(19) United States
(12) Patent Application Publication
(10) Pub. No.: US 2024/0141434 A1
(43) Pub. Date: May 2, 2024

(54) METHODS FOR DETECTING AND PREDICTING BREAST CANCER

(71) Applicant: UCL BUSINESS LTD, London (GB)

(72) Inventors: Martin Widschwendter, London (GB); James Barrett, London (GB)

(21) Appl. No.: 18/009,936

(22) PCT Filed: Jun. 17, 2021
(86) PCT No.: PCT/GB2021/051540

§ 371 Date: Dec. 12, 2022

(30) Foreign Application Priority Data
Jun. 17, 2020 (GB) 2009220.1

(51) Int. Cl. C12Q 1/6886

(52) U.S. Cl. CPC C12Q 1/6886; C12Q 2600/118; C12Q 2600/154; G01N 2800/50

(57) ABSTRACT

The present invention relates to assays for predicting the presence, absence or development of cancer in an individual, particularly breast and ovarian cancer, by determining the methylation status of certain CpGs in a population of DNA molecules in a sample which has been taken from the individual, deriving an index value based on the methylation status of the certain CpGs, and predicting the presence, absence or development of cancer in the individual based on the cancer index value. The invention further relates to a method of treating and/or prevention of cancer in an individual, particularly breast and ovarian cancer, the method comprising assessing the presence, absence or development of cancer in an individual by performing the assays of the invention, followed by administering one or more therapeutic treatments or measures to the individual based on the assessment. The invention further provides a method of monitoring the cancer status of an individual according to changes in the individuals breast cancer index value over the course of time. The invention further relates to arrays which are suitable for performing the assays of the invention.

### SEQUENCE LISTING

[0001] The instant application contains a Sequence Listing which has been submitted electronically in ASCII format and is hereby incorporated by reference in its entirety. Said ASCII copy, created on Jun. 9, 2021, is named ‘Sequence listing as filed 17 Jun. 2021 N418732WO MGW JAS.txt’ and is 15,290,046 bytes in size.

### FIELD OF THE INVENTION

[0002] The present invention relates to assays for predicting the presence, absence or development of cancer in an individual, particularly breast and ovarian cancer, by determining the methylation status of certain CpGs in a population of DNA molecules in a sample which has been taken from the individual, deriving an index value based on the methylation status of the certain CpGs, and predicting the presence, absence or development of cancer in the individual based on the cancer index value. The invention further relates to a method of treating and/or preventing cancer in an individual, particularly breast and ovarian cancer, the method comprising assessing the presence, absence or development of cancer in an individual by performing the assays of the invention, followed by administering one or more therapeutic or preventative treatments or measures to the individual based on the assessment. The invention further provides a method of monitoring the cancer status of an individual according to changes in the individual's cancer index value over the course of time. The invention further relates to arrays which are suitable for performing the assays of the invention.

[0003] The project leading to this application has been funded by the European Commission's Horizon 2020 Research and Innovation Action, H2020 FORECEE under Grant Agreement No. 634570, the European Commission's Horizon 2020 European Research Council Executive Agency, H2020 BRCA-ERC under Grant Agreement No. 742432 as well as the charity, The Eve Appeal.

### BACKGROUND TO THE INVENTION

[0004] Breast cancer is by far the most common cancer in females in general, and a leading cause of death in young women. To date, the identification of individuals with primary cancer is achieved by assessing evidence directly from the tumour (e.g. imaging or detection of cancer cell products released into the system). Currently available early detection strategies, such as mammography screening, suffer from low performance in young women, over-diagnosis, and decreasing attendance rates, and its benefit on mortality rates has recently been questioned. Developing models which allow for a stratified breast cancer early detection and prevention strategy have proven to be challenging, and the best predictive models combining three different sources of information—epidemiological risk factors, single nucleotide polymorphisms (SNPs) and mammographic density—have only led to a Receiver Operator Characteristic (ROC) Area Under the Curve (AUC) of 0.68.

[0005] In contrast, cervical cancer screening (i.e. assessing cervical smear samples) has reduced the incidence and mortality from cervical cancer by more than 50%. The fact that clinician- and self-collected samples show similar performance in detecting relevant cervical lesions is likely to further increase attendance rates.

[0006] Epigenetic (i.e. DNAme) changes have been identified in normal breast tissue adjacent to breast cancers and could potentially serve as a surrogate for both genetic and non-genetic factors including lifestyle, reproductive and environmental exposures contributing to breast cancer development. A number of proof of principle studies, so far exclusively performed in blood, have demonstrated that certain DNAme changes are associated with breast cancer predisposition. Sample heterogeneity and the choice of surrogate tissue are deemed to be among the most important factors impeding clinical implementation.

[0007] Thus, the inventors aimed to assess whether DNAme profiles derived from cervical smear samples (i.e. containing hormone sensitive epithelial cells which are capable of recording breast cancer-predisposing factors at the level of the epigenome and can be self-collected) are able to identify women with primary breast cancer.

### SUMMARY OF THE INVENTION

[0008] The current inventors set out to understand whether DNAme (DNA methylation) profiles may be used to detect the presence or absence of cancer, particularly breast and ovarian cancer. The inventors also set out to understand whether said DNAme profiles may be associated with the development of cancer, and therefore whether such profiles may be capable of functioning as surrogate markers for individual stratification purposes in connection with cancer.

[0009] In this regard the inventors have succeeded in developing assays involving “cancer index values” which are derived from and associated with DNAme profiles established from samples from tissue comprising epithelial cells from a given individual. The sample may particularly be derived from the cervix, the vagina, the buccal area, blood and/or urine. The sample is preferably a cervical liquid-based cytology sample, and more preferably a cervical smear sample. Subsequent DNAme profiles from a given individual, and which values can be used to stratify the individual in connection with cancer. A preferred sample for use in any of the assays described and defined herein is a cervical liquid-based cytology sample. A particularly preferred sample for use in any of the assays described and defined herein is a cervical smear sample.

[0010] Accordingly, in contrast to prior art assays, the inventors have surprisingly determined that it is possible to derive “cancer index values” derived from and associated with DNAme profiles established from samples, wherein the samples are free of tumor-derived DNA. Thus the tissue(s) from which DNAme profiles of the present assays are established may act to provide surrogate markers for the presence, absence or development of cancer, wherein tumor cells, if present, or cells at risk of transforming into tumor cells, are located at an anatomical site distinct from the site from which the sample was taken.

[0011] The cancer index value is determined from data relating to the methylation status of one or more CpGs in a panel of CpGs as further defined and described herein. CpGs of the panel are methylation sites in DNA from cells derived from/obtained from a sample comprising epithelial cells. The sample may particularly be derived from the cervix, the vagina, the buccal area, blood and/or urine. The sample is preferably a cervical liquid-based cytology sample, and more preferably a cervical smear sample. Subsequent DNAme profiles from a given individual, and which values can be used to stratify the individual in connection with cancer. A preferred sample for use in any of the assays described and defined herein is a cervical liquid-based cytology sample. A particularly preferred sample for use in any of the assays described and defined herein is a cervical smear sample.

[0012] For the purposes of the present invention, the cancer index value may be used interchangeably herein with “WID-BC-Index”, “WID-Index”, “cancer index”, “index” or “index value” (WID=women's risk identification). Furthermore, any reference to a cancer index value in the context of the present invention, may be equally used for the assessment of the presence, absence or development of breast cancer and/or ovarian cancer in an individual.

[0013] Based on studies with patients known to be free of breast cancer, the inventors have established cancer index values, using specific panels of CpGs, which have been determined to be associated with/characteristic of breast tissue which is negative for breast cancer, i.e. normal breast tissue which is free of breast cancer. Based on studies with patients known to possess breast cancer, the inventors have established cancer index values which have been determined to be associated with/characteristic of breast tissue which is positive for breast cancer.

[0014] The inventors have further established that the same specific panels of CpGs that associate with breast tissue which is negative or positive for breast cancer may likewise be associated with ovarian tissue that is negative or positive for ovarian cancer. Based on studies with patients known to be free of ovarian cancer, the inventors have established cancer index values, using specific panels of CpGs, which have been determined to be associated with/characteristic of ovarian tissue which is negative for ovarian cancer, i.e. normal ovarian tissue which is free of ovarian cancer. Based on studies with patients known to possess ovarian cancer, the inventors have established cancer index values which have been determined to be associated with/characteristic of ovarian tissue which is positive for ovarian cancer.

[0015] Thus, the inventors have been able to establish cancer index values, using specific panels of CpGs, which can characterize an individual as having cancer or not having cancer, or having a high risk of cancer development.

[0016] By determining the methylation profile-based cancer index value from a sample derived from the individual, the individual may be seen to possess a cancer index value which correlates with those possessed by individuals which are known, via the inventor's studies described herein, to be cancer positive or negative. Such correlations have been determined with a high degree of statistical accuracy, particularly with respect to parameters relevant to biological assays such as receiver operating characteristics (ROC) sensitivity and specificity, as well as area under the curve (AUC). Accordingly, by determining the cancer index value from a sample from a given individual, the individual may be determined to possess breast and/or ovarian tissue which is positive for cancer, i.e. the individual is diagnosed as having breast and/or ovarian cancer. Conversely, by determining the cancer index value from a sample from a given individual, the individual may be determined to possess breast and/or ovarian tissue which is negative for cancer, i.e. the individual is diagnosed as not having breast and/or ovarian cancer.

[0017] By determining the methylation profile-based cancer index value from samples derived from women known to possess a BRCA1 and/or BRCA2 germline mutation, but are otherwise cancer negative, these women have an increased cancer index value relative to healthy women that do not possess a BRCA1 and/or BRCA2 germline mutation. Women with a BRCA1 and/or BRCA2 germline mutation are known to be at high risk of developing breast and/or ovarian cancer. Accordingly, an increased cancer index value in women that are, at the time of testing, cancer negative can indicate a high risk of said women developing cancer, particularly breast and/or ovarian cancer, most preferably breast cancer. Preventative therapies and intensified screening as described herein may be particularly suitable for these women that have a high risk of developing cancer, particularly breast and/or ovarian cancer, most preferably breast cancer.

[0018] The inventors have determined that the cancer index value is typically increased in individuals with BRCA1 and/or BRCA2 germline mutations. The inventors have also determined that the cancer index value increases in normal breast tissue surrounding a cancer lesion, increases further in the cancer lesion itself, and is particularly increased in a triple negative breast cancer lesion. This indicates that the breast cancer index value, determined in accordance with the present invention, is capable of identifying individuals that may be at risk of developing cancer, and are thereby pre-disposed to breast cancer. These observations from the current inventors further establish that the cancer index value, as further described and defined herein, is dynamic and can change according to genetic and environmental conditions including the grade and severity of the cancer. The cancer index value may therefore be used to monitor an individual's cancer status and risk of cancer development. Moreover, the cancer index value may be used to monitor the efficacy of cancer treatments being administered to an individual, including therapeutic treatments and preventative treatments.

[0019] Accordingly, in the context of the present invention, by determining the cancer index value from a sample from a given individual it is possible to assess the presence, absence or development of cancer in an individual, or in other words to stratify the individual for cancer. In the context of the present invention, stratification for cancer is the process of categorizing the individual as being a member of a group of individuals who possess a phenotype in connection with cancer, including the presence or absence of cancer in the individual, or the development of cancer, i.e. by having epithelial cells, particularly derived from an anatomical site other than the breast or ovary, such as the cervix, the vagina, the buccal area, blood and/or urine which is more characteristic of breast or ovarian tissue which is cancer positive than breast or ovarian tissue which is cancer negative. A preferred sample for use in any of the assays described and defined herein is a cervical liquid-based cytology sample. A particularly preferred sample for use in any of the assays described and defined herein is a cervical smear sample.

[0020] As explained herein, the assays methods of the invention are based on a cancer index value derived from a methylation profile from DNA originating from epithelial cells, particularly derived from an anatomical site other than the breast or ovary, such as the cervix, the vagina, the buccal area, blood and/or urine, preferably a cervical liquid-based cytology sample, more preferably a cervical smear sample. Accordingly, the assays provide means for correlating a cervical tissue, vaginal tissue, buccal tissue or cervicovaginal tissue-derived DNA methylation profile with a status connected with breast or ovarian cancer ranging from the individual being cancer negative, to the individual being cancer positive, with high statistical accuracy. Because the assays of the invention provide a correlation between the methylation profile and the disease status, the skilled person will appreciate that as part of the stratification process and outcome, disease status is assigned on the basis of a likelihood. As such, the methods of the invention provide assays which are predictive of an individual's status with respect to cancer. The assays of the invention accordingly provide means for predicting the presence or absence of cancer in an individual. The assays of the invention accordingly also provide means for predicting the development of cancer in an individual. The assays of the invention can provide means for predicting the development of cancer in an individual since the inventors have demonstrated that specific cancer index values can define breast and ovarian tissue which is cancer negative, whilst others can define breast and ovarian tissue which is cancer positive, and since the specific cancer index values may be dynamic and thereby increased in association with tumour grade and further increased cancer risk factors such as germline BRCA1 and/or BRCA2 mutation, the values may be subject to change along a scale of cancer risk.

[0021] Whilst disease status may be assigned on the basis of a likelihood, the inventors have demonstrated herein that correlations between DNA methylation profile and cancer status using cancer index values can be achieved with a very high degree of statistical accuracy using parameters relevant to biological assays, as described further herein. As such, the assays of the invention provide means for predicting the presence or absence of cancer in an individual and for predicting the development of cancer in an individual, and for stratifying an individual for cancer, and wherein the prediction/stratification can be defined to be statistically highly reliable and robust. This in turn means that the prediction/stratification can be made with a high level of confidence. The assays of the invention can be defined to be statistically accurate by means known in the art, as further described and defined herein. The assays of the invention can be defined according to parameters relating to their statistical specificity and sensitivity. These parameters define the likelihood of false positive and false negative test results. The lower the proportion of false positive and false negative test results the more statistically accurate the assay becomes. In this regard the inventors have established CpG panels, as described and defined further herein, wherein the methylation status of CpGs in the panel can be used to establish cancer index values such that the assays produce statistically accurate predictions of cancer status. Accordingly, the inventors have determined that the assays described herein may be defined according to statistical parameters such as percentage specificity and sensitivity and also by receiver operating characteristics (ROC) area under the curve (AUC). All such means are known in the art and are known to be defined measures of statistical accuracy for biological assays such as those described and defined herein.

[0022] Thus the methods of the invention provide assays which can be used, with a high degree of statistical accuracy, to predict the presence, absence or development of cancer. The methods of the invention provide assays which can be used, with a high degree of statistical accuracy, to stratify an individual with respect to cancer status. Accordingly, the methods of the invention provide useful information to individuals and their physicians concerning patient cancer status. This information may help inform actual therapeutic treatment measures if the presence of cancer is identified in the individual. The information may help to monitor the progress of therapeutic treatment measures in the individual by monitoring changes in the cancer index value over the course of a period of time. The information may help to monitor the progress of prophylactic or preventative treatment measures in the individual by monitoring changes in the cancer index value over the course of a period of time. As such the methods of the invention offer significant advantages in the personalised prevention and early detection as well as treatment and management of cancer in individuals.

[0023] Accordingly, the invention provides an assay for assessing the presence, absence or development of cancer in an individual, the assay comprising:
[0024] a. providing a sample which has been taken from the individual, the sample comprising a population of DNA molecules;
[0025] b. determining in the population of DNA molecules in the sample the methylation status of a panel of one or more CpGs selected from a panel of CpGs identified at nucleotide positions 61 to 62 in SEQ ID NOs 1 to 29,000;
[0026] c. deriving a cancer index value based on the methylation status of the one or more CpGs in the panel; and
[0027] d. assessing the presence, absence or development of cancer in the individual based on the cancer index value;
[0028] wherein the assay is characterised as having an area under the curve (AUC) of 0.60 or more as determined by receiver operating characteristics (ROC).

[0029] The assay of the invention may be performed above and additionally wherein the panel of one or more CpGs comprises at least 500 CpGs selected from the CpGs identified at nucleotide positions 61 to 62 in SEQ ID NOs 1 to 29,000, preferably wherein the assay is characterised as having an AUC of at least 0.60.

[0030] The assay of the invention may be performed above and additionally wherein the panel of one or more CpGs comprises at least the CpGs identified in SEQ ID NOs 1 to 500 and identified at nucleotide positions 61 to 62, preferably wherein the assay is characterised as having an AUC of at least 0.78.

[0031] The assay of the invention may be performed above and additionally wherein the panel of one or more CpGs comprises at least 1000 CpGs selected from the CpGs identified at nucleotide positions 61 to 62 in SEQ ID NOs 1 to 29,000, preferably wherein the assay is characterised as having an AUC of at least 0.61.

[0032] The assay of the invention may be performed above and additionally wherein the panel of one or more CpGs comprises at least the CpGs identified in SEQ ID NOs 1 to 1000 and identified at nucleotide positions 61 to 62, preferably wherein the assay is characterised as having an AUC of at least 0.81.

[0033] The assay of the invention may be performed above and additionally wherein the panel of one or more CpGs comprises at least 2000 CpGs selected from the CpGs identified at nucleotide positions 61 to 62 in SEQ ID NOs 1 to 29,000, preferably wherein the assay is characterised as having an AUC of at least 0.61.

[0034] The assay of the invention may be performed above and additionally wherein the panel of one or more CpGs comprises at least the CpGs identified in SEQ ID NOs 1 to 2000 and identified at nucleotide positions 61 to 62, preferably wherein the assay is characterised as having an AUC of at least 0.82.

[0035] The assay of the invention may be performed above and additionally wherein the panel of one or more CpGs comprises at least 10,000 CpGs selected from the CpGs identified at nucleotide positions 61 to 62 in SEQ ID NOs 1 to 29,000, preferably wherein the assay is characterised as having an AUC of at least 0.62.

[0036] The assay of the invention may be performed above and additionally wherein the panel of one or more CpGs comprises at least the CpGs identified in SEQ ID NOs 1 to 10,000 and identified at nucleotide positions 61 to 62, preferably wherein the assay is characterised as having an AUC of at least 0.84.

[0037] The assay of the invention may be performed above and additionally wherein the panel of one or more CpGs comprises at least the 29,000 CpGs identified at nucleotide positions 61 to 62 in SEQ ID NOs 1 to 29,000, and further wherein the assay is characterised as having an AUC of at least 0.84.

[0038] The assay of the invention may be performed above and additionally wherein the step of determining in the population of DNA molecules in the sample the methylation status of the one or more CpGs in the panel further comprises determining a β value of each CpG.

[0039] The assay of the invention may be performed above and additionally wherein the step of deriving the cancer index value based on the methylation status of the one or more CpGs in the panel comprises:
[0040] a. providing a methylation β-value data set comprising the methylation β-values for each CpG in the panel; and
[0041] b. providing a mathematical model capable of generating the cancer index from the methylation β-value data set; and
[0042] c. applying the mathematical model to the methylation β-value data set, thereby generating the cancer index.

[0043] The assay of the invention may be performed above and additionally wherein the cancer index value is a breast cancer index value (WID-BC-Index), and wherein the mathematical model which is applied to the methylation β-value data set to generate the cancer index is an algorithm according to the following formula:

$$WID - BC - index = {\sum }_{i = 1}^{n} \frac{μ - {w}_{i} {β}_{i}}{σ}$$

[0044] wherein:
   [0045] a. β₁, . . . , βₙ are methylation beta-values (between 0 and 1);
   [0046] b. w₁, . . . , w_{29,000} are real valued coefficients;
   [0047] c. μ and σ are real valued parameters used to scale the index; and
   [0048] d. n refers to the number of CpGs in the panel of one or more CpGs;

[0049] preferably wherein the cancer is breast cancer.

[0050] The assay of the invention may be performed above and additionally wherein when the cancer index value for the individual is about −0.278 or more, the individual is assessed as having cancer or as having high risk of cancer development, or wherein when the cancer index value for the individual is less than about −0.278, the individual is assessed as not having cancer or as having a low risk of cancer development, preferably wherein:
[0051] a. the panel of one or more CpGs comprises at least 500 of the CpGs identified at nucleotide positions 61 to 62 in SEQ ID NOs 1 to 29,000, and wherein the sensitivity is at least 63% and the specificity is at least 21%;
[0052] b. the panel of one or more CpGs comprises at least the CpGs defined by SEQ ID NOs 1 to 500 and identified at nucleotide positions 61 to 62, and wherein the sensitivity is at least 87% and specificity is at least 50%;
[0053] c. the panel of one or more CpGs comprises at least the CpGs defined by SEQ ID NOs 1 to 1000 and identified at nucleotide positions 61 to 62, and wherein the sensitivity is at least 89% and specificity is at least 49%; or
[0054] d. the panel of one or more CpGs comprises at least the CpGs defined by SEQ ID NOs 1 to 2000 and identified at nucleotide positions 61 to 62, and wherein the sensitivity is at least 89% and specificity is at least 48%;
[0055] preferably wherein the assay comprises determining methylation β-values for each CpG in the panel of one or more CpGs, more preferably wherein the cancer is breast cancer.

[0056] The assay of the invention may be performed above and additionally wherein when the cancer index value for the individual is about 0.126 or more, the individual is assessed as having cancer or as having a high risk of cancer development, or wherein when the cancer index value for the individual is less than about 0.126, the individual is assessed as not having cancer or as having a low risk of cancer development, preferably wherein:
[0057] a. the panel of one or more CpGs comprises at least 500 of the CpGs identified at nucleotide positions 61 to 62 in SEQ ID NOs 1 to 29,000, and wherein the sensitivity is at least 48% and the specificity is at least 39%;
[0058] b. the panel of one or more CpGs comprises at least the CpGs defined by SEQ ID NOs 1 to 500 and identified at nucleotide positions 61 to 62, and wherein the sensitivity is at least 70% and specificity is at least 72%;
[0059] c. the pane of one or more CpGs comprises at least the CpGs defined by SEQ ID NOs 1 to 1000 and identified at nucleotide positions 61 to 62, and wherein the sensitivity is at least 70% and specificity is at least 78%; or
[0060] d. the panel of one or more CpGs comprises at least the CpGs defined by SEQ ID NOs 1 to 2000 and identified at nucleotide positions 61 to 62, and wherein the sensitivity is at least 74% and specificity is at least 78%;
[0061] preferably wherein the assay comprises determining methylation β-values for each CpG in the panel of one or more CpGs, more preferably wherein the cancer is breast cancer.

[0062] The assay of the invention may be performed above and additionally wherein when the cancer index value for the individual is about 0.743 or more, the individual is assessed as having cancer or as having a high risk of cancer development, or wherein when the cancer index value for the individual is less than about 0.743, the individual is assessed as not having cancer or as having a low risk of cancer development, preferably wherein:
[0063] a. the panel of one or more CpGs comprises at least 500 of the CpGs identified at nucleotide positions 61 to 62 in SEQ ID NOs 1 to 29,000, and wherein the sensitivity is at least 17% and the specificity is at least 77%;
[0064] b. the panel of one or more CpGs comprises at least the CpGs defined by SEQ ID NOs 1 to 500 and identified at nucleotide positions 61 to 62, and wherein the sensitivity is at least 30% and specificity is at least 95%;
[0065] c. the panel of one or more CpGs comprises at least the CpGs defined by SEQ ID NOs 1 to 1000 and identified at nucleotide positions 61 to 62, and wherein the sensitivity is at least 31% and specificity is at least 96%; or
[0066] d. the panel of one or more CpGs comprises at least the CpGs defined by SEQ ID NOs 1 to 2000 and identified at nucleotide positions 61 to 62, and wherein the sensitivity is at least 29% and specificity is at least 96%; preferably wherein the assay comprises determining methylation β-values for each CpG in the panel of one or more CpGs, more preferably wherein the cancer is breast cancer.

[0067] The assay of the invention may be performed above and additionally wherein when the cancer index value for the individual is:
[0068] a. less than about −0.580 the individual is assessed as not having cancer;
[0069] b. about −0.580 or more and less than about −0.280 the individual is assessed as having a low risk of cancer;
[0070] c. about −0.280 or more and less than about 0.070 the individual is assessed as having a moderate risk of cancer;
[0071] d. about 0.070 or more the individual is assessed as having a high risk of cancer;
   preferably wherein the assay comprises determining methylation β-values for each CpG in the panel of one or more CpGs, more preferably wherein the cancer is breast cancer.

[0072] The assay of the invention may be performed above and additionally wherein the step of determining in the population of DNA molecules in the sample the methylation status of each CpG in the panel of one or more CpGs comprises:
[0073] a. performing a sequencing step to determine the sequence of each CpG;
[0074] b. hybridising DNA to an array comprising probes capable of discriminating between methylated and non-methylated forms of the CpGs and applying a detection system to the array so as to determine the methylation status of each CpG; and/or
[0075] c. performing a PCR step using methylation-specific primers, wherein the methylation status of the CpG is determined by the presence or absence of a PCR product.

[0076] The assay of the invention may be performed above and additionally wherein the step of determining the methylation status of each CpG in the panel of one or more CpGs comprises:
[0077] a. bisulphite converting the DNA; or
[0078] b. performing the steps of oxidising 5-methylcytosine bases (5mC) to 5-carboxylcytosine bases (5caC), preferably by ten-eleven translocation (TET), and/or oxidising 5-hydroxymethylcytosine bases (5hmC) to 5-carboxylcytosine bases (5caC), preferably by ten-eleven translocation (TET); followed by reducing 5-carboxylcytosine bases (5caC) to dihydrouracil bases (DHU), optionally with pyridine borane.

[0079] The assay of the invention may be performed above and additionally wherein the assay further comprises:
[0080] a. determining in the sample from the individual the proportion of epithelial cells;
[0081] b. determining in the sample from the individual the proportion of fat cells; and/or
[0082] c. determining in the sample from the individual differentiation characteristics of non-fat cells.

[0083] The assay of the invention may be performed above and additionally wherein determining the proportion of epithelial and/or fat cells and/or determining differentiation characteristics of non-fat cells comprises performing a method comprising:
[0084] a. gene expression profiling;
[0085] b. non-coding RNA-profiling;
[0086] c. epigenome profiling;
[0087] d. DNA methylation profiling;
[0088] e. deriving a WID-BC-Index; and/or
[0089] f. immunohistochemistry; and

[0090] arriving at a determination based on the results of the method.

[0091] The invention also provides a method of treating or preventing cancer in an individual, the method comprising:
[0092] a. assessing the cancer status of the individual by assessing the presence, absence or development of cancer in the individual by performing the assay of any one of the assays of the invention;
[0093] b. administering one or more therapeutic or preventative treatments to the individual based on the assessment.

[0094] The method of the invention may be performed above and additionally wherein the individual is assessed as not having cancer or as having a low risk of cancer development, and wherein when the cancer index value is about −0.580 or more and less than about −0.280, and preferably wherein the assay comprises determining methylation β-values for each CpG in the panel of one or more CpGs, the individual is subjected to one or more treatments according to their cancer index value, wherein the one or more treatments comprise intensified screening, preferably wherein the intensified screening comprises any of:
[0095] a. a test for a BRCA1 and/or BRCA2 germline mutation;
[0096] b. a repeat assay according to any one of the assays of the invention, preferably wherein the repeat assay is about two years after the previous assay.

[0097] The method of the invention may be performed above and additionally wherein when the test for a BRCA1 and/or BRCA2 germline mutation is positive, the intensified screening further comprises a mammogram.

[0098] The method of the invention may be performed above and additionally wherein when the test for a BRCA1 and/or BRCA2 germline mutation is negative, the individual is subjected to routine mammography screening, preferably wherein the routine screening comprises a mammogram about three years following the test for a BRCA1 and/or BRCA2 germline mutation.

[0099] The method of the invention may be performed above and additionally wherein the individual is assessed as having a moderate risk of having cancer or as having a moderate risk of cancer development, and wherein when the cancer index value is about −0.280 or more and less than about 0.070, and preferably wherein the assay comprises determining methylation β-values for each CpG in the panel of one or more CpGs, the individual is subjected to one or more treatments according to their cancer index value, wherein the one or more treatments comprise any of:
[0100] a. intensified screening, preferably wherein the intensified screening comprises one or more of:
   [0101] i. a test for a BRCA1 and/or BRCA2 germline mutation;
   [0102] ii. a breast MRI scan, preferably wherein the scan is repeated about two years after the previous scan;
   [0103] iii. a repeat assay according to any one of the assays of the invention, preferably wherein the repeat assay is performed about one year after the previous assay;
[0104] b. administration of one or more of Denosumab, “selective estrogen receptor modulators” (SERMs), and “selective progesterone receptor modulators” (SPRMs).

[0105] The method of the invention may be performed above and additionally wherein the individual is assessed as having cancer or as having a high risk of cancer development, and wherein when the cancer index value is about 0.070 or more, and preferably wherein the assay comprises determining methylation β-values for each CpG in the panel of one or more CpGs, and the individual is subjected to one or more treatments according to their cancer index value, wherein the one or more treatments comprise any of:
[0106] a. intensified screening, preferably wherein the intensified screening comprises one or more of:
   [0107] i. a test for a BRCA1 and/or BRCA2 germline mutation;
   [0108] ii. a breast MRI scan, preferably wherein the scan is repeated about a year after the previous scan;
   [0109] iii. a mammogram, preferably wherein the mammogram is repeated about a year after the previous mammogram;
   [0110] iv. a test for CA125, preferably wherein the test is repeated three-monthly;
   [0111] v. a test for cell-free tumour DNA methylation in plasma/serum, preferably wherein the test is repeated annually;
   [0112] vi. a test for cell-free tumour DNA methylation in vaginal fluid, preferably wherein the test is repeated annually;
   [0113] vii. a repeat assay according to any one of the assays of the invention, preferably wherein the repeat assay is performed about one year after the previous assay;
[0114] b. administration of one or more of Denosumab, “selective estrogen receptor modulators” (SERMs), and “selective progesterone receptor modulators” (SPRMs);
[0115] c. a bilateral mastectomy; and/or
[0116] d. a bilateral salpingo-oophorectomy.

[0117] The method of the invention may be performed above and additionally wherein the one or more treatments that the individual is subjected to are repeated on a monthly, three monthly, six monthly, yearly or two yearly basis following an initial administration.

[0118] The method of the invention may be performed above and additionally wherein:
[0119] a. the SERMs comprise Anordin, Bazedoxifene, Broparestrol, Broparestrol, Clomifene, Cyclofenil, Lasofoxifene, Ormeloxifene, Ospemifene, Raloxifene, Tamoxifen, preferably wherein the SERMs comprise Tamoxifen, Bazedoxifene and Raloxifene; and/or
[0120] b. the SPRMs comprise Mifepristone, Ulipristal, Asoprisnil, Proellex, Onapristone, Asoprisnil and Lonaprisan.

[0121] The invention also provides a method of monitoring the cancer status of an individual according to the individual's cancer index value, the method comprising: (a) assessing the presence, absence or development of cancer in an individual by performing the assay according to any one of the assays of the invention at a first time point; (b) assessing the presence, absence or development of cancer in the individual by performing the assay according to any one of the assays of the invention at one or more further time points; and (c) monitoring any change in the cancer status of the individual between time points.

[0122] The method of the invention may be performed above and additionally wherein the further time points are monthly, three monthly, six monthly, yearly or two yearly basis following an initial assessment.

[0123] The method of the invention may be performed above and additionally wherein depending on the cancer status of the individual, one or more treatments are administered to the individual according to any one of the methods of the invention, or wherein when the cancer the cancer index value of the individual is less than about −0.580 no treatment is administered to the individual.

[0124] The method of the invention may be performed above and additionally wherein an increase in the cancer index value indicates a negative response to the one or more treatments.

[0125] The method of the invention may be performed above and additionally wherein changes are made to the one or more treatments if a negative response is identified.

[0126] The method of the invention may be performed above and additionally wherein a decrease in the cancer index value indicates a positive response to the one or more treatments.

[0127] The method of the invention may be performed above and additionally wherein changes are made to the one or more treatments if a positive response is identified.

[0128] The method of the invention may be performed above and additionally wherein the method further comprises:
[0129] a. determining the proportion of epithelial cells in the sample from the individual between any two or more time points and assessing if the proportion changes between time points;
[0130] b. determining the proportion of fat cells in the sample from the individual between any two or more time points and assessing if the proportion changes between time points; and/or
[0131] c. determining differentiation characteristics of non-fat cells in the sample from the individual between any two or more time points and assessing if the proportion changes between time points.

[0132] The method of the invention may be performed above and additionally wherein:
[0133] a. an increase in the cancer index value and an increase in the proportion of epithelial cells; and/or
[0134] b. an increase in the cancer index value and a decrease in the proportion of fat cells; and/or
[0135] c. an increase in the cancer index value and an increase in differentiation of non-fat cells towards fat cells, indicates a negative response to the one or more treatments.

[0136] The method of the invention may be performed above and additionally wherein changes are made to the one or more treatments if a negative response is identified.

[0137] The method of the invention may be performed above and additionally wherein:
[0138] a. a decrease in the cancer index value and a decrease in the proportion of epithelial cells;
[0139] b. a decrease in the cancer index value and an increase in the proportion of fat cells; and/or
[0140] c. a decrease in the cancer index value and a decrease in differentiation of non-fat cells towards fat cells, indicates a positive response to the one or more treatments.

[0141] The method of the invention may be performed above and additionally wherein changes are made to the one or more treatments if a positive response is identified.

[0142] The assay of the invention may be performed above and additionally wherein the sample is obtained from a tissue comprising epithelial cells, preferably wherein the sample is not obtained from breast or ovarian tissue.

[0143] The assay of the invention may be performed above and additionally wherein the sample is obtained from:
[0144] a. cervical tissue;
[0145] b. vaginal tissue;
[0146] c. cervicovaginal tissue;
[0147] d. buccal tissue; and/or
[0148] e. breast tissue;
   preferably wherein the sample is obtained from cervical tissue, most preferably wherein the sample is obtained from tissue from a cervical smear.

[0149] The assay of the invention may be performed above and additionally wherein the assay is for assessing the presence, absence or development of:
[0150] a. breast cancer, particularly wherein the breast cancer is ductal carcinoma in situ; an invasive ductal carcinoma such as tubular type invasive ductal carcinoma (IDC), medullary type IDC, mucinous type IDC, papillary type IDC cribriform type IDC; invasive lobular carcinoma, inflammatory breast cancer, lobular carcinoma in situ, male breast cancer, luminal A breast cancer, luminal B breast cancer, triple-negative/basal-like breast cancer, HER2-enriched breast cancer, normal-like breast cancer, Paget's Disease of the nipple, Phyllodes tumours of the breast, or metastatic breast cancer;
[0151] b. ovarian cancer, particularly wherein the ovarian cancer is serious carcinoma, mucinous carcinoma, endometrioid carcinoma, clear cell carcinoma, low malignant potential (LMP) tumor, borderline epithelial ovarian cancer, teratoma, dysgerminoma, endodermal sinus tumor, Choriocarcinoma, granulosa-theca tumor, Sertoli-Leydig tumor, granulosa cell tumor, small cell carcinoma of the ovary or primary peritoneal carcinoma.

[0152] The invention also provides an array capable of discriminating between methylated and non-methylated forms of CpGs; the array comprising oligonucleotide probes specific for a methylated form of each CpG in a CpG panel and oligonucleotide probes specific for a non-methylated form of each CpG in the panel; wherein the panel consists of at least 500 CpGs selected from the CpGs identified at nucleotide position 61 to 62 in SEQ ID NOs 1 to 29,000.

[0153] The array of the invention may be performed above and additionally provided that the array is not an Infinium MethylationEPIC BeadChip array or an Infinium HumanMethylation450, and/or provided that the number of CpG-specific oligonucleotide probes of the array is 482,000 or less, 480,000 or less, 450,000 or less, 440,000 or less, 430,000 or less, 420,000 or less, 410,000 or less, or 400,000 or less.

[0154] The array of the invention may be performed above and additionally wherein the panel comprises any set of CpGs defined in the assays of any one of the assays of the invention.

[0155] The array of the invention may be performed above and additionally further comprising one or more oligonucleotides comprising any set of CpGs defined in the assays of the invention, wherein the one or more oligonucleotides are hybridized to corresponding oligonucleotide probes of the array.

[0156] The invention also provides a hybridized array, wherein the array is obtainable by hybridizing to an array according to any one of the arrays of the invention a group of oligonucleotides comprising any set of CpGs defined in the assays of the invention. The invention also provides a process for making the hybridized array according to the invention, comprising contacting an array according to the arrays of the invention with a group of oligonucleotides comprising any set of CpGs defined in the assays of any one of the assays of the invention.

### BRIEF DESCRIPTION OF THE FIGURES

[0157] FIG. 1 shows training of the WID-BC-index classifiers and predictive performance of the WID-BC index, wherein optionally the WID-BC-index controls for immune cell proportion.

[0158] (A) Distribution of different cell types in the discovery dataset inferred using the HEpiDISH algorithm (* p<0.05, ** p<0.01, *** p<0.001). (B) Example of a CpG with cell-type specific methylation. (C) Area under the receiver operating characteristic curve (AUROC) in the internal validation set as a function of the number of CpGs used to train the classifier. (D) ROC curves of the WID-BC-index in the internal validation set for samples with an immune cell (IC) proportion ≤0.5 and >0.5. (E) Distribution of the WID-BC-index with respect to immune cell proportion in the internal validation set. (F) Distribution of the estimated variance in epithelial and immune cells across all CpGs used in the WID-BC-index. (G) The proportion of variance, weighted by the absolute coefficient values from the WID-BC-index, corresponding to each component of the index. (H) Performance of the WID-BC-index in the internal validation set after omitting each subcomponent. (I) Odds ratios corresponding to the genomic annotation of the 29,000 CpGs comprising the WID-BC-index (when compared to the 776,725 CpGs in the dataset; * p<0.05, ** p<0.01, *** p<0.001). (J) AUC values in the internal validation set after training classifiers on different subsets of the CpGs used in the WID-BC-index. The top n CpGs were either retained or removed. CpGs were also split into separate bins of size 500.

[0159] FIG. 2 shows external validation of the WID-BC-index, performance of the WID-BC-index in discriminating cancer-free women and women with endometrial cancer, and association between the WID-BC-index and germline BRCA1 mutation.

[0160] (A) WID-BC-index versus immune cell proportion in the external validation set. (B) ROC curve in the external validation set. (C-E) Performance of the WID-BC-index discriminating BRCA1 carriers from healthy controls in cervical, buccal and blood samples respectively.

[0161] FIG. 3 shows WID-BC-index performance when using buccal samples and association of WID-BC-index with ovarian cancer.

[0162] (A) WID-BC-index versus immune cell proportion in matched buccal samples from the breast cancer internal validation set. (B) ROC curve corresponding to the matched buccal samples. (C) WID-BC-index versus immune cell proportion in ovarian cancer cases and healthy controls. (D) ROC curve corresponding to the ovarian cancer samples.

[0163] FIG. 4 shows WID-BC-index data and its association with clinically relevant factors.

[0164] (A) The WID-BC-index versus age in samples from the internal and external validation datasets. (B) Correlation with a polygenic risk score (PRS) based on 303 SNPs in the internal validation dataset. (C) ROC curve corresponding to the PRS evaluated in a subset of samples from the discovery set. (D) Correlation with body mass index (BMI) in controls. (E) Family history. (F) Age at menarche. (G) Age at first live birth. (H) Menopause. (I) Hormone replacement therapy, (J) Stage, (K) Nodal status, (L) Grade. Panels (D) to (I) are based on controls from the internal and external validation datasets. Panels (J) to (L) are based on cases from the internal and external validation datasets.

[0165] FIG. 5 shows WID-BC-index data and its association with tumour cell fraction, known cancer markers, indicators of cell type of origin, and cervical microbiome type.

[0166] (A) The WID-BC-index evaluated in ENCODE primary cells (pc) and in vitro differentiated cells (ivdc). (B) The WID-index evaluated in ENCODE tissue samples. (C) The WID-BC-index evaluated in breast tissue samples. (D) WID-BC-index after linear adjustment for fat content in breast tissue samples from healthy women, women with BRCA mutation, triple negative breast cancers (TNBC) and matched adjacent normal tissue. (E) Top ten tissue-specific patterns enriched in hyper-methylated CpGs inferred using eFORGE. (F) Top ten tissue-specific patterns enriched in hypo-methylated CpGs. (G) The first two principal components corresponding to the bimodal CpGs in samples with IC<0.5. Samples are labelled with their corresponding cervicovaginal microbiome type, Type-L (Lactobacilli dominating) or Type-O (Non-lactobacilli dominating).

[0167] FIG. 6 shows the experimental design underpinning the discovery and validation of the WID-BC-index.

[0168] FIG. 7 shows cell type distributions in different datasets.

[0169] Distribution of different cell-types as estimated using the HEpiDISH algorithm in (A) the external validation dataset, (B) BRCA1 buccal samples, (C) BRCA2 buccal samples, (D) BRCA1 cervical samples, (E) BRCA2 cervical samples, (F) ovarian cancer samples, (G) matched buccal samples from the breast cancer internal validation dataset, (H) fresh breast tissue samples.

[0170] FIG. 8 shows the performance of the WID-BC-index in the discriminatory performance for assessing ovarian cancer risk of BRCA2 germline mutation carriers.

[0171] (A) Bimodal, (B) Epithelial, (C) Immune, and (D) Shared subcomponents of the WID-BC-index in the internal validation dataset. ROC curves corresponding to the WID-BC-index discriminating between BRCA2 carriers and healthy controls in (E) cervical, (F) buccal, and (G) blood samples.

[0172] FIG. 9 shows correlation of WID-BC-index derived from different sample tissues.

[0173] Correlations between (A) the overall WID-BC-index, and the (B) bimodal, (C) epithelial, (D) immune, and (E) shared subcomponents between matched cervical and blood samples from BRCA carriers and healthy controls. Correlations between (F) overall index, and (G) bimodal, (H) epithelial, (I) immune, and (J) shared subcomponents in matched cervical and buccal samples from the BRCA dataset. Correlations between (K) the overall index, and (L) bimodal, (M) epithelial, (N) immune, and (O) shared subcomponents in matched buccal and blood samples from the BRCA dataset.

[0174] FIG. 10 shows WID-BC-index performance of buccal samples and ovarianc cancer subcomponents.

[0175] (A) Bimodal, (B) Epithelial, (C) Immune, and (D) Shared subcomponents of the WID-BC-index in matched buccal samples from the breast cancer internal validation dataset. (E) Bimodal, (F) Epithelial, (G) Immune, and (H) Shared subcomponents of the WID-BC-index in ovarian cancer cases and healthy controls.

[0176] FIG. 11 shows a lack of association of WID-BC-index with other technical parameters.

[0177] (A) The WID-BC-index is independent of the time between sample collection and processing (Discovery set). (B) Distribution of the WID-BC-index in controls that volunteered from the general population and women that presented at hospitals for benign women-specific conditions (Discovery set).

[0178] FIG. 12 shows association between WID-BC-index components determined by IC fraction and cervicovaginal microbiome.

[0179] (A) The first two principal components corresponding to the CpGs comprising the epithelial subcomponent of the WID-BC-index in samples with IC<0.5. Samples are labelled with their corresponding cervicovaginal microbiome type. (B) First two principal components corresponding to the immune subcomponent in samples with IC>0.5. (C) First two principal components corresponding to the shared subcomponent in all samples.

[0180] FIG. 13 shows cutpoints applied to the patient data, and consequent specificity and sensitivity for cancer status discrimination achieved when these cutpoints are applied.

### DETAILED DESCRIPTION OF THE INVENTION

### Identification of CpGs

[0181] The present inventors sought to identify CpG methylation-based assays capable of assessing the presence, absence or development of cancer in an individual. Any of the assays described herein for assessing the presence, absence or development of cancer in an individual are capable of being utilised for assessing the presence, absence or development of breast cancer and/or ovarian cancer. The present inventors compared CpG methylation levels in non-cancerous epithelial cells, particularly derived from an anatomical site other than the breast or ovary, such as the cervix, the vagina, the buccal area, blood and/or urine, preferably cervical liquid-based cytology sample and more preferably derived from a cervical smear sample, across groups of women that were either known to be both breast and/or ovarian cancer negative, or known to be breast and/or ovarian cancer positive, or known to have a BRCA1 and/or BRCA2 germline mutation but are as yet breast and ovarian cancer free. This led to the surprising establishment of a “cancer index”, used interchangeable herein with “index”, “index value”, “WID-BC-Index” or “WID-Index” (WID=women's risk identification).

[0182] A CpG as defined herein refers to the CG dinucleotide motif identified in relation to each SEQ ID NO., wherein the CG dinucleotide of interest is denoted by [CG]. Thus by determining the methylation status of the cytosine of the CG dinucleotide motif identified at positions 61 to 62 in the panel of one or more CpGs of SEQ ID NOs 1 to 29,000, accepting that variations in the sequence upstream and downstream of any given CpG, as identified at positions 61 to 62 of any given SEQ ID NO, may exist due to sequencing errors or variation between individuals.

[0183] As set out in more detail in the Examples, the methylation status of sub-selections of the 29,000 CpGs, as identified in SEQ ID NOs 1 to 29,000, may be determined in order to assess an individual for the presence, absence or development of cancer with high sensitivity and specificity. A panel of one or more of the CpGs identified in SEQ ID NOs 1 to 29,000 may be utilised to derive a cancer index for an individual in accordance with the invention described herein.

[0184] The methylation status of a panel of one or more CpGs of the 29,000 CpGs defined according to SEQ ID NOs: 1 to 29,000 may be assessed by any suitable technique. As explained in more detail in the Examples below, one particular exemplary technique which the inventors have used is an array-based analysis technique coupled with beta value analysis. SEQ ID NOs 1 to 29,000 correspond to the sequences of commercial probes utilised in said array.

### Cancer-Related CpGs for Analysis

[0185] In any of the assays described herein, in a sample which has been taken from an individual, the sample comprises a population of DNA molecules.

[0186] The assay of the invention further comprises determining in the population of DNA molecules in the sample the methylation status of a panel of one or more CpGs selected from a panel of CpGs identified at nucleotide positions 61 to 62 in SEQ ID NOs 1 to 29,000. A cancer index value is then derived based on the methylation status of the one or more CpGs in the panel, which is used to assess the presence, absence or development of cancer in the individual based on the cancer index value.

[0187] In any of the assays described herein, in DNA derived from cells in the sample the methylation status of each CpG in a panel of one or more CpGs from a panel of CpGs identified at nucleotide positions 61 to 62 in SEQ ID NOs 1 to 29,000, is determined.

[0188] In any of the assays described herein, the panel of one or more CpGs may comprise at least 500 CpGs selected from the CpGs identified at nucleotide positions 61 to 62 in SEQ ID NOs 1 to 29,000, preferably wherein the assay is characterised as having a receiver operating characteristics (ROC) area under the curve (AUC) of at least 0.60. The panel of one or more CpGs may comprise at least the CpGs identified in SEQ ID NOs 1 to 500 and identified at nucleotide positions 61 to 62, preferably wherein the assay is characterised as having an ROC AUC of at least 0.78.

[0189] In any of the assays described herein, the panel of one or more CpGs may comprise at least 1000 CpGs selected from the CpGs identified at nucleotide positions 61 to 62 in SEQ ID NOs 1 to 29,000, preferably wherein the assay is characterised as having a ROC AUC of at least 0.61. The panel of one or more CpGs may comprise at least the CpGs identified in SEQ ID NOs 1 to 1000 and identified at nucleotide positions 61 to 62, preferably wherein the assay is characterised as having a ROC AUC of at least 0.81.

[0190] In any of the assays described herein, the panel of one or more CpGs may comprise at least 2000 CpGs selected from the CpGs identified at nucleotide positions 61 to 62 in SEQ ID NOs 1 to 29,000, preferably wherein the assay is characterised as having a ROC AUC of at least 0.61. The panel of one or more CpGs may comprise at least the CpGs identified in SEQ ID NOs 1 to 2000 and identified at nucleotide positions 61 to 62, preferably wherein the assay is characterised as having a ROC AUC of at least 0.82.

[0191] In any of the assays described herein, the panel of one or more CpGs may comprise at least 10,000 CpGs selected from the CpGs identified at nucleotide positions 61 to 62 in SEQ ID NOs 1 to 29,000, preferably wherein the assay is characterised as having an AUC of at least 0.62. The panel of one or more CpGs may comprise at least the CpGs identified in SEQ ID NOs 1 to 10,000 and identified at nucleotide positions 61 to 62, preferably wherein the assay is characterised as having a ROC AUC of at least 0.84.

[0192] In any of the assays described herein, the panel of one or more CpGs may comprise at least the 29,000 CpGs identified at nucleotide positions 61 to 62 in SEQ ID NOs 1 to 29,000, and further wherein the assay is characterised as having a ROC AUC of at least 0.84.

[0193] In any of the above-described assays, the assay may be characterised as having a ROC AUC of 0.60 or more, 0.61 or more, 0.62 or more, 0.63 or more, 0.64 or more, 0.65 or more, 0.66 or more, 0.67 or more, 0.68 or more, 0.69 or more, 0.70 or more, 0.71 or more, 0.72 or more, 0.73 or more, 0.74 or more, 0.75 or more, 0.76 or more, 0.77 or more, 0.78 or more, 0.79 or more, 0.80 or more, 0.81 or more, 0.82 or more, 0.83 or more, 0.84 or more, 0.85 or more, 0.86 or more, 0.87 or more, 0.88 or more, 0.89 or more or 0.90 or more.

[0194] In any of the described assays, the methylation status of the one or more CpGs in the panel is preferably determined by a β-value analysis, and the cancer is breast cancer or ovarian cancer. Preferably, the cancer is breast cancer.

[0195] In any of the assays described herein, the panel of one or more CpGs may comprise at least 500 CpGs selected from the CpGs identified at nucleotide positions 61 to 62 in SEQ ID NOs 1 to 29,000, optionally wherein:
[0196] 1. the assay is characterised as having an ROC AUC (AUC) of at least 0.78, and more preferably wherein the panel of one or more CpGs comprises at least the CpGs identified in SEQ ID NOs 1 to 500 and identified at nucleotide positions 61 to 62;
[0197] 2. the assay is characterised as having an AUC of at least 0.78, and more preferably wherein the panel of one or more CpGs comprises at least the CpGs identified in SEQ ID NOs 501 to 1000 and identified at nucleotide positions 61 to 62;
[0198] 3. the assay is characterised as having an AUC of at least 0.77, and more preferably wherein the panel of one or more CpGs comprises at least the CpGs identified in SEQ ID NOs 1001 to 1500 and identified at nucleotide positions 61 to 62;
[0199] 4. the assay is characterised as having an AUC of at least 0.74, and more preferably wherein the panel of one or more CpGs comprises at least the CpGs identified in SEQ ID NOs 1501 to 2000 and identified at nucleotide positions 61 to 62;
[0200] 5. the assay is characterised as having an AUC of at least 0.77, and more preferably wherein the panel of one or more CpGs comprises at least the CpGs identified in SEQ ID NOs 2001 to 2500 and identified at nucleotide positions 61 to 62;
[0201] 6. the assay is characterised as having an AUC of at least 0.72, and more preferably wherein the panel of one or more CpGs comprises at least the CpGs identified in SEQ ID NOs 2501 to 3000 and identified at nucleotide positions 61 to 62;
[0202] 7. the assay is characterised as having an AUC of at least 0.75, and more preferably wherein the panel of one or more CpGs comprises at least the CpGs identified in SEQ ID NOs 3001 to 3500 and identified at nucleotide positions 61 to 62;
[0203] 8. the assay is characterised as having an AUC of at least 0.70, and more CpGs identified in SEQ ID NOs 3501 to 4000 and identified at nucleotide positions 61 to 62;
[0204] 9. the assay is characterised as having an AUC of at least 0.74, and more preferably wherein the panel of one or more CpGs comprises at least the CpGs identified in SEQ ID NOs 4001 to 4500 and identified at nucleotide positions 61 to 62;
[0205] 10. the assay is characterised as having an AUC of at least 0.76, and more preferably wherein the panel of one or more CpGs comprises at least the CpGs identified in SEQ ID NOs 4501 to 5000 and identified at nucleotide positions 61 to 62;
[0206] 11. the assay is characterised as having an AUC of at least 0.74, and more preferably wherein the panel of one or more CpGs comprises at least the CpGs identified in SEQ ID NOs 5001 to 5500 and identified at nucleotide positions 61 to 62;
[0207] 12. the assay is characterised as having an AUC of at least 0.72, and more preferably wherein the panel of one or more CpGs comprises at least the CpGs identified in SEQ ID NOs 5501 to 6000 and identified at nucleotide positions 61 to 62;
[0208] 13. the assay is characterised as having an AUC of at least 0.72, and more preferably wherein the panel of one or more CpGs comprises at least the CpGs identified in SEQ ID NOs 6001 to 6500 and identified at nucleotide positions 61 to 62;
[0209] 14. the assay is characterised as having an AUC of at least 0.71, and more preferably wherein the panel of one or more CpGs comprises at least the CpGs identified in SEQ ID NOs 6501 to 7000 and identified at nucleotide positions 61 to 62;
[0210] 15. the assay is characterised as having an AUC of at least 0.71, and more preferably wherein the panel of one or more CpGs comprises at least the CpGs identified in SEQ ID NOs 7001 to 7500 and identified at nucleotide positions 61 to 62;
[0211] 16. the assay is characterised as having an AUC of at least 0.69, and more preferably wherein the panel of one or more CpGs comprises at least the CpGs identified in SEQ ID NOs 7501 to 8000 and identified at nucleotide positions 61 to 62;
[0212] 17. the assay is characterised as having an AUC of at least 0.72, and more preferably wherein the panel of one or more CpGs comprises at least the CpGs identified in SEQ ID NOs 8001 to 8500 and identified at nucleotide positions 61 to 62;
[0213] 18. the assay is characterised as having an AUC of at least 0.72, and more preferably wherein the panel of one or more CpGs comprises at least the CpGs identified in SEQ ID NOs 8501 to 9000 and identified at nucleotide positions 61 to 62;
[0214] 19. the assay is characterised as having an AUC of at least 0.72, and more preferably wherein the panel of one or more CpGs comprises at least the CpGs identified in SEQ ID NOs 9001 to 9500 and identified at nucleotide positions 61 to 62;
[0215] 20. the assay is characterised as having an AUC of at least 0.70, and more preferably wherein the panel of one or more CpGs comprises at least the CpGs identified in SEQ ID NOs 9501 to 10000 and identified at nucleotide positions 61 to 62;
[0216] 21. the assay is characterised as having an AUC of at least 0.68, and more preferably wherein the panel of one or more CpGs comprises at least the CpGs identified in SEQ ID NOs 10001 to 10500 and identified at nucleotide positions 61 to 62;
[0217] 22. the assay is characterised as having an AUC of at least 0.69, and more preferably wherein the panel of one or more CpGs comprises at least the CpGs identified in SEQ ID NOs 10501 to 11000 and identified at nucleotide positions 61 to 62;
[0218] 23. the assay is characterised as having an AUC of at least 0.68, and more CpGs identified in SEQ ID NOs 11001 to 11500 and identified at nucleotide positions 61 to 62;
[0219] 24. the assay is characterised as having an AUC of at least 0.64, and more preferably wherein the panel of one or more CpGs comprises at least the CpGs identified in SEQ ID NOs 11501 to 12000 and identified at nucleotide positions 61 to 62;
[0220] 25. the assay is characterised as having an AUC of at least 0.67, and more preferably wherein the panel of one or more CpGs comprises at least the CpGs identified in SEQ ID NOs 12001 to 12500 and identified at nucleotide positions 61 to 62;
[0221] 26. the assay is characterised as having an AUC of at least 0.68, and more preferably wherein the panel of one or more CpGs comprises at least the CpGs identified in SEQ ID NOs 12501 to 13000 and identified at nucleotide positions 61 to 62;
[0222] 27. the assay is characterised as having an AUC of at least 0.69, and more preferably wherein the panel of one or more CpGs comprises at least the CpGs identified in SEQ ID NOs 13001 to 13500 and identified at nucleotide positions 61 to 62;
[0223] 28. the assay is characterised as having an AUC of at least 0.67, and more preferably wherein the panel of one or more CpGs comprises at least the CpGs identified in SEQ ID NOs 13501 to 14000 and identified at nucleotide positions 61 to 62;
[0224] 29. the assay is characterised as having an AUC of at least 0.66, and more preferably wherein the panel of one or more CpGs comprises at least the CpGs identified in SEQ ID NOs 14001 to 14500 and identified at nucleotide positions 61 to 62;
[0225] 30. the assay is characterised as having an AUC of at least 0.63, and more preferably wherein the panel of one or more CpGs comprises at least the CpGs identified in SEQ ID NOs 14501 to 15000 and identified at nucleotide positions 61 to 62;
[0226] 31. the assay is characterised as having an AUC of at least 0.69, and more preferably wherein the panel of one or more CpGs comprises at least the CpGs identified in SEQ ID NOs 15001 to 15500 and identified at nucleotide positions 61 to 62;
[0227] 32. the assay is characterised as having an AUC of at least 0.64, and more preferably wherein the panel of one or more CpGs comprises at least the CpGs identified in SEQ ID NOs 15501 to 16000 and identified at nucleotide positions 61 to 62;
[0228] 33. the assay is characterised as having an AUC of at least 0.64, and more preferably wherein the panel of one or more CpGs comprises at least the CpGs identified in SEQ ID NOs 16001 to 16500 and identified at nucleotide positions 61 to 62;
[0229] 34. the assay is characterised as having an AUC of at least 0.66, and more preferably wherein the panel of one or more CpGs comprises at least the CpGs identified in SEQ ID NOs 16501 to 17000 and identified at nucleotide positions 61 to 62;
[0230] 35. the assay is characterised as having an AUC of at least 0.61, and more preferably wherein the panel of one or more CpGs comprises at least the CpGs identified in SEQ ID NOs 17001 to 17500 and identified at nucleotide positions 61 to 62;
[0231] 36. the assay is characterised as having an AUC of at least 0.64, and more preferably wherein the panel of one or more CpGs comprises at least the CpGs identified in SEQ ID NOs 17501 to 18000 and identified at nucleotide positions 61 to 62;
[0232] 37. the assay is characterised as having an AUC of at least 0.61, and more preferably wherein the panel of one or more CpGs comprises at least the CpGs identified in SEQ ID NOs 18001 to 18500 and identified at nucleotide positions 61 to 62;
[0233] 38. the assay is characterised as having an AUC of at least 0.62, and more CpGs identified in SEQ ID NOs 18501 to 19000 and identified at nucleotide positions 61 to 62;
[0234] 39. the assay is characterised as having an AUC of at least 0.62, and more preferably wherein the panel of one or more CpGs comprises at least the CpGs identified in SEQ ID NOs 19001 to 19500 and identified at nucleotide positions 61 to 62;
[0235] 40. the assay is characterised as having an AUC of at least 0.62, and more preferably wherein the panel of one or more CpGs comprises at least the CpGs identified in SEQ ID NOs 19501 to 20000 and identified at nucleotide positions 61 to 62;
[0236] 41. the assay is characterised as having an AUC of at least 0.64, and more preferably wherein the panel of one or more CpGs comprises at least the CpGs identified in SEQ ID NOs 20001 to 20500 and identified at nucleotide positions 61 to 62;
[0237] 42. the assay is characterised as having an AUC of at least 0.62, and more preferably wherein the panel of one or more CpGs comprises at least the CpGs identified in SEQ ID NOs 20501 to 21000 and identified at nucleotide positions 61 to 62;
[0238] 43. the assay is characterised as having an AUC of at least 0.62, and more preferably wherein the panel of one or more CpGs comprises at least the CpGs identified in SEQ ID NOs 21001 to 21500 and identified at nucleotide positions 61 to 62;
[0239] 44. the assay is characterised as having an AUC of at least 0.63, and more preferably wherein the panel of one or more CpGs comprises at least the CpGs identified in SEQ ID NOs 21501 to 22000 and identified at nucleotide positions 61 to 62;
[0240] 45. the assay is characterised as having an AUC of at least 0.64, and more preferably wherein the panel of one or more CpGs comprises at least the CpGs identified in SEQ ID NOs 22001 to 22500 and identified at nucleotide positions 61 to 62;
[0241] 46. the assay is characterised as having an AUC of at least 0.61, and more preferably wherein the panel of one or more CpGs comprises at least the CpGs identified in SEQ ID NOs 22501 to 23000 and identified at nucleotide positions 61 to 62;
[0242] 47. the assay is characterised as having an AUC of at least 0.59, and more preferably wherein the panel of one or more CpGs comprises at least the CpGs identified in SEQ ID NOs 23001 to 23500 and identified at nucleotide positions 61 to 62;
[0243] 48. the assay is characterised as having an AUC of at least 0.60, and more preferably wherein the panel of one or more CpGs comprises at least the CpGs identified in SEQ ID NOs 23501 to 24000 and identified at nucleotide positions 61 to 62;
[0244] 49. the assay is characterised as having an AUC of at least 0.64, and more preferably wherein the panel of one or more CpGs comprises at least the CpGs identified in SEQ ID NOs 24001 to 24500 and identified at nucleotide positions 61 to 62;
[0245] 50. the assay is characterised as having an AUC of at least 0.60, and more preferably wherein the panel of one or more CpGs comprises at least the CpGs identified in SEQ ID NOs 24501 to 25000 and identified at nucleotide positions 61 to 62;
[0246] 51. the assay is characterised as having an AUC of at least 0.58, and more preferably wherein the panel of one or more CpGs comprises at least the CpGs identified in SEQ ID NOs 25001 to 25500 and identified at nucleotide positions 61 to 62;
[0247] 52. the assay is characterised as having an AUC of at least 0.60, and more preferably wherein the panel of one or more CpGs comprises at least the CpGs identified in SEQ ID NOs 25501 to 26000 and identified at nucleotide positions 61 to 62;
[0248] 53. the assay is characterised as having an AUC of at least 0.59, and more CpGs identified in SEQ ID NOs 26001 to 26500 and identified at nucleotide positions 61 to 62;
[0249] 54. the assay is characterised as having an AUC of at least 0.61, and more preferably wherein the panel of one or more CpGs comprises at least the CpGs identified in SEQ ID NOs 26501 to 27000 and identified at nucleotide positions 61 to 62;
[0250] 55. the assay is characterised as having an AUC of at least 0.56, and more preferably wherein the panel of one or more CpGs comprises at least the CpGs identified in SEQ ID NOs 27001 to 27500 and identified at nucleotide positions 61 to 62;
[0251] 56. the assay is characterised as having an AUC of at least 0.62, and more preferably wherein the panel of one or more CpGs comprises at least the CpGs identified in SEQ ID NOs 27501 to 28000 and identified at nucleotide positions 61 to 62;
[0252] 57. the assay is characterised as having an AUC of at least 0.60, and more preferably wherein the panel of one or more CpGs comprises at least the CpGs identified in SEQ ID NOs 28001 to 28500 and identified at nucleotide positions 61 to 62; or
[0253] 58. the assay is characterised as having an AUC of at least 0.61, and more preferably wherein the panel of one or more CpGs comprises at least the CpGs identified in SEQ ID NOs 28501 to 29000 and identified at nucleotide positions 61 to 62.

[0254] In any of the described assays, the methylation status of the one or more CpGs in the panel is preferably determined by a β-value analysis, and the cancer is breast cancer or ovarian cancer. Preferably, the cancer is breast cancer.

[0255] In any of the above-described assays, the assay may be characterised as having a ROC AUC of 0.60 or more, 0.61 or more, 0.62 or more, 0.63 or more, 0.64 or more, 0.65 or more, 0.66 or more, 0.67 or more, 0.68 or more, 0.69 or more, 0.70 or more, 0.71 or more, 0.72 or more, 0.73 or more, 0.74 or more, 0.75 or more, 0.76 or more, 0.77 or more, 0.78 or more, 0.79 or more, 0.80 or more, 0.81 or more, 0.82 or more, 0.83 or more, 0.84 or more, 0.85 or more, 0.86 or more, 0.87 or more, 0.88 or more, 0.89 or more or 0.90 or more.

[0256] In any of the assays described herein, the panel of one or more CpGs may comprise:
[0257] 1. at least 100 CpGs selected from the CpGs identified at nucleotide positions 61 to 62 in SEQ ID NOs 1 to 29,000, preferably wherein the assay is characterised as having an AUC of at least 0.72, and more preferably wherein the panel of one or more CpGs comprises at least the CpGs identified in SEQ ID NOs 1 to 100 and identified at nucleotide positions 61 to 62;
[0258] 2. at least 500 CpGs selected from the CpGs identified at nucleotide positions 61 to 62 in SEQ ID NOs 1 to 29,000, preferably wherein the assay is characterised as having an AUC of at least 0.78, and more preferably wherein the panel of one or more CpGs comprises at least the CpGs identified in SEQ ID NOs 1 to 500 and identified at nucleotide positions 61 to 62;
[0259] 3. at least 1000 CpGs selected from the CpGs identified at nucleotide positions 61 to 62 in SEQ ID NOs 1 to 29,000, preferably wherein the assay is characterised as having an AUC of at least 0.81, and more preferably wherein the panel of one or more CpGs comprises at least the CpGs identified in SEQ ID NOs 1 to 1000 and identified at nucleotide positions 61 to 62;
[0260] 4. at least 2000 CpGs selected from the CpGs identified at nucleotide positions 61 to 62 in SEQ ID NOs 1 to 29,000, preferably wherein the assay is characterised as having an AUC of at least 0.82, and more preferably wherein the panel of one or more CpGs comprises at least the CpGs identified in SEQ ID NOs 1 to 2000 and identified at nucleotide positions 61 to 62;
[0261] 5. at least 3000 CpGs selected from the CpGs identified at nucleotide positions 61 to 62 in SEQ ID NOs 1 to 29,000, preferably wherein the assay is characterised as having an AUC of at least 0.83, and more preferably wherein the panel of one or more CpGs comprises at least the CpGs identified in SEQ ID NOs 1 to 3000 and identified at nucleotide positions 61 to 62;
[0262] 6. at least 4000 CpGs selected from the CpGs identified at nucleotide positions 61 to 62 in SEQ ID NOs 1 to 29,000, preferably wherein the assay is characterised as having an AUC of at least 0.83, and more preferably wherein the panel of one or more CpGs comprises at least the CpGs identified in SEQ ID NOs 1 to 4000 and identified at nucleotide positions 61 to 62;
[0263] 7. at least 5000 CpGs selected from the CpGs identified at nucleotide positions 61 to 62 in SEQ ID NOs 1 to 29,000, preferably wherein the assay is characterised as having an AUC of at least 0.84, and more preferably wherein the panel of one or more CpGs comprises at least the CpGs identified in SEQ ID NOs 1 to 5000 and identified at nucleotide positions 61 to 62;
[0264] 8. at least 6000 CpGs selected from the CpGs identified at nucleotide positions 61 to 62 in SEQ ID NOs 1 to 29,000, preferably wherein the assay is characterised as having an AUC of at least 0.84, and more preferably wherein the panel of one or more CpGs comprises at least the CpGs identified in SEQ ID NOs 1 to 6000 and identified at nucleotide positions 61 to 62;
[0265] 9. at least 7000 CpGs selected from the CpGs identified at nucleotide positions 61 to 62 in SEQ ID NOs 1 to 29,000, preferably wherein the assay is characterised as having an AUC of at least 0.84, and more preferably wherein the panel of one or more CpGs comprises at least the CpGs identified in SEQ ID NOs 1 to 7000 and identified at nucleotide positions 61 to 62;
[0266] 10. at least 8000 CpGs selected from the CpGs identified at nucleotide positions 61 to 62 in SEQ ID NOs 1 to 29,000, preferably wherein the assay is characterised as having an AUC of at least 0.84, and more preferably wherein the panel of one or more CpGs comprises at least the CpGs identified in SEQ ID NOs 1 to 8000 and identified at nucleotide positions 61 to 62;
[0267] 11. at least 9000 CpGs selected from the CpGs identified at nucleotide positions 61 to 62 in SEQ ID NOs 1 to 29,000, preferably wherein the assay is characterised as having an AUC of at least 0.84, and more preferably wherein the panel of one or more CpGs comprises at least the CpGs identified in SEQ ID NOs 1 to 9000 and identified at nucleotide positions 61 to 62;
[0268] 12. at least 10000 CpGs selected from the CpGs identified at nucleotide positions 61 to 62 in SEQ ID NOs 1 to 29,000, preferably wherein the assay is characterised as having an AUC of at least 0.84, and more preferably wherein the panel of one or more CpGs comprises at least the CpGs identified in SEQ ID NOs 1 to 10000 and identified at nucleotide positions 61 to 62;
[0269] 13. at least 11000 CpGs selected from the CpGs identified at nucleotide positions 61 to 62 in SEQ ID NOs 1 to 29,000, preferably wherein the assay is characterised as having an AUC of at least 0.84, and more preferably wherein the panel of one or more CpGs comprises at least the CpGs identified in SEQ ID NOs 1 to 11000 and identified at nucleotide positions 61 to 62;
[0270] 14. at least 12000 CpGs selected from the CpGs identified at nucleotide positions 61 to 62 in SEQ ID NOs 1 to 29,000, preferably wherein the assay is characterised as having an AUC of at least 0.84, and more preferably wherein the panel of one or more CpGs comprises at least the CpGs identified in SEQ ID NOs 1 to 12000 and identified at nucleotide positions 61 to 62;
[0271] 15. at least 13000 CpGs selected from the CpGs identified at nucleotide is characterised as having an AUC of at least 0.84, and more preferably wherein the panel of one or more CpGs comprises at least the CpGs identified in SEQ ID NOs 1 to 13000 and identified at nucleotide positions 61 to 62;
[0272] 16. at least 14000 CpGs selected from the CpGs identified at nucleotide positions 61 to 62 in SEQ ID NOs 1 to 29,000, preferably wherein the assay is characterised as having an AUC of at least 0.84, and more preferably wherein the panel of one or more CpGs comprises at least the CpGs identified in SEQ ID NOs 1 to 14000 and identified at nucleotide positions 61 to 62;
[0273] 17. at least 15000 CpGs selected from the CpGs identified at nucleotide positions 61 to 62 in SEQ ID NOs 1 to 29,000, preferably wherein the assay is characterised as having an AUC of at least 0.84, and more preferably wherein the panel of one or more CpGs comprises at least the CpGs identified in SEQ ID NOs 1 to 15000 and identified at nucleotide positions 61 to 62;
[0274] 18. at least 16000 CpGs selected from the CpGs identified at nucleotide positions 61 to 62 in SEQ ID NOs 1 to 29,000, preferably wherein the assay is characterised as having an AUC of at least 0.84, and more preferably wherein the panel of one or more CpGs comprises at least the CpGs identified in SEQ ID NOs 1 to 16000 and identified at nucleotide positions 61 to 62;
[0275] 19. at least 17000 CpGs selected from the CpGs identified at nucleotide positions 61 to 62 in SEQ ID NOs 1 to 29,000, preferably wherein the assay is characterised as having an AUC of at least 0.84, and more preferably wherein the panel of one or more CpGs comprises at least the CpGs identified in SEQ ID NOs 1 to 17000 and identified at nucleotide positions 61 to 62;
[0276] 20. at least 18000 CpGs selected from the CpGs identified at nucleotide is characterised as having an AUC of at least 0.84, and more preferably wherein the panel of one or more CpGs comprises at least the CpGs identified in SEQ ID NOs 1 to 18000 and identified at nucleotide positions 61 to 62;
[0277] 21. at least 19000 CpGs selected from the CpGs identified at nucleotide positions 61 to 62 in SEQ ID NOs 1 to 29,000, preferably wherein the assay is characterised as having an AUC of at least 0.84, and more preferably wherein the panel of one or more CpGs comprises at least the CpGs identified in SEQ ID NOs 1 to 19000 and identified at nucleotide positions 61 to 62;
[0278] 22. at least 20000 CpGs selected from the CpGs identified at nucleotide positions 61 to 62 in SEQ ID NOs 1 to 29,000, preferably wherein the assay is characterised as having an AUC of at least 0.84, and more preferably wherein the panel of one or more CpGs comprises at least the CpGs identified in SEQ ID NOs 1 to 20000 and identified at nucleotide positions 61 to 62;
[0279] 23. at least 21000 CpGs selected from the CpGs identified at nucleotide positions 61 to 62 in SEQ ID NOs 1 to 29,000, preferably wherein the assay is characterised as having an AUC of at least 0.84, and more preferably wherein the panel of one or more CpGs comprises at least the CpGs identified in SEQ ID NOs 1 to 21000 and identified at nucleotide positions 61 to 62;
[0280] 24. at least 22000 CpGs selected from the CpGs identified at nucleotide positions 61 to 62 in SEQ ID NOs 1 to 29,000, preferably wherein the assay is characterised as having an AUC of at least 0.84, and more preferably wherein the panel of one or more CpGs comprises at least the CpGs identified in SEQ ID NOs 1 to 22000 and identified at nucleotide positions 61 to 62;
[0281] 25. at least 23000 CpGs selected from the CpGs identified at nucleotide is characterised as having an AUC of at least 0.84, and more preferably wherein the panel of one or more CpGs comprises at least the CpGs identified in SEQ ID NOs 1 to 23000 and identified at nucleotide positions 61 to 62;
[0282] 26. at least 24000 CpGs selected from the CpGs identified at nucleotide positions 61 to 62 in SEQ ID NOs 1 to 29,000, preferably wherein the assay is characterised as having an AUC of at least 0.84, and more preferably wherein the panel of one or more CpGs comprises at least the CpGs identified in SEQ ID NOs 1 to 24000 and identified at nucleotide positions 61 to 62;
[0283] 27. at least 25000 CpGs selected from the CpGs identified at nucleotide positions 61 to 62 in SEQ ID NOs 1 to 29,000, preferably wherein the assay is characterised as having an AUC of at least 0.84, and more preferably wherein the panel of one or more CpGs comprises at least the CpGs identified in SEQ ID NOs 1 to 25000 and identified at nucleotide positions 61 to 62;
[0284] 28. at least 26000 CpGs selected from the CpGs identified at nucleotide positions 61 to 62 in SEQ ID NOs 1 to 29,000, preferably wherein the assay is characterised as having an AUC of at least 0.84, and more preferably wherein the panel of one or more CpGs comprises at least the CpGs identified in SEQ ID NOs 1 to 26000 and identified at nucleotide positions 61 to 62;
[0285] 29. at least 27000 CpGs selected from the CpGs identified at nucleotide positions 61 to 62 in SEQ ID NOs 1 to 29,000, preferably wherein the assay is characterised as having an AUC of at least 0.84, and more preferably wherein the panel of one or more CpGs comprises at least the CpGs identified in SEQ ID NOs 1 to 27000 and identified at nucleotide positions 61 to 62;
[0286] 30. at least 28000 CpGs selected from the CpGs identified at nucleotide is characterised as having an AUC of at least 0.84, and more preferably wherein the panel of one or more CpGs comprises at least the CpGs identified in SEQ ID NOs 1 to 28000 and identified at nucleotide positions 61 to 62; or
[0287] 31. at least 29000 CpGs selected from the CpGs identified at nucleotide positions 61 to 62 in SEQ ID NOs 1 to 29,000, preferably wherein the assay is characterised as having an AUC of at least 0.84, and more preferably wherein the panel of one or more CpGs comprises at least the CpGs identified in SEQ ID NOs 1 to 29000 and identified at nucleotide positions 61 to 62.

[0288] In any of the described assays, the methylation status of the one or more CpGs in the panel is preferably determined by a β-value analysis, and the cancer is breast cancer or ovarian cancer. Preferably, the cancer is breast cancer.

[0289] In any of the above-described assays, the assay may be characterised as having a ROC AUC of 0.60 or more, 0.61 or more, 0.62 or more, 0.63 or more, 0.64 or more, 0.65 or more, 0.66 or more, 0.67 or more, 0.68 or more, 0.69 or more, 0.70 or more, 0.71 or more, 0.72 or more, 0.73 or more, 0.74 or more, 0.75 or more, 0.76 or more, 0.77 or more, 0.78 or more, 0.79 or more, 0.80 or more, 0.81 or more, 0.82 or more, 0.83 or more, 0.84 or more, 0.85 or more, 0.86 or more, 0.87 or more, 0.88 or more, 0.89 or more or 0.90 or more.

[0290] In any of the assays described herein, the panel of one or more CpGs may comprise:
[0291] 1. at least 1000 CpGs selected from the CpGs identified at nucleotide positions 61 to 62 in SEQ ID NOs 1 to 29,000, preferably wherein the assay is characterised as having an AUC of at least 0.61, and more preferably wherein the panel of one or more CpGs comprises at least the CpGs identified in SEQ ID NOs 28,001 to 29,000 and identified at nucleotide positions 61 to 62;
[0292] 2. at least 2000 CpGs selected from the CpGs identified at nucleotide positions 61 to 62 in SEQ ID NOs 1 to 29,000, preferably wherein the assay is characterised as having an AUC of at least 0.61, and more preferably wherein the panel of one or more CpGs comprises at least the CpGs identified in SEQ ID NOs 27,001 to 29,000 and identified at nucleotide positions 61 to 62;
[0293] 3. at least 3000 CpGs selected from the CpGs identified at nucleotide positions 61 to 62 in SEQ ID NOs 1 to 29,000, preferably wherein the assay is characterised as having an AUC of at least 0.62, and more preferably wherein the panel of one or more CpGs comprises at least the CpGs identified in SEQ ID NOs 26,001 to 29,000 and identified at nucleotide positions 61 to 62;
[0294] 4. at least 4000 CpGs selected from the CpGs identified at nucleotide positions 61 to 62 in SEQ ID NOs 1 to 29,000, preferably wherein the assay is characterised as having an AUC of at least 0.60, and more preferably wherein the panel of one or more CpGs comprises at least the CpGs identified in SEQ ID NOs 25,001 to 29,000 and identified at nucleotide positions 61 to 62;
[0295] 5. at least 5000 CpGs selected from the CpGs identified at nucleotide positions 61 to 62 in SEQ ID NOs 1 to 29,000, preferably wherein the assay is characterised as having an AUC of at least 0.61, and more preferably wherein the panel of one or more CpGs comprises at least the CpGs identified in SEQ ID NOs 24,001 to 29,000 and identified at nucleotide positions 61 to 62;
[0296] 6. at least 6000 CpGs selected from the CpGs identified at nucleotide positions 61 to 62 in SEQ ID NOs 1 to 29,000, preferably wherein the assay is characterised as having an AUC of at least 0.62, and more preferably wherein the panel of one or more CpGs comprises at least the CpGs identified in SEQ ID NOs 23,001 to 29,000 and identified at nucleotide positions 61 to 62;
[0297] 7. at least 7000 CpGs selected from the CpGs identified at nucleotide positions 61 to 62 in SEQ ID NOs 1 to 29,000, preferably wherein the assay is characterised as having an AUC of at least 0.62, and more preferably wherein the panel of one or more CpGs comprises at least the CpGs identified in SEQ ID NOs 22,001 to 29,000 and identified at nucleotide positions 61 to 62;
[0298] 8. at least 8000 CpGs selected from the CpGs identified at nucleotide positions 61 to 62 in SEQ ID NOs 1 to 29,000, preferably wherein the assay is characterised as having an AUC of at least 0.61, and more preferably wherein the panel of one or more CpGs comprises at least the CpGs identified in SEQ ID NOs 21,001 to 29,000 and identified at nucleotide positions 61 to 62;
[0299] 9. at least 9000 CpGs selected from the CpGs identified at nucleotide positions 61 to 62 in SEQ ID NOs 1 to 29,000, preferably wherein the assay is characterised as having an AUC of at least 0.63, and more preferably wherein the panel of one or more CpGs comprises at least the CpGs identified in SEQ ID NOs 20,001 to 29,000 and identified at nucleotide positions 61 to 62;
[0300] 10. at least 10000 CpGs selected from the CpGs identified at nucleotide positions 61 to 62 in SEQ ID NOs 1 to 29,000, preferably wherein the assay is characterised as having an AUC of at least 0.62, and more preferably wherein the panel of one or more CpGs comprises at least the CpGs identified in SEQ ID NOs 19,001 to 29,000 and identified at nucleotide positions 61 to 62;
[0301] 11. at least 11000 CpGs selected from the CpGs identified at nucleotide positions 61 to 62 in SEQ ID NOs 1 to 29,000, preferably wherein the assay is characterised as having an AUC of at least 0.62, and more preferably wherein the panel of one or more CpGs comprises at least the CpGs identified in SEQ ID NOs 18,001 to 29,000 and identified at nucleotide positions 61 to 62;
[0302] 12. at least 12000 CpGs selected from the CpGs identified at nucleotide is characterised as having an AUC of at least 0.62, and more preferably wherein the panel of one or more CpGs comprises at least the CpGs identified in SEQ ID NOs 17,001 to 29,000 and identified at nucleotide positions 61 to 62;
[0303] 13. at least 13000 CpGs selected from the CpGs identified at nucleotide positions 61 to 62 in SEQ ID NOs 1 to 29,000, preferably wherein the assay is characterised as having an AUC of at least 0.63, and more preferably wherein the panel of one or more CpGs comprises at least the CpGs identified in SEQ ID NOs 16,001 to 29,000 and identified at nucleotide positions 61 to 62;
[0304] 14. at least 14000 CpGs selected from the CpGs identified at nucleotide positions 61 to 62 in SEQ ID NOs 1 to 29,000, preferably wherein the assay is characterised as having an AUC of at least 0.63, and more preferably wherein the panel of one or more CpGs comprises at least the CpGs identified in SEQ ID NOs 15,001 to 29,000 and identified at nucleotide positions 61 to 62;
[0305] 15. at least 15000 CpGs selected from the CpGs identified at nucleotide positions 61 to 62 in SEQ ID NOs 1 to 29,000, preferably wherein the assay is characterised as having an AUC of at least 0.63, and more preferably wherein the panel of one or more CpGs comprises at least the CpGs identified in SEQ ID NOs 14,001 to 29,000 and identified at nucleotide positions 61 to 62;
[0306] 16. at least 16000 CpGs selected from the CpGs identified at nucleotide positions 61 to 62 in SEQ ID NOs 1 to 29,000, preferably wherein the assay is characterised as having an AUC of at least 0.64, and more preferably wherein the panel of one or more CpGs comprises at least the CpGs identified in SEQ ID NOs 13,001 to 29,000 and identified at nucleotide positions 61 to 62;
[0307] 17. at least 17000 CpGs selected from the CpGs identified at nucleotide is characterised as having an AUC of at least 0.64, and more preferably wherein the panel of one or more CpGs comprises at least the CpGs identified in SEQ ID NOs 12,001 to 29,000 and identified at nucleotide positions 61 to 62;
[0308] 18. at least 18000 CpGs selected from the CpGs identified at nucleotide positions 61 to 62 in SEQ ID NOs 1 to 29,000, preferably wherein the assay is characterised as having an AUC of at least 0.64, and more preferably wherein the panel of one or more CpGs comprises at least the CpGs identified in SEQ ID NOs 11,001 to 29,000 and identified at nucleotide positions 61 to 62;
[0309] 19. at least 19000 CpGs selected from the CpGs identified at nucleotide positions 61 to 62 in SEQ ID NOs 1 to 29,000, preferably wherein the assay is characterised as having an AUC of at least 0.66, and more preferably wherein the panel of one or more CpGs comprises at least the CpGs identified in SEQ ID NOs 10,001 to 29,000 and identified at nucleotide positions 61 to 62;
[0310] 20. at least 20000 CpGs selected from the CpGs identified at nucleotide positions 61 to 62 in SEQ ID NOs 1 to 29,000, preferably wherein the assay is characterised as having an AUC of at least 0.66, and more preferably wherein the panel of one or more CpGs comprises at least the CpGs identified in SEQ ID NOs 9,001 to 29,000 and identified at nucleotide positions 61 to 62;
[0311] 21. at least 21000 CpGs selected from the CpGs identified at nucleotide positions 61 to 62 in SEQ ID NOs 1 to 29,000, preferably wherein the assay is characterised as having an AUC of at least 0.68, and more preferably wherein the panel of one or more CpGs comprises at least the CpGs identified in SEQ ID NOs 8,001 to 29,000 and identified at nucleotide positions 61 to 62;
[0312] 22. at least 22000 CpGs selected from the CpGs identified at nucleotide is characterised as having an AUC of at least 0.66, and more preferably wherein the panel of one or more CpGs comprises at least the CpGs identified in SEQ ID NOs 7,001 to 29,000 and identified at nucleotide positions 61 to 62;
[0313] 23. at least 23000 CpGs selected from the CpGs identified at nucleotide positions 61 to 62 in SEQ ID NOs 1 to 29,000, preferably wherein the assay is characterised as having an AUC of at least 0.69, and more preferably wherein the panel of one or more CpGs comprises at least the CpGs identified in SEQ ID NOs 6,001 to 29,000 and identified at nucleotide positions 61 to 62;
[0314] 24. at least 24000 CpGs selected from the CpGs identified at nucleotide positions 61 to 62 in SEQ ID NOs 1 to 29,000, preferably wherein the assay is characterised as having an AUC of at least 0.71, and more preferably wherein the panel of one or more CpGs comprises at least the CpGs identified in SEQ ID NOs 5,001 to 29,000 and identified at nucleotide positions 61 to 62;
[0315] 25. at least 25000 CpGs selected from the CpGs identified at nucleotide positions 61 to 62 in SEQ ID NOs 1 to 29,000, preferably wherein the assay is characterised as having an AUC of at least 0.72, and more preferably wherein the panel of one or more CpGs comprises at least the CpGs identified in SEQ ID NOs 4,001 to 29,000 and identified at nucleotide positions 61 to 62;
[0316] 26. at least 26000 CpGs selected from the CpGs identified at nucleotide positions 61 to 62 in SEQ ID NOs 1 to 29,000, preferably wherein the assay is characterised as having an AUC of at least 0.75, and more preferably wherein the panel of one or more CpGs comprises at least the CpGs identified in SEQ ID NOs 3,001 to 29,000 and identified at nucleotide positions 61 to 62;
[0317] 27. at least 27000 CpGs selected from the CpGs identified at nucleotide is characterised as having an AUC of at least 0.77, and more preferably wherein the panel of one or more CpGs comprises at least the CpGs identified in SEQ ID NOs 2,001 to 29,000 and identified at nucleotide positions 61 to 62;
[0318] 28. at least 28000 CpGs selected from the CpGs identified at nucleotide positions 61 to 62 in SEQ ID NOs 1 to 29,000, preferably wherein the assay is characterised as having an AUC of at least 0.80, and more preferably wherein the panel of one or more CpGs comprises at least the CpGs identified in SEQ ID NOs 1,001 to 29,000 and identified at nucleotide positions 61 to 62;
[0319] 29. at least 28500 CpGs selected from the CpGs identified at nucleotide positions 61 to 62 in SEQ ID NOs 1 to 29,000, preferably wherein the assay is characterised as having an AUC of at least 0.83, and more preferably wherein the panel of one or more CpGs comprises at least the CpGs identified in SEQ ID NOs 501 to 29,000 and identified at nucleotide positions 61 to 62;
[0320] 30. at least 28900 CpGs selected from the CpGs identified at nucleotide positions 61 to 62 in SEQ ID NOs 1 to 29,000, preferably wherein the assay is characterised as having an AUC of at least 0.84, and more preferably wherein the panel of one or more CpGs comprises at least the CpGs identified in SEQ ID NOs 101 to 29,000 and identified at nucleotide positions 61 to 62; or
[0321] 31. at least 29000 CpGs selected from the CpGs identified at nucleotide positions 61 to 62 in SEQ ID NOs 1 to 29,000, preferably wherein the assay is characterised as having an AUC of at least 0.84, and more preferably wherein the panel of one or more CpGs comprises at least the CpGs identified at nucleotide positions 61 to 62 in SEQ ID NOs 1 to 29,000.

[0322] In any of the described assays, the methylation status of the one or more CpGs in the panel is preferably determined by a β-value analysis, and the cancer is breast cancer or ovarian cancer. Preferably, the cancer is breast cancer.

[0323] In any of the above-described assays, the assay may be characterised as having a ROC AUC of 0.60 or more, 0.61 or more, 0.62 or more, 0.63 or more, 0.64 or more, 0.65 or more, 0.66 or more, 0.67 or more, 0.68 or more, 0.69 or more, 0.70 or more, 0.71 or more, 0.72 or more, 0.73 or more, 0.74 or more, 0.75 or more, 0.76 or more, 0.77 or more, 0.78 or more, 0.79 or more, 0.80 or more, 0.81 or more, 0.82 or more, 0.83 or more, 0.84 or more, 0.85 or more, 0.86 or more, 0.87 or more, 0.88 or more, 0.89 or more or 0.90 or more.

[0324] The invention also provides a variety of assays, each comprising any 1, 2, 3, 4, 5, 6, 7, 8, 9, 10 or more (or any range derivable therein) of a variety of steps and in no particular order, including methods of the following: measuring in a sample; analyzing a sample; assessing a sample; evaluating a sample; measuring nucleic acids in a sample; assessing nucleic acids in a sample; detecting nucleic acids in a sample; measuring methylation in nucleic acids in a sample; analyzing nucleic acids in a sample; assessing nucleic acids in a sample; measuring methylation at one or more CpG dinucleotides in a sample; detecting methylation at one or more CpG dinucleotides in a sample; assaying methylation at one or more CpG dinucleotides in a sample; assessing methylation at one or more CpG dinucleotides in a sample; measuring a methylation status in a sample; assaying a methylation status in a sample; detecting methylation status in a sample; determining methylation status in a sample; identifying methylation status in a sample; measuring one or more DNA methylation markers in a sample; assessing one or more DNA methylation markers in a sample; detecting one or more DNA methylation markers in a sample; measuring the presence of methylation at one or more markers in a sample; detecting the presence of methylation at one or more markers in a sample; assessing the presence of methylation at one or more markers in a sample; assaying the presence of one of more markers in a sample; measuring one or more DNA methylation markers in a sample but excluding the measuring of one or more other DNA methylation markers in the sample; assessing one or more DNA methylation markers in a sample but excluding the assessing of one or more other DNA methylation markers in the sample; analyzing one or more DNA methylation markers in a sample but excluding the analyzing of one or more other DNA methylation markers in the sample; detecting one or more DNA methylation markers in a sample but excluding the detecting of one or more other DNA methylation markers in the sample; measuring methylation status in nucleic acids from a sample from tissue from an individual other than tissue from the individual suspected of, or at risk for, being cancerous; detecting methylation status in nucleic acids from a sample from tissue from an individual other than tissue from the individual suspected of, or at risk for, being cancerous; analyzing methylation status in nucleic acids from a sample from tissue from an individual other than tissue from the individual suspected of, or at risk for, being cancerous; assessing methylation status in nucleic acids from a sample from tissue from an individual other than tissue from the individual suspected of, or at risk for, being cancerous; measuring methylation at one or more CpG dinucleotides in a sample but excluding the measuring of methylation at one or more CpG dinucleotides in the sample; assessing methylation at one or more CpG dinucleotides in a sample but excluding the assessing of methylation at one or more CpG dinucleotides in the sample; analyzing methylation at one or more CpG dinucleotides in a sample but excluding the analyzing of methylation at one or more CpG dinucleotides in the sample; detecting methylation at one or more CpG dinucleotides in a sample but excluding the detecting of methylation at one or more CpG dinucleotides in the sample; measuring methylation at one or more CpG dinucleotides in nucleic acids from a sample from tissue from an individual other than tissue from the individual suspected of, or at risk for, being cancerous; detecting methylation at one or more CpG dinucleotides in nucleic acids from a sample from tissue from an individual other than tissue from the individual suspected of, or at risk for, being cancerous; analyzing methylation at one or more CpG dinucleotides in nucleic acids from a sample from tissue from an individual other than tissue from the individual suspected of, or at risk for, being cancerous; assessing methylation at one or more CpG dinucleotides in nucleic acids from a sample from tissue from an individual other than tissue from the individual suspected of, or at risk for, being cancerous; treating an individual for cancer when the individual has been determined to have a methylation status at one or more methylation markers; treating an individual for cancer when the individual has been determined to have methylation at one or more CpG dinucleotides;
[0325] wherein any of the aforementioned methods, or any other methods encompassed by the disclosure, may comprise any one or more of the following method steps:
[0326] measuring methylation status, wherein the measuring identifies the methylation status of one or markers from nucleic acids in a sample;
[0327] measuring methylation status, wherein the measuring identifies the presence of one or more markers from nucleic acids in a sample;
[0328] measuring the presence of one or more methylation markers from a sample;
[0329] providing DNA from a sample;
[0330] providing nucleic acids from a sample;
[0331] determining whether one or more methylation markers from nucleic acids from a sample are methylated;
[0332] measuring whether one or more methylation markers from nucleic acids from a sample are methylated;
[0333] performing a sequencing step on nucleic acids from a sample;
[0334] determining a sequence of nucleic acids from a sample;
[0335] performing bisulphite conversion on one or more markers;
[0336] performing bisulphite conversion on one or more CpG dinucleotides;
[0337] hybridizing DNA to an array comprising probes capable of determining methylated versus non-methylated markers;
[0338] hybridizing DNA to an array comprising probes capable of determining methylated versus non-methylated CpG dinucleotides;
[0339] hybridizing DNA to an array comprising probes capable of discriminating between methylated and non-methylated markers;
[0340] hybridizing DNA to an array comprising probes capable of discriminating between methylated and non-methylated CpG dinucleotides;
[0341] performing an amplification step on sequence from nucleic acids from a sample;
[0342] performing an amplification step on sequence from nucleic acids using methylation-specific primers;
[0343] performing amplification of sequence comprising one or more regions suspected of having methylation or in need of determination of a methylation status;
[0344] performing PCR on sequence comprising one or more regions suspected of having methylation or in need of determination of a methylation status;
[0345] performing a capturing step;
[0346] performing a binding step;
[0347] performing a purification step;
[0348] performing a capturing step comprising binding of polynucleotides comprising one or more methylation markers to binding molecules specific to the one or more methylation markers and collecting complexes thereof;
[0349] stratifying the grade of a cancer;
[0350] determining the risk of cancer;
[0351] determining the risk of recurrence of cancer;
[0352] obtaining a sample from an individual;
[0353] obtaining DNA from a sample from an individual;
[0354] administering a treatment to an individual;
[0355] providing DNA from a sample;
[0356] determining whether one or more methylation markers from a panel of methylation markers comprises a specific sequence; and/or
[0357] obtaining data that identifies whether each one of a group of methylation markers from a panel comprises a specific sequence.

[0358] Moreover, in some aspects of the invention, an individual who is administered a therapy or treatment has been subjected to any of the methods and steps described herein.

[0359] Described herein are assays that utilise a statistically robust panel of one or more CpGs whose methylation status can be determined to provide a reliable prediction of the presence or development of cancer in an individual. By determining the methylation status of each CpG within the panel of one or more CpGs, a cancer index value may be derived thus enabling stratification of individuals according to their risk of developing cancer or of having cancer, particularly breast and/or ovarian cancer, with statistically robust sensitivity and specificity. The skilled person would understand that the methylation status of each CpG within a panel of one or more CpGs can be determined by any suitable means in order to thereby derive the cancer index value. Any one method, or a combination of methods, may be used to determine the methylation status of each CpG within a panel of one or more CpGs.

[0360] Various exemplary methods for determining the methylation status of each CpG within a panel of one or more CpGs are described herein. For example, in one method a percent methylated reference (PMR) value of a CpG may be determined. In another method the methylation β-values of a CpG may be determined. Different mechanisms may be employed to determine specific values depending on the circumstances, such as PCR-based mechanisms or array-based mechanisms.

### Cancer Index Values as Diagnostic and Risk Assessment Tools

[0361] In any of the assays described herein, the assessment of the presence, absence or development of cancer in an individual is based on the cancer index value of the individual at the time of testing.

[0362] As explained herein, using panels of the specific CpGs disclosed herein, cancer index values can be established which correspond with cancer negative samples, because they are based on values derived from individuals known to be cancer negative and obtained from samples from an anatomical site other than the breast or ovary, such as the cervix, the vagina, the buccal area, blood and/or urine, preferably a cervical liquid-based cytology sample and most preferably a cervical smear sample. Similarly, using panels of the specific CpGs disclosed herein, cancer index values can be established which correspond with cancer positive samples, because they are based on values derived from samples from an anatomical site other than the breast or ovary, as noted above, from tissue samples from individuals known to be cancer positive. A user can then apply these cancer index values to assess the presence, absence or development of cancer in any test individual whose cancer status is required to be tested. As also explained herein, the assays of the invention are capable of being performed with a high degree of statistical accuracy.

[0363] As explained herein, the described assays particularly relate to the assessment of the presence, absence or development of breast cancer and/or ovarian cancer.

[0364] A skilled person will readily appreciate that a cancer index value provides a value that indicates a “likelihood” or “risk” or “prediction” of any of the assays of the invention correctly assessing the presence, absence or development of cancer in an individual. This is because the assessment is based upon a correlation between DNA methylation profiles of tissue samples and individual disease status. Nevertheless, as demonstrated by data set out in the Examples and elsewhere herein, the assays of the invention provide such correlations with high statistical accuracy, thus providing the skilled person with a high degree of confidence that the cancer index value which is determined for any test individual whose cancer status is required to be tested will provide an accurate correlation with actual disease status for the individual.

[0365] In the context of the present invention, “likelihood”, “risk” and “prediction” may be used synonymously with each other.

[0366] Any references herein to sequences, genomic sequences and/or genomic coordinates are derived based upon Homo sapiens (human) genome assembly GRCh37 (hg19). The skilled person would understand variations in the nucleotide sequences of any given sequence, may exist due to sequencing errors and/or variation between individuals.

[0367] The assay of the invention represents a ‘prediction’ because any cancer index value (WID-BC-Index) derived in accordance with the invention is unlikely to be capable of diagnosing every individual as having or not having cancer with 100% specificity and 100% sensitivity. Rather, depending on the cancer index cutpoint threshold applied by the user for positively predicting the presence of cancer in an individual, the false positive and false negative rate will vary. In other words, the inventors have discovered that the assays of the invention can achieve variable levels of sensitivity and specificity for predicting the presence, absence or development of cancer, as defined by receiver operating characteristics, depending on the cancer index cutpoint threshold chosen and applied by the user. Such sensitivity and specificity can be seen from the data disclosed herein to be achievable at high proportions, demonstrating accurate and statistically-significant discriminatory capability.

[0368] Similarly, cancer index values which have been pre-determined to correlate with specific cancer phenotypes, such as the presence or absence of cancer, have been defined with a high level of statistical accuracy as explained further herein.

[0369] Assessing the ‘development’ of cancer in the context of the invention may refer to assessing whether an individual is likely or unlikely to develop cancer. The inventors have shown that the CpGs assayed in order to derive the cancer index value of the assays of the invention are representative of the cells within normal tissue from an anatomical site other than the breast or ovary, such as the cervix, the vagina, the buccal area, blood and/or urine, preferably a cervical liquid-based cytology sample and most preferably a cervical smear sample. As such, cells from these tissues canact as a surrogate for breast and/or ovarian cells that may transform to cancer. In more detail, the cancer index value derived in accordance with the present invention has been show to progressively increase in samples from a normal cervix, vagina, buccal area, blood and/or urine preferably cervical liquid-based cytology and most preferably derived from a cervical smear sample, in healthy women, to samples from corresponding tissue in women with a BRCA1 and/or BRCA2 germline mutation. The cancer index value derived in accordance with the invention has been show to further progressively increase in normal breast tissue surrounding a cancer lesion, and increase further in the cancer lesion itself, and increase yet further in a triple negative breast cancer lesion. This indicates that the breast cancer index value, determined in accordance with the present invention, is capable of identifying individuals that may be at risk of developing cancer, and are thereby pre-disposed to breast cancer or ovarian cancer, preferably breast cancer. Thus, assessing the development of cancer in accordance with the assays of the invention may refer to assessing an increased or decreased likelihood of cancer development, particularly breast cancer and ovarian cancer, preferably breast cancer. Assessing of the development of cancer in accordance with the assays of the invention may refer to assessing progression or worsening of a pre-existing cancer lesion in an individual. Assessment of the development of cancer in accordance with the assays of the invention may refer to predicting the likelihood of recurrence of cancer.

[0370] In any of the assays described herein, the step of assessing the presence or development of cancer in an individual based on a cancer index value may involve the application of a threshold value. Threshold values can provide a risk-based indication of an individual's cancer status, whether that is cancer positive, or cancer negative. Threshold values can also provide a means for identifying whether the cancer index value is intermediate between a cancer positive value and a cancer negative value. As explained herein, the cancer index value may be dynamic and subject to change depending upon genetic and/or environmental factors. Accordingly, the cancer index value may provide a means for assessing and monitoring cancer development. Cancer index values may therefore indicate at least a low risk or a high risk that the individual has a cancer positive status or has a status that is indicative of the development of cancer. If the cancer index value of an individual is determined by the assays of the invention at two or more time points, an increase or decrease in the individual's cancer index value may indicate an increased or decreased risk of the individual having or developing cancer, particularly breast and/or ovarian cancer, preferably breast cancer.

[0371] Throughout the disclosure herein the terms “threshold value”, “cutpoint”, and “cutpoint threshold” are to be considered synonymous and interchangeable.

[0372] As explained further herein any assay of the invention is an assay for assessing the presence, absence or development of cancer in an individual. The types of cancer are set out further herein. As explained further herein, the assays of the invention provide means for assessing whether an individual is at risk of having or developing cancer based on specific cutpoint thresholds. Such risk assessments can be provided with a high degree of confidence based on the statistical parameters which characterise the assay. Thus in any of the assays described herein involving cancer index cutpoint thresholds, the cutpoint threshold may be used for risk assessment purposes. Equally, in any of the assays described herein involving cancer index cutpoint thresholds, the cutpoint threshold value may be used to specify whether or not an individual has cancer as a pure diagnostic test. Again, such diagnostic tests can be provided with a high degree of confidence based on the statistical parameters which characterise the assay. Accordingly, in any assay described herein which specifies that a cancer index value for the individual is a specific value or more, or is “about” a specific value or more, the individual may be assessed as having cancer. In any assay described herein which specifies that a cancer index value for the individual is less than a specific value, or is less than “about” a specific value, the individual may be assessed as not having cancer. The term “about” is to be understood as providing a range of +/−5% of the value.

[0373] Accordingly, any assay of the invention is an assay for assessing the presence, absence or development of cancer in an individual, the assay comprising:
[0374] e. providing a sample which has been taken from the individual, the sample comprising a population of DNA molecules;
[0375] f. determining in the population of DNA molecules in the sample the methylation status of a panel of one or more CpGs selected from a panel of CpGs identified at nucleotide positions 61 to 62 in SEQ ID NOs 1 to 29,000;
[0376] g. deriving a cancer index value based on the methylation status of the one or more CpGs in the panel; and
[0377] h. assessing the presence, absence or development of cancer in the individual based on the cancer index value;

[0378] wherein the assay is characterised as having an area under the curve (AUC) of 0.60 or more as determined by receiver operating characteristics (ROC).

[0379] Such an assay may be performed in accordance with any of the methods disclosed and defined herein.

[0380] As explained further herein, any assay of the invention for assessing the presence, absence or development of cancer in an individual may alternatively be referred to as an assay for stratifying an individual in accordance with their cancer status.

[0381] Accordingly, any assay of the invention is an assay for stratifying an individual for the presence, absence or development of cancer in an individual, the assay comprising:
[0382] a. providing a sample which has been taken from the individual, the sample comprising a population of DNA molecules;
[0383] b. determining in the population of DNA molecules in the sample the methylation status of a panel of one or more CpGs selected from a panel of CpGs identified at nucleotide positions 61 to 62 in SEQ ID NOs 1 to 29,000;
[0384] c. deriving a cancer index value based on the methylation status of the one or more CpGs in the panel; and
[0385] d. stratifying the individual for the presence, absence or development of cancer based on the cancer index value;

[0386] wherein the assay is characterised as having an area under the curve (AUC) of 0.60 or more as determined by receiver operating characteristics (ROC).

[0387] Such an assay may be performed in accordance with any of the methods disclosed and defined herein.

[0388] Accordingly, any assay of the invention is an assay for stratifying an individual for cancer, the assay comprising:
[0389] a. providing a sample which has been taken from the individual, the sample comprising a population of DNA molecules;
[0390] b. determining in the population of DNA molecules in the sample the methylation status of a panel of one or more CpGs selected from a panel of CpGs identified at nucleotide positions 61 to 62 in SEQ ID NOs 1 to 29,000;
[0391] c. deriving a cancer index value based on the methylation status of the one or more CpGs in the panel; and
[0392] d. stratifying the individual for cancer based on the cancer index value;

[0393] wherein the assay is characterised as having an area under the curve (AUC) of 0.60 or more as determined by receiver operating characteristics (ROC).

[0394] Such an assay may be performed in accordance with any of the methods disclosed and defined herein.

[0395] The cancer index value may be derived by any suitable means. Preferably, the cancer index value may be derived by assessing the methylation status of the one or more CpGs in the panel selected from a panel of CpGs identified at nucleotide positions 61 to 62 in SEQ ID NOs 1 to 29,000, in a sample provided from an individual. The methylation status of the CpGs may be determined by any suitable means. For example, in any of the assays described herein the step of determining the methylation status of each CpG in the panel of one or more CpGs may comprise:
[0396] a. performing a sequencing step to determine the sequence of each CpG;
[0397] b. hybridising DNA to an array comprising probes capable of discriminating between methylated and non-methylated forms of the CpGs and applying a detection system to the array so as to determine the methylation status of each CpG; and/or
[0398] c. performing a PCR step using methylation-specific primers, wherein the methylation status of the CpG is determined by the presence or absence of a PCR product.

[0399] Preferably, the the step of determining in the population of DNA molecules in the sample the methylation status of a panel of one or more CpGs further comprises determining a (3 value of each CpG. Deriving the cancer index value may involve providing a methylation β-value data set comprising the methylation β-values for each CpG in the panel of one or more CpGs. Optionally deriving the cancer index value may also involve estimating the fraction of contaminating DNA (e.g. immune cell DNA) within the DNA provided from a sample.

[0400] DNA may be DNA originating from a particular source organism, tissue or cell type. Preferably the contaminating DNA originates from one or more different cell types to one or more cell types of interest. A cell type of interest may particularly be an epithelial cell. In some aspects of the invention, it may be preferable to estimate the fraction of contaminating DNA after the step of providing a sample which has been take from an individual. The assays described herein may optionally involve estimating a contaminating DNA fraction within DNA in the sample by any suitable means. Preferably, the contaminating DNA fraction for the sample is estimated via any suitable bioinformatics analysis tool. A bioinformatics analysis tool that may be used to estimate a contaminating DNA fraction may be EpIDISH. As described herein, it may be desirable to estimate the fraction of contaminating DNA from the one or more cell types that are different to the one or more cell types of interest because the cancer index value used for predicting the presence or development of cancer in an individual may, in some instances, only be reliably derived from determining the methylation status of a set of CpGs from DNA of a particular cell type of interest. Particularly, methylation status beta-values may differ in the one or more cell types of interest within a sample relative to methylation status beta-values in contaminating DNA from different cell types within the same sample. Thus, the derived cancer index value may in some instances have a decreased predictive power without estimating and controlling for the contaminating DNA fraction within the DNA provided from the sample. In assays of the invention that involve estimating the fraction of contaminating DNA and accordingly controlling for said contaminating DNA, it is preferable to estimate an immune cell DNA fraction within the DNA provided from the sample. In particular assays of the invention, wherein the individual has an immune cell contamination of over 50% (i.e. wherein more than 50% of the DNA in the sample is deemed to be derived from immune cells), the assay may preferably involve controlling for the immune cell contamination by deriving the cancer index, in accordance with the invention, solely from the DNA molecules derived from epithelial cells.

[0401] Any of the assays described herein comprising a step of deriving a cancer index value based on the methylation status of the one or more CpGs in the panel may further comprise applying an algorithm to the methylation beta-value dataset to obtain the cancer index value. Preferably, in any of the assays described herein, the step of deriving the cancer index value based on the methylation status of the panel of CpGs comprises providing a methylation beta-value data set comprising the methylation beta-values for each CpG in the panel and applying an algorithm to the methylation beta-value data set to obtain the cancer index value.

[0402] In any of the assays described herein, the step of deriving the cancer index value based on the methylation status of the one or more CpGs in the panel comprises:
[0403] a. providing a methylation β-value data set comprising the methylation β-values for each CpG in the panel;
[0404] b. providing a mathematical model capable of generating the cancer index from the methylation β-value data set; and
[0405] c. applying the mathematical model to the methylation β-value data set, thereby generating the cancer index.

[0406] In any of the assays described herein, the cancer index value may be calculated by any suitable mathematical model such as an algorithm or formula. Preferably, the cancer index value is termed Women's risk Identification for Breast Cancer Index (WID-BC-index) and wherein the mathematical model which is applied to the methylation β-value data set to generate the cancer index is calculated by an algorithm according to the following formula:

$$WID - BC - index = {\sum }_{i = 1}^{n} \frac{μ - {w}_{i} {β}_{i}}{σ}$$

[0407] wherein:
[0408] a. β₁, . . . , βₙ are methylation beta-values (between 0 and 1);
[0409] b. w₁, . . . , w_{29,000} are real valued coefficients;
[0410] c. μ and σ are real valued parameters used to scale the index; and
[0411] d. n refers to the number of CpGs in the set of test CpGs;

[0412] preferably wherein the cancer is ovarian cancer.

[0413] In any of the assays described herein, the WID-BC-index algorithm applies real value coefficients inferred by initially training on a dataset (this dataset in the exemplary embodiments of the invention described in the Examples consisted of 217 breast cancer cases and 572 controls) to fit a ridge classifier using the R package glmnet with a mixing parameter value of alpha=0 (ridge penalty) and binomial response type. Ten-fold cross-validation was used internally by the cv.glmnet function in order to determine the optimal value of the regularisation parameter lambda. The beta values from n CpGs for individual ν, β₁^{ν}, . . . , βₙ^{ν}, are used as inputs to the ridge classifier. The coefficients w₁, . . . , wₙ are obtained from the fitted model. The following quantity was computed for each individual v in the training set:

$${x}_{v} = {\sum }_{i = 1}^{n} {w}_{i} {β}_{i}^{v}$$

[0414] Any suitable real valued coefficients may be applied to the WID-BC-Index in any of the assays described herein.

[0415] The value of the parameters μ and σ are given by the mean and standard deviation of x_{ν} in the training dataset respectively.

[0416] Thus, any suitable μ and σ real valued parameters may be applied to the WID-BC-index in any of the assays described herein. Any suitable training data set may be applied to the assays described herein in order to infer real value parameters and coefficients that can subsequently be applied to the WID-BC-index formula according to the present invention. Exemplary ways of utilising a training dataset in accordance with the present invention are further described in the ‘Statistical Analyses for Classifier Development’ section of the Materials and Methods section of the Examples.

[0417] Exemplary μ and σ real valued parameters are provided in Table 1 for CpG subsets identified in SEQ ID NOs 1 to 29,000. These real valued parameters may be applied to any of the assays described herein wherein the real parameters correspond to any one of the sets of CpGs identified in SEQ ID NOs 1 to 29,000 and set out in the left hand column of Table 1.

TABLE 1
Exemplary μ and σ real valued parameters are provided in
Table 1 for CpG subsets identified in SEQ ID NOs 1 to 29,000

| | mu | sigma |
|---|---|---|
| 1-100 | 1.802459586 | 1.656270817 |
| 1-500 | 2.616861104 | 2.85547826 |
| 1-1000 | 0.706240996 | 3.76930138 |
| 1-2000 | −2.751311174 | 4.334044068 |
| 1-3000 | −3.389185274 | 4.476544913 |
| 1-4000 | −5.032110623 | 4.623163512 |
| 1-5000 | −6.09198663 | 4.757014538 |
| 1-6000 | −6.334609741 | 4.801754622 |
| 1-7000 | −6.464186221 | 4.829523686 |
| 1-8000 | −6.182002383 | 4.851226293 |
| 1-9000 | −6.284348293 | 4.789306299 |
| 1-10000 | −6.328704187 | 4.960804433 |
| 1-11000 | −5.919447725 | 4.971132834 |
| 1-12000 | −5.312253693 | 4.979966579 |
| 1-13000 | −5.295876334 | 4.984380015 |
| 1-14000 | −5.593824433 | 4.991011031 |
| 1-15000 | −5.754919225 | 4.995382643 |
| 1-16000 | −5.615422764 | 4.99765114 |
| 1-17000 | −5.516580287 | 5.000467792 |
| 1-18000 | −5.54155042 | 5.002885671 |
| 1-19000 | −5.473472369 | 4.925317756 |
| 1-20000 | −5.650564107 | 5.006168191 |
| 1-21000 | −5.547857121 | 5.007066548 |
| 1-22000 | −5.478733023 | 5.007952537 |
| 1-23000 | −5.355319817 | 4.84946768 |
| 1-24000 | −5.518865053 | 5.008154299 |
| 1-25000 | −5.50792209 | 5.008628153 |
| 1-26000 | −5.445141511 | 5.008685384 |
| 1-27000 | −5.384804459 | 4.92985421 |
| 1-28000 | −5.440152727 | 5.008757086 |
| 1-29000 | −5.373148368 | 4.851176995 |

[0418] Exemplary w₁, . . . , wₙ real value coefficients are provided below for the CpGs identified at positions 61 to 62 in SEQ ID NOs 1 to 29,000. These real value coefficients may be applied to any of the assays described herein wherein the real parameters correspond to any one of the sets of CpGs identified in SEQ ID NOs 1 to 29,000 wherein the 29,000 real value coefficients below in turn correspond to the CpGs in turn identified at nucleotide positions 61 to 62 in SEQ ID NOs 1 to 29,000. Accordingly, the listed coefficients are presented below in numerical order corresponding respectively to the CpGs identified in SEQ ID NOs 1 to 5000. Thus the first number below corresponds to SEQ ID NO 1, the second number corresponds to SEQ ID NO 2 etc. The exemplary real value coefficients are as follows:

[0419] −0.87359, −0.5494, 0.54381, −0.50414, 0.49734, 0.49357, −0.49285, −0.48972, −0.48553, −0.48535, −0.48194, 0.47108, 0.46888, −0.46692, −0.46373, 0.44945, 0.44607, 0.44483, −0.4445, −0.43581, 0.43427, −0.42868, −0.42193, −0.41962, −0.41856, 0.4157, −0.41567, −0.41257, 0.4117, −0.4116, 0.40783, 0.40778, −0.40755, −0.40554, −0.40288, −0.40278, 0.39996, −0.39728, 0.39603, −0.39297, −0.38925, 0.38822, −0.38364, 0.38178, 0.37925, −0.378, −0.37623, 0.37542, −0.3744, 0.37397, −0.37305, 0.37273, 0.37068, 0.37045, 0.37009, −0.36972, −0.36961, −0.36945, −0.36724, −0.36398, 0.36311, −0.36082, 0.3598, 20−0.35824, −0.35811, −0.35792, 0.35687, −0.35512, −0.35408, 0.3535, 0.35228, −0.3505, −0.34865, 0.34717, 0.34699, −0.34648, 0.34503, 0.34366, −0.34357, 0.34304, −0.34251, 0.3424, −0.34179, 0.34102, −0.33907, −0.33761, 0.33675, 0.33637, −0.33472, 0.33471, −0.33468, 0.33438, −0.33238, −0.33238, 0.33026, 0.32991, 0.32796, −0.32787, −0.32629, 0.32606, −0.32586, 0.32488, 0.32471, 0.32266, −0.32183, 0.32012, 0.3191, 0.31814, −0.31771, −0.31753, −0.31702, 0.31531, −0.31478, 0.31455, 0.31367, 0.31353, 0.31249, −0.3123, 0.31173, 0.31107, 0.31086, −0.31064, −0.3105, 0.30944, 0.30912, 0.3087, 0.30839, 0.30811, −0.30786, 0.30778, 0.30776, 0.3074, −0.30639, 0.30501, −0.30328, −0.3024, 0.30206, 0.3013, 0.30072, −0.30012, 0.29941, 0.29912, −0.29887, −0.29879, −0.29754, −0.29647, −0.29596, −0.29591, 0.29463, −0.29439, −0.29397, 0.29336, 0.29205, −0.292, 0.29188, 0.29107, −0.29086, −0.29073, −0.29038, 0.28998, 0.28856, 0.28828, −0.28747, 0.2872, 0.2871, 0.2866, −0.28644, 0.28575, −0.2851, 0.28403, −0.28358, −0.28296, −0.28251, 0.28237, 0.28168, 0.28139, 0.28066, −0.28024, 0.27997, −0.2797, 0.27967, −0.2792, −0.27914, −0.27909, −0.27868, −0.2785, 0.27809, −0.27802, 0.27793, 0.27737, −0.27727, −0.27702, 0.27655, 0.27643, −0.27638, 0.27619, 0.27551, 0.27488, 0.27453, −0.27421, −0.27417, −0.27376, 0.27361, 0.2736, 0.27353, −0.27343, −0.27254, 0.27171, 0.2717, −0.27114, −0.27107, −0.27034, −0.27017, 0.27014, −0.26948, 0.26943, −0.269, −0.26841, −0.26786, 0.26761, 0.26744, −0.267, −0.26697, −0.26642, −0.26615, −0.26608, 0.26563, 0.26557, 0.26505, 0.26499, 0.26497, −0.26496, −0.26462, 0.26447, 0.26437, −0.26409, −0.26327, −0.26177, −0.26173, −0.26083, 0.2608, 0.26074, −0.26072, −0.26014, 0.2597, −0.25905, −0.25884, −0.25865, 0.25851, 0.2585, −0.25787, −0.25671, −0.25653, −0.2564, −0.25577, −0.25526, −0.25525, 0.25524, −0.25485, 0.25461, 0.25438, −0.25385, 0.25365, 0.25343, −0.25328, −0.25328, −0.25323, −0.25311, 0.25299, 0.25278, 0.25267, 0.25242, −0.25236, −0.25234, −0.25209, 0.25192, 0.25182, 0.25177, 0.25162, −0.25162, −0.25159, 0.25153, 0.25132, 0.25099, 0.25073, −0.25069, 0.25036, 0.24998, 0.2493, 0.24908, −0.24889, 0.24834, −0.24832, 0.24832, −0.24798, 0.24781, 0.24737, 0.24696, −0.24642, 0.24612, 0.24609, −0.24604, 0.24598, 0.24594, 0.24558, 0.24545, 0.24542, 0.24449, 0.24448, 0.24358, 0.24319, −0.24314, 0.24304, 0.24303, 0.24295, 0.24293, 0.24278, −0.24273, 0.24245, 0.24238, 0.24201, 0.24176, 0.24168, −0.24164, 0.24153, −0.2415, 0.2409, 0.24067, −0.24013, −0.24012, −0.23969, −0.23938, −0.23882, −0.23852, 0.23847, 0.23834, −0.23825, −0.23818, 0.23814, −0.23786, 0.23785, 0.23783, −0.23711, 0.23627, −0.23623, −0.23593, 0.23573, 0.23553, 0.23537, 0.23518, −0.23485, −0.23478, −0.23467, 0.23428, −0.23424, 0.23402, −0.23399, 0.2337, −0.23338, −0.23334, 0.23304, −0.23299, 0.23289, −0.23259, 0.23241, 0.23237, 0.23215, 0.23209, −0.23194, −0.23084, 0.23022, 0.22982, 0.22933, 0.22917, 0.22904, 0.22867, 0.22836, −0.22826, −0.22823, 0.22821, −0.22818, 0.22806, 0.22796, 0.22759, −0.22742, 0.2274, 0.22691, −0.22661, −0.2266, −0.22658, 0.22656, 0.22641, −0.22636, −0.22635, −0.22617, 0.2261, −0.22609, −0.22603, 0.22583, 0.2258, 0.2258, 0.22559, −0.22509, −0.22494, 0.22465, −0.22437, −0.22429, 0.22403, 0.22366, −0.22355, 0.2233, 0.22326, −0.22325, −0.22313, −0.22309, −0.22308, 0.22301, 0.22293, 0.22252, −0.22249, 0.22187, −0.2218, −0.22166, −0.22135, 0.22123, 0.22117, −0.22105, −0.221, −0.22096, 0.22095, −0.22089, −0.2207, −0.22067, −0.22059, 0.2205, 0.22004, −0.21995, −0.21939, −0.2192, 0.21901, −0.21884, −0.21876, 0.21868, −0.21845, 0.21821, 0.21818, 0.21791, −0.2177, −0.21745, 0.2173, −0.21726, −0.21692, −0.21679, −0.21674, 0.21669, −0.21667, −0.21666, 0.21648, −0.21644, −0.21641, 0.21641, 0.21604, −0.21602, −0.21602, 0.21573, 0.2155, 0.21532, −0.21531, −0.21528, −0.21504, −0.21499, −0.21465, −0.21458, 0.21427, −0.21417, 0.21385, −0.21296, −0.21259, 0.21206, −0.21192, 0.2118, 0.21161, −0.21147, −0.21124, −0.21113, −0.21113, −0.21079, 0.20989, 0.20979, 0.20965, 0.20954, 0.20917, −0.20893, 0.20887, −0.20874, 0.20873, −0.20862, −0.20854, 0.20836, 0.20828, 0.20826, 0.20824, −0.20821, 0.20816, −0.20803, 0.20801, 0.20767, 0.20751, 0.20747, −0.20736, −0.20721, −0.20717, −0.20702, −0.20701, −0.20681, −0.20678, 0.2067, −0.20657, 0.20657, 0.20651, −0.20611, 0.20608, 0.20592, 0.20589, 0.20569, −0.20557, 0.20509, −0.20509, 0.20495, −0.20494, −0.20491, 0.20472, 0.20452, −0.20423, 0.20399, −0.20393, −0.20376, −0.20374, 0.20355, −0.20351, 0.20342, 0.20325, −0.20322, −0.20318, 0.20318, 0.20298, −0.20281, −0.2028, −0.20258, 0.20242, 0.20221, 0.20212, 0.20204, 0.20196, 0.2018, −0.20157, 0.20065, −0.20063, −0.20059, −0.20053, −0.20053, −0.2002, 0.19999, −0.19973, −0.19965, 0.19952, −0.19914, −0.19905, −0.19864, 0.1985, −0.19845, −0.19816, 0.19784, 0.19772, 0.19771, 0.19769, 0.19722, 0.19704, 0.19702, −0.19688, 0.19665, 0.19661, 0.19655, 0.19649, −0.19647, −0.19626, −0.19611, −0.19534, −0.19533, 0.19524, 0.19522, 0.19451, 0.19425, −0.19412, −0.19406, −0.19401, 0.19388, 0.19371, 0.19365, −0.19361, −0.19349, 0.19311, 0.19304, 0.19288, −0.19275, 0.19268, 0.19262, 0.19249, −0.19209, 0.19208, −0.19182, 0.19162, 0.19158, −0.19154, 0.19153, 0.19125, −0.19117, −0.19079, −0.19038, 0.19022, −0.1901, −0.19007, −0.19005, −0.19004, −0.18981, −0.1898, 0.18962, −0.18932, 0.18931, −0.1892, −0.18918, 0.18898, −0.18887, −0.18881, 0.18878, −0.18861, 0.18834, 0.1882, −0.18819, 0.18795, 0.18783, −0.1878, −0.18753, 0.18737, −0.18708, 0.18694, −0.18672, 0.18672, 0.18663, −0.18655, 0.18643, 0.18638, 0.18637, −0.18626, 0.1862, 0.1861, −0.1861, −0.18609, 0.18603, 0.18577, −0.18541, −0.1852, 0.18516, −0.18511, 0.18493, 0.18472, −0.18465, −0.18441, 0.18426, 0.18422, 0.18405, −0.18403, −0.18386, −0.18367, 0.18359, −0.18355, −0.18343, −0.18342, −0.18336, −0.18283, 0.18278, 0.18256, 0.1825, 0.1824, −0.18236, −0.18235, 0.18233, 0.18232, 0.18209, −0.18208, 0.18203, 0.18198, 0.18194, −0.18187, −0.18172, 0.18161, −0.1816, −0.18153, 0.18125, 0.18121, 0.18119, 0.18118, −0.18102, −0.18095, −0.18078, −0.18067, 0.18057, 0.18056, 0.18055, −0.18049, 0.1804, 0.18013, −0.17996, −0.17991, −0.17991, 0.1799, −0.17988, 0.17975, 0.17971, −0.17959, −0.17953, 0.17929, −0.17925, 0.17919, −0.17919, 0.17908, −0.17903, 0.17889, 0.17887, 0.17872, −0.17868, −0.17866, 0.17865, −0.17823, 0.17819, 0.17811, −0.17806, 0.17803, 0.17799, 0.1779, 0.17755, −0.17747, 0.17709, −0.17708, 0.17691, −0.17663, 0.1764, −0.17635, −0.17613, −0.17609, −0.1759, −0.17584, 0.17561, 0.17552, −0.17543, −0.17537, 0.17534, −0.17511, −0.17504, 0.17492, 0.17468, 0.17465, 0.17461, 0.17448, 0.17419, 0.17415, −0.17414, −0.17403, 0.1738, −0.17358, 0.17349, 0.17322, 0.17319, −0.17314, 0.17308, 0.17307, 0.17299, 0.17288, 0.17271, −0.1727, −0.17268, −0.17267, −0.1723, −0.17225, 0.1722, −0.1721, 0.17206, 0.17202, 0.17201, −0.17193, 0.17177, 0.1717, −0.17169, 0.17168, 0.17157, −0.17152, 0.17149, 0.17124, 0.17121, 0.17117, −0.17113, −0.17113, −0.17112, −0.17111, 0.17099, 0.17096, −0.1709, 0.17086, −0.17077, 0.17075, 0.17058, −0.17048, −0.17038, 0.17037, 0.1703, 0.17029, 0.17028, −0.17013, 0.16995, −0.16991, −0.16988, −0.16985, −0.16981, 0.16972, 0.16956, 0.16954, −0.16951, −0.16943, 0.16938, −0.16925, 0.16911, −0.16908, 0.16899, 0.16871, 0.1687, 0.16856, 0.16853, 0.16849, 0.16843, −0.16825, 0.16809, 0.16808, −0.16807, 0.16792, −0.16787, 0.16779, −0.16764, 0.16755, −0.16752, 0.16745, 0.16733, 0.1672, 0.1671, −0.16709, −0.16701, 0.16699, 0.16696, −0.16696, −0.1669, 0.16679, −0.16653, 0.16653, −0.16646, −0.16642, −0.16636, −0.16633, −0.16628, −0.16625, 0.16617, −0.16605, 0.16595, −0.16582, −0.16562, −0.16558, 0.16551, 0.16549, −0.16546, −0.16537, −0.16525, 0.16525, −0.16522, −0.16507, 0.16491, 0.16491, −0.16484, −0.16476, 0.16474, 0.16466, −0.16461, −0.16448, 0.16447, 0.16433, −0.1643, −0.16409, 0.16404, 0.16389, −0.16381, −0.1636, −0.16357, −0.1635, −0.16338, −0.16333, 0.16324, 0.16323, 0.1632, −0.16289, −0.16286, 0.16284, 0.16284, −0.16283, −0.16256, 0.16254, 0.1625, −0.16238, 0.16217, −0.16216, 0.16207, 0.16198, 0.16194, −0.16193, 0.1619, −0.16185, 0.16178, 0.16175, 0.16175, 0.16171, −0.1617, −0.16169, −0.16164, −0.16159, 0.16148, 0.16148, 0.16133, −0.1613, −0.16098, 0.16078, −0.16071, 0.16063, −0.16049, 0.16048, −0.16046, 0.16033, −0.16032, −0.16016, 0.16002, −0.15985, 0.15977, 0.15974, 0.15969, −0.15969, 0.15962, 0.15961, −0.1595, 0.15944, −0.15942, −0.1594, 0.15939, 0.15928, −0.15926, −0.15913, −0.15901, −0.15885, 0.15883, 0.15878, 0.15872, −0.15869, −0.15867, 0.15865, 0.15853, 0.15849, 0.15849, 0.15847, 0.15842, 0.15836, −0.15835, −0.15835, 0.15833, 0.15829, 0.15821, 0.15819, −0.15809, −0.15793, −0.15786, 0.15782, 0.15779, −0.15777, −0.15774, 0.15771, 0.15755, −0.15746, −0.15743, 0.1574, 0.1573, 0.15725, −0.15723, −0.15723, 0.15721, −0.15715, −0.15713, 0.15705, −0.15697, 0.15679, −0.15675, 0.15675, 0.15674, 0.15674, −0.1567, 0.15652, −0.15651, −0.15623, 0.15618, −0.15613, −0.15606, 0.15595, 0.15575, 0.15574, 0.15571, 0.1557, −0.15555, −0.15555, 0.15548, −0.15548, 0.15547, 0.15537, 0.15526, −0.15515, 0.15511, 0.155, 0.15499, 0.15483, 0.1548, 0.15479, 0.15476, −0.15476, 0.15472, −0.15471, −0.15461, 0.1546, −0.15457, −0.15454, −0.15447, −0.15445, 0.15438, 0.1543, −0.15421, −0.15414, 0.15411, 0.15411, 0.15409, 0.15391, 0.15374, −0.1537, −0.15366, 0.15358, −0.15357, −0.15353, −0.15347, 0.15333, −0.15317, −0.15317, −0.15316, 0.15302, −0.15293, 0.15291, 0.15289, 0.15279, 0.15268, 0.15252, 0.15249, −0.15238, −0.15232, 0.15222, −0.15203, −0.15172, 0.1517, −0.1516, −0.15151, −0.15135, 0.15133, −0.15132, −0.15126, −0.15125, −0.15111, 0.15096, −0.15091, 0.1509, −0.15081, 0.15074, 0.15072, 0.15071, −0.15069, −0.15064, 0.15059, −0.15051, 0.15049, 0.15043, −0.15043, −0.15042, −0.15039, −0.15034, 0.15025, −0.15019, 0.15016, −0.15015, −0.1501, −0.15005, 0.15, 0.1499, 0.14987, 0.1498, −0.14979, −0.14971, −0.14968, −0.1496, −0.14958, 0.14956, 0.14944, 0.14942, −0.14936, −0.14934, 0.14925, 0.14923, −0.14919, −0.14918, 0.14911, −0.14906, 0.14883, −0.14859, 0.14856, 0.1485, −0.14847, 0.14845, 0.14831, 0.14824, −0.14823, 0.14822, 0.14803, −0.148, 0.148, −0.14797, 0.14792, 0.14791, 0.14784, 0.14783, 0.14774, −0.14768, −0.14763, −0.14746, 0.14746, −0.14745, −0.14742, 0.14738, −0.14734, −0.14733, 0.1473, −0.14719, −0.14716, −0.14713, 0.14705, 0.14696, −0.14695, −0.1469, 0.14673, −0.14663, −0.14661, −0.1466, −0.14659, 0.14657, 0.14639, −0.14638, −0.14633, 0.14621, 0.1461, 0.146, 0.14597, 0.14589, −0.14586, 0.14581, 0.14578, −0.1457, 0.14562, 0.14555, 0.1454, 0.1454, −0.14538, −0.14534, −0.14527, −0.14515, 0.1451, −0.14509, 0.14495, 0.14488, −0.14487, −0.14469, 0.14465, −0.14443, 0.1444, −0.14438, 0.14438, −0.14434, 0.1442, 0.14419, 0.14415, 0.14409, 0.14404, −0.14402, 0.144, −0.14397, 0.14365, −0.14363, −0.14356, −0.14354, 0.14346, −0.14331, −0.14328, 0.14318, 0.14315, 0.14299, −0.14286, −0.14279, 0.14279, 0.14276, −0.14276, 0.14274, −0.14266, 0.14261, −0.1426, 0.14254, 0.14251, −0.14248, 0.14229, −0.1422, 0.14207, −0.14203, 0.14198, 0.14194, 0.14184, 0.14184, 0.14181, 0.14169, 0.14167, 0.14165, 0.14163, 0.14161, −0.14151, −0.14146, 0.14145, 0.14138, 0.1412, 0.14117, 0.14115, 0.14111, −0.14109, −0.14107, 0.14104, 0.14099, 0.14097, −0.14092, 0.14083, −0.14079, 0.14061, 0.14058, −0.14056, 0.14054, 0.1405, 0.14046, −0.14042, 0.14037, 0.14033, 0.14031, 0.14023, −0.14019, −0.14003, −0.14003, −0.13999, 0.13996, −0.13971, −0.13968, −0.13961, 0.1396, 0.13958, 0.13945, −0.13937, −0.1393, −0.13929, 0.13928, −0.13924, 0.13901, −0.13901, −0.13889, −0.13882, 0.13873, 0.13871, −0.13865, −0.13861, 0.13855, −0.13854, 0.13851, −0.13851, 0.13843, 0.13838, 0.13835, −0.13833, 0.1383, −0.13828, −0.13825, −0.13823, 0.13823, 0.13787, −0.13786, −0.13785, 0.13783, 0.13771, −0.1376, 0.13755, 0.13755, −0.13754, 0.13752, 0.13748, 0.13746, −0.13738, 0.13726, 0.13721, −0.13721, −0.13719, 0.1371, −0.13704, 0.137, −0.13697, −0.13697, 0.13696, −0.13695, −0.13694, 0.13693, −0.13693, −0.13693, −0.13693, 0.13691, −0.1369, −0.13683, 0.13674, 0.13672, 0.13672, 0.13671, 0.13669, −0.13642, 0.13641, −0.13641, 0.13638, 0.13628, −0.13628, −0.13621, −0.13621, 0.13608, −0.13604, 0.13603, −0.13581, 0.13581, 0.13578, 0.13576, 0.13571, 0.1357, 0.13566, −0.13559, −0.13557, 0.13554, −0.13554, −0.13551, −0.13545, −0.13538, −0.13532, −0.13524, 0.1352, −0.13518, 0.13504, −0.13502, 0.13496, −0.13489, −0.13484, 0.13472, 0.13459, −0.13454, 0.13446, 0.13443, −0.13441, 0.13429, 0.13413, 0.13412, 0.13403, −0.13394, −0.13393, −0.13386, 0.13383, 0.1338, −0.13367, 0.13366, 0.13365, −0.13361, −0.13361, −0.13361, 0.13356, 0.13348, 0.13345, −0.13343, 0.13336, 0.13333, −0.13319, 0.13316, −0.13314, −0.13312, 0.13309, 0.13298, −0.13298, 0.13294, −0.13289, −0.13279, 0.13277, −0.13276, 0.13246, −0.13244, −0.13224, 0.13218, −0.13214, −0.13212, 0.13206, −0.13195, −0.13192, −0.13191, −0.13189, 0.13186, −0.13185, −0.13169, 0.13165, 0.13156, 0.13155, 0.13141, 0.13132, −0.13118, −0.1311, −0.131, 0.13097, −0.13094, −0.13086, −0.13082, −0.1308, 0.13076, 0.13065, 0.13063, −0.1306, 0.13058, −0.13057, −0.13053, −0.1305, −0.13046, 0.13044, 0.13036, 0.13035, 0.13032, −0.1303, −0.13027, 0.13027, 0.13026, −0.13025, −0.13022, 0.1302, −0.13018, 0.13009, −0.13004, −0.12999, −0.12991, 0.12986, 0.12979, −0.12976, 0.12972, 0.12964, 0.12963, −0.12948, −0.12948, 0.12942, −0.12934, −0.12932, −0.1293, −0.12929, 0.12928, 0.12924, 0.12919, −0.12915, −0.12911, 0.12908, −0.12905, 0.129, −0.12899, −0.12895, −0.12882, 0.12879, 0.1287, 0.12865, −0.12856, 0.12847, 0.12847, −0.12844, −0.12828, −0.12826, 0.12825, −0.12823, 0.12819, −0.12816, 0.12814, −0.12812, −0.12809, 0.128, −0.128, 0.12794, −0.1279, −0.12784, 0.12782, −0.12781, −0.12779, 0.12777, 0.12776, 0.12776, −0.12775, −0.12775, 0.12774, 0.12773, −0.12765, −0.12764, −0.12763, 0.1276, −0.12746, −0.12745, 0.12744, −0.1274, 0.1273, −0.12724, −0.12718, 0.12714, 0.12712, −0.12712, 0.12712, −0.12707, 0.12705, −0.12702, 0.12701, −0.12699, −0.12698, 0.12687, −0.12684, −0.12682, −0.12681, 0.12679, −0.12679, 0.12667, −0.12634, −0.12627, −0.12615, 0.12596, 0.12595, 0.12594, −0.12588, −0.12577, −0.12572, 0.12571, −0.12566, 0.12563, 0.12558, 0.12557, −0.12551, −0.12543, −0.12536, −0.12528, −0.12526, −0.1252, 0.12516, −0.12516, 0.12506, 0.12499, 0.12492, −0.1249, 0.12478, 0.12474, −0.12473, 0.12472, −0.12471, −0.12471, 0.12466, −0.12449, 0.12446, −0.12443, −0.12443, −0.12439, 0.12438, −0.12437, 0.12431, −0.12428, 0.12425, −0.12423, 0.12423, −0.12423, 0.12421, 0.12419, −0.12419, −0.12413, 0.1241, −0.12409, −0.12409, 0.12409, −0.12406, −0.12405, −0.12403, 0.12397, 0.12394, −0.12392, 0.12378, 0.12375, −0.12372, −0.12367, −0.12365, −0.12362, −0.12353, 0.12351, −0.12346, −0.12344, −0.12342, −0.12337, 0.12334, −0.1233, −0.12325, 0.12324, 0.12319, 0.12316, −0.12315, −0.12308, 0.12303, 0.12296, −0.12292, 0.12291, 0.12273, −0.12272, 0.12261, 0.12255, 0.12252, 0.12251, 0.1225, 0.12243, 0.1224, −0.12237, −0.12236, −0.12228, −0.12228, 0.12206, −0.12206, 0.12204, −0.122, −0.1219, 0.1218, 0.12166, 0.12158, −0.12153, 0.1215, 0.12149, −0.12149, −0.12143, −0.12142, 0.12142, −0.12135, 0.12132, 0.12129, 0.12129, −0.12128, 0.12127, 0.12127, 0.12123, 0.12115, 0.12114, −0.12114, 0.1211, 0.12107, −0.12097, −0.12092, −0.12085, 0.12081, 0.12076, −0.12075, −0.12073, 0.12069, −0.12066, 0.12065, 0.12065, −0.12062, −0.12059, −0.12054, −0.12054, −0.1205, 0.12049, −0.12046, 0.12046, −0.12036, −0.12036, 0.12035, −0.12029, 0.12025, 0.12022, −0.12021, −0.12016, −0.12012, 0.12009, 0.12006, −0.12005, 0.11996, −0.11994, −0.11987, −0.11984, 0.11982, −0.11982, 0.11971, −0.11955, 0.11951, 0.11945, 0.11942, −0.11942, −0.11941, 0.11928, −0.11927, 0.11919, 0.11914, 0.11913, −0.11911, 0.11895, −0.11884, −0.11883, −0.11882, −0.11882, 0.11881, −0.11871, 0.11869, 0.11867, 0.11864, −0.11859, −0.11858, −0.11854, −0.11853, −0.11851, 0.11843, 0.11843, 0.11832, −0.11825, −0.11819, 0.11817, 0.11816, −0.11813, 0.11812, 0.11809, −0.11802, −0.118, 0.11796, −0.11792, −0.1179, −0.11788, 0.11788, 0.11787, 0.11786, 0.11786, 0.11784, −0.11782, −0.11779, −0.11773, −0.11767, 0.11765, −0.11765, 0.11762, −0.11751, 0.11749, −0.11744, 0.11737, 0.1173, −0.1173, −0.11722, −0.11716, 0.11716, 0.11714, −0.11707, −0.11701, −0.117, 0.11699, −0.11697, 0.11695, −0.11684, −0.11681, −0.1167, −0.11663, 0.11662, −0.11658, −0.11657, 0.11653, −0.11644, −0.11638, 0.11627, 0.11618, −0.11617, 0.11617, −0.11615, −0.11608, 0.11605, −0.1159, −0.11587, −0.11581, −0.11576, −0.11574, −0.11572, −0.11565, −0.11564, 0.11562, −0.11562, −0.11561, −0.1156, −0.11559, −0.11557, −0.11554, 0.11552, 0.11551, −0.11544, 0.11541, −0.11534, 0.11534, 0.11527, −0.11526, 0.11518, −0.11508, 0.11505, 0.11505, 0.11501, 0.11498, 0.11496, −0.11494, 0.11482, 0.1148, −0.1148, −0.11476, 0.11476, 0.11471, −0.11467, −0.11458, 0.11458, −0.11452, 0.11445, 0.11444, −0.11443, −0.11442, 0.1144, −0.11438, 0.11432, −0.11424, 0.1142, −0.11416, −0.11414, 0.11413, 0.11412, 0.11403, 0.11402, 0.11401, 0.11396, 0.11391, −0.11388, 0.11388, 0.11387, 0.11385, −0.11378, −0.11376, −0.11376, −0.11374, −0.11374, 0.11372, 0.11371, 0.11368, −0.11364, −0.11363, 0.11361, 0.11356, −0.11355, 0.11354, 0.11352, 0.11344, 0.11344, −0.11339, 0.11329, 0.11329, −0.11323, 0.11309, 0.11306, 0.11305, −0.11303, −0.11301, 0.113, 0.11295, −0.11294, −0.11293, 0.11291, 0.1129, −0.11288, −0.11286, 0.11283, 0.11283, −0.11283, 0.11282, −0.11282, −0.1128, 0.1128, 0.11279, 0.11275, 0.11274, −0.11274, −0.11273, −0.11271, −0.11268, −0.11266, 0.11259, −0.11256, −0.11252, −0.11251, 0.11251, −0.11241, −0.11239, −0.11239, 0.11237, −0.11236, 0.11234, −0.1122, 0.11217, 0.11201, −0.112, −0.112, 0.11198, −0.11196, 0.11194, 0.11193, 0.11191, 0.11189, −0.11187, −0.11185, −0.11177, 0.11171, −0.11166, −0.11165, 0.11164, −0.11156, −0.11153, 0.11151, −0.1115, −0.11143, 0.1114, 0.1114, 0.11135, 0.11131, −0.11131, 0.1113, 0.11121, 0.11119, 0.11119, 0.11114, 0.11112, −0.11109, −0.11104, 0.11099, 0.11095, −0.11094, 0.11094, 0.11092, −0.1109, 0.1109, 0.11088, 0.11086, −0.11086, −0.11085, 0.11084, −0.11075, 0.11072, −0.11071, −0.11068, −0.11063, −0.11063, 0.1106, 0.1106, −0.11059, 0.11053, −0.11045, 0.11033, −0.11033, −0.11031, −0.11025, 0.11021, −0.11017, 0.11016, 0.11015, 0.11013, 0.11011, −0.11009, −0.11007, 0.11, 0.10994, 0.10988, −0.10988, 0.10987, 0.10984, −0.10984, 0.10977, −0.10976, −0.10973, −0.10971, 0.10969, −0.10965, −0.10964, 0.10963, −0.10962, −0.10962, 0.10961, 0.1096, −0.10956, 0.10949, 0.10944, −0.1094, −0.10939, 0.10937, 0.10934, −0.1093, −0.1093, 0.10925, −0.10924, −0.10923, −0.10922, 0.10916, 0.10909, 0.10908, −0.10906, 0.10902, 0.10901, 0.10897, 0.10891, −0.1089, 0.10889, 0.10887, 0.10885, −0.10881, −0.10876, −0.10876, 0.10874, −0.10872, 0.10872, 0.10867, 0.10866, 0.10866, −0.10865, 0.10864, 0.10863, −0.10862, 0.10861, 0.10857, −0.10853, −0.10842, 0.10833, −0.10833, 0.10828, −0.10828, −0.10826, −0.10822, 0.10822, 0.10816, −0.10812, 0.10812, 0.10807, −0.10801, 0.108, 0.10795, −0.10795, −0.10793, −0.10781, 0.1078, −0.10778, 0.10776, 0.10774, −0.10763, 0.10762, −0.10756, −0.10755, 0.1075, 0.10748, −0.10743, −0.10736, 0.10732, 0.10731, 0.10727, −0.10724, 0.10723, 0.10712, −0.10711, −0.10706, 0.107, −0.1069, −0.10687, −0.10685, 0.10682, 0.1068, −0.10677, 0.1067, −0.10668, −0.10667, −0.10661, −0.10659, 0.10653, 0.10651, 0.1065, −0.10648, 0.10645, −0.10644, −0.10643, −0.10639, 0.10634, 0.10627, −0.10624, 0.10622, −0.10619, −0.1061, 0.10607, 0.10602, 0.10601, −0.106, −0.10598, −0.10596, 0.10591, 0.10587, 0.10584, 0.10582, 0.10577, 0.10577, 0.10575, −0.1057, 0.10559, −0.10557, −0.10556, 0.10552, −0.10546, 0.10545, 0.10543, 0.10543, 0.10539, 0.10538, −0.10538, −0.10537, −0.10537, −0.10534, −0.10534, 0.10533, −0.10527, −0.10524, 0.10524, −0.10522, 0.10519, −0.10519, −0.10514, −0.10511, 0.10509, 0.10505, −0.10501, 0.10499, 0.10496, −0.10491, −0.10487, −0.10487, 0.10486, −0.10485, 0.10485, 0.10482, −0.10479, −0.10478, 0.10472, −0.1047, −0.10469, 0.10465, −0.10465, −0.1046, −0.10453, 0.10449, 0.10449, 0.10447, 0.10443, 0.10442, 0.10427, −0.10424, 0.10422, −0.10421, 0.1042, 0.10419, 0.10419, 0.10418, −0.10412, −0.10406, 0.10404, 0.10402, 0.10401, −0.104, −0.10397, 0.10397, 0.10397, −0.10397, −0.10392, −0.10386, −0.10375, −0.10375, −0.10371, 0.10371, −0.1037, 0.10369, 0.10368, −0.10366, 0.10363, 0.10363, 0.10362, 0.10357, −0.10355, 0.10351, −0.1035, −0.10348, −0.10346, −0.10345, −0.10344, 0.10342, 0.10339, −0.10331, 0.10328, 0.10327, 0.10323, −0.1032, 0.10315, −0.1031, −0.1031, 0.10306, 0.10305, −0.10304, 0.10302, −0.103, 0.10298, −0.10295, −0.10294, 0.10291, −0.10289, 0.10289, 0.10288, 0.10285, −0.10282, −0.10277, −0.10274, −0.10274, −0.10272, −0.10266, 0.10265, 0.10262, −0.10256, −0.10252, 0.10249, 0.10248, 0.10248, −0.10244, 0.10236, −0.10235, −0.10235, −0.10235, −0.10234, −0.10233, −0.1023, −0.10229, −0.10229, 0.10227, 0.10226, −0.10225, −0.10222, −0.10221, 0.10219, −0.10218, −0.10216, −0.10213, −0.10212, −0.10211, −0.10201, 0.10199, 0.10192, 0.1019, 0.10181, 0.10181, 0.10178, 0.10174, 0.10174, 0.10171, 0.10168, 0.10167, 0.10163, −0.10162, 0.10158, 0.10157, −0.10155, −0.10153, 0.10152, −0.1015, −0.10144, 0.10139, 0.10132, −0.10131, 0.1013, −0.10128, 0.10124, −0.10121, 0.10118, −0.10116, 0.10114, 0.10113, 0.10112, −0.1011, 0.10107, 0.10103, −0.101, 0.10098, 0.10097, 0.10095, −0.10094, −0.10093, −0.10086, 0.10081, 0.1008, 0.1008, 0.10075, 0.10074, −0.10072, 0.10071, 0.10062, 0.1006, −0.10045, 0.10045, −0.10043, 0.10042, −0.10041, 0.1004, 0.10037, −0.10035, −0.10025, 0.10024, −0.10023, 0.10023, 0.10017, 0.10013, −0.10011, −0.10009, 0.10009, 0.10008, −0.10008, −0.10004, 0.1, 0.09997, −0.09996, 0.09996, −0.09995, −0.09985, 0.09984, −0.09982, −0.09982, −0.09978, −0.09973, −0.09972, 0.0997, 0.09967, 0.09966, 0.09965, 0.0996, 0.0996, 0.09959, 0.09959, 0.09951, −0.09948, −0.09946, 0.09945, 0.09942, −0.09942, −0.09941, −0.09938, 0.09937, 0.09933, 0.09932, 0.09931, −0.0993, −0.09925, −0.0992, −0.09918, −0.09916, 0.09915, −0.09914, 0.09911, −0.09909, −0.09908, −0.09902, −0.09897, −0.09896, 0.09894, 0.09889, −0.09889, 0.09886, 0.09885, −0.09885, −0.09876, −0.09868, −0.09868, 0.09862, −0.09861, 0.09858, −0.09858, −0.09852, 0.09852, −0.09852, 0.09848, 0.09848, 0.09846, −0.09846, 0.09845, −0.09843, 0.0984, 0.09839, 0.09838, 0.09837, −0.09832, 0.0983, 0.09827, −0.09826, 0.09821, −0.09819, 0.09817, −0.09814, 0.09812, 0.0981, −0.0981, 0.09806, 0.09805, 0.09805, 0.09803, −0.09802, −0.09801, 0.098, −0.098, 0.09798, 0.09797, 0.09794, −0.09792, 0.09789, 0.09788, 0.09784, 0.09783, 0.09782, 0.09781, −0.09779, −0.09779, −0.09777, 0.09776, −0.09775, 0.09775, −0.09775, 0.0977, 0.0977, −0.09769, −0.09767, 0.09766, −0.09765, 0.09761, −0.09761, −0.09756, 0.09752, 0.09748, −0.09746, 0.09743, −0.09742, 0.09739, −0.09738, 0.09735, 0.09734, 0.09733, 0.09728, −0.09727, 0.09722, −0.09722, 0.09719, −0.09717, −0.09714, −0.09712, −0.09708, −0.09707, −0.09706, 0.09698, 0.09693, −0.0969, −0.09689, −0.09687, 0.09685, 0.09685, 0.09673, −0.09673, −0.09672, −0.09671, 0.09668, −0.09666, −0.09663, 0.09662, −0.09661, −0.09658, −0.0965, 0.09636, −0.09632, 0.09629, −0.09628, −0.09627, −0.0962, 0.09619, 0.09617, 0.09616, −0.09615, −0.09614, −0.09611, 0.09611, −0.09609, 0.09608, 0.09607, −0.09606, 0.09603, 0.09603, 0.09596, 0.09593, −0.09593, −0.09591, −0.09586, 0.09586, −0.09585, −0.09584, −0.09582, −0.09579, 0.09577, −0.09576, 0.09573, 0.09572, 0.09572, 0.09571, 0.0957, 0.09569, 0.09564, 0.09562, 0.0956, −0.09558, 0.09558, −0.09555, 0.09555, 0.09555, 0.09553, 0.09553, −0.0955, −0.09548, 0.09543, −0.09542, 0.09541, −0.0954, −0.09537, −0.09536, −0.09536, 0.0953, 0.09529, 0.09528, −0.09528, −0.09528, 0.09526, −0.09523, 0.09523, 0.09523, −0.09521, −0.09521, 0.09516, −0.09512, −0.0951, −0.095, 0.09496, −0.09493, −0.09493, 0.09493, −0.09493, −0.09493, 0.09492, −0.09492, 0.09491, −0.09488, −0.09482, 0.09482, −0.09478, 0.09475, −0.09466, −0.09463, 0.09462, 0.09459, 0.09457, 0.09457, −0.09456, 0.09456, −0.09456, 0.09456, −0.09452, 0.09452, −0.09451, −0.09451, 0.09448, 0.09448, 0.09447, −0.09443, 0.09442, −0.09439, 0.09439, 0.09438, −0.09436, 0.09435, 0.09435, 0.09424, 0.09422, 0.09422, 0.09421, −0.09417, −0.09416, 0.09416, −0.09416, −0.09416, 0.09415, 0.09413, −0.09413, 0.09409, −0.09405, −0.09404, 0.09401, −0.09401, 0.09399, −0.09397, 0.09396, −0.09394, −0.09392, −0.09391, 0.0939, 0.09389, 0.09389, −0.09386, −0.09386, 0.0938, 0.09379, −0.09379, 0.09372, −0.09372, 0.09368, 0.09366, 0.09364, −0.09355, 0.09354, 0.09352, −0.09352, 0.09351, 0.09347, 0.09347, −0.09343, −0.09341, −0.0934, −0.09338, −0.09336, −0.09336, 0.09335, −0.09328, −0.09325, −0.09321, 0.09321, −0.09318, 0.09316, 0.09316, −0.09316, 0.09314, 0.09314, −0.09314, −0.09309, 0.09309, 0.09306, 0.09292, −0.09291, −0.09291, 0.09291, 0.0929, 0.09287, −0.09282, 0.0928, −0.09278, −0.0927, 0.09269, −0.09269, −0.09268, −0.09266, −0.09265, 0.09265, −0.09262, −0.09261, 0.0926, −0.0926, 0.09253, 0.09252, 0.09251, −0.09251, −0.09247, −0.09245, −0.09242, −0.09239, −0.09237, −0.09232, 0.09225, −0.09225, 0.09222, 0.09221, −0.09221, −0.0922, 0.09218, −0.09216, 0.09215, −0.09204, 0.09202, −0.092, −0.092, −0.09199, 0.09196, 0.09195, −0.09194, 0.09193, −0.09193, −0.09189, −0.09186, −0.09183, −0.09179, −0.09176, 0.0917, −0.09168, 0.09166, −0.09166, 0.09165, 0.09165, −0.09164, 0.0916, 0.09158, 0.09154, 0.09153, 0.09153, 0.09147, 0.09145, 0.09144, −0.09143, −0.09143, −0.09136, 0.09131, 0.09128, 0.09126, −0.09126, 0.09125, −0.09125, −0.09119, 0.09118, −0.09118, −0.09117, 0.09114, 0.09111, −0.0911, −0.09108, −0.09108, 0.09108, −0.09106, 0.09103, 0.091, −0.09098, 0.09096, −0.09091, −0.0909, −0.0909, −0.09086, −0.09085, −0.09085, −0.09081, 0.09073, −0.09073, −0.09072, −0.09066, −0.09063, −0.09062, 0.09061, −0.09061, −0.09061, 0.09059, −0.09058, −0.09056, −0.09053, 0.09051, 0.09049, −0.09047, 0.09045, −0.09044, −0.09044, 0.09044, −0.09043, −0.0904, −0.09038, 0.09037, 0.09036, 0.09034, 0.09029, 0.09028, −0.09028, −0.09027, 0.09027, 0.09026, −0.09021, 0.09014, −0.09013, 0.09013, 0.0901, −0.09009, 0.09006, −0.09003, −0.09002, −0.09, 0.08996, 0.08996, 0.08995, 0.08995, 0.08993, 0.08989, −0.08988, −0.08988, 0.08988, −0.08988, 0.08987, 0.08984, 0.08984, −0.08982, 0.08978, 0.08977, −0.08977, 0.08976, 0.08974, −0.08974, −0.08971, −0.08967, −0.08967, 0.08966, 0.08964, 0.08964, 0.08961, 0.0896, 0.08956, −0.08956, 0.08955, 0.08952, −0.08951, 0.0895, −0.08949, 0.08943, −0.08942, −0.08942, 0.0894, −0.08935, −0.08933, −0.08931, −0.0893, 0.08929, 0.08929, 0.08928, −0.08926, −0.08926, 0.08921, −0.08919, −0.08916, 0.08911, −0.08911, 0.08909, −0.08908, −0.08907, 0.08904, −0.089, 0.08898, 0.08898, 0.08893, 0.08893, 0.08893, 0.08888, −0.08886, −0.08885, 0.08885, 0.08883, −0.08881, 0.0888, −0.08879, −0.08874, 0.08873, 0.08872, −0.08871, −0.08869, 0.08867, 0.08863, 0.08862, −0.0886, −0.0886, −0.08859, 0.08858, 0.08857, 0.08855, 0.08854, −0.0885, 0.08847, −0.08846, −0.08845, −0.08845, −0.08845, 0.08843, 0.08843, −0.08842, −0.0884, −0.08839, 0.08839, −0.08838, −0.08837, −0.08833, 0.0883, 0.08828, 0.08828, 0.08827, 0.08822, 0.08821, 0.08821, −0.08812, −0.08811, 0.0881, 0.08808, −0.08807, 0.08806, −0.08804, 0.08802, 0.088, 0.08798, −0.08797, −0.08797, −0.08795, 0.08794, 0.0879, −0.08788, 0.08786, 0.08785, 0.08782, 0.08781, 0.0878, −0.08774, 0.08772, −0.08771, 0.08771, 0.08769, 0.08769, 0.08767, −0.08766, −0.08761, −0.08755, −0.08752, 0.08752, −0.08751, 0.0875, −0.08749, 0.08748, −0.08746, 0.08744, −0.08741, 0.08741, 0.0874, −0.08739, 0.08739, −0.08737, 0.08737, 0.08736, 0.08735, −0.08733, −0.08729, 0.08729, −0.08724, 0.08723, −0.08722, −0.08722, 0.08721, 0.0872, −0.0872, −0.08719, 0.08719, 0.08717, −0.08716, 0.08714, −0.08711, −0.08711, 0.08708, 0.08706, 0.08705, −0.08702, −0.087, −0.08696, 0.08694, 0.08691, −0.0869, −0.08689, 0.08688, 0.08688, −0.08686, −0.08685, −0.08679, −0.08679, 0.08674, 0.0867, 0.0866, −0.08651, −0.08649, 0.08647, −0.08644, −0.08642, 0.0864, 0.08639, 0.08639, −0.08635, 0.08634, −0.08633, 0.08624, −0.08624, −0.08623, 0.08622, −0.08621, 0.0862, −0.08619, 0.08618, −0.08617, −0.08616, 0.08616, −0.08616, 0.08616, −0.08614, 0.08612, −0.08607, −0.08605, 0.08604, −0.08601, 0.086, −0.08598, −0.08597, 0.08595, −0.08594, −0.0859, 0.08589, 0.08587, 0.08587, 0.08583, 0.08582, 0.08581, −0.0858, −0.0858, −0.08576, −0.08576, 0.08576, 0.08575, −0.08573, 0.08567, 0.08565, −0.08564, 0.08563, 0.0856, 0.08556, 0.08556, −0.08554, −0.08551, −0.08549, 0.08549, 0.08548, −0.08548, −0.08544, −0.08542, −0.0854, 0.0854, −0.08539, −0.08539, 0.08536, −0.08533, −0.08533, 0.08531, 0.0853, −0.0853, 0.0853, −0.0853, −0.08528, 0.08523, 0.0852, 0.08519, 0.08517, 0.08516, 0.08516, −0.08514, 0.08512, −0.08512, 0.08512, 0.08507, −0.08505, 0.08504, −0.08502, 0.08501, −0.085, −0.08497, −0.08495, −0.08493, −0.08492, −0.08491, −0.0849, 0.08488, 0.08488, 0.08485, −0.08484, −0.08477, −0.0847, −0.08468, 0.08466, −0.08465, 0.08464, −0.08463, −0.08463, 0.08462, 0.08461, −0.08459, 0.08458, −0.08457, 0.08456, 0.08454, 0.08452, 0.08448, 0.08445, −0.08444, 0.08444, −0.08442, 0.08441, 0.08439, 0.08438, −0.08438, −0.08437, −0.08436, 0.08435, 0.08432, −0.08429, 0.08426, −0.08425, 0.08422, −0.08421, 0.0842, 0.08418, −0.08417, −0.08417, 0.08415, −0.08415, −0.08414, 0.08413, 0.08411, −0.0841, 0.08402, 0.08394, 0.08394, −0.0839, 0.0839, 0.08386, −0.08385, 0.08384, −0.08382, −0.08381, 0.0838, −0.08377, 0.08377, 0.08377, −0.0837, −0.08367, −0.08366, −0.08366, −0.08366, −0.08366, −0.08363, −0.08361, −0.0836, 0.08357, −0.08356, −0.08355, −0.08355, 0.08354, 0.08353, 0.08353, −0.08352, 0.0835, 0.08343, 0.08342, −0.0834, −0.08334, 0.08333, −0.08331, −0.08328, −0.08328, 0.08327, −0.08326, −0.08322, −0.08322, −0.08322, −0.0832, −0.08317, 0.08315, −0.08313, 0.08312, 0.0831, −0.08308, −0.08307, 0.08307, 0.08306, −0.08301, −0.08296, −0.08295, 0.08295, 0.08294, −0.08294, −0.08294, −0.08293, −0.08293, 0.08293, 0.08285, −0.08285, 0.08283, −0.08282, 0.0828, −0.08277, −0.08276, −0.08275, 0.08273, −0.08272, 0.08269, −0.08267, 0.08266, 0.08265, 0.08262, 0.08262, −0.08258, 0.08254, 0.08254, −0.08254, 0.08253, 0.08253, 0.08251, 0.0825, 0.08248, 0.08247, −0.08246, 0.08245, 0.08243, −0.08241, 0.08238, −0.08237, 0.08237, 0.08235, 0.08232, −0.08232, −0.0823, −0.08228, −0.08227, 0.08218, 0.08216, 0.08215, −0.08213, −0.08213, 0.0821, −0.0821, −0.08205, −0.08205, 0.08204, −0.08204, 0.08203, 0.08202, −0.08197, 0.08197, 0.08194, 0.08193, −0.0819, 0.08189, 0.08186, −0.08183, 0.08182, −0.08182, 0.08173, −0.08173, 0.08172, 0.08171, −0.08171, 0.08169, 0.08168, −0.08167, −0.08165, 0.08165, −0.08161, −0.08159, −0.08159, 0.08158, 0.08157, 0.08154, −0.08153, −0.08151, −0.08147, −0.08147, −0.08143, −0.0814, 0.08138, −0.08136, 0.08136, 0.08135, 0.08133, 0.0813, 0.08129, 0.08125, 0.08124, 0.08122, 0.08122, −0.08122, −0.08121, 0.08118, −0.08115, −0.08115, −0.08114, −0.08109, 0.08108, −0.08107, 0.08106, 0.08102, 0.08101, −0.08099, 0.08096, −0.08092, −0.08091, 0.08091, −0.08088, −0.08087, −0.08087, −0.08087, −0.08086, 0.08085, −0.08083, 0.08083, −0.08082, −0.08075, −0.08075, 0.08074, −0.08071, 0.08069, 0.08065, 0.08064, −0.08061, −0.0806, −0.08052, −0.08051, −0.08048, −0.08042, −0.08042, 0.08041, 0.08038, −0.08038, 0.08038, −0.08037, −0.08035, 0.08034, −0.08034, 0.08032, 0.0803, −0.08026, 0.08025, 0.08024, −0.08021, −0.08018, 0.08017, −0.08012, 0.08012, 0.08009, 0.08008, −0.08007, −0.08007, 0.08006, −0.07999, −0.07995, −0.07995, 0.07994, 0.07991, 0.07991, 0.07987, 0.07987, −0.07987, −0.07985, −0.07985, −0.07982, −0.07979, −0.07971, −0.0797, 0.0797, −0.0797, −0.07966, −0.07966, −0.07965, 0.07965, 0.07965, −0.07963, 0.07962, 0.07962, −0.07958, −0.07958, 0.07957, −0.07957, 0.07956, −0.07955, −0.07953, 0.07952, 0.07952, 0.0795, −0.07947, −0.07946, 0.07945, −0.07943, −0.07942, −0.07941, −0.0794, 0.07939, 0.07938, 0.07935, 0.07935, 0.07934, −0.07931, 0.07926, −0.07925, 0.07923, −0.07923, −0.07922, 0.07922, −0.0792, 0.07919, −0.07916, 0.07916, −0.07915, −0.07915, 0.07914, 0.07911, 0.07911, 0.0791, −0.07908, −0.07907, 0.07906, 0.07905, 0.07903, 0.07903, −0.07901, 0.07901, −0.079, 0.07897, 0.07896, −0.07894, 0.07893, 0.07887, −0.07886, −0.07884, −0.07881, −0.0788, 0.07878, 0.07876, −0.07869, 0.07867, −0.07867, 0.07866, 0.07863, −0.07862, 0.07858, 0.07855, −0.07853, −0.07851, 0.07845, 0.07844, −0.07842, −0.07841, −0.07839, 0.07838, 0.07833, 0.07832, 0.07832, −0.07831, 0.07831, 0.0783, 0.0783, 0.0783, 0.0783, 0.0783, −0.07829, 0.07827, 0.07822, −0.07822, −0.07821, −0.07819, −0.07818, −0.07817, 0.07814, 0.07812, 0.07812, −0.07811, 0.07809, 0.07806, −0.07804, 0.07803, −0.07801, 0.078, 0.07799, −0.07798, 0.07797, 0.07795, 0.07793, 0.07793, −0.07792, −0.07786, −0.07785, −0.07784, 0.07781, 0.07781, −0.07779, −0.07778, −0.07776, 0.07774, −0.07773, 0.0777, 0.07766, 0.07765, 0.07765, −0.07758, −0.07756, −0.07754, 0.07753, −0.07749, −0.07748, −0.07747, 0.07744, −0.07743, −0.07742, 0.07741, −0.07741, −0.0774, 0.07739, −0.07739, 0.07738, 0.07736, 0.07735, −0.07735, −0.07733, 0.07732, 0.07731, 0.0773, −0.07728, 0.07725, 0.07725, 0.07723, 0.07722, 0.0772, −0.0772, 0.07719, −0.07717, 0.07716, 0.07716, 0.07715, −0.07712, 0.07707, 0.07707, −0.07704, 0.07703, −0.07701, 0.07701, 0.077, −0.077, 0.07696, −0.07696, −0.07693, 0.07693, −0.0769, −0.07689, 0.07688, −0.07687, −0.07686, −0.07686, −0.07685, −0.07683, 0.07679, 0.07678, 0.07677, 0.07676, 0.07676, 0.07672, 0.07671, −0.0767, 0.07669, −0.07667, −0.07666, −0.07662, 0.0766, 0.07659, −0.07656, 0.07655, −0.07651, 0.0765, −0.07649, 0.07648, −0.07644, −0.07642, −0.07639, −0.07637, −0.07636, −0.07636, 0.07633, −0.07632, −0.07631, 0.0763, −0.0763, −0.07628, 0.07627, −0.07625, −0.07619, −0.07616, 0.07613, 0.0761, −0.07608, −0.07605, 0.07604, −0.07604, 0.07604, −0.07599, −0.07599, −0.07598, −0.07596, −0.07594, −0.07592, −0.0759, 0.07589, −0.07587, 0.07587, −0.07587, −0.07586, −0.07585, −0.07583, −0.07583, 0.07582, 0.07582, −0.0758, 0.0758, −0.07577, −0.07576, 0.07576, 0.07575, −0.0757, 0.07569, 0.07569, 0.07568, −0.07568, 0.07567, −0.07566, 0.07566, 0.07564, −0.07563, −0.07561, −0.07555, 0.07555, −0.07554, −0.07552, −0.07551, 0.07547, −0.07546, −0.07545, −0.07542, −0.07538, −0.07537, −0.07535, 0.07533, −0.07532, 0.07531, 0.07528, 0.07527, 0.07524, −0.07523, 0.07522, −0.0752, 0.07519, −0.07511, −0.0751, 0.0751, 0.07508, −0.07507, 0.07507, 0.07506, −0.07506, −0.07504, −0.07498, 0.07496, −0.0749, 0.07489, 0.07488, 0.07488, 0.07483, 0.07482, −0.0748, 0.07479, −0.07478, −0.07473, 0.07472, 0.0747, −0.07468, 0.07467, −0.07467, 0.07466, −0.07466, −0.07462, −0.07461, −0.07461, 0.07459, 0.07459, −0.07457, 0.07457, −0.07456, 0.07455, 0.07454, −0.07454, −0.07452, −0.07452, −0.07451, 0.07451, −0.0745, −0.0745, 0.07446, −0.07443, −0.07441, 0.07439, −0.07439, 0.07438, 0.07438, 0.07437, −0.07436, 0.07436, 0.07436, 0.0743, −0.0743, −0.0743, 0.07428, −0.07425, −0.07425, −0.07422, −0.07422, 0.07418, −0.07416, 0.07416, 0.07416, 0.07413, 0.07411, 0.07411, −0.07409, −0.07409, −0.07409, −0.07409, −0.07408, −0.07407, 0.07407, −0.07404, −0.07404, −0.07403, −0.07402, 0.07402, −0.07401, 0.074, 0.07398, 0.07395, 0.07395, 0.07394, 0.07391, −0.0739, 0.07388, 0.07388, −0.07388, −0.07387, −0.07387, 0.07386, 0.07384, −0.07381, −0.07376, 0.07374, 0.07373, −0.07372, −0.0737, 0.0737, 0.07369, 0.07367, −0.07364, 0.07361, −0.07361, −0.07359, −0.07359, 0.07357, 0.07357, 0.07356, −0.07355, 0.07354, −0.07353, −0.07349, 0.07345, −0.07343, −0.07341, −0.0734, −0.0734, 0.07339, −0.07339, 0.07338, 0.07336, −0.07336, 0.07335, 0.07335, −0.07334, −0.07331, 0.07329, −0.07329, −0.07328, 0.07326, −0.07326, −0.07325, −0.07324, −0.07316, 0.07315, 0.07313, −0.07313, −0.07309, −0.07309, −0.07308, −0.07306, −0.07306, 0.07306, 0.07305, −0.07305, −0.073, 0.073, −0.07299, 0.07298, −0.07294, −0.07293, 0.07293, 0.07291, 0.07289, 0.07289, 0.07288, 0.07286, 0.07281, 0.0728, −0.07279, 0.07278, −0.07278, −0.07276, 0.07271, 0.07269, 0.07267, 0.07267, −0.07263, −0.07262, −0.0726, 0.07259, 0.07259, −0.07258, 0.07256, −0.07252, −0.07251, −0.0725, 0.07247, −0.07246, 0.07246, 0.07246, −0.07245, −0.07243, 0.07242, −0.07242, 0.0724, 0.0724, −0.07236, −0.07235, 0.07235, −0.07234, −0.07233, −0.07231, −0.07231, −0.07231, −0.07231, 0.0723, 0.0723, −0.07229, −0.07226, −0.07226, −0.07222, −0.07222, −0.07221, 0.07221, −0.07221, −0.07219, −0.07219, −0.07217, 0.07215, −0.07214, −0.07214, −0.07213, 0.07212, 0.07208, 0.07207, 0.07206, −0.07203, −0.07202, −0.07202, −0.07202, −0.07198, −0.07197, 0.07195, −0.07195, −0.07193, −0.07192, 0.07192, 0.0719, 0.07187, 0.07187, 0.07186, 0.07185, 0.07182, −0.07182, 0.07179, −0.07179, −0.07178, 0.07176, −0.07174, 0.07169, 0.07169, 0.07168, 0.07168, −0.07164, −0.0716, −0.07159, 0.07157, 0.07155, −0.07154, −0.07154, 0.07154, 0.07154, −0.07152, 0.07151, −0.0715, 0.0715, 0.07149, 0.07149, −0.07149, 0.07146, 0.07146, 0.07146, −0.07146, −0.07145, −0.07144, 0.07144, 0.07142, 0.0714, −0.07139, 0.07137, −0.07137, −0.07137, −0.07137, −0.07135, −0.07135, 0.07133, 0.07131, −0.07129, −0.07129, −0.07126, −0.07125, −0.07124, −0.07122, 0.07118, 0.07118, 0.07118, 0.07117, 0.07117, −0.07116, −0.07116, 0.07116, −0.07115, −0.07114, −0.07114, −0.0711, −0.07109, −0.07109, −0.07108, 0.07105, −0.07104, 0.07103, −0.07101, 0.07097, −0.07097, 0.07097, 0.07095, −0.07095, 0.07095, −0.07094, −0.07093, 0.0709, −0.07089, 0.07087, −0.07086, −0.07083, 0.07082, −0.07082, 0.0708, 0.07079, 0.07078, 0.07076, 0.07075, −0.07075, 0.07072, −0.07071, −0.07067, 0.07067, 0.07066, 0.07066, −0.07065, −0.07064, −0.07064, −0.07063, −0.07061, −0.07061, 0.07059, −0.07058, 0.07057, −0.07057, 0.07053, −0.07052, −0.07051, −0.0705, −0.07047, 0.07047, 0.07046, −0.07044, −0.07044, −0.07043, −0.07042, 0.07041, 0.07041, −0.0704, 0.07039, −0.07039, −0.07038, −0.07037, −0.07033, −0.07033, −0.07031, −0.07031, 0.07031, −0.0703, −0.07028, 0.07027, −0.07026, 0.07026, 0.07025, −0.07024, 0.07021, −0.0702, 0.07018, 0.07017, 0.07015, −0.07015, 0.07013, 0.07012, 0.07012, −0.0701, −0.0701, 0.07009, 0.07009, 0.07005, 0.07004, −0.07002, −0.07002, −0.07002, 0.07001, 0.07, −0.07, −0.07, −0.06995, −0.06994, −0.06993, 0.06993, 0.06992, 0.06992, −0.06992, 0.06991, 0.06987, −0.06985, −0.06985, 0.06985, 0.06984, −0.06984, 0.06982, −0.06981, −0.06981, 0.06981, −0.06981, 0.0698, 0.06978, −0.06977, 0.06976, −0.06975, −0.06975, −0.0697, 0.06968, 0.06967, 0.06967, 0.06967, −0.0696, −0.06959, 0.06957, 0.06956, 0.06955, −0.06955, −0.06953, −0.06953, −0.06951, −0.06949, −0.06947, 0.06944, 0.06943, −0.06942, −0.06941, −0.06941, −0.0694, 0.06937, 0.06936, −0.06935, −0.06934, 0.06933, 0.06931, −0.06931, 0.06931, −0.06929, 0.06929, −0.06928, −0.06927, −0.06925, 0.06923, −0.06922, −0.06919, −0.06913, −0.06913, −0.06912, 0.06911, 0.06907, −0.06905, 0.06903, 0.06902, 0.06899, 0.06896, −0.06896, −0.06894, 0.06893, −0.06893, 0.06893, 0.06891, 0.06891, 0.06889, −0.06889, −0.06888, −0.06888, −0.06887, 0.06886, −0.06882, 0.06881, 0.0688, 0.0688, 0.0688, −0.06876, −0.06876, −0.06875, 0.06874, −0.06869, 0.06868, −0.06864, 0.06863, 0.06863, 0.06862, 0.06859, 0.06859, −0.06856, −0.06855, 0.06854, −0.06849, 0.06849, 0.06847, 0.06846, 0.06844, −0.06844, 0.06843, 0.06842, 0.06841, 0.06841, 0.06836, −0.06836, 0.06834, −0.06829, −0.06827, −0.06825, −0.06823, 0.06822, −0.0682, −0.0682, 0.06819, −0.06819, 0.06819, −0.06818, 0.06817, −0.06815, 0.06813, 0.06813, 0.06812, 0.0681, −0.06808, 0.06808, 0.06806, 0.06804, −0.06804, 0.06803, −0.06803, −0.06803, −0.06802, −0.06801, −0.06799, 0.06798, −0.06795, −0.06795, −0.06792, 0.0679, 0.0679, −0.06789, −0.06789, 0.06789, −0.06786, 0.06786, −0.06785, 0.06783, 0.06782, −0.06782, 0.06782, −0.06781, 0.06781, −0.0678, 0.06779, 0.06779, 0.06778, −0.06778, 0.06778, 0.06777, 0.06774, 0.06774, 0.06771, −0.0677, −0.06769, 0.06765, 0.06764, −0.06763, 0.06758, −0.06754, 0.06751, 0.06751, 0.0675, 0.0675, −0.06749, 0.06749, 0.06748, 0.06747, −0.06746, 0.06746, −0.06743, −0.06742, 0.06741, 0.0674, 0.06739, 0.06738, 0.06736, 0.06735, −0.06734, −0.06734, 0.06733, −0.06732, 0.06731, −0.06731, −0.06731, −0.0673, −0.06729, 0.06728, 0.06727, −0.06726, 0.06722, 0.0672, −0.06719, 0.06719, 0.06718, −0.06714, −0.06714, 0.06713, −0.0671, −0.06709, −0.06708, −0.06706, 0.06705, 0.06702, 0.06701, −0.06701, 0.067, 0.067, −0.06698, −0.06696, −0.06694, 0.06694, 0.06692, 0.06691, 0.0669, −0.06688, 0.06688, −0.06688, −0.06687, 0.06685, 0.06685, −0.06683, 0.06679, 0.06675, 0.06675, 0.06675, −0.06674, −0.06673, 0.06672, 0.0667, −0.06667, 0.06663, −0.06663, 0.06662, −0.06661, −0.06659, 0.06658, −0.06652, −0.0665, −0.06649, 0.06649, 0.06648, 0.06647, 0.06643, 0.06642, −0.06641, −0.06639, −0.06638, −0.06636, 0.06632, −0.06631, 0.06629, 0.06626, 0.06626, −0.06624, 0.06624, 0.06622, −0.06622, 0.0662, 0.0662, 0.06618, 0.06616, −0.06615, 0.06615, −0.06614, 0.06613, −0.06608, −0.06604, −0.06604, 0.06604, −0.06602, −0.06601, 0.06601, 0.06601, −0.066, −0.066, −0.06599, 0.06599, 0.06597, 0.06596, 0.06596, 0.06595, −0.06594, 0.06594, 0.06594, −0.06592, −0.06591, 0.0659, −0.06589, 0.06589, 0.06589, −0.06588, −0.06586, 0.06586, −0.06583, −0.06583, −0.06582, 0.06581, 0.06581, 0.06579, 0.06578, 0.06577, −0.06577, −0.06577, 0.06577, −0.06576, 0.06575, −0.06575, 0.06574, 0.06573, 0.06572, 0.06572, 0.06571, 0.06569, −0.06569, −0.06568, 0.06568, 0.06567, −0.06567, −0.06562, 0.06562, 0.0656, 0.06559, 0.06559, 0.06558, 0.06557, −0.06555, 0.06555, 0.06554, 0.06552, −0.0655, 0.0655, 0.06549, 0.06549, 0.06548, 0.06548, −0.06547, −0.06547, 0.06546, −0.06542, 0.06542, −0.06541, 0.06539, 0.06539, −0.06535, −0.06531, 0.0653, 0.06528, −0.06526, 0.06525, −0.06519, −0.06516, −0.06514, 0.06513, 0.0651, −0.06509, 0.06508, −0.06506, 0.06506, −0.06506, 0.06505, −0.06503, 0.06501, −0.065, −0.065, 0.06498, −0.06497, −0.06497, 0.06496, 0.06496, −0.06492, −0.0649, 0.0649, −0.06489, 0.06489, −0.06488, −0.06487, 0.06484, 0.06484, −0.06484, −0.06483, −0.06482, 0.06482, 0.0648, −0.0648, −0.06479, 0.06478, 0.06477, −0.06475, −0.06473, −0.06472, −0.06472, −0.06471, −0.0647, 0.0647, −0.06469, 0.06467, −0.06466, −0.06464, 0.06463, 0.06463, −0.06462, 0.06462, 0.06462, −0.06462, 0.06461, 0.06461, −0.06457, −0.06455, 0.06455, 0.06454, 0.06454, 0.06452, −0.06452, −0.06452, 0.06451, −0.06449, −0.06447, −0.06446, 0.06445, −0.06445, 0.06443, −0.06441, 0.06441, −0.06441, −0.06437, −0.06435, 0.06435, −0.06435, 0.06434, 0.06431, 0.06429, 0.06428, −0.06427, −0.06426, −0.06425, −0.06423, 0.06423, 0.06423, 0.0642, 0.06415, 0.06412, −0.0641, −0.0641, −0.0641, −0.0641, 0.0641, 0.06409, 0.06407, 0.06407, −0.06407, −0.06407, −0.06406, −0.06404, −0.06404, 0.06402, −0.06401, 0.064, 0.064, 0.06397, −0.06396, 0.06391, 0.0639, −0.06387, 0.06387, −0.06387, 0.06386, 0.06385, 0.06385, −0.06384, −0.06383, −0.06383, 0.06382, −0.0638, −0.06379, 0.06379, −0.06378, 0.06377, −0.06377, −0.06376, 0.06376, 0.06376, −0.06375, −0.06374, −0.06374, 0.06374, −0.06372, −0.06371, −0.0637, 0.06368, 0.06367, −0.06366, −0.06366, 0.06364, −0.06363, 0.06362, 0.0636, 0.06358, −0.06358, 0.06357, 0.06357, 0.06357, 0.06357, −0.06355, −0.06354, 0.06353, −0.06351, −0.06351, 0.06351, −0.06351, −0.0635, 0.06349, 0.06343, −0.06343, 0.06339, 0.06334, −0.0633, −0.06326, −0.06325, −0.06323, −0.06323, 0.06321, 0.06319, 0.06319, 0.06318, 0.06318, −0.06316, 0.06316, 0.06315, 0.06313, 0.06312, 0.06311, −0.06309, −0.06309, −0.06309, 0.06308, −0.06305, −0.06304, 0.06304, 0.06303, 0.06301, −0.063, −0.06297, 0.06294, −0.06292, 0.06292, 0.0629, −0.06289, −0.06288, 0.06287, −0.06286, −0.06285, −0.06284, −0.06283, −0.06282, 0.06281, 0.06281, 0.0628, −0.0628, 0.06279, 0.06279, 0.06279, 0.06279, 0.06276, 0.06276, 0.06275, −0.06274, −0.06272, −0.06272, −0.06268, −0.06267, −0.06267, 0.06266, −0.06265, −0.06265, 0.06265, 0.06264, −0.06264, 0.06264, −0.06264, 0.06263, −0.06262, 0.06261, −0.06258, 0.06258, −0.06258, 0.06254, −0.06254, −0.06253, −0.0625, −0.06249, 0.06248, −0.06246, −0.06246, 0.06244, −0.06243, 0.0624, 0.06239, −0.06239, −0.06238, 0.06234, −0.06233, −0.06231, −0.06228, 0.06228, 0.06228, 0.06227, −0.06219, −0.06218, −0.06217, 0.06217, 0.06216, −0.06216, 0.06216, −0.06214, 0.06213, −0.06213, −0.06212, 0.06211, 0.06211, −0.06209, 0.06208, −0.06208, −0.06207, −0.06206, 0.06206, 0.06205, 0.06203, 0.06202, 0.06202, 0.06201, 0.062, −0.06198, 0.06195, 0.06195, −0.06194, 0.06192, 0.06192, 0.06192, −0.06191, 0.06191, 0.06189, 0.06189, 0.06189, 0.06188, 0.06185, 0.06185, 0.06185, −0.06185, −0.06182, −0.0618, −0.06177, 0.06176, 0.06175, −0.06175, −0.06175, −0.06174, −0.06173, 0.06172, 0.06172, −0.06172, −0.06171, −0.0617, 0.0617, −0.06168, 0.06167, 0.06167, 0.06165, −0.06165, −0.06164, 0.06164, 0.06163, −0.06162, 0.06161, 0.06158, −0.06157, 0.06157, 0.06157, −0.06156, −0.06155, 0.06153, 0.06152, 0.06152, 0.06151, 0.06151, −0.0615, −0.0615, −0.0615, −0.06149, −0.06149, 0.06145, −0.06144, 0.06143, 0.06142, −0.06142, 0.0614, −0.0614, −0.06138, 0.06138, −0.06137, 0.06137, 0.06136, −0.06134, −0.06132, 0.06128, −0.06124, 0.06123, −0.0612, −0.06119, 0.06117, −0.06117, 0.06116, −0.06116, −0.06113, 0.06111, 0.0611, −0.06109, 0.06108, −0.06108, −0.06107, −0.06107, −0.06107, 0.06106, 0.06105, 0.06104, −0.06103, −0.06103, −0.06103, −0.06102, 0.06102, 0.06098, −0.06098, 0.06097, 0.06094, 0.06093, −0.06093, −0.06093, −0.06093, 0.06093, −0.06092, −0.06092, 0.06092, −0.0609, 0.06088, 0.06088, −0.06087, 0.06085, 0.06085, 0.06084, −0.06083, −0.06077, 0.06075, −0.06075, −0.06073, −0.06073, −0.06073, 0.06072, 0.06071, −0.06071, 0.06071, −0.0607, 0.06068, 0.06068, −0.06068, −0.06065, 0.06065, −0.06064, 0.06063, −0.06061, 0.0606, −0.0606, 0.06058, 0.06056, 0.06056, −0.06056, 0.06055, 0.06054, 0.06053, 0.06052, 0.06052, 0.06051, 0.06051, 0.06049, 0.06049, 0.06048, −0.06046, −0.06046, −0.06045, 0.06043, −0.06042, 0.06041, −0.0604, 0.06037, 0.06036, −0.06035, 0.06035, −0.06035, −0.06034, −0.06034, 0.06033, −0.06032, 0.06032, 0.06031, −0.0603, −0.06027, −0.06025, −0.06023, −0.06022, 0.06016, 0.06014, −0.06014, 0.06013, 0.06012, 0.06011, 0.0601, 0.0601, 0.06009, −0.06009, −0.06007, −0.06007, −0.06007, −0.06007, −0.06006, −0.06006, 0.06006, −0.06004, 0.06004, 0.06002, 0.06002, −0.05999, 0.05997, −0.05997, −0.05995, −0.05994, 0.05993, −0.05993, −0.05993, 0.05993, 0.05993, 0.05992, 0.05991, −0.0599, −0.05989, −0.05989, 0.05988, 0.05986, −0.05983, 0.05983, −0.05982, −0.05979, 0.05979, −0.05976, 0.05976, −0.05974, −0.05973, −0.05973, 0.05973, −0.05972, 0.05971, −0.05969, 0.05968, 0.05968, 0.05967, −0.05967, 0.05967, 0.05966, −0.05965, 0.05964, 0.05962, −0.05962, 0.05962, 0.05962, 0.05962, −0.05957, −0.05956, 0.05953, −0.05953, 0.05953, −0.05953, 0.05953, 0.05953, −0.05952, −0.05949, 0.05948, −0.05947, −0.05945, −0.05945, 0.0594, −0.05937, 0.05937, 0.05937, 0.05935, 0.05935, 0.05934, −0.05934, −0.05933, −0.05932, −0.05932, 0.05932, 0.05932, −0.0593, −0.0593, −0.05927, 0.05927, 0.05925, 0.05922, 0.05922, 0.05922, 0.05921, −0.05921, −0.05921, 0.05921, 0.0592, 0.0592, −0.05918, −0.05917, −0.05916, −0.05915, 0.05914, −0.05914, 0.05914, 0.05912, 0.05907, −0.05907, 0.05904, −0.05904, 0.05904, −0.05903, 0.05903, −0.05903, 0.05903, 0.05903, 0.05901, 0.05898, 0.05898, −0.05897, −0.05896, 0.05895, 0.05894, 0.05894, 0.05893, 0.05892, −0.0589, −0.05888, 0.05887, −0.05886, −0.05885, 0.05885, −0.05883, 0.05883, 0.05882, 0.05881, −0.05881, 0.05879, 0.05878, 0.05878, −0.05875, 0.05873, 0.05873, 0.05873, −0.05871, 0.0587, −0.05869, 0.05868, 0.05866, −0.05866, 0.05865, −0.05863, 0.05863, 0.05862, 0.05861, −0.05857, 0.05857, −0.05856, 0.05856, −0.05852, 0.0585, 0.05847, −0.05847, −0.05847, 0.05846, 0.05846, 0.05846, −0.05844, 0.05844, 0.05843, −0.05843, −0.05841, −0.05841, 0.05841, −0.0584, −0.0584, −0.0584, −0.0584, −0.05839, 0.05838, −0.05838, −0.05837, −0.05834, −0.05833, 0.05832, −0.05832, −0.05831, −0.05828, 0.05827, 0.05827, 0.05827, −0.05825, −0.05825, 0.05825, −0.05824, 0.0582, 0.0582, 0.05818, −0.05817, 0.05814, 0.05813, −0.05812, 0.05811, 0.05811, 0.0581, −0.05809, −0.05808, 0.05806, −0.05806, −0.05806, 0.05805, −0.05803, 0.05803, 0.05801, −0.058, −0.05798, 0.05798, 0.05797, 0.05797, 0.05797, 0.05796, −0.05796, −0.05795, 0.05795, −0.05793, −0.05793, −0.05791, −0.05789, 0.05788, 0.05787, 0.05786, −0.05785, 0.05784, −0.05783, 0.05782, 0.05781, −0.05779, 0.05778, 0.05778, 0.05777, −0.05776, −0.05776, 0.05775, 0.05774, 0.05773, −0.05772, 0.05772, −0.05771, −0.05771, 0.05771, −0.0577, 0.05769, 0.05768, 0.05768, −0.05768, 0.05768, 0.05768, 0.05766, −0.05763, −0.05763, −0.05763, −0.05763, 0.05762, −0.05761, −0.0576, 0.0576, −0.05759, 0.05758, 0.05757, −0.05756, −0.05755, 0.05754, 0.05754, −0.05754, −0.05753, −0.05752, −0.05749, 0.05749, 0.05748, −0.05748, −0.05747, 0.05746, −0.05746, 0.05746, 0.05745, −0.05743, 0.05742, 0.0574, −0.0574, 0.0574, −0.05739, −0.05738, 0.05738, −0.05737, −0.05737, 0.05735, 0.05734, −0.05733, −0.05733, 0.05731, −0.05728, 0.05727, 0.05727, −0.05727, −0.05726, 0.05725, 0.05725, 0.05724, 0.05723, 0.05723, −0.05722, −0.0572, −0.0572, −0.05719, 0.05719, −0.05718, −0.05717, 0.05716, 0.05716, −0.05716, −0.05714, 0.05714, 0.05713, −0.05712, −0.05712, 0.05712, −0.05711, −0.05711, −0.05711, 0.05711, 0.0571, −0.05709, 0.05708, 0.05707, −0.05707, 0.05706, −0.05706, 0.05706, 0.05701, 0.057, 0.057, −0.05699, −0.05698, −0.05695, 0.05693, −0.05691, −0.0569, −0.0569, 0.05689, −0.05689, −0.05689, 0.05688, 0.05688, −0.05686, 0.05685, 0.05685, 0.05685, 0.05684, −0.05683, 0.05683, −0.05682, −0.05681, −0.0568, 0.05679, 0.05677, 0.05676, −0.05676, −0.05676, 0.05675, 0.05675, 0.05674, 0.05671, −0.0567, 0.05669, 0.05667, 0.05666, −0.05664, −0.05664, −0.05663, 0.05663, 0.05663, 0.05662, 0.0566, −0.0566, −0.05658, −0.05654, 0.05653, −0.05652, 0.05648, 0.05647, 0.05646, −0.05646, −0.05645, −0.05644, −0.05644, 0.05643, −0.05643, −0.05641, −0.05641, 0.0564, −0.0564, −0.05639, 0.05639, −0.05638, −0.05637, −0.05637, −0.05636, 0.05636, 0.05635, −0.05634, 0.05633, 0.0563, 0.0563, 0.05629, −0.05628, −0.05628, 0.05627, −0.05627, −0.05627, −0.05626, 0.05625, 0.05624, 0.05623, 0.05622, 0.05621, 0.0562, 0.0562, 0.05619, 0.05619, −0.05619, 0.05618, −0.05618, −0.05617, 0.05617, −0.05616, 0.05616, −0.05615, −0.05614, −0.05611, 0.05611, 0.0561, −0.0561, 0.0561, 0.05605, −0.05604, 0.05604, 0.05603, 0.05602, −0.05602, 0.056, −0.056, −0.05599, 0.05599, −0.05597, −0.05597, 0.05596, 0.05593, −0.05593, −0.05592, −0.05591, 0.0559, 0.0559, −0.05589, 0.05589, 0.05588, −0.05586, 0.05584, −0.05583, 0.05582, 0.05582, 0.05578, 0.05578, 0.05578, 0.05576, 0.05576, 0.05572, 0.05571, −0.0557, 0.05568, −0.05568, 0.05568, 0.05567, 0.05566, 0.05566, −0.05566, 0.05565, 0.05565, −0.05564, 0.05562, −0.05561, −0.05559, −0.05556, 0.05556, 0.05555, 0.05553, 0.05552, −0.05552, −0.0555, −0.0555, −0.0555, 0.05549, −0.05549, −0.05548, 0.05546, −0.05546, −0.05545, 0.05545, −0.05544, 0.05542, −0.05542, 0.05542, 0.05541, −0.05541, −0.0554, −0.0554, −0.0554, −0.05538, −0.05538, 0.05537, 0.05536, −0.05535, −0.05534, 0.05533, −0.05532, 0.05532, −0.05531, 0.05531, 0.0553, −0.05528, −0.05526, 0.05522, 0.05522, −0.05522, −0.05522, 0.05519, 0.05519, −0.05519, 0.05518, 0.05518, 0.05517, 0.05516, 0.05515, 0.05514, 0.05514, −0.05513, 0.05512, −0.05511, −0.05511, −0.0551, −0.05509, −0.05508, 0.05506, −0.05505, −0.05504, 0.05503, −0.05503, 0.05503, 0.05503, −0.05503, 0.05502, −0.05502, 0.05502, 0.05501, 0.055, 0.055, 0.05499, 0.05498, −0.05498, 0.05498, −0.05495, 0.05495, 0.05494, 0.05493, 0.05493, −0.05492, 0.05492, 0.05491, 0.05491, −0.05491, 0.05491, 0.05489, 0.05489, −0.05489, 0.05488, 0.05488, 0.05487, 0.05486, 0.05486, −0.05485, 0.05483, 0.05483, −0.05482, 0.0548, −0.0548, −0.05478, 0.05478, 0.05476, 0.05474, 0.05474, −0.05473, −0.05472, 0.0547, 0.05469, 0.05468, 0.05466, −0.05466, 0.05465, 0.05464, −0.05462, −0.05462, 0.05461, −0.05461, −0.05458, 0.05457, −0.05457, −0.05455, 0.05455, −0.05454, 0.05454, 0.05452, −0.05452, −0.0545, −0.0545, −0.0545, −0.0545, 0.05449, 0.05448, −0.05447, −0.05446, 0.05446, −0.05445, −0.05445, −0.05445, 0.05444, −0.05444, −0.05443, −0.05442, −0.05442, −0.05439, −0.05436, −0.05434, 0.05434, −0.05433, −0.05433, −0.05432, 0.05429, 0.05429, 0.05428, −0.05428, 0.05426, −0.05425, −0.05424, 0.05424, 0.05424, 0.05423, 0.05423, −0.05423, −0.05423, 0.05422, 0.05422, 0.05421, −0.05421, −0.05419, 0.05419, 0.05416, 0.05416, 0.05415, −0.05414, 0.05414, −0.05412, 0.05412, −0.05411, 0.0541, 0.0541, 0.05407, −0.05405, 0.05404, 0.05402, −0.05402, −0.05402, 0.05402, 0.05401, −0.054, 0.05399, 0.05398, −0.05396, 0.05396, 0.05393, 0.05392, −0.05391, −0.05391, 0.05389, −0.05387, −0.05387, −0.05386, 0.05385, 0.05384, −0.05382, −0.05382, 0.05382, −0.05379, 0.05379, −0.05379, −0.05378, −0.05377, 0.05377, 0.05376, −0.05375, 0.05375, −0.05375, −0.05375, −0.05374, 0.05373, −0.05373, −0.05371, −0.05371, 0.0537, 0.05369, −0.05368, −0.05368, 0.05367, 0.05367, −0.05367, −0.05367, 0.05364, −0.05363, 0.05362, 0.05362, 0.0536, 0.0536, 0.0536, −0.0536, 0.05359, −0.05358, 0.05356, 0.05356, 0.05354, −0.05354, 0.05354, −0.05353, −0.05352, 0.05352, −0.05351, 0.0535, −0.0535, 0.0535, −0.05348, 0.05348, 0.05345, −0.05344, 0.05344, −0.05343, 0.05342, −0.05342, −0.0534, −0.0534, −0.0534, 0.05339, −0.05339, 0.05337, −0.05337, −0.05336, 0.05335, 0.05334, 0.05333, 0.05332, 0.05332, −0.05331, −0.05331, 0.05328, −0.05327, −0.05326, −0.05323, 0.05322, −0.05322, −0.05321, −0.0532, −0.05319, −0.05319, −0.05319, −0.05318, 0.05317, 0.05317, 0.05316, 0.05314, −0.05314, −0.05314, 0.05313, 0.05313, −0.0531, −0.0531, 0.0531, −0.05308, 0.05305, 0.05301, 0.053, −0.053, 0.05299, 0.05298, −0.05297, −0.05297, −0.05295, 0.05295, 0.05295, −0.05294, −0.05293, −0.05293, −0.05292, 0.05291, 0.05291, 0.05291, 0.05291, 0.0529, −0.0529, −0.0529, −0.0529, −0.0529, 0.0529, −0.05289, 0.05285, −0.05284, 0.05283, −0.05282, 0.05281, 0.05279, 0.05278, −0.05278, −0.05277, −0.05276, −0.05276, −0.05275, 0.05274, −0.05273, 0.05272, −0.05271, 0.05269, 0.05267, −0.05266, −0.05266, 0.05265, −0.05265, −0.05264, −0.05264, −0.05264, −0.05263, −0.05262, −0.05262, −0.05261, 0.0526, −0.05259, 0.05259, 0.05258, −0.05258, 0.05258, 0.05258, 0.05258, 0.05257, −0.05257, 0.05256, −0.05255, −0.05255, −0.05255, −0.05253, 0.05253, 0.05253, −0.05252, −0.05252, −0.05252, 0.05252, 0.05252, 0.05252, 0.05252, −0.0525, −0.0525, −0.05246, 0.05245, −0.05244, −0.05243, −0.05243, 0.05242, 0.05242, 0.05241, 0.05241, −0.05241, 0.0524, −0.05238, −0.05237, 0.05237, 0.05234, −0.05234, −0.05234, −0.05233, 0.05233, 0.05232, 0.0523, 0.0523, −0.05229, 0.05229, −0.05228, 0.05228, 0.05228, −0.05227, −0.05226, 0.05226, 0.05224, 0.05224, 0.05222, −0.05222, −0.05221, −0.0522, −0.0522, −0.0522, −0.05219, −0.05218, −0.05218, −0.05218, 0.05216, −0.05215, 0.05215, −0.05215, −0.05214, −0.05213, −0.05213, −0.05213, 0.05212, 0.05209, 0.05209, 0.05205, −0.05204, 0.05204, 0.05203, 0.05203, 0.05203, 0.05202, 0.05201, 0.052, −0.05195, 0.05195, −0.05195, −0.05194, 0.05194, 0.05191, 0.0519, 0.0519, 0.05186, 0.05183, −0.05181, −0.05181, 0.05181, 0.0518, −0.05178, −0.05177, −0.05175, 0.05175, −0.05175, −0.05175, 0.05175, −0.05174, 0.05174, 0.05173, 0.05173, −0.05173, 0.05172, −0.05171, −0.0517, 0.05168, 0.05167, −0.05165, −0.05164, −0.05164, 0.05164, −0.05162, 0.05162, −0.05161, 0.0516, −0.0516, −0.05158, −0.05157, −0.05157, 0.05157, −0.05156, −0.05156, 0.05155, −0.05155, 0.05154, −0.05153, 0.05153, −0.05153, 0.05152, 0.0515, −0.0515, 0.0515, 0.0515, 0.05149, 0.05149, 0.05147, −0.05147, −0.05147, 0.05147, −0.05147, 0.05147, −0.05146, −0.05146, 0.05145, 0.05145, −0.05143, −0.05142, −0.05142, −0.05141, 0.05141, 0.05141, 0.05141, 0.0514, 0.0514, −0.0514, −0.0514, 0.05139, −0.05139, −0.05138, 0.05138, 0.05137, 0.05136, 0.05135, 0.05135, −0.05135, −0.05134, −0.05133, −0.05131, −0.0513, 0.05129, 0.05128, −0.05128, 0.05128, 0.05128, 0.05127, −0.05126, −0.05125, 0.05125, −0.05124, −0.05123, −0.05121, 0.05121, −0.05119, −0.05119, −0.05118, 0.05117, 0.05117, 0.05117, −0.05116, 0.05116, 0.05115, 0.05115, 0.05115, 0.05114, 0.05113, 0.05113, −0.05112, −0.05112, 0.0511, 0.05109, 0.05109, −0.05109, 0.05107, 0.05105, 0.05105, 0.05104, −0.05103, 0.05103, 0.05103, −0.05103, −0.05101, −0.05101, −0.05101, −0.05101, −0.051, 0.051, 0.051, −0.05099, −0.05098, 0.05098, 0.05097, −0.05097, −0.05096, −0.05096, 0.05095, 0.05094, −0.05091, 0.05091, −0.05091, 0.0509, −0.05089, 0.05088, 0.05087, 0.05087, 0.05086, −0.05086, −0.05086, −0.05085, 0.05084, −0.05083, 0.05083, 0.05083, −0.05082, 0.05082, 0.05082, 0.05082, −0.05081, −0.0508, 0.0508, −0.0508, −0.0508, 0.0508, −0.05079, 0.05079, 0.05076, 0.05075, 0.05074, −0.05074, −0.05074, 0.05073, 0.05072, −0.05071, 0.05071, 0.05069, 0.05069, −0.05069, 0.05068, −0.05068, −0.05067, −0.05067, 0.05066, −0.05066, −0.05066, 0.05065, −0.05065, 0.05065, 0.05065, −0.05064, 0.05062, −0.05058, −0.05058, 0.05057, −0.05057, 0.05056, 0.05056, −0.05056, −0.05056, −0.05055, −0.05055, 0.05054, −0.05053, −0.05053, 0.05052, −0.05051, −0.05051, −0.05051, 0.0505, −0.05049, 0.05046, 0.05045, 0.05045, −0.05043, 0.05043, −0.05042, −0.05041, −0.0504, −0.05039, 0.05039, −0.05039, 0.05038, −0.05036, −0.05036, 0.05035, 0.05034, −0.05033, 0.05033, −0.05032, 0.05031, −0.0503, 0.0503, −0.05029, 0.05029, −0.05029, 0.05029, −0.05028, −0.05028, −0.05027, 0.05027, 0.05026, 0.05025, 0.05023, −0.05022, −0.05022, −0.0502, 0.05017, −0.05017, −0.05017, 0.05016, 0.05016, −0.05015, 0.05014, −0.05014, −0.05014, −0.05012, 0.05011, 0.05011, −0.05011, −0.05009, 0.05009, 0.05008, 0.05008, 0.05007, −0.05006, 0.05006, −0.05004, −0.05003, 0.05003, 0.05002, −0.05, −0.05, 0.04997, −0.04996, −0.04995, 0.04994, −0.04994, −0.04994, −0.04991, −0.04991, −0.04991, 0.0499, 0.0499, 0.0499, 0.04989, −0.04989, 0.04989, −0.04989, 0.04987, −0.04984, −0.04984, 0.04984, −0.04984, −0.04982, 0.04981, 0.04981, −0.0498, 0.0498, −0.04979, −0.04979, −0.04978, 0.04977, 0.04977, 0.04977, −0.04976, −0.04975, −0.04975, −0.04974, −0.04973, 0.0497, 0.0497, 0.04969, −0.04965, −0.04965, 0.04965, 0.04964, 0.04963, −0.04963, 0.04963, −0.04962, 0.04961, 0.0496, −0.04958, 0.04957, −0.04957, −0.04956, −0.04956, −0.04954, −0.04953, 0.04953, 0.04952, −0.0495, 0.0495, −0.0495, −0.04949, −0.04949, −0.04949, 0.04948, 0.04946, −0.04946, −0.04946, −0.04945, 0.04944, −0.04943, 0.04941, 0.0494, −0.0494, −0.0494, −0.04936, 0.04935, −0.04931, 0.04928, 0.04928, −0.04928, 0.04927, 0.04927, 0.04926, 0.04926, 0.04926, 0.04924, 0.04923, 0.0492, 0.04919, 0.04919, −0.04919, −0.04918, −0.04918, 0.04918, −0.04918, −0.04916, −0.04915, 0.04913, 0.04912, −0.04909, −0.04909, 0.04908, −0.04907, −0.04907, −0.04907, 0.04906, −0.04906, 0.04905, −0.04905, 0.04904, −0.04903, 0.04903, −0.04902, −0.04902, −0.04901, −0.04901, 0.04901, −0.049, 0.049, −0.04899, 0.04898, −0.04898, −0.04898, −0.04896, −0.04896, −0.04895, −0.04895, 0.04893, 0.04892, 0.04891, 0.04891, −0.04891, −0.0489, −0.0489, −0.04889, 0.04888, −0.04886, −0.04885, 0.04885, −0.04884, −0.04882, −0.04882, 0.04881, 0.04881, −0.0488, −0.04879, 0.04879, 0.04879, 0.04879, −0.04878, −0.04877, −0.04876, 0.04875, −0.04874, 0.04874, 0.04873, 0.04873, −0.04873, −0.04873, 0.04872, 0.0487, 0.04869, 0.04868, −0.04867, −0.04867, −0.04867, 0.04864, −0.04864, 0.04864, −0.04863, −0.04863, 0.04862, 0.0486, 0.04859, 0.04859, −0.04857, 0.04857, 0.04856, 0.04855, 0.04855, −0.04855, −0.04854, −0.04854, 0.04853, 0.04853, −0.04853, −0.04853, 0.04851, −0.04851, 0.04851, 0.0485, 0.0485, 0.04849, 0.04848, 0.04847, −0.04847, −0.04846, 0.04845, −0.04845, −0.04844, 0.04844, 0.04842, 0.04842, 0.04841, −0.0484, 0.04838, −0.04838, 0.04838, −0.04837, −0.04835, 0.04834, 0.04834, −0.04832, −0.0483, 0.0483, −0.04829, −0.04827, −0.04827, 0.04827, −0.04826, 0.04825, 0.04824, 0.04823, 0.04823, −0.04822, 0.04822, −0.04822, 0.04821, 0.04819, −0.04819, −0.04816, 0.04816, −0.04814, −0.04814, −0.04814, 0.04814, 0.04814, −0.04812, 0.04812, 0.04812, 0.04812, 0.04811, 0.0481, −0.0481, 0.0481, −0.04809, −0.04808, −0.04807, 0.04807, −0.04807, 0.04806, 0.04805, −0.04805, 0.04805, −0.04804, −0.04804, −0.04804, 0.04803, −0.04802, 0.04801, −0.04801, 0.04801, −0.048, 0.048, 0.048, −0.048, −0.04799, −0.04798, 0.04798, −0.04797, 0.04796, 0.04796, 0.04796, −0.04796, 0.04796, −0.04795, 0.04793, −0.04793, 0.04792, 0.04792, −0.04791, −0.0479, −0.04789, −0.04789, 0.04788, 0.04788, 0.04788, −0.04786, −0.04786, 0.04786, 0.04786, 0.04785, −0.04784, −0.04784, −0.04783, −0.04783, −0.04782, 0.04782, 0.04782, 0.04781, 0.0478, −0.0478, 0.0478, −0.04779, 0.04779, −0.04779, −0.04779, 0.04778, 0.04776, 0.04774, 0.04774, 0.04773, 0.04773, 0.04772, 0.04772, −0.04771, −0.04769, −0.04769, −0.04768, −0.04767, −0.04766, −0.04766, −0.04765, −0.04764, 0.04764, −0.04763, −0.04762, 0.0476, −0.04759, 0.04758, 0.04758, 0.04757, 0.04757, 0.04756, −0.04754, 0.04754, −0.04754, 0.04753, −0.04753, 0.04753, 0.04752, 0.04752, −0.04751, 0.0475, −0.0475, −0.04749, 0.04749, 0.04749, −0.04748, −0.04748, 0.04748, −0.04748, −0.04747, 0.04747, 0.04746, 0.04745, 0.04745, 0.04744, 0.04743, −0.04742, 0.04742, 0.0474, 0.04739, 0.04739, 0.04738, −0.04737, −0.04736, 0.04736, −0.04735, 0.04735, 0.04734, −0.04731, −0.04731, −0.04731, 0.0473, 0.04729, 0.04729, 0.04727, 0.04727, 0.04727, 0.04726, −0.04726, −0.04725, 0.04725, −0.04724, 0.04723, 0.04722, −0.04721, −0.04721, −0.0472, 0.0472, −0.0472, −0.0472, 0.0472, −0.04719, 0.04719, 0.04718, 0.04718, −0.04717, 0.04716, 0.04715, 0.04714, −0.04713, 0.04711, −0.0471, −0.04709, 0.04709, 0.04709, 0.04709, −0.04708, −0.04708, −0.04708, −0.04707, −0.04706, −0.04705, 0.04704, −0.047, 0.04699, −0.04698, −0.04697, 0.04696, −0.04695, 0.04694, −0.04694, −0.04694, 0.04693, −0.04692, −0.04691, 0.04691, 0.04691, 0.0469, −0.04689, 0.04689, 0.04688, 0.04688, −0.04687, 0.04686, −0.04686, −0.04683, 0.04683, −0.04682, −0.04682, 0.04681, −0.04681, 0.0468, −0.0468, 0.04679, 0.04676, −0.04676, 0.04676, −0.04676, 0.04675, −0.04675, 0.04674, 0.04674, 0.04674, −0.04673, 0.04673, 0.04672, 0.0467, 0.04669, −0.04669, −0.04669, −0.04668, −0.04667, 0.04667, −0.04667, −0.04667, −0.04666, 0.04665, −0.04664, 0.04664, 0.04663, 0.04663, −0.04662, 0.04662, 0.04662, −0.04661, −0.0466, 0.0466, −0.0466, 0.04659, 0.04658, −0.04658, −0.04658, 0.04658, −0.04657, 0.04656, −0.04656, −0.04655, −0.04654, −0.04653, −0.04653, −0.04651, 0.04651, −0.04649, 0.04648, −0.04648, 0.04647, 0.04646, 0.04646, 0.04646, 0.04642, 0.04641, −0.04641, −0.04641, −0.04641, 0.0464, 0.04637, 0.04637, −0.04635, 0.04632, 0.04631, −0.0463, −0.04628, −0.04627, 0.04627, 0.04626, 0.04625, 0.04625, −0.04624, 0.04624, 0.04623, 0.04622, 0.04619, −0.04619, 0.04619, 0.04618, 0.04618, 0.04617, −0.04617, −0.04617, 0.04617, 0.04617, 0.04617, 0.04617, −0.04616, −0.04615, 0.04614, 0.04614, 0.04614, −0.04613, 0.04613, −0.04612, −0.0461, −0.0461, −0.0461, −0.04608, 0.04608, −0.04607, −0.04607, 0.04607, 0.04607, −0.04607, 0.04607, −0.04605, 0.04605, −0.04604, 0.04602, −0.04602, −0.04602, −0.04602, 0.04601, 0.04599, −0.04599, 0.04598, −0.04598, 0.04596, 0.04596, −0.04594, 0.04593, −0.04592, −0.04591, −0.04591, −0.0459, 0.0459, 0.0459, −0.04589, −0.04589, −0.04588, −0.04588, −0.04587, −0.04587, 0.04587, 0.04587, −0.04587, −0.04587, 0.04586, −0.04584, 0.04583, −0.04583, 0.04583, 0.04581, −0.04581, −0.04581, −0.04581, −0.04581, −0.0458, 0.0458, −0.04579, 0.04578, 0.04576, 0.04576, −0.04576, −0.04575, −0.04575, 0.04575, −0.04575, −0.04572, −0.04572, 0.04572, −0.04572, 0.04571, −0.04571, 0.04571, 0.0457, −0.0457, 0.04569, 0.04569, 0.04569, −0.04569, −0.04569, −0.04568, 0.04567, 0.04566, 0.04565, −0.04565, −0.04564, 0.04564, 0.04564, 0.04563, −0.04563, −0.04562, 0.04562, −0.0456, 0.04559, −0.04559, −0.04557, −0.04556, −0.04554, −0.04553, 0.04553, −0.04551, −0.04551, −0.0455, 0.04548, 0.04548, 0.04547, 0.04546, −0.04545, 0.04544, −0.04544, −0.04544, −0.04543, −0.04542, 0.04542, 0.04542, −0.04542, 0.04542, 0.04541, −0.04541, −0.04541, 0.0454, 0.0454, 0.04539, −0.04538, −0.04538, 0.04537, −0.04536, 0.04535, −0.04535, −0.04533, −0.04531, −0.04531, 0.04531, 0.04528, −0.04528, −0.04527, −0.04527, −0.04527, 0.04526, 0.04526, 0.04525, 0.04525, 0.04524, 0.04524, −0.04524, −0.04524, −0.04523, −0.04521, −0.04521, −0.04521, 0.04519, −0.04519, −0.04519, −0.04519, 0.04515, −0.04515, −0.04514, 0.04514, 0.04513, 0.04512, −0.0451, 0.04509, 0.04508, 0.04507, 0.04506, 0.04505, 0.04504, −0.04502, 0.04502, 0.04502, 0.04502, 0.045, −0.045, 0.04499, 0.04499, −0.04498, −0.04498, −0.04498, −0.04497, −0.04497, 0.04496, 0.04495, −0.04495, 0.04495, 0.04494, −0.04494, −0.04493, −0.04492, 0.04489, 0.04489, −0.04489, −0.04489, 0.04489, −0.04488, 0.04488, 0.04488, 0.04488, −0.04487, 0.04487, −0.04487, 0.04487, −0.04486, −0.04486, −0.04485, −0.04485, −0.04484, 0.04482, 0.04481, 0.04481, −0.04481, 0.0448, −0.0448, −0.04479, 0.04478, 0.04478, −0.04478, −0.04478, 0.04477, −0.04477, −0.04476, 0.04476, −0.04475, −0.04474, −0.04473, −0.04473, 0.04472, 0.04471, −0.04471, 0.04471, −0.0447, −0.04469, 0.04469, −0.04469, −0.04468, 0.04466, −0.04465, 0.04465, −0.04465, 0.04464, −0.04463, −0.04463, 0.04463, −0.04463, 0.04462, −0.04461, −0.04461, −0.04461, 0.04461, −0.04459, −0.04457, −0.04457, 0.04454, −0.04454, −0.04453, 0.04453, 0.04453, 0.04453, −0.04452, 0.04452, 0.0445, 0.04449, 0.04449, −0.04448, −0.04447, −0.04447, 0.04446, −0.04446, 0.04446, −0.04445, 0.04444, 0.04444, 0.04444, −0.04443, −0.04442, −0.04442, −0.04441, 0.0444, −0.0444, 0.0444, −0.0444, 0.04439, 0.04439, −0.04438, 0.04438, 0.04437, 0.04437, −0.04435, 0.04434, −0.04434, −0.04434, −0.04433, 0.04431, 0.0443, −0.04428, 0.04428, 0.04426, 0.04426, −0.04426, −0.04426, 0.04426, −0.04426, 0.04425, 0.04424, 0.04424, 0.04423, 0.04422, 0.04422, 0.04421, 0.04421, −0.0442, −0.0442, −0.0442, 0.04419, −0.04419, −0.04418, −0.04418, 0.04416, −0.04415, 0.04413, 0.04413, 0.04412, 0.04412, −0.04411, 0.04411, −0.04408, 0.04407, −0.04405, −0.04405, −0.04405, −0.04405, 0.04403, 0.04402, 0.04402, 0.04402, −0.04401, 0.044, −0.044, −0.04399, 0.04399, −0.04398, 0.04398, −0.04398, −0.04398, 0.04397, −0.04396, −0.04396, −0.04395, −0.04395, 0.04394, 0.04393, 0.04392, 0.04392, −0.04391, 0.0439, −0.0439, 0.0439, −0.04389, −0.04388, 0.04387, 0.04387, 0.04386, 0.04386, 0.04385, −0.04385, −0.04384, −0.04384, 0.04383, −0.04383, −0.04382, 0.04382, 0.04381, −0.04381, 0.04379, 0.04378, −0.04378, −0.04378, 0.04378, −0.04377, 0.04377, 0.04375, 0.04374, −0.04374, 0.04374, 0.04373, −0.04373, 0.04373, 0.04372, −0.04371, −0.04371, −0.0437, 0.04368, 0.04368, 0.04367, −0.04366, 0.04365, −0.04365, 0.04364, −0.04363, −0.04363, 0.04363, −0.04363, −0.04362, −0.04362, 0.04362, −0.04361, −0.04361, −0.0436, −0.0436, 0.0436, −0.04359, −0.04359, 0.04358, 0.04358, −0.04357, 0.04356, 0.04355, −0.04355, −0.04355, −0.04354, −0.04354, 0.04352, 0.04352, 0.04352, −0.04352, −0.0435, −0.0435, 0.0435, −0.04348, −0.04348, −0.04347, 0.04346, −0.04346, 0.04346, −0.04346, 0.04345, −0.04345, −0.04344, −0.04343, −0.04343, 0.04343, −0.04343, 0.04342, −0.04341, −0.04341, 0.04341, 0.0434, −0.0434, 0.0434, 0.04339, 0.04338, 0.04338, 0.04336, 0.04335, 0.04335, −0.04335, 0.04335, −0.04334, 0.04333, 0.04332, −0.04331, 0.04331, −0.04331, −0.0433, 0.0433, 0.0433, −0.0433, 0.04329, −0.04329, 0.04328, 0.04327, 0.04326, −0.04326, 0.04326, −0.04326, −0.04326, −0.04325, −0.04325, 0.04324, −0.04324, 0.04322, −0.04321, 0.0432, 0.0432, 0.04319, 0.04318, 0.04316, −0.04314, −0.04313, −0.04313, −0.04313, −0.04312, −0.04311, 0.0431, −0.04309, 0.04309, 0.04309, −0.04308, 0.04308, 0.04308, −0.04307, −0.04306, 0.04306, 0.04304, −0.04304, 0.04303, −0.04302, −0.04302, −0.04302, 0.04301, −0.04301, 0.04301, −0.04299, 0.04299, −0.04298, −0.04298, 0.04297, 0.04297, −0.04297, −0.04297, 0.04296, 0.04296, 0.04295, −0.04294, −0.04294, −0.04294, −0.04294, −0.04293, −0.04292, 0.04291, −0.04291, −0.0429, 0.0429, 0.04289, 0.04288, −0.04288, −0.04288, 0.04288, 0.04288, −0.04287, −0.04285, 0.04284, −0.04284, −0.04282, 0.04281, 0.04281, 0.04281, 0.0428, 0.04279, −0.04279, −0.04279, −0.04279, 0.04278, −0.04277, −0.04276, −0.04276, −0.04275, 0.04274, 0.04274, 0.04272, 0.04271, −0.04271, 0.0427, 0.0427, 0.04269, −0.04267, −0.04267, 0.04266, −0.04264, −0.04264, −0.04263, 0.04263, −0.04262, 0.04262, 0.0426, 0.0426, −0.04259, −0.04259, −0.04258, −0.04258, −0.04257, −0.04256, −0.04256, 0.04255, −0.04255, −0.04254, −0.04253, 0.04252, −0.04252, 0.04252, 0.04251, 0.04251, −0.0425, −0.0425, 0.04249, 0.04249, 0.04247, 0.04247, 0.04246, −0.04246, −0.04246, −0.04244, 0.04244, −0.04242, 0.0424, 0.0424, −0.0424, 0.04238, 0.04238, 0.04237, −0.04236, 0.04235, −0.04235, 0.04234, 0.04234, 0.04234, 0.04233, 0.04233, −0.04233, −0.04232, −0.04232, 0.04231, 0.0423, 0.0423, −0.0423, −0.04229, 0.04229, 0.04228, −0.04228, −0.04227, 0.04225, −0.04224, −0.04224, 0.04224, −0.04223, −0.04222, 0.04222, 0.04221, −0.0422, −0.04219, −0.04219, −0.04219, 0.04218, −0.04218, 0.04217, −0.04216, −0.04216, 0.04215, −0.04214, 0.04212, 0.04212, −0.04211, 0.04209, 0.04209, 0.04209, −0.04206, 0.04205, 0.04204, 0.04203, −0.04203, 0.042, 0.042, −0.04199, 0.04199, 0.04199, 0.04199, −0.04199, −0.04197, 0.04194, −0.04194, 0.04193, 0.04193, 0.04193, 0.04192, 0.04192, −0.04191, 0.04191, 0.0419, −0.0419, 0.0419, 0.04189, −0.04189, −0.04189, −0.04189, 0.04188, 0.04187, 0.04186, −0.04184, 0.04184, 0.04183, 0.04182, 0.04182, −0.04181, −0.04181, −0.0418, −0.04179, −0.04179, −0.04179, −0.04179, −0.04178, 0.04178, −0.04178, 0.04177, 0.04177, −0.04176, −0.04176, −0.04175, −0.04175, −0.04175, 0.04173, −0.04173, 0.04171, 0.0417, 0.0417, 0.04169, −0.04168, −0.04167, −0.04167, −0.04166, −0.04166, 0.04166, −0.04165, 0.04165, −0.04165, −0.04165, 0.04165, −0.04164, −0.04164, 0.04163, −0.04162, −0.04162, −0.04161, −0.04161, −0.0416, 0.04159, 0.04159, 0.04158, 0.04158, −0.04158, −0.04157, −0.04156, 0.04156, 0.04155, 0.04155, −0.04154, 0.04154, −0.04153, 0.04152, 0.04152, 0.04151, 0.04151, −0.04147, 0.04147, −0.04146, −0.04145, −0.04145, −0.04144, −0.04144, −0.04142, 0.04141, 0.0414, 0.0414, −0.04139, 0.04139, 0.04138, −0.04138, −0.04137, 0.04137, 0.04135, −0.04134, 0.04133, 0.04133, −0.04133, 0.04132, 0.04132, 0.04131, 0.04131, −0.04129, 0.04129, 0.04127, −0.04126, −0.04125, 0.04125, −0.04125, −0.04125, −0.04125, 0.04124, 0.04124, −0.04124, −0.04123, 0.04123, −0.04122, 0.04121, 0.04121, 0.0412, 0.0412, −0.04119, 0.04119, 0.04118, −0.04118, −0.04117, 0.04117, 0.04116, 0.04116, −0.04115, 0.04115, 0.04115, −0.04114, −0.04114, 0.04113, −0.04113, 0.04113, −0.04113, 0.04112, 0.04111, −0.0411, 0.0411, 0.0411, −0.0411, −0.04107, −0.04107, −0.04106, 0.04105, −0.04105, 0.04104, 0.04103, 0.04102, −0.04102, −0.04101, 0.04101, −0.04101, 0.04101, −0.041, −0.041, 0.04099, −0.04098, 0.04098, 0.04097, 0.04097, 0.04096, 0.04096, −0.04093, −0.04093, 0.04093, 0.04093, −0.04091, −0.04091, 0.0409, −0.0409, −0.0409, −0.04087, −0.04087, 0.04086, 0.04085, 0.04085, −0.04085, 0.04084, 0.04083, 0.04083, −0.04083, 0.04082, 0.04082, 0.0408, −0.0408, 0.0408, 0.04079, −0.04078, 0.04077, −0.04077, −0.04077, −0.04076, −0.04076, 0.04076, 0.04075, 0.04075, 0.04074, −0.04074, 0.04073, 0.04073, 0.04073, 0.04073, 0.04073, −0.04073, −0.04073, −0.04073, −0.04073, 0.04071, 0.0407, 0.0407, −0.0407, 0.0407, −0.04069, −0.04068, 0.04068, −0.04068, −0.04067, −0.04065, 0.04065, −0.04063, 0.04063, 0.04062, 0.04062, −0.04062, 0.04061, −0.04061, −0.0406, −0.0406, −0.04059, 0.04058, 0.04058, −0.04058, 0.04057, −0.04057, 0.04057, 0.04057, 0.04057, −0.04055, −0.04054, −0.04054, −0.04054, 0.04053, −0.04051, 0.0405, 0.0405, −0.04048, 0.04048, 0.04048, −0.04048, −0.04048, 0.04046, 0.04046, 0.04046, 0.04045, −0.04045, 0.04045, 0.04045, 0.04044, −0.04044, −0.04044, −0.04043, −0.04042, 0.04041, −0.04041, 0.04039, 0.04039, −0.04039, −0.04039, −0.04038, −0.04038, 0.04038, 0.04037, −0.04037, −0.04036, −0.04036, 0.04036, −0.04036, −0.04034, 0.04034, −0.04034, −0.04034, −0.04033, 0.04033, −0.04032, −0.04032, 0.04031, 0.04031, −0.04031, −0.0403, −0.0403, 0.0403, 0.0403, −0.0403, 0.04029, −0.04029, 0.04028, −0.04027, 0.04027, −0.04026, 0.04026, −0.04025, 0.04025, −0.04024, 0.04024, −0.04024, −0.04024, −0.04022, 0.04021, −0.04021, −0.04021, −0.04021, 0.04021, 0.04021, −0.04021, 0.0402, −0.04019, −0.04019, −0.04017, 0.04017, 0.04016, −0.04016, −0.04016, 0.04015, 0.04013, −0.04011, 0.0401, −0.0401, 0.04009, 0.04009, 0.04009, 0.04008, −0.04008, 0.04007, −0.04007, 0.04006, −0.04006, 0.04005, 0.04005, 0.04005, −0.04004, 0.04004, −0.04003, 0.04003, −0.04003, −0.04001, 0.04001, −0.04001, 0.04, −0.04, −0.03999, −0.03998, −0.03998, 0.03998, −0.03997, −0.03996, −0.03996, −0.03991, −0.03991, 0.03991, −0.03991, 0.0399, −0.0399, −0.03989, 0.03988, 0.03987, −0.03987, −0.03987, −0.03987, −0.03986, −0.03985, −0.03984, 0.03984, 0.03984, 0.03984, −0.03983, 0.03982, 0.03982, −0.03982, −0.03981, 0.03981, 0.03981, 0.03981, −0.03981, −0.03981, −0.03979, 0.03979, −0.03979, 0.03979, −0.03978, 0.03978, −0.03978, 0.03977, −0.03977, 0.03976, 0.03976, −0.03976, 0.03976, −0.03974, 0.03973, −0.03973, 0.03972, 0.03971, −0.03971, −0.03971, −0.0397, 0.03969, 0.03969, −0.03969, −0.03969, −0.03968, 0.03967, 0.03967, −0.03966, 0.03966, 0.03966, 0.03965, −0.03964, 0.03964, −0.03964, 0.03964, 0.03963, 0.03963, −0.03963, −0.03963, 0.03963, −0.03962, 0.03962, 0.03962, 0.03962, 0.03962, −0.03961, 0.03961, 0.03961, −0.03961, 0.0396, 0.03959, 0.03959, 0.03958, −0.03958, −0.03955, −0.03955, −0.03954, −0.03954, 0.03954, −0.03954, −0.03953, −0.03953, −0.03952, −0.03952, 0.03952, 0.0395, −0.0395, 0.0395, −0.0395, −0.0395, −0.03948, 0.03948, 0.03948, 0.03946, −0.03946, −0.03945, 0.03944, −0.03943, −0.03942, −0.03942, −0.03941, 0.03941, 0.03941, −0.0394, −0.03939, −0.03938, 0.03937, 0.03937, 0.03937, 0.03937, 0.03936, −0.03936, 0.03936, 0.03935, −0.03934, 0.03933, 0.03933, −0.03933, 0.03932, −0.03932, 0.03931, −0.0393, 0.03929, −0.03929, −0.03929, 0.03929, 0.03928, −0.03928, −0.03928, −0.03928, −0.03928, 0.03928, −0.03926, 0.03926, −0.03926, 0.03926, −0.03926, −0.03924, −0.03924, 0.03924, −0.03923, 0.03922, 0.03921, −0.03921, 0.03921, 0.0392, −0.03919, 0.03919, 0.03919, 0.03919, 0.03917, −0.03916, 0.03915, −0.03914, 0.03914, −0.03914, −0.03914, −0.03914, −0.03913, −0.03913, −0.03912, −0.03911, 0.03911, −0.03911, 0.03911, −0.0391, −0.03909, −0.03909, −0.03908, −0.03906, −0.03906, −0.03905, 0.03905, 0.03905, 0.03905, −0.03904, 0.03903, 0.03903, −0.03903, 0.03903, −0.039, 0.039, −0.039, −0.03899, −0.03899, −0.03898, −0.03898, −0.03898, 0.03897, 0.03897, −0.03895, −0.03893, 0.03893, 0.03893, 0.03893, 0.03892, −0.03892, 0.03891, 0.03891, 0.0389, −0.0389, 0.03889, −0.03888, 0.03888, 0.03888, −0.03888, −0.03888, 0.03887, 0.03887, −0.03886, 0.03886, 0.03885, −0.03885, −0.03884, −0.03883, 0.03882, −0.03882, −0.03881, 0.03879, −0.03879, −0.03878, 0.03878, 0.03878, −0.03878, −0.03878, −0.03877, 0.03875, −0.03875, −0.03875, −0.03874, −0.03874, −0.03873, 0.03873, −0.03872, −0.03872, −0.03871, 0.0387, −0.0387, −0.03867, −0.03867, −0.03866, 0.03865, −0.03864, −0.03864, −0.03863, −0.03863, −0.03863, 0.03862, −0.03861, −0.03861, 0.0386, 0.0386, −0.03859, 0.03858, −0.03858, 0.03857, −0.03857, −0.03857, −0.03856, −0.03856, 0.03856, −0.03854, −0.03853, 0.03852, −0.03852, −0.03852, −0.0385, 0.0385, −0.03849, 0.03848, −0.03848, 0.03847, 0.03847, −0.03845, −0.03845, −0.03844, 0.03844, −0.03843, −0.03843, 0.03843, 0.03843, 0.03841, −0.03841, −0.03839, 0.03839, 0.03839, 0.03839, 0.03838, −0.03837, −0.03836, −0.03836, −0.03835, −0.03833, 0.03832, −0.03832, −0.03832, −0.03832, −0.03831, −0.03828, 0.03827, 0.03827, −0.03827, 0.03826, −0.03826, −0.03825, −0.03825, 0.03824, 0.03824, 0.03823, −0.03823, 0.03822, −0.03822, −0.03821, 0.03819, −0.03819, −0.03819, 0.03818, 0.03817, −0.03816, 0.03816, 0.03816, 0.03815, 0.03815, −0.03813, −0.03813, −0.03813, −0.03812, 0.0381, 0.03809, −0.03809, 0.03808, −0.03807, 0.03806, −0.03806, −0.03805, 0.03804, −0.03803, 0.03803, 0.03803, 0.03801, −0.03801, −0.03801, −0.038, 0.03799, 0.03799, 0.03799, −0.03798, 0.03798, −0.03797, 0.03797, 0.03797, −0.03797, −0.03795, 0.03795, −0.03794, −0.03794, −0.03794, 0.03793, −0.03793, −0.03793, −0.03792, 0.03792, −0.03792, 0.03792, 0.03792, −0.03791, −0.03791, 0.03791, −0.0379, 0.0379, 0.0379, 0.0379, 0.03789, 0.03789, 0.03788, −0.03785, 0.03784, 0.03783, −0.03783, 0.03783, −0.03783, −0.03783, 0.03782, −0.03782, 0.03782, 0.03781, −0.03781, 0.03781, 0.03781, 0.0378, 0.0378, 0.0378, −0.03779, 0.03779, −0.03778, −0.03777, 0.03777, 0.03776, 0.03776, 0.03776, 0.03776, −0.03775, −0.03775, −0.03775, 0.03774, −0.03773, −0.03771, 0.03771, −0.03771, 0.0377, −0.0377, 0.0377, −0.0377, 0.03769, 0.03768, −0.03768, −0.03768, 0.03768, 0.03767, −0.03766, −0.03766, 0.03765, 0.03764, −0.03762, −0.03762, −0.03762, 0.03761, 0.03761, 0.03761, −0.0376, 0.0376, 0.0376, 0.03759, −0.03759, 0.03759, 0.03758, −0.03756, −0.03755, −0.03755, −0.03755, −0.03754, −0.03754, 0.03753, −0.03753, 0.03753, −0.03753, 0.03753, 0.03752, −0.03752, 0.03751, −0.03751, −0.0375, 0.0375, 0.0375, −0.0375, −0.03749, 0.03749, 0.03749, −0.03748, 0.03748, −0.03747, −0.03747, −0.03746, 0.03745, −0.03745, 0.03745, 0.03745, 0.03745, −0.03744, 0.03743, 0.03742, 0.03742, 0.03742, 0.03741, 0.03741, −0.0374, 0.03738, −0.03738, 0.03737, −0.03737, −0.03737, −0.03737, 0.03737, −0.03736, −0.03735, −0.03735, −0.03735, 0.03734, 0.03734, −0.03733, 0.03733, −0.03732, −0.03731, 0.03731, 0.03731, −0.03731, −0.03731, 0.0373, 0.03729, −0.03729, −0.03728, −0.03728, 0.03727, −0.03727, −0.03726, 0.03726, −0.03726, −0.03725, −0.03725, 0.03725, −0.03725, 0.03724, 0.03724, 0.03724, 0.03723, 0.03722, 0.03722, 0.03722, 0.03722, 0.03722, −0.03721, −0.03721, 0.0372, 0.03719, −0.03718, 0.03717, −0.03717, 0.03716, −0.03716, 0.03715, 0.03714, −0.03713, 0.03713, −0.03712, −0.03712, 0.03712, 0.03711, 0.0371, 0.0371, 0.03709, −0.03708, −0.03706, −0.03705, 0.03705, −0.03704, −0.03704, −0.03703, −0.03703, 0.03702, −0.03702, −0.03701, −0.03701, 0.03701, 0.037, −0.037, 0.037, −0.037, 0.03699, −0.03699, 0.03698, 0.03698, 0.03698, −0.03698, 0.03697, 0.03697, −0.03697, 0.03697, −0.03696, 0.03695, −0.03695, 0.03694, 0.03694, −0.03694, 0.03694, −0.03693, 0.03692, −0.03692, 0.03691, 0.0369, −0.0369, −0.0369, −0.0369, −0.03688, −0.03688, 0.03687, −0.03687, 0.03687, 0.03686, 0.03686, −0.03686, 0.03686, 0.03685, −0.03685, −0.03685, 0.03684, 0.03684, 0.03683, 0.03683, 0.03682, −0.03682, −0.03681, 0.0368, −0.0368, 0.03678, 0.03678, 0.03678, 0.03678, 0.03677, 0.03677, 0.03676, −0.03675, −0.03675, −0.03675, −0.03674, −0.03673, 0.03673, 0.03672, −0.03672, −0.03671, −0.0367, −0.03668, −0.03668, 0.03667, −0.03667, −0.03666, −0.03666, 0.03666, −0.03665, 0.03665, −0.03665, −0.03665, −0.03665, 0.03664, 0.03664, 0.03664, 0.03663, −0.03663, 0.03662, 0.03662, −0.03662, 0.03662, −0.03662, −0.03661, 0.03661, 0.03661, 0.0366, −0.03659, −0.03659, −0.03658, 0.03658, 0.03658, −0.03658, 0.03657, 0.03657, 0.03656, 0.03656, −0.03654, −0.03654, 0.03654, −0.03654, 0.03654, 0.03654, 0.03653, −0.03653, −0.03653, 0.03653, −0.03652, −0.0365, −0.0365, 0.0365, −0.03649, 0.03649, 0.03648, −0.03647, 0.03647, −0.03647, 0.03645, 0.03645, −0.03644, 0.03643, −0.03643, −0.03643, 0.03643, −0.03642, −0.03642, −0.03642, 0.03642, 0.03641, 0.03641, −0.0364, 0.03639, 0.03639, 0.03639, 0.03638, −0.03638, 0.03637, 0.03637, 0.03636, 0.03636, 0.03636, −0.03636, −0.03635, −0.03635, −0.03634, −0.03633, −0.03633, −0.03633, 0.03633, −0.03632, 0.03632, −0.03632, 0.03632, 0.03632, −0.03632, −0.03632, 0.03631, 0.03631, 0.03631, −0.0363, −0.03629, −0.03629, 0.03629, 0.03629, 0.03628, −0.03627, 0.03627, 0.03626, −0.03624, 0.03624, 0.03624, 0.03624, 0.03622, 0.03621, 0.03621, −0.03621, −0.0362, 0.03619, 0.03619, 0.03618, 0.03618, −0.03618, −0.03618, −0.03617, 0.03616, −0.03616, −0.03615, −0.03615, −0.03615, 0.03613, −0.03613, 0.03613, 0.03612, −0.03611, −0.03611, −0.0361, 0.0361, −0.0361, −0.0361, −0.03609, −0.03609, 0.03609, −0.03608, 0.03608, 0.03607, 0.03606, −0.03606, 0.03606, 0.03605, −0.03605, 0.03605, −0.03605, 0.03604, 0.03604, −0.03603, −0.03603, 0.03603, 0.03603, −0.03602, 0.03602, 0.03602, 0.03599, 0.03599, 0.03598, −0.03598, 0.03597, 0.03596, 0.03596, 0.03595, −0.03594, −0.03593, 0.03593, −0.03593, −0.03593, −0.03592, 0.03592, 0.03592, −0.03592, 0.03592, 0.03591, −0.0359, 0.03589, −0.03589, −0.03589, −0.03589, 0.03589, −0.03589, −0.03589, −0.03588, −0.03587, 0.03586, −0.03586, −0.03585, −0.03585, −0.03585, 0.03584, −0.03584, −0.03584, 0.03584, 0.03583, 0.03582, 0.03581, 0.03581, 0.03581, −0.03581, −0.03581, −0.0358, −0.0358, −0.03579, 0.03579, −0.03578, 0.03578, 0.03578, 0.03577, −0.03577, −0.03576, −0.03576, 0.03576, −0.03575, −0.03575, 0.03575, −0.03574, −0.03573, −0.03573, 0.03573, 0.03573, 0.03572, 0.03572, 0.0357, −0.0357, 0.03569, −0.03569, −0.03569, 0.03568, 0.03568, −0.03568, −0.03568, −0.03566, −0.03565, 0.03564, 0.03564, 0.03564, −0.03564, −0.03564, 0.03563, −0.03562, −0.03561, −0.03561, −0.0356, −0.0356, −0.0356, 0.0356, 0.0356, −0.03559, −0.03559, −0.03559, −0.03557, 0.03557, −0.03556, −0.03555, 0.03553, 0.03553, −0.03552, −0.03552, 0.03551, 0.03551, 0.03551, −0.0355, −0.03549, −0.03549, 0.03549, 0.03548, −0.03548, −0.03548, 0.03547, 0.03547, 0.03546, −0.03546, −0.03545, −0.03543, 0.03543, −0.03542, −0.03542, 0.03542, 0.03541, −0.03541, −0.03541, 0.03541, −0.0354, 0.0354, 0.03539, 0.03539, 0.03539, −0.03537, −0.03537, 0.03537, −0.03536, −0.03536, −0.03535, −0.03535, −0.03534, −0.03534, 0.03534, 0.03533, 0.03533, −0.03533, −0.03533, −0.03533, 0.03532, −0.03532, 0.03532, −0.03531, 0.03531, −0.0353, −0.03529, 0.03529, −0.03528, 0.03528, −0.03528, 0.03527, 0.03526, 0.03526, −0.03526, 0.03526, −0.03526, −0.03525, −0.03524, −0.03524, 0.03523, 0.03522, 0.03521, −0.03521, −0.03521, −0.0352, −0.0352, −0.0352, 0.0352, −0.03519, −0.03518, 0.03518, 0.03516, −0.03515, 0.03515, −0.03515, −0.03515, −0.03514, −0.03513, 0.03513, 0.03512, 0.03512, 0.03511, −0.03511, 0.0351, 0.0351, −0.03509, −0.03509, 0.03509, 0.03509, −0.03509, −0.03508, 0.03508, 0.03508, −0.03508, −0.03508, −0.03508, 0.03507, 0.03507, 0.03506, 0.03506, 0.03506, 0.03505, 0.03505, 0.03505, −0.03504, 0.03504, 0.03503, 0.03503, 0.03501, −0.03501, 0.03501, −0.035, 0.035, 0.03498, −0.03498, −0.03498, 0.03497, 0.03497, −0.03497, −0.03495, 0.03493, 0.03493, 0.03493, −0.03493, 0.03492, −0.03492, −0.03492, −0.03492, 0.03492, −0.03491, −0.03491, 0.03491, −0.0349, 0.0349, −0.03489, −0.03489, −0.03488, 0.03488, 0.03488, 0.03488, 0.03487, 0.03486, −0.03486, −0.03485, −0.03485, 0.03485, 0.03485, −0.03484, 0.03483, 0.03482, −0.03481, 0.03481, 0.0348, 0.0348, 0.0348, −0.03479, 0.03479, −0.03479, 0.03478, −0.03478, −0.03478, −0.03477, 0.03477, 0.03476, 0.03475, 0.03475, −0.03475, 0.03475, 0.03474, 0.03473, −0.03473, 0.03472, −0.03471, −0.03471, −0.03471, 0.03471, −0.03469, −0.03469, −0.03469, 0.03469, −0.03468, 0.03467, 0.03466, 0.03465, −0.03464, 0.03464, 0.03463, 0.03462, −0.03462, −0.03462, −0.03461, 0.0346, −0.0346, −0.0346, 0.03459, −0.03459, −0.03458, 0.03457, 0.03457, −0.03457, 0.03456, 0.03456, 0.03456, 0.03454, −0.03454, −0.03454, 0.03453, 0.03453, 0.03452, 0.03452, 0.03452, −0.03451, −0.0345, 0.03449, −0.03449, −0.03449, −0.03448, 0.03448, −0.03447, 0.03447, 0.03447, −0.03446, −0.03445, 0.03445, −0.03444, 0.03442, 0.03442, −0.03441, 0.0344, −0.0344, 0.03439, 0.03439, 0.03438, 0.03437, 0.03436, −0.03436, −0.03436, −0.03436, −0.03435, 0.03435, 0.03435, 0.03435, −0.03435, −0.03434, 0.03434, 0.03434, −0.03434, −0.03433, 0.03433, −0.03432, 0.03432, 0.03432, 0.03431, −0.0343, 0.0343, −0.0343, 0.03429, −0.03429, 0.03428, −0.03428, 0.03428, 0.03427, 0.03427, −0.03427, −0.03427, 0.03425, 0.03425, −0.03425, −0.03424, −0.03424, −0.03424, −0.03424, 0.03422, 0.03422, 0.03422, −0.03421, −0.03421, −0.0342, 0.0342, 0.0342, 0.0342, −0.0342, 0.03419, −0.03418, −0.03418, 0.03418, −0.03417, 0.03417, −0.03417, 0.03417, 0.03416, 0.03416, 0.03415, −0.03415, 0.03414, −0.03413, −0.03413, −0.03413, −0.03413, 0.03412, 0.03412, −0.03411, −0.03411, 0.03411, 0.03411, −0.0341, 0.03409, 0.03409, −0.03408, −0.03408, −0.03408, −0.03407, −0.03407, −0.03407, −0.03406, 0.03406, 0.03406, 0.03406, 0.03406, −0.03405, 0.03405, −0.03405, −0.03405, −0.03403, 0.03403, 0.03403, −0.03402, 0.03402, 0.03401, 0.03401, −0.034, −0.034, 0.03399, 0.03399, −0.03399, −0.03399, 0.03399, −0.03398, −0.03398, 0.03398, 0.03398, 0.03397, 0.03395, −0.03395, 0.03394, 0.03394, 0.03394, −0.03394, 0.03393, −0.03393, −0.03393, 0.03393, −0.03392, 0.03392, 0.03391, 0.03391, 0.03391, 0.03389, −0.03389, 0.03389, 0.03388, 0.03385, 0.03385, 0.03384, −0.03384, 0.03384, 0.03383, 0.03382, 0.03382, 0.03381, 0.03381, −0.03381, −0.03381, 0.03381, 0.03381, −0.03381, 0.03381, 0.0338, −0.0338, −0.0338, 0.0338, 0.0338, −0.03379, 0.03379, −0.03379, −0.03378, 0.03378, −0.03378, −0.03377, −0.03376, 0.03376, −0.03375, −0.03374, 0.03374, 0.03374, −0.03373, 0.03373, −0.03373, −0.03373, −0.03372, −0.03372, 0.03371, −0.03371, 0.03371, −0.0337, 0.0337, 0.0337, −0.03369, −0.03369, −0.03369, −0.03369, −0.03368, 0.03366, −0.03365, 0.03365, −0.03365, 0.03365, 0.03364, −0.03364, 0.03364, 0.03364, −0.03363, 0.03363, −0.03362, −0.03362, −0.03361, −0.03361, −0.03361, 0.0336, −0.03359, 0.03359, −0.03358, 0.03358, −0.03358, −0.03357, 0.03357, 0.03357, −0.03357, 0.03356, 0.03356, −0.03355, −0.03355, 0.03355, 0.03355, 0.03355, 0.03354, 0.03354, −0.03354, −0.03352, −0.03352, 0.03352, −0.03352, −0.0335, 0.03349, 0.03349, −0.03349, 0.03349, −0.03348, −0.03348, −0.03347, 0.03346, 0.03346, −0.03346, 0.03345, −0.03345, 0.03344, 0.03343, 0.03343, 0.03342, −0.03342, −0.03342, 0.03342, −0.03341, −0.03341, 0.03341, 0.0334, −0.03339, −0.03338, 0.03338, −0.03338, −0.03336, 0.03335, −0.03335, 0.03335, 0.03334, −0.03333, 0.03333, 0.03332, −0.03331, −0.03331, −0.03331, −0.03331, 0.0333, −0.0333, −0.0333, 0.03329, −0.03328, 0.03328, 0.03328, −0.03328, −0.03328, 0.03327, −0.03327, −0.03327, 0.03327, 0.03326, 0.03326, 0.03325, 0.03325, 0.03323, −0.03323, −0.03322, −0.03322, 0.03322, 0.03321, 0.03321, 0.03321, −0.03321, −0.03321, 0.0332, 0.0332, −0.0332, −0.03319, 0.03318, 0.03318, −0.03318, −0.03317, 0.03316, −0.03316, 0.03316, −0.03316, 0.03316, 0.03316, 0.03315, −0.03315, −0.03314, 0.03313, 0.03313, 0.03312, 0.03312, 0.03311, −0.03311, −0.03311, −0.03311, 0.0331, −0.0331, −0.03309, 0.03309, 0.03309, 0.03309, −0.03308, 0.03308, 0.03308, 0.03307, −0.03307, −0.03307, 0.03305, −0.03305, 0.03303, −0.03302, −0.03302, 0.03301, 0.03301, −0.033, −0.033, −0.03299, 0.03299, 0.03299, −0.03299, −0.03299, −0.03299, −0.03299, −0.03298, −0.03298, 0.03298, 0.03298, −0.03297, −0.03297, −0.03296, −0.03295, 0.03294, 0.03294, 0.03294, −0.03294, −0.03294, 0.03293, −0.03293, 0.03292, −0.03292, −0.03292, 0.03292, −0.03292, 0.03291, 0.03291, 0.03291, −0.03291, −0.03291, 0.0329, −0.0329, 0.0329, 0.03289, 0.03289, −0.03289, −0.03289, 0.03288, 0.03288, −0.03288, −0.03287, 0.03287, −0.03286, 0.03286, 0.03286, 0.03285, 0.03284, −0.03284, 0.03284, −0.03284, −0.03283, −0.03283, −0.03283, −0.03283, 0.03282, 0.03282, 0.03282, −0.03281, −0.03281, 0.0328, 0.0328, 0.0328, −0.03279, 0.03279, 0.03279, 0.03278, 0.03278, 0.03277, 0.03277, −0.03277, −0.03276, 0.03275, −0.03275, 0.03274, 0.03274, 0.03273, 0.03272, −0.03272, 0.0327, 0.0327, −0.0327, 0.0327, 0.03269, −0.03269, 0.03268, −0.03268, −0.03268, −0.03266, −0.03266, −0.03266, −0.03266, −0.03265, 0.03265, 0.03265, −0.03265, 0.03265, −0.03264, −0.03264, 0.03263, −0.03263, −0.03262, 0.03262, −0.03261, 0.03261, −0.03261, 0.0326, 0.03259, −0.03259, 0.03259, 0.03259, −0.03259, 0.03258, −0.03258, 0.03258, −0.03258, 0.03258, 0.03258, 0.03258, 0.03257, −0.03257, 0.03256, −0.03256, −0.03255, 0.03255, −0.03254, −0.03254, 0.03253, 0.03253, −0.03253, 0.03252, −0.03252, −0.03251, 0.0325, 0.0325, −0.0325, −0.0325, 0.03249, −0.03249, 0.03249, −0.03248, 0.03248, −0.03247, 0.03247, −0.03247, 0.03246, 0.03246, −0.03246, −0.03245, 0.03244, −0.03243, 0.03243, 0.03243, −0.03242, 0.03242, 0.03241, 0.03241, −0.03241, −0.03241, −0.0324, 0.0324, 0.03239, −0.03239, 0.03239, −0.03239, 0.03239, 0.03237, 0.03237, −0.03237, −0.03237, −0.03237, −0.03237, 0.03237, −0.03236, −0.03235, −0.03235, 0.03233, −0.03233, 0.03233, 0.03233, −0.03232, 0.03232, −0.03232, 0.03232, 0.03232, −0.03231, −0.03231, −0.03231, 0.03231, −0.03231, −0.0323, −0.0323, 0.0323, 0.03229, 0.03229, −0.03228, 0.03228, 0.03228, 0.03228, 0.03227, −0.03227, −0.03226, −0.03226, −0.03225, −0.03225, 0.03225, 0.03225, 0.03225, 0.03225, −0.03224, 0.03224, −0.03224, 0.03224, 0.03224, 0.03222, 0.03222, −0.03222, 0.03221, −0.0322, 0.0322, −0.0322, −0.0322, −0.03219, −0.03219, −0.03218, −0.03218, −0.03218, −0.03218, 0.03218, −0.03217, 0.03217, 0.03216, 0.03215, 0.03214, −0.03214, 0.03214, −0.03214, −0.03214, −0.03214, 0.03213, 0.03212, −0.03212, 0.03211, 0.03211, −0.03211, −0.0321, 0.03209, −0.03209, −0.03209, 0.03209, 0.03209, −0.03209, −0.03208, −0.03207, 0.03207, −0.03205, −0.03205, −0.03205, 0.03205, −0.03204, 0.03204, −0.03203, −0.03202, 0.03202, −0.03202, 0.03201, 0.03201, 0.03199, 0.03199, −0.03199, 0.03199, −0.03198, 0.03198, −0.03197, 0.03196, −0.03196, 0.03195, −0.03195, −0.03194, 0.03194, 0.03193, 0.03193, −0.03193, 0.03192, −0.03192, 0.03191, 0.03191, −0.03191, 0.0319, −0.0319, 0.0319, −0.0319, 0.03189, −0.03189, −0.03189, 0.03189, −0.03188, 0.03187, −0.03187, −0.03187, −0.03187, −0.03186, −0.03186, 0.03186, −0.03186, −0.03184, 0.03184, 0.03183, −0.03183, 0.03183, −0.03183, 0.03182, 0.03182, −0.03182, 0.03182, −0.03181, 0.03179, −0.03179, 0.03178, 0.03177, 0.03176, −0.03175, −0.03175, −0.03175, 0.03174, 0.03174, −0.03174, 0.03173, −0.03172, −0.03171, 0.03171, −0.03171, −0.03171, −0.0317, 0.03169, 0.03169, 0.03169, −0.03168, −0.03168, −0.03168, −0.03168, −0.03167, 0.03167, −0.03167, −0.03166, −0.03166, −0.03165, 0.03165, 0.03165, −0.03165, 0.03164, 0.03164, −0.03164, −0.03164, −0.03164, −0.03163, 0.03163, −0.03162, 0.03161, −0.03161, 0.0316, −0.0316, −0.0316, −0.0316, −0.03159, 0.03159, −0.03158, 0.03158, −0.03158, −0.03158, −0.03158, −0.03157, 0.03157, −0.03157, −0.03156, 0.03156, −0.03156, 0.03155, 0.03155, −0.03155, −0.03155, −0.03154, 0.03154, 0.03154, −0.03154, 0.03154, −0.03153, 0.03153, 0.03153, 0.03153, −0.03153, 0.03152, −0.03152, −0.03152, 0.03152, 0.03151, 0.03151, 0.03151, 0.03151, 0.0315, −0.03149, −0.03149, 0.03149, 0.03148, −0.03147, −0.03147, −0.03147, 0.03146, −0.03146, 0.03146, −0.03146, −0.03146, 0.03145, 0.03145, −0.03145, −0.03145, −0.03145, −0.03144, −0.03144, −0.03144, −0.03143, −0.03143, −0.03143, 0.03143, 0.03142, 0.03142, −0.03142, −0.0314, −0.03139, −0.03139, −0.03139, −0.03139, 0.03139, −0.03138, 0.03138, −0.03137, −0.03137, 0.03137, 0.03136, 0.03135, 0.03135, −0.03132, −0.03131, 0.03131, 0.0313, −0.03129, 0.03129, 0.03129, −0.03128, −0.03127, −0.03127, −0.03127, 0.03126, −0.03126, 0.03125, 0.03125, −0.03124, −0.03124, 0.03124, −0.03123, −0.03123, −0.03123, −0.03123, 0.03122, 0.03122, −0.0312, 0.03119, 0.03119, −0.03119, 0.03119, −0.03118, 0.03118, −0.03117, 0.03117, 0.03117, 0.03116, 0.03115, −0.03115, −0.03115, −0.03115, −0.03114, 0.03114, 0.03114, −0.03113, −0.03113, −0.03113, −0.03113, −0.03112, 0.03112, −0.03112, 0.03112, 0.03111, 0.03111, −0.03111, −0.03111, 0.0311, 0.0311, 0.0311, −0.0311, 0.03109, 0.03108, −0.03108, 0.03108, −0.03107, 0.03106, 0.03106, 0.03106, −0.03106, −0.03105, 0.03105, 0.03105, −0.03103, −0.03103, 0.03103, 0.03102, 0.03101, 0.03101, 0.03101, −0.031, 0.031, 0.031, 0.03099, 0.03099, 0.03099, −0.03099, −0.03098, −0.03098, 0.03098, −0.03097, −0.03097, −0.03097, −0.03097, −0.03096, −0.03096, 0.03096, −0.03096, −0.03095, −0.03094, −0.03094, −0.03094, −0.03094, −0.03094, 0.03093, 0.03093, −0.03093, 0.03093, −0.03092, 0.03092, 0.03092, 0.03091, −0.03091, 0.0309, 0.0309, −0.03089, −0.03089, 0.03089, −0.03088, −0.03088, 0.03087, −0.03087, 0.03087, 0.03087, −0.03086, 0.03086, 0.03086, −0.03085, 0.03085, 0.03085, 0.03084, −0.03084, −0.03083, −0.03082, 0.03082, −0.03082, 0.03081, 0.03081, −0.03081, −0.03081, 0.0308, 0.0308, 0.0308, 0.03079, 0.03079, −0.03079, −0.03079, 0.03079, 0.03078, −0.03078, −0.03078, −0.03078, 0.03078, 0.03077, −0.03077, −0.03076, 0.03076, −0.03076, 0.03075, 0.03075, 0.03075, −0.03075, 0.03074, 0.03074, −0.03073, −0.03073, −0.03072, 0.03072, 0.03072, −0.03072, 0.03071, −0.0307, −0.0307, 0.0307, 0.03069, −0.03069, −0.03068, −0.03067, −0.03067, 0.03066, −0.03066, −0.03066, −0.03065, 0.03065, −0.03065, 0.03065, −0.03065, −0.03064, −0.03063, 0.03062, −0.03062, 0.03061, −0.03061, −0.0306, 0.0306, −0.0306, −0.03058, 0.03058, 0.03058, 0.03058, −0.03058, −0.03058, 0.03057, −0.03056, 0.03056, 0.03055, −0.03055, 0.03055, 0.03055, 0.03055, 0.03055, −0.03055, −0.03055, 0.03055, −0.03054, −0.03053, 0.03053, −0.03052, −0.03052, −0.03052, 0.03052, −0.03051, 0.03051, 0.0305, 0.0305, −0.0305, 0.03049, −0.03049, −0.03049, −0.03049, −0.03048, 0.03048, 0.03048, −0.03047, 0.03047, 0.03047, −0.03047, 0.03046, −0.03045, 0.03045, −0.03045, −0.03045, 0.03045, 0.03044, −0.03044, −0.03044, −0.03043, 0.03042, 0.03042, −0.03041, −0.0304, 0.0304, −0.03039, −0.03039, 0.03039, −0.03039, −0.03039, −0.03039, 0.03039, 0.03038, −0.03038, 0.03038, −0.03038, −0.03038, 0.03038, 0.03037, −0.03037, −0.03037, 0.03037, 0.03036, −0.03036, −0.03036, 0.03036, −0.03036, −0.03035, −0.03035, −0.03035, −0.03035, −0.03035, −0.03035, −0.03034, −0.03034, 0.03033, −0.03033, −0.03033, 0.03032, −0.03032, −0.03031, −0.03031, 0.03031, −0.03031, 0.03031, 0.03029, −0.03028, 0.03027, −0.03027, −0.03027, −0.03027, 0.03026, −0.03026, 0.03026, 0.03026, −0.03026, −0.03024, 0.03024, −0.03024, −0.03023, 0.03021, 0.03021, −0.0302, 0.0302, 0.03019, −0.03019, −0.03019, 0.03018, 0.03017, 0.03017, −0.03017, −0.03016, −0.03016, 0.03015, 0.03015, 0.03015, 0.03014, −0.03014, 0.03013, 0.03013, −0.03012, 0.03012, −0.03011, −0.03011, −0.03011, 0.03011, 0.0301, −0.0301, 0.0301, −0.03009, −0.03009, −0.03009, 0.03009, −0.03009, −0.03009, 0.03009, −0.03008, −0.03008, −0.03007, 0.03007, 0.03006, −0.03005, −0.03005, −0.03005, −0.03004, −0.03004, 0.03003, −0.03003, −0.03003, −0.03002, −0.03002, −0.03002, −0.03001, −0.03001, 0.03, −0.03, −0.02999, 0.02999, −0.02998, −0.02998, 0.02998, 0.02998, −0.02997, 0.02997, −0.02996, 0.02995, −0.02995, −0.02994, −0.02994, −0.02994, −0.02994, −0.02993, −0.02993, −0.02993, 0.02993, −0.02993, −0.02992, −0.02992, 0.02992, −0.02992, 0.02992, −0.0299, −0.0299, −0.0299, −0.0299, 0.0299, −0.02989, 0.02989, −0.02989, −0.02988, −0.02988, 0.02987, −0.02987, −0.02986, −0.02986, −0.02985, −0.02984, 0.02984, −0.02983, −0.02981, −0.02981, −0.02981, 0.02981, −0.02981, −0.0298, 0.0298, −0.0298, 0.0298, −0.0298, 0.02979, −0.02979, −0.02978, −0.02978, −0.02978, −0.02977, −0.02977, 0.02977, −0.02977, −0.02976, 0.02976, 0.02976, −0.02975, 0.02975, 0.02975, −0.02975, 0.02975, −0.02975, −0.02974, 0.02973, 0.02973, 0.02972, 0.02972, −0.02971, 0.02971, 0.02971, −0.0297, 0.0297, −0.02969, 0.02969, 0.02969, 0.02969, 0.02969, 0.02968, 0.02968, 0.02968, −0.02967, 0.02967, −0.02967, 0.02966, −0.02966, −0.02966, −0.02966, 0.02965, −0.02965, −0.02965, −0.02965, −0.02964, −0.02963, 0.02962, −0.02962, −0.02962, 0.02961, 0.02961, 0.02961, 0.0296, −0.0296, 0.0296, −0.02959, 0.02959, −0.02959, 0.02959, −0.02958, −0.02958, −0.02958, −0.02957, −0.02957, −0.02957, 0.02956, 0.02956, 0.02955, 0.02955, 0.02954, −0.02954, −0.02954, −0.02954, −0.02954, 0.02953, 0.02953, −0.02953, −0.02953, −0.02953, −0.02952, −0.02952, −0.0295, 0.0295, 0.0295, −0.0295, −0.0295, 0.0295, −0.0295, −0.02949, −0.02949, −0.02948, −0.02948, −0.02948, 0.02948, −0.02947, 0.02947, −0.02946, 0.02946, 0.02946, 0.02945, −0.02945, 0.02945, −0.02944, 0.02944, 0.02944, −0.02944, −0.02944, 0.02944, 0.02943, 0.02943, −0.02943, −0.02943, −0.02943, −0.02942, −0.02942, −0.02941, −0.0294, −0.0294, −0.0294, 0.0294, 0.0294, −0.02939, 0.02939, −0.02939, 0.02939, 0.02939, −0.02938, −0.02938, 0.02938, 0.02938, 0.02937, 0.02936, 0.02936, −0.02936, 0.02935, 0.02935, −0.02935, 0.02934, −0.02934, −0.02934, 0.02934, 0.02934, −0.02933, 0.02933, −0.02933, 0.02933, −0.02932, 0.02932, −0.02932, 0.02932, −0.02932, −0.02932, −0.02931, 0.02931, −0.0293, 0.0293, 0.0293, 0.0293, 0.0293, −0.02929, 0.02929, 0.02929, 0.02928, 0.02927, −0.02927, 0.02927, 0.02926, −0.02926, 0.02926, −0.02926, −0.02926, −0.02925, 0.02925, −0.02925, 0.02924, −0.02924, 0.02924, −0.02923, −0.02923, −0.02923, 0.02923, −0.02923, 0.02922, −0.02922, −0.02922, 0.02922, −0.02922, 0.02921, 0.02921, −0.02921, 0.0292, 0.0292, 0.0292, −0.02919, 0.02919, −0.02919, −0.02918, 0.02917, −0.02917, 0.02917, −0.02917, −0.02917, −0.02916, −0.02916, −0.02916, 0.02916, 0.02915, −0.02915, 0.02915, −0.02915, −0.02914, −0.02914, −0.02914, −0.02914, 0.02913, 0.02913, 0.02913, −0.02912, −0.02912, −0.02912, 0.02912, 0.02912, −0.02912, −0.02912, 0.02911, 0.02911, 0.02911, −0.02911, 0.0291, −0.02909, 0.02909, 0.02908, 0.02908, −0.02908, 0.02907, −0.02907, 0.02907, −0.02907, 0.02906, −0.02906, 0.02905, −0.02905, −0.02905, −0.02905, −0.02905, −0.02905, −0.02904, −0.02904, −0.02903, −0.02903, −0.02903, −0.02903, −0.02903, 0.02902, 0.02902, −0.02901, −0.02901, 0.02901, 0.029, 0.02899, −0.02899, −0.02899, 0.02899, −0.02898, 0.02898, −0.02898, 0.02898, −0.02898, −0.02897, −0.02897, −0.02897, 0.02896, 0.02896, −0.02896, 0.02895, 0.02895, −0.02895, −0.02895, 0.02895, −0.02894, −0.02894, 0.02894, 0.02893, −0.02893, 0.02892, −0.02892, 0.02892, −0.02892, 0.02892, −0.02891, −0.0289, −0.0289, 0.02889, −0.02889, −0.02889, −0.02889, 0.02888, −0.02888, −0.02888, −0.02888, −0.02886, 0.02886, 0.02885, −0.02885, 0.02885, 0.02884, 0.02883, −0.02883, −0.02883, −0.02883, −0.02883, 0.02883, −0.02882, −0.02882, −0.02882, 0.02881, 0.02881, 0.02881, 0.0288, −0.02879, 0.02879, −0.02878, −0.02878, −0.02878, −0.02878, −0.02878, 0.02878, 0.02877, 0.02877, 0.02877, −0.02877, −0.02876, 0.02876, 0.02875, −0.02875, 0.02875, 0.02874, −0.02874, −0.02874, 0.02873, −0.02873, 0.02873, −0.02873, −0.02873, −0.02872, −0.02872, −0.02871, −0.0287, −0.0287, −0.0287, −0.0287, 0.02869, −0.02868, 0.02868, 0.02867, −0.02867, 0.02867, 0.02867, −0.02867, 0.02866, −0.02866, 0.02866, −0.02866, −0.02865, −0.02865, −0.02865, 0.02865, 0.02865, −0.02864, 0.02864, 0.02864, 0.02863, 0.02863, −0.02863, −0.02862, −0.02862, 0.02861, 0.02861, −0.0286, 0.0286, 0.0286, 0.02859, 0.02859, −0.02859, 0.02858, −0.02858, −0.02858, 0.02858, −0.02857, −0.02857, −0.02857, 0.02856, 0.02856, −0.02855, 0.02855, 0.02855, −0.02855, 0.02854, −0.02854, 0.02854, 0.02853, 0.02853, −0.02853, 0.02853, 0.02852, −0.02852, 0.02852, 0.02851, 0.02851, −0.0285, −0.0285, −0.0285, 0.02849, −0.02848, −0.02848, 0.02848, 0.02847, 0.02847, −0.02847, −0.02847, −0.02847, 0.02846, −0.02846, 0.02846, −0.02845, 0.02845, −0.02845, 0.02845, 0.02845, 0.02845, −0.02844, 0.02844, −0.02844, −0.02843, 0.02843, 0.02843, 0.02843, −0.02842, −0.02842, −0.02842, −0.02842, 0.02841, −0.0284, −0.02839, 0.02838, −0.02838, −0.02837, 0.02837, 0.02837, 0.02837, −0.02836, 0.02835, −0.02835, −0.02835, 0.02835, −0.02835, 0.02834, 0.02834, 0.02834, 0.02833, −0.02833, 0.02833, 0.02833, 0.02832, 0.02832, −0.02831, 0.02831, 0.02831, −0.0283, −0.0283, −0.0283, −0.0283, −0.02829, −0.02828, 0.02828, 0.02827, −0.02827, 0.02826, −0.02826, −0.02825, −0.02824, 0.02824, −0.02824, 0.02823, −0.02823, 0.02823, −0.02822, −0.02822, 0.02822, −0.02822, −0.02822, 0.02821, 0.02821, 0.0282, −0.0282, 0.0282, −0.0282, 0.02819, −0.02819, −0.02819, 0.02819, 0.02819, 0.02819, −0.02818, −0.02818, 0.02818, −0.02818, −0.02818, −0.02818, 0.02816, 0.02816, −0.02816, −0.02816, 0.02816, −0.02816, −0.02815, −0.02815, −0.02815, 0.02815, −0.02815, −0.02814, 0.02814, −0.02813, 0.02812, −0.02812, −0.02811, −0.02811, −0.02811, −0.02811, −0.02811, 0.0281, 0.0281, −0.0281, −0.02809, 0.02808, −0.02808, −0.02808, 0.02808, 0.02807, −0.02807, 0.02807, −0.02806, −0.02806, −0.02806, −0.02806, −0.02806, −0.02805, −0.02805, −0.02805, 0.02805, −0.02805, 0.02804, 0.02804, −0.02804, 0.02803, 0.02803, −0.02802, −0.02802, −0.02802, −0.02802, −0.02802, −0.02802, 0.02801, −0.028, −0.028, 0.028, −0.02799, 0.02799, 0.02798, −0.02798, −0.02798, 0.02796, 0.02796, 0.02796, 0.02795, 0.02794, −0.02794, −0.02793, −0.02793, 0.02792, −0.02792, −0.02792, 0.02791, −0.02791, 0.0279, 0.0279, 0.0279, −0.0279, 0.02789, −0.02789, −0.02789, 0.02789, 0.02789, −0.02788, −0.02788, 0.02788, 0.02787, 0.02787, −0.02787, −0.02786, −0.02786, 0.02785, 0.02785, 0.02785, −0.02785, 0.02785, −0.02785, −0.02784, 0.02784, 0.02784, −0.02784, 0.02783, 0.02783, 0.02783, −0.02783, 0.02783, −0.02782, −0.02782, −0.02782, 0.02782, 0.02781, −0.02781, 0.0278, −0.0278, 0.0278, 0.02779, 0.02779, 0.02779, −0.02779, 0.02779, −0.02779, −0.02779, −0.02779, 0.02779, 0.02779, −0.02779, 0.02778, 0.02778, −0.02777, −0.02777, 0.02777, −0.02777, −0.02776, −0.02776, −0.02776, 0.02776, −0.02775, 0.02775, 0.02774, 0.02774, 0.02773, 0.02773, −0.02772, 0.02772, −0.02771, 0.02771, −0.02771, −0.0277, −0.02769, 0.02769, −0.02769, 0.02768, 0.02768, 0.02768, 0.02768, −0.02768, 0.02768, −0.02767, 0.02767, 0.02767, −0.02766, −0.02766, 0.02766, 0.02766, −0.02766, 0.02766, 0.02766, 0.02765, 0.02764, −0.02764, −0.02763, 0.02763, −0.02763, 0.02762, −0.02762, −0.02762, 0.02762, 0.02761, 0.02761, −0.0276, 0.0276, −0.0276, −0.0276, 0.0276, 0.0276, 0.02759, 0.02759, −0.02759, −0.02759, 0.02758, 0.02758, −0.02758, 0.02758, 0.02757, −0.02757, −0.02757, −0.02756, −0.02755, 0.02754, −0.02754, 0.02754, 0.02754, −0.02753, 0.02753, −0.02752, −0.02752, −0.02751, 0.02751, −0.0275, 0.0275, 0.0275, −0.02749, 0.02749, −0.02749, 0.02749, 0.02749, −0.02748, 0.02748, 0.02747, −0.02747, −0.02747, −0.02747, 0.02746, 0.02746, −0.02745, −0.02745, −0.02745, −0.02745, −0.02744, 0.02744, 0.02743, −0.02742, −0.02741, 0.02741, 0.02741, −0.0274, 0.0274, −0.0274, −0.0274, 0.02739, 0.02739, 0.02739, −0.02739, −0.02739, 0.02739, −0.02738, −0.02738, 0.02738, 0.02737, −0.02736, −0.02736, −0.02736, 0.02736, −0.02736, 0.02736, 0.02735, 0.02735, 0.02735, −0.02734, −0.02734, −0.02734, −0.02733, −0.02732, −0.02732, −0.02731, 0.02731, 0.02731, 0.0273, −0.0273, 0.0273, −0.02729, −0.02729, −0.02729, 0.02729, −0.02728, −0.02727, −0.02726, 0.02726, 0.02725, −0.02725, −0.02725, −0.02725, −0.02725, 0.02725, 0.02724, 0.02724, −0.02724, −0.02724, 0.02723, −0.02723, 0.02722, −0.02721, 0.0272, −0.0272, −0.02719, 0.02719, 0.02719, 0.02719, −0.02718, −0.02718, 0.02717, −0.02717, −0.02716, −0.02716, −0.02715, −0.02715, 0.02715, 0.02714, −0.02714, 0.02714, 0.02713, −0.02713, −0.02713, 0.02712, −0.02712, 0.02712, −0.02712, 0.02711, −0.02711, −0.02711, 0.0271, −0.02709, −0.02709, −0.02708, 0.02708, −0.02707, −0.02707, 0.02707, 0.02706, 0.02706, −0.02706, −0.02705, 0.02705, 0.02705, −0.02705, −0.02704, 0.02704, 0.02704, −0.02703, 0.02703, 0.02703, −0.02703, 0.02702, −0.02702, 0.02702, 0.02701, −0.02701, −0.02701, −0.027, −0.027, 0.027, −0.027, 0.027, 0.027, 0.02699, 0.02699, −0.02699, −0.02698, 0.02698, 0.02698, 0.02698, 0.02698, 0.02697, 0.02696, −0.02696, 0.02695, 0.02695, −0.02695, −0.02695, −0.02695, 0.02695, 0.02694, −0.02694, −0.02693, −0.02693, 0.02693, 0.02693, 0.02693, 0.02693, 0.02693, −0.02693, 0.02692, 0.02692, 0.02692, 0.02692, 0.02692, 0.02691, 0.02691, 0.0269, −0.0269, 0.0269, −0.0269, 0.02689, 0.02689, 0.02689, −0.02689, −0.02689, −0.02688, −0.02688, 0.02687, −0.02687, 0.02687, 0.02687, −0.02686, 0.02686, −0.02685, −0.02685, 0.02685, −0.02684, 0.02684, −0.02684, 0.02684, 0.02683, 0.02683, 0.02683, 0.02683, 0.02683, 0.02682, 0.02682, 0.02682, 0.02682, 0.02682, −0.02682, −0.02682, −0.02681, −0.0268, −0.0268, 0.0268, −0.0268, 0.02679, −0.02679, 0.02679, 0.02679, −0.02679, −0.02679, −0.02678, 0.02678, 0.02678, −0.02678, −0.02678, −0.02678, 0.02677, −0.02677, −0.02677, 0.02676, −0.02676, −0.02676, −0.02676, −0.02676, −0.02674, −0.02674, −0.02674, −0.02673, 0.02673, −0.02672, 0.02671, 0.02671, 0.0267, 0.0267, −0.02669, −0.02669, −0.02669, −0.02669, 0.02668, −0.02668, 0.02667, −0.02667, −0.02666, 0.02666, −0.02665, −0.02665, 0.02665, −0.02665, 0.02665, −0.02664, −0.02664, 0.02664, 0.02663, −0.02662, 0.02662, 0.02662, 0.02662, −0.02662, −0.02661, 0.02661, −0.02661, 0.02661, 0.02661, 0.02661, −0.02661, −0.0266, −0.0266, −0.02659, 0.02659, −0.02659, 0.02659, −0.02659, −0.02659, −0.02658, −0.02658, 0.02658, 0.02658, −0.02658, −0.02657, 0.02657, 0.02656, −0.02656, −0.02656, 0.02656, 0.02656, −0.02656, −0.02655, 0.02655, −0.02655, −0.02655, −0.02654, 0.02654, −0.02654, −0.02654, −0.02653, 0.02651, −0.02651, 0.02651, −0.02651, 0.02651, −0.02651, 0.02651, 0.02651, 0.02651, 0.0265, 0.0265, 0.0265, −0.0265, 0.0265, 0.0265, 0.02649, 0.02649, −0.02649, −0.02648, −0.02648, −0.02648, −0.02647, 0.02647, −0.02647, 0.02646, −0.02646, −0.02645, 0.02645, 0.02644, 0.02644, −0.02644, 0.02644, 0.02643, 0.02643, 0.02643, −0.02643, 0.02642, −0.02642, 0.02642, 0.02641, −0.02639, −0.02639, −0.02639, 0.02639, 0.02638, −0.02638, 0.02637, −0.02637, −0.02637, 0.02637, 0.02637, 0.02636, −0.02636, 0.02635, −0.02635, −0.02633, −0.02633, 0.02633, 0.02632, 0.02632, 0.02632, −0.02632, 0.02632, −0.02631, −0.02631, −0.02631, −0.02631, 0.02631, −0.02631, −0.02631, 0.0263, −0.0263, −0.0263, 0.0263, −0.0263, 0.02629, 0.02629, −0.02629, −0.02629, 0.02628, −0.02628, 0.02627, −0.02627, 0.02626, −0.02626, −0.02626, 0.02625, 0.02625, −0.02625, −0.02623, −0.02622, −0.02622, −0.02622, −0.02622, 0.02622, −0.02622, −0.02621, 0.02621, −0.02621, −0.02621, −0.0262, −0.0262, −0.0262, −0.02619, −0.02619, 0.02618, −0.02618, −0.02617, 0.02617, 0.02617, −0.02616, −0.02615, −0.02615, 0.02615, 0.02615, −0.02615, 0.02614, −0.02614, −0.02613, −0.02613, 0.02613, 0.02613, −0.02613, 0.02612, −0.02612, 0.02612, −0.02612, 0.02612, −0.02612, 0.02611, −0.02611, 0.02611, 0.02611, −0.02611, −0.02611, −0.02611, −0.02611, −0.0261, 0.0261, −0.0261, 0.0261, −0.0261, 0.0261, 0.02609, −0.02607, 0.02607, 0.02607, 0.02607, 0.02607, 0.02607, 0.02606, −0.02606, −0.02606, −0.02606, −0.02606, 0.02605, −0.02605, 0.02605, 0.02604, −0.02603, 0.02603, −0.02602, 0.02602, 0.02602, −0.02602, −0.02601, 0.02601, −0.02601, 0.026, 0.02599, 0.02599, 0.02599, −0.02599, 0.02599, −0.02599, 0.02598, −0.02598, −0.02597, −0.02597, −0.02596, −0.02596, −0.02596, −0.02595, −0.02595, −0.02595, 0.02595, −0.02593, −0.02593, 0.02593, 0.02593, 0.02592, 0.02592, −0.02591, 0.02591, −0.02591, −0.02591, 0.0259, 0.0259, 0.0259, 0.0259, −0.0259, −0.0259, 0.0259, −0.0259, 0.02589, 0.02589, 0.02589, −0.02589, −0.02589, −0.02588, 0.02588, −0.02588, 0.02588, −0.02587, 0.02586, −0.02585, −0.02585, −0.02585, −0.02585, −0.02584, 0.02583, −0.02583, 0.02583, 0.02583, 0.02582, 0.02582, −0.02581, −0.02581, 0.02581, 0.02581, 0.0258, −0.0258, 0.0258, 0.0258, 0.0258, −0.02579, 0.02579, −0.02578, 0.02578, 0.02578, −0.02578, 0.02578, 0.02578, −0.02577, −0.02577, −0.02577, 0.02577, 0.02576, 0.02576, −0.02576, −0.02576, −0.02575, −0.02575, −0.02575, 0.02575, 0.02575, 0.02574, −0.02574, −0.02574, 0.02574, −0.02574, 0.02574, −0.02573, 0.02573, 0.02573, −0.02573, −0.02573, −0.02573, −0.02572, −0.02572, −0.02572, −0.02572, 0.02572, 0.02571, −0.0257, 0.0257, −0.02569, 0.02568, 0.02568, −0.02568, −0.02568, 0.02567, −0.02567, −0.02567, −0.02567, 0.02566, −0.02566, −0.02566, 0.02566, 0.02566, 0.02565, −0.02564, 0.02564, 0.02564, 0.02564, 0.02564, 0.02564, −0.02564, 0.02563, 0.02563, −0.02563, −0.02562, −0.02562, −0.02561, −0.02561, −0.02561, −0.0256, −0.0256, −0.0256, 0.0256, 0.02559, −0.02559, −0.02559, −0.02559, 0.02559, 0.02559, 0.02559, 0.02558, 0.02558, 0.02558, −0.02557, 0.02557, 0.02557, 0.02557, −0.02557, −0.02557, 0.02557, −0.02557, 0.02556, 0.02556, −0.02556, 0.02555, 0.02555, −0.02554, −0.02553, 0.02553, −0.02553, 0.02553, 0.02553, −0.02553, 0.02552, 0.02552, 0.02552, 0.02552, −0.02551, 0.02551, −0.02551, −0.02551, −0.02551, 0.02551, 0.02551, 0.02551, −0.0255, −0.0255, −0.0255, 0.0255, −0.02549, −0.02549, 0.02549, 0.02548, −0.02548, −0.02548, 0.02548, −0.02548, −0.02547, −0.02547, −0.02547, 0.02547, −0.02546, 0.02546, −0.02546, −0.02546, −0.02545, −0.02545, −0.02545, −0.02545, 0.02545, −0.02544, −0.02544, 0.02544, 0.02544, −0.02544, 0.02543, 0.02543, −0.02542, 0.02542, 0.02542, 0.02541, −0.02541, −0.02541, −0.0254, −0.0254, −0.0254, −0.0254, 0.02539, 0.02539, −0.02539, −0.02539, −0.02538, 0.02538, −0.02537, −0.02537, 0.02537, 0.02536, 0.02536, −0.02536, −0.02536, 0.02536, 0.02535, −0.02535, −0.02535, −0.02535, −0.02535, −0.02534, −0.02534, 0.02534, 0.02534, −0.02533, −0.02533, 0.02533, 0.02533, −0.02532, 0.02532, −0.02532, 0.02532, 0.02532, 0.02532, 0.02532, −0.02531, −0.02531, −0.0253, −0.0253, −0.0253, −0.02529, −0.02529, 0.02529, −0.02528, 0.02528, −0.02528, 0.02528, 0.02528, −0.02528, −0.02527, −0.02527, 0.02527, −0.02526, −0.02526, 0.02526, −0.02526, −0.02525, −0.02525, 0.02525, 0.02525, −0.02524, −0.02524, −0.02523, −0.02523, −0.02523, 0.02523, 0.02523, 0.02522, 0.02522, −0.02522, 0.02522, −0.02522, −0.02521, −0.02521, −0.02521, 0.02521, 0.0252, −0.0252, 0.0252, −0.0252, −0.0252, 0.02519, −0.02519, 0.02518, −0.02518, 0.02518, −0.02518, 0.02517, 0.02517, 0.02516, −0.02516, 0.02516, 0.02516, −0.02515, −0.02515, −0.02515, −0.02515, 0.02514, 0.02514, 0.02514, −0.02514, 0.02513, −0.02513, −0.02513, 0.02513, −0.02512, 0.02512, 0.02511, 0.02511, 0.02511, 0.02511, −0.02511, 0.02509, −0.02509, 0.02508, −0.02508, 0.02508, −0.02508, 0.02507, −0.02506, 0.02506, 0.02506, −0.02504, −0.02503, 0.02503, −0.02503, 0.02503, 0.02502, 0.02502, 0.02502, −0.025, 0.025, 0.025, 0.025, −0.02499, −0.02499, 0.02499, 0.02499, −0.02499, −0.02498, 0.02498, −0.02498, −0.02498, −0.02497, 0.02497, 0.02497, 0.02496, 0.02496, 0.02496, −0.02496, 0.02496, 0.02496, 0.02495, 0.02495, −0.02494, 0.02494, −0.02494, 0.02494, −0.02494, 0.02493, 0.02493, 0.02492, −0.02492, −0.02492, 0.02492, 0.02492, 0.02492, 0.02492, −0.02492, −0.02491, 0.02491, −0.02491, −0.02491, 0.0249, 0.0249, 0.0249, −0.0249, −0.0249, −0.0249, 0.0249, −0.02489, 0.02489, 0.02489, −0.02489, 0.02489, 0.02488, −0.02488, 0.02488, 0.02488, 0.02488, −0.02488, −0.02488, −0.02488, 0.02487, 0.02487, 0.02487, 0.02487, −0.02485, 0.02485, −0.02485, 0.02484, −0.02484, 0.02484, 0.02484, 0.02484, −0.02484, 0.02483, −0.02483, −0.02482, −0.02482, −0.02481, 0.02481, −0.02481, −0.0248, −0.0248, −0.0248, −0.0248, −0.0248, 0.0248, −0.0248, −0.0248, 0.02479, −0.02479, −0.02479, −0.02479, 0.02478, 0.02478, −0.02478, 0.02477, −0.02477, 0.02477, −0.02477, −0.02477, −0.02477, 0.02477, 0.02477, 0.02477, 0.02476, 0.02476, 0.02475, −0.02475, 0.02474, −0.02474, −0.02473, −0.02473, 0.02473, −0.02473, −0.02472, −0.02471, 0.0247, −0.0247, 0.0247, 0.02469, 0.02469, 0.02469, −0.02468, −0.02468, −0.02468, −0.02468, −0.02468, 0.02468, 0.02467, −0.02467, 0.02467, −0.02467, 0.02467, 0.02467, 0.02467, 0.02466, −0.02465, −0.02465, 0.02465, −0.02464, −0.02464, −0.02464, 0.02463, −0.02462, 0.02461, −0.02461, −0.02461, 0.02461, −0.02461, −0.02461, −0.02461, −0.02461, 0.0246, 0.02459, −0.02459, −0.02458, −0.02458, −0.02458, 0.02458, 0.02457, −0.02456, −0.02456, −0.02456, −0.02456, −0.02456, −0.02456, −0.02455, 0.02454, −0.02454, 0.02454, 0.02453, −0.02453, 0.02453, 0.02453, 0.02452, −0.02452, −0.02451, −0.02451, 0.0245, −0.0245, 0.0245, 0.02449, −0.02449, 0.02449, −0.02449, 0.02449, −0.02448, −0.02448, 0.02448, 0.02448, 0.02448, −0.02447, 0.02447, −0.02447, −0.02446, −0.02446, −0.02446, −0.02445, 0.02445, 0.02445, 0.02445, 0.02445, −0.02445, 0.02445, 0.02445, 0.02444, −0.02444, 0.02443, −0.02443, −0.02443, −0.02443, 0.02443, 0.02443, 0.02442, −0.02442, 0.02442, 0.02442, 0.02441, 0.02441, −0.02441, 0.02441, 0.0244, −0.0244, 0.02439, 0.02439, 0.02439, 0.02438, −0.02438, −0.02438, −0.02438, −0.02437, 0.02437, 0.02437, 0.02436, −0.02436, 0.02436, 0.02436, 0.02436, −0.02435, −0.02435, −0.02434, 0.02434, −0.02433, −0.02433, −0.02432, −0.02432, 0.02432, −0.02432, −0.02431, −0.02431, 0.02431, −0.02431, 0.0243, 0.0243, 0.0243, −0.0243, 0.0243, −0.02429, −0.02429, 0.02428, −0.02428, 0.02427, −0.02427, 0.02427, 0.02427, 0.02427, 0.02427, 0.02427, 0.02427, −0.02427, 0.02426, 0.02426, −0.02426, 0.02426, 0.02426, 0.02425, 0.02424, −0.02424, 0.02424, −0.02423, −0.02423, −0.02423, 0.02423, 0.02422, 0.02422, 0.02422, 0.02422, 0.02422, −0.02421, −0.02421, 0.0242, 0.0242, −0.0242, −0.02419, −0.02418, −0.02418, −0.02417, 0.02417, 0.02416, 0.02416, 0.02416, −0.02416, 0.02415, 0.02415, 0.02415, −0.02414, 0.02414, 0.02413, −0.02412, −0.02412, −0.02412, 0.02412, 0.02412, −0.02412, −0.02412, −0.02411, −0.02411, 0.02411, 0.02411, −0.0241, −0.0241, −0.0241, −0.02409, 0.02409, −0.02409, 0.02409, −0.02408, −0.02408, −0.02408, −0.02408, 0.02408, 0.02408, −0.02407, −0.02407, −0.02407, −0.02406, −0.02405, 0.02405, −0.02405, 0.02405, 0.02405, −0.02405, −0.02404, −0.02404, 0.02404, −0.02404, 0.02404, −0.02404, 0.02403, 0.02403, −0.02403, 0.02403, 0.02402, 0.02402, 0.02402, −0.02402, −0.02402, 0.02401, 0.02401, −0.02401, −0.024, −0.024, −0.024, −0.024, 0.02399, 0.02398, −0.02398, −0.02398, −0.02397, −0.02397, −0.02397, 0.02396, 0.02396, 0.02396, −0.02396, 0.02396, 0.02395, 0.02395, −0.02395, 0.02395, 0.02394, −0.02394, 0.02393, −0.02393, −0.02392, 0.02392, −0.02392, −0.02392, −0.02391, −0.02391, −0.02391, −0.0239, 0.0239, −0.02389, −0.02389, −0.02389, 0.02389, 0.02387, 0.02387, 0.02387, 0.02386, −0.02386, −0.02386, 0.02386, 0.02385, −0.02385, 0.02384, −0.02384, −0.02383, 0.02383, −0.02383, 0.02382, −0.02381, −0.02381, −0.0238, 0.0238, −0.0238, 0.0238, −0.0238, 0.0238, 0.02379, −0.02379, −0.02379, −0.02379, 0.02379, 0.02379, −0.02378, −0.02378, 0.02378, 0.02377, 0.02376, −0.02376, −0.02376, 0.02375, 0.02375, −0.02375, −0.02373, −0.02373, 0.02373, −0.02373, −0.02372, 0.02372, −0.02372, 0.02372, −0.02371, 0.02371, 0.02371, 0.02371, 0.02371, −0.0237, 0.0237, −0.0237, −0.0237, 0.02369, 0.02369, 0.02369, −0.02369, 0.02369, 0.02368, 0.02368, −0.02367, −0.02367, 0.02366, −0.02366, −0.02366, 0.02366, 0.02366, 0.02366, 0.02365, −0.02365, −0.02365, −0.02365, 0.02365, −0.02364, −0.02364, −0.02364, 0.02364, 0.02364, −0.02364, 0.02364, 0.02363, −0.02363, −0.02363, −0.02362, 0.02362, −0.02362, 0.02362, −0.02361, 0.02361, 0.02361, 0.0236, 0.0236, 0.0236, −0.0236, 0.0236, −0.0236, 0.0236, −0.0236, −0.0236, 0.02359, 0.02358, −0.02358, 0.02358, −0.02358, −0.02358, −0.02358, 0.02358, −0.02358, 0.02357, −0.02357, −0.02357, 0.02356, −0.02356, −0.02356, 0.02356, 0.02356, −0.02355, 0.02355, 0.02355, −0.02355, 0.02354, 0.02354, 0.02354, −0.02353, 0.02353, −0.02353, −0.02353, 0.02352, −0.02352, 0.02351, 0.02351, 0.0235, 0.0235, −0.02349, −0.02349, 0.02349, −0.02349, −0.02348, 0.02348, 0.02348, −0.02348, −0.02347, 0.02347, 0.02346, −0.02346, 0.02346, 0.02346, −0.02346, −0.02345, −0.02345, 0.02345, −0.02345, −0.02345, −0.02345, 0.02345, −0.02345, 0.02344, −0.02344, 0.02344, 0.02344, 0.02343, 0.02343, −0.02343, −0.02343, −0.02343, 0.02342, −0.02342, 0.02342, 0.02341, −0.02341, 0.0234, −0.0234, −0.0234, 0.02339, 0.02339, −0.02339, −0.02339, −0.02338, −0.02338, −0.02338, −0.02338, 0.02338, 0.02337, −0.02337, 0.02337, −0.02336, 0.02336, −0.02336, 0.02336, −0.02336, 0.02336, 0.02335, −0.02335, −0.02334, −0.02333, 0.02333, −0.02333, 0.02333, 0.02332, 0.02331, −0.02331, −0.02331, −0.02331, −0.02331, 0.0233, −0.0233, −0.0233, −0.0233, 0.0233, 0.0233, 0.02329, 0.02329, −0.02329, −0.02329, 0.02329, 0.02329, 0.02328, −0.02328, −0.02328, −0.02328, −0.02328, 0.02327, −0.02327, 0.02327, 0.02327, −0.02326, −0.02326, −0.02326, 0.02325, −0.02325, −0.02325, 0.02324, 0.02324, 0.02324, 0.02324, −0.02324, 0.02323, −0.02323, 0.02323, 0.02322, 0.02322, 0.02322, −0.02321, 0.02321, −0.02321, −0.0232, 0.0232, 0.02319, 0.02319, −0.02319, 0.02318, −0.02318, 0.02318, −0.02318, −0.02318, −0.02317, 0.02316, −0.02316, −0.02316, 0.02316, 0.02315, 0.02315, −0.02315, −0.02314, −0.02314, 0.02313, −0.02313, 0.02313, −0.02313, −0.02313, −0.02312, −0.02311, −0.02311, −0.02311, 0.02311, −0.0231, 0.0231, −0.0231, 0.0231, −0.0231, 0.0231, −0.02308, 0.02308, −0.02308, −0.02308, −0.02308, −0.02307, 0.02307, −0.02307, −0.02307, −0.02306, 0.02306, −0.02306, 0.02306, −0.02306, 0.02306, 0.02305, 0.02305, −0.02305, −0.02305, −0.02305, −0.02304, −0.02304, −0.02304, −0.02304, −0.02304, 0.02304, 0.02303, 0.02303, −0.02303, −0.02302, −0.02302, −0.02301, −0.02301, 0.023, −0.023, −0.023, 0.02299, −0.02298, 0.02298, 0.02298, −0.02298, −0.02298, −0.02298, −0.02298, −0.02297, 0.02297, −0.02297, −0.02297, 0.02297, 0.02296, −0.02296, 0.02295, 0.02295, 0.02295, −0.02295, 0.02295, −0.02294, 0.02294, 0.02294, 0.02294, −0.02294, 0.02294, 0.02293, −0.02293, 0.02293, 0.02293, −0.02293, −0.02293, 0.02292, 0.02292, 0.02292, −0.02292, −0.02292, −0.02291, 0.02291, −0.02291, 0.02291, −0.02291, 0.0229, 0.0229, −0.02289, 0.02289, −0.02289, −0.02288, 0.02288, −0.02288, 0.02287, −0.02287, −0.02287, −0.02287, 0.02287, 0.02287, 0.02286, −0.02286, −0.02286, −0.02285, −0.02285, −0.02285, −0.02285, 0.02285, −0.02284, 0.02284, 0.02284, 0.02284, 0.02284, −0.02283, 0.02283, −0.02283, 0.02283, 0.02282, −0.02282, 0.02282, 0.02281, −0.02281, −0.0228, −0.0228, 0.0228, 0.0228, 0.02279, 0.02279, 0.02279, 0.02279, 0.02278, 0.02278, −0.02277, −0.02277, 0.02277, 0.02276, 0.02276, 0.02276, 0.02276, 0.02276, 0.02275, −0.02275, 0.02275, −0.02274, 0.02274, 0.02274, 0.02274, 0.02274, 0.02273, −0.02273, −0.02273, 0.02273, −0.02272, −0.02272, 0.02271, 0.02271, 0.02271, −0.02271, 0.02271, −0.02271, −0.0227, −0.0227, 0.02269, 0.02269, −0.02269, −0.02269, 0.02268, 0.02268, −0.02268, 0.02268, 0.02267, −0.02267, −0.02267, −0.02267, −0.02266, −0.02266, −0.02266, −0.02266, 0.02265, −0.02265, 0.02265, −0.02264, 0.02264, −0.02263, −0.02263, 0.02263, −0.02263, 0.02262, 0.02262, −0.02262, 0.02262, 0.02262, 0.02262, 0.02262, 0.02261, 0.02261, −0.02261, −0.02261, −0.02261, 0.02261, 0.0226, 0.0226, −0.02259, 0.02259, −0.02258, 0.02258, 0.02258, 0.02258, −0.02258, 0.02258, −0.02258, −0.02257, 0.02257, 0.02257, 0.02256, 0.02256, −0.02256, −0.02255, −0.02255, 0.02254, 0.02254, 0.02254, 0.02253, −0.02253, −0.02252, −0.02252, 0.02252, −0.02252, 0.02252, 0.02251, −0.02251, −0.02251, −0.02251, 0.02251, −0.02251, −0.02251, 0.0225, 0.0225, 0.0225, −0.0225, −0.0225, −0.0225, 0.02248, −0.02248, 0.02248, 0.02247, −0.02247, −0.02247, −0.02246, 0.02246, 0.02246, −0.02245, 0.02245, −0.02245, 0.02244, −0.02244, 0.02244, −0.02243, 0.02243, −0.02243, 0.02243, 0.02243, 0.02243, −0.02242, −0.02242, −0.02242, −0.02241, 0.02241, −0.02241, 0.02241, 0.02241, 0.02241, 0.0224, 0.0224, 0.0224, 0.02239, 0.02239, 0.02239, −0.02239, 0.02239, 0.02239, 0.02238, −0.02238, 0.02238, 0.02238, 0.02238, −0.02238, −0.02237, −0.02237, 0.02237, 0.02237, −0.02237, 0.02236, −0.02236, 0.02236, −0.02236, 0.02235, 0.02235, −0.02235, 0.02235, 0.02234, 0.02233, 0.02233, −0.02233, −0.02232, 0.02232, −0.02232, 0.02232, −0.02232, 0.02231, 0.02231, −0.02231, −0.0223, 0.0223, −0.0223, −0.02229, −0.02229, −0.02229, −0.02229, 0.02229, 0.02229, 0.02229, −0.02229, 0.02229, −0.02229, −0.02229, −0.02228, 0.02228, 0.02228, 0.02227, 0.02227, −0.02227, −0.02227, −0.02226, −0.02226, 0.02226, 0.02226, 0.02225, 0.02225, −0.02225, −0.02225, 0.02225, 0.02225, −0.02225, 0.02224, −0.02224, 0.02224, −0.02224, −0.02224, −0.02224, 0.02223, −0.02223, 0.02223, 0.02223, 0.02223, −0.02222, 0.02222, −0.02222, 0.02222, 0.02221, 0.02221, 0.02221, 0.02221, 0.0222, 0.0222, −0.0222, −0.0222, 0.0222, 0.0222, 0.0222, −0.02219, −0.02219, −0.02219, −0.02219, 0.02219, 0.02219, −0.02219, −0.02218, 0.02218, 0.02218, 0.02218, −0.02217, −0.02217, −0.02217, 0.02217, 0.02217, −0.02216, −0.02216, −0.02216, −0.02216, 0.02216, −0.02215, −0.02215, 0.02215, 0.02215, −0.02214, 0.02214, −0.02214, −0.02213, −0.02213, 0.02213, 0.02213, 0.02213, 0.02213, 0.02212, 0.02212, −0.02212, 0.02212, 0.02211, 0.02211, 0.02211, −0.0221, 0.0221, −0.0221, 0.02209, −0.02209, −0.02209, −0.02209, 0.02209, −0.02208, 0.02208, 0.02208, 0.02207, 0.02207, −0.02207, 0.02207, 0.02206, 0.02206, 0.02206, −0.02206, 0.02206, −0.02206, −0.02206, 0.02205, 0.02205, −0.02205, 0.02205, −0.02204, 0.02204, −0.02204, −0.02204, 0.02203, −0.02203, 0.02203, 0.02203, 0.02202, 0.02202, −0.02202, −0.02202, −0.02202, 0.02202, 0.02201, 0.02201, −0.02201, 0.02201, −0.02201, 0.02201, 0.022, 0.022, 0.022, −0.022, 0.02199, −0.02199, 0.02199, 0.02199, 0.02198, −0.02198, 0.02197, −0.02197, 0.02197, 0.02196, −0.02196, 0.02196, 0.02196, −0.02196, −0.02195, 0.02195, 0.02195, 0.02195, 0.02194, 0.02194, −0.02194, 0.02194, −0.02193, −0.02193, 0.02193, 0.02193, −0.02193, 0.02193, 0.02192, 0.02192, 0.02191, −0.02191, 0.02191, −0.02191, −0.02191, −0.0219, −0.0219, −0.0219, 0.0219, 0.02189, −0.02189, 0.02189, −0.02188, −0.02188, −0.02188, −0.02187, −0.02187, −0.02187, 0.02186, −0.02186, −0.02186, −0.02186, 0.02186, 0.02186, −0.02186, −0.02186, 0.02186, 0.02185, −0.02185, 0.02185, −0.02184, 0.02184, −0.02184, 0.02184, 0.02183, 0.02183, 0.02183, −0.02183, −0.02183, −0.02182, 0.02182, 0.02182, −0.02182, 0.02182, 0.02181, −0.02181, 0.02181, 0.02181, −0.02181, −0.02181, 0.02181, 0.0218, −0.0218, 0.0218, 0.0218, −0.0218, −0.02179, −0.02179, 0.02179, −0.02178, −0.02178, −0.02178, 0.02178, 0.02177, −0.02177, 0.02177, 0.02177, −0.02177, 0.02176, −0.02176, 0.02176, 0.02176, −0.02176, −0.02176, 0.02176, −0.02175, 0.02175, 0.02175, −0.02175, 0.02175, 0.02175, −0.02175, 0.02174, −0.02174, 0.02174, −0.02173, −0.02173, 0.02173, −0.02173, 0.02173, −0.02172, 0.02172, 0.02172, 0.02172, 0.02172, 0.02171, 0.02171, 0.02171, 0.02171, −0.0217, 0.0217, 0.0217, −0.0217, −0.0217, −0.02169, 0.02169, −0.02169, 0.02169, −0.02169, 0.02168, 0.02167, 0.02167, −0.02167, 0.02167, −0.02166, 0.02166, 0.02166, −0.02165, −0.02165, −0.02165, 0.02165, 0.02165, 0.02165, 0.02164, −0.02164, −0.02164, −0.02164, −0.02164, 0.02164, −0.02164, −0.02163, 0.02163, 0.02163, −0.02163, 0.02163, 0.02163, 0.02163, −0.02162, 0.02162, 0.02161, 0.02161, 0.02161, 0.02161, 0.0216, 0.0216, −0.0216, 0.0216, 0.0216, 0.0216, 0.02159, 0.02159, 0.02159, 0.02159, 0.02159, −0.02159, 0.02158, 0.02158, −0.02158, −0.02158, 0.02158, 0.02157, −0.02156, −0.02156, 0.02156, −0.02156, 0.02156, −0.02156, −0.02156, 0.02156, −0.02155, 0.02155, 0.02155, −0.02155, −0.02154, 0.02154, −0.02154, −0.02153, −0.02153, −0.02153, −0.02153, −0.02153, −0.02152, 0.02152, −0.02151, −0.02151, −0.02151, −0.02151, 0.0215, −0.0215, −0.0215, −0.0215, 0.02149, −0.02149, −0.02149, 0.02149, −0.02149, 0.02148, 0.02148, −0.02147, −0.02147, 0.02146, 0.02146, 0.02145, 0.02145, −0.02145, 0.02144, −0.02144, −0.02144, 0.02144, −0.02144, 0.02143, 0.02143, 0.02143, 0.02143, 0.02143, −0.02143, 0.02142, −0.02142, 0.02142, 0.02142, 0.02142, 0.02142, 0.02142, −0.02141, −0.02141, −0.02141, 0.0214, 0.0214, 0.0214, −0.0214, −0.0214, −0.02139, 0.02139, −0.02139, 0.02138, 0.02138, 0.02137, 0.02136, −0.02136, 0.02136, −0.02135, −0.02135, 0.02135, −0.02135, −0.02135, 0.02135, −0.02135, −0.02134, 0.02134, 0.02134, −0.02133, 0.02133, 0.02133, 0.02133, 0.02132, −0.02132, −0.02132, −0.02132, 0.02132, 0.02132, −0.02132, −0.02132, 0.02131, −0.02131, −0.02131, −0.02131, 0.02131, −0.02131, −0.02131, 0.0213, 0.0213, 0.0213, 0.0213, 0.0213, 0.02129, 0.02129, −0.02129, −0.02129, 0.02129, 0.02128, −0.02128, 0.02128, 0.02128, 0.02128, 0.02127, 0.02126, −0.02126, 0.02125, −0.02125, −0.02124, −0.02124, 0.02123, −0.02123, −0.02123, −0.02123, −0.02123, 0.02122, 0.02122, −0.02122, 0.02122, −0.02122, 0.02121, 0.02121, 0.02121, −0.02121, 0.0212, −0.0212, 0.0212, −0.02119, −0.02119, 0.02119, −0.02119, 0.02118, 0.02118, 0.02118, 0.02118, −0.02118, 0.02118, 0.02117, −0.02117, 0.02117, 0.02117, 0.02117, −0.02116, −0.02116, 0.02116, −0.02116, −0.02115, 0.02115, −0.02115, 0.02115, −0.02115, −0.02115, 0.02114, −0.02114, 0.02114, 0.02113, −0.02112, 0.02112, −0.02112, 0.02112, 0.02112, −0.02112, 0.02111, −0.02111, 0.02111, 0.02111, −0.02111, 0.02111, −0.0211, 0.0211, −0.0211, −0.0211, 0.02109, −0.02108, 0.02108, −0.02108, −0.02107, 0.02107, 0.02107, −0.02107, 0.02107, 0.02107, 0.02107, −0.02107, 0.02106, 0.02106, −0.02105, −0.02105, −0.02105, −0.02105, −0.02105, −0.02105, 0.02104, 0.02104, 0.02104, −0.02103, −0.02103, 0.02103, 0.02103, −0.02102, −0.02102, 0.02102, −0.02102, 0.02102, −0.02102, −0.02101, −0.02101, 0.02101, −0.02101, 0.02101, −0.02101, −0.021, 0.021, 0.02099, −0.02099, −0.02099, 0.02098, 0.02098, −0.02098, 0.02097, −0.02097, 0.02097, −0.02096, −0.02096, −0.02096, 0.02096, 0.02096, 0.02095, −0.02095, −0.02095, 0.02095, −0.02095, −0.02095, 0.02095, 0.02094, −0.02094, −0.02094, −0.02094, 0.02094, −0.02094, −0.02093, −0.02093, −0.02093, −0.02093, −0.02093, −0.02093, 0.02093, −0.02092, 0.02092, −0.02092, 0.02092, 0.02092, −0.02091, 0.02091, −0.0209, −0.0209, 0.0209, 0.0209, −0.02089, 0.02089, 0.02089, 0.02089, −0.02089, 0.02089, −0.02088, −0.02088, 0.02088, −0.02088, −0.02087, 0.02087, 0.02087, 0.02086, −0.02086, −0.02086, 0.02085, −0.02085, 0.02085, −0.02085, −0.02084, −0.02084, −0.02084, −0.02084, −0.02084, −0.02084, −0.02083, 0.02083, 0.02083, −0.02083, 0.02083, −0.02082, 0.02082, 0.02082, 0.02082, 0.02082, −0.02082, 0.02081, −0.02081, 0.02081, 0.02081, 0.02081, 0.02081, 0.02081, 0.02081, −0.02081, 0.02081, −0.0208, −0.0208, 0.0208, 0.02079, −0.02079, 0.02079, −0.02079, 0.02079, −0.02078, −0.02078, −0.02078, −0.02078, 0.02078, 0.02078, −0.02078, 0.02078, 0.02077, 0.02077, 0.02077, 0.02077, −0.02077, −0.02077, −0.02077, −0.02076, 0.02076, 0.02076, −0.02076, −0.02075, 0.02075, −0.02075, −0.02075, −0.02075, 0.02074, −0.02074, 0.02074, 0.02073, −0.02073, 0.02073, 0.02073, 0.02073, −0.02073, 0.02073, −0.02073, 0.02072, 0.02072, 0.02071, −0.02071, 0.02071, 0.02071, 0.02071, 0.02071, 0.0207, 0.0207, 0.0207, 0.0207, −0.0207, 0.0207, −0.02069, 0.02069, −0.02068, 0.02068, 0.02068, −0.02068, −0.02068, 0.02068, 0.02068, 0.02067, −0.02067, 0.02067, 0.02067, −0.02067, 0.02066, −0.02065, −0.02065, −0.02065, −0.02065, −0.02065, 0.02065, 0.02064, −0.02064, 0.02064, 0.02064, 0.02063, −0.02063, −0.02063, 0.02063, −0.02063, −0.02062, 0.02062, 0.02062, −0.02062, −0.02062, 0.02062, 0.02062, −0.02061, 0.02061, −0.0206, −0.0206, 0.0206, 0.02059, −0.02058, −0.02058, −0.02058, −0.02058, −0.02058, 0.02058, 0.02057, 0.02057, −0.02056, −0.02056, −0.02056, 0.02056, 0.02056, −0.02055, −0.02055, −0.02055, −0.02054, −0.02054, 0.02054, 0.02054, −0.02054, −0.02053, −0.02053, 0.02053, −0.02053, −0.02053, 0.02053, −0.02053, −0.02052, 0.02052, −0.02052, 0.02052, 0.02052, −0.02052, −0.02052, −0.02052, 0.02052, 0.02051, 0.02051, 0.02051, −0.02051, −0.02051, 0.02051, −0.02051, −0.02051, 0.02051, −0.02051, −0.0205, 0.0205, −0.0205, −0.0205, 0.0205, 0.02049, 0.02049, 0.02049, 0.02049, 0.02049, −0.02048, −0.02048, 0.02048, 0.02048, 0.02047, −0.02047, 0.02047, −0.02045, −0.02045, −0.02045, 0.02044, −0.02044, 0.02044, 0.02044, −0.02043, 0.02043, 0.02043, −0.02043, 0.02043, −0.02043, 0.02042, 0.02042, 0.02042, −0.02041, −0.02041, −0.02041, −0.02041, 0.02041, 0.02041, −0.0204, 0.0204, −0.0204, −0.02039, 0.02039, 0.02039, −0.02039, −0.02039, 0.02039, 0.02039, 0.02038, −0.02038, −0.02038, 0.02038, −0.02038, 0.02038, −0.02038, 0.02037, −0.02037, 0.02037, 0.02037, −0.02037, −0.02037, 0.02037, 0.02036, 0.02036, −0.02036, 0.02036, 0.02036, 0.02036, 0.02035, −0.02035, 0.02035, −0.02035, 0.02035, 0.02035, −0.02035, 0.02034, 0.02033, 0.02033, 0.02032, 0.02032, −0.02031, 0.02031, 0.02031, −0.02031, 0.0203, 0.0203, −0.0203, −0.02029, −0.02029, 0.02029, 0.02029, 0.02029, 0.02029, 0.02029, 0.02029, −0.02028, −0.02028, −0.02028, 0.02028, −0.02028, 0.02027, 0.02027, −0.02027, −0.02027, −0.02026, −0.02026, 0.02026, −0.02025, −0.02025, −0.02025, −0.02025, −0.02025, 0.02025, −0.02024, 0.02024, −0.02024, −0.02024, 0.02024, 0.02024, 0.02024, 0.02024, 0.02024, −0.02024, 0.02023, 0.02023, −0.02023, 0.02023, −0.02022, −0.02022, −0.02022, −0.02022, 0.02021, 0.02021, −0.02021, 0.02021, 0.02021, 0.02021, −0.02021, 0.02021, 0.02021, −0.02021, −0.0202, 0.0202, −0.0202, 0.0202, 0.0202, 0.0202, 0.02019, 0.02019, 0.02018, −0.02018, −0.02018, 0.02017, −0.02016, 0.02015, −0.02015, −0.02015, 0.02015, −0.02015, −0.02014, 0.02014, 0.02014, −0.02014, −0.02014, −0.02014, −0.02013, −0.02013, 0.02013, 0.02013, 0.02012, −0.02012, −0.02012, −0.02012, 0.02012, −0.02012, −0.02011, −0.02011, −0.02011, 0.0201, 0.0201, 0.0201, −0.02009, 0.02009, 0.02009, −0.02009, 0.02009, 0.02008, −0.02008, −0.02007, −0.02007, 0.02007, 0.02007, 0.02006, −0.02006, 0.02006, 0.02006, 0.02006, 0.02006, 0.02005, −0.02005, 0.02005, −0.02004, −0.02004, −0.02004, −0.02004, 0.02003, 0.02003, −0.02003, 0.02003, −0.02003, 0.02003, −0.02002, −0.02002, −0.02002, −0.02002, −0.02001, 0.02001, 0.02001, 0.02001, 0.02001, −0.02, −0.02, −0.02, 0.02, 0.02, −0.02, −0.01999, 0.01999, −0.01999, −0.01999, 0.01998, 0.01998, −0.01998, −0.01998, −0.01998, 0.01997, −0.01997, 0.01997, 0.01996, −0.01996, 0.01996, 0.01995, 0.01995, −0.01995, 0.01995, −0.01995, −0.01995, −0.01994, 0.01994, −0.01994, −0.01993, 0.01993, −0.01993, 0.01993, −0.01992, 0.01992, −0.01992, −0.01992, −0.01991, 0.01991, 0.0199, −0.01989, 0.01989, 0.01989, 0.01988, 0.01988, −0.01988, −0.01988, −0.01988, 0.01988, −0.01987, −0.01987, −0.01987, −0.01986, 0.01986, −0.01986, −0.01986, −0.01986, 0.01986, 0.01986, 0.01985, −0.01985, −0.01985, 0.01984, 0.01984, −0.01984, 0.01984, −0.01983, 0.01983, −0.01983, 0.01983, −0.01983, −0.01982, 0.01982, 0.01981, 0.01981, −0.01981, −0.01981, −0.01981, −0.01981, −0.0198, 0.0198, −0.0198, 0.0198, 0.0198, 0.0198, 0.01979, 0.01979, −0.01979, −0.01979, −0.01979, −0.01978, −0.01978, −0.01978, 0.01978, −0.01978, 0.01978, −0.01978, 0.01978, 0.01978, 0.01978, −0.01977, 0.01977, 0.01977, −0.01977, 0.01977, 0.01977, −0.01976, −0.01976, −0.01976, 0.01976, 0.01976, −0.01975, 0.01975, −0.01974, 0.01974, −0.01974, 0.01974, 0.01973, 0.01973, −0.01973, −0.01972, −0.01972, 0.01972, 0.01972, −0.01972, −0.01972, 0.01971, 0.01971, 0.01971, 0.01971, 0.01971, −0.0197, −0.0197, 0.0197, 0.01968, −0.01968, 0.01968, −0.01968, −0.01968, 0.01967, 0.01967, −0.01966, 0.01966, −0.01966, −0.01966, −0.01966, 0.01964, 0.01964, −0.01964, 0.01964, 0.01963, −0.01963, 0.01963, 0.01963, 0.01962, 0.01962, 0.01962, 0.01962, 0.01962, 0.01962, −0.01962, −0.01961, −0.0196, −0.0196, 0.0196, −0.0196, −0.01959, 0.01959, −0.01959, −0.01959, −0.01959, −0.01959, −0.01959, 0.01959, −0.01958, 0.01957, 0.01957, −0.01957, −0.01956, −0.01956, 0.01956, −0.01956, 0.01956, 0.01956, 0.01955, −0.01955, 0.01955, −0.01955, −0.01955, −0.01955, −0.01955, −0.01955, −0.01955, −0.01954, −0.01953, −0.01953, −0.01953, 0.01952, 0.01952, 0.01951, −0.0195, 0.0195, −0.0195, −0.0195, −0.0195, 0.0195, −0.0195, 0.0195, −0.01949, 0.01949, −0.01949, 0.01949, 0.01949, 0.01949, 0.01948, −0.01948, 0.01948, 0.01948, 0.01947, 0.01947, 0.01947, 0.01947, −0.01947, 0.01947, 0.01947, 0.01946, 0.01946, −0.01946, −0.01945, −0.01945, −0.01945, −0.01945, 0.01944, −0.01944, −0.01944, −0.01943, 0.01943, 0.01943, 0.01943, 0.01943, −0.01942, 0.01942, −0.01942, 0.01942, −0.01942, −0.01942, 0.01941, 0.01941, 0.01941, 0.01941, 0.0194, 0.0194, 0.0194, −0.01939, 0.01939, −0.01939, 0.01939, −0.01939, 0.01939, 0.01939, 0.01938, −0.01938, −0.01937, −0.01937, 0.01937, 0.01937, 0.01937, −0.01937, 0.01937, 0.01937, −0.01937, 0.01936, −0.01936, 0.01936, 0.01936, −0.01936, −0.01936, 0.01936, 0.01936, 0.01936, −0.01935, 0.01935, 0.01935, 0.01935, 0.01935, 0.01935, −0.01935, 0.01934, −0.01934, 0.01934, 0.01934, −0.01934, −0.01934, 0.01934, 0.01933, 0.01933, −0.01933, 0.01933, −0.01933, −0.01932, −0.01932, −0.01932, −0.01931, 0.01931, −0.01931, −0.01931, 0.01931, 0.0193, −0.0193, 0.0193, −0.0193, 0.0193, 0.0193, −0.0193, −0.0193, −0.0193, 0.01929, −0.01929, −0.01929, 0.01929, −0.01928, −0.01928, 0.01928, 0.01928, −0.01927, −0.01927, −0.01927, −0.01927, 0.01926, 0.01926, −0.01926, 0.01926, 0.01926, −0.01926, 0.01925, −0.01925, 0.01925, −0.01925, −0.01925, 0.01925, −0.01924, 0.01924, −0.01924, 0.01924, 0.01924, 0.01924, 0.01923, −0.01923, 0.01923, −0.01922, 0.01922, −0.01922, 0.01921, 0.01921, 0.01921, 0.01921, 0.0192, −0.0192, 0.0192, 0.0192, 0.01919, −0.01919, −0.01919, 0.01919, −0.01919, −0.01919, 0.01918, 0.01918, −0.01918, −0.01918, −0.01917, −0.01917, 0.01916, −0.01915, 0.01915, −0.01915, 0.01915, −0.01915, 0.01915, −0.01915, −0.01914, 0.01914, 0.01914, 0.01914, 0.01914, 0.01914, −0.01914, −0.01913, 0.01913, −0.01913, 0.01913, 0.01913, 0.01913, −0.01913, −0.01912, −0.01912, 0.01912, −0.01912, −0.01912, −0.01912, 0.01912, −0.01911, −0.01911, −0.01911, −0.01911, −0.01911, 0.0191, −0.0191, −0.0191, −0.0191, −0.0191, 0.0191, 0.01909, 0.01909, −0.01909, −0.01909, 0.01909, −0.01909, −0.01907, 0.01907, −0.01906, −0.01906, 0.01906, −0.01905, 0.01905, 0.01905, 0.01904, 0.01904, 0.01904, 0.01904, −0.01903, −0.01903, −0.01903, −0.01903, 0.01903, 0.01903, −0.01903, 0.01903, −0.01903, −0.01902, 0.01902, 0.01902, −0.01902, −0.01902, −0.01902, 0.01902, 0.01901, −0.01901, 0.01901, 0.01901, −0.01901, 0.01901, −0.019, −0.019, −0.019, −0.019, 0.019, −0.019, 0.019, 0.019, 0.019, −0.01899, 0.01899, −0.01899, −0.01899, 0.01898, 0.01898, 0.01898, 0.01898, −0.01897, −0.01897, −0.01897, −0.01897, 0.01897, −0.01897, 0.01897, 0.01897, 0.01896, 0.01896, −0.01895, −0.01895, 0.01895, 0.01895, 0.01895, −0.01895, 0.01895, 0.01895, 0.01894, 0.01894, 0.01894, 0.01894, 0.01893, −0.01893, 0.01893, −0.01893, −0.01892, −0.01892, −0.01892, −0.01892, 0.01892, 0.01892, −0.01891, 0.01891, 0.0189, 0.0189, 0.0189, 0.0189, −0.0189, −0.01889, 0.01889, −0.01889, 0.01889, −0.01889, −0.01888, 0.01888, −0.01888, −0.01888, 0.01887, −0.01887, −0.01887, 0.01887, 0.01887, 0.01887, 0.01886, −0.01886, −0.01886, −0.01886, −0.01886, 0.01885, −0.01885, −0.01885, 0.01885, 0.01884, 0.01884, −0.01884, −0.01883, 0.01883, 0.01883, 0.01882, 0.01882, −0.01882, −0.01882, −0.01882, −0.01882, −0.01882, 0.01881, −0.01881, 0.01881, 0.01881, −0.0188, 0.0188, 0.0188, 0.0188, 0.0188, 0.0188, −0.0188, −0.01879, −0.01879, −0.01879, −0.01879, −0.01879, −0.01879, 0.01879, 0.01878, 0.01878, 0.01878, −0.01878, −0.01877, −0.01877, 0.01876, −0.01875, 0.01875, −0.01875, 0.01875, −0.01875, −0.01875, 0.01875, 0.01875, 0.01875, 0.01874, −0.01874, −0.01874, −0.01874, −0.01874, −0.01874, 0.01873, 0.01873, −0.01873, −0.01873, 0.01872, −0.01872, −0.01872, 0.01872, −0.01872, −0.01872, 0.01871, 0.01871, 0.01871, −0.01871, −0.01871, 0.01871, 0.01871, 0.0187, 0.0187, 0.0187, 0.0187, −0.0187, −0.0187, −0.0187, 0.0187, 0.01869, 0.01869, −0.01869, 0.01869, 0.01869, −0.01869, 0.01869, −0.01868, 0.01868, 0.01867, −0.01867, −0.01867, 0.01867, 0.01867, 0.01867, 0.01866, −0.01866, −0.01866, −0.01866, −0.01866, −0.01866, 0.01865, 0.01865, 0.01865, 0.01865, 0.01865, −0.01865, −0.01865, −0.01865, −0.01864, −0.01864, 0.01864, 0.01864, 0.01864, 0.01864, −0.01863, −0.01863, −0.01863, −0.01863, 0.01863, 0.01863, −0.01863, 0.01863, −0.01862, 0.01862, 0.01862, −0.01862, 0.01861, 0.01861, 0.01861, 0.01861, 0.01861, 0.01861, 0.0186, 0.0186, −0.0186, 0.0186, 0.0186, 0.0186, 0.0186, −0.0186, 0.01859, 0.01859, −0.01859, 0.01859, 0.01859, 0.01858, −0.01858, −0.01858, −0.01858, 0.01857, −0.01857, −0.01857, −0.01857, −0.01856, 0.01856, 0.01856, −0.01856, 0.01856, 0.01856, −0.01856, 0.01855, 0.01855, −0.01854, −0.01854, 0.01854, −0.01854, 0.01854, 0.01854, 0.01854, −0.01854, −0.01854, 0.01853, −0.01853, 0.01853, 0.01853, −0.01853, −0.01852, 0.01852, −0.01852, 0.01852, −0.01852, −0.01852, 0.01852, 0.01852, 0.01851, 0.01851, −0.01851, 0.01851, −0.01851, 0.01851, 0.0185, −0.0185, −0.0185, 0.0185, −0.0185, −0.0185, −0.01849, −0.01849, 0.01849, 0.01849, 0.01849, 0.01848, −0.01848, 0.01848, 0.01848, −0.01847, 0.01847, −0.01847, 0.01847, −0.01846, 0.01846, −0.01846, −0.01845, 0.01845, −0.01845, −0.01845, −0.01845, 0.01845, 0.01845, 0.01844, −0.01844, 0.01844, −0.01844, −0.01844, 0.01843, −0.01843, 0.01843, 0.01843, 0.01843, −0.01843, 0.01843, −0.01842, 0.01842, −0.01842, −0.01842, −0.01842, −0.01841, −0.01841, 0.01841, 0.01841, −0.01841, −0.0184, 0.0184, 0.0184, 0.0184, −0.01839, −0.01839, −0.01839, 0.01839, 0.01838, −0.01838, 0.01838, 0.01838, −0.01838, −0.01837, −0.01837, −0.01837, −0.01836, −0.01836, 0.01836, 0.01836, −0.01836, 0.01835, −0.01835, −0.01834, −0.01834, −0.01834, −0.01834, −0.01833, −0.01833, −0.01833, 0.01833, 0.01833, 0.01833, 0.01833, 0.01833, 0.01832, −0.01832, −0.01832, 0.01832, −0.01832, −0.01832, −0.01832, −0.01832, −0.01831, 0.01831, −0.01831, 0.01831, −0.01831, −0.01831, 0.0183, 0.0183, −0.0183, 0.01829, 0.01829, 0.01829, −0.01829, −0.01829, −0.01829, 0.01829, −0.01829, 0.01829, 0.01828, −0.01828, −0.01828, 0.01827, 0.01827, −0.01827, 0.01827, 0.01827, 0.01827, 0.01826, 0.01826, 0.01826, −0.01825, 0.01825, 0.01825, 0.01825, 0.01824, 0.01824, 0.01824, 0.01824, 0.01824, −0.01824, 0.01824, −0.01824, −0.01824, 0.01824, 0.01824, 0.01824, 0.01823, 0.01823, 0.01823, 0.01823, 0.01822, −0.01822, −0.01822, 0.01822, −0.01821, 0.01821, 0.01821, −0.01821, −0.0182, 0.0182, 0.0182, −0.01819, 0.01819, 0.01819, −0.01819, 0.01819, −0.01819, −0.01819, −0.01819, −0.01818, 0.01818, −0.01818, 0.01818, −0.01818, 0.01817, 0.01817, 0.01817, 0.01817, −0.01816, 0.01816, −0.01816, 0.01816, 0.01815, 0.01815, −0.01815, 0.01815, 0.01814, −0.01814, −0.01814, 0.01814, −0.01814, −0.01813, 0.01813, 0.01813, 0.01813, 0.01813, 0.01813, 0.01813, −0.01812, 0.01811, −0.01811, −0.01811, −0.01811, −0.0181, 0.0181, −0.0181, 0.0181, 0.0181, 0.01809, −0.01809, 0.01809, −0.01809, 0.01809, 0.01809, 0.01809, 0.01809, 0.01809, 0.01808, −0.01808, −0.01808, 0.01807, −0.01806, −0.01806, −0.01805, −0.01805, 0.01805, −0.01805, −0.01805, 0.01804, −0.01804, −0.01804, −0.01804, −0.01803, −0.01803, −0.01803, 0.01803, −0.01803, −0.01802, −0.01802, 0.01802, −0.01802, −0.01802, 0.01802, 0.01801, −0.01801, −0.01801, 0.01801, 0.018, −0.018, −0.018, 0.018, −0.018, 0.018, 0.018, −0.018, −0.018, 0.018, 0.01799, −0.01799, −0.01799, 0.01799, 0.01798, 0.01798, −0.01798, −0.01798, −0.01798, 0.01798, −0.01797, 0.01797, 0.01797, −0.01796, 0.01796, 0.01796, 0.01796, 0.01796, 0.01795, −0.01795, 0.01795, 0.01795, −0.01795, 0.01795, −0.01795, −0.01794, 0.01794, −0.01794, 0.01794, 0.01794, 0.01794, −0.01793, −0.01793, −0.01793, 0.01793, −0.01793, −0.01793, 0.01792, −0.01792, 0.01791, −0.01791, −0.01791, −0.01791, −0.0179, −0.0179, 0.0179, 0.0179, −0.01789, −0.01789, −0.01788, 0.01788, −0.01788, −0.01788, 0.01788, −0.01788, −0.01788, 0.01787, −0.01787, 0.01787, −0.01787, 0.01787, 0.01787, 0.01787, 0.01787, 0.01787, −0.01787, 0.01786, 0.01786, 0.01786, 0.01784, 0.01784, 0.01784, −0.01784, −0.01784, 0.01783, 0.01783, 0.01783, 0.01783, −0.01783, −0.01782, −0.01782, 0.01782, −0.01782, −0.01782, −0.01782, −0.01782, −0.01781, −0.01781, −0.01781, 0.01781, 0.01781, −0.0178, −0.0178, 0.0178, −0.01779, −0.01779, 0.01779, −0.01779, 0.01779, −0.01778, −0.01778, −0.01778, 0.01778, 0.01778, −0.01778, −0.01778, 0.01777, 0.01777, −0.01777, 0.01777, −0.01777, 0.01777, −0.01777, 0.01776, 0.01776, −0.01776, −0.01776, 0.01776, 0.01775, 0.01775, −0.01775, −0.01775, 0.01775, −0.01774, −0.01774, −0.01774, −0.01774, −0.01774, 0.01774, 0.01774, 0.01774, 0.01773, −0.01773, −0.01773, −0.01772, 0.01772, 0.01772, 0.01772, 0.01771, −0.0177, 0.0177, 0.0177, −0.0177, −0.0177, −0.0177, 0.0177, −0.01769, −0.01769, 0.01769, −0.01769, −0.01769, −0.01769, −0.01769, −0.01769, −0.01769, 0.01768, 0.01768, 0.01768, 0.01768, −0.01768, 0.01768, 0.01767, 0.01767, −0.01767, −0.01767, 0.01767, −0.01767, −0.01767, 0.01766, −0.01766, −0.01766, 0.01766, 0.01766, −0.01765, 0.01765, −0.01765, −0.01765, 0.01765, −0.01765, 0.01765, −0.01765, −0.01764, −0.01764, 0.01764, −0.01763, −0.01763, 0.01763, 0.01763, −0.01763, −0.01763, −0.01763, −0.01763, 0.01762, −0.01762, −0.01762, −0.01761, −0.01761, 0.01761, 0.01761, −0.0176, 0.0176, 0.0176, −0.0176, 0.0176, 0.0176, 0.01759, −0.01759, 0.01759, −0.01759, −0.01759, 0.01759, −0.01758, −0.01758, −0.01758, −0.01758, −0.01757, 0.01757, 0.01756, −0.01756, 0.01756, 0.01756, −0.01756, 0.01755, −0.01755, −0.01755, 0.01754, 0.01754, 0.01754, −0.01753, 0.01753, 0.01753, −0.01753, 0.01753, −0.01753, 0.01752, 0.01752, 0.01752, 0.01752, 0.01751, −0.01751, −0.0175, −0.0175, −0.0175, 0.0175, −0.0175, −0.0175, −0.0175, −0.0175, −0.0175, −0.01749, 0.01749, −0.01749, −0.01749, −0.01748, −0.01748, −0.01748, 0.01747, 0.01747, 0.01747, −0.01747, 0.01747, −0.01746, −0.01746, −0.01746, 0.01746, 0.01745, −0.01745, −0.01745, −0.01745, 0.01745, 0.01745, −0.01744, 0.01744, −0.01744, −0.01744, 0.01744, 0.01744, −0.01744, 0.01743, 0.01743, −0.01743, 0.01742, −0.01742, 0.01742, −0.01742, −0.01742, −0.01741, 0.01741, −0.01741, −0.01741, 0.01741, 0.01741, −0.0174, −0.0174, −0.0174, −0.0174, 0.0174, 0.01739, 0.01739, −0.01738, 0.01738, −0.01737, −0.01737, −0.01737, 0.01736, 0.01736, 0.01736, 0.01736, 0.01736, 0.01736, 0.01736, 0.01736, 0.01736, −0.01736, −0.01736, −0.01736, −0.01736, 0.01735, 0.01735, −0.01735, −0.01735, −0.01735, −0.01734, −0.01734, −0.01734, 0.01733, −0.01733, 0.01732, −0.01732, −0.01732, −0.01732, −0.01732, −0.01732, −0.01732, −0.01731, 0.01731, 0.01731, 0.01731, 0.01731, −0.01731, −0.0173, −0.0173, −0.0173, 0.0173, −0.0173, 0.01729, 0.01729, −0.01729, 0.01729, −0.01729, 0.01729, −0.01728, −0.01728, −0.01728, 0.01728, −0.01727, 0.01727, 0.01726, −0.01726, 0.01725, 0.01725, 0.01725, −0.01725, 0.01725, 0.01725, −0.01725, −0.01724, 0.01724, 0.01724, −0.01723, −0.01723, −0.01723, 0.01723, 0.01723, 0.01722, 0.01722, 0.01722, −0.01722, 0.01722, −0.01721, 0.01721, −0.01721, −0.01721, −0.0172, 0.0172, 0.0172, −0.0172, −0.0172, −0.0172, −0.01719, 0.01719, −0.01719, 0.01719, −0.01719, −0.01719, 0.01718, 0.01718, 0.01718, 0.01718, 0.01717, 0.01717, −0.01717, −0.01717, 0.01716, 0.01716, −0.01715, 0.01715, 0.01715, 0.01715, −0.01714, 0.01714, 0.01714, −0.01714, −0.01714, 0.01713, 0.01713, 0.01712, −0.01712, −0.01711, 0.01711, −0.01711, 0.0171, −0.0171, −0.0171, 0.0171, 0.0171, 0.0171, −0.0171, 0.0171, 0.0171, −0.0171, 0.01709, −0.01709, −0.01709, −0.01709, 0.01709, −0.01708, −0.01708, −0.01708, 0.01708, 0.01708, 0.01708, 0.01707, 0.01707, 0.01707, 0.01707, 0.01707, 0.01707, −0.01707, −0.01706, −0.01706, −0.01706, −0.01706, 0.01706, 0.01706, −0.01705, 0.01705, −0.01704, 0.01704, −0.01703, −0.01703, −0.01703, −0.01702, 0.01702, −0.01702, 0.01702, 0.01701, −0.01701, 0.01701, −0.017, 0.017, −0.01699, 0.01699, 0.01699, 0.01699, −0.01698, 0.01698, −0.01698, 0.01698, 0.01698, 0.01697, −0.01697, −0.01697, 0.01697, 0.01697, 0.01697, −0.01696, −0.01696, −0.01695, 0.01695, −0.01694, −0.01694, −0.01694, −0.01694, −0.01694, −0.01693, −0.01693, −0.01693, −0.01693, −0.01693, −0.01693, 0.01693, −0.01692, 0.01692, −0.01692, −0.01692, −0.01692, 0.01692, −0.01692, −0.01692, 0.01691, 0.01691, 0.01691, −0.0169, 0.0169, −0.0169, 0.0169, −0.0169, 0.0169, 0.01689, 0.01689, 0.01688, 0.01688, −0.01688, −0.01688, −0.01688, 0.01688, −0.01687, −0.01687, 0.01687, −0.01687, 0.01687, −0.01686, 0.01686, −0.01686, 0.01686, −0.01686, −0.01686, −0.01686, 0.01686, 0.01686, −0.01686, −0.01685, 0.01685, −0.01685, 0.01685, 0.01685, 0.01685, −0.01685, 0.01685, 0.01685, 0.01685, 0.01684, −0.01684, 0.01684, 0.01684, −0.01683, 0.01683, 0.01683, −0.01683, −0.01683, −0.01683, −0.01683, 0.01683, 0.01682, −0.01682, −0.01682, −0.01681, −0.01681, 0.01681, −0.01681, 0.01681, −0.01681, 0.01681, 0.01681, −0.01681, 0.0168, −0.0168, −0.0168, −0.0168, −0.01679, −0.01679, 0.01679, 0.01679, 0.01679, −0.01678, 0.01678, 0.01678, 0.01678, 0.01678, 0.01678, −0.01678, 0.01678, −0.01678, 0.01677, 0.01677, 0.01676, −0.01676, 0.01676, −0.01676, −0.01676, −0.01676, 0.01676, 0.01675, −0.01675, −0.01675, 0.01675, 0.01675, 0.01674, 0.01674, 0.01674, 0.01674, 0.01674, −0.01673, −0.01673, −0.01673, 0.01673, 0.01673, −0.01673, −0.01673, −0.01673, 0.01673, 0.01673, 0.01673, −0.01672, 0.01672, −0.01672, 0.01672, −0.01672, −0.01672, −0.01672, −0.01671, −0.01671, −0.01671, 0.01671, −0.0167, −0.0167, −0.0167, 0.0167, 0.0167, −0.0167, −0.01668, −0.01668, −0.01667, 0.01667, −0.01667, 0.01667, −0.01667, 0.01667, −0.01667, 0.01667, −0.01667, 0.01667, 0.01666, 0.01666, 0.01665, −0.01665, −0.01665, 0.01665, 0.01665, 0.01664, 0.01664, 0.01664, 0.01664, −0.01664, −0.01664, −0.01664, 0.01663, 0.01663, 0.01663, 0.01663, −0.01663, 0.01662, −0.01662, 0.01662, −0.01662, −0.01662, −0.01662, −0.01661, −0.01661, −0.01661, 0.01661, 0.01661, 0.01661, −0.01661, −0.0166, −0.0166, −0.0166, 0.01659, −0.01659, −0.01659, 0.01659, −0.01659, −0.01659, −0.01658, −0.01658, 0.01658, 0.01658, −0.01657, 0.01657, 0.01657, 0.01657, 0.01656, 0.01656, −0.01656, 0.01656, −0.01655, −0.01654, −0.01654, −0.01654, −0.01654, 0.01654, 0.01653, −0.01653, −0.01653, −0.01653, −0.01653, 0.01652, −0.01652, 0.01652, 0.01652, 0.01652, 0.01652, −0.01651, 0.01651, −0.01651, −0.01651, 0.01651, 0.01651, 0.01651, 0.01651, −0.0165, −0.0165, 0.0165, 0.0165, 0.0165, −0.01649, −0.01649, 0.01649, −0.01649, 0.01649, −0.01649, −0.01648, −0.01647, 0.01647, 0.01647, 0.01647, 0.01646, −0.01646, 0.01646, 0.01646, −0.01646, −0.01646, −0.01646, 0.01646, 0.01646, −0.01645, 0.01645, 0.01645, 0.01645, 0.01645, −0.01644, −0.01644, 0.01644, 0.01644, 0.01644, −0.01644, −0.01644, −0.01643, 0.01643, −0.01643, −0.01643, −0.01643, −0.01642, 0.01642, 0.01642, −0.01642, −0.01641, −0.01641, 0.01641, 0.01641, −0.01641, −0.01641, 0.01641, −0.01641, −0.01641, 0.01641, −0.0164, 0.0164, −0.0164, −0.0164, 0.0164, −0.0164, −0.01639, −0.01639, −0.01639, −0.01639, 0.01638, −0.01638, −0.01638, −0.01638, −0.01638, 0.01638, 0.01638, 0.01637, −0.01637, −0.01637, −0.01636, −0.01636, −0.01636, 0.01635, 0.01635, 0.01635, −0.01635, −0.01635, 0.01635, 0.01635, 0.01635, 0.01635, 0.01634, 0.01634, 0.01634, −0.01633, −0.01633, 0.01633, −0.01633, −0.01633, −0.01633, −0.01633, −0.01633, −0.01632, −0.01632, −0.01632, 0.01632, −0.01631, 0.01631, 0.01631, 0.0163, 0.0163, 0.0163, 0.0163, −0.01629, 0.01629, 0.01629, 0.01628, 0.01628, 0.01628, −0.01628, 0.01628, −0.01628, −0.01627, 0.01627, 0.01627, −0.01627, −0.01627, 0.01627, −0.01626, −0.01626, 0.01626, −0.01626, −0.01625, 0.01625, −0.01625, −0.01625, 0.01625, 0.01625, −0.01625, 0.01625, 0.01625, −0.01625, −0.01624, −0.01624, 0.01624, −0.01624, 0.01624, 0.01624, 0.01624, −0.01624, 0.01624, −0.01623, 0.01623, −0.01623, −0.01623, 0.01623, 0.01623, −0.01622, 0.01622, −0.01622, −0.01622, 0.01622, −0.01622, −0.01621, 0.01621, 0.01621, 0.01621, 0.0162, −0.0162, 0.0162, 0.0162, −0.0162, 0.0162, −0.01619, −0.01619, 0.01619, 0.01619, 0.01619, 0.01619, 0.01619, −0.01619, −0.01618, 0.01618, −0.01618, −0.01618, −0.01618, 0.01618, −0.01617, 0.01616, 0.01616, −0.01616, −0.01615, 0.01615, 0.01615, 0.01615, −0.01615, −0.01615, −0.01615, 0.01614, −0.01614, −0.01614, 0.01614, 0.01614, −0.01614, 0.01614, 0.01614, −0.01613, −0.01613, 0.01613, −0.01612, 0.01612, −0.01612, −0.01611, −0.01611, 0.01611, 0.01611, 0.01611, 0.01611, −0.01611, 0.0161, 0.0161, −0.0161, −0.0161, −0.0161, 0.0161, 0.0161, −0.0161, 0.0161, 0.01609, 0.01609, −0.01609, 0.01609, −0.01609, 0.01608, −0.01608, −0.01608, −0.01608, 0.01608, −0.01607, 0.01607, −0.01607, −0.01607, −0.01607, 0.01606, −0.01606, −0.01606, 0.01605, −0.01605, 0.01605, 0.01605, 0.01605, 0.01605, −0.01605, 0.01605, 0.01605, −0.01604, 0.01604, 0.01604, −0.01603, −0.01603, −0.01603, 0.01603, −0.01603, −0.01603, −0.01603, 0.01603, 0.01602, −0.01602, 0.01602, −0.01602, 0.01601, 0.01601, −0.01601, −0.01601, 0.01601, −0.01601, 0.01601, −0.016, −0.016, 0.016, −0.016, −0.016, 0.016, −0.01599, −0.01599, −0.01599, 0.01599, 0.01599, −0.01599, −0.01598, 0.01598, −0.01598, −0.01598, −0.01598, −0.01598, −0.01597, −0.01597, −0.01597, −0.01597, 0.01597, −0.01597, 0.01597, −0.01596, 0.01596, −0.01596, −0.01596, −0.01596, −0.01595, 0.01595, 0.01595, −0.01594, 0.01594, 0.01594, −0.01594, −0.01594, 0.01594, 0.01594, −0.01592, 0.01592, −0.01592, −0.01592, 0.01591, −0.01591, −0.01591, −0.01591, 0.0159, −0.0159, −0.01589, 0.01589, −0.01589, −0.01589, 0.01589, 0.01589, −0.01588, −0.01588, 0.01588, −0.01587, 0.01587, 0.01587, 0.01587, 0.01587, −0.01587, 0.01587, −0.01587, 0.01587, −0.01586, −0.01586, 0.01586, 0.01586, 0.01586, −0.01586, −0.01586, 0.01585, 0.01585, 0.01585, 0.01585, −0.01585, 0.01584, 0.01584, 0.01584, 0.01584, 0.01583, −0.01583, 0.01583, 0.01583, −0.01583, 0.01583, 0.01583, −0.01583, 0.01583, 0.01582, −0.01582, 0.01582, −0.01582, 0.01582, −0.01582, 0.01581, −0.01581, 0.01581, 0.01581, 0.01581, −0.0158, −0.0158, 0.0158, 0.0158, 0.01579, −0.01579, 0.01579, 0.01578, −0.01578, −0.01578, 0.01578, −0.01578, 0.01578, 0.01578, 0.01578, 0.01577, 0.01577, 0.01577, −0.01577, 0.01576, −0.01576, −0.01576, 0.01576, 0.01575, 0.01575, −0.01575, 0.01575, −0.01575, −0.01575, −0.01575, −0.01574, −0.01574, 0.01574, −0.01574, −0.01574, −0.01574, 0.01573, −0.01573, 0.01573, 0.01573, 0.01573, 0.01572, −0.01572, 0.01572, 0.01572, 0.01572, −0.01572, −0.01572, −0.01571, 0.01571, 0.01571, 0.01571, 0.01571, −0.0157, −0.0157, 0.0157, −0.0157, −0.0157, 0.01569, 0.01569, 0.01569, −0.01569, −0.01569, −0.01569, −0.01568, 0.01568, 0.01568, −0.01568, 0.01568, 0.01567, 0.01567, 0.01567, 0.01567, 0.01567, −0.01567, −0.01567, −0.01566, 0.01566, 0.01566, 0.01566, 0.01566, −0.01566, −0.01566, −0.01565, 0.01565, 0.01565, −0.01565, −0.01565, 0.01565, −0.01565, 0.01565, 0.01565, 0.01564, 0.01564, −0.01564, −0.01564, −0.01564, 0.01563, 0.01563, −0.01563, 0.01563, 0.01563, 0.01563, 0.01562, 0.01562, −0.01562, 0.01561, 0.01561, 0.01561, 0.01561, 0.01561, −0.01561, 0.01561, −0.01561, 0.01561, −0.0156, −0.0156, 0.0156, 0.0156, −0.0156, 0.0156, 0.01559, 0.01559, −0.01558, 0.01558, 0.01558, 0.01558, 0.01558, −0.01558, −0.01558, 0.01558, 0.01558, 0.01558, −0.01557, 0.01557, −0.01557, 0.01557, −0.01557, 0.01557, 0.01556, 0.01556, −0.01556, 0.01555, 0.01555, 0.01555, −0.01554, −0.01554, 0.01554, 0.01553, 0.01553, 0.01553, 0.01552, −0.01552, −0.01552, 0.01552, −0.01552, −0.0155, −0.0155, −0.0155, 0.0155, −0.01549, 0.01549, 0.01549, 0.01548, 0.01548, 0.01547, 0.01547, 0.01547, 0.01547, −0.01547, 0.01546, −0.01546, 0.01546, −0.01546, −0.01546, 0.01546, −0.01546, 0.01545, −0.01545, −0.01545, −0.01545, 0.01544, 0.01544, −0.01544, 0.01544, 0.01543, −0.01543, 0.01542, −0.01542, 0.01541, −0.01541, −0.0154, −0.0154, −0.0154, −0.0154, 0.0154, −0.01539, −0.01539, 0.01539, 0.01539, −0.01539, 0.01539, −0.01539, 0.01538, 0.01538, −0.01538, −0.01538, 0.01538, −0.01537, 0.01537, −0.01537, −0.01537, 0.01537, 0.01537, −0.01536, 0.01536, 0.01536, 0.01535, −0.01535, −0.01535, 0.01535, −0.01534, −0.01534, 0.01534, 0.01534, −0.01534, 0.01534, −0.01534, −0.01534, −0.01534, 0.01534, −0.01533, 0.01533, 0.01533, 0.01533, −0.01533, 0.01533, −0.01533, −0.01533, −0.01533, −0.01533, 0.01533, 0.01532, −0.01532, 0.01532, 0.01532, 0.01531, −0.01531, 0.01531, 0.01531, 0.01531, 0.0153, −0.0153, −0.0153, −0.0153, −0.0153, 0.0153, 0.0153, 0.0153, 0.0153, 0.0153, 0.0153, −0.01529, 0.01529, −0.01529, −0.01528, −0.01528, 0.01528, −0.01528, 0.01528, −0.01528, −0.01528, −0.01528, −0.01528, −0.01527, 0.01527, 0.01527, −0.01527, −0.01526, −0.01526, −0.01526, −0.01526, −0.01526, −0.01526, −0.01526, 0.01525, 0.01525, −0.01525, 0.01525, −0.01525, 0.01524, −0.01524, −0.01523, 0.01523, −0.01523, 0.01523, 0.01522, −0.01522, 0.01522, 0.01522, 0.01521, 0.01521, 0.01521, 0.01521, 0.01521, 0.01521, 0.01521, 0.01521, 0.01521, −0.01521, −0.01521, −0.01521, 0.0152, −0.0152, −0.0152, 0.0152, 0.0152, 0.01519, 0.01519, 0.01519, −0.01519, 0.01518, 0.01518, 0.01518, −0.01517, 0.01517, 0.01517, −0.01516, −0.01516, 0.01516, −0.01516, −0.01516, 0.01516, 0.01516, 0.01515, −0.01515, −0.01515, −0.01515, 0.01514, 0.01514, −0.01514, −0.01514, 0.01514, 0.01514, 0.01514, 0.01514, 0.01513, 0.01513, −0.01513, −0.01513, 0.01513, −0.01513, −0.01513, 0.01513, −0.01513, −0.01512, −0.01512, 0.01512, 0.01511, 0.01511, −0.01511, −0.01511, 0.01511, 0.0151, 0.0151, 0.0151, 0.0151, −0.0151, 0.0151, −0.0151, 0.0151, 0.01509, −0.01509, −0.01509, −0.01509, −0.01509, 0.01508, −0.01508, −0.01508, 0.01508, 0.01508, 0.01507, 0.01507, 0.01507, −0.01507, −0.01507, −0.01507, −0.01507, 0.01506, 0.01506, 0.01506, −0.01506, 0.01506, 0.01506, 0.01506, −0.01506, −0.01506, −0.01506, 0.01506, −0.01505, −0.01505, 0.01505, −0.01505, −0.01505, −0.01504, −0.01504, −0.01503, −0.01503, 0.01503, −0.01503, 0.01503, 0.01503, 0.01503, 0.01502, 0.01502, 0.01502, 0.01502, −0.01502, 0.01501, 0.01501, 0.01501, −0.01501, 0.01501, −0.01501, 0.01501, −0.015, 0.015, −0.015, 0.015, −0.015, −0.015, −0.015, 0.015, 0.01499, 0.01499, −0.01499, 0.01499, −0.01499, −0.01499, 0.01498, −0.01498, 0.01497, 0.01497, 0.01497, −0.01497, −0.01497, −0.01496, 0.01496, 0.01496, −0.01496, 0.01496, 0.01496, 0.01496, −0.01495, 0.01495, 0.01495, −0.01495, −0.01495, 0.01495, 0.01495, −0.01494, 0.01494, 0.01494, −0.01493, −0.01493, −0.01493, −0.01493, 0.01493, −0.01492, −0.01492, −0.01492, −0.01492, −0.01492, −0.01491, 0.01491, 0.01491, −0.01491, 0.01491, −0.01491, 0.01491, −0.0149, −0.0149, 0.0149, 0.0149, −0.01489, 0.01489, 0.01489, −0.01488, 0.01488, −0.01488, 0.01488, −0.01488, −0.01488, 0.01488, 0.01488, 0.01487, 0.01486, −0.01486, 0.01486, 0.01486, −0.01486, 0.01486, 0.01486, 0.01486, −0.01485, 0.01485, 0.01485, −0.01485, −0.01485, 0.01485, −0.01485, 0.01485, −0.01484, −0.01484, −0.01484, 0.01483, −0.01483, 0.01483, 0.01483, 0.01483, −0.01483, 0.01482, −0.01482, −0.01482, 0.01482, −0.01482, 0.01482, −0.01481, −0.01481, −0.01481, −0.01481, 0.01481, −0.01481, −0.01481, −0.01481, 0.01481, 0.01481, −0.0148, −0.0148, 0.0148, 0.0148, 0.0148, 0.0148, −0.0148, −0.01479, 0.01479, 0.01479, 0.01479, −0.01479, −0.01479, 0.01479, −0.01479, 0.01478, −0.01478, −0.01478, 0.01478, 0.01478, 0.01477, 0.01477, −0.01477, −0.01477, −0.01476, −0.01476, −0.01476, −0.01476, −0.01476, 0.01476, 0.01476, 0.01476, −0.01476, −0.01475, 0.01475, 0.01475, −0.01475, −0.01475, −0.01475, −0.01475, −0.01474, −0.01474, −0.01474, 0.01474, −0.01474, −0.01473, 0.01473, 0.01473, 0.01473, 0.01473, 0.01473, 0.01472, 0.01472, 0.01472, 0.01472, −0.01472, −0.01471, 0.01471, −0.01471, −0.01471, −0.01471, −0.01471, −0.01471, −0.0147, 0.0147, 0.0147, −0.0147, 0.0147, 0.0147, 0.01469, −0.01469, −0.01469, −0.01469, −0.01469, −0.01469, −0.01469, 0.01469, −0.01468, 0.01468, 0.01468, 0.01468, −0.01468, −0.01468, −0.01468, −0.01468, −0.01467, 0.01467, 0.01467, −0.01467, −0.01467, −0.01466, −0.01466, 0.01466, 0.01466, 0.01466, 0.01465, 0.01465, 0.01465, 0.01465, −0.01465, 0.01465, −0.01465, −0.01465, 0.01465, 0.01464, 0.01464, 0.01464, −0.01464, −0.01464, −0.01464, 0.01463, −0.01463, 0.01463, −0.01462, 0.01462, −0.01462, −0.01462, 0.01462, 0.01462, −0.01461, 0.01461, −0.01461, 0.01461, 0.01461, −0.01461, −0.0146, −0.0146, 0.0146, −0.0146, 0.0146, 0.0146, −0.01459, −0.01459, 0.01459, 0.01458, 0.01458, 0.01458, −0.01458, 0.01458, −0.01458, 0.01458, 0.01458, 0.01457, 0.01457, 0.01457, 0.01457, −0.01457, 0.01457, 0.01457, −0.01457, −0.01457, 0.01456, 0.01456, −0.01456, −0.01456, −0.01456, 0.01456, 0.01456, −0.01455, −0.01455, −0.01455, 0.01454, −0.01454, 0.01454, 0.01454, 0.01454, 0.01454, 0.01454, 0.01454, 0.01454, 0.01454, −0.01453, 0.01453, 0.01452, −0.01452, 0.01452, −0.01452, 0.01452, −0.01451, 0.01451, 0.01451, −0.01451, 0.01451, 0.0145, −0.0145, 0.0145, −0.0145, 0.0145, −0.01449, 0.01449, −0.01449, 0.01449, 0.01448, −0.01448, −0.01448, 0.01448, −0.01447, −0.01447, −0.01447, −0.01447, 0.01447, 0.01447, 0.01447, 0.01447, −0.01447, −0.01446, −0.01446, 0.01446, −0.01446, −0.01446, 0.01445, −0.01445, −0.01445, 0.01445, −0.01445, 0.01444, −0.01443, −0.01443, 0.01443, −0.01443, 0.01443, −0.01443, 0.01443, −0.01443, 0.01443, −0.01443, 0.01443, 0.01443, −0.01443, 0.01442, −0.01442, −0.01442, 0.01442, 0.01442, 0.01442, −0.01442, 0.01441, −0.01441, −0.01441, −0.01441, −0.01441, 0.01441, −0.0144, −0.0144, 0.0144, −0.0144, 0.0144, 0.0144, −0.01439, −0.01439, 0.01439, 0.01439, −0.01439, 0.01439, −0.01439, 0.01438, −0.01438, −0.01438, 0.01438, 0.01437, 0.01437, −0.01437, 0.01437, −0.01437, 0.01436, 0.01436, −0.01436, 0.01436, −0.01436, −0.01436, 0.01436, −0.01436, 0.01436, 0.01436, −0.01436, −0.01435, 0.01435, 0.01435, 0.01435, 0.01435, −0.01435, 0.01434, 0.01434, −0.01434, −0.01434, −0.01434, 0.01434, −0.01433, −0.01433, −0.01432, −0.01432, −0.01432, 0.01432, 0.01432, −0.01432, −0.01432, −0.01431, 0.01431, −0.01431, 0.01431, −0.01431, 0.01431, −0.0143, −0.0143, −0.0143, 0.0143, −0.0143, 0.0143, 0.0143, 0.01429, −0.01429, −0.01429, 0.01429, 0.01429, −0.01429, −0.01428, −0.01428, −0.01428, 0.01428, −0.01428, 0.01427, −0.01427, 0.01427, −0.01427, 0.01427, −0.01427, −0.01426, 0.01426, 0.01426, 0.01425, 0.01425, 0.01425, 0.01425, 0.01425, 0.01424, 0.01424, 0.01424, 0.01423, −0.01423, 0.01423, −0.01423, 0.01423, 0.01423, 0.01423, 0.01423, 0.01422, 0.01422, −0.01422, 0.01422, 0.01422, 0.01422, 0.01422, 0.01421, −0.01421, −0.01421, −0.01421, 0.01421, 0.01421, −0.0142, 0.0142, 0.0142, −0.01419, −0.01419, 0.01419, −0.01419, −0.01419, −0.01419, 0.01418, −0.01418, 0.01418, 0.01418, 0.01418, 0.01418, 0.01418, −0.01418, 0.01418, −0.01418, 0.01417, 0.01417, −0.01417, −0.01417, −0.01417, 0.01417, −0.01417, −0.01417, 0.01416, −0.01416, 0.01416, 0.01415, −0.01415, 0.01415, 0.01415, −0.01415, 0.01415, −0.01415, 0.01415, 0.01415, −0.01414, −0.01414, 0.01414, 0.01414, 0.01414, 0.01414, −0.01414, 0.01414, −0.01414, 0.01414, −0.01414, 0.01413, 0.01413, −0.01413, −0.01413, 0.01413, 0.01413, 0.01413, 0.01413, 0.01413, −0.01412, 0.01412, 0.01412, −0.01412, −0.01412, 0.01411, 0.01411, −0.01411, 0.01411, −0.01411, −0.01411, 0.01411, −0.01411, −0.01411, 0.0141, 0.0141, −0.0141, −0.0141, −0.0141, 0.0141, −0.01409, −0.01409, 0.01409, 0.01409, −0.01409, −0.01409, 0.01409, 0.01409, −0.01409, 0.01409, −0.01409, −0.01409, −0.01408, 0.01408, −0.01408, 0.01408, 0.01408, 0.01408, −0.01407, 0.01407, 0.01407, −0.01407, 0.01407, 0.01407, −0.01407, 0.01407, −0.01407, −0.01407, −0.01406, −0.01406, 0.01406, 0.01406, −0.01406, −0.01406, 0.01406, −0.01405, 0.01405, 0.01405, 0.01405, −0.01404, 0.01404, 0.01404, 0.01404, −0.01404, 0.01404, −0.01404, −0.01403, −0.01403, 0.01403, −0.01403, −0.01403, −0.01403, −0.01403, −0.01403, −0.01402, 0.01402, −0.01402, −0.01402, 0.01402, 0.01402, −0.01401, −0.01401, −0.01401, −0.01401, 0.01401, −0.01401, −0.01401, 0.014, 0.014, 0.014, 0.014, −0.014, −0.01399, −0.01399, −0.01399, −0.01399, 0.01399, −0.01399, −0.01399, 0.01398, −0.01398, 0.01398, −0.01398, 0.01398, −0.01397, −0.01396, −0.01396, 0.01396, 0.01396, 0.01396, −0.01396, 0.01395, −0.01395, 0.01395, 0.01395, 0.01395, −0.01395, −0.01395, 0.01394, −0.01394, 0.01394, −0.01394, −0.01394, 0.01394, 0.01394, 0.01394, −0.01393, −0.01393, 0.01393, 0.01393, 0.01393, 0.01393, 0.01393, −0.01393, 0.01392, 0.01392, 0.01392, −0.01392, −0.01392, −0.01392, −0.01392, −0.01392, −0.01391, 0.01391, −0.01391, 0.01391, −0.01391, 0.01391, −0.01391, −0.0139, −0.0139, −0.0139, −0.0139, 0.0139, 0.0139, 0.0139, −0.0139, −0.01389, 0.01389, −0.01389, −0.01389, 0.01389, 0.01388, 0.01388, −0.01388, 0.01388, 0.01388, −0.01388, −0.01387, 0.01387, 0.01387, 0.01387, −0.01387, 0.01386, 0.01386, 0.01386, −0.01385, 0.01385, −0.01385, −0.01385, 0.01385, −0.01385, 0.01385, −0.01385, 0.01385, 0.01385, −0.01385, 0.01385, 0.01384, 0.01384, −0.01384, −0.01384, 0.01384, −0.01384, −0.01383, −0.01383, −0.01383, 0.01383, 0.01383, 0.01382, 0.01382, −0.01381, −0.01381, −0.01381, 0.01381, 0.01381, 0.01381, 0.01381, 0.01381, −0.0138, 0.0138, 0.0138, 0.0138, −0.0138, −0.0138, −0.0138, 0.0138, −0.0138, −0.01379, −0.01379, −0.01379, 0.01379, −0.01378, 0.01378, 0.01378, −0.01378, 0.01378, −0.01377, −0.01377, −0.01377, −0.01377, 0.01376, −0.01376, 0.01376, −0.01376, 0.01376, 0.01376, −0.01375, −0.01375, 0.01375, −0.01375, 0.01375, 0.01375, −0.01375, 0.01375, −0.01374, 0.01374, −0.01374, 0.01374, −0.01374, −0.01374, −0.01373, −0.01373, −0.01373, 0.01373, −0.01373, 0.01372, 0.01372, 0.01372, 0.01372, −0.01371, 0.01371, −0.01371, −0.01371, 0.01371, −0.01371, 0.01371, 0.0137, −0.0137, −0.0137, −0.0137, 0.01369, −0.01369, 0.01369, 0.01368, −0.01368, −0.01368, −0.01368, 0.01368, −0.01368, −0.01367, 0.01367, 0.01367, −0.01367, 0.01367, −0.01366, −0.01366, −0.01366, 0.01366, −0.01366, 0.01366, −0.01366, −0.01366, 0.01366, 0.01366, −0.01365, −0.01365, −0.01365, −0.01365, −0.01365, 0.01364, −0.01364, 0.01364, −0.01363, −0.01363, 0.01363, 0.01363, 0.01363, −0.01363, 0.01362, 0.01362, 0.01362, −0.01362, 0.01361, 0.01361, 0.01361, 0.01361, −0.01361, 0.01361, −0.0136, 0.0136, 0.0136, −0.0136, −0.0136, 0.0136, 0.0136, 0.0136, −0.0136, −0.01359, −0.01359, −0.01359, 0.01359, 0.01359, 0.01358, 0.01358, 0.01358, 0.01358, 0.01358, −0.01357, 0.01357, 0.01357, 0.01357, 0.01357, 0.01357, −0.01357, −0.01357, −0.01357, 0.01357, 0.01356, 0.01356, 0.01356, −0.01356, −0.01356, −0.01355, 0.01355, 0.01355, 0.01355, −0.01355, −0.01355, −0.01355, −0.01354, −0.01354, −0.01354, −0.01354, 0.01354, −0.01354, −0.01354, −0.01354, −0.01354, −0.01354, 0.01353, 0.01353, 0.01353, −0.01353, 0.01352, 0.01352, 0.01352, −0.01352, 0.01352, −0.01352, −0.01352, −0.01352, −0.01352, −0.01351, 0.01351, 0.01351, 0.01351, 0.01351, 0.01351, −0.0135, 0.0135, −0.0135, −0.0135, −0.01349, −0.01349, 0.01349, −0.01348, 0.01348, 0.01348, −0.01348, 0.01348, −0.01347, 0.01347, 0.01347, 0.01347, −0.01347, 0.01347, 0.01347, 0.01346, −0.01346, −0.01346, −0.01346, 0.01346, 0.01346, 0.01346, 0.01346, 0.01346, −0.01345, 0.01345, 0.01345, 0.01344, 0.01344, 0.01344, −0.01344, 0.01344, −0.01343, −0.01343, 0.01343, 0.01343, −0.01343, 0.01342, −0.01342, −0.01342, −0.01342, −0.01342, −0.01342, 0.01342, −0.01342, −0.01342, −0.01342, −0.01341, −0.01341, −0.01341, −0.01341, 0.01341, 0.01341, 0.01341, 0.01341, 0.0134, −0.0134, −0.0134, 0.0134, 0.0134, −0.0134, 0.0134, −0.0134, 0.0134, −0.01339, 0.01339, 0.01339, −0.01339, 0.01339, 0.01338, −0.01338, 0.01338, −0.01338, −0.01338, −0.01337, −0.01337, 0.01337, −0.01337, −0.01337, 0.01337, 0.01337, −0.01337, −0.01337, 0.01337, −0.01336, 0.01336, −0.01336, −0.01336, 0.01336, −0.01336, −0.01336, −0.01335, 0.01335, 0.01335, −0.01335, 0.01335, −0.01334, −0.01334, 0.01334, 0.01333, −0.01333, −0.01333, 0.01332, −0.01332, 0.01332, −0.01332, 0.01332, −0.01332, −0.01331, 0.01331, 0.01331, −0.01331, 0.01331, 0.01331, 0.01331, 0.01331, 0.0133, 0.0133, 0.0133, 0.0133, 0.0133, −0.0133, −0.01329, −0.01329, −0.01329, −0.01329, −0.01329, −0.01329, −0.01329, 0.01329, −0.01329, −0.01329, −0.01329, −0.01329, −0.01328, 0.01328, −0.01328, −0.01328, 0.01328, −0.01327, 0.01327, 0.01327, −0.01327, −0.01326, −0.01326, 0.01326, −0.01326, −0.01326, 0.01326, −0.01326, 0.01326, 0.01326, −0.01325, 0.01325, −0.01325, −0.01325, −0.01325, 0.01325, 0.01324, −0.01324, −0.01324, 0.01324, 0.01324, 0.01324, 0.01322, −0.01322, 0.01321, −0.01321, 0.0132, 0.0132, −0.0132, −0.0132, 0.0132, −0.01319, −0.01319, 0.01319, −0.01319, −0.01319, −0.01319, 0.01318, 0.01318, −0.01318, 0.01318, −0.01318, 0.01318, 0.01318, −0.01318, 0.01318, −0.01318, 0.01317, 0.01317, −0.01317, −0.01317, 0.01317, 0.01317, 0.01317, −0.01317, −0.01317, 0.01317, 0.01317, 0.01316, 0.01316, −0.01316, −0.01316, 0.01316, −0.01316, −0.01316, 0.01316, −0.01315, −0.01315, −0.01314, 0.01314, 0.01314, −0.01314, −0.01314, −0.01313, −0.01313, 0.01313, 0.01313, −0.01312, −0.01312, 0.01312, 0.01312, 0.01311, −0.01311, −0.01311, 0.01311, 0.01311, −0.0131, −0.0131, −0.0131, −0.0131, −0.0131, 0.0131, 0.0131, −0.0131, −0.0131, 0.01309, −0.01309, −0.01309, 0.01309, 0.01308, −0.01308, −0.01308, 0.01308, −0.01308, −0.01308, 0.01308, 0.01308, −0.01308, −0.01308, 0.01308, 0.01307, 0.01307, −0.01307, −0.01307, −0.01307, −0.01307, 0.01307, 0.01306, −0.01306, 0.01306, −0.01306, −0.01305, 0.01305, −0.01304, 0.01304, −0.01304, 0.01304, 0.01304, 0.01304, −0.01304, 0.01304, 0.01303, −0.01303, −0.01303, −0.01303, −0.01302, −0.01302, 0.01301, 0.01301, 0.01301, −0.01301, 0.01301, −0.01301, 0.01301, 0.01301, 0.01301, −0.01301, 0.01301, −0.013, −0.013, 0.013, −0.01299, −0.01299, 0.01299, 0.01299, 0.01299, −0.01299, 0.01299, −0.01299, 0.01298, 0.01298, 0.01298, 0.01298, −0.01298, 0.01297, −0.01297, 0.01297, 0.01296, 0.01296, 0.01296, 0.01296, 0.01296, 0.01296, −0.01296, 0.01295, −0.01295, 0.01295, −0.01295, −0.01295, 0.01295, −0.01294, −0.01294, −0.01294, 0.01294, 0.01294, 0.01294, −0.01293, −0.01293, 0.01293, 0.01293, 0.01293, 0.01293, −0.01293, 0.01293, 0.01293, 0.01293, −0.01293, −0.01292, 0.01292, −0.01292, −0.01292, 0.01292, 0.01292, −0.01292, 0.01292, −0.01291, 0.01291, −0.01291, −0.01291, −0.01291, 0.01291, 0.0129, 0.0129, −0.0129, −0.0129, −0.01289, −0.01289, 0.01289, 0.01289, −0.01289, −0.01289, −0.01289, −0.01288, 0.01288, 0.01288, 0.01288, 0.01288, −0.01288, −0.01288, −0.01288, 0.01288, 0.01288, 0.01287, −0.01287, −0.01287, −0.01287, −0.01287, 0.01287, −0.01287, −0.01286, 0.01286, 0.01286, 0.01285, 0.01285, 0.01285, 0.01285, 0.01285, 0.01284, 0.01284, −0.01284, 0.01284, 0.01284, −0.01284, 0.01284, −0.01283, −0.01283, 0.01283, 0.01283, −0.01283, 0.01283, −0.01283, −0.01283, 0.01283, 0.01283, −0.01283, 0.01282, −0.01282, −0.01282, 0.01282, −0.01282, 0.01282, 0.01281, 0.01281, 0.01281, 0.01281, −0.01281, 0.01281, 0.01281, 0.0128, 0.0128, −0.0128, 0.0128, −0.0128, −0.01279, 0.01279, 0.01279, 0.01279, −0.01279, −0.01279, 0.01279, 0.01278, 0.01278, −0.01277, −0.01277, −0.01277, −0.01277, −0.01277, 0.01277, 0.01276, 0.01276, −0.01276, −0.01276, 0.01276, −0.01276, −0.01276, −0.01276, −0.01276, 0.01276, −0.01276, 0.01276, 0.01276, 0.01276, 0.01275, 0.01275, 0.01275, 0.01275, −0.01275, 0.01275, 0.01275, −0.01275, −0.01275, −0.01274, 0.01273, 0.01273, 0.01273, 0.01272, −0.01272, −0.01272, −0.01272, 0.01272, −0.01272, −0.01272, 0.01272, 0.01271, −0.01271, 0.01271, 0.01271, −0.01271, 0.01271, 0.01271, −0.01271, −0.0127, −0.0127, 0.0127, −0.0127, −0.0127, −0.01269, −0.01269, −0.01269, −0.01269, 0.01269, 0.01269, 0.01269, −0.01269, 0.01269, 0.01269, −0.01269, −0.01268, −0.01268, −0.01268, 0.01268, 0.01268, 0.01268, 0.01267, 0.01267, −0.01267, 0.01267, 0.01267, −0.01267, 0.01266, −0.01266, 0.01266, 0.01266, 0.01266, 0.01266, 0.01265, −0.01265, 0.01265, 0.01265, −0.01264, 0.01264, 0.01264, 0.01264, 0.01264, 0.01263, −0.01263, 0.01263, 0.01263, 0.01263, −0.01263, −0.01263, −0.01263, −0.01262, 0.01262, 0.01262, 0.01262, −0.01262, −0.01261, 0.01261, 0.01261, 0.01261, 0.01261, 0.01261, −0.01261, −0.01261, 0.0126, −0.0126, −0.0126, 0.0126, −0.0126, −0.0126, −0.0126, 0.0126, −0.0126, 0.0126, −0.01259, −0.01259, 0.01259, 0.01259, 0.01259, −0.01258, 0.01258, −0.01258, 0.01258, 0.01258, −0.01258, −0.01258, 0.01258, −0.01258, 0.01258, −0.01258, 0.01257, −0.01257, −0.01257, −0.01257, 0.01256, −0.01256, −0.01256, 0.01256, 0.01256, −0.01256, −0.01256, −0.01256, 0.01255, 0.01255, 0.01255, 0.01255, 0.01254, −0.01254, 0.01254, −0.01254, −0.01254, 0.01254, 0.01254, 0.01254, −0.01253, 0.01253, −0.01253, −0.01253, −0.01253, −0.01252, 0.01252, −0.01252, 0.01252, −0.01252, −0.01252, −0.01252, −0.01252, −0.01252, 0.01252, 0.01251, −0.01251, −0.01251, 0.01251, 0.01251, 0.01251, 0.0125, 0.0125, −0.0125, −0.0125, 0.0125, 0.0125, 0.0125, −0.01249, −0.01249, 0.01249, −0.01249, 0.01249, 0.01249, 0.01248, 0.01248, −0.01248, 0.01248, −0.01248, 0.01248, 0.01248, −0.01248, −0.01247, 0.01246, 0.01246, −0.01246, 0.01246, 0.01246, 0.01246, 0.01246, 0.01245, −0.01245, 0.01245, 0.01245, −0.01245, 0.01245, 0.01245, 0.01245, −0.01245, 0.01245, 0.01244, −0.01244, 0.01244, −0.01244, −0.01244, 0.01244, 0.01243, −0.01243, −0.01243, −0.01243, −0.01243, 0.01243, −0.01243, −0.01243, 0.01242, −0.01242, 0.01242, 0.01242, 0.01241, 0.01241, −0.01241, 0.01241, 0.01241, 0.01241, −0.01241, −0.0124, 0.0124, −0.0124, −0.0124, −0.0124, −0.0124, −0.0124, −0.0124, −0.0124, −0.0124, −0.0124, −0.0124, 0.01239, 0.01239, 0.01239, −0.01239, 0.01239, −0.01239, −0.01239, 0.01238, 0.01238, 0.01238, 0.01238, 0.01238, −0.01237, 0.01237, −0.01237, 0.01237, 0.01237, 0.01237, 0.01237, −0.01237, −0.01236, 0.01236, −0.01236, 0.01236, 0.01236, −0.01236, −0.01236, 0.01236, −0.01236, 0.01235, 0.01235, 0.01235, 0.01235, 0.01235, −0.01235, 0.01235, 0.01235, 0.01235, 0.01234, 0.01234, 0.01234, −0.01234, −0.01234, −0.01234, 0.01234, 0.01234, −0.01234, −0.01233, −0.01233, 0.01233, 0.01233, −0.01233, 0.01233, 0.01233, 0.01233, −0.01232, −0.01232, 0.01232, −0.01232, −0.01232, −0.01232, −0.01232, 0.01232, −0.01231, 0.01231, −0.01231, 0.01231, −0.01231, 0.01231, 0.01231, −0.01231, 0.01231, 0.01231, −0.01231, 0.0123, 0.0123, −0.01229, −0.01229, 0.01229, 0.01229, −0.01228, −0.01228, −0.01228, −0.01228, 0.01228, −0.01228, −0.01227, 0.01227, −0.01227, −0.01227, 0.01227, 0.01227, −0.01227, −0.01227, −0.01227, −0.01226, −0.01226, −0.01226, 0.01226, −0.01226, 0.01226, −0.01226, 0.01226, 0.01226, 0.01226, 0.01225, −0.01225, 0.01225, 0.01225, 0.01225, −0.01224, 0.01224, −0.01224, 0.01224, 0.01224, −0.01224, 0.01224, −0.01223, −0.01223, 0.01223, −0.01223, 0.01223, −0.01223, 0.01222, 0.01222, −0.01222, 0.01222, −0.01222, −0.01221, 0.01221, −0.01221, 0.01221, 0.01221, −0.01221, 0.01221, 0.01221, 0.0122, 0.0122, −0.0122, 0.0122, −0.0122, −0.0122, 0.0122, 0.0122, −0.01219, 0.01219, −0.01219, 0.01218, −0.01218, 0.01218, −0.01218, −0.01218, −0.01218, 0.01218, 0.01217, 0.01217, −0.01217, −0.01217, −0.01217, −0.01217, 0.01217, −0.01217, −0.01216, 0.01216, −0.01216, −0.01216, 0.01216, 0.01216, 0.01215, −0.01215, −0.01215, −0.01215, −0.01215, 0.01215, −0.01215, 0.01214, 0.01214, −0.01214, −0.01214, −0.01214, 0.01213, 0.01213, −0.01213, −0.01213, 0.01213, −0.01213, −0.01213, 0.01212, 0.01212, 0.01212, −0.01212, 0.01212, 0.01212, 0.01212, 0.01212, 0.01212, 0.01212, 0.01211, 0.01211, −0.01211, −0.01211, −0.01211, 0.01211, 0.01211, 0.01211, 0.01211, 0.01211, 0.0121, 0.0121, −0.0121, −0.0121, −0.0121, −0.0121, −0.0121, 0.0121, 0.0121, 0.0121, −0.0121, 0.01209, −0.01209, 0.01209, −0.01209, 0.01209, −0.01209, −0.01208, −0.01208, 0.01208, −0.01208, −0.01208, 0.01208, 0.01207, −0.01207, −0.01207, 0.01207, 0.01207, −0.01207, 0.01207, −0.01206, 0.01206, 0.01206, 0.01206, 0.01206, −0.01206, 0.01206, −0.01206, −0.01205, −0.01205, −0.01205, −0.01205, 0.01205, 0.01205, 0.01205, 0.01205, −0.01205, 0.01205, 0.01205, 0.01205, 0.01204, −0.01204, 0.01204, −0.01204, 0.01204, 0.01203, −0.01203, 0.01203, 0.01203, −0.01203, 0.01203, −0.01203, −0.01202, −0.01202, −0.01202, −0.01202, −0.01202, −0.01202, −0.01202, 0.01202, −0.01202, −0.01202, −0.01201, −0.01201, −0.01201, 0.01201, −0.01201, 0.01201, −0.01201, −0.01201, −0.012, −0.012, 0.012, −0.012, 0.012, 0.012, −0.012, −0.012, 0.012, −0.01199, −0.01199, 0.01199, 0.01199, 0.01199, 0.01199, 0.01198, −0.01198, 0.01198, 0.01198, 0.01198, 0.01198, 0.01198, 0.01198, 0.01198, −0.01197, 0.01197, −0.01197, 0.01197, −0.01197, −0.01197, −0.01197, −0.01197, 0.01197, 0.01197, 0.01196, 0.01196, −0.01196, −0.01196, 0.01196, 0.01196, 0.01196, 0.01196, 0.01196, 0.01196, 0.01196, −0.01196, −0.01196, 0.01195, 0.01195, −0.01195, 0.01195, 0.01194, 0.01194, −0.01194, 0.01194, −0.01193, 0.01193, −0.01193, 0.01193, −0.01192, 0.01192, −0.01192, 0.01192, 0.01192, 0.01191, 0.01191, −0.01191, −0.01191, 0.01191, 0.01191, −0.01191, −0.0119, 0.0119, −0.0119, −0.0119, −0.0119, 0.0119, −0.0119, −0.0119, 0.0119, −0.0119, 0.01189, −0.01189, 0.01189, 0.01189, 0.01189, 0.01189, −0.01188, −0.01188, −0.01188, −0.01188, −0.01188, 0.01188, 0.01188, −0.01188, −0.01188, 0.01188, −0.01188, 0.01187, −0.01187, −0.01187, 0.01187, −0.01187, 0.01187, 0.01187, −0.01187, −0.01187, −0.01187, −0.01186, −0.01186, −0.01186, 0.01186, 0.01186, −0.01186, 0.01186, −0.01186, −0.01185, 0.01185, 0.01185, −0.01185, 0.01185, 0.01185, 0.01185, 0.01185, −0.01184, 0.01184, −0.01184, 0.01184, −0.01184, 0.01184, −0.01184, −0.01184, 0.01184, −0.01183, 0.01183, 0.01183, 0.01183, 0.01183, −0.01182, 0.01182, 0.01182, −0.01182, −0.01182, 0.01182, −0.01181, 0.01181, 0.01181, −0.01181, 0.01181, 0.01181, 0.01181, −0.0118, −0.0118, 0.0118, 0.0118, 0.0118, 0.01179, 0.01179, −0.01178, 0.01178, −0.01178, 0.01178, 0.01178, −0.01177, −0.01177, 0.01177, 0.01177, 0.01176, −0.01176, 0.01176, −0.01176, −0.01176, −0.01175, 0.01175, 0.01175, 0.01175, −0.01175, 0.01175, 0.01175, −0.01175, −0.01174, 0.01174, 0.01174, 0.01174, 0.01174, −0.01174, 0.01174, 0.01174, −0.01174, 0.01174, −0.01174, 0.01174, 0.01173, 0.01173, 0.01173, 0.01173, 0.01172, 0.01172, −0.01172, 0.01172, −0.01172, −0.01172, −0.01172, 0.01172, 0.01171, 0.01171, 0.01171, −0.01171, −0.01171, 0.01171, −0.01171, −0.0117, −0.0117, 0.0117, −0.0117, 0.0117, −0.0117, 0.0117, −0.01169, 0.01169, −0.01169, 0.01169, 0.01169, −0.01169, 0.01169, 0.01169, −0.01168, 0.01168, 0.01168, 0.01168, −0.01168, −0.01168, 0.01167, −0.01167, −0.01167, −0.01167, −0.01167, 0.01166, 0.01166, 0.01166, −0.01166, 0.01166, 0.01166, −0.01166, 0.01166, 0.01166, 0.01166, −0.01165, −0.01165, −0.01165, 0.01165, 0.01165, −0.01165, −0.01164, 0.01164, 0.01164, 0.01164, −0.01164, −0.01164, −0.01164, 0.01164, 0.01164, −0.01163, −0.01163, −0.01163, 0.01163, −0.01163, 0.01162, 0.01162, −0.01162, −0.01162, 0.01162, 0.01162, 0.01161, 0.01161, −0.01161, −0.01161, −0.01161, 0.01161, −0.01161, −0.01161, −0.0116, 0.0116, 0.0116, −0.0116, 0.0116, −0.0116, 0.0116, −0.0116, −0.0116, 0.0116, 0.0116, −0.0116, 0.01159, 0.01159, −0.01159, 0.01159, −0.01159, −0.01159, −0.01159, 0.01159, −0.01159, −0.01159, −0.01159, −0.01159, 0.01159, 0.01158, 0.01158, 0.01158, −0.01158, 0.01158, 0.01158, 0.01158, −0.01158, −0.01157, −0.01157, −0.01157, 0.01157, −0.01157, −0.01157, 0.01157, −0.01156, −0.01156, −0.01156, −0.01156, −0.01156, 0.01156, 0.01155, −0.01155, 0.01155, 0.01155, −0.01155, −0.01154, 0.01154, −0.01154, −0.01154, 0.01153, 0.01153, −0.01153, 0.01153, 0.01153, −0.01153, 0.01152, −0.01152, 0.01152, 0.01152, 0.01152, −0.01152, 0.01152, −0.01152, −0.01151, −0.01151, 0.01151, 0.01151, −0.01151, −0.01151, 0.0115, −0.0115, −0.0115, 0.0115, 0.0115, −0.01149, −0.01149, 0.01149, 0.01149, 0.01149, −0.01149, −0.01148, −0.01148, −0.01148, 0.01148, −0.01148, 0.01148, 0.01148, −0.01148, −0.01148, −0.01148, −0.01148, −0.01148, −0.01148, −0.01147, 0.01147, −0.01147, 0.01147, −0.01147, −0.01147, 0.01147, 0.01147, −0.01146, −0.01146, −0.01146, −0.01146, 0.01146, 0.01146, −0.01146, −0.01145, 0.01145, −0.01145, −0.01145, −0.01145, −0.01145, 0.01144, −0.01144, −0.01144, 0.01144, 0.01144, −0.01144, 0.01144, 0.01144, 0.01143, −0.01143, 0.01143, −0.01143, 0.01142, 0.01142, 0.01142, 0.01142, −0.01142, −0.01142, −0.01142, −0.01142, −0.01142, −0.01142, 0.01142, −0.01141, 0.01141, −0.0114, 0.0114, −0.0114, −0.0114, −0.0114, 0.0114, 0.0114, −0.0114, −0.0114, 0.01139, −0.01139, −0.01139, 0.01139, 0.01139, 0.01139, 0.01139, 0.01139, 0.01139, −0.01138, 0.01138, 0.01138, −0.01138, 0.01138, 0.01138, 0.01138, 0.01137, 0.01137, 0.01137, 0.01137, 0.01137, 0.01136, −0.01136, 0.01136, 0.01136, −0.01136, −0.01136, 0.01136, 0.01136, 0.01136, 0.01135, 0.01135, 0.01135, 0.01135, 0.01135, 0.01134, −0.01134, −0.01134, 0.01134, 0.01134, −0.01134, −0.01134, 0.01134, 0.01134, −0.01133, 0.01133, 0.01133, −0.01133, 0.01133, 0.01133, 0.01133, −0.01132, 0.01132, −0.01132, 0.01132, −0.01132, 0.01132, 0.01132, −0.01132, 0.01132, 0.01132, −0.01132, 0.01131, 0.01131, −0.01131, 0.01131, −0.01131, −0.01131, −0.01131, −0.01131, −0.01131, −0.01131, −0.01131, 0.01131, 0.0113, −0.0113, −0.0113, −0.0113, −0.0113, −0.0113, −0.0113, 0.0113, 0.0113, 0.0113, 0.0113, −0.0113, −0.0113, 0.0113, −0.01129, −0.01129, 0.01129, 0.01129, −0.01129, −0.01129, 0.01129, 0.01129, −0.01129, 0.01129, −0.01128, −0.01128, −0.01128, 0.01128, 0.01127, 0.01127, 0.01127, −0.01127, −0.01127, 0.01127, 0.01127, −0.01127, −0.01126, 0.01126, 0.01126, −0.01126, 0.01126, 0.01126, −0.01126, −0.01126, 0.01126, 0.01126, 0.01125, −0.01125, −0.01125, 0.01125, −0.01125, −0.01125, 0.01125, 0.01124, 0.01124, −0.01124, 0.01124, 0.01124, 0.01124, −0.01124, 0.01124, 0.01123, −0.01123, 0.01123, 0.01123, 0.01123, −0.01123, 0.01122, −0.01122, −0.01122, −0.01122, 0.01122, −0.01122, 0.01121, 0.01121, −0.01121, −0.01121, −0.0112, 0.0112, −0.0112, −0.0112, 0.0112, 0.0112, 0.0112, 0.01119, 0.01119, 0.01119, 0.01119, −0.01119, 0.01119, 0.01119, −0.01119, −0.01119, 0.01119, 0.01119, 0.01118, −0.01118, −0.01118, −0.01118, −0.01118, 0.01117, −0.01117, −0.01117, −0.01117, −0.01117, −0.01116, −0.01116, −0.01116, −0.01116, −0.01116, −0.01116, 0.01115, −0.01115, −0.01115, −0.01115, −0.01115, −0.01115, −0.01114, 0.01114, −0.01113, −0.01113, 0.01113, −0.01113, −0.01113, 0.01113, −0.01113, −0.01113, −0.01113, −0.01113, 0.01113, 0.01112, −0.01112, −0.01112, 0.01112, 0.01111, −0.01111, −0.01111, 0.01111, 0.01111, −0.01111, 0.01111, 0.01111, −0.01111, 0.0111, −0.0111, −0.0111, 0.0111, −0.0111, 0.0111, 0.0111, −0.0111, 0.01109, 0.01109, −0.01109, 0.01108, 0.01108, −0.01108, 0.01108, −0.01108, 0.01108, 0.01107, −0.01107, −0.01107, 0.01107, 0.01107, 0.01107, 0.01106, −0.01106, 0.01106, 0.01106, −0.01106, −0.01106, 0.01106, 0.01106, 0.01105, 0.01105, −0.01105, −0.01105, −0.01104, 0.01104, 0.01104, 0.01104, 0.01104, −0.01104, 0.01103, −0.01103, 0.01103, 0.01103, 0.01103, 0.01103, 0.01103, 0.01103, −0.01103, 0.01102, −0.01102, −0.01102, 0.01102, 0.01102, 0.01102, −0.01102, 0.01101, −0.01101, 0.01101, −0.01101, −0.01101, 0.01101, 0.01101, 0.01101, −0.01101, −0.011, −0.011, 0.011, −0.011, 0.011, 0.011, −0.011, 0.011, −0.011, −0.01099, −0.01099, 0.01098, −0.01098, 0.01098, 0.01098, 0.01098, −0.01098, −0.01098, 0.01097, 0.01097, −0.01097, 0.01097, −0.01097, 0.01097, 0.01097, −0.01097, 0.01097, 0.01097, −0.01097, −0.01097, 0.01096, −0.01096, −0.01095, 0.01095, −0.01095, 0.01095, 0.01095, −0.01095, −0.01094, −0.01094, 0.01094, −0.01093, 0.01092, −0.01092, −0.01092, −0.01092, −0.01092, 0.01091, −0.01091, 0.01091, −0.01091, −0.01091, −0.01091, 0.0109, −0.0109, 0.0109, 0.0109, −0.0109, −0.0109, 0.01089, −0.01089, −0.01089, −0.01089, 0.01089, −0.01088, −0.01088, −0.01088, −0.01088, −0.01088, −0.01088, −0.01088, −0.01088, −0.01087, −0.01087, −0.01087, 0.01087, −0.01087, 0.01086, −0.01086, −0.01086, −0.01086, −0.01086, 0.01086, 0.01086, 0.01086, −0.01086, −0.01086, 0.01085, −0.01085, −0.01085, −0.01085, −0.01085, 0.01085, 0.01084, 0.01084, −0.01084, 0.01084, 0.01084, −0.01084, 0.01084, 0.01084, 0.01084, −0.01084, 0.01084, 0.01084, −0.01083, −0.01083, −0.01083, 0.01083, −0.01083, 0.01083, 0.01082, 0.01082, −0.01082, −0.01082, 0.01082, 0.01082, −0.01081, 0.01081, −0.01081, 0.01081, 0.01081, 0.01081, −0.01081, −0.0108, 0.0108, 0.0108, 0.0108, −0.0108, −0.0108, −0.0108, 0.0108, 0.0108, −0.0108, −0.0108, 0.0108, 0.01079, 0.01079, 0.01079, −0.01079, 0.01079, −0.01079, 0.01079, 0.01078, 0.01078, 0.01078, 0.01078, −0.01078, 0.01078, −0.01078, −0.01078, −0.01078, 0.01078, −0.01077, −0.01077, −0.01077, 0.01077, −0.01077, −0.01077, 0.01077, 0.01076, −0.01076, 0.01076, −0.01076, 0.01076, 0.01075, −0.01075, 0.01075, 0.01075, −0.01075, −0.01075, 0.01075, 0.01075, −0.01075, 0.01075, −0.01074, 0.01074, −0.01074, 0.01074, 0.01074, −0.01074, 0.01074, −0.01073, 0.01073, 0.01073, −0.01073, −0.01073, −0.01073, 0.01073, −0.01073, −0.01072, 0.01072, 0.01072, 0.01072, 0.01072, 0.01072, 0.01071, −0.01071, 0.01071, 0.01071, 0.01071, 0.0107, 0.0107, 0.0107, 0.0107, 0.0107, 0.01069, −0.01069, −0.01069, −0.01069, 0.01069, 0.01069, −0.01069, −0.01069, 0.01068, 0.01068, −0.01068, −0.01068, 0.01068, 0.01068, 0.01068, −0.01068, 0.01068, 0.01068, −0.01067, −0.01067, 0.01067, −0.01067, 0.01067, −0.01067, −0.01067, 0.01067, 0.01067, 0.01067, −0.01067, −0.01067, 0.01066, −0.01066, 0.01066, 0.01066, 0.01066, 0.01066, 0.01066, −0.01066, −0.01066, −0.01066, −0.01066, 0.01066, −0.01066, 0.01066, −0.01066, −0.01065, −0.01065, −0.01065, −0.01065, −0.01065, −0.01064, −0.01064, 0.01064, −0.01064, 0.01064, −0.01064, 0.01063, −0.01063, 0.01063, 0.01063, 0.01063, 0.01063, 0.01063, −0.01063, 0.01063, −0.01063, −0.01062, −0.01062, 0.01062, 0.01062, 0.01062, 0.01062, 0.01062, 0.01062, 0.01062, −0.01062, 0.01062, −0.01062, −0.01062, 0.01061, −0.01061, 0.01061, −0.01061, −0.01061, −0.01061, 0.0106, −0.0106, 0.0106, 0.0106, 0.01059, 0.01059, 0.01059, −0.01059, 0.01059, 0.01059, −0.01059, −0.01059, −0.01059, −0.01059, −0.01059, 0.01058, −0.01058, −0.01058, −0.01058, −0.01058, 0.01058, 0.01058, −0.01058, 0.01057, 0.01057, 0.01057, 0.01057, 0.01057, 0.01057, 0.01057, −0.01057, 0.01056, −0.01056, 0.01056, −0.01056, −0.01056, 0.01055, 0.01055, 0.01055, 0.01055, −0.01055, −0.01055, −0.01055, −0.01055, 0.01055, −0.01054, 0.01054, 0.01054, 0.01054, −0.01054, −0.01054, −0.01054, 0.01053, −0.01053, −0.01053, −0.01052, −0.01052, −0.01052, −0.01052, 0.01052, 0.01052, 0.01052, −0.01051, 0.01051, 0.01051, −0.01051, −0.01051, −0.01051, 0.01051, 0.0105, 0.0105, −0.0105, −0.0105, −0.0105, −0.0105, −0.0105, 0.01049, 0.01049, 0.01049, 0.01049, 0.01049, 0.01049, 0.01049, 0.01049, −0.01049, −0.01049, −0.01049, −0.01048, 0.01048, 0.01048, 0.01048, −0.01048, 0.01048, −0.01048, 0.01048, 0.01048, 0.01048, −0.01048, −0.01048, −0.01048, 0.01048, 0.01047, −0.01047, 0.01047, −0.01047, −0.01047, −0.01047, 0.01047, 0.01046, 0.01046, 0.01046, −0.01046, −0.01046, 0.01046, 0.01046, −0.01046, 0.01046, 0.01045, 0.01045, −0.01045, 0.01045, 0.01045, 0.01045, −0.01045, −0.01044, 0.01044, −0.01044, 0.01044, 0.01044, −0.01044, −0.01044, 0.01044, 0.01043, 0.01043, 0.01043, −0.01043, 0.01042, −0.01042, 0.01042, 0.01042, 0.01041, 0.01041, 0.01041, 0.01041, 0.01041, −0.01041, 0.01041, 0.01041, −0.01041, 0.01041, 0.0104, −0.0104, 0.0104, 0.0104, 0.01039, −0.01039, −0.01039, 0.01039, 0.01039, 0.01039, −0.01039, 0.01038, −0.01038, −0.01038, −0.01038, 0.01038, 0.01038, 0.01038, 0.01037, 0.01037, 0.01037, −0.01037, −0.01037, 0.01037, 0.01037, 0.01037, 0.01037, −0.01037, −0.01037, 0.01037, 0.01037, −0.01037, 0.01037, −0.01036, −0.01036, 0.01036, 0.01036, −0.01036, −0.01036, 0.01036, −0.01035, 0.01035, 0.01035, 0.01035, 0.01035, −0.01034, −0.01034, 0.01034, 0.01034, −0.01034, 0.01034, −0.01034, 0.01033, −0.01033, −0.01033, −0.01033, −0.01033, 0.01033, −0.01033, −0.01033, 0.01033, −0.01033, −0.01033, 0.01033, −0.01033, 0.01033, 0.01032, 0.01032, 0.01032, 0.01032, 0.01032, −0.01032, −0.01032, −0.01032, 0.01032, −0.01031, 0.01031, −0.01031, −0.01031, −0.01031, 0.01031, 0.01031, −0.01031, 0.01031, −0.01031, 0.01031, 0.0103, −0.0103, −0.0103, −0.0103, 0.0103, 0.0103, −0.0103, −0.0103, 0.0103, −0.0103, 0.0103, 0.0103, −0.0103, −0.01029, −0.01029, −0.01029, 0.01029, 0.01029, −0.01029, −0.01029, 0.01029, −0.01029, −0.01029, 0.01029, −0.01028, 0.01028, 0.01028, 0.01028, 0.01028, 0.01028, 0.01028, −0.01028, −0.01028, −0.01028, 0.01028, −0.01027, −0.01027, 0.01027, 0.01027, −0.01027, −0.01027, −0.01026, 0.01026, 0.01026, −0.01026, −0.01026, −0.01026, 0.01026, −0.01026, −0.01026, 0.01026, −0.01026, 0.01025, −0.01025, 0.01025, −0.01025, 0.01025, 0.01025, −0.01025, −0.01025, −0.01025, −0.01024, 0.01024, −0.01024, 0.01024, 0.01024, −0.01023, 0.01023, −0.01023, −0.01023, −0.01023, −0.01023, −0.01023, 0.01023, −0.01023, 0.01022, −0.01022, 0.01022, 0.01022, −0.01022, −0.01021, −0.01021, −0.01021, −0.01021, −0.01021, 0.01021, −0.01021, −0.0102, 0.0102, 0.0102, 0.0102, −0.0102, −0.0102, −0.0102, 0.0102, −0.0102, 0.0102, −0.0102, −0.0102, −0.0102, 0.01019, −0.01019, 0.01019, 0.01019, −0.01019, −0.01019, −0.01019, 0.01019, −0.01018, 0.01018, 0.01018, 0.01018, 0.01018, −0.01018, 0.01018, −0.01018, −0.01018, 0.01017, 0.01017, 0.01017, 0.01017, −0.01016, −0.01016, −0.01016, −0.01016, 0.01016, 0.01016, 0.01016, −0.01016, −0.01016, 0.01016, 0.01016, 0.01016, −0.01015, 0.01015, 0.01015, −0.01015, 0.01014, 0.01014, 0.01014, −0.01014, 0.01014, 0.01014, −0.01014, −0.01014, −0.01014, 0.01014, −0.01014, −0.01013, 0.01013, −0.01013, 0.01013, −0.01013, −0.01013, 0.01013, −0.01012, 0.01012, 0.01012, 0.01012, 0.01012, 0.01012, −0.01012, 0.01012, 0.01012, −0.01011, 0.01011, −0.01011, 0.01011, −0.01011, −0.01011, 0.01011, 0.01011, 0.01011, 0.0101, 0.0101, 0.0101, −0.0101, −0.0101, −0.0101, −0.0101, −0.01009, 0.01009, 0.01009, 0.01008, −0.01008, −0.01008, 0.01008, 0.01008, −0.01008, −0.01008, 0.01008, 0.01007, 0.01007, −0.01007, 0.01007, −0.01007, 0.01007, 0.01007, 0.01007, −0.01006, −0.01006, −0.01006, 0.01006, −0.01006, 0.01006, −0.01006, −0.01006, 0.01005, −0.01005, −0.01005, 0.01005, 0.01005, 0.01005, 0.01005, 0.01004, 0.01004, 0.01004, 0.01004, −0.01004, −0.01004, 0.01004, 0.01004, −0.01003, 0.01003, 0.01003, 0.01003, 0.01003, 0.01003, 0.01003, −0.01002, −0.01002, 0.01002, −0.01002, −0.01002, −0.01002, 0.01001, 0.01001, 0.01001, −0.01001, 0.01001, 0.01001, 0.01001, −0.01001, −0.01, 0.01, 0.01, 0.01, −0.01, −0.01, 0.01, −0.01, 0.01, −0.00999, 0.00999, −0.00999, 0.00999, −0.00999, 0.00999, 0.00999, −0.00999, 0.00999, 0.00999, −0.00998, 0.00998, −0.00998, −0.00998, 0.00998, −0.00998, 0.00998, −0.00998, 0.00998, 0.00998, 0.00997, −0.00997, 0.00997, 0.00997, 0.00997, −0.00997, −0.00997, 0.00997, 0.00997, −0.00997, −0.00997, 0.00996, 0.00996, −0.00996, 0.00996, 0.00996, −0.00996, 0.00996, −0.00996, −0.00996, 0.00996, −0.00996, −0.00996, 0.00995, 0.00995, −0.00995, 0.00995, −0.00995, −0.00995, −0.00995, 0.00995, 0.00995, 0.00995, −0.00995, −0.00995, 0.00995, 0.00995, 0.00994, −0.00994, 0.00994, 0.00994, −0.00994, −0.00994, 0.00993, −0.00993, 0.00993, 0.00993, −0.00992, 0.00992, 0.00992, 0.00992, 0.00992, −0.00992, 0.00992, −0.00991, 0.00991, −0.00991, 0.00991, −0.00991, −0.00991, −0.00991, −0.00991, 0.0099, −0.0099, 0.0099, 0.0099, −0.0099, −0.0099, −0.0099, −0.0099, −0.00989, 0.00989, 0.00989, 0.00989, −0.00989, 0.00989, 0.00989, −0.00989, 0.00989, −0.00989, −0.00989, 0.00988, −0.00988, −0.00988, −0.00988, 0.00988, 0.00988, −0.00988, 0.00988, −0.00987, −0.00987, 0.00987, 0.00987, −0.00987, 0.00987, −0.00987, 0.00987, 0.00987, 0.00987, 0.00987, 0.00987, 0.00987, 0.00986, −0.00986, −0.00986, 0.00985, 0.00985, 0.00985, 0.00985, −0.00985, −0.00985, −0.00984, 0.00984, −0.00984, −0.00984, −0.00984, 0.00984, 0.00983, −0.00983, 0.00983, 0.00983, −0.00983, 0.00982, 0.00982, −0.00982, −0.00982, 0.00982, 0.00981, −0.00981, 0.00981, 0.00981, −0.00981, 0.00981, −0.00981, −0.0098, −0.0098, 0.0098, −0.0098, 0.0098, 0.0098, 0.0098, −0.0098, 0.00979, −0.00979, −0.00979, −0.00979, 0.00979, 0.00979, 0.00979, 0.00978, −0.00978, 0.00978, −0.00978, 0.00978, −0.00978, −0.00978, −0.00977, 0.00977, 0.00977, 0.00977, 0.00977, −0.00977, 0.00977, −0.00977, −0.00976, −0.00976, −0.00976, −0.00976, 0.00976, 0.00976, 0.00976, 0.00976, 0.00976, 0.00976, −0.00975, −0.00975, 0.00975, −0.00975, 0.00975, −0.00975, 0.00975, −0.00975, −0.00975, 0.00975, −0.00974, −0.00974, −0.00974, −0.00974, −0.00974, 0.00974, −0.00974, 0.00974, 0.00974, 0.00973, −0.00973, 0.00973, 0.00973, 0.00973, 0.00973, −0.00973, 0.00973, −0.00973, −0.00973, 0.00973, 0.00972, 0.00972, −0.00972, 0.00972, −0.00972, −0.00972, 0.00972, −0.00972, −0.00972, 0.00972, 0.00972, 0.00972, −0.00972, −0.00972, −0.00971, 0.00971, 0.00971, 0.00971, 0.00971, 0.00971, −0.0097, 0.0097, 0.0097, 0.00969, −0.00969, 0.00969, 0.00969, −0.00969, −0.00969, −0.00969, −0.00969, −0.00969, 0.00969, 0.00969, 0.00968, −0.00968, −0.00968, −0.00968, −0.00968, 0.00967, −0.00967, 0.00967, −0.00967, 0.00967, 0.00967, −0.00967, 0.00967, 0.00966, −0.00966, 0.00966, 0.00966, −0.00966, 0.00966, −0.00966, 0.00966, −0.00966, 0.00966, 0.00965, −0.00965, 0.00965, 0.00965, −0.00965, 0.00965, 0.00965, −0.00965, 0.00964, −0.00964, 0.00964, 0.00964, 0.00964, −0.00964, −0.00964, 0.00964, 0.00964, 0.00964, −0.00963, 0.00963, 0.00963, 0.00963, −0.00963, −0.00963, 0.00962, −0.00962, 0.00962, 0.00962, −0.00961, 0.00961, −0.00961, 0.00961, 0.00961, −0.00961, −0.00961, −0.00961, 0.0096, −0.0096, −0.0096, 0.0096, 0.0096, 0.00959, 0.00959, 0.00959, −0.00959, 0.00959, 0.00959, 0.00959, 0.00959, 0.00959, 0.00959, 0.00959, −0.00959, −0.00959, −0.00958, −0.00958, 0.00958, 0.00958, −0.00958, −0.00958, 0.00958, −0.00958, −0.00958, −0.00958, −0.00958, 0.00958, 0.00958, −0.00957, 0.00957, 0.00957, −0.00957, −0.00957, −0.00956, 0.00956, −0.00956, −0.00956, 0.00956, 0.00956, −0.00955, −0.00955, −0.00955, 0.00955, −0.00955, 0.00955, 0.00955, −0.00955, 0.00955, −0.00955, 0.00954, −0.00954, 0.00954, 0.00954, 0.00954, −0.00954, 0.00954, 0.00954, −0.00954, 0.00953, −0.00953, 0.00953, 0.00953, 0.00953, −0.00953, 0.00953, −0.00953, −0.00953, −0.00953, 0.00953, −0.00953, −0.00953, −0.00953, 0.00953, 0.00953, 0.00952, 0.00952, 0.00952, 0.00951, 0.00951, −0.00951, −0.00951, −0.00951, 0.00951, 0.00951, −0.0095, −0.0095, 0.0095, 0.0095, −0.0095, 0.0095, 0.0095, −0.0095, −0.00949, −0.00949, −0.00949, 0.00949, −0.00949, 0.00949, −0.00949, −0.00948, 0.00948, −0.00948, −0.00948, −0.00948, 0.00948, 0.00948, 0.00947, −0.00947, −0.00947, −0.00947, −0.00947, −0.00947, 0.00947, 0.00947, −0.00947, −0.00947, −0.00946, −0.00946, 0.00946, 0.00946, 0.00946, 0.00946, 0.00946, −0.00946, 0.00946, −0.00946, 0.00946, 0.00946, 0.00946, 0.00945, 0.00945, 0.00945, −0.00945, 0.00945, −0.00945, −0.00945, −0.00945, 0.00945, −0.00945, −0.00945, −0.00944, 0.00944, −0.00944, 0.00944, 0.00944, −0.00944, 0.00944, 0.00944, 0.00944, 0.00944, 0.00944, −0.00943, 0.00943, 0.00943, −0.00943, 0.00943, −0.00943, −0.00943, 0.00943, 0.00943, 0.00943, −0.00943, −0.00942, 0.00942, 0.00942, −0.00942, 0.00941, 0.00941, 0.00941, −0.00941, −0.00941, 0.0094, 0.0094, 0.0094, −0.0094, −0.0094, −0.0094, −0.0094, −0.00939, −0.00939, 0.00939, 0.00939, 0.00939, 0.00939, −0.00938, 0.00938, 0.00938, −0.00938, −0.00938, −0.00938, 0.00938, −0.00938, 0.00938, −0.00938, 0.00937, 0.00937, −0.00937, −0.00937, 0.00937, 0.00937, −0.00937, −0.00937, 0.00936, −0.00936, 0.00936, 0.00935, 0.00935, −0.00935, 0.00935, 0.00935, −0.00935, 0.00935, 0.00935, 0.00934, −0.00934, −0.00934, 0.00934, 0.00934, −0.00934, 0.00934, −0.00933, −0.00933, −0.00933, 0.00933, −0.00933, 0.00933, 0.00933, 0.00933, 0.00933, 0.00932, 0.00932, 0.00932, −0.00932, 0.00932, −0.00932, 0.00932, 0.00932, −0.00931, −0.00931, 0.00931, 0.00931, −0.00931, 0.0093, 0.0093, 0.0093, −0.0093, −0.0093, −0.0093, −0.0093, −0.0093, −0.0093, 0.0093, 0.0093, 0.0093, 0.00929, −0.00929, 0.00929, 0.00929, 0.00929, 0.00929, 0.00929, −0.00928, −0.00928, 0.00928, −0.00928, −0.00928, 0.00928, −0.00927, 0.00927, 0.00927, 0.00927, 0.00927, −0.00927, −0.00927, −0.00926, 0.00926, 0.00926, 0.00925, −0.00925, −0.00925, −0.00925, 0.00925, 0.00925, −0.00924, 0.00924, −0.00924, −0.00924, 0.00924, −0.00924, −0.00924, −0.00924, −0.00924, 0.00924, 0.00924, 0.00924, 0.00924, 0.00923, −0.00923, −0.00923, 0.00923, −0.00923, −0.00923, 0.00923, −0.00923, 0.00922, 0.00922, 0.00922, 0.00922, 0.00922, 0.00922, −0.00921, 0.00921, 0.00921, −0.00921, −0.00921, 0.00921, −0.00921, 0.00921, −0.00921, −0.00921, 0.0092, 0.0092, 0.0092, 0.0092, −0.0092, 0.0092, 0.00919, 0.00919, 0.00919, −0.00919, 0.00919, −0.00919, −0.00919, 0.00919, 0.00919, 0.00919, 0.00918, 0.00918, −0.00918, −0.00918, 0.00918, 0.00918, −0.00918, −0.00918, −0.00917, −0.00917, −0.00917, 0.00917, −0.00917, 0.00917, 0.00917, 0.00917, 0.00917, 0.00917, 0.00917, 0.00917, −0.00917, −0.00916, 0.00916, 0.00916, −0.00916, −0.00916, −0.00916, −0.00916, 0.00916, 0.00916, −0.00915, 0.00915, −0.00915, 0.00915, 0.00915, 0.00915, −0.00915, −0.00915, −0.00914, 0.00914, 0.00914, −0.00914, −0.00914, 0.00914, 0.00914, 0.00913, 0.00913, 0.00913, 0.00913, 0.00913, −0.00913, −0.00913, −0.00913, −0.00912, 0.00912, −0.00912, 0.00912, 0.00912, −0.00912, −0.00912, 0.00911, −0.00911, −0.00911, 0.0091, −0.0091, −0.0091, 0.0091, −0.0091, 0.0091, 0.00909, 0.00909, 0.00909, −0.00909, −0.00909, −0.00908, −0.00908, 0.00908, −0.00908, −0.00908, −0.00908, −0.00907, −0.00907, −0.00907, −0.00907, 0.00907, −0.00907, −0.00907, 0.00907, 0.00906, 0.00906, 0.00906, 0.00906, 0.00906, −0.00906, 0.00906, 0.00906, 0.00906, 0.00906, −0.00906, 0.00906, −0.00906, 0.00906, 0.00906, −0.00906, −0.00905, 0.00905, 0.00905, 0.00905, 0.00905, −0.00905, −0.00905, −0.00905, 0.00905, 0.00904, 0.00904, −0.00904, 0.00904, 0.00904, 0.00904, −0.00904, 0.00904, 0.00904, 0.00903, −0.00903, 0.00903, 0.00903, −0.00903, 0.00903, 0.00903, −0.00903, 0.00903, 0.00903, 0.00903, −0.00902, 0.00902, 0.00902, −0.00902, 0.00902, −0.00902, −0.00902, −0.00902, −0.00902, −0.00902, 0.00901, 0.00901, 0.00901, −0.00901, −0.00901, 0.00901, 0.00901, 0.00901, 0.00901, −0.00901, −0.00901, 0.00901, 0.00901, −0.009, 0.009, −0.009, 0.009, −0.009, 0.009, −0.009, 0.009, 0.00899, 0.00899, −0.00899, −0.00899, 0.00899, −0.00899, −0.00899, −0.00898, 0.00898, 0.00898, −0.00898, 0.00898, 0.00897, −0.00897, 0.00897, −0.00897, −0.00897, −0.00897, −0.00897, 0.00897, −0.00896, 0.00896, 0.00896, −0.00896, 0.00895, −0.00895, 0.00895, −0.00895, −0.00895, −0.00895, −0.00895, −0.00895, −0.00895, 0.00895, 0.00895, 0.00895, 0.00895, 0.00895, −0.00894, −0.00894, 0.00894, 0.00894, −0.00894, 0.00894, 0.00894, −0.00894, −0.00894, −0.00893, 0.00893, 0.00893, −0.00893, −0.00892, −0.00892, 0.00892, −0.00892, −0.00892, 0.00892, −0.00892, 0.00891, −0.00891, −0.00891, −0.00891, −0.00891, −0.00891, 0.00891, −0.00891, 0.00891, −0.00891, −0.0089, 0.0089, 0.0089, 0.0089, 0.0089, −0.0089, −0.0089, −0.0089, −0.0089, −0.0089, 0.00889, −0.00889, 0.00889, −0.00889, 0.00889, −0.00889, 0.00889, −0.00889, −0.00889, −0.00889, −0.00889, −0.00889, 0.00888, −0.00888, 0.00888, −0.00888, 0.00888, 0.00888, −0.00888, 0.00888, −0.00888, −0.00887, 0.00887, 0.00887, 0.00887, −0.00887, 0.00887, −0.00887, −0.00887, 0.00887, −0.00887, 0.00887, 0.00887, −0.00886, 0.00886, 0.00886, −0.00886, 0.00886, −0.00886, 0.00886, 0.00886, 0.00885, −0.00885, 0.00885, −0.00885, −0.00885, 0.00885, −0.00884, −0.00884, 0.00884, 0.00884, −0.00884, −0.00884, −0.00884, 0.00884, −0.00884, 0.00883, 0.00883, −0.00883, 0.00883, 0.00883, −0.00883, −0.00883, −0.00883, 0.00883, 0.00883, −0.00883, −0.00883, 0.00882, 0.00882, 0.00882, 0.00882, −0.00882, −0.00882, 0.00882, −0.00882, −0.00882, 0.00881, −0.00881, −0.00881, −0.00881, −0.00881, 0.00881, 0.00881, 0.00881, −0.0088, 0.0088, 0.0088, −0.0088, −0.0088, −0.0088, 0.0088, 0.0088, 0.00879, 0.00879, −0.00879, −0.00879, −0.00879, −0.00879, 0.00879, −0.00879, 0.00878, 0.00878, −0.00878, 0.00878, −0.00878, 0.00878, −0.00878, −0.00878, −0.00877, −0.00877, 0.00877, 0.00877, −0.00877, −0.00877, −0.00877, 0.00877, −0.00877, −0.00876, −0.00876, −0.00876, 0.00876, 0.00876, 0.00876, 0.00876, −0.00876, −0.00875, −0.00875, −0.00875, −0.00875, 0.00875, 0.00875, −0.00875, 0.00875, 0.00874, −0.00874, 0.00874, 0.00874, 0.00874, 0.00874, −0.00874, −0.00874, 0.00873, 0.00873, −0.00873, −0.00873, 0.00873, 0.00873, −0.00873, −0.00873, 0.00873, −0.00872, 0.00872, 0.00872, 0.00872, 0.00872, −0.00872, 0.00872, −0.00871, −0.00871, −0.00871, −0.00871, −0.0087, 0.0087, −0.0087, 0.0087, 0.0087, 0.0087, −0.0087, 0.0087, −0.0087, −0.0087, 0.00869, 0.00869, −0.00869, −0.00869, 0.00869, 0.00869, −0.00869, 0.00868, 0.00868, 0.00868, 0.00868, −0.00868, 0.00868, 0.00867, 0.00867, −0.00867, −0.00867, −0.00867, −0.00867, −0.00867, −0.00867, 0.00867, −0.00867, 0.00867, 0.00867, −0.00867, −0.00867, 0.00866, 0.00866, −0.00866, −0.00866, −0.00866, 0.00866, 0.00866, −0.00866, 0.00865, 0.00865, 0.00865, 0.00865, −0.00865, −0.00865, −0.00864, 0.00864, 0.00864, −0.00864, −0.00864, −0.00864, 0.00864, −0.00864, −0.00864, 0.00864, 0.00864, 0.00864, −0.00863, 0.00863, 0.00862, 0.00862, −0.00862, −0.00862, 0.00862, 0.00862, 0.00862, 0.00861, 0.00861, −0.00861, 0.00861, 0.00861, 0.00861, 0.00861, 0.00861, −0.00861, −0.00861, −0.0086, −0.0086, 0.0086, −0.0086, 0.0086, 0.0086, 0.0086, −0.0086, 0.0086, −0.0086, −0.00859, 0.00859, −0.00859, 0.00859, 0.00859, −0.00859, −0.00858, 0.00858, 0.00858, 0.00858, 0.00858, 0.00858, 0.00858, −0.00858, 0.00858, −0.00858, 0.00857, 0.00857, 0.00857, −0.00857, 0.00857, −0.00857, −0.00857, −0.00857, −0.00857, −0.00857, 0.00857, −0.00857, −0.00857, 0.00857, 0.00857, −0.00856, 0.00856, 0.00856, −0.00856, 0.00856, 0.00856, 0.00856, −0.00855, 0.00855, 0.00855, −0.00855, 0.00855, −0.00855, 0.00855, −0.00855, 0.00855, 0.00854, −0.00854, −0.00854, 0.00854, 0.00854, 0.00854, −0.00854, −0.00854, 0.00854, −0.00854, −0.00854, 0.00854, 0.00853, −0.00853, −0.00853, −0.00853, 0.00853, −0.00853, 0.00852, −0.00852, −0.00852, 0.00852, 0.00852, −0.00852, −0.00852, 0.00852, −0.00852, 0.00852, −0.00852, −0.00852, −0.00851, 0.00851, 0.00851, 0.00851, −0.00851, 0.00851, −0.00851, −0.00851, 0.00851, −0.0085, −0.0085, −0.0085, 0.0085, 0.0085, −0.0085, −0.0085, −0.0085, −0.00849, −0.00849, 0.00849, 0.00849, 0.00849, 0.00849, 0.00849, −0.00849, −0.00849, −0.00848, −0.00848, 0.00848, 0.00848, 0.00848, −0.00848, −0.00848, −0.00848, −0.00848, −0.00848, −0.00848, 0.00848, −0.00848, 0.00847, 0.00847, −0.00847, 0.00847, 0.00847, 0.00847, −0.00847, −0.00847, −0.00846, −0.00846, −0.00846, 0.00846, −0.00846, −0.00845, −0.00845, 0.00845, 0.00845, 0.00845, 0.00845, 0.00845, 0.00845, 0.00844, −0.00844, −0.00844, −0.00844, 0.00843, −0.00843, −0.00843, 0.00843, −0.00843, 0.00843, −0.00843, 0.00843, 0.00843, −0.00842, 0.00842, 0.00842, −0.00842, 0.00842, 0.00842, −0.00842, 0.00842, −0.00842, 0.00842, 0.00841, −0.00841, −0.00841, 0.00841, 0.00841, −0.00841, −0.00841, −0.0084, −0.0084, −0.0084, −0.0084, 0.0084, 0.00839, −0.00839, −0.00839, −0.00839, 0.00839, −0.00839, −0.00839, −0.00839, −0.00839, −0.00839, −0.00838, 0.00838, 0.00838, 0.00838, −0.00838, −0.00838, 0.00838, 0.00838, 0.00838, 0.00838, −0.00838, 0.00838, 0.00837, −0.00837, 0.00837, −0.00837, −0.00837, −0.00837, −0.00837, −0.00837, 0.00836, −0.00836, 0.00836, 0.00836, 0.00836, −0.00836, −0.00835, −0.00835, −0.00835, 0.00835, 0.00835, 0.00835, 0.00835, 0.00834, −0.00834, −0.00834, 0.00834, 0.00834, 0.00834, 0.00834, 0.00834, 0.00834, −0.00834, −0.00834, −0.00834, −0.00834, 0.00833, −0.00833, −0.00833, 0.00833, 0.00833, −0.00833, −0.00833, 0.00833, 0.00833, −0.00833, 0.00833, −0.00833, −0.00832, 0.00832, −0.00832, 0.00832, 0.00832, −0.00832, −0.00831, 0.00831, 0.00831, −0.0083, −0.0083, 0.0083, 0.0083, 0.0083, −0.00829, 0.00829, −0.00829, 0.00829, 0.00829, −0.00829, 0.00829, 0.00828, 0.00828, −0.00828, −0.00828, −0.00828, −0.00828, −0.00828, 0.00827, 0.00827, 0.00827, 0.00827, −0.00827, −0.00827, 0.00827, 0.00827, 0.00826, −0.00826, −0.00826, −0.00826, 0.00826, 0.00826, −0.00826, −0.00826, −0.00825, −0.00825, −0.00825, 0.00825, 0.00825, −0.00825, 0.00825, 0.00825, 0.00825, 0.00825, 0.00825, 0.00825, −0.00825, 0.00824, −0.00824, 0.00824, 0.00824, 0.00824, 0.00823, 0.00823, −0.00823, −0.00823, 0.00823, −0.00823, −0.00823, 0.00822, −0.00822, −0.00822, −0.00822, −0.00822, 0.00822, −0.00822, 0.00822, −0.00822, −0.00822, 0.00821, 0.00821, −0.00821, 0.00821, 0.00821, −0.00821, 0.00821, 0.00821, 0.00821, 0.00821, 0.00821, −0.00821, −0.00821, 0.0082, −0.0082, 0.0082, 0.0082, 0.0082, −0.0082, −0.0082, 0.0082, 0.00819, 0.00819, −0.00819, 0.00819, 0.00819, −0.00819, 0.00819, −0.00818, −0.00818, −0.00818, −0.00818, 0.00818, 0.00818, −0.00818, 0.00818, 0.00817, −0.00817, 0.00817, 0.00817, 0.00817, 0.00817, −0.00817, −0.00817, −0.00816, 0.00816, 0.00816, 0.00816, −0.00816, 0.00816, −0.00816, 0.00816, 0.00816, −0.00815, −0.00815, 0.00815, −0.00815, 0.00815, −0.00815, 0.00815, −0.00814, 0.00814, −0.00814, −0.00814, 0.00814, 0.00814, −0.00814, 0.00814, −0.00814, 0.00814, 0.00813, −0.00813, −0.00813, −0.00813, −0.00812, −0.00812, −0.00812, −0.00812, −0.00812, 0.00812, −0.00812, 0.00812, −0.00812, −0.00812, −0.00811, 0.00811, 0.00811, 0.00811, 0.00811, 0.00811, 0.00811, 0.00811, −0.00811, −0.00811, 0.0081, 0.0081, −0.0081, 0.0081, 0.0081, −0.00809, 0.00809, −0.00809, −0.00809, −0.00809, 0.00809, −0.00808, −0.00808, 0.00808, 0.00808, 0.00808, 0.00808, 0.00808, −0.00807, 0.00807, −0.00807, −0.00807, −0.00807, 0.00807, −0.00807, 0.00806, 0.00806, 0.00806, −0.00806, −0.00806, 0.00805, 0.00805, 0.00805, 0.00805, 0.00805, −0.00805, −0.00805, −0.00805, 0.00805, 0.00804, −0.00804, −0.00804, −0.00804, −0.00804, −0.00804, 0.00804, −0.00804, 0.00804, −0.00804, −0.00804, −0.00804, −0.00804, 0.00803, 0.00803, −0.00803, −0.00803, 0.00803, −0.00803, 0.00803, −0.00803, −0.00802, 0.00802, 0.00802, −0.00802, −0.00802, 0.00802, 0.00802, 0.00802, −0.00802, 0.00801, −0.00801, 0.00801, 0.00801, 0.008, −0.008, 0.008, 0.008, 0.008, 0.008, −0.008, −0.008, 0.008, −0.008, −0.008, −0.00799, 0.00799, 0.00799, −0.00799, −0.00799, 0.00799, −0.00799, 0.00799, 0.00799, −0.00798, 0.00798, 0.00798, 0.00798, 0.00798, −0.00797, −0.00797, −0.00797, −0.00797, −0.00797, −0.00797, 0.00797, −0.00797, 0.00797, 0.00797, −0.00797, −0.00796, 0.00796, 0.00796, 0.00796, 0.00796, 0.00796, −0.00795, 0.00795, −0.00795, −0.00795, −0.00795, −0.00795, 0.00795, 0.00794, 0.00794, −0.00794, −0.00794, −0.00794, 0.00794, −0.00794, 0.00793, −0.00793, −0.00793, 0.00793, −0.00793, 0.00793, 0.00793, −0.00793, 0.00793, −0.00793, 0.00793, 0.00793, −0.00792, 0.00792, 0.00792, 0.00792, −0.00792, 0.00792, −0.00792, −0.00792, −0.00791, 0.00791, 0.00791, −0.00791, −0.00791, 0.00791, 0.00791, 0.00791, 0.00791, −0.0079, 0.0079, −0.0079, −0.0079, −0.0079, 0.0079, 0.0079, 0.0079, −0.00789, 0.00789, 0.00789, −0.00789, 0.00789, −0.00789, −0.00789, −0.00788, 0.00788, 0.00788, 0.00788, 0.00788, −0.00788, 0.00787, 0.00787, −0.00787, 0.00787, −0.00787, −0.00787, 0.00787, 0.00787, −0.00786, −0.00786, −0.00786, −0.00786, 0.00786, 0.00786, 0.00786, 0.00786, 0.00785, −0.00785, −0.00785, −0.00785, 0.00785, −0.00785, −0.00784, −0.00784, −0.00784, −0.00784, −0.00784, 0.00784, −0.00784, 0.00784, −0.00784, −0.00784, −0.00784, −0.00784, 0.00783, 0.00783, −0.00783, 0.00783, −0.00783, 0.00783, 0.00783, −0.00783, 0.00783, 0.00783, 0.00783, −0.00782, −0.00782, −0.00782, 0.00782, −0.00782, −0.00782, −0.00782, 0.00782, 0.00781, 0.00781, −0.00781, 0.00781, 0.00781, 0.00781, 0.00781, 0.00781, −0.00781, 0.00781, −0.00781, −0.0078, −0.0078, 0.0078, −0.0078, −0.0078, −0.0078, −0.00779, 0.00779, 0.00779, 0.00779, −0.00779, 0.00779, 0.00779, −0.00779, −0.00779, −0.00779, 0.00779, −0.00778, −0.00778, 0.00778, 0.00778, 0.00778, 0.00777, −0.00777, −0.00777, 0.00777, −0.00777, −0.00777, −0.00777, 0.00777, −0.00776, 0.00776, 0.00776, −0.00776, −0.00776, −0.00776, −0.00775, 0.00775, 0.00775, 0.00775, 0.00775, −0.00775, 0.00774, 0.00774, −0.00774, 0.00774, −0.00774, −0.00774, −0.00774, −0.00774, −0.00774, 0.00774, 0.00774, 0.00774, 0.00774, −0.00774, −0.00774, −0.00774, 0.00773, −0.00773, −0.00773, −0.00773, −0.00772, −0.00772, −0.00772, 0.00772, 0.00772, 0.00772, 0.00772, 0.00772, −0.00772, −0.00771, −0.00771, 0.00771, −0.00771, −0.00771, −0.00771, 0.00771, −0.00771, −0.00771, −0.00771, −0.0077, 0.0077, 0.0077, −0.00769, −0.00769, 0.00769, −0.00769, −0.00769, −0.00769, 0.00769, −0.00769, 0.00768, 0.00768, −0.00768, −0.00768, 0.00768, 0.00768, −0.00768, 0.00768, 0.00768, 0.00768, −0.00768, 0.00768, −0.00768, 0.00767, −0.00767, 0.00767, 0.00767, −0.00767, 0.00767, 0.00767, 0.00767, −0.00767, −0.00766, −0.00766, −0.00766, 0.00766, −0.00766, 0.00766, 0.00766, 0.00766, 0.00766, −0.00765, 0.00765, 0.00765, −0.00765, −0.00765, −0.00765, 0.00765, 0.00765, −0.00764, −0.00764, −0.00764, 0.00764, −0.00764, 0.00764, −0.00764, −0.00763, 0.00763, −0.00763, −0.00763, 0.00763, 0.00763, 0.00763, −0.00763, 0.00763, 0.00763, −0.00763, −0.00763, −0.00762, 0.00762, 0.00762, 0.00762, −0.00762, 0.00762, −0.00762, −0.00762, −0.00762, 0.00762, −0.00762, −0.00762, 0.00762, 0.00762, −0.00762, 0.00761, −0.00761, 0.00761, −0.0076, −0.0076, −0.0076, 0.0076, 0.0076, 0.0076, 0.0076, −0.0076, −0.0076, −0.0076, 0.00759, −0.00759, 0.00759, 0.00759, 0.00759, 0.00759, 0.00759, 0.00759, 0.00759, 0.00758, −0.00758, −0.00758, −0.00758, −0.00758, −0.00758, −0.00758, −0.00758, −0.00758, 0.00758, 0.00758, −0.00758, 0.00758, 0.00758, 0.00758, −0.00758, 0.00757, −0.00757, −0.00757, −0.00757, 0.00757, −0.00757, 0.00757, 0.00757, 0.00757, 0.00757, 0.00756, 0.00756, −0.00756, 0.00756, −0.00756, 0.00756, −0.00756, 0.00756, −0.00756, −0.00756, −0.00756, 0.00755, 0.00755, 0.00755, −0.00755, 0.00755, 0.00755, −0.00755, −0.00755, 0.00755, 0.00755, −0.00755, 0.00755, 0.00754, −0.00754, 0.00754, −0.00754, −0.00754, 0.00754, −0.00754, −0.00754, 0.00754, −0.00754, 0.00754, 0.00754, 0.00754, 0.00753, 0.00753, −0.00753, −0.00753, 0.00752, −0.00752, −0.00752, 0.00752, 0.00752, −0.00752, −0.00752, 0.00751, 0.00751, 0.00751, 0.00751, −0.00751, 0.00751, −0.00751, 0.00751, −0.0075, 0.0075, 0.0075, −0.0075, −0.0075, 0.0075, 0.0075, −0.0075, 0.0075, −0.00749, 0.00749, −0.00749, 0.00749, −0.00749, −0.00749, 0.00749, −0.00749, 0.00748, 0.00748, 0.00748, −0.00748, 0.00748, 0.00747, 0.00747, 0.00747, 0.00747, 0.00747, −0.00747, 0.00747, 0.00747, 0.00747, −0.00747, 0.00746, 0.00746, −0.00746, 0.00746, −0.00746, −0.00746, 0.00745, −0.00745, 0.00745, 0.00745, −0.00745, 0.00745, −0.00745, −0.00745, −0.00745, −0.00745, −0.00745, −0.00745, 0.00745, 0.00745, −0.00745, 0.00745, 0.00745, 0.00745, 0.00745, 0.00744, −0.00744, −0.00744, 0.00744, 0.00744, −0.00744, 0.00744, 0.00744, 0.00744, −0.00744, −0.00744, 0.00744, 0.00744, 0.00743, −0.00743, 0.00743, 0.00743, 0.00743, 0.00743, 0.00743, 0.00743, −0.00743, −0.00743, 0.00743, 0.00742, −0.00742, 0.00742, −0.00742, 0.00742, −0.00742, −0.00742, −0.00742, 0.00742, 0.00742, 0.00742, 0.00742, −0.00741, −0.00741, 0.00741, 0.00741, −0.00741, −0.00741, −0.00741, −0.00741, 0.00741, 0.00741, −0.00741, 0.0074, −0.0074, −0.0074, −0.00739, −0.00739, 0.00739, −0.00739, 0.00739, −0.00739, 0.00739, 0.00739, −0.00738, −0.00738, −0.00738, 0.00738, 0.00738, −0.00738, −0.00738, −0.00738, −0.00738, −0.00738, −0.00737, −0.00737, −0.00737, −0.00737, −0.00737, −0.00737, −0.00737, 0.00737, 0.00737, 0.00736, −0.00736, 0.00736, 0.00736, 0.00736, 0.00736, 0.00736, 0.00736, −0.00736, −0.00736, −0.00735, 0.00735, 0.00735, −0.00735, 0.00735, 0.00735, 0.00735, −0.00735, −0.00735, −0.00735, 0.00735, −0.00735, −0.00734, −0.00734, −0.00734, −0.00734, 0.00734, 0.00734, −0.00734, −0.00734, 0.00734, 0.00734, −0.00734, −0.00734, 0.00734, −0.00734, −0.00734, −0.00734, −0.00733, −0.00733, 0.00733, −0.00733, 0.00733, 0.00733, 0.00733, 0.00733, −0.00733, −0.00733, 0.00733, 0.00733, 0.00732, 0.00732, −0.00732, 0.00732, −0.00732, −0.00732, 0.00732, −0.00732, −0.00732, −0.00732, 0.00731, −0.00731, 0.00731, 0.00731, 0.00731, 0.00731, −0.00731, −0.0073, 0.0073, 0.0073, −0.00729, −0.00729, −0.00729, −0.00729, 0.00729, 0.00728, 0.00728, −0.00728, 0.00728, 0.00728, −0.00728, 0.00728, 0.00728, −0.00727, 0.00727, −0.00727, 0.00727, 0.00727, 0.00727, −0.00727, −0.00727, 0.00726, 0.00726, 0.00726, −0.00726, 0.00726, 0.00726, −0.00726, 0.00726, −0.00725, 0.00725, 0.00725, −0.00725, 0.00725, −0.00725, 0.00725, −0.00725, −0.00725, 0.00724, 0.00724, −0.00724, 0.00724, −0.00724, 0.00724, 0.00724, 0.00724, −0.00723, −0.00723, 0.00723, 0.00723, 0.00723, 0.00723, 0.00723, −0.00723, −0.00723, −0.00723, 0.00723, −0.00722, 0.00722, 0.00722, 0.00722, −0.00722, −0.00722, 0.00721, −0.00721, −0.00721, 0.00721, 0.00721, −0.00721, 0.00721, −0.00721, −0.00721, −0.00721, −0.00721, 0.0072, 0.0072, −0.0072, 0.0072, −0.0072, −0.0072, 0.0072, 0.00719, 0.00719, −0.00719, 0.00719, −0.00718, −0.00718, 0.00718, 0.00718, −0.00718, 0.00718, 0.00718, −0.00718, 0.00718, 0.00718, 0.00718, −0.00717, −0.00717, 0.00717, 0.00717, −0.00717, 0.00716, 0.00716, 0.00716, −0.00716, 0.00716, −0.00716, −0.00716, −0.00716, 0.00716, 0.00716, −0.00716, 0.00716, −0.00715, −0.00715, 0.00715, 0.00715, −0.00715, 0.00715, −0.00715, 0.00715, −0.00715, −0.00715, −0.00715, 0.00715, −0.00714, 0.00714, −0.00714, −0.00714, 0.00714, −0.00714, −0.00714, 0.00713, 0.00713, 0.00713, 0.00713, 0.00713, −0.00712, −0.00712, −0.00712, −0.00712, −0.00712, 0.00712, −0.00712, 0.00712, 0.00711, −0.00711, 0.00711, −0.00711, −0.00711, −0.00711, −0.00711, −0.00711, 0.0071, −0.0071, −0.0071, 0.0071, 0.0071, 0.0071, −0.0071, −0.0071, −0.00709, 0.00709, 0.00709, 0.00709, −0.00709, −0.00709, 0.00709, 0.00709, −0.00709, 0.00708, −0.00708, −0.00708, −0.00708, 0.00708, 0.00708, −0.00708, −0.00708, 0.00708, −0.00708, 0.00708, −0.00708, −0.00708, 0.00707, 0.00707, 0.00707, 0.00707, 0.00707, 0.00707, 0.00707, −0.00707, −0.00706, −0.00706, 0.00706, 0.00706, 0.00706, −0.00706, 0.00706, 0.00706, 0.00705, −0.00705, −0.00705, 0.00705, 0.00705, −0.00705, 0.00705, −0.00705, −0.00705, 0.00704, 0.00704, 0.00704, 0.00704, −0.00704, 0.00704, 0.00703, 0.00703, 0.00703, −0.00703, −0.00703, 0.00703, 0.00703, 0.00703, −0.00703, −0.00703, 0.00703, 0.00703, 0.00703, 0.00703, 0.00703, −0.00703, −0.00703, 0.00703, 0.00702, −0.00702, −0.00702, −0.00702, −0.00702, −0.00702, −0.00701, 0.00701, −0.00701, −0.00701, 0.00701, 0.00701, −0.00701, −0.00701, 0.007, 0.007, −0.007, 0.007, 0.007, 0.007, −0.007, −0.007, 0.007, −0.007, 0.007, 0.00699, −0.00699, −0.00699, −0.00699, 0.00699, −0.00699, 0.00699, −0.00699, −0.00699, 0.00699, −0.00699, 0.00699, 0.00698, −0.00698, −0.00698, −0.00698, −0.00697, −0.00697, 0.00697, −0.00697, 0.00697, −0.00697, −0.00697, −0.00697, −0.00697, −0.00697, −0.00697, 0.00697, 0.00697, −0.00697, 0.00697, 0.00697, −0.00697, 0.00697, 0.00696, 0.00696, 0.00696, 0.00696, 0.00696, −0.00695, 0.00695, −0.00695, −0.00695, 0.00695, 0.00695, −0.00695, 0.00695, −0.00695, 0.00695, 0.00694, 0.00694, 0.00694, 0.00694, 0.00694, −0.00694, 0.00694, −0.00694, −0.00694, 0.00694, −0.00693, −0.00693, −0.00693, −0.00693, 0.00693, −0.00693, 0.00693, 0.00693, 0.00692, 0.00692, 0.00692, −0.00692, −0.00692, 0.00692, −0.00692, 0.00692, 0.00692, 0.00692, 0.00691, −0.00691, 0.00691, 0.00691, −0.00691, −0.00691, 0.00691, −0.00691, −0.00691, −0.00691, −0.00691, 0.00691, 0.00691, −0.00691, −0.00691, −0.0069, −0.0069, −0.0069, −0.0069, −0.0069, 0.0069, 0.0069, 0.00689, 0.00689, 0.00689, −0.00689, −0.00689, −0.00689, −0.00689, −0.00689, 0.00689, −0.00689, −0.00689, 0.00688, −0.00688, −0.00688, −0.00688, −0.00688, 0.00688, −0.00688, 0.00688, −0.00688, 0.00688, −0.00688, 0.00688, 0.00688, −0.00688, −0.00688, 0.00688, 0.00687, −0.00687, −0.00687, −0.00687, 0.00687, −0.00687, 0.00687, −0.00687, 0.00687, 0.00687, −0.00687, −0.00686, −0.00686, 0.00686, 0.00686, 0.00686, 0.00686, −0.00686, −0.00686, 0.00686, 0.00685, −0.00685, 0.00685, −0.00685, −0.00685, 0.00685, 0.00685, −0.00685, −0.00685, −0.00685, −0.00684, 0.00684, 0.00684, −0.00684, 0.00684, 0.00684, 0.00684, 0.00683, 0.00683, 0.00683, −0.00683, 0.00683, −0.00683, −0.00683, 0.00683, 0.00683, −0.00683, −0.00683, 0.00683, 0.00682, 0.00682, −0.00682, 0.00682, 0.00682, −0.00682, −0.00682, 0.00682, −0.00682, 0.00682, −0.00681, −0.00681, −0.00681, 0.00681, −0.00681, 0.00681, 0.00681, 0.00681, −0.00681, 0.0068, −0.0068, 0.0068, 0.0068, 0.00679, 0.00679, 0.00679, −0.00679, 0.00679, −0.00679, −0.00679, −0.00679, 0.00679, −0.00679, 0.00679, 0.00678, −0.00678, −0.00678, 0.00678, −0.00678, 0.00678, 0.00678, 0.00678, −0.00677, 0.00677, −0.00677, −0.00677, 0.00677, 0.00677, 0.00677, 0.00677, 0.00677, 0.00676, −0.00676, −0.00676, 0.00676, 0.00676, −0.00676, −0.00676, −0.00676, −0.00676, −0.00675, −0.00675, 0.00675, 0.00675, −0.00675, 0.00675, −0.00675, 0.00675, −0.00675, 0.00674, −0.00674, −0.00674, −0.00674, 0.00674, 0.00674, −0.00674, −0.00674, −0.00674, −0.00674, 0.00674, −0.00674, 0.00674, −0.00674, 0.00673, 0.00673, −0.00673, −0.00673, 0.00672, −0.00672, 0.00672, −0.00672, 0.00672, 0.00672, 0.00672, 0.00672, 0.00672, 0.00672, 0.00672, −0.00671, −0.00671, −0.00671, −0.00671, −0.00671, 0.00671, −0.0067, −0.0067, 0.0067, 0.0067, −0.0067, 0.0067, −0.0067, 0.0067, 0.00669, 0.00669, −0.00669, −0.00669, −0.00669, 0.00669, −0.00669, −0.00669, 0.00669, 0.00668, −0.00668, 0.00668, −0.00668, 0.00668, −0.00668, −0.00668, 0.00668, 0.00667, −0.00667, 0.00667, 0.00667, 0.00667, −0.00667, −0.00667, −0.00667, 0.00666, −0.00666, 0.00666, −0.00666, 0.00666, 0.00666, −0.00666, 0.00666, −0.00666, −0.00666, −0.00666, −0.00666, 0.00666, 0.00666, −0.00666, 0.00665, 0.00665, 0.00665, 0.00665, 0.00665, 0.00664, 0.00664, 0.00664, 0.00664, 0.00664, −0.00664, −0.00664, 0.00664, −0.00664, 0.00664, 0.00664, −0.00664, −0.00664, 0.00663, −0.00663, −0.00663, −0.00663, 0.00663, −0.00663, −0.00663, 0.00663, 0.00663, −0.00662, −0.00662, −0.00662, 0.00662, −0.00662, −0.00662, 0.00662, −0.00662, 0.00662, −0.00661, −0.00661, 0.00661, 0.00661, −0.00661, 0.00661, 0.00661, 0.00661, 0.00661, −0.00661, 0.00661, −0.00661, 0.0066, −0.0066, 0.0066, 0.0066, −0.0066, −0.00659, 0.00659, −0.00659, 0.00659, 0.00659, −0.00659, −0.00659, 0.00659, 0.00659, 0.00659, 0.00659, 0.00659, 0.00659, 0.00659, 0.00659, −0.00658, −0.00658, −0.00658, 0.00658, 0.00658, 0.00658, −0.00658, 0.00658, −0.00658, 0.00658, 0.00657, 0.00657, 0.00657, 0.00657, −0.00657, −0.00657, 0.00657, −0.00657, −0.00657, 0.00657, −0.00657, 0.00657, −0.00656, 0.00656, 0.00656, 0.00656, −0.00656, 0.00656, −0.00655, 0.00655, −0.00655, −0.00655, 0.00655, −0.00655, −0.00655, 0.00655, −0.00654, 0.00654, −0.00654, −0.00654, −0.00654, −0.00653, −0.00653, 0.00653, 0.00653, −0.00653, −0.00653, −0.00653, −0.00653, 0.00653, −0.00653, −0.00653, −0.00653, 0.00653, 0.00653, −0.00652, −0.00652, −0.00652, −0.00652, 0.00652, −0.00652, −0.00652, −0.00652, −0.00652, 0.00652, −0.00652, 0.00652, −0.00652, −0.00652, 0.00651, 0.00651, 0.00651, −0.00651, 0.00651, −0.00651, 0.00651, −0.0065, 0.0065, −0.0065, 0.0065, −0.0065, 0.0065, 0.0065, 0.0065, −0.00649, −0.00649, 0.00649, 0.00649, −0.00649, −0.00649, −0.00649, 0.00649, −0.00649, 0.00649, −0.00649, 0.00648, −0.00648, 0.00648, −0.00648, 0.00648, −0.00648, 0.00648, −0.00647, 0.00647, −0.00647, −0.00647, 0.00647, −0.00647, −0.00647, −0.00647, −0.00647, 0.00646, −0.00646, 0.00646, −0.00646, 0.00646, −0.00646, 0.00646, 0.00646, 0.00646, −0.00645, 0.00645, −0.00645, −0.00645, −0.00645, −0.00645, −0.00645, 0.00645, 0.00645, −0.00645, 0.00644, 0.00644, 0.00644, 0.00644, 0.00644, 0.00644, −0.00644, 0.00643, −0.00643, 0.00643, −0.00643, 0.00643, 0.00643, −0.00643, 0.00643, 0.00643, 0.00642, 0.00642, 0.00642, 0.00642, 0.00642, 0.00642, 0.00642, 0.00642, 0.00642, 0.00642, −0.00641, 0.00641, 0.00641, −0.00641, −0.00641, −0.00641, −0.00641, 0.00641, −0.00641, −0.00641, −0.00641, −0.00641, 0.00641, 0.0064, −0.0064, 0.0064, −0.0064, 0.0064, 0.0064, 0.0064, 0.00639, 0.00639, −0.00639, −0.00639, 0.00639, 0.00639, 0.00639, 0.00639, 0.00639, −0.00639, −0.00638, 0.00638, 0.00638, 0.00638, 0.00638, −0.00638, 0.00638, 0.00638, −0.00638, 0.00638, −0.00638, 0.00638, −0.00637, 0.00637, 0.00637, −0.00637, −0.00637, −0.00637, 0.00637, −0.00636, −0.00636, −0.00636, −0.00636, −0.00636, −0.00635, −0.00635, −0.00635, −0.00635, 0.00635, −0.00635, −0.00635, −0.00635, −0.00635, −0.00635, −0.00635, −0.00634, 0.00634, 0.00634, −0.00634, 0.00634, −0.00634, −0.00634, 0.00634, −0.00634, 0.00633, −0.00633, −0.00633, 0.00633, 0.00633, −0.00633, −0.00633, −0.00633, 0.00633, −0.00632, 0.00632, 0.00632, 0.00632, 0.00632, 0.00632, 0.00632, 0.00632, 0.00632, −0.00632, 0.00632, 0.00632, 0.00632, 0.00632, −0.00632, −0.00632, 0.00631, −0.00631, −0.00631, 0.00631, −0.0063, 0.0063, −0.0063, 0.0063, 0.0063, 0.0063, −0.00629, 0.00629, −0.00629, −0.00628, −0.00628, −0.00628, 0.00628, 0.00627, 0.00627, 0.00627, −0.00627, −0.00627, 0.00627, 0.00627, −0.00626, −0.00626, −0.00626, 0.00626, 0.00626, −0.00626, −0.00626, 0.00626, 0.00626, −0.00625, 0.00625, −0.00625, −0.00625, 0.00625, −0.00624, −0.00624, 0.00624, 0.00624, 0.00624, −0.00624, −0.00624, 0.00624, 0.00624, −0.00624, 0.00624, −0.00623, 0.00623, 0.00623, 0.00623, 0.00623, −0.00623, −0.00623, 0.00623, 0.00622, 0.00622, 0.00622, −0.00622, −0.00622, −0.00622, −0.00622, −0.00622, −0.00621, 0.00621, 0.00621, −0.00621, −0.00621, 0.00621, 0.00621, −0.00621, 0.0062, 0.0062, −0.0062, −0.0062, 0.0062, 0.0062, 0.0062, 0.0062, −0.0062, −0.0062, −0.00619, 0.00619, 0.00619, 0.00619, −0.00619, −0.00619, −0.00619, −0.00619, 0.00619, 0.00619, 0.00619, 0.00618, −0.00618, 0.00618, 0.00618, 0.00618, 0.00618, 0.00618, 0.00618, −0.00618, 0.00618, −0.00617, −0.00617, −0.00617, −0.00617, −0.00617, −0.00617, 0.00617, 0.00617, 0.00617, 0.00616, 0.00616, 0.00616, −0.00616, 0.00616, −0.00616, 0.00616, −0.00616, −0.00616, 0.00616, 0.00616, −0.00616, 0.00615, 0.00615, −0.00615, −0.00615, 0.00615, −0.00615, 0.00615, −0.00615, 0.00615, −0.00615, 0.00615, −0.00615, −0.00615, 0.00615, 0.00615, 0.00614, 0.00614, 0.00614, −0.00614, 0.00614, −0.00614, −0.00614, 0.00614, 0.00613, 0.00613, 0.00613, −0.00613, 0.00613, −0.00613, −0.00613, 0.00612, −0.00612, 0.00612, 0.00612, 0.00612, −0.00612, 0.00612, 0.00612, 0.00611, −0.00611, −0.00611, −0.00611, 0.00611, 0.00611, 0.00611, −0.00611, −0.00611, 0.0061, 0.0061, −0.0061, 0.0061, 0.0061, −0.0061, 0.0061, 0.0061, −0.0061, 0.0061, −0.0061, −0.0061, −0.00609, −0.00609, 0.00609, 0.00609, 0.00609, −0.00609, −0.00609, −0.00608, 0.00608, −0.00608, −0.00608, 0.00608, 0.00608, 0.00608, −0.00608, −0.00608, 0.00608, 0.00608, 0.00608, 0.00608, 0.00607, −0.00607, −0.00607, −0.00607, 0.00607, 0.00607, 0.00606, 0.00606, −0.00606, 0.00606, −0.00606, 0.00605, 0.00605, 0.00605, −0.00605, −0.00605, 0.00605, 0.00605, 0.00605, −0.00605, 0.00604, −0.00604, −0.00604, −0.00604, −0.00604, −0.00604, 0.00604, −0.00603, −0.00603, −0.00603, 0.00603, 0.00603, 0.00603, −0.00603, −0.00603, −0.00603, −0.00603, −0.00603, 0.00603, 0.00603, −0.00603, 0.00603, 0.00602, −0.00602, −0.00602, −0.00602, 0.00602, −0.00602, 0.00602, 0.00602, −0.00602, 0.00602, 0.00602, 0.00601, −0.00601, −0.00601, 0.00601, −0.00601, −0.00601, 0.00601, −0.006, −0.006, 0.006, −0.006, 0.006, 0.00599, −0.00599, 0.00599, −0.00599, 0.00599, −0.00599, −0.00599, 0.00599, 0.00598, 0.00598, 0.00598, 0.00598, 0.00598, −0.00598, 0.00598, 0.00598, 0.00598, −0.00598, 0.00598, −0.00598, 0.00598, −0.00597, 0.00597, −0.00597, 0.00597, 0.00597, −0.00597, 0.00597, 0.00597, −0.00597, −0.00597, 0.00597, 0.00597, −0.00597, 0.00597, 0.00597, 0.00597, −0.00597, −0.00597, −0.00597, 0.00596, −0.00596, −0.00596, −0.00596, 0.00596, −0.00596, 0.00596, 0.00596, 0.00595, −0.00595, 0.00595, −0.00595, 0.00595, 0.00595, −0.00594, 0.00594, −0.00594, −0.00594, −0.00594, 0.00593, 0.00593, −0.00593, −0.00593, −0.00593, −0.00593, −0.00593, −0.00593, 0.00593, −0.00593, 0.00593, 0.00593, 0.00592, 0.00592, 0.00592, 0.00592, −0.00592, −0.00592, −0.00592, −0.00592, −0.00592, 0.00592, 0.00592, −0.00591, 0.00591, 0.00591, 0.00591, −0.00591, −0.00591, −0.00591, −0.0059, −0.0059, −0.0059, 0.0059, −0.0059, 0.00589, 0.00589, −0.00589, 0.00589, −0.00589, −0.00589, 0.00589, 0.00589, −0.00589, 0.00589, 0.00588, −0.00588, −0.00588, 0.00588, −0.00588, −0.00588, −0.00588, 0.00587, −0.00587, 0.00587, 0.00587, −0.00587, 0.00587, 0.00587, −0.00587, −0.00587, −0.00587, 0.00586, −0.00586, 0.00586, −0.00586, 0.00586, 0.00586, 0.00586, 0.00586, −0.00586, 0.00586, 0.00586, 0.00586, 0.00586, −0.00586, 0.00586, −0.00586, −0.00586, −0.00585, −0.00585, −0.00585, 0.00585, −0.00585, −0.00585, 0.00585, −0.00585, −0.00585, 0.00585, 0.00584, 0.00584, −0.00584, 0.00584, 0.00584, 0.00584, 0.00584, 0.00583, −0.00583, 0.00583, 0.00583, 0.00583, 0.00583, −0.00583, 0.00583, −0.00583, 0.00583, 0.00583, −0.00582, 0.00582, 0.00582, 0.00582, −0.00582, −0.00582, −0.00582, −0.00581, 0.00581, 0.00581, 0.00581, −0.00581, 0.00581, 0.00581, 0.00581, −0.00581, 0.00581, −0.00581, 0.0058, −0.0058, 0.0058, 0.0058, 0.0058, 0.0058, 0.0058, 0.0058, 0.0058, 0.0058, 0.00579, −0.00579, 0.00579, −0.00579, 0.00579, −0.00579, −0.00579, 0.00579, −0.00579, −0.00579, 0.00578, 0.00578, −0.00578, −0.00578, 0.00578, −0.00578, −0.00577, −0.00577, 0.00577, −0.00577, −0.00577, 0.00577, 0.00577, 0.00577, −0.00577, 0.00576, 0.00576, −0.00576, 0.00576, 0.00576, 0.00576, 0.00576, 0.00576, 0.00575, 0.00575, 0.00575, 0.00575, −0.00575, 0.00575, −0.00575, −0.00575, −0.00575, −0.00574, −0.00574, 0.00574, −0.00574, 0.00574, 0.00574, −0.00574, −0.00574, −0.00574, 0.00574, −0.00574, 0.00574, −0.00574, −0.00574, −0.00574, −0.00573, −0.00573, 0.00573, 0.00573, 0.00573, −0.00573, 0.00573, −0.00573, 0.00573, 0.00573, −0.00573, 0.00572, 0.00572, −0.00572, 0.00572, 0.00572, 0.00572, 0.00572, −0.00572, −0.00572, −0.00572, 0.00572, −0.00572, −0.00571, −0.00571, −0.00571, 0.00571, −0.00571, 0.00571, 0.00571, 0.00571, 0.00571, −0.00571, 0.00571, 0.0057, 0.0057, −0.0057, −0.0057, −0.0057, 0.0057, 0.0057, 0.00569, −0.00569, 0.00569, 0.00569, 0.00569, −0.00569, −0.00569, 0.00568, −0.00568, 0.00568, 0.00568, −0.00568, 0.00568, −0.00568, −0.00568, −0.00568, −0.00568, 0.00567, −0.00567, −0.00567, 0.00567, 0.00567, 0.00567, −0.00567, 0.00567, 0.00567, −0.00567, −0.00567, −0.00567, −0.00566, 0.00566, −0.00566, 0.00566, −0.00566, −0.00566, −0.00566, 0.00566, −0.00566, 0.00566, 0.00566, −0.00565, −0.00565, 0.00565, −0.00565, 0.00565, 0.00565, −0.00565, 0.00565, 0.00564, 0.00564, −0.00564, −0.00564, −0.00564, 0.00564, −0.00564, −0.00564, −0.00563, −0.00563, −0.00563, −0.00563, 0.00563, −0.00563, 0.00562, 0.00562, −0.00562, 0.00562, −0.00562, 0.00562, 0.00562, 0.00562, 0.00562, −0.00562, 0.00562, 0.00561, 0.00561, 0.00561, −0.00561, 0.0056, 0.0056, 0.0056, 0.0056, 0.0056, −0.0056, −0.0056, 0.0056, 0.0056, −0.0056, 0.0056, 0.0056, 0.00559, 0.00559, 0.00559, −0.00559, −0.00559, 0.00559, −0.00559, −0.00559, −0.00559, 0.00559, −0.00559, −0.00558, 0.00558, 0.00558, −0.00558, 0.00558, 0.00558, −0.00558, −0.00558, −0.00558, −0.00558, −0.00558, −0.00557, 0.00557, −0.00557, 0.00557, −0.00557, 0.00557, 0.00556, −0.00556, −0.00556, −0.00556, 0.00556, 0.00556, −0.00556, −0.00555, −0.00555, 0.00555, −0.00555, −0.00555, 0.00555, 0.00555, −0.00555, −0.00555, 0.00555, 0.00554, −0.00554, −0.00554, 0.00554, −0.00554, −0.00554, 0.00554, 0.00554, 0.00553, −0.00553, 0.00553, 0.00553, −0.00553, −0.00553, 0.00553, 0.00553, 0.00552, 0.00552, 0.00552, 0.00552, −0.00552, 0.00552, 0.00552, 0.00552, −0.00551, −0.00551, −0.00551, 0.00551, −0.00551, −0.00551, −0.00551, −0.00551, −0.00551, −0.00551, 0.0055, 0.0055, −0.0055, 0.0055, −0.0055, 0.0055, 0.0055, 0.0055, 0.0055, 0.00549, 0.00549, −0.00549, −0.00549, 0.00549, 0.00549, −0.00549, −0.00549, 0.00549, −0.00549, 0.00549, 0.00549, 0.00549, 0.00549, −0.00549, 0.00549, −0.00549, −0.00548, −0.00548, −0.00548, 0.00548, −0.00548, 0.00548, −0.00548, −0.00548, 0.00548, −0.00547, 0.00547, −0.00547, 0.00547, −0.00547, −0.00547, 0.00546, 0.00546, −0.00546, −0.00546, −0.00546, 0.00546, 0.00546, 0.00546, 0.00546, −0.00546, −0.00546, 0.00545, −0.00545, 0.00545, 0.00545, 0.00545, 0.00545, −0.00545, 0.00545, 0.00545, −0.00545, 0.00545, −0.00544, −0.00544, 0.00544, 0.00544, 0.00544, −0.00544, 0.00544, −0.00544, 0.00543, 0.00543, −0.00543, 0.00543, −0.00543, −0.00543, −0.00543, 0.00543, −0.00542, −0.00542, 0.00542, −0.00542, −0.00542, −0.00542, −0.00542, −0.00542, −0.00542, 0.00542, −0.00542, 0.00542, −0.00541, 0.00541, 0.00541, −0.00541, 0.00541, −0.0054, 0.0054, 0.0054, 0.0054, 0.0054, 0.0054, 0.0054, 0.0054, −0.0054, −0.0054, −0.0054, 0.0054, −0.00539, 0.00539, −0.00539, −0.00539, −0.00539, 0.00539, −0.00539, 0.00539, −0.00539, −0.00539, 0.00539, −0.00538, −0.00538, −0.00538, −0.00538, 0.00538, −0.00538, 0.00538, −0.00537, −0.00537, 0.00537, 0.00537, −0.00537, −0.00537, 0.00537, 0.00537, −0.00537, −0.00536, −0.00536, −0.00536, 0.00536, −0.00536, 0.00536, −0.00536, −0.00536, 0.00536, −0.00535, 0.00535, −0.00535, 0.00535, −0.00535, −0.00535, 0.00534, 0.00534, −0.00534, 0.00534, −0.00534, 0.00534, −0.00534, −0.00534, 0.00534, −0.00534, −0.00534, 0.00533, 0.00533, 0.00533, −0.00533, 0.00533, −0.00533, −0.00532, −0.00532, −0.00532, 0.00532, −0.00532, −0.00532, 0.00532, 0.00532, −0.00532, −0.00532, 0.00532, 0.00532, 0.00531, 0.00531, −0.00531, −0.00531, −0.00531, 0.00531, −0.00531, −0.00531, 0.0053, −0.0053, −0.0053, 0.0053, 0.0053, −0.0053, −0.0053, −0.0053, −0.0053, −0.0053, −0.0053, 0.00529, −0.00529, −0.00529, −0.00529, −0.00529, −0.00529, −0.00529, −0.00529, 0.00529, 0.00529, 0.00529, 0.00529, 0.00529, 0.00529, 0.00529, 0.00529, 0.00528, −0.00528, 0.00528, 0.00528, −0.00528, −0.00528, 0.00527, −0.00527, −0.00527, −0.00527, −0.00527, −0.00527, 0.00527, 0.00527, −0.00527, −0.00527, 0.00527, 0.00527, −0.00526, 0.00526, 0.00526, 0.00526, −0.00526, 0.00526, −0.00526, −0.00526, 0.00526, −0.00526, −0.00525, −0.00525, −0.00525, 0.00525, −0.00525, 0.00525, −0.00525, −0.00525, 0.00525, −0.00525, −0.00525, −0.00525, −0.00524, 0.00524, −0.00524, 0.00524, −0.00524, 0.00524, 0.00524, −0.00523, −0.00523, 0.00523, −0.00523, −0.00523, −0.00523, 0.00523, 0.00523, −0.00523, 0.00523, −0.00522, 0.00522, −0.00522, −0.00522, −0.00522, 0.00522, −0.00522, 0.00521, −0.00521, 0.00521, 0.00521, 0.0052, 0.0052, 0.0052, 0.0052, 0.0052, −0.0052, 0.0052, 0.0052, 0.00519, 0.00519, −0.00519, −0.00519, −0.00519, −0.00519, 0.00519, 0.00519, 0.00519, 0.00518, −0.00518, −0.00518, −0.00518, 0.00518, 0.00518, −0.00518, 0.00518, −0.00518, 0.00518, 0.00518, 0.00518, 0.00518, −0.00518, 0.00518, −0.00518, −0.00518, 0.00518, −0.00517, 0.00517, 0.00517, 0.00517, −0.00517, 0.00517, −0.00517, 0.00517, 0.00517, 0.00517, −0.00516, −0.00516, −0.00516, 0.00516, −0.00516, −0.00516, −0.00516, −0.00516, 0.00515, −0.00515, 0.00515, 0.00515, 0.00515, 0.00515, 0.00515, 0.00515, −0.00515, −0.00515, −0.00515, −0.00515, −0.00515, 0.00514, 0.00514, 0.00514, −0.00514, −0.00514, 0.00514, −0.00513, 0.00513, 0.00513, 0.00513, 0.00513, 0.00513, −0.00513, 0.00513, 0.00513, −0.00513, −0.00513, 0.00513, 0.00513, 0.00513, −0.00513, −0.00513, 0.00513, 0.00512, −0.00512, 0.00512, 0.00512, 0.00512, −0.00512, −0.00512, −0.00512, −0.00512, 0.00512, −0.00512, 0.00511, 0.00511, 0.00511, −0.00511, −0.00511, 0.00511, −0.00511, 0.00511, 0.00511, 0.00511, −0.00511, 0.00511, −0.00511, −0.0051, −0.0051, 0.0051, −0.0051, 0.0051, 0.0051, −0.0051, 0.0051, −0.0051, 0.0051, 0.0051, −0.0051, 0.0051, −0.00509, −0.00509, −0.00509, 0.00509, −0.00509, −0.00509, −0.00509, 0.00509, 0.00509, −0.00509, 0.00509, 0.00508, 0.00508, 0.00508, 0.00508, −0.00508, 0.00508, 0.00507, −0.00507, −0.00507, 0.00507, −0.00507, 0.00506, 0.00506, −0.00506, −0.00506, 0.00506, −0.00506, −0.00506, 0.00506, 0.00506, 0.00505, 0.00505, 0.00505, 0.00505, −0.00505, −0.00505, 0.00505, −0.00505, −0.00505, −0.00505, 0.00505, 0.00505, 0.00505, 0.00505, −0.00504, 0.00504, 0.00504, 0.00503, −0.00503, −0.00503, −0.00503, 0.00503, 0.00503, 0.00503, 0.00503, 0.00503, 0.00502, −0.00502, 0.00502, 0.00502, −0.00502, −0.00502, −0.00501, −0.00501, 0.00501, 0.00501, 0.00501, 0.00501, −0.00501, −0.00501, −0.00501, −0.005, 0.005, 0.005, −0.005, −0.005, 0.005, 0.00499, −0.00499, 0.00499, −0.00499, −0.00499, −0.00499, −0.00499, −0.00499, 0.00499, 0.00498, −0.00498, −0.00498, −0.00498, −0.00498, −0.00498, 0.00498, −0.00498, −0.00498, −0.00498, 0.00498, 0.00497, 0.00497, −0.00497, 0.00497, −0.00497, −0.00497, 0.00497, 0.00497, 0.00497, 0.00496, −0.00496, −0.00496, 0.00496, 0.00496, 0.00496, −0.00496, 0.00496, −0.00496, −0.00496, −0.00496, −0.00496, −0.00496, 0.00496, −0.00496, −0.00495, 0.00495, −0.00495, 0.00495, −0.00495, −0.00495, −0.00495, −0.00495, −0.00494, −0.00494, 0.00494, 0.00494, 0.00494, −0.00494, −0.00494, 0.00494, 0.00494, −0.00494, 0.00494, 0.00494, 0.00493, −0.00493, −0.00493, −0.00493, −0.00493, −0.00493, 0.00493, −0.00493, −0.00493, 0.00493, 0.00492, 0.00492, 0.00492, −0.00492, −0.00491, −0.00491, 0.00491, 0.00491, 0.0049, 0.0049, 0.0049, −0.0049, −0.0049, −0.0049, 0.0049, 0.0049, −0.0049, −0.0049, 0.00489, 0.00489, −0.00489, 0.00489, −0.00489, −0.00489, 0.00489, 0.00489, −0.00489, 0.00488, −0.00488, 0.00488, 0.00488, 0.00488, −0.00488, −0.00488, −0.00488, −0.00488, −0.00488, 0.00488, −0.00488, −0.00488, 0.00488, 0.00487, 0.00487, 0.00487, −0.00487, −0.00487, −0.00487, −0.00487, 0.00487, −0.00487, 0.00486, −0.00486, −0.00486, 0.00486, 0.00486, 0.00486, 0.00486, 0.00486, −0.00486, 0.00486, −0.00486, 0.00486, 0.00486, 0.00486, −0.00486, −0.00485, 0.00485, −0.00485, −0.00485, −0.00485, −0.00485, 0.00484, −0.00484, −0.00484, 0.00484, 0.00484, −0.00483, −0.00483, −0.00483, 0.00483, 0.00483, −0.00483, 0.00483, 0.00483, 0.00483, 0.00483, −0.00482, −0.00482, −0.00482, −0.00482, −0.00482, −0.00482, −0.00482, −0.00482, −0.00482, 0.00482, 0.00482, 0.00482, −0.00482, −0.00482, −0.00481, 0.00481, 0.00481, −0.00481, 0.00481, −0.00481, 0.00481, 0.00481, −0.0048, −0.0048, 0.0048, 0.0048, −0.0048, −0.0048, −0.0048, 0.0048, 0.0048, −0.0048, −0.0048, −0.00479, −0.00479, 0.00479, −0.00479, −0.00479, −0.00479, 0.00479, 0.00479, 0.00478, −0.00478, −0.00478, 0.00478, 0.00478, −0.00478, −0.00478, 0.00478, 0.00478, 0.00478, −0.00478, 0.00477, 0.00477, 0.00477, −0.00477, −0.00477, −0.00477, 0.00477, −0.00477, −0.00477, 0.00477, 0.00477, 0.00476, −0.00476, 0.00476, 0.00476, 0.00476, 0.00476, 0.00476, 0.00476, −0.00476, −0.00476, −0.00476, 0.00476, 0.00475, 0.00475, 0.00475, 0.00475, −0.00475, 0.00475, −0.00475, −0.00475, −0.00475, −0.00475, −0.00475, −0.00474, −0.00474, −0.00474, 0.00474, 0.00474, −0.00474, −0.00474, 0.00474, −0.00474, −0.00474, 0.00474, 0.00474, 0.00474, −0.00474, −0.00473, −0.00473, −0.00473, 0.00473, −0.00473, −0.00473, −0.00473, −0.00473, 0.00473, 0.00472, 0.00472, 0.00472, 0.00472, −0.00472, 0.00471, 0.00471, 0.00471, 0.00471, 0.00471, −0.00471, 0.00471, −0.00471, −0.0047, −0.0047, −0.0047, −0.0047, −0.0047, 0.0047, 0.0047, 0.0047, −0.0047, 0.0047, −0.00469, −0.00469, 0.00469, 0.00469, 0.00469, −0.00469, −0.00468, 0.00468, 0.00468, −0.00468, 0.00468, −0.00468, 0.00468, −0.00468, 0.00467, 0.00467, −0.00467, −0.00467, 0.00467, 0.00467, −0.00466, −0.00466, 0.00466, 0.00466, 0.00466, 0.00466, −0.00465, −0.00465, −0.00465, 0.00465, 0.00465, 0.00465, 0.00465, 0.00465, 0.00465, −0.00465, 0.00465, 0.00465, 0.00464, −0.00464, −0.00464, −0.00464, 0.00464, −0.00464, −0.00464, −0.00464, −0.00464, −0.00464, 0.00464, 0.00464, 0.00464, −0.00464, 0.00463, 0.00463, −0.00463, −0.00463, 0.00463, 0.00463, −0.00463, 0.00463, 0.00462, −0.00462, 0.00462, −0.00462, 0.00462, 0.00462, 0.00462, 0.00462, −0.00462, −0.00462, 0.00462, 0.00461, 0.00461, −0.00461, 0.00461, 0.00461, −0.0046, −0.0046, −0.0046, 0.0046, 0.0046, −0.0046, 0.0046, 0.0046, 0.0046, 0.0046, −0.00459, 0.00459, −0.00459, 0.00459, −0.00459, −0.00459, −0.00459, −0.00459, −0.00459, −0.00459, 0.00458, 0.00458, −0.00458, −0.00458, 0.00458, 0.00458, 0.00457, 0.00457, −0.00457, −0.00457, −0.00457, −0.00457, −0.00457, 0.00457, −0.00456, 0.00456, 0.00456, −0.00456, −0.00456, 0.00456, −0.00455, 0.00455, −0.00455, 0.00455, −0.00455, 0.00455, −0.00455, 0.00454, 0.00454, −0.00454, −0.00454, 0.00454, 0.00453, 0.00453, 0.00453, −0.00453, 0.00453, −0.00453, 0.00453, −0.00453, −0.00453, 0.00453, −0.00453, 0.00453, −0.00452, −0.00452, 0.00452, −0.00452, 0.00452, −0.00452, 0.00451, −0.00451, 0.00451, −0.00451, −0.00451, −0.00451, 0.00451, −0.00451, 0.00451, −0.0045, 0.0045, −0.0045, −0.0045, 0.0045, −0.0045, 0.00449, 0.00449, 0.00449, 0.00449, −0.00449, 0.00449, 0.00449, −0.00449, −0.00449, 0.00449, 0.00449, −0.00449, −0.00449, 0.00449, −0.00449, 0.00449, −0.00449, 0.00448, 0.00448, −0.00448, 0.00448, −0.00448, −0.00448, 0.00448, 0.00448, −0.00448, −0.00448, −0.00448, 0.00447, −0.00447, −0.00447, 0.00447, 0.00447, −0.00447, 0.00447, 0.00447, −0.00447, 0.00447, 0.00447, 0.00446, −0.00446, 0.00446, 0.00446, −0.00446, 0.00446, −0.00446, −0.00446, 0.00446, 0.00445, −0.00445, −0.00445, −0.00445, 0.00445, −0.00445, −0.00445, −0.00445, 0.00445, 0.00445, 0.00445, −0.00445, 0.00445, 0.00445, −0.00445, −0.00445, 0.00444, −0.00444, −0.00444, −0.00444, −0.00444, −0.00444, 0.00444, 0.00444, −0.00444, 0.00444, −0.00443, 0.00443, 0.00443, 0.00443, −0.00443, 0.00443, 0.00443, −0.00443, 0.00443, 0.00443, −0.00443, −0.00442, 0.00442, −0.00442, 0.00442, 0.00442, −0.00442, 0.00442, −0.00442, 0.00442, 0.00442, −0.00442, −0.00442, −0.00442, −0.00442, 0.00441, 0.00441, 0.00441, 0.00441, 0.00441, 0.00441, −0.00441, −0.00441, −0.00441, 0.00441, −0.00441, −0.00441, 0.0044, 0.0044, −0.0044, −0.0044, 0.0044, 0.0044, −0.0044, 0.0044, 0.00439, 0.00439, −0.00439, 0.00439, −0.00439, −0.00439, 0.00438, 0.00438, −0.00438, 0.00438, 0.00438, 0.00438, 0.00438, −0.00438, 0.00438, −0.00438, −0.00438, 0.00438, 0.00438, 0.00438, −0.00437, 0.00437, 0.00437, 0.00437, −0.00437, 0.00437, −0.00437, 0.00437, 0.00437, 0.00437, −0.00437, 0.00437, −0.00436, 0.00436, −0.00436, −0.00436, 0.00436, 0.00436, 0.00436, 0.00436, 0.00436, 0.00436, −0.00436, −0.00436, −0.00436, 0.00436, −0.00436, 0.00436, −0.00435, −0.00435, 0.00435, 0.00435, 0.00435, −0.00435, 0.00435, 0.00435, −0.00434, −0.00434, 0.00434, −0.00434, −0.00434, 0.00434, 0.00434, −0.00434, −0.00434, 0.00433, −0.00433, 0.00433, −0.00433, −0.00433, 0.00433, −0.00433, 0.00433, 0.00432, −0.00432, 0.00432, −0.00432, 0.00432, 0.00432, 0.00432, −0.00432, 0.00432, 0.00432, 0.00432, 0.00432, 0.00432, 0.00431, 0.00431, 0.00431, 0.00431, 0.00431, −0.00431, 0.00431, −0.00431, −0.00431, −0.00431, −0.00431, −0.00431, 0.00431, 0.00431, 0.0043, 0.0043, −0.0043, 0.0043, 0.00429, 0.00429, −0.00429, −0.00429, −0.00429, −0.00428, −0.00428, −0.00428, −0.00428, 0.00428, −0.00428, 0.00428, −0.00428, 0.00428, −0.00428, −0.00427, 0.00427, 0.00427, −0.00427, −0.00427, −0.00427, −0.00427, 0.00427, −0.00427, −0.00427, −0.00426, 0.00426, −0.00426, −0.00426, 0.00426, −0.00426, −0.00426, 0.00425, −0.00425, −0.00425, −0.00425, 0.00425, 0.00425, 0.00425, −0.00425, −0.00425, −0.00425, 0.00424, −0.00424, −0.00424, 0.00424, 0.00424, 0.00424, −0.00424, 0.00424, −0.00424, 0.00423, −0.00423, −0.00423, 0.00423, −0.00423, 0.00423, −0.00423, 0.00423, −0.00423, −0.00423, 0.00423, −0.00423, 0.00423, 0.00423, 0.00423, 0.00423, −0.00423, −0.00422, −0.00422, −0.00422, −0.00422, −0.00422, 0.00422, 0.00422, −0.00422, −0.00421, −0.00421, 0.00421, −0.00421, −0.00421, −0.00421, −0.00421, 0.00421, 0.00421, −0.0042, 0.0042, 0.0042, −0.0042, −0.0042, 0.0042, 0.00419, 0.00419, −0.00419, 0.00419, 0.00419, 0.00419, 0.00418, 0.00418, 0.00418, −0.00418, 0.00418, −0.00418, −0.00418, −0.00418, 0.00418, 0.00418, −0.00418, 0.00418, 0.00418, −0.00417, 0.00417, −0.00417, 0.00417, −0.00417, −0.00417, 0.00417, 0.00417, 0.00417, −0.00417, −0.00417, −0.00417, −0.00416, −0.00416, 0.00416, −0.00416, 0.00416, 0.00416, 0.00416, −0.00416, 0.00416, −0.00416, −0.00416, 0.00415, 0.00415, 0.00415, 0.00415, 0.00415, −0.00415, 0.00415, −0.00414, 0.00414, −0.00414, 0.00414, 0.00414, −0.00414, 0.00414, 0.00414, 0.00413, −0.00413, 0.00413, 0.00413, 0.00413, −0.00413, −0.00413, −0.00412, 0.00412, −0.00412, 0.00412, 0.00412, 0.00412, 0.00412, −0.00412, 0.00412, −0.00412, 0.00412, −0.00412, −0.00411, 0.00411, −0.00411, −0.00411, −0.00411, 0.00411, −0.00411, −0.00411, −0.00411, 0.0041, −0.0041, 0.0041, 0.0041, −0.0041, −0.0041, −0.0041, −0.0041, −0.0041, −0.0041, −0.0041, −0.0041, 0.0041, −0.00409, 0.00409, 0.00409, 0.00409, −0.00409, −0.00409, 0.00409, −0.00409, 0.00409, −0.00409, −0.00409, 0.00409, −0.00409, 0.00408, −0.00408, 0.00408, −0.00408, −0.00408, 0.00408, −0.00408, 0.00408, 0.00407, 0.00407, 0.00407, −0.00407, 0.00407, −0.00406, 0.00406, −0.00406, 0.00406, 0.00406, −0.00406, 0.00405, −0.00405, 0.00405, 0.00405, 0.00405, −0.00405, 0.00405, 0.00404, 0.00404, −0.00404, −0.00404, −0.00404, −0.00404, 0.00404, −0.00404, 0.00404, 0.00404, −0.00404, −0.00404, 0.00404, −0.00404, −0.00404, 0.00403, 0.00403, −0.00403, 0.00403, 0.00403, −0.00403, 0.00403, 0.00403, 0.00403, 0.00403, 0.00403, 0.00403, 0.00403, 0.00403, 0.00402, 0.00402, −0.00402, −0.00402, 0.00402, 0.00402, −0.00402, −0.00402, 0.00402, −0.00402, −0.00402, 0.00401, −0.00401, −0.00401, −0.00401, 0.00401, 0.00401, −0.00401, 0.004, −0.004, 0.004, −0.004, 0.004, −0.004, −0.004, 0.004, −0.004, −0.004, −0.004, 0.004, −0.00399, 0.00399, 0.00399, 0.00399, −0.00399, 0.00399, −0.00399, −0.00399, 0.00399, −0.00399, −0.00399, −0.00399, −0.00398, −0.00398, −0.00398, 0.00398, −0.00398, 0.00398, −0.00398, −0.00398, 0.00398, −0.00398, −0.00397, 0.00397, −0.00397, 0.00397, 0.00397, 0.00397, 0.00397, −0.00397, 0.00397, 0.00397, −0.00397, 0.00397, 0.00397, −0.00396, 0.00396, 0.00396, −0.00396, −0.00396, 0.00396, 0.00396, −0.00395, 0.00395, 0.00395, −0.00395, 0.00395, 0.00395, 0.00395, 0.00395, −0.00394, 0.00394, −0.00394, −0.00394, 0.00394, −0.00394, −0.00394, −0.00394, −0.00394, 0.00394, −0.00394, −0.00394, −0.00394, 0.00393, 0.00393, 0.00393, 0.00393, 0.00393, −0.00393, −0.00393, −0.00392, 0.00392, 0.00392, 0.00392, 0.00392, −0.00392, 0.00392, −0.00392, 0.00392, 0.00391, −0.00391, 0.00391, −0.00391, 0.00391, −0.00391, 0.00391, −0.00391, 0.0039, 0.0039, −0.0039, 0.0039, 0.0039, −0.0039, −0.0039, −0.0039, 0.0039, −0.0039, 0.0039, 0.00389, 0.00389, 0.00389, 0.00389, −0.00389, 0.00389, −0.00389, −0.00389, −0.00389, 0.00389, −0.00389, −0.00389, 0.00388, 0.00388, 0.00388, 0.00388, −0.00388, 0.00388, −0.00387, −0.00387, 0.00387, −0.00387, −0.00387, 0.00387, 0.00387, 0.00387, 0.00387, −0.00387, −0.00387, 0.00387, 0.00387, −0.00387, −0.00387, 0.00386, −0.00386, −0.00386, −0.00386, 0.00386, 0.00386, 0.00386, −0.00385, −0.00385, 0.00385, 0.00385, −0.00385, 0.00385, −0.00385, 0.00385, 0.00385, −0.00385, 0.00385, −0.00385, 0.00384, 0.00384, 0.00384, −0.00384, −0.00384, 0.00384, 0.00384, 0.00384, 0.00384, 0.00384, 0.00384, −0.00384, −0.00384, −0.00384, 0.00384, −0.00383, −0.00383, −0.00383, 0.00383, 0.00383, −0.00383, −0.00382, −0.00382, 0.00382, −0.00382, 0.00382, −0.00382, 0.00382, −0.00382, 0.00382, 0.00382, 0.00382, 0.00381, −0.00381, 0.00381, −0.00381, −0.00381, 0.00381, −0.00381, −0.0038, −0.0038, 0.0038, −0.0038, −0.0038, −0.0038, −0.0038, −0.0038, 0.0038, 0.0038, 0.0038, −0.00379, 0.00379, −0.00379, −0.00379, −0.00379, −0.00379, −0.00379, −0.00379, 0.00379, 0.00379, −0.00379, −0.00379, −0.00378, 0.00378, −0.00378, 0.00378, 0.00378, 0.00378, −0.00378, 0.00378, 0.00378, 0.00378, −0.00378, −0.00378, 0.00377, 0.00377, −0.00377, 0.00377, 0.00377, 0.00377, 0.00377, −0.00377, 0.00376, 0.00376, −0.00376, −0.00376, 0.00376, −0.00376, 0.00376, −0.00376, 0.00375, 0.00375, 0.00375, −0.00375, 0.00375, −0.00375, −0.00375, 0.00375, 0.00375, 0.00375, 0.00375, −0.00374, 0.00374, −0.00374, 0.00374, −0.00374, −0.00374, 0.00374, −0.00374, 0.00374, 0.00374, 0.00374, 0.00374, −0.00374, 0.00374, −0.00374, 0.00374, 0.00373, 0.00373, −0.00373, −0.00373, 0.00373, 0.00373, 0.00373, 0.00373, 0.00373, −0.00373, 0.00372, −0.00372, 0.00372, 0.00372, −0.00372, 0.00372, −0.00372, −0.00372, 0.00372, −0.00371, −0.00371, 0.00371, −0.00371, −0.00371, −0.0037, 0.0037, 0.0037, 0.0037, 0.0037, 0.0037, 0.0037, 0.0037, 0.00369, 0.00369, −0.00369, −0.00369, 0.00369, 0.00369, 0.00369, −0.00369, 0.00369, 0.00368, 0.00368, 0.00368, 0.00368, 0.00368, 0.00368, 0.00368, 0.00368, 0.00368, −0.00368, −0.00368, 0.00367, −0.00367, 0.00367, −0.00367, 0.00367, 0.00367, 0.00367, −0.00367, −0.00366, 0.00366, −0.00366, −0.00366, 0.00366, −0.00365, −0.00365, −0.00365, −0.00365, −0.00365, 0.00365, 0.00365, 0.00365, −0.00365, −0.00365, −0.00365, −0.00364, 0.00364, −0.00364, 0.00364, −0.00364, 0.00364, 0.00364, 0.00364, −0.00364, 0.00363, 0.00363, −0.00363, −0.00363, −0.00363, −0.00363, 0.00363, −0.00363, −0.00363, 0.00362, 0.00362, 0.00362, −0.00362, 0.00362, 0.00362, 0.00362, −0.00362, 0.00362, −0.00362, −0.00362, 0.00361, 0.00361, 0.00361, −0.00361, −0.00361, −0.00361, 0.00361, −0.00361, 0.00361, −0.00361, 0.00361, −0.0036, 0.0036, 0.0036, −0.0036, −0.00359, 0.00359, 0.00359, 0.00359, 0.00359, −0.00359, 0.00359, 0.00359, 0.00359, 0.00359, −0.00359, −0.00359, 0.00358, −0.00358, −0.00358, 0.00358, 0.00358, 0.00358, 0.00358, 0.00358, 0.00358, −0.00358, −0.00358, −0.00358, 0.00358, 0.00358, 0.00358, −0.00358, −0.00358, 0.00357, −0.00357, −0.00357, 0.00357, 0.00357, −0.00357, 0.00357, −0.00357, 0.00357, 0.00356, 0.00356, 0.00356, −0.00356, 0.00356, 0.00356, 0.00356, 0.00356, −0.00356, 0.00356, −0.00356, −0.00355, 0.00355, −0.00355, 0.00355, −0.00355, −0.00355, −0.00355, 0.00355, 0.00355, 0.00355, −0.00354, −0.00354, −0.00354, 0.00354, −0.00354, −0.00354, −0.00354, 0.00354, 0.00354, 0.00354, 0.00354, 0.00353, −0.00353, −0.00353, −0.00353, −0.00353, −0.00353, 0.00353, 0.00353, −0.00353, −0.00353, −0.00352, 0.00352, −0.00352, 0.00352, 0.00352, 0.00352, −0.00352, 0.00352, −0.00352, −0.00352, 0.00352, 0.00351, 0.00351, −0.00351, 0.00351, 0.00351, −0.00351, 0.00351, 0.00351, 0.00351, 0.00351, −0.00351, 0.00351, 0.00351, −0.00351, −0.0035, 0.0035, −0.0035, −0.0035, 0.0035, 0.0035, 0.0035, −0.0035, −0.0035, −0.0035, −0.0035, −0.00349, 0.00349, −0.00349, 0.00349, −0.00349, 0.00349, −0.00349, −0.00349, −0.00349, 0.00349, −0.00348, −0.00348, 0.00348, −0.00348, −0.00348, 0.00348, 0.00348, 0.00348, 0.00347, 0.00347, −0.00347, −0.00347, 0.00347, −0.00347, −0.00347, 0.00347, −0.00346, −0.00346, 0.00346, −0.00346, 0.00346, 0.00346, 0.00346, 0.00346, −0.00346, −0.00346, −0.00346, 0.00346, 0.00346, −0.00346, 0.00346, −0.00345, 0.00345, 0.00345, 0.00345, −0.00345, 0.00345, −0.00345, −0.00345, 0.00344, 0.00344, 0.00344, 0.00344, 0.00344, −0.00344, −0.00344, −0.00344, −0.00344, 0.00344, −0.00344, −0.00344, 0.00343, −0.00343, 0.00343, −0.00343, −0.00343, −0.00343, 0.00343, −0.00343, 0.00343, −0.00343, 0.00343, −0.00343, 0.00342, −0.00342, −0.00342, −0.00342, −0.00342, 0.00342, 0.00342, −0.00342, −0.00342, −0.00342, 0.00342, −0.00342, −0.00341, −0.00341, 0.00341, 0.00341, −0.00341, 0.00341, 0.00341, 0.00341, −0.00341, 0.00341, −0.00341, 0.00341, 0.00341, −0.0034, 0.0034, 0.0034, 0.0034, 0.0034, −0.0034, 0.0034, 0.0034, −0.0034, 0.0034, 0.0034, −0.00339, 0.00339, 0.00339, 0.00339, 0.00339, −0.00338, 0.00338, −0.00338, −0.00338, −0.00338, 0.00338, 0.00338, −0.00338, −0.00338, −0.00338, 0.00338, 0.00338, −0.00338, 0.00338, 0.00338, 0.00338, −0.00337, −0.00337, −0.00337, −0.00337, 0.00337, 0.00337, 0.00337, −0.00337, 0.00336, 0.00336, 0.00336, 0.00336, 0.00336, −0.00336, −0.00336, −0.00336, −0.00336, 0.00336, 0.00336, −0.00336, 0.00336, 0.00336, 0.00335, 0.00335, 0.00335, 0.00335, 0.00335, −0.00335, −0.00335, −0.00335, 0.00335, −0.00334, 0.00334, 0.00334, −0.00334, 0.00334, −0.00334, 0.00334, 0.00334, 0.00334, 0.00334, 0.00334, 0.00334, 0.00334, 0.00334, −0.00334, −0.00334, 0.00334, 0.00334, 0.00333, 0.00333, 0.00333, 0.00333, 0.00333, 0.00333, −0.00333, 0.00333, 0.00333, −0.00333, 0.00333, −0.00332, −0.00332, 0.00332, 0.00332, −0.00332, −0.00332, 0.00332, 0.00331, −0.00331, −0.00331, 0.00331, 0.00331, 0.00331, 0.00331, 0.00331, 0.00331, 0.0033, 0.0033, 0.0033, 0.0033, 0.0033, −0.0033, 0.0033, 0.0033, −0.0033, 0.0033, 0.00329, −0.00329, −0.00329, −0.00329, 0.00329, −0.00329, 0.00329, 0.00329, −0.00328, −0.00328, 0.00328, −0.00328, −0.00328, −0.00328, −0.00328, 0.00328, −0.00328, −0.00328, −0.00328, 0.00328, 0.00327, 0.00327, 0.00327, 0.00327, 0.00327, −0.00327, 0.00327, 0.00327, −0.00327, 0.00327, −0.00327, 0.00327, 0.00327, −0.00327, −0.00327, 0.00327, −0.00326, 0.00326, 0.00326, 0.00326, 0.00326, −0.00326, −0.00326, −0.00326, −0.00326, −0.00325, −0.00325, 0.00325, 0.00325, 0.00325, 0.00324, −0.00324, 0.00324, 0.00324, 0.00324, −0.00324, 0.00324, 0.00324, 0.00324, 0.00323, −0.00323, −0.00323, −0.00323, 0.00323, −0.00323, −0.00323, −0.00323, −0.00323, 0.00323, 0.00323, 0.00322, −0.00322, −0.00322, −0.00322, −0.00322, −0.00322, −0.00322, −0.00322, 0.00322, −0.00321, 0.00321, 0.00321, −0.00321, −0.00321, 0.00321, −0.00321, −0.00321, −0.00321, −0.0032, −0.0032, 0.0032, −0.0032, 0.0032, −0.0032, 0.0032, 0.0032, 0.0032, 0.00319, 0.00319, −0.00319, −0.00319, 0.00319, 0.00319, −0.00319, 0.00319, 0.00319, −0.00319, 0.00319, 0.00318, −0.00318, 0.00318, −0.00318, 0.00318, −0.00318, 0.00318, 0.00318, 0.00318, 0.00318, 0.00318, 0.00318, 0.00317, −0.00317, 0.00317, 0.00317, −0.00317, −0.00317, 0.00316, 0.00316, 0.00316, 0.00316, −0.00316, −0.00316, 0.00316, 0.00316, 0.00316, −0.00316, −0.00316, 0.00315, −0.00315, −0.00315, −0.00315, −0.00315, −0.00315, 0.00314, −0.00314, 0.00314, 0.00314, −0.00314, 0.00314, 0.00314, 0.00314, 0.00314, −0.00314, 0.00314, 0.00313, −0.00313, 0.00313, −0.00313, −0.00313, −0.00313, 0.00313, −0.00313, 0.00313, 0.00313, −0.00313, −0.00312, −0.00312, 0.00312, 0.00312, −0.00312, 0.00312, 0.00312, −0.00312, 0.00312, −0.00312, −0.00312, 0.00312, 0.00312, −0.00311, −0.00311, 0.00311, −0.00311, 0.00311, 0.00311, 0.00311, −0.00311, 0.0031, 0.0031, 0.0031, 0.0031, −0.0031, 0.00309, −0.00309, 0.00309, −0.00309, −0.00309, −0.00309, 0.00309, 0.00309, −0.00308, 0.00308, −0.00308, −0.00308, −0.00308, 0.00308, 0.00308, 0.00308, −0.00307, 0.00307, −0.00307, 0.00307, 0.00307, 0.00307, −0.00307, 0.00307, 0.00307, −0.00307, 0.00306, −0.00306, −0.00306, 0.00306, 0.00306, −0.00306, 0.00306, −0.00306, −0.00306, −0.00306, 0.00306, −0.00305, −0.00305, −0.00305, −0.00305, 0.00305, −0.00305, 0.00305, 0.00305, −0.00304, −0.00304, 0.00304, 0.00304, 0.00304, 0.00304, 0.00304, 0.00304, 0.00304, −0.00304, −0.00303, 0.00303, 0.00303, 0.00303, 0.00303, −0.00303, 0.00303, −0.00303, 0.00303, −0.00302, 0.00302, 0.00302, 0.00302, −0.00302, 0.00302, −0.00302, 0.00302, 0.00302, 0.00302, 0.00301, 0.00301, 0.00301, −0.00301, 0.00301, −0.00301, −0.00301, −0.003, 0.003, 0.003, −0.003, −0.003, −0.003, 0.003, −0.003, −0.003, 0.003, −0.003, 0.00299, −0.00299, 0.00299, 0.00299, 0.00299, −0.00299, 0.00299, −0.00299, −0.00299, −0.00298, 0.00298, 0.00298, −0.00298, −0.00298, −0.00298, 0.00298, 0.00298, 0.00297, 0.00297, −0.00297, 0.00297, 0.00297, −0.00297, −0.00296, −0.00296, 0.00296, 0.00296, −0.00296, 0.00296, −0.00296, 0.00296, −0.00296, −0.00296, 0.00296, −0.00296, −0.00295, 0.00295, −0.00295, 0.00294, 0.00294, −0.00294, −0.00294, 0.00294, −0.00294, 0.00293, −0.00293, −0.00293, 0.00293, 0.00293, 0.00292, 0.00292, 0.00292, −0.00292, −0.00292, 0.00292, 0.00292, 0.00292, −0.00292, −0.00292, −0.00291, −0.00291, −0.00291, −0.00291, 0.00291, 0.00291, 0.00291, 0.00291, −0.0029, 0.0029, −0.0029, 0.0029, −0.0029, 0.0029, 0.0029, 0.0029, 0.0029, 0.0029, −0.00289, −0.00289, 0.00289, −0.00289, 0.00289, 0.00289, −0.00289, −0.00289, −0.00289, 0.00289, −0.00289, −0.00288, 0.00288, −0.00288, 0.00288, −0.00287, −0.00287, −0.00287, 0.00287, 0.00287, −0.00287, −0.00287, −0.00287, 0.00287, 0.00287, −0.00287, −0.00287, 0.00287, 0.00286, −0.00286, −0.00286, −0.00286, −0.00286, −0.00286, 0.00286, 0.00286, 0.00286, 0.00286, −0.00286, 0.00286, 0.00286, 0.00286, 0.00285, 0.00285, −0.00285, −0.00285, −0.00284, −0.00284, −0.00284, 0.00284, −0.00284, 0.00284, 0.00284, −0.00284, 0.00284, 0.00284, 0.00283, −0.00283, 0.00283, 0.00283, −0.00283, −0.00283, 0.00283, −0.00283, −0.00283, 0.00283, −0.00283, 0.00283, 0.00282, 0.00282, 0.00282, −0.00282, −0.00282, 0.00282, 0.00282, −0.00282, 0.00282, 0.00282, −0.00282, −0.00282, 0.00281, −0.00281, −0.00281, 0.00281, −0.00281, −0.00281, −0.00281, 0.00281, −0.00281, 0.00281, 0.00281, 0.00281, 0.00281, −0.0028, 0.0028, 0.0028, 0.0028, −0.0028, −0.0028, −0.00279, 0.00279, 0.00279, −0.00279, 0.00279, 0.00279, −0.00279, 0.00279, 0.00279, 0.00279, 0.00279, 0.00279, −0.00278, 0.00278, −0.00278, 0.00278, −0.00278, 0.00278, −0.00278, 0.00278, 0.00277, −0.00277, −0.00277, 0.00277, −0.00277, −0.00277, −0.00277, 0.00277, 0.00277, 0.00277, −0.00277, 0.00277, 0.00277, 0.00277, 0.00277, −0.00277, 0.00277, −0.00277, −0.00276, 0.00276, −0.00276, −0.00276, −0.00276, −0.00276, −0.00276, 0.00276, −0.00276, 0.00276, 0.00276, −0.00275, −0.00275, −0.00275, −0.00275, 0.00275, −0.00275, −0.00275, −0.00275, 0.00275, 0.00275, 0.00275, 0.00275, −0.00275, 0.00275, 0.00274, −0.00274, −0.00274, 0.00274, 0.00274, 0.00274, 0.00273, 0.00273, −0.00273, 0.00273, −0.00273, 0.00273, 0.00273, −0.00273, −0.00273, 0.00273, 0.00272, 0.00272, 0.00272, 0.00272, −0.00272, 0.00272, 0.00272, 0.00272, 0.00272, −0.00271, 0.00271, 0.00271, −0.00271, 0.0027, 0.0027, −0.0027, 0.0027, −0.0027, 0.0027, −0.0027, 0.0027, 0.0027, −0.0027, 0.00269, −0.00269, 0.00269, 0.00269, −0.00269, 0.00269, 0.00268, −0.00268, −0.00268, −0.00268, 0.00268, −0.00267, −0.00267, 0.00267, −0.00267, −0.00267, 0.00267, 0.00267, −0.00267, 0.00267, 0.00267, −0.00267, 0.00266, 0.00266, 0.00266, −0.00266, 0.00266, 0.00266, −0.00265, −0.00265, 0.00265, 0.00265, −0.00265, −0.00265, 0.00265, 0.00265, 0.00264, 0.00264, −0.00264, −0.00264, −0.00264, −0.00264, −0.00264, 0.00264, 0.00264, −0.00264, 0.00264, 0.00264, −0.00263, −0.00263, 0.00263, −0.00263, −0.00263, −0.00263, 0.00263, 0.00263, −0.00263, −0.00263, −0.00263, −0.00262, −0.00262, 0.00262, 0.00262, 0.00262, −0.00262, 0.00262, −0.00262, 0.00262, 0.00262, −0.00262, −0.00262, 0.00262, −0.00262, −0.00262, −0.00262, 0.00261, 0.00261, 0.00261, −0.00261, −0.00261, −0.00261, 0.00261, 0.00261, −0.00261, −0.00261, 0.00261, 0.00261, 0.0026, 0.0026, −0.0026, 0.0026, 0.0026, −0.0026, 0.0026, −0.0026, −0.0026, −0.0026, −0.0026, −0.0026, 0.0026, −0.00259, 0.00259, −0.00259, 0.00259, 0.00259, −0.00259, 0.00259, −0.00259, −0.00259, 0.00259, 0.00259, −0.00258, −0.00258, −0.00258, 0.00258, −0.00258, 0.00258, 0.00257, 0.00257, 0.00257, −0.00257, −0.00257, −0.00257, −0.00257, −0.00257, 0.00257, −0.00257, −0.00257, 0.00257, 0.00257, 0.00257, 0.00256, 0.00256, 0.00256, −0.00256, −0.00256, −0.00256, −0.00256, −0.00256, −0.00255, −0.00255, 0.00255, −0.00255, 0.00255, 0.00255, −0.00255, 0.00255, −0.00255, −0.00254, 0.00254, −0.00254, 0.00254, −0.00254, 0.00254, −0.00254, −0.00254, −0.00254, −0.00254, 0.00253, 0.00253, 0.00253, 0.00253, 0.00252, 0.00252, −0.00252, −0.00252, 0.00252, −0.00252, 0.00252, 0.00252, 0.00252, −0.00252, 0.00251, −0.00251, 0.00251, 0.00251, 0.00251, −0.00251, −0.00251, 0.00251, −0.00251, −0.00251, −0.0025, −0.0025, −0.0025, 0.0025, −0.0025, −0.0025, 0.0025, −0.0025, 0.0025, 0.0025, 0.0025, −0.0025, 0.00249, −0.00249, 0.00249, 0.00249, 0.00249, 0.00249, 0.00249, −0.00249, −0.00249, 0.00249, 0.00249, −0.00249, 0.00248, −0.00248, 0.00248, 0.00248, −0.00248, −0.00248, 0.00248, 0.00248, −0.00248, 0.00248, 0.00248, −0.00248, 0.00248, 0.00248, −0.00248, 0.00248, −0.00248, −0.00247, 0.00247, −0.00247, −0.00247, 0.00247, −0.00247, 0.00247, −0.00247, −0.00246, −0.00246, −0.00246, 0.00246, 0.00246, −0.00246, −0.00246, −0.00246, 0.00246, −0.00245, −0.00245, −0.00245, −0.00245, 0.00245, −0.00245, 0.00245, −0.00244, −0.00244, 0.00244, −0.00244, −0.00244, −0.00244, 0.00244, 0.00244, −0.00244, 0.00244, 0.00244, −0.00244, −0.00244, −0.00244, 0.00244, 0.00244, 0.00244, −0.00244, 0.00244, 0.00244, 0.00243, −0.00243, −0.00243, −0.00243, −0.00243, 0.00243, −0.00243, 0.00243, −0.00243, 0.00242, 0.00242, 0.00242, 0.00242, 0.00242, 0.00242, 0.00242, −0.00242, 0.00242, −0.00241, −0.00241, −0.00241, −0.00241, 0.00241, −0.00241, 0.00241, 0.00241, −0.00241, 0.00241, 0.00241, −0.00241, −0.0024, −0.0024, 0.0024, 0.0024, −0.0024, −0.0024, 0.0024, −0.0024, −0.0024, −0.00239, −0.00239, 0.00239, 0.00239, −0.00239, 0.00239, 0.00239, 0.00238, 0.00238, −0.00238, 0.00238, 0.00238, −0.00238, 0.00238, 0.00238, −0.00238, 0.00238, 0.00238, −0.00238, −0.00238, 0.00238, 0.00237, −0.00237, 0.00237, 0.00237, 0.00237, −0.00237, −0.00237, 0.00237, −0.00237, 0.00237, −0.00237, 0.00237, 0.00237, 0.00237, −0.00237, 0.00236, 0.00236, −0.00236, −0.00236, 0.00236, 0.00236, −0.00236, −0.00236, 0.00236, 0.00236, 0.00236, 0.00236, 0.00236, 0.00236, 0.00235, 0.00235, 0.00235, 0.00235, 0.00235, 0.00234, 0.00234, −0.00234, −0.00234, −0.00234, 0.00234, −0.00234, 0.00234, −0.00233, −0.00233, −0.00233, −0.00233, −0.00233, −0.00233, 0.00232, 0.00232, −0.00232, 0.00232, −0.00232, −0.00232, −0.00232, −0.00232, 0.00232, 0.00232, 0.00231, −0.00231, 0.00231, −0.00231, 0.00231, 0.00231, −0.00231, 0.00231, −0.00231, −0.00231, −0.0023, −0.0023, 0.0023, −0.0023, −0.0023, −0.0023, 0.0023, 0.0023, 0.0023, 0.0023, −0.0023, −0.0023, −0.0023, 0.0023, −0.0023, 0.00229, 0.00229, 0.00229, −0.00229, 0.00229, 0.00229, −0.00229, −0.00229, −0.00229, 0.00229, 0.00229, 0.00229, 0.00229, −0.00229, −0.00229, −0.00229, 0.00229, −0.00229, 0.00229, 0.00229, 0.00228, 0.00228, −0.00228, −0.00228, −0.00228, −0.00228, 0.00227, −0.00227, 0.00227, −0.00227, 0.00227, −0.00227, 0.00227, 0.00227, −0.00227, −0.00227, −0.00227, −0.00226, −0.00226, −0.00226, −0.00226, −0.00226, 0.00226, 0.00226, −0.00226, 0.00226, −0.00225, −0.00225, 0.00225, −0.00225, −0.00225, 0.00225, 0.00225, −0.00225, 0.00224, −0.00224, −0.00224, 0.00224, −0.00224, 0.00224, −0.00224, 0.00224, 0.00223, −0.00223, 0.00223, −0.00223, 0.00223, 0.00223, 0.00223, −0.00223, −0.00223, 0.00223, 0.00223, −0.00223, −0.00223, 0.00223, 0.00222, −0.00222, 0.00222, −0.00222, 0.00222, −0.00222, −0.00222, −0.00222, 0.00222, −0.00222, −0.00222, 0.00222, −0.00221, 0.00221, 0.00221, −0.00221, 0.00221, −0.00221, −0.00221, −0.00221, −0.00221, −0.00221, −0.00221, −0.00221, −0.0022, 0.0022, −0.0022, 0.0022, 0.0022, 0.0022, 0.0022, −0.0022, −0.0022, 0.0022, −0.0022, 0.00219, 0.00219, −0.00219, 0.00219, 0.00219, 0.00219, 0.00219, 0.00219, 0.00219, 0.00219, −0.00219, 0.00218, −0.00218, 0.00218, −0.00218, 0.00218, −0.00218, −0.00217, 0.00217, 0.00217, −0.00217, 0.00217, −0.00217, −0.00217, −0.00217, −0.00217, −0.00216, 0.00216, 0.00216, −0.00215, −0.00215, 0.00215, 0.00215, −0.00215, −0.00215, −0.00215, 0.00215, 0.00215, 0.00214, 0.00214, 0.00214, −0.00214, 0.00214, 0.00214, 0.00214, −0.00214, −0.00214, 0.00214, 0.00214, −0.00214, 0.00214, −0.00214, 0.00213, 0.00213, −0.00213, −0.00213, 0.00213, −0.00213, −0.00213, 0.00213, 0.00213, 0.00213, −0.00213, 0.00213, 0.00212, −0.00212, 0.00212, 0.00212, −0.00212, −0.00212, −0.00212, 0.00212, −0.00212, 0.00212, 0.00212, 0.00212, 0.00211, −0.00211, 0.00211, 0.00211, −0.00211, 0.00211, 0.00211, −0.00211, 0.00211, −0.00211, 0.00211, −0.00211, 0.0021, 0.0021, 0.0021, 0.0021, −0.0021, 0.0021, −0.0021, −0.0021, −0.0021, −0.0021, −0.0021, 0.0021, 0.0021, 0.00209, 0.00209, 0.00209, 0.00209, −0.00209, −0.00209, −0.00209, 0.00209, 0.00208, −0.00208, −0.00208, −0.00208, 0.00208, −0.00208, 0.00208, 0.00208, −0.00208, 0.00207, −0.00207, 0.00207, −0.00207, −0.00207, −0.00207, −0.00207, 0.00207, 0.00206, 0.00206, −0.00206, 0.00206, 0.00206, 0.00206, −0.00206, 0.00206, −0.00205, 0.00205, 0.00205, 0.00205, 0.00205, 0.00205, 0.00204, −0.00204, −0.00204, −0.00204, 0.00204, 0.00203, 0.00203, 0.00203, 0.00203, −0.00203, 0.00203, 0.00203, −0.00203, −0.00203, 0.00203, −0.00202, −0.00202, −0.00202, 0.00202, 0.00202, 0.00202, −0.00202, 0.00201, −0.00201, 0.00201, −0.00201, −0.00201, −0.00201, 0.00201, 0.00201, 0.00201, −0.00201, 0.00201, 0.00201, −0.002, 0.002, −0.002, 0.002, −0.002, −0.002, 0.002, −0.002, −0.002, 0.002, −0.002, −0.002, −0.002, 0.002, 0.002, −0.002, −0.002, 0.002, 0.002, −0.002, −0.00199, 0.00199, −0.00199, 0.00199, −0.00199, 0.00199, −0.00199, −0.00199, −0.00199, 0.00199, 0.00199, 0.00199, −0.00199, 0.00199, −0.00198, −0.00198, −0.00198, −0.00198, −0.00198, −0.00198, 0.00198, 0.00198, −0.00198, −0.00198, 0.00198, −0.00198, 0.00198, −0.00198, 0.00197, 0.00197, 0.00197, −0.00197, 0.00197, 0.00197, −0.00197, 0.00197, −0.00197, 0.00197, −0.00197, −0.00197, −0.00197, −0.00197, 0.00197, −0.00197, −0.00196, −0.00196, 0.00196, −0.00196, −0.00196, 0.00196, −0.00196, 0.00196, −0.00196, −0.00196, −0.00195, −0.00195, −0.00195, −0.00195, −0.00195, 0.00195, 0.00195, 0.00195, −0.00195, 0.00195, −0.00195, −0.00194, 0.00194, −0.00194, −0.00194, 0.00194, 0.00194, 0.00194, −0.00194, 0.00194, 0.00194, 0.00194, 0.00193, −0.00193, 0.00193, −0.00193, 0.00193, 0.00193, −0.00193, −0.00193, −0.00193, −0.00192, −0.00192, −0.00192, −0.00192, 0.00192, −0.00192, −0.00192, 0.00192, 0.00192, 0.00191, −0.00191, −0.00191, −0.00191, −0.00191, −0.00191, −0.00191, 0.00191, −0.00191, −0.00191, 0.00191, −0.00191, 0.00191, 0.00191, 0.00191, 0.0019, 0.0019, −0.0019, 0.0019, −0.0019, −0.0019, −0.0019, −0.0019, 0.0019, −0.0019, −0.0019, 0.0019, 0.0019, 0.00189, −0.00189, 0.00189, 0.00189, −0.00189, 0.00189, 0.00189, 0.00189, 0.00189, −0.00189, −0.00189, 0.00189, 0.00188, 0.00188, −0.00188, −0.00188, 0.00188, −0.00188, −0.00188, 0.00188, −0.00188, −0.00188, −0.00188, 0.00188, 0.00188, −0.00188, −0.00187, −0.00187, −0.00187, −0.00187, −0.00187, −0.00187, 0.00187, 0.00187, −0.00187, 0.00187, 0.00186, −0.00186, 0.00186, −0.00186, −0.00186, 0.00186, 0.00186, −0.00186, 0.00186, −0.00186, −0.00185, 0.00185, −0.00185, 0.00185, −0.00185, 0.00185, 0.00185, 0.00185, 0.00185, 0.00185, −0.00185, 0.00185, 0.00185, −0.00185, 0.00184, 0.00184, −0.00184, 0.00184, −0.00184, −0.00184, −0.00183, −0.00183, 0.00183, 0.00183, −0.00183, 0.00183, 0.00183, −0.00183, 0.00183, −0.00182, −0.00182, 0.00182, 0.00182, 0.00182, −0.00182, −0.00182, 0.00182, −0.00182, −0.00182, −0.00182, 0.00182, 0.00182, −0.00181, 0.00181, −0.00181, −0.00181, −0.00181, 0.00181, −0.00181, 0.00181, −0.0018, −0.0018, −0.0018, 0.0018, −0.0018, 0.0018, −0.0018, −0.0018, −0.0018, −0.00179, −0.00179, −0.00179, 0.00179, −0.00179, 0.00179, −0.00179, 0.00179, 0.00179, −0.00179, −0.00179, −0.00179, −0.00179, −0.00179, −0.00178, −0.00178, −0.00178, −0.00178, 0.00178, −0.00178, −0.00178, −0.00177, −0.00177, −0.00177, −0.00177, 0.00177, 0.00177, 0.00177, −0.00177, −0.00177, 0.00177, −0.00177, 0.00177, −0.00177, 0.00176, −0.00176, −0.00176, −0.00176, −0.00176, −0.00176, −0.00175, −0.00175, −0.00175, 0.00175, 0.00175, 0.00175, 0.00175, −0.00175, −0.00175, −0.00175, 0.00175, 0.00175, 0.00174, 0.00174, −0.00174, −0.00174, −0.00174, 0.00174, −0.00174, −0.00174, −0.00174, 0.00174, 0.00174, 0.00173, 0.00173, 0.00173, 0.00173, 0.00173, −0.00173, −0.00173, −0.00173, 0.00172, 0.00172, 0.00172, −0.00172, −0.00172, −0.00172, −0.00172, 0.00172, 0.00171, −0.00171, 0.00171, −0.00171, −0.00171, 0.00171, −0.00171, −0.00171, 0.00171, 0.00171, −0.0017, −0.0017, 0.0017, −0.0017, −0.0017, 0.0017, −0.0017, −0.0017, 0.0017, −0.0017, 0.0017, 0.0017, −0.0017, −0.00169, −0.00169, −0.00169, −0.00169, 0.00169, 0.00169, −0.00169, −0.00169, 0.00169, −0.00169, −0.00168, 0.00168, −0.00168, −0.00168, −0.00168, 0.00168, −0.00168, 0.00167, 0.00167, −0.00167, −0.00167, 0.00167, −0.00167, 0.00167, −0.00167, 0.00167, −0.00166, 0.00166, 0.00166, 0.00166, 0.00166, −0.00166, 0.00166, −0.00166, −0.00166, 0.00166, −0.00166, 0.00166, −0.00166, −0.00166, −0.00165, −0.00165, −0.00165, 0.00165, −0.00165, 0.00165, −0.00165, 0.00165, −0.00165, −0.00164, 0.00164, 0.00164, −0.00164, −0.00164, −0.00164, 0.00164, 0.00164, 0.00164, −0.00163, −0.00163, −0.00163, −0.00163, −0.00163, −0.00163, 0.00163, −0.00163, −0.00162, −0.00162, 0.00162, −0.00162, 0.00162, −0.00162, −0.00162, −0.00162, 0.00162, 0.00162, −0.00162, 0.00162, −0.00161, −0.00161, 0.00161, −0.00161, −0.00161, 0.00161, −0.00161, −0.00161, −0.0016, 0.0016, 0.0016, −0.0016, −0.0016, 0.0016, 0.0016, −0.0016, 0.0016, 0.00159, −0.00159, 0.00159, −0.00159, −0.00159, −0.00159, −0.00159, −0.00159, −0.00159, −0.00158, −0.00158, −0.00158, 0.00158, −0.00158, −0.00158, −0.00158, 0.00158, −0.00158, −0.00158, 0.00157, 0.00157, 0.00157, −0.00157, 0.00157, −0.00157, −0.00157, 0.00157, −0.00157, 0.00157, −0.00156, −0.00156, −0.00156, 0.00156, −0.00155, 0.00155, −0.00155, 0.00155, −0.00155, −0.00154, 0.00154, −0.00154, −0.00154, 0.00154, 0.00154, −0.00154, 0.00154, −0.00154, −0.00154, −0.00154, 0.00154, 0.00154, −0.00154, −0.00153, −0.00153, −0.00153, −0.00153, −0.00153, 0.00153, −0.00153, 0.00153, −0.00153, 0.00153, 0.00153, 0.00153, −0.00153, 0.00153, −0.00153, 0.00153, −0.00153, −0.00152, −0.00152, −0.00152, 0.00152, 0.00152, 0.00152, 0.00152, 0.00152, 0.00152, 0.00152, −0.00152, −0.00152, 0.00152, −0.00151, −0.00151, 0.00151, −0.00151, −0.00151, −0.00151, 0.00151, 0.00151, 0.00151, −0.00151, 0.00151, −0.00151, 0.0015, −0.0015, −0.0015, 0.0015, 0.0015, 0.0015, 0.0015, 0.0015, −0.0015, −0.0015, −0.0015, 0.0015, −0.0015, 0.0015, 0.0015, −0.00149, 0.00149, 0.00149, −0.00149, 0.00149, −0.00149, −0.00149, −0.00149, 0.00149, −0.00149, 0.00149, −0.00149, −0.00148, 0.00148, 0.00148, −0.00148, −0.00148, 0.00147, −0.00147, −0.00147, 0.00147, 0.00147, 0.00147, 0.00147, −0.00147, −0.00146, −0.00146, 0.00146, −0.00146, 0.00146, 0.00146, −0.00146, −0.00146, 0.00145, 0.00145, −0.00145, 0.00145, 0.00145, −0.00144, −0.00144, 0.00144, −0.00144, 0.00144, −0.00144, 0.00144, −0.00144, 0.00144, −0.00144, 0.00144, 0.00144, −0.00143, 0.00143, 0.00143, 0.00143, −0.00143, 0.00143, −0.00143, 0.00143, −0.00143, 0.00143, 0.00143, 0.00143, 0.00143, 0.00142, 0.00142, −0.00142, −0.00142, 0.00142, 0.00142, 0.00142, −0.00142, −0.00142, 0.00142, −0.00142, −0.00142, −0.00142, 0.00142, −0.00142, 0.00141, −0.00141, 0.00141, −0.00141, 0.00141, 0.00141, −0.00141, −0.00141, 0.00141, −0.00141, 0.0014, −0.0014, −0.0014, −0.0014, −0.0014, −0.0014, −0.0014, 0.0014, −0.0014, 0.0014, −0.0014, −0.0014, 0.0014, −0.00139, −0.00139, 0.00139, −0.00139, −0.00139, 0.00139, 0.00139, −0.00138, −0.00138, 0.00138, −0.00138, 0.00138, 0.00138, −0.00138, 0.00138, −0.00138, −0.00138, 0.00138, 0.00138, 0.00138, 0.00138, −0.00138, 0.00137, −0.00137, 0.00137, 0.00137, 0.00137, 0.00137, 0.00137, 0.00137, 0.00137, 0.00137, 0.00137, −0.00137, −0.00137, −0.00136, 0.00136, −0.00136, −0.00136, −0.00136, −0.00136, −0.00136, 0.00136, −0.00136, −0.00136, −0.00136, −0.00136, 0.00136, 0.00135, 0.00135, 0.00135, 0.00135, 0.00135, −0.00135, −0.00135, −0.00135, 0.00135, 0.00135, 0.00135, −0.00135, −0.00134, −0.00134, −0.00134, −0.00134, −0.00134, −0.00134, 0.00133, 0.00133, −0.00133, 0.00133, −0.00133, −0.00133, −0.00133, 0.00133, 0.00132, 0.00132, 0.00132, 0.00132, −0.00132, 0.00132, 0.00132, 0.00132, 0.00132, −0.00132, 0.00132, −0.00132, −0.00132, 0.00132, −0.00132, 0.00132, 0.00131, 0.00131, 0.00131, 0.00131, −0.00131, 0.00131, 0.00131, 0.00131, 0.00131, −0.00131, −0.00131, −0.00131, −0.00131, 0.00131, 0.00131, 0.00131, 0.0013, −0.0013, 0.0013, −0.0013, −0.0013, 0.0013, 0.0013, −0.0013, −0.0013, −0.0013, 0.00129, −0.00129, −0.00129, −0.00129, −0.00128, −0.00128, 0.00128, −0.00128, 0.00128, −0.00128, 0.00128, −0.00128, −0.00128, −0.00128, −0.00128, −0.00128, 0.00128, 0.00127, 0.00127, 0.00127, 0.00127, −0.00127, 0.00127, 0.00126, −0.00126, 0.00126, 0.00126, 0.00126, −0.00126, 0.00126, 0.00126, −0.00126, 0.00126, 0.00126, 0.00125, 0.00125, −0.00125, 0.00125, 0.00125, 0.00125, −0.00125, 0.00125, −0.00124, −0.00124, −0.00124, 0.00124, −0.00124, −0.00124, −0.00124, 0.00124, 0.00124, −0.00124, 0.00124, −0.00124, −0.00123, −0.00123, 0.00123, 0.00123, 0.00123, 0.00123, −0.00123, −0.00123, 0.00122, −0.00122, 0.00122, −0.00122, −0.00122, 0.00122, 0.00121, 0.00121, −0.00121, 0.00121, 0.00121, −0.00121, 0.00121, 0.00121, 0.00121, 0.00121, 0.0012, 0.0012, −0.0012, 0.0012, −0.00119, 0.00119, 0.00119, −0.00119, −0.00119, 0.00119, −0.00119, 0.00119, −0.00119, −0.00119, −0.00119, −0.00118, −0.00118, −0.00118, −0.00118, 0.00118, −0.00118, −0.00118, 0.00118, 0.00117, −0.00117, 0.00117, 0.00117, 0.00117, −0.00117, −0.00117, −0.00117, −0.00117, 0.00117, −0.00117, 0.00117, 0.00117, 0.00117, −0.00116, −0.00116, 0.00116, 0.00116, −0.00116, −0.00116, 0.00116, 0.00116, 0.00116, 0.00115, −0.00115, 0.00115, −0.00115, 0.00115, 0.00115, −0.00115, 0.00115, −0.00115, 0.00115, 0.00115, 0.00115, −0.00115, −0.00114, 0.00114, −0.00114, −0.00114, 0.00114, −0.00114, 0.00114, 0.00114, 0.00113, −0.00113, 0.00113, −0.00113, −0.00113, −0.00113, −0.00113, −0.00113, 0.00113, −0.00113, −0.00113, 0.00113, −0.00113, −0.00112, 0.00112, 0.00112, −0.00112, 0.00112, −0.00112, 0.00112, −0.00112, 0.00112, −0.00112, −0.00112, 0.00111, −0.00111, 0.00111, 0.00111, −0.00111, −0.00111, 0.00111, 0.00111, −0.0011, 0.0011, −0.0011, 0.0011, 0.0011, −0.0011, −0.0011, 0.0011, −0.00109, 0.00109, 0.00109, 0.00109, −0.00109, 0.00109, −0.00109, 0.00109, −0.00109, 0.00109, −0.00109, 0.00109, 0.00109, 0.00109, 0.00109, 0.00109, 0.00108, −0.00108, −0.00108, 0.00108, 0.00108, −0.00108, −0.00108, −0.00108, −0.00108, 0.00108, 0.00108, −0.00108, −0.00107, 0.00107, 0.00107, −0.00107, 0.00107, −0.00107, −0.00107, −0.00107, −0.00107, 0.00107, −0.00107, −0.00106, 0.00106, −0.00106, 0.00106, 0.00106, −0.00106, −0.00106, 0.00106, 0.00106, −0.00106, 0.00106, −0.00106, −0.00106, −0.00105, −0.00105, −0.00105, −0.00105, −0.00105, 0.00105, −0.00105, 0.00105, −0.00105, −0.00105, −0.00105, −0.00105, −0.00104, −0.00104, 0.00104, −0.00104, 0.00104, 0.00104, −0.00104, −0.00104, 0.00104, 0.00104, −0.00104, −0.00104, 0.00104, 0.00104, −0.00104, −0.00104, 0.00103, 0.00103, −0.00103, 0.00103, 0.00103, 0.00103, 0.00103, −0.00103, −0.00103, −0.00103, 0.00103, 0.00103, −0.00103, 0.00103, −0.00103, 0.00103, 0.00102, 0.00102, −0.00102, −0.00102, 0.00102, 0.00102, 0.00102, 0.00102, −0.00101, 0.00101, −0.00101, −0.00101, −0.00101, 0.00101, 0.00101, 0.001, −0.001, −0.001, −0.001, −0.001, 0.001, 0.001, 0.001, −0.001, 0.001, 0.001, 0.001, 0.001, 0.001, −0.001, 0.001, 0.001, −0.001, 0.00099, 0.00099, 0.00099, 0.00099, −0.00099, −0.00099, −0.00099, −0.00099, −0.00099, 0.00099, 0.00099, 0.00099, 0.00099, −0.00099, −0.00099, −0.00099, −0.00099, 0.00099, −0.00098, −0.00098, −0.00098, −0.00098, 0.00098, −0.00098, 0.00098, 0.00098, −0.00098, 0.00098, 0.00098, −0.00098, 0.00098, 0.00098, 0.00097, 0.00097, −0.00097, 0.00097, −0.00097, 0.00097, −0.00097, −0.00097, 0.00097, −0.00097, 0.00097, 0.00097, 0.00096, 0.00096, −0.00096, 0.00096, 0.00096, 0.00096, −0.00095, −0.00095, −0.00095, 0.00095, 0.00095, −0.00095, 0.00095, 0.00095, 0.00095, 0.00095, 0.00094, 0.00094, 0.00094, −0.00094, −0.00094, −0.00094, −0.00094, 0.00094, −0.00093, 0.00093, −0.00093, −0.00093, 0.00093, 0.00093, 0.00093, −0.00093, −0.00093, −0.00093, 0.00093, −0.00093, 0.00093, −0.00093, −0.00093, −0.00093, −0.00093, −0.00093, 0.00093, −0.00093, −0.00092, 0.00092, 0.00092, −0.00092, 0.00092, 0.00092, 0.00092, −0.00092, −0.00092, −0.00092, −0.00092, −0.00091, −0.00091, −0.00091, 0.00091, −0.00091, 0.00091, −0.00091, 0.00091, 0.00091, 0.00091, 0.00091, −0.00091, 0.00091, 9.00E-04, −9.00E-04, −9.00E-04, −9.00E-04, 9.00E-04, 9.00E-04, 9.00E-04, −9.00E-04, −9.00E-04, 9.00E-04, −9.00E-04, 0.00089, 0.00089, 0.00089, 0.00089, 0.00089, −0.00089, 0.00089, 0.00089, −0.00089, −0.00089, −0.00089, 0.00089, −0.00089, −0.00088, −0.00088, 0.00088, −0.00088, −0.00088, 0.00088, 0.00088, −0.00088, 0.00088, −0.00088, 0.00088, 0.00088, −0.00088, 0.00088, −0.00088, −0.00088, −0.00088, 0.00088, −0.00088, 0.00087, 0.00087, −0.00087, −0.00087, −0.00087, −0.00087, −0.00087, −0.00087, 0.00087, 0.00087, 0.00087, −0.00087, 0.00087, 0.00087, 0.00086, 0.00086, 0.00086, 0.00086, −0.00086, 0.00086, −0.00086, −0.00086, 0.00085, 0.00085, 0.00085, −0.00085, −0.00085, 0.00085, 0.00085, 0.00085, −0.00085, 0.00084, −0.00084, 0.00084, −0.00084, 0.00084, 0.00084, 0.00084, 0.00084, −0.00083, −0.00083, −0.00083, 0.00083, −0.00083, 0.00083, 0.00082, 0.00082, 0.00082, 0.00082, −0.00082, 0.00082, −0.00082, 0.00082, −0.00081, 0.00081, 0.00081, −0.00081, 0.00081, −8.00E-04, 8.00E-04, −8.00E-04, −8.00E-04, 8.00E-04, 8.00E-04, 8.00E-04, 8.00E-04, −8.00E-04, 8.00E-04, 8.00E-04, 8.00E-04, 8.00E-04, 8.00E-04, −8.00E-04, −8.00E-04, 8.00E-04, 0.00079, −0.00079, −0.00079, 0.00079, −0.00079, 0.00079, 0.00079, −0.00079, −0.00079, −0.00079, 0.00079, 0.00079, −0.00079, −0.00079, 0.00078, 0.00078, 0.00078, −0.00077, 0.00077, −0.00077, −0.00077, 0.00077, 0.00077, −0.00077, −0.00077, 0.00077, −0.00077, −0.00077, −0.00076, 0.00076, 0.00076, −0.00076, −0.00076, 0.00076, −0.00076, 0.00075, −0.00075, 0.00075, −0.00075, −0.00075, −0.00075, −0.00075, 0.00075, 0.00074, −0.00074, 0.00074, 0.00074, −0.00074, 0.00074, −0.00074, −0.00074, −0.00074, 0.00074, −0.00074, −0.00074, 0.00074, 0.00073, 0.00073, −0.00073, 0.00073, −0.00073, 0.00073, −0.00073, −0.00073, 0.00073, 0.00073, −0.00073, −0.00073, 0.00073, −0.00073, 0.00073, −0.00072, 0.00072, −0.00072, −0.00072, −0.00072, 0.00072, −0.00072, 0.00072, −0.00072, 0.00072, −0.00072, 0.00072, −0.00071, −0.00071, 0.00071, 0.00071, −0.00071, −0.00071, −0.00071, −0.00071, −0.00071, −0.00071, 0.00071, 0.00071, −0.00071, 0.00071, 7.00E-04, −7.00E-04, 7.00E-04, −7.00E-04, 7.00E-04, −7.00E-04, 7.00E-04, 7.00E-04, 7.00E-04, −7.00E-04, 0.00069, −0.00069, 0.00069, 0.00069, 0.00069, 0.00069, 0.00069, 0.00069, 0.00069, 0.00069, 0.00068, 0.00068, −0.00068, −0.00068, 0.00068, 0.00068, −0.00067, −0.00067, −0.00067, 0.00067, 0.00067, 0.00067, 0.00067, 0.00067, 0.00067, −0.00066, −0.00066, −0.00066, 0.00066, 0.00066, −0.00066, 0.00066, 0.00066, 0.00066, 0.00066, −0.00066, −0.00065, −0.00065, −0.00065, 0.00065, 0.00065, 0.00065, 0.00065, 0.00065, 0.00064, −0.00064, −0.00064, 0.00064, 0.00064, 0.00064, −0.00064, 0.00064, −0.00064, −0.00064, −0.00064, −0.00063, 0.00063, −0.00063, −0.00063, −0.00063, 0.00063, −0.00063, 0.00063, 0.00063, −0.00063, −0.00063, 0.00063, 0.00063, 0.00063, 0.00063, 0.00063, 0.00062, −0.00062, −0.00062, 0.00062, −0.00062, −0.00062, −0.00062, 0.00062, 0.00061, −0.00061, −0.00061, 0.00061, 0.00061, 0.00061, 0.00061, 0.00061, 0.00061, 6.00E-04, 6.00E-04, −6.00E-04, −6.00E-04, −6.00E-04, −6.00E-04, −6.00E-04, −6.00E-04, 0.00059, −0.00059, −0.00059, −0.00059, −0.00059, −0.00059, −0.00059, 0.00059, −0.00059, −0.00059, 0.00059, −0.00059, 0.00058, 0.00058, 0.00058, 0.00058, −0.00058, −0.00058, −0.00058, 0.00058, −0.00058, 0.00058, −0.00058, −0.00057, 0.00057, −0.00057, −0.00057, −0.00057, −0.00057, 0.00057, −0.00057, −0.00057, −0.00057, 0.00057, −0.00056, −0.00056, −0.00056, −0.00056, −0.00056, 0.00056, 0.00056, 0.00056, −0.00056, 0.00056, −0.00056, −0.00055, 0.00055, 0.00055, −0.00055, −0.00055, −0.00055, −0.00055, −0.00054, −0.00054, −0.00054, −0.00054, 0.00054, 0.00054, −0.00054, −0.00054, −0.00053, −0.00053, −0.00053, 0.00053, −0.00053, 0.00053, 0.00053, 0.00053, −0.00053, −0.00053, −0.00053, −0.00053, 0.00053, −0.00053, 0.00052, 0.00052, 0.00052, 0.00052, −0.00052, 0.00052, −0.00052, 0.00051, 0.00051, 0.00051, 0.00051, 0.00051, 0.00051, −0.00051, −0.00051, 0.00051, 0.00051, −0.00051, −0.00051, 5.00E-04, −5.00E-04, 5.00E-04, −5.00E-04, −5.00E-04, −5.00E-04, 0.00049, −0.00049, 0.00049, −0.00049, −0.00049, −0.00049, 0.00049, −0.00048, −0.00048, −0.00048, 0.00048, 0.00048, 0.00048, −0.00048, −0.00048, 0.00047, 0.00047, −0.00047, −0.00047, 0.00047, 0.00047, 0.00047, −0.00047, −0.00047, −0.00047, 0.00047, −0.00047, −0.00046, 0.00046, 0.00046, −0.00046, −0.00046, −0.00045, −0.00045, 0.00045, 0.00045, 0.00045, 0.00045, −0.00045, −0.00045, 0.00045, −0.00045, 0.00044, 0.00044, −0.00044, 0.00044, 0.00044, −0.00044, −0.00044, 0.00044, −0.00044, −0.00043, −0.00043, −0.00043, −0.00043, 0.00043, 0.00043, 0.00043, −0.00043, 0.00043, −0.00043, 0.00043, −0.00043, −0.00043, 0.00042, 0.00042, 0.00042, 0.00042, −0.00042, −0.00042, 0.00042, 0.00042, −0.00042, 0.00042, −0.00042, −0.00042, −0.00042, −0.00042, −0.00042, −0.00041, −0.00041, 0.00041, 0.00041, −0.00041, 0.00041, 0.00041, −0.00041, −0.00041, 0.00041, 4.00E-04, 4.00E-04, 4.00E-04, −4.00E-04, −4.00E-04, 4.00E-04, −4.00E-04, 4.00E-04, −4.00E-04, 4.00E-04, 4.00E-04, −0.00039, 0.00039, 0.00039, 0.00039, −0.00039, 0.00039, −0.00039, 0.00039, −0.00039, −0.00039, 0.00039, −0.00039, −0.00039, −0.00038, −0.00038, 0.00038, −0.00038, −0.00038, 0.00038, 0.00038, −0.00038, 0.00038, 0.00037, −0.00037, 0.00037, 0.00037, −0.00037, 0.00037, −0.00037, −0.00037, 0.00036, 0.00036, 0.00036, −0.00036, 0.00036, 0.00036, 0.00036, −0.00036, −0.00036, 0.00036, −0.00036, 0.00036, −0.00035, 0.00035, −0.00035, 0.00035, −0.00035, −0.00035, 0.00035, −0.00035, −0.00035, 0.00035, 0.00035, 0.00035, −0.00035, −0.00035, 0.00035, 0.00035, 0.00035, 0.00034, 0.00034, 0.00034, −0.00034, 0.00034, 0.00034, 0.00034, −0.00034, −0.00034, 0.00034, −0.00034, −0.00034, 0.00034, 0.00033, −0.00033, 0.00033, 0.00033, −0.00033, 0.00033, −0.00033, 0.00033, −0.00032, −0.00032, 0.00032, 0.00032, 0.00032, −0.00032, 0.00032, 0.00032, −0.00032, −0.00032, 0.00032, −0.00032, 0.00031, 0.00031, −0.00031, 0.00031, −0.00031, −0.00031, 0.00031, 3.00E-04, −3.00E-04, −3.00E-04, 3.00E-04, 3.00E-04, 3.00E-04, 3.00E-04, −3.00E-04, −0.00029, −0.00029, 0.00029, −0.00029, 0.00028, 0.00028, 0.00028, 0.00028, −0.00028, 0.00028, −0.00028, −0.00028, −0.00028, −0.00028, 0.00028, 0.00028, −0.00028, −0.00028, −0.00027, 0.00027, 0.00027, −0.00027, −0.00027, −0.00027, −0.00027, −0.00027, −0.00027, 0.00027, 0.00027, 0.00027, 0.00027, −0.00027, 0.00027, 0.00026, −0.00026, −0.00026, 0.00026, −0.00026, −0.00026, −0.00026, −0.00026, 0.00026, −0.00026, −0.00025, −0.00025, −0.00025, −0.00025, −0.00025, −0.00025, −0.00025, −0.00025, −0.00025, −0.00025, 0.00025, 0.00025, 0.00025, 0.00024, 0.00024, −0.00024, 0.00024, 0.00024, −0.00024, 0.00024, −0.00024, −0.00024, 0.00024, −0.00024, −0.00024, 0.00024, −0.00024, 0.00023, −0.00023, −0.00023, −0.00023, −0.00023, −0.00023, −0.00023, −0.00023, 0.00023, −0.00023, 0.00023, −0.00023, −0.00023, 0.00023, 0.00022, −0.00022, 0.00022, 0.00022, −0.00022, 0.00022, −0.00022, 0.00022, 0.00022, 0.00022, 0.00022, −0.00022, −0.00021, −0.00021, −0.00021, 0.00021, 0.00021, −0.00021, 0.00021, −0.00021, −0.00021, −0.00021, 2.00E-04, 2.00E-04, −2.00E-04, 2.00E-04, −2.00E-04, −2.00E-04, 2.00E-04, −2.00E-04, 2.00E-04, 2.00E-04, −2.00E-04, 0.00019, 0.00019, −0.00019, −0.00019, 0.00019, 0.00019, 0.00019, 0.00019, 0.00019, −0.00019, 0.00019, −0.00019, 0.00019, −0.00018, −0.00018, −0.00018, −0.00018, −0.00018, −0.00018, −0.00018, −0.00018, 0.00018, 0.00018, −0.00018, −0.00018, −0.00018, −0.00018, −0.00018, −0.00017, −0.00017, −0.00017, −0.00017, −0.00017, 0.00017, 0.00017, −0.00017, 0.00016, −0.00016, −0.00016, −0.00016, 0.00016, −0.00016, −0.00016, 0.00016, −0.00016, 0.00015, 0.00015, 0.00015, 0.00015, 0.00015, −0.00015, 0.00015, −0.00015, −0.00015, 0.00014, −0.00014, −0.00014, −0.00014, 0.00014, 0.00014, −0.00013, 0.00013, 0.00013, 0.00013, −0.00013, −0.00013, 0.00013, 0.00013, −0.00013, −0.00013, −0.00012, 0.00012, −0.00012, −0.00012, 0.00012, 0.00012, −0.00012, −0.00012, 0.00012, 0.00012, −0.00012, −0.00012, −0.00011, 0.00011, 0.00011, −0.00011, −0.00011, −0.00011, 0.00011, −0.00011, −0.00011, −0.00011, −1.00E-04, −1.00E-04, −1.00E-04, 1.00E-04, 1.00E-04, 1.00E-04, 1.00E-04, 1.00E-04, 1.00E-04, −1.00E-04, −9.00E-05, −9.00E-05, 9.00E-05, −9.00E-05, 9.00E-05, −9.00E-05, −9.00E-05, −9.00E-05, 9.00E-05, 9.00E-05, 9.00E-05, −9.00E-05, 8.00E-05, −8.00E-05, 8.00E-05, 8.00E-05, 8.00E-05, 8.00E-05, −8.00E-05, 8.00E-05, 8.00E-05, 8.00E-05, 7.00E-05, 7.00E-05, 7.00E-05, −7.00E-05, 7.00E-05, −7.00E-05, 7.00E-05, 7.00E-05, 7.00E-05, −7.00E-05, −6.00E-05, −6.00E-05, 6.00E-05, −6.00E-05, 6.00E-05, 6.00E-05, 6.00E-05, −6.00E-05, 6.00E-05, 6.00E-05, 6.00E-05, −6.00E-05, 5.00E-05, −5.00E-05, 5.00E-05, 5.00E-05, 5.00E-05, −5.00E-05, −5.00E-05, −5.00E-05, 4.00E-05, −4.00E-05, 4.00E-05, 4.00E-05, −4.00E-05, −4.00E-05, 4.00E-05, −4.00E-05, −4.00E-05, 4.00E-05, −3.00E-05, −3.00E-05, −3.00E-05, 3.00E-05, −3.00E-05, −3.00E-05, −3.00E-05, 2.00E-05, 2.00E-05, −2.00E-05, 2.00E-05, 2.00E-05, 2.00E-05, 1.00E-05, −1.00E-05, 1.00E-05, 1.00E-05, 1.00E-05, −1.00E-05, 1.00E-05, −1.00E-05, −1.00E-05, −1.00E-05, 1.00E-05, 0, 0, 0, 0, and 0.

[0420] The predicting the presence, absence or development of cancer in an individual may particularly involve a threshold cancer index value being applied in order to assess or stratify an individual has having or not having cancer or of having a high or low risk of cancer development.

[0421] In any of the assays described herein, wherein when the cancer index value for the individual is about −0.278 or more, the individual is assessed as having cancer or as having a high risk of cancer development, or wherein when the cancer index value for the individual is less than about −0.278, the individual is assessed as not having cancer or as having a low risk of cancer development, preferably wherein the assay comprises determining methylation β-values for each CpG in the panel of one or more CpGs, and more preferably wherein the assessing the presence, absence or development of cancer in an individual is based on the WID-BC-Index. The panel of one or more CpGs used to derive the cancer index value may particularly comprise:
[0422] a. at least 500 of the CpGs identified at nucleotide positions 61 to 62 in SEQ ID NOs 1 to 29,000, and wherein the sensitivity is at least 63% and the specificity is at least 21%;
[0423] b. at least the CpGs defined by SEQ ID NOs 1 to 500 and identified at nucleotide positions 61 to 62, and wherein the sensitivity is at least 87% and specificity is at least 50%;
[0424] c. at least the CpGs defined by SEQ ID NOs 1 to 1000 and identified at nucleotide positions 61 to 62, and wherein the sensitivity is at least 89% and specificity is at least 49%; or
[0425] d. at least the CpGs defined by SEQ ID NOs 1 to 2000 and identified at nucleotide positions 61 to 62, and wherein the sensitivity is at least 89% and specificity is at least 48%.

[0426] In any of the assays described herein, wherein when the cancer index value for the individual is about −0.278 or more, the individual is assessed as having cancer or as having a high risk of cancer development, or wherein when the cancer index value for the individual is less than about −0.278, the individual is assessed as not having cancer or as having a low risk of cancer development, preferably wherein the assay comprises determining methylation β-values for each CpG in the panel of one or more CpGs, and more preferably wherein the assessing the presence, absence or development of cancer in an individual is based on the WID-BC-Index. The panel of one or more CpGs used to derive the cancer index value may particularly comprise:
[0427] 1. at least the CpGs defined by SEQ ID NOs 1 to 500 and identified at nucleotide positions 61 to 62, and wherein the sensitivity is at least 87% and specificity is at least 50%;
[0428] 2. at least the CpGs defined by SEQ ID NOs 501 to 100 and identified at nucleotide positions 61 to 62, and wherein the sensitivity is at least 87% and specificity is at least 50%; or
[0429] 3. at least the CpGs defined by SEQ ID NOs 1001 to 1500 and identified at nucleotide positions 61 to 62, and wherein the sensitivity is at least 85% and specificity is at least 50%;
[0430] 4. at least the CpGs defined by SEQ ID NOs 1501 to 2000 and identified at nucleotide positions 61 to 62, and wherein the sensitivity is at least 82% and specificity is at least 45%;
[0431] 5. at least the CpGs defined by SEQ ID NOs 2001 to 2500 and identified at nucleotide positions 61 to 62, and wherein the sensitivity is at least 86% and specificity is at least 49%;
[0432] 6. at least the CpGs defined by SEQ ID NOs 2501 to 3000 and identified at nucleotide positions 61 to 62, and wherein the sensitivity is at least 83% and specificity is at least 47%;
[0433] 7. at least the CpGs defined by SEQ ID NOs 3001 to 3500 and identified at nucleotide positions 61 to 62, and wherein the sensitivity is at least 82% and specificity is at least 53%;
[0434] 8. at least the CpGs defined by SEQ ID NOs 3501 to 4000 and identified at nucleotide positions 61 to 62, and wherein the sensitivity is at least 78% and specificity is at least 48%;
[0435] 9. at least the CpGs defined by SEQ ID NOs 4001 to 4500 and identified at nucleotide positions 61 to 62, and wherein the sensitivity is at least 82% and specificity is at least 48%;
[0436] 10. at least the CpGs defined by SEQ ID NOs 4501 to 5000 and identified at nucleotide positions 61 to 62, and wherein the sensitivity is at least 80% and specificity is at least 51%;
[0437] 11. at least the CpGs defined by SEQ ID NOs 5001 to 5500 and identified at nucleotide positions 61 to 62, and wherein the sensitivity is at least 87% and specificity is at least 51%;
[0438] 12. at least the CpGs defined by SEQ ID NOs 5501 to 6000 and identified at nucleotide positions 61 to 62, and wherein the sensitivity is at least 75% and specificity is at least 51%;
[0439] 13. at least the CpGs defined by SEQ ID NOs 6001 to 6500 and identified at nucleotide positions 61 to 62, and wherein the sensitivity is at least 77% and specificity is at least 50%;
[0440] 14. at least the CpGs defined by SEQ ID NOs 6501 to 7000 and identified at nucleotide positions 61 to 62, and wherein the sensitivity is at least 77% and specificity is at least 49%;
[0441] 15. at least the CpGs defined by SEQ ID NOs 7001 to 7500 and identified at nucleotide positions 61 to 62, and wherein the sensitivity is at least 80% and specificity is at least 51%;
[0442] 16. at least the CpGs defined by SEQ ID NOs 7501 to 8000 and identified at nucleotide positions 61 to 62, and wherein the sensitivity is at least 77% and specificity is at least 49%;
[0443] 17. at least the CpGs defined by SEQ ID NOs 8001 to 8500 and identified at nucleotide positions 61 to 62, and wherein the sensitivity is at least 79% and specificity is at least 50%;
[0444] 18. at least the CpGs defined by SEQ ID NOs 8501 to 9000 and identified at nucleotide positions 61 to 62, and wherein the sensitivity is at least 79% and specificity is at least 51%;
[0445] 19. at least the CpGs defined by SEQ ID NOs 9001 to 9500 and identified at nucleotide positions 61 to 62, and wherein the sensitivity is at least 78% and specificity is at least 54%;
[0446] 20. at least the CpGs defined by SEQ ID NOs 9501 to 10000 and identified at nucleotide positions 61 to 62, and wherein the sensitivity is at least 71% and specificity is at least 52%;
[0447] 21. at least the CpGs defined by SEQ ID NOs 10001 to 10500 and identified at nucleotide positions 61 to 62, and wherein the sensitivity is at least 71% and specificity is at least 53%;
[0448] 22. at least the CpGs defined by SEQ ID NOs 10501 to 11000 and identified at nucleotide positions 61 to 62, and wherein the sensitivity is at least 73% and specificity is at least 52%;
[0449] 23. at least the CpGs defined by SEQ ID NOs 11001 to 11500 and identified at nucleotide positions 61 to 62, and wherein the sensitivity is at least 69% and specificity is at least 54%;
[0450] 24. at least the CpGs defined by SEQ ID NOs 11501 to 12000 and identified at nucleotide positions 61 to 62, and wherein the sensitivity is at least 64% and specificity is at least 54%;
[0451] 25. at least the CpGs defined by SEQ ID NOs 12001 to 12500 and identified at nucleotide positions 61 to 62, and wherein the sensitivity is at least 70% and specificity is at least 50%;
[0452] 26. at least the CpGs defined by SEQ ID NOs 12501 to 13000 and identified at nucleotide positions 61 to 62, and wherein the sensitivity is at least 66% and specificity is at least 55%;
[0453] 27. at least the CpGs defined by SEQ ID NOs 13001 to 13500 and identified at nucleotide positions 61 to 62, and wherein the sensitivity is at least 72% and specificity is at least 55%;
[0454] 28. at least the CpGs defined by SEQ ID NOs 13501 to 14000 and identified at nucleotide positions 61 to 62, and wherein the sensitivity is at least 69% and specificity is at least 52%;
[0455] 29. at least the CpGs defined by SEQ ID NOs 14001 to 14500 and identified at nucleotide positions 61 to 62, and wherein the sensitivity is at least 64% and specificity is at least 55%;
[0456] 30. at least the CpGs defined by SEQ ID NOs 14501 to 15000 and identified at nucleotide positions 61 to 62, and wherein the sensitivity is at least 62% and specificity is at least 54%;
[0457] 31. at least the CpGs defined by SEQ ID NOs 15001 to 15500 and identified at nucleotide positions 61 to 62, and wherein the sensitivity is at least 75% and specificity is at least 52%;
[0458] 32. at least the CpGs defined by SEQ ID NOs 15501 to 16000 and identified at nucleotide positions 61 to 62, and wherein the sensitivity is at least 56% and specificity is at least 24%;
[0459] 33. at least the CpGs defined by SEQ ID NOs 16001 to 16500 and identified at nucleotide positions 61 to 62, and wherein the sensitivity is at least 62% and specificity is at least 25%;
[0460] 34. at least the CpGs defined by SEQ ID NOs 16501 to 17000 and identified at nucleotide positions 61 to 62, and wherein the sensitivity is at least 58% and specificity is at least 23%;
[0461] 35. at least the CpGs defined by SEQ ID NOs 17001 to 17500 and identified at nucleotide positions 61 to 62, and wherein the sensitivity is at least 66% and specificity is at least 23%;
[0462] 36. at least the CpGs defined by SEQ ID NOs 17501 to 18000 and identified at nucleotide positions 61 to 62, and wherein the sensitivity is at least 59% and specificity is at least 24%;
[0463] 37. at least the CpGs defined by SEQ ID NOs 18001 to 18500 and identified at nucleotide positions 61 to 62, and wherein the sensitivity is at least 65% and specificity is at least 23%;
[0464] 38. at least the CpGs defined by SEQ ID NOs 18501 to 19000 and identified at nucleotide positions 61 to 62, and wherein the sensitivity is at least 62% and specificity is at least 22%;
[0465] 39. at least the CpGs defined by SEQ ID NOs 19001 to 19500 and identified at nucleotide positions 61 to 62, and wherein the sensitivity is at least 61% and specificity is at least 23%;
[0466] 40. at least the CpGs defined by SEQ ID NOs 19501 to 20000 and identified at nucleotide positions 61 to 62, and wherein the sensitivity is at least 60% and specificity is at least 22%;
[0467] 41. at least the CpGs defined by SEQ ID NOs 20001 to 20500 and identified at nucleotide positions 61 to 62, and wherein the sensitivity is at least 62% and specificity is at least 21%;
[0468] 42. at least the CpGs defined by SEQ ID NOs 20501 to 21000 and identified at nucleotide positions 61 to 62, and wherein the sensitivity is at least 62% and specificity is at least 25%;
[0469] 43. at least the CpGs defined by SEQ ID NOs 21001 to 21500 and identified at nucleotide positions 61 to 62, and wherein the sensitivity is at least 62% and specificity is at least 21%;
[0470] 44. at least the CpGs defined by SEQ ID NOs 21501 to 22000 and identified at nucleotide positions 61 to 62, and wherein the sensitivity is at least 62% and specificity is at least 22%;
[0471] 45. at least the CpGs defined by SEQ ID NOs 22001 to 22500 and identified at nucleotide positions 61 to 62, and wherein the sensitivity is at least 58% and specificity is at least 22%;
[0472] 46. at least the CpGs defined by SEQ ID NOs 22501 to 23000 and identified at nucleotide positions 61 to 62, and wherein the sensitivity is at least 62% and specificity is at least 24%;
[0473] 47. at least the CpGs defined by SEQ ID NOs 23001 to 23500 and identified at nucleotide positions 61 to 62, and wherein the sensitivity is at least 64% and specificity is at least 21%;
[0474] 48. at least the CpGs defined by SEQ ID NOs 23501 to 24000 and identified at nucleotide positions 61 to 62, and wherein the sensitivity is at least 63% and specificity is at least 23%;
[0475] 49. at least the CpGs defined by SEQ ID NOs 24001 to 24500 and identified at nucleotide positions 61 to 62, and wherein the sensitivity is at least 62% and specificity is at least 22%;
[0476] 50. at least the CpGs defined by SEQ ID NOs 24501 to 25000 and identified at nucleotide positions 61 to 62, and wherein the sensitivity is at least 69% and specificity is at least 24%;
[0477] 51. at least the CpGs defined by SEQ ID NOs 25001 to 25500 and identified at nucleotide positions 61 to 62, and wherein the sensitivity is at least 63% and specificity is at least 19%;
[0478] 52. at least the CpGs defined by SEQ ID NOs 25501 to 26000 and identified at nucleotide positions 61 to 62, and wherein the sensitivity is at least 62% and specificity is at least 23%;
[0479] 53. at least the CpGs defined by SEQ ID NOs 26001 to 26500 and identified at nucleotide positions 61 to 62, and wherein the sensitivity is at least 66% and specificity is at least 24%;
[0480] 54. at least the CpGs defined by SEQ ID NOs 26501 to 27000 and identified at nucleotide positions 61 to 62, and wherein the sensitivity is at least 62% and specificity is at least 23%;
[0481] 55. at least the CpGs defined by SEQ ID NOs 27001 to 27500 and identified at nucleotide positions 61 to 62, and wherein the sensitivity is at least 68% and specificity is at least 22%;
[0482] 56. at least the CpGs defined by SEQ ID NOs 27501 to 28000 and identified at nucleotide positions 61 to 62, and wherein the sensitivity is at least 63% and specificity is at least 23%;
[0483] 57. at least the CpGs defined by SEQ ID NOs 28001 to 28500 and identified at nucleotide positions 61 to 62, and wherein the sensitivity is at least 65% and specificity is at least 21%;
[0484] 58. at least the CpGs defined by SEQ ID NOs 28501 to 29000 and identified at nucleotide positions 61 to 62, and wherein the sensitivity is at least 63% and specificity is at least 21%;
[0485] 59. at least the CpGs defined by SEQ ID NOs 1 to 100 and identified at nucleotide positions 61 to 62, and wherein the sensitivity is at least 84% and specificity is at least 44%;
[0486] 60. at least the CpGs defined by SEQ ID NOs 1 to 500 and identified at nucleotide positions 61 to 62, and wherein the sensitivity is at least 87% and specificity is at least 50%;
[0487] 61. at least the CpGs defined by SEQ ID NOs 1 to 1000 and identified at nucleotide positions 61 to 62, and wherein the sensitivity is at least 89% and specificity is at least 49%;
[0488] 62. at least the CpGs defined by SEQ ID NOs 1 to 2000 and identified at nucleotide positions 61 to 62, and wherein the sensitivity is at least 89% and specificity is at least 48%;
[0489] 63. at least the CpGs defined by SEQ ID NOs 1 to 3000 and identified at nucleotide positions 61 to 62, and wherein the sensitivity is at least 92% and specificity is at least 49%;
[0490] 64. at least the CpGs defined by SEQ ID NOs 1 to 4000 and identified at nucleotide positions 61 to 62, and wherein the sensitivity is at least 92% and specificity is at least 49%;
[0491] 65. at least the CpGs defined by SEQ ID NOs 1 to 5000 and identified at nucleotide positions 61 to 62, and wherein the sensitivity is at least 93% and specificity is at least 50%;
[0492] 66. at least the CpGs defined by SEQ ID NOs 1 to 6000 and identified at nucleotide positions 61 to 62, and wherein the sensitivity is at least 93% and specificity is at least 51%;
[0493] 67. at least the CpGs defined by SEQ ID NOs 1 to 7000 and identified at nucleotide positions 61 to 62, and wherein the sensitivity is at least 93% and specificity is at least 50%;
[0494] 68. at least the CpGs defined by SEQ ID NOs 1 to 8000 and identified at nucleotide positions 61 to 62, and wherein the sensitivity is at least 93% and specificity is at least 49%;
[0495] 69. at least the CpGs defined by SEQ ID NOs 1 to 9000 and identified at nucleotide positions 61 to 62, and wherein the sensitivity is at least 93% and specificity is at least 50%;
[0496] 70. at least the CpGs defined by SEQ ID NOs 1 to 10000 and identified at nucleotide positions 61 to 62, and wherein the sensitivity is at least 93% and specificity is at least 49%;
[0497] 71. at least the CpGs defined by SEQ ID NOs 1 to 11000 and identified at nucleotide positions 61 to 62, and wherein the sensitivity is at least 93% and specificity is at least 50%;
[0498] 72. at least the CpGs defined by SEQ ID NOs 1 to 12000 and identified at nucleotide positions 61 to 62, and wherein the sensitivity is at least 93% and specificity is at least 48%;
[0499] 73. at least the CpGs defined by SEQ ID NOs 1 to 13000 and identified at nucleotide positions 61 to 62, and wherein the sensitivity is at least 94% and specificity is at least 48%;
[0500] 74. at least the CpGs defined by SEQ ID NOs 1 to 14000 and identified at nucleotide positions 61 to 62, and wherein the sensitivity is at least 93% and specificity is at least 49%;
[0501] 75. at least the CpGs defined by SEQ ID NOs 1 to 15000 and identified at nucleotide positions 61 to 62, and wherein the sensitivity is at least 94% and specificity is at least 48%;
[0502] 76. at least the CpGs defined by SEQ ID NOs 1 to 16000 and identified at nucleotide positions 61 to 62, and wherein the sensitivity is at least 94% and specificity is at least 49%;
[0503] 77. at least the CpGs defined by SEQ ID NOs 1 to 17000 and identified at nucleotide positions 61 to 62, and wherein the sensitivity is at least 94% and specificity is at least 48%;
[0504] 78. at least the CpGs defined by SEQ ID NOs 1 to 18000 and identified at nucleotide positions 61 to 62, and wherein the sensitivity is at least 94% and specificity is at least 49%;
[0505] 79. at least the CpGs defined by SEQ ID NOs 1 to 19000 and identified at nucleotide positions 61 to 62, and wherein the sensitivity is at least 94% and specificity is at least 49%;
[0506] 80. at least the CpGs defined by SEQ ID NOs 1 to 20000 and identified at nucleotide positions 61 to 62, and wherein the sensitivity is at least 94% and specificity is at least 49%;
[0507] 81. at least the CpGs defined by SEQ ID NOs 1 to 21000 and identified at nucleotide positions 61 to 62, and wherein the sensitivity is at least 94% and specificity is at least 49%;
[0508] 82. at least the CpGs defined by SEQ ID NOs 1 to 22000 and identified at nucleotide positions 61 to 62, and wherein the sensitivity is at least 94% and specificity is at least 49%;
[0509] 83. at least the CpGs defined by SEQ ID NOs 1 to 23000 and identified at nucleotide positions 61 to 62, and wherein the sensitivity is at least 94% and specificity is at least 49%;
[0510] 84. at least the CpGs defined by SEQ ID NOs 1 to 24000 and identified at nucleotide positions 61 to 62, and wherein the sensitivity is at least 94% and specificity is at least 49%;
[0511] 85. at least the CpGs defined by SEQ ID NOs 1 to 25000 and identified at nucleotide positions 61 to 62, and wherein the sensitivity is at least 94% and specificity is at least 49%;
[0512] 86. at least the CpGs defined by SEQ ID NOs 1 to 26000 and identified at nucleotide positions 61 to 62, and wherein the sensitivity is at least 94% and specificity is at least 49%;
[0513] 87. at least the CpGs defined by SEQ ID NOs 1 to 27000 and identified at nucleotide positions 61 to 62, and wherein the sensitivity is at least 94% and specificity is at least 49%;
[0514] 88. at least the CpGs defined by SEQ ID NOs 1 to 28000 and identified at nucleotide positions 61 to 62, and wherein the sensitivity is at least 94% and specificity is at least 49%;
[0515] 89. at least the CpGs defined by SEQ ID NOs 1 to 29000 and identified at nucleotide positions 61 to 62, and wherein the sensitivity is at least 94% and specificity is at least 50%;
[0516] 90. at least the CpGs defined by SEQ ID NOs 28,001 to 29,000 and identified at nucleotide positions 61 to 62, and wherein the sensitivity is at least 62% and specificity is at least 54%;
[0517] 91. at least the CpGs defined by SEQ ID NOs 27,001 to 29,000 and identified at nucleotide positions 61 to 62, and wherein the sensitivity is at least 64% and specificity is at least 52%;
[0518] 92. at least the CpGs defined by SEQ ID NOs 26,001 to 29,000 and identified at nucleotide positions 61 to 62, and wherein the sensitivity is at least 62% and specificity is at least 52%;
[0519] 93. at least the CpGs defined by SEQ ID NOs 25,001 to 29,000 and identified at nucleotide positions 61 to 62, and wherein the sensitivity is at least 62% and specificity is at least 51%;
[0520] 94. at least the CpGs defined by SEQ ID NOs 24,001 to 29,000 and identified at nucleotide positions 61 to 62, and wherein the sensitivity is at least 62% and specificity is at least 52%;
[0521] 95. at least the CpGs defined by SEQ ID NOs 23,001 to 29,000 and identified at nucleotide positions 61 to 62, and wherein the sensitivity is at least 64% and specificity is at least 51%;
[0522] 96. at least the CpGs defined by SEQ ID NOs 22,001 to 29,000 and identified at nucleotide positions 61 to 62, and wherein the sensitivity is at least 63% and specificity is at least 51%;
[0523] 97. at least the CpGs defined by SEQ ID NOs 21,001 to 29,000 and identified at nucleotide positions 61 to 62, and wherein the sensitivity is at least 63% and specificity is at least 51%;
[0524] 98. at least the CpGs defined by SEQ ID NOs 20,001 to 29,000 and identified at nucleotide positions 61 to 62, and wherein the sensitivity is at least 64% and specificity is at least 52%;
[0525] 99. at least the CpGs defined by SEQ ID NOs 19,001 to 29,000 and identified at nucleotide positions 61 to 62, and wherein the sensitivity is at least 62% and specificity is at least 53%;
[0526] 100. at least the CpGs defined by SEQ ID NOs 18,001 to 29,000 and identified at nucleotide positions 61 to 62, and wherein the sensitivity is at least 62% and specificity is at least 53%;
[0527] 101. at least the CpGs defined by SEQ ID NOs 17,001 to 29,000 and identified at nucleotide positions 61 to 62, and wherein the sensitivity is at least 63% and specificity is at least 53%;
[0528] 102. at least the CpGs defined by SEQ ID NOs 16,001 to 29,000 and identified at nucleotide positions 61 to 62, and wherein the sensitivity is at least 64% and specificity is at least 54%;
[0529] 103. at least the CpGs defined by SEQ ID NOs 15,001 to 29,000 and identified at nucleotide positions 61 to 62, and wherein the sensitivity is at least 63% and specificity is at least 53%;
[0530] 104. at least the CpGs defined by SEQ ID NOs 14,001 to 29,000 and identified at nucleotide positions 61 to 62, and wherein the sensitivity is at least 63% and specificity is at least 53%;
[0531] 105. at least the CpGs defined by SEQ ID NOs 13,001 to 29,000 and identified at nucleotide positions 61 to 62, and wherein the sensitivity is at least 63% and specificity is at least 53%;
[0532] 106. at least the CpGs defined by SEQ ID NOs 12,001 to 29,000 and identified at nucleotide positions 61 to 62, and wherein the sensitivity is at least 63% and specificity is at least 53%;
[0533] 107. at least the CpGs defined by SEQ ID NOs 11,001 to 29,000 and identified at nucleotide positions 61 to 62, and wherein the sensitivity is at least 63% and specificity is at least 53%;
[0534] 108. at least the CpGs defined by SEQ ID NOs 10,001 to 29,000 and identified at nucleotide positions 61 to 62, and wherein the sensitivity is at least 65% and specificity is at least 52%;
[0535] 109. at least the CpGs defined by SEQ ID NOs 9,001 to 29,000 and identified at nucleotide positions 61 to 62, and wherein the sensitivity is at least 64% and specificity is at least 52%;
[0536] 110. at least the CpGs defined by SEQ ID NOs 8,001 to 29,000 and identified at nucleotide positions 61 to 62, and wherein the sensitivity is at least 71% and specificity is at least 53%;
[0537] 111. at least the CpGs defined by SEQ ID NOs 7,001 to 29,000 and identified at nucleotide positions 61 to 62, and wherein the sensitivity is at least 65% and specificity is at least 52%;
[0538] 112. at least the CpGs defined by SEQ ID NOs 6,001 to 29,000 and identified at nucleotide positions 61 to 62, and wherein the sensitivity is at least 71% and specificity is at least 53%;
[0539] 113. at least the CpGs defined by SEQ ID NOs 5,001 to 29,000 and identified at nucleotide positions 61 to 62, and wherein the sensitivity is at least 78% and specificity is at least 53%;
[0540] 114. at least the CpGs defined by SEQ ID NOs 4,001 to 29,000 and identified at nucleotide positions 61 to 62, and wherein the sensitivity is at least 79% and specificity is at least 53%;
[0541] 115. at least the CpGs defined by SEQ ID NOs 3,001 to 29,000 and identified at nucleotide positions 61 to 62, and wherein the sensitivity is at least 83% and specificity is at least 53%;
[0542] 116. at least the CpGs defined by SEQ ID NOs 2,001 to 29,000 and identified at nucleotide positions 61 to 62, and wherein the sensitivity is at least 86% and specificity is at least 53%;
[0543] 117. at least the CpGs defined by SEQ ID NOs 1,001 to 29,000 and identified at nucleotide positions 61 to 62, and wherein the sensitivity is at least 89% and specificity is at least 52%;
[0544] 118. at least the CpGs defined by SEQ ID NOs 501 to 29,000 and identified at nucleotide positions 61 to 62, and wherein the sensitivity is at least 93% and specificity is at least 52%;
[0545] 119. at least the CpGs defined by SEQ ID NOs 101 to 29,000 and identified at nucleotide positions 61 to 62, and wherein the sensitivity is at least 94% and specificity is at least 51%; or
[0546] 120. at least the CpGs defined by SEQ ID NOs 1 to 29,000 and identified at nucleotide positions 61 to 62, and wherein the sensitivity is at least 94% and specificity is at least 50%.

[0547] In any of the described assays, the methylation status of the one or more CpGs in the panel is preferably determined by a β-value analysis, and the cancer is breast cancer or ovarian cancer. Preferably, the cancer is breast cancer.

[0548] In any of the assays described herein, wherein when the cancer index value for the individual is about 0.126 or more, the individual is assessed as having cancer or as having a high risk of cancer development, or wherein when the cancer index value for the individual is less than about 0.126, the individual is assessed as not having cancer or as having a low risk of cancer development, preferably wherein the assay comprises determining methylation β-values for each CpG in the panel of one or more CpGs, and more preferably wherein the assessing the presence, absence or development of cancer in an individual is based on the WID-BC-Index. The panel of one or more CpGs used to derive the cancer index value may particularly comprise:
[0549] a. at least 500 of the CpGs identified at nucleotide positions 61 to 62 in SEQ ID NOs 1 to 29,000, and wherein the sensitivity is at least 48% and the specificity is at least 39%;
[0550] b. at least the CpGs defined by SEQ ID NOs 1 to 500 and identified at nucleotide positions 61 to 62, and wherein the sensitivity is at least 70% and specificity is at least 72%;
[0551] c. at least the CpGs defined by SEQ ID NOs 1 to 1000 and identified at nucleotide positions 61 to 62, and wherein the sensitivity is at least 70% and specificity is at least 78%;
[0552] d. at least the CpGs defined by SEQ ID NOs 1 to 2000 and identified at nucleotide positions 61 to 62, and wherein the sensitivity is at least 74% and specificity is at least 78%.

[0553] In any of the assays described herein, wherein when the cancer index value for the individual is about 0.126 or more, the individual is assessed as having cancer or as having a high risk of cancer development, or wherein when the cancer index value for the individual is less than about 0.126, the individual is assessed as not having cancer or as having a low risk of cancer development, preferably wherein the assay comprises determining methylation β-values for each CpG in the panel of one or more CpGs, and more preferably wherein the assessing the presence, absence or development of cancer in an individual is based on the WID-BC-Index. The panel of one or more CpGs used to derive the cancer index value may particularly comprise:
[0554] 1. at least the CpGs defined by SEQ ID NOs 1 to 500 and identified at nucleotide positions 61 to 62, and wherein the sensitivity is at least 70% and specificity is at least 72%;
[0555] 2. at least the CpGs defined by SEQ ID NOs 501 to 100 and identified at nucleotide positions 61 to 62, and wherein the sensitivity is at least 71% and specificity is at least 74%; or
[0556] 3. at least the CpGs defined by SEQ ID NOs 1001 to 1500 and identified at nucleotide positions 61 to 62, and wherein the sensitivity is at least 67% and specificity is at least 74%;
[0557] 4. at least the CpGs defined by SEQ ID NOs 1501 to 2000 and identified at nucleotide positions 61 to 62, and wherein the sensitivity is at least 68% and specificity is at least 68%;
[0558] 5. at least the CpGs defined by SEQ ID NOs 2001 to 2500 and identified at nucleotide positions 61 to 62, and wherein the sensitivity is at least 71% and specificity is at least 72%;
[0559] 6. at least the CpGs defined by SEQ ID NOs 2501 to 3000 and identified at nucleotide positions 61 to 62, and wherein the sensitivity is at least 61% and specificity is at least 71%;
[0560] 7. at least the CpGs defined by SEQ ID NOs 3001 to 3500 and identified at nucleotide positions 61 to 62, and wherein the sensitivity is at least 64% and specificity is at least 75%;
[0561] 8. at least the CpGs defined by SEQ ID NOs 3501 to 4000 and identified at nucleotide positions 61 to 62, and wherein the sensitivity is at least 56% and specificity is at least 70%;
[0562] 9. at least the CpGs defined by SEQ ID NOs 4001 to 4500 and identified at nucleotide positions 61 to 62, and wherein the sensitivity is at least 61% and specificity is at least 69%;
[0563] 10. at least the CpGs defined by SEQ ID NOs 4501 to 5000 and identified at nucleotide positions 61 to 62, and wherein the sensitivity is at least 66% and specificity is at least 72%;
[0564] 11. at least the CpGs defined by SEQ ID NOs 5001 to 5500 and identified at nucleotide positions 61 to 62, and wherein the sensitivity is at least 74% and specificity is at least 69%;
[0565] 12. at least the CpGs defined by SEQ ID NOs 5501 to 6000 and identified at nucleotide positions 61 to 62, and wherein the sensitivity is at least 62% and specificity is at least 71%;
[0566] 13. at least the CpGs defined by SEQ ID NOs 6001 to 6500 and identified at nucleotide positions 61 to 62, and wherein the sensitivity is at least 57% and specificity is at least 69%;
[0567] 14. at least the CpGs defined by SEQ ID NOs 6501 to 7000 and identified at nucleotide positions 61 to 62, and wherein the sensitivity is at least 65% and specificity is at least 69%;
[0568] 15. at least the CpGs defined by SEQ ID NOs 7001 to 7500 and identified at nucleotide positions 61 to 62, and wherein the sensitivity is at least 55% and specificity is at least 69%;
[0569] 16. at least the CpGs defined by SEQ ID NOs 7501 to 8000 and identified at nucleotide positions 61 to 62, and wherein the sensitivity is at least 59% and specificity is at least 68%;
[0570] 17. at least the CpGs defined by SEQ ID NOs 8001 to 8500 and identified at nucleotide positions 61 to 62, and wherein the sensitivity is at least 62% and specificity is at least 70%;
[0571] 18. at least the CpGs defined by SEQ ID NOs 8501 to 9000 and identified at nucleotide positions 61 to 62, and wherein the sensitivity is at least 59% and specificity is at least 73%;
[0572] 19. at least the CpGs defined by SEQ ID NOs 9001 to 9500 and identified at nucleotide positions 61 to 62, and wherein the sensitivity is at least 59% and specificity is at least 71%;
[0573] 20. at least the CpGs defined by SEQ ID NOs 9501 to 10000 and identified at nucleotide positions 61 to 62, and wherein the sensitivity is at least 54% and specificity is at least 71%;
[0574] 21. at least the CpGs defined by SEQ ID NOs 10001 to 10500 and identified at nucleotide positions 61 to 62, and wherein the sensitivity is at least 52% and specificity is at least 72%;
[0575] 22. at least the CpGs defined by SEQ ID NOs 10501 to 11000 and identified at nucleotide positions 61 to 62, and wherein the sensitivity is at least 54% and specificity is at least 72%;
[0576] 23. at least the CpGs defined by SEQ ID NOs 11001 to 11500 and identified at nucleotide positions 61 to 62, and wherein the sensitivity is at least 55% and specificity is at least 69%;
[0577] 24. at least the CpGs defined by SEQ ID NOs 11501 to 12000 and identified at nucleotide positions 61 to 62, and wherein the sensitivity is at least 48% and specificity is at least 70%;
[0578] 25. at least the CpGs defined by SEQ ID NOs 12001 to 12500 and identified at nucleotide positions 61 to 62, and wherein the sensitivity is at least 54% and specificity is at least 68%;
[0579] 26. at least the CpGs defined by SEQ ID NOs 12501 to 13000 and identified at nucleotide positions 61 to 62, and wherein the sensitivity is at least 51% and specificity is at least 72%;
[0580] 27. at least the CpGs defined by SEQ ID NOs 13001 to 13500 and identified at nucleotide positions 61 to 62, and wherein the sensitivity is at least 55% and specificity is at least 72%;
[0581] 28. at least the CpGs defined by SEQ ID NOs 13501 to 14000 and identified at nucleotide positions 61 to 62, and wherein the sensitivity is at least 50% and specificity is at least 73%;
[0582] 29. at least the CpGs defined by SEQ ID NOs 14001 to 14500 and identified at nucleotide positions 61 to 62, and wherein the sensitivity is at least 48% and specificity is at least 73%;
[0583] 30. at least the CpGs defined by SEQ ID NOs 14501 to 15000 and identified at nucleotide positions 61 to 62, and wherein the sensitivity is at least 38% and specificity is at least 73%;
[0584] 31. at least the CpGs defined by SEQ ID NOs 15001 to 15500 and identified at nucleotide positions 61 to 62, and wherein the sensitivity is at least 54% and specificity is at least 71%;
[0585] 32. at least the CpGs defined by SEQ ID NOs 15501 to 16000 and identified at nucleotide positions 61 to 62, and wherein the sensitivity is at least 46% and specificity is at least 39%;
[0586] 33. at least the CpGs defined by SEQ ID NOs 16001 to 16500 and identified at nucleotide positions 61 to 62, and wherein the sensitivity is at least 44% and specificity is at least 40%;
[0587] 34. at least the CpGs defined by SEQ ID NOs 16501 to 17000 and identified at nucleotide positions 61 to 62, and wherein the sensitivity is at least 38% and specificity is at least 40%;
[0588] 35. at least the CpGs defined by SEQ ID NOs 17001 to 17500 and identified at nucleotide positions 61 to 62, and wherein the sensitivity is at least 46% and specificity is at least 38%;
[0589] 36. at least the CpGs defined by SEQ ID NOs 17501 to 18000 and identified at nucleotide positions 61 to 62, and wherein the sensitivity is at least 42% and specificity is at least 38%;
[0590] 37. at least the CpGs defined by SEQ ID NOs 18001 to 18500 and identified at nucleotide positions 61 to 62, and wherein the sensitivity is at least 44% and specificity is at least 39%;
[0591] 38. at least the CpGs defined by SEQ ID NOs 18501 to 19000 and identified at nucleotide positions 61 to 62, and wherein the sensitivity is at least 45% and specificity is at least 41%;
[0592] 39. at least the CpGs defined by SEQ ID NOs 19001 to 19500 and identified at nucleotide positions 61 to 62, and wherein the sensitivity is at least 48% and specificity is at least 38%;
[0593] 40. at least the CpGs defined by SEQ ID NOs 19501 to 20000 and identified at nucleotide positions 61 to 62, and wherein the sensitivity is at least 46% and specificity is at least 41%;
[0594] 41. at least the CpGs defined by SEQ ID NOs 20001 to 20500 and identified at nucleotide positions 61 to 62, and wherein the sensitivity is at least 41% and specificity is at least 40%;
[0595] 42. at least the CpGs defined by SEQ ID NOs 20501 to 21000 and identified at nucleotide positions 61 to 62, and wherein the sensitivity is at least 46% and specificity is at least 42%;
[0596] 43. at least the CpGs defined by SEQ ID NOs 21001 to 21500 and identified at nucleotide positions 61 to 62, and wherein the sensitivity is at least 46% and specificity is at least 39%;
[0597] 44. at least the CpGs defined by SEQ ID NOs 21501 to 22000 and identified at nucleotide positions 61 to 62, and wherein the sensitivity is at least 43% and specificity is at least 39%;
[0598] 45. at least the CpGs defined by SEQ ID NOs 22001 to 22500 and identified at nucleotide positions 61 to 62, and wherein the sensitivity is at least 38% and specificity is at least 41%;
[0599] 46. at least the CpGs defined by SEQ ID NOs 22501 to 23000 and identified at nucleotide positions 61 to 62, and wherein the sensitivity is at least 45% and specificity is at least 39%;
[0600] 47. at least the CpGs defined by SEQ ID NOs 23001 to 23500 and identified at nucleotide positions 61 to 62, and wherein the sensitivity is at least 47% and specificity is at least 40%;
[0601] 48. at least the CpGs defined by SEQ ID NOs 23501 to 24000 and identified at nucleotide positions 61 to 62, and wherein the sensitivity is at least 50% and specificity is at least 37%;
[0602] 49. at least the CpGs defined by SEQ ID NOs 24001 to 24500 and identified at nucleotide positions 61 to 62, and wherein the sensitivity is at least 42% and specificity is at least 39%;
[0603] 50. at least the CpGs defined by SEQ ID NOs 24501 to 25000 and identified at nucleotide positions 61 to 62, and wherein the sensitivity is at least 50% and specificity is at least 37%;
[0604] 51. at least the CpGs defined by SEQ ID NOs 25001 to 25500 and identified at nucleotide positions 61 to 62, and wherein the sensitivity is at least 46% and specificity is at least 40%;
[0605] 52. at least the CpGs defined by SEQ ID NOs 25501 to 26000 and identified at nucleotide positions 61 to 62, and wherein the sensitivity is at least 45% and specificity is at least 44%;
[0606] 53. at least the CpGs defined by SEQ ID NOs 26001 to 26500 and identified at nucleotide positions 61 to 62, and wherein the sensitivity is at least 50% and specificity is at least 41%;
[0607] 54. at least the CpGs defined by SEQ ID NOs 26501 to 27000 and identified at nucleotide positions 61 to 62, and wherein the sensitivity is at least 44% and specificity is at least 39%;
[0608] 55. at least the CpGs defined by SEQ ID NOs 27001 to 27500 and identified at nucleotide positions 61 to 62, and wherein the sensitivity is at least 48% and specificity is at least 45%;
[0609] 56. at least the CpGs defined by SEQ ID NOs 27501 to 28000 and identified at nucleotide positions 61 to 62, and wherein the sensitivity is at least 44% and specificity is at least 40%;
[0610] 57. at least the CpGs defined by SEQ ID NOs 28001 to 28500 and identified at nucleotide positions 61 to 62, and wherein the sensitivity is at least 48% and specificity is at least 40%;
[0611] 58. at least the CpGs defined by SEQ ID NOs 28501 to 29000 and identified at nucleotide positions 61 to 62, and wherein the sensitivity is at least 48% and specificity is at least 39%;
[0612] 59. least the CpGs defined by SEQ ID NOs 1 to 100 and identified at nucleotide positions 61 to 62, and wherein the sensitivity is at least 66% and specificity is at least 64%;
[0613] 60. at least the CpGs defined by SEQ ID NOs 1 to 500 and identified at nucleotide positions 61 to 62, and wherein the sensitivity is at least 70% and specificity is at least 72%;
[0614] 61. at least the CpGs defined by SEQ ID NOs 1 to 1000 and identified at nucleotide positions 61 to 62, and wherein the sensitivity is at least 70% and specificity is at least 78%;
[0615] 62. at least the CpGs defined by SEQ ID NOs 1 to 2000 and identified at nucleotide positions 61 to 62, and wherein the sensitivity is at least 74% and specificity is at least 78%;
[0616] 63. at least the CpGs defined by SEQ ID NOs 1 to 3000 and identified at nucleotide positions 61 to 62, and wherein the sensitivity is at least 75% and specificity is at least 77%;
[0617] 64. at least the CpGs defined by SEQ ID NOs 1 to 4000 and identified at nucleotide positions 61 to 62, and wherein the sensitivity is at least 72% and specificity is at least 77%;
[0618] 65. at least the CpGs defined by SEQ ID NOs 1 to 5000 and identified at nucleotide positions 61 to 62, and wherein the sensitivity is at least 73% and specificity is at least 79%;
[0619] 66. at least the CpGs defined by SEQ ID NOs 1 to 6000 and identified at nucleotide positions 61 to 62, and wherein the sensitivity is at least 72% and specificity is at least 79%;
[0620] 67. at least the CpGs defined by SEQ ID NOs 1 to 7000 and identified at nucleotide positions 61 to 62, and wherein the sensitivity is at least 72% and specificity is at least 78%;
[0621] 68. at least the CpGs defined by SEQ ID NOs 1 to 8000 and identified at nucleotide positions 61 to 62, and wherein the sensitivity is at least 72% and specificity is at least 79%;
[0622] 69. at least the CpGs defined by SEQ ID NOs 1 to 9000 and identified at nucleotide positions 61 to 62, and wherein the sensitivity is at least 72% and specificity is at least 78%;
[0623] 70. at least the CpGs defined by SEQ ID NOs 1 to 10000 and identified at nucleotide positions 61 to 62, and wherein the sensitivity is at least 73% and specificity is at least 79%;
[0624] 71. at least the CpGs defined by SEQ ID NOs 1 to 11000 and identified at nucleotide positions 61 to 62, and wherein the sensitivity is at least 73% and specificity is at least 78%;
[0625] 72. at least the CpGs defined by SEQ ID NOs 1 to 12000 and identified at nucleotide positions 61 to 62, and wherein the sensitivity is at least 73% and specificity is at least 78%;
[0626] 73. at least the CpGs defined by SEQ ID NOs 1 to 13000 and identified at nucleotide positions 61 to 62, and wherein the sensitivity is at least 73% and specificity is at least 79%;
[0627] 74. at least the CpGs defined by SEQ ID NOs 1 to 14000 and identified at nucleotide positions 61 to 62, and wherein the sensitivity is at least 73% and specificity is at least 79%;
[0628] 75. at least the CpGs defined by SEQ ID NOs 1 to 15000 and identified at nucleotide positions 61 to 62, and wherein the sensitivity is at least 73% and specificity is at least 79%;
[0629] 76. at least the CpGs defined by SEQ ID NOs 1 to 16000 and identified at nucleotide positions 61 to 62, and wherein the sensitivity is at least 73% and specificity is at least 80%;
[0630] 77. at least the CpGs defined by SEQ ID NOs 1 to 17000 and identified at nucleotide positions 61 to 62, and wherein the sensitivity is at least 73% and specificity is at least 80%;
[0631] 78. at least the CpGs defined by SEQ ID NOs 1 to 18000 and identified at nucleotide positions 61 to 62, and wherein the sensitivity is at least 73% and specificity is at least 80%;
[0632] 79. at least the CpGs defined by SEQ ID NOs 1 to 19000 and identified at nucleotide positions 61 to 62, and wherein the sensitivity is at least 73% and specificity is at least 80%;
[0633] 80. at least the CpGs defined by SEQ ID NOs 1 to 20000 and identified at nucleotide positions 61 to 62, and wherein the sensitivity is at least 73% and specificity is at least 79%;
[0634] 81. at least the CpGs defined by SEQ ID NOs 1 to 21000 and identified at nucleotide positions 61 to 62, and wherein the sensitivity is at least 73% and specificity is at least 79%;
[0635] 82. at least the CpGs defined by SEQ ID NOs 1 to 22000 and identified at nucleotide positions 61 to 62, and wherein the sensitivity is at least 73% and specificity is at least 79%;
[0636] 83. at least the CpGs defined by SEQ ID NOs 1 to 23000 and identified at nucleotide positions 61 to 62, and wherein the sensitivity is at least 73% and specificity is at least 79%;
[0637] 84. at least the CpGs defined by SEQ ID NOs 1 to 24000 and identified at nucleotide positions 61 to 62, and wherein the sensitivity is at least 73% and specificity is at least 80%;
[0638] 85. at least the CpGs defined by SEQ ID NOs 1 to 25000 and identified at nucleotide positions 61 to 62, and wherein the sensitivity is at least 73% and specificity is at least 80%;
[0639] 86. at least the CpGs defined by SEQ ID NOs 1 to 26000 and identified at nucleotide positions 61 to 62, and wherein the sensitivity is at least 73% and specificity is at least 80%;
[0640] 87. at least the CpGs defined by SEQ ID NOs 1 to 27000 and identified at nucleotide positions 61 to 62, and wherein the sensitivity is at least 73% and specificity is at least 80%;
[0641] 88. at least the CpGs defined by SEQ ID NOs 1 to 28000 and identified at nucleotide positions 61 to 62, and wherein the sensitivity is at least 73% and specificity is at least 80%;
[0642] 89. at least the CpGs defined by SEQ ID NOs 1 to 29000 and identified at nucleotide positions 61 to 62, and wherein the sensitivity is at least 73% and specificity is at least 80%;
[0643] 90. at least the CpGs defined by SEQ ID NOs 28,001 to 29,000 and identified at nucleotide positions 61 to 62, and wherein the sensitivity is at least 41% and specificity is at least 74%;
[0644] 91. at least the CpGs defined by SEQ ID NOs 27,001 to 29,000 and identified at nucleotide positions 61 to 62, and wherein the sensitivity is at least 42% and specificity is at least 73%;
[0645] 92. at least the CpGs defined by SEQ ID NOs 26,001 to 29,000 and identified at nucleotide positions 61 to 62, and wherein the sensitivity is at least 44% and specificity is at least 71%;
[0646] 93. at least the CpGs defined by SEQ ID NOs 25,001 to 29,000 and identified at nucleotide positions 61 to 62, and wherein the sensitivity is at least 42% and specificity is at least 72%;
[0647] 94. at least the CpGs defined by SEQ ID NOs 24,001 to 29,000 and identified at nucleotide positions 61 to 62, and wherein the sensitivity is at least 40% and specificity is at least 72%;
[0648] 95. at least the CpGs defined by SEQ ID NOs 23,001 to 29,000 and identified at nucleotide positions 61 to 62, and wherein the sensitivity is at least 43% and specificity is at least 73%;
[0649] 96. at least the CpGs defined by SEQ ID NOs 22,001 to 29,000 and identified at nucleotide positions 61 to 62, and wherein the sensitivity is at least 43% and specificity is at least 73%;
[0650] 97. at least the CpGs defined by SEQ ID NOs 21,001 to 29,000 and identified at nucleotide positions 61 to 62, and wherein the sensitivity is at least 41% and specificity is at least 72%;
[0651] 98. at least the CpGs defined by SEQ ID NOs 20,001 to 29,000 and identified at nucleotide positions 61 to 62, and wherein the sensitivity is at least 45% and specificity is at least 72%;
[0652] 99. at least the CpGs defined by SEQ ID NOs 19,001 to 29,000 and identified at nucleotide positions 61 to 62, and wherein the sensitivity is at least 43% and specificity is at least 72%;
[0653] 100. at least the CpGs defined by SEQ ID NOs 18,001 to 29,000 and identified at nucleotide positions 61 to 62, and wherein the sensitivity is at least 42% and specificity is at least 72%;
[0654] 101. at least the CpGs defined by SEQ ID NOs 17,001 to 29,000 and identified at nucleotide positions 61 to 62, and wherein the sensitivity is at least 43% and specificity is at least 72%;
[0655] 102. at least the CpGs defined by SEQ ID NOs 16,001 to 29,000 and identified at nucleotide positions 61 to 62, and wherein the sensitivity is at least 45% and specificity is at least 72%;
[0656] 103. at least the CpGs defined by SEQ ID NOs 15,001 to 29,000 and identified at nucleotide positions 61 to 62, and wherein the sensitivity is at least 45% and specificity is at least 72%;
[0657] 104. at least the CpGs defined by SEQ ID NOs 14,001 to 29,000 and identified at nucleotide positions 61 to 62, and wherein the sensitivity is at least 45% and specificity is at least 72%;
[0658] 105. at least the CpGs defined by SEQ ID NOs 13,001 to 29,000 and identified at nucleotide positions 61 to 62, and wherein the sensitivity is at least 46% and specificity is at least 72%;
[0659] 106. at least the CpGs defined by SEQ ID NOs 12,001 to 29,000 and identified at nucleotide positions 61 to 62, and wherein the sensitivity is at least 46% and specificity is at least 72%;
[0660] 107. at least the CpGs defined by SEQ ID NOs 11,001 to 29,000 and identified at nucleotide positions 61 to 62, and wherein the sensitivity is at least 46% and specificity is at least 72%;
[0661] 108. at least the CpGs defined by SEQ ID NOs 10,001 to 29,000 and identified at nucleotide positions 61 to 62, and wherein the sensitivity is at least 50% and specificity is at least 71%;
[0662] 109. at least the CpGs defined by SEQ ID NOs 9,001 to 29,000 and identified at nucleotide positions 61 to 62, and wherein the sensitivity is at least 48% and specificity is at least 72%;
[0663] 110. at least the CpGs defined by SEQ ID NOs 8,001 to 29,000 and identified at nucleotide positions 61 to 62, and wherein the sensitivity is at least 54% and specificity is at least 71%;
[0664] 111. at least the CpGs defined by SEQ ID NOs 7,001 to 29,000 and identified at nucleotide positions 61 to 62, and wherein the sensitivity is at least 50% and specificity is at least 72%;
[0665] 112. at least the CpGs defined by SEQ ID NOs 6,001 to 29,000 and identified at nucleotide positions 61 to 62, and wherein the sensitivity is at least 53% and specificity is at least 72%;
[0666] 113. at least the CpGs defined by SEQ ID NOs 5,001 to 29,000 and identified at nucleotide positions 61 to 62, and wherein the sensitivity is at least 54% and specificity is at least 72%;
[0667] 114. at least the CpGs defined by SEQ ID NOs 4,001 to 29,000 and identified at nucleotide positions 61 to 62, and wherein the sensitivity is at least 56% and specificity is at least 72%;
[0668] 115. at least the CpGs defined by SEQ ID NOs 3,001 to 29,000 and identified at nucleotide positions 61 to 62, and wherein the sensitivity is at least 59% and specificity is at least 72%;
[0669] 116. at least the CpGs defined by SEQ ID NOs 2,001 to 29,000 and identified at nucleotide positions 61 to 62, and wherein the sensitivity is at least 61% and specificity is at least 73%;
[0670] 117. at least the CpGs defined by SEQ ID NOs 1,001 to 29,000 and identified at nucleotide positions 61 to 62, and wherein the sensitivity is at least 69% and specificity is at least 76%;
[0671] 118. at least the CpGs defined by SEQ ID NOs 501 to 29,000 and identified at nucleotide positions 61 to 62, and wherein the sensitivity is at least 75% and specificity is at least 77%;
[0672] 119. at least the CpGs defined by SEQ ID NOs 101 to 29,000 and identified at nucleotide positions 61 to 62, and wherein the sensitivity is at least 76% and specificity is at least 81%; or
[0673] 120. at least the CpGs defined by SEQ ID NOs 1 to 29,000 and identified at nucleotide positions 61 to 62, and wherein the sensitivity is at least 73% and specificity is at least 80%.

[0674] In any of the described assays, the methylation status of the one or more CpGs in the panel is preferably determined by a β-value analysis, and the cancer is breast cancer or ovarian cancer. Preferably, the cancer is breast cancer.

[0675] In any of the assays described herein, wherein when the cancer index value for the individual is about 0.743 or more, the individual is assessed as having cancer or as having a high risk of cancer development, or wherein when the cancer index value for the individual is less than about 0.743, the individual is assessed as not having cancer or as having a low risk of cancer development, preferably wherein the assay comprises determining methylation β-values for each CpG in the panel of one or more CpGs, and more preferably wherein the assessing the presence, absence or development of cancer in an individual is based on the WID-BC-Index. The panel of one or more CpGs used to derive the cancer index value may particularly comprise:
[0676] a. at least 500 of the CpGs identified at nucleotide positions 61 to 62 in SEQ ID NOs 1 to 29,000, and wherein the sensitivity is at least 17% and the specificity is at least 77%;
[0677] b. at least the CpGs defined by SEQ ID NOs 1 to 500 and identified at nucleotide positions 61 to 62, and wherein the sensitivity is at least 30% and specificity is at least 95%;
[0678] c. at least the CpGs defined by SEQ ID NOs 1 to 1000 and identified at nucleotide positions 61 to 62, and wherein the sensitivity is at least 31% and specificity is at least 96%;
[0679] d. at least the CpGs defined by SEQ ID NOs 1 to 2000 and identified at nucleotide positions 61 to 62, and wherein the sensitivity is at least 29% and specificity is at least 96%.

[0680] In any of the assays described herein, wherein when the cancer index value for the individual is about 0.743 or more, the individual is assessed as having cancer or as having a high risk of cancer development, or wherein when the cancer index value for the individual is less than about 0.743, the individual is assessed as not having cancer or as having a low risk of cancer development, preferably wherein the assay comprises determining methylation β-values for each CpG in the panel of one or more CpGs, and more preferably wherein the assessing the presence, absence or development of cancer in an individual is based on the WID-BC-Index. The panel of one or more CpGs used to derive the cancer index value may particularly comprise:
[0681] 1. at least the CpGs defined by SEQ ID NOs 1 to 500 and identified at nucleotide positions 61 to 62, and wherein the sensitivity is at least 30% and specificity is at least 95%;
[0682] 2. at least the CpGs defined by SEQ ID NOs 501 to 1000 and identified at nucleotide positions 61 to 62, and wherein the sensitivity is at least 30% and specificity is at least 93%; or
[0683] 3. at least the CpGs defined by SEQ ID NOs 1001 to 1500 and identified at nucleotide positions 61 to 62, and wherein the sensitivity is at least 31% and specificity is at least 91%;
[0684] 4. at least the CpGs defined by SEQ ID NOs 1501 to 2000 and identified at nucleotide positions 61 to 62, and wherein the sensitivity is at least 29% and specificity is at least 92%;
[0685] 5. at least the CpGs defined by SEQ ID NOs 2001 to 2500 and identified at nucleotide positions 61 to 62, and wherein the sensitivity is at least 35% and specificity is at least 90%;
[0686] 6. at least the CpGs defined by SEQ ID NOs 2501 to 3000 and identified at nucleotide positions 61 to 62, and wherein the sensitivity is at least 33% and specificity is at least 89%;
[0687] 7. at least the CpGs defined by SEQ ID NOs 3001 to 3500 and identified at nucleotide positions 61 to 62, and wherein the sensitivity is at least 34% and specificity is at least 93%;
[0688] 8. at least the CpGs defined by SEQ ID NOs 3501 to 4000 and identified at nucleotide positions 61 to 62, and wherein the sensitivity is at least 29% and specificity is at least 91%;
[0689] 9. at least the CpGs defined by SEQ ID NOs 4001 to 4500 and identified at nucleotide positions 61 to 62, and wherein the sensitivity is at least 33% and specificity is at least 90%;
[0690] 10. at least the CpGs defined by SEQ ID NOs 4501 to 5000 and identified at nucleotide positions 61 to 62, and wherein the sensitivity is at least 36% and specificity is at least 92%;
[0691] 11. at least the CpGs defined by SEQ ID NOs 5001 to 5500 and identified at nucleotide positions 61 to 62, and wherein the sensitivity is at least 30% and specificity is at least 88%;
[0692] 12. at least the CpGs defined by SEQ ID NOs 5501 to 6000 and identified at nucleotide positions 61 to 62, and wherein the sensitivity is at least 35% and specificity is at least 90%;
[0693] 13. at least the CpGs defined by SEQ ID NOs 6001 to 6500 and identified at nucleotide positions 61 to 62, and wherein the sensitivity is at least 28% and specificity is at least 92%;
[0694] 14. at least the CpGs defined by SEQ ID NOs 6501 to 7000 and identified at nucleotide positions 61 to 62, and wherein the sensitivity is at least 30% and specificity is at least 92%;
[0695] 15. at least the CpGs defined by SEQ ID NOs 7001 to 7500 and identified at nucleotide positions 61 to 62, and wherein the sensitivity is at least 29% and specificity is at least 89%;
[0696] 16. at least the CpGs defined by SEQ ID NOs 7501 to 8000 and identified at nucleotide positions 61 to 62, and wherein the sensitivity is at least 31% and specificity is at least 87%;
[0697] 17. at least the CpGs defined by SEQ ID NOs 8001 to 8500 and identified at nucleotide positions 61 to 62, and wherein the sensitivity is at least 34% and specificity is at least 86%;
[0698] 18. at least the CpGs defined by SEQ ID NOs 8501 to 9000 and identified at nucleotide positions 61 to 62, and wherein the sensitivity is at least 29% and specificity is at least 91%;
[0699] 19. at least the CpGs defined by SEQ ID NOs 9001 to 9500 and identified at nucleotide positions 61 to 62, and wherein the sensitivity is at least 28% and specificity is at least 89%;
[0700] 20. at least the CpGs defined by SEQ ID NOs 9501 to 10000 and identified at nucleotide positions 61 to 62, and wherein the sensitivity is at least 34% and specificity is at least 87%;
[0701] 21. at least the CpGs defined by SEQ ID NOs 10001 to 10500 and identified at nucleotide positions 61 to 62, and wherein the sensitivity is at least 27% and specificity is at least 87%;
[0702] 22. at least the CpGs defined by SEQ ID NOs 10501 to 11000 and identified at nucleotide positions 61 to 62, and wherein the sensitivity is at least 28% and specificity is at least 88%;
[0703] 23. at least the CpGs defined by SEQ ID NOs 11001 to 11500 and identified at nucleotide positions 61 to 62, and wherein the sensitivity is at least 30% and specificity is at least 87%;
[0704] 24. at least the CpGs defined by SEQ ID NOs 11501 to 12000 and identified at nucleotide positions 61 to 62, and wherein the sensitivity is at least 24% and specificity is at least 88%;
[0705] 25. at least the CpGs defined by SEQ ID NOs 12001 to 12500 and identified at nucleotide positions 61 to 62, and wherein the sensitivity is at least 28% and specificity is at least 89%;
[0706] 26. at least the CpGs defined by SEQ ID NOs 12501 to 13000 and identified at nucleotide positions 61 to 62, and wherein the sensitivity is at least 30% and specificity is at least 89%;
[0707] 27. at least the CpGs defined by SEQ ID NOs 13001 to 13500 and identified at nucleotide positions 61 to 62, and wherein the sensitivity is at least 29% and specificity is at least 89%;
[0708] 28. at least the CpGs defined by SEQ ID NOs 13501 to 14000 and identified at nucleotide positions 61 to 62, and wherein the sensitivity is at least 26% and specificity is at least 89%;
[0709] 29. at least the CpGs defined by SEQ ID NOs 14001 to 14500 and identified at nucleotide positions 61 to 62, and wherein the sensitivity is at least 26% and specificity is at least 88%;
[0710] 30. at least the CpGs defined by SEQ ID NOs 14501 to 15000 and identified at nucleotide positions 61 to 62, and wherein the sensitivity is at least 24% and specificity is at least 88%;
[0711] 31. at least the CpGs defined by SEQ ID NOs 15001 to 15500 and identified at nucleotide positions 61 to 62, and wherein the sensitivity is at least 24% and specificity is at least 89%;
[0712] 32. at least the CpGs defined by SEQ ID NOs 15501 to 16000 and identified at nucleotide positions 61 to 62, and wherein the sensitivity is at least 11% and specificity is at least 72%;
[0713] 33. at least the CpGs defined by SEQ ID NOs 16001 to 16500 and identified at nucleotide positions 61 to 62, and wherein the sensitivity is at least 13% and specificity is at least 73%;
[0714] 34. at least the CpGs defined by SEQ ID NOs 16501 to 17000 and identified at nucleotide positions 61 to 62, and wherein the sensitivity is at least 12% and specificity is at least 70%;
[0715] 35. at least the CpGs defined by SEQ ID NOs 17001 to 17500 and identified at nucleotide positions 61 to 62, and wherein the sensitivity is at least 15% and specificity is at least 74%;
[0716] 36. at least the CpGs defined by SEQ ID NOs 17501 to 18000 and identified at nucleotide positions 61 to 62, and wherein the sensitivity is at least 15% and specificity is at least 75%;
[0717] 37. at least the CpGs defined by SEQ ID NOs 18001 to 18500 and identified at nucleotide positions 61 to 62, and wherein the sensitivity is at least 15% and specificity is at least 75%;
[0718] 38. at least the CpGs defined by SEQ ID NOs 18501 to 19000 and identified at nucleotide positions 61 to 62, and wherein the sensitivity is at least 17% and specificity is at least 73%;
[0719] 39. at least the CpGs defined by SEQ ID NOs 19001 to 19500 and identified at nucleotide positions 61 to 62, and wherein the sensitivity is at least 12% and specificity is at least 74%;
[0720] 40. at least the CpGs defined by SEQ ID NOs 19501 to 20000 and identified at nucleotide positions 61 to 62, and wherein the sensitivity is at least 16% and specificity is at least 70%;
[0721] 41. at least the CpGs defined by SEQ ID NOs 20001 to 20500 and identified at nucleotide positions 61 to 62, and wherein the sensitivity is at least 12% and specificity is at least 74%;
[0722] 42. at least the CpGs defined by SEQ ID NOs 20501 to 21000 and identified at nucleotide positions 61 to 62, and wherein the sensitivity is at least 15% and specificity is at least 72%;
[0723] 43. at least the CpGs defined by SEQ ID NOs 21001 to 21500 and identified at nucleotide positions 61 to 62, and wherein the sensitivity is at least 15% and specificity is at least 72%;
[0724] 44. at least the CpGs defined by SEQ ID NOs 21501 to 22000 and identified at nucleotide positions 61 to 62, and wherein the sensitivity is at least 12% and specificity is at least 74%;
[0725] 45. at least the CpGs defined by SEQ ID NOs 22001 to 22500 and identified at nucleotide positions 61 to 62, and wherein the sensitivity is at least 12% and specificity is at least 72%;
[0726] 46. at least the CpGs defined by SEQ ID NOs 22501 to 23000 and identified at nucleotide positions 61 to 62, and wherein the sensitivity is at least 17% and specificity is at least 74%;
[0727] 47. at least the CpGs defined by SEQ ID NOs 23001 to 23500 and identified at nucleotide positions 61 to 62, and wherein the sensitivity is at least 21% and specificity is at least 76%;
[0728] 48. at least the CpGs defined by SEQ ID NOs 23501 to 24000 and identified at nucleotide positions 61 to 62, and wherein the sensitivity is at least 18% and specificity is at least 73%;
[0729] 49. at least the CpGs defined by SEQ ID NOs 24001 to 24500 and identified at nucleotide positions 61 to 62, and wherein the sensitivity is at least 13% and specificity is at least 72%;
[0730] 50. at least the CpGs defined by SEQ ID NOs 24501 to 25000 and identified at nucleotide positions 61 to 62, and wherein the sensitivity is at least 16% and specificity is at least 72%;
[0731] 51. at least the CpGs defined by SEQ ID NOs 25001 to 25500 and identified at nucleotide positions 61 to 62, and wherein the sensitivity is at least 19% and specificity is at least 75%;
[0732] 52. at least the CpGs defined by SEQ ID NOs 25501 to 26000 and identified at nucleotide positions 61 to 62, and wherein the sensitivity is at least 19% and specificity is at least 75%;
[0733] 53. at least the CpGs defined by SEQ ID NOs 26001 to 26500 and identified at nucleotide positions 61 to 62, and wherein the sensitivity is at least 16% and specificity is at least 75%;
[0734] 54. at least the CpGs defined by SEQ ID NOs 26501 to 27000 and identified at nucleotide positions 61 to 62, and wherein the sensitivity is at least 20% and specificity is at least 72%;
[0735] 55. at least the CpGs defined by SEQ ID NOs 27001 to 27500 and identified at nucleotide positions 61 to 62, and wherein the sensitivity is at least 24% and specificity is at least 77%;
[0736] 56. at least the CpGs defined by SEQ ID NOs 27501 to 28000 and identified at nucleotide positions 61 to 62, and wherein the sensitivity is at least 16% and specificity is at least 75%;
[0737] 57. at least the CpGs defined by SEQ ID NOs 28001 to 28500 and identified at nucleotide positions 61 to 62, and wherein the sensitivity is at least 21% and specificity is at least 73%;
[0738] 58. at least the CpGs defined by SEQ ID NOs 28501 to 29000 and identified at nucleotide positions 61 to 62, and wherein the sensitivity is at least 17% and specificity is at least 77%;
[0739] 59. at least the CpGs defined by SEQ ID NOs 1 to 100 and identified at nucleotide positions 61 to 62, and wherein the sensitivity is at least 35% and specificity is at least 88%;
[0740] 60. at least the CpGs defined by SEQ ID NOs 1 to 500 and identified at nucleotide positions 61 to 62, and wherein the sensitivity is at least 30% and specificity is at least 95%;
[0741] 61. at least the CpGs defined by SEQ ID NOs 1 to 1000 and identified at nucleotide positions 61 to 62, and wherein the sensitivity is at least 31% and specificity is at least 96%;
[0742] 62. at least the CpGs defined by SEQ ID NOs 1 to 2000 and identified at nucleotide positions 61 to 62, and wherein the sensitivity is at least 29% and specificity is at least 96%;
[0743] 63. at least the CpGs defined by SEQ ID NOs 1 to 3000 and identified at nucleotide positions 61 to 62, and wherein the sensitivity is at least 26% and specificity is at least 97%;
[0744] 64. at least the CpGs defined by SEQ ID NOs 1 to 4000 and identified at nucleotide positions 61 to 62, and wherein the sensitivity is at least 26% and specificity is at least 97%;
[0745] 65. at least the CpGs defined by SEQ ID NOs 1 to 5000 and identified at nucleotide positions 61 to 62, and wherein the sensitivity is at least 27% and specificity is at least 97%;
[0746] 66. at least the CpGs defined by SEQ ID NOs 1 to 6000 and identified at nucleotide positions 61 to 62, and wherein the sensitivity is at least 29% and specificity is at least 97%;
[0747] 67. at least the CpGs defined by SEQ ID NOs 1 to 7000 and identified at nucleotide positions 61 to 62, and wherein the sensitivity is at least 28% and specificity is at least 97%;
[0748] 68. at least the CpGs defined by SEQ ID NOs 1 to 8000 and identified at nucleotide positions 61 to 62, and wherein the sensitivity is at least 27% and specificity is at least 97%;
[0749] 69. at least the CpGs defined by SEQ ID NOs 1 to 9000 and identified at nucleotide positions 61 to 62, and wherein the sensitivity is at least 25% and specificity is at least 97%;
[0750] 70. at least the CpGs defined by SEQ ID NOs 1 to 10000 and identified at nucleotide positions 61 to 62, and wherein the sensitivity is at least 25% and specificity is at least 97%;
[0751] 71. at least the CpGs defined by SEQ ID NOs 1 to 11000 and identified at nucleotide positions 61 to 62, and wherein the sensitivity is at least 26% and specificity is at least 97%;
[0752] 72. at least the CpGs defined by SEQ ID NOs 1 to 12000 and identified at nucleotide positions 61 to 62, and wherein the sensitivity is at least 26% and specificity is at least 97%;
[0753] 73. at least the CpGs defined by SEQ ID NOs 1 to 13000 and identified at nucleotide positions 61 to 62, and wherein the sensitivity is at least 26% and specificity is at least 97%;
[0754] 74. at least the CpGs defined by SEQ ID NOs 1 to 14000 and identified at nucleotide positions 61 to 62, and wherein the sensitivity is at least 25% and specificity is at least 97%;
[0755] 75. at least the CpGs defined by SEQ ID NOs 1 to 15000 and identified at nucleotide positions 61 to 62, and wherein the sensitivity is at least 25% and specificity is at least 97%;
[0756] 76. at least the CpGs defined by SEQ ID NOs 1 to 16000 and identified at nucleotide positions 61 to 62, and wherein the sensitivity is at least 25% and specificity is at least 97%;
[0757] 77. at least the CpGs defined by SEQ ID NOs 1 to 17000 and identified at nucleotide positions 61 to 62, and wherein the sensitivity is at least 25% and specificity is at least 97%;
[0758] 78. at least the CpGs defined by SEQ ID NOs 1 to 18000 and identified at nucleotide positions 61 to 62, and wherein the sensitivity is at least 25% and specificity is at least 97%;
[0759] 79. at least the CpGs defined by SEQ ID NOs 1 to 19000 and identified at nucleotide positions 61 to 62, and wherein the sensitivity is at least 24% and specificity is at least 97%;
[0760] 80. at least the CpGs defined by SEQ ID NOs 1 to 20000 and identified at nucleotide positions 61 to 62, and wherein the sensitivity is at least 24% and specificity is at least 97%;
[0761] 81. at least the CpGs defined by SEQ ID NOs 1 to 21000 and identified at nucleotide positions 61 to 62, and wherein the sensitivity is at least 24% and specificity is at least 97%;
[0762] 82. at least the CpGs defined by SEQ ID NOs 1 to 22000 and identified at nucleotide positions 61 to 62, and wherein the sensitivity is at least 24% and specificity is at least 97%;
[0763] 83. at least the CpGs defined by SEQ ID NOs 1 to 23000 and identified at nucleotide positions 61 to 62, and wherein the sensitivity is at least 24% and specificity is at least 97%;
[0764] 84. at least the CpGs defined by SEQ ID NOs 1 to 24000 and identified at nucleotide positions 61 to 62, and wherein the sensitivity is at least 24% and specificity is at least 97%;
[0765] 85. at least the CpGs defined by SEQ ID NOs 1 to 25000 and identified at nucleotide positions 61 to 62, and wherein the sensitivity is at least 24% and specificity is at least 97%;
[0766] 86. at least the CpGs defined by SEQ ID NOs 1 to 26000 and identified at nucleotide positions 61 to 62, and wherein the sensitivity is at least 24% and specificity is at least 97%;
[0767] 87. at least the CpGs defined by SEQ ID NOs 1 to 27000 and identified at nucleotide positions 61 to 62, and wherein the sensitivity is at least 24% and specificity is at least 97%;
[0768] 88. at least the CpGs defined by SEQ ID NOs 1 to 28000 and identified at nucleotide positions 61 to 62, and wherein the sensitivity is at least 24% and specificity is at least 97%;
[0769] 89. at least the CpGs defined by SEQ ID NOs 1 to 29000 and identified at nucleotide positions 61 to 62, and wherein the sensitivity is at least 24% and specificity is at least 97%;
[0770] 90. at least the CpGs defined by SEQ ID NOs 28,001 to 29,000 and identified at nucleotide positions 61 to 62, and wherein the sensitivity is at least 23% and specificity is at least 89%;
[0771] 91. at least the CpGs defined by SEQ ID NOs 27,001 to 29,000 and identified at nucleotide positions 61 to 62, and wherein the sensitivity is at least 25% and specificity is at least 88%;
[0772] 92. at least the CpGs defined by SEQ ID NOs 26,001 to 29,000 and identified at nucleotide positions 61 to 62, and wherein the sensitivity is at least 25% and specificity is at least 88%;
[0773] 93. at least the CpGs defined by SEQ ID NOs 25,001 to 29,000 and identified at nucleotide positions 61 to 62, and wherein the sensitivity is at least 25% and specificity is at least 88%;
[0774] 94. at least the CpGs defined by SEQ ID NOs 24,001 to 29,000 and identified at nucleotide positions 61 to 62, and wherein the sensitivity is at least 24% and specificity is at least 88%;
[0775] 95. at least the CpGs defined by SEQ ID NOs 23,001 to 29,000 and identified at nucleotide positions 61 to 62, and wherein the sensitivity is at least 25% and specificity is at least 88%;
[0776] 96. at least the CpGs defined by SEQ ID NOs 22,001 to 29,000 and identified at nucleotide positions 61 to 62, and wherein the sensitivity is at least 25% and specificity is at least 88%;
[0777] 97. at least the CpGs defined by SEQ ID NOs 21,001 to 29,000 and identified at nucleotide positions 61 to 62, and wherein the sensitivity is at least 25% and specificity is at least 88%;
[0778] 98. at least the CpGs defined by SEQ ID NOs 20,001 to 29,000 and identified at nucleotide positions 61 to 62, and wherein the sensitivity is at least 25% and specificity is at least 88%;
[0779] 99. at least the CpGs defined by SEQ ID NOs 19,001 to 29,000 and identified at nucleotide positions 61 to 62, and wherein the sensitivity is at least 25% and specificity is at least 89%;
[0780] 100. at least the CpGs defined by SEQ ID NOs 18,001 to 29,000 and identified at nucleotide positions 61 to 62, and wherein the sensitivity is at least 25% and specificity is at least 89%;
[0781] 101. at least the CpGs defined by SEQ ID NOs 17,001 to 29,000 and identified at nucleotide positions 61 to 62, and wherein the sensitivity is at least 25% and specificity is at least 89%;
[0782] 102. at least the CpGs defined by SEQ ID NOs 16,001 to 29,000 and identified at nucleotide positions 61 to 62, and wherein the sensitivity is at least 25% and specificity is at least 88%;
[0783] 103. at least the CpGs defined by SEQ ID NOs 15,001 to 29,000 and identified at nucleotide positions 61 to 62, and wherein the sensitivity is at least 25% and specificity is at least 88%;
[0784] 104. at least the CpGs defined by SEQ ID NOs 14,001 to 29,000 and identified at nucleotide positions 61 to 62, and wherein the sensitivity is at least 25% and specificity is at least 88%;
[0785] 105. at least the CpGs defined by SEQ ID NOs 13,001 to 29,000 and identified at nucleotide positions 61 to 62, and wherein the sensitivity is at least 25% and specificity is at least 89%;
[0786] 106. at least the CpGs defined by SEQ ID NOs 12,001 to 29,000 and identified at nucleotide positions 61 to 62, and wherein the sensitivity is at least 25% and specificity is at least 89%;
[0787] 107. at least the CpGs defined by SEQ ID NOs 11,001 to 29,000 and identified at nucleotide positions 61 to 62, and wherein the sensitivity is at least 26% and specificity is at least 89%;
[0788] 108. at least the CpGs defined by SEQ ID NOs 10,001 to 29,000 and identified at nucleotide positions 61 to 62, and wherein the sensitivity is at least 27% and specificity is at least 89%;
[0789] 109. at least the CpGs defined by SEQ ID NOs 9,001 to 29,000 and identified at nucleotide positions 61 to 62, and wherein the sensitivity is at least 27% and specificity is at least 89%;
[0790] 110. at least the CpGs defined by SEQ ID NOs 8,001 to 29,000 and identified at nucleotide positions 61 to 62, and wherein the sensitivity is at least 26% and specificity is at least 90%;
[0791] 111. at least the CpGs defined by SEQ ID NOs 7,001 to 29,000 and identified at nucleotide positions 61 to 62, and wherein the sensitivity is at least 26% and specificity is at least 89%;
[0792] 112. at least the CpGs defined by SEQ ID NOs 6,001 to 29,000 and identified at nucleotide positions 61 to 62, and wherein the sensitivity is at least 25% and specificity is at least 90%;
[0793] 113. at least the CpGs defined by SEQ ID NOs 5,001 to 29,000 and identified at nucleotide positions 61 to 62, and wherein the sensitivity is at least 26% and specificity is at least 90%;
[0794] 114. at least the CpGs defined by SEQ ID NOs 4,001 to 29,000 and identified at nucleotide positions 61 to 62, and wherein the sensitivity is at least 29% and specificity is at least 90%;
[0795] 115. at least the CpGs defined by SEQ ID NOs 3,001 to 29,000 and identified at nucleotide positions 61 to 62, and wherein the sensitivity is at least 29% and specificity is at least 91%;
[0796] 116. at least the CpGs defined by SEQ ID NOs 2,001 to 29,000 and identified at nucleotide positions 61 to 62, and wherein the sensitivity is at least 29% and specificity is at least 93%;
[0797] 117. at least the CpGs defined by SEQ ID NOs 1,001 to 29,000 and identified at nucleotide positions 61 to 62, and wherein the sensitivity is at least 29% and specificity is at least 95%;
[0798] 118. at least the CpGs defined by SEQ ID NOs 501 to 29,000 and identified at nucleotide positions 61 to 62, and wherein the sensitivity is at least 28% and specificity is at least 96%;
[0799] 119. at least the CpGs defined by SEQ ID NOs 101 to 29,000 and identified at nucleotide positions 61 to 62, and wherein the sensitivity is at least 23% and specificity is at least 97%; or
[0800] 120. at least the CpGs defined by SEQ ID NOs 1 to 29,000 and identified at nucleotide positions 61 to 62, and wherein the sensitivity is at least 24% and specificity is at least 97%.

[0801] In any of the described assays, the methylation status of the one or more CpGs in the panel is preferably determined by a β-value analysis, and the cancer is breast cancer or ovarian cancer. Preferably, the cancer is ovarian cancer.

[0802] In any of the assays described herein, the sensitivity and specificity of the cancer index threshold values vary depending on the number of CpGs comprised within the set, and specifically what CpGs are comprised within the set. Tables 2, 3, and 4 exemplify this assertion.

[0803] In any of the assays of the invention described herein, the individual may be stratified according to their cancer index value, and consequently be defined according to their cancer status and/or cancer risk. In any of the assays described herein, wherein when the cancer index value for the individual is:
[0804] a. less than about −0.580 the individual is assessed as not having cancer;
[0805] b. about −0.580 or more and less than about −0.280 the individual is assessed as having a low risk of cancer;
[0806] c. about −0.280 or more and less than about 0.070 the individual is assessed as having a moderate risk of cancer;
[0807] d. about 0.070 or more the individual is assessed as having a high risk of cancer;

[0808] preferably wherein the assay comprises determining methylation β-values for each CpG in the panel of one or more CpGs, more preferably wherein the cancer is breast cancer.

TABLE 2

| | AUC | | | | | | |
|---|---|---|---|---|---|---|---|
| | (internal | Sensitivity | Specificty | Sensitivity | Specificty | Sensitivity | Specificty |
| subset | validation) | (q = 0.743) | (q = 0.743) | (q = 0.126) | (q = 0.126) | (q = −0.278) | (q = −0.278) |
| 1-29000 | 0.84 | 0.24 | 0.97 | 0.73 | 0.8 | 0.94 | 0.5 |
| 101-29000 | 0.84 | 0.23 | 0.97 | 0.76 | 0.81 | 0.94 | 0.51 |
| 501-29000 | 0.83 | 0.28 | 0.96 | 0.75 | 0.77 | 0.93 | 0.52 |
| 1001-29000 | 0.8 | 0.29 | 0.95 | 0.69 | 0.76 | 0.89 | 0.52 |
| 2001-29000 | 0.77 | 0.29 | 0.93 | 0.61 | 0.73 | 0.86 | 0.53 |
| 3001-29000 | 0.75 | 0.29 | 0.91 | 0.59 | 0.73 | 0.83 | 0.53 |
| 4001-29000 | 0.72 | 0.29 | 0.9 | 0.56 | 0.72 | 0.79 | 0.53 |
| 5001-29000 | 0.71 | 0.26 | 0.9 | 0.54 | 0.72 | 0.78 | 0.53 |
| 6001-29000 | 0.69 | 0.25 | 0.9 | 0.53 | 0.72 | 0.71 | 0.53 |
| 7001-29000 | 0.66 | 0.26 | 0.89 | 0.5 | 0.72 | 0.65 | 0.52 |
| 8001-29000 | 0.68 | 0.26 | 0.9 | 0.54 | 0.71 | 0.71 | 0.53 |
| 9001-29000 | 0.66 | 0.27 | 0.89 | 0.48 | 0.72 | 0.64 | 0.52 |
| 10001-29000 | 0.66 | 0.27 | 0.89 | 0.5 | 0.71 | 0.65 | 0.52 |
| 11001-29000 | 0.64 | 0.26 | 0.89 | 0.46 | 0.72 | 0.63 | 0.53 |
| 12001-29000 | 0.64 | 0.25 | 0.89 | 0.46 | 0.72 | 0.63 | 0.53 |
| 13001-29000 | 0.64 | 0.25 | 0.89 | 0.46 | 0.72 | 0.63 | 0.53 |
| 14001-29000 | 0.63 | 0.25 | 0.88 | 0.45 | 0.72 | 0.63 | 0.53 |
| 15001-29000 | 0.63 | 0.25 | 0.88 | 0.45 | 0.72 | 0.63 | 0.53 |
| 16001-29000 | 0.63 | 0.25 | 0.88 | 0.45 | 0.72 | 0.64 | 0.54 |
| 17001-29000 | 0.62 | 0.25 | 0.89 | 0.43 | 0.72 | 0.63 | 0.53 |
| 18001-29000 | 0.62 | 0.25 | 0.89 | 0.42 | 0.72 | 0.62 | 0.53 |
| 19001-29000 | 0.62 | 0.25 | 0.89 | 0.43 | 0.72 | 0.62 | 0.53 |
| 20001-29000 | 0.63 | 0.25 | 0.88 | 0.45 | 0.72 | 0.64 | 0.52 |
| 21001-29000 | 0.61 | 0.25 | 0.88 | 0.41 | 0.72 | 0.63 | 0.51 |
| 22001-29000 | 0.62 | 0.25 | 0.88 | 0.43 | 0.73 | 0.63 | 0.51 |
| 23001-29000 | 0.62 | 0.25 | 0.88 | 0.43 | 0.73 | 0.64 | 0.51 |
| 24001-29000 | 0.61 | 0.24 | 0.88 | 0.4 | 0.72 | 0.62 | 0.52 |
| 25001-29000 | 0.6 | 0.25 | 0.88 | 0.42 | 0.72 | 0.62 | 0.51 |
| 26001-29000 | 0.62 | 0.25 | 0.88 | 0.44 | 0.71 | 0.62 | 0.52 |
| 27001-29000 | 0.61 | 0.25 | 0.88 | 0.42 | 0.73 | 0.64 | 0.52 |
| 28001-29000 | 0.61 | 0.23 | 0.89 | 0.41 | 0.74 | 0.62 | 0.54 |

TABLE 3

| | AUC | | | | | | |
|---|---|---|---|---|---|---|---|
| | (internal | Sensitivity | Specificty | Sensitivity | Specificty | Sensitivity | Specificty |
| subset | validation) | (q = 0.743) | (q = 0.743) | (q = 0.126) | (q = 0.126) | (q = −0.278) | (q = −0.278) |
| 1-100 | 0.72 | 0.35 | 0.88 | 0.66 | 0.64 | 0.84 | 0.44 |
| 1-500 | 0.78 | 0.3 | 0.95 | 0.7 | 0.72 | 0.87 | 0.5 |
| 1-1000 | 0.81 | 0.31 | 0.96 | 0.7 | 0.78 | 0.89 | 0.49 |
| 1-2000 | 0.82 | 0.29 | 0.96 | 0.74 | 0.78 | 0.89 | 0.48 |
| 1-3000 | 0.83 | 0.26 | 0.97 | 0.75 | 0.77 | 0.92 | 0.49 |
| 1-4000 | 0.83 | 0.26 | 0.97 | 0.72 | 0.77 | 0.92 | 0.49 |
| 1-5000 | 0.84 | 0.27 | 0.97 | 0.73 | 0.79 | 0.93 | 0.5 |
| 1-6000 | 0.84 | 0.29 | 0.97 | 0.72 | 0.79 | 0.93 | 0.51 |
| 1-7000 | 0.84 | 0.28 | 0.97 | 0.72 | 0.78 | 0.93 | 0.5 |
| 1-8000 | 0.84 | 0.27 | 0.97 | 0.72 | 0.79 | 0.93 | 0.49 |
| 1-9000 | 0.84 | 0.25 | 0.97 | 0.72 | 0.78 | 0.93 | 0.5 |
| 1-10000 | 0.84 | 0.25 | 0.97 | 0.73 | 0.79 | 0.93 | 0.49 |
| 1-11000 | 0.84 | 0.26 | 0.97 | 0.73 | 0.78 | 0.93 | 0.5 |
| 1-12000 | 0.84 | 0.26 | 0.97 | 0.73 | 0.78 | 0.93 | 0.48 |
| 1-13000 | 0.84 | 0.26 | 0.97 | 0.73 | 0.79 | 0.94 | 0.48 |
| 1-14000 | 0.84 | 0.25 | 0.97 | 0.73 | 0.79 | 0.93 | 0.49 |
| 1-15000 | 0.84 | 0.25 | 0.97 | 0.73 | 0.79 | 0.94 | 0.48 |
| 1-16000 | 0.84 | 0.25 | 0.97 | 0.73 | 0.8 | 0.94 | 0.49 |
| 1-17000 | 0.84 | 0.25 | 0.97 | 0.73 | 0.8 | 0.94 | 0.48 |
| 1-18000 | 0.84 | 0.25 | 0.97 | 0.73 | 0.8 | 0.94 | 0.49 |
| 1-19000 | 0.84 | 0.24 | 0.97 | 0.73 | 0.8 | 0.94 | 0.49 |
| 1-20000 | 0.84 | 0.24 | 0.97 | 0.73 | 0.79 | 0.94 | 0.49 |
| 1-21000 | 0.84 | 0.24 | 0.97 | 0.73 | 0.79 | 0.94 | 0.49 |
| 1-22000 | 0.84 | 0.24 | 0.97 | 0.73 | 0.79 | 0.94 | 0.49 |
| 1-23000 | 0.84 | 0.24 | 0.97 | 0.73 | 0.79 | 0.94 | 0.49 |
| 1-24000 | 0.84 | 0.24 | 0.97 | 0.73 | 0.8 | 0.94 | 0.49 |
| 1-25000 | 0.84 | 0.24 | 0.97 | 0.73 | 0.8 | 0.94 | 0.49 |
| 1-26000 | 0.84 | 0.24 | 0.97 | 0.73 | 0.8 | 0.94 | 0.49 |
| 1-27000 | 0.84 | 0.24 | 0.97 | 0.73 | 0.8 | 0.94 | 0.49 |
| 1-28000 | 0.84 | 0.24 | 0.97 | 0.73 | 0.8 | 0.94 | 0.49 |
| 1-29000 | 0.84 | 0.24 | 0.97 | 0.73 | 0.8 | 0.94 | 0.5 |

TABLE 4

| | AUC | | | | | | |
|---|---|---|---|---|---|---|---|
| | (internal | Sensitivity | Specificty | Sensitivity | Specificty | Sensitivity | Specificty |
| subset | validation) | (q = 0.743) | (q = 0.743) | (q = 0.126) | (q = 0.126) | (q = −0.278) | (q = −0.278) |
| 1-500 | 0.78 | 0.3 | 0.95 | 0.7 | 0.72 | 0.87 | 0.5 |
| 501-1000 | 0.78 | 0.3 | 0.93 | 0.71 | 0.74 | 0.87 | 0.5 |
| 1001-1500 | 0.77 | 0.31 | 0.91 | 0.67 | 0.74 | 0.85 | 0.5 |
| 1501-2000 | 0.74 | 0.29 | 0.92 | 0.68 | 0.68 | 0.82 | 0.45 |
| 2001-2500 | 0.77 | 0.35 | 0.9 | 0.71 | 0.72 | 0.86 | 0.49 |
| 2501-3000 | 0.72 | 0.33 | 0.89 | 0.61 | 0.71 | 0.83 | 0.47 |
| 3001-3500 | 0.75 | 0.34 | 0.93 | 0.64 | 0.75 | 0.82 | 0.53 |
| 3501-4000 | 0.7 | 0.29 | 0.91 | 0.56 | 0.7 | 0.78 | 0.48 |
| 4001-4500 | 0.74 | 0.33 | 0.9 | 0.61 | 0.69 | 0.82 | 0.48 |
| 4501-5000 | 0.76 | 0.36 | 0.92 | 0.66 | 0.72 | 0.8 | 0.51 |
| 5001-5500 | 0.74 | 0.3 | 0.88 | 0.74 | 0.69 | 0.87 | 0.51 |
| 5501-6000 | 0.72 | 0.35 | 0.9 | 0.62 | 0.71 | 0.75 | 0.51 |
| 6001-6500 | 0.72 | 0.28 | 0.92 | 0.57 | 0.69 | 0.77 | 0.5 |
| 6501-7000 | 0.71 | 0.3 | 0.92 | 0.65 | 0.69 | 0.77 | 0.49 |
| 7001-7500 | 0.71 | 0.29 | 0.89 | 0.55 | 0.69 | 0.8 | 0.51 |
| 7501-8000 | 0.69 | 0.26 | 0.86 | 0.59 | 0.68 | 0.77 | 0.49 |
| 8001-8500 | 0.72 | 0.29 | 0.89 | 0.62 | 0.7 | 0.79 | 0.5 |
| 8501-9000 | 0.72 | 0.29 | 0.91 | 0.59 | 0.73 | 0.79 | 0.51 |
| 9001-9500 | 0.72 | 0.28 | 0.89 | 0.59 | 0.71 | 0.78 | 0.54 |
| 9501-10000 | 0.7 | 0.34 | 0.87 | 0.54 | 0.71 | 0.71 | 0.52 |
| 10001-10500 | 0.68 | 0.27 | 0.87 | 0.52 | 0.72 | 0.71 | 0.53 |
| 10501-11000 | 0.69 | 0.28 | 0.88 | 0.54 | 0.72 | 0.73 | 0.52 |
| 11001-11500 | 0.68 | 0.3 | 0.87 | 0.55 | 0.69 | 0.69 | 0.54 |
| 11501-12000 | 0.64 | 0.24 | 0.88 | 0.48 | 0.7 | 0.64 | 0.54 |
| 12001-12500 | 0.67 | 0.28 | 0.89 | 0.54 | 0.68 | 0.7 | 0.5 |
| 12501-13000 | 0.68 | 0.3 | 0.89 | 0.51 | 0.72 | 0.66 | 0.55 |
| 13001-13500 | 0.69 | 0.29 | 0.89 | 0.55 | 0.72 | 0.72 | 0.55 |
| 13501-14000 | 0.67 | 0.26 | 0.89 | 0.5 | 0.73 | 0.69 | 0.52 |
| 14001-14500 | 0.66 | 0.26 | 0.88 | 0.48 | 0.73 | 0.64 | 0.55 |
| 14501-15000 | 0.63 | 0.24 | 0.88 | 0.38 | 0.73 | 0.62 | 0.54 |
| 15001-15500 | 0.69 | 0.24 | 0.89 | 0.54 | 0.71 | 0.75 | 0.52 |
| 15501-16000 | 0.64 | 0.11 | 0.72 | 0.46 | 0.39 | 0.56 | 0.24 |
| 16001-16500 | 0.64 | 0.13 | 0.73 | 0.44 | 0.4 | 0.62 | 0.25 |
| 16501-17000 | 0.66 | 0.12 | 0.7 | 0.38 | 0.4 | 0.58 | 0.23 |
| 17001-17500 | 0.61 | 0.15 | 0.74 | 0.46 | 0.38 | 0.66 | 0.23 |
| 17501-18000 | 0.64 | 0.15 | 0.75 | 0.42 | 0.38 | 0.59 | 0.24 |
| 18001-18500 | 0.61 | 0.15 | 0.75 | 0.44 | 0.39 | 0.65 | 0.23 |
| 18501-19000 | 0.62 | 0.17 | 0.73 | 0.45 | 0.41 | 0.62 | 0.22 |
| 19001-19500 | 0.62 | 0.12 | 0.74 | 0.48 | 0.38 | 0.61 | 0.23 |
| 19501-20000 | 0.62 | 0.16 | 0.7 | 0.46 | 0.41 | 0.6 | 0.22 |
| 20001-20500 | 0.64 | 0.12 | 0.71 | 0.41 | 0.4 | 0.62 | 0.21 |
| 20501-21000 | 0.62 | 0.15 | 0.72 | 0.46 | 0.42 | 0.62 | 0.25 |
| 21001-21500 | 0.62 | 0.15 | 0.72 | 0.46 | 0.39 | 0.62 | 0.21 |
| 21501-22000 | 0.63 | 0.12 | 0.74 | 0.43 | 0.39 | 0.62 | 0.22 |
| 22001-22500 | 0.64 | 0.12 | 0.72 | 0.38 | 0.41 | 0.58 | 0.22 |
| 22501-23000 | 0.61 | 0.17 | 0.74 | 0.45 | 0.39 | 0.62 | 0.24 |
| 23001-23500 | 0.59 | 0.21 | 0.76 | 0.47 | 0.4 | 0.64 | 0.21 |
| 23501-24000 | 0.6 | 0.18 | 0.73 | 0.5 | 0.37 | 0.63 | 0.23 |
| 24001-24500 | 0.64 | 0.13 | 0.72 | 0.42 | 0.39 | 0.62 | 0.22 |
| 24501-25000 | 0.6 | 0.16 | 0.72 | 0.5 | 0.37 | 0.63 | 0.19 |
| 25001-25500 | 0.58 | 0.19 | 0.75 | 0.46 | 0.4 | 0.69 | 0.24 |
| 25501-26000 | 0.6 | 0.19 | 0.75 | 0.45 | 0.44 | 0.62 | 0.23 |
| 26001-26500 | 0.59 | 0.16 | 0.75 | 0.5 | 0.41 | 0.66 | 0.24 |
| 26501-27000 | 0.61 | 0.2 | 0.72 | 0.44 | 0.39 | 0.62 | 0.23 |
| 27001-27500 | 0.56 | 0.24 | 0.77 | 0.48 | 0.45 | 0.68 | 0.22 |
| 27501-28000 | 0.62 | 0.16 | 0.75 | 0.44 | 0.4 | 0.63 | 0.23 |
| 28001-28500 | 0.6 | 0.21 | 0.73 | 0.48 | 0.4 | 0.65 | 0.21 |
| 28501-29000 | 0.61 | 0.17 | 0.77 | 0.48 | 0.39 | 0.63 | 0.21 |

### Relationship Between Cancer Index Value and Determining Methylation Status of CpGs

[0809] In view of the observations described herein (see Examples), the inventors derived a cancer index based on an analysis of methylation status (DNAme; as described above) for use in assays for assessing the presence or development of cancer in an individual.

[0810] As explained herein, the described assays particularly relate to the assessment of assessing the presence, absence or development of breast cancer and/or ovarian cancer, particularly breast cancer.

[0811] Any of the assays described herein involve deriving a cancer index value based on the methylation of status of a panel of one or more CpGs assayed in a sample provided from an individual, as described and defined herein.

[0812] The cancer index value may be derived by any suitable means.

[0813] The inventors have identified specific CpGs, as described and defined herein, which may be used to form a panel of CpGs whose methylation status is determined in order to establish cancer index values in accordance with the assays described and defined herein. Using these panels the inventors have demonstrated that it is possible to derive a cancer index value which correlates with and is indicative of normal tissue, i.e. tissue which is cancer negative, in particular breast and/or ovarian tissue which is cancer negative. Accordingly, cancer can be assessed to be absent in the individual. Using these panels the inventors have demonstrated that it is possible to derive a cancer index value which correlates with and is indicative of cancer tissue, i.e. tissue which is cancer positive, in particular breast and/or ovarian tissue which is cancer negative. Accordingly, cancer can be assessed to be present in the individual. As explained herein, the inventors have shown that using panels of the CpGs that have been identified it can be shown that the DNA methylation profile of normal cells derived from an anatomical site other than the breast or ovary, such as the cervix, the vagina, the buccal area, blood and/or urine, preferably cervical liquid-based cytology, more preferably tissue derived from a cervical smear sample, as indicated by the cancer index value, is dynamic and subject to change on a continuum from indicating cancer negative to cancer positive tissue. In particular, the cancer index value described herein acts as a surrogate for indicating whether the breast and/or ovarian tissue of an individual is cancer negative or cancer positive to a high degree of statistical accuracy. As such, using panels of the CpGs that have been identified it is possible to establish a cancer index value scale that can be used to assess the presence, absence or development of cancer in an individual.

[0814] As described herein, the inventors have used certain methods for determining the methylation status of specific CpGs in the population of DNA molecules in the sample. For example, in one method a percent methylated reference (PMR) value of a CpG may be determined. In another method the methylation β-values of a CpG may be determined. Different mechanisms may be employed to determine specific values depending on the circumstances, such as PCR-based mechanisms or array-based mechanisms.

[0815] As will be apparent to a skilled person, in the assays of the invention the steps of determining the methylation status of specific CpGs in the population of DNA molecules in the sample are not limited to any one specific methodology. As the skilled person will appreciate, because the cancer index value is based on the methylation status of CpGs, and since the methylation status of CpGs can be represented by values which may be specific to a specific methodology, e.g. percent methylated reference (PMR) value or methylation β-value, then the range of cancer index values which define cancer negative and cancer positive samples may be dependent upon the methodology used to determine the methylation status of CpGs. Nevertheless, a user may readily reproduce and implement the assays of the invention using any suitable methodology for determining the methylation status of CpGs, provided that the same methodology is used consistently. Moreover, the user can readily establish, de novo, cancer index values which define cancer negative and cancer positive samples by determining the methylation status of CpGs in panels constituting the specific CpGs disclosed herein from known cancer negative and cancer positive patient samples. Once such cancer index values are established using the CpGs identified herein, a user may use these values as a basis for assessing the presence, absence or development of cancer in any test individual whose cancer status is to be determined. Accordingly, cancer index values according to the present invention are not limited to specific methods of determination of methylation status of CpGs. On the contrary, the skilled person will appreciate that cancer index values can be established which reflect the intrinsic capabilities of the CpGs identified herein to correlate methylation status with cancer disease status.

[0816] Accordingly, the cancer index value may be derived by assessing the methylation status of the one or more CpGs in the panel in a sample provided from an individual by any suitable means.

[0817] The step of determining the methylation status of each CpG in the panel of one or more CpGs may be achieved by determining a percent methylated reference (PMR) value of each one of the one or more CpGs. The step of determining the methylation status of each CpG in the panel of one or more CpGs may be achieved by determining the methylation β-value of each one of the one or more CpGs.

[0818] In any of the assays described herein, the methylation status of the CpGs may be determined by any suitable means. For example, in any of the assays described herein the step of determining the methylation status of each CpG in the panel of one or more CpGs may comprise:
[0819] a. performing a sequencing step to determine the sequence of each CpG;
[0820] b. hybridising DNA to an array comprising probes capable of discriminating between methylated and non-methylated forms of the CpGs and applying a detection system to the array so as to determine the methylation status of each CpG; and/or
[0821] c. performing a PCR step using methylation-specific primers, wherein the methylation status of the CpG is determined by the presence or absence of a PCR product.

[0822] The step of determining the methylation status of each CpG in the panel of one or more CpGs may comprise a conversion step in order to distinguish methylated CpG dinucleotides relative to non-methylated CpG dinucleotides. The conversion step may comprise e.g. bisulfate conversion or TAPS (TET-assisted pyridine borane sequencing) conversion of the DNA in a sample that is to be applied to any one or more of a. to c. above. TAPS may particularly involve the steps of oxidising 5-methylcytosine bases (5mC) to 5-carboxylcytosine bases (5caC), preferably by ten-eleven translocation (TET), and/or oxidising 5-hydroxymethylcytosine bases (5hmC) to 5-carboxylcytosine bases (5caC), preferably by ten-eleven translocation (TET); followed by reducing 5-carboxylcytosine bases (5caC) to dihydrouracil bases (DHU), optionally with pyridine borane.

[0823] The step of determining the methylation status of each CpG in the panel of one or more CpGs may additionally, or alternatively, comprise the use of TempO-seq (templated Olig-sequencing). The oligoniclueotides in the context of TempO-seq may or may not be designed such that they hybridise with methylated CpG dinucleotides following a prior conversion as described herein.

[0824] The step of determining the methylation status of each CpG in the panel of one or more CpGs may comprise the contacting the DNA in the sample with one or more methylation sensitive restriction endonucleases that cleave methylated and/or unmethylated forms of their restriction sites, and preferably the contacting of the DNA is prior to performing any one of a. to c. above. In assays of the invention wherein methylation sensitive restriction enzymes are used, one or more control reactions are performed. Preferably, the one or more control reactions involve interrogation of known loci that contain (i) no restriction endonuclease sites; (ii) a restriction site that is methylated; (iii) a restriction site that is unmethylated.

[0825] Using any of the methods for determining the methylation status of each CpG in the panel of one or more CpGs, the proportion of methylated and unmethylated CpGs at any given locus may be determined, thereby enabling generation of a cancer index value.

[0826] Preferably, the the step of determining in the population of DNA molecules in the sample the methylation status of a panel of one or more CpGs further comprises determining a R value of each CpG. Deriving the cancer index value may involve providing a methylation β-value data set comprising the methylation β-values for each CpG in the panel of one or more CpGs.

### Assessment of Methylation Status of CpGs

[0827] Methylation of DNA is a recognised form of epigenetic modification which has the capability of altering the expression of genes and other elements such as microRNAs. In cancer development and progression, methylation may have the effect of e.g. silencing tumor suppressor genes and/or increasing the expression of oncogenes. Other forms of dysregulation may occur as a result of methylation. Methylation of DNA occurs at discrete loci which are predominately dinucleotides consisting of a CpG motif, but may also occur at CHH motifs (where H is A, C, or T). During methylation, a methyl group is added to the fifth carbon of cytosine bases to create methylcytosine.

[0828] Methylation can occur throughout the genome and is not limited to regions with respect to an expressed sequence such as a gene. Methylation typically, but not always, occurs in a promoter or other regulatory region of an expressed sequence such as enhancer elements. Most typically, the methylation status of CpGs is clustered in CpG islands, for example CpG islands present in the regulatory regions of genes, especially in their promoter regions.

[0829] Typically, an assessment of DNA methylation status involves analysing the presence or absence of methyl groups in DNA, for example methyl groups on the 5 position of one or more cytosine nucleotides. Preferably, the methylation status of one or more cytosine nucleotides present as a CpG dinucleotide (where C stands for Cytosine, G for Guanine and p for the phosphate group linking the two) is assessed.

[0830] A variety of techniques are available for the identification and assessment of CpG methylation status, as will be outlined briefly below. The assays described herein encompass any suitable technique for the determination of CpG methylation status.

[0831] Methyl groups are lost from a starting DNA molecule during conventional in vitro handling steps such as PCR. To avoid this, techniques for the detection of methyl groups commonly involve the preliminary treatment of DNA prior to subsequent processing, in a way that preserves the methylation status information of the original DNA molecule. Such preliminary techniques involve three main categories of processing, i.e. bisulphite modification, restriction enzyme digestion and affinity-based analysis. Products of these techniques can then be coupled with sequencing or array-based platforms for subsequent identification or qualitative assessment of CpG methylation status.

[0832] Techniques involving bisulphite modification of DNA have become the most common assays for detection and assessment of methylation status of CpG dinucleotides. Treatment of DNA with bisulphite, e.g. sodium bisulphite, converts cytosine bases to uracil bases, but has no effect on 5-methylcytosines. Thus, the presence of a cytosine in bisulphite-treated DNA is indicative of the presence of a cytosine base which was previously methylated in the starting DNA molecule. Such cytosine bases can be detected by a variety of techniques. For example, primers specific for unmethylated versus methylated DNA can be generated and used for PCR-based identification of methylated CpG dinucleotides. DNA may be amplified, either before or after bisulphite conversion. A separation/capture step may be performed, e.g. using binding molecules such as complementary oligonucleotide sequences. Standard and next-generation DNA sequencing protocols can also be used.

[0833] In other approaches, methylation-sensitive enzymes can be employed which digest or cut only in the presence of methylated DNA. Analysis of resulting fragments is commonly carried out using mircroarrays.

[0834] Affinity-based techniques exploit binding interactions to capture fragments of methylated DNA for the purposes of enrichment. Binding molecules such as anti-5-methylcytosine antibodies are commonly employed prior to subsequent processing steps such as PCR and sequencing.

[0835] Olkhov-Mitsel and Bapat (2012) provide a comprehensive review of techniques available for the identification and assessment of biomarkers involving methylcytosine.

[0836] For the purposes of assessing the methylation status of the CpG-based biomarkers characterised and described herein, any suitable assay can be employed.

[0837] Assays described herein may comprise determining methylation status of CpGs by bisulphite converting the DNA. Preferred assays involve bisulphite treatment of DNA, including amplification of the identified CpG loci for methylation specific PCR and/or sequencing and/or assessment of the methylation status of target loci using methylation-discriminatory microarrays.

[0838] Amplification of CpG loci can be achieved by a variety of approaches. Preferably, CpG loci are amplified using PCR. A variety of PCR-based approaches may be used. For example, methylation-specific primers may be hybridized to DNA containing the CpG sequence of interest. Such primers may be designed to anneal to a sequence derived from either a methylated or non-methylated CpG locus. Following annealing, a PCR reaction is performed and the presence of a subsequent PCR product indicates the presence of an annealed CpG of identifiable sequence. In such assays, DNA is bisulphite converted prior to amplification. Such techniques are commonly referred to as methylation specific PCR (MSP).

[0839] In other techniques, PCR primers may anneal to the CpG sequence of interest independently of the methylation status, and further processing steps may be used to determine the status of the CpG. Assays are designed so that the CpG site(s) are located between primer annealing sites. This assay scheme is used in techniques such as bisulphite genomic sequencing, COBRA, Ms-SNuPE. In such assay, DNA can be bisulphite converted before or after amplification.

[0840] Small-scale PCR approaches may be used. Such approaches commonly involve mass partitioning of samples (e.g. digital PCR). These techniques offer robust accuracy and sensitivity in the context of a highly miniaturised system (pico-liter sized droplets), ideal for the subsequent handling of small quantities of DNA obtainable from the potentially small volume of cellular material present in biological samples, particularly urine samples. A variety of such small-scale PCR techniques are widely available. For example, microdroplet-based PCR instruments are available from a variety of suppliers, including RainDance Technologies, Inc. (Billerica, MA; http://raindancetech.com/) and Bio-Rad, Inc. (http://www.bio-rad.com/). Microarray platforms may also be used to carry out small-scale PCR. Such platforms may include microfluidic network-based arrays e.g. available from Fluidigm Corp. (www.fluidigm.com).

[0841] Following amplification of CpG loci, amplified PCR products may be coupled to subsequent analytical platforms in order to determine the methylation status of the CpGs of interest. For example, the PCR products may be directly sequenced to determine the presence or absence of a methylcytosine at the target CpG or analysed by array-based techniques.

[0842] Any suitable sequencing techniques may be employed to determine the sequence of target DNA. In the assays of the present invention the use of high-throughput, so-called “second generation”, “third generation” and “next generation” techniques to sequence bisulphite-treated DNA can be used.

[0843] In second generation techniques, large numbers of DNA molecules are sequenced in parallel. Typically, tens of thousands of molecules are anchored to a given location at high density and sequences are determined in a process dependent upon DNA synthesis. Reactions generally consist of successive reagent delivery and washing steps, e.g. to allow the incorporation of reversible labelled terminator bases, and scanning steps to determine the order of base incorporation. Array-based systems of this type are available commercially e.g. from Illumina, Inc. (San Diego, CA; http://www.illumina.com/).

[0844] Third generation techniques are typically defined by the absence of a requirement to halt the sequencing process between detection steps and can therefore be viewed as real-time systems. For example, the base-specific release of hydrogen ions, which occurs during the incorporation process, can be detected in the context of microwell systems (e.g. see the Ion Torrent system available from Life Technologies; http://www.lifetechnologies.com/). Similarly, in pyrosequencing the base-specific release of pyrophosphate (PPi) is detected and analysed. In nanopore technologies, DNA molecules are passed through or positioned next to nanopores, and the identities of individual bases are determined following movement of the DNA molecule relative to the nanopore. Systems of this type are available commercially e.g. from Oxford Nanopore (https://www.nanoporetech.com/). In an alternative assay, a DNA polymerase enzyme is confined in a “zero-mode waveguide” and the identity of incorporated bases are determined with florescence detection of gamma-labeled phosphonucleotides (see e.g. Pacific Biosciences; http://www.pacificbiosciences.com/).

[0845] In other assays sequencing steps may be omitted. For example, amplified PCR products may be applied directly to hybridization arrays based on the principle of the annealing of two complementary nucleic acid strands to form a double-stranded molecule. Hybridization arrays may be designed to include probes which are able to hybridize to amplification products of a CpG and allow discrimination between methylated and non-methylated loci. For example, probes may be designed which are able to selectively hybridize to an CpG locus containing thymine, indicating the generation of uracil following bisulphite conversion of an unmethylated cytosine in the starting template DNA. Conversely, probes may be designed which are able to selectively hybridize to a CpG locus containing cytosine, indicating the absence of uracil conversion following bisulphite treatment. This corresponds with a methylated CpG locus in the starting template DNA.

[0846] Following the application of a suitable detection system to the array, computer-based analytical techniques can be used to determine the methylation status of a CpG. Detection systems may include, e.g. the addition of fluorescent molecules following a methylation status-specific probe extension reaction. Such techniques allow CpG status determination without the specific need for the sequencing of CpG amplification products. Such array-based discriminatory probes may be termed methylation-specific probes.

[0847] Any suitable methylation-discriminatory microarrays may be employed to assess the methylation status of the CpGs described herein. One particular methylation-discriminatory microarray system is provided by Illumina, Inc. (San Diego, CA; http://www.illumina.com/). In particular, the Infinium MethylationEPIC BeadChip array and the Infinium HumanMethylation450 BeadChip array systems may be used to assess the methylation status of CpGs for predicting cancer development as described herein. Such a system exploits the chemical modifications made to DNA following bisulphite treatment of the starting DNA molecule. Briefly, the array comprises beads to which are coupled oligonucleotide probes specific for DNA sequences corresponding to the unmethylated form of a CpG, as well as separate beads to which are coupled oligonucleotide probes specific for DNA sequences corresponding to the methylated form of an CpG. Candidate DNA molecules are applied to the array and selectively hybridize, under appropriate conditions, to the oligonucleotide probe corresponding to the relevant epigenetic form. Thus, a DNA molecule derived from a CpG which was methylated in the corresponding genomic DNA will selectively attach to the bead comprising the methylation-specific oligonucleotide probe, but will fail to attach to the bead comprising the non-methylation-specific oligonucleotide probe. Single-base extension of only the hybridized probes incorporates a labeled ddNTP, which is subsequently stained with a fluorescence reagent and imaged. The methylation status of the CpG is determined by calculating the ratio of the fluorescent signal derived from the methylated and unmethylated sites.

[0848] Infinium HumanMethylation450 BeadChip array systems can be used to interrogate CpGs in the assays described herein. Alternative or customised arrays could, however, be employed to interrogate the cancer-specific CpG biomarkers defined herein, provided that they comprise means for interrogating all CpG for a given assay, as defined herein.

[0849] Techniques involving combinations of the above-described assays may also be used. For example, DNA containing CpG sequences of interest may be hybridized to microarrays and then subjected to DNA sequencing to determine the status of the CpG as described above.

[0850] In the assays described above, sequences corresponding to CpG loci may also be subjected to an enrichment process if desired. DNA containing CpG sequences of interest may be captured by binding molecules such as oligonucleotide probes complementary to the CpG target sequence of interest. Sequences corresponding to CpG loci may be captured before or after bisulphite conversion or before or after amplification. Probes may be designed to be complementary to bisulphite converted DNA. Captured DNA may then be subjected to further processing steps to determine the status of the CpG, such as DNA sequencing steps.

[0851] Capture/separation steps may be custom designed. Alternatively a variety of such techniques are available commercially, e.g. the SureSelect target enrichment system available from Agilent Technologies (http://www.agilent.com/home). In this system biotinylated “bait” or “probe” sequences (e.g. RNA) complementary to the DNA containing CpG sequences of interest are hybridized to sample nucleic acids. Streptavidin-coated magnetic beads are then used to capture sequences of interest hybridized to bait sequences. Unbound fractions are discarded. Bait sequences are then removed (e.g. by digestion of RNA) thus providing an enriched pool of CpG target sequences separated from non-CpG sequences. Template DNA may be subjected to bisulphite conversion and target loci amplified by small-scale PCR such as microdroplet PCR using primers which are independent of the methylation status of the CpG. Following amplification, samples may be subjected to a capture step to enrich for PCR products containing the target CpG, e.g. captured and purified using magnetic beads, as described above. Following capture, a standard PCR reaction is carried out to incorporate DNA sequencing barcodes into CpG-containing amplicons. PCR products are again purified and then subjected to DNA sequencing and analysis to determine the presence or absence of a methylcytosine at the target genomic CpG.

[0852] CpG biomarker loci defined herein by SEQ ID NOs 1 to 29,000 correspond to Illumina® identifiers (IlmnID) known in the art. These CpG loci identifiers refer to individual CpG sites used in the commercially available Illumina® Infinium Methylation EPIC BeadChip kit and Illumina® Infinium Human Methylation450 BeadChip kit. The identity of each CpG site represented by each CpG loci identifier is publicly available from the Illumina, Inc. website under reference to the CpG sites used in the Infinium Methylation EPIC BeadChip kit and the Infinium Human Methylation450 BeadChip kit.

[0853] To complement evolving public databases to provide accurate CpG loci identifiers and strand orientation, Illumina® has developed a method to consistently designate CpG loci based on the actual or contextual sequence of each individual CpG locus. To unambiguously refer to CpG loci in any species, Illumina® has developed a consistent and deterministic CpG loci database to ensure uniformity in the reporting of methylation data. The Illumina® method takes advantage of sequences flanking a CpG locus to generate a unique CpG locus cluster ID. This number is based on sequence information only and is unaffected by genome version. Illumina's standardized nomenclature also parallels the TOP/BOT strand nomenclature (which indicates the strand orientation) commonly used for single nucleotide polymorphism (SNP) designation.

[0854] Illumina® Identifiers for the Infinium MethylationEPIC BeadChip and Infinium Human Methylation450 BeadChip system are also available from public repositories such as Gene Expression Omnibus (GEO) (http://www.ncbi.nlm.nih.gov/geo/). By assessing the methylation status of a CpG it is meant that a determination is made as to whether a given CpG is methylated or unmethylated. In addition, it is meant that a determination is made as to the degree to which a given CpG site is methylated across a population of CpG loci in a sample.

[0855] CpG methylation status may be measured indirectly using a detection system such as fluorescence. A methylation-discriminatory microarray may be used. When calculating the degree of methylation of a given CpG, the Illumina® definition of beta-values may be used. The Illumina® methylation beta-value of a specific CpG site is calculated from the intensity of the methylated (M) and unmethylated (U) alleles, as the ratio of fluorescent signals β=Max(M,0)/[Max(M,0)+Max(U,0)+100]. On this scale, 0<β<1, β values of 1 or close to 1 indicate 100% methylation whereas values of 0 or close to 0 indicate 0% methylation.

[0856] The methylation status of any one or more CpGs of the 29,000 CpGs defined according to SEQ ID NOS: 1 to 29,000 may be assessed by any suitable technique. As explained in more detail in the Examples below, one particular exemplary technique which the inventors have used is a methylation discriminatory array, such as an Illumina InfiniumMethylation EPIC BeadChip. These assays utilise probes directed to methylated and unmethylated CpGs at a given locus.

[0857] Another exemplary technique which the inventors have used to determine the methylation status of any one or more CpGs is a fluorescence-based PCR technique referred to as MethyLight. These assays utilise forward and reverse PCR primers specific for sequences encompassing any one or more of the 29,000 CpGs defined according to SEQ ID NOS: 1 to 29,000. The methylation status of one or more of the 29,000 CpGs defined according to SEQ ID NOS: 1 to 29,000 may therefore be determined by MethyLight analysis. The detectable probes are typically designed such that they hybridise only to methylated forms of the one or more CpGs to be assayed.

### Bioinformatic Tools and Statistical Metrics for CpG-Based Assays

[0858] Software programs which aid in the in silico analysis of bisulphite converted DNA sequences and in primer design for the purposes of methylation-specific analyses are generally available and have been described previously.

[0859] In risk models for predicting cancer, a receiver-operating-characteristic (ROC) curve analysis is often used, in which the area under the curve (AUC) is assessed. Each point on the ROC curve shows the effect of a rule for turning a risk/likelihood estimate into a prediction of the presence, absence or development of cancer in an individual.

[0860] The AUC measures how well the model discriminates between case subjects and control subjects. An ROC curve that corresponds to a random classification of case subjects and control subjects is a straight line with an AUC of 50%. An ROC curve that corresponds to perfect classification has an AUC of 100%.

[0861] In any of the methods described herein, the 95% confidence interval for the ROC AUC may be between 0.60 and 1.

[0862] In any of the methods described herein, the interval may be defined as a range having as an upper limit any number between 0.60 and 1. The upper limit number may be 0.60, 0.61, 0.62, 0.63, 0.64, 0.65, 0.66, 0.67, 0.68, 0.69, 0.70, 0.71, 0.72, 0.73, 0.74, 0.75, 0.76, 0.77, 0.78, 0.79, 0.80, 0.81, 0.82, 0.83, 0.84, 0.85, 0.86, 0.87, 0.88, 0.89, 0.90, 0.91, 0.92, 0.93, 0.94, 0.95, 0.96, 0.97, 0.98, 0.99 or 1.00.

[0863] In any of the methods described herein, the interval may be defined as a range having as a lower limit any number between 0.60 and 1. The lower limit number may be 0.60, 0.61, 0.62, 0.63, 0.64, 0.65, 0.66, 0.67, 0.68, 0.69, 0.70, 0.71, 0.72, 0.73, 0.74, 0.75, 0.76, 0.77, 0.78, 0.79, 0.80, 0.81, 0.82, 0.83, 0.84, 0.85, 0.86, 0.87, 0.88, 0.89, 0.90, 0.91, 0.92, 0.93, 0.94, 0.95, 0.96, 0.97, 0.98, 0.99 or 1.00.

[0864] In any of the methods described herein, the interval range may comprise any of the above lower limit numbers combined with any of the above upper limit numbers as appropriate.

[0865] Preferably, the upper limit number is 1. Thus, the 95% confidence ROC AUC interval may be defined as a range having an upper limit of 1 and as a lower limit any number between 0.60 and 1. The lower limit number may be 0.60, 0.61, 0.62, 0.63, 0.64, 0.65, 0.66, 0.67, 0.68, 0.69, 0.70, 0.71, 0.72, 0.73, 0.74, 0.75, 0.76, 0.77, 0.78, 0.79, 0.80, 0.81, 0.82, 0.83, 0.84, 0.85, 0.86, 0.87, 0.88, 0.89, 0.90, 0.91, 0.92, 0.93, 0.94, 0.95, 0.96, 0.97, 0.98, 0.99 or 1.00.

[0866] The upper limit number may be 0.99. Thus, the 95% confidence ROC AUC interval may be defined as a range having an upper limit of 0.99 and as a lower limit any number between 0.60 and 0.99. The lower limit number may be 0.60, 0.61, 0.62, 0.63, 0.64, 0.65, 0.66, 0.67, 0.68, 0.69, 0.70, 0.71, 0.72, 0.73, 0.74, 0.75, 0.76, 0.77, 0.78, 0.79, 0.80, 0.81, 0.82, 0.83, 0.84, 0.85, 0.86, 0.87, 0.88, 0.89, 0.90, 0.91, 0.92, 0.93, 0.94, 0.95, 0.96, 0.97, 0.98 or 0.99.

[0867] The upper limit number may be 0.98. Thus, the 95% confidence ROC AUC interval may be defined as a range having an upper limit of 0.98 and as a lower limit any number between 0.60 and 0.98. The lower limit number may be 0.60, 0.61, 0.62, 0.63, 0.64, 0.65, 0.66, 0.67, 0.68, 0.69, 0.70, 0.71, 0.72, 0.73, 0.74, 0.75, 0.76, 0.77, 0.78, 0.79, 0.80, 0.81, 0.82, 0.83, 0.84, 0.85, 0.86, 0.87, 0.88, 0.89, 0.90, 0.91, 0.92, 0.93, 0.94, 0.95, 0.96, 0.97 or 0.98.

[0868] The upper limit number may be 0.97. Thus, the 95% confidence ROC AUC interval may be defined as a range having an upper limit of 0.97 and as a lower limit any number between 0.60 and 0.97. The lower limit number may be 0.60, 0.61, 0.62, 0.63, 0.64, 0.65, 0.66, 0.67, 0.68, 0.69, 0.70, 0.71, 0.72, 0.73, 0.74, 0.75, 0.76, 0.77, 0.78, 0.79, 0.80, 0.81, 0.82, 0.83, 0.84, 0.85, 0.86, 0.87, 0.88, 0.89, 0.90, 0.91, 0.92, 0.93, 0.94, 0.95, 0.96 or 0.97.

[0869] The upper limit number may be 0.96. Thus, the 95% confidence ROC AUC interval may be defined as a range having an upper limit of 0.96 and as a lower limit any number between 0.60 and 0.96. The lower limit number may be 0.60, 0.61, 0.62, 0.63, 0.64, 0.65, 0.66, 0.67, 0.68, 0.69, 0.70, 0.71, 0.72, 0.73, 0.74, 0.75, 0.76, 0.77, 0.78, 0.79, 0.80, 0.81, 0.82, 0.83, 0.84, 0.85, 0.86, 0.87, 0.88, 0.89, 0.90, 0.91, 0.92, 0.93, 0.94, 0.95 or 0.96.

[0870] The upper limit number may be 0.95. Thus, the 95% confidence ROC AUC interval may be defined as a range having an upper limit of 0.95 and as a lower limit any number between 0.60 and 0.95. The lower limit number may be 0.60, 0.61, 0.62, 0.63, 0.64, 0.65, 0.66, 0.67, 0.68, 0.69, 0.70, 0.71, 0.72, 0.73, 0.74, 0.75, 0.76, 0.77, 0.78, 0.79, 0.80, 0.81, 0.82, 0.83, 0.84, 0.85, 0.86, 0.87, 0.88, 0.89, 0.90, 0.91, 0.92, 0.93, 0.94 or 0.95.

[0871] The upper limit number may be 0.94. Thus, the 95% confidence ROC AUC interval may be defined as a range having an upper limit of 0.94 and as a lower limit any number between 0.60 and 0.94. The lower limit number may be 0.60, 0.61, 0.62, 0.63, 0.64, 0.65, 0.66, 0.67, 0.68, 0.69, 0.70, 0.71, 0.72, 0.73, 0.74, 0.75, 0.76, 0.77, 0.78, 0.79, 0.80, 0.81, 0.82, 0.83, 0.84, 0.85, 0.86, 0.87, 0.88, 0.89, 0.90, 0.91, 0.92, 0.93 or 0.94.

[0872] The upper limit number may be 0.93. Thus, the 95% confidence ROC AUC interval may be defined as a range having an upper limit of 0.93 and as a lower limit any number between 0.60 and 0.93. The lower limit number may be 0.60, 0.61, 0.62, 0.63, 0.64, 0.65, 0.66, 0.67, 0.68, 0.69, 0.70, 0.71, 0.72, 0.73, 0.74, 0.75, 0.76, 0.77, 0.78, 0.79, 0.80, 0.81, 0.82, 0.83, 0.84, 0.85, 0.86, 0.87, 0.88, 0.89, 0.90, 0.91, 0.92 or 0.93.

[0873] The upper limit number may be 0.92. Thus, the 95% confidence ROC AUC interval may be defined as a range having an upper limit of 0.92 and as a lower limit any number between 0.60 and 0.92. The lower limit number may be 0.60, 0.61, 0.62, 0.63, 0.64, 0.65, 0.66, 0.67, 0.68, 0.69, 0.70, 0.71, 0.72, 0.73, 0.74, 0.75, 0.76, 0.77, 0.78, 0.79, 0.80, 0.81, 0.82, 0.83, 0.84, 0.85, 0.86, 0.87, 0.88, 0.89, 0.90, 0.91 or 0.92.

[0874] The upper limit number may be 0.91. Thus, the 95% confidence ROC AUC interval may be defined as a range having an upper limit of 0.91 and as a lower limit any number between 0.60 and 0.91. The lower limit number may be 0.60, 0.61, 0.62, 0.63, 0.64, 0.65, 0.66, 0.67, 0.68, 0.69, 0.70, 0.71, 0.72, 0.73, 0.74, 0.75, 0.76, 0.77, 0.78, 0.79, 0.80, 0.81, 0.82, 0.83, 0.84, 0.85, 0.86, 0.87, 0.88, 0.89, 0.90 or 0.91.

[0875] The upper limit number may be 0.90. Thus, the 95% confidence ROC AUC interval may be defined as a range having an upper limit of 0.90 and as a lower limit any number between 0.60 and 0.90. The lower limit number may be 0.60, 0.61, 0.62, 0.63, 0.64, 0.65, 0.66, 0.67, 0.68, 0.69, 0.70, 0.71, 0.72, 0.73, 0.74, 0.75, 0.76, 0.77, 0.78, 0.79, 0.80, 0.81, 0.82, 0.83, 0.84, 0.85, 0.86, 0.87, 0.88, 0.89 or 0.90.

[0876] The upper limit number may be 0.89. Thus, the 95% confidence ROC AUC interval may be defined as a range having an upper limit of 0.89 and as a lower limit any number between 0.60 and 0.89. The lower limit number may be 0.60, 0.61, 0.62, 0.63, 0.64, 0.65, 0.66, 0.67, 0.68, 0.69, 0.70, 0.71, 0.72, 0.73, 0.74, 0.75, 0.76, 0.77, 0.78, 0.79, 0.80, 0.81, 0.82, 0.83, 0.84, 0.85, 0.86, 0.87, 0.88 or 0.89.

[0877] The upper limit number may be 0.88. Thus, the 95% confidence ROC AUC interval may be defined as a range having an upper limit of 0.88 and as a lower limit any number between 0.60 and 0.88. The lower limit number may be 0.60, 0.61, 0.62, 0.63, 0.64, 0.65, 0.66, 0.67, 0.68, 0.69, 0.70, 0.71, 0.72, 0.73, 0.74, 0.75, 0.76, 0.77, 0.78, 0.79, 0.80, 0.81, 0.82, 0.83, 0.84, 0.85, 0.86, 0.87 or 0.88.

[0878] The upper limit number may be 0.87. Thus, the 95% confidence ROC AUC interval may be defined as a range having an upper limit of 0.87 and as a lower limit any number between 0.60 and 0.87. The lower limit number may be 0.60, 0.61, 0.62, 0.63, 0.64, 0.65, 0.66, 0.67, 0.68, 0.69, 0.70, 0.71, 0.72, 0.73, 0.74, 0.75, 0.76, 0.77, 0.78, 0.79, 0.80, 0.81, 0.82, 0.83, 0.84, 0.85, 0.86 or 0.87.

[0879] The upper limit number may be 0.86. Thus, the 95% confidence ROC AUC interval may be defined as a range having an upper limit of 0.86 and as a lower limit any number between 0.60 and 0.86. The lower limit number may be 0.60, 0.61, 0.62, 0.63, 0.64, 0.65, 0.66, 0.67, 0.68, 0.69, 0.70, 0.71, 0.72, 0.73, 0.74, 0.75, 0.76, 0.77, 0.78, 0.79, 0.80, 0.81, 0.82, 0.83, 0.84, 0.85 or 0.86.

[0880] The upper limit number may be 0.85. Thus, the 95% confidence ROC AUC interval may be defined as a range having an upper limit of 0.85 and as a lower limit any number between 0.60 and 0.85. The lower limit number may be 0.60, 0.61, 0.62, 0.63, 0.64, 0.65, 0.66, 0.67, 0.68, 0.69, 0.70, 0.71, 0.72, 0.73, 0.74, 0.75, 0.76, 0.77, 0.78, 0.79, 0.80, 0.81, 0.82, 0.83, 0.84 or 0.85.

[0881] The upper limit number may be 0.84. Thus, the 95% confidence ROC AUC interval may be defined as a range having an upper limit of 0.84 and as a lower limit any number between 0.60 and 0.84. The lower limit number may be 0.60, 0.61, 0.62, 0.63, 0.64, 0.65, 0.66, 0.67, 0.68, 0.69, 0.70, 0.71, 0.72, 0.73, 0.74, 0.75, 0.76, 0.77, 0.78, 0.79, 0.80, 0.81, 0.82, 0.83 or 0.84.

[0882] The upper limit number may be 0.83. Thus, the 95% confidence ROC AUC interval may be defined as a range having an upper limit of 0.83 and as a lower limit any number between 0.60 and 0.83. The lower limit number may be 0.60, 0.61, 0.62, 0.63, 0.64, 0.65, 0.66, 0.67, 0.68, 0.69, 0.70, 0.71, 0.72, 0.73, 0.74, 0.75, 0.76, 0.77, 0.78, 0.79, 0.80, 0.81, 0.82 or 0.83.

[0883] The upper limit number may be 0.82. Thus, the 95% confidence ROC AUC interval may be defined as a range having an upper limit of 0.82 and as a lower limit any number between 0.60 and 0.82. The lower limit number may be 0.60, 0.61, 0.62, 0.63, 0.64, 0.65, 0.66, 0.67, 0.68, 0.69, 0.70, 0.71, 0.72, 0.73, 0.74, 0.75, 0.76, 0.77, 0.78, 0.79, 0.80, 0.81 or 0.82.

[0884] The upper limit number may be 0.81. Thus, the 95% confidence ROC AUC interval may be defined as a range having an upper limit of 0.81 and as a lower limit any number between 0.60 and 0.81. The lower limit number may be 0.60, 0.61, 0.62, 0.63, 0.64, 0.65, 0.66, 0.67, 0.68, 0.69, 0.70, 0.71, 0.72, 0.73, 0.74, 0.75, 0.76, 0.77, 0.78, 0.79, 0.80 or 0.81.

[0885] The upper limit number may be 0.80. Thus, the 95% confidence ROC AUC interval may be defined as a range having an upper limit of 0.80 and as a lower limit any number between 0.60 and 0.80. The lower limit number may be 0.60, 0.61, 0.62, 0.63, 0.64, 0.65, 0.66, 0.67, 0.68, 0.69, 0.70, 0.71, 0.72, 0.73, 0.74, 0.75, 0.76, 0.77, 0.78, 0.79 or 0.80.

[0886] The upper limit number may be 0.79. Thus, the 95% confidence ROC AUC interval may be defined as a range having an upper limit of 0.79 and as a lower limit any number between 0.60 and 0.79. The lower limit number may be 0.60, 0.61, 0.62, 0.63, 0.64, 0.65, 0.66, 0.67, 0.68, 0.69, 0.70, 0.71, 0.72, 0.73, 0.74, 0.75, 0.76, 0.77, 0.78 or 0.79.

[0887] The upper limit number may be 0.78. Thus, the 95% confidence ROC AUC interval may be defined as a range having an upper limit of 0.78 and as a lower limit any number between 0.60 and 0.78. The lower limit number may be 0.60, 0.61, 0.62, 0.63, 0.64, 0.65, 0.66, 0.67, 0.68, 0.69, 0.70, 0.71, 0.72, 0.73, 0.74, 0.75, 0.76, 0.77 or 0.78.

[0888] The upper limit number may be 0.77. Thus, the 95% confidence ROC AUC interval may be defined as a range having an upper limit of 0.77 and as a lower limit any number between 0.60 and 0.77. The lower limit number may be 0.60, 0.61, 0.62, 0.63, 0.64, 0.65, 0.66, 0.67, 0.68, 0.69, 0.70, 0.71, 0.72, 0.73, 0.74, 0.75, 0.76 or 0.77. The upper limit number may be 0.76. Thus, the 95% confidence ROC AUC interval may be defined as a range having an upper limit of 0.76 and as a lower limit any number between 0.60 and 0.76. The lower limit number may be 0.60, 0.61, 0.62, 0.63, 0.64, 0.65, 0.66, 0.67, 0.68, 0.69, 0.70, 0.71, 0.72, 0.73, 0.74, 0.75 or 0.76.

[0889] The upper limit number may be 0.75. Thus, the 95% confidence ROC AUC interval may be defined as a range having an upper limit of 0.75 and as a lower limit any number between 0.60 and 0.75. The lower limit number may be 0.60, 0.61, 0.62, 0.63, 0.64, 0.65, 0.66, 0.67, 0.68, 0.69, 0.70, 0.71, 0.72, 0.73, 0.74 or 0.75.

[0890] The upper limit number may be 0.74. Thus, the 95% confidence ROC AUC interval may be defined as a range having an upper limit of 0.74 and as a lower limit any number between 0.60 and 0.74. The lower limit number may be 0.60, 0.61, 0.62, 0.63, 0.64, 0.65, 0.66, 0.67, 0.68, 0.69, 0.70, 0.71, 0.72, 0.73 or 0.74.

[0891] The upper limit number may be 0.73. Thus, the 95% confidence ROC AUC interval may be defined as a range having an upper limit of 0.73 and as a lower limit any number between 0.60 and 0.73. The lower limit number may be 0.60, 0.61, 0.62, 0.63, 0.64, 0.65, 0.66, 0.67, 0.68, 0.69, 0.70, 0.71, 0.72 or 0.73.

[0892] The upper limit number may be 0.72. Thus, the 95% confidence ROC AUC interval may be defined as a range having an upper limit of 0.72 and as a lower limit any number between 0.60 and 0.72. The lower limit number may be 0.60, 0.61, 0.62, 0.63, 0.64, 0.65, 0.66, 0.67, 0.68, 0.69, 0.70, 0.71 or 0.72.

[0893] The upper limit number may be 0.71. Thus, the 95% confidence ROC AUC interval may be defined as a range having an upper limit of 0.71 and as a lower limit any number between 0.60 and 0.71. The lower limit number may be 0.60, 0.61, 0.62, 0.63, 0.64, 0.65, 0.66, 0.67, 0.68, 0.69, 0.70 or 0.71.

[0894] The upper limit number may be 0.70. Thus, the 95% confidence ROC AUC interval may be defined as a range having an upper limit of 0.70 and as a lower limit any number between 0.60 and 0.70. The lower limit number may be 0.60, 0.61, 0.62, 0.63, 0.64, 0.65, 0.66, 0.67, 0.68, 0.69 or 0.70.

[0895] Epithelial and Fat Cell Proportion in a Sample and Non-Fat Cell Differentiation Characteristics

[0896] The assays described herein may also comprise determining proportions of cell types within a sample which has been taken from an individual. The proportion of cell types may further enable prediction of the presence or development of breast cancer in an individual.

[0897] Determining the proportion of cells in any of the assays described herein may comprise utilisation of any suitable technique known in the art for determining cell identity and thus proportion of cells in a sample which has been taken from an individual. The determining the proportion of cells may involve genetic or epigenetic analysis. The determining the proportion of epithelial and/or fat cells may comprise determining cellular characteristics by gene expression profiling, non-coding RNA profiling, epigenome profiling, DNA methylation profiling, deriving a WID-BC-Index and/or immunohistochemistry. The determining the proportion of cells may involve comparing any one or more of said cellular characteristics with other specific cell types or reference datasets in order to robustly identify epithelial and/or fat cells in the sample. The determining the proportion of epithelial and/or fat cells may involve DNA methylation analysis, which may comprise comparison with reference DNA methylation profiles for specific cell types. The determining the proportion of cells may involve the use of EpiDISH and/or HEpiDISH.

[0898] Any of the assays described herein may comprise determining in the sample from the individual the proportion of epithelial cells and/or determining in the sample from the individual the proportion of fat cells.

[0899] High levels of epithelial cells within a sample taken from an individual, or increased levels of epithelial cells within two or more samples taken from an individual over time after initially assessing a first sample, may indicate an increased risk of an individual having breast cancer or developing breast cancer. Low levels of fat cells within a sample taken from an individual, or decreased levels of fat cells within two or more samples taken from an individual over time after initially assessing a first sample, may indicate an increased risk of an individual having breast cancer or developing breast cancer. High levels of epithelial cells and low levels of fat cells within a sample taken from an individual may indicate an increased risk of breast cancer in the individual.

[0900] Low levels of epithelial cells within a sample taken from an individual, or decreased levels of epithelial cells within one or more samples taken from an individual over time after initially assessing a first sample, may indicate an decreased risk of an individual having breast cancer or developing breast cancer. High levels of fat cells within a sample taken from an individual, or increased levels of fat cells within two or more samples taken from an individual over time after initially assessing a first sample, may indicate an decreased risk of an individual having breast cancer or developing breast cancer. Low levels of epithelial cells and high levels of fat cells within a sample taken from an individual may indicate an increased risk of breast cancer in the individual.

[0901] In any of the assays described herein, the assay may further comprise:
[0902] i. determining in the sample from the individual the proportion of epithelial cells;
[0903] ii. determining in the sample from the individual the proportion of fat cells; and/or
[0904] iii. determining in the sample from the individual differentiation characteristics of non-fat cells.

[0905] The present inventors have shown that increased epithelial cell proportion and decreased fat cell proportion in a sample taken from an individual can associate with at least a moderate risk of harbouring breast cancer or at least a moderate risk of breast cancer development as determined by derivation of a breast cancer index value in the individual. Particularly, the inventors have shown that the proportion of epithelial and fat cells in a sample taken from an individual may change. Fat cells and epithelial cells in the context of the assays disclosed herein may change with or without prior treatment being administered to the individual. In the assays and methods described herein, epithelial and/or fat cell proportion may be monitored for changes, particularly in response to one or more treatments. Fat cell and epithelial cell proportion in samples obtained from an individual, particularly sample of cervical and breast tissue origin, may reflect changes in breast cancer index according to any of the methods described herein. Thus, fat cell and epithelial cell proportion may equally represent an assay for predicting the presence or development of breast cancer in an individual and/or monitoring the risk of an individual harbouring breast cancer or of breast cancer development, in a likewise manner to the assays for determining a breast cancer index value in a sample from an individual described herein.

[0906] The assays described herein may comprise determining in the sample from the individual differentiation characteristics of non-fat cells. In combination with the breast cancer index values described herein, the differentiation of non-fat cells to fat cells may further enable prediction of the presence or development of breast cancer in an individual. “Differentiation characteristics” in the context of the present invention refers to cellular identity, as defined by any one or more cellular characteristics such as the cell's genomic or epigenomic characteristics. Particularly, the determining of differentiation characteristics may comprise comparing the characteristics of non-fat cells in the sample to characteristics of fat cells in order to determine if non-fat cells within the sample are undergoing differentiation to fat cells.

[0907] Determining differentiation characteristics of non-fat cells to fat cells in any of the assays described herein may comprise utilisation of any suitable technique known in the art for determining cell differentiation characteristics. The determining differentiation characteristics of non-fat cells involve genetic or epigenetic analysis. The determining differentiation characteristics of non-fat cells in the sample may comprise determining the non-fat cell characteristics by gene expression profiling, non-coding RNA profiling, epigenome profiling, DNA methylation profiling, deriving a WID-BC-Index and/or immunohistochemistry. The determining differentiation characteristics of the non-fat cells may involve comparing any one or more of said cellular characteristics with characteristics of fat cells or fat cell reference data e.g. publically available ENCODE data. The determining differentiation characteristics of non-fat cells may involve the detection of lipids in the sample by any suitable method. The determining differentiation characteristics of non-fat cells may involve DNA methylation analysis, which may comprise comparison with reference DNA methylation profiles for specific fat cell types. The determining differentiation characteristics of non-fat cells may involve RT-PCR based methods for detection of known genetic markers of fat cells. The determining the proportion of cells may involve the use of EpiDISH and/or HEpiDISH.

[0908] In any of the assays described herein, wherein the determining the proportion of epithelial and/or fat cells and/or determining differentiation characteristics of non-fat cells comprises performing a method comprising:
[0909] a. gene expression profiling;
[0910] b. non-coding RNA-profiling;
[0911] c. epigenome profiling;
[0912] d. DNA methylation profiling;
[0913] e. deriving a WID-BC-Index; and/or
[0914] f. immunohistochemistry; and
   arriving at a determination based on the results of the method

[0915] Preferably, in any of the assays described herein, the sample derived from the individual for determining changes in epithelial cell proportion, fat cell proportion and/or differentiation characteristics of non-fat cells is a sample from the breast.

### Methods of Treatment and Diagnosis

[0916] The term “treatment” as used herein is intended to refer to any intervention or procedure performed on an individual, including a surgical intervention or a pharmacological intervention such as the administration of a compound or drug. Any such treatment may be performed for therapeutic purposes or for preventative or prophylactic purposes.

[0917] The invention also encompasses the performance of one or more treatment steps following a positive classification of cancer, particularly breast and/or ovarian cancer, based on any of the methods described herein. Said treatments may be considered “therapeutic” treatments.

[0918] The invention also encompasses the performance of one or more treatment steps following a negative classification of cancer or prediction of an individual being at risk of cancer development, particularly breast and/or ovarian cancer, based on any of the methods described herein. Said treatments may be considered “risk prevention”, “preventative” or “prophylactic” treatments.

[0919] The invention also encompasses the performance of one or more treatment steps following a negative classification of cancer or prediction of an individual being at risk of cancer development based on any of the methods described herein, in an individual that harbours one or more mutations that predispose the individual to an increased risk of developing cancer, particularly breast and/or ovarian cancer, such as a BRCA1 and/or a BRCA2 mutation.

[0920] The invention thus encompasses a method of treating a cancer patient comprising administering chemotherapy, radiation, immunotherapy or any cancer therapy described herein to the patient determined to have a cancer index value which indicates that the patient has is positive for cancer based on any of the assays described herein, preferably wherein the cancer is breast cancer.

[0921] The invention thus encompasses a method of treating or preventing cancer in an individual, the method comprising:
[0922] a. assessing the cancer status of the individual by assessing the presence, absence or development of cancer in the individual by performing any one of the assays described herein;
[0923] b. administering one or more therapeutic or preventative treatments to the individual based on the assessment, preferably wherein the cancer is breast and/or ovarian cancer, most preferably

[0924] wherein the cancer is breast cancer.

[0925] The invention thus encompasses a method of treating or preventing cancer in an individual, the method comprising:
[0926] a. assessing the cancer status of the individual by assessing the presence, absence or development of cancer in the individual comprising:
   [0927] i. providing a sample which has been taken from the individual, the sample comprising a population of DNA molecules;
   [0928] ii. determining in the population of DNA molecules in the sample the methylation status of a panel of one or more CpGs selected from a panel of CpGs identified at nucleotide positions 61 to 62 in SEQ ID NOs 1 to 29,000;
   [0929] iii. deriving a cancer index value based on the methylation status of the one or more CpGs in the panel; and
   [0930] iv. assessing the presence, absence or development of cancer in the individual based on the cancer index value, wherein the assay is characterised as having an area under the curve (AUC) of 0.60 or more as determined by receiver operating characteristics (ROC);
[0931] b. administering one or more therapeutic or preventative treatments to the individual based on the assessment,
[0932] preferably wherein the cancer in breast and/or ovarian cancer, most preferably wherein the cancer is breast cancer.

[0933] In any of the methods of treatment encompassed by the invention, the step of predicting the presence or development of cancer, preferably wherein the cancer in breast and/or ovarian cancer, in an individual may involve deriving a cancer index value.

[0934] In any of the methods of treatment encompassed by the invention, the step of predicting the presence or development of cancer in an individual may involve the use of any one of the arrays described herein.

[0935] In any of the methods of treatment encompassed by the invention, the step of stratifying the individual may involve applying any one of the thresholds according to any one of the assays of the invention described herein.

[0936] The step of administering one or more treatments may comprise different treatment steps depending on the stratification of an individual on the basis of their risk of having cancer or on the basis of risk of cancer development, particularly breast and/or ovarian cancer. Particularly the amount of an invasiveness of the treatments administered may vary dependent on the stratification of an individual on the basis of their risk of having cancer or on the basis of their risk of cancer development. The treatments administered to the individual may comprise any treatments considered suitable by a person skilled in the art.

[0937] For example, wherein the individual is assessed as not having cancer or as having a low risk of cancer development, and wherein when the cancer index value is about −0.580 or more and less than about −0.280, and preferably wherein the assay comprises determining methylation β-values for each CpG in the panel of one or more CpGs, the individual is subjected to one or more treatments according to their cancer index value, the one or more treatments may comprise intensified screening, preferably wherein the intensified screening comprises any of:
[0938] a. a test for a BRCA1 and/or BRCA2 germline mutation;
[0939] b. a repeat assay according to any one of the assays of the invention, preferably wherein the repeat assay is performed about two years after the previous assay;
   preferably wherein the cancer in breast and/or ovarian cancer, most preferably wherein the cancer is breast cancer.

[0940] Wherein the individual is assessed as having a low risk of having cancer or a low risk of cancer development, and the intensified screening comprising a test for a BRCA1 and/or BRCA2 germline mutation indicates the individual is positive for a BRCA1 and/or BRCA2 germline mutation, the intensified screening further comprises a mammogram. The mammogram is preferably repeated about at least once every year following the test for BRCA1 and/or BRCA2 germline mutation.

[0941] Wherein the individual is assessed as having a low risk of having cancer or a low risk of cancer development, and the intensified screening comprising a test for a BRCA1 and/or BRCA2 germline mutation indicates the individual is negative for a BRCA1 and/or BRCA2 germline mutation, the intensified screening may further comprise routine mammography screening. The routine screening preferably comprises a mammogram about every three years following the test for BRCA1 and/or BRCA2 germline mutation.

[0942] Wherein the individual is assessed as having a moderate risk of having cancer or as having a moderate risk of cancer development, and wherein when the cancer index value is about −0.280 or more and less than about 0.070, and preferably wherein the assay comprises determining methylation β-values for each CpG in the panel of one or more CpGs, the individual is subjected to one or more treatments according to their cancer index value, the one or more treatments may comprise any of:
[0943] a. intensified screening, preferably wherein the intensified screening comprises one or more of:
   [0944] i. a test for a BRCA1 and/or BRCA2 germline mutation;
   [0945] ii. a breast MRI scan, preferably wherein the scan is repeated about two years after the previous scan;
   [0946] iii. a repeat assay according to the invention described herein, preferably wherein the repeat assay is performed about one year after the previous assay;
[0947] b. administration of one or more of Denosumab, “selective estrogen receptor modulators” (SERMs), and “selective progesterone receptor modulators” (SPRMs);
   preferably wherein the cancer in breast and/or ovarian cancer, most preferably wherein the cancer is breast cancer.

[0948] Wherein the individual is assessed as having cancer or as having a high risk of cancer development, and wherein when the cancer index value is about 0.070 or more, and preferably wherein the assay comprises determining methylation β-values for each CpG in the panel of one or more CpGs, and the individual is subjected to one or more treatments according to their cancer index value, the one or more treatments may comprise any of:
[0949] a. intensified screening, preferably wherein the intensified screening comprises one or more of:
   [0950] i. a test for a BRCA1 and/or BRCA2 germline mutation;
   [0951] ii. a breast MRI scan, preferably wherein the scan is repeated about a year after the previous scan;
   [0952] iii. a mammogram, preferably wherein the mammogram is repeated about a year after the previous mammogram;
   [0953] iv. a test for CA125, preferably wherein the test is repeated three-monthly;
   [0954] v. a test for cell-free tumour DNA methylation in plasma/serum, preferably wherein the test is repeated annually;
   [0955] vi. a test for cell-free tumour DNA methylation in vaginal fluid, preferably wherein the test is repeated annually;
   [0956] vii. a repeat assay according to the invention described herein, preferably wherein the repeat assay is performed about one year after the previous assay;
[0957] b. administration of one or more of Denosumab, “selective estrogen receptor modulators” (SERMs), and “selective progesterone receptor modulators” (SPRMs);
[0958] c. a bilateral mastectomy; and/or
[0959] d. a bilateral salpingo-oophorectomy;
   preferably wherein the cancer in breast and/or ovarian cancer, most preferably wherein the cancer is breast cancer.

[0960] In any of the assays described herein, wherein tests are performed as part of intensified screening the tests may be repeated at any suitable interval. A test for CA125 may be performed three-monthly, six-monthly, annually or about once every two, three or four years. A test for cell-free tumour DNA methylation in plasma/serum may be performed three-monthly, six-monthly, annually or about once every two, three or four years. A test for cell-free tumour DNS methylation in vaginal fluid may be performed three-monthly, six-monthly, annually or about once every two, three or four years. A mammogram may be performed three-monthly, six-monthly, annually or about once every two, three or four years.

[0961] Wherein the individual is assessed as having a moderate to high risk of having cancer or a moderate to high risk of cancer development, and/or if the individual has a germline tissue mutation of BRCA1 or BRCA2, preferably BRCA1, the one or more treatments may comprise administration of one or more of Denosumab, “selective estrogen receptor modulators” (SERMs), and “selective progesterone receptor modulators” (SPRMs). The SERMs may comprise Anordin, Bazedoxifene, Broparestrol, Broparestrol, Clomifene, Cyclofenil, Lasofoxifene, Ormeloxifene, Ospemifene, Raloxifene, Tamoxifen, preferably wherein the SERMs comprise Tamoxifen, Bazedoxifene and Raloxifene, preferably wherein the SERMs comprise Tamoxifen, Bazedoxifene and Raloxifene. The SPRMs may comprise Mifepristone, Ulipristal, Asoprisnil, Proellex, Onapristone, Asoprisnil and Lonaprisan.

[0962] Wherein the individual is stratified as being at risk of having breast cancer or developing breast cancer, the individual may be subjected to further screening methods as described herein. If the further screening methods result in a negative breast cancer diagnosis, one or more preventative therapies may be administered such as routine screening as described herein, and preventative therapies described herein. Particularly, preventative therapies include administration of one or more doses of one or more selective progesterone receptor modulators (SPRMs) and/or RANKL inhibitors, preferably wherein the SPRMs comprise mifepristone.

[0963] In any one of the methods of treatment described herein, the method may further comprise genetic and/or expression profiling of any panel of genes known in the art as being associated with breast cancer. For example, the methods described herein may further comprise genetic and/or expression profiling of any one or more of the genes comprised within the MammaPrint™ test (Cardoso et al, N Engl J Med, 2016; 375:717-729). For any panel of genes known in the art as being associated with breast cancer, the skilled person would be aware of what genetic and/or expression profiles would be considered to be abnormal. Furthermore, the skilled person would be aware of treatments in the art that are known to be efficacious with respect to specific abnormalities observed in profiling any panel of genes known in the art as being associated with breast cancer. For example, upon observing one or more mutations in one or both of the BRCA1 and BRCA2 genes the skilled person would consider administering platinum-based treatments to the individual.

[0964] Wherein the individual is predicted as not having breast cancer or having a low risk of having breast cancer or of breast cancer development, the individual may be subjected to risk-prevention treatments. Particularly, for example, if the individual has one or more genetic mutations that predispose an individual to an increased risk of developing breast cancer, the individual may be subjected to risk-prevention treatments. Risk-prevention treatments may comprise any suitable treatment. For example, a risk prevention treatment may be administering one or more doses of mifepristone. In any of the methods described herein, the individual may not harbour breast cancer, but may harbour one or more genetic mutations that pre-dispose the individual to breast cancer such as one or more mutations in the BRCA genes. Other mutations may include any mutations in the art that are considered to pre-dispose individuals to breast cancer. In any of the methods of treatment described herein, the individual may not harbour breast cancer but may harbour one or more genetic mutations that pre-dispose the individual to breast cancer, and this individual may be subjected to any of the methods of monitoring described herein. For example, in any of the methods described herein, the individual does not harbour breast cancer and harbours one or more mutations that predispose the individual to an increased risk of developing breast cancer, and wherein one or more treatments administered to the individual comprises one or more doses of mifepristone.

[0965] Other exemplary treatments comprise one or more surgical procedures, one or more chemotherapeutic agents, one or more cytotoxic chemotherapeutic agents one or more radiotherapeutic agents, one or more immunotherapeutic agents, one or more biological therapeutics, one or more anti-hormonal treatments or any combination of the above following a positive diagnosis of cancer.

[0966] In any of the methods of treatment described herein, the individual may particularly be administered treatments recited in Table 8. Four sub-groups defined by ranges of cancer index values are specified in Table 8 as corresponding to preferred clinical actions, comprising intensified screening, administration of therapeutics and surgery.

[0967] Cancer treatments may be administered to an individual harbouring cancer or at risk of cancer development, in an amount sufficient to prevent, treat, cure, alleviate or partially arrest cancer or one or more of its symptoms. Such treatments may result in a decrease in severity, and/or decreased cancer index value, of cancer symptoms, or an increase in frequency or duration of symptom-free periods. A treatment amount adequate to accomplish this is defined as “therapeutically effective amount”. Effective amounts for a given purpose will depend on the severity of cancer and/or the individual's cancer index value as well as the weight and general state of the individual. As used herein, the term “individual” includes any human, preferably the human is a woman. As used herein, “treatment” is to be considered synonymous with “therapeutic agent”.

[0968] The following therapeutic agents may be administered to an individual based on their cancer risk alone or in combination with any other treatment described herein. The therapeutic agent may be directly attached, for example by chemical conjugation, to an antibody. Methods of conjugating agents or labels to an antibody are known in the art. For example, carbodiimide conjugation (Bauminger & Wilchek (1980) Methods Enzymol. 70, 151-159) may be used to conjugate a variety of agents, including doxorubicin, to antibodies or peptides. The water-soluble carbodiimide, 1-ethyl-3-(3-dimethylaminopropyl) carbodiimide (EDC) is particularly useful for conjugating a functional moiety to a binding moiety. Other methods for conjugating a moiety to antibodies can also be used. For example, sodium periodate oxidation followed by reductive alkylation of appropriate reactants can be used, as can glutaraldehyde cross-linking. However, it is recognised that, regardless of which method of producing a conjugate of the invention is selected, a determination must be made that the antibody maintains its targeting ability and that the functional moiety maintains its relevant function.

[0969] A cytotoxic moiety may be directly and/or indirectly cytotoxic. By “directly cytotoxic” it is meant that the moiety is one which on its own is cytotoxic. By “indirectly cytotoxic” it is meant that the moiety is one which, although is not itself cytotoxic, can induce cytotoxicity, for example by its action on a further molecule or by further action on it. The cytotoxic moiety may be cytotoxic only when intracellular and is preferably not cytotoxic when extracellular.

[0970] Cytotoxic chemotherapeutic agents are well known in the art. Cytotoxic chemotherapeutic agents, such as anticancer agents, include: alkylating agents including nitrogen mustards such as mechlorethamine (HN2), cyclophosphamide, ifosfamide, melphalan (L-sarcolysin) and chlorambucil; ethylenimines and methylmelamines such as hexamethylmelamine, thiotepa; alkyl sulphonates such as busulfan; nitrosoureas such as carmustine (BCNU), lomustine (CCNU), semustine (methyl-CCNU) and streptozocin (streptozotocin); and triazenes such as decarbazine (DTIC; dimethyltriazenoimidazole-carboxamide); Antimetabolites including folic acid analogues such as methotrexate (amethopterin); pyrimidine analogues such as fluorouracil (5-fluorouracil; 5-FU), floxuridine (fluorodeoxyuridine; FUdR) and cytarabine (cytosine arabinoside); and purine analogues and related inhibitors such as mercaptopurine (6-mercaptopurine; 6-MP), thioguanine (6-thioguanine; TG) and pentostatin (2′-deoxycoformycin). Natural Products including vinca alkaloids such as vinblastine (VLB) and vincristine; epipodophyllotoxins such as etoposide and teniposide; antibiotics such as dactinomycin (actinomycin D), daunorubicin (daunomycin; rubidomycin), doxorubicin, bleomycin, plicamycin (mithramycin) and mitomycin (mitomycin C); enzymes such as L-asparaginase; and biological response modifiers such as interferon alphenomes. Miscellaneous agents including platinum coordination complexes such as cisplatin (cis-DDP) and carboplatin; anthracenedione such as mitoxantrone and anthracycline; substituted urea such as hydroxyurea; methyl hydrazine derivative such as procarbazine (N-methylhydrazine, MIH); and adrenocortical suppressant such as mitotane (o,p′-DDD) and aminoglutethimide; taxol and analogues/derivatives; and hormone agonists/antagonists such as flutamide and tamoxifen.

[0971] A cytotoxic chemotherapeutic agent may be a cytotoxic peptide or polypeptide moiety which leads to cell death. Cytotoxic peptide and polypeptide moieties are well known in the art and include, for example, ricin, abrin, Pseudomonas exotoxin, tissue factor and the like. Methods for linking them to targeting moieties such as antibodies are also known in the art. Other ribosome inactivating proteins are described as cytotoxic agents in WO 96/06641. Pseudomonas exotoxin may also be used as the cytotoxic polypeptide. Certain cytokines, such as TNFα and IL-2, may also be useful as cytotoxic agents.

[0972] Certain radioactive atoms may also be cytotoxic if delivered in sufficient doses. Radiotherapeutic agents may comprise a radioactive atom which, in use, delivers a sufficient quantity of radioactivity to the target site so as to be cytotoxic. Suitable radioactive atoms include phosphorus-32, iodine-125, iodine-131, indium-111, rhenium-186, rhenium-188 or yttrium-90, or any other isotope which emits enough energy to destroy neighbouring cells, organelles or nucleic acid. Preferably, the isotopes and density of radioactive atoms in the agents of the invention are such that a dose of more than 4000 cGy (preferably at least 6000, 8000 or 10000 cGy) is delivered to the target site and, preferably, to the cells at the target site and their organelles, particularly the nucleus.

[0973] The radioactive atom may be attached to an antibody, antigen-binding fragment, variant, fusion or derivative thereof in known ways. For example, EDTA or another chelating agent may be attached to the binding moiety and used to attach 111In or 90Y. Tyrosine residues may be directly labelled with 1251 or 1311.

[0974] A cytotoxic chemotherapeutic agent may be a suitable indirectly-cytotoxic polypeptide. In a particularly preferred embodiment, the indirectly cytotoxic polypeptide is a polypeptide which has enzymatic activity and can convert a non-toxic and/or relatively non-toxic prodrug into a cytotoxic drug. With antibodies, this type of system is often referred to as ADEPT (Antibody-Directed Enzyme Prodrug Therapy). The system requires that the antibody locates the enzymatic portion to the desired site in the body of the patient and after allowing time for the enzyme to localise at the site, administering a prodrug which is a substrate for the enzyme, the end product of the catalysis being a cytotoxic compound. The object of the approach is to maximise the concentration of drug at the desired site and to minimise the concentration of drug in normal tissues. In a preferred embodiment, the cytotoxic moiety is capable of converting a non-cytotoxic prodrug into a cytotoxic drug.

[0975] In any of the methods of treatment described herein, the one or more treatments that the individual is subjected to may be repeated on one or more occasions. The one or more treatments may be repeated at regular intervals. The repetitive nature of the treatment administration may depend on the particular treatment being administered. Some treatments may require repetitive administration at greater frequency than others. The skilled person would be aware of the frequency of administration required for therapies known in the art. The one or more treatments may be repeated weekly, two weekly, three weekly, four weekly, monthly, three monthly, six monthly, yearly, two yearly, three yearly, four yearly, or five yearly.

[0976] In any of the methods described herein, when the individual is assessed as having a cancer index value of less than about −0.580, and preferably wherein the assay comprises determining methylation β-values for each CpG in the panel of one or more CpGs, no treatment is administered to the individual.

### Methods of Monitoring

[0977] The invention also provides methods of monitoring the risk of the presence or development of cancer in an individual.

[0978] “Monitoring” in the context of the present invention may refer to longitudinal assessment of an individual's risk of harbouring cancer or risk of cancer development. This longitudinal assessment may be carried out according to the assays of the invention described herein. This longitudinal assessment may involve performance of the assays of the invention described herein to predict the presence or development of cancer in an individual at more than one time point over the course of an undetermined time window. The time window may be any period of time whilst the individual is still living. The time window may persist for the lifetime of the individual. The time window may persist until the individual's risk of harbouring cancer or risk of cancer development falls below a certain level. The level may be a particular cancer index value.

[0979] The invention thus encompasses a method of monitoring for the presence, absence or development of cancer, particularly breast and/or ovarian cancer, most preferably breast cancer, in an individual, the method comprising:
[0980] a. assessing the presence or absence of cancer in an individual or assessing cancer development in an individual to establish a cancer status for the individual by performing any one of the assays of the invention described herein at a first time point;
[0981] b. assessing the presence or absence of cancer in the individual or assessing cancer development in the individual to establish a cancer status for the individual by performing any one of the assays of the invention described herein at one or more further time points, preferably wherein the cancer status of the individual in steps a and b are assessed using the same assay; and
[0982] c. monitoring any change in the cancer status of the individual between time points.

[0983] The invention also encompasses a method of monitoring for the presence, absence or development of cancer, particularly breast and/or ovarian cancer, most preferably breast cancer, in an individual, the method comprising:
[0984] a. assessing the presence or absence of cancer in an individual or assessing cancer development in an individual to establish a cancer status for the individual by performing an assay at a first time point, comprising:
   [0985] i. providing a sample which has been taken from the individual, the sample comprising a population of DNA molecules;
   [0986] ii. determining in the population of DNA molecules in the sample the methylation status of a panel of one or more CpGs selected from a panel of CpGs identified at nucleotide positions 61 to 62 in SEQ ID NOs 1 to 29,000;
   [0987] iii. deriving a cancer index value based on the methylation status of the one or more CpGs in the panel; and
   [0988] iv. assessing the presence, absence or development of cancer in the individual based on the cancer index value, wherein the assay is characterised as having an area under the curve (AUC) of 0.60 or more as determined by receiver operating characteristics (ROC);
   [0989] b. assessing the presence or absence of cancer in the individual or assessing cancer development in the individual to establish a cancer status for the individual by performing the assay of steps a(i) to a(iv) or by performing any one of the assays of the invention described herein at one or more further time points; and
   [0990] c. monitoring any change in the cancer status of the individual between time points.

[0991] In any of the methods of monitoring described herein, the steps of assessing the presence, absence or development of cancer in an individual based on a cancer index value may involve the application of threshold values. Threshold values can provide an indication of an individual's risk of having cancer or an individual's risk of cancer development. For example, cancer index values may indicate a high or low risk of harbouring or developing cancer. In any of the methods of monitoring encompassed by the invention, the step of predicting the presence, absence or development of cancer in an individual involves deriving a cancer index value.

[0992] The invention further encompasses a method of measuring methylation in a patient at multiple time points comprising (a) assessing the presence, absence or development of cancer in an individual by performing any one of the assays of the invention described herein at a first time point; (b) assessing the presence, absence or development of cancer in the individual by performing any one of the assays of the invention described herein at one or more further time points, and (c) detecting differential methylation status between (a) and (b).

[0993] In any of the methods of monitoring described herein, the individual may already harbour cancer, particularly breast and/or ovarian cancer. The individual may not have cancer. The individual may not harbour cancer. The individual may not harbour cancer but may harbour one or more genetic mutations that predispose the individual to an increased risk of cancer development e.g. the individual may harbour one or more mutations in a BRCA gene. Other mutations may include any mutations in the art that are considered to pre-dispose individuals to cancer. In any of the methods of monitoring described herein, the individual may not harbour cancer but may harbour one or more genetic mutations that pre-dispose the individual to cancer, and this individual may be subjected to any of the methods of monitoring described herein in order to determine their risk of having cancer or of developing cancer. For example, in any of the methods described herein, the individual does not harbour cancer and harbours one or more mutations that predispose the individual to an increased risk of developing cancer, particularly breast and/or ovarian cancer, and wherein one or more treatments are administered to the individual in accordance with any of the methods of treatment described herein as a method of prophylaxis. In any of the methods described herein, the individual does not harbour cancer and harbours one or more mutations that predispose the individual to an increased risk of developing cancer, and wherein one or more treatments are administered to the individual in accordance with any of the methods of treatment described herein as a method of prophylaxis, and wherein the one or more treatments administered to the individual comprises one or more doses of Denosumab, “selective estrogen receptor modulators” (SERMs), and “selective progesterone receptor modulators” (SPRMs). The SERMs may comprise Anordin, Bazedoxifene, Broparestrol, Broparestrol, Clomifene, Cyclofenil, Lasofoxifene, Ormeloxifene, Ospemifene, Raloxifene, Tamoxifen. The SPRMs may comprise Mifepristone, Ulipristal, Asoprisnil, Proellex, Onapristone, Asoprisnil and Lonaprisan. Preferably the one or more prophylactic treatments administered to the individual comprises Tamoxifen, Bazedoxifene and Raloxifene.

[0994] In any of the methods of monitoring described herein, depending on the risk of the presence or development of cancer in the individual, one or more treatments are administered to the individual according to any one of the methods of treatment encompassed by the invention and described herein, or wherein when the cancer index value of the individual is less than about −0.580 no treatment is administered to the individual. Different treatments may be administered depending on the stratification of an individual on the basis of their risk of harbouring cancer or on the basis of their risk of cancer development. The method may further comprise administration of one or more treatments according to the methods of treatment described herein.

[0995] The cancer index value may change between any two or more time points. For this reason, longitudinal monitoring of an individual's cancer index value could be of particular benefit to the assessment of, for example, cancer progression, prevention of recurrence of cancer, cancer treatment efficacy, or cancer efficacy.

[0996] In any of the methods of monitoring described herein, the one or more further time points may be any suitable time point. Preferably the one or more further time points may of suitable distance apart for sufficiently frequent screening in order to predict any particularly early onset cases of presence or development of cancer in an individual. Preferably the one or more further time points may be of suitable distance apart for assessing the efficacy of one or more treatments. Preferably the one or more further time points may be of suitable distance apart for predicting whether an individual remains free of cancer after a successful course of treatment. The one or more further time points may be about monthly, about two monthly, about three monthly, about four monthly, about five monthly, about six monthly, about seven monthly, about eight monthly, about nine monthly, about ten monthly, about eleven monthly, about yearly, about two yearly, or more than two yearly.

[0997] In any of the methods of monitoring described herein, changes may be made to the one or more treatments wherein a positive or negative responses to the one or more treatments are observed. Treatments may be changed in accordance with the methods of treatments described herein. Treatments may particularly be changed if the individual's risk stratification, based on their cancer index value, changes.

[0998] In any of the methods of monitoring encompassed by the invention, the step of predicting the presence or development of cancer in an individual may involve the use of any one of the arrays described herein.

### Biological Samples

[0999] The assays described herein are preferably performed on samples comprising epithelial cells, particularly obtained from an anatomical site other than the ovary or endometrium. The sample may particularly be derived from the cervix, the vagina, the buccal area, blood and/or urine. The sample is preferably a cervical liquid-based cytology sample, and more preferably a cervical smear sample.

[1000] Preferably, any one of the assays described herein for assessing the presence, absence or development of cancer in an individual comprises providing a sample which has been taken from the individual. Preferably the individual is a woman.

[1001] In any of the assays described herein, the assay may or may not encompass the step of obtaining the sample from the individual. In assays which do not encompass the step of obtaining the sample from the individual, a sample which has previously been obtained from the individual is provided.

[1002] The sample may be provided directly from the individual for analysis or may be derived from stored material, e.g. frozen, preserved, fixed or cryopreserved material.

[1003] In any of the assays described herein, the sample may be self-collected or collected by any suitable medical professional.

[1004] Any of the assays described herein, the sample may comprise cells. The sample may comprise genetic material such as DNA and/or RNA.

[1005] Any of the assays described herein may involve providing a biological sample from the patient as the source of patient DNA for methylation analysis.

[1006] Any of the assays described herein may involve obtaining patient DNA from a biological sample which has previously been obtained from the patient.

[1007] Any of the assays described herein may involve obtaining a biological sample from the patient as the source of patient DNA for methylation analysis. The sample may be self-collected or collected by any suitable medical professional. Procedures for obtaining a biological sample include biopsy.

[1008] Methods for sample isolation and for the subsequent extraction and isolation of DNA from such cell or tissue samples in preparation for assessing DNA methylation, are well known to those skilled in the art. In the context of the assays or methods described herein, the entirety of a sample may be used, or alternatively cells may be concentrated or cell types may be fractionated in order to only apply subsets of one or more cell types to the present assays or methods. Any suitable methods of concentration or fractionation may be used.

[1009] In any one of the assays described and defined herein the sample from the individual, or the sample which has been taken from the individual, may derive from a tissue which is different from the tissue which harbours the tumour, if a tumour is present in the individual. Accordingly, in any one of the assays described and defined herein the sample from the individual, or the sample which has been taken from the individual, may not comprise nucleic acid, including DNA, which derives from the tumour, i.e. tumour-specific nucleic acid, including tumour-specific DNA. Thus, consistent with the data set out in the examples and the disclosures herein, methylation profiles derived from DNA molecules in the sample are used as surrogate markers for tumour-specific nucleic acid, including tumour-specific DNA, which exists at an anatomical site in the body of the individual which is remote from the anatomical site from which the sample is derived. A skilled person would able to identify the absence of tumour-specific DNA in any given population of sample-specific DNA molecules by routine means, such as determining the absence of known genetic mutations which are characteristic of the particular cancer, by e.g. sequence based screening. However, the performance of any one of the assays described and defined herein does not require any assessment to verify the absence of tumour-specific DNA in any given population of DNA molecules.

### Types of Cancers

[1010] The methods described herein may be applied to any cancer. Preferably, the methods described herein may be applied to breast cancer and/or ovarian cancer. The methods described herein are most preferably applied to breast cancer.

[1011] The cancer may be a primary cancer lesion. The cancer may be a secondary cancer lesion. The cancer may be a metastatic lesion.

[1012] In assays described herein, wherein the assays is for assessing the presence, absence or development of breast cancer, the breast cancer may be a ductal carcinoma in situ or an invasive ductal carcinoma such as tubular type invasive ductal carcinoma (IDC), medullary type IDC, mucinous type IDC, papillary type IDC or cribriform type IDC.

[1013] The breast cancer may be an invasive carcinoma such as a pleomorphic carcinoma, carcinoma with osteoclast giant cells, carcinoma with choriocarcinoma features, carcinoma with melanotic features. The invasive breast carcinoma may be an invasive lobular carcinoma, tubular carcinoma, invasive cribriform carcinoma, medullary carcinoma, mucinous carcinoma and other tumours with abundant mucin such as mucinous carcinoma, cystadenocarcinoma and column a cell mucinous carcinoma, signet ring cell carcinoma. The invasive breast carcinoma may be a neuroendocrine tumour such as solid neuroendocrine carcinoma (carcinoid of the breast), atypical acarcinoid tumour, small cell/oat cell carcinoma, large cell neuroendocrine carcinoma. The invasive breast carcinoma may be an invasive papillary carcinoma, invasive micropapillary carcinoma, apocrine carcinoma, metaplastic carcinomas such as pure epithelial metaplastic carcinomas including squamous cell carcinoma, adenocarcinoma with spindle cell metaplasia, adenosquamous carcinoma, mucoepidermoid carcinoma, mixed epithelial/mesenchymal metaplastic carcinomas, matrix-producing carcinoma, spindle cell carcinoma, carcinosarcoma, squamous cell carcinoma of mammary origin, metaplastic carcinoma with osteoclastic giant cells. The invasive breast carcinoma may be a lipid-rich carcinoma, secretory carcinoma, oncocytic carcinoma, adenoid cystic carcinoma, acinic cell carcinoma, glycogen-rich clear cell carcinoma, sebaceous carcinoma, inflammatory carcinoma, bilateral breast carcinoma.

[1014] The breast cancer may be a mesenchymal breast tumour. The mesenchymal tumour may include sarcoma. The mesenchymal breast tumour may be a hemangioma, angiomatosis, Hemangiopericytoma, Pseudoangiomatous stromal hyperplasia, Myofibroblastoma, Fibromatosis (aggressive), Inflammatory myofibroblastic tumor, Lipoma Angiolipoma, Granular cell tumour, Neurofibroma, Schwannoma, Angiosarcoma, Liposarcoma, Rhabdomyosarcoma, Osteosarcoma, Leiomyoma, Leiomyosarcoma.

[1015] The breast cancer may be a malignant lymphoma such as Non-Hodgkin lymphoma.

[1016] The breast cancer may be a metastatic tumour in which the primary lesion originated in a tissue other than the breast.

[1017] The breast cancer may be a precursor breast cancer lesion. The precursor breast cancer lesion may be a Lobular neoplasia, lobular carcinoma in situ, Intraductal proliferative lesions, Usual ductal hyperplasia, Flat epithelial hyperplasia, Atypical ductal hyperplasia, Ductal carcinoma in situ, Microinvasive carcinoma, Intraductal papillary neoplasms, Central papilloma, Peripheral papilloma, Atypical papilloma, Intraductal papillary carcinoma, Intracystic papillary carcinoma.

[1018] The breast cancer may be a myoepithelial breast cancer lesion. The myoepithelial breast cancer lesion be myoepitheliosis, adenomyoepithelial adenosis, adenomyoepithelioma, malignant myoepithelioma.

[1019] The breast cancer may be a fibroepithelial breast tumour. The fibroepithelial breast tumour may be a fibroadenoma, phyllodes tumour, periductal stromal sarcoma, mammary hamartoma.

[1020] The breast cancer may be Paget's disease of the nipple.

[1021] Any of the assays described herein may additionally, or alternatively, be for assessing the presence, absence or development of ovarian cancer.

[1022] In assays described herein, wherein the assays is for assessing the presence, absence or development of ovarian cancer, the ovarian cancer may preferably be serious carcinoma, mucinous carcinoma, endometrioid carcinoma, clear cell carcinoma, lop malignant potential (LMP) tumor, borderline epithelial ovarian cancer, teratoma, dysgerminoma, endodermal sinus tumor, Choriocarcinoma, granulosa-theca tumor, Sertoli-Leydig tumor, granulosa cell tumor, small cell carcinoma of the ovary or primary peritoneal carcinoma.

### Arrays and Kits

[1023] The invention also encompasses arrays capable of discriminating between methylated and non-methylated forms of CpGs as defined herein; the arrays may comprise oligonucleotide probes specific for methylated forms of CpGs as defined herein and oligonucleotide probes specific for non-methylated forms of CpGs as defined herein.

[1024] In any of the arrays described herein, the array may comprise oligonucleotide probes specific for a methylated form of each CpG in a CpG panel and oligonucleotide probes specific for a non-methylated form of each CpG in the panel; wherein the panel consists of at least 500 CpGs selected from the CpGs identified at nucleotide position 61 to 62 in SEQ ID NOs 1 to 29,000.

[1025] The panel may consist of at least 1000 CpGs selected from the CpGs identified at nucleotide position 61 to 62 in SEQ ID NOs 1 to 29,000, preferably wherein the CpGs are the CpGs identified at nucleotide position 61 to 62 in SEQ ID NOs 1 to 1000.

[1026] The panel may consist of at least 2000 CpGs selected from the CpGs identified at nucleotide position 61 to 62 in SEQ ID NOs 1 to 29,000, preferably wherein the CpGs are the CpGs identified at nucleotide position 61 to 62 in SEQ ID NOs 1 to 2000.

[1027] The panel may consist of at least 3000 CpGs selected from the CpGs identified at nucleotide position 61 to 62 in SEQ ID NOs 1 to 29,000, preferably wherein the CpGs are the CpGs identified at nucleotide position 61 to 62 in SEQ ID NOs 1 to 3000.

[1028] The panel may consist of at least 4000 CpGs selected from the CpGs identified at nucleotide position 61 to 62 in SEQ ID NOs 1 to 29000, preferably wherein the CpGs are the CpGs identified at nucleotide position 61 to 62 in SEQ ID NOs 1 to 4000.

[1029] The panel may consist of at least 5000 CpGs selected from the CpGs identified at nucleotide position 61 to 62 in SEQ ID NOs 1 to 29,000, preferably wherein the CpGs are the CpGs identified at nucleotide position 61 to 62 in SEQ ID NOs 1 to 5000.

[1030] The panel may consist of at least 6000 CpGs selected from the CpGs identified at nucleotide position 61 to 62 in SEQ ID NOs 1 to 29,000, preferably wherein the CpGs are the CpGs identified at nucleotide position 61 to 62 in SEQ ID NOs 1 to 6000.

[1031] The panel may consist of at least 7000 CpGs selected from the CpGs identified at nucleotide position 61 to 62 in SEQ ID NOs 1 to 29,000, preferably wherein the CpGs are the CpGs identified at nucleotide position 61 to 62 in SEQ ID NOs 1 to 7000.

[1032] The panel may consist of at least 8000 CpGs selected from the CpGs identified at nucleotide position 61 to 62 in SEQ ID NOs 1 to 29,000, preferably wherein the CpGs are the CpGs identified at nucleotide position 61 to 62 in SEQ ID NOs 1 to 8000.

[1033] The panel may consist of at least 9000 CpGs selected from the CpGs identified at nucleotide position 61 to 62 in SEQ ID NOs 1 to 29,000, preferably wherein the CpGs are the CpGs identified at nucleotide position 61 to 62 in SEQ ID NOs 1 to 9000.

[1034] The panel may consist of at least 10000 CpGs selected from the CpGs identified at nucleotide position 61 to 62 in SEQ ID NOs 1 to 29,000, preferably wherein the CpGs are the CpGs identified at nucleotide position 61 to 62 in SEQ ID NOs 1 to 10000.

[1035] The panel may consist of at least 11000 CpGs selected from the CpGs identified at nucleotide position 61 to 62 in SEQ ID NOs 1 to 29,000, preferably wherein the CpGs are the CpGs identified at nucleotide position 61 to 62 in SEQ ID NOs 1 to 11000.

[1036] The panel may consist of at least 12000 CpGs selected from the CpGs identified at nucleotide position 61 to 62 in SEQ ID NOs 1 to 29,000, preferably wherein the CpGs are the CpGs identified at nucleotide position 61 to 62 in SEQ ID NOs 1 to 12000.

[1037] The panel may consist of at least 13000 CpGs selected from the CpGs identified at nucleotide position 61 to 62 in SEQ ID NOs 1 to 29,000, preferably wherein the CpGs are the CpGs identified at nucleotide position 61 to 62 in SEQ ID NOs 1 to 13000.

[1038] The panel may consist of at least 14000 CpGs selected from the CpGs identified at nucleotide position 61 to 62 in SEQ ID NOs 1 to 29,000, preferably wherein the CpGs are the CpGs identified at nucleotide position 61 to 62 in SEQ ID NOs 1 to 14000.

[1039] The panel may consist of at least 15000 CpGs selected from the CpGs identified at nucleotide position 61 to 62 in SEQ ID NOs 1 to 29,000, preferably wherein the CpGs are the CpGs identified at nucleotide position 61 to 62 in SEQ ID NOs 1 to 15000.

[1040] The panel may consist of at least 16000 CpGs selected from the CpGs identified at nucleotide position 61 to 62 in SEQ ID NOs 1 to 29,000, preferably wherein the CpGs are the CpGs identified at nucleotide position 61 to 62 in SEQ ID NOs 1 to 16000.

[1041] The panel may consist of at least 17000 CpGs selected from the CpGs identified at nucleotide position 61 to 62 in SEQ ID NOs 1 to 29,000, preferably wherein the CpGs are the CpGs identified at nucleotide position 61 to 62 in SEQ ID NOs 1 to 17000.

[1042] The panel may consist of at least 18000 CpGs selected from the CpGs identified at nucleotide position 61 to 62 in SEQ ID NOs 1 to 29,000, preferably wherein the CpGs are the CpGs identified at nucleotide position 61 to 62 in SEQ ID NOs 1 to 18000.

[1043] The panel may consist of at least 19000 CpGs selected from the CpGs identified at nucleotide position 61 to 62 in SEQ ID NOs 1 to 29,000, preferably wherein the CpGs are the CpGs identified at nucleotide position 61 to 62 in SEQ ID NOs 1 to 19000.

[1044] The panel may consist of at least 20000 CpGs selected from the CpGs identified at nucleotide position 61 to 62 in SEQ ID NOs 1 to 29,000, preferably wherein the CpGs are the CpGs identified at nucleotide position 61 to 62 in SEQ ID NOs 1 to 20000.

[1045] The panel may consist of at least 21000 CpGs selected from the CpGs identified at nucleotide position 61 to 62 in SEQ ID NOs 1 to 29,000, preferably wherein the CpGs are the CpGs identified at nucleotide position 61 to 62 in SEQ ID NOs 1 to 21000.

[1046] The panel may consist of at least 22000 CpGs selected from the CpGs identified at nucleotide position 61 to 62 in SEQ ID NOs 1 to 29,000, preferably wherein the CpGs are the CpGs identified at nucleotide position 61 to 62 in SEQ ID NOs 1 to 22000.

[1047] The panel may consist of at least 23000 CpGs selected from the CpGs identified at nucleotide position 61 to 62 in SEQ ID NOs 1 to 29,000, preferably wherein the CpGs are the CpGs identified at nucleotide position 61 to 62 in SEQ ID NOs 1 to 23000.

[1048] The panel may consist of at least 24000 CpGs selected from the CpGs identified at nucleotide position 61 to 62 in SEQ ID NOs 1 to 29,000, preferably wherein the CpGs are the CpGs identified at nucleotide position 61 to 62 in SEQ ID NOs 1 to 24000.

[1049] The panel may consist of at least 25000 CpGs selected from the CpGs identified at nucleotide position 61 to 62 in SEQ ID NOs 1 to 29,000, preferably wherein the CpGs are the CpGs identified at nucleotide position 61 to 62 in SEQ ID NOs 1 to 25000.

[1050] The panel may consist of at least 26000 CpGs selected from the CpGs identified at nucleotide position 61 to 62 in SEQ ID NOs 1 to 29,000, preferably wherein the CpGs are the CpGs identified at nucleotide position 61 to 62 in SEQ ID NOs 1 to 26000.

[1051] The panel may consist of at least 27000 CpGs selected from the CpGs identified at nucleotide position 61 to 62 in SEQ ID NOs 1 to 29,000, preferably wherein the CpGs are the CpGs identified at nucleotide position 61 to 62 in SEQ ID NOs 1 to 27000.

[1052] The panel may consist of at least 28000 CpGs selected from the CpGs identified at nucleotide position 61 to 62 in SEQ ID NOs 1 to 29,000, preferably wherein the CpGs are the CpGs identified at nucleotide position 61 to 62 in SEQ ID NOs 1 to 28000.

[1053] The panel may consist of all CpGs identified in SEQ ID NOs 1 to 29,000.

[1054] In some embodiments the array is not an Infinium MethylationEPIC BeadChip array or an Illumina Infinium HumanMethylation450 BeadChip array.

[1055] Separately or additionally, in some embodiments the number of CpG-specific oligonucleotide probes of the array is 482,000 or less, 480,000 or less, 450,000 or less, 440,000 or less, 430,000 or less, 420,000 or less, 410,000 or less, or 400,000 or less, 375,000 or less, 350,000 or less, 325,000 or less, 300,000 or less, 275,000 or less, 250,000 or less, 225,000 or less, 200,000 or less, 175,000 or less, 150,000 or less, 125,000 or less, 100,000 or less, 75,000 or less, 50,000 or less, 45,000 or less, 40,000 or less, 35,000 or less, 30,000 or less, 25,000 or less, 20,000 or less, 15,000 or less, 10,000 or less, 5,000 or less, 4,000 or less, 3,000 or less or 2,000 or less.

[1056] The CpG panel may comprise any set of CpGs defined in the assays of the invention described herein.

[1057] The arrays of the invention may comprise one or more oligonucleotides comprising any set of CpGs defined in the assays of the invention, wherein the one or more oligonucleotides are hybridized to corresponding oligonucleotide probes of the array.

[1058] The invention also encompasses a process for making a hybridized array described herein, comprising contacting an array according to the present invention with a group of oligonucleotides comprising any set of CpGs defined in the assays of the invention.

[1059] Any of the arrays as defined herein may be comprised in a kit. The kit may comprise any array as defined herein together with instructions for use.

[1060] The invention further encompasses the use of any of the arrays as defined herein in any of the assays for determining the methylation status of CpGs for the purposes of predicting the presence or development of cancer in an individual.

[1061] The following Examples serve to illustrate but not to limit the invention.

### EXAMPLES

[1062] In the Examples described herein, WID-BC-Index is a cancer index value wherein the index value has been determined by assaying in a population of DNA molecules derived from a given sample from an individual the methylation status of a panel of CpGs selected from the CpGs defined by SEQ ID NOs: 1 to 29,000.

[1063] In some instances within the Examples, all CpGs defined by SEQ ID NOs: 1 to 29,000 have been included in the panel which has been assayed to obtain a cancer index value. In addition, specific sub-selections of CpGs from among the 29,000 CpGs defined by SEQ ID NOs: 1 to 29,000 have been included in the panel which has been assayed to obtain a cancer index value. In these instances, the cancer index value's ability to discriminate between cancer positive and cancer negative women is described, wherein discriminatory ability of the index is characterised by AUC and received operating characteristics.

[1064] To date, DNA methylation of only a very few genes has been assessed in cervical smear samples from women with and without ovarian cancer and not one of these very small studies reached significance after multiple test adjustment.

[1065] Here, the inventors performed an epigenome-wide DNAme analysis in cervical smear samples from women who had recently been diagnosed with breast cancer, and in matched controls, and established the WID-BC-index (Women's risk IDentification for Breast Cancer index) which the inventors validated in buccal samples and in an independent set of cervical samples. Further validation was done in samples from women with ovarian cancer and a set of matched cervical, buccal, and blood samples from BRCA mutation carriers. In addition, the inventors assessed the WID-BC-index in a larger number of different cell types as well as in normal breast and breast cancer tissue samples.

### Materials and Methods

### Study Design and Epidemiological Data Acquisition

[1066] The study was conducted as part of a multi-centre study involving several recruitment sites in 5 European countries (i.e. the UK, Czech Republic, Italy, Norway and Germany). Participants were aged ≥18 years. Prior to taking part, each prospective study volunteer was given a Participant Information Sheet as well as a Consent Form and the rationale for the study was explained. Additional resources, including an explanatory video and further online resources, were also made available. Women diagnosed with breast or ovarian cancer (case) or a non-malignant benign gynaecological condition (control) were approached during outpatient hospital clinics, while women recruited as BRCA mutation carriers or healthy volunteers from the general population (control) were approached via outreach campaigns, public engagement, and as part of cervical screening programmes. After signing an informed consent, participants completed an epidemiological questionnaire as well as a feedback form after their participation. The study itself is a sub-study of the FORECEE (4C) Programme, which has ethical approval from the UK Health Research Authority (REC 14/LO/1633) and other contributing centres.

[1067] The epidemiological survey was administered via the Qualtrics application on dedicated iPads. The survey contained questions relating to health habits, relevant risk factors, and also made enquiries as to historical health habits, as well as obtaining a thorough medical and obstetric history. Cervical samples were collected at appropriate clinical venues by trained staff and the cervical smears were carried out by a small group of research midwives or physicians with a view to establishing standard practice. Buccal samples were collected using Copan 4N6FLOQ Swabs, Thermofisher Scientific.

[1068] Biological samples were given an anonymous Participant ID Number which was assigned to the person's name in a securely stored link file. Following sample taking, an email survey was sent to each participant, enabling them to feedback with respect to the recruitment process. Women with a current diagnosis of (a) primary breast cancer with poor prognosis features (Grade III and/or T2/3 and/or N1/2 and/or HR-ve) or (b) malignant invasive epithelial ovarian cancer and recruited prior to receiving any systemic treatment (chemo- or antihormonal or Herceptin, etc.) or surgery or radiotherapy were eligible as breast, ovarian or endometrial cancer cases respectively. For the FORECEE Discovery set controls were initially matched one-to-one with cases based on menopausal status, age (5 year age ranges where possible), and recruitment centre/country. However, due to an imbalance in recruitment of cases and controls at some centres, a number of cases were matched on age and menopausal status alone. Cancer histological data was collected post-recruitment either by clinicians directly involved in the diagnosis/treatment of the cancer cases or by a nominated data manager with access to the in-house hospital systems.

### Cervical Smear Sample Collection

[1069] Cervical smears were taken at collaborating hospitals and recruitment centres using the ThinPrep system (Hologic Inc., cat #70098-002). Cervical cells were sampled from the cervix using a cervix brush (Rovers Medical Devices, cat #70671-001) which was rotated 5 times through 360 degrees whilst in contact with the cervix to maximise cell sampling. The brush was removed from the vagina and immersed in a ThinPrep vial containing Preserve-cyt fluid and then pushed against the bottom of the vial 10 times to facilitate release of the cells from the brush into the solution. The sample vial was sealed and stored locally at room temperature. Buccal cells were collected using two Copan 4N6FLOQ Buccal Swabs (Copan Medical Diagnostics, cat #4504C) by firmly brushing the swab head 5-6 times against the buccal mucosa of each cheek. The swabs were re-capped and left to dry out at room temperature within the sampling tube which contains a drying desiccant. 2.5 ml of venous whole blood was collected in PAX gene blood DNA tubes (BD Biosciences #761165) and stored locally at 4° C. All samples were shipped to UCL at ambient temperature.

### Breast Tissue Samples

[1070] The inventors have analysed two independent sets of breast tissue samples. The first set contained a total of 56 breast samples from premenopausal women aged 19-54 years: normal breast tissue from 14 women who underwent cosmetic breast operations, normal breast tissue from women who underwent prophylactic mastectomies due to a BRCA1 (n=9) or a BRCA2 (n=5) mutation, and 14 women who had breast surgery due to a triple negative breast cancer and who provided both normal adjacent breast tissue as well as cancer tissue samples. All samples were collected fresh from theatre and samples processed within 1 hr of surgical excision. Fresh samples were frozen rapidly in Liquid Nitrogen and stored at −80° C. Ethical approval was obtained from the NRES Committee East of England (reference number 15/EE/0192).

[1071] The second set of samples were obtained from the clinical trial “The Effect of a Progesterone Receptor Modulator on Breast Tissue in Women With BRCA-1 and -2 Mutations—a Placebo Controlled RCT” (ClinicalTrials.gov Identifier: NCT01898312; regional ethical review board at Karolinska Institutet permit 2009/144-31/4). Study subjects were healthy premenopausal women aged 18-43 years with regular menstrual cycles lasting 25-35 days and with no contraindications to mifepristone. The main exclusion criteria were: use of any hormonal or intrauterine contraception and pregnancy or breastfeeding 2 months prior to the study; a history of breast cancer or other malignancies and adnexal abnormality upon transvaginal ultrasound examination. All women were instructed to use barrier contraceptive methods throughout the duration of the study.

[1072] After signing an informed consent, study subjects were randomised into two groups. One group (i.e. 11 BRCA carriers and 9 controls) was treated with 50 mg mifepristone (one quarter of 200 mg Mifegyne®, Exelgyn, Paris, France) every other day for two months (56 days) starting on the first day of the menstrual cycle. As mifepri stone is only available in 200 mg tablets in Sweden, a study nurse divided the tablets into 4 parts and instructed the study subjects to take one part every other day. The placebo group (i.e. 4 BRCA carriers and 11 controls) received B-vitamin tablets which are visually identical (one quarter of TrioBe® Recip) to mifepristone. Tablets were dispensed for two weeks at a time.

[1073] Core needle aspiration biopsies were collected during the luteal phase. The biopsies were collected under ultrasound guidance from the upper outer quadrant of one breast using a 14 Gauge needle with an outer diameter of 2.2 mm. The end-of-treatment breast biopsy was taken from the same area.

### Sample Processing and DNA Extraction

[1074] When preparing for sample storage in the laboratory, cervical smear samples were poured into 50 ml Falcon tubes and left to sediment at room temperature for 2 hours. 1 mL wide bore tips were then used to transfer the enriched cellular sediment into a 2 mL vial. The cervical sediments were washed twice with PBS, lysed, and stored temporarily at −20° C. ahead of extraction. The Copan 4N6FLOQ Buccal Swabs were cut and lysed sequentially in the same aliquot of lysis buffer prior to temporary storage at −20° C. ahead of extraction. Whole blood samples were simply held transiently at −20° C. until DNA extraction. DNA was extracted from whole blood, cervical and buccal tissue lysates on a Hamilton Star liquid handling platform using the Nucleo-Mag Blood 200 ul kit (Macherey Nagel, cat #744501.4) with prior modifications for optimal lysis of cervical cell pellets and paired buccal swabs. For breast tissues, DNA was extracted from up to 40 mg of tissue using the Lipid Tissue kit from Macherey Nagel (cat #740471.50), and the manufacturer's instructions were followed. DNA concentration and quality absorbance ratios were measured using Nanodrop-8000, Thermoscientific Inc. Extracted DNA was stored at −80° C. until further analysis.

### DNA Methylation Array Analysis

[1075] Cervical, buccal and breast tissue DNA was normalised to 25 ng/ul and 500 ng total DNA was bisulfite modified using the EZ-96 DNA Methylation-Lightning kit (Zymo Research Corp, cat #D5047) on the Hamilton Star Liquid handling platform. 8 ul of modified DNA was subjected to methylation analysis on the Illumina InfiniumMethylation EPIC BeadChip (Illumina, CA, USA) at UCL Genomics according to the manufacturer's standard protocol.

### Microbiome Analysis

[1076] The inventors have described the microbiome analyses recently 26. In brief, during wet laboratory processing, each cervical smear sample was poured into 50 mL Falcon tubes (Fisher Scientific, Loughborough, UK) and left to sediment at room temperature for 2 h. 1 mL wide-bore tips were used to transfer cervical cell enriched sediment to 2 mL cryovials, which were stored at −80° C. Next-generation sequencing was done on all samples in both sets. Total DNA extraction from cervical smears was done with the QIAsymphony DSP Virus/Pathogen kit (Qiagen, Hilden, Germany) according to the manufacturer's instructions. Sequencing and taxonomical classification of bacterial species in cervical samples was done by Eurofins Genomics Europe Sequencing (Constance, Germany) as previously described.12 In brief, the hypervariable V1-V3 region of the bacterial small subunit ribosomal DNA (16S rRNA genes) was amplified with primers modified from work by Klindworth and colleagues (27F 5′-AGAGTTTGATCCTGGCTCAG and 534R 5′-ATTACCGCGGCTGCTGG) to decrease melting temperature stringency and, as a result, increase taxonomic coverage, including Illumina adapters and dual index barcodes. These barcoded libraries were equimolarly pooled and sequenced on the HiSeq2500 with 300 bp paired-end reads (HiSeq Rapid SBS Kit v2; Illumina, San Diego, CA, USA). The 16S rRNA gene PCRs, next-generation sequencing libraries, and pooled libraries were quality checked by Eurofins Genomics via electropherograms and fluorometer concentration determinations. Additionally, positive and negative controls were included in each library preparation, including DNA extraction batches.

[1077] To process the 16S rRNA gene-sequencing data, the demultiplexed sequencing reads were quality checked, trimmed, and filtered with Sickle (version 1.33; settings: −q 20, −1 246, −n yes), and adapters and primers were removed with Cutadapt (version 1.10; settings: −minimum-length 246). Overlapping paired-end reads were merged for full-length V1-V3 16S amplicons with FLASH (version 1.2.11; settings: −min-overlap 10, −max-overlap 300, −max-mismatch-density 0.25) and clustered with CD-HIT (version 4.6; settings: −c 0.99 and cluster filtered, resulting in a minimum number of two members), and then chimeric sequences were removed with UCHIME (version 4.2.40). Operational taxonomic units were assigned with BLASTN+(version 2.4.0; −evalue 1e-06) via a non-redundant 16S rRNA reference database from the Ribosomal Database Project (release 11), and filtered to ensure that only high-quality operational taxonomic units were included (ie, 97% identity threshold, 95% alignment coverage, 376 query length threshold, and 10% bitscore threshold). Taxonomic classification was based on the US National Center for Biotechnology Information taxonomy. To establish species diversity and evenness, the inventors calculated both the Shannon and the Simpson indices for each sample.

[1078] For the purposes of this study, the inventors collapsed Ravel's 29 four Lactobacillus community groups I, II, III, and V into one microbial community, which the inventors referred to as community type L. The inventors divided samples into people whose cervicovaginal microbiota consisted of at least 50% community type L and those whose microbiota consisted of less than 50% community type L, which the inventors referred to as community type 0. Generally, community type L microbiota are dominated by a Lactobacillus species, whereas type 0 microbiota communities have more bacterial diversity, are composed of typical obligate and facultative anaerobe genera (such as Gardnerella or Atopobium species), and are in turn associated with aerobic vaginitis and bacterial vaginosis.

### Methylation Analysis

[1079] All methylation microarray data were processed through the same standardised pipeline. Raw data was loaded using the R package minfi. Any samples with median methylated and unmethylated intensities <9.5 were removed. Any probes with a detection p-value >0.01 were regarded as failed. Any samples with >10% failed probes, and any probes with >10% failure rate were removed from the dataset. Beta values from failed probes (approximately 0.001% of the dataset) were imputed using the impute.knn function as part of the impute R package.

[1080] Non-CpG probes (2,932), SNP-related probes as identified by Zhou et. al. 30 (82,108), and chrY probes were removed from the dataset. An additional 6,102 previously identified probes that followed a trimodal methylation pattern characteristic of an underlying SNP were removed.

[1081] Background intensity correction and dye bias correction was performed using the minfi single sample preprocessNoob function. Probe bias correction was performed using the beta mixture quantile normalisation (BMIQ) algorithm.

[1082] The fraction of immune cell contamination, and the relative proportions of different immune cell subtypes in each sample, were estimated using the EpiDISH algorithm using the epithelial, fibroblast and immune cell reference dataset. The top 1,000 most variable probes (ranked by standard deviation) were used in a principal component analysis. Statistical tests were performed in order to identify any anomalous associations between plate, sentrix position, date of array processing, date of DNA creation, study centre, immune contamination fraction, age, type (case versus control) and the top ten principal components. Finally, two-thirds of the discovery dataset was randomly selected for use as the training dataset and the remaining third was allocated to the internal validation dataset. This split was carried out once, and the same training and validation sets were used in all subsequent analyses.

[1083] 113 samples were downloaded from the ENCODE database (https://www.encodeproject.orgi; see Additional Data). The beta mixture quantile normalisation was applied to these samples after using minfi to extract beta values.

### Statistical Analyses for Classifier Development

[1084] Contamination by immune cells presented a challenge with respect to the identification of differentially methylated positions (DMPs) as differential methylation that occurred solely in epithelial cells was diminished in samples with high IC and vice versa. In order to overcome this, the inventors linearly regressed the beta values on IC for each CpG site, the linear models being fitted to cases and controls separately. The intercept points at IC=0 were used as estimates of mean beta values in cases and controls in a pure epithelial cell population. The difference between these intercept points provided a delta-beta estimate in epithelial cells. The difference between intercept points at IC=1 provided immune cell delta-beta estimates. A list of ranked CpGs was produced according to delta-beta estimates in epithelial cells.

[1085] The R package glmnet was used to train classifiers with a mixing parameter value of alpha=0 (ridge penalty) and alpha=1 (lasso penalty) with binomial response type. Data from the training dataset were used to fit the classifiers. A ranked list of CpGs was generated by taking the CpG with the largest epithelial delta-beta, followed by the CpG with the largest immune delta-beta, followed by the next largest epithelial delta-beta and so forth (any duplicates were removed). The top n CpGs from the list of ranked CpGs were used as inputs to the classifier. Ten-fold cross-validation was used inside the training set by the cv.glmnet function in order to determine the optimal value of the regularisation parameter lambda. The AUC was used as a metric of classifier performance which was evaluated on the internal validation dataset as a function of n, the number of CpGs used as inputs during training. The maximum value of n was 30,000.

[1086] The optimal classifier was selected based on the highest AUC obtained in the internal validation dataset. Once the optimal number of inputs was determined, the training and internal validation datasets were combined and the classifier was refitted using the entire discovery dataset with alpha and lambda fixed to their optimal values. This finalised classifier was then applied to the external validation dataset and the corresponding AUC was computed.

[1087] Denoting the top n CpGs as x₁, . . . , xₙ and the regression coefficients from the trained classifier as w₁, . . . , wₙ then WID-BC-index=Σᵢ₌₁ⁿ(wᵢxᵢ−μ)/σ where μ and σ are defined as the mean and standard deviation of the quantity Σᵢ₌₁ⁿwᵢxᵢ in the training dataset (that is, the index is scaled to have zero mean and unit standard deviation in the training dataset).

### Decomposition of Index

[1088] The inventors aimed to estimate how much variability across the 29,000 CpGs in the WID-BC-index could be attributed to epithelial cells or immune cells. An example of a CpG with high variability in epithelial cells and low variability in immune cells is given in FIG. 1B. For each CpG the inventors applied the following model. The inventors assumed that the epithelial beta values follow a beta distribution Beta(β|a₀,b₀) with shape parameters a₀>0 and b₀>0, and that immune beta values followed Beta(β|a₁, b₁) with shape parameters a₁>0 and b₁>0. The inventors assumed that each sample is a combination of epithelial and immune cells and that ρᵢ∈[0,1] is the proportion of immune cells in sample i, i=1, . . . , N. The quantities ρᵢ were obtained from the EpiDISH algorithm. The following log likelihood function was numerically optimised with respect to a₀, b₀, a₁, b₁:

$$L ( {a}_{0} , {b}_{0} , {a}_{1} , {b}_{1} ) = - \frac{1}{N} {\sum }_{i = 1}^{N} log [ ( 1 - {ρ}_{i} ) Beta ( {β}_{i} \vert {a}_{0} , {b}_{0} ) + {ρ}_{i} Beta ( {β}_{i} \vert {a}_{1} , {b}_{1} ) ]$$

and the variance of the epithelial and immune beta distributions were used as estimates of epithelial and immune variance.

### Enrichment Analyses

[1089] The epithelial delta-beta estimates were used to compute the top 1,000 hyper and hypo CpGs. These were used as inputs to the eFORGE 2.0 tool 24 (accessed at https://eforge.altiuisinstitute.org/). Data from the “Consolidated Roadmap Epigenomics DHS” were used for the analysis. The default options of 1 kb proximity window, 1,000 background repetitions, and strict and marginal significance thresholds of 0.01 and 0.05 were used.

[1090] A gene set enrichment analysis (GSEA) 25 was carried out by first selecting for each gene TSS200 region the CpG with the largest epithelial delta-beta estimate (both hyper- and hypo-methylated). Genes were then ranked according to the absolute value of these delta-beta estimates. The C2 curated gene set, c2.all.v6.2.symbols.gmt, was downloaded from MSigDB. The fgsea R package was used to perform the enrichment analysis with parameters minSize, maxSize, and nperm set to 15, 500, and 10,000 respectively.

### Analysis of Breast Tissue Samples

[1091] The cell type composition of each sample was estimated using EpIDISH with the epithelial, fibroblast, fat, and immune cell reference dataset. In contrast to cervical samples, fat cells constituted a substantial proportion of each sample. Results from cervical smear data indicated that the index performs independently of epithelial and immune proportions (fibroblasts formed a negligible proportion of cells). A linear adjustment was therefore made for fat content by splitting the samples into normal, BRCA carrier, adjacent, and TNBC groups. The inventors linearly regressed the WID-BC-index on fat in each group and obtained an estimate of what the index values would be if all four groups had the same fat composition. Similarly, samples from the mifepristone trial were split into mifepristone before, mifepristone after, placebo before, and placebo after groups. Within each group the inventors linearly regressed the index on fat proportion in order to obtain estimates of the index after adjustment for fat content.

### SNP Genotyping, QC and Imputation

[1092] In total, 318 breast cancer case subjects and 850 controls from the methylation discovery cohort were taken forward for genotyping using an Illumina 650 k Infinium Global Screening Array (GSA). Whole blood DNA was normalised to 75 ng/ul and a total of 300 ng applied to the Infinium Global Screening Array −24 V2 (Illumina, CA, USA) at UCL Genomics according to the manufacturer's standard protocol.

[1093] One control subject from this cohort failed to genotype. Genotype calling was performed using GenomeStudio, with genetic variants found to be clustering poorly being removed from further analyses. For duplicate genetic variant pairs, the variant within each pair with the lowest calling and clustering score was excluded. Autosomal SNPs were used in subsequent QC and PRS analyses (except for checks for sex mismatches, where the X chromosome was used to infer sex).

[1094] General subject and single nucleotide polymorphism (SNP) quality control (QC) was performed using PLINK version 1.9³¹. Three breast cancer cases and eight controls with a call rate less than 95% were excluded. One breast cancer case and three controls were further removed due to genetically inferred sex not being female. Genetic variants with a missing genotype rate greater than 5%, minor allele frequency (MAF) less than 1% or a significant departure from Hardy-Weinberg equilibrium (p-value <5×10⁻⁶) were excluded.

[1095] KING³², a relatedness inference algorithm, was used to identify duplicate/monozygotic twin or first-degree relative pairs. One control subject pair was identified as being a duplicate/monozygotic twin pair, and nine control pairs were inferred to be first-degree relatives. The subject within each related pair with the lowest call rate was excluded. After performing QC, 314 breast cancer case subjects, 816 controls and 479,105 variants were retained in the SNP discovery sample.

[1096] Non-European subjects were identified by plotting the top two principal components, generated using GCTA version 1.26.0, for the SNP discovery samples and 270 HapMap phase II release 23 samples (CEU, YRI, JPT and CHB individuals) downloaded in PLINK-formatted binary files. Subjects found not to cluster around HapMap European samples were excluded from further analyses. After excluding non-European subjects, 305 breast cancer cases and 754 controls were retained in the SNP discovery sample.

[1097] Using the Michigan Imputation Server 33 and 1000 Genomes Phase 3 reference panel, the SNP discovery dataset went through further QC before being phased (Eagle2) and imputed. Variants where strand, allele, genetic position or allele frequencies were not concordant with the 1000 Genomes Phase 3 reference panel were removed before phasing and imputation using Strand Tools.

[1098] After imputation, exclusion of variants with imputation R²<0.5 and removal of variants observed to have 3 or more alleles, 303 of the 313 SNPs used by Mavaddat et al. 22 to develop a 313 SNP breast cancer polygenic risk score (PRS) were successfully imputed. The inventors constructed a breast cancer PRS for each subject in the discovery cohort, such that the PRS is equal to:

$${PRS}_{j} = {\sum }_{i = 1}^{303} {\hat{β}}_{i} {x}_{ij}$$

where, \hat{β}ᵢ is the log odds ratio for the i-th SNP taken from publically available Oncoarray summary association results³⁴ (combined Oncoarray, iCOGs and BCAC overall breast cancer beta values) and xᵢⱼ is the number of copies of the effect allele present in each discovery cohort subject. Scores were generated using PLINK version 1.9.

### Data Availability

[1099] DNAme data has been deposited in the European Genome-phenome Archive (EGA), which is hosted by the EBI and the CRG, under accession number EGASXXXXXXXXXXX.

### EXAMPLE

[1100] The inventors performed an epigenome-wide DNAme analysis in cervical smear samples from women who had recently been diagnosed with breast cancer, and in matched controls, and established the WID-BC-index (Women's risk IDentification for Breast Cancer index) which the inventors validated in buccal samples and in an independent set of cervical samples. Further validation was done in samples from women with ovarian cancer and a set of matched cervical, buccal, and blood samples from BRCA mutation carriers. In addition, the inventors assessed the WID-BC-index in a larger number of different cell types as well as in normal breast and breast cancer tissue samples.

### Sample Heterogeneity and Differential Methylation

[1101] For the Discovery Set, the inventors collected samples from 329 women with primary breast cancers with poor prognosis features (defined by >2 cm cancers and/or lymph-node positive and/or grade 3 and/or hormone-receptor negative) from 14 European centres at the time of diagnosis and before treatment commenced, and 869 women without breast cancer (593 from the general population and 276 from women attending hospital for benign women-specific conditions) (Extended Data Table 1). Epigenome-wide DNAme was analysed using an Illumina Infinium EPIC bead chip array which encompasses over 850,000 CpG sites¹⁸.

[1102] The inventors assessed the level of cell type heterogeneity in each cervical smear sample using HEpiDISH¹⁹, an algorithm that infers the relative proportion of epithelial cells, fibroblasts, and seven subtypes of immune cells in each sample. The distribution of immune cell contamination (IC) was approximately uniform in both samples from cancer cases and controls. There was a significantly greater proportion of epithelial cells in cancers, and correspondingly fewer immune cells across all subtypes in the discovery dataset (FIG. 1A). This difference was comparatively small however, and absent in the external validation dataset (FIG. 7A).

[1103] Identifying CpGs with differential methylation between cases and controls was hampered by sample heterogeneity, since any differential methylation specific to epithelial cells was greatly diminished in samples with high IC (FIG. 1B). In order to infer which CpGs may contain a potential discriminatory signal, the inventors developed a statistical protocol to estimate the delta-beta (i.e. difference in mean proportion of methylated cells) between cases and controls in a pure epithelial cell sample, and a pure immune cell sample. The inventors linearly regressed beta values on IC fraction in both cases and controls separately. The difference between the two points where these lines intercept the y-axis at IC=0, gives an estimate of the delta-beta between cases and controls in pure epithelial cells. Conversely, the difference between intercept points at the IC=1 axis gives a delta-beta estimate in immune cells.

### Development of Discriminatory Index

[1104] In order to derive a diagnostic methylation signature, termed the WID-BC-index, the inventors used ridge and lasso regression to classify individuals as cases or controls. Classifiers were trained on two thirds of the discovery dataset (572 cancer-free controls, 217 breast cancer cases) and the remaining one third was used as an internal validation set (297 controls, 112 cases) with the intention of evaluating their performance as a function of the number of CpGs used to construct the index. The area under the receiver operator characteristic curve (AUC) was used as a measure of predictive performance. CpGs were ranked by combining the epithelial delta-beta ranking with the immune delta-beta ranking.

[1105] Predictive performance was evaluated as a function of n, the number of CpGs used to train the classifier, using the internal validation dataset (FIG. 1C) and optimal performance of 0.84 (95% CI: 0.80-0.88) was achieved using 29,000 CpGs with ridge regression (FIG. 1D). The WID-BC-index was moderately, but significantly associated with IC fraction in the internal validation set (FIG. 1E, linear regression coefficients of −0.55, p=0.004 and −0.20, p=0.07 in cases and controls, respectively).

[1106] In samples with an IC fraction ≤0.5 and IC>0.5 the AUC was 0.85 (95% CI: 0.78-0.91) and 0.86 (95% CI: 0.80-0.91), respectively, suggesting that discriminatory signals are present in both epithelial and immune cells. In order to resolve cell-type specific signals the inventors attempted to infer which of the 29,000 CpGs account for most of the variability in epithelial cells (and hence potentially drive an epithelial-specific signal) and which vary most in immune cells. Firstly, it was observed that a substantial number of CpGs follow the distinctive bimodal distribution in epithelial cells as shown in FIG. 1B. The inventors developed a bimodality detection algorithm and found that 8,442 out of the 29,000 CpGs followed this pattern. A principal component analysis of these bimodal CpGs in training set samples with an IC<0.5 revealed two distinct subgroups. In the internal validation set, 37.3% of the larger subgroup were breast cancer cases compared to 19.5% in the smaller subgroup (OR: 2.43; 95% CI: 1.23-4.84).

[1107] The inventors then developed a statistical model to infer the epithelial and immune variance at each remaining CpG site. CpGs were divided into “epithelial” (10,119 CpGs), “immune” (3,525 CpGs) or “shared” (6,914 CpGs) subsets as shown in FIG. 1F. Since the WID-BC-index is defined as a weighted sum of 29,000 beta-values the index can be split into four subcomponents by taking the weighted sums corresponding to each of the four subsets of CpGs (FIG. 1G). As expected, the epithelial subcomponent captures an epithelial-specific signal in the internal validation set, the immune subcomponent corresponds to an immune-specific signal, whereas the shared subcomponent captures a signal that is shared across both cell types (FIG. 8). The inventors evaluated the AUC in the internal validation set after omitting each subcomponent and observed that the removal of the epithelial component leads to the greatest reduction in performance suggesting that this component is particularly informative (FIG. 1H).

[1108] The inventors found that the index was highly depleted of CpG islands and enriched for Open Sea regions (FIG. 1I). Ridge regression combines information from all input CpGs in contrast to lasso regression, which typically selects a small subset of inputs. Ridge regression offered consistently superior performance suggesting that the discriminatory signal is most robustly extracted by combining a large number of comparatively weak signals from predominantly open sea CpG sites. The inventors ranked the 29,000 CpGs used to define the WID-BC-index according to the absolute value of the regression coefficients from the ridge model. In order to assess how informative the top CpG sites are the inventors trained sub-classifiers on the top n sites (FIG. 1J). The inventors observed that AUCs of 0.78 and 0.81 can be achieved with the top 500 and 1,000 CpGs respectively indicating that the top ranked subsets are particularly informative. The inventors also trained sub-classifiers after removing the top n CpGs, and on subsets of 500 CpGs after partitioning the ranked list into bins of size 500. In both cases, the inventors found that a substantial predictive signal is present.

### External Validation

[1109] A separate independent external validation dataset consisting of 225 controls and 113 cases was used to validate the index performance (Extended Data Table 1). The WID-BC-index was computed for each woman (FIG. 2A) resulting in an AUC of 0.81 (FIG. 2B; 95% CI: 0.76-0.86). There was no significant dependence on IC.

Validation in Women with a BRCA Mutation

[1110] DNAme is tissue specific and specific exposures are recorded in certain cell subtypes^{17,20,21}. The index decomposition in FIG. 1F implies that the WID-BC-index subtypes uses epithelial- and immune-specific signals as well as a shared component. In order to assess whether the WID-BC-index (derived from cervical smear samples) can be extended to other tissue types the inventors analysed an independent dataset of matched cervical, buccal and blood samples from yet unaffected BRCA1 (n=58) and BRCA2 (n=53) mutation carriers and 116 healthy controls. Similar to the cervical smears, a substantial proportion of buccal DNA originates from immune cells (Extended Data FIG. 2B,C). In BRCA1 carriers the inventors observed an AUC of 0.61 (FIG. 2C; 95% CI: 0.52-0.69) in cervical samples, 0.67 (FIG. 2D; 95% CI: 0.59-0.76) in buccal samples, and 0.64 (FIG. 2E; 95% CI: 0.56-0.72) in blood. In BRCA2 carriers whose breast cancer risk is lower the AUCs were 0.55 (95% CI: 0.52-0.69) in cervical samples, 0.61 (95% CI: 0.52-0.71) in buccal samples, and 0.60 (95% CI: 0.51-0.69) in blood (FIG. 8E-G).

[1111] Furthermore in this set, the inventors observed strong correlations between all three matched tissue types (FIG. 9). As expected, the strongest correlations were between the shared subcomponent confirming that this signal is not tied to any particular cell subtype. The immune subcomponent was also strongly correlated across tissues. The epithelial component was relatively weakly correlated, particularly between cervical and buccal samples.

### Performance of Index in Matched Buccal Samples

[1112] In order to further assess whether the WID-BC-index can discriminate breast cancer cases from unaffected controls based on DNAme profiles in buccal samples the inventors analysed matched buccal samples from a subset of 135 women in the internal validation set (69 controls and 66 cases). The cell type composition of these buccal samples was comparable to the BRCA dataset (FIG. 7G). The inventors found that the discriminatory signal derived using cervical smear samples was also present in these matched buccal samples (FIG. 3A), yielding an AUC of 0.69 (FIG. 3B; 95% CI: 0.60-0.79). There was a correlation of 0.57 (p<10-12) between the WID-BC-index computed in matched cervical and buccal samples. The immune and shared subcomponents showed the greatest discriminatory performance (FIG. 10C,D).

### Ovarian Cancer

[1113] The inventors additionally analysed 242 cervical samples from women with ovarian cancer. The inventors obtained an AUC of 0.69 (FIG. 3C,D; CI: 0.65-0.74) in these 242 samples and the same 297 control samples from the breast cancer internal validation set. The subcomponents followed a similar pattern as the breast cancer cases (FIG. 10E-H). Consistent with the breast cancer internal validation set, the odds ratio associated with the largest bimodal group was 1.6 (95% CI: 0.97-2.61).

[1114] For each of our validation datasets the inventors computed odds ratios corresponding to quartiles of the WID-BC-index (Tables 5A-F).

Association with Epidemiological and Clinical Factors

[1115] The inventors investigated the relationship between the WID-BC-index and various epidemiological variables using the internal and external validation datasets (the training dataset is not suitable because it was used to develop the index). A statistically significant association was found between the WID-BC-index and age (FIG. 4A, correlation coefficients of 0.27, p<10-9 and 0.33, p<10-6 in controls and cases respectively). The Illumina 650 k Infinium Global Screening Array was used to genotype matched blood samples from a subset of 314 cases and 816 controls in the discovery set. The inventors computed a recently published polygenic risk score (PRS; 303 of the 313 SNPs described 22 were used) for breast cancer prediction. In the 107 cases and 280 controls from the internal validation set the inventors found a modest but significant correlation of 0.13 (p=0.03) between the PRS and the WID-BC-index (FIG. 4B) in controls and no significant correlation in cases (correlation coefficient −0.03, p=0.7). In the entire discovery set the PRS had an AUC of 0.67 (FIG. 4C; 95% CI: 0.64-0.71). No significant association was found between the WID-BC-index and BMI (FIG. 4D). No significant difference in the WID-BC-index was observed between individuals with 0 and >1 first-degree-relatives with breast cancer (FIG. 4E), age of menarche (FIG. 4F), or age at first live birth (FIG. 4G). The index was significantly higher in postmenopausal women (FIG. 4H, p<10-5) and women who had undergone hormone replacement therapy (FIG. 4I, p<0.001). There was no association between the WID-BC-index and clinic-pathological features of the cancers.

[1116] No significant association was found between the WID-BC-index and various technical parameters including the time between sample collection and processing (FIG. 11A), date of processing, plate number (samples were processed on 96 sample plates) and sentrix position. No difference was found between control samples from healthy volunteers and women presenting at hospitals for benign women-specific conditions (FIG. 11B).

### The WID-BC-Index is Reflective of a Fat-Cell Differentiation

[1117] In order to assess whether the WID-BC-index is reflective of a cell-specific program the inventors analysed all ENCODE samples (Additional Data) for which EPIC array data were available. The inventors ranked and plotted the WID-BC-index in all primary cell samples and in vitro differentiated cell samples and found a high WID-BC-index in non-epithelial cells (FIG. 5A). The majority of tissue samples contain substantial proportions of fat, as determined by the Epidish algorithm, and hence the inventors have plotted the WID-BC-index against the fat content of the respective tissue samples (FIG. 5B). Surprisingly the inventors find a very strong direct correlation between the WID-BC-index and the fat content of the sample irrespective of whether the sample was taken from an epithelial or non-epithelial organ. These findings strongly indicate that the WID-BC-index is reflective of a fat cell program.

### WID-BC-Index in Breast Tissue

[1118] We, and others, have demonstrated the existence of an epigenetic field defect in the normal breast adjacent to a breast cancer^{9, 23}. The inventors therefore wanted to assess whether the WID-BC-index, which was established in cervical smear samples in women with and without a breast cancer, is reflected in normal and cancerous breast tissue. The inventors analysed 14 normal breast samples from healthy women, 14 normal breast samples from women with a BRCA mutation, 14 normal breast samples adjacent to a triple-negative breast cancer, and 14 matched cancer samples. As expected, in contrast to cervical and buccal samples, the inventors found that fat cells constituted a substantial proportion of normal samples and substantially less so for cancerous breast tissue samples (FIG. 7H). The inventors also analysed breast tissue samples from a clinical trial consisting of 21 BRCA carriers and 23 healthy controls who donated samples before and after treatment with either mifepristone or placebo. As expected, the inventors found that in all four sample groups and the clinical trial samples the index is substantially higher in fat cells (FIG. 5C) and that this leads to an overall increase in the index in comparison to cervical samples. After linearly adjusting for fat content the inventors observed a distinct trend in which the WID-BC-index increased in tissues that are at increased risk of developing cancer and was highest in breast cancer (FIG. 5D).

eFORGE

[1119] In order to further assess the functional aspect of the WID-BC-index the inventors utilized the eFORGE tool 24 to search for enrichment of cell-type specific CpGs in the top 1,000 hyper- and hypo-methylated epithelial CpGs. The strongest enrichment in (i) hyper-methylated CpGs was for breast epithelial cell-specific CpGs and muscle, fibroblasts and mesenchymal cells (FIG. 5E) and in (ii) hypo-methylated CpGs for a foetal-like program with enrichment for stem cells and foetal and gastrointestinal differentiation (FIG. 5F). These findings suggest that in cervical smear samples from breast cancer cases the epigenome has undergone an epigenetic re-programming which may be reflective of a limited capacity for mammary epithelial cell differentiation and a shift towards mesenchymal and foetal/gastrointestinal programs. In addition, a gene set enrichment analysis was performed using the Broad Institute's Molecular Signatures Database 25 (Extended Data Table 2) and breast cancer associated pathways were enriched in hypo-methylated genes.

### WID-BC-Index Reflects Cervicovaginal Microbiome

[1120] Due to the fact that the WID-BC-index is reflective of an aberrant differentiation at the level of the epigenome the inventors wanted to assess whether this also impacts on functional aspects like the ability to host microbiome communities. The inventors analysed the cervicovaginal microbiomes from a subset of 229 women in the ovarian cancer dataset (56 controls and 173 ovarian cancer cases) which underwent 16S rRNA gene sequencing 26. Samples in which lactobacilli species accounted for greater than 50% of species present were classified as Type-L (95 samples), otherwise they were classified as Type-0 (134 samples). A principal component analysis of the 8,442 bimodal CpGs used in the WID-BC-index in samples with an IC<0.5 (48 Type-L and 61 Type-O) showed that the two bimodal subgroups overlap substantially with microbiome type (FIG. 5G). A similar pattern was observed in the epithelial component (FIG. 12A) but not the immune or shared components (FIG. 7B,C).

### Cancer Index Values and Clinical Actions

[1121] Four sub-groups defined by ranges of cancer index values are specified in Table 8 as corresponding to preferred clinical actions, comprising intensified screening, administration of therapeutics and surgery. The subgroups are quartiles based on control samples from the internal validation set. That is, these values of the index split the control samples into four equally sized groups. Odds ratio values are calculated by comparing the number of cases and controls in a given quartile to the first quartile (which is taken as a reference). Odds ratio values are determined for breast cancer risk, ovarian cancer risk and BRCA1 mutation risk. For the breast cancers these estimates are based on the internal validation dataset. For example, a woman in the fourth quartile is roughly 15 times more likely to have breast cancer than a woman in the first quartile.

### DISCUSSION

[1122] The inventors have identified a cervical smear based DNAme signature (the WID-BC-index) which provides an unprecedented opportunity to identify women with a primary breast cancer with poor prognosis features based on a bio-sample which has no direct (anatomical) link to the diseased organ (i.e. women in the top quartile of the WID-BC-Index have a 15.7 fold increased risk for breast cancer independent of any other risk factors; Table 5b). The fact that the WID-BC-index discovered in a cervical smear sample (i) does not increase with tumour size or surrogates for dissemination (i.e. nodal metastasis), (ii) increases in normal breast samples with increasing tendency towards cancer and is highest in the cancer tissue and (iii) is reflective of a fat cell epigenetic program, strongly supports the view that cervical DNAme reflects breast cancer predisposition rather than purely the current presence of an established breast cancer. This notion is further supported by the fact that the index also identifies women with ovarian cancer and those women who have a very high risk of developing both breast and ovarian cancer (i.e. due to a BRCA1 mutation)—likely at least in part due to cell-nonautonomous factors²⁷. The fact that the WID-BC-index is able to identify women who have a BRCA1 mutation is quite surprising because the inclusion criteria that the inventors have chosen for this set (i.e. women without risk reducing surgery and who had not developed a cancer yet) were biasing against those carriers with the highest risk.

[1123] Our findings described here are consistent with data published more than 30 years ago showing that patients with hereditary breast cancer and their first degree relatives harbour a differentiation defect²⁸. Interestingly this “epigenetic misprogramming” leads to functional alterations locally (i.e. reduced capacity to host lactobacilli in the vagina) and due to “epigenetic assimilation” of epithelial cells to fat cells might facilitate unregulated mixing of epithelial and fat cells in the breast, which is synonymous with invasive growth. The fact that the pathways associated with breast cancer metastasis into organs with high fat content (bone metastasis via the bone marrow) were enriched in hypo-methylated genes strongly supports this.

[1124] Considerable effort in the past has shown that by combining SNPs, mammographic density, and epidemiologic risk factors the AUC that predicts breast cancer can be increased up to 0.68⁶. Studying population-based cervical smear samples from women who develop a breast cancer several years after sample donations will be a prerequisite in order to assess whether the actual risk-predictive nature of the WID-BC-index will continue to outperform current breast cancer predictive algorithms. Whether DNAme profiles assessed in cervical smear samples, and/or in breast samples, can act as surrogates for monitoring breast cancer preventive measures will need to be assessed in prospective clinical trials.

TABLE 5A

| Quantile | Control | Cancer | OR (unadjusted) | | OR (adjusted) | |
|---|---|---|---|---|---|---|
| (−1.53, −0.58) | 75 | 2 | 1.00 | (reference) | 1.00 | (reference) |
| (−0.58, −0.28) | 74 | 5 | 2.42 | (0.48, 19.25) | 2.29 | (0.45, 17.15) |
| (−0.28, 0.07) | 74 | 17 | 8.01 | (2.17, 56.31) | 8.47 | (2.23, 55.81) |
| (0.07, 1.62) | 74 | 88 | 41.11 | (12.33, 274.77) | 41.73 | (12.2, 262.62) |

TABLE 5B

| | Con- | Can- | | | | |
|---|---|---|---|---|---|---|
| Quantile | trol | cer | OR (unadjusted) | | OR (adjusted) | |
| (−1.53, −0.58) | 58 | 8 | 1.00 | (reference) | 1.00 | (reference) |
| (−0.58, −0.28) | 69 | 8 | 0.84 | (0.29, 2.46) | 0.89 | (0.3, 2.67) |
| (−0.28, 0.07) | 50 | 14 | 2 | (0.78, 5.46) | 2.57 | (0.95, 7.51) |
| (0.07, 1.62) | 48 | 83 | 12.19 | (5.62, 29.86) | 15.67 | (6.59, 42.38) |

TABLE 5C

| | Con- | Can- | | | | |
|---|---|---|---|---|---|---|
| Quantile | trol | cer | OR (unadjusted) | | OR (adjusted) | |
| (−1.53, −0.58) | 75 | 13 | 1.00 | (reference) | 1.00 | (reference) |
| (−0.58, −0.28) | 74 | 11 | 0.86 | (0.35, 2.06) | 0.76 | (0.3, 1.94) |
| (−0.28, 0.07) | 74 | 17 | 1.32 | (0.6, 2.98) | 0.81 | (0.32, 2.03) |
| (0.07, 1.62) | 74 | 42 | 3.23 | (1.64, 6.76) | 2.42 | (1.18, 5.21) |

TABLE 5D

| | Con- | | | | | |
|---|---|---|---|---|---|---|
| Quantile | trol | Cases | OR (unadjusted) | | OR (adjusted) | |
| (−1.53, −0.58) | 54 | 17 | 1.00 | (reference) | 1.00 | (reference) |
| (−0.58, −0.28) | 20 | 14 | 2.2 | (0.91, 5.36) | 1.74 | (0.65, 4.6) |
| (−0.28, 0.07) | 20 | 10 | 1.59 | (0.6, 4.05) | 1.27 | (0.45, 3.46) |
| (0.07, 1.62) | 20 | 16 | 2.51 | (1.06, 6.01) | 2.26 | (0.78, 6.61) |

TABLE 5E

| | Con- | | | | | |
|---|---|---|---|---|---|---|
| Quantile | trol | Cases | OR (unadjusted) | | OR (adjusted) | |
| (−1.39, −1.02) | 29 | 4 | 1.00 | (reference) | 1.00 | (reference) |
| (−1.02, −0.75) | 29 | 14 | 3.37 | (1.05, 13.45) | 2.9 | (0.86, 11.64) |
| (−0.75, −0.45) | 29 | 17 | 4.08 | (1.3, 16.03) | 4.91 | (1.5, 19.52) |
| (−0.45, 0.91) | 29 | 27 | 6.44 | (2.16, 24.59) | 8.75 | (2.52, 38.02) |

TABLE 5F

| | Con- | | | | | |
|---|---|---|---|---|---|---|
| Quantile | trol | Cases | OR (unadjusted) | | OR (adjusted) | |
| (−2.09, −1.5) | 29 | 7 | 1.00 | (reference) | 1.00 | (reference) |
| (−1.5, −1.24) | 29 | 6 | 0.86 | (0.24, 2.97) | 0.84 | (0.24, 2.84) |
| (−1.24, −0.95) | 28 | 17 | 2.46 | (0.9, 7.33) | 2.71 | (0.99, 8.13) |
| (−0.95, 0.04) | 29 | 27 | 3.76 | (1.46, 10.77) | 4.63 | (1.68, 14.32) |

TABLE 6A
External validation

| Factor | Group | Control | | Cancer | | OR | | p-value |
|---|---|---|---|---|---|---|---|---|
| Age (years) | <52 | 91 | (40%) | 61 | (54%) | 1.00 | (reference) | — |
| | 52-64 | 85 | (38%) | 27 | (24%) | 0.48 | (0.27, 0.81) | 0.006 |
| | >64 | 49 | (22%) | 25 | (22%) | 0.76 | (0.42, 1.36) | 0.36 |
| Age at menarche (years) | <12 | 34 | (15%) | 31 | (27%) | 1.87 | (0.99, 3.54) | 0.05 |
| | Dec-13 | 119 | (53%) | 47 | (42%) | 0.81 | (0.48, 1.38) | 0.44 |
| | >13 | 72 | (32%) | 35 | (31%) | 1.00 | (reference) | — |
| Parous | Yes | 166 | (74%) | 81 | (72%) | 1.00 | (reference) | — |
| | No | 59 | (26%) | 32 | (28%) | 1.11 | (0.67, 1.84) | 0.68 |
| Age at birth of first live child | <21 | 16 | (10%) | 1 | (1%) | 1.00 | (reference) | — |
| (years) | 21-27 | 61 | (38%) | 20 | (25%) | 4.61 | (0.84, 116.32) | 0.08 |
| | >27 | 84 | (52%) | 59 | (74%) | 9.85 | (1.92, 241.73) | 0.003 |
| Menopausal status | Pre | 79 | (35%) | 57 | (50%) | 1.00 | (reference) | — |
| | Post | 146 | (65%) | 56 | (50%) | 0.53 | (0.34, 0.84) | 0.007 |
| Age at menopause (years) | <46 | 82 | (37%) | 36 | (33%) | 1.08 | (0.56, 2.13) | 0.81 |
| | 46-52 | 91 | (41%) | 53 | (49%) | 1.43 | (0.77, 2.75) | 0.26 |
| | >52 | 47 | (21%) | 19 | (18%) | 1.00 | (reference) | — |
| BMI (kg/m2) | <25 | 117 | (52%) | 67 | (59%) | 1.00 | (reference) | — |
| | 25-30 | 57 | (25%) | 29 | (26%) | 0.89 | (0.51, 1.52) | 0.67 |
| | >30 | 51 | (23%) | 17 | (15%) | 0.59 | (0.31, 1.08) | 0.09 |
| Oral contraceptive use | No | 29 | (34%) | 14 | (29%) | 1.00 | (reference) | — |
| (pre menopausal only) | Yes | 57 | (66%) | 35 | (71%) | 1.27 | (0.59, 2.79) | 0.55 |
| Hormone replacement therapy | No | 82 | (95%) | 49 | (98%) | 1.00 | (reference) | — |
| (post menopausal only) | Yes | 4 | (5%) | 1 | (2%) | 0.46 | (0.02, 3.46) | 0.49 |
| Smoking | No | 190 | (85%) | 100 | (88%) | 1.00 | (reference) | — |
| | Yes | 34 | (15%) | 13 | (12%) | 0.73 | (0.36, 1.42) | 0.37 |
| First degree relatives | 0 | 193 | (86%) | 98 | (87%) | 1.00 | (reference) | — |
| with breast cancer | 1 | 30 | (13%) | 14 | (12%) | 0.92 | (0.45, 1.8) | 0.82 |
| | 2+ | 2 | (1%) | 1 | (1%) | 1.05 | (0.03, 13.08) | 0.97 |

TABLE 6B
External validation

| Factor | Group | Control | | Cancer | | OR | | p-value |
|---|---|---|---|---|---|---|---|---|
| Age (years) | <52 | 538 | (62%) | 162 | (49%) | 1.00 | (reference) | — |
| | 52-64 | 208 | (24%) | 96 | (29%) | 1.53 | (1.13, 2.06) | 0.006 |
| | >64 | 123 | (14%) | 71 | (22%) | 1.92 | (1.36, 2.69) | <10\hat{ }−3 |
| Age at menarche (years) | <12 | 150 | (17%) | 67 | (21%) | 1.45 | (1, 2.12) | 0.05 |
| | Dec-13 | 437 | (51%) | 174 | (53%) | 1.3 | (0.96, 1.76) | 0.09 |
| | >13 | 277 | (32%) | 85 | (26%) | 1.00 | (reference) | — |
| Parous | Yes | 636 | (73%) | 263 | (80%) | 1.00 | (reference) | — |
| | No | 232 | (27%) | 65 | (20%) | 0.68 | (0.49, 0.92) | 0.01 |
| Age at birth of first live child | <21 | 22 | (3%) | 10 | (4%) | 1.00 | (reference) | — |
| (years) | 21-27 | 211 | (34%) | 83 | (32%) | 0.86 | (0.4, 1.98) | 0.71 |
| | >27 | 396 | (63%) | 167 | (64%) | 0.92 | (0.43, 2.09) | 0.83 |
| Menopausal status | Pre | 509 | (59%) | 159 | (48%) | 1.00 | (reference) | — |
| | Post | 360 | (41%) | 170 | (52%) | 1.51 | (1.17, 1.95) | 0.002 |
| Age at menopause (years) | <46 | 423 | (54%) | 105 | (34%) | 0.36 | (0.25, 0.53) | <10\hat{ }−6 |
| | 46-52 | 260 | (33%) | 138 | (44%) | 0.78 | (0.54, 1.13) | 0.18 |
| | >52 | 101 | (13%) | 69 | (22%) | 1.00 | (reference) | — |
| BMI (kg/m2) | <25 | 445 | (51%) | 201 | (61%) | 1.00 | (reference) | — |
| | 25-30 | 275 | (32%) | 81 | (25%) | 0.65 | (0.48, 0.88) | 0.005 |
| | >30 | 149 | (17%) | 47 | (14%) | 0.7 | (0.48, 1.01) | 0.05 |
| Oral contraceptive use | No | 378 | (84%) | 175 | (81%) | 1.00 | (reference) | — |
| (pre menopausal only) | Yes | 67 | (15%) | 36 | (17%) | 1.16 | (0.74, 1.8) | 0.51 |
| Hormone replacement therapy | No | 441 | (98%) | 216 | (100%) | 1.00 | (reference) | — |
| (post menopausal only) | Yes | 8 | (2%) | 1 | (0%) | 0.29 | (0.01, 1.61) | 0.18 |
| Smoking | No | 759 | (87%) | 290 | (88%) | 1.00 | (reference) | — |
| | Yes | 95 | (11%) | 39 | (12%) | 1.08 | (0.72, 1.59) | 0.72 |
| First degree relatives with | 0 | 770 | (89%) | 274 | (83%) | 1.00 | (reference) | — |
| breast cancer | 1 | 95 | (11%) | 54 | (16%) | 1.6 | (1.11, 2.29) | 0.01 |
| | 2+ | 4 | (0%) | 1 | (0%) | 0.77 | (0.03, 5.62) | 0.83 |

TABLE 6B
External validation

| Factor | Group | Set | |
|---|---|---|---|
| Age (years) | <52 | 61 | (54%) |
| | 52-64 | 27 | (24%) |
| | >64 | 25 | (22%) |
| Menopausal status | Pre | 57 | (50%) |
| | Post | 56 | (50%) |
| T-Stage | T1 | 50 | (44%) |
| | T2 | 49 | (43%) |
| | T3/T4 | 13 | (12%) |
| N-Stage | N0 | 49 | (43%) |
| | >N0 | 62 | (55%) |
| ER | Pos | 94 | (83%) |
| | Neg | 17 | (15%) |
| PR | Pos | 82 | (73%) |
| | Neg | 27 | (24%) |
| HER2 | Pos | 48 | (42%) |
| | Neg | 64 | (57%) |
| Grade | I | 8 | (7%) |
| | II | 51 | (45%) |
| | III | 54 | (48%) |
| Histology | Ductal | 93 | (82%) |
| | Lobular | 11 | (10%) |
| | Other | 9 | (8%) |

TABLE 6B
Internal validation

| Factor | Group | Set | |
|---|---|---|---|
| Age (years) | <52 | 162 | (49%) |
| | 52-64 | 96 | (29%) |
| | >64 | 71 | (22%) |
| Menopausal status | Pre | 159 | (48%) |
| | Post | 170 | (52%) |
| T-Stage | T1 | 141 | (43%) |
| | T2 | 163 | (50%) |
| | T3/T4 | 22 | (7%) |
| N-Stage | N0 | 153 | (47%) |
| | >N0 | 167 | (51%) |
| ER | Pos | 282 | (86%) |
| | Neg | 46 | (14%) |
| PR | Pos | 247 | (75%) |
| | Neg | 79 | (24%) |
| HER2 | Pos | 107 | (33%) |
| | Neg | 218 | (66%) |
| Grade | I | 21 | (6%) |
| | II | 135 | (41%) |
| | III | 170 | (52%) |
| Histology | Ductal | 242 | (74%) |
| | Lobular | 54 | (16%) |
| | Other | 33 | (10%) |

TABLE 7A

| | Con- | | | | | |
|---|---|---|---|---|---|---|
| Quantile | trol | Cases | OR (unadjusted) | | OR (adjusted) | |
| (−1.53, −0.58) | 54 | 21 | 1.00 | (reference) | 1.00 | (reference) |
| (−0.58, −0.28) | 20 | 13 | 1.67 | (0.69, 3.97) | 1.22 | (0.45, 3.17) |
| (−0.28, 0.07) | 20 | 9 | 1.16 | (0.44, 2.94) | 0.85 | (0.29, 2.3) |
| (0.07, 1.62) | 20 | 10 | 1.29 | (0.5, 3.2) | 1.14 | (0.38, 3.27) |

TABLE 7B

| | Con- | | | | | |
|---|---|---|---|---|---|---|
| Quantile | trol | Cases | OR (unadjusted) | | OR (adjusted) | |
| (−1.53, −0.58) | 54 | 21 | 1.00 | (reference) | 1.00 | (reference) |
| (−0.58, −0.28) | 20 | 13 | 1.67 | (0.69, 3.97) | 1.22 | (0.45, 3.17) |
| (−0.28, 0.07) | 20 | 9 | 1.16 | (0.44, 2.94) | 0.85 | (0.29, 2.3) |
| (0.07, 1.62) | 20 | 10 | 1.29 | (0.5, 3.2) | 1.14 | (0.38, 3.27) |

TABLE 7C

| | Con- | | | | | |
|---|---|---|---|---|---|---|
| Quantile | trol | Cases | OR (unadjusted) | | OR (adjusted) | |
| (−1.53, −0.58) | 54 | 21 | 1.00 | (reference) | 1.00 | (reference) |
| (−0.58, −0.28) | 20 | 13 | 1.67 | (0.69, 3.97) | 1.22 | (0.45, 3.17) |
| (−0.28, 0.07) | 20 | 9 | 1.16 | (0.44, 2.94) | 0.85 | (0.29, 2.3) |
| (0.07, 1.62) | 20 | 10 | 1.29 | (0.5, 3.2) | 1.14 | (0.38, 3.27) |

TABLE 8

| | | | BRCA1 | |
|---|---|---|---|---|
| WID-BC | Breast | Ovarian | mutation | |
| ranges | cancer risk | cancer risk | risk | Clinical Action |
| (−1.53, −0.58) | 1 | 1 | 1 | No mammography screening, no preventive measures. Repeat test in 2 years |
| | | | | time. |
| (−0.58, −0.28) | 0.89 | 0.86 | 2.2 | Testing for a BRCA1 or BRCA2 germline mutation - if negative only routine |
| | (0.3, 2.67) | (0.35, 2.06) | (0.91, 5.36) | mammography screening. Repeat test in 2 years time. |
| (−0.28, 0.07) | 2.57 | 1.32 | 1.59 | (1) Testing for a BRCA1 or BRCA2 germline mutation; (2) Intensified breast |
| | (0.95, 7.51) | (0.6, 2.98) | (0.6, 4.05) | cancer screening using breast MRI every other year; (3) To consider taking any |
| | | | | of the following risk preventive drugs: Denosumab, “selective estrogen |
| | | | | receptor modulators” (SERMs) and “selective progesterone receptor |
| | | | | modulators” (SPRMs). SERMs may include Anordin, Bazedoxifene, |
| | | | | Broparestrol, Clomifene, Cyclofenil, Lasofoxifene, Ormeloxifene, Ospemifene, |
| | | | | Raloxifene, Tamoxifen. Preferably, the SERMs include Tamoxifen, |
| | | | | Bazedoxifene and Raloxifene. Preferably, the SPRMs include Mifepristone, |
| | | | | Ulipristal, Asoprisnil, Proellex, Onapristone, Asoprisnil and Lonaprisan. (6) |
| | | | | Repeat test annually. |
| (0.07, 1.62) | 15.67 | 3.23 | 2.51 | (1) Testing for a BRCA1 or BRCA2 germline mutation; (2) Intensified breast |
| | (6.59, 42.38) | (1.64, 6.76) | (1.06, 6.01) | cancer screening: using annual breast MRI and mammography; (3) To consider |
| | | | | taking any of the following risk preventive drugs: Denosumab, “selective |
| | | | | estrogen receptor modulators” (SERMs) and “selective progesterone receptor |
| | | | | modulators” (SPRMs). SERMs may include Anordin, Bazedoxifene, |
| | | | | Broparestrol, Clomifene, Cyclofenil, Lasofoxifene, Ormeloxifene, Ospemifene, |
| | | | | Raloxifene, Tamoxifen. Preferably, the SERMs include Tamoxifen, |
| | | | | Bazedoxifene and Raloxifene. Preferably, the SPRMs include Mifepristone, |
| | | | | Ulipristal, Asoprisnil, Proellex, Onapristone, Asoprisnil and Lonaprisan. (4) To |
| | | | | consider risk reducing blateral mastectomy +/− bilateral salpingoophorectomy. |
| | | | | (5) To consider early detection of ovarian cancer using a combination of |
| | | | | CA125 tumour marker and cancer-specific cell-free DNA methylation in |
| | | | | plasma/serum. (6) Repeat test annually. |

1. A method comprising assaying from a sample from an individual
the methylation status of a panel of one or more CpGs selected from a panel of CpGs identified at nucleotide positions 61 to 62 in SEQ ID NOs 1 to 29,000.

2. A method according to claim 1, wherein:
i) the panel of one or more CpGs comprises at least 500 CpGs selected from the CpGs identified at nucleotide positions 61 to 62 in SEQ ID NOs 1 to 29,000, and optionally wherein the panel of one or more CpGs comprises at least the CpGs identified in SEQ ID NOs 1 to 500 and identified at nucleotide positions 61 to 62; or
ii) the panel of one or more CpGs comprises at least 1000 CpGs selected from the CpGs identified at nucleotide positions 61 to 62 in SEQ ID NOs 1 to 29,000, and optionally wherein the panel of one or more CpGs comprises at least the CpGs identified in SEQ ID NOs 1 to 1000 and identified at nucleotide positions 61 to 62; or
iii) wherein the panel of one or more CpGs comprises at least 2000 CpGs selected from the CpGs identified at nucleotide positions 61 to 62 in SEQ ID NOs 1 to 29,000, and optionally wherein the panel of one or more CpGs comprises at least the CpGs identified in SEQ ID NOs 1 to 2000 and identified at nucleotide positions 61 to 62; or
iv) wherein the panel of one or more CpGs comprises at least 10,000 CpGs selected from the CpGs identified at nucleotide positions 61 to 62 in SEQ ID NOs 1 to 29,000, and optionally wherein the panel of one or more CpGs comprises at least the CpGs identified in SEQ ID NOs 1 to 10,000 and identified at nucleotide positions 61 to 62; or
v) wherein the panel of one or more CpGs comprises at least the 29,000 CpGs identified at nucleotide positions 61 to 62 in SEQ ID NOs 1 to 29,000.

3. (canceled)

4. (canceled)

5. (canceled)

6. (canceled)

7. (canceled)

8. (canceled)

9. (canceled)

10. (canceled)

11. (canceled)

12. (canceled)

13. (canceled)

14. (canceled)

15. (canceled)

16. (canceled)

17. (canceled)

18. A method according to claim 1, wherein the step of assaying the methylation status of each CpG in the panel of one or more CpGs comprises:
a. performing a sequencing step to determine the sequence of each CpG;
b. hybridising DNA to an array comprising probes capable of discriminating between methylated and non-methylated forms of the CpGs and applying a detection system to the array so as to determine the methylation status of each CpG; and/or
c. performing a PCR step using methylation-specific primers, wherein the methylation status of the CpG is determined by the presence or absence of a PCR product.

19. A method according to claim 1, wherein the step of assaying the methylation status of each CpG in the panel of one or more CpGs comprises:
a. bisulphite converting the DNA; or
b. performing the steps of oxidising 5-methyl cytosine bases (5mC) to 5-carboxylcytosine bases (5caC), preferably by ten-eleven translocation (TET), and/or oxidising 5-hydroxymethylcytosine bases (5hmC) to 5-carboxylcytosine bases (5caC), preferably by ten-eleven translocation (TET); followed by reducing 5-carboxyl cytosine bases (5caC) to dihydrouracil bases (DHU), optionally with pyridine borane.

20. A method according to claim 1, wherein the method further comprises:
a. assaying from the sample from the individual the proportion of epithelial cells;
b. assaying from the sample from the individual the proportion of fat cells; and/or
c. assaying from the sample from the individual differentiation characteristics of non-fat cells, optionally wherein assaying the proportion of epithelial and/or fat cells and/or assaying differentiation characteristics of non-fat cells comprises performing a method comprising:
a. gene expression profiling;
b. non-coding RNA-profiling;
c. epigenome profiling;
d. DNA methylation profiling;
e. deriving a WID-BC-Index; and/or
f. immunohistochemistry; and
arriving at a determination based on the results of the method.

21. (canceled)

22. A method of treating or preventing cancer in an individual, the method comprising administering one or more treatments to the individual determined to have cancer by the step of performing the method of claim 1 on a sample from the individual.

23.-50. (canceled)

51. A method according to claim 22, further defined as comprising a step of stratifying the individual according to their cancer risk or of having cancer.

52. A method according to claim 51, wherein the individual is stratified as not having cancer or as having a low risk of cancer development, and wherein the individual is subjected to one or more treatments according to their stratification, wherein the one or more treatments comprise intensified screening, preferably wherein the intensified screening comprises any one or more of:
a. a test for a BRCA1 and/or BRCA2 germline mutation;
b. a repeat method according to claim 1, preferably wherein the repeat method is about two years after the previous method,
optionally wherein when the test for a BRCA1 and/or BRCA2 germline mutation is positive, the intensified screening further comprises a mammogram, preferably wherein when the test for a BRCA1 and/or BRCA2 germline mutation is negative, the individual is subjected to routine mammography screening, and more preferably wherein the routine screening comprises a mammogram about three years following the test for a BRCA1 and/or BRCA2 germline mutation.

53. A method according to claim 51, wherein the individual is stratified as having a moderate risk of having cancer or as having a moderate risk of cancer development, and wherein the individual is subjected to one or more treatments according to their stratification, wherein the one or more treatments comprise any of:
a. intensified screening, preferably wherein the intensified screening comprises one or more of:
i. a test for a BRCA1 and/or BRCA2 germline mutation;
ii. a breast MRI scan, preferably wherein the scan is repeated about two years after the previous scan;
iii. a repeat assay according to any one of claims 1 to 20, preferably wherein the repeat assay is performed about one year after the previous assay;
b. administration of one or more of Denosumab, “selective estrogen receptor modulators” (SERMs), optionally comprising Anordin, Bazedoxifene, Broparestrol, Broparestrol, Clomifene, Cyclofenil, Lasofoxifene, Ormeloxifene, Ospemifene, Raloxifene, Tamoxifen, preferably wherein the SERMs comprise Tamoxifen, Bazedoxifene and Raloxifene, and “selective progesterone receptor modulators” (SPRMs), optionally comprising Mifepristone, Ulipristal, Asoprisnil, Proellex, Onapristone, Asoprisnil and Lonaprisan.

54. A method according to claim 51, wherein the individual is stratified as having cancer or as having a high risk of cancer development, and wherein the individual is subjected to one or more treatments according to their stratification, wherein the one or more treatments comprise any of:
a. intensified screening, preferably wherein the intensified screening comprises one or more of:
i. a test for a BRCA1 and/or BRCA2 germline mutation;
ii. a breast MRI scan, preferably wherein the scan is repeated about a year after the previous scan;
iii. a mammogram, preferably wherein the mammogram is repeated about a year after the previous mammogram;
iv. a test for CA125, preferably wherein the test is repeated three-monthly;
v. a test for cell-free tumour DNA methylation in plasma/serum, preferably wherein the test is repeated annually;
vi. a test for cell-free tumour DNA methylation in vaginal fluid, preferably wherein the test is repeated annually;
vii. a repeat method according to any claim 1, preferably wherein the repeat method is performed about one year after the previous method;
b. administration of one or more of Denosumab, “selective estrogen receptor modulators” (SERMs), optionally comprising Anordin, Bazedoxifene, Broparestrol, Broparestrol, Clomifene, Cyclofenil, Lasofoxifene, Ormeloxifene, Ospemifene, Raloxifene, Tamoxifen, preferably wherein the SERMs comprise Tamoxifen, Bazedoxifene and Raloxifene, and “selective progesterone receptor modulators” (SPRMs), optionally comprising Mifepristone, Ulipristal, Asoprisnil, Proellex, Onapristone, Asoprisnil and Lonaprisan;
c. a bilateral mastectomy; and/or
d. a bilateral salpingo-oophorectomy.

55. A method according to 22, wherein the one or more treatments that the individual is subjected to are repeated on a monthly, three monthly, six monthly, yearly or two yearly basis following an initial administration.

56. A method of assaying methylation in an individual at multiple time points, the method comprising: (a) performing the method according to claim 1 at a first time point; (b) performing the method according to claim 1 at one or more further time points; and (c) detecting differential methylation status between (a) and (b).

57. A method according to claim 56, wherein the further time points are monthly, three monthly, six monthly, yearly or two yearly basis following an initial assessment; and/or
wherein one or more treatments are administered to the individual according to claim 10.

58. A method according to claim 56, wherein the method further comprises:
a. assaying the proportion of epithelial cells in the sample from the individual between any two or more time points and assessing if the proportion changes between time points;
b. assaying the proportion of fat cells in the sample from the individual between any two or more time points and assessing if the proportion changes between time points; and/or
c. assaying differentiation characteristics of non-fat cells in the sample from the individual between any two or more time points and assessing if the proportion changes between time points.

59. An assay according to claim 1, wherein the sample is obtained from a tissue comprising epithelial cells, preferably wherein the sample is not obtained from breast or ovarian tissue, optionally wherein the sample is obtained from:
a. cervical tissue;
b. vaginal tissue;
c. cervicovaginal tissue;
d. buccal tissue; and/or
e. breast tissue;
preferably wherein the sample is obtained from cervical tissue, most preferably wherein the sample is obtained from tissue from a cervical smear.

60. An array for discriminating between methylated and non-methylated forms of CpGs; the array comprising oligonucleotide probes specific for a methylated form of each CpG in a CpG panel and oligonucleotide probes specific for a non-methylated form of each CpG in the panel; wherein the panel comprises at least 500 CpGs selected from the CpGs identified at nucleotide position 61 to 62 in SEQ ID NOs 1 to 29,000.

61. An array according to claim 60, provided that the array is not an Infinium MethylationEPIC BeadChip array or an Infinium HumanMethylation450, and/or provided that the number of CpG-specific oligonucleotide probes of the array is 482,000 or less, 480,000 or less, 450,000 or less, 440,000 or less, 430,000 or less, 420,000 or less, 410,000 or less, or 400,000 or less; and/or wherein the panel comprises one or more CpGs selected from the CpGs identified at nucleotide positions 61 to 62 in SEQ ID NOs 1 to 29,000; and/or wherein the array further comprises one or more oligonucleotides comprising any set of CpGs selected from the CpGs identified at nucleotide positions 61 to 62 in SEQ ID NOs 1 to 29,000, wherein the one or more oligonucleotides are hybridized to corresponding oligonucleotide probes of the array.

62. A hybridized array, wherein the array is obtainable by hybridizing to an array according to claim 60 a group of oligonucleotides comprising any set of CpGs selected from the CpGs identified at nucleotide positions 61 to 62 in SEQ ID NOs 1 to 29,000.

63. A process for making the hybridized array according to claim 62, comprising contacting an array comprising oligonucleotide probes specific for a methylated form of each CpG in a CpG panel and oligonucleotide probes specific for a non-methylated form of each CpG in the panel; wherein the panel comprises at least 500 CpGs selected from the CpGs identified at nucleotide position 61 to 62 in SEQ ID NOs 1 to 29,000 with a group of oligonucleotides comprising any set of CpGs selected from the CpGs identified at nucleotide positions 61 to 62 in SEQ ID NOs 1 to 29,000.

The application's sequence listing, which the Patent Office published only in electronic form, follows.

SEQUENCE LISTING (29000 sequences)

SEQ ID NO: 1 - DNA, 122 bp, Homo sapiens
  misc_feature (61)..(62): /note="This region represents a CpG dinucleotide"
  misc_feature (61)..(61): /note="Nucleotide may be methylated to form 5-methylcytosine"
ccgaaggggtcatactaggcgtcatactagggtctctggatagctcccaggcctggacttcgttttccaggatatcacctttactggtcaacccattttgtttcgcgagtgcccagtgagtg

SEQ ID NO: 2 - DNA, 122 bp, Homo sapiens
  misc_feature (61)..(62): /note="This region represents a CpG dinucleotide"
  misc_feature (61)..(61): /note="Nucleotide may be methylated to form 5-methylcytosine"
tcaccatgcggattttacaacgtgtgccaggtttgtttatcctgtaacctcaggaagaaacgaccaccaagaaacacagtgggaagtgaggcagatgagaggaggaagccatttcttttgaa

SEQ ID NO: 3 - DNA, 122 bp, Homo sapiens
  misc_feature (61)..(62): /note="This region represents a CpG dinucleotide"
  misc_feature (61)..(61): /note="Nucleotide may be methylated to form 5-methylcytosine"
cctctcccttttaccttgcttgctacataaaactagttactctggctggacgtggtggcccgtgcctgtaattccagcactttgggaggcctaggagggagaatcacttgaagccaggagtt

SEQ ID NO: 4 - DNA, 122 bp, Homo sapiens
  misc_feature (61)..(62): /note="This region represents a CpG dinucleotide"
  misc_feature (61)..(61): /note="Nucleotide may be methylated to form 5-methylcytosine"
ctggactagagaatttctaagatctcttctggctctaaaatgttcatttctcaccaggcacggtggctcacacctgtaatcccagcactttgggaggccgaggcaggtggatcacctgaggt

SEQ ID NO: 5 - DNA, 122 bp, Homo sapiens
  misc_feature (61)..(62): /note="This region represents a CpG dinucleotide"
  misc_feature (61)..(61): /note="Nucleotide may be methylated to form 5-methylcytosine"
aaattctcatggtgcccccagagccggcctctgccccagccctgctgccagctgccccggcgccctggtgctgtgcggcccatggtgcctgcacccacttgcttgtccagttactttctcct

SEQ ID NO: 6 - DNA, 122 bp, Homo sapiens
  misc_feature (61)..(62): /note="This region represents a CpG dinucleotide"
  misc_feature (61)..(61): /note="Nucleotide may be methylated to form 5-methylcytosine"
gaaggtgactcatttagacagatctgcacggggacatttgcaggtcataggggctgtgtgcgaacatgggccctctgcagccaggaagctataacgctgctctccaggcagaagctgctagc

SEQ ID NO: 7 - DNA, 122 bp, Homo sapiens
  misc_feature (61)..(62): /note="This region represents a CpG dinucleotide"
  misc_feature (61)..(61): /note="Nucleotide may be methylated to form 5-methylcytosine"
gaccgggcgatctcacacttgctgacatccagtccccttttgggcatgaaacccatgccccgctgcggctctttgctgctgaacgtgttcaggtagtgcacgaaaggcggctcgtcggtaat

SEQ ID NO: 8 - DNA, 122 bp, Homo sapiens
  misc_feature (61)..(62): /note="This region represents a CpG dinucleotide"
  misc_feature (61)..(61): /note="Nucleotide may be methylated to form 5-methylcytosine"
gggtgtggcggggaaggcggtaagggcacagtctggagagctcaaagcccccccaaggaccgagccccgccccccaagcgggagggcgagcgagtgatggcggcggctgtggctgtggcgtg

SEQ ID NO: 9 - DNA, 122 bp, Homo sapiens
  misc_feature (61)..(62): /note="This region represents a CpG dinucleotide"
  misc_feature (61)..(61): /note="Nucleotide may be methylated to form 5-methylcytosine"
ccttcgtcaccgtgaacgcccagtggggcatcctcagcaagtgcctgacctacagcaaggcggtggccgacccgttcacgtactctctgctccgccggccgttccgccaagtcctggccggc

SEQ ID NO: 10 - DNA, 122 bp, Homo sapiens
  misc_feature (61)..(62): /note="This region represents a CpG dinucleotide"
  misc_feature (61)..(61): /note="Nucleotide may be methylated to form 5-methylcytosine"
ttgcacacacgtgtgtgtgtattatcctcatctctgaaccgtgcaatacctcgctcatagcgaccaccgaagattcctaccagctgtccccattgagtgcgcactgtgtggtgggtgtttta

SEQ ID NO: 11 - DNA, 122 bp, Homo sapiens
  misc_feature (61)..(62): /note="This region represents a CpG dinucleotide"
  misc_feature (61)..(61): /note="Nucleotide may be methylated to form 5-methylcytosine"
acatatgactagaaattgcaaccagacagcaatctgtgaagcaagtgataggagctccaccgtctggtgcctgctgtggatgtctggcacccattggtaccagatttggtgtaagtggggct

SEQ ID NO: 12 - DNA, 122 bp, Homo sapiens
  misc_feature (61)..(62): /note="This region represents a CpG dinucleotide"
  misc_feature (61)..(61): /note="Nucleotide may be methylated to form 5-methylcytosine"
agcagccggtgagtagccatatcaagctccttagggaggctccaccccatcctctggggccgcccttcctcggcgtccacggccccgcgggcagttacctgttctaggtgtttgtgcccccc

SEQ ID NO: 13 - DNA, 122 bp, Homo sapiens
  misc_feature (61)..(62): /note="This region represents a CpG dinucleotide"
  misc_feature (61)..(61): /note="Nucleotide may be methylated to form 5-methylcytosine"
agacaatagtggctatgaatcaagcatgagctcaggtgggtgatcacctaatgcgcctaacgtggtgtggttatataatgtgcctcatgtagcatggttacataatgtgtggagttgtgtgc

SEQ ID NO: 14 - DNA, 122 bp, Homo sapiens
  misc_feature (61)..(62): /note="This region represents a CpG dinucleotide"
  misc_feature (61)..(61): /note="Nucleotide may be methylated to form 5-methylcytosine"
agttttcatggctaaacattttccagaggatccctggtgtgtctacagcacccatctgggcgctggggcttgtattaagagaacaggtacttcatggagctgtgaatactctattcaggctt

SEQ ID NO: 15 - DNA, 122 bp, Homo sapiens
  misc_feature (61)..(62): /note="This region represents a CpG dinucleotide"
  misc_feature (61)..(61): /note="Nucleotide may be methylated to form 5-methylcytosine"
ctgccatggatggcggggacccgcctctaagcggcaccacccatatctggatccgagttacggatgccaatgataatgctcccgtgtttagccaggaggtatacagggttagcctccaagaa

SEQ ID NO: 16 - DNA, 122 bp, Homo sapiens
  misc_feature (61)..(62): /note="This region represents a CpG dinucleotide"
  misc_feature (61)..(61): /note="Nucleotide may be methylated to form 5-methylcytosine"
gctgggttggaggcgggtggaggcgggggttcctcacttcagacagctcagcgcggggcccgaggcccagccccatgcccacagctcctccagaccctgggtgagccggaccccggtgagcg

SEQ ID NO: 17 - DNA, 122 bp, Homo sapiens
  misc_feature (61)..(62): /note="This region represents a CpG dinucleotide"
  misc_feature (61)..(61): /note="Nucleotide may be methylated to form 5-methylcytosine"
ctaattcagttattcattttaccctgagggtggcagcaggagtctcttctatcgcccaagcgttgccaagaggcaacttttaggtcactctgacatgagctaacagatgcagtttctggtta

SEQ ID NO: 18 - DNA, 122 bp, Homo sapiens
  misc_feature (61)..(62): /note="This region represents a CpG dinucleotide"
  misc_feature (61)..(61): /note="Nucleotide may be methylated to form 5-methylcytosine"
aagagggcttatctaacatgctggtagactttaccctgaatgacaagatctctatgcaggcgtatggagccaaggagaggtgggctgtcacgggaggctgggggcagagggcagtctagaag

SEQ ID NO: 19 - DNA, 122 bp, Homo sapiens
  misc_feature (61)..(62): /note="This region represents a CpG dinucleotide"
  misc_feature (61)..(61): /note="Nucleotide may be methylated to form 5-methylcytosine"
tcttttcctgccccttttcagcttgttcaggctcataaccatccagtgtctgccaagcaacggtctgattgatggtaaacaaccaaatcagaacacgcgtctctgtgcctgaactttcccta

SEQ ID NO: 20 - DNA, 122 bp, Homo sapiens
  misc_feature (61)..(62): /note="This region represents a CpG dinucleotide"
  misc_feature (61)..(61): /note="Nucleotide may be methylated to form 5-methylcytosine"
tgactgttcatctaacaaaagggatcttcgcctctcaaacggagtcagctccaggatcctcgaccacgggcgtggcgtgaaatcgatttacaaacacgcgatttgtatctgcccatctagga

SEQ ID NO: 21 - DNA, 122 bp, Homo sapiens
  misc_feature (61)..(62): /note="This region represents a CpG dinucleotide"
  misc_feature (61)..(61): /note="Nucleotide may be methylated to form 5-methylcytosine"
acaccgggaagtgggtttctacagcccgggtcatctgggccgcgtgtgatcattagctgtcgcgggctgcccggaggaggatggcctgtcctttctgggcgtctccagatcagcctcagtgt

SEQ ID NO: 22 - DNA, 122 bp, Homo sapiens
  misc_feature (61)..(62): /note="This region represents a CpG dinucleotide"
  misc_feature (61)..(61): /note="Nucleotide may be methylated to form 5-methylcytosine"
ggaacatgcgagcccagaaaagtctctcctggtcttgggatggaggtcacacgaagcctccgcaaggcaaggacttttggtgagttccgggctccgctgaactcagctctttttcttttcct

SEQ ID NO: 23 - DNA, 122 bp, Homo sapiens
  misc_feature (61)..(62): /note="This region represents a CpG dinucleotide"
  misc_feature (61)..(61): /note="Nucleotide may be methylated to form 5-methylcytosine"
gcagaggctgagacgcacctgagaggggaggaagcttccgctcttctggcctcccggatccgccagggctcctgctgctcccacttccgccacccaggagggccaggccgccgtcttgagtt

SEQ ID NO: 24 - DNA, 122 bp, Homo sapiens
  misc_feature (61)..(62): /note="This region represents a CpG dinucleotide"
  misc_feature (61)..(61): /note="Nucleotide may be methylated to form 5-methylcytosine"
gacttggcaatgccaaggtgtttgctgaggctgtggactctccagcccgggagaggtcgccggacctttgaggggcattggaatcctgggctcctcctctgctgggtggagccgcgaaccct

SEQ ID NO: 25 - DNA, 122 bp, Homo sapiens
  misc_feature (61)..(62): /note="This region represents a CpG dinucleotide"
  misc_feature (61)..(61): /note="Nucleotide may be methylated to form 5-methylcytosine"
gcattagaataggaactccaggggcagggttcagaccagttccatttaccattttatatccgggacctaacatcagacctggttacacagttgttggatgaataaattagtgagccccttct

SEQ ID NO: 26 - DNA, 122 bp, Homo sapiens
  misc_feature (61)..(62): /note="This region represents a CpG dinucleotide"
  misc_feature (61)..(61): /note="Nucleotide may be methylated to form 5-methylcytosine"
ttagaaaataatttgctttgtcaggaaaggaaaacctctagaaaacagttctcagtgcaacgagcatgcaagctaaggcccgtttcctcaagggcagagtttcagagtcacagatggttagt

SEQ ID NO: 27 - DNA, 122 bp, Homo sapiens
  misc_feature (61)..(62): /note="This region represents a CpG dinucleotide"
  misc_feature (61)..(61): /note="Nucleotide may be methylated to form 5-methylcytosine"
ctgtttttgtaaataaagtgttgtcagcaggcagccacatcccttcatttccatattgtccgtggctgctctgctgtacaatggcacagtccagtaatcgcaatggagactatatggcatat

SEQ ID NO: 28 - DNA, 122 bp, Homo sapiens
  misc_feature (61)..(62): /note="This region represents a CpG dinucleotide"
  misc_feature (61)..(61): /note="Nucleotide may be methylated to form 5-methylcytosine"
ctcacagtctggcaatgctcaaagggctgtgcaactcacagatgctgccagcaaagggcacgggacaccctctcccagtttccagcttggttctcaacctctgcccaccccacagggccagc

SEQ ID NO: 29 - DNA, 122 bp, Homo sapiens
  misc_feature (61)..(62): /note="This region represents a CpG dinucleotide"
  misc_feature (61)..(61): /note="Nucleotide may be methylated to form 5-methylcytosine"
agccaccttctcttatctctgctctgcaacaatgagtcttgacgtcattggctcagcaaacgtttctcaaaggctagatatgaggctggaacttctaggcagttccttacagcagcctgctt

SEQ ID NO: 30 - DNA, 122 bp, Homo sapiens
  misc_feature (61)..(62): /note="This region represents a CpG dinucleotide"
  misc_feature (61)..(61): /note="Nucleotide may be methylated to form 5-methylcytosine"
cctcagcgggcacagccgagaggcggttggcctgcaggtccagcagccgcagcttgggggcgtccctgagcgccgcccaggggaaggcggccaggcggttcccgggcagccgcagctcccgc

SEQ ID NO: 31 - DNA, 122 bp, Homo sapiens
  misc_feature (61)..(62): /note="This region represents a CpG dinucleotide"
  misc_feature (61)..(61): /note="Nucleotide may be methylated to form 5-methylcytosine"
ctgagtgtatagtgacttacccaggccacacagttggataccagagatagtagtcacaatcgctaacatctgccatgtggtccttactgcaaatcttatttaataatgaggtcggtttttgt

SEQ ID NO: 32 - DNA, 122 bp, Homo sapiens
  misc_feature (61)..(62): /note="This region represents a CpG dinucleotide"
  misc_feature (61)..(61): /note="Nucleotide may be methylated to form 5-methylcytosine"
ctgtgctgggggtgggggcggcagacactgcagagcagctagtccggcttacaggttgggcgggagagggctctggaagggaggggaaggggcaaaggcgcccaaactccgagttcaggccg

SEQ ID NO: 33 - DNA, 122 bp, Homo sapiens
  misc_feature (61)..(62): /note="This region represents a CpG dinucleotide"
  misc_feature (61)..(61): /note="Nucleotide may be methylated to form 5-methylcytosine"
cagggttcacacgcctagggctgtgtttggtggactggaggcctccaccacaaggtggaacggagagagttcagcaaagatgtcacacattcggccacggtgtggatgatctgtgtcccttt

SEQ ID NO: 34 - DNA, 122 bp, Homo sapiens
  misc_feature (61)..(62): /note="This region represents a CpG dinucleotide"
  misc_feature (61)..(61): /note="Nucleotide may be methylated to form 5-methylcytosine"
agcccgttcctccttagtctgtgggttgtcactcttaacattgctgacattcctttggcacgctgcactttctcccccttagaaatgttcaaaggcaggaagctcccttcccacagactcca

SEQ ID NO: 35 - DNA, 122 bp, Homo sapiens
  misc_feature (61)..(62): /note="This region represents a CpG dinucleotide"
  misc_feature (61)..(61): /note="Nucleotide may be methylated to form 5-methylcytosine"
agggtttgagttcactcagtacttgtcagtgccaggagttggacagggtgtttgaagaagcgccctctgctgccgtcttcttctagttgcttttgtagaggctgtggctggggcaaatcaca

SEQ ID NO: 36 - DNA, 122 bp, Homo sapiens
  misc_feature (61)..(62): /note="This region represents a CpG dinucleotide"
  misc_feature (61)..(61): /note="Nucleotide may be methylated to form 5-methylcytosine"
tgtaggtcataagacccaccattccagagagggtcctgccccacacccagaaggaaggggcgcggctcagagaggccagtaagaatccaggctcatctgcctgcccatgctttgtggaactt

SEQ ID NO: 37 - DNA, 122 bp, Homo sapiens
  misc_feature (61)..(62): /note="This region represents a CpG dinucleotide"
  misc_feature (61)..(61): /note="Nucleotide may be methylated to form 5-methylcytosine"
agggttgtaagctcctgcccagtcccgtgggcagttctaggatcttacccccagcccctgcgattctgaggggacgtgtcagtcattcagcctccagccagtccctggggatgtctgaggga

SEQ ID NO: 38 - DNA, 122 bp, Homo sapiens
  misc_feature (61)..(62): /note="This region represents a CpG dinucleotide"
  misc_feature (61)..(61): /note="Nucleotide may be methylated to form 5-methylcytosine"
aattactgatgtgcacaaaggacccagggaccacttaaaacaaggggaggactgagtccacgcagggatgaagccacaggcacagtccccacgtgcttgacagtggccccgcaacccacctg

SEQ ID NO: 39 - DNA, 122 bp, Homo sapiens
  misc_feature (61)..(62): /note="This region represents a CpG dinucleotide"
  misc_feature (61)..(61): /note="Nucleotide may be methylated to form 5-methylcytosine"
aacatggtgaaaccctgtctctactaaaaatccaaaaaattacccaggcatgctggtgctcgcctgtaatcccagcttctcaggaggctgaggcaggagaatcacttgaacctgggaggcag

SEQ ID NO: 40 - DNA, 122 bp, Homo sapiens
  misc_feature (61)..(62): /note="This region represents a CpG dinucleotide"
  misc_feature (61)..(61): /note="Nucleotide may be methylated to form 5-methylcytosine"
agtaaaggaccggtctgaaacctacaagaacaggtgtcgggggctgcaggctgcgggctgcgggaggaggtgggcgggtggggagaagcacccccttcagagttggggcttggggagtgggg

SEQ ID NO: 41 - DNA, 122 bp, Homo sapiens
  misc_feature (61)..(62): /note="This region represents a CpG dinucleotide"
  misc_feature (61)..(61): /note="Nucleotide may be methylated to form 5-methylcytosine"
tgttgcttttcagtcttcactaattacttgctatcaataagtaatggtttgggtgatacacggcagacacttctgggccaaaataactggtcctgagctaggttcagaggactgtgtgtcag

SEQ ID NO: 42 - DNA, 122 bp, Homo sapiens
  misc_feature (61)..(62): /note="This region represents a CpG dinucleotide"
  misc_feature (61)..(61): /note="Nucleotide may be methylated to form 5-methylcytosine"
cgcgagccctgcccctccggcaagaggcaccatagaaatgtgtgctaacaagcctccctgcggcctgcggggaataggagagagcaggaagctttcagaacaacaagagtggctagaaaagg

SEQ ID NO: 43 - DNA, 122 bp, Homo sapiens
  misc_feature (61)..(62): /note="This region represents a CpG dinucleotide"
  misc_feature (61)..(61): /note="Nucleotide may be methylated to form 5-methylcytosine"
atcaggctatatagactaccaccttaaatgggtgtagattcaacatgattcccaaagtcacgtgacttgcctcgctaaccagggttcttccttagtggggaaactacttgggccttttttcc

SEQ ID NO: 44 - DNA, 122 bp, Homo sapiens
  misc_feature (61)..(62): /note="This region represents a CpG dinucleotide"
  misc_feature (61)..(61): /note="Nucleotide may be methylated to form 5-methylcytosine"
ctgaaactttactttgcctgttgtatgggacacacacaggactaagagacacatgtaaaacgcatgtggtcttggcacggggaaaggaccatatgttttttaaaaacagtctccagcagctc

SEQ ID NO: 45 - DNA, 122 bp, Homo sapiens
  misc_feature (61)..(62): /note="This region represents a CpG dinucleotide"
  misc_feature (61)..(61): /note="Nucleotide may be methylated to form 5-methylcytosine"
cgcgaggacgcagactgcagagctctacggggaatgggagttttctctcgttcactatggcgtccccggcgacccgaatggaggctgctgcgttgcaagaactgggctaagactattttttt

SEQ ID NO: 46 - DNA, 122 bp, Homo sapiens
  misc_feature (61)..(62): /note="This region represents a CpG dinucleotide"
  misc_feature (61)..(61): /note="Nucleotide may be methylated to form 5-methylcytosine"
gtctctcacagccaggactgctgcggctggaattcctgacatactgtcatacctctcactcgtcaatctacactctcctcccatctacacagctctggaaattaaaaacaatccaaccatga

SEQ ID NO: 47 - DNA, 122 bp, Homo sapiens
  misc_feature (61)..(62): /note="This region represents a CpG dinucleotide"
  misc_feature (61)..(61): /note="Nucleotide may be methylated to form 5-methylcytosine"
gtcgagaccggacaccaggagggacgggactagctgatagggtgtccagagaccgcggagcgttttgtggtgcgtccttcccagtctgttgcattcaggaattcttccttctcccatgtctt

SEQ ID NO: 48 - DNA, 122 bp, Homo sapiens
  misc_feature (61)..(62): /note="This region represents a CpG dinucleotide"
  misc_feature (61)..(61): /note="Nucleotide may be methylated to form 5-methylcytosine"
tcaccacccttgggccacgccgtctagtccacacctgaggagttggtcaggtagaaggggcggatgaccgtgcggaagccgttgaagtgccctgccgggcaggggaaggaggaggtgctctt

SEQ ID NO: 49 - DNA, 122 bp, Homo sapiens
  misc_feature (61)..(62): /note="This region represents a CpG dinucleotide"
  misc_feature (61)..(61): /note="Nucleotide may be methylated to form 5-methylcytosine"
tcattagctgcagtgcgctggtgctgcctaacagaacgcacactggctgtcactaggaagcgccatacggttgctatcacccaacatggtgaaagggtgatggatttcactgtgaatatgcc

SEQ ID NO: 50 - DNA, 122 bp, Homo sapiens
  misc_feature (61)..(62): /note="This region represents a CpG dinucleotide"
  misc_feature (61)..(61): /note="Nucleotide may be methylated to form 5-methylcytosine"
cctctccttgccatgccatcaggtcaggaatgagcatggggaaggagctggagcatggagcggcttggcctcagtctggcctgatttcatggtccccagctgtaccccgtgttaggtgggtg

SEQ ID NO: 51 - DNA, 122 bp, Homo sapiens
  misc_feature (61)..(62): /note="This region represents a CpG dinucleotide"
  misc_feature (61)..(61): /note="Nucleotide may be methylated to form 5-methylcytosine"
tccggcccccgagggatggcagctgtgaggcttggccacggtctcaggccaccaggcccccgggctcgccagcgctttcaccggatggccaccggctgggcagttctcgggagtccacttgg

SEQ ID NO: 52 - DNA, 122 bp, Homo sapiens
  misc_feature (61)..(62): /note="This region represents a CpG dinucleotide"
  misc_feature (61)..(61): /note="Nucleotide may be methylated to form 5-methylcytosine"
ctctccccactagaaggcaggtctcaggagggcaaggacccggcctgtccagcttccagccgtagccccagggccgggtgtgcagtagatactcaacaagccttctttcctcccaccagcct

SEQ ID NO: 53 - DNA, 122 bp, Homo sapiens
  misc_feature (61)..(62): /note="This region represents a CpG dinucleotide"
  misc_feature (61)..(61): /note="Nucleotide may be methylated to form 5-methylcytosine"
aaaacacacagatccccaggcctgagagctgcccggggctgcgcgccggataaacgcaggcggcgtgaaccaggcttctcccaggagcgtggaagaaagtcactgattctgcatttgtcaaa

SEQ ID NO: 54 - DNA, 122 bp, Homo sapiens
  misc_feature (61)..(62): /note="This region represents a CpG dinucleotide"
  misc_feature (61)..(61): /note="Nucleotide may be methylated to form 5-methylcytosine"
gttaaaaacctccaacattccagtttagacacagcccctcccctttctggccatagtgaccgctctctggcaagcactgcccagggaagataaatcagttagccagtggcctaagggttagg

SEQ ID NO: 55 - DNA, 122 bp, Homo sapiens
  misc_feature (61)..(62): /note="This region represents a CpG dinucleotide"
  misc_feature (61)..(61): /note="Nucleotide may be methylated to form 5-methylcytosine"
ttatggaattcagcagtgacctagccgcatgatcccgcagtgagggcttaacacgttccacggcctgaactcgctctgaatggactccagattcccaatgatgcatgcagcccctcagggtc

SEQ ID NO: 56 - DNA, 122 bp, Homo sapiens
  misc_feature (61)..(62): /note="This region represents a CpG dinucleotide"
  misc_feature (61)..(61): /note="Nucleotide may be methylated to form 5-methylcytosine"
ggcggcggccccattagcggagcctccgcctatgattggcttcgcccgggaagctggagacgggcgatgaataattgatgtgtgcggtgcggtagccggacggcggcggcggtggcgggcag

SEQ ID NO: 57 - DNA, 122 bp, Homo sapiens
  misc_feature (61)..(62): /note="This region represents a CpG dinucleotide"
  misc_feature (61)..(61): /note="Nucleotide may be methylated to form 5-methylcytosine"
ctcccctttcttgcaacgctgagagggcgagtgcgcgctagcagcactttaaaaggaacccgtacgcttccagcgccccggctgccgggccaagaagggagcgacagtgctgccagggagca

SEQ ID NO: 58 - DNA, 122 bp, Homo sapiens
  misc_feature (61)..(62): /note="This region represents a CpG dinucleotide"
  misc_feature (61)..(61): /note="Nucleotide may be methylated to form 5-methylcytosine"
actccttcctctggtgtggtgtttcccagttttgcccggtgagaatcacctgcggctggccgtgcgcagtggctcacgcctgtaatcccagcactttgggaggccgaggcgggtgaatcacg

SEQ ID NO: 59 - DNA, 122 bp, Homo sapiens
  misc_feature (61)..(62): /note="This region represents a CpG dinucleotide"
  misc_feature (61)..(61): /note="Nucleotide may be methylated to form 5-methylcytosine"
gtccggcctctgccatgtgctgctgctatgtgtgcatggccactactttggtgtggacctcggtaaccagggacagtcaagagaacccttgtcctgtcatttacctcattttagcaactttg

SEQ ID NO: 60 - DNA, 122 bp, Homo sapiens
  misc_feature (61)..(62): /note="This region represents a CpG dinucleotide"
  misc_feature (61)..(61): /note="Nucleotide may be methylated to form 5-methylcytosine"
gccgcgcagttccgtgcagaggggcggccggcgcgccagctgctcgggctcaagtagcgccgcctggcaatcctgtgcctcaggcgggcccagggtgtccaggggctcccagtcggccagcg

SEQ ID NO: 61 - DNA, 122 bp, Homo sapiens
  misc_feature (61)..(62): /note="This region represents a CpG dinucleotide"
  misc_feature (61)..(61): /note="Nucleotide may be methylated to form 5-methylcytosine"
atctaggcagaaacagtaggaacctactgccaccccccccacccccccccgctaccaccccggccctggctggctcctcacttgcactgatcaagcacctgctgggttagggggttacaaaa

SEQ ID NO: 62 - DNA, 122 bp, Homo sapiens
  misc_feature (61)..(62): /note="This region represents a CpG dinucleotide"
  misc_feature (61)..(61): /note="Nucleotide may be methylated to form 5-methylcytosine"
gaagcccgctgctggggagttgcctcccctttgatgaaaaggaagtgcgaagcgtaggaacgctcttcaggtcaccaccccgtgagtgggaggcttggggagtctgaaggaagagaaagctc

SEQ ID NO: 63 - DNA, 122 bp, Homo sapiens
  misc_feature (61)..(62): /note="This region represents a CpG dinucleotide"
  misc_feature (61)..(61): /note="Nucleotide may be methylated to form 5-methylcytosine"
catctgacctcagacgacagggaaccagacctgcaagccctttccttcggtgaggccatgcggtatcccaggagtttagggaccgcaaataaaagagggccccatcatgtgtacagagctga

SEQ ID NO: 64 - DNA, 122 bp, Homo sapiens
  misc_feature (61)..(62): /note="This region represents a CpG dinucleotide"
  misc_feature (61)..(61): /note="Nucleotide may be methylated to form 5-methylcytosine"
tgataccccatgcatcataagcatccactgcaagagaattaccaggaaatttcagtgccacgtggcaaatactcaggcaattacaagcagaaatagtttcagaaattgtttcttcatgtgaa

SEQ ID NO: 65 - DNA, 122 bp, Homo sapiens
  misc_feature (61)..(62): /note="This region represents a CpG dinucleotide"
  misc_feature (61)..(61): /note="Nucleotide may be methylated to form 5-methylcytosine"
taaaaggccacacactgagaatgccagtccccagggacttagggtgaatttctccaaagacgtgtgtgtgtgtgtgtgtgtgtgtgtgtgtgtgtgtgtgtacatgttctccccagggtact

SEQ ID NO: 66 - DNA, 122 bp, Homo sapiens
  misc_feature (61)..(62): /note="This region represents a CpG dinucleotide"
  misc_feature (61)..(61): /note="Nucleotide may be methylated to form 5-methylcytosine"
gatttaaaaaagtaaaagaatagaaaaaaaaaaaaaaaagaacccactgacagcttaaatcgaaagattcagttcagccagccagccagaagtttgggtgtttatcttaacttgcctcacct

SEQ ID NO: 67 - DNA, 122 bp, Homo sapiens
  misc_feature (61)..(62): /note="This region represents a CpG dinucleotide"
  misc_feature (61)..(61): /note="Nucleotide may be methylated to form 5-methylcytosine"
gccactgcactccagcctgggcaacagagcgagaccctttttcacaaaaataaaacaaaacgaaaaaagatcaggcctccgacttcctccaaattcctcattgtccagaggagaaaatagcc

SEQ ID NO: 68 - DNA, 122 bp, Homo sapiens
  misc_feature (61)..(62): /note="This region represents a CpG dinucleotide"
  misc_feature (61)..(61): /note="Nucleotide may be methylated to form 5-methylcytosine"
ctatgtgcacaaacttttcttctggtctgtttgcaagcactcacatacttagagagtgaccgccctggatattaagggaaaattgaactatatataaaataacttcttatacttcttaaccc

SEQ ID NO: 69 - DNA, 122 bp, Homo sapiens
  misc_feature (61)..(62): /note="This region represents a CpG dinucleotide"
  misc_feature (61)..(61): /note="Nucleotide may be methylated to form 5-methylcytosine"
tgctgtggagcaaagaaatggaacagatcccagaaactcaggacctcggccttttggtggcgctgttgctatgtgctagtgccaggaaaacagtattcatatataattaactaccacggagc

SEQ ID NO: 70 - DNA, 122 bp, Homo sapiens
  misc_feature (61)..(62): /note="This region represents a CpG dinucleotide"
  misc_feature (61)..(61): /note="Nucleotide may be methylated to form 5-methylcytosine"
cagccccccaccttgtcactgccaaagtacatcagactcctcccattgaactgcacaaagcgtctctggaagacatagtttctgaggaaggaaggagccaagatcagtgtttgaggttgcat

SEQ ID NO: 71 - DNA, 122 bp, Homo sapiens
  misc_feature (61)..(62): /note="This region represents a CpG dinucleotide"
  misc_feature (61)..(61): /note="Nucleotide may be methylated to form 5-methylcytosine"
gacaaggtcaggtcagaggtgaaagaggcaggggactgcaggtggaatgaaagcaggaaccgttcagaccctttcacctatgaggatactgggtctctgaaaggtgaacggagaggcttgca

SEQ ID NO: 72 - DNA, 122 bp, Homo sapiens
  misc_feature (61)..(62): /note="This region represents a CpG dinucleotide"
  misc_feature (61)..(61): /note="Nucleotide may be methylated to form 5-methylcytosine"
taggatatattacctcgggcatctgcattacaaatttacctctcattacagctatgttaacgggaaaaggcagcttctcaacaacatgcaaggcagagtttattagcataaatttgcataat

SEQ ID NO: 73 - DNA, 122 bp, Homo sapiens
  misc_feature (61)..(62): /note="This region represents a CpG dinucleotide"
  misc_feature (61)..(61): /note="Nucleotide may be methylated to form 5-methylcytosine"
caggtcctcattcaaacatccacgtgacaaatcaaaacagctttatcaggcacatggacacgtctgagttactattattctgtttgtaaatcacctcccttcattcctttcctttttctttg

SEQ ID NO: 74 - DNA, 122 bp, Homo sapiens
  misc_feature (61)..(62): /note="This region represents a CpG dinucleotide"
  misc_feature (61)..(61): /note="Nucleotide may be methylated to form 5-methylcytosine"
cacttgccttgcaggcgccgcgtcctctgacacgggctcggattacaggagggaccggcgcggtggcagcagcccccgggacacacgttccactcagatggacgcacgcacagatgacgagc

SEQ ID NO: 75 - DNA, 122 bp, Homo sapiens
  misc_feature (61)..(62): /note="This region represents a CpG dinucleotide"
  misc_feature (61)..(61): /note="Nucleotide may be methylated to form 5-methylcytosine"
ttgggacagcagtagcaaattgcttcttcgaagtcattgagcatggtgaatcacatcttacgccatctgttgacaacatggaattctgcaggctggaaacttttgagtaaaccctaagaagt

SEQ ID NO: 76 - DNA, 122 bp, Homo sapiens
  misc_feature (61)..(62): /note="This region represents a CpG dinucleotide"
  misc_feature (61)..(61): /note="Nucleotide may be methylated to form 5-methylcytosine"
ctctgcaaaccccctttttcagcaccagctccagcacagtctgcgaaaacttttttcaagcgatgcagctttaaataggaagaatgctgcctccacttcttttcctgccccttttcagcttg

SEQ ID NO: 77 - DNA, 122 bp, Homo sapiens
  misc_feature (61)..(62): /note="This region represents a CpG dinucleotide"
  misc_feature (61)..(61): /note="Nucleotide may be methylated to form 5-methylcytosine"
atcagtcatatccagaagatcctctttcagttaagacactatcattggtgatgatatgaacgtttccttaccattgccattcacatggactggaaaacaattgaggtgtaacagtctctgtg

SEQ ID NO: 78 - DNA, 122 bp, Homo sapiens
  misc_feature (61)..(62): /note="This region represents a CpG dinucleotide"
  misc_feature (61)..(61): /note="Nucleotide may be methylated to form 5-methylcytosine"
ttcaacttatgttataattctgcaacatgtgcacatacattgtgtttctgatttccaacacgtttctcactgcagctacaaaaacagagatattattttagggctgctctgaaatcactttg

SEQ ID NO: 79 - DNA, 122 bp, Homo sapiens
  misc_feature (61)..(62): /note="This region represents a CpG dinucleotide"
  misc_feature (61)..(61): /note="Nucleotide may be methylated to form 5-methylcytosine"
ctgttcggagccgcagaaaacatgacagctgtaatcaattagggtggttcctgcctcaagcgccggctgcctcggattccaacggctttcctggcggctgtgagcgcctcgggatgcagacc

SEQ ID NO: 80 - DNA, 122 bp, Homo sapiens
  misc_feature (61)..(62): /note="This region represents a CpG dinucleotide"
  misc_feature (61)..(61): /note="Nucleotide may be methylated to form 5-methylcytosine"
tagcctagggaggggagcctgaggcttccgggataggttggcttccctcttcccccctcccgcctctcttcttggtctgtgtctctgctctcctctcctgtatctgcttcgttcttttctct

SEQ ID NO: 81 - DNA, 122 bp, Homo sapiens
  misc_feature (61)..(62): /note="This region represents a CpG dinucleotide"
  misc_feature (61)..(61): /note="Nucleotide may be methylated to form 5-methylcytosine"
cttgctttgcacaggactctgttgacttctgtagtcttgcctgtggaagacaatgagtgacggcagaaagttactagcattcttttatggaagggaagtgggtaattaccatatccagacca

SEQ ID NO: 82 - DNA, 122 bp, Homo sapiens
  misc_feature (61)..(62): /note="This region represents a CpG dinucleotide"
  misc_feature (61)..(61): /note="Nucleotide may be methylated to form 5-methylcytosine"
tgtgtgcagctgggtcatggtccccaccttttgggctgataaacctggctgagggctaggcgtgtatgtttgccatgagtgagtgtttcttgtgtgtgtgtgtgtgtgtgtgtgtgtgtgtg

SEQ ID NO: 83 - DNA, 122 bp, Homo sapiens
  misc_feature (61)..(62): /note="This region represents a CpG dinucleotide"
  misc_feature (61)..(61): /note="Nucleotide may be methylated to form 5-methylcytosine"
gcggttagaagcaggggtccgtctccttagcttgagtgtggcccgggacagaaacagttgcgttgcgcatgttgtgagaccccagtgaccaggaaccccggggagaagtctcctccatgagt

SEQ ID NO: 84 - DNA, 122 bp, Homo sapiens
  misc_feature (61)..(62): /note="This region represents a CpG dinucleotide"
  misc_feature (61)..(61): /note="Nucleotide may be methylated to form 5-methylcytosine"
gaccaactgggcatcaagcggtgcaaaagcaaatccctctcaaagctgggagagtcacaccgtgggctactcctgcatgcagctgggtacatatctcctgggtcctatgacctgcctaaaaa

SEQ ID NO: 85 - DNA, 122 bp, Homo sapiens
  misc_feature (61)..(62): /note="This region represents a CpG dinucleotide"
  misc_feature (61)..(61): /note="Nucleotide may be methylated to form 5-methylcytosine"
agagcatcttggtctaacttgtctgcacaaaagggcatcattttctaattctcccaaggacgctgtttatgccagcagagaccctgggtgaagcctacatagggtgggctgggctccctgcc

SEQ ID NO: 86 - DNA, 122 bp, Homo sapiens
  misc_feature (61)..(62): /note="This region represents a CpG dinucleotide"
  misc_feature (61)..(61): /note="Nucleotide may be methylated to form 5-methylcytosine"
attactccattgctgtgtgtgcattgtggcctccctggagagcggcgggcgggcggcagacggggccgcgctcaccgccagtctccccgcagcaggcagcagaactcggccaaggcgcgctc

SEQ ID NO: 87 - DNA, 122 bp, Homo sapiens
  misc_feature (61)..(62): /note="This region represents a CpG dinucleotide"
  misc_feature (61)..(61): /note="Nucleotide may be methylated to form 5-methylcytosine"
gtgcaagaatcgcaggtgccgggcacgagcaggggccaaggctcaggcccctcccggctgcgcttgctcccgcccacccctgaacctggaggggcccaggataggggctggggagctggctg

SEQ ID NO: 88 - DNA, 122 bp, Homo sapiens
  misc_feature (61)..(62): /note="This region represents a CpG dinucleotide"
  misc_feature (61)..(61): /note="Nucleotide may be methylated to form 5-methylcytosine"
tacacgcagggtcacaaacataccagctcagaaacacaaacacagatgcacaagcacacgcgtaaacaacacgcagaactgcagtcgcacttacaagacttggtcccagggccgggcaccga

SEQ ID NO: 89 - DNA, 122 bp, Homo sapiens
  misc_feature (61)..(62): /note="This region represents a CpG dinucleotide"
  misc_feature (61)..(61): /note="Nucleotide may be methylated to form 5-methylcytosine"
tctttccacaacagctgctttccttaaacatcagcaattttaatctcacaaggcaaactacggaagaaaagccaaaagtaaaatcctgcttccctttaaaattcaaacagatgttctgtgta

SEQ ID NO: 90 - DNA, 122 bp, Homo sapiens
  misc_feature (61)..(62): /note="This region represents a CpG dinucleotide"
  misc_feature (61)..(61): /note="Nucleotide may be methylated to form 5-methylcytosine"
gcacacagaggagacctcttttgggcagggttacattctttacaacacttcctctgtgtacgcttccatttgcatttctaaatctgtacctgctttgaatcagaggaaaaagatgtcagacc

SEQ ID NO: 91 - DNA, 122 bp, Homo sapiens
  misc_feature (61)..(62): /note="This region represents a CpG dinucleotide"
  misc_feature (61)..(61): /note="Nucleotide may be methylated to form 5-methylcytosine"
ctcctgtgtgttgtttttcataattcttcgcgaaaggccaggcaagctgcacacatcaagcgaaacgcctgaggggcggccagcgcgagggtttctggccatcgaccctcacctcccgggac

SEQ ID NO: 92 - DNA, 122 bp, Homo sapiens
  misc_feature (61)..(62): /note="This region represents a CpG dinucleotide"
  misc_feature (61)..(61): /note="Nucleotide may be methylated to form 5-methylcytosine"
ggtaacagagcactgtgagagcccgcagaaagctcctaacccatctgggatgagacctagcgcttccaggacgagccgatgttgagctgagacctcgaaggacaggttagtcattcaccttc

SEQ ID NO: 93 - DNA, 122 bp, Homo sapiens
  misc_feature (61)..(62): /note="This region represents a CpG dinucleotide"
  misc_feature (61)..(61): /note="Nucleotide may be methylated to form 5-methylcytosine"
ggtttgatcaaagtgctatcaagcgttgttcccatttcagaaaaccacatcactagaggccgtgatggttgtgccacctgacacagcatttgcggctgtcacacagggagggcacgttctga

SEQ ID NO: 94 - DNA, 122 bp, Homo sapiens
  misc_feature (61)..(62): /note="This region represents a CpG dinucleotide"
  misc_feature (61)..(61): /note="Nucleotide may be methylated to form 5-methylcytosine"
taggtcataagacccaccattccagagagggtcctgccccacacccagaaggaaggggcgcggctcagagaggccagtaagaatccaggctcatctgcctgcccatgctttgtggaacttgc

SEQ ID NO: 95 - DNA, 122 bp, Homo sapiens
  misc_feature (61)..(62): /note="This region represents a CpG dinucleotide"
  misc_feature (61)..(61): /note="Nucleotide may be methylated to form 5-methylcytosine"
gggccaaccggactcagagtaagatccaataaattgatgaccaatcgtaccctcaatctccgcactttacagggtcttccgaggcgtcccaggtgtttgtctcagactgagcttgtggagat

SEQ ID NO: 96 - DNA, 122 bp, Homo sapiens
  misc_feature (61)..(62): /note="This region represents a CpG dinucleotide"
  misc_feature (61)..(61): /note="Nucleotide may be methylated to form 5-methylcytosine"
tcctggtctgcattttcttgataaagctaattcctataaaataaagagggaaacaatccacgtgtgcttatgtgatgaattttatttttgtcaagaggccctaagtccgtataagtacaacc

SEQ ID NO: 97 - DNA, 122 bp, Homo sapiens
  misc_feature (61)..(62): /note="This region represents a CpG dinucleotide"
  misc_feature (61)..(61): /note="Nucleotide may be methylated to form 5-methylcytosine"
acagttgtaaagaatttgattagattttgcagaaaatagaatttatcccaggtgagttgtcgcatgggaaccagcatgggaagaagatggtaggagcaaataggtcaagcactgctttagta

SEQ ID NO: 98 - DNA, 122 bp, Homo sapiens
  misc_feature (61)..(62): /note="This region represents a CpG dinucleotide"
  misc_feature (61)..(61): /note="Nucleotide may be methylated to form 5-methylcytosine"
cccattctagatctatcatcagaatctgcactgtgacaagaaccctagctgattgttacgcgctttaattaagtttgagggagcgctgttctaagcgtgaatggtttcatatgccctctagt

SEQ ID NO: 99 - DNA, 122 bp, Homo sapiens
  misc_feature (61)..(62): /note="This region represents a CpG dinucleotide"
  misc_feature (61)..(61): /note="Nucleotide may be methylated to form 5-methylcytosine"
tatcagaatggggaagaaaggggggaaaaacggagagacaccaagaaagaacgaaatctacgcggacccttgggtctccaaaagggaagcagtcctgcattaagtttaaagaaggagcgcgg

SEQ ID NO: 100 - DNA, 122 bp, Homo sapiens
  misc_feature (61)..(62): /note="This region represents a CpG dinucleotide"
  misc_feature (61)..(61): /note="Nucleotide may be methylated to form 5-methylcytosine"
atgtatctgggcggttaaggatccggttagaaatcatgtttcagtgtgagggcaaataaccgatttgaacatgaggtatttccgaggaaacgctttttttgcccgatagtagtttgtcaaaa

SEQ ID NO: 101 - DNA, 122 bp, Homo sapiens
  misc_feature (61)..(62): /note="This region represents a CpG dinucleotide"
  misc_feature (61)..(61): /note="Nucleotide may be methylated to form 5-methylcytosine"
ctctttctcttctgataagggcacttattctatcagattagcactctgcccttatgacctcgtaatttaaccttacttagctcctgaaagctctatctccaatacaatcacactaggggtta

SEQ ID NO: 102 - DNA, 122 bp, Homo sapiens
  misc_feature (61)..(62): /note="This region represents a CpG dinucleotide"
  misc_feature (61)..(61): /note="Nucleotide may be methylated to form 5-methylcytosine"
ttatacctcttggacactccttccgaaggattgggtctcaagggcagtggggtgtgactacggtagacagggctgattaattttcatccaaaactctttggcggattcccctgctctccgct

SEQ ID NO: 103 - DNA, 122 bp, Homo sapiens
  misc_feature (61)..(62): /note="This region represents a CpG dinucleotide"
  misc_feature (61)..(61): /note="Nucleotide may be methylated to form 5-methylcytosine"
ccagaatggtcgtttggcagaagtctccgggaccgcactccaggacaggcacagtcagggcgtcgcgtgggcctactgtggcaaaggagacgtccgcgcgaatccggtcctggggaaagggc

SEQ ID NO: 104 - DNA, 122 bp, Homo sapiens
  misc_feature (61)..(62): /note="This region represents a CpG dinucleotide"
  misc_feature (61)..(61): /note="Nucleotide may be methylated to form 5-methylcytosine"
gaggggaccctgaaagtgggtagccatctgtgaagttgagtccagggtttctatgaacttcgaatgggattgctccataggtgctcttggaaaaaacaccattcaactggttaaaaagcatc

SEQ ID NO: 105 - DNA, 122 bp, Homo sapiens
  misc_feature (61)..(62): /note="This region represents a CpG dinucleotide"
  misc_feature (61)..(61): /note="Nucleotide may be methylated to form 5-methylcytosine"
attagaaattcattgctgcaaggattcactgtgactgacaagagcttgctgcaaccttcacgagtgtgccatggtaaaaaggttgtgagccactgcaaactatagcatcttctttcttttgt

SEQ ID NO: 106 - DNA, 122 bp, Homo sapiens
  misc_feature (61)..(62): /note="This region represents a CpG dinucleotide"
  misc_feature (61)..(61): /note="Nucleotide may be methylated to form 5-methylcytosine"
atggtgttggcgccctgcgggctcctgctcaacctgaccggcaccctggcgcccggctggcggctggtgaagggcttcctgaaccagccagtggacgtggagttgtaccagggcctgtggga

SEQ ID NO: 107 - DNA, 122 bp, Homo sapiens
  misc_feature (61)..(62): /note="This region represents a CpG dinucleotide"
  misc_feature (61)..(61): /note="Nucleotide may be methylated to form 5-methylcytosine"
ccagaagactcattttgaccccggcctgtcgtcatcgagagcaaggccacggcagtcacccgctgcccttgtgcgcaatcgctgctcagtggacgctgcctccgtggccttgttctgaccca

SEQ ID NO: 108 - DNA, 122 bp, Homo sapiens
  misc_feature (61)..(62): /note="This region represents a CpG dinucleotide"
  misc_feature (61)..(61): /note="Nucleotide may be methylated to form 5-methylcytosine"
tgggggatggcttcttgccatgcagttggtgtaaccgtaccaggctatgcagagggcagccgctgtgaacagcagagggaggggagcatagcattggccaacaaggggccagtcatcctggc

SEQ ID NO: 109 - DNA, 122 bp, Homo sapiens
  misc_feature (61)..(62): /note="This region represents a CpG dinucleotide"
  misc_feature (61)..(61): /note="Nucleotide may be methylated to form 5-methylcytosine"
taggtggagtcctcacgatagtcacacctctcctttgggcctagcagggccagagaaagacggaatcactctacccactcaggttgcccagagagcactttaggttctgactcgcgtggggc

SEQ ID NO: 110 - DNA, 122 bp, Homo sapiens
  misc_feature (61)..(62): /note="This region represents a CpG dinucleotide"
  misc_feature (61)..(61): /note="Nucleotide may be methylated to form 5-methylcytosine"
tggctaacactctttacactcttctgccttcccttgagataattaaaatagactgtacaccggccctagtcggtgcccattccccctaactcttcactcaactacgtgtgtagtccgaggga

SEQ ID NO: 111 - DNA, 122 bp, Homo sapiens
  misc_feature (61)..(62): /note="This region represents a CpG dinucleotide"
  misc_feature (61)..(61): /note="Nucleotide may be methylated to form 5-methylcytosine"
gcgcccacacaggggcctcctggagggtccctgtgggaggctgtatgtggggcagaggttcggatgtggccggatacccactctcccataccgggggccctgcgctggccactccagccaca

SEQ ID NO: 112 - DNA, 122 bp, Homo sapiens
  misc_feature (61)..(62): /note="This region represents a CpG dinucleotide"
  misc_feature (61)..(61): /note="Nucleotide may be methylated to form 5-methylcytosine"
gtaagaggaggaaaacaattgagaacataacgattgtgacttcgtcagccgttcccccgacgcctctggaaactggccatttcgtttttgagtaagggcaagaagtgtcctgctcaagccac

SEQ ID NO: 113 - DNA, 122 bp, Homo sapiens
  misc_feature (61)..(62): /note="This region represents a CpG dinucleotide"
  misc_feature (61)..(61): /note="Nucleotide may be methylated to form 5-methylcytosine"
tcctttcaatagaaccatattatgttgggctttgttgtatttcctgctttggcccaataacggggctttagtgacccttgcttgttttgaagaaagatgacagatttcctgcagctctttct

SEQ ID NO: 114 - DNA, 122 bp, Homo sapiens
  misc_feature (61)..(62): /note="This region represents a CpG dinucleotide"
  misc_feature (61)..(61): /note="Nucleotide may be methylated to form 5-methylcytosine"
aagctctcaaggcaggactatcacgagatgcatgtttgtacttaaatcactgaaagcctccgcttggaccggctctccggaagcccagcaacataaaacctgggatggggaagactgaagtg

SEQ ID NO: 115 - DNA, 122 bp, Homo sapiens
  misc_feature (61)..(62): /note="This region represents a CpG dinucleotide"
  misc_feature (61)..(61): /note="Nucleotide may be methylated to form 5-methylcytosine"
atgaagatcaagcaatttctttagctgagttttagaagaaacgtgacacacaattggaaacgttcaggcatcaaggcaggaagcaacagtgcatgatacgagttcaagatgatgaaaactct

SEQ ID NO: 116 - DNA, 122 bp, Homo sapiens
  misc_feature (61)..(62): /note="This region represents a CpG dinucleotide"
  misc_feature (61)..(61): /note="Nucleotide may be methylated to form 5-methylcytosine"
aacagcagagcatcaacccaagtgtaaggcctaagtgtggggcccgtgtgactgcacaggcgcacggccctgcagccatccctgcttgcagaatcaggtgtaagccaccctctgagatcatc

SEQ ID NO: 117 - DNA, 122 bp, Homo sapiens
  misc_feature (61)..(62): /note="This region represents a CpG dinucleotide"
  misc_feature (61)..(61): /note="Nucleotide may be methylated to form 5-methylcytosine"
gccaatgttacttgatgattcaatttctcagcaatatctggcacatggttcccaggtcatcggtgagaagaagcagcctcaaccgggtcatggagcctctcagctagaagccctcttagctg

SEQ ID NO: 118 - DNA, 122 bp, Homo sapiens
  misc_feature (61)..(62): /note="This region represents a CpG dinucleotide"
  misc_feature (61)..(61): /note="Nucleotide may be methylated to form 5-methylcytosine"
gggaacgtggagatcacatagggagaagcccaggttagctccctggagcatgagaggccacgtggagagaaagatgcagccatcccagctgctgtctgttttaaatgttggctgtattatta

SEQ ID NO: 119 - DNA, 122 bp, Homo sapiens
  misc_feature (61)..(62): /note="This region represents a CpG dinucleotide"
  misc_feature (61)..(61): /note="Nucleotide may be methylated to form 5-methylcytosine"
gcctcgacctcccctatcacgccttcctgctcccttagtccggcccctgtgggcccgagacgctctgttcacttgaactagagatgcccagggtctcttgggcaccatgcatacgcgttggg

SEQ ID NO: 120 - DNA, 122 bp, Homo sapiens
  misc_feature (61)..(62): /note="This region represents a CpG dinucleotide"
  misc_feature (61)..(61): /note="Nucleotide may be methylated to form 5-methylcytosine"
ctttgatgatgtgctctccctgctgtgaagactaatgacttcaaagagggcatcctgccacgctaggggctcccatggaaaatctgactgcagtgtaattaggcaagaggctggagttcagg

SEQ ID NO: 121 - DNA, 122 bp, Homo sapiens
  misc_feature (61)..(62): /note="This region represents a CpG dinucleotide"
  misc_feature (61)..(61): /note="Nucleotide may be methylated to form 5-methylcytosine"
aagaggaaacggccccctggccttggccccaggcttcaggatgaatgaggcctctcccagcgacctgaaggtcaccccagggcatgtcccaagaccttgtacagacaaggcttctgattact

SEQ ID NO: 122 - DNA, 122 bp, Homo sapiens
  misc_feature (61)..(62): /note="This region represents a CpG dinucleotide"
  misc_feature (61)..(61): /note="Nucleotide may be methylated to form 5-methylcytosine"
tgtcattatatatgtaacttaaatctagacaccatcaaagcataaaataaaaataaaaagcgttgctgaatctgggtcgaaaatgtagtgcgtttatcccactattctctctgaaaatgttc

SEQ ID NO: 123 - DNA, 122 bp, Homo sapiens
  misc_feature (61)..(62): /note="This region represents a CpG dinucleotide"
  misc_feature (61)..(61): /note="Nucleotide may be methylated to form 5-methylcytosine"
ctatcgggcacttgaaatgggggcagtctaaattgaggtgtgccatcagtgcagaacacacgttgggttttgaagacttagtatgaaaagagaatgtaaaatatttcatcagtaatttttaa

SEQ ID NO: 124 - DNA, 122 bp, Homo sapiens
  misc_feature (61)..(62): /note="This region represents a CpG dinucleotide"
  misc_feature (61)..(61): /note="Nucleotide may be methylated to form 5-methylcytosine"
aagagaggcagtgctttaaggcagccatttccaatagaaagaaaaaaaatgtgagccatgcgtgtcatttaaatttttctagtagctgcttaaaggaaaaggaaacaggctggacatggtgg

SEQ ID NO: 125 - DNA, 122 bp, Homo sapiens
  misc_feature (61)..(62): /note="This region represents a CpG dinucleotide"
  misc_feature (61)..(61): /note="Nucleotide may be methylated to form 5-methylcytosine"
cagggcgatcgtgaacggcggtccctctgagcaggtgcacaggctgggcagttgctgcagcggagaactcattggaattcaggggctagaaccgaggggcatccggccctccctgttgcttg

SEQ ID NO: 126 - DNA, 122 bp, Homo sapiens
  misc_feature (61)..(62): /note="This region represents a CpG dinucleotide"
  misc_feature (61)..(61): /note="Nucleotide may be methylated to form 5-methylcytosine"
ccctcttcctgctccccttcttttgcacagggcatgtttcacatatacaagatgttcttacgtgtcatcccactttagagatgaggaaattgagtctcagggaaggcaaacatcaactttgt

SEQ ID NO: 127 - DNA, 122 bp, Homo sapiens
  misc_feature (61)..(62): /note="This region represents a CpG dinucleotide"
  misc_feature (61)..(61): /note="Nucleotide may be methylated to form 5-methylcytosine"
aaaagaagcaaacagataccaagagtcggaaacaggctaaggatcaaaagcagaaacatccgttcaagccaaagtaaactcagggcattccttctatccacccatctattcaaataacacta

SEQ ID NO: 128 - DNA, 122 bp, Homo sapiens
  misc_feature (61)..(62): /note="This region represents a CpG dinucleotide"
  misc_feature (61)..(61): /note="Nucleotide may be methylated to form 5-methylcytosine"
tcccccttccccaacctaccctggctggctccctccattcctccctccaggagcagatgacgggagcgcccagccaccatagcctgttactgggctaattgcagttgcctgggaggagggca

SEQ ID NO: 129 - DNA, 122 bp, Homo sapiens
  misc_feature (61)..(62): /note="This region represents a CpG dinucleotide"
  misc_feature (61)..(61): /note="Nucleotide may be methylated to form 5-methylcytosine"
taaaattaaccattttaaagtgaacaacccatggcacttcacaatgttgtataaccaacacgtctatctaatttcaagacattttcgtcattccagaaggaaatcccatatccgttaagcag

SEQ ID NO: 130 - DNA, 122 bp, Homo sapiens
  misc_feature (61)..(62): /note="This region represents a CpG dinucleotide"
  misc_feature (61)..(61): /note="Nucleotide may be methylated to form 5-methylcytosine"
tggttttcttgctcatattttctatgtatgcggtgatttccaactacactctgtggagcccgtggggttctgaacggatgctcccaggatgtgtgggaggggcaggaagagcaagagtggag

SEQ ID NO: 131 - DNA, 122 bp, Homo sapiens
  misc_feature (61)..(62): /note="This region represents a CpG dinucleotide"
  misc_feature (61)..(61): /note="Nucleotide may be methylated to form 5-methylcytosine"
tggtactgacagtaggtactgctaccaaccaattttggattgcagcattaaacatcctggcgcatttttaagtgtatctgagtgggctggagccctcgtctgggccaggaaaaaaaaaaaag

SEQ ID NO: 132 - DNA, 122 bp, Homo sapiens
  misc_feature (61)..(62): /note="This region represents a CpG dinucleotide"
  misc_feature (61)..(61): /note="Nucleotide may be methylated to form 5-methylcytosine"
tctgcattctcagtgcagcgtggcccgtactggtcacctgggtatagctttactgaatttcgcagatctggaaacggagaagggactggatctccaaacttggactgccttggactgaccct

SEQ ID NO: 133 - DNA, 122 bp, Homo sapiens
  misc_feature (61)..(62): /note="This region represents a CpG dinucleotide"
  misc_feature (61)..(61): /note="Nucleotide may be methylated to form 5-methylcytosine"
atgggaaagtaccgtgaaaggtgaggttacactttctccttccagcaccggcccaggcgccggcacatctgggttctggtgcacacccatcctgactcagagtccctgaaccttggcccacg

SEQ ID NO: 134 - DNA, 122 bp, Homo sapiens
  misc_feature (61)..(62): /note="This region represents a CpG dinucleotide"
  misc_feature (61)..(61): /note="Nucleotide may be methylated to form 5-methylcytosine"
tgttcgacacggagctaggcactcggtgatgttggctgtcgtcactggcattcactgttacgaatttgcggagtacagaaaagcataaaaataaataggtcaccctcatcctacctctgtga

SEQ ID NO: 135 - DNA, 122 bp, Homo sapiens
  misc_feature (61)..(62): /note="This region represents a CpG dinucleotide"
  misc_feature (61)..(61): /note="Nucleotide may be methylated to form 5-methylcytosine"
caggggactctttgttgcgaccttccttcagaatggggctgacctcatgcatgactttctcgctatcagctccacggggctcagcttcagagggacgagtagggccattgttgacattgttg

SEQ ID NO: 136 - DNA, 122 bp, Homo sapiens
  misc_feature (61)..(62): /note="This region represents a CpG dinucleotide"
  misc_feature (61)..(61): /note="Nucleotide may be methylated to form 5-methylcytosine"
cacacaccgataaacttcagtgcctggatgagcaagcttcctgtgtgcttcagcttggggcgcatgtgcgcttcttctaggattttctgaaacttggtcaggggctcctggatcatgattgc

SEQ ID NO: 137 - DNA, 122 bp, Homo sapiens
  misc_feature (61)..(62): /note="This region represents a CpG dinucleotide"
  misc_feature (61)..(61): /note="Nucleotide may be methylated to form 5-methylcytosine"
aggctgggcagaggggacagtcatctttgtggaggggtggggcatcccaagtcagcttctcgcgggcctggctgtcggagggcacggccgaacccttgcccctcttggcgtacgtgctgctc

SEQ ID NO: 138 - DNA, 122 bp, Homo sapiens
  misc_feature (61)..(62): /note="This region represents a CpG dinucleotide"
  misc_feature (61)..(61): /note="Nucleotide may be methylated to form 5-methylcytosine"
cgagttccaggaggtcttgcagtgactgaatggtggtcactgcagcatatctgcacagtccgtgtcggtgtgagggtcagtggggcctgctgaacaggctgcatgtaactgtcccacgggaa

SEQ ID NO: 139 - DNA, 122 bp, Homo sapiens
  misc_feature (61)..(62): /note="This region represents a CpG dinucleotide"
  misc_feature (61)..(61): /note="Nucleotide may be methylated to form 5-methylcytosine"
ctgctcctcccgcactatcgattttcaattgacctccgcctcccactttacacttcagagcgctcagcggcctccacacctcctgagcaaggaggaaagccagctgggcgcggggcccctgc

SEQ ID NO: 140 - DNA, 122 bp, Homo sapiens
  misc_feature (61)..(62): /note="This region represents a CpG dinucleotide"
  misc_feature (61)..(61): /note="Nucleotide may be methylated to form 5-methylcytosine"
aggcgggggagggggggggaggtggtgggggcgagggggcgggggctcagctagtccagccgtctacaagaaaattgctccctttgaagctgccaggggggccgggaagcctgccccctcct

SEQ ID NO: 141 - DNA, 122 bp, Homo sapiens
  misc_feature (61)..(62): /note="This region represents a CpG dinucleotide"
  misc_feature (61)..(61): /note="Nucleotide may be methylated to form 5-methylcytosine"
cagcagccccggccccgcccctcataccgcggccggaaaccggaagcgcccgccgggcaccgcccaccagccctcgcgaggccccggaggctccgcccacctccgcttcccaccccgccccg

SEQ ID NO: 142 - DNA, 122 bp, Homo sapiens
  misc_feature (61)..(62): /note="This region represents a CpG dinucleotide"
  misc_feature (61)..(61): /note="Nucleotide may be methylated to form 5-methylcytosine"
atcgagcaatccagaccacaggaaagtaccttgccccttctaagccctagatctaacatgcggagcagccaggagactgtgagaaggaactgcttgaggaagtatcccaggcattccttcag

SEQ ID NO: 143 - DNA, 122 bp, Homo sapiens
  misc_feature (61)..(62): /note="This region represents a CpG dinucleotide"
  misc_feature (61)..(61): /note="Nucleotide may be methylated to form 5-methylcytosine"
tacaatgtgcaaaaaggctgatacagagtatctaatgagatcagcaaaccggtcaagcaccgtctccttcaaagctcctccccacaggatggtcgtaccacgtagctgaaagcagacatagc

SEQ ID NO: 144 - DNA, 122 bp, Homo sapiens
  misc_feature (61)..(62): /note="This region represents a CpG dinucleotide"
  misc_feature (61)..(61): /note="Nucleotide may be methylated to form 5-methylcytosine"
agagagctgctggccctgagacaggcttgcctgcctccacctagtccccaccaagtatggcgctggccttgggacacccaggcaaaggaacatgaacttggccttcatcatgcaccctccca

SEQ ID NO: 145 - DNA, 122 bp, Homo sapiens
  misc_feature (61)..(62): /note="This region represents a CpG dinucleotide"
  misc_feature (61)..(61): /note="Nucleotide may be methylated to form 5-methylcytosine"
tgtgctcgtgagtgcgctcgtgtgcttgtgcgggtgtgcacatgcgtgtgacattgtgagcgtgagtgtgagcatgtgtaaggatgcacgtgtgtgagcgtgcatgtgtgcgcggatgtgtg

SEQ ID NO: 146 - DNA, 122 bp, Homo sapiens
  misc_feature (61)..(62): /note="This region represents a CpG dinucleotide"
  misc_feature (61)..(61): /note="Nucleotide may be methylated to form 5-methylcytosine"
cctcccaccctcatggtacagctccaccttccccaggctggcttctgataattgtgctttcggaatcttgcattggaggccagttatcctaatgtgttgggattttggaaaaaagcctcagc

SEQ ID NO: 147 - DNA, 122 bp, Homo sapiens
  misc_feature (61)..(62): /note="This region represents a CpG dinucleotide"
  misc_feature (61)..(61): /note="Nucleotide may be methylated to form 5-methylcytosine"
aaaactaatataggcaggatctgcgattctgcatttctaacgggttcccagcttatcctacgttgagtaatgagacactaaataatcattacaaaagtggtgagattaagaaggattttaat

SEQ ID NO: 148 - DNA, 122 bp, Homo sapiens
  misc_feature (61)..(62): /note="This region represents a CpG dinucleotide"
  misc_feature (61)..(61): /note="Nucleotide may be methylated to form 5-methylcytosine"
gaggttgggtgagttaatgcagttacatggttggccaatggtggggccagatgaacaattcgcaccccctggcttccagaacaggctggttttaccaccggtgaggctggtcctttcagtgg

SEQ ID NO: 149 - DNA, 122 bp, Homo sapiens
  misc_feature (61)..(62): /note="This region represents a CpG dinucleotide"
  misc_feature (61)..(61): /note="Nucleotide may be methylated to form 5-methylcytosine"
cacaaatgcttactgaacaccttctacaattagtcattgcacctcatggagtgacagggacgtgaggaatccatagccctggggtctgggggccaggtgtacatgtgtgtgtgatgttaatg

SEQ ID NO: 150 - DNA, 122 bp, Homo sapiens
  misc_feature (61)..(62): /note="This region represents a CpG dinucleotide"
  misc_feature (61)..(61): /note="Nucleotide may be methylated to form 5-methylcytosine"
ccgcgcctcagccccgcctgccccgctgggagaggtaaatggaccgcacttggtttacgccggttagagtctcagatgctttgttacaggggcacaaactaccctacccctactgtgcgtgg

SEQ ID NO: 151 - DNA, 122 bp, Homo sapiens
  misc_feature (61)..(62): /note="This region represents a CpG dinucleotide"
  misc_feature (61)..(61): /note="Nucleotide may be methylated to form 5-methylcytosine"
cagcggccccggcccagagcgctccacactcggagctagccagctgggacagagcaacagcgcagcgcgggcagccacagcctgcaccggccccgcggggacctgctgtgtgtgggtgtgaa

SEQ ID NO: 152 - DNA, 122 bp, Homo sapiens
  misc_feature (61)..(62): /note="This region represents a CpG dinucleotide"
  misc_feature (61)..(61): /note="Nucleotide may be methylated to form 5-methylcytosine"
acctcgtgatccgcccgcctcggcctcccaaagtggtgggattacaggcgtgagccattgcgcccggcccgtataccaggttctttttttaaggagtgtaaacagctatattttatgggtgc

SEQ ID NO: 153 - DNA, 122 bp, Homo sapiens
  misc_feature (61)..(62): /note="This region represents a CpG dinucleotide"
  misc_feature (61)..(61): /note="Nucleotide may be methylated to form 5-methylcytosine"
ccctatgactgtttctcttccccccaggacaaaacaggccaaggtagcttaagtaagccccgaaggtcacacagtttagtctgggatttctgcaaattttgaattgaccaagacaaataaag

SEQ ID NO: 154 - DNA, 122 bp, Homo sapiens
  misc_feature (61)..(62): /note="This region represents a CpG dinucleotide"
  misc_feature (61)..(61): /note="Nucleotide may be methylated to form 5-methylcytosine"
aaatgtggcatagcgtggccacatcaatggggtggtgaacagctttgaggtaaaggctttcgagtttgagactgctttcagaggactgtaggtaaacgtcggaaaactcatttaagatacta

SEQ ID NO: 155 - DNA, 122 bp, Homo sapiens
  misc_feature (61)..(62): /note="This region represents a CpG dinucleotide"
  misc_feature (61)..(61): /note="Nucleotide may be methylated to form 5-methylcytosine"
ggaattcagagctagagtcgctttacaattcggttccattgtcgagacggagagattccacgaccatgacagaaagtgagactatttaggatttgccaaataggatgttttctgaaccaatc

SEQ ID NO: 156 - DNA, 122 bp, Homo sapiens
  misc_feature (61)..(62): /note="This region represents a CpG dinucleotide"
  misc_feature (61)..(61): /note="Nucleotide may be methylated to form 5-methylcytosine"
ttcacctttgcaactgcatttggattctatattgtctgcatcaggcatggagacgcccaccggctgctgtgagaggaataaaaggagtactgacaaacgtcatcatacaaaaaaggtttcaa

SEQ ID NO: 157 - DNA, 122 bp, Homo sapiens
  misc_feature (61)..(62): /note="This region represents a CpG dinucleotide"
  misc_feature (61)..(61): /note="Nucleotide may be methylated to form 5-methylcytosine"
cagcgtggctgggtgttatgtgctgctgctcctgctagaacctcagaagtgtgagcagtgcgtcaagatgagggaccaggcttctaagctatagcccagctaagccccccagtgccaatccc

SEQ ID NO: 158 - DNA, 122 bp, Homo sapiens
  misc_feature (61)..(62): /note="This region represents a CpG dinucleotide"
  misc_feature (61)..(61): /note="Nucleotide may be methylated to form 5-methylcytosine"
tttcttaatccagtctatcattgttggacattttctttttgatagtcgaattcccttcaacgtctagcacagtgccttgcacatttacccactcaaaaaaaatttcgtaaggaattaataaa

SEQ ID NO: 159 - DNA, 122 bp, Homo sapiens
  misc_feature (61)..(62): /note="This region represents a CpG dinucleotide"
  misc_feature (61)..(61): /note="Nucleotide may be methylated to form 5-methylcytosine"
tgaaatctgcaaatatatacatcccatcagaaaagacatgcagaactgccagcttacagacgtgctcctgacatcctcattccttaatcagaaacccatgtacgttaacatgaagaaaatag

SEQ ID NO: 160 - DNA, 122 bp, Homo sapiens
  misc_feature (61)..(62): /note="This region represents a CpG dinucleotide"
  misc_feature (61)..(61): /note="Nucleotide may be methylated to form 5-methylcytosine"
ggttaaggagaggagattgcgtggctcggagcagccagacccggtaagccgactccttcccgtattccgctttaaccaagcttgtttccctggcggccccacaaattccctgagcggagcgt

SEQ ID NO: 161 - DNA, 122 bp, Homo sapiens
  misc_feature (61)..(62): /note="This region represents a CpG dinucleotide"
  misc_feature (61)..(61): /note="Nucleotide may be methylated to form 5-methylcytosine"
gctgctgcactgatttcaaacagcccaggctgaggaggtagcttcatggtgttttcctaacgaaatctagtaagtggtacatggatgacagaaatctctgtgttggcaactggaaactccag

SEQ ID NO: 162 - DNA, 122 bp, Homo sapiens
  misc_feature (61)..(62): /note="This region represents a CpG dinucleotide"
  misc_feature (61)..(61): /note="Nucleotide may be methylated to form 5-methylcytosine"
ggggacgaggctcatggagaagtttcgggcggtgctggacctgcacgtcaagcaccacagcgccttgggctacggcctggtgaccctgctgacggcgggcggggagcgcatcttctccgccg

SEQ ID NO: 163 - DNA, 122 bp, Homo sapiens
  misc_feature (61)..(62): /note="This region represents a CpG dinucleotide"
  misc_feature (61)..(61): /note="Nucleotide may be methylated to form 5-methylcytosine"
gccccggcccagagcgctccacactcggagctagccagctgggacagagcaacagcgcagcgcgggcagccacagcctgcaccggccccgcggggacctgctgtgtgtgggtgtgaaggtgg

SEQ ID NO: 164 - DNA, 122 bp, Homo sapiens
  misc_feature (61)..(62): /note="This region represents a CpG dinucleotide"
  misc_feature (61)..(61): /note="Nucleotide may be methylated to form 5-methylcytosine"
gcgggacgttctcttcggtgcccgcttcccctgcctgggtgtggatggggcagcagtgggcgccactgtgcaacccccagccccagccccggccccgtcctcatcaacacatcatccagtca

SEQ ID NO: 165 - DNA, 122 bp, Homo sapiens
  misc_feature (61)..(62): /note="This region represents a CpG dinucleotide"
  misc_feature (61)..(61): /note="Nucleotide may be methylated to form 5-methylcytosine"
attcttatataacatcctgttgcaaaaaataatagagaccactatttgctgaaagcctaccgtggattaagcattgttcagtgtgcttttcatgtgtcatttagtcttgacagttcaatact

SEQ ID NO: 166 - DNA, 122 bp, Homo sapiens
  misc_feature (61)..(62): /note="This region represents a CpG dinucleotide"
  misc_feature (61)..(61): /note="Nucleotide may be methylated to form 5-methylcytosine"
ctagccagcaccaggaagtccccctttatccccttccccaggagtcggggctggcggagacggagagctgcgggcagactcacacctggccccgggctctggctgtattgatggggctgtgg

SEQ ID NO: 167 - DNA, 122 bp, Homo sapiens
  misc_feature (61)..(62): /note="This region represents a CpG dinucleotide"
  misc_feature (61)..(61): /note="Nucleotide may be methylated to form 5-methylcytosine"
aactgcatctaaccctgacacacacaggcagccactcggtacgggggaccctgttacacacggcccactgtgggaagcctgaggccatgtgaaggggaccccctgggctctgtctctttgtc

SEQ ID NO: 168 - DNA, 122 bp, Homo sapiens
  misc_feature (61)..(62): /note="This region represents a CpG dinucleotide"
  misc_feature (61)..(61): /note="Nucleotide may be methylated to form 5-methylcytosine"
ttttccaagtccagcaaattgtagacgagggaagattggtcactcggcaaacctcatgatcggcaggattgtcccaaaggtcacttgacagcgcacatgatcgatccaggatggcaaaatag

SEQ ID NO: 169 - DNA, 122 bp, Homo sapiens
  misc_feature (61)..(62): /note="This region represents a CpG dinucleotide"
  misc_feature (61)..(61): /note="Nucleotide may be methylated to form 5-methylcytosine"
acgcccggcttactgacaattttacctgccacattgcccttccttagatttcccaagtaccgtctttgttctcatcaataagctaccagcactgctgaggaacaggtaggcttgagcaggac

SEQ ID NO: 170 - DNA, 122 bp, Homo sapiens
  misc_feature (61)..(62): /note="This region represents a CpG dinucleotide"
  misc_feature (61)..(61): /note="Nucleotide may be methylated to form 5-methylcytosine"
acagtatgcggagggatgactccgacagcgatttcggagcctctctcggcgtcagtcttgcgccggcacccgccacggccagcgcaaccaacacctgcctgaggactggcccgagctcggcc

SEQ ID NO: 171 - DNA, 122 bp, Homo sapiens
  misc_feature (61)..(62): /note="This region represents a CpG dinucleotide"
  misc_feature (61)..(61): /note="Nucleotide may be methylated to form 5-methylcytosine"
ctcttcaggactgtttctaactgcccgtatttgcatattcccactgctctttctgcataacgaggagcaatcagaagtgctctctccctccccaaggatccagtaccagtggagggggtatg

SEQ ID NO: 172 - DNA, 122 bp, Homo sapiens
  misc_feature (61)..(62): /note="This region represents a CpG dinucleotide"
  misc_feature (61)..(61): /note="Nucleotide may be methylated to form 5-methylcytosine"
cggccggagtgtgaacagaagtttgctcatctgacacctggggctgggcagagcccctcccgggggcagctctgggcagcctgtggagagactgatgcaagacaggcaagttcagagaacga

SEQ ID NO: 173 - DNA, 122 bp, Homo sapiens
  misc_feature (61)..(62): /note="This region represents a CpG dinucleotide"
  misc_feature (61)..(61): /note="Nucleotide may be methylated to form 5-methylcytosine"
ttgtgagaccccagtgaccaggaaccccggggagaagtctcctccatgagtcatgatagccgcaggcagctgcgaaggagggggacgtgtagccaagaccgggaagctaggtaactgcagtg

SEQ ID NO: 174 - DNA, 122 bp, Homo sapiens
  misc_feature (61)..(62): /note="This region represents a CpG dinucleotide"
  misc_feature (61)..(61): /note="Nucleotide may be methylated to form 5-methylcytosine"
tctcctagatacaaagatgggaagaggtggcattaggaaaatgccatgtacagagatttacggatttgtgtgtgtattgattactgtgtctaatgggtaaagcattttagacagccatttga

SEQ ID NO: 175 - DNA, 122 bp, Homo sapiens
  misc_feature (61)..(62): /note="This region represents a CpG dinucleotide"
  misc_feature (61)..(61): /note="Nucleotide may be methylated to form 5-methylcytosine"
ggcaacacctcacccctggtcctactatctctggtcaaagaaatgtgcgcggtcatctagcgtcagcaaatcatcttgtatctacagatctgcctcagctcctttgctcagtaagaacttgt

SEQ ID NO: 176 - DNA, 122 bp, Homo sapiens
  misc_feature (61)..(62): /note="This region represents a CpG dinucleotide"
  misc_feature (61)..(61): /note="Nucleotide may be methylated to form 5-methylcytosine"
ccggaccgcacccttcagccgctgccctgacccggccagcagctgcgaaacccgtccacgcgaaattgagttcttggctgggcccgtgcctcgtgctccggacctgggatcctcgaggcatc

SEQ ID NO: 177 - DNA, 122 bp, Homo sapiens
  misc_feature (61)..(62): /note="This region represents a CpG dinucleotide"
  misc_feature (61)..(61): /note="Nucleotide may be methylated to form 5-methylcytosine"
ggtctggcctatcaaggaccccttgaaggtgcctctcacccccagcaccaaagtggcccacgtcctgaggcagttcacagagcacctcagccctggttccaagggtcaagaagacagtgagg

SEQ ID NO: 178 - DNA, 122 bp, Homo sapiens
  misc_feature (61)..(62): /note="This region represents a CpG dinucleotide"
  misc_feature (61)..(61): /note="Nucleotide may be methylated to form 5-methylcytosine"
gcctgtgtgcagatggcagtggaagccagcgcaggacgcttggcagtgtgggttcttgctcggtcttcttcctatctggatgtcctggaaacttcctccatgcagggagcgtgtgtctgtgg

SEQ ID NO: 179 - DNA, 122 bp, Homo sapiens
  misc_feature (61)..(62): /note="This region represents a CpG dinucleotide"
  misc_feature (61)..(61): /note="Nucleotide may be methylated to form 5-methylcytosine"
attatcttaattttctcgtctttgaacatcactcacgtttgcactacccagtcagtggaacgagtgggtcataattaaggttcagattctagcttccaacgtccaagctggctggagtggca

SEQ ID NO: 180 - DNA, 122 bp, Homo sapiens
  misc_feature (61)..(62): /note="This region represents a CpG dinucleotide"
  misc_feature (61)..(61): /note="Nucleotide may be methylated to form 5-methylcytosine"
ttttacctaactggctggaggcccgccagaggccacaagaaccctccagccctaagtctgcgaagttgctgatgtcacgtcctttcccaaactgagaccaatcagtgaggaagccttggagt

SEQ ID NO: 181 - DNA, 122 bp, Homo sapiens
  misc_feature (61)..(62): /note="This region represents a CpG dinucleotide"
  misc_feature (61)..(61): /note="Nucleotide may be methylated to form 5-methylcytosine"
gttgagaagtatcttaatgagttaacacatacctcctgtataatccaactgttccatatccgggaagagaaataaaagcctatgtccataaaagacctgaataattgtagcagctttattca

SEQ ID NO: 182 - DNA, 122 bp, Homo sapiens
  misc_feature (61)..(62): /note="This region represents a CpG dinucleotide"
  misc_feature (61)..(61): /note="Nucleotide may be methylated to form 5-methylcytosine"
tattttcatccacagctccctaaacacaaagctgtggatttcataaatgtaaatatactgcgtaatctgcccactgggagttcatagtttagtaaggactcagagaagacaatttcactgtg

SEQ ID NO: 183 - DNA, 122 bp, Homo sapiens
  misc_feature (61)..(62): /note="This region represents a CpG dinucleotide"
  misc_feature (61)..(61): /note="Nucleotide may be methylated to form 5-methylcytosine"
ctgggcccacggaggacgggctgctcaaatgtcaccgcctttggcaatgtggctgtgagacgtcagaagggcgtcgcaggagagcttctgtgtggatcgctccattttgtagaagggaaatc

SEQ ID NO: 184 - DNA, 122 bp, Homo sapiens
  misc_feature (61)..(62): /note="This region represents a CpG dinucleotide"
  misc_feature (61)..(61): /note="Nucleotide may be methylated to form 5-methylcytosine"
ttaaacaaagaaataaacaaaaaaatcattatgctacacagaaaaatgaaagcaaaaccacggacagcagcttggacaccacgtgtctgaccaaggcagcaccatggacagcagccaacagt

SEQ ID NO: 185 - DNA, 122 bp, Homo sapiens
  misc_feature (61)..(62): /note="This region represents a CpG dinucleotide"
  misc_feature (61)..(61): /note="Nucleotide may be methylated to form 5-methylcytosine"
tgaaaccctaaatgaggttaatttcttcattcttttttcattcagtccacctctattcaacgcctacccacatgccattctttgtattgtattgtccttaaatagaaatatttttttaaagt

SEQ ID NO: 186 - DNA, 122 bp, Homo sapiens
  misc_feature (61)..(62): /note="This region represents a CpG dinucleotide"
  misc_feature (61)..(61): /note="Nucleotide may be methylated to form 5-methylcytosine"
ccccccttcccccttcccccttcccccttcccccttcccctcccccatctccagcctggccgctccaggaagtgagcaccgtttatcccccaccccaggcggcccgactcctcccagaagga

SEQ ID NO: 187 - DNA, 122 bp, Homo sapiens
  misc_feature (61)..(62): /note="This region represents a CpG dinucleotide"
  misc_feature (61)..(61): /note="Nucleotide may be methylated to form 5-methylcytosine"
cgcagatcccaggggatccttggcgtttctggttcatgcccacggtgtgtctcaggcccacggggggcagcctaaagcggcacgaaagcttgaaaggggaggtcgaagcacctgtgtgatga

SEQ ID NO: 188 - DNA, 122 bp, Homo sapiens
  misc_feature (61)..(62): /note="This region represents a CpG dinucleotide"
  misc_feature (61)..(61): /note="Nucleotide may be methylated to form 5-methylcytosine"
caattttcagataatttcccctctaaactggctacctataggtgcactactacatctaaacgcatcataaaattatgcttaaaatctcaccctgcatagaattccttgcgaatgtaaagact

SEQ ID NO: 189 - DNA, 122 bp, Homo sapiens
  misc_feature (61)..(62): /note="This region represents a CpG dinucleotide"
  misc_feature (61)..(61): /note="Nucleotide may be methylated to form 5-methylcytosine"
accccctttcctaccccggcctgtgcttagacatggggaaagctgcctgagaccctggggcgccccccgtgtatctccggaaggaggaaaaggtcactgcactttcacaagcttttatttta

SEQ ID NO: 190 - DNA, 122 bp, Homo sapiens
  misc_feature (61)..(62): /note="This region represents a CpG dinucleotide"
  misc_feature (61)..(61): /note="Nucleotide may be methylated to form 5-methylcytosine"
ccccttgggggcgtcaagcccctctgagatcctgacggtttgtgggaggagcctacaaagcgctcggccccgcccactcctggtaccctcccacccaggctcaacccgcatccgaggccgtc

SEQ ID NO: 191 - DNA, 122 bp, Homo sapiens
  misc_feature (61)..(62): /note="This region represents a CpG dinucleotide"
  misc_feature (61)..(61): /note="Nucleotide may be methylated to form 5-methylcytosine"
ggggtggcggtagggcagaggtttccagccctagtgcggggtgagaccccacaccagaaacggagcccagagcaccggttgggtcgggacagggttggtgagggactctgggacgtgttgag

SEQ ID NO: 192 - DNA, 122 bp, Homo sapiens
  misc_feature (61)..(62): /note="This region represents a CpG dinucleotide"
  misc_feature (61)..(61): /note="Nucleotide may be methylated to form 5-methylcytosine"
tgtgtgtgtgtttgcgcgcgcgcgtgtgtgttgggttctgttaaatgcttgagcctgagacggggggcggggcgggggggggtgcgggaaagccatttccttgcttaagcccaaagggtttc

SEQ ID NO: 193 - DNA, 122 bp, Homo sapiens
  misc_feature (61)..(62): /note="This region represents a CpG dinucleotide"
  misc_feature (61)..(61): /note="Nucleotide may be methylated to form 5-methylcytosine"
taaaggataaatattctagtgtcttttttactttgtgtgtgcttgtggcaggattgctgacgggcaccaccctttctgcagagagtaaacatcgccttgctaaggaaactttttgtctgatt

SEQ ID NO: 194 - DNA, 122 bp, Homo sapiens
  misc_feature (61)..(62): /note="This region represents a CpG dinucleotide"
  misc_feature (61)..(61): /note="Nucleotide may be methylated to form 5-methylcytosine"
ctgtacttgtgtgactctatcactgtgaacccttggtccgacccagtgtggaaatatttgcgttaagtgtcatgcagtgtaaaaggaaatgttctacttaacagcacttgcctatgaggtat

SEQ ID NO: 195 - DNA, 122 bp, Homo sapiens
  misc_feature (61)..(62): /note="This region represents a CpG dinucleotide"
  misc_feature (61)..(61): /note="Nucleotide may be methylated to form 5-methylcytosine"
gaaccttttggcggccagctggaagcctgtgcacccgtcttcaaataaaggcttttaattcgcagactagaacgtttaggattacaaagaaaactggttcctttcaaatctggttatgtttg

SEQ ID NO: 196 - DNA, 122 bp, Homo sapiens
  misc_feature (61)..(62): /note="This region represents a CpG dinucleotide"
  misc_feature (61)..(61): /note="Nucleotide may be methylated to form 5-methylcytosine"
ggagagcaagtggaggtggcagggccagggcgagacagctgtggttgtggtttcctcccacgtggcccctccttctgaaggttctgagaggcctttgagtgcatttggggtgatttgactca

SEQ ID NO: 197 - DNA, 122 bp, Homo sapiens
  misc_feature (61)..(62): /note="This region represents a CpG dinucleotide"
  misc_feature (61)..(61): /note="Nucleotide may be methylated to form 5-methylcytosine"
tctccatgttttcgatctgtcatcctgcaggtctgctgtagcaggtggctccgcttgaagcgagggaggaagtttcctccgatcagtagaggtcggtgtgggcgtgggggctgcctggaatg

SEQ ID NO: 198 - DNA, 122 bp, Homo sapiens
  misc_feature (61)..(62): /note="This region represents a CpG dinucleotide"
  misc_feature (61)..(61): /note="Nucleotide may be methylated to form 5-methylcytosine"
ttggttgtaccgtgtgtgtggctgcagcccctgatgcaggctgtctccactagggggcagcgcagcctccctgctgagtctccccagggggcccagaggtgtgcagcccagacagtttggga

SEQ ID NO: 199 - DNA, 122 bp, Homo sapiens
  misc_feature (61)..(62): /note="This region represents a CpG dinucleotide"
  misc_feature (61)..(61): /note="Nucleotide may be methylated to form 5-methylcytosine"
gtgctaggggctctgcttctaggaatggtaagtgaacttcccctaccttcccctggagggcgccacacagagatgtctggatttccgccgcacagtgatgccacctggcagtcatgtgacat

SEQ ID NO: 200 - DNA, 122 bp, Homo sapiens
  misc_feature (61)..(62): /note="This region represents a CpG dinucleotide"
  misc_feature (61)..(61): /note="Nucleotide may be methylated to form 5-methylcytosine"
aaaccttttcaaggggcatgctctgtggcaggttcttctgttagcccaacaaaaccatcacgttttctagaatgaagcctaaatagaaatgaatcttaagtaaaaagcagaaatcagggtca

SEQ ID NO: 201 - DNA, 122 bp, Homo sapiens
  misc_feature (61)..(62): /note="This region represents a CpG dinucleotide"
  misc_feature (61)..(61): /note="Nucleotide may be methylated to form 5-methylcytosine"
agatgaagttactactatatttcaccaccctgcaggtaactgaaactcaattaccgctgccgctcactcggttccatccccctgagtttagatagctctggtgcctctcagaactcccctgt

SEQ ID NO: 202 - DNA, 122 bp, Homo sapiens
  misc_feature (61)..(62): /note="This region represents a CpG dinucleotide"
  misc_feature (61)..(61): /note="Nucleotide may be methylated to form 5-methylcytosine"
tgcattcttaatttccttggtatgaggcaatgaacctcgggtattaccccagacaaacgacgtcgatgccacttcagcaggatataagaacctatgccaggaccatggctgcgaggatggaa

SEQ ID NO: 203 - DNA, 122 bp, Homo sapiens
  misc_feature (61)..(62): /note="This region represents a CpG dinucleotide"
  misc_feature (61)..(61): /note="Nucleotide may be methylated to form 5-methylcytosine"
gagtgcttctctccatccttgcactaactttcctaatctttaattgtgccaattcaacttcgttgtgttattcttggcttctcgcctcatgagggaccagaagtttgtaagcacatagagga

SEQ ID NO: 204 - DNA, 122 bp, Homo sapiens
  misc_feature (61)..(62): /note="This region represents a CpG dinucleotide"
  misc_feature (61)..(61): /note="Nucleotide may be methylated to form 5-methylcytosine"
cgtctcattcaactccccacgccccagccgaggggtactgtccttccagcccccgcgctacgcagctgctgcctggtcctcgcctgtccccgcggagcccccgccctggccaggctcactgc

SEQ ID NO: 205 - DNA, 122 bp, Homo sapiens
  misc_feature (61)..(62): /note="This region represents a CpG dinucleotide"
  misc_feature (61)..(61): /note="Nucleotide may be methylated to form 5-methylcytosine"
agaaatcagaagtgactgggaacctttgtgaggcagggttcttgttcctggaagaatacacgacggggttgccaggatattgcagagaatgtaggaggaggggaatggaagagaaaaatccc

SEQ ID NO: 206 - DNA, 122 bp, Homo sapiens
  misc_feature (61)..(62): /note="This region represents a CpG dinucleotide"
  misc_feature (61)..(61): /note="Nucleotide may be methylated to form 5-methylcytosine"
acgtcacattcatctaagtgagggggcctggtttgttccaaattttcatgaccatcggagcgggtctgacggtgagaccagacattttgcttgtatttctggttcagctccagctagggctg

SEQ ID NO: 207 - DNA, 122 bp, Homo sapiens
  misc_feature (61)..(62): /note="This region represents a CpG dinucleotide"
  misc_feature (61)..(61): /note="Nucleotide may be methylated to form 5-methylcytosine"
aaccattttcaaagtttccataaaaggaatctcaaaatagattataatgaattcctctgtcgcatattatcatggaacaaagtggcacatttttagaagtgggctactgagaaatgaatcta

SEQ ID NO: 208 - DNA, 122 bp, Homo sapiens
  misc_feature (61)..(62): /note="This region represents a CpG dinucleotide"
  misc_feature (61)..(61): /note="Nucleotide may be methylated to form 5-methylcytosine"
cacttcgaatacagactacacacttctgggtctgtcttgtaccacattgtctggcataggcgctcactgtatatttgttgaatgttaaagttctgtgcaccaaaaccgtgcactttgcatcg

SEQ ID NO: 209 - DNA, 122 bp, Homo sapiens
  misc_feature (61)..(62): /note="This region represents a CpG dinucleotide"
  misc_feature (61)..(61): /note="Nucleotide may be methylated to form 5-methylcytosine"
caggcgctttggcaagctctgcccagaaggcctggaggtcattagtgcgccagggggtcccggggcacccagcggagcaggtggtgggaaatgtggtggctggcttaactggtcaaggaggc

SEQ ID NO: 210 - DNA, 122 bp, Homo sapiens
  misc_feature (61)..(62): /note="This region represents a CpG dinucleotide"
  misc_feature (61)..(61): /note="Nucleotide may be methylated to form 5-methylcytosine"
ccaaaatccccggctactgtatgcaaacccccagtggtgagccaatgactcctgcagagacgcccaggctgcaacccccgagccgtggttttgccaccttgtggcagaacgactccgcagac

SEQ ID NO: 211 - DNA, 122 bp, Homo sapiens
  misc_feature (61)..(62): /note="This region represents a CpG dinucleotide"
  misc_feature (61)..(61): /note="Nucleotide may be methylated to form 5-methylcytosine"
ctgcatgtgtatttctgctgccttttccggccacagcttggggagcttgtctgtagagggcgtccgaggctccatggatagtgaggtccatcctactgcattttcaacactgctccatagcc

SEQ ID NO: 212 - DNA, 122 bp, Homo sapiens
  misc_feature (61)..(62): /note="This region represents a CpG dinucleotide"
  misc_feature (61)..(61): /note="Nucleotide may be methylated to form 5-methylcytosine"
tcctcacggctgctctctgggaaggacgctgcctcgccacttcctcccagccacctgcagcgcctcctgcaacactcaggaatcctagagatccttaagccttcacagggcgcaggccccat

SEQ ID NO: 213 - DNA, 122 bp, Homo sapiens
  misc_feature (61)..(62): /note="This region represents a CpG dinucleotide"
  misc_feature (61)..(61): /note="Nucleotide may be methylated to form 5-methylcytosine"
gattgtatctatttacttaccaaggtccaggcacctagggctgtgctgggtgccccgaggcgctgtcatagccgtggctttgaagagcacctgactggtccacatctgtcccaggaggcaga

SEQ ID NO: 214 - DNA, 122 bp, Homo sapiens
  misc_feature (61)..(62): /note="This region represents a CpG dinucleotide"
  misc_feature (61)..(61): /note="Nucleotide may be methylated to form 5-methylcytosine"
ttcttgggtcacttaacatttgcagtgaagtcattcctggagcccttacctagggctccccgcccctcccccaccttgtgctcatcctgcttattcaaaggctcttaattttgatgagtttc

SEQ ID NO: 215 - DNA, 122 bp, Homo sapiens
  misc_feature (61)..(62): /note="This region represents a CpG dinucleotide"
  misc_feature (61)..(61): /note="Nucleotide may be methylated to form 5-methylcytosine"
acaggcttgcttcctttttctcttttgagtctaaaaaaaatcatgtgcaagtttagcccacgaaaaaggggctcagttcttttgaatgagcaggtgatacactttagagaaacaaagaaagg

SEQ ID NO: 216 - DNA, 122 bp, Homo sapiens
  misc_feature (61)..(62): /note="This region represents a CpG dinucleotide"
  misc_feature (61)..(61): /note="Nucleotide may be methylated to form 5-methylcytosine"
ctccaggcgggaggccactttcagccactctcagacaaaatccctgggggaaggcccccccggctgctctctcccaggactgattacaagcaaacagctggaggcaaacatctgctcctctc

SEQ ID NO: 217 - DNA, 122 bp, Homo sapiens
  misc_feature (61)..(62): /note="This region represents a CpG dinucleotide"
  misc_feature (61)..(61): /note="Nucleotide may be methylated to form 5-methylcytosine"
tcaccttactattactcctcttgtgacttcccttcttatattgttccaccccccgacacacgtacacactgatcaagttatagatggctgaaggcgtaacagctggtctacactcttcttag

SEQ ID NO: 218 - DNA, 122 bp, Homo sapiens
  misc_feature (61)..(62): /note="This region represents a CpG dinucleotide"
  misc_feature (61)..(61): /note="Nucleotide may be methylated to form 5-methylcytosine"
cccacttgaaggaatagctagatttctggacccccattttctgaggctttccaggatggacgcatgctatcagctccccctgcaggtctgactctttcctgacagggaattcctggaggtcc

SEQ ID NO: 219 - DNA, 122 bp, Homo sapiens
  misc_feature (61)..(62): /note="This region represents a CpG dinucleotide"
  misc_feature (61)..(61): /note="Nucleotide may be methylated to form 5-methylcytosine"
ggagcagaatgaatacaagttgagaaaacggagtggttctaggtgaagtggactcctgaacgacttttctaaaaagatgttgtgctgaagagtatactcagtgtggtcagaaatgtcaggag

SEQ ID NO: 220 - DNA, 122 bp, Homo sapiens
  misc_feature (61)..(62): /note="This region represents a CpG dinucleotide"
  misc_feature (61)..(61): /note="Nucleotide may be methylated to form 5-methylcytosine"
cagacacagcctcatggggtgtttaatcttgatccaaaagtcactatcgtacctgtggtccgaatgcatgtataacagtcacagttccaactttcacttcccttcagatgtgagattcagaa

SEQ ID NO: 221 - DNA, 122 bp, Homo sapiens
  misc_feature (61)..(62): /note="This region represents a CpG dinucleotide"
  misc_feature (61)..(61): /note="Nucleotide may be methylated to form 5-methylcytosine"
gtatcccagtgaactgaatgagctgctcccagacagttagaatcgcagccggggcccaggcggctgactgcacagtgaggagccaggccggacaggccccaggcgcccccgcccagccctgg

SEQ ID NO: 222 - DNA, 122 bp, Homo sapiens
  misc_feature (61)..(62): /note="This region represents a CpG dinucleotide"
  misc_feature (61)..(61): /note="Nucleotide may be methylated to form 5-methylcytosine"
acatacccgtccctattacgatcacatcaaactccgaagggagagtatccgccatcttgacgggaaacgtgtcatgtgactattacttgtggaaatgagatcaagttaggcattccctccgt

SEQ ID NO: 223 - DNA, 122 bp, Homo sapiens
  misc_feature (61)..(62): /note="This region represents a CpG dinucleotide"
  misc_feature (61)..(61): /note="Nucleotide may be methylated to form 5-methylcytosine"
attcagaaggaattcctgttagccaagcctcctggactcctcaagggagtctttaaaaatcgtaagcacacttcttacacctcacatgcctcatacctaaactgtgtctgggttaataaaat

SEQ ID NO: 224 - DNA, 122 bp, Homo sapiens
  misc_feature (61)..(62): /note="This region represents a CpG dinucleotide"
  misc_feature (61)..(61): /note="Nucleotide may be methylated to form 5-methylcytosine"
tatgaagtgtagaagcgtgcccttttctcttagtccatttccaccagacacggacagcaccgcgggtcgcggctaagggctctgccatgcacatggaaccctggggcctcctccttctgccc

SEQ ID NO: 225 - DNA, 122 bp, Homo sapiens
  misc_feature (61)..(62): /note="This region represents a CpG dinucleotide"
  misc_feature (61)..(61): /note="Nucleotide may be methylated to form 5-methylcytosine"
gatgattgagccaaagcaagagaaactcatttctttgtaaaactgcacttgacgttgtaacggttttgaacaaaggataggcacactttcagaacactttatctgttgagagtcacggcatg

SEQ ID NO: 226 - DNA, 122 bp, Homo sapiens
  misc_feature (61)..(62): /note="This region represents a CpG dinucleotide"
  misc_feature (61)..(61): /note="Nucleotide may be methylated to form 5-methylcytosine"
ctcgatctcctgacctcgtgatcctcccgcctcggcctcccaaagtgctgggattacaggcgtgagccaccacgccctgcccccagaacgatcttgagaacagaatgttcccaataaatatc

SEQ ID NO: 227 - DNA, 122 bp, Homo sapiens
  misc_feature (61)..(62): /note="This region represents a CpG dinucleotide"
  misc_feature (61)..(61): /note="Nucleotide may be methylated to form 5-methylcytosine"
catcaggccacaaagcaactaggcaactgctgactattgttctccaaacttctaaagtcccgaagaacaaaaaagcaagtgcccagtactcagcttttcaaaaccattaaaatacaaacttc

SEQ ID NO: 228 - DNA, 122 bp, Homo sapiens
  misc_feature (61)..(62): /note="This region represents a CpG dinucleotide"
  misc_feature (61)..(61): /note="Nucleotide may be methylated to form 5-methylcytosine"
atgggtctggttgccctagaataagaggcagagctcatgcgagcgctcaccttctggctgcgatggaaacattgcccactgcgtacagctctagtgactccttgatgtgtaagcatgtgtga

SEQ ID NO: 229 - DNA, 122 bp, Homo sapiens
  misc_feature (61)..(62): /note="This region represents a CpG dinucleotide"
  misc_feature (61)..(61): /note="Nucleotide may be methylated to form 5-methylcytosine"
ttggactcggctcttttgtgacctaacagtgcaggggccttgtgctgagctgcacatgctcgctctcgctggtgctccctctctctctctctctctctctgcattatttatagtaaaccata

SEQ ID NO: 230 - DNA, 122 bp, Homo sapiens
  misc_feature (61)..(62): /note="This region represents a CpG dinucleotide"
  misc_feature (61)..(61): /note="Nucleotide may be methylated to form 5-methylcytosine"
gggtgggaatcagaaattcagcttcagacttggggggttggagctgcctatttggtatggcgagtaggcagctggacgtagaaggaggctggagtttgcgagagaaacttgggagtggttgg

SEQ ID NO: 231 - DNA, 122 bp, Homo sapiens
  misc_feature (61)..(62): /note="This region represents a CpG dinucleotide"
  misc_feature (61)..(61): /note="Nucleotide may be methylated to form 5-methylcytosine"
agggctaagggtccccccgttctgtggccgcctccagcacatccacccagagtccctgggcgtgaacacagccgctggggacgatcaccgcctgcccagcgtgcagccctggggctgcgtcc

SEQ ID NO: 232 - DNA, 122 bp, Homo sapiens
  misc_feature (61)..(62): /note="This region represents a CpG dinucleotide"
  misc_feature (61)..(61): /note="Nucleotide may be methylated to form 5-methylcytosine"
tgtcccagagatctacactctggaaatgatgcctagaatcatgctggtccagagaggacccgacttccaccaatgctgggcctggatgtacagcgtgcaccacaagcttcagcactggctgt

SEQ ID NO: 233 - DNA, 122 bp, Homo sapiens
  misc_feature (61)..(62): /note="This region represents a CpG dinucleotide"
  misc_feature (61)..(61): /note="Nucleotide may be methylated to form 5-methylcytosine"
aaagtcgagtgctctcatgccaggaagctgatacagttcatgaaacctcagtcattctttcgtattactcctgtcttctctttggaaaacaatctcatgaatttggtcttgacgctgactta

SEQ ID NO: 234 - DNA, 122 bp, Homo sapiens
  misc_feature (61)..(62): /note="This region represents a CpG dinucleotide"
  misc_feature (61)..(61): /note="Nucleotide may be methylated to form 5-methylcytosine"
cagggaaactgaagttctgaggcagtaaaactcaggcagcgccatgcattagctgtagtgcgatctgaaattgcagccgagcagcctccgcgcgctcgcgcacttcaagaacgcattttcct

SEQ ID NO: 235 - DNA, 122 bp, Homo sapiens
  misc_feature (61)..(62): /note="This region represents a CpG dinucleotide"
  misc_feature (61)..(61): /note="Nucleotide may be methylated to form 5-methylcytosine"
ttctcctgcctcagtctcccccagtagctggctagacaggattagaggtgtgtgccatcacgcccagctaatttttttgtatttttagtagagacggggtttcaccatgctggccaggctgg

SEQ ID NO: 236 - DNA, 122 bp, Homo sapiens
  misc_feature (61)..(62): /note="This region represents a CpG dinucleotide"
  misc_feature (61)..(61): /note="Nucleotide may be methylated to form 5-methylcytosine"
tgttgtaagagaataatgtgctcttggcagcctggatgttgttaaaacaccccctggcaccgcacactcagagcctcccagcccttcgctggcccaagggccaccaggcagcggggagcaaa

SEQ ID NO: 237 - DNA, 122 bp, Homo sapiens
  misc_feature (61)..(62): /note="This region represents a CpG dinucleotide"
  misc_feature (61)..(61): /note="Nucleotide may be methylated to form 5-methylcytosine"
cggagttcatccaaggtctccgtccaagctatgacaagctacatcctcgctcggtgattacgagagacacccctgcagttacctgatggcacaggatggtctgttgcaccagtcgagcgtag

SEQ ID NO: 238 - DNA, 122 bp, Homo sapiens
  misc_feature (61)..(62): /note="This region represents a CpG dinucleotide"
  misc_feature (61)..(61): /note="Nucleotide may be methylated to form 5-methylcytosine"
atcttctaatagttaattaggatccctagctgcaagccttccttgctactgggttaggagcgctttcccccattgacccaggagcttcttcagggagtaggggatggaacgtttgtctcctc

SEQ ID NO: 239 - DNA, 122 bp, Homo sapiens
  misc_feature (61)..(62): /note="This region represents a CpG dinucleotide"
  misc_feature (61)..(61): /note="Nucleotide may be methylated to form 5-methylcytosine"
aaacactgatttctaggatatgctggtcaataaaaatagcctaagcgactccctttcacccgccccatctgccacaggcttgcctattgcctctgagtgacagaatcaggctaggtggagtg

SEQ ID NO: 240 - DNA, 122 bp, Homo sapiens
  misc_feature (61)..(62): /note="This region represents a CpG dinucleotide"
  misc_feature (61)..(61): /note="Nucleotide may be methylated to form 5-methylcytosine"
ttctcaggttattgaatagtgtgttgacttccgaaataaatagatatgcagtgtgaagggcgagctgtcactttaggagagctttcctgatctaaattaaaaggcacttctaattgaaaact

SEQ ID NO: 241 - DNA, 122 bp, Homo sapiens
  misc_feature (61)..(62): /note="This region represents a CpG dinucleotide"
  misc_feature (61)..(61): /note="Nucleotide may be methylated to form 5-methylcytosine"
ttggttacttgtgaagggaattggtcagtttccacctcagcactttgccttatcaacatgcggtcgccatctagtggccaaaggttgtctccaccagctacccagatggaaggcaaataaat

SEQ ID NO: 242 - DNA, 122 bp, Homo sapiens
  misc_feature (61)..(62): /note="This region represents a CpG dinucleotide"
  misc_feature (61)..(61): /note="Nucleotide may be methylated to form 5-methylcytosine"
ccccaatgctactgagcctgggcacgcgcctcccgggagagtcaccctgggcgacagccccgcccacctggctttgatcaatccggacgcggcacctgctgtaccacagccaatcggagcca

SEQ ID NO: 243 - DNA, 122 bp, Homo sapiens
  misc_feature (61)..(62): /note="This region represents a CpG dinucleotide"
  misc_feature (61)..(61): /note="Nucleotide may be methylated to form 5-methylcytosine"
ctcccacctcaggcaccggtgcaacgtttctgcagccaggccgcctgtcaccccactgtgcgcgccccagcggccccggcccagagcgctccacactcggagctagccagctgggacagagc

SEQ ID NO: 244 - DNA, 122 bp, Homo sapiens
  misc_feature (61)..(62): /note="This region represents a CpG dinucleotide"
  misc_feature (61)..(61): /note="Nucleotide may be methylated to form 5-methylcytosine"
cctcgcgctactcaatgacgaggcagcggggcaggtgctgcgagaaatacttgaagagctcgggggtggccccggggcagttggtcagctccagctcctccagctcctgcagctgcaccagg

SEQ ID NO: 245 - DNA, 122 bp, Homo sapiens
  misc_feature (61)..(62): /note="This region represents a CpG dinucleotide"
  misc_feature (61)..(61): /note="Nucleotide may be methylated to form 5-methylcytosine"
ctcacctcctaccttgcagcctccccctgagcacttcacccttaggctgtgaggtacacacgtactcaggaagctccatccaggcagacagcatgcacccctgaatggctagtgcagctctg

SEQ ID NO: 246 - DNA, 122 bp, Homo sapiens
  misc_feature (61)..(62): /note="This region represents a CpG dinucleotide"
  misc_feature (61)..(61): /note="Nucleotide may be methylated to form 5-methylcytosine"
cggcctggcggtttctcagctgtgcgcatgcaggatgagggcttggtcagcaggtggagccgtggacgcctttattgaacacaaactcttccttcctgacatcagatcagctgtaaaccttt

SEQ ID NO: 247 - DNA, 122 bp, Homo sapiens
  misc_feature (61)..(62): /note="This region represents a CpG dinucleotide"
  misc_feature (61)..(61): /note="Nucleotide may be methylated to form 5-methylcytosine"
actcaagaggtacgtggaagcaggacagcaggatcttgacagatggccctgggggggcggcgcatttgagtcagagacagcatcatgagtaagaggaacccagcctgacgtgggcaactcag

SEQ ID NO: 248 - DNA, 122 bp, Homo sapiens
  misc_feature (61)..(62): /note="This region represents a CpG dinucleotide"
  misc_feature (61)..(61): /note="Nucleotide may be methylated to form 5-methylcytosine"
cttactgatttattaccttcaaggggcttgacaatttgtaatttttctggcataaaacctcgaaggcaactggcactgctgaggtctgtgatctctgactgggtggtgcagagagaggcaag

SEQ ID NO: 249 - DNA, 122 bp, Homo sapiens
  misc_feature (61)..(62): /note="This region represents a CpG dinucleotide"
  misc_feature (61)..(61): /note="Nucleotide may be methylated to form 5-methylcytosine"
actgttgacagtccttctttcagcacttaagaaatgttgtgtcacttattgtggcctctgcggtttcagatgagaaatatgctattatttgagtttgtatttccctgtggtaaatgtgtcgt

SEQ ID NO: 250 - DNA, 122 bp, Homo sapiens
  misc_feature (61)..(62): /note="This region represents a CpG dinucleotide"
  misc_feature (61)..(61): /note="Nucleotide may be methylated to form 5-methylcytosine"
gacctagacctactgtatcagaatctctgtgctggtcctgagaatgtgcattctcaacagcgcctcacattccccaccccaattcttctgcagctaacgtttgagagcgctggtctggtgcc

SEQ ID NO: 251 - DNA, 122 bp, Homo sapiens
  misc_feature (61)..(62): /note="This region represents a CpG dinucleotide"
  misc_feature (61)..(61): /note="Nucleotide may be methylated to form 5-methylcytosine"
gatgtggtgttgggcaaggtgcctctctgctgatgaggcaatcacactgaaggtgctggccgctgaaggccacctaccaacagcactccttgcatctggggaaacaagtgcttcattgacag

SEQ ID NO: 252 - DNA, 122 bp, Homo sapiens
  misc_feature (61)..(62): /note="This region represents a CpG dinucleotide"
  misc_feature (61)..(61): /note="Nucleotide may be methylated to form 5-methylcytosine"
ctacactcagaaggtgaaacaggaaaatttttttctccgcacccacattccaatcattcacggaataggatcgactccataatgactgtgatgctggaaaaaatttactaaatatgtactta

SEQ ID NO: 253 - DNA, 122 bp, Homo sapiens
  misc_feature (61)..(62): /note="This region represents a CpG dinucleotide"
  misc_feature (61)..(61): /note="Nucleotide may be methylated to form 5-methylcytosine"
tcctgaggccagagacatctccacgggaaagtcaaaggcctggaggaagtgcggacctgacgacagatgccccgcacgctggccgggaccgggaagggcggtcaagggtggaaaggggctgg

SEQ ID NO: 254 - DNA, 122 bp, Homo sapiens
  misc_feature (61)..(62): /note="This region represents a CpG dinucleotide"
  misc_feature (61)..(61): /note="Nucleotide may be methylated to form 5-methylcytosine"
ccgttttttttttctgacttccagatgtgcaatatgatagttaattgctaacagaggctacggtatccgtttgcttcctccctgctaggagtagcgagaatattccatcatcacggtttgca

SEQ ID NO: 255 - DNA, 122 bp, Homo sapiens
  misc_feature (61)..(62): /note="This region represents a CpG dinucleotide"
  misc_feature (61)..(61): /note="Nucleotide may be methylated to form 5-methylcytosine"
cttcagcctcctcatatgtaaaatacataatgaggattaaatactgagagcatacagaaccgtgctggtccagagcaagtgctcaatcaacattagcaattgttatgttactgtgttgctct

SEQ ID NO: 256 - DNA, 122 bp, Homo sapiens
  misc_feature (61)..(62): /note="This region represents a CpG dinucleotide"
  misc_feature (61)..(61): /note="Nucleotide may be methylated to form 5-methylcytosine"
tcctagctggatgctgatgacccccaggacatgaggtcatttcctggagttgtagctgcccgttgaaatgagaactctggatttaactgctgaggcagcgatccctaaatcactaaagaatg

SEQ ID NO: 257 - DNA, 122 bp, Homo sapiens
  misc_feature (61)..(62): /note="This region represents a CpG dinucleotide"
  misc_feature (61)..(61): /note="Nucleotide may be methylated to form 5-methylcytosine"
tttggattttgggggaaaatgggaagctgtggaagctatagaaggggtctaagagggaagcgacataatcacattgcattgtacaaaggcctctctggctacagagggcgcagcagcttaga

SEQ ID NO: 258 - DNA, 122 bp, Homo sapiens
  misc_feature (61)..(62): /note="This region represents a CpG dinucleotide"
  misc_feature (61)..(61): /note="Nucleotide may be methylated to form 5-methylcytosine"
ccctccccgcccagccgaccctccccggcaggagcgcgggccgtgcagggtctcgggggtcgaaccgtcctggaggtcacacggccccagagttgcctgtcccaggggtcgcccagtccgga

SEQ ID NO: 259 - DNA, 122 bp, Homo sapiens
  misc_feature (61)..(62): /note="This region represents a CpG dinucleotide"
  misc_feature (61)..(61): /note="Nucleotide may be methylated to form 5-methylcytosine"
ttggtcatccccatgccaagttcacatcccatctggtggcatggagcctggtttgctgatcggcaagttcacagcatgagcctgtgctccccagagagaaatacaaaaccataattgtcccc

SEQ ID NO: 260 - DNA, 122 bp, Homo sapiens
  misc_feature (61)..(62): /note="This region represents a CpG dinucleotide"
  misc_feature (61)..(61): /note="Nucleotide may be methylated to form 5-methylcytosine"
tgctctgtagaatgggaatcatgcgtgtctgtttcctgctctgtagaatcagaatcacggcgtgtctgtttgctgctcttcagaatgggaatcacccatgtccgtttcctgctctgtagaat

SEQ ID NO: 261 - DNA, 122 bp, Homo sapiens
  misc_feature (61)..(62): /note="This region represents a CpG dinucleotide"
  misc_feature (61)..(61): /note="Nucleotide may be methylated to form 5-methylcytosine"
ccatgtgctcagcccctcagatagtggacgatcctggcaggtagggatgtttctgtgtgacgccccctgcaaggaatgctattccctgactgtcaagagagtagctggcagtattgtcatgt

SEQ ID NO: 262 - DNA, 122 bp, Homo sapiens
  misc_feature (61)..(62): /note="This region represents a CpG dinucleotide"
  misc_feature (61)..(61): /note="Nucleotide may be methylated to form 5-methylcytosine"
gggaaccccgtgtcaagccctccccaggccagtgatgagcccaaaagctcctctggaaaacgttgatctttgcacggcgcccatgcaggcttccaggccaccagggcatgggcaggactcag

SEQ ID NO: 263 - DNA, 122 bp, Homo sapiens
  misc_feature (61)..(62): /note="This region represents a CpG dinucleotide"
  misc_feature (61)..(61): /note="Nucleotide may be methylated to form 5-methylcytosine"
ccagttaaaaaacctggagcctggactaggcgttcctgggttaaaaggtttcggtctgtgcggggagtcatgtcgagtctgctcagtcccaggccagcattacctccctgcaggccagcgca

SEQ ID NO: 264 - DNA, 122 bp, Homo sapiens
  misc_feature (61)..(62): /note="This region represents a CpG dinucleotide"
  misc_feature (61)..(61): /note="Nucleotide may be methylated to form 5-methylcytosine"
cttttcccccagtctctatgggaggagtcttgaggctgagagcactcaccataaaagagtcgctggggttcctcagtcaccccacaaggcagcatgacaccttggctgggggaggctgggct

SEQ ID NO: 265 - DNA, 122 bp, Homo sapiens
  misc_feature (61)..(62): /note="This region represents a CpG dinucleotide"
  misc_feature (61)..(61): /note="Nucleotide may be methylated to form 5-methylcytosine"
gaaggtacgctcgcccccgcggactgcctggcccaccccacgcgccaggactgctggcggcgcctggccctgcatacccacagacggcccgcccccgctccctgtctggtggcttcctacct

SEQ ID NO: 266 - DNA, 122 bp, Homo sapiens
  misc_feature (61)..(62): /note="This region represents a CpG dinucleotide"
  misc_feature (61)..(61): /note="Nucleotide may be methylated to form 5-methylcytosine"
cacaggaacgcttctcatcagtggaagaaggacaagaaaggtcgtgcaagtttcaaattacgtggagctggggctacagccattactttcggacaggtgcaattcaaagcgtgatcctccga

SEQ ID NO: 267 - DNA, 122 bp, Homo sapiens
  misc_feature (61)..(62): /note="This region represents a CpG dinucleotide"
  misc_feature (61)..(61): /note="Nucleotide may be methylated to form 5-methylcytosine"
taggcggctggagaatcataacttcccaagaaaatatttagcatacatagcatacacagtcgtcgttgggttagcaactggctagattcgtgacatgttgttacaaaaaaatagttgtataa

SEQ ID NO: 268 - DNA, 122 bp, Homo sapiens
  misc_feature (61)..(62): /note="This region represents a CpG dinucleotide"
  misc_feature (61)..(61): /note="Nucleotide may be methylated to form 5-methylcytosine"
aggcactgtgggtgtatcgtttggggatgctaatagctccaagtcccccagtagagctcacgtgcaaagggtgtgactgatgtttcctttcaggtccagtctttttgagtacaatccactct

SEQ ID NO: 269 - DNA, 122 bp, Homo sapiens
  misc_feature (61)..(62): /note="This region represents a CpG dinucleotide"
  misc_feature (61)..(61): /note="Nucleotide may be methylated to form 5-methylcytosine"
aacaatatgataagctgggttccctctagtggacaaaatacttttgtcagctgctatgaccgctgaccaaagccagcaaggcgaggttgttactgctggtatcagaggtttcaagaataatg

SEQ ID NO: 270 - DNA, 122 bp, Homo sapiens
  misc_feature (61)..(62): /note="This region represents a CpG dinucleotide"
  misc_feature (61)..(61): /note="Nucleotide may be methylated to form 5-methylcytosine"
attgaagatcccatattgctactttaggacttttactgtgcccctggagccagcagaggccgctgtcaggcgggggctgctggattgaactgacatcactgctttgtttcgggtcaggagaa

SEQ ID NO: 271 - DNA, 122 bp, Homo sapiens
  misc_feature (61)..(62): /note="This region represents a CpG dinucleotide"
  misc_feature (61)..(61): /note="Nucleotide may be methylated to form 5-methylcytosine"
agggcccgtgaaaagaccagtactgacataaccccatgcaggatgtacagacacggagcccggcacgggacagcccccgagcttacttaaatgaaagagcatcaacacaatgttatagaaaa

SEQ ID NO: 272 - DNA, 122 bp, Homo sapiens
  misc_feature (61)..(62): /note="This region represents a CpG dinucleotide"
  misc_feature (61)..(61): /note="Nucleotide may be methylated to form 5-methylcytosine"
gcctggtcaagtggggacccccccatcctgacccctgacctctccccagccctaaccatgcgtttgcctggcctacacactccactgccacaactgggtccctactctacctaggctggcca

SEQ ID NO: 273 - DNA, 122 bp, Homo sapiens
  misc_feature (61)..(62): /note="This region represents a CpG dinucleotide"
  misc_feature (61)..(61): /note="Nucleotide may be methylated to form 5-methylcytosine"
tacctcggagtgtgctgcccagacggacttgtgaatagctgcgtctgtccccatagttaacgggagaaggaaacaccaggagaaaagaaggaaaagacaggaaacgggaagaggagcagagg

SEQ ID NO: 274 - DNA, 122 bp, Homo sapiens
  misc_feature (61)..(62): /note="This region represents a CpG dinucleotide"
  misc_feature (61)..(61): /note="Nucleotide may be methylated to form 5-methylcytosine"
catagccatagctcactagggcaaataaatctgcttttcagatgttgctgttaaagccaacgatgacaaaaatgcaagccagtatgtaaagtgagaagaatttagaaggcttccttaacctc

SEQ ID NO: 275 - DNA, 122 bp, Homo sapiens
  misc_feature (61)..(62): /note="This region represents a CpG dinucleotide"
  misc_feature (61)..(61): /note="Nucleotide may be methylated to form 5-methylcytosine"
ctgaacatccaactgccttggtgaggggagaggaagaaattttacaggctttttattggccggttatttttctgtgtgtcccatacaggcccccaccatgaagggtttcacagccactctct

SEQ ID NO: 276 - DNA, 122 bp, Homo sapiens
  misc_feature (61)..(62): /note="This region represents a CpG dinucleotide"
  misc_feature (61)..(61): /note="Nucleotide may be methylated to form 5-methylcytosine"
cgccattgcactccagcctgggcaacaagagtgaaactccgggctagatgaggtggctcacgcctgtaatcccagcactttgggaggccaaggtgggcaaatcatgaggtcaggaggtcgag

SEQ ID NO: 277 - DNA, 122 bp, Homo sapiens
  misc_feature (61)..(62): /note="This region represents a CpG dinucleotide"
  misc_feature (61)..(61): /note="Nucleotide may be methylated to form 5-methylcytosine"
gtagtggtgatctggcacgttgtaattgagactgaggaggtgaatgacttacatggaggtcgatggagctgaagagggtctctaggaaatgtcatagtcaagaggtttgtatgcagaatgtg

SEQ ID NO: 278 - DNA, 122 bp, Homo sapiens
  misc_feature (61)..(62): /note="This region represents a CpG dinucleotide"
  misc_feature (61)..(61): /note="Nucleotide may be methylated to form 5-methylcytosine"
tcagcctgggcgcactggtcatcgtgctggccagcgccctcctgctgctgggtgagtgagcgccccgcctccacctggaccctcggaccctcggaccctcctccccaggccgtcccctgcta

SEQ ID NO: 279 - DNA, 122 bp, Homo sapiens
  misc_feature (61)..(62): /note="This region represents a CpG dinucleotide"
  misc_feature (61)..(61): /note="Nucleotide may be methylated to form 5-methylcytosine"
aaagacatgtagctgaaatgccagtgcacatagctaatgtaaacaagttgaggggagcaacggaaacagtgctgtaaactggaaacatgccacgtgagtcatgctggaaggatgtgagggtg

SEQ ID NO: 280 - DNA, 122 bp, Homo sapiens
  misc_feature (61)..(62): /note="This region represents a CpG dinucleotide"
  misc_feature (61)..(61): /note="Nucleotide may be methylated to form 5-methylcytosine"
acctcagctgatccacccgccttggcctcccaaagtgctgggattacaggcgtgagccaccgagcctggccaaaccatcacttttcatgagcagggatgcacccactggcactcctgcacct

SEQ ID NO: 281 - DNA, 122 bp, Homo sapiens
  misc_feature (61)..(62): /note="This region represents a CpG dinucleotide"
  misc_feature (61)..(61): /note="Nucleotide may be methylated to form 5-methylcytosine"
ctcaagtgattctcctgccttgggttcccaaagcgttgggacggcagatgtcagccaccgcgcctggccttattcttataaactcaaaattatctgaattcaagcaaggtaatgtatttcac

SEQ ID NO: 282 - DNA, 122 bp, Homo sapiens
  misc_feature (61)..(62): /note="This region represents a CpG dinucleotide"
  misc_feature (61)..(61): /note="Nucleotide may be methylated to form 5-methylcytosine"
cttgctggttgccaggctcttatctcagccagtccagactccagcccaacccaggaaggacgcaaaccagaggagaagagaggaggaggaggagttagaggtggcccctctgattagggcag

SEQ ID NO: 283 - DNA, 122 bp, Homo sapiens
  misc_feature (61)..(62): /note="This region represents a CpG dinucleotide"
  misc_feature (61)..(61): /note="Nucleotide may be methylated to form 5-methylcytosine"
gcagacgcgggggcggggcacaggatggaatggtggcagtgcgaaaggcgcggcggggggcggtgctgcggtcagcaccgggtgcggggatgcgccacgtgggcctgcagggcctcccggat

SEQ ID NO: 284 - DNA, 122 bp, Homo sapiens
  misc_feature (61)..(62): /note="This region represents a CpG dinucleotide"
  misc_feature (61)..(61): /note="Nucleotide may be methylated to form 5-methylcytosine"
aggaagttgctgcggaggaaggactgtgagaacaaggatggatactctgacctatattcacggctggtttgacatctgtgtgctacaaaccaccaaccttctggccgagattggcggagaag

SEQ ID NO: 285 - DNA, 122 bp, Homo sapiens
  misc_feature (61)..(62): /note="This region represents a CpG dinucleotide"
  misc_feature (61)..(61): /note="Nucleotide may be methylated to form 5-methylcytosine"
aagttaacttcctctgtggcaaattaaggacagattacaagcagcctgggaaccgggctccgtcaccacagggggccgcctactcagcctccttctgttcagccatgggaaagatgcagctg

SEQ ID NO: 286 - DNA, 122 bp, Homo sapiens
  misc_feature (61)..(62): /note="This region represents a CpG dinucleotide"
  misc_feature (61)..(61): /note="Nucleotide may be methylated to form 5-methylcytosine"
agtgttcacagcacattcttcgtgacagctgagaacgggaacaagccccagctccgtgaacggaaccacagataaactaaatgtgatcgagccacaccatggagggttcctcggccataaag

SEQ ID NO: 287 - DNA, 122 bp, Homo sapiens
  misc_feature (61)..(62): /note="This region represents a CpG dinucleotide"
  misc_feature (61)..(61): /note="Nucleotide may be methylated to form 5-methylcytosine"
gcataaaatgacctgctgtgacagtcctgaggcaatatcataagaacaaactcacatgaacgtctgatatctagttatatgtggatttgggacttttaaaactttcgaatatgaaagataca

SEQ ID NO: 288 - DNA, 122 bp, Homo sapiens
  misc_feature (61)..(62): /note="This region represents a CpG dinucleotide"
  misc_feature (61)..(61): /note="Nucleotide may be methylated to form 5-methylcytosine"
actccagcctgacttcgtctcaaaaaaaaaaaaaaaaaaaaagttgctttctgaaaaatacgcacacccatgaccctgaaatttcacttactagctgtgtgacgttgggcaagttacttaac

SEQ ID NO: 289 - DNA, 122 bp, Homo sapiens
  misc_feature (61)..(62): /note="This region represents a CpG dinucleotide"
  misc_feature (61)..(61): /note="Nucleotide may be methylated to form 5-methylcytosine"
ggggacaggaaatttcccttgaagaagccttggcagagtaagcacactctttctcttcaacgttatgtttatgtgccagggggctactgcagatttagggacaaacaactcacccacccacc

SEQ ID NO: 290 - DNA, 122 bp, Homo sapiens
  misc_feature (61)..(62): /note="This region represents a CpG dinucleotide"
  misc_feature (61)..(61): /note="Nucleotide may be methylated to form 5-methylcytosine"
agacccttggcgatctgagaaagaaagactgagtccggatgtcaagaggcctgggcctcacgagggagtttgtctgcttatttgaacacctcagagttgaagatcttgttactgctatttct

SEQ ID NO: 291 - DNA, 122 bp, Homo sapiens
  misc_feature (61)..(62): /note="This region represents a CpG dinucleotide"
  misc_feature (61)..(61): /note="Nucleotide may be methylated to form 5-methylcytosine"
cccctacaccgcccactcccgggcatccccattggctgcgtgcttctccggctctcaattcgctgtacgtcatccgtgcatggctgcccattggccctctgcaatacttgtcttcatctcac

SEQ ID NO: 292 - DNA, 122 bp, Homo sapiens
  misc_feature (61)..(62): /note="This region represents a CpG dinucleotide"
  misc_feature (61)..(61): /note="Nucleotide may be methylated to form 5-methylcytosine"
gctcagtgcacagaagcattctgcttacccagctgggactgctgactgcaccatcgagcacgcaggttgcactgttctcagcagctacactggattatatgccgcctttcttactgactgat

SEQ ID NO: 293 - DNA, 122 bp, Homo sapiens
  misc_feature (61)..(62): /note="This region represents a CpG dinucleotide"
  misc_feature (61)..(61): /note="Nucleotide may be methylated to form 5-methylcytosine"
ttccatccatccatctatctatctgagactggggtctcgctatgctgcttggactgttctcgaactcctgggctcaggccatcctcctgggatctaccggcgcgcagagactacgggcgcgc

SEQ ID NO: 294 - DNA, 122 bp, Homo sapiens
  misc_feature (61)..(62): /note="This region represents a CpG dinucleotide"
  misc_feature (61)..(61): /note="Nucleotide may be methylated to form 5-methylcytosine"
aaaacaggagggtggtatgtgtgtctagcattctgccttttcagggggcttcctgagggacgagtttttgcctcatctgattcagagtcctaatgggaaaccaacataccttgtttgcttag

SEQ ID NO: 295 - DNA, 122 bp, Homo sapiens
  misc_feature (61)..(62): /note="This region represents a CpG dinucleotide"
  misc_feature (61)..(61): /note="Nucleotide may be methylated to form 5-methylcytosine"
cgcggccccgcgcccttacctggagcggcctgcagcaggcacaggagcagggggccccagcgctcgggccccgccatggccttcctgccgcggcgtccccgcccgggcccaggtccccgcct

SEQ ID NO: 296 - DNA, 122 bp, Homo sapiens
  misc_feature (61)..(62): /note="This region represents a CpG dinucleotide"
  misc_feature (61)..(61): /note="Nucleotide may be methylated to form 5-methylcytosine"
cgttcgcagccaaagccactagcctagatctcgcacagccaggcccgccataacgcatcccgggagcaaggggtaagaccctccctgggactgcggctacctcgccttccttctagtctccg

SEQ ID NO: 297 - DNA, 122 bp, Homo sapiens
  misc_feature (61)..(62): /note="This region represents a CpG dinucleotide"
  misc_feature (61)..(61): /note="Nucleotide may be methylated to form 5-methylcytosine"
tctcccagtgtaattaccatctcaagcattttctgttcgtcccctgtaggtacaccacatcgtgccaacaacccatggcccagcaggaatatacagtagcctttgccagggtccaccagggc

SEQ ID NO: 298 - DNA, 122 bp, Homo sapiens
  misc_feature (61)..(62): /note="This region represents a CpG dinucleotide"
  misc_feature (61)..(61): /note="Nucleotide may be methylated to form 5-methylcytosine"
gttgttgcatcaccagtgactcagaacagactgcctttgtgtgtgaccacaccagcaaaacgatggccatgccatgtctgtctcttcatataactccctttctctttatccatctgaattag

SEQ ID NO: 299 - DNA, 122 bp, Homo sapiens
  misc_feature (61)..(62): /note="This region represents a CpG dinucleotide"
  misc_feature (61)..(61): /note="Nucleotide may be methylated to form 5-methylcytosine"
aagaaagaaagaaaaaaaagaagcagaaaaaggaaggtatgcccttgagtaaaatgaacacgaagaaagctggacatgaactaaattgagctttgtttgctattaactatatgactatgatt

SEQ ID NO: 300 - DNA, 122 bp, Homo sapiens
  misc_feature (61)..(62): /note="This region represents a CpG dinucleotide"
  misc_feature (61)..(61): /note="Nucleotide may be methylated to form 5-methylcytosine"
cgcagggtcgcaggagcgagaccctaaccaaagtctgcgacctcaggtgcaggaggggtccgcgcgtcccccttcggccgtggcttgcgaggactgcagctgcagggacgagaaggtggcgc

SEQ ID NO: 301 - DNA, 122 bp, Homo sapiens
  misc_feature (61)..(62): /note="This region represents a CpG dinucleotide"
  misc_feature (61)..(61): /note="Nucleotide may be methylated to form 5-methylcytosine"
gccaggcctaaaattaaaatttcttgcatccctgagagtctggaagactgtttgcatgtccgagactgtttcctctctggagcaatcagagaggggacatccaaactaatagtccctggatg

SEQ ID NO: 302 - DNA, 122 bp, Homo sapiens
  misc_feature (61)..(62): /note="This region represents a CpG dinucleotide"
  misc_feature (61)..(61): /note="Nucleotide may be methylated to form 5-methylcytosine"
tagcgtttcggcctgtctcctagaaaacaggaagggagacctgtatctccttgcctgtgccggcatttccttggtgtgtattagaggggcgttttgtcacgagaaatggacagaagagagga

SEQ ID NO: 303 - DNA, 122 bp, Homo sapiens
  misc_feature (61)..(62): /note="This region represents a CpG dinucleotide"
  misc_feature (61)..(61): /note="Nucleotide may be methylated to form 5-methylcytosine"
atgtccattgaagaggtggagaggatcctggacgagacgcaggaggccgtggagtaccagcgggtaggtggcaccctgaccggcctgcccccaactgtgagaacccacaaggccaccctcga

SEQ ID NO: 304 - DNA, 122 bp, Homo sapiens
  misc_feature (61)..(62): /note="This region represents a CpG dinucleotide"
  misc_feature (61)..(61): /note="Nucleotide may be methylated to form 5-methylcytosine"
agctggggtggggctgggaacatctcctagctggacctgctgtccttcctctgagaaccacgttcacctctgtgtgcatctcccctaagctcctgagtcttttcttgaatacagctccaaga

SEQ ID NO: 305 - DNA, 122 bp, Homo sapiens
  misc_feature (61)..(62): /note="This region represents a CpG dinucleotide"
  misc_feature (61)..(61): /note="Nucleotide may be methylated to form 5-methylcytosine"
gcctttcagcagttccggcaggttgaatgtgaaagctaacatagccccttgcaaggctctcgtgactactaacagggaaaatacagaagtgagtctgctactgagtgggttctcagtctgta

SEQ ID NO: 306 - DNA, 122 bp, Homo sapiens
  misc_feature (61)..(62): /note="This region represents a CpG dinucleotide"
  misc_feature (61)..(61): /note="Nucleotide may be methylated to form 5-methylcytosine"
ctcggctgaggagctcagccacttcaccctgggctgatctccagacctgtctctcaccagcgtttagcctgagccctgatctgtgtggtcagcagcattcccagtgcccttgcagggtgtct

SEQ ID NO: 307 - DNA, 122 bp, Homo sapiens
  misc_feature (61)..(62): /note="This region represents a CpG dinucleotide"
  misc_feature (61)..(61): /note="Nucleotide may be methylated to form 5-methylcytosine"
agacatccttcttgcgcaagcgcagttgtaccatgaatgcggtcgtcctgctgcagaccacgcccaccaagggcggggccacatccactgcagctgagctcagagccttctgtggggtctgc

SEQ ID NO: 308 - DNA, 122 bp, Homo sapiens
  misc_feature (61)..(62): /note="This region represents a CpG dinucleotide"
  misc_feature (61)..(61): /note="Nucleotide may be methylated to form 5-methylcytosine"
tctctcctggccggtagggcttccactgtaaagtcggctgccagacgtgttggagctcaccggtatgttacttgtttcttttctctttcttcctttagaacttttcttatctttgacttttg

SEQ ID NO: 309 - DNA, 122 bp, Homo sapiens
  misc_feature (61)..(62): /note="This region represents a CpG dinucleotide"
  misc_feature (61)..(61): /note="Nucleotide may be methylated to form 5-methylcytosine"
tgggtgagcgccaggtctccccaccccaaggatagcgcgcacagggcgatctgctgctcgcgaggtagagagtggcttacttggggagaaaacattgaatctgtaaattaccttgggcagta

SEQ ID NO: 310 - DNA, 122 bp, Homo sapiens
  misc_feature (61)..(62): /note="This region represents a CpG dinucleotide"
  misc_feature (61)..(61): /note="Nucleotide may be methylated to form 5-methylcytosine"
gtgtctctaccattagactgcctggggtcataagcaagtctcccttattagaatgcctgacgtcatccaggtgtttctatcattagactgtctgggtacagcatgagtctctcccattagaa

SEQ ID NO: 311 - DNA, 122 bp, Homo sapiens
  misc_feature (61)..(62): /note="This region represents a CpG dinucleotide"
  misc_feature (61)..(61): /note="Nucleotide may be methylated to form 5-methylcytosine"
gggtgggcaagtagtgtttcgtggcttaacgtaaggggcaaaagggttgtgggggctttacgcagctggtaacccagaggaggcaaatggcaccatcaccgccattcccttccaggcagtcg

SEQ ID NO: 312 - DNA, 122 bp, Homo sapiens
  misc_feature (61)..(62): /note="This region represents a CpG dinucleotide"
  misc_feature (61)..(61): /note="Nucleotide may be methylated to form 5-methylcytosine"
ggaggaaaataagaagagtaactccattcaaacactgtcagccagggcaggtcaggaggtcgtggaaacaaaggacccaccattgtcagatccctttcccttccttctttctttccacgtct

SEQ ID NO: 313 - DNA, 122 bp, Homo sapiens
  misc_feature (61)..(62): /note="This region represents a CpG dinucleotide"
  misc_feature (61)..(61): /note="Nucleotide may be methylated to form 5-methylcytosine"
cacctccaaatccctgcccctcctattgcttaatgcctctctatctcctcctatcccctccggactattttgtgtggtgtgggttttctcgtggggccacacctttctagagtggtggttga

SEQ ID NO: 314 - DNA, 122 bp, Homo sapiens
  misc_feature (61)..(62): /note="This region represents a CpG dinucleotide"
  misc_feature (61)..(61): /note="Nucleotide may be methylated to form 5-methylcytosine"
tctgctacgtactcaccctgtaatgtcgcgggaaatgcataaaagtgaaaagaactcctacgccaaagttccaggtgtggaaaagttattctgagcaaggagctagtcaacagaaaggatgt

SEQ ID NO: 315 - DNA, 122 bp, Homo sapiens
  misc_feature (61)..(62): /note="This region represents a CpG dinucleotide"
  misc_feature (61)..(61): /note="Nucleotide may be methylated to form 5-methylcytosine"
gccacatcctgcttgcagatctgctgctgggttaacacaacatcatctgccagttggtgtcgtttatttgacatcttggggttttagtactctgaaggacacccactgcccttaacagaaaa

SEQ ID NO: 316 - DNA, 122 bp, Homo sapiens
  misc_feature (61)..(62): /note="This region represents a CpG dinucleotide"
  misc_feature (61)..(61): /note="Nucleotide may be methylated to form 5-methylcytosine"
tgtccctgcgcgtgacacaaatttggccccgagggagctccgtgtgctcagcctcagagccgtaggcgagagcgcctgtctgcatgagtgagcatatgggtgtttttgagtctgtgggtgtc

SEQ ID NO: 317 - DNA, 122 bp, Homo sapiens
  misc_feature (61)..(62): /note="This region represents a CpG dinucleotide"
  misc_feature (61)..(61): /note="Nucleotide may be methylated to form 5-methylcytosine"
caaaggggtataaatgagcactatagcttagtttgatactttttctgctcctcctccatccgtggctcatagctcaaaacaccaatctagttgatttggttacacagctgacagtggcaatt

SEQ ID NO: 318 - DNA, 122 bp, Homo sapiens
  misc_feature (61)..(62): /note="This region represents a CpG dinucleotide"
  misc_feature (61)..(61): /note="Nucleotide may be methylated to form 5-methylcytosine"
agtatgtcgcttgagtcgtatacaaaatattaaaaatcacttcatttcccaaatcctcatcgaatgttcctcgccagccgagtggtcctccagagcaaaggccagccttccttccagctgtc

SEQ ID NO: 319 - DNA, 122 bp, Homo sapiens
  misc_feature (61)..(62): /note="This region represents a CpG dinucleotide"
  misc_feature (61)..(61): /note="Nucleotide may be methylated to form 5-methylcytosine"
ctggaaggggcggcaagagtcagagacagacagtcaagcatcttggctctgctaccacttcgtgatggggaggccaagttatgcgatgcattccagctcaatcaatttctggagatgggccc

SEQ ID NO: 320 - DNA, 122 bp, Homo sapiens
  misc_feature (61)..(62): /note="This region represents a CpG dinucleotide"
  misc_feature (61)..(61): /note="Nucleotide may be methylated to form 5-methylcytosine"
tgcagcataacatatggcttcctgaacttgcaagtatggcttaatgttctctgttgaaatcgtgtctgtttaaacagtctcttggaaaagtgagccatattcaataaaatcattaatttcat

SEQ ID NO: 321 - DNA, 122 bp, Homo sapiens
  misc_feature (61)..(62): /note="This region represents a CpG dinucleotide"
  misc_feature (61)..(61): /note="Nucleotide may be methylated to form 5-methylcytosine"
gtcccttgcaggcgctccacccgccctcgggtcaggagccagggctgcgcccacactcaccgcgttccgcacccccagctcggccccatagagcagcagtagcttcatggctttgtagctgc

SEQ ID NO: 322 - DNA, 122 bp, Homo sapiens
  misc_feature (61)..(62): /note="This region represents a CpG dinucleotide"
  misc_feature (61)..(61): /note="Nucleotide may be methylated to form 5-methylcytosine"
cactgggtgagaacatggaagtcagagcaagtaacagtgctgctttttgtggggggggggcgacctggaacattccacctggctttttcgatgacttgtgcttttagtcatgcctacttcta

SEQ ID NO: 323 - DNA, 122 bp, Homo sapiens
  misc_feature (61)..(62): /note="This region represents a CpG dinucleotide"
  misc_feature (61)..(61): /note="Nucleotide may be methylated to form 5-methylcytosine"
aatacaggattatggctttgtcaagatacccaattgtgaaatctgagcatcaccttcttccgtcaccagagggcgagatcgcaccagccatcacattgaccgttaacatttcgggcaagctg

SEQ ID NO: 324 - DNA, 122 bp, Homo sapiens
  misc_feature (61)..(62): /note="This region represents a CpG dinucleotide"
  misc_feature (61)..(61): /note="Nucleotide may be methylated to form 5-methylcytosine"
actacactccaaagtgggcaacagagcgaaaccctattcaaaaaaaaaaaggaaaagaaacgagaaaattggagcaaatgatctctgagccttgaagattcttacagggtggacaagaaaac

SEQ ID NO: 325 - DNA, 122 bp, Homo sapiens
  misc_feature (61)..(62): /note="This region represents a CpG dinucleotide"
  misc_feature (61)..(61): /note="Nucleotide may be methylated to form 5-methylcytosine"
aaattgagataggagcggaggcggagcgcggccgtgcagggaggggcagggcggtgtaggcggcttcatttaccaagctttgctggccattgtttccatgccaaacccttgccaaggggatt

SEQ ID NO: 326 - DNA, 122 bp, Homo sapiens
  misc_feature (61)..(62): /note="This region represents a CpG dinucleotide"
  misc_feature (61)..(61): /note="Nucleotide may be methylated to form 5-methylcytosine"
tgcccttataaatggggttttacctgccctcagttctgcactcatggccctttaaaaaggcgagtgtagaaggagaatttattggtgtcagccctggagatttttaatctaaccaagtccac

SEQ ID NO: 327 - DNA, 122 bp, Homo sapiens
  misc_feature (61)..(62): /note="This region represents a CpG dinucleotide"
  misc_feature (61)..(61): /note="Nucleotide may be methylated to form 5-methylcytosine"
aatttattgagttttgattatagaataaataggagaacatggcttgtgaatatgctcaagcggttttagtagtttatcaccatgaccagtagatggtattgttggcccaagatagtttggtt

SEQ ID NO: 328 - DNA, 122 bp, Homo sapiens
  misc_feature (61)..(62): /note="This region represents a CpG dinucleotide"
  misc_feature (61)..(61): /note="Nucleotide may be methylated to form 5-methylcytosine"
aataccggagacacagggacaaacgcaatggtggctgcccagggaactggatggggggggcggtatgccacaggataccttgatgccagcctcactcaagggcccaggcctgggggcccatc

SEQ ID NO: 329 - DNA, 122 bp, Homo sapiens
  misc_feature (61)..(62): /note="This region represents a CpG dinucleotide"
  misc_feature (61)..(61): /note="Nucleotide may be methylated to form 5-methylcytosine"
cgtagtcgtgcccagaacgccggcgtggcccagactccattttggaacttcgcaggctggcgtggacgaagtaaacacatttatggaaaaaccccggggttaggaggtttgcggaaagaggg

SEQ ID NO: 330 - DNA, 122 bp, Homo sapiens
  misc_feature (61)..(62): /note="This region represents a CpG dinucleotide"
  misc_feature (61)..(61): /note="Nucleotide may be methylated to form 5-methylcytosine"
ggcgggactgggagttttcctgggcgacgtcttctgcatctcgcttgcttcctggccttgcggcagggggcgcgcgtggcaccagtgtgagcctccacccccctctgcctgctccagggtcc

SEQ ID NO: 331 - DNA, 122 bp, Homo sapiens
  misc_feature (61)..(62): /note="This region represents a CpG dinucleotide"
  misc_feature (61)..(61): /note="Nucleotide may be methylated to form 5-methylcytosine"
tcctcgtctgtagaatgagagcattagaccactagataaagcctaatggctcttgtagcccgttaggaatttattgataatcacttcctgaccatcatgctatccactcacattctaaatga

SEQ ID NO: 332 - DNA, 122 bp, Homo sapiens
  misc_feature (61)..(62): /note="This region represents a CpG dinucleotide"
  misc_feature (61)..(61): /note="Nucleotide may be methylated to form 5-methylcytosine"
aacattaagggctgagtaaaatttcctgcccagacttggacagtacttgaaacttgtatacgaaaagaacagatataaagaggggagaaagaatttgggctgaaattcaatctatcacactt

SEQ ID NO: 333 - DNA, 122 bp, Homo sapiens
  misc_feature (61)..(62): /note="This region represents a CpG dinucleotide"
  misc_feature (61)..(61): /note="Nucleotide may be methylated to form 5-methylcytosine"
cttcccgattcctcattaggctgagggaacccacatcaaaaatatcctggaagatgctttcgtctttttctcacacatcataacaaaaatactttactgtctcaatttgaaagcaagagagg

SEQ ID NO: 334 - DNA, 122 bp, Homo sapiens
  misc_feature (61)..(62): /note="This region represents a CpG dinucleotide"
  misc_feature (61)..(61): /note="Nucleotide may be methylated to form 5-methylcytosine"
gtgctgtagagtcacgatgttgaactcacaaatactctggtggattttccactacactaacggtttcatggctatgagcactggtcacacagtgctttaggctgacgaaaactctcacacca

SEQ ID NO: 335 - DNA, 122 bp, Homo sapiens
  misc_feature (61)..(62): /note="This region represents a CpG dinucleotide"
  misc_feature (61)..(61): /note="Nucleotide may be methylated to form 5-methylcytosine"
gagtcagcctctgccctgaccccaagcctgctgggcaggtctacgccaagtccaaccaggcgtggaaggagagaccccacagcactatgtctgggcctctacatgatctcgtggctcctgca

SEQ ID NO: 336 - DNA, 122 bp, Homo sapiens
  misc_feature (61)..(62): /note="This region represents a CpG dinucleotide"
  misc_feature (61)..(61): /note="Nucleotide may be methylated to form 5-methylcytosine"
cggaggccagcccctcccggaggctcgggaggagggttttggggaggagcgccatgcagacgcagccaggactgagaacggcttccgggccttcattcccaccagcatcgccttctctccac

SEQ ID NO: 337 - DNA, 122 bp, Homo sapiens
  misc_feature (61)..(62): /note="This region represents a CpG dinucleotide"
  misc_feature (61)..(61): /note="Nucleotide may be methylated to form 5-methylcytosine"
cctgagctaggagatgcaggggcggggagtggggcacagcgctgccagcagaggctgagacgcacctgagaggggaggaagcttccgctcttctggcctcccggatccgccagggctcctgc

SEQ ID NO: 338 - DNA, 122 bp, Homo sapiens
  misc_feature (61)..(62): /note="This region represents a CpG dinucleotide"
  misc_feature (61)..(61): /note="Nucleotide may be methylated to form 5-methylcytosine"
gcttgctgcacagcctgcgtggtcctcgggaacactaagctcatggtgtacaaaagtgagcgcacctgccctccgtccccagctgccgctcccccagaggccccgtctccggtggggccgtc

SEQ ID NO: 339 - DNA, 122 bp, Homo sapiens
  misc_feature (61)..(62): /note="This region represents a CpG dinucleotide"
  misc_feature (61)..(61): /note="Nucleotide may be methylated to form 5-methylcytosine"
gtcagggctgcaggcggctgtgacactccggaggcctcgacagaggggtcccaggcgcagcgtacccgggctcctcttgcctcagcggagcgtcccacggcagtcccggacccgcgcctctc

SEQ ID NO: 340 - DNA, 122 bp, Homo sapiens
  misc_feature (61)..(62): /note="This region represents a CpG dinucleotide"
  misc_feature (61)..(61): /note="Nucleotide may be methylated to form 5-methylcytosine"
gaggtcctgagagactgtgagagccccaactccattagtattatgggcctcaatacttcccgggttgcaattaccctgaagccccaagaccctatggaacagaacgtagctgagctgttgca

SEQ ID NO: 341 - DNA, 122 bp, Homo sapiens
  misc_feature (61)..(62): /note="This region represents a CpG dinucleotide"
  misc_feature (61)..(61): /note="Nucleotide may be methylated to form 5-methylcytosine"
tcctagctctgccctctatggtcctaaggcaaggatcacaaaccccaatgcttttaggggcgctacaggtaacataaatggcagggtacagatgggtaaactgaagagccattcataaatta

SEQ ID NO: 342 - DNA, 122 bp, Homo sapiens
  misc_feature (61)..(62): /note="This region represents a CpG dinucleotide"
  misc_feature (61)..(61): /note="Nucleotide may be methylated to form 5-methylcytosine"
actgagctggtcgaaaataatctgcacccagtgagcacagcaaattagcacaccctcaatcgttggcatcaggggacatttaagctccacttgcctgtgacacggcagtgtgctgagccccg

SEQ ID NO: 343 - DNA, 122 bp, Homo sapiens
  misc_feature (61)..(62): /note="This region represents a CpG dinucleotide"
  misc_feature (61)..(61): /note="Nucleotide may be methylated to form 5-methylcytosine"
ccccggggggttggatctgagaccatcagcatccagcagccgtgagtgtgatggatgaaccgaggccagtcacctagtggggaaacgacatctcacatttaaagaacaccaggcgtttctac

SEQ ID NO: 344 - DNA, 122 bp, Homo sapiens
  misc_feature (61)..(62): /note="This region represents a CpG dinucleotide"
  misc_feature (61)..(61): /note="Nucleotide may be methylated to form 5-methylcytosine"
cgccctagagggtgtggtgtttctgtggggctggctgatcccaggtcagtggctgcattccgccccggccatgtgacccctagtctctttcgtccagttgggccgattctgcaggcaaagcc

SEQ ID NO: 345 - DNA, 122 bp, Homo sapiens
  misc_feature (61)..(62): /note="This region represents a CpG dinucleotide"
  misc_feature (61)..(61): /note="Nucleotide may be methylated to form 5-methylcytosine"
gcctttgccagaaagcttctagttacaactactggcagggaccttatgcttcagaggtctcgaaaatattcctcctgacctcagtgtccagccccagcacagatttagcttcttggatgttc

SEQ ID NO: 346 - DNA, 122 bp, Homo sapiens
  misc_feature (61)..(62): /note="This region represents a CpG dinucleotide"
  misc_feature (61)..(61): /note="Nucleotide may be methylated to form 5-methylcytosine"
catcgatcccacgtgcagctggcggccggtgcccatcaagtcggacttacacatcaaggacgaccctgatggcatcccctccaagcggttcaagaccatgagtcccagccagatgatcatgc

SEQ ID NO: 347 - DNA, 122 bp, Homo sapiens
  misc_feature (61)..(62): /note="This region represents a CpG dinucleotide"
  misc_feature (61)..(61): /note="Nucleotide may be methylated to form 5-methylcytosine"
ccccggccaccctccgactcacagggacaccccgcccccgctcccactgcccccgagccgcgcgggaccctggtcctagcccaaacctcctcagctcgcctgcttgtcacactcgggctgaa

SEQ ID NO: 348 - DNA, 122 bp, Homo sapiens
  misc_feature (61)..(62): /note="This region represents a CpG dinucleotide"
  misc_feature (61)..(61): /note="Nucleotide may be methylated to form 5-methylcytosine"
agcatcggtgcacaagtgcatgagctgagcaacacatacccagcacagccagagggtcagcggcccccgcggacggcttggttcctgtttagccgttgagttggaggaaacattcctcggcg

SEQ ID NO: 349 - DNA, 122 bp, Homo sapiens
  misc_feature (61)..(62): /note="This region represents a CpG dinucleotide"
  misc_feature (61)..(61): /note="Nucleotide may be methylated to form 5-methylcytosine"
gcagtctgatggcttctgtgcatttggccaattacacagtgaattaccccagtgagtattcgtcaaatgcaccatccgctctcactcctcaactcccttgttagaattcttgttaatttgac

SEQ ID NO: 350 - DNA, 122 bp, Homo sapiens
  misc_feature (61)..(62): /note="This region represents a CpG dinucleotide"
  misc_feature (61)..(61): /note="Nucleotide may be methylated to form 5-methylcytosine"
ctcgccgcacggtgaggaccctggccccgccctaacctctaagaatcattttcttggccacgcacctctgcgtgcctcgctcctcctgcagactccgcccctagaatgaccctgcctctgca

SEQ ID NO: 351 - DNA, 122 bp, Homo sapiens
  misc_feature (61)..(62): /note="This region represents a CpG dinucleotide"
  misc_feature (61)..(61): /note="Nucleotide may be methylated to form 5-methylcytosine"
gcaaggcaaatggctcattaatgtagtggggagccagattgaacatttggaaaacacccacgtatttaaaggggccaaaatgagctttctgctcaagctgccagctggtttgcctgtaacat

SEQ ID NO: 352 - DNA, 122 bp, Homo sapiens
  misc_feature (61)..(62): /note="This region represents a CpG dinucleotide"
  misc_feature (61)..(61): /note="Nucleotide may be methylated to form 5-methylcytosine"
gttttgactctggagctgcattcttcattcttatcctacacttgcttgtgaattctttttcgtccttccagaatccctgaagctgtacagctatactttaccggttacgtctagactataaa

SEQ ID NO: 353 - DNA, 122 bp, Homo sapiens
  misc_feature (61)..(62): /note="This region represents a CpG dinucleotide"
  misc_feature (61)..(61): /note="Nucleotide may be methylated to form 5-methylcytosine"
aagtaagagaattccaggcttcctacacaggcccagtaggtattttttatcttaataactcgttggtaaatggcctactatgtccataggaaaagcatcctcttcttcaactgtgttttaaa

SEQ ID NO: 354 - DNA, 122 bp, Homo sapiens
  misc_feature (61)..(62): /note="This region represents a CpG dinucleotide"
  misc_feature (61)..(61): /note="Nucleotide may be methylated to form 5-methylcytosine"
cactcacggtcattcgtcctcagtcacttgaccctctaggccccaccttccaagcccacacgccctaagagtctcccatggcagaacgggtaggggaagggatgcagagagggaagaaaagc

SEQ ID NO: 355 - DNA, 122 bp, Homo sapiens
  misc_feature (61)..(62): /note="This region represents a CpG dinucleotide"
  misc_feature (61)..(61): /note="Nucleotide may be methylated to form 5-methylcytosine"
aatgccctaaaagacatcgaaagtcctgcggggggatttccagaagcacttctaggtgttcgacgtaaaaaccacccagggcgaagaagaatcaaggctttttccatacacttcttagaaag

SEQ ID NO: 356 - DNA, 122 bp, Homo sapiens
  misc_feature (61)..(62): /note="This region represents a CpG dinucleotide"
  misc_feature (61)..(61): /note="Nucleotide may be methylated to form 5-methylcytosine"
acagtctgtctttccttctccagttttcaatgagtcccagcccccagccccgcctcttggcgtataataaacaggagtgcaggggggagtactatcgtctgccctcattctttgatatcttt

SEQ ID NO: 357 - DNA, 122 bp, Homo sapiens
  misc_feature (61)..(62): /note="This region represents a CpG dinucleotide"
  misc_feature (61)..(61): /note="Nucleotide may be methylated to form 5-methylcytosine"
ttggcagaaaacttgcagaggaaggaaagaaagatttatgactagtgtttatctactgtccgcgaagtgccaggaaagccccctgctgggtaacttacatatgtttaactcattccagcttc

SEQ ID NO: 358 - DNA, 122 bp, Homo sapiens
  misc_feature (61)..(62): /note="This region represents a CpG dinucleotide"
  misc_feature (61)..(61): /note="Nucleotide may be methylated to form 5-methylcytosine"
cttgattttagacagataagacagcagacagcaggtggtgccaaactgcagctagggcatcgtgatttaaagcgtgcggtccacgtctggactctgtggtctggctgcacagacttcccttg

SEQ ID NO: 359 - DNA, 122 bp, Homo sapiens
  misc_feature (61)..(62): /note="This region represents a CpG dinucleotide"
  misc_feature (61)..(61): /note="Nucleotide may be methylated to form 5-methylcytosine"
ccagcatgagctacatgaaagagaccaccgccaaggagtgactcaaacaagaagccagggcgccccgtggccacatcctcactgcagaggcatctgtgagagcagagcctggggctgctccc

SEQ ID NO: 360 - DNA, 122 bp, Homo sapiens
  misc_feature (61)..(62): /note="This region represents a CpG dinucleotide"
  misc_feature (61)..(61): /note="Nucleotide may be methylated to form 5-methylcytosine"
aaaaagcttctgtgcatgtatgtgtgggggtgggaggaagaacagaaaagggaacagtgccgccctagcaaatcaaaagtttaagatgcatggactgagatgacatcattggcggattatca

SEQ ID NO: 361 - DNA, 122 bp, Homo sapiens
  misc_feature (61)..(62): /note="This region represents a CpG dinucleotide"
  misc_feature (61)..(61): /note="Nucleotide may be methylated to form 5-methylcytosine"
ccacttttgcctcatcacgcaggcgctggtaggcggcatcactgggcgggtcagaaaccacgcgcatgcgcagacaccctcaggcgactggcgggtcgcggcttccaagctctaaatggaga

SEQ ID NO: 362 - DNA, 122 bp, Homo sapiens
  misc_feature (61)..(62): /note="This region represents a CpG dinucleotide"
  misc_feature (61)..(61): /note="Nucleotide may be methylated to form 5-methylcytosine"
cttctcgacctttgccccggctaagggctgccctgaaccaggaaaaggggcacagggtcgcgagaccccactgagaagtcctctgtccacatagccaggggaacatgttccccaagacctgt

SEQ ID NO: 363 - DNA, 122 bp, Homo sapiens
  misc_feature (61)..(62): /note="This region represents a CpG dinucleotide"
  misc_feature (61)..(61): /note="Nucleotide may be methylated to form 5-methylcytosine"
ttttatttttttctccctttcttttctgtcttctgactctatgtctttttcttaattttccgtttccctatcttttccctgcttcccagtggcatccatgaatgctgttaaattaactgcca

SEQ ID NO: 364 - DNA, 122 bp, Homo sapiens
  misc_feature (61)..(62): /note="This region represents a CpG dinucleotide"
  misc_feature (61)..(61): /note="Nucleotide may be methylated to form 5-methylcytosine"
cactgcactccagcctgggtgacagagtgagactccgtgtaaaaaaaaaaaaaagaaaaacggaaaaacaaatactataatggtatcccccaagccagacaggcgggtcttgcagacggagg

SEQ ID NO: 365 - DNA, 122 bp, Homo sapiens
  misc_feature (61)..(62): /note="This region represents a CpG dinucleotide"
  misc_feature (61)..(61): /note="Nucleotide may be methylated to form 5-methylcytosine"
tgaggcggggcgcctgccaccattcgtgattttccgtgactcaccctctcaacagtgtcccgtcagcccccgctttctggaattaagatgattttccatgggcattatagtcagaggaggtt

SEQ ID NO: 366 - DNA, 122 bp, Homo sapiens
  misc_feature (61)..(62): /note="This region represents a CpG dinucleotide"
  misc_feature (61)..(61): /note="Nucleotide may be methylated to form 5-methylcytosine"
agctgagggaactgcatggtatgacatggccatgcaggtcccaccttagggtaccagtgacgtttttccacagaatgtagggggtggcagggtgatagtgctgtgtggaaaacagctatcat

SEQ ID NO: 367 - DNA, 122 bp, Homo sapiens
  misc_feature (61)..(62): /note="This region represents a CpG dinucleotide"
  misc_feature (61)..(61): /note="Nucleotide may be methylated to form 5-methylcytosine"
accgcagactcccggctgagtaccgcccggctgcaggcactgctgttcggcgacgaccaccgctgcttcacacggatgaccccggccctgctcctgctgccgcggtccgagcccgcgccgct

SEQ ID NO: 368 - DNA, 122 bp, Homo sapiens
  misc_feature (61)..(62): /note="This region represents a CpG dinucleotide"
  misc_feature (61)..(61): /note="Nucleotide may be methylated to form 5-methylcytosine"
gagtagctggattacagctgtgagcctctgcgcccggccaagacagcacctcttaaactccggcctggagaggcagtggccctgggcacctccccgctgcacacaagccccatccactcatg

SEQ ID NO: 369 - DNA, 122 bp, Homo sapiens
  misc_feature (61)..(62): /note="This region represents a CpG dinucleotide"
  misc_feature (61)..(61): /note="Nucleotide may be methylated to form 5-methylcytosine"
caatttgtaaaagtgctaggtgttataatttggctctaatatttcaaatatattgagtaacgaacaaatgtaacaaagtagatggaaaatatttatgttagagaggctgacttagcactaaa

SEQ ID NO: 370 - DNA, 122 bp, Homo sapiens
  misc_feature (61)..(62): /note="This region represents a CpG dinucleotide"
  misc_feature (61)..(61): /note="Nucleotide may be methylated to form 5-methylcytosine"
tgagcacttggtgccacacactgtttgggaacaggaaatctgcaataatgttctccctaccgtcaagtaggaaaacagcaatacggtgaacaataggtgttccatcagttatgtgaccttgg

SEQ ID NO: 371 - DNA, 122 bp, Homo sapiens
  misc_feature (61)..(62): /note="This region represents a CpG dinucleotide"
  misc_feature (61)..(61): /note="Nucleotide may be methylated to form 5-methylcytosine"
accctttacctggcattttagccagcaagacccgcttgcattgcagtcgttcacggtgctcgctggcacaattttagaatgttacatgaatactcaggcctgactaaccttcccctccaaaa

SEQ ID NO: 372 - DNA, 122 bp, Homo sapiens
  misc_feature (61)..(62): /note="This region represents a CpG dinucleotide"
  misc_feature (61)..(61): /note="Nucleotide may be methylated to form 5-methylcytosine"
ttagtgtggagtttggaactgaagaagcatttaataattaacattttaaagtgtagactacggtatatcagacctttctggaacactccctagacactgaaatgcggcaaagacactgcatt

SEQ ID NO: 373 - DNA, 122 bp, Homo sapiens
  misc_feature (61)..(62): /note="This region represents a CpG dinucleotide"
  misc_feature (61)..(61): /note="Nucleotide may be methylated to form 5-methylcytosine"
gtgattacttgcacgtatttgttcattcaccatcatgtggcacataaatgtagttaatttcgtggtaaaccagccactttgatttgtccacttactagctatgttacttggaaaaattcacc

SEQ ID NO: 374 - DNA, 122 bp, Homo sapiens
  misc_feature (61)..(62): /note="This region represents a CpG dinucleotide"
  misc_feature (61)..(61): /note="Nucleotide may be methylated to form 5-methylcytosine"
attttgaaatcaaatgactgtgtgagcttggggaagttagttaatatctctgatcttcagcgtcatgtgtaaaatgtgggcgatcataccagctgtatagcattataatgaagattaaatga

SEQ ID NO: 375 - DNA, 122 bp, Homo sapiens
  misc_feature (61)..(62): /note="This region represents a CpG dinucleotide"
  misc_feature (61)..(61): /note="Nucleotide may be methylated to form 5-methylcytosine"
ttcagagacactgttctgatcttgagtggcaaaatttcagcaatctgcatgtcatgaattcgtgtcctgtggtcttatgtcatccgtccttggctaaaaggggaaaccaagaggaagggatc

SEQ ID NO: 376 - DNA, 122 bp, Homo sapiens
  misc_feature (61)..(62): /note="This region represents a CpG dinucleotide"
  misc_feature (61)..(61): /note="Nucleotide may be methylated to form 5-methylcytosine"
tgaccacgaatactctgccaactgcctcctgagtgaccgagacagctcagtctagagtctcgactacccggggtgacccaatagtcccgactccccgagacagggacccggagacgtgggct

SEQ ID NO: 377 - DNA, 122 bp, Homo sapiens
  misc_feature (61)..(62): /note="This region represents a CpG dinucleotide"
  misc_feature (61)..(61): /note="Nucleotide may be methylated to form 5-methylcytosine"
cttatccaaaaatatcacctttataatacagagctctgctctggctctctatacaaagaacgcccagaataaatatgatgataacaggaaaacaaagaccaaacattttgaaggcataatgt

SEQ ID NO: 378 - DNA, 122 bp, Homo sapiens
  misc_feature (61)..(62): /note="This region represents a CpG dinucleotide"
  misc_feature (61)..(61): /note="Nucleotide may be methylated to form 5-methylcytosine"
ttccctccagcctggcctagggacgactcttcttcagtgccgccttctccaccgagtcctcgcatattaagattccagaaggttctgatctcctggtgcttcagtgtaaacgagtgtgtttg

SEQ ID NO: 379 - DNA, 122 bp, Homo sapiens
  misc_feature (61)..(62): /note="This region represents a CpG dinucleotide"
  misc_feature (61)..(61): /note="Nucleotide may be methylated to form 5-methylcytosine"
tggaattctagacggtgtttaaccttgagagcagtttgtttttcccttgagaaaggctgacgagtacacagatcaatggtttacaagggaaatcacctgataaaggggagagttcttacccc

SEQ ID NO: 380 - DNA, 122 bp, Homo sapiens
  misc_feature (61)..(62): /note="This region represents a CpG dinucleotide"
  misc_feature (61)..(61): /note="Nucleotide may be methylated to form 5-methylcytosine"
gtcagtttaacagattctgcctccgggaaccaactgccgggagattctgattggctcagccgcgtgcccacgtgaccgaccaaaaccggccaccagggtctcccaactgcctgtcaaacgca

SEQ ID NO: 381 - DNA, 122 bp, Homo sapiens
  misc_feature (61)..(62): /note="This region represents a CpG dinucleotide"
  misc_feature (61)..(61): /note="Nucleotide may be methylated to form 5-methylcytosine"
gtgggtcctacggctgcctcatgtcgggctgtctcgttttcactcaactgggtgtggttacgacatggaagtgatgaccagaagctcccaccagagtgaggggtccaccctcttgatcccct

SEQ ID NO: 382 - DNA, 122 bp, Homo sapiens
  misc_feature (61)..(62): /note="This region represents a CpG dinucleotide"
  misc_feature (61)..(61): /note="Nucleotide may be methylated to form 5-methylcytosine"
aaaaaggaagcaaagggatagttacaactccttctactcttctcccccagaaaaacctttcgaggcctcaccaatagatggcttgctttctcctccaatcaccagcagacagaggggccctg

SEQ ID NO: 383 - DNA, 122 bp, Homo sapiens
  misc_feature (61)..(62): /note="This region represents a CpG dinucleotide"
  misc_feature (61)..(61): /note="Nucleotide may be methylated to form 5-methylcytosine"
gttaggcgcggcggcttgccctgtgtctctgagcccgggacatccatttgtagtggcttccgaccccggtagcggtgctggagatggcagagctcgggatagccatctcagatgaagcaggg

SEQ ID NO: 384 - DNA, 122 bp, Homo sapiens
  misc_feature (61)..(62): /note="This region represents a CpG dinucleotide"
  misc_feature (61)..(61): /note="Nucleotide may be methylated to form 5-methylcytosine"
tccctaacatattttcccaagcaaattcagtcaagtccaactttcaaaacatcccaactgcgcaactaaatgctataacaaagtaggaggagacaaacaactgtactcggtgtccacttcct

SEQ ID NO: 385 - DNA, 122 bp, Homo sapiens
  misc_feature (61)..(62): /note="This region represents a CpG dinucleotide"
  misc_feature (61)..(61): /note="Nucleotide may be methylated to form 5-methylcytosine"
ccatctccagcctggccgctccaggaagtgagcaccgtttatcccccaccccaggcggcccgactcctcccagaaggagttgggagatgagccttccgcaaactcctgacctgtgggtccgt

SEQ ID NO: 386 - DNA, 122 bp, Homo sapiens
  misc_feature (61)..(62): /note="This region represents a CpG dinucleotide"
  misc_feature (61)..(61): /note="Nucleotide may be methylated to form 5-methylcytosine"
gaacaactcattactctggcagttgttccaaatgtttgaaaatacttccctaatctgaaccgaactcgatctacctgtaaataccacctcctgggctttgccttggcctccactggtataaa

SEQ ID NO: 387 - DNA, 122 bp, Homo sapiens
  misc_feature (61)..(62): /note="This region represents a CpG dinucleotide"
  misc_feature (61)..(61): /note="Nucleotide may be methylated to form 5-methylcytosine"
caaacagcattctattccagaggacagcatgaaaggaatagtattattttcctgggtaaacgtcccatgaaattgactttagcaaccaccagaggagtaagatggcatgcctttcatccccc

SEQ ID NO: 388 - DNA, 122 bp, Homo sapiens
  misc_feature (61)..(62): /note="This region represents a CpG dinucleotide"
  misc_feature (61)..(61): /note="Nucleotide may be methylated to form 5-methylcytosine"
ctctgtccacctccttgaaatgcttggtttcagtgataccgagatctcatgttcttcccacgtagtgactgccatgctggagcagcctggcaatagtggtccttcaatgtcatcctcggaag

SEQ ID NO: 389 - DNA, 122 bp, Homo sapiens
  misc_feature (61)..(62): /note="This region represents a CpG dinucleotide"
  misc_feature (61)..(61): /note="Nucleotide may be methylated to form 5-methylcytosine"
ccgcatgccgcggcctctggtgagctgggtggggatgctcctagtgccccgcctgcgtggcgccccccaggggccacccgccacggcgctcgtggtgtctgacccgcaagggcgcccctagt

SEQ ID NO: 390 - DNA, 122 bp, Homo sapiens
  misc_feature (61)..(62): /note="This region represents a CpG dinucleotide"
  misc_feature (61)..(61): /note="Nucleotide may be methylated to form 5-methylcytosine"
ggctttccgtaaggctctcttttgaccacttctggtgccataaaatgaggtgttccaacacgtcctacatttaaaacaacattaaggaaaaatgtttacataaaatgggattttcacttgaa

SEQ ID NO: 391 - DNA, 122 bp, Homo sapiens
  misc_feature (61)..(62): /note="This region represents a CpG dinucleotide"
  misc_feature (61)..(61): /note="Nucleotide may be methylated to form 5-methylcytosine"
tagctatgacacatggcttggaaattaacctttaaccaaacatcttataagtaacgccagcgcagcttcccttgtgaatgtaaagagatccagggctcttggagagggacaagtgagagcca

SEQ ID NO: 392 - DNA, 122 bp, Homo sapiens
  misc_feature (61)..(62): /note="This region represents a CpG dinucleotide"
  misc_feature (61)..(61): /note="Nucleotide may be methylated to form 5-methylcytosine"
ccacctcagtgcggctagggggcaggatgtgtcaaggaagtttagtcaagtatggaaatgcgacacaaaggtcaggaaaagataaagtgctgtgccaaataatatcgtagcaaaaacctttc

SEQ ID NO: 393 - DNA, 122 bp, Homo sapiens
  misc_feature (61)..(62): /note="This region represents a CpG dinucleotide"
  misc_feature (61)..(61): /note="Nucleotide may be methylated to form 5-methylcytosine"
tctgcttctctccccatagtatatacgtctgtcctgcgacacggacgcggaaatcctttacgagctgctgacccagcactggcacctgaaaacacccaacctggtcatttctgtgaccgggg

SEQ ID NO: 394 - DNA, 122 bp, Homo sapiens
  misc_feature (61)..(62): /note="This region represents a CpG dinucleotide"
  misc_feature (61)..(61): /note="Nucleotide may be methylated to form 5-methylcytosine"
ctggccattgacgcagaggtggccatctgtgcaccaaaagtgtatgctccccagctgagtcgttgctggaaaacagcagcccagccagggactatgtttcctggcccccttgcctctgtgtg

SEQ ID NO: 395 - DNA, 122 bp, Homo sapiens
  misc_feature (61)..(62): /note="This region represents a CpG dinucleotide"
  misc_feature (61)..(61): /note="Nucleotide may be methylated to form 5-methylcytosine"
ctcccccatctccagcctggccgctccaggaagtgagcaccgtttatcccccaccccaggcggcccgactcctcccagaaggagttgggagatgagccttccgcaaactcctgacctgtggg

SEQ ID NO: 396 - DNA, 122 bp, Homo sapiens
  misc_feature (61)..(62): /note="This region represents a CpG dinucleotide"
  misc_feature (61)..(61): /note="Nucleotide may be methylated to form 5-methylcytosine"
tttccacactgcaaaaacctagtgcttctgtgtttggttttcccttaaatgcaggcaaaacggacccagtttggttcagtaacagacccgctccactaaggtcatgtggggaagcagaggga

SEQ ID NO: 397 - DNA, 122 bp, Homo sapiens
  misc_feature (61)..(62): /note="This region represents a CpG dinucleotide"
  misc_feature (61)..(61): /note="Nucleotide may be methylated to form 5-methylcytosine"
actgctctgggcgtctaatgcaataaaaagtctaccccaagtagattccttgttagtcttcgtgattgtttccatgttccagcctctcattctttctttttagatttaaaagtaaagcaccc

SEQ ID NO: 398 - DNA, 122 bp, Homo sapiens
  misc_feature (61)..(62): /note="This region represents a CpG dinucleotide"
  misc_feature (61)..(61): /note="Nucleotide may be methylated to form 5-methylcytosine"
cccctgaatttgagcaggctttttatgaggtgaagattcgggagaatagcatccttggctcgctgattttgattgtctcagcttgggatttagactctggaacaaatggtgaaatatgctat

SEQ ID NO: 399 - DNA, 122 bp, Homo sapiens
  misc_feature (61)..(62): /note="This region represents a CpG dinucleotide"
  misc_feature (61)..(61): /note="Nucleotide may be methylated to form 5-methylcytosine"
ctgaagcacagggcacagagctgcctagctagagactgcatttcccagcctcccttgcaacgaggtgtggccatgtgactaggttctagcgaatgaaatgtgactggatgtgataggtgtgt

SEQ ID NO: 400 - DNA, 122 bp, Homo sapiens
  misc_feature (61)..(62): /note="This region represents a CpG dinucleotide"
  misc_feature (61)..(61): /note="Nucleotide may be methylated to form 5-methylcytosine"
tttatgtatattttcccacagatacacacatacacacaagatatacttgaacaacacccgcggggattctgattaatctggggcttgggaaaatgcatttcaaatatgcgactgaggtggtt

SEQ ID NO: 401 - DNA, 122 bp, Homo sapiens
  misc_feature (61)..(62): /note="This region represents a CpG dinucleotide"
  misc_feature (61)..(61): /note="Nucleotide may be methylated to form 5-methylcytosine"
caaggcagccgtgtgtgcttgcatgtgaggcggcaaaaacagcgcgctgcagggccggcgcggtggctcacgcctgtaatcccagcactttgggaggcggaggcgggtggatcacgaggtca

SEQ ID NO: 402 - DNA, 122 bp, Homo sapiens
  misc_feature (61)..(62): /note="This region represents a CpG dinucleotide"
  misc_feature (61)..(61): /note="Nucleotide may be methylated to form 5-methylcytosine"
ggaactggccgcgagaggcgcccggattctttccaaagggaacaaacagtatttgcagctcgaacggaagagtgggaatttgctcctaaaagaaaaattggaccgggaagagttgtgcggtg

SEQ ID NO: 403 - DNA, 122 bp, Homo sapiens
  misc_feature (61)..(62): /note="This region represents a CpG dinucleotide"
  misc_feature (61)..(61): /note="Nucleotide may be methylated to form 5-methylcytosine"
ggtgatcactcagtaagtactgttgtccctttggtctgtttctggcagcgattagctgtgcgcattctttgagaggagcgacggagggaacagaagagggtactagtgaagaactaaggtgc

SEQ ID NO: 404 - DNA, 122 bp, Homo sapiens
  misc_feature (61)..(62): /note="This region represents a CpG dinucleotide"
  misc_feature (61)..(61): /note="Nucleotide may be methylated to form 5-methylcytosine"
ggcgggtaacctggggcaagttctcagctctgcgcactgcctgcctagtgctgttaatggcggcagggtggctgggtgaggccggtgactgctggctttctcacacttcctgacaatctgca

SEQ ID NO: 405 - DNA, 122 bp, Homo sapiens
  misc_feature (61)..(62): /note="This region represents a CpG dinucleotide"
  misc_feature (61)..(61): /note="Nucleotide may be methylated to form 5-methylcytosine"
aacagctttgaattttatgtcagttgatgttaagatccaacaggaagtttaccctgataacgttaagatgaacagtttgaaagcagcttcctgctggaagttgaaatagagatgattcagat

SEQ ID NO: 406 - DNA, 122 bp, Homo sapiens
  misc_feature (61)..(62): /note="This region represents a CpG dinucleotide"
  misc_feature (61)..(61): /note="Nucleotide may be methylated to form 5-methylcytosine"
tgttggccatcattcattcattcatccactcactcattcagtcaatcattatttattgagcgtcaaccgtgcgccagcaggcactgtgctagtacatggagagcagaaaggcacgggagctt

SEQ ID NO: 407 - DNA, 122 bp, Homo sapiens
  misc_feature (61)..(62): /note="This region represents a CpG dinucleotide"
  misc_feature (61)..(61): /note="Nucleotide may be methylated to form 5-methylcytosine"
catgggactattgtggacagagaagctccaggcttcctttggttttgatttacggccccacggaactggagcgaggccctgcagcaggcttatctctcggggctcagcctcactggttctgg

SEQ ID NO: 408 - DNA, 122 bp, Homo sapiens
  misc_feature (61)..(62): /note="This region represents a CpG dinucleotide"
  misc_feature (61)..(61): /note="Nucleotide may be methylated to form 5-methylcytosine"
ccaactttgccgccagtccccttgccctgtgcgcctcctccgcgtggctgttcctgaatacgctggtgtctgttcgcatcttttagaatacgctggtgtcggtgcgcacagcgcttctctta

SEQ ID NO: 409 - DNA, 122 bp, Homo sapiens
  misc_feature (61)..(62): /note="This region represents a CpG dinucleotide"
  misc_feature (61)..(61): /note="Nucleotide may be methylated to form 5-methylcytosine"
caactaggaaaccaattcctggaaatgtccaggatgacattagtctgttattgcttcttacgtgggaatgaaaatctgcacagatgtctaaggaattacagagaaaaaaaactggaacaaat

SEQ ID NO: 410 - DNA, 122 bp, Homo sapiens
  misc_feature (61)..(62): /note="This region represents a CpG dinucleotide"
  misc_feature (61)..(61): /note="Nucleotide may be methylated to form 5-methylcytosine"
aagacagtcttcctaaactttgtccaggaagcaccaggctacacatacccgtccctattacgatcacatcaaactccgaagggagagtatccgccatcttgacgggaaacgtgtcatgtgac

SEQ ID NO: 411 - DNA, 122 bp, Homo sapiens
  misc_feature (61)..(62): /note="This region represents a CpG dinucleotide"
  misc_feature (61)..(61): /note="Nucleotide may be methylated to form 5-methylcytosine"
tcttgatagggcttcaactcacatttgagatcaatagttttgcacagtgattgtcaaccccggctgtacattagaatcacctgggcagttttttaaaactacaagtacctgggcttcacgcc

SEQ ID NO: 412 - DNA, 122 bp, Homo sapiens
  misc_feature (61)..(62): /note="This region represents a CpG dinucleotide"
  misc_feature (61)..(61): /note="Nucleotide may be methylated to form 5-methylcytosine"
agcaggcccagcacaaagcccccgactccactcagcatcttgctctgtgcagattcagaccgtgctcctgagagaggaagccaggtttagtgatgtttattccaaattgaacctttttactt

SEQ ID NO: 413 - DNA, 122 bp, Homo sapiens
  misc_feature (61)..(62): /note="This region represents a CpG dinucleotide"
  misc_feature (61)..(61): /note="Nucleotide may be methylated to form 5-methylcytosine"
gctgatttcttgtttcagcaacatcccgggcataaaacagcattttttgttatttactcacgtaaataatcagttgctggaggctgttctggaaagcaggacacatacagcacacataggaa

SEQ ID NO: 414 - DNA, 122 bp, Homo sapiens
  misc_feature (61)..(62): /note="This region represents a CpG dinucleotide"
  misc_feature (61)..(61): /note="Nucleotide may be methylated to form 5-methylcytosine"
attttcagtggtgaatgcttttgaatgccttataaaggtacaaagtttatctacagtttacggtattatttaattgtcatacctgtgaaaggaggaatggtgaaaatcccttatttatgcct

SEQ ID NO: 415 - DNA, 122 bp, Homo sapiens
  misc_feature (61)..(62): /note="This region represents a CpG dinucleotide"
  misc_feature (61)..(61): /note="Nucleotide may be methylated to form 5-methylcytosine"
ctcgcctctctcctggacgccgtcgccctgcctccccgcggggacacagcctccctcccacgtcccgcccggcaccggagccgctcacttgggagcttcttactgtgtggggggagctgggg

SEQ ID NO: 416 - DNA, 122 bp, Homo sapiens
  misc_feature (61)..(62): /note="This region represents a CpG dinucleotide"
  misc_feature (61)..(61): /note="Nucleotide may be methylated to form 5-methylcytosine"
ccagcccccatcccaccgacctaaacagtcaggcttgagagactggaagggtttcacttccgcctggctgcaggaaccacaagttccagactaggtcgtaattggaataatcacagtcaaaa

SEQ ID NO: 417 - DNA, 122 bp, Homo sapiens
  misc_feature (61)..(62): /note="This region represents a CpG dinucleotide"
  misc_feature (61)..(61): /note="Nucleotide may be methylated to form 5-methylcytosine"
aaggagttagattcggaacccctacaagagaaaattaaggtctgaatttggggatggggtcgcagagggcagaggatgaagaaataaatacagaagacattagaaaggactctggtttgtgg

SEQ ID NO: 418 - DNA, 122 bp, Homo sapiens
  misc_feature (61)..(62): /note="This region represents a CpG dinucleotide"
  misc_feature (61)..(61): /note="Nucleotide may be methylated to form 5-methylcytosine"
gcactcctcaccccttgggcggtcaatggaaccgggtgctgccaaacatggggcggcgcacgtcacggaggcccggctgcccgggagcccgccgcagtggcggggggcggggcttgggcatg

SEQ ID NO: 419 - DNA, 122 bp, Homo sapiens
  misc_feature (61)..(62): /note="This region represents a CpG dinucleotide"
  misc_feature (61)..(61): /note="Nucleotide may be methylated to form 5-methylcytosine"
gccacccgccaccggcctggtctgctcacgtcccctggacccgcgggccagccaaggagccgctgcccttggcacctgttctccgtgcctgcaaacagacaaggccctgcacttttctcctc

SEQ ID NO: 420 - DNA, 122 bp, Homo sapiens
  misc_feature (61)..(62): /note="This region represents a CpG dinucleotide"
  misc_feature (61)..(61): /note="Nucleotide may be methylated to form 5-methylcytosine"
ttttcaataaattcctgctttcgttcttttgctgcttcattctttctttgctttgttgggcgttttgtccaattctttgttcaaaatgccaagaacctggacaagttgcagttatgaccctc

SEQ ID NO: 421 - DNA, 122 bp, Homo sapiens
  misc_feature (61)..(62): /note="This region represents a CpG dinucleotide"
  misc_feature (61)..(61): /note="Nucleotide may be methylated to form 5-methylcytosine"
acaagacataagactttaagtcaagaataaaggtaatgtgagtcttttttcttgcattggcgctacccacagggtgcatcatgacatattgctaagttctgcattcaggttatgtggctctc

SEQ ID NO: 422 - DNA, 122 bp, Homo sapiens
  misc_feature (61)..(62): /note="This region represents a CpG dinucleotide"
  misc_feature (61)..(61): /note="Nucleotide may be methylated to form 5-methylcytosine"
ttcattttctttttcagcaaaaaacatatcttcctacttcacattttttcttgactgtcacgctagcattctgtagattgagaaatctatgtaaatacaccataatttctagaagcacgttt

SEQ ID NO: 423 - DNA, 122 bp, Homo sapiens
  misc_feature (61)..(62): /note="This region represents a CpG dinucleotide"
  misc_feature (61)..(61): /note="Nucleotide may be methylated to form 5-methylcytosine"
ttcgacgcggccgcttcagagcggcggggacaggctgcagcaggtggcgcagttagcagccgccgccgcagccacagagacctcctcgtcgggaacccatgaagactgcgcaacacagccgc

SEQ ID NO: 424 - DNA, 122 bp, Homo sapiens
  misc_feature (61)..(62): /note="This region represents a CpG dinucleotide"
  misc_feature (61)..(61): /note="Nucleotide may be methylated to form 5-methylcytosine"
aacttctaactagtgaacataatctcaagcctcatttcctgttttcctggcaaccaactccgaggatgatttgccaacatgctttatagtaattatggtttgagctttgctgaatcagagag

SEQ ID NO: 425 - DNA, 122 bp, Homo sapiens
  misc_feature (61)..(62): /note="This region represents a CpG dinucleotide"
  misc_feature (61)..(61): /note="Nucleotide may be methylated to form 5-methylcytosine"
agtctttcctttcctgcgtgtatgtgggtactaaagagaagggcaacacaaacccaaacacgtggcctgtctggaagcaggcagcgtataaattgcaaaataagaaagcctgggtcctttgt

SEQ ID NO: 426 - DNA, 122 bp, Homo sapiens
  misc_feature (61)..(62): /note="This region represents a CpG dinucleotide"
  misc_feature (61)..(61): /note="Nucleotide may be methylated to form 5-methylcytosine"
ggtgctgagcaaactcaccagtgcactgtaggatgttttaaaatttcaagagaaacacagcgacatctgctggactctgtgcaaactactagtttgaggcaattcagtctcattagattgtc

SEQ ID NO: 427 - DNA, 122 bp, Homo sapiens
  misc_feature (61)..(62): /note="This region represents a CpG dinucleotide"
  misc_feature (61)..(61): /note="Nucleotide may be methylated to form 5-methylcytosine"
cctgcaaaggctgagccttccctgatccttagaagtgggccaggcagacaagcggctgatcgtgggggtcctcctgccacttcctcctgcagagttctgtcctgctccctcagaagctcagg

SEQ ID NO: 428 - DNA, 122 bp, Homo sapiens
  misc_feature (61)..(62): /note="This region represents a CpG dinucleotide"
  misc_feature (61)..(61): /note="Nucleotide may be methylated to form 5-methylcytosine"
gcgcccgggacctcaaagctggactccccggggactgagtccaaccgtggctgcaggggccgcggcctggcggagggtccgcgtgggtgtctacgaggatcccccccgttccatctcctctt

SEQ ID NO: 429 - DNA, 122 bp, Homo sapiens
  misc_feature (61)..(62): /note="This region represents a CpG dinucleotide"
  misc_feature (61)..(61): /note="Nucleotide may be methylated to form 5-methylcytosine"
tgccctgcccacagaactctgctatggctgactgtgacagacgctggcctgggggcctgccgtgagcatgcctgggtgagggcagcacgcgatcgacaccttgaagtggacatggatgtggt

SEQ ID NO: 430 - DNA, 122 bp, Homo sapiens
  misc_feature (61)..(62): /note="This region represents a CpG dinucleotide"
  misc_feature (61)..(61): /note="Nucleotide may be methylated to form 5-methylcytosine"
aggagttgggcgacggagggggcggggagagcttcgtgggtggccacggccagcagcacccgggtgcccctcagagaggaaggtacctgcagcctctgctcatgtgtggggccagcccccac

SEQ ID NO: 431 - DNA, 122 bp, Homo sapiens
  misc_feature (61)..(62): /note="This region represents a CpG dinucleotide"
  misc_feature (61)..(61): /note="Nucleotide may be methylated to form 5-methylcytosine"
agggccctgaggtgggaggggccgggcggcctcaggctcagcgaggggctgaggggccaacgtggccggagtggagtgggcgaggggagggagcgctggccaggagagacaaccacgagcca

SEQ ID NO: 432 - DNA, 122 bp, Homo sapiens
  misc_feature (61)..(62): /note="This region represents a CpG dinucleotide"
  misc_feature (61)..(61): /note="Nucleotide may be methylated to form 5-methylcytosine"
ccttaaactcacgtgacgaagatcacggagcagtttagtccaaatccgggggtaacgcttcggggttctgtcggcccctgtaagcttctctcctcttctcactgaagctcttccgggaaaaa

SEQ ID NO: 433 - DNA, 122 bp, Homo sapiens
  misc_feature (61)..(62): /note="This region represents a CpG dinucleotide"
  misc_feature (61)..(61): /note="Nucleotide may be methylated to form 5-methylcytosine"
caaccttacaggaaaggagaagagaaagccttttaggcattacgatgatttgaggggctccggaaagcatttctcaaaagtactttgtccatagacctggcactgaagactcgaatttaacc

SEQ ID NO: 434 - DNA, 122 bp, Homo sapiens
  misc_feature (61)..(62): /note="This region represents a CpG dinucleotide"
  misc_feature (61)..(61): /note="Nucleotide may be methylated to form 5-methylcytosine"
catcttccgatcctgtgtcccgcactgggacacagagcagggattgtggtgagggtggctcgtgggtcctctcgcggagagcagggtctggcacttaccagcgcgcacgactaggacttgtt

SEQ ID NO: 435 - DNA, 122 bp, Homo sapiens
  misc_feature (61)..(62): /note="This region represents a CpG dinucleotide"
  misc_feature (61)..(61): /note="Nucleotide may be methylated to form 5-methylcytosine"
ctcgcccctcgctctgctaccatttccttccgtttctgcttcgcttggcgatgcaaaacgcgcgaggctcacggcagagggccgaggccacgggactctcagggccgggcccgcccctcggc

SEQ ID NO: 436 - DNA, 122 bp, Homo sapiens
  misc_feature (61)..(62): /note="This region represents a CpG dinucleotide"
  misc_feature (61)..(61): /note="Nucleotide may be methylated to form 5-methylcytosine"
atctccaaacttggactgccttggactgaccctggcctggaaggtgtgggctcaggactccgagctcaagtcagtctgttcccccaacccctaacccactgcatccgggtgaggagttgggc

SEQ ID NO: 437 - DNA, 122 bp, Homo sapiens
  misc_feature (61)..(62): /note="This region represents a CpG dinucleotide"
  misc_feature (61)..(61): /note="Nucleotide may be methylated to form 5-methylcytosine"
actctatcaggtgcagatatcagaaaacagccccctggattcccttgttgccactgtttccgctagagattcagacatgggaattaatggtgagatattctactcattttttatggtgatga

SEQ ID NO: 438 - DNA, 122 bp, Homo sapiens
  misc_feature (61)..(62): /note="This region represents a CpG dinucleotide"
  misc_feature (61)..(61): /note="Nucleotide may be methylated to form 5-methylcytosine"
taaaaaaaattgttcaacccatcagttattaaccagctctgcttcccaaattacccaaaacgaataacctcaagcccaccaaacgctgaagggtagtcagtcagagtgagaggcagtgtcgg

SEQ ID NO: 439 - DNA, 122 bp, Homo sapiens
  misc_feature (61)..(62): /note="This region represents a CpG dinucleotide"
  misc_feature (61)..(61): /note="Nucleotide may be methylated to form 5-methylcytosine"
ttatgcaaaggaaactctgggaagaaatgatgtggtttgggactacacttgtgggtagcacgtgcttagatgtattattatagccagtgctataaggagatgactaagttatttcaccacat

SEQ ID NO: 440 - DNA, 122 bp, Homo sapiens
  misc_feature (61)..(62): /note="This region represents a CpG dinucleotide"
  misc_feature (61)..(61): /note="Nucleotide may be methylated to form 5-methylcytosine"
atagttaagttttgaaatcaggaagtagatgtctacaattccaaccttttgcctcttattcgagattatttaggctgctgtgggtctattgcattgcatatgaactttaaaataaccttgtt

SEQ ID NO: 441 - DNA, 122 bp, Homo sapiens
  misc_feature (61)..(62): /note="This region represents a CpG dinucleotide"
  misc_feature (61)..(61): /note="Nucleotide may be methylated to form 5-methylcytosine"
accccaaggagctctctcgccctctctctaccatgtgaggatacaacaaggaatcagcagcgtgcaacctggaggaggcctttcagcagaacccagccatgctggcacccagatctcagacc

SEQ ID NO: 442 - DNA, 122 bp, Homo sapiens
  misc_feature (61)..(62): /note="This region represents a CpG dinucleotide"
  misc_feature (61)..(61): /note="Nucleotide may be methylated to form 5-methylcytosine"
tgcctgcctcccgctgcgctggagttagatgctgtttattgtggggcttcccaattgtgtcgagtcagcggaaagtcctttccaaagttaccagaggtgttgtgccaatctccagaataata

SEQ ID NO: 443 - DNA, 122 bp, Homo sapiens
  misc_feature (61)..(62): /note="This region represents a CpG dinucleotide"
  misc_feature (61)..(61): /note="Nucleotide may be methylated to form 5-methylcytosine"
cctttcccgggccagaggctgggcggatctgccccagggaagaccccacatctgctgcggcggctgcagtccggctccttgaggctggtttcctgtcccctccttcccactacgtccccttc

SEQ ID NO: 444 - DNA, 122 bp, Homo sapiens
  misc_feature (61)..(62): /note="This region represents a CpG dinucleotide"
  misc_feature (61)..(61): /note="Nucleotide may be methylated to form 5-methylcytosine"
tactctgttgttgccatcttgagattcattataatataatttttgaatttgtgttttgaacgtgatgtccaatgggacaatggaacattcacataacagaggagacaggtcaggtggcagcc

SEQ ID NO: 445 - DNA, 122 bp, Homo sapiens
  misc_feature (61)..(62): /note="This region represents a CpG dinucleotide"
  misc_feature (61)..(61): /note="Nucleotide may be methylated to form 5-methylcytosine"
cccacccctgcttaccagccttgccccgccccgccccctcctcccacctccttcgcagcccggccccctgaagtcgcgccctgtgcctggccccagcctgcgtcccctcattccccagtgct

SEQ ID NO: 446 - DNA, 122 bp, Homo sapiens
  misc_feature (61)..(62): /note="This region represents a CpG dinucleotide"
  misc_feature (61)..(61): /note="Nucleotide may be methylated to form 5-methylcytosine"
aatattgaattaaggcaagatattacttttaccttctctttctcattagtggactgaatacgttttgtggatacttggtttatggcagttactaggacccaacttagaaaagaaagtcacca

SEQ ID NO: 447 - DNA, 122 bp, Homo sapiens
  misc_feature (61)..(62): /note="This region represents a CpG dinucleotide"
  misc_feature (61)..(61): /note="Nucleotide may be methylated to form 5-methylcytosine"
tgcgggcgccttctcccctgtagaaatggtgacctcaaggcttctaggtcgcatctttcccgagggcaggtacacttcgaagggcctgcactccttctgccccggggcgccccccgccagcc

SEQ ID NO: 448 - DNA, 122 bp, Homo sapiens
  misc_feature (61)..(62): /note="This region represents a CpG dinucleotide"
  misc_feature (61)..(61): /note="Nucleotide may be methylated to form 5-methylcytosine"
cggtcagtgtttgcagggccatctggccatcagagctccactttctagacaaagtggttgcggcctgtgttctccataaagctgcctcgcgtggcaggaaacaacaataattatccttcctc

SEQ ID NO: 449 - DNA, 122 bp, Homo sapiens
  misc_feature (61)..(62): /note="This region represents a CpG dinucleotide"
  misc_feature (61)..(61): /note="Nucleotide may be methylated to form 5-methylcytosine"
ggaggctgtggcagatcctagctggggcgcacagcttagtgataacttgttgattctctgcgctgttcataagtagggcttgcgtttggtttgtggactgtggccaaatccgccaggtgaca

SEQ ID NO: 450 - DNA, 122 bp, Homo sapiens
  misc_feature (61)..(62): /note="This region represents a CpG dinucleotide"
  misc_feature (61)..(61): /note="Nucleotide may be methylated to form 5-methylcytosine"
gactctgcagtcttcagggctggtgcccttcaccgatgcagcttcacagcttttccatttcgggtcaccgttacattgtggtcctttccccggccctggactggccaccactggacagcagg

SEQ ID NO: 451 - DNA, 122 bp, Homo sapiens
  misc_feature (61)..(62): /note="This region represents a CpG dinucleotide"
  misc_feature (61)..(61): /note="Nucleotide may be methylated to form 5-methylcytosine"
tccccgtcacctactgcctctgactccccctgagtaaatgcaatgggaaaagcagggagacgtgctctcgactctccccagagcagaccctgcaggcggaagccacctgaatctcacttgct

SEQ ID NO: 452 - DNA, 122 bp, Homo sapiens
  misc_feature (61)..(62): /note="This region represents a CpG dinucleotide"
  misc_feature (61)..(61): /note="Nucleotide may be methylated to form 5-methylcytosine"
aaaagaactacgccttgccttctccagcaaccacaggtatggcgtcttctcctgtgaacccgcagagcacctcgcctggcggttctagtgcaggccgcggcccagtcttgctcaccctcgca

SEQ ID NO: 453 - DNA, 122 bp, Homo sapiens
  misc_feature (61)..(62): /note="This region represents a CpG dinucleotide"
  misc_feature (61)..(61): /note="Nucleotide may be methylated to form 5-methylcytosine"
ttttcttttttttctaaagctaccatcatttctaagctgatactttagaagcctcttaaccgacctgcttgcttccgctccagattttcatccacagagcagccaaaagtatctcttacata

SEQ ID NO: 454 - DNA, 122 bp, Homo sapiens
  misc_feature (61)..(62): /note="This region represents a CpG dinucleotide"
  misc_feature (61)..(61): /note="Nucleotide may be methylated to form 5-methylcytosine"
ggaaagagaaaccatctgtgaagcagccagacactgtggggatgaattacacctggcaaacgtcaactactctcgaggggctacagctgttccccaacaagaccccaattgggactacaata

SEQ ID NO: 455 - DNA, 122 bp, Homo sapiens
  misc_feature (61)..(62): /note="This region represents a CpG dinucleotide"
  misc_feature (61)..(61): /note="Nucleotide may be methylated to form 5-methylcytosine"
tctctagaacttattcatcttgaataactgaaactttatacctgttcaacaataacttcccgtttctcccttcccccagcccctggcaactaccattctactttccgtttctgagtctattt

SEQ ID NO: 456 - DNA, 122 bp, Homo sapiens
  misc_feature (61)..(62): /note="This region represents a CpG dinucleotide"
  misc_feature (61)..(61): /note="Nucleotide may be methylated to form 5-methylcytosine"
ctggcaggtatttcctgcatgcctgcattccagtgctataacctgctcaaggacacagagcgctccttacttagctctgtagcctcagcacctagcgcaatcctttatacacagtaggcatc

SEQ ID NO: 457 - DNA, 122 bp, Homo sapiens
  misc_feature (61)..(62): /note="This region represents a CpG dinucleotide"
  misc_feature (61)..(61): /note="Nucleotide may be methylated to form 5-methylcytosine"
gtctgcctggggcttagacgggattcgacgtaacagaagatgacgcttgagtgacagattcgtcagcgcccagaggaggaggacaagctggacccctaccctggttggggcttggagccata

SEQ ID NO: 458 - DNA, 122 bp, Homo sapiens
  misc_feature (61)..(62): /note="This region represents a CpG dinucleotide"
  misc_feature (61)..(61): /note="Nucleotide may be methylated to form 5-methylcytosine"
tccaagaacctggtgagagcttatagtgtcttgccacagaaaattacaatgtcaaaaaaacggattttagaaagatacactgtttgaaacctaaaattccaaaataatgtaacagaaagatt

SEQ ID NO: 459 - DNA, 122 bp, Homo sapiens
  misc_feature (61)..(62): /note="This region represents a CpG dinucleotide"
  misc_feature (61)..(61): /note="Nucleotide may be methylated to form 5-methylcytosine"
cgttttcatatgcccggcattaaggctttgaagttcttaaaaccccttctagggtgaaaccgttagggaatttcaacgacgtactagaattattgaacaaatgcaatgggaggatcttgcct

SEQ ID NO: 460 - DNA, 122 bp, Homo sapiens
  misc_feature (61)..(62): /note="This region represents a CpG dinucleotide"
  misc_feature (61)..(61): /note="Nucleotide may be methylated to form 5-methylcytosine"
gaaaaatactgagcagttaatctacaaacctgtttcagtctagctgaccactagatggcccgttactcaagataataatcagaacaagacatgctgacctgtacgtagctaactcttgcaca

SEQ ID NO: 461 - DNA, 122 bp, Homo sapiens
  misc_feature (61)..(62): /note="This region represents a CpG dinucleotide"
  misc_feature (61)..(61): /note="Nucleotide may be methylated to form 5-methylcytosine"
gattacagttgtgagccactgcacccggcctctccttcttttaaacatatgcagactcaccgcagaaactggaaacagattaaaagaaatgctggcttttaaggcgagtttgaaaaacgtaa

SEQ ID NO: 462 - DNA, 122 bp, Homo sapiens
  misc_feature (61)..(62): /note="This region represents a CpG dinucleotide"
  misc_feature (61)..(61): /note="Nucleotide may be methylated to form 5-methylcytosine"
ctctggcccatgtctgcgcactcgtagttccacccctcagccccagtgtttgttatttttcgggttcagcttgcttttgccccgtctccgtcgacgcaatcgccaccagtcaatggggtggt

SEQ ID NO: 463 - DNA, 122 bp, Homo sapiens
  misc_feature (61)..(62): /note="This region represents a CpG dinucleotide"
  misc_feature (61)..(61): /note="Nucleotide may be methylated to form 5-methylcytosine"
gtggaaaagggaggatgggaagggccccgatccccagcccctggctcaggtaggtgccatcgcctcccagggccgttgtccagattcaccgcggtgcatgtgaaagcccgggcaaacagatg

SEQ ID NO: 464 - DNA, 122 bp, Homo sapiens
  misc_feature (61)..(62): /note="This region represents a CpG dinucleotide"
  misc_feature (61)..(61): /note="Nucleotide may be methylated to form 5-methylcytosine"
cagcctgagtaactacaccatcagccccaatgcctatttccatattaatgtccatgatagcggggaggggaatatctatcccgaattggtgctgaatcaagtgctggatcgggaagagatac

SEQ ID NO: 465 - DNA, 122 bp, Homo sapiens
  misc_feature (61)..(62): /note="This region represents a CpG dinucleotide"
  misc_feature (61)..(61): /note="Nucleotide may be methylated to form 5-methylcytosine"
gcccccagtctgcaatagttctgaaactgtgcagcagttgatgctgtaaaaatgtagatacgaacctctgtgtagtcatcatactgagttgtctgggcatggatccagttatgtctcacttc

SEQ ID NO: 466 - DNA, 122 bp, Homo sapiens
  misc_feature (61)..(62): /note="This region represents a CpG dinucleotide"
  misc_feature (61)..(61): /note="Nucleotide may be methylated to form 5-methylcytosine"
aaaattatatggatattcatagttaagtagcacacccaaaaaagcaactttgaggccaggcgcagtggctcatgcctataattccagcactttgggaggccaaggcgagtggatcacctgag

SEQ ID NO: 467 - DNA, 122 bp, Homo sapiens
  misc_feature (61)..(62): /note="This region represents a CpG dinucleotide"
  misc_feature (61)..(61): /note="Nucleotide may be methylated to form 5-methylcytosine"
aatgattaataataactaacatttcctgagtgcttactgtcttccaggcatcgtgctcagcgtcttaaagacatgatggcaatttaatcctcctatcagttcagtgaagcaggagtcgttat

SEQ ID NO: 468 - DNA, 122 bp, Homo sapiens
  misc_feature (61)..(62): /note="This region represents a CpG dinucleotide"
  misc_feature (61)..(61): /note="Nucleotide may be methylated to form 5-methylcytosine"
tcccgccaactgtgggatgttctctttctgccccgaatccctggagcgggagcgagagcccgccgctctcagagataccgagataaccgcctgcgaggaggcgcttcgtgaacccagtgcag

SEQ ID NO: 469 - DNA, 122 bp, Homo sapiens
  misc_feature (61)..(62): /note="This region represents a CpG dinucleotide"
  misc_feature (61)..(61): /note="Nucleotide may be methylated to form 5-methylcytosine"
ccatcacggggcacagagtgggacgcctgccatgccgtcctccctgcaaaccacagccaacgtccaggccccgcctttcactcgaagctcagcccttgttctggccggggaatctggtgcat

SEQ ID NO: 470 - DNA, 122 bp, Homo sapiens
  misc_feature (61)..(62): /note="This region represents a CpG dinucleotide"
  misc_feature (61)..(61): /note="Nucleotide may be methylated to form 5-methylcytosine"
atgaatgactgttaggaaagattcctgaaggaattcactaggtggcactctttcttctttcgcagtgtcttcataataagcggcagaatatttggaattattgatgaatttttgagtttcct

SEQ ID NO: 471 - DNA, 122 bp, Homo sapiens
  misc_feature (61)..(62): /note="This region represents a CpG dinucleotide"
  misc_feature (61)..(61): /note="Nucleotide may be methylated to form 5-methylcytosine"
atagatgcagttggggctcagaccaaagcctcgtatccagttaggagcaggatcagaattcgaacccaaagccagctgactccttgttctggtcaacacggttggtgctctcccgtgcagga

SEQ ID NO: 472 - DNA, 122 bp, Homo sapiens
  misc_feature (61)..(62): /note="This region represents a CpG dinucleotide"
  misc_feature (61)..(61): /note="Nucleotide may be methylated to form 5-methylcytosine"
ttctttgtagtttctccaaattctttgtaaaaattatgaaagtaatttgcgaaaaataagcgaattgacatggaatataaggtgaataatacatttttaaaatgtagttgtgtataatggaa

SEQ ID NO: 473 - DNA, 122 bp, Homo sapiens
  misc_feature (61)..(62): /note="This region represents a CpG dinucleotide"
  misc_feature (61)..(61): /note="Nucleotide may be methylated to form 5-methylcytosine"
agagcatcccttgtgtggcactgcctgtggtgacgacaatggtggcagtggctgggaaggcggccgcggtggtgtgggtgggggtggctccagtgctggccatgatcctggctctggctcct

SEQ ID NO: 474 - DNA, 122 bp, Homo sapiens
  misc_feature (61)..(62): /note="This region represents a CpG dinucleotide"
  misc_feature (61)..(61): /note="Nucleotide may be methylated to form 5-methylcytosine"
tccttggctagatgggtatgtccttgatgacaagaatgacgtgtgatggctctttcctcccgttggcctgttgagtatcttgccccttgctccccccaccccaccacagtaacaaacaataa

SEQ ID NO: 475 - DNA, 122 bp, Homo sapiens
  misc_feature (61)..(62): /note="This region represents a CpG dinucleotide"
  misc_feature (61)..(61): /note="Nucleotide may be methylated to form 5-methylcytosine"
tcagcgaagggtttcaggtagtaatggaactcctcccgtgcttccagaagctgctgcagccggcggggtttgagcgccggagttccgggcggcagtagtgtggaccccgcccctccaggtct

SEQ ID NO: 476 - DNA, 122 bp, Homo sapiens
  misc_feature (61)..(62): /note="This region represents a CpG dinucleotide"
  misc_feature (61)..(61): /note="Nucleotide may be methylated to form 5-methylcytosine"
cataagaatggtggaagaggaagatgagcagagaaaaagcctttgactgtggtggttctgcgtgttagggacctggagccttggaggaaatctgaagaataccagaatcttttttgaaacac

SEQ ID NO: 477 - DNA, 122 bp, Homo sapiens
  misc_feature (61)..(62): /note="This region represents a CpG dinucleotide"
  misc_feature (61)..(61): /note="Nucleotide may be methylated to form 5-methylcytosine"
gcagagacagcagcagctctcttgggctgggagccctcggaaggcagtgctgagcaggcccgttcttcggaagttagttgttgatccggttttgattatgctatgatttccatctgagctct

SEQ ID NO: 478 - DNA, 122 bp, Homo sapiens
  misc_feature (61)..(62): /note="This region represents a CpG dinucleotide"
  misc_feature (61)..(61): /note="Nucleotide may be methylated to form 5-methylcytosine"
tcaagagtggctaagcagagcctcagtcttttgtgacgtagccacaggagtcataactgtcgtttctgcaatatcctgttgattacacaggataggtcagccctattcattgtgggaggtga

SEQ ID NO: 479 - DNA, 122 bp, Homo sapiens
  misc_feature (61)..(62): /note="This region represents a CpG dinucleotide"
  misc_feature (61)..(61): /note="Nucleotide may be methylated to form 5-methylcytosine"
acagggttgtgagccaacagcaaccacatacacctttgcagtaatcagaaccagcgttctcgatgctgaaagcaaaatcaagtaaacaaggttgtgttgtggacttccttgacccagacttt

SEQ ID NO: 480 - DNA, 122 bp, Homo sapiens
  misc_feature (61)..(62): /note="This region represents a CpG dinucleotide"
  misc_feature (61)..(61): /note="Nucleotide may be methylated to form 5-methylcytosine"
ggtttcccctgtaccaagcacagtgctgactgcattacatgggtttttctttttactattcgtgacaaccttctgaggtaggtatcattactgtccccatttacagatgagacaactgaggc

SEQ ID NO: 481 - DNA, 122 bp, Homo sapiens
  misc_feature (61)..(62): /note="This region represents a CpG dinucleotide"
  misc_feature (61)..(61): /note="Nucleotide may be methylated to form 5-methylcytosine"
ttgggttgcttgtgaaaaatagatcccccagcttccagcctgacctactatattggaaatcgggattggggggtggggtgtgtgtgttaaagacaggggggttctagcataaaaatgtatat

SEQ ID NO: 482 - DNA, 122 bp, Homo sapiens
  misc_feature (61)..(62): /note="This region represents a CpG dinucleotide"
  misc_feature (61)..(61): /note="Nucleotide may be methylated to form 5-methylcytosine"
ccagagactttaagcgacattaccatggtcacatgttttcacatgaatgtaaaccccaaacgctgcttattttcagacttgaattttaaatttccatacaaaggcttcaagtggttctcacc

SEQ ID NO: 483 - DNA, 122 bp, Homo sapiens
  misc_feature (61)..(62): /note="This region represents a CpG dinucleotide"
  misc_feature (61)..(61): /note="Nucleotide may be methylated to form 5-methylcytosine"
agcttaatctcatactaattatgtgaacttacatactggtgcttcacctatttcctcatccgtaaaatggggataataccaatctcatggggctgttacaagtcttaaatgagagaaaggta

SEQ ID NO: 484 - DNA, 122 bp, Homo sapiens
  misc_feature (61)..(62): /note="This region represents a CpG dinucleotide"
  misc_feature (61)..(61): /note="Nucleotide may be methylated to form 5-methylcytosine"
gtcactacatgtatcattaaaggtcctaaaaggaattgttaggcggcaggctttgtgttacgtgttacatggagtgagggtagatgtgaagatttaaaacgattgatggatttaaggaagtg

SEQ ID NO: 485 - DNA, 122 bp, Homo sapiens
  misc_feature (61)..(62): /note="This region represents a CpG dinucleotide"
  misc_feature (61)..(61): /note="Nucleotide may be methylated to form 5-methylcytosine"
actccgccaccctctcgttagctgcggcctgtggaatacgtgcacgtgctcacacagtcccgtctcacaagccccctgaggcccctcccgaggccttgctccctggaccttgggttcccact

SEQ ID NO: 486 - DNA, 122 bp, Homo sapiens
  misc_feature (61)..(62): /note="This region represents a CpG dinucleotide"
  misc_feature (61)..(61): /note="Nucleotide may be methylated to form 5-methylcytosine"
cgcccacatcgctcccacccctgcccggcccctcccgaccagcaaacctctcctgccccgcggctgtgtttttaattatttttacatataaatgtgctgcacgcctcatctgcctcgaattt

SEQ ID NO: 487 - DNA, 122 bp, Homo sapiens
  misc_feature (61)..(62): /note="This region represents a CpG dinucleotide"
  misc_feature (61)..(61): /note="Nucleotide may be methylated to form 5-methylcytosine"
caagacttgccccttaggtaacacagcaagtaagtgacttggggctagaatcctcgttttcgcatcttgagctcgattaccatcctcaacagaccccaatctttacatcatcataccataca

SEQ ID NO: 488 - DNA, 122 bp, Homo sapiens
  misc_feature (61)..(62): /note="This region represents a CpG dinucleotide"
  misc_feature (61)..(61): /note="Nucleotide may be methylated to form 5-methylcytosine"
aacagcgcgagggcgaggcgactttggagctgcctcatgcagcgacctcgccttccgctgcgcctcctcccagaacccaagaagcctggaacctgtggcgtccagccctgaaaggaggagac

SEQ ID NO: 489 - DNA, 122 bp, Homo sapiens
  misc_feature (61)..(62): /note="This region represents a CpG dinucleotide"
  misc_feature (61)..(61): /note="Nucleotide may be methylated to form 5-methylcytosine"
ccctgacacagagcattcagagcagaatttcaataagtcttttggagcagacattaaaaacggtttttggcatatggagctatattattcatggcagtcaaatacatccttggagccacttt

SEQ ID NO: 490 - DNA, 122 bp, Homo sapiens
  misc_feature (61)..(62): /note="This region represents a CpG dinucleotide"
  misc_feature (61)..(61): /note="Nucleotide may be methylated to form 5-methylcytosine"
cacctctggggcaggctggggtcccagcccagaatagtcagcaacggtgagcccaggagccgcgtccctgggcagggctgaccgcgtggctggggcagccttggagggcactccgctgggcc

SEQ ID NO: 491 - DNA, 122 bp, Homo sapiens
  misc_feature (61)..(62): /note="This region represents a CpG dinucleotide"
  misc_feature (61)..(61): /note="Nucleotide may be methylated to form 5-methylcytosine"
gtccccatgggcgcaaacactgaggccttagctagcagagagcacaggcttcagagcggccgctcccagattcctgcactgcccccctctgcagcttcacaaacctccgcttccgcttccgc

SEQ ID NO: 492 - DNA, 122 bp, Homo sapiens
  misc_feature (61)..(62): /note="This region represents a CpG dinucleotide"
  misc_feature (61)..(61): /note="Nucleotide may be methylated to form 5-methylcytosine"
gtggggaccatcccttcagccacttgaaaacataaccaaagccagagacagtgagtcccccgtgggagaattattcagggagaacatgactggacttctgggttcttggcttccttttcccc

SEQ ID NO: 493 - DNA, 122 bp, Homo sapiens
  misc_feature (61)..(62): /note="This region represents a CpG dinucleotide"
  misc_feature (61)..(61): /note="Nucleotide may be methylated to form 5-methylcytosine"
tagtaggccagtgtgactaagacttggggaattaattcattgagatgaggtcaaagttaacggggccaggtcacatggaacaaagtttctgaacttcagcattattgacagttggaaatttt

SEQ ID NO: 494 - DNA, 122 bp, Homo sapiens
  misc_feature (61)..(62): /note="This region represents a CpG dinucleotide"
  misc_feature (61)..(61): /note="Nucleotide may be methylated to form 5-methylcytosine"
gaaaaaaaaaaaaaaaaaaaccctttcagaacagtttgtgctcctgttcagcccaggagacgtcgttcctgcttttacgcggcgccatgtccttcttggcgtacacttggcaaaacagaatg

SEQ ID NO: 495 - DNA, 122 bp, Homo sapiens
  misc_feature (61)..(62): /note="This region represents a CpG dinucleotide"
  misc_feature (61)..(61): /note="Nucleotide may be methylated to form 5-methylcytosine"
agaaacagttttcagataaagaatttgctcaggggaacataggtggcgggagaaaaaaaacgagggtttacaatttcggagctgtcacacttaataaccttgctgaagtattgatagaggaa

SEQ ID NO: 496 - DNA, 122 bp, Homo sapiens
  misc_feature (61)..(62): /note="This region represents a CpG dinucleotide"
  misc_feature (61)..(61): /note="Nucleotide may be methylated to form 5-methylcytosine"
gctgagagtcaaacagctgagtcaggccccaaagttcacatgacatcatagaatagctgtcgatgagctttggatttgacgatgagtttcccagcagcctgggggagaaggaaagtggaaca

SEQ ID NO: 497 - DNA, 122 bp, Homo sapiens
  misc_feature (61)..(62): /note="This region represents a CpG dinucleotide"
  misc_feature (61)..(61): /note="Nucleotide may be methylated to form 5-methylcytosine"
ggatctgattattgaggtgtggaaggaataaataatcagtccacaaataaacaaactgtccgggattcctagagggaaggagaaatccttgaaggagatccaagtcgctccaggtctgcctg

SEQ ID NO: 498 - DNA, 122 bp, Homo sapiens
  misc_feature (61)..(62): /note="This region represents a CpG dinucleotide"
  misc_feature (61)..(61): /note="Nucleotide may be methylated to form 5-methylcytosine"
ccagtggcagaggctttgcaaggacgggctccaggtagtgacggcaaccagccccctccacgtgtcctggctctgtcctcgcgcaaagcacctctcctctcctgtggctgtggctgccgcta

SEQ ID NO: 499 - DNA, 122 bp, Homo sapiens
  misc_feature (61)..(62): /note="This region represents a CpG dinucleotide"
  misc_feature (61)..(61): /note="Nucleotide may be methylated to form 5-methylcytosine"
gccaaacgtatctagattaatataaacgtcctgcatgtgacaatttgcccccaccagaagcgattttttaacaagattgagcaatttacctgagaaaaacatttgacagagacagaaactgt

SEQ ID NO: 500 - DNA, 122 bp, Homo sapiens
  misc_feature (61)..(62): /note="This region represents a CpG dinucleotide"
  misc_feature (61)..(61): /note="Nucleotide may be methylated to form 5-methylcytosine"
gccagggaggagcccacttggagcactgcccacccttcccacaaaacggcagctgccctccgtggtgacagctcatgtgctgtgcatgccctgaccatcacctctggtgtctcccctcactt

SEQ ID NO: 501 - DNA, 122 bp, Homo sapiens
  misc_feature (61)..(62): /note="This region represents a CpG dinucleotide"
  misc_feature (61)..(61): /note="Nucleotide may be methylated to form 5-methylcytosine"
tttccccatagacataatccagccgttagttattcaaagcagcagatgggagaaggaatccgtggaaatgtggatttattagctctcacaatgaaagaccacactggttatgctaaggatta

SEQ ID NO: 502 - DNA, 122 bp, Homo sapiens
  misc_feature (61)..(62): /note="This region represents a CpG dinucleotide"
  misc_feature (61)..(61): /note="Nucleotide may be methylated to form 5-methylcytosine"
acccagtcccgacacagactcactgtccctctaaaaccacatccacccccacctcagaaacggaagtttcactgaaggtttcttaggaatttaaaaggcaaggttccttcccagtttagcaa

SEQ ID NO: 503 - DNA, 122 bp, Homo sapiens
  misc_feature (61)..(62): /note="This region represents a CpG dinucleotide"
  misc_feature (61)..(61): /note="Nucleotide may be methylated to form 5-methylcytosine"
agaagacatggatctgcttcacccttcttaatggacatggattattctctctgggcttttcgagtgctgtgacgttttctgtcattaaccaagacattttccaccactaggtcctggatgga

SEQ ID NO: 504 - DNA, 122 bp, Homo sapiens
  misc_feature (61)..(62): /note="This region represents a CpG dinucleotide"
  misc_feature (61)..(61): /note="Nucleotide may be methylated to form 5-methylcytosine"
aacaagtagaaagatggatttttcctgttttcagatgagtttctttgagtcctatcttttcgctgtagtattgttccctctgctggtgacctggcgaatagtagcaggcacagttgtttctg

SEQ ID NO: 505 - DNA, 122 bp, Homo sapiens
  misc_feature (61)..(62): /note="This region represents a CpG dinucleotide"
  misc_feature (61)..(61): /note="Nucleotide may be methylated to form 5-methylcytosine"
ccaccaggtggcggtaaggagccatatctggctcaagcagggttaggaactgctccgggccgcgctactagacaatggtgccttacctaatacagactgatgccttgaaacagggttcaccc

SEQ ID NO: 506 - DNA, 122 bp, Homo sapiens
  misc_feature (61)..(62): /note="This region represents a CpG dinucleotide"
  misc_feature (61)..(61): /note="Nucleotide may be methylated to form 5-methylcytosine"
aactgaaaggatgtagggcagagcctttcttggaacaaatcccagagcaaatcaatgagccgtgactttttgaggaattactaaatggtcatacacacccgagttctaacaccagccctaac

SEQ ID NO: 507 - DNA, 122 bp, Homo sapiens
  misc_feature (61)..(62): /note="This region represents a CpG dinucleotide"
  misc_feature (61)..(61): /note="Nucleotide may be methylated to form 5-methylcytosine"
cccctcaggttccagcttcgttaaagctggtatttagagaaatgggaaacacattgataacgattcctaaccagtttcagtgttcacgaccggtgcgcatgcagtctctggtggaaacggac

SEQ ID NO: 508 - DNA, 122 bp, Homo sapiens
  misc_feature (61)..(62): /note="This region represents a CpG dinucleotide"
  misc_feature (61)..(61): /note="Nucleotide may be methylated to form 5-methylcytosine"
catgatgtcactattgaaaacaaagattctgcatggctctgtgtcaagtcatggtggaggcgaagggaatagaaaggagccttaaacagattacagtgtttctccagtagagggcaatccca

SEQ ID NO: 509 - DNA, 122 bp, Homo sapiens
  misc_feature (61)..(62): /note="This region represents a CpG dinucleotide"
  misc_feature (61)..(61): /note="Nucleotide may be methylated to form 5-methylcytosine"
tctttttaaatcttactgctggaagaatgatgcaattttttgtattattcactgtgaatacgtagtagatttcctggaagtaaaactcataaaagagtaggagaccccctaggcctagtttc

SEQ ID NO: 510 - DNA, 122 bp, Homo sapiens
  misc_feature (61)..(62): /note="This region represents a CpG dinucleotide"
  misc_feature (61)..(61): /note="Nucleotide may be methylated to form 5-methylcytosine"
ggatctctgtcacccactctgtgtgtgtatgctagccctgatgggcttccccctcagagccggcatgctctctctctcactccctctctcctcattcatccatccatgcatccatccaccca

SEQ ID NO: 511 - DNA, 122 bp, Homo sapiens
  misc_feature (61)..(62): /note="This region represents a CpG dinucleotide"
  misc_feature (61)..(61): /note="Nucleotide may be methylated to form 5-methylcytosine"
gagctaatttgaaactatataaatatcctggaaccgtccaacccactctattgttagcatcgtttgaccactcacacctgagttggttgttatgatgatggctgccacatgaaagagttatt

SEQ ID NO: 512 - DNA, 122 bp, Homo sapiens
  misc_feature (61)..(62): /note="This region represents a CpG dinucleotide"
  misc_feature (61)..(61): /note="Nucleotide may be methylated to form 5-methylcytosine"
ttccacctgctttgggtaaacagcatgatattgccaacagggggaggtacagacagaagacggatgaagccgattttgtttaggagtgtaatttagctgaactgacaatatattatacctta

SEQ ID NO: 513 - DNA, 122 bp, Homo sapiens
  misc_feature (61)..(62): /note="This region represents a CpG dinucleotide"
  misc_feature (61)..(61): /note="Nucleotide may be methylated to form 5-methylcytosine"
taggcctggtctaaatgctccttctgtgggcattggctgagtctgcccaatgtagctttccgctgtgacagcacagcactgggttccaatacacagttttacaattgctgcactctccctcc

SEQ ID NO: 514 - DNA, 122 bp, Homo sapiens
  misc_feature (61)..(62): /note="This region represents a CpG dinucleotide"
  misc_feature (61)..(61): /note="Nucleotide may be methylated to form 5-methylcytosine"
gtaaaagaattccgagtttgtgttattttattgaacaaacctattcagcacttggggaatcgcaggcagcattgcagactcgctggctcctggctgtgatctcacacccaaactgcaataat

SEQ ID NO: 515 - DNA, 122 bp, Homo sapiens
  misc_feature (61)..(62): /note="This region represents a CpG dinucleotide"
  misc_feature (61)..(61): /note="Nucleotide may be methylated to form 5-methylcytosine"
ctcccagatggtttggggtttgcattgtcctgggatggtcccctgcacccgacctgaagacgctactcagcattcagaatagaaagctctatctgtaatggctctgtagggggaaaaatgat

SEQ ID NO: 516 - DNA, 122 bp, Homo sapiens
  misc_feature (61)..(62): /note="This region represents a CpG dinucleotide"
  misc_feature (61)..(61): /note="Nucleotide may be methylated to form 5-methylcytosine"
ccgagtgggtaatctgactcacaggtctaggaaaagggccattcaggatagtagtattggcgggtattttacaatggagctgcagacatcagcaccagcctcctaaggacaccttgaagacg

SEQ ID NO: 517 - DNA, 122 bp, Homo sapiens
  misc_feature (61)..(62): /note="This region represents a CpG dinucleotide"
  misc_feature (61)..(61): /note="Nucleotide may be methylated to form 5-methylcytosine"
ttgtgctaaactgccaaagatggggaggagacagctacaaacataggcaagtatcccctacgctaggacaacattgccatggcaaccagggtaagggcaaccagctttgagtgtgaacctgc

SEQ ID NO: 518 - DNA, 122 bp, Homo sapiens
  misc_feature (61)..(62): /note="This region represents a CpG dinucleotide"
  misc_feature (61)..(61): /note="Nucleotide may be methylated to form 5-methylcytosine"
tcatccacggctaaattaacagccccagttgtggcacaaaggaagctttgaaggctgcaccggcttggtcctccagttgccaactggaggtaggtttaatgtaacatattcttgctgcttaa

SEQ ID NO: 519 - DNA, 122 bp, Homo sapiens
  misc_feature (61)..(62): /note="This region represents a CpG dinucleotide"
  misc_feature (61)..(61): /note="Nucleotide may be methylated to form 5-methylcytosine"
attttaaaagactttgtccttctaagcagagcgactgtattcactgactccttttgcaggcgtgtgtctagcgggcttcgtttcaggagtgtgatgttgacacaataaaagtttctgtataa

SEQ ID NO: 520 - DNA, 122 bp, Homo sapiens
  misc_feature (61)..(62): /note="This region represents a CpG dinucleotide"
  misc_feature (61)..(61): /note="Nucleotide may be methylated to form 5-methylcytosine"
tgtggcaacctcaaggtcatcattatgagcagcgcgatgaaaacaaaactttagctggtccgatcctctcataattcccgttactttactgaaagttttagtgctttaactaaaaaaaatta

SEQ ID NO: 521 - DNA, 122 bp, Homo sapiens
  misc_feature (61)..(62): /note="This region represents a CpG dinucleotide"
  misc_feature (61)..(61): /note="Nucleotide may be methylated to form 5-methylcytosine"
tcctccatcctcacccgccaaactgtgcgttgttccgctggttgatggcctgctggcctgcggcgtctgtcagtgtgtgctgttaggccgctgcattcctctcgatgtccagccgttgtgtc

SEQ ID NO: 522 - DNA, 122 bp, Homo sapiens
  misc_feature (61)..(62): /note="This region represents a CpG dinucleotide"
  misc_feature (61)..(61): /note="Nucleotide may be methylated to form 5-methylcytosine"
aactctagcatgcgaccatcttcgacagacttttcattctggctagaatagcatggcctacgtagttctctgtgttgaaatttggcagggtagctcgctagtgaccaaatagtcattttaac

SEQ ID NO: 523 - DNA, 122 bp, Homo sapiens
  misc_feature (61)..(62): /note="This region represents a CpG dinucleotide"
  misc_feature (61)..(61): /note="Nucleotide may be methylated to form 5-methylcytosine"
attagactcatttctaattaaattcaaaccagagatatgctagaagtgaagccgtccgcacggttgtgtcaggtttatcatcaaccatggaagtaactagtaactagatgagtcacttttcc

SEQ ID NO: 524 - DNA, 122 bp, Homo sapiens
  misc_feature (61)..(62): /note="This region represents a CpG dinucleotide"
  misc_feature (61)..(61): /note="Nucleotide may be methylated to form 5-methylcytosine"
aagaaacaagaagtaacatatgcttgttgcagaacacttagaaaatgcagaggccacacgcggtggctcacacctgtaatcccagcactttgggaggccaaggcgggcggatcgtgaggtca

SEQ ID NO: 525 - DNA, 122 bp, Homo sapiens
  misc_feature (61)..(62): /note="This region represents a CpG dinucleotide"
  misc_feature (61)..(61): /note="Nucleotide may be methylated to form 5-methylcytosine"
gattctaagaagactaggagtaactgggtgcagtggcgtgtgcctataggcccaggcactcgagaggctaaggtgggaggatcccatgagcttaggagttcgaggctgcagtgagctatgat

SEQ ID NO: 526 - DNA, 122 bp, Homo sapiens
  misc_feature (61)..(62): /note="This region represents a CpG dinucleotide"
  misc_feature (61)..(61): /note="Nucleotide may be methylated to form 5-methylcytosine"
cctgtcgtgcgttttccttccaaccccatgcacactcattccaacataaagtcgtggaaacgggcgtgcactgggctgttcccgccgaacaccgggcgcgactcaggctgccggaggcttcc

SEQ ID NO: 527 - DNA, 122 bp, Homo sapiens
  misc_feature (61)..(62): /note="This region represents a CpG dinucleotide"
  misc_feature (61)..(61): /note="Nucleotide may be methylated to form 5-methylcytosine"
cggtccctgctagggacgctgcgctctccgagtgcgagttttcgccaaactgataaagcacgcagaaccgcaatccccaaactaacactgaacccggacccgcgatccccaaactgacaagg

SEQ ID NO: 528 - DNA, 122 bp, Homo sapiens
  misc_feature (61)..(62): /note="This region represents a CpG dinucleotide"
  misc_feature (61)..(61): /note="Nucleotide may be methylated to form 5-methylcytosine"
aggactcaatgtttcatatgaagcccttggtgatgaggacatagcatctgccctggaaatcgttattccaacataatattattttctagaatgccctggaaggacagaatatttaaaaatat

SEQ ID NO: 529 - DNA, 122 bp, Homo sapiens
  misc_feature (61)..(62): /note="This region represents a CpG dinucleotide"
  misc_feature (61)..(61): /note="Nucleotide may be methylated to form 5-methylcytosine"
ggggcgttggggggctggagggcaagaggttacgcgccccagctcccaccttgggtccttcgcctgcacccagtctaacctggcacctaaaggtttcgtcacccagccaaccttctagttct

SEQ ID NO: 530 - DNA, 122 bp, Homo sapiens
  misc_feature (61)..(62): /note="This region represents a CpG dinucleotide"
  misc_feature (61)..(61): /note="Nucleotide may be methylated to form 5-methylcytosine"
tcaagagtccccaggagtccaggggcgcccccgagacgggtacgctggagggcctgggcacgggggacaagagagaatacatgcctgctcgctgggagcagggaggcggtgtggcggggcag

SEQ ID NO: 531 - DNA, 122 bp, Homo sapiens
  misc_feature (61)..(62): /note="This region represents a CpG dinucleotide"
  misc_feature (61)..(61): /note="Nucleotide may be methylated to form 5-methylcytosine"
tgacctattgatgtgtgcttggccacattattagaatggccaatggaatttgagacatcgcgatgcactctgaggtcttgaaagtttgaaaggcttaacttagctctgagggcttctgtgat

SEQ ID NO: 532 - DNA, 122 bp, Homo sapiens
  misc_feature (61)..(62): /note="This region represents a CpG dinucleotide"
  misc_feature (61)..(61): /note="Nucleotide may be methylated to form 5-methylcytosine"
agaactactgagtcaagtgcaaactcccagccaggcagagagcagctgactctgtagaaccgtcccttcccgtctccctccacaccttgcctcctccaggcccaaccccattccaccagcac

SEQ ID NO: 533 - DNA, 122 bp, Homo sapiens
  misc_feature (61)..(62): /note="This region represents a CpG dinucleotide"
  misc_feature (61)..(61): /note="Nucleotide may be methylated to form 5-methylcytosine"
aagggcggagcctgtgcagtgagcgtttggccacctggtcgcacaccgagtgctcgtcagcgcgcatggcctgagcgttctgccctgacactcgctggcctctgggcgcttctgtctttgac

SEQ ID NO: 534 - DNA, 122 bp, Homo sapiens
  misc_feature (61)..(62): /note="This region represents a CpG dinucleotide"
  misc_feature (61)..(61): /note="Nucleotide may be methylated to form 5-methylcytosine"
ctcagctccaaagtcacccttcaatatctgctttgcgtaatgggcggagttccttttaagcgtcattcctttacagtgagtgcagtgttaagttttctcagtagagggcgctagaggaacac

SEQ ID NO: 535 - DNA, 122 bp, Homo sapiens
  misc_feature (61)..(62): /note="This region represents a CpG dinucleotide"
  misc_feature (61)..(61): /note="Nucleotide may be methylated to form 5-methylcytosine"
cagattgtgctcgggctggagcccctcagaagttcgccagatccctgcctcaggcttggacgcaccaacaacccggagaaccctcacccacccgcgcagaggtattttgcttggcgacactt

SEQ ID NO: 536 - DNA, 122 bp, Homo sapiens
  misc_feature (61)..(62): /note="This region represents a CpG dinucleotide"
  misc_feature (61)..(61): /note="Nucleotide may be methylated to form 5-methylcytosine"
gcaactcattccccagttctgttctccagcatttcattgtcagccacggccagggtaccccgccgcctctcacttccatcacacagccagccccaggcagactgtttttaaaaacataagcc

SEQ ID NO: 537 - DNA, 122 bp, Homo sapiens
  misc_feature (61)..(62): /note="This region represents a CpG dinucleotide"
  misc_feature (61)..(61): /note="Nucleotide may be methylated to form 5-methylcytosine"
acacagggtccccagcctgatgtgtgtgcctgcattcatgcctgtcactctgctcagctgcgtgcagacagcttatatgaaggaggactgtgtacatgtggtcagagaagaaaaaaatgctt

SEQ ID NO: 538 - DNA, 122 bp, Homo sapiens
  misc_feature (61)..(62): /note="This region represents a CpG dinucleotide"
  misc_feature (61)..(61): /note="Nucleotide may be methylated to form 5-methylcytosine"
tcagggctgccagcattcattccatggtgtggaagcagtgggaagagccaggggtgggagcgctgaatgaccggcctttgtgttccaattagatacagtcagcttgagttgttagagagaga

SEQ ID NO: 539 - DNA, 122 bp, Homo sapiens
  misc_feature (61)..(62): /note="This region represents a CpG dinucleotide"
  misc_feature (61)..(61): /note="Nucleotide may be methylated to form 5-methylcytosine"
tcaagtagcaaacttgagcccaagtcttctgattttaattcccatgctctttttaaggcacgctacccacacataccaacagggagatgcgacctgggcagtaggctgtgagatgtgatgcc

SEQ ID NO: 540 - DNA, 122 bp, Homo sapiens
  misc_feature (61)..(62): /note="This region represents a CpG dinucleotide"
  misc_feature (61)..(61): /note="Nucleotide may be methylated to form 5-methylcytosine"
actggaaaaccccttgcagttttttcaggcttccttgcgagtcagagatataaatgaccacgccccggaattccctgccagagaaatgctcctgaaaatatcagaaattactatgccaggaa

SEQ ID NO: 541 - DNA, 122 bp, Homo sapiens
  misc_feature (61)..(62): /note="This region represents a CpG dinucleotide"
  misc_feature (61)..(61): /note="Nucleotide may be methylated to form 5-methylcytosine"
gcctgagggctgcggggcgggaccgagcagggcggggcgcttaggtggcctcgggggaggcggggcttggaggctccgcccctcaggccccgcctcctccccggctagtctttggccgccgc

SEQ ID NO: 542 - DNA, 122 bp, Homo sapiens
  misc_feature (61)..(62): /note="This region represents a CpG dinucleotide"
  misc_feature (61)..(61): /note="Nucleotide may be methylated to form 5-methylcytosine"
aaaaaataatattaataaaaagaataaaatccggcgctgcgcggtgacatcagtctctgtcgttaatgcctcgcgccggctaccgtcctgcgcagtctctttctgaggacccccccccccac

SEQ ID NO: 543 - DNA, 122 bp, Homo sapiens
  misc_feature (61)..(62): /note="This region represents a CpG dinucleotide"
  misc_feature (61)..(61): /note="Nucleotide may be methylated to form 5-methylcytosine"
tttagagacatgaccttagagaataaagaaacactggctgattaaaggggatggctcaaacgtagagctgaagaaggccatgtgtcccaacatttgtactcacaggccttagaagggaaagg

SEQ ID NO: 544 - DNA, 122 bp, Homo sapiens
  misc_feature (61)..(62): /note="This region represents a CpG dinucleotide"
  misc_feature (61)..(61): /note="Nucleotide may be methylated to form 5-methylcytosine"
aagacggtgaaggtgattcttgaatgtttgttttctgtgttgcatcatgtttgtacaacacggtaatatatttggaccttgattaaataatgtaagaggggaatttgatcaaaaaataaaat

SEQ ID NO: 545 - DNA, 122 bp, Homo sapiens
  misc_feature (61)..(62): /note="This region represents a CpG dinucleotide"
  misc_feature (61)..(61): /note="Nucleotide may be methylated to form 5-methylcytosine"
cctgccgcagctccgccggtcactcaggcagaacggggtatgcaaatggcctggagaggccgaggccgaacactgcgcccattgtcccgggcgctcaaagcgccgagcagctgcgcagactt

SEQ ID NO: 546 - DNA, 122 bp, Homo sapiens
  misc_feature (61)..(62): /note="This region represents a CpG dinucleotide"
  misc_feature (61)..(61): /note="Nucleotide may be methylated to form 5-methylcytosine"
cctgctccatagcaaagagggagaaaaggagggtgcagcgagggagagggggagcagagccgtgactctgcagccggcctctgtgggtgagcagccggcctccagctgccctttccggttcc

SEQ ID NO: 547 - DNA, 122 bp, Homo sapiens
  misc_feature (61)..(62): /note="This region represents a CpG dinucleotide"
  misc_feature (61)..(61): /note="Nucleotide may be methylated to form 5-methylcytosine"
ctgccccgccccccagcagtggagatccagcatgcaagagctgcagtggccctcaggggtcgtcgactccatccagctcccaacataacaggagaggggagggcaggccacagctccccaca

SEQ ID NO: 548 - DNA, 122 bp, Homo sapiens
  misc_feature (61)..(62): /note="This region represents a CpG dinucleotide"
  misc_feature (61)..(61): /note="Nucleotide may be methylated to form 5-methylcytosine"
aatgaggaaactgaggcacaagagaggttacctaaattcctgagggttgcatgactaatacgtggtgaagccagggttcaaacgccagcatctcacagtgttactgttataagacagttgcc

SEQ ID NO: 549 - DNA, 122 bp, Homo sapiens
  misc_feature (61)..(62): /note="This region represents a CpG dinucleotide"
  misc_feature (61)..(61): /note="Nucleotide may be methylated to form 5-methylcytosine"
ctcacctaatggagctaatgagagcaccttacccactgggttgctaatgaggatggcaggcggtaataattcctgtggaatccctagaacagtgcccggcgcatgcgaagaaccacgtaaat

SEQ ID NO: 550 - DNA, 122 bp, Homo sapiens
  misc_feature (61)..(62): /note="This region represents a CpG dinucleotide"
  misc_feature (61)..(61): /note="Nucleotide may be methylated to form 5-methylcytosine"
gagaagatgctcacttcatctatggttaccccaagaaggggcacggccactcttacaccacggctgaagagtaagttcaaaaccagacccagcagggcttccagtttgccgtttgctgacac

SEQ ID NO: 551 - DNA, 122 bp, Homo sapiens
  misc_feature (61)..(62): /note="This region represents a CpG dinucleotide"
  misc_feature (61)..(61): /note="Nucleotide may be methylated to form 5-methylcytosine"
tccggggtgctagccgctaggcggctagtgatggatagctgggcttgagccccgccaggccgccgagtccaccctggcgtccgggggctggcaggccggccctccacaaacagcggcctccc

SEQ ID NO: 552 - DNA, 122 bp, Homo sapiens
  misc_feature (61)..(62): /note="This region represents a CpG dinucleotide"
  misc_feature (61)..(61): /note="Nucleotide may be methylated to form 5-methylcytosine"
gggttcttaagatgaccacggttcctgttttcccacagccctctgtcaagtcttcaccgacgggcagacagcacagttcacatttcagtcacggcactggcttgcccctcttgcttggcaga

SEQ ID NO: 553 - DNA, 122 bp, Homo sapiens
  misc_feature (61)..(62): /note="This region represents a CpG dinucleotide"
  misc_feature (61)..(61): /note="Nucleotide may be methylated to form 5-methylcytosine"
tgtattcgaaacatagcgagactgggtttcgctgtgttgcccaggctggtctgacctccccggctcaaagcggtccaccctcctcagcgtttcaaagtactgggattacaggcgtgagccac

SEQ ID NO: 554 - DNA, 122 bp, Homo sapiens
  misc_feature (61)..(62): /note="This region represents a CpG dinucleotide"
  misc_feature (61)..(61): /note="Nucleotide may be methylated to form 5-methylcytosine"
cactgggtaggactgaaaggcagggactaaggtgacagctgactctgccggggcggagtgcgtgtcctcccaccgtgctggcgctgaactgactgtccgctgccaagggaagtgacagccgc

SEQ ID NO: 555 - DNA, 122 bp, Homo sapiens
  misc_feature (61)..(62): /note="This region represents a CpG dinucleotide"
  misc_feature (61)..(61): /note="Nucleotide may be methylated to form 5-methylcytosine"
tctccccagactccagactctagagggcgacctcctcctgctcctgctcctggagcgcagcgagcgcacagcgtttccgcaggaatcctgagaatggcaaggcccccatacccgcggtggtt

SEQ ID NO: 556 - DNA, 122 bp, Homo sapiens
  misc_feature (61)..(62): /note="This region represents a CpG dinucleotide"
  misc_feature (61)..(61): /note="Nucleotide may be methylated to form 5-methylcytosine"
tgtgtgcttgtgcctcgccgtctcctggctatgcgtgttgggagtccctgggaaccatgacggataaagttcatctcatcagtcaggaaaattcatgccctcacacaccacccgtctgagtc

SEQ ID NO: 557 - DNA, 122 bp, Homo sapiens
  misc_feature (61)..(62): /note="This region represents a CpG dinucleotide"
  misc_feature (61)..(61): /note="Nucleotide may be methylated to form 5-methylcytosine"
gagaactcctgcacctgggtcagggtctcagccacggacaaggggcgtggctctgcagagcgaagcagcagctccacccgttcgcagggagggagggggcggaggtggcctcactgcctgag

SEQ ID NO: 558 - DNA, 122 bp, Homo sapiens
  misc_feature (61)..(62): /note="This region represents a CpG dinucleotide"
  misc_feature (61)..(61): /note="Nucleotide may be methylated to form 5-methylcytosine"
gtaggcgaacaccgcacctcgagtccatctgcgttgctgcttgagggtatggacgatgtgcgggatggaggcccagagctgttcatccctgcaaccaatgttcacgcaaccaccagggggcg

SEQ ID NO: 559 - DNA, 122 bp, Homo sapiens
  misc_feature (61)..(62): /note="This region represents a CpG dinucleotide"
  misc_feature (61)..(61): /note="Nucleotide may be methylated to form 5-methylcytosine"
actataatttgccacgtcattccatttctcttgttactaaaatggattctctgctgaggccgtgacttccaactccaaaaaaaaaaaaaaaagatcatccacagccactattcctcacaatt

SEQ ID NO: 560 - DNA, 122 bp, Homo sapiens
  misc_feature (61)..(62): /note="This region represents a CpG dinucleotide"
  misc_feature (61)..(61): /note="Nucleotide may be methylated to form 5-methylcytosine"
cctctctgaggagtgggtgccccgcccctccgtgggccgcctggtttctcttattggcagcgtctgtagtcccctggctctgtcacccgcagctattctaggcctctggttcctttcacttt

SEQ ID NO: 561 - DNA, 122 bp, Homo sapiens
  misc_feature (61)..(62): /note="This region represents a CpG dinucleotide"
  misc_feature (61)..(61): /note="Nucleotide may be methylated to form 5-methylcytosine"
atggagggctgctgtggaggaaggagcctagaacttgctagaccttcatacacaccttcccgggagcctggcctccctgcagagcagtctctgacacagaaaaggaaggaattagcataatc

SEQ ID NO: 562 - DNA, 122 bp, Homo sapiens
  misc_feature (61)..(62): /note="This region represents a CpG dinucleotide"
  misc_feature (61)..(61): /note="Nucleotide may be methylated to form 5-methylcytosine"
gtctggatctagcagttctgtttctggggccaacccccttgccggccccaattccctgcccgcagtatcctgctgcccgcctgctgcctgctcactgccagcccccgggtgccccctcccgc

SEQ ID NO: 563 - DNA, 122 bp, Homo sapiens
  misc_feature (61)..(62): /note="This region represents a CpG dinucleotide"
  misc_feature (61)..(61): /note="Nucleotide may be methylated to form 5-methylcytosine"
tggtacacggtaatttgacaattggtacatctctcagaccacaaaactgaacacaaagcacgtgaattaaaaatgattctaccataatgaataataacaacgaaagttttgattagcacaga

SEQ ID NO: 564 - DNA, 122 bp, Homo sapiens
  misc_feature (61)..(62): /note="This region represents a CpG dinucleotide"
  misc_feature (61)..(61): /note="Nucleotide may be methylated to form 5-methylcytosine"
tccccaacggtctcctccctaacaggctgtaaaataacatgaagcatggccccaaagggccgtgaatgacccctggagcaaaggactccaaaaggctctgcagagcttttggcacatctgaa

SEQ ID NO: 565 - DNA, 122 bp, Homo sapiens
  misc_feature (61)..(62): /note="This region represents a CpG dinucleotide"
  misc_feature (61)..(61): /note="Nucleotide may be methylated to form 5-methylcytosine"
tcatctccccatacccatcgagaaccctattctcctgtggcagactttaatgaatgtaaccgcagattatgtgttttctttctttggtgaacttagaggatgcataggccaggtgccaagtg

SEQ ID NO: 566 - DNA, 122 bp, Homo sapiens
  misc_feature (61)..(62): /note="This region represents a CpG dinucleotide"
  misc_feature (61)..(61): /note="Nucleotide may be methylated to form 5-methylcytosine"
atgcattcaatacacctagcctggcaaacatcatagtttatggccgggtgcagtggatcacgcctgtaatcccagcacttggaaaggctaagacaggaggatcacttgagcccaggactttg

SEQ ID NO: 567 - DNA, 122 bp, Homo sapiens
  misc_feature (61)..(62): /note="This region represents a CpG dinucleotide"
  misc_feature (61)..(61): /note="Nucleotide may be methylated to form 5-methylcytosine"
tgcctgctcaagtctgctcttgtggtcacaactctaatacttctagtcacttcacccctccgagcttcagtgttgtgaggattcagtatgaagcagcaggatattatcctgaaagagtagct

SEQ ID NO: 568 - DNA, 122 bp, Homo sapiens
  misc_feature (61)..(62): /note="This region represents a CpG dinucleotide"
  misc_feature (61)..(61): /note="Nucleotide may be methylated to form 5-methylcytosine"
accctctaagagatgaataatatggttttcttttttttagatgaagaatctgaggtttaacgggttaaataattgctcaggttcacccagctagtagtggacagaggtgggatttgaaccca

SEQ ID NO: 569 - DNA, 122 bp, Homo sapiens
  misc_feature (61)..(62): /note="This region represents a CpG dinucleotide"
  misc_feature (61)..(61): /note="Nucleotide may be methylated to form 5-methylcytosine"
agcttcactctggactgtaaaaggtggcattcttcaccagggaattcctcacccagagcacgctggggccaaattgacttaaagcttaaggctacccagtgagtcgatgctggcaccaggac

SEQ ID NO: 570 - DNA, 122 bp, Homo sapiens
  misc_feature (61)..(62): /note="This region represents a CpG dinucleotide"
  misc_feature (61)..(61): /note="Nucleotide may be methylated to form 5-methylcytosine"
aagccagctcactttatgtcctccaaactcaccctaacttctcgtttgggtctcatcccgcggggctgctgggaaataagctccgccaccacagtggttcctccgccctgtgggagtggggg

SEQ ID NO: 571 - DNA, 122 bp, Homo sapiens
  misc_feature (61)..(62): /note="This region represents a CpG dinucleotide"
  misc_feature (61)..(61): /note="Nucleotide may be methylated to form 5-methylcytosine"
acgcaagctcaggccgcagctaccaagggaacctgcctaagcgggcggcacagaagggagcgccggggacgctctggttttcagatcccctttcggaaggtgagattgtttttcataacagg

SEQ ID NO: 572 - DNA, 122 bp, Homo sapiens
  misc_feature (61)..(62): /note="This region represents a CpG dinucleotide"
  misc_feature (61)..(61): /note="Nucleotide may be methylated to form 5-methylcytosine"
cacataagattccccactctgttaaaaaaaaatgtgtttatacttggtcccctctgaaggcggacgacacccatacttttgtcccagcccaatttgctggctgggatttttctcatccttta

SEQ ID NO: 573 - DNA, 122 bp, Homo sapiens
  misc_feature (61)..(62): /note="This region represents a CpG dinucleotide"
  misc_feature (61)..(61): /note="Nucleotide may be methylated to form 5-methylcytosine"
ttgggacctgagattctcggaagccaagccttgtcctggtttctgaaacacccccaaccgcgtcccgacactgaccagccgccggaacagcctctgcagttgcgccgcgtcctcccggagcc

SEQ ID NO: 574 - DNA, 122 bp, Homo sapiens
  misc_feature (61)..(62): /note="This region represents a CpG dinucleotide"
  misc_feature (61)..(61): /note="Nucleotide may be methylated to form 5-methylcytosine"
agttcctggctagtgtgggcagaacttctgtgattaattgattgattggagacagagtttcgctcttgttgcccaggctgggtgcagtctccagatctcagctcaccgcaacctgctcagac

SEQ ID NO: 575 - DNA, 122 bp, Homo sapiens
  misc_feature (61)..(62): /note="This region represents a CpG dinucleotide"
  misc_feature (61)..(61): /note="Nucleotide may be methylated to form 5-methylcytosine"
aggaagtaagggaagtcggggtacaggaagggggagggattttctaaattgtttggtcaccgccaaagtcaagtcttcaccctatgaaatggaagatctcacattgagtaggcggagggagg

SEQ ID NO: 576 - DNA, 122 bp, Homo sapiens
  misc_feature (61)..(62): /note="This region represents a CpG dinucleotide"
  misc_feature (61)..(61): /note="Nucleotide may be methylated to form 5-methylcytosine"
cctctagtgctgatctaattaacaatctagacactgaaggattcttgtttccgtggaaaacgggtttgtctataacttgtccttggctatggcaggatacattgtttctgaaaacattacca

SEQ ID NO: 577 - DNA, 122 bp, Homo sapiens
  misc_feature (61)..(62): /note="This region represents a CpG dinucleotide"
  misc_feature (61)..(61): /note="Nucleotide may be methylated to form 5-methylcytosine"
ctcagatgattcgcccgcctcggcctcccaaagtgctgggattacaggcgtgagccaccgcgcctggccagtgatttttaaatatttcaccacaaagaaatggcaaatgtttcaggtgagga

SEQ ID NO: 578 - DNA, 122 bp, Homo sapiens
  misc_feature (61)..(62): /note="This region represents a CpG dinucleotide"
  misc_feature (61)..(61): /note="Nucleotide may be methylated to form 5-methylcytosine"
gcacgcacgcacacacacacaccggcccaggacctcagcacaaagggcgcgctgacccagcgctaacacacaagacaaattaaagaaaggggcaaatcggaggaggggctaaggcgagggtc

SEQ ID NO: 579 - DNA, 122 bp, Homo sapiens
  misc_feature (61)..(62): /note="This region represents a CpG dinucleotide"
  misc_feature (61)..(61): /note="Nucleotide may be methylated to form 5-methylcytosine"
gtggcccaggcatgaccgtgcagaatttctcgctctttagtcatcagggggactgagagacgtaccaaagtatgatgaaaataaaggcaggcagtggaaataaaatgtagcagaaaaaacct

SEQ ID NO: 580 - DNA, 122 bp, Homo sapiens
  misc_feature (61)..(62): /note="This region represents a CpG dinucleotide"
  misc_feature (61)..(61): /note="Nucleotide may be methylated to form 5-methylcytosine"
tccacttcgtcagggcctcagctctttcctggtgattcctgtgggctgatgtacccatcacggggcacagagtgggacgcctgccatgccgtcctccctgcaaaccacagccaacgtccagg

SEQ ID NO: 581 - DNA, 122 bp, Homo sapiens
  misc_feature (61)..(62): /note="This region represents a CpG dinucleotide"
  misc_feature (61)..(61): /note="Nucleotide may be methylated to form 5-methylcytosine"
caaatctgcaagcactccttgcagataaaacagctcagactgggagaggccaagagaacacggaggtcctgaagccccctgtgcttgagtcaggagcccagaggctggtgccacagctccaa

SEQ ID NO: 582 - DNA, 122 bp, Homo sapiens
  misc_feature (61)..(62): /note="This region represents a CpG dinucleotide"
  misc_feature (61)..(61): /note="Nucleotide may be methylated to form 5-methylcytosine"
ccaagtttgacatttaaatcaggtacattatgcacattttcccctccctgctgaggggcacgtgcaggaagaacagacagatcttgttgctccctgataaggtcagagaagcttagctagat

SEQ ID NO: 583 - DNA, 122 bp, Homo sapiens
  misc_feature (61)..(62): /note="This region represents a CpG dinucleotide"
  misc_feature (61)..(61): /note="Nucleotide may be methylated to form 5-methylcytosine"
acagcgaagcagaggcagaaggcagacaaaaggggctgggttggtccccgcctgtgtgaacgaaaaaatatgtcagattggaaaattgcggtaaaaaccaggcagagcacgtacgttgcccc

SEQ ID NO: 584 - DNA, 122 bp, Homo sapiens
  misc_feature (61)..(62): /note="This region represents a CpG dinucleotide"
  misc_feature (61)..(61): /note="Nucleotide may be methylated to form 5-methylcytosine"
atgcataagcaccaaggctggctagaacttacaaattcattataattatttaaagactcacgaaagtcaaaggaaatatgaagttctgggcttcatttataggatttagctcaattagtgag

SEQ ID NO: 585 - DNA, 122 bp, Homo sapiens
  misc_feature (61)..(62): /note="This region represents a CpG dinucleotide"
  misc_feature (61)..(61): /note="Nucleotide may be methylated to form 5-methylcytosine"
ctcggaacggaacggagcagagtcgtgcgtggttgagtttagataaaagccgagtgagcgcgctctgttccttaagattagtttaaggtgccttggattgctctgaagagctttgaccacct

SEQ ID NO: 586 - DNA, 122 bp, Homo sapiens
  misc_feature (61)..(62): /note="This region represents a CpG dinucleotide"
  misc_feature (61)..(61): /note="Nucleotide may be methylated to form 5-methylcytosine"
accaaccttatcaacacagacatgcattgggcacccctgactatgttgctatgttgaccacgtgtcacaggccagtatctagaaagcgatgtctctctgcctgtcatctccaccggcatgga

SEQ ID NO: 587 - DNA, 122 bp, Homo sapiens
  misc_feature (61)..(62): /note="This region represents a CpG dinucleotide"
  misc_feature (61)..(61): /note="Nucleotide may be methylated to form 5-methylcytosine"
aaaacctctagacagggaacatcagagctctcatcgcttaatcctgactgccatggatggcggggacccgcctctaagcggcaccacccatatctggatccgagttacggatgccaatgata

SEQ ID NO: 588 - DNA, 122 bp, Homo sapiens
  misc_feature (61)..(62): /note="This region represents a CpG dinucleotide"
  misc_feature (61)..(61): /note="Nucleotide may be methylated to form 5-methylcytosine"
cataaggtcagtaaactccctatttgattaatctgccctaggtcatgactctattacatacgaccagatacaaacctaactcttacatattctctatctcagttttcccctgaatgtgtctc

SEQ ID NO: 589 - DNA, 122 bp, Homo sapiens
  misc_feature (61)..(62): /note="This region represents a CpG dinucleotide"
  misc_feature (61)..(61): /note="Nucleotide may be methylated to form 5-methylcytosine"
ctacaccattaccccttggcatcacccttgtgagttacatggctaagtagaaattcagcacggtagagggtgcatgcacgtgggagcttgggcagatgagatgggcttaggttataggggaa

SEQ ID NO: 590 - DNA, 122 bp, Homo sapiens
  misc_feature (61)..(62): /note="This region represents a CpG dinucleotide"
  misc_feature (61)..(61): /note="Nucleotide may be methylated to form 5-methylcytosine"
gtcttgagctttagagaagaagtaagtgttcttgtccccattctataaactgggataccacggaccaaagaagacagatgtcttgccccaggtcatatggcaaagtcagcagcagaaacgtg

SEQ ID NO: 591 - DNA, 122 bp, Homo sapiens
  misc_feature (61)..(62): /note="This region represents a CpG dinucleotide"
  misc_feature (61)..(61): /note="Nucleotide may be methylated to form 5-methylcytosine"
aaactctacaattagctaacactctgttgttgtatattactcttgtctctctccctcactcgcacacatacatgcacacacatggtaaacttctccaggccaaagcttaggtcttttatcat

SEQ ID NO: 592 - DNA, 122 bp, Homo sapiens
  misc_feature (61)..(62): /note="This region represents a CpG dinucleotide"
  misc_feature (61)..(61): /note="Nucleotide may be methylated to form 5-methylcytosine"
atgggcctgcctggccagagtattggctccggtgaccatctgggcttcccagggagaagccgcataaggggaagtagctgaagaacaaaaacaggagtgaggagggaagagggagcaggagg

SEQ ID NO: 593 - DNA, 122 bp, Homo sapiens
  misc_feature (61)..(62): /note="This region represents a CpG dinucleotide"
  misc_feature (61)..(61): /note="Nucleotide may be methylated to form 5-methylcytosine"
atgtaatcctcccacctcagcctcccgagtagctgggactggaggcgggagccaccatgtcgggctaattggtttttctgtagagatcgggcctccctaggttgcccaggcttacttaacac

SEQ ID NO: 594 - DNA, 122 bp, Homo sapiens
  misc_feature (61)..(62): /note="This region represents a CpG dinucleotide"
  misc_feature (61)..(61): /note="Nucleotide may be methylated to form 5-methylcytosine"
gtgcctttgcgaagcggcagcgcatggagaaacagtcgctggtggccagggccagagtcgcgcaccgggtagccagaacaggcaggagcgaggaggctcccggggtgagaacggggcacccc

SEQ ID NO: 595 - DNA, 122 bp, Homo sapiens
  misc_feature (61)..(62): /note="This region represents a CpG dinucleotide"
  misc_feature (61)..(61): /note="Nucleotide may be methylated to form 5-methylcytosine"
ccctccaaagggtcccatgagtgaaaggatcagggtttgaaatgcaccaccccaagagggcgccagctccagctggtaactccacggatcacgtggttcaaccccttgcctctcctccctcc

SEQ ID NO: 596 - DNA, 122 bp, Homo sapiens
  misc_feature (61)..(62): /note="This region represents a CpG dinucleotide"
  misc_feature (61)..(61): /note="Nucleotide may be methylated to form 5-methylcytosine"
gactcatcactgacaaccgggttactgtaatcccccgcgtagacgcgacgcctgggccgccgcactatctgtaagaggagcgcacacaaaatggctgcaacattagcgcgatccctcccttt

SEQ ID NO: 597 - DNA, 122 bp, Homo sapiens
  misc_feature (61)..(62): /note="This region represents a CpG dinucleotide"
  misc_feature (61)..(61): /note="Nucleotide may be methylated to form 5-methylcytosine"
tcaaaaaacaaacacaaaaaacctgcctcaaagtaccaggaggccagagcctgtcactctcgcctcattcagtgctgtgtatggttgcaacttctgtcactcaaggcctgaggcgggagact

SEQ ID NO: 598 - DNA, 122 bp, Homo sapiens
  misc_feature (61)..(62): /note="This region represents a CpG dinucleotide"
  misc_feature (61)..(61): /note="Nucleotide may be methylated to form 5-methylcytosine"
ctggctttgcaacctcgtctgtagtggtggagtgagtgcaggtccagaaacaaaccagaccggccttgaaattctgccctaacttcagagctgtaatcctaggcaggttacttttaatactt

SEQ ID NO: 599 - DNA, 122 bp, Homo sapiens
  misc_feature (61)..(62): /note="This region represents a CpG dinucleotide"
  misc_feature (61)..(61): /note="Nucleotide may be methylated to form 5-methylcytosine"
tccaggcatccaaaggctggtggagttctctaagcagggcctgagctgtggggcccgggccgtgcttcagggctttctttccttctgtggatcagggatgcagaaagcaccttgaaactgct

SEQ ID NO: 600 - DNA, 122 bp, Homo sapiens
  misc_feature (61)..(62): /note="This region represents a CpG dinucleotide"
  misc_feature (61)..(61): /note="Nucleotide may be methylated to form 5-methylcytosine"
ggagcatgtaacttcaaggtttaaaaacgaggtggagaggatgggttttgatatgaacaacgcctggaggatttccaacatcaatgagaagtacaagtgagttatatgggtccctgtggact

SEQ ID NO: 601 - DNA, 122 bp, Homo sapiens
  misc_feature (61)..(62): /note="This region represents a CpG dinucleotide"
  misc_feature (61)..(61): /note="Nucleotide may be methylated to form 5-methylcytosine"
gctcagccctctaacacgtctcttctcttttgacctcctcagccaaaacagagtggagtacgagaaaagggtccgagcacaagccaagaagtttgcgccctcataagcagcgaccttgtggc

SEQ ID NO: 602 - DNA, 122 bp, Homo sapiens
  misc_feature (61)..(62): /note="This region represents a CpG dinucleotide"
  misc_feature (61)..(61): /note="Nucleotide may be methylated to form 5-methylcytosine"
gtagttgtgggtcacaggcaccccagccagaacacccacagtgggtagatgtgtggggaccggatgtgggtcctctcctgagagacgtgcagatggggagaggctgggcagttctcagcaca

SEQ ID NO: 603 - DNA, 122 bp, Homo sapiens
  misc_feature (61)..(62): /note="This region represents a CpG dinucleotide"
  misc_feature (61)..(61): /note="Nucleotide may be methylated to form 5-methylcytosine"
cccttcccccgcccgggcccgccggcctaagacgcgcgggaagcgctgggctcggggctgcgccgcagactctctagtccacgttcccggcagccaagggcaccagtggaatttgcttcctc

SEQ ID NO: 604 - DNA, 122 bp, Homo sapiens
  misc_feature (61)..(62): /note="This region represents a CpG dinucleotide"
  misc_feature (61)..(61): /note="Nucleotide may be methylated to form 5-methylcytosine"
gcggatgcctcacaagcttacgactccagacaggctcacccaactgcctcctccacccaacgctgcagcccactcaaggtccacgtagtccaagctgcattccttcctcgcactcccttgcc

SEQ ID NO: 605 - DNA, 122 bp, Homo sapiens
  misc_feature (61)..(62): /note="This region represents a CpG dinucleotide"
  misc_feature (61)..(61): /note="Nucleotide may be methylated to form 5-methylcytosine"
gcatatggggagagaactttgcaataggacgaatggtcccaccagaagatctgcaagcaccgcaaaggtcagatagaaaggaattttcttttataagaaggaataaacaaggctagaaagaa

SEQ ID NO: 606 - DNA, 122 bp, Homo sapiens
  misc_feature (61)..(62): /note="This region represents a CpG dinucleotide"
  misc_feature (61)..(61): /note="Nucleotide may be methylated to form 5-methylcytosine"
ggagacgaaagggcttggccacctgtggcagccatgataaaacctagggaaaacggagctcgaagtagcttattttatttattttttatttatttatttatttattaaggagtcttgctctg

SEQ ID NO: 607 - DNA, 122 bp, Homo sapiens
  misc_feature (61)..(62): /note="This region represents a CpG dinucleotide"
  misc_feature (61)..(61): /note="Nucleotide may be methylated to form 5-methylcytosine"
ccaccaattaccagtgggatctggtataaataccccagttccctgaccccttgggcggaacgactctgagacgtcggttctacactggcttccagagttcccagcatgattaaccacggaga

SEQ ID NO: 608 - DNA, 122 bp, Homo sapiens
  misc_feature (61)..(62): /note="This region represents a CpG dinucleotide"
  misc_feature (61)..(61): /note="Nucleotide may be methylated to form 5-methylcytosine"
ttcttcctgtgcctttgctttgcttatctcccaccctacacgggcctgtgagtgacaggccgaggtcagcccaggcccttctccttggggcccctttgacatcacggcagcatttaacattc

SEQ ID NO: 609 - DNA, 122 bp, Homo sapiens
  misc_feature (61)..(62): /note="This region represents a CpG dinucleotide"
  misc_feature (61)..(61): /note="Nucleotide may be methylated to form 5-methylcytosine"
tggctccattcttcccaaaagcttatttctgtctgtgaactttcctacccatgttgaggtcgtattctgtcagtggagaggaggactgagtctcttctcttttggatgcaacttgaaacctg

SEQ ID NO: 610 - DNA, 122 bp, Homo sapiens
  misc_feature (61)..(62): /note="This region represents a CpG dinucleotide"
  misc_feature (61)..(61): /note="Nucleotide may be methylated to form 5-methylcytosine"
ctccgaggggcggggctggtgcaactccaaaatggctgccgcggggagcggcgattagaacgggttccagtcgcttgggggcgttggggggctggagggcaagaggttacgcgccccagctc

SEQ ID NO: 611 - DNA, 122 bp, Homo sapiens
  misc_feature (61)..(62): /note="This region represents a CpG dinucleotide"
  misc_feature (61)..(61): /note="Nucleotide may be methylated to form 5-methylcytosine"
ccccctgttggccgcatgccgcggcctctggtgagctgggtggggatgctcctagtgccccgcctgcgtggcgccccccaggggccacccgccacggcgctcgtggtgtctgacccgcaagg

SEQ ID NO: 612 - DNA, 122 bp, Homo sapiens
  misc_feature (61)..(62): /note="This region represents a CpG dinucleotide"
  misc_feature (61)..(61): /note="Nucleotide may be methylated to form 5-methylcytosine"
ccccaggctacagagtaaaagtctgatggtaggatgtgaggtgagggaccttccttgacccggcacccacatgaggcaggactgagaacaccctgaggactgcccgggtggctggggtgctg

SEQ ID NO: 613 - DNA, 122 bp, Homo sapiens
  misc_feature (61)..(62): /note="This region represents a CpG dinucleotide"
  misc_feature (61)..(61): /note="Nucleotide may be methylated to form 5-methylcytosine"
tttctctgcttgatatagaaacccacttcctcatggttggagagaaatctgatagagaatcggaagtgggaatgaaaaaatcctgctgaggtgcaaaataaatactagggcaatttagacaa

SEQ ID NO: 614 - DNA, 122 bp, Homo sapiens
  misc_feature (61)..(62): /note="This region represents a CpG dinucleotide"
  misc_feature (61)..(61): /note="Nucleotide may be methylated to form 5-methylcytosine"
aacataaaaagagccctatcctggtgggttctgctggtccagttctctgcaaagtaaaaacgagtatatccatgtctgccaacccttgtatctctgagagagatgcagatgcactcacagtg

SEQ ID NO: 615 - DNA, 122 bp, Homo sapiens
  misc_feature (61)..(62): /note="This region represents a CpG dinucleotide"
  misc_feature (61)..(61): /note="Nucleotide may be methylated to form 5-methylcytosine"
ggagcatataatttaaatttatagacaaacacacaagaaaaattaatattttgtctgaaacgtattggaatttatctaaaacctgaatatctgcagagtcgcatggtggcgctgcaggataa

SEQ ID NO: 616 - DNA, 122 bp, Homo sapiens
  misc_feature (61)..(62): /note="This region represents a CpG dinucleotide"
  misc_feature (61)..(61): /note="Nucleotide may be methylated to form 5-methylcytosine"
actgcaagctggggtgaatcagcttgtttacaacttctaaattttttaaaccaaaagaaacgacagaacaaaagtttcgtgaacttctggggttgggtttgtcagtctggctgtatgctgag

SEQ ID NO: 617 - DNA, 122 bp, Homo sapiens
  misc_feature (61)..(62): /note="This region represents a CpG dinucleotide"
  misc_feature (61)..(61): /note="Nucleotide may be methylated to form 5-methylcytosine"
cagcatcatctccttgccatgctccaggtgtctgagcagccacctagtgcagtgacccatcggggcttcccttgtggcctccgcggtccagaacctctcccaggtgtgatggatcctccaag

SEQ ID NO: 618 - DNA, 122 bp, Homo sapiens
  misc_feature (61)..(62): /note="This region represents a CpG dinucleotide"
  misc_feature (61)..(61): /note="Nucleotide may be methylated to form 5-methylcytosine"
ccccatccccacctctccgggtcccgccccctgggcgactgttggggtagtgagtgacagcggaggacggggggaggcagggacccagccctcacgtgcccctccttcccttgtctgcagcc

SEQ ID NO: 619 - DNA, 122 bp, Homo sapiens
  misc_feature (61)..(62): /note="This region represents a CpG dinucleotide"
  misc_feature (61)..(61): /note="Nucleotide may be methylated to form 5-methylcytosine"
tccaaagggttggcaaaaaagataaactctgaggcagccctgctgggttctaatccacatcgtgtgagactaagaaataattacacatcctttatgtcttcctttgtcatctcctgtaaaat

SEQ ID NO: 620 - DNA, 122 bp, Homo sapiens
  misc_feature (61)..(62): /note="This region represents a CpG dinucleotide"
  misc_feature (61)..(61): /note="Nucleotide may be methylated to form 5-methylcytosine"
atcacctcccaccagcccccacctcttacattggagattacaatttgacatgagatttggcgggggatacatatctaaactatactacacggcatgtgttcaccgggctattccatccacac

SEQ ID NO: 621 - DNA, 122 bp, Homo sapiens
  misc_feature (61)..(62): /note="This region represents a CpG dinucleotide"
  misc_feature (61)..(61): /note="Nucleotide may be methylated to form 5-methylcytosine"
agtaaaacggcaaaacagattttattcagaaaaactactgcagtaagaggagagagacctcggtacagaactgctccactgcgaatacaaagaaaagtaggaattgatggcgggggagccgg

SEQ ID NO: 622 - DNA, 122 bp, Homo sapiens
  misc_feature (61)..(62): /note="This region represents a CpG dinucleotide"
  misc_feature (61)..(61): /note="Nucleotide may be methylated to form 5-methylcytosine"
ctccctcaaggcaataggttattcttacagcacaactcatctgttcctgcgttcagcacacggttactaggcacctgctatgcacccagcactgccctagagcctgggacatagcagtgaac

SEQ ID NO: 623 - DNA, 122 bp, Homo sapiens
  misc_feature (61)..(62): /note="This region represents a CpG dinucleotide"
  misc_feature (61)..(61): /note="Nucleotide may be methylated to form 5-methylcytosine"
actggaggaaggcacagaaagagaaagggcttggaagtagaaagagacattacttacctgcggtggagaccccaagaagatacagccactgctacagaagaaacagatgcacaggccaatga

SEQ ID NO: 624 - DNA, 122 bp, Homo sapiens
  misc_feature (61)..(62): /note="This region represents a CpG dinucleotide"
  misc_feature (61)..(61): /note="Nucleotide may be methylated to form 5-methylcytosine"
tctaggtgtctagagcctagtgcttgaggaaaatttaaaaagtcaacctgtttattctcacgcttccgggcaaggctgtaccaattagccaaactccattctggaagcggagcaaagagtcc

SEQ ID NO: 625 - DNA, 122 bp, Homo sapiens
  misc_feature (61)..(62): /note="This region represents a CpG dinucleotide"
  misc_feature (61)..(61): /note="Nucleotide may be methylated to form 5-methylcytosine"
agcattgaggccttctgcaatggccaccggatacccactttattcagacaatgataatatcgttgagctatggtaagatcatttcctttggaacaaaatgaaaagctttcagtgttcacaat

SEQ ID NO: 626 - DNA, 122 bp, Homo sapiens
  misc_feature (61)..(62): /note="This region represents a CpG dinucleotide"
  misc_feature (61)..(61): /note="Nucleotide may be methylated to form 5-methylcytosine"
caagcacttccgcattggatggcaggtcaaaggtcacattcttagagccactcttagagtcgtagttcatcgagaaggcagcgaagctggccattacgcaggctgtcccgttgccctttttc

SEQ ID NO: 627 - DNA, 122 bp, Homo sapiens
  misc_feature (61)..(62): /note="This region represents a CpG dinucleotide"
  misc_feature (61)..(61): /note="Nucleotide may be methylated to form 5-methylcytosine"
attacctgtatttcatttgtaataactcttttcctttaagaaatggatttgctaaaaattcgaggtatccaacaaccaaacaggctactttgtgacctagtgagagccctgccttaggaggt

SEQ ID NO: 628 - DNA, 122 bp, Homo sapiens
  misc_feature (61)..(62): /note="This region represents a CpG dinucleotide"
  misc_feature (61)..(61): /note="Nucleotide may be methylated to form 5-methylcytosine"
tatttaatgagatacctgcattcactcaccccctctcccgcaaccaccccttcagcaagtcgcgctccacccaattaggaggggctttaggctgggcctaaaaagttgggccaagaccccac

SEQ ID NO: 629 - DNA, 122 bp, Homo sapiens
  misc_feature (61)..(62): /note="This region represents a CpG dinucleotide"
  misc_feature (61)..(61): /note="Nucleotide may be methylated to form 5-methylcytosine"
cgtcccttccaccttccctggttcattggcttggagccatgagcgcggccagtggctccgcggctcccggagggacgctgggggtttgccctgggagtagggtgcaggaggttccacggacg

SEQ ID NO: 630 - DNA, 122 bp, Homo sapiens
  misc_feature (61)..(62): /note="This region represents a CpG dinucleotide"
  misc_feature (61)..(61): /note="Nucleotide may be methylated to form 5-methylcytosine"
agtcaaatctcttgacaaacaggtgacatcagaacttgatgtgcactttcctctctattgcgtttccttgaccacagtgattcttggccaaaaggagtcaagaatgggggcggtgagaaatg

SEQ ID NO: 631 - DNA, 122 bp, Homo sapiens
  misc_feature (61)..(62): /note="This region represents a CpG dinucleotide"
  misc_feature (61)..(61): /note="Nucleotide may be methylated to form 5-methylcytosine"
ttaatgtagcagtttgacaaatactttaacatttgccaaacccaacttcctcaatacttgcgggtaaggagaaacagaggcactcattcactactggtaggagtgaggagtggtactcttga

SEQ ID NO: 632 - DNA, 122 bp, Homo sapiens
  misc_feature (61)..(62): /note="This region represents a CpG dinucleotide"
  misc_feature (61)..(61): /note="Nucleotide may be methylated to form 5-methylcytosine"
agctcgctagccggggcgcgggctgcctccttgttctggtgtgatccgaatgtaacggagcggactttgggatccagaaccccggactgaggttgtgcttggcttgaggggcgggctggtag

SEQ ID NO: 633 - DNA, 122 bp, Homo sapiens
  misc_feature (61)..(62): /note="This region represents a CpG dinucleotide"
  misc_feature (61)..(61): /note="Nucleotide may be methylated to form 5-methylcytosine"
caatacttgagttctgttgggtaagtatccacaggggaatctctccatgctcggtggctgcgatgcaggcaacagctgtaaagaaaatgctttgttatgtaaagggaagaacaggcaacctt

SEQ ID NO: 634 - DNA, 122 bp, Homo sapiens
  misc_feature (61)..(62): /note="This region represents a CpG dinucleotide"
  misc_feature (61)..(61): /note="Nucleotide may be methylated to form 5-methylcytosine"
tctaggtccgaggctagccccctgttgagaactgatttaagacttgaggtgtgcctcggtcgatcggaagcttgctcttggctgaaagctgaagctaagtctggtccttgataaaggagagg

SEQ ID NO: 635 - DNA, 122 bp, Homo sapiens
  misc_feature (61)..(62): /note="This region represents a CpG dinucleotide"
  misc_feature (61)..(61): /note="Nucleotide may be methylated to form 5-methylcytosine"
ttggcaaggccccagaaccaactgagtttctgggatcgagtctcaggcactctttgttctcgtttaagcttggttgatgcataccaggccctggtaccacgcccatggcctgatgctggccc

SEQ ID NO: 636 - DNA, 122 bp, Homo sapiens
  misc_feature (61)..(62): /note="This region represents a CpG dinucleotide"
  misc_feature (61)..(61): /note="Nucleotide may be methylated to form 5-methylcytosine"
cccatttatctgtgcatgtggccgacaacgacctgatggccgtgctgagcacctgggcagcgaggacaggcctttcatgtaccagcctcacctgggaaccagcaggcagtactgtgcccgtc

SEQ ID NO: 637 - DNA, 122 bp, Homo sapiens
  misc_feature (61)..(62): /note="This region represents a CpG dinucleotide"
  misc_feature (61)..(61): /note="Nucleotide may be methylated to form 5-methylcytosine"
ctcactaaagaaaatgaacataactatggatagtctgtggccagccagaggaatggcttgcgatttggagagataaagaaaggattcatagaagtggaacttgcctttattggggcctcagt

SEQ ID NO: 638 - DNA, 122 bp, Homo sapiens
  misc_feature (61)..(62): /note="This region represents a CpG dinucleotide"
  misc_feature (61)..(61): /note="Nucleotide may be methylated to form 5-methylcytosine"
ttttttccaactccacatgcctgtctagacttcaagctttattacgaataaagagaaaatcggctggatggcataaaaaatatttcaggcagattaacacatgatttacctcttcttgaaca

SEQ ID NO: 639 - DNA, 122 bp, Homo sapiens
  misc_feature (61)..(62): /note="This region represents a CpG dinucleotide"
  misc_feature (61)..(61): /note="Nucleotide may be methylated to form 5-methylcytosine"
gttctgccttgtattccctttgtctgcactaagctgcaactttgaatgcacatggggtggcgaggaaggaagaagagtaagaaaacaggaaaaacgaagtaggatagagagagcagcctctt

SEQ ID NO: 640 - DNA, 122 bp, Homo sapiens
  misc_feature (61)..(62): /note="This region represents a CpG dinucleotide"
  misc_feature (61)..(61): /note="Nucleotide may be methylated to form 5-methylcytosine"
aggctcttccctgggaaaaccattctggggtaatgttctgctccttccctcctcagtcaccgcaggacctgggaggggaagctgagaaacacaaggcatgtgaggggaagtcagagaggaca

SEQ ID NO: 641 - DNA, 122 bp, Homo sapiens
  misc_feature (61)..(62): /note="This region represents a CpG dinucleotide"
  misc_feature (61)..(61): /note="Nucleotide may be methylated to form 5-methylcytosine"
agctcacacaagcatctgatacaaagcagtgtagcatctgaggacaaaagacaatgagagcgtgacatcatgaagatcaaggaaagagacaatttcacgaaagcatgtgcaggcaacagtat

SEQ ID NO: 642 - DNA, 122 bp, Homo sapiens
  misc_feature (61)..(62): /note="This region represents a CpG dinucleotide"
  misc_feature (61)..(61): /note="Nucleotide may be methylated to form 5-methylcytosine"
actgtttacccatctgacatcactgtttgccagctattagcattatttaattagctccttcgacaaaccaagtcaatgtcaggagctgtttctgtgacttaaaacacaacctacaccagccc

SEQ ID NO: 643 - DNA, 122 bp, Homo sapiens
  misc_feature (61)..(62): /note="This region represents a CpG dinucleotide"
  misc_feature (61)..(61): /note="Nucleotide may be methylated to form 5-methylcytosine"
atggcaggcacatcattctgtttcaaaagaagtgtcgctgggctctgcctcaatgccttccggcaggtggccaggaccagcagaccacttgctcgtcactaggctctgtttgttttctttgt

SEQ ID NO: 644 - DNA, 122 bp, Homo sapiens
  misc_feature (61)..(62): /note="This region represents a CpG dinucleotide"
  misc_feature (61)..(61): /note="Nucleotide may be methylated to form 5-methylcytosine"
ctgacacaacccaaccagcctggtgttgcaccacagggctcacacctcagatcaagacaacgggggcccagccacagcccactgacgagggcatgcagggcgtccaggatgcagggcagaga

SEQ ID NO: 645 - DNA, 122 bp, Homo sapiens
  misc_feature (61)..(62): /note="This region represents a CpG dinucleotide"
  misc_feature (61)..(61): /note="Nucleotide may be methylated to form 5-methylcytosine"
gaccctgcctgtgctttgttacttcctgaagccgatactacccttgattcttcctcaagccgccttggtcctgttggggaaccaaaagtcttgatcatggaaatgataacctatatgttttt

SEQ ID NO: 646 - DNA, 122 bp, Homo sapiens
  misc_feature (61)..(62): /note="This region represents a CpG dinucleotide"
  misc_feature (61)..(61): /note="Nucleotide may be methylated to form 5-methylcytosine"
cttatcggggagacactcaaatatgacaccctgataaacaaacctacacaaacaaacacacgtacattcatcttggaacaaccctcccggctcagtgctcataaaacacacagatacccaag

SEQ ID NO: 647 - DNA, 122 bp, Homo sapiens
  misc_feature (61)..(62): /note="This region represents a CpG dinucleotide"
  misc_feature (61)..(61): /note="Nucleotide may be methylated to form 5-methylcytosine"
cccagctgcttggaaccaggtcatctggggagtgtgtgggaatcccgctggcctggcccacgtgttcctgccaggggattccattatggtattgataacagtattattagccaatggtgacc

SEQ ID NO: 648 - DNA, 122 bp, Homo sapiens
  misc_feature (61)..(62): /note="This region represents a CpG dinucleotide"
  misc_feature (61)..(61): /note="Nucleotide may be methylated to form 5-methylcytosine"
aggaaggatagagttttttgtgttcctgtttactctgtcatcagcatttgcgttctaacccgcatctcttttgtggcttacattcgtgttttgctgtactaggaagtaaagggaagcacacg

SEQ ID NO: 649 - DNA, 122 bp, Homo sapiens
  misc_feature (61)..(62): /note="This region represents a CpG dinucleotide"
  misc_feature (61)..(61): /note="Nucleotide may be methylated to form 5-methylcytosine"
tgaatttaatgacaattatttatgctctacttcctaaacaatgatatatgcctctacctgcgattttcaggaaaaaatgcagatgtctcaggaatctctgagttggacaagataagcttttc

SEQ ID NO: 650 - DNA, 122 bp, Homo sapiens
  misc_feature (61)..(62): /note="This region represents a CpG dinucleotide"
  misc_feature (61)..(61): /note="Nucleotide may be methylated to form 5-methylcytosine"
cctgtcccgtctgccaaccaaggtgcaaggtagctgtccatggtcctggacctgtaagaccgtatttttttttttttttttttttaaaccacttcattgaaggatgatgggcaagtaaaaag

SEQ ID NO: 651 - DNA, 122 bp, Homo sapiens
  misc_feature (61)..(62): /note="This region represents a CpG dinucleotide"
  misc_feature (61)..(61): /note="Nucleotide may be methylated to form 5-methylcytosine"
ccagctgttcagcaaagcccctgtgatccagatgaagagtcactggtagagtccatgtgccgttagcctcatagttttgcacatgctatttcatctgcttaaaatattcttgtcaatttcct

SEQ ID NO: 652 - DNA, 122 bp, Homo sapiens
  misc_feature (61)..(62): /note="This region represents a CpG dinucleotide"
  misc_feature (61)..(61): /note="Nucleotide may be methylated to form 5-methylcytosine"
gtctcagtgcctttcaaacaaagggataagaatgagttgttaggctgctgtgtgcatagtcgcatagtcttatcataagacaaagtttaggaactgaaggttgtcgtttagcattcaactca

SEQ ID NO: 653 - DNA, 122 bp, Homo sapiens
  misc_feature (61)..(62): /note="This region represents a CpG dinucleotide"
  misc_feature (61)..(61): /note="Nucleotide may be methylated to form 5-methylcytosine"
agccaggcaatgtaaaagcaacacaaactcaggattcccaagtgttataattcaaccatacgaatttgtcctacattgaaatcatgcacacacatacctgtacacacagaaatttattttca

SEQ ID NO: 654 - DNA, 122 bp, Homo sapiens
  misc_feature (61)..(62): /note="This region represents a CpG dinucleotide"
  misc_feature (61)..(61): /note="Nucleotide may be methylated to form 5-methylcytosine"
tttacttcctgagacagactcatgggggatcggggctcaggtgcacctggatgtgaaagccgggaaggcctccctcactcccacacagagcccgtggattcgtctgctctctgggtgctggg

SEQ ID NO: 655 - DNA, 122 bp, Homo sapiens
  misc_feature (61)..(62): /note="This region represents a CpG dinucleotide"
  misc_feature (61)..(61): /note="Nucleotide may be methylated to form 5-methylcytosine"
ccgctgcctgcgcgaggggggcaggtcccgggcgggccgcgggctgggggtggtgctgcccggagggcgggcgtctagggccggagggtggagctgggggttcgggggtgtacccgggggcg

SEQ ID NO: 656 - DNA, 122 bp, Homo sapiens
  misc_feature (61)..(62): /note="This region represents a CpG dinucleotide"
  misc_feature (61)..(61): /note="Nucleotide may be methylated to form 5-methylcytosine"
ccctacctgtccaccaaaatcaaatcaaaggcctttttcctcaaggaagtttccacattacgcaacagccaaccatgtcaagagctgatttgcaggctgagctcagtcacattagggacttc

SEQ ID NO: 657 - DNA, 122 bp, Homo sapiens
  misc_feature (61)..(62): /note="This region represents a CpG dinucleotide"
  misc_feature (61)..(61): /note="Nucleotide may be methylated to form 5-methylcytosine"
gttgttaacatgcagttgccttggatgcagtagctttggcttgagaccagcaacatcacacgtgaacctctcctttgtcaacacaccaaagctttttgaagtgaccgtcatgatcctgatgg

SEQ ID NO: 658 - DNA, 122 bp, Homo sapiens
  misc_feature (61)..(62): /note="This region represents a CpG dinucleotide"
  misc_feature (61)..(61): /note="Nucleotide may be methylated to form 5-methylcytosine"
tcctccaccctacaaatcctttgctttctgaaatgggtggctgtgcttgctcatccttcacgttatgctgacccctagaggcagtacagtgcagctcttcagtgctgagcccaggaccttga

SEQ ID NO: 659 - DNA, 122 bp, Homo sapiens
  misc_feature (61)..(62): /note="This region represents a CpG dinucleotide"
  misc_feature (61)..(61): /note="Nucleotide may be methylated to form 5-methylcytosine"
cccagaatctaacctggtcttgagtcatatttggtgtgctctgatttccaggcgagtccacgcaccacagacttgcctttctgcggtggtgaagaatccccctgatgactgtggtaccccac

SEQ ID NO: 660 - DNA, 122 bp, Homo sapiens
  misc_feature (61)..(62): /note="This region represents a CpG dinucleotide"
  misc_feature (61)..(61): /note="Nucleotide may be methylated to form 5-methylcytosine"
aacttctctcattcttaacctactcattaggtagctccctcagaggcctggagcacagcccgggcgtttcggaagagcttgatggttacctttcattccccgtttcccaattgtgtttttct

SEQ ID NO: 661 - DNA, 122 bp, Homo sapiens
  misc_feature (61)..(62): /note="This region represents a CpG dinucleotide"
  misc_feature (61)..(61): /note="Nucleotide may be methylated to form 5-methylcytosine"
cctggctacagagcacgagattccctctcaaacaaaagaaaagaaaaaaacagaaacaaacggaagcagaaggaagtaaataataaagatcagagcagaaataaagactagaaaagatcaat

SEQ ID NO: 662 - DNA, 122 bp, Homo sapiens
  misc_feature (61)..(62): /note="This region represents a CpG dinucleotide"
  misc_feature (61)..(61): /note="Nucleotide may be methylated to form 5-methylcytosine"
tcccattttgctccttccaactgtaaagagagaagacagagaataggtgcctagtccagtcggggaggggaaatcaaacaagctgaagtaaattgccatgggaaaggacagtcaagctttgg

SEQ ID NO: 663 - DNA, 122 bp, Homo sapiens
  misc_feature (61)..(62): /note="This region represents a CpG dinucleotide"
  misc_feature (61)..(61): /note="Nucleotide may be methylated to form 5-methylcytosine"
ccgtcggtccctctgcgccccggcccggcctcctgcaccgccaccgccgcagctcccccacggacggaagtgagtttactgaaattttcaagccacagaaagaacaaaagaagtaatatcca

SEQ ID NO: 664 - DNA, 122 bp, Homo sapiens
  misc_feature (61)..(62): /note="This region represents a CpG dinucleotide"
  misc_feature (61)..(61): /note="Nucleotide may be methylated to form 5-methylcytosine"
caggtggatttacatctaatatgttacaatcctgatgtaaatccccaggaggaagcctggcgttagccacccttactctgcacagtgctatccttgctgttgctttcatctctggcaggagt

SEQ ID NO: 665 - DNA, 122 bp, Homo sapiens
  misc_feature (61)..(62): /note="This region represents a CpG dinucleotide"
  misc_feature (61)..(61): /note="Nucleotide may be methylated to form 5-methylcytosine"
cgtagttccacccctcagccccagtgtttgttatttttcgggttcagcttgcttttgccccgtctccgtcgacgcaatcgccaccagtcaatggggtggtcgttttgagggacaagtggtaa

SEQ ID NO: 666 - DNA, 122 bp, Homo sapiens
  misc_feature (61)..(62): /note="This region represents a CpG dinucleotide"
  misc_feature (61)..(61): /note="Nucleotide may be methylated to form 5-methylcytosine"
tttacacccagtaagttgaacacaaaccggaggacagcatttctcatgtgggaagtacagcgggaatgttacagaaacgtgcctgtgaaagttaactaactgtggaccaagcagcattgggc

SEQ ID NO: 667 - DNA, 122 bp, Homo sapiens
  misc_feature (61)..(62): /note="This region represents a CpG dinucleotide"
  misc_feature (61)..(61): /note="Nucleotide may be methylated to form 5-methylcytosine"
agaatatttgaagcaaaaatgaccacaaacttccaaaacctggaaaaattaacacatcaacgctcagacaactctaacttggataaactccaagaaatgcaaacttagacaaatcatagttg

SEQ ID NO: 668 - DNA, 122 bp, Homo sapiens
  misc_feature (61)..(62): /note="This region represents a CpG dinucleotide"
  misc_feature (61)..(61): /note="Nucleotide may be methylated to form 5-methylcytosine"
tggaagggtgggtggcactgttttggtaattgtctcttttctgcatttcactctccacatcggaaatacactccccatataccatgaacaaccaaaagggaaattctgaaacctgttcacat

SEQ ID NO: 669 - DNA, 122 bp, Homo sapiens
  misc_feature (61)..(62): /note="This region represents a CpG dinucleotide"
  misc_feature (61)..(61): /note="Nucleotide may be methylated to form 5-methylcytosine"
cgtcatccggaaggctgccataagcctgcgtttcgcagagctgcgctgaggctcccgtgtcgcggccgtccggccggcgcgctgatgtggctgcaaacctgggtatcagatcagccgccgtg

SEQ ID NO: 670 - DNA, 122 bp, Homo sapiens
  misc_feature (61)..(62): /note="This region represents a CpG dinucleotide"
  misc_feature (61)..(61): /note="Nucleotide may be methylated to form 5-methylcytosine"
ctgtaccggactctcctggtgacagttttagtggctgcatatgtttgcagaagaaggaagcgtggtaacttggcaaacagctccaaacgctcctggcttgctgccacaggattgtccttgag

SEQ ID NO: 671 - DNA, 122 bp, Homo sapiens
  misc_feature (61)..(62): /note="This region represents a CpG dinucleotide"
  misc_feature (61)..(61): /note="Nucleotide may be methylated to form 5-methylcytosine"
tcccgtcagtgaggccaggcccccaggtgccactggagtcagaggagggcagctggcgtgcgccaagcagccactaggagccacttcatgccaatgctccacttcctgcacgccacagtcac

SEQ ID NO: 672 - DNA, 122 bp, Homo sapiens
  misc_feature (61)..(62): /note="This region represents a CpG dinucleotide"
  misc_feature (61)..(61): /note="Nucleotide may be methylated to form 5-methylcytosine"
gttctcatttatttcccaacgtgtctctttcctggatgagtcaggtttcctttctgaagacgccgagctcaataaattaagcagactgagaggtgacttcagtgcttgtcctcatcatgcag

SEQ ID NO: 673 - DNA, 122 bp, Homo sapiens
  misc_feature (61)..(62): /note="This region represents a CpG dinucleotide"
  misc_feature (61)..(61): /note="Nucleotide may be methylated to form 5-methylcytosine"
ctaatgtgttcttatcatgtgcttcttgaatgagcagttttctcttcgggcatcttggagcgttctgttacagacttcctttgaacaacgggacatgaaataaaacctcgatactttttact

SEQ ID NO: 674 - DNA, 122 bp, Homo sapiens
  misc_feature (61)..(62): /note="This region represents a CpG dinucleotide"
  misc_feature (61)..(61): /note="Nucleotide may be methylated to form 5-methylcytosine"
ctggcttcatgttactgtgtgccagtccctttagcaggactgggggtacagccaggaagacgaggccctgccctctggaaggtatgttctagatgagagaccaataataaacgcaccaacac

SEQ ID NO: 675 - DNA, 122 bp, Homo sapiens
  misc_feature (61)..(62): /note="This region represents a CpG dinucleotide"
  misc_feature (61)..(61): /note="Nucleotide may be methylated to form 5-methylcytosine"
aacgttgttctatggtgtgtgcgtgtttttaatgttaaaatcagtggttagattaaaaaacgttatcagatttgaaagtggtgaggagtacaaagattaaccctgcacattccacatttgaa

SEQ ID NO: 676 - DNA, 122 bp, Homo sapiens
  misc_feature (61)..(62): /note="This region represents a CpG dinucleotide"
  misc_feature (61)..(61): /note="Nucleotide may be methylated to form 5-methylcytosine"
caccagtgaagacccaagacagcacaaaaggccagctagcagagaaacatgattgttcaccgtccatctctgggacaacctaggtccttcttgcctttctgtcctcctcagttgacagagtc

SEQ ID NO: 677 - DNA, 122 bp, Homo sapiens
  misc_feature (61)..(62): /note="This region represents a CpG dinucleotide"
  misc_feature (61)..(61): /note="Nucleotide may be methylated to form 5-methylcytosine"
gcacatttgatgtttctaaattgcctttcctctcatccccagacttaagtaaatccatgtcggggaggcagaaacttgaagcacaactaacagaaaataatatcgtgaaagaggtgagggac

SEQ ID NO: 678 - DNA, 122 bp, Homo sapiens
  misc_feature (61)..(62): /note="This region represents a CpG dinucleotide"
  misc_feature (61)..(61): /note="Nucleotide may be methylated to form 5-methylcytosine"
tggctaaaccattacaatgcagtcaatttcgaaataagtgaatcccagcttaggcttcctcgtccaaacagtaactaaatttaatttttttgcaatcagtggcatatgtttgcatctgtcta

SEQ ID NO: 679 - DNA, 122 bp, Homo sapiens
  misc_feature (61)..(62): /note="This region represents a CpG dinucleotide"
  misc_feature (61)..(61): /note="Nucleotide may be methylated to form 5-methylcytosine"
atggcttctccatgctaatcgccctatagaacaaggagaaaaggaaaggtgggcccttcacggtatatattttgctctttgattggaacgaaatgaactcagtgtaacgtccaggctgttgt

SEQ ID NO: 680 - DNA, 122 bp, Homo sapiens
  misc_feature (61)..(62): /note="This region represents a CpG dinucleotide"
  misc_feature (61)..(61): /note="Nucleotide may be methylated to form 5-methylcytosine"
attgttgacatgaatgcgccctctaggtttctgccttagtttcagtaatggcagtgatcccggcatcccatttgcagccctctcaagcgatgctgccatactcatttattccttcattatca

SEQ ID NO: 681 - DNA, 122 bp, Homo sapiens
  misc_feature (61)..(62): /note="This region represents a CpG dinucleotide"
  misc_feature (61)..(61): /note="Nucleotide may be methylated to form 5-methylcytosine"
agggatgtggctgatttaggaggtttagcatgtgcctgccagtctagaagtggaaccaaacgcatgttcgctgcttgcggagtctaattaacaagagcgaggtctggtagaaagaaagtgac

SEQ ID NO: 682 - DNA, 122 bp, Homo sapiens
  misc_feature (61)..(62): /note="This region represents a CpG dinucleotide"
  misc_feature (61)..(61): /note="Nucleotide may be methylated to form 5-methylcytosine"
agaaagataatccattaatccattttgatcactaattctgttctgagcttttgtgctttccgtaattaaaggtaatttgcttaagtatctgacatctccattacaaaatgctctccagttcc

SEQ ID NO: 683 - DNA, 122 bp, Homo sapiens
  misc_feature (61)..(62): /note="This region represents a CpG dinucleotide"
  misc_feature (61)..(61): /note="Nucleotide may be methylated to form 5-methylcytosine"
ctgtcagcacatttgccactgaggcctgatgggaatgtgtgtgactacacagcaacaaaacggattcaccagccacatggggaaaccagcctcattacttcagagtcacgtcacgtggtctc

SEQ ID NO: 684 - DNA, 122 bp, Homo sapiens
  misc_feature (61)..(62): /note="This region represents a CpG dinucleotide"
  misc_feature (61)..(61): /note="Nucleotide may be methylated to form 5-methylcytosine"
agtgcccgggccgtggcggggggcatggatttgttgcagggtctgcagtactgagaacagcgtagaaccagtggcgatgggaggaaggggaccggtagagcggggctgggtaagcctccatc

SEQ ID NO: 685 - DNA, 122 bp, Homo sapiens
  misc_feature (61)..(62): /note="This region represents a CpG dinucleotide"
  misc_feature (61)..(61): /note="Nucleotide may be methylated to form 5-methylcytosine"
tgaaggcttcggatgggaagtttgcgttggagtccaacacccgacaggaaccccagttaacgcctccgcatggccaggggcagagttcttgacacctgtagcttaatcaacgcaggtggaga

SEQ ID NO: 686 - DNA, 122 bp, Homo sapiens
  misc_feature (61)..(62): /note="This region represents a CpG dinucleotide"
  misc_feature (61)..(61): /note="Nucleotide may be methylated to form 5-methylcytosine"
tctggacgtgcttcccagaggagacgtaggtgccatagaagaactcccaagtatgagggtcgacaggcattaaacaagtaatactgagggtgaatcggggtgggcgtcctggaggaagggct

SEQ ID NO: 687 - DNA, 122 bp, Homo sapiens
  misc_feature (61)..(62): /note="This region represents a CpG dinucleotide"
  misc_feature (61)..(61): /note="Nucleotide may be methylated to form 5-methylcytosine"
cgggcggcaggaaataaacacgatgttctcaggcttttcccggtgggcgcgtggaggccccggcagcagatcctaacactcggcttcctctccacagctccgggccttgggatcgattgtgt

SEQ ID NO: 688 - DNA, 122 bp, Homo sapiens
  misc_feature (61)..(62): /note="This region represents a CpG dinucleotide"
  misc_feature (61)..(61): /note="Nucleotide may be methylated to form 5-methylcytosine"
caggctggacaagtgaggctggcactgcgatgtgatcaaagacacaggagtaatgctcggcggcttcggtccaaggacctgtgatgagcaccttgaccccaccctgcagacagaagtcagag

SEQ ID NO: 689 - DNA, 122 bp, Homo sapiens
  misc_feature (61)..(62): /note="This region represents a CpG dinucleotide"
  misc_feature (61)..(61): /note="Nucleotide may be methylated to form 5-methylcytosine"
ttggcgtgaacgtggcgtttgtgggagtgtcactgagatggcccgtgctgccgcccaccccgcctcggagcctctgggagcagcagtgccactgtgcatggcgtgggctgagccttggtgtg

SEQ ID NO: 690 - DNA, 122 bp, Homo sapiens
  misc_feature (61)..(62): /note="This region represents a CpG dinucleotide"
  misc_feature (61)..(61): /note="Nucleotide may be methylated to form 5-methylcytosine"
tgttttcttcattccttataactccttcccctaatattatatgtaacttgagctgttcctcggaaccaaaagagcctgacgaaaacactctaaatggccccagattgttttttttttttttt

SEQ ID NO: 691 - DNA, 122 bp, Homo sapiens
  misc_feature (61)..(62): /note="This region represents a CpG dinucleotide"
  misc_feature (61)..(61): /note="Nucleotide may be methylated to form 5-methylcytosine"
catggaactttagaatgagtcaggacaagtcttagataactttgctcagcctctctccttcgtgtgacatccctagtagaacaaggtacacctacctctacttggaaacttctggtgatggg

SEQ ID NO: 692 - DNA, 122 bp, Homo sapiens
  misc_feature (61)..(62): /note="This region represents a CpG dinucleotide"
  misc_feature (61)..(61): /note="Nucleotide may be methylated to form 5-methylcytosine"
gactcaagctgatttccctaccaaccctctgcctctcttgctctttcatttttattgcctcggtaaaattggtggctgaaagaacagaacagaacacaatgtactggcttctgcagcccacg

SEQ ID NO: 693 - DNA, 122 bp, Homo sapiens
  misc_feature (61)..(62): /note="This region represents a CpG dinucleotide"
  misc_feature (61)..(61): /note="Nucleotide may be methylated to form 5-methylcytosine"
tcagcctcacactgccaggttgccctaggggagattccacaagggcgcattccctcgccacgcacatgcgcaggcacgcacatccgtgtgcacgcactcacccacaaccagggcttcagatg

SEQ ID NO: 694 - DNA, 122 bp, Homo sapiens
  misc_feature (61)..(62): /note="This region represents a CpG dinucleotide"
  misc_feature (61)..(61): /note="Nucleotide may be methylated to form 5-methylcytosine"
aagtcctagattcattccttcctttctctctttttctctcccttttaaagagggaccagacgttgttttatttcttggttatcaggacagaaaaattttgaacatgtacgtatatctttcgc

SEQ ID NO: 695 - DNA, 122 bp, Homo sapiens
  misc_feature (61)..(62): /note="This region represents a CpG dinucleotide"
  misc_feature (61)..(61): /note="Nucleotide may be methylated to form 5-methylcytosine"
gtgcgtggttattctgagctgccttcctgctgcgcgcgtcaggaatttgttgcatttcgtcgcttgcagggtcctgttgtgcggaggtgccacagtttggccgtaccctcatctgttgatgg

SEQ ID NO: 696 - DNA, 122 bp, Homo sapiens
  misc_feature (61)..(62): /note="This region represents a CpG dinucleotide"
  misc_feature (61)..(61): /note="Nucleotide may be methylated to form 5-methylcytosine"
tgaggaaggagcccgtgcctcttcatgtcatgcttatgactcagggcaccaacacttcaacgtctcaaactaaaatgtccttaacatttcaaaattccagcatttccattttcttcagtaaa

SEQ ID NO: 697 - DNA, 122 bp, Homo sapiens
  misc_feature (61)..(62): /note="This region represents a CpG dinucleotide"
  misc_feature (61)..(61): /note="Nucleotide may be methylated to form 5-methylcytosine"
cctgccttttccttacaattaccctgttcctgttgggaacatacacagagatgtgagtggcgccccctagggctgcacagaccatgtgcatggaccaggtccccagcccctagattgcactc

SEQ ID NO: 698 - DNA, 122 bp, Homo sapiens
  misc_feature (61)..(62): /note="This region represents a CpG dinucleotide"
  misc_feature (61)..(61): /note="Nucleotide may be methylated to form 5-methylcytosine"
gctctttgagccgctgtccaggtctgcaggtcctcgttcagggacatgaaatctccttgtcgtaggcggacttaaagtgtccttcgaggaagctcctgtccggagccaccacccagccagac

SEQ ID NO: 699 - DNA, 122 bp, Homo sapiens
  misc_feature (61)..(62): /note="This region represents a CpG dinucleotide"
  misc_feature (61)..(61): /note="Nucleotide may be methylated to form 5-methylcytosine"
tctgtatgtgtccctaaatacagcaatgaggcacagtgagcactgagactgaagtttcctcgtctcctagtgcagccccattactggatgagtgctggcacactgtaggcactcaatagata

SEQ ID NO: 700 - DNA, 122 bp, Homo sapiens
  misc_feature (61)..(62): /note="This region represents a CpG dinucleotide"
  misc_feature (61)..(61): /note="Nucleotide may be methylated to form 5-methylcytosine"
ttgaaaaaactggatccagatctctcttctgaaggaactagtaatacatgattagcagcacgggtgactttttaactatgcccttcaaaatccaatcattgaaaacttattgaattaaaagg

SEQ ID NO: 701 - DNA, 122 bp, Homo sapiens
  misc_feature (61)..(62): /note="This region represents a CpG dinucleotide"
  misc_feature (61)..(61): /note="Nucleotide may be methylated to form 5-methylcytosine"
gacgttcttctcttgggcaggaagaccttgccagcatccatgctatgtgtgtttcaggagcggagggcaggttcaattagctgcggcaagtcaggtctcggagaggtcgtgggaggcccctc

SEQ ID NO: 702 - DNA, 122 bp, Homo sapiens
  misc_feature (61)..(62): /note="This region represents a CpG dinucleotide"
  misc_feature (61)..(61): /note="Nucleotide may be methylated to form 5-methylcytosine"
cggggctgtcttcccgcggagcgtgctgggggcgggtcgcgccgggccgggccgctagtgcgcatgggcgggcgtcctcggctctaactgccgccactttccacacgctgggagggccgtta

SEQ ID NO: 703 - DNA, 122 bp, Homo sapiens
  misc_feature (61)..(62): /note="This region represents a CpG dinucleotide"
  misc_feature (61)..(61): /note="Nucleotide may be methylated to form 5-methylcytosine"
ggggccacagtggtgtgagcaggaagaggctggcaggtgggaagggaagtgggagaaagtcgtgcagaaaatgccttccgaacgctgatgcacagggtttaaactgctgggattttactcaa

SEQ ID NO: 704 - DNA, 122 bp, Homo sapiens
  misc_feature (61)..(62): /note="This region represents a CpG dinucleotide"
  misc_feature (61)..(61): /note="Nucleotide may be methylated to form 5-methylcytosine"
gaatgacaatgggagagtggctttgccctgggatcaccaactaaagcctcaacactgaggcgatgaagttatgacaaaaagcacagctttggctgggcttatgataaaactcaactagaata

SEQ ID NO: 705 - DNA, 122 bp, Homo sapiens
  misc_feature (61)..(62): /note="This region represents a CpG dinucleotide"
  misc_feature (61)..(61): /note="Nucleotide may be methylated to form 5-methylcytosine"
tggcctcgtctccattttacatgaactgttgcataaataaacacagagtacctgaaacaacggaggtgatcattctgcctaccgagtgttggccaggccaagcttggagtgttgctcttatt

SEQ ID NO: 706 - DNA, 122 bp, Homo sapiens
  misc_feature (61)..(62): /note="This region represents a CpG dinucleotide"
  misc_feature (61)..(61): /note="Nucleotide may be methylated to form 5-methylcytosine"
agtgactcggctcacaaatgctgagctgaggcgtgttcttgactgtgcaccccaagccctcggccttggcctttcccaggtgggtgcctgttgaggcttctgtgtgccatttggagaagtgg

SEQ ID NO: 707 - DNA, 122 bp, Homo sapiens
  misc_feature (61)..(62): /note="This region represents a CpG dinucleotide"
  misc_feature (61)..(61): /note="Nucleotide may be methylated to form 5-methylcytosine"
cttagttattatgcactggtccccaagagcaatttctgcgctgctgttgcaaaaattcatcgtaatgaaataaacgtaaaaggggaaaatgtgttatgaagtgttggagggtgctttgctca

SEQ ID NO: 708 - DNA, 122 bp, Homo sapiens
  misc_feature (61)..(62): /note="This region represents a CpG dinucleotide"
  misc_feature (61)..(61): /note="Nucleotide may be methylated to form 5-methylcytosine"
ttcactttacagacttgtgctttctttctttcttgcaggagatccaagaaccatctctctcgggactgcatcaggaaccctttcatgtaacaataatggtagaagcacctgggatttgggaa

SEQ ID NO: 709 - DNA, 122 bp, Homo sapiens
  misc_feature (61)..(62): /note="This region represents a CpG dinucleotide"
  misc_feature (61)..(61): /note="Nucleotide may be methylated to form 5-methylcytosine"
tgtgttattccacactgtttaaaaaaaaaaaaaaaatgagctccagctcctggatgcacacgacacagatgcatctcacagacatcatgctgagtgaaagaaggcagacacgaaatacatgc

SEQ ID NO: 710 - DNA, 122 bp, Homo sapiens
  misc_feature (61)..(62): /note="This region represents a CpG dinucleotide"
  misc_feature (61)..(61): /note="Nucleotide may be methylated to form 5-methylcytosine"
catttgttgtgaacgattctgagtactccatgagtcaatggctcctgatacaaacggaagcgctgatgttgcctcccacccactcagcagggggatggccggggggcctccatcctcgcatg

SEQ ID NO: 711 - DNA, 122 bp, Homo sapiens
  misc_feature (61)..(62): /note="This region represents a CpG dinucleotide"
  misc_feature (61)..(61): /note="Nucleotide may be methylated to form 5-methylcytosine"
aatacagaacatcccaagacactcaaataatgcctttgctctgttcctttagtttccagccgacaggggcttccctccccttctctgttcccagaaagcagttcaaacaagtgtaggttttc

SEQ ID NO: 712 - DNA, 122 bp, Homo sapiens
  misc_feature (61)..(62): /note="This region represents a CpG dinucleotide"
  misc_feature (61)..(61): /note="Nucleotide may be methylated to form 5-methylcytosine"
gatgagtgagaaagagaattaacatagaaataaagagtttactacttacaaaggtatatacgccaaaggaaaagaaacacaggagttaagttgtcctggtcctagttataaaggcgcaaact

SEQ ID NO: 713 - DNA, 122 bp, Homo sapiens
  misc_feature (61)..(62): /note="This region represents a CpG dinucleotide"
  misc_feature (61)..(61): /note="Nucleotide may be methylated to form 5-methylcytosine"
ctccagctccaagctttggggtttccaaaattctgggggcttgtctccctgtcccccccccgccccaagtttccctccgtcgctggcgctgtccggtgccttcggtcgctcgggccgccccc

SEQ ID NO: 714 - DNA, 122 bp, Homo sapiens
  misc_feature (61)..(62): /note="This region represents a CpG dinucleotide"
  misc_feature (61)..(61): /note="Nucleotide may be methylated to form 5-methylcytosine"
cgtcttggaggatttatctctagtgatacaggccagcagtatgtggccttttcttgaacccgtcagaactgtgacttttctttgaactcttggctgcttggtgctactgaccttgttgctca

SEQ ID NO: 715 - DNA, 122 bp, Homo sapiens
  misc_feature (61)..(62): /note="This region represents a CpG dinucleotide"
  misc_feature (61)..(61): /note="Nucleotide may be methylated to form 5-methylcytosine"
agcagacaggtcctgggcggggctggttatttctgcagtactgggaggttagaaagcctacgggccgctctgtgcttgagacctatagtcataggtttcaggaaacttctcaggtcaccaaa

SEQ ID NO: 716 - DNA, 122 bp, Homo sapiens
  misc_feature (61)..(62): /note="This region represents a CpG dinucleotide"
  misc_feature (61)..(61): /note="Nucleotide may be methylated to form 5-methylcytosine"
cacccattgcctactggtttatccgtttttctgagctgcagaagagctgggatgattcagcgtcttggggtggggtggagaggagacccaggacaggcagctattgggagcttaatggtaga

SEQ ID NO: 717 - DNA, 122 bp, Homo sapiens
  misc_feature (61)..(62): /note="This region represents a CpG dinucleotide"
  misc_feature (61)..(61): /note="Nucleotide may be methylated to form 5-methylcytosine"
aggctccaccctctcagcaattatcttaccatggataataaagcttagcatgaaacctcccgcccaagctgtgtgctggggaagggcctgcatggaggctctctcgtgggagaggagttgca

SEQ ID NO: 718 - DNA, 122 bp, Homo sapiens
  misc_feature (61)..(62): /note="This region represents a CpG dinucleotide"
  misc_feature (61)..(61): /note="Nucleotide may be methylated to form 5-methylcytosine"
ctgaatatttcagaagcattcttacctgaaagtccggacacatcagatttaggcagatgtcgagcttttaagacaaccacagttagagtgtttgtggtggactgatagcagagagagatcag

SEQ ID NO: 719 - DNA, 122 bp, Homo sapiens
  misc_feature (61)..(62): /note="This region represents a CpG dinucleotide"
  misc_feature (61)..(61): /note="Nucleotide may be methylated to form 5-methylcytosine"
gttcgtgtggtgtgacatctgcctcggtgtttctgttttccttgcacaacacaggtgattcgacctcccctttcaagcattcctgccgccttgggctggaccccgtgggcggaggcactctt

SEQ ID NO: 720 - DNA, 122 bp, Homo sapiens
  misc_feature (61)..(62): /note="This region represents a CpG dinucleotide"
  misc_feature (61)..(61): /note="Nucleotide may be methylated to form 5-methylcytosine"
ttcctgttgaggtcaggttggggattggccaccccagcttcgttgcacacacatggattccgaaagggaaaaactgatatttcaagcaagacaaatggaaaatgttctctagagaaagagga

SEQ ID NO: 721 - DNA, 122 bp, Homo sapiens
  misc_feature (61)..(62): /note="This region represents a CpG dinucleotide"
  misc_feature (61)..(61): /note="Nucleotide may be methylated to form 5-methylcytosine"
cggcggctctgggagaagtgacctgaggagtctgcagatcccagcccgggacggaggcgccgcgagaggagctactaagccctccaagccgccctttccctcttgcctccccagcccagttc

SEQ ID NO: 722 - DNA, 122 bp, Homo sapiens
  misc_feature (61)..(62): /note="This region represents a CpG dinucleotide"
  misc_feature (61)..(61): /note="Nucleotide may be methylated to form 5-methylcytosine"
gtgagtggagggagaaactgctgattcgggggccttcagacatggccgatttcacagcagcgaaaataggtcactaatgacacgtggcaatgagccaataaactgtggccaggagctccgaa

SEQ ID NO: 723 - DNA, 122 bp, Homo sapiens
  misc_feature (61)..(62): /note="This region represents a CpG dinucleotide"
  misc_feature (61)..(61): /note="Nucleotide may be methylated to form 5-methylcytosine"
agagggtagcctcggatccatcaataatttagttttactctatcaacatcagtggagagacgagtacctctaaggatcctgtcaggacagtcctgcattttgctcaaatgctgtctagagat

SEQ ID NO: 724 - DNA, 122 bp, Homo sapiens
  misc_feature (61)..(62): /note="This region represents a CpG dinucleotide"
  misc_feature (61)..(61): /note="Nucleotide may be methylated to form 5-methylcytosine"
gcgtggcgctgcgcgggagggacccgcagacggcagagggtccgcggggagcgggcggggcgttgagagcgcgcacacagacacccaaaaaacacacaaacaagcggcccctgtgccgcggc

SEQ ID NO: 725 - DNA, 122 bp, Homo sapiens
  misc_feature (61)..(62): /note="This region represents a CpG dinucleotide"
  misc_feature (61)..(61): /note="Nucleotide may be methylated to form 5-methylcytosine"
tggagacctgcataatgaaattcagacagtggtgactaacttcccctcagaacaaggtggcgtgggctggcagggagcatgcttctcccaaggctggggcataaagctgagtgagaggaagc

SEQ ID NO: 726 - DNA, 122 bp, Homo sapiens
  misc_feature (61)..(62): /note="This region represents a CpG dinucleotide"
  misc_feature (61)..(61): /note="Nucleotide may be methylated to form 5-methylcytosine"
taccatttgcttcctaccattcaaaattacctggaacttatatttatttccagtgttcttcgttttattttcctaattttaactggaagtttgaaccaaaagctagggcaatacaaacacag

SEQ ID NO: 727 - DNA, 122 bp, Homo sapiens
  misc_feature (61)..(62): /note="This region represents a CpG dinucleotide"
  misc_feature (61)..(61): /note="Nucleotide may be methylated to form 5-methylcytosine"
acaataatgaaatcacctaaggacacattactcagaacatatcctcatcattaagtggcccgtgacggtacaatcaattcttgttatttgtggttatgttctatacagtcactgtggacaat

SEQ ID NO: 728 - DNA, 122 bp, Homo sapiens
  misc_feature (61)..(62): /note="This region represents a CpG dinucleotide"
  misc_feature (61)..(61): /note="Nucleotide may be methylated to form 5-methylcytosine"
tgcctcggtcctgttgataagagggaagtctgtgctgggttcctatccacaaagcccttgcggggaatgggtcccacacgccgcttctgcagacccagctcatcctgtttccggtttctatt

SEQ ID NO: 729 - DNA, 122 bp, Homo sapiens
  misc_feature (61)..(62): /note="This region represents a CpG dinucleotide"
  misc_feature (61)..(61): /note="Nucleotide may be methylated to form 5-methylcytosine"
aaaacagggccaaaaactgttaacagctgtcattcagtttagaacccattctccacctcacgctgctgtctctcaagtatactaattgataattatttctgcagcatgttgggccaggtctg

SEQ ID NO: 730 - DNA, 122 bp, Homo sapiens
  misc_feature (61)..(62): /note="This region represents a CpG dinucleotide"
  misc_feature (61)..(61): /note="Nucleotide may be methylated to form 5-methylcytosine"
tagagaggatcacagacccatctgtccttccttacagaaatgattctcttagggaaagcacgagaaagctatgcaatagggggaggtatgccaaagattttgatcacttcattcacttttat

SEQ ID NO: 731 - DNA, 122 bp, Homo sapiens
  misc_feature (61)..(62): /note="This region represents a CpG dinucleotide"
  misc_feature (61)..(61): /note="Nucleotide may be methylated to form 5-methylcytosine"
gaacggaaaaatttaaggaaagaacatgtctacatgacctgaaggcagaaacaccggcgacggaaccagcctcagaatgattttaccccaaatcactgaaacgaccccaagagtctcatagc

SEQ ID NO: 732 - DNA, 122 bp, Homo sapiens
  misc_feature (61)..(62): /note="This region represents a CpG dinucleotide"
  misc_feature (61)..(61): /note="Nucleotide may be methylated to form 5-methylcytosine"
agcaagggggtgggtcctgggagccagaaaggctgcctccgcgaggattaggggcgctttcgggattcaaatgactggaagcagctggaaacaatgtccaaagctccaaaagtaaaggatga

SEQ ID NO: 733 - DNA, 122 bp, Homo sapiens
  misc_feature (61)..(62): /note="This region represents a CpG dinucleotide"
  misc_feature (61)..(61): /note="Nucleotide may be methylated to form 5-methylcytosine"
gcctctgcaggcggttttcaaggcagccgtgtgtgcttgcatgtgaggcggcaaaaacagcgcgctgcagggccggcgcggtggctcacgcctgtaatcccagcactttgggaggcggaggc

SEQ ID NO: 734 - DNA, 122 bp, Homo sapiens
  misc_feature (61)..(62): /note="This region represents a CpG dinucleotide"
  misc_feature (61)..(61): /note="Nucleotide may be methylated to form 5-methylcytosine"
gtcaggttgtaggttaattccccaactcaaacttccccgatcaaacattgtcaggccaggcgactgttttggtttatggatgataaagtatagggccaaggtaggccaagagtagaagacag

SEQ ID NO: 735 - DNA, 122 bp, Homo sapiens
  misc_feature (61)..(62): /note="This region represents a CpG dinucleotide"
  misc_feature (61)..(61): /note="Nucleotide may be methylated to form 5-methylcytosine"
caccgctatgctgctctgccaccttgtggagggcctccaggaaggtttctgaagctgctgcgtgtgtggcaattggttacgtagcagcagaaaacaaatgcagctttctactcctccctctc

SEQ ID NO: 736 - DNA, 122 bp, Homo sapiens
  misc_feature (61)..(62): /note="This region represents a CpG dinucleotide"
  misc_feature (61)..(61): /note="Nucleotide may be methylated to form 5-methylcytosine"
acacacactcttctcggaggaactatttgtcattcaccatggagccagccccacctacaacgctgaggaacatatttacatatttcaactccattgctggctgaagcactccagaaagtgat

SEQ ID NO: 737 - DNA, 122 bp, Homo sapiens
  misc_feature (61)..(62): /note="This region represents a CpG dinucleotide"
  misc_feature (61)..(61): /note="Nucleotide may be methylated to form 5-methylcytosine"
acttgccagcttaaaacagcacatttttctcacaatttatgtggattaggaatctggacacggcttagctagatcttctgctgagtgtctcataagactgtaatgaggatgttggtcaggac

SEQ ID NO: 738 - DNA, 122 bp, Homo sapiens
  misc_feature (61)..(62): /note="This region represents a CpG dinucleotide"
  misc_feature (61)..(61): /note="Nucleotide may be methylated to form 5-methylcytosine"
cagaaaaaactgtcttttttaaagctcattcagccgggtgcaaaccgccttgctggcgggcggcacctgaaggtgacctggccttgtccccccctccatccccccagtttcctctctgtggt

SEQ ID NO: 739 - DNA, 122 bp, Homo sapiens
  misc_feature (61)..(62): /note="This region represents a CpG dinucleotide"
  misc_feature (61)..(61): /note="Nucleotide may be methylated to form 5-methylcytosine"
accaaggaagtgacttcagttgaactctgtacctgttgtgttcacttcctttgcaacatgcgtgactaatggttactccttctcttgaatgcttccagaagagtagcactcaccacctcatg

SEQ ID NO: 740 - DNA, 122 bp, Homo sapiens
  misc_feature (61)..(62): /note="This region represents a CpG dinucleotide"
  misc_feature (61)..(61): /note="Nucleotide may be methylated to form 5-methylcytosine"
tacagaaatgcattctaagctaggcgcctgtatgtcagaatcagttctgcaggtagcttccgtgctccaagtatgacatgtattgtaagggctgcatctgttttaaacccacataagccatg

SEQ ID NO: 741 - DNA, 122 bp, Homo sapiens
  misc_feature (61)..(62): /note="This region represents a CpG dinucleotide"
  misc_feature (61)..(61): /note="Nucleotide may be methylated to form 5-methylcytosine"
tgcacagaggaggccacctcataacactcctcacacgtaaagtttgacttgcactttctacgttcatggtttgaaaagattgcagtaagcattttgtaaaatgtaaattacattcttcaatt

SEQ ID NO: 742 - DNA, 122 bp, Homo sapiens
  misc_feature (61)..(62): /note="This region represents a CpG dinucleotide"
  misc_feature (61)..(61): /note="Nucleotide may be methylated to form 5-methylcytosine"
ataaccgcccaggcaggtgcagggctttgctgctggtatttggcctaccctgactaggagcgcctcctctgtggctttagtccagctgcacatctctgctggtgctggcaggggtgctcagc

SEQ ID NO: 743 - DNA, 122 bp, Homo sapiens
  misc_feature (61)..(62): /note="This region represents a CpG dinucleotide"
  misc_feature (61)..(61): /note="Nucleotide may be methylated to form 5-methylcytosine"
accagggcttgttattgtcaatagcacaagaggctaaagatggcgccatttccggtcacgcggcgccgagggaggggcggtgtcaacctcagggagtgggggtgagggaagcgctgcagccg

SEQ ID NO: 744 - DNA, 122 bp, Homo sapiens
  misc_feature (61)..(62): /note="This region represents a CpG dinucleotide"
  misc_feature (61)..(61): /note="Nucleotide may be methylated to form 5-methylcytosine"
tgggggtgccatgttaaccactgtaggctgtcctgcagagctgcctgggctgttttaggacgttgaggttccagagcagcaggaggttcccagaagacaagctgggctccagcaccaggacc

SEQ ID NO: 745 - DNA, 122 bp, Homo sapiens
  misc_feature (61)..(62): /note="This region represents a CpG dinucleotide"
  misc_feature (61)..(61): /note="Nucleotide may be methylated to form 5-methylcytosine"
tgtgtgctgagtcatatggaggtgggggcaggggatgacgctggctccttgccagacacacgtactgcccaggttgatgaacgagcctccaaaggcactacaacaggattataatttcacta

SEQ ID NO: 746 - DNA, 122 bp, Homo sapiens
  misc_feature (61)..(62): /note="This region represents a CpG dinucleotide"
  misc_feature (61)..(61): /note="Nucleotide may be methylated to form 5-methylcytosine"
gtgggtccggccagccagggctgactttagtgacaacgagagtgcccggctggccacggacgccctcttggatgggggttctgaagcctactggcgggtgctcagccaggaaggcgaggtgg

SEQ ID NO: 747 - DNA, 122 bp, Homo sapiens
  misc_feature (61)..(62): /note="This region represents a CpG dinucleotide"
  misc_feature (61)..(61): /note="Nucleotide may be methylated to form 5-methylcytosine"
acaaagcttatgtatattcttcattgtttctgacaccctaaaaatgaatactgccaaaaacgtactaagttctaaggacagattggagcaaacaatcgttagcatgcttcggactcaactct

SEQ ID NO: 748 - DNA, 122 bp, Homo sapiens
  misc_feature (61)..(62): /note="This region represents a CpG dinucleotide"
  misc_feature (61)..(61): /note="Nucleotide may be methylated to form 5-methylcytosine"
ccgaacctcggaatgcgaggcccggcggaaacaggccggtgctaactccgtgagtcaggacgaaggcgccggggaaggctggccctaaacagtggctggtgtttttggaaggaggagaaaca

SEQ ID NO: 749 - DNA, 122 bp, Homo sapiens
  misc_feature (61)..(62): /note="This region represents a CpG dinucleotide"
  misc_feature (61)..(61): /note="Nucleotide may be methylated to form 5-methylcytosine"
gaagccgaccaccaacccgtaattccccccttcattccagagtgggaaagcccagattcccgtcggttctttatgctgcagcagtggcttctcacccagtcagatacgttgcaaaaaaactg

SEQ ID NO: 750 - DNA, 122 bp, Homo sapiens
  misc_feature (61)..(62): /note="This region represents a CpG dinucleotide"
  misc_feature (61)..(61): /note="Nucleotide may be methylated to form 5-methylcytosine"
gtgaagtttttctgagacagttgttctggtgggctgcacagcaggtcttaggtagacaaccgagggggtaatgacagtaactccttgcacaagctcagtgctgttcactcgatagagcctgt

SEQ ID NO: 751 - DNA, 122 bp, Homo sapiens
  misc_feature (61)..(62): /note="This region represents a CpG dinucleotide"
  misc_feature (61)..(61): /note="Nucleotide may be methylated to form 5-methylcytosine"
cacagacacatagaaatcacttcctggcttaacacatacttggctgaattccttggtccacgtatcaccctgaatctgaaacatcctttctgcaccagccattgacccaggaactgaaacag

SEQ ID NO: 752 - DNA, 122 bp, Homo sapiens
  misc_feature (61)..(62): /note="This region represents a CpG dinucleotide"
  misc_feature (61)..(61): /note="Nucleotide may be methylated to form 5-methylcytosine"
agttcgcaaatttcttgaatatttaacaatcagcttttgcaagtgcatacatgctcacaacgtttgcttttttgtactttgttttgagggaggcaggaaatggaaacttgcaatggtattga

SEQ ID NO: 753 - DNA, 122 bp, Homo sapiens
  misc_feature (61)..(62): /note="This region represents a CpG dinucleotide"
  misc_feature (61)..(61): /note="Nucleotide may be methylated to form 5-methylcytosine"
caaatggcaccttgcaaagacactttctgtgatcacccagtttaaagagcaccccttacccgtagtcattccctgttacattatcctgctttattttttagaaaaaaatttatcatttgata

SEQ ID NO: 754 - DNA, 122 bp, Homo sapiens
  misc_feature (61)..(62): /note="This region represents a CpG dinucleotide"
  misc_feature (61)..(61): /note="Nucleotide may be methylated to form 5-methylcytosine"
tatgtaggtagtttatcctttgaagaacccagtggcttgtctcacagcccaagacagattcgagttctcaaaaactatccagcccaaaagaatacagaggaaaaagcttttcccactttctt

SEQ ID NO: 755 - DNA, 122 bp, Homo sapiens
  misc_feature (61)..(62): /note="This region represents a CpG dinucleotide"
  misc_feature (61)..(61): /note="Nucleotide may be methylated to form 5-methylcytosine"
gggtggggatgctcctagtgccccgcctgcgtggcgccccccaggggccacccgccacggcgctcgtggtgtctgacccgcaagggcgcccctagtgacagccctcccttatacctcccggg

SEQ ID NO: 756 - DNA, 122 bp, Homo sapiens
  misc_feature (61)..(62): /note="This region represents a CpG dinucleotide"
  misc_feature (61)..(61): /note="Nucleotide may be methylated to form 5-methylcytosine"
ggtgggtctcggcagttgccccgcccactcacaagcccctcttcctcccgcccacagactcgcacctccccagtggaagtggtttcctggctcgctgtccccaacccactcactggcctttc

SEQ ID NO: 757 - DNA, 122 bp, Homo sapiens
  misc_feature (61)..(62): /note="This region represents a CpG dinucleotide"
  misc_feature (61)..(61): /note="Nucleotide may be methylated to form 5-methylcytosine"
tctgtatcttttaatgtgtaaccaaaaccacaggcccaaagcaaaaactacaaacaggaacggagagtttcatgaccatagacatgggcatttgcttccaagagcaatggccctgcatgctt

SEQ ID NO: 758 - DNA, 122 bp, Homo sapiens
  misc_feature (61)..(62): /note="This region represents a CpG dinucleotide"
  misc_feature (61)..(61): /note="Nucleotide may be methylated to form 5-methylcytosine"
cccagcgccaaccccgccgagcccgacggcgccgccgagccgcccgtggtcaagcggccgcgcaagaagatgaagtggatccccaccagcaacccgcttccgcagcccttcaaggagccgct

SEQ ID NO: 759 - DNA, 122 bp, Homo sapiens
  misc_feature (61)..(62): /note="This region represents a CpG dinucleotide"
  misc_feature (61)..(61): /note="Nucleotide may be methylated to form 5-methylcytosine"
ccactggaatttaaccacttagtagtttcatttaacctgcttagtgggcctctgagtgagcgcaaaagttaaagtccttgctgggaagttatttccagttgaggaaggaaaagatggtatca

SEQ ID NO: 760 - DNA, 122 bp, Homo sapiens
  misc_feature (61)..(62): /note="This region represents a CpG dinucleotide"
  misc_feature (61)..(61): /note="Nucleotide may be methylated to form 5-methylcytosine"
gctgtggctgtggacttcagcacaaccatcaacattgctgttcaaagaaattacagtttacgtccattccaagttgtaaatgctagtctttttttttttttttccaataaaaagaccattaa

SEQ ID NO: 761 - DNA, 122 bp, Homo sapiens
  misc_feature (61)..(62): /note="This region represents a CpG dinucleotide"
  misc_feature (61)..(61): /note="Nucleotide may be methylated to form 5-methylcytosine"
ctgcaaagccaggttttccttcacggcccctcctaatgatgtttcttttcctatcattgtcgagcccttagaaccccaggatcgagggagggaaaacaagcgctcaagcactccctcgttgg

SEQ ID NO: 762 - DNA, 122 bp, Homo sapiens
  misc_feature (61)..(62): /note="This region represents a CpG dinucleotide"
  misc_feature (61)..(61): /note="Nucleotide may be methylated to form 5-methylcytosine"
ctactgcagaggcatctggccctttgatggcttttgggtaacttctgatctacagggcatcgtatcaaaatgcagactgagatttagtgggtagccagtgagcacttgctaggtgccaggca

SEQ ID NO: 763 - DNA, 122 bp, Homo sapiens
  misc_feature (61)..(62): /note="This region represents a CpG dinucleotide"
  misc_feature (61)..(61): /note="Nucleotide may be methylated to form 5-methylcytosine"
cttgctatgtcgcccacaatgacttcaagtgatcctcctgccttggcccccaccaaagtgcgtggactacaggcataagccactgcacctggcctctctcgcaattctcatagccaatctca

SEQ ID NO: 764 - DNA, 122 bp, Homo sapiens
  misc_feature (61)..(62): /note="This region represents a CpG dinucleotide"
  misc_feature (61)..(61): /note="Nucleotide may be methylated to form 5-methylcytosine"
cagcccctaggctgtggaataactctttagtagaattatgtagaaaggaatccaaacattcgatttcagagtgtgcgcttctgtgcccagtgtggcagcaattcactcagagagttgctgtg

SEQ ID NO: 765 - DNA, 122 bp, Homo sapiens
  misc_feature (61)..(62): /note="This region represents a CpG dinucleotide"
  misc_feature (61)..(61): /note="Nucleotide may be methylated to form 5-methylcytosine"
tgacctcttgatccgcccgcctcagcctcccaaagtgctgggattacaggcgtgagccaccgcgcccggcctacatcaatgtttatccagtttttgtttgtttgttttgacggagttttgct

SEQ ID NO: 766 - DNA, 122 bp, Homo sapiens
  misc_feature (61)..(62): /note="This region represents a CpG dinucleotide"
  misc_feature (61)..(61): /note="Nucleotide may be methylated to form 5-methylcytosine"
ctggcgtcagggaggtgctggggtccatcctgtggatctgggacggtttggcaggaaaaacgagagtgtgttccacgtctaggaaccagagttctactgccatctgggaaagaacctctctc

SEQ ID NO: 767 - DNA, 122 bp, Homo sapiens
  misc_feature (61)..(62): /note="This region represents a CpG dinucleotide"
  misc_feature (61)..(61): /note="Nucleotide may be methylated to form 5-methylcytosine"
ggggggctgcgggggccggaggtgctgcagagggggcctccggggcagcggtgctgggaacggggtcgcgggggcacgaggggactaagtgcccggggtgggtagggtgtggggggactcag

SEQ ID NO: 768 - DNA, 122 bp, Homo sapiens
  misc_feature (61)..(62): /note="This region represents a CpG dinucleotide"
  misc_feature (61)..(61): /note="Nucleotide may be methylated to form 5-methylcytosine"
cagtccccatctggtccaggtgacactcaccattcatctgggagggtgacagcgagtagtcgcggtcggtgtgccgcctgtctggcttcaagttgcggctctgtcggccggaaccctccagc

SEQ ID NO: 769 - DNA, 122 bp, Homo sapiens
  misc_feature (61)..(62): /note="This region represents a CpG dinucleotide"
  misc_feature (61)..(61): /note="Nucleotide may be methylated to form 5-methylcytosine"
aggaggcggcggcggaggaggcggcggcggaggaggcggcggcggcggaggcggcggcggcggaggaggactgacaatagcaacaataactggctgaaagccagctttgtaatatcctcaaa

SEQ ID NO: 770 - DNA, 122 bp, Homo sapiens
  misc_feature (61)..(62): /note="This region represents a CpG dinucleotide"
  misc_feature (61)..(61): /note="Nucleotide may be methylated to form 5-methylcytosine"
tttaagatttaaagactgccctgctaggattcagacttgtaggccgggcgcagtggcttacgtctgtaatcctaaaactctgggaggctgagacgggcggatcacctgaggtcgggagtttg

SEQ ID NO: 771 - DNA, 122 bp, Homo sapiens
  misc_feature (61)..(62): /note="This region represents a CpG dinucleotide"
  misc_feature (61)..(61): /note="Nucleotide may be methylated to form 5-methylcytosine"
agaatgaatgtgcatattcagcacactaagcactctaagagccgagagagcttcctgaaacgcgtgaaggaaaatgatcagaaaaagagggaagccaaagagaaaggtacctggattcaact

SEQ ID NO: 772 - DNA, 122 bp, Homo sapiens
  misc_feature (61)..(62): /note="This region represents a CpG dinucleotide"
  misc_feature (61)..(61): /note="Nucleotide may be methylated to form 5-methylcytosine"
cgggctatttatccaccttaccttccttcgtaaccaataaatcctcttacaaacctgaggcggcaaactaaaaggccagcggatggcctggtttgctgcggcggggaaacagtcacttcctg

SEQ ID NO: 773 - DNA, 122 bp, Homo sapiens
  misc_feature (61)..(62): /note="This region represents a CpG dinucleotide"
  misc_feature (61)..(61): /note="Nucleotide may be methylated to form 5-methylcytosine"
tggatacatgtctttggagcagatttccatccatttttactccagtcctatggtggctaccggtattgttcttgtcgcctgctattcttaagtctgcagtttgcctgtgactcaccccagga

SEQ ID NO: 774 - DNA, 122 bp, Homo sapiens
  misc_feature (61)..(62): /note="This region represents a CpG dinucleotide"
  misc_feature (61)..(61): /note="Nucleotide may be methylated to form 5-methylcytosine"
caccttcctcccttctgctgatgagatttatgactgcaaggtggagcactggggcctggacgagcctcttctgaaacactggggtaaggatgagttccaccacttcatgggtttctaataat

SEQ ID NO: 775 - DNA, 122 bp, Homo sapiens
  misc_feature (61)..(62): /note="This region represents a CpG dinucleotide"
  misc_feature (61)..(61): /note="Nucleotide may be methylated to form 5-methylcytosine"
gaggtaccccagcgcatcttgcggatcatgtgccgtctggaggagctgggccttgccgggcgctgcctcaccctgacaccgcgccctgccacagaggctgagctgctcacctgtcacaggtc

SEQ ID NO: 776 - DNA, 122 bp, Homo sapiens
  misc_feature (61)..(62): /note="This region represents a CpG dinucleotide"
  misc_feature (61)..(61): /note="Nucleotide may be methylated to form 5-methylcytosine"
gatggtcctttgagagctccacgctcctggcctcacaggcacactctgctgcttctccagcgcactctagtcatctgccagaagaagcgttcaaacacagtgaattgtatttgaacactacc

SEQ ID NO: 777 - DNA, 122 bp, Homo sapiens
  misc_feature (61)..(62): /note="This region represents a CpG dinucleotide"
  misc_feature (61)..(61): /note="Nucleotide may be methylated to form 5-methylcytosine"
aacacacacacacacacaaacacacacacacacacacacacacaggcaggacaagaggcacgattccatggagtatgaccagggtggcagcatccacagtgacatctggcaaatggccctgt

SEQ ID NO: 778 - DNA, 122 bp, Homo sapiens
  misc_feature (61)..(62): /note="This region represents a CpG dinucleotide"
  misc_feature (61)..(61): /note="Nucleotide may be methylated to form 5-methylcytosine"
gtgaacataagccttcaattcatttggataaatacctaggagtgggattgccgggttgttcgctaaggatctgtttaactgtaaaaactgccaaactgttttccaaagttgctatgtcattt

SEQ ID NO: 779 - DNA, 122 bp, Homo sapiens
  misc_feature (61)..(62): /note="This region represents a CpG dinucleotide"
  misc_feature (61)..(61): /note="Nucleotide may be methylated to form 5-methylcytosine"
cgatgcagtaatgcatttggcagctgaactgtgtactgggaaaagaaaaatatcctggagcgggtttaagtttcgcagataagaaaaatggctttatttagtgaattggaacaatacaagac

SEQ ID NO: 780 - DNA, 122 bp, Homo sapiens
  misc_feature (61)..(62): /note="This region represents a CpG dinucleotide"
  misc_feature (61)..(61): /note="Nucleotide may be methylated to form 5-methylcytosine"
catcagaacagttctcatattcttcaagcatgagacagtaaactttatgtttgggatttgcgttaggggaagtgatggtgctgtgagtcagaagttcttaaagttaaaaatatgacaaatta

SEQ ID NO: 781 - DNA, 122 bp, Homo sapiens
  misc_feature (61)..(62): /note="This region represents a CpG dinucleotide"
  misc_feature (61)..(61): /note="Nucleotide may be methylated to form 5-methylcytosine"
ccgagctgccgccatccccggacccctcgccgccctcgacggcgccggcctccagctcgtcggccgcgcgccccttgccccgccgctcctccagacccacctccaccgagcgagggcgcacc

SEQ ID NO: 782 - DNA, 122 bp, Homo sapiens
  misc_feature (61)..(62): /note="This region represents a CpG dinucleotide"
  misc_feature (61)..(61): /note="Nucleotide may be methylated to form 5-methylcytosine"
ggagggtggctgaaagatcaaacaaggtcatggatgtaaagcccctggcacagtgcctggcgtgatgcaggcagcagaaaatgctgagtcccctggaggtgaggagctaggaagggagagtg

SEQ ID NO: 783 - DNA, 122 bp, Homo sapiens
  misc_feature (61)..(62): /note="This region represents a CpG dinucleotide"
  misc_feature (61)..(61): /note="Nucleotide may be methylated to form 5-methylcytosine"
agaaagcacagccactctactcttattcagttgaaaagaatttccaggaaggtgtttctgcgattgcctcagaaaagtcagttccctttgggaatttcccttagggatcatctgtaactcca

SEQ ID NO: 784 - DNA, 122 bp, Homo sapiens
  misc_feature (61)..(62): /note="This region represents a CpG dinucleotide"
  misc_feature (61)..(61): /note="Nucleotide may be methylated to form 5-methylcytosine"
gcggagtggccgcagaggccggggtcggcctttgcgccgtggcttcgggtgttgtggaggcgcacagaggcacgttagttgatttccagtggtttttggtttcgggggtcttaggaaggtgt

SEQ ID NO: 785 - DNA, 122 bp, Homo sapiens
  misc_feature (61)..(62): /note="This region represents a CpG dinucleotide"
  misc_feature (61)..(61): /note="Nucleotide may be methylated to form 5-methylcytosine"
cttctaccaggaattcatgcattcacttaaacatttactgagggcccacagtgtgctccgcggttgctgagcaaacacgcagtttcaatgcaggatagtgagtccaaaagttcgtaacaggg

SEQ ID NO: 786 - DNA, 122 bp, Homo sapiens
  misc_feature (61)..(62): /note="This region represents a CpG dinucleotide"
  misc_feature (61)..(61): /note="Nucleotide may be methylated to form 5-methylcytosine"
gcaaagcgtgatgaccgtggggaccagagctcggactggtaccggccggaaaggccccgacgaacttaccgtacagggcagcctcccatagtcctgccctcggaaccatagcaaccgcgcag

SEQ ID NO: 787 - DNA, 122 bp, Homo sapiens
  misc_feature (61)..(62): /note="This region represents a CpG dinucleotide"
  misc_feature (61)..(61): /note="Nucleotide may be methylated to form 5-methylcytosine"
cagagaagcagcttggattcgatgggactgtagtttctggaatccgactgcaaagctgaccgctggtagagcccagcttctaacttaggaaaggcactagctctctacaaagccgccactcc

SEQ ID NO: 788 - DNA, 122 bp, Homo sapiens
  misc_feature (61)..(62): /note="This region represents a CpG dinucleotide"
  misc_feature (61)..(61): /note="Nucleotide may be methylated to form 5-methylcytosine"
tagaagtagactttatggtactctgctcagctatgttctcatttgattccaaccactacacggcagaaaaggtaaccaatattcaagaaagatttgattggaaacggtttaggcctaaagac

SEQ ID NO: 789 - DNA, 122 bp, Homo sapiens
  misc_feature (61)..(62): /note="This region represents a CpG dinucleotide"
  misc_feature (61)..(61): /note="Nucleotide may be methylated to form 5-methylcytosine"
gtccaaggccgactataccctcagctccattagcccccgaggcctccctgacaggcggggcggacaatcccagtgcagatgctctgtatcgatcgcatgctatcggttctttcaaggaacgt

SEQ ID NO: 790 - DNA, 122 bp, Homo sapiens
  misc_feature (61)..(62): /note="This region represents a CpG dinucleotide"
  misc_feature (61)..(61): /note="Nucleotide may be methylated to form 5-methylcytosine"
acctcaggcgatccacccgccttggcctcccaaagtgctgggattacaggagtgagccaccgcgcccggctaaggctgttaataccactttttgtatcagtaagatcatggctggctgtcac

SEQ ID NO: 791 - DNA, 122 bp, Homo sapiens
  misc_feature (61)..(62): /note="This region represents a CpG dinucleotide"
  misc_feature (61)..(61): /note="Nucleotide may be methylated to form 5-methylcytosine"
cacacagggagtgatggtgcaggccagtgacccgagcttgactcaagacccatgtgtgaacgctggaacctgctgatagcaaaagaggaaagcaagcacgtttgccattgtcccctgcttcc

SEQ ID NO: 792 - DNA, 122 bp, Homo sapiens
  misc_feature (61)..(62): /note="This region represents a CpG dinucleotide"
  misc_feature (61)..(61): /note="Nucleotide may be methylated to form 5-methylcytosine"
cggtccctctgcgccccggcccggcctcctgcaccgccaccgccgcagctcccccacggacggaagtgagtttactgaaattttcaagccacagaaagaacaaaagaagtaatatccattat

SEQ ID NO: 793 - DNA, 122 bp, Homo sapiens
  misc_feature (61)..(62): /note="This region represents a CpG dinucleotide"
  misc_feature (61)..(61): /note="Nucleotide may be methylated to form 5-methylcytosine"
ggccagctccaggcacactgcatggcgcttcctcaactcagaaggccccggagggtctgacgcaaaggaggaccactgcagccagtgtctgccagggcaccaagatcaaaggcagcctcacc

SEQ ID NO: 794 - DNA, 122 bp, Homo sapiens
  misc_feature (61)..(62): /note="This region represents a CpG dinucleotide"
  misc_feature (61)..(61): /note="Nucleotide may be methylated to form 5-methylcytosine"
cttcagcccagtctgttaatcaccttggcattactcacttaacgtcctgtaactgtctgacgtaaaaaaaaaaaaaaaaaaaaaaaaaaaaaaaaaaaaagtctacaaaaccactcagcctc

SEQ ID NO: 795 - DNA, 122 bp, Homo sapiens
  misc_feature (61)..(62): /note="This region represents a CpG dinucleotide"
  misc_feature (61)..(61): /note="Nucleotide may be methylated to form 5-methylcytosine"
gaaccaactgccgggagattctgattggctcagccgcgtgcccacgtgaccgaccaaaaccggccaccagggtctcccaactgcctgtcaaacgcacagccctgttgggcccccggagagga

SEQ ID NO: 796 - DNA, 122 bp, Homo sapiens
  misc_feature (61)..(62): /note="This region represents a CpG dinucleotide"
  misc_feature (61)..(61): /note="Nucleotide may be methylated to form 5-methylcytosine"
cactgcctgcctgttgaacccggggaggctcttgtctgactgaaatcactgcaggcttcccgacgatcccctgggtgtgtgtgggcaggcgcacttgccactgggcacaggtgataaagcat

SEQ ID NO: 797 - DNA, 122 bp, Homo sapiens
  misc_feature (61)..(62): /note="This region represents a CpG dinucleotide"
  misc_feature (61)..(61): /note="Nucleotide may be methylated to form 5-methylcytosine"
gacccaccggcgactacagcttggcacacgctggggtttctgcccatctgttgacacagccgaggccgccctgcgcccactccgagctcccgggccctgcgtgtcttcccacgtggaggccg

SEQ ID NO: 798 - DNA, 122 bp, Homo sapiens
  misc_feature (61)..(62): /note="This region represents a CpG dinucleotide"
  misc_feature (61)..(61): /note="Nucleotide may be methylated to form 5-methylcytosine"
ttctacaaaaccatagactcttcctcttgaaagtaagttcacctgtcaagcagctctactcgcacacgcatgacggtgaaaagtgccttaattgggttttcaagaagatagatgggaagtca

SEQ ID NO: 799 - DNA, 122 bp, Homo sapiens
  misc_feature (61)..(62): /note="This region represents a CpG dinucleotide"
  misc_feature (61)..(61): /note="Nucleotide may be methylated to form 5-methylcytosine"
gaggctgttgagcagggctgaagttggctaatgccgtgtgctgttggctttcaacaattccggtaacctagatatgagtcctaatgctttcgtctgcataagaacaatccgaaattctgggc

SEQ ID NO: 800 - DNA, 122 bp, Homo sapiens
  misc_feature (61)..(62): /note="This region represents a CpG dinucleotide"
  misc_feature (61)..(61): /note="Nucleotide may be methylated to form 5-methylcytosine"
tggggcctttttctgaccaggaagttcaggcatgtgacctggagacaagcaaatgtaccacgtgatgtgaagtgaactctcagccagccttgggcttccttagcctggggactgcatcctcc

SEQ ID NO: 801 - DNA, 122 bp, Homo sapiens
  misc_feature (61)..(62): /note="This region represents a CpG dinucleotide"
  misc_feature (61)..(61): /note="Nucleotide may be methylated to form 5-methylcytosine"
tgtccgcctgtcacgccctcaccaccctccccttccagccaccaccctttccgttccgctcgggccttcccagaagcgtcctgtgactctgggagaggtgacacctcactaaggggccgacc

SEQ ID NO: 802 - DNA, 122 bp, Homo sapiens
  misc_feature (61)..(62): /note="This region represents a CpG dinucleotide"
  misc_feature (61)..(61): /note="Nucleotide may be methylated to form 5-methylcytosine"
cactcagcgtggtgaagtaaggggaggccgagggctgcagtgaccctgccaggcttgtcacgagccattggctgctctacatgaagcagttcagaaactacaggtgaacatggaaggatacg

SEQ ID NO: 803 - DNA, 122 bp, Homo sapiens
  misc_feature (61)..(62): /note="This region represents a CpG dinucleotide"
  misc_feature (61)..(61): /note="Nucleotide may be methylated to form 5-methylcytosine"
tggccaaaataagtcatatggccaaaccctgagtcagcatgggaggggactccccaagggcgtggatacgagcagatgtgaacaaaccgggaattattacttctacaatccaccacacgaag

SEQ ID NO: 804 - DNA, 122 bp, Homo sapiens
  misc_feature (61)..(62): /note="This region represents a CpG dinucleotide"
  misc_feature (61)..(61): /note="Nucleotide may be methylated to form 5-methylcytosine"
aaagagaacttgtgagccttaagagctgcccggcgccgtcttaccaggcctcgcccggcccggccctggccctcagttccctgccagggttgggacttaagggagatcttatgacctaggaa

SEQ ID NO: 805 - DNA, 122 bp, Homo sapiens
  misc_feature (61)..(62): /note="This region represents a CpG dinucleotide"
  misc_feature (61)..(61): /note="Nucleotide may be methylated to form 5-methylcytosine"
tctgataggccccagtgtctgttagaaccaacttttcacttcttgagtatctctattgtccgtttatgttctttggcttatctttattgtttccttccttttgctttctctgaatgtaatgt

SEQ ID NO: 806 - DNA, 122 bp, Homo sapiens
  misc_feature (61)..(62): /note="This region represents a CpG dinucleotide"
  misc_feature (61)..(61): /note="Nucleotide may be methylated to form 5-methylcytosine"
tggacaggccgctgcaggttttccatgtggaggtggcagtgaaggacatcaatgacaatccgcccaggttctccagacaagaacaaagattattcattttagagtcaagaatgccagattcg

SEQ ID NO: 807 - DNA, 122 bp, Homo sapiens
  misc_feature (61)..(62): /note="This region represents a CpG dinucleotide"
  misc_feature (61)..(61): /note="Nucleotide may be methylated to form 5-methylcytosine"
tttgtaggagtctcacaggatcattcatgaagcggggagaacgggtgctgctattaagcacgttctctggttttctgtcgccatgtgcgctgtggttgtatatgctagtacatacactgcat

SEQ ID NO: 808 - DNA, 122 bp, Homo sapiens
  misc_feature (61)..(62): /note="This region represents a CpG dinucleotide"
  misc_feature (61)..(61): /note="Nucleotide may be methylated to form 5-methylcytosine"
gtgtgtcaaaatattcattcctatcacatgcagtaaaactgtattccagagccattaatacgccctgggggactgaggggatttgcagcctaagatttcagacttaaagcccgctaaggccc

SEQ ID NO: 809 - DNA, 122 bp, Homo sapiens
  misc_feature (61)..(62): /note="This region represents a CpG dinucleotide"
  misc_feature (61)..(61): /note="Nucleotide may be methylated to form 5-methylcytosine"
tttaaccatggacttttctggacttttgtctcctcatctgtaaaacaagtgattcaagaccgtgaactggaagatgtgattgggtgccgggtgtctgttcttaagagactctagaatttctg

SEQ ID NO: 810 - DNA, 122 bp, Homo sapiens
  misc_feature (61)..(62): /note="This region represents a CpG dinucleotide"
  misc_feature (61)..(61): /note="Nucleotide may be methylated to form 5-methylcytosine"
aagcatcttatgtgcttctacattgtctttatagccagctgtctgaagttctacatcatccgtcagtgatgggtcctgagtaaactcagcagtctcctctaagtaacttgtatatatccctt

SEQ ID NO: 811 - DNA, 122 bp, Homo sapiens
  misc_feature (61)..(62): /note="This region represents a CpG dinucleotide"
  misc_feature (61)..(61): /note="Nucleotide may be methylated to form 5-methylcytosine"
taactttaatcctttaaattgtccaaaaagtacagttgtgaatagaaagcaatatttatacgtatacaatgtcaatatgggctgtatgtaataaagcatacttgggcgaaatattggtgttt

SEQ ID NO: 812 - DNA, 122 bp, Homo sapiens
  misc_feature (61)..(62): /note="This region represents a CpG dinucleotide"
  misc_feature (61)..(61): /note="Nucleotide may be methylated to form 5-methylcytosine"
caccgtggtagggcacacagcggctgacttgtcctggtaaatcataagcatggtgggctccgcaggtgcctccctcctttctgtccttgagtctgaagccagcaccttctttgatgacacaa

SEQ ID NO: 813 - DNA, 122 bp, Homo sapiens
  misc_feature (61)..(62): /note="This region represents a CpG dinucleotide"
  misc_feature (61)..(61): /note="Nucleotide may be methylated to form 5-methylcytosine"
aaggcaggagactgtctctccctttctctttcagaatagccctgaaaatcagtgcaacctcggacatccatggttaaaagtcagaccctgttttggaaatggctgggaagggcggctttctg

SEQ ID NO: 814 - DNA, 122 bp, Homo sapiens
  misc_feature (61)..(62): /note="This region represents a CpG dinucleotide"
  misc_feature (61)..(61): /note="Nucleotide may be methylated to form 5-methylcytosine"
atcccagctctgccattttctaaattactctcctaaccttttatggcctgtgttctcaaccgtcaaaggggaaaaataatagtacctgtcttatagggtagttaggaacacaaaaagctctt

SEQ ID NO: 815 - DNA, 122 bp, Homo sapiens
  misc_feature (61)..(62): /note="This region represents a CpG dinucleotide"
  misc_feature (61)..(61): /note="Nucleotide may be methylated to form 5-methylcytosine"
ttattctgctctgggctgcagtgttgttagggaaaacatacgtacacaaactgacatgtgcgtgtatgtgtgcaaatgcatgtacacatacataccacagaccaacagtttcttaccagaac

SEQ ID NO: 816 - DNA, 122 bp, Homo sapiens
  misc_feature (61)..(62): /note="This region represents a CpG dinucleotide"
  misc_feature (61)..(61): /note="Nucleotide may be methylated to form 5-methylcytosine"
tttctgttgttaaccttctgaagcacttaaaacatttttttcttttttgtgatggagtctcgttctgctccccaggctggcatgcagtggtaagatcttgggcccacggcaacctctgcctc

SEQ ID NO: 817 - DNA, 122 bp, Homo sapiens
  misc_feature (61)..(62): /note="This region represents a CpG dinucleotide"
  misc_feature (61)..(61): /note="Nucleotide may be methylated to form 5-methylcytosine"
tagaaacataggatttggatgcttggttatgaccagtatgcagaacaacaaaggcaaggacgtgaaggctggggtggagagacccagagcacgtggaaaggccacatgcagtatggtattta

SEQ ID NO: 818 - DNA, 122 bp, Homo sapiens
  misc_feature (61)..(62): /note="This region represents a CpG dinucleotide"
  misc_feature (61)..(61): /note="Nucleotide may be methylated to form 5-methylcytosine"
tcttaaagtttggtggcaaatgataaacccttatcattttgtgaacacagctgccaaactcgattgattaacaggcttttgtttattctgggctggcaaatacacacacgttttaccttaag

SEQ ID NO: 819 - DNA, 122 bp, Homo sapiens
  misc_feature (61)..(62): /note="This region represents a CpG dinucleotide"
  misc_feature (61)..(61): /note="Nucleotide may be methylated to form 5-methylcytosine"
gcacagcctcttagctcagttccgtaacttaggacaaaatgagcctcacatgccactcaacgccacttttccagattctttccagcaacccaacagccacccgtttcctcactctcccaata

SEQ ID NO: 820 - DNA, 122 bp, Homo sapiens
  misc_feature (61)..(62): /note="This region represents a CpG dinucleotide"
  misc_feature (61)..(61): /note="Nucleotide may be methylated to form 5-methylcytosine"
gatgaatgtgggagacttggataccccttgacaatactgaagcaaaattgttaggagacacggagagcggagtgaaattgaaggcggtttgctctgtgaacaaaggagactttcattccagc

SEQ ID NO: 821 - DNA, 122 bp, Homo sapiens
  misc_feature (61)..(62): /note="This region represents a CpG dinucleotide"
  misc_feature (61)..(61): /note="Nucleotide may be methylated to form 5-methylcytosine"
tgtccaaatgcccctttcacccacgttggtctagtagccatctgctgaccgtatacccggcgcagaagaacaacacctgacctccattaacagtgtctgccacacctcagcaagttcagata

SEQ ID NO: 822 - DNA, 122 bp, Homo sapiens
  misc_feature (61)..(62): /note="This region represents a CpG dinucleotide"
  misc_feature (61)..(61): /note="Nucleotide may be methylated to form 5-methylcytosine"
ccggccaggcggcgcgagcgggaactacggccttggccttcttcagttctagcgtcaacccggtgctctacgtcttcaccgctggagatctgctgccccgggcaggtccccgtttcctcacg

SEQ ID NO: 823 - DNA, 122 bp, Homo sapiens
  misc_feature (61)..(62): /note="This region represents a CpG dinucleotide"
  misc_feature (61)..(61): /note="Nucleotide may be methylated to form 5-methylcytosine"
gaggtgtccctagacccccgccaaggttggtgcttgtacctgccctggagagcctggtcacgggcttgccagacccagccatacccagctctgccgcccccagccagggtggtggcagagtg

SEQ ID NO: 824 - DNA, 122 bp, Homo sapiens
  misc_feature (61)..(62): /note="This region represents a CpG dinucleotide"
  misc_feature (61)..(61): /note="Nucleotide may be methylated to form 5-methylcytosine"
ccctttctcctcctcgtcgcccgaaaacgtggaggattccggcctggactctccgtcccacgcggcacctggcccctccccagattcctgggtcccccgcccaggcaccccgcagagcccgc

SEQ ID NO: 825 - DNA, 122 bp, Homo sapiens
  misc_feature (61)..(62): /note="This region represents a CpG dinucleotide"
  misc_feature (61)..(61): /note="Nucleotide may be methylated to form 5-methylcytosine"
ccatgctccatgggaatgcttgacgactccagatatcctataattaactgcagggcttgacgggggacagagaaactccaccgcatgtttatttttacaaagaggcagccgcacagaggttg

SEQ ID NO: 826 - DNA, 122 bp, Homo sapiens
  misc_feature (61)..(62): /note="This region represents a CpG dinucleotide"
  misc_feature (61)..(61): /note="Nucleotide may be methylated to form 5-methylcytosine"
ccagctgtgggatatcaccatggtaacaggaatatacaatcaaagcaggtttccatgctacgatggcagcattactcatttaaagaatgtaatatgctgaagacaggaagaaacaatttcac

SEQ ID NO: 827 - DNA, 122 bp, Homo sapiens
  misc_feature (61)..(62): /note="This region represents a CpG dinucleotide"
  misc_feature (61)..(61): /note="Nucleotide may be methylated to form 5-methylcytosine"
caagatccatcagatctgcccctacttttaaacaggtaacacaaatgcagaacttttcaacggggtaaaggagcaacaaatatgccttaaatagccaaaggtttcatccagcagaggttaac

SEQ ID NO: 828 - DNA, 122 bp, Homo sapiens
  misc_feature (61)..(62): /note="This region represents a CpG dinucleotide"
  misc_feature (61)..(61): /note="Nucleotide may be methylated to form 5-methylcytosine"
aatgtctcaacctttcccactgctgccatcctacttgagataaggccaggaaccagccagcgtctggggcagtggttctgtgggggaatgcgaccttagtccactttacttgtcctttaact

SEQ ID NO: 829 - DNA, 122 bp, Homo sapiens
  misc_feature (61)..(62): /note="This region represents a CpG dinucleotide"
  misc_feature (61)..(61): /note="Nucleotide may be methylated to form 5-methylcytosine"
cgtggagctcccagcgaatcggttgaaaactctgaaattctctgctcgctctctgtaaaacgtgcattcacacgcacacccagaatgatgggtgctccgatatctgatcgctgggctccaca

SEQ ID NO: 830 - DNA, 122 bp, Homo sapiens
  misc_feature (61)..(62): /note="This region represents a CpG dinucleotide"
  misc_feature (61)..(61): /note="Nucleotide may be methylated to form 5-methylcytosine"
tgataaaaacattactagcttctgattattctcttgaaaactctctttctacactaattacgtaatttgagacagaatgaacaagtgactgtatctgggaggcttcctacaattagagaaga

SEQ ID NO: 831 - DNA, 122 bp, Homo sapiens
  misc_feature (61)..(62): /note="This region represents a CpG dinucleotide"
  misc_feature (61)..(61): /note="Nucleotide may be methylated to form 5-methylcytosine"
aaaacgggggccccaactgctgtcgctgtccctggtgctgactaaaccctaaagcctctgcgttgcggccttggggccattggtggtgccgagttattcttttattttctttctgttctttt

SEQ ID NO: 832 - DNA, 122 bp, Homo sapiens
  misc_feature (61)..(62): /note="This region represents a CpG dinucleotide"
  misc_feature (61)..(61): /note="Nucleotide may be methylated to form 5-methylcytosine"
gtaccagtaaaagttttgcagttcgaaaaccgcagcacactatggaataagcaagcccagcgcaaaaggcttgtgccttcagtccaccttcagtgatgggtggcaattcagtttcagaaatg

SEQ ID NO: 833 - DNA, 122 bp, Homo sapiens
  misc_feature (61)..(62): /note="This region represents a CpG dinucleotide"
  misc_feature (61)..(61): /note="Nucleotide may be methylated to form 5-methylcytosine"
cgcgggagggacccgcagacggcagagggtccgcggggagcgggcggggcgttgagagcgcgcacacagacacccaaaaaacacacaaacaagcggcccctgtgccgcggcggaacgcgctg

SEQ ID NO: 834 - DNA, 122 bp, Homo sapiens
  misc_feature (61)..(62): /note="This region represents a CpG dinucleotide"
  misc_feature (61)..(61): /note="Nucleotide may be methylated to form 5-methylcytosine"
aaaaaaaaaaaaaagacaaaaaaaaagtgctagagaaccagatttaaagcagaagcagtccggaaatcacatgcaaaactgctcccagggagaaacgcaagcccaggcacagagccccgctt

SEQ ID NO: 835 - DNA, 122 bp, Homo sapiens
  misc_feature (61)..(62): /note="This region represents a CpG dinucleotide"
  misc_feature (61)..(61): /note="Nucleotide may be methylated to form 5-methylcytosine"
tctccccaccgccaacccccaccgcaaccattctcttctctctgtccctagagaaaagcccgctacatccatttggatttatgtaaggtggattagggacacaaaggaaacaataagaccca

SEQ ID NO: 836 - DNA, 122 bp, Homo sapiens
  misc_feature (61)..(62): /note="This region represents a CpG dinucleotide"
  misc_feature (61)..(61): /note="Nucleotide may be methylated to form 5-methylcytosine"
cctgctggaggaaagcagaaagggaactggggtataaccaagcttgtccaatccgaggcccgtgggtcacatgctgctgagggaggatgactttgaatgaggcccaacacaagttcgtaaag

SEQ ID NO: 837 - DNA, 122 bp, Homo sapiens
  misc_feature (61)..(62): /note="This region represents a CpG dinucleotide"
  misc_feature (61)..(61): /note="Nucleotide may be methylated to form 5-methylcytosine"
ggacttagtgcaatgcctggcatgagggcagcctcaattacatgatcattatcactggggcgtgacttctgtcccccacccgctgagtgtctgtgagtgtctgagcgttggggcaggaagtg

SEQ ID NO: 838 - DNA, 122 bp, Homo sapiens
  misc_feature (61)..(62): /note="This region represents a CpG dinucleotide"
  misc_feature (61)..(61): /note="Nucleotide may be methylated to form 5-methylcytosine"
atcaccatcttactgaatcaccccacacttctcccttgttgccatgagtaataaactaaacgtatttgacaacaggtgtgggggttttctggttttttttgtttgttgttttgttttgtttt

SEQ ID NO: 839 - DNA, 122 bp, Homo sapiens
  misc_feature (61)..(62): /note="This region represents a CpG dinucleotide"
  misc_feature (61)..(61): /note="Nucleotide may be methylated to form 5-methylcytosine"
ggaattacagggttgtgagccaacagcaaccacatacacctttgcagtaatcagaaccagcgttctcgatgctgaaagcaaaatcaagtaaacaaggttgtgttgtggacttccttgaccca

SEQ ID NO: 840 - DNA, 122 bp, Homo sapiens
  misc_feature (61)..(62): /note="This region represents a CpG dinucleotide"
  misc_feature (61)..(61): /note="Nucleotide may be methylated to form 5-methylcytosine"
gccttaggagcagagcggaagtctcgcgagagtgactgctgcaggcagtggcggcgcgggcgcgcgcagagacggcctcgggcgcgcgcgcgcgcgcgcgcgctccccgcccccagccccgg

SEQ ID NO: 841 - DNA, 122 bp, Homo sapiens
  misc_feature (61)..(62): /note="This region represents a CpG dinucleotide"
  misc_feature (61)..(61): /note="Nucleotide may be methylated to form 5-methylcytosine"
agccaccagtaggtaacaggagctgtgtaccttatcagacacccctcctgggaatctattcgaaggaaatagttcaaaagaagaacaaagagatatatgcaaagatgctttaagcactagtc

SEQ ID NO: 842 - DNA, 122 bp, Homo sapiens
  misc_feature (61)..(62): /note="This region represents a CpG dinucleotide"
  misc_feature (61)..(61): /note="Nucleotide may be methylated to form 5-methylcytosine"
ctggtctgttcttgctcattcagaaactggttggagtaaaaagattccccttttcaagatcgccaaaagtggaactgatcgctttcgaagggactccttcaggaagaaggagaaaaattcga

SEQ ID NO: 843 - DNA, 122 bp, Homo sapiens
  misc_feature (61)..(62): /note="This region represents a CpG dinucleotide"
  misc_feature (61)..(61): /note="Nucleotide may be methylated to form 5-methylcytosine"
ataatcaaatgattggacaaccacccccacgtcagcaatgacacttcgccgcagtaaaggcgggtgctagcaacctgcttcttcactgttaaggtctacagcaaaccaatcctcttcctccg

SEQ ID NO: 844 - DNA, 122 bp, Homo sapiens
  misc_feature (61)..(62): /note="This region represents a CpG dinucleotide"
  misc_feature (61)..(61): /note="Nucleotide may be methylated to form 5-methylcytosine"
tctagaaatgagaatattagtaaaaggctacatatacctcttttttttgagacggagtctcgctctgttgccaggctagagtgaagtgaggtgatctcagctcactgctgtctcctccccgc

SEQ ID NO: 845 - DNA, 122 bp, Homo sapiens
  misc_feature (61)..(62): /note="This region represents a CpG dinucleotide"
  misc_feature (61)..(61): /note="Nucleotide may be methylated to form 5-methylcytosine"
tccagggagggaactgagaagccgcgagggacaggcccccaacggagatgctgatgaggccggcagccttccagcttccagcgccatcttccttgggagtttgggaaactcagtgcctccag

SEQ ID NO: 846 - DNA, 122 bp, Homo sapiens
  misc_feature (61)..(62): /note="This region represents a CpG dinucleotide"
  misc_feature (61)..(61): /note="Nucleotide may be methylated to form 5-methylcytosine"
cccttgccccaactcccatggccaccaggactccatctcaggaggtgttttttctcagcccggggctgccttccagcagcaagtccaagggagccatgacccgagtttcccggtcactgaca

SEQ ID NO: 847 - DNA, 122 bp, Homo sapiens
  misc_feature (61)..(62): /note="This region represents a CpG dinucleotide"
  misc_feature (61)..(61): /note="Nucleotide may be methylated to form 5-methylcytosine"
tctcttccaggaacatgctcacaggcacatccagaaataacattttaccagccatctgggcgtcccttaaccccgtccagcagacacataaaattaaccctcatgtatacctaggagtggaa

SEQ ID NO: 848 - DNA, 122 bp, Homo sapiens
  misc_feature (61)..(62): /note="This region represents a CpG dinucleotide"
  misc_feature (61)..(61): /note="Nucleotide may be methylated to form 5-methylcytosine"
tgtgaggagacagttgtgtagggacaactgaggtggtgggataagaataagaaagtgcttcgaggactctgctgacagccatcttgaaccactgccacacttgtaaaggtgtttgtttccta

SEQ ID NO: 849 - DNA, 122 bp, Homo sapiens
  misc_feature (61)..(62): /note="This region represents a CpG dinucleotide"
  misc_feature (61)..(61): /note="Nucleotide may be methylated to form 5-methylcytosine"
agacccatacttaggaatccctcactgttatctctggggcaagcagtttaatattcccagcggcagtctcaaagccaggagatgcatgcctaagacctgccctcccaacccccaccaagtca

SEQ ID NO: 850 - DNA, 122 bp, Homo sapiens
  misc_feature (61)..(62): /note="This region represents a CpG dinucleotide"
  misc_feature (61)..(61): /note="Nucleotide may be methylated to form 5-methylcytosine"
atgcacttttccacctttccaatttcctgtgtctctcacaatgggcttcttaagcttaaacgtatatcctgttagctttgaatttgaagggtgcaccttcagttttgggcatagctaaggac

SEQ ID NO: 851 - DNA, 122 bp, Homo sapiens
  misc_feature (61)..(62): /note="This region represents a CpG dinucleotide"
  misc_feature (61)..(61): /note="Nucleotide may be methylated to form 5-methylcytosine"
attctaagaaatcagggtctcagccatcatcacccccaattctaagaaatcccagtgttccgggcacggccctttctttccgcaggctctgtgctgtcataagcagaagtaactgtctattt

SEQ ID NO: 852 - DNA, 122 bp, Homo sapiens
  misc_feature (61)..(62): /note="This region represents a CpG dinucleotide"
  misc_feature (61)..(61): /note="Nucleotide may be methylated to form 5-methylcytosine"
tacaagctaactatgagtcagaacacagtgatggggagaaatgtgtgtatacgatgctggcgtgtgtactgcttgcttatagaaagaagtgagtgtgtattcactctggctgtgagttctgt

SEQ ID NO: 853 - DNA, 122 bp, Homo sapiens
  misc_feature (61)..(62): /note="This region represents a CpG dinucleotide"
  misc_feature (61)..(61): /note="Nucleotide may be methylated to form 5-methylcytosine"
tgtcaggttgggggagaggcccaggttcctcacctggcctctgtgaacacttgagggagccgtgctccttgttattgctaggtgtggatgggggttcaggcttcccactaggtctctgctga

SEQ ID NO: 854 - DNA, 122 bp, Homo sapiens
  misc_feature (61)..(62): /note="This region represents a CpG dinucleotide"
  misc_feature (61)..(61): /note="Nucleotide may be methylated to form 5-methylcytosine"
gggaacgcgcaagaagccggcatgctgggaagttactcatagctcctggggtcaccctcccgccccatgcccatccggatgagatgttttcgtgagttgcgtaactcacagccacccggtaa

SEQ ID NO: 855 - DNA, 122 bp, Homo sapiens
  misc_feature (61)..(62): /note="This region represents a CpG dinucleotide"
  misc_feature (61)..(61): /note="Nucleotide may be methylated to form 5-methylcytosine"
aaggcccaaggatgaatgtccctgacagggcaagccaggccccagggaccctgaaggaggcgggtattcattttgccttgaagttcgtccccttgtctcaatctcaaacacagaatatcagc

SEQ ID NO: 856 - DNA, 122 bp, Homo sapiens
  misc_feature (61)..(62): /note="This region represents a CpG dinucleotide"
  misc_feature (61)..(61): /note="Nucleotide may be methylated to form 5-methylcytosine"
atctaggctcactgcaacctccacctcctgagttcaagcgattctcctgtctcagcctcccgagtggctgggattatgagggcaccaccacgcccagctaatttttgtatttttagtagaga

SEQ ID NO: 857 - DNA, 122 bp, Homo sapiens
  misc_feature (61)..(62): /note="This region represents a CpG dinucleotide"
  misc_feature (61)..(61): /note="Nucleotide may be methylated to form 5-methylcytosine"
agatggtttcagtcactatgtaaatgagccacatggtttttacatttggaaagttcccttcgggttgatacaaaaaagcagggcctgaatgacagtcattcctcttaggaatggagtccaag

SEQ ID NO: 858 - DNA, 122 bp, Homo sapiens
  misc_feature (61)..(62): /note="This region represents a CpG dinucleotide"
  misc_feature (61)..(61): /note="Nucleotide may be methylated to form 5-methylcytosine"
acagatctgggaatcaactgcatggaggaggtagttataggtgatgagatggatcagggacgaactttgttagaaggagaaaagatactaggctggtacaaaaataattgctatttttgcca

SEQ ID NO: 859 - DNA, 122 bp, Homo sapiens
  misc_feature (61)..(62): /note="This region represents a CpG dinucleotide"
  misc_feature (61)..(61): /note="Nucleotide may be methylated to form 5-methylcytosine"
ctacaaatgcctggaaggggttgcaaagaacaatgcaggatgctctctatcaatctattgcgttcctcattagtcatgatcactgcctccacaatgccccagatccctttgtggcattcaag

SEQ ID NO: 860 - DNA, 122 bp, Homo sapiens
  misc_feature (61)..(62): /note="This region represents a CpG dinucleotide"
  misc_feature (61)..(61): /note="Nucleotide may be methylated to form 5-methylcytosine"
gcagcagccagacacctcccaggaacccaatgtaagccctgtatcgatggcagcttcctgcgaagccactgtgagcgtgtgaaaaatccccaccgtaggaacaaaagtttttgtatctaaaa

SEQ ID NO: 861 - DNA, 122 bp, Homo sapiens
  misc_feature (61)..(62): /note="This region represents a CpG dinucleotide"
  misc_feature (61)..(61): /note="Nucleotide may be methylated to form 5-methylcytosine"
tgagggagggcatgtcaaatgtgtgtcatggccgagacacctccaaaaagccactgctgccgcctgagcagagcatgctgaaggctgtggtttactgacttcatcacaagccctagaggaaa

SEQ ID NO: 862 - DNA, 122 bp, Homo sapiens
  misc_feature (61)..(62): /note="This region represents a CpG dinucleotide"
  misc_feature (61)..(61): /note="Nucleotide may be methylated to form 5-methylcytosine"
ttattttgctcccctcggcgggtggcagcttgattgtagtcatccagtgaactgaaaatgcgattttaagtatatttttattgccgtgaatcaggacctaacctagtaaaacactggacact

SEQ ID NO: 863 - DNA, 122 bp, Homo sapiens
  misc_feature (61)..(62): /note="This region represents a CpG dinucleotide"
  misc_feature (61)..(61): /note="Nucleotide may be methylated to form 5-methylcytosine"
taaggactatgctgggtaagtgattgcaaggaggaagtgctttaatgcccctcaggtactcgactaaggccagggaggagagaagaattctgatgtgttacatattcttttcctgcaaagtc

SEQ ID NO: 864 - DNA, 122 bp, Homo sapiens
  misc_feature (61)..(62): /note="This region represents a CpG dinucleotide"
  misc_feature (61)..(61): /note="Nucleotide may be methylated to form 5-methylcytosine"
gccaaattgaacataacaataatgggaaaacagattttgctcaatcagacccagctcagtcggaacctaggtttattgtggatctgatataattctagcacaaaacaaggaaacctagcatt

SEQ ID NO: 865 - DNA, 122 bp, Homo sapiens
  misc_feature (61)..(62): /note="This region represents a CpG dinucleotide"
  misc_feature (61)..(61): /note="Nucleotide may be methylated to form 5-methylcytosine"
ggctttcccgccagcgtctacctgtagagagtgagacgaagatggagacaattaactggacgaagcaggcaaaatccccgataattgaggccgggtgccacggggtgactttccctttctgg

SEQ ID NO: 866 - DNA, 122 bp, Homo sapiens
  misc_feature (61)..(62): /note="This region represents a CpG dinucleotide"
  misc_feature (61)..(61): /note="Nucleotide may be methylated to form 5-methylcytosine"
acagtctttatcagtctatgacaacaaaattaactcatacttgcatttcaaacccaaactcgtatggcacaagttcaaatcagcaaaactactggaaactggccgtatttaaattgtttccc

SEQ ID NO: 867 - DNA, 122 bp, Homo sapiens
  misc_feature (61)..(62): /note="This region represents a CpG dinucleotide"
  misc_feature (61)..(61): /note="Nucleotide may be methylated to form 5-methylcytosine"
gggcggagccggccaggcggcgcgagcgggaactacggccttggccttcttcagttctagcgtcaacccggtgctctacgtcttcaccgctggagatctgctgccccgggcaggtccccgtt

SEQ ID NO: 868 - DNA, 122 bp, Homo sapiens
  misc_feature (61)..(62): /note="This region represents a CpG dinucleotide"
  misc_feature (61)..(61): /note="Nucleotide may be methylated to form 5-methylcytosine"
ccctttgtgccatttaattcctgcgattcccattcccctgtcaccgagacctcggggccgcgtggttttggtgtaatttaagtgagtggaatattcagtgcagacatcatcaccatcgtctg

SEQ ID NO: 869 - DNA, 122 bp, Homo sapiens
  misc_feature (61)..(62): /note="This region represents a CpG dinucleotide"
  misc_feature (61)..(61): /note="Nucleotide may be methylated to form 5-methylcytosine"
cctggtggctgcacattgtctcatgccttagaccacttccttgccttggtcagtagatggcgtgtggtgaccctaagttggaaccaggatttttgggacctccctattgagggacctcatgg

SEQ ID NO: 870 - DNA, 122 bp, Homo sapiens
  misc_feature (61)..(62): /note="This region represents a CpG dinucleotide"
  misc_feature (61)..(61): /note="Nucleotide may be methylated to form 5-methylcytosine"
atgtgttcaggaaggtggaggtggaggtggaggatacaaaatttagccagatgctaataccgatctaatggaggaaaaaacaataacttcaaaggggttgagttagaaattattcttggaac

SEQ ID NO: 871 - DNA, 122 bp, Homo sapiens
  misc_feature (61)..(62): /note="This region represents a CpG dinucleotide"
  misc_feature (61)..(61): /note="Nucleotide may be methylated to form 5-methylcytosine"
acaggagccagggcctgggaggaggagagaggcactcctagcatgtgctgggaaacagcacgccagacaccaaggccagacaagacagtggggcaccgagaaccagtattacagtcttatcc

SEQ ID NO: 872 - DNA, 122 bp, Homo sapiens
  misc_feature (61)..(62): /note="This region represents a CpG dinucleotide"
  misc_feature (61)..(61): /note="Nucleotide may be methylated to form 5-methylcytosine"
gtaagaaaaagataacccggtagaaaaatgggccgaagatacttcgcaaaagaggaaacacgcaggtccaatttacaatgaaagtgctatgagttactagaggcttacgttaaagaaaagat

SEQ ID NO: 873 - DNA, 122 bp, Homo sapiens
  misc_feature (61)..(62): /note="This region represents a CpG dinucleotide"
  misc_feature (61)..(61): /note="Nucleotide may be methylated to form 5-methylcytosine"
aagaggagccaaacgtcgcaggagcaatttcaaagacgtctggggaacgaaaagggtcttcgatccaaggaccagcctaggggccatcgggaaccaaggctctgggggatcccagcagggcc

SEQ ID NO: 874 - DNA, 122 bp, Homo sapiens
  misc_feature (61)..(62): /note="This region represents a CpG dinucleotide"
  misc_feature (61)..(61): /note="Nucleotide may be methylated to form 5-methylcytosine"
tggcccactagagtctttcttacttgagcactaaaacatgcttctgacctctgatcaaaacggtgttgatgatacagagtcatgtgcctgactcaggccatgcaaatcaccccaccgccaac

SEQ ID NO: 875 - DNA, 122 bp, Homo sapiens
  misc_feature (61)..(62): /note="This region represents a CpG dinucleotide"
  misc_feature (61)..(61): /note="Nucleotide may be methylated to form 5-methylcytosine"
caatgctaattggttacacactgaaagattcaaatcattattataatccataaacaataacggaatactgtgaacaaagaacaattggagaaaaagaaagagagctttcagacctgaaaaag

SEQ ID NO: 876 - DNA, 122 bp, Homo sapiens
  misc_feature (61)..(62): /note="This region represents a CpG dinucleotide"
  misc_feature (61)..(61): /note="Nucleotide may be methylated to form 5-methylcytosine"
aggtaagcgaacacccaggagccactttgtctgtggtttcagattttggtcaggtgggggcgctgcactctccaagcctgtgctgagcagtgtgagctttcagtggtgctgcttctgctgtg

SEQ ID NO: 877 - DNA, 122 bp, Homo sapiens
  misc_feature (61)..(62): /note="This region represents a CpG dinucleotide"
  misc_feature (61)..(61): /note="Nucleotide may be methylated to form 5-methylcytosine"
agccctgagactgtctgcattcgcatggagtgggcacctccgctggggacagattacagacgcgtccggcccaaggaatgctttggagagctgggagtggggctgcaagaagggtactgtct

SEQ ID NO: 878 - DNA, 122 bp, Homo sapiens
  misc_feature (61)..(62): /note="This region represents a CpG dinucleotide"
  misc_feature (61)..(61): /note="Nucleotide may be methylated to form 5-methylcytosine"
cgcgaggcctgctgggctgacgtgacgtgaggctgggctgcggggcgccggaggcggaggcgggggcggggcgccgggaccgactagggcggggcgcggggtcggggggcggggcgcggggt

SEQ ID NO: 879 - DNA, 122 bp, Homo sapiens
  misc_feature (61)..(62): /note="This region represents a CpG dinucleotide"
  misc_feature (61)..(61): /note="Nucleotide may be methylated to form 5-methylcytosine"
agagaacatgataggtttggagaactaggagagtttgctaaagattcagcttaggatccacgaaggaacaaaatgaaaaggatgtcagcaggcagattagaaaggatcttaaagtcatgtta

SEQ ID NO: 880 - DNA, 122 bp, Homo sapiens
  misc_feature (61)..(62): /note="This region represents a CpG dinucleotide"
  misc_feature (61)..(61): /note="Nucleotide may be methylated to form 5-methylcytosine"
ctggggccagggtcaaggctcattccgtggccttgagcacagcctggtgtgtggctgggtcgagtccagcagaagtctcggggttttccagcctccatccgagtccggctttgatgcctttc

SEQ ID NO: 881 - DNA, 122 bp, Homo sapiens
  misc_feature (61)..(62): /note="This region represents a CpG dinucleotide"
  misc_feature (61)..(61): /note="Nucleotide may be methylated to form 5-methylcytosine"
agtcagctgtcactgttgtttacgtagctccactcctgaatgaaaatggacccactcaatcgaaggccactcactgctttctcatctcccagggcgcccttacatgcctctggcacctgcca

SEQ ID NO: 882 - DNA, 122 bp, Homo sapiens
  misc_feature (61)..(62): /note="This region represents a CpG dinucleotide"
  misc_feature (61)..(61): /note="Nucleotide may be methylated to form 5-methylcytosine"
ttctttaacaggtttctataatccaggaacttgttactaattatgaagcctctcttaaaacgtgtgacttttttagcccatatggtaagtttaaattagattgaattggaatttgattactc

SEQ ID NO: 883 - DNA, 122 bp, Homo sapiens
  misc_feature (61)..(62): /note="This region represents a CpG dinucleotide"
  misc_feature (61)..(61): /note="Nucleotide may be methylated to form 5-methylcytosine"
tgtattatcctttgattcttcaaatgcatttagttcatggatgagaaactgtctgtccaacggaactacaggttgaccagattctgggagaaataaattcatgagaacactcagtctattaa

SEQ ID NO: 884 - DNA, 122 bp, Homo sapiens
  misc_feature (61)..(62): /note="This region represents a CpG dinucleotide"
  misc_feature (61)..(61): /note="Nucleotide may be methylated to form 5-methylcytosine"
gccttcggtgcctgagggacttgatattttctcattatgaagactttcccatctagtgaacgctgcaaataaaactgctcagaatcggtctgaactgcctgtttccgtggtagcaggcctct

SEQ ID NO: 885 - DNA, 122 bp, Homo sapiens
  misc_feature (61)..(62): /note="This region represents a CpG dinucleotide"
  misc_feature (61)..(61): /note="Nucleotide may be methylated to form 5-methylcytosine"
agtggctcaaagagaagcacttctcggaagcttcccttgctttttgtcagcaatgaaaagcggtgggcagtctagcaacctcttaagaggaaaaggggagtttgcttttaagaggaagacaa

SEQ ID NO: 886 - DNA, 122 bp, Homo sapiens
  misc_feature (61)..(62): /note="This region represents a CpG dinucleotide"
  misc_feature (61)..(61): /note="Nucleotide may be methylated to form 5-methylcytosine"
ctaccctcctgctacaggacagaaaaaaacacggtggttttatttccatttcttatcacacggtgtccactgcctgagctgcacagggaggcattttgtcatttcactgtaggggtctcctg

SEQ ID NO: 887 - DNA, 122 bp, Homo sapiens
  misc_feature (61)..(62): /note="This region represents a CpG dinucleotide"
  misc_feature (61)..(61): /note="Nucleotide may be methylated to form 5-methylcytosine"
gatggaggcgctggctgcggagaccaacttgctcctggcccagaagcaacggctggagcgcgccctggacgccacagaggtgcccttctccatcaccactgacaacctgcagtgccgtgagc

SEQ ID NO: 888 - DNA, 122 bp, Homo sapiens
  misc_feature (61)..(62): /note="This region represents a CpG dinucleotide"
  misc_feature (61)..(61): /note="Nucleotide may be methylated to form 5-methylcytosine"
ccatctgcctcccacccatcactggaccagctgtgctcagagagcacacgaggcagccaacgtggctctggccctatttagacagatggcgccagagcccagaaataggcttcaacctggcc

SEQ ID NO: 889 - DNA, 122 bp, Homo sapiens
  misc_feature (61)..(62): /note="This region represents a CpG dinucleotide"
  misc_feature (61)..(61): /note="Nucleotide may be methylated to form 5-methylcytosine"
tcacctcatggggggagccctgacactctcacgtcagactgttctcctcacccacccccacggctctggtcacgctatgcctctgccagggaccaacctgctgtttagtgttcagcacccag

SEQ ID NO: 890 - DNA, 122 bp, Homo sapiens
  misc_feature (61)..(62): /note="This region represents a CpG dinucleotide"
  misc_feature (61)..(61): /note="Nucleotide may be methylated to form 5-methylcytosine"
tgaagtcccgccctgcgcggggctggttcccgaggccgggttgtccaggtcgcggtctggcgtgagtcctcgtgcccttcccggctcggggattacctctctggctggtcccctcctccgtg

SEQ ID NO: 891 - DNA, 122 bp, Homo sapiens
  misc_feature (61)..(62): /note="This region represents a CpG dinucleotide"
  misc_feature (61)..(61): /note="Nucleotide may be methylated to form 5-methylcytosine"
tcccaggaaaggcgggctggggtcaactgcttgaaaatttagtaaccctgctcctaatcccgtgcactgctatatcctagtgtgcggcgggacacttgagagttttgaaagaaccctcaaac

SEQ ID NO: 892 - DNA, 122 bp, Homo sapiens
  misc_feature (61)..(62): /note="This region represents a CpG dinucleotide"
  misc_feature (61)..(61): /note="Nucleotide may be methylated to form 5-methylcytosine"
gagacccctgtctctacaaaaacttaaagtataaaaaaattagccaggcctcgtggagtgcgcctgtaggcctacatacgtgggaggattgcttgaccctgggaggttgaggctgcagtgag

SEQ ID NO: 893 - DNA, 122 bp, Homo sapiens
  misc_feature (61)..(62): /note="This region represents a CpG dinucleotide"
  misc_feature (61)..(61): /note="Nucleotide may be methylated to form 5-methylcytosine"
cagcctgcatgagtgagtgtaatgtctgaaatgtggaaccaaccacatggcccttctccacgctggtcagtgagggggctttgtcagtgaaaacagacttattgtggctaatgtaggtcgca

SEQ ID NO: 894 - DNA, 122 bp, Homo sapiens
  misc_feature (61)..(62): /note="This region represents a CpG dinucleotide"
  misc_feature (61)..(61): /note="Nucleotide may be methylated to form 5-methylcytosine"
ccacccgtccctttggtagcggcagtcacgtgacagactccggggtaaggcagatgcccacgtgatcctggcctgcagttgggtggctgcggtgagatacctgggttcctgaagggcgggtg

SEQ ID NO: 895 - DNA, 122 bp, Homo sapiens
  misc_feature (61)..(62): /note="This region represents a CpG dinucleotide"
  misc_feature (61)..(61): /note="Nucleotide may be methylated to form 5-methylcytosine"
gtttcacctaatgaagtcttctcagtgctttagacctcagtgagatctctggatgcatatcgctaacgcctttttatgctcaatcacatgccacagtcaacatgcaatactcaagacagaaa

SEQ ID NO: 896 - DNA, 122 bp, Homo sapiens
  misc_feature (61)..(62): /note="This region represents a CpG dinucleotide"
  misc_feature (61)..(61): /note="Nucleotide may be methylated to form 5-methylcytosine"
tcaatgacaagtcacagctgcatagacgcagccccatctatgtgctgactcaggaggtaacgcagtgcttcctctctttgattaccaggggtcttgacttctgtactaaagtaagagagaaa

SEQ ID NO: 897 - DNA, 122 bp, Homo sapiens
  misc_feature (61)..(62): /note="This region represents a CpG dinucleotide"
  misc_feature (61)..(61): /note="Nucleotide may be methylated to form 5-methylcytosine"
ttttaaatagtatttacacataatgaaatggttataaaaaatctaagcttattttcaacacgtaaagagatgtttctgagtgatgtttgtgtgttgtaaatttaagcaacctttccttaact

SEQ ID NO: 898 - DNA, 122 bp, Homo sapiens
  misc_feature (61)..(62): /note="This region represents a CpG dinucleotide"
  misc_feature (61)..(61): /note="Nucleotide may be methylated to form 5-methylcytosine"
agcagccaaatatatggtcctgattgagacatatgggaatttttttttttaaatgacacacggagcactgcttcttatggtggtgctgttcccccagctgaaccctgccaggtaccagcccc

SEQ ID NO: 899 - DNA, 122 bp, Homo sapiens
  misc_feature (61)..(62): /note="This region represents a CpG dinucleotide"
  misc_feature (61)..(61): /note="Nucleotide may be methylated to form 5-methylcytosine"
agtccaaagtcagagcagggaagttcactccatctagagttgaaggatggtaaaaccacacggaaaagggagtggacaggaggggtacagaaccaggctaatgagacaatctgccaaccaca

SEQ ID NO: 900 - DNA, 122 bp, Homo sapiens
  misc_feature (61)..(62): /note="This region represents a CpG dinucleotide"
  misc_feature (61)..(61): /note="Nucleotide may be methylated to form 5-methylcytosine"
ttgtgctcttaaccactgtgtggcgctaccagaccttacaggatggtcaagcaatattgacggagtgtttgctgcaggtgctgtgctaagtgctgaatacattacatgttgagcagatgaat

SEQ ID NO: 901 - DNA, 122 bp, Homo sapiens
  misc_feature (61)..(62): /note="This region represents a CpG dinucleotide"
  misc_feature (61)..(61): /note="Nucleotide may be methylated to form 5-methylcytosine"
ttcaattaagaagccaaaacctgtaagaccatggagctccacacaggactgaggcggcggcgattttgttcaatgacacggagctcgctggaatccacgcccctgagtttgatcgtggtcac

SEQ ID NO: 902 - DNA, 122 bp, Homo sapiens
  misc_feature (61)..(62): /note="This region represents a CpG dinucleotide"
  misc_feature (61)..(61): /note="Nucleotide may be methylated to form 5-methylcytosine"
gccgagaccagctggtcgctgccgggcccgctagtagcccacggagaagccgcccacagccggacaccagagccttgagggccgccatcttcaaaaacctaccctgacctctcgtccatttc

SEQ ID NO: 903 - DNA, 122 bp, Homo sapiens
  misc_feature (61)..(62): /note="This region represents a CpG dinucleotide"
  misc_feature (61)..(61): /note="Nucleotide may be methylated to form 5-methylcytosine"
gccaaagacttccttccacaggatcttgtcgcaccagcaactgacaggagcttgggagctcgggagcttgggagagggcttatgtttttaataatgtagctgtcagttcgaagcctggaaat

SEQ ID NO: 904 - DNA, 122 bp, Homo sapiens
  misc_feature (61)..(62): /note="This region represents a CpG dinucleotide"
  misc_feature (61)..(61): /note="Nucleotide may be methylated to form 5-methylcytosine"
tctgcagcagtagcaatgtgtgctgaatcagttcttaacagatggggttttttagatatacggtagactaagaaaggaagtgaaatgtttctcttgagataaaaaagaaatttaactcttca

SEQ ID NO: 905 - DNA, 122 bp, Homo sapiens
  misc_feature (61)..(62): /note="This region represents a CpG dinucleotide"
  misc_feature (61)..(61): /note="Nucleotide may be methylated to form 5-methylcytosine"
aaagcttaaagtggttaacatcatgagtccccaaaagagcaaacttaagtgatcctaaagcgtgtcactatattcatttataattatgaaaacaaaatactgtggccaaaaatgctttgcga

SEQ ID NO: 906 - DNA, 122 bp, Homo sapiens
  misc_feature (61)..(62): /note="This region represents a CpG dinucleotide"
  misc_feature (61)..(61): /note="Nucleotide may be methylated to form 5-methylcytosine"
gagcgccccctggtgacctgagcccagaattgttgtctttagcaccacctatgtcctgagcgcccccttgtggttctgagcaaccattggtggtcctgagcgccccctgttggttctgagta

SEQ ID NO: 907 - DNA, 122 bp, Homo sapiens
  misc_feature (61)..(62): /note="This region represents a CpG dinucleotide"
  misc_feature (61)..(61): /note="Nucleotide may be methylated to form 5-methylcytosine"
tgccgagtgaatcaagacagaaaattaccctagtgtgcagaaccttgttgaagaggtaaccgttgctagctttcaaggtgtttctgaaaaggaagctatcaccctccccaccaccctgcaaa

SEQ ID NO: 908 - DNA, 122 bp, Homo sapiens
  misc_feature (61)..(62): /note="This region represents a CpG dinucleotide"
  misc_feature (61)..(61): /note="Nucleotide may be methylated to form 5-methylcytosine"
tttctaattacagtcactataacagatctgctaaaggtagtttcatgattaatggctgcccgaagttaccatcctcaaactattaagccattggaaaatgctagaggcttaatactcgtgta

SEQ ID NO: 909 - DNA, 122 bp, Homo sapiens
  misc_feature (61)..(62): /note="This region represents a CpG dinucleotide"
  misc_feature (61)..(61): /note="Nucleotide may be methylated to form 5-methylcytosine"
gacgtgacactcctgttttggtaagaattgacacacagctaccctcatctggtgaacggacgaattggggctaaagctgaatggctgacatgtcaacaacctgaaataaaaacaaaccagcc

SEQ ID NO: 910 - DNA, 122 bp, Homo sapiens
  misc_feature (61)..(62): /note="This region represents a CpG dinucleotide"
  misc_feature (61)..(61): /note="Nucleotide may be methylated to form 5-methylcytosine"
gcttgactcaggccttagtgttttgaaacaatgcagtatttaggcatttattttaaaagacgctagtgcaattcagtaaggttctaattgttaggtgatccctaaccttgttttcaggatga

SEQ ID NO: 911 - DNA, 122 bp, Homo sapiens
  misc_feature (61)..(62): /note="This region represents a CpG dinucleotide"
  misc_feature (61)..(61): /note="Nucleotide may be methylated to form 5-methylcytosine"
ctgcccatagagagtccaaacgcatgaattcctgctggtatcagcttcggaggcagaggtcgcgagctgagcttgggacaacccttcaagcctgctagcaattacctgctctcagccacttt

SEQ ID NO: 912 - DNA, 122 bp, Homo sapiens
  misc_feature (61)..(62): /note="This region represents a CpG dinucleotide"
  misc_feature (61)..(61): /note="Nucleotide may be methylated to form 5-methylcytosine"
cgattttatgccggatttagcccttattactatttcaagggtgcttcgggctagtgcgggcgggagcattcagggatgccaaggggaagactttcccaagtcaccgtcttcttctctgcccc

SEQ ID NO: 913 - DNA, 122 bp, Homo sapiens
  misc_feature (61)..(62): /note="This region represents a CpG dinucleotide"
  misc_feature (61)..(61): /note="Nucleotide may be methylated to form 5-methylcytosine"
ctaaaacaacctatagccagttacatgtggtcagaatctgtacccctcccttgcccagcacgatcaatttggcagttatgaaaataaagggaccctgggatccaagttctttactgagcata

SEQ ID NO: 914 - DNA, 122 bp, Homo sapiens
  misc_feature (61)..(62): /note="This region represents a CpG dinucleotide"
  misc_feature (61)..(61): /note="Nucleotide may be methylated to form 5-methylcytosine"
aaacagaagcttcgctggatttggtgcaagagagagtaggaagacaggaagagggcatgccgaacagagatcatttatttcaggaggtacctacattgaaggaggctcacaagctggggcaa

SEQ ID NO: 915 - DNA, 122 bp, Homo sapiens
  misc_feature (61)..(62): /note="This region represents a CpG dinucleotide"
  misc_feature (61)..(61): /note="Nucleotide may be methylated to form 5-methylcytosine"
ctcatcttacccacagggacagacagacataatgatcaattgagccctcatatgtaaaatcgctgtccaaatgtgaaggcttaataatggtgccataatatgaggtgatcctttctttcctc

SEQ ID NO: 916 - DNA, 122 bp, Homo sapiens
  misc_feature (61)..(62): /note="This region represents a CpG dinucleotide"
  misc_feature (61)..(61): /note="Nucleotide may be methylated to form 5-methylcytosine"
gactcagagggagggcctggagaacagctcccagcagcccacacatggtgactgcgtgagcggcctgtggccaccacaatagttaccacaaattgggtggcaaaagacaagagaaatgtatt

SEQ ID NO: 917 - DNA, 122 bp, Homo sapiens
  misc_feature (61)..(62): /note="This region represents a CpG dinucleotide"
  misc_feature (61)..(61): /note="Nucleotide may be methylated to form 5-methylcytosine"
atgtggcatttctccagaagcctctcatagaaagtgtagaaaccaaaatgaagactctgacgaatgagaagtaaagaaacaagcaccccatagtaaatggagtaacagagatcagactgtgt

SEQ ID NO: 918 - DNA, 122 bp, Homo sapiens
  misc_feature (61)..(62): /note="This region represents a CpG dinucleotide"
  misc_feature (61)..(61): /note="Nucleotide may be methylated to form 5-methylcytosine"
catgagaggaattgggaggaaatagctgtctcaatggggaattcaaaattatttatctcacgtcccactaaggggaatgcacccagcccttcaggacgcactggcatgcatgatgtaccagg

SEQ ID NO: 919 - DNA, 122 bp, Homo sapiens
  misc_feature (61)..(62): /note="This region represents a CpG dinucleotide"
  misc_feature (61)..(61): /note="Nucleotide may be methylated to form 5-methylcytosine"
aaagaaaccacgttctctgtcctcagccagaagttcagtaatccaaggccagagagtggacggcagaggcactgtccctggggaccttggttataagttatccagacacagggaccagagcc

SEQ ID NO: 920 - DNA, 122 bp, Homo sapiens
  misc_feature (61)..(62): /note="This region represents a CpG dinucleotide"
  misc_feature (61)..(61): /note="Nucleotide may be methylated to form 5-methylcytosine"
aagtgatgaagccctgaactgtggcaatgatgccggagaaggatgtaaaaatcgtaaagtcgactggtgaccaattagagctggaaggacttacccacgctaacacctcccaaatatgggag

SEQ ID NO: 921 - DNA, 122 bp, Homo sapiens
  misc_feature (61)..(62): /note="This region represents a CpG dinucleotide"
  misc_feature (61)..(61): /note="Nucleotide may be methylated to form 5-methylcytosine"
gaagctttctgtgctcccagatcagctccataaaaaagtaagtgttctaaatatcaggcacgtcaatactgacaaccacagcaaatttaacgccaaacgtttttatcattgcagcagatggt

SEQ ID NO: 922 - DNA, 122 bp, Homo sapiens
  misc_feature (61)..(62): /note="This region represents a CpG dinucleotide"
  misc_feature (61)..(61): /note="Nucleotide may be methylated to form 5-methylcytosine"
agaaatggtcttattgattgtatgcatgcacgtatttgctgatgtatacccctgaacagacgtgacacatacccagagaaggggcacagacacctgcacactcagggccacacctgcactag

SEQ ID NO: 923 - DNA, 122 bp, Homo sapiens
  misc_feature (61)..(62): /note="This region represents a CpG dinucleotide"
  misc_feature (61)..(61): /note="Nucleotide may be methylated to form 5-methylcytosine"
tacagtttgggcaaaaggaataccaccaggcaaattgttttcaaatctatctaatttcttcgagacttttcctgtttgtttttctaaaatcaccttctctccttccatggcaacaggacaag

SEQ ID NO: 924 - DNA, 122 bp, Homo sapiens
  misc_feature (61)..(62): /note="This region represents a CpG dinucleotide"
  misc_feature (61)..(61): /note="Nucleotide may be methylated to form 5-methylcytosine"
cttccagtcagctttcccggctttgaaggctgggagctgctgctaacacttcaaactaggcggacaagaagggagccgggcgatcagctccggagcctcccctcctcccttacccatcccca

SEQ ID NO: 925 - DNA, 122 bp, Homo sapiens
  misc_feature (61)..(62): /note="This region represents a CpG dinucleotide"
  misc_feature (61)..(61): /note="Nucleotide may be methylated to form 5-methylcytosine"
aagggtgggcgtgtgcgcgcgttctccaaacgccacccccacggggcctcacagccgccccggcctggcaaccgtcacccattttacgaacgaggacatcaaggtaggtcgctcatccagcc

SEQ ID NO: 926 - DNA, 122 bp, Homo sapiens
  misc_feature (61)..(62): /note="This region represents a CpG dinucleotide"
  misc_feature (61)..(61): /note="Nucleotide may be methylated to form 5-methylcytosine"
tcagctccaaccctcacttccacgttctcacccgcaatcgcagcgaaggcaggaagttcccggagctggtgctagacaaaccgttggaccgcgaggagcagccccaactcaggctaacgctg

SEQ ID NO: 927 - DNA, 122 bp, Homo sapiens
  misc_feature (61)..(62): /note="This region represents a CpG dinucleotide"
  misc_feature (61)..(61): /note="Nucleotide may be methylated to form 5-methylcytosine"
tcataaaccagaaatgtgtatgatacagattgagcattattgtctctgagaaaatgaacccgagagagatcagcatacaatgtgtcaattccccaggcattcagcagaaaatgaatatgtat

SEQ ID NO: 928 - DNA, 122 bp, Homo sapiens
  misc_feature (61)..(62): /note="This region represents a CpG dinucleotide"
  misc_feature (61)..(61): /note="Nucleotide may be methylated to form 5-methylcytosine"
tcagctcgagtcagccctgatgggctgtggactcggtgacttcactccaagcaatgtgcacgctaattgagaaaacatgttcctgtgatggcctcatgcaaaaatccagatttacgaatttt

SEQ ID NO: 929 - DNA, 122 bp, Homo sapiens
  misc_feature (61)..(62): /note="This region represents a CpG dinucleotide"
  misc_feature (61)..(61): /note="Nucleotide may be methylated to form 5-methylcytosine"
gtgcaatctacaaacatcaaaattacagtaacagagtagaagggtggtttccagggctgacggtctatcctgtgcctgtcccaccattgtattttggaagcaaatagcttctttggcttcac

SEQ ID NO: 930 - DNA, 122 bp, Homo sapiens
  misc_feature (61)..(62): /note="This region represents a CpG dinucleotide"
  misc_feature (61)..(61): /note="Nucleotide may be methylated to form 5-methylcytosine"
cagcccttcctcgcaggcctggccggggcaacccagtgggcctgatgctgcctggcacctcgaggccccagagccagtgagcagacgctcgctcgcccatctccctagagtcccgctgtgca

SEQ ID NO: 931 - DNA, 122 bp, Homo sapiens
  misc_feature (61)..(62): /note="This region represents a CpG dinucleotide"
  misc_feature (61)..(61): /note="Nucleotide may be methylated to form 5-methylcytosine"
tccggatcctcaggtcagcggaggagcggttcaggccttcctcttgctcgatggactgctcgatgcctgggggcacaggtggctgctaagtcataaccaggccccttcaaccccgtccccta

SEQ ID NO: 932 - DNA, 122 bp, Homo sapiens
  misc_feature (61)..(62): /note="This region represents a CpG dinucleotide"
  misc_feature (61)..(61): /note="Nucleotide may be methylated to form 5-methylcytosine"
acctgttgatccagaggcatgaagagcttggcgccatcaggtggcagcctaaacttccagcgcaatggatcatccctgtgtctcttgggggcagcattcctccctctggaactaagatctct

SEQ ID NO: 933 - DNA, 122 bp, Homo sapiens
  misc_feature (61)..(62): /note="This region represents a CpG dinucleotide"
  misc_feature (61)..(61): /note="Nucleotide may be methylated to form 5-methylcytosine"
cgcctgctgaatgtgctctgcacagggtgatgtaacatgtggggtcagcccctgcgtcaacgaccaaatacacaagtgtaacgagatggggggaacaagacagactccacatggccagcctg

SEQ ID NO: 934 - DNA, 122 bp, Homo sapiens
  misc_feature (61)..(62): /note="This region represents a CpG dinucleotide"
  misc_feature (61)..(61): /note="Nucleotide may be methylated to form 5-methylcytosine"
cctgagtgtttaggttgtgccaggcacttaactcgcttaatcctttcaacagctttgagtcgtagatcttattatccccattttacagattagagagtctagcctcagaggttaagaaacat

SEQ ID NO: 935 - DNA, 122 bp, Homo sapiens
  misc_feature (61)..(62): /note="This region represents a CpG dinucleotide"
  misc_feature (61)..(61): /note="Nucleotide may be methylated to form 5-methylcytosine"
cctggtgatcaagcggcagtgtcaggggctgaggctggggcaggctgctctctctgtctccgccagaggcactgttgtgtcacaactaccagagcagtccctctgaagccccaaagccagac

SEQ ID NO: 936 - DNA, 122 bp, Homo sapiens
  misc_feature (61)..(62): /note="This region represents a CpG dinucleotide"
  misc_feature (61)..(61): /note="Nucleotide may be methylated to form 5-methylcytosine"
aggcctatcaaattgcccctgaaagtagctatagaaattttgccatccactggccaggcacggtggctcacgcctgtaatcccagcactttgggaggctgaggcaggcagatcacgagctca

SEQ ID NO: 937 - DNA, 122 bp, Homo sapiens
  misc_feature (61)..(62): /note="This region represents a CpG dinucleotide"
  misc_feature (61)..(61): /note="Nucleotide may be methylated to form 5-methylcytosine"
gacatattgcaacatacatgaaacctctgtgatctatttatggtcacagaaagtaggtaacgttctgagataaagagcttggaggcaaggtgatgtggccagtcacagtaaaaaataagtaa

SEQ ID NO: 938 - DNA, 122 bp, Homo sapiens
  misc_feature (61)..(62): /note="This region represents a CpG dinucleotide"
  misc_feature (61)..(61): /note="Nucleotide may be methylated to form 5-methylcytosine"
ttctcgggaaagataaagttgctatatcacctgtctgcttatctttcagtcaactgttagcggtggataaaaagtccttgctattggttttatgtcattaccctgagggctgtatgtttcgt

SEQ ID NO: 939 - DNA, 122 bp, Homo sapiens
  misc_feature (61)..(62): /note="This region represents a CpG dinucleotide"
  misc_feature (61)..(61): /note="Nucleotide may be methylated to form 5-methylcytosine"
gattttggtggagtgagtctcttcagatgggcattgcttcctctgagacagtttcctgcacgtgttcccggtgctctgttccccgtgctcctggaagacagtgactgtgagatttgcatttt

SEQ ID NO: 940 - DNA, 122 bp, Homo sapiens
  misc_feature (61)..(62): /note="This region represents a CpG dinucleotide"
  misc_feature (61)..(61): /note="Nucleotide may be methylated to form 5-methylcytosine"
ctataaaccagattttactccaaagcccaatgttcttaaacattacatgaacattttcggcgttttttggtttttatcctttcatagtagtatactatcttaccaacccctcgggaattttt

SEQ ID NO: 941 - DNA, 122 bp, Homo sapiens
  misc_feature (61)..(62): /note="This region represents a CpG dinucleotide"
  misc_feature (61)..(61): /note="Nucleotide may be methylated to form 5-methylcytosine"
caggcagagatccaatcttgaggttgagttgttcccaggttaatacaggcctgaccttgtcgcaaccatgtagaccaggacctctggggagaggcaggaagtcagccagccagaatggacat

SEQ ID NO: 942 - DNA, 122 bp, Homo sapiens
  misc_feature (61)..(62): /note="This region represents a CpG dinucleotide"
  misc_feature (61)..(61): /note="Nucleotide may be methylated to form 5-methylcytosine"
agagcagagagataaagagcatttttgttggaagatttccatttattatctctcccaccccgtggagaaggattggtgtcagtttttactcctcgggcagttagttttttagatggaaagac

SEQ ID NO: 943 - DNA, 122 bp, Homo sapiens
  misc_feature (61)..(62): /note="This region represents a CpG dinucleotide"
  misc_feature (61)..(61): /note="Nucleotide may be methylated to form 5-methylcytosine"
aaaccagcgtgagcgactcaggttgagctgcatagttctgccgaagatctcgatatatgacggggcccgttctattgcttgagtcccaatctggatccgcatgcctgtcatcaccatagtgc

SEQ ID NO: 944 - DNA, 122 bp, Homo sapiens
  misc_feature (61)..(62): /note="This region represents a CpG dinucleotide"
  misc_feature (61)..(61): /note="Nucleotide may be methylated to form 5-methylcytosine"
agattttttgttagtttgtttctcttttgcaaaggaataaatcaaggactggaccgggtgcgtgcctgctctgctgcggtttaggatggggcttgaggttctccttccaggatcagctgatg

SEQ ID NO: 945 - DNA, 122 bp, Homo sapiens
  misc_feature (61)..(62): /note="This region represents a CpG dinucleotide"
  misc_feature (61)..(61): /note="Nucleotide may be methylated to form 5-methylcytosine"
acttgagcaatatattagatcagaagcatcctttctctttccctatctgcttcttagaatcgttttcaaacaaatagaataatagtaaatgaagtctgaaaatatcagaaaataaaatccaa

SEQ ID NO: 946 - DNA, 122 bp, Homo sapiens
  misc_feature (61)..(62): /note="This region represents a CpG dinucleotide"
  misc_feature (61)..(61): /note="Nucleotide may be methylated to form 5-methylcytosine"
agaaggcttccaggagggagtgatggcacaatctgggaagttgggatggctggttctggccgcagggcctctgcactggctgctcctgggaacaccctccacctgcatccccgagccacgtc

SEQ ID NO: 947 - DNA, 122 bp, Homo sapiens
  misc_feature (61)..(62): /note="This region represents a CpG dinucleotide"
  misc_feature (61)..(61): /note="Nucleotide may be methylated to form 5-methylcytosine"
atggtgtatcaggcatcactgtatccccgatattctagaacatgcatgacacacagtaggcgctcacaagttttactaatttagtttttgggcagcacggctcccattcggaaccagcaagt

SEQ ID NO: 948 - DNA, 122 bp, Homo sapiens
  misc_feature (61)..(62): /note="This region represents a CpG dinucleotide"
  misc_feature (61)..(61): /note="Nucleotide may be methylated to form 5-methylcytosine"
tactcaggaggctgaggcatgagaacagcttgaatccaggaggcggaggttgcagtgagccgagattgcaccattgcactacaggttgggagacagagcaagactcagtcttaaaaaataat

SEQ ID NO: 949 - DNA, 122 bp, Homo sapiens
  misc_feature (61)..(62): /note="This region represents a CpG dinucleotide"
  misc_feature (61)..(61): /note="Nucleotide may be methylated to form 5-methylcytosine"
gcgggagacttacagctctatccaattagagcgctggattgacaactgccgaatgaggcgcgcagcagagaggagggtgcggcatccgggatctggcgcggcttttgcttgtagctccagcc

SEQ ID NO: 950 - DNA, 122 bp, Homo sapiens
  misc_feature (61)..(62): /note="This region represents a CpG dinucleotide"
  misc_feature (61)..(61): /note="Nucleotide may be methylated to form 5-methylcytosine"
gagtagattccacttcaaaaacttcttcattttctcagttataggaaacaaatgttcatccgttttaccatgagactgcagcaattcagtcacatcttcagtctccacttctaattccagtt

SEQ ID NO: 951 - DNA, 122 bp, Homo sapiens
  misc_feature (61)..(62): /note="This region represents a CpG dinucleotide"
  misc_feature (61)..(61): /note="Nucleotide may be methylated to form 5-methylcytosine"
ccagtacgcagggttccacatagagagcctggctgcatgatcttgaggtcacctaactcccgggcctcccttgtgtgtctggacagggagagaggggaggattggcttcaggagaggcgaga

SEQ ID NO: 952 - DNA, 122 bp, Homo sapiens
  misc_feature (61)..(62): /note="This region represents a CpG dinucleotide"
  misc_feature (61)..(61): /note="Nucleotide may be methylated to form 5-methylcytosine"
ataaaagccaagttcaactgaaaggtgggagaggaagggtctaaggaggagggcgtttcccgggagaacgcccagagctcggctcacctggcgatcctaattacaggggagtttcaccccca

SEQ ID NO: 953 - DNA, 122 bp, Homo sapiens
  misc_feature (61)..(62): /note="This region represents a CpG dinucleotide"
  misc_feature (61)..(61): /note="Nucleotide may be methylated to form 5-methylcytosine"
cggccccccgcaagcagggatggggcggcgagagcgtgacctggggcgtctccgagactccgccccacgggggtatcctgaggctcatatgggaagtggacagtgcccctccagagaaacgg

SEQ ID NO: 954 - DNA, 122 bp, Homo sapiens
  misc_feature (61)..(62): /note="This region represents a CpG dinucleotide"
  misc_feature (61)..(61): /note="Nucleotide may be methylated to form 5-methylcytosine"
acagcaactttctgatgcctgagacagcatgtgaaatgttctctctgtactgcctgttcccgtgacagttttttcatcaaagttgtacaacctccagagaaaacttgtccttttgatgggga

SEQ ID NO: 955 - DNA, 122 bp, Homo sapiens
  misc_feature (61)..(62): /note="This region represents a CpG dinucleotide"
  misc_feature (61)..(61): /note="Nucleotide may be methylated to form 5-methylcytosine"
ccccgcggggacctgctgtgtgtgggtgtgaaggtggtgtggggcaagctgtgggaaccccgtgtcaagccctccccaggccagtgatgagcccaaaagctcctctggaaaacgttgatctt

SEQ ID NO: 956 - DNA, 122 bp, Homo sapiens
  misc_feature (61)..(62): /note="This region represents a CpG dinucleotide"
  misc_feature (61)..(61): /note="Nucleotide may be methylated to form 5-methylcytosine"
gttatttctggacctgcagctcactcataccaacagcgttaatactcattcatacctcagcgttaaagctgagagcatgcacatggcaagcctgggctgacacctaagtactgttctctttt

SEQ ID NO: 957 - DNA, 122 bp, Homo sapiens
  misc_feature (61)..(62): /note="This region represents a CpG dinucleotide"
  misc_feature (61)..(61): /note="Nucleotide may be methylated to form 5-methylcytosine"
aggtatcacatgcagtggaaacaggtagagtaaatgcatgacgtgggaaaaagtgtgatacgtcgaatcaacacaagttgattagatgatctagataattgtgacatagtaggtgacagaga

SEQ ID NO: 958 - DNA, 122 bp, Homo sapiens
  misc_feature (61)..(62): /note="This region represents a CpG dinucleotide"
  misc_feature (61)..(61): /note="Nucleotide may be methylated to form 5-methylcytosine"
cctcacgtctgagctgtttcctgagtcacacaatgtcctggacaccctagtaatggggggcggaggaagagtggaggaacactaggggggatgaaggaggggccttctgtccctgacaaccc

SEQ ID NO: 959 - DNA, 122 bp, Homo sapiens
  misc_feature (61)..(62): /note="This region represents a CpG dinucleotide"
  misc_feature (61)..(61): /note="Nucleotide may be methylated to form 5-methylcytosine"
gagtaagtttccaaacctctctgaggctcagtttcttcttctgaaaagtgaggtgatgtccgtgaggtgcttgatgcacaccttgcatgtaataaatgtcactgattgttctcatgtgtagt

SEQ ID NO: 960 - DNA, 122 bp, Homo sapiens
  misc_feature (61)..(62): /note="This region represents a CpG dinucleotide"
  misc_feature (61)..(61): /note="Nucleotide may be methylated to form 5-methylcytosine"
gttaaggaatattgttctctattcatcatttctcaggtgacacagaaagctcaggcatctcgagatttgctttgattttgtagccagggagtaaattgataactgtgactgaacattgattg

SEQ ID NO: 961 - DNA, 122 bp, Homo sapiens
  misc_feature (61)..(62): /note="This region represents a CpG dinucleotide"
  misc_feature (61)..(61): /note="Nucleotide may be methylated to form 5-methylcytosine"
gactcatcgagccgtagccggctcctcagtacagtgacttgcacacaagctccaaggagccgcgcttatctcctctggccagcctggcgttgcaccgtttgtccgcctgctggggcctggtc

SEQ ID NO: 962 - DNA, 122 bp, Homo sapiens
  misc_feature (61)..(62): /note="This region represents a CpG dinucleotide"
  misc_feature (61)..(61): /note="Nucleotide may be methylated to form 5-methylcytosine"
atggtaaaacagggagattccaaactagcttttaagccttttgcagtcaccagctctcttcggtcctttacctgctcaggaagttgtttcttacttcagatgagtaagacatttttaggaaa

SEQ ID NO: 963 - DNA, 122 bp, Homo sapiens
  misc_feature (61)..(62): /note="This region represents a CpG dinucleotide"
  misc_feature (61)..(61): /note="Nucleotide may be methylated to form 5-methylcytosine"
gaaaggtgggagaggaagggtctaaggaggagggcgtttcccgggagaacgcccagagctcggctcacctggcgatcctaattacaggggagtttcacccccacattcttgggcgctttctt

SEQ ID NO: 964 - DNA, 122 bp, Homo sapiens
  misc_feature (61)..(62): /note="This region represents a CpG dinucleotide"
  misc_feature (61)..(61): /note="Nucleotide may be methylated to form 5-methylcytosine"
agcgcgggtctcagctctggcctagcgactggacgctcgcgctgccggttgttaaaggaccggcaggcagctcccagtgcatactaacatttttaatgtataagattttattacggttcagt

SEQ ID NO: 965 - DNA, 122 bp, Homo sapiens
  misc_feature (61)..(62): /note="This region represents a CpG dinucleotide"
  misc_feature (61)..(61): /note="Nucleotide may be methylated to form 5-methylcytosine"
actctggtctctgggcaaagctgatgcgtcaatggtgggggatgctgacagtgtggggggcggtgtggagggtagcaggtagacaggaattctctgtaccttactctcaaatttgctatgaa

SEQ ID NO: 966 - DNA, 122 bp, Homo sapiens
  misc_feature (61)..(62): /note="This region represents a CpG dinucleotide"
  misc_feature (61)..(61): /note="Nucleotide may be methylated to form 5-methylcytosine"
tgctgcagtcctcgcctgtgtacccgggccagcacacgcagcggccgtccacgcagcgcccgccctcgccacagtcccaggggcagctccgcgtaccacagtcctcgccagtgtagccgggg

SEQ ID NO: 967 - DNA, 122 bp, Homo sapiens
  misc_feature (61)..(62): /note="This region represents a CpG dinucleotide"
  misc_feature (61)..(61): /note="Nucleotide may be methylated to form 5-methylcytosine"
tgtgggacacgtcatgggcagcgccctgacctgagccttcagatgggggagctcggagcccgtccagcctgctgcccagcagacccccacacgcgctgccccccagcccctgcagatggggt

SEQ ID NO: 968 - DNA, 122 bp, Homo sapiens
  misc_feature (61)..(62): /note="This region represents a CpG dinucleotide"
  misc_feature (61)..(61): /note="Nucleotide may be methylated to form 5-methylcytosine"
tggccagcatgtgacggccatttcaggtggtaaagcaggagcagatttgctttttgtgcccgaaaccccttctgacaataacagcagcttccctgttcccctgcacctccctgtcagccgag

SEQ ID NO: 969 - DNA, 122 bp, Homo sapiens
  misc_feature (61)..(62): /note="This region represents a CpG dinucleotide"
  misc_feature (61)..(61): /note="Nucleotide may be methylated to form 5-methylcytosine"
taagtccatcatccttagatcctgtagagcactggctgctgaggcacacttatcaccaaacgcctgttggtgtcactacagagtaggaaccaaattgctctcactgctggatgacaacttgt

SEQ ID NO: 970 - DNA, 122 bp, Homo sapiens
  misc_feature (61)..(62): /note="This region represents a CpG dinucleotide"
  misc_feature (61)..(61): /note="Nucleotide may be methylated to form 5-methylcytosine"
caagtagttccgcaaaactttgagccccgttcccattttcttttggcctagaattgtgaacgtattgttgatttcggcctttttttccccccgtcgcgagaatgtcttgttttgcctttagt

SEQ ID NO: 971 - DNA, 122 bp, Homo sapiens
  misc_feature (61)..(62): /note="This region represents a CpG dinucleotide"
  misc_feature (61)..(61): /note="Nucleotide may be methylated to form 5-methylcytosine"
gacgcccgcgactggggactcggaacctgggccaggctgggacgaggccgcgcgggagggcgcgctgggcggacgctggggccgcggagcccaaccgcccttgtcctggacgccccttggcg

SEQ ID NO: 972 - DNA, 122 bp, Homo sapiens
  misc_feature (61)..(62): /note="This region represents a CpG dinucleotide"
  misc_feature (61)..(61): /note="Nucleotide may be methylated to form 5-methylcytosine"
gtgcccattttcaagcaggtgctcttttagatacggtccccctttcacaaaagttatatccgcggccaggtgcggtggctcacgcctgtaatcccagcactttgggaggctgaggtgggagg

SEQ ID NO: 973 - DNA, 122 bp, Homo sapiens
  misc_feature (61)..(62): /note="This region represents a CpG dinucleotide"
  misc_feature (61)..(61): /note="Nucleotide may be methylated to form 5-methylcytosine"
ctctttgggggaggccacggagcccgacccgctccgggcgcgcaggcagccctcggccgacgggagtaagccctggtggtggtcctacttcacatcgctgagcacccacaggccacgctggc

SEQ ID NO: 974 - DNA, 122 bp, Homo sapiens
  misc_feature (61)..(62): /note="This region represents a CpG dinucleotide"
  misc_feature (61)..(61): /note="Nucleotide may be methylated to form 5-methylcytosine"
agagaacctgccatactcacacttgcccactccagctgggaaggcaagggatggggcacacgtccagtaggggagaatatagcagcaaggcaaaaccacaaagtgcaaatgtccatttcatt

SEQ ID NO: 975 - DNA, 122 bp, Homo sapiens
  misc_feature (61)..(62): /note="This region represents a CpG dinucleotide"
  misc_feature (61)..(61): /note="Nucleotide may be methylated to form 5-methylcytosine"
acacacacacacacacacacacacacacacacacatatgtttataagtgggatgggagaacgggtacggtgataattaaaagaggtaaggtttctcttgagatgaaaatgttctaaaattgt

SEQ ID NO: 976 - DNA, 122 bp, Homo sapiens
  misc_feature (61)..(62): /note="This region represents a CpG dinucleotide"
  misc_feature (61)..(61): /note="Nucleotide may be methylated to form 5-methylcytosine"
caggtgcccaccaccttgcatacagagagttactgtggggcttgccctacaaaatgtccacgacaggaaaagagcttgcagcacactcaacattaatcattaggtcagcatgctctcgacct

SEQ ID NO: 977 - DNA, 122 bp, Homo sapiens
  misc_feature (61)..(62): /note="This region represents a CpG dinucleotide"
  misc_feature (61)..(61): /note="Nucleotide may be methylated to form 5-methylcytosine"
cccgcgggagcagcgagcaggagggatggagggatgggctccccgctgacctggttcatccgctcatccccaggaagcagctgacgctgccgtctctacgcttgtacgaggagcactgcaaa

SEQ ID NO: 978 - DNA, 122 bp, Homo sapiens
  misc_feature (61)..(62): /note="This region represents a CpG dinucleotide"
  misc_feature (61)..(61): /note="Nucleotide may be methylated to form 5-methylcytosine"
tggcaggaagcttcctcacattttcagtttaaatgcattcctcctgatctttccaaaagacggaggcagaacagctggttgccatactccgcataaagtcctttgggtaaattgaaggtaaa

SEQ ID NO: 979 - DNA, 122 bp, Homo sapiens
  misc_feature (61)..(62): /note="This region represents a CpG dinucleotide"
  misc_feature (61)..(61): /note="Nucleotide may be methylated to form 5-methylcytosine"
acctaacacatagggttgttgggagtgttcaatgagatgatgcatggaaagcaattgacacggtgcctggaaacgtagtaagtgctaaaaaatgttacatgagagtattatcattacggctc

SEQ ID NO: 980 - DNA, 122 bp, Homo sapiens
  misc_feature (61)..(62): /note="This region represents a CpG dinucleotide"
  misc_feature (61)..(61): /note="Nucleotide may be methylated to form 5-methylcytosine"
gctccgcttctgctcacactggcagcgttggtgcacgtgggagtgcagtcacggggctcacgttcgcgtttcctcggctgcctggagcccatagagcgctcctttctgggggtgcttcctcg

SEQ ID NO: 981 - DNA, 122 bp, Homo sapiens
  misc_feature (61)..(62): /note="This region represents a CpG dinucleotide"
  misc_feature (61)..(61): /note="Nucleotide may be methylated to form 5-methylcytosine"
ccagaaaccaaaaaaccccagtatgagtagaacacagagaatgagaaggatatgatgcaacgtgagactggagaaacaggtatggacccaaccattcaaggccttatagattatagatttca

SEQ ID NO: 982 - DNA, 122 bp, Homo sapiens
  misc_feature (61)..(62): /note="This region represents a CpG dinucleotide"
  misc_feature (61)..(61): /note="Nucleotide may be methylated to form 5-methylcytosine"
aatgaggaacagccattcccctccagcagggcctcggcaggtgggcccggcaggtgctcccgtgactctgcctccgcctccagccctggtctctgggatgcgaagatggatggaaagaccat

SEQ ID NO: 983 - DNA, 122 bp, Homo sapiens
  misc_feature (61)..(62): /note="This region represents a CpG dinucleotide"
  misc_feature (61)..(61): /note="Nucleotide may be methylated to form 5-methylcytosine"
tgaggaaactgctacctaagagatgctggatgactgaccaggatagtacggcccataaaacgtgggacttggatttgaacccggcactgtcctctcagagtggaactcatgacccccaccag

SEQ ID NO: 984 - DNA, 122 bp, Homo sapiens
  misc_feature (61)..(62): /note="This region represents a CpG dinucleotide"
  misc_feature (61)..(61): /note="Nucleotide may be methylated to form 5-methylcytosine"
catgtgacgctgcgacggggcgtcccgggggtgacactggcatgtgacgctgcgacggggcgtcccggggcagggccctgccaagggacccccaacaaacacgactgaaactcagcctggat

SEQ ID NO: 985 - DNA, 122 bp, Homo sapiens
  misc_feature (61)..(62): /note="This region represents a CpG dinucleotide"
  misc_feature (61)..(61): /note="Nucleotide may be methylated to form 5-methylcytosine"
tattgcattcaaatgcaccacaagcatctttaatagcaacacttcctagggactgtgctacgagggtttgacagactctcaaataccatgtcctctatagggacaggaagagaggtctggta

SEQ ID NO: 986 - DNA, 122 bp, Homo sapiens
  misc_feature (61)..(62): /note="This region represents a CpG dinucleotide"
  misc_feature (61)..(61): /note="Nucleotide may be methylated to form 5-methylcytosine"
ttgcctaactctcaaaatctcatctaacactctatttaagctgaatgctgctgctgtcttcgtagtactatttagcttaaaaattagagaaactgtattcgggtttaacatttttaaacaaa

SEQ ID NO: 987 - DNA, 122 bp, Homo sapiens
  misc_feature (61)..(62): /note="This region represents a CpG dinucleotide"
  misc_feature (61)..(61): /note="Nucleotide may be methylated to form 5-methylcytosine"
ttcccacatgacgtgcgccaccgacacgcagaacgtcaaatttgtcttcgacgctgtcaccgacatcatcatcaaggagaacctcaaagactgtggcctcttctgaggtaggtcgctgccct

SEQ ID NO: 988 - DNA, 122 bp, Homo sapiens
  misc_feature (61)..(62): /note="This region represents a CpG dinucleotide"
  misc_feature (61)..(61): /note="Nucleotide may be methylated to form 5-methylcytosine"
ttccctccccgacgcgcggctgctggcctgcaggaagaactgctggcggtgggccagcctcgctgcgcatgcccacccagaacgccaggcagacaaaggggggcggacgagagtctggggat

SEQ ID NO: 989 - DNA, 122 bp, Homo sapiens
  misc_feature (61)..(62): /note="This region represents a CpG dinucleotide"
  misc_feature (61)..(61): /note="Nucleotide may be methylated to form 5-methylcytosine"
gttgcaacttctgtcactcaaggcctgaggcgggagacttacagctctatccaattagagcgctggattgacaactgccgaatgaggcgcgcagcagagaggagggtgcggcatccgggatc

SEQ ID NO: 990 - DNA, 122 bp, Homo sapiens
  misc_feature (61)..(62): /note="This region represents a CpG dinucleotide"
  misc_feature (61)..(61): /note="Nucleotide may be methylated to form 5-methylcytosine"
ccagttactcagaaggctgaagtaggagaattgcttaagcccaggaggttgaagttgcagcgagttgtgatcttgcaactgcactccagactaggtcacagattcagactctgtctcttaaa

SEQ ID NO: 991 - DNA, 122 bp, Homo sapiens
  misc_feature (61)..(62): /note="This region represents a CpG dinucleotide"
  misc_feature (61)..(61): /note="Nucleotide may be methylated to form 5-methylcytosine"
acttcggcaagagcagtgttttgtggtcctttgacgattgtagccacatcctctcttccccggctctataatagccctaaaacccagcagccttgcaatcttggcagccacgaaaaccagca

SEQ ID NO: 992 - DNA, 122 bp, Homo sapiens
  misc_feature (61)..(62): /note="This region represents a CpG dinucleotide"
  misc_feature (61)..(61): /note="Nucleotide may be methylated to form 5-methylcytosine"
gcctcagcggagcgtcccacggcagtcccggacccgcgcctctcccgcccggctcctgcacgcccagcgagcctgcagcctgggatcctccgctcctgcatcccggctcgggatgggtcccg

SEQ ID NO: 993 - DNA, 122 bp, Homo sapiens
  misc_feature (61)..(62): /note="This region represents a CpG dinucleotide"
  misc_feature (61)..(61): /note="Nucleotide may be methylated to form 5-methylcytosine"
taagatagtgatgactccgagcccctccagctcccctgttctcctcaaccctggtctgagcgcctgctttgtgcgagtcattcaggcttcatcaaggcactatgttaatgttaggtccttct

SEQ ID NO: 994 - DNA, 122 bp, Homo sapiens
  misc_feature (61)..(62): /note="This region represents a CpG dinucleotide"
  misc_feature (61)..(61): /note="Nucleotide may be methylated to form 5-methylcytosine"
tgggcagtagagcggaggcaagccatgcagaggcaggagcagatgagaccctagatgccacgagaagctaaacatgtggggaaaataaagagcagattaactcaggaaaattatatggggag

SEQ ID NO: 995 - DNA, 122 bp, Homo sapiens
  misc_feature (61)..(62): /note="This region represents a CpG dinucleotide"
  misc_feature (61)..(61): /note="Nucleotide may be methylated to form 5-methylcytosine"
caaggcataatattttatggtatgcatttaccatactttacttatgtgtttttaggcaaccgtgtgagtgattctttctggatatactctggagacgaattactaggtcattggttacacca

SEQ ID NO: 996 - DNA, 122 bp, Homo sapiens
  misc_feature (61)..(62): /note="This region represents a CpG dinucleotide"
  misc_feature (61)..(61): /note="Nucleotide may be methylated to form 5-methylcytosine"
tgatttggagcctagagacagggactgtgtcccatgtgccaaagccagaatcggggctcccgaacatgcctcggtgtcctctggaggaaagggaaggtgatggtgctccattcactgctggg

SEQ ID NO: 997 - DNA, 122 bp, Homo sapiens
  misc_feature (61)..(62): /note="This region represents a CpG dinucleotide"
  misc_feature (61)..(61): /note="Nucleotide may be methylated to form 5-methylcytosine"
tacatcctcacagcatatcacacaacaccactcaaatccaggggaacaccagtgttctaacgctaggtggtactagcactgtaactgaagttcccaaatgtctgcttccttttgtacttcag

SEQ ID NO: 998 - DNA, 122 bp, Homo sapiens
  misc_feature (61)..(62): /note="This region represents a CpG dinucleotide"
  misc_feature (61)..(61): /note="Nucleotide may be methylated to form 5-methylcytosine"
ttcttaccagaggaaagagaataactgtctggcagataaatcccagatgtccactctaaccgtccaccttggaacctccaccttcctgtgctcgtcttagaggaattctagaactgtcgttg

SEQ ID NO: 999 - DNA, 122 bp, Homo sapiens
  misc_feature (61)..(62): /note="This region represents a CpG dinucleotide"
  misc_feature (61)..(61): /note="Nucleotide may be methylated to form 5-methylcytosine"
acgtggctgaacttgcacaactgtctaatcctgtgtttccacaccacttgtgacagtgagcgttgcttgacaggggtttatgcaaggacaacgtgtgtgcgcctacgccgtgtgcacgtgtg

SEQ ID NO: 1000 - DNA, 122 bp, Homo sapiens
  misc_feature (61)..(62): /note="This region represents a CpG dinucleotide"
  misc_feature (61)..(61): /note="Nucleotide may be methylated to form 5-methylcytosine"
ttgctccaggggagccccagagttggtggctggctaacccaaggccccagcggcagcctccgcccggccagctcgccatggcacggggtccacagaccctggtgcaggtgtgggtgggcggc

SEQ ID NO: 1001 - DNA, 122 bp, Homo sapiens
  misc_feature (61)..(62): /note="This region represents a CpG dinucleotide"
  misc_feature (61)..(61): /note="Nucleotide may be methylated to form 5-methylcytosine"
ctcttcgtggaactccagttattcaccttttatggtgcttaaaaagtcacttacactctacgtttgtttttaagttttgtctctccatgtttcattttggatagcttctattacattgtcta

SEQ ID NO: 1002 - DNA, 122 bp, Homo sapiens
  misc_feature (61)..(62): /note="This region represents a CpG dinucleotide"
  misc_feature (61)..(61): /note="Nucleotide may be methylated to form 5-methylcytosine"
tagagataattaatatatgaataatatgttcctttcaaaagtttttttctcagctttaaacgcaaaaattaccaggggctgctatgtagggcatacttcagagaaaaagtagctacttcggt

SEQ ID NO: 1003 - DNA, 122 bp, Homo sapiens
  misc_feature (61)..(62): /note="This region represents a CpG dinucleotide"
  misc_feature (61)..(61): /note="Nucleotide may be methylated to form 5-methylcytosine"
gcggtccccgcgcattagaggtgaatcagacacttgaacatctgtccacttcatggaagacgtttcatctcagaatacacgtactaataaacaacagttggagacaattgtctctgacattc

SEQ ID NO: 1004 - DNA, 122 bp, Homo sapiens
  misc_feature (61)..(62): /note="This region represents a CpG dinucleotide"
  misc_feature (61)..(61): /note="Nucleotide may be methylated to form 5-methylcytosine"
ggagtgcccccgtgggattgtcgcgcaccgtgggtgcacgccaggaatgccatgatccaacgacccctgtgcagaggctgctggaaaggcactttcttcattgggaggacacaggccctgtt

SEQ ID NO: 1005 - DNA, 122 bp, Homo sapiens
  misc_feature (61)..(62): /note="This region represents a CpG dinucleotide"
  misc_feature (61)..(61): /note="Nucleotide may be methylated to form 5-methylcytosine"
ggagctgctggggctcccctagggggtgggcggcgggcgggtcagcagagcgcattggaacgccagcctagacctctggcctggccccgcctcccctaactcaccaggccgcagcgtgaccc

SEQ ID NO: 1006 - DNA, 122 bp, Homo sapiens
  misc_feature (61)..(62): /note="This region represents a CpG dinucleotide"
  misc_feature (61)..(61): /note="Nucleotide may be methylated to form 5-methylcytosine"
cttgaatgagaataaagccaatttcaaaccttactgttactttcatctctggaggtgacacgtgagagcaattaagagaggactctgaggggaaaaaattcctacctccgttgaaagaggct

SEQ ID NO: 1007 - DNA, 122 bp, Homo sapiens
  misc_feature (61)..(62): /note="This region represents a CpG dinucleotide"
  misc_feature (61)..(61): /note="Nucleotide may be methylated to form 5-methylcytosine"
atagaaccagacgatctccttgtggacacgcaggaaaacgtctgcagtggttacctcacacgcccctccttgggggacaggcagggaaagaaaggtcatggagcccacagtggctcatttac

SEQ ID NO: 1008 - DNA, 122 bp, Homo sapiens
  misc_feature (61)..(62): /note="This region represents a CpG dinucleotide"
  misc_feature (61)..(61): /note="Nucleotide may be methylated to form 5-methylcytosine"
gctcttcctgctgcgccagtgcctgcgctcgctgggcggctatgtgctgtcgctcgtgcacgatgtgcgcttccaccactttcccatcgagcgccagctcaacggcacctacgccattgccg

SEQ ID NO: 1009 - DNA, 122 bp, Homo sapiens
  misc_feature (61)..(62): /note="This region represents a CpG dinucleotide"
  misc_feature (61)..(61): /note="Nucleotide may be methylated to form 5-methylcytosine"
tgcaactttgaatgcacatggggtggcgaggaaggaagaagagtaagaaaacaggaaaaacgaagtaggatagagagagcagcctctttgtctttacagcagagaatcagacacccaattag

SEQ ID NO: 1010 - DNA, 122 bp, Homo sapiens
  misc_feature (61)..(62): /note="This region represents a CpG dinucleotide"
  misc_feature (61)..(61): /note="Nucleotide may be methylated to form 5-methylcytosine"
cgtatcctgttgcaggcgctgcctacccagtgctgggagaaaaagaaacagtcgcagacacgcacactcacactcgcaggcacctggggctccaagagagagttaaatctccttcgtggagt

SEQ ID NO: 1011 - DNA, 122 bp, Homo sapiens
  misc_feature (61)..(62): /note="This region represents a CpG dinucleotide"
  misc_feature (61)..(61): /note="Nucleotide may be methylated to form 5-methylcytosine"
caaaaccttggtggggactggggtaccagggagtctgaggctctaatcagtatttcttgccgtcagtaggcaggatgtctaggagctgcctgaggtcagggtcaaggcctgatgttgtgagg

SEQ ID NO: 1012 - DNA, 122 bp, Homo sapiens
  misc_feature (61)..(62): /note="This region represents a CpG dinucleotide"
  misc_feature (61)..(61): /note="Nucleotide may be methylated to form 5-methylcytosine"
gggacatgaaatctccttgtcgtaggcggacttaaagtgtccttcgaggaagctcctgtccggagccaccacccagccagacagcagcatctgcaggtgcggtgccctggacctgccccagg

SEQ ID NO: 1013 - DNA, 122 bp, Homo sapiens
  misc_feature (61)..(62): /note="This region represents a CpG dinucleotide"
  misc_feature (61)..(61): /note="Nucleotide may be methylated to form 5-methylcytosine"
agatagtcactcaacctcacctgtccaaaagcagaagagaaacgtaatacagcaaagcaacgtgcagtctgtttcacaggctacatgactcaggaaatgaagaaggatttagatctttacaa

SEQ ID NO: 1014 - DNA, 122 bp, Homo sapiens
  misc_feature (61)..(62): /note="This region represents a CpG dinucleotide"
  misc_feature (61)..(61): /note="Nucleotide may be methylated to form 5-methylcytosine"
cagacattacttttgctgtaacaaccattcttagctacctgaacaaggcctcataatagccgggggaaaagggagtatataacaggctatgacctaaaaggcctgctatatgttttagctat

SEQ ID NO: 1015 - DNA, 122 bp, Homo sapiens
  misc_feature (61)..(62): /note="This region represents a CpG dinucleotide"
  misc_feature (61)..(61): /note="Nucleotide may be methylated to form 5-methylcytosine"
agtctcacccactggactacaacttgaggtcagtgcttgtgtcttcctcgtctcttcatacgcaacacccatcaagatgctcagcatgtagtaaatgataagtaaactaagtgaaagaatag

SEQ ID NO: 1016 - DNA, 122 bp, Homo sapiens
  misc_feature (61)..(62): /note="This region represents a CpG dinucleotide"
  misc_feature (61)..(61): /note="Nucleotide may be methylated to form 5-methylcytosine"
cagaactctcctggctgctgcctaccctgacctagacaaccaaacccacggattctcagacggaggaatagctcaggcttcggagtccacagaccaccatcacccaggcacctgaatacact

SEQ ID NO: 1017 - DNA, 122 bp, Homo sapiens
  misc_feature (61)..(62): /note="This region represents a CpG dinucleotide"
  misc_feature (61)..(61): /note="Nucleotide may be methylated to form 5-methylcytosine"
cgctgggcagctctgcaccggcatcgccgcatctctccccattgtgccgggaccacgggacggtagtcaagggaaaatcctgactcagggtgtggggttcatgaatgagaagagctttgggc

SEQ ID NO: 1018 - DNA, 122 bp, Homo sapiens
  misc_feature (61)..(62): /note="This region represents a CpG dinucleotide"
  misc_feature (61)..(61): /note="Nucleotide may be methylated to form 5-methylcytosine"
gggcagggggagctgcgaggagccttttttttttttttttttcctgcgcagagccccttgcgtgacacacagtaggcgctcaatacatgtttattttcagttgagtgttgcttcagctttta

SEQ ID NO: 1019 - DNA, 122 bp, Homo sapiens
  misc_feature (61)..(62): /note="This region represents a CpG dinucleotide"
  misc_feature (61)..(61): /note="Nucleotide may be methylated to form 5-methylcytosine"
tctggccgttctgttggagcgcctctgactgacttcccccatgtgtccgtgtggccacaccgtgctactttcagaggcagtgggcttttcgctaagggataaaaagaagtaaaaccttgcct

SEQ ID NO: 1020 - DNA, 122 bp, Homo sapiens
  misc_feature (61)..(62): /note="This region represents a CpG dinucleotide"
  misc_feature (61)..(61): /note="Nucleotide may be methylated to form 5-methylcytosine"
tgaagtgtcccagaattccttgcctccttcccggaaccagtagtcatgaacagagttattcgtgtagtagggtggagataggagaatgagcaaggcatgagggtgcacagacactcctgtac

SEQ ID NO: 1021 - DNA, 122 bp, Homo sapiens
  misc_feature (61)..(62): /note="This region represents a CpG dinucleotide"
  misc_feature (61)..(61): /note="Nucleotide may be methylated to form 5-methylcytosine"
tcttataacttaacttctcaaattaaactcatcatttctcctctgtgttcccttgctcaacgatatttatgcccaaatcctattctgaaatctgggagtcatactagaatccaaattcccct

SEQ ID NO: 1022 - DNA, 122 bp, Homo sapiens
  misc_feature (61)..(62): /note="This region represents a CpG dinucleotide"
  misc_feature (61)..(61): /note="Nucleotide may be methylated to form 5-methylcytosine"
gggcccacagcataccgaggctcattaagcaataaagatcgtgactgagaatattgttcacgattaatgacaggctgggggccgaaaacgcacagctgacggccaggaagcccagttggtaa

SEQ ID NO: 1023 - DNA, 122 bp, Homo sapiens
  misc_feature (61)..(62): /note="This region represents a CpG dinucleotide"
  misc_feature (61)..(61): /note="Nucleotide may be methylated to form 5-methylcytosine"
tttttcatgttgacatcatcttatttcactttggggaaagtttttttctaaggatgatagcgaaaagtccttttgtcttgtgacaatagcaatttttatgtcagcttgggtttttttcctcc

SEQ ID NO: 1024 - DNA, 122 bp, Homo sapiens
  misc_feature (61)..(62): /note="This region represents a CpG dinucleotide"
  misc_feature (61)..(61): /note="Nucleotide may be methylated to form 5-methylcytosine"
cagcagcggagccgagaatggcgaggccagcgggcgaccaggcctccggccaagggcacgcgaccccccgcgcttcccgagtgctcccctgaagcctggtacgcgtgggcaccggcgcacgg

SEQ ID NO: 1025 - DNA, 122 bp, Homo sapiens
  misc_feature (61)..(62): /note="This region represents a CpG dinucleotide"
  misc_feature (61)..(61): /note="Nucleotide may be methylated to form 5-methylcytosine"
atcttaacctaccaaattgttggcacagcctgcagtttgagaaatgtcactgttgaccagcgattttcaaacgttcgtgtgcatcagactcaactgcagagtgtgctaaaacaatctgctcc

SEQ ID NO: 1026 - DNA, 122 bp, Homo sapiens
  misc_feature (61)..(62): /note="This region represents a CpG dinucleotide"
  misc_feature (61)..(61): /note="Nucleotide may be methylated to form 5-methylcytosine"
gggggaggggggcattccaggcgggcacagaagtgggctggtcaaaggcaggtttcaggacggcgactggccaggccggctggaaaggagggtaatatgaccagcttgtctcctgcctgtgg

SEQ ID NO: 1027 - DNA, 122 bp, Homo sapiens
  misc_feature (61)..(62): /note="This region represents a CpG dinucleotide"
  misc_feature (61)..(61): /note="Nucleotide may be methylated to form 5-methylcytosine"
gacagccctactttgaaatcttggctctgtccttgccacagcttgacgagagtactgggacgtgtccttgacagggcatctggggcccctgggaggaagcagctgagtcatgtggggagcac

SEQ ID NO: 1028 - DNA, 122 bp, Homo sapiens
  misc_feature (61)..(62): /note="This region represents a CpG dinucleotide"
  misc_feature (61)..(61): /note="Nucleotide may be methylated to form 5-methylcytosine"
gtaactgagaactgttgatagttacttggttatatgtagtctatgaccaaaagaaacatccgaggctttatgatcttcaaatagtttgaatacttggccacaccacagtgatagggcttttt

SEQ ID NO: 1029 - DNA, 122 bp, Homo sapiens
  misc_feature (61)..(62): /note="This region represents a CpG dinucleotide"
  misc_feature (61)..(61): /note="Nucleotide may be methylated to form 5-methylcytosine"
ctcaggcaggatagtgacgggccgtgtgactgtgacgccatcatcaggttggtgagatggcgtgaccgcgtgctgcctatcagtctcctgtatgttcctccaccatctatcttgatattcag

SEQ ID NO: 1030 - DNA, 122 bp, Homo sapiens
  misc_feature (61)..(62): /note="This region represents a CpG dinucleotide"
  misc_feature (61)..(61): /note="Nucleotide may be methylated to form 5-methylcytosine"
ggccccctcggcccaggagctacgcgagctcggattgtgtttccccggcgaggacagggacgcgcgcgggcggggagcaggggcccggtggctccgacgccggaggcttgcggcccagggcc

SEQ ID NO: 1031 - DNA, 122 bp, Homo sapiens
  misc_feature (61)..(62): /note="This region represents a CpG dinucleotide"
  misc_feature (61)..(61): /note="Nucleotide may be methylated to form 5-methylcytosine"
cacttgacccagatcctaatttttgcttgatgcactatttacctgtatcaaattacagtccgttcctttgaatttttttttttttttttttttttttttttttttttttgagacactgtctc

SEQ ID NO: 1032 - DNA, 122 bp, Homo sapiens
  misc_feature (61)..(62): /note="This region represents a CpG dinucleotide"
  misc_feature (61)..(61): /note="Nucleotide may be methylated to form 5-methylcytosine"
ccaactcccgggctcatgtaatcctcccacctcagcctcccgagtagctgggactggaggcgggagccaccatgtcgggctaattggtttttctgtagagatcgggcctccctaggttgccc

SEQ ID NO: 1033 - DNA, 122 bp, Homo sapiens
  misc_feature (61)..(62): /note="This region represents a CpG dinucleotide"
  misc_feature (61)..(61): /note="Nucleotide may be methylated to form 5-methylcytosine"
acggctgggctattacaaccccttctacttcctgagccccagggccgcgggggcttgacccgggggcagctgctggcatcagcacccctgctacagtcacgggcctgggaccctgggttcct

SEQ ID NO: 1034 - DNA, 122 bp, Homo sapiens
  misc_feature (61)..(62): /note="This region represents a CpG dinucleotide"
  misc_feature (61)..(61): /note="Nucleotide may be methylated to form 5-methylcytosine"
gcttagaggaaacatgtacaggacttggcaaagaacctgactccatgtgaatgctcactccgtgtgaaattgttcttattatagtgatttgtggggaagaaataaccaaggagggaaataaa

SEQ ID NO: 1035 - DNA, 122 bp, Homo sapiens
  misc_feature (61)..(62): /note="This region represents a CpG dinucleotide"
  misc_feature (61)..(61): /note="Nucleotide may be methylated to form 5-methylcytosine"
aagttaaatatgttgaaatctttcttccctgcaatactggcatcagcgtgctggacaaaacgtagcaaactagaagtaacttgtgaatttttaataaagttgtcttccctagcagagctaaa

SEQ ID NO: 1036 - DNA, 122 bp, Homo sapiens
  misc_feature (61)..(62): /note="This region represents a CpG dinucleotide"
  misc_feature (61)..(61): /note="Nucleotide may be methylated to form 5-methylcytosine"
tctccaccacccctgtatgcacagagaagaggccatgtcaggacacagcaagaaggcagccgtctacaagccaggaagtgagccctcaccagaaaccaacgatggcacctttatcttgtcat

SEQ ID NO: 1037 - DNA, 122 bp, Homo sapiens
  misc_feature (61)..(62): /note="This region represents a CpG dinucleotide"
  misc_feature (61)..(61): /note="Nucleotide may be methylated to form 5-methylcytosine"
ggctaaccacaagacttcccgtctgcctctcccactgggaggcaggctcatcctccagggcggcctgggagggagtaattttaattttaattgaggtaaagttcacatcacgtaaaatgaac

SEQ ID NO: 1038 - DNA, 122 bp, Homo sapiens
  misc_feature (61)..(62): /note="This region represents a CpG dinucleotide"
  misc_feature (61)..(61): /note="Nucleotide may be methylated to form 5-methylcytosine"
acaaggcctcttgaggcctagacttggaacaggcactccatcaattacgccacatgctttcgcccaaagcaagtctcaaggtcaagccagttttcccccgatttagcagtagggaaatagaa

SEQ ID NO: 1039 - DNA, 122 bp, Homo sapiens
  misc_feature (61)..(62): /note="This region represents a CpG dinucleotide"
  misc_feature (61)..(61): /note="Nucleotide may be methylated to form 5-methylcytosine"
tgggaagtgccccagcaggccccgtggttgtctggctttgttgactgtctgaatgcaacacgttgacaatgggttagctgctttggttttagggttattctccttatgcctcatgcaaatga

SEQ ID NO: 1040 - DNA, 122 bp, Homo sapiens
  misc_feature (61)..(62): /note="This region represents a CpG dinucleotide"
  misc_feature (61)..(61): /note="Nucleotide may be methylated to form 5-methylcytosine"
tgaatgacaatcccccacaggtgaccatgtctgcactcaccagccccatcccagagaactcgcctgagatagtagttgctgttttcagcgtttcagatcctgactccggaaacaatgggaag

SEQ ID NO: 1041 - DNA, 122 bp, Homo sapiens
  misc_feature (61)..(62): /note="This region represents a CpG dinucleotide"
  misc_feature (61)..(61): /note="Nucleotide may be methylated to form 5-methylcytosine"
tcacagcgcgctggcgctacacgcccgctaaaagaaggttgatttctaattggccccggtcggccaatagaaaaaagataatctggagcgttttcattggtccgctaaagataatgacccgc

SEQ ID NO: 1042 - DNA, 122 bp, Homo sapiens
  misc_feature (61)..(62): /note="This region represents a CpG dinucleotide"
  misc_feature (61)..(61): /note="Nucleotide may be methylated to form 5-methylcytosine"
cccacctggctttgccatcggcttcttgttttccgaggattctgctggtaaccttgttgccgagctcctcagcgcccccaccacctggtccagccctaattttaccagctctttactgacac

SEQ ID NO: 1043 - DNA, 122 bp, Homo sapiens
  misc_feature (61)..(62): /note="This region represents a CpG dinucleotide"
  misc_feature (61)..(61): /note="Nucleotide may be methylated to form 5-methylcytosine"
attggaccttcagtttagtaatgaccagagctaaagataggcctggcacacctgggcacccgtctatatctttatattctgtttatgtggcctgtttgctagtggatgagagtagactatga

SEQ ID NO: 1044 - DNA, 122 bp, Homo sapiens
  misc_feature (61)..(62): /note="This region represents a CpG dinucleotide"
  misc_feature (61)..(61): /note="Nucleotide may be methylated to form 5-methylcytosine"
acacgggactcgggaaccgctatctccaaagggcagctttctttgagggaggctgttagacgtgactccttgtttctaaaaatggacaaataccagcctgggcaacatgacaaaaacccatt

SEQ ID NO: 1045 - DNA, 122 bp, Homo sapiens
  misc_feature (61)..(62): /note="This region represents a CpG dinucleotide"
  misc_feature (61)..(61): /note="Nucleotide may be methylated to form 5-methylcytosine"
tggcttgaggaaaggacagaaagtaacctcagggttcatctctgctccctagtcgggtgccgtgcctcacgcctgcaatcccagcactttgggaggccgaggaaggcaaatcacttgagtcc

SEQ ID NO: 1046 - DNA, 122 bp, Homo sapiens
  misc_feature (61)..(62): /note="This region represents a CpG dinucleotide"
  misc_feature (61)..(61): /note="Nucleotide may be methylated to form 5-methylcytosine"
tctgtgggacagataatgggtgatcgacatgcactctgcaccaggagtggttagaagatccgccgagcttccttactgaaagtggctgctgcgggcaagttctgtttccgccgagcactctt

SEQ ID NO: 1047 - DNA, 122 bp, Homo sapiens
  misc_feature (61)..(62): /note="This region represents a CpG dinucleotide"
  misc_feature (61)..(61): /note="Nucleotide may be methylated to form 5-methylcytosine"
ttttttttttttttttttgaggcagagtctcgctctgctgcccagactggagtgcagtggcgcgagctccactcactgcaacctccgcatgctaggttccagcaattctcctgcctcagcct

SEQ ID NO: 1048 - DNA, 122 bp, Homo sapiens
  misc_feature (61)..(62): /note="This region represents a CpG dinucleotide"
  misc_feature (61)..(61): /note="Nucleotide may be methylated to form 5-methylcytosine"
attttcactgtaagtttattttgtttccttcaacattgactgtgttctttttcaaataaacggaccagaggcataataaatttctggttgctaggtgtggtttcctacaaacatgccacatc

SEQ ID NO: 1049 - DNA, 122 bp, Homo sapiens
  misc_feature (61)..(62): /note="This region represents a CpG dinucleotide"
  misc_feature (61)..(61): /note="Nucleotide may be methylated to form 5-methylcytosine"
ccctctaagaggggtacctggtctgtctctcctggagctgctgctctttgctgactcaaacgttcttaccaatgttcataccttttgacatttctcatacctattgaacatttactttctca

SEQ ID NO: 1050 - DNA, 122 bp, Homo sapiens
  misc_feature (61)..(62): /note="This region represents a CpG dinucleotide"
  misc_feature (61)..(61): /note="Nucleotide may be methylated to form 5-methylcytosine"
gcctggcctttttatttggtcagctaccaggctgttgtgttggttgtcatgggaatggatcgtaagtcctctatattagtttcctgttttgaaaatgaattatgacgaatgtagtagcttaa

SEQ ID NO: 1051 - DNA, 122 bp, Homo sapiens
  misc_feature (61)..(62): /note="This region represents a CpG dinucleotide"
  misc_feature (61)..(61): /note="Nucleotide may be methylated to form 5-methylcytosine"
tggtgagcaagccaacaagggcctgcccacttgaagcttgctgcctaggtgggaggagaccgaggttcaacagaaaatcatgcatgtgatcattaaagttgggaagaaagttagggaggaaa

SEQ ID NO: 1052 - DNA, 122 bp, Homo sapiens
  misc_feature (61)..(62): /note="This region represents a CpG dinucleotide"
  misc_feature (61)..(61): /note="Nucleotide may be methylated to form 5-methylcytosine"
cccgcccctccctacctaattaaggaccctaatcagcttggggagattaagggctctggccggctgtacccacgcccccgccctggcctgggctggcaaggaagacctgtgggcgggcgtca

SEQ ID NO: 1053 - DNA, 122 bp, Homo sapiens
  misc_feature (61)..(62): /note="This region represents a CpG dinucleotide"
  misc_feature (61)..(61): /note="Nucleotide may be methylated to form 5-methylcytosine"
acatgcacccccgcttgcatgcacctcgcctcccacccccgctcacacgcacccccggctcgcatcctgggctcccatgcacccccggctcccatgcacccctgggtcacacgcatccccgc

SEQ ID NO: 1054 - DNA, 122 bp, Homo sapiens
  misc_feature (61)..(62): /note="This region represents a CpG dinucleotide"
  misc_feature (61)..(61): /note="Nucleotide may be methylated to form 5-methylcytosine"
acatatacggtcattgtctctgctgcttcccactgcagctttatataataaaacaagccgcgtcaaataggctaggctgtaatattaggtaaaatctaatttcagtttggttatcacatagc

SEQ ID NO: 1055 - DNA, 122 bp, Homo sapiens
  misc_feature (61)..(62): /note="This region represents a CpG dinucleotide"
  misc_feature (61)..(61): /note="Nucleotide may be methylated to form 5-methylcytosine"
aatatcaattttaccttgcttgtgattttgtgggttagaaatacatgaaggactcgggtgcgtgactcatcagctgaagtagctgggactagaggatcaattttcaagaaggcttattcact

SEQ ID NO: 1056 - DNA, 122 bp, Homo sapiens
  misc_feature (61)..(62): /note="This region represents a CpG dinucleotide"
  misc_feature (61)..(61): /note="Nucleotide may be methylated to form 5-methylcytosine"
acatttatcttttgccactaagctccctgttaggatctgccaatcagaggacgctaggggcggactggaaggctgagtggggaagaaggaagacacttcctgtttgcttcctgttctgttta

SEQ ID NO: 1057 - DNA, 122 bp, Homo sapiens
  misc_feature (61)..(62): /note="This region represents a CpG dinucleotide"
  misc_feature (61)..(61): /note="Nucleotide may be methylated to form 5-methylcytosine"
ccgtccacctgctcctcttgctcccgtttctgcttcttctgaggtttatccatgtggcatcgctaatggtctccctgctagtgggaattttgtgacaatgggaccttgtttattttactgct

SEQ ID NO: 1058 - DNA, 122 bp, Homo sapiens
  misc_feature (61)..(62): /note="This region represents a CpG dinucleotide"
  misc_feature (61)..(61): /note="Nucleotide may be methylated to form 5-methylcytosine"
taaaatcttaggaaacccactgtgtttgcatatgaaagccaggttctataatccatgctacgccttctgtctgtctcatttgcttctgaagtctgagggaaagatgggtgttattttgcact

SEQ ID NO: 1059 - DNA, 122 bp, Homo sapiens
  misc_feature (61)..(62): /note="This region represents a CpG dinucleotide"
  misc_feature (61)..(61): /note="Nucleotide may be methylated to form 5-methylcytosine"
gcttgcaccctgcacgtgctgccctctgactgcagggtgccggcagcctcctccgacctccgaagagtggtcattgatttgtccttcaggcctcatccactgccgcgacccccaccccgagt

SEQ ID NO: 1060 - DNA, 122 bp, Homo sapiens
  misc_feature (61)..(62): /note="This region represents a CpG dinucleotide"
  misc_feature (61)..(61): /note="Nucleotide may be methylated to form 5-methylcytosine"
cgggaaggaactattgttctttacatccattttatttcccaatctgcccccgacatctggcgcaaacttaaaaaggctgaagatgcccctcagaccccacaacgagacctccttaacttggc

SEQ ID NO: 1061 - DNA, 122 bp, Homo sapiens
  misc_feature (61)..(62): /note="This region represents a CpG dinucleotide"
  misc_feature (61)..(61): /note="Nucleotide may be methylated to form 5-methylcytosine"
ccagcgcgtcccccccgcacccccggcccctcctccgcgccaactgtgtaaatcagccgccgcagtcctctcgccgcgcatcgcaggcaaaatcccggcttaggaagcaaggaagcaagtga

SEQ ID NO: 1062 - DNA, 122 bp, Homo sapiens
  misc_feature (61)..(62): /note="This region represents a CpG dinucleotide"
  misc_feature (61)..(61): /note="Nucleotide may be methylated to form 5-methylcytosine"
tcgtaaggaagtagactacattacgggaggccttaagtagccttaaattcaggcaagcatcgttctttgagttggttgcacccaaactcaatctcactctctcaaagctttctggccaggtt

SEQ ID NO: 1063 - DNA, 122 bp, Homo sapiens
  misc_feature (61)..(62): /note="This region represents a CpG dinucleotide"
  misc_feature (61)..(61): /note="Nucleotide may be methylated to form 5-methylcytosine"
ccgccctgccacgcgcaggccgcagcgcggggacccaagctgctgcccgggagcggcagtcgccagtagaaatggacagaccggtcctgtcagagcctgtggcttttgttgtaaacgtctag

SEQ ID NO: 1064 - DNA, 122 bp, Homo sapiens
  misc_feature (61)..(62): /note="This region represents a CpG dinucleotide"
  misc_feature (61)..(61): /note="Nucleotide may be methylated to form 5-methylcytosine"
taatttgtctttcttcactctggtgtggaaattttgatagagattccaatatcacttaaacgtttcccagaatatttagatagaataatttagtttcttctgaaaagtttattttaggctag

SEQ ID NO: 1065 - DNA, 122 bp, Homo sapiens
  misc_feature (61)..(62): /note="This region represents a CpG dinucleotide"
  misc_feature (61)..(61): /note="Nucleotide may be methylated to form 5-methylcytosine"
gccgttgtctcattttctcttctcatatctgccagatgtgttcttgaagcaatagctgcacgttaatcagctacttccacagccctggtgcgggcattgccttctttctgcttatttcttat

SEQ ID NO: 1066 - DNA, 122 bp, Homo sapiens
  misc_feature (61)..(62): /note="This region represents a CpG dinucleotide"
  misc_feature (61)..(61): /note="Nucleotide may be methylated to form 5-methylcytosine"
gagagttaaactgactggccttcagtgctagccatattgcactttctttcctgattagcacgggtgccaggctgttccttcaaattaagacaatatgcttatagtgatgagccgtattggcc

SEQ ID NO: 1067 - DNA, 122 bp, Homo sapiens
  misc_feature (61)..(62): /note="This region represents a CpG dinucleotide"
  misc_feature (61)..(61): /note="Nucleotide may be methylated to form 5-methylcytosine"
ggagtaagtatttctcctgaattattcaccagcttccaggagatggaaccatcactgtggcgtcttgttacaggagtgctgtggcctctcctctggtggagcaccggaagtggaaggcacgc

SEQ ID NO: 1068 - DNA, 122 bp, Homo sapiens
  misc_feature (61)..(62): /note="This region represents a CpG dinucleotide"
  misc_feature (61)..(61): /note="Nucleotide may be methylated to form 5-methylcytosine"
gttaaaaatagccaaggattaggcaaaccctgaggacacaaaagaacagcatctccttcccggctttcgctttgctgtccctccttctgaaatacacacgctcatgcgcgtgttaatttagc

SEQ ID NO: 1069 - DNA, 122 bp, Homo sapiens
  misc_feature (61)..(62): /note="This region represents a CpG dinucleotide"
  misc_feature (61)..(61): /note="Nucleotide may be methylated to form 5-methylcytosine"
ggctgcagggaccccatcagctggatgactgcactgactgcttgtaagacggttagcatgcgccatctaccagattttttgtttattacaagcaccagcaaattccatggagaaattgtggg

SEQ ID NO: 1070 - DNA, 122 bp, Homo sapiens
  misc_feature (61)..(62): /note="This region represents a CpG dinucleotide"
  misc_feature (61)..(61): /note="Nucleotide may be methylated to form 5-methylcytosine"
acacacacacacacacacacacacacacatatgtttataagtgggatgggagaacgggtacggtgataattaaaagaggtaaggtttctcttgagatgaaaatgttctaaaattgtgatggc

SEQ ID NO: 1071 - DNA, 122 bp, Homo sapiens
  misc_feature (61)..(62): /note="This region represents a CpG dinucleotide"
  misc_feature (61)..(61): /note="Nucleotide may be methylated to form 5-methylcytosine"
acaagcatgagccaccatgcccagccatgcctgattattttttgtattttttttggtgggcggggaggtagagatgcgatcttgctaggttgcccaagctggtctcgaactcctggcctgag

SEQ ID NO: 1072 - DNA, 122 bp, Homo sapiens
  misc_feature (61)..(62): /note="This region represents a CpG dinucleotide"
  misc_feature (61)..(61): /note="Nucleotide may be methylated to form 5-methylcytosine"
agtttttcaacataaagattaacttaaaagctttacagttttttataaagacacctcctacgaaggtaaatggctgtattttcatgtgaccccaatgagaagtaaaatccaccagggggcgc

SEQ ID NO: 1073 - DNA, 122 bp, Homo sapiens
  misc_feature (61)..(62): /note="This region represents a CpG dinucleotide"
  misc_feature (61)..(61): /note="Nucleotide may be methylated to form 5-methylcytosine"
attgttgctatgggactggggagtggaggtatgggggaggtggtggactcgccatggaggcggggtgttggtctccagtacctatctggagatggccctccagagtcctcctccttgcttgc

SEQ ID NO: 1074 - DNA, 122 bp, Homo sapiens
  misc_feature (61)..(62): /note="This region represents a CpG dinucleotide"
  misc_feature (61)..(61): /note="Nucleotide may be methylated to form 5-methylcytosine"
gtgcccgtggaggattaattggttagccatgcccacttagccctcgtttaatttattttgcggaaatgagagggaaggagatggcttgagtgaacgtcaggctgtccttggagaatctgggg

SEQ ID NO: 1075 - DNA, 122 bp, Homo sapiens
  misc_feature (61)..(62): /note="This region represents a CpG dinucleotide"
  misc_feature (61)..(61): /note="Nucleotide may be methylated to form 5-methylcytosine"
ggcagaggaagctaacacccacagagagagctgagggtgatagccttgtatctagagcaacgcccaaacagcagtgcaaatcgatgattactgagggcatccttgaggcattagtgggaccg

SEQ ID NO: 1076 - DNA, 122 bp, Homo sapiens
  misc_feature (61)..(62): /note="This region represents a CpG dinucleotide"
  misc_feature (61)..(61): /note="Nucleotide may be methylated to form 5-methylcytosine"
agtaaacaaaggctgcagattgatgtaaaaataattcccttgttctgactaatacactcacgcacgcatgcatttccttccagtcaccacagctagctgaccttaggaaactcaagtaatga

SEQ ID NO: 1077 - DNA, 122 bp, Homo sapiens
  misc_feature (61)..(62): /note="This region represents a CpG dinucleotide"
  misc_feature (61)..(61): /note="Nucleotide may be methylated to form 5-methylcytosine"
cccaggagaaaccacacatcctggggctcaaaccactgggccgtgtgactcgtgcgcttgcgcggcagggagcagcgggactaggaaatctcctctgagaggacagtcaatcagaaggcgct

SEQ ID NO: 1078 - DNA, 122 bp, Homo sapiens
  misc_feature (61)..(62): /note="This region represents a CpG dinucleotide"
  misc_feature (61)..(61): /note="Nucleotide may be methylated to form 5-methylcytosine"
gaggcaccaccctagaacctcatgttcacagaaacacatcatcatgacaagcagcagtcacgacaagcaggtgaagggaagtgcaattctgaaagtaacaccacataagcaaagtgggaaat

SEQ ID NO: 1079 - DNA, 122 bp, Homo sapiens
  misc_feature (61)..(62): /note="This region represents a CpG dinucleotide"
  misc_feature (61)..(61): /note="Nucleotide may be methylated to form 5-methylcytosine"
tcctggcgcctccttgtgctgcttcatgcaactgtttccttcaggttgctctccccaaagcgcctgggattgcagcagcagaggtgcttgatggactgtgcctgtctctacctgccttcctc

SEQ ID NO: 1080 - DNA, 122 bp, Homo sapiens
  misc_feature (61)..(62): /note="This region represents a CpG dinucleotide"
  misc_feature (61)..(61): /note="Nucleotide may be methylated to form 5-methylcytosine"
ctacaaaacccgaggtcatttggttaattccactgccgagctccccacggcgcatacccccggatgcttcggcccagccaggttccttgctaagggcaagttttacgaccttgggaacattg

SEQ ID NO: 1081 - DNA, 122 bp, Homo sapiens
  misc_feature (61)..(62): /note="This region represents a CpG dinucleotide"
  misc_feature (61)..(61): /note="Nucleotide may be methylated to form 5-methylcytosine"
gaggagagagggggaaaagctccgagcggtgcgtgtggagggtgcaagcgcttgcaagtgcgtgcaagtgggctggtacgtgtgttgagaaggcatgagtgtgtatgaaggggtatagagag

SEQ ID NO: 1082 - DNA, 122 bp, Homo sapiens
  misc_feature (61)..(62): /note="This region represents a CpG dinucleotide"
  misc_feature (61)..(61): /note="Nucleotide may be methylated to form 5-methylcytosine"
tttttcctacaactgtatatatataaaaatatatttaaacatatatttatatatcatatccgtaatgtaaataaatgtctagcatgtttttcaagactcattaatgcagttgcctctttcct

SEQ ID NO: 1083 - DNA, 122 bp, Homo sapiens
  misc_feature (61)..(62): /note="This region represents a CpG dinucleotide"
  misc_feature (61)..(61): /note="Nucleotide may be methylated to form 5-methylcytosine"
actttccaaaatcacacagaggtggcataaaacttcaaaactttgtcaacctgaattcaacgcccatccttgtcacttatgtaataacatcctgccccctataggcaatggctgtgaaacgg

SEQ ID NO: 1084 - DNA, 122 bp, Homo sapiens
  misc_feature (61)..(62): /note="This region represents a CpG dinucleotide"
  misc_feature (61)..(61): /note="Nucleotide may be methylated to form 5-methylcytosine"
atatttaaatagttgtgtcaaatgtacttaaagtggggatcataaagctgatttcccagacgctgtgaaaaatgcatttctacgagtcaaattacaatgagtaactgttggagcaggaagta

SEQ ID NO: 1085 - DNA, 122 bp, Homo sapiens
  misc_feature (61)..(62): /note="This region represents a CpG dinucleotide"
  misc_feature (61)..(61): /note="Nucleotide may be methylated to form 5-methylcytosine"
agggcttctaggaaaccaagtctacatgactctacaagggagggattgcagtgaaagctgcgagaaagacccgtgcgctctgtaactaggcgagtcagcatcacagcccaatggaatatact

SEQ ID NO: 1086 - DNA, 122 bp, Homo sapiens
  misc_feature (61)..(62): /note="This region represents a CpG dinucleotide"
  misc_feature (61)..(61): /note="Nucleotide may be methylated to form 5-methylcytosine"
cagtgtcaccctccttcctgctgtgctgatttcagcgagggcctccgggccagactgccccgtgcgccccctgttgactaacctgggaatcgcccgccgcctgccttgagccttgtgatgtg

SEQ ID NO: 1087 - DNA, 122 bp, Homo sapiens
  misc_feature (61)..(62): /note="This region represents a CpG dinucleotide"
  misc_feature (61)..(61): /note="Nucleotide may be methylated to form 5-methylcytosine"
cccctatcttctcttccatcaaatacaaaggcggcagggcctggggctgggccgttccaccggcaggtcaggaccgccaggccagcctttctgtccactgggccgaagggtgtggcccggtt

SEQ ID NO: 1088 - DNA, 122 bp, Homo sapiens
  misc_feature (61)..(62): /note="This region represents a CpG dinucleotide"
  misc_feature (61)..(61): /note="Nucleotide may be methylated to form 5-methylcytosine"
tctcccacaatttcactgcaacctattcttccttgtggtgcagtgatcttgcaataataacgatgtcactatttacattgtggtgccgtcttaaactgcaattaattcacagttccaggcta

SEQ ID NO: 1089 - DNA, 122 bp, Homo sapiens
  misc_feature (61)..(62): /note="This region represents a CpG dinucleotide"
  misc_feature (61)..(61): /note="Nucleotide may be methylated to form 5-methylcytosine"
gaggagaaacgagaaaggccatagagaaacttagcagggaagggagagcatgatattaaacggcatggggtctaagttttggagtatatattttttgatattacaattaaagtaagattaaa

SEQ ID NO: 1090 - DNA, 122 bp, Homo sapiens
  misc_feature (61)..(62): /note="This region represents a CpG dinucleotide"
  misc_feature (61)..(61): /note="Nucleotide may be methylated to form 5-methylcytosine"
taggttcttcttcagtttgtccagttcccctgttctttattctctaaattcggagtaacccgccacctccccctgccccggcttttgctgtgcagtaacctgtctaaacatgcctagacatg

SEQ ID NO: 1091 - DNA, 122 bp, Homo sapiens
  misc_feature (61)..(62): /note="This region represents a CpG dinucleotide"
  misc_feature (61)..(61): /note="Nucleotide may be methylated to form 5-methylcytosine"
tttcaggataaaactaaaatactacaggattcagtcaaacagccctggctgcaggtttttcgcatcttgggaacaatggagggcctaataaagtcctggggagtgcactggtcaaggcaagg

SEQ ID NO: 1092 - DNA, 122 bp, Homo sapiens
  misc_feature (61)..(62): /note="This region represents a CpG dinucleotide"
  misc_feature (61)..(61): /note="Nucleotide may be methylated to form 5-methylcytosine"
accactggaaggaaaaaccctattgatgtctttgttatttattgttatgattatagcccacgaaagctgctggtttccaatgagaatctcttgaaagggaatttctttaaaggtcagtgtta

SEQ ID NO: 1093 - DNA, 122 bp, Homo sapiens
  misc_feature (61)..(62): /note="This region represents a CpG dinucleotide"
  misc_feature (61)..(61): /note="Nucleotide may be methylated to form 5-methylcytosine"
catgaaagcccttagtcacaccctcactcttcttttggattttgttcccagagcactgaacgtaaatataaagctcctcccagattccatatttaactgttcatgcaaacagaatcaccctc

SEQ ID NO: 1094 - DNA, 122 bp, Homo sapiens
  misc_feature (61)..(62): /note="This region represents a CpG dinucleotide"
  misc_feature (61)..(61): /note="Nucleotide may be methylated to form 5-methylcytosine"
ggcttggtgccactgagcagacccaggagggcctcactggtaagctcttcggccttggcgcgtcactgctaacccaggcgagcaccctcatgtctgtgcagcccgaggctgacacccagggc

SEQ ID NO: 1095 - DNA, 122 bp, Homo sapiens
  misc_feature (61)..(62): /note="This region represents a CpG dinucleotide"
  misc_feature (61)..(61): /note="Nucleotide may be methylated to form 5-methylcytosine"
atgattcagttccttgtgcaatgatttgtttattgtctatttcctctattagactgtaaacgtcattaagagaggagcaatgctgatgcttcctaagagggtgcccaacatacagtagatgc

SEQ ID NO: 1096 - DNA, 122 bp, Homo sapiens
  misc_feature (61)..(62): /note="This region represents a CpG dinucleotide"
  misc_feature (61)..(61): /note="Nucleotide may be methylated to form 5-methylcytosine"
gcttgaacccaggaggtggaggttgcagtgagccgtcatcgcgccactaagccaagatcgcgccactgcactccagcctgggcgacagagccagactgtctcaaataaataaatatgagata

SEQ ID NO: 1097 - DNA, 122 bp, Homo sapiens
  misc_feature (61)..(62): /note="This region represents a CpG dinucleotide"
  misc_feature (61)..(61): /note="Nucleotide may be methylated to form 5-methylcytosine"
cggcgcgcgccgggctgtagctctgcgacgacagcgagcggttctgctgcgggtacgtggcgcacggccgcagcgcccccacggccggcgcgcacgcctcgtcccgcgcgcccgacgcctgc

SEQ ID NO: 1098 - DNA, 122 bp, Homo sapiens
  misc_feature (61)..(62): /note="This region represents a CpG dinucleotide"
  misc_feature (61)..(61): /note="Nucleotide may be methylated to form 5-methylcytosine"
tgagcaggtgcacagggtggatctgcggttggaccagcaagagtggtggtggaggcgtgacgtgaaggaatgcccgtgatgcccctgaccctgaccttggtcccgagaaggtcatctgagaa

SEQ ID NO: 1099 - DNA, 122 bp, Homo sapiens
  misc_feature (61)..(62): /note="This region represents a CpG dinucleotide"
  misc_feature (61)..(61): /note="Nucleotide may be methylated to form 5-methylcytosine"
tattcatttacatgtcatttgactgtctcactttttacccagaacagtaacaacccacaccgtcttccttcagggatttccaactggcactctgtgggtgctacacagaatgcaatttaatg

SEQ ID NO: 1100 - DNA, 122 bp, Homo sapiens
  misc_feature (61)..(62): /note="This region represents a CpG dinucleotide"
  misc_feature (61)..(61): /note="Nucleotide may be methylated to form 5-methylcytosine"
tctgtctggaccccttgatggtaaaccatcccgtgtgaggtctgctctttactgtgtggacgaggccagggctgttatttgacatccgtggccacagcccacagtctaacgtcggccagctc

SEQ ID NO: 1101 - DNA, 122 bp, Homo sapiens
  misc_feature (61)..(62): /note="This region represents a CpG dinucleotide"
  misc_feature (61)..(61): /note="Nucleotide may be methylated to form 5-methylcytosine"
tgcagagggtgcggtccgggggtcagtgctcacctgggagggggcagtcgggggccagtgcgcacctggggagggggcagtctgggggtcagtgcgcacctgcggaggtgtgggggccgccg

SEQ ID NO: 1102 - DNA, 122 bp, Homo sapiens
  misc_feature (61)..(62): /note="This region represents a CpG dinucleotide"
  misc_feature (61)..(61): /note="Nucleotide may be methylated to form 5-methylcytosine"
tccctgcagtcattccatggggctgcgatccaggaattcaatgactgctcgcactgggggcgcctggtacaactgagctctgtgggaagtacaggatggacttgaaggctgtgctctccatt

SEQ ID NO: 1103 - DNA, 122 bp, Homo sapiens
  misc_feature (61)..(62): /note="This region represents a CpG dinucleotide"
  misc_feature (61)..(61): /note="Nucleotide may be methylated to form 5-methylcytosine"
gcagggcagcggctgccgccaagcacaccactcatcagagcctgccccgttccacccccgcgtttcagtcatgctttccagaaatggggtcactcactcagtaactattacacacacgcagc

SEQ ID NO: 1104 - DNA, 122 bp, Homo sapiens
  misc_feature (61)..(62): /note="This region represents a CpG dinucleotide"
  misc_feature (61)..(61): /note="Nucleotide may be methylated to form 5-methylcytosine"
tggagttataggaaagagggttttttagcttctcgagaggggcctcgcgggccccgctcccgccctcggctcgcctggcccagaccggaagcagcgccgcactgcctgggcctggcgcgggg

SEQ ID NO: 1105 - DNA, 122 bp, Homo sapiens
  misc_feature (61)..(62): /note="This region represents a CpG dinucleotide"
  misc_feature (61)..(61): /note="Nucleotide may be methylated to form 5-methylcytosine"
gcttcagttttatcatttgtaaaatggatacaatcctgatgcctttggaccaagtggtcacggaaatgaaagagataagtatgaaaaaatccatgctcatagtagctgtggtttccaactgc

SEQ ID NO: 1106 - DNA, 122 bp, Homo sapiens
  misc_feature (61)..(62): /note="This region represents a CpG dinucleotide"
  misc_feature (61)..(61): /note="Nucleotide may be methylated to form 5-methylcytosine"
gttttacaataataggaaacaactcacggtacctgtgtccctgtggacaaacagtgtttccggggtgggtttgagccgccagcgtgtggtgaggcagagcgtcccgggtttgcggcttggct

SEQ ID NO: 1107 - DNA, 122 bp, Homo sapiens
  misc_feature (61)..(62): /note="This region represents a CpG dinucleotide"
  misc_feature (61)..(61): /note="Nucleotide may be methylated to form 5-methylcytosine"
atccccgttagtgagagtaatccagtgattttaaaaaagagaagtcaaactgaaatgcagcgtagtcacggcacaattaccctggaatagccacttcacatggaatgactgaggagcctttc

SEQ ID NO: 1108 - DNA, 122 bp, Homo sapiens
  misc_feature (61)..(62): /note="This region represents a CpG dinucleotide"
  misc_feature (61)..(61): /note="Nucleotide may be methylated to form 5-methylcytosine"
gccaggggctccccagcctgtgtagattctgctgtaagtgactcttctctgaaagactggcgcgaggcggctgcttctgactcctgtttcagtttaccctctgtgtgaaatctgtaactatc

SEQ ID NO: 1109 - DNA, 122 bp, Homo sapiens
  misc_feature (61)..(62): /note="This region represents a CpG dinucleotide"
  misc_feature (61)..(61): /note="Nucleotide may be methylated to form 5-methylcytosine"
gggactcagaaacctctgcagggtgcctagtaagtgctagacatcttgcatgcattaagtcgtaaaccagaaaactccagagagacctttgctgtggatattactgtcccatgttgcggatg

SEQ ID NO: 1110 - DNA, 122 bp, Homo sapiens
  misc_feature (61)..(62): /note="This region represents a CpG dinucleotide"
  misc_feature (61)..(61): /note="Nucleotide may be methylated to form 5-methylcytosine"
gcatattctggtctcctgcagtggttagttctacttctttgtagcatttgaaccctgacacgttttctcttgatttctaggacataattttctcttttcagtctctctctttatggttgtat

SEQ ID NO: 1111 - DNA, 122 bp, Homo sapiens
  misc_feature (61)..(62): /note="This region represents a CpG dinucleotide"
  misc_feature (61)..(61): /note="Nucleotide may be methylated to form 5-methylcytosine"
ctgggaagtgctgctcagatctgggaagtcatttagcttggctgtgtgttctcaccactgcggaacagtatttaagcacaagatttctggcccaggtcattgaatgattgtggtgcactctg

SEQ ID NO: 1112 - DNA, 122 bp, Homo sapiens
  misc_feature (61)..(62): /note="This region represents a CpG dinucleotide"
  misc_feature (61)..(61): /note="Nucleotide may be methylated to form 5-methylcytosine"
agttacaggaattttaactaaattagaaagtttgccactttgttccgtgtaaaataaaagcgtataaagccagagctcctgaaacacaggttcagctcagtttgaaaaaacaagaaaacgtc

SEQ ID NO: 1113 - DNA, 122 bp, Homo sapiens
  misc_feature (61)..(62): /note="This region represents a CpG dinucleotide"
  misc_feature (61)..(61): /note="Nucleotide may be methylated to form 5-methylcytosine"
tccagaatggcaccaagccattcacgagggatccacccccatccaacacctcccattaggcgccacctccaacactgaggatcaagtttcagcatgaggtttgaaggggacaaatattcaaa

SEQ ID NO: 1114 - DNA, 122 bp, Homo sapiens
  misc_feature (61)..(62): /note="This region represents a CpG dinucleotide"
  misc_feature (61)..(61): /note="Nucleotide may be methylated to form 5-methylcytosine"
cgcgcgacctccagttcccgcccgcccgtgcctggcgctccagacctgggatcctcccggcggctctgcccagctctgcccgccttctttgcgggcttctggaatctgccttcctacatcca

SEQ ID NO: 1115 - DNA, 122 bp, Homo sapiens
  misc_feature (61)..(62): /note="This region represents a CpG dinucleotide"
  misc_feature (61)..(61): /note="Nucleotide may be methylated to form 5-methylcytosine"
ctttgacctacttctcacttggtgttctctgtccagtttcactctcgtgtttagagtcagcgcctccatctccactcacagcacctgcttgctgcacagcctgcgtggtcctcgggaacact

SEQ ID NO: 1116 - DNA, 122 bp, Homo sapiens
  misc_feature (61)..(62): /note="This region represents a CpG dinucleotide"
  misc_feature (61)..(61): /note="Nucleotide may be methylated to form 5-methylcytosine"
gctcctgctccggggtgctagccgctaggcggctagtgatggatagctgggcttgagccccgccaggccgccgagtccaccctggcgtccgggggctggcaggccggccctccacaaacagc

SEQ ID NO: 1117 - DNA, 122 bp, Homo sapiens
  misc_feature (61)..(62): /note="This region represents a CpG dinucleotide"
  misc_feature (61)..(61): /note="Nucleotide may be methylated to form 5-methylcytosine"
ctttgtaactgtgaaatactctccaggatttaaaaggctgtggagctccagataaagaatcgtttatctttcttctgaaggtaagcactggggttagaaatgcttgcatcatcctctgtcac

SEQ ID NO: 1118 - DNA, 122 bp, Homo sapiens
  misc_feature (61)..(62): /note="This region represents a CpG dinucleotide"
  misc_feature (61)..(61): /note="Nucleotide may be methylated to form 5-methylcytosine"
atactgatggagaggctgcaatgagcacttttagaatttatctgaatgaacatgactgatcgtgaaattgctgggtcctagttcatgcatatcttaaactttctgatatttggtaaactgtt

SEQ ID NO: 1119 - DNA, 122 bp, Homo sapiens
  misc_feature (61)..(62): /note="This region represents a CpG dinucleotide"
  misc_feature (61)..(61): /note="Nucleotide may be methylated to form 5-methylcytosine"
ttaatcatggcattcttaaggaatcactgcaattaaccaggtagaccaatttagttggaccgtggtctgtttttttagtatgtaaaaacatgggttcaggggattaaaacaactcaacattc

SEQ ID NO: 1120 - DNA, 122 bp, Homo sapiens
  misc_feature (61)..(62): /note="This region represents a CpG dinucleotide"
  misc_feature (61)..(61): /note="Nucleotide may be methylated to form 5-methylcytosine"
tggctgtgacacgcgggccagctgttgtgagaggtggagcgcggcgggcgttttccaggacggaggctgagggcaggttgacgggcctgtggagaatgtgtgctgcttcctgcaggcgacca

SEQ ID NO: 1121 - DNA, 122 bp, Homo sapiens
  misc_feature (61)..(62): /note="This region represents a CpG dinucleotide"
  misc_feature (61)..(61): /note="Nucleotide may be methylated to form 5-methylcytosine"
ccgaaaaagctctgggtggtattttgcctgcaaccaaagcttgacgtcaaaatttgcacacgtgttgtaggatcatttactctgtgtctccagcccctactcttttcttggtgttcctgagt

SEQ ID NO: 1122 - DNA, 122 bp, Homo sapiens
  misc_feature (61)..(62): /note="This region represents a CpG dinucleotide"
  misc_feature (61)..(61): /note="Nucleotide may be methylated to form 5-methylcytosine"
ccctcaatcgtgaacccagtaaaccagcctgcaccccacacagcccaaggtcttgccccgcgcccaggtcccagcacctagcgacccgccttcagcacttggaatgggctggagttgggaaa

SEQ ID NO: 1123 - DNA, 122 bp, Homo sapiens
  misc_feature (61)..(62): /note="This region represents a CpG dinucleotide"
  misc_feature (61)..(61): /note="Nucleotide may be methylated to form 5-methylcytosine"
ctcctccctgggagccgccatcttgtgtgaagaagtaacaactaaacatggcggcagcggcgccggcggtcgggcgaggaggcggagccgggtgacgtcaccgcttccccccactcgccctc

SEQ ID NO: 1124 - DNA, 122 bp, Homo sapiens
  misc_feature (61)..(62): /note="This region represents a CpG dinucleotide"
  misc_feature (61)..(61): /note="Nucleotide may be methylated to form 5-methylcytosine"
tctttgttggcggccccattgacttaggggcgatttgttaggggtaagacacgtgttcggcgagcaggctgctgctgctcactcccttgagagagggcaggcctccctctgggatgcacgct

SEQ ID NO: 1125 - DNA, 122 bp, Homo sapiens
  misc_feature (61)..(62): /note="This region represents a CpG dinucleotide"
  misc_feature (61)..(61): /note="Nucleotide may be methylated to form 5-methylcytosine"
ctacattcagaatttcctcctccattgttgttgaaagtgagatctcaagggaaaaatcagcgctgagacctaggagcaagtaggtcagtagatggcactcctcgccaactcagatactgggc

SEQ ID NO: 1126 - DNA, 122 bp, Homo sapiens
  misc_feature (61)..(62): /note="This region represents a CpG dinucleotide"
  misc_feature (61)..(61): /note="Nucleotide may be methylated to form 5-methylcytosine"
taaccagcactggggacagcggcacgcaggtggccggggttggcgaacagccactgcagccgcgcctgcggccgggaagcgagcattttcgcgccctgcacacccagcagccgcaggaggcg

SEQ ID NO: 1127 - DNA, 122 bp, Homo sapiens
  misc_feature (61)..(62): /note="This region represents a CpG dinucleotide"
  misc_feature (61)..(61): /note="Nucleotide may be methylated to form 5-methylcytosine"
cacgcatcacacgcacatacaccagcgcggttatccataactctaccatttcaagtgagccgcaagagactgtaaatcgcagtgaagtgggccgtcaggcaatgattactaaataagcatgg

SEQ ID NO: 1128 - DNA, 122 bp, Homo sapiens
  misc_feature (61)..(62): /note="This region represents a CpG dinucleotide"
  misc_feature (61)..(61): /note="Nucleotide may be methylated to form 5-methylcytosine"
cacagagcccagcagctggaccagggtgaccatgatgccactggggctgggacacctgcacgagactcttcaggaataagcccctatttccccacctaaaaatggaagtggggccgggcaca

SEQ ID NO: 1129 - DNA, 122 bp, Homo sapiens
  misc_feature (61)..(62): /note="This region represents a CpG dinucleotide"
  misc_feature (61)..(61): /note="Nucleotide may be methylated to form 5-methylcytosine"
gtgggtgagccttgcgcccaggaggctagagatgcaggagccccagaacctgcggtgcagcgagtgcacatgcgcatagacggggcccaggagctgaccctggccctcccgttcgcttccgg

SEQ ID NO: 1130 - DNA, 122 bp, Homo sapiens
  misc_feature (61)..(62): /note="This region represents a CpG dinucleotide"
  misc_feature (61)..(61): /note="Nucleotide may be methylated to form 5-methylcytosine"
ttctctcagcttccagctcaggaggcggagtgggaggagcgggcctggcggccgtgggggcggggctgctccactaacggttactggtcgctgctgccgccgcgctcctcccccggctgcgg

SEQ ID NO: 1131 - DNA, 122 bp, Homo sapiens
  misc_feature (61)..(62): /note="This region represents a CpG dinucleotide"
  misc_feature (61)..(61): /note="Nucleotide may be methylated to form 5-methylcytosine"
ctggggaagataattcatcatcataaaaacaaacatccattttacacttgcatggcaatgcggatgtccttatttgcataatgatggtgatttgcatatgaggaaaatttgcctgagtgagt

SEQ ID NO: 1132 - DNA, 122 bp, Homo sapiens
  misc_feature (61)..(62): /note="This region represents a CpG dinucleotide"
  misc_feature (61)..(61): /note="Nucleotide may be methylated to form 5-methylcytosine"
tagagatcaataactctgtaacagaaatgcagaatgcctttgatgggcttattagtagaccggacatggctatggaaagaatctctgagcttcaagatatctcaacaaaagctgccaaaact

SEQ ID NO: 1133 - DNA, 122 bp, Homo sapiens
  misc_feature (61)..(62): /note="This region represents a CpG dinucleotide"
  misc_feature (61)..(61): /note="Nucleotide may be methylated to form 5-methylcytosine"
caagttcaactgaaaggtgggagaggaagggtctaaggaggagggcgtttcccgggagaacgcccagagctcggctcacctggcgatcctaattacaggggagtttcacccccacattcttg

SEQ ID NO: 1134 - DNA, 122 bp, Homo sapiens
  misc_feature (61)..(62): /note="This region represents a CpG dinucleotide"
  misc_feature (61)..(61): /note="Nucleotide may be methylated to form 5-methylcytosine"
tcttcaaagggcggagcctgtgcagtgagcgtttggccacctggtcgcacaccgagtgctcgtcagcgcgcatggcctgagcgttctgccctgacactcgctggcctctgggcgcttctgtc

SEQ ID NO: 1135 - DNA, 122 bp, Homo sapiens
  misc_feature (61)..(62): /note="This region represents a CpG dinucleotide"
  misc_feature (61)..(61): /note="Nucleotide may be methylated to form 5-methylcytosine"
aagacagggaagaaaaagaatgtgctggcgtgttagacagtaatgcataccctggaacaccgagtgtgcagaaacgagaggacgcaggagtaagattgcacagatcttactcctgtgagata

SEQ ID NO: 1136 - DNA, 122 bp, Homo sapiens
  misc_feature (61)..(62): /note="This region represents a CpG dinucleotide"
  misc_feature (61)..(61): /note="Nucleotide may be methylated to form 5-methylcytosine"
gtgggagagcttgagggggagggaatactcacatcaggaacatgggatcctcaggctccacgtccctcatgaagcggaacatcctgatctcagctccagggggctccacactggaaagatat

SEQ ID NO: 1137 - DNA, 122 bp, Homo sapiens
  misc_feature (61)..(62): /note="This region represents a CpG dinucleotide"
  misc_feature (61)..(61): /note="Nucleotide may be methylated to form 5-methylcytosine"
aggcggcgtggagagacgggacgcgcgggagcaaaaggcggcgtggagagacgggacgcgcgggaggaaaaggctcccaaggaagatctctggaagaaaagggactccgtgcaatacacgat

SEQ ID NO: 1138 - DNA, 122 bp, Homo sapiens
  misc_feature (61)..(62): /note="This region represents a CpG dinucleotide"
  misc_feature (61)..(61): /note="Nucleotide may be methylated to form 5-methylcytosine"
catcctcttttcttctctataacattttcttctctataacatttcaggctacaaataacccgtttttgaagtgacttccacccttgactgcaaggaccctgcactcttgaatttctcctacc

SEQ ID NO: 1139 - DNA, 122 bp, Homo sapiens
  misc_feature (61)..(62): /note="This region represents a CpG dinucleotide"
  misc_feature (61)..(61): /note="Nucleotide may be methylated to form 5-methylcytosine"
cacatctggaagcctctttctctaggtctggctgcctcctaggcagcattagggacgagtcgctctgccccatgccttactcctttctcacattctcacattctcacattctgtttctcctg

SEQ ID NO: 1140 - DNA, 122 bp, Homo sapiens
  misc_feature (61)..(62): /note="This region represents a CpG dinucleotide"
  misc_feature (61)..(61): /note="Nucleotide may be methylated to form 5-methylcytosine"
tcccattcactaggtctgcttgtctaatgacagccctctaaattttgcactcaacatggacgtcatttttcacttcaggtcgtatttaatagcagtttggaaagatgaaactatatcgtcaa

SEQ ID NO: 1141 - DNA, 122 bp, Homo sapiens
  misc_feature (61)..(62): /note="This region represents a CpG dinucleotide"
  misc_feature (61)..(61): /note="Nucleotide may be methylated to form 5-methylcytosine"
tggtcctccaggtctttgattgctattagtaagtcccaagacacagtctttacaccaagtcgctgtgtgccttgggcaagaaactctccctctctgagactgtgtttccacactggtagaag

SEQ ID NO: 1142 - DNA, 122 bp, Homo sapiens
  misc_feature (61)..(62): /note="This region represents a CpG dinucleotide"
  misc_feature (61)..(61): /note="Nucleotide may be methylated to form 5-methylcytosine"
tccaaatgcccggtggccacacatgattaatggctaccacactggtcagtgcagaatggacgtaaacatcgctgcacaaagttctaatggacagcgctgtctagaccatggcctggagccac

SEQ ID NO: 1143 - DNA, 122 bp, Homo sapiens
  misc_feature (61)..(62): /note="This region represents a CpG dinucleotide"
  misc_feature (61)..(61): /note="Nucleotide may be methylated to form 5-methylcytosine"
tgggtggagccaggcgccggcgtcttccagttctcctccaagcacaaggaactcctggcgcgccgctggggccagcagaaggggaaccgcaagcgcatgacctaccagaagctggcgcgcgc

SEQ ID NO: 1144 - DNA, 122 bp, Homo sapiens
  misc_feature (61)..(62): /note="This region represents a CpG dinucleotide"
  misc_feature (61)..(61): /note="Nucleotide may be methylated to form 5-methylcytosine"
tgagctccgcgggtccggaaacaaacacccagccaggtggtggaaggccgccccttcctccgaggctggcacctgattggacagttccacacaagcgcctctgattggctagggatcctgac

SEQ ID NO: 1145 - DNA, 122 bp, Homo sapiens
  misc_feature (61)..(62): /note="This region represents a CpG dinucleotide"
  misc_feature (61)..(61): /note="Nucleotide may be methylated to form 5-methylcytosine"
gcagaggaccagctcttgctccacaacagcttgcctccccttcctctttctacccttccacgtgaccctcacggttctctccaccagaaaagaggctaccattgttagttgccagtctggca

SEQ ID NO: 1146 - DNA, 122 bp, Homo sapiens
  misc_feature (61)..(62): /note="This region represents a CpG dinucleotide"
  misc_feature (61)..(61): /note="Nucleotide may be methylated to form 5-methylcytosine"
tccctcatttttctttacagttagcaccatttacccattcacggagaaccttacagttctcgcaacagggtgatcactcagtaagtactgttgtccctttggtctgtttctggcagcgatta

SEQ ID NO: 1147 - DNA, 122 bp, Homo sapiens
  misc_feature (61)..(62): /note="This region represents a CpG dinucleotide"
  misc_feature (61)..(61): /note="Nucleotide may be methylated to form 5-methylcytosine"
ttctagaagattaatccaccaacatttcaaaatcttgtaaggagctgcgacccgctaggacgggagcctactgcgccctcaaaccccgcggcggctccctccccggagggggcgcgtgaggc

SEQ ID NO: 1148 - DNA, 122 bp, Homo sapiens
  misc_feature (61)..(62): /note="This region represents a CpG dinucleotide"
  misc_feature (61)..(61): /note="Nucleotide may be methylated to form 5-methylcytosine"
ctctccatcgagcagcagatgagcagggtctgtgtgaacacacatcccagagtcggagcacgcaggccagagggcgctgagcaagcatctcagagacagctcagagacaggccccaccccca

SEQ ID NO: 1149 - DNA, 122 bp, Homo sapiens
  misc_feature (61)..(62): /note="This region represents a CpG dinucleotide"
  misc_feature (61)..(61): /note="Nucleotide may be methylated to form 5-methylcytosine"
acattctgtactgactctgtaccacacattgttctaggcatttaaaatgcactaagtggccgggcgcggtggcttatgcctgtaatccagcactttaggacggtggcttacgcctgtaatcc

SEQ ID NO: 1150 - DNA, 122 bp, Homo sapiens
  misc_feature (61)..(62): /note="This region represents a CpG dinucleotide"
  misc_feature (61)..(61): /note="Nucleotide may be methylated to form 5-methylcytosine"
tacgagtctgtgactggcgtgcatgttacgagtctgtgagtggcgtgcacgttacgagtccgtgtgagtggcgtgcacgttacgagtctgtgagtggcgtgcacgttacgagtctgtgagtg

SEQ ID NO: 1151 - DNA, 122 bp, Homo sapiens
  misc_feature (61)..(62): /note="This region represents a CpG dinucleotide"
  misc_feature (61)..(61): /note="Nucleotide may be methylated to form 5-methylcytosine"
agccgacgaaagggaaaaggccagtgcctgtccgggaagagctcagcctagtggggcgggcgacaagttacagttgctgccttacgatggccgtggcccgtggaggcactagaccctcacca

SEQ ID NO: 1152 - DNA, 122 bp, Homo sapiens
  misc_feature (61)..(62): /note="This region represents a CpG dinucleotide"
  misc_feature (61)..(61): /note="Nucleotide may be methylated to form 5-methylcytosine"
gacccagggactgtggggctgggctggtggggccactgctaccgactaagcagtacgggccgcctggaagaccgaaggcggagttcgctgatgcggaagccaaggcacagggcaataaggat

SEQ ID NO: 1153 - DNA, 122 bp, Homo sapiens
  misc_feature (61)..(62): /note="This region represents a CpG dinucleotide"
  misc_feature (61)..(61): /note="Nucleotide may be methylated to form 5-methylcytosine"
ttggctgtttttctggaactgtcaggctcactccgttctgccaaacacccgagtctgggtcgctgtcctccatctgtctgtggttctttccagtcaaaatggccatgaacagcagctgattc

SEQ ID NO: 1154 - DNA, 122 bp, Homo sapiens
  misc_feature (61)..(62): /note="This region represents a CpG dinucleotide"
  misc_feature (61)..(61): /note="Nucleotide may be methylated to form 5-methylcytosine"
ctgtgagtacagacgcccaagtggacgcgtgttacaaaactcagatttgctgtctgcagacggcttgtgtgttaatccgctcaatggaccctctgccttatctcaagagcctggggccagtg

SEQ ID NO: 1155 - DNA, 122 bp, Homo sapiens
  misc_feature (61)..(62): /note="This region represents a CpG dinucleotide"
  misc_feature (61)..(61): /note="Nucleotide may be methylated to form 5-methylcytosine"
agctgctagagtccatgcttctgcaatggaaacatagttgataactgtacctccagtccacgtttcctctgttctcaggtagtactacagctactcctgggtgagttagggtggcccaaact

SEQ ID NO: 1156 - DNA, 122 bp, Homo sapiens
  misc_feature (61)..(62): /note="This region represents a CpG dinucleotide"
  misc_feature (61)..(61): /note="Nucleotide may be methylated to form 5-methylcytosine"
ccccaacaaggtcagacatctgctactgcatggtccaaggcctccaccatagatcaccaccgttgtgagcctaaactgccaagggcaccaactccagggagactgttgggaagccagccttc

SEQ ID NO: 1157 - DNA, 122 bp, Homo sapiens
  misc_feature (61)..(62): /note="This region represents a CpG dinucleotide"
  misc_feature (61)..(61): /note="Nucleotide may be methylated to form 5-methylcytosine"
ccacaggtgggctctggctggtggtggctggagaggcgtccagggggcgtagcgacctggcgcggtggcctggggtgggctgtggagcccttcctagcctgagacctgttgggcaccccctg

SEQ ID NO: 1158 - DNA, 122 bp, Homo sapiens
  misc_feature (61)..(62): /note="This region represents a CpG dinucleotide"
  misc_feature (61)..(61): /note="Nucleotide may be methylated to form 5-methylcytosine"
aaaaaaaaaactccttcctctcatgatattccgaatactttgtcaacattttattaagtccgttgcttctaagccccacattaagtgtgtgtgggtagggagaggaaaaacaagagatgaat

SEQ ID NO: 1159 - DNA, 122 bp, Homo sapiens
  misc_feature (61)..(62): /note="This region represents a CpG dinucleotide"
  misc_feature (61)..(61): /note="Nucleotide may be methylated to form 5-methylcytosine"
ggcctgggggaaggggtgtgagacccgcccttccccatgggctgggcatctaagaagggacgtatcagaagggggctttggagggggcagtctacagagggagcaccaagtcacagaagtgt

SEQ ID NO: 1160 - DNA, 122 bp, Homo sapiens
  misc_feature (61)..(62): /note="This region represents a CpG dinucleotide"
  misc_feature (61)..(61): /note="Nucleotide may be methylated to form 5-methylcytosine"
gcatataatcaagaaataactataagtgtaatcagtgggcagccaagccgctgccctgtccgtggagtagccattcttattcctttactttcttaataaacttgctttcactttactctgtg

SEQ ID NO: 1161 - DNA, 122 bp, Homo sapiens
  misc_feature (61)..(62): /note="This region represents a CpG dinucleotide"
  misc_feature (61)..(61): /note="Nucleotide may be methylated to form 5-methylcytosine"
tggccacagcggatcccggaggccttggggctcatccctctgctaccaagtgactaggagcgctcagccttgctgggcacccccatcctgcggggggcattctcgtccggggctcgcagccc

SEQ ID NO: 1162 - DNA, 122 bp, Homo sapiens
  misc_feature (61)..(62): /note="This region represents a CpG dinucleotide"
  misc_feature (61)..(61): /note="Nucleotide may be methylated to form 5-methylcytosine"
ctcagaactgtagatttcgcttttaaaaccatggcaagagtatcatcaccacagcaagggcgagcccagagaaagtgcatttggtgagattttataaatgtacccaaggcacgtgttttgtt

SEQ ID NO: 1163 - DNA, 122 bp, Homo sapiens
  misc_feature (61)..(62): /note="This region represents a CpG dinucleotide"
  misc_feature (61)..(61): /note="Nucleotide may be methylated to form 5-methylcytosine"
ctagagatttggggtttagtgaatgattacaaactctgcaaagggaaaactcttccagagcgccagtgttgtcagcccagtgctgcataagctgttgttcaacaaatggactttggccgagt

SEQ ID NO: 1164 - DNA, 122 bp, Homo sapiens
  misc_feature (61)..(62): /note="This region represents a CpG dinucleotide"
  misc_feature (61)..(61): /note="Nucleotide may be methylated to form 5-methylcytosine"
aaaagcctgctcttcaaaggcctgtacagttcatgacagaaacacacattttcacagcaacggaaagagttgggtgaaagtttaagattttatgaagaaatagaaaagcaaatgatttcgct

SEQ ID NO: 1165 - DNA, 122 bp, Homo sapiens
  misc_feature (61)..(62): /note="This region represents a CpG dinucleotide"
  misc_feature (61)..(61): /note="Nucleotide may be methylated to form 5-methylcytosine"
ctaccgccacctgtggagggaccgcgtatgccagctgtgccacccgtcgccggtccacgccgccgcccacctgagcctggagactctgaccgctttcgtgcttcctttcgggctgatgctcg

SEQ ID NO: 1166 - DNA, 122 bp, Homo sapiens
  misc_feature (61)..(62): /note="This region represents a CpG dinucleotide"
  misc_feature (61)..(61): /note="Nucleotide may be methylated to form 5-methylcytosine"
gggctaatccttgcctttgtgggagagcctgggaccagagggtctgccaccagtcacagccgcctgctacgatgctggccccgtggctctgccaccaccccaggaccctgtaggcctcctga

SEQ ID NO: 1167 - DNA, 122 bp, Homo sapiens
  misc_feature (61)..(62): /note="This region represents a CpG dinucleotide"
  misc_feature (61)..(61): /note="Nucleotide may be methylated to form 5-methylcytosine"
cctgcctcggcctaccaaaatgctgcgattacaggcgtgagccaccgttcccggcctatacgttgtttattttggaaaaattaaaaattaagttttttttcattaaagatatgttatttccg

SEQ ID NO: 1168 - DNA, 122 bp, Homo sapiens
  misc_feature (61)..(62): /note="This region represents a CpG dinucleotide"
  misc_feature (61)..(61): /note="Nucleotide may be methylated to form 5-methylcytosine"
agctccccaggtttttgtgtggacataagtttttatttccctgggataaacacctgagggcgctactgctgggtcataggcatgctgggttttataattagctgccctctgttttctaggct

SEQ ID NO: 1169 - DNA, 122 bp, Homo sapiens
  misc_feature (61)..(62): /note="This region represents a CpG dinucleotide"
  misc_feature (61)..(61): /note="Nucleotide may be methylated to form 5-methylcytosine"
atctgagggccccaagcacagtggttgacacataataagcacttaatccttgttgaatctcgaatttgaatatgattcctggagaggaaagagaggcttcttagagaaggcagcctctaagc

SEQ ID NO: 1170 - DNA, 122 bp, Homo sapiens
  misc_feature (61)..(62): /note="This region represents a CpG dinucleotide"
  misc_feature (61)..(61): /note="Nucleotide may be methylated to form 5-methylcytosine"
ctaagaatgtgtggcccatgtggatgagaggggttgccacttttattcaaaaatgtatcacgaatgcttagaacagtgcctgggataaggtagacagacatttataaagtggaaaaatattt

SEQ ID NO: 1171 - DNA, 122 bp, Homo sapiens
  misc_feature (61)..(62): /note="This region represents a CpG dinucleotide"
  misc_feature (61)..(61): /note="Nucleotide may be methylated to form 5-methylcytosine"
ggtttacaatgctcctaattttcagacatggtgttgagagccggggtcacagacataatacgaaaaggaagagaagttgtgtatttagattgtgctgctaacaatgttgactcacatatttt

SEQ ID NO: 1172 - DNA, 122 bp, Homo sapiens
  misc_feature (61)..(62): /note="This region represents a CpG dinucleotide"
  misc_feature (61)..(61): /note="Nucleotide may be methylated to form 5-methylcytosine"
tgatttgatctgattctatttcctcctggtctcctgctgttgtgttggtctctgaattgacggtgagcatagtttcttggggagtgtttagttttattgtatccccaactatggatgaagac

SEQ ID NO: 1173 - DNA, 122 bp, Homo sapiens
  misc_feature (61)..(62): /note="This region represents a CpG dinucleotide"
  misc_feature (61)..(61): /note="Nucleotide may be methylated to form 5-methylcytosine"
cagggttacagaacagccaggttccagttcaggtctgggaatctacccatccagagtttgcgcccttttcgttttgcaatttaaaaccgggttggagggggaaggagtgaaggcagcatgcg

SEQ ID NO: 1174 - DNA, 122 bp, Homo sapiens
  misc_feature (61)..(62): /note="This region represents a CpG dinucleotide"
  misc_feature (61)..(61): /note="Nucleotide may be methylated to form 5-methylcytosine"
cctgggtgattctaatgtgcagcctgggctgaatatcacagctgtaaacttccgtctcctcgtctgtgaaatagagatttagaaaacagccactatgtcatggggtattttgcaaaattcag

SEQ ID NO: 1175 - DNA, 122 bp, Homo sapiens
  misc_feature (61)..(62): /note="This region represents a CpG dinucleotide"
  misc_feature (61)..(61): /note="Nucleotide may be methylated to form 5-methylcytosine"
tttttttttttttttttaaacagagtctcgctctgttgcccaggctggagtgcagtggcgcgatctggctcactgcaagctcaccctcccgggttcacgcaattctccttcctcagcctcct

SEQ ID NO: 1176 - DNA, 122 bp, Homo sapiens
  misc_feature (61)..(62): /note="This region represents a CpG dinucleotide"
  misc_feature (61)..(61): /note="Nucleotide may be methylated to form 5-methylcytosine"
gactggagggaccgcggctgagacaggctgctgcaccaggcggccctggaccgccgcttccgcccctaagccgccctcccagcccaggtgacaggtcgccctacccagggagcatcgccctc

SEQ ID NO: 1177 - DNA, 122 bp, Homo sapiens
  misc_feature (61)..(62): /note="This region represents a CpG dinucleotide"
  misc_feature (61)..(61): /note="Nucleotide may be methylated to form 5-methylcytosine"
ccacgcctccgccctgggagccgccatcttgccacttcccctcgcccggccgtccgcgggcgtcaatagcgactttcagcacaaaacaaagatggcggcggcggcatctcggaaatgcccgg

SEQ ID NO: 1178 - DNA, 122 bp, Homo sapiens
  misc_feature (61)..(62): /note="This region represents a CpG dinucleotide"
  misc_feature (61)..(61): /note="Nucleotide may be methylated to form 5-methylcytosine"
gagcaaatccagagccatggtctttccaaggtcctgtgctgcctctggcatttacaaggacggccctgctgcaagaatgggcccaagcccatatcccacatgcttggcattcccttgcacag

SEQ ID NO: 1179 - DNA, 122 bp, Homo sapiens
  misc_feature (61)..(62): /note="This region represents a CpG dinucleotide"
  misc_feature (61)..(61): /note="Nucleotide may be methylated to form 5-methylcytosine"
gcatgtggccatctgaatcatttcctttcgcaatgtgttactcagtttcagggcctgccacgtgggggtgtttccattcctttctgcagctggacttggtggacgtggggaacgtggcagtt

SEQ ID NO: 1180 - DNA, 122 bp, Homo sapiens
  misc_feature (61)..(62): /note="This region represents a CpG dinucleotide"
  misc_feature (61)..(61): /note="Nucleotide may be methylated to form 5-methylcytosine"
gccagttcaacctcaatacaatagaataccaggtagacttctgaggtttttgactcagtacgagtcccagacaccacttctggacccatttggggcctgagggacctcacagcccttaaggg

SEQ ID NO: 1181 - DNA, 122 bp, Homo sapiens
  misc_feature (61)..(62): /note="This region represents a CpG dinucleotide"
  misc_feature (61)..(61): /note="Nucleotide may be methylated to form 5-methylcytosine"
cccacggtgacagaagggaggagggactctcctcatcacggcccaccccgccaccccccccgcccccgcctttaggagttcaggtgcagctgacccacactaactccaaaatagttatccaa

SEQ ID NO: 1182 - DNA, 122 bp, Homo sapiens
  misc_feature (61)..(62): /note="This region represents a CpG dinucleotide"
  misc_feature (61)..(61): /note="Nucleotide may be methylated to form 5-methylcytosine"
gaacaaataccactaggaaagaactttctgaagaaaccttagtggcctccaaattggcaacggaaagaaaccaaaagttagtggaggtgaagtcactgacataacaatggaggccagtttca

SEQ ID NO: 1183 - DNA, 122 bp, Homo sapiens
  misc_feature (61)..(62): /note="This region represents a CpG dinucleotide"
  misc_feature (61)..(61): /note="Nucleotide may be methylated to form 5-methylcytosine"
ctcagtacccatccctcctccatgagggccaccctgatttatttcccccttgctggcctccgccccacactgcccagggccactatgagcatgacctgtcatgcttggttgaccataactga

SEQ ID NO: 1184 - DNA, 122 bp, Homo sapiens
  misc_feature (61)..(62): /note="This region represents a CpG dinucleotide"
  misc_feature (61)..(61): /note="Nucleotide may be methylated to form 5-methylcytosine"
aaggactcgggaatggttttccatcgctcttggttgctctgctgcccctggagccccagccgccactgcttccccaccccaggggaccactatgttcccaagaatgttggggtgtggagaaa

SEQ ID NO: 1185 - DNA, 122 bp, Homo sapiens
  misc_feature (61)..(62): /note="This region represents a CpG dinucleotide"
  misc_feature (61)..(61): /note="Nucleotide may be methylated to form 5-methylcytosine"
ttcagccttgagaagctttctcagcatgagtagtgttgtggtaaagagcttgaatgctgacgtcagactaattagtttctaatcttggctttgcaacagattagccatgtgatttggtggca

SEQ ID NO: 1186 - DNA, 122 bp, Homo sapiens
  misc_feature (61)..(62): /note="This region represents a CpG dinucleotide"
  misc_feature (61)..(61): /note="Nucleotide may be methylated to form 5-methylcytosine"
cacagagtattttcagatgtctctaggctcagcgcatgcgcggcgtgcagggaggtgtttcgggggcggaggttctggttctgcggagagggatgttgaagacagcgcgcccagcgatggca

SEQ ID NO: 1187 - DNA, 122 bp, Homo sapiens
  misc_feature (61)..(62): /note="This region represents a CpG dinucleotide"
  misc_feature (61)..(61): /note="Nucleotide may be methylated to form 5-methylcytosine"
cacgaaactctaccactacgttctcgctgctccatcgcgccgccatctcccactctcggccgccaaggccccaggaccgcgccctcccatccaccagacccgggtcccctggccctctgagc

SEQ ID NO: 1188 - DNA, 122 bp, Homo sapiens
  misc_feature (61)..(62): /note="This region represents a CpG dinucleotide"
  misc_feature (61)..(61): /note="Nucleotide may be methylated to form 5-methylcytosine"
atgctgaattccagggacaacctcggtgatgattagtgactcacgtctaaaaacagaatacgcagagctgaagggatgtgacttctgatgtgaggtcacaaaataccccactcctctctagg

SEQ ID NO: 1189 - DNA, 122 bp, Homo sapiens
  misc_feature (61)..(62): /note="This region represents a CpG dinucleotide"
  misc_feature (61)..(61): /note="Nucleotide may be methylated to form 5-methylcytosine"
cttcctggggcgcttgttacctggccttctatgggattccatctccatggctggttgcctcgttttctgtttgtcttacccttctcaggatgtgctgtatttactgtatggattccttagta

SEQ ID NO: 1190 - DNA, 122 bp, Homo sapiens
  misc_feature (61)..(62): /note="This region represents a CpG dinucleotide"
  misc_feature (61)..(61): /note="Nucleotide may be methylated to form 5-methylcytosine"
attgggatttgacaaggactgtgaaaggctgactctccctgttctctttcatgctggcaccgggcagagtgtgggaactactgcctcaatagtaagtacagtaagtcctgtgagaaactgcg

SEQ ID NO: 1191 - DNA, 122 bp, Homo sapiens
  misc_feature (61)..(62): /note="This region represents a CpG dinucleotide"
  misc_feature (61)..(61): /note="Nucleotide may be methylated to form 5-methylcytosine"
atggagatctaggaggaaaagaacatgactagcaagcatggcacagcagggcatcgcggccgcactgccatcagccacagagaactgtcgaagccacggccaacccacttccggggcctgag

SEQ ID NO: 1192 - DNA, 122 bp, Homo sapiens
  misc_feature (61)..(62): /note="This region represents a CpG dinucleotide"
  misc_feature (61)..(61): /note="Nucleotide may be methylated to form 5-methylcytosine"
cgcgtcccggattcggtacccggaaccgtgcagacgtggtctatggagcccgggccatctcgcccccgcggctcccgaagccgaagaacttcttggtggtggtgacttctcagacccccaac

SEQ ID NO: 1193 - DNA, 122 bp, Homo sapiens
  misc_feature (61)..(62): /note="This region represents a CpG dinucleotide"
  misc_feature (61)..(61): /note="Nucleotide may be methylated to form 5-methylcytosine"
cctaacaaaataaccaatactatcatctaacagtttattttcagaattgtacaataatctcgaaaccgtgtttttagagcttttttgtttgaaaaagtaatgttttaatgacaataaaattt

SEQ ID NO: 1194 - DNA, 122 bp, Homo sapiens
  misc_feature (61)..(62): /note="This region represents a CpG dinucleotide"
  misc_feature (61)..(61): /note="Nucleotide may be methylated to form 5-methylcytosine"
tcctcccaaagctctgcgattacaggcgtgagccaccgtgcctggcttccagcctcttcccgacttagcagctcagcatccctgtcccagaatccggtcctcatcctcagatcccttcactt

SEQ ID NO: 1195 - DNA, 122 bp, Homo sapiens
  misc_feature (61)..(62): /note="This region represents a CpG dinucleotide"
  misc_feature (61)..(61): /note="Nucleotide may be methylated to form 5-methylcytosine"
ttttcccattgggcttcagggtgtactgtggctctgagccccaggcaggaccaaggaggacgccaaggtagctgtcaatgccagcagtaatgaatcactgggaatcagataacaaggctatt

SEQ ID NO: 1196 - DNA, 122 bp, Homo sapiens
  misc_feature (61)..(62): /note="This region represents a CpG dinucleotide"
  misc_feature (61)..(61): /note="Nucleotide may be methylated to form 5-methylcytosine"
tttcagcttccatttttcagtcaaccttccttttttcttagccacagtcataatgagctccgctactctgtggtagctacattttcacagcaataaaacacagcgaaggaacccaaacataa

SEQ ID NO: 1197 - DNA, 122 bp, Homo sapiens
  misc_feature (61)..(62): /note="This region represents a CpG dinucleotide"
  misc_feature (61)..(61): /note="Nucleotide may be methylated to form 5-methylcytosine"
cgacagcccacaggggccctggtttctcccactctcagtcctcaatgcctggcaaactggcgaactcagaatgttaagaaatgtgagctactgaaatacagaacttgagaaatgatcccagg

SEQ ID NO: 1198 - DNA, 122 bp, Homo sapiens
  misc_feature (61)..(62): /note="This region represents a CpG dinucleotide"
  misc_feature (61)..(61): /note="Nucleotide may be methylated to form 5-methylcytosine"
gggaagcactacagaaagataggggacaaaggaatccgcactaccttactcttcagctggcgaaggtattgctttctgtctgaatttcctggtcctcgtatcagtgggcctccttctggcac

SEQ ID NO: 1199 - DNA, 122 bp, Homo sapiens
  misc_feature (61)..(62): /note="This region represents a CpG dinucleotide"
  misc_feature (61)..(61): /note="Nucleotide may be methylated to form 5-methylcytosine"
attgtagaaggtcctcttccattttccgattttcatagatgatcttccattaaaaaaagacgctggcatgtttctgctgtagaaaaaaggaagcaaagggatagttacaactccttctactc

SEQ ID NO: 1200 - DNA, 122 bp, Homo sapiens
  misc_feature (61)..(62): /note="This region represents a CpG dinucleotide"
  misc_feature (61)..(61): /note="Nucleotide may be methylated to form 5-methylcytosine"
tgtgcccaggacagtcaactcaggcgctggactctcattctggttggattttatgacagccgtattcgccataagaattctagagccagaccttgttacttcacaattgcctcacgttgcag

SEQ ID NO: 1201 - DNA, 122 bp, Homo sapiens
  misc_feature (61)..(62): /note="This region represents a CpG dinucleotide"
  misc_feature (61)..(61): /note="Nucleotide may be methylated to form 5-methylcytosine"
tatgatactataggtgagaccagtgagtttgggcatcttttttaccccattaggattcctcgtcataggaaaaataacaaagagtggagagttagagtctactcaaaccatttgggcaaggc

SEQ ID NO: 1202 - DNA, 122 bp, Homo sapiens
  misc_feature (61)..(62): /note="This region represents a CpG dinucleotide"
  misc_feature (61)..(61): /note="Nucleotide may be methylated to form 5-methylcytosine"
aagttacagagctgagatacaaacccggcctctgatctggagcccaggctcccagtcccacggcataacaggtggagtggatactcaccagcaccctctgcagtccctgatttgataaattc

SEQ ID NO: 1203 - DNA, 122 bp, Homo sapiens
  misc_feature (61)..(62): /note="This region represents a CpG dinucleotide"
  misc_feature (61)..(61): /note="Nucleotide may be methylated to form 5-methylcytosine"
tgcaggctggcttttctttcaggggtgccgattgccggaaggcatgctgtggtggttgggcgcagtaaaatagttggggccccgatgcatgacttgcttctgtggaacaatgccacagtgac

SEQ ID NO: 1204 - DNA, 122 bp, Homo sapiens
  misc_feature (61)..(62): /note="This region represents a CpG dinucleotide"
  misc_feature (61)..(61): /note="Nucleotide may be methylated to form 5-methylcytosine"
gtggctattgtggaacagagtgtggttgccgtccccccaggggtagggctgtggagagagcgggggagggagcgcgcgtgagcgccgtgagtccggagtccgcgccccgcgcgacccccccc

SEQ ID NO: 1205 - DNA, 122 bp, Homo sapiens
  misc_feature (61)..(62): /note="This region represents a CpG dinucleotide"
  misc_feature (61)..(61): /note="Nucleotide may be methylated to form 5-methylcytosine"
gggtgctggagtgaggagtcaggcagagttcctgccggggctggtcctgcatcagccccgcggtgtttgtgatgcccgctgcggccgccaggcggcgcacccactttcccaccttgaggcgg

SEQ ID NO: 1206 - DNA, 122 bp, Homo sapiens
  misc_feature (61)..(62): /note="This region represents a CpG dinucleotide"
  misc_feature (61)..(61): /note="Nucleotide may be methylated to form 5-methylcytosine"
aaaaaaaaaaataaaataaaaaaagaccctttgtgatatgatgtcacacattcacaggctcggagggttaggaaatgtattcatacatggttgtgggccattattctatcggtcacagaaag

SEQ ID NO: 1207 - DNA, 122 bp, Homo sapiens
  misc_feature (61)..(62): /note="This region represents a CpG dinucleotide"
  misc_feature (61)..(61): /note="Nucleotide may be methylated to form 5-methylcytosine"
gggtcagtgcgcacctgcggaggtgtgggggccgccgggggtcagcgagcagctgaggagcgggcgaggccgggggtcagtgagcacctgcggaggaggcgctgggagtggggagaggggac

SEQ ID NO: 1208 - DNA, 122 bp, Homo sapiens
  misc_feature (61)..(62): /note="This region represents a CpG dinucleotide"
  misc_feature (61)..(61): /note="Nucleotide may be methylated to form 5-methylcytosine"
agtcattagatgagtacattagattgagtcaatttcctcccagatcctcagcaaaactctcgagccagttccttactacttgggggatggcttgcctgactgagcgcagctttggtgcccct

SEQ ID NO: 1209 - DNA, 122 bp, Homo sapiens
  misc_feature (61)..(62): /note="This region represents a CpG dinucleotide"
  misc_feature (61)..(61): /note="Nucleotide may be methylated to form 5-methylcytosine"
tctgtaaaatgtgctcacagacagcacctacaacataggtagggtgtgttgcaaagattgcgagttaagcttttgtttgttttgtcgagatggagtctcactccgtcgcccaggctggcgtg

SEQ ID NO: 1210 - DNA, 122 bp, Homo sapiens
  misc_feature (61)..(62): /note="This region represents a CpG dinucleotide"
  misc_feature (61)..(61): /note="Nucleotide may be methylated to form 5-methylcytosine"
acgcgagagggagggcagagctgggggcccggaggactggccaaccctggcccgggccagcgggcgcgccccgaccagaaatagccagattcctccagcttcctccgccgccgccacccacg

SEQ ID NO: 1211 - DNA, 122 bp, Homo sapiens
  misc_feature (61)..(62): /note="This region represents a CpG dinucleotide"
  misc_feature (61)..(61): /note="Nucleotide may be methylated to form 5-methylcytosine"
cagaccaaactaaaaaatgctgatttaggaaacacacccttttcctgatgaggaaagttgcgtttttgtccaatatcttaaatcttaaggagcttttaaggttttggcaccttttttccctc

SEQ ID NO: 1212 - DNA, 122 bp, Homo sapiens
  misc_feature (61)..(62): /note="This region represents a CpG dinucleotide"
  misc_feature (61)..(61): /note="Nucleotide may be methylated to form 5-methylcytosine"
aacccccacattgtatataataatctcttacaatcttgttcatagtgccacctatggtcacgaccaattagagctggtaaggcagctgtactgtttgcttcagccaatgagggtaaatgtac

SEQ ID NO: 1213 - DNA, 122 bp, Homo sapiens
  misc_feature (61)..(62): /note="This region represents a CpG dinucleotide"
  misc_feature (61)..(61): /note="Nucleotide may be methylated to form 5-methylcytosine"
aaaaaataaaaataaaaataaaaaataaacagctggcacagtggggacccgggtaccgcacgtgcctttctgggagttgtagttcctagcacgtgtctctaaaatacgttaaacatggcacc

SEQ ID NO: 1214 - DNA, 122 bp, Homo sapiens
  misc_feature (61)..(62): /note="This region represents a CpG dinucleotide"
  misc_feature (61)..(61): /note="Nucleotide may be methylated to form 5-methylcytosine"
ccctggcctgggcggcttccccttcctcccaaggccggagcttccctctctctgtctacacgggggagtttccctcagaaagagtcctaacgtcctgaagtatcacagcctcctatgctgcc

SEQ ID NO: 1215 - DNA, 122 bp, Homo sapiens
  misc_feature (61)..(62): /note="This region represents a CpG dinucleotide"
  misc_feature (61)..(61): /note="Nucleotide may be methylated to form 5-methylcytosine"
tccaccttttaggagacagaaaactggctgttgtatccaaattaccgtttttctagcccgcggtttctgaacagtttcgtggatcttaagtctgagtttcagttaggctttcctccccactg

SEQ ID NO: 1216 - DNA, 122 bp, Homo sapiens
  misc_feature (61)..(62): /note="This region represents a CpG dinucleotide"
  misc_feature (61)..(61): /note="Nucleotide may be methylated to form 5-methylcytosine"
tgtcatgaaaaacaaagaaggcgactcctcctacacagcagagttgttcagaaagtaccacgctgcactggcaataatcaattttaatgattaaggctaatgtgttttgcataaaagacaag

SEQ ID NO: 1217 - DNA, 122 bp, Homo sapiens
  misc_feature (61)..(62): /note="This region represents a CpG dinucleotide"
  misc_feature (61)..(61): /note="Nucleotide may be methylated to form 5-methylcytosine"
gcgcgctggctcgggatcccgggcggactcccggcgagacaccgcagcgccacctagtgccgggatgagcaggtgcttttcggccgagccagtttccgtgcagaacacctgagcctgggatc

SEQ ID NO: 1218 - DNA, 122 bp, Homo sapiens
  misc_feature (61)..(62): /note="This region represents a CpG dinucleotide"
  misc_feature (61)..(61): /note="Nucleotide may be methylated to form 5-methylcytosine"
agaaaacactgctgctggccgtgtttcctgtgagttttgagggtgacctgagttgagttgcgtgtaggcagctcaggttgactgagacaggaatgcgctcgatttcctgcccgttaaaacac

SEQ ID NO: 1219 - DNA, 122 bp, Homo sapiens
  misc_feature (61)..(62): /note="This region represents a CpG dinucleotide"
  misc_feature (61)..(61): /note="Nucleotide may be methylated to form 5-methylcytosine"
ggaggaaggggctcgaaacctccatcatcgcagagtctgaatagcagtggccccgccatgcgcccacgtagcggcgcctacgtagccacgcccccacaccccgtcctggccactctccctcc

SEQ ID NO: 1220 - DNA, 122 bp, Homo sapiens
  misc_feature (61)..(62): /note="This region represents a CpG dinucleotide"
  misc_feature (61)..(61): /note="Nucleotide may be methylated to form 5-methylcytosine"
tcccagctttgtttacatatttgtggtgcacaaaaatagaaatggactaaacaaaattcccgattttcccaaactgtggtggattgcagaaaccaagacttcgcagggctcggttctgaaat

SEQ ID NO: 1221 - DNA, 122 bp, Homo sapiens
  misc_feature (61)..(62): /note="This region represents a CpG dinucleotide"
  misc_feature (61)..(61): /note="Nucleotide may be methylated to form 5-methylcytosine"
tgtcggggcagggcttccagatgatcattcggcttttttgtgtcttccaagatgatgatccggggaggagggatgtgaaagggggtcagtcgccaggcgagctgaggacccagttctgcgcc

SEQ ID NO: 1222 - DNA, 122 bp, Homo sapiens
  misc_feature (61)..(62): /note="This region represents a CpG dinucleotide"
  misc_feature (61)..(61): /note="Nucleotide may be methylated to form 5-methylcytosine"
ggcggccaggggggcggcgcgcccgggcccggaaagcggcggaggggacgcccgggacagcgcccctcaccgcccgctgctcgcaggaggagcagcatcgatcccacgagaactgcctggac

SEQ ID NO: 1223 - DNA, 122 bp, Homo sapiens
  misc_feature (61)..(62): /note="This region represents a CpG dinucleotide"
  misc_feature (61)..(61): /note="Nucleotide may be methylated to form 5-methylcytosine"
atttctgtaccaacaaccttgcaatggcttccttttgttcttagaataataaaatccaagcgcccattatttggccttggtttaccttttcagccttcctttccacttactcttgagacatt

SEQ ID NO: 1224 - DNA, 122 bp, Homo sapiens
  misc_feature (61)..(62): /note="This region represents a CpG dinucleotide"
  misc_feature (61)..(61): /note="Nucleotide may be methylated to form 5-methylcytosine"
gtgtgagggagggggaaccggagctcaggagagggatctggccacaaagatgggtgggggcggtgcacagaggattctaaagacacagagtggcacagagggcagagagcctgtggagatga

SEQ ID NO: 1225 - DNA, 122 bp, Homo sapiens
  misc_feature (61)..(62): /note="This region represents a CpG dinucleotide"
  misc_feature (61)..(61): /note="Nucleotide may be methylated to form 5-methylcytosine"
ccacccagccagacagcagcatctgcaggtgcggtgccctggacctgccccagggtgagccggaggcggggccagggaggggagggaggtcgccccgcccaccccagctccttcctccctct

SEQ ID NO: 1226 - DNA, 122 bp, Homo sapiens
  misc_feature (61)..(62): /note="This region represents a CpG dinucleotide"
  misc_feature (61)..(61): /note="Nucleotide may be methylated to form 5-methylcytosine"
gcagactcgaagcttcacacctttattgtgtccgggggcgtccggggcctcaggggtgttcgtagcccgtgggcagagggttcacgtggctattgtggaacagagtgtggttgccgtccccc

SEQ ID NO: 1227 - DNA, 122 bp, Homo sapiens
  misc_feature (61)..(62): /note="This region represents a CpG dinucleotide"
  misc_feature (61)..(61): /note="Nucleotide may be methylated to form 5-methylcytosine"
gcctctcccctccaggatcagcggcccagagatagggacatgtcattgtttccgaggacgcgttgtttgaggtcaccttaaggccagatcggtgtttcattgacgattctgttggttttatt

SEQ ID NO: 1228 - DNA, 122 bp, Homo sapiens
  misc_feature (61)..(62): /note="This region represents a CpG dinucleotide"
  misc_feature (61)..(61): /note="Nucleotide may be methylated to form 5-methylcytosine"
tccagtccatggagttttcattattcattattcgccgggcccgggcagcacagcagcgcccgtgtctgtctaatccctacctgataatgtgtttctgataagcatgacggagcccagtgctc

SEQ ID NO: 1229 - DNA, 122 bp, Homo sapiens
  misc_feature (61)..(62): /note="This region represents a CpG dinucleotide"
  misc_feature (61)..(61): /note="Nucleotide may be methylated to form 5-methylcytosine"
agacacagccgggaaactggctgtggtggggaagcttctggtgctatggcttggctacatcgcaggctgtgtgaggaggaggacaggagaagcctggggaggcagcgggggctcagggtgga

SEQ ID NO: 1230 - DNA, 122 bp, Homo sapiens
  misc_feature (61)..(62): /note="This region represents a CpG dinucleotide"
  misc_feature (61)..(61): /note="Nucleotide may be methylated to form 5-methylcytosine"
gcaagaaaaattaaattacttaaggacacattcttgcacattccatgtgcataataggtgcggaatgagtgaatgcccttgaattatttatattttgaaagaaagcaggcacatgcagatca

SEQ ID NO: 1231 - DNA, 122 bp, Homo sapiens
  misc_feature (61)..(62): /note="This region represents a CpG dinucleotide"
  misc_feature (61)..(61): /note="Nucleotide may be methylated to form 5-methylcytosine"
gacccaccgctgctgctccctgctttccaccttgaaagccacaggcctgcgcctgggcagcggcctcccaggtgcacgctccagggcctccagcgcctcctttaatcagattcaggtagccg

SEQ ID NO: 1232 - DNA, 122 bp, Homo sapiens
  misc_feature (61)..(62): /note="This region represents a CpG dinucleotide"
  misc_feature (61)..(61): /note="Nucleotide may be methylated to form 5-methylcytosine"
atgttcttgtaatatacaaggattaaaaaaaaatcctaccaagagagcagtaataggctccggcttttctggtctgggagcaaatataatgagcctccatgaaaatattgaatcgcttcccg

SEQ ID NO: 1233 - DNA, 122 bp, Homo sapiens
  misc_feature (61)..(62): /note="This region represents a CpG dinucleotide"
  misc_feature (61)..(61): /note="Nucleotide may be methylated to form 5-methylcytosine"
gtaaacaaaagctgaattcatactcagggcttgctgagtttgaaccccgtgctctgcctgcgctatgccctgattctcagccttgctcaccacttcccgcccctcggccctttcctccgctt

SEQ ID NO: 1234 - DNA, 122 bp, Homo sapiens
  misc_feature (61)..(62): /note="This region represents a CpG dinucleotide"
  misc_feature (61)..(61): /note="Nucleotide may be methylated to form 5-methylcytosine"
gcagagggcccggtggaccacttggatcccaccttcagagaagaggcttcacctagcagccggtacttggcaaatccatctgtttcaggacttaacttgtgttcccaaagcctagaaagcac

SEQ ID NO: 1235 - DNA, 122 bp, Homo sapiens
  misc_feature (61)..(62): /note="This region represents a CpG dinucleotide"
  misc_feature (61)..(61): /note="Nucleotide may be methylated to form 5-methylcytosine"
gacacacagttgatcagcacccaggacagcatctcttgtgagcttggggaggatggacctcgcagcacaacacaaacccagttgaattcaggactctagggcctatattctgcagatagaaa

SEQ ID NO: 1236 - DNA, 122 bp, Homo sapiens
  misc_feature (61)..(62): /note="This region represents a CpG dinucleotide"
  misc_feature (61)..(61): /note="Nucleotide may be methylated to form 5-methylcytosine"
gtatgtagtgagagtttgagtcacactcttgcttaagaggatactctatgcattttcagacgtatgactaactgggcaaaaagtttaaagaataaaattcagaataacagtgttcagcagga

SEQ ID NO: 1237 - DNA, 122 bp, Homo sapiens
  misc_feature (61)..(62): /note="This region represents a CpG dinucleotide"
  misc_feature (61)..(61): /note="Nucleotide may be methylated to form 5-methylcytosine"
aattccaaggtgccagcatctggtgaaggccttcttactgggtcgaaatgtggcagaaggcgtcgtatggcagaagggcaaggggagggtgagagagggcaagagagagggctgaactcatc

SEQ ID NO: 1238 - DNA, 122 bp, Homo sapiens
  misc_feature (61)..(62): /note="This region represents a CpG dinucleotide"
  misc_feature (61)..(61): /note="Nucleotide may be methylated to form 5-methylcytosine"
ggagaagaggaggtagacctaggagccaacaaatggctatcaatcccaccaaataggctccgcagtggggttgctaaacaacgaagcttccagaagcggaccccagttcccaccctcttgct

SEQ ID NO: 1239 - DNA, 122 bp, Homo sapiens
  misc_feature (61)..(62): /note="This region represents a CpG dinucleotide"
  misc_feature (61)..(61): /note="Nucleotide may be methylated to form 5-methylcytosine"
caaaaaactcttggcaattgtgcaactgaattgccagtgtctttctctcttagacaagaacgacttctcattcatgtgacagtcatgaataagaagggaatacactctggtacacttaactc

SEQ ID NO: 1240 - DNA, 122 bp, Homo sapiens
  misc_feature (61)..(62): /note="This region represents a CpG dinucleotide"
  misc_feature (61)..(61): /note="Nucleotide may be methylated to form 5-methylcytosine"
cgttttccaagacaggacagtgttatggagcatggactcaagccttgggccatctacatccgttctttctccaccaagatgagttaggcgaccttggccacgtgacccccacctttctgagc

SEQ ID NO: 1241 - DNA, 122 bp, Homo sapiens
  misc_feature (61)..(62): /note="This region represents a CpG dinucleotide"
  misc_feature (61)..(61): /note="Nucleotide may be methylated to form 5-methylcytosine"
agtatcttattttctgttgttggttagttaggctaagtaaattacagccaactcactctacgaaatattaggttgctgttaataatgcaaaatataaagatcatcacaacacagaaaaaaat

SEQ ID NO: 1242 - DNA, 122 bp, Homo sapiens
  misc_feature (61)..(62): /note="This region represents a CpG dinucleotide"
  misc_feature (61)..(61): /note="Nucleotide may be methylated to form 5-methylcytosine"
actgcggttcagtgcagggctccccagtggctgctccgggtcgcaggtggcctttgctgccgggtcagtgctgtggtgaccgtcctcgggcagatgctgcccacatcctcctggtgcagcgt

SEQ ID NO: 1243 - DNA, 122 bp, Homo sapiens
  misc_feature (61)..(62): /note="This region represents a CpG dinucleotide"
  misc_feature (61)..(61): /note="Nucleotide may be methylated to form 5-methylcytosine"
aggcgggagacttacagctctatccaattagagcgctggattgacaactgccgaatgaggcgcgcagcagagaggagggtgcggcatccgggatctggcgcggcttttgcttgtagctccag

SEQ ID NO: 1244 - DNA, 122 bp, Homo sapiens
  misc_feature (61)..(62): /note="This region represents a CpG dinucleotide"
  misc_feature (61)..(61): /note="Nucleotide may be methylated to form 5-methylcytosine"
ggaccagctaaagttttgtttgtcgcgctgctcatattgatgaccttgaggttgccacaccggctgctgcgggctgcagagggaacaaagcccagcgccctcggggacaggggtgagccgag

SEQ ID NO: 1245 - DNA, 122 bp, Homo sapiens
  misc_feature (61)..(62): /note="This region represents a CpG dinucleotide"
  misc_feature (61)..(61): /note="Nucleotide may be methylated to form 5-methylcytosine"
acgttgattctgaagaatattctgtaataaattaaactggttgtttcctctggcagtttccgttttcattcccacaatgttattcattgtgggattgtgattcgtcagcatgtgctaactgg

SEQ ID NO: 1246 - DNA, 122 bp, Homo sapiens
  misc_feature (61)..(62): /note="This region represents a CpG dinucleotide"
  misc_feature (61)..(61): /note="Nucleotide may be methylated to form 5-methylcytosine"
agagaattcatcttattcctgtttctggattctaaggaaatatctctgttgcattttaaacggtgattgctggctattggactaaggttttcttaattggttttataaatactgttactttt

SEQ ID NO: 1247 - DNA, 122 bp, Homo sapiens
  misc_feature (61)..(62): /note="This region represents a CpG dinucleotide"
  misc_feature (61)..(61): /note="Nucleotide may be methylated to form 5-methylcytosine"
tggccaggctggtcttgaactcctgacctcaagtgatctgcccgcctcggcctcccaaagcgctgaaattacaggaagaagccaccgcgcccgacctaaagccagttttattccatagcttc

SEQ ID NO: 1248 - DNA, 122 bp, Homo sapiens
  misc_feature (61)..(62): /note="This region represents a CpG dinucleotide"
  misc_feature (61)..(61): /note="Nucleotide may be methylated to form 5-methylcytosine"
gctgagctaggggttagccaaccgggctggggtatcttactggtgatgacagcatggcctcgtcaccttcctgagggagggagtggcaggaaaccccagtcttacctcttttagcaatagca

SEQ ID NO: 1249 - DNA, 122 bp, Homo sapiens
  misc_feature (61)..(62): /note="This region represents a CpG dinucleotide"
  misc_feature (61)..(61): /note="Nucleotide may be methylated to form 5-methylcytosine"
aatgggaagcagactcagatgattaacactctgccttaattgggtgcttactcactctgccgtggcaaggcactgtgttctggactttggagatatctcatttaaaactctcaacagcctgt

SEQ ID NO: 1250 - DNA, 122 bp, Homo sapiens
  misc_feature (61)..(62): /note="This region represents a CpG dinucleotide"
  misc_feature (61)..(61): /note="Nucleotide may be methylated to form 5-methylcytosine"
agcctgttttagtgcttcattgaaggccatggactatgatgggcagtagatggcagtacacgattacaaatcttgggaaactccctctttttccaactccaagcccaaattctgtctttgag

SEQ ID NO: 1251 - DNA, 122 bp, Homo sapiens
  misc_feature (61)..(62): /note="This region represents a CpG dinucleotide"
  misc_feature (61)..(61): /note="Nucleotide may be methylated to form 5-methylcytosine"
ctgagcaggccacagtgtggaagaggctccagaaaacccagccctgccgctgcacacgtgcgtggccagcagataaagtcttccttgttattgtgggcagcgtagctgcacctgcggtgagg

SEQ ID NO: 1252 - DNA, 122 bp, Homo sapiens
  misc_feature (61)..(62): /note="This region represents a CpG dinucleotide"
  misc_feature (61)..(61): /note="Nucleotide may be methylated to form 5-methylcytosine"
gggaaaggatggggagacaaggatggggaagtgggccttataacaggattgtggcctttgcgcactcaccaaatgtttgaccctgtgagtgcctcagttgctactgttggaagaatgggcaa

SEQ ID NO: 1253 - DNA, 122 bp, Homo sapiens
  misc_feature (61)..(62): /note="This region represents a CpG dinucleotide"
  misc_feature (61)..(61): /note="Nucleotide may be methylated to form 5-methylcytosine"
caagaccatcacgatgacttcacgtcagtgccagcatatgcagccgtggaatacagtgagcgctctctgcggctgacagcaatagcggtgatctaatttacccggcgactggaagaaactct

SEQ ID NO: 1254 - DNA, 122 bp, Homo sapiens
  misc_feature (61)..(62): /note="This region represents a CpG dinucleotide"
  misc_feature (61)..(61): /note="Nucleotide may be methylated to form 5-methylcytosine"
ggcaggggcaggggctgcaggcggccctacagagccggtaaaggtgaaggcggtgctctgcggtgggaacgggaagcttccccaatcagactgcatcctgagggacaggagcggacacacga

SEQ ID NO: 1255 - DNA, 122 bp, Homo sapiens
  misc_feature (61)..(62): /note="This region represents a CpG dinucleotide"
  misc_feature (61)..(61): /note="Nucleotide may be methylated to form 5-methylcytosine"
caactgcattaaagttctcataaagtttacatcatgtagctttgcattacaaacccttctcggtttctcttgggttctgtattgcatcactaaatctcacttcattcttcctctttctactt

SEQ ID NO: 1256 - DNA, 122 bp, Homo sapiens
  misc_feature (61)..(62): /note="This region represents a CpG dinucleotide"
  misc_feature (61)..(61): /note="Nucleotide may be methylated to form 5-methylcytosine"
ttatgacacatactacatgtctgatacagatggcttacagaccattcttgtataaacagtcgttttacattgtggaaaacagtgtggcgattcctcagggatctaggactagaaataccatt

SEQ ID NO: 1257 - DNA, 122 bp, Homo sapiens
  misc_feature (61)..(62): /note="This region represents a CpG dinucleotide"
  misc_feature (61)..(61): /note="Nucleotide may be methylated to form 5-methylcytosine"
ccctgaatggcttttcctgccctggctcctcccatcatattttaaatgccgtcttcctcccgctccaaggaaaccttctcttgacgtcaggtactctccagccacggacctatcaacattct

SEQ ID NO: 1258 - DNA, 122 bp, Homo sapiens
  misc_feature (61)..(62): /note="This region represents a CpG dinucleotide"
  misc_feature (61)..(61): /note="Nucleotide may be methylated to form 5-methylcytosine"
agctaggaccacaggcatgcaccaccatgctgggctaatttttaaacatttttctagagacgagatctcactattttgcccaggctggtcttgaactcccggcctcaaggcatgagtcaccc

SEQ ID NO: 1259 - DNA, 122 bp, Homo sapiens
  misc_feature (61)..(62): /note="This region represents a CpG dinucleotide"
  misc_feature (61)..(61): /note="Nucleotide may be methylated to form 5-methylcytosine"
cagacgccacgtcctatatctcccgcaacacggtcgccatttttggtcgccatttttggtcgccattctgttggtactaaggtgttgtggttggtagaagcttaagtgagagcatcgcgagt

SEQ ID NO: 1260 - DNA, 122 bp, Homo sapiens
  misc_feature (61)..(62): /note="This region represents a CpG dinucleotide"
  misc_feature (61)..(61): /note="Nucleotide may be methylated to form 5-methylcytosine"
accgtgaaagaggatacttgtttgctgtccctactgataagggaaaggtgtgggtgctaacgctatgtgaggatgatggaatacagcttcacaaaccctgccttgaaaagcaacccagaggg

SEQ ID NO: 1261 - DNA, 122 bp, Homo sapiens
  misc_feature (61)..(62): /note="This region represents a CpG dinucleotide"
  misc_feature (61)..(61): /note="Nucleotide may be methylated to form 5-methylcytosine"
ttcagacattccagattctcaaagctgtgcaatgccccttgtcaaatgattcactccaaacgcctctggaactcatgcacatgtgtggagcgccttcccacacctggtaacctggggttact

SEQ ID NO: 1262 - DNA, 122 bp, Homo sapiens
  misc_feature (61)..(62): /note="This region represents a CpG dinucleotide"
  misc_feature (61)..(61): /note="Nucleotide may be methylated to form 5-methylcytosine"
ccgtgcgtcatccggaaggctgccataagcctgcgtttcgcagagctgcgctgaggctcccgtgtcgcggccgtccggccggcgcgctgatgtggctgcaaacctgggtatcagatcagccg

SEQ ID NO: 1263 - DNA, 122 bp, Homo sapiens
  misc_feature (61)..(62): /note="This region represents a CpG dinucleotide"
  misc_feature (61)..(61): /note="Nucleotide may be methylated to form 5-methylcytosine"
gctcactaactataggagatcattgcaaattattttctttctcatgctgctattcacttacgtactgcatatttgcttcaattctccaagggaagaaatgtggctcttgtgggaaaggtcca

SEQ ID NO: 1264 - DNA, 122 bp, Homo sapiens
  misc_feature (61)..(62): /note="This region represents a CpG dinucleotide"
  misc_feature (61)..(61): /note="Nucleotide may be methylated to form 5-methylcytosine"
ccccgggtgtccgtgggaagctccaaagccgggccgcgggacggctaccctgggctgtgacgcagtccaggatcttcgccaaggcacctgctggaggcccctcctgggtcccacgaccccga

SEQ ID NO: 1265 - DNA, 122 bp, Homo sapiens
  misc_feature (61)..(62): /note="This region represents a CpG dinucleotide"
  misc_feature (61)..(61): /note="Nucleotide may be methylated to form 5-methylcytosine"
ctttatattagagggagagttgcagtataggtacgaacatctgaaaagctgaaccagtatcgccaaatttcttctagacatgtgtattttcactagcaatataggaacttctgcttttcata

SEQ ID NO: 1266 - DNA, 122 bp, Homo sapiens
  misc_feature (61)..(62): /note="This region represents a CpG dinucleotide"
  misc_feature (61)..(61): /note="Nucleotide may be methylated to form 5-methylcytosine"
ctcaactcaggccattaacatggtaataccatcctgtttgcatctcctttgtctgtccagcgtttgtctgggatcctggcctctggatgctggaaatacttaggccccaaaggagagggagc

SEQ ID NO: 1267 - DNA, 122 bp, Homo sapiens
  misc_feature (61)..(62): /note="This region represents a CpG dinucleotide"
  misc_feature (61)..(61): /note="Nucleotide may be methylated to form 5-methylcytosine"
tgccaggtacagtgggacacgttcctagggcgacagaactggtggtcctgtacctgcaggcgagggtgtcagatgagtggcctggggaggagttctggaaaccattcccacgacaggcttgc

SEQ ID NO: 1268 - DNA, 122 bp, Homo sapiens
  misc_feature (61)..(62): /note="This region represents a CpG dinucleotide"
  misc_feature (61)..(61): /note="Nucleotide may be methylated to form 5-methylcytosine"
gtccggccctgaggctaggagcggggcgaaggctgcagaacgaacccaaagccaagcaggcgctccagctggagttgaagggaagtgactcgaggggtgtcacctcgtatgtcacaaactcc

SEQ ID NO: 1269 - DNA, 122 bp, Homo sapiens
  misc_feature (61)..(62): /note="This region represents a CpG dinucleotide"
  misc_feature (61)..(61): /note="Nucleotide may be methylated to form 5-methylcytosine"
cgctccacgtttgttgatatcagcattcagactctggaatcttgaatgaacctcttcaaccgtgttgaaatggaaagtctaaaataaagaaaatcttctttctacaaccatttattttgaaa

SEQ ID NO: 1270 - DNA, 122 bp, Homo sapiens
  misc_feature (61)..(62): /note="This region represents a CpG dinucleotide"
  misc_feature (61)..(61): /note="Nucleotide may be methylated to form 5-methylcytosine"
aaaggtcacacagccagcacatggcagcagtaggatttgaacccaagctgtctggctctacgtccatgctcagcccccatgctgtggagagcttagagctttctagatggcccagatctgtg

SEQ ID NO: 1271 - DNA, 122 bp, Homo sapiens
  misc_feature (61)..(62): /note="This region represents a CpG dinucleotide"
  misc_feature (61)..(61): /note="Nucleotide may be methylated to form 5-methylcytosine"
aactgttatcacccttgacatgctaatcacgtgatgcaactgtgtttagtgatcagtccacgtttctgaatgttaaatagattgacaagacatcaaaacccctatgacccttatcttttgac

SEQ ID NO: 1272 - DNA, 122 bp, Homo sapiens
  misc_feature (61)..(62): /note="This region represents a CpG dinucleotide"
  misc_feature (61)..(61): /note="Nucleotide may be methylated to form 5-methylcytosine"
cttatttaaaagccattctgtttattaaaataatagttttggatgagaaacaatgaaattcgtagaatgctcatagaataacctttgctgcacaacagactgtctggggatcttcattaaaa

SEQ ID NO: 1273 - DNA, 122 bp, Homo sapiens
  misc_feature (61)..(62): /note="This region represents a CpG dinucleotide"
  misc_feature (61)..(61): /note="Nucleotide may be methylated to form 5-methylcytosine"
aaagaaacctactgatttgggttggcagttgtttccacagtgacacagaagaaacaaaaacggtgtcccagcaatgttgtaaagcatttttacattgatgtgttatgcattgtgtatcctca

SEQ ID NO: 1274 - DNA, 122 bp, Homo sapiens
  misc_feature (61)..(62): /note="This region represents a CpG dinucleotide"
  misc_feature (61)..(61): /note="Nucleotide may be methylated to form 5-methylcytosine"
ttttctttcctgtatgtcttagccccccaactacttctggagagcagaaatattacggaacgtttctgttgagtctatcctagagccctagagacagtgctggacccacaacaggaagtcaa

SEQ ID NO: 1275 - DNA, 122 bp, Homo sapiens
  misc_feature (61)..(62): /note="This region represents a CpG dinucleotide"
  misc_feature (61)..(61): /note="Nucleotide may be methylated to form 5-methylcytosine"
tgggtcaaatctatttgctgctcatgtctccaagtatcttcaattagttagcctttgaaccggtccacacatgttcagtaagttcataagatatgaagcaatgctttagcatttgacagatt

SEQ ID NO: 1276 - DNA, 122 bp, Homo sapiens
  misc_feature (61)..(62): /note="This region represents a CpG dinucleotide"
  misc_feature (61)..(61): /note="Nucleotide may be methylated to form 5-methylcytosine"
tgaggtcttgggtgtgttgtccattcaccctggttgactcacaaatgttatcatgttctgcgtgttgtaaaaaatgttgggaaacactggtgtggctattgaaaatacaatcagcattatat

SEQ ID NO: 1277 - DNA, 122 bp, Homo sapiens
  misc_feature (61)..(62): /note="This region represents a CpG dinucleotide"
  misc_feature (61)..(61): /note="Nucleotide may be methylated to form 5-methylcytosine"
ataatcagtcaatgcaccattctgggtgttgggtgcagccaagcatggagaaaggaaccacgcagagtaaattctgccccaggcctgagagggaactgtactcaggctgaaacctagagata

SEQ ID NO: 1278 - DNA, 122 bp, Homo sapiens
  misc_feature (61)..(62): /note="This region represents a CpG dinucleotide"
  misc_feature (61)..(61): /note="Nucleotide may be methylated to form 5-methylcytosine"
gaaccgctctagttctttttctgcaaggataaaaatgagcttgaggatgaagctaatctacggagcaagcctgagccaagtgaattacagataaatgagctaaagcctgatgatgttgtaaa

SEQ ID NO: 1279 - DNA, 122 bp, Homo sapiens
  misc_feature (61)..(62): /note="This region represents a CpG dinucleotide"
  misc_feature (61)..(61): /note="Nucleotide may be methylated to form 5-methylcytosine"
cacctttcatgccagttcctaccctactcatccacacagacagaaagctctggaaggggacgaaggtggcacaaagcaccctgacaaagtagccactacccaggctcagggatcacatattc

SEQ ID NO: 1280 - DNA, 122 bp, Homo sapiens
  misc_feature (61)..(62): /note="This region represents a CpG dinucleotide"
  misc_feature (61)..(61): /note="Nucleotide may be methylated to form 5-methylcytosine"
cagcggcctgctggactctgagaactgggaaagatcagagcaagccttgcctcttatcttcgggaaaccagaatatgtttggggtggtaggagccacacagactcttctgagccccctcact

SEQ ID NO: 1281 - DNA, 122 bp, Homo sapiens
  misc_feature (61)..(62): /note="This region represents a CpG dinucleotide"
  misc_feature (61)..(61): /note="Nucleotide may be methylated to form 5-methylcytosine"
gagcagggaaagggggtgccaaaatgaagcatcattcacgtccagtcacatatgcagagacggggcaaacgtttgatgcaatcttgggtctcgctgctcccggggccgacaccgcaggcgat

SEQ ID NO: 1282 - DNA, 122 bp, Homo sapiens
  misc_feature (61)..(62): /note="This region represents a CpG dinucleotide"
  misc_feature (61)..(61): /note="Nucleotide may be methylated to form 5-methylcytosine"
gatttaatctattcaggcagctggaagcagaatggattatacagaaaaagaagggaggcccggtaggaggccaacaaagaaaaattgcctttgatgactgggatagcagtgtctgtggggtt

SEQ ID NO: 1283 - DNA, 122 bp, Homo sapiens
  misc_feature (61)..(62): /note="This region represents a CpG dinucleotide"
  misc_feature (61)..(61): /note="Nucleotide may be methylated to form 5-methylcytosine"
gtgctaatgattaacgccccgtccgtgctggccggtttctcaaatgcctcctgacgattgcgcacagccggacatcatttgtactgagagacaaaaggaaatcactgaggctttctgaggtg

SEQ ID NO: 1284 - DNA, 122 bp, Homo sapiens
  misc_feature (61)..(62): /note="This region represents a CpG dinucleotide"
  misc_feature (61)..(61): /note="Nucleotide may be methylated to form 5-methylcytosine"
ctgcctgaaatccacatgattttaatcatgtaaagagaatccaatttctaacctagaaaacgattagatgttattgagaggtaagactttgattaccaaacagtagtgtgccgtggtaaatt

SEQ ID NO: 1285 - DNA, 122 bp, Homo sapiens
  misc_feature (61)..(62): /note="This region represents a CpG dinucleotide"
  misc_feature (61)..(61): /note="Nucleotide may be methylated to form 5-methylcytosine"
atctactactgcacaacaaaccactccaaaatagtggcttaaaaccatagcagtcacttacgttgcttactaatctgggcattgactgggctcagccaggcagttctcactaggggtcgcta

SEQ ID NO: 1286 - DNA, 122 bp, Homo sapiens
  misc_feature (61)..(62): /note="This region represents a CpG dinucleotide"
  misc_feature (61)..(61): /note="Nucleotide may be methylated to form 5-methylcytosine"
aattcttatcaggcttggttcctcattgtgttatctccatgttcctagcctgagcatttacgtcacatcttcgtgtacttaacactttttttttttttgaggaaggcggcgggggagacagg

SEQ ID NO: 1287 - DNA, 122 bp, Homo sapiens
  misc_feature (61)..(62): /note="This region represents a CpG dinucleotide"
  misc_feature (61)..(61): /note="Nucleotide may be methylated to form 5-methylcytosine"
acctcaggtgatccgcccatctcggcctcccaaagtgttgagattacaggcgtgagccaccgcgcccggccgctagcgtgttatcttttctaagcatcagtttccttatctgcaacaccagg

SEQ ID NO: 1288 - DNA, 122 bp, Homo sapiens
  misc_feature (61)..(62): /note="This region represents a CpG dinucleotide"
  misc_feature (61)..(61): /note="Nucleotide may be methylated to form 5-methylcytosine"
gggcaacagagaccctgtctcaaaaaaaaaatccaccagaatcccccccgcaaaaaaaaacgctaccttatgtatatgctaagggagtagtcatggcatggcatcctagtgacattacaaat

SEQ ID NO: 1289 - DNA, 122 bp, Homo sapiens
  misc_feature (61)..(62): /note="This region represents a CpG dinucleotide"
  misc_feature (61)..(61): /note="Nucleotide may be methylated to form 5-methylcytosine"
agataaaaaacacacgggttattggactcacaaaattgaggagggaagaatttgccttcacgttgtgaaattaaattgataagaggacactggtttggactgagctcctgcactgggcccag

SEQ ID NO: 1290 - DNA, 122 bp, Homo sapiens
  misc_feature (61)..(62): /note="This region represents a CpG dinucleotide"
  misc_feature (61)..(61): /note="Nucleotide may be methylated to form 5-methylcytosine"
atacgattcaggttagaagattcaagttagaaaattctctctagtcaatgctctccaacccgttgcagtaggattgggatggaactgctgaggtagcaagcaggacttgactccagaggccg

SEQ ID NO: 1291 - DNA, 122 bp, Homo sapiens
  misc_feature (61)..(62): /note="This region represents a CpG dinucleotide"
  misc_feature (61)..(61): /note="Nucleotide may be methylated to form 5-methylcytosine"
cggggatacgaagaattcaaccagggctggacaagtcagagtgggccaaggtaagagttacggctgctactgtgcccacgttggaacagatagattagttcatctgctagttgtgtggcaag

SEQ ID NO: 1292 - DNA, 122 bp, Homo sapiens
  misc_feature (61)..(62): /note="This region represents a CpG dinucleotide"
  misc_feature (61)..(61): /note="Nucleotide may be methylated to form 5-methylcytosine"
tccccacctcacgccggcggggccaccctttcactccgcctccatctgctctgtggtccgcgctcgctcctgaagttaggcgtatacaccaccttccaactgggacagaagatatcagtctc

SEQ ID NO: 1293 - DNA, 122 bp, Homo sapiens
  misc_feature (61)..(62): /note="This region represents a CpG dinucleotide"
  misc_feature (61)..(61): /note="Nucleotide may be methylated to form 5-methylcytosine"
gtaattgccgtttacaaattcaaactttccaagaaaaccaagttggtgtctgatatgacacgttaaatgaagcaaatggctgtgaaacttatgttgagctgacagttcatacaaattcatga

SEQ ID NO: 1294 - DNA, 122 bp, Homo sapiens
  misc_feature (61)..(62): /note="This region represents a CpG dinucleotide"
  misc_feature (61)..(61): /note="Nucleotide may be methylated to form 5-methylcytosine"
ggctgcagtaggttcttactgataagtgccatctactggctgtaggtcaaaccaaacagccgtatgtaaaagctgctgatagaaatgcatagggctatagaagcaaagccaaaagatcctac

SEQ ID NO: 1295 - DNA, 122 bp, Homo sapiens
  misc_feature (61)..(62): /note="This region represents a CpG dinucleotide"
  misc_feature (61)..(61): /note="Nucleotide may be methylated to form 5-methylcytosine"
aggactgtggtggcagccggtgtgctggttgtcagctgatgtccctgtctgtgatttttccgtgtgaatgcagccttgactgggcatgtagatcagaggtgacaagtcctgggcacctctgc

SEQ ID NO: 1296 - DNA, 122 bp, Homo sapiens
  misc_feature (61)..(62): /note="This region represents a CpG dinucleotide"
  misc_feature (61)..(61): /note="Nucleotide may be methylated to form 5-methylcytosine"
ttgcagcctcacgaaaagatggtcctcatatctgggaagagcttcctcttctgcttattacgtccagtaaacagagcctgccccttccgtgaccaactgccaagttcacagcttccagtaag

SEQ ID NO: 1297 - DNA, 122 bp, Homo sapiens
  misc_feature (61)..(62): /note="This region represents a CpG dinucleotide"
  misc_feature (61)..(61): /note="Nucleotide may be methylated to form 5-methylcytosine"
cctctgagcctcagcagtgggatctagtggtcaccatttcttggatgtgtcataaggatacggtgtggctcagggaagcactggattataatgtgttttaagctcattctgaagaaaagcac

SEQ ID NO: 1298 - DNA, 122 bp, Homo sapiens
  misc_feature (61)..(62): /note="This region represents a CpG dinucleotide"
  misc_feature (61)..(61): /note="Nucleotide may be methylated to form 5-methylcytosine"
gggcagtgactggaatggttggaatgtggccttggtttgccattgggtgttttgttcctccgagcattggctggactctctggtgatttctggtcttgaaggacttcctgttttaaatgtct

SEQ ID NO: 1299 - DNA, 122 bp, Homo sapiens
  misc_feature (61)..(62): /note="This region represents a CpG dinucleotide"
  misc_feature (61)..(61): /note="Nucleotide may be methylated to form 5-methylcytosine"
tgccaggtgctgagagcagatgaggggcatcagagggtgggcgcccgagccgaggggtgtcgggcgcatccgctgcccagcggaagcggcggcctgagtggagtcaccgtgcaatgggtggg

SEQ ID NO: 1300 - DNA, 122 bp, Homo sapiens
  misc_feature (61)..(62): /note="This region represents a CpG dinucleotide"
  misc_feature (61)..(61): /note="Nucleotide may be methylated to form 5-methylcytosine"
ctccctcaatcgtgaacccagtaaaccagcctgcaccccacacagcccaaggtcttgccccgcgcccaggtcccagcacctagcgacccgccttcagcacttggaatgggctggagttggga

SEQ ID NO: 1301 - DNA, 122 bp, Homo sapiens
  misc_feature (61)..(62): /note="This region represents a CpG dinucleotide"
  misc_feature (61)..(61): /note="Nucleotide may be methylated to form 5-methylcytosine"
acaacaacaaaattgcgtaacaatgcatttctcagaacatatccctgtcatgaagtgactcgtgactatatttcttatttctcgcctgtgtcaaagagtgtcaccatgcaggttgccaacag

SEQ ID NO: 1302 - DNA, 122 bp, Homo sapiens
  misc_feature (61)..(62): /note="This region represents a CpG dinucleotide"
  misc_feature (61)..(61): /note="Nucleotide may be methylated to form 5-methylcytosine"
ttgcagaagtctcactcaaaagagttcaaaatgagagttccaaacctaataaagataacacgtttgccctctggtggacattcattttgagttagaattttctctgctaagactagagattt

SEQ ID NO: 1303 - DNA, 122 bp, Homo sapiens
  misc_feature (61)..(62): /note="This region represents a CpG dinucleotide"
  misc_feature (61)..(61): /note="Nucleotide may be methylated to form 5-methylcytosine"
ctgtttcagggatattggtttctcatgttcagtggagaaaatccccagtaatttttagaccggattgcagaggaaagcaagactagttctttgaaacttcattgaccccaatacatacctgt

SEQ ID NO: 1304 - DNA, 122 bp, Homo sapiens
  misc_feature (61)..(62): /note="This region represents a CpG dinucleotide"
  misc_feature (61)..(61): /note="Nucleotide may be methylated to form 5-methylcytosine"
gctgaaccagaagcttctaaatccagtgttgcctagactagccttgagacacaaagaccacgttcctttaccagctatgaaaacatccttattctataccctctctcttacagggtatttta

SEQ ID NO: 1305 - DNA, 122 bp, Homo sapiens
  misc_feature (61)..(62): /note="This region represents a CpG dinucleotide"
  misc_feature (61)..(61): /note="Nucleotide may be methylated to form 5-methylcytosine"
tgttgaaaggaggcctgggttgtcctgtgggtgactgttggtggaatctttcgcggaaagcgttttggaagaatggcgcgacgagcgagcagaggggaaggtggtgaccctgagcgctcggc

SEQ ID NO: 1306 - DNA, 122 bp, Homo sapiens
  misc_feature (61)..(62): /note="This region represents a CpG dinucleotide"
  misc_feature (61)..(61): /note="Nucleotide may be methylated to form 5-methylcytosine"
tcgtgccaggattggaccttgtagcaggtcactctagccacagaatcctggacctaaccacgggccagcctccaggaacacaccctgcaggtgtccaccagacagtcccataccccttactc

SEQ ID NO: 1307 - DNA, 122 bp, Homo sapiens
  misc_feature (61)..(62): /note="This region represents a CpG dinucleotide"
  misc_feature (61)..(61): /note="Nucleotide may be methylated to form 5-methylcytosine"
ctgcgttggcccactccgctgttgctcttcctccaacttcgcttgcttggtggcggcatccggcccctgggcagctcgccgcttgttcacgtgtgtcccatcctcctgtggagtgggcacgc

SEQ ID NO: 1308 - DNA, 122 bp, Homo sapiens
  misc_feature (61)..(62): /note="This region represents a CpG dinucleotide"
  misc_feature (61)..(61): /note="Nucleotide may be methylated to form 5-methylcytosine"
acgggcaggtgccaccgccccagggggctaatctgatccatctctgcgagggaaggtgctcgctcgtagctcccaggcgcggtctccagggcgctggggcacgtgtaggggtggggagaagc

SEQ ID NO: 1309 - DNA, 122 bp, Homo sapiens
  misc_feature (61)..(62): /note="This region represents a CpG dinucleotide"
  misc_feature (61)..(61): /note="Nucleotide may be methylated to form 5-methylcytosine"
aaaaaaaaaagaatcaagtgattttgctcttatctggagttgagacaagccagatgttctcgtgttgttttcataagcaaaagaggctaaactgatggccagaaagtactcctgctcatagg

SEQ ID NO: 1310 - DNA, 122 bp, Homo sapiens
  misc_feature (61)..(62): /note="This region represents a CpG dinucleotide"
  misc_feature (61)..(61): /note="Nucleotide may be methylated to form 5-methylcytosine"
ttgtccgcaatttccattgcaacattattcacaatgaccaaaaggtggaatcaaaccaagcgtccatgagcagacaaatggataaacagatgtgatgcgttcactcaatattcagccctaaa

SEQ ID NO: 1311 - DNA, 122 bp, Homo sapiens
  misc_feature (61)..(62): /note="This region represents a CpG dinucleotide"
  misc_feature (61)..(61): /note="Nucleotide may be methylated to form 5-methylcytosine"
ttaatgacaacactccccaattccagttagaggaactggagtttaaaatgaatgaaataacgactccaggtaccagagtctcattgccttttgggcaagaccttgatgtgggtatgaactca

SEQ ID NO: 1312 - DNA, 122 bp, Homo sapiens
  misc_feature (61)..(62): /note="This region represents a CpG dinucleotide"
  misc_feature (61)..(61): /note="Nucleotide may be methylated to form 5-methylcytosine"
caagagagtttcttttccttgaaagcaaacaacccctgaccagaagaatgtcacagatgacgagaggtgcctcatcacagaatcaggaacagtcagaatctcagtgggaagctatgcagctt

SEQ ID NO: 1313 - DNA, 122 bp, Homo sapiens
  misc_feature (61)..(62): /note="This region represents a CpG dinucleotide"
  misc_feature (61)..(61): /note="Nucleotide may be methylated to form 5-methylcytosine"
ccgtttcctctcagtccgtctgtattatggactagatgatctccagggttccttctaactcggaccctctgggatgccgggcatcatcactgtggggtgcttcccaggtaggacagctgctc

SEQ ID NO: 1314 - DNA, 122 bp, Homo sapiens
  misc_feature (61)..(62): /note="This region represents a CpG dinucleotide"
  misc_feature (61)..(61): /note="Nucleotide may be methylated to form 5-methylcytosine"
ccttaacaaaggctagaatgtgggactgatcaaacattagagaaagccccattgccctcacgggccacctgcctggcacacacctgtgtgcacttcccacatatttatggtgtttatcccag

SEQ ID NO: 1315 - DNA, 122 bp, Homo sapiens
  misc_feature (61)..(62): /note="This region represents a CpG dinucleotide"
  misc_feature (61)..(61): /note="Nucleotide may be methylated to form 5-methylcytosine"
attacttgttaaatgtcttcatcctacacctttttccttgtcctggacttctgtgagtttcgttccaacaactgagtcccaaaggagggagaaattgagactgggtggaattgcggagtttt

SEQ ID NO: 1316 - DNA, 122 bp, Homo sapiens
  misc_feature (61)..(62): /note="This region represents a CpG dinucleotide"
  misc_feature (61)..(61): /note="Nucleotide may be methylated to form 5-methylcytosine"
gctgcagagaggaaggagatcctgactggcaccaagtgcatctgggtgaaggccgcccggcggcgctcgcgggccctgggaaccgaggggcgacacctgctggcacccgcgacagagcgcag

SEQ ID NO: 1317 - DNA, 122 bp, Homo sapiens
  misc_feature (61)..(62): /note="This region represents a CpG dinucleotide"
  misc_feature (61)..(61): /note="Nucleotide may be methylated to form 5-methylcytosine"
atgtttttctttcttcttctaatttggatttcatgtcacacaggcttgctgcagccttctcgtcactgtccaggttaggttcccttccattcattctctttcactcacctcttaccctacct

SEQ ID NO: 1318 - DNA, 122 bp, Homo sapiens
  misc_feature (61)..(62): /note="This region represents a CpG dinucleotide"
  misc_feature (61)..(61): /note="Nucleotide may be methylated to form 5-methylcytosine"
catttacaagtaagaaaaatgaggcttcaggaagtctgtttccccagtggcctgcaggctcggggatcctcagtgcaagcccaacatctcacatcgccaccaaataaaatcaatgcacgtgg

SEQ ID NO: 1319 - DNA, 122 bp, Homo sapiens
  misc_feature (61)..(62): /note="This region represents a CpG dinucleotide"
  misc_feature (61)..(61): /note="Nucleotide may be methylated to form 5-methylcytosine"
gggttccttccactgtaaatctggggtcttggattaggtgacctgcagctgccctttgcccgactccagcagctcctccgactcggcctccccgagagcagcccttcccgagtgtccctgat

SEQ ID NO: 1320 - DNA, 122 bp, Homo sapiens
  misc_feature (61)..(62): /note="This region represents a CpG dinucleotide"
  misc_feature (61)..(61): /note="Nucleotide may be methylated to form 5-methylcytosine"
cttcctgttttctcccttgtttgttcatatggctgtgctttacaagattaaaaggcttaccgggcaaaagcatagcagaaggaagtaaaaccttcgggcagatgaaataattcttccatttt

SEQ ID NO: 1321 - DNA, 122 bp, Homo sapiens
  misc_feature (61)..(62): /note="This region represents a CpG dinucleotide"
  misc_feature (61)..(61): /note="Nucleotide may be methylated to form 5-methylcytosine"
cagtcaccagtagagtaaccatttcctttgtccattgattgactaacctggataacccaacgtggcagcctcaacatctgtataaatggaaccactgctgtggaccacggtggaaataagaa

SEQ ID NO: 1322 - DNA, 122 bp, Homo sapiens
  misc_feature (61)..(62): /note="This region represents a CpG dinucleotide"
  misc_feature (61)..(61): /note="Nucleotide may be methylated to form 5-methylcytosine"
aaggatgaaacacagagtggattacgcaaggtgaatctggtcagcccgggcctgaggtcacgtctgactcccagcaatggtgttttgcttggagacttctactgccctcttggcccctctgt

SEQ ID NO: 1323 - DNA, 122 bp, Homo sapiens
  misc_feature (61)..(62): /note="This region represents a CpG dinucleotide"
  misc_feature (61)..(61): /note="Nucleotide may be methylated to form 5-methylcytosine"
ttcagtgtgcttttcatgtgtcatttagtcttgacagttcaatactcggtaggcatttcccgttttccagatgaggacattgaaactgaaaaagattaaataactaaacaagtcacagagct

SEQ ID NO: 1324 - DNA, 122 bp, Homo sapiens
  misc_feature (61)..(62): /note="This region represents a CpG dinucleotide"
  misc_feature (61)..(61): /note="Nucleotide may be methylated to form 5-methylcytosine"
gcgtcccagtctgtgttgcagcagcattctcatcgggggtgcgcacaccatcgttactgtcgggcagtaactgccgcttgccttgccgcagtaggagggaaatctcaccttccttccacata

SEQ ID NO: 1325 - DNA, 122 bp, Homo sapiens
  misc_feature (61)..(62): /note="This region represents a CpG dinucleotide"
  misc_feature (61)..(61): /note="Nucleotide may be methylated to form 5-methylcytosine"
gaacaggagatggttcaggttctccggaggctggcatactctcaagacttgtgtccagttcgttattggtgttttctttacactgctcttttgaggcactgctatctcccaccacatctact

SEQ ID NO: 1326 - DNA, 122 bp, Homo sapiens
  misc_feature (61)..(62): /note="This region represents a CpG dinucleotide"
  misc_feature (61)..(61): /note="Nucleotide may be methylated to form 5-methylcytosine"
attgggaagccccaggttggttctgacttcatgcatgactggatccagtggctcaacacacgttaccagggcctggttccctccccagctcttggctctgttgactgccctgtaacatccct

SEQ ID NO: 1327 - DNA, 122 bp, Homo sapiens
  misc_feature (61)..(62): /note="This region represents a CpG dinucleotide"
  misc_feature (61)..(61): /note="Nucleotide may be methylated to form 5-methylcytosine"
gccctgggctgggctgggctgagcagcagggaggctgagcagcctgtagagggcagcacacgcgcggcttcccagccagccgccctggaggacgtggaggggaggcagccacagtcctggag

SEQ ID NO: 1328 - DNA, 122 bp, Homo sapiens
  misc_feature (61)..(62): /note="This region represents a CpG dinucleotide"
  misc_feature (61)..(61): /note="Nucleotide may be methylated to form 5-methylcytosine"
actccagtgggggtgtgcaggcatgcccttctgctgccaataaataactcatggtggctgcgtaaacccagaggcaaagtactagtgagtgtagacatgcaatttgacttgttgctatctgg

SEQ ID NO: 1329 - DNA, 122 bp, Homo sapiens
  misc_feature (61)..(62): /note="This region represents a CpG dinucleotide"
  misc_feature (61)..(61): /note="Nucleotide may be methylated to form 5-methylcytosine"
tgacaaataaaaagaaggaacaaaacattggtcatacctacaaagaatcagaaaccaaaacggtgtttaatttctcaagaaggggaagtgtaagtaattgtaagtgagtaattgtaaactca

SEQ ID NO: 1330 - DNA, 122 bp, Homo sapiens
  misc_feature (61)..(62): /note="This region represents a CpG dinucleotide"
  misc_feature (61)..(61): /note="Nucleotide may be methylated to form 5-methylcytosine"
ttagcgtttgttccattcagccattatcatgatccaggttttttctacttaaaataatgccgtgaaggatgcacccctaccttaatatacatatattcaaatgtatttgaaatagatgaaat

SEQ ID NO: 1331 - DNA, 122 bp, Homo sapiens
  misc_feature (61)..(62): /note="This region represents a CpG dinucleotide"
  misc_feature (61)..(61): /note="Nucleotide may be methylated to form 5-methylcytosine"
aaaggatggatttgttgtcccaggcccagggtcttactggcatttggtgctgggacagagcgggcaggatgcacaatgtcccgcaccaaacaggctacataatgagtcatctccaaaaaatg

SEQ ID NO: 1332 - DNA, 122 bp, Homo sapiens
  misc_feature (61)..(62): /note="This region represents a CpG dinucleotide"
  misc_feature (61)..(61): /note="Nucleotide may be methylated to form 5-methylcytosine"
tttggaagagttgtacttcagacaaacttagttggctcttaaaagaaaggcatctacgtccgcatctcttgccatgtaaatacagatttaattaacatttgcaacctgtgaagatgcaaaac

SEQ ID NO: 1333 - DNA, 122 bp, Homo sapiens
  misc_feature (61)..(62): /note="This region represents a CpG dinucleotide"
  misc_feature (61)..(61): /note="Nucleotide may be methylated to form 5-methylcytosine"
actaccctccagccttggcgacagagtgagactgtgtctcaaaaataataaataaacaaacggacaacacaaattcaaatacagatctaaagaaaactaaacaggttgatggacttcttatg

SEQ ID NO: 1334 - DNA, 122 bp, Homo sapiens
  misc_feature (61)..(62): /note="This region represents a CpG dinucleotide"
  misc_feature (61)..(61): /note="Nucleotide may be methylated to form 5-methylcytosine"
cctgcctcccagtccttgggctcagccaagcctcttcatctctttacagagacaagggagcgcctgccctgtgccaggcactgcagcaggaaggactacgtcagcaacatagcacacacgca

SEQ ID NO: 1335 - DNA, 122 bp, Homo sapiens
  misc_feature (61)..(62): /note="This region represents a CpG dinucleotide"
  misc_feature (61)..(61): /note="Nucleotide may be methylated to form 5-methylcytosine"
tccctgtcgaccgcacacaggccgaggttgagtcacccgggcaaagccagttgggatcagcggaaccacagtcaacctgcagacccggaaaaggggaaatcacatgcctgctgtgcgtgctg

SEQ ID NO: 1336 - DNA, 122 bp, Homo sapiens
  misc_feature (61)..(62): /note="This region represents a CpG dinucleotide"
  misc_feature (61)..(61): /note="Nucleotide may be methylated to form 5-methylcytosine"
gttcatgttccaccccattatctgtgtgtcagctgatggatgcttagggtgattccatgtcgtgtttgtttctgtgaacgatctcattgatgcctcatgcatgccacctgagtcccgcatgt

SEQ ID NO: 1337 - DNA, 122 bp, Homo sapiens
  misc_feature (61)..(62): /note="This region represents a CpG dinucleotide"
  misc_feature (61)..(61): /note="Nucleotide may be methylated to form 5-methylcytosine"
atgtagacaagtatttttctggggagagggtctggagcttacataaggcttaaagaggaacgtaaccccagatgaggttaagcatcttcaaattagcttctctgagcttcaatttctttggc

SEQ ID NO: 1338 - DNA, 122 bp, Homo sapiens
  misc_feature (61)..(62): /note="This region represents a CpG dinucleotide"
  misc_feature (61)..(61): /note="Nucleotide may be methylated to form 5-methylcytosine"
aatcctgtttatgaaaatattaataattcattttaattgtcactggagcatatatacttacgtgtttatttctgatgactagtaagcatggaatttctcaatctttatgcagtttttcctct

SEQ ID NO: 1339 - DNA, 122 bp, Homo sapiens
  misc_feature (61)..(62): /note="This region represents a CpG dinucleotide"
  misc_feature (61)..(61): /note="Nucleotide may be methylated to form 5-methylcytosine"
gtgtgcccgggacttcagcgataagtgtttcggtgttcctgcgtgcggatttgtgctctccggggaggtctgcggcccaggttcgattcctgcgacttgtcctaggcaggcctgtatgtgcg

SEQ ID NO: 1340 - DNA, 122 bp, Homo sapiens
  misc_feature (61)..(62): /note="This region represents a CpG dinucleotide"
  misc_feature (61)..(61): /note="Nucleotide may be methylated to form 5-methylcytosine"
ttaacccacaacaccagggattttacctaattcctgcctatcctgccttttctctggctccgtgctggactggccacttcctcttgcctcatacccacctggctaatctgactgcttatcct

SEQ ID NO: 1341 - DNA, 122 bp, Homo sapiens
  misc_feature (61)..(62): /note="This region represents a CpG dinucleotide"
  misc_feature (61)..(61): /note="Nucleotide may be methylated to form 5-methylcytosine"
acatggccatagaggacaatgaataagaaatagatccccaaattaaggggccagttgccacggagaacaacaaacaagaggattcttcccagacagaaaagttctaatcaaacaattttcct

SEQ ID NO: 1342 - DNA, 122 bp, Homo sapiens
  misc_feature (61)..(62): /note="This region represents a CpG dinucleotide"
  misc_feature (61)..(61): /note="Nucleotide may be methylated to form 5-methylcytosine"
catgtggacttaacttgttctgttgcagttttgccagtgcaccttaaagtagcggtttctcgttgtctgaacaagtacccggggttctttgtcctgcatccaaaaaaattaaggagcatgga

SEQ ID NO: 1343 - DNA, 122 bp, Homo sapiens
  misc_feature (61)..(62): /note="This region represents a CpG dinucleotide"
  misc_feature (61)..(61): /note="Nucleotide may be methylated to form 5-methylcytosine"
tttgttcagagataaggagtagtcaagtggcccaggcatgctcctaaacatcctgcaatacgcaggagtccaaaatgtcaatggtgctgagattgagagaaaccctgggctagatgatctct

SEQ ID NO: 1344 - DNA, 122 bp, Homo sapiens
  misc_feature (61)..(62): /note="This region represents a CpG dinucleotide"
  misc_feature (61)..(61): /note="Nucleotide may be methylated to form 5-methylcytosine"
ttgaagataaagtgttgccttatgagtaattggatatgtgggcttgaaaagttgaaatttcgttttgatgttatgcatgtaaatgatgcctgaacaaagggagcaaaatatttttttatctt

SEQ ID NO: 1345 - DNA, 122 bp, Homo sapiens
  misc_feature (61)..(62): /note="This region represents a CpG dinucleotide"
  misc_feature (61)..(61): /note="Nucleotide may be methylated to form 5-methylcytosine"
tatatttattatactcgtggctgtggccaaaattactatgaaggctgccagagtacttcccgtttttcaccccctcgcttcttagaaaggcttatgttttcatctaaaatgctgtttatttg

SEQ ID NO: 1346 - DNA, 122 bp, Homo sapiens
  misc_feature (61)..(62): /note="This region represents a CpG dinucleotide"
  misc_feature (61)..(61): /note="Nucleotide may be methylated to form 5-methylcytosine"
taaatttgattgaatttgaaggtataagggaatttcaaatgaaactttagcctctggtgacgttgccattgatgaatatgatgatagacatcttttcagtagcctttctacctcatgggatt

SEQ ID NO: 1347 - DNA, 122 bp, Homo sapiens
  misc_feature (61)..(62): /note="This region represents a CpG dinucleotide"
  misc_feature (61)..(61): /note="Nucleotide may be methylated to form 5-methylcytosine"
tgaggcaggagaatcactcaaacctggggggcggaggttgcagcgagccgagattgattgcgccactgcactccagccttggcaacagagccagactccgtctcaaaaacaaaaagagcaca

SEQ ID NO: 1348 - DNA, 122 bp, Homo sapiens
  misc_feature (61)..(62): /note="This region represents a CpG dinucleotide"
  misc_feature (61)..(61): /note="Nucleotide may be methylated to form 5-methylcytosine"
ataactgatctgggtctattctacactcaaaacgaacacagtgcaccttctacacataggcgcacaccacacacaagcacttcctcattccttaccatctctagctctacctagcctgtcag

SEQ ID NO: 1349 - DNA, 122 bp, Homo sapiens
  misc_feature (61)..(62): /note="This region represents a CpG dinucleotide"
  misc_feature (61)..(61): /note="Nucleotide may be methylated to form 5-methylcytosine"
ttttagctgttcttgcttggtaatctgaggaggaaatgatttcccttcctggctacctttcgttttaactgtctttcgggtacaaagtccagtcattaattgacgtcaaaccacagaaaggc

SEQ ID NO: 1350 - DNA, 122 bp, Homo sapiens
  misc_feature (61)..(62): /note="This region represents a CpG dinucleotide"
  misc_feature (61)..(61): /note="Nucleotide may be methylated to form 5-methylcytosine"
attgcataagaactagatgcaagtggctttgtcacctgttcgctgcagggaagtcacacccgtccaaagggccaccagcatccacctggatctcatgaaccaaaggccagtgctcattgccc

SEQ ID NO: 1351 - DNA, 122 bp, Homo sapiens
  misc_feature (61)..(62): /note="This region represents a CpG dinucleotide"
  misc_feature (61)..(61): /note="Nucleotide may be methylated to form 5-methylcytosine"
acttgaggactgcagagtcggaactaaagcctggggtcctctgaggccaaaatctgggctcgtttagctccagcaggggcttggggggtactttctgtgaccgaggactcggcagcctgacg

SEQ ID NO: 1352 - DNA, 122 bp, Homo sapiens
  misc_feature (61)..(62): /note="This region represents a CpG dinucleotide"
  misc_feature (61)..(61): /note="Nucleotide may be methylated to form 5-methylcytosine"
ggaggctttttaataatgagcagtttgcctgggctgagggccatttccataatctccacccgcccctgcaggcattttgctcactagatggggagagaggtctcccaggtggagggaatttg

SEQ ID NO: 1353 - DNA, 122 bp, Homo sapiens
  misc_feature (61)..(62): /note="This region represents a CpG dinucleotide"
  misc_feature (61)..(61): /note="Nucleotide may be methylated to form 5-methylcytosine"
tcactctgatgcatagaaacttcatcatagttcaaggaagtgaatcattagaaaaacttccggataagttagactaaatatgagactcacttgagctcattgagctcattgaatgagctcat

SEQ ID NO: 1354 - DNA, 122 bp, Homo sapiens
  misc_feature (61)..(62): /note="This region represents a CpG dinucleotide"
  misc_feature (61)..(61): /note="Nucleotide may be methylated to form 5-methylcytosine"
tttactctataatggagacatttttaatgaatacattaaaacaagcaggattcggccgggcgcggtggctcacgcctgtaatcccaacactttgggaggctgcggcgggcggatcacctgag

SEQ ID NO: 1355 - DNA, 122 bp, Homo sapiens
  misc_feature (61)..(62): /note="This region represents a CpG dinucleotide"
  misc_feature (61)..(61): /note="Nucleotide may be methylated to form 5-methylcytosine"
tttgtgtgtgtggtccccatgtgcatgtgtggtgtgtctgatgtgtgtggtttgtgtgtgcggtttaagtgtgtgtgtagtgtgtgatttgtatgtggtttacatgtgcgtgtatggtgcat

SEQ ID NO: 1356 - DNA, 122 bp, Homo sapiens
  misc_feature (61)..(62): /note="This region represents a CpG dinucleotide"
  misc_feature (61)..(61): /note="Nucleotide may be methylated to form 5-methylcytosine"
aaaaccctgacctggaaagcaaaggagattgcttgctaattgtaggcacttgaggtgtgtcgaaggccctgggcaaagagaagacgaggaaaccaaagcttctgagggcacctggggaggga

SEQ ID NO: 1357 - DNA, 122 bp, Homo sapiens
  misc_feature (61)..(62): /note="This region represents a CpG dinucleotide"
  misc_feature (61)..(61): /note="Nucleotide may be methylated to form 5-methylcytosine"
aagtagagtcttagtccctgagggtggatcacgtgggctcccacacatctcctcctgctgcgagctgttcgtgctctgtcagcccctctgccagaggaaggtgtatcatacagtggtctgtg

SEQ ID NO: 1358 - DNA, 122 bp, Homo sapiens
  misc_feature (61)..(62): /note="This region represents a CpG dinucleotide"
  misc_feature (61)..(61): /note="Nucleotide may be methylated to form 5-methylcytosine"
tgggcaaagtgactcacgcctataattccaacactttggggagccaaggcaagaggatcacggcagccaggggttcaagaccagcctggacaacatagtgagacacccccttccctacaaac

SEQ ID NO: 1359 - DNA, 122 bp, Homo sapiens
  misc_feature (61)..(62): /note="This region represents a CpG dinucleotide"
  misc_feature (61)..(61): /note="Nucleotide may be methylated to form 5-methylcytosine"
accacttgctctgcaattgtataaggagtatggggaagaatgtctcctgatactgtcaaacggccaactagaagctgttagggtaagatagaactttccgaaagatgctcttctcctccact

SEQ ID NO: 1360 - DNA, 122 bp, Homo sapiens
  misc_feature (61)..(62): /note="This region represents a CpG dinucleotide"
  misc_feature (61)..(61): /note="Nucleotide may be methylated to form 5-methylcytosine"
aactcccaacctcaagcgatccacccgcctcggcctcccaaagtgctgggattacagacgcgaaccaccgcgcccgactgtcctgtgttttaatgcttgaaaataatctgaatatggaaaat

SEQ ID NO: 1361 - DNA, 122 bp, Homo sapiens
  misc_feature (61)..(62): /note="This region represents a CpG dinucleotide"
  misc_feature (61)..(61): /note="Nucleotide may be methylated to form 5-methylcytosine"
tgtgagatgaaagctgagtgggaagctggaccctacaaaggagtctgggggcgccgggaccggaccccttcggaaaggtttgcgggaaggggcttccggggacgatggttattgttgtaacg

SEQ ID NO: 1362 - DNA, 122 bp, Homo sapiens
  misc_feature (61)..(62): /note="This region represents a CpG dinucleotide"
  misc_feature (61)..(61): /note="Nucleotide may be methylated to form 5-methylcytosine"
ccaacctgggagacagagcaagattgtgtcaaaaatcaaaacaaaaaaaaaccccagcaacgcttgagacctgctcctgcaagtatttaactcacagaaaaggagatagcaccaggtaaaaa

SEQ ID NO: 1363 - DNA, 122 bp, Homo sapiens
  misc_feature (61)..(62): /note="This region represents a CpG dinucleotide"
  misc_feature (61)..(61): /note="Nucleotide may be methylated to form 5-methylcytosine"
aaatgaacagcttttccgaggccctcatttctgatgcaggctagcagtttcaatctgttacgtttctctgtctatgtctctgtcgcctctctctgtcactattctttctctgcccctctctc

SEQ ID NO: 1364 - DNA, 122 bp, Homo sapiens
  misc_feature (61)..(62): /note="This region represents a CpG dinucleotide"
  misc_feature (61)..(61): /note="Nucleotide may be methylated to form 5-methylcytosine"
gagtatctattttctaaagccactgagcttgtggtaattgtttacagctggaataggaaacggatccagcacctgatcctcccagcatggggaagcgtttatagagaaagagagagctgcag

SEQ ID NO: 1365 - DNA, 122 bp, Homo sapiens
  misc_feature (61)..(62): /note="This region represents a CpG dinucleotide"
  misc_feature (61)..(61): /note="Nucleotide may be methylated to form 5-methylcytosine"
gttttatgattaaatatcctccatgcaacattaggaaagtcaggagtcctaaataagtcacgtggtttggcactttaacagctgtgatctcatatgcgcttcacagtaaccctatgcaatgg

SEQ ID NO: 1366 - DNA, 122 bp, Homo sapiens
  misc_feature (61)..(62): /note="This region represents a CpG dinucleotide"
  misc_feature (61)..(61): /note="Nucleotide may be methylated to form 5-methylcytosine"
tagccgctccagtgtgtggcagtctcggtgcctgcaaagtaaatcctgtccactggctggcgtagaacccttggaacaaaaccaaagaggcaaaagtggtcagtctcagagagtcagagaaa

SEQ ID NO: 1367 - DNA, 122 bp, Homo sapiens
  misc_feature (61)..(62): /note="This region represents a CpG dinucleotide"
  misc_feature (61)..(61): /note="Nucleotide may be methylated to form 5-methylcytosine"
gaccctcccccatccacacatcaggttctgaaacctgaccctgccaggcaactaaagccgcgaaccccacagtgccctgagctggcctcaccctacccacgatcccaagagggtactagccg

SEQ ID NO: 1368 - DNA, 122 bp, Homo sapiens
  misc_feature (61)..(62): /note="This region represents a CpG dinucleotide"
  misc_feature (61)..(61): /note="Nucleotide may be methylated to form 5-methylcytosine"
aaggccttgaaagcaaggttcagccgtctgtattggtcatcttcccattgccagtgcctacgaagggcttgacccattcattgttagacgctcagtaagtgtgtattgaggcagccctctgt

SEQ ID NO: 1369 - DNA, 122 bp, Homo sapiens
  misc_feature (61)..(62): /note="This region represents a CpG dinucleotide"
  misc_feature (61)..(61): /note="Nucleotide may be methylated to form 5-methylcytosine"
gttttgttttatggagattggctagactggcaggtgacaaggcaagaggtgggctggccacgagagccagctgagcagtgcgagttggtgtgattcagccatttgtcaccaccatattctgc

SEQ ID NO: 1370 - DNA, 122 bp, Homo sapiens
  misc_feature (61)..(62): /note="This region represents a CpG dinucleotide"
  misc_feature (61)..(61): /note="Nucleotide may be methylated to form 5-methylcytosine"
caggcacagcattgaacctgtcatcacacatatcagattctttcagctgtttgtgactggcgtgcccctttctgtggtatccaaactggctgtgcatgagtggtctgcacattaaagcattg

SEQ ID NO: 1371 - DNA, 122 bp, Homo sapiens
  misc_feature (61)..(62): /note="This region represents a CpG dinucleotide"
  misc_feature (61)..(61): /note="Nucleotide may be methylated to form 5-methylcytosine"
cagccagtcacgtagcatcagcaaggctgagctgggtcagatttctggactccagacttacgtttaatccgatgagattcacagccatgctgttatcccagcatagactttgtttagtcaca

SEQ ID NO: 1372 - DNA, 122 bp, Homo sapiens
  misc_feature (61)..(62): /note="This region represents a CpG dinucleotide"
  misc_feature (61)..(61): /note="Nucleotide may be methylated to form 5-methylcytosine"
gggctgagtgagacctcgttgccaaaaaaaaaaaaaacaaaaaaacctggggagagagagcgaaagctactcaaggggccacaaatgtaattatgccaaaattcaaatgatgattagtcagt

SEQ ID NO: 1373 - DNA, 122 bp, Homo sapiens
  misc_feature (61)..(62): /note="This region represents a CpG dinucleotide"
  misc_feature (61)..(61): /note="Nucleotide may be methylated to form 5-methylcytosine"
ggaaccaggaaactggatgacaaaaggatgacaaatgctgacaaacgctatcatgggaaacggacatgaacacagagcagagcccccacagccagtctatggagtaatccaggagggcttcc

SEQ ID NO: 1374 - DNA, 122 bp, Homo sapiens
  misc_feature (61)..(62): /note="This region represents a CpG dinucleotide"
  misc_feature (61)..(61): /note="Nucleotide may be methylated to form 5-methylcytosine"
agaacaaaaatgcatatctatccccctcccgttccctctgcctcccctcccaaaagaacgcgtctgcggggacagatggccctgtgtcagcgtccctgtgtgatattgatgtgaacagcgag

SEQ ID NO: 1375 - DNA, 122 bp, Homo sapiens
  misc_feature (61)..(62): /note="This region represents a CpG dinucleotide"
  misc_feature (61)..(61): /note="Nucleotide may be methylated to form 5-methylcytosine"
ccctccaaccaaccttacaaaactccagcctccaaaactccgcccttcgcgattcttccccgcccctcggcgtccagacagatagacagacgacctgccccgccccctgcgccaccgactga

SEQ ID NO: 1376 - DNA, 122 bp, Homo sapiens
  misc_feature (61)..(62): /note="This region represents a CpG dinucleotide"
  misc_feature (61)..(61): /note="Nucleotide may be methylated to form 5-methylcytosine"
attttttataaatgttccccatctcccgtcagtaaaattgattttagaaaaatacaaaaacgagaagcccccatagtgccgtaggtctggaaaccattaggaagctctacagcctgggaaac

SEQ ID NO: 1377 - DNA, 122 bp, Homo sapiens
  misc_feature (61)..(62): /note="This region represents a CpG dinucleotide"
  misc_feature (61)..(61): /note="Nucleotide may be methylated to form 5-methylcytosine"
cgttgtaaggtaggaggagttgggtgatgggtctggtttctttgaaaagccagcggggggcgctttgagccttctgatgatgccatgatggctgccatgcccccatggcccagccctggcaa

SEQ ID NO: 1378 - DNA, 122 bp, Homo sapiens
  misc_feature (61)..(62): /note="This region represents a CpG dinucleotide"
  misc_feature (61)..(61): /note="Nucleotide may be methylated to form 5-methylcytosine"
gctttccgcagtaatttcccaagctgcactaaatattatcaacaagcacaataactcagccgtgtgctctgcgctctcatttcccttccatgagcagaggcttattataaatcagtaggatt

SEQ ID NO: 1379 - DNA, 122 bp, Homo sapiens
  misc_feature (61)..(62): /note="This region represents a CpG dinucleotide"
  misc_feature (61)..(61): /note="Nucleotide may be methylated to form 5-methylcytosine"
ccagcaacagcagagctctaactaccacccctagaacatttgattgcatcagattaccagcgaaggcccctgcagaactctgggctgtgcctccactgggtttcacctgacaaccctcgtac

SEQ ID NO: 1380 - DNA, 122 bp, Homo sapiens
  misc_feature (61)..(62): /note="This region represents a CpG dinucleotide"
  misc_feature (61)..(61): /note="Nucleotide may be methylated to form 5-methylcytosine"
cacctgaagataaaaggcaaactcttgactgtgtgcttgggcctggcccctctgtgggctcgtctaagaccacccctcactctcacttccttgcattcagtatgtaccagcctcttttaact

SEQ ID NO: 1381 - DNA, 122 bp, Homo sapiens
  misc_feature (61)..(62): /note="This region represents a CpG dinucleotide"
  misc_feature (61)..(61): /note="Nucleotide may be methylated to form 5-methylcytosine"
actttagctctagaattactctgagaccttgaaaaagttttaccttaaatttttaaatttcgaggaaaactctgggacaatcttagcaaaaagtagtaaacaacttagttaagagtaaatgt

SEQ ID NO: 1382 - DNA, 122 bp, Homo sapiens
  misc_feature (61)..(62): /note="This region represents a CpG dinucleotide"
  misc_feature (61)..(61): /note="Nucleotide may be methylated to form 5-methylcytosine"
gctgggtggggatgctcctagtgccccgcctgcgtggcgccccccaggggccacccgccacggcgctcgtggtgtctgacccgcaagggcgcccctagtgacagccctcccttatacctccc

SEQ ID NO: 1383 - DNA, 122 bp, Homo sapiens
  misc_feature (61)..(62): /note="This region represents a CpG dinucleotide"
  misc_feature (61)..(61): /note="Nucleotide may be methylated to form 5-methylcytosine"
tttattgcttgtacaacatctcctctttggctttggatacaggacatgccacatgactttcgtcacttctggaaaccacagccatgctggcaggatgacctggtgagccctggtcccctatc

SEQ ID NO: 1384 - DNA, 122 bp, Homo sapiens
  misc_feature (61)..(62): /note="This region represents a CpG dinucleotide"
  misc_feature (61)..(61): /note="Nucleotide may be methylated to form 5-methylcytosine"
tgtcctaataaagcagacacagcctcatggggtgtttaatcttgatccaaaagtcactatcgtacctgtggtccgaatgcatgtataacagtcacagttccaactttcacttcccttcagat

SEQ ID NO: 1385 - DNA, 122 bp, Homo sapiens
  misc_feature (61)..(62): /note="This region represents a CpG dinucleotide"
  misc_feature (61)..(61): /note="Nucleotide may be methylated to form 5-methylcytosine"
gcggggaaaaaacaccggtgggattcgtcagcccccacagaggccgcaggggaaaaacaccggtgggattcatcagcccccacagaggccgcagggaaatgcagcctggtgatttccgagaa

SEQ ID NO: 1386 - DNA, 122 bp, Homo sapiens
  misc_feature (61)..(62): /note="This region represents a CpG dinucleotide"
  misc_feature (61)..(61): /note="Nucleotide may be methylated to form 5-methylcytosine"
cagagggggcagtgacaggcgggtgggtgtggcaggaccccacaatgtctctttctgtggcgtctccttcttcgcctgccccttcctatgggccatccttccagctcacctgcggcccaccc

SEQ ID NO: 1387 - DNA, 122 bp, Homo sapiens
  misc_feature (61)..(62): /note="This region represents a CpG dinucleotide"
  misc_feature (61)..(61): /note="Nucleotide may be methylated to form 5-methylcytosine"
cagttagcattggtccatgcctatcaacggaaaattgtgcagtctctgggataaacagctcgactttgtcaagggaaccgtgtatttttactagaagtcagattcacgtccggcctccaggc

SEQ ID NO: 1388 - DNA, 122 bp, Homo sapiens
  misc_feature (61)..(62): /note="This region represents a CpG dinucleotide"
  misc_feature (61)..(61): /note="Nucleotide may be methylated to form 5-methylcytosine"
ctcttttatgtctctacctcctacatcttatctccaggttggatgattgatgagaacattcgcccaacctttaaagaactagccaatgagttcaccaggatggcccgagacccaccacggta

SEQ ID NO: 1389 - DNA, 122 bp, Homo sapiens
  misc_feature (61)..(62): /note="This region represents a CpG dinucleotide"
  misc_feature (61)..(61): /note="Nucleotide may be methylated to form 5-methylcytosine"
acatggcacagtttcactttcactctacccagctcttactgccagacatcctttagaacacgctcacaaacactagctggaactgggctggcattaatagcaagccagttatcagtgctgac

SEQ ID NO: 1390 - DNA, 122 bp, Homo sapiens
  misc_feature (61)..(62): /note="This region represents a CpG dinucleotide"
  misc_feature (61)..(61): /note="Nucleotide may be methylated to form 5-methylcytosine"
gatggattttgtttgaatgaggaacctcagaattaaacgtttgctcccccttagggctttcgtgtgggaagatgtcctattatttaggggtcgcctcttgacttcatcaattccctctcatg

SEQ ID NO: 1391 - DNA, 122 bp, Homo sapiens
  misc_feature (61)..(62): /note="This region represents a CpG dinucleotide"
  misc_feature (61)..(61): /note="Nucleotide may be methylated to form 5-methylcytosine"
gttgtaatttctccttgaaaagaactgagtttatggtctttacttcacatcccagctgttcgagaattgctaaatccatagggagttgcgtgagttatgtaattggcatgaattatttgagt

SEQ ID NO: 1392 - DNA, 122 bp, Homo sapiens
  misc_feature (61)..(62): /note="This region represents a CpG dinucleotide"
  misc_feature (61)..(61): /note="Nucleotide may be methylated to form 5-methylcytosine"
actgagtgtggacggtcattgctctgctgcggcttcccggggagcacggctcacggcccacgtcaccatgcacctcgtgtgcactcggacaggccgcagccaccagcctctcccctgttgtc

SEQ ID NO: 1393 - DNA, 122 bp, Homo sapiens
  misc_feature (61)..(62): /note="This region represents a CpG dinucleotide"
  misc_feature (61)..(61): /note="Nucleotide may be methylated to form 5-methylcytosine"
caagctctgcccagaaggcctggaggtcattagtgcgccagggggtcccggggcacccagcggagcaggtggtgggaaatgtggtggctggcttaactggtcaaggaggcagggtcgcaccg

SEQ ID NO: 1394 - DNA, 122 bp, Homo sapiens
  misc_feature (61)..(62): /note="This region represents a CpG dinucleotide"
  misc_feature (61)..(61): /note="Nucleotide may be methylated to form 5-methylcytosine"
tcccatccagccccaggagtctggggcaagtagtcttgtaaggtcagtggcctgcggggacgcagtgagcgccgaatttgcctggggcaggggaaatgcgctctggcccatgtctgcgcact

SEQ ID NO: 1395 - DNA, 122 bp, Homo sapiens
  misc_feature (61)..(62): /note="This region represents a CpG dinucleotide"
  misc_feature (61)..(61): /note="Nucleotide may be methylated to form 5-methylcytosine"
ccagtcagtgagaaagaatgaagaggacaggaggaccacctctcagggcagagctctgagcgcagacagcagacagcagacagcagacagcaaggcacatgcgcaataatggacatgcccag

SEQ ID NO: 1396 - DNA, 122 bp, Homo sapiens
  misc_feature (61)..(62): /note="This region represents a CpG dinucleotide"
  misc_feature (61)..(61): /note="Nucleotide may be methylated to form 5-methylcytosine"
cctcagtgtggagtcaaactctgccatttactgtgtgacttacttgtgtgcccttagacacgtcactcaagtgaatctctgtttccttgtacataaaatgggaataatgatgctcctcttgc

SEQ ID NO: 1397 - DNA, 122 bp, Homo sapiens
  misc_feature (61)..(62): /note="This region represents a CpG dinucleotide"
  misc_feature (61)..(61): /note="Nucleotide may be methylated to form 5-methylcytosine"
ctcctgccaccagaactcactagttcctcatagaagatccatatctccttgaaatcataacgtttggatcttattgaataataagaaaactatttccttcctaaatgtgagctacattaaaa

SEQ ID NO: 1398 - DNA, 122 bp, Homo sapiens
  misc_feature (61)..(62): /note="This region represents a CpG dinucleotide"
  misc_feature (61)..(61): /note="Nucleotide may be methylated to form 5-methylcytosine"
actcgggttgggcccggcgacttgtgttttaaaagccctccgggtgattttgtgcatgctcgaccttgagaaccctgaacaattagtggcagggctggaatgagaatcctggtaaacccgcc

SEQ ID NO: 1399 - DNA, 122 bp, Homo sapiens
  misc_feature (61)..(62): /note="This region represents a CpG dinucleotide"
  misc_feature (61)..(61): /note="Nucleotide may be methylated to form 5-methylcytosine"
tatgctggcggggggtgctcttcatgcatgtgcgtgaatggccagggtgggcagagctgccggatgggttgggggtcaggaggggccctcctgaagccaaagtttatctttggaggtttccg

SEQ ID NO: 1400 - DNA, 122 bp, Homo sapiens
  misc_feature (61)..(62): /note="This region represents a CpG dinucleotide"
  misc_feature (61)..(61): /note="Nucleotide may be methylated to form 5-methylcytosine"
tagggtgatctaaccatggtgcttctcaaaatttaaagtgcctacgaattgcctggggaccgtgttgaaatgcagcttccaacttggtcctgaatttctaacaagctactgggtgctgttgc

SEQ ID NO: 1401 - DNA, 122 bp, Homo sapiens
  misc_feature (61)..(62): /note="This region represents a CpG dinucleotide"
  misc_feature (61)..(61): /note="Nucleotide may be methylated to form 5-methylcytosine"
ttgttctgggggagcatttatctctagcagccagcagggggtggcatcaggtaccaaaggcgtgagcctggcccaagggagtgggagcagagggctttgcagatttgggagaggtcaaggtc

SEQ ID NO: 1402 - DNA, 122 bp, Homo sapiens
  misc_feature (61)..(62): /note="This region represents a CpG dinucleotide"
  misc_feature (61)..(61): /note="Nucleotide may be methylated to form 5-methylcytosine"
ttgtgttactgtgagtgtatgtcagaagctctgatgagtatgcttacaccctccacaccacgtaaaaatgcagaattgtgcaattaactagaggatgaggattgaaagatgctcctactctg

SEQ ID NO: 1403 - DNA, 122 bp, Homo sapiens
  misc_feature (61)..(62): /note="This region represents a CpG dinucleotide"
  misc_feature (61)..(61): /note="Nucleotide may be methylated to form 5-methylcytosine"
cttcttccagaaacaacagtcttgtgtttgcatatctttataattttcacagcatttccccgaccattatcttgttggaatttcacaattctatgaagtaagaaaggcacgtagttttcctt

SEQ ID NO: 1404 - DNA, 122 bp, Homo sapiens
  misc_feature (61)..(62): /note="This region represents a CpG dinucleotide"
  misc_feature (61)..(61): /note="Nucleotide may be methylated to form 5-methylcytosine"
agatcactccattgcattccagcctgagtgacagagcaagactctgtttaaaaaagacaacgaaaaccgaaaaacaaagaacaggtggagtctactgacttgcatgagtcaggtaattcatt

SEQ ID NO: 1405 - DNA, 122 bp, Homo sapiens
  misc_feature (61)..(62): /note="This region represents a CpG dinucleotide"
  misc_feature (61)..(61): /note="Nucleotide may be methylated to form 5-methylcytosine"
ctcacccttcgtggatgggtaaactgagggggtcagcatcagagatagaggggtaccacacgaggccacaaggacataaaacaatgctggagaatgtacaatagatacacaagtcctgatcc

SEQ ID NO: 1406 - DNA, 122 bp, Homo sapiens
  misc_feature (61)..(62): /note="This region represents a CpG dinucleotide"
  misc_feature (61)..(61): /note="Nucleotide may be methylated to form 5-methylcytosine"
gcctcccccgccccctcccggctgtgggctcctgcgcagccccagcctcccccacgagcgcggctgcctgctcctcggcgcccagtcccgtcgaccgcccaaggactgaggagtgcgcgcgc

SEQ ID NO: 1407 - DNA, 122 bp, Homo sapiens
  misc_feature (61)..(62): /note="This region represents a CpG dinucleotide"
  misc_feature (61)..(61): /note="Nucleotide may be methylated to form 5-methylcytosine"
taaagaatcattgtttggaattttctgtttagcctgtattaaaagcaacttgacatctgtcgtcacaaaatatgaacatctaatataagccaccatttattatttgactctcttccacaata

SEQ ID NO: 1408 - DNA, 122 bp, Homo sapiens
  misc_feature (61)..(62): /note="This region represents a CpG dinucleotide"
  misc_feature (61)..(61): /note="Nucleotide may be methylated to form 5-methylcytosine"
ttgtttccttggctgttaggtctgcctgtttcctcaggctaattatgaaatcatctgctccgccaggaagaagcacacagctgaagagcatcatcctgtgttccagcattactgtggagcat

SEQ ID NO: 1409 - DNA, 122 bp, Homo sapiens
  misc_feature (61)..(62): /note="This region represents a CpG dinucleotide"
  misc_feature (61)..(61): /note="Nucleotide may be methylated to form 5-methylcytosine"
tccttagagcgtttcccaaagtgtattctgcggaactagcacctactgtgttctcaacaccgtgccacctatagaaggtaggatttgaaaaagcttttgacttacaggaaggggtgggcttg

SEQ ID NO: 1410 - DNA, 122 bp, Homo sapiens
  misc_feature (61)..(62): /note="This region represents a CpG dinucleotide"
  misc_feature (61)..(61): /note="Nucleotide may be methylated to form 5-methylcytosine"
aaagaggctcaaatgagcaggcttaatacaagtgctatatttcttcaagctttgattccacgttgattcttatacctgaagtcatcaatgagatccccaagttccatgaagtgtatgaccaa

SEQ ID NO: 1411 - DNA, 122 bp, Homo sapiens
  misc_feature (61)..(62): /note="This region represents a CpG dinucleotide"
  misc_feature (61)..(61): /note="Nucleotide may be methylated to form 5-methylcytosine"
ctagatccaacaacaagatataccttctgaaagaagtacacagtaataccgagaacaggtcgtatttcaaggtgatgaaatacacagagagaacatccaatatggttacactgagtctgact

SEQ ID NO: 1412 - DNA, 122 bp, Homo sapiens
  misc_feature (61)..(62): /note="This region represents a CpG dinucleotide"
  misc_feature (61)..(61): /note="Nucleotide may be methylated to form 5-methylcytosine"
cacccttggtcccccagtaaacatgtatataacattcttttcatacatgcaactccaaaacgtcctgcttaaaattccccaactttcccaggtgaaaccccaaacagtagttttctggccta

SEQ ID NO: 1413 - DNA, 122 bp, Homo sapiens
  misc_feature (61)..(62): /note="This region represents a CpG dinucleotide"
  misc_feature (61)..(61): /note="Nucleotide may be methylated to form 5-methylcytosine"
agcccgggcaactgagtgagaccttgtctcaaaaaaaaaaaaaaaaaaaaaaattttaaacggaaggaagaagcagttcctgagttgtttactgagaatttatgttaaaataacataaactg

SEQ ID NO: 1414 - DNA, 122 bp, Homo sapiens
  misc_feature (61)..(62): /note="This region represents a CpG dinucleotide"
  misc_feature (61)..(61): /note="Nucleotide may be methylated to form 5-methylcytosine"
ctgggctgtgccagagcagggggatggaatggaggttttggccctgggcccaaccagagacggcagggctgaagcccgatgccacgctagacaggtgactcaaatcttaggcctctgttttc

SEQ ID NO: 1415 - DNA, 122 bp, Homo sapiens
  misc_feature (61)..(62): /note="This region represents a CpG dinucleotide"
  misc_feature (61)..(61): /note="Nucleotide may be methylated to form 5-methylcytosine"
tgcaccttgtcaagctggtccccagtgtgtgtgacttcagcctgcactagaccatttgaccgacctaatcattttgttcgtaagagcttcaagaacatctaattgagcattcccagcctttg

SEQ ID NO: 1416 - DNA, 122 bp, Homo sapiens
  misc_feature (61)..(62): /note="This region represents a CpG dinucleotide"
  misc_feature (61)..(61): /note="Nucleotide may be methylated to form 5-methylcytosine"
aacagggcacttttatctctatctgatttcttaaactctgtacatgtataaaaacaaaaacgtttttaataattaaaaagaagagaagtgggtggcttaggttgctggagtagtggggatat

SEQ ID NO: 1417 - DNA, 122 bp, Homo sapiens
  misc_feature (61)..(62): /note="This region represents a CpG dinucleotide"
  misc_feature (61)..(61): /note="Nucleotide may be methylated to form 5-methylcytosine"
cggctctctgaaagcgggtggagctgagaagcaacccagagaggctcctgcagccagggtcgggaggatttcaccttcctggatgggaattgattctccagacctagctttattaagtgtca

SEQ ID NO: 1418 - DNA, 122 bp, Homo sapiens
  misc_feature (61)..(62): /note="This region represents a CpG dinucleotide"
  misc_feature (61)..(61): /note="Nucleotide may be methylated to form 5-methylcytosine"
ttagaggcctcagagaatgtcaaaggttggcgctggctgccttgggcgctcgggagaacccgagaggggaagcggtccccggaaagagttcaggacacggggcctggaggatggggatggca

SEQ ID NO: 1419 - DNA, 122 bp, Homo sapiens
  misc_feature (61)..(62): /note="This region represents a CpG dinucleotide"
  misc_feature (61)..(61): /note="Nucleotide may be methylated to form 5-methylcytosine"
ttgcacaggaatcatcacagcagtaaaaactctccaaagaggaataagagaagtctaattcgggtcagatcttcagagacaggtaagataagcctgcaatacaaggtttcctggaggcctaa

SEQ ID NO: 1420 - DNA, 122 bp, Homo sapiens
  misc_feature (61)..(62): /note="This region represents a CpG dinucleotide"
  misc_feature (61)..(61): /note="Nucleotide may be methylated to form 5-methylcytosine"
accaaggagtgagttatttattatttatttatttatttattattttgccctcctgctcctcgggaggcttctgtcctgagctcgccttagctaatcctgcgttaccgttcggcaggtgtgcg

SEQ ID NO: 1421 - DNA, 122 bp, Homo sapiens
  misc_feature (61)..(62): /note="This region represents a CpG dinucleotide"
  misc_feature (61)..(61): /note="Nucleotide may be methylated to form 5-methylcytosine"
ctacaaatcacatttatcttttgccactaagctccctgttaggatctgccaatcagaggacgctaggggcggactggaaggctgagtggggaagaaggaagacacttcctgtttgcttcctg

SEQ ID NO: 1422 - DNA, 122 bp, Homo sapiens
  misc_feature (61)..(62): /note="This region represents a CpG dinucleotide"
  misc_feature (61)..(61): /note="Nucleotide may be methylated to form 5-methylcytosine"
gggttgcagggagccgagatcacgtcactgcactctaccctgggtgacagagcgagatgccgtgtcaaaaaaaataaattaaatcaaataaaaaatttaaaaatgtatatatataaaataaa

SEQ ID NO: 1423 - DNA, 122 bp, Homo sapiens
  misc_feature (61)..(62): /note="This region represents a CpG dinucleotide"
  misc_feature (61)..(61): /note="Nucleotide may be methylated to form 5-methylcytosine"
gaggcccctttgcataaacacaaacactcagcaaatgaataactggctcaatcagacgcccgctgtgccttctacctgtcctcactctgacaggagacactgcctattccaggggacaccac

SEQ ID NO: 1424 - DNA, 122 bp, Homo sapiens
  misc_feature (61)..(62): /note="This region represents a CpG dinucleotide"
  misc_feature (61)..(61): /note="Nucleotide may be methylated to form 5-methylcytosine"
catgaaggactttatgtgtcaggggagatgcttgtgatatattgtctaaggccagggggccgtgaatgggtttgggcaggaaagagttagactcaactctttggctgttggaaggattccta

SEQ ID NO: 1425 - DNA, 122 bp, Homo sapiens
  misc_feature (61)..(62): /note="This region represents a CpG dinucleotide"
  misc_feature (61)..(61): /note="Nucleotide may be methylated to form 5-methylcytosine"
cagaacctgccttctggagaggcgccatgtgtgtgaatgaacctgctgtttggaaggcaccgctgtgtcgtcgcactcagactccatgaagccaccgctgtgtcgtcgcactcagactccat

SEQ ID NO: 1426 - DNA, 122 bp, Homo sapiens
  misc_feature (61)..(62): /note="This region represents a CpG dinucleotide"
  misc_feature (61)..(61): /note="Nucleotide may be methylated to form 5-methylcytosine"
gctgcccagcaagatgcggacctgggtgcagtcacagggcccccgaagctgcagggaggccgccagcctggtggaggacctcacacagatgtgccagcaggaaggtgagaggcgcaggcttc

SEQ ID NO: 1427 - DNA, 122 bp, Homo sapiens
  misc_feature (61)..(62): /note="This region represents a CpG dinucleotide"
  misc_feature (61)..(61): /note="Nucleotide may be methylated to form 5-methylcytosine"
gtccctggcactgtggagcttagaggctaatgaggtggcaggtgcttacactttagaaaccgttgtgaggaatagctagtggtagttaaatgatacagtgatagttaacagagaggaaagct

SEQ ID NO: 1428 - DNA, 122 bp, Homo sapiens
  misc_feature (61)..(62): /note="This region represents a CpG dinucleotide"
  misc_feature (61)..(61): /note="Nucleotide may be methylated to form 5-methylcytosine"
attctgtttgtctgaacatccctcagccagttggtgaattttctttcgtttagtgggacccgcagtactcactggccaccttgaacaaatagttggctgtggacaagcaactgtgtttcaag

SEQ ID NO: 1429 - DNA, 122 bp, Homo sapiens
  misc_feature (61)..(62): /note="This region represents a CpG dinucleotide"
  misc_feature (61)..(61): /note="Nucleotide may be methylated to form 5-methylcytosine"
gcggggcccggagctgttgggttgcagaagatgcgtgcgtgacgcagggtgaggggcgcccgccgcgcctgctgcgcccctcgaaaggcagatggggccccctaaaaaaagaaatcaagaaa

SEQ ID NO: 1430 - DNA, 122 bp, Homo sapiens
  misc_feature (61)..(62): /note="This region represents a CpG dinucleotide"
  misc_feature (61)..(61): /note="Nucleotide may be methylated to form 5-methylcytosine"
gacggggtttcaccatgttggttgggctggtcgcaaactcctgacctcaagtgatctgcccgccttggcctacaggggtgagccactgcgcctggctgaagttttacttttcttaaagagaa

SEQ ID NO: 1431 - DNA, 122 bp, Homo sapiens
  misc_feature (61)..(62): /note="This region represents a CpG dinucleotide"
  misc_feature (61)..(61): /note="Nucleotide may be methylated to form 5-methylcytosine"
cataatacttggtcattttacttaatccttctggtcttttactcaaagggcatcatagcacgtttcttccaggattgttatgatgtttgaatgagaagatatatgtaaatatgcttaacatg

SEQ ID NO: 1432 - DNA, 122 bp, Homo sapiens
  misc_feature (61)..(62): /note="This region represents a CpG dinucleotide"
  misc_feature (61)..(61): /note="Nucleotide may be methylated to form 5-methylcytosine"
caaagtttgtaaaaattctatgctcttaaaaatggcttttattttaaaacttcccaaatacgttgtcttgaagttgttaatttctcaatcaagacgcagggtggcgctgcaggctaagttgt

SEQ ID NO: 1433 - DNA, 122 bp, Homo sapiens
  misc_feature (61)..(62): /note="This region represents a CpG dinucleotide"
  misc_feature (61)..(61): /note="Nucleotide may be methylated to form 5-methylcytosine"
tcctgattggctaaccatggtactggggtgagaaagctgagactagtggtgttgctagagcgaggttgtcttgacttagaagagctgattgtgaaattttcagaaattttgcttgctgatta

SEQ ID NO: 1434 - DNA, 122 bp, Homo sapiens
  misc_feature (61)..(62): /note="This region represents a CpG dinucleotide"
  misc_feature (61)..(61): /note="Nucleotide may be methylated to form 5-methylcytosine"
ggccgggtgggcgccggcgggcagagcgccccctagggccatcccctcggggttcttgggcggaggctgaccgccggcttctcggcttcaccccccaggcccatctggcccgcggcggccgc

SEQ ID NO: 1435 - DNA, 122 bp, Homo sapiens
  misc_feature (61)..(62): /note="This region represents a CpG dinucleotide"
  misc_feature (61)..(61): /note="Nucleotide may be methylated to form 5-methylcytosine"
gtatgcctttcggggatgaatggcagcacactgtggtctagtcttctccctgaggaggctcgagatatcacatgtttggagctgatgccaggaagcttggctgaaaccatctgccttgtgac

SEQ ID NO: 1436 - DNA, 122 bp, Homo sapiens
  misc_feature (61)..(62): /note="This region represents a CpG dinucleotide"
  misc_feature (61)..(61): /note="Nucleotide may be methylated to form 5-methylcytosine"
tgatactatcttcttcaaagtattttgttagctcctgttacagcaattccttcacagtaacgtaattatttgtttacacatctgccttccttatgagaccatgggctctgaagagcaggaat

SEQ ID NO: 1437 - DNA, 122 bp, Homo sapiens
  misc_feature (61)..(62): /note="This region represents a CpG dinucleotide"
  misc_feature (61)..(61): /note="Nucleotide may be methylated to form 5-methylcytosine"
aataatctcagttattgtccaattcttgcaaactgtaacagttggaaagtttgaataattcgttcatgttagcagttgacatataaagacttttatttggcaggcaacagaatatagggttg

SEQ ID NO: 1438 - DNA, 122 bp, Homo sapiens
  misc_feature (61)..(62): /note="This region represents a CpG dinucleotide"
  misc_feature (61)..(61): /note="Nucleotide may be methylated to form 5-methylcytosine"
gctccttgcccaatgccaagtgctggggatttctgtcagcaagccctgtggctccagtgacggtatttctaaagccaaacttagttacctagaattagcgccatgttggaaacactgtcgca

SEQ ID NO: 1439 - DNA, 122 bp, Homo sapiens
  misc_feature (61)..(62): /note="This region represents a CpG dinucleotide"
  misc_feature (61)..(61): /note="Nucleotide may be methylated to form 5-methylcytosine"
ttgcccccacacacagcaggcacatccggagcccccgcctgcccgcgtaaccccagctcccgtcacctcccactcgagcctgttacggatgctttctggaggaggtttgctggggctgccaa

SEQ ID NO: 1440 - DNA, 122 bp, Homo sapiens
  misc_feature (61)..(62): /note="This region represents a CpG dinucleotide"
  misc_feature (61)..(61): /note="Nucleotide may be methylated to form 5-methylcytosine"
ttgtagttaggggaatagaaagaaccaagttggacattacgcatggaagaaaagcaaacccgccttttggtaaacggtgtctggcattccagcagaatcttggtttgcatccttaccaggaa

SEQ ID NO: 1441 - DNA, 122 bp, Homo sapiens
  misc_feature (61)..(62): /note="This region represents a CpG dinucleotide"
  misc_feature (61)..(61): /note="Nucleotide may be methylated to form 5-methylcytosine"
gagaccgttgttctcatggaatgctggcacttcctctgcaaggcacagcgagaatctggacgtgcagagggatgtgcagattaaaactgatagaaaagtttcaaattaggagcacaaaaaat

SEQ ID NO: 1442 - DNA, 122 bp, Homo sapiens
  misc_feature (61)..(62): /note="This region represents a CpG dinucleotide"
  misc_feature (61)..(61): /note="Nucleotide may be methylated to form 5-methylcytosine"
tcagttcaatgatgtaaaccacttagtacacagcatacactatgtagtgtgagctactaccgtcattattatatgcaacatcatctcttctcagatttctataattagccttggttattatt

SEQ ID NO: 1443 - DNA, 122 bp, Homo sapiens
  misc_feature (61)..(62): /note="This region represents a CpG dinucleotide"
  misc_feature (61)..(61): /note="Nucleotide may be methylated to form 5-methylcytosine"
taaaatgtctccactaggtatggtgtttactgtattatttagtttactgagtgtcttagtcggttgggctgctatagctgggtgactttaaacagcagacatttatttgttacagttctgga

SEQ ID NO: 1444 - DNA, 122 bp, Homo sapiens
  misc_feature (61)..(62): /note="This region represents a CpG dinucleotide"
  misc_feature (61)..(61): /note="Nucleotide may be methylated to form 5-methylcytosine"
gtcaacgctcaatacaagggacattaggattggcagtagctcagagatctctctgctcaccgtgatcttcaagtttgaaaattgcatctcaaatctaagacccagagggctcacccagagtc

SEQ ID NO: 1445 - DNA, 122 bp, Homo sapiens
  misc_feature (61)..(62): /note="This region represents a CpG dinucleotide"
  misc_feature (61)..(61): /note="Nucleotide may be methylated to form 5-methylcytosine"
ccccgtgtccaggggatgcagaagtgtcctcgtccttggctgtgggtgagccccacaaaccgaaggtggtaacactccacttctcacatcaccaaactcttcagccctggtgcagcttctga

SEQ ID NO: 1446 - DNA, 122 bp, Homo sapiens
  misc_feature (61)..(62): /note="This region represents a CpG dinucleotide"
  misc_feature (61)..(61): /note="Nucleotide may be methylated to form 5-methylcytosine"
gaagcaggcaccccagacatcaaaaaaaaaaaaaaagtgcccttaaaaaaccaggataaacgtttaccaaaaacacgagggcttctgtctttataaggtgatccttgcactcccttccctgc

SEQ ID NO: 1447 - DNA, 122 bp, Homo sapiens
  misc_feature (61)..(62): /note="This region represents a CpG dinucleotide"
  misc_feature (61)..(61): /note="Nucleotide may be methylated to form 5-methylcytosine"
acgtgaactcggtcacctcctccccctcgctcctccccggcaggctctgaggagccgaggcggtggcagcagcgcgaggaacagaacacgctgcaaactgcttggctacccctttacaagac

SEQ ID NO: 1448 - DNA, 122 bp, Homo sapiens
  misc_feature (61)..(62): /note="This region represents a CpG dinucleotide"
  misc_feature (61)..(61): /note="Nucleotide may be methylated to form 5-methylcytosine"
gcattatggcaggaagtcagatcttttgctctaaagcctaatactcctattctgtactctcggtaggtaaatacttttcaagccttagattcattttcaatcaagtcgctctgcttagtcaa

SEQ ID NO: 1449 - DNA, 122 bp, Homo sapiens
  misc_feature (61)..(62): /note="This region represents a CpG dinucleotide"
  misc_feature (61)..(61): /note="Nucleotide may be methylated to form 5-methylcytosine"
cgtcacatccgcctgctgctgcttctcaaccaagctgcccccactctcggcctctgtccccgatggccctctcgggctgtgcaggtcccacggacccaccgctgccttcacttcatcctcgc

SEQ ID NO: 1450 - DNA, 122 bp, Homo sapiens
  misc_feature (61)..(62): /note="This region represents a CpG dinucleotide"
  misc_feature (61)..(61): /note="Nucleotide may be methylated to form 5-methylcytosine"
ggggaaaaagctcacctttctaggctgtgaatgggccctggcaagtctgtggccaggactcgtcttctcttccacatggggcccctagcttggcacctagcacgtggcaggcagcgacagat

SEQ ID NO: 1451 - DNA, 122 bp, Homo sapiens
  misc_feature (61)..(62): /note="This region represents a CpG dinucleotide"
  misc_feature (61)..(61): /note="Nucleotide may be methylated to form 5-methylcytosine"
gaggaaggatgaggggactgcagggcagagagggagaaagaaaagcatccaaagttaaaacggtaggaagaaataagaagtatattacatgggtttgaaggaatttcataactgaacaagtc

SEQ ID NO: 1452 - DNA, 122 bp, Homo sapiens
  misc_feature (61)..(62): /note="This region represents a CpG dinucleotide"
  misc_feature (61)..(61): /note="Nucleotide may be methylated to form 5-methylcytosine"
gagacgcagagaagagaacgaaaccgacgagtcaggtgaactgtaatacaacgttctacccgaatgtaagtcatctgattggcttttggactcttctaggccacccattgtgatacgacatt

SEQ ID NO: 1453 - DNA, 122 bp, Homo sapiens
  misc_feature (61)..(62): /note="This region represents a CpG dinucleotide"
  misc_feature (61)..(61): /note="Nucleotide may be methylated to form 5-methylcytosine"
ctcctggagccggagccagctcggcactggaaccggcgtcctctggtggcagagagagagcgctactggcgattttcggaccgaatcggcacgctcgtcagatccaagcaggcgggactggc

SEQ ID NO: 1454 - DNA, 122 bp, Homo sapiens
  misc_feature (61)..(62): /note="This region represents a CpG dinucleotide"
  misc_feature (61)..(61): /note="Nucleotide may be methylated to form 5-methylcytosine"
atgaactgatacagtttacagacatttacctttatagcagagacctgcctggagacatctcgctggcactacaaattgtctcatctcactgggggatcccttagaagccggcccctggggtc

SEQ ID NO: 1455 - DNA, 122 bp, Homo sapiens
  misc_feature (61)..(62): /note="This region represents a CpG dinucleotide"
  misc_feature (61)..(61): /note="Nucleotide may be methylated to form 5-methylcytosine"
tgcattgtgggcattggtaagagaactcattggagttttttgggggaagggtgctggggacgatggcagagagagatatatgatcaggtttagcacagaatataggcaaacgcacccttcaa

SEQ ID NO: 1456 - DNA, 122 bp, Homo sapiens
  misc_feature (61)..(62): /note="This region represents a CpG dinucleotide"
  misc_feature (61)..(61): /note="Nucleotide may be methylated to form 5-methylcytosine"
cagtgtgaccttgggccagttacttaatctctctgagcctcagtgttcccatctgcaaaacggagataataataacagcatgttccacacagaatttggggaggagtaaatgagctcatgtg

SEQ ID NO: 1457 - DNA, 122 bp, Homo sapiens
  misc_feature (61)..(62): /note="This region represents a CpG dinucleotide"
  misc_feature (61)..(61): /note="Nucleotide may be methylated to form 5-methylcytosine"
aggaggcattccatgtagcaaaaatggcattcagacacttcaagatccatgtgagaaaatcgttgacaccatcttatgtggggtcgaatgactttgagaatgctgtcttggattatgtcatt

SEQ ID NO: 1458 - DNA, 122 bp, Homo sapiens
  misc_feature (61)..(62): /note="This region represents a CpG dinucleotide"
  misc_feature (61)..(61): /note="Nucleotide may be methylated to form 5-methylcytosine"
acgctcccaacccctcccctcccagcggaacaagcgcaccgcgttatcagcccggggatccgtgactgtggcagctgtggctggaggggacttctgagtccaatccctgcaaccagggaccc

SEQ ID NO: 1459 - DNA, 122 bp, Homo sapiens
  misc_feature (61)..(62): /note="This region represents a CpG dinucleotide"
  misc_feature (61)..(61): /note="Nucleotide may be methylated to form 5-methylcytosine"
tgacgttgccccagctgaggggccttggtttcagaggcctactcaatgcattatttcatccgagcctgcccagtgctcacactctcatagaggcggggaataaactgacaacaaatcgcaac

SEQ ID NO: 1460 - DNA, 122 bp, Homo sapiens
  misc_feature (61)..(62): /note="This region represents a CpG dinucleotide"
  misc_feature (61)..(61): /note="Nucleotide may be methylated to form 5-methylcytosine"
tcagagacacagctgagtgggatgatgcaaccctgagcttggagccacctgatctaaattcgagcccacacttagccacttaggagctgtgtagtcttggataagtcactcaaaccctctgg

SEQ ID NO: 1461 - DNA, 122 bp, Homo sapiens
  misc_feature (61)..(62): /note="This region represents a CpG dinucleotide"
  misc_feature (61)..(61): /note="Nucleotide may be methylated to form 5-methylcytosine"
gatgcaagagtggatctatggggtggctcccacctgggtctctgatatgagttgagccttcgtcctgttccagtttctggaaggaactgttcactctgcagcccctgccacggggatcctta

SEQ ID NO: 1462 - DNA, 122 bp, Homo sapiens
  misc_feature (61)..(62): /note="This region represents a CpG dinucleotide"
  misc_feature (61)..(61): /note="Nucleotide may be methylated to form 5-methylcytosine"
tgagctaacaatagtgaactttatctcccgccccatgctggaagttccagctgtaggtcccgaattctaataagggctttgctcatgcctctgaggttatggtaatattttatccatctttc

SEQ ID NO: 1463 - DNA, 122 bp, Homo sapiens
  misc_feature (61)..(62): /note="This region represents a CpG dinucleotide"
  misc_feature (61)..(61): /note="Nucleotide may be methylated to form 5-methylcytosine"
gaatggtgtcacctttctagagggccatctggcaccatgtaatcacgccacagatctttacgaagctcctgctatgtaggaaacactatgcctggcactgggtatccattaaaatgtaaaat

SEQ ID NO: 1464 - DNA, 122 bp, Homo sapiens
  misc_feature (61)..(62): /note="This region represents a CpG dinucleotide"
  misc_feature (61)..(61): /note="Nucleotide may be methylated to form 5-methylcytosine"
ctcaggtacttcgtctccccatcactaccccaaccatccatccctctaatacccccacctcgaccacaaagtggctccatcagccggccacagccctaaagcctgaggccacactgcagagg

SEQ ID NO: 1465 - DNA, 122 bp, Homo sapiens
  misc_feature (61)..(62): /note="This region represents a CpG dinucleotide"
  misc_feature (61)..(61): /note="Nucleotide may be methylated to form 5-methylcytosine"
gtgaaacagagcacaagttaagaacatgagcttccaagtcagacagtgctgtgctcaactcgcagctctgccctctctaagagagggatgtcagcaggtaacttaacctccaacagccatgg

SEQ ID NO: 1466 - DNA, 122 bp, Homo sapiens
  misc_feature (61)..(62): /note="This region represents a CpG dinucleotide"
  misc_feature (61)..(61): /note="Nucleotide may be methylated to form 5-methylcytosine"
cgcaggtctggggctgtccacccggaccccgtctgtgagcacttctgagtcaagcgcgggcgcgggcacgggcacgggtaccagcaccccgtccacacccaccaccaccagccagagccgcc

SEQ ID NO: 1467 - DNA, 122 bp, Homo sapiens
  misc_feature (61)..(62): /note="This region represents a CpG dinucleotide"
  misc_feature (61)..(61): /note="Nucleotide may be methylated to form 5-methylcytosine"
ctctctgaaaatactagccaatgtttactgagtactgtgaggagatgggagagtcccacacgtgcacatgtgttgtttcttactcacaggtcattttatgattacccctacttacgtatggg

SEQ ID NO: 1468 - DNA, 122 bp, Homo sapiens
  misc_feature (61)..(62): /note="This region represents a CpG dinucleotide"
  misc_feature (61)..(61): /note="Nucleotide may be methylated to form 5-methylcytosine"
gaaaagtgtattcagatggtttccaaggcacagaggagagtcattcctaaagttatacaacgctgggtcactgtatcctctattaaacaatgtttctcattttctgaattatttttatcacc

SEQ ID NO: 1469 - DNA, 122 bp, Homo sapiens
  misc_feature (61)..(62): /note="This region represents a CpG dinucleotide"
  misc_feature (61)..(61): /note="Nucleotide may be methylated to form 5-methylcytosine"
tcccttcacagcacacagcgccccagtccccactgagctgtcaccagtctcctgaaaacccggcacggatcccgcacgggagcattctcacccaagcccagagactcccctcccacccttta

SEQ ID NO: 1470 - DNA, 122 bp, Homo sapiens
  misc_feature (61)..(62): /note="This region represents a CpG dinucleotide"
  misc_feature (61)..(61): /note="Nucleotide may be methylated to form 5-methylcytosine"
acaatggtcacaatttactaagcataactgtctcctgcaaggatgacgaaatccatatagcgcaaggatttgaagcccaagaagaggactttgacctatggatttctcaggaggtttcgtta

SEQ ID NO: 1471 - DNA, 122 bp, Homo sapiens
  misc_feature (61)..(62): /note="This region represents a CpG dinucleotide"
  misc_feature (61)..(61): /note="Nucleotide may be methylated to form 5-methylcytosine"
aggtttattatctcacttaataaaagtcaacagacctttgttttaaactgctaagctcggcgtaatttgttatacagcaatagataactaatacaaggaagagctgttcagtaaatggtcca

SEQ ID NO: 1472 - DNA, 122 bp, Homo sapiens
  misc_feature (61)..(62): /note="This region represents a CpG dinucleotide"
  misc_feature (61)..(61): /note="Nucleotide may be methylated to form 5-methylcytosine"
ccacccaagtctcatgttgaattgtaatccccaacactgaaggtggggcctggtgggagacgtttggatcatggcagcagatcactcatggcttggttccatctttgtgatagggacttctc

SEQ ID NO: 1473 - DNA, 122 bp, Homo sapiens
  misc_feature (61)..(62): /note="This region represents a CpG dinucleotide"
  misc_feature (61)..(61): /note="Nucleotide may be methylated to form 5-methylcytosine"
acccccattaaagttcttcagccttcttagtagaaagctctgtgaagtttgattcacccacggaagttacttcatggagtggaagcatttgagaaatcagatcttggctttcttcttgtgga

SEQ ID NO: 1474 - DNA, 122 bp, Homo sapiens
  misc_feature (61)..(62): /note="This region represents a CpG dinucleotide"
  misc_feature (61)..(61): /note="Nucleotide may be methylated to form 5-methylcytosine"
gcagggtgcagggcccctgtgacattccctccctctgttgccttctcaggtctcaggctacgtctccagggcagaccaatggggacagctccttggaagtgctggcgactcgcttccaggta

SEQ ID NO: 1475 - DNA, 122 bp, Homo sapiens
  misc_feature (61)..(62): /note="This region represents a CpG dinucleotide"
  misc_feature (61)..(61): /note="Nucleotide may be methylated to form 5-methylcytosine"
ccacagaggggaatcaacaaaccagaaacaaacctccctctttacttagcacctagcatgcgtccaacaccgggttacaaaaatacttttgatctgtttacgcttccaacaaccctatgagg

SEQ ID NO: 1476 - DNA, 122 bp, Homo sapiens
  misc_feature (61)..(62): /note="This region represents a CpG dinucleotide"
  misc_feature (61)..(61): /note="Nucleotide may be methylated to form 5-methylcytosine"
tagaggagaactgcagtggagggacagtggtagggggcagggagaagggtaggttgtgaacgagaagttcttaggcagagcaaataaataggagcacaaagatttaactcagagcaagatgt

SEQ ID NO: 1477 - DNA, 122 bp, Homo sapiens
  misc_feature (61)..(62): /note="This region represents a CpG dinucleotide"
  misc_feature (61)..(61): /note="Nucleotide may be methylated to form 5-methylcytosine"
atttgagtacatgtgaatcatggatttggtattcaactttttccctggatgctttggaatcgtgtcttccatgctccactgggttcaatttaaaataggagaggctttctcttctgaaagat

SEQ ID NO: 1478 - DNA, 122 bp, Homo sapiens
  misc_feature (61)..(62): /note="This region represents a CpG dinucleotide"
  misc_feature (61)..(61): /note="Nucleotide may be methylated to form 5-methylcytosine"
tatcaaaaaatattggggtttagtcatagagggcattttttgaggcatagtggttaagaacgcagactttagagtcaactgcttagtcacctcctggatctatcacatactgtgcagccttg

SEQ ID NO: 1479 - DNA, 122 bp, Homo sapiens
  misc_feature (61)..(62): /note="This region represents a CpG dinucleotide"
  misc_feature (61)..(61): /note="Nucleotide may be methylated to form 5-methylcytosine"
acttcatcagaattgttaatgtcccttacacttaagagatctgaggcaaaaatgacaaaacgttaatttgggtgggtagatataggtgcttgttttcaacttactgcaaacaattttttaaa

SEQ ID NO: 1480 - DNA, 122 bp, Homo sapiens
  misc_feature (61)..(62): /note="This region represents a CpG dinucleotide"
  misc_feature (61)..(61): /note="Nucleotide may be methylated to form 5-methylcytosine"
atgacggggccatctctgcctcagagcctggccaagtgcccgtccagtcatctgtggtcacgcccatgcaggggggtgtgctccttacagatgccattgcacccacaacacataattgggca

SEQ ID NO: 1481 - DNA, 122 bp, Homo sapiens
  misc_feature (61)..(62): /note="This region represents a CpG dinucleotide"
  misc_feature (61)..(61): /note="Nucleotide may be methylated to form 5-methylcytosine"
ctaattttttatttttagtaagagacggggtttcaccatgatggtcaggctggtctcgaacgagactcaagcagtcctcccaacttggcctgccaaagtgtggggattataggaatgagcca

SEQ ID NO: 1482 - DNA, 122 bp, Homo sapiens
  misc_feature (61)..(62): /note="This region represents a CpG dinucleotide"
  misc_feature (61)..(61): /note="Nucleotide may be methylated to form 5-methylcytosine"
aaggggcacctccccagggtgacacccgcctgggtaaggggaaggggcacctccccagggcggcacccaccactgacttccacgtcaggagtcagaagtgccaggaggagacgctctgaaac

SEQ ID NO: 1483 - DNA, 122 bp, Homo sapiens
  misc_feature (61)..(62): /note="This region represents a CpG dinucleotide"
  misc_feature (61)..(61): /note="Nucleotide may be methylated to form 5-methylcytosine"
attaatcatattaaaaatatataaatccacctctcttcacatttggcccacagaggttcacgttatgaaaagagttttagtgatttatttggtcttgaaccacaaggttctgtttttcttaa

SEQ ID NO: 1484 - DNA, 122 bp, Homo sapiens
  misc_feature (61)..(62): /note="This region represents a CpG dinucleotide"
  misc_feature (61)..(61): /note="Nucleotide may be methylated to form 5-methylcytosine"
aagtgagtactttcccacctggggagagcctaccaatgggcagtactcctgaggaagccacggggagccttgcaggatgttttgctggaagggaggagccagagaagatcattttacctgtc

SEQ ID NO: 1485 - DNA, 122 bp, Homo sapiens
  misc_feature (61)..(62): /note="This region represents a CpG dinucleotide"
  misc_feature (61)..(61): /note="Nucleotide may be methylated to form 5-methylcytosine"
gaaacaaaagatttttgtttgaaccttacatttttaagatatagaaatggcaccttgaagcgacgacagggcatgcaattgctgttcaaagtcaacaggaaactttaaaagcatatgttaga

SEQ ID NO: 1486 - DNA, 122 bp, Homo sapiens
  misc_feature (61)..(62): /note="This region represents a CpG dinucleotide"
  misc_feature (61)..(61): /note="Nucleotide may be methylated to form 5-methylcytosine"
gcccggggagcccccagacagtgcaagatgttagggtggtcggggtgctaaagccactcccgttgccaactgcggctccaggtcatgccccacccctcactgtgatgggataggctggggcc

SEQ ID NO: 1487 - DNA, 122 bp, Homo sapiens
  misc_feature (61)..(62): /note="This region represents a CpG dinucleotide"
  misc_feature (61)..(61): /note="Nucleotide may be methylated to form 5-methylcytosine"
gctgaattctgtatcattcaaccacaacataagctctgggcaaactgaatttcaaggctgcgaacagggccactctactgtctaagttagtgtaggaagagtaaggttgaagttgaagttga

SEQ ID NO: 1488 - DNA, 122 bp, Homo sapiens
  misc_feature (61)..(62): /note="This region represents a CpG dinucleotide"
  misc_feature (61)..(61): /note="Nucleotide may be methylated to form 5-methylcytosine"
tagcatccaaccctgggcagcctgtgagctgtgagttcctagcctgattttctgagacatcgaaagaatttggaacagtcatattattggtgatggctggtttctgtcatccctgttgaatt

SEQ ID NO: 1489 - DNA, 122 bp, Homo sapiens
  misc_feature (61)..(62): /note="This region represents a CpG dinucleotide"
  misc_feature (61)..(61): /note="Nucleotide may be methylated to form 5-methylcytosine"
gggtggtgggaggatgggggttctgtgttcaaaagcactagagttagaaaagaatgaaaacgaaaggagcttgggcttcccatgggtttggacaagagacaaaccacaaagaaaacagcttc

SEQ ID NO: 1490 - DNA, 122 bp, Homo sapiens
  misc_feature (61)..(62): /note="This region represents a CpG dinucleotide"
  misc_feature (61)..(61): /note="Nucleotide may be methylated to form 5-methylcytosine"
tggggctccgagctcgtcctagagcctcacctggtctccccagacctgcttcccataggacggtactcgtgaaacaccagtttgtccaggaccccatcaggcatcctccttcccgcatccgc

SEQ ID NO: 1491 - DNA, 122 bp, Homo sapiens
  misc_feature (61)..(62): /note="This region represents a CpG dinucleotide"
  misc_feature (61)..(61): /note="Nucleotide may be methylated to form 5-methylcytosine"
gctgccccgcaggcctcccttcaatctgtgcttgcacaattctagatgggcgttctccagcggggtctggtggtgtgcactctgctgctccatttgctgtccagttgtttgctaggtgtgtt

SEQ ID NO: 1492 - DNA, 122 bp, Homo sapiens
  misc_feature (61)..(62): /note="This region represents a CpG dinucleotide"
  misc_feature (61)..(61): /note="Nucleotide may be methylated to form 5-methylcytosine"
aaaagattaaataagatgtccaagttcacgcatcacataaaggcgcaaaacctggatctgcgttccaagggtctgaaatccaaaggggcttggggatttcacgaggtctgaatctaaaactg

SEQ ID NO: 1493 - DNA, 122 bp, Homo sapiens
  misc_feature (61)..(62): /note="This region represents a CpG dinucleotide"
  misc_feature (61)..(61): /note="Nucleotide may be methylated to form 5-methylcytosine"
taatcctccactgagtcttcccttggggtaactgttgcccaactgcagcatctgaagtgtcggttagcacgttgggatggtgaccacatgcatagtgcgtttactgaagttgtgctcatgct

SEQ ID NO: 1494 - DNA, 122 bp, Homo sapiens
  misc_feature (61)..(62): /note="This region represents a CpG dinucleotide"
  misc_feature (61)..(61): /note="Nucleotide may be methylated to form 5-methylcytosine"
tttctaatactaaagctggaaaatgcatataaaattcgcaacctgttcaggttccagggccgtgcatgcatgacaaatttaccatccaatacggcctttcgtggatttggcttcccacaagg

SEQ ID NO: 1495 - DNA, 122 bp, Homo sapiens
  misc_feature (61)..(62): /note="This region represents a CpG dinucleotide"
  misc_feature (61)..(61): /note="Nucleotide may be methylated to form 5-methylcytosine"
cgcctctctggacctcttttttcatctgtagcttggggataacactgactaacatggccacgctgagcactgcaaatctagcctgattgccagtcagaatgcacgcccggcctcgctgtttc

SEQ ID NO: 1496 - DNA, 122 bp, Homo sapiens
  misc_feature (61)..(62): /note="This region represents a CpG dinucleotide"
  misc_feature (61)..(61): /note="Nucleotide may be methylated to form 5-methylcytosine"
tgcagacccagggaccaccaaacactccatcactgcagacccagggaccaccgaggactccgtcactgcagacccagggaccacagaagatgaaaccactaaacatggtgacactcaccttc

SEQ ID NO: 1497 - DNA, 122 bp, Homo sapiens
  misc_feature (61)..(62): /note="This region represents a CpG dinucleotide"
  misc_feature (61)..(61): /note="Nucleotide may be methylated to form 5-methylcytosine"
acactttcagagcagggagaggaagcacagctgcagtggtgaggaaatacagaggggccacgcagtggagcaacagcctacctactagccattatgcttaagcaccatctactggatcacag

SEQ ID NO: 1498 - DNA, 122 bp, Homo sapiens
  misc_feature (61)..(62): /note="This region represents a CpG dinucleotide"
  misc_feature (61)..(61): /note="Nucleotide may be methylated to form 5-methylcytosine"
ctgtcgggatcatttttcttagcatgacgacctccaggtcagacacaaggtcacaggtggcggtttctgccttcctctggctgaatatatttcattaaatatatattccgcattttctgtat

SEQ ID NO: 1499 - DNA, 122 bp, Homo sapiens
  misc_feature (61)..(62): /note="This region represents a CpG dinucleotide"
  misc_feature (61)..(61): /note="Nucleotide may be methylated to form 5-methylcytosine"
agtgagagtcagtccagaaatgaatccagtagttcaagttagggacatttgggatgaacacggggaattccccaaccacagggctttttgtatgtaagcagcaagttatggtcagcagttct

SEQ ID NO: 1500 - DNA, 122 bp, Homo sapiens
  misc_feature (61)..(62): /note="This region represents a CpG dinucleotide"
  misc_feature (61)..(61): /note="Nucleotide may be methylated to form 5-methylcytosine"
tggagcttttgcagcactgagaccttcctggggatttaaaaaaaaaaaaaaaaaggcatgcgccatctcctggtggaaataagcattgtcctgttgggcatgagatggccagtagccattgt

SEQ ID NO: 1501 - DNA, 122 bp, Homo sapiens
  misc_feature (61)..(62): /note="This region represents a CpG dinucleotide"
  misc_feature (61)..(61): /note="Nucleotide may be methylated to form 5-methylcytosine"
ctccatggtcgggagagacaccaggcgaggcgaggcggcgggagagcgcgggagttcggccggcctcggacgccaccactgcgcaggcgcggcagcctgaggggctcgccgggaaatgtggt

SEQ ID NO: 1502 - DNA, 122 bp, Homo sapiens
  misc_feature (61)..(62): /note="This region represents a CpG dinucleotide"
  misc_feature (61)..(61): /note="Nucleotide may be methylated to form 5-methylcytosine"
gcctcacagctctggggcggcattccaaatcagggtgtgggtgggccgtgctcccgctggcggctctacctgggccccttctgcctctccactccgggcggtggccagcagtccgtggcatt

SEQ ID NO: 1503 - DNA, 122 bp, Homo sapiens
  misc_feature (61)..(62): /note="This region represents a CpG dinucleotide"
  misc_feature (61)..(61): /note="Nucleotide may be methylated to form 5-methylcytosine"
gcctccacctctctggcctgtttcctcacctgggatttagtatgattggcaaggcctccacgcatgggtggccaaggggcatgttgaaatccactgtgcactctggcatgagctgaaaccag

SEQ ID NO: 1504 - DNA, 122 bp, Homo sapiens
  misc_feature (61)..(62): /note="This region represents a CpG dinucleotide"
  misc_feature (61)..(61): /note="Nucleotide may be methylated to form 5-methylcytosine"
ctgtgaagcaacctagtattcattgtaataataatatccacagaagttaccatgtgtccacgtgggtgcactttgccatatttgattgatgatgatgatgatagtgatgatgctggattata

SEQ ID NO: 1505 - DNA, 122 bp, Homo sapiens
  misc_feature (61)..(62): /note="This region represents a CpG dinucleotide"
  misc_feature (61)..(61): /note="Nucleotide may be methylated to form 5-methylcytosine"
aacttatgttgtgtcagaggcaccatttactcactgaatattatttaatacctcctaccacgtgccaagtactaagctaagcaatatccaatacagcagtgaacaaacagtctctgtttatg

SEQ ID NO: 1506 - DNA, 122 bp, Homo sapiens
  misc_feature (61)..(62): /note="This region represents a CpG dinucleotide"
  misc_feature (61)..(61): /note="Nucleotide may be methylated to form 5-methylcytosine"
gaaacaggaggcagaagagtcattgtcagagtgatgcaatgtaataaagactccagtggccgttgctggttttaaagatgaaaggggctcatgggaagacagtgggaggcctctaaaagctg

SEQ ID NO: 1507 - DNA, 122 bp, Homo sapiens
  misc_feature (61)..(62): /note="This region represents a CpG dinucleotide"
  misc_feature (61)..(61): /note="Nucleotide may be methylated to form 5-methylcytosine"
ggtgatctgcccgcctcggcttcccaaagtgctgggattacaggcatgagccaccgcgcccggcctggcctgtatttttttaaatagtcagtgtcaacagagaagcggacaccttgtgttgt

SEQ ID NO: 1508 - DNA, 122 bp, Homo sapiens
  misc_feature (61)..(62): /note="This region represents a CpG dinucleotide"
  misc_feature (61)..(61): /note="Nucleotide may be methylated to form 5-methylcytosine"
gaactcccggtccccattgtggggaagacagcccgtccactggaggcagggcagcggctgcgacagccactctgggggcctaagttcagggtcctgcagacacctgcgcctagaggtggctg

SEQ ID NO: 1509 - DNA, 122 bp, Homo sapiens
  misc_feature (61)..(62): /note="This region represents a CpG dinucleotide"
  misc_feature (61)..(61): /note="Nucleotide may be methylated to form 5-methylcytosine"
gccgccgccgctctgaattattgatgcagccggcgctgcagccggagcgggcggagagcgcgcgccgggcacaaaggcgcggacctcggcctggccccgcccccgccgcctcccggcccgcc

SEQ ID NO: 1510 - DNA, 122 bp, Homo sapiens
  misc_feature (61)..(62): /note="This region represents a CpG dinucleotide"
  misc_feature (61)..(61): /note="Nucleotide may be methylated to form 5-methylcytosine"
tgaaccagtaggggaggcacaagttaagagaatagaattctctgacatcagagatggtgacgggtgtctgtaataagtgaacatatttctgtgttcatgacaactgggaaaatagccaaagc

SEQ ID NO: 1511 - DNA, 122 bp, Homo sapiens
  misc_feature (61)..(62): /note="This region represents a CpG dinucleotide"
  misc_feature (61)..(61): /note="Nucleotide may be methylated to form 5-methylcytosine"
ggccaatcagcatacagataatatgggttaatttacatactgtatttctattggatgagccgaggtaaagccttatcttgatgtcacagtcgttacacaaagccctatgttggtaatactga

SEQ ID NO: 1512 - DNA, 122 bp, Homo sapiens
  misc_feature (61)..(62): /note="This region represents a CpG dinucleotide"
  misc_feature (61)..(61): /note="Nucleotide may be methylated to form 5-methylcytosine"
ggtcgcagagcattgtgttcgtgtggaggacacgcgaggactcttggaagtgctttttggcggggtagtgcagtgtgttccgggcggacgggcgtcagtttacgtgtgcgtttctcatcctt

SEQ ID NO: 1513 - DNA, 122 bp, Homo sapiens
  misc_feature (61)..(62): /note="This region represents a CpG dinucleotide"
  misc_feature (61)..(61): /note="Nucleotide may be methylated to form 5-methylcytosine"
ttgacttttgttaatcactaagcttttcccccagcatgtggtgtggagccacagtgaacacgccatagcttagcagctctcagaggctggtctatggatcctagagtctctgggaccctttc

SEQ ID NO: 1514 - DNA, 122 bp, Homo sapiens
  misc_feature (61)..(62): /note="This region represents a CpG dinucleotide"
  misc_feature (61)..(61): /note="Nucleotide may be methylated to form 5-methylcytosine"
ggtcagtacctggaagattccataaagtcggggtgcttgagggcgtagggccgagaccgtcgcgggtactgaggcgcctccgtcgtctctcccactcgccgcccgctttccaagacatatgt

SEQ ID NO: 1515 - DNA, 122 bp, Homo sapiens
  misc_feature (61)..(62): /note="This region represents a CpG dinucleotide"
  misc_feature (61)..(61): /note="Nucleotide may be methylated to form 5-methylcytosine"
ataagaaaggtgtatagattgaggttagagggagaggaatagctagtgtgagggacaaaacgcagttttgaatagtattgagtacttacatgtcagttgctgcactgagcacctgccgtgtg

SEQ ID NO: 1516 - DNA, 122 bp, Homo sapiens
  misc_feature (61)..(62): /note="This region represents a CpG dinucleotide"
  misc_feature (61)..(61): /note="Nucleotide may be methylated to form 5-methylcytosine"
gaacccaactcttggcttctctgctgcgcggggcaggcaccgggctctcctaggtgtgcgcgcgtgtgtgcattttatccgcccccccttatctcgctcccctccccccacacccccgcccc

SEQ ID NO: 1517 - DNA, 122 bp, Homo sapiens
  misc_feature (61)..(62): /note="This region represents a CpG dinucleotide"
  misc_feature (61)..(61): /note="Nucleotide may be methylated to form 5-methylcytosine"
agcatttggtaatcccctcaccccatacttggctgtaaaatctgtgaagtagcctccttccggaagtcaggttttctagtaatgccctaattggttaagtatgtattatggtgtatttaata

SEQ ID NO: 1518 - DNA, 122 bp, Homo sapiens
  misc_feature (61)..(62): /note="This region represents a CpG dinucleotide"
  misc_feature (61)..(61): /note="Nucleotide may be methylated to form 5-methylcytosine"
tgtctgtggcttccctctacaatagcagcgttggatagttgctacagagacctcatcccccgctctccactgcaagcctaacatttttattatctagccctttaaggaagaatttgtggact

SEQ ID NO: 1519 - DNA, 122 bp, Homo sapiens
  misc_feature (61)..(62): /note="This region represents a CpG dinucleotide"
  misc_feature (61)..(61): /note="Nucleotide may be methylated to form 5-methylcytosine"
aggcagggagcggaaccgtcttcaggaaatttcgggagttccggggtcaggtccactccccggctgttgttgtgttgttggcagggcagagggtctaggatgccagcctgctccgggctgcg

SEQ ID NO: 1520 - DNA, 122 bp, Homo sapiens
  misc_feature (61)..(62): /note="This region represents a CpG dinucleotide"
  misc_feature (61)..(61): /note="Nucleotide may be methylated to form 5-methylcytosine"
agtagggggaagtaggacggtgtgcctggagggcaggtgataggaggggagaaggaatctcggaaccccctgggcagtcccagccctgctgtttgttgatctggtctctcctttctagggat

SEQ ID NO: 1521 - DNA, 122 bp, Homo sapiens
  misc_feature (61)..(62): /note="This region represents a CpG dinucleotide"
  misc_feature (61)..(61): /note="Nucleotide may be methylated to form 5-methylcytosine"
accaacgttgtatcttggttctgtcttaacacattggtgcactgcagtgaatctctcctccgccagcctcaggtcgtggggtgctcaggactcctggctgctgcatacacagcctcacgtgg

SEQ ID NO: 1522 - DNA, 122 bp, Homo sapiens
  misc_feature (61)..(62): /note="This region represents a CpG dinucleotide"
  misc_feature (61)..(61): /note="Nucleotide may be methylated to form 5-methylcytosine"
catttttgtgaacgtcttttggtgcacaaagtaggtgttcctggggtatatattaggagtcgaactgctgagtcataagtcatgtgtatatgcagctttactagatattgccagaccgtttt

SEQ ID NO: 1523 - DNA, 122 bp, Homo sapiens
  misc_feature (61)..(62): /note="This region represents a CpG dinucleotide"
  misc_feature (61)..(61): /note="Nucleotide may be methylated to form 5-methylcytosine"
gattagtacacagatatcaaaagtggaagtagaccctgagtccttagctaaggactagaacgatcgtggcagaaacgtgcacaggaaatcatgtggcctctgtctcaccagcgggtgttcca

SEQ ID NO: 1524 - DNA, 122 bp, Homo sapiens
  misc_feature (61)..(62): /note="This region represents a CpG dinucleotide"
  misc_feature (61)..(61): /note="Nucleotide may be methylated to form 5-methylcytosine"
ttaaacttttattttattttatttcatttgagatggagtctcactctgtcgcccaggctgcggtgcagtggcacgatgcattttaaacttttatattcaattgttacaaaaatattaagagc

SEQ ID NO: 1525 - DNA, 122 bp, Homo sapiens
  misc_feature (61)..(62): /note="This region represents a CpG dinucleotide"
  misc_feature (61)..(61): /note="Nucleotide may be methylated to form 5-methylcytosine"
tcaccccatcatgcgtcctgagcgtaagagcgatgtgtaaacctgccttgaattgtgtcccgctcttcgcaggggggccgtctgaaggagcctctccagaagctcaaggaagccattggcag

SEQ ID NO: 1526 - DNA, 122 bp, Homo sapiens
  misc_feature (61)..(62): /note="This region represents a CpG dinucleotide"
  misc_feature (61)..(61): /note="Nucleotide may be methylated to form 5-methylcytosine"
aatgactctcgggtcttcccgcggccgccgaagacccgctgaggcagaagctgcccgcggcgcgcgccttatcaaaaacccgttttcttgccattgaaagagaaactgggaacttagataac

SEQ ID NO: 1527 - DNA, 122 bp, Homo sapiens
  misc_feature (61)..(62): /note="This region represents a CpG dinucleotide"
  misc_feature (61)..(61): /note="Nucleotide may be methylated to form 5-methylcytosine"
ggtgactaaagttagcatttaacaatcaactggtgttaatttctgcttacacttagagtgcgcagaaatatttgtgtgatcattgttagtttagcagcattttgtcttagctgaaatatggt

SEQ ID NO: 1528 - DNA, 122 bp, Homo sapiens
  misc_feature (61)..(62): /note="This region represents a CpG dinucleotide"
  misc_feature (61)..(61): /note="Nucleotide may be methylated to form 5-methylcytosine"
tacctcccaggcccaagtgatggtctcacctcagcctcctgagtagctgggactaaggtgcgtgcatgccaccactcctggctacccaggctgatctggaactcttgagctcaagcaatcca

SEQ ID NO: 1529 - DNA, 122 bp, Homo sapiens
  misc_feature (61)..(62): /note="This region represents a CpG dinucleotide"
  misc_feature (61)..(61): /note="Nucleotide may be methylated to form 5-methylcytosine"
ggccaagcggaggtgtgggcagcagatgccctgtgcatgctgactcacacaagcagcttccgggccccaggatctgccagggtctctgctggctttcctcaggatggcagggcagcaggaca

SEQ ID NO: 1530 - DNA, 122 bp, Homo sapiens
  misc_feature (61)..(62): /note="This region represents a CpG dinucleotide"
  misc_feature (61)..(61): /note="Nucleotide may be methylated to form 5-methylcytosine"
aagcgctttctattcagtcctcaaatgcaaagcagacccttgctaataatggtaataatccgaatgggtttaactgcagcattgtaagaaaaggcaggcagtactcttagactacaggggtg

SEQ ID NO: 1531 - DNA, 122 bp, Homo sapiens
  misc_feature (61)..(62): /note="This region represents a CpG dinucleotide"
  misc_feature (61)..(61): /note="Nucleotide may be methylated to form 5-methylcytosine"
cttctgtcagattctgttcccccatcaccgcccctatcataccttgctatgattttgttacggacctgtcttgttggttagtaagctcccagaggacaataaccagaacacagagactacag

SEQ ID NO: 1532 - DNA, 122 bp, Homo sapiens
  misc_feature (61)..(62): /note="This region represents a CpG dinucleotide"
  misc_feature (61)..(61): /note="Nucleotide may be methylated to form 5-methylcytosine"
tgcacagttggatgtggctccttcccggccacttctcagccttgctctggcctgccacagcggtgcccacagagtcttggcggaaagaacagaacatcccatggctctgagccaggtccctg

SEQ ID NO: 1533 - DNA, 122 bp, Homo sapiens
  misc_feature (61)..(62): /note="This region represents a CpG dinucleotide"
  misc_feature (61)..(61): /note="Nucleotide may be methylated to form 5-methylcytosine"
ccaatacatgtgattttctgcatgcatgtggtcttggctccttggactccaggttggccacgcagcgacagacctgcctctcggtgggagttctcaggaagtcaaatcagatggaaacctga

SEQ ID NO: 1534 - DNA, 122 bp, Homo sapiens
  misc_feature (61)..(62): /note="This region represents a CpG dinucleotide"
  misc_feature (61)..(61): /note="Nucleotide may be methylated to form 5-methylcytosine"
gacaagcgttcaccctactctttccaaaacgaaaaccaaattacctggaagatttgaaaacggttttctgtagttttcctgtagtcagctactcttccccacagatttttctcatcatgtga

SEQ ID NO: 1535 - DNA, 122 bp, Homo sapiens
  misc_feature (61)..(62): /note="This region represents a CpG dinucleotide"
  misc_feature (61)..(61): /note="Nucleotide may be methylated to form 5-methylcytosine"
agtgtttggatcgtaatctgagggcagtagggagttacactgccttgaagtctgcaagtacgttatgaaccataagagaaagggctgagctgtcttcaaagctctcagtccatatcctgagt

SEQ ID NO: 1536 - DNA, 122 bp, Homo sapiens
  misc_feature (61)..(62): /note="This region represents a CpG dinucleotide"
  misc_feature (61)..(61): /note="Nucleotide may be methylated to form 5-methylcytosine"
tggtgagagtatggaggacaggtcgatgcaaattcattagctgacatgaaaaatcattagcgtcatttttggatggagctagtgtaatcccagagattaattcctctacttcagctatacca

SEQ ID NO: 1537 - DNA, 122 bp, Homo sapiens
  misc_feature (61)..(62): /note="This region represents a CpG dinucleotide"
  misc_feature (61)..(61): /note="Nucleotide may be methylated to form 5-methylcytosine"
ccctctgaatgcagagatttgtactgggccaaccgaggggcagggcaagctcagtgcacccgggctgtgtgggtgccacgacctctaccaatggagggcaaccctgggcacctgtgtatttc

SEQ ID NO: 1538 - DNA, 122 bp, Homo sapiens
  misc_feature (61)..(62): /note="This region represents a CpG dinucleotide"
  misc_feature (61)..(61): /note="Nucleotide may be methylated to form 5-methylcytosine"
tacaattcccatccagccccaggagtctggggcaagtagtcttgtaaggtcagtggcctgcggggacgcagtgagcgccgaatttgcctggggcaggggaaatgcgctctggcccatgtctg

SEQ ID NO: 1539 - DNA, 122 bp, Homo sapiens
  misc_feature (61)..(62): /note="This region represents a CpG dinucleotide"
  misc_feature (61)..(61): /note="Nucleotide may be methylated to form 5-methylcytosine"
aaccgtccaccttggaacctccaccttcctgtgctcgtcttagaggaattctagaactgtcgttggaggaacaccgctgttttctagaggtcccacagccgtccttctgttcatgcggagta

SEQ ID NO: 1540 - DNA, 122 bp, Homo sapiens
  misc_feature (61)..(62): /note="This region represents a CpG dinucleotide"
  misc_feature (61)..(61): /note="Nucleotide may be methylated to form 5-methylcytosine"
ataagtcggtccgtcggaaagcatactcagaggagcgtcctttggggccagagtaacttacggcctggtaagaaagacacagtgaaaccacttataatttgggaaatctcccctcactgcca

SEQ ID NO: 1541 - DNA, 122 bp, Homo sapiens
  misc_feature (61)..(62): /note="This region represents a CpG dinucleotide"
  misc_feature (61)..(61): /note="Nucleotide may be methylated to form 5-methylcytosine"
aatacaagggtggaatctcaggcaggtcagtgaaggcactctttcagctcaccttggctacgtcccagattctggtcccttccatttttctgctgctgaagcaggagttgccaagtctatct

SEQ ID NO: 1542 - DNA, 122 bp, Homo sapiens
  misc_feature (61)..(62): /note="This region represents a CpG dinucleotide"
  misc_feature (61)..(61): /note="Nucleotide may be methylated to form 5-methylcytosine"
cttctaggagcattaaaaactttcccagtgacttaaagaaaccacacacatgcacgtactcgaagtgtatccctagagtggttctactgtgttggttctttctctcatctttgggagcctgt

SEQ ID NO: 1543 - DNA, 122 bp, Homo sapiens
  misc_feature (61)..(62): /note="This region represents a CpG dinucleotide"
  misc_feature (61)..(61): /note="Nucleotide may be methylated to form 5-methylcytosine"
cgccactttgttttcctgaatcaccacaagactatttttcctgatgaattaacaattgaacgggcttaagtgcccactatttttgtgaagatgtaaaggagcataagcacgtctttctgttt

SEQ ID NO: 1544 - DNA, 122 bp, Homo sapiens
  misc_feature (61)..(62): /note="This region represents a CpG dinucleotide"
  misc_feature (61)..(61): /note="Nucleotide may be methylated to form 5-methylcytosine"
gacacgcccacaggcgaggccgcagctttcactttccccatgaagaggacagcttcttcacgtctccagtttggacctcctggactctctggctcggctttgacgtcttcctctcctcacca

SEQ ID NO: 1545 - DNA, 122 bp, Homo sapiens
  misc_feature (61)..(62): /note="This region represents a CpG dinucleotide"
  misc_feature (61)..(61): /note="Nucleotide may be methylated to form 5-methylcytosine"
ggagagtgtttccgaccgcaagtatgaaccctcctcactaacagctatgctgaagcacagcggggagccagtgcagcacaagctcagcacgaccgcggttgtaagaacccacgtggaagcca

SEQ ID NO: 1546 - DNA, 122 bp, Homo sapiens
  misc_feature (61)..(62): /note="This region represents a CpG dinucleotide"
  misc_feature (61)..(61): /note="Nucleotide may be methylated to form 5-methylcytosine"
gaggggtgcggagagcgggcctgtgattcaccagagggttgcagagagaggcccaagaatcgcgggaggggtgcggagaggggcctgtgaatcacgggaggggtgcggagaggggcccgtga

SEQ ID NO: 1547 - DNA, 122 bp, Homo sapiens
  misc_feature (61)..(62): /note="This region represents a CpG dinucleotide"
  misc_feature (61)..(61): /note="Nucleotide may be methylated to form 5-methylcytosine"
caatgtccagctcatcagcttcttcctattcacccagtctttcttcttctcttacttgcccgagtagaagaaagatgaatgaagctccttgcatgctggaactgtgttttatctacgttttt

SEQ ID NO: 1548 - DNA, 122 bp, Homo sapiens
  misc_feature (61)..(62): /note="This region represents a CpG dinucleotide"
  misc_feature (61)..(61): /note="Nucleotide may be methylated to form 5-methylcytosine"
ggtttcactatgatgcagcactgaaataaacagttgtgtaatagaagattgcatatgctacgacagtcagcataattaaaggcagagaaatatcaaatctctcagaatttgaagttgaggag

SEQ ID NO: 1549 - DNA, 122 bp, Homo sapiens
  misc_feature (61)..(62): /note="This region represents a CpG dinucleotide"
  misc_feature (61)..(61): /note="Nucleotide may be methylated to form 5-methylcytosine"
aatcaaaagagaatgttgtttaagtgagtcataggtattcaatgactgaggtttaaaaatcgtcttgtcaatgtgtggatcattaagcaattaggcccgctgcttaactgatattttgtgta

SEQ ID NO: 1550 - DNA, 122 bp, Homo sapiens
  misc_feature (61)..(62): /note="This region represents a CpG dinucleotide"
  misc_feature (61)..(61): /note="Nucleotide may be methylated to form 5-methylcytosine"
tcaggtcacaatattcattacctcaaccatcttggatacttggccagtcttatcaaaccacgaatagcccagttttcagagtttgctctagaatccctgtcctggtttattctaagacaagt

SEQ ID NO: 1551 - DNA, 122 bp, Homo sapiens
  misc_feature (61)..(62): /note="This region represents a CpG dinucleotide"
  misc_feature (61)..(61): /note="Nucleotide may be methylated to form 5-methylcytosine"
aagatgaagaagggagcgacaagccaaggaatacaggtgattgactgcctgtcattagcgcggtggctcacgcctgccattgcctgttgtccccgtcctctgtggccctcttggcttctgta

SEQ ID NO: 1552 - DNA, 122 bp, Homo sapiens
  misc_feature (61)..(62): /note="This region represents a CpG dinucleotide"
  misc_feature (61)..(61): /note="Nucleotide may be methylated to form 5-methylcytosine"
ccagctgcaggtggaccctgagatgggcccaagctcccccgacgtgaaaggcagctgctccgtcctgggcagcaccttcctcaggaagaggcctggctcctgctgccacccccacccccacc

SEQ ID NO: 1553 - DNA, 122 bp, Homo sapiens
  misc_feature (61)..(62): /note="This region represents a CpG dinucleotide"
  misc_feature (61)..(61): /note="Nucleotide may be methylated to form 5-methylcytosine"
ccttcatgtttagaaaaatctttcaactgcaaggaacagcctcactcatttaggcaagcacgtatagcaagagatgaaaacagcattttttgctagtaacagaaatcaagtaaaaacgaatt

SEQ ID NO: 1554 - DNA, 122 bp, Homo sapiens
  misc_feature (61)..(62): /note="This region represents a CpG dinucleotide"
  misc_feature (61)..(61): /note="Nucleotide may be methylated to form 5-methylcytosine"
tcctgttgaatagggaacaaaacaggcctaaagactgaaaggaaaagctgctgtggggagcggtctctccagatggaagttttctggcagattgtgatttgtgactcagaatgagcccagat

SEQ ID NO: 1555 - DNA, 122 bp, Homo sapiens
  misc_feature (61)..(62): /note="This region represents a CpG dinucleotide"
  misc_feature (61)..(61): /note="Nucleotide may be methylated to form 5-methylcytosine"
tccatgcagaagttatgtttactgtgaacataggccgcaggaggccttggggagcttctgcgggtggtaggagacacactttgctaggtctgcaatttcccttctggccaacaagggctgca

SEQ ID NO: 1556 - DNA, 122 bp, Homo sapiens
  misc_feature (61)..(62): /note="This region represents a CpG dinucleotide"
  misc_feature (61)..(61): /note="Nucleotide may be methylated to form 5-methylcytosine"
actgacagagtcctgataatatattgcaggaaaacccacgggccagccgataacactcagcgttaatttgtttacccaaaaattagaggaaggagaagttggtgatttgcaaaaaaagaagt

SEQ ID NO: 1557 - DNA, 122 bp, Homo sapiens
  misc_feature (61)..(62): /note="This region represents a CpG dinucleotide"
  misc_feature (61)..(61): /note="Nucleotide may be methylated to form 5-methylcytosine"
cccatgggcttgggaatggctgggggcaaggtgctcttgcctcttcctctagggaacaaccggtgggacctgaacctcggaaagcgggcgtccaggcttgagggtgcgaggaccacccagta

SEQ ID NO: 1558 - DNA, 122 bp, Homo sapiens
  misc_feature (61)..(62): /note="This region represents a CpG dinucleotide"
  misc_feature (61)..(61): /note="Nucleotide may be methylated to form 5-methylcytosine"
aggggcgggactcaccacccatgtgacctgcactggcctggaggagctgcctgactgcagcggactctgccaagaatttcaagaggtgcagtggtccagtcataaagcaacatgaaaacgct

SEQ ID NO: 1559 - DNA, 122 bp, Homo sapiens
  misc_feature (61)..(62): /note="This region represents a CpG dinucleotide"
  misc_feature (61)..(61): /note="Nucleotide may be methylated to form 5-methylcytosine"
gccagattcaaattagatatgcctcatccaaagtctagggggttttaggccactgaaattcgaatgtaagagtgttttctaatacctgggcttaaactagctgctatgtttcctatgccaaa

SEQ ID NO: 1560 - DNA, 122 bp, Homo sapiens
  misc_feature (61)..(62): /note="This region represents a CpG dinucleotide"
  misc_feature (61)..(61): /note="Nucleotide may be methylated to form 5-methylcytosine"
agagcgagactccatctaaaaaaaaaaaaaaacaaaaggcttttttttccccctaaatgtcgtccacatttttggcaagtattgatctctagtagtcagtgtcaggatctgaagaaaacagt

SEQ ID NO: 1561 - DNA, 122 bp, Homo sapiens
  misc_feature (61)..(62): /note="This region represents a CpG dinucleotide"
  misc_feature (61)..(61): /note="Nucleotide may be methylated to form 5-methylcytosine"
aatattaaaaggaactataagaatagaaatacagttaaccactattttcttaactctcaacgaacagatatatttctgctttaaatgagtgttgtctatcacggccaatcagctgctagcaa

SEQ ID NO: 1562 - DNA, 122 bp, Homo sapiens
  misc_feature (61)..(62): /note="This region represents a CpG dinucleotide"
  misc_feature (61)..(61): /note="Nucleotide may be methylated to form 5-methylcytosine"
ttcctgcttcctggaggctaagttccactaggcattacggtcacactggactggagaggacgagagacacagagagagggaaagatcttaccgtggagttcagaacaatgagcatgacagcc

SEQ ID NO: 1563 - DNA, 122 bp, Homo sapiens
  misc_feature (61)..(62): /note="This region represents a CpG dinucleotide"
  misc_feature (61)..(61): /note="Nucleotide may be methylated to form 5-methylcytosine"
tctcatcttcatatctgaaagacagtgtactttttgtctccctaagccctgtgtctaggtcgtttgggaaacgccttggagagtcaagaataaatttgcaggtcaaacaatggatgactgga

SEQ ID NO: 1564 - DNA, 122 bp, Homo sapiens
  misc_feature (61)..(62): /note="This region represents a CpG dinucleotide"
  misc_feature (61)..(61): /note="Nucleotide may be methylated to form 5-methylcytosine"
attttttttaacttatcagtgatatctgatgttatcagtatactaaaagtggacatagaacgttaaagaaggaaccaaagaggcaaagatacctggagttattagggacctattttgagatt

SEQ ID NO: 1565 - DNA, 122 bp, Homo sapiens
  misc_feature (61)..(62): /note="This region represents a CpG dinucleotide"
  misc_feature (61)..(61): /note="Nucleotide may be methylated to form 5-methylcytosine"
agtcggcagtggggcacaaaaaggatttcaaagggctctgaaaaccgaaagcccctaacccggatacgaggggcctcgagagaaaggtttgtcctcccctgcagcccaggcgcgggccaggg

SEQ ID NO: 1566 - DNA, 122 bp, Homo sapiens
  misc_feature (61)..(62): /note="This region represents a CpG dinucleotide"
  misc_feature (61)..(61): /note="Nucleotide may be methylated to form 5-methylcytosine"
gctgctgggccactggcggagcctgctgcgtcgcgtgccggcaagcccgggcctggcgcacggcctgtattggccccagcacttcctgccgcccctggacggcggcgcacccccgcactacg

SEQ ID NO: 1567 - DNA, 122 bp, Homo sapiens
  misc_feature (61)..(62): /note="This region represents a CpG dinucleotide"
  misc_feature (61)..(61): /note="Nucleotide may be methylated to form 5-methylcytosine"
cagtttaacagattctgcctccgggaaccaactgccgggagattctgattggctcagccgcgtgcccacgtgaccgaccaaaaccggccaccagggtctcccaactgcctgtcaaacgcaca

SEQ ID NO: 1568 - DNA, 122 bp, Homo sapiens
  misc_feature (61)..(62): /note="This region represents a CpG dinucleotide"
  misc_feature (61)..(61): /note="Nucleotide may be methylated to form 5-methylcytosine"
aggaaatgcatatcctataatagtgggccagagtctcacctcttcatgtgacaaatgacacgtgctcagtctaaataaagctctttactttatgaaatacaacggcaccaaagccttatgca

SEQ ID NO: 1569 - DNA, 122 bp, Homo sapiens
  misc_feature (61)..(62): /note="This region represents a CpG dinucleotide"
  misc_feature (61)..(61): /note="Nucleotide may be methylated to form 5-methylcytosine"
tattttcaacttcacaaataatgaggtgagattctgaaacagaagttccctaatctcactcgcaggcacgcgatgggggtgtggctcatttctttggtgctccgctgcgcatacccctaggg

SEQ ID NO: 1570 - DNA, 122 bp, Homo sapiens
  misc_feature (61)..(62): /note="This region represents a CpG dinucleotide"
  misc_feature (61)..(61): /note="Nucleotide may be methylated to form 5-methylcytosine"
atgtgatttaaaatcttttcctctgagctttccagtgactgctactcacagcaatttggccgcacataactgcatgaaaggctgggaagtgcagtcttttagctgagttcatgaccacacaa

SEQ ID NO: 1571 - DNA, 122 bp, Homo sapiens
  misc_feature (61)..(62): /note="This region represents a CpG dinucleotide"
  misc_feature (61)..(61): /note="Nucleotide may be methylated to form 5-methylcytosine"
ggctgtgagcctcacaatggcatttgataaacattctgtgctgtctgacatctcattccccgccttcacccaagccaggcccctcctatcccaggagcagtgagagcaccccgctggaattg

SEQ ID NO: 1572 - DNA, 122 bp, Homo sapiens
  misc_feature (61)..(62): /note="This region represents a CpG dinucleotide"
  misc_feature (61)..(61): /note="Nucleotide may be methylated to form 5-methylcytosine"
tctgcatttgttctccttactgtaatgactgttgaaaaagctttcctgagatattagcagcgattaatcccctgggtcaaactgcatttgcagagtagctgctcagtcatctgtctgggctc

SEQ ID NO: 1573 - DNA, 122 bp, Homo sapiens
  misc_feature (61)..(62): /note="This region represents a CpG dinucleotide"
  misc_feature (61)..(61): /note="Nucleotide may be methylated to form 5-methylcytosine"
acacaagcaccattagctgtcctgtagcataggatataaaatgtcggggagtgggggtggcgtgagagttcaccaggtcagcctgctgctctgactctgagtcctatatagcattctctgtt

SEQ ID NO: 1574 - DNA, 122 bp, Homo sapiens
  misc_feature (61)..(62): /note="This region represents a CpG dinucleotide"
  misc_feature (61)..(61): /note="Nucleotide may be methylated to form 5-methylcytosine"
ggagcggtgaccagctgtggtcaggagagcctcagcagggccagccccaggagtctttcccgattcttgctcactgctcacccacctgctgctgccatgaggcaccttggggccttcctctt

SEQ ID NO: 1575 - DNA, 122 bp, Homo sapiens
  misc_feature (61)..(62): /note="This region represents a CpG dinucleotide"
  misc_feature (61)..(61): /note="Nucleotide may be methylated to form 5-methylcytosine"
agaggtgtccttctctttctggcaaggtttcagggtagaggcacggtgctcggggtcccacggctggtgggtggcccctgtgcttctcgctttgggatttgctgtccccgagctgcccatca

SEQ ID NO: 1576 - DNA, 122 bp, Homo sapiens
  misc_feature (61)..(62): /note="This region represents a CpG dinucleotide"
  misc_feature (61)..(61): /note="Nucleotide may be methylated to form 5-methylcytosine"
gccccacccccaggactgctgtcaccaggcatgtgtatccacaaaaagatgcttgcccagcgcccctgtgcgtcccatgcctgagcaagaagctgcacttcctcgggcctcccagctctgga

SEQ ID NO: 1577 - DNA, 122 bp, Homo sapiens
  misc_feature (61)..(62): /note="This region represents a CpG dinucleotide"
  misc_feature (61)..(61): /note="Nucleotide may be methylated to form 5-methylcytosine"
cagtactctgcgttcctgaccttcaagggccttctgttacttcagataacgggaagctgccgtttctgtgaaaactccttatcacttaagagagcatttttctgttttcctagaagagtctt

SEQ ID NO: 1578 - DNA, 122 bp, Homo sapiens
  misc_feature (61)..(62): /note="This region represents a CpG dinucleotide"
  misc_feature (61)..(61): /note="Nucleotide may be methylated to form 5-methylcytosine"
caagtgaaatgagttcagtgatctcattctagtccttcgactcctgtccacatcactaagcgactgcacagcttggcacaggccaggatgagtcagcagtctctggtcatgagaggccaggc

SEQ ID NO: 1579 - DNA, 122 bp, Homo sapiens
  misc_feature (61)..(62): /note="This region represents a CpG dinucleotide"
  misc_feature (61)..(61): /note="Nucleotide may be methylated to form 5-methylcytosine"
agatatagaaggtttaaaggagaaaggatttcaggtttccttctgaattcctgtgtatgtcgttaggaccccaaattgtaggttttttgttttattaaacgataattatgcacttgtctaat

SEQ ID NO: 1580 - DNA, 122 bp, Homo sapiens
  misc_feature (61)..(62): /note="This region represents a CpG dinucleotide"
  misc_feature (61)..(61): /note="Nucleotide may be methylated to form 5-methylcytosine"
atcgcaagtcagcaacaaagcatggaaatgcacaaaactcatactgaaaggagagagacacgtgtccagaagggagaagaatgatctcaggcaatgaaaacaaaccagggcaaaggtaagct

SEQ ID NO: 1581 - DNA, 122 bp, Homo sapiens
  misc_feature (61)..(62): /note="This region represents a CpG dinucleotide"
  misc_feature (61)..(61): /note="Nucleotide may be methylated to form 5-methylcytosine"
ttaagagctgtaacactcactgcgaaggtctgcaccttcactcttgagccagcaagaccacgaacccaccaggagaaaactccgaacacaactgaacatcagaaggaacaaactccagacgc

SEQ ID NO: 1582 - DNA, 122 bp, Homo sapiens
  misc_feature (61)..(62): /note="This region represents a CpG dinucleotide"
  misc_feature (61)..(61): /note="Nucleotide may be methylated to form 5-methylcytosine"
gtcttaaccagaacagcaaaactgaatctatcggtttgaaaaaatgagagtgcaaacatgcggaggaggaagaggcaaaacaggtggataaaatgttgcactaagctacacacaatattagt

SEQ ID NO: 1583 - DNA, 122 bp, Homo sapiens
  misc_feature (61)..(62): /note="This region represents a CpG dinucleotide"
  misc_feature (61)..(61): /note="Nucleotide may be methylated to form 5-methylcytosine"
tctgttgttctttctgtgcgttgactctctctaggtatcctaattgtatcctgaggaaatcgtatttttttctgttacctcatcggtgttccttgttcctgaggaggcatgagtagagggtg

SEQ ID NO: 1584 - DNA, 122 bp, Homo sapiens
  misc_feature (61)..(62): /note="This region represents a CpG dinucleotide"
  misc_feature (61)..(61): /note="Nucleotide may be methylated to form 5-methylcytosine"
gcgctatccaggtgacgctggcacagccttcaaagagcagcagaagtaatttgctcccagcgttctttgccacacagagtggcaggattagatgttgacttacctctgccacttccttggtg

SEQ ID NO: 1585 - DNA, 122 bp, Homo sapiens
  misc_feature (61)..(62): /note="This region represents a CpG dinucleotide"
  misc_feature (61)..(61): /note="Nucleotide may be methylated to form 5-methylcytosine"
ggagagcggttcggctcaacccccttctccagggccagttccaccaggctgcaggggccgcgctctgggcttgcagctgtaggggaagcacagttcgcttactttgtatttttcttgggagc

SEQ ID NO: 1586 - DNA, 122 bp, Homo sapiens
  misc_feature (61)..(62): /note="This region represents a CpG dinucleotide"
  misc_feature (61)..(61): /note="Nucleotide may be methylated to form 5-methylcytosine"
ttgaaactgccatgttcttttcaattttggtagctcccctgcatttaatttagtcataagcgtctgtattaatgggtgtgttcaatatgaaggcatcctgtgaagacaataaattatattat

SEQ ID NO: 1587 - DNA, 122 bp, Homo sapiens
  misc_feature (61)..(62): /note="This region represents a CpG dinucleotide"
  misc_feature (61)..(61): /note="Nucleotide may be methylated to form 5-methylcytosine"
gccacatagtgggtgttcaataagtggtgacttacaatgttataatagggcaaattataacgggctggggaagggcatgatgcatagggcaagctcacctagattgtgcttctaaaaggggc

SEQ ID NO: 1588 - DNA, 122 bp, Homo sapiens
  misc_feature (61)..(62): /note="This region represents a CpG dinucleotide"
  misc_feature (61)..(61): /note="Nucleotide may be methylated to form 5-methylcytosine"
actccgggcgcggttctggaagcagtctcggggcaaggggctgctgcacggcccccaggacgaccttcgagacaatgtcctcaactacgatgagcaaggaggcggggaggaggaccaggtga

SEQ ID NO: 1589 - DNA, 122 bp, Homo sapiens
  misc_feature (61)..(62): /note="This region represents a CpG dinucleotide"
  misc_feature (61)..(61): /note="Nucleotide may be methylated to form 5-methylcytosine"
ttggtcttcttattctactctctttggttgatctctgtcacattcctttagttcaagcaccgtctctacattgatgactcccttaggtatttcctcttgcccaagcaccaaaccagtcctac

SEQ ID NO: 1590 - DNA, 122 bp, Homo sapiens
  misc_feature (61)..(62): /note="This region represents a CpG dinucleotide"
  misc_feature (61)..(61): /note="Nucleotide may be methylated to form 5-methylcytosine"
ggcagcgtgcgtccagggcggagaggtcgtgctactcaggtgtgcactgaggaccagccgcgtcaacatcactgcggcttcttagcaaaaccgcggactctggaaaccccagacctacagaa

SEQ ID NO: 1591 - DNA, 122 bp, Homo sapiens
  misc_feature (61)..(62): /note="This region represents a CpG dinucleotide"
  misc_feature (61)..(61): /note="Nucleotide may be methylated to form 5-methylcytosine"
ccgttgattaatgggtcagagagctatgtaagactgtgatctcctattgtccctgtttcacggaacaaatgtgggggatgctacaaagattcaacactaggtagacatctaatgaagctggg

SEQ ID NO: 1592 - DNA, 122 bp, Homo sapiens
  misc_feature (61)..(62): /note="This region represents a CpG dinucleotide"
  misc_feature (61)..(61): /note="Nucleotide may be methylated to form 5-methylcytosine"
ggctctattccaataaaactttatttacaaggtcaggctgtgcctctatttgtgcttccacggctatagtttgtcagcccctgttgtaagacatcagtcattgaggttttttgtttgttcgt

SEQ ID NO: 1593 - DNA, 122 bp, Homo sapiens
  misc_feature (61)..(62): /note="This region represents a CpG dinucleotide"
  misc_feature (61)..(61): /note="Nucleotide may be methylated to form 5-methylcytosine"
caggaactcatgtcttaaactgttgctggggctagaaaggggaggaaatggtggaaaacccggtcctttaggcaacaggagctatgagccaggcaaagcacactgcaggccttgaggtcaga

SEQ ID NO: 1594 - DNA, 122 bp, Homo sapiens
  misc_feature (61)..(62): /note="This region represents a CpG dinucleotide"
  misc_feature (61)..(61): /note="Nucleotide may be methylated to form 5-methylcytosine"
atgggccagatagtgcctgagctcacgcccctaggaagtggtgaggggccaggatgtccacgctgatgactccagatcacactgcctgctcaatacaccagaaaggggaagtgcctcaccca

SEQ ID NO: 1595 - DNA, 122 bp, Homo sapiens
  misc_feature (61)..(62): /note="This region represents a CpG dinucleotide"
  misc_feature (61)..(61): /note="Nucleotide may be methylated to form 5-methylcytosine"
tgctgggctttccactaccttaggccacgtgtcactatggagcgaagatcaagaaggtcccggaaggagagaagctgcggggtccagggagactttttggtggttggtcggagaggcttcag

SEQ ID NO: 1596 - DNA, 122 bp, Homo sapiens
  misc_feature (61)..(62): /note="This region represents a CpG dinucleotide"
  misc_feature (61)..(61): /note="Nucleotide may be methylated to form 5-methylcytosine"
ctctctgagcagtgggattggagagagggaggcagactgttctggtttcctccaaatacccgcaagtgctgcattgcatagccccatatatgatgcgctggcaggcagatgggcagcagtgg

SEQ ID NO: 1597 - DNA, 122 bp, Homo sapiens
  misc_feature (61)..(62): /note="This region represents a CpG dinucleotide"
  misc_feature (61)..(61): /note="Nucleotide may be methylated to form 5-methylcytosine"
aaaaaggtaaagaccaacacaaaaacctcagacttcctatacaagttaagcagaggaacccggaaaatgtctgaagaaaacgattaccaattttttttgttttttttgttttttggtgaccg

SEQ ID NO: 1598 - DNA, 122 bp, Homo sapiens
  misc_feature (61)..(62): /note="This region represents a CpG dinucleotide"
  misc_feature (61)..(61): /note="Nucleotide may be methylated to form 5-methylcytosine"
cagctgactttttatgattccttttcccagaactcagccttggcttaacaggaaactcaacgtaggtttctcagtcctagttcaattgggtgaggtcccctgagaaccggcatattctcttg

SEQ ID NO: 1599 - DNA, 122 bp, Homo sapiens
  misc_feature (61)..(62): /note="This region represents a CpG dinucleotide"
  misc_feature (61)..(61): /note="Nucleotide may be methylated to form 5-methylcytosine"
agaaagcacgcctgcaaatcgggaaagcaagccgcctcccggagatgggtggctggggaccggcaggacggcagagggagtagagcccatctgggcagacgctgctgcaggcctgggtggac

SEQ ID NO: 1600 - DNA, 122 bp, Homo sapiens
  misc_feature (61)..(62): /note="This region represents a CpG dinucleotide"
  misc_feature (61)..(61): /note="Nucleotide may be methylated to form 5-methylcytosine"
cctactgccccagtccttccagctcttgttaggggctcattgattgctattgggaacattcgctaagggtcggtggcttgcgtattgagcagaaacttctccaaggagttttgtttctcttt

SEQ ID NO: 1601 - DNA, 122 bp, Homo sapiens
  misc_feature (61)..(62): /note="This region represents a CpG dinucleotide"
  misc_feature (61)..(61): /note="Nucleotide may be methylated to form 5-methylcytosine"
tcggagagcaggagcaggcagacgagtaagagagcacgcgcgcaagagagggctcacatccgtcctggaggaagaacggcacagacggagggaggctggggttggcagagactgggacggaa

SEQ ID NO: 1602 - DNA, 122 bp, Homo sapiens
  misc_feature (61)..(62): /note="This region represents a CpG dinucleotide"
  misc_feature (61)..(61): /note="Nucleotide may be methylated to form 5-methylcytosine"
tagttttggtctttctatgttatgttgcaggcatttcctcaaatgccttggctatcttctcgtattttagaaggatgatatatcaaaatgctgacaatcaactctgtgagcgaacagtacct

SEQ ID NO: 1603 - DNA, 122 bp, Homo sapiens
  misc_feature (61)..(62): /note="This region represents a CpG dinucleotide"
  misc_feature (61)..(61): /note="Nucleotide may be methylated to form 5-methylcytosine"
gattcagagaaacgatgtgggctagcctattcattttcactccttgtcctctaggtcagacgtggtttgatgtgtaagtccaaagctgcaatttgcaatttaaagaattactaatagaaaat

SEQ ID NO: 1604 - DNA, 122 bp, Homo sapiens
  misc_feature (61)..(62): /note="This region represents a CpG dinucleotide"
  misc_feature (61)..(61): /note="Nucleotide may be methylated to form 5-methylcytosine"
tataaaacacatctgcactactggcaacgggtggctcatgcatctggatcacatcactcacgttctccccaaccacatatcatagcaggaggaatttcctgatgaatcagatgctgcccaaa

SEQ ID NO: 1605 - DNA, 122 bp, Homo sapiens
  misc_feature (61)..(62): /note="This region represents a CpG dinucleotide"
  misc_feature (61)..(61): /note="Nucleotide may be methylated to form 5-methylcytosine"
agctaagactcccagaacgtgggaaggaaaacgaggcccagcagaagagcaggagggcggcgctttccggtcgggccccggatttaactgtcttcacctacagaggccccaccccacccccc

SEQ ID NO: 1606 - DNA, 122 bp, Homo sapiens
  misc_feature (61)..(62): /note="This region represents a CpG dinucleotide"
  misc_feature (61)..(61): /note="Nucleotide may be methylated to form 5-methylcytosine"
ggctcccggtttaattaaattccgtataacgactatccaaatgggcagcacgcggcacagcgaacccccgccagcctgcgcgtcagctcagaggcggagacccgcgagcgctcaccctcggc

SEQ ID NO: 1607 - DNA, 122 bp, Homo sapiens
  misc_feature (61)..(62): /note="This region represents a CpG dinucleotide"
  misc_feature (61)..(61): /note="Nucleotide may be methylated to form 5-methylcytosine"
ggctctctaatgcagggggaagcagagaggaagtagagaaagctcctccatctccacccccgtggagctaatgagggaagagcaagcaacaataccaaaccagcctatttcccttatctccc

SEQ ID NO: 1608 - DNA, 122 bp, Homo sapiens
  misc_feature (61)..(62): /note="This region represents a CpG dinucleotide"
  misc_feature (61)..(61): /note="Nucleotide may be methylated to form 5-methylcytosine"
tttacatagctacaatgacatgatcacatagttaacagcacacagtgtaatctcataccccgaatcacatttccttgactgtcctcttttagcagctggtttgcttcagattgcaaagaagt

SEQ ID NO: 1609 - DNA, 122 bp, Homo sapiens
  misc_feature (61)..(62): /note="This region represents a CpG dinucleotide"
  misc_feature (61)..(61): /note="Nucleotide may be methylated to form 5-methylcytosine"
atcatcctctccctttctgggtattagaaataatatcagagagtgggtggtcaccccctccgatattgggagtaatatcctctccccttctggatattaaaagcaatatcatagtgagggtg

SEQ ID NO: 1610 - DNA, 122 bp, Homo sapiens
  misc_feature (61)..(62): /note="This region represents a CpG dinucleotide"
  misc_feature (61)..(61): /note="Nucleotide may be methylated to form 5-methylcytosine"
agaaggaggctgtggacagacccagctgacatgtaagtgacaggccaagcaccaggagcccgagagagagcagtcagatggatagaagtaaacttgcagcaaagcaaaaggaaaatgagctt

SEQ ID NO: 1611 - DNA, 122 bp, Homo sapiens
  misc_feature (61)..(62): /note="This region represents a CpG dinucleotide"
  misc_feature (61)..(61): /note="Nucleotide may be methylated to form 5-methylcytosine"
tacatgcgcatagccatacacttgtatatgcctgtactgtctctgtgaacacgagaatctcgtaacagtaattgccgttgaggaaaggggaactgagtgagaacagaagtgggagacagact

SEQ ID NO: 1612 - DNA, 122 bp, Homo sapiens
  misc_feature (61)..(62): /note="This region represents a CpG dinucleotide"
  misc_feature (61)..(61): /note="Nucleotide may be methylated to form 5-methylcytosine"
tgccatgcacagtactttgaagacacagtacctaaccctggaatgttctgaaaccttagccgctcccattcttagaagtggccacatgtatgactgtgcattttatcacagtccaatctaaa

SEQ ID NO: 1613 - DNA, 122 bp, Homo sapiens
  misc_feature (61)..(62): /note="This region represents a CpG dinucleotide"
  misc_feature (61)..(61): /note="Nucleotide may be methylated to form 5-methylcytosine"
caggcttcagtgcagtggctgcattggggctcattgaagcctggaattcctgggcccaagcgatcctcctgccttggcctcccaaagtgttgggataacaggagtgagctattgcatggcca

SEQ ID NO: 1614 - DNA, 122 bp, Homo sapiens
  misc_feature (61)..(62): /note="This region represents a CpG dinucleotide"
  misc_feature (61)..(61): /note="Nucleotide may be methylated to form 5-methylcytosine"
atgcggagcagcgcctgttctggaattttctgtggctgctcagctctctcccagggagcgcgggtcttgagccacagcagagggcatcagcctcagcaagcccagacccgcccggaggctcc

SEQ ID NO: 1615 - DNA, 122 bp, Homo sapiens
  misc_feature (61)..(62): /note="This region represents a CpG dinucleotide"
  misc_feature (61)..(61): /note="Nucleotide may be methylated to form 5-methylcytosine"
tggtaaagactctgaaaatcattcccattcacatcacaggggcctaaagatggcctgggtcgtcagtgcggctttttctatacttccactccccatacattttctttcttttggcgacttgc

SEQ ID NO: 1616 - DNA, 122 bp, Homo sapiens
  misc_feature (61)..(62): /note="This region represents a CpG dinucleotide"
  misc_feature (61)..(61): /note="Nucleotide may be methylated to form 5-methylcytosine"
catgtctgtgcaatgggtccatctgcagccagggccagggcccagcagaggccagaactgcgactgtctgaatcaaagccagtccacggccagggtcagaggtcagtcaaagatcagggtca

SEQ ID NO: 1617 - DNA, 122 bp, Homo sapiens
  misc_feature (61)..(62): /note="This region represents a CpG dinucleotide"
  misc_feature (61)..(61): /note="Nucleotide may be methylated to form 5-methylcytosine"
agagactcaaaaggaacagcaggtgggtgtaaaccccttcagcaaccccagtgcacaggccggccctgccaaggcaatgtgggtatcactgttgacctaagagactggctatgctttggagg

SEQ ID NO: 1618 - DNA, 122 bp, Homo sapiens
  misc_feature (61)..(62): /note="This region represents a CpG dinucleotide"
  misc_feature (61)..(61): /note="Nucleotide may be methylated to form 5-methylcytosine"
cagcctggccaacatggtgtaaccttgtctccactaaaaatccacaaattagctgggcatcgtggcgcacgcctgtaatcccagctatttgggaggccgaggcaggagaatcgcttgaacct

SEQ ID NO: 1619 - DNA, 122 bp, Homo sapiens
  misc_feature (61)..(62): /note="This region represents a CpG dinucleotide"
  misc_feature (61)..(61): /note="Nucleotide may be methylated to form 5-methylcytosine"
accatctacaacaacaacaaaaaagctcagaaatagtctggtgaaactatgcagtgggcacggtttttctgtggctttcttccttccaccttctcagtcccttctcacacagaactcccagc

SEQ ID NO: 1620 - DNA, 122 bp, Homo sapiens
  misc_feature (61)..(62): /note="This region represents a CpG dinucleotide"
  misc_feature (61)..(61): /note="Nucleotide may be methylated to form 5-methylcytosine"
gttacctcacagtcaacctcagtctgaaaatattaaatgcaaaattccagagtaaagattcgtaagttttaaagtgtgtggtttttgagtagcatgatgaaatctcttgccatcccattctg

SEQ ID NO: 1621 - DNA, 122 bp, Homo sapiens
  misc_feature (61)..(62): /note="This region represents a CpG dinucleotide"
  misc_feature (61)..(61): /note="Nucleotide may be methylated to form 5-methylcytosine"
ttaattaatacaagcaaagtaacaggcgtgataatcatgatgaagcaaaaccactaacaacggcagaaaaataagagaaaaaatatactcactgggaagatgttttattgctaaagtgggtt

SEQ ID NO: 1622 - DNA, 122 bp, Homo sapiens
  misc_feature (61)..(62): /note="This region represents a CpG dinucleotide"
  misc_feature (61)..(61): /note="Nucleotide may be methylated to form 5-methylcytosine"
ttttagcccttgctatcttgtaaactccatgcagaagttatgtttactgtgaacataggccgcaggaggccttggggagcttctgcgggtggtaggagacacactttgctaggtctgcaatt

SEQ ID NO: 1623 - DNA, 122 bp, Homo sapiens
  misc_feature (61)..(62): /note="This region represents a CpG dinucleotide"
  misc_feature (61)..(61): /note="Nucleotide may be methylated to form 5-methylcytosine"
ggaagatctttgttgggtagaataacctcaatagaggcttctctgctgaagaggggaatacgttttgtgtgatcaagggaaactagagaggatgtcaaactgtgctaaatatctgcatgtag

SEQ ID NO: 1624 - DNA, 122 bp, Homo sapiens
  misc_feature (61)..(62): /note="This region represents a CpG dinucleotide"
  misc_feature (61)..(61): /note="Nucleotide may be methylated to form 5-methylcytosine"
gcaaatactatcagcctgagacggaggtaaggtcaggtggccagtcctgtctgccctctccgatgagcacccaggttagggtagagctctggggacccacaatctctctcagacctttcagc

SEQ ID NO: 1625 - DNA, 122 bp, Homo sapiens
  misc_feature (61)..(62): /note="This region represents a CpG dinucleotide"
  misc_feature (61)..(61): /note="Nucleotide may be methylated to form 5-methylcytosine"
cattatatgatcactccttgctttggtaaaaccaaaccaaagttagcacctacctaaacacgtccttgaaaaagacctatagattccaacagtaaataaaatgaaaatagcttaagaaaact

SEQ ID NO: 1626 - DNA, 122 bp, Homo sapiens
  misc_feature (61)..(62): /note="This region represents a CpG dinucleotide"
  misc_feature (61)..(61): /note="Nucleotide may be methylated to form 5-methylcytosine"
atgtaaaacccctacccccacttgctaggtgcttcagtctccttggccaccaccctgctgcgtcagccctggctggaacgtctccagtcatggagagctcattacctccggaagcagccttc

SEQ ID NO: 1627 - DNA, 122 bp, Homo sapiens
  misc_feature (61)..(62): /note="This region represents a CpG dinucleotide"
  misc_feature (61)..(61): /note="Nucleotide may be methylated to form 5-methylcytosine"
aataggtaagtgagacttaaaaaaaacaaacacaaaaacaaaggaggagctgctgttccacgtagcagtgctttacctgtagctgctcacttgctccaggtttaattctgacatcaggggaa

SEQ ID NO: 1628 - DNA, 122 bp, Homo sapiens
  misc_feature (61)..(62): /note="This region represents a CpG dinucleotide"
  misc_feature (61)..(61): /note="Nucleotide may be methylated to form 5-methylcytosine"
acaaacattgctattattcagctcatttcaaaggattccgctgctgccatttgtgagagccgctggaggctgagtgaaagtcattttgaaagactgatccaaagaagaatggaggccagagt

SEQ ID NO: 1629 - DNA, 122 bp, Homo sapiens
  misc_feature (61)..(62): /note="This region represents a CpG dinucleotide"
  misc_feature (61)..(61): /note="Nucleotide may be methylated to form 5-methylcytosine"
acctttaataatctatgaacctggctgaattttctcaaaaaacctgctgcatctacaccccgcaggaacagcctgttaagcagtttgggctaccagctctcagcctccaagacagccgccca

SEQ ID NO: 1630 - DNA, 122 bp, Homo sapiens
  misc_feature (61)..(62): /note="This region represents a CpG dinucleotide"
  misc_feature (61)..(61): /note="Nucleotide may be methylated to form 5-methylcytosine"
tacatgttggccaagcatgatttcaaaccggaaagaaaattacacagcaataaaatatagcggcatgagaacttacatttgtcttcagggtccacacatgagatacatttgttattctgtga

SEQ ID NO: 1631 - DNA, 122 bp, Homo sapiens
  misc_feature (61)..(62): /note="This region represents a CpG dinucleotide"
  misc_feature (61)..(61): /note="Nucleotide may be methylated to form 5-methylcytosine"
cttctttcttcctaacattttcatgtgagatccagaaaggacacattgtctctggccattcgaagaaagaaagaaagaaaaaaaaaaaaggtatttagagacagagagagaaaaaggctgaa

SEQ ID NO: 1632 - DNA, 122 bp, Homo sapiens
  misc_feature (61)..(62): /note="This region represents a CpG dinucleotide"
  misc_feature (61)..(61): /note="Nucleotide may be methylated to form 5-methylcytosine"
ttcatttaaaatttccctgacaccgatttttcttaactcttactgtagcaaaatgcctgtcgcaatctaaataaggaaccacatgtgtttgcatcttttgtcctttgtgttttcactttctt

SEQ ID NO: 1633 - DNA, 122 bp, Homo sapiens
  misc_feature (61)..(62): /note="This region represents a CpG dinucleotide"
  misc_feature (61)..(61): /note="Nucleotide may be methylated to form 5-methylcytosine"
tgtttaggttaaaaacaatgaggcaaaatttatgtgttacttttaagtttttgttgaatacggattggaaatgtagttgatcagggaactgatgaaagtaagataaaggagatacggaagaa

SEQ ID NO: 1634 - DNA, 122 bp, Homo sapiens
  misc_feature (61)..(62): /note="This region represents a CpG dinucleotide"
  misc_feature (61)..(61): /note="Nucleotide may be methylated to form 5-methylcytosine"
ggagattttaaataatcctaactacctcctaaactagcttagagattaactgagataatacggaggcagccctaagagcagtgcctagaacatagtgagccctcaataaaggcagaagggat

SEQ ID NO: 1635 - DNA, 122 bp, Homo sapiens
  misc_feature (61)..(62): /note="This region represents a CpG dinucleotide"
  misc_feature (61)..(61): /note="Nucleotide may be methylated to form 5-methylcytosine"
gaactggggacagctgtcctcctgggagagtaaggctggtcaggtgctgcctgggcacagcggagcagccatgccctgaacagtcccctgaggccccgaggcccctcaccatgtgggcacgg

SEQ ID NO: 1636 - DNA, 122 bp, Homo sapiens
  misc_feature (61)..(62): /note="This region represents a CpG dinucleotide"
  misc_feature (61)..(61): /note="Nucleotide may be methylated to form 5-methylcytosine"
cccagccaccctctttcatagcagataaactataaacagttctagaaaaacagtcctttccgtctttaaccttatatataaatcaaattggtcacccattctaaacttatgcttttagtctt

SEQ ID NO: 1637 - DNA, 122 bp, Homo sapiens
  misc_feature (61)..(62): /note="This region represents a CpG dinucleotide"
  misc_feature (61)..(61): /note="Nucleotide may be methylated to form 5-methylcytosine"
agtccagatggctttgcagcctgtaaaacagactttactcactgatgcctctcggagtgtcggcagggcaatgtctttctcgcagcagaaatgcaaaacaaaagacagcatctgtggcttgc

SEQ ID NO: 1638 - DNA, 122 bp, Homo sapiens
  misc_feature (61)..(62): /note="This region represents a CpG dinucleotide"
  misc_feature (61)..(61): /note="Nucleotide may be methylated to form 5-methylcytosine"
gtgcattataaaaagtacagtaatgcattggcttcaacttgcatatttcccaaacatgggcgtttgcaagaaaagcaaacactttttgataacatatactgaaggatcttaaaataagatca

SEQ ID NO: 1639 - DNA, 122 bp, Homo sapiens
  misc_feature (61)..(62): /note="This region represents a CpG dinucleotide"
  misc_feature (61)..(61): /note="Nucleotide may be methylated to form 5-methylcytosine"
agtcctcgcctgtgtacccgggccagcacacgcagcggccgtccacgcagcgcccgccctcgccacagtcccaggggcagctccgcgtaccacagtcctcgccagtgtagccggggtcacac

SEQ ID NO: 1640 - DNA, 122 bp, Homo sapiens
  misc_feature (61)..(62): /note="This region represents a CpG dinucleotide"
  misc_feature (61)..(61): /note="Nucleotide may be methylated to form 5-methylcytosine"
aaccatggccagaggaggtagacagtagggggcagtgcagtgtagggcaagaagctcctgcgctggggctcgttggctgcattttgaatttcaattgtagcatctgttggtggagtggcctc

SEQ ID NO: 1641 - DNA, 122 bp, Homo sapiens
  misc_feature (61)..(62): /note="This region represents a CpG dinucleotide"
  misc_feature (61)..(61): /note="Nucleotide may be methylated to form 5-methylcytosine"
acaggcagcttttaaagccttaaagcgaactctacaactgatagctcctctgcatgatatcgtggcctaccttgtcagttttgctaagcttggcaattgtccagcatgttttgaatttcctc

SEQ ID NO: 1642 - DNA, 122 bp, Homo sapiens
  misc_feature (61)..(62): /note="This region represents a CpG dinucleotide"
  misc_feature (61)..(61): /note="Nucleotide may be methylated to form 5-methylcytosine"
tgaacagaagccagagagctactagccagagaggattttaattgtgcttcatcaattcctcgaattgcttctctttttgttagacatctgttccctctctagccaaggcctgggactcctgc

SEQ ID NO: 1643 - DNA, 122 bp, Homo sapiens
  misc_feature (61)..(62): /note="This region represents a CpG dinucleotide"
  misc_feature (61)..(61): /note="Nucleotide may be methylated to form 5-methylcytosine"
acatatctggttccaaaaccaggactcttttcattacagcagtggttctcaacagagttgcgattttgccccccagggaatatttcacaatgtctggagacatttatgactgtcaggattgg

SEQ ID NO: 1644 - DNA, 122 bp, Homo sapiens
  misc_feature (61)..(62): /note="This region represents a CpG dinucleotide"
  misc_feature (61)..(61): /note="Nucleotide may be methylated to form 5-methylcytosine"
gggcgaaggaagcacatttattcacagtggagacaggcctcttgcattgtcaattttacccgtgtgagaattgttgttcctgttggtgactgggtcactgataaaagattaaatcagattgg

SEQ ID NO: 1645 - DNA, 122 bp, Homo sapiens
  misc_feature (61)..(62): /note="This region represents a CpG dinucleotide"
  misc_feature (61)..(61): /note="Nucleotide may be methylated to form 5-methylcytosine"
ccaagggaagctcaggacatgaggcacaggcagcagagaagggcttggaagtttcacaaacgtgtgtggatttttaaaatcttagcctctgacattcagagcttgtctttctattttttaaa

SEQ ID NO: 1646 - DNA, 122 bp, Homo sapiens
  misc_feature (61)..(62): /note="This region represents a CpG dinucleotide"
  misc_feature (61)..(61): /note="Nucleotide may be methylated to form 5-methylcytosine"
ggttttcaggtcttaactttttgccaaagaaaacaaatgtcattttacttgtttttttaacggagacacaagtaatgtgtgaagatgctgctattgttgtaaaggagttctgacagtgaaaa

SEQ ID NO: 1647 - DNA, 122 bp, Homo sapiens
  misc_feature (61)..(62): /note="This region represents a CpG dinucleotide"
  misc_feature (61)..(61): /note="Nucleotide may be methylated to form 5-methylcytosine"
gagaggggccctccgagttctgctgtcacctgggggcgcctcacttcattcagccagtggcggggctccctgggtcggcacagagtcaggggagggggctgggggacctcctggtgggaaaa

SEQ ID NO: 1648 - DNA, 122 bp, Homo sapiens
  misc_feature (61)..(62): /note="This region represents a CpG dinucleotide"
  misc_feature (61)..(61): /note="Nucleotide may be methylated to form 5-methylcytosine"
gttgtcaaagcggtcgggcctggaggggttcccagatgtccttcccgcctggtcagtgaccgcccagcggggtcaccatgcactcctccaggagggacacgcttgtcatgttggcgcttgtc

SEQ ID NO: 1649 - DNA, 122 bp, Homo sapiens
  misc_feature (61)..(62): /note="This region represents a CpG dinucleotide"
  misc_feature (61)..(61): /note="Nucleotide may be methylated to form 5-methylcytosine"
agcctgggagaggcttaatttatgttttatggagattagcttgcttctgagagggggttccgccatcaactcgatttctgcacacactcagagctcaggagattgcctgctctctgaaaaac

SEQ ID NO: 1650 - DNA, 122 bp, Homo sapiens
  misc_feature (61)..(62): /note="This region represents a CpG dinucleotide"
  misc_feature (61)..(61): /note="Nucleotide may be methylated to form 5-methylcytosine"
caactcatttgccggcgtatacctcgcgctcgctgggaagcatttgcacaggctgcaaagcgcagcgattagagacccgcttccaaataaaatcaccgtggagagactacattttcttttca

SEQ ID NO: 1651 - DNA, 122 bp, Homo sapiens
  misc_feature (61)..(62): /note="This region represents a CpG dinucleotide"
  misc_feature (61)..(61): /note="Nucleotide may be methylated to form 5-methylcytosine"
gcagaccctgctggaggcacagcaggaagtgaccaggcacaggctgggcagtccttcttccgcccctgagtcactgccacatgcatgagaagggaactcagtgcaggctagacagaaaaggt

SEQ ID NO: 1652 - DNA, 122 bp, Homo sapiens
  misc_feature (61)..(62): /note="This region represents a CpG dinucleotide"
  misc_feature (61)..(61): /note="Nucleotide may be methylated to form 5-methylcytosine"
agccaagtttcccacagctggagaggaaagtcaaaggtatgcaaggaaggaaagctagaacgaaccttgtgggactgtattaaagtcagaaacctcaatgtgaacttaggtttagcttgaca

SEQ ID NO: 1653 - DNA, 122 bp, Homo sapiens
  misc_feature (61)..(62): /note="This region represents a CpG dinucleotide"
  misc_feature (61)..(61): /note="Nucleotide may be methylated to form 5-methylcytosine"
catcatgaccatgagacacaactggacaccaggtaggccttggggctacgcatgggcaggcggggtagggtgaggtctatgaacagaatggagcaatgggctaacccggagccttcactcca

SEQ ID NO: 1654 - DNA, 122 bp, Homo sapiens
  misc_feature (61)..(62): /note="This region represents a CpG dinucleotide"
  misc_feature (61)..(61): /note="Nucleotide may be methylated to form 5-methylcytosine"
agtgggtggtgaagatcagaggaaccacactggataatgactggagccgagtgatgggcacgtggggctgatttaagccaatctccacttcggggtatatttgaaattttccataacaaaag

SEQ ID NO: 1655 - DNA, 122 bp, Homo sapiens
  misc_feature (61)..(62): /note="This region represents a CpG dinucleotide"
  misc_feature (61)..(61): /note="Nucleotide may be methylated to form 5-methylcytosine"
gcaggtacgtgcgtgtacacatgcacacaaacatgaatattcagtgaatggcaaagcacacgtgtgtgtgtatatatatatgtgtgtgtatatatgtcagattgtcataactggaatgctta

SEQ ID NO: 1656 - DNA, 122 bp, Homo sapiens
  misc_feature (61)..(62): /note="This region represents a CpG dinucleotide"
  misc_feature (61)..(61): /note="Nucleotide may be methylated to form 5-methylcytosine"
cagtactagtgaggtcctaagtcttggcagtgggtctcctgcagagcctggtgctgtcaccgcatcaatcagccctggagcatgctgttattatcacaaccagtcattccacactgcaatca

SEQ ID NO: 1657 - DNA, 122 bp, Homo sapiens
  misc_feature (61)..(62): /note="This region represents a CpG dinucleotide"
  misc_feature (61)..(61): /note="Nucleotide may be methylated to form 5-methylcytosine"
acagcaacctacatttattgagagtttactatatgctcggcactacactaatcctttatccgggttatctcatttaatctttacactctctgaggtagacaaacctacattttccagatgag

SEQ ID NO: 1658 - DNA, 122 bp, Homo sapiens
  misc_feature (61)..(62): /note="This region represents a CpG dinucleotide"
  misc_feature (61)..(61): /note="Nucleotide may be methylated to form 5-methylcytosine"
cagacgggcggggtggggaagacgcgcggggcccgcacgagggtgggtgtagccgaggggcggggccagtgggtgggtgggtgggcgtagccggggggggggggccctggtgggtgcggtcg

SEQ ID NO: 1659 - DNA, 122 bp, Homo sapiens
  misc_feature (61)..(62): /note="This region represents a CpG dinucleotide"
  misc_feature (61)..(61): /note="Nucleotide may be methylated to form 5-methylcytosine"
tctcggttactcagccccggttgcctcccttctgcccagcagttagttcctcaggactcacggcttccaggctcccctcgcctgtgagccggacccaagctcctctttggggctgaggagga

SEQ ID NO: 1660 - DNA, 122 bp, Homo sapiens
  misc_feature (61)..(62): /note="This region represents a CpG dinucleotide"
  misc_feature (61)..(61): /note="Nucleotide may be methylated to form 5-methylcytosine"
ctataccttcctggttcctgaggattgagtgtcccctgcgcgcttaaagctggagccagacgtatgcagctttttcccgctgtccccaggcaccgagtactccagataaactcattggcagc

SEQ ID NO: 1661 - DNA, 122 bp, Homo sapiens
  misc_feature (61)..(62): /note="This region represents a CpG dinucleotide"
  misc_feature (61)..(61): /note="Nucleotide may be methylated to form 5-methylcytosine"
tttaccttttcatcccaccttctgttccctcattttctccctccttccacacccaagagtcgctgcccctgatctagagtgttggctgtcatgtgagaagttagttctgaaatcttccaggg

SEQ ID NO: 1662 - DNA, 122 bp, Homo sapiens
  misc_feature (61)..(62): /note="This region represents a CpG dinucleotide"
  misc_feature (61)..(61): /note="Nucleotide may be methylated to form 5-methylcytosine"
gctgctcacctcctgctgtgtggcctggttcctaacaggccagggagcagaactggtctgcggccctgggagttggggacccctggtctaaattatatgagtctatgaagttttagactggt

SEQ ID NO: 1663 - DNA, 122 bp, Homo sapiens
  misc_feature (61)..(62): /note="This region represents a CpG dinucleotide"
  misc_feature (61)..(61): /note="Nucleotide may be methylated to form 5-methylcytosine"
ccaggacccctgtgtctttccaagttgggggcactggccagggaaggatcctggttcttccggtgtctgggatgatgaggctggtcctcaggcagtgggaggctggaggagggggaatgtgt

SEQ ID NO: 1664 - DNA, 122 bp, Homo sapiens
  misc_feature (61)..(62): /note="This region represents a CpG dinucleotide"
  misc_feature (61)..(61): /note="Nucleotide may be methylated to form 5-methylcytosine"
ataatatatcaggtgcctgatatcagagccggaattacagttgaaaaataccatctccatcgtcaaggagttgacagtggcagaagaaaacccaagtaaaccagagttcataatgtgctgtg

SEQ ID NO: 1665 - DNA, 122 bp, Homo sapiens
  misc_feature (61)..(62): /note="This region represents a CpG dinucleotide"
  misc_feature (61)..(61): /note="Nucleotide may be methylated to form 5-methylcytosine"
ggacttggctctgggatgtggattgggctcagttctggaccacatgtttcttatcctccacgtgcatgttcttctcatgggggaaggaaggagaacaagagacaaagccacgcatacaggca

SEQ ID NO: 1666 - DNA, 122 bp, Homo sapiens
  misc_feature (61)..(62): /note="This region represents a CpG dinucleotide"
  misc_feature (61)..(61): /note="Nucleotide may be methylated to form 5-methylcytosine"
tccccctaggaagccaggaagacgagtcatgataatcagaggagtcagtcctttctgagacgtagcctgcagaacactgctgttcctgacctcagtgaagaacagccagttttccaactttt

SEQ ID NO: 1667 - DNA, 122 bp, Homo sapiens
  misc_feature (61)..(62): /note="This region represents a CpG dinucleotide"
  misc_feature (61)..(61): /note="Nucleotide may be methylated to form 5-methylcytosine"
tcctccttttaaatcaactggggatctagggagtcagccctcagctttggcccacgaattcgtcttatcctgagctttagggatcttgtatgatcagagtgggcatttctttgagttgaggt

SEQ ID NO: 1668 - DNA, 122 bp, Homo sapiens
  misc_feature (61)..(62): /note="This region represents a CpG dinucleotide"
  misc_feature (61)..(61): /note="Nucleotide may be methylated to form 5-methylcytosine"
ttataaagtgctttaaaacatttttaaagtccacttcagacaaatatgtgaggtgggtagcgcagtatattacttggctttgcagcaggaacaactcgcaaatctcagtggcttacaatgac

SEQ ID NO: 1669 - DNA, 122 bp, Homo sapiens
  misc_feature (61)..(62): /note="This region represents a CpG dinucleotide"
  misc_feature (61)..(61): /note="Nucleotide may be methylated to form 5-methylcytosine"
aaggttaaacctaggaacacggaagccaatgtgcccccagagaacggaagaggcggtctgcgagttcagaaggcaggcagctcatgcttgaaggtgatagccttctgcctacaagagaaatc

SEQ ID NO: 1670 - DNA, 122 bp, Homo sapiens
  misc_feature (61)..(62): /note="This region represents a CpG dinucleotide"
  misc_feature (61)..(61): /note="Nucleotide may be methylated to form 5-methylcytosine"
tgggttcagtgacccccagggaaagctgagtcatgtccaggaaagcaatgtcatcccacccgaaccagagtggcctgtgttgtgaaatctagcagaaaggtcatcaccacaggttccaagat

SEQ ID NO: 1671 - DNA, 122 bp, Homo sapiens
  misc_feature (61)..(62): /note="This region represents a CpG dinucleotide"
  misc_feature (61)..(61): /note="Nucleotide may be methylated to form 5-methylcytosine"
ctcttttatctcagaccacaaaattggaagttctacgtgaccagatttacatccatataacgtctctgggcataaactgtgaactgtgacagatctgggtttcaatctagcttccaccacct

SEQ ID NO: 1672 - DNA, 122 bp, Homo sapiens
  misc_feature (61)..(62): /note="This region represents a CpG dinucleotide"
  misc_feature (61)..(61): /note="Nucleotide may be methylated to form 5-methylcytosine"
ccggcagccccgcagttcccgctgtcagccgcagtcccgggccggggtgagtccccgggacgccgcagttgcgcacacgcccaccgtctcaggcacagggtcactgggacgatcccgggggc

SEQ ID NO: 1673 - DNA, 122 bp, Homo sapiens
  misc_feature (61)..(62): /note="This region represents a CpG dinucleotide"
  misc_feature (61)..(61): /note="Nucleotide may be methylated to form 5-methylcytosine"
ggcttacttaacactcttgaacgtcaaaacccacgctcagtacccgcttcaagtggaagtcggtgttgagatacaagcataggaacgaactcaaggctaacagctgttctgtattcagagcc

SEQ ID NO: 1674 - DNA, 122 bp, Homo sapiens
  misc_feature (61)..(62): /note="This region represents a CpG dinucleotide"
  misc_feature (61)..(61): /note="Nucleotide may be methylated to form 5-methylcytosine"
gacttattgaatcttttcacagttcagaattaaactttctccactgctaactgcagacagcgtagaatgaaagttgagtcttaactgacagtcctctccttagatcaatctttgcaaaagcc

SEQ ID NO: 1675 - DNA, 122 bp, Homo sapiens
  misc_feature (61)..(62): /note="This region represents a CpG dinucleotide"
  misc_feature (61)..(61): /note="Nucleotide may be methylated to form 5-methylcytosine"
cttgggatataacaggtgaatgcagaccctttaaatagtggatgtacactcagatatttccgaattacataaataacactcatagtagacacacattttggatacccaaaagaatatacaca

SEQ ID NO: 1676 - DNA, 122 bp, Homo sapiens
  misc_feature (61)..(62): /note="This region represents a CpG dinucleotide"
  misc_feature (61)..(61): /note="Nucleotide may be methylated to form 5-methylcytosine"
tttgtgggcctggtgtcagcagtggggaacagtcttcctgccactttccattcatgtctacgtgactccaacctaaaatagatttttgggggagcccttgattgtaaccttcaacaaaggaa

SEQ ID NO: 1677 - DNA, 122 bp, Homo sapiens
  misc_feature (61)..(62): /note="This region represents a CpG dinucleotide"
  misc_feature (61)..(61): /note="Nucleotide may be methylated to form 5-methylcytosine"
gctcctgaaaatatcagaaattactatgccaggaaagatatttcctttgaaaatggcacacgatttagacaccggcagcaacggccttcagaggtacacaatcagctccaaccctcacttcc

SEQ ID NO: 1678 - DNA, 122 bp, Homo sapiens
  misc_feature (61)..(62): /note="This region represents a CpG dinucleotide"
  misc_feature (61)..(61): /note="Nucleotide may be methylated to form 5-methylcytosine"
gtgatagaagattgatgtggtagtcatggagatgagcctcccaacaccccccaccccgcccgctgttcaaggaagggcctgctgcccagctgcagggagtttggacagcagacagcctccag

SEQ ID NO: 1679 - DNA, 122 bp, Homo sapiens
  misc_feature (61)..(62): /note="This region represents a CpG dinucleotide"
  misc_feature (61)..(61): /note="Nucleotide may be methylated to form 5-methylcytosine"
taaagctaagtattaatacgccctggggtgatgccctcatcagcaacaccaggatgtgttcgttctctctctttcttggcacagatttttgtttgtttgtttttgtcttttttttttttgag

SEQ ID NO: 1680 - DNA, 122 bp, Homo sapiens
  misc_feature (61)..(62): /note="This region represents a CpG dinucleotide"
  misc_feature (61)..(61): /note="Nucleotide may be methylated to form 5-methylcytosine"
tcaactctagtctggtacttgttcacatgaacttaaatctagggtaaaaagattgtttttcgttgctgaagtcaatttggcaaatttgtagttttgatataagtcagatttgcagttcactc

SEQ ID NO: 1681 - DNA, 122 bp, Homo sapiens
  misc_feature (61)..(62): /note="This region represents a CpG dinucleotide"
  misc_feature (61)..(61): /note="Nucleotide may be methylated to form 5-methylcytosine"
cgaccccatgcaaggctgtgtggataagccgctgtgaaaccgcctggtacaacgtgatgacgagcagagatacattttgcatccccgactcattatttcgctgtcaaaatgttccatttcct

SEQ ID NO: 1682 - DNA, 122 bp, Homo sapiens
  misc_feature (61)..(62): /note="This region represents a CpG dinucleotide"
  misc_feature (61)..(61): /note="Nucleotide may be methylated to form 5-methylcytosine"
gtctctgccagacatttgcagactgggtttccttcactggggtgccaccagcccctcccacgtttgcagcccaattttgtctcatgtacatgtcttaacactgggttcccctggaaacaggc

SEQ ID NO: 1683 - DNA, 122 bp, Homo sapiens
  misc_feature (61)..(62): /note="This region represents a CpG dinucleotide"
  misc_feature (61)..(61): /note="Nucleotide may be methylated to form 5-methylcytosine"
ctgttggccttcatttaatgtgaacgtaatgtttgagtcaccccctgagatttcatgactcggaatttcatgaaagtcagtcccagtttacgaaacctctccaacagagaaaactctgttcc

SEQ ID NO: 1684 - DNA, 122 bp, Homo sapiens
  misc_feature (61)..(62): /note="This region represents a CpG dinucleotide"
  misc_feature (61)..(61): /note="Nucleotide may be methylated to form 5-methylcytosine"
gagccaacagaacacctggaacatgataagtgcttttaaatatgttaaagaaaacaattgcgagagaagagagaacacagacgacatgagacgtcctacaaaaggaggccccttagctatta

SEQ ID NO: 1685 - DNA, 122 bp, Homo sapiens
  misc_feature (61)..(62): /note="This region represents a CpG dinucleotide"
  misc_feature (61)..(61): /note="Nucleotide may be methylated to form 5-methylcytosine"
tgtacgcggctgcatacccactgcacgatgtaagtaaccttgacacacgatttatctctgcgtcatttgactccccaaatcccgccgggccacacccccccgggagctgcaattatcctgtg

SEQ ID NO: 1686 - DNA, 122 bp, Homo sapiens
  misc_feature (61)..(62): /note="This region represents a CpG dinucleotide"
  misc_feature (61)..(61): /note="Nucleotide may be methylated to form 5-methylcytosine"
gcgtgagccaccgcgcccggccaaaagttcctctcttaagcaagctgggcacgaagtagccggcaaccaaaagcagctaagggctacaactttaaaaaatggtttatttttttctttaacaa

SEQ ID NO: 1687 - DNA, 122 bp, Homo sapiens
  misc_feature (61)..(62): /note="This region represents a CpG dinucleotide"
  misc_feature (61)..(61): /note="Nucleotide may be methylated to form 5-methylcytosine"
ctccctgctgctgcttcaccttgccttagcttgtgtaagcgtcagggaaacaggcaaatgcgtctcatttgtcttcagaaccctgtcttattagatcgccatcaactacatttggagcaatc

SEQ ID NO: 1688 - DNA, 122 bp, Homo sapiens
  misc_feature (61)..(62): /note="This region represents a CpG dinucleotide"
  misc_feature (61)..(61): /note="Nucleotide may be methylated to form 5-methylcytosine"
tgtgggcctccatcctcctgtgaggcagtggaagaccactccttgttctccggctgactccgtttcttgtgcagttcttgctggatgccttctttaatcacctctcaggacagagagtttct

SEQ ID NO: 1689 - DNA, 122 bp, Homo sapiens
  misc_feature (61)..(62): /note="This region represents a CpG dinucleotide"
  misc_feature (61)..(61): /note="Nucleotide may be methylated to form 5-methylcytosine"
caggctaactccaaagaataaagaatagactgaccaaggtagtggtggaagcaggtagaccggttaggttaagattaggtaggaaatgattgtggttagagctgtaatgttagggcttgtga

SEQ ID NO: 1690 - DNA, 122 bp, Homo sapiens
  misc_feature (61)..(62): /note="This region represents a CpG dinucleotide"
  misc_feature (61)..(61): /note="Nucleotide may be methylated to form 5-methylcytosine"
aaaaaaaaaaaagagagagagagcaaaaacataagcccagagttactcaccaattgaatccgaccatgtcactccaccacttagaaaacgtatgtggttagtagtccctctattgatcacag

SEQ ID NO: 1691 - DNA, 122 bp, Homo sapiens
  misc_feature (61)..(62): /note="This region represents a CpG dinucleotide"
  misc_feature (61)..(61): /note="Nucleotide may be methylated to form 5-methylcytosine"
acagcgccggggacagggaaggcacagcgcgggggtgcaggggctgtgtgggcagggaggcgagctgagaaacagcagccccaagggccgaccctgggactgccagtgtgtgggacaccctg

SEQ ID NO: 1692 - DNA, 122 bp, Homo sapiens
  misc_feature (61)..(62): /note="This region represents a CpG dinucleotide"
  misc_feature (61)..(61): /note="Nucleotide may be methylated to form 5-methylcytosine"
tacaatattcggttaattgtggacgggctcaagctgtgctcatccctgcgaaggctgccgcggctgcacggtgctcacaggagcaggctcgtttctccgggacccgccagctccacagcctg

SEQ ID NO: 1693 - DNA, 122 bp, Homo sapiens
  misc_feature (61)..(62): /note="This region represents a CpG dinucleotide"
  misc_feature (61)..(61): /note="Nucleotide may be methylated to form 5-methylcytosine"
cgcactcgctctgcgcccgggtctcggcgcgcgcggaaacccaggccgcgggctcccctccgccccgccggcccgcgtgcagcattaaatattcatagggatgctactttcttaaaggagaa

SEQ ID NO: 1694 - DNA, 122 bp, Homo sapiens
  misc_feature (61)..(62): /note="This region represents a CpG dinucleotide"
  misc_feature (61)..(61): /note="Nucleotide may be methylated to form 5-methylcytosine"
gatgtcagagactgggctgcagccaggaaccttccttggacagacagtcagcaggggagccgcccgggagaagttcacagaaagcagcctgaccccactcgagctccaggaaggtggggacc

SEQ ID NO: 1695 - DNA, 122 bp, Homo sapiens
  misc_feature (61)..(62): /note="This region represents a CpG dinucleotide"
  misc_feature (61)..(61): /note="Nucleotide may be methylated to form 5-methylcytosine"
ggggttgggcaggcagatccttcagcccgagtggtgtggcaagctggagggagggggaggcgtggcaccaactctggggaagtttcatgacagcgaagctcaatcatcacagctgaacaccc

SEQ ID NO: 1696 - DNA, 122 bp, Homo sapiens
  misc_feature (61)..(62): /note="This region represents a CpG dinucleotide"
  misc_feature (61)..(61): /note="Nucleotide may be methylated to form 5-methylcytosine"
acagttgacttgatcattgagatgactcctaagtgactcacaggtggggagcgtccacagcgtgggtcccctggataaagaaaggattcaattcctcagccaggaaatagcagaatggtgtg

SEQ ID NO: 1697 - DNA, 122 bp, Homo sapiens
  misc_feature (61)..(62): /note="This region represents a CpG dinucleotide"
  misc_feature (61)..(61): /note="Nucleotide may be methylated to form 5-methylcytosine"
gtgctatcatcttccgcaacaagactctgtcttcttatgaattatggctctgcaataaaacgaaccaggatgtgaatgtttgctagatcaatacagtaatccagggcaaacaaaccagaata

SEQ ID NO: 1698 - DNA, 122 bp, Homo sapiens
  misc_feature (61)..(62): /note="This region represents a CpG dinucleotide"
  misc_feature (61)..(61): /note="Nucleotide may be methylated to form 5-methylcytosine"
ccacccaccagctccagacactagccccagacagtgtgcacgcacacgcacacacacacacgcgtactgcgaatggcatctcagcattgtaggagccctgaatctccaagtcttagaattgt

SEQ ID NO: 1699 - DNA, 122 bp, Homo sapiens
  misc_feature (61)..(62): /note="This region represents a CpG dinucleotide"
  misc_feature (61)..(61): /note="Nucleotide may be methylated to form 5-methylcytosine"
aagttagtttgctccacgtgacctatgttccactcaagtgctctctgactcaggctcacccgcaggactcgtcatctggcctgatgtgcacgagagggaagactgaccggctccaaaggctg

SEQ ID NO: 1700 - DNA, 122 bp, Homo sapiens
  misc_feature (61)..(62): /note="This region represents a CpG dinucleotide"
  misc_feature (61)..(61): /note="Nucleotide may be methylated to form 5-methylcytosine"
gcagattggcgggtcgctttggtgggagtttcttgcttccttggcacaccattcgctccgcgagtttgttaagggcccctgtgtgccaggctcggcccgagcatctgtggaaccagaggaag

SEQ ID NO: 1701 - DNA, 122 bp, Homo sapiens
  misc_feature (61)..(62): /note="This region represents a CpG dinucleotide"
  misc_feature (61)..(61): /note="Nucleotide may be methylated to form 5-methylcytosine"
atggtagcaacgggaggttgtatccctagctgatgagttgtatgagcctctactacctggcgcacctccgcctgaagattgccagaattgcttgcctcatgacgtgagtcacaatggaaact

SEQ ID NO: 1702 - DNA, 122 bp, Homo sapiens
  misc_feature (61)..(62): /note="This region represents a CpG dinucleotide"
  misc_feature (61)..(61): /note="Nucleotide may be methylated to form 5-methylcytosine"
ctgtgggctgtgaatccaactcgtcctgggagcagggcgctctcgccttctgttcctctccgagctcagtgcacagaagcattctgcttacccagctgggactgctgactgcaccatcgagc

SEQ ID NO: 1703 - DNA, 122 bp, Homo sapiens
  misc_feature (61)..(62): /note="This region represents a CpG dinucleotide"
  misc_feature (61)..(61): /note="Nucleotide may be methylated to form 5-methylcytosine"
ttcatgttttggtcaactaccttccctgacacttctttttgtgtactttgactaaatttacggtgagaaactggactttggctttgtgcataatcccaagctgtaccaggctcacaaaattc

SEQ ID NO: 1704 - DNA, 122 bp, Homo sapiens
  misc_feature (61)..(62): /note="This region represents a CpG dinucleotide"
  misc_feature (61)..(61): /note="Nucleotide may be methylated to form 5-methylcytosine"
cacgccattggctcacaagctggccctaccacaccaccaggaggaatatatattgggcaacgactaatagcaatagaaaaactcatgcttctttctcctggcatgacttcatgtatatgaca

SEQ ID NO: 1705 - DNA, 122 bp, Homo sapiens
  misc_feature (61)..(62): /note="This region represents a CpG dinucleotide"
  misc_feature (61)..(61): /note="Nucleotide may be methylated to form 5-methylcytosine"
acagcctcagacggtgtgagcagctgggggacccctcagatgtggctccctctgtccctccggcctgtgctggcctgcccctgcccccaggcctgtaagctgggcaggctgtggggcaggaa

SEQ ID NO: 1706 - DNA, 122 bp, Homo sapiens
  misc_feature (61)..(62): /note="This region represents a CpG dinucleotide"
  misc_feature (61)..(61): /note="Nucleotide may be methylated to form 5-methylcytosine"
gttccctctgcctcccctcccaaaagaacgcgtctgcggggacagatggccctgtgtcagcgtccctgtgtgatattgatgtgaacagcgagggaaggcgacgtgtctcatggctgtaaaaa

SEQ ID NO: 1707 - DNA, 122 bp, Homo sapiens
  misc_feature (61)..(62): /note="This region represents a CpG dinucleotide"
  misc_feature (61)..(61): /note="Nucleotide may be methylated to form 5-methylcytosine"
ggaaggtgaatgtgttgttggagcccaagcctggtggctgcagcagaggccagcaggggccgtctttatctaagagaaatgggtcttcattataggatttaagggagaaaaaagataagatt

SEQ ID NO: 1708 - DNA, 122 bp, Homo sapiens
  misc_feature (61)..(62): /note="This region represents a CpG dinucleotide"
  misc_feature (61)..(61): /note="Nucleotide may be methylated to form 5-methylcytosine"
gcagctgtccgggtgggggcgcccttctgagggcccgtgctgctgctgattgtaaagaagcgcctgacaatgcagacacggctgagtgcatcctgtgtaaccggcgcatgcgcgcccagagg

SEQ ID NO: 1709 - DNA, 122 bp, Homo sapiens
  misc_feature (61)..(62): /note="This region represents a CpG dinucleotide"
  misc_feature (61)..(61): /note="Nucleotide may be methylated to form 5-methylcytosine"
ttaggcaagctaagccatctacgtgttgggggcatggttgctggccctccggaaacccctcggatctgaagagcagacaagagcatctgtcatctcacagagatgccttgggatttgaatac

SEQ ID NO: 1710 - DNA, 122 bp, Homo sapiens
  misc_feature (61)..(62): /note="This region represents a CpG dinucleotide"
  misc_feature (61)..(61): /note="Nucleotide may be methylated to form 5-methylcytosine"
atgtgcactactcacaacagccagaaggtgggaacaacccagatgtccaatgtctgtccgcggaagaatagcaaacagtattcaactgtaaaatggaatgagacattgatacatgttacaac

SEQ ID NO: 1711 - DNA, 122 bp, Homo sapiens
  misc_feature (61)..(62): /note="This region represents a CpG dinucleotide"
  misc_feature (61)..(61): /note="Nucleotide may be methylated to form 5-methylcytosine"
gaggagagcgccctgtgagtgcctgacaaatggaggtatttctttccaggttttacaacccgatgtattttcagggaggaccttcctaggtacctccacttctcagtctctcaactcagcag

SEQ ID NO: 1712 - DNA, 122 bp, Homo sapiens
  misc_feature (61)..(62): /note="This region represents a CpG dinucleotide"
  misc_feature (61)..(61): /note="Nucleotide may be methylated to form 5-methylcytosine"
ctctctgatttatgtttcctctttaaattctgattcgggtattttgatgatctgctcaaacggctcttggctcaagtcattcagctgggcccaggtttgatagcaaatatgcttgcagaaaa

SEQ ID NO: 1713 - DNA, 122 bp, Homo sapiens
  misc_feature (61)..(62): /note="This region represents a CpG dinucleotide"
  misc_feature (61)..(61): /note="Nucleotide may be methylated to form 5-methylcytosine"
gagtgtagcaagggaaggagatcagctacagaagagattagagaagtcaacagggtttagcgatgcaacatcccttaggctatgaaaagagatcaatgtttgtagcaggattttattttgag

SEQ ID NO: 1714 - DNA, 122 bp, Homo sapiens
  misc_feature (61)..(62): /note="This region represents a CpG dinucleotide"
  misc_feature (61)..(61): /note="Nucleotide may be methylated to form 5-methylcytosine"
taggtaaccccaaagatctctcagccacattgtcatagagcaaaaataattcagaagccccgatttttgcctcaggtctctttctcctaacacagacaacttccagcacttcatttccttaa

SEQ ID NO: 1715 - DNA, 122 bp, Homo sapiens
  misc_feature (61)..(62): /note="This region represents a CpG dinucleotide"
  misc_feature (61)..(61): /note="Nucleotide may be methylated to form 5-methylcytosine"
ctccaggtgtctgagcagccacctagtgcagtgacccatcggggcttcccttgtggcctccgcggtccagaacctctcccaggtgtgatggatcctccaagccgctctttgagccgctgtcc

SEQ ID NO: 1716 - DNA, 122 bp, Homo sapiens
  misc_feature (61)..(62): /note="This region represents a CpG dinucleotide"
  misc_feature (61)..(61): /note="Nucleotide may be methylated to form 5-methylcytosine"
gggttggggcctgaggcaaggtgagaattagcccccagactgggcatctgccccctggtgcgggcccccatttttttttatcccgatcccttcaccctggattctgaatccccttccacccc

SEQ ID NO: 1717 - DNA, 122 bp, Homo sapiens
  misc_feature (61)..(62): /note="This region represents a CpG dinucleotide"
  misc_feature (61)..(61): /note="Nucleotide may be methylated to form 5-methylcytosine"
atggaattattcagagtctggtgttggctgatgggaatgcgtcatgataggaatctctcacgtgtatcactataagctgactgctttctagagcatagtgaagtcatcagctgagagatgag

SEQ ID NO: 1718 - DNA, 122 bp, Homo sapiens
  misc_feature (61)..(62): /note="This region represents a CpG dinucleotide"
  misc_feature (61)..(61): /note="Nucleotide may be methylated to form 5-methylcytosine"
ctgaagcattgcctttaacttcggaagaggcactagaactctcccagtcaaccaccactgcgctggttcctgcagtttggaggccctcccaagtgccctctggtggccttcaagacaagaca

SEQ ID NO: 1719 - DNA, 122 bp, Homo sapiens
  misc_feature (61)..(62): /note="This region represents a CpG dinucleotide"
  misc_feature (61)..(61): /note="Nucleotide may be methylated to form 5-methylcytosine"
accctagaaaaacagtattgtaagtaatcacttaaatcacttcctgttctctcctccatgcgcaccaccctcattcccctagcaagcactgtattagtccattctcacactgctatgaactg

SEQ ID NO: 1720 - DNA, 122 bp, Homo sapiens
  misc_feature (61)..(62): /note="This region represents a CpG dinucleotide"
  misc_feature (61)..(61): /note="Nucleotide may be methylated to form 5-methylcytosine"
ggcaggagaatggcatgaacccgggaggcggaccttgcccacgccagtgagctgagactgcgaaactgcactacagcccgggagacagagagagcctccgtctcaaaaaaaaaaaaaaaaaa

SEQ ID NO: 1721 - DNA, 122 bp, Homo sapiens
  misc_feature (61)..(62): /note="This region represents a CpG dinucleotide"
  misc_feature (61)..(61): /note="Nucleotide may be methylated to form 5-methylcytosine"
tctagggatttatttactgactttcagaaaagtaccgtaaagactgaagagttaatcactcgactcttaggatgtaaatgccatagaaacacccggcttcaggtcttcataaacatatctgt

SEQ ID NO: 1722 - DNA, 122 bp, Homo sapiens
  misc_feature (61)..(62): /note="This region represents a CpG dinucleotide"
  misc_feature (61)..(61): /note="Nucleotide may be methylated to form 5-methylcytosine"
gggctccgaccccatggcagcatctaggtgtgcatgtttacagctgaagccccagtggggcgtgtgttacagagtgctctttcagtttagccatccgtccataggcggcttgcattagtcag

SEQ ID NO: 1723 - DNA, 122 bp, Homo sapiens
  misc_feature (61)..(62): /note="This region represents a CpG dinucleotide"
  misc_feature (61)..(61): /note="Nucleotide may be methylated to form 5-methylcytosine"
taaggcataaagcatcatgctaagtattgtatgcatgtgtgcatgctgatggcaggggggcggggtgactttaagtctttataaggcaagagatgtttacaagaggaggtaggtgtccctaa

SEQ ID NO: 1724 - DNA, 122 bp, Homo sapiens
  misc_feature (61)..(62): /note="This region represents a CpG dinucleotide"
  misc_feature (61)..(61): /note="Nucleotide may be methylated to form 5-methylcytosine"
gcccaggagctctgcctcacgttgtataaatcacagcttcttgtggtccataagtcacggcgctagcgctgtgaaatgccaggccccagcctggagagccactccggccctctgtcatcttt

SEQ ID NO: 1725 - DNA, 122 bp, Homo sapiens
  misc_feature (61)..(62): /note="This region represents a CpG dinucleotide"
  misc_feature (61)..(61): /note="Nucleotide may be methylated to form 5-methylcytosine"
gaagatgagccagcggagctcaaagtccagccagcccatggtcaccaagcaggaagaagacggcactgagaggtgacaatgggctaatgctaacctcaaagaatgagttaggaagtgttgcc

SEQ ID NO: 1726 - DNA, 122 bp, Homo sapiens
  misc_feature (61)..(62): /note="This region represents a CpG dinucleotide"
  misc_feature (61)..(61): /note="Nucleotide may be methylated to form 5-methylcytosine"
gactcggcctctttcttctgcggccaccagatcgcgggatatcggagacttcgaacaatccgctggagtcctttacagtttaaaaacagaggaccggccgggcgcggtggctcacgcctgta

SEQ ID NO: 1727 - DNA, 122 bp, Homo sapiens
  misc_feature (61)..(62): /note="This region represents a CpG dinucleotide"
  misc_feature (61)..(61): /note="Nucleotide may be methylated to form 5-methylcytosine"
aaagttttcctcttcctgtgatccccacgatggtgaattcagcaacataaatagctcctgcgcacacgccaggcagggatggcgaagaacacacaagaaccctcactgcctccaccaaaagg

SEQ ID NO: 1728 - DNA, 122 bp, Homo sapiens
  misc_feature (61)..(62): /note="This region represents a CpG dinucleotide"
  misc_feature (61)..(61): /note="Nucleotide may be methylated to form 5-methylcytosine"
ggcacccgtctccacctccccagcagctgttccctgtcatgtcggtgcatttacaatgagcgccagtcgcctgtctccaggtggtcagaggttgaaatcccttttgaaaagttctttaaaaa

SEQ ID NO: 1729 - DNA, 122 bp, Homo sapiens
  misc_feature (61)..(62): /note="This region represents a CpG dinucleotide"
  misc_feature (61)..(61): /note="Nucleotide may be methylated to form 5-methylcytosine"
acctgggccaggctgggacgaggccgcgcgggagggcgcgctgggcggacgctggggccgcggagcccaaccgcccttgtcctggacgccccttggcggtccgcactggcgggtgccctctc

SEQ ID NO: 1730 - DNA, 122 bp, Homo sapiens
  misc_feature (61)..(62): /note="This region represents a CpG dinucleotide"
  misc_feature (61)..(61): /note="Nucleotide may be methylated to form 5-methylcytosine"
ctcatcgagccgtagccggctcctcagtacagtgacttgcacacaagctccaaggagccgcgcttatctcctctggccagcctggcgttgcaccgtttgtccgcctgctggggcctggtctg

SEQ ID NO: 1731 - DNA, 122 bp, Homo sapiens
  misc_feature (61)..(62): /note="This region represents a CpG dinucleotide"
  misc_feature (61)..(61): /note="Nucleotide may be methylated to form 5-methylcytosine"
actgtttaagacatataaattaatgtctattgcacaggcttggctgggtgactcacattgcggcttctatttctggtgggggagactcagatacatttgtcatgactccagtaagtggtaaa

SEQ ID NO: 1732 - DNA, 122 bp, Homo sapiens
  misc_feature (61)..(62): /note="This region represents a CpG dinucleotide"
  misc_feature (61)..(61): /note="Nucleotide may be methylated to form 5-methylcytosine"
agacccaggagggcctcactggtaagctcttcggccttggcgcgtcactgctaacccaggcgagcaccctcatgtctgtgcagcccgaggctgacacccagggccagcctgcccccagcaag

SEQ ID NO: 1733 - DNA, 122 bp, Homo sapiens
  misc_feature (61)..(62): /note="This region represents a CpG dinucleotide"
  misc_feature (61)..(61): /note="Nucleotide may be methylated to form 5-methylcytosine"
agagtaatatcacggtattcaatctcttcctttgtttatgccacaaatacttacacagcacgtgctatgtgctgtcactgctgtaggtgatacatcagcaaaaaagaaaaaattcctgcctc

SEQ ID NO: 1734 - DNA, 122 bp, Homo sapiens
  misc_feature (61)..(62): /note="This region represents a CpG dinucleotide"
  misc_feature (61)..(61): /note="Nucleotide may be methylated to form 5-methylcytosine"
tcggctctcggcagcagaagagggcccagcccctgcagagctgctgggggtcccaggcttcggccatgggtgggggtctggcggctcagggccactcagggcggcttggctggccctgggac

SEQ ID NO: 1735 - DNA, 122 bp, Homo sapiens
  misc_feature (61)..(62): /note="This region represents a CpG dinucleotide"
  misc_feature (61)..(61): /note="Nucleotide may be methylated to form 5-methylcytosine"
cacaattaaagctgtgttggttaggttgctttcaaagaagttttttttttttttttcctccgaagcctcctgaatctctcacatgctagttgagctttaatagggtggggagtaatggagaa

SEQ ID NO: 1736 - DNA, 122 bp, Homo sapiens
  misc_feature (61)..(62): /note="This region represents a CpG dinucleotide"
  misc_feature (61)..(61): /note="Nucleotide may be methylated to form 5-methylcytosine"
agctatggtttccatggtagagtagaagcatccaccatgtgtgacattcagcagatggggcgctgtgggtggcttggagcactctggttgtaactgaggcaggcacagtgtttaggaagcct

SEQ ID NO: 1737 - DNA, 122 bp, Homo sapiens
  misc_feature (61)..(62): /note="This region represents a CpG dinucleotide"
  misc_feature (61)..(61): /note="Nucleotide may be methylated to form 5-methylcytosine"
gggaggtgggggagagaaccgcagaatgcacgttaagcctgggctccctgcgggtccctgcgcccctctccaacctcgtcaccgccctcctccggcaccgctgcaggccagcggctcctcgg

SEQ ID NO: 1738 - DNA, 122 bp, Homo sapiens
  misc_feature (61)..(62): /note="This region represents a CpG dinucleotide"
  misc_feature (61)..(61): /note="Nucleotide may be methylated to form 5-methylcytosine"
aatcaaagtcacaatgagacaacgcacacccacgaggatgtctggaatccaaatgcaaagcgagtgttggctgttgggagagacgcgggacctgcacacactgctgggggcaggtgaagcgg

SEQ ID NO: 1739 - DNA, 122 bp, Homo sapiens
  misc_feature (61)..(62): /note="This region represents a CpG dinucleotide"
  misc_feature (61)..(61): /note="Nucleotide may be methylated to form 5-methylcytosine"
tatgcatccaggagctcatgtctgggatgagtgaacgctgccatctggccctgtgcttctcgtcactggctctgacatccccctaaaccaactccaggacaaagctgtacgtgcccggtgtg

SEQ ID NO: 1740 - DNA, 122 bp, Homo sapiens
  misc_feature (61)..(62): /note="This region represents a CpG dinucleotide"
  misc_feature (61)..(61): /note="Nucleotide may be methylated to form 5-methylcytosine"
atttaaatgctgtccatttccttgccgataataacttggaaggcaattttaatagccagacggatgctgaatggagagctctgtttaaactgtgtcttccataaatagaaacaaagtgcaga

SEQ ID NO: 1741 - DNA, 122 bp, Homo sapiens
  misc_feature (61)..(62): /note="This region represents a CpG dinucleotide"
  misc_feature (61)..(61): /note="Nucleotide may be methylated to form 5-methylcytosine"
gaaaatgttgatatgtttaaaaaattactcataaagccataggtaagtggtgcaacaacacgagtaacatttctatgtatgtgtctctatgtgtggatttaaatagaattacagtgtacact

SEQ ID NO: 1742 - DNA, 122 bp, Homo sapiens
  misc_feature (61)..(62): /note="This region represents a CpG dinucleotide"
  misc_feature (61)..(61): /note="Nucleotide may be methylated to form 5-methylcytosine"
taagcaacagctccggcttctgggcattttgtcgtgtttgctgaggagcccttacatcatcgcattccgtgttcacattccatgcagtgagtggaagtactgtttctcatgctgttgctgtg

SEQ ID NO: 1743 - DNA, 122 bp, Homo sapiens
  misc_feature (61)..(62): /note="This region represents a CpG dinucleotide"
  misc_feature (61)..(61): /note="Nucleotide may be methylated to form 5-methylcytosine"
ccaccactcaagtctttccacccaacaagactccggtgactgacccaggaagtgcaggcgcgttcatgtcactcccagccccgcccaggctgtacctcattctgcaggttccagaccccgtc

SEQ ID NO: 1744 - DNA, 122 bp, Homo sapiens
  misc_feature (61)..(62): /note="This region represents a CpG dinucleotide"
  misc_feature (61)..(61): /note="Nucleotide may be methylated to form 5-methylcytosine"
taccgcgcatgctggaggctggagcctacagtggctcacctcgctgctgcggttggtggccgcgagggtgactacagcgcagccagaatggtgaaaaggtggcagaataggttcgttatccc

SEQ ID NO: 1745 - DNA, 122 bp, Homo sapiens
  misc_feature (61)..(62): /note="This region represents a CpG dinucleotide"
  misc_feature (61)..(61): /note="Nucleotide may be methylated to form 5-methylcytosine"
gaaaatagcggggtcaacaggcagaggagcatcaaaaacctacgtttatatgcctgcgtgcgtgtaggagagaaggtagcaatgctagagggggaagggaagaaagaagagaggagaaacac

SEQ ID NO: 1746 - DNA, 122 bp, Homo sapiens
  misc_feature (61)..(62): /note="This region represents a CpG dinucleotide"
  misc_feature (61)..(61): /note="Nucleotide may be methylated to form 5-methylcytosine"
caagttatgtaatctctctgtacctcaaagaacttaactactctgtacaaatgagtttctcgatgtatattatgaaggtgagagcacttacatgtcataggattgttatgaagattgcatta

SEQ ID NO: 1747 - DNA, 122 bp, Homo sapiens
  misc_feature (61)..(62): /note="This region represents a CpG dinucleotide"
  misc_feature (61)..(61): /note="Nucleotide may be methylated to form 5-methylcytosine"
ggccctagcacataattagtggctagtattgttgcttttttgaatgatttatgagtcagtcggtctttgggtagtcatgaagaatatgacttctatacagaggaaatatttgccaggcccaa

SEQ ID NO: 1748 - DNA, 122 bp, Homo sapiens
  misc_feature (61)..(62): /note="This region represents a CpG dinucleotide"
  misc_feature (61)..(61): /note="Nucleotide may be methylated to form 5-methylcytosine"
tagtctgcaaaagccatgacgtggcactgaaatgaagccctgtgtagggttttactcagacgttagagaactggctgcccctgagtgctgtgctaactagggaaagaaaaaaaaccctgacc

SEQ ID NO: 1749 - DNA, 122 bp, Homo sapiens
  misc_feature (61)..(62): /note="This region represents a CpG dinucleotide"
  misc_feature (61)..(61): /note="Nucleotide may be methylated to form 5-methylcytosine"
gccctgggctggcagttgaggagaaaatgcagcagtggggttgagtagacacctcagccacggagtgacagtcattgtgttctaggtaccacctgaccgctctctgtctgctccttctgtgg

SEQ ID NO: 1750 - DNA, 122 bp, Homo sapiens
  misc_feature (61)..(62): /note="This region represents a CpG dinucleotide"
  misc_feature (61)..(61): /note="Nucleotide may be methylated to form 5-methylcytosine"
gacaaagaggcgggccgcgcacgctctcacgcttcggcagctcagatacctgttacctggcgttaattgcatttacagcgggagagagagcttgggctctcaccaggtaccaattgcacgtg

SEQ ID NO: 1751 - DNA, 122 bp, Homo sapiens
  misc_feature (61)..(62): /note="This region represents a CpG dinucleotide"
  misc_feature (61)..(61): /note="Nucleotide may be methylated to form 5-methylcytosine"
ctttaggtccttggtaagtgattttaaagtgtgtgttgcaaggtgaggaactggttgggacggggcagccttaatggcataataatttgggatacttgagtacaactaggtggagatcctgc

SEQ ID NO: 1752 - DNA, 122 bp, Homo sapiens
  misc_feature (61)..(62): /note="This region represents a CpG dinucleotide"
  misc_feature (61)..(61): /note="Nucleotide may be methylated to form 5-methylcytosine"
gacctggggctggagctggcggagctggtgccgcgcctgttccagttggattccaaaggccgcggggaccttctggaggtaaatctgcagaatggcattttgtttgtgaattctcggatcga

SEQ ID NO: 1753 - DNA, 122 bp, Homo sapiens
  misc_feature (61)..(62): /note="This region represents a CpG dinucleotide"
  misc_feature (61)..(61): /note="Nucleotide may be methylated to form 5-methylcytosine"
ccaaggccatgcaataggaagtgggggatctggcttttgaatgtagggtctgtccaatgtcgagtacacatggacaccaagaaaggaaaaatagtgtctccctctgtacctcccctaagagg

SEQ ID NO: 1754 - DNA, 122 bp, Homo sapiens
  misc_feature (61)..(62): /note="This region represents a CpG dinucleotide"
  misc_feature (61)..(61): /note="Nucleotide may be methylated to form 5-methylcytosine"
tggggtttcgccatgttggccaggctggtctcaaactcctggcctcaaatctgcccacctcggcaaaagtggtgttttaatacaagaattctgcatgttcaaggtggggaaaaggcttataa

SEQ ID NO: 1755 - DNA, 122 bp, Homo sapiens
  misc_feature (61)..(62): /note="This region represents a CpG dinucleotide"
  misc_feature (61)..(61): /note="Nucleotide may be methylated to form 5-methylcytosine"
gacaccttccccactgcctgcctacagcccaggagccccattgccacccttgcccaagaacgttggcacatctcctacctggtccccttgaagctgagctcagctgactctgtcacccttcc

SEQ ID NO: 1756 - DNA, 122 bp, Homo sapiens
  misc_feature (61)..(62): /note="This region represents a CpG dinucleotide"
  misc_feature (61)..(61): /note="Nucleotide may be methylated to form 5-methylcytosine"
tgcagctccctaagtttgccaaaagttgcagcccaagttctgaagtttctaattttaattcgtcagcactaggatactgagtaagaccctgagctaatgtaatagctccctctgatagataa

SEQ ID NO: 1757 - DNA, 122 bp, Homo sapiens
  misc_feature (61)..(62): /note="This region represents a CpG dinucleotide"
  misc_feature (61)..(61): /note="Nucleotide may be methylated to form 5-methylcytosine"
tgcaggtcctcgttcagggacatgaaatctccttgtcgtaggcggacttaaagtgtccttcgaggaagctcctgtccggagccaccacccagccagacagcagcatctgcaggtgcggtgcc

SEQ ID NO: 1758 - DNA, 122 bp, Homo sapiens
  misc_feature (61)..(62): /note="This region represents a CpG dinucleotide"
  misc_feature (61)..(61): /note="Nucleotide may be methylated to form 5-methylcytosine"
cagtgacaatccagggaccattccctgggaaggcaaattctggggcctgtgtaactgccacgtggcaaaggcacctaacttgcaggaagggcatctgagaaggcttcctggaggaagtgaca

SEQ ID NO: 1759 - DNA, 122 bp, Homo sapiens
  misc_feature (61)..(62): /note="This region represents a CpG dinucleotide"
  misc_feature (61)..(61): /note="Nucleotide may be methylated to form 5-methylcytosine"
acaaaagtatcgtttatatgatcaacaggcatcctacgctgtgtgcacacagcatatcaccgggagagacggcacggaaagatggccctgccctcaaggagctgcagtctgcccaggaaggc

SEQ ID NO: 1760 - DNA, 122 bp, Homo sapiens
  misc_feature (61)..(62): /note="This region represents a CpG dinucleotide"
  misc_feature (61)..(61): /note="Nucleotide may be methylated to form 5-methylcytosine"
acttcccgaaagaccatcatgataggagctgatactcacagatgccttagtgaatgattacgtctcaggatgccataaggaatacacagaagggtacaatctcaagcctgtgagtaatttta

SEQ ID NO: 1761 - DNA, 122 bp, Homo sapiens
  misc_feature (61)..(62): /note="This region represents a CpG dinucleotide"
  misc_feature (61)..(61): /note="Nucleotide may be methylated to form 5-methylcytosine"
gagtggaccaggtgattttcaaaagatgcttttacactcagagcagccaggctcccaaggcgaatgaaggatccacgaaggattcaaaatgtggggctggatggagagagaggatactgggc

SEQ ID NO: 1762 - DNA, 122 bp, Homo sapiens
  misc_feature (61)..(62): /note="This region represents a CpG dinucleotide"
  misc_feature (61)..(61): /note="Nucleotide may be methylated to form 5-methylcytosine"
gagaaagggagcctccctccactccgcacgcaacactcctcgtttatctcctttcctctccgtttgctccaggtgatcacaggttggaaagcttattatcttttgcaactacaggctactgg

SEQ ID NO: 1763 - DNA, 122 bp, Homo sapiens
  misc_feature (61)..(62): /note="This region represents a CpG dinucleotide"
  misc_feature (61)..(61): /note="Nucleotide may be methylated to form 5-methylcytosine"
tgtgagatccaagaaccgtctcttggggtctggatcaggacctctttccagtaacaccaacgccaccgagtgccagcccaataaatgaaagtcaacccttacaaatacacataattgtgaaa

SEQ ID NO: 1764 - DNA, 122 bp, Homo sapiens
  misc_feature (61)..(62): /note="This region represents a CpG dinucleotide"
  misc_feature (61)..(61): /note="Nucleotide may be methylated to form 5-methylcytosine"
acagctgtgcggtccggagccgccccccacccccgacgcgccgctcccagccccagcgggcgagactaatgccgggccacccctcaggacccccgcacctcccccagaccccacacggtcct

SEQ ID NO: 1765 - DNA, 122 bp, Homo sapiens
  misc_feature (61)..(62): /note="This region represents a CpG dinucleotide"
  misc_feature (61)..(61): /note="Nucleotide may be methylated to form 5-methylcytosine"
tcgccctgcagatcaggtccagcggactgcaggtccagcagctgccactgcagggtggcccgggccctctgctaggtctcccagctgcttccatccaccaggcatcttctcaagacacattt

SEQ ID NO: 1766 - DNA, 122 bp, Homo sapiens
  misc_feature (61)..(62): /note="This region represents a CpG dinucleotide"
  misc_feature (61)..(61): /note="Nucleotide may be methylated to form 5-methylcytosine"
tcttgctccttttcccaggccggcgcgctgcttgctgggaaatttagtttgggttcagatcgctaggggccggccaaagtgcgtaaaaactaccttcccatcaaccactgtggcaccggcgg

SEQ ID NO: 1767 - DNA, 122 bp, Homo sapiens
  misc_feature (61)..(62): /note="This region represents a CpG dinucleotide"
  misc_feature (61)..(61): /note="Nucleotide may be methylated to form 5-methylcytosine"
aaagctactgacttgaacaaaagcagtactgtacctgctcctggccgccagaaacaatgacgagcgccttgataagattagatgtaattttaaatgcagcagggacaaagactccctcccat

SEQ ID NO: 1768 - DNA, 122 bp, Homo sapiens
  misc_feature (61)..(62): /note="This region represents a CpG dinucleotide"
  misc_feature (61)..(61): /note="Nucleotide may be methylated to form 5-methylcytosine"
aagatcatgcctgaaggtgagtaacaggcgggctgggcatggccgaggcccagccgagcgcgggcttcttcctggcaccccagggccgggccgggtggagaggggcgaggccgaggctggtg

SEQ ID NO: 1769 - DNA, 122 bp, Homo sapiens
  misc_feature (61)..(62): /note="This region represents a CpG dinucleotide"
  misc_feature (61)..(61): /note="Nucleotide may be methylated to form 5-methylcytosine"
atacataaaaacataagactctgaataagattcagcctttaaaaacaaagcttgtgtttacgtggatgaacccggaagacgttcagtgaaataagccaggcacagaaaaacaaatacttcct

SEQ ID NO: 1770 - DNA, 122 bp, Homo sapiens
  misc_feature (61)..(62): /note="This region represents a CpG dinucleotide"
  misc_feature (61)..(61): /note="Nucleotide may be methylated to form 5-methylcytosine"
tgaaacaaagctttgaatggctcacccacttcagtcttaagcacttttcatcactaataacgaggagcctaacatccctaagcctcaggcttttgcttttatttccttatagttgttttatc

SEQ ID NO: 1771 - DNA, 122 bp, Homo sapiens
  misc_feature (61)..(62): /note="This region represents a CpG dinucleotide"
  misc_feature (61)..(61): /note="Nucleotide may be methylated to form 5-methylcytosine"
tcatctgtgttggttcttgctgggcttcttcactcttccccactggtctttctctaccctcgtttgtaaatcctgctttgctagacacagcaaaagtctcccggagtcaagggcattagctc

SEQ ID NO: 1772 - DNA, 122 bp, Homo sapiens
  misc_feature (61)..(62): /note="This region represents a CpG dinucleotide"
  misc_feature (61)..(61): /note="Nucleotide may be methylated to form 5-methylcytosine"
atttttaccaggaacggaagccagaagaccagttaaaaggctatcgcatggctggccaggcgtgcacgcctgtaattccagctacgtggaaggctgagaggcaggagaatcgcttgaacccg

SEQ ID NO: 1773 - DNA, 122 bp, Homo sapiens
  misc_feature (61)..(62): /note="This region represents a CpG dinucleotide"
  misc_feature (61)..(61): /note="Nucleotide may be methylated to form 5-methylcytosine"
ggtttcatttggcttcctttttctgagtctctatacctgttcagtgtacttagcttctagcgttctggtgcaactacctggcactcatttcttgctttctccttttgactgtctcttaaaca

SEQ ID NO: 1774 - DNA, 122 bp, Homo sapiens
  misc_feature (61)..(62): /note="This region represents a CpG dinucleotide"
  misc_feature (61)..(61): /note="Nucleotide may be methylated to form 5-methylcytosine"
gctgctttgttccttataaataggggtttcccagctagtctggagtgatgagtactaagacgggtcaaagtccaaagttgcagacatgtggttgtgtaagtatgaatgttgcatattctcag

SEQ ID NO: 1775 - DNA, 122 bp, Homo sapiens
  misc_feature (61)..(62): /note="This region represents a CpG dinucleotide"
  misc_feature (61)..(61): /note="Nucleotide may be methylated to form 5-methylcytosine"
agtctggtgggcagtggcgcaatcattggcttactgcagcttccaactcctcggctcaagcgatcctccagcctcagcctcccaagtagcaaggagtataggcacgtgctaatttttttaat

SEQ ID NO: 1776 - DNA, 122 bp, Homo sapiens
  misc_feature (61)..(62): /note="This region represents a CpG dinucleotide"
  misc_feature (61)..(61): /note="Nucleotide may be methylated to form 5-methylcytosine"
agcaagctccaagtcttcagtaaattcgatctaccagtccttgcaattaatccttgttggcgagctgcacagtatcttgataccctgtagggtcgtaaaagcacagtccattcacagagtgc

SEQ ID NO: 1777 - DNA, 122 bp, Homo sapiens
  misc_feature (61)..(62): /note="This region represents a CpG dinucleotide"
  misc_feature (61)..(61): /note="Nucleotide may be methylated to form 5-methylcytosine"
cccagatgattgagtatacacacatgacatcctgactttgttcacaagagtttctaatgtcgatactcttcacagagtcttcaccaagtaatcttcaagaactgagaaactttattaacatc

SEQ ID NO: 1778 - DNA, 122 bp, Homo sapiens
  misc_feature (61)..(62): /note="This region represents a CpG dinucleotide"
  misc_feature (61)..(61): /note="Nucleotide may be methylated to form 5-methylcytosine"
tgtttcccactgaaactcaataaccacaatcatttatgcataaacaaatgctttgcaaaccgtctcagccagatgaggcggcttcctggaagaaacaggcacattcgagaacctttactgtt

SEQ ID NO: 1779 - DNA, 122 bp, Homo sapiens
  misc_feature (61)..(62): /note="This region represents a CpG dinucleotide"
  misc_feature (61)..(61): /note="Nucleotide may be methylated to form 5-methylcytosine"
ggcgggtaggaggtccgctttaggggagcagacaaaggagccactactccctaagcctcacgcctgggcgcaagggttgtgtccacagcaatatgtgtgttggcgcgcgcggagcggggtag

SEQ ID NO: 1780 - DNA, 122 bp, Homo sapiens
  misc_feature (61)..(62): /note="This region represents a CpG dinucleotide"
  misc_feature (61)..(61): /note="Nucleotide may be methylated to form 5-methylcytosine"
cacagagagagggcaggggccagtgctgaggacagagtggtcaggagatcccaccccagacgcagggctgcagggaaggccaggctggctgggagttcagccagctccttctccagccactt

SEQ ID NO: 1781 - DNA, 122 bp, Homo sapiens
  misc_feature (61)..(62): /note="This region represents a CpG dinucleotide"
  misc_feature (61)..(61): /note="Nucleotide may be methylated to form 5-methylcytosine"
gttttcagatgggtaaatggagttgtctctttaaagtgccccggtcagttcaccacacgtcgggcagctgctgctttccaggctgccccgcgattcccaggctagaaggattgacaaggcga

SEQ ID NO: 1782 - DNA, 122 bp, Homo sapiens
  misc_feature (61)..(62): /note="This region represents a CpG dinucleotide"
  misc_feature (61)..(61): /note="Nucleotide may be methylated to form 5-methylcytosine"
tagcctattcagatctacttccagaataagacgattcttgaatcaaaaccataagtcagtcggcgctttcactgtgacaccatgcagagtcggaactctaactggtattaaatgcacaatta

SEQ ID NO: 1783 - DNA, 122 bp, Homo sapiens
  misc_feature (61)..(62): /note="This region represents a CpG dinucleotide"
  misc_feature (61)..(61): /note="Nucleotide may be methylated to form 5-methylcytosine"
tgaaataacttcttgtctggaagtcccaactaattgataggaagtcacaaacaggccactcgtgcaatcagggttatttgtcatggaaaagccacaggggaaaggtgatggcaaggaggctg

SEQ ID NO: 1784 - DNA, 122 bp, Homo sapiens
  misc_feature (61)..(62): /note="This region represents a CpG dinucleotide"
  misc_feature (61)..(61): /note="Nucleotide may be methylated to form 5-methylcytosine"
aattttcccctcctgtcctcctcctcctggcctcccgttttgattaattctgttctattgcgttcctttccaggggaggcctcagagccacttcaggctccagttcatgaaacagatcctca

SEQ ID NO: 1785 - DNA, 122 bp, Homo sapiens
  misc_feature (61)..(62): /note="This region represents a CpG dinucleotide"
  misc_feature (61)..(61): /note="Nucleotide may be methylated to form 5-methylcytosine"
atgtacacttaaggtttctccatgtcattttgttacttgctagctcatttatttttatcacggaataatattccattatatgaaaataccagtttctttagttacctactgaaggacatctt

SEQ ID NO: 1786 - DNA, 122 bp, Homo sapiens
  misc_feature (61)..(62): /note="This region represents a CpG dinucleotide"
  misc_feature (61)..(61): /note="Nucleotide may be methylated to form 5-methylcytosine"
ctcctgaggccgcatgaacaagcctgggggcggggggtggggtgaaaggctgcaccacagcgctcagggcccactgggtgtcgggctcctctctgatgtggcttgcactaatcagacgcagg

SEQ ID NO: 1787 - DNA, 122 bp, Homo sapiens
  misc_feature (61)..(62): /note="This region represents a CpG dinucleotide"
  misc_feature (61)..(61): /note="Nucleotide may be methylated to form 5-methylcytosine"
ctcaaaagtcaagtgagtgagctgagattccatgaactgggcctctcttccgggagtgctcgtaaactagatttcagctttccttctgaggtgagcagtccagggaggataataagcctgct

SEQ ID NO: 1788 - DNA, 122 bp, Homo sapiens
  misc_feature (61)..(62): /note="This region represents a CpG dinucleotide"
  misc_feature (61)..(61): /note="Nucleotide may be methylated to form 5-methylcytosine"
gaactgttgcataaataaacacagagtacctgaaacaacggaggtgatcattctgcctaccgagtgttggccaggccaagcttggagtgttgctcttattcttagggagtttatttttaagt

SEQ ID NO: 1789 - DNA, 122 bp, Homo sapiens
  misc_feature (61)..(62): /note="This region represents a CpG dinucleotide"
  misc_feature (61)..(61): /note="Nucleotide may be methylated to form 5-methylcytosine"
tttttttttttttttagaatattaccctaactagcattcccttctctaccgcattatctgcgtggggatgttatctttggcctggtgcctggttgttaacatttccccatctctcccagtca

SEQ ID NO: 1790 - DNA, 122 bp, Homo sapiens
  misc_feature (61)..(62): /note="This region represents a CpG dinucleotide"
  misc_feature (61)..(61): /note="Nucleotide may be methylated to form 5-methylcytosine"
cgggggtggtttccctaaaggaaaaccagggtgttatgttactggtaaggagtacctggacgctgggcagcaaagacattatatgccttagttctagtgagctgtttaggaaacagcttttg

SEQ ID NO: 1791 - DNA, 122 bp, Homo sapiens
  misc_feature (61)..(62): /note="This region represents a CpG dinucleotide"
  misc_feature (61)..(61): /note="Nucleotide may be methylated to form 5-methylcytosine"
aactgtggtttcagattcacccaagtttttcagtgactgaatatgtatccaaaccctgctcgtgttagggaagaatataatcactaaagcaacacaaatgatgaaagaggactgatgaaatg

SEQ ID NO: 1792 - DNA, 122 bp, Homo sapiens
  misc_feature (61)..(62): /note="This region represents a CpG dinucleotide"
  misc_feature (61)..(61): /note="Nucleotide may be methylated to form 5-methylcytosine"
taagtccgtgggctttgcttcctcttggccctgggtttgtgtcccagccatgttaggtagcgtattttgaatgtgggcaagacagaaggatggcaaggaagggttggataaaagagggtgtg

SEQ ID NO: 1793 - DNA, 122 bp, Homo sapiens
  misc_feature (61)..(62): /note="This region represents a CpG dinucleotide"
  misc_feature (61)..(61): /note="Nucleotide may be methylated to form 5-methylcytosine"
gatgcgaattgccgcctggaccaaattgcagagaaagctaagaatagtaggtaggacccacgaaggcttccaagcctttaaatggaccatctgggtgagatgacagctcaaaatgggatcaa

SEQ ID NO: 1794 - DNA, 122 bp, Homo sapiens
  misc_feature (61)..(62): /note="This region represents a CpG dinucleotide"
  misc_feature (61)..(61): /note="Nucleotide may be methylated to form 5-methylcytosine"
ttaaattttaaagcattttgttttacgcaatcaattcatctttagaaatgcataagagaacgtaaggattgtcatccttcattttacagaggaaagtgataataatcatttgctgagtcatc

SEQ ID NO: 1795 - DNA, 122 bp, Homo sapiens
  misc_feature (61)..(62): /note="This region represents a CpG dinucleotide"
  misc_feature (61)..(61): /note="Nucleotide may be methylated to form 5-methylcytosine"
cagctagttttggactgacctagagtcctttctcttttgcagactggcatcgtgctgaatcggccggttttgagaggggaagatggggacaaagccgctccacctcccatgtcggcacaggt

SEQ ID NO: 1796 - DNA, 122 bp, Homo sapiens
  misc_feature (61)..(62): /note="This region represents a CpG dinucleotide"
  misc_feature (61)..(61): /note="Nucleotide may be methylated to form 5-methylcytosine"
tatacccaccatctcccaaatggcagagcaaaataaaagcaaaaccttaccaatatgccacgagttttgaggcagcatcattatgggtctatctcttcctgagtcctgatgtaactcctggg

SEQ ID NO: 1797 - DNA, 122 bp, Homo sapiens
  misc_feature (61)..(62): /note="This region represents a CpG dinucleotide"
  misc_feature (61)..(61): /note="Nucleotide may be methylated to form 5-methylcytosine"
ccacttcctccatttaataaatgtttattcagagtctatttttctgccagtgccatgctacgcactaggcaccagggatataaatatgaataggactgacataattcctgctttcaaaaagc

SEQ ID NO: 1798 - DNA, 122 bp, Homo sapiens
  misc_feature (61)..(62): /note="This region represents a CpG dinucleotide"
  misc_feature (61)..(61): /note="Nucleotide may be methylated to form 5-methylcytosine"
ggttagtccagcaagaatgcacctacccttaatgtctcctcttagtaattttccatctatcgacccccttactctgtaccttggctataaatccccacttccccttgttgagcccagtctct

SEQ ID NO: 1799 - DNA, 122 bp, Homo sapiens
  misc_feature (61)..(62): /note="This region represents a CpG dinucleotide"
  misc_feature (61)..(61): /note="Nucleotide may be methylated to form 5-methylcytosine"
ttaaagagacaactgggtctcctattttctattttccatttccaaaaacaataaataaaacgaagagtagtgtgcaaagtattagtagtctcagtgttcagacatggccaagttttaggggt

SEQ ID NO: 1800 - DNA, 122 bp, Homo sapiens
  misc_feature (61)..(62): /note="This region represents a CpG dinucleotide"
  misc_feature (61)..(61): /note="Nucleotide may be methylated to form 5-methylcytosine"
tggggagcaggaagtgaaaggctgcagttataaagcgctgcttaaggcggtctctcctggcgcctctgaacttgatcagatgttctatttcctacagagagatggcggccaggctgtgaggc

SEQ ID NO: 1801 - DNA, 122 bp, Homo sapiens
  misc_feature (61)..(62): /note="This region represents a CpG dinucleotide"
  misc_feature (61)..(61): /note="Nucleotide may be methylated to form 5-methylcytosine"
cttcatataaatctacatgtcaaaaaataatcctttgccagatcacgtatccagatttttcgtttggaaaatacgaacattactactacagaatatcaaactgaatacagccctgtcctgag

SEQ ID NO: 1802 - DNA, 122 bp, Homo sapiens
  misc_feature (61)..(62): /note="This region represents a CpG dinucleotide"
  misc_feature (61)..(61): /note="Nucleotide may be methylated to form 5-methylcytosine"
ccggcgcggatcttgtgcgacaggctggagactttggcgcgcagctgggtcgtgggtctccggaacggccccagcagcctccactcgcggaaggcgctgggtggctttcgacggctggcgac

SEQ ID NO: 1803 - DNA, 122 bp, Homo sapiens
  misc_feature (61)..(62): /note="This region represents a CpG dinucleotide"
  misc_feature (61)..(61): /note="Nucleotide may be methylated to form 5-methylcytosine"
cttgcaccgtgcatcgctctgagtgaggcgacttaaatgcgcgatgttaccgttttcagccgtgaccgtagcactcggtctttgactgtagactgttgtgtctacatagtgctagtttgtat

SEQ ID NO: 1804 - DNA, 122 bp, Homo sapiens
  misc_feature (61)..(62): /note="This region represents a CpG dinucleotide"
  misc_feature (61)..(61): /note="Nucleotide may be methylated to form 5-methylcytosine"
tctgaggttcctcatttccggttgaagaaagtacagaatataaaaatgtggctatctctccgttcctatcttaaggtagaatgggagtgataaaagtagctttaacatgctggccctttctg

SEQ ID NO: 1805 - DNA, 122 bp, Homo sapiens
  misc_feature (61)..(62): /note="This region represents a CpG dinucleotide"
  misc_feature (61)..(61): /note="Nucleotide may be methylated to form 5-methylcytosine"
gctctgtgtcgggacggaaacaatggggtcatttggtggactcagaaaaggaactctaaacggagggaggaaagtagcagagcctcagtgagagcagctgcccctccatcccgtcagcacct

SEQ ID NO: 1806 - DNA, 122 bp, Homo sapiens
  misc_feature (61)..(62): /note="This region represents a CpG dinucleotide"
  misc_feature (61)..(61): /note="Nucleotide may be methylated to form 5-methylcytosine"
atgctctgtgctgtgtgcgctgtgctgtgtgcgctgtgctgtgtgctctgtgctgtgctccgtgcgctgtgtgctgcgcgtgtgtgctctgtgctgtgctccgtgcgctgtgtgctttgttg

SEQ ID NO: 1807 - DNA, 122 bp, Homo sapiens
  misc_feature (61)..(62): /note="This region represents a CpG dinucleotide"
  misc_feature (61)..(61): /note="Nucleotide may be methylated to form 5-methylcytosine"
cttgaattttattatcaagtagctaaatggaaaatcagtctcccaggattcttagaggggcgtaggagagacctctgaacgtattctatctcattacagagctggctcagaagcccaagacc

SEQ ID NO: 1808 - DNA, 122 bp, Homo sapiens
  misc_feature (61)..(62): /note="This region represents a CpG dinucleotide"
  misc_feature (61)..(61): /note="Nucleotide may be methylated to form 5-methylcytosine"
agagactctttgccatgtacctgttgaattttttttctgctaggttgctgcctccttcttcggcactagagggcaacataagtccaggttttcctcagctccaataaaggatcagagtgggg

SEQ ID NO: 1809 - DNA, 122 bp, Homo sapiens
  misc_feature (61)..(62): /note="This region represents a CpG dinucleotide"
  misc_feature (61)..(61): /note="Nucleotide may be methylated to form 5-methylcytosine"
tgaattgcatatcagcaaggctctccagtgtgagtgagacttgaccagtttgtaacttcccgtgtacggaaatccttctaacatgcaaatctgaccctttcattctcctgcttaaacctctt

SEQ ID NO: 1810 - DNA, 122 bp, Homo sapiens
  misc_feature (61)..(62): /note="This region represents a CpG dinucleotide"
  misc_feature (61)..(61): /note="Nucleotide may be methylated to form 5-methylcytosine"
cctttggggtgaatcatgcttccagactgctctcttttgacttagcagttagtttgtcagcgtatagcctggatcacacggaaggctggaataagagaattttaccaggaccactctttgat

SEQ ID NO: 1811 - DNA, 122 bp, Homo sapiens
  misc_feature (61)..(62): /note="This region represents a CpG dinucleotide"
  misc_feature (61)..(61): /note="Nucleotide may be methylated to form 5-methylcytosine"
cgctcctgggtcgggtggctcggggggagcccgcggccgagggaccccttcctcctcggccgcccccccacctgggaaggctccctctggggaaaaaggggtctcggtctcgtagccgctgt

SEQ ID NO: 1812 - DNA, 122 bp, Homo sapiens
  misc_feature (61)..(62): /note="This region represents a CpG dinucleotide"
  misc_feature (61)..(61): /note="Nucleotide may be methylated to form 5-methylcytosine"
gcaagaggcagataccagtgtcttcacattatttccagaggcaagaagtcctatagtttacgctgagtcacagagttaacagatccacatggctacccaaatagaaacagtgtaactggctt

SEQ ID NO: 1813 - DNA, 122 bp, Homo sapiens
  misc_feature (61)..(62): /note="This region represents a CpG dinucleotide"
  misc_feature (61)..(61): /note="Nucleotide may be methylated to form 5-methylcytosine"
agtctaatattctacattacccttacattgcttctgtaataataaaaagaaagaatgacacggagagttttaataaaccactgatgtccaggccttaccccagataaattttaaaaggttga

SEQ ID NO: 1814 - DNA, 122 bp, Homo sapiens
  misc_feature (61)..(62): /note="This region represents a CpG dinucleotide"
  misc_feature (61)..(61): /note="Nucleotide may be methylated to form 5-methylcytosine"
gtcagagtgtccagacttgttttcagttggagtgaaactaccctcattacctctgtgactcgagcaggttagacagtgagccaaaagagcctggtggacatactggaaaaagcagaggaaat

SEQ ID NO: 1815 - DNA, 122 bp, Homo sapiens
  misc_feature (61)..(62): /note="This region represents a CpG dinucleotide"
  misc_feature (61)..(61): /note="Nucleotide may be methylated to form 5-methylcytosine"
cttgtctgccttaccagatatgagacgtgatgcccttaagtctagtgaaaaccatctacacgataattatgagtgaagataataatggtaagcagtagaagcttactcttcatattcacatt

SEQ ID NO: 1816 - DNA, 122 bp, Homo sapiens
  misc_feature (61)..(62): /note="This region represents a CpG dinucleotide"
  misc_feature (61)..(61): /note="Nucleotide may be methylated to form 5-methylcytosine"
cctagcgagcttttaaatcttccagggcccaaaccacattgtgaaccaattaaatcaggacgtctggggctagaagccagtcatcagtatctttttttaagctcccaaagtgattccaatgt

SEQ ID NO: 1817 - DNA, 122 bp, Homo sapiens
  misc_feature (61)..(62): /note="This region represents a CpG dinucleotide"
  misc_feature (61)..(61): /note="Nucleotide may be methylated to form 5-methylcytosine"
aaagcaaaatctttgtaaatctcactctattcatttataacatagggattattattacatcgtgatgtgactaaatagtttaccttgcacaaagtttttagagcaggatctgaaacaaatta

SEQ ID NO: 1818 - DNA, 122 bp, Homo sapiens
  misc_feature (61)..(62): /note="This region represents a CpG dinucleotide"
  misc_feature (61)..(61): /note="Nucleotide may be methylated to form 5-methylcytosine"
taaattatgccatgaggaaacacaagcaatgtggatgagctggccatctttgtttgtaaacgaggaacacaggctgagaatgcccagccacacatgccatcagcagtggcaccagtgagaga

SEQ ID NO: 1819 - DNA, 122 bp, Homo sapiens
  misc_feature (61)..(62): /note="This region represents a CpG dinucleotide"
  misc_feature (61)..(61): /note="Nucleotide may be methylated to form 5-methylcytosine"
ctgcctccaggagatacagtcttctgttctttttgtcatagttgtttatttttcatgaatcgctgtttttgagcatagggcacttacctctttctgtgtccccagccctaccacagtgccag

SEQ ID NO: 1820 - DNA, 122 bp, Homo sapiens
  misc_feature (61)..(62): /note="This region represents a CpG dinucleotide"
  misc_feature (61)..(61): /note="Nucleotide may be methylated to form 5-methylcytosine"
tgggaatgcatgccgtttctgctgcctgccctgaacacagtccatcaaccacagccccagcgcccccaccacccagggtaggggatacagacaaacctgcttggagctcagggtctcactcc

SEQ ID NO: 1821 - DNA, 122 bp, Homo sapiens
  misc_feature (61)..(62): /note="This region represents a CpG dinucleotide"
  misc_feature (61)..(61): /note="Nucleotide may be methylated to form 5-methylcytosine"
gccaaagtaaacgaacctgaatctgctctgctggaacatggataatgtggggcggcctgtcgccatggtgatgcaccgcgttgctctcctgttcataaatggcatcacgttctggctgagga

SEQ ID NO: 1822 - DNA, 122 bp, Homo sapiens
  misc_feature (61)..(62): /note="This region represents a CpG dinucleotide"
  misc_feature (61)..(61): /note="Nucleotide may be methylated to form 5-methylcytosine"
tggtggggagtggggagggagcctgtggctgcctggtggggagcaccctatggggaggcacgtcctaggaggaggagtgtcctagagggagggcccggcacctgccagggcccttgggtggg

SEQ ID NO: 1823 - DNA, 122 bp, Homo sapiens
  misc_feature (61)..(62): /note="This region represents a CpG dinucleotide"
  misc_feature (61)..(61): /note="Nucleotide may be methylated to form 5-methylcytosine"
cacatacatgaatcctctcccacccatccgccccccaccctacacccacgcacccacacacgtgcacgaactctcccaaactgacattgcccccagccctcctgggcacaagaatacatata

SEQ ID NO: 1824 - DNA, 122 bp, Homo sapiens
  misc_feature (61)..(62): /note="This region represents a CpG dinucleotide"
  misc_feature (61)..(61): /note="Nucleotide may be methylated to form 5-methylcytosine"
catccctgatcatgcttggtatacagatggctccagcaagggaaacccctgtacttggaccgctgttgctatatgaccacaaactgatacaatctggcttgatataagtacccatcacagta

SEQ ID NO: 1825 - DNA, 122 bp, Homo sapiens
  misc_feature (61)..(62): /note="This region represents a CpG dinucleotide"
  misc_feature (61)..(61): /note="Nucleotide may be methylated to form 5-methylcytosine"
gagcaaaggctagcatgacctttaagtcctcctttaagagtactgaatttctgccaggagcgtggcttgttcctcaagtgtcgctaggtgaattgttattagcaaggagggatgaaattgcg

SEQ ID NO: 1826 - DNA, 122 bp, Homo sapiens
  misc_feature (61)..(62): /note="This region represents a CpG dinucleotide"
  misc_feature (61)..(61): /note="Nucleotide may be methylated to form 5-methylcytosine"
gctccacgtccgtatttgcatgtggccctttcctgctgtgaaaatgtctttttgcttttgcgtttactttgtggtgatccaggagcctttggaatttgagggtagatatacccgaagataga

SEQ ID NO: 1827 - DNA, 122 bp, Homo sapiens
  misc_feature (61)..(62): /note="This region represents a CpG dinucleotide"
  misc_feature (61)..(61): /note="Nucleotide may be methylated to form 5-methylcytosine"
tcatgcccctcggataacaaataaccagcattctctctctcctgggtgctttggtgggaacggaacggtgtcacccctcaccgagtggctagaccaggaggagggggaggctggcggagagt

SEQ ID NO: 1828 - DNA, 122 bp, Homo sapiens
  misc_feature (61)..(62): /note="This region represents a CpG dinucleotide"
  misc_feature (61)..(61): /note="Nucleotide may be methylated to form 5-methylcytosine"
tccccatgtcatgaggccagaggaaggggaagcgagaatccctacactgggccatccacacgcaggagcagaacagacactgtgctcagagttgcagggtcaaaataacaaacactgtccca

SEQ ID NO: 1829 - DNA, 122 bp, Homo sapiens
  misc_feature (61)..(62): /note="This region represents a CpG dinucleotide"
  misc_feature (61)..(61): /note="Nucleotide may be methylated to form 5-methylcytosine"
aaatccttaccaagaaccactttaccagttattttctcatcactcaatgattctgagttacgttcatttgtattttgctatgtgaatagtactaaaatgtttttaccctgcctactttgcta

SEQ ID NO: 1830 - DNA, 122 bp, Homo sapiens
  misc_feature (61)..(62): /note="This region represents a CpG dinucleotide"
  misc_feature (61)..(61): /note="Nucleotide may be methylated to form 5-methylcytosine"
ctttatgttctgtgaattttacctcattttttttagaaaaagacaataaaaagaatgttgcgtgtgctgagcaaggagtctgacagataaaagatgcctcaggaagtgtttatatgcacaaa

SEQ ID NO: 1831 - DNA, 122 bp, Homo sapiens
  misc_feature (61)..(62): /note="This region represents a CpG dinucleotide"
  misc_feature (61)..(61): /note="Nucleotide may be methylated to form 5-methylcytosine"
atgcggaaggatgagctgcagtactgtgccttaagcaatgggcacgcatgcctggaaaaccgcagccagggggaagcattgcaaagagaaagggaaagtgtgtctggaggaagaaccaggaa

SEQ ID NO: 1832 - DNA, 122 bp, Homo sapiens
  misc_feature (61)..(62): /note="This region represents a CpG dinucleotide"
  misc_feature (61)..(61): /note="Nucleotide may be methylated to form 5-methylcytosine"
tcctctccacgtatgctcttcacaggtctctccagcagggtagtcagatatcttacatagcggcttagggctcccaaaagcaaacattccaagaggaagcagaagctgccagtccttttaaa

SEQ ID NO: 1833 - DNA, 122 bp, Homo sapiens
  misc_feature (61)..(62): /note="This region represents a CpG dinucleotide"
  misc_feature (61)..(61): /note="Nucleotide may be methylated to form 5-methylcytosine"
aatgttctgtctaccacagccaggtttgacagaacagcttgaaactgggaagtttcatcccgcttgcataacagagtggtttgaaaattgcactgtggccaagtagctgtccaaaatgtgaa

SEQ ID NO: 1834 - DNA, 122 bp, Homo sapiens
  misc_feature (61)..(62): /note="This region represents a CpG dinucleotide"
  misc_feature (61)..(61): /note="Nucleotide may be methylated to form 5-methylcytosine"
aaactaaaggttgatgagctgatttcatctgctatatttcatttcaaagcagccatggaacgagactctatgtttgcatttgcctacacagacctggccaacatgtacgctgaaggaggcca

SEQ ID NO: 1835 - DNA, 122 bp, Homo sapiens
  misc_feature (61)..(62): /note="This region represents a CpG dinucleotide"
  misc_feature (61)..(61): /note="Nucleotide may be methylated to form 5-methylcytosine"
aacaaatgccccttgtgataagtcgggccccacgttccattgggtcctgccaagctctcgcgagacttgggcctttcccagtgcaaaggttttaacacctggtttttacttcccgcccgcca

SEQ ID NO: 1836 - DNA, 122 bp, Homo sapiens
  misc_feature (61)..(62): /note="This region represents a CpG dinucleotide"
  misc_feature (61)..(61): /note="Nucleotide may be methylated to form 5-methylcytosine"
tctctccaccagacgccaagccaggcacagcggagcacggatgggtccaacacagtccagcgcccccggcagtgtcagcgcacacccgcgtgggagctggggaaggcaggcaaccacagttt

SEQ ID NO: 1837 - DNA, 122 bp, Homo sapiens
  misc_feature (61)..(62): /note="This region represents a CpG dinucleotide"
  misc_feature (61)..(61): /note="Nucleotide may be methylated to form 5-methylcytosine"
ccgcctggggagaccgggctctggaggcttttggcttcccgctttcttcaggctttctctcgctcgttggcgcaattcccaaccgctccctgactctggctccctcatttctgcccggacct

SEQ ID NO: 1838 - DNA, 122 bp, Homo sapiens
  misc_feature (61)..(62): /note="This region represents a CpG dinucleotide"
  misc_feature (61)..(61): /note="Nucleotide may be methylated to form 5-methylcytosine"
tctatgaagtcattcttccccatttaaacacataagagtctgccttacatcagaatgagacgtaactatcccctgttagtgtggttttaaatcttgaatctaacagctaatgaaagaaaaaa

SEQ ID NO: 1839 - DNA, 122 bp, Homo sapiens
  misc_feature (61)..(62): /note="This region represents a CpG dinucleotide"
  misc_feature (61)..(61): /note="Nucleotide may be methylated to form 5-methylcytosine"
ttggggccttcttagggaggaggccgtgccagcccgggagccgggggcgtggggaggctgcgctttgctggcttccaggaagacgcacacgctgtgtgtggccagagaccggggcacctctt

SEQ ID NO: 1840 - DNA, 122 bp, Homo sapiens
  misc_feature (61)..(62): /note="This region represents a CpG dinucleotide"
  misc_feature (61)..(61): /note="Nucleotide may be methylated to form 5-methylcytosine"
cctccatgaaaaccccaaaggcccaggttcagagagcttcctggttgccgaacatgtagacgttccgtgctccttcccacgtgctttgccctatctcttcatccggttgttcatctgtattg

SEQ ID NO: 1841 - DNA, 122 bp, Homo sapiens
  misc_feature (61)..(62): /note="This region represents a CpG dinucleotide"
  misc_feature (61)..(61): /note="Nucleotide may be methylated to form 5-methylcytosine"
ctaaacagaaattattttccttgattagccatggcacattcgcccttcttaggtggacagcgtgttttgatacgaaggtgatgggttacaggtgctgggtttctccacatgggcagtttctc

SEQ ID NO: 1842 - DNA, 122 bp, Homo sapiens
  misc_feature (61)..(62): /note="This region represents a CpG dinucleotide"
  misc_feature (61)..(61): /note="Nucleotide may be methylated to form 5-methylcytosine"
agttaaatctcaggaggaaaagaaaatacgaggacaacaaagagaggaagtggcctgggccggcctacccggtgggtcttgtcctgccccccaactaccctggctggccccacaggggccgc

SEQ ID NO: 1843 - DNA, 122 bp, Homo sapiens
  misc_feature (61)..(62): /note="This region represents a CpG dinucleotide"
  misc_feature (61)..(61): /note="Nucleotide may be methylated to form 5-methylcytosine"
cacctctgtctccacaaatggcttgtttatctcactatttgctcacgtagctatttggcacgaggttcacagaccttgcctcctgacagtcagggtaccagccccacctaacatgggagggt

SEQ ID NO: 1844 - DNA, 122 bp, Homo sapiens
  misc_feature (61)..(62): /note="This region represents a CpG dinucleotide"
  misc_feature (61)..(61): /note="Nucleotide may be methylated to form 5-methylcytosine"
cgcccgctgcgccgctccgacggcccggggactgcgggaaccctgcctcccacgcgggcccgaaccacccccgggagccacccgcccgctcacccatccgtgcccgcagctctctcaaggat

SEQ ID NO: 1845 - DNA, 122 bp, Homo sapiens
  misc_feature (61)..(62): /note="This region represents a CpG dinucleotide"
  misc_feature (61)..(61): /note="Nucleotide may be methylated to form 5-methylcytosine"
agtgactcaaatgatgtagagccaagcagccccagaagcctacctgccaagagccagagtcggtggtgaggattgtggggatgggaagggaagtggcttgagacacagagcaaataggtggg

SEQ ID NO: 1846 - DNA, 122 bp, Homo sapiens
  misc_feature (61)..(62): /note="This region represents a CpG dinucleotide"
  misc_feature (61)..(61): /note="Nucleotide may be methylated to form 5-methylcytosine"
tgggaattgagaatggagtgctcttgctggctggggttgtggtagccctggcagaggtgccgttgtgcaccagagtagaagctgagcctgatgcagagcctgaggccgaggtgacattgtgg

SEQ ID NO: 1847 - DNA, 122 bp, Homo sapiens
  misc_feature (61)..(62): /note="This region represents a CpG dinucleotide"
  misc_feature (61)..(61): /note="Nucleotide may be methylated to form 5-methylcytosine"
tttaccaattcaccaaaagtgtgctaataggctcacctctcactcttgttaagttaatatcgcaagtcagcaacaaagcatggaaatgcacaaaactcatactgaaaggagagagacacgtg

SEQ ID NO: 1848 - DNA, 122 bp, Homo sapiens
  misc_feature (61)..(62): /note="This region represents a CpG dinucleotide"
  misc_feature (61)..(61): /note="Nucleotide may be methylated to form 5-methylcytosine"
tttcctaaaggtgacagatctcggtgaacagtcaagctttactgagtgcaagacagtccacgcgcctataagattaaggtacagtgctaaggacggggatcttaattacctgtctttccaca

SEQ ID NO: 1849 - DNA, 122 bp, Homo sapiens
  misc_feature (61)..(62): /note="This region represents a CpG dinucleotide"
  misc_feature (61)..(61): /note="Nucleotide may be methylated to form 5-methylcytosine"
tgctttcttttgttaagccaagacttgagagaaacctggcagccgtctctaagtctggcacgatttcacctcagacgcactcggttggtttggatgttgagggagaccgcacatgagagagg

SEQ ID NO: 1850 - DNA, 122 bp, Homo sapiens
  misc_feature (61)..(62): /note="This region represents a CpG dinucleotide"
  misc_feature (61)..(61): /note="Nucleotide may be methylated to form 5-methylcytosine"
gctatatttaaccagtgttctcagcaagtcaagcctgtcaacagctgagaagtttggagccggctttactcagttcctaagcagctgggttatcagtggatacagcgctgctcaccctgtaa

SEQ ID NO: 1851 - DNA, 122 bp, Homo sapiens
  misc_feature (61)..(62): /note="This region represents a CpG dinucleotide"
  misc_feature (61)..(61): /note="Nucleotide may be methylated to form 5-methylcytosine"
aatgaaaagtcttagtattaaattattatattctgacattatgtctccaggttagctccacgcagaggcagctgacaaacacagcttcagcaaaagtcatgatccatttatggttcactgtc

SEQ ID NO: 1852 - DNA, 122 bp, Homo sapiens
  misc_feature (61)..(62): /note="This region represents a CpG dinucleotide"
  misc_feature (61)..(61): /note="Nucleotide may be methylated to form 5-methylcytosine"
ccataagctggggttctaggatgtccattcttagttgagtctcatttcctgtcatatcgacgtcaaaggcccaagaccttcctcctccccttgagcaaacaagccacgccctgcaccaaagt

SEQ ID NO: 1853 - DNA, 122 bp, Homo sapiens
  misc_feature (61)..(62): /note="This region represents a CpG dinucleotide"
  misc_feature (61)..(61): /note="Nucleotide may be methylated to form 5-methylcytosine"
aatttgtataactggctggtttatgaccaaaaatgctatttgcctaatgagcatttagaacgtggaaactgattttgaagcttgtaacagaaataggataaaataaaaataaaataaaatga

SEQ ID NO: 1854 - DNA, 122 bp, Homo sapiens
  misc_feature (61)..(62): /note="This region represents a CpG dinucleotide"
  misc_feature (61)..(61): /note="Nucleotide may be methylated to form 5-methylcytosine"
accacttgacagcagaatggtgtgtagagcctatactgctcctaggtcagcccatctgggcgtgaggatcactgtgaagcccgcagttggcttcagcctcttatttcctaccaataaactct

SEQ ID NO: 1855 - DNA, 122 bp, Homo sapiens
  misc_feature (61)..(62): /note="This region represents a CpG dinucleotide"
  misc_feature (61)..(61): /note="Nucleotide may be methylated to form 5-methylcytosine"
tataagagaaaggtagagggctacttgagactcagacccacatggaataagaccatttgacgatggaggcatggagcttgaagtcacttagcccctaggcaaagaacacctgaagtcaccag

SEQ ID NO: 1856 - DNA, 122 bp, Homo sapiens
  misc_feature (61)..(62): /note="This region represents a CpG dinucleotide"
  misc_feature (61)..(61): /note="Nucleotide may be methylated to form 5-methylcytosine"
gaacttaggcaaaatattcatcgcaaagtctctagcgtcatatttttctcacccaaattacgtttccacgagattatttatatatagttggtctatctctgcagtccttgaaggtgaagttg

SEQ ID NO: 1857 - DNA, 122 bp, Homo sapiens
  misc_feature (61)..(62): /note="This region represents a CpG dinucleotide"
  misc_feature (61)..(61): /note="Nucleotide may be methylated to form 5-methylcytosine"
aggagcaagaacccaattaagcagctcagctgcacaggcctgagtgtagcgtggcagacccggggcgccctagcacgccccctttgactctgcctggctgagcttcctttaagctctctgtc

SEQ ID NO: 1858 - DNA, 122 bp, Homo sapiens
  misc_feature (61)..(62): /note="This region represents a CpG dinucleotide"
  misc_feature (61)..(61): /note="Nucleotide may be methylated to form 5-methylcytosine"
ctttcactccctctctctccagcatttatttcgaccctaattggtttccctcttcttcgacgtatctagtggataatgcacaccttccctgagtcagagcctgcaaaaagcaaaggaacgaa

SEQ ID NO: 1859 - DNA, 122 bp, Homo sapiens
  misc_feature (61)..(62): /note="This region represents a CpG dinucleotide"
  misc_feature (61)..(61): /note="Nucleotide may be methylated to form 5-methylcytosine"
ccagaggcgctctccgacctgcagcccccagggctcctggccctttcccgtttgccactgcggcttgttgtcaagaaatggaacttcagaaaacccccagatatacactgcgttaggtaagg

SEQ ID NO: 1860 - DNA, 122 bp, Homo sapiens
  misc_feature (61)..(62): /note="This region represents a CpG dinucleotide"
  misc_feature (61)..(61): /note="Nucleotide may be methylated to form 5-methylcytosine"
ggagcctccaggcaacactaagcagcacagagagaacagaacagacatggggcctgccaccgtggataacatactgtgtgccatatgaaaagtcattacagaggaagcactgaaaacctgga

SEQ ID NO: 1861 - DNA, 122 bp, Homo sapiens
  misc_feature (61)..(62): /note="This region represents a CpG dinucleotide"
  misc_feature (61)..(61): /note="Nucleotide may be methylated to form 5-methylcytosine"
ttgtggcatttcccaggcagaggtggcccgggaggtttccgaagcggtcccttcccgagccggcgaggccctggatgtgcgactacattttcttaaacacatatacaggcggcttgctgttt

SEQ ID NO: 1862 - DNA, 122 bp, Homo sapiens
  misc_feature (61)..(62): /note="This region represents a CpG dinucleotide"
  misc_feature (61)..(61): /note="Nucleotide may be methylated to form 5-methylcytosine"
tggtgtgctgactgtggataggtctccgccaagccgtggctcctgtcgtcctgacatagacgccgccattttaacgctgacctccaggggctggtggctggacctgcgcggccatcactgcc

SEQ ID NO: 1863 - DNA, 122 bp, Homo sapiens
  misc_feature (61)..(62): /note="This region represents a CpG dinucleotide"
  misc_feature (61)..(61): /note="Nucleotide may be methylated to form 5-methylcytosine"
gaggcccccggacgcctcagtcccccggcggcgccggaggagcggccggccgcggacacgcgctccattgtgtcgggctactccaccctgtccaccatggaccgcagcgtgtgctcgggcgc

SEQ ID NO: 1864 - DNA, 122 bp, Homo sapiens
  misc_feature (61)..(62): /note="This region represents a CpG dinucleotide"
  misc_feature (61)..(61): /note="Nucleotide may be methylated to form 5-methylcytosine"
agggaagaaaaatgttcagagtatgtgatgaggtcacccaagggggcagaacaatacatccgtgaaatcagttttctcaactttcaattatgccctaccacttcgattcttatcatcctaaa

SEQ ID NO: 1865 - DNA, 122 bp, Homo sapiens
  misc_feature (61)..(62): /note="This region represents a CpG dinucleotide"
  misc_feature (61)..(61): /note="Nucleotide may be methylated to form 5-methylcytosine"
tccccagccttgcgtgtcctggtggtagcgctgcatggagcgcatgttggctgcgcagcgcgtgaagtccgtgcagggtggtgcaggcacgtaggtgtgatgcacgtacaagaatcccagcg

SEQ ID NO: 1866 - DNA, 122 bp, Homo sapiens
  misc_feature (61)..(62): /note="This region represents a CpG dinucleotide"
  misc_feature (61)..(61): /note="Nucleotide may be methylated to form 5-methylcytosine"
tccatctaacagctagactttccactgggttcctggcctgacttctgtagtattctgcatcgttttttccattaaacaagggcttccaggactataatttgactctgctaatggaagggcat

SEQ ID NO: 1867 - DNA, 122 bp, Homo sapiens
  misc_feature (61)..(62): /note="This region represents a CpG dinucleotide"
  misc_feature (61)..(61): /note="Nucleotide may be methylated to form 5-methylcytosine"
cagaaggcccatgaggggaaggtgaggcacctggggcagagaaaaaaaaaaaatgcgccgcgaagcgctgtctgggtcatccacgaaggaaactgtcttcccatcagcccttgcgctgggcc

SEQ ID NO: 1868 - DNA, 122 bp, Homo sapiens
  misc_feature (61)..(62): /note="This region represents a CpG dinucleotide"
  misc_feature (61)..(61): /note="Nucleotide may be methylated to form 5-methylcytosine"
ggagccaatggcaaactgaagtggaccagcacttacttacttctttaagacagaactttgcggtgtattcttggttgttccttctctctaatcccttttcccgttagctggtctcttctctc

SEQ ID NO: 1869 - DNA, 122 bp, Homo sapiens
  misc_feature (61)..(62): /note="This region represents a CpG dinucleotide"
  misc_feature (61)..(61): /note="Nucleotide may be methylated to form 5-methylcytosine"
agcggcacgggctgcctaacagactgtcccattttctttcgggtttggaaggggccacgacggagcttaggactccataagaatgggcaaaaacaaggagcttatgcccctgaacccagaca

SEQ ID NO: 1870 - DNA, 122 bp, Homo sapiens
  misc_feature (61)..(62): /note="This region represents a CpG dinucleotide"
  misc_feature (61)..(61): /note="Nucleotide may be methylated to form 5-methylcytosine"
cggcggcggccttggatggaccgtagtctcggggactgcggggccggaggaggtcgtgggcgcgcggtggcggcgcaggcggccgggctagcaggtcccgcgggcccctgtccccgcagccg

SEQ ID NO: 1871 - DNA, 122 bp, Homo sapiens
  misc_feature (61)..(62): /note="This region represents a CpG dinucleotide"
  misc_feature (61)..(61): /note="Nucleotide may be methylated to form 5-methylcytosine"
gtggcagcaccgggatgtaggtgtgctgccaggcgaaggggtagatcagcgccaccatcgcgtggcagcacttggacaggatgctgcagccggggagagaacagggagagaggccgactcag

SEQ ID NO: 1872 - DNA, 122 bp, Homo sapiens
  misc_feature (61)..(62): /note="This region represents a CpG dinucleotide"
  misc_feature (61)..(61): /note="Nucleotide may be methylated to form 5-methylcytosine"
caccagctccccctccctgccctcctctgccaaaggaaggccctgctatttcaacacaagcggcttgcaggaggagcctgttaagaggacggctggtccactgaaaaagcggcagcagcttc

SEQ ID NO: 1873 - DNA, 122 bp, Homo sapiens
  misc_feature (61)..(62): /note="This region represents a CpG dinucleotide"
  misc_feature (61)..(61): /note="Nucleotide may be methylated to form 5-methylcytosine"
agagagagagctgttttatctgtggtttgtttagccctgagcactgggacattgcgcccccggtcgaattcaagtaaattgccctgagtagaccttacgtggggaagaggacttgtgattta

SEQ ID NO: 1874 - DNA, 122 bp, Homo sapiens
  misc_feature (61)..(62): /note="This region represents a CpG dinucleotide"
  misc_feature (61)..(61): /note="Nucleotide may be methylated to form 5-methylcytosine"
agtcccagccgcccctcgcgggggtgggggaccgccccgtgggccgggcatcccctcaggcgctgccaccccgcctagcctgaggggaggaacccgccgggcctcatctagcggcccagcca

SEQ ID NO: 1875 - DNA, 122 bp, Homo sapiens
  misc_feature (61)..(62): /note="This region represents a CpG dinucleotide"
  misc_feature (61)..(61): /note="Nucleotide may be methylated to form 5-methylcytosine"
aggggccttccatccttgggttgtaggtcttccagctacaaccctgggctaatcttaggtcgttggccttgtgtcacaagtctcagttcttaggccttccatgtgtcctgtcccaggtctta

SEQ ID NO: 1876 - DNA, 122 bp, Homo sapiens
  misc_feature (61)..(62): /note="This region represents a CpG dinucleotide"
  misc_feature (61)..(61): /note="Nucleotide may be methylated to form 5-methylcytosine"
agcccctgtctgggtagcactgggtgacagcgcccctggtggtcaggtcttggtattccccgtgcatgttgtgggtgcccctcccagagtcatagcgcagtcagatgccaagttcttcaccc

SEQ ID NO: 1877 - DNA, 122 bp, Homo sapiens
  misc_feature (61)..(62): /note="This region represents a CpG dinucleotide"
  misc_feature (61)..(61): /note="Nucleotide may be methylated to form 5-methylcytosine"
tgcaacaaccacataatctgcaaagcctaaaacattaactatctggctctttccagaaaacgtacgcctgcctggcctacagcagtagttcttaaatcaccagggaactttgtaaaaatgca

SEQ ID NO: 1878 - DNA, 122 bp, Homo sapiens
  misc_feature (61)..(62): /note="This region represents a CpG dinucleotide"
  misc_feature (61)..(61): /note="Nucleotide may be methylated to form 5-methylcytosine"
aggtcctcggcccgcgcgcgccgctcgggagcccgcgaggctgcggtgtgctccagcgggcgcatttcccaggccccgccacatcgtgtgtgttagtggctgggaaggacacgaggacagag

SEQ ID NO: 1879 - DNA, 122 bp, Homo sapiens
  misc_feature (61)..(62): /note="This region represents a CpG dinucleotide"
  misc_feature (61)..(61): /note="Nucleotide may be methylated to form 5-methylcytosine"
caggcctcctgttccttcttcggatggtccttatgtgttttgtacactgagctgtccaggcgtgcccctgcctggttgtggcaggggacagtcagcaggtgggccatgccaggtgaccgcct

SEQ ID NO: 1880 - DNA, 122 bp, Homo sapiens
  misc_feature (61)..(62): /note="This region represents a CpG dinucleotide"
  misc_feature (61)..(61): /note="Nucleotide may be methylated to form 5-methylcytosine"
aagggcaagtgaaagaacaccaaagcaccaaggtggccgtttgatgtggctggccgttagcggggattgggctgaaactgcatcctctgctcaaataaggtctattagccactggtgacttt

SEQ ID NO: 1881 - DNA, 122 bp, Homo sapiens
  misc_feature (61)..(62): /note="This region represents a CpG dinucleotide"
  misc_feature (61)..(61): /note="Nucleotide may be methylated to form 5-methylcytosine"
aaaccaccagctcatctggctggaatctcatttgtaatgagcatttgccaaagctggctacgttttttggtttctcatctgcctggccctcctgatttattgatgtgtttgactttctccat

SEQ ID NO: 1882 - DNA, 122 bp, Homo sapiens
  misc_feature (61)..(62): /note="This region represents a CpG dinucleotide"
  misc_feature (61)..(61): /note="Nucleotide may be methylated to form 5-methylcytosine"
gtcacgccatgcaggaaatggctgtgggccctgtgtctaacagacaggcccctgtgggtccgcccaaagctgcacaccctcgggcccctggggacatgcgctctgccactctagatgtgtgt

SEQ ID NO: 1883 - DNA, 122 bp, Homo sapiens
  misc_feature (61)..(62): /note="This region represents a CpG dinucleotide"
  misc_feature (61)..(61): /note="Nucleotide may be methylated to form 5-methylcytosine"
gtttgtgtcctggcttggccacttgcttgctatctgagcttagccatgacacttggtcttcgtgagcctcagtctatgcatctataaaatggagataaaaatggcttcagctccagagaatt

SEQ ID NO: 1884 - DNA, 122 bp, Homo sapiens
  misc_feature (61)..(62): /note="This region represents a CpG dinucleotide"
  misc_feature (61)..(61): /note="Nucleotide may be methylated to form 5-methylcytosine"
ggagaaaaccggacagagcaatggacaccaaacacgcaacggacacacaacactgagctccgcgggtccggaaacaaacacccagccaggtggtggaaggccgccccttcctccgaggctgg

SEQ ID NO: 1885 - DNA, 122 bp, Homo sapiens
  misc_feature (61)..(62): /note="This region represents a CpG dinucleotide"
  misc_feature (61)..(61): /note="Nucleotide may be methylated to form 5-methylcytosine"
gcatcaggctccgcccactcagaccccatccccgaacgtgggccccgccccctccccggtcgggcccctcctacctgtagccgatgtctccccagccttgcgtgtcctggtggtagcgctgc

SEQ ID NO: 1886 - DNA, 122 bp, Homo sapiens
  misc_feature (61)..(62): /note="This region represents a CpG dinucleotide"
  misc_feature (61)..(61): /note="Nucleotide may be methylated to form 5-methylcytosine"
gaaactcggctgggggtgggggctcagaagccgccccagaaagcactgaaagccacagcacgtacacccactccagggatctgccagcaccctgtggggcccagactacaggctgatggcgg

SEQ ID NO: 1887 - DNA, 122 bp, Homo sapiens
  misc_feature (61)..(62): /note="This region represents a CpG dinucleotide"
  misc_feature (61)..(61): /note="Nucleotide may be methylated to form 5-methylcytosine"
attctattgttgcaaacacactgcacttagatcctcctaaggccatttcttaatagataacgacaagtgacccagagcattttgggagacaaatgtttttccctcccagcaccggtttaatt

SEQ ID NO: 1888 - DNA, 122 bp, Homo sapiens
  misc_feature (61)..(62): /note="This region represents a CpG dinucleotide"
  misc_feature (61)..(61): /note="Nucleotide may be methylated to form 5-methylcytosine"
cctagggctgtctagtaaatcctgaagcctttgccagtagccaggaagctgagatcacctcggagcacagatggggaaggaggttatgggggagacagagactgtgcccagctgggttggag

SEQ ID NO: 1889 - DNA, 122 bp, Homo sapiens
  misc_feature (61)..(62): /note="This region represents a CpG dinucleotide"
  misc_feature (61)..(61): /note="Nucleotide may be methylated to form 5-methylcytosine"
acgagaattcaggaatgacaccatgtttctggctcaggcaactgggttgatgtgctgcctcgtgatatcaaagggattactgaagaagaacaaagtaatttttgaggaagtattgactttgg

SEQ ID NO: 1890 - DNA, 122 bp, Homo sapiens
  misc_feature (61)..(62): /note="This region represents a CpG dinucleotide"
  misc_feature (61)..(61): /note="Nucleotide may be methylated to form 5-methylcytosine"
ttgatgggattaaactccttgcttgctgctctgctgacatcagtaattgccttgcttcttcgtttccaatttcctgtttctttaaaacaatccatgtattccttttactgtttgtttccttg

SEQ ID NO: 1891 - DNA, 122 bp, Homo sapiens
  misc_feature (61)..(62): /note="This region represents a CpG dinucleotide"
  misc_feature (61)..(61): /note="Nucleotide may be methylated to form 5-methylcytosine"
agacagttctgttagtctctctctgacaataccccaaaacacctctaacctccgtgtgtgcggatctgctgtaatcttggccctcactttgtaataacagcaaacattatggccggggtcag

SEQ ID NO: 1892 - DNA, 122 bp, Homo sapiens
  misc_feature (61)..(62): /note="This region represents a CpG dinucleotide"
  misc_feature (61)..(61): /note="Nucleotide may be methylated to form 5-methylcytosine"
gctctaaaaaagtagaagtaaatacatttttaattgactagaatgttttaaatgatctcccgtgtgtcatctacttgttcaaaatataaattacactggcagtttttgggtgtgtaatctac

SEQ ID NO: 1893 - DNA, 122 bp, Homo sapiens
  misc_feature (61)..(62): /note="This region represents a CpG dinucleotide"
  misc_feature (61)..(61): /note="Nucleotide may be methylated to form 5-methylcytosine"
tccctgaagccccgtgtgcgtggtggtggccagcctgagggatttgggtcgggcagctcacgacgaccctgaggctttgtcatgctgcagtctctgctgtcaagagacacagaggaagaaat

SEQ ID NO: 1894 - DNA, 122 bp, Homo sapiens
  misc_feature (61)..(62): /note="This region represents a CpG dinucleotide"
  misc_feature (61)..(61): /note="Nucleotide may be methylated to form 5-methylcytosine"
ccaatatggggcaactgattttccttactctccaagtcccattgtactagaggctaaaggcgagatattcccagtctggcctccagggtcaccttcaggtctgtcaaaaatacctcctgctg

SEQ ID NO: 1895 - DNA, 122 bp, Homo sapiens
  misc_feature (61)..(62): /note="This region represents a CpG dinucleotide"
  misc_feature (61)..(61): /note="Nucleotide may be methylated to form 5-methylcytosine"
cgacagccggagccattgtggctccggccgattgcgccggccctcgggccctcagggaggcgagggtgtgagggtacagagttcgaggccaacttggtccacattggtaggaaaaaaaaaat

SEQ ID NO: 1896 - DNA, 122 bp, Homo sapiens
  misc_feature (61)..(62): /note="This region represents a CpG dinucleotide"
  misc_feature (61)..(61): /note="Nucleotide may be methylated to form 5-methylcytosine"
ataaaaatccttacaatccctttagttcacattcacaggccgagcatagtgattcaccttcgcccttccttcagctggggcctgttgcaggtgagaggctgtgatccaggaaaggtgggagg

SEQ ID NO: 1897 - DNA, 122 bp, Homo sapiens
  misc_feature (61)..(62): /note="This region represents a CpG dinucleotide"
  misc_feature (61)..(61): /note="Nucleotide may be methylated to form 5-methylcytosine"
gcttgactactttagactgtaaaagctaaatttggctttcccagcctctctagaggctaacggtaatggtgtgactcaattctggccaataagacacaggaagcagtctgctggagcgggga

SEQ ID NO: 1898 - DNA, 122 bp, Homo sapiens
  misc_feature (61)..(62): /note="This region represents a CpG dinucleotide"
  misc_feature (61)..(61): /note="Nucleotide may be methylated to form 5-methylcytosine"
cggacagacagaacagcgtctggagactcacatcatgaacttttgctccaagaactaccacgggaagttcttggaactaccacaggcaagttctcagccctgggcactggctgcctggaaat

SEQ ID NO: 1899 - DNA, 122 bp, Homo sapiens
  misc_feature (61)..(62): /note="This region represents a CpG dinucleotide"
  misc_feature (61)..(61): /note="Nucleotide may be methylated to form 5-methylcytosine"
ctttgcccatcctgccctaggtccgagtggagttcccccacaaggagacactgtgcagtgcgtcaaagccaggagcaccatcccaccaggtagtggtcgtgccccccacctcctccaagata

SEQ ID NO: 1900 - DNA, 122 bp, Homo sapiens
  misc_feature (61)..(62): /note="This region represents a CpG dinucleotide"
  misc_feature (61)..(61): /note="Nucleotide may be methylated to form 5-methylcytosine"
aaaaaaaaaaaaaaaaaaaaaaaaaaaatactgcctcctattggaggtgggtgcattaaccgagctctcgaagccctgtctgctctgggcttacaatctacatggagaaccaaatgcgctcc

SEQ ID NO: 1901 - DNA, 122 bp, Homo sapiens
  misc_feature (61)..(62): /note="This region represents a CpG dinucleotide"
  misc_feature (61)..(61): /note="Nucleotide may be methylated to form 5-methylcytosine"
ggcggtgctcacctagaagctgctggtgtggacctggctggagctcaggtttctgccaaccgtgtctgctcctcctgtccctgctgtttgaacgggggtgtcggcgtgttcgtcccgcccct

SEQ ID NO: 1902 - DNA, 122 bp, Homo sapiens
  misc_feature (61)..(62): /note="This region represents a CpG dinucleotide"
  misc_feature (61)..(61): /note="Nucleotide may be methylated to form 5-methylcytosine"
caagtctcatagcttatgcccacagaattcatgtgctaggaaataaaacacccaatcacacggtgtattcaacggtcctagatggaagaactattcccagccttgcctttaactcactctgt

SEQ ID NO: 1903 - DNA, 122 bp, Homo sapiens
  misc_feature (61)..(62): /note="This region represents a CpG dinucleotide"
  misc_feature (61)..(61): /note="Nucleotide may be methylated to form 5-methylcytosine"
aattctactacaaagtccatggttgcacaacagacttctttaaattctcttacagccatgcgtagaatgtcaaatggaccctgtattagttcgttctcacactgctatgaaaaaatacatga

SEQ ID NO: 1904 - DNA, 122 bp, Homo sapiens
  misc_feature (61)..(62): /note="This region represents a CpG dinucleotide"
  misc_feature (61)..(61): /note="Nucleotide may be methylated to form 5-methylcytosine"
cctctttcctcaaatatggatgcctccaaggaacataattccagctccaagaggtcctgacgtggggcctggaggaccccagtacctgccggcagcatcatctccttgccatgctccaggtg

SEQ ID NO: 1905 - DNA, 122 bp, Homo sapiens
  misc_feature (61)..(62): /note="This region represents a CpG dinucleotide"
  misc_feature (61)..(61): /note="Nucleotide may be methylated to form 5-methylcytosine"
aagacttgacatagagccaggcatgtgattctgggcagatgacttgcccccttaggccttcgtttctcatttctcatctgcagtacgtgggggtgagcagttccatcagatcaggagacggg

SEQ ID NO: 1906 - DNA, 122 bp, Homo sapiens
  misc_feature (61)..(62): /note="This region represents a CpG dinucleotide"
  misc_feature (61)..(61): /note="Nucleotide may be methylated to form 5-methylcytosine"
tgcttcctgattctacataccctacgatggcttgaccccatgaatgatttacttgtcatacgtattctggaaaaggcagaatatccataaaggaactggaatctgactaataaggtaattta

SEQ ID NO: 1907 - DNA, 122 bp, Homo sapiens
  misc_feature (61)..(62): /note="This region represents a CpG dinucleotide"
  misc_feature (61)..(61): /note="Nucleotide may be methylated to form 5-methylcytosine"
gtacgttttgacaaaagactgctcctcccctgcctcgcccttccaggtgctggtgaagaacgacgcccgccggacacgctccttctcgtggaccaagtcggtggagctggtgctgggcgaga

SEQ ID NO: 1908 - DNA, 122 bp, Homo sapiens
  misc_feature (61)..(62): /note="This region represents a CpG dinucleotide"
  misc_feature (61)..(61): /note="Nucleotide may be methylated to form 5-methylcytosine"
aagtgatccatccgccttggcgtcccaaagtgttgggattataggtgtgagccaccacaccggccagtttacaacttttaaaagaaaacagagggaaatgtatttataacccaggagtaaga

SEQ ID NO: 1909 - DNA, 122 bp, Homo sapiens
  misc_feature (61)..(62): /note="This region represents a CpG dinucleotide"
  misc_feature (61)..(61): /note="Nucleotide may be methylated to form 5-methylcytosine"
agtcgctggcgttcctctcaccgagggtccaggctgagggtgaaaccgcttctctgttgacgccgcccggcctgccgaaccgagtcagccgcctctggacctaggctcggtgacacctgcac

SEQ ID NO: 1910 - DNA, 122 bp, Homo sapiens
  misc_feature (61)..(62): /note="This region represents a CpG dinucleotide"
  misc_feature (61)..(61): /note="Nucleotide may be methylated to form 5-methylcytosine"
taaattgggtggcggtggtggcatgtcctgttagctgtggagtcttttcctcttatcttgcgcctccggttgtgccttaatgacacttttgacattgtgtatcacaaccaactggcaaaaac

SEQ ID NO: 1911 - DNA, 122 bp, Homo sapiens
  misc_feature (61)..(62): /note="This region represents a CpG dinucleotide"
  misc_feature (61)..(61): /note="Nucleotide may be methylated to form 5-methylcytosine"
caactaaaagtgttaaaaacaactgaaatttcccctctcctgtggaaacctcaggctgaacgtgtcatagtgttctactttcatatatagaaaagactgtacttgtgggcaacagtgtcatt

SEQ ID NO: 1912 - DNA, 122 bp, Homo sapiens
  misc_feature (61)..(62): /note="This region represents a CpG dinucleotide"
  misc_feature (61)..(61): /note="Nucleotide may be methylated to form 5-methylcytosine"
gataaaatctgctgcactctttttaacagaagcacagaattaaatcatatggatgcacttcgttttatgctactctacagagtgacaagacttctttgtgcatttatctttgagcacttatt

SEQ ID NO: 1913 - DNA, 122 bp, Homo sapiens
  misc_feature (61)..(62): /note="This region represents a CpG dinucleotide"
  misc_feature (61)..(61): /note="Nucleotide may be methylated to form 5-methylcytosine"
gagctcccttgcagtcccctccatgttccccggcgccactactccccttcctaaggccgccgcttaccccggggtctatggaagtaatggaaggacccctcaacctggtgagtgtcccacag

SEQ ID NO: 1914 - DNA, 122 bp, Homo sapiens
  misc_feature (61)..(62): /note="This region represents a CpG dinucleotide"
  misc_feature (61)..(61): /note="Nucleotide may be methylated to form 5-methylcytosine"
atatagttctgtgaaagatgagttgtttaacagttgcatatgcctgtgagttaatccttccgctactcaaaagagctctcagaatgttgactttaatctgcttgagcaagcaagcatttagc

SEQ ID NO: 1915 - DNA, 122 bp, Homo sapiens
  misc_feature (61)..(62): /note="This region represents a CpG dinucleotide"
  misc_feature (61)..(61): /note="Nucleotide may be methylated to form 5-methylcytosine"
tgagagcacactgtgctctctcgtatgttgtgttttgtccactctgtacctttgtccttacgttccctgaaccagcagacccttccttagcctgtggccccttgaaattctgcagccctgag

SEQ ID NO: 1916 - DNA, 122 bp, Homo sapiens
  misc_feature (61)..(62): /note="This region represents a CpG dinucleotide"
  misc_feature (61)..(61): /note="Nucleotide may be methylated to form 5-methylcytosine"
ttctgctacctcagctttcacaagtcatttttattcttttttgccagctcagctgaccatcgtgaatgttattctgtactgaatcatcagtatagaatggttgcaattcaattagctgtcag

SEQ ID NO: 1917 - DNA, 122 bp, Homo sapiens
  misc_feature (61)..(62): /note="This region represents a CpG dinucleotide"
  misc_feature (61)..(61): /note="Nucleotide may be methylated to form 5-methylcytosine"
gtagggtcggacatcttggtagcagaggctgaaagtgattggagcctccagagccttcctcggggtggggcgtttaacatcccttcagaaccccaccctcggaggccttactgtcgtttcct

SEQ ID NO: 1918 - DNA, 122 bp, Homo sapiens
  misc_feature (61)..(62): /note="This region represents a CpG dinucleotide"
  misc_feature (61)..(61): /note="Nucleotide may be methylated to form 5-methylcytosine"
aaatcccctttccccgggagactgcaaagcattctgggggactagcccagtttaagacatcgtgttgctttcgcagaggcagccttaatcctgtgccttgcactctgtggttgctcaataaa

SEQ ID NO: 1919 - DNA, 122 bp, Homo sapiens
  misc_feature (61)..(62): /note="This region represents a CpG dinucleotide"
  misc_feature (61)..(61): /note="Nucleotide may be methylated to form 5-methylcytosine"
ggcacttcacacccagctgcaaggtgctgtacttgtcccacagctctaggaaaaagagaacgatatggagcaacagttcacatccaacagggcagtctgctcgcctctgttccagtggaggg

SEQ ID NO: 1920 - DNA, 122 bp, Homo sapiens
  misc_feature (61)..(62): /note="This region represents a CpG dinucleotide"
  misc_feature (61)..(61): /note="Nucleotide may be methylated to form 5-methylcytosine"
ccctgcaggccccaacgcttcatcgcagcgcccactttttccacctgacccggcgaacaccgggcgggccgctggagtttatcagctccaggacaaatctgcctctgaccaccacgtttgct

SEQ ID NO: 1921 - DNA, 122 bp, Homo sapiens
  misc_feature (61)..(62): /note="This region represents a CpG dinucleotide"
  misc_feature (61)..(61): /note="Nucleotide may be methylated to form 5-methylcytosine"
tccccaaactgacaagggacccggaacagcgacccccaaaccgacacgggactcgggaaccgctatctccaaagggcagctttctttgagggaggctgttagacgtgactccttgtttctaa

SEQ ID NO: 1922 - DNA, 122 bp, Homo sapiens
  misc_feature (61)..(62): /note="This region represents a CpG dinucleotide"
  misc_feature (61)..(61): /note="Nucleotide may be methylated to form 5-methylcytosine"
aatctggtgcacaaatatttatgctgtacatgaacttatattgtatacatatgtggtatgcgtgtttcataatattataaggaatgccttattcagttgacttgtaaccatttgcttttaat

SEQ ID NO: 1923 - DNA, 122 bp, Homo sapiens
  misc_feature (61)..(62): /note="This region represents a CpG dinucleotide"
  misc_feature (61)..(61): /note="Nucleotide may be methylated to form 5-methylcytosine"
acccaggttgtagaacactgatgtatgatgggaagccattgagtgctcagccccataatacgacctgactcagagtatcatgggattactgtggctgtcatgttgtagatggtgtagaaagg

SEQ ID NO: 1924 - DNA, 122 bp, Homo sapiens
  misc_feature (61)..(62): /note="This region represents a CpG dinucleotide"
  misc_feature (61)..(61): /note="Nucleotide may be methylated to form 5-methylcytosine"
atgtcaaaaggcagcacgtaaattgaataagggaaggaaaatgccgggcggcctcattcacgtccggcatgttccgctattattgaaaggaaattgagaaattagacagtactgcctattag

SEQ ID NO: 1925 - DNA, 122 bp, Homo sapiens
  misc_feature (61)..(62): /note="This region represents a CpG dinucleotide"
  misc_feature (61)..(61): /note="Nucleotide may be methylated to form 5-methylcytosine"
caaaaattcaccaattccggaaacactgcgaggcagcagcgtgtcttacacagacggaaccgccgttcccctgccatgttcaggcgggtcggcaggctttgttcgttattctgagtggcagt

SEQ ID NO: 1926 - DNA, 122 bp, Homo sapiens
  misc_feature (61)..(62): /note="This region represents a CpG dinucleotide"
  misc_feature (61)..(61): /note="Nucleotide may be methylated to form 5-methylcytosine"
tggggccacaggaaaggcagcctggagagcagccccctgccctgctctacagagggagcgcgggtcaccgctctaaaggtggagtgggcacccgccaggtctctccctctgtctcatgactg

SEQ ID NO: 1927 - DNA, 122 bp, Homo sapiens
  misc_feature (61)..(62): /note="This region represents a CpG dinucleotide"
  misc_feature (61)..(61): /note="Nucleotide may be methylated to form 5-methylcytosine"
gttgtggcctcaaacagtgaatttacatccatgagaatcaatttcctcatctgccaagtacggatcctaactcaagttcctctaagccttaaaactgttcttccacaatattaatttcttca

SEQ ID NO: 1928 - DNA, 122 bp, Homo sapiens
  misc_feature (61)..(62): /note="This region represents a CpG dinucleotide"
  misc_feature (61)..(61): /note="Nucleotide may be methylated to form 5-methylcytosine"
acgttccacaaaatctgtctattctgtttaataaagttaatcctcaaattgctgtatagccgggagactcaagttcattgtaactacgcagcaatactgggctctatgatgctgatatacca

SEQ ID NO: 1929 - DNA, 122 bp, Homo sapiens
  misc_feature (61)..(62): /note="This region represents a CpG dinucleotide"
  misc_feature (61)..(61): /note="Nucleotide may be methylated to form 5-methylcytosine"
atgaatagttccagattgcttgcttctctcacttgaaagaacaaacatttgttaggcttccgttactaaaagttggcataaaattctgctttaaaccatttcccacatacctcaaatgcatt

SEQ ID NO: 1930 - DNA, 122 bp, Homo sapiens
  misc_feature (61)..(62): /note="This region represents a CpG dinucleotide"
  misc_feature (61)..(61): /note="Nucleotide may be methylated to form 5-methylcytosine"
acaacaggaagtggctacattaacagcacactgtgtactatagttaattttatgcagttacggtttcagactgcatcccgacattggtttacatttctcttgactgagaatggtgccacgtg

SEQ ID NO: 1931 - DNA, 122 bp, Homo sapiens
  misc_feature (61)..(62): /note="This region represents a CpG dinucleotide"
  misc_feature (61)..(61): /note="Nucleotide may be methylated to form 5-methylcytosine"
taatggacccattggttcaatttgtgcattaactccaaacatgcagcagtcaccaccttccggacttttttggaataacaaacactggtgaattctgggggcttactgactcctctacatgt

SEQ ID NO: 1932 - DNA, 122 bp, Homo sapiens
  misc_feature (61)..(62): /note="This region represents a CpG dinucleotide"
  misc_feature (61)..(61): /note="Nucleotide may be methylated to form 5-methylcytosine"
ccttcgctgggccccagggagtgtccacagcaccaaggctgctatggatgcatcgccaagcgcggtggggacctggcttgtgtctttgtgtattttgatcagaactttccctgtagcttcct

SEQ ID NO: 1933 - DNA, 122 bp, Homo sapiens
  misc_feature (61)..(62): /note="This region represents a CpG dinucleotide"
  misc_feature (61)..(61): /note="Nucleotide may be methylated to form 5-methylcytosine"
gtctggccatcatttatttctaccactgttgcctcacctgcttcatcccctgaagagcctcgaggtggtgccagagttcacttttgctgctattcttgcttgtggttatttgcatcctgttg

SEQ ID NO: 1934 - DNA, 122 bp, Homo sapiens
  misc_feature (61)..(62): /note="This region represents a CpG dinucleotide"
  misc_feature (61)..(61): /note="Nucleotide may be methylated to form 5-methylcytosine"
cctagagccacaagtgtggtgctctggggtctctatcacagtgagtaaaacaaatgctggcgcattgagggtgtttgcgtacaagaatgtaatcatgaataatggaaaatgactcatcacct

SEQ ID NO: 1935 - DNA, 122 bp, Homo sapiens
  misc_feature (61)..(62): /note="This region represents a CpG dinucleotide"
  misc_feature (61)..(61): /note="Nucleotide may be methylated to form 5-methylcytosine"
ttaaaggcaatgagactgacacatggagagatcggattatttgctctaaatcacatgtctcgtaagtggaaaggctggacttggccgggtttatttctaaactgaatctctgcacacttttt

SEQ ID NO: 1936 - DNA, 122 bp, Homo sapiens
  misc_feature (61)..(62): /note="This region represents a CpG dinucleotide"
  misc_feature (61)..(61): /note="Nucleotide may be methylated to form 5-methylcytosine"
ctcttcaaaaaggctgtgcaaaattacagtcctgataacagctacccagagatcctgtaacggcatttgccctcatcattattattattattattattattattattattatttgaatttga

SEQ ID NO: 1937 - DNA, 122 bp, Homo sapiens
  misc_feature (61)..(62): /note="This region represents a CpG dinucleotide"
  misc_feature (61)..(61): /note="Nucleotide may be methylated to form 5-methylcytosine"
tcttcaaggctccaggatgcctgttcttactttagccagagcagtttcttattcatccttcgttttcatattgaggttacacctgaaaagctattcccttttcagttaaatggatgtaagtt

SEQ ID NO: 1938 - DNA, 122 bp, Homo sapiens
  misc_feature (61)..(62): /note="This region represents a CpG dinucleotide"
  misc_feature (61)..(61): /note="Nucleotide may be methylated to form 5-methylcytosine"
cgcaacccagtcaggcttcgtgtccttcaggggttctaggctaacaggcgaaaggaagggcgttgggaccgaggggcatcctggtttttatgtacgccactgagaggccaccagacacattt

SEQ ID NO: 1939 - DNA, 122 bp, Homo sapiens
  misc_feature (61)..(62): /note="This region represents a CpG dinucleotide"
  misc_feature (61)..(61): /note="Nucleotide may be methylated to form 5-methylcytosine"
gggtggggtgtaggtgacaagcaatcgagagtaggtgatgcatgcatttcctaactggcacgcaatcacattgcattccaagactacattacttatagggttctgttttacagatgcatggc

SEQ ID NO: 1940 - DNA, 122 bp, Homo sapiens
  misc_feature (61)..(62): /note="This region represents a CpG dinucleotide"
  misc_feature (61)..(61): /note="Nucleotide may be methylated to form 5-methylcytosine"
ataatctttgtccattcttgttggcttttgctgggtagtgtttggttgaagttggtcccccgtcttaaggaaatgacagggctttaccacacacacatgtgttcattgtatttataactata

SEQ ID NO: 1941 - DNA, 122 bp, Homo sapiens
  misc_feature (61)..(62): /note="This region represents a CpG dinucleotide"
  misc_feature (61)..(61): /note="Nucleotide may be methylated to form 5-methylcytosine"
gcctcttggtataggcggcttcccggaagcactccatgcacaccgccgtcagcttcaccacgctctcggccagcggcaccaggttcaggatggccccaaatggctgcgctcccatggaaaga

SEQ ID NO: 1942 - DNA, 122 bp, Homo sapiens
  misc_feature (61)..(62): /note="This region represents a CpG dinucleotide"
  misc_feature (61)..(61): /note="Nucleotide may be methylated to form 5-methylcytosine"
atctctctgaaccagtttcctcattttaagaattgaaatgctggctgggccagtggctcacgcctgtaatcccagcactttgggaggccaaggcgagatgactgcttgagtccaggagttcg

SEQ ID NO: 1943 - DNA, 122 bp, Homo sapiens
  misc_feature (61)..(62): /note="This region represents a CpG dinucleotide"
  misc_feature (61)..(61): /note="Nucleotide may be methylated to form 5-methylcytosine"
aaaagatggtggtaaggatttcttaattttctagatcttcttgggaagaaattcatgaatcgtgaaggcactcaaagtgagtcagatcgccatctggtgactatttacagaaatagcagaca

SEQ ID NO: 1944 - DNA, 122 bp, Homo sapiens
  misc_feature (61)..(62): /note="This region represents a CpG dinucleotide"
  misc_feature (61)..(61): /note="Nucleotide may be methylated to form 5-methylcytosine"
ttacctgactatactcttgcctaagaaatcccagaggctaatcttgcaacaacctaggcacggaaaccctgttgtggaatccgcctactttgggaaagttgtgaacaatgagtccaccacca

SEQ ID NO: 1945 - DNA, 122 bp, Homo sapiens
  misc_feature (61)..(62): /note="This region represents a CpG dinucleotide"
  misc_feature (61)..(61): /note="Nucleotide may be methylated to form 5-methylcytosine"
ttatatctgaactcaaaaataagtattcctggtcagtgccccatacaacctcaaaatgtacgtattgtctttatcattttaatcgactcttccaatgctatttttctgcctttagaaataga

SEQ ID NO: 1946 - DNA, 122 bp, Homo sapiens
  misc_feature (61)..(62): /note="This region represents a CpG dinucleotide"
  misc_feature (61)..(61): /note="Nucleotide may be methylated to form 5-methylcytosine"
agatggcgtggggatttaggggagtgggaccttgaggcttcttcagttcagatgtcaaaacgccattatttgggggtatgtttctgcgcctccaacactgtttaacagggaggcttgtttca

SEQ ID NO: 1947 - DNA, 122 bp, Homo sapiens
  misc_feature (61)..(62): /note="This region represents a CpG dinucleotide"
  misc_feature (61)..(61): /note="Nucleotide may be methylated to form 5-methylcytosine"
tcgttcttcaggacatttcctgttttccgattagctacgcctgcctctcactcagttctgcggaggtcaccactgcagtaattaaccccaatgccagcctccaaacaaggtttccgggagaa

SEQ ID NO: 1948 - DNA, 122 bp, Homo sapiens
  misc_feature (61)..(62): /note="This region represents a CpG dinucleotide"
  misc_feature (61)..(61): /note="Nucleotide may be methylated to form 5-methylcytosine"
gattctaatgaccatttccctgacgaagcaaccaggcttgagatagtatatggtgacactcgttaagtgattccctgtgagtgagggataaacctgtgaatggaataaggtccacgggcccc

SEQ ID NO: 1949 - DNA, 122 bp, Homo sapiens
  misc_feature (61)..(62): /note="This region represents a CpG dinucleotide"
  misc_feature (61)..(61): /note="Nucleotide may be methylated to form 5-methylcytosine"
agcggtctgttacatgctaaatgcactgggtggttggtgcattatcgtagaagagtattgcgctgtgataggttcatgttacaagatttgcagatgaatcttgcttttgctgtataagttac

SEQ ID NO: 1950 - DNA, 122 bp, Homo sapiens
  misc_feature (61)..(62): /note="This region represents a CpG dinucleotide"
  misc_feature (61)..(61): /note="Nucleotide may be methylated to form 5-methylcytosine"
gcgtgcctggggtgcagcaagtgagaggagcatggctcaaggtgaggctgagcaaagacacggcagacagctcatgcagagcttttgtcaccttgctaattatttggcataatggaatctga

SEQ ID NO: 1951 - DNA, 122 bp, Homo sapiens
  misc_feature (61)..(62): /note="This region represents a CpG dinucleotide"
  misc_feature (61)..(61): /note="Nucleotide may be methylated to form 5-methylcytosine"
aattctgtaccctgcaccccatgcatccccatcaaaagctgggttgatgattggattcctcgagctggcgtgggagtgggagagctggaacaagggagcagggagaggaagggaaccagggc

SEQ ID NO: 1952 - DNA, 122 bp, Homo sapiens
  misc_feature (61)..(62): /note="This region represents a CpG dinucleotide"
  misc_feature (61)..(61): /note="Nucleotide may be methylated to form 5-methylcytosine"
gcccactcctttaggatgcctgtgtgtgctctcccgaaggctcagcacacatgcgcctaccgctgtcgtttcctgcctggggagggtgttgacacaggagagccagggcatcatgcagctgt

SEQ ID NO: 1953 - DNA, 122 bp, Homo sapiens
  misc_feature (61)..(62): /note="This region represents a CpG dinucleotide"
  misc_feature (61)..(61): /note="Nucleotide may be methylated to form 5-methylcytosine"
gcaccagcttccccagcccctcctggccgatttccccattgggatgcccgctcctggccgcgggctgctgggttggcccagcctggggtcctcccgccaatccacagcagggctgcgtgggg

SEQ ID NO: 1954 - DNA, 122 bp, Homo sapiens
  misc_feature (61)..(62): /note="This region represents a CpG dinucleotide"
  misc_feature (61)..(61): /note="Nucleotide may be methylated to form 5-methylcytosine"
ataaattaaatgaaaacaaaatcagaatacaaaattgtatgtgtgctctgcttacaaccacgtggagcacagctataattaaagcgggctatacttggcacactgattgttaaataagtgca

SEQ ID NO: 1955 - DNA, 122 bp, Homo sapiens
  misc_feature (61)..(62): /note="This region represents a CpG dinucleotide"
  misc_feature (61)..(61): /note="Nucleotide may be methylated to form 5-methylcytosine"
atgctcctttccccacagccctcagggaaggggcccagcagccaagaagtttcccaacatcgctgccaccttcaccatacctgttcctggcccaagtggaggccccagtgggaaatgtgtgt

SEQ ID NO: 1956 - DNA, 122 bp, Homo sapiens
  misc_feature (61)..(62): /note="This region represents a CpG dinucleotide"
  misc_feature (61)..(61): /note="Nucleotide may be methylated to form 5-methylcytosine"
cttccctcagtcctgaggaatgttcttgctggggaccagaatccttcccctgtagggcagcgacagggatgcagcctgtgtccccctttctacacagctggcaggcaacatggaacctttat

SEQ ID NO: 1957 - DNA, 122 bp, Homo sapiens
  misc_feature (61)..(62): /note="This region represents a CpG dinucleotide"
  misc_feature (61)..(61): /note="Nucleotide may be methylated to form 5-methylcytosine"
gttacctccgtacagtgctgctcttactttttggtgccaccaagtggccaagtttaatggcgcagtgatacatcccccagagggaaccccaatttttatagcataagctctgtttcagacag

SEQ ID NO: 1958 - DNA, 122 bp, Homo sapiens
  misc_feature (61)..(62): /note="This region represents a CpG dinucleotide"
  misc_feature (61)..(61): /note="Nucleotide may be methylated to form 5-methylcytosine"
tggcaaattgtgggaaggcaaaataatgatagatgaagtccacttagcaaagcttattaacgtagattcctcttgtgccatctccagccagatgagggctacagttgtcttcagtggttaac

SEQ ID NO: 1959 - DNA, 122 bp, Homo sapiens
  misc_feature (61)..(62): /note="This region represents a CpG dinucleotide"
  misc_feature (61)..(61): /note="Nucleotide may be methylated to form 5-methylcytosine"
ttttcttccataacatcctggcaatagtggcaggcagggagatgttcatattactgagcacggttttgacttgatattagaatatatatttatttgctcagcttttttttttctcatcccta

SEQ ID NO: 1960 - DNA, 122 bp, Homo sapiens
  misc_feature (61)..(62): /note="This region represents a CpG dinucleotide"
  misc_feature (61)..(61): /note="Nucleotide may be methylated to form 5-methylcytosine"
gctatccaattttgcatctgggaagtgttcatcgattgctagaaaaataatcaggtcgaacgcaggccatttccggtaaagaggctctagggaagcaccttcaggccagatgactcaggact

SEQ ID NO: 1961 - DNA, 122 bp, Homo sapiens
  misc_feature (61)..(62): /note="This region represents a CpG dinucleotide"
  misc_feature (61)..(61): /note="Nucleotide may be methylated to form 5-methylcytosine"
agttagggcctgcttcctcatagatgaaggcttctcactgtagggtgagagataagagaacggcccgtcggtggagcagtcagagcacacagaacatttgttgattaagtttactgtcttct

SEQ ID NO: 1962 - DNA, 122 bp, Homo sapiens
  misc_feature (61)..(62): /note="This region represents a CpG dinucleotide"
  misc_feature (61)..(61): /note="Nucleotide may be methylated to form 5-methylcytosine"
agcacgtgacgatgcacttcttgactatatatcccaactgcagcagcggagttgtcagagcgcagagccggacagagcagaagaaccctcttggactggacgatttgggaattcaaaacttg

SEQ ID NO: 1963 - DNA, 122 bp, Homo sapiens
  misc_feature (61)..(62): /note="This region represents a CpG dinucleotide"
  misc_feature (61)..(61): /note="Nucleotide may be methylated to form 5-methylcytosine"
gtaaggactgcctgtttagagccctgagtgcccgctttggcttttttctgacaaatgtgtcgttgaagcacaccgattttccttcctgggcctcagttgattcttccgtaaaagcagaagtt

SEQ ID NO: 1964 - DNA, 122 bp, Homo sapiens
  misc_feature (61)..(62): /note="This region represents a CpG dinucleotide"
  misc_feature (61)..(61): /note="Nucleotide may be methylated to form 5-methylcytosine"
cgggttaaagggcagcccagcctcagggctgacagtttgctccccaggcaccaccactcccgcctcccaccttaaccttgcatgagtttaccttgagatgagattgacagctccctcagcag

SEQ ID NO: 1965 - DNA, 122 bp, Homo sapiens
  misc_feature (61)..(62): /note="This region represents a CpG dinucleotide"
  misc_feature (61)..(61): /note="Nucleotide may be methylated to form 5-methylcytosine"
tcctttaaggacctaacctacatgttacttgcatcacttttgattccaccctagtgactgcgcttagtcacatgaccacagcctaactgcaagggaacctgggaaatgtagtctttattctg

SEQ ID NO: 1966 - DNA, 122 bp, Homo sapiens
  misc_feature (61)..(62): /note="This region represents a CpG dinucleotide"
  misc_feature (61)..(61): /note="Nucleotide may be methylated to form 5-methylcytosine"
gaggacgccgcagtgcgcactagccctccatggaagacaggcgcagaggacgccggagtgcgcactagcccttcatggaagacgggagcagaggatgcgtggagtgcgcaccagccctccat

SEQ ID NO: 1967 - DNA, 122 bp, Homo sapiens
  misc_feature (61)..(62): /note="This region represents a CpG dinucleotide"
  misc_feature (61)..(61): /note="Nucleotide may be methylated to form 5-methylcytosine"
aaccatcaccacaatccagttttagaacatttccactgccccagacaagcactgattgcacgatgcccatttgcagtcattcctcctcccacaccccgaccaccactgatctgctttccatg

SEQ ID NO: 1968 - DNA, 122 bp, Homo sapiens
  misc_feature (61)..(62): /note="This region represents a CpG dinucleotide"
  misc_feature (61)..(61): /note="Nucleotide may be methylated to form 5-methylcytosine"
aaccaaggcttctcctccccaagccgacaccccacacttcctacatgtggtggctgcccacgggctggaagacagtgcctctcccatgacccctcagtgcatcaccccacccatctgagcaa

SEQ ID NO: 1969 - DNA, 122 bp, Homo sapiens
  misc_feature (61)..(62): /note="This region represents a CpG dinucleotide"
  misc_feature (61)..(61): /note="Nucleotide may be methylated to form 5-methylcytosine"
cctgggcccagcagagggtgcccggcatggtgctagacacagcctgagaaagagacccgccgccttcttcccagaaagtctgttgagctctagctggcgtgagagcaagtgggcgccactcc

SEQ ID NO: 1970 - DNA, 122 bp, Homo sapiens
  misc_feature (61)..(62): /note="This region represents a CpG dinucleotide"
  misc_feature (61)..(61): /note="Nucleotide may be methylated to form 5-methylcytosine"
gaaaatcagctggtgagtcaatgggactttgttaggatagtcacagggcgcagctggcgccggcttaagggaagagctggatccccccttgataacatgctgtttatctggcttcctgtttc

SEQ ID NO: 1971 - DNA, 122 bp, Homo sapiens
  misc_feature (61)..(62): /note="This region represents a CpG dinucleotide"
  misc_feature (61)..(61): /note="Nucleotide may be methylated to form 5-methylcytosine"
ggagactgaggcaggagaatcgcttgaacccggcaggcagaagttgcaatgagccgagatcgcgcaaatgcactccagcccaggcgatggtgagagactccgtttcaaaaaaaaaaaaaaaa

SEQ ID NO: 1972 - DNA, 122 bp, Homo sapiens
  misc_feature (61)..(62): /note="This region represents a CpG dinucleotide"
  misc_feature (61)..(61): /note="Nucleotide may be methylated to form 5-methylcytosine"
tacagagcgggctcccaggaaccagccggaaatggccctgcaaggttgctggaacttggccgtgagctgctcaacttcccagctctggggagcctttctggtgggagtggtaggtggttttc

SEQ ID NO: 1973 - DNA, 122 bp, Homo sapiens
  misc_feature (61)..(62): /note="This region represents a CpG dinucleotide"
  misc_feature (61)..(61): /note="Nucleotide may be methylated to form 5-methylcytosine"
ctcctcgaggtgggaggggaagtcggggggaagccaaactgctccccgctcctgcagcaccggcctcggtcgcgctgactctggcctggtgtccgtgtctcttgctatctctctttctctca

SEQ ID NO: 1974 - DNA, 122 bp, Homo sapiens
  misc_feature (61)..(62): /note="This region represents a CpG dinucleotide"
  misc_feature (61)..(61): /note="Nucleotide may be methylated to form 5-methylcytosine"
tcccaaaaggccccatctcttaatactttcacaatggtgactacatttcaacatatacaacgtaacatgtaatagtaatgattagaccatagcagcagcttttacaaaccttttattctcct

SEQ ID NO: 1975 - DNA, 122 bp, Homo sapiens
  misc_feature (61)..(62): /note="This region represents a CpG dinucleotide"
  misc_feature (61)..(61): /note="Nucleotide may be methylated to form 5-methylcytosine"
gctagatgggcttgcttaccttttcctgttgtttcatcatttccaaaacaagtgaagaaacgttgcatcttggctaggaactatctgtcgatatggctttgctgctgatggggtgtgctggg

SEQ ID NO: 1976 - DNA, 122 bp, Homo sapiens
  misc_feature (61)..(62): /note="This region represents a CpG dinucleotide"
  misc_feature (61)..(61): /note="Nucleotide may be methylated to form 5-methylcytosine"
tggtggaaggcaaaggagaaacaagcacatattctcacagccagcaggaaagagaatgtgcgcagaagggaagtgccacacacttttaaatcagcagatctcgtgagaactcactcaccatc

SEQ ID NO: 1977 - DNA, 122 bp, Homo sapiens
  misc_feature (61)..(62): /note="This region represents a CpG dinucleotide"
  misc_feature (61)..(61): /note="Nucleotide may be methylated to form 5-methylcytosine"
ggactggtgtaaagcggactggattaagaattagaagacccaattacccgagaaggggtacgaggagccttctgggtactgaaatgttcaaagctgttcactgaagatttatgggtttgaat

SEQ ID NO: 1978 - DNA, 122 bp, Homo sapiens
  misc_feature (61)..(62): /note="This region represents a CpG dinucleotide"
  misc_feature (61)..(61): /note="Nucleotide may be methylated to form 5-methylcytosine"
ctggaaaccggatcaaggtggactcacagaccacttagaattgttaagtccctgagttcacggtcttaagagtttcttccaggcccctgctccacactctcaagttcatcttgcaaaagtcg

SEQ ID NO: 1979 - DNA, 122 bp, Homo sapiens
  misc_feature (61)..(62): /note="This region represents a CpG dinucleotide"
  misc_feature (61)..(61): /note="Nucleotide may be methylated to form 5-methylcytosine"
cacatctggagtggttttctgggaaatcttgtgtggtgtgcatgtctttacacacctgcccggaaaaaagatgaatcaggcctcaaggaattcctctccctctcagcattcagagagaactg

SEQ ID NO: 1980 - DNA, 122 bp, Homo sapiens
  misc_feature (61)..(62): /note="This region represents a CpG dinucleotide"
  misc_feature (61)..(61): /note="Nucleotide may be methylated to form 5-methylcytosine"
ggtggtacaggctctcaagctgtcctggggctctggaggcagagaggaggttggatgggacggaaagaacccaccagagcggagccaagagcaaaggccatcatcacgctaagggcaaggcc

SEQ ID NO: 1981 - DNA, 122 bp, Homo sapiens
  misc_feature (61)..(62): /note="This region represents a CpG dinucleotide"
  misc_feature (61)..(61): /note="Nucleotide may be methylated to form 5-methylcytosine"
aatccctctccctcagcaagctttccatcacggcccccccgtcagcatcttccctgatagcgttcttctctgtgtttattctggggcttcaggctcgcccaggaggaactgataaccgctgg

SEQ ID NO: 1982 - DNA, 122 bp, Homo sapiens
  misc_feature (61)..(62): /note="This region represents a CpG dinucleotide"
  misc_feature (61)..(61): /note="Nucleotide may be methylated to form 5-methylcytosine"
acagactggaactgctctgatgtggcttgcgtggaaattcagccaccaccccaatgaccacgtggccaccatgaccacaagactcaacatagccttgtgcagtgatgcatcaggcaccacct

SEQ ID NO: 1983 - DNA, 122 bp, Homo sapiens
  misc_feature (61)..(62): /note="This region represents a CpG dinucleotide"
  misc_feature (61)..(61): /note="Nucleotide may be methylated to form 5-methylcytosine"
agcaaagcctgaaagggctctgccaggcacaccaggcacatctccacgtgaggccggccgcgcactcacctggcaggtgagcctgaccagcacaatcagatctggctgagcaacttaaacgg

SEQ ID NO: 1984 - DNA, 122 bp, Homo sapiens
  misc_feature (61)..(62): /note="This region represents a CpG dinucleotide"
  misc_feature (61)..(61): /note="Nucleotide may be methylated to form 5-methylcytosine"
cttggatgttagaactcagtgttctccagacttcggattctggaacttgcaccagcaatccgtcaggttctcaggcctctgacctcatactgagagttactctgtaagctcccttggttctg

SEQ ID NO: 1985 - DNA, 122 bp, Homo sapiens
  misc_feature (61)..(62): /note="This region represents a CpG dinucleotide"
  misc_feature (61)..(61): /note="Nucleotide may be methylated to form 5-methylcytosine"
gtcatatgaagttatagcgcatgtgctgattcctctcttcacagctgtaaaaagaaagcacgcttcaaaaagcaggcttgctagggctctgaagactttaattctgtaatgggtccagctcc

SEQ ID NO: 1986 - DNA, 122 bp, Homo sapiens
  misc_feature (61)..(62): /note="This region represents a CpG dinucleotide"
  misc_feature (61)..(61): /note="Nucleotide may be methylated to form 5-methylcytosine"
gaagcctggggtgtgccaaggtccctcgggcctaagtggagttctgtggccaggatgatccggaatgatcaggactcgctgacgcagctgctgcagctggggctggtggtgctggtgagtgc

SEQ ID NO: 1987 - DNA, 122 bp, Homo sapiens
  misc_feature (61)..(62): /note="This region represents a CpG dinucleotide"
  misc_feature (61)..(61): /note="Nucleotide may be methylated to form 5-methylcytosine"
cattagactaatatccatctgtgggatcaaaggggagagcaaacatatttagcttttgtacgcagcttgttctttgtgatgagaacacagtgtgtcacataaaaatccaccaccacatgctt

SEQ ID NO: 1988 - DNA, 122 bp, Homo sapiens
  misc_feature (61)..(62): /note="This region represents a CpG dinucleotide"
  misc_feature (61)..(61): /note="Nucleotide may be methylated to form 5-methylcytosine"
ctcctaccgtcagcagggtggccctggtggtggcggagtcctccaggtgcagcttcctcccgccgagcacgcccttcaggtgcttccggacctcctggttgagcacgcagtggaaaaggagg

SEQ ID NO: 1989 - DNA, 122 bp, Homo sapiens
  misc_feature (61)..(62): /note="This region represents a CpG dinucleotide"
  misc_feature (61)..(61): /note="Nucleotide may be methylated to form 5-methylcytosine"
ttgatttgtgtgatgcacagctcaacccttctgttacttgagaaggccctttgatcctaacgtcttggagtgtgaggcaggagaaggctaggtagaaaaaaaaaagagaagcaatttcagaa

SEQ ID NO: 1990 - DNA, 122 bp, Homo sapiens
  misc_feature (61)..(62): /note="This region represents a CpG dinucleotide"
  misc_feature (61)..(61): /note="Nucleotide may be methylated to form 5-methylcytosine"
aaatttttttttaactattcacggaagctggatgttcttccttgtcatttgaatcaaggccgtctaacaggaattgaataattcagggactagcatttaacccatatcaggtctaggcaaga

SEQ ID NO: 1991 - DNA, 122 bp, Homo sapiens
  misc_feature (61)..(62): /note="This region represents a CpG dinucleotide"
  misc_feature (61)..(61): /note="Nucleotide may be methylated to form 5-methylcytosine"
ttttcctgaaagtctgttttttcatccttccttccttttcatcatctcccgttttcaaaacggctcttaaaccatgcgcaatgcgttaacgttaagtcgtcatttccatctactcaatgaca

SEQ ID NO: 1992 - DNA, 122 bp, Homo sapiens
  misc_feature (61)..(62): /note="This region represents a CpG dinucleotide"
  misc_feature (61)..(61): /note="Nucleotide may be methylated to form 5-methylcytosine"
taaatacactctatgatcttcagacagtggcaaaactgcctaacaagacatttctcagaacgtatccccatcattgcacaatgcatgactgtatataatttgctcctgtcttcccaagaacc

SEQ ID NO: 1993 - DNA, 122 bp, Homo sapiens
  misc_feature (61)..(62): /note="This region represents a CpG dinucleotide"
  misc_feature (61)..(61): /note="Nucleotide may be methylated to form 5-methylcytosine"
aaagggataaagggagcaaaggattcaggctgcaggactggctgtgccacttcccggctgcgtgaccgtgagcaagttacttcacctcccagagcctcagaggcccccatctgctacggttg

SEQ ID NO: 1994 - DNA, 122 bp, Homo sapiens
  misc_feature (61)..(62): /note="This region represents a CpG dinucleotide"
  misc_feature (61)..(61): /note="Nucleotide may be methylated to form 5-methylcytosine"
ttctgccatccctatggaactgtcaggcagcacgctgaaactgaattcaggaaacaaagtcgtcatcttcttaaagtcatagtagtaatttaaggccaaaagaccagagtcatctgataata

SEQ ID NO: 1995 - DNA, 122 bp, Homo sapiens
  misc_feature (61)..(62): /note="This region represents a CpG dinucleotide"
  misc_feature (61)..(61): /note="Nucleotide may be methylated to form 5-methylcytosine"
ctgaatctgctctgctggaacatggataatgtggggcggcctgtcgccatggtgatgcaccgcgttgctctcctgttcataaatggcatcacgttctggctgaggaagactgaggaaccttc

SEQ ID NO: 1996 - DNA, 122 bp, Homo sapiens
  misc_feature (61)..(62): /note="This region represents a CpG dinucleotide"
  misc_feature (61)..(61): /note="Nucleotide may be methylated to form 5-methylcytosine"
tggatctggccgcctttcagatccgagccccgcgtcccgctgcgccctaggagcgcgcggcggccccagagccctggctcggtgccctgagggccccacccccctgagcgcgcccgcggagc

SEQ ID NO: 1997 - DNA, 122 bp, Homo sapiens
  misc_feature (61)..(62): /note="This region represents a CpG dinucleotide"
  misc_feature (61)..(61): /note="Nucleotide may be methylated to form 5-methylcytosine"
gcacgtgggcttcttgtggcacgttcctggaggccgaacccttctggctttggaaggagtcgtcagagacccccgccatgcgggaggctggggaggaaggggctcgaaacctccatcatcgc

SEQ ID NO: 1998 - DNA, 122 bp, Homo sapiens
  misc_feature (61)..(62): /note="This region represents a CpG dinucleotide"
  misc_feature (61)..(61): /note="Nucleotide may be methylated to form 5-methylcytosine"
aaactctcctcctcctaatgtcccctttttactttttctttctcttataaataccatcatcgttctaggatcagagctagctattccagcacttttcatttctttgagtcggtaacccatat

SEQ ID NO: 1999 - DNA, 122 bp, Homo sapiens
  misc_feature (61)..(62): /note="This region represents a CpG dinucleotide"
  misc_feature (61)..(61): /note="Nucleotide may be methylated to form 5-methylcytosine"
ttgcccaggctaatagatttttttaaatgatcatacaggacggctgggtgcagtggttcacgcctgtaatcccagcactttgggaatcccagtactttgggaggccgaggcgggcaaatcac

SEQ ID NO: 2000 - DNA, 122 bp, Homo sapiens
  misc_feature (61)..(62): /note="This region represents a CpG dinucleotide"
  misc_feature (61)..(61): /note="Nucleotide may be methylated to form 5-methylcytosine"
cagccctggagagccagagacagagtctgttgcatccacagcactcagcactgcttgccacgtggtagccattcaataaatagtaaatgctcaaacagtatttgtagatagatggacagatg

SEQ ID NO: 2001 - DNA, 122 bp, Homo sapiens
  misc_feature (61)..(62): /note="This region represents a CpG dinucleotide"
  misc_feature (61)..(61): /note="Nucleotide may be methylated to form 5-methylcytosine"
aaaacattttgatttcctttagccacttgcagggtcttgcgccatccttttgtctgggtgcgtagctgtccagcagctctagcactacctggaagttgaggcatggtcatgcagaactaagg

SEQ ID NO: 2002 - DNA, 122 bp, Homo sapiens
  misc_feature (61)..(62): /note="This region represents a CpG dinucleotide"
  misc_feature (61)..(61): /note="Nucleotide may be methylated to form 5-methylcytosine"
ttctaaacaaggcataatatgaacattaactcagcgtgctctctctgggttgggactgcccgtcccactcactgatgattaaacctatgagaagtcttgctaaacattaaatcatcttggat

SEQ ID NO: 2003 - DNA, 122 bp, Homo sapiens
  misc_feature (61)..(62): /note="This region represents a CpG dinucleotide"
  misc_feature (61)..(61): /note="Nucleotide may be methylated to form 5-methylcytosine"
attagaagaagcaccaagcactatcaacattagcaaatcagtactaggaagtagcttggccgcttccttccatttccttccaaccctgggaactctttccattaaaaacatttctccaccac

SEQ ID NO: 2004 - DNA, 122 bp, Homo sapiens
  misc_feature (61)..(62): /note="This region represents a CpG dinucleotide"
  misc_feature (61)..(61): /note="Nucleotide may be methylated to form 5-methylcytosine"
aaatggcacaataaataactgcaagggtccatccctccacaaaaaacatgcacactcatgcgaacacacacagagtgagcaaacattgtcagaatcaactttgtcagaactgtagaaactag

SEQ ID NO: 2005 - DNA, 122 bp, Homo sapiens
  misc_feature (61)..(62): /note="This region represents a CpG dinucleotide"
  misc_feature (61)..(61): /note="Nucleotide may be methylated to form 5-methylcytosine"
ccagtgcaccagactgctggtcccgcagcaactcgcggccgggtccctcctctttcacgtcgcccccgaactgggacacagcctcccaccaccgtgatgcccgaatccccttccctaccgcg

SEQ ID NO: 2006 - DNA, 122 bp, Homo sapiens
  misc_feature (61)..(62): /note="This region represents a CpG dinucleotide"
  misc_feature (61)..(61): /note="Nucleotide may be methylated to form 5-methylcytosine"
cagtgggatctggtataaataccccagttccctgaccccttgggcggaacgactctgagacgtcggttctacactggcttccagagttcccagcatgattaaccacggagaatgacttgaca

SEQ ID NO: 2007 - DNA, 122 bp, Homo sapiens
  misc_feature (61)..(62): /note="This region represents a CpG dinucleotide"
  misc_feature (61)..(61): /note="Nucleotide may be methylated to form 5-methylcytosine"
ggtcaaagaaaaactcatatgaaagcaccaaaaatgtggatgaaagcaatgccatcctcacgtgctaaggagtgtgtgaatgcatgaaaataaggtgcttagaacaatacctaacacatacc

SEQ ID NO: 2008 - DNA, 122 bp, Homo sapiens
  misc_feature (61)..(62): /note="This region represents a CpG dinucleotide"
  misc_feature (61)..(61): /note="Nucleotide may be methylated to form 5-methylcytosine"
gagagttgcaccttgagcgggaactgcagagggttttaatggcaccagctccaaacatttcgcccacagcgtctgcagtcctccactgcggaaggcagaataaacgccccaagggtgtccac

SEQ ID NO: 2009 - DNA, 122 bp, Homo sapiens
  misc_feature (61)..(62): /note="This region represents a CpG dinucleotide"
  misc_feature (61)..(61): /note="Nucleotide may be methylated to form 5-methylcytosine"
tgaccctgagggatgggggcgctgcacatggtggggtcagagggtaaggaagtggggttccgctgctggtgggagcacagagatcactgctggacactcaagcgtccatggggatgagcccc

SEQ ID NO: 2010 - DNA, 122 bp, Homo sapiens
  misc_feature (61)..(62): /note="This region represents a CpG dinucleotide"
  misc_feature (61)..(61): /note="Nucleotide may be methylated to form 5-methylcytosine"
ctatcttagcagtgtttgtgcaggtctgtcttggtgctgacttttcatcttcttcatgtccgtaaaacttccccaagagaggggatttacggcagcctttacttctcaggagtttctgcttt

SEQ ID NO: 2011 - DNA, 122 bp, Homo sapiens
  misc_feature (61)..(62): /note="This region represents a CpG dinucleotide"
  misc_feature (61)..(61): /note="Nucleotide may be methylated to form 5-methylcytosine"
ttgttgctacatataccaaagcagagcttgagaccagcactggcttgtggttgtagtctccgtcctgtaggagacgttcaggatatggcaccatagcagcgcattgaagccctggctgtgag

SEQ ID NO: 2012 - DNA, 122 bp, Homo sapiens
  misc_feature (61)..(62): /note="This region represents a CpG dinucleotide"
  misc_feature (61)..(61): /note="Nucleotide may be methylated to form 5-methylcytosine"
agttgagagataaagcatgagtttggtctgtgaccttgattacaacatgttgtgatgtgacgatatggctttgccttgactgacatttgtttggccactgccatgggtactgtttcaagtca

SEQ ID NO: 2013 - DNA, 122 bp, Homo sapiens
  misc_feature (61)..(62): /note="This region represents a CpG dinucleotide"
  misc_feature (61)..(61): /note="Nucleotide may be methylated to form 5-methylcytosine"
gagacttttgaaccagagcaactccatcttgaaaaggggctaagtaaaataaggctgaaacgtactgggcttcattctcagagggctaggcattctaagtcacaggatgaggtaggaggtca

SEQ ID NO: 2014 - DNA, 122 bp, Homo sapiens
  misc_feature (61)..(62): /note="This region represents a CpG dinucleotide"
  misc_feature (61)..(61): /note="Nucleotide may be methylated to form 5-methylcytosine"
ttgctgccagagtgaactacataaagtacacatctgatatatagcttctctacttaattccgtctgttgcttccttattgcttacagggtagaggccacgatccttagcatggatggcataa

SEQ ID NO: 2015 - DNA, 122 bp, Homo sapiens
  misc_feature (61)..(62): /note="This region represents a CpG dinucleotide"
  misc_feature (61)..(61): /note="Nucleotide may be methylated to form 5-methylcytosine"
ggtcgccgtttcatcagaagccggaggacgggcgccagggggcaacttcctacaggagggcgtcccgttagaatgacagggcttttgcaaaagtctgacacccgtggcacagagcgccccag

SEQ ID NO: 2016 - DNA, 122 bp, Homo sapiens
  misc_feature (61)..(62): /note="This region represents a CpG dinucleotide"
  misc_feature (61)..(61): /note="Nucleotide may be methylated to form 5-methylcytosine"
caaggcctgacccttttctctgggcctccaggagaggctgaggagggggctggagtccggcgctcactagggctgctaagggccaggagttcgggaacaggaggcccctggcctggtggtct

SEQ ID NO: 2017 - DNA, 122 bp, Homo sapiens
  misc_feature (61)..(62): /note="This region represents a CpG dinucleotide"
  misc_feature (61)..(61): /note="Nucleotide may be methylated to form 5-methylcytosine"
tgtcagtgggattaaattaaaagaggtcctagtggtaagtgcttcctgcaggggctgacacgtggccgacatcagtggacaacagtcatgtcaatctgattgcaatgagcagagacagagcc

SEQ ID NO: 2018 - DNA, 122 bp, Homo sapiens
  misc_feature (61)..(62): /note="This region represents a CpG dinucleotide"
  misc_feature (61)..(61): /note="Nucleotide may be methylated to form 5-methylcytosine"
tctaaagttttgtggctttatgattctacgaaatctgtaccacagattcttccctaactgcgcaaattctacatcacaaatcctagacggttagaaaacctctctctggcaatttcattaaa

SEQ ID NO: 2019 - DNA, 122 bp, Homo sapiens
  misc_feature (61)..(62): /note="This region represents a CpG dinucleotide"
  misc_feature (61)..(61): /note="Nucleotide may be methylated to form 5-methylcytosine"
gaaacaaaaggctcagcttgacagtgtctgcgtttttgcgtcacccagctctttgttccacgcctgctccaaagcctattaatttgtcagatggtcttctcgggaaagataaagttgctata

SEQ ID NO: 2020 - DNA, 122 bp, Homo sapiens
  misc_feature (61)..(62): /note="This region represents a CpG dinucleotide"
  misc_feature (61)..(61): /note="Nucleotide may be methylated to form 5-methylcytosine"
gaggcccactttttccagacacggcgctgtgatgactggtaggagccacgaggatggctgcgtggggagccttggtcctgtcacttcctctctgcatctgtggacaagttgttcccctctag

SEQ ID NO: 2021 - DNA, 122 bp, Homo sapiens
  misc_feature (61)..(62): /note="This region represents a CpG dinucleotide"
  misc_feature (61)..(61): /note="Nucleotide may be methylated to form 5-methylcytosine"
tgggggagcgtggccaaagctaaagcagtggctggcagctggtggcgctgtggttccagacgaggcttggaaggaggctgtggggtgggcggggaggacccgttatggggcctcaggatcca

SEQ ID NO: 2022 - DNA, 122 bp, Homo sapiens
  misc_feature (61)..(62): /note="This region represents a CpG dinucleotide"
  misc_feature (61)..(61): /note="Nucleotide may be methylated to form 5-methylcytosine"
tcaggctgaggagtctggccccggtctctgtgcttttagcagctcagcccagctgcttctcggccacccttgcgacatcatcttccatctcacactgccaagggcaggaatgccagacttat

SEQ ID NO: 2023 - DNA, 122 bp, Homo sapiens
  misc_feature (61)..(62): /note="This region represents a CpG dinucleotide"
  misc_feature (61)..(61): /note="Nucleotide may be methylated to form 5-methylcytosine"
acagagtaaatccaggatttcctctccaagcagtgagtaaatgtcatctatgtaagtactcgttattcctgttgttgacttgatttacacagaaaaaaaaatcgtacctgaaaaatacattt

SEQ ID NO: 2024 - DNA, 122 bp, Homo sapiens
  misc_feature (61)..(62): /note="This region represents a CpG dinucleotide"
  misc_feature (61)..(61): /note="Nucleotide may be methylated to form 5-methylcytosine"
ctccaggcgtgagccaccacccccggcctctttcatgaatttcattcagacaatctcttacggcattttctgtcttaatctaggataaggtttcttaacattggctctgttgacatttgggt

SEQ ID NO: 2025 - DNA, 122 bp, Homo sapiens
  misc_feature (61)..(62): /note="This region represents a CpG dinucleotide"
  misc_feature (61)..(61): /note="Nucleotide may be methylated to form 5-methylcytosine"
aggagacaacatgcaatatccatggagacctccacaggtctcagacccggagcagcctggcgccagtgccctagccacaatagaggccacagaagcagtgcccaagagcagtaaatttgctc

SEQ ID NO: 2026 - DNA, 122 bp, Homo sapiens
  misc_feature (61)..(62): /note="This region represents a CpG dinucleotide"
  misc_feature (61)..(61): /note="Nucleotide may be methylated to form 5-methylcytosine"
catctgccggaaaatcttcatactaaaactacaaatcactggtgatcatgccacggaaggcgccctctatggttgtgcaaggtataacttgcacgatcacacagtgaccctctaggggatat

SEQ ID NO: 2027 - DNA, 122 bp, Homo sapiens
  misc_feature (61)..(62): /note="This region represents a CpG dinucleotide"
  misc_feature (61)..(61): /note="Nucleotide may be methylated to form 5-methylcytosine"
gcggcaggagacctggggctgtccatcatcaactctgctttcttctggtcctcctgaaggcgatctgggtaatgtacttctgtggctgccacagccctccttagtaagagatatttaagtta

SEQ ID NO: 2028 - DNA, 122 bp, Homo sapiens
  misc_feature (61)..(62): /note="This region represents a CpG dinucleotide"
  misc_feature (61)..(61): /note="Nucleotide may be methylated to form 5-methylcytosine"
tgaaacagatggtttgaatttgtcccttctgtatagcctctaaatatgaagtgacctgggcgggatgcagagggcctcaggggtgagtcttttgtatggtgctttgtgatctcactgtgcct

SEQ ID NO: 2029 - DNA, 122 bp, Homo sapiens
  misc_feature (61)..(62): /note="This region represents a CpG dinucleotide"
  misc_feature (61)..(61): /note="Nucleotide may be methylated to form 5-methylcytosine"
ccacttggacaggcagcctgtgcctgaattttcctgagggcttcagagcctgtctcgcctcgcctcacatgcctggctcaccttagaacggtcaccttgacggctaaagggacacctgtgtg

SEQ ID NO: 2030 - DNA, 122 bp, Homo sapiens
  misc_feature (61)..(62): /note="This region represents a CpG dinucleotide"
  misc_feature (61)..(61): /note="Nucleotide may be methylated to form 5-methylcytosine"
caccccaccatgcatgcttactgtagacctaatcactaattagcccaagggttgactgagcgtgctggtgagagtaacaggaggcaggtggatggggaggtgtgatgctgcgcgcatagtag

SEQ ID NO: 2031 - DNA, 122 bp, Homo sapiens
  misc_feature (61)..(62): /note="This region represents a CpG dinucleotide"
  misc_feature (61)..(61): /note="Nucleotide may be methylated to form 5-methylcytosine"
ttattagtaatgattaacttggcaatgtatgtcctgggctcagtacaacttccatcatcccggctccttcactgtggttcccatgtgctctgtgtagaccccttgtgtccgaatcacctggg

SEQ ID NO: 2032 - DNA, 122 bp, Homo sapiens
  misc_feature (61)..(62): /note="This region represents a CpG dinucleotide"
  misc_feature (61)..(61): /note="Nucleotide may be methylated to form 5-methylcytosine"
ataatttatgaaggatttttattcttgatttggtaccttatgcatagactgtaaaactaacggagatctgctcagcttacatgttgcaacaggtgttccctgctgccccagttgatgttctg

SEQ ID NO: 2033 - DNA, 122 bp, Homo sapiens
  misc_feature (61)..(62): /note="This region represents a CpG dinucleotide"
  misc_feature (61)..(61): /note="Nucleotide may be methylated to form 5-methylcytosine"
aaaaagccgggccacattctgctcagccaacatgttcccagaggaatgtgatttaacttccgcttttcacacagtcagaagcaacaccatagacctgtagggaaggtgatggccgcctggga

SEQ ID NO: 2034 - DNA, 122 bp, Homo sapiens
  misc_feature (61)..(62): /note="This region represents a CpG dinucleotide"
  misc_feature (61)..(61): /note="Nucleotide may be methylated to form 5-methylcytosine"
cacgatgacttcacgtcagtgccagcatatgcagccgtggaatacagtgagcgctctctgcggctgacagcaatagcggtgatctaatttacccggcgactggaagaaactctttgtacagg

SEQ ID NO: 2035 - DNA, 122 bp, Homo sapiens
  misc_feature (61)..(62): /note="This region represents a CpG dinucleotide"
  misc_feature (61)..(61): /note="Nucleotide may be methylated to form 5-methylcytosine"
accggggggcagggcgggtgtctgcagcgtcctcgggaggtctcaggccccttgggcagacgctgcgcgtgcccagagggagggatggcaggcttcagccacttctcccagccgccctaccg

SEQ ID NO: 2036 - DNA, 122 bp, Homo sapiens
  misc_feature (61)..(62): /note="This region represents a CpG dinucleotide"
  misc_feature (61)..(61): /note="Nucleotide may be methylated to form 5-methylcytosine"
gaaacgaaatcttcatgccaaaactaacacttgtcagttggacctctctatagtctgtaacgtattttatttcctctccctttagtgaagttcatctgacatttttctcaagttagtcctct

SEQ ID NO: 2037 - DNA, 122 bp, Homo sapiens
  misc_feature (61)..(62): /note="This region represents a CpG dinucleotide"
  misc_feature (61)..(61): /note="Nucleotide may be methylated to form 5-methylcytosine"
tgtcaatgaagaaatcatctgatgccagggactttgaagtctttctccaagaggtagatacgatgatctctgttttgctggaaagaaagctgatacccagaaagagcctgtaatctcaggtc

SEQ ID NO: 2038 - DNA, 122 bp, Homo sapiens
  misc_feature (61)..(62): /note="This region represents a CpG dinucleotide"
  misc_feature (61)..(61): /note="Nucleotide may be methylated to form 5-methylcytosine"
acagcatgtggaataaattttgcctgatgacaggctttcagctattttgccaccactgggcgcggacgctgcgcttagcagagcctgtttgccagcggcgggctccctgagaccccggcaac

SEQ ID NO: 2039 - DNA, 122 bp, Homo sapiens
  misc_feature (61)..(62): /note="This region represents a CpG dinucleotide"
  misc_feature (61)..(61): /note="Nucleotide may be methylated to form 5-methylcytosine"
agcgggtggggtcgggaggagctcggggaccagaaaacgctctgtttgggtgggtgcgtgcgtgggcatagtggtttggaaggagcgtgatgaggggagaagggccggggcggggctgcgag

SEQ ID NO: 2040 - DNA, 122 bp, Homo sapiens
  misc_feature (61)..(62): /note="This region represents a CpG dinucleotide"
  misc_feature (61)..(61): /note="Nucleotide may be methylated to form 5-methylcytosine"
agggtcccccttgtgggcatgaaaagtatcttgtttcacatttcagaattcctcaaatcacgagagaaatattaaagagggataaaggaggaatgaaagggatgacatttttatatgctata

SEQ ID NO: 2041 - DNA, 122 bp, Homo sapiens
  misc_feature (61)..(62): /note="This region represents a CpG dinucleotide"
  misc_feature (61)..(61): /note="Nucleotide may be methylated to form 5-methylcytosine"
ttcccataagcagagcccttgaaggtgctggcacagattccacgatctgaggcctcctgacggcctctggagcccccttctgccgcttcccacgtagggctgccgcgtgtggtccgaaaatc

SEQ ID NO: 2042 - DNA, 122 bp, Homo sapiens
  misc_feature (61)..(62): /note="This region represents a CpG dinucleotide"
  misc_feature (61)..(61): /note="Nucleotide may be methylated to form 5-methylcytosine"
aatttcaagtattttttatatattgtgaaattgcctctccctgggcctgtgaccaattatcgctctagtgtgacagttgtgggccatcaggaaattgcctctccctggctccagctgccaat

SEQ ID NO: 2043 - DNA, 122 bp, Homo sapiens
  misc_feature (61)..(62): /note="This region represents a CpG dinucleotide"
  misc_feature (61)..(61): /note="Nucleotide may be methylated to form 5-methylcytosine"
caccaccaccctcggcgtgggatgccggcccgcgaggaacctcggggacacacaaatggccgcacctgaatctggctgccattgtgactctgccgcgcacgcgcagctccatcccctttgag

SEQ ID NO: 2044 - DNA, 122 bp, Homo sapiens
  misc_feature (61)..(62): /note="This region represents a CpG dinucleotide"
  misc_feature (61)..(61): /note="Nucleotide may be methylated to form 5-methylcytosine"
ggtggccttgttcctaggatcctgagaaaacatttgattcataggaaccacaagttacatcggatgaatccttaagcattcccaaaggacattcattcccacctggctctcatcgcatccct

SEQ ID NO: 2045 - DNA, 122 bp, Homo sapiens
  misc_feature (61)..(62): /note="This region represents a CpG dinucleotide"
  misc_feature (61)..(61): /note="Nucleotide may be methylated to form 5-methylcytosine"
taccaaggagaaagaggagagacagcagtgctgggagattctcaaatagaaacccgtggacgctccaatgggcttgtcatgatatcaggctaggctttcctgctcatttttcaaagacgctc

SEQ ID NO: 2046 - DNA, 122 bp, Homo sapiens
  misc_feature (61)..(62): /note="This region represents a CpG dinucleotide"
  misc_feature (61)..(61): /note="Nucleotide may be methylated to form 5-methylcytosine"
gcaattgactgcatgagtctggagtttaggggaagttcgggctgtaaataaagacttggacggataggcagttgtgtgctggtaatgtttaccaactgactctgtgaggggtggggttggta

SEQ ID NO: 2047 - DNA, 122 bp, Homo sapiens
  misc_feature (61)..(62): /note="This region represents a CpG dinucleotide"
  misc_feature (61)..(61): /note="Nucleotide may be methylated to form 5-methylcytosine"
ggctctctttcctcctcctttctgaggcttgagggagaggaaagtccttcctgcctggggcgcccagagctgtcactttggctctggttcagtgaaacctggccattgacaggacagatggc

SEQ ID NO: 2048 - DNA, 122 bp, Homo sapiens
  misc_feature (61)..(62): /note="This region represents a CpG dinucleotide"
  misc_feature (61)..(61): /note="Nucleotide may be methylated to form 5-methylcytosine"
gtaccggctgatggattaaaaaataaaaacaagcccatgaatgtagttctgatacagcagcgatctaaagatgaggtgtttattagttctaagctctgtgttatttcattacttaaagagag

SEQ ID NO: 2049 - DNA, 122 bp, Homo sapiens
  misc_feature (61)..(62): /note="This region represents a CpG dinucleotide"
  misc_feature (61)..(61): /note="Nucleotide may be methylated to form 5-methylcytosine"
ttcaccactgggtgtttgaggggtgagggatgtgactaatcatggagccagtgagtcacgcgtgtcaggcctctgagcacagcaagagctctttgggctctgcactggcaccactctcggcg

SEQ ID NO: 2050 - DNA, 122 bp, Homo sapiens
  misc_feature (61)..(62): /note="This region represents a CpG dinucleotide"
  misc_feature (61)..(61): /note="Nucleotide may be methylated to form 5-methylcytosine"
gcgacaggcttggaagttggagcccgggccctgggttctctcagcttccagctcaggaggcggagtgggaggagcgggcctggcggccgtgggggcggggctgctccactaacggttactgg

SEQ ID NO: 2051 - DNA, 122 bp, Homo sapiens
  misc_feature (61)..(62): /note="This region represents a CpG dinucleotide"
  misc_feature (61)..(61): /note="Nucleotide may be methylated to form 5-methylcytosine"
gaaagactcctgggccctccctttgagcatttactaaaaatggcttgcaaatacgaatcccgcctctatccctttgagatgtatatctatctccttcagctcaggagtgtctttctttagga

SEQ ID NO: 2052 - DNA, 122 bp, Homo sapiens
  misc_feature (61)..(62): /note="This region represents a CpG dinucleotide"
  misc_feature (61)..(61): /note="Nucleotide may be methylated to form 5-methylcytosine"
cgcgggtgctggaggcacagcggcttccacgcagacgcccgcagcaccacagcctgtgcacggcgcatccacgccctgttacaaatgttccattcaacgccttctagcacattcacagatcg

SEQ ID NO: 2053 - DNA, 122 bp, Homo sapiens
  misc_feature (61)..(62): /note="This region represents a CpG dinucleotide"
  misc_feature (61)..(61): /note="Nucleotide may be methylated to form 5-methylcytosine"
ctggcggaggctgctcagcccgagtggcactgcacaggctcctgaaggcagatgaggccccggagagaaaacacaggaagacagcccccacagccccgcccctccgcgaaggagagccgtca

SEQ ID NO: 2054 - DNA, 122 bp, Homo sapiens
  misc_feature (61)..(62): /note="This region represents a CpG dinucleotide"
  misc_feature (61)..(61): /note="Nucleotide may be methylated to form 5-methylcytosine"
cttctgtgaatcctgctgctgtggacatttgcgtagtcctcgtgtggatgctgctgtggacgtctgcgtcgtcctcgtgtggatgctgctgtggacgtctgcgtcgtcctcgtgtggatgct

SEQ ID NO: 2055 - DNA, 122 bp, Homo sapiens
  misc_feature (61)..(62): /note="This region represents a CpG dinucleotide"
  misc_feature (61)..(61): /note="Nucleotide may be methylated to form 5-methylcytosine"
ccattttgtagggctgaccccaaattcttccctgaagtaattaagtgagacaagtaattacgtcactgtaaggctctaaaatgtcactaaaatgacaacccagctacttcctgaagttttac

SEQ ID NO: 2056 - DNA, 122 bp, Homo sapiens
  misc_feature (61)..(62): /note="This region represents a CpG dinucleotide"
  misc_feature (61)..(61): /note="Nucleotide may be methylated to form 5-methylcytosine"
cttctcctgctcattcatttgtcagtcacagtaactaaggattattatttgctgaatgtacgtgacaccagcaatttgcaaagtctgttggcaagaaaatcaggttagcatgacagagtgag

SEQ ID NO: 2057 - DNA, 122 bp, Homo sapiens
  misc_feature (61)..(62): /note="This region represents a CpG dinucleotide"
  misc_feature (61)..(61): /note="Nucleotide may be methylated to form 5-methylcytosine"
cgggagacgaaggatgggatgtgaggcggtcctgccttgccgccttctgtccctagtctccgggtccccgccctccagccgcctttgattcgtgactgggtcacggtcctcactcattcctc

SEQ ID NO: 2058 - DNA, 122 bp, Homo sapiens
  misc_feature (61)..(62): /note="This region represents a CpG dinucleotide"
  misc_feature (61)..(61): /note="Nucleotide may be methylated to form 5-methylcytosine"
tgtgggctgaatcatggctggggggggcagcaggagtgaggttggccggtcgagatagaacgatgggtgtgatgcatgcaaaaaacctgaaaagatgtctctaaactccagtctttggttct

SEQ ID NO: 2059 - DNA, 122 bp, Homo sapiens
  misc_feature (61)..(62): /note="This region represents a CpG dinucleotide"
  misc_feature (61)..(61): /note="Nucleotide may be methylated to form 5-methylcytosine"
gcagcggagaatgaatatcacctaggtaacaactcacaagcacagtgtctggcttcggggcgtaggggcggggacacatgtaatcaatacaagccgcctgcctgggtggcttcccccttccc

SEQ ID NO: 2060 - DNA, 122 bp, Homo sapiens
  misc_feature (61)..(62): /note="This region represents a CpG dinucleotide"
  misc_feature (61)..(61): /note="Nucleotide may be methylated to form 5-methylcytosine"
gggaaccttgctctaaaacctaagcagccacatgaaaatgatttagcttcctgaagattgcgcaagagtcaacagcacagctagacaatattgttttaattcttcatgttgcagaattatct

SEQ ID NO: 2061 - DNA, 122 bp, Homo sapiens
  misc_feature (61)..(62): /note="This region represents a CpG dinucleotide"
  misc_feature (61)..(61): /note="Nucleotide may be methylated to form 5-methylcytosine"
gctcctttcactgtccaaacgtcaaccaaaggaacttttgtgacgctaagacgctcccggcgtcctcacccgttcacagccagagttgatcttagaaggcagggggctcgcaccgagacgct

SEQ ID NO: 2062 - DNA, 122 bp, Homo sapiens
  misc_feature (61)..(62): /note="This region represents a CpG dinucleotide"
  misc_feature (61)..(61): /note="Nucleotide may be methylated to form 5-methylcytosine"
gtatacaaaatgtggctgtttcctgcatagcagaatgaggttccagcacttcagcagccacggtcctgagtgcttgcccaagaccccttgatttatgattgtgacaggaagttttgcaagga

SEQ ID NO: 2063 - DNA, 122 bp, Homo sapiens
  misc_feature (61)..(62): /note="This region represents a CpG dinucleotide"
  misc_feature (61)..(61): /note="Nucleotide may be methylated to form 5-methylcytosine"
gccagcacagcactgggtgttgcccatggtctggtgtaaccactacttggctaccacttacgtttgctcaaggccctagggttcttcagtcagcaggtggtaaggacagtcgtgcttgtttt

SEQ ID NO: 2064 - DNA, 122 bp, Homo sapiens
  misc_feature (61)..(62): /note="This region represents a CpG dinucleotide"
  misc_feature (61)..(61): /note="Nucleotide may be methylated to form 5-methylcytosine"
ggtgaatcagacacttgaacatctgtccacttcatggaagacgtttcatctcagaatacacgtactaataaacaacagttggagacaattgtctctgacattcaacataatgctgagctgag

SEQ ID NO: 2065 - DNA, 122 bp, Homo sapiens
  misc_feature (61)..(62): /note="This region represents a CpG dinucleotide"
  misc_feature (61)..(61): /note="Nucleotide may be methylated to form 5-methylcytosine"
gccctgtcatcatcctgtgaagatgaatgtccacggtgcagggctgttgatgtagaaagacgtggagtgttgaaatgatgtacactgagtttgtgatttccccaggcactgcactctaatgt

SEQ ID NO: 2066 - DNA, 122 bp, Homo sapiens
  misc_feature (61)..(62): /note="This region represents a CpG dinucleotide"
  misc_feature (61)..(61): /note="Nucleotide may be methylated to form 5-methylcytosine"
ctgaaggtggcccggagggacctgtggttttcagaggcccggccattcccgagggtgtgacggtcagacctccaatccatcccaaacccaagcaaacacagctggcccaggcctgcagtgtg

SEQ ID NO: 2067 - DNA, 122 bp, Homo sapiens
  misc_feature (61)..(62): /note="This region represents a CpG dinucleotide"
  misc_feature (61)..(61): /note="Nucleotide may be methylated to form 5-methylcytosine"
gacccactggctggtccactgtggcgcacgtcatccacgccaccacctacttacctccagcggagccctggaaacaaacacaattcgctgcctttcttgcagcaatataaataatccttata

SEQ ID NO: 2068 - DNA, 122 bp, Homo sapiens
  misc_feature (61)..(62): /note="This region represents a CpG dinucleotide"
  misc_feature (61)..(61): /note="Nucleotide may be methylated to form 5-methylcytosine"
cagctctaatttatcactgtctttcatgtccagagcccaacactgactcaccgttgttaacgtgtttcttagttcaaattttcaacagaaaaggatctggtcactagcccagcaaaggatgg

SEQ ID NO: 2069 - DNA, 122 bp, Homo sapiens
  misc_feature (61)..(62): /note="This region represents a CpG dinucleotide"
  misc_feature (61)..(61): /note="Nucleotide may be methylated to form 5-methylcytosine"
acaagttaaggggcctcacgcttactcagcagaggaaatctttgtgtctgtgaggaatcacgccaattcctattagtaagaaaggatacaggggtgaggaagcctattctctcaatgaccag

SEQ ID NO: 2070 - DNA, 122 bp, Homo sapiens
  misc_feature (61)..(62): /note="This region represents a CpG dinucleotide"
  misc_feature (61)..(61): /note="Nucleotide may be methylated to form 5-methylcytosine"
aatatcaactacaattgaatatttagaaagtaaagaaatgctgtaatcgcaagggtattgcgattgttaggttgggctaatttctgtaataaacaacccccaaaatctcagtggttatggaa

SEQ ID NO: 2071 - DNA, 122 bp, Homo sapiens
  misc_feature (61)..(62): /note="This region represents a CpG dinucleotide"
  misc_feature (61)..(61): /note="Nucleotide may be methylated to form 5-methylcytosine"
tctggcctaagcatgcagactctggaaatttatcccacagcacgtgcatagttttcgatgcgtcatttacccaatgaggctgaacctggaattggacttctacctgcccgtcctttccaggt

SEQ ID NO: 2072 - DNA, 122 bp, Homo sapiens
  misc_feature (61)..(62): /note="This region represents a CpG dinucleotide"
  misc_feature (61)..(61): /note="Nucleotide may be methylated to form 5-methylcytosine"
tactggggagactgaggcaggagaatcgcttgaacccggcaggcagaagttgcaatgagccgagatcgcgcaaatgcactccagcccaggcgatggtgagagactccgtttcaaaaaaaaaa

SEQ ID NO: 2073 - DNA, 122 bp, Homo sapiens
  misc_feature (61)..(62): /note="This region represents a CpG dinucleotide"
  misc_feature (61)..(61): /note="Nucleotide may be methylated to form 5-methylcytosine"
agcatgagatactagtacaggtggacaggtcagggtttgcttactcttcactgaactctacgtagtaggtacaactgccttggatcaaaaacaatttttagagaccctgatagaggattaat

SEQ ID NO: 2074 - DNA, 122 bp, Homo sapiens
  misc_feature (61)..(62): /note="This region represents a CpG dinucleotide"
  misc_feature (61)..(61): /note="Nucleotide may be methylated to form 5-methylcytosine"
gcatatcatatttaattatatctttttcctctgactaaataaagcatcactggctgggtgcggtggctcaagcctgtaatcccagcactttgggaggctgaggtgggtggatcacctgaggt

SEQ ID NO: 2075 - DNA, 122 bp, Homo sapiens
  misc_feature (61)..(62): /note="This region represents a CpG dinucleotide"
  misc_feature (61)..(61): /note="Nucleotide may be methylated to form 5-methylcytosine"
ctttatctcactcagctataacaatttgtgaatcctcattaattgtctaacaatgtttcacgaatcttgaaagtaactgaaataaaagggttcattagtgtgtgcttcataatgagagaaac

SEQ ID NO: 2076 - DNA, 122 bp, Homo sapiens
  misc_feature (61)..(62): /note="This region represents a CpG dinucleotide"
  misc_feature (61)..(61): /note="Nucleotide may be methylated to form 5-methylcytosine"
ctctaattgacggctccccttgggtctgaaagaaaagatgtaatcagaccacacaaagcacgtcctgtccaattacaaggatcggcatggatgggctgacctgtgacctataaaacaaaatt

SEQ ID NO: 2077 - DNA, 122 bp, Homo sapiens
  misc_feature (61)..(62): /note="This region represents a CpG dinucleotide"
  misc_feature (61)..(61): /note="Nucleotide may be methylated to form 5-methylcytosine"
taatggaatattatgcaaccctgtggatggatgaatggatagcaaaatatagtatgtacacgcaatggaagattatgcaaccctcagaaggagtgcagttccaacacgtgccacatgtggca

SEQ ID NO: 2078 - DNA, 122 bp, Homo sapiens
  misc_feature (61)..(62): /note="This region represents a CpG dinucleotide"
  misc_feature (61)..(61): /note="Nucleotide may be methylated to form 5-methylcytosine"
ctcacctcaacaacaaagcgcggtttcctccctcgccatccttcctcgtggtcgcgcacccggttggatttcacagtcatggaagttctgctttaaaatccgtttctgaagaagtgttaatg

SEQ ID NO: 2079 - DNA, 122 bp, Homo sapiens
  misc_feature (61)..(62): /note="This region represents a CpG dinucleotide"
  misc_feature (61)..(61): /note="Nucleotide may be methylated to form 5-methylcytosine"
tcctccctccggtaagtagctccatcccatagcctctgaagtttgcatgccatgagggaccgccccctccagcaaatctgtcaaggctttgaccaaagaaaacgtatgcattctactgccat

SEQ ID NO: 2080 - DNA, 122 bp, Homo sapiens
  misc_feature (61)..(62): /note="This region represents a CpG dinucleotide"
  misc_feature (61)..(61): /note="Nucleotide may be methylated to form 5-methylcytosine"
gcagggggcgaggacacttcccgagacgcgcttcccctgctgtaggcaggtggggtgacgcgagatgccaggcgcgggactgtgagcctgtccaacccagccagagaaaacgttcagcatct

SEQ ID NO: 2081 - DNA, 122 bp, Homo sapiens
  misc_feature (61)..(62): /note="This region represents a CpG dinucleotide"
  misc_feature (61)..(61): /note="Nucleotide may be methylated to form 5-methylcytosine"
gagtcaaagagttttgtcttcaaaaattacataatcgggatttgctaagagtttacttttcggtatggaagactggaaaagagaaagaaatcttaggtttcttgaatgttgggtttgggaat

SEQ ID NO: 2082 - DNA, 122 bp, Homo sapiens
  misc_feature (61)..(62): /note="This region represents a CpG dinucleotide"
  misc_feature (61)..(61): /note="Nucleotide may be methylated to form 5-methylcytosine"
cggcccggcaggacccaggcgtggacttttaagggcatttttctaccttgtggtggctgccgggtttatcagcgtgcagttgaaccggacgtgatattcctgagccctcccgggacgcctgc

SEQ ID NO: 2083 - DNA, 122 bp, Homo sapiens
  misc_feature (61)..(62): /note="This region represents a CpG dinucleotide"
  misc_feature (61)..(61): /note="Nucleotide may be methylated to form 5-methylcytosine"
gtgaggagtgacctttgttacttgacaaaagtatcgtttatatgatcaacaggcatcctacgctgtgtgcacacagcatatcaccgggagagacggcacggaaagatggccctgccctcaag

SEQ ID NO: 2084 - DNA, 122 bp, Homo sapiens
  misc_feature (61)..(62): /note="This region represents a CpG dinucleotide"
  misc_feature (61)..(61): /note="Nucleotide may be methylated to form 5-methylcytosine"
gttttcctgcaacttctcactcgagagcagttgctgtatctgcctctgcggtagatcagacgctgatggctcttatcttcctcatgactccaaaccacacagttcggttcctggtatctgct

SEQ ID NO: 2085 - DNA, 122 bp, Homo sapiens
  misc_feature (61)..(62): /note="This region represents a CpG dinucleotide"
  misc_feature (61)..(61): /note="Nucleotide may be methylated to form 5-methylcytosine"
gggccagaacccacctggtgccttgggtgcagtatgcacacacctgcacaggcctacacacgccagccaacactcgtgcctgttctgtgtgtgatgcccggtatgtatacaccactgatcac

SEQ ID NO: 2086 - DNA, 122 bp, Homo sapiens
  misc_feature (61)..(62): /note="This region represents a CpG dinucleotide"
  misc_feature (61)..(61): /note="Nucleotide may be methylated to form 5-methylcytosine"
ttctcagatattttgcacttcctcttcaaactctgaagtacacaggcagtggtcatgcggcgtgatctaagttaaaaaggcgtggcacctgtttaccgggatccacccttgtggactgagag

SEQ ID NO: 2087 - DNA, 122 bp, Homo sapiens
  misc_feature (61)..(62): /note="This region represents a CpG dinucleotide"
  misc_feature (61)..(61): /note="Nucleotide may be methylated to form 5-methylcytosine"
ggtggggggagtgggattggaagaggcttctcaacctggggttggggctgcgggagggcacgcgagccccaggctggagggttaggtgaggggctaagttggtcggggtaggggatggagag

SEQ ID NO: 2088 - DNA, 122 bp, Homo sapiens
  misc_feature (61)..(62): /note="This region represents a CpG dinucleotide"
  misc_feature (61)..(61): /note="Nucleotide may be methylated to form 5-methylcytosine"
aaatatatgtttttcccaccgggtcccattttgactcccccaataccctccagttcatcccggagtgctgcagatatctatacatttcctggatgtctcaggaggtgaaaaaaaaaaaaaaa

SEQ ID NO: 2089 - DNA, 122 bp, Homo sapiens
  misc_feature (61)..(62): /note="This region represents a CpG dinucleotide"
  misc_feature (61)..(61): /note="Nucleotide may be methylated to form 5-methylcytosine"
tcagtctatcaaatcaatgcttgcatccatttcctaaggctataagatttggagctacagcggtcgctctatttgaagagtaggtggctattttgacattaaatgtagatgccactagcagc

SEQ ID NO: 2090 - DNA, 122 bp, Homo sapiens
  misc_feature (61)..(62): /note="This region represents a CpG dinucleotide"
  misc_feature (61)..(61): /note="Nucleotide may be methylated to form 5-methylcytosine"
caagaatgactcagttttgtgcttagttgtctaggcaatggtggcagaatgaataagaatcgggaatcaggatagaagttgaggaaggagctgaatttaggcagaaagatgacaaatttgtt

SEQ ID NO: 2091 - DNA, 122 bp, Homo sapiens
  misc_feature (61)..(62): /note="This region represents a CpG dinucleotide"
  misc_feature (61)..(61): /note="Nucleotide may be methylated to form 5-methylcytosine"
aatcccatttcctgtttctgctcctggaccgagggggcggggccgggtgcctccgaggggcggggctggtgcaactccaaaatggctgccgcggggagcggcgattagaacgggttccagtc

SEQ ID NO: 2092 - DNA, 122 bp, Homo sapiens
  misc_feature (61)..(62): /note="This region represents a CpG dinucleotide"
  misc_feature (61)..(61): /note="Nucleotide may be methylated to form 5-methylcytosine"
tactaaatagtcgcaccccagcagcctctctcgcacaccggggccctgcatgtcagatggcgtggtctgcagggggagctctgtgccttagtggctcttggcaggacactgagggcctgcct

SEQ ID NO: 2093 - DNA, 122 bp, Homo sapiens
  misc_feature (61)..(62): /note="This region represents a CpG dinucleotide"
  misc_feature (61)..(61): /note="Nucleotide may be methylated to form 5-methylcytosine"
gcaggtctggctcccaggtttgaagattaaattctaaacacgtcatttaaaatttagaaacgaggaaaggagattttaagtaatctggaagcactggctcctattgtctgccccaagtaata

SEQ ID NO: 2094 - DNA, 122 bp, Homo sapiens
  misc_feature (61)..(62): /note="This region represents a CpG dinucleotide"
  misc_feature (61)..(61): /note="Nucleotide may be methylated to form 5-methylcytosine"
gagagatcggattatttgctctaaatcacatgtctcgtaagtggaaaggctggacttggccgggtttatttctaaactgaatctctgcacacttttttcttttggatatacaatttcacatt

SEQ ID NO: 2095 - DNA, 122 bp, Homo sapiens
  misc_feature (61)..(62): /note="This region represents a CpG dinucleotide"
  misc_feature (61)..(61): /note="Nucleotide may be methylated to form 5-methylcytosine"
ggaaacccgtcaccccctcgccgggggaaaaaggagggactgagcatgagccccggactccgagtgggattctcccaggatcctcccgcggccctgaacatccaggagacccgggagactgg

SEQ ID NO: 2096 - DNA, 122 bp, Homo sapiens
  misc_feature (61)..(62): /note="This region represents a CpG dinucleotide"
  misc_feature (61)..(61): /note="Nucleotide may be methylated to form 5-methylcytosine"
aagcatcggttgcgtttgctggagttgttgtcagcatgtttgccgctttgatttagaggccgggataaagggcgattatcaaaggactgcatgttcccggcatggccacgatgggccccggc

SEQ ID NO: 2097 - DNA, 122 bp, Homo sapiens
  misc_feature (61)..(62): /note="This region represents a CpG dinucleotide"
  misc_feature (61)..(61): /note="Nucleotide may be methylated to form 5-methylcytosine"
tgatgaagaaaggatttcccaagacaacagctatgtgccaagtgcagagggcaaacagaacggactttaaaagggcagaagattcaggagattgtttcaaggttaaattgatagaacaccta

SEQ ID NO: 2098 - DNA, 122 bp, Homo sapiens
  misc_feature (61)..(62): /note="This region represents a CpG dinucleotide"
  misc_feature (61)..(61): /note="Nucleotide may be methylated to form 5-methylcytosine"
tcatactagaaacctctaagagaaacactaaggttggaaagatcatgggttttagtcagacggatctgcatttgaccctgatttgaccttttactggctatatgatcttggacagattattt

SEQ ID NO: 2099 - DNA, 122 bp, Homo sapiens
  misc_feature (61)..(62): /note="This region represents a CpG dinucleotide"
  misc_feature (61)..(61): /note="Nucleotide may be methylated to form 5-methylcytosine"
taaagcagagctcagggctggggctccatattgcagccagggctgttctctcagggagtgcgtggagtgggcacagctacttgtcccctgtggtgtctgggtgccaggaggacaggagagca

SEQ ID NO: 2100 - DNA, 122 bp, Homo sapiens
  misc_feature (61)..(62): /note="This region represents a CpG dinucleotide"
  misc_feature (61)..(61): /note="Nucleotide may be methylated to form 5-methylcytosine"
cccacctgagcctcacgccgccaacgcctctgcttccgccctgcgccgggcacttccgcccgcacccaccaggcgccggccccaggccccgcacttccgccccacgccggcagcactgccgc

SEQ ID NO: 2101 - DNA, 122 bp, Homo sapiens
  misc_feature (61)..(62): /note="This region represents a CpG dinucleotide"
  misc_feature (61)..(61): /note="Nucleotide may be methylated to form 5-methylcytosine"
ctgggattgctcctgtttctgaaagggttaactcatccaagttagagaatgatccatcttcgacaagacaaacaattatatttgttgatccccaaaggcaaccaacaatgcacctaaaaatg

SEQ ID NO: 2102 - DNA, 122 bp, Homo sapiens
  misc_feature (61)..(62): /note="This region represents a CpG dinucleotide"
  misc_feature (61)..(61): /note="Nucleotide may be methylated to form 5-methylcytosine"
gtttcctagcaacaggcaagtgcagcttatcacagtttgagatctctaccaaccctgaagcgtgtttctcacccaccactgactggggtgggttgggggtggacactgggaaatggggtgat

SEQ ID NO: 2103 - DNA, 122 bp, Homo sapiens
  misc_feature (61)..(62): /note="This region represents a CpG dinucleotide"
  misc_feature (61)..(61): /note="Nucleotide may be methylated to form 5-methylcytosine"
gtgtgtactagcagcgttttcacagtgaaaactgcacagaccctctcccagggctccccgcgagcccactgatccacaccggagcccagggccagccatttctgtatggcttttgactggct

SEQ ID NO: 2104 - DNA, 122 bp, Homo sapiens
  misc_feature (61)..(62): /note="This region represents a CpG dinucleotide"
  misc_feature (61)..(61): /note="Nucleotide may be methylated to form 5-methylcytosine"
gaaaatttctcttatgtgttttaagagtaatgacaaaaccagaaagacataactactacacggcatagtgtcgggtaatgtcatttctatgttatgtccttggatccccacagtagtcctat

SEQ ID NO: 2105 - DNA, 122 bp, Homo sapiens
  misc_feature (61)..(62): /note="This region represents a CpG dinucleotide"
  misc_feature (61)..(61): /note="Nucleotide may be methylated to form 5-methylcytosine"
aagattcaggctgcttgattacaaacaactaccagttaaagaccagtgcacagctctctgcggtaattatgcagggcaagttgggtctgtgtttactgaagtcttaggaaacaagaagcagt

SEQ ID NO: 2106 - DNA, 122 bp, Homo sapiens
  misc_feature (61)..(62): /note="This region represents a CpG dinucleotide"
  misc_feature (61)..(61): /note="Nucleotide may be methylated to form 5-methylcytosine"
tatctgccccatgtcatttgtcttcttgttccttatttgactcttgccagcaaatctcaccgcttgataattgagccagctactgaactgctctagcagctcagattcctttccctagctgt

SEQ ID NO: 2107 - DNA, 122 bp, Homo sapiens
  misc_feature (61)..(62): /note="This region represents a CpG dinucleotide"
  misc_feature (61)..(61): /note="Nucleotide may be methylated to form 5-methylcytosine"
tttgccactgcggcttgttgtcaagaaatggaacttcagaaaacccccagatatacactgcgttaggtaaggatttcattctaatcgagtccaatgtgaccctggctttccctcccgtagtt

SEQ ID NO: 2108 - DNA, 122 bp, Homo sapiens
  misc_feature (61)..(62): /note="This region represents a CpG dinucleotide"
  misc_feature (61)..(61): /note="Nucleotide may be methylated to form 5-methylcytosine"
aagaaaaggatgcagtgagtgcaactaactacatccctccttgctctttaaattgcagttcgtaccaactagtcaaaagtgagccaaatatctgcactttggttcctgccactacctcatat

SEQ ID NO: 2109 - DNA, 122 bp, Homo sapiens
  misc_feature (61)..(62): /note="This region represents a CpG dinucleotide"
  misc_feature (61)..(61): /note="Nucleotide may be methylated to form 5-methylcytosine"
cagagacaaactttatgtgtttaaaaagctcaataaaggcaaagtggctgggtcattgggcgtaagaggaagagtggcagatgactggagcaagacagatgggtttgattacattggatctc

SEQ ID NO: 2110 - DNA, 122 bp, Homo sapiens
  misc_feature (61)..(62): /note="This region represents a CpG dinucleotide"
  misc_feature (61)..(61): /note="Nucleotide may be methylated to form 5-methylcytosine"
ttgtgcttatgtaacccagttcaggatctgatggttagtctctcgatacatgctgaaacacgagggaatttttacttgccaggatgcctgcttcatggaaaatattgtgtctatgttgaagc

SEQ ID NO: 2111 - DNA, 122 bp, Homo sapiens
  misc_feature (61)..(62): /note="This region represents a CpG dinucleotide"
  misc_feature (61)..(61): /note="Nucleotide may be methylated to form 5-methylcytosine"
ccacactctgtccccttgcaagtaaagaaatgcaccaagcagggcttatgcagcagccctcggtctggcctggctggagctataaacatgcatgctccgaaaagccgcctcgcggaaggtat

SEQ ID NO: 2112 - DNA, 122 bp, Homo sapiens
  misc_feature (61)..(62): /note="This region represents a CpG dinucleotide"
  misc_feature (61)..(61): /note="Nucleotide may be methylated to form 5-methylcytosine"
cagtgtcatcttcatccaaatgcatgaatgcaagatccacagcttccctcttccaatgatcgcacagcctgtctcctttaagatgtccttggttatctctgtaaaacttgaccttaagttct

SEQ ID NO: 2113 - DNA, 122 bp, Homo sapiens
  misc_feature (61)..(62): /note="This region represents a CpG dinucleotide"
  misc_feature (61)..(61): /note="Nucleotide may be methylated to form 5-methylcytosine"
agagcagatgagctaggctgtctacaaatgtgtcggatccagctcccgccatccttccttcgcaaagcagagcttgccaagcctgcgcacccacgggctgcctctcttcaaagggcggagcc

SEQ ID NO: 2114 - DNA, 122 bp, Homo sapiens
  misc_feature (61)..(62): /note="This region represents a CpG dinucleotide"
  misc_feature (61)..(61): /note="Nucleotide may be methylated to form 5-methylcytosine"
tagagacgggcgggcctcattctgtcaggttgtaggttaattccccaactcaaacttccccgatcaaacattgtcaggccaggcgactgttttggtttatggatgataaagtatagggccaa

SEQ ID NO: 2115 - DNA, 122 bp, Homo sapiens
  misc_feature (61)..(62): /note="This region represents a CpG dinucleotide"
  misc_feature (61)..(61): /note="Nucleotide may be methylated to form 5-methylcytosine"
tgaagtttaattatggacacatttcagttcaaagtgctaaacaggtgaagcagagtagcacggaactagaaaatctagaaaactaggaaaatcaagtaagttacaaaattaagggagatgat

SEQ ID NO: 2116 - DNA, 122 bp, Homo sapiens
  misc_feature (61)..(62): /note="This region represents a CpG dinucleotide"
  misc_feature (61)..(61): /note="Nucleotide may be methylated to form 5-methylcytosine"
ggaaagagtccccaggccgtggggacgagagcaacaggcagggggcgaggcttacattgtcgttctgaaaggagtggaggaagttccctcctagctcgccgtcatctcgaggggtgcctgga

SEQ ID NO: 2117 - DNA, 122 bp, Homo sapiens
  misc_feature (61)..(62): /note="This region represents a CpG dinucleotide"
  misc_feature (61)..(61): /note="Nucleotide may be methylated to form 5-methylcytosine"
aaatggatgaaaaattcaccaaggtgttactggtccctggcaaaatttctactcagttgccgtatatccataatgcaagtttaataccatgtaatgccccccaatgcaattcatcttcaata

SEQ ID NO: 2118 - DNA, 122 bp, Homo sapiens
  misc_feature (61)..(62): /note="This region represents a CpG dinucleotide"
  misc_feature (61)..(61): /note="Nucleotide may be methylated to form 5-methylcytosine"
aacagaaatgcaggatgaatgtagctgagcctgggaaaccagcctgcttaccgcccaccccgctgtgatgggccctaaaacagggtgcagacagaacagaatttgcaaacctctaagctgtg

SEQ ID NO: 2119 - DNA, 122 bp, Homo sapiens
  misc_feature (61)..(62): /note="This region represents a CpG dinucleotide"
  misc_feature (61)..(61): /note="Nucleotide may be methylated to form 5-methylcytosine"
atggccaagcttccctctacccaagaccgacgaagttggggaccagactcctagagggggcgcggggattctcagggtgtggggaacaggtcctccagagacaaatctgccttgcaggtggg

SEQ ID NO: 2120 - DNA, 122 bp, Homo sapiens
  misc_feature (61)..(62): /note="This region represents a CpG dinucleotide"
  misc_feature (61)..(61): /note="Nucleotide may be methylated to form 5-methylcytosine"
aggattaaatccaaatctaaaatatgaccagttaaaaaagaccatttacctggccgggcgcggtggttgactcctgtaatcccagcactttgggaggctgaagcaggcggatcacctgaggt

SEQ ID NO: 2121 - DNA, 122 bp, Homo sapiens
  misc_feature (61)..(62): /note="This region represents a CpG dinucleotide"
  misc_feature (61)..(61): /note="Nucleotide may be methylated to form 5-methylcytosine"
gtaaggcatagcattaccatatttcctcatctctaaggcaccatctattgtgacgtacaccgtcattttatgtaccactaaggaaaatgctgtcaatttcagcatgctgtgtcattgatgat

SEQ ID NO: 2122 - DNA, 122 bp, Homo sapiens
  misc_feature (61)..(62): /note="This region represents a CpG dinucleotide"
  misc_feature (61)..(61): /note="Nucleotide may be methylated to form 5-methylcytosine"
aggctgtagtgagccatgattgtgtcactgcacttcagcttgggcaacagagcaagacatcgtcctaaaaaaaaaaaaaaaaaaaaaaagcaaaagcaattctgtgggttttagtatattcc

SEQ ID NO: 2123 - DNA, 122 bp, Homo sapiens
  misc_feature (61)..(62): /note="This region represents a CpG dinucleotide"
  misc_feature (61)..(61): /note="Nucleotide may be methylated to form 5-methylcytosine"
gcagaaatagtcctggataacaataagcttccattggcaggtttctgtcttcttggttagcgagagaaaaaaaaagcctttaaaataaatcatagcttgggaactgtttaccacccttcacc

SEQ ID NO: 2124 - DNA, 122 bp, Homo sapiens
  misc_feature (61)..(62): /note="This region represents a CpG dinucleotide"
  misc_feature (61)..(61): /note="Nucleotide may be methylated to form 5-methylcytosine"
aagcgaggaaagtctatgccgccagcgaccggcaggaggcacgtcgggcacgctcgtcaccgtttcctggcacgtgaccaccgccctgccctgtcgctttagggcctgtcgcttccggcggt

SEQ ID NO: 2125 - DNA, 122 bp, Homo sapiens
  misc_feature (61)..(62): /note="This region represents a CpG dinucleotide"
  misc_feature (61)..(61): /note="Nucleotide may be methylated to form 5-methylcytosine"
ccggtagtacctatgccagggacaaagtgcactttaatagtcaatacacaggttgcttaccgggttcttgttttttttgtcaatagtcttctttcatttcaagttcccaaagtcttgggaac

SEQ ID NO: 2126 - DNA, 122 bp, Homo sapiens
  misc_feature (61)..(62): /note="This region represents a CpG dinucleotide"
  misc_feature (61)..(61): /note="Nucleotide may be methylated to form 5-methylcytosine"
tgtttccacgtgtgggagcgcctctcattcccccaccacacacgcccagtttccgcttctcgcccccaagggcacagctttgcctgctgggtgctgtgccctgctgggtacacgcgggcctc

SEQ ID NO: 2127 - DNA, 122 bp, Homo sapiens
  misc_feature (61)..(62): /note="This region represents a CpG dinucleotide"
  misc_feature (61)..(61): /note="Nucleotide may be methylated to form 5-methylcytosine"
tgatggtgcggtatttgtcctgctccgggcaagtcacccccacgtcctggtaggcgcagccgcttgacttggacaacacattcagctgggcgggcgtcagcacatctgccgggggaaagaac

SEQ ID NO: 2128 - DNA, 122 bp, Homo sapiens
  misc_feature (61)..(62): /note="This region represents a CpG dinucleotide"
  misc_feature (61)..(61): /note="Nucleotide may be methylated to form 5-methylcytosine"
actttggggtaacggttccagcacagcacatccctttctcctcttttcactcatcgtcaccgctacctgaaaaccctggccgggtgctggggcttgaggagcagttcccacttcccagtctt

SEQ ID NO: 2129 - DNA, 122 bp, Homo sapiens
  misc_feature (61)..(62): /note="This region represents a CpG dinucleotide"
  misc_feature (61)..(61): /note="Nucleotide may be methylated to form 5-methylcytosine"
cctccagctaggcagggctgggggcatggggcgggggggacatgagtgagatattaaagccgtatttctgcttgggtctggtatgtggcttctcaagagtacatgaggcaatgagaaactgg

SEQ ID NO: 2130 - DNA, 122 bp, Homo sapiens
  misc_feature (61)..(62): /note="This region represents a CpG dinucleotide"
  misc_feature (61)..(61): /note="Nucleotide may be methylated to form 5-methylcytosine"
gccatggtccggaggggatagcggccgcagcgtggagggcttcgaaaacgggggtgggggcgcccaagagctcagtgcccagccccgggatcgcctcctcccctcaggacccgcgagccctc

SEQ ID NO: 2131 - DNA, 122 bp, Homo sapiens
  misc_feature (61)..(62): /note="This region represents a CpG dinucleotide"
  misc_feature (61)..(61): /note="Nucleotide may be methylated to form 5-methylcytosine"
ctgtccacccaccgcgcgtccccgtgcccccacccacggtcatgtcgcgcgccccgcaggcggctgcactgcacgcgcaactacatccacatgcacctgttcctgtccttcatgctgcgcgc

SEQ ID NO: 2132 - DNA, 122 bp, Homo sapiens
  misc_feature (61)..(62): /note="This region represents a CpG dinucleotide"
  misc_feature (61)..(61): /note="Nucleotide may be methylated to form 5-methylcytosine"
atagactcctctctgagacgcccgtgtttcagttggcagccggcctgtttcttttaagcccgccctaatttatttttggtcccatgcataggagccagtgcttattttgataaccgcgttta

SEQ ID NO: 2133 - DNA, 122 bp, Homo sapiens
  misc_feature (61)..(62): /note="This region represents a CpG dinucleotide"
  misc_feature (61)..(61): /note="Nucleotide may be methylated to form 5-methylcytosine"
gggcgggacctgggcgacggaagtgcgtagccgcgcggcattctggggccggaagtggggcgccagctgcgggctggtgtcatggcaggtgggcggcgccgcaggaggcgcctggcggagct

SEQ ID NO: 2134 - DNA, 122 bp, Homo sapiens
  misc_feature (61)..(62): /note="This region represents a CpG dinucleotide"
  misc_feature (61)..(61): /note="Nucleotide may be methylated to form 5-methylcytosine"
cctcttcaggaggtccacgaacccccttaagttataagcaaaagtttgtggccatttacccggtcagatggtccatagctgtagattctcaaaggagctggaaccaaaactcaggttgcccc

SEQ ID NO: 2135 - DNA, 122 bp, Homo sapiens
  misc_feature (61)..(62): /note="This region represents a CpG dinucleotide"
  misc_feature (61)..(61): /note="Nucleotide may be methylated to form 5-methylcytosine"
aggtggtgggtggggagaaggggagaggtgaggtaatacagggaagacagacaaaaatgacggtcactggccgggcgctgtggctcatgcctataatctcagcacttatgggatgccaaggc

SEQ ID NO: 2136 - DNA, 122 bp, Homo sapiens
  misc_feature (61)..(62): /note="This region represents a CpG dinucleotide"
  misc_feature (61)..(61): /note="Nucleotide may be methylated to form 5-methylcytosine"
actctgacagacggtccttgtgtccttggctctgctggtcctgaaataaactgcttgggacgggggctgggagtggcaggattaggggagaggaaattaaagagagaaggaagaggatggtg

SEQ ID NO: 2137 - DNA, 122 bp, Homo sapiens
  misc_feature (61)..(62): /note="This region represents a CpG dinucleotide"
  misc_feature (61)..(61): /note="Nucleotide may be methylated to form 5-methylcytosine"
gctgaggcagcggcaggcggtgggcaagctgctgggccactggcggagcctgctgcgtcgcgtgccggcaagcccgggcctggcgcacggcctgtattggccccagcacttcctgccgcccc

SEQ ID NO: 2138 - DNA, 122 bp, Homo sapiens
  misc_feature (61)..(62): /note="This region represents a CpG dinucleotide"
  misc_feature (61)..(61): /note="Nucleotide may be methylated to form 5-methylcytosine"
aaaggagggagggaaggaagggatagtgtaactgcactgcaactgaaagaaaccagagaacggaaactcatggtgacctggtgactgcttgagcatttattgcttaacagctacttgtgcga

SEQ ID NO: 2139 - DNA, 122 bp, Homo sapiens
  misc_feature (61)..(62): /note="This region represents a CpG dinucleotide"
  misc_feature (61)..(61): /note="Nucleotide may be methylated to form 5-methylcytosine"
ggcttagtgtctctctccccctgccagaatgtaagttccatgagtccatggatgtttgtccgatttgttcacggatgttttttcagcaccagaatggagcctggcacactgtaggcactcag

SEQ ID NO: 2140 - DNA, 122 bp, Homo sapiens
  misc_feature (61)..(62): /note="This region represents a CpG dinucleotide"
  misc_feature (61)..(61): /note="Nucleotide may be methylated to form 5-methylcytosine"
tgctgcaaagaagaacagagaaagtcatcaagccagccctgggtggtttggcactaggcccggggtcaccaaaagatcagaatttagagattacactggagatttcagtcaaaaggctgaga

SEQ ID NO: 2141 - DNA, 122 bp, Homo sapiens
  misc_feature (61)..(62): /note="This region represents a CpG dinucleotide"
  misc_feature (61)..(61): /note="Nucleotide may be methylated to form 5-methylcytosine"
tggtccttttaaaattagagttatattctcatgagccaggcgcccagaagcccatcagcccgcctcccgctaggccagaatacggcgccagcgcgcatggggcgccccccgccccccccccc

SEQ ID NO: 2142 - DNA, 122 bp, Homo sapiens
  misc_feature (61)..(62): /note="This region represents a CpG dinucleotide"
  misc_feature (61)..(61): /note="Nucleotide may be methylated to form 5-methylcytosine"
accaccgctgcttcacacggatgaccccggccctgctcctgctgccgcggtccgagcccgcgccgctgcctgcgcacggccagctggacaccgtgcccttcccgccgcccaggtgcgcgcag

SEQ ID NO: 2143 - DNA, 122 bp, Homo sapiens
  misc_feature (61)..(62): /note="This region represents a CpG dinucleotide"
  misc_feature (61)..(61): /note="Nucleotide may be methylated to form 5-methylcytosine"
aagcaccaaactaggcagctggataatgggagagtcggctggttgtgagcatgctcgcgccgggaacagatccaccctctgttattcctctgaataaatataaatcacgatcagaaacccaa

SEQ ID NO: 2144 - DNA, 122 bp, Homo sapiens
  misc_feature (61)..(62): /note="This region represents a CpG dinucleotide"
  misc_feature (61)..(61): /note="Nucleotide may be methylated to form 5-methylcytosine"
ccgttcccggcagctcagcacttagggccagagagcggcagaggcccagaacccaaagcccggcagcgcaggcccagtagcccgcagctcccagaatactacacccggctctaggccccgct

SEQ ID NO: 2145 - DNA, 122 bp, Homo sapiens
  misc_feature (61)..(62): /note="This region represents a CpG dinucleotide"
  misc_feature (61)..(61): /note="Nucleotide may be methylated to form 5-methylcytosine"
gagctctggggatgcatctttagctttttgctgctaagttccctccatgactccaggtggcgctattggacaaaagtcaagatggcttgctctttgcacagttcaagtccactacgagagaa

SEQ ID NO: 2146 - DNA, 122 bp, Homo sapiens
  misc_feature (61)..(62): /note="This region represents a CpG dinucleotide"
  misc_feature (61)..(61): /note="Nucleotide may be methylated to form 5-methylcytosine"
accttttctgtgtttaggtatgtttagatatacacatacttaccattgtgttaccattgccgacagcattcagtacagtgacatgctataggtttgtagcttgctagcaatagcctaggtgt

SEQ ID NO: 2147 - DNA, 122 bp, Homo sapiens
  misc_feature (61)..(62): /note="This region represents a CpG dinucleotide"
  misc_feature (61)..(61): /note="Nucleotide may be methylated to form 5-methylcytosine"
agtcctcattaaaaccaatgtggagtgagcttcttccttcccatgatatatttttgtctacgtgtctgtctgtctgtctgccactctctctctctctctctctttctgtttctctttctctc

SEQ ID NO: 2148 - DNA, 122 bp, Homo sapiens
  misc_feature (61)..(62): /note="This region represents a CpG dinucleotide"
  misc_feature (61)..(61): /note="Nucleotide may be methylated to form 5-methylcytosine"
aagctactctatcaggattaaacaactaggtagaaacacatctgtgcccagaacacaggacgtctacccataaggataagggtatttattgggcctgggcctgattcccacaagatcccagg

SEQ ID NO: 2149 - DNA, 122 bp, Homo sapiens
  misc_feature (61)..(62): /note="This region represents a CpG dinucleotide"
  misc_feature (61)..(61): /note="Nucleotide may be methylated to form 5-methylcytosine"
acaagttgaattacattcatggattagtcatttacatggattagtcattctgatttcacgcgtactagtctgcactccccaatgaatttagagattaaaggcaatgtgggcatatagaaaac

SEQ ID NO: 2150 - DNA, 122 bp, Homo sapiens
  misc_feature (61)..(62): /note="This region represents a CpG dinucleotide"
  misc_feature (61)..(61): /note="Nucleotide may be methylated to form 5-methylcytosine"
tccctgtgagattcatgtcatttgtccatatcaagttttctccatcctggtcactggcaccgctgtattagtgtgctattgctacataacagatcaccacaaagtgagtggcttaaagcaac

SEQ ID NO: 2151 - DNA, 122 bp, Homo sapiens
  misc_feature (61)..(62): /note="This region represents a CpG dinucleotide"
  misc_feature (61)..(61): /note="Nucleotide may be methylated to form 5-methylcytosine"
aactactgatatcagttgctctgaaggaccccactgactcagctgagcagaggaacaccacgagcagctgactcaccaaagaaggtgatttccacattgtgatgatttcatcacccttgccc

SEQ ID NO: 2152 - DNA, 122 bp, Homo sapiens
  misc_feature (61)..(62): /note="This region represents a CpG dinucleotide"
  misc_feature (61)..(61): /note="Nucleotide may be methylated to form 5-methylcytosine"
gctgaccgctgagctcacttgcaggtcaatgtgtcctggggcttgcttgttgaacactaacgtgtgtgcaggttgcaggggtaagggtggggggcgggtgcacctcactctgagcccgcttc

SEQ ID NO: 2153 - DNA, 122 bp, Homo sapiens
  misc_feature (61)..(62): /note="This region represents a CpG dinucleotide"
  misc_feature (61)..(61): /note="Nucleotide may be methylated to form 5-methylcytosine"
ccaggtgtctgagcagccacctagtgcagtgacccatcggggcttcccttgtggcctccgcggtccagaacctctcccaggtgtgatggatcctccaagccgctctttgagccgctgtccag

SEQ ID NO: 2154 - DNA, 122 bp, Homo sapiens
  misc_feature (61)..(62): /note="This region represents a CpG dinucleotide"
  misc_feature (61)..(61): /note="Nucleotide may be methylated to form 5-methylcytosine"
ggatggctagggatgctgggcttagatgtggctggctccagttctggtcgtggctgtcctcgtgacccatccagtatcatgcaaggtaacctttaaatagtttgcatttccagcttttcaac

SEQ ID NO: 2155 - DNA, 122 bp, Homo sapiens
  misc_feature (61)..(62): /note="This region represents a CpG dinucleotide"
  misc_feature (61)..(61): /note="Nucleotide may be methylated to form 5-methylcytosine"
tgtagaacaaaaaggtacttagaactttcataaaacatctcctaacattccccttccccccgccaacccctccatcccccgcccaaaaaagatccatctttagaaaacagaggatgtcaaag

SEQ ID NO: 2156 - DNA, 122 bp, Homo sapiens
  misc_feature (61)..(62): /note="This region represents a CpG dinucleotide"
  misc_feature (61)..(61): /note="Nucleotide may be methylated to form 5-methylcytosine"
gccttctcagaccggccaggtacttgctttccacctggcagtttctggcttggaggtaggcgcactgcaaacagggaaaggctggtcaggctaccgggtgggagctgggccgccccagaggc

SEQ ID NO: 2157 - DNA, 122 bp, Homo sapiens
  misc_feature (61)..(62): /note="This region represents a CpG dinucleotide"
  misc_feature (61)..(61): /note="Nucleotide may be methylated to form 5-methylcytosine"
acttccctgcatcatgcaatccacatggatcaaggtgggctgtgggatttttttcactggcgggtgacttgctgcaagccctggaacaaattgctcaatgatgactgagtcatcttgtccca

SEQ ID NO: 2158 - DNA, 122 bp, Homo sapiens
  misc_feature (61)..(62): /note="This region represents a CpG dinucleotide"
  misc_feature (61)..(61): /note="Nucleotide may be methylated to form 5-methylcytosine"
ggatcatgggggtggtttctaaaggtttagcaccttctccctagtgctgtcttgtgataacgttctcatgagatctggttgtttgaaaagggtgtagcacttccccctttgctctctgtctc

SEQ ID NO: 2159 - DNA, 122 bp, Homo sapiens
  misc_feature (61)..(62): /note="This region represents a CpG dinucleotide"
  misc_feature (61)..(61): /note="Nucleotide may be methylated to form 5-methylcytosine"
cccacctctccgggtcccgccccctgggcgactgttggggtagtgagtgacagcggaggacggggggaggcagggacccagccctcacgtgcccctccttcccttgtctgcagccacggggc

SEQ ID NO: 2160 - DNA, 122 bp, Homo sapiens
  misc_feature (61)..(62): /note="This region represents a CpG dinucleotide"
  misc_feature (61)..(61): /note="Nucleotide may be methylated to form 5-methylcytosine"
tcaggtgtggcctgtggtctccagcaagctgtttcccctccttccagacccggctccagacgccccctccgggtcactgccagtggtgctgatctctgactcctcagacctggctatttcct

SEQ ID NO: 2161 - DNA, 122 bp, Homo sapiens
  misc_feature (61)..(62): /note="This region represents a CpG dinucleotide"
  misc_feature (61)..(61): /note="Nucleotide may be methylated to form 5-methylcytosine"
gctgggtggcagaggagataaacagccatgtgcaactctccacactatatttaacagctgcggcggagaaggcagggaggcagccacggtggcggctctgggggcagctcttgtcttcgggg

SEQ ID NO: 2162 - DNA, 122 bp, Homo sapiens
  misc_feature (61)..(62): /note="This region represents a CpG dinucleotide"
  misc_feature (61)..(61): /note="Nucleotide may be methylated to form 5-methylcytosine"
ttccctctctccacacaaacagcagtgcgctgtgaatgtgattctgcagtgaccctgggtcgtcactcttgactgctggggctccagcaaacatgctcctcctgcacttcctgcttcccctg

SEQ ID NO: 2163 - DNA, 122 bp, Homo sapiens
  misc_feature (61)..(62): /note="This region represents a CpG dinucleotide"
  misc_feature (61)..(61): /note="Nucleotide may be methylated to form 5-methylcytosine"
acgctctgaaagtccttatgcctctgtgttgttccaaataaactcacttatcctgagagccgctccctttgctgctcaggatggcacaatctggtgccagaaataggaccagaaggaagatg

SEQ ID NO: 2164 - DNA, 122 bp, Homo sapiens
  misc_feature (61)..(62): /note="This region represents a CpG dinucleotide"
  misc_feature (61)..(61): /note="Nucleotide may be methylated to form 5-methylcytosine"
cctcactggctttcctagggtcccatcccctgtcgacttgagggcatttaactcttctttcgtcatcttggtaggatcttggtatcaaacattactgagagtgtcggaagtctctccattgg

SEQ ID NO: 2165 - DNA, 122 bp, Homo sapiens
  misc_feature (61)..(62): /note="This region represents a CpG dinucleotide"
  misc_feature (61)..(61): /note="Nucleotide may be methylated to form 5-methylcytosine"
aaactaggaagaggtgcgttcaacccagggaagggtcatgggaggctgcctagaggaagtcgcaggcaagctgaggaggcagagagagcagcctgaatcaaagtccagagatgataaagagc

SEQ ID NO: 2166 - DNA, 122 bp, Homo sapiens
  misc_feature (61)..(62): /note="This region represents a CpG dinucleotide"
  misc_feature (61)..(61): /note="Nucleotide may be methylated to form 5-methylcytosine"
gtggattgacctgttctgcacattttgtgtaaatggaatcatatcatatgtgctaccttgcgtctggcctctttcactcagccccatgtttgtaaggcttattcctgttgtagcccctgtta

SEQ ID NO: 2167 - DNA, 122 bp, Homo sapiens
  misc_feature (61)..(62): /note="This region represents a CpG dinucleotide"
  misc_feature (61)..(61): /note="Nucleotide may be methylated to form 5-methylcytosine"
ttgatcacatagcatatgccatacatttaggtggtagaaaattagtggaggataaacacacgtagatactgtgctcatggaactctcagcccactggggagaaagccattcatcagatgtct

SEQ ID NO: 2168 - DNA, 122 bp, Homo sapiens
  misc_feature (61)..(62): /note="This region represents a CpG dinucleotide"
  misc_feature (61)..(61): /note="Nucleotide may be methylated to form 5-methylcytosine"
aagaataaaattgagttttacctcacgatttgtgtattcagcccctggtacaacacatcccgtatgttgattagcatggggtccttcttaaggcttttaaaattctccttataatattcgtt

SEQ ID NO: 2169 - DNA, 122 bp, Homo sapiens
  misc_feature (61)..(62): /note="This region represents a CpG dinucleotide"
  misc_feature (61)..(61): /note="Nucleotide may be methylated to form 5-methylcytosine"
gggaaaaccagaagaccctgtttctggttcattctttcctcaacatttgaattcatttgtcgtttcttgtttttatagtgcagtgaagacagagaatgtcaactttgttaggaaatggcttt

SEQ ID NO: 2170 - DNA, 122 bp, Homo sapiens
  misc_feature (61)..(62): /note="This region represents a CpG dinucleotide"
  misc_feature (61)..(61): /note="Nucleotide may be methylated to form 5-methylcytosine"
tttagccagaaaccaaacttgcccattcactgtgtaagcacactgtcaaagcactaagcacgcactagaaatgcacaactggatcttaagcacaggaagaggaaatggcttaaactagggag

SEQ ID NO: 2171 - DNA, 122 bp, Homo sapiens
  misc_feature (61)..(62): /note="This region represents a CpG dinucleotide"
  misc_feature (61)..(61): /note="Nucleotide may be methylated to form 5-methylcytosine"
atgtcattcagcaggaaggtgacatttggaggagaggctttgagcaccccaggatgtggtcgccagtcacagagcagaagaggcggaagctgctgagagctctgttggctcttggaaccaaa

SEQ ID NO: 2172 - DNA, 122 bp, Homo sapiens
  misc_feature (61)..(62): /note="This region represents a CpG dinucleotide"
  misc_feature (61)..(61): /note="Nucleotide may be methylated to form 5-methylcytosine"
cttcctttcagtcttcctttcagtccaggagttctcagcccatctggggaaggggggccacggaccacccaaggcatccatggccctgggtggagaaaaatctgcatctttcttttcaccag

SEQ ID NO: 2173 - DNA, 122 bp, Homo sapiens
  misc_feature (61)..(62): /note="This region represents a CpG dinucleotide"
  misc_feature (61)..(61): /note="Nucleotide may be methylated to form 5-methylcytosine"
agctgtgagactggataaaccatttaacctccccaggcctcagtttgcttatatatgaaacgggaatagtagtgtctcattctatggtgaaaatgcacataaagtgcccgacagagttggtg

SEQ ID NO: 2174 - DNA, 122 bp, Homo sapiens
  misc_feature (61)..(62): /note="This region represents a CpG dinucleotide"
  misc_feature (61)..(61): /note="Nucleotide may be methylated to form 5-methylcytosine"
cactttcctgaacccccacatttcttgttgatgccttacatcattagctaacattgggggcgtatcttgctcacccgactgtaagctcttcaccgctctgtattttctctcagcaatagaat

SEQ ID NO: 2175 - DNA, 122 bp, Homo sapiens
  misc_feature (61)..(62): /note="This region represents a CpG dinucleotide"
  misc_feature (61)..(61): /note="Nucleotide may be methylated to form 5-methylcytosine"
cttcagggctgggtcttccaagcactagatattgctcatctcagtggatggagacattcacgtggactgggctgggtcaggtaggtcaggggaaggcaggaataccttaagtaaggcttgtt

SEQ ID NO: 2176 - DNA, 122 bp, Homo sapiens
  misc_feature (61)..(62): /note="This region represents a CpG dinucleotide"
  misc_feature (61)..(61): /note="Nucleotide may be methylated to form 5-methylcytosine"
catctcggctcactgcaacctccctgcctgattctcctgcctcagcctgcccagtgcccgcgattgcacgcgccgccacacctgactggttttcgtatttttttggtggagacggggtttcg

SEQ ID NO: 2177 - DNA, 122 bp, Homo sapiens
  misc_feature (61)..(62): /note="This region represents a CpG dinucleotide"
  misc_feature (61)..(61): /note="Nucleotide may be methylated to form 5-methylcytosine"
gctgatctgatgcattcatatttgacataccagttaaaggaagtagttagaaatgatgtacgtataaaagaaaagtagaataataatacaacaggcgcctctgtcctcaaccccagaactca

SEQ ID NO: 2178 - DNA, 122 bp, Homo sapiens
  misc_feature (61)..(62): /note="This region represents a CpG dinucleotide"
  misc_feature (61)..(61): /note="Nucleotide may be methylated to form 5-methylcytosine"
tacctagtacacgcacagcattttgaaggttccccttggtgatttcattacaatcttcatcgctcttggcctggctgtccccctttcttgtaaattattcttgagttaatagctgttctttg

SEQ ID NO: 2179 - DNA, 122 bp, Homo sapiens
  misc_feature (61)..(62): /note="This region represents a CpG dinucleotide"
  misc_feature (61)..(61): /note="Nucleotide may be methylated to form 5-methylcytosine"
gcccttcagcgccctctcctggctgcagccaacaatgccgccccagcagcacctgaagaacgtaaagagcccccaagattacccaggggcagactgccctaggcctggtttcccatctgcaa

SEQ ID NO: 2180 - DNA, 122 bp, Homo sapiens
  misc_feature (61)..(62): /note="This region represents a CpG dinucleotide"
  misc_feature (61)..(61): /note="Nucleotide may be methylated to form 5-methylcytosine"
gctcttagaacaccagcccgcctctctggtcccccttacccccaagcccagcacactccgcggcctagctctggggtccttaaatatcggtctcccgtaggttgctgtagtcggccaattcg

SEQ ID NO: 2181 - DNA, 122 bp, Homo sapiens
  misc_feature (61)..(62): /note="This region represents a CpG dinucleotide"
  misc_feature (61)..(61): /note="Nucleotide may be methylated to form 5-methylcytosine"
tgcagtgttttgtagcctcaagatcagtgagggaatcttcgggcccccagcatgcaggaccgaagcccccgagacagctgtccctcagtcccaaggtccccatttggaagcagccacaggag

SEQ ID NO: 2182 - DNA, 122 bp, Homo sapiens
  misc_feature (61)..(62): /note="This region represents a CpG dinucleotide"
  misc_feature (61)..(61): /note="Nucleotide may be methylated to form 5-methylcytosine"
gtattttgaaactgcttggctgtcctcaacaataaatgtcaaatccatgttttacattgccgtgtccagggtgttttgctttgcaactaagaccgtgacttcctgtttgatggtttgtcact

SEQ ID NO: 2183 - DNA, 122 bp, Homo sapiens
  misc_feature (61)..(62): /note="This region represents a CpG dinucleotide"
  misc_feature (61)..(61): /note="Nucleotide may be methylated to form 5-methylcytosine"
ccccctcttctccaccccctttcctcctcctcctcctcctcctcctcctcctcataaccacggccttttcagtttgatgtttttagatatcaaaggaagttctccaggaaccctgcaactaa

SEQ ID NO: 2184 - DNA, 122 bp, Homo sapiens
  misc_feature (61)..(62): /note="This region represents a CpG dinucleotide"
  misc_feature (61)..(61): /note="Nucleotide may be methylated to form 5-methylcytosine"
aaggacagaaaagcgaggaaagtctatgccgccagcgaccggcaggaggcacgtcgggcacgctcgtcaccgtttcctggcacgtgaccaccgccctgccctgtcgctttagggcctgtcgc

SEQ ID NO: 2185 - DNA, 122 bp, Homo sapiens
  misc_feature (61)..(62): /note="This region represents a CpG dinucleotide"
  misc_feature (61)..(61): /note="Nucleotide may be methylated to form 5-methylcytosine"
cacccgccctctgaatttgtctcctcccctaggatctgtcgctgacctgagttctgcccccgccctctgagttctctccccaccgttggagttgtgtccccttctcctaggatctgtccctg

SEQ ID NO: 2186 - DNA, 122 bp, Homo sapiens
  misc_feature (61)..(62): /note="This region represents a CpG dinucleotide"
  misc_feature (61)..(61): /note="Nucleotide may be methylated to form 5-methylcytosine"
cggcctctcccagcctgtgctccctcctgtgagcagctggtaggagtggccactgggtggcgtgtgggcaccagggtttccttgctcccagttgtccagagctccttaattcatccatcctt

SEQ ID NO: 2187 - DNA, 122 bp, Homo sapiens
  misc_feature (61)..(62): /note="This region represents a CpG dinucleotide"
  misc_feature (61)..(61): /note="Nucleotide may be methylated to form 5-methylcytosine"
taggctgaggcacaagtgtcgctgaacctgggaggcggaggttgtagcgagccgagatcacgcaactgctctccagcctggtgacagggtgagactcagtctcaacaacagcaacaacaaca

SEQ ID NO: 2188 - DNA, 122 bp, Homo sapiens
  misc_feature (61)..(62): /note="This region represents a CpG dinucleotide"
  misc_feature (61)..(61): /note="Nucleotide may be methylated to form 5-methylcytosine"
cactttgggctcttctctttcttcatttcctaattagtcaccaatattgatccagatcctcgtccctacagattgtacattctcaggtaggactaataaccttttatattccccaaagtagc

SEQ ID NO: 2189 - DNA, 122 bp, Homo sapiens
  misc_feature (61)..(62): /note="This region represents a CpG dinucleotide"
  misc_feature (61)..(61): /note="Nucleotide may be methylated to form 5-methylcytosine"
tttaactttttttccttttcagatccaacttagaaataatgtttcattcaagataaggctcgtggcttaggagattgtgacctggcttgcatcattctaagacttctatcgtctgttttcaa

SEQ ID NO: 2190 - DNA, 122 bp, Homo sapiens
  misc_feature (61)..(62): /note="This region represents a CpG dinucleotide"
  misc_feature (61)..(61): /note="Nucleotide may be methylated to form 5-methylcytosine"
gcttgccttcttctttttccttccttttgtaataggaacttcacagttcaaaggcttctgcggagagtttggcagaaaatgtagtttaagctgcaacttgctgtaatcataatagctgccgt

SEQ ID NO: 2191 - DNA, 122 bp, Homo sapiens
  misc_feature (61)..(62): /note="This region represents a CpG dinucleotide"
  misc_feature (61)..(61): /note="Nucleotide may be methylated to form 5-methylcytosine"
cttggattccagtcccggtgggactgattccaaaccctgtgttttgtccctgcctcatggcgtggcctcacactacaactcacagactttggaaagctgagggagcttggtgagcctaggga

SEQ ID NO: 2192 - DNA, 122 bp, Homo sapiens
  misc_feature (61)..(62): /note="This region represents a CpG dinucleotide"
  misc_feature (61)..(61): /note="Nucleotide may be methylated to form 5-methylcytosine"
gttcacaatgagcctcaccccaccccggccccgcatcaccagttcctcttggtggcaccacgtgaccatacacactcttttggccacacaggagcctgtggggtcactgtctgtcctctgct

SEQ ID NO: 2193 - DNA, 122 bp, Homo sapiens
  misc_feature (61)..(62): /note="This region represents a CpG dinucleotide"
  misc_feature (61)..(61): /note="Nucleotide may be methylated to form 5-methylcytosine"
tctaatgtttgatgcttagctttttctgccctctagctgcagaagatgaacctctttatacgcagccaaggacagtctataacttgcacttcttaagttggtgattaatcaccattgtcttc

SEQ ID NO: 2194 - DNA, 122 bp, Homo sapiens
  misc_feature (61)..(62): /note="This region represents a CpG dinucleotide"
  misc_feature (61)..(61): /note="Nucleotide may be methylated to form 5-methylcytosine"
agaaataacatggtaaactttattaagattaggccactagggaaggactgtttgagataacggcatttaaactgataattaaaggagaagtagaaattagcaggtgaagaatgaaagactag

SEQ ID NO: 2195 - DNA, 122 bp, Homo sapiens
  misc_feature (61)..(62): /note="This region represents a CpG dinucleotide"
  misc_feature (61)..(61): /note="Nucleotide may be methylated to form 5-methylcytosine"
taagataaaatcaacagagaccaaaactcctttcacagtgttatagtgaatcattaaacacgaaacgagcctctgaccttgccctgttggcatttctactggccagagaaatacaacttaaa

SEQ ID NO: 2196 - DNA, 122 bp, Homo sapiens
  misc_feature (61)..(62): /note="This region represents a CpG dinucleotide"
  misc_feature (61)..(61): /note="Nucleotide may be methylated to form 5-methylcytosine"
ttttaagtgtttttttaggagattttctgcagcactctgagtgtctcttcccaaacacttcggttactgtttattcacctgctgagatctggtctcttattcactctcattgccttaagaaa

SEQ ID NO: 2197 - DNA, 122 bp, Homo sapiens
  misc_feature (61)..(62): /note="This region represents a CpG dinucleotide"
  misc_feature (61)..(61): /note="Nucleotide may be methylated to form 5-methylcytosine"
cacctcggggagacctcactacaaagtaagggagagtgtgtagggaggcaggaggagaaacgagaaaggccatagagaaacttagcagggaagggagagcatgatattaaacggcatggggt

SEQ ID NO: 2198 - DNA, 122 bp, Homo sapiens
  misc_feature (61)..(62): /note="This region represents a CpG dinucleotide"
  misc_feature (61)..(61): /note="Nucleotide may be methylated to form 5-methylcytosine"
cagcaaaaagcaaacattcaaagcagtccctgcgggctcagcgtggcgaccatgagcgcacgtttgtgtgccggctgactctcctcctcgcataggaggaccagggcgcattggtggcggtg

SEQ ID NO: 2199 - DNA, 122 bp, Homo sapiens
  misc_feature (61)..(62): /note="This region represents a CpG dinucleotide"
  misc_feature (61)..(61): /note="Nucleotide may be methylated to form 5-methylcytosine"
agataaatatctcgaaatagctgaagagtgctcatgtggaagacagaattggcctttccccgtgctctcctgagggacagaggtttggcttttgccccatgctcctgagtgggtagaagcta

SEQ ID NO: 2200 - DNA, 122 bp, Homo sapiens
  misc_feature (61)..(62): /note="This region represents a CpG dinucleotide"
  misc_feature (61)..(61): /note="Nucleotide may be methylated to form 5-methylcytosine"
gttctttttaaccgatgcgaggtcttttatcatatttctctctcccacactgcactcacccgtttcccccgatgggcatttatgttaccgtcactcatgattcagtgactgggcttgaatgt

SEQ ID NO: 2201 - DNA, 122 bp, Homo sapiens
  misc_feature (61)..(62): /note="This region represents a CpG dinucleotide"
  misc_feature (61)..(61): /note="Nucleotide may be methylated to form 5-methylcytosine"
ccgctccacacctgagctgccgccaagctaactcaatccgagccggcgcatttgagaaggcgcctgtgagggtcgctcctcagccgccgcgctcccactccgcgtccccactccgcgccgcc

SEQ ID NO: 2202 - DNA, 122 bp, Homo sapiens
  misc_feature (61)..(62): /note="This region represents a CpG dinucleotide"
  misc_feature (61)..(61): /note="Nucleotide may be methylated to form 5-methylcytosine"
gttatttagtgtacatcaagtgtgagaatgctgcccccatgcttccaaatacagccatcacgtggaatgctttctctctccaaatgtaagagaacttttctatggggaatatagggaaaaag

SEQ ID NO: 2203 - DNA, 122 bp, Homo sapiens
  misc_feature (61)..(62): /note="This region represents a CpG dinucleotide"
  misc_feature (61)..(61): /note="Nucleotide may be methylated to form 5-methylcytosine"
ggctggtcaggagaacaacagtggacttcatgggagctgaactcattggcaaagtgcccccggagagtgctggccaccccacaaacacacacaccccatgcacaccctcactatgcaccctc

SEQ ID NO: 2204 - DNA, 122 bp, Homo sapiens
  misc_feature (61)..(62): /note="This region represents a CpG dinucleotide"
  misc_feature (61)..(61): /note="Nucleotide may be methylated to form 5-methylcytosine"
cggcggtgtcctcgccgcaggtcaccagagcctcacgcacggccgccagcccattgagcacgaccaccggcatccaggccagctgcaggctgaacacgtccccaaagcggtgccgcagctgt

SEQ ID NO: 2205 - DNA, 122 bp, Homo sapiens
  misc_feature (61)..(62): /note="This region represents a CpG dinucleotide"
  misc_feature (61)..(61): /note="Nucleotide may be methylated to form 5-methylcytosine"
cagctcttgacgtgggacaccgggggttctgggcccactgtgcctgaagcaatcacagggcgtcaccgcccggcctggctactctcaggcctcctctcacacgatactcctgtcaggcaggg

SEQ ID NO: 2206 - DNA, 122 bp, Homo sapiens
  misc_feature (61)..(62): /note="This region represents a CpG dinucleotide"
  misc_feature (61)..(61): /note="Nucleotide may be methylated to form 5-methylcytosine"
ttgagaaaggggctgcgtccaatgagtggagcggtgagtacagcgcgtcgacggcggaggcgggaagggggcggaggccgaccgaaggcggctagggactggctgaagagggttagcgaaac

SEQ ID NO: 2207 - DNA, 122 bp, Homo sapiens
  misc_feature (61)..(62): /note="This region represents a CpG dinucleotide"
  misc_feature (61)..(61): /note="Nucleotide may be methylated to form 5-methylcytosine"
atgcctcttccagagattgctgctcagaggatacttgttttacaaataaatgtttcctctcgctggttgtggaatttatatagaaactttgattcttccagggataaagttgggtgagcgga

SEQ ID NO: 2208 - DNA, 122 bp, Homo sapiens
  misc_feature (61)..(62): /note="This region represents a CpG dinucleotide"
  misc_feature (61)..(61): /note="Nucleotide may be methylated to form 5-methylcytosine"
tttaggcttaatttgctcatctataaaacaaatagaacaactctcagcctttttctgagacgctgaatattcccgtaggtgttaatgcagcttgtgctgcattgcggtgtgaaaagtaatct

SEQ ID NO: 2209 - DNA, 122 bp, Homo sapiens
  misc_feature (61)..(62): /note="This region represents a CpG dinucleotide"
  misc_feature (61)..(61): /note="Nucleotide may be methylated to form 5-methylcytosine"
tgagcaggtgagagggcagacagcttgcccaagacagtgtgtggtctcccgaaaaattaacgagctctgctgaatcccaacagtcaatgggtggattttagatatgtctcactccctggacg

SEQ ID NO: 2210 - DNA, 122 bp, Homo sapiens
  misc_feature (61)..(62): /note="This region represents a CpG dinucleotide"
  misc_feature (61)..(61): /note="Nucleotide may be methylated to form 5-methylcytosine"
cacgctaactagggatgaagcctggatttcaaggtgaagcctttctccagttaaggacagcgcgtccaggcgcactggacggaagcagcgctggcagaggctccggacgtccggagtgagct

SEQ ID NO: 2211 - DNA, 122 bp, Homo sapiens
  misc_feature (61)..(62): /note="This region represents a CpG dinucleotide"
  misc_feature (61)..(61): /note="Nucleotide may be methylated to form 5-methylcytosine"
cacagagtaagtctttctctatctgccaactttccgtagagcttcaccatgtgctcagaccgagatcaggggtgcaagctgaaagaaatctgaggcattgcacaccttcatgtaaaataagg

SEQ ID NO: 2212 - DNA, 122 bp, Homo sapiens
  misc_feature (61)..(62): /note="This region represents a CpG dinucleotide"
  misc_feature (61)..(61): /note="Nucleotide may be methylated to form 5-methylcytosine"
ttttcatttcagtttcaaattcaaattcatactgtaaagtggtgatgaacacatcccatccgcaggtacttaacctccatacaaataagaactacctctcatatgggcaaaaagatcaaaat

SEQ ID NO: 2213 - DNA, 122 bp, Homo sapiens
  misc_feature (61)..(62): /note="This region represents a CpG dinucleotide"
  misc_feature (61)..(61): /note="Nucleotide may be methylated to form 5-methylcytosine"
ggtgcgggccctaaggcagcttgccagagccctgcagctgggaaatggcaaagctggattcgcagcccaggcaggctggtgccagagggcttttggggattggagggtgcagtgaaatccag

SEQ ID NO: 2214 - DNA, 122 bp, Homo sapiens
  misc_feature (61)..(62): /note="This region represents a CpG dinucleotide"
  misc_feature (61)..(61): /note="Nucleotide may be methylated to form 5-methylcytosine"
actgttgcatgtactgtgataactgattacaagaactggagttattctgtcatactcaatcgagttaaatcaagagatcaggagaggaaaaaagcagcacacagggcacaagggcctgccca

SEQ ID NO: 2215 - DNA, 122 bp, Homo sapiens
  misc_feature (61)..(62): /note="This region represents a CpG dinucleotide"
  misc_feature (61)..(61): /note="Nucleotide may be methylated to form 5-methylcytosine"
tgagtgttagcataatgactaatagtggggaacccaggcaggaagctctgctgtaccattcgtgccctgaggatatcccagccccatgttccgccaacagtggagacaacttatacacagca

SEQ ID NO: 2216 - DNA, 122 bp, Homo sapiens
  misc_feature (61)..(62): /note="This region represents a CpG dinucleotide"
  misc_feature (61)..(61): /note="Nucleotide may be methylated to form 5-methylcytosine"
cactctgaattgcacccagccacgtgtacagtgcacatgaagtataagtggcttttaaagcgtagtacctctgctaacaaaggctctttgaactgaggttaggataggatgtgtgggtttgt

SEQ ID NO: 2217 - DNA, 122 bp, Homo sapiens
  misc_feature (61)..(62): /note="This region represents a CpG dinucleotide"
  misc_feature (61)..(61): /note="Nucleotide may be methylated to form 5-methylcytosine"
attactgcccacgagggtcactggaattgactcaagtcagtgaaaggctttgaagattaacgggcccatataaatgttaatttgttatgaggtttctgctaggacgttaaacagagcaggga

SEQ ID NO: 2218 - DNA, 122 bp, Homo sapiens
  misc_feature (61)..(62): /note="This region represents a CpG dinucleotide"
  misc_feature (61)..(61): /note="Nucleotide may be methylated to form 5-methylcytosine"
gtgccttctgttagccatggctgcttggatggccaaaggccactgtgggtttttcagcagcgcttttagcagaattccttcacactgcccccaccccacttgcagatgatggaaggcttgct

SEQ ID NO: 2219 - DNA, 122 bp, Homo sapiens
  misc_feature (61)..(62): /note="This region represents a CpG dinucleotide"
  misc_feature (61)..(61): /note="Nucleotide may be methylated to form 5-methylcytosine"
gcctttggcatttatgtttaaaacgacaccacctgctaagtaacaaacactcttcttaatcgcggtggcaaaaacgtatccgtcccgtgtgtgtttgtttttacccttccgctacactctta

SEQ ID NO: 2220 - DNA, 122 bp, Homo sapiens
  misc_feature (61)..(62): /note="This region represents a CpG dinucleotide"
  misc_feature (61)..(61): /note="Nucleotide may be methylated to form 5-methylcytosine"
gagttctcagtcaggtcctcagagtgagccaggtatgagggtggctcagtaaacaggacccgaataaggcaaatgtccaggtctcactttctcattgctgaaggggtgtgcgcaaagggcag

SEQ ID NO: 2221 - DNA, 122 bp, Homo sapiens
  misc_feature (61)..(62): /note="This region represents a CpG dinucleotide"
  misc_feature (61)..(61): /note="Nucleotide may be methylated to form 5-methylcytosine"
cctgtcacacttctttaccatgtgcaaatagcctgggttatgaatctgtgctgcccagcccgcctctcactccacttctgttgagtgagtgagtacattcagatgtcgtgttggactgttcc

SEQ ID NO: 2222 - DNA, 122 bp, Homo sapiens
  misc_feature (61)..(62): /note="This region represents a CpG dinucleotide"
  misc_feature (61)..(61): /note="Nucleotide may be methylated to form 5-methylcytosine"
ttctttgcttcttcctcattccaccctatgccttacaaaatgctgaatatcctttgtgagcgtttgaaaatctagcaatttttttcatgaactcctatgaattctactcagtatctacttgt

SEQ ID NO: 2223 - DNA, 122 bp, Homo sapiens
  misc_feature (61)..(62): /note="This region represents a CpG dinucleotide"
  misc_feature (61)..(61): /note="Nucleotide may be methylated to form 5-methylcytosine"
ccgttaagaccgggtcaggtgaacaggaagttaaagactgaaaaggagacacaaaactgccgactttcccgacggcgaattggccctctggaaacagccgaccaatcacaggcagcaggggc

SEQ ID NO: 2224 - DNA, 122 bp, Homo sapiens
  misc_feature (61)..(62): /note="This region represents a CpG dinucleotide"
  misc_feature (61)..(61): /note="Nucleotide may be methylated to form 5-methylcytosine"
ccttatgtggattcaaaatttatactcgcaaaacaaaattatatgagtgtattccaccaacgtcaagacatgggaagtaatatcttgggacccgggactgttttcttttactcctgcacctg

SEQ ID NO: 2225 - DNA, 122 bp, Homo sapiens
  misc_feature (61)..(62): /note="This region represents a CpG dinucleotide"
  misc_feature (61)..(61): /note="Nucleotide may be methylated to form 5-methylcytosine"
aaacccttgtggccacaacacagctctgcacctgtcatttgctctagacaaactgctaaacgcaattgtttctgacaatggattactctgtatcccgtgggggaattctcagacagcagcat

SEQ ID NO: 2226 - DNA, 122 bp, Homo sapiens
  misc_feature (61)..(62): /note="This region represents a CpG dinucleotide"
  misc_feature (61)..(61): /note="Nucleotide may be methylated to form 5-methylcytosine"
cccgtgttctctgcagggcacttagaggactcctgtgctgacctctcaggcagccttctacgaagggacgcggagaataacaggaaggatttccatttcctttttctaggaaaaaaacaaaa

SEQ ID NO: 2227 - DNA, 122 bp, Homo sapiens
  misc_feature (61)..(62): /note="This region represents a CpG dinucleotide"
  misc_feature (61)..(61): /note="Nucleotide may be methylated to form 5-methylcytosine"
cctagaaacctggtaaaaatgggaatggtaattgcccagctcatggtctgtgaccgcggccgggtgctgggaagcttaatctcaatgcttcctccaagaaaataaatgcttttatgatgctc

SEQ ID NO: 2228 - DNA, 122 bp, Homo sapiens
  misc_feature (61)..(62): /note="This region represents a CpG dinucleotide"
  misc_feature (61)..(61): /note="Nucleotide may be methylated to form 5-methylcytosine"
taagtttctttcatcagcaaccatggcaagatctgtttgccttgcgcacttggtcttttacgcattatggacagctgaagttcatgcaggccttacggtgtgcttcagctgaagcctgacaa

SEQ ID NO: 2229 - DNA, 122 bp, Homo sapiens
  misc_feature (61)..(62): /note="This region represents a CpG dinucleotide"
  misc_feature (61)..(61): /note="Nucleotide may be methylated to form 5-methylcytosine"
gttagagaccagcctggccaacatggcaaaattctgtctctattaaaacaaaaaattagccgggcttggtggagggcgcctgtaatctgagttactcaggaggctgagggaggagaatcgct

SEQ ID NO: 2230 - DNA, 122 bp, Homo sapiens
  misc_feature (61)..(62): /note="This region represents a CpG dinucleotide"
  misc_feature (61)..(61): /note="Nucleotide may be methylated to form 5-methylcytosine"
aatcataaaacaccctctacttaaggagctgtggtgatcactccccatgtctttctcaaccgttatctccatgcggatgacttcacacctcttcctctaacccaatatcccaatatctctcc

SEQ ID NO: 2231 - DNA, 122 bp, Homo sapiens
  misc_feature (61)..(62): /note="This region represents a CpG dinucleotide"
  misc_feature (61)..(61): /note="Nucleotide may be methylated to form 5-methylcytosine"
atgtatggtgcggttcaaatgaattgttaacttgggcaagaggatatgcttgtgtccacacgccctcagatcctctttagagtccagcacaatgcatcacaccatactatggcatagctaag

SEQ ID NO: 2232 - DNA, 122 bp, Homo sapiens
  misc_feature (61)..(62): /note="This region represents a CpG dinucleotide"
  misc_feature (61)..(61): /note="Nucleotide may be methylated to form 5-methylcytosine"
gtgttgcaaataaagcacattcgtcgttttgccacagttaggacgtgaagttctctgaatcgaagtacggtgtcagtggatgggacagaatagtacggtagtgagtttgcagaaccctgttt

SEQ ID NO: 2233 - DNA, 122 bp, Homo sapiens
  misc_feature (61)..(62): /note="This region represents a CpG dinucleotide"
  misc_feature (61)..(61): /note="Nucleotide may be methylated to form 5-methylcytosine"
ctttttgtaattctttgtttatctagttgactttctccttgagaccagcctttccttctccgcttcaatctacaggaaatcctccctctcctatagagagaaagacaactttctcctaggga

SEQ ID NO: 2234 - DNA, 122 bp, Homo sapiens
  misc_feature (61)..(62): /note="This region represents a CpG dinucleotide"
  misc_feature (61)..(61): /note="Nucleotide may be methylated to form 5-methylcytosine"
taaaatatcaagagaattactcagtaattctctgcttcaagactgagctcttgggcctggcgtggtggctgatgcctgtaatgccagcactttgggagaccgaggcgggcggatcatgaggt

SEQ ID NO: 2235 - DNA, 122 bp, Homo sapiens
  misc_feature (61)..(62): /note="This region represents a CpG dinucleotide"
  misc_feature (61)..(61): /note="Nucleotide may be methylated to form 5-methylcytosine"
tctgtgtgaaggtcacccttggtaagatctggtggctttgggattcattcctgggagcagcgttgggtatacacccatctgtgcacatcctctccgccaaccagcagatgcttgtcagatag

SEQ ID NO: 2236 - DNA, 122 bp, Homo sapiens
  misc_feature (61)..(62): /note="This region represents a CpG dinucleotide"
  misc_feature (61)..(61): /note="Nucleotide may be methylated to form 5-methylcytosine"
cacagagagagctcagttagagggctgtggcaaactgtcttagtccttaaatgagttgtacgaggaagtgatgtctaaaactctgatagccatcttataagtaaaaagaagaagcagtataa

SEQ ID NO: 2237 - DNA, 122 bp, Homo sapiens
  misc_feature (61)..(62): /note="This region represents a CpG dinucleotide"
  misc_feature (61)..(61): /note="Nucleotide may be methylated to form 5-methylcytosine"
gctcaggaggcaggtggtgcagacgcagaggtccctcatcaccctgctcaggtagaaaagcgtcttacacttgaagtcaaaatgaagggactcaaaaaggtctggagacaccaagaacacaa

SEQ ID NO: 2238 - DNA, 122 bp, Homo sapiens
  misc_feature (61)..(62): /note="This region represents a CpG dinucleotide"
  misc_feature (61)..(61): /note="Nucleotide may be methylated to form 5-methylcytosine"
gagcacctgctcccggatgcctgaggtaggcgtcctccccgaagcacccctctcctcaatcgaggctgctgagcgcctgcaaggcctggctggaagccagctcgacctccagccttggaacc

SEQ ID NO: 2239 - DNA, 122 bp, Homo sapiens
  misc_feature (61)..(62): /note="This region represents a CpG dinucleotide"
  misc_feature (61)..(61): /note="Nucleotide may be methylated to form 5-methylcytosine"
ggatgtgagcaaaaacccaccagtaccacttccaggtgcacatcaaacctcccaccatggcgtcctccaagcccattcatcttgatgggcacagcagtcttggaagacatttgccgagccac

SEQ ID NO: 2240 - DNA, 122 bp, Homo sapiens
  misc_feature (61)..(62): /note="This region represents a CpG dinucleotide"
  misc_feature (61)..(61): /note="Nucleotide may be methylated to form 5-methylcytosine"
attggctttattctcaggttctcttaattaacttagccaatgatttttcctacttaagtgcgcaagaaaaatgaaacaaaggggtagaacacaaaaattcctgtgaattttcaaaagccaaa

SEQ ID NO: 2241 - DNA, 122 bp, Homo sapiens
  misc_feature (61)..(62): /note="This region represents a CpG dinucleotide"
  misc_feature (61)..(61): /note="Nucleotide may be methylated to form 5-methylcytosine"
ataacgtgtgaaaaactgcggtttcttcatgtggctagaggatcatgtgtgaagagtgcacgagttagggaaggatcagatcttgaaagccttcagtgtctaacaagtttctggacattatc

SEQ ID NO: 2242 - DNA, 122 bp, Homo sapiens
  misc_feature (61)..(62): /note="This region represents a CpG dinucleotide"
  misc_feature (61)..(61): /note="Nucleotide may be methylated to form 5-methylcytosine"
ccccgcccctccccgccccgccctcaacctagtgagggctggaggctgcgcagacctcgacgggccctacatgacgtcacaaaggggccagaccaagtggggcagcaccctgcgaccctgcg

SEQ ID NO: 2243 - DNA, 122 bp, Homo sapiens
  misc_feature (61)..(62): /note="This region represents a CpG dinucleotide"
  misc_feature (61)..(61): /note="Nucleotide may be methylated to form 5-methylcytosine"
tctgaagaagataaaacagtggacagcccagtcaaaagatttagacatccatccccccaccgacgagagactgtaagaaagaagttgctccatcctctatcgggtaggaacctgggccttcc

SEQ ID NO: 2244 - DNA, 122 bp, Homo sapiens
  misc_feature (61)..(62): /note="This region represents a CpG dinucleotide"
  misc_feature (61)..(61): /note="Nucleotide may be methylated to form 5-methylcytosine"
gaagtccctgtatggctttccagagtcccggaagcgccgagaggcggagtcctggaactccgtctcagagggaaagcagcctagattctcccaccggattccgctgctgatctttgatcagg

SEQ ID NO: 2245 - DNA, 122 bp, Homo sapiens
  misc_feature (61)..(62): /note="This region represents a CpG dinucleotide"
  misc_feature (61)..(61): /note="Nucleotide may be methylated to form 5-methylcytosine"
tgtggctggcatgttgagccgccgtccagagatcagctggcggctgctgagcaaacagcacgagctaatcagcaaaaggtcacgccggctccccgagtccccgcatttgaagtcatgcctca

SEQ ID NO: 2246 - DNA, 122 bp, Homo sapiens
  misc_feature (61)..(62): /note="This region represents a CpG dinucleotide"
  misc_feature (61)..(61): /note="Nucleotide may be methylated to form 5-methylcytosine"
taagaggttgttgatgaatttgaggtttttaaggccactaccaaggtaatggaaatgggacgagaatggaagagccattatgtaagagaccagtcacggctgtgtggagaacgaaatcaaga

SEQ ID NO: 2247 - DNA, 122 bp, Homo sapiens
  misc_feature (61)..(62): /note="This region represents a CpG dinucleotide"
  misc_feature (61)..(61): /note="Nucleotide may be methylated to form 5-methylcytosine"
atcaaaaatctcttcctcctttttcccaggctactgactttttcttttcctgaataaattcgaagagaagcagctgttggaatctaaatcaaccaacattttgttcaggaactttataaaca

SEQ ID NO: 2248 - DNA, 122 bp, Homo sapiens
  misc_feature (61)..(62): /note="This region represents a CpG dinucleotide"
  misc_feature (61)..(61): /note="Nucleotide may be methylated to form 5-methylcytosine"
ttgcaaatactcctttgagaggtcatggcaaagcgctgcacaaaggatcaccctcaaaatcgtgtatttttcaaatcccttattgaatcatttcttgctcaaaataactgtttaggagtgag

SEQ ID NO: 2249 - DNA, 122 bp, Homo sapiens
  misc_feature (61)..(62): /note="This region represents a CpG dinucleotide"
  misc_feature (61)..(61): /note="Nucleotide may be methylated to form 5-methylcytosine"
ccccaggttggttcccagcacgtcctgcagaccctgcattatgctgatgttgaccgctagcgccacctccgttcgggccacctcagccttggggtttagggtcttcaccactgccatagctg

SEQ ID NO: 2250 - DNA, 122 bp, Homo sapiens
  misc_feature (61)..(62): /note="This region represents a CpG dinucleotide"
  misc_feature (61)..(61): /note="Nucleotide may be methylated to form 5-methylcytosine"
aaatatccagggttcctagatgtgagggcagcccctttgttggctgatgacaacaaattacgtggcttacccctgacctatgtcatcacctgtcaatatgatctcttaagagatgatggact

SEQ ID NO: 2251 - DNA, 122 bp, Homo sapiens
  misc_feature (61)..(62): /note="This region represents a CpG dinucleotide"
  misc_feature (61)..(61): /note="Nucleotide may be methylated to form 5-methylcytosine"
tggctccagcctcctcggctgtgcctccggtggcggtggcagcggtggcggcggtggctgcggcctcgtgttgtctacccatccggcctttgcgtccacgccgcttccggggccgccgccgg

SEQ ID NO: 2252 - DNA, 122 bp, Homo sapiens
  misc_feature (61)..(62): /note="This region represents a CpG dinucleotide"
  misc_feature (61)..(61): /note="Nucleotide may be methylated to form 5-methylcytosine"
cctcagattctgtccttgggtgatcaaatcctgctttctgtctcctaaaattgtctctagcgctttctctgggaccactctagtgcctctgagcaggcatcacaggctggcccatcggatca

SEQ ID NO: 2253 - DNA, 122 bp, Homo sapiens
  misc_feature (61)..(62): /note="This region represents a CpG dinucleotide"
  misc_feature (61)..(61): /note="Nucleotide may be methylated to form 5-methylcytosine"
ctggattgcccaccactgccatctacagcccttcccaaaaactaaactgttgctgtgaaacgaatgaaaggccactaagttagaagggtgagaacggctttaattctaaataataccagcca

SEQ ID NO: 2254 - DNA, 122 bp, Homo sapiens
  misc_feature (61)..(62): /note="This region represents a CpG dinucleotide"
  misc_feature (61)..(61): /note="Nucleotide may be methylated to form 5-methylcytosine"
caaaccacatgaccacatgactgaaatctgacagggcataggtgtcttattacacagtgacgcattagttgagccattgctaggtttcttctgagctcagagtggcccattttctgagggaa

SEQ ID NO: 2255 - DNA, 122 bp, Homo sapiens
  misc_feature (61)..(62): /note="This region represents a CpG dinucleotide"
  misc_feature (61)..(61): /note="Nucleotide may be methylated to form 5-methylcytosine"
gctggcgggggacacctcagatggcctggccgcactacagctggatgggctgccctcaggcgacatcgacgggctggtgcccacgcgggatgagcgcggccagcccatcccagagtggaagc

SEQ ID NO: 2256 - DNA, 122 bp, Homo sapiens
  misc_feature (61)..(62): /note="This region represents a CpG dinucleotide"
  misc_feature (61)..(61): /note="Nucleotide may be methylated to form 5-methylcytosine"
tgcagtaattttcacggaaaacatgaacacaatcagcttggcttatgaactattttttgccgtggaaatacgtacaaagcctgctttgttctgtagactagtatcacatgacattggttaga

SEQ ID NO: 2257 - DNA, 122 bp, Homo sapiens
  misc_feature (61)..(62): /note="This region represents a CpG dinucleotide"
  misc_feature (61)..(61): /note="Nucleotide may be methylated to form 5-methylcytosine"
accccaaggtgtgacagagtaaggcctgtgcagctgcagcgtggcgctgagcaggaaggacgcgtggagatgccggctgtggcgaccgcgtgatttgaaggcacctgtgacttctgctcctg

SEQ ID NO: 2258 - DNA, 122 bp, Homo sapiens
  misc_feature (61)..(62): /note="This region represents a CpG dinucleotide"
  misc_feature (61)..(61): /note="Nucleotide may be methylated to form 5-methylcytosine"
gttgaatttctcaataagtgcaagggataccaggtaaccagaataaagctactttgtaaccgttacctctaacattacaatagctaaatgttgatagcaaaaaaggagaaataggaatgaaa

SEQ ID NO: 2259 - DNA, 122 bp, Homo sapiens
  misc_feature (61)..(62): /note="This region represents a CpG dinucleotide"
  misc_feature (61)..(61): /note="Nucleotide may be methylated to form 5-methylcytosine"
tcccttgtgatgagtagagcacacattaataaactgcttgtttttcttttgttaatttgacgtttgttttcaggagagtgtcaactaataacctaaaaagggaaatttaaaaaaaacttgtt

SEQ ID NO: 2260 - DNA, 122 bp, Homo sapiens
  misc_feature (61)..(62): /note="This region represents a CpG dinucleotide"
  misc_feature (61)..(61): /note="Nucleotide may be methylated to form 5-methylcytosine"
atgagaacttacatttgtcttcagggtccacacatgagatacatttgttattctgtgactcgctgcatctctcacagtaattaaactggtgtagagtcccctcttcttgatcttccaccagc

SEQ ID NO: 2261 - DNA, 122 bp, Homo sapiens
  misc_feature (61)..(62): /note="This region represents a CpG dinucleotide"
  misc_feature (61)..(61): /note="Nucleotide may be methylated to form 5-methylcytosine"
gaaagacacagtctggtgcagagctgccaggagccacatgtggtgagtgagcaccagaaacgtggccaatctgaagtgagatatgctgtaagtggaaaatgcacactgaatttcaaagatct

SEQ ID NO: 2262 - DNA, 122 bp, Homo sapiens
  misc_feature (61)..(62): /note="This region represents a CpG dinucleotide"
  misc_feature (61)..(61): /note="Nucleotide may be methylated to form 5-methylcytosine"
gctcctcgctctcctcccaccacacgcgcccccctaaaccccgcaggccctcagcccacccggtccagcccagggcttgactgcaccccagagtcaggtcagaaaccaacgcagtggcttcc

SEQ ID NO: 2263 - DNA, 122 bp, Homo sapiens
  misc_feature (61)..(62): /note="This region represents a CpG dinucleotide"
  misc_feature (61)..(61): /note="Nucleotide may be methylated to form 5-methylcytosine"
acctgagctggactgaagcgggaagggggctggcccctggtcaacacacactgaacccagcggccagtacacatcctgttcagctgacatgggctctgcagagaattccagctccctctatt

SEQ ID NO: 2264 - DNA, 122 bp, Homo sapiens
  misc_feature (61)..(62): /note="This region represents a CpG dinucleotide"
  misc_feature (61)..(61): /note="Nucleotide may be methylated to form 5-methylcytosine"
caccctacctgaagcagccgcacctgcctgctcctagtcacgccgttccttcacctgtttcgtttcctccacagggtttaccacaatctgaaagtcttattcatgcaggtgtctacttgttt

SEQ ID NO: 2265 - DNA, 122 bp, Homo sapiens
  misc_feature (61)..(62): /note="This region represents a CpG dinucleotide"
  misc_feature (61)..(61): /note="Nucleotide may be methylated to form 5-methylcytosine"
ggcctccgcggtccagaacctctcccaggtgtgatggatcctccaagccgctctttgagccgctgtccaggtctgcaggtcctcgttcagggacatgaaatctccttgtcgtaggcggactt

SEQ ID NO: 2266 - DNA, 122 bp, Homo sapiens
  misc_feature (61)..(62): /note="This region represents a CpG dinucleotide"
  misc_feature (61)..(61): /note="Nucleotide may be methylated to form 5-methylcytosine"
gtttggagcttgcctgtgttgatgggattaaggcagggatgatttatgtgtaaatttatgcgttagtaacagcagtaaccgctgtagttacactagggttctaagagcaaatgttgattaaa

SEQ ID NO: 2267 - DNA, 122 bp, Homo sapiens
  misc_feature (61)..(62): /note="This region represents a CpG dinucleotide"
  misc_feature (61)..(61): /note="Nucleotide may be methylated to form 5-methylcytosine"
tggaggctacaagattgaccatccctaaactactcctaagatcaatggcttggctgggcacgggtggctcaagcctgtaatcccagcactttgggaggcggaggcgggtggatcacctgagg

SEQ ID NO: 2268 - DNA, 122 bp, Homo sapiens
  misc_feature (61)..(62): /note="This region represents a CpG dinucleotide"
  misc_feature (61)..(61): /note="Nucleotide may be methylated to form 5-methylcytosine"
cttgcatcctccgcatgctaatgaagctgtgatgtcagcaagtcagtcacggcatctggacgtcccatcctgctgcccagtgctgagatttatttacatgtaaattagccttgccttccaaa

SEQ ID NO: 2269 - DNA, 122 bp, Homo sapiens
  misc_feature (61)..(62): /note="This region represents a CpG dinucleotide"
  misc_feature (61)..(61): /note="Nucleotide may be methylated to form 5-methylcytosine"
tcctcgtggctcctccgacagggtgggcactgtggcggtcgtaaggggcagggatgagcgcgctcagggagaccccgcggttaccgcagcctttcagggaggagggaggcggcggatgcggt

SEQ ID NO: 2270 - DNA, 122 bp, Homo sapiens
  misc_feature (61)..(62): /note="This region represents a CpG dinucleotide"
  misc_feature (61)..(61): /note="Nucleotide may be methylated to form 5-methylcytosine"
gctttgtttctatgcaatcagcttatccagggctttcaaaccagtacttgctgaagtgtgcggacccaaatgaagcattaagcagagtcctagaatgagtcaggaagataatctgaataggt

SEQ ID NO: 2271 - DNA, 122 bp, Homo sapiens
  misc_feature (61)..(62): /note="This region represents a CpG dinucleotide"
  misc_feature (61)..(61): /note="Nucleotide may be methylated to form 5-methylcytosine"
tcagtaaaccacccacgcgtgggtgaagaattacagggaacgctttatgcactctggccccgtttcgacttccatacagtaacctgagaccacacttgttttcctgcaccaagatagaaaaa

SEQ ID NO: 2272 - DNA, 122 bp, Homo sapiens
  misc_feature (61)..(62): /note="This region represents a CpG dinucleotide"
  misc_feature (61)..(61): /note="Nucleotide may be methylated to form 5-methylcytosine"
cttattctccccagttcactctttctccccgggtgattgagtgtggatcaaggactggaacgtagcccctgtgtgcccccactggaaagtaccccagaccgtcatcctgaccactcccaccg

SEQ ID NO: 2273 - DNA, 122 bp, Homo sapiens
  misc_feature (61)..(62): /note="This region represents a CpG dinucleotide"
  misc_feature (61)..(61): /note="Nucleotide may be methylated to form 5-methylcytosine"
tcattgttaaggttttataaatgtgcattattgcgcaaggagtggttctggaaggataaacgagaaaatgattaacccattggcttcagggacggaaactgaatggctgctgggtaatgggg

SEQ ID NO: 2274 - DNA, 122 bp, Homo sapiens
  misc_feature (61)..(62): /note="This region represents a CpG dinucleotide"
  misc_feature (61)..(61): /note="Nucleotide may be methylated to form 5-methylcytosine"
aatctaatgctgctgctgatctgactggaggcagagctcaggtgataatgttcactcactcgctgctcacttcctgctatgcagcctggtttcctaacaggccatgaactgcccaggggttg

SEQ ID NO: 2275 - DNA, 122 bp, Homo sapiens
  misc_feature (61)..(62): /note="This region represents a CpG dinucleotide"
  misc_feature (61)..(61): /note="Nucleotide may be methylated to form 5-methylcytosine"
ccctacaccgcctgcgacctggcgccccccgccggcaccaccgacgccgcgcacccggggcggtccgtggtccccgcgttgcttcctctgctggccgggaccctgctgctgctggagacggc

SEQ ID NO: 2276 - DNA, 122 bp, Homo sapiens
  misc_feature (61)..(62): /note="This region represents a CpG dinucleotide"
  misc_feature (61)..(61): /note="Nucleotide may be methylated to form 5-methylcytosine"
ataagcagccaccagtgatgaaagtgcttcaggaaggagggatggatccgctgtggattgcgtagtagttgagtcatgagagaactgattggcatgacttcaagagggaaaatgggagggga

SEQ ID NO: 2277 - DNA, 122 bp, Homo sapiens
  misc_feature (61)..(62): /note="This region represents a CpG dinucleotide"
  misc_feature (61)..(61): /note="Nucleotide may be methylated to form 5-methylcytosine"
gccgggtggcaaggaggatgtcggtctgggtgtgccaggcaaatgaggaagagacttggacggaagcctgggccacaaacaaacaaggcagacaaaaggggacacatgagaacaggcttgcc

SEQ ID NO: 2278 - DNA, 122 bp, Homo sapiens
  misc_feature (61)..(62): /note="This region represents a CpG dinucleotide"
  misc_feature (61)..(61): /note="Nucleotide may be methylated to form 5-methylcytosine"
tcactgactcaatcacctctaggagccaagcatattttagaaatgaatcaaacagtaaggcgatatggacagattcagtaatgtgctggaatgattgttcatcgcttgcaagagctggtcat

SEQ ID NO: 2279 - DNA, 122 bp, Homo sapiens
  misc_feature (61)..(62): /note="This region represents a CpG dinucleotide"
  misc_feature (61)..(61): /note="Nucleotide may be methylated to form 5-methylcytosine"
ctggtactctcagagaaaaatctatgcacttccccagggcctacagctcacagcaggtggcgggggggcctcctgatctcatcacccaccacttcctggctgctccctagcctctgccttcc

SEQ ID NO: 2280 - DNA, 122 bp, Homo sapiens
  misc_feature (61)..(62): /note="This region represents a CpG dinucleotide"
  misc_feature (61)..(61): /note="Nucleotide may be methylated to form 5-methylcytosine"
cacattggtattgtcagactcacaaattggactttggaattaatgaagtaaagtgaatgacggtctctttctgacattgggatggtatagagtgtgttacatctaacgtggaggggagatgg

SEQ ID NO: 2281 - DNA, 122 bp, Homo sapiens
  misc_feature (61)..(62): /note="This region represents a CpG dinucleotide"
  misc_feature (61)..(61): /note="Nucleotide may be methylated to form 5-methylcytosine"
tgactgacttttataaaccagatctatgagttgagaatgggaacactgttaggcccagcacgcattgtgtctcacgcttgtaatcccagcactctgggaggccgagaagggtggatcacatt

SEQ ID NO: 2282 - DNA, 122 bp, Homo sapiens
  misc_feature (61)..(62): /note="This region represents a CpG dinucleotide"
  misc_feature (61)..(61): /note="Nucleotide may be methylated to form 5-methylcytosine"
gaaagtctgttgagctctagctggcgtgagagcaagtgggcgccactcccattccatgcgcgctgtgtccgagcctgccaggctgctggagtccgggagcaaccttgggagaggacatgaaa

SEQ ID NO: 2283 - DNA, 122 bp, Homo sapiens
  misc_feature (61)..(62): /note="This region represents a CpG dinucleotide"
  misc_feature (61)..(61): /note="Nucleotide may be methylated to form 5-methylcytosine"
ccacatagaccctccctggagcagccgtggggtcccaggtcccagtgccaggttctgtgtcgctttgactcgggtgctgcgtgggtgtgcacacagtggcgtcacgggccacatgccgaggc

SEQ ID NO: 2284 - DNA, 122 bp, Homo sapiens
  misc_feature (61)..(62): /note="This region represents a CpG dinucleotide"
  misc_feature (61)..(61): /note="Nucleotide may be methylated to form 5-methylcytosine"
gagcccagaaggagccacgtcagttctctaagatggatgcctaatgatttccctctgaaacgttcaccaaattgcccttgtttaatgagaggaatgagcagaatcactaccttggtggagaa

SEQ ID NO: 2285 - DNA, 122 bp, Homo sapiens
  misc_feature (61)..(62): /note="This region represents a CpG dinucleotide"
  misc_feature (61)..(61): /note="Nucleotide may be methylated to form 5-methylcytosine"
tttagcaatgtcagccttgtggctttaaggttattgtatggttgccataaattgtccctgcgtctctgaacttgacttagtctaaaagtttagagacctgatcttgtcatcttctttctgta

SEQ ID NO: 2286 - DNA, 122 bp, Homo sapiens
  misc_feature (61)..(62): /note="This region represents a CpG dinucleotide"
  misc_feature (61)..(61): /note="Nucleotide may be methylated to form 5-methylcytosine"
tcttttgccaagactctactctccttttactctgtccctgtctcatagctgtatgttaagcgacttcctgtagactgttctcagtgttatttactgtagcttcctgccaggcaggagggagg

SEQ ID NO: 2287 - DNA, 122 bp, Homo sapiens
  misc_feature (61)..(62): /note="This region represents a CpG dinucleotide"
  misc_feature (61)..(61): /note="Nucleotide may be methylated to form 5-methylcytosine"
caacattctcattaagtcctcgttcttcctgttaactgtttacatgactgtccttcagcacgtacacggttcagcctcagctacagaccatcactgctacagagcgacaacttcccattcgg

SEQ ID NO: 2288 - DNA, 122 bp, Homo sapiens
  misc_feature (61)..(62): /note="This region represents a CpG dinucleotide"
  misc_feature (61)..(61): /note="Nucleotide may be methylated to form 5-methylcytosine"
tcaatcttcctcctctcctctctctgtcccttcacctctgatcagtcccagcctgattcccgttccctgatgcctcaccttcttgctgccagatgcctctaggaactagggtccttcagact

SEQ ID NO: 2289 - DNA, 122 bp, Homo sapiens
  misc_feature (61)..(62): /note="This region represents a CpG dinucleotide"
  misc_feature (61)..(61): /note="Nucleotide may be methylated to form 5-methylcytosine"
tacacacaaatacacacacacacacacacacacacacacacacacacacacacacctgcacgcacacaagctgcatgagatatactcaaagactcctcattggttttctgaaatttaaattt

SEQ ID NO: 2290 - DNA, 122 bp, Homo sapiens
  misc_feature (61)..(62): /note="This region represents a CpG dinucleotide"
  misc_feature (61)..(61): /note="Nucleotide may be methylated to form 5-methylcytosine"
attcttaacacatgcatagatttgcccctctggtcacaaagagccccttggggcaaatcgcgttgttagcagttgacggagtgcagaaactgctgactccagagatttccatttctaaagga

SEQ ID NO: 2291 - DNA, 122 bp, Homo sapiens
  misc_feature (61)..(62): /note="This region represents a CpG dinucleotide"
  misc_feature (61)..(61): /note="Nucleotide may be methylated to form 5-methylcytosine"
cgggctccctaagccaccgaccccagcccgcggcgccttcgagccttctagggcctccggcgccgcgacctcctctcaagatcgagtgaaagaatcttaaaaactgttttttccactcaggg

SEQ ID NO: 2292 - DNA, 122 bp, Homo sapiens
  misc_feature (61)..(62): /note="This region represents a CpG dinucleotide"
  misc_feature (61)..(61): /note="Nucleotide may be methylated to form 5-methylcytosine"
tgagtcagaaatcagatctgttgccatacagctgccgttatgtgatcatttgcaagtcaacgtttctcaattgtttagtcatttgtaagacaaaaagactggttggatttcagagaattttg

SEQ ID NO: 2293 - DNA, 122 bp, Homo sapiens
  misc_feature (61)..(62): /note="This region represents a CpG dinucleotide"
  misc_feature (61)..(61): /note="Nucleotide may be methylated to form 5-methylcytosine"
cactgggccatctctacctaggagtgctatagcctgactttacattatctgtgagggttacggaaaatgatgtgaatttactagcatggtgcctgccacttggcaagttctgatatatagtc

SEQ ID NO: 2294 - DNA, 122 bp, Homo sapiens
  misc_feature (61)..(62): /note="This region represents a CpG dinucleotide"
  misc_feature (61)..(61): /note="Nucleotide may be methylated to form 5-methylcytosine"
aaatggttacttcgagggctggggcaggaatatataagataacattggaacaaattctgacgccagaacatgaagaaatatttgaaaaaggatggggcatattgactgaacacagaagacaa

SEQ ID NO: 2295 - DNA, 122 bp, Homo sapiens
  misc_feature (61)..(62): /note="This region represents a CpG dinucleotide"
  misc_feature (61)..(61): /note="Nucleotide may be methylated to form 5-methylcytosine"
gatgggatgttttcaacttgatctcttatctttccaataaactacaccaagcatcttctacgttttacctcctccccacgaagcttccttgaccgaccagaagaaagcagatggcttcttta

SEQ ID NO: 2296 - DNA, 122 bp, Homo sapiens
  misc_feature (61)..(62): /note="This region represents a CpG dinucleotide"
  misc_feature (61)..(61): /note="Nucleotide may be methylated to form 5-methylcytosine"
tttggtcacagtagttcatcatgtagcccaagatagggtagcccaagtcagcctaaatctcgtggtgcttcagtggcactgaaagccaaccatagcttccaaacctgacgtagatactttaa

SEQ ID NO: 2297 - DNA, 122 bp, Homo sapiens
  misc_feature (61)..(62): /note="This region represents a CpG dinucleotide"
  misc_feature (61)..(61): /note="Nucleotide may be methylated to form 5-methylcytosine"
gagttttctgtgggagtaagtagccctgcctgcagcaaaggcagcctattgcagatgaagcgtgtcagcagggctcagcgtctgaagggactggggtatgcgacaagactatggctcaacac

SEQ ID NO: 2298 - DNA, 122 bp, Homo sapiens
  misc_feature (61)..(62): /note="This region represents a CpG dinucleotide"
  misc_feature (61)..(61): /note="Nucleotide may be methylated to form 5-methylcytosine"
ccgccggggaacctggggactgaggctggtcattaactgtggagtgtctcctttcctccccgcagcggtgcagaggggcaggatgccgccgacccagccgacccacgggcagttcgcgctga

SEQ ID NO: 2299 - DNA, 122 bp, Homo sapiens
  misc_feature (61)..(62): /note="This region represents a CpG dinucleotide"
  misc_feature (61)..(61): /note="Nucleotide may be methylated to form 5-methylcytosine"
cggcaacaatgggcagaagctgagcaggggccgccccaggcgtgaggcctgccggggtgacgacatctgtcacccgtgctcactgcctctgccttgggtcccgccccgtccccccttcccat

SEQ ID NO: 2300 - DNA, 122 bp, Homo sapiens
  misc_feature (61)..(62): /note="This region represents a CpG dinucleotide"
  misc_feature (61)..(61): /note="Nucleotide may be methylated to form 5-methylcytosine"
ctaaagagcccacatcctgtctgaggagagagtcactactctctccagcatgtgctaccacgtgacattgtgatcccagtgcagtggtgtgctggtaaatgtttaacaactggctcattaaa

SEQ ID NO: 2301 - DNA, 122 bp, Homo sapiens
  misc_feature (61)..(62): /note="This region represents a CpG dinucleotide"
  misc_feature (61)..(61): /note="Nucleotide may be methylated to form 5-methylcytosine"
atagcaacgtatgtctcatgggttactactgtcagagtcaaatgaggtaattgtaggtaacgccctttgcacagtgtcaggcacaccatgagagctggaaaagcgttggcttttaacattcc

SEQ ID NO: 2302 - DNA, 122 bp, Homo sapiens
  misc_feature (61)..(62): /note="This region represents a CpG dinucleotide"
  misc_feature (61)..(61): /note="Nucleotide may be methylated to form 5-methylcytosine"
aacacagtcagctgaacagagggtctcaaagacaaatgttattcttcctagttcagaacccgtggctccagtcatagatgttggtggtctatttgacagattaaaatggcaatatttatact

SEQ ID NO: 2303 - DNA, 122 bp, Homo sapiens
  misc_feature (61)..(62): /note="This region represents a CpG dinucleotide"
  misc_feature (61)..(61): /note="Nucleotide may be methylated to form 5-methylcytosine"
agcacctaccgcctgcctgtggcttgcttgctccccccactgcctggctccctactgccacgtccctgctaggcacaagggcccctatgggacctgcccgggaagggtcagggcctctggga

SEQ ID NO: 2304 - DNA, 122 bp, Homo sapiens
  misc_feature (61)..(62): /note="This region represents a CpG dinucleotide"
  misc_feature (61)..(61): /note="Nucleotide may be methylated to form 5-methylcytosine"
tggccggccgggcaggcgaggtcaccgtgctgggcaagcagagtggtgtggcctcacagacgttggactcatttgccaaggagttgccctccaggacaaaagcagagggcagaacggggtga

SEQ ID NO: 2305 - DNA, 122 bp, Homo sapiens
  misc_feature (61)..(62): /note="This region represents a CpG dinucleotide"
  misc_feature (61)..(61): /note="Nucleotide may be methylated to form 5-methylcytosine"
gttccaagttctgagttggggacggtagcaattctccatgaccaaaacactctgcagctgcgtcctttggagcagggaacacgagctgctttgttgacccctcttcaccccagaggcgtgtc

SEQ ID NO: 2306 - DNA, 122 bp, Homo sapiens
  misc_feature (61)..(62): /note="This region represents a CpG dinucleotide"
  misc_feature (61)..(61): /note="Nucleotide may be methylated to form 5-methylcytosine"
tttgaggtggggctgagtgggccctccctgctcctcagcagctccagcgaccaccctagacgtgctagggagatgacaccctgagccctgctcagaagggggcaccacttgcgagtaggccc

SEQ ID NO: 2307 - DNA, 122 bp, Homo sapiens
  misc_feature (61)..(62): /note="This region represents a CpG dinucleotide"
  misc_feature (61)..(61): /note="Nucleotide may be methylated to form 5-methylcytosine"
gcagactaactaggaaccccagtgacctgaactcgaggtgatgagttccctgggttttctcgttgtatcaaatattccagatcaggtactggagaagccagcagcctggaaatgccaatggg

SEQ ID NO: 2308 - DNA, 122 bp, Homo sapiens
  misc_feature (61)..(62): /note="This region represents a CpG dinucleotide"
  misc_feature (61)..(61): /note="Nucleotide may be methylated to form 5-methylcytosine"
ggcggccaacgcacctgacaggaaaaggtctgtccactccccaccgtctccgactacaatcgctgctctgtatttcaacatttccctggaattgggtccgtttctccaggtgaaagagtctg

SEQ ID NO: 2309 - DNA, 122 bp, Homo sapiens
  misc_feature (61)..(62): /note="This region represents a CpG dinucleotide"
  misc_feature (61)..(61): /note="Nucleotide may be methylated to form 5-methylcytosine"
tcccacgacttttcgcgggaggcgagtgcccggggcagcagcacgagtgggatgtgaggtcgcccagagtcctgcgctagtcctgaatagccggcacgcgcagctactaggtttgcaatccc

SEQ ID NO: 2310 - DNA, 122 bp, Homo sapiens
  misc_feature (61)..(62): /note="This region represents a CpG dinucleotide"
  misc_feature (61)..(61): /note="Nucleotide may be methylated to form 5-methylcytosine"
ccaggtggggccaggcgttgcaggagtgggcatagcagtgtcatgcagcttttgctcattcgtcaaggacaatgaagagcccttgaaaagctttgagtgggaggagcaaggtcagaaatgca

SEQ ID NO: 2311 - DNA, 122 bp, Homo sapiens
  misc_feature (61)..(62): /note="This region represents a CpG dinucleotide"
  misc_feature (61)..(61): /note="Nucleotide may be methylated to form 5-methylcytosine"
tttcaatacaagaggctctaatcccaacatcacaggttgttgtaaattaagtttgcacctcgtcatgcttgtaaagcacttagcatgacacctggcacatagtaagcgctcaataaacagta

SEQ ID NO: 2312 - DNA, 122 bp, Homo sapiens
  misc_feature (61)..(62): /note="This region represents a CpG dinucleotide"
  misc_feature (61)..(61): /note="Nucleotide may be methylated to form 5-methylcytosine"
aaatggattggtaaggattaggcaggagaatgctcctgttcacctgtttgtcaagcattccgcagcttgatggtatttctctattctaagccatcttaatactttcccatgctctgtgtagg

SEQ ID NO: 2313 - DNA, 122 bp, Homo sapiens
  misc_feature (61)..(62): /note="This region represents a CpG dinucleotide"
  misc_feature (61)..(61): /note="Nucleotide may be methylated to form 5-methylcytosine"
gtaaatttctcttaaaatttagtgtctctttcaacaggtcaccagaaagatgcaactcatcgtttccctttttatcttggttgccaggagactccaagctagccccgtgtcactccctgctg

SEQ ID NO: 2314 - DNA, 122 bp, Homo sapiens
  misc_feature (61)..(62): /note="This region represents a CpG dinucleotide"
  misc_feature (61)..(61): /note="Nucleotide may be methylated to form 5-methylcytosine"
gactgtattcccacttcctttaggaacactgaattattcagttcagagttcagtgcctggcgattgcatgtgctcactgaacattgctgaggttgagtaatatgctgactcggagataaata

SEQ ID NO: 2315 - DNA, 122 bp, Homo sapiens
  misc_feature (61)..(62): /note="This region represents a CpG dinucleotide"
  misc_feature (61)..(61): /note="Nucleotide may be methylated to form 5-methylcytosine"
acgaacaggagaaagacaagctctcaccttcaaaacttggtactgggagcagtgtctttacgccagcactggcggggaggagtgcccaggaatctacaaagacaaatcaagttaaacgacga

SEQ ID NO: 2316 - DNA, 122 bp, Homo sapiens
  misc_feature (61)..(62): /note="This region represents a CpG dinucleotide"
  misc_feature (61)..(61): /note="Nucleotide may be methylated to form 5-methylcytosine"
taggaagctactgtgagcacggggattctcagcaggtgcgtctacaaggatcgtgatccccgcctgagaacacagtgcccctggggcagcctcagagccgggagcagggagcagggagggag

SEQ ID NO: 2317 - DNA, 122 bp, Homo sapiens
  misc_feature (61)..(62): /note="This region represents a CpG dinucleotide"
  misc_feature (61)..(61): /note="Nucleotide may be methylated to form 5-methylcytosine"
gctactgggtcctggtagagatgcaacatctgaccacgagacatcaagtgactatgcagccggaactgttcataatgagctgaggttttttatcagaactgttaaatcataaggttggatga

SEQ ID NO: 2318 - DNA, 122 bp, Homo sapiens
  misc_feature (61)..(62): /note="This region represents a CpG dinucleotide"
  misc_feature (61)..(61): /note="Nucleotide may be methylated to form 5-methylcytosine"
aaatcacgatcagaaacccaaacagaagcatccctcttgaattcgtgctgctgaaaaacacggaataaattcagcctgcagacacagaatctaatcagcagctgttttctgaatccagagcc

SEQ ID NO: 2319 - DNA, 122 bp, Homo sapiens
  misc_feature (61)..(62): /note="This region represents a CpG dinucleotide"
  misc_feature (61)..(61): /note="Nucleotide may be methylated to form 5-methylcytosine"
gaaaacattcactaaagtgctcattaaaaagaaatgaattaatgggaatgaaatatttcacgtggctggcatgtgaccttcaagccactgctgaattttcgtaggaaactcatttatatatt

SEQ ID NO: 2320 - DNA, 122 bp, Homo sapiens
  misc_feature (61)..(62): /note="This region represents a CpG dinucleotide"
  misc_feature (61)..(61): /note="Nucleotide may be methylated to form 5-methylcytosine"
ctcaagcgatcctcccatctcagcctcccaaagtgctgagattacaggtgtgagccaccacgcccagtctagagagttttcataccacaaagttgaaggtgaacctgtagaacccataaact

SEQ ID NO: 2321 - DNA, 122 bp, Homo sapiens
  misc_feature (61)..(62): /note="This region represents a CpG dinucleotide"
  misc_feature (61)..(61): /note="Nucleotide may be methylated to form 5-methylcytosine"
tatctacactacatgtattattcaagtaatataatagatttattgctgcttaatacataccgataactcagttgagagaagcactagagttgatgcctgaaaaatatacagtgtatttattt

SEQ ID NO: 2322 - DNA, 122 bp, Homo sapiens
  misc_feature (61)..(62): /note="This region represents a CpG dinucleotide"
  misc_feature (61)..(61): /note="Nucleotide may be methylated to form 5-methylcytosine"
tatgaggtcctcactttgcccaagcatgatcttttacaacagcacacagaagtcttaaaacgccagcacaatatctctatgcagttgaggtatattgaaagtgtgctcctactgagtgctca

SEQ ID NO: 2323 - DNA, 122 bp, Homo sapiens
  misc_feature (61)..(62): /note="This region represents a CpG dinucleotide"
  misc_feature (61)..(61): /note="Nucleotide may be methylated to form 5-methylcytosine"
gaggcagccaggggtcaggggctcccagtcactcagttgtgaaacgtgcagtgtgtgccacgttaagtcttcttagctcctttgccaagcagcccgaacatttcagaggtgcaagagggcag

SEQ ID NO: 2324 - DNA, 122 bp, Homo sapiens
  misc_feature (61)..(62): /note="This region represents a CpG dinucleotide"
  misc_feature (61)..(61): /note="Nucleotide may be methylated to form 5-methylcytosine"
attccatttatatgaaatatccagaacaggcaaatccattggttgctgcctggggcaaggcgagtgggaaatggggagcaattgcttaatggatttgagatttcctcttggggtgatgaaat

SEQ ID NO: 2325 - DNA, 122 bp, Homo sapiens
  misc_feature (61)..(62): /note="This region represents a CpG dinucleotide"
  misc_feature (61)..(61): /note="Nucleotide may be methylated to form 5-methylcytosine"
acacgcaccccgggctcacacgcaccccgggctcacacgcaccccctcttacacgcaccccgggcccacatgcactccggctcacacacaccctcactcatgcaccccgggcccacacgcac

SEQ ID NO: 2326 - DNA, 122 bp, Homo sapiens
  misc_feature (61)..(62): /note="This region represents a CpG dinucleotide"
  misc_feature (61)..(61): /note="Nucleotide may be methylated to form 5-methylcytosine"
aaccctgggtgtgaccttgcccgcccccaggaccttcgccccgctctgggaggtcttccgcgtctcctcggacaagctggcgctgtgccacctggaactgacacggaagttacaggatctca

SEQ ID NO: 2327 - DNA, 122 bp, Homo sapiens
  misc_feature (61)..(62): /note="This region represents a CpG dinucleotide"
  misc_feature (61)..(61): /note="Nucleotide may be methylated to form 5-methylcytosine"
ttcctcatctgagaagaggataagagctttgaacttagttgtcaaagtcaaatgagataacgttaaaaaactgcctagctgagtggtgagtattccgtaagtgcttaataaatggaagctac

SEQ ID NO: 2328 - DNA, 122 bp, Homo sapiens
  misc_feature (61)..(62): /note="This region represents a CpG dinucleotide"
  misc_feature (61)..(61): /note="Nucleotide may be methylated to form 5-methylcytosine"
ctataacagctgtgtggttcctgcaggtggagtttggccttgcccaggtccttggaggcacgacttctgtgtctggtggaactgtgcagcatggctcagacccacaagctgtgtgatggctt

SEQ ID NO: 2329 - DNA, 122 bp, Homo sapiens
  misc_feature (61)..(62): /note="This region represents a CpG dinucleotide"
  misc_feature (61)..(61): /note="Nucleotide may be methylated to form 5-methylcytosine"
caaactggaaagtcggcctaggtttccgaggataatgaaaggcacagcgttttttgacctcgacttcaggcctgaccccccactctctcggtcccgtacctcttctgcgggatgtaactctg

SEQ ID NO: 2330 - DNA, 122 bp, Homo sapiens
  misc_feature (61)..(62): /note="This region represents a CpG dinucleotide"
  misc_feature (61)..(61): /note="Nucleotide may be methylated to form 5-methylcytosine"
gtcaactccgctggtcccaacagctagcctctggaaagttggcctcaagagagctgaccacgagagcatgggtcagaattcactggagaacccatcctaatatggaaaatgtcaacacttgc

SEQ ID NO: 2331 - DNA, 122 bp, Homo sapiens
  misc_feature (61)..(62): /note="This region represents a CpG dinucleotide"
  misc_feature (61)..(61): /note="Nucleotide may be methylated to form 5-methylcytosine"
caaaggctcgcgtcacagcttctctgtgtcttggcagaagacctcgggatcctcccagaacgcagaggcagggagacctctatgaagctgctatgaggccatcccccactcacctccctatg

SEQ ID NO: 2332 - DNA, 122 bp, Homo sapiens
  misc_feature (61)..(62): /note="This region represents a CpG dinucleotide"
  misc_feature (61)..(61): /note="Nucleotide may be methylated to form 5-methylcytosine"
ttaaagcatttgttatcacttccatcctttactgtttaatctttctcataagcacaaatacgcgtgcacacacatacacacactcacatgagttccccgtgccggctgcaagtctgggtgct

SEQ ID NO: 2333 - DNA, 122 bp, Homo sapiens
  misc_feature (61)..(62): /note="This region represents a CpG dinucleotide"
  misc_feature (61)..(61): /note="Nucleotide may be methylated to form 5-methylcytosine"
tcagcaatccttttctgttttctgggaaagtaaaaacatttaattatgtatgggttaggacggcctataaattaggtaatagagcaggaagttgaatgggattcatatctgttggctctcct

SEQ ID NO: 2334 - DNA, 122 bp, Homo sapiens
  misc_feature (61)..(62): /note="This region represents a CpG dinucleotide"
  misc_feature (61)..(61): /note="Nucleotide may be methylated to form 5-methylcytosine"
gtggggctgggctggtggggccactgctaccgactaagcagtacgggccgcctggaagaccgaaggcggagttcgctgatgcggaagccaaggcacagggcaataaggatccgcgccatttc

SEQ ID NO: 2335 - DNA, 122 bp, Homo sapiens
  misc_feature (61)..(62): /note="This region represents a CpG dinucleotide"
  misc_feature (61)..(61): /note="Nucleotide may be methylated to form 5-methylcytosine"
tattacttatttcctctcacaaccactatgtagtttccaagtaataaatttcactatggacgtcacagcactcagataaagaatttctgaaggatttccttctttctttttttttttttttg

SEQ ID NO: 2336 - DNA, 122 bp, Homo sapiens
  misc_feature (61)..(62): /note="This region represents a CpG dinucleotide"
  misc_feature (61)..(61): /note="Nucleotide may be methylated to form 5-methylcytosine"
gactctttagttcacaggaggggacggccggcgctgacagcttcccctttgctttccccacgaagctcctccctggcagcccctgaccttccgctcagaagcaaagctggaacagcccagca

SEQ ID NO: 2337 - DNA, 122 bp, Homo sapiens
  misc_feature (61)..(62): /note="This region represents a CpG dinucleotide"
  misc_feature (61)..(61): /note="Nucleotide may be methylated to form 5-methylcytosine"
ggcagccacaacatcacaagggtaaacaaccaatacttacagtgtaccgtgttggcagcacgttttgatattgtgttttgtatttttgcatcccattgtgtctacaaaatgcccatctatgt

SEQ ID NO: 2338 - DNA, 122 bp, Homo sapiens
  misc_feature (61)..(62): /note="This region represents a CpG dinucleotide"
  misc_feature (61)..(61): /note="Nucleotide may be methylated to form 5-methylcytosine"
ctacacttggtgggggggactccaggcatccctgagagaggtcggaatgggtgtgcctgccggcccaggtctggggtttggccttcgtttcgctgtgggtgtgtgatgagatattgtggcct

SEQ ID NO: 2339 - DNA, 122 bp, Homo sapiens
  misc_feature (61)..(62): /note="This region represents a CpG dinucleotide"
  misc_feature (61)..(61): /note="Nucleotide may be methylated to form 5-methylcytosine"
ccctcttgtcacattggttttccagtcccagagctgttggccaaaagcacacctccagcccgaccagaagcactatctttgttgctgtgtgtgtgaaaacgaatgtctctttttgttttgcc

SEQ ID NO: 2340 - DNA, 122 bp, Homo sapiens
  misc_feature (61)..(62): /note="This region represents a CpG dinucleotide"
  misc_feature (61)..(61): /note="Nucleotide may be methylated to form 5-methylcytosine"
tggttcacgcagccaccaaaggcgtaggcccagaacagcagccagcgccaggccagcccgcgcaccagccagcaggccagcatctgcaccagcaccagcaccagcaccgcccacttgaggcg

SEQ ID NO: 2341 - DNA, 122 bp, Homo sapiens
  misc_feature (61)..(62): /note="This region represents a CpG dinucleotide"
  misc_feature (61)..(61): /note="Nucleotide may be methylated to form 5-methylcytosine"
tcgttcattttcaaagctgtttcaaagtgactctgataagcaaattgctggcagccctggcgggtgattattcctgcattaatcagggggaaattatgccagttactgattaactaattaca

SEQ ID NO: 2342 - DNA, 122 bp, Homo sapiens
  misc_feature (61)..(62): /note="This region represents a CpG dinucleotide"
  misc_feature (61)..(61): /note="Nucleotide may be methylated to form 5-methylcytosine"
caaacccctgacctcaagcgatccgcccgcctcagcctcccaaagtgttgggattacaggcgtgagccactgcacgcccagcctgggtggtggctttttagtaaagacaagatccagggtgt

SEQ ID NO: 2343 - DNA, 122 bp, Homo sapiens
  misc_feature (61)..(62): /note="This region represents a CpG dinucleotide"
  misc_feature (61)..(61): /note="Nucleotide may be methylated to form 5-methylcytosine"
aagttattcatgaaatgagtttaatgagcttttattttctaatgaacgtgacaataaatacgttagcatgatgtcttgtttgtgtactacctaaaatgcagatgtatatgcatcatcatagg

SEQ ID NO: 2344 - DNA, 122 bp, Homo sapiens
  misc_feature (61)..(62): /note="This region represents a CpG dinucleotide"
  misc_feature (61)..(61): /note="Nucleotide may be methylated to form 5-methylcytosine"
tggggtttccgtcccgggactcccctacgagggcggtccccggtagccagaagatccggccggactccgagcctggccccttgggcgccgtgtaattctatagctgtagggtttcctctcca

SEQ ID NO: 2345 - DNA, 122 bp, Homo sapiens
  misc_feature (61)..(62): /note="This region represents a CpG dinucleotide"
  misc_feature (61)..(61): /note="Nucleotide may be methylated to form 5-methylcytosine"
ggaccttacagtgggaaccatagttactcaactggaaagcttaaatgcagtgggaataaacggattacaggatgtcaggggccaagttgtggaactcaactgcagaaaacaaggtgggcata

SEQ ID NO: 2346 - DNA, 122 bp, Homo sapiens
  misc_feature (61)..(62): /note="This region represents a CpG dinucleotide"
  misc_feature (61)..(61): /note="Nucleotide may be methylated to form 5-methylcytosine"
cgtctgcgccgcccgagccgctgtgctgcgcgtactcctcgaagggagggaacttgggctcgatgtagttggagtttatcaaaaacgagctcatggtcattaatttgtgaagtgcaaaaata

SEQ ID NO: 2347 - DNA, 122 bp, Homo sapiens
  misc_feature (61)..(62): /note="This region represents a CpG dinucleotide"
  misc_feature (61)..(61): /note="Nucleotide may be methylated to form 5-methylcytosine"
atgaagaggaggaagttcactcggcagaggaccagtgaaggctctgcactctgggaagaacgaggtcgtggctcagccccacctcgggcttacctgggcaggtgacttcggctgcccgcctg

SEQ ID NO: 2348 - DNA, 122 bp, Homo sapiens
  misc_feature (61)..(62): /note="This region represents a CpG dinucleotide"
  misc_feature (61)..(61): /note="Nucleotide may be methylated to form 5-methylcytosine"
taattacatatacagtacaggttcatttacataaaacgctctcatactttgacaaggcaccgtagtcaaataacatacatatgtatatttatatacatgagatcaactgaataaacaaggtt

SEQ ID NO: 2349 - DNA, 122 bp, Homo sapiens
  misc_feature (61)..(62): /note="This region represents a CpG dinucleotide"
  misc_feature (61)..(61): /note="Nucleotide may be methylated to form 5-methylcytosine"
caagaggttttactggtctggctggttgttattgctgctgttgttgttgcttcgagtaagcggaagagatgatagcagtgtggaggacgactgtgacggggtagaaaggtgggtagtggagg

SEQ ID NO: 2350 - DNA, 122 bp, Homo sapiens
  misc_feature (61)..(62): /note="This region represents a CpG dinucleotide"
  misc_feature (61)..(61): /note="Nucleotide may be methylated to form 5-methylcytosine"
aataaacgagaaatgaaagtgtgctctgctgtctctctggggtcacaggccagtcacctgcgcatcctgtaccagtcaggttatctggccaaacaaggagagggagccgtgctacacatcag

SEQ ID NO: 2351 - DNA, 122 bp, Homo sapiens
  misc_feature (61)..(62): /note="This region represents a CpG dinucleotide"
  misc_feature (61)..(61): /note="Nucleotide may be methylated to form 5-methylcytosine"
tccctgtggaagtagcgctcatatttggaccggctcccatctgcagtctacagccagattcgtctttctgaagcttagctccagggatcagccctttcctactcatagatgagctctggctt

SEQ ID NO: 2352 - DNA, 122 bp, Homo sapiens
  misc_feature (61)..(62): /note="This region represents a CpG dinucleotide"
  misc_feature (61)..(61): /note="Nucleotide may be methylated to form 5-methylcytosine"
ttcttattcttatttttatttatcattattagtattatttttttaacagtcttgccctgtcgcccaggctggagtgcaatggcaaaatcttggctcactgcaacctcagcctcctgggttca

SEQ ID NO: 2353 - DNA, 122 bp, Homo sapiens
  misc_feature (61)..(62): /note="This region represents a CpG dinucleotide"
  misc_feature (61)..(61): /note="Nucleotide may be methylated to form 5-methylcytosine"
accatgaggaagcccaaatcaactcatatagagtgactatgatggcgaggatcaagatttcgggaagaaaaacagttaagttttcaacgatgtatgaatctctctctccaagcaggactata

SEQ ID NO: 2354 - DNA, 122 bp, Homo sapiens
  misc_feature (61)..(62): /note="This region represents a CpG dinucleotide"
  misc_feature (61)..(61): /note="Nucleotide may be methylated to form 5-methylcytosine"
gatctccacaccagtccctacccttaatgcattaaggttttcttttcctgacagcaattacgttaattctttgaaaacaaatatccatcaatcaattcattacatcctttccactcaccgct

SEQ ID NO: 2355 - DNA, 122 bp, Homo sapiens
  misc_feature (61)..(62): /note="This region represents a CpG dinucleotide"
  misc_feature (61)..(61): /note="Nucleotide may be methylated to form 5-methylcytosine"
ttgatatcaacatttaagaccaaactcgtagggcttccaaaaaaaaggcccttatgtgaacgtttttttttacatgcataactaattagcttaggttattataagcagggcttctgtgataa

SEQ ID NO: 2356 - DNA, 122 bp, Homo sapiens
  misc_feature (61)..(62): /note="This region represents a CpG dinucleotide"
  misc_feature (61)..(61): /note="Nucleotide may be methylated to form 5-methylcytosine"
tcatctcatttatgtaaacattgtgaggaaatagagcactggagagttaaggaactcactcgggtactcactgctggtaagtgatgcagccaggattcaacccagcccatcagatggcagca

SEQ ID NO: 2357 - DNA, 122 bp, Homo sapiens
  misc_feature (61)..(62): /note="This region represents a CpG dinucleotide"
  misc_feature (61)..(61): /note="Nucleotide may be methylated to form 5-methylcytosine"
tatcataggctgttcccagaatgaggcaaccacaggaagcattcctgtggagttcctgtccgtcacttctgaacaagaggttgctgccagggtaggtggaaggacaacaagagcaggggcct

SEQ ID NO: 2358 - DNA, 122 bp, Homo sapiens
  misc_feature (61)..(62): /note="This region represents a CpG dinucleotide"
  misc_feature (61)..(61): /note="Nucleotide may be methylated to form 5-methylcytosine"
aaccgagtggcccaaatatctggaggctgaagataaattgacaaagaggcgggccgcgcacgctctcacgcttcggcagctcagatacctgttacctggcgttaattgcatttacagcggga

SEQ ID NO: 2359 - DNA, 122 bp, Homo sapiens
  misc_feature (61)..(62): /note="This region represents a CpG dinucleotide"
  misc_feature (61)..(61): /note="Nucleotide may be methylated to form 5-methylcytosine"
gtgggccaggcagaccagaggagcaaacaaacttacttgccatctgctaggctgaggcctcggaagactggctgagagggaggttgaggccgcccagtctggtcttcatacaggaagcggac

SEQ ID NO: 2360 - DNA, 122 bp, Homo sapiens
  misc_feature (61)..(62): /note="This region represents a CpG dinucleotide"
  misc_feature (61)..(61): /note="Nucleotide may be methylated to form 5-methylcytosine"
atctgtcatacagtagttacctacactatagtcattcatacatagtggtgacaagtctgccgtggatctccttcttgagaggaggaagcccaccttcttttaaaaagatgaacacaagtaac

SEQ ID NO: 2361 - DNA, 122 bp, Homo sapiens
  misc_feature (61)..(62): /note="This region represents a CpG dinucleotide"
  misc_feature (61)..(61): /note="Nucleotide may be methylated to form 5-methylcytosine"
tgtctgagctcttgcgagagcctcttcctgagtttccctcctccagtctctcctctactccgttgactgccagattgtcttacagcatagatgaaaccacgtgacttctgtgccccaagact

SEQ ID NO: 2362 - DNA, 122 bp, Homo sapiens
  misc_feature (61)..(62): /note="This region represents a CpG dinucleotide"
  misc_feature (61)..(61): /note="Nucleotide may be methylated to form 5-methylcytosine"
tacaaaccactgggagccaggaatcacatcttgtatttctgtattcaccacaactaagcacgtttggttgtatggagaagggggaaagataaatgctttaagatgaatattaacagcatatc

SEQ ID NO: 2363 - DNA, 122 bp, Homo sapiens
  misc_feature (61)..(62): /note="This region represents a CpG dinucleotide"
  misc_feature (61)..(61): /note="Nucleotide may be methylated to form 5-methylcytosine"
actaggagtcaggctgggctgggcggtcctgtggggggctacagccaactgttgggcccacgtaggccttgcttcacctggaaagagaatccaggcaggaggtcatctcagggatgggctgg

SEQ ID NO: 2364 - DNA, 122 bp, Homo sapiens
  misc_feature (61)..(62): /note="This region represents a CpG dinucleotide"
  misc_feature (61)..(61): /note="Nucleotide may be methylated to form 5-methylcytosine"
ctctcctcctccgtgtgagtgtctggccctgccttcctgtgtgcggcatcgtcctgaggtcggtgggaattgctgcagtggatccgggctccccatgcgacctgggtggcctcagaggctgg

SEQ ID NO: 2365 - DNA, 122 bp, Homo sapiens
  misc_feature (61)..(62): /note="This region represents a CpG dinucleotide"
  misc_feature (61)..(61): /note="Nucleotide may be methylated to form 5-methylcytosine"
aggaattaagctgtgattcagcaggaggaggcacacacaggaggagctggttctcacactcgctgagccgcgagcgctgggaggctgggcactgagccgcagattctcatttctcaaggcca

SEQ ID NO: 2366 - DNA, 122 bp, Homo sapiens
  misc_feature (61)..(62): /note="This region represents a CpG dinucleotide"
  misc_feature (61)..(61): /note="Nucleotide may be methylated to form 5-methylcytosine"
aatcttaagaagcacggactgagattactttaggaagtatttgcagcagcttccaaccaacgctatttacttgaaaacccttgtgattgggagtgaattggtgtcaatgaagaaaggcgttg

SEQ ID NO: 2367 - DNA, 122 bp, Homo sapiens
  misc_feature (61)..(62): /note="This region represents a CpG dinucleotide"
  misc_feature (61)..(61): /note="Nucleotide may be methylated to form 5-methylcytosine"
ttttacaagggaactaggttccttttgaactttgctatcacagtattggataattgactgcgcaagtctctcctcaaattcccaactcatgcatgactttttattacgttgtagcaataaaa

SEQ ID NO: 2368 - DNA, 122 bp, Homo sapiens
  misc_feature (61)..(62): /note="This region represents a CpG dinucleotide"
  misc_feature (61)..(61): /note="Nucleotide may be methylated to form 5-methylcytosine"
gagaggagcggggacacgggcggggccgccgtagctccggatgggaccagcgcccgggcccgttagtccaagcaggagctccgggagaatccttcacagggagatttacccctgccttcccc

SEQ ID NO: 2369 - DNA, 122 bp, Homo sapiens
  misc_feature (61)..(62): /note="This region represents a CpG dinucleotide"
  misc_feature (61)..(61): /note="Nucleotide may be methylated to form 5-methylcytosine"
ttatcagtttttttctgaccagtactgaccatttcccgggatggacgctcaaacagaaggcgctaatcctggtcccaatctgtgcatttagacacctggaactagaggggttactcataaaa

SEQ ID NO: 2370 - DNA, 122 bp, Homo sapiens
  misc_feature (61)..(62): /note="This region represents a CpG dinucleotide"
  misc_feature (61)..(61): /note="Nucleotide may be methylated to form 5-methylcytosine"
ccctggaccccttctccttcctctccgaagccctccctggaaggagccccgcatgctgaccgcagctgccgctagggggcagagccgtctacaccaaaagccacaccgctccagcgtgcgcg

SEQ ID NO: 2371 - DNA, 122 bp, Homo sapiens
  misc_feature (61)..(62): /note="This region represents a CpG dinucleotide"
  misc_feature (61)..(61): /note="Nucleotide may be methylated to form 5-methylcytosine"
tgtgtgcaaatgtctagtgaaacacaccattatccaatgggtttgcacagacaaggagcacgttatgctactgtgggtttttcctggctgagcagatgcaagcagcatatcttaaaattttc

SEQ ID NO: 2372 - DNA, 122 bp, Homo sapiens
  misc_feature (61)..(62): /note="This region represents a CpG dinucleotide"
  misc_feature (61)..(61): /note="Nucleotide may be methylated to form 5-methylcytosine"
tagctgtgcctctttccacgtggcctttcatcctcaaagaggcaagcccaggcttgttcacgaggcagtagtgtctcaagagagtagaagcaaagctacaagaccttataaggtataacctc

SEQ ID NO: 2373 - DNA, 122 bp, Homo sapiens
  misc_feature (61)..(62): /note="This region represents a CpG dinucleotide"
  misc_feature (61)..(61): /note="Nucleotide may be methylated to form 5-methylcytosine"
aataaattacttaaggccacatgaatttgaagttaatacaggtgagcatttctatagtctcgggaaaaaattttttttaacttttttttttttgagacggagtctcactctgtcgcccaggc

SEQ ID NO: 2374 - DNA, 122 bp, Homo sapiens
  misc_feature (61)..(62): /note="This region represents a CpG dinucleotide"
  misc_feature (61)..(61): /note="Nucleotide may be methylated to form 5-methylcytosine"
aagagagatactttctctctggtaggaacttggtaggtgtgagcaacttgtaacaggctacggtgccaaaccagcagaacatgactttgagatgttctgttagaatgaccctgtctgtattg

SEQ ID NO: 2375 - DNA, 122 bp, Homo sapiens
  misc_feature (61)..(62): /note="This region represents a CpG dinucleotide"
  misc_feature (61)..(61): /note="Nucleotide may be methylated to form 5-methylcytosine"
tagagtgtggaataatagactttggagactcagaagggtggaagcgtggcaagggtgtaacgtgtgagaaattgcttaatgagtacaatatatgttactcaggtgatagttacactaaaagc

SEQ ID NO: 2376 - DNA, 122 bp, Homo sapiens
  misc_feature (61)..(62): /note="This region represents a CpG dinucleotide"
  misc_feature (61)..(61): /note="Nucleotide may be methylated to form 5-methylcytosine"
caaatcaaggtgaggaaaggtctaaaatttaggagtactcctaaccccagtaatcatattcggcacttgccaaccacaacctccccacaccactcccgctttgcctctgtggttcactgatg

SEQ ID NO: 2377 - DNA, 122 bp, Homo sapiens
  misc_feature (61)..(62): /note="This region represents a CpG dinucleotide"
  misc_feature (61)..(61): /note="Nucleotide may be methylated to form 5-methylcytosine"
agattccaacctctccaggctgtgccacttactagctgtgtggctacagttatgtggctgcgtgagcctcaagttcctcatgtataaaacggaggtaaaaacagtcactgcctctggggttg

SEQ ID NO: 2378 - DNA, 122 bp, Homo sapiens
  misc_feature (61)..(62): /note="This region represents a CpG dinucleotide"
  misc_feature (61)..(61): /note="Nucleotide may be methylated to form 5-methylcytosine"
accacttgcacggaaattgttgtctcagagtctgctcctgagggaactcaaatgaagaaacggggccaccctggtctctttcacttttgttctgtgctcttcttgttaccatttgacttatc

SEQ ID NO: 2379 - DNA, 122 bp, Homo sapiens
  misc_feature (61)..(62): /note="This region represents a CpG dinucleotide"
  misc_feature (61)..(61): /note="Nucleotide may be methylated to form 5-methylcytosine"
tctttcaagttgttgtgcttgagccactctgtcattagctgtgggcgttccgagtgccagcgcacagtgttgagcagagcgggtaggagcgccctggcttcagggagggcccccgccccctg

SEQ ID NO: 2380 - DNA, 122 bp, Homo sapiens
  misc_feature (61)..(62): /note="This region represents a CpG dinucleotide"
  misc_feature (61)..(61): /note="Nucleotide may be methylated to form 5-methylcytosine"
agacctaacaatggtcatatctttccatcctactcccaccttccttctctcttattatgacgttctggagaataagaccagtgtctttgaatgccccctagtgtggggcatgatgcctggca

SEQ ID NO: 2381 - DNA, 122 bp, Homo sapiens
  misc_feature (61)..(62): /note="This region represents a CpG dinucleotide"
  misc_feature (61)..(61): /note="Nucleotide may be methylated to form 5-methylcytosine"
cctggggaccctggaatgcccggttcgcgcgaccggagcggctggacatggtgggggggccgcccaaaggtgcagggaggcttgaaagaggacgtagaggcaccggtggaacgcaaaaaaac

SEQ ID NO: 2382 - DNA, 122 bp, Homo sapiens
  misc_feature (61)..(62): /note="This region represents a CpG dinucleotide"
  misc_feature (61)..(61): /note="Nucleotide may be methylated to form 5-methylcytosine"
gaaaaaaaaaaaccttgaaaaaaatgggtgtaaccctgggctttgatacaactggcctttcggcccccacttgagatttgcacatccccaagggaagctgtggtttggaataagatggtgca

SEQ ID NO: 2383 - DNA, 122 bp, Homo sapiens
  misc_feature (61)..(62): /note="This region represents a CpG dinucleotide"
  misc_feature (61)..(61): /note="Nucleotide may be methylated to form 5-methylcytosine"
attagacaaaggatttggaacagaaattctccaaaggtataaacttggccaataagcatacgaaacaatgctcaatatcattagtcattagggaaatacaaatcaaaaccacatgagatatt

SEQ ID NO: 2384 - DNA, 122 bp, Homo sapiens
  misc_feature (61)..(62): /note="This region represents a CpG dinucleotide"
  misc_feature (61)..(61): /note="Nucleotide may be methylated to form 5-methylcytosine"
caaagcctttgtgtcttcctcttctgctgtggacagataccatggggcaccaggaaaggacggggagcacacagccccggggaggcgcactctaaggagggccaaagccattctgcggggtg

SEQ ID NO: 2385 - DNA, 122 bp, Homo sapiens
  misc_feature (61)..(62): /note="This region represents a CpG dinucleotide"
  misc_feature (61)..(61): /note="Nucleotide may be methylated to form 5-methylcytosine"
ccgggttcaattcccggccaatgcagcaggtacttcttcatttcattatggccttttacccgtcttttacgctgcaaaattatactgcataacctaatagtgcatttaggggcttggccacc

SEQ ID NO: 2386 - DNA, 122 bp, Homo sapiens
  misc_feature (61)..(62): /note="This region represents a CpG dinucleotide"
  misc_feature (61)..(61): /note="Nucleotide may be methylated to form 5-methylcytosine"
ccttaggatttggggtcattataattagccagaatggaaagaactcctgaatgatatatccggtctaagcacaggcacatgaattacatggctgagatgggtaaacctgaaaattttctgag

SEQ ID NO: 2387 - DNA, 122 bp, Homo sapiens
  misc_feature (61)..(62): /note="This region represents a CpG dinucleotide"
  misc_feature (61)..(61): /note="Nucleotide may be methylated to form 5-methylcytosine"
accaatggaaactccaccaacatcataacagtttacaattacaattacagttacaaatgccgtggcattgtcctgaaactaccctatatgatctaaacgggagaggatccctcaattctggg

SEQ ID NO: 2388 - DNA, 122 bp, Homo sapiens
  misc_feature (61)..(62): /note="This region represents a CpG dinucleotide"
  misc_feature (61)..(61): /note="Nucleotide may be methylated to form 5-methylcytosine"
gtggggcatgatattactcccagaatcgcggggggtgcctcacccccctgctatggggatcgtcatgtccagggtgggagtggaaggtgatattactccccgaatcgcggggcccccgcccc

SEQ ID NO: 2389 - DNA, 122 bp, Homo sapiens
  misc_feature (61)..(62): /note="This region represents a CpG dinucleotide"
  misc_feature (61)..(61): /note="Nucleotide may be methylated to form 5-methylcytosine"
aaatgctactattcctagtaccaatagaaacccttgtttccctttgaaagaaatatggagcgcctgaggactagataaccaaggttgcctgaggaaaggatcacaataacagtaggcaattc

SEQ ID NO: 2390 - DNA, 122 bp, Homo sapiens
  misc_feature (61)..(62): /note="This region represents a CpG dinucleotide"
  misc_feature (61)..(61): /note="Nucleotide may be methylated to form 5-methylcytosine"
caaagccgctgccaccgctgaaaccgctgctgccgccgccaaatccaccgccgattccaccgccgcctccccggccaaagccactgcctgagccgccgcccgcactgaagccacctcctaaa

SEQ ID NO: 2391 - DNA, 122 bp, Homo sapiens
  misc_feature (61)..(62): /note="This region represents a CpG dinucleotide"
  misc_feature (61)..(61): /note="Nucleotide may be methylated to form 5-methylcytosine"
ttgtttctttaaacacttccattgttaccaaaatgagagcgagccctggaaagtctagggcgtgggaaggttttgtcccctgaggaagcaaagaagacaggcagtggtttgagtgggtgggc

SEQ ID NO: 2392 - DNA, 122 bp, Homo sapiens
  misc_feature (61)..(62): /note="This region represents a CpG dinucleotide"
  misc_feature (61)..(61): /note="Nucleotide may be methylated to form 5-methylcytosine"
tatttacacattgttagtgagcttaactggatcaacagttcaaagggcaatggtgagaagcgctggcttcctgtggccaggcaacagaaccacctggcatccttggctttagtactacaggt

SEQ ID NO: 2393 - DNA, 122 bp, Homo sapiens
  misc_feature (61)..(62): /note="This region represents a CpG dinucleotide"
  misc_feature (61)..(61): /note="Nucleotide may be methylated to form 5-methylcytosine"
gggagatagcacagccctgccacttctcgggtcaaacctggggccccaggaaccagcacacggccaaccgcgcacaaagactaaactatttaaaacgttgacggttcctccatagacggacg

SEQ ID NO: 2394 - DNA, 122 bp, Homo sapiens
  misc_feature (61)..(62): /note="This region represents a CpG dinucleotide"
  misc_feature (61)..(61): /note="Nucleotide may be methylated to form 5-methylcytosine"
tcagctccaattcaccctccaagattcaaccaaaacgttacacagggaaattccctaaggcgccagcactgcctctggagggcccggggctcccaggacttctccttggtagctcttattac

SEQ ID NO: 2395 - DNA, 122 bp, Homo sapiens
  misc_feature (61)..(62): /note="This region represents a CpG dinucleotide"
  misc_feature (61)..(61): /note="Nucleotide may be methylated to form 5-methylcytosine"
ggtgaagccggcactaaaagacggacagccctacagagaccgccaatccccagaagcagccgaggcaaccgcgtccaccccctgccgggggcccttcctgcacagctcggggatcccagccc

SEQ ID NO: 2396 - DNA, 122 bp, Homo sapiens
  misc_feature (61)..(62): /note="This region represents a CpG dinucleotide"
  misc_feature (61)..(61): /note="Nucleotide may be methylated to form 5-methylcytosine"
ctaaggatgtcattttgtgaccatgtatcctataaagagccatgaagcttgactacctcgcgcagataacccattgccaaacttttccttaccttcaaccgcctttccccacacctcagacc

SEQ ID NO: 2397 - DNA, 122 bp, Homo sapiens
  misc_feature (61)..(62): /note="This region represents a CpG dinucleotide"
  misc_feature (61)..(61): /note="Nucleotide may be methylated to form 5-methylcytosine"
aagtgacactcccggaagctaccgcctcttataagccacacatgggcggagttagccttccggcccgcagtcccactggctgacttcgctgcccgtcacgggaatgcgggagagggcggcgc

SEQ ID NO: 2398 - DNA, 122 bp, Homo sapiens
  misc_feature (61)..(62): /note="This region represents a CpG dinucleotide"
  misc_feature (61)..(61): /note="Nucleotide may be methylated to form 5-methylcytosine"
catttgttcttctttttaatggcccaaatgcatgcaaagaacatttcagaaagtacttaacgttgccaccctagataaaaagtttttcagtcagcccaacctcctccttctgcttctcctcc

SEQ ID NO: 2399 - DNA, 122 bp, Homo sapiens
  misc_feature (61)..(62): /note="This region represents a CpG dinucleotide"
  misc_feature (61)..(61): /note="Nucleotide may be methylated to form 5-methylcytosine"
tggtatttgctctctttcttgaatcagcaaaagaaatcgctgtaaagttaatgtaatttacgggaagttcccgtgccacactgcatgcttttgtgtgtcacaagacttaagcttcctgctac

SEQ ID NO: 2400 - DNA, 122 bp, Homo sapiens
  misc_feature (61)..(62): /note="This region represents a CpG dinucleotide"
  misc_feature (61)..(61): /note="Nucleotide may be methylated to form 5-methylcytosine"
gaactgtcaacattttgcaaaagatatctgaggccatctaactagtttagcttgatcaaacgtgggctcttatctcttcctagagagtgatgaggaacttagaaaagattgtttgtatatct

SEQ ID NO: 2401 - DNA, 122 bp, Homo sapiens
  misc_feature (61)..(62): /note="This region represents a CpG dinucleotide"
  misc_feature (61)..(61): /note="Nucleotide may be methylated to form 5-methylcytosine"
agagaaatgtttgccagccaggttttctgctaagaatcatttattgaagacataaatcaacgagtttgatccaaccattagtaattaaaggggatatatttgaagaggcaaccattgtgttt

SEQ ID NO: 2402 - DNA, 122 bp, Homo sapiens
  misc_feature (61)..(62): /note="This region represents a CpG dinucleotide"
  misc_feature (61)..(61): /note="Nucleotide may be methylated to form 5-methylcytosine"
ttctaagcttctagaatgtagttgtcataccttgactagctgtcatcaactccctccccacggaatagtagctctgcatacctgctgagatcctgccataaatggtcaggccaccagcaatt

SEQ ID NO: 2403 - DNA, 122 bp, Homo sapiens
  misc_feature (61)..(62): /note="This region represents a CpG dinucleotide"
  misc_feature (61)..(61): /note="Nucleotide may be methylated to form 5-methylcytosine"
gcttgtggatgatccttttattgccctgattaaaatccacacagtaagaaattttttaaacggaggttgatgatggaagcttcctcaataagtatccttcagtcaagaaatgattgagcttt

SEQ ID NO: 2404 - DNA, 122 bp, Homo sapiens
  misc_feature (61)..(62): /note="This region represents a CpG dinucleotide"
  misc_feature (61)..(61): /note="Nucleotide may be methylated to form 5-methylcytosine"
ttactgacttgggttcagcctgagtgttctctgccagctctctcacaagccctcatcagacgtcctgggctggggtcacccctgagggcagtgcttctctctgagtgccccatctctctccc

SEQ ID NO: 2405 - DNA, 122 bp, Homo sapiens
  misc_feature (61)..(62): /note="This region represents a CpG dinucleotide"
  misc_feature (61)..(61): /note="Nucleotide may be methylated to form 5-methylcytosine"
taagtgatgaatgggcacgtatcatatgcagcatgggtaagctagacatagcatgattcacgtcctgaggggagacagagcatatttcatcatactactcagaatggcatgcaatttaagac

SEQ ID NO: 2406 - DNA, 122 bp, Homo sapiens
  misc_feature (61)..(62): /note="This region represents a CpG dinucleotide"
  misc_feature (61)..(61): /note="Nucleotide may be methylated to form 5-methylcytosine"
cctaaaggcatttaccctttaagtcccctgggatgctggttactgtcactgatggaggaacggtgaccctgacctgccactgagactctacattatctggattgagaagacaacttttgctg

SEQ ID NO: 2407 - DNA, 122 bp, Homo sapiens
  misc_feature (61)..(62): /note="This region represents a CpG dinucleotide"
  misc_feature (61)..(61): /note="Nucleotide may be methylated to form 5-methylcytosine"
acaaaacttaaagttattttaactcatttggtggcaaagactgacctaaatgaaatgctacgagtgtaattactatcctaatttaatccatttcctatgaatatttgtatgtgttgccacaa

SEQ ID NO: 2408 - DNA, 122 bp, Homo sapiens
  misc_feature (61)..(62): /note="This region represents a CpG dinucleotide"
  misc_feature (61)..(61): /note="Nucleotide may be methylated to form 5-methylcytosine"
taaagcccttcccagggtgcctggcacagagcaagctctgcaggtggtatgactgaacagcgcccaggggatggacactgccctcatgccctctgctgctgccacctaggctccttctgttc

SEQ ID NO: 2409 - DNA, 122 bp, Homo sapiens
  misc_feature (61)..(62): /note="This region represents a CpG dinucleotide"
  misc_feature (61)..(61): /note="Nucleotide may be methylated to form 5-methylcytosine"
gcaacatggttgagacgcttctctcctgccgggactggaaaggtgggccctgtggtcagccggtgccgcagccaaccctgcagtccagaaagcagacgctttgctgatgaacagtgagcaga

SEQ ID NO: 2410 - DNA, 122 bp, Homo sapiens
  misc_feature (61)..(62): /note="This region represents a CpG dinucleotide"
  misc_feature (61)..(61): /note="Nucleotide may be methylated to form 5-methylcytosine"
aagtatcaaaacttgacattttctccagtcggcttcaaggcggagcaagtcagactaggacgtgatttacagcctgggaagtcttccgtggaaacaccgggctttctgtgcatgaggtcagg

SEQ ID NO: 2411 - DNA, 122 bp, Homo sapiens
  misc_feature (61)..(62): /note="This region represents a CpG dinucleotide"
  misc_feature (61)..(61): /note="Nucleotide may be methylated to form 5-methylcytosine"
ttgtggtaacacacaactcctgatcccagccatgcccagcccctgccacctgcccacaggcgtgctctgtattaacttaggggcctgaaatgcccaggtccacacaggccccacccccaccc

SEQ ID NO: 2412 - DNA, 122 bp, Homo sapiens
  misc_feature (61)..(62): /note="This region represents a CpG dinucleotide"
  misc_feature (61)..(61): /note="Nucleotide may be methylated to form 5-methylcytosine"
gaaggaatagcatgaacatctggggcacttaccacctagactgaaaaattaacacctggtcgtatgtatgtatattacccattgtctactttcttctgtcaaatccgtgactttggaaattt

SEQ ID NO: 2413 - DNA, 122 bp, Homo sapiens
  misc_feature (61)..(62): /note="This region represents a CpG dinucleotide"
  misc_feature (61)..(61): /note="Nucleotide may be methylated to form 5-methylcytosine"
ttgcttgtgggccaggggaacacgtgattaaagccttcctgcaaacagagcatctgcaaacgcagttttaaacccttcctgcaaacaaaccaagtaaattttactcgaaaagaggccgtgga

SEQ ID NO: 2414 - DNA, 122 bp, Homo sapiens
  misc_feature (61)..(62): /note="This region represents a CpG dinucleotide"
  misc_feature (61)..(61): /note="Nucleotide may be methylated to form 5-methylcytosine"
tcaccctgagagattctgatctcctgggtctgggcctgaagatggggctatttaaaagcccgctgggtaactgacatgcagccagggctgacttacaacagctttctgattatctccatttc

SEQ ID NO: 2415 - DNA, 122 bp, Homo sapiens
  misc_feature (61)..(62): /note="This region represents a CpG dinucleotide"
  misc_feature (61)..(61): /note="Nucleotide may be methylated to form 5-methylcytosine"
ttgctttcattttatggattcacctcaaattctttcttgcatgagaaccctctcttgagacgtggatctggacccctttctggtaacacaggtactcagggccccacttcttttctcggttt

SEQ ID NO: 2416 - DNA, 122 bp, Homo sapiens
  misc_feature (61)..(62): /note="This region represents a CpG dinucleotide"
  misc_feature (61)..(61): /note="Nucleotide may be methylated to form 5-methylcytosine"
gaagcaagatgggcagaggggaaggagaggaccccagcccacatagccagccagagaggacgggcagagccaggcctccaactacagtgccattggcactccccacgccgtgccgtcatgtc

SEQ ID NO: 2417 - DNA, 122 bp, Homo sapiens
  misc_feature (61)..(62): /note="This region represents a CpG dinucleotide"
  misc_feature (61)..(61): /note="Nucleotide may be methylated to form 5-methylcytosine"
ataaaatcttggcagtcctgaggtagaaggtagccgagaaaaggtgagaagcaatgaggacgaattgagtgagatggtttaattatgatgtgttttatgtaccaagatctctgaggatacag

SEQ ID NO: 2418 - DNA, 122 bp, Homo sapiens
  misc_feature (61)..(62): /note="This region represents a CpG dinucleotide"
  misc_feature (61)..(61): /note="Nucleotide may be methylated to form 5-methylcytosine"
gtcttaccaccaggggcatgagagctgcttggaaagaaattagaacacttccctgcttcccgatgggcatcaggggcaaggatcccagcttttgcataggacctcaacattcttttctccca

SEQ ID NO: 2419 - DNA, 122 bp, Homo sapiens
  misc_feature (61)..(62): /note="This region represents a CpG dinucleotide"
  misc_feature (61)..(61): /note="Nucleotide may be methylated to form 5-methylcytosine"
tagaatgtcttgtttttaaagaggatttgctggatgtgtaatactcttaagaaatgctgccgatgcttaccgttttgtggaatatcattctctgggtttttctagatactgctttatttctc

SEQ ID NO: 2420 - DNA, 122 bp, Homo sapiens
  misc_feature (61)..(62): /note="This region represents a CpG dinucleotide"
  misc_feature (61)..(61): /note="Nucleotide may be methylated to form 5-methylcytosine"
tgcgatacaatttcttattattcaagccagtttctgtcactgtttcctattacacagagccgaaaacaccctaaagataaacatactcagttaaatgactccagctctgtgttgacactttg

SEQ ID NO: 2421 - DNA, 122 bp, Homo sapiens
  misc_feature (61)..(62): /note="This region represents a CpG dinucleotide"
  misc_feature (61)..(61): /note="Nucleotide may be methylated to form 5-methylcytosine"
ggtctggaagtgccaggaagctgcctttaacatcctaccgcagggaacaatgaaggttgccggccagggagaagacaggatagagacgtctctgggtttgcagccagcctgcctcagatggg

SEQ ID NO: 2422 - DNA, 122 bp, Homo sapiens
  misc_feature (61)..(62): /note="This region represents a CpG dinucleotide"
  misc_feature (61)..(61): /note="Nucleotide may be methylated to form 5-methylcytosine"
gattgaattcctagtatgaattgtgtgagagctttaataaaaatatctttgcagttcttacgggttttgataagctgacattgcacgtgctcaagaaaatgaaggtgataatttacagcaca

SEQ ID NO: 2423 - DNA, 122 bp, Homo sapiens
  misc_feature (61)..(62): /note="This region represents a CpG dinucleotide"
  misc_feature (61)..(61): /note="Nucleotide may be methylated to form 5-methylcytosine"
tcagcgcattcaatgcaacgtcaggtaaataccatttaccacaaaagaactttgctcctacgagccatacttttggattagaataatctgttgggtaggggaccttttgactctcacgtggt

SEQ ID NO: 2424 - DNA, 122 bp, Homo sapiens
  misc_feature (61)..(62): /note="This region represents a CpG dinucleotide"
  misc_feature (61)..(61): /note="Nucleotide may be methylated to form 5-methylcytosine"
caggggccaatgccaatcacatctgaagttgaacagtatccataccttctgttgacacaacgatctggaggacacagtccaaaggcaaggtacagcaatcatcacagtaatggcagccacta

SEQ ID NO: 2425 - DNA, 122 bp, Homo sapiens
  misc_feature (61)..(62): /note="This region represents a CpG dinucleotide"
  misc_feature (61)..(61): /note="Nucleotide may be methylated to form 5-methylcytosine"
ggaagtgtgcgacagtttataaatcacgtatacacgcataacctctttcaggtgtattaccgccctggttcctctcactgcccagagagtgatagattatctctgttttacagatggggatg

SEQ ID NO: 2426 - DNA, 122 bp, Homo sapiens
  misc_feature (61)..(62): /note="This region represents a CpG dinucleotide"
  misc_feature (61)..(61): /note="Nucleotide may be methylated to form 5-methylcytosine"
catgtagaaagagtgtcatggaatttcctttacggaaatgaaagtgctccgtatttctatcgctgtgcttttcataatggcaaatgattctgctgatggaatggctttctgagtgtataggt

SEQ ID NO: 2427 - DNA, 122 bp, Homo sapiens
  misc_feature (61)..(62): /note="This region represents a CpG dinucleotide"
  misc_feature (61)..(61): /note="Nucleotide may be methylated to form 5-methylcytosine"
cacacacacacacacacccaaaatgtatcatcttaatcgtttctgagtgcagtgctcagtcgtgtgaagtacactcacactgttgtgtaacagctccagagctttctcatgctcccgaggcc

SEQ ID NO: 2428 - DNA, 122 bp, Homo sapiens
  misc_feature (61)..(62): /note="This region represents a CpG dinucleotide"
  misc_feature (61)..(61): /note="Nucleotide may be methylated to form 5-methylcytosine"
catgcacagattggggccagaagtcgagattctgcgcgtcctctcccgccaccccactcccggtcccctagagtggcccagactcaggctaaagtctagggcttctttcctgggatgccctt

SEQ ID NO: 2429 - DNA, 122 bp, Homo sapiens
  misc_feature (61)..(62): /note="This region represents a CpG dinucleotide"
  misc_feature (61)..(61): /note="Nucleotide may be methylated to form 5-methylcytosine"
aatctgctgagtgatgtaagaagctcctatttcactgctctaagaaattatgggcagctccgtgacaggttaaaagtttacttgttgctgctgctgttattttaaatataggcaacacttta

SEQ ID NO: 2430 - DNA, 122 bp, Homo sapiens
  misc_feature (61)..(62): /note="This region represents a CpG dinucleotide"
  misc_feature (61)..(61): /note="Nucleotide may be methylated to form 5-methylcytosine"
aagccaggaaggaaggaagcaaaccccagcagtgctgtacctggagggcgatgaatgagtcgcagaggctccctttctgagctgggattaggagttgataatggtcttgcaagtgcagttct

SEQ ID NO: 2431 - DNA, 122 bp, Homo sapiens
  misc_feature (61)..(62): /note="This region represents a CpG dinucleotide"
  misc_feature (61)..(61): /note="Nucleotide may be methylated to form 5-methylcytosine"
gcaggctcacagccacggctgctgcctccagtgcggtcgttctgtggcctgagagcgtcacgtgctcctcatcctggaccatcaggggctggcgcacccatcaacagctgggtgaccctgga

SEQ ID NO: 2432 - DNA, 122 bp, Homo sapiens
  misc_feature (61)..(62): /note="This region represents a CpG dinucleotide"
  misc_feature (61)..(61): /note="Nucleotide may be methylated to form 5-methylcytosine"
cgaggggcatcctggtttttatgtacgccactgagaggccaccagacacattttctcaaccgcagatcccccttccccacaccctgctccttgcgtgtcagcctgagagcccttgctttgag

SEQ ID NO: 2433 - DNA, 122 bp, Homo sapiens
  misc_feature (61)..(62): /note="This region represents a CpG dinucleotide"
  misc_feature (61)..(61): /note="Nucleotide may be methylated to form 5-methylcytosine"
tgtttaagggccctacgccacctaactgtagaaatttagaatgcaatcctatattaattacgataaacaacccagctactcttgaccgggaaccttggaggtaggtattaggaacagatatc

SEQ ID NO: 2434 - DNA, 122 bp, Homo sapiens
  misc_feature (61)..(62): /note="This region represents a CpG dinucleotide"
  misc_feature (61)..(61): /note="Nucleotide may be methylated to form 5-methylcytosine"
tctagtctgcctccttctctaggctgccaggctgctcacctcagtctaaccattgcctgccgtgtttaaaaagttgaccagccaggagcttggcaggacccacagaaacagttcagtttgca

SEQ ID NO: 2435 - DNA, 122 bp, Homo sapiens
  misc_feature (61)..(62): /note="This region represents a CpG dinucleotide"
  misc_feature (61)..(61): /note="Nucleotide may be methylated to form 5-methylcytosine"
tgctaagcagtggaggccactaagtaggaggcttgcctaggtagtcagtctttctggggtcgttagccaggtactcccagccatagagacacagccatatagacactgccctgcagagggca

SEQ ID NO: 2436 - DNA, 122 bp, Homo sapiens
  misc_feature (61)..(62): /note="This region represents a CpG dinucleotide"
  misc_feature (61)..(61): /note="Nucleotide may be methylated to form 5-methylcytosine"
aggcggagggaagggagacagcagagggtagaggctgactgtccgaaacctcccatgacccgtgacccgtgacccaagaagtgcggctccggcgtcgcggggattcactcacaagcagccca

SEQ ID NO: 2437 - DNA, 122 bp, Homo sapiens
  misc_feature (61)..(62): /note="This region represents a CpG dinucleotide"
  misc_feature (61)..(61): /note="Nucleotide may be methylated to form 5-methylcytosine"
aaaaaaaaatgattaccaagactaaatgcctcagaaagtttccaaaatcctttatttcctcgtacctgtcaatcctagacttccactttttttttcttttcttagacaagtattttcaactt

SEQ ID NO: 2438 - DNA, 122 bp, Homo sapiens
  misc_feature (61)..(62): /note="This region represents a CpG dinucleotide"
  misc_feature (61)..(61): /note="Nucleotide may be methylated to form 5-methylcytosine"
ggagggcagcctgagccgcttcccgcccccgcggggaccgtcgccagcccgcatctctagcgagaggaggttccacagcgcgcccggcagccccgccaccgtcagcacctgcgcctcgggcg

SEQ ID NO: 2439 - DNA, 122 bp, Homo sapiens
  misc_feature (61)..(62): /note="This region represents a CpG dinucleotide"
  misc_feature (61)..(61): /note="Nucleotide may be methylated to form 5-methylcytosine"
gcaaacacatgggtgcatacgtgggctccaaggcatacttgggctgcaagggagtcagcacgtcctgagaagatggagggatggggaaagctataaggaaagcagatcaggaaggaggggat

SEQ ID NO: 2440 - DNA, 122 bp, Homo sapiens
  misc_feature (61)..(62): /note="This region represents a CpG dinucleotide"
  misc_feature (61)..(61): /note="Nucleotide may be methylated to form 5-methylcytosine"
ctgaaatgtgtcttgtgcatagtggctctcatagtggctctcaacatgtttatcagaacacgtggagctgaaatgtgtcttgtgcatagtggctctcaacacgtttatgtaatccaggaaat

SEQ ID NO: 2441 - DNA, 122 bp, Homo sapiens
  misc_feature (61)..(62): /note="This region represents a CpG dinucleotide"
  misc_feature (61)..(61): /note="Nucleotide may be methylated to form 5-methylcytosine"
tgaacgttggatggcaaatgggacattcatctccagttatctcccatgaaatgctggccacgcaaagccagggagtgactttaccctgaagatcctttgcaggcacctctgccccctagtga

SEQ ID NO: 2442 - DNA, 122 bp, Homo sapiens
  misc_feature (61)..(62): /note="This region represents a CpG dinucleotide"
  misc_feature (61)..(61): /note="Nucleotide may be methylated to form 5-methylcytosine"
aatcttggggtgagtttccctgaagacagccccagggtgctgtggctgtaggagctggaccgtctagtgccttggtctgggggtggctgaagctggaggagggaaagaggccagtcctttgc

SEQ ID NO: 2443 - DNA, 122 bp, Homo sapiens
  misc_feature (61)..(62): /note="This region represents a CpG dinucleotide"
  misc_feature (61)..(61): /note="Nucleotide may be methylated to form 5-methylcytosine"
ggaaaataaatgcattcacacacagagtggtggccacttccttttctgaattcagagttccgttttgcactgtgatcagctctggtgagcatcaagtgtattaggtaacccttctctcctgc

SEQ ID NO: 2444 - DNA, 122 bp, Homo sapiens
  misc_feature (61)..(62): /note="This region represents a CpG dinucleotide"
  misc_feature (61)..(61): /note="Nucleotide may be methylated to form 5-methylcytosine"
gcttttccatatccttagcatttcacacactgtatgttcttatcatattctacaaaaacacggcaacttcactatgatttagcaaaacacaggctttgtactcttccttctcaaggattact

SEQ ID NO: 2445 - DNA, 122 bp, Homo sapiens
  misc_feature (61)..(62): /note="This region represents a CpG dinucleotide"
  misc_feature (61)..(61): /note="Nucleotide may be methylated to form 5-methylcytosine"
gttctctgtgaactgaagactagatctgcagccccagctgcggcaggagacaaatgcccccgccaacacccggaagccgcccttgtcctctccagctgcagcctgattgcccggttttcggc

SEQ ID NO: 2446 - DNA, 122 bp, Homo sapiens
  misc_feature (61)..(62): /note="This region represents a CpG dinucleotide"
  misc_feature (61)..(61): /note="Nucleotide may be methylated to form 5-methylcytosine"
cagaggaagatcccacatgtgtagaatacagacccatggcccctgggagagtgaaggacacgcagatgattggcagcggccacttctcacacaagcaacccctctctgttttactgatgaga

SEQ ID NO: 2447 - DNA, 122 bp, Homo sapiens
  misc_feature (61)..(62): /note="This region represents a CpG dinucleotide"
  misc_feature (61)..(61): /note="Nucleotide may be methylated to form 5-methylcytosine"
cgctttatttttctttcaaatctttttctcctaatcttttaaaataaggaaaggtgcctccgtgttgggtattataattgtattcaagtttttgcaactccattcaaaaaagtacgtatttt

SEQ ID NO: 2448 - DNA, 122 bp, Homo sapiens
  misc_feature (61)..(62): /note="This region represents a CpG dinucleotide"
  misc_feature (61)..(61): /note="Nucleotide may be methylated to form 5-methylcytosine"
ttctttgctgttaccacacactgaaacatacaatacctttattatttagtgaatgccacacgactgaaaagtcctggaaacaagacaaagttaaaatggtaaaatttcattcaaccaaaaat

SEQ ID NO: 2449 - DNA, 122 bp, Homo sapiens
  misc_feature (61)..(62): /note="This region represents a CpG dinucleotide"
  misc_feature (61)..(61): /note="Nucleotide may be methylated to form 5-methylcytosine"
tttttgcaaggcccgagatggcgggccctgcgcaggccgccctattccgcgccctcagggcgtcagtatccgcctgaggccggatacccactctgggctcggatacccgcgctgggcccgga

SEQ ID NO: 2450 - DNA, 122 bp, Homo sapiens
  misc_feature (61)..(62): /note="This region represents a CpG dinucleotide"
  misc_feature (61)..(61): /note="Nucleotide may be methylated to form 5-methylcytosine"
tgcctataccctcagtaaggaaactgaaacccagaaaggctaaaaggcacttgcctcggccgagccagagccatgacccacagcgtcccctgggtttctaggaaattttctgattccagaac

SEQ ID NO: 2451 - DNA, 122 bp, Homo sapiens
  misc_feature (61)..(62): /note="This region represents a CpG dinucleotide"
  misc_feature (61)..(61): /note="Nucleotide may be methylated to form 5-methylcytosine"
ataaaacagataaggagaaggctgtatctaggctgaatggctggccaatgttttcctctccgtcagtataaataaaatggatggaagaaaacacccctggatactatcaaatatgcctttca

SEQ ID NO: 2452 - DNA, 122 bp, Homo sapiens
  misc_feature (61)..(62): /note="This region represents a CpG dinucleotide"
  misc_feature (61)..(61): /note="Nucleotide may be methylated to form 5-methylcytosine"
agggaggccgagcagggctgcccgggccgccggcgtgggggtccgagctccggctggctccgcggagcctcagaggcaggtccgagccgccctcacccaggagcccctccgtgcggttctgg

SEQ ID NO: 2453 - DNA, 122 bp, Homo sapiens
  misc_feature (61)..(62): /note="This region represents a CpG dinucleotide"
  misc_feature (61)..(61): /note="Nucleotide may be methylated to form 5-methylcytosine"
ctccagtcctcttggaggtgaagagacctgaagggtaagggggtgtggaggttgtgaaggcgggaaggggggtagccccttcaccaatgtaaacaaggatgtgggttctgcggccacactct

SEQ ID NO: 2454 - DNA, 122 bp, Homo sapiens
  misc_feature (61)..(62): /note="This region represents a CpG dinucleotide"
  misc_feature (61)..(61): /note="Nucleotide may be methylated to form 5-methylcytosine"
ctgcgaggctgagattcaggaacaacacttgcaggaatatgccctggagggactgacactcgagaagaatttttgttttggaattgtgagaaactgaaaatgcccatctgcaaggaaagtga

SEQ ID NO: 2455 - DNA, 122 bp, Homo sapiens
  misc_feature (61)..(62): /note="This region represents a CpG dinucleotide"
  misc_feature (61)..(61): /note="Nucleotide may be methylated to form 5-methylcytosine"
agggttagggtgggggaacctcagccaggtgaccaaggtcaacatgggcagtgaaggtcgcgctgatggtgtcccccatgtgatgtggtgggaggaagccccgcccccattctcttcctccc

SEQ ID NO: 2456 - DNA, 122 bp, Homo sapiens
  misc_feature (61)..(62): /note="This region represents a CpG dinucleotide"
  misc_feature (61)..(61): /note="Nucleotide may be methylated to form 5-methylcytosine"
ccgagcccgcccgcagcgcctggggcctggggagtgggtggtagggtaggactggtgtcacgaagacgccccgagggcaggaggccctaaccactcccttggcagtggatgtggggagtggg

SEQ ID NO: 2457 - DNA, 122 bp, Homo sapiens
  misc_feature (61)..(62): /note="This region represents a CpG dinucleotide"
  misc_feature (61)..(61): /note="Nucleotide may be methylated to form 5-methylcytosine"
tctacatgtccttcctctctatttgtgtatgatagtgtctgaaatcattggatggatcaccggtgaaccatattgacagctgctatatggtcagggagattggttcccatgtagtattccga

SEQ ID NO: 2458 - DNA, 122 bp, Homo sapiens
  misc_feature (61)..(62): /note="This region represents a CpG dinucleotide"
  misc_feature (61)..(61): /note="Nucleotide may be methylated to form 5-methylcytosine"
tctgggtgtttccaggacaagaggctgcagccactggctgagtccaggcagaagtggttccgcagggctggaggctggcaccaagccttgtccagcgagggggtgtggagtaatcttactgc

SEQ ID NO: 2459 - DNA, 122 bp, Homo sapiens
  misc_feature (61)..(62): /note="This region represents a CpG dinucleotide"
  misc_feature (61)..(61): /note="Nucleotide may be methylated to form 5-methylcytosine"
gagtggtcccaggaagttgatttactcaagggacaccctcttcaccccaacgccaggtggcgctgatggaaatggctagcaggccacactttgagaaaccctggcccagaatatcatctatc

SEQ ID NO: 2460 - DNA, 122 bp, Homo sapiens
  misc_feature (61)..(62): /note="This region represents a CpG dinucleotide"
  misc_feature (61)..(61): /note="Nucleotide may be methylated to form 5-methylcytosine"
ctgcaaaaccccctcacctttttcacagtctattagctggaagtaagttgcaggtcctaccggcgctccaggggaggaggttacacagggtgtgaacaccagggagtgggaccacagggccc

SEQ ID NO: 2461 - DNA, 122 bp, Homo sapiens
  misc_feature (61)..(62): /note="This region represents a CpG dinucleotide"
  misc_feature (61)..(61): /note="Nucleotide may be methylated to form 5-methylcytosine"
tgatttattgcaggagatgctgtttactctgacagtctcaaaaacacccattaattgttccgggtcccttttgtgcttcttgacttccccgtggggtgtttcacatagatgttattgagtat

SEQ ID NO: 2462 - DNA, 122 bp, Homo sapiens
  misc_feature (61)..(62): /note="This region represents a CpG dinucleotide"
  misc_feature (61)..(61): /note="Nucleotide may be methylated to form 5-methylcytosine"
ggcaaatcaaagtggaaaagagtatgctacttttatattaacaagtctggtcatgtacagcgacatctagtggaggccagccagtattacaatccattggtgtaacaggtatcatgcaagta

SEQ ID NO: 2463 - DNA, 122 bp, Homo sapiens
  misc_feature (61)..(62): /note="This region represents a CpG dinucleotide"
  misc_feature (61)..(61): /note="Nucleotide may be methylated to form 5-methylcytosine"
aaatatattaagctaatcatgtggaagttaaccagaggccccttcacatttgtcatgtggcgtctgcagtcatttgctctgaatttttgccactttgccgcagttggggcccttgctaatga

SEQ ID NO: 2464 - DNA, 122 bp, Homo sapiens
  misc_feature (61)..(62): /note="This region represents a CpG dinucleotide"
  misc_feature (61)..(61): /note="Nucleotide may be methylated to form 5-methylcytosine"
cttgaagccacacaagagcccaaggtttggagcagattgagcgtatttctctgagtaacacgaagaacaagtttcactgcctggactgagagttgcaaacttgcattcggaatttttttttt

SEQ ID NO: 2465 - DNA, 122 bp, Homo sapiens
  misc_feature (61)..(62): /note="This region represents a CpG dinucleotide"
  misc_feature (61)..(61): /note="Nucleotide may be methylated to form 5-methylcytosine"
aagattggtcactcggcaaacctcatgatcggcaggattgtcccaaaggtcacttgacagcgcacatgatcgatccaggatggcaaaatagcccaagggaaaaaacagaaagcatgagaaat

SEQ ID NO: 2466 - DNA, 122 bp, Homo sapiens
  misc_feature (61)..(62): /note="This region represents a CpG dinucleotide"
  misc_feature (61)..(61): /note="Nucleotide may be methylated to form 5-methylcytosine"
aaaattggtttaatgatcaaatgtaagagtaaatgagttccggcacatgtggtccacatccgggtttttagcagaacataggtattatgatgtctgtcacagttcactctaaatctcagctg

SEQ ID NO: 2467 - DNA, 122 bp, Homo sapiens
  misc_feature (61)..(62): /note="This region represents a CpG dinucleotide"
  misc_feature (61)..(61): /note="Nucleotide may be methylated to form 5-methylcytosine"
ggcttcctgagcgagtgtagtttgacaatatagagtccagctgagatttaggcataaacacgtcaaagccttcagcaagttgtacttctggctaccaaaagaacacagatatttcattaaaa

SEQ ID NO: 2468 - DNA, 122 bp, Homo sapiens
  misc_feature (61)..(62): /note="This region represents a CpG dinucleotide"
  misc_feature (61)..(61): /note="Nucleotide may be methylated to form 5-methylcytosine"
gaatagcccccttctgggaagccctggcctcttctgtagaagttcttactcatattccaccgttcaagacgctgcctcccaatcgtgattggcccgactgaagagaaagcacttcatcaaaa

SEQ ID NO: 2469 - DNA, 122 bp, Homo sapiens
  misc_feature (61)..(62): /note="This region represents a CpG dinucleotide"
  misc_feature (61)..(61): /note="Nucleotide may be methylated to form 5-methylcytosine"
tccagcgtgagttaccagaaaccacaagagagagagagagcgtgcaagccccaaagcgagcgacatgtccctttggggagcagtccctctgcaccccagagtgaggaggacgcaggggtcag

SEQ ID NO: 2470 - DNA, 122 bp, Homo sapiens
  misc_feature (61)..(62): /note="This region represents a CpG dinucleotide"
  misc_feature (61)..(61): /note="Nucleotide may be methylated to form 5-methylcytosine"
tactcaaaaaatattactcagcacctaccacagggcaggctctgctagacagcgggaaatcgtggcaatgagacagactagatcccaaccttaacaagcttacagacaagtgcagggagaaa

SEQ ID NO: 2471 - DNA, 122 bp, Homo sapiens
  misc_feature (61)..(62): /note="This region represents a CpG dinucleotide"
  misc_feature (61)..(61): /note="Nucleotide may be methylated to form 5-methylcytosine"
gcagcacctgaaatgatctgtcttaggtatgtgtgtgcttgttcattgttttgtcttctccgtgaaaatctaagctcctagaaactttgtgagggaggcaatgggtctgttttgtttacctc

SEQ ID NO: 2472 - DNA, 122 bp, Homo sapiens
  misc_feature (61)..(62): /note="This region represents a CpG dinucleotide"
  misc_feature (61)..(61): /note="Nucleotide may be methylated to form 5-methylcytosine"
cccactgcgcatgccccagagcggcgacgaatgggagcccggagcgcaggggcggaggcgcgcccgggcagctaccgagaagcgccaatcaaccatcgaccaatcagatcatcaccgtcaat

SEQ ID NO: 2473 - DNA, 122 bp, Homo sapiens
  misc_feature (61)..(62): /note="This region represents a CpG dinucleotide"
  misc_feature (61)..(61): /note="Nucleotide may be methylated to form 5-methylcytosine"
aatgggaatgacagatcccttccatgcttctaaactctctctgatggtcagtttggagaacgttttacggtagatacagtttaagtagttttttcccatgcaattattaaagacaaggaata

SEQ ID NO: 2474 - DNA, 122 bp, Homo sapiens
  misc_feature (61)..(62): /note="This region represents a CpG dinucleotide"
  misc_feature (61)..(61): /note="Nucleotide may be methylated to form 5-methylcytosine"
gcgtatcaaacaaacggactgaagaaggtctccccaggactcgggtaaaagggcagccctcggtcctctcctccccgctgcccataaccgacccacagccgggaggcggcgtattcccaggc

SEQ ID NO: 2475 - DNA, 122 bp, Homo sapiens
  misc_feature (61)..(62): /note="This region represents a CpG dinucleotide"
  misc_feature (61)..(61): /note="Nucleotide may be methylated to form 5-methylcytosine"
tctgtcattaccttgttagtttatgtgtcttttttcttcctaatgaaaataaaaactcagcgagtataaggatatttgttcctaggaggatgtctagtataaagggggaactcaataaatat

SEQ ID NO: 2476 - DNA, 122 bp, Homo sapiens
  misc_feature (61)..(62): /note="This region represents a CpG dinucleotide"
  misc_feature (61)..(61): /note="Nucleotide may be methylated to form 5-methylcytosine"
ctcccatcttaaaggctctgttaaagttccatttcttccacaaagcatcctctttctaatcggctgtatttctgtcctgtcttctgttttagacaatacttactattgtcaagtgtggtatt

SEQ ID NO: 2477 - DNA, 122 bp, Homo sapiens
  misc_feature (61)..(62): /note="This region represents a CpG dinucleotide"
  misc_feature (61)..(61): /note="Nucleotide may be methylated to form 5-methylcytosine"
gaccagccttggcaagacagcgagaccctgtttgtaccaaaaaatcaataattagccaggcgtggtagcatgttcctgtagacttagctacttggcaggctgaagcaggagaactgcttgag

SEQ ID NO: 2478 - DNA, 122 bp, Homo sapiens
  misc_feature (61)..(62): /note="This region represents a CpG dinucleotide"
  misc_feature (61)..(61): /note="Nucleotide may be methylated to form 5-methylcytosine"
ggccctaagaaagcatagtcacctccttgacagtggacaacaagagagtacatcctgaatcgtcctcaagtttgtgtcccagatatgtagccaattttctcttacctattttcccatataaa

SEQ ID NO: 2479 - DNA, 122 bp, Homo sapiens
  misc_feature (61)..(62): /note="This region represents a CpG dinucleotide"
  misc_feature (61)..(61): /note="Nucleotide may be methylated to form 5-methylcytosine"
cagttagggagccctcctaccccgaagctaatgggtgtcacgctggctggggacacctcacgccatctgacatagacccggacaacagctgcaggaagtggtacaggaatcacccccgatca

SEQ ID NO: 2480 - DNA, 122 bp, Homo sapiens
  misc_feature (61)..(62): /note="This region represents a CpG dinucleotide"
  misc_feature (61)..(61): /note="Nucleotide may be methylated to form 5-methylcytosine"
tggcctcatctccctcaggctccatgcaaacgttcaatttcactcctgtattatgtggagcgcttttgctctctgaaacctattcaataactggccttgtttgcctcttcaaagatgcttta

SEQ ID NO: 2481 - DNA, 122 bp, Homo sapiens
  misc_feature (61)..(62): /note="This region represents a CpG dinucleotide"
  misc_feature (61)..(61): /note="Nucleotide may be methylated to form 5-methylcytosine"
tgagccggcttccccttcccacgcagctctgggatgcagcagccgctcgcatggaagtgccgcccagaggcatgcaggctgctgggcaccaccccctcatccagggaacgagtgtgtctcaa

SEQ ID NO: 2482 - DNA, 122 bp, Homo sapiens
  misc_feature (61)..(62): /note="This region represents a CpG dinucleotide"
  misc_feature (61)..(61): /note="Nucleotide may be methylated to form 5-methylcytosine"
gattttcccagctacagtcattgttatcttttgtcagcctataagcatgttctggctgggcgcggtgtctcacccctgtaatcccagcactttgggaggcttagctgggtggatcacttgag

SEQ ID NO: 2483 - DNA, 122 bp, Homo sapiens
  misc_feature (61)..(62): /note="This region represents a CpG dinucleotide"
  misc_feature (61)..(61): /note="Nucleotide may be methylated to form 5-methylcytosine"
ggaaggttgatggcttgcagagctgtgtgcagatcctagtgggatctgattcagtgcaggcgtctctgtcattggacacccacagccagctgcccatggattccggcagatgctcctgtttt

SEQ ID NO: 2484 - DNA, 122 bp, Homo sapiens
  misc_feature (61)..(62): /note="This region represents a CpG dinucleotide"
  misc_feature (61)..(61): /note="Nucleotide may be methylated to form 5-methylcytosine"
aaggtgagtcttagagtgactcaggcccatttcatgtgaaagacattcagaggaaagctgcgagggaagtggttttggggtctttaatatagcttattttaatcaaagcatttcagaagttt

SEQ ID NO: 2485 - DNA, 122 bp, Homo sapiens
  misc_feature (61)..(62): /note="This region represents a CpG dinucleotide"
  misc_feature (61)..(61): /note="Nucleotide may be methylated to form 5-methylcytosine"
agggggtatccggcctcaggcggatactgacgccctgagggcgcggaatagggcggcctgcgcagggcccgccgtctcggccttgcaaaaacagcggcctcttcaaagcccctaccggaacc

SEQ ID NO: 2486 - DNA, 122 bp, Homo sapiens
  misc_feature (61)..(62): /note="This region represents a CpG dinucleotide"
  misc_feature (61)..(61): /note="Nucleotide may be methylated to form 5-methylcytosine"
gccggtgctgcgtgtactgcggcaatgcgccgacaatggcagtccctggggagggactcacgaagggacgagagaaaagatcttgtccactgcatccctccaggaaggcctcctagttcctg

SEQ ID NO: 2487 - DNA, 122 bp, Homo sapiens
  misc_feature (61)..(62): /note="This region represents a CpG dinucleotide"
  misc_feature (61)..(61): /note="Nucleotide may be methylated to form 5-methylcytosine"
tgctgtctctctgttgccagtgaggggtggtgcctactgggcaagagtgcgtcctcggagcgtggattcatagtgaaattgaccaagcaatgtgacagtgaattggccttactttactcagg

SEQ ID NO: 2488 - DNA, 122 bp, Homo sapiens
  misc_feature (61)..(62): /note="This region represents a CpG dinucleotide"
  misc_feature (61)..(61): /note="Nucleotide may be methylated to form 5-methylcytosine"
tgtggtctttctgtcttcctgggctttgctgggggcccattggagtggccagtggggcctcgttgtcacagctgacacagagcagggcccaggccacccggcttctctctccctgtggttgt

SEQ ID NO: 2489 - DNA, 122 bp, Homo sapiens
  misc_feature (61)..(62): /note="This region represents a CpG dinucleotide"
  misc_feature (61)..(61): /note="Nucleotide may be methylated to form 5-methylcytosine"
ctataagtgatcactaactgtccctgtgacattgtgtcacaccctctagagtcaaaagttcgggtgtggtgtctcattggtcaagcccgagtcacacaccccaaccccaactgccaggaagc

SEQ ID NO: 2490 - DNA, 122 bp, Homo sapiens
  misc_feature (61)..(62): /note="This region represents a CpG dinucleotide"
  misc_feature (61)..(61): /note="Nucleotide may be methylated to form 5-methylcytosine"
gaccctccatcctgccactgaaaaatgtcaaaggcttagaagattcagctgcacacagcacgtttatttttccaatttcaaatgctctgaggagaaatgattttctcctttattgccaaaaa

SEQ ID NO: 2491 - DNA, 122 bp, Homo sapiens
  misc_feature (61)..(62): /note="This region represents a CpG dinucleotide"
  misc_feature (61)..(61): /note="Nucleotide may be methylated to form 5-methylcytosine"
atagagatgagggcctcggcggagacagtctcacgcagaggtatgccaccttggcatctgcgccttccgtgggccagtgggtcttccgggagggattctgtgtccctggtattgtgtgtcaa

SEQ ID NO: 2492 - DNA, 122 bp, Homo sapiens
  misc_feature (61)..(62): /note="This region represents a CpG dinucleotide"
  misc_feature (61)..(61): /note="Nucleotide may be methylated to form 5-methylcytosine"
ggttcatacacttaccaatataaagaactcctaccataaactgtaataataaacacacaacgccactaagaaataaaaaaaggatctgaacagacacttctctaaagaagatagacaaatgg

SEQ ID NO: 2493 - DNA, 122 bp, Homo sapiens
  misc_feature (61)..(62): /note="This region represents a CpG dinucleotide"
  misc_feature (61)..(61): /note="Nucleotide may be methylated to form 5-methylcytosine"
gaaatcacactgttgataatgtataaaatactgaaccaatcttagccaaagccacttaaacgtgaggtcaagttaattttgatatagctattgttgtactcttcagttggagtgtcttccgt

SEQ ID NO: 2494 - DNA, 122 bp, Homo sapiens
  misc_feature (61)..(62): /note="This region represents a CpG dinucleotide"
  misc_feature (61)..(61): /note="Nucleotide may be methylated to form 5-methylcytosine"
gggtttagtgagacaaggagggtatgattgagtgtgaggcaaaacgtgggtcagacccagcgccgagttggatctcactggtcttagctgaattggccacttcctgtttgtcaggatcctgt

SEQ ID NO: 2495 - DNA, 122 bp, Homo sapiens
  misc_feature (61)..(62): /note="This region represents a CpG dinucleotide"
  misc_feature (61)..(61): /note="Nucleotide may be methylated to form 5-methylcytosine"
cagttccttagagagagataatgtaagcatcgggtaagtaggggctggagccaaggggagcgaggaacaaaggagaaaacctctaggtcaagagagtagactgggttactgttctggggtat

SEQ ID NO: 2496 - DNA, 122 bp, Homo sapiens
  misc_feature (61)..(62): /note="This region represents a CpG dinucleotide"
  misc_feature (61)..(61): /note="Nucleotide may be methylated to form 5-methylcytosine"
ttcactgctcactctgccacgatcaatctctgttgtaaattttcctcccagagcacgtgacgatgcacttcttgactatatatcccaactgcagcagcggagttgtcagagcgcagagccgg

SEQ ID NO: 2497 - DNA, 122 bp, Homo sapiens
  misc_feature (61)..(62): /note="This region represents a CpG dinucleotide"
  misc_feature (61)..(61): /note="Nucleotide may be methylated to form 5-methylcytosine"
tttgacaatccgtcagctgagtgctccaacaagaggccagaggagggttcatggcagtgacgctctccctggctcggcagccagagccatctcctgagaggaattccaacctttcttcacaa

SEQ ID NO: 2498 - DNA, 122 bp, Homo sapiens
  misc_feature (61)..(62): /note="This region represents a CpG dinucleotide"
  misc_feature (61)..(61): /note="Nucleotide may be methylated to form 5-methylcytosine"
tagtttagaaacactaaacatttaattcaccgcaccgggggccagacaggtaatggagaacgccttaagtatgttaggaagggaagttatctacagtcgcagccgctattcagatctatttc

SEQ ID NO: 2499 - DNA, 122 bp, Homo sapiens
  misc_feature (61)..(62): /note="This region represents a CpG dinucleotide"
  misc_feature (61)..(61): /note="Nucleotide may be methylated to form 5-methylcytosine"
ttcaatccaacatgccaagctgagagagtttttaaaatatttatttttatttttttgcaccgtccaattaccaggccctatgctcctcgcaccaatctagtaagactgtgtgtgtcaaggag

SEQ ID NO: 2500 - DNA, 122 bp, Homo sapiens
  misc_feature (61)..(62): /note="This region represents a CpG dinucleotide"
  misc_feature (61)..(61): /note="Nucleotide may be methylated to form 5-methylcytosine"
gaaaaacatagtatataaaaggtttgggcgtcgatcagcgagggagcagcaaatggccggcggttggcgcctcgcggggggcgggcggcgcagagtagggggcggtggccagggccgaggcg

SEQ ID NO: 2501 - DNA, 122 bp, Homo sapiens
  misc_feature (61)..(62): /note="This region represents a CpG dinucleotide"
  misc_feature (61)..(61): /note="Nucleotide may be methylated to form 5-methylcytosine"
atgttctagtccaactcaacagttaaggactatcagagagattctttaaaataaaggcttcgaaatgcatggcggagttagcaggtggtatgcatttgttgaatagacaaatttatctatcc

SEQ ID NO: 2502 - DNA, 122 bp, Homo sapiens
  misc_feature (61)..(62): /note="This region represents a CpG dinucleotide"
  misc_feature (61)..(61): /note="Nucleotide may be methylated to form 5-methylcytosine"
gaggccagccatgtttctaggagtctcaggccgactcagtgtgtagtgagagaaggtaaacgtaggggaaagaaaattaaaatgctcaaagagtgagcaaaggaaaaatgaagtgtaagaga

SEQ ID NO: 2503 - DNA, 122 bp, Homo sapiens
  misc_feature (61)..(62): /note="This region represents a CpG dinucleotide"
  misc_feature (61)..(61): /note="Nucleotide may be methylated to form 5-methylcytosine"
gtcgactttcatgcatgagttagagagaagaaaccagaagggggcagctgaggacggtcacgtagagcagcatcagcccaggttgcgtcattcattagtttgcgttcaaaatgagtagggaa

SEQ ID NO: 2504 - DNA, 122 bp, Homo sapiens
  misc_feature (61)..(62): /note="This region represents a CpG dinucleotide"
  misc_feature (61)..(61): /note="Nucleotide may be methylated to form 5-methylcytosine"
ggagcagagagctgaggactgccagatggagtccagcttaggggaccctgcccccaaccccgctcccgtatccctcccatttttaagcacccctacgcctgggacctctgttccacgagaag

SEQ ID NO: 2505 - DNA, 122 bp, Homo sapiens
  misc_feature (61)..(62): /note="This region represents a CpG dinucleotide"
  misc_feature (61)..(61): /note="Nucleotide may be methylated to form 5-methylcytosine"
ggtgaggtgtgtcaggcaagagcgggggcagagctccggtgacgcggtgctcacgtgacccgcccggcgcctacgtgggcaccagcccccgcgcccgcccgccagcccgcccagcggtcggg

SEQ ID NO: 2506 - DNA, 122 bp, Homo sapiens
  misc_feature (61)..(62): /note="This region represents a CpG dinucleotide"
  misc_feature (61)..(61): /note="Nucleotide may be methylated to form 5-methylcytosine"
gggaaaccgtggggccagagccctaatccaccatccccaggatttactccgggacagctgcgtggatgggctgtgtcctccctccctcctgcccggcttcccctccttcgctctcttccttc

SEQ ID NO: 2507 - DNA, 122 bp, Homo sapiens
  misc_feature (61)..(62): /note="This region represents a CpG dinucleotide"
  misc_feature (61)..(61): /note="Nucleotide may be methylated to form 5-methylcytosine"
cggcgggcggggggcgggtgccagggctcggatccgggaagagggccttctgggcgatggcgagtggtttggctttatcccaagcctgagaggaagccgccgcgcggggctaggcagaggga

SEQ ID NO: 2508 - DNA, 122 bp, Homo sapiens
  misc_feature (61)..(62): /note="This region represents a CpG dinucleotide"
  misc_feature (61)..(61): /note="Nucleotide may be methylated to form 5-methylcytosine"
cgccccactgatcaaaatgtctcctttatgatttttggttaagttgaacatttccataatcgtcattattagtgcaaattacacgcctaatcggtccttaaatagattttaattaaataagc

SEQ ID NO: 2509 - DNA, 122 bp, Homo sapiens
  misc_feature (61)..(62): /note="This region represents a CpG dinucleotide"
  misc_feature (61)..(61): /note="Nucleotide may be methylated to form 5-methylcytosine"
ggaggagcgggaggaggatggtgattgttaggccttacaagtccctggggaatgtaacagcgtcctcagccagagtcactatgttctgggttgtcccctgagcatcttgctgagtgaaaagg

SEQ ID NO: 2510 - DNA, 122 bp, Homo sapiens
  misc_feature (61)..(62): /note="This region represents a CpG dinucleotide"
  misc_feature (61)..(61): /note="Nucleotide may be methylated to form 5-methylcytosine"
tgttaatgttggtggagttccagccactgcactttttttgaggcagactcactgtggctccggctggagtgcagtggcatggtcatagctcatggcagcccccaactcccgggctcatgtaa

SEQ ID NO: 2511 - DNA, 122 bp, Homo sapiens
  misc_feature (61)..(62): /note="This region represents a CpG dinucleotide"
  misc_feature (61)..(61): /note="Nucleotide may be methylated to form 5-methylcytosine"
gtgtggaagtcggggaccggggacgaggcatggatgggagcgctgtttgggcagcctcgccgcggccagggcttaaaaatggaagtcaggaaaatttagccaagggtcgggtcacaccttaa

SEQ ID NO: 2512 - DNA, 122 bp, Homo sapiens
  misc_feature (61)..(62): /note="This region represents a CpG dinucleotide"
  misc_feature (61)..(61): /note="Nucleotide may be methylated to form 5-methylcytosine"
tcaagaataaaatcaaagtctttggcttgacagccttccacaatctgacctctgttttctcgccagcctcatctcctgtcattcacaacatttccagcattccaaccagtctgaacttttgc

SEQ ID NO: 2513 - DNA, 122 bp, Homo sapiens
  misc_feature (61)..(62): /note="This region represents a CpG dinucleotide"
  misc_feature (61)..(61): /note="Nucleotide may be methylated to form 5-methylcytosine"
cgaaagacattggaggaaatggagctgcgtattgagactcaaaagcagaccctaaatgctcgggatgaatccattaagaagcttctggaaatgttgcagagcaaaggactttctgccaaggc

SEQ ID NO: 2514 - DNA, 122 bp, Homo sapiens
  misc_feature (61)..(62): /note="This region represents a CpG dinucleotide"
  misc_feature (61)..(61): /note="Nucleotide may be methylated to form 5-methylcytosine"
agattccataaagtcggggtgcttgagggcgtagggccgagaccgtcgcgggtactgaggcgcctccgtcgtctctcccactcgccgcccgctttccaagacatatgtcccgcttgcagccc

SEQ ID NO: 2515 - DNA, 122 bp, Homo sapiens
  misc_feature (61)..(62): /note="This region represents a CpG dinucleotide"
  misc_feature (61)..(61): /note="Nucleotide may be methylated to form 5-methylcytosine"
aagcgcttgtcactgtgtgggggcagcagccttagtgcacctcccagcgtgtgtggcccccgccctcctctgcatccctcccaggcttcccaggactgcccagctgttttctcctggcatta

SEQ ID NO: 2516 - DNA, 122 bp, Homo sapiens
  misc_feature (61)..(62): /note="This region represents a CpG dinucleotide"
  misc_feature (61)..(61): /note="Nucleotide may be methylated to form 5-methylcytosine"
cgctcgggaatgtctcctggccaggcctggagattgcaggaggccgggcgaggagccccgcgtctcccccgtttccgggccgttgttttcttggctggattttgaggagggttaagtgtccc

SEQ ID NO: 2517 - DNA, 122 bp, Homo sapiens
  misc_feature (61)..(62): /note="This region represents a CpG dinucleotide"
  misc_feature (61)..(61): /note="Nucleotide may be methylated to form 5-methylcytosine"
ctccaggctgctgtacgatgtgttcaactgagtcaggctggactggggggggtggcactgcgttgggggacagctctctatctaaagagtcaagtgtttggagctggcagggtcctcctgga

SEQ ID NO: 2518 - DNA, 122 bp, Homo sapiens
  misc_feature (61)..(62): /note="This region represents a CpG dinucleotide"
  misc_feature (61)..(61): /note="Nucleotide may be methylated to form 5-methylcytosine"
acaggtgttcaggaagttctggactaggcacattggctcatgtttgtaatccatgcacttcgggaggctgagatgggaggaccacttgagcccagcaagatcaagcccaggagtttaagacc

SEQ ID NO: 2519 - DNA, 122 bp, Homo sapiens
  misc_feature (61)..(62): /note="This region represents a CpG dinucleotide"
  misc_feature (61)..(61): /note="Nucleotide may be methylated to form 5-methylcytosine"
tgcgcgctctgcagaaattctgcccgcctctccaggccctccttccagctcccggcagagcgggctggaagtaacggggaagagcggttatttgttggtttaatataatttgtttagtcacc

SEQ ID NO: 2520 - DNA, 122 bp, Homo sapiens
  misc_feature (61)..(62): /note="This region represents a CpG dinucleotide"
  misc_feature (61)..(61): /note="Nucleotide may be methylated to form 5-methylcytosine"
gcagcaggtgtgggcagtgggtcctctggggtggactgaggtgaggcctgggtgtgaccacgcggtggcactggtggctgccggcagctgtcgtctgcagagtgggtgagaccgagtgtggc

SEQ ID NO: 2521 - DNA, 122 bp, Homo sapiens
  misc_feature (61)..(62): /note="This region represents a CpG dinucleotide"
  misc_feature (61)..(61): /note="Nucleotide may be methylated to form 5-methylcytosine"
ttcacagccatgctgtcgttggttctttcagtgcaaaagacaacctaggcacatcaatttcgttttcatgcttctcaacataatgaatttgcttcaagaaagtggataatttactcctaaga

SEQ ID NO: 2522 - DNA, 122 bp, Homo sapiens
  misc_feature (61)..(62): /note="This region represents a CpG dinucleotide"
  misc_feature (61)..(61): /note="Nucleotide may be methylated to form 5-methylcytosine"
tgctggtaccatcctccagctcaaatatttgacttggaacaactgaatgttgtttagacacgctaaagattgtaaagaaaagacatacaaaagtactttgttagataaaaagcagcaagtag

SEQ ID NO: 2523 - DNA, 122 bp, Homo sapiens
  misc_feature (61)..(62): /note="This region represents a CpG dinucleotide"
  misc_feature (61)..(61): /note="Nucleotide may be methylated to form 5-methylcytosine"
tgagatggttgaggagcggttgggtgctgcatgcatgcgaggccggtgcctgccagggagcgtgaggatgaagacaggttgcccaagcctggagaggcccactgtctgcagggcaagcattc

SEQ ID NO: 2524 - DNA, 122 bp, Homo sapiens
  misc_feature (61)..(62): /note="This region represents a CpG dinucleotide"
  misc_feature (61)..(61): /note="Nucleotide may be methylated to form 5-methylcytosine"
agggaggagcgagagagggtggggctgaggaggaggctgtgtgagaaaaggggcggggcgcgcccaaagtctggcggaagagcgttaccctggcaaccctcccgcggaggccgagagaggcc

SEQ ID NO: 2525 - DNA, 122 bp, Homo sapiens
  misc_feature (61)..(62): /note="This region represents a CpG dinucleotide"
  misc_feature (61)..(61): /note="Nucleotide may be methylated to form 5-methylcytosine"
tggaatgaaacagcaaagataccggggacaaatcattcttgttgcagaattccttcaatccgccatctttttgttctagtcttgataacgggaataacatccacaaaacgcaaggtggcgct

SEQ ID NO: 2526 - DNA, 122 bp, Homo sapiens
  misc_feature (61)..(62): /note="This region represents a CpG dinucleotide"
  misc_feature (61)..(61): /note="Nucleotide may be methylated to form 5-methylcytosine"
tttctttctttctttttctttcttttctttttctttcttttctttttctttctgtctgtccgtctgtctgtctctctctgtttctttttttcctagtggggctacaacttatgcttaataca

SEQ ID NO: 2527 - DNA, 122 bp, Homo sapiens
  misc_feature (61)..(62): /note="This region represents a CpG dinucleotide"
  misc_feature (61)..(61): /note="Nucleotide may be methylated to form 5-methylcytosine"
caccgcttgcaatgataggaaccctagcgatcctgctccagagatgaatataagctatagcgccagctgtacagaagtgcagtttcttagatgaacagacagataagcacttactggctttg

SEQ ID NO: 2528 - DNA, 122 bp, Homo sapiens
  misc_feature (61)..(62): /note="This region represents a CpG dinucleotide"
  misc_feature (61)..(61): /note="Nucleotide may be methylated to form 5-methylcytosine"
gttgccttctcctgcttgtctcctgggccctcatcttcctcgctggaggagggcttgctccgtttctttctgcctcccttgttcctcttccctttggcacttggcctgcaggtgcccttagc

SEQ ID NO: 2529 - DNA, 122 bp, Homo sapiens
  misc_feature (61)..(62): /note="This region represents a CpG dinucleotide"
  misc_feature (61)..(61): /note="Nucleotide may be methylated to form 5-methylcytosine"
tggtggaggaagggaagggctggcttcttcccgttggcaaatggcagactgtgggcaggacggggcagtccaggaaacaagatgaaacacagcccacttgtctgtcatgcagacatgtttgt

SEQ ID NO: 2530 - DNA, 122 bp, Homo sapiens
  misc_feature (61)..(62): /note="This region represents a CpG dinucleotide"
  misc_feature (61)..(61): /note="Nucleotide may be methylated to form 5-methylcytosine"
tggttagaaaatcagttcgaacttcttgagttttgtgttttaaactcttctcaactgttccgatgattgatggatggcccagaggcgacctctttatctccagcaacatatttggctgttgg

SEQ ID NO: 2531 - DNA, 122 bp, Homo sapiens
  misc_feature (61)..(62): /note="This region represents a CpG dinucleotide"
  misc_feature (61)..(61): /note="Nucleotide may be methylated to form 5-methylcytosine"
atcttgtccaccgtgtgtcttcttctgcacgagactttgaggctgtcagagcgctttttgcgtggttgctcccgcaagtttccttctctggagcttcccgcaggtgggcagctagctgcagc

SEQ ID NO: 2532 - DNA, 122 bp, Homo sapiens
  misc_feature (61)..(62): /note="This region represents a CpG dinucleotide"
  misc_feature (61)..(61): /note="Nucleotide may be methylated to form 5-methylcytosine"
ggtggggtaaatatcaagcactcctgacttagaatgtaagcctgcctcatgggcagagaccgtatctctttcacttacccacagaataagtcacagaaggtccctttctggaccgggtagaa

SEQ ID NO: 2533 - DNA, 122 bp, Homo sapiens
  misc_feature (61)..(62): /note="This region represents a CpG dinucleotide"
  misc_feature (61)..(61): /note="Nucleotide may be methylated to form 5-methylcytosine"
agaccatgaatttgcaaatgctctgcctgaagtgtgtactgaagctctggagacctcacccggattcccagggccataattatcataataatgtacaaacgagaatctttctgtaaatttaa

SEQ ID NO: 2534 - DNA, 122 bp, Homo sapiens
  misc_feature (61)..(62): /note="This region represents a CpG dinucleotide"
  misc_feature (61)..(61): /note="Nucleotide may be methylated to form 5-methylcytosine"
ggtccacagtcaggatgtctccatcccacactgcccagctgggtggcggagtttgtggatcggatattccttcctcatggtatgtggtatttgcccagttcccctccccaaccacaccctgc

SEQ ID NO: 2535 - DNA, 122 bp, Homo sapiens
  misc_feature (61)..(62): /note="This region represents a CpG dinucleotide"
  misc_feature (61)..(61): /note="Nucleotide may be methylated to form 5-methylcytosine"
atgagattgcccatagtcacctcttcatttaaaaagcattagaaagagactccactactacgtaggggaaatcacagctctttagaggcgaccactgctgcagtctcttactttgcatttta

SEQ ID NO: 2536 - DNA, 122 bp, Homo sapiens
  misc_feature (61)..(62): /note="This region represents a CpG dinucleotide"
  misc_feature (61)..(61): /note="Nucleotide may be methylated to form 5-methylcytosine"
gctggactgaaggggtcccgagtgggacggggggctcggcgggaagtttacctggtgccgcgggcggcccacgatggacgggaagacagcgcggggcgcgtcatcgcccgcaaagccggcct

SEQ ID NO: 2537 - DNA, 122 bp, Homo sapiens
  misc_feature (61)..(62): /note="This region represents a CpG dinucleotide"
  misc_feature (61)..(61): /note="Nucleotide may be methylated to form 5-methylcytosine"
ctctctggcctccatttcctccctcatctgtaaaatatgtgttgaagaggaagggggaagcgataataaatctaccacggtaggttactttaagaaccaaaagaagtcacttgagtaactgc

SEQ ID NO: 2538 - DNA, 122 bp, Homo sapiens
  misc_feature (61)..(62): /note="This region represents a CpG dinucleotide"
  misc_feature (61)..(61): /note="Nucleotide may be methylated to form 5-methylcytosine"
gttatggactttcttggggcctcaactctccccaagagcgtgatcctcactacgggggagcggcgctttatccggcggggcgggtggacactcctacagacccactttgacccattttctca

SEQ ID NO: 2539 - DNA, 122 bp, Homo sapiens
  misc_feature (61)..(62): /note="This region represents a CpG dinucleotide"
  misc_feature (61)..(61): /note="Nucleotide may be methylated to form 5-methylcytosine"
ctgtttaaccagagcagacccaactctgcggggcaaagttgacataccagcataattacacgtaggttgaccatatttactgcaactctgttgttctagaatttcaaacaaaggctgaaccc

SEQ ID NO: 2540 - DNA, 122 bp, Homo sapiens
  misc_feature (61)..(62): /note="This region represents a CpG dinucleotide"
  misc_feature (61)..(61): /note="Nucleotide may be methylated to form 5-methylcytosine"
acaaacctacaaacaaaattttaaaaattcaaaacaatctcattcatctgtgctatatcacgtgctgccctcagaactccagtgcagagggactctggcacttcattcctaggacatgattt

SEQ ID NO: 2541 - DNA, 122 bp, Homo sapiens
  misc_feature (61)..(62): /note="This region represents a CpG dinucleotide"
  misc_feature (61)..(61): /note="Nucleotide may be methylated to form 5-methylcytosine"
tacccaggctccttagggaactgtttcatacagttctacaaataggatcaatgattatcacggttcagtgatcttacatgcgaaaagagtaattcagtggaagttccacagaatcagttcaa

SEQ ID NO: 2542 - DNA, 122 bp, Homo sapiens
  misc_feature (61)..(62): /note="This region represents a CpG dinucleotide"
  misc_feature (61)..(61): /note="Nucleotide may be methylated to form 5-methylcytosine"
tttggtttatcctggggtcaaacccagattctccctacaaggattacattagatagagatcgtcaaaaccagaaatgatcaacctgaaacacttcctggtcagcttttgctaaaagaagata

SEQ ID NO: 2543 - DNA, 122 bp, Homo sapiens
  misc_feature (61)..(62): /note="This region represents a CpG dinucleotide"
  misc_feature (61)..(61): /note="Nucleotide may be methylated to form 5-methylcytosine"
gtaataggctggcattagtataatgaaactcttaaaatctgaatgacaaaagtttataaacgggcactaaggaaagcctctatatcattaacagaccatgctttctaacactaacataacat

SEQ ID NO: 2544 - DNA, 122 bp, Homo sapiens
  misc_feature (61)..(62): /note="This region represents a CpG dinucleotide"
  misc_feature (61)..(61): /note="Nucleotide may be methylated to form 5-methylcytosine"
ttcttaattttttttaaagcactaaaactttcagtaaagtaacgggaattatgagaggatcggaccagctaaagttttgtttgtcgcgctgctcatattgatgaccttgaggttgccacacc

SEQ ID NO: 2545 - DNA, 122 bp, Homo sapiens
  misc_feature (61)..(62): /note="This region represents a CpG dinucleotide"
  misc_feature (61)..(61): /note="Nucleotide may be methylated to form 5-methylcytosine"
aaaagagtgagtttgcaaaattctatcaccagacagcctgctttcagatgatgtggacttcgtaacccaaggcttccttcctcctcctctgccggcaggctgattcctgcttaccaccctgt

SEQ ID NO: 2546 - DNA, 122 bp, Homo sapiens
  misc_feature (61)..(62): /note="This region represents a CpG dinucleotide"
  misc_feature (61)..(61): /note="Nucleotide may be methylated to form 5-methylcytosine"
gacactttcccagtctccgtcccttccaccttccctggttcattggcttggagccatgagcgcggccagtggctccgcggctcccggagggacgctgggggtttgccctgggagtagggtgc

SEQ ID NO: 2547 - DNA, 122 bp, Homo sapiens
  misc_feature (61)..(62): /note="This region represents a CpG dinucleotide"
  misc_feature (61)..(61): /note="Nucleotide may be methylated to form 5-methylcytosine"
gaaaaagtcctggaaacctgaggtcccctctccctcactactggaaaagaattaagacaacgtgttactccttgggccccaggcagaggccaagctgccctcgaaacatccaatctgctcca

SEQ ID NO: 2548 - DNA, 122 bp, Homo sapiens
  misc_feature (61)..(62): /note="This region represents a CpG dinucleotide"
  misc_feature (61)..(61): /note="Nucleotide may be methylated to form 5-methylcytosine"
gctgagataaaagtgagattccccagagagaatttccattttcttctttcaaatgctctccgttcaaaaatgctctgaattaaatcagcagcttgagttttgtttgttgttttttgaaaaag

SEQ ID NO: 2549 - DNA, 122 bp, Homo sapiens
  misc_feature (61)..(62): /note="This region represents a CpG dinucleotide"
  misc_feature (61)..(61): /note="Nucleotide may be methylated to form 5-methylcytosine"
atgccatgttcttctttacttcttattcgaattcttatattgttgaatgaaagaaacaaacgtggcatcttttagctgtgtagggaattattgggaagacaaagcaatttactggttttgtt

SEQ ID NO: 2550 - DNA, 122 bp, Homo sapiens
  misc_feature (61)..(62): /note="This region represents a CpG dinucleotide"
  misc_feature (61)..(61): /note="Nucleotide may be methylated to form 5-methylcytosine"
tgtgcagagacgggtgcgtgtgaacacgtgtgtgtgcagatgggtgcgcatgactccacgcgtgtgtgcagagacggatgtgtgtggacacgcgtgtgtgcagagacgggtgtgtgtggaca

SEQ ID NO: 2551 - DNA, 122 bp, Homo sapiens
  misc_feature (61)..(62): /note="This region represents a CpG dinucleotide"
  misc_feature (61)..(61): /note="Nucleotide may be methylated to form 5-methylcytosine"
ggtggaaatgcccaatctcaggctccaaccagactttctaactctgaatctgcattttaacggtgtccccagggattcacatgcacctagacgtttgaaaagcactgctctaaatatgctat

SEQ ID NO: 2552 - DNA, 122 bp, Homo sapiens
  misc_feature (61)..(62): /note="This region represents a CpG dinucleotide"
  misc_feature (61)..(61): /note="Nucleotide may be methylated to form 5-methylcytosine"
agaataatctattatttggagcctgccaagaggtactgtaatgggtaattctgacgtcagcgcaccaaaactatcctgattccaaatatgtatgcacctcaaggtcatcaaacatttgccaa

SEQ ID NO: 2553 - DNA, 122 bp, Homo sapiens
  misc_feature (61)..(62): /note="This region represents a CpG dinucleotide"
  misc_feature (61)..(61): /note="Nucleotide may be methylated to form 5-methylcytosine"
ggtgccccccaggccaggcagcagtctcagtagcagcatcgaaaacttggagtcggaggccgtgttcgaggccaagttcaagcgcagccgcgagtcgcccctgtcgctggggctgcggctgc

SEQ ID NO: 2554 - DNA, 122 bp, Homo sapiens
  misc_feature (61)..(62): /note="This region represents a CpG dinucleotide"
  misc_feature (61)..(61): /note="Nucleotide may be methylated to form 5-methylcytosine"
aagccttaagagagagacgtgtttctatagtggccaaggggtccagttgtcccctgagtccggaggggtgggcctaagaagggggcagctctcccccattaagcaccataagccgagtggta

SEQ ID NO: 2555 - DNA, 122 bp, Homo sapiens
  misc_feature (61)..(62): /note="This region represents a CpG dinucleotide"
  misc_feature (61)..(61): /note="Nucleotide may be methylated to form 5-methylcytosine"
ctcttcctcctggggctccccctttcccgggtctgccccttggcctcacctcttctctcccgtcccccagctccacatccagaggccggagatggtagcatccactgtgtgagccaacgggg

SEQ ID NO: 2556 - DNA, 122 bp, Homo sapiens
  misc_feature (61)..(62): /note="This region represents a CpG dinucleotide"
  misc_feature (61)..(61): /note="Nucleotide may be methylated to form 5-methylcytosine"
aatataaaatgttaagatcagttaattaaactatgactatagtgctatttacgtgggcctcgtgacaagcctgcgattggtgctggtagattaggatacccaccatgactcagcatacccat

SEQ ID NO: 2557 - DNA, 122 bp, Homo sapiens
  misc_feature (61)..(62): /note="This region represents a CpG dinucleotide"
  misc_feature (61)..(61): /note="Nucleotide may be methylated to form 5-methylcytosine"
agtgccagagactgtgctgagtacttaattacgcattgccttgttatatccccactacaacgctatgaggtaggcactttttacatctccattttacagatgaggaaattgagatttggcga

SEQ ID NO: 2558 - DNA, 122 bp, Homo sapiens
  misc_feature (61)..(62): /note="This region represents a CpG dinucleotide"
  misc_feature (61)..(61): /note="Nucleotide may be methylated to form 5-methylcytosine"
ccttgtgtgggggctggcttcctccaggacgaccatccagagacagtcagggggatgcaacgtggctttttttttaacctatccttggaagtcacacagtgtcacttttgctgtactttatt

SEQ ID NO: 2559 - DNA, 122 bp, Homo sapiens
  misc_feature (61)..(62): /note="This region represents a CpG dinucleotide"
  misc_feature (61)..(61): /note="Nucleotide may be methylated to form 5-methylcytosine"
ccacttgttcctgaagctggatccacccatgaactgttcagctgcaggagttaataagcacgcctctttggcttggctcagcttcatctgggtttctgtcatttgcagatgaaagcatcctg

SEQ ID NO: 2560 - DNA, 122 bp, Homo sapiens
  misc_feature (61)..(62): /note="This region represents a CpG dinucleotide"
  misc_feature (61)..(61): /note="Nucleotide may be methylated to form 5-methylcytosine"
ttctatctaaaaaatggacatttgtacattaattgaaacacacaaatacatgtacagccacggtaagaaaatataaaaagaaaagaaaaccagaacttcccagcagccaatagccaggggcg

SEQ ID NO: 2561 - DNA, 122 bp, Homo sapiens
  misc_feature (61)..(62): /note="This region represents a CpG dinucleotide"
  misc_feature (61)..(61): /note="Nucleotide may be methylated to form 5-methylcytosine"
aaaaaaacatacacaactacacatactgacttctggagtagacgctcggtgacttctttccggtgtgataacttttttgggttgtgcgatgggaaggtatcgagtatctgtagctactgctc

SEQ ID NO: 2562 - DNA, 122 bp, Homo sapiens
  misc_feature (61)..(62): /note="This region represents a CpG dinucleotide"
  misc_feature (61)..(61): /note="Nucleotide may be methylated to form 5-methylcytosine"
aagggccttgggctaggttagtcagttgggtagagaagtggctgggaaaataaggatttgcgtaacagggtttgttttgtgccgagttccttggcttcaacttcccatccttgaccataaga

SEQ ID NO: 2563 - DNA, 122 bp, Homo sapiens
  misc_feature (61)..(62): /note="This region represents a CpG dinucleotide"
  misc_feature (61)..(61): /note="Nucleotide may be methylated to form 5-methylcytosine"
caataaaggaaaaacatgaaatcaagctttgtgtacatatatattaatgagactaaagaacggtgatgtgcacaagtcagacccatctctagaacttggcaaatatggaaactggaaaatga

SEQ ID NO: 2564 - DNA, 122 bp, Homo sapiens
  misc_feature (61)..(62): /note="This region represents a CpG dinucleotide"
  misc_feature (61)..(61): /note="Nucleotide may be methylated to form 5-methylcytosine"
tgccccagtcttctgcactaagctgtggtgagcacatccgggttccactggatttttgtgcggggagggggttttctacgttgggtcaatgatgagaatcttatattgtcctgaagagaggt

SEQ ID NO: 2565 - DNA, 122 bp, Homo sapiens
  misc_feature (61)..(62): /note="This region represents a CpG dinucleotide"
  misc_feature (61)..(61): /note="Nucleotide may be methylated to form 5-methylcytosine"
ttctagctctgtgaccctgggcacgtggcttaacccttccgagcctgcctgtttcctcgccgtaaaatagaaactcagctcacagggctgactcagaggctcagtgagcgaatgcctgccta

SEQ ID NO: 2566 - DNA, 122 bp, Homo sapiens
  misc_feature (61)..(62): /note="This region represents a CpG dinucleotide"
  misc_feature (61)..(61): /note="Nucleotide may be methylated to form 5-methylcytosine"
agtatgggaatactgtgaccaaagtgaagatttaaaaagatggttctatcattgatagaacgttatcattgagaccaagcctggtgcttagggagaggagaaaatcattttaaacttgtact

SEQ ID NO: 2567 - DNA, 122 bp, Homo sapiens
  misc_feature (61)..(62): /note="This region represents a CpG dinucleotide"
  misc_feature (61)..(61): /note="Nucleotide may be methylated to form 5-methylcytosine"
cactaacatgtggtgttcttcctgtgtcttcatctctgtgtctctttgtctttacatggccgtttttacaaaggcactggtcatcctagtcccatacgacctaatcttaactaagtacaact

SEQ ID NO: 2568 - DNA, 122 bp, Homo sapiens
  misc_feature (61)..(62): /note="This region represents a CpG dinucleotide"
  misc_feature (61)..(61): /note="Nucleotide may be methylated to form 5-methylcytosine"
tcaccgagtctcctcttgctggctctggcctggctctcctgctgagactgtgcattccagcgggttgttgtctgaaactgagcctgtctcagagaggactctgagcccagtgctgtacaggg

SEQ ID NO: 2569 - DNA, 122 bp, Homo sapiens
  misc_feature (61)..(62): /note="This region represents a CpG dinucleotide"
  misc_feature (61)..(61): /note="Nucleotide may be methylated to form 5-methylcytosine"
taccaaatatagcaattttggtaactgccaaaagaagcaaagtatttaggaaaatcccaccgaatattagtagcctttgtcactcagtcagtgatttcctgagtgaaacaactgtttgcttt

SEQ ID NO: 2570 - DNA, 122 bp, Homo sapiens
  misc_feature (61)..(62): /note="This region represents a CpG dinucleotide"
  misc_feature (61)..(61): /note="Nucleotide may be methylated to form 5-methylcytosine"
cgggagcctggctccctcccccgccctgggtcctgcggggagagcgtgtgcggggaactgcgctcgttgctatgcaacctccatcccgcgcccgccgcaccgcgcctcccgggacggaagcg

SEQ ID NO: 2571 - DNA, 122 bp, Homo sapiens
  misc_feature (61)..(62): /note="This region represents a CpG dinucleotide"
  misc_feature (61)..(61): /note="Nucleotide may be methylated to form 5-methylcytosine"
ccgacttatgaaatggacatatatggtatctcatttgaaacacaaaaataacttgcatttcgacttacagcaaactagggataatctagggaatcccagctctcaaggaccaaagcccaggt

SEQ ID NO: 2572 - DNA, 122 bp, Homo sapiens
  misc_feature (61)..(62): /note="This region represents a CpG dinucleotide"
  misc_feature (61)..(61): /note="Nucleotide may be methylated to form 5-methylcytosine"
aagtatttgaaacatgggcagcagcaaagagttttcattgtttgttcacccaaatctttacgacaacagagaagaatgcattatggatacactaaattctgaactatgaaatctaagctgtg

SEQ ID NO: 2573 - DNA, 122 bp, Homo sapiens
  misc_feature (61)..(62): /note="This region represents a CpG dinucleotide"
  misc_feature (61)..(61): /note="Nucleotide may be methylated to form 5-methylcytosine"
ttctttcttcttttcttttctttcttttttgtccctgtgtacctagttgtcccaacacaacgtgttgaaaggccgacttttcctcactcctctgcaaccctctgctgtcacaagtcaggtgt

SEQ ID NO: 2574 - DNA, 122 bp, Homo sapiens
  misc_feature (61)..(62): /note="This region represents a CpG dinucleotide"
  misc_feature (61)..(61): /note="Nucleotide may be methylated to form 5-methylcytosine"
ggtgtagtctgtctgtgtcaggaacctgggtccctcacccactacccctccccacccacacgtttcctctgtcatagcttccggtggaaagaaccttataaaccagggctttacagagggtg

SEQ ID NO: 2575 - DNA, 122 bp, Homo sapiens
  misc_feature (61)..(62): /note="This region represents a CpG dinucleotide"
  misc_feature (61)..(61): /note="Nucleotide may be methylated to form 5-methylcytosine"
cctgtgtctctgagcacatattgcaataattctctgactagctgctcaaggccttggcttcgtggctttttactccgtttaaaggtcttgatcaggccacttccgtttttaatgtttgagaa

SEQ ID NO: 2576 - DNA, 122 bp, Homo sapiens
  misc_feature (61)..(62): /note="This region represents a CpG dinucleotide"
  misc_feature (61)..(61): /note="Nucleotide may be methylated to form 5-methylcytosine"
tgtggtaggttcgtgaaacacacttcattcctggcacagcagagggcagcagtggcaagtcgtgagtctcttcatcttaccacctttcttccacttgtgtccttactgtcaacatgtaattt

SEQ ID NO: 2577 - DNA, 122 bp, Homo sapiens
  misc_feature (61)..(62): /note="This region represents a CpG dinucleotide"
  misc_feature (61)..(61): /note="Nucleotide may be methylated to form 5-methylcytosine"
acgaggaagaatattgttgggactttattcatagactcacagcagttccggtccctccgccggagccccgcctctccaccgtgaccccgcccccgaggcgaggagtttgcggcggcttcgag

SEQ ID NO: 2578 - DNA, 122 bp, Homo sapiens
  misc_feature (61)..(62): /note="This region represents a CpG dinucleotide"
  misc_feature (61)..(61): /note="Nucleotide may be methylated to form 5-methylcytosine"
ggcagtgctgggccagggctggctcacacaggcccacggatggctctcttcccaactccacgtccagtgacagcctgccggtcactgaaattggccacaataggagtatttacaccacagaa

SEQ ID NO: 2579 - DNA, 122 bp, Homo sapiens
  misc_feature (61)..(62): /note="This region represents a CpG dinucleotide"
  misc_feature (61)..(61): /note="Nucleotide may be methylated to form 5-methylcytosine"
tcctgttagcaaatgtttacctgtgccacacaccgtgttaagacttctataattgcctggcgcggtggttcacgcctgtaatcccagcactttgggaggctgaggcaggcagatcgcttgag

SEQ ID NO: 2580 - DNA, 122 bp, Homo sapiens
  misc_feature (61)..(62): /note="This region represents a CpG dinucleotide"
  misc_feature (61)..(61): /note="Nucleotide may be methylated to form 5-methylcytosine"
gaaatgccaggagctggatgtggtggcgtgtgggaggccaaggggagtgccattaaggagcggaaggagggagtgaataattcatcacagacatgcaccacggagtgggcacaggcagacaa

SEQ ID NO: 2581 - DNA, 122 bp, Homo sapiens
  misc_feature (61)..(62): /note="This region represents a CpG dinucleotide"
  misc_feature (61)..(61): /note="Nucleotide may be methylated to form 5-methylcytosine"
atatggttgaggcttaatataataacaaaagacttactcctatcactcaagaagtttcaacggttttacagtctctctgccaggaacctgggacctagatcaaacatatattttttatttta

SEQ ID NO: 2582 - DNA, 122 bp, Homo sapiens
  misc_feature (61)..(62): /note="This region represents a CpG dinucleotide"
  misc_feature (61)..(61): /note="Nucleotide may be methylated to form 5-methylcytosine"
gagttccaggaactttccatgaatagtgtgagaagaatgtgaagttccttaatgctgccacgaggggatctagtatgaaaactagtccagcatctgcaggaagacagagctacaagaatcag

SEQ ID NO: 2583 - DNA, 122 bp, Homo sapiens
  misc_feature (61)..(62): /note="This region represents a CpG dinucleotide"
  misc_feature (61)..(61): /note="Nucleotide may be methylated to form 5-methylcytosine"
tttcttagggccctccaggatacaggctccccattgtgccttgagaatgaagtccatttgcgctgaagagggaagagggaattttacatttgcttacattagaaggcactgtagccaatgag

SEQ ID NO: 2584 - DNA, 122 bp, Homo sapiens
  misc_feature (61)..(62): /note="This region represents a CpG dinucleotide"
  misc_feature (61)..(61): /note="Nucleotide may be methylated to form 5-methylcytosine"
gaggctgactttgggagagcgacctgttgaggctcacacattgaggcaaggcactaccaccgcccggtgctcttgcagctctgtcacggagcaccctgccagcacctctcatggacagtctc

SEQ ID NO: 2585 - DNA, 122 bp, Homo sapiens
  misc_feature (61)..(62): /note="This region represents a CpG dinucleotide"
  misc_feature (61)..(61): /note="Nucleotide may be methylated to form 5-methylcytosine"
gtgagcagcctgcggaggaagagcctctcagacagctaatgacaggttccttctccctggcgcggccacctcccctctccagcgggtggagatggagaacctgtcggccggcctcagggtga

SEQ ID NO: 2586 - DNA, 122 bp, Homo sapiens
  misc_feature (61)..(62): /note="This region represents a CpG dinucleotide"
  misc_feature (61)..(61): /note="Nucleotide may be methylated to form 5-methylcytosine"
gcactttccgtaaatcagttcaagtgcaccaactaatcacaagaaactaaattgagattacgtaaatcacaggtacacagtatcatgttactcaattatcttggcatcaagttgaaacaatg

SEQ ID NO: 2587 - DNA, 122 bp, Homo sapiens
  misc_feature (61)..(62): /note="This region represents a CpG dinucleotide"
  misc_feature (61)..(61): /note="Nucleotide may be methylated to form 5-methylcytosine"
aagcatattcagctgacaggaaattgcttgtattccactctgacagacaatgatttgcaacgttaagtaacaaagggcagtacaaatattgactgttcctgaatcactgatactgtaagcaa

SEQ ID NO: 2588 - DNA, 122 bp, Homo sapiens
  misc_feature (61)..(62): /note="This region represents a CpG dinucleotide"
  misc_feature (61)..(61): /note="Nucleotide may be methylated to form 5-methylcytosine"
ccaatcgtggtgacgggaagacccagcaaaggaaaagcagggtacgattagaatagagggcgtcagaaaggcagtaaaggcgtataccactgtgggacaccccaaaattgcaaggaaaaagc

SEQ ID NO: 2589 - DNA, 122 bp, Homo sapiens
  misc_feature (61)..(62): /note="This region represents a CpG dinucleotide"
  misc_feature (61)..(61): /note="Nucleotide may be methylated to form 5-methylcytosine"
tgttcctgctttgagacctgtgaattcttgtgggacagttccactgacagcttgcgttcccgaggtaccagtcctcagtgacctcgggaaccccaaccacttaggtcccaaagccacaaggg

SEQ ID NO: 2590 - DNA, 122 bp, Homo sapiens
  misc_feature (61)..(62): /note="This region represents a CpG dinucleotide"
  misc_feature (61)..(61): /note="Nucleotide may be methylated to form 5-methylcytosine"
ttttgaaaaacgctgagaagcataaagtttgagattgcctttttctgtttttggggggtgcggttggggaagaacctgaaatgtgagtatttagcatttctgatgagacattttattttata

SEQ ID NO: 2591 - DNA, 122 bp, Homo sapiens
  misc_feature (61)..(62): /note="This region represents a CpG dinucleotide"
  misc_feature (61)..(61): /note="Nucleotide may be methylated to form 5-methylcytosine"
ttgttaggcaatttcatcattgtgcaacctgcagagcacacttacacaaacctaagatggcgcagccccactatacacctaggctatatggtatagcctgttgctgctaggttacaaacctg

SEQ ID NO: 2592 - DNA, 122 bp, Homo sapiens
  misc_feature (61)..(62): /note="This region represents a CpG dinucleotide"
  misc_feature (61)..(61): /note="Nucleotide may be methylated to form 5-methylcytosine"
cagtcagtcacagtcctgtgtggccaaatggtttgcttttcaagggaagccggagattcgcgccatgtgaaatgtcccaatttttcaatcatcagaaattcattcaaaattttaaaaagtac

SEQ ID NO: 2593 - DNA, 122 bp, Homo sapiens
  misc_feature (61)..(62): /note="This region represents a CpG dinucleotide"
  misc_feature (61)..(61): /note="Nucleotide may be methylated to form 5-methylcytosine"
aagttctggaggaagtggcacagtggcaccagttgcttaagagatccactggaggccagacgcagtgactcacacctgtaatgccagcactttttaaggccgaggtgggcagatcacctgag

SEQ ID NO: 2594 - DNA, 122 bp, Homo sapiens
  misc_feature (61)..(62): /note="This region represents a CpG dinucleotide"
  misc_feature (61)..(61): /note="Nucleotide may be methylated to form 5-methylcytosine"
gcgtgtaaagaggactccctccatcacttccttgggtgagagatggggcttccctgaacacgtgatctcacccacactccccacacacaccacaccctgtggctgcttctcttcaaatctcc

SEQ ID NO: 2595 - DNA, 122 bp, Homo sapiens
  misc_feature (61)..(62): /note="This region represents a CpG dinucleotide"
  misc_feature (61)..(61): /note="Nucleotide may be methylated to form 5-methylcytosine"
caggctttgttcatccagagggcaccgagcagcttctgagacccaccctgtgtcactggccgggctgcatatcccagtctgatgcacagacccacgattttttgtttgtttattttctgaga

SEQ ID NO: 2596 - DNA, 122 bp, Homo sapiens
  misc_feature (61)..(62): /note="This region represents a CpG dinucleotide"
  misc_feature (61)..(61): /note="Nucleotide may be methylated to form 5-methylcytosine"
ggcggaggccagcgccagtgtcctgtggtgaccacagcagcctgctggcatctttgcccccgccgtgccacgtcatctgggctcactgtgcgttttctggctcaggcctgaggcagccacgt

SEQ ID NO: 2597 - DNA, 122 bp, Homo sapiens
  misc_feature (61)..(62): /note="This region represents a CpG dinucleotide"
  misc_feature (61)..(61): /note="Nucleotide may be methylated to form 5-methylcytosine"
tttgataataatagatactgtttacccagtgcttgatgccaggcattgctacaaacactgcgtacacattattctatttaatcttcataacccagtgaggtaggtactgtcattactgtcct

SEQ ID NO: 2598 - DNA, 122 bp, Homo sapiens
  misc_feature (61)..(62): /note="This region represents a CpG dinucleotide"
  misc_feature (61)..(61): /note="Nucleotide may be methylated to form 5-methylcytosine"
gtgtgtggagaggtgattagggggtttgggccaccagatctacaccttcctccatccattcgcctccagcagccccagccccaggtctgggaatgcaggggatgggattcccagatcctctg

SEQ ID NO: 2599 - DNA, 122 bp, Homo sapiens
  misc_feature (61)..(62): /note="This region represents a CpG dinucleotide"
  misc_feature (61)..(61): /note="Nucleotide may be methylated to form 5-methylcytosine"
tgcagcgtggcaagaaccgggcagcacctggtgtcagcggctaattgtgttttaaggtggcgtgttagaccagcgcgcgaagggcaacccgagccaccgcacttgccttgcaggcgccgcgt

SEQ ID NO: 2600 - DNA, 122 bp, Homo sapiens
  misc_feature (61)..(62): /note="This region represents a CpG dinucleotide"
  misc_feature (61)..(61): /note="Nucleotide may be methylated to form 5-methylcytosine"
gaagcagaggttgcagtgagccaagctcgcatcattgcactcgagcctgagtaacaagagcgaaagagccaagctcgcatcattgcactcgagcctgggtaacaagagtgaaactccatctc

SEQ ID NO: 2601 - DNA, 122 bp, Homo sapiens
  misc_feature (61)..(62): /note="This region represents a CpG dinucleotide"
  misc_feature (61)..(61): /note="Nucleotide may be methylated to form 5-methylcytosine"
ggtcccaggggccctctgacatccgagaggcccgggctggggacccgctggccgggggagcgtctcctggaagtcccgtcccccaccgacctgcatggtttctgcgctcgggacttgcaggc

SEQ ID NO: 2602 - DNA, 122 bp, Homo sapiens
  misc_feature (61)..(62): /note="This region represents a CpG dinucleotide"
  misc_feature (61)..(61): /note="Nucleotide may be methylated to form 5-methylcytosine"
attatagaatggcatacaaacttgaaaatgcatgctattctaaaagcaatggattgctttcgaatatactacagtcactattcccttttactcattaaaaaaacaaaaaccaaaaacaaaca

SEQ ID NO: 2603 - DNA, 122 bp, Homo sapiens
  misc_feature (61)..(62): /note="This region represents a CpG dinucleotide"
  misc_feature (61)..(61): /note="Nucleotide may be methylated to form 5-methylcytosine"
agagtggggaaccgtttgacctattttctctaatgaggcctaggccatccttatcatgtgcggggatacgtggcacccaaacactatgatgctgggggtttgagagccttctgtagtctctc

SEQ ID NO: 2604 - DNA, 122 bp, Homo sapiens
  misc_feature (61)..(62): /note="This region represents a CpG dinucleotide"
  misc_feature (61)..(61): /note="Nucleotide may be methylated to form 5-methylcytosine"
ctctccaactgctgctcctaaatctcagaatatatggtgttgcttgcttctcctccgaaccgccccctcccctcagggtggggatagggcatggaaatggcctttggaagttaatgggattc

SEQ ID NO: 2605 - DNA, 122 bp, Homo sapiens
  misc_feature (61)..(62): /note="This region represents a CpG dinucleotide"
  misc_feature (61)..(61): /note="Nucleotide may be methylated to form 5-methylcytosine"
gcggcttcaaggcctgggccgagcgggggagccacagcgagggttccggagcctgcaaggcggagtcccgggctcagctcaccccaggcgcaggcctgagggctgggagggctccgggggct

SEQ ID NO: 2606 - DNA, 122 bp, Homo sapiens
  misc_feature (61)..(62): /note="This region represents a CpG dinucleotide"
  misc_feature (61)..(61): /note="Nucleotide may be methylated to form 5-methylcytosine"
ggattaaaccagaccgtgttgaaccgagcggacgctttggctaaagacccgaaaatgttgcggagccagtctcagctagacctgtgcaaagactctccctatgaattgaagaaaggtatgtc

SEQ ID NO: 2607 - DNA, 122 bp, Homo sapiens
  misc_feature (61)..(62): /note="This region represents a CpG dinucleotide"
  misc_feature (61)..(61): /note="Nucleotide may be methylated to form 5-methylcytosine"
ataactttccagaaaccagttcagccaagagattggatccaaagacaagctgcaaggtgtcggtaagtgagatgctaagagtggagtttagtgagtacagaccacgatttcctaacacctag

SEQ ID NO: 2608 - DNA, 122 bp, Homo sapiens
  misc_feature (61)..(62): /note="This region represents a CpG dinucleotide"
  misc_feature (61)..(61): /note="Nucleotide may be methylated to form 5-methylcytosine"
gagctgacaaatagaaaggcctgctgtcttaggaatacgtcatcagcataacatgcagagcggtggattacagagtggaggggagtggaatgatggtggcctgggagacggcgatgttccca

SEQ ID NO: 2609 - DNA, 122 bp, Homo sapiens
  misc_feature (61)..(62): /note="This region represents a CpG dinucleotide"
  misc_feature (61)..(61): /note="Nucleotide may be methylated to form 5-methylcytosine"
ttgcatggaggaatttggcccctaagattttggcttccccattggatcatcagtatggaacgcagtcagtatggaactcaaacaagaaagacagtgtatgaaaattagagttaccacggcaa

SEQ ID NO: 2610 - DNA, 122 bp, Homo sapiens
  misc_feature (61)..(62): /note="This region represents a CpG dinucleotide"
  misc_feature (61)..(61): /note="Nucleotide may be methylated to form 5-methylcytosine"
caccgtgtatatctgtcctttactgtctgttccttctccagctgctgctgcctggctggccgactgcgggagaagagcctctggtactcccgggaggccctcggtaaaagcgtgagcaccac

SEQ ID NO: 2611 - DNA, 122 bp, Homo sapiens
  misc_feature (61)..(62): /note="This region represents a CpG dinucleotide"
  misc_feature (61)..(61): /note="Nucleotide may be methylated to form 5-methylcytosine"
gtttgtgaacacagagaaacactaagagatcaaccgctcaggaacagagagaaggaaaaccgcagaaacagaactagctagacatgcaagacagagaggtgagggggcacaggcacagccca

SEQ ID NO: 2612 - DNA, 122 bp, Homo sapiens
  misc_feature (61)..(62): /note="This region represents a CpG dinucleotide"
  misc_feature (61)..(61): /note="Nucleotide may be methylated to form 5-methylcytosine"
cctgcaccccgggctgacctgccagagcctgaagtcaccagcttcccgtcactgctcaagcgaagtgggggtctgaattcacagcttcgccatcagctattgggggacccgcacgagtcatt

SEQ ID NO: 2613 - DNA, 122 bp, Homo sapiens
  misc_feature (61)..(62): /note="This region represents a CpG dinucleotide"
  misc_feature (61)..(61): /note="Nucleotide may be methylated to form 5-methylcytosine"
atgccagggtattatgcagtgctgccctggacaggatgtcggtttctgtgattccatctacgttcctggattcctactatgctgaagtgagcaaagagaaccttagaacctgtattggggct

SEQ ID NO: 2614 - DNA, 122 bp, Homo sapiens
  misc_feature (61)..(62): /note="This region represents a CpG dinucleotide"
  misc_feature (61)..(61): /note="Nucleotide may be methylated to form 5-methylcytosine"
tgacaagagaaatgggcaagagacagagatttaattgaataaaaactccaggctgtgacacgggtgggaagacacaaacgagtaattaacaacataatattttaaatgacagtgcaattaat

SEQ ID NO: 2615 - DNA, 122 bp, Homo sapiens
  misc_feature (61)..(62): /note="This region represents a CpG dinucleotide"
  misc_feature (61)..(61): /note="Nucleotide may be methylated to form 5-methylcytosine"
agaagctttaaaataaatcagcccttaaaaattcactttccggctgggtgcggtggctcacgcctgtaatcccagcactttgggaggccaaagcgggcggatcacttgagatcaggagttcg

SEQ ID NO: 2616 - DNA, 122 bp, Homo sapiens
  misc_feature (61)..(62): /note="This region represents a CpG dinucleotide"
  misc_feature (61)..(61): /note="Nucleotide may be methylated to form 5-methylcytosine"
gttgctccaattccgtttacttaaagtagaaagaagacaatccctgccccgatgggtctgcgctggcttgtaggaaggagagattttgctgagtatccaacactaaccgcaggagagagcag

SEQ ID NO: 2617 - DNA, 122 bp, Homo sapiens
  misc_feature (61)..(62): /note="This region represents a CpG dinucleotide"
  misc_feature (61)..(61): /note="Nucleotide may be methylated to form 5-methylcytosine"
cccaattaaaggtcaacatggctgctcaaaaatatttatttaaaaaggcagtcagctcagcgggctcccaagtgtgattacactaccacttcatagaattcaattaaacccgggacggggca

SEQ ID NO: 2618 - DNA, 122 bp, Homo sapiens
  misc_feature (61)..(62): /note="This region represents a CpG dinucleotide"
  misc_feature (61)..(61): /note="Nucleotide may be methylated to form 5-methylcytosine"
tgtgtcacctgccactcccctgccagtgtgcgaggcagcgtgaagctggggcctgctccccgcagcctctggagcgcatctcagaccttctgagacctatgttgctggccccccagaacccg

SEQ ID NO: 2619 - DNA, 122 bp, Homo sapiens
  misc_feature (61)..(62): /note="This region represents a CpG dinucleotide"
  misc_feature (61)..(61): /note="Nucleotide may be methylated to form 5-methylcytosine"
attcaaagctcttcactgtttcctctttagtttttcaacctcaaagtccataatcctcctcgtgaaccctccactctagccacccagtaaaattctcattgaccttttccaccctgtggctc

SEQ ID NO: 2620 - DNA, 122 bp, Homo sapiens
  misc_feature (61)..(62): /note="This region represents a CpG dinucleotide"
  misc_feature (61)..(61): /note="Nucleotide may be methylated to form 5-methylcytosine"
ggcccctgggctgggggagggagcaggagctttggaccccagccccccagctttggttcccgctgggaattcaggccctgtcaggctgtaggtcctctcgggagccctctgcctgccctact

SEQ ID NO: 2621 - DNA, 122 bp, Homo sapiens
  misc_feature (61)..(62): /note="This region represents a CpG dinucleotide"
  misc_feature (61)..(61): /note="Nucleotide may be methylated to form 5-methylcytosine"
tttttgataaggaagtggcttcttctgaagctatgactttacaaccacccttgcctaaggcgtaatgaatgatttgtgagtttgtactggatacttttaagttccaggaagacagaaaaata

SEQ ID NO: 2622 - DNA, 122 bp, Homo sapiens
  misc_feature (61)..(62): /note="This region represents a CpG dinucleotide"
  misc_feature (61)..(61): /note="Nucleotide may be methylated to form 5-methylcytosine"
acggctgtcccgcaggccctccgggttagagaccgtcgggggcgtgtcttgagctggggacgcgactcctcggcgggggtgcacctgagaggccgggaccagcgaggccgcgccccggtggc

SEQ ID NO: 2623 - DNA, 122 bp, Homo sapiens
  misc_feature (61)..(62): /note="This region represents a CpG dinucleotide"
  misc_feature (61)..(61): /note="Nucleotide may be methylated to form 5-methylcytosine"
ctcacattgggaaaaatctaggtagattaagatttttttttcactaaattttaccctacacgacacaaagtttatccagaatgaagataaaaatagagttaaaggaagaagaagaatggatt

SEQ ID NO: 2624 - DNA, 122 bp, Homo sapiens
  misc_feature (61)..(62): /note="This region represents a CpG dinucleotide"
  misc_feature (61)..(61): /note="Nucleotide may be methylated to form 5-methylcytosine"
gaaagaaagaaagaaagaaagaaagaaagaaaacaaagagaaaatattgactttatatctcgttgtctacctggcttgcgctgtctgacactggcctctaatttaatgcttgtctcactatc

SEQ ID NO: 2625 - DNA, 122 bp, Homo sapiens
  misc_feature (61)..(62): /note="This region represents a CpG dinucleotide"
  misc_feature (61)..(61): /note="Nucleotide may be methylated to form 5-methylcytosine"
taatggaatctttccatgttatcaagcaatgacaggatgggaacagatactagccaagtccgaaccttaactttcctcttggttttgactgtgaaggctgtggtggagtgagactgtgggtt

SEQ ID NO: 2626 - DNA, 122 bp, Homo sapiens
  misc_feature (61)..(62): /note="This region represents a CpG dinucleotide"
  misc_feature (61)..(61): /note="Nucleotide may be methylated to form 5-methylcytosine"
ttggggaccagatgagtccttgtatgacatctgatagtaagtatttattttattaacaaacgaggccacaaagaatgtgaccagttgaaaacagagtttggtttcttcatgtctctccttca

SEQ ID NO: 2627 - DNA, 122 bp, Homo sapiens
  misc_feature (61)..(62): /note="This region represents a CpG dinucleotide"
  misc_feature (61)..(61): /note="Nucleotide may be methylated to form 5-methylcytosine"
atcagcccccctccggagcacaggtgggccaggcaagccgcaggtcctggccgcagtggtcgcgccgcgggagtgggtcgtaggtgcaacaggcggcccggagcgcggtgtccctgttggga

SEQ ID NO: 2628 - DNA, 122 bp, Homo sapiens
  misc_feature (61)..(62): /note="This region represents a CpG dinucleotide"
  misc_feature (61)..(61): /note="Nucleotide may be methylated to form 5-methylcytosine"
tacaggtggcagcctcggagggtgattgtgaagggtccaggcggttcccgcgtgcagcctcgggacagggctgtgctggagccatcgagctggagagagagtgagcttcaccccagggcagc

SEQ ID NO: 2629 - DNA, 122 bp, Homo sapiens
  misc_feature (61)..(62): /note="This region represents a CpG dinucleotide"
  misc_feature (61)..(61): /note="Nucleotide may be methylated to form 5-methylcytosine"
ggaatcaaaggaatcctgatttctgacttgacagggtagaaggaggtgtgtgtgtgtgtgcgtgtgtgtgtgtatgtttatgtagggacagtgacacccaagagaggctaggaataggtttg

SEQ ID NO: 2630 - DNA, 122 bp, Homo sapiens
  misc_feature (61)..(62): /note="This region represents a CpG dinucleotide"
  misc_feature (61)..(61): /note="Nucleotide may be methylated to form 5-methylcytosine"
tgagggttaaatgcccacctacctatccagatgtgtgagtacatttataaatagctttgacgtggtttcagttttctgttttgacaacatagaaacagattgaaattcgtagtattttctcc

SEQ ID NO: 2631 - DNA, 122 bp, Homo sapiens
  misc_feature (61)..(62): /note="This region represents a CpG dinucleotide"
  misc_feature (61)..(61): /note="Nucleotide may be methylated to form 5-methylcytosine"
aagatttccatatttcctcagggtgcttccctggctttctgagctcagcgacttgtagttcgttaagcaacctgatctgcttttgatctcttctggctgtcagcagcttttcttgatgtagt

SEQ ID NO: 2632 - DNA, 122 bp, Homo sapiens
  misc_feature (61)..(62): /note="This region represents a CpG dinucleotide"
  misc_feature (61)..(61): /note="Nucleotide may be methylated to form 5-methylcytosine"
attgttttttttaatttaattgtccttttaaatatttaattcaaagacagggctgggggacggtcatggaggaggtttacaggatgactcaagaaatgtttcctgtctatcaaatggacagc

SEQ ID NO: 2633 - DNA, 122 bp, Homo sapiens
  misc_feature (61)..(62): /note="This region represents a CpG dinucleotide"
  misc_feature (61)..(61): /note="Nucleotide may be methylated to form 5-methylcytosine"
ctctattaattaaaacaaaaacaaaaacaaaaatgacagacatatgatctccgaaacaaacgaatcatgcaggtcaaccaggatgtggggagaactcaaaaaggtatataaacaataacaca

SEQ ID NO: 2634 - DNA, 122 bp, Homo sapiens
  misc_feature (61)..(62): /note="This region represents a CpG dinucleotide"
  misc_feature (61)..(61): /note="Nucleotide may be methylated to form 5-methylcytosine"
gcaagaagggaccaagtcccctgtgggaccggcagccttgggagggttccagcgaggccccggcctgcgccccagccagtcacagaggccccttcctgcccactggccagacacccagggtg

SEQ ID NO: 2635 - DNA, 122 bp, Homo sapiens
  misc_feature (61)..(62): /note="This region represents a CpG dinucleotide"
  misc_feature (61)..(61): /note="Nucleotide may be methylated to form 5-methylcytosine"
cagagaaaaagtgctgcagtcagcagttctcttaagacagggaaactgacacacagacagcgcaggcttggccagggccatgttgccaacaggcactaatggaaactcagctaccgcctgct

SEQ ID NO: 2636 - DNA, 122 bp, Homo sapiens
  misc_feature (61)..(62): /note="This region represents a CpG dinucleotide"
  misc_feature (61)..(61): /note="Nucleotide may be methylated to form 5-methylcytosine"
cttatctcctaggaccatagactttatcagacatgatgtcaccattcacgcaggcattgccgcaccactgcctgggaaaagacactgcatataaatcttcccacagtgcctttagggggcga

SEQ ID NO: 2637 - DNA, 122 bp, Homo sapiens
  misc_feature (61)..(62): /note="This region represents a CpG dinucleotide"
  misc_feature (61)..(61): /note="Nucleotide may be methylated to form 5-methylcytosine"
acggtggccgagaccgggcgggggcgggggcgctttgggagttaggatacgctttgtgcccgcttgctgcttttttcctgcaagctgcgcatcaattaaagtactcgggtttttgtttggtt

SEQ ID NO: 2638 - DNA, 122 bp, Homo sapiens
  misc_feature (61)..(62): /note="This region represents a CpG dinucleotide"
  misc_feature (61)..(61): /note="Nucleotide may be methylated to form 5-methylcytosine"
cggagcaagggtcttcagagcccgagatgcgcgacgcgcaggaagcaccagagagggtggcgggaagaaaaggcacctccatcactttgaaatgtcagaggcaagttgcggctgcgttgaaa

SEQ ID NO: 2639 - DNA, 122 bp, Homo sapiens
  misc_feature (61)..(62): /note="This region represents a CpG dinucleotide"
  misc_feature (61)..(61): /note="Nucleotide may be methylated to form 5-methylcytosine"
tgttggcccggctggtcttgaactggttgaactcctgacctcaggtgacccgcccatctccgcctccaaaagtgctgggattacaggcctgagccactgtgcctggatgcatggctaatttt

SEQ ID NO: 2640 - DNA, 122 bp, Homo sapiens
  misc_feature (61)..(62): /note="This region represents a CpG dinucleotide"
  misc_feature (61)..(61): /note="Nucleotide may be methylated to form 5-methylcytosine"
ttttaaataaggcctttaaaatagtatcagaactgcttctttttgtctgtctcctgaacccgtatttcccagacattgtcagtgcttttgtgcttgtgtttttgcccgagtggggtgcaggg

SEQ ID NO: 2641 - DNA, 122 bp, Homo sapiens
  misc_feature (61)..(62): /note="This region represents a CpG dinucleotide"
  misc_feature (61)..(61): /note="Nucleotide may be methylated to form 5-methylcytosine"
ggcttagggagctgagagcccagcgctaatgcctaagaaagtcgtgggtggattagaaatcgagggggattagggccagagctggtggctgatgcaggagcggagcccctccctctgaggaa

SEQ ID NO: 2642 - DNA, 122 bp, Homo sapiens
  misc_feature (61)..(62): /note="This region represents a CpG dinucleotide"
  misc_feature (61)..(61): /note="Nucleotide may be methylated to form 5-methylcytosine"
gaaagagctattggctttggtggtcctctctgttggtgtctgctttctaactcatccacgcgtgctgttttccttctcaacttccttctgcctattttctgtgggcgtgcttcactggatta

SEQ ID NO: 2643 - DNA, 122 bp, Homo sapiens
  misc_feature (61)..(62): /note="This region represents a CpG dinucleotide"
  misc_feature (61)..(61): /note="Nucleotide may be methylated to form 5-methylcytosine"
aatcattgtagtgagccttattgcaccctttccagactcattaaagatgttttaaactcacgtttttctcaacttttataaagttactcttcagaaaagatacttagagcccttaaaatttg

SEQ ID NO: 2644 - DNA, 122 bp, Homo sapiens
  misc_feature (61)..(62): /note="This region represents a CpG dinucleotide"
  misc_feature (61)..(61): /note="Nucleotide may be methylated to form 5-methylcytosine"
aggagggagaaagcaaacagatgtgggggttttgatgaactcaagaaggtgggtagtgtacgagccattaaataataggtaaaataggagtaagtagcagctagaacaggtgtttctggaag

SEQ ID NO: 2645 - DNA, 122 bp, Homo sapiens
  misc_feature (61)..(62): /note="This region represents a CpG dinucleotide"
  misc_feature (61)..(61): /note="Nucleotide may be methylated to form 5-methylcytosine"
ttagttcctcagcaattttatgtgctatgacaactgttatcacccttgacatgctaatcacgtgatgcaactgtgtttagtgatcagtccacgtttctgaatgttaaatagattgacaagac

SEQ ID NO: 2646 - DNA, 122 bp, Homo sapiens
  misc_feature (61)..(62): /note="This region represents a CpG dinucleotide"
  misc_feature (61)..(61): /note="Nucleotide may be methylated to form 5-methylcytosine"
ctcctgtcggggtcaggcgggctttctgtttgtccagttagaggacctgtctctccaggacgcaggtccagtggtggcaaccagtgctgctacccagtatcggcagggctttgtggggtgag

SEQ ID NO: 2647 - DNA, 122 bp, Homo sapiens
  misc_feature (61)..(62): /note="This region represents a CpG dinucleotide"
  misc_feature (61)..(61): /note="Nucleotide may be methylated to form 5-methylcytosine"
gcatcgtcacgtgctctgtctgcgccccgagtggcctcttctcctcctccacagacacctcggggaggggtcatccttcagacacgctgagcctaggctgcccgcccttccgcagccccgcc

SEQ ID NO: 2648 - DNA, 122 bp, Homo sapiens
  misc_feature (61)..(62): /note="This region represents a CpG dinucleotide"
  misc_feature (61)..(61): /note="Nucleotide may be methylated to form 5-methylcytosine"
ttgttttgggaaactgaatctcctaacgcgatggactcgctctttatctccagcattgcccgctgccttggtgtctgctttgtttattacacagtgatgctaactttcttttatttagtgtt

SEQ ID NO: 2649 - DNA, 122 bp, Homo sapiens
  misc_feature (61)..(62): /note="This region represents a CpG dinucleotide"
  misc_feature (61)..(61): /note="Nucleotide may be methylated to form 5-methylcytosine"
ttctgtggttttaggatatcgtgtggggacacttctgaggctgaactgtagacgcagctgcgggcgcctcttaagggccaaaagactcttttgtgcttctgcatggattgagattttggcaa

SEQ ID NO: 2650 - DNA, 122 bp, Homo sapiens
  misc_feature (61)..(62): /note="This region represents a CpG dinucleotide"
  misc_feature (61)..(61): /note="Nucleotide may be methylated to form 5-methylcytosine"
aaatgttcaagagcaaacactgaatgtttcccctttggacagtaatagtcacgtaaaccacgcagctgtagaatactatgtttttagacattcctggtagcagtgggggagggaagaaaaca

SEQ ID NO: 2651 - DNA, 122 bp, Homo sapiens
  misc_feature (61)..(62): /note="This region represents a CpG dinucleotide"
  misc_feature (61)..(61): /note="Nucleotide may be methylated to form 5-methylcytosine"
cacttctggctgttggtctcggggctaccggactagaatcctagcatgtgcctggtggtgcgcagccccggagggaggggcagggccgtgtgcaccgctccgcttccaaagccatgctggac

SEQ ID NO: 2652 - DNA, 122 bp, Homo sapiens
  misc_feature (61)..(62): /note="This region represents a CpG dinucleotide"
  misc_feature (61)..(61): /note="Nucleotide may be methylated to form 5-methylcytosine"
gcgacctcttgtccaaaagcaatacagccaagaaggggcaaggagggttttgaaaccagtcggccaggctctggggctcctaacaagcaaagcagcctggtttctaaaactatagcttctgg

SEQ ID NO: 2653 - DNA, 122 bp, Homo sapiens
  misc_feature (61)..(62): /note="This region represents a CpG dinucleotide"
  misc_feature (61)..(61): /note="Nucleotide may be methylated to form 5-methylcytosine"
cgtttaaaacaaatcaagaaacttttgggtaacattgcaattacatgaaattgataaccgcgaaaataattggaactcctgcttgcaagtgtcaacctaaaaaaagtgcttccttttgttat

SEQ ID NO: 2654 - DNA, 122 bp, Homo sapiens
  misc_feature (61)..(62): /note="This region represents a CpG dinucleotide"
  misc_feature (61)..(61): /note="Nucleotide may be methylated to form 5-methylcytosine"
ctctgttagtgacagaatttaaaatatttgttatttttttttgcctgggtaatgaagtaccgtgacccagatatgtactgtggctccttgtttattttctgacagagatggggtttgaggtg

SEQ ID NO: 2655 - DNA, 122 bp, Homo sapiens
  misc_feature (61)..(62): /note="This region represents a CpG dinucleotide"
  misc_feature (61)..(61): /note="Nucleotide may be methylated to form 5-methylcytosine"
tttcgtggcaaggagtgattctctccagtaggcaatcctaagaacgagcgcagtgcttggcgcacagtaaatgctccatggaccatttatgaaattaagtctaagtggacttcaggaaaatg

SEQ ID NO: 2656 - DNA, 122 bp, Homo sapiens
  misc_feature (61)..(62): /note="This region represents a CpG dinucleotide"
  misc_feature (61)..(61): /note="Nucleotide may be methylated to form 5-methylcytosine"
gcatagtccccacccaaacagcttttgatctatttctgcatttgaaaaacctcagaatggcgtttgctaaatccaaaagcctccaacttcagtattacacacacacacacaaaactcacaga

SEQ ID NO: 2657 - DNA, 122 bp, Homo sapiens
  misc_feature (61)..(62): /note="This region represents a CpG dinucleotide"
  misc_feature (61)..(61): /note="Nucleotide may be methylated to form 5-methylcytosine"
tgggactctggactgggagcgagggctgagactaaagtcgccacatcaggctgcttgttccgttcactcagcaaatatttatagctaatctaaccagtttcagatatcgttcaagaggtggg

SEQ ID NO: 2658 - DNA, 122 bp, Homo sapiens
  misc_feature (61)..(62): /note="This region represents a CpG dinucleotide"
  misc_feature (61)..(61): /note="Nucleotide may be methylated to form 5-methylcytosine"
accaccccagagccccagctttggagctccccaacgccacagccaggcacagtgcgaccccggcagcagagggggcacttggaccatttgttcatagtctgggacctccggtcccacgagag

SEQ ID NO: 2659 - DNA, 122 bp, Homo sapiens
  misc_feature (61)..(62): /note="This region represents a CpG dinucleotide"
  misc_feature (61)..(61): /note="Nucleotide may be methylated to form 5-methylcytosine"
cacacctaacgaatggaggcgggccggaggccggtggaaccagctcgagctctcgagggccgtttgggggctcgcgccgtacggcttgtgaagtctcgcgcctctccccttagtccgcctct

SEQ ID NO: 2660 - DNA, 122 bp, Homo sapiens
  misc_feature (61)..(62): /note="This region represents a CpG dinucleotide"
  misc_feature (61)..(61): /note="Nucleotide may be methylated to form 5-methylcytosine"
acataaggaaaagtcctaaaactatgggattgttagaatcacaaggcccttttgttctggcgatgtttgaattagcttcttcaggggccattgaactagtcggtaattgtgaaagccacttt

SEQ ID NO: 2661 - DNA, 122 bp, Homo sapiens
  misc_feature (61)..(62): /note="This region represents a CpG dinucleotide"
  misc_feature (61)..(61): /note="Nucleotide may be methylated to form 5-methylcytosine"
cctcactctccttgattatacttctacacaatgacttgattatattaggttggtgaaaaacgaattgcggttttgccactaaaagtaatggcaaattagaagtaatggcaatgccattaaaa

SEQ ID NO: 2662 - DNA, 122 bp, Homo sapiens
  misc_feature (61)..(62): /note="This region represents a CpG dinucleotide"
  misc_feature (61)..(61): /note="Nucleotide may be methylated to form 5-methylcytosine"
tctatgaggcgctttcgtggcaaggagtgattctctccagtaggcaatcctaagaacgagcgcagtgcttggcgcacagtaaatgctccatggaccatttatgaaattaagtctaagtggac

SEQ ID NO: 2663 - DNA, 122 bp, Homo sapiens
  misc_feature (61)..(62): /note="This region represents a CpG dinucleotide"
  misc_feature (61)..(61): /note="Nucleotide may be methylated to form 5-methylcytosine"
actctcagcttagttcttcaggtggttttgtaatcactgggcacttcccttccccatccacggacaggtctcccacagtgtgcagcactgagtgatctgtgaatgaattaaatcgatatccc

SEQ ID NO: 2664 - DNA, 122 bp, Homo sapiens
  misc_feature (61)..(62): /note="This region represents a CpG dinucleotide"
  misc_feature (61)..(61): /note="Nucleotide may be methylated to form 5-methylcytosine"
ctccacgtggtaggtggtgccgggcctgaggtcgggcaggctgacggtgcgcgtggtgcccggcacagtcagctcaccgccggggccctctgcaggcggctgaggccgccagcgcagcacca

SEQ ID NO: 2665 - DNA, 122 bp, Homo sapiens
  misc_feature (61)..(62): /note="This region represents a CpG dinucleotide"
  misc_feature (61)..(61): /note="Nucleotide may be methylated to form 5-methylcytosine"
caaccacctgtggccctggagcagctggcaggcagagtcatgccagaccaaatagggcctcgctcatggaacaggccagagcagggctgggtggggaaggtgacttggcagttgagtttgaa

SEQ ID NO: 2666 - DNA, 122 bp, Homo sapiens
  misc_feature (61)..(62): /note="This region represents a CpG dinucleotide"
  misc_feature (61)..(61): /note="Nucleotide may be methylated to form 5-methylcytosine"
caccgcgattcaaactgcccattcttatcttttttgattgtagctgttaagccgatagctcgcggtagggaaggatgggccttctctacaagccgagaaggctcagggagcttcagtcaata

SEQ ID NO: 2667 - DNA, 122 bp, Homo sapiens
  misc_feature (61)..(62): /note="This region represents a CpG dinucleotide"
  misc_feature (61)..(61): /note="Nucleotide may be methylated to form 5-methylcytosine"
tgggacgttttgtcattttttatgaacttgcccatatcccactctttggtaccagcaattcggcacccaggttttcccaagagacacgaaaacagatgccctcaaaatctcttgtgagaaga

SEQ ID NO: 2668 - DNA, 122 bp, Homo sapiens
  misc_feature (61)..(62): /note="This region represents a CpG dinucleotide"
  misc_feature (61)..(61): /note="Nucleotide may be methylated to form 5-methylcytosine"
gagagcctcccaggttcccccactcatagcttgtctccccggtctccaacaccaagctaccgctccacccctgacttcccatctggtgagtgagtctcctggtctaaacagcagaggggagg

SEQ ID NO: 2669 - DNA, 122 bp, Homo sapiens
  misc_feature (61)..(62): /note="This region represents a CpG dinucleotide"
  misc_feature (61)..(61): /note="Nucleotide may be methylated to form 5-methylcytosine"
tgttgaagattttagtgaaatcgagtgaaagctgtactaataaggacagaaattatcacacgtgaaaggagagatgggatgtatacaaattttaaatatggtaggcaaaggaaaagaagtca

SEQ ID NO: 2670 - DNA, 122 bp, Homo sapiens
  misc_feature (61)..(62): /note="This region represents a CpG dinucleotide"
  misc_feature (61)..(61): /note="Nucleotide may be methylated to form 5-methylcytosine"
tgaactcctgaccttaggtgatccatctgcttcggcctcccaaagtgctgggattataggcgtgcagcctaattttgtatttgttgtagagatggggttttaccgtgttgcccaggctggtc

SEQ ID NO: 2671 - DNA, 122 bp, Homo sapiens
  misc_feature (61)..(62): /note="This region represents a CpG dinucleotide"
  misc_feature (61)..(61): /note="Nucleotide may be methylated to form 5-methylcytosine"
tgttgttaagcaagagaagataagagtgggctgatgcttaaagaactcccatttcctgaacgctgacttttttgaatgtctgaggggctaagcaagtctcttgattctgcctgtatgaaagc

SEQ ID NO: 2672 - DNA, 122 bp, Homo sapiens
  misc_feature (61)..(62): /note="This region represents a CpG dinucleotide"
  misc_feature (61)..(61): /note="Nucleotide may be methylated to form 5-methylcytosine"
ttatttattcagcaagtactgagtgctgtcctaggggctggggaaacacaggagaacaaacgagaagtccatgctcttaagcagtttacattctagtggggaaggaagacaaacaaagtaaa

SEQ ID NO: 2673 - DNA, 122 bp, Homo sapiens
  misc_feature (61)..(62): /note="This region represents a CpG dinucleotide"
  misc_feature (61)..(61): /note="Nucleotide may be methylated to form 5-methylcytosine"
tactaatgtcagaacatttcactacccctaaaagaaaccccataccacagattccgatgccgccgggagccctgccatgccatgtcacatatattatagtatatctatgcccagccatggtc

SEQ ID NO: 2674 - DNA, 122 bp, Homo sapiens
  misc_feature (61)..(62): /note="This region represents a CpG dinucleotide"
  misc_feature (61)..(61): /note="Nucleotide may be methylated to form 5-methylcytosine"
tacccaaccagtgactaatactatgatcaggtctgtcagcctgagcctctaacccaagctcgctgagatggtggtatctgttctttagctgcttaactaatgaggaagcaaagttgctgaag

SEQ ID NO: 2675 - DNA, 122 bp, Homo sapiens
  misc_feature (61)..(62): /note="This region represents a CpG dinucleotide"
  misc_feature (61)..(61): /note="Nucleotide may be methylated to form 5-methylcytosine"
gctctcaggaaagcaagagagtggctgtggctggtcagaggcaaaaggaggagatgttggcgccattcactctcgccagcaggaaactgggactagcccatggccccagggaaaattcttaa

SEQ ID NO: 2676 - DNA, 122 bp, Homo sapiens
  misc_feature (61)..(62): /note="This region represents a CpG dinucleotide"
  misc_feature (61)..(61): /note="Nucleotide may be methylated to form 5-methylcytosine"
atccaagttcttcttcctgtggacagggaacccaggctgcgaactgggaggatgtggcctcgtggggggcagggccagcgtgctgtgatggggatggggctgggcaggttggggctgcctgc

SEQ ID NO: 2677 - DNA, 122 bp, Homo sapiens
  misc_feature (61)..(62): /note="This region represents a CpG dinucleotide"
  misc_feature (61)..(61): /note="Nucleotide may be methylated to form 5-methylcytosine"
caagaaagtcaagaaacagagagtaatagactcatggaactgatgatctaatggatacctcggataagagaggcctctaggttgctgaccttggcaattgagtgaatgacagtgacctcaga

SEQ ID NO: 2678 - DNA, 122 bp, Homo sapiens
  misc_feature (61)..(62): /note="This region represents a CpG dinucleotide"
  misc_feature (61)..(61): /note="Nucleotide may be methylated to form 5-methylcytosine"
cgggatcccctggtccccttcctcaaatgagatgtctctggcataggttccatctactcccgttcaaaggcaataattcactagtggagccatttggacacatggctactttacaatcactt

SEQ ID NO: 2679 - DNA, 122 bp, Homo sapiens
  misc_feature (61)..(62): /note="This region represents a CpG dinucleotide"
  misc_feature (61)..(61): /note="Nucleotide may be methylated to form 5-methylcytosine"
tgaaatggttacatctttaagtgggactttcccagctgcacttctgatcccagggcctgacgatttgtactgtcccccaacacaccttccccatcttccttagctgagtgaagtgttaaaaa

SEQ ID NO: 2680 - DNA, 122 bp, Homo sapiens
  misc_feature (61)..(62): /note="This region represents a CpG dinucleotide"
  misc_feature (61)..(61): /note="Nucleotide may be methylated to form 5-methylcytosine"
cctggcagggcactgccagccattccccacgtacgtgcaccgtgtatctgggcatggctccgctgcagcctgaggtcctcagctggtcacaggaggggagagctttatgcaggagtggctac

SEQ ID NO: 2681 - DNA, 122 bp, Homo sapiens
  misc_feature (61)..(62): /note="This region represents a CpG dinucleotide"
  misc_feature (61)..(61): /note="Nucleotide may be methylated to form 5-methylcytosine"
cctccctctggctgtgaagatggaagcccatgggttggatgcctcgggccagggctgtcacgcaaggaagcctggggaggactgtggcactgaccccatgggccatggtatcgcctcagggc

SEQ ID NO: 2682 - DNA, 122 bp, Homo sapiens
  misc_feature (61)..(62): /note="This region represents a CpG dinucleotide"
  misc_feature (61)..(61): /note="Nucleotide may be methylated to form 5-methylcytosine"
aaagttccatgctttaatcttcctcttccagtaaagaaacagcctgaagtggcctgtctgcgagtcacagtgttaactcagatccacaggaagatgttcaccggatgctccttggccaggct

SEQ ID NO: 2683 - DNA, 122 bp, Homo sapiens
  misc_feature (61)..(62): /note="This region represents a CpG dinucleotide"
  misc_feature (61)..(61): /note="Nucleotide may be methylated to form 5-methylcytosine"
gttttgttttagcttgctaagtacagaattggaggatacgatgggataaacaactgaatacgtgacaacagtttgttgactcagacagaaagccatcagatggcaagggttgaccgttgaag

SEQ ID NO: 2684 - DNA, 122 bp, Homo sapiens
  misc_feature (61)..(62): /note="This region represents a CpG dinucleotide"
  misc_feature (61)..(61): /note="Nucleotide may be methylated to form 5-methylcytosine"
ggcaaaacctttgctagcaaagcgccttttgtgccgggctgtggctcgctatcgacatctcgtccgttaccaaggctgggtttcctactgatttccctcctcctctgctttcacaggctcgc

SEQ ID NO: 2685 - DNA, 122 bp, Homo sapiens
  misc_feature (61)..(62): /note="This region represents a CpG dinucleotide"
  misc_feature (61)..(61): /note="Nucleotide may be methylated to form 5-methylcytosine"
gggcagggcggcgaactggaggaagagggtggacgttggtgagaaccgcagtttcagccacgccagtgcagcgaaggcccccgatcaaaaagacagatttgttactagatgattcatcggtg

SEQ ID NO: 2686 - DNA, 122 bp, Homo sapiens
  misc_feature (61)..(62): /note="This region represents a CpG dinucleotide"
  misc_feature (61)..(61): /note="Nucleotide may be methylated to form 5-methylcytosine"
cggtgccattgtcagcagcagaggacgcagacctgggcagggtctcctccctgagaagcccgccctccgcgcccgcacctcccctctgtctgccgcgccccttccccgccgagcccatctgc

SEQ ID NO: 2687 - DNA, 122 bp, Homo sapiens
  misc_feature (61)..(62): /note="This region represents a CpG dinucleotide"
  misc_feature (61)..(61): /note="Nucleotide may be methylated to form 5-methylcytosine"
gaagctcttaggctgctgtgcaacttccatttatcttctcaaacttcctggaacattggccgctgatgtaccttatctatctattgatggcccagaagtcatataaacactgtctatcaatg

SEQ ID NO: 2688 - DNA, 122 bp, Homo sapiens
  misc_feature (61)..(62): /note="This region represents a CpG dinucleotide"
  misc_feature (61)..(61): /note="Nucleotide may be methylated to form 5-methylcytosine"
tcttccggctcaattacacttcaaggtcaatgatgctataaaataagctaaaaatagcttcgtaggcataggagatcatccaaaaggtgtgtggatttcaaaccaacccaaagagaaggtaa

SEQ ID NO: 2689 - DNA, 122 bp, Homo sapiens
  misc_feature (61)..(62): /note="This region represents a CpG dinucleotide"
  misc_feature (61)..(61): /note="Nucleotide may be methylated to form 5-methylcytosine"
aagagtagtttatgtacctagctcacaacatagcttctttcaacaggtttcacggagacacgtgaaccacgttcttgtaagacaagagctattctacagggtatctagagtgcaaacccaaa

SEQ ID NO: 2690 - DNA, 122 bp, Homo sapiens
  misc_feature (61)..(62): /note="This region represents a CpG dinucleotide"
  misc_feature (61)..(61): /note="Nucleotide may be methylated to form 5-methylcytosine"
atctgcccgcctcagcctcccaaagtgctgggattacaggcatgagccaccgcacctcgccgggtaatgattcttgagacaagaggtggttaagtagcattattatgtaatgtttatatacc

SEQ ID NO: 2691 - DNA, 122 bp, Homo sapiens
  misc_feature (61)..(62): /note="This region represents a CpG dinucleotide"
  misc_feature (61)..(61): /note="Nucleotide may be methylated to form 5-methylcytosine"
ccagatagagcacagtaaaaaacagttctctaaacctatgctgtccaatatggcaacacacgagtggctagtggcttcagtattggacagaacagccccagatcatttctattatagcagaa

SEQ ID NO: 2692 - DNA, 122 bp, Homo sapiens
  misc_feature (61)..(62): /note="This region represents a CpG dinucleotide"
  misc_feature (61)..(61): /note="Nucleotide may be methylated to form 5-methylcytosine"
tgttccattttaacaagcacagaactataaaagaagatgctccttacaaaacagcaaggacgcccaaggagtgttcttgtacatccagagccccgagcacagtgtccagatgggataagttc

SEQ ID NO: 2693 - DNA, 122 bp, Homo sapiens
  misc_feature (61)..(62): /note="This region represents a CpG dinucleotide"
  misc_feature (61)..(61): /note="Nucleotide may be methylated to form 5-methylcytosine"
atagagttgtccaggttcttggcctgttgaacaaaaaattgaacgaaatgcacggagtaacgaaagaaagaagcaaggaaaaacaaagcaacagaagggaggaaggaaaacgtagatttata

SEQ ID NO: 2694 - DNA, 122 bp, Homo sapiens
  misc_feature (61)..(62): /note="This region represents a CpG dinucleotide"
  misc_feature (61)..(61): /note="Nucleotide may be methylated to form 5-methylcytosine"
tagcagtggtgagttagggaaggagcagaataaaagatattctacctagcaatggggacccgctgtagtagtaagaaactaagtaccttaagggactggggagttttcttaaacctctctgg

SEQ ID NO: 2695 - DNA, 122 bp, Homo sapiens
  misc_feature (61)..(62): /note="This region represents a CpG dinucleotide"
  misc_feature (61)..(61): /note="Nucleotide may be methylated to form 5-methylcytosine"
cgccggcgggccgcgcgccccgagacggaggaggccggagactcccgccacgccaccccgcgcccatctcacctgccgcctcacctgcccggtcctggcctccaaccggcgggcgggggcgc

SEQ ID NO: 2696 - DNA, 122 bp, Homo sapiens
  misc_feature (61)..(62): /note="This region represents a CpG dinucleotide"
  misc_feature (61)..(61): /note="Nucleotide may be methylated to form 5-methylcytosine"
caacttcctgtcggtcatatcctgtttggctatgtcttagtcacagtggaaaacaaaagccggggcaacaggatgaaggaggttagaggagctgattagaaaaggaacctgccatgaaatta

SEQ ID NO: 2697 - DNA, 122 bp, Homo sapiens
  misc_feature (61)..(62): /note="This region represents a CpG dinucleotide"
  misc_feature (61)..(61): /note="Nucleotide may be methylated to form 5-methylcytosine"
ctgtctcataggatcttcttcctgtcacaggctgtagcaaggtgctgctgaggccacggacgtcggaggaggtgtcccacatcctcaggtgaggtggtggctcccggctcccccagccttcc

SEQ ID NO: 2698 - DNA, 122 bp, Homo sapiens
  misc_feature (61)..(62): /note="This region represents a CpG dinucleotide"
  misc_feature (61)..(61): /note="Nucleotide may be methylated to form 5-methylcytosine"
cacctgtagtcccagttacttaggaggctgaggtgggaggatcacttgagcccaggagttcgaggctgcagggagttatatcatgctactacactccagcctgggcactacagcaaggccct

SEQ ID NO: 2699 - DNA, 122 bp, Homo sapiens
  misc_feature (61)..(62): /note="This region represents a CpG dinucleotide"
  misc_feature (61)..(61): /note="Nucleotide may be methylated to form 5-methylcytosine"
attttaagagagaaaatgtgtcctattagctataaataaaatcactctcctaactctctccggagagaatgagaaagaaaagctggagtcataaaagagtgttctttccctgtgactgtgga

SEQ ID NO: 2700 - DNA, 122 bp, Homo sapiens
  misc_feature (61)..(62): /note="This region represents a CpG dinucleotide"
  misc_feature (61)..(61): /note="Nucleotide may be methylated to form 5-methylcytosine"
tggtctgtaacggattggcttggccttacccacgaggctttgcggtggctgttggcttggcggtggtcgcttggcttggcgtggcagtgatcgcttggcttggcatttctggcttggcggtc

SEQ ID NO: 2701 - DNA, 122 bp, Homo sapiens
  misc_feature (61)..(62): /note="This region represents a CpG dinucleotide"
  misc_feature (61)..(61): /note="Nucleotide may be methylated to form 5-methylcytosine"
aagaggatgatgcttggaagctgccttctcttgtttgcatatgttttacagtgtcctaaccgctttggagagcgataacttgagttaaagcacctgtctgtgcctggcctccagcagatctt

SEQ ID NO: 2702 - DNA, 122 bp, Homo sapiens
  misc_feature (61)..(62): /note="This region represents a CpG dinucleotide"
  misc_feature (61)..(61): /note="Nucleotide may be methylated to form 5-methylcytosine"
tgaccaagtgggctggaaccccgaaaaccctcaggtgactgaggctgggttaacaagagccgaagggcaggaagtcccatactcagtactgctcagtcctggcaggttcccacaaaacatgc

SEQ ID NO: 2703 - DNA, 122 bp, Homo sapiens
  misc_feature (61)..(62): /note="This region represents a CpG dinucleotide"
  misc_feature (61)..(61): /note="Nucleotide may be methylated to form 5-methylcytosine"
cagcccgggagccgggggcgtggggaggctgcgctttgctggcttccaggaagacgcacacgctgtgtgtggccagagaccggggcacctctttgttggcggccccattgacttaggggcga

SEQ ID NO: 2704 - DNA, 122 bp, Homo sapiens
  misc_feature (61)..(62): /note="This region represents a CpG dinucleotide"
  misc_feature (61)..(61): /note="Nucleotide may be methylated to form 5-methylcytosine"
cggagctgctgtggtcgcaaatagccttgtgcccctgggaacctgtgagatgcaatatgtcgtcagtctccctcaatcttggcctgagtccaagagaaaggcagctgctctgaggttcgaga

SEQ ID NO: 2705 - DNA, 122 bp, Homo sapiens
  misc_feature (61)..(62): /note="This region represents a CpG dinucleotide"
  misc_feature (61)..(61): /note="Nucleotide may be methylated to form 5-methylcytosine"
aataatttctgaaagactgataaattatttctttttttaggaagattccaaatttggcctcgaagggaaatcaggtcatctttaatagagccacaaatctatagagcagaagctcccccagg

SEQ ID NO: 2706 - DNA, 122 bp, Homo sapiens
  misc_feature (61)..(62): /note="This region represents a CpG dinucleotide"
  misc_feature (61)..(61): /note="Nucleotide may be methylated to form 5-methylcytosine"
gggtacccatgctgccccgcaggcctcccttcaatctgtgcttgcacaattctagatgggcgttctccagcggggtctggtggtgtgcactctgctgctccatttgctgtccagttgtttgc

SEQ ID NO: 2707 - DNA, 122 bp, Homo sapiens
  misc_feature (61)..(62): /note="This region represents a CpG dinucleotide"
  misc_feature (61)..(61): /note="Nucleotide may be methylated to form 5-methylcytosine"
atggaggcgggccggaggccggtggaaccagctcgagctctcgagggccgtttgggggctcgcgccgtacggcttgtgaagtctcgcgcctctccccttagtccgcctctgctgctcaggct

SEQ ID NO: 2708 - DNA, 122 bp, Homo sapiens
  misc_feature (61)..(62): /note="This region represents a CpG dinucleotide"
  misc_feature (61)..(61): /note="Nucleotide may be methylated to form 5-methylcytosine"
caatctaggatatgcagcctatgatgcatcataggtatacccctggggtaggaacttcttcgtctcatgtaaagatgactatgtaagcagccttgaaaaaaggtgcataggtcactgaaact

SEQ ID NO: 2709 - DNA, 122 bp, Homo sapiens
  misc_feature (61)..(62): /note="This region represents a CpG dinucleotide"
  misc_feature (61)..(61): /note="Nucleotide may be methylated to form 5-methylcytosine"
atgagggtctctctcgcaacagaaacttccactgttacttcatttgagttctccagggagcgcgtgcacaacctcggtaaacacactgcgctccctcccaagggcttgcaggccaccctcag

SEQ ID NO: 2710 - DNA, 122 bp, Homo sapiens
  misc_feature (61)..(62): /note="This region represents a CpG dinucleotide"
  misc_feature (61)..(61): /note="Nucleotide may be methylated to form 5-methylcytosine"
taaatggagtaacacataaggcacataagactctcagggacgtagtaaaatgcactatcacgtaacacgcaatgtcaattgaaaccctatccaatttaatgcagatatgtcagtgctgtcca

SEQ ID NO: 2711 - DNA, 122 bp, Homo sapiens
  misc_feature (61)..(62): /note="This region represents a CpG dinucleotide"
  misc_feature (61)..(61): /note="Nucleotide may be methylated to form 5-methylcytosine"
gatagacacaaagcagagatttaaaataagccataccatttcaaatcatggagattctgacgtggtttgaacaaccacaatctagccaatcatgacttgataaaagaaagtttttgaatttc

SEQ ID NO: 2712 - DNA, 122 bp, Homo sapiens
  misc_feature (61)..(62): /note="This region represents a CpG dinucleotide"
  misc_feature (61)..(61): /note="Nucleotide may be methylated to form 5-methylcytosine"
aaaaggaaaagtcacacagctggtgagaaactaatgatgtcagcatgtaaaattatagtgcgtaaaatgtttggataggatgcagtatgagaaattgaaggctttgctctcaaacagagtaa

SEQ ID NO: 2713 - DNA, 122 bp, Homo sapiens
  misc_feature (61)..(62): /note="This region represents a CpG dinucleotide"
  misc_feature (61)..(61): /note="Nucleotide may be methylated to form 5-methylcytosine"
cgtggcctccccgaagaagaaccgatgcactggggctcctggcgtctgcggggtccataacgcctccctagggaggagagggaggagctaggagatgcagggagtgcagaaaccttggagaa

SEQ ID NO: 2714 - DNA, 122 bp, Homo sapiens
  misc_feature (61)..(62): /note="This region represents a CpG dinucleotide"
  misc_feature (61)..(61): /note="Nucleotide may be methylated to form 5-methylcytosine"
gaaggaaaaccaaacagaggcagaacttgttctgtctggctactggccagctaatccaaacgataaaagaggctgtctatggatttgatagactgatagtaaatcatggaatgcttattaag

SEQ ID NO: 2715 - DNA, 122 bp, Homo sapiens
  misc_feature (61)..(62): /note="This region represents a CpG dinucleotide"
  misc_feature (61)..(61): /note="Nucleotide may be methylated to form 5-methylcytosine"
ttcaggatagtaagtcaccgcagttccctggcagttctagaggtgccgtcagggagctagcgattagagtcgaaagacttagaaagccacctggtgttctattgtactgtggctgggctgaa

SEQ ID NO: 2716 - DNA, 122 bp, Homo sapiens
  misc_feature (61)..(62): /note="This region represents a CpG dinucleotide"
  misc_feature (61)..(61): /note="Nucleotide may be methylated to form 5-methylcytosine"
ttaataccattaacagccatacatctcacaattacataaaaattcatcgttggggccgggcgcggtgactcacgcctgtaatcccagcactttggaaggccgaggcgggcgaatcacaaggt

SEQ ID NO: 2717 - DNA, 122 bp, Homo sapiens
  misc_feature (61)..(62): /note="This region represents a CpG dinucleotide"
  misc_feature (61)..(61): /note="Nucleotide may be methylated to form 5-methylcytosine"
aatcacctatacccactttctatgaatctgcagtttctgcaattcttttatttcttcccacgtatgcttgttctaagaataaccgctgaaatgtaattttacatttgttgtatttaataaac

SEQ ID NO: 2718 - DNA, 122 bp, Homo sapiens
  misc_feature (61)..(62): /note="This region represents a CpG dinucleotide"
  misc_feature (61)..(61): /note="Nucleotide may be methylated to form 5-methylcytosine"
gctatatgctatagcctgttgctcccaggctacaaactgttcggcatgttactgtcctgacgactataggcaatggcaacactgtggggagtatttgtgtatctaaacatttttaaccaaga

SEQ ID NO: 2719 - DNA, 122 bp, Homo sapiens
  misc_feature (61)..(62): /note="This region represents a CpG dinucleotide"
  misc_feature (61)..(61): /note="Nucleotide may be methylated to form 5-methylcytosine"
tggggctttaggtcagggaagagctgaaagaaagcccctttcccttcccctgaagattgtcggaggcagcttaccactgcagcaggaactgaaacctttagctttagggctccagttatcac

SEQ ID NO: 2720 - DNA, 122 bp, Homo sapiens
  misc_feature (61)..(62): /note="This region represents a CpG dinucleotide"
  misc_feature (61)..(61): /note="Nucleotide may be methylated to form 5-methylcytosine"
tcttgtccagattctgctatttacaactggggaggaaaataaaatataaaagtttgtctacgtttagaagagcagacataagtaaagaaaacagtgaagaaacagacaggctagcttagcag

SEQ ID NO: 2721 - DNA, 122 bp, Homo sapiens
  misc_feature (61)..(62): /note="This region represents a CpG dinucleotide"
  misc_feature (61)..(61): /note="Nucleotide may be methylated to form 5-methylcytosine"
tcactgtgtgatgttcttagaaaaactctctataaatcctctcagaaaaccccatggaatcgctagacatcgatctgccacaaatgggaaaatcacattcccaggccgtaacactatggcag

SEQ ID NO: 2722 - DNA, 122 bp, Homo sapiens
  misc_feature (61)..(62): /note="This region represents a CpG dinucleotide"
  misc_feature (61)..(61): /note="Nucleotide may be methylated to form 5-methylcytosine"
gcccctctgtttttcagcaaacacccctggaggatgagctgcaattgggcaagcacagaacgtttgatcttcttagaaaggctctctattgtttgcttcaaaaatgacccaaggctgccagt

SEQ ID NO: 2723 - DNA, 122 bp, Homo sapiens
  misc_feature (61)..(62): /note="This region represents a CpG dinucleotide"
  misc_feature (61)..(61): /note="Nucleotide may be methylated to form 5-methylcytosine"
ttcacagcagaaggcgccattggtccgcttcctctcgcagcaattaattacacagagcggcgtgttttgacgcggaccacagcaaacgcgtcaggtcacgggcatttacgcgtatctgagag

SEQ ID NO: 2724 - DNA, 122 bp, Homo sapiens
  misc_feature (61)..(62): /note="This region represents a CpG dinucleotide"
  misc_feature (61)..(61): /note="Nucleotide may be methylated to form 5-methylcytosine"
caaaagaatcgcgcacagaagtatcccggtatcacacacactacacacccagacgcaccacggcacctttctaggacacttggaagcgctcaaaccaaagaacacacactttcaaggacacg

SEQ ID NO: 2725 - DNA, 122 bp, Homo sapiens
  misc_feature (61)..(62): /note="This region represents a CpG dinucleotide"
  misc_feature (61)..(61): /note="Nucleotide may be methylated to form 5-methylcytosine"
atgagatgggaaaatagcatttgcagtaattttgtgtggctataactgaaattccatgtgcgtgttttgccttatcgcttttaagtaagtacaaagggacagataatgcttccaaatgcatg

SEQ ID NO: 2726 - DNA, 122 bp, Homo sapiens
  misc_feature (61)..(62): /note="This region represents a CpG dinucleotide"
  misc_feature (61)..(61): /note="Nucleotide may be methylated to form 5-methylcytosine"
acacagctttgagttttagttaaggttctgagtcacagaaatgacatcggttgagggtagcggggagaaaatattaggaacttgcacacgtgtattttgtcagcaaatttgagttcagtagc

SEQ ID NO: 2727 - DNA, 122 bp, Homo sapiens
  misc_feature (61)..(62): /note="This region represents a CpG dinucleotide"
  misc_feature (61)..(61): /note="Nucleotide may be methylated to form 5-methylcytosine"
attgtaaaagggagagttccatttatgagaatatgagtgaagtggagtcatgattaaaggcgtcacattgcactcccacatgactgacaagttggtacatctgcatgagtgattccattcag

SEQ ID NO: 2728 - DNA, 122 bp, Homo sapiens
  misc_feature (61)..(62): /note="This region represents a CpG dinucleotide"
  misc_feature (61)..(61): /note="Nucleotide may be methylated to form 5-methylcytosine"
tttccaaaagagagggacttggggcacagaatctctggcaggtgggggagaaacggctaccgtcaccccactgggcaccgcatgaataacccagatgtcggcgaaggggagcccctggtttc

SEQ ID NO: 2729 - DNA, 122 bp, Homo sapiens
  misc_feature (61)..(62): /note="This region represents a CpG dinucleotide"
  misc_feature (61)..(61): /note="Nucleotide may be methylated to form 5-methylcytosine"
ccctgctgtcagggaggcggcctacaaacgcttcggctacaagctggctggcatggaccccgagaagcccggcacgcccatcgtgctgaggagggcccagccacgcgctcgcagcagcaacg

SEQ ID NO: 2730 - DNA, 122 bp, Homo sapiens
  misc_feature (61)..(62): /note="This region represents a CpG dinucleotide"
  misc_feature (61)..(61): /note="Nucleotide may be methylated to form 5-methylcytosine"
ttactaaagctgcataaaaaactactccaaaacttagtcctgtgaaataccatcttgttgcgctcactctgtaggttaggaatttggtcagggcataatggggatgacttgtctctgattca

SEQ ID NO: 2731 - DNA, 122 bp, Homo sapiens
  misc_feature (61)..(62): /note="This region represents a CpG dinucleotide"
  misc_feature (61)..(61): /note="Nucleotide may be methylated to form 5-methylcytosine"
cgaggaggcaaacacataaggcacgaggcgagaaacgtgcagagcggaggacgaggccgacggacggggaggctgggggggacactaggcagcctggccaactctgcttgtccccctgctct

SEQ ID NO: 2732 - DNA, 122 bp, Homo sapiens
  misc_feature (61)..(62): /note="This region represents a CpG dinucleotide"
  misc_feature (61)..(61): /note="Nucleotide may be methylated to form 5-methylcytosine"
ccactacactcaatagaatagggattaagcaggactctgtaggctggtcagcaactttcacggcagcctaatgctaaagttctgccttacaagggtgttctggactgcacagtaaatggctg

SEQ ID NO: 2733 - DNA, 122 bp, Homo sapiens
  misc_feature (61)..(62): /note="This region represents a CpG dinucleotide"
  misc_feature (61)..(61): /note="Nucleotide may be methylated to form 5-methylcytosine"
ggatgttattttgggcttggcttatcgagtagtcaatggaaggattcccgtcccctctctcggcagcttagtaactgctgtagccagctcggctcccttccctgtgtatctgtgtcctgcta

SEQ ID NO: 2734 - DNA, 122 bp, Homo sapiens
  misc_feature (61)..(62): /note="This region represents a CpG dinucleotide"
  misc_feature (61)..(61): /note="Nucleotide may be methylated to form 5-methylcytosine"
tgtgtgactgctgcttctcctcatagggtagctgtccaaacagagggaatttttgaaaaacggtagaagatgaacacagaaccgcaacctgggaaaattcaccaagcatgccaagcttgcca

SEQ ID NO: 2735 - DNA, 122 bp, Homo sapiens
  misc_feature (61)..(62): /note="This region represents a CpG dinucleotide"
  misc_feature (61)..(61): /note="Nucleotide may be methylated to form 5-methylcytosine"
caggcttcaaggtcagagttgaggagttgccacagagactaaagtatttactctttagcccgtgacagaataagttcatgacccctgaactagaggctgttgatctcgtttacagtgaaaga

SEQ ID NO: 2736 - DNA, 122 bp, Homo sapiens
  misc_feature (61)..(62): /note="This region represents a CpG dinucleotide"
  misc_feature (61)..(61): /note="Nucleotide may be methylated to form 5-methylcytosine"
agtttgccagaagcaagatcaccctccttccacccccggggtggcaaaggacattcattccgtggagggggaggggactgtgtaactcactctaaatggggctggggtgaccggggagtggg

SEQ ID NO: 2737 - DNA, 122 bp, Homo sapiens
  misc_feature (61)..(62): /note="This region represents a CpG dinucleotide"
  misc_feature (61)..(61): /note="Nucleotide may be methylated to form 5-methylcytosine"
cagagcctggcgcgggcactgcccggacccacttggcctctcttgagtcgccgcgatctccgtctcctcccgggcgtctctgctgccccctagagagggggccactcgcagtggagaactgg

SEQ ID NO: 2738 - DNA, 122 bp, Homo sapiens
  misc_feature (61)..(62): /note="This region represents a CpG dinucleotide"
  misc_feature (61)..(61): /note="Nucleotide may be methylated to form 5-methylcytosine"
ctgccccatgatttaattacctcccaccgggtccctcccacaacacgtgcgaattcaagacgaaatttggttgggacacagccaaaccatatcagccactcacagtggtgcacacctgtaat

SEQ ID NO: 2739 - DNA, 122 bp, Homo sapiens
  misc_feature (61)..(62): /note="This region represents a CpG dinucleotide"
  misc_feature (61)..(61): /note="Nucleotide may be methylated to form 5-methylcytosine"
aaaccagatctatgagttgagaatgggaacactgttaggcccagcacgcattgtgtctcacgcttgtaatcccagcactctgggaggccgagaagggtggatcacattaagtcaggagtttg

SEQ ID NO: 2740 - DNA, 122 bp, Homo sapiens
  misc_feature (61)..(62): /note="This region represents a CpG dinucleotide"
  misc_feature (61)..(61): /note="Nucleotide may be methylated to form 5-methylcytosine"
gtttcggagggaaaggcaggcaaggcaaggtttaggattggcaagtgtgagtaattttggcgggctccaaggtataggggatttctctagttgtctgacacttggccctggggtgactagga

SEQ ID NO: 2741 - DNA, 122 bp, Homo sapiens
  misc_feature (61)..(62): /note="This region represents a CpG dinucleotide"
  misc_feature (61)..(61): /note="Nucleotide may be methylated to form 5-methylcytosine"
ctcattcatctctggattataagcaaaaagctctgtctccccaggaagcccagaagccaccgaggaaagttctcagtgaatgaacaggagtcatagctgtcctccacctccctgctcatgac

SEQ ID NO: 2742 - DNA, 122 bp, Homo sapiens
  misc_feature (61)..(62): /note="This region represents a CpG dinucleotide"
  misc_feature (61)..(61): /note="Nucleotide may be methylated to form 5-methylcytosine"
tatggcctccctttttacatgagcgtccagggagtgaagaggaaaccaaaggactgaaagcgtggacaacagagtagtgacagttccgccaccctttgtcagcaggccacatggctaagtgg

SEQ ID NO: 2743 - DNA, 122 bp, Homo sapiens
  misc_feature (61)..(62): /note="This region represents a CpG dinucleotide"
  misc_feature (61)..(61): /note="Nucleotide may be methylated to form 5-methylcytosine"
atcatgatgcagaataaattctggagcaaccctgcctgacaacagaggattgactgcaatcgtttgaaaggacagagctccacaacacattttctgaaatgttttcttatgaaggaaaagct

SEQ ID NO: 2744 - DNA, 122 bp, Homo sapiens
  misc_feature (61)..(62): /note="This region represents a CpG dinucleotide"
  misc_feature (61)..(61): /note="Nucleotide may be methylated to form 5-methylcytosine"
aaggaaagggaagaggcggagcgtgggagcgcacagtgtcaggaatacaatagtgctccgcgccgcctcagccgccgccgccgcccaaccgcctgcccagcgctgaggcctgacgggccggg

SEQ ID NO: 2745 - DNA, 122 bp, Homo sapiens
  misc_feature (61)..(62): /note="This region represents a CpG dinucleotide"
  misc_feature (61)..(61): /note="Nucleotide may be methylated to form 5-methylcytosine"
ctgctcctccccatgtccctggttctcaccagaaacctcagcagtgctcttaggaagtcccgctttggggacccacttttctggggacacaccatggcactgtcaggtggagagtctgggct

SEQ ID NO: 2746 - DNA, 122 bp, Homo sapiens
  misc_feature (61)..(62): /note="This region represents a CpG dinucleotide"
  misc_feature (61)..(61): /note="Nucleotide may be methylated to form 5-methylcytosine"
tttcattacatcctggttgaattaccaaatggaaactgatttaggaatactgagtgtgtacggcacagagaaaaaatatcactgcgaaatttataggcctgtgtaagactgtcagggccctg

SEQ ID NO: 2747 - DNA, 122 bp, Homo sapiens
  misc_feature (61)..(62): /note="This region represents a CpG dinucleotide"
  misc_feature (61)..(61): /note="Nucleotide may be methylated to form 5-methylcytosine"
cctgcgaattgaagctgggtgctgctagtgctgggggcaggcgtgggggagtcgcggaggcggggaggggggctgggcagaggttggaacgtctatttttagtgagggttttatagagtgga

SEQ ID NO: 2748 - DNA, 122 bp, Homo sapiens
  misc_feature (61)..(62): /note="This region represents a CpG dinucleotide"
  misc_feature (61)..(61): /note="Nucleotide may be methylated to form 5-methylcytosine"
tgagggagtaatattatgcaaacttaggttctgggccctcagagccttgcatacttctgccggcactattggacatctgtccaactgccatgtgagcaaactagggctggcctaccagagga

SEQ ID NO: 2749 - DNA, 122 bp, Homo sapiens
  misc_feature (61)..(62): /note="This region represents a CpG dinucleotide"
  misc_feature (61)..(61): /note="Nucleotide may be methylated to form 5-methylcytosine"
aggaaggatcagggacgcagccatccactcaggcaatcacaggcagtgggttgggacccccgaaaggaaaaaaaaagtttgttttcttcttatttagttttgtttttatttctaaatgttgt

SEQ ID NO: 2750 - DNA, 122 bp, Homo sapiens
  misc_feature (61)..(62): /note="This region represents a CpG dinucleotide"
  misc_feature (61)..(61): /note="Nucleotide may be methylated to form 5-methylcytosine"
aggggcttacctatggctccccttctcctcctccctggctccagagtctgcaggaaaaagcgtagccaagtagccaagagttggaggcaaacttcccttgcaagaaagccccaaccctccta

SEQ ID NO: 2751 - DNA, 122 bp, Homo sapiens
  misc_feature (61)..(62): /note="This region represents a CpG dinucleotide"
  misc_feature (61)..(61): /note="Nucleotide may be methylated to form 5-methylcytosine"
gcttttgtgcagaattgaagaatgtttactatgttttccttcctgtctctctggaaatgacgcaaagaataacaacaacaaaaaagaactccttgtcccgtgcaaaacacccgcccctcccc

SEQ ID NO: 2752 - DNA, 122 bp, Homo sapiens
  misc_feature (61)..(62): /note="This region represents a CpG dinucleotide"
  misc_feature (61)..(61): /note="Nucleotide may be methylated to form 5-methylcytosine"
ctcctactgattggtcagcagacatgagagagaagacacaaggttcccatgagaccttcacggccagcccctaacagctgcctcagctggagagggttgtttcactctaatttgcagatgat

SEQ ID NO: 2753 - DNA, 122 bp, Homo sapiens
  misc_feature (61)..(62): /note="This region represents a CpG dinucleotide"
  misc_feature (61)..(61): /note="Nucleotide may be methylated to form 5-methylcytosine"
ggcttttgttgtaaacgtctagaagttcagttaaattacaagatctaccagatctaccggcgggcagaattattactttgaagttactgaagttatgcgtcctgctggaagaccttgtaatt

SEQ ID NO: 2754 - DNA, 122 bp, Homo sapiens
  misc_feature (61)..(62): /note="This region represents a CpG dinucleotide"
  misc_feature (61)..(61): /note="Nucleotide may be methylated to form 5-methylcytosine"
ttctagcctccccctggcaggatcccccaatgtatttgatagcatttaccctttgagaaacgtaaaatctcaatacaagctctaaactgagcctttactgcagcccagacacccaatgggag

SEQ ID NO: 2755 - DNA, 122 bp, Homo sapiens
  misc_feature (61)..(62): /note="This region represents a CpG dinucleotide"
  misc_feature (61)..(61): /note="Nucleotide may be methylated to form 5-methylcytosine"
taggcactccccgaagtgcttttgcaggtattaactcatttaacctttgtaaggatcttacgaagtacatactgttactacatttgattggtaaatgaggaaactaaggtacaataatcttt

SEQ ID NO: 2756 - DNA, 122 bp, Homo sapiens
  misc_feature (61)..(62): /note="This region represents a CpG dinucleotide"
  misc_feature (61)..(61): /note="Nucleotide may be methylated to form 5-methylcytosine"
gaaccgggcagcacctggtgtcagcggctaattgtgttttaaggtggcgtgttagaccagcgcgcgaagggcaacccgagccaccgcacttgccttgcaggcgccgcgtcctctgacacggg

SEQ ID NO: 2757 - DNA, 122 bp, Homo sapiens
  misc_feature (61)..(62): /note="This region represents a CpG dinucleotide"
  misc_feature (61)..(61): /note="Nucleotide may be methylated to form 5-methylcytosine"
gatgggaacaggtggacagagagagacagagtaaagcagagacaaagataccagaaatatcgagagaggaaacagtgactaagggaactctagagcagaactacttgcttaaagtaagtccc

SEQ ID NO: 2758 - DNA, 122 bp, Homo sapiens
  misc_feature (61)..(62): /note="This region represents a CpG dinucleotide"
  misc_feature (61)..(61): /note="Nucleotide may be methylated to form 5-methylcytosine"
tctaggtcaatggatggtcctttttcgatcctggacttggcactgggccaagacaaacttcgcagacaggaaaaccttcaatgatgctccctatgagacaggaaatgtgcctacggtgggga

SEQ ID NO: 2759 - DNA, 122 bp, Homo sapiens
  misc_feature (61)..(62): /note="This region represents a CpG dinucleotide"
  misc_feature (61)..(61): /note="Nucleotide may be methylated to form 5-methylcytosine"
atttattgaccagaatcaagcaagtactattcctatgccttttaagccctgttagctccacgttattctcacacttctgtactagggtatgttaaataagcagaagccattgaactgagact

SEQ ID NO: 2760 - DNA, 122 bp, Homo sapiens
  misc_feature (61)..(62): /note="This region represents a CpG dinucleotide"
  misc_feature (61)..(61): /note="Nucleotide may be methylated to form 5-methylcytosine"
tgtgaaatttgacattgttccaatttaaatgctttactccagcaagtgcaagactgcgggcgcttcggtgcggggcttgccacggccaggccgttctgagactcgccagctctccaggcttc

SEQ ID NO: 2761 - DNA, 122 bp, Homo sapiens
  misc_feature (61)..(62): /note="This region represents a CpG dinucleotide"
  misc_feature (61)..(61): /note="Nucleotide may be methylated to form 5-methylcytosine"
agtcctggggatcttccgatttcctgtgacagggcaacaaattgccgatgtgagtacaaacgggtaggcaggcagcttaaagatgagaatgctggggcgagggcattatgtcacagttcatg

SEQ ID NO: 2762 - DNA, 122 bp, Homo sapiens
  misc_feature (61)..(62): /note="This region represents a CpG dinucleotide"
  misc_feature (61)..(61): /note="Nucleotide may be methylated to form 5-methylcytosine"
ccaggggcattaaaaaaaggtgtatgtttaaaatgtacattttaaaatataaaatggattcgtgtcagggtgcatcaaggtatgcaacgggaaacccaccacaattctaaagtggggaagtt

SEQ ID NO: 2763 - DNA, 122 bp, Homo sapiens
  misc_feature (61)..(62): /note="This region represents a CpG dinucleotide"
  misc_feature (61)..(61): /note="Nucleotide may be methylated to form 5-methylcytosine"
attaccaagaaatgtcttaataagaccagagctctggatcctctgggcactctctagaggcgggatatatacagtctctgaattttaaaatagaaaacagtgggcagcggggaacggagtag

SEQ ID NO: 2764 - DNA, 122 bp, Homo sapiens
  misc_feature (61)..(62): /note="This region represents a CpG dinucleotide"
  misc_feature (61)..(61): /note="Nucleotide may be methylated to form 5-methylcytosine"
agtctggatgtcctcaaccttcagcacctcttagccctttagtctgagtggaagaggattcggttacttgatccacagtgcatgctgaacccactgtctggttcccgcccccgcctcctgca

SEQ ID NO: 2765 - DNA, 122 bp, Homo sapiens
  misc_feature (61)..(62): /note="This region represents a CpG dinucleotide"
  misc_feature (61)..(61): /note="Nucleotide may be methylated to form 5-methylcytosine"
tttgagtacatctcttggtatagttctcatagtggtcacatgagtattacaatagacacacgtgacttaccacagtctgttggtggtgatgtttcactactttgagtgaggtgtggaaatct

SEQ ID NO: 2766 - DNA, 122 bp, Homo sapiens
  misc_feature (61)..(62): /note="This region represents a CpG dinucleotide"
  misc_feature (61)..(61): /note="Nucleotide may be methylated to form 5-methylcytosine"
atctacataaattttagtagcttcattaagtgccaatcatcacttaattttagactctgccgaaaactgaatttacaagttcatcctacatcattcattctctccaataatccctcccttca

SEQ ID NO: 2767 - DNA, 122 bp, Homo sapiens
  misc_feature (61)..(62): /note="This region represents a CpG dinucleotide"
  misc_feature (61)..(61): /note="Nucleotide may be methylated to form 5-methylcytosine"
tcattcattcgaagatttctttctttccattcttgacagggtctctctatagtgcctaggcgggacagaactccttttttttttttttttttttttttttttttttgagacaaagtctcgct

SEQ ID NO: 2768 - DNA, 122 bp, Homo sapiens
  misc_feature (61)..(62): /note="This region represents a CpG dinucleotide"
  misc_feature (61)..(61): /note="Nucleotide may be methylated to form 5-methylcytosine"
caggtgtagtaagattgccagttttctaagctggttgtacctgttctgcattcctataagcgctatatgagagttatggtagttttgcatctttgctagtctttttcattttaggtattttg

SEQ ID NO: 2769 - DNA, 122 bp, Homo sapiens
  misc_feature (61)..(62): /note="This region represents a CpG dinucleotide"
  misc_feature (61)..(61): /note="Nucleotide may be methylated to form 5-methylcytosine"
aactctcggtggcgctgctggtggtgcctgagaagtcgctgttgcagtgcttgcatcctccgcatgctaatgaagctgtgatgtcagcaagtcagtcacggcatctggacgtcccatcctgc

SEQ ID NO: 2770 - DNA, 122 bp, Homo sapiens
  misc_feature (61)..(62): /note="This region represents a CpG dinucleotide"
  misc_feature (61)..(61): /note="Nucleotide may be methylated to form 5-methylcytosine"
agggtgtgtgtgtgtgttcgcgtgtttgtcgaggtgggtatctaacctgatcactcaggtcgtgtcccttcactcagtttggtagctgaaaccaaatgtcttcaaacaagttctctgtgacc

SEQ ID NO: 2771 - DNA, 122 bp, Homo sapiens
  misc_feature (61)..(62): /note="This region represents a CpG dinucleotide"
  misc_feature (61)..(61): /note="Nucleotide may be methylated to form 5-methylcytosine"
ctgaagtctttcataaaagcactgctccacaagttctccttgcttctactacatgattaacgttttctttcctctctactggatagtcccatcagcagacaaacattctctgttcttaaaga

SEQ ID NO: 2772 - DNA, 122 bp, Homo sapiens
  misc_feature (61)..(62): /note="This region represents a CpG dinucleotide"
  misc_feature (61)..(61): /note="Nucleotide may be methylated to form 5-methylcytosine"
catcctctcataacccctccatgctaggcgaaagggaaacacaggtgtcaggcctcaaaacgcctggctagtttgtcagagacagctgcagccaaggtgctaaataagccctggttatcagg

SEQ ID NO: 2773 - DNA, 122 bp, Homo sapiens
  misc_feature (61)..(62): /note="This region represents a CpG dinucleotide"
  misc_feature (61)..(61): /note="Nucleotide may be methylated to form 5-methylcytosine"
caccgtcagactgagggcgggtgcacgtggctgcagacagcagctgctgagaatgacacgcgactctgatgaaagcgatacagcttagccggtctggctgttcaccgtcctgctgcactcta

SEQ ID NO: 2774 - DNA, 122 bp, Homo sapiens
  misc_feature (61)..(62): /note="This region represents a CpG dinucleotide"
  misc_feature (61)..(61): /note="Nucleotide may be methylated to form 5-methylcytosine"
ctcgtcttctcacactcactcggtgtgtgacagcgacaggtcacagagggcggtaaagtgcggcgcccttggggcggtttcgtctggcgcggagtagaggtggccggcagttgtggttgctc

SEQ ID NO: 2775 - DNA, 122 bp, Homo sapiens
  misc_feature (61)..(62): /note="This region represents a CpG dinucleotide"
  misc_feature (61)..(61): /note="Nucleotide may be methylated to form 5-methylcytosine"
cctaaatggtatctaggaaaatattctctctttaacttgtttattctggtcataaagattcgggacattactgagggctgggtaggggcactagttgacctctaggttctacgtcctgttct

SEQ ID NO: 2776 - DNA, 122 bp, Homo sapiens
  misc_feature (61)..(62): /note="This region represents a CpG dinucleotide"
  misc_feature (61)..(61): /note="Nucleotide may be methylated to form 5-methylcytosine"
tcttcagtttgaaaaggtcccagaactcccctggaatcctcccacttccttccaacagcacggagcctgaggacccagcctaaccctgagtcatacttgggaccaaatgaggaatggggaga

SEQ ID NO: 2777 - DNA, 122 bp, Homo sapiens
  misc_feature (61)..(62): /note="This region represents a CpG dinucleotide"
  misc_feature (61)..(61): /note="Nucleotide may be methylated to form 5-methylcytosine"
cctgtatctctttgctatcccttagaacagttaacagtaaaaacaaaaaacatcaaaaaacgttgctaaatggtatttcaatttcaatttcaattcttttatcatttgtgaatagttttctt

SEQ ID NO: 2778 - DNA, 122 bp, Homo sapiens
  misc_feature (61)..(62): /note="This region represents a CpG dinucleotide"
  misc_feature (61)..(61): /note="Nucleotide may be methylated to form 5-methylcytosine"
acgaaaccactgaaagcttccttgtttcatctgttcatgaggatagtattttttacctcacggcagtatgaggatccattaagatgtatatcaagagtttttagaccagtgcccggcacatg

SEQ ID NO: 2779 - DNA, 122 bp, Homo sapiens
  misc_feature (61)..(62): /note="This region represents a CpG dinucleotide"
  misc_feature (61)..(61): /note="Nucleotide may be methylated to form 5-methylcytosine"
ctcaaagcagacactgaaaaatgtgaggctgctgccaagccacagggctcagggagtatccgctgtctccacacaaaggctgaaataatgagaatcctctggtcggtatcatgtagcagtct

SEQ ID NO: 2780 - DNA, 122 bp, Homo sapiens
  misc_feature (61)..(62): /note="This region represents a CpG dinucleotide"
  misc_feature (61)..(61): /note="Nucleotide may be methylated to form 5-methylcytosine"
ttgtaaatgagtcaccagggggtgttggttttccttccagaggtcaggcatgctattgagcgctgtgattcccaacttgggagaactgggacaccctcatgtcatttgttagatttcttgat

SEQ ID NO: 2781 - DNA, 122 bp, Homo sapiens
  misc_feature (61)..(62): /note="This region represents a CpG dinucleotide"
  misc_feature (61)..(61): /note="Nucleotide may be methylated to form 5-methylcytosine"
tagcagctgcagcagaacagctagtagtcagattccagaagccaaatgttccttataaggcggcaggatgtggtggagagagtctagaactagcaggcagctgacccagcttgttctgcttc

SEQ ID NO: 2782 - DNA, 122 bp, Homo sapiens
  misc_feature (61)..(62): /note="This region represents a CpG dinucleotide"
  misc_feature (61)..(61): /note="Nucleotide may be methylated to form 5-methylcytosine"
gcagaactgtgtccgaaactggtggcctctatggcttataagaatgaagccgcagacactcgccctgtgtgtttcagctgttacaatatcccgtccagagtttctttcagtgggtttctgat

SEQ ID NO: 2783 - DNA, 122 bp, Homo sapiens
  misc_feature (61)..(62): /note="This region represents a CpG dinucleotide"
  misc_feature (61)..(61): /note="Nucleotide may be methylated to form 5-methylcytosine"
gaagtgtgctgcttgcagctctggaggtcagaagtccaagagcaaggtgccagcagattccgtgtctggtgaggccgcttcctgtttcatagacggtgccttctaactgagtcttcacagtg

SEQ ID NO: 2784 - DNA, 122 bp, Homo sapiens
  misc_feature (61)..(62): /note="This region represents a CpG dinucleotide"
  misc_feature (61)..(61): /note="Nucleotide may be methylated to form 5-methylcytosine"
cccccaagcacagcacgccattgcagcaggccccttcctgaagctgcgcccccatgaatacgccctgtacccattctgagaatcaggtctgatattatgggaagaaaatgtgtgcctaggca

SEQ ID NO: 2785 - DNA, 122 bp, Homo sapiens
  misc_feature (61)..(62): /note="This region represents a CpG dinucleotide"
  misc_feature (61)..(61): /note="Nucleotide may be methylated to form 5-methylcytosine"
gccttgggaatagctgaaaagttagcattaaaacaacagctgcaggtgaagctatttcgccggctgcatcaccgcagccaccccctcttctgtcgggcaccgtgggagggtgggggcgggga

SEQ ID NO: 2786 - DNA, 122 bp, Homo sapiens
  misc_feature (61)..(62): /note="This region represents a CpG dinucleotide"
  misc_feature (61)..(61): /note="Nucleotide may be methylated to form 5-methylcytosine"
acttggagtggctaggtttcttaaaagtttatgttggccaggtgtgtgagctcaggagttcgagtctagcccaggcaacataatgaggccccatctctacaaaaacagttaaaaattagcca

SEQ ID NO: 2787 - DNA, 122 bp, Homo sapiens
  misc_feature (61)..(62): /note="This region represents a CpG dinucleotide"
  misc_feature (61)..(61): /note="Nucleotide may be methylated to form 5-methylcytosine"
gaatataatggacattggatgattatcatctttgaaattaggatacacggcaatacttaacgatatattatctgttaagcgttatcaatttagatgagggctggaagccaacatgattgtga

SEQ ID NO: 2788 - DNA, 122 bp, Homo sapiens
  misc_feature (61)..(62): /note="This region represents a CpG dinucleotide"
  misc_feature (61)..(61): /note="Nucleotide may be methylated to form 5-methylcytosine"
ggcaaagtgttcatggtaacttggagctccccaatacatggccatgtcttctaaagacaacgtaatgagcccaagtgaactgaaggtcatactggcaggtgctgatgacagtttgtccttga

SEQ ID NO: 2789 - DNA, 122 bp, Homo sapiens
  misc_feature (61)..(62): /note="This region represents a CpG dinucleotide"
  misc_feature (61)..(61): /note="Nucleotide may be methylated to form 5-methylcytosine"
caagagaaagagggaacccgctggtgtctgagaagaaacccgctggtgtctgagaagaaacggtgaagggtgcactacgaagggaatataaactaatcaaacattcttgaatggcaatgaca

SEQ ID NO: 2790 - DNA, 122 bp, Homo sapiens
  misc_feature (61)..(62): /note="This region represents a CpG dinucleotide"
  misc_feature (61)..(61): /note="Nucleotide may be methylated to form 5-methylcytosine"
cattagcaaggggttaaggaccttaaggacggagcccaggcagcaccgggaagccagctccgctcagaagaagggtggcgaccacgggagagctagaaagggaggaccatgggaaacagggc

SEQ ID NO: 2791 - DNA, 122 bp, Homo sapiens
  misc_feature (61)..(62): /note="This region represents a CpG dinucleotide"
  misc_feature (61)..(61): /note="Nucleotide may be methylated to form 5-methylcytosine"
cctgaaacttctttcgttctggcttatcagttgtttcagggcgatgtattactcagccaccgcctgtgaagtgaaccagaacaatttgaggttaattcacctctcccaacaatcataaaagt

SEQ ID NO: 2792 - DNA, 122 bp, Homo sapiens
  misc_feature (61)..(62): /note="This region represents a CpG dinucleotide"
  misc_feature (61)..(61): /note="Nucleotide may be methylated to form 5-methylcytosine"
ggtaccttccaggaacataactaggagttagccaggggagaggggaaagggtattccagacggaaggacaacttgagcaaagacagggaaggaaaatttaaaaatacagtggtgctttgtgc

SEQ ID NO: 2793 - DNA, 122 bp, Homo sapiens
  misc_feature (61)..(62): /note="This region represents a CpG dinucleotide"
  misc_feature (61)..(61): /note="Nucleotide may be methylated to form 5-methylcytosine"
ttgctgaatttagctatgacactcgctgagtcactgcagtgggcaagaagaaatgcagtccgatagttctctgcttcaaaaaacaggggagatcttatcctggtgaaggtgggtcagcacac

SEQ ID NO: 2794 - DNA, 122 bp, Homo sapiens
  misc_feature (61)..(62): /note="This region represents a CpG dinucleotide"
  misc_feature (61)..(61): /note="Nucleotide may be methylated to form 5-methylcytosine"
aaattagatgagccccagggttttccacctgctccgacactagtgtccgtggctgaggagcggccagagggttgagaaggaaatggggtctgaactggatgaggggcgcttgcttgctccgt

SEQ ID NO: 2795 - DNA, 122 bp, Homo sapiens
  misc_feature (61)..(62): /note="This region represents a CpG dinucleotide"
  misc_feature (61)..(61): /note="Nucleotide may be methylated to form 5-methylcytosine"
caataatatttataattatttcctctgaatcacatgtagtcaggctttttcttatgctcccgtgagcttttcagtagcaaaactttgctgttgtaattgctaaggttcaatatgccatattt

SEQ ID NO: 2796 - DNA, 122 bp, Homo sapiens
  misc_feature (61)..(62): /note="This region represents a CpG dinucleotide"
  misc_feature (61)..(61): /note="Nucleotide may be methylated to form 5-methylcytosine"
ctttcaaaggcaagctgcagggctccttggttttgtcacattcctcattctggggctttgcggttttgtcttgggaatctcgaggctctcccaaggttcctttctatgtttatatcatttag

SEQ ID NO: 2797 - DNA, 122 bp, Homo sapiens
  misc_feature (61)..(62): /note="This region represents a CpG dinucleotide"
  misc_feature (61)..(61): /note="Nucleotide may be methylated to form 5-methylcytosine"
tccttacgttgatatctcattcagtttccttagcaaccctgagaggtgggcaggggccaccgtcattctggtttcactgaggaagtcaggacagcactgaagacacctgtccagcaccttgt

SEQ ID NO: 2798 - DNA, 122 bp, Homo sapiens
  misc_feature (61)..(62): /note="This region represents a CpG dinucleotide"
  misc_feature (61)..(61): /note="Nucleotide may be methylated to form 5-methylcytosine"
gagatggtgacaaggccactcaacctgcctcagaggagtcatgagaatcaaacaagatcacggatgctgaaatgtgtcatgaactacagggtgatgcatacacatgagccgtgactgtcact

SEQ ID NO: 2799 - DNA, 122 bp, Homo sapiens
  misc_feature (61)..(62): /note="This region represents a CpG dinucleotide"
  misc_feature (61)..(61): /note="Nucleotide may be methylated to form 5-methylcytosine"
ggcttctccaaacagtggtggagccacacctctaactccttctcagaggaatggccccagcggctcagcaggaagttcagaagtcactgcaatgagcaaacagacctgagcacaccccggcg

SEQ ID NO: 2800 - DNA, 122 bp, Homo sapiens
  misc_feature (61)..(62): /note="This region represents a CpG dinucleotide"
  misc_feature (61)..(61): /note="Nucleotide may be methylated to form 5-methylcytosine"
gttgttttgcagccacccggaggtggcctgtcctatttgcgcttgcattctctctcccctcggatgggcatcgctggagagtggaaaacatctgctacatactcagtgtctctgccacttcc

SEQ ID NO: 2801 - DNA, 122 bp, Homo sapiens
  misc_feature (61)..(62): /note="This region represents a CpG dinucleotide"
  misc_feature (61)..(61): /note="Nucleotide may be methylated to form 5-methylcytosine"
aatttcctaatactctgggggtgtctcttctcctcctcctcttggggtccccctattttgcgaggcagaggctccctcaagcctgtggtgctcaagtaccttcaaccctagagaggggaaag

SEQ ID NO: 2802 - DNA, 122 bp, Homo sapiens
  misc_feature (61)..(62): /note="This region represents a CpG dinucleotide"
  misc_feature (61)..(61): /note="Nucleotide may be methylated to form 5-methylcytosine"
ggcaatctgcccgcctcggcctcccatagtgctgggattacaggcatgagccaccgcacccggtccagatttattaagcaatagtggtgcatttcatgcacaggtatcagctagtctagtaa

SEQ ID NO: 2803 - DNA, 122 bp, Homo sapiens
  misc_feature (61)..(62): /note="This region represents a CpG dinucleotide"
  misc_feature (61)..(61): /note="Nucleotide may be methylated to form 5-methylcytosine"
cttttacctgaatggtagtttcaatctttaggcggtctttacttttcagtttcctccacacgttccgatacctgccatcttctcatggagcacattcacatgtcacaatcagtgtttccgca

SEQ ID NO: 2804 - DNA, 122 bp, Homo sapiens
  misc_feature (61)..(62): /note="This region represents a CpG dinucleotide"
  misc_feature (61)..(61): /note="Nucleotide may be methylated to form 5-methylcytosine"
aggaaacgatttgataccatcatggagtgaatagagttggaagcaaggaaagagtattgacgtcaatgcttatcatattagtgaaataaatatggagaggatagttagagaatcttgtgata

SEQ ID NO: 2805 - DNA, 122 bp, Homo sapiens
  misc_feature (61)..(62): /note="This region represents a CpG dinucleotide"
  misc_feature (61)..(61): /note="Nucleotide may be methylated to form 5-methylcytosine"
gtttccttggggagataagaataacattcgtggacggtaaataaagcagcatgtggtgaacggctaatttcgccacacagaaaacaaacacacaaatctctgtatggagagaacaggaggtc

SEQ ID NO: 2806 - DNA, 122 bp, Homo sapiens
  misc_feature (61)..(62): /note="This region represents a CpG dinucleotide"
  misc_feature (61)..(61): /note="Nucleotide may be methylated to form 5-methylcytosine"
aacgacctggcatgctctgataagaaaacgctttataatctcgccaactaccttaactgccgtacactcccaacacgctcccgccaaagattaaagtgtggaaattggacctgttttttcct

SEQ ID NO: 2807 - DNA, 122 bp, Homo sapiens
  misc_feature (61)..(62): /note="This region represents a CpG dinucleotide"
  misc_feature (61)..(61): /note="Nucleotide may be methylated to form 5-methylcytosine"
tatttttagtagagatggggttttgccacgttggccaggctggtctcaagctcccaacctcgagtgatccacctaccacgcctcccaagttgctaggattacaggcatgagccaccatgccc

SEQ ID NO: 2808 - DNA, 122 bp, Homo sapiens
  misc_feature (61)..(62): /note="This region represents a CpG dinucleotide"
  misc_feature (61)..(61): /note="Nucleotide may be methylated to form 5-methylcytosine"
aattacaaaccctctgctctttgtatttctctgttgtgaagaataaactgtacctgcacccgggtggcggtggtgtttggcgtgctctgtgcgagggcagggctggggggcacctttccatt

SEQ ID NO: 2809 - DNA, 122 bp, Homo sapiens
  misc_feature (61)..(62): /note="This region represents a CpG dinucleotide"
  misc_feature (61)..(61): /note="Nucleotide may be methylated to form 5-methylcytosine"
attacttccccacccccactcctcccgacttgcttctctcaggtccaggcctgtccttgacgtcagaaggcatgggctggtctccaggaagcccgtccaagctcagaacttagagacaaagc

SEQ ID NO: 2810 - DNA, 122 bp, Homo sapiens
  misc_feature (61)..(62): /note="This region represents a CpG dinucleotide"
  misc_feature (61)..(61): /note="Nucleotide may be methylated to form 5-methylcytosine"
gagctgggcatggggactgaccagtcccctattatgggctggggacctgtttgcagccttcgtatcttgccaatctacatgtgcaggcaagaggtggttttggagttgcgcgacctccagcg

SEQ ID NO: 2811 - DNA, 122 bp, Homo sapiens
  misc_feature (61)..(62): /note="This region represents a CpG dinucleotide"
  misc_feature (61)..(61): /note="Nucleotide may be methylated to form 5-methylcytosine"
gggcatgcagggcgtccaggatgcagggcagagagagaagcgagggatgagtcacggatgcgccccccgctctgagcccgacggggccctgaatggcttttcctgccctggctcctcccatc

SEQ ID NO: 2812 - DNA, 122 bp, Homo sapiens
  misc_feature (61)..(62): /note="This region represents a CpG dinucleotide"
  misc_feature (61)..(61): /note="Nucleotide may be methylated to form 5-methylcytosine"
ggcctagcacagcctgatctctaacatcataagtcagaaatgacgtcacggttacagccacgatactgatgacagccattcacaacacgctgggccagtgcgaaatcctgtcttgctgactg

SEQ ID NO: 2813 - DNA, 122 bp, Homo sapiens
  misc_feature (61)..(62): /note="This region represents a CpG dinucleotide"
  misc_feature (61)..(61): /note="Nucleotide may be methylated to form 5-methylcytosine"
tgtattggtcatcttcccattgccagtgcctacgaagggcttgacccattcattgttagacgctcagtaagtgtgtattgaggcagccctctgtgccactccagggctctttccactaaatc

SEQ ID NO: 2814 - DNA, 122 bp, Homo sapiens
  misc_feature (61)..(62): /note="This region represents a CpG dinucleotide"
  misc_feature (61)..(61): /note="Nucleotide may be methylated to form 5-methylcytosine"
agtttatccatgtattctctctctcctcctattgaagtgccctagccctcaagtcctcctcggacagagcttttggactcctaatttgcacacaagtctaacaagccacatcatcttgcttt

SEQ ID NO: 2815 - DNA, 122 bp, Homo sapiens
  misc_feature (61)..(62): /note="This region represents a CpG dinucleotide"
  misc_feature (61)..(61): /note="Nucleotide may be methylated to form 5-methylcytosine"
cgtctgagggacggaactggctcagagggatcaggtcagcggttggagacccctcccctccgttagatcagcggctggagacccctccgcggcctgagcgtctgtcccagccggaggggcgg

SEQ ID NO: 2816 - DNA, 122 bp, Homo sapiens
  misc_feature (61)..(62): /note="This region represents a CpG dinucleotide"
  misc_feature (61)..(61): /note="Nucleotide may be methylated to form 5-methylcytosine"
taatgtttgcctagaactgagcacgagttttccactcttgcagcgcgagaagagaaaagacgcagataaactagcagagcaaagggcagaagaaaagagactaaaaaggagaaactagaatt

SEQ ID NO: 2817 - DNA, 122 bp, Homo sapiens
  misc_feature (61)..(62): /note="This region represents a CpG dinucleotide"
  misc_feature (61)..(61): /note="Nucleotide may be methylated to form 5-methylcytosine"
gtttcccaggctgggatgccttttgctttccacaataggaatggccagtagctgccagcccgtggtggaaagaagcaactggagattgcaaactctcctctgctctctcaacaggcaatagg

SEQ ID NO: 2818 - DNA, 122 bp, Homo sapiens
  misc_feature (61)..(62): /note="This region represents a CpG dinucleotide"
  misc_feature (61)..(61): /note="Nucleotide may be methylated to form 5-methylcytosine"
tcttatttatctccgtgtctgtcattcgcacaagcggctttagagagcgactgagcgtctcgctcaggtgtacaccgctgtgcagagatgccagccctcctggaactgcacccaagaagccc

SEQ ID NO: 2819 - DNA, 122 bp, Homo sapiens
  misc_feature (61)..(62): /note="This region represents a CpG dinucleotide"
  misc_feature (61)..(61): /note="Nucleotide may be methylated to form 5-methylcytosine"
gtgtggaccggcggctccatggtggcctccctgcactccttccagcgccgctggataactcgggccatgtaccaggagtgtggctccaggctgctgtacgatgtgttcaactgagtcaggct

SEQ ID NO: 2820 - DNA, 122 bp, Homo sapiens
  misc_feature (61)..(62): /note="This region represents a CpG dinucleotide"
  misc_feature (61)..(61): /note="Nucleotide may be methylated to form 5-methylcytosine"
ttttgtttttgtttttttgcgacggagtctcattccttcacccaggctggagtgtagtggcgcgatctcggctcactgcaacctctgcctccagggttcaagcgattctcgtgcctcagcct

SEQ ID NO: 2821 - DNA, 122 bp, Homo sapiens
  misc_feature (61)..(62): /note="This region represents a CpG dinucleotide"
  misc_feature (61)..(61): /note="Nucleotide may be methylated to form 5-methylcytosine"
tggggacatggaccagtggctttcccagcccaggacctttgctgctcctcaggactgagccgaaccacagctcttctcacttgggccaagttaaatgccagggctgttgatacagtaaacag

SEQ ID NO: 2822 - DNA, 122 bp, Homo sapiens
  misc_feature (61)..(62): /note="This region represents a CpG dinucleotide"
  misc_feature (61)..(61): /note="Nucleotide may be methylated to form 5-methylcytosine"
aaaaaccaccttttaaagctgtaaaaacacagtcaattaaactagtagagttttatttcacgtaatgctgagaatgaaagagagccttctttggaccacggtaatctttaatatacaggaat

SEQ ID NO: 2823 - DNA, 122 bp, Homo sapiens
  misc_feature (61)..(62): /note="This region represents a CpG dinucleotide"
  misc_feature (61)..(61): /note="Nucleotide may be methylated to form 5-methylcytosine"
gcaaagtttgtggtaatgttgttcatgcaggcaccagtggtatctcctcttcattgtgaccgtaaagtccccaaagagagatttatggtacttttactcttggtctgttgcctgggggtaaa

SEQ ID NO: 2824 - DNA, 122 bp, Homo sapiens
  misc_feature (61)..(62): /note="This region represents a CpG dinucleotide"
  misc_feature (61)..(61): /note="Nucleotide may be methylated to form 5-methylcytosine"
aggaccaggaaacctggctgagtagtgtggtctatggaggtgcatgggcttcagagacaacgttgatcctgagtccaagccagctgcttagtagatgtgggagagttttatacttacctgca

SEQ ID NO: 2825 - DNA, 122 bp, Homo sapiens
  misc_feature (61)..(62): /note="This region represents a CpG dinucleotide"
  misc_feature (61)..(61): /note="Nucleotide may be methylated to form 5-methylcytosine"
atctggaagagctcagggtcattgccgttggcctgaagcaggagcggcaggacatcgaagcggcctctaggcggtttccagccctgctgtatgcatatctgcaagcagacccggccaggtaa

SEQ ID NO: 2826 - DNA, 122 bp, Homo sapiens
  misc_feature (61)..(62): /note="This region represents a CpG dinucleotide"
  misc_feature (61)..(61): /note="Nucleotide may be methylated to form 5-methylcytosine"
atgcccgagagcccaaggtcccgggacctggtgcaggaagagccgcctgcgcgggggagacgcggggatcaccggccacaccccggacgctcagtcggggccttactcgggggggcggcagc

SEQ ID NO: 2827 - DNA, 122 bp, Homo sapiens
  misc_feature (61)..(62): /note="This region represents a CpG dinucleotide"
  misc_feature (61)..(61): /note="Nucleotide may be methylated to form 5-methylcytosine"
gaccccgccctgcagggccctgattgacagaagctgtgttcctgcctgggacaggcggcccgaaggacgtgtgtttggctggctcagccctttgcttcagggcttccttgcggtgctggcac

SEQ ID NO: 2828 - DNA, 122 bp, Homo sapiens
  misc_feature (61)..(62): /note="This region represents a CpG dinucleotide"
  misc_feature (61)..(61): /note="Nucleotide may be methylated to form 5-methylcytosine"
ttcctctgaataaatataaatcacgatcagaaacccaaacagaagcatccctcttgaattcgtgctgctgaaaaacacggaataaattcagcctgcagacacagaatctaatcagcagctgt

SEQ ID NO: 2829 - DNA, 122 bp, Homo sapiens
  misc_feature (61)..(62): /note="This region represents a CpG dinucleotide"
  misc_feature (61)..(61): /note="Nucleotide may be methylated to form 5-methylcytosine"
tttctgccccaaccctagtcatcttccctcagtgttcattgtgttatgtgctggttcaaacgtgtacttcccttgaacaggaactctctggtttatggcataacgttatgctccaggctctt

SEQ ID NO: 2830 - DNA, 122 bp, Homo sapiens
  misc_feature (61)..(62): /note="This region represents a CpG dinucleotide"
  misc_feature (61)..(61): /note="Nucleotide may be methylated to form 5-methylcytosine"
gtctgttgagcacgtgtttatcatggtttttaatcacagcttcatctttccagactgcagcgtccctcctgactgtaatttcttctcatggtttggtacctctttcagtcgcccctccctta

SEQ ID NO: 2831 - DNA, 122 bp, Homo sapiens
  misc_feature (61)..(62): /note="This region represents a CpG dinucleotide"
  misc_feature (61)..(61): /note="Nucleotide may be methylated to form 5-methylcytosine"
ctctttgaaagttgacagggtagaaatcatttttgtagacaagaaaattgaagcacaaggcgataacgcaacttgcccagcagcacatggttattaataggtggagcgggaattagaagcca

SEQ ID NO: 2832 - DNA, 122 bp, Homo sapiens
  misc_feature (61)..(62): /note="This region represents a CpG dinucleotide"
  misc_feature (61)..(61): /note="Nucleotide may be methylated to form 5-methylcytosine"
tgcacaatctgcaaaacataaaatactccataaatggaagcagtaaatcttccccgagctcgagactccaaaggccctgagcccagtaccagtaacagcacccaggtaagtaggctggctga

SEQ ID NO: 2833 - DNA, 122 bp, Homo sapiens
  misc_feature (61)..(62): /note="This region represents a CpG dinucleotide"
  misc_feature (61)..(61): /note="Nucleotide may be methylated to form 5-methylcytosine"
aatttttttttgaagattgctaaagagtggttgcaggcagcagtaagacagcaattgctgcgagacacttgtctctgctaaggaggcagcagctgcgactgtcactcagcctcggcactcac

SEQ ID NO: 2834 - DNA, 122 bp, Homo sapiens
  misc_feature (61)..(62): /note="This region represents a CpG dinucleotide"
  misc_feature (61)..(61): /note="Nucleotide may be methylated to form 5-methylcytosine"
agctgctttccttgttatcacttatgttccagcagctcgatccatcttcccatgcaggaacgtttctccccaaagtcctgaccctgccgtggagcacctgaggggaggagtcactgggtttc

SEQ ID NO: 2835 - DNA, 122 bp, Homo sapiens
  misc_feature (61)..(62): /note="This region represents a CpG dinucleotide"
  misc_feature (61)..(61): /note="Nucleotide may be methylated to form 5-methylcytosine"
ggatacctggcccaccttcccctgaccccagagagttgtggggcctctgtcaggaggcaccggctctaacaagagctgtgggtgtgctctgggctttctgcttggcactgctgctcagtgat

SEQ ID NO: 2836 - DNA, 122 bp, Homo sapiens
  misc_feature (61)..(62): /note="This region represents a CpG dinucleotide"
  misc_feature (61)..(61): /note="Nucleotide may be methylated to form 5-methylcytosine"
tctactaatatttcaatgttcatgtgtctttgactttccccacaagtaaactccaagtttcgtagaaacagaaagtacatcatacactttctatcttagaaacagaaagtacatcatacact

SEQ ID NO: 2837 - DNA, 122 bp, Homo sapiens
  misc_feature (61)..(62): /note="This region represents a CpG dinucleotide"
  misc_feature (61)..(61): /note="Nucleotide may be methylated to form 5-methylcytosine"
taatttagggattcctctttgtggtttgccctcagtgtatgcatcacccactgttgaacacggtagcctacagcaatgtctcagaggttttagaacatcattcagaaccatgactggtgatt

SEQ ID NO: 2838 - DNA, 122 bp, Homo sapiens
  misc_feature (61)..(62): /note="This region represents a CpG dinucleotide"
  misc_feature (61)..(61): /note="Nucleotide may be methylated to form 5-methylcytosine"
agtttgttgcaaagtgacaaattatacttgtatatattttgcaggaacagtgttatattacgaaaaaggtattttcagattttttggatgttgtgagcctggcgtaatgctattctcattag

SEQ ID NO: 2839 - DNA, 122 bp, Homo sapiens
  misc_feature (61)..(62): /note="This region represents a CpG dinucleotide"
  misc_feature (61)..(61): /note="Nucleotide may be methylated to form 5-methylcytosine"
agcccctccaccactgcacagtgacatttacctcttagtctcctgtgtcactggatgaggcgtccttgctgctgggcttacccttccacctctgcccttgttccctttccttcctgtctcct

SEQ ID NO: 2840 - DNA, 122 bp, Homo sapiens
  misc_feature (61)..(62): /note="This region represents a CpG dinucleotide"
  misc_feature (61)..(61): /note="Nucleotide may be methylated to form 5-methylcytosine"
tgcctctgcagtgaaagccacagtcagccacagacacaggctcagaggccctctgactcacgagcaggcacaagaacatcactgcatagcccagaaaaggctgacaaaagccaaaaacccac

SEQ ID NO: 2841 - DNA, 122 bp, Homo sapiens
  misc_feature (61)..(62): /note="This region represents a CpG dinucleotide"
  misc_feature (61)..(61): /note="Nucleotide may be methylated to form 5-methylcytosine"
tagagagaagatcgtcatatgctctccgtaggttacctgtctatttagaagcaaacctctcgtcacccgctgcggagcatctcgatgttagaaaccacgccactatttttagtgtgtgtcct

SEQ ID NO: 2842 - DNA, 122 bp, Homo sapiens
  misc_feature (61)..(62): /note="This region represents a CpG dinucleotide"
  misc_feature (61)..(61): /note="Nucleotide may be methylated to form 5-methylcytosine"
aggcatttgaagaatgtccttcaatcaagatttaaattgtttttctcatgctttgactgacgctatgagatttgtcaggaacaattaaaaagctaaagtatttcttttcattacatcatata

SEQ ID NO: 2843 - DNA, 122 bp, Homo sapiens
  misc_feature (61)..(62): /note="This region represents a CpG dinucleotide"
  misc_feature (61)..(61): /note="Nucleotide may be methylated to form 5-methylcytosine"
agtggttgtgcaactggacttactgcttcctcttacatatctgccatcatcaagcgactacgcctgggatagtttacagatgtatgaaaagcaagcagaacagaattgaatcttatcagtgg

SEQ ID NO: 2844 - DNA, 122 bp, Homo sapiens
  misc_feature (61)..(62): /note="This region represents a CpG dinucleotide"
  misc_feature (61)..(61): /note="Nucleotide may be methylated to form 5-methylcytosine"
acacacactcagattcccagctcacggggactcaggccccgcccgcggccatgctcacctcgccgctgcactgtgaagctctccacaaccccgtagttgtgtctgcagtaggtgtccaccgc

SEQ ID NO: 2845 - DNA, 122 bp, Homo sapiens
  misc_feature (61)..(62): /note="This region represents a CpG dinucleotide"
  misc_feature (61)..(61): /note="Nucleotide may be methylated to form 5-methylcytosine"
ttcccctttctcctgtgttccttttgttttccagacacaccacaaaccaaaaggagcacacggcctgtgttatacaaaatgtgcaggaacagggtttcttgagtggctacccaattaagtaa

SEQ ID NO: 2846 - DNA, 122 bp, Homo sapiens
  misc_feature (61)..(62): /note="This region represents a CpG dinucleotide"
  misc_feature (61)..(61): /note="Nucleotide may be methylated to form 5-methylcytosine"
tctacttctgaagcctttcctaacaatctatgccccagagtcgacttcagaatatttttacgttttaattatccccttatttgaattactatagcaattatagcttcatacaggctcattat

SEQ ID NO: 2847 - DNA, 122 bp, Homo sapiens
  misc_feature (61)..(62): /note="This region represents a CpG dinucleotide"
  misc_feature (61)..(61): /note="Nucleotide may be methylated to form 5-methylcytosine"
gccgctcgcacaactggccgcctaacagccagacccacccacgccgatgcccgccggagacgccccgccgcagacacagcgcaaccagcttcacacacctggggacgccccacagaagtcac

SEQ ID NO: 2848 - DNA, 122 bp, Homo sapiens
  misc_feature (61)..(62): /note="This region represents a CpG dinucleotide"
  misc_feature (61)..(61): /note="Nucleotide may be methylated to form 5-methylcytosine"
tactgtagtgtcaattcttcaactttctcgccaaggtaaatcacctggtgatgattgcttcgtctccaattccaaacagaaaaaatgagaatccatcatcgtgtaactccacaattgaacct

SEQ ID NO: 2849 - DNA, 122 bp, Homo sapiens
  misc_feature (61)..(62): /note="This region represents a CpG dinucleotide"
  misc_feature (61)..(61): /note="Nucleotide may be methylated to form 5-methylcytosine"
gagtcccggcggctcggcgcggtcttggtctgggtcggtggggttgggccgggagacccgcggccggcggggtccaggctgggggaggccgccgctgccaccaggtccccgaggtagggtag

SEQ ID NO: 2850 - DNA, 122 bp, Homo sapiens
  misc_feature (61)..(62): /note="This region represents a CpG dinucleotide"
  misc_feature (61)..(61): /note="Nucleotide may be methylated to form 5-methylcytosine"
atgtgtcagaactccattcttctttatggttgagtaatatttcactttatgaatttagcacgttttatttaaccattcatcaagtgatggacatttgagttagctccaatttttggttattg

SEQ ID NO: 2851 - DNA, 122 bp, Homo sapiens
  misc_feature (61)..(62): /note="This region represents a CpG dinucleotide"
  misc_feature (61)..(61): /note="Nucleotide may be methylated to form 5-methylcytosine"
cctgtcttgatatatcagctgtgtctaggcagcgggcaaggtgaacccattgggcagttacgcagctgctggatgaacaaataaatgtgtggaaaatgaagaaaaaccgagagtcaaagctt

SEQ ID NO: 2852 - DNA, 122 bp, Homo sapiens
  misc_feature (61)..(62): /note="This region represents a CpG dinucleotide"
  misc_feature (61)..(61): /note="Nucleotide may be methylated to form 5-methylcytosine"
tatagacaaatcccttcttctgattttctgagcaaaatatcagcatagaaccagccatctcgtttcttccggactaggagtgctgtttaatcaggagaaagtagagggtgctctctgcctac

SEQ ID NO: 2853 - DNA, 122 bp, Homo sapiens
  misc_feature (61)..(62): /note="This region represents a CpG dinucleotide"
  misc_feature (61)..(61): /note="Nucleotide may be methylated to form 5-methylcytosine"
gctagtgctgtgctgactatagtgtttacaatgaatcattgaataaattgttaccatccacggaggctgcctctctggataattagcaatttcaatttaaggaagatactataaagtacact

SEQ ID NO: 2854 - DNA, 122 bp, Homo sapiens
  misc_feature (61)..(62): /note="This region represents a CpG dinucleotide"
  misc_feature (61)..(61): /note="Nucleotide may be methylated to form 5-methylcytosine"
cggttgggtgcagttggagctgtcggaagcatttcccgagagaaacaccatggtcccagccggggccgggcgaggtccggctgtccagggccacctcccgggctggcgcggaggcgggagcg

SEQ ID NO: 2855 - DNA, 122 bp, Homo sapiens
  misc_feature (61)..(62): /note="This region represents a CpG dinucleotide"
  misc_feature (61)..(61): /note="Nucleotide may be methylated to form 5-methylcytosine"
ttcaccaggcacgagaaataggggatttggatgcttggcagtttccagtaattatttcttcggctgaggagcccggagaacatgctcaagcacgctgggagccatttccttttaaaatatta

SEQ ID NO: 2856 - DNA, 122 bp, Homo sapiens
  misc_feature (61)..(62): /note="This region represents a CpG dinucleotide"
  misc_feature (61)..(61): /note="Nucleotide may be methylated to form 5-methylcytosine"
aaggaagggacaaagggatttattgaaagtgaaagtacactccacagtgtgggagggggccgagcataggaactcaaagacaccgttacagaatttttgggagtttaaataccccctagagg

SEQ ID NO: 2857 - DNA, 122 bp, Homo sapiens
  misc_feature (61)..(62): /note="This region represents a CpG dinucleotide"
  misc_feature (61)..(61): /note="Nucleotide may be methylated to form 5-methylcytosine"
gtccaaatttcccctctttattttattaaggagaggagggcaagggaacttctgggggaacgagggatcaaagaagaagcttaagtgtctaggttatatcactgagcagcagagactctgaa

SEQ ID NO: 2858 - DNA, 122 bp, Homo sapiens
  misc_feature (61)..(62): /note="This region represents a CpG dinucleotide"
  misc_feature (61)..(61): /note="Nucleotide may be methylated to form 5-methylcytosine"
gctgggcttataattgatcctcaggtctgtcttgtcattctggagctttgtaccaaaagccgctgtagcattccaaatacaaccccatgttaaaattactcagcaccctcaagaaaggctga

SEQ ID NO: 2859 - DNA, 122 bp, Homo sapiens
  misc_feature (61)..(62): /note="This region represents a CpG dinucleotide"
  misc_feature (61)..(61): /note="Nucleotide may be methylated to form 5-methylcytosine"
ggtcatgcaaacttgttaacagatatttcttcgggataacttgagaaccttcacagtagacgatgctagtgctgtgctgactatagtgtttacaatgaatcattgaataaattgttaccatc

SEQ ID NO: 2860 - DNA, 122 bp, Homo sapiens
  misc_feature (61)..(62): /note="This region represents a CpG dinucleotide"
  misc_feature (61)..(61): /note="Nucleotide may be methylated to form 5-methylcytosine"
ccttaagggaaaggtcatgcactgtttaccatagtatatgcagtgcctagcacagggcatcgtaagcacttagctaaactgaataaatagttaagtactaacaatattagggcttaggacat

SEQ ID NO: 2861 - DNA, 122 bp, Homo sapiens
  misc_feature (61)..(62): /note="This region represents a CpG dinucleotide"
  misc_feature (61)..(61): /note="Nucleotide may be methylated to form 5-methylcytosine"
cagcccggcagtttgtttaaaggtctgggttaccttgggccccaggcgcgtgatatagaacgtcagcaactgctgctgtccaggcgctcctcagccagccttctctcctgacctctcctcag

SEQ ID NO: 2862 - DNA, 122 bp, Homo sapiens
  misc_feature (61)..(62): /note="This region represents a CpG dinucleotide"
  misc_feature (61)..(61): /note="Nucleotide may be methylated to form 5-methylcytosine"
ccgtttcatcagaagccggaggacgggcgccagggggcaacttcctacaggagggcgtcccgttagaatgacagggcttttgcaaaagtctgacacccgtggcacagagcgccccagatatg

SEQ ID NO: 2863 - DNA, 122 bp, Homo sapiens
  misc_feature (61)..(62): /note="This region represents a CpG dinucleotide"
  misc_feature (61)..(61): /note="Nucleotide may be methylated to form 5-methylcytosine"
gttagaacacttctaatctttgttagaacacttactttgttagaacacttacctcagcctcgttacttagtctctctgatgctcagttttcttaatagtaatccaggtggaatcatgggaac

SEQ ID NO: 2864 - DNA, 122 bp, Homo sapiens
  misc_feature (61)..(62): /note="This region represents a CpG dinucleotide"
  misc_feature (61)..(61): /note="Nucleotide may be methylated to form 5-methylcytosine"
cttacaaaggacaaatctgtacaaatcagtttagataatctgttaaaaaaaaaaaaaacacgctcagcacaaaatcttgatctgttatttagggagagaagagggcaactgtctacttctat

SEQ ID NO: 2865 - DNA, 122 bp, Homo sapiens
  misc_feature (61)..(62): /note="This region represents a CpG dinucleotide"
  misc_feature (61)..(61): /note="Nucleotide may be methylated to form 5-methylcytosine"
ttttgccataacctattggttcaaagcaagtcataggttctgcccacactcaatgggaagcgaccacagaaggcatgaatatcaggaggcagggattataggggccaccttaagattccttc

SEQ ID NO: 2866 - DNA, 122 bp, Homo sapiens
  misc_feature (61)..(62): /note="This region represents a CpG dinucleotide"
  misc_feature (61)..(61): /note="Nucleotide may be methylated to form 5-methylcytosine"
ggttctgcgtgtaggagaatctgcttgggaaaccacagccctgcctgccgtggagatggacgcagcgtcccgctcacccggcgcacactgcagggctccatgcgggagtgaggcggcagcgc

SEQ ID NO: 2867 - DNA, 122 bp, Homo sapiens
  misc_feature (61)..(62): /note="This region represents a CpG dinucleotide"
  misc_feature (61)..(61): /note="Nucleotide may be methylated to form 5-methylcytosine"
catcacttttaatggcaaaatccacaattgcttttgcaccaacctaatagcatttaataacgtaaatatagctgggaaatctcaaaatatttaaacatacacagtacacttcaaaataacgc

SEQ ID NO: 2868 - DNA, 122 bp, Homo sapiens
  misc_feature (61)..(62): /note="This region represents a CpG dinucleotide"
  misc_feature (61)..(61): /note="Nucleotide may be methylated to form 5-methylcytosine"
tatatttgttcaacctaagccatgtccttcgagaagcagattagcacagtgaatcatggacgttagttttcctgttaccagactggtctggctaagctacatctttcaggaaaacctgctgt

SEQ ID NO: 2869 - DNA, 122 bp, Homo sapiens
  misc_feature (61)..(62): /note="This region represents a CpG dinucleotide"
  misc_feature (61)..(61): /note="Nucleotide may be methylated to form 5-methylcytosine"
gctgcgccaccccttaccacttccactccccctcgcttaccccacctttgttctctccagcgaactgtgactgtctaaatggaggaacatgtgtgtccaacaagtacttctccaacattcac

SEQ ID NO: 2870 - DNA, 122 bp, Homo sapiens
  misc_feature (61)..(62): /note="This region represents a CpG dinucleotide"
  misc_feature (61)..(61): /note="Nucleotide may be methylated to form 5-methylcytosine"
atatgatagtattatgatatatgtagcatatagaatgtctgaaccgaggccaaacttagacgaaagaatgctttggcaggcctaacgtttggcacacattccaacatgattgtaaaatattt

SEQ ID NO: 2871 - DNA, 122 bp, Homo sapiens
  misc_feature (61)..(62): /note="This region represents a CpG dinucleotide"
  misc_feature (61)..(61): /note="Nucleotide may be methylated to form 5-methylcytosine"
tggatgtgtctgactcaactacagagaagcgccctccccatctctgctccgtgtaaattccgtactgttggtgcctccctggagcctaaaaaacattagccagtttcctcagtctccttcac

SEQ ID NO: 2872 - DNA, 122 bp, Homo sapiens
  misc_feature (61)..(62): /note="This region represents a CpG dinucleotide"
  misc_feature (61)..(61): /note="Nucleotide may be methylated to form 5-methylcytosine"
aaagaattttgattggtgaccaattttgaggacttttattaaaattctaatttaagtcttcgagagtttccagtcatggatactacagataatattgcagatgatgaaagcgtcttcaaaat

SEQ ID NO: 2873 - DNA, 122 bp, Homo sapiens
  misc_feature (61)..(62): /note="This region represents a CpG dinucleotide"
  misc_feature (61)..(61): /note="Nucleotide may be methylated to form 5-methylcytosine"
ccattcagctcttttgtcactacttgccagactaatcactcagaattgtaaccctttaaacgcgtcccctcccttctttatgttccaccatttttaaaacagaggaaccaaagcatcagcct

SEQ ID NO: 2874 - DNA, 122 bp, Homo sapiens
  misc_feature (61)..(62): /note="This region represents a CpG dinucleotide"
  misc_feature (61)..(61): /note="Nucleotide may be methylated to form 5-methylcytosine"
ttctactttcctacttagccaagaagaggctccagacagccttgtgatcctgaagaaggacgtgataagtcatattgagtcatattctgcaggatgccaggaaggaacttgtctggttttct

SEQ ID NO: 2875 - DNA, 122 bp, Homo sapiens
  misc_feature (61)..(62): /note="This region represents a CpG dinucleotide"
  misc_feature (61)..(61): /note="Nucleotide may be methylated to form 5-methylcytosine"
tcccagatgaccaaggcagtgagtatgaggctggcctctgtgacagacaggcacatccaccgagtctaagagtttgatatgcacctactgtttgatcctcacaaaagctgccttgtgttcca

SEQ ID NO: 2876 - DNA, 122 bp, Homo sapiens
  misc_feature (61)..(62): /note="This region represents a CpG dinucleotide"
  misc_feature (61)..(61): /note="Nucleotide may be methylated to form 5-methylcytosine"
cactcacggcctccatggcaccagggacaacgctgtccccgcagcagcgcctcctcccggcgcccgagagaccggcacgccacggcccctcccccaaggaacagagcaaaggatggtggccg

SEQ ID NO: 2877 - DNA, 122 bp, Homo sapiens
  misc_feature (61)..(62): /note="This region represents a CpG dinucleotide"
  misc_feature (61)..(61): /note="Nucleotide may be methylated to form 5-methylcytosine"
cccctgaagcctggtacgcgtgggcaccggcgcacggcggtgccccggaaacgcagccatcgcctcagggcagccactcaccgatgcggtaatgccccaacggggcgtttcattggccagct

SEQ ID NO: 2878 - DNA, 122 bp, Homo sapiens
  misc_feature (61)..(62): /note="This region represents a CpG dinucleotide"
  misc_feature (61)..(61): /note="Nucleotide may be methylated to form 5-methylcytosine"
gtgggaatgtggctcctagttgatgttcagtactaatcattcattcagcaaacagcctaccgcccactgtgtgtcatggcctgtgatttgtcttttttctttttgggggcttctgggtcata

SEQ ID NO: 2879 - DNA, 122 bp, Homo sapiens
  misc_feature (61)..(62): /note="This region represents a CpG dinucleotide"
  misc_feature (61)..(61): /note="Nucleotide may be methylated to form 5-methylcytosine"
aagtgctaggattacaggtgtgggccactaattgccagccttggatttttacttttgacacgtcatttcctcatattagtcatgaggttctcctgatgaccgtctttgaaaatgtgtgcaca

SEQ ID NO: 2880 - DNA, 122 bp, Homo sapiens
  misc_feature (61)..(62): /note="This region represents a CpG dinucleotide"
  misc_feature (61)..(61): /note="Nucleotide may be methylated to form 5-methylcytosine"
gggaaaagaaagagtctaaaattgatcctgggtgactgagataatagaaaagtcacaaggcgtaggtttccagggaagatgagtttttagcctatttgttagtctcatgggatgagtgaaga

SEQ ID NO: 2881 - DNA, 122 bp, Homo sapiens
  misc_feature (61)..(62): /note="This region represents a CpG dinucleotide"
  misc_feature (61)..(61): /note="Nucleotide may be methylated to form 5-methylcytosine"
tttgttgtaagaaatagaaactcactctagcttaagtaaagtgagacttatataaggaatcggcatctctcaggaagaatgggaaggccttcacaaaggaaatgcaaacaggaactgagagt

SEQ ID NO: 2882 - DNA, 122 bp, Homo sapiens
  misc_feature (61)..(62): /note="This region represents a CpG dinucleotide"
  misc_feature (61)..(61): /note="Nucleotide may be methylated to form 5-methylcytosine"
ctacagacaaagcctttttcctacggccttcacccttaattccgtaagatttttttcaaacgacttttgaagagatgtgactgaaaatgagaactgacttaacacagggaatctgagatttg

SEQ ID NO: 2883 - DNA, 122 bp, Homo sapiens
  misc_feature (61)..(62): /note="This region represents a CpG dinucleotide"
  misc_feature (61)..(61): /note="Nucleotide may be methylated to form 5-methylcytosine"
tgcaatttgccagattgtacacagctgatactctaggattttcccacactatatgaaactcgttttgttgccttcattctaaacagccggtaaagtatttggctttctaatagttcacaatg

SEQ ID NO: 2884 - DNA, 122 bp, Homo sapiens
  misc_feature (61)..(62): /note="This region represents a CpG dinucleotide"
  misc_feature (61)..(61): /note="Nucleotide may be methylated to form 5-methylcytosine"
caacccccagccccagccccggccccgtcctcatcaacacatcatccagtcaccatgcgccgtgcctgcgcatccccccgcccgctggcgaccccgcagcgcacctgccttccacccagggg

SEQ ID NO: 2885 - DNA, 122 bp, Homo sapiens
  misc_feature (61)..(62): /note="This region represents a CpG dinucleotide"
  misc_feature (61)..(61): /note="Nucleotide may be methylated to form 5-methylcytosine"
ttagacataacctctggccacctcatggggcctgtcgcgcacagccatgcaattagcaagcggggctgctgcagacttcaggcacagggaacgccaggactaccgactgattttccccgcta

SEQ ID NO: 2886 - DNA, 122 bp, Homo sapiens
  misc_feature (61)..(62): /note="This region represents a CpG dinucleotide"
  misc_feature (61)..(61): /note="Nucleotide may be methylated to form 5-methylcytosine"
gactcacactgaacctgaagggatgaaattacatatgacgatggaatgtggccatattcacgcagtcacagcagtgtgttgcccaatgacagtactggagcagtttccacagaggcactcat

SEQ ID NO: 2887 - DNA, 122 bp, Homo sapiens
  misc_feature (61)..(62): /note="This region represents a CpG dinucleotide"
  misc_feature (61)..(61): /note="Nucleotide may be methylated to form 5-methylcytosine"
tcctagggcaggggaggggcgggcaatgccagagaacggtccccacctggggtggtctgacggccagggatgcagggagagacgcctcccacactcccggaggcacgcacgtgctgtggcca

SEQ ID NO: 2888 - DNA, 122 bp, Homo sapiens
  misc_feature (61)..(62): /note="This region represents a CpG dinucleotide"
  misc_feature (61)..(61): /note="Nucleotide may be methylated to form 5-methylcytosine"
acagaaaagcgaggaaagtctatgccgccagcgaccggcaggaggcacgtcgggcacgctcgtcaccgtttcctggcacgtgaccaccgccctgccctgtcgctttagggcctgtcgcttcc

SEQ ID NO: 2889 - DNA, 122 bp, Homo sapiens
  misc_feature (61)..(62): /note="This region represents a CpG dinucleotide"
  misc_feature (61)..(61): /note="Nucleotide may be methylated to form 5-methylcytosine"
acagggctgtagtattttgatgctgtagtccaataactgtattttctgtccatattaggccgagagtaggggcgtcctccagggttgtataaaccatcagtagccaattcatttgcacctgc

SEQ ID NO: 2890 - DNA, 122 bp, Homo sapiens
  misc_feature (61)..(62): /note="This region represents a CpG dinucleotide"
  misc_feature (61)..(61): /note="Nucleotide may be methylated to form 5-methylcytosine"
ggtagcagccttgctgctggcttctcccagctccgtgttcggtcccggtggggtcacaggcgctgcggctctgtctgtcgcagcccaggtgagccaggagggggacgccgacctccaacccc

SEQ ID NO: 2891 - DNA, 122 bp, Homo sapiens
  misc_feature (61)..(62): /note="This region represents a CpG dinucleotide"
  misc_feature (61)..(61): /note="Nucleotide may be methylated to form 5-methylcytosine"
tggatcaccctaataaacacaggatctgctactggtatttgtttcctgtcctgactgcatcgaactcatgtccaaggtcagaggatatccggagaactgtgaaggacaactatgaacgtggt

SEQ ID NO: 2892 - DNA, 122 bp, Homo sapiens
  misc_feature (61)..(62): /note="This region represents a CpG dinucleotide"
  misc_feature (61)..(61): /note="Nucleotide may be methylated to form 5-methylcytosine"
gaagtgaaagtaacttgtacctgacgacttgagcctttgggcagtgtgctggagctggctcgtaccagctcaagagaccccttgttaaacatcaaggaattttgcaagtaggttggtagctt

SEQ ID NO: 2893 - DNA, 122 bp, Homo sapiens
  misc_feature (61)..(62): /note="This region represents a CpG dinucleotide"
  misc_feature (61)..(61): /note="Nucleotide may be methylated to form 5-methylcytosine"
aagggctagaatgagtccatggttggtcttatcaggagaaagttactaaaatcagtctcacgttcagtcaaagctatagttacagttagtggaacaggggtacagtttgtcagcatctagtg

SEQ ID NO: 2894 - DNA, 122 bp, Homo sapiens
  misc_feature (61)..(62): /note="This region represents a CpG dinucleotide"
  misc_feature (61)..(61): /note="Nucleotide may be methylated to form 5-methylcytosine"
ttatccatttcttttagggatgagaaaactaaggctcacaacaatcaagggaccaacccacggtcccctagctctgaagtggggatccaacccaggtgtggctgaatagagaccaccgagat

SEQ ID NO: 2895 - DNA, 122 bp, Homo sapiens
  misc_feature (61)..(62): /note="This region represents a CpG dinucleotide"
  misc_feature (61)..(61): /note="Nucleotide may be methylated to form 5-methylcytosine"
atagtaatgtcattacggtgccaccacctgggaccccatgatgggaccctgtgactttgccgtggactcagacctcagccttgctctgtgtagaggaagctggcctttccttctctactgct

SEQ ID NO: 2896 - DNA, 122 bp, Homo sapiens
  misc_feature (61)..(62): /note="This region represents a CpG dinucleotide"
  misc_feature (61)..(61): /note="Nucleotide may be methylated to form 5-methylcytosine"
ggacacggggctttgggaagcccgtttgacagagggcaggagccattcaggaaatgggtccgggacacgtggctttgtagtcactggctggctgggtgtggtaaagccgcacatacgtgaca

SEQ ID NO: 2897 - DNA, 122 bp, Homo sapiens
  misc_feature (61)..(62): /note="This region represents a CpG dinucleotide"
  misc_feature (61)..(61): /note="Nucleotide may be methylated to form 5-methylcytosine"
ttatttttaggaaaccaatgtctgtggtcagaagttctttcttatgactaaaccagtcagcgctggcaaaattcacagtggcagcttactcaacctctgaagaatatctaacttcattataa

SEQ ID NO: 2898 - DNA, 122 bp, Homo sapiens
  misc_feature (61)..(62): /note="This region represents a CpG dinucleotide"
  misc_feature (61)..(61): /note="Nucleotide may be methylated to form 5-methylcytosine"
tccatgccacgtcaatttacagccagccccctaccagagttctgtcgctcagggcaccagcggtgctttgtctattccagttggctggatgataaaaagaggtgtccaaaaacggaaataaa

SEQ ID NO: 2899 - DNA, 122 bp, Homo sapiens
  misc_feature (61)..(62): /note="This region represents a CpG dinucleotide"
  misc_feature (61)..(61): /note="Nucleotide may be methylated to form 5-methylcytosine"
acaatactaatgaagggtcactgtggcctgggaaaatagcattatattgggatagttacccgagcctttagttatttccaagcctgggaaagggaaggttacttgcagaaactggagattgt

SEQ ID NO: 2900 - DNA, 122 bp, Homo sapiens
  misc_feature (61)..(62): /note="This region represents a CpG dinucleotide"
  misc_feature (61)..(61): /note="Nucleotide may be methylated to form 5-methylcytosine"
tcttcctcagatttacataataggactcattgcagaccggaaatttcagcatttcaacaccgttctggaggcttacatccaacagcatttcagtgcgaccttggcttacaagtaagtaattg

SEQ ID NO: 2901 - DNA, 122 bp, Homo sapiens
  misc_feature (61)..(62): /note="This region represents a CpG dinucleotide"
  misc_feature (61)..(61): /note="Nucleotide may be methylated to form 5-methylcytosine"
caatggtttccaggagcaggaggtgaagagagggaactgactacatggcactgaaaggaacgttttgtagtaatggatatatcttgatggtggttacatgactaagtctgtcaaaattcata

SEQ ID NO: 2902 - DNA, 122 bp, Homo sapiens
  misc_feature (61)..(62): /note="This region represents a CpG dinucleotide"
  misc_feature (61)..(61): /note="Nucleotide may be methylated to form 5-methylcytosine"
acacactcacaggtccacatgtccacaggtccagcagtacacgggttcacacgcagtccacgggtccatgggttcacacatctacagtacaaaggttcacaggtacacagatccagaggtcc

SEQ ID NO: 2903 - DNA, 122 bp, Homo sapiens
  misc_feature (61)..(62): /note="This region represents a CpG dinucleotide"
  misc_feature (61)..(61): /note="Nucleotide may be methylated to form 5-methylcytosine"
gctggaacttattatttggctagactctcaattcccataaaattacatagggcaaagatacgaaccatcattacagttatcaccctcagagggtttgttgagactttctccactgttgtttg

SEQ ID NO: 2904 - DNA, 122 bp, Homo sapiens
  misc_feature (61)..(62): /note="This region represents a CpG dinucleotide"
  misc_feature (61)..(61): /note="Nucleotide may be methylated to form 5-methylcytosine"
gatattttgcatatggagaaactgaggctgagagcctttagtctccaccttgtttttaaacgaagggggcagggagcaaatagaaacctgttcatgcagcattagtttcaattcttaaaata

SEQ ID NO: 2905 - DNA, 122 bp, Homo sapiens
  misc_feature (61)..(62): /note="This region represents a CpG dinucleotide"
  misc_feature (61)..(61): /note="Nucleotide may be methylated to form 5-methylcytosine"
gcaaagggaacaatcatctgtctttgtccttcattccttccacaactatttatccagcaccgtttctgggcacagggctccagcgatggtcccaacaggtacaatgacctctggggaccaag

SEQ ID NO: 2906 - DNA, 122 bp, Homo sapiens
  misc_feature (61)..(62): /note="This region represents a CpG dinucleotide"
  misc_feature (61)..(61): /note="Nucleotide may be methylated to form 5-methylcytosine"
ccaactgccacttcctcttatgccaggcttcttcccaggaacaatggactcacacctgcacgctgccctgatatgtcattgcgacagaactgaagacacatgttgctaatgacataaatccc

SEQ ID NO: 2907 - DNA, 122 bp, Homo sapiens
  misc_feature (61)..(62): /note="This region represents a CpG dinucleotide"
  misc_feature (61)..(61): /note="Nucleotide may be methylated to form 5-methylcytosine"
tcgcttcccgcggcccattgggcccttgccccgccctctgacgcaaacacaattatggggcggagcatcgtccccactagccaggcacaccccagtcccatagggaggcgactgagaaagcc

SEQ ID NO: 2908 - DNA, 122 bp, Homo sapiens
  misc_feature (61)..(62): /note="This region represents a CpG dinucleotide"
  misc_feature (61)..(61): /note="Nucleotide may be methylated to form 5-methylcytosine"
aggactagaaagccaactttctacttgtcactttcccagatatggacaaggttgtaaacacgtggaagtataatttttttagtggcaaattacaaatgcattcaacagagctgtttcagaaa

SEQ ID NO: 2909 - DNA, 122 bp, Homo sapiens
  misc_feature (61)..(62): /note="This region represents a CpG dinucleotide"
  misc_feature (61)..(61): /note="Nucleotide may be methylated to form 5-methylcytosine"
atcaagtccacccaccacctcggcggctaaggcggtgaaagaggaacaccgcgggtggagcgggggggcccgtccccagtcccctggacctcagtttcctcatgcccgcagatcaagcgaga

SEQ ID NO: 2910 - DNA, 122 bp, Homo sapiens
  misc_feature (61)..(62): /note="This region represents a CpG dinucleotide"
  misc_feature (61)..(61): /note="Nucleotide may be methylated to form 5-methylcytosine"
gtttgtaaagtctcagaagtttcaggctccattttttttttctttgcaagaaacccatgtcgactataatgagtgcattttagagatgctgtgctgaaagctggcaatggataaagcaagaa

SEQ ID NO: 2911 - DNA, 122 bp, Homo sapiens
  misc_feature (61)..(62): /note="This region represents a CpG dinucleotide"
  misc_feature (61)..(61): /note="Nucleotide may be methylated to form 5-methylcytosine"
gtcggccctggagcattctcaggactctgcctgcccctgggggcttccagagcaagactacggggtggtctttcccactcagaacttgtaagtcacacgacttgcccgagccagaggtgact

SEQ ID NO: 2912 - DNA, 122 bp, Homo sapiens
  misc_feature (61)..(62): /note="This region represents a CpG dinucleotide"
  misc_feature (61)..(61): /note="Nucleotide may be methylated to form 5-methylcytosine"
ccacttggagccccgggtcctcgcgcgctcacagcggcgacgtactggctcataaccatccgtgcatacaaccatctggagacgaacacacacacgcacacgcgcgcgcacacacacacaca

SEQ ID NO: 2913 - DNA, 122 bp, Homo sapiens
  misc_feature (61)..(62): /note="This region represents a CpG dinucleotide"
  misc_feature (61)..(61): /note="Nucleotide may be methylated to form 5-methylcytosine"
ttttgtagtgttttgatattttagtggttgaaattcttatgttttgttaccgaagctccccgtggtcgctttctgatagaggtgtggagtggggtggtgatcaagattgttagaagaaaatg

SEQ ID NO: 2914 - DNA, 122 bp, Homo sapiens
  misc_feature (61)..(62): /note="This region represents a CpG dinucleotide"
  misc_feature (61)..(61): /note="Nucleotide may be methylated to form 5-methylcytosine"
ctctcccacccctcactcttctggctcctctgagtttaaattagtcatttccccagcacccgccatgccctcctgggccactgagtcggcacacgccgtctctctgcctgccatgtctctgg

SEQ ID NO: 2915 - DNA, 122 bp, Homo sapiens
  misc_feature (61)..(62): /note="This region represents a CpG dinucleotide"
  misc_feature (61)..(61): /note="Nucleotide may be methylated to form 5-methylcytosine"
tgccaccgaaaacaacgtgagaaggtaatgctttagaccactgccgtggaattctgccatcgactggtctgccacaagcatggtttccacatagcggtgactggacacaaatcgcttctttc

SEQ ID NO: 2916 - DNA, 122 bp, Homo sapiens
  misc_feature (61)..(62): /note="This region represents a CpG dinucleotide"
  misc_feature (61)..(61): /note="Nucleotide may be methylated to form 5-methylcytosine"
tgttataagcccaaacacaagcaaaattaaacaataattgtttagtgatacacatacatgcgatttaaaaaaatgtttagtgcaagggaatgataaacatcccttttgtggttggtgagaag

SEQ ID NO: 2917 - DNA, 122 bp, Homo sapiens
  misc_feature (61)..(62): /note="This region represents a CpG dinucleotide"
  misc_feature (61)..(61): /note="Nucleotide may be methylated to form 5-methylcytosine"
aggagcagagctataaacagaattcagaattctcctcctcctctggggctatctacttagcgcttttgccatttacttcctgagacagactcatgggggatcggggctcaggtgcacctgga

SEQ ID NO: 2918 - DNA, 122 bp, Homo sapiens
  misc_feature (61)..(62): /note="This region represents a CpG dinucleotide"
  misc_feature (61)..(61): /note="Nucleotide may be methylated to form 5-methylcytosine"
agggttgaggtagccactgtgtttcaggccaagatagttgttaatgggatatcaggaacgcgactgggcttgacgggaagcaaggctggagttacaggctgggcttggcgggaaacaaagct

SEQ ID NO: 2919 - DNA, 122 bp, Homo sapiens
  misc_feature (61)..(62): /note="This region represents a CpG dinucleotide"
  misc_feature (61)..(61): /note="Nucleotide may be methylated to form 5-methylcytosine"
acgctcgcaagcaattatttatgcatgcggtccacgcactcagtttgagaaacactgactcgacttaaaagtctttataatgctcagatttctgaaatgctattgacctgaaaacatctcat

SEQ ID NO: 2920 - DNA, 122 bp, Homo sapiens
  misc_feature (61)..(62): /note="This region represents a CpG dinucleotide"
  misc_feature (61)..(61): /note="Nucleotide may be methylated to form 5-methylcytosine"
gtggcaagtctcaaaacatttatttgagagaatctaatcctctagtagttgaattcccaacgctcctattttaggacgtcattcatggcgtggagattaaaccttcatgtgtcctttactat

SEQ ID NO: 2921 - DNA, 122 bp, Homo sapiens
  misc_feature (61)..(62): /note="This region represents a CpG dinucleotide"
  misc_feature (61)..(61): /note="Nucleotide may be methylated to form 5-methylcytosine"
tgcaaaacgaccgactctattgaagacacactgggtggcgcgggaggttcctgccaatgccgggaggaagagcaacccaggacgcctgtgcctgggagggatggaaaggccaggggagggtg

SEQ ID NO: 2922 - DNA, 122 bp, Homo sapiens
  misc_feature (61)..(62): /note="This region represents a CpG dinucleotide"
  misc_feature (61)..(61): /note="Nucleotide may be methylated to form 5-methylcytosine"
actcttgctcgatggtaaacataacacgcgctgcttgcagaacatgtggaaacactgaaacgcttaaaggagagaacatggtcccggtacccggccttcaagggagctgctggcgcctgttc

SEQ ID NO: 2923 - DNA, 122 bp, Homo sapiens
  misc_feature (61)..(62): /note="This region represents a CpG dinucleotide"
  misc_feature (61)..(61): /note="Nucleotide may be methylated to form 5-methylcytosine"
ttaaccaaaggttaaaagaatctgagacagttcaagaactgttctgctttgctttctatgcggttttgtgaactcttgctttgttataaaacaaattcactttcaagtcttttgaccaaatt

SEQ ID NO: 2924 - DNA, 122 bp, Homo sapiens
  misc_feature (61)..(62): /note="This region represents a CpG dinucleotide"
  misc_feature (61)..(61): /note="Nucleotide may be methylated to form 5-methylcytosine"
ctgcttccgccctgcgccgggcacttccgcccgcacccaccaggcgccggccccaggccccgcacttccgccccacgccggcagcactgccgctgggcgttctatctcaggtggtgtcccgt

SEQ ID NO: 2925 - DNA, 122 bp, Homo sapiens
  misc_feature (61)..(62): /note="This region represents a CpG dinucleotide"
  misc_feature (61)..(61): /note="Nucleotide may be methylated to form 5-methylcytosine"
tcatatatcagcttcttgggtatcagtttcctgagggcagaaaaccatgttgatgtggcacgctgtgtccagcaaatagtaggtactcagtatgttagtcaaatgactgaatcaagtaagca

SEQ ID NO: 2926 - DNA, 122 bp, Homo sapiens
  misc_feature (61)..(62): /note="This region represents a CpG dinucleotide"
  misc_feature (61)..(61): /note="Nucleotide may be methylated to form 5-methylcytosine"
gagaacacttccatatataaagaagccttatgacctgcctgcaactgcagattttgcaaacgtgatcttactttttctctcttttgggatatgctcccctttaaactgaagctcaacctcct

SEQ ID NO: 2927 - DNA, 122 bp, Homo sapiens
  misc_feature (61)..(62): /note="This region represents a CpG dinucleotide"
  misc_feature (61)..(61): /note="Nucleotide may be methylated to form 5-methylcytosine"
caagcactgttaagaactgggctacaaagactatgaggcctgactcattcttttcaggcacgagcataccaatacaggaaacagaaaagtacaagttgcaggaggtgtatgtaggaaatgcc

SEQ ID NO: 2928 - DNA, 122 bp, Homo sapiens
  misc_feature (61)..(62): /note="This region represents a CpG dinucleotide"
  misc_feature (61)..(61): /note="Nucleotide may be methylated to form 5-methylcytosine"
gaaaggtgatttaagtgtgaaagcatttttgattatggcaattgcatacattctttcaatcgaattctagctggattaacctgtctttagtatatggctatgaataatttatattattatct

SEQ ID NO: 2929 - DNA, 122 bp, Homo sapiens
  misc_feature (61)..(62): /note="This region represents a CpG dinucleotide"
  misc_feature (61)..(61): /note="Nucleotide may be methylated to form 5-methylcytosine"
tttcgaaacgccaataagacttcggtacactgagagacactacttgaaaatactcaatttcgattgccatcagcctgaaagaaagcactgggattttcttaaagtttaggagaaaataaata

SEQ ID NO: 2930 - DNA, 122 bp, Homo sapiens
  misc_feature (61)..(62): /note="This region represents a CpG dinucleotide"
  misc_feature (61)..(61): /note="Nucleotide may be methylated to form 5-methylcytosine"
gaagccagggatgcattggttttaatacagcaaaaagtatcccccagggttgcaaaatgacgtgggtttcacagggacaaacagtgatcacattagaaaataatgttatttccaaacacaag

SEQ ID NO: 2931 - DNA, 122 bp, Homo sapiens
  misc_feature (61)..(62): /note="This region represents a CpG dinucleotide"
  misc_feature (61)..(61): /note="Nucleotide may be methylated to form 5-methylcytosine"
ctgagaaacactgggaaccaaagacagtgatgctcaacaacagcgagactcagccaatggcgctggatctgcttttcaaaacctccatgaactgagttgcacatgactcacaagccacgtgc

SEQ ID NO: 2932 - DNA, 122 bp, Homo sapiens
  misc_feature (61)..(62): /note="This region represents a CpG dinucleotide"
  misc_feature (61)..(61): /note="Nucleotide may be methylated to form 5-methylcytosine"
cccgacccattcacggcccctcccgcagcccctttcttcgggccctttgtggcctcaccgcggctgcctggctgctctggctgaggatagccatgagtgtttgtccccagagccggcctttg

SEQ ID NO: 2933 - DNA, 122 bp, Homo sapiens
  misc_feature (61)..(62): /note="This region represents a CpG dinucleotide"
  misc_feature (61)..(61): /note="Nucleotide may be methylated to form 5-methylcytosine"
gttcttgtctgactctttagctgcatatgtaaagagcacagactttgaaacctgagctcccgcgttcgaatccccactgtaccactatctaaacatggcatcttgggcaagtgattcaagca

SEQ ID NO: 2934 - DNA, 122 bp, Homo sapiens
  misc_feature (61)..(62): /note="This region represents a CpG dinucleotide"
  misc_feature (61)..(61): /note="Nucleotide may be methylated to form 5-methylcytosine"
ccattcaggccatgcgggcagccacgtgcaaaggccctgagccaggagtatacctagtatcgagctaagaggccagtgtggctggagctgaataaacagtggggagtcgtagcagatgagat

SEQ ID NO: 2935 - DNA, 122 bp, Homo sapiens
  misc_feature (61)..(62): /note="This region represents a CpG dinucleotide"
  misc_feature (61)..(61): /note="Nucleotide may be methylated to form 5-methylcytosine"
cgtgctcccaggctcaccgtgcggttttctttataggacaatacatggcttgatatacaacgccctgaagctcttcatggagatgaaccaaaagctatttgatgactgtacacaacagttca

SEQ ID NO: 2936 - DNA, 122 bp, Homo sapiens
  misc_feature (61)..(62): /note="This region represents a CpG dinucleotide"
  misc_feature (61)..(61): /note="Nucleotide may be methylated to form 5-methylcytosine"
tttcactgcttaagcagcagttttacataactgccaaactgttattcaaggtggctggaccgttttacagcccccgttgtatgcgtcccagttgcctcccccagcagcatgtggtgtggttg

SEQ ID NO: 2937 - DNA, 122 bp, Homo sapiens
  misc_feature (61)..(62): /note="This region represents a CpG dinucleotide"
  misc_feature (61)..(61): /note="Nucleotide may be methylated to form 5-methylcytosine"
agccccaactgcaggatagcagctgctcccttaaagaccagaacaccaagaaactcaacacggtccaggctaccagcatattctgttctagaaagttgtttgtgtttgtgtttgtgtctgtc

SEQ ID NO: 2938 - DNA, 122 bp, Homo sapiens
  misc_feature (61)..(62): /note="This region represents a CpG dinucleotide"
  misc_feature (61)..(61): /note="Nucleotide may be methylated to form 5-methylcytosine"
ctcaccccagtctgtctggcgcccatgctccccttctgctcatactctgtacattcacctcgcgggaaagcccagactcccaaggctcctctgagaagatttgagaggatccagcagctata

SEQ ID NO: 2939 - DNA, 122 bp, Homo sapiens
  misc_feature (61)..(62): /note="This region represents a CpG dinucleotide"
  misc_feature (61)..(61): /note="Nucleotide may be methylated to form 5-methylcytosine"
ctccaggaagtctttctggattagctatctcttgacccttgtgtgtcctggttattgccccgtcaccctacattgtgatcacctgttcaggtatgtttccgttatctacaaaccatcccaaa

SEQ ID NO: 2940 - DNA, 122 bp, Homo sapiens
  misc_feature (61)..(62): /note="This region represents a CpG dinucleotide"
  misc_feature (61)..(61): /note="Nucleotide may be methylated to form 5-methylcytosine"
ttttctctctctgcacatggatgaacagtgagattctgaatactcccttgctgaaccaagcgatggcaggtcctgctggacccacctggggaagggagacagctgtgcgacagctttcagag

SEQ ID NO: 2941 - DNA, 122 bp, Homo sapiens
  misc_feature (61)..(62): /note="This region represents a CpG dinucleotide"
  misc_feature (61)..(61): /note="Nucleotide may be methylated to form 5-methylcytosine"
tcccccagagtgacagggaacccccagggaagaagggcccctgtggggcatgcagaaaaacgcctgccccctggtgtgaggtcacagactcagtggccaagctcaacaatgctctgggaact

SEQ ID NO: 2942 - DNA, 122 bp, Homo sapiens
  misc_feature (61)..(62): /note="This region represents a CpG dinucleotide"
  misc_feature (61)..(61): /note="Nucleotide may be methylated to form 5-methylcytosine"
cgctcacatagaaatttctgtcaaggataccaatgataaccccccggttttcagcagagacgaatatagaattagtcttagtgaaaatctgccccctgggtcccctgtgttgcaagtgacag

SEQ ID NO: 2943 - DNA, 122 bp, Homo sapiens
  misc_feature (61)..(62): /note="This region represents a CpG dinucleotide"
  misc_feature (61)..(61): /note="Nucleotide may be methylated to form 5-methylcytosine"
tgaaagagaaaaaggtagctttgggttctccgggtggatgagacagcgaagagctgtccgcgacctgatggtgctgaaggcaggggagggagaccggggttcaggtgcacccccagaccagg

SEQ ID NO: 2944 - DNA, 122 bp, Homo sapiens
  misc_feature (61)..(62): /note="This region represents a CpG dinucleotide"
  misc_feature (61)..(61): /note="Nucleotide may be methylated to form 5-methylcytosine"
cccatacacatctacctcattccttttaacagttgtatagaactctcttgtatgaatggacgatggttcagttaattccagtgctgggaattcatatatattaactgattttaatctcagat

SEQ ID NO: 2945 - DNA, 122 bp, Homo sapiens
  misc_feature (61)..(62): /note="This region represents a CpG dinucleotide"
  misc_feature (61)..(61): /note="Nucleotide may be methylated to form 5-methylcytosine"
gcaagaaaaggttaaatgacttgtgcactgggaagaaaaaaaaaaaaaacagttgtcatccgtggtgccaaaaatagaagttctgatttccagtcctgtgatctcaacagaagacagaatgt

SEQ ID NO: 2946 - DNA, 122 bp, Homo sapiens
  misc_feature (61)..(62): /note="This region represents a CpG dinucleotide"
  misc_feature (61)..(61): /note="Nucleotide may be methylated to form 5-methylcytosine"
tatttactgtgaaaattaagcggctccaattccatttcgatgtgtaggctataggtgttacggcaagagctgcctggtacatctgaaggccgctacgcccaccttcagtgccagtttcctta

SEQ ID NO: 2947 - DNA, 122 bp, Homo sapiens
  misc_feature (61)..(62): /note="This region represents a CpG dinucleotide"
  misc_feature (61)..(61): /note="Nucleotide may be methylated to form 5-methylcytosine"
cacaaaaagtggttggagcctcagatttgcctagcgttccccctaaacactcacatgggacggtactttgtgtgtgcatgttattgtataaatgcatgtgccctcaactatcagaaagcata

SEQ ID NO: 2948 - DNA, 122 bp, Homo sapiens
  misc_feature (61)..(62): /note="This region represents a CpG dinucleotide"
  misc_feature (61)..(61): /note="Nucleotide may be methylated to form 5-methylcytosine"
gtcagctattgttcaaagcattgttagagctcattgttgatgtcttctgagcctgcagcacgttcttttgaaaatgatggtaaatcttcattgacagatttgtcttgtggaaagagccaaaa

SEQ ID NO: 2949 - DNA, 122 bp, Homo sapiens
  misc_feature (61)..(62): /note="This region represents a CpG dinucleotide"
  misc_feature (61)..(61): /note="Nucleotide may be methylated to form 5-methylcytosine"
aaactcacaggtcaaggaaaaactctgtgatgtgcggtggggcgatttgccggcagccggcggcatcctcgcctcgggcctgtttagaacccagagctggccttcttcatttgacacctgtc

SEQ ID NO: 2950 - DNA, 122 bp, Homo sapiens
  misc_feature (61)..(62): /note="This region represents a CpG dinucleotide"
  misc_feature (61)..(61): /note="Nucleotide may be methylated to form 5-methylcytosine"
gtgcatctatgcctaggaacagctccatgagaacatgttctctctgtttaagtgattacacgtaaacagggacaaaaatttaaattcaaaccataagtcaccagatttaagaataacctctc

SEQ ID NO: 2951 - DNA, 122 bp, Homo sapiens
  misc_feature (61)..(62): /note="This region represents a CpG dinucleotide"
  misc_feature (61)..(61): /note="Nucleotide may be methylated to form 5-methylcytosine"
ttcccaaaggggttgctgggggaaccgcgtgttccgccccggtcaaggccacaaagctggcgtcagcggggctcacaaaacacctggcagcgccactcccctcaggctgcccgtaacctaga

SEQ ID NO: 2952 - DNA, 122 bp, Homo sapiens
  misc_feature (61)..(62): /note="This region represents a CpG dinucleotide"
  misc_feature (61)..(61): /note="Nucleotide may be methylated to form 5-methylcytosine"
tccataggtttcaccagacactataagcagttcatggcacaaaaggctctaagacccctgcgttagatcatggtcttcacgagcctggtcaaaactgggcacgctggctttccaaccgagag

SEQ ID NO: 2953 - DNA, 122 bp, Homo sapiens
  misc_feature (61)..(62): /note="This region represents a CpG dinucleotide"
  misc_feature (61)..(61): /note="Nucleotide may be methylated to form 5-methylcytosine"
cctgaagaggccaagtatgctgagtttcatttcaggaccaagtagctatgatgggtgtaacggcctggtccactccagtggagaaagaaactgagaactcaaatgggtcaagagagttactt

SEQ ID NO: 2954 - DNA, 122 bp, Homo sapiens
  misc_feature (61)..(62): /note="This region represents a CpG dinucleotide"
  misc_feature (61)..(61): /note="Nucleotide may be methylated to form 5-methylcytosine"
agcagatctggagctgggcctaagattctgcgtttctaacaagctcccacctaatacctacgcaactgattcttgcatcacacttttttgagtggcaagactggacttagttctaatgatgt

SEQ ID NO: 2955 - DNA, 122 bp, Homo sapiens
  misc_feature (61)..(62): /note="This region represents a CpG dinucleotide"
  misc_feature (61)..(61): /note="Nucleotide may be methylated to form 5-methylcytosine"
gctaggtacctagtagtctcggtaaacaattacaaaaataactgccaatgaccatttccccgctagccatttccagctgctgatctgatccagccctggcttcgttgcctggagcctggatt

SEQ ID NO: 2956 - DNA, 122 bp, Homo sapiens
  misc_feature (61)..(62): /note="This region represents a CpG dinucleotide"
  misc_feature (61)..(61): /note="Nucleotide may be methylated to form 5-methylcytosine"
cggccaaggggtcaggcatgctaatgacaaaattaccatttaccttttacctggcaggcccggtgcctgacattataaatgtaggtaacctttcacctgaagctctcttttgctctagtaga

SEQ ID NO: 2957 - DNA, 122 bp, Homo sapiens
  misc_feature (61)..(62): /note="This region represents a CpG dinucleotide"
  misc_feature (61)..(61): /note="Nucleotide may be methylated to form 5-methylcytosine"
agattgagaaggaaaataaaaggaagaagaaaacatgacatagaggacataatgtttcctcgtgctgtggtatagaatgcagaaattttatcagctaaagctgaaggggaattttagtgcct

SEQ ID NO: 2958 - DNA, 122 bp, Homo sapiens
  misc_feature (61)..(62): /note="This region represents a CpG dinucleotide"
  misc_feature (61)..(61): /note="Nucleotide may be methylated to form 5-methylcytosine"
ataaaaactgttgttaagactgaggctctaaaggtttctggtgatttgtcttcagtgacacgtgcatttttgagctgtggcatttaggtctcctgactcatattgagttgcccaatattaaa

SEQ ID NO: 2959 - DNA, 122 bp, Homo sapiens
  misc_feature (61)..(62): /note="This region represents a CpG dinucleotide"
  misc_feature (61)..(61): /note="Nucleotide may be methylated to form 5-methylcytosine"
cttattctatttcctccctctgctgagagattttacttctagttgctgcttctgtaaagacgttctttccatgtgtttccaagcacatttctgagtttagttccatattatgtagcacatgg

SEQ ID NO: 2960 - DNA, 122 bp, Homo sapiens
  misc_feature (61)..(62): /note="This region represents a CpG dinucleotide"
  misc_feature (61)..(61): /note="Nucleotide may be methylated to form 5-methylcytosine"
actcaaaactagcagccttagggctattcggtaagtgagtcagagcaccatgtcaacatgcgagatcagttgtctcctatacccaaaacaaggctgaatttctttccaggggttataattta

SEQ ID NO: 2961 - DNA, 122 bp, Homo sapiens
  misc_feature (61)..(62): /note="This region represents a CpG dinucleotide"
  misc_feature (61)..(61): /note="Nucleotide may be methylated to form 5-methylcytosine"
cagcaggtggcctctcaatggctgaaacttccaaggtatctgcagtcagtctgctaacaccgtttttctcccctgctgctgcagcaagacagagaatgggtttgtaacaggggacaagataa

SEQ ID NO: 2962 - DNA, 122 bp, Homo sapiens
  misc_feature (61)..(62): /note="This region represents a CpG dinucleotide"
  misc_feature (61)..(61): /note="Nucleotide may be methylated to form 5-methylcytosine"
gatcctctcgcctcggcctccctcccaaagtgttgggatcaccggcctgagccccctgcccggcctcgctctacgttttttaggcgcattctgaacgtgaagtgtatacactgaattctcac

SEQ ID NO: 2963 - DNA, 122 bp, Homo sapiens
  misc_feature (61)..(62): /note="This region represents a CpG dinucleotide"
  misc_feature (61)..(61): /note="Nucleotide may be methylated to form 5-methylcytosine"
ccaaggaattatatgcttttcctcatctctttagttaagaaattctaaagtaaagccgggcgtagtgtctcacatctgtaatcccagcactttgggaggctgaggtgggtggatcaccttga

SEQ ID NO: 2964 - DNA, 122 bp, Homo sapiens
  misc_feature (61)..(62): /note="This region represents a CpG dinucleotide"
  misc_feature (61)..(61): /note="Nucleotide may be methylated to form 5-methylcytosine"
tcacccacaccctctgaagaaattattagaacctgtctcctgcctccttccatgagagtccgtgggtcccctagcggcgtgcagcctgctgggatggaaagggcccgtgctgcaactctgca

SEQ ID NO: 2965 - DNA, 122 bp, Homo sapiens
  misc_feature (61)..(62): /note="This region represents a CpG dinucleotide"
  misc_feature (61)..(61): /note="Nucleotide may be methylated to form 5-methylcytosine"
ggccttttcgaagagtttagctacgcaaccgttttccattaatgttaccatcttgtgactcgggtgacctgtgcgacttgggtcgtgaattctcaggtcggccttcccaatgcttgagaagg

SEQ ID NO: 2966 - DNA, 122 bp, Homo sapiens
  misc_feature (61)..(62): /note="This region represents a CpG dinucleotide"
  misc_feature (61)..(61): /note="Nucleotide may be methylated to form 5-methylcytosine"
ctcctccccctcccgcagacgccgccaccaaagttcgagccgctcctccccagcccagcgcgcgccccgccccgtgccccacgtgcagcgcccccaccaatgggcgcaccgcgcgcgcggac

SEQ ID NO: 2967 - DNA, 122 bp, Homo sapiens
  misc_feature (61)..(62): /note="This region represents a CpG dinucleotide"
  misc_feature (61)..(61): /note="Nucleotide may be methylated to form 5-methylcytosine"
aagcaacacacacatacaaaactctggttatgtgagtgtcaaagaaaaaccagagatggacggtaaagtggtaaaaacagattttattcaggaatattgcaatagtgggaaagagacctcag

SEQ ID NO: 2968 - DNA, 122 bp, Homo sapiens
  misc_feature (61)..(62): /note="This region represents a CpG dinucleotide"
  misc_feature (61)..(61): /note="Nucleotide may be methylated to form 5-methylcytosine"
acttctctctgtctctgttgctcttgttctcattaatgagctaattacagttcccaagagcgccatgtcttcatggttttgcccatggagttcattctgcctcacaccttttcctggttcct

SEQ ID NO: 2969 - DNA, 122 bp, Homo sapiens
  misc_feature (61)..(62): /note="This region represents a CpG dinucleotide"
  misc_feature (61)..(61): /note="Nucleotide may be methylated to form 5-methylcytosine"
acaggaaaccccacaaacccacaaactgcatgtgtgctgtgattcattctattgatgatacgatatgaatagacttcgctgaagaacttcttgatttggaaaaggtagtgcagcacataccg

SEQ ID NO: 2970 - DNA, 122 bp, Homo sapiens
  misc_feature (61)..(62): /note="This region represents a CpG dinucleotide"
  misc_feature (61)..(61): /note="Nucleotide may be methylated to form 5-methylcytosine"
cgttgcggctgttttccccccgtcagcgaggctttttgttgccgcggctttttgcccaggcgtttgctgcctccttatttaatcagagccttaatttgaacgtcaggtcatcaaatctggaa

SEQ ID NO: 2971 - DNA, 122 bp, Homo sapiens
  misc_feature (61)..(62): /note="This region represents a CpG dinucleotide"
  misc_feature (61)..(61): /note="Nucleotide may be methylated to form 5-methylcytosine"
tccccactgtccttcaatcagtagtgttgcctcttcctggagacgtggttcttcttgccacgtgtgcttttccttctttacctgttacttccgttattgaataagttcatgcttatagacct

SEQ ID NO: 2972 - DNA, 122 bp, Homo sapiens
  misc_feature (61)..(62): /note="This region represents a CpG dinucleotide"
  misc_feature (61)..(61): /note="Nucleotide may be methylated to form 5-methylcytosine"
caccaggagcaaacctgtggtccacaaaatcgggtgtactgacccactgcaatgagggagcgcctcccaagaacgaagggaaaggcagagtttgaaggggttgagggaaggcagagtttagg

SEQ ID NO: 2973 - DNA, 122 bp, Homo sapiens
  misc_feature (61)..(62): /note="This region represents a CpG dinucleotide"
  misc_feature (61)..(61): /note="Nucleotide may be methylated to form 5-methylcytosine"
cattttttaagctaagcttttcccatttaaatactctctgatgagcttcctcatgattgtcgtgagttgtaaggccttgcaccttacaattgagaacatgctttacatctggaaccattgga

SEQ ID NO: 2974 - DNA, 122 bp, Homo sapiens
  misc_feature (61)..(62): /note="This region represents a CpG dinucleotide"
  misc_feature (61)..(61): /note="Nucleotide may be methylated to form 5-methylcytosine"
tatttgtttcccgagtctattgatctccctgaattctacagaaatgcattctaagctaggcgcctgtatgtcagaatcagttctgcaggtagcttccgtgctccaagtatgacatgtattgt

SEQ ID NO: 2975 - DNA, 122 bp, Homo sapiens
  misc_feature (61)..(62): /note="This region represents a CpG dinucleotide"
  misc_feature (61)..(61): /note="Nucleotide may be methylated to form 5-methylcytosine"
ggcattcatcatttctccccagctgcacccatttcccacggctgctgcaacaatgtgccacgaactgggtggctttgaacaactgacatttattgtctcacaggtctagaggcggaagtcca

SEQ ID NO: 2976 - DNA, 122 bp, Homo sapiens
  misc_feature (61)..(62): /note="This region represents a CpG dinucleotide"
  misc_feature (61)..(61): /note="Nucleotide may be methylated to form 5-methylcytosine"
ataagtcatttactgtggtttaataccaggactacccacgaggcttgtccaaaagtaagccgtctcctactccagcctgatttcttactatcaagagaagacttctcccttttaactgccct

SEQ ID NO: 2977 - DNA, 122 bp, Homo sapiens
  misc_feature (61)..(62): /note="This region represents a CpG dinucleotide"
  misc_feature (61)..(61): /note="Nucleotide may be methylated to form 5-methylcytosine"
caagcacaaagcgccacttctcttttctgtataactgtgggtttgttttaggtaagcccccgtcttccctgtgcaagtttctgtggagcccaccatgtatatgcctcaaaaggggaggaaac

SEQ ID NO: 2978 - DNA, 122 bp, Homo sapiens
  misc_feature (61)..(62): /note="This region represents a CpG dinucleotide"
  misc_feature (61)..(61): /note="Nucleotide may be methylated to form 5-methylcytosine"
actgaatgacaataataaatgtaggctcttatttaattatgctgcggtttattaactatccgataataaggaaaacccctagtttattatagatctgtggggtgtgtgaatatgtgtgtgtg

SEQ ID NO: 2979 - DNA, 122 bp, Homo sapiens
  misc_feature (61)..(62): /note="This region represents a CpG dinucleotide"
  misc_feature (61)..(61): /note="Nucleotide may be methylated to form 5-methylcytosine"
ttcccttggtcaagtcacttcccttcttggagattttagttttcctgtcgataaagtaggcgtgatgatatcttcctatcaggttgatgtgagatttcaatgaagctccgcatacaaaatgc

SEQ ID NO: 2980 - DNA, 122 bp, Homo sapiens
  misc_feature (61)..(62): /note="This region represents a CpG dinucleotide"
  misc_feature (61)..(61): /note="Nucleotide may be methylated to form 5-methylcytosine"
ccaacatggtgaaaccccatctccactaaacatacaaaactagccaggagtggtggtgcacgcctgtagtcccagctactcagaaggctgaggcaggagaatcacttgaacctggaaggtgg

SEQ ID NO: 2981 - DNA, 122 bp, Homo sapiens
  misc_feature (61)..(62): /note="This region represents a CpG dinucleotide"
  misc_feature (61)..(61): /note="Nucleotide may be methylated to form 5-methylcytosine"
aggctggggttgaggactaggggacggccaacgtggctgggtggagggcaggcgggtgggcgtggagaggttggcagagtgtcagggcctgggcgggtttagcctcacccagaagtcaagag

SEQ ID NO: 2982 - DNA, 122 bp, Homo sapiens
  misc_feature (61)..(62): /note="This region represents a CpG dinucleotide"
  misc_feature (61)..(61): /note="Nucleotide may be methylated to form 5-methylcytosine"
gaatcagcaccataggaaagcgggggtggtggtggggaaccattatgagaaagtacagcccgaaaataaacttagccttgtgcaaagatgttacataataaaggacatcaccccatgaccta

SEQ ID NO: 2983 - DNA, 122 bp, Homo sapiens
  misc_feature (61)..(62): /note="This region represents a CpG dinucleotide"
  misc_feature (61)..(61): /note="Nucleotide may be methylated to form 5-methylcytosine"
gtgcagtaggagagtcagtgagagggtgagagagacggggagacggaaacctcttaaccacggctcacacggcgtctttggtgaggtggtttaggtttacatctcttttttctctctttctt

SEQ ID NO: 2984 - DNA, 122 bp, Homo sapiens
  misc_feature (61)..(62): /note="This region represents a CpG dinucleotide"
  misc_feature (61)..(61): /note="Nucleotide may be methylated to form 5-methylcytosine"
tgccattgtctttctcactagctcccagtgcagcacaggaacctaacaatagtgttttcacgccgtgagccctgctaactggcaaagccggctcgttgtctctggtttaaaggaagagtggg

SEQ ID NO: 2985 - DNA, 122 bp, Homo sapiens
  misc_feature (61)..(62): /note="This region represents a CpG dinucleotide"
  misc_feature (61)..(61): /note="Nucleotide may be methylated to form 5-methylcytosine"
taagcgctcagcgggcagcagctctctcccgcctcttccttatggccactcgcactgactcgattcctggccgccccgtccctctgaccaccttgggctgtccctggcggcagctcctctcc

SEQ ID NO: 2986 - DNA, 122 bp, Homo sapiens
  misc_feature (61)..(62): /note="This region represents a CpG dinucleotide"
  misc_feature (61)..(61): /note="Nucleotide may be methylated to form 5-methylcytosine"
ccttggagaaagtgaaataagacattagactttcagtaatctcatatggtgatgatcaatcgaaacctggagaagaaggccaatttatagaaattgtatctgcttcactgggtggctggaac

SEQ ID NO: 2987 - DNA, 122 bp, Homo sapiens
  misc_feature (61)..(62): /note="This region represents a CpG dinucleotide"
  misc_feature (61)..(61): /note="Nucleotide may be methylated to form 5-methylcytosine"
tagtgtgctgatggcattgaccatctacactgggttgaatagggccacccccaaaattcacgtctaccaggaacctcagaatgtgaacttatttggaaatagtttctttgcaggtgtaatta

SEQ ID NO: 2988 - DNA, 122 bp, Homo sapiens
  misc_feature (61)..(62): /note="This region represents a CpG dinucleotide"
  misc_feature (61)..(61): /note="Nucleotide may be methylated to form 5-methylcytosine"
gggacagaggcttagtagacacaggcagcaaatgtgctcagacacctggcatcaagggctcgtgcatcaagttagagtttgggtcttaccatgtgggctgtggagtgcctctgaatattcta

SEQ ID NO: 2989 - DNA, 122 bp, Homo sapiens
  misc_feature (61)..(62): /note="This region represents a CpG dinucleotide"
  misc_feature (61)..(61): /note="Nucleotide may be methylated to form 5-methylcytosine"
gtgagtcagcacaaatttcaaccaagtgccttgacttcctagtagagtcacagcttccttcgtggaacagatatcatgcctttacaaaagcactgaaggaatatttgagggttcacaaagcc

SEQ ID NO: 2990 - DNA, 122 bp, Homo sapiens
  misc_feature (61)..(62): /note="This region represents a CpG dinucleotide"
  misc_feature (61)..(61): /note="Nucleotide may be methylated to form 5-methylcytosine"
aatctgcttcctacactcacttcccaaatacctctggaggcatccaatacttcattcaaacgcactcaaggcgaagcgctcaaaccgtcactgaacatttctctggcaggttgccagtactt

SEQ ID NO: 2991 - DNA, 122 bp, Homo sapiens
  misc_feature (61)..(62): /note="This region represents a CpG dinucleotide"
  misc_feature (61)..(61): /note="Nucleotide may be methylated to form 5-methylcytosine"
aagtcagtaaaacgcgtgaattgcgtggagcaggcactcccagaacaagtttggaggatccgtgatggctgagctcttccgagtccctggagatgtccctccctcgcgattggtgcctgccc

SEQ ID NO: 2992 - DNA, 122 bp, Homo sapiens
  misc_feature (61)..(62): /note="This region represents a CpG dinucleotide"
  misc_feature (61)..(61): /note="Nucleotide may be methylated to form 5-methylcytosine"
gtcccagggattttccggcttaatttaggagggctgagaagagagggacgtggccggctccggaagaacctcgacagggtcttcgaggctttggaacagggtctcaagctttagaaatgtcc

SEQ ID NO: 2993 - DNA, 122 bp, Homo sapiens
  misc_feature (61)..(62): /note="This region represents a CpG dinucleotide"
  misc_feature (61)..(61): /note="Nucleotide may be methylated to form 5-methylcytosine"
tatcgaacaggctcaagaggggagggggtggggtctggctttttaaggatgggtctaatgcgttcagctgttatcacactttgctgattgtaatcactcgttttatggtttcttttccagct

SEQ ID NO: 2994 - DNA, 122 bp, Homo sapiens
  misc_feature (61)..(62): /note="This region represents a CpG dinucleotide"
  misc_feature (61)..(61): /note="Nucleotide may be methylated to form 5-methylcytosine"
taggcaatgttggggaggtatttttgaactgagggaactttaaggctcagtagcactgggcgagtccctgcatgtcacaggaaccagaggcttcaaagtctccaaatggcttcaggatccag

SEQ ID NO: 2995 - DNA, 122 bp, Homo sapiens
  misc_feature (61)..(62): /note="This region represents a CpG dinucleotide"
  misc_feature (61)..(61): /note="Nucleotide may be methylated to form 5-methylcytosine"
taaagccatcaggcccaaggtttggtggtgattgcttcatatttactgttagtccagcaacggggatggtacttttacagtctttggacagactagtgagtgtgacatttaaagtgttgatt

SEQ ID NO: 2996 - DNA, 122 bp, Homo sapiens
  misc_feature (61)..(62): /note="This region represents a CpG dinucleotide"
  misc_feature (61)..(61): /note="Nucleotide may be methylated to form 5-methylcytosine"
gtgctttggtcagagcaaatctatgctttaaaaagatagtttcggcttatgttctattggcggtagtggtgtccagaggaaagctgcattattaaaattattattagtttggtgcaattact

SEQ ID NO: 2997 - DNA, 122 bp, Homo sapiens
  misc_feature (61)..(62): /note="This region represents a CpG dinucleotide"
  misc_feature (61)..(61): /note="Nucleotide may be methylated to form 5-methylcytosine"
ggggatagcccagggagggggcagtggtggcagccatgtggtgggtgcctggtcagagggcgggctcagtttggcagctctttaccagccagtaaggacagagatctcaacattttaatgtc

SEQ ID NO: 2998 - DNA, 122 bp, Homo sapiens
  misc_feature (61)..(62): /note="This region represents a CpG dinucleotide"
  misc_feature (61)..(61): /note="Nucleotide may be methylated to form 5-methylcytosine"
aaaccttttccacaaagggccacagaataaatattttcagctctgggggccattcaagcccgggggtgactactcaggtctgccattggagcagaaaacagagacgagaggtaagcaagtgg

SEQ ID NO: 2999 - DNA, 122 bp, Homo sapiens
  misc_feature (61)..(62): /note="This region represents a CpG dinucleotide"
  misc_feature (61)..(61): /note="Nucleotide may be methylated to form 5-methylcytosine"
tagaaaatttccatcagttcattcatgaaagaacaaagaacctggcaaaacttaaaaaaacgtttccaagaatcagataaaagaggacaaaccttagggagaagaaggcagctgctcatttc

SEQ ID NO: 3000 - DNA, 122 bp, Homo sapiens
  misc_feature (61)..(62): /note="This region represents a CpG dinucleotide"
  misc_feature (61)..(61): /note="Nucleotide may be methylated to form 5-methylcytosine"
taaatgaaaaccactcagattgcatcctttccttcccagtctcccaaaggaagaaaagaacgatcatcaatggcaaatggcagttgcagcaaagcaacatcaagagccggctttacacttag

SEQ ID NO: 3001 - DNA, 122 bp, Homo sapiens
  misc_feature (61)..(62): /note="This region represents a CpG dinucleotide"
  misc_feature (61)..(61): /note="Nucleotide may be methylated to form 5-methylcytosine"
tatatgtagcttgcttcgttaattctgaaggtcatcaaagattctgcccagaagacgcatcgtaatcggactgtaatcagatatttatgctatttcctgatctcagtcactacacacggccc

SEQ ID NO: 3002 - DNA, 122 bp, Homo sapiens
  misc_feature (61)..(62): /note="This region represents a CpG dinucleotide"
  misc_feature (61)..(61): /note="Nucleotide may be methylated to form 5-methylcytosine"
accaaaaccacagaaaataacaaatgttggtgagaatgtggggaaattggaaccctcctacgttgctgataggaataccacggagcagccactgtgaaaaacagtttggcaactcctcagag

SEQ ID NO: 3003 - DNA, 122 bp, Homo sapiens
  misc_feature (61)..(62): /note="This region represents a CpG dinucleotide"
  misc_feature (61)..(61): /note="Nucleotide may be methylated to form 5-methylcytosine"
gccggatgtttgagtttggtttttgtgatcgagcggagctgggaggggccgcccgggagccgccgccttatcgggctgtccccgcgctgtctcccgctgccccggcctcccaggctggcggc

SEQ ID NO: 3004 - DNA, 122 bp, Homo sapiens
  misc_feature (61)..(62): /note="This region represents a CpG dinucleotide"
  misc_feature (61)..(61): /note="Nucleotide may be methylated to form 5-methylcytosine"
tattcaatatcgttttgctttcttgtgtagactgagggtgtaaacctcgtttctgacagtcgcctataggacttttcagcaggctgtgggcctagaggtgggggatgtggaatcaagctaaa

SEQ ID NO: 3005 - DNA, 122 bp, Homo sapiens
  misc_feature (61)..(62): /note="This region represents a CpG dinucleotide"
  misc_feature (61)..(61): /note="Nucleotide may be methylated to form 5-methylcytosine"
cccttcccctcctccccttcccttccccagtcttcccctcccactctttcaagcccccagcgtgctgtgcagttattagtttaggttcatttagaatcggcttagcaaccccacacccctgg

SEQ ID NO: 3006 - DNA, 122 bp, Homo sapiens
  misc_feature (61)..(62): /note="This region represents a CpG dinucleotide"
  misc_feature (61)..(61): /note="Nucleotide may be methylated to form 5-methylcytosine"
cctcttacacatatgggtcgatgcctcacgtctccctaacgtgtaaaactgagctgtgcccggccaccttgggcacacgtcctcaggacctcccgaggctgtcacgggcctgtccttaactt

SEQ ID NO: 3007 - DNA, 122 bp, Homo sapiens
  misc_feature (61)..(62): /note="This region represents a CpG dinucleotide"
  misc_feature (61)..(61): /note="Nucleotide may be methylated to form 5-methylcytosine"
gcctaaatttcaagcttgtgaaatgatgagtctccttaattgctcctaagttcattaagacgtaaaacattcagcattttgcaccttatgaagagataaacagaaaataaaagtcaaattac

SEQ ID NO: 3008 - DNA, 122 bp, Homo sapiens
  misc_feature (61)..(62): /note="This region represents a CpG dinucleotide"
  misc_feature (61)..(61): /note="Nucleotide may be methylated to form 5-methylcytosine"
gatcgagactgtgatttcaccatccgtgagcgaggaaggaacccgggcgtgggtcacgcacggagctggggagatgaggggatctcccccagccgccttcctgtgaaagtggcgcagcccct

SEQ ID NO: 3009 - DNA, 122 bp, Homo sapiens
  misc_feature (61)..(62): /note="This region represents a CpG dinucleotide"
  misc_feature (61)..(61): /note="Nucleotide may be methylated to form 5-methylcytosine"
atttatggctagaagaactcgtatgtacactttagtttccagaactgtttggtaacctttcgtaccttattaaagattcttaaatctccgtgattgtggtaggaatttcttcttcacccacc

SEQ ID NO: 3010 - DNA, 122 bp, Homo sapiens
  misc_feature (61)..(62): /note="This region represents a CpG dinucleotide"
  misc_feature (61)..(61): /note="Nucleotide may be methylated to form 5-methylcytosine"
gaagccatattgtcagccagcacgcaggcaagggtaccagttcccagacaagctgagctacgtatcagtgagagtaggcatagtttgcaatctgtcccagtaccttagccagatacaagatg

SEQ ID NO: 3011 - DNA, 122 bp, Homo sapiens
  misc_feature (61)..(62): /note="This region represents a CpG dinucleotide"
  misc_feature (61)..(61): /note="Nucleotide may be methylated to form 5-methylcytosine"
ggaaccaggaaagcccaatgtgactagtgtgtcttgtttcaatagaaggaaatgtcaccacgaattccagtgtaaatgcaaaacaaactggaattgacttgggggtaggggagcttagcagt

SEQ ID NO: 3012 - DNA, 122 bp, Homo sapiens
  misc_feature (61)..(62): /note="This region represents a CpG dinucleotide"
  misc_feature (61)..(61): /note="Nucleotide may be methylated to form 5-methylcytosine"
tgatgacagacgtttgcatcatttccagtttgggactgttctgaatagggctgttctgaacgttcttgtacttgccttggggtgagcataagtattcatttctgttgggtgttttctttgga

SEQ ID NO: 3013 - DNA, 122 bp, Homo sapiens
  misc_feature (61)..(62): /note="This region represents a CpG dinucleotide"
  misc_feature (61)..(61): /note="Nucleotide may be methylated to form 5-methylcytosine"
tcttcttagattatgtaacatgatccaggcaggacatgtggctcttggtgcccagtgaaccgtgccatgttggtttttaaacatccttgctgaggtagctttcagggccttgtgtgtatgac

SEQ ID NO: 3014 - DNA, 122 bp, Homo sapiens
  misc_feature (61)..(62): /note="This region represents a CpG dinucleotide"
  misc_feature (61)..(61): /note="Nucleotide may be methylated to form 5-methylcytosine"
aagagttcaggctagagttactcaaagattgatgaagccagatcatggaatgcagtttagcgcagttactaggtgcagtttgacacgttattcacaatttccagtgcctccaaagtcctcag

SEQ ID NO: 3015 - DNA, 122 bp, Homo sapiens
  misc_feature (61)..(62): /note="This region represents a CpG dinucleotide"
  misc_feature (61)..(61): /note="Nucleotide may be methylated to form 5-methylcytosine"
tctggattgtgttgcttaggaggccactaaatgacccagggctttgaaggttttcatccccgtggcctgaaattcacagcactggagtcatccttttaagtgaatgcattcgatgattaggc

SEQ ID NO: 3016 - DNA, 122 bp, Homo sapiens
  misc_feature (61)..(62): /note="This region represents a CpG dinucleotide"
  misc_feature (61)..(61): /note="Nucleotide may be methylated to form 5-methylcytosine"
ggccgccatccagtggtcctgtggactcctctgtgtgcctctagatggcagcacagagatcggagtttgactcttagaggcaggtccacttccaaggaaagaactttccttttttttttttt

SEQ ID NO: 3017 - DNA, 122 bp, Homo sapiens
  misc_feature (61)..(62): /note="This region represents a CpG dinucleotide"
  misc_feature (61)..(61): /note="Nucleotide may be methylated to form 5-methylcytosine"
ctacattactaacaaggaaaaatgcccaaagacagtgttcagccaaaaaacaaaagcgtccgttacaaaatatgtaaatataataattctgattttcaaattaataaatagactaatttttg

SEQ ID NO: 3018 - DNA, 122 bp, Homo sapiens
  misc_feature (61)..(62): /note="This region represents a CpG dinucleotide"
  misc_feature (61)..(61): /note="Nucleotide may be methylated to form 5-methylcytosine"
tcacagcccagcccttcagacaaatgattttgcaacaaccatgtctgttcatagtgaacccggatacttcagaggttgtttaaagccttacaatttgtggctcctattctcatatagcttat

SEQ ID NO: 3019 - DNA, 122 bp, Homo sapiens
  misc_feature (61)..(62): /note="This region represents a CpG dinucleotide"
  misc_feature (61)..(61): /note="Nucleotide may be methylated to form 5-methylcytosine"
ctccttctctgtgccgagcctcttggtataggcggcttcccggaagcactccatgcacaccgccgtcagcttcaccacgctctcggccagcggcaccaggttcaggatggccccaaatggct

SEQ ID NO: 3020 - DNA, 122 bp, Homo sapiens
  misc_feature (61)..(62): /note="This region represents a CpG dinucleotide"
  misc_feature (61)..(61): /note="Nucleotide may be methylated to form 5-methylcytosine"
tgcctgacacctggtgtcgtaaccagaaggagcaaggccacggttgtactgtgataggaacgtgtcctacgggacctggaacagggagtaccggttgtggaggagagatgaggcttgatata

SEQ ID NO: 3021 - DNA, 122 bp, Homo sapiens
  misc_feature (61)..(62): /note="This region represents a CpG dinucleotide"
  misc_feature (61)..(61): /note="Nucleotide may be methylated to form 5-methylcytosine"
agccactgattagggacttcattacatcgggacttcactttgtatatcccataatctaatcgtgggagtgacagccaacactgtcctgcccacacccaaaggggaagagattatgcaggacg

SEQ ID NO: 3022 - DNA, 122 bp, Homo sapiens
  misc_feature (61)..(62): /note="This region represents a CpG dinucleotide"
  misc_feature (61)..(61): /note="Nucleotide may be methylated to form 5-methylcytosine"
gggcgcggacaagcccagagggcgagtggggccgggcgtgcggcagggaccaggctggagcgcatggccacgtgggtgaaccccgacccgcggacaggggcccaggaccctctggcgggagg

SEQ ID NO: 3023 - DNA, 122 bp, Homo sapiens
  misc_feature (61)..(62): /note="This region represents a CpG dinucleotide"
  misc_feature (61)..(61): /note="Nucleotide may be methylated to form 5-methylcytosine"
ccaggggcagagcctgcacgtgtcagagccaggcctgggatgcaccttctctgggcagaccgacccaaaagaaagcccacaagggctgaagccacacacagcccgccccagggctgcctgga

SEQ ID NO: 3024 - DNA, 122 bp, Homo sapiens
  misc_feature (61)..(62): /note="This region represents a CpG dinucleotide"
  misc_feature (61)..(61): /note="Nucleotide may be methylated to form 5-methylcytosine"
tcacctccccaggggtgtagaaagacctgggcctgtatatatgtctatacccatggcttccggagaaatcaacactagatctaagatgagctgaataataagaaaattaccccctccacaac

SEQ ID NO: 3025 - DNA, 122 bp, Homo sapiens
  misc_feature (61)..(62): /note="This region represents a CpG dinucleotide"
  misc_feature (61)..(61): /note="Nucleotide may be methylated to form 5-methylcytosine"
tcttaaagtcccgtccggcggcggcacctgcgcgggcaggcgggaggtgggggagagaaccgcagaatgcacgttaagcctgggctccctgcgggtccctgcgcccctctccaacctcgtca

SEQ ID NO: 3026 - DNA, 122 bp, Homo sapiens
  misc_feature (61)..(62): /note="This region represents a CpG dinucleotide"
  misc_feature (61)..(61): /note="Nucleotide may be methylated to form 5-methylcytosine"
tgagaagaggaaaggagatgtccatgcaggcgcctctgcacacagaaagcactcagtaaacgctgtttccccgcttccccctatacaaaggtgaggaactctcattgttcacttggtttctg

SEQ ID NO: 3027 - DNA, 122 bp, Homo sapiens
  misc_feature (61)..(62): /note="This region represents a CpG dinucleotide"
  misc_feature (61)..(61): /note="Nucleotide may be methylated to form 5-methylcytosine"
atgccattcatatctttcccttgaaatggaagtgcagccagaaacacttcctacttagagcgtctaagaaacagcctggagaattgaagctgttcttcctgctattgtgtgtagtagaggag

SEQ ID NO: 3028 - DNA, 122 bp, Homo sapiens
  misc_feature (61)..(62): /note="This region represents a CpG dinucleotide"
  misc_feature (61)..(61): /note="Nucleotide may be methylated to form 5-methylcytosine"
agagcgagctggcctgctttctcccagtaaccctgaccagcagacagcaagcccgctacacggggagagaaatgatctcattcctcagccgggcacgtgagccgccttctttctctcacaca

SEQ ID NO: 3029 - DNA, 122 bp, Homo sapiens
  misc_feature (61)..(62): /note="This region represents a CpG dinucleotide"
  misc_feature (61)..(61): /note="Nucleotide may be methylated to form 5-methylcytosine"
atcggaaggaaacgaaacctcgcctcaggcatgcgggctctgacgggcaggatggcggcacggagggctgctgtatccagtgaagtcagcagttcagatgaaacagataactcccttaaaag

SEQ ID NO: 3030 - DNA, 122 bp, Homo sapiens
  misc_feature (61)..(62): /note="This region represents a CpG dinucleotide"
  misc_feature (61)..(61): /note="Nucleotide may be methylated to form 5-methylcytosine"
ctatcatttcaaggattcaggggtggtggtgggagaggtaacaaatggataggacagaaacgtgtggagatgtttgtgctgcaatttgcaattactgaagaatacagaaatctaaccgaaaa

SEQ ID NO: 3031 - DNA, 122 bp, Homo sapiens
  misc_feature (61)..(62): /note="This region represents a CpG dinucleotide"
  misc_feature (61)..(61): /note="Nucleotide may be methylated to form 5-methylcytosine"
tctaacctaactgacttcaccttgcttttaacctttaagctgtccttgttccttcctggacgtgggctgaactaactttgggaggaagttagtttatagtttatagtttaaaacaaagatga

SEQ ID NO: 3032 - DNA, 122 bp, Homo sapiens
  misc_feature (61)..(62): /note="This region represents a CpG dinucleotide"
  misc_feature (61)..(61): /note="Nucleotide may be methylated to form 5-methylcytosine"
tggaaatgattggtcctaaaaaatctttcctcagtagctcataaagcagttcataattatcgaaggcttattatgaagggtgtttcggtatcttccctccaaaatgctaagaaataatttag

SEQ ID NO: 3033 - DNA, 122 bp, Homo sapiens
  misc_feature (61)..(62): /note="This region represents a CpG dinucleotide"
  misc_feature (61)..(61): /note="Nucleotide may be methylated to form 5-methylcytosine"
acaaagattaaacttagataataatagggaggaagttgtggtagccattcttgttccaagcgggaacttgatgtgttgctcatcacagttttgctggtggcatcctgtccatggatagagct

SEQ ID NO: 3034 - DNA, 122 bp, Homo sapiens
  misc_feature (61)..(62): /note="This region represents a CpG dinucleotide"
  misc_feature (61)..(61): /note="Nucleotide may be methylated to form 5-methylcytosine"
ccctcccactctcacactgaaacacccagacctagagatagctagacacacccagacacccgccaagcccctcacatacagatatgtgcacaatgatacacagcaaacgtacacagagttca

SEQ ID NO: 3035 - DNA, 122 bp, Homo sapiens
  misc_feature (61)..(62): /note="This region represents a CpG dinucleotide"
  misc_feature (61)..(61): /note="Nucleotide may be methylated to form 5-methylcytosine"
gggcagaacggctttgtgctgtcctgaaacaacactctggtttaatgagctccttgtacacgcagggcaattgtcagtgaaatctgcccattaaaatgcatgtggtttggaaggaggcttgg

SEQ ID NO: 3036 - DNA, 122 bp, Homo sapiens
  misc_feature (61)..(62): /note="This region represents a CpG dinucleotide"
  misc_feature (61)..(61): /note="Nucleotide may be methylated to form 5-methylcytosine"
cagaatggagtgctgtttagtgtgacctgttaccagcatgggctttctaatttgcaaggccgcgggcaaaacggacatgcagaaccttttgatcaaaaattttgaagaatttcagggtggtg

SEQ ID NO: 3037 - DNA, 122 bp, Homo sapiens
  misc_feature (61)..(62): /note="This region represents a CpG dinucleotide"
  misc_feature (61)..(61): /note="Nucleotide may be methylated to form 5-methylcytosine"
acctgaatctggctgccattgtgactctgccgcgcacgcgcagctccatcccctttgaggcgcgcatgtgctcgccaagggggcgcttctgtcaggcctctgagcccaagccaagccatcgc

SEQ ID NO: 3038 - DNA, 122 bp, Homo sapiens
  misc_feature (61)..(62): /note="This region represents a CpG dinucleotide"
  misc_feature (61)..(61): /note="Nucleotide may be methylated to form 5-methylcytosine"
aaaggccacagagcaaagtttcagatccaggcagccctgctccagggctccaaatcaccacggagcaacaggtgaggttagtggttttgtaacagcccatattttctcaatctctttttgaa

SEQ ID NO: 3039 - DNA, 122 bp, Homo sapiens
  misc_feature (61)..(62): /note="This region represents a CpG dinucleotide"
  misc_feature (61)..(61): /note="Nucleotide may be methylated to form 5-methylcytosine"
agcggccagtgtaggactggacagaggccatatgaaacacacggtacattccggtcccagcgtaacaaactgtaccagcctttttgagagctgtgagcactaaaatggggagggaagagagc

SEQ ID NO: 3040 - DNA, 122 bp, Homo sapiens
  misc_feature (61)..(62): /note="This region represents a CpG dinucleotide"
  misc_feature (61)..(61): /note="Nucleotide may be methylated to form 5-methylcytosine"
aaataggctgtttgttgagtaagacttggccatgacctttgccatgggatagcctctccccgtgacatttatgaggaccagatcccctctgggagtttaccagccacaccggaagcatacca

SEQ ID NO: 3041 - DNA, 122 bp, Homo sapiens
  misc_feature (61)..(62): /note="This region represents a CpG dinucleotide"
  misc_feature (61)..(61): /note="Nucleotide may be methylated to form 5-methylcytosine"
ttacatcacaaatgacatttttagtgctaattggtggtgtggagaagaccagatggctcccgggtgtcagcatagttgggccatagcgaatcctgcctgcctgcactgtggatctggctata

SEQ ID NO: 3042 - DNA, 122 bp, Homo sapiens
  misc_feature (61)..(62): /note="This region represents a CpG dinucleotide"
  misc_feature (61)..(61): /note="Nucleotide may be methylated to form 5-methylcytosine"
ccagcccagccccacccacagatcccctgctcctgttgtgttctgttgtaaatcatttggcgagactgtattttagtaactgctgcctaacttccctgtgttctatttgagaggcgcctgtc

SEQ ID NO: 3043 - DNA, 122 bp, Homo sapiens
  misc_feature (61)..(62): /note="This region represents a CpG dinucleotide"
  misc_feature (61)..(61): /note="Nucleotide may be methylated to form 5-methylcytosine"
cagccagaagaggatctagttagacttctgtgaaagaaagtctatgtgccattccagtgccgtactcatgcctgccatggagcaagacggtggaagacacttaaaccttcagtgctttaact

SEQ ID NO: 3044 - DNA, 122 bp, Homo sapiens
  misc_feature (61)..(62): /note="This region represents a CpG dinucleotide"
  misc_feature (61)..(61): /note="Nucleotide may be methylated to form 5-methylcytosine"
cgtctactcagcttggtgtctgctttacccaaaccagattagatggcctgtttgactcttcgtttgcaggttgagtctgaagtaccttatgtgtgagacaggctttaaagtttaatcttttg

SEQ ID NO: 3045 - DNA, 122 bp, Homo sapiens
  misc_feature (61)..(62): /note="This region represents a CpG dinucleotide"
  misc_feature (61)..(61): /note="Nucleotide may be methylated to form 5-methylcytosine"
tagcaaattctaagttggggataggtgaggcttcttgggtagacaccctgtctgtgttcccggccaagacttgatgattctgatagatgtactggaaatgctggagaaagactcaggcaaga

SEQ ID NO: 3046 - DNA, 122 bp, Homo sapiens
  misc_feature (61)..(62): /note="This region represents a CpG dinucleotide"
  misc_feature (61)..(61): /note="Nucleotide may be methylated to form 5-methylcytosine"
gccagcattgaacccaaacaatatcggatagattttttttcttcctctctctctctttgacgggaaaagttattgattgggtaaacacagatgtatttaatgttttaagtcagttcacagtg

SEQ ID NO: 3047 - DNA, 122 bp, Homo sapiens
  misc_feature (61)..(62): /note="This region represents a CpG dinucleotide"
  misc_feature (61)..(61): /note="Nucleotide may be methylated to form 5-methylcytosine"
gttggaaaggaaggaggagagaggcagagagagagagagagagagagagagagagagaagcgcgagagcggccctgtaattgagcagaaaggaaagggagaaaaatgaatcccaaactttgg

SEQ ID NO: 3048 - DNA, 122 bp, Homo sapiens
  misc_feature (61)..(62): /note="This region represents a CpG dinucleotide"
  misc_feature (61)..(61): /note="Nucleotide may be methylated to form 5-methylcytosine"
gttccacaggtgagtctgatatgcatagttctgagaacaaccgttataagtacacacgaccgtgccttttccatctactattcattgcctgatggggggcaagtgctgggatgcagagcatc

SEQ ID NO: 3049 - DNA, 122 bp, Homo sapiens
  misc_feature (61)..(62): /note="This region represents a CpG dinucleotide"
  misc_feature (61)..(61): /note="Nucleotide may be methylated to form 5-methylcytosine"
caggccagacaggaggcccctgaggcgctccccatctcaccccaggggcaaagccgggtccggggaccacgaaccagaccttcgccctacactgctcatactgccaaggagagaacgggagc

SEQ ID NO: 3050 - DNA, 122 bp, Homo sapiens
  misc_feature (61)..(62): /note="This region represents a CpG dinucleotide"
  misc_feature (61)..(61): /note="Nucleotide may be methylated to form 5-methylcytosine"
accccgtggacctccacgtggtaggtggtgccgggcctgaggtcgggcaggctgacggtgcgcgtggtgcccggcacagtcagctcaccgccggggccctctgcaggcggctgaggccgcca

SEQ ID NO: 3051 - DNA, 122 bp, Homo sapiens
  misc_feature (61)..(62): /note="This region represents a CpG dinucleotide"
  misc_feature (61)..(61): /note="Nucleotide may be methylated to form 5-methylcytosine"
tacttatgttgtgctacaattgcctacagtattcagtatagcaacatgccatacaggttccgcaagttactgcagagcaataggctccagcacgtggcctaggtgtgtagtaggcataccat

SEQ ID NO: 3052 - DNA, 122 bp, Homo sapiens
  misc_feature (61)..(62): /note="This region represents a CpG dinucleotide"
  misc_feature (61)..(61): /note="Nucleotide may be methylated to form 5-methylcytosine"
aaaatgttggttccctccatctctctggatcccccacccccttaaggatttcttaaaaaacgaaaaacctgccagccagctgccactggaaagatgtcaagtaggataagctgctgataggt

SEQ ID NO: 3053 - DNA, 122 bp, Homo sapiens
  misc_feature (61)..(62): /note="This region represents a CpG dinucleotide"
  misc_feature (61)..(61): /note="Nucleotide may be methylated to form 5-methylcytosine"
caccaccccgcaactcactgggagagtcagtctgttattttccccattgtctgtatcccacgaaagaggagcccactcctaaaggggaatatgagccagttttgcttttctacacctgccgg

SEQ ID NO: 3054 - DNA, 122 bp, Homo sapiens
  misc_feature (61)..(62): /note="This region represents a CpG dinucleotide"
  misc_feature (61)..(61): /note="Nucleotide may be methylated to form 5-methylcytosine"
ggcagagagtgaatacttctcatttcaactctggatccatgtaatacgagttgacttcctcgtgtttaaagtttggtttaactaatttaatgagactatactaaatccttggagagaaggtg

SEQ ID NO: 3055 - DNA, 122 bp, Homo sapiens
  misc_feature (61)..(62): /note="This region represents a CpG dinucleotide"
  misc_feature (61)..(61): /note="Nucleotide may be methylated to form 5-methylcytosine"
cctgtttttctcagaaacatgaacatcttcactgaaaagccgtagttaggttcctgtacacgtcacgttgtattgacacaggaggatgtgtaaacctagcccaaagctttaggaagaagcag

SEQ ID NO: 3056 - DNA, 122 bp, Homo sapiens
  misc_feature (61)..(62): /note="This region represents a CpG dinucleotide"
  misc_feature (61)..(61): /note="Nucleotide may be methylated to form 5-methylcytosine"
aagtcgcttacactttgtgaattttacctccaggaactatccaggttctcacagtgaagacggaagaaaaatccccttgtgcttctggcagcaggaggagaaagggaaccatgtttatatac

SEQ ID NO: 3057 - DNA, 122 bp, Homo sapiens
  misc_feature (61)..(62): /note="This region represents a CpG dinucleotide"
  misc_feature (61)..(61): /note="Nucleotide may be methylated to form 5-methylcytosine"
gatcttttactccacggggtatatcctttggtgcccctaaggtacttcttctaaaaatcacgtcaatatgcttgtcttggaggaccacagccttgtgacctgggtagcccaatctgtccagg

SEQ ID NO: 3058 - DNA, 122 bp, Homo sapiens
  misc_feature (61)..(62): /note="This region represents a CpG dinucleotide"
  misc_feature (61)..(61): /note="Nucleotide may be methylated to form 5-methylcytosine"
gatgtgtgagagggaggtacagtgggtcccgggtaggctgcaggggtgtgtgcgcgcgaacgtgttgggtccgggagactgagagtgtgtgtgcaagatttcgggagggagctttttctccg

SEQ ID NO: 3059 - DNA, 122 bp, Homo sapiens
  misc_feature (61)..(62): /note="This region represents a CpG dinucleotide"
  misc_feature (61)..(61): /note="Nucleotide may be methylated to form 5-methylcytosine"
acacactaagtcctccttccttgtggagggaagggctcaagtagcaaatattggagcccccgcttggtgctgggagctgtgacaggcagctcctgaagaagcagtttaattggaaccagtga

SEQ ID NO: 3060 - DNA, 122 bp, Homo sapiens
  misc_feature (61)..(62): /note="This region represents a CpG dinucleotide"
  misc_feature (61)..(61): /note="Nucleotide may be methylated to form 5-methylcytosine"
ctgtctggctccacccccagagactcaggtttcacggggctacagtggggctcgggcattcgcatgcttttaaaatatcatgatttttttaaattgaagtgaaattcacatagcataaaatt

SEQ ID NO: 3061 - DNA, 122 bp, Homo sapiens
  misc_feature (61)..(62): /note="This region represents a CpG dinucleotide"
  misc_feature (61)..(61): /note="Nucleotide may be methylated to form 5-methylcytosine"
tgtcggtgagcgtcttggtcttaaacttcattccaggtgcggtcgacagctgtaggatcacgtaagggtcggcctcactcactgccaaggttaaggaagtcttcgtgagggagtactcccca

SEQ ID NO: 3062 - DNA, 122 bp, Homo sapiens
  misc_feature (61)..(62): /note="This region represents a CpG dinucleotide"
  misc_feature (61)..(61): /note="Nucleotide may be methylated to form 5-methylcytosine"
ccagctccgagccctgctcgtggagccattggtgctgcggcggggagaagaggccacaggcggggacgccccagacactcccgtggggcccgtgccagggtctcctgctcctcagaaagagc

SEQ ID NO: 3063 - DNA, 122 bp, Homo sapiens
  misc_feature (61)..(62): /note="This region represents a CpG dinucleotide"
  misc_feature (61)..(61): /note="Nucleotide may be methylated to form 5-methylcytosine"
cgagccgtggccgctgctggacgacagggagccggggctggtggcggcgggcggcgagtgcgccacgggcatggacatggagcggctgtgttgcagcgcgccccctgccggcagcagcgcca

SEQ ID NO: 3064 - DNA, 122 bp, Homo sapiens
  misc_feature (61)..(62): /note="This region represents a CpG dinucleotide"
  misc_feature (61)..(61): /note="Nucleotide may be methylated to form 5-methylcytosine"
tacaaattcagagttaagagctggacaacgagttgggttatgagggcttccaccccagtccgtttctttcttgctcatggtaggaccctagacaattcttttccactctcagcctgcatttt

SEQ ID NO: 3065 - DNA, 122 bp, Homo sapiens
  misc_feature (61)..(62): /note="This region represents a CpG dinucleotide"
  misc_feature (61)..(61): /note="Nucleotide may be methylated to form 5-methylcytosine"
agaaaagatctagcacaagttaagagagattctgtgaatcttgaaaaagcttcagaggcccggtctttgaggtgaggacacagttaatctatatggaaagaaacctaagacttttagtccac

SEQ ID NO: 3066 - DNA, 122 bp, Homo sapiens
  misc_feature (61)..(62): /note="This region represents a CpG dinucleotide"
  misc_feature (61)..(61): /note="Nucleotide may be methylated to form 5-methylcytosine"
ctcagctgtgctgggatgctgttgccctatttcccgcgtagaaacaactgctggtggcgccgccggctgaagagtgcagaactgtggccctgagccaagctggggcaaatatgggagacgcg

SEQ ID NO: 3067 - DNA, 122 bp, Homo sapiens
  misc_feature (61)..(62): /note="This region represents a CpG dinucleotide"
  misc_feature (61)..(61): /note="Nucleotide may be methylated to form 5-methylcytosine"
ttcctgttcctcttcttgctcttcctgtttctgcccctcttcctgcttgtgttcttgtgtcggctcctgcctgtgctccactccttgctcctgcttgtgctctggcgcttgctcctggcctc

SEQ ID NO: 3068 - DNA, 122 bp, Homo sapiens
  misc_feature (61)..(62): /note="This region represents a CpG dinucleotide"
  misc_feature (61)..(61): /note="Nucleotide may be methylated to form 5-methylcytosine"
atgatctttcccttcaagtgatttcctctccttcccatttgataacaactctgtggggcacgttttgtgaactgcttcgatctaatttaaaaagataacgttgcattttataattttatgta

SEQ ID NO: 3069 - DNA, 122 bp, Homo sapiens
  misc_feature (61)..(62): /note="This region represents a CpG dinucleotide"
  misc_feature (61)..(61): /note="Nucleotide may be methylated to form 5-methylcytosine"
agataagtatcggaatctgtcattttctgctttggatgtatgcctaaacagccaaagaagcgcatcaaaaccaaggaaaaaaatgtggaaaggccaacctaaatgtatatagggtatagtcc

SEQ ID NO: 3070 - DNA, 122 bp, Homo sapiens
  misc_feature (61)..(62): /note="This region represents a CpG dinucleotide"
  misc_feature (61)..(61): /note="Nucleotide may be methylated to form 5-methylcytosine"
tggactgatgttgtagttcaagacaggcctctgactcagctttttggttctgttcagacccgtaagtgagtagatgaggcccaccacattaggaagggtcatttccttttctcagtctaata

SEQ ID NO: 3071 - DNA, 122 bp, Homo sapiens
  misc_feature (61)..(62): /note="This region represents a CpG dinucleotide"
  misc_feature (61)..(61): /note="Nucleotide may be methylated to form 5-methylcytosine"
accaacagcatctttgcctttcatttaagtgcaattcaacaggagtttatgagtaacatacgcaagttgattgagcaatggtatagattctgtgtccaataaataaggtagtgtcaccagac

SEQ ID NO: 3072 - DNA, 122 bp, Homo sapiens
  misc_feature (61)..(62): /note="This region represents a CpG dinucleotide"
  misc_feature (61)..(61): /note="Nucleotide may be methylated to form 5-methylcytosine"
cccgggggcggcgcacagagacagatgggcttgtgcaagggagagttcgagccttccggacgcctttgcataaaaatgacgagacctgtgcagctttgattatctctggaatactgcaggaa

SEQ ID NO: 3073 - DNA, 122 bp, Homo sapiens
  misc_feature (61)..(62): /note="This region represents a CpG dinucleotide"
  misc_feature (61)..(61): /note="Nucleotide may be methylated to form 5-methylcytosine"
aggaaatgaccatagcagcctgaggagcacttaggacttgtcactcataagaaccacaggcgtggtcattacaaccttacagctgtcccagatggcaggaaattaatttatgctcataaatt

SEQ ID NO: 3074 - DNA, 122 bp, Homo sapiens
  misc_feature (61)..(62): /note="This region represents a CpG dinucleotide"
  misc_feature (61)..(61): /note="Nucleotide may be methylated to form 5-methylcytosine"
ctcggctctccttcctgagatatttatagactccttgactgcaaagaggcgattatgcagcggcctgagggatttgcacaaatgtggcgcctgcttaaagatttagtcccaagctcatccaa

SEQ ID NO: 3075 - DNA, 122 bp, Homo sapiens
  misc_feature (61)..(62): /note="This region represents a CpG dinucleotide"
  misc_feature (61)..(61): /note="Nucleotide may be methylated to form 5-methylcytosine"
ctattgtggtgtgtggtatttccagcactgagcacggtgcctggcatatagtgggagctccgtggctgaacgttaagcattcagcacctatttatcagagatctatgatgtgcaggaagctg

SEQ ID NO: 3076 - DNA, 122 bp, Homo sapiens
  misc_feature (61)..(62): /note="This region represents a CpG dinucleotide"
  misc_feature (61)..(61): /note="Nucleotide may be methylated to form 5-methylcytosine"
ggtttctcttccttttagaccttatagggtaacttctggatgttgtgtaaacagtcatgacgttggtgggagtattgtttagcaggccaatacattataattggcatataatgaacattgag

SEQ ID NO: 3077 - DNA, 122 bp, Homo sapiens
  misc_feature (61)..(62): /note="This region represents a CpG dinucleotide"
  misc_feature (61)..(61): /note="Nucleotide may be methylated to form 5-methylcytosine"
gaggtgcagatttaaataggctggtcagggaagtcctttcccactgatttcccctcaaggcgtgagcctgtggtgagggagcaatcctgtgcttgttcaggagaaagggctttcaggaaggg

SEQ ID NO: 3078 - DNA, 122 bp, Homo sapiens
  misc_feature (61)..(62): /note="This region represents a CpG dinucleotide"
  misc_feature (61)..(61): /note="Nucleotide may be methylated to form 5-methylcytosine"
taaataaataaaattattcttcagtgaatctgtttttggattcagtcttgataataaaaacggagaaaaaaaattttaacagatagattatttcaatattgctctgtcagcaatatctggaa

SEQ ID NO: 3079 - DNA, 122 bp, Homo sapiens
  misc_feature (61)..(62): /note="This region represents a CpG dinucleotide"
  misc_feature (61)..(61): /note="Nucleotide may be methylated to form 5-methylcytosine"
gcctcatgtcatatggccctcagagtctaaaatatttgccatctggcccctttcagaaaacgtttcccaatccctggtgtaaattgcaacagtagtaatgtgcaatgaaaagactgatttcg

SEQ ID NO: 3080 - DNA, 122 bp, Homo sapiens
  misc_feature (61)..(62): /note="This region represents a CpG dinucleotide"
  misc_feature (61)..(61): /note="Nucleotide may be methylated to form 5-methylcytosine"
ccaagctgtggaggggctgggctttcctttgaggactaaaatgctttgggtttgaaagcacgttaccctgcttggcaacagaatcttgaaggggtcgctttgttggccccaaagggcacact

SEQ ID NO: 3081 - DNA, 122 bp, Homo sapiens
  misc_feature (61)..(62): /note="This region represents a CpG dinucleotide"
  misc_feature (61)..(61): /note="Nucleotide may be methylated to form 5-methylcytosine"
gggccctgccaaagcttctcaaatttttcaattcaacagttgttatttaaagagggggtacggatggagggggaaaaaaactccagaaagcaaaaatccaaaagaggagtggctaataacag

SEQ ID NO: 3082 - DNA, 122 bp, Homo sapiens
  misc_feature (61)..(62): /note="This region represents a CpG dinucleotide"
  misc_feature (61)..(61): /note="Nucleotide may be methylated to form 5-methylcytosine"
tatttattttactaaaaagaacaaaaacaacagactgctgtcctttagacaataggatcacgtcatctgagccctctgtgccccaggtgacaagcccagccccaagttctctttcctcagcc

SEQ ID NO: 3083 - DNA, 122 bp, Homo sapiens
  misc_feature (61)..(62): /note="This region represents a CpG dinucleotide"
  misc_feature (61)..(61): /note="Nucleotide may be methylated to form 5-methylcytosine"
attgattttatggctaatacattaaaggaaaaggaagagctttgtaaacagaaggacttacggcttggtaatgtgtgagtattaccttccaaatattgctaaagaatgtatgtgctttagca

SEQ ID NO: 3084 - DNA, 122 bp, Homo sapiens
  misc_feature (61)..(62): /note="This region represents a CpG dinucleotide"
  misc_feature (61)..(61): /note="Nucleotide may be methylated to form 5-methylcytosine"
gggaaatgagatttccctctaaagcagcatttgagtttgtcatacagttcatgtgtctgccgcttctgagaggaggcaatggtaatacatatacagaaaaaatgctgggcaacctatcttgg

SEQ ID NO: 3085 - DNA, 122 bp, Homo sapiens
  misc_feature (61)..(62): /note="This region represents a CpG dinucleotide"
  misc_feature (61)..(61): /note="Nucleotide may be methylated to form 5-methylcytosine"
ccagctactcaggaagcagcggcgggaggatcgctcagcctgggggtccaggacagcctgcgcgacaatgtaacattccctcccgcagtctctctcttttttaaatttttaaaataaaattt

SEQ ID NO: 3086 - DNA, 122 bp, Homo sapiens
  misc_feature (61)..(62): /note="This region represents a CpG dinucleotide"
  misc_feature (61)..(61): /note="Nucleotide may be methylated to form 5-methylcytosine"
agaatgcacgttaagcctgggctccctgcgggtccctgcgcccctctccaacctcgtcaccgccctcctccggcaccgctgcaggccagcggctcctcgggcactcctgccctccttgcaag

SEQ ID NO: 3087 - DNA, 122 bp, Homo sapiens
  misc_feature (61)..(62): /note="This region represents a CpG dinucleotide"
  misc_feature (61)..(61): /note="Nucleotide may be methylated to form 5-methylcytosine"
tcctgcttccttgtcagtggatccagacgcatggagcttattgataagcacctgtggagacgtgtttgactcgcacccctgctgctgctgcgtgcttgcctgtttagctagaagccattctc

SEQ ID NO: 3088 - DNA, 122 bp, Homo sapiens
  misc_feature (61)..(62): /note="This region represents a CpG dinucleotide"
  misc_feature (61)..(61): /note="Nucleotide may be methylated to form 5-methylcytosine"
ccacttaaacaccattctaatttacacctaaatcacacaagcatcctccttctaagaagacgtcataatcgttttgaaaatcattgcaaaattcccaaacttgaaaaaaaagaaaaaaaaaa

SEQ ID NO: 3089 - DNA, 122 bp, Homo sapiens
  misc_feature (61)..(62): /note="This region represents a CpG dinucleotide"
  misc_feature (61)..(61): /note="Nucleotide may be methylated to form 5-methylcytosine"
cttctttcaggaaggcttctcagggccccaagctggatcagggcccctcctggcattctccgagcttgcctccaccacagcatttatcagaataaggagtcaaaggcatcagctctgcctga

SEQ ID NO: 3090 - DNA, 122 bp, Homo sapiens
  misc_feature (61)..(62): /note="This region represents a CpG dinucleotide"
  misc_feature (61)..(61): /note="Nucleotide may be methylated to form 5-methylcytosine"
gtccctagcccagggcctggcatacggtaggtgctcaataaatgcttatcctttctcctccgtctctgtcatcctgcacattccctgtgattcatggtttacatacagctttacacatatca

SEQ ID NO: 3091 - DNA, 122 bp, Homo sapiens
  misc_feature (61)..(62): /note="This region represents a CpG dinucleotide"
  misc_feature (61)..(61): /note="Nucleotide may be methylated to form 5-methylcytosine"
caccgtgcgctggaacggctcgcgcatcgcgctcccctgccgcgcgccacacttccacatcgacctggatggctacctcttgaaagtgaccaccaaagcaggtggggcgtctgtggcctccc

SEQ ID NO: 3092 - DNA, 122 bp, Homo sapiens
  misc_feature (61)..(62): /note="This region represents a CpG dinucleotide"
  misc_feature (61)..(61): /note="Nucleotide may be methylated to form 5-methylcytosine"
tgaaatcagtgtattgtgtgcatcaatgtggtgcagtaacttagtaaggactcacagcgccgctgttcaccaaccagggaaaaatggtgcgagagatcccacagaaaccaccgagttttaca

SEQ ID NO: 3093 - DNA, 122 bp, Homo sapiens
  misc_feature (61)..(62): /note="This region represents a CpG dinucleotide"
  misc_feature (61)..(61): /note="Nucleotide may be methylated to form 5-methylcytosine"
tttttcacaccttaaaaacaaggaagaagagaaatgaaaataaaatagtgagcaacacctcggtgaaagtagaggtgtttgtacagttcagctgctgccttattcaaaaacaggaagaaaaa

SEQ ID NO: 3094 - DNA, 122 bp, Homo sapiens
  misc_feature (61)..(62): /note="This region represents a CpG dinucleotide"
  misc_feature (61)..(61): /note="Nucleotide may be methylated to form 5-methylcytosine"
aatctctagtattcagcctgaggcatgacatgcggggctgagccacacaagagctagagacgctccccgcaagcagaggacagtgcttttgtggcaaaacatggtttttaaaaaaatcactt

SEQ ID NO: 3095 - DNA, 122 bp, Homo sapiens
  misc_feature (61)..(62): /note="This region represents a CpG dinucleotide"
  misc_feature (61)..(61): /note="Nucleotide may be methylated to form 5-methylcytosine"
ctgggcaacatagcaagactccttctcaaaaaataaaaataaaaataaaaatattattaccgtatgagctggcaatcctgcttttgtgtatacacccaaggaattgaaagggggtctggaag

SEQ ID NO: 3096 - DNA, 122 bp, Homo sapiens
  misc_feature (61)..(62): /note="This region represents a CpG dinucleotide"
  misc_feature (61)..(61): /note="Nucleotide may be methylated to form 5-methylcytosine"
gctggtcaggaacaaaatgacattaaacaattgccctcaggcatgaagggggatgaatgacgtctcatacttgtgtgtctctgggcctgcacatctcacagagctcagacttctcggagtta

SEQ ID NO: 3097 - DNA, 122 bp, Homo sapiens
  misc_feature (61)..(62): /note="This region represents a CpG dinucleotide"
  misc_feature (61)..(61): /note="Nucleotide may be methylated to form 5-methylcytosine"
aattccagaaactggccttaggagatccaaatattgaagcaaggtttcagggtcccacctcgggaaggaatgctgcaattgatttacagccttattgcttctggtcagaccaccaggtggcc

SEQ ID NO: 3098 - DNA, 122 bp, Homo sapiens
  misc_feature (61)..(62): /note="This region represents a CpG dinucleotide"
  misc_feature (61)..(61): /note="Nucleotide may be methylated to form 5-methylcytosine"
gaacttgacagaatgttttattacagaggcccagtaactaccagactagtgaataaatttcgtgacgatcaccgtaggaaagtctagagtctttgaatgaaaaattgtcatttttacaatga

SEQ ID NO: 3099 - DNA, 122 bp, Homo sapiens
  misc_feature (61)..(62): /note="This region represents a CpG dinucleotide"
  misc_feature (61)..(61): /note="Nucleotide may be methylated to form 5-methylcytosine"
ggtagatgtggggtaagatctaatgtggcatgtacagatgactctggtggaactgaggaacgtgagctcttgaaggggtgctgagatcacttcattcactttctcatcccaacccaggtcct

SEQ ID NO: 3100 - DNA, 122 bp, Homo sapiens
  misc_feature (61)..(62): /note="This region represents a CpG dinucleotide"
  misc_feature (61)..(61): /note="Nucleotide may be methylated to form 5-methylcytosine"
cccctcctcaaggcttatcatccatctttactgccgcacaatgatgcggtggtttgttttcgtattcactgcagcaggtaataaatgttcctactttggcttcagttttaataaaactatca

SEQ ID NO: 3101 - DNA, 122 bp, Homo sapiens
  misc_feature (61)..(62): /note="This region represents a CpG dinucleotide"
  misc_feature (61)..(61): /note="Nucleotide may be methylated to form 5-methylcytosine"
ccctgaggacatgtgatgcaaaggttttattggtggagatttgaaaagaaatgatctgtacgaaggccccttacacagtctcatggactgtgtcatgagcaagtagtcaagctcctttcgtg

SEQ ID NO: 3102 - DNA, 122 bp, Homo sapiens
  misc_feature (61)..(62): /note="This region represents a CpG dinucleotide"
  misc_feature (61)..(61): /note="Nucleotide may be methylated to form 5-methylcytosine"
cagagaagcaaatttgtattaaggcacttaaggcatcttgccaccactgggtctgggaggcgctgctcagtctgccgacagcatcttctggaattactggtgtggtggaactcaaaaatttt

SEQ ID NO: 3103 - DNA, 122 bp, Homo sapiens
  misc_feature (61)..(62): /note="This region represents a CpG dinucleotide"
  misc_feature (61)..(61): /note="Nucleotide may be methylated to form 5-methylcytosine"
cgtggctgcgcgggagtctctgagtctactctgactcaggaggctgctggaatcgcaaatcgtttgtttctcaattaaattccattaaatttaattcagctgaagtttttttttttttttaa

SEQ ID NO: 3104 - DNA, 122 bp, Homo sapiens
  misc_feature (61)..(62): /note="This region represents a CpG dinucleotide"
  misc_feature (61)..(61): /note="Nucleotide may be methylated to form 5-methylcytosine"
ccaccaccaccacacacacacacagtaaaggcaaagtctctttggcccctgaaataattccgcctgatctcaggaaaggtaacatcctcctccccaccccacccccgagttaggctccatct

SEQ ID NO: 3105 - DNA, 122 bp, Homo sapiens
  misc_feature (61)..(62): /note="This region represents a CpG dinucleotide"
  misc_feature (61)..(61): /note="Nucleotide may be methylated to form 5-methylcytosine"
aagattatcaaaagtagccttaacagttcagggtggagttgggggtgcagcaccataacacgtgggactgcacatccctcacagtaactcactgagatggggttgccgtagtgcaggtggga

SEQ ID NO: 3106 - DNA, 122 bp, Homo sapiens
  misc_feature (61)..(62): /note="This region represents a CpG dinucleotide"
  misc_feature (61)..(61): /note="Nucleotide may be methylated to form 5-methylcytosine"
aaaacgcagttttgaatagtattgagtacttacatgtcagttgctgcactgagcacctgccgtgtgagctcatttgaagaatgtgggtatgtggaatgaagagaaagggcgttctagacaga

SEQ ID NO: 3107 - DNA, 122 bp, Homo sapiens
  misc_feature (61)..(62): /note="This region represents a CpG dinucleotide"
  misc_feature (61)..(61): /note="Nucleotide may be methylated to form 5-methylcytosine"
ttaagtccttttcatgcactattgaatttcctatctcctttatcttaagagatagatccccgtttttcaggagaagaaactcagactcactaacttgtccaacattacacagcttaagtagt

SEQ ID NO: 3108 - DNA, 122 bp, Homo sapiens
  misc_feature (61)..(62): /note="This region represents a CpG dinucleotide"
  misc_feature (61)..(61): /note="Nucleotide may be methylated to form 5-methylcytosine"
gtagaactccatttaaggctctatgccagatgagaatctgagggttcgtgtgcttgaaaacgtgttcgtctatgagtgtctagtattgctaaatggagtataattgcttctgctttatttct

SEQ ID NO: 3109 - DNA, 122 bp, Homo sapiens
  misc_feature (61)..(62): /note="This region represents a CpG dinucleotide"
  misc_feature (61)..(61): /note="Nucleotide may be methylated to form 5-methylcytosine"
ggataggcagtgaggacagacttgcttccaagctgggtctgacctggagactcctcccagcgtcgttcctgcctagggcgaggggcgtcacagcgaagcacagatgctcaagtcactggtgg

SEQ ID NO: 3110 - DNA, 122 bp, Homo sapiens
  misc_feature (61)..(62): /note="This region represents a CpG dinucleotide"
  misc_feature (61)..(61): /note="Nucleotide may be methylated to form 5-methylcytosine"
ctccggtgatccacctgcattggcctcccaaagtgctgggattacaggcgtgagccactgcgcctgaccggttacttaactttctcaaggtcccacagctagtaagtgaggaagctctggca

SEQ ID NO: 3111 - DNA, 122 bp, Homo sapiens
  misc_feature (61)..(62): /note="This region represents a CpG dinucleotide"
  misc_feature (61)..(61): /note="Nucleotide may be methylated to form 5-methylcytosine"
gacttgtgagcttgaagacacaacaacagaaagtatccaaaatgaaacataaagaaaagacgcggtgaggacagaacatcagtgaactaagtgaacaaattacatgtaattaaaggcaaggg

SEQ ID NO: 3112 - DNA, 122 bp, Homo sapiens
  misc_feature (61)..(62): /note="This region represents a CpG dinucleotide"
  misc_feature (61)..(61): /note="Nucleotide may be methylated to form 5-methylcytosine"
gggtttgaagacatgcaaagttgtaaaaggaggtgaatctttcactctagccaaaaacagcgatgtataatactctaatccagtggttttcccagctgtgtacatgagaatcctaagattca

SEQ ID NO: 3113 - DNA, 122 bp, Homo sapiens
  misc_feature (61)..(62): /note="This region represents a CpG dinucleotide"
  misc_feature (61)..(61): /note="Nucleotide may be methylated to form 5-methylcytosine"
gtcatttgttgtatttctaaattcccacaagatggcagaatttcagagcattttaaagtacgtgtctggataggtagctagaatattttaagtcttgtaactaggttaagtgcaaatcctgt

SEQ ID NO: 3114 - DNA, 122 bp, Homo sapiens
  misc_feature (61)..(62): /note="This region represents a CpG dinucleotide"
  misc_feature (61)..(61): /note="Nucleotide may be methylated to form 5-methylcytosine"
agagaaaatcaacaagctagtgtttaaataatgtgcagggtgtgataccaaccgaacctccgccctccttcctggggaaatgcaaagtttgctgtggccttttcacaaacctcggagagaat

SEQ ID NO: 3115 - DNA, 122 bp, Homo sapiens
  misc_feature (61)..(62): /note="This region represents a CpG dinucleotide"
  misc_feature (61)..(61): /note="Nucleotide may be methylated to form 5-methylcytosine"
gataagttgataagagcagccagacatgtgtagtgggctgctccgccctcctggcttagccgttatcttcctgtagggggtcactagccaggcaacaggaaaaatcagagcagaatgcctgc

SEQ ID NO: 3116 - DNA, 122 bp, Homo sapiens
  misc_feature (61)..(62): /note="This region represents a CpG dinucleotide"
  misc_feature (61)..(61): /note="Nucleotide may be methylated to form 5-methylcytosine"
ttttactctccatgtggccatcatggacgaggacgaagagggacttgatttttcctttaacgagaagaatgtttaagctctgaatttttaaccaatttttatgctcgttactctgctgtagg

SEQ ID NO: 3117 - DNA, 122 bp, Homo sapiens
  misc_feature (61)..(62): /note="This region represents a CpG dinucleotide"
  misc_feature (61)..(61): /note="Nucleotide may be methylated to form 5-methylcytosine"
ccaattagaacagatagacgcaacatgggccactgatctaaatctctgaggggtggcccacgtgtgtatgtgtgggcatgtgagtgtgtgtgtgtgtgtgtgtgtgtgtgtgtgtgtgtatt

SEQ ID NO: 3118 - DNA, 122 bp, Homo sapiens
  misc_feature (61)..(62): /note="This region represents a CpG dinucleotide"
  misc_feature (61)..(61): /note="Nucleotide may be methylated to form 5-methylcytosine"
aacccctccctccctccactgtcctacctataaagtggaaaaaaataacagactccctcacggtggctgcatatactgcgtgcacagagctcaactggaactacgttgcccagaatttcctt

SEQ ID NO: 3119 - DNA, 122 bp, Homo sapiens
  misc_feature (61)..(62): /note="This region represents a CpG dinucleotide"
  misc_feature (61)..(61): /note="Nucleotide may be methylated to form 5-methylcytosine"
cacccccagttaagcttggagatgactgcaggcccagccatcaccttgactacagcctcacggccaacccagaagcagagagcccggctaagtgatggccaggttcctgactcacagaaact

SEQ ID NO: 3120 - DNA, 122 bp, Homo sapiens
  misc_feature (61)..(62): /note="This region represents a CpG dinucleotide"
  misc_feature (61)..(61): /note="Nucleotide may be methylated to form 5-methylcytosine"
gtactcttcacggtgcttatgttcaataatttcagtgttcttggccttagttctctaatgcgtgttttggaaaatacattatttttattctctgcgtggttacagttttaagagaaaaatgg

SEQ ID NO: 3121 - DNA, 122 bp, Homo sapiens
  misc_feature (61)..(62): /note="This region represents a CpG dinucleotide"
  misc_feature (61)..(61): /note="Nucleotide may be methylated to form 5-methylcytosine"
gggacatttttgtacactactgatagggtttggctgtgtatccccactgaaatctcatctcgaattgtaatccctatgtgttgaaggagggaggtgactggataatgggggcagtttccccc

SEQ ID NO: 3122 - DNA, 122 bp, Homo sapiens
  misc_feature (61)..(62): /note="This region represents a CpG dinucleotide"
  misc_feature (61)..(61): /note="Nucleotide may be methylated to form 5-methylcytosine"
tgtggcagatgaactgataaaatgcaatgaaagacaagaagccagtgtcagcacgtaacacgcatctttgatgtatgatcaggaacaaaatcatgggcagcccaagtggctgttttaactca

SEQ ID NO: 3123 - DNA, 122 bp, Homo sapiens
  misc_feature (61)..(62): /note="This region represents a CpG dinucleotide"
  misc_feature (61)..(61): /note="Nucleotide may be methylated to form 5-methylcytosine"
aaaggaaatgttcagttacaataagtgtcactgcttccattcacttgtgcagcttcctctcgtaaggctgaaattttgatgagttaattcatacaggaagagatttcttggatctcaattac

SEQ ID NO: 3124 - DNA, 122 bp, Homo sapiens
  misc_feature (61)..(62): /note="This region represents a CpG dinucleotide"
  misc_feature (61)..(61): /note="Nucleotide may be methylated to form 5-methylcytosine"
aataatggaagctacagtcttatccagttcctttcaactatttacatagaataagccctccgaacgtgaggatgaattattgttcaacctatccacactaaacatcaaaaagccaacttagc

SEQ ID NO: 3125 - DNA, 122 bp, Homo sapiens
  misc_feature (61)..(62): /note="This region represents a CpG dinucleotide"
  misc_feature (61)..(61): /note="Nucleotide may be methylated to form 5-methylcytosine"
tgagccatgttgactgaagacagataacctggcagatgtgttgactccaacaaaacaaggcgaatgttctcaggttttgggtattgtgtctctctgaggtgataaccacagagcgagtttct

SEQ ID NO: 3126 - DNA, 122 bp, Homo sapiens
  misc_feature (61)..(62): /note="This region represents a CpG dinucleotide"
  misc_feature (61)..(61): /note="Nucleotide may be methylated to form 5-methylcytosine"
caggcccgggcagcgacctcttgctgttcagcaaaaagcaaacattcaaagcagtccctgcgggctcagcgtggcgaccatgagcgcacgtttgtgtgccggctgactctcctcctcgcata

SEQ ID NO: 3127 - DNA, 122 bp, Homo sapiens
  misc_feature (61)..(62): /note="This region represents a CpG dinucleotide"
  misc_feature (61)..(61): /note="Nucleotide may be methylated to form 5-methylcytosine"
cttttgcagctggcttatctcacttacacagcatcttcagggctcatgcatgtggtagcccgtgccagaatttccttccttctgaagacggaagagtatttcattatgtgcctatagcacac

SEQ ID NO: 3128 - DNA, 122 bp, Homo sapiens
  misc_feature (61)..(62): /note="This region represents a CpG dinucleotide"
  misc_feature (61)..(61): /note="Nucleotide may be methylated to form 5-methylcytosine"
cccgcacttccccacgttcctctctcctggattggatttctggaaggttctgctgggccacgtcccgtcaggtcctcaggaacacggcatgcacaaccacacaccccgtctgcaggggctgc

SEQ ID NO: 3129 - DNA, 122 bp, Homo sapiens
  misc_feature (61)..(62): /note="This region represents a CpG dinucleotide"
  misc_feature (61)..(61): /note="Nucleotide may be methylated to form 5-methylcytosine"
atgaaacttggatgttaccagcctgagctgtcaggcctcagtgtactcatttgtaaaaggcggataataatgacacctgcttcacgaggttgttatgcaaagcacttagactaatttctaac

SEQ ID NO: 3130 - DNA, 122 bp, Homo sapiens
  misc_feature (61)..(62): /note="This region represents a CpG dinucleotide"
  misc_feature (61)..(61): /note="Nucleotide may be methylated to form 5-methylcytosine"
ctgcctgagaggaaacattttccagtgtcctccttcctttttctttgaaaatgagctcaacggccgtgttcccaggcactataacaaatgagttgcttcaggcacagagaggcattaataaa

SEQ ID NO: 3131 - DNA, 122 bp, Homo sapiens
  misc_feature (61)..(62): /note="This region represents a CpG dinucleotide"
  misc_feature (61)..(61): /note="Nucleotide may be methylated to form 5-methylcytosine"
agatagatttctgttttaagaccccaagtgtgtgattctttcttacactagccatggaaacgaatgcattgtatctccctgggaggggcaggccaccaagactcatcatcccctccaactct

SEQ ID NO: 3132 - DNA, 122 bp, Homo sapiens
  misc_feature (61)..(62): /note="This region represents a CpG dinucleotide"
  misc_feature (61)..(61): /note="Nucleotide may be methylated to form 5-methylcytosine"
gttagattttggataaaggcaggctgtgaggctgaagagagcctgaagtcaccctgaacccgtgccccctcctgcctttcacctctggcccctcaaacctttggactctgctccaatgtttg

SEQ ID NO: 3133 - DNA, 122 bp, Homo sapiens
  misc_feature (61)..(62): /note="This region represents a CpG dinucleotide"
  misc_feature (61)..(61): /note="Nucleotide may be methylated to form 5-methylcytosine"
ctcatcttaaaaatataactgtgtcagtcactaattcattacctctcagcttcaaattgacgtctgtctcctttgctgctttcccggcaggctgatgtttggctttgccaatagggggcgat

SEQ ID NO: 3134 - DNA, 122 bp, Homo sapiens
  misc_feature (61)..(62): /note="This region represents a CpG dinucleotide"
  misc_feature (61)..(61): /note="Nucleotide may be methylated to form 5-methylcytosine"
ctgcccagaatccaccaccaaaaacggaagcagaggagagatgagaagcagcaccctctccggggcacagcctcgcccgggcacaccctcacccgggcacagcctcgcccgggcacaccctc

SEQ ID NO: 3135 - DNA, 122 bp, Homo sapiens
  misc_feature (61)..(62): /note="This region represents a CpG dinucleotide"
  misc_feature (61)..(61): /note="Nucleotide may be methylated to form 5-methylcytosine"
ctctgcctgtcttccttctactgtgattctctaatctctgagacttagctctcttagcctcgatccttggtgtggaaacaatcatatttatgctgtaggggaatttaaggagtacttggctg

SEQ ID NO: 3136 - DNA, 122 bp, Homo sapiens
  misc_feature (61)..(62): /note="This region represents a CpG dinucleotide"
  misc_feature (61)..(61): /note="Nucleotide may be methylated to form 5-methylcytosine"
gcgctgacatcggcctctgaagtggttgccccgcactggcttctggcctggccgtggccccgacagttgggcgtcctgcagcagtcccaacctcaggactccctaccctccacctccaaaca

SEQ ID NO: 3137 - DNA, 122 bp, Homo sapiens
  misc_feature (61)..(62): /note="This region represents a CpG dinucleotide"
  misc_feature (61)..(61): /note="Nucleotide may be methylated to form 5-methylcytosine"
ggggcgaggttctcccaaccaaaggccggcgggcttatgtccggtcggaggtacagtgggcgagcgccccttatcatagagcccaaatgcccatgcgtggcccacttcttccgccggggcca

SEQ ID NO: 3138 - DNA, 122 bp, Homo sapiens
  misc_feature (61)..(62): /note="This region represents a CpG dinucleotide"
  misc_feature (61)..(61): /note="Nucleotide may be methylated to form 5-methylcytosine"
atttctacctttaaaaataatttttctttaggatgtcctacagcaggggtcagcaaactacggctagtagatcaaatctgagaagctgcctatttttgtaagcaaagttttattggaacaca

SEQ ID NO: 3139 - DNA, 122 bp, Homo sapiens
  misc_feature (61)..(62): /note="This region represents a CpG dinucleotide"
  misc_feature (61)..(61): /note="Nucleotide may be methylated to form 5-methylcytosine"
aagttgcaaggcaaactcatgaagcattccgtatgttctttgagcagtggcactgtggctcgaaccaatgtccagcttccacactctctgcttggaagaggattacccttatttggaagtct

SEQ ID NO: 3140 - DNA, 122 bp, Homo sapiens
  misc_feature (61)..(62): /note="This region represents a CpG dinucleotide"
  misc_feature (61)..(61): /note="Nucleotide may be methylated to form 5-methylcytosine"
accagaaaccatttctggctgatgtaagcaaaaaaaatgaatttattataaggttttttacgtggttcacagaattgtcaggaaggctagagaattatactcagagctgtgcagccaggaac

SEQ ID NO: 3141 - DNA, 122 bp, Homo sapiens
  misc_feature (61)..(62): /note="This region represents a CpG dinucleotide"
  misc_feature (61)..(61): /note="Nucleotide may be methylated to form 5-methylcytosine"
catctcctctctccccaaccatgcctctcctgccccattctgcgtgtgtcactccagccccgccctctgaccaggtcgccccgtctcgccccacccaggccacagcacagatggagggccgt

SEQ ID NO: 3142 - DNA, 122 bp, Homo sapiens
  misc_feature (61)..(62): /note="This region represents a CpG dinucleotide"
  misc_feature (61)..(61): /note="Nucleotide may be methylated to form 5-methylcytosine"
tctgtaaacgccaaactgtctctttgttctcttcattttacacttagggctatgtttcctcgtctgtaaactgttcattgtaataaagtctgtttcctctaaattccttttcagagaacttt

SEQ ID NO: 3143 - DNA, 122 bp, Homo sapiens
  misc_feature (61)..(62): /note="This region represents a CpG dinucleotide"
  misc_feature (61)..(61): /note="Nucleotide may be methylated to form 5-methylcytosine"
gggagagggtaattagaggcccaggtgctggagttgccacctacctgcccctgcctgtctcgtgtcctggtgtggggctggccagctttgcctatcgtgccctgtattctaacactaatcct

SEQ ID NO: 3144 - DNA, 122 bp, Homo sapiens
  misc_feature (61)..(62): /note="This region represents a CpG dinucleotide"
  misc_feature (61)..(61): /note="Nucleotide may be methylated to form 5-methylcytosine"
gtgaatatttcagtaacattggctgtaaatcatacccaggccttttctttctgtgactcacgtgatgtaaggaagagatcagatgacgaggtcaagaggacacaaaacctcagccctgcttc

SEQ ID NO: 3145 - DNA, 122 bp, Homo sapiens
  misc_feature (61)..(62): /note="This region represents a CpG dinucleotide"
  misc_feature (61)..(61): /note="Nucleotide may be methylated to form 5-methylcytosine"
acataaaggcggtaagccctgtgttcgaaggcatgagtgtggcatacgtctgtgaaggtgcgtgggagcatgtctgtgaactagcatctacctgcactgagccactcaggcaggaatccctg

SEQ ID NO: 3146 - DNA, 122 bp, Homo sapiens
  misc_feature (61)..(62): /note="This region represents a CpG dinucleotide"
  misc_feature (61)..(61): /note="Nucleotide may be methylated to form 5-methylcytosine"
gcgtgccagtcagtgcctgggtcaccgcgaattccatcccaacccgctccggcaccgcgacggtctctcctgtcactggagacgtttcttgtgtcagtgcaaatatatgtcgttccttgttt

SEQ ID NO: 3147 - DNA, 122 bp, Homo sapiens
  misc_feature (61)..(62): /note="This region represents a CpG dinucleotide"
  misc_feature (61)..(61): /note="Nucleotide may be methylated to form 5-methylcytosine"
caatgcataagaaatgcttcagccagggccttattgtcatctagtatgtcatcagcatttcgtagctcttatcactatgtcacaggtaccattaatcagttttggtatctgtgaaatgcttc

SEQ ID NO: 3148 - DNA, 122 bp, Homo sapiens
  misc_feature (61)..(62): /note="This region represents a CpG dinucleotide"
  misc_feature (61)..(61): /note="Nucleotide may be methylated to form 5-methylcytosine"
cttagacaggccatctgtcaattattaagcgacatcagtgggcccagcaattccattctgcgtagtgcaaaggtcctccacacattccaggtctataccatcaaagtggctatttttctcaa

SEQ ID NO: 3149 - DNA, 122 bp, Homo sapiens
  misc_feature (61)..(62): /note="This region represents a CpG dinucleotide"
  misc_feature (61)..(61): /note="Nucleotide may be methylated to form 5-methylcytosine"
catgggtccccctccccgagccatgaagagctgcctgcggccatcttggccctcgcaccccgtctctgtcaccccaggcccctgtaacttgcttaacgcttcctgaggggtggtttgggttt

SEQ ID NO: 3150 - DNA, 122 bp, Homo sapiens
  misc_feature (61)..(62): /note="This region represents a CpG dinucleotide"
  misc_feature (61)..(61): /note="Nucleotide may be methylated to form 5-methylcytosine"
cgagaagggcggactgagggcagaccaggcaggagaccaggagcatggacattcctggcacggagaacataaagtgatgagagctacagaggagtcagaagtgatacccaatgagagagaaa

SEQ ID NO: 3151 - DNA, 122 bp, Homo sapiens
  misc_feature (61)..(62): /note="This region represents a CpG dinucleotide"
  misc_feature (61)..(61): /note="Nucleotide may be methylated to form 5-methylcytosine"
tcaattacaccaagtaggcagttacatgttcttacataaagctacaaactgtttttgtcacgttaatgaaagcaaaggaaacaaggagtcttttattgattctggagaccatgtgatacaaa

SEQ ID NO: 3152 - DNA, 122 bp, Homo sapiens
  misc_feature (61)..(62): /note="This region represents a CpG dinucleotide"
  misc_feature (61)..(61): /note="Nucleotide may be methylated to form 5-methylcytosine"
aatgagtgttcctttagtcgaaaaggaactatcatcaccattgactgagaggtggggtatcgtttaagggaatagagtgagtgctatagaacagagtaagcataaaagtataacaaaggaca

SEQ ID NO: 3153 - DNA, 122 bp, Homo sapiens
  misc_feature (61)..(62): /note="This region represents a CpG dinucleotide"
  misc_feature (61)..(61): /note="Nucleotide may be methylated to form 5-methylcytosine"
ggactggaaaaggttaaccggcttcagctctacactgctgacttagactgacagcaattgcgttccttctcttgctctctggttctctcaaacagtgttactgtagctaatctctccccacc

SEQ ID NO: 3154 - DNA, 122 bp, Homo sapiens
  misc_feature (61)..(62): /note="This region represents a CpG dinucleotide"
  misc_feature (61)..(61): /note="Nucleotide may be methylated to form 5-methylcytosine"
gccaggaagaacccctcaggcagggactgcacgtcagcgtgagtcatgctctcagaaacacgcatgcgtgcgtcatgctctcagaaacacgcatgcgtgcgtcatgctctcagaaacacgca

SEQ ID NO: 3155 - DNA, 122 bp, Homo sapiens
  misc_feature (61)..(62): /note="This region represents a CpG dinucleotide"
  misc_feature (61)..(61): /note="Nucleotide may be methylated to form 5-methylcytosine"
aattaaatcgggaagagaattattatgaaattaatgatcttaggtataataattgtactgcggttatgtagcagaacatctattcttaggagatacatgctgcaatgttaaagggttaagtg

SEQ ID NO: 3156 - DNA, 122 bp, Homo sapiens
  misc_feature (61)..(62): /note="This region represents a CpG dinucleotide"
  misc_feature (61)..(61): /note="Nucleotide may be methylated to form 5-methylcytosine"
tactgtcgattaccttactgggtaagggcaaaaacccctattgtgaaagacttgtggctgcgtagccaacggccattctttttgaaacagtcatttctgtttttgaaactattttttttaaa

SEQ ID NO: 3157 - DNA, 122 bp, Homo sapiens
  misc_feature (61)..(62): /note="This region represents a CpG dinucleotide"
  misc_feature (61)..(61): /note="Nucleotide may be methylated to form 5-methylcytosine"
cagatggctaccgcccaaggtgatgtatgactaccactacttgagagacacgatgctgaacgcttccaaattccagaccaagggaactatgaaaaataagtgttgtttcaagccactaaatt

SEQ ID NO: 3158 - DNA, 122 bp, Homo sapiens
  misc_feature (61)..(62): /note="This region represents a CpG dinucleotide"
  misc_feature (61)..(61): /note="Nucleotide may be methylated to form 5-methylcytosine"
gaaatcctctgtcttgtttacactacattaaaatctcccttccccaagcccgtccttctccgaaggctgaggtgcttatcctggagccactacttcctgcagcttgaagatgagtaaaccat

SEQ ID NO: 3159 - DNA, 122 bp, Homo sapiens
  misc_feature (61)..(62): /note="This region represents a CpG dinucleotide"
  misc_feature (61)..(61): /note="Nucleotide may be methylated to form 5-methylcytosine"
tcaatcttgatttttgaaaaggtccaaggatgattacgacgtgcgtaggttgcgaaccatcgaaaagcacccaccaatgtgtcaacctggcaactcaggaaaaagccaataaggagcctgac

SEQ ID NO: 3160 - DNA, 122 bp, Homo sapiens
  misc_feature (61)..(62): /note="This region represents a CpG dinucleotide"
  misc_feature (61)..(61): /note="Nucleotide may be methylated to form 5-methylcytosine"
gagatgggagggtgagagccccaggggcccaggcagagcctggtctgcaggtggggtggccgtgggtgtggaagaaacaaagaaaaacagaaggcagagggctctctctccatgggtgaaat

SEQ ID NO: 3161 - DNA, 122 bp, Homo sapiens
  misc_feature (61)..(62): /note="This region represents a CpG dinucleotide"
  misc_feature (61)..(61): /note="Nucleotide may be methylated to form 5-methylcytosine"
cctttcaggcagacctgtcaggagagagacagacagttcagggtaattcattcttgccaccgagtctcaagtgacttgtgaaggaatctggcatttctaaaatataaatagcattaactcac

SEQ ID NO: 3162 - DNA, 122 bp, Homo sapiens
  misc_feature (61)..(62): /note="This region represents a CpG dinucleotide"
  misc_feature (61)..(61): /note="Nucleotide may be methylated to form 5-methylcytosine"
gtctggtgaggactcacttcctggttcataggtagccatctcctctgtgtcctcaaaagacgggaggagtaaatgagctttctgggatccattttacaagggccctacttcttcatgaccta

SEQ ID NO: 3163 - DNA, 122 bp, Homo sapiens
  misc_feature (61)..(62): /note="This region represents a CpG dinucleotide"
  misc_feature (61)..(61): /note="Nucleotide may be methylated to form 5-methylcytosine"
gcaacttattagtaagtttctctcttaaaacgtttccggctgggtgcagtggctcacactcgtaataccagcactttgggaggctgaggcgggcagatcacctgaggtcaggagtttgagac

SEQ ID NO: 3164 - DNA, 122 bp, Homo sapiens
  misc_feature (61)..(62): /note="This region represents a CpG dinucleotide"
  misc_feature (61)..(61): /note="Nucleotide may be methylated to form 5-methylcytosine"
gcaggatgggggtagattcctattaccttgctgccctcaagtacataaggaggtcacagtcgttaactccaggcatccagaccagttcctcatgttgggtcactgtatcaccatctggagaa

SEQ ID NO: 3165 - DNA, 122 bp, Homo sapiens
  misc_feature (61)..(62): /note="This region represents a CpG dinucleotide"
  misc_feature (61)..(61): /note="Nucleotide may be methylated to form 5-methylcytosine"
taaagaaagagaaaaaccgcaaatcactatacatgatcaacatttgccattctactagcacgttgctacagctgcttccagctttgctggggtaaaacactgacacctgttattcagcgagg

SEQ ID NO: 3166 - DNA, 122 bp, Homo sapiens
  misc_feature (61)..(62): /note="This region represents a CpG dinucleotide"
  misc_feature (61)..(61): /note="Nucleotide may be methylated to form 5-methylcytosine"
taaacagggaagtaatggctctgtggccacctatgatgcagcatggaagttctactggcacgtgtcttctttctggatgtagtaccccctctaacacagccgccacatggtagagtagttgc

SEQ ID NO: 3167 - DNA, 122 bp, Homo sapiens
  misc_feature (61)..(62): /note="This region represents a CpG dinucleotide"
  misc_feature (61)..(61): /note="Nucleotide may be methylated to form 5-methylcytosine"
agacagcacagctggttaatgtcagtaaagctagcatccacatgttcacatcctatctcacgttctttctacaaccccaagagggcttacttcacttaaattgaagtcaaatcccagctatt

SEQ ID NO: 3168 - DNA, 122 bp, Homo sapiens
  misc_feature (61)..(62): /note="This region represents a CpG dinucleotide"
  misc_feature (61)..(61): /note="Nucleotide may be methylated to form 5-methylcytosine"
cacttccacatgcatacaggtgggcacactagtgtgcctccaagcagttagcttcagagccggaagaagatgtggggttgtatacccagtctaacctgccttcaggttctgcccagcagcca

SEQ ID NO: 3169 - DNA, 122 bp, Homo sapiens
  misc_feature (61)..(62): /note="This region represents a CpG dinucleotide"
  misc_feature (61)..(61): /note="Nucleotide may be methylated to form 5-methylcytosine"
tgaactaacaaaacaaagaagaggtttcgagtgcaagatgaatccaggctgtacttacagcgaattggcaaaaaccaagataaaaatgagaagatatccaagatgtttcagaaatttcaggc

SEQ ID NO: 3170 - DNA, 122 bp, Homo sapiens
  misc_feature (61)..(62): /note="This region represents a CpG dinucleotide"
  misc_feature (61)..(61): /note="Nucleotide may be methylated to form 5-methylcytosine"
cttccgcaggggcagcggggtctcctggaagccccggagcctcatggaagcccgggagggcggcggagcggggcccgcagcgcggggcccggaggggcagccggcgcccgaagccagggtgc

SEQ ID NO: 3171 - DNA, 122 bp, Homo sapiens
  misc_feature (61)..(62): /note="This region represents a CpG dinucleotide"
  misc_feature (61)..(61): /note="Nucleotide may be methylated to form 5-methylcytosine"
cgaccccctagtaataacaaattcactgttgaccctggacagatggtgttcaaaaagctacgtgcagggggccagtacacttaggtcgcagggaaactcccacgtattaagcaccgactgtg

SEQ ID NO: 3172 - DNA, 122 bp, Homo sapiens
  misc_feature (61)..(62): /note="This region represents a CpG dinucleotide"
  misc_feature (61)..(61): /note="Nucleotide may be methylated to form 5-methylcytosine"
aaagtcccggagctgtgacactcatctccatagcagcagccccaggtccttcaagacagccgtgcctctagggcctctgttaataaaggaatgaaatgcacatcctctttttacaatgccat

SEQ ID NO: 3173 - DNA, 122 bp, Homo sapiens
  misc_feature (61)..(62): /note="This region represents a CpG dinucleotide"
  misc_feature (61)..(61): /note="Nucleotide may be methylated to form 5-methylcytosine"
gtggaggctgggcaggaatgcttgggacgttgcctgtttgtgcccctgtgtgtgtgcgcccgtgtgcgaggaagtggctttctggaggcgtcgtgcacccatgagggtgtatatgtggcggg

SEQ ID NO: 3174 - DNA, 122 bp, Homo sapiens
  misc_feature (61)..(62): /note="This region represents a CpG dinucleotide"
  misc_feature (61)..(61): /note="Nucleotide may be methylated to form 5-methylcytosine"
ttcagatgttaaacactttctcatgcacaaaccacttaagcagcatagacacagagtccacgtcagggaatgttacattcagtataggcacctattatttggtaactcagaagtaggaaaat

SEQ ID NO: 3175 - DNA, 122 bp, Homo sapiens
  misc_feature (61)..(62): /note="This region represents a CpG dinucleotide"
  misc_feature (61)..(61): /note="Nucleotide may be methylated to form 5-methylcytosine"
accggctgagccagaatgctcccctctcctggggtggctgtcgggctcaagcacagaaggcgaaagccacacaggctggcccgccgccagctctggtgttctttccatgaggtgcttctgaa

SEQ ID NO: 3176 - DNA, 122 bp, Homo sapiens
  misc_feature (61)..(62): /note="This region represents a CpG dinucleotide"
  misc_feature (61)..(61): /note="Nucleotide may be methylated to form 5-methylcytosine"
ggaccttggggccaggtgccatggtcctctaagcactcttgctcgatggtaaacataacacgcgctgcttgcagaacatgtggaaacactgaaacgcttaaaggagagaacatggtcccggt

SEQ ID NO: 3177 - DNA, 122 bp, Homo sapiens
  misc_feature (61)..(62): /note="This region represents a CpG dinucleotide"
  misc_feature (61)..(61): /note="Nucleotide may be methylated to form 5-methylcytosine"
ggaggggaaagggggagcaggcacgttacatggtgaaagcaggagcaagtgagagcgaggcgggaaggggagtgccacacacttgcaagaactcactgtcaggaagacagcaccaagctgtg

SEQ ID NO: 3178 - DNA, 122 bp, Homo sapiens
  misc_feature (61)..(62): /note="This region represents a CpG dinucleotide"
  misc_feature (61)..(61): /note="Nucleotide may be methylated to form 5-methylcytosine"
agaaggccagtgactcagacctgcctacttcccactatctcctcaacacactcataaaagcgtttgttgccactccactgaaaaggcttcaaccaaggtcagcagctgtttacattttgcca

SEQ ID NO: 3179 - DNA, 122 bp, Homo sapiens
  misc_feature (61)..(62): /note="This region represents a CpG dinucleotide"
  misc_feature (61)..(61): /note="Nucleotide may be methylated to form 5-methylcytosine"
tctgaggttagctatggtggtggccgcacaacatggcgagtgtatacgaaacctctggaccgtgtgggctgcacactctcaatgggtgagttctaaggtctgtgaactccatcccgacaaaa

SEQ ID NO: 3180 - DNA, 122 bp, Homo sapiens
  misc_feature (61)..(62): /note="This region represents a CpG dinucleotide"
  misc_feature (61)..(61): /note="Nucleotide may be methylated to form 5-methylcytosine"
tggtatgtatccttccagtcacatctatttacccatatattcaaatgcaaaatatacatacgtagggtggtggtggttgtattttaaaatgaaattattttatgcacattactctgcatcgt

SEQ ID NO: 3181 - DNA, 122 bp, Homo sapiens
  misc_feature (61)..(62): /note="This region represents a CpG dinucleotide"
  misc_feature (61)..(61): /note="Nucleotide may be methylated to form 5-methylcytosine"
acccatgtgaccagtcacttttctctaggcttcagtttcttcatctgtaaatggggatgacgccctacctcagtgggtggttgtaagaattgaatagacaatttagtgtggtgcctggcaca

SEQ ID NO: 3182 - DNA, 122 bp, Homo sapiens
  misc_feature (61)..(62): /note="This region represents a CpG dinucleotide"
  misc_feature (61)..(61): /note="Nucleotide may be methylated to form 5-methylcytosine"
gtaactcactggaaaagtgaaaaattctcaccttcacacccacagagataacgggggcggcgtgggggcaagccgaacgcatgcgtgtgctctgtgcactcaccgccgccctctccgcggct

SEQ ID NO: 3183 - DNA, 122 bp, Homo sapiens
  misc_feature (61)..(62): /note="This region represents a CpG dinucleotide"
  misc_feature (61)..(61): /note="Nucleotide may be methylated to form 5-methylcytosine"
cttgggttatgggtgaatcaaaatctcagaaaccatcactaaagaacttacacatgtaaccgaaaaccacctgttccccaaaactattgaaataaaataaaataaaataaaaatagcagata

SEQ ID NO: 3184 - DNA, 122 bp, Homo sapiens
  misc_feature (61)..(62): /note="This region represents a CpG dinucleotide"
  misc_feature (61)..(61): /note="Nucleotide may be methylated to form 5-methylcytosine"
cccctcataaccctcatccaacctaccagcaatttttttagcatgaatcttcaaaatacacgctgaatcctaccacttctcaattctatacctttgtccaaactttcctgactcttgacact

SEQ ID NO: 3185 - DNA, 122 bp, Homo sapiens
  misc_feature (61)..(62): /note="This region represents a CpG dinucleotide"
  misc_feature (61)..(61): /note="Nucleotide may be methylated to form 5-methylcytosine"
caggcgcaaggcgcgcccccttccctcacccgcaggcgccgggtccgcggacgcccaccccggcccgccccgcccgccgcctggtgcccgctcaaggtcactgctgacaaggcgcctgcctc

SEQ ID NO: 3186 - DNA, 122 bp, Homo sapiens
  misc_feature (61)..(62): /note="This region represents a CpG dinucleotide"
  misc_feature (61)..(61): /note="Nucleotide may be methylated to form 5-methylcytosine"
ccggttaaaaaccacaagtattcctcagcttctctttcaatgtcaatgaggtgtgcatgacgtcatcttgcatataaaatattcctcccattttaaaacattaaactatctttctgtgttaa

SEQ ID NO: 3187 - DNA, 122 bp, Homo sapiens
  misc_feature (61)..(62): /note="This region represents a CpG dinucleotide"
  misc_feature (61)..(61): /note="Nucleotide may be methylated to form 5-methylcytosine"
ctcagcccagtgagcatctcaatttcagcctcaggagaccctaagcagaaagcccagtcacgttgtaaccagccttctacccacagaattgtgaggtgataactgggaattgtttgaagcca

SEQ ID NO: 3188 - DNA, 122 bp, Homo sapiens
  misc_feature (61)..(62): /note="This region represents a CpG dinucleotide"
  misc_feature (61)..(61): /note="Nucleotide may be methylated to form 5-methylcytosine"
cagggtgacccacatttttgttgctgttgttgttctttcaagaggattgagcaaggcagtcgactgacaacttgaaacccagcccagctcactggcctcatgggggtagaccagcctgcttt

SEQ ID NO: 3189 - DNA, 122 bp, Homo sapiens
  misc_feature (61)..(62): /note="This region represents a CpG dinucleotide"
  misc_feature (61)..(61): /note="Nucleotide may be methylated to form 5-methylcytosine"
agtgagatggtatctcactgtggttaggattcacatttccctgatgactagtaatgtttccgtgtaatttcttgaatgatcattcagtaacaataagtgtaggttgagtttgtagaatcagg

SEQ ID NO: 3190 - DNA, 122 bp, Homo sapiens
  misc_feature (61)..(62): /note="This region represents a CpG dinucleotide"
  misc_feature (61)..(61): /note="Nucleotide may be methylated to form 5-methylcytosine"
agaggaagctgtgcaatgtggagtcatgcagcccatccctcccctctctcaatcctatagcggctagacggtgtggagaaacatggttattgtttaatcacatcacactggctgtaaatcaa

SEQ ID NO: 3191 - DNA, 122 bp, Homo sapiens
  misc_feature (61)..(62): /note="This region represents a CpG dinucleotide"
  misc_feature (61)..(61): /note="Nucleotide may be methylated to form 5-methylcytosine"
agacttttcccccttctagttggctcacttggacaggacaggatctaaagacagactccacgtgggctcgctcttttgaggcccccttctggcctttgtaaacatttattaaacctttgccc

SEQ ID NO: 3192 - DNA, 122 bp, Homo sapiens
  misc_feature (61)..(62): /note="This region represents a CpG dinucleotide"
  misc_feature (61)..(61): /note="Nucleotide may be methylated to form 5-methylcytosine"
acacgggcaagttaacagtgtggagtctgcgggctgtgctggtttcctctgtgtctccagcgcccagccgaatgcctgactcgctccagttctcagaaagtgtttactaagtgaaccgcact

SEQ ID NO: 3193 - DNA, 122 bp, Homo sapiens
  misc_feature (61)..(62): /note="This region represents a CpG dinucleotide"
  misc_feature (61)..(61): /note="Nucleotide may be methylated to form 5-methylcytosine"
gataagagcccttaagctctttataagaaagtggtacttttcacttctgtgaagcaggaacgtctttataggtgatacacccctactttatggtaattgcttatttaatgcctgccttattt

SEQ ID NO: 3194 - DNA, 122 bp, Homo sapiens
  misc_feature (61)..(62): /note="This region represents a CpG dinucleotide"
  misc_feature (61)..(61): /note="Nucleotide may be methylated to form 5-methylcytosine"
gtgggttgatgtgggcagagttggtgggggtcccagggagtccccccagccccttcccagcgtcatagcgacatggtctggggcttacattacccccatgttgtttttgtacagcaggaagc

SEQ ID NO: 3195 - DNA, 122 bp, Homo sapiens
  misc_feature (61)..(62): /note="This region represents a CpG dinucleotide"
  misc_feature (61)..(61): /note="Nucleotide may be methylated to form 5-methylcytosine"
caacaccgaaacaaaggcctttaattggtttcagagttttaagaaaacttgttaagcaaccggactttgagagcaagcagaaatgggtgtgaatcaagacatcccaaatgggtgaccttgtg

SEQ ID NO: 3196 - DNA, 122 bp, Homo sapiens
  misc_feature (61)..(62): /note="This region represents a CpG dinucleotide"
  misc_feature (61)..(61): /note="Nucleotide may be methylated to form 5-methylcytosine"
gcgcgaagggcagaggccgaggcccaccgggaggcagaggcccaggcctgggagcaagcccggctgcgggaggcagtggaggctgctggccaggagctggagtctgcgtcccaggaacggga

SEQ ID NO: 3197 - DNA, 122 bp, Homo sapiens
  misc_feature (61)..(62): /note="This region represents a CpG dinucleotide"
  misc_feature (61)..(61): /note="Nucleotide may be methylated to form 5-methylcytosine"
ctgggttctggcctttttggtaatgttattcagctgtttctctcaggaacttcctaataacgtactttagcactattaacaaaaggaccacatggtgaatttcagtgttccagaggtgattc

SEQ ID NO: 3198 - DNA, 122 bp, Homo sapiens
  misc_feature (61)..(62): /note="This region represents a CpG dinucleotide"
  misc_feature (61)..(61): /note="Nucleotide may be methylated to form 5-methylcytosine"
cgtcacttccactttagtctctgttagaaatgactcattaaggccaggtgtgggggctcacgcctgtaatcccagcactttgggaggccgaggcgagcggatcacgaggtcaggagatcaag

SEQ ID NO: 3199 - DNA, 122 bp, Homo sapiens
  misc_feature (61)..(62): /note="This region represents a CpG dinucleotide"
  misc_feature (61)..(61): /note="Nucleotide may be methylated to form 5-methylcytosine"
gtttatatagagtacaaatggaagtaaaagagtaattgcaatttgaccccaaaaaagctacgtggcgctcccatctggctgttcctgtactgaagttctcagtaagtttctactttaaaaca

SEQ ID NO: 3200 - DNA, 122 bp, Homo sapiens
  misc_feature (61)..(62): /note="This region represents a CpG dinucleotide"
  misc_feature (61)..(61): /note="Nucleotide may be methylated to form 5-methylcytosine"
ccacttaatgggacttaagtgttacctagttttagaggaataagaataacttctgtctcacgttgggtttcactgaggagatgtctgcattggaaagacagagctcatgtcactaaagaagc

SEQ ID NO: 3201 - DNA, 122 bp, Homo sapiens
  misc_feature (61)..(62): /note="This region represents a CpG dinucleotide"
  misc_feature (61)..(61): /note="Nucleotide may be methylated to form 5-methylcytosine"
tgaagacaagtcctgacaccaccgctgggtggcagaactagaacagaccaggaacggggacgaccccaggagaaatgtctgaggaaaaaagaatgaatctaatagaatgtccaatgtgctca

SEQ ID NO: 3202 - DNA, 122 bp, Homo sapiens
  misc_feature (61)..(62): /note="This region represents a CpG dinucleotide"
  misc_feature (61)..(61): /note="Nucleotide may be methylated to form 5-methylcytosine"
tgtgaaaagcaaacagttctgcagtccacttcaaggcagcctgacatctgctctggacagcggtctgagtcatttgtgaattggcaggctttgttcctagaagcctagctagagccagggct

SEQ ID NO: 3203 - DNA, 122 bp, Homo sapiens
  misc_feature (61)..(62): /note="This region represents a CpG dinucleotide"
  misc_feature (61)..(61): /note="Nucleotide may be methylated to form 5-methylcytosine"
agataaaattaccccctatatgataaataaatgtgaggatctctcaattaattttggccacgtggacacaatcttttaagcatttgtactgtaggtcaggtcagtttaaagggagaaatgga

SEQ ID NO: 3204 - DNA, 122 bp, Homo sapiens
  misc_feature (61)..(62): /note="This region represents a CpG dinucleotide"
  misc_feature (61)..(61): /note="Nucleotide may be methylated to form 5-methylcytosine"
ttgccagagtctcgaggggtggcctccttccacgggtgagtaaccacaagtccatgtgaccgaacaaacagcatattcttttgttcaaaagagaaaaacaacattgaaggaaatcagctgaa

SEQ ID NO: 3205 - DNA, 122 bp, Homo sapiens
  misc_feature (61)..(62): /note="This region represents a CpG dinucleotide"
  misc_feature (61)..(61): /note="Nucleotide may be methylated to form 5-methylcytosine"
aaagcccaaacaataggaccatttatcatttaggtgaagccaaaagctggattgagtagtcggtgacagagggctaacacagatagattctgtgctccactactgcctctttcttcccctgc

SEQ ID NO: 3206 - DNA, 122 bp, Homo sapiens
  misc_feature (61)..(62): /note="This region represents a CpG dinucleotide"
  misc_feature (61)..(61): /note="Nucleotide may be methylated to form 5-methylcytosine"
gtgatatatggttttctggaagaccaagaatggtaaggaaaaataggtgctgtatacacacgtatgcataatcatgttattacagaatttatgttgggggggaaaatgagagttgttctgta

SEQ ID NO: 3207 - DNA, 122 bp, Homo sapiens
  misc_feature (61)..(62): /note="This region represents a CpG dinucleotide"
  misc_feature (61)..(61): /note="Nucleotide may be methylated to form 5-methylcytosine"
tgcaggaataatcacaagtaagaacattacacaacatggaataaaattaccctggtttaacgtgggcttggtgaaaataaaagctatgtgttaaaatactattcttcatacgcttctaaaaa

SEQ ID NO: 3208 - DNA, 122 bp, Homo sapiens
  misc_feature (61)..(62): /note="This region represents a CpG dinucleotide"
  misc_feature (61)..(61): /note="Nucleotide may be methylated to form 5-methylcytosine"
aggcacttgtcctccacaatggctgccatgagtgttggttgccgatggttacagccaagtcgttccttggccttagaggaggaagctctcttgcccgagggcatgcactcccctactgcagg

SEQ ID NO: 3209 - DNA, 122 bp, Homo sapiens
  misc_feature (61)..(62): /note="This region represents a CpG dinucleotide"
  misc_feature (61)..(61): /note="Nucleotide may be methylated to form 5-methylcytosine"
ccactttccccccagtaacctccagggccaaagctcagctcctcttcctaagagcagactcgacagccagagtccttcctgccacctcaccaggggcactggccagcctcacctcagctggg

SEQ ID NO: 3210 - DNA, 122 bp, Homo sapiens
  misc_feature (61)..(62): /note="This region represents a CpG dinucleotide"
  misc_feature (61)..(61): /note="Nucleotide may be methylated to form 5-methylcytosine"
ctctgccctcctccagagggcctagagccagcctaggccctaggctggagtcagcctgcacgctcagcccgccaggaacaacaggccctcagacatcactgtggcagaggttccaaggtggg

SEQ ID NO: 3211 - DNA, 122 bp, Homo sapiens
  misc_feature (61)..(62): /note="This region represents a CpG dinucleotide"
  misc_feature (61)..(61): /note="Nucleotide may be methylated to form 5-methylcytosine"
ccgagcaagccaccactgccttcccggctgcagcgccgtgatttatcggcggctcctcctcgccagggcccacggcaggaggagttcaaacacccgcgagaaaagccacccgctattgatcc

SEQ ID NO: 3212 - DNA, 122 bp, Homo sapiens
  misc_feature (61)..(62): /note="This region represents a CpG dinucleotide"
  misc_feature (61)..(61): /note="Nucleotide may be methylated to form 5-methylcytosine"
agggcgagtgcgcgcctggcaagccgacgctggtgtgttctagcgcggtggggagttggtcgtactcgcagcagaggaggcagagggtgtgctctggcgagggtaagcagaagaccgacctc

SEQ ID NO: 3213 - DNA, 122 bp, Homo sapiens
  misc_feature (61)..(62): /note="This region represents a CpG dinucleotide"
  misc_feature (61)..(61): /note="Nucleotide may be methylated to form 5-methylcytosine"
atataatttatttacatggtaaatccaagtataccaatgtacaaatataaaaatttgccacggacccataaaagtattgaagaaagagaaaatagggaagaggaggaaggaatatacggaaa

SEQ ID NO: 3214 - DNA, 122 bp, Homo sapiens
  misc_feature (61)..(62): /note="This region represents a CpG dinucleotide"
  misc_feature (61)..(61): /note="Nucleotide may be methylated to form 5-methylcytosine"
cagcgagccctgctggcccatgggatcctcatgcttgaatgagtggttggggaactgcgccgcatggtgcgagggcgtgtgaccgtagctgggcgtcccgtcgaaggtgaccgtgctgtaac

SEQ ID NO: 3215 - DNA, 122 bp, Homo sapiens
  misc_feature (61)..(62): /note="This region represents a CpG dinucleotide"
  misc_feature (61)..(61): /note="Nucleotide may be methylated to form 5-methylcytosine"
cctctcttgtttcctgcacctgaagtatactgggtcactactcagttcagggaataaacacggtatcttctgtgaagatgtccctcaaccaggttcaccccctaggggtagtcacttctttg

SEQ ID NO: 3216 - DNA, 122 bp, Homo sapiens
  misc_feature (61)..(62): /note="This region represents a CpG dinucleotide"
  misc_feature (61)..(61): /note="Nucleotide may be methylated to form 5-methylcytosine"
tagagcttgatcctccaatattacatggcactaaaccaactgcagtcacaagtgagtttacgttcttggcaatttactatcatttaagttctggagaaagttatgttagattaagctaacat

SEQ ID NO: 3217 - DNA, 122 bp, Homo sapiens
  misc_feature (61)..(62): /note="This region represents a CpG dinucleotide"
  misc_feature (61)..(61): /note="Nucleotide may be methylated to form 5-methylcytosine"
aatgattccttaagatccatggccaaaacaaattgccgcaattaacacgtgccactgccacgatctatgggctgaaacgtggctggaacgacgcagaagcagaaaccacagagagcgtgcgc

SEQ ID NO: 3218 - DNA, 122 bp, Homo sapiens
  misc_feature (61)..(62): /note="This region represents a CpG dinucleotide"
  misc_feature (61)..(61): /note="Nucleotide may be methylated to form 5-methylcytosine"
ccttgagggaaagaacacacagtgccggcctttggaattggcagccagtgtgctgttctccgtctgataagaggtactgtaaataaaactgtacaccatggcctgttgtaaaatgccctgcg

SEQ ID NO: 3219 - DNA, 122 bp, Homo sapiens
  misc_feature (61)..(62): /note="This region represents a CpG dinucleotide"
  misc_feature (61)..(61): /note="Nucleotide may be methylated to form 5-methylcytosine"
tcatactgtttcacaaaatgcttatctactgtgcctaacacactgcaagtcaagacctgtcgcgagccgagattgcgccactgcactccagcctggggcacagagcaagactaggtttaaaa

SEQ ID NO: 3220 - DNA, 122 bp, Homo sapiens
  misc_feature (61)..(62): /note="This region represents a CpG dinucleotide"
  misc_feature (61)..(61): /note="Nucleotide may be methylated to form 5-methylcytosine"
ataaacggtagaatatttcctcaagtcaacaccaaaaagggatgttataataaagcaggtcggacaacagtctcacattactgaataacgatactgatctgatgttgatgattgcttcttta

SEQ ID NO: 3221 - DNA, 122 bp, Homo sapiens
  misc_feature (61)..(62): /note="This region represents a CpG dinucleotide"
  misc_feature (61)..(61): /note="Nucleotide may be methylated to form 5-methylcytosine"
acacatgcctcttgaactgatcttatcagcggatggggagcttcacaggaagctgccggtcgctgctgccgtccacagagggggaaatcctgttttgaaccaggtagcaccagggccgtttg

SEQ ID NO: 3222 - DNA, 122 bp, Homo sapiens
  misc_feature (61)..(62): /note="This region represents a CpG dinucleotide"
  misc_feature (61)..(61): /note="Nucleotide may be methylated to form 5-methylcytosine"
tctattcggcttgccccagcgcgctgccccacgtccccgaggccccggcccaggcccagccggcgagtcccggcctgctccactctgcacaaaacgaaacccaaatgcccaaaaagctcagg

SEQ ID NO: 3223 - DNA, 122 bp, Homo sapiens
  misc_feature (61)..(62): /note="This region represents a CpG dinucleotide"
  misc_feature (61)..(61): /note="Nucleotide may be methylated to form 5-methylcytosine"
acacatacaaacataacagagtgaaaggaaataacatttaatgagcacttcccatggagccgagctcatgttcttatgttatctctgttaatctgtcaggtaggtgtctttattatccccac

SEQ ID NO: 3224 - DNA, 122 bp, Homo sapiens
  misc_feature (61)..(62): /note="This region represents a CpG dinucleotide"
  misc_feature (61)..(61): /note="Nucleotide may be methylated to form 5-methylcytosine"
tgcccatgacaccctaagccttattgagcaggttaacctcaactttacaatgatcttagccgccaaatcttctccagtggtgattgttcagtaaacgttaaatggattatgtacaaagatga

SEQ ID NO: 3225 - DNA, 122 bp, Homo sapiens
  misc_feature (61)..(62): /note="This region represents a CpG dinucleotide"
  misc_feature (61)..(61): /note="Nucleotide may be methylated to form 5-methylcytosine"
cattaggcaatttagcacttacctgctgagttccaagtgctcatcttacctcatgtgatacggtaaatttggcaagtgctctgtactagtagtttggcatttaaggaaaatcaagctataat

SEQ ID NO: 3226 - DNA, 122 bp, Homo sapiens
  misc_feature (61)..(62): /note="This region represents a CpG dinucleotide"
  misc_feature (61)..(61): /note="Nucleotide may be methylated to form 5-methylcytosine"
aaaaacaccaggcctaaaatagtatctaggacaacactggcagaactaaaagaaacagaacgaggaagaaatttgggtggggcatagagcaaatgagttcaatttcacacagaatgattttg

SEQ ID NO: 3227 - DNA, 122 bp, Homo sapiens
  misc_feature (61)..(62): /note="This region represents a CpG dinucleotide"
  misc_feature (61)..(61): /note="Nucleotide may be methylated to form 5-methylcytosine"
cagaaaaggaaacacttatccatgacatgcttggctaagttattacctaacaccagagcacgtcactgccctgccttggcctggaagaaggtaaaccctcactacccgtgttttgtgatgac

SEQ ID NO: 3228 - DNA, 122 bp, Homo sapiens
  misc_feature (61)..(62): /note="This region represents a CpG dinucleotide"
  misc_feature (61)..(61): /note="Nucleotide may be methylated to form 5-methylcytosine"
tgcccattaccatgatgtaatccagtttacagcagagctttgaatgagaactcagcgccccgggcactgtgggaggaacccgggctggtggagggctctggtgtctcgccgccatttatcct

SEQ ID NO: 3229 - DNA, 122 bp, Homo sapiens
  misc_feature (61)..(62): /note="This region represents a CpG dinucleotide"
  misc_feature (61)..(61): /note="Nucleotide may be methylated to form 5-methylcytosine"
ctggctgattttcaactacacacaaagcatgaatcccggtgacacaacacaatgtaaatacgaacaaccttgacaaagctaaaggtacaaaaaataggaaggaagtgcaggagacctgatgg

SEQ ID NO: 3230 - DNA, 122 bp, Homo sapiens
  misc_feature (61)..(62): /note="This region represents a CpG dinucleotide"
  misc_feature (61)..(61): /note="Nucleotide may be methylated to form 5-methylcytosine"
caagacatcctggacattggttctgagcagcaatcattgcaatttgctcttttctgcagccgtgaaactaccaggataaagtaatcagagtgatcccatgatgtgctggggcaaactaaaca

SEQ ID NO: 3231 - DNA, 122 bp, Homo sapiens
  misc_feature (61)..(62): /note="This region represents a CpG dinucleotide"
  misc_feature (61)..(61): /note="Nucleotide may be methylated to form 5-methylcytosine"
gaaaaactctaatccaatatttttttcaaccttagctgtagttagaaagacctatttacacgtgcttccaagtcattgtcataatagctctactagtcaaaaaagcctccaagttaacccta

SEQ ID NO: 3232 - DNA, 122 bp, Homo sapiens
  misc_feature (61)..(62): /note="This region represents a CpG dinucleotide"
  misc_feature (61)..(61): /note="Nucleotide may be methylated to form 5-methylcytosine"
gagtggaggacaggggctgaaggtgagccctgagaaggcctcatggcactgcacacccaccgtccctgccagtgtgcaatcatggcctgcatcctggccccactcccaggccatggggtccc

SEQ ID NO: 3233 - DNA, 122 bp, Homo sapiens
  misc_feature (61)..(62): /note="This region represents a CpG dinucleotide"
  misc_feature (61)..(61): /note="Nucleotide may be methylated to form 5-methylcytosine"
cttcctccttctgcccaattcatcttttggtgcatgctaacaagcagtggaatggacagacgcagcacaagggaggagcagccagagttccagataagcaaggtgccaagagttgcaacaag

SEQ ID NO: 3234 - DNA, 122 bp, Homo sapiens
  misc_feature (61)..(62): /note="This region represents a CpG dinucleotide"
  misc_feature (61)..(61): /note="Nucleotide may be methylated to form 5-methylcytosine"
tacagaaacccagagccaaaggtgctctcaggggatcccctgaaacattcaaagccattgcggccccagaaggtaaatggctttcgcaggaacacaggtctcctgactcacggcctaacctt

SEQ ID NO: 3235 - DNA, 122 bp, Homo sapiens
  misc_feature (61)..(62): /note="This region represents a CpG dinucleotide"
  misc_feature (61)..(61): /note="Nucleotide may be methylated to form 5-methylcytosine"
acctcatgatccgccagccttggcttcccaaagtgctgggattacaggcgtgagccaccacgcccggccaagaagtttttttttaatgctgtttttgtttattgtcaaattcacaagtaatg

SEQ ID NO: 3236 - DNA, 122 bp, Homo sapiens
  misc_feature (61)..(62): /note="This region represents a CpG dinucleotide"
  misc_feature (61)..(61): /note="Nucleotide may be methylated to form 5-methylcytosine"
aagcaaatccattaagatcttcctgcaaaaaaaaaatgtgttattgagaaagccctggtgcgataggaaggaggggaacctgcactagctctgggacatttgtggcatcagttcccctctct

SEQ ID NO: 3237 - DNA, 122 bp, Homo sapiens
  misc_feature (61)..(62): /note="This region represents a CpG dinucleotide"
  misc_feature (61)..(61): /note="Nucleotide may be methylated to form 5-methylcytosine"
cgtggaaacccccagcccagtggttatggactttcttggggcctcaactctccccaagagcgtgatcctcactacgggggagcggcgctttatccggcggggcgggtggacactcctacaga

SEQ ID NO: 3238 - DNA, 122 bp, Homo sapiens
  misc_feature (61)..(62): /note="This region represents a CpG dinucleotide"
  misc_feature (61)..(61): /note="Nucleotide may be methylated to form 5-methylcytosine"
gctctctttcccgtggcggccctgcttccggcaggggcatcacccggaagtgggggtagtcgagggagggaggggtaaaggcggctggccgccgcggcggggggtgggaaaagagaagcaga

SEQ ID NO: 3239 - DNA, 122 bp, Homo sapiens
  misc_feature (61)..(62): /note="This region represents a CpG dinucleotide"
  misc_feature (61)..(61): /note="Nucleotide may be methylated to form 5-methylcytosine"
gagccccaggctttgtcatggtacagacgcactcacaatacctgttgtgaggaccaaggacgtaacacatcaagcccagccctgtgggcactttctgcaacaatcagactgatcacgggctg

SEQ ID NO: 3240 - DNA, 122 bp, Homo sapiens
  misc_feature (61)..(62): /note="This region represents a CpG dinucleotide"
  misc_feature (61)..(61): /note="Nucleotide may be methylated to form 5-methylcytosine"
ttcagctccatgacattgggtgagttgtctaaatgctctgtgctttggtgtccttgtctgcgtgtgacatgaagccgcagatctcaaagatctctttcattccgtgaaagcgctctcaatgt

SEQ ID NO: 3241 - DNA, 122 bp, Homo sapiens
  misc_feature (61)..(62): /note="This region represents a CpG dinucleotide"
  misc_feature (61)..(61): /note="Nucleotide may be methylated to form 5-methylcytosine"
cacacatacaactactccacatgacaggtgagcaagacttcccaaggacaggctgtgcaacgacaggaggctggcacacagccatgacaaatgacctgtttcttgcccagtcccactgccaa

SEQ ID NO: 3242 - DNA, 122 bp, Homo sapiens
  misc_feature (61)..(62): /note="This region represents a CpG dinucleotide"
  misc_feature (61)..(61): /note="Nucleotide may be methylated to form 5-methylcytosine"
aggtgagaaaaaaggaaaatgtgacctaaaggaaaaagtcaattaataaccactccaagacgacccaggttagaattagcagacagcaatcctaaagcaactaccatagctgtgttcaaaga

SEQ ID NO: 3243 - DNA, 122 bp, Homo sapiens
  misc_feature (61)..(62): /note="This region represents a CpG dinucleotide"
  misc_feature (61)..(61): /note="Nucleotide may be methylated to form 5-methylcytosine"
aaaaggctggctcagtgtggcagacagcactagaggaggaagagcgggaaggatgtaagccgactgtttaaacaaaaatgatcaaaacacaattggccactgagaagggagtggaggctcct

SEQ ID NO: 3244 - DNA, 122 bp, Homo sapiens
  misc_feature (61)..(62): /note="This region represents a CpG dinucleotide"
  misc_feature (61)..(61): /note="Nucleotide may be methylated to form 5-methylcytosine"
aggagggaaactgccaagaaaattaaaattacctcgtatgtcaaattgtaagtactgtggcgatttaaggcaggtacacatgttagttaaattgctaaacctcagtggtggcagcatgtaaa

SEQ ID NO: 3245 - DNA, 122 bp, Homo sapiens
  misc_feature (61)..(62): /note="This region represents a CpG dinucleotide"
  misc_feature (61)..(61): /note="Nucleotide may be methylated to form 5-methylcytosine"
gccgagttctgtttcctcttgggttgggacatgctgctgagtacgtcaggcctcgggtggcgctcattgggtaagacgataacagagcagggccactcccttctcactttgctgccagaggt

SEQ ID NO: 3246 - DNA, 122 bp, Homo sapiens
  misc_feature (61)..(62): /note="This region represents a CpG dinucleotide"
  misc_feature (61)..(61): /note="Nucleotide may be methylated to form 5-methylcytosine"
accgtttaaaaataagtctcacctaactcttaggagaggcccaggccccctgaactatcccgatctgctcagaagctgagctgtaaaaccataaaacagaacctctcctttctctactgggt

SEQ ID NO: 3247 - DNA, 122 bp, Homo sapiens
  misc_feature (61)..(62): /note="This region represents a CpG dinucleotide"
  misc_feature (61)..(61): /note="Nucleotide may be methylated to form 5-methylcytosine"
aactattaggttgatgcacaagtaattgcagttttcacaattaaaagtaatggcaaaaaccgcaattacttgtgcaccaagctaatactagcatgtggaactaactgagagacatgaaaaag

SEQ ID NO: 3248 - DNA, 122 bp, Homo sapiens
  misc_feature (61)..(62): /note="This region represents a CpG dinucleotide"
  misc_feature (61)..(61): /note="Nucleotide may be methylated to form 5-methylcytosine"
ccttcagctggagctctccaggcaaggcctggctgctgttctgggcaaggacacaggtcacgctgcgcacgctggtgccgttccctgccttctcatgctggtcccgcaggaggaagcccagc

SEQ ID NO: 3249 - DNA, 122 bp, Homo sapiens
  misc_feature (61)..(62): /note="This region represents a CpG dinucleotide"
  misc_feature (61)..(61): /note="Nucleotide may be methylated to form 5-methylcytosine"
atcgaagtagaggcttcagtggcctgacttttcccacttcctgctcccctgtgagctgaacgtcagtccaaggatgcggtcttgggctgcccatggtgggagacagggcagtttgggggaag

SEQ ID NO: 3250 - DNA, 122 bp, Homo sapiens
  misc_feature (61)..(62): /note="This region represents a CpG dinucleotide"
  misc_feature (61)..(61): /note="Nucleotide may be methylated to form 5-methylcytosine"
agacggcaagaactctcaggtctttagaaacccctacgtgtgggactgagtcagcggtggcgaggagaggcgggcggatttggggagggccctgaggacctggccccgggcaagggactctc

SEQ ID NO: 3251 - DNA, 122 bp, Homo sapiens
  misc_feature (61)..(62): /note="This region represents a CpG dinucleotide"
  misc_feature (61)..(61): /note="Nucleotide may be methylated to form 5-methylcytosine"
tctcctaagctccattcatggcaagtgccctacacagtaataccatttttcatctttttccgtctgtctcccaagctggagtgcagtgatgcaatcatagcttactctcaactttcaattcc

SEQ ID NO: 3252 - DNA, 122 bp, Homo sapiens
  misc_feature (61)..(62): /note="This region represents a CpG dinucleotide"
  misc_feature (61)..(61): /note="Nucleotide may be methylated to form 5-methylcytosine"
actccgtctcaaaaaaaataaaataaaaataaaaataaaataaaaacatagtacacattacgacttaagtagttgaaatttgtgccaagtttgagcaacaaatgagttgctcaaaaacattt

SEQ ID NO: 3253 - DNA, 122 bp, Homo sapiens
  misc_feature (61)..(62): /note="This region represents a CpG dinucleotide"
  misc_feature (61)..(61): /note="Nucleotide may be methylated to form 5-methylcytosine"
ggtgggcgtggcgctgcgcgggagggacccgcagacggcagagggtccgcggggagcgggcggggcgttgagagcgcgcacacagacacccaaaaaacacacaaacaagcggcccctgtgcc

SEQ ID NO: 3254 - DNA, 122 bp, Homo sapiens
  misc_feature (61)..(62): /note="This region represents a CpG dinucleotide"
  misc_feature (61)..(61): /note="Nucleotide may be methylated to form 5-methylcytosine"
tctcttgggtttttcagaatacccagaaatccaggttccactctttctggttttcttgttcgtctacacagtcactgtagtggggaacttgggcatgataataatcatcagactcaattcaa

SEQ ID NO: 3255 - DNA, 122 bp, Homo sapiens
  misc_feature (61)..(62): /note="This region represents a CpG dinucleotide"
  misc_feature (61)..(61): /note="Nucleotide may be methylated to form 5-methylcytosine"
ttcagaatttttgattcattacttggatgaaaacacaggaaattgcttatcagatatgtacgtggtacagaactgaaaggacagctgcaacagagagctgcctgcattaagattacaagtag

SEQ ID NO: 3256 - DNA, 122 bp, Homo sapiens
  misc_feature (61)..(62): /note="This region represents a CpG dinucleotide"
  misc_feature (61)..(61): /note="Nucleotide may be methylated to form 5-methylcytosine"
agctgggttgaggggctggatggttatggaggcccttgtgggagtgcttcccaactccctcgtcatcctgcatgggataagagaggactcggacacctccgggctaagaccttagtacagct

SEQ ID NO: 3257 - DNA, 122 bp, Homo sapiens
  misc_feature (61)..(62): /note="This region represents a CpG dinucleotide"
  misc_feature (61)..(61): /note="Nucleotide may be methylated to form 5-methylcytosine"
tctgcctttcttctcagcctctgcctctattgcatttattaaactgcattgtgtgcacctcgcctctggctttactctttgcagatcaccacagggggaaactcagctctgtgagctcacta

SEQ ID NO: 3258 - DNA, 122 bp, Homo sapiens
  misc_feature (61)..(62): /note="This region represents a CpG dinucleotide"
  misc_feature (61)..(61): /note="Nucleotide may be methylated to form 5-methylcytosine"
cactcccatgctggaggagctagaatcaggagcttttccactataggtctcaaatgagagcggaaaagaaatgagaataaacattcaaattaatgttgaactgggccgggcacagtggctca

SEQ ID NO: 3259 - DNA, 122 bp, Homo sapiens
  misc_feature (61)..(62): /note="This region represents a CpG dinucleotide"
  misc_feature (61)..(61): /note="Nucleotide may be methylated to form 5-methylcytosine"
tggaagcaggcatggtgcgtttcagccaacctctgaatccaaggatctactcatcaataccgctgtgcatttctgaaagaaaaaaaaaatgtatataaaatgagaacaaagagaaaaagggt

SEQ ID NO: 3260 - DNA, 122 bp, Homo sapiens
  misc_feature (61)..(62): /note="This region represents a CpG dinucleotide"
  misc_feature (61)..(61): /note="Nucleotide may be methylated to form 5-methylcytosine"
tttcttgaagccaaagaagagtttgctcataagaccctggcaatggatgtgatgaaaccccggagaaatgatcctttgttgactgtccttactcaggacagtatgactgtggaagatgtaga

SEQ ID NO: 3261 - DNA, 122 bp, Homo sapiens
  misc_feature (61)..(62): /note="This region represents a CpG dinucleotide"
  misc_feature (61)..(61): /note="Nucleotide may be methylated to form 5-methylcytosine"
ggctacttctaggaaggctaacacatgactcaaacagcagtcattaatacattaacatagcgagacactgagggattgaatgggacacagagcccatgcatggaagagtagattctgaagcc

SEQ ID NO: 3262 - DNA, 122 bp, Homo sapiens
  misc_feature (61)..(62): /note="This region represents a CpG dinucleotide"
  misc_feature (61)..(61): /note="Nucleotide may be methylated to form 5-methylcytosine"
ccaccgtgaaatcaaacccgcggggttctgtatgcgccccatccccgctcctaccaccatcgctttgatttcaagaacactcacaagccccaagccctgccagcaggaggactgtcaggaac

SEQ ID NO: 3263 - DNA, 122 bp, Homo sapiens
  misc_feature (61)..(62): /note="This region represents a CpG dinucleotide"
  misc_feature (61)..(61): /note="Nucleotide may be methylated to form 5-methylcytosine"
gagtggagaggcctgacagtgtatgggcgtgattatctctggtagcccattctggactaacgattctgtgaacctataatttagagagtccataatgtcatatgttcaccttacttatctcc

SEQ ID NO: 3264 - DNA, 122 bp, Homo sapiens
  misc_feature (61)..(62): /note="This region represents a CpG dinucleotide"
  misc_feature (61)..(61): /note="Nucleotide may be methylated to form 5-methylcytosine"
cagccattctgcttctaagaatttttctcaggaatagagtgcagggagtacttaatccggcgcctgacaggcaggtttgtttcctcctttaggactggaggctgccaccactgacatgttcc

SEQ ID NO: 3265 - DNA, 122 bp, Homo sapiens
  misc_feature (61)..(62): /note="This region represents a CpG dinucleotide"
  misc_feature (61)..(61): /note="Nucleotide may be methylated to form 5-methylcytosine"
ctgcatttatgtaatagaagctaatttatataactgtctatatggatgctcaaactcatccgtttaaaattaaaactgttcccttcctcaaaactaaatataccttcaccaaccagctccat

SEQ ID NO: 3266 - DNA, 122 bp, Homo sapiens
  misc_feature (61)..(62): /note="This region represents a CpG dinucleotide"
  misc_feature (61)..(61): /note="Nucleotide may be methylated to form 5-methylcytosine"
ggcgctcagaccacaattgtgggagccgccatcttgagaccgtcccgcttccccgcccagcgccttagtgcagccgccgctcccgaaacagcctcgacacacctaacgaatggaggcgggcc

SEQ ID NO: 3267 - DNA, 122 bp, Homo sapiens
  misc_feature (61)..(62): /note="This region represents a CpG dinucleotide"
  misc_feature (61)..(61): /note="Nucleotide may be methylated to form 5-methylcytosine"
gcggcagggggtggaaggctctggacgagccggggacaggcgcagcgggtgctgactgggcggtggggaggatgtggtccacagcccagcgaagggaggagtcttgttggcctggggtggga

SEQ ID NO: 3268 - DNA, 122 bp, Homo sapiens
  misc_feature (61)..(62): /note="This region represents a CpG dinucleotide"
  misc_feature (61)..(61): /note="Nucleotide may be methylated to form 5-methylcytosine"
gtgtgggtcttggcaggaggaaggcagcatagaaatgggccaggggcagtagggaggggccgcttgtgcttgtgaccgagaggctatggctcagctctaggctgaccaccagtgccagccca

SEQ ID NO: 3269 - DNA, 122 bp, Homo sapiens
  misc_feature (61)..(62): /note="This region represents a CpG dinucleotide"
  misc_feature (61)..(61): /note="Nucleotide may be methylated to form 5-methylcytosine"
caccccaaaagacactgcactaaatgctgtgcaggctcactataatcagtaagtgcttatcgcccccttcaggtgcttatcttcttgagaacagagacagtgactcatgttatattttatta

SEQ ID NO: 3270 - DNA, 122 bp, Homo sapiens
  misc_feature (61)..(62): /note="This region represents a CpG dinucleotide"
  misc_feature (61)..(61): /note="Nucleotide may be methylated to form 5-methylcytosine"
tagcctgcaaaatcctctcattgtccttttgcatataatggagttaattcccagagcctgcgctaaactaacacacgatgacaacttcctcagctggacctggggagcttgcagtgtgaggt

SEQ ID NO: 3271 - DNA, 122 bp, Homo sapiens
  misc_feature (61)..(62): /note="This region represents a CpG dinucleotide"
  misc_feature (61)..(61): /note="Nucleotide may be methylated to form 5-methylcytosine"
aggttctcagatggtgtcagggctgctttgcagctgtttggggacacccagcacagggcacgctgggaaccatgttccctgtgaactctgcaggctgtagatctttgcatcaagataacagt

SEQ ID NO: 3272 - DNA, 122 bp, Homo sapiens
  misc_feature (61)..(62): /note="This region represents a CpG dinucleotide"
  misc_feature (61)..(61): /note="Nucleotide may be methylated to form 5-methylcytosine"
cctgtctgcttgaggtaccgtgcccgctctttgccttggcagactccatctccagggtggcgtcttattaatgttcccagtgttgctgactcaggcatcacaggccagggccttcagtgaca

SEQ ID NO: 3273 - DNA, 122 bp, Homo sapiens
  misc_feature (61)..(62): /note="This region represents a CpG dinucleotide"
  misc_feature (61)..(61): /note="Nucleotide may be methylated to form 5-methylcytosine"
caaactccaactatattcttggcttccctccctcctctggtggaaggaatgcaaaactgtcgacagttctggctattgctacctgtttgcactgtctgtcccaaaggtctcctcgacttgca

SEQ ID NO: 3274 - DNA, 122 bp, Homo sapiens
  misc_feature (61)..(62): /note="This region represents a CpG dinucleotide"
  misc_feature (61)..(61): /note="Nucleotide may be methylated to form 5-methylcytosine"
catgaccccatcctcctggacacagtggattggaacagagatgaaagagacaggaagagacggagacacacatagaggcagagagaggaaaaaagggcaaagccagcaggtagtcagacaaa

SEQ ID NO: 3275 - DNA, 122 bp, Homo sapiens
  misc_feature (61)..(62): /note="This region represents a CpG dinucleotide"
  misc_feature (61)..(61): /note="Nucleotide may be methylated to form 5-methylcytosine"
ctcaggtgttttaaatgcctcacagtagttctctgaataggaaacagcacgcaatgcactcgtgagacttgctggacagaaaacatcctccgtcattgcaaccaaggcagccgagtagatgc

SEQ ID NO: 3276 - DNA, 122 bp, Homo sapiens
  misc_feature (61)..(62): /note="This region represents a CpG dinucleotide"
  misc_feature (61)..(61): /note="Nucleotide may be methylated to form 5-methylcytosine"
aggagagtagtctagctccatgtccggggctctaggggttcatagatggcagctcctgtccggggctgaggttgggaggggagaaacaggggcagagtgagttggtctctggagtgactgtg

SEQ ID NO: 3277 - DNA, 122 bp, Homo sapiens
  misc_feature (61)..(62): /note="This region represents a CpG dinucleotide"
  misc_feature (61)..(61): /note="Nucleotide may be methylated to form 5-methylcytosine"
taggaaggagggaacagaaatcctccaccattcttctcaactgtgtagccaacagagaagcggagactgtacagaaagggtatgttaagtagctcagccagcagctcaccacagggattaac

SEQ ID NO: 3278 - DNA, 122 bp, Homo sapiens
  misc_feature (61)..(62): /note="This region represents a CpG dinucleotide"
  misc_feature (61)..(61): /note="Nucleotide may be methylated to form 5-methylcytosine"
cattctgcaaccaggaagctggcagcccatacaactatgcagaaggtgaaagagagaaggcgggaccatgaacacgcgttttaattactgcatgtttgtttctgacagagagaggtcagtgt

SEQ ID NO: 3279 - DNA, 122 bp, Homo sapiens
  misc_feature (61)..(62): /note="This region represents a CpG dinucleotide"
  misc_feature (61)..(61): /note="Nucleotide may be methylated to form 5-methylcytosine"
ctttccctctctggagtcctgtgactcaccgtgtccttacgagacccccgatgcgtcgtgcgcctctagcagtggggaggattctggcaggcattctgggcttcccccgtgagccagtggcc

SEQ ID NO: 3280 - DNA, 122 bp, Homo sapiens
  misc_feature (61)..(62): /note="This region represents a CpG dinucleotide"
  misc_feature (61)..(61): /note="Nucleotide may be methylated to form 5-methylcytosine"
tttttccttccccacaaatcctcttttctgtgcatacagtgtgcccaagttcatcccttacgtgcctacaagaattcagacgttagggaattcaagaccatgccttagacctggctgttgta

SEQ ID NO: 3281 - DNA, 122 bp, Homo sapiens
  misc_feature (61)..(62): /note="This region represents a CpG dinucleotide"
  misc_feature (61)..(61): /note="Nucleotide may be methylated to form 5-methylcytosine"
caggtaggggcgctgctgctccccctaccacccacgcatcctcctccctgtctgcattcccgtcgtcgtagccagaggagttcagagcctctacagagagcacaacttctccagctggaaca

SEQ ID NO: 3282 - DNA, 122 bp, Homo sapiens
  misc_feature (61)..(62): /note="This region represents a CpG dinucleotide"
  misc_feature (61)..(61): /note="Nucleotide may be methylated to form 5-methylcytosine"
ctcccccaggaggaagctccccctctgcctcaggcgtttgtccattgatttggacacaaacgcatggttcaccttcctgtggaaaaatccggccctcggactttatctggagggtgcagtgg

SEQ ID NO: 3283 - DNA, 122 bp, Homo sapiens
  misc_feature (61)..(62): /note="This region represents a CpG dinucleotide"
  misc_feature (61)..(61): /note="Nucleotide may be methylated to form 5-methylcytosine"
ttgtaagagcaccactttggtgaggtgacgcacacacaaacaaaattctaggaaatgatacgagttttgcctaaataggggtaatttttagataaactggtgaggttttacacctgtttaaa

SEQ ID NO: 3284 - DNA, 122 bp, Homo sapiens
  misc_feature (61)..(62): /note="This region represents a CpG dinucleotide"
  misc_feature (61)..(61): /note="Nucleotide may be methylated to form 5-methylcytosine"
atcccaaacttaaacagtttttgaaactttcccaagccaaaggtgctactgtcaaccttacgcgatgcttttaggatgatccatgttttaaaaagtgctgcttagacaattgtttggttatt

SEQ ID NO: 3285 - DNA, 122 bp, Homo sapiens
  misc_feature (61)..(62): /note="This region represents a CpG dinucleotide"
  misc_feature (61)..(61): /note="Nucleotide may be methylated to form 5-methylcytosine"
tattacttgcgcattttatggatgagaaaacaaaaccttagaggtgttaagtaacacagccgtgatctcccagttagcaagtggcagagccaagattccaacccaagccattcactccaaag

SEQ ID NO: 3286 - DNA, 122 bp, Homo sapiens
  misc_feature (61)..(62): /note="This region represents a CpG dinucleotide"
  misc_feature (61)..(61): /note="Nucleotide may be methylated to form 5-methylcytosine"
tgaataatccttacaatgagtaattggtatgcaggcagacagaggttaattaagaggcaacgtggtcaggcaacgtgcacagaccaagtgcacaatcttggatatgtagttttacttccctt

SEQ ID NO: 3287 - DNA, 122 bp, Homo sapiens
  misc_feature (61)..(62): /note="This region represents a CpG dinucleotide"
  misc_feature (61)..(61): /note="Nucleotide may be methylated to form 5-methylcytosine"
tcccattcctcttagtacgtcagtgacggtagatattgagaccacccgatggaagaagagcgcgtaggatgtgttctgtgacctacatgcctatgtccaagataacaaaggtcagtacaaat

SEQ ID NO: 3288 - DNA, 122 bp, Homo sapiens
  misc_feature (61)..(62): /note="This region represents a CpG dinucleotide"
  misc_feature (61)..(61): /note="Nucleotide may be methylated to form 5-methylcytosine"
ggcacctttcttaccaacttggcaaaagacctagggttaggggtaggggaactgagagcccggggaactagaattgtttcagaccagaacatgcaaattttactgctcagttcgcttactgg

SEQ ID NO: 3289 - DNA, 122 bp, Homo sapiens
  misc_feature (61)..(62): /note="This region represents a CpG dinucleotide"
  misc_feature (61)..(61): /note="Nucleotide may be methylated to form 5-methylcytosine"
ggcgagggagagtcctgggctgcccctgagccccggggccacgggaagaacttgcagcgacgtcatccctgccccggacacagtcccgggcccagggaggacctggaacattcccttcctcc

SEQ ID NO: 3290 - DNA, 122 bp, Homo sapiens
  misc_feature (61)..(62): /note="This region represents a CpG dinucleotide"
  misc_feature (61)..(61): /note="Nucleotide may be methylated to form 5-methylcytosine"
gctaggtgattaaagagacaggcaggacaaaattcaaagtaaccagttaaagtaaaaacacggttaggcatttcaggattacaagcgtgagccaccacgcccagccaacatttcttttttac

SEQ ID NO: 3291 - DNA, 122 bp, Homo sapiens
  misc_feature (61)..(62): /note="This region represents a CpG dinucleotide"
  misc_feature (61)..(61): /note="Nucleotide may be methylated to form 5-methylcytosine"
tagagaggacattgcttaactattgttgtctgtgtctacaggcacttggactagaggaaacgggcttgaagagaaatgggagcattccctttggtcacaaggaagacatttaaccatgaact

SEQ ID NO: 3292 - DNA, 122 bp, Homo sapiens
  misc_feature (61)..(62): /note="This region represents a CpG dinucleotide"
  misc_feature (61)..(61): /note="Nucleotide may be methylated to form 5-methylcytosine"
gagccgggattagaactcgggcagattgacccaggacctattctatttactactgtactacgagtaagtcctaatttcatgaatgcatgtcttgaaagcacaacgcaaatcttttttttttt

SEQ ID NO: 3293 - DNA, 122 bp, Homo sapiens
  misc_feature (61)..(62): /note="This region represents a CpG dinucleotide"
  misc_feature (61)..(61): /note="Nucleotide may be methylated to form 5-methylcytosine"
tgaaagaagcctcttaaataaatcctacacgctgtaatatttctgccacgaaacagaacacgtgtgccaggataactcccggcaaagaaagttacagaaaccaaaagagtaaacagaattct

SEQ ID NO: 3294 - DNA, 122 bp, Homo sapiens
  misc_feature (61)..(62): /note="This region represents a CpG dinucleotide"
  misc_feature (61)..(61): /note="Nucleotide may be methylated to form 5-methylcytosine"
ttttttaaaggtttgctgaaccatggtgtctaaaaccaaatctgagctttccctgctgcacgttaaagctgttctcttttgcactctgaaccggtcttttaccaccacacgtgattccgcca

SEQ ID NO: 3295 - DNA, 122 bp, Homo sapiens
  misc_feature (61)..(62): /note="This region represents a CpG dinucleotide"
  misc_feature (61)..(61): /note="Nucleotide may be methylated to form 5-methylcytosine"
ttttaaatagatattccctggattgctgcaaaccttaggttaattctggagctctgaaaacgttgattctgacaattttttgctgttgttctcaatgcttctacaaaaaataaaaattgcag

SEQ ID NO: 3296 - DNA, 122 bp, Homo sapiens
  misc_feature (61)..(62): /note="This region represents a CpG dinucleotide"
  misc_feature (61)..(61): /note="Nucleotide may be methylated to form 5-methylcytosine"
gcattgggtaattactatttattagcattacatacaatttagaccagtttcaggaaacaccgtataaattctttcccttgaatctgaccttaaccacaaagtctaatgatctaaccagagca

SEQ ID NO: 3297 - DNA, 122 bp, Homo sapiens
  misc_feature (61)..(62): /note="This region represents a CpG dinucleotide"
  misc_feature (61)..(61): /note="Nucleotide may be methylated to form 5-methylcytosine"
cacaggctcacccaggctttcacttcatgggccgactgcactgcctgtgtttcctaaagacggggacagtggggcagtcaattgttgaaatgctaatgactccaaaacttttcataacctcc

SEQ ID NO: 3298 - DNA, 122 bp, Homo sapiens
  misc_feature (61)..(62): /note="This region represents a CpG dinucleotide"
  misc_feature (61)..(61): /note="Nucleotide may be methylated to form 5-methylcytosine"
ctttgttcccactattccctttgcttgcaatgcaactttctggattttcccataatacatcgtcatgcaccctgtaaaaggcagccaggcaccacccaccctaggaagtcttgcttgactaa

SEQ ID NO: 3299 - DNA, 122 bp, Homo sapiens
  misc_feature (61)..(62): /note="This region represents a CpG dinucleotide"
  misc_feature (61)..(61): /note="Nucleotide may be methylated to form 5-methylcytosine"
ttcacaaggttttgagaggatttagtgacttgctattcacaaagtgcctagcacagcgctcgcacaccataaatgctcataaatgtgagacccactcctcccctctgaacacttaccagccc

SEQ ID NO: 3300 - DNA, 122 bp, Homo sapiens
  misc_feature (61)..(62): /note="This region represents a CpG dinucleotide"
  misc_feature (61)..(61): /note="Nucleotide may be methylated to form 5-methylcytosine"
agcagctggactgaacaaagtggactccctgaggttacttttgccctcctgacttgagaacgtcccagacaccaatcccaaggcagtgaagagatgaaaagatgaaagcattacaagagtta

SEQ ID NO: 3301 - DNA, 122 bp, Homo sapiens
  misc_feature (61)..(62): /note="This region represents a CpG dinucleotide"
  misc_feature (61)..(61): /note="Nucleotide may be methylated to form 5-methylcytosine"
aaacaaatgtggctgaaagactgaaatgtgactgtcagattcttccccttggatcaggcacgctgcctgtcattttgctgtgaactcaagtggcagcctgcaggcgtcctggcttttcttct

SEQ ID NO: 3302 - DNA, 122 bp, Homo sapiens
  misc_feature (61)..(62): /note="This region represents a CpG dinucleotide"
  misc_feature (61)..(61): /note="Nucleotide may be methylated to form 5-methylcytosine"
aggaaattaatttaaacctatttaataaaacgaatggttttgtaagttggtgtaagggtgcgtcagcgtaagtagtagagagtagaaatctataagttcctgatggtcaaaatggtcaagtt

SEQ ID NO: 3303 - DNA, 122 bp, Homo sapiens
  misc_feature (61)..(62): /note="This region represents a CpG dinucleotide"
  misc_feature (61)..(61): /note="Nucleotide may be methylated to form 5-methylcytosine"
gtcaaacatttgggaacagggaaaagaatacagaaatgaattcaaagatatggtatccaccgttaaggaactgattgtctaatgagggaggcagagaaataaaggaattactataattatgg

SEQ ID NO: 3304 - DNA, 122 bp, Homo sapiens
  misc_feature (61)..(62): /note="This region represents a CpG dinucleotide"
  misc_feature (61)..(61): /note="Nucleotide may be methylated to form 5-methylcytosine"
aaaagaattcccaaactgccacagcatgaattgaaaacataccatctgcagctgcttagccgcagctactgcccccaaatcaaatgaaaggctcaagaaatgctcagctgtgttcttattgc

SEQ ID NO: 3305 - DNA, 122 bp, Homo sapiens
  misc_feature (61)..(62): /note="This region represents a CpG dinucleotide"
  misc_feature (61)..(61): /note="Nucleotide may be methylated to form 5-methylcytosine"
tcatgtaagtagttatggcatgcagcttttcagtcactcaaacctgacctcttacactagcgtgccatagagcctacatttcctacactcagccaaattctttaaagagatatccatatttt

SEQ ID NO: 3306 - DNA, 122 bp, Homo sapiens
  misc_feature (61)..(62): /note="This region represents a CpG dinucleotide"
  misc_feature (61)..(61): /note="Nucleotide may be methylated to form 5-methylcytosine"
ccagatgcattttcccattaaatgatggctacatgaaaaaggaagctccaaaaccaaatccggggcattaccaggtgtttctcaacaagaacaaataagtgctgtttgcatttttaatcatt

SEQ ID NO: 3307 - DNA, 122 bp, Homo sapiens
  misc_feature (61)..(62): /note="This region represents a CpG dinucleotide"
  misc_feature (61)..(61): /note="Nucleotide may be methylated to form 5-methylcytosine"
ttggagcagcaaggagacatgagagagaaagggctggaggatgcatttataaaagacagccgagaaggggaatggctatttattgctgttgcaaaggtctgtctcttaaaacccgagtcgaa

SEQ ID NO: 3308 - DNA, 122 bp, Homo sapiens
  misc_feature (61)..(62): /note="This region represents a CpG dinucleotide"
  misc_feature (61)..(61): /note="Nucleotide may be methylated to form 5-methylcytosine"
tacttttttagtagattccttgatcagtgcctgcaggagtgacagtttttattccagcagcgccagcatgtacatgccaccacctagcgcagacatggggacctatggaatgcaaacctgtg

SEQ ID NO: 3309 - DNA, 122 bp, Homo sapiens
  misc_feature (61)..(62): /note="This region represents a CpG dinucleotide"
  misc_feature (61)..(61): /note="Nucleotide may be methylated to form 5-methylcytosine"
tgccagatactatcctaaacaccccacatcctcttctttaatccttgcaactacccttggcgggaggtaatattagtatcaccactttacaggtaaggaaactgagacacagaggggttgcc

SEQ ID NO: 3310 - DNA, 122 bp, Homo sapiens
  misc_feature (61)..(62): /note="This region represents a CpG dinucleotide"
  misc_feature (61)..(61): /note="Nucleotide may be methylated to form 5-methylcytosine"
tgagttgcacatcctgtagatgagcgcaaagagatgagtaaaaaataaccaaacactgtacgtgagaagtcataatctttaaagatacaggatttgtcttaagagtaatggctttaaaaact

SEQ ID NO: 3311 - DNA, 122 bp, Homo sapiens
  misc_feature (61)..(62): /note="This region represents a CpG dinucleotide"
  misc_feature (61)..(61): /note="Nucleotide may be methylated to form 5-methylcytosine"
gcctggtgggaccagtgccagagctgggaggggagtgagggctgtgattcctacaaagtgcggaggcacccaaaacagagtctagagcaggactctggatcagacacacccaggttctagtt

SEQ ID NO: 3312 - DNA, 122 bp, Homo sapiens
  misc_feature (61)..(62): /note="This region represents a CpG dinucleotide"
  misc_feature (61)..(61): /note="Nucleotide may be methylated to form 5-methylcytosine"
gagaggtgtggggattggggccggtctctcggtgccctcctcccgccgccgggaattctgcgtgtccacgtaccttctgtgtgttgggggaggggttcctatgtgtatataatccatttgcc

SEQ ID NO: 3313 - DNA, 122 bp, Homo sapiens
  misc_feature (61)..(62): /note="This region represents a CpG dinucleotide"
  misc_feature (61)..(61): /note="Nucleotide may be methylated to form 5-methylcytosine"
gagtctagtggtgcagtcagcaccagtaaatttccattcagtaattcagtgactgttaatcgacacctaatatgtatccatcactgtctgaggccctgtgctagggacagaaacaaacaccg

SEQ ID NO: 3314 - DNA, 122 bp, Homo sapiens
  misc_feature (61)..(62): /note="This region represents a CpG dinucleotide"
  misc_feature (61)..(61): /note="Nucleotide may be methylated to form 5-methylcytosine"
tccctggagggttctgcgctatagtcttgcttgtggttctgactgtgcttttcttcatcccgtccacctatctagctgcttcctctaggctttccggtaatactgtgagttctttctcggcc

SEQ ID NO: 3315 - DNA, 122 bp, Homo sapiens
  misc_feature (61)..(62): /note="This region represents a CpG dinucleotide"
  misc_feature (61)..(61): /note="Nucleotide may be methylated to form 5-methylcytosine"
ccgtacgcccgagaactgaggtagcccgcgcgggaaacgccgcagtgcaagccgggcgaccggcaaatgtcgcgagaatacgtccaggcctaacgggattttcgccttccggcaggagtggg

SEQ ID NO: 3316 - DNA, 122 bp, Homo sapiens
  misc_feature (61)..(62): /note="This region represents a CpG dinucleotide"
  misc_feature (61)..(61): /note="Nucleotide may be methylated to form 5-methylcytosine"
aggaggagcaggggccagggaagacggggcgggcaagagcggcatgtggcatttctcaagcgggagaccaagttcaaagggagcacagcactcccagtgaaaccacccctataaacttcata

SEQ ID NO: 3317 - DNA, 122 bp, Homo sapiens
  misc_feature (61)..(62): /note="This region represents a CpG dinucleotide"
  misc_feature (61)..(61): /note="Nucleotide may be methylated to form 5-methylcytosine"
ttgaggaaagtctgtatgatttgctcagtgaaaggcacacccatctgtactctaaggcctcgaaacagagtgaggaagaagctcagcatctcatcagtcacatctgaggaaaggggcagaga

SEQ ID NO: 3318 - DNA, 122 bp, Homo sapiens
  misc_feature (61)..(62): /note="This region represents a CpG dinucleotide"
  misc_feature (61)..(61): /note="Nucleotide may be methylated to form 5-methylcytosine"
actattcacaagggtccatgtgcttttaaaaccattctgccagatacaaatagctataaacgtcatgagtggttatgagatacaagtgtttaagaaataaactgtatagattcagtaaatcc

SEQ ID NO: 3319 - DNA, 122 bp, Homo sapiens
  misc_feature (61)..(62): /note="This region represents a CpG dinucleotide"
  misc_feature (61)..(61): /note="Nucleotide may be methylated to form 5-methylcytosine"
cgctaaggaagcaatgagggccagtccccaggccaggctgctgctgggtacccatggctgcgtgtgagcgaggcaggaccccacctcctccccgtctgcagtccatcctgaccctacagtcc

SEQ ID NO: 3320 - DNA, 122 bp, Homo sapiens
  misc_feature (61)..(62): /note="This region represents a CpG dinucleotide"
  misc_feature (61)..(61): /note="Nucleotide may be methylated to form 5-methylcytosine"
cagtaagaggccgggcacggtgactcacacctgtaatcctagcactttgggaggctgaggcgggtggatcaggcagtcaggagttcaacaccagcctggccaagatgatgaaaccccatttc

SEQ ID NO: 3321 - DNA, 122 bp, Homo sapiens
  misc_feature (61)..(62): /note="This region represents a CpG dinucleotide"
  misc_feature (61)..(61): /note="Nucleotide may be methylated to form 5-methylcytosine"
attcagacctctgttctagttattccatctgggtaaatctaaggacataatgtgaaataccggcaacattatgcaaaagctgttttgagatctagaggtctagactcacaagaaataaggaa

SEQ ID NO: 3322 - DNA, 122 bp, Homo sapiens
  misc_feature (61)..(62): /note="This region represents a CpG dinucleotide"
  misc_feature (61)..(61): /note="Nucleotide may be methylated to form 5-methylcytosine"
cctcctcactgctcttgcctccgggcatgggaacgatgccgtctgctcgtctgcctgagacgctttctactccactccgagagtaggaggtcagccggggccaaatgacatggtggacatca

SEQ ID NO: 3323 - DNA, 122 bp, Homo sapiens
  misc_feature (61)..(62): /note="This region represents a CpG dinucleotide"
  misc_feature (61)..(61): /note="Nucleotide may be methylated to form 5-methylcytosine"
atcagtagctgagggttggttggagccggctggaaagcagaggctttcagatggctgactcgttacaaagctgcaaacttcaaagcccagtttagaaggtcctgttctcgtatggcagagta

SEQ ID NO: 3324 - DNA, 122 bp, Homo sapiens
  misc_feature (61)..(62): /note="This region represents a CpG dinucleotide"
  misc_feature (61)..(61): /note="Nucleotide may be methylated to form 5-methylcytosine"
ctcataaacagtgtttttctccttttctggtgcccttgttttcacagaaacacagctgcacggcactgacagagaactcgcagagtaaaaaggaacccacaataaacgagctgctttgcgcc

SEQ ID NO: 3325 - DNA, 122 bp, Homo sapiens
  misc_feature (61)..(62): /note="This region represents a CpG dinucleotide"
  misc_feature (61)..(61): /note="Nucleotide may be methylated to form 5-methylcytosine"
aaattttgcaattttggggagctctggtgacagcatcccaggaagagcaatgtcctcccacgagagctgcaatcagaggcactagagtagaaatcctgtaacagtaaggaatttttccactg

SEQ ID NO: 3326 - DNA, 122 bp, Homo sapiens
  misc_feature (61)..(62): /note="This region represents a CpG dinucleotide"
  misc_feature (61)..(61): /note="Nucleotide may be methylated to form 5-methylcytosine"
agcgagactccgtctcaaaaacaaccaaagcaccaaaacttctggttaatttaattgattcgtcggattcagatgctggaaagtgggcctgggatatacagtaagcgatcaataataacact

SEQ ID NO: 3327 - DNA, 122 bp, Homo sapiens
  misc_feature (61)..(62): /note="This region represents a CpG dinucleotide"
  misc_feature (61)..(61): /note="Nucleotide may be methylated to form 5-methylcytosine"
ccacgcatgagccatctttatataagttctgggttaatgatcagcctcaggcaggtggggcgagatatcagagccagctcctggatatggagacctttaaacctcttctccaaagctgtggc

SEQ ID NO: 3328 - DNA, 122 bp, Homo sapiens
  misc_feature (61)..(62): /note="This region represents a CpG dinucleotide"
  misc_feature (61)..(61): /note="Nucleotide may be methylated to form 5-methylcytosine"
gtgagctgagatcgtgccactgcctgggcgacagagccaagatcacgcttccaacctgggcgacagagcaagacaagctctgtctggatttaaacaatccagtttcaaaatgggcaaagaac

SEQ ID NO: 3329 - DNA, 122 bp, Homo sapiens
  misc_feature (61)..(62): /note="This region represents a CpG dinucleotide"
  misc_feature (61)..(61): /note="Nucleotide may be methylated to form 5-methylcytosine"
cctatttttccccaggctccttagctaggtttattcctcttccagaaagacttttgttggcgcatacatgagttccattttcaattgacactaaactaacagagcagtctaccaagacagga

SEQ ID NO: 3330 - DNA, 122 bp, Homo sapiens
  misc_feature (61)..(62): /note="This region represents a CpG dinucleotide"
  misc_feature (61)..(61): /note="Nucleotide may be methylated to form 5-methylcytosine"
gggtgttgcaatagctcattcataaatacaggcaccccagttattggctcatcacaggcacgtgttattggaaacagaatatgcaactttgacctccaaataatgagttgttgccaactcaa

SEQ ID NO: 3331 - DNA, 122 bp, Homo sapiens
  misc_feature (61)..(62): /note="This region represents a CpG dinucleotide"
  misc_feature (61)..(61): /note="Nucleotide may be methylated to form 5-methylcytosine"
gaatttcaccccctaaactctcttaggcataaaagcacagggaggaagcacatcttcctccgttatatgtcatcaaggctgaaggttgacagacagtagggtggaggagtgaatgccacatg

SEQ ID NO: 3332 - DNA, 122 bp, Homo sapiens
  misc_feature (61)..(62): /note="This region represents a CpG dinucleotide"
  misc_feature (61)..(61): /note="Nucleotide may be methylated to form 5-methylcytosine"
tcaggacctgcccaggattcacataatccctgtgaaccttattcactattcggtcgtaggcgggagaagtgtacatcccgaaagaacaacgtaatttgcgttcacattttttcctatggtaa

SEQ ID NO: 3333 - DNA, 122 bp, Homo sapiens
  misc_feature (61)..(62): /note="This region represents a CpG dinucleotide"
  misc_feature (61)..(61): /note="Nucleotide may be methylated to form 5-methylcytosine"
gaaagaatgaatgctagatagtgttacaaagttgctttaggtcttagagacctcttggcacgatttcaagtgtattatttctgtgtaatacattgtgaaggttgtgtttcaggagacaaact

SEQ ID NO: 3334 - DNA, 122 bp, Homo sapiens
  misc_feature (61)..(62): /note="This region represents a CpG dinucleotide"
  misc_feature (61)..(61): /note="Nucleotide may be methylated to form 5-methylcytosine"
agggcttagattccagattgacactgggctctctaaagcctgctcctcaatctactgatccggtccagcttaagatccagtagaaagaaaacatagcctgcccggaccgtaacctttttgtt

SEQ ID NO: 3335 - DNA, 122 bp, Homo sapiens
  misc_feature (61)..(62): /note="This region represents a CpG dinucleotide"
  misc_feature (61)..(61): /note="Nucleotide may be methylated to form 5-methylcytosine"
aagggcaagagcttaaatgtcagccagagcctactgaaatcccagatttcacactcttatcggctgtgtgattgcctgcaagtggctttccctctctgaacctcatttctcatttggaaagt

SEQ ID NO: 3336 - DNA, 122 bp, Homo sapiens
  misc_feature (61)..(62): /note="This region represents a CpG dinucleotide"
  misc_feature (61)..(61): /note="Nucleotide may be methylated to form 5-methylcytosine"
ccgtgtaactgcctcatctgtgttccatgaaaccatcagtaaaatctacaagtctgccaacgctttcctggttggatttcctgttctttatcagatatgccaaatcactacattgaatcaga

SEQ ID NO: 3337 - DNA, 122 bp, Homo sapiens
  misc_feature (61)..(62): /note="This region represents a CpG dinucleotide"
  misc_feature (61)..(61): /note="Nucleotide may be methylated to form 5-methylcytosine"
tcccgccccgagaacggagcgcgcggaaccggcgcaggcctccgaggcttccagccgagacggcacccaggtttcccgagcagggtctgaggctccaaggacatcccggcggcgagaaggcg

SEQ ID NO: 3338 - DNA, 122 bp, Homo sapiens
  misc_feature (61)..(62): /note="This region represents a CpG dinucleotide"
  misc_feature (61)..(61): /note="Nucleotide may be methylated to form 5-methylcytosine"
ttctccagggctgacccgaggaaaggacggctcccttggaggactgtgcactccagggttcggctgatcaaccctaacacggtcacggccattctacctcacgtgacttggtgggaggctgc

SEQ ID NO: 3339 - DNA, 122 bp, Homo sapiens
  misc_feature (61)..(62): /note="This region represents a CpG dinucleotide"
  misc_feature (61)..(61): /note="Nucleotide may be methylated to form 5-methylcytosine"
tagaggccaagaatgctagcccaagggtgaaggaagcccaggaagatttcaaggaagagacgaacacctcagagctgggctttaggaagggccaggggaaaagtggtagattagagggagga

SEQ ID NO: 3340 - DNA, 122 bp, Homo sapiens
  misc_feature (61)..(62): /note="This region represents a CpG dinucleotide"
  misc_feature (61)..(61): /note="Nucleotide may be methylated to form 5-methylcytosine"
ccagagcgaggggatgagaagcctgaggccggcccgtccctgctccagacgcccccccaccgctccccctcataggagccaaggaggaggaagtgcttcattctttgcaaagaatactccgc

SEQ ID NO: 3341 - DNA, 122 bp, Homo sapiens
  misc_feature (61)..(62): /note="This region represents a CpG dinucleotide"
  misc_feature (61)..(61): /note="Nucleotide may be methylated to form 5-methylcytosine"
acatataggaaactttaaggagcagtggccataggaagctgtgacaatgaaggcagcacacggccgcagcctcccgttagctgctggaaggaagccacacacacccagatatttcaattctg

SEQ ID NO: 3342 - DNA, 122 bp, Homo sapiens
  misc_feature (61)..(62): /note="This region represents a CpG dinucleotide"
  misc_feature (61)..(61): /note="Nucleotide may be methylated to form 5-methylcytosine"
taggtgcctgccactgggtatcacctgtggctgggcttctcagcaatgctaagacacagacgccatcgtcatccttgcagtcagcagggggcactgaggcacagagggctgagtggctcccc

SEQ ID NO: 3343 - DNA, 122 bp, Homo sapiens
  misc_feature (61)..(62): /note="This region represents a CpG dinucleotide"
  misc_feature (61)..(61): /note="Nucleotide may be methylated to form 5-methylcytosine"
ttacaagtgaatcatcttcatttccaccttatggtgttttcgtaaggattaaatgcaatacggtgtcttaagtgctcagcacagtgccccacacttggtaggaagtgctcagagatgacggc

SEQ ID NO: 3344 - DNA, 122 bp, Homo sapiens
  misc_feature (61)..(62): /note="This region represents a CpG dinucleotide"
  misc_feature (61)..(61): /note="Nucleotide may be methylated to form 5-methylcytosine"
acggcggttcgtccaagccggacgcctgcagcagccacctcctgggcctcacggcggggccggagaaggccagggctggggcggggcagccgtgctcggccccgggccagggtcccccggta

SEQ ID NO: 3345 - DNA, 122 bp, Homo sapiens
  misc_feature (61)..(62): /note="This region represents a CpG dinucleotide"
  misc_feature (61)..(61): /note="Nucleotide may be methylated to form 5-methylcytosine"
ctttggcaaatgcagactcatatgggtggtgcttcctctaccaaagcacatcaggctaagcgtaagagggatgccacagtgggtaggtcatgtttgtaaagttagaccttgaactagttttc

SEQ ID NO: 3346 - DNA, 122 bp, Homo sapiens
  misc_feature (61)..(62): /note="This region represents a CpG dinucleotide"
  misc_feature (61)..(61): /note="Nucleotide may be methylated to form 5-methylcytosine"
aagaaaactaatgttgttattcccagagttcacagccattctaaaacatttgttactctccgcagtccaaagatgaggaaacttcttacttctctggaccaaaatatcctcatcttggactg

SEQ ID NO: 3347 - DNA, 122 bp, Homo sapiens
  misc_feature (61)..(62): /note="This region represents a CpG dinucleotide"
  misc_feature (61)..(61): /note="Nucleotide may be methylated to form 5-methylcytosine"
tggcttgggggtgcttgtgtaagttcttggttatgtgccctcagccaccaggatatgaaccgtgtctgcagagcttcactttagtgagcttacaagtttttaaatttttacttctagttaca

SEQ ID NO: 3348 - DNA, 122 bp, Homo sapiens
  misc_feature (61)..(62): /note="This region represents a CpG dinucleotide"
  misc_feature (61)..(61): /note="Nucleotide may be methylated to form 5-methylcytosine"
tggtgctttggagacagaggacatgggatagtgactcagattgggagggaacatgccccccgggacagatttctatgttgctggttatgatgaaatactttccactgaccacaagctatata

SEQ ID NO: 3349 - DNA, 122 bp, Homo sapiens
  misc_feature (61)..(62): /note="This region represents a CpG dinucleotide"
  misc_feature (61)..(61): /note="Nucleotide may be methylated to form 5-methylcytosine"
tcggggtaaatacggtagaacgcggtaaatacggtagaccggggtaaatgcccctccaggcggacaccctttgagcaatgcttgcgactccctgactccacttcctcatcctcacccagccc

SEQ ID NO: 3350 - DNA, 122 bp, Homo sapiens
  misc_feature (61)..(62): /note="This region represents a CpG dinucleotide"
  misc_feature (61)..(61): /note="Nucleotide may be methylated to form 5-methylcytosine"
gacttagccaattatttttagcttatttctccattttactgacaagagaatgccatttaccgaacatttaataagcaaaataatttcttacacacttacttctcttaacttttgaaaggaat

SEQ ID NO: 3351 - DNA, 122 bp, Homo sapiens
  misc_feature (61)..(62): /note="This region represents a CpG dinucleotide"
  misc_feature (61)..(61): /note="Nucleotide may be methylated to form 5-methylcytosine"
gtctaacacatataatccaatttgctttgtaaaaagcctgcccctgcgtgcctgggctagcgcaactgtgtccgggttctgtgatgaactaaactcaagtgaccagggagatggaatgggat

SEQ ID NO: 3352 - DNA, 122 bp, Homo sapiens
  misc_feature (61)..(62): /note="This region represents a CpG dinucleotide"
  misc_feature (61)..(61): /note="Nucleotide may be methylated to form 5-methylcytosine"
attcacagtgagaaagccattagaacgttggctggaacctaggggcatatcgagggcccacgtgggaaggacaatgacaacttgtttagtcctcactggtttcccagtctgtggatcttatt

SEQ ID NO: 3353 - DNA, 122 bp, Homo sapiens
  misc_feature (61)..(62): /note="This region represents a CpG dinucleotide"
  misc_feature (61)..(61): /note="Nucleotide may be methylated to form 5-methylcytosine"
aaaggactttgaatctctatagatggcaattcaggggaaaggcaaataaatggtgaaggccggttagtaaaggtgttatctccaggctgaaagtctaaagatatttccagtgggtaaacttt

SEQ ID NO: 3354 - DNA, 122 bp, Homo sapiens
  misc_feature (61)..(62): /note="This region represents a CpG dinucleotide"
  misc_feature (61)..(61): /note="Nucleotide may be methylated to form 5-methylcytosine"
gagtgccaaatgccacataagtggcacaggatatgcttccgtggcctgctcagacctcaacggccagatctctacggcttgcttttagaaatccacttgcctatggatgcctcactcccagt

SEQ ID NO: 3355 - DNA, 122 bp, Homo sapiens
  misc_feature (61)..(62): /note="This region represents a CpG dinucleotide"
  misc_feature (61)..(61): /note="Nucleotide may be methylated to form 5-methylcytosine"
cagttatgcaaccctctcccttcctgcagaacttgcattcctcacttaccaaattatgtacggagcacctaccagggccaggtcttgtgctaggctctagaaagttggtggccagacaaaaa

SEQ ID NO: 3356 - DNA, 122 bp, Homo sapiens
  misc_feature (61)..(62): /note="This region represents a CpG dinucleotide"
  misc_feature (61)..(61): /note="Nucleotide may be methylated to form 5-methylcytosine"
gcctgctctgccccttggagctgcatttgacctgctctcactggtaaggtgacttggtggcgttcccacttgatttagccattttcttccattgtgagaccactgccatctatccacctgcc

SEQ ID NO: 3357 - DNA, 122 bp, Homo sapiens
  misc_feature (61)..(62): /note="This region represents a CpG dinucleotide"
  misc_feature (61)..(61): /note="Nucleotide may be methylated to form 5-methylcytosine"
cctgggtaacacgatgaaatcccatctctactaaacatacaaaaaattagccagttgtggcggcgtgcacctgtagtcccagctacttgggaggctgaggcaggagaattgcttgaacccag

SEQ ID NO: 3358 - DNA, 122 bp, Homo sapiens
  misc_feature (61)..(62): /note="This region represents a CpG dinucleotide"
  misc_feature (61)..(61): /note="Nucleotide may be methylated to form 5-methylcytosine"
tcttaaaaaaaagtgacaatgtcacttctgctcacagtctgttgatcaaaatgaggcaaacggccaaacctgatgcctataggttgaggaaattgtgtatttgtgaatagtaatagcacagc

SEQ ID NO: 3359 - DNA, 122 bp, Homo sapiens
  misc_feature (61)..(62): /note="This region represents a CpG dinucleotide"
  misc_feature (61)..(61): /note="Nucleotide may be methylated to form 5-methylcytosine"
gagtcaaactatccctgtttgcagacagcatgattttatatctagaaaacccccatagcacgtcccaaaagctccttgtgctgataaaaaaaaacttcagcgaagtttcagaatacaaaatc

SEQ ID NO: 3360 - DNA, 122 bp, Homo sapiens
  misc_feature (61)..(62): /note="This region represents a CpG dinucleotide"
  misc_feature (61)..(61): /note="Nucleotide may be methylated to form 5-methylcytosine"
gtcaacacctggcttcacattctagatctctttgcctgtctgtcttctgccgcatgagagcgtgagctctgtgagggcagggacttgtgtgaactggattgcaccccagtgcctggaacagg

SEQ ID NO: 3361 - DNA, 122 bp, Homo sapiens
  misc_feature (61)..(62): /note="This region represents a CpG dinucleotide"
  misc_feature (61)..(61): /note="Nucleotide may be methylated to form 5-methylcytosine"
gccccacttccagcactggggattacaattcaacatgagatttggatggggacaaatatccgaactataacaagagggaatgaggaaaggcccgcccaacaaagcaggaaaccccaggaacc

SEQ ID NO: 3362 - DNA, 122 bp, Homo sapiens
  misc_feature (61)..(62): /note="This region represents a CpG dinucleotide"
  misc_feature (61)..(61): /note="Nucleotide may be methylated to form 5-methylcytosine"
cgctgtcccagcccacccgtcaatcacccatcaatcaccggccaatcacccgtcaatcaccgtctcttgccagctttgcatcctaaatattttttggaagagtcccgtgtccgccacacccc

SEQ ID NO: 3363 - DNA, 122 bp, Homo sapiens
  misc_feature (61)..(62): /note="This region represents a CpG dinucleotide"
  misc_feature (61)..(61): /note="Nucleotide may be methylated to form 5-methylcytosine"
cagctccatggaaaaaaacgtgttctagagacataaaattgatgctgctctgttaacagacgccaatgactcttctgagacttaaatcatggaacattcaacatgactcagggacattccgg

SEQ ID NO: 3364 - DNA, 122 bp, Homo sapiens
  misc_feature (61)..(62): /note="This region represents a CpG dinucleotide"
  misc_feature (61)..(61): /note="Nucleotide may be methylated to form 5-methylcytosine"
agggagccgagcaattagcaaggcgcgggcgcccgcttgcccagagggggtcggggagggcgagtggggagaccagggcgcgagggcaaagggctcccttcctggcaggctgcggtctgcag

SEQ ID NO: 3365 - DNA, 122 bp, Homo sapiens
  misc_feature (61)..(62): /note="This region represents a CpG dinucleotide"
  misc_feature (61)..(61): /note="Nucleotide may be methylated to form 5-methylcytosine"
tcgcagctccctgaatattcctgtgctcccccacatttccagtccctttacagttaaagccgtgtgacttgtttgagccaatagagtggaagtggaagagaagtatgtcactgcgagactga

SEQ ID NO: 3366 - DNA, 122 bp, Homo sapiens
  misc_feature (61)..(62): /note="This region represents a CpG dinucleotide"
  misc_feature (61)..(61): /note="Nucleotide may be methylated to form 5-methylcytosine"
tttggatattggataaatggaaaccttatatcaagaaaggttttcatttcccaaagagggcgctgtggttcaaattagtgcatttgctagcactgagttcctatttgggctttcttcctttt

SEQ ID NO: 3367 - DNA, 122 bp, Homo sapiens
  misc_feature (61)..(62): /note="This region represents a CpG dinucleotide"
  misc_feature (61)..(61): /note="Nucleotide may be methylated to form 5-methylcytosine"
cacctctgctactcaactcccacctcccacctcctgtctttaacctagagcagtgggcttcgctggccccaaaggagaaggaggcctgagccaacaagaaaactgctgaagcaaagtgagag

SEQ ID NO: 3368 - DNA, 122 bp, Homo sapiens
  misc_feature (61)..(62): /note="This region represents a CpG dinucleotide"
  misc_feature (61)..(61): /note="Nucleotide may be methylated to form 5-methylcytosine"
ataggactagaggcttcagtttcttgctgtcagccagaggctatactcaattctttgccacgtgggtttccccaacatagcctctcacatagccaacagagagactctagcaagacagatac

SEQ ID NO: 3369 - DNA, 122 bp, Homo sapiens
  misc_feature (61)..(62): /note="This region represents a CpG dinucleotide"
  misc_feature (61)..(61): /note="Nucleotide may be methylated to form 5-methylcytosine"
cccctccccgccgggtcggcagctagctgggccgaccaggtgcacagaaggcgtggcttgcggtcagcccccaccgcaggagctcagcactttcagccaaaagtcccattttgctccttcca

SEQ ID NO: 3370 - DNA, 122 bp, Homo sapiens
  misc_feature (61)..(62): /note="This region represents a CpG dinucleotide"
  misc_feature (61)..(61): /note="Nucleotide may be methylated to form 5-methylcytosine"
actatgcttcacatcaaaatattcccaaataatagtatagcatcactacactttttacctcgtgtgtattgttcaactctataatctagcttgcttcctcatccctccactgacactatgct

SEQ ID NO: 3371 - DNA, 122 bp, Homo sapiens
  misc_feature (61)..(62): /note="This region represents a CpG dinucleotide"
  misc_feature (61)..(61): /note="Nucleotide may be methylated to form 5-methylcytosine"
acggggaaaaccagtcctctccttggatgcgtcaagtgacggcaagttcagtgtcacacacggatgttgagggtcctccactgagtttatgggctagagaattactcacctacagaaacgaa

SEQ ID NO: 3372 - DNA, 122 bp, Homo sapiens
  misc_feature (61)..(62): /note="This region represents a CpG dinucleotide"
  misc_feature (61)..(61): /note="Nucleotide may be methylated to form 5-methylcytosine"
cttcccacccctgccagataagtaatccaatatagtcagggaggcattgttttagaataacgtggggagggttcagaagaccacatatctaaaacagtttctacatactgtgggctaaaaga

SEQ ID NO: 3373 - DNA, 122 bp, Homo sapiens
  misc_feature (61)..(62): /note="This region represents a CpG dinucleotide"
  misc_feature (61)..(61): /note="Nucleotide may be methylated to form 5-methylcytosine"
ccaagaaccaagcaagccaattagcaaatttgttcttctgttaatgctttagttccaaagcggaattttaatgcatttaaagttagactttatgcctttattagatgagcttgcacatgaaa

SEQ ID NO: 3374 - DNA, 122 bp, Homo sapiens
  misc_feature (61)..(62): /note="This region represents a CpG dinucleotide"
  misc_feature (61)..(61): /note="Nucleotide may be methylated to form 5-methylcytosine"
attcacattataaaatgtatcgatttaactattaaaacgaatgtctggcttcagatggggcgggccaactcagcctgtggaaacacagcataacactaggtggatacatggcgccacctagc

SEQ ID NO: 3375 - DNA, 122 bp, Homo sapiens
  misc_feature (61)..(62): /note="This region represents a CpG dinucleotide"
  misc_feature (61)..(61): /note="Nucleotide may be methylated to form 5-methylcytosine"
cattgtgaatacagggaccaaaagaaaggaggtcactgtggttgaagctgaatgagcatgcggcagagccgggcagccactgctgccaaaaaccacaaggcttgcaaaaatagtaaaagaga

SEQ ID NO: 3376 - DNA, 122 bp, Homo sapiens
  misc_feature (61)..(62): /note="This region represents a CpG dinucleotide"
  misc_feature (61)..(61): /note="Nucleotide may be methylated to form 5-methylcytosine"
tagaatagctcactctcttcccctgggtatcagcatgttgcgtggaggaggtactggctgcgtttcactaaggaatcctttataggtgggtgtgaacagagagccacagaaatatgttgaat

SEQ ID NO: 3377 - DNA, 122 bp, Homo sapiens
  misc_feature (61)..(62): /note="This region represents a CpG dinucleotide"
  misc_feature (61)..(61): /note="Nucleotide may be methylated to form 5-methylcytosine"
gcatctccagctcccagcaacctagcagtgcctctacgaaagtcccagtcccctactccacgaaaacacatcaaagcctcaggggaattgaatgccacaccatacgccgaggcacacacatg

SEQ ID NO: 3378 - DNA, 122 bp, Homo sapiens
  misc_feature (61)..(62): /note="This region represents a CpG dinucleotide"
  misc_feature (61)..(61): /note="Nucleotide may be methylated to form 5-methylcytosine"
ttcgccttgcaggcccttcctcctcttactgctaccccggccctgcctacctaggaggcacggctcgagccccgcctcccagcagctctcccaggcctcctagcagtcttcctccgctggga

SEQ ID NO: 3379 - DNA, 122 bp, Homo sapiens
  misc_feature (61)..(62): /note="This region represents a CpG dinucleotide"
  misc_feature (61)..(61): /note="Nucleotide may be methylated to form 5-methylcytosine"
ctgacctggtgaagttattaatattaacagctccaactaataaaagagtcaagcataggccgggcatggtggctcatacctgtaatcccagcacttttgggaggctgaggcgggcagataac

SEQ ID NO: 3380 - DNA, 122 bp, Homo sapiens
  misc_feature (61)..(62): /note="This region represents a CpG dinucleotide"
  misc_feature (61)..(61): /note="Nucleotide may be methylated to form 5-methylcytosine"
aattttttttaatttttaaaaatttgttgaaaaaccatcagccctgttaagttgctcacacgtgctgttgcagccccagctcacccggtagtaaatcctgctgacacagggtcccccacagc

SEQ ID NO: 3381 - DNA, 122 bp, Homo sapiens
  misc_feature (61)..(62): /note="This region represents a CpG dinucleotide"
  misc_feature (61)..(61): /note="Nucleotide may be methylated to form 5-methylcytosine"
ttcatttctaatgacacgccatgaatcatccaaccacagttacagcaacctgccccatgtcggtcacagagctgaagttagaacctgagccttctttgagcccggcatgtaaggaggaaaga

SEQ ID NO: 3382 - DNA, 122 bp, Homo sapiens
  misc_feature (61)..(62): /note="This region represents a CpG dinucleotide"
  misc_feature (61)..(61): /note="Nucleotide may be methylated to form 5-methylcytosine"
actagatgcaaagctcatggctgagattgagagccagagagacccaaagtctctacatcacgcccacactggtacttccagcctaggaggcgtggtgaatgcctcccacagtggttgctgag

SEQ ID NO: 3383 - DNA, 122 bp, Homo sapiens
  misc_feature (61)..(62): /note="This region represents a CpG dinucleotide"
  misc_feature (61)..(61): /note="Nucleotide may be methylated to form 5-methylcytosine"
cgcggagttcgacggagcggagttccaggggcggcggtatcggtggctgccctactacagcggtgagcgcggccgggactcgctctctcggggcctcttgtatacctacgttgatgccacag

SEQ ID NO: 3384 - DNA, 122 bp, Homo sapiens
  misc_feature (61)..(62): /note="This region represents a CpG dinucleotide"
  misc_feature (61)..(61): /note="Nucleotide may be methylated to form 5-methylcytosine"
gaaggatgcactaacacagaactgcagctgggggtggtagcccggggaagatcgctttcccgggggtgatcccaagcctatggagtgcatggctcccctgccggtgcttcttgctaacgggc

SEQ ID NO: 3385 - DNA, 122 bp, Homo sapiens
  misc_feature (61)..(62): /note="This region represents a CpG dinucleotide"
  misc_feature (61)..(61): /note="Nucleotide may be methylated to form 5-methylcytosine"
gctcaaaaccggctccctctgcgagggtttcccaggttaagccatcaggaaacaggaagacgcctaagaacgatacactggactttggggactcggagggaagggtgggagggggacaagga

SEQ ID NO: 3386 - DNA, 122 bp, Homo sapiens
  misc_feature (61)..(62): /note="This region represents a CpG dinucleotide"
  misc_feature (61)..(61): /note="Nucleotide may be methylated to form 5-methylcytosine"
tggggggcacatatggcagtgtcaccggctcctcacctgtgtccacaggtatccaggctccggagctttctcacggtgaaggtgattgagtgagccgccgagcggtggggacagaaatcttt

SEQ ID NO: 3387 - DNA, 122 bp, Homo sapiens
  misc_feature (61)..(62): /note="This region represents a CpG dinucleotide"
  misc_feature (61)..(61): /note="Nucleotide may be methylated to form 5-methylcytosine"
aggaaaccctcttatttgcatacttactagtatggcattcaaagcatttacttactaattcggatgataattttttgtcagttggaattcaactaagattgtagtggctttcaccaagcctt

SEQ ID NO: 3388 - DNA, 122 bp, Homo sapiens
  misc_feature (61)..(62): /note="This region represents a CpG dinucleotide"
  misc_feature (61)..(61): /note="Nucleotide may be methylated to form 5-methylcytosine"
ttgagaagccatttgcagctaccataacagcctcccaaacccaacaaagagtagcaaaaacgggcaaaatgaactgggcgtcttgcttccgcatgaataagcaatcagccctctcagaagtt

SEQ ID NO: 3389 - DNA, 122 bp, Homo sapiens
  misc_feature (61)..(62): /note="This region represents a CpG dinucleotide"
  misc_feature (61)..(61): /note="Nucleotide may be methylated to form 5-methylcytosine"
agtcccgggcccagggaggacctggaacattcccttcctccccccccccccccccgcccccgcccatcagcccagcctgcaaggaggcgccaccggacctgcacactcaggagcaggtgagc

SEQ ID NO: 3390 - DNA, 122 bp, Homo sapiens
  misc_feature (61)..(62): /note="This region represents a CpG dinucleotide"
  misc_feature (61)..(61): /note="Nucleotide may be methylated to form 5-methylcytosine"
ctttgttcattgcacattcacagcctgcctccagagccctcttgttcactgtttcactcacgttacacatgaggaaattggcctagaatggccaagtaacttgcccccaggtcactcagctg

SEQ ID NO: 3391 - DNA, 122 bp, Homo sapiens
  misc_feature (61)..(62): /note="This region represents a CpG dinucleotide"
  misc_feature (61)..(61): /note="Nucleotide may be methylated to form 5-methylcytosine"
ccaacgagaagcagttaccgaaaccacaactagcagaatgacttgcttaaatattagccacgtattttctcaagatctttgtgaaaatcccaagtttatgatgatagaccacaggagtataa

SEQ ID NO: 3392 - DNA, 122 bp, Homo sapiens
  misc_feature (61)..(62): /note="This region represents a CpG dinucleotide"
  misc_feature (61)..(61): /note="Nucleotide may be methylated to form 5-methylcytosine"
tcacgtgggaggtctgcccaggatcccggcagtgaggctgccctggaggcaggcttgctccgccacaggcgcgcaggcaacagcagcggagccgagaatggcgaggccagcgggcgaccagg

SEQ ID NO: 3393 - DNA, 122 bp, Homo sapiens
  misc_feature (61)..(62): /note="This region represents a CpG dinucleotide"
  misc_feature (61)..(61): /note="Nucleotide may be methylated to form 5-methylcytosine"
ctggtgggggcaggtgggggaatttgcaggcctggctgtatcctctgagcacttttccttcggaggtgaaagcttctccttaggaggtcagctggagcttcctcctctactaatcagcctgg

SEQ ID NO: 3394 - DNA, 122 bp, Homo sapiens
  misc_feature (61)..(62): /note="This region represents a CpG dinucleotide"
  misc_feature (61)..(61): /note="Nucleotide may be methylated to form 5-methylcytosine"
aatgccactccactctgtaatgcactgcatgttaacaagatttatatacattactggtgccgttaaggaaacttaaatgacttgcagtttctctagatgagattttaaaaaatcttaaaaag

SEQ ID NO: 3395 - DNA, 122 bp, Homo sapiens
  misc_feature (61)..(62): /note="This region represents a CpG dinucleotide"
  misc_feature (61)..(61): /note="Nucleotide may be methylated to form 5-methylcytosine"
cagacgaacccgctgtgcaagaacattttccacacagcggcgcatacccccgcccgggggcgctcggcagccgcacgcggccctcagagcgcagcccccacacgcctttacttctggaaggc

SEQ ID NO: 3396 - DNA, 122 bp, Homo sapiens
  misc_feature (61)..(62): /note="This region represents a CpG dinucleotide"
  misc_feature (61)..(61): /note="Nucleotide may be methylated to form 5-methylcytosine"
tggccttttttgcttttgttgtggtagtatgtacgacaatcctttctccttcctcttcctcgcactttctggggacagtagtgatgaagaagatgaagaagaagatgatgatgatggtgatg

SEQ ID NO: 3397 - DNA, 122 bp, Homo sapiens
  misc_feature (61)..(62): /note="This region represents a CpG dinucleotide"
  misc_feature (61)..(61): /note="Nucleotide may be methylated to form 5-methylcytosine"
tcccagacagcccaatctttaggcagtgagaatttaaggtcattctgggtcaatcctgcacgttgcatcacagcatggttccagaacctggagctttagtcctattaccatggttcctagtt

SEQ ID NO: 3398 - DNA, 122 bp, Homo sapiens
  misc_feature (61)..(62): /note="This region represents a CpG dinucleotide"
  misc_feature (61)..(61): /note="Nucleotide may be methylated to form 5-methylcytosine"
ccccaccgcagatgtcttggacctcatccccagttcacttttggccatgcgtttatcagtcgaacacttcctaggaatctctctgtaggctgggagtcagagccccacttccagaggcttcc

SEQ ID NO: 3399 - DNA, 122 bp, Homo sapiens
  misc_feature (61)..(62): /note="This region represents a CpG dinucleotide"
  misc_feature (61)..(61): /note="Nucleotide may be methylated to form 5-methylcytosine"
gaacactctagtactgaaagccatgctgattctttatggccatttgttattgccccacagcgtgattttagtccctctgtgtgaggatggaatgctaatcaaagcttcaatagaacagaagt

SEQ ID NO: 3400 - DNA, 122 bp, Homo sapiens
  misc_feature (61)..(62): /note="This region represents a CpG dinucleotide"
  misc_feature (61)..(61): /note="Nucleotide may be methylated to form 5-methylcytosine"
gcgctctggccccgacacgctcggcatagatgcctttgcggagcagacggcgctggagcccggccagggaagaccaagtctgggacttcagcgccagcctcgccaccctgcttcccacaacc

SEQ ID NO: 3401 - DNA, 122 bp, Homo sapiens
  misc_feature (61)..(62): /note="This region represents a CpG dinucleotide"
  misc_feature (61)..(61): /note="Nucleotide may be methylated to form 5-methylcytosine"
agccacagcacctggttgctgcccctaaggctcaatgggcaagtaacagatcactccgatcgcagaggcttcggaaatgccttccaccgtggtaccaaggatggtttgctctcaggagagga

SEQ ID NO: 3402 - DNA, 122 bp, Homo sapiens
  misc_feature (61)..(62): /note="This region represents a CpG dinucleotide"
  misc_feature (61)..(61): /note="Nucleotide may be methylated to form 5-methylcytosine"
ccagggtgggagattggggtgatattactccccgcaaggaggggggcgtcggcccccctgcgatgtggttcgtcatatccggtggggagtgggggttgatattactccccttatgtgggcgg

SEQ ID NO: 3403 - DNA, 122 bp, Homo sapiens
  misc_feature (61)..(62): /note="This region represents a CpG dinucleotide"
  misc_feature (61)..(61): /note="Nucleotide may be methylated to form 5-methylcytosine"
gcctagttaggcttccagtgaccccctaatttgcctggaaataatgcagagaccacctaccgtgtgcaaagcagtgtgacatttagaacaaaggtggcagaatctcaatgttcaaaagaaca

SEQ ID NO: 3404 - DNA, 122 bp, Homo sapiens
  misc_feature (61)..(62): /note="This region represents a CpG dinucleotide"
  misc_feature (61)..(61): /note="Nucleotide may be methylated to form 5-methylcytosine"
gacacaaggtgacctcttgtatgtgctgcctagtctgccggagttatctaagcaatctgtcgacctttaaggtttcagctgtctctgtagggtaattgtctgatttcgagattttgggggtt

SEQ ID NO: 3405 - DNA, 122 bp, Homo sapiens
  misc_feature (61)..(62): /note="This region represents a CpG dinucleotide"
  misc_feature (61)..(61): /note="Nucleotide may be methylated to form 5-methylcytosine"
gtttcctctttgctctctctgccacgcttgaacaacttgccaaggatgccatctctcttacgtccgccgtggtgctccggattctgactcattcggacgaacgggtcggggtcgcggaacct

SEQ ID NO: 3406 - DNA, 122 bp, Homo sapiens
  misc_feature (61)..(62): /note="This region represents a CpG dinucleotide"
  misc_feature (61)..(61): /note="Nucleotide may be methylated to form 5-methylcytosine"
gggaaccgttttcctaacgcagctctgaccgggttctcaaagccaacctgcaaatagtcgcgttcagggacagccagggaccgctgggcttttcacagcctgcctcacctttgaatattgta

SEQ ID NO: 3407 - DNA, 122 bp, Homo sapiens
  misc_feature (61)..(62): /note="This region represents a CpG dinucleotide"
  misc_feature (61)..(61): /note="Nucleotide may be methylated to form 5-methylcytosine"
taattcaggttcatagcactgtttattaaatgggttaacacaggtaatttgacttgatcacgaagttcactcaaattgcctgtcttagcaattttagtactggctgacttagcatgaaaatc

SEQ ID NO: 3408 - DNA, 122 bp, Homo sapiens
  misc_feature (61)..(62): /note="This region represents a CpG dinucleotide"
  misc_feature (61)..(61): /note="Nucleotide may be methylated to form 5-methylcytosine"
gggagtggatggaacacgggatgtgtccctccctccagcttgccacagcttgctcctgagcgactcctatatatggaaaagcgaaagtgcctgaaaaatcatgtgagaaaattggaggagtc

SEQ ID NO: 3409 - DNA, 122 bp, Homo sapiens
  misc_feature (61)..(62): /note="This region represents a CpG dinucleotide"
  misc_feature (61)..(61): /note="Nucleotide may be methylated to form 5-methylcytosine"
gtgctctaaccacaaaaagaaacaaacaaagggaatgagaggaaatattaggaggtgatgcgtaagtaagtttatggcattgatagtgatgatggttttaaaggtatatagttatctccaaa

SEQ ID NO: 3410 - DNA, 122 bp, Homo sapiens
  misc_feature (61)..(62): /note="This region represents a CpG dinucleotide"
  misc_feature (61)..(61): /note="Nucleotide may be methylated to form 5-methylcytosine"
gtgagtgtgataaggaaaatgaaaataaaatagaccaacagttaagatgaaggaaaagcacgggaaagataaaggagaaacaggaaatggaagtaacataatcaggtaaattatgccaacta

SEQ ID NO: 3411 - DNA, 122 bp, Homo sapiens
  misc_feature (61)..(62): /note="This region represents a CpG dinucleotide"
  misc_feature (61)..(61): /note="Nucleotide may be methylated to form 5-methylcytosine"
aataaatgagtacaaaccacaagctcagtttctcctgaaactctcacagcctgcttctgacgtcagatgtgtgtgggttgcacactgcgttaatccattctcacactgctataaagaaatac

SEQ ID NO: 3412 - DNA, 122 bp, Homo sapiens
  misc_feature (61)..(62): /note="This region represents a CpG dinucleotide"
  misc_feature (61)..(61): /note="Nucleotide may be methylated to form 5-methylcytosine"
atgtcacaggtggcatttaaaacccattccttgctggacctggtagagacgcccccagtccgtcaggtctctcgctgcagttccgcagtttgaccgcaggggacggaatctgcggcggcctg

SEQ ID NO: 3413 - DNA, 122 bp, Homo sapiens
  misc_feature (61)..(62): /note="This region represents a CpG dinucleotide"
  misc_feature (61)..(61): /note="Nucleotide may be methylated to form 5-methylcytosine"
agaggtcagggagcagaagagaagtgtcaggagatttgagtccctcaattagtttttctacgttgggcagagagacaaaaagaaagcaaaaatgtagtaagatattaaagccagcggatcat

SEQ ID NO: 3414 - DNA, 122 bp, Homo sapiens
  misc_feature (61)..(62): /note="This region represents a CpG dinucleotide"
  misc_feature (61)..(61): /note="Nucleotide may be methylated to form 5-methylcytosine"
atgcatctttttttacatcaaacaatactgatgggcttctagtgctaaagcagcaggccccgccccacctcgctccccaactccagccctccagccagttaaccatttgcaaactgcttact

SEQ ID NO: 3415 - DNA, 122 bp, Homo sapiens
  misc_feature (61)..(62): /note="This region represents a CpG dinucleotide"
  misc_feature (61)..(61): /note="Nucleotide may be methylated to form 5-methylcytosine"
gaggcgtcccgggggcctctgaggctgggcgatttggggtgccagagaccgctaaagcagcggcccactgcccaatttatgtgtgcgctaaatcacgaccatgatttctgcgtgttttctag

SEQ ID NO: 3416 - DNA, 122 bp, Homo sapiens
  misc_feature (61)..(62): /note="This region represents a CpG dinucleotide"
  misc_feature (61)..(61): /note="Nucleotide may be methylated to form 5-methylcytosine"
gactcggacgtcccagggctgcgttaactgccaggtgctttacaaacggggtgactttgacgtttagccccacggttagaacagaaaacccgtctgccatgagaatcgagagagtctgaggc

SEQ ID NO: 3417 - DNA, 122 bp, Homo sapiens
  misc_feature (61)..(62): /note="This region represents a CpG dinucleotide"
  misc_feature (61)..(61): /note="Nucleotide may be methylated to form 5-methylcytosine"
tgcagaggcgggactggggatgtcaccatgggacagagccagggagtgccacaagaagggcgggcagctcccagagctagtggggcctactaaggccagagcacaagcaccagacagcccag

SEQ ID NO: 3418 - DNA, 122 bp, Homo sapiens
  misc_feature (61)..(62): /note="This region represents a CpG dinucleotide"
  misc_feature (61)..(61): /note="Nucleotide may be methylated to form 5-methylcytosine"
tcctaatgataatggcccccaagcctgtgctatcacctgtcttagaattttgccaggtatcggccttaatgtttgacacaggaatcatcttaggattaaatttcagatttttcatctgcagt

SEQ ID NO: 3419 - DNA, 122 bp, Homo sapiens
  misc_feature (61)..(62): /note="This region represents a CpG dinucleotide"
  misc_feature (61)..(61): /note="Nucleotide may be methylated to form 5-methylcytosine"
caagtccacagagtaaagtgaaagcaagtttattaagaaagtgaaggaataaatgaatggcgactccataagcagaacagccccaatggctgctggttagctgtcatctatgattatctttt

SEQ ID NO: 3420 - DNA, 122 bp, Homo sapiens
  misc_feature (61)..(62): /note="This region represents a CpG dinucleotide"
  misc_feature (61)..(61): /note="Nucleotide may be methylated to form 5-methylcytosine"
acagatgaggaaactgaggcccagagaagccaagtagtgacctagggtcacacagattgccgttaagtggcaagatacggggtgtgtactcaggcatatcggatctgtaaagtgagggataa

SEQ ID NO: 3421 - DNA, 122 bp, Homo sapiens
  misc_feature (61)..(62): /note="This region represents a CpG dinucleotide"
  misc_feature (61)..(61): /note="Nucleotide may be methylated to form 5-methylcytosine"
ctgccgctctcccagggctgcagggacctggtcgtgctggagacggatgttttcaggcagcgctttgtaggaggcagtgacgctggtaacccactaatgtgaggatgaagtctttgtattct

SEQ ID NO: 3422 - DNA, 122 bp, Homo sapiens
  misc_feature (61)..(62): /note="This region represents a CpG dinucleotide"
  misc_feature (61)..(61): /note="Nucleotide may be methylated to form 5-methylcytosine"
ttctccaaagacgatgcaatgtttataaaactcaggatgagcttgactcacgataacagacggagcgatcaggggaggcaatgttagctgttatgggctaatttatatcccccaccaaccac

SEQ ID NO: 3423 - DNA, 122 bp, Homo sapiens
  misc_feature (61)..(62): /note="This region represents a CpG dinucleotide"
  misc_feature (61)..(61): /note="Nucleotide may be methylated to form 5-methylcytosine"
aagtatgctctttatcgcaacctgcaacattccccctcagacggaagcttgtgtagaggccgccaagttccaacaaatgctcccgactgtagacgccaccaagtgctgggacttgctctcgt

SEQ ID NO: 3424 - DNA, 122 bp, Homo sapiens
  misc_feature (61)..(62): /note="This region represents a CpG dinucleotide"
  misc_feature (61)..(61): /note="Nucleotide may be methylated to form 5-methylcytosine"
aggcacctgccacgccccagagctggcccttctgcagagcaacactgagctgcacagggtcgaatgttcagagagaagctccttggatctgccatttctaactatatgagtgagaagaaaga

SEQ ID NO: 3425 - DNA, 122 bp, Homo sapiens
  misc_feature (61)..(62): /note="This region represents a CpG dinucleotide"
  misc_feature (61)..(61): /note="Nucleotide may be methylated to form 5-methylcytosine"
gaccccctccctgcctccagcctgttctggagacctccaagcaggagctggaggaggatccgcccagcaccgcagcccgcgccgcctcctcctgggagccccaaagacactctctgctcctc

SEQ ID NO: 3426 - DNA, 122 bp, Homo sapiens
  misc_feature (61)..(62): /note="This region represents a CpG dinucleotide"
  misc_feature (61)..(61): /note="Nucleotide may be methylated to form 5-methylcytosine"
agagacggagccttcctgtggttcgcgcacttccttcctgaagcctcatatttcccattccgttgatacttggccacctcaacctgcaacgtgcagtttccagtgtcatcttcatccaaatg

SEQ ID NO: 3427 - DNA, 122 bp, Homo sapiens
  misc_feature (61)..(62): /note="This region represents a CpG dinucleotide"
  misc_feature (61)..(61): /note="Nucleotide may be methylated to form 5-methylcytosine"
aggctagaaggtgaacttggggtaatgaaccagtcctaatgaggatgtaaccaaagggaacggtagaacagtgaaatgaaaggaagttggatccctgtatgacctgccagatcagagcagct

SEQ ID NO: 3428 - DNA, 122 bp, Homo sapiens
  misc_feature (61)..(62): /note="This region represents a CpG dinucleotide"
  misc_feature (61)..(61): /note="Nucleotide may be methylated to form 5-methylcytosine"
tttaatagatgcagaaactgaggcacagagaggttaagcaagtgatcaaggtcacacagccggtaagggccggtgaaggaattgaaaataggccagtgaccactgtaaccagtaaactatct

SEQ ID NO: 3429 - DNA, 122 bp, Homo sapiens
  misc_feature (61)..(62): /note="This region represents a CpG dinucleotide"
  misc_feature (61)..(61): /note="Nucleotide may be methylated to form 5-methylcytosine"
caagatgtctcacaccctagaagcctagggctgggggagacagccctgtctgggagggggcgttgggtggcctctggtatttatttggcatttataaatatataaactccttttttactcta

SEQ ID NO: 3430 - DNA, 122 bp, Homo sapiens
  misc_feature (61)..(62): /note="This region represents a CpG dinucleotide"
  misc_feature (61)..(61): /note="Nucleotide may be methylated to form 5-methylcytosine"
tgctgggtcatttgggaagcaggaaagtgtggtggtcagcagagctgcacgcccatggcacgcagagaatgagctccccatcaccaagagtattcaagtagagtacggataatcgccttgga

SEQ ID NO: 3431 - DNA, 122 bp, Homo sapiens
  misc_feature (61)..(62): /note="This region represents a CpG dinucleotide"
  misc_feature (61)..(61): /note="Nucleotide may be methylated to form 5-methylcytosine"
aggactgcatatttgtaatggtttcctagtggcatctgaagaaagataaatctcttttggcgaggactgagattctgatttgatggcagccagagcagtctaccaaagtcactaaagcatta

SEQ ID NO: 3432 - DNA, 122 bp, Homo sapiens
  misc_feature (61)..(62): /note="This region represents a CpG dinucleotide"
  misc_feature (61)..(61): /note="Nucleotide may be methylated to form 5-methylcytosine"
gtattttcccacttagagaagcttttgtacactgagcatgtggctgtttaaatgccccagcgggacatccagaggctgcaaaaacgggaaaaattatttggaacaatttgctttcgttcaag

SEQ ID NO: 3433 - DNA, 122 bp, Homo sapiens
  misc_feature (61)..(62): /note="This region represents a CpG dinucleotide"
  misc_feature (61)..(61): /note="Nucleotide may be methylated to form 5-methylcytosine"
tccttgtgtttcctgtaggtcattctctagggacataaatttctgaatgttcctcaagcacggataatcgaatcattggactccaagcaaaaggttaagtggagattgataggatctggcta

SEQ ID NO: 3434 - DNA, 122 bp, Homo sapiens
  misc_feature (61)..(62): /note="This region represents a CpG dinucleotide"
  misc_feature (61)..(61): /note="Nucleotide may be methylated to form 5-methylcytosine"
ataagcacttcttcctggtgtgcccaggtaggccgtgacatactgggttcagccttgaaccgcaccctacagcccctgtggcaggactcacgggctcgcctgcctgtcttcctgaagaacct

SEQ ID NO: 3435 - DNA, 122 bp, Homo sapiens
  misc_feature (61)..(62): /note="This region represents a CpG dinucleotide"
  misc_feature (61)..(61): /note="Nucleotide may be methylated to form 5-methylcytosine"
ggcagcaaaacagggcaggttttaaaaactgcacccacacgaactctgaacagaggaagacggtttgcttcaggcaccatctctaagctgtgtgtgctcttggcacagctcgtggacctggg

SEQ ID NO: 3436 - DNA, 122 bp, Homo sapiens
  misc_feature (61)..(62): /note="This region represents a CpG dinucleotide"
  misc_feature (61)..(61): /note="Nucleotide may be methylated to form 5-methylcytosine"
gtcagaggggtggatccctcataaatggcttgatgctgttctctgtagtgaatgcattctcgctctggacagactagattatttttgtgggaatcgattagttccgtagagagtggcttgtt

SEQ ID NO: 3437 - DNA, 122 bp, Homo sapiens
  misc_feature (61)..(62): /note="This region represents a CpG dinucleotide"
  misc_feature (61)..(61): /note="Nucleotide may be methylated to form 5-methylcytosine"
caaattaaacatttcaggacccatttccaatgaaagatgcatgggcatcagtatttcctccgcaatgcttagggaacacgccatcctcccacaaactccagtaaagaatgtgaaacccaatt

SEQ ID NO: 3438 - DNA, 122 bp, Homo sapiens
  misc_feature (61)..(62): /note="This region represents a CpG dinucleotide"
  misc_feature (61)..(61): /note="Nucleotide may be methylated to form 5-methylcytosine"
cgtgccccactcctggctaaaactcctcctgtttcaggactcctgaggcaactggttttgcgtctcagaagggatcaccctcactagtgtatgtctttcacctttcatcagccacttcccct

SEQ ID NO: 3439 - DNA, 122 bp, Homo sapiens
  misc_feature (61)..(62): /note="This region represents a CpG dinucleotide"
  misc_feature (61)..(61): /note="Nucleotide may be methylated to form 5-methylcytosine"
aaccctttagtaatgttcaagttatctctagagcagttaaggggaactaaaatcttctaacggggtctacatgatcctaggataataggcaccaaacaactatgaggaaacaggtcagggag

SEQ ID NO: 3440 - DNA, 122 bp, Homo sapiens
  misc_feature (61)..(62): /note="This region represents a CpG dinucleotide"
  misc_feature (61)..(61): /note="Nucleotide may be methylated to form 5-methylcytosine"
agtggtaatggccagggcagggccagttcagggcggttcctcctttcaacatggcccaagcgggtgtatgtagggatgggaaaatacgtaattggcaaaagaacatactgcaaggggaaact

SEQ ID NO: 3441 - DNA, 122 bp, Homo sapiens
  misc_feature (61)..(62): /note="This region represents a CpG dinucleotide"
  misc_feature (61)..(61): /note="Nucleotide may be methylated to form 5-methylcytosine"
ccttgcacacaggcttctggaacttctagttcctgttgtaggaatcctggagttgggtgacgggaagaatgcaactagagaggtttggggagatttttttttgtttttgagacaggatgtca

SEQ ID NO: 3442 - DNA, 122 bp, Homo sapiens
  misc_feature (61)..(62): /note="This region represents a CpG dinucleotide"
  misc_feature (61)..(61): /note="Nucleotide may be methylated to form 5-methylcytosine"
cctctgtgcccaagctgtcttatctgtgttttcctgtctgctctttctggctgctctttccgtagttagaagaggtttccttgaaatgcatgaggctagaatgggaggtggaatttaaagtg

SEQ ID NO: 3443 - DNA, 122 bp, Homo sapiens
  misc_feature (61)..(62): /note="This region represents a CpG dinucleotide"
  misc_feature (61)..(61): /note="Nucleotide may be methylated to form 5-methylcytosine"
ggacttaacccctttgccccatccctgcagctggccagccgatgtcgagatgctaggatccgcctcctcctggctcagtgtaatggtgagatgtgtggagaagagcggggcccagtgcctgg

SEQ ID NO: 3444 - DNA, 122 bp, Homo sapiens
  misc_feature (61)..(62): /note="This region represents a CpG dinucleotide"
  misc_feature (61)..(61): /note="Nucleotide may be methylated to form 5-methylcytosine"
ggattttttttctagttattttaattcagaatcaattaaagccttttctttttctctccacgcagaagagggttctgtgaaagcctggtgaattaccaccataaagtctaattattccttcc

SEQ ID NO: 3445 - DNA, 122 bp, Homo sapiens
  misc_feature (61)..(62): /note="This region represents a CpG dinucleotide"
  misc_feature (61)..(61): /note="Nucleotide may be methylated to form 5-methylcytosine"
ttgcttttgttgtacagttcaatcctaacatttatgctgttgagaaccaaatgcactcaccgatgtcttttcacacttgctttttatcctgagatgggccagatacagctgctcttctctat

SEQ ID NO: 3446 - DNA, 122 bp, Homo sapiens
  misc_feature (61)..(62): /note="This region represents a CpG dinucleotide"
  misc_feature (61)..(61): /note="Nucleotide may be methylated to form 5-methylcytosine"
acaaataataatcctggaactacacagtggttcagagactctgcttactaagcattttcacgtcctttcatctgagttttgtaacaaccccatgtgaaaggctggtaagtatttttagcttt

SEQ ID NO: 3447 - DNA, 122 bp, Homo sapiens
  misc_feature (61)..(62): /note="This region represents a CpG dinucleotide"
  misc_feature (61)..(61): /note="Nucleotide may be methylated to form 5-methylcytosine"
tgtcgaaaatcccttaggaagtttctccttaggagagggaaagaagttctaaaacttgaacgtctagctacgggtggattcaggttttgtaatttgaggaatcctctttaagaaaaggaata

SEQ ID NO: 3448 - DNA, 122 bp, Homo sapiens
  misc_feature (61)..(62): /note="This region represents a CpG dinucleotide"
  misc_feature (61)..(61): /note="Nucleotide may be methylated to form 5-methylcytosine"
gaggaaaatgtcatcagcactataatctttgtctcacttaagaaaaaaggccttaatttgcggcagggaagtatttaaatatacagactgtaaatattggagggtacatttttgtggcttag

SEQ ID NO: 3449 - DNA, 122 bp, Homo sapiens
  misc_feature (61)..(62): /note="This region represents a CpG dinucleotide"
  misc_feature (61)..(61): /note="Nucleotide may be methylated to form 5-methylcytosine"
caaatttggcagctgaaatgcaagtctgaattatgtcatcttcctggtcatcagtgtcaccgtcctgtctgacagttcccttgcgggctccttttaccggtttattcagatcagagtcattt

SEQ ID NO: 3450 - DNA, 122 bp, Homo sapiens
  misc_feature (61)..(62): /note="This region represents a CpG dinucleotide"
  misc_feature (61)..(61): /note="Nucleotide may be methylated to form 5-methylcytosine"
tcatggagctcctcctaagcacccgacagagagaaattgtgtcttcaacggactcaaaagcggaggggagagaaacacagagacatgtctctttgtgatccccagcaagacaagcagaatat

SEQ ID NO: 3451 - DNA, 122 bp, Homo sapiens
  misc_feature (61)..(62): /note="This region represents a CpG dinucleotide"
  misc_feature (61)..(61): /note="Nucleotide may be methylated to form 5-methylcytosine"
cagcccttccctgggagaagcctggcccagcccgggttttggcctgcaactaacacattgcgtacaccaccgttatctcttcacttaagtcctgaaaggggtcaataaagttactcaagaag

SEQ ID NO: 3452 - DNA, 122 bp, Homo sapiens
  misc_feature (61)..(62): /note="This region represents a CpG dinucleotide"
  misc_feature (61)..(61): /note="Nucleotide may be methylated to form 5-methylcytosine"
aattagcaattttcacttattcctgttttatttattattctttattacatttttttcctccgtgttacaatatcaggaaagctcatcgaccgaggaaatacattgcaccagttttttctcat

SEQ ID NO: 3453 - DNA, 122 bp, Homo sapiens
  misc_feature (61)..(62): /note="This region represents a CpG dinucleotide"
  misc_feature (61)..(61): /note="Nucleotide may be methylated to form 5-methylcytosine"
ccgagccctgctcgtggagccattggtgctgcggcggggagaagaggccacaggcggggacgccccagacactcccgtggggcccgtgccagggtctcctgctcctcagaaagagcccttgt

SEQ ID NO: 3454 - DNA, 122 bp, Homo sapiens
  misc_feature (61)..(62): /note="This region represents a CpG dinucleotide"
  misc_feature (61)..(61): /note="Nucleotide may be methylated to form 5-methylcytosine"
tgaactcctgggctcaagtgatctgcccaccttagcctcccaaagtgctgggattgtaggcgtgagccaccctgcctggccctagtagtcatgttttaaaaagtaaaaagaaagagacaaaa

SEQ ID NO: 3455 - DNA, 122 bp, Homo sapiens
  misc_feature (61)..(62): /note="This region represents a CpG dinucleotide"
  misc_feature (61)..(61): /note="Nucleotide may be methylated to form 5-methylcytosine"
cctcggcgcttccaagggggaaatatccaggagggatgcctattcctgagaactctttatcgagtcttctcagagcctgccttgaggccgcaaccaatttcaaaaatctcgtctcaagatca

SEQ ID NO: 3456 - DNA, 122 bp, Homo sapiens
  misc_feature (61)..(62): /note="This region represents a CpG dinucleotide"
  misc_feature (61)..(61): /note="Nucleotide may be methylated to form 5-methylcytosine"
ggtgacctcagtagtgaggagaagcaggatgaacaaataggagagtgggaagaatgatgacggagtgagagattatataagatttgatcatgctaagagtttacttcagagtgaagaaggtt

SEQ ID NO: 3457 - DNA, 122 bp, Homo sapiens
  misc_feature (61)..(62): /note="This region represents a CpG dinucleotide"
  misc_feature (61)..(61): /note="Nucleotide may be methylated to form 5-methylcytosine"
agagtaaagacagtgtgcttctatttatgtaaaattcaaaatcagaacaaaactaactcacggagttagaagtcagaatagggttttcttcggggggaaatggtgactggaaaggggcaagg

SEQ ID NO: 3458 - DNA, 122 bp, Homo sapiens
  misc_feature (61)..(62): /note="This region represents a CpG dinucleotide"
  misc_feature (61)..(61): /note="Nucleotide may be methylated to form 5-methylcytosine"
cgagaagagtgccccgcggagtggctgtgatgagcgggatgcggaaggtgtccactgagccgatctgtctcccgctcacccacagcagttgctccatggtcaccagcggctgcacctgtcat

SEQ ID NO: 3459 - DNA, 122 bp, Homo sapiens
  misc_feature (61)..(62): /note="This region represents a CpG dinucleotide"
  misc_feature (61)..(61): /note="Nucleotide may be methylated to form 5-methylcytosine"
cctttatctttctctttatgaccataaaacttgcccgacgaaagtctaaaatgcccaaatcgggagtcattggtggactgcaaccatcggtttctccaatgctctgtggggaaggggaaata

SEQ ID NO: 3460 - DNA, 122 bp, Homo sapiens
  misc_feature (61)..(62): /note="This region represents a CpG dinucleotide"
  misc_feature (61)..(61): /note="Nucleotide may be methylated to form 5-methylcytosine"
ctgcctccagaagaccctgactgccccatgacgatgacgcatagggagcttcctggggaacggctggctccacctcaggaagggcccaggcccaacagactccccagcaggggcctacaccc

SEQ ID NO: 3461 - DNA, 122 bp, Homo sapiens
  misc_feature (61)..(62): /note="This region represents a CpG dinucleotide"
  misc_feature (61)..(61): /note="Nucleotide may be methylated to form 5-methylcytosine"
ggatgaacgaggaagaggaatagctttgtgtacttatttttagttacatgaaaggaccaacgctggtaaatacttagagataaatcagatgtattgagcaatggggaacatgtgagcaaata

SEQ ID NO: 3462 - DNA, 122 bp, Homo sapiens
  misc_feature (61)..(62): /note="This region represents a CpG dinucleotide"
  misc_feature (61)..(61): /note="Nucleotide may be methylated to form 5-methylcytosine"
ttcttctcccgtccttgaaaggtacaagttgcttaaccaagaagaaggtgagtactacaacgtacccattccggaaggggacgaggaaggaaacatggaactcaggcagaaattcgaggtga

SEQ ID NO: 3463 - DNA, 122 bp, Homo sapiens
  misc_feature (61)..(62): /note="This region represents a CpG dinucleotide"
  misc_feature (61)..(61): /note="Nucleotide may be methylated to form 5-methylcytosine"
atatgatttggaaaatgcttactaatgcttctactggaaactgtttaagcctcgagagtccgctacacagggttattcaatgttcagtgtgcttatgaatcacctgaggactcttgttaaaa

SEQ ID NO: 3464 - DNA, 122 bp, Homo sapiens
  misc_feature (61)..(62): /note="This region represents a CpG dinucleotide"
  misc_feature (61)..(61): /note="Nucleotide may be methylated to form 5-methylcytosine"
tcagatagtccacttaccacattgtcttcctcataaacacattttggatttgggttaaaacgactttaaattactaaaggtgatttacatttgtgtggtgtagagacaatttcaatcatctt

SEQ ID NO: 3465 - DNA, 122 bp, Homo sapiens
  misc_feature (61)..(62): /note="This region represents a CpG dinucleotide"
  misc_feature (61)..(61): /note="Nucleotide may be methylated to form 5-methylcytosine"
tacgtaagtttacttgctggctcagtcatcatttattagtcgtaggaagcctttattgagcgcctaccataatgtgccaggcattggcctaagcataatcctgctgctgctttagatttacg

SEQ ID NO: 3466 - DNA, 122 bp, Homo sapiens
  misc_feature (61)..(62): /note="This region represents a CpG dinucleotide"
  misc_feature (61)..(61): /note="Nucleotide may be methylated to form 5-methylcytosine"
ggaggggaggcctgggcttccccagggcccttgcagtggcttcgagcaccgccacctcctcggcctgctgagcctccatgagtgccatctgctgctccaacttccggcgttgctcttcctgc

SEQ ID NO: 3467 - DNA, 122 bp, Homo sapiens
  misc_feature (61)..(62): /note="This region represents a CpG dinucleotide"
  misc_feature (61)..(61): /note="Nucleotide may be methylated to form 5-methylcytosine"
gattaacttccatcataaagatgtgatttaaattcctgttggtatgaggccctccacttgcggtctcttattaaaacaatataccacagtaagtagtggatgttcttttcttctaattactg

SEQ ID NO: 3468 - DNA, 122 bp, Homo sapiens
  misc_feature (61)..(62): /note="This region represents a CpG dinucleotide"
  misc_feature (61)..(61): /note="Nucleotide may be methylated to form 5-methylcytosine"
gcccataccgcagtaggctcctcgggctgcccctcggtgagtacagttttgatgtcggctcggccgcctgccgccaacccgagatttggtattgccagttgtgggagggcgtcctgctaaaa

SEQ ID NO: 3469 - DNA, 122 bp, Homo sapiens
  misc_feature (61)..(62): /note="This region represents a CpG dinucleotide"
  misc_feature (61)..(61): /note="Nucleotide may be methylated to form 5-methylcytosine"
ggctttcggaccagagcagccctggcagggttgagtccagccctggcggggttgagttaccgaaacaccctggaggcagctaaatttcctcagctgtcctggagaggctcaccccagcccca

SEQ ID NO: 3470 - DNA, 122 bp, Homo sapiens
  misc_feature (61)..(62): /note="This region represents a CpG dinucleotide"
  misc_feature (61)..(61): /note="Nucleotide may be methylated to form 5-methylcytosine"
aagaactcatgatttacattgtcttactatgaaataccatccctcactcttgacagacgacgtagctgatctgagcagcgccctggcacccgcaggcctacccccctgcctgaggtgtgatg

SEQ ID NO: 3471 - DNA, 122 bp, Homo sapiens
  misc_feature (61)..(62): /note="This region represents a CpG dinucleotide"
  misc_feature (61)..(61): /note="Nucleotide may be methylated to form 5-methylcytosine"
gccatggatggggacttgctattcttggacagtgacccccggtctccctgtaccctctaccgtgtctgtccctgtaactgcagcatcttcatgggcagagtccacatccccagcagggagga

SEQ ID NO: 3472 - DNA, 122 bp, Homo sapiens
  misc_feature (61)..(62): /note="This region represents a CpG dinucleotide"
  misc_feature (61)..(61): /note="Nucleotide may be methylated to form 5-methylcytosine"
gatgctgtgcttttgctgatgtttggttcaacccagctgtgcactcacatgcagtccctccgtgagctcatagctttggttctgtctcagtgaggccctcctacagccttcctgacacagac

SEQ ID NO: 3473 - DNA, 122 bp, Homo sapiens
  misc_feature (61)..(62): /note="This region represents a CpG dinucleotide"
  misc_feature (61)..(61): /note="Nucleotide may be methylated to form 5-methylcytosine"
ggggctggtgcaactccaaaatggctgccgcggggagcggcgattagaacgggttccagtcgcttgggggcgttggggggctggagggcaagaggttacgcgccccagctcccaccttgggt

SEQ ID NO: 3474 - DNA, 122 bp, Homo sapiens
  misc_feature (61)..(62): /note="This region represents a CpG dinucleotide"
  misc_feature (61)..(61): /note="Nucleotide may be methylated to form 5-methylcytosine"
agacaaaaatagacacggaagccgcgatcgaggaggagggggaacaaaagggtcagcttccgctaagaaagcctcagccacgtccctggggaagtttcatgtctttcctcacacgtggcagg

SEQ ID NO: 3475 - DNA, 122 bp, Homo sapiens
  misc_feature (61)..(62): /note="This region represents a CpG dinucleotide"
  misc_feature (61)..(61): /note="Nucleotide may be methylated to form 5-methylcytosine"
atagcacgtttatttacgcctatgagcacacactcgagcaaggacctgaaaaacctgcagcgtgggcaggaggtaaaccactgaaagtatgccgaggttacgtctctcctggttattcaggt

SEQ ID NO: 3476 - DNA, 122 bp, Homo sapiens
  misc_feature (61)..(62): /note="This region represents a CpG dinucleotide"
  misc_feature (61)..(61): /note="Nucleotide may be methylated to form 5-methylcytosine"
cctttaactgatgggtcagacaggaactgtgcagtggagctcctcccagctcttgctgggcgaattgtttcttcagcttatctgatgatagggctgaggttagagtcatgatctgcctctgt

SEQ ID NO: 3477 - DNA, 122 bp, Homo sapiens
  misc_feature (61)..(62): /note="This region represents a CpG dinucleotide"
  misc_feature (61)..(61): /note="Nucleotide may be methylated to form 5-methylcytosine"
gctattgaagggttgcccaggtatctgtatagaaaaccaacctaacctggtcaaagtaaacgagtacaactggatgtttgtagtcattacacaggaaaccaccatgctaatctatctatgaa

SEQ ID NO: 3478 - DNA, 122 bp, Homo sapiens
  misc_feature (61)..(62): /note="This region represents a CpG dinucleotide"
  misc_feature (61)..(61): /note="Nucleotide may be methylated to form 5-methylcytosine"
gcagcgtcaggccaagcttggccacttacatgtctggcatgacagtggcctcagagtactcgtctgagaagaagagctatcacctgagcgctctggagaacttagccggagctttcaggcag

SEQ ID NO: 3479 - DNA, 122 bp, Homo sapiens
  misc_feature (61)..(62): /note="This region represents a CpG dinucleotide"
  misc_feature (61)..(61): /note="Nucleotide may be methylated to form 5-methylcytosine"
gctccccagcctgtgtagattctgctgtaagtgactcttctctgaaagactggcgcgaggcggctgcttctgactcctgtttcagtttaccctctgtgtgaaatctgtaactatccagcttc

SEQ ID NO: 3480 - DNA, 122 bp, Homo sapiens
  misc_feature (61)..(62): /note="This region represents a CpG dinucleotide"
  misc_feature (61)..(61): /note="Nucleotide may be methylated to form 5-methylcytosine"
ggatttataatttttgttatgattggggacttttcagctattgtttcttcaaaaattggccggacacagtggttcacaacttcaggaggccaagtcgggaggtgttgagtgaggcctgaaat

SEQ ID NO: 3481 - DNA, 122 bp, Homo sapiens
  misc_feature (61)..(62): /note="This region represents a CpG dinucleotide"
  misc_feature (61)..(61): /note="Nucleotide may be methylated to form 5-methylcytosine"
tgggtacagaattcatctcaactacttcctccttcggcttctcgttcttgctgaaattctcgtctggctggtacctgaattagagagagtagggcaagattaacccaggtccctgttcatcc

SEQ ID NO: 3482 - DNA, 122 bp, Homo sapiens
  misc_feature (61)..(62): /note="This region represents a CpG dinucleotide"
  misc_feature (61)..(61): /note="Nucleotide may be methylated to form 5-methylcytosine"
aaactcccaaagaattcaggaaggaagataacttaaaactacactgaagaacgttacctgcggtgcacgtcacagctgaagagccagagttaagctctaaattaagatcagttgcaccgctc

SEQ ID NO: 3483 - DNA, 122 bp, Homo sapiens
  misc_feature (61)..(62): /note="This region represents a CpG dinucleotide"
  misc_feature (61)..(61): /note="Nucleotide may be methylated to form 5-methylcytosine"
tggttgctgtgatcccatttctgtctctaaaatggttaattctctggcccaggctggccccgcccacaagctgggatggccccacccacaagctgggatggccctgcccacaggaggccgtc

SEQ ID NO: 3484 - DNA, 122 bp, Homo sapiens
  misc_feature (61)..(62): /note="This region represents a CpG dinucleotide"
  misc_feature (61)..(61): /note="Nucleotide may be methylated to form 5-methylcytosine"
ataaggaagttacaacctggtagtagaggtctttttttccatctggcaaatctaataaaacgtgaaaagacattaagtcatgaacaaacacccaattagaagatcaaataaactatggccct

SEQ ID NO: 3485 - DNA, 122 bp, Homo sapiens
  misc_feature (61)..(62): /note="This region represents a CpG dinucleotide"
  misc_feature (61)..(61): /note="Nucleotide may be methylated to form 5-methylcytosine"
ctgctgtgggctcctggcacgaaagggtgaagtccgtctgagtccaccgaccaatggtgacgcgcagcgccttcgcggcgcttcctgattggcgggcatgcagggtgggcgggagggaggag

SEQ ID NO: 3486 - DNA, 122 bp, Homo sapiens
  misc_feature (61)..(62): /note="This region represents a CpG dinucleotide"
  misc_feature (61)..(61): /note="Nucleotide may be methylated to form 5-methylcytosine"
cagggagggtttagactactggttagagtgccattcaattactcggagttggacctctcccgaggacacacacaaaggccagggagcgcgagtgcgcgttccctctcccagagtgtgtgtat

SEQ ID NO: 3487 - DNA, 122 bp, Homo sapiens
  misc_feature (61)..(62): /note="This region represents a CpG dinucleotide"
  misc_feature (61)..(61): /note="Nucleotide may be methylated to form 5-methylcytosine"
gatgagaccctctaaagagtgacagcctttaggggagggagacatctacaagccctgtcacgagccctgtcatcacctcgggaggaaaaggaaagcttgttactcattgataacaatcgctg

SEQ ID NO: 3488 - DNA, 122 bp, Homo sapiens
  misc_feature (61)..(62): /note="This region represents a CpG dinucleotide"
  misc_feature (61)..(61): /note="Nucleotide may be methylated to form 5-methylcytosine"
agcaaaacaggtgctgcttcacatgccctttgctaagagtcctggagtttgaagtctccacggccgatctaaaagcaagttcctgaggaaggagccggaaagttctctgaaaccagtagtgg

SEQ ID NO: 3489 - DNA, 122 bp, Homo sapiens
  misc_feature (61)..(62): /note="This region represents a CpG dinucleotide"
  misc_feature (61)..(61): /note="Nucleotide may be methylated to form 5-methylcytosine"
gacagccgctgtcaacacaattgtatagacaatattattcttcagtaaataaaaacacaccgtcacaaaatatcaccacacattttcccctgaacattagtaaacatggcagtttgctctgc

SEQ ID NO: 3490 - DNA, 122 bp, Homo sapiens
  misc_feature (61)..(62): /note="This region represents a CpG dinucleotide"
  misc_feature (61)..(61): /note="Nucleotide may be methylated to form 5-methylcytosine"
tgagactacaggtgcccgccaccacgcccggctatttatctccattcttatggagcacagcgtggtggagttcagtccacacgcttacaggtggcttatctgcaaaatgtgtctaaaaagaa

SEQ ID NO: 3491 - DNA, 122 bp, Homo sapiens
  misc_feature (61)..(62): /note="This region represents a CpG dinucleotide"
  misc_feature (61)..(61): /note="Nucleotide may be methylated to form 5-methylcytosine"
actcggcaaacctcatgatcggcaggattgtcccaaaggtcacttgacagcgcacatgatcgatccaggatggcaaaatagcccaagggaaaaaacagaaagcatgagaaattagaaattaa

SEQ ID NO: 3492 - DNA, 122 bp, Homo sapiens
  misc_feature (61)..(62): /note="This region represents a CpG dinucleotide"
  misc_feature (61)..(61): /note="Nucleotide may be methylated to form 5-methylcytosine"
ccgcccccaggaccttcgccccgctctgggaggtcttccgcgtctcctcggacaagctggcgctgtgccacctggaactgacacggaagttacaggatctcatcaaggacgttctccgctac

SEQ ID NO: 3493 - DNA, 122 bp, Homo sapiens
  misc_feature (61)..(62): /note="This region represents a CpG dinucleotide"
  misc_feature (61)..(61): /note="Nucleotide may be methylated to form 5-methylcytosine"
cttcgataaacacaactggaggggcagctaagccacggcagtccccggcaggtttggccacgccagaactcggtatatgtttatctacatggacttcggaacagtgaattagcagcgggcat

SEQ ID NO: 3494 - DNA, 122 bp, Homo sapiens
  misc_feature (61)..(62): /note="This region represents a CpG dinucleotide"
  misc_feature (61)..(61): /note="Nucleotide may be methylated to form 5-methylcytosine"
acaatgaaggacaatcaggaatagcacttaggtctgaggagaaatggagctagaaggagccgtttcatagctcagtgtaacacagagttatttggggtttaactgaaacgccttccttcatc

SEQ ID NO: 3495 - DNA, 122 bp, Homo sapiens
  misc_feature (61)..(62): /note="This region represents a CpG dinucleotide"
  misc_feature (61)..(61): /note="Nucleotide may be methylated to form 5-methylcytosine"
atgctctcctgacctaacgtccttaaaaccttggtcagaagtcagaccattgtgctaatgcgtgagggtgtgcgtggggatggagggtggggtggaactcctgcatagttagcaaccctgca

SEQ ID NO: 3496 - DNA, 122 bp, Homo sapiens
  misc_feature (61)..(62): /note="This region represents a CpG dinucleotide"
  misc_feature (61)..(61): /note="Nucleotide may be methylated to form 5-methylcytosine"
cagaaatcaagatacaggacattccaaatccccagaggtttcattgtgtcgcctgtcattcgtatcccttgtccccagtgttaactttcattttggctcttataataattgattaggtttta

SEQ ID NO: 3497 - DNA, 122 bp, Homo sapiens
  misc_feature (61)..(62): /note="This region represents a CpG dinucleotide"
  misc_feature (61)..(61): /note="Nucleotide may be methylated to form 5-methylcytosine"
actctcaggcttccgggtagaaaaaaacctctcccttgttccctcgccccacaaacaccccggcagatggacacctcctggcccgccggcctctgtacccctccgaaatgggagtaccgcag

SEQ ID NO: 3498 - DNA, 122 bp, Homo sapiens
  misc_feature (61)..(62): /note="This region represents a CpG dinucleotide"
  misc_feature (61)..(61): /note="Nucleotide may be methylated to form 5-methylcytosine"
cctgtcttaaaaaaagaaaagaaaaaaagaaagaaagaaagaaggaaatgactccgtggacgaggagacgtgggctctagccagagcaccaatagtgattttcagaatattgaacggctgct

SEQ ID NO: 3499 - DNA, 122 bp, Homo sapiens
  misc_feature (61)..(62): /note="This region represents a CpG dinucleotide"
  misc_feature (61)..(61): /note="Nucleotide may be methylated to form 5-methylcytosine"
gccttcttttgttggtggtcacctccttctctagcttcctgctctgtgcacactcataggcgcaaccagatacttgggaacacagatgccctcaagtgcagatttgccaggtacagccttgc

SEQ ID NO: 3500 - DNA, 122 bp, Homo sapiens
  misc_feature (61)..(62): /note="This region represents a CpG dinucleotide"
  misc_feature (61)..(61): /note="Nucleotide may be methylated to form 5-methylcytosine"
cccacttccccttccattagaagtgagcaaatacatgggcatttgagctgagaaagacgacggaaggaatgaatggaatggagaatttctagtccagtttgcaaactgaaagttactactta

SEQ ID NO: 3501 - DNA, 122 bp, Homo sapiens
  misc_feature (61)..(62): /note="This region represents a CpG dinucleotide"
  misc_feature (61)..(61): /note="Nucleotide may be methylated to form 5-methylcytosine"
ccttaaatgagttctgtaattctgagggtggggcacaaaagagctgaggaaaaggcaggccgacgagctgccatgggcttgaattgatcacaccccatgacttcctctggccacaggcctgt

SEQ ID NO: 3502 - DNA, 122 bp, Homo sapiens
  misc_feature (61)..(62): /note="This region represents a CpG dinucleotide"
  misc_feature (61)..(61): /note="Nucleotide may be methylated to form 5-methylcytosine"
tttgcctggttagtaattacttccttttgaaaactctgatgtcatctgtcagaaaacctccgtggtccttcctctgagcccaggcccctggccctcagctctgggcatgtctctacttttta

SEQ ID NO: 3503 - DNA, 122 bp, Homo sapiens
  misc_feature (61)..(62): /note="This region represents a CpG dinucleotide"
  misc_feature (61)..(61): /note="Nucleotide may be methylated to form 5-methylcytosine"
caataggcatccttaggcattcttgcaatggttttctcaaacgtaatgcagtttttatgacgacgacatcatcaatacagcacccagcaagcagtgaggaggctgcactgctatagttggca

SEQ ID NO: 3504 - DNA, 122 bp, Homo sapiens
  misc_feature (61)..(62): /note="This region represents a CpG dinucleotide"
  misc_feature (61)..(61): /note="Nucleotide may be methylated to form 5-methylcytosine"
tgttcaaaaaaagcatgtaaacacagggcttgattttgttagcctctatcccagaaaattcgtcgatcactccttggcttttgtataattcagtgactggctttgccacatctttgtactgt

SEQ ID NO: 3505 - DNA, 122 bp, Homo sapiens
  misc_feature (61)..(62): /note="This region represents a CpG dinucleotide"
  misc_feature (61)..(61): /note="Nucleotide may be methylated to form 5-methylcytosine"
agaaaggggggagtgtcctgtccaacagctcaagccctcttccaaactccactggagggacgtgtctgcaaatcagcacatgaccgtactttggtctgacctgcctagactccctcagcttc

SEQ ID NO: 3506 - DNA, 122 bp, Homo sapiens
  misc_feature (61)..(62): /note="This region represents a CpG dinucleotide"
  misc_feature (61)..(61): /note="Nucleotide may be methylated to form 5-methylcytosine"
gtcagctttgtgcttccacttatgtttcctattggggccccttcctgtgccctttgtcctcgtctcactgacaggttgccttggagatggggcagaggggtgggattatcatggcccgatcc

SEQ ID NO: 3507 - DNA, 122 bp, Homo sapiens
  misc_feature (61)..(62): /note="This region represents a CpG dinucleotide"
  misc_feature (61)..(61): /note="Nucleotide may be methylated to form 5-methylcytosine"
ggggacgctggatgagcccatttctgaagtgcggaggggccgggcttcttaggctgtgggcggagcctgggcctgggagaggaacagggccctggagcacctggtttcggggacagtagggt

SEQ ID NO: 3508 - DNA, 122 bp, Homo sapiens
  misc_feature (61)..(62): /note="This region represents a CpG dinucleotide"
  misc_feature (61)..(61): /note="Nucleotide may be methylated to form 5-methylcytosine"
acttcctcaaggtcagagctgtggcttgagggcagttttcttcctcattggaggaacttacggacaggaagtgagtgtccacgacatcacattcagtagggcagtcacccagctgttgatat

SEQ ID NO: 3509 - DNA, 122 bp, Homo sapiens
  misc_feature (61)..(62): /note="This region represents a CpG dinucleotide"
  misc_feature (61)..(61): /note="Nucleotide may be methylated to form 5-methylcytosine"
gcactgccgctgggcgttctatctcaggtggtgtcccgtctacgctctcaagggtggccgcgcctgaacctttactcgtgaagagtgacacacaaaccaaggccaaactaaaaaacaaaata

SEQ ID NO: 3510 - DNA, 122 bp, Homo sapiens
  misc_feature (61)..(62): /note="This region represents a CpG dinucleotide"
  misc_feature (61)..(61): /note="Nucleotide may be methylated to form 5-methylcytosine"
tagctaaaatctctgattctaattgagaaagactgatagagagaaggagtcagacactggcgagcaatcagagtagaatatagctcagcatagactcagagaaggatataggtcagaaaggc

SEQ ID NO: 3511 - DNA, 122 bp, Homo sapiens
  misc_feature (61)..(62): /note="This region represents a CpG dinucleotide"
  misc_feature (61)..(61): /note="Nucleotide may be methylated to form 5-methylcytosine"
ttggtatttatcccagacaacaaagccattttattttggttctccttaagctctacctatcggcagagaggatgcattttgagctattttccattatgcaataataatgataaatccaaaca

SEQ ID NO: 3512 - DNA, 122 bp, Homo sapiens
  misc_feature (61)..(62): /note="This region represents a CpG dinucleotide"
  misc_feature (61)..(61): /note="Nucleotide may be methylated to form 5-methylcytosine"
tgctttattggatggaaataataaattgtcaatgcctccggactctcaggtgctgctcaacgccctgccctgccccaggaagcttctccccacagcggaagccacttagctctcacatgcag

SEQ ID NO: 3513 - DNA, 122 bp, Homo sapiens
  misc_feature (61)..(62): /note="This region represents a CpG dinucleotide"
  misc_feature (61)..(61): /note="Nucleotide may be methylated to form 5-methylcytosine"
tgtcaataataagggctacaggatctgggagcagggagtcatttcggacggcagaagatgcgtcaggaggaaatattcagactgaaaggactgcaataagtaaaaagtgggacgatgaaagg

SEQ ID NO: 3514 - DNA, 122 bp, Homo sapiens
  misc_feature (61)..(62): /note="This region represents a CpG dinucleotide"
  misc_feature (61)..(61): /note="Nucleotide may be methylated to form 5-methylcytosine"
gctccttggttctcctccacttagtctttccacatggctaaactggactttctcacagcacggtagtttcagggttgtcagactcttcacaacttggccaacttctataagagaggaagttg

SEQ ID NO: 3515 - DNA, 122 bp, Homo sapiens
  misc_feature (61)..(62): /note="This region represents a CpG dinucleotide"
  misc_feature (61)..(61): /note="Nucleotide may be methylated to form 5-methylcytosine"
gaactctgttttctttgctcatgctgtgctttcacatcctgtttcccttgcttggatacccgcccccccgccctccccccgcctcccccggcctcccccggcctgcctggctaattcctacc

SEQ ID NO: 3516 - DNA, 122 bp, Homo sapiens
  misc_feature (61)..(62): /note="This region represents a CpG dinucleotide"
  misc_feature (61)..(61): /note="Nucleotide may be methylated to form 5-methylcytosine"
ctctacccagtcggttacttggacaagcaagtgcctgataccagcgtgcaagagacagaccggatcctggtggagaaggtacagaggtatagatgttaccgtagcccatgggccagtcctga

SEQ ID NO: 3517 - DNA, 122 bp, Homo sapiens
  misc_feature (61)..(62): /note="This region represents a CpG dinucleotide"
  misc_feature (61)..(61): /note="Nucleotide may be methylated to form 5-methylcytosine"
gctcaaaaacaaaagcaaaaactgagcacctgctatatacaggccaggcactgtactaagcgtttaacacagattgatagatgacggtcccagcaaccccactggaatgaccaggtctggga

SEQ ID NO: 3518 - DNA, 122 bp, Homo sapiens
  misc_feature (61)..(62): /note="This region represents a CpG dinucleotide"
  misc_feature (61)..(61): /note="Nucleotide may be methylated to form 5-methylcytosine"
atcttgttcaataatgctgtggaacacctaggtatctatctggtaaaagcaattttaatccgtgactcattgtatatacccaaataaacacacgccagcccctcccagtgttagacatgttg

SEQ ID NO: 3519 - DNA, 122 bp, Homo sapiens
  misc_feature (61)..(62): /note="This region represents a CpG dinucleotide"
  misc_feature (61)..(61): /note="Nucleotide may be methylated to form 5-methylcytosine"
aacagcaaatcctcctcgacctagctctggcagatgggcggcatgtgtctgataaatactcggactgggcttgcttcctcctgttcctaacagatagacagaacacccagcaaattaatttt

SEQ ID NO: 3520 - DNA, 122 bp, Homo sapiens
  misc_feature (61)..(62): /note="This region represents a CpG dinucleotide"
  misc_feature (61)..(61): /note="Nucleotide may be methylated to form 5-methylcytosine"
tcagatctattctctgtgggttcttcctgtaatgctgcatgatgtcagttcctggcatagcgcctggcacactgcaaagctcacatgtgttgagagaatgaaagaagaaaggagccagtgaa

SEQ ID NO: 3521 - DNA, 122 bp, Homo sapiens
  misc_feature (61)..(62): /note="This region represents a CpG dinucleotide"
  misc_feature (61)..(61): /note="Nucleotide may be methylated to form 5-methylcytosine"
cttaaatttcatcatcacaggattgccatggcattcaaatggcataacgtgtgttaaaatcgttcccactattctttgacactagtggtaccaaactgtactctttaaatctttgcctgtgc

SEQ ID NO: 3522 - DNA, 122 bp, Homo sapiens
  misc_feature (61)..(62): /note="This region represents a CpG dinucleotide"
  misc_feature (61)..(61): /note="Nucleotide may be methylated to form 5-methylcytosine"
ctccttggccccactgtcccaccgcctcctctagcacctctcaccaagcacgtggcccagcgcttgccttccctgtggactttcacatttctcagggaagttcccgagagatgcacatttgc

SEQ ID NO: 3523 - DNA, 122 bp, Homo sapiens
  misc_feature (61)..(62): /note="This region represents a CpG dinucleotide"
  misc_feature (61)..(61): /note="Nucleotide may be methylated to form 5-methylcytosine"
agaatagaatacagggcatagagactgcctcagcgtggattgggtttctgttcctgagcccgctcatgactcatacttgggagattaagcaatgtggagtgtagctgttggcagcaatatgc

SEQ ID NO: 3524 - DNA, 122 bp, Homo sapiens
  misc_feature (61)..(62): /note="This region represents a CpG dinucleotide"
  misc_feature (61)..(61): /note="Nucleotide may be methylated to form 5-methylcytosine"
cctggccaatcagagcactgccttctcatagcctcactgattggctcagggatgggcacacggtctaaactgctccaatcacagtgagtcccaggacttaggtaggagctacccaaatgata

SEQ ID NO: 3525 - DNA, 122 bp, Homo sapiens
  misc_feature (61)..(62): /note="This region represents a CpG dinucleotide"
  misc_feature (61)..(61): /note="Nucleotide may be methylated to form 5-methylcytosine"
aggccaacagacaagccagttggccttgagctcaggcttgctaataatagcatcatccagcgcatctcagagctgtgggggactgcaggatgacatcacccagatggaagccggagggatgg

SEQ ID NO: 3526 - DNA, 122 bp, Homo sapiens
  misc_feature (61)..(62): /note="This region represents a CpG dinucleotide"
  misc_feature (61)..(61): /note="Nucleotide may be methylated to form 5-methylcytosine"
catccactgatatgaaacatactatggtactgagggagaactcacctgtcacacacagaacgtcagcttcatgaatgacatagtgagattgtttcttgttcacactgaggccagcttgaccc

SEQ ID NO: 3527 - DNA, 122 bp, Homo sapiens
  misc_feature (61)..(62): /note="This region represents a CpG dinucleotide"
  misc_feature (61)..(61): /note="Nucleotide may be methylated to form 5-methylcytosine"
gaaaagggcaggccacctttgaagtatggggtgataaagagaggaaagatggagcaaatacgtgagacactagcgatctttaggaacagcgctgagttgtcttttaagaaaataaaagacct

SEQ ID NO: 3528 - DNA, 122 bp, Homo sapiens
  misc_feature (61)..(62): /note="This region represents a CpG dinucleotide"
  misc_feature (61)..(61): /note="Nucleotide may be methylated to form 5-methylcytosine"
gctcagcaggggctgccaggttgggacccgcaggggacctgcttcatgagtgggcaggaccgccgtgatttggactgcacaagtttctgcccacatgtttggaaagtcatttcagtgttttc

SEQ ID NO: 3529 - DNA, 122 bp, Homo sapiens
  misc_feature (61)..(62): /note="This region represents a CpG dinucleotide"
  misc_feature (61)..(61): /note="Nucleotide may be methylated to form 5-methylcytosine"
aaatgtagcttcatcccctgcccttcattgaatgactgaattacagtcagcaccacataacgatgtttcggtcaactatggactccatatgtgatgagacagtgatcccatagattatagtg

SEQ ID NO: 3530 - DNA, 122 bp, Homo sapiens
  misc_feature (61)..(62): /note="This region represents a CpG dinucleotide"
  misc_feature (61)..(61): /note="Nucleotide may be methylated to form 5-methylcytosine"
aacaaatcagcagtgctcaagctcctgataagctcgtggtatacattatctcactgaacacgctcacaacactgccaggccagtagagttattgctgtttaacttgaccacagccacacagc

SEQ ID NO: 3531 - DNA, 122 bp, Homo sapiens
  misc_feature (61)..(62): /note="This region represents a CpG dinucleotide"
  misc_feature (61)..(61): /note="Nucleotide may be methylated to form 5-methylcytosine"
atcaaatccctggtcaatcatagacaacttagtataattgagagcttggtcttagtcctacgtaagccctccattatgcacacttgaaagtgtctcctcttccagtctcccatctcatcatt

SEQ ID NO: 3532 - DNA, 122 bp, Homo sapiens
  misc_feature (61)..(62): /note="This region represents a CpG dinucleotide"
  misc_feature (61)..(61): /note="Nucleotide may be methylated to form 5-methylcytosine"
aagaagtagagcacgcaaacagatcagcttagccaaagtatttgctctctgcggccctcacgtggaggccaattagatttggaagaggagaatgctaggcactatttcctttaatgccgtta

SEQ ID NO: 3533 - DNA, 122 bp, Homo sapiens
  misc_feature (61)..(62): /note="This region represents a CpG dinucleotide"
  misc_feature (61)..(61): /note="Nucleotide may be methylated to form 5-methylcytosine"
ggaggcaggggaagggcacctaagtatcagaattactgcccacacccgctattccctgaacgcacacccacactggaactgccaccgtgatgagccacctgtttcagaggaagtgggtcaaa

SEQ ID NO: 3534 - DNA, 122 bp, Homo sapiens
  misc_feature (61)..(62): /note="This region represents a CpG dinucleotide"
  misc_feature (61)..(61): /note="Nucleotide may be methylated to form 5-methylcytosine"
ttatcacccatgccctcctaaaagggtgtctcaaagcatatctttctgtagagcagaattcggaactgagaagacgagggctcaaattgaatctcacaggatttgcgtgcaagagaaaccca

SEQ ID NO: 3535 - DNA, 122 bp, Homo sapiens
  misc_feature (61)..(62): /note="This region represents a CpG dinucleotide"
  misc_feature (61)..(61): /note="Nucleotide may be methylated to form 5-methylcytosine"
tatctattgacagctgttaacagcatagttacacttgtgggcctagagcagcactttcaccgtggttctcagcactcttgagagatagcaagagctcagggacctttgccaaagatggctgg

SEQ ID NO: 3536 - DNA, 122 bp, Homo sapiens
  misc_feature (61)..(62): /note="This region represents a CpG dinucleotide"
  misc_feature (61)..(61): /note="Nucleotide may be methylated to form 5-methylcytosine"
atattttccagctccccttgtggttaaacgttgccatgtggcaagttctggccagtgaagcgtgagcaaaactgaaaagggttctttgtagattgagacagtgaagagcctatgtgtgctca

SEQ ID NO: 3537 - DNA, 122 bp, Homo sapiens
  misc_feature (61)..(62): /note="This region represents a CpG dinucleotide"
  misc_feature (61)..(61): /note="Nucleotide may be methylated to form 5-methylcytosine"
ccaagcatgaccacatgactcaagactggcttgtttgtgggctggactgagtcaatgaaacgctcagtgagaggaactgagtcacagaggtcaggggtggtagctattcaacaagaagatct

SEQ ID NO: 3538 - DNA, 122 bp, Homo sapiens
  misc_feature (61)..(62): /note="This region represents a CpG dinucleotide"
  misc_feature (61)..(61): /note="Nucleotide may be methylated to form 5-methylcytosine"
gattcttggagggagggaccagagcagaggtggtgagtggcaggaggaggcaaatgtccccgcaaccaggaagttcatcgggttgaagtttcctctgccgtcgcctcctgctcgccagcaga

SEQ ID NO: 3539 - DNA, 122 bp, Homo sapiens
  misc_feature (61)..(62): /note="This region represents a CpG dinucleotide"
  misc_feature (61)..(61): /note="Nucleotide may be methylated to form 5-methylcytosine"
gcaggatgtgggtgaatataaatctatatcgtggtgactcaaaatggcccattaagaactcgttggtcttggtcatatcagatgaggaagcattgagcatcttttggcctgtgtcatacaaa

SEQ ID NO: 3540 - DNA, 122 bp, Homo sapiens
  misc_feature (61)..(62): /note="This region represents a CpG dinucleotide"
  misc_feature (61)..(61): /note="Nucleotide may be methylated to form 5-methylcytosine"
gctgcccagttcctcttcctcttcccaagtggcccccgtcctgccactcccttctatgagcgcagaccttctggtttagagcttcagtctggaccattgtgctgtgtcctctccaggcgggg

SEQ ID NO: 3541 - DNA, 122 bp, Homo sapiens
  misc_feature (61)..(62): /note="This region represents a CpG dinucleotide"
  misc_feature (61)..(61): /note="Nucleotide may be methylated to form 5-methylcytosine"
agaacatggccctgcgctgttggggcccattcttccctctgaccttgggtgggtgtgcagcgtgggcagggctttttcagggaggtgcggggtgagtttgccccttggcgtccccagtcttt

SEQ ID NO: 3542 - DNA, 122 bp, Homo sapiens
  misc_feature (61)..(62): /note="This region represents a CpG dinucleotide"
  misc_feature (61)..(61): /note="Nucleotide may be methylated to form 5-methylcytosine"
gaggaagccgtagctgcctgggtgctctggaaagttcgctgcacccatcctgtcaaggttcgtccaagcttccaagaacaaagaaaagattattgtattgcattgctctatcagtacttaca

SEQ ID NO: 3543 - DNA, 122 bp, Homo sapiens
  misc_feature (61)..(62): /note="This region represents a CpG dinucleotide"
  misc_feature (61)..(61): /note="Nucleotide may be methylated to form 5-methylcytosine"
cagctacaagcaggatcttcatctccttttcagctgtggataacaacggaagcagtcagccgtctaataaatcaagtttaattttaacagcatgaagtattgcccgctttgtaattatactt

SEQ ID NO: 3544 - DNA, 122 bp, Homo sapiens
  misc_feature (61)..(62): /note="This region represents a CpG dinucleotide"
  misc_feature (61)..(61): /note="Nucleotide may be methylated to form 5-methylcytosine"
gcgccacctttatgaacattatgcttcggcgttctttttagatcttgttaccttttcttacgttcacaaatgttgcctagcaatatgtctagtcaggaaagatgaagggattcttatcttgg

SEQ ID NO: 3545 - DNA, 122 bp, Homo sapiens
  misc_feature (61)..(62): /note="This region represents a CpG dinucleotide"
  misc_feature (61)..(61): /note="Nucleotide may be methylated to form 5-methylcytosine"
ttgaaagccatgatgaaaagtttcaagatggttatattcacataaaatgcatgaaggaaacgatagaaatgccagaagaaataaataggaatctagttggaagtgggatttttaacaaaaaa

SEQ ID NO: 3546 - DNA, 122 bp, Homo sapiens
  misc_feature (61)..(62): /note="This region represents a CpG dinucleotide"
  misc_feature (61)..(61): /note="Nucleotide may be methylated to form 5-methylcytosine"
tatgtcctgttatgtaaaggcatcgtgtgagcatattctcacgctcttttagttttgtaacgaaggcagtgatgacgcactcaccttggtaaactgccaagtgcacttatatttttgctttt

SEQ ID NO: 3547 - DNA, 122 bp, Homo sapiens
  misc_feature (61)..(62): /note="This region represents a CpG dinucleotide"
  misc_feature (61)..(61): /note="Nucleotide may be methylated to form 5-methylcytosine"
aagttacagggaggcagatgtttgtctaagacaaagaatcttctcggggtcagagctgtccgtgtggaccggaagcctggggagggagtgaacagcacaacctgagagaagtttgagaggag

SEQ ID NO: 3548 - DNA, 122 bp, Homo sapiens
  misc_feature (61)..(62): /note="This region represents a CpG dinucleotide"
  misc_feature (61)..(61): /note="Nucleotide may be methylated to form 5-methylcytosine"
ttttttttggaatgcctcactgtcccacccataacagtactgtcgtgtgcattcatttatcgaatacattagctaggggtgcgggtccagaggggagtgtcagtggagaagggaaacacact

SEQ ID NO: 3549 - DNA, 122 bp, Homo sapiens
  misc_feature (61)..(62): /note="This region represents a CpG dinucleotide"
  misc_feature (61)..(61): /note="Nucleotide may be methylated to form 5-methylcytosine"
ttcacaccacttcctacttattaatgtggctggttcccatgtaccagattctactgagcacgttcacaatagtatctcattcagttgctccatcaccaccgatgatgtcggtgttactagtt

SEQ ID NO: 3550 - DNA, 122 bp, Homo sapiens
  misc_feature (61)..(62): /note="This region represents a CpG dinucleotide"
  misc_feature (61)..(61): /note="Nucleotide may be methylated to form 5-methylcytosine"
tcttactcatagcacggagtgaggatagaatatattatcaatagctacagctatttctatcgatgatgaagtttccagacctcagtgcacaagatactgatctacgtcatccactgactcat

SEQ ID NO: 3551 - DNA, 122 bp, Homo sapiens
  misc_feature (61)..(62): /note="This region represents a CpG dinucleotide"
  misc_feature (61)..(61): /note="Nucleotide may be methylated to form 5-methylcytosine"
tttgctggaaatcagaagtcattaagtatctttgtggttgaaaatgtttggtgtctcaggcggttctacttattgctaaagaggtctaccttgagcttatagtaaatttgtcagttagttga

SEQ ID NO: 3552 - DNA, 122 bp, Homo sapiens
  misc_feature (61)..(62): /note="This region represents a CpG dinucleotide"
  misc_feature (61)..(61): /note="Nucleotide may be methylated to form 5-methylcytosine"
aacctaagtttgaaaatgagcacggatgttccttaccttcaacacaaacccagacaacagcggcagtgtgcgcggcctcccggccctttaccttcaacacaaacccggacaacagcggcagt

SEQ ID NO: 3553 - DNA, 122 bp, Homo sapiens
  misc_feature (61)..(62): /note="This region represents a CpG dinucleotide"
  misc_feature (61)..(61): /note="Nucleotide may be methylated to form 5-methylcytosine"
agctggttaggtcccattgccataatggttcatatttcctagttaattaatattgctaaccgtctcatctgaggtcaagcagtccatattaagcttagggagctgtatgagacatcagaacc

SEQ ID NO: 3554 - DNA, 122 bp, Homo sapiens
  misc_feature (61)..(62): /note="This region represents a CpG dinucleotide"
  misc_feature (61)..(61): /note="Nucleotide may be methylated to form 5-methylcytosine"
aaggttgaatgggctggaaaatgtggcctttagaaaaggcaaaaaggccacatccagcaccgtcacctgccaggccagcgggacaggtgggcagagccagctccttggcccattctgcgtca

SEQ ID NO: 3555 - DNA, 122 bp, Homo sapiens
  misc_feature (61)..(62): /note="This region represents a CpG dinucleotide"
  misc_feature (61)..(61): /note="Nucleotide may be methylated to form 5-methylcytosine"
ttcctggcctggagtgtgaaccggttgcattgcttttctttctgagtcacatcgtttcaccgcatcacagctgtgtgggtaaccagggccctctggtgcacagtcagggccctctcctgtgt

SEQ ID NO: 3556 - DNA, 122 bp, Homo sapiens
  misc_feature (61)..(62): /note="This region represents a CpG dinucleotide"
  misc_feature (61)..(61): /note="Nucleotide may be methylated to form 5-methylcytosine"
ttattttggattgtcgtgtgcccaaataaaaagtgtatcgcaatgtgagaaggagagggccgctattgggagaactagttccctctgctaagtgacctttctagttgctttcatggctccaa

SEQ ID NO: 3557 - DNA, 122 bp, Homo sapiens
  misc_feature (61)..(62): /note="This region represents a CpG dinucleotide"
  misc_feature (61)..(61): /note="Nucleotide may be methylated to form 5-methylcytosine"
catatgtggaacactgttagtcccggtcagtcccatggttctctcagagtgtatggtctacgctaagagaactgcggcccccacacatcactccccgcattggttcctcctggaaccgcctc

SEQ ID NO: 3558 - DNA, 122 bp, Homo sapiens
  misc_feature (61)..(62): /note="This region represents a CpG dinucleotide"
  misc_feature (61)..(61): /note="Nucleotide may be methylated to form 5-methylcytosine"
cttatccttctatctcccagggaaggggaaaccttctggctcctcctatgcagaattaatcgctcacccttgaagggtaccagtatatgccacctcaaactatctttagcatgtggattatt

SEQ ID NO: 3559 - DNA, 122 bp, Homo sapiens
  misc_feature (61)..(62): /note="This region represents a CpG dinucleotide"
  misc_feature (61)..(61): /note="Nucleotide may be methylated to form 5-methylcytosine"
tgtgtgtgaatgtatgtgtgtgtgtgtgtgtgtgtctctgtgtgtgagagagcgagcgagcgtgtatgttctcattaggggacgatctatgatttgacagcctcactgctgctgctcctgct

SEQ ID NO: 3560 - DNA, 122 bp, Homo sapiens
  misc_feature (61)..(62): /note="This region represents a CpG dinucleotide"
  misc_feature (61)..(61): /note="Nucleotide may be methylated to form 5-methylcytosine"
ttcccaagcctctttttggccagcatggtttggaggtgacctgaagattttactcagcaacgtggttttaggactgctgagagcagagacaacggctacccttactgcggcacgttcagtga

SEQ ID NO: 3561 - DNA, 122 bp, Homo sapiens
  misc_feature (61)..(62): /note="This region represents a CpG dinucleotide"
  misc_feature (61)..(61): /note="Nucleotide may be methylated to form 5-methylcytosine"
gaggtcctttacatgagggtggaggagctttctaggcagggagaacagtgaaagcttggacgctgggctggaatcaatgccacaggtatgaaagcaagtggagggattgctggactagagta

SEQ ID NO: 3562 - DNA, 122 bp, Homo sapiens
  misc_feature (61)..(62): /note="This region represents a CpG dinucleotide"
  misc_feature (61)..(61): /note="Nucleotide may be methylated to form 5-methylcytosine"
tatagtaaaaacacagataaaatattttttaaatgatacacctgtatagggcgcttaccacgaatgcagcttgcaggacaggaagatactctgggtacaacagtgagtcagtagtgagtgaa

SEQ ID NO: 3563 - DNA, 122 bp, Homo sapiens
  misc_feature (61)..(62): /note="This region represents a CpG dinucleotide"
  misc_feature (61)..(61): /note="Nucleotide may be methylated to form 5-methylcytosine"
ggctgttttttttgttattgttgttcttcaaaaaagaaattgtttctttctgcagttttacgacatcctcacaccatttagcactggtgataagatgccaccaaggctacatggtgggaaga

SEQ ID NO: 3564 - DNA, 122 bp, Homo sapiens
  misc_feature (61)..(62): /note="This region represents a CpG dinucleotide"
  misc_feature (61)..(61): /note="Nucleotide may be methylated to form 5-methylcytosine"
tccagctgtgtctcttaggcctatcctgtgcctgctctgttagcttcccaggtagccactcgtttagcaagaaagaagagaaagagatgcactttcaaaaggtcaaaagacacattcatttg

SEQ ID NO: 3565 - DNA, 122 bp, Homo sapiens
  misc_feature (61)..(62): /note="This region represents a CpG dinucleotide"
  misc_feature (61)..(61): /note="Nucleotide may be methylated to form 5-methylcytosine"
gaaagggaaagaaaataaacagtttaaaaatgcctagggaagtcccggtgcggtggcccacgcctgtaatcccagcacttagggaggccgaggcaggcggatcacgaggtcaggagatcaag

SEQ ID NO: 3566 - DNA, 122 bp, Homo sapiens
  misc_feature (61)..(62): /note="This region represents a CpG dinucleotide"
  misc_feature (61)..(61): /note="Nucleotide may be methylated to form 5-methylcytosine"
gctcctgttcttgaaccatctggccccttcagtgcaactctgtaggactgtgctctgctccgtgggggttggtgtcactgtttaactgctggaggatgttcttaccacaatcgttttcacct

SEQ ID NO: 3567 - DNA, 122 bp, Homo sapiens
  misc_feature (61)..(62): /note="This region represents a CpG dinucleotide"
  misc_feature (61)..(61): /note="Nucleotide may be methylated to form 5-methylcytosine"
agggtgtggggagggggctgccccgcctcacgattaaggttcagactaggggtacttaaccgctggagcaggcccgactgaggtggggtgagctgaggaccccgaggaggagggcacaaggc

SEQ ID NO: 3568 - DNA, 122 bp, Homo sapiens
  misc_feature (61)..(62): /note="This region represents a CpG dinucleotide"
  misc_feature (61)..(61): /note="Nucleotide may be methylated to form 5-methylcytosine"
gctccttctgccgcccggccaggatcaggtggtggttgtggttcaggacgtagaccacggcgttctgcacaatccacgcctcctggatctcctgtccgatctctgcggagcgcagccagtta

SEQ ID NO: 3569 - DNA, 122 bp, Homo sapiens
  misc_feature (61)..(62): /note="This region represents a CpG dinucleotide"
  misc_feature (61)..(61): /note="Nucleotide may be methylated to form 5-methylcytosine"
taactcaaaaaacaagggctttctgcaatcagctggtgaatctgtggtcccacacagccccgccccaagggttaggatagctcctcctgcccagcccatcagaagtctgcccagaatcttcc

SEQ ID NO: 3570 - DNA, 122 bp, Homo sapiens
  misc_feature (61)..(62): /note="This region represents a CpG dinucleotide"
  misc_feature (61)..(61): /note="Nucleotide may be methylated to form 5-methylcytosine"
gcaggtcaggaaacttccctccgaacagtcaaccgttgcttacactggggctgagtcacccgacaggaagttcctacaaaccttactggcatcattgaaaacagacagctccatggtacctt

SEQ ID NO: 3571 - DNA, 122 bp, Homo sapiens
  misc_feature (61)..(62): /note="This region represents a CpG dinucleotide"
  misc_feature (61)..(61): /note="Nucleotide may be methylated to form 5-methylcytosine"
atgaaaaatgaagagaaacaaaaccactttcacatggcaataattaaatttctgagtttacgtaaagaatcttatgaaacttctcattccaaccttttgtttcctttaagttctttattatc

SEQ ID NO: 3572 - DNA, 122 bp, Homo sapiens
  misc_feature (61)..(62): /note="This region represents a CpG dinucleotide"
  misc_feature (61)..(61): /note="Nucleotide may be methylated to form 5-methylcytosine"
cacaacacagagagaggggcagattccccgctttgagagctcctgtcccctggggagagacgacacactctgacacagcagagaacgatacagagctggctgcaggctgaagagacacacag

SEQ ID NO: 3573 - DNA, 122 bp, Homo sapiens
  misc_feature (61)..(62): /note="This region represents a CpG dinucleotide"
  misc_feature (61)..(61): /note="Nucleotide may be methylated to form 5-methylcytosine"
tggtggcctcttgcctttagcctacatcctagtcatgaaacaatgttatggcttttcagtcgaacctggtcctcaaaatattcacatttcataatcatttcttctacaagtttccagtgtcc

SEQ ID NO: 3574 - DNA, 122 bp, Homo sapiens
  misc_feature (61)..(62): /note="This region represents a CpG dinucleotide"
  misc_feature (61)..(61): /note="Nucleotide may be methylated to form 5-methylcytosine"
cacactcagattcccagctcacggggactcaggccccgcccgcggccatgctcacctcgccgctgcactgtgaagctctccacaaccccgtagttgtgtctgcagtaggtgtccaccgcggc

SEQ ID NO: 3575 - DNA, 122 bp, Homo sapiens
  misc_feature (61)..(62): /note="This region represents a CpG dinucleotide"
  misc_feature (61)..(61): /note="Nucleotide may be methylated to form 5-methylcytosine"
gctattgagaaacaaagagaagaaaactcttctgaagcgagtgatgtggagacaaaactacgtgagtttgaagatcttcagatgcagcttaacacaagcattgatttgcgcacagtaagttt

SEQ ID NO: 3576 - DNA, 122 bp, Homo sapiens
  misc_feature (61)..(62): /note="This region represents a CpG dinucleotide"
  misc_feature (61)..(61): /note="Nucleotide may be methylated to form 5-methylcytosine"
gaggaaatgaagccttatatttactcatagatgagtcaatggggaagcccggattcttcccgacatctgtgtggtagccatcttccaagatgacccccatgattcttgcccattggtactca

SEQ ID NO: 3577 - DNA, 122 bp, Homo sapiens
  misc_feature (61)..(62): /note="This region represents a CpG dinucleotide"
  misc_feature (61)..(61): /note="Nucleotide may be methylated to form 5-methylcytosine"
aacaattctgtgtgatgggggattctcatcttcaatttatagatgaggaaataagctcaacggctcatccaaggttatataggcagaggggcagagccagtcaaacacaggttgtctaatgc

SEQ ID NO: 3578 - DNA, 122 bp, Homo sapiens
  misc_feature (61)..(62): /note="This region represents a CpG dinucleotide"
  misc_feature (61)..(61): /note="Nucleotide may be methylated to form 5-methylcytosine"
agaaacagaaacccaaagacctttagcagtagaacaataaagggcatagagctgccatgtcgctaagggggttaaaccatttcttctatgccgtaaagctaaatatcaggcggagaacaaaa

SEQ ID NO: 3579 - DNA, 122 bp, Homo sapiens
  misc_feature (61)..(62): /note="This region represents a CpG dinucleotide"
  misc_feature (61)..(61): /note="Nucleotide may be methylated to form 5-methylcytosine"
ttttaattttatttatttatttatctgagatggagtctccctctgtcgctcagaccagaccgcagtggcacaatctcggctcacttgcccaggctggagagaagtggcgtgcctggccataa

SEQ ID NO: 3580 - DNA, 122 bp, Homo sapiens
  misc_feature (61)..(62): /note="This region represents a CpG dinucleotide"
  misc_feature (61)..(61): /note="Nucleotide may be methylated to form 5-methylcytosine"
acatttatttgcaaatgcattcacattgcttataaacctctccaactcattacagcatttcgtttgataggaaattttagtattgcaagatcagtgttttatatcctatgtaaagaataaaa

SEQ ID NO: 3581 - DNA, 122 bp, Homo sapiens
  misc_feature (61)..(62): /note="This region represents a CpG dinucleotide"
  misc_feature (61)..(61): /note="Nucleotide may be methylated to form 5-methylcytosine"
ggcacctgggccctggtgtcagcctgggcagctcccatagggctaggatttcctaagagacgctccgaggtcaaggtgctctaggagggggaacagtgtgaggggacagggctcccggggct

SEQ ID NO: 3582 - DNA, 122 bp, Homo sapiens
  misc_feature (61)..(62): /note="This region represents a CpG dinucleotide"
  misc_feature (61)..(61): /note="Nucleotide may be methylated to form 5-methylcytosine"
tgtctctccatcttcaacaatatttacggctttatttgttccttaaaagaagaagtaactcgactatagagttatgttctgctttgcttggcacaaaataaatgtaacctggaggctccaag

SEQ ID NO: 3583 - DNA, 122 bp, Homo sapiens
  misc_feature (61)..(62): /note="This region represents a CpG dinucleotide"
  misc_feature (61)..(61): /note="Nucleotide may be methylated to form 5-methylcytosine"
atatagaaaactacactgcagtgcacactgtccctcagcaggcgtggtggcatggaaggacgcgaacgaccccgggagtggcgggtgaggagggaaggggagcgagcgggtgcgaggtgccc

SEQ ID NO: 3584 - DNA, 122 bp, Homo sapiens
  misc_feature (61)..(62): /note="This region represents a CpG dinucleotide"
  misc_feature (61)..(61): /note="Nucleotide may be methylated to form 5-methylcytosine"
acataattgtgctactacagaaaggtgacacccacctccttcagcctttgtaaaatttcacgagtgcctcacattgacaaaacctaaacttacgaggggatcacatgggaatctgagaaatg

SEQ ID NO: 3585 - DNA, 122 bp, Homo sapiens
  misc_feature (61)..(62): /note="This region represents a CpG dinucleotide"
  misc_feature (61)..(61): /note="Nucleotide may be methylated to form 5-methylcytosine"
taaaaattccaagaattcacatgcagctgttatgctgtaccacaataataataaagccatcgttttcaatactcacggttcagtcgatcatgtcagatgtttggaggttgtcattttttcct

SEQ ID NO: 3586 - DNA, 122 bp, Homo sapiens
  misc_feature (61)..(62): /note="This region represents a CpG dinucleotide"
  misc_feature (61)..(61): /note="Nucleotide may be methylated to form 5-methylcytosine"
ttcactttcttgtgaggtgtggcagcccctggaccctgattccctgtgggcaactggatgcgctggagcttctggtcctacagagctgggattaacccagctcttttgatatgttgctcagg

SEQ ID NO: 3587 - DNA, 122 bp, Homo sapiens
  misc_feature (61)..(62): /note="This region represents a CpG dinucleotide"
  misc_feature (61)..(61): /note="Nucleotide may be methylated to form 5-methylcytosine"
tagagcgtgtctgggagcaggttaaactttctcctaggtggtgatgtgcctccaggtgagcgcacaggctttgcagaaaccccagcatgacaagcaagtaggaaggtgacattgttgtttga

SEQ ID NO: 3588 - DNA, 122 bp, Homo sapiens
  misc_feature (61)..(62): /note="This region represents a CpG dinucleotide"
  misc_feature (61)..(61): /note="Nucleotide may be methylated to form 5-methylcytosine"
tacaactggaatttcttctggttcaaagtgacgactcctcaccacagtccatagaatctccgtatttccatgcttacaactctctcaaaggtcatcaaatgtgtcccaatcttaatatacaa

SEQ ID NO: 3589 - DNA, 122 bp, Homo sapiens
  misc_feature (61)..(62): /note="This region represents a CpG dinucleotide"
  misc_feature (61)..(61): /note="Nucleotide may be methylated to form 5-methylcytosine"
aactcgcatcaaggtttaaaataaaacccaaggccaaaagcaccaaaagaaaggttcagacggcttgtttggggatttcataagaggaagaaaaaccaaggccacagaactaagccttgaac

SEQ ID NO: 3590 - DNA, 122 bp, Homo sapiens
  misc_feature (61)..(62): /note="This region represents a CpG dinucleotide"
  misc_feature (61)..(61): /note="Nucleotide may be methylated to form 5-methylcytosine"
tttcccccacggtgaagaaattcaactttttacttagtattaccatcatgcccaagtcaccgcaaagttaaactaacccaaataagactttaaacctgaagtcacccattcgagatctgtca

SEQ ID NO: 3591 - DNA, 122 bp, Homo sapiens
  misc_feature (61)..(62): /note="This region represents a CpG dinucleotide"
  misc_feature (61)..(61): /note="Nucleotide may be methylated to form 5-methylcytosine"
ttgagcctgggagtttgagcagtcagcccaagcttgtactgcaaggtggctgcaaggccacgacccaaatctagagcctgaccttgacctcatgggttccatggagccgccctgctgatgcc

SEQ ID NO: 3592 - DNA, 122 bp, Homo sapiens
  misc_feature (61)..(62): /note="This region represents a CpG dinucleotide"
  misc_feature (61)..(61): /note="Nucleotide may be methylated to form 5-methylcytosine"
tgcccattgttgcccgatgctaacaaggtgagctagcagctggataaacagcaacaccaacgtggataagctgcagcagcacctggtgcctctgcacctactttctgagcattaaaagaata

SEQ ID NO: 3593 - DNA, 122 bp, Homo sapiens
  misc_feature (61)..(62): /note="This region represents a CpG dinucleotide"
  misc_feature (61)..(61): /note="Nucleotide may be methylated to form 5-methylcytosine"
tccagccatctgtctttgctgccctgcacccagactgtggagcactgctgggggaggactcgtgcttccaggattccttgttgatgccggctcattctgcatagccctcctacactgcatcc

SEQ ID NO: 3594 - DNA, 122 bp, Homo sapiens
  misc_feature (61)..(62): /note="This region represents a CpG dinucleotide"
  misc_feature (61)..(61): /note="Nucleotide may be methylated to form 5-methylcytosine"
catgtatttttttaattgaagtattgctttgttcaagacctatgtttaccactcccatggcgatcctgtacacaaagacaagtcaggaagacatgaaacgaacggagatacttatgttgctt

SEQ ID NO: 3595 - DNA, 122 bp, Homo sapiens
  misc_feature (61)..(62): /note="This region represents a CpG dinucleotide"
  misc_feature (61)..(61): /note="Nucleotide may be methylated to form 5-methylcytosine"
gagaaggtcccctacaaggtaaagagagggtactttgcaaattgaaggcaccttgaggaccgaggccaaagccttgagtccttgcatgctcttccccatgatgggcacacagcaggtgctca

SEQ ID NO: 3596 - DNA, 122 bp, Homo sapiens
  misc_feature (61)..(62): /note="This region represents a CpG dinucleotide"
  misc_feature (61)..(61): /note="Nucleotide may be methylated to form 5-methylcytosine"
ctgaacaaggggaagtttgcgcaatcactaacacatcatactgtatctgaattaacacctcgggccaagtggaaagatgaatcaaaaaatttaaaaagaaagccacctggtgttctaaggta

SEQ ID NO: 3597 - DNA, 122 bp, Homo sapiens
  misc_feature (61)..(62): /note="This region represents a CpG dinucleotide"
  misc_feature (61)..(61): /note="Nucleotide may be methylated to form 5-methylcytosine"
ttcctcaacagtactttgcactatttttctcaacttctccttccttacctgaagtcataccgttaagttgatgaatacaagcacttaaagaaaacaaatctagttcacatgaagagctcaat

SEQ ID NO: 3598 - DNA, 122 bp, Homo sapiens
  misc_feature (61)..(62): /note="This region represents a CpG dinucleotide"
  misc_feature (61)..(61): /note="Nucleotide may be methylated to form 5-methylcytosine"
tcactcccttacctggggctacagaactaggaagcaacagaagagaatttgaacctatgtcggtctagctccaaaaactgtgctcttaactattgtgccacactgttaccttaaaatacctt

SEQ ID NO: 3599 - DNA, 122 bp, Homo sapiens
  misc_feature (61)..(62): /note="This region represents a CpG dinucleotide"
  misc_feature (61)..(61): /note="Nucleotide may be methylated to form 5-methylcytosine"
tttgagtctttttccttttcagttttttctagtcactggatgtacccacacttcctgttacgtatgtcagtagaacattagaatgcctcacttcgctcagttcatcactgcaaaggtggcat

SEQ ID NO: 3600 - DNA, 122 bp, Homo sapiens
  misc_feature (61)..(62): /note="This region represents a CpG dinucleotide"
  misc_feature (61)..(61): /note="Nucleotide may be methylated to form 5-methylcytosine"
cccgtggacctccacgtggtaggtggtgccgggcctgaggtcgggcaggctgacggtgcgcgtggtgcccggcacagtcagctcaccgccggggccctctgcaggcggctgaggccgccagc

SEQ ID NO: 3601 - DNA, 122 bp, Homo sapiens
  misc_feature (61)..(62): /note="This region represents a CpG dinucleotide"
  misc_feature (61)..(61): /note="Nucleotide may be methylated to form 5-methylcytosine"
gtggttaccttacaattcagaatgaactttgaacaaatccctgaagacaacgaggctggccgtggatgtgcagctgccttgcgccttagtgtgtcatctgtaaaatgaggtaatagcaacgt

SEQ ID NO: 3602 - DNA, 122 bp, Homo sapiens
  misc_feature (61)..(62): /note="This region represents a CpG dinucleotide"
  misc_feature (61)..(61): /note="Nucleotide may be methylated to form 5-methylcytosine"
ggcagaggtggaagaaaatctgtatgtaagtcgacccacacaggtcaaacccatgttgttcgagggtcaacagtatttgaaaaaatactgatagtaatatatgaaaaagagttaaaacctca

SEQ ID NO: 3603 - DNA, 122 bp, Homo sapiens
  misc_feature (61)..(62): /note="This region represents a CpG dinucleotide"
  misc_feature (61)..(61): /note="Nucleotide may be methylated to form 5-methylcytosine"
ggaagacttacagtgagcaccagaacttaatgttgctccagaaatatattgctgctctgtcgttgttttccaggatggggaagaataagtgggcactggaacttaatcctgaccttttagtt

SEQ ID NO: 3604 - DNA, 122 bp, Homo sapiens
  misc_feature (61)..(62): /note="This region represents a CpG dinucleotide"
  misc_feature (61)..(61): /note="Nucleotide may be methylated to form 5-methylcytosine"
ggaatttgccaagatctgaaattcttcagcagcacctttgcacatgacacatgaactgaacgcgtggagagcagcagtaagcatcacaataacagaatagttttttggtgcatctaatacaa

SEQ ID NO: 3605 - DNA, 122 bp, Homo sapiens
  misc_feature (61)..(62): /note="This region represents a CpG dinucleotide"
  misc_feature (61)..(61): /note="Nucleotide may be methylated to form 5-methylcytosine"
cttaagcatcaaggaattgtactgtatttaactccttttcacattcattttctttcctaccgtcttttcctttcttattcccctttttcttttgcatcatattgggacactcagggaaactt

SEQ ID NO: 3606 - DNA, 122 bp, Homo sapiens
  misc_feature (61)..(62): /note="This region represents a CpG dinucleotide"
  misc_feature (61)..(61): /note="Nucleotide may be methylated to form 5-methylcytosine"
ggaggcttgtgaggagcaagaacccaattaagcagctcagctgcacaggcctgagtgtagcgtggcagacccggggcgccctagcacgccccctttgactctgcctggctgagcttccttta

SEQ ID NO: 3607 - DNA, 122 bp, Homo sapiens
  misc_feature (61)..(62): /note="This region represents a CpG dinucleotide"
  misc_feature (61)..(61): /note="Nucleotide may be methylated to form 5-methylcytosine"
gttactctttcacttgggattgaatgctagccttgagccagaccgggggcaacaatgacccgtatgacaacggatctaacccctccacaaacttccggaaccttcagtcaccctttcgccta

SEQ ID NO: 3608 - DNA, 122 bp, Homo sapiens
  misc_feature (61)..(62): /note="This region represents a CpG dinucleotide"
  misc_feature (61)..(61): /note="Nucleotide may be methylated to form 5-methylcytosine"
tctgctccagccctcgggtaggggcgggggtggattctgaaacaagcacaagtgtgagaacgtatccaagcaccaaggcttccgcctgccggaaagaacaatgagcttaattgtgttcgctt

SEQ ID NO: 3609 - DNA, 122 bp, Homo sapiens
  misc_feature (61)..(62): /note="This region represents a CpG dinucleotide"
  misc_feature (61)..(61): /note="Nucleotide may be methylated to form 5-methylcytosine"
ctaagacacttaacattgtggttagtcagatcaggctggtagagaggaagccagtgtggtcgaggccaacgtatttggcatacttaataaagaagaatgttggtttctctttctctttcatc

SEQ ID NO: 3610 - DNA, 122 bp, Homo sapiens
  misc_feature (61)..(62): /note="This region represents a CpG dinucleotide"
  misc_feature (61)..(61): /note="Nucleotide may be methylated to form 5-methylcytosine"
ccaagctcagccatgagcaccacccctgattgtaacccacacatttgcatcaagactaaacgtggcccaccatttctttttgtttactgactctttggcctgactgcttcttccttatagcc

SEQ ID NO: 3611 - DNA, 122 bp, Homo sapiens
  misc_feature (61)..(62): /note="This region represents a CpG dinucleotide"
  misc_feature (61)..(61): /note="Nucleotide may be methylated to form 5-methylcytosine"
tacatgctcattagtgcgtgtaagtacatgcttttcaccccagaacactcatgatctttacgtcatctttctgcctcagctgctctttcatctggatcatggaatgttgcagggttaacaca

SEQ ID NO: 3612 - DNA, 122 bp, Homo sapiens
  misc_feature (61)..(62): /note="This region represents a CpG dinucleotide"
  misc_feature (61)..(61): /note="Nucleotide may be methylated to form 5-methylcytosine"
ggataactgtacccatatgtcctttaattctggtctgcatgctgcctaccattaaatattcgtaatggattattgtaaacaggagattagcatgggagacagggtgttaaagctgagtctca

SEQ ID NO: 3613 - DNA, 122 bp, Homo sapiens
  misc_feature (61)..(62): /note="This region represents a CpG dinucleotide"
  misc_feature (61)..(61): /note="Nucleotide may be methylated to form 5-methylcytosine"
gacttagtctggtgcttaggtgtacggaagtgtgcaacctagcacctagaacctttcctgcgttaatgtcgtcattcatcacccaccactgcttacataattccattagaagctatgattca

SEQ ID NO: 3614 - DNA, 122 bp, Homo sapiens
  misc_feature (61)..(62): /note="This region represents a CpG dinucleotide"
  misc_feature (61)..(61): /note="Nucleotide may be methylated to form 5-methylcytosine"
cacagtgcattatgtcagaatagaggaagcagttcagcccgtaaatctgtgccaccggcacgcagggtgttgtgttgtctccaatgtgccttgtcaacaccacagggctaatagcagtgtca

SEQ ID NO: 3615 - DNA, 122 bp, Homo sapiens
  misc_feature (61)..(62): /note="This region represents a CpG dinucleotide"
  misc_feature (61)..(61): /note="Nucleotide may be methylated to form 5-methylcytosine"
cacccgaatattgcgcttttccgactggcttaaaaaccggtgcaccacgagattctatcccgcacgtggctcggaggctcctacgcccacggagtctcactgattgctagcacagcagtctg

SEQ ID NO: 3616 - DNA, 122 bp, Homo sapiens
  misc_feature (61)..(62): /note="This region represents a CpG dinucleotide"
  misc_feature (61)..(61): /note="Nucleotide may be methylated to form 5-methylcytosine"
gcaccacgaggtcattgtccactggtagtaggtggcatggatgacgactcatgggtgtaacgtgtgaacaacaacagatacaccggctggagtcagccacacttggaattctggctgtaatg

SEQ ID NO: 3617 - DNA, 122 bp, Homo sapiens
  misc_feature (61)..(62): /note="This region represents a CpG dinucleotide"
  misc_feature (61)..(61): /note="Nucleotide may be methylated to form 5-methylcytosine"
agcgggggtccacgaacttgttgagggcctccaggatcacggtgtgcacgggctgggattcgaagtccaggcgctgcgggagggagcagagggccggttagtgggtggggtctggtggacac

SEQ ID NO: 3618 - DNA, 122 bp, Homo sapiens
  misc_feature (61)..(62): /note="This region represents a CpG dinucleotide"
  misc_feature (61)..(61): /note="Nucleotide may be methylated to form 5-methylcytosine"
ggaacacagtgagcacataaaaagtgtttagctattattgtatgtcatttccccagccctcgtaggcatcttagtatgggacccccaatttaaaccaatcttctcagccctggttgctgatt

SEQ ID NO: 3619 - DNA, 122 bp, Homo sapiens
  misc_feature (61)..(62): /note="This region represents a CpG dinucleotide"
  misc_feature (61)..(61): /note="Nucleotide may be methylated to form 5-methylcytosine"
ttatgtaacaaaaacttacattaaaaatgacatatctccctgaggcaacttatgaaataacgaatgaaaggtaggctcatgcttccgaagaaagcaatgtagttcagaaaaaactacagagc

SEQ ID NO: 3620 - DNA, 122 bp, Homo sapiens
  misc_feature (61)..(62): /note="This region represents a CpG dinucleotide"
  misc_feature (61)..(61): /note="Nucleotide may be methylated to form 5-methylcytosine"
tattattttcacttttttacatagaaggaaatggaagcttagaaaactgaagcaatttaccgaaagtcagagttaacagagcaaggaaacctgaacagtgtgcagcctccgctcaccagaaa

SEQ ID NO: 3621 - DNA, 122 bp, Homo sapiens
  misc_feature (61)..(62): /note="This region represents a CpG dinucleotide"
  misc_feature (61)..(61): /note="Nucleotide may be methylated to form 5-methylcytosine"
atttggtttgcaggtatttgagtgtctgtttccctccctgggaaatcatgaggaccgaaacgctccttgtgcgctgtagctctgaggtggctgtcatggcccggacggcgggggaggcgagg

SEQ ID NO: 3622 - DNA, 122 bp, Homo sapiens
  misc_feature (61)..(62): /note="This region represents a CpG dinucleotide"
  misc_feature (61)..(61): /note="Nucleotide may be methylated to form 5-methylcytosine"
caggaaatcagatgaataaataaataaatgcagtgacgagctttgtggtgactcaacagacgtcagcataggggctggtaaaggcacaaaggaaagagtagtcaaaattcttttaacttcag

SEQ ID NO: 3623 - DNA, 122 bp, Homo sapiens
  misc_feature (61)..(62): /note="This region represents a CpG dinucleotide"
  misc_feature (61)..(61): /note="Nucleotide may be methylated to form 5-methylcytosine"
cccagcagcggccgtgggcgtcacagcaggagcctgctcacagggccgtcgcttcctctccgctgccccatgctgctggccccagcacttggtttggtggctcggccagcgggtggcctgag

SEQ ID NO: 3624 - DNA, 122 bp, Homo sapiens
  misc_feature (61)..(62): /note="This region represents a CpG dinucleotide"
  misc_feature (61)..(61): /note="Nucleotide may be methylated to form 5-methylcytosine"
ccaccctgtgtcttgcttttctattatagtatagcatgctgctatacctagccctggcctcgtgctgtttgagtgcctaaatgcctgcttctctgtttgtagagctaaccaatctcaaactg

SEQ ID NO: 3625 - DNA, 122 bp, Homo sapiens
  misc_feature (61)..(62): /note="This region represents a CpG dinucleotide"
  misc_feature (61)..(61): /note="Nucleotide may be methylated to form 5-methylcytosine"
ctttgtgacttgaagaaccctgactttgtttctgcaaaggcacctgcatgtgtctgtgttcgtgtaggcataatgtgaggaggtggggagaccaccccacccccatgtccaccatgaccctc

SEQ ID NO: 3626 - DNA, 122 bp, Homo sapiens
  misc_feature (61)..(62): /note="This region represents a CpG dinucleotide"
  misc_feature (61)..(61): /note="Nucleotide may be methylated to form 5-methylcytosine"
aacgtagttttatgttcactgcattgaatcatcaagtcattatcttctctttgccataaacggacagcctacctttttgtcagcatgctatttcatttatttcacagagaaacccagtttca

SEQ ID NO: 3627 - DNA, 122 bp, Homo sapiens
  misc_feature (61)..(62): /note="This region represents a CpG dinucleotide"
  misc_feature (61)..(61): /note="Nucleotide may be methylated to form 5-methylcytosine"
gggcagctccaggctaaggagtcaacacgcagctcgagcccttggcccttgaacatggagcgctttacagacctggagctgagtcaaggcacgtttcccaagattttggggctcccctctca

SEQ ID NO: 3628 - DNA, 122 bp, Homo sapiens
  misc_feature (61)..(62): /note="This region represents a CpG dinucleotide"
  misc_feature (61)..(61): /note="Nucleotide may be methylated to form 5-methylcytosine"
tgaggccaccacccagagcctcttcctagaggagccggaagcatcgggagccgcggtacccgcccatcttccggccaggatgtgtggtcctggtgagcgattgtcctgtggcgtccgggacc

SEQ ID NO: 3629 - DNA, 122 bp, Homo sapiens
  misc_feature (61)..(62): /note="This region represents a CpG dinucleotide"
  misc_feature (61)..(61): /note="Nucleotide may be methylated to form 5-methylcytosine"
tctggagcctttgttctagaggaagctgcatggagtgtgcagtctggcaggggatgcccacgtgcagtcgtggtgttcattgccagcgcatgcagttcagaggaacgtgggcggtcggagga

SEQ ID NO: 3630 - DNA, 122 bp, Homo sapiens
  misc_feature (61)..(62): /note="This region represents a CpG dinucleotide"
  misc_feature (61)..(61): /note="Nucleotide may be methylated to form 5-methylcytosine"
ggacagcagcgcttccccttggcccaggaatcccggccagggctgcggggaggtcagcggcgcccctaaatcctgcacgcacggcgggccccgcacgggcgccgggtgcagcccacacacca

SEQ ID NO: 3631 - DNA, 122 bp, Homo sapiens
  misc_feature (61)..(62): /note="This region represents a CpG dinucleotide"
  misc_feature (61)..(61): /note="Nucleotide may be methylated to form 5-methylcytosine"
ttgacctagtaatatgctattcctggcatgggttgtttccttcagtcattccttccttatcgctgactacagtagttccctcttattttcagtttcgctttccacagtttcagctacctgca

SEQ ID NO: 3632 - DNA, 122 bp, Homo sapiens
  misc_feature (61)..(62): /note="This region represents a CpG dinucleotide"
  misc_feature (61)..(61): /note="Nucleotide may be methylated to form 5-methylcytosine"
cctgtggcccatgttcctgagagcagctcagttcaggagggtctctcctcctagacaccacgcaaggcaccctgagggccagacacacccatgcataaatcccctttcatcctgagactttg

SEQ ID NO: 3633 - DNA, 122 bp, Homo sapiens
  misc_feature (61)..(62): /note="This region represents a CpG dinucleotide"
  misc_feature (61)..(61): /note="Nucleotide may be methylated to form 5-methylcytosine"
gtgggactgtttggtggttagcagaacaatgcaaactggctcccctgtccaaagtcaaaccgtgtgcattccccacaagtggacacagtgtcttctgtgtctgaattaccacagtcatgtag

SEQ ID NO: 3634 - DNA, 122 bp, Homo sapiens
  misc_feature (61)..(62): /note="This region represents a CpG dinucleotide"
  misc_feature (61)..(61): /note="Nucleotide may be methylated to form 5-methylcytosine"
cattcccctccttacagcgttttaggatgcagattgagaggagataacgttagcccgaagcgcctttgcagcctcttttgcgcggctgaaacacagcacaacccacccccccgccccacccc

SEQ ID NO: 3635 - DNA, 122 bp, Homo sapiens
  misc_feature (61)..(62): /note="This region represents a CpG dinucleotide"
  misc_feature (61)..(61): /note="Nucleotide may be methylated to form 5-methylcytosine"
gaagggtgtagctctgaggtgacccacgaaccacttttgatgggtggggcagtggaccttcgttgtctgaggcctctcccaagtcacccctttccccctccttctggctctgggcccggggc

SEQ ID NO: 3636 - DNA, 122 bp, Homo sapiens
  misc_feature (61)..(62): /note="This region represents a CpG dinucleotide"
  misc_feature (61)..(61): /note="Nucleotide may be methylated to form 5-methylcytosine"
tcctgcacctcgggctcctgctccgccagcagctgccggaacctgggcgggaggggagggcgctggggacattcacccacaacagcgggtctggcaccccgggcgtctaaccccgaggggct

SEQ ID NO: 3637 - DNA, 122 bp, Homo sapiens
  misc_feature (61)..(62): /note="This region represents a CpG dinucleotide"
  misc_feature (61)..(61): /note="Nucleotide may be methylated to form 5-methylcytosine"
tgcaggctattcattgtcatgcaaattgtgctgcccttgtggcctgagtggtagagccaccgtattgacctctgaattactttcagtgtctgcagttatcagatcttagaaatgaacagcag

SEQ ID NO: 3638 - DNA, 122 bp, Homo sapiens
  misc_feature (61)..(62): /note="This region represents a CpG dinucleotide"
  misc_feature (61)..(61): /note="Nucleotide may be methylated to form 5-methylcytosine"
ctgttttcctctctaactttctgtcttacagacacacacacacacacacacacacacacacgtgtgtgtgtgcacactgagcaactaaatatttttgaatcttgttgaccaactgtgagtct

SEQ ID NO: 3639 - DNA, 122 bp, Homo sapiens
  misc_feature (61)..(62): /note="This region represents a CpG dinucleotide"
  misc_feature (61)..(61): /note="Nucleotide may be methylated to form 5-methylcytosine"
gcgcgcgggcggggccgggggcgcggcgaggctcgggttggggcggggcgggggcgggggcggggccggacccggggaagccgcccgcccgcggggacgtccgcaccgcgagggttaaggcc

SEQ ID NO: 3640 - DNA, 122 bp, Homo sapiens
  misc_feature (61)..(62): /note="This region represents a CpG dinucleotide"
  misc_feature (61)..(61): /note="Nucleotide may be methylated to form 5-methylcytosine"
cagaaggccaagtccaggggtggacggcggacacagagcccttggcagcctccaggctcacgtggggcacacctccgactgcaccgcatcccggagagctgcatgctctgctcactgaggtg

SEQ ID NO: 3641 - DNA, 122 bp, Homo sapiens
  misc_feature (61)..(62): /note="This region represents a CpG dinucleotide"
  misc_feature (61)..(61): /note="Nucleotide may be methylated to form 5-methylcytosine"
cttttttttctgactggcttatttgtctcagcaaggttcatccttgttgtcgcatgtttccgaatttcctttctgaagtctgagtaataatccactgtatcacatttattcatttatccatg

SEQ ID NO: 3642 - DNA, 122 bp, Homo sapiens
  misc_feature (61)..(62): /note="This region represents a CpG dinucleotide"
  misc_feature (61)..(61): /note="Nucleotide may be methylated to form 5-methylcytosine"
agaaaaatagctaccttactctcatttaccaatctctttcaaataactataacttattttcgtttaactaagtatagaaaataatatatattatttattatttatgtctatatattgtgtgt

SEQ ID NO: 3643 - DNA, 122 bp, Homo sapiens
  misc_feature (61)..(62): /note="This region represents a CpG dinucleotide"
  misc_feature (61)..(61): /note="Nucleotide may be methylated to form 5-methylcytosine"
agtgtgaaaggagaaatattattttcatgtttcacacaaagcataatgcctgtcatccaacggctgcttaatcaatttgtgttgaacaaataagtaagagggtagatgaaacattgacattg

SEQ ID NO: 3644 - DNA, 122 bp, Homo sapiens
  misc_feature (61)..(62): /note="This region represents a CpG dinucleotide"
  misc_feature (61)..(61): /note="Nucleotide may be methylated to form 5-methylcytosine"
acatataccttgccccatgcagctattccatctggtgttcatggtaccatttgtaataaccgttatagtaagccagtaaatccaagtcaatgtttccctgagttctgtgagccatcctagca

SEQ ID NO: 3645 - DNA, 122 bp, Homo sapiens
  misc_feature (61)..(62): /note="This region represents a CpG dinucleotide"
  misc_feature (61)..(61): /note="Nucleotide may be methylated to form 5-methylcytosine"
ccaatgcctagctcttcatcagtcattattgctctgaggtactgagcaattcactacattcgctgaaatttgatgtttctacatctaaggagaaatatgaataccatgaaaagtttatggga

SEQ ID NO: 3646 - DNA, 122 bp, Homo sapiens
  misc_feature (61)..(62): /note="This region represents a CpG dinucleotide"
  misc_feature (61)..(61): /note="Nucleotide may be methylated to form 5-methylcytosine"
gtgtgtgtttgctttcctttttctgtgaattacctgttggtgtgcaaagacagctgtttacgtggttctctagccagactttccagggcacttcctggctgtgtgaacttgaactaattcct

SEQ ID NO: 3647 - DNA, 122 bp, Homo sapiens
  misc_feature (61)..(62): /note="This region represents a CpG dinucleotide"
  misc_feature (61)..(61): /note="Nucleotide may be methylated to form 5-methylcytosine"
ccaggaaagggaggaaagccctgtccctgcctgagcctgtgaacccagcgaagaggcagtcgggctgattttacatgcacctctgcacttagagggatcagggcgttctcgcatgaaatccc

SEQ ID NO: 3648 - DNA, 122 bp, Homo sapiens
  misc_feature (61)..(62): /note="This region represents a CpG dinucleotide"
  misc_feature (61)..(61): /note="Nucleotide may be methylated to form 5-methylcytosine"
tctggaatttctatgctgattcattaaaaatgccaacgtgtttattattcactgtccacacgcctaccaattctgggattatgagatagtctgagtactttgtcaacatcaattcttagaat

SEQ ID NO: 3649 - DNA, 122 bp, Homo sapiens
  misc_feature (61)..(62): /note="This region represents a CpG dinucleotide"
  misc_feature (61)..(61): /note="Nucleotide may be methylated to form 5-methylcytosine"
gctgttctcatcccgagcacatagctcagtgcctgcagaagacaggcactcaggaaatgacgcaatgggcagcctgactcatggacagatttcacttcgattaaattccccaccgcctcctg

SEQ ID NO: 3650 - DNA, 122 bp, Homo sapiens
  misc_feature (61)..(62): /note="This region represents a CpG dinucleotide"
  misc_feature (61)..(61): /note="Nucleotide may be methylated to form 5-methylcytosine"
gaatagccagactatacagctaatttcctttcttgactcataacggaagaagattgaaggcgcatatgttgggaaagagaagatttagtgtaagtagcagcatgacaaaaagcctgagtcat

SEQ ID NO: 3651 - DNA, 122 bp, Homo sapiens
  misc_feature (61)..(62): /note="This region represents a CpG dinucleotide"
  misc_feature (61)..(61): /note="Nucleotide may be methylated to form 5-methylcytosine"
ataaaccaggattggaggcggtgcgtgtcccaggagagagggccagcgcggtgcgcgcctcgccaggcatgctgggaggagtagtctcctagccacttccggccgttggtcacaggttgccg

SEQ ID NO: 3652 - DNA, 122 bp, Homo sapiens
  misc_feature (61)..(62): /note="This region represents a CpG dinucleotide"
  misc_feature (61)..(61): /note="Nucleotide may be methylated to form 5-methylcytosine"
atcatttggaatggatttgaggtaatccataccaaatgtcctctgactctcatttccctacgtttttatgagtggggaaagaaggggtctgcccgtgcaagacagctgctcatgtgaatgtc

SEQ ID NO: 3653 - DNA, 122 bp, Homo sapiens
  misc_feature (61)..(62): /note="This region represents a CpG dinucleotide"
  misc_feature (61)..(61): /note="Nucleotide may be methylated to form 5-methylcytosine"
tgatccgcctatctcagcctcccaaagtgctgggattacaggcgtgagccactggcccggcggcacaaccaaatcttattaaactcaccctaggctggccgcggtgactcatgcctataatc

SEQ ID NO: 3654 - DNA, 122 bp, Homo sapiens
  misc_feature (61)..(62): /note="This region represents a CpG dinucleotide"
  misc_feature (61)..(61): /note="Nucleotide may be methylated to form 5-methylcytosine"
gccacatattgtatacatgattgattgtacaaaaagaagttactaaacagctggagggggcgattcagtagtaaaggaaaatagaaagtagtcagtctctaggttagccattgcattttatt

SEQ ID NO: 3655 - DNA, 122 bp, Homo sapiens
  misc_feature (61)..(62): /note="This region represents a CpG dinucleotide"
  misc_feature (61)..(61): /note="Nucleotide may be methylated to form 5-methylcytosine"
ctcaggtaatctgcctgccttggcctcccaaagtgctgggattataggcttgagccaccacgcccagcccacactggtaaattctataatcattagttgtatggaaaagtacctagcgcatt

SEQ ID NO: 3656 - DNA, 122 bp, Homo sapiens
  misc_feature (61)..(62): /note="This region represents a CpG dinucleotide"
  misc_feature (61)..(61): /note="Nucleotide may be methylated to form 5-methylcytosine"
ggctgtggtttttgtcaacccgcatggttgggcagaagcctggtcacagacgctgtgccacggcacctagagaggtcataggccagttaagtgagaacttatctccccactggcaaagaata

SEQ ID NO: 3657 - DNA, 122 bp, Homo sapiens
  misc_feature (61)..(62): /note="This region represents a CpG dinucleotide"
  misc_feature (61)..(61): /note="Nucleotide may be methylated to form 5-methylcytosine"
tctgtcttctagcttcagagtccctcaaatttttaaggaccttttctgggtccttaaaaacgtaaaaactaataggcaatgtagtgagtaagttctgtgaacagaaggatcaccagggacac

SEQ ID NO: 3658 - DNA, 122 bp, Homo sapiens
  misc_feature (61)..(62): /note="This region represents a CpG dinucleotide"
  misc_feature (61)..(61): /note="Nucleotide may be methylated to form 5-methylcytosine"
taggagttatgttttgtatctatcctttccctacagctttttctatgagcctatctcacacgtctctaccttctttcctgtttcctttccgttatttttcacactacttaagtactccaaca

SEQ ID NO: 3659 - DNA, 122 bp, Homo sapiens
  misc_feature (61)..(62): /note="This region represents a CpG dinucleotide"
  misc_feature (61)..(61): /note="Nucleotide may be methylated to form 5-methylcytosine"
tgagtgtgtgtgtgttgttttagtatgaggctcccttcccacctcagtcattggtttgctcgctcccttatgtgatgaatcaatgctttcagaacaggggcttctgagtgactgcgggaaca

SEQ ID NO: 3660 - DNA, 122 bp, Homo sapiens
  misc_feature (61)..(62): /note="This region represents a CpG dinucleotide"
  misc_feature (61)..(61): /note="Nucleotide may be methylated to form 5-methylcytosine"
cgtagcatttttatagtgtacaggtcataaacatgttgtctgaagatgggcaaagtaggtcgtagagataggaagtgagttcacatcacggcgtgagtcaaggcagcagcatatgagctcag

SEQ ID NO: 3661 - DNA, 122 bp, Homo sapiens
  misc_feature (61)..(62): /note="This region represents a CpG dinucleotide"
  misc_feature (61)..(61): /note="Nucleotide may be methylated to form 5-methylcytosine"
gcgtcaaaatgtgcagcctcagatgctgtccctcccaccttcaaaagggcagttgatgaacgactcttcagggtaattgcaatttcatggatcaggaggtgtagccagttcacatttttttc

SEQ ID NO: 3662 - DNA, 122 bp, Homo sapiens
  misc_feature (61)..(62): /note="This region represents a CpG dinucleotide"
  misc_feature (61)..(61): /note="Nucleotide may be methylated to form 5-methylcytosine"
tggccagagctaaacccatttctcaaaattcagtgagggggtgactcactaatgggggcccgctcttcaggctccctgaggatggggatgagggtcacctgctcagacccaggggatggggc

SEQ ID NO: 3663 - DNA, 122 bp, Homo sapiens
  misc_feature (61)..(62): /note="This region represents a CpG dinucleotide"
  misc_feature (61)..(61): /note="Nucleotide may be methylated to form 5-methylcytosine"
ccagctaaagtctgtaacaagagatgaacaaacatcgagtcatcctagctgggctggtttcgccagagacaaggtgatgagatgctttaagcctgatatgattacaggcttataacttctga

SEQ ID NO: 3664 - DNA, 122 bp, Homo sapiens
  misc_feature (61)..(62): /note="This region represents a CpG dinucleotide"
  misc_feature (61)..(61): /note="Nucleotide may be methylated to form 5-methylcytosine"
actccactcacatatttccctgcaaataaaggggctctgtatgtaattaactgacaaaaacgcgggtggaattgcaggtttggaaataaagtataaggctctataactcagcctggctccgc

SEQ ID NO: 3665 - DNA, 122 bp, Homo sapiens
  misc_feature (61)..(62): /note="This region represents a CpG dinucleotide"
  misc_feature (61)..(61): /note="Nucleotide may be methylated to form 5-methylcytosine"
gccccgagcacacggacgtggcagcgggcagcgggcagatggtgcacagtctcacatcctcgggcatccggcggcgcggggacccctgtggtctctgcactgcgggcacctgcaagcagagc

SEQ ID NO: 3666 - DNA, 122 bp, Homo sapiens
  misc_feature (61)..(62): /note="This region represents a CpG dinucleotide"
  misc_feature (61)..(61): /note="Nucleotide may be methylated to form 5-methylcytosine"
tttgtgtaagcactttgctgggtgctagggattcagcagtggacaaggtaaacaagattccgccctcctgaattctgtcacctggccaaaataaacatttaacaagtacgctgctagaattt

SEQ ID NO: 3667 - DNA, 122 bp, Homo sapiens
  misc_feature (61)..(62): /note="This region represents a CpG dinucleotide"
  misc_feature (61)..(61): /note="Nucleotide may be methylated to form 5-methylcytosine"
tatgcagagaagaaatggaaaaatacacctttcaatatatcagttcccaaccctgatcttcgttactgaaatatgaatctaatcccatctctgaatttgatcaaccaaaactgtgcaaactg

SEQ ID NO: 3668 - DNA, 122 bp, Homo sapiens
  misc_feature (61)..(62): /note="This region represents a CpG dinucleotide"
  misc_feature (61)..(61): /note="Nucleotide may be methylated to form 5-methylcytosine"
ccatagcatccctcctttttaattaacaaaaataacaggggcaaaaataacagcagcgctcgctgaccaagcgccagcatctatctgccaggcacatgctaaatgctgcactcttctatcgc

SEQ ID NO: 3669 - DNA, 122 bp, Homo sapiens
  misc_feature (61)..(62): /note="This region represents a CpG dinucleotide"
  misc_feature (61)..(61): /note="Nucleotide may be methylated to form 5-methylcytosine"
gttcctaccccagatttcctgagggcagccatggagcatagagtgggctctgtgccagcccgtgttctcctattgaggtagagttcacaggctgcaaaggggaagccttttcagagacagct

SEQ ID NO: 3670 - DNA, 122 bp, Homo sapiens
  misc_feature (61)..(62): /note="This region represents a CpG dinucleotide"
  misc_feature (61)..(61): /note="Nucleotide may be methylated to form 5-methylcytosine"
tctcaagaataccacaaaggtggcagccaggcccttcctgagctcaccaggctgcggggacgcagtgaacacacctctgacttacagtttcctggccggggagtcatgcaaagaaaacagcc

SEQ ID NO: 3671 - DNA, 122 bp, Homo sapiens
  misc_feature (61)..(62): /note="This region represents a CpG dinucleotide"
  misc_feature (61)..(61): /note="Nucleotide may be methylated to form 5-methylcytosine"
aaagagttccaacattggtgggagtgttcccactgccaccctggcccctgaacagggatacgtggctggaattcacaggaagtaactgtgacaaggcaaagtctgtttcagtaccggccctg

SEQ ID NO: 3672 - DNA, 122 bp, Homo sapiens
  misc_feature (61)..(62): /note="This region represents a CpG dinucleotide"
  misc_feature (61)..(61): /note="Nucleotide may be methylated to form 5-methylcytosine"
tactgccctagacactcttacctcaggccgttatagtgagtccatacacttaaaaataagcgtctttccaagtactttaaagattcaaaatgatagtggatctgaaatgccgcctgagtccc

SEQ ID NO: 3673 - DNA, 122 bp, Homo sapiens
  misc_feature (61)..(62): /note="This region represents a CpG dinucleotide"
  misc_feature (61)..(61): /note="Nucleotide may be methylated to form 5-methylcytosine"
cagttctacgtgcttagcagtgaatacttttgtccaaggtactctggcaggaggaagaggcgtgtcctcttgagttcttgacttgggctctggcctgttaatatttccatgttggtgaaacc

SEQ ID NO: 3674 - DNA, 122 bp, Homo sapiens
  misc_feature (61)..(62): /note="This region represents a CpG dinucleotide"
  misc_feature (61)..(61): /note="Nucleotide may be methylated to form 5-methylcytosine"
ctagcttctcccagtctctctgcctcaccttctgggtgtggagaacttggtcagccactgcggaagcctgagctccctgcaaccaccagttcctctcttccctaaaacacgagcactgatct

SEQ ID NO: 3675 - DNA, 122 bp, Homo sapiens
  misc_feature (61)..(62): /note="This region represents a CpG dinucleotide"
  misc_feature (61)..(61): /note="Nucleotide may be methylated to form 5-methylcytosine"
gcccgcctccccgagtcggcccccacctctgcacgcagagacctctcctcacctcccgcccggccagatcacagggccgccgagtcagatgggatccctgcccccatcagcccttctgcact

SEQ ID NO: 3676 - DNA, 122 bp, Homo sapiens
  misc_feature (61)..(62): /note="This region represents a CpG dinucleotide"
  misc_feature (61)..(61): /note="Nucleotide may be methylated to form 5-methylcytosine"
gtctcagtccttcttggtcaagagctgcagcaagaggttggttcatttctgttgccccaacgagcctagaaaagcccccagcacttggcaggtgctcagtcaatgcttgcagcgttgagtta

SEQ ID NO: 3677 - DNA, 122 bp, Homo sapiens
  misc_feature (61)..(62): /note="This region represents a CpG dinucleotide"
  misc_feature (61)..(61): /note="Nucleotide may be methylated to form 5-methylcytosine"
tcaggccccaagagattaagtttctttcatcagcaaccatggcaagatctgtttgccttgcgcacttggtcttttacgcattatggacagctgaagttcatgcaggccttacggtgtgcttc

SEQ ID NO: 3678 - DNA, 122 bp, Homo sapiens
  misc_feature (61)..(62): /note="This region represents a CpG dinucleotide"
  misc_feature (61)..(61): /note="Nucleotide may be methylated to form 5-methylcytosine"
atgctgttggaccacactttaagaaccgctgctctagagggtaactcggacctatcccagcgtcccagggaaacgaaatctgcagtgagaaatggaacgtccaaggcaatcttcagccggcc

SEQ ID NO: 3679 - DNA, 122 bp, Homo sapiens
  misc_feature (61)..(62): /note="This region represents a CpG dinucleotide"
  misc_feature (61)..(61): /note="Nucleotide may be methylated to form 5-methylcytosine"
cttttatttgcacagtcctattaattttaatgcctaaagcagtgttaatcgcatgacccacgtgaaaagattttaaaaattgctttgttagaaaatgtaatagacttgtcgttaaagttttc

SEQ ID NO: 3680 - DNA, 122 bp, Homo sapiens
  misc_feature (61)..(62): /note="This region represents a CpG dinucleotide"
  misc_feature (61)..(61): /note="Nucleotide may be methylated to form 5-methylcytosine"
ggtttagaattgccactggcaaaaaaggaatttggaccacaagctagggtactgttattacgaatacggtgacaaagaggttgggagcttcacccaaaccctgaagatttcaccatcccaca

SEQ ID NO: 3681 - DNA, 122 bp, Homo sapiens
  misc_feature (61)..(62): /note="This region represents a CpG dinucleotide"
  misc_feature (61)..(61): /note="Nucleotide may be methylated to form 5-methylcytosine"
caagtctgggacttcagcgccagcctcgccaccctgcttcccacaaccagatgtctcctgcgaagtagccccctctaatgccaaaccaaaagcagaggtcataaggactatatcccttacac

SEQ ID NO: 3682 - DNA, 122 bp, Homo sapiens
  misc_feature (61)..(62): /note="This region represents a CpG dinucleotide"
  misc_feature (61)..(61): /note="Nucleotide may be methylated to form 5-methylcytosine"
tgcaaacccacccggactcagggagtttgcccccacaagcctgcttaagggaaggaatgacgggacaacactgtccacgagaaaacaaaaggccctggaatgaagccacacagcaggcagag

SEQ ID NO: 3683 - DNA, 122 bp, Homo sapiens
  misc_feature (61)..(62): /note="This region represents a CpG dinucleotide"
  misc_feature (61)..(61): /note="Nucleotide may be methylated to form 5-methylcytosine"
gttcttccagccacttaagcttgaaacatgggaggcatcttgtattgctcgctcttttcccgtgtgtctcaaaattcaaccgcatttcctgtaaccatgatttccttccagcattctcagtg

SEQ ID NO: 3684 - DNA, 122 bp, Homo sapiens
  misc_feature (61)..(62): /note="This region represents a CpG dinucleotide"
  misc_feature (61)..(61): /note="Nucleotide may be methylated to form 5-methylcytosine"
aaatgtgcattaaaacctctgagattacatctcctataggtacatatggcccaatgggcacgcacttcctgcatgccatagagacaggccaccagcagaggaggccgcaggctcggacagag

SEQ ID NO: 3685 - DNA, 122 bp, Homo sapiens
  misc_feature (61)..(62): /note="This region represents a CpG dinucleotide"
  misc_feature (61)..(61): /note="Nucleotide may be methylated to form 5-methylcytosine"
ttcgcttttgtcgtgggggcggggtgggatagtggactcgtaccctaacaaagacccactcgaggctgcgtgtcggcccgggggcagcagggggcaggagaagctggctctagaccacgcgt

SEQ ID NO: 3686 - DNA, 122 bp, Homo sapiens
  misc_feature (61)..(62): /note="This region represents a CpG dinucleotide"
  misc_feature (61)..(61): /note="Nucleotide may be methylated to form 5-methylcytosine"
tcttcaagatccagctgaaattctagctcctaatggagcttcctcaactatcctggcccacgttgagttcttcctgctctaatgctcacattacttaccagagcttttatttgggcatttaa

SEQ ID NO: 3687 - DNA, 122 bp, Homo sapiens
  misc_feature (61)..(62): /note="This region represents a CpG dinucleotide"
  misc_feature (61)..(61): /note="Nucleotide may be methylated to form 5-methylcytosine"
actccagcctgggcgacagaacaagaatcagtttcaaaaaaaaaaaaaaattcaagatggcgccagcagagcattaaaaccagctctgggacttctaggacaggatcatgatgctggctctg

SEQ ID NO: 3688 - DNA, 122 bp, Homo sapiens
  misc_feature (61)..(62): /note="This region represents a CpG dinucleotide"
  misc_feature (61)..(61): /note="Nucleotide may be methylated to form 5-methylcytosine"
tgtaaaaatggatgactactttttagattctgaactcatttctgttctcttacttagtcccgacatgctgacactggatgagcaagagcttatgtgcttttactaataacttctcaatgttt

SEQ ID NO: 3689 - DNA, 122 bp, Homo sapiens
  misc_feature (61)..(62): /note="This region represents a CpG dinucleotide"
  misc_feature (61)..(61): /note="Nucleotide may be methylated to form 5-methylcytosine"
gtcactgattctgcatttgtcaaagatctttcattctgtggggccaggtgaggtgttaaacgtgacggcccccagagccttccctccccacagacccccggcaggggtggagggggctcagg

SEQ ID NO: 3690 - DNA, 122 bp, Homo sapiens
  misc_feature (61)..(62): /note="This region represents a CpG dinucleotide"
  misc_feature (61)..(61): /note="Nucleotide may be methylated to form 5-methylcytosine"
catcagaaagctggtgctgccccaggtctgtgtctgcctggccagaggacatgggcatcccggagctcatgtgcccagcagcctagacaatgcctctagctcctgtggtcatacggcactga

SEQ ID NO: 3691 - DNA, 122 bp, Homo sapiens
  misc_feature (61)..(62): /note="This region represents a CpG dinucleotide"
  misc_feature (61)..(61): /note="Nucleotide may be methylated to form 5-methylcytosine"
agcattttaataaatattgctaaactgaactttcaaaacaagtatagtaatttacattcccgttaacaaggcatgattgctcatttcccaagatctttatcaaaccaagtattgtcaagctt

SEQ ID NO: 3692 - DNA, 122 bp, Homo sapiens
  misc_feature (61)..(62): /note="This region represents a CpG dinucleotide"
  misc_feature (61)..(61): /note="Nucleotide may be methylated to form 5-methylcytosine"
aacagcagcagagtcatcaatgcgtgtaaactgcctgcacctggagctgcccggagaggacgctgcaaagctttagagcaaggcctccagcctaatccggatgggtgggtggaaaccaagca

SEQ ID NO: 3693 - DNA, 122 bp, Homo sapiens
  misc_feature (61)..(62): /note="This region represents a CpG dinucleotide"
  misc_feature (61)..(61): /note="Nucleotide may be methylated to form 5-methylcytosine"
gtgagcatttctgacctgcttaaatttcagagactctccagcctggatttcctcagctgacgcaaccagttgggctgtaccctgagctttaggaattgacaaacagactggtgccaggaagg

SEQ ID NO: 3694 - DNA, 122 bp, Homo sapiens
  misc_feature (61)..(62): /note="This region represents a CpG dinucleotide"
  misc_feature (61)..(61): /note="Nucleotide may be methylated to form 5-methylcytosine"
ttcagctcttttgctggtacttaaggagttcttgggtcactctgcaggaacactggagcccggcggccccactctctttattggcagctctggcgtccttccatcacccactgcggcgtctt

SEQ ID NO: 3695 - DNA, 122 bp, Homo sapiens
  misc_feature (61)..(62): /note="This region represents a CpG dinucleotide"
  misc_feature (61)..(61): /note="Nucleotide may be methylated to form 5-methylcytosine"
actggcagctgggagagtggggcagggctctcacagcactgcagccaaaggcgggcaccacgcccacacggggcagcacacgggaaccaagagttgccacacattcctaaggcccagagcag

SEQ ID NO: 3696 - DNA, 122 bp, Homo sapiens
  misc_feature (61)..(62): /note="This region represents a CpG dinucleotide"
  misc_feature (61)..(61): /note="Nucleotide may be methylated to form 5-methylcytosine"
cagggaagcagggactcctggggtacagcaaaaggtacttgtgctacattcatcctcgggcgtccatgaaggctttagcgcctcactgaggaaagcagaggaagcatgaaagcaaactatga

SEQ ID NO: 3697 - DNA, 122 bp, Homo sapiens
  misc_feature (61)..(62): /note="This region represents a CpG dinucleotide"
  misc_feature (61)..(61): /note="Nucleotide may be methylated to form 5-methylcytosine"
ccagttttctaattttgcaagcccagctttcattagaattttgcaaaaatccttgctttgcgagcatggcacaggcaagagatgaggcactctctctttcttcccccagagcctttgactgc

SEQ ID NO: 3698 - DNA, 122 bp, Homo sapiens
  misc_feature (61)..(62): /note="This region represents a CpG dinucleotide"
  misc_feature (61)..(61): /note="Nucleotide may be methylated to form 5-methylcytosine"
tgacttcacgcctgttactacagctggagggaaaccgatttcagaatctatctgatatgtcggatttctttgtggcatccacttcatcgctcagcagccagccatgatgtcataagcccatc

SEQ ID NO: 3699 - DNA, 122 bp, Homo sapiens
  misc_feature (61)..(62): /note="This region represents a CpG dinucleotide"
  misc_feature (61)..(61): /note="Nucleotide may be methylated to form 5-methylcytosine"
acttcccgagttaatgagtagaaacagaacatattgcaacgtataattgtcacgattatgcgggctgttcatttagcgttttcgtgtgcacatgcattcagctgccacatctgcagtgcacg

SEQ ID NO: 3700 - DNA, 122 bp, Homo sapiens
  misc_feature (61)..(62): /note="This region represents a CpG dinucleotide"
  misc_feature (61)..(61): /note="Nucleotide may be methylated to form 5-methylcytosine"
cggagcccaaaatatcagtgctcagaaagatttggacctaactggcatgcaatgcaagcccggagcttagttcattcactcctttgtccattgtggaattatctaatgacaagagggatgtg

SEQ ID NO: 3701 - DNA, 122 bp, Homo sapiens
  misc_feature (61)..(62): /note="This region represents a CpG dinucleotide"
  misc_feature (61)..(61): /note="Nucleotide may be methylated to form 5-methylcytosine"
tggccagcatgatgaaaccccatctctactaaaaatacaaaaattagccaggcgtggtggcgtgcgactgtagtcccagctactccaaaggcaagagaatcgcttaaacccaggaggcagag

SEQ ID NO: 3702 - DNA, 122 bp, Homo sapiens
  misc_feature (61)..(62): /note="This region represents a CpG dinucleotide"
  misc_feature (61)..(61): /note="Nucleotide may be methylated to form 5-methylcytosine"
aagcagaggcacagggaggtgaaatggtttgcccaacatcccacagtgtatcagcaaaagcgatgggcttggaaaccaccaggtttccatttcctgtctatgaccacactaagagtgagaat

SEQ ID NO: 3703 - DNA, 122 bp, Homo sapiens
  misc_feature (61)..(62): /note="This region represents a CpG dinucleotide"
  misc_feature (61)..(61): /note="Nucleotide may be methylated to form 5-methylcytosine"
atgacagcctgagccacacacctatcgactgagacttagaagtaagagccaaagcctacccggaacctcccagtctcacaccaccttttccaattcagcttttcccagatttctccattggg

SEQ ID NO: 3704 - DNA, 122 bp, Homo sapiens
  misc_feature (61)..(62): /note="This region represents a CpG dinucleotide"
  misc_feature (61)..(61): /note="Nucleotide may be methylated to form 5-methylcytosine"
aaggaagcagttcactggttctattgaccacagtttgccattcttgaacagggttgccaacgtctagtgtttgtattttgttgtctgactctacaagttccagaacttcttttataaatgat

SEQ ID NO: 3705 - DNA, 122 bp, Homo sapiens
  misc_feature (61)..(62): /note="This region represents a CpG dinucleotide"
  misc_feature (61)..(61): /note="Nucleotide may be methylated to form 5-methylcytosine"
gcaatcctctgtccttcagcagcaccagaaacagtggaggatccgtgtgggtgttcacagcgttgtgaatagatctagtgggaggcaagagtccaaggctcaggcttcctgcacgtaccacc

SEQ ID NO: 3706 - DNA, 122 bp, Homo sapiens
  misc_feature (61)..(62): /note="This region represents a CpG dinucleotide"
  misc_feature (61)..(61): /note="Nucleotide may be methylated to form 5-methylcytosine"
tgccgcgcctgcgcacggggtcaagcggggccatagtggaggcgcctcgcctgcacaaagcgcacctgcggacggtggcgctgtggggatagggaggtcccgcgctccctgaccgatgtagg

SEQ ID NO: 3707 - DNA, 122 bp, Homo sapiens
  misc_feature (61)..(62): /note="This region represents a CpG dinucleotide"
  misc_feature (61)..(61): /note="Nucleotide may be methylated to form 5-methylcytosine"
caagaaccaccgcctgtactcccagtcctaaggctgcagaaacggatggcacgtaagatacgggtgcaagttgtacctactcaggtttgttgtgagaatcaaatatgaacagcgatgaaaca

SEQ ID NO: 3708 - DNA, 122 bp, Homo sapiens
  misc_feature (61)..(62): /note="This region represents a CpG dinucleotide"
  misc_feature (61)..(61): /note="Nucleotide may be methylated to form 5-methylcytosine"
gtgatagaccctgagtagcaaaagacgaagactaattacctgacagagctcccctccactcgcctgggtcattgaaattaatttctgctttcaagcttggcagaaagcagctgcagaatttc

SEQ ID NO: 3709 - DNA, 122 bp, Homo sapiens
  misc_feature (61)..(62): /note="This region represents a CpG dinucleotide"
  misc_feature (61)..(61): /note="Nucleotide may be methylated to form 5-methylcytosine"
atggcactgtgatttcacaatgggttgcacaacacaaaagagagaaattcctgcatacctcggggacaactaaggctggaataatacgatccttaaccagaatcgtgcaagaagatggaaat

SEQ ID NO: 3710 - DNA, 122 bp, Homo sapiens
  misc_feature (61)..(62): /note="This region represents a CpG dinucleotide"
  misc_feature (61)..(61): /note="Nucleotide may be methylated to form 5-methylcytosine"
caaagcaacgggaactaggtttaccatctccaagacacaacccctattttgctagactggcgacaaatatcaaagtgctcagccggggccactgtcaagctaaagaacatcaaagcagacag

SEQ ID NO: 3711 - DNA, 122 bp, Homo sapiens
  misc_feature (61)..(62): /note="This region represents a CpG dinucleotide"
  misc_feature (61)..(61): /note="Nucleotide may be methylated to form 5-methylcytosine"
agcagagagaacagatctcccctttcccatcttagatctccatttttatgttcctgttgtcgagtggtttgtcatggtaaagaaaaaatgcttttaaatgtgagtgtatatatatcatctat

SEQ ID NO: 3712 - DNA, 122 bp, Homo sapiens
  misc_feature (61)..(62): /note="This region represents a CpG dinucleotide"
  misc_feature (61)..(61): /note="Nucleotide may be methylated to form 5-methylcytosine"
tctgagaaccaaaatccgaccctttacatccagatcaggacaaactcacagagtagtttgcgaactactagtttagaactagttcggaatctgcttgttacggtttgtgacaagaggaacgc

SEQ ID NO: 3713 - DNA, 122 bp, Homo sapiens
  misc_feature (61)..(62): /note="This region represents a CpG dinucleotide"
  misc_feature (61)..(61): /note="Nucleotide may be methylated to form 5-methylcytosine"
atcacataatggcagctaccttttgttgaagaaacaaaaggctcagcttgacagtgtctgcgtttttgcgtcacccagctctttgttccacgcctgctccaaagcctattaatttgtcagat

SEQ ID NO: 3714 - DNA, 122 bp, Homo sapiens
  misc_feature (61)..(62): /note="This region represents a CpG dinucleotide"
  misc_feature (61)..(61): /note="Nucleotide may be methylated to form 5-methylcytosine"
aaaataaaaagagttccacaaataaggcatattggctgcaggcaaatccacacaaaggaccgctttaaagaaaaatctcttgtgttcctgagttctgagctttgggtgagtttctgaagagg

SEQ ID NO: 3715 - DNA, 122 bp, Homo sapiens
  misc_feature (61)..(62): /note="This region represents a CpG dinucleotide"
  misc_feature (61)..(61): /note="Nucleotide may be methylated to form 5-methylcytosine"
ccttgtcttagagcttgaaaaaattacatttgtcttatcttagttcctttctcagcaaatcgaccatcaggtttcctgacagtatcaaggaactgaaacttaccagatcagtgcatctggcc

SEQ ID NO: 3716 - DNA, 122 bp, Homo sapiens
  misc_feature (61)..(62): /note="This region represents a CpG dinucleotide"
  misc_feature (61)..(61): /note="Nucleotide may be methylated to form 5-methylcytosine"
tgcaggccaagcaaacggctctgggctggaatagccctacctgagtgccctgtttgactccgccactatctgccatgtgagttgggcaaattgttgaccacctctgagccttgaaaaagtag

SEQ ID NO: 3717 - DNA, 122 bp, Homo sapiens
  misc_feature (61)..(62): /note="This region represents a CpG dinucleotide"
  misc_feature (61)..(61): /note="Nucleotide may be methylated to form 5-methylcytosine"
atccatcaccaggtcgtcccctcctcctcttcctctccccttccttcctcgctgcctcgccgcctccccgccgcccttacctgtagccatctgattgtaatggactaccgagtcgctgctgc

SEQ ID NO: 3718 - DNA, 122 bp, Homo sapiens
  misc_feature (61)..(62): /note="This region represents a CpG dinucleotide"
  misc_feature (61)..(61): /note="Nucleotide may be methylated to form 5-methylcytosine"
aaagcctcatcttcccttctatacaccaattttgcaaatactcagttgcaacagactgaacgtttttgtccctcaaaattctggtgttgaaatcctagcccccaagatgattgtattaggag

SEQ ID NO: 3719 - DNA, 122 bp, Homo sapiens
  misc_feature (61)..(62): /note="This region represents a CpG dinucleotide"
  misc_feature (61)..(61): /note="Nucleotide may be methylated to form 5-methylcytosine"
aggggctgtggtcgtattaagggtgtgagtggcaaggcccgcagcgggatgggcagtccccgccatgccagtgcagctctgtgtaaatccttagtcccgagtatcctcgtgtaactcagagc

SEQ ID NO: 3720 - DNA, 122 bp, Homo sapiens
  misc_feature (61)..(62): /note="This region represents a CpG dinucleotide"
  misc_feature (61)..(61): /note="Nucleotide may be methylated to form 5-methylcytosine"
ttgtaattgttaaaatgggaatttgggagtcttttgaatttgaaagaaaaaacaaatgtgcgggattgaggctcagaccctgtacaggcaaagaaaaagttaaaagtgaggaaaatgagaga

SEQ ID NO: 3721 - DNA, 122 bp, Homo sapiens
  misc_feature (61)..(62): /note="This region represents a CpG dinucleotide"
  misc_feature (61)..(61): /note="Nucleotide may be methylated to form 5-methylcytosine"
gaactgaatagaaggtgaactggtaactccctggaaagaaaggccttatcatttatgggacgaatgctgtcaaccttcatggtgtggcataatgtgataagttatggacactaccaagcgtg

SEQ ID NO: 3722 - DNA, 122 bp, Homo sapiens
  misc_feature (61)..(62): /note="This region represents a CpG dinucleotide"
  misc_feature (61)..(61): /note="Nucleotide may be methylated to form 5-methylcytosine"
aaatcctgagcgaattctttgctgccaggacagtccataggctcttactcttagaaattacgtaagcatgagcagtcaacgctgaaaagcagagaatgtggttttctggcggactccagagg

SEQ ID NO: 3723 - DNA, 122 bp, Homo sapiens
  misc_feature (61)..(62): /note="This region represents a CpG dinucleotide"
  misc_feature (61)..(61): /note="Nucleotide may be methylated to form 5-methylcytosine"
ttcattggtttaagtttctttccttgcaagattaaaagtaaccagtggtctgaaacgggacggtggagaaatgacagcagatgatgatcgctgttatttcctgaaagggagtgtgggaacta

SEQ ID NO: 3724 - DNA, 122 bp, Homo sapiens
  misc_feature (61)..(62): /note="This region represents a CpG dinucleotide"
  misc_feature (61)..(61): /note="Nucleotide may be methylated to form 5-methylcytosine"
gtgtataccgcagccattccattctggctaggcataaacaagcgcagtgtcgctccttagcggaggctgaaattcaagagatttctgtcaactgtgaacgtgaaatatcacctgcactggat

SEQ ID NO: 3725 - DNA, 122 bp, Homo sapiens
  misc_feature (61)..(62): /note="This region represents a CpG dinucleotide"
  misc_feature (61)..(61): /note="Nucleotide may be methylated to form 5-methylcytosine"
aacaaattaatcatgccacaagaaacacagtgttgacacagacccacagggagaaaccaacggtgtgtgaactccacacagagaatagctttgcatgctcggttgcagagcatgaatttggc

SEQ ID NO: 3726 - DNA, 122 bp, Homo sapiens
  misc_feature (61)..(62): /note="This region represents a CpG dinucleotide"
  misc_feature (61)..(61): /note="Nucleotide may be methylated to form 5-methylcytosine"
gcaggtctgggctgctttgctgagcagagactggcagcctgagctatgtacatcatccaacgcctgagggtgccactgaagcaatatttcagcggctgggctgggaatgcccatttctctgt

SEQ ID NO: 3727 - DNA, 122 bp, Homo sapiens
  misc_feature (61)..(62): /note="This region represents a CpG dinucleotide"
  misc_feature (61)..(61): /note="Nucleotide may be methylated to form 5-methylcytosine"
ctgcctcagcctcccgagtagctaggactacagaaaatgatcacttttaaatcactccaccgcctgatttctttggggcacactctggcctgtgttctgtacagcaacttttcccctgaggt

SEQ ID NO: 3728 - DNA, 122 bp, Homo sapiens
  misc_feature (61)..(62): /note="This region represents a CpG dinucleotide"
  misc_feature (61)..(61): /note="Nucleotide may be methylated to form 5-methylcytosine"
actcccggaggttccttttgcaataaccactttagtagctccctagagatgtctgtgtcacgtacccaagagctgaagtcagacttcagaaaatgctccttgacgctctactcttctgagta

SEQ ID NO: 3729 - DNA, 122 bp, Homo sapiens
  misc_feature (61)..(62): /note="This region represents a CpG dinucleotide"
  misc_feature (61)..(61): /note="Nucleotide may be methylated to form 5-methylcytosine"
agcacgtcccaggagccacaacctctagccccacccactagcgacgcacagcacaattcgcgacagacacttaccaaccagtaagactggatgagagacagaccagaatgcttgttccaaca

SEQ ID NO: 3730 - DNA, 122 bp, Homo sapiens
  misc_feature (61)..(62): /note="This region represents a CpG dinucleotide"
  misc_feature (61)..(61): /note="Nucleotide may be methylated to form 5-methylcytosine"
cgtgaacttacggccaccccacttccctgcccacttccccatcagcttcaccttgggtcgcggcacatctgttctccagaacatgttccctgccaggaatctgcagggagctcttaagactt

SEQ ID NO: 3731 - DNA, 122 bp, Homo sapiens
  misc_feature (61)..(62): /note="This region represents a CpG dinucleotide"
  misc_feature (61)..(61): /note="Nucleotide may be methylated to form 5-methylcytosine"
tctttttggtgcctggtgcaatgcataatggaggcctgggtgagcagagcagccgcctctcgttgagctaaaattttcattgggtgtttaatgtctttatttcctaatgtcaggaggcctct

SEQ ID NO: 3732 - DNA, 122 bp, Homo sapiens
  misc_feature (61)..(62): /note="This region represents a CpG dinucleotide"
  misc_feature (61)..(61): /note="Nucleotide may be methylated to form 5-methylcytosine"
ggagagtcgcctccagggaaagcaaagtcatagtagatttgaccatgtggaaaatcttatcgagagactttttacagagctgttggtgggtatgaaaaagcttaggtactggtttaaagaaa

SEQ ID NO: 3733 - DNA, 122 bp, Homo sapiens
  misc_feature (61)..(62): /note="This region represents a CpG dinucleotide"
  misc_feature (61)..(61): /note="Nucleotide may be methylated to form 5-methylcytosine"
ctcctccacccctgcttccaggctgtctgcagaccgctgggccgggtttcacagtattggcgtgaatcagcttgccaggcttctaccctttgtgcttggtggtagctaactgacttttttct

SEQ ID NO: 3734 - DNA, 122 bp, Homo sapiens
  misc_feature (61)..(62): /note="This region represents a CpG dinucleotide"
  misc_feature (61)..(61): /note="Nucleotide may be methylated to form 5-methylcytosine"
cagttgtacccaacccctatactgtgctctctcaaataccagaggaagcagaatggttcacggttctggagctcaaggatgcctgcttctgtattcccctgcactctgactcccagtttctc

SEQ ID NO: 3735 - DNA, 122 bp, Homo sapiens
  misc_feature (61)..(62): /note="This region represents a CpG dinucleotide"
  misc_feature (61)..(61): /note="Nucleotide may be methylated to form 5-methylcytosine"
caacaagcttgtaggtcagaagcttcaggttccctttgatggattagctccctgcttggtcggctgtgtaaggtctcaagtctgtgcatagtatttacttaagtcagtgatgtagccacctc

SEQ ID NO: 3736 - DNA, 122 bp, Homo sapiens
  misc_feature (61)..(62): /note="This region represents a CpG dinucleotide"
  misc_feature (61)..(61): /note="Nucleotide may be methylated to form 5-methylcytosine"
atataaaaacaatgacatgctttcatacctttcttgccattgcttaaattcccttatgaccgccccagatatagatcacaccctgacattcttagctactgtgggaatggagacttgaagaa

SEQ ID NO: 3737 - DNA, 122 bp, Homo sapiens
  misc_feature (61)..(62): /note="This region represents a CpG dinucleotide"
  misc_feature (61)..(61): /note="Nucleotide may be methylated to form 5-methylcytosine"
taatgtgcagttaaacttttcagcgcattgtttcccgaaaactccaagctgaattgttctcggttctttgtgaattattaggtcagtgcaaaagtaattgcgggttttgccgttgcttttaa

SEQ ID NO: 3738 - DNA, 122 bp, Homo sapiens
  misc_feature (61)..(62): /note="This region represents a CpG dinucleotide"
  misc_feature (61)..(61): /note="Nucleotide may be methylated to form 5-methylcytosine"
gccgcccccaaagaagagtcggggcaggggcgcccaacgctggggcccaggcaggttcttcgtcctcacttcctgaccctttctcaagagtctagggaccaaatggatccatccttggagcc

SEQ ID NO: 3739 - DNA, 122 bp, Homo sapiens
  misc_feature (61)..(62): /note="This region represents a CpG dinucleotide"
  misc_feature (61)..(61): /note="Nucleotide may be methylated to form 5-methylcytosine"
tggaagaaaaccttgtgtgatggtcatctctagttggtaatctgatataagttgagttgccgacagaacccagctgaggagaatgactggtctaatcccagcatggctttcctgctcccttt

SEQ ID NO: 3740 - DNA, 122 bp, Homo sapiens
  misc_feature (61)..(62): /note="This region represents a CpG dinucleotide"
  misc_feature (61)..(61): /note="Nucleotide may be methylated to form 5-methylcytosine"
tcactatgcagttgacatcgaggccagcctctctggagtttaagaattagctaattcttccgttggaggagagggaagtctgcaatacccactaaaattgcagctgacttcctctttggctt

SEQ ID NO: 3741 - DNA, 122 bp, Homo sapiens
  misc_feature (61)..(62): /note="This region represents a CpG dinucleotide"
  misc_feature (61)..(61): /note="Nucleotide may be methylated to form 5-methylcytosine"
caccaggttcccccagaccccgaggcccccgccagccccagccatgcctccagacactgccggggacccaggagtcccaggcctagtccttccacctgctggactttacactcaagaatttc

SEQ ID NO: 3742 - DNA, 122 bp, Homo sapiens
  misc_feature (61)..(62): /note="This region represents a CpG dinucleotide"
  misc_feature (61)..(61): /note="Nucleotide may be methylated to form 5-methylcytosine"
tgcaatttaacaaatggcttcctcacacaaactataaggttgatacagaatgattgacaacgatgccaacatttgaaaagcagctaagagcttcaaagcctacagtagctgaggccaggagt

SEQ ID NO: 3743 - DNA, 122 bp, Homo sapiens
  misc_feature (61)..(62): /note="This region represents a CpG dinucleotide"
  misc_feature (61)..(61): /note="Nucleotide may be methylated to form 5-methylcytosine"
tgcgctgggtcccttgggggagcgagctggcatcggaggcccttaccccaggaaaagcgccggaaataggttccttgggaagctggggcctgggcccgggcggtccgggtctctggactgct

SEQ ID NO: 3744 - DNA, 122 bp, Homo sapiens
  misc_feature (61)..(62): /note="This region represents a CpG dinucleotide"
  misc_feature (61)..(61): /note="Nucleotide may be methylated to form 5-methylcytosine"
agtgcatattcccggggaggctcccctctgcgcctgtgggcctcgtctcctcgcagcttccggcaagactcacagtagcacaggcttcgctttggcggaggcatgaaataatcttctgcggg

SEQ ID NO: 3745 - DNA, 122 bp, Homo sapiens
  misc_feature (61)..(62): /note="This region represents a CpG dinucleotide"
  misc_feature (61)..(61): /note="Nucleotide may be methylated to form 5-methylcytosine"
gcgccccctgcaggcggcgcgccacaccgctggccctccggcaccgccccctcccggccccgctccgcccgccgccccccggtactgcccaccttcagcccaccccgcagcccccgcgctct

SEQ ID NO: 3746 - DNA, 122 bp, Homo sapiens
  misc_feature (61)..(62): /note="This region represents a CpG dinucleotide"
  misc_feature (61)..(61): /note="Nucleotide may be methylated to form 5-methylcytosine"
ccatatctgttctcacaggagagccataagaggcctgcataagtgcctctgattgtcagacgcatgtaatgaggctcaaaaataataaccagctggagcaatgaatgcaggactgttagtta

SEQ ID NO: 3747 - DNA, 122 bp, Homo sapiens
  misc_feature (61)..(62): /note="This region represents a CpG dinucleotide"
  misc_feature (61)..(61): /note="Nucleotide may be methylated to form 5-methylcytosine"
tgttagtttcttccagtggttcagcggacaattttgaactgaatccagcagagaactcatcggaggttttttgttttttgttttaagtagtagtgataccatttcatccgattccaatgcta

SEQ ID NO: 3748 - DNA, 122 bp, Homo sapiens
  misc_feature (61)..(62): /note="This region represents a CpG dinucleotide"
  misc_feature (61)..(61): /note="Nucleotide may be methylated to form 5-methylcytosine"
caagtttacaaatttgtgttgggctgcatccgtcctgggctgcatgcagcccacgggtggcgggttggacaagcttgcagtagattctagcaatctcagcacacgatttttttttctttcct

SEQ ID NO: 3749 - DNA, 122 bp, Homo sapiens
  misc_feature (61)..(62): /note="This region represents a CpG dinucleotide"
  misc_feature (61)..(61): /note="Nucleotide may be methylated to form 5-methylcytosine"
atgttgtggtggggtcattcagacaggacctgagtgccgctcttcatttggtcctgaattcgggtgtgcggtgaggctgcgcctggcaccccggatccctccacggcttcccccttatctag

SEQ ID NO: 3750 - DNA, 122 bp, Homo sapiens
  misc_feature (61)..(62): /note="This region represents a CpG dinucleotide"
  misc_feature (61)..(61): /note="Nucleotide may be methylated to form 5-methylcytosine"
gccctttcaaacttaatctaacaactattctgagtgctcaggatatgttaggcgctttgacggcactggggctacagtgagaagacacagtcccgatttcttgaagctcacagtctgttgtg

SEQ ID NO: 3751 - DNA, 122 bp, Homo sapiens
  misc_feature (61)..(62): /note="This region represents a CpG dinucleotide"
  misc_feature (61)..(61): /note="Nucleotide may be methylated to form 5-methylcytosine"
atgtttgattccaaagcccacacgttttcctagtttagaaacactaaacatttaattcaccgcaccgggggccagacaggtaatggagaacgccttaagtatgttaggaagggaagttatct

SEQ ID NO: 3752 - DNA, 122 bp, Homo sapiens
  misc_feature (61)..(62): /note="This region represents a CpG dinucleotide"
  misc_feature (61)..(61): /note="Nucleotide may be methylated to form 5-methylcytosine"
gttatttaaccaagtgctagcattaacatagatgagtaaaaattacatttttagcagctgcgttaagaaggaatttaggacttgagcttactcattttctaatggccggtttctaatcagag

SEQ ID NO: 3753 - DNA, 122 bp, Homo sapiens
  misc_feature (61)..(62): /note="This region represents a CpG dinucleotide"
  misc_feature (61)..(61): /note="Nucleotide may be methylated to form 5-methylcytosine"
actttaaagattctttcaaacccctatttagtatttgttcttcgtgggattagaagaattcgatttttcccttggctccataatcttgtgtaatagtacccctatacacaagggatacacac

SEQ ID NO: 3754 - DNA, 122 bp, Homo sapiens
  misc_feature (61)..(62): /note="This region represents a CpG dinucleotide"
  misc_feature (61)..(61): /note="Nucleotide may be methylated to form 5-methylcytosine"
gtttttgttattgttcagtgtttgtattatcatgaccagaagtatttttcacagcaataccgcatttccttttgtggttgtcattagtgctcactgacagatattttgttcttaacttttaa

SEQ ID NO: 3755 - DNA, 122 bp, Homo sapiens
  misc_feature (61)..(62): /note="This region represents a CpG dinucleotide"
  misc_feature (61)..(61): /note="Nucleotide may be methylated to form 5-methylcytosine"
agaactgcaacccgccggtgcactgggaggagtgcgccctggggtggagccacggaagttcgtaccgtttccagcagagaggagcctggcccttcctcttcctgtgtagaacccgggatttt

SEQ ID NO: 3756 - DNA, 122 bp, Homo sapiens
  misc_feature (61)..(62): /note="This region represents a CpG dinucleotide"
  misc_feature (61)..(61): /note="Nucleotide may be methylated to form 5-methylcytosine"
tgggtaacctttctgacgttaatttgtttctccatctgtgtgccatgcattttgggaggacgtgagaaacaggcttgatgccattcaagtgtgtttcccctttttgtattgatggaaacttg

SEQ ID NO: 3757 - DNA, 122 bp, Homo sapiens
  misc_feature (61)..(62): /note="This region represents a CpG dinucleotide"
  misc_feature (61)..(61): /note="Nucleotide may be methylated to form 5-methylcytosine"
cagtgataatctcaatagaagaatctaagagctagaagactcagttggaaacagcagaatcgggccaaataggaacagctccagtctactgctcccggcgtgagcgacacagaagacgaatg

SEQ ID NO: 3758 - DNA, 122 bp, Homo sapiens
  misc_feature (61)..(62): /note="This region represents a CpG dinucleotide"
  misc_feature (61)..(61): /note="Nucleotide may be methylated to form 5-methylcytosine"
ggactaactctttggccagggcatgtaaaatttaacctgaaagactggctcaggccgtgacgggaagtgagggttggacatgcctcattaacattaacacagaccttaagtctgataagaaa

SEQ ID NO: 3759 - DNA, 122 bp, Homo sapiens
  misc_feature (61)..(62): /note="This region represents a CpG dinucleotide"
  misc_feature (61)..(61): /note="Nucleotide may be methylated to form 5-methylcytosine"
cccccatctaagttggccctctctgtgctccatatcattgccccctccttgacttcctttcgcaatttatcacgcgcatatgtatgtgtatgcataaacagatataattttgtttgctcgct

SEQ ID NO: 3760 - DNA, 122 bp, Homo sapiens
  misc_feature (61)..(62): /note="This region represents a CpG dinucleotide"
  misc_feature (61)..(61): /note="Nucleotide may be methylated to form 5-methylcytosine"
cattttattgctgggtagttggggtagatcgccgacacattctgccgacaagtcagactgcggttctgacctgaaggcctcggtgaacataagcaagggcacctgggcgcggggagagccgt

SEQ ID NO: 3761 - DNA, 122 bp, Homo sapiens
  misc_feature (61)..(62): /note="This region represents a CpG dinucleotide"
  misc_feature (61)..(61): /note="Nucleotide may be methylated to form 5-methylcytosine"
gtgaccactactggggccagctctgcttctcttccatagagtgaggatcatcattttactcgaatcacttcagcctaacaaggtatgtcatgcaggaagcagtcagacacagtggttaaaat

SEQ ID NO: 3762 - DNA, 122 bp, Homo sapiens
  misc_feature (61)..(62): /note="This region represents a CpG dinucleotide"
  misc_feature (61)..(61): /note="Nucleotide may be methylated to form 5-methylcytosine"
cctctgacgccaaggagccagccagaaaccagcggtggtgagcacgggctcccccgggagcggtttcctttgtgagcaaggccaggatgggccgcccaggctagctgctcccagagccacaa

SEQ ID NO: 3763 - DNA, 122 bp, Homo sapiens
  misc_feature (61)..(62): /note="This region represents a CpG dinucleotide"
  misc_feature (61)..(61): /note="Nucleotide may be methylated to form 5-methylcytosine"
ttaatagagtgtcagttatccagaactggatcattgaagccccagtcttatcacaaatgacgtttatttgccagtgtcagacttcttcctgtaagccaaattagaatgagttcagttctgtc

SEQ ID NO: 3764 - DNA, 122 bp, Homo sapiens
  misc_feature (61)..(62): /note="This region represents a CpG dinucleotide"
  misc_feature (61)..(61): /note="Nucleotide may be methylated to form 5-methylcytosine"
ccccgccggcgctcagaccacaattgtgggagccgccatcttgagaccgtcccgcttccccgcccagcgccttagtgcagccgccgctcccgaaacagcctcgacacacctaacgaatggag

SEQ ID NO: 3765 - DNA, 122 bp, Homo sapiens
  misc_feature (61)..(62): /note="This region represents a CpG dinucleotide"
  misc_feature (61)..(61): /note="Nucleotide may be methylated to form 5-methylcytosine"
cttccttccgtgaacataaacaaacttccagtgctggcttggatagtggttttccggtcacgaccagaacatgataaaaaggtgaaacacaggctagatggaggaaacatgagcagatgctc

SEQ ID NO: 3766 - DNA, 122 bp, Homo sapiens
  misc_feature (61)..(62): /note="This region represents a CpG dinucleotide"
  misc_feature (61)..(61): /note="Nucleotide may be methylated to form 5-methylcytosine"
cagggcagtgatccatcacagatggttttttgtttctcattgcccagcaggtccatgggacggtatggggcagaaggaccaatcatagctccaagttgtatgtcagaagggcaagaacaaat

SEQ ID NO: 3767 - DNA, 122 bp, Homo sapiens
  misc_feature (61)..(62): /note="This region represents a CpG dinucleotide"
  misc_feature (61)..(61): /note="Nucleotide may be methylated to form 5-methylcytosine"
ttataatctcaaaatcaccatcgtcataatgcactcctaagatttattctttgacactagcgttttgatgtggaagacaaggcatacgcctggaccccaggccagtgtgggttcaaatcacg

SEQ ID NO: 3768 - DNA, 122 bp, Homo sapiens
  misc_feature (61)..(62): /note="This region represents a CpG dinucleotide"
  misc_feature (61)..(61): /note="Nucleotide may be methylated to form 5-methylcytosine"
ctgtgcaacctggaggtctgagggcagctgcagctttcatcagctccagcatcccattgacgtctgtgttgggtgactcagtattgagcagatcctgactgatataacatcattcttctaaa

SEQ ID NO: 3769 - DNA, 122 bp, Homo sapiens
  misc_feature (61)..(62): /note="This region represents a CpG dinucleotide"
  misc_feature (61)..(61): /note="Nucleotide may be methylated to form 5-methylcytosine"
tcttgtctctgcagtagctatgacctgcacataaacctgtttcctacactgtaaaattggcgtaaccaccattccctcccagtctttctctggagtcctaatgggaacagtgacggaatgaa

SEQ ID NO: 3770 - DNA, 122 bp, Homo sapiens
  misc_feature (61)..(62): /note="This region represents a CpG dinucleotide"
  misc_feature (61)..(61): /note="Nucleotide may be methylated to form 5-methylcytosine"
taggtctggggtggtgtctaagaatgtgcttttctaacgagttcccaggtgaggctgatgcggccaacctggggcctacactttgagaaccactggtatgattgtagcatatgaaggaggca

SEQ ID NO: 3771 - DNA, 122 bp, Homo sapiens
  misc_feature (61)..(62): /note="This region represents a CpG dinucleotide"
  misc_feature (61)..(61): /note="Nucleotide may be methylated to form 5-methylcytosine"
cgttgcctggagcctggatttagtaatgaaaactggccagcagaaaggacccagcgggtgcgttccaggtgctccccctggtggggaaatgtccctggacagtaaggaaatcccctgtcttt

SEQ ID NO: 3772 - DNA, 122 bp, Homo sapiens
  misc_feature (61)..(62): /note="This region represents a CpG dinucleotide"
  misc_feature (61)..(61): /note="Nucleotide may be methylated to form 5-methylcytosine"
tgaactcctgaccccaggtgatccgcccgccttggcctctcaaagtgctgggattacaggcgtgagccattgtgcccgagctgagggcagatttcaatcctgcacacattcctttcttccct

SEQ ID NO: 3773 - DNA, 122 bp, Homo sapiens
  misc_feature (61)..(62): /note="This region represents a CpG dinucleotide"
  misc_feature (61)..(61): /note="Nucleotide may be methylated to form 5-methylcytosine"
ccgttcataggaatttgcctgcacacatgtaaaattttctagaaggatatgcacaagcaacgggtaacagtgtttgtctctagggagaaaaaaatgaggagaactggtcactgggataggaa

SEQ ID NO: 3774 - DNA, 122 bp, Homo sapiens
  misc_feature (61)..(62): /note="This region represents a CpG dinucleotide"
  misc_feature (61)..(61): /note="Nucleotide may be methylated to form 5-methylcytosine"
gacttctgcaacacagacgcacaccacattcacagaaaatgaagatgcaggaaagaaccacggggagacagtgctcacccagagaacatgtgcaaggaaaagcattctcctaggcccagaca

SEQ ID NO: 3775 - DNA, 122 bp, Homo sapiens
  misc_feature (61)..(62): /note="This region represents a CpG dinucleotide"
  misc_feature (61)..(61): /note="Nucleotide may be methylated to form 5-methylcytosine"
gggctgccagtgccagtgcccggtcccctgtcaccccccatagtcataggaacgcttctgcgccagtcactacatttataaggggaagctggtggagctgctcagcttccaacaggaagccc

SEQ ID NO: 3776 - DNA, 122 bp, Homo sapiens
  misc_feature (61)..(62): /note="This region represents a CpG dinucleotide"
  misc_feature (61)..(61): /note="Nucleotide may be methylated to form 5-methylcytosine"
tggacatgcagtaaacactctaccaatgatagtctttctcttgtttttgctgttacatgacgtagcatgtacttgatgtggtgtacaggggtatttccccaatccccttcatgatggagagg

SEQ ID NO: 3777 - DNA, 122 bp, Homo sapiens
  misc_feature (61)..(62): /note="This region represents a CpG dinucleotide"
  misc_feature (61)..(61): /note="Nucleotide may be methylated to form 5-methylcytosine"
gggttgtttgcactgtgtccctcttgtaaacaatgtcgggatggacaagtttgtgctgggcgtttccttgtccctttggctggttacctcaggcagactggcccataccagcccttccccgc

SEQ ID NO: 3778 - DNA, 122 bp, Homo sapiens
  misc_feature (61)..(62): /note="This region represents a CpG dinucleotide"
  misc_feature (61)..(61): /note="Nucleotide may be methylated to form 5-methylcytosine"
aggtatggaatttgagaatgtcctttctagagcataagcatgagatctgatcccatcccccgtcccccagtttatcagtagttgagaaggggaacaagaggtagaggaatagataatcaaag

SEQ ID NO: 3779 - DNA, 122 bp, Homo sapiens
  misc_feature (61)..(62): /note="This region represents a CpG dinucleotide"
  misc_feature (61)..(61): /note="Nucleotide may be methylated to form 5-methylcytosine"
gatagagactctttatctacctctttatatgaaatgttaagcaaccacttagagcgtaatcgatcataaccaatcaggtcttgtaactgtttgttagtcttgtgtggaaaatgtaattctgt

SEQ ID NO: 3780 - DNA, 122 bp, Homo sapiens
  misc_feature (61)..(62): /note="This region represents a CpG dinucleotide"
  misc_feature (61)..(61): /note="Nucleotide may be methylated to form 5-methylcytosine"
tagcatgtggccagaagtgatgaatctatgtgaagattttgatggcaggtgatctttgagcgggcatggcagttgcaccacaaaaggtcgaacacattttcacgggaaagttgcctatgtgc

SEQ ID NO: 3781 - DNA, 122 bp, Homo sapiens
  misc_feature (61)..(62): /note="This region represents a CpG dinucleotide"
  misc_feature (61)..(61): /note="Nucleotide may be methylated to form 5-methylcytosine"
ttgctcttgagtgtctggctgtatgtcaacaagtggcctctctgttccttggtttccaggcgctggccatgtggtctgtccaggaaggagagtgtaaatgtgataatattgcctgctacaca

SEQ ID NO: 3782 - DNA, 122 bp, Homo sapiens
  misc_feature (61)..(62): /note="This region represents a CpG dinucleotide"
  misc_feature (61)..(61): /note="Nucleotide may be methylated to form 5-methylcytosine"
cccttcacccagcttttcccaatggcaacatcttacataaccataatatatcagctaaaccgggaaatttactttgatgcaacactatttactaaagctacagaccctactcagatggattc

SEQ ID NO: 3783 - DNA, 122 bp, Homo sapiens
  misc_feature (61)..(62): /note="This region represents a CpG dinucleotide"
  misc_feature (61)..(61): /note="Nucleotide may be methylated to form 5-methylcytosine"
agagcctggctataaccaagcagtttcccagggacaccaacacccacagacagggcacctcgactccagacaccatgtgcctcttgcttcccggattcatggaaacacagagaccagggatg

SEQ ID NO: 3784 - DNA, 122 bp, Homo sapiens
  misc_feature (61)..(62): /note="This region represents a CpG dinucleotide"
  misc_feature (61)..(61): /note="Nucleotide may be methylated to form 5-methylcytosine"
tctagtacagtgagaactcccagatgtgccccttctggtgagaggcaagcttcctgacaacgccatgctgagtgtttgattggccggccagacctgttcataaagcatttcacaaaccgtcc

SEQ ID NO: 3785 - DNA, 122 bp, Homo sapiens
  misc_feature (61)..(62): /note="This region represents a CpG dinucleotide"
  misc_feature (61)..(61): /note="Nucleotide may be methylated to form 5-methylcytosine"
gcctggtaggcagtcagtgtgagctgcagtcactgtcaccaccactgtctttgtcatcatcgccatgatgagttgagaagcactgggagatactcactatgagccactgtcaagtcactgtc

SEQ ID NO: 3786 - DNA, 122 bp, Homo sapiens
  misc_feature (61)..(62): /note="This region represents a CpG dinucleotide"
  misc_feature (61)..(61): /note="Nucleotide may be methylated to form 5-methylcytosine"
agtagcgcgcctgagcctcagggcttagcagcaggttgtacagggcgatccacacttgcccgtccaacttgctcagcttttgctgctctgagggggccacagtatgccaacggctgccctcg

SEQ ID NO: 3787 - DNA, 122 bp, Homo sapiens
  misc_feature (61)..(62): /note="This region represents a CpG dinucleotide"
  misc_feature (61)..(61): /note="Nucleotide may be methylated to form 5-methylcytosine"
gacctgcctggttcctggccctcacagccctctccccaataactagggcaacatgacttccgcttgttgactcaatgctagacccaagccccaggactaatcctgttcccagtctggagaga

SEQ ID NO: 3788 - DNA, 122 bp, Homo sapiens
  misc_feature (61)..(62): /note="This region represents a CpG dinucleotide"
  misc_feature (61)..(61): /note="Nucleotide may be methylated to form 5-methylcytosine"
gacccacagaggccaagcagttattctcaattgttctccacctactacgggaaatgtttccgttcttctacacccaagtccttgttttttggtgagtgttcaattaccagccgaaactcact

SEQ ID NO: 3789 - DNA, 122 bp, Homo sapiens
  misc_feature (61)..(62): /note="This region represents a CpG dinucleotide"
  misc_feature (61)..(61): /note="Nucleotide may be methylated to form 5-methylcytosine"
ctctgcagggaaacagttggctgcctgagggctcattcatggctgtttcccctggaagggcggcgcaggagcccggttctgcagccctgccgacgccgtgtcacagacacagctcttcatgg

SEQ ID NO: 3790 - DNA, 122 bp, Homo sapiens
  misc_feature (61)..(62): /note="This region represents a CpG dinucleotide"
  misc_feature (61)..(61): /note="Nucleotide may be methylated to form 5-methylcytosine"
catctttgttttgattagcattcctgatgactggccatgcagagcatttcttcatataaccgttagtcatttctaaacatatacattcaacaatacaaattacagctacacttatcttttga

SEQ ID NO: 3791 - DNA, 122 bp, Homo sapiens
  misc_feature (61)..(62): /note="This region represents a CpG dinucleotide"
  misc_feature (61)..(61): /note="Nucleotide may be methylated to form 5-methylcytosine"
gcctctcctgtcctttctggtcaaaggtccctgatccctctgtgtgttgcaattgacacacgttttgtccccctctttctctttctaaattattccatgaagacagccacacctcttgctct

SEQ ID NO: 3792 - DNA, 122 bp, Homo sapiens
  misc_feature (61)..(62): /note="This region represents a CpG dinucleotide"
  misc_feature (61)..(61): /note="Nucleotide may be methylated to form 5-methylcytosine"
aaaattgtttgcttaagatatgtcaatagatacctgcagatgtgaaggcttaccaggacacgcaggccatttagagaagagcttcagtatggtttacatttcagcctcagtatttataaaca

SEQ ID NO: 3793 - DNA, 122 bp, Homo sapiens
  misc_feature (61)..(62): /note="This region represents a CpG dinucleotide"
  misc_feature (61)..(61): /note="Nucleotide may be methylated to form 5-methylcytosine"
acattaatatctgagaaataggacatcaggatgatttaggatcaaccctagcaacatctacgtggagacacatggagcatcactgactcccgacagggactctgcccacctgtcacaacttc

SEQ ID NO: 3794 - DNA, 122 bp, Homo sapiens
  misc_feature (61)..(62): /note="This region represents a CpG dinucleotide"
  misc_feature (61)..(61): /note="Nucleotide may be methylated to form 5-methylcytosine"
tgtggttgaaacttgtaaacaaactcagactggtttgtcttccttatcctaagttggtggcgcatctgtttcctttatgggtgatagcagctctttgtcaatcacgtgtcatctgccgtaca

SEQ ID NO: 3795 - DNA, 122 bp, Homo sapiens
  misc_feature (61)..(62): /note="This region represents a CpG dinucleotide"
  misc_feature (61)..(61): /note="Nucleotide may be methylated to form 5-methylcytosine"
acgtcaccatcgtaagaccacaggacccttcccagccgctcctgtatatgacgtcaccgccgtaagaccacaagtcaccgccccagccgctcctgtagatgacgtcaccacagtaagaccac

SEQ ID NO: 3796 - DNA, 122 bp, Homo sapiens
  misc_feature (61)..(62): /note="This region represents a CpG dinucleotide"
  misc_feature (61)..(61): /note="Nucleotide may be methylated to form 5-methylcytosine"
cctcacacagaaacctcttatccagtttgagagaggtgtgtgcatgcatgtatgcacgtgcgtgtgcaggcttgtgtgcgtgcctaatgaaaagcagcttgttcagagttagtcaaaggctt

SEQ ID NO: 3797 - DNA, 122 bp, Homo sapiens
  misc_feature (61)..(62): /note="This region represents a CpG dinucleotide"
  misc_feature (61)..(61): /note="Nucleotide may be methylated to form 5-methylcytosine"
cacccccgctgctgaagacaggttggaagtcagaagaatgttggcaagccctaagtgcagcggcagtcctgctgtgggaactgcaggatgctctctgcagaggacaatggcagcaggaacta

SEQ ID NO: 3798 - DNA, 122 bp, Homo sapiens
  misc_feature (61)..(62): /note="This region represents a CpG dinucleotide"
  misc_feature (61)..(61): /note="Nucleotide may be methylated to form 5-methylcytosine"
ccaagccttccttttattcccttagtcctccatactgctgctctgtgttggcattaatcacgttgtcgtctgcgtgttggatttaccctattgtctctctctgagcctcttgagggcaggaa

SEQ ID NO: 3799 - DNA, 122 bp, Homo sapiens
  misc_feature (61)..(62): /note="This region represents a CpG dinucleotide"
  misc_feature (61)..(61): /note="Nucleotide may be methylated to form 5-methylcytosine"
gtgaaaaagtgcccttgtgccagcagccctgggtaacaaatagggagcttatttcataatcgagacaggaggtaagaagcaagcattcgttccaccatgtcatggttcgcctcctgcagccc

SEQ ID NO: 3800 - DNA, 122 bp, Homo sapiens
  misc_feature (61)..(62): /note="This region represents a CpG dinucleotide"
  misc_feature (61)..(61): /note="Nucleotide may be methylated to form 5-methylcytosine"
tgaagcggctgcagcgcgttctttaactttcccagaaagacctacagtttgtaaagcgcgcgatctcatgcatgtcccagccagcccagcagctggggggtgcagggccacgtccagtctgg

SEQ ID NO: 3801 - DNA, 122 bp, Homo sapiens
  misc_feature (61)..(62): /note="This region represents a CpG dinucleotide"
  misc_feature (61)..(61): /note="Nucleotide may be methylated to form 5-methylcytosine"
tcttttgcatttagatcaactgtgggcattatgtattctgctcctggcaagcctgagcgtcgtcttggttctcatttgtggtgttttattcttggttagaatggatgattgagtgattgcca

SEQ ID NO: 3802 - DNA, 122 bp, Homo sapiens
  misc_feature (61)..(62): /note="This region represents a CpG dinucleotide"
  misc_feature (61)..(61): /note="Nucleotide may be methylated to form 5-methylcytosine"
cttacagagaccacagcctatggagtgtctagcttcagagaatatgtactccactggcagcgtgagaaacaaatacccaagaaaatacaatatagcacaaaccaggagctgagggtgaatga

SEQ ID NO: 3803 - DNA, 122 bp, Homo sapiens
  misc_feature (61)..(62): /note="This region represents a CpG dinucleotide"
  misc_feature (61)..(61): /note="Nucleotide may be methylated to form 5-methylcytosine"
gataatacccccaaactcagtctggctctgcttgactggtcagttatgcagatggtagcccgctttcctctcagaaaccctggctcagtgagagtcccatgctccccgacagccagtgagga

SEQ ID NO: 3804 - DNA, 122 bp, Homo sapiens
  misc_feature (61)..(62): /note="This region represents a CpG dinucleotide"
  misc_feature (61)..(61): /note="Nucleotide may be methylated to form 5-methylcytosine"
acttctctttccttctgaagaggaaatgacttcctatagttagctgaccaggagttagcacgcatcccgcctggagctaggacctggagcaaatacccggagcccacccaaatgagaccaaa

SEQ ID NO: 3805 - DNA, 122 bp, Homo sapiens
  misc_feature (61)..(62): /note="This region represents a CpG dinucleotide"
  misc_feature (61)..(61): /note="Nucleotide may be methylated to form 5-methylcytosine"
tcattttgtgtgttctgtgtgtcactctgggagacctgctttacctgataagaagcagaacgcagctgttgactgcaggatctggaatcatcctgcttgggttcaaatctgatcattacact

SEQ ID NO: 3806 - DNA, 122 bp, Homo sapiens
  misc_feature (61)..(62): /note="This region represents a CpG dinucleotide"
  misc_feature (61)..(61): /note="Nucleotide may be methylated to form 5-methylcytosine"
atatgccaacccacagtcactggcaatagttaccctgaactgtgaaaaggaacaaggtaacgagaggcaccaactcagcaggaaatgtaaacgtctacttgggaacacgatcaacactcatg

SEQ ID NO: 3807 - DNA, 122 bp, Homo sapiens
  misc_feature (61)..(62): /note="This region represents a CpG dinucleotide"
  misc_feature (61)..(61): /note="Nucleotide may be methylated to form 5-methylcytosine"
gttgaatacaggaaaacactaaacacaaaacttctctagttgggagagagaagggagggacggcaccacagaaaatcagaccagagaaagtagagtctatacaacccccttaatttacaaat

SEQ ID NO: 3808 - DNA, 122 bp, Homo sapiens
  misc_feature (61)..(62): /note="This region represents a CpG dinucleotide"
  misc_feature (61)..(61): /note="Nucleotide may be methylated to form 5-methylcytosine"
attgctagctcctgctaatgcctgcattgctgctgcaaaggatattcagaaaaagttgctcgtcagaaaaagaattcatgctagctctggccctgctgctgatgcattgtgtgaaacccttg

SEQ ID NO: 3809 - DNA, 122 bp, Homo sapiens
  misc_feature (61)..(62): /note="This region represents a CpG dinucleotide"
  misc_feature (61)..(61): /note="Nucleotide may be methylated to form 5-methylcytosine"
caaaccatccacgagaaggacacaggtgggaagaaggaggcagtgagtcacgatttactacgaggcaggccagacacagtagctcaaacctataatcccagcatgttgggaggccgaggcgg

SEQ ID NO: 3810 - DNA, 122 bp, Homo sapiens
  misc_feature (61)..(62): /note="This region represents a CpG dinucleotide"
  misc_feature (61)..(61): /note="Nucleotide may be methylated to form 5-methylcytosine"
gaggggccggggcggagctaagatgcggaggagggtgacgcactagctctccagttcgcccgttcctggcctgacccccaccaaggcccataccgcagtaggctcctcgggctgcccctcgg

SEQ ID NO: 3811 - DNA, 122 bp, Homo sapiens
  misc_feature (61)..(62): /note="This region represents a CpG dinucleotide"
  misc_feature (61)..(61): /note="Nucleotide may be methylated to form 5-methylcytosine"
tcgaagggtggtgactgtggctcctgcatctgcatcaacatattccagcacagggattagcgtaccagagatgtcaaacaaatatttgctaaacaaatgacaaagagttcaagactgccaat

SEQ ID NO: 3812 - DNA, 122 bp, Homo sapiens
  misc_feature (61)..(62): /note="This region represents a CpG dinucleotide"
  misc_feature (61)..(61): /note="Nucleotide may be methylated to form 5-methylcytosine"
catgatggccaaggtcgtccctgatggcgtccagttggtcctgaaggaggcggatgcgctcgtccaggttgcgctgctgggccaggacggcggccttgcccgccagcagggcgcaatagacg

SEQ ID NO: 3813 - DNA, 122 bp, Homo sapiens
  misc_feature (61)..(62): /note="This region represents a CpG dinucleotide"
  misc_feature (61)..(61): /note="Nucleotide may be methylated to form 5-methylcytosine"
ccctgcatcctggtgggtccaggcactggcattgcccccttccggggattctggcaggagcggctgcatgacattgagagcaaaggtgaggctggggactaaaggactgcctgaagggagtc

SEQ ID NO: 3814 - DNA, 122 bp, Homo sapiens
  misc_feature (61)..(62): /note="This region represents a CpG dinucleotide"
  misc_feature (61)..(61): /note="Nucleotide may be methylated to form 5-methylcytosine"
cagctgcttctttcccagaatcttcagccaagactgtcaggcaggatgtgatctttcaggcgaaggagagttaagagtccatgctcagttcttgccataaatctccaggaactctgctttga

SEQ ID NO: 3815 - DNA, 122 bp, Homo sapiens
  misc_feature (61)..(62): /note="This region represents a CpG dinucleotide"
  misc_feature (61)..(61): /note="Nucleotide may be methylated to form 5-methylcytosine"
cacatcagtcagatgtcaaaaggcagcacgtaaattgaataagggaaggaaaatgccgggcggcctcattcacgtccggcatgttccgctattattgaaaggaaattgagaaattagacagt

SEQ ID NO: 3816 - DNA, 122 bp, Homo sapiens
  misc_feature (61)..(62): /note="This region represents a CpG dinucleotide"
  misc_feature (61)..(61): /note="Nucleotide may be methylated to form 5-methylcytosine"
ttagtgagttattgaggatgcagtgacaaggaaaacataagacactgtgcaatcgctgtccgagcccctttattctgaaggctcctagggcacatacgaacaggatacagaaagccactgtg

SEQ ID NO: 3817 - DNA, 122 bp, Homo sapiens
  misc_feature (61)..(62): /note="This region represents a CpG dinucleotide"
  misc_feature (61)..(61): /note="Nucleotide may be methylated to form 5-methylcytosine"
cagtggcttcactccaaccttcactcaggcagaaccttttacaaaagtgcagaatcattccgctgggaaaggtgccattcactaatggatgttttcacatcctcttctcctcttagttaaca

SEQ ID NO: 3818 - DNA, 122 bp, Homo sapiens
  misc_feature (61)..(62): /note="This region represents a CpG dinucleotide"
  misc_feature (61)..(61): /note="Nucleotide may be methylated to form 5-methylcytosine"
ttaatgctctggcaaaatgcaaatttttttcttagtttaggttttgctgtggtctgaaaacgccctataaataaaagaacagagaccaggggtctagttcagactaagcctttaacgtttta

SEQ ID NO: 3819 - DNA, 122 bp, Homo sapiens
  misc_feature (61)..(62): /note="This region represents a CpG dinucleotide"
  misc_feature (61)..(61): /note="Nucleotide may be methylated to form 5-methylcytosine"
gaggccccatgctggctccactcggcctctgcagccctctcttcccaccagttgcctcctcggatccttccggtgcagcttctaggctgctcttggcctgagtccaaagccgactggccctg

SEQ ID NO: 3820 - DNA, 122 bp, Homo sapiens
  misc_feature (61)..(62): /note="This region represents a CpG dinucleotide"
  misc_feature (61)..(61): /note="Nucleotide may be methylated to form 5-methylcytosine"
cttgccatgtctctctagcgccctctactgagaagctttgcatcgtgctcactcgaaaaacgctgaaaggaattctgtggtttaatcacagagcatgttttgaagggtaaattgggagctga

SEQ ID NO: 3821 - DNA, 122 bp, Homo sapiens
  misc_feature (61)..(62): /note="This region represents a CpG dinucleotide"
  misc_feature (61)..(61): /note="Nucleotide may be methylated to form 5-methylcytosine"
ctgcatctccacaatgtttgtgcttctctctcctccctccacgcctgcccccaaccggagcgtaagcaccaagggatgagggaatgtggcttttcctcattgcattctcagtgctcagaaca

SEQ ID NO: 3822 - DNA, 122 bp, Homo sapiens
  misc_feature (61)..(62): /note="This region represents a CpG dinucleotide"
  misc_feature (61)..(61): /note="Nucleotide may be methylated to form 5-methylcytosine"
tacctctgtgaactccctaactgtggttcttggcttcaagttttaggccaagctggggagcgtgatggataatacttgtcaaaagttgcctatttactaccatagtttctgcactaagacct

SEQ ID NO: 3823 - DNA, 122 bp, Homo sapiens
  misc_feature (61)..(62): /note="This region represents a CpG dinucleotide"
  misc_feature (61)..(61): /note="Nucleotide may be methylated to form 5-methylcytosine"
agagataaaaggctgttactttgtatcagcaaggcgtctttttctgcaggactgagttcacgaaaggggaaggcggtgggcgggggagtagaaggaagcgggggccgttaatagactttgga

SEQ ID NO: 3824 - DNA, 122 bp, Homo sapiens
  misc_feature (61)..(62): /note="This region represents a CpG dinucleotide"
  misc_feature (61)..(61): /note="Nucleotide may be methylated to form 5-methylcytosine"
ccaagacataagctactgttataatacataattagtgtatgcactcccaagaagggaagtcgaatctaatttgtaaaagactgatttcctcatatcgctgtagatgacagcactctttgtaa

SEQ ID NO: 3825 - DNA, 122 bp, Homo sapiens
  misc_feature (61)..(62): /note="This region represents a CpG dinucleotide"
  misc_feature (61)..(61): /note="Nucleotide may be methylated to form 5-methylcytosine"
tggagcctttcactctgcacttcaggaggtctgacagggtcactagtacttcaagattcccgtccctatttctgtcttaagcatgttcgttttataccctgttatgagatgttctttgattc

SEQ ID NO: 3826 - DNA, 122 bp, Homo sapiens
  misc_feature (61)..(62): /note="This region represents a CpG dinucleotide"
  misc_feature (61)..(61): /note="Nucleotide may be methylated to form 5-methylcytosine"
caggcagggccgtgagccgggcgagggagagtcctgggctgcccctgagccccggggccacgggaagaacttgcagcgacgtcatccctgccccggacacagtcccgggcccagggaggacc

SEQ ID NO: 3827 - DNA, 122 bp, Homo sapiens
  misc_feature (61)..(62): /note="This region represents a CpG dinucleotide"
  misc_feature (61)..(61): /note="Nucleotide may be methylated to form 5-methylcytosine"
ccacttccagaattgtgcaacaggtgacctccaggataactatggcttatcttacagcaacgtagttcatctaggatagaaaattgtacctttatccctggtaccttctgactacagatgac

SEQ ID NO: 3828 - DNA, 122 bp, Homo sapiens
  misc_feature (61)..(62): /note="This region represents a CpG dinucleotide"
  misc_feature (61)..(61): /note="Nucleotide may be methylated to form 5-methylcytosine"
ccctaaggtgttatcagcatcgtgaacagacagactggtgcccacagagctgacacacaacgtggcaacagtggaagaaacaacatgccatgtagctttacagaggatacaagtatttctaa

SEQ ID NO: 3829 - DNA, 122 bp, Homo sapiens
  misc_feature (61)..(62): /note="This region represents a CpG dinucleotide"
  misc_feature (61)..(61): /note="Nucleotide may be methylated to form 5-methylcytosine"
agagtttacaaccctctagcacaaaggtgcatctcaactcatgtgcctgtcagaagtgcacgccctgccaacgggaggcagaaatctcacctatgctccagggcaggtgggaagggcggctg

SEQ ID NO: 3830 - DNA, 122 bp, Homo sapiens
  misc_feature (61)..(62): /note="This region represents a CpG dinucleotide"
  misc_feature (61)..(61): /note="Nucleotide may be methylated to form 5-methylcytosine"
aagcagcaaacttggccctgtcaaatttagttttcatgtgcttgactctctcactggtagcgccaagggtgaagaggatgttatttcacatataacttaacactttacttgctctgtttccc

SEQ ID NO: 3831 - DNA, 122 bp, Homo sapiens
  misc_feature (61)..(62): /note="This region represents a CpG dinucleotide"
  misc_feature (61)..(61): /note="Nucleotide may be methylated to form 5-methylcytosine"
cttcagtttgtcaaagtggacaaagcctacgacaactgccagtaccagctactaggcatccgcagtctttccagttggtggtactggaggtccctacccaggatttccgtggattccaaggg

SEQ ID NO: 3832 - DNA, 122 bp, Homo sapiens
  misc_feature (61)..(62): /note="This region represents a CpG dinucleotide"
  misc_feature (61)..(61): /note="Nucleotide may be methylated to form 5-methylcytosine"
cttaagaactgtcttctttcactgaacatcccatggctggaagagttaaatcagaagcaacggtggaggaaagggggcagaatcttaaatagtatcagaaaatgatttaagacttttatcac

SEQ ID NO: 3833 - DNA, 122 bp, Homo sapiens
  misc_feature (61)..(62): /note="This region represents a CpG dinucleotide"
  misc_feature (61)..(61): /note="Nucleotide may be methylated to form 5-methylcytosine"
aaagtcatttaacaccaggacccttgttttcttatctgtaacatggagatgctggtaactcgtgcctcataaaatcacttgatgtgggtgagagagaaagctaagtgttgatgacagtgtgg

SEQ ID NO: 3834 - DNA, 122 bp, Homo sapiens
  misc_feature (61)..(62): /note="This region represents a CpG dinucleotide"
  misc_feature (61)..(61): /note="Nucleotide may be methylated to form 5-methylcytosine"
ctctgatcatccccaggacaagaatagcattatcctgtgttgatattcaaatatgtactccgtgtgagtgctctgaatagctgagagcatcttgcaaacttcagtaagaatgggacaaacac

SEQ ID NO: 3835 - DNA, 122 bp, Homo sapiens
  misc_feature (61)..(62): /note="This region represents a CpG dinucleotide"
  misc_feature (61)..(61): /note="Nucleotide may be methylated to form 5-methylcytosine"
actaagacaagagatctcttgggatgtcttcagatcatgagggctaaacatgactcagaccggaaggttagtgtttaccaagacccttcttacagctggggaaaatgaaggcaaattaagtt

SEQ ID NO: 3836 - DNA, 122 bp, Homo sapiens
  misc_feature (61)..(62): /note="This region represents a CpG dinucleotide"
  misc_feature (61)..(61): /note="Nucleotide may be methylated to form 5-methylcytosine"
agttgtggagccacttgtagaactgatcagcctggacttgttctgatcagagcccagtgacgtgtttgctccgcaccagccatgcccagtacacctctgtgttgacgatacctggtttggtt

SEQ ID NO: 3837 - DNA, 122 bp, Homo sapiens
  misc_feature (61)..(62): /note="This region represents a CpG dinucleotide"
  misc_feature (61)..(61): /note="Nucleotide may be methylated to form 5-methylcytosine"
gttctgttgcccaggctggagtacagtccccatctcggattctgggatcactgcaatctccgccgcccgggttcaagcgattctccatgttggctggtctcgaactcctgacctcaggttat

SEQ ID NO: 3838 - DNA, 122 bp, Homo sapiens
  misc_feature (61)..(62): /note="This region represents a CpG dinucleotide"
  misc_feature (61)..(61): /note="Nucleotide may be methylated to form 5-methylcytosine"
gcaataaagatcgtgactgagaatattgttcacgattaatgacaggctgggggccgaaaacgcacagctgacggccaggaagcccagttggtaagaaccctgccaagcatcccccacaaggc

SEQ ID NO: 3839 - DNA, 122 bp, Homo sapiens
  misc_feature (61)..(62): /note="This region represents a CpG dinucleotide"
  misc_feature (61)..(61): /note="Nucleotide may be methylated to form 5-methylcytosine"
tacggaaagaagtttccccactgagttaatctgcagtggctggaggtgaccttctggagacggcgattaatcacgggccgtggcgggcgccgcgccacgccgggccctttgggggaatacta

SEQ ID NO: 3840 - DNA, 122 bp, Homo sapiens
  misc_feature (61)..(62): /note="This region represents a CpG dinucleotide"
  misc_feature (61)..(61): /note="Nucleotide may be methylated to form 5-methylcytosine"
agcaagtgggaaagacctgagcaagaagagctgcatccttgatacattgaagagcagccacgactctttcagctgcttgagagaatgctgtgagatgaatctgaggaattaggcagagcctt

SEQ ID NO: 3841 - DNA, 122 bp, Homo sapiens
  misc_feature (61)..(62): /note="This region represents a CpG dinucleotide"
  misc_feature (61)..(61): /note="Nucleotide may be methylated to form 5-methylcytosine"
gacagcccggagattagtctccaaggccacaacgccagttgccataggcacgcaggcccgcgtcaggactgcgatttctcatcctggtcacgcaggcaggcggccgcccctgcccgcctgcc

SEQ ID NO: 3842 - DNA, 122 bp, Homo sapiens
  misc_feature (61)..(62): /note="This region represents a CpG dinucleotide"
  misc_feature (61)..(61): /note="Nucleotide may be methylated to form 5-methylcytosine"
caaaataggagagagtgggatgaactatacaagtgctgcaaggaaaaaaatgccaaccaacgctttacctggcaaatctgttcctcagaaatgaaggagagagaagaactttcctagacaaa

SEQ ID NO: 3843 - DNA, 122 bp, Homo sapiens
  misc_feature (61)..(62): /note="This region represents a CpG dinucleotide"
  misc_feature (61)..(61): /note="Nucleotide may be methylated to form 5-methylcytosine"
gaaaaggaagtccggattcccacagcctgggcctcagctggctgcagtcagtcaatagctcgcaaagcaagggggaggagaaggaagagaaattgtagtcgagggcggggtctgggggccgg

SEQ ID NO: 3844 - DNA, 122 bp, Homo sapiens
  misc_feature (61)..(62): /note="This region represents a CpG dinucleotide"
  misc_feature (61)..(61): /note="Nucleotide may be methylated to form 5-methylcytosine"
tgctcctgagagaagcctggtccatctagtgagaattgaccttatctcactttctctccccgccagggtctgggatccccaaggcctgggcaggcatagacttgaaggtacaaccccaggaa

SEQ ID NO: 3845 - DNA, 122 bp, Homo sapiens
  misc_feature (61)..(62): /note="This region represents a CpG dinucleotide"
  misc_feature (61)..(61): /note="Nucleotide may be methylated to form 5-methylcytosine"
ctactgcctggtgattcgcaccacagccccagcctcagcagccccaagatactctgcaggcgcatcccactgtctcctgagggcaggtctcaacacaaacataaatcctagtccacccctcc

SEQ ID NO: 3846 - DNA, 122 bp, Homo sapiens
  misc_feature (61)..(62): /note="This region represents a CpG dinucleotide"
  misc_feature (61)..(61): /note="Nucleotide may be methylated to form 5-methylcytosine"
gggcggggaaagagggggaggtttgctactttccataaaactaaaaggtcccttcgagggcggtattcttataagtgtgtgttctcagtttgccgaacctactgtgttttccaagggcttct

SEQ ID NO: 3847 - DNA, 122 bp, Homo sapiens
  misc_feature (61)..(62): /note="This region represents a CpG dinucleotide"
  misc_feature (61)..(61): /note="Nucleotide may be methylated to form 5-methylcytosine"
ttctaagtttctgaatttccagtcaaaccatctgctgctgaccacaaatcagtgtggattcgtatttatagccatcactcctttgacacaaaatgtgcagtcatgtacactgcttcgagtgt

SEQ ID NO: 3848 - DNA, 122 bp, Homo sapiens
  misc_feature (61)..(62): /note="This region represents a CpG dinucleotide"
  misc_feature (61)..(61): /note="Nucleotide may be methylated to form 5-methylcytosine"
gccccgagagggaggaggcgtggtctgtggctcgaggggcgtggcccgtagcggaaaaggcgtggcccagctcaggagcctggcgggcaagctcctccctgtgcgcggcgctgtgcggcgtg

SEQ ID NO: 3849 - DNA, 122 bp, Homo sapiens
  misc_feature (61)..(62): /note="This region represents a CpG dinucleotide"
  misc_feature (61)..(61): /note="Nucleotide may be methylated to form 5-methylcytosine"
ccatcagactcacacccctgagctaacctgcacccaggccttcctggcagtacagactcacgctcaggacagtgtttcatgcctgtctttctaaggagtttctgtaggatttcaacatgtga

SEQ ID NO: 3850 - DNA, 122 bp, Homo sapiens
  misc_feature (61)..(62): /note="This region represents a CpG dinucleotide"
  misc_feature (61)..(61): /note="Nucleotide may be methylated to form 5-methylcytosine"
acacaaaaatcctccaacaaatcctgacatagaaaactgtgttttcttagcagatgtgatcgtatagttttgtaacctcattactattataaatgtaaataattctcatactttctcacctc

SEQ ID NO: 3851 - DNA, 122 bp, Homo sapiens
  misc_feature (61)..(62): /note="This region represents a CpG dinucleotide"
  misc_feature (61)..(61): /note="Nucleotide may be methylated to form 5-methylcytosine"
gaatgtattacagttttgcccaagaaaccacaaacgttggaaacactcaagtttctttctcgtatacatcagctggtgtcatgcaatgggacatacatctgacgcttccctgttcttccctg

SEQ ID NO: 3852 - DNA, 122 bp, Homo sapiens
  misc_feature (61)..(62): /note="This region represents a CpG dinucleotide"
  misc_feature (61)..(61): /note="Nucleotide may be methylated to form 5-methylcytosine"
atttgtccatctaattctaggcaataataaacaaagcagggttctgttttacagactgcacgactaagtcatccttttggctgatggaaagacccagggtttaaaatgactcagcaaaaagc

SEQ ID NO: 3853 - DNA, 122 bp, Homo sapiens
  misc_feature (61)..(62): /note="This region represents a CpG dinucleotide"
  misc_feature (61)..(61): /note="Nucleotide may be methylated to form 5-methylcytosine"
gtaagttccccccagtagtaggagaatgtggtagcttgagctagagaagttgcctctttccggcagtggtcctcacccggtgagtcacagacactctgtgacactctggtcacaggcagctg

SEQ ID NO: 3854 - DNA, 122 bp, Homo sapiens
  misc_feature (61)..(62): /note="This region represents a CpG dinucleotide"
  misc_feature (61)..(61): /note="Nucleotide may be methylated to form 5-methylcytosine"
ccagaccttttttgaaagggggtttaaccttttaaagacacagtacaccaattatcacttcggaatagctgtcactcccagcgcaggaagccagtcccatgcctaaaggcacagtaggcttg

SEQ ID NO: 3855 - DNA, 122 bp, Homo sapiens
  misc_feature (61)..(62): /note="This region represents a CpG dinucleotide"
  misc_feature (61)..(61): /note="Nucleotide may be methylated to form 5-methylcytosine"
tggctattttcaagctgctggctagctggctgggttgaagggacttcctgttcacctcctcggtcaaggtagcatgagtgaatggttcagtttcattcaccccagcagggggatagctggca

SEQ ID NO: 3856 - DNA, 122 bp, Homo sapiens
  misc_feature (61)..(62): /note="This region represents a CpG dinucleotide"
  misc_feature (61)..(61): /note="Nucleotide may be methylated to form 5-methylcytosine"
ttggtcatttacctctgtttattttccctttccagacatcaggtattgtctgcattccagcgcccacacaaaagtaatatctccccaattaaggctacagtgtctctgattgttgctaaggt

SEQ ID NO: 3857 - DNA, 122 bp, Homo sapiens
  misc_feature (61)..(62): /note="This region represents a CpG dinucleotide"
  misc_feature (61)..(61): /note="Nucleotide may be methylated to form 5-methylcytosine"
tacttcaagtttggccttgtgttaaactggctgtgtgactccaggcaggctatacaacctcgctgagctatttcctcatctggacaacttatttcatgcacttcacaggcttgttgctggga

SEQ ID NO: 3858 - DNA, 122 bp, Homo sapiens
  misc_feature (61)..(62): /note="This region represents a CpG dinucleotide"
  misc_feature (61)..(61): /note="Nucleotide may be methylated to form 5-methylcytosine"
ttttctgattttctgagggctcttcctgtagagcattttctttcagcaggctcctttgttcgtttttatgagttaaatccaagtcgcaaataaatggatctgtcatcatttctcagaatgtg

SEQ ID NO: 3859 - DNA, 122 bp, Homo sapiens
  misc_feature (61)..(62): /note="This region represents a CpG dinucleotide"
  misc_feature (61)..(61): /note="Nucleotide may be methylated to form 5-methylcytosine"
ctgaagcctgtacccaaacctgcagttgaggttccagccaaaccccacagtgggagcttacgtaggcagagatgtagcctagttttcatctgcatatgcaagtgataaataaatgtataaac

SEQ ID NO: 3860 - DNA, 122 bp, Homo sapiens
  misc_feature (61)..(62): /note="This region represents a CpG dinucleotide"
  misc_feature (61)..(61): /note="Nucleotide may be methylated to form 5-methylcytosine"
tgtgatctgattggtgggccccttacccaatcttgagagatcatcaaaggcttcctgaagcgtcacctgagtttaaccaggaaggatgagtgggagttaatggcaaggcggcaggaaacgcc

SEQ ID NO: 3861 - DNA, 122 bp, Homo sapiens
  misc_feature (61)..(62): /note="This region represents a CpG dinucleotide"
  misc_feature (61)..(61): /note="Nucleotide may be methylated to form 5-methylcytosine"
taatgccattttcaaacctaaagtaatagtgatacggagacggggaaatgaatgatacctcgctctgacctttgaccataagccctaactctggatagctggccccaccacacacataatcg

SEQ ID NO: 3862 - DNA, 122 bp, Homo sapiens
  misc_feature (61)..(62): /note="This region represents a CpG dinucleotide"
  misc_feature (61)..(61): /note="Nucleotide may be methylated to form 5-methylcytosine"
gagcatggcctgagtctgtgtctgtttatgcccatgtccctggtacagtgcatgctaacacgtgcctctgtacatttgtatagtgggtgcacatgtgtccaggtgtgtgtgtgagtgtgtgt

SEQ ID NO: 3863 - DNA, 122 bp, Homo sapiens
  misc_feature (61)..(62): /note="This region represents a CpG dinucleotide"
  misc_feature (61)..(61): /note="Nucleotide may be methylated to form 5-methylcytosine"
attacatgagttctggaaaaggacctcagaaatggtatcatttaacaatctccacttgaacgcttatgttactcactatattaaaaattatggtgcttgtttcaggagcacacagactaaaa

SEQ ID NO: 3864 - DNA, 122 bp, Homo sapiens
  misc_feature (61)..(62): /note="This region represents a CpG dinucleotide"
  misc_feature (61)..(61): /note="Nucleotide may be methylated to form 5-methylcytosine"
ctatattagggctttgttgctgacaacagtgaaaacttgtttgtgtcaggaagtgaggtacggagatatgacctggaaggtacagacaaaaccaaagtggcagtttttgcattacttttctg

SEQ ID NO: 3865 - DNA, 122 bp, Homo sapiens
  misc_feature (61)..(62): /note="This region represents a CpG dinucleotide"
  misc_feature (61)..(61): /note="Nucleotide may be methylated to form 5-methylcytosine"
tcaagcttttaggagctgtcagaggtcacagcaggggctcagcccctggtcctgtggcagcgctgggggcccctgcgcacccagctcctcagccacagccatggcctcacacagtgccctct

SEQ ID NO: 3866 - DNA, 122 bp, Homo sapiens
  misc_feature (61)..(62): /note="This region represents a CpG dinucleotide"
  misc_feature (61)..(61): /note="Nucleotide may be methylated to form 5-methylcytosine"
aaataaaaataaaacaaaacagaaaccaaaccaaccaaacaaaaagattatagtctatagcggaagaccagacattgttaaatagaggttaagttctaatcactttgcttaaattgttaggt

SEQ ID NO: 3867 - DNA, 122 bp, Homo sapiens
  misc_feature (61)..(62): /note="This region represents a CpG dinucleotide"
  misc_feature (61)..(61): /note="Nucleotide may be methylated to form 5-methylcytosine"
cctcctcagtaagcctcaagtgaactctgatgccctctcatggattctctctgcaggagacgtgtctccaggtgtctgcctgtctgctttgatatctggtgctatgagatcctggttttaga

SEQ ID NO: 3868 - DNA, 122 bp, Homo sapiens
  misc_feature (61)..(62): /note="This region represents a CpG dinucleotide"
  misc_feature (61)..(61): /note="Nucleotide may be methylated to form 5-methylcytosine"
tccttcacccccatcttcttctgtcctcataccaaccctgtatggagaggccacttttgtcgatatttacaaatgagaaaactaaagctggtagggggtctgctcaaggtctcacacctgga

SEQ ID NO: 3869 - DNA, 122 bp, Homo sapiens
  misc_feature (61)..(62): /note="This region represents a CpG dinucleotide"
  misc_feature (61)..(61): /note="Nucleotide may be methylated to form 5-methylcytosine"
cagactgagcctccccatctgggtttatccttttttaaaagtgtgtaaattttagtgtcccgaagtacttctcatttgtctgacttcaaagaacagctgtgccacctgctggctgtgtgctc

SEQ ID NO: 3870 - DNA, 122 bp, Homo sapiens
  misc_feature (61)..(62): /note="This region represents a CpG dinucleotide"
  misc_feature (61)..(61): /note="Nucleotide may be methylated to form 5-methylcytosine"
gcacacccacccagagtatcgtctgaaccaacagaaggaaccataagtcactccagtcatcgacttcagacagtagagcccaggaagcaagaagatctgcaacccaagtgctttttttctat

SEQ ID NO: 3871 - DNA, 122 bp, Homo sapiens
  misc_feature (61)..(62): /note="This region represents a CpG dinucleotide"
  misc_feature (61)..(61): /note="Nucleotide may be methylated to form 5-methylcytosine"
ttgatgggattctggccaaggtccccgagtcctgtgatggcaaactgccggacagccagccgccggggccctccacgtcccagaccgaggcgtccctgtcgccgcccgctaagtccacccct

SEQ ID NO: 3872 - DNA, 122 bp, Homo sapiens
  misc_feature (61)..(62): /note="This region represents a CpG dinucleotide"
  misc_feature (61)..(61): /note="Nucleotide may be methylated to form 5-methylcytosine"
atttactcttagatccggcctatggtttgttgttttgagccagggtttcactctgttgcccgggctggagggcagtggcatgatcacggctcactgcagcctcaacctccccaggctcaggt

SEQ ID NO: 3873 - DNA, 122 bp, Homo sapiens
  misc_feature (61)..(62): /note="This region represents a CpG dinucleotide"
  misc_feature (61)..(61): /note="Nucleotide may be methylated to form 5-methylcytosine"
acactgcgactccaagtggtcgttactagttcacaatcaagtagctctcgttcatcttctcgttcatcttcaactctatgattaactgcaaaatgttctgctcattttgactagagtcttga

SEQ ID NO: 3874 - DNA, 122 bp, Homo sapiens
  misc_feature (61)..(62): /note="This region represents a CpG dinucleotide"
  misc_feature (61)..(61): /note="Nucleotide may be methylated to form 5-methylcytosine"
gaactggcttccctggcaaccagccccacatcctgtggtttctaggggtttttcaaaaatcgccttattaacataagctcagatgtgttgaaagggcttgctgtaaatcacagaagactctt

SEQ ID NO: 3875 - DNA, 122 bp, Homo sapiens
  misc_feature (61)..(62): /note="This region represents a CpG dinucleotide"
  misc_feature (61)..(61): /note="Nucleotide may be methylated to form 5-methylcytosine"
tcatcttcccttctctttgtcagccacgtgtacagtaaggagcagataacatggcaccagcgaggcaaagatcccatttgcataagattagggcgagccatccagcttccccatgtgctatg

SEQ ID NO: 3876 - DNA, 122 bp, Homo sapiens
  misc_feature (61)..(62): /note="This region represents a CpG dinucleotide"
  misc_feature (61)..(61): /note="Nucleotide may be methylated to form 5-methylcytosine"
cacagcagagagggcaggcagagctcattcaatgagcacacgttagaattcttggccaggcgcagtggctcacgcctgtaatccccaactctttgggaggccgaggcaggcagatcaggagg

SEQ ID NO: 3877 - DNA, 122 bp, Homo sapiens
  misc_feature (61)..(62): /note="This region represents a CpG dinucleotide"
  misc_feature (61)..(61): /note="Nucleotide may be methylated to form 5-methylcytosine"
taatttcgggctcaggggagaaatggaagtcaaagaatctcataaacacagctgcgatgacgaaccctttcacgggaaggaacatgcgagcccagaaaagtctctcctggtcttgggatgga

SEQ ID NO: 3878 - DNA, 122 bp, Homo sapiens
  misc_feature (61)..(62): /note="This region represents a CpG dinucleotide"
  misc_feature (61)..(61): /note="Nucleotide may be methylated to form 5-methylcytosine"
acaaactgtccattgtatgcctgtcctagagggcctttgctttctggaacttttaaaagtcgattcaaggactgatgcaaggacaaggcttacctattcctaacagacctaactgtgaaaga

SEQ ID NO: 3879 - DNA, 122 bp, Homo sapiens
  misc_feature (61)..(62): /note="This region represents a CpG dinucleotide"
  misc_feature (61)..(61): /note="Nucleotide may be methylated to form 5-methylcytosine"
gaggaaaggcagtggctggggagatggttaggaggaagttcagttccttgaccccacaatcgcatttgttccccatatgttctggatgacagcatcatcacggagcacaatgttcaccatgc

SEQ ID NO: 3880 - DNA, 122 bp, Homo sapiens
  misc_feature (61)..(62): /note="This region represents a CpG dinucleotide"
  misc_feature (61)..(61): /note="Nucleotide may be methylated to form 5-methylcytosine"
tttcctgagggaagggctctagggagaacttcgagagctgttgttgaaacagccctgatacggtttcaggaatggaaatcccagaaagacagaaaggtgaaaacttaggtgattcatctcct

SEQ ID NO: 3881 - DNA, 122 bp, Homo sapiens
  misc_feature (61)..(62): /note="This region represents a CpG dinucleotide"
  misc_feature (61)..(61): /note="Nucleotide may be methylated to form 5-methylcytosine"
ctgttttgttatgtgtattttgctgggatggaaaatgttaatttggtttcccatgcagcccgtcaggcagcatcttgcaaataaagaatcttgtcttacagggtgattttctcttgtaaaat

SEQ ID NO: 3882 - DNA, 122 bp, Homo sapiens
  misc_feature (61)..(62): /note="This region represents a CpG dinucleotide"
  misc_feature (61)..(61): /note="Nucleotide may be methylated to form 5-methylcytosine"
cactgtgctcagctgagtgtcacaggccctcagtgagtctttgttgaccgtactatagttcgttgttcatgtgtctgctcagcagaaaaagctaggaaatcctcaaggatgtccacatgctg

SEQ ID NO: 3883 - DNA, 122 bp, Homo sapiens
  misc_feature (61)..(62): /note="This region represents a CpG dinucleotide"
  misc_feature (61)..(61): /note="Nucleotide may be methylated to form 5-methylcytosine"
tgaaaacattctaatacatcatcacccccatccaaccactcccaccgtccttgcctccagcgcagacgaaataattccagccgatggtaacatctgcaatctcacgctaaactaactcacag

SEQ ID NO: 3884 - DNA, 122 bp, Homo sapiens
  misc_feature (61)..(62): /note="This region represents a CpG dinucleotide"
  misc_feature (61)..(61): /note="Nucleotide may be methylated to form 5-methylcytosine"
ttcctttgtttggttcggagactgcttgatccatggctgcttggcaggcttcttctttagcgttcattcttgtggccatttattctctgatattaaactacaggataattttaatctcaact

SEQ ID NO: 3885 - DNA, 122 bp, Homo sapiens
  misc_feature (61)..(62): /note="This region represents a CpG dinucleotide"
  misc_feature (61)..(61): /note="Nucleotide may be methylated to form 5-methylcytosine"
ccaggggaccagttccttggtgttgctttggcattgatgcctgaagtgggaggagaaagccgagcccacaaacacacagagcagagtggggctctgagtatataactgttaggtgcctccct

SEQ ID NO: 3886 - DNA, 122 bp, Homo sapiens
  misc_feature (61)..(62): /note="This region represents a CpG dinucleotide"
  misc_feature (61)..(61): /note="Nucleotide may be methylated to form 5-methylcytosine"
tacttattagccacaggttcaatgtgcacttcacattctgcaagacattgtccctgagcacgattggagcattttctaggtctgtctcttcaacctcatattcattatttatcaagtgtgat

SEQ ID NO: 3887 - DNA, 122 bp, Homo sapiens
  misc_feature (61)..(62): /note="This region represents a CpG dinucleotide"
  misc_feature (61)..(61): /note="Nucleotide may be methylated to form 5-methylcytosine"
aaaagcagaaatgtgtattctctttttttgtttcgatgaccttgttcctgacttgttactcgtgacttgagagatcagagggctagaggactagaatttatagaggtgttttttttgtttgt

SEQ ID NO: 3888 - DNA, 122 bp, Homo sapiens
  misc_feature (61)..(62): /note="This region represents a CpG dinucleotide"
  misc_feature (61)..(61): /note="Nucleotide may be methylated to form 5-methylcytosine"
gtggttgttgtagtttaaaagtatttctgtttttgtctctattatgcctctcttcaatttcgtttatttatcttttctagttttatgagttgagtgctttaaggaagacaatttcatataag

SEQ ID NO: 3889 - DNA, 122 bp, Homo sapiens
  misc_feature (61)..(62): /note="This region represents a CpG dinucleotide"
  misc_feature (61)..(61): /note="Nucleotide may be methylated to form 5-methylcytosine"
caagtttttcctcttatggcatcagtgtaggtgcaataaaaaatctgcctctaacatctgcgtataatatatttagctatttaactgaatagcccaatattcattttatgagtagtttttaa

SEQ ID NO: 3890 - DNA, 122 bp, Homo sapiens
  misc_feature (61)..(62): /note="This region represents a CpG dinucleotide"
  misc_feature (61)..(61): /note="Nucleotide may be methylated to form 5-methylcytosine"
tcgagagtacaaatccagatatgactttcatcatccaactaataaaccagtacatgattccgtcttgttcctaatttgggtatagacagaggactatctatgttgacatgaaaaaaaaatgc

SEQ ID NO: 3891 - DNA, 122 bp, Homo sapiens
  misc_feature (61)..(62): /note="This region represents a CpG dinucleotide"
  misc_feature (61)..(61): /note="Nucleotide may be methylated to form 5-methylcytosine"
attcacgctaaatgtcctccagttataaaacctcagaaacaacctgtatgttcaaagtgccgcaccttgcacaactcctatggtgccatgcacagatgagcagagcatggccagatggtcta

SEQ ID NO: 3892 - DNA, 122 bp, Homo sapiens
  misc_feature (61)..(62): /note="This region represents a CpG dinucleotide"
  misc_feature (61)..(61): /note="Nucleotide may be methylated to form 5-methylcytosine"
tcttcctaatgttgtgaataggaattcattccagctatgcttgttggcacacctcaagcacggtccagggctcaggaacatatcggtcttatgcagctcttggatgcttaccacaaaaggag

SEQ ID NO: 3893 - DNA, 122 bp, Homo sapiens
  misc_feature (61)..(62): /note="This region represents a CpG dinucleotide"
  misc_feature (61)..(61): /note="Nucleotide may be methylated to form 5-methylcytosine"
gcatatttataattctgcccttcatacccagcaggttacttgcaggctctttaattcgaacgatcttttgtgtaaatgtaaactacctttccattgctaacaacaccattgaccccatgtca

SEQ ID NO: 3894 - DNA, 122 bp, Homo sapiens
  misc_feature (61)..(62): /note="This region represents a CpG dinucleotide"
  misc_feature (61)..(61): /note="Nucleotide may be methylated to form 5-methylcytosine"
caaatccaagaccagtacccagatctctttactctcattgtggagcttgtttctgcaaaccgcaactggattcactttagttttctaaaggaagtatctgaatgaatgactgtttagcacag

SEQ ID NO: 3895 - DNA, 122 bp, Homo sapiens
  misc_feature (61)..(62): /note="This region represents a CpG dinucleotide"
  misc_feature (61)..(61): /note="Nucleotide may be methylated to form 5-methylcytosine"
aacagtgaagcagcagcaaagggcactggtggtttcccaagtggagacgctcagaggctccgtcctgagatggggaagttgggattagccttcatcaatgctgcaggaggtatgataagcag

SEQ ID NO: 3896 - DNA, 122 bp, Homo sapiens
  misc_feature (61)..(62): /note="This region represents a CpG dinucleotide"
  misc_feature (61)..(61): /note="Nucleotide may be methylated to form 5-methylcytosine"
caactaatcctcacccttggctatgtttgaacaccactagattatgcaagcatatcccatcgctcttgtctccatgcttttgtttatatcattttcctagcctgggcaactcttctttctcc

SEQ ID NO: 3897 - DNA, 122 bp, Homo sapiens
  misc_feature (61)..(62): /note="This region represents a CpG dinucleotide"
  misc_feature (61)..(61): /note="Nucleotide may be methylated to form 5-methylcytosine"
cccattccccttgtagagttcatgtctccacaaaaaccaccatttacccagttgcccaagcgagctgcttgagtatcattaacttctacacccctaaatctctgacttctaagctaataaca

SEQ ID NO: 3898 - DNA, 122 bp, Homo sapiens
  misc_feature (61)..(62): /note="This region represents a CpG dinucleotide"
  misc_feature (61)..(61): /note="Nucleotide may be methylated to form 5-methylcytosine"
catcaggaaacttatacagtcatggcagaaggggaagcaaaaacatccttcttcatgtggcggcagcaaggaaaagtgctgagccaaaggagcaaaagtcccttataaagccatcagatctt

SEQ ID NO: 3899 - DNA, 122 bp, Homo sapiens
  misc_feature (61)..(62): /note="This region represents a CpG dinucleotide"
  misc_feature (61)..(61): /note="Nucleotide may be methylated to form 5-methylcytosine"
cgggcatctccatggtactggcgttgagcatccagggagaagcagcccagttccgaagggcgccggtagaaaggaaagggcccagagtagagggcagggtctgtgggcagagaaggtgctgg

SEQ ID NO: 3900 - DNA, 122 bp, Homo sapiens
  misc_feature (61)..(62): /note="This region represents a CpG dinucleotide"
  misc_feature (61)..(61): /note="Nucleotide may be methylated to form 5-methylcytosine"
tggtgagtcagccggcagccccaaggatctccttccatgggctgtcactctctgcatagacgtcatgtatgtgattcgtgagcataaagtcatgaccctgtgttgctgcttttcatatttct

SEQ ID NO: 3901 - DNA, 122 bp, Homo sapiens
  misc_feature (61)..(62): /note="This region represents a CpG dinucleotide"
  misc_feature (61)..(61): /note="Nucleotide may be methylated to form 5-methylcytosine"
tgggtctcacagaaggctgctaagtcatggctcattctggccatggggtcattcagtttccgcagctccctggccagctctgatgccatatccatagcactgaactcatcccaccaggctac

SEQ ID NO: 3902 - DNA, 122 bp, Homo sapiens
  misc_feature (61)..(62): /note="This region represents a CpG dinucleotide"
  misc_feature (61)..(61): /note="Nucleotide may be methylated to form 5-methylcytosine"
actaacaatgactagcttaaagtgactttccagagccctcgtccttcctgtcatcagaaccgactgactggaaggccagtaatttgatatcggaaatttacaattgataaagtcatcaatgg

SEQ ID NO: 3903 - DNA, 122 bp, Homo sapiens
  misc_feature (61)..(62): /note="This region represents a CpG dinucleotide"
  misc_feature (61)..(61): /note="Nucleotide may be methylated to form 5-methylcytosine"
aaggagtgcaagtcagcccttttaccctctgggctactcactgctcaacgaatgtctccacgctcttcctgttgcattcaatagccattacttaccactgacaagaaatcctaggcttcctt

SEQ ID NO: 3904 - DNA, 122 bp, Homo sapiens
  misc_feature (61)..(62): /note="This region represents a CpG dinucleotide"
  misc_feature (61)..(61): /note="Nucleotide may be methylated to form 5-methylcytosine"
actcagtcaggcagaaaaagaattcatgtatcttgctagtttttgtgcatgaactgttcacgtggtaccattaagttgccttgcggatctcaagagttttgtaactgaaacagcaaaggtct

SEQ ID NO: 3905 - DNA, 122 bp, Homo sapiens
  misc_feature (61)..(62): /note="This region represents a CpG dinucleotide"
  misc_feature (61)..(61): /note="Nucleotide may be methylated to form 5-methylcytosine"
cgagaggagggcaacagagccagcatcttgccagggccccggaggaggggttccccgctacgcctgtgccggaggagttccagtcaccgagcgaggggcgcaagggtgggtgcatcctgcgc

SEQ ID NO: 3906 - DNA, 122 bp, Homo sapiens
  misc_feature (61)..(62): /note="This region represents a CpG dinucleotide"
  misc_feature (61)..(61): /note="Nucleotide may be methylated to form 5-methylcytosine"
ttttttaaagtatctgttgaacactggtaaattttgttccccgcctctctggtaatcgctcgacctgttctttccagcaggtatttctcctgcagaacctgctggctggcccccgcccttat

SEQ ID NO: 3907 - DNA, 122 bp, Homo sapiens
  misc_feature (61)..(62): /note="This region represents a CpG dinucleotide"
  misc_feature (61)..(61): /note="Nucleotide may be methylated to form 5-methylcytosine"
atccaaagcgtgccatgggaccacaattgcacacgatcaatgagtctcacaaactgaccacggcttatctgaggcagtttagggttgtgcaagagcccagcttttaagggactgtgggttgg

SEQ ID NO: 3908 - DNA, 122 bp, Homo sapiens
  misc_feature (61)..(62): /note="This region represents a CpG dinucleotide"
  misc_feature (61)..(61): /note="Nucleotide may be methylated to form 5-methylcytosine"
gcgccctcagtgtggacagctgggcttcaaactcacttcagagccgccgtgtgggggtggcgcctctgagggcttgaggttattttcttgtgcggtttctctctcctggcctaggtttttct

SEQ ID NO: 3909 - DNA, 122 bp, Homo sapiens
  misc_feature (61)..(62): /note="This region represents a CpG dinucleotide"
  misc_feature (61)..(61): /note="Nucleotide may be methylated to form 5-methylcytosine"
tctctgcaattaaccctgtgctgtattactatccttttgtgacctggttgtcagggtacccgctctggggaggattatccgtgagtacaaggccatatggtctccttcctgggtcaccagac

SEQ ID NO: 3910 - DNA, 122 bp, Homo sapiens
  misc_feature (61)..(62): /note="This region represents a CpG dinucleotide"
  misc_feature (61)..(61): /note="Nucleotide may be methylated to form 5-methylcytosine"
ttgtgacagcagcatgcatgattgtgacagcagcattaggtgtgtggccacttgtaaccacgtgaatggcttttcttgactgtgtgtaactcttgcttatgttattgactgtatgtgaatag

SEQ ID NO: 3911 - DNA, 122 bp, Homo sapiens
  misc_feature (61)..(62): /note="This region represents a CpG dinucleotide"
  misc_feature (61)..(61): /note="Nucleotide may be methylated to form 5-methylcytosine"
aggggcctgggagctggctgtcccccgccctgggctccctgacgaaatcgtccttttctgcggcggatgacaggttgtgggaacaacagcttgaattacggaaagaagtttccccactgagt

SEQ ID NO: 3912 - DNA, 122 bp, Homo sapiens
  misc_feature (61)..(62): /note="This region represents a CpG dinucleotide"
  misc_feature (61)..(61): /note="Nucleotide may be methylated to form 5-methylcytosine"
aggttttacttctatctgcaaagtgatttttaaccagacaatggcaatctataaacacaccgtgggcagcaaatcagaacaaactgcaaggtcgatagtcacgctgatgagcttgtttctgc

SEQ ID NO: 3913 - DNA, 122 bp, Homo sapiens
  misc_feature (61)..(62): /note="This region represents a CpG dinucleotide"
  misc_feature (61)..(61): /note="Nucleotide may be methylated to form 5-methylcytosine"
tcctcctcctccctcctccctcctccctcctcccccttcctcctcctccccctcctcccccgactggccccgcccccactgccggccccgcccccactgccggcccgggccccacccacgcc

SEQ ID NO: 3914 - DNA, 122 bp, Homo sapiens
  misc_feature (61)..(62): /note="This region represents a CpG dinucleotide"
  misc_feature (61)..(61): /note="Nucleotide may be methylated to form 5-methylcytosine"
agacgttttgactgtctttacttctagctgtatggtgctttgtctgttttcagataagctcgtaattatagtctcctcttaagaaaggatctgttatcagtcatttatactttagtaacaat

SEQ ID NO: 3915 - DNA, 122 bp, Homo sapiens
  misc_feature (61)..(62): /note="This region represents a CpG dinucleotide"
  misc_feature (61)..(61): /note="Nucleotide may be methylated to form 5-methylcytosine"
attttcactgttttattacttttctgggaattcaaatcagtgtaaccacgcttgatgcgccggtgaaaaatgctatctccctcccccttctccttcaacctaatgaattgccttttttcata

SEQ ID NO: 3916 - DNA, 122 bp, Homo sapiens
  misc_feature (61)..(62): /note="This region represents a CpG dinucleotide"
  misc_feature (61)..(61): /note="Nucleotide may be methylated to form 5-methylcytosine"
agaatacacatgtggctcacgttttatttcagaggattgcctcctttttaaactctcaatcggcctgctcaaaggaccagaattcagaaagggcataaaatctggaattttaaaataattgt

SEQ ID NO: 3917 - DNA, 122 bp, Homo sapiens
  misc_feature (61)..(62): /note="This region represents a CpG dinucleotide"
  misc_feature (61)..(61): /note="Nucleotide may be methylated to form 5-methylcytosine"
atgactcagaggtagtggatgccaccatgcatggaaatgctgcacgcttcatcaatcactcgtgtgagcctaactgctattctcgggtcatcaatattgatgggcagaagcacattgtcatc

SEQ ID NO: 3918 - DNA, 122 bp, Homo sapiens
  misc_feature (61)..(62): /note="This region represents a CpG dinucleotide"
  misc_feature (61)..(61): /note="Nucleotide may be methylated to form 5-methylcytosine"
tatgacataaagaagctttagtatcacttcttttttaacaatgcttcccatgtaatttaacgtaccaaattaatttaacaagtttgtttttataagaagaaagacaaggccgggtgcagtgg

SEQ ID NO: 3919 - DNA, 122 bp, Homo sapiens
  misc_feature (61)..(62): /note="This region represents a CpG dinucleotide"
  misc_feature (61)..(61): /note="Nucleotide may be methylated to form 5-methylcytosine"
cattaaatgttggctgagttaaaaatgctcatttaactttctaagacccactgccgaaagcgccatctcctgaaagaatagagaactgtctccacgtctgtctgcgtgagaccaaggaaggc

SEQ ID NO: 3920 - DNA, 122 bp, Homo sapiens
  misc_feature (61)..(62): /note="This region represents a CpG dinucleotide"
  misc_feature (61)..(61): /note="Nucleotide may be methylated to form 5-methylcytosine"
gcctgctattataagctcttggctgattaccaagagctgtggcttttcgtgccgggctggcgctgtgggtttggagtttccgctggatctgcaggtcagctggtattaggcagtgggcactc

SEQ ID NO: 3921 - DNA, 122 bp, Homo sapiens
  misc_feature (61)..(62): /note="This region represents a CpG dinucleotide"
  misc_feature (61)..(61): /note="Nucleotide may be methylated to form 5-methylcytosine"
ctcgtggggatgttgtgtgtgtatacatgcatacacacgtgtgcaaagagcttagagccacgcctggtaccatttacatgctcagtaaatgtttaggaggattgttgtgataacccagcaga

SEQ ID NO: 3922 - DNA, 122 bp, Homo sapiens
  misc_feature (61)..(62): /note="This region represents a CpG dinucleotide"
  misc_feature (61)..(61): /note="Nucleotide may be methylated to form 5-methylcytosine"
ttctggagcttttatatcttcttgcctcaggaattaataatctttactttagtcacaaagcgataatattatttgagaaaaacaatccatccataaaagtcttatctacagtgaaaaaaatg

SEQ ID NO: 3923 - DNA, 122 bp, Homo sapiens
  misc_feature (61)..(62): /note="This region represents a CpG dinucleotide"
  misc_feature (61)..(61): /note="Nucleotide may be methylated to form 5-methylcytosine"
ccttagatcagtaggcattagagtcttataaggagcacacaacctgcaacttagatccatcgcatgcgcagttcacagtagggcttctgcccctatgagaatcgagtggaaccgctgctctc

SEQ ID NO: 3924 - DNA, 122 bp, Homo sapiens
  misc_feature (61)..(62): /note="This region represents a CpG dinucleotide"
  misc_feature (61)..(61): /note="Nucleotide may be methylated to form 5-methylcytosine"
agtacctgacacgggtgtcaggcccaaccacgtgctcggtgtattcatagaccttagtcacggaagcacagtcttgtccggatgcacagcatgtgagcacttgctctccaaacttaccatct

SEQ ID NO: 3925 - DNA, 122 bp, Homo sapiens
  misc_feature (61)..(62): /note="This region represents a CpG dinucleotide"
  misc_feature (61)..(61): /note="Nucleotide may be methylated to form 5-methylcytosine"
ggctgtcaccctttcttcactcagcccagcaactgatcacatcttctgtcactcagggcacgagaaggtggggttttaaaagttatccaatcagcgacgctgggttgggaaccgtccaatca

SEQ ID NO: 3926 - DNA, 122 bp, Homo sapiens
  misc_feature (61)..(62): /note="This region represents a CpG dinucleotide"
  misc_feature (61)..(61): /note="Nucleotide may be methylated to form 5-methylcytosine"
tcacactggcactaccaaagtggttttcgtctgctaaaaagacagagccaaatatgaaagcgcttaaacattaaccattttctggtgtacttttatctttgtaaatagaagataaagtatca

SEQ ID NO: 3927 - DNA, 122 bp, Homo sapiens
  misc_feature (61)..(62): /note="This region represents a CpG dinucleotide"
  misc_feature (61)..(61): /note="Nucleotide may be methylated to form 5-methylcytosine"
gtttcataggatccacccccccatctcaccgatgttccttctctagcatttgctacctaacgtatagctcaggggtggtaaatggtgaccagtgggccccagcctgtggccagcttctgcac

SEQ ID NO: 3928 - DNA, 122 bp, Homo sapiens
  misc_feature (61)..(62): /note="This region represents a CpG dinucleotide"
  misc_feature (61)..(61): /note="Nucleotide may be methylated to form 5-methylcytosine"
ggatatatgtatgaatagagaatatggagagttataaaaaaagggaggtaagaaagctcacggaaaagagtgtaaattataaagatcacacgggaagaggcttgccttttgagatcagaaac

SEQ ID NO: 3929 - DNA, 122 bp, Homo sapiens
  misc_feature (61)..(62): /note="This region represents a CpG dinucleotide"
  misc_feature (61)..(61): /note="Nucleotide may be methylated to form 5-methylcytosine"
aagcaacaacaacaaaatgctcagaagctatactcagtagtctcagtgactgaaaaagtccggcttttaactgccatccaatccaaacaacccacttctttagaaagctatgcaaaatattg

SEQ ID NO: 3930 - DNA, 122 bp, Homo sapiens
  misc_feature (61)..(62): /note="This region represents a CpG dinucleotide"
  misc_feature (61)..(61): /note="Nucleotide may be methylated to form 5-methylcytosine"
ggctaccgccagaggcgtgaagccgtcctggccagaggaggaaaatgctttgctctgactcgtctgacgccagccgcccttcacacgggacacacccttgcccctcgggcttatgctcccag

SEQ ID NO: 3931 - DNA, 122 bp, Homo sapiens
  misc_feature (61)..(62): /note="This region represents a CpG dinucleotide"
  misc_feature (61)..(61): /note="Nucleotide may be methylated to form 5-methylcytosine"
gctcgatcattttgcaaggcccacatcatgtgcctgagaagtcaactactccaggtttatcgcctgcagcctccaaggcttcctgaaaagcaaacttctgctcaatttgcttcaccattttg

SEQ ID NO: 3932 - DNA, 122 bp, Homo sapiens
  misc_feature (61)..(62): /note="This region represents a CpG dinucleotide"
  misc_feature (61)..(61): /note="Nucleotide may be methylated to form 5-methylcytosine"
aggattgtgtcctcctccaccttccctgtgctcggtctccacctgtctcccattctgtgacgatggttcaatggaagagactctgccagctgcattacttgtgggctctgggctgctatatg

SEQ ID NO: 3933 - DNA, 122 bp, Homo sapiens
  misc_feature (61)..(62): /note="This region represents a CpG dinucleotide"
  misc_feature (61)..(61): /note="Nucleotide may be methylated to form 5-methylcytosine"
tttttttatttccaggagagcaaataaagtaatgccttacctttagttccagaactattacgttgatattgctgattaagtccctgggtcttaagtgaaagtttttgctttgagctaaattt

SEQ ID NO: 3934 - DNA, 122 bp, Homo sapiens
  misc_feature (61)..(62): /note="This region represents a CpG dinucleotide"
  misc_feature (61)..(61): /note="Nucleotide may be methylated to form 5-methylcytosine"
tctcaaactcaggcaatcctcccacctcgacttccctaagtgctaggattacagccacaacgcccggccaaaaggaacttttaagcatacagtaaaatagtagctcatagaaccaggaagaa

SEQ ID NO: 3935 - DNA, 122 bp, Homo sapiens
  misc_feature (61)..(62): /note="This region represents a CpG dinucleotide"
  misc_feature (61)..(61): /note="Nucleotide may be methylated to form 5-methylcytosine"
caccacagggactgaggttctccagatttcaaaagcctgtgatctgcggttgtgttgccccgttccccccgcggcagacaagcccagacacacacggcccagacaccccagaggcaaaggaa

SEQ ID NO: 3936 - DNA, 122 bp, Homo sapiens
  misc_feature (61)..(62): /note="This region represents a CpG dinucleotide"
  misc_feature (61)..(61): /note="Nucleotide may be methylated to form 5-methylcytosine"
gttctgcgttagagaagaagcagaggctgcagggaaggcgtggtttatgtatttacaatgcgagaggacatgtggaagttcccttgttatgtcgcctcacaaggaataaaagcaacaggatg

SEQ ID NO: 3937 - DNA, 122 bp, Homo sapiens
  misc_feature (61)..(62): /note="This region represents a CpG dinucleotide"
  misc_feature (61)..(61): /note="Nucleotide may be methylated to form 5-methylcytosine"
ctaactcttctcctgcaaaaccaagagcaagaattctacaacaaagactgtacagagcttcgtcatctgaaaacttccagaaatgaggtcaatagactatagttgatttattcctcaataaa

SEQ ID NO: 3938 - DNA, 122 bp, Homo sapiens
  misc_feature (61)..(62): /note="This region represents a CpG dinucleotide"
  misc_feature (61)..(61): /note="Nucleotide may be methylated to form 5-methylcytosine"
gctctgtttggttttctccttcctgccctggaacctcagacgccagtctggctgtgaaggcgcccatatactggggaaagtacaaagcccctacacagctggctgcagagaaccgcgcgcag

SEQ ID NO: 3939 - DNA, 122 bp, Homo sapiens
  misc_feature (61)..(62): /note="This region represents a CpG dinucleotide"
  misc_feature (61)..(61): /note="Nucleotide may be methylated to form 5-methylcytosine"
aaagagtctcaaccagggacaatagattccataattttttcactggtctccaggttttcccgactccaaattatcctatccaccatcaccaaagagagtgccccaaacctagatctgctcac

SEQ ID NO: 3940 - DNA, 122 bp, Homo sapiens
  misc_feature (61)..(62): /note="This region represents a CpG dinucleotide"
  misc_feature (61)..(61): /note="Nucleotide may be methylated to form 5-methylcytosine"
gaaatgggtctgtcagcccttccaatgaattaaggctgatgcgaagatctaatggaatctcgcaacgggaggcccattggaaattgtgaatataattaggtgagttactactgctgtgccga

SEQ ID NO: 3941 - DNA, 122 bp, Homo sapiens
  misc_feature (61)..(62): /note="This region represents a CpG dinucleotide"
  misc_feature (61)..(61): /note="Nucleotide may be methylated to form 5-methylcytosine"
gactggagctaagaacaggggagcaatagacagatgaagtgttcccggattgctgccccacgctctttgtaataaaggaaaacttggccaaaggtcaatgcttagggtagtagaagatatgt

SEQ ID NO: 3942 - DNA, 122 bp, Homo sapiens
  misc_feature (61)..(62): /note="This region represents a CpG dinucleotide"
  misc_feature (61)..(61): /note="Nucleotide may be methylated to form 5-methylcytosine"
tgtcacgtggggtatcaggtggctctgccagaaactcccttggcacacagagcactgggtcggccctcgggtgtggctgtttgggcaggacagccctctgtatgtagccttgagcaggtagg

SEQ ID NO: 3943 - DNA, 122 bp, Homo sapiens
  misc_feature (61)..(62): /note="This region represents a CpG dinucleotide"
  misc_feature (61)..(61): /note="Nucleotide may be methylated to form 5-methylcytosine"
ccgtaaagacggggatctttacgggttttcctcactgacttctcccaaaagctaaaccagcgcctggaatataaacatgtacataatttgcaggtgttagttttagcgtccttccggattca

SEQ ID NO: 3944 - DNA, 122 bp, Homo sapiens
  misc_feature (61)..(62): /note="This region represents a CpG dinucleotide"
  misc_feature (61)..(61): /note="Nucleotide may be methylated to form 5-methylcytosine"
tggcttcctgcagggtggcagctacctcgcccacccatgggagcgtcttctgtacaggttcgattggcttcagctgttcaaacatcttctcttctgtggtgtctctttctagctttatccac

SEQ ID NO: 3945 - DNA, 122 bp, Homo sapiens
  misc_feature (61)..(62): /note="This region represents a CpG dinucleotide"
  misc_feature (61)..(61): /note="Nucleotide may be methylated to form 5-methylcytosine"
ggacacagtcccgggcccagggaggacctggaacattcccttcctccccccccccccccccgcccccgcccatcagcccagcctgcaaggaggcgccaccggacctgcacactcaggagcag

SEQ ID NO: 3946 - DNA, 122 bp, Homo sapiens
  misc_feature (61)..(62): /note="This region represents a CpG dinucleotide"
  misc_feature (61)..(61): /note="Nucleotide may be methylated to form 5-methylcytosine"
tgccggttatttctcctccttagagatgaaatggtaaagttaggatgactcagcgtgcagcgtctagcgtgattcctggccaggcacagatagatactcagttcatgctgttttctccttat

SEQ ID NO: 3947 - DNA, 122 bp, Homo sapiens
  misc_feature (61)..(62): /note="This region represents a CpG dinucleotide"
  misc_feature (61)..(61): /note="Nucleotide may be methylated to form 5-methylcytosine"
gcgcgccccaggagcagctcgcactcctggttcaggttgcagctgcccttctccaccacacggtcttaggggtcagagtttcaagcagggctgctgtcccctccagttaaccccccaccccc

SEQ ID NO: 3948 - DNA, 122 bp, Homo sapiens
  misc_feature (61)..(62): /note="This region represents a CpG dinucleotide"
  misc_feature (61)..(61): /note="Nucleotide may be methylated to form 5-methylcytosine"
atgtagccaggcagtggtttcagatgtgctatgagtggatgaatcggggcttcaggagcacggagaggaactcccaactcaggcctgagaatcagggaagacttcagaaggaagataagctt

SEQ ID NO: 3949 - DNA, 122 bp, Homo sapiens
  misc_feature (61)..(62): /note="This region represents a CpG dinucleotide"
  misc_feature (61)..(61): /note="Nucleotide may be methylated to form 5-methylcytosine"
ataatgtggacgaacaagtgaaacactttttcaacttaaatgaaaaaacaggagaaatcacgacaaaggatgatttggattttgagattgcaagtagttacactctgagtatcgaagcaaaa

SEQ ID NO: 3950 - DNA, 122 bp, Homo sapiens
  misc_feature (61)..(62): /note="This region represents a CpG dinucleotide"
  misc_feature (61)..(61): /note="Nucleotide may be methylated to form 5-methylcytosine"
ctcggggaaatatagaggcgccacgcggggaaggcctgcggcgctgtgaggcaggctgggcggggctgtgacgtcacacaaggcgccgtcccggagcgaccacccaggctggggcacgtggg

SEQ ID NO: 3951 - DNA, 122 bp, Homo sapiens
  misc_feature (61)..(62): /note="This region represents a CpG dinucleotide"
  misc_feature (61)..(61): /note="Nucleotide may be methylated to form 5-methylcytosine"
gagccgtcagaggaaggacagccctgccgccaccttcatttcagactcggcttccagaaccgcaggaggacacagttctgtggctatgaaccacccgatttgtggtgcttggttatggcagc

SEQ ID NO: 3952 - DNA, 122 bp, Homo sapiens
  misc_feature (61)..(62): /note="This region represents a CpG dinucleotide"
  misc_feature (61)..(61): /note="Nucleotide may be methylated to form 5-methylcytosine"
gctactgcctttgggccttgacatagccttggggatgggcaacacaaatgttatccaacccgttggcaggtgaggcaggtcaggccaacacaagttgaggggcccgtccagagcaacaggtg

SEQ ID NO: 3953 - DNA, 122 bp, Homo sapiens
  misc_feature (61)..(62): /note="This region represents a CpG dinucleotide"
  misc_feature (61)..(61): /note="Nucleotide may be methylated to form 5-methylcytosine"
gaagtattttaagtggataatgagtagtctcttctctcaatgaatacgttcaaataacatcgactgcctgtaatatgcaaagttcctagtcaaggctgccttaggaattcctgccccttaac

SEQ ID NO: 3954 - DNA, 122 bp, Homo sapiens
  misc_feature (61)..(62): /note="This region represents a CpG dinucleotide"
  misc_feature (61)..(61): /note="Nucleotide may be methylated to form 5-methylcytosine"
ctctgcaggtgccgctcttccccagaggacaccccttccctgccagtcaaccccaccagccgcaggcagacatttcccccgagaaagctctccaggatccctgctccccaggcctgtgtctg

SEQ ID NO: 3955 - DNA, 122 bp, Homo sapiens
  misc_feature (61)..(62): /note="This region represents a CpG dinucleotide"
  misc_feature (61)..(61): /note="Nucleotide may be methylated to form 5-methylcytosine"
aacaccttttatttgcatgataccctataggtcgcaaaacacttggaggcactggattctcgttaacctacttgaggtcaggaatgcctttgagagtctgatgaaagctatgtaccctctct

SEQ ID NO: 3956 - DNA, 122 bp, Homo sapiens
  misc_feature (61)..(62): /note="This region represents a CpG dinucleotide"
  misc_feature (61)..(61): /note="Nucleotide may be methylated to form 5-methylcytosine"
agcacagctcttatgtgcaaagcccctgtaggtgctggagggattcactgatggccttggcggaggtggcagtgggcatgtgcacttggctctgacacagccactcatgcaacaccctgtgc

SEQ ID NO: 3957 - DNA, 122 bp, Homo sapiens
  misc_feature (61)..(62): /note="This region represents a CpG dinucleotide"
  misc_feature (61)..(61): /note="Nucleotide may be methylated to form 5-methylcytosine"
actcatctctcatcttgcacaagtttggcttttgagggacttggataactccatgagggccgtgacatatgcaatacatgcctcataaccagggcttgccacactgcgattgcagcaggaca

SEQ ID NO: 3958 - DNA, 122 bp, Homo sapiens
  misc_feature (61)..(62): /note="This region represents a CpG dinucleotide"
  misc_feature (61)..(61): /note="Nucleotide may be methylated to form 5-methylcytosine"
ctaaatggatcagcatattagcctcctgaaaagatattacactgcttagcctgaaacttccgcctcatagctcaagtatctcacaatgggattcacttaaggcatagggtttcttatagggt

SEQ ID NO: 3959 - DNA, 122 bp, Homo sapiens
  misc_feature (61)..(62): /note="This region represents a CpG dinucleotide"
  misc_feature (61)..(61): /note="Nucleotide may be methylated to form 5-methylcytosine"
tcccttaatcttaaactcccaccgctttcagacactatcataccccgccccccttccccccgcgaacccccgtgcattctgggactcatggtttggtgagtgttgtccaggaatggctacaa

SEQ ID NO: 3960 - DNA, 122 bp, Homo sapiens
  misc_feature (61)..(62): /note="This region represents a CpG dinucleotide"
  misc_feature (61)..(61): /note="Nucleotide may be methylated to form 5-methylcytosine"
atcggggtgcagcagtgctccttggcctaatagcagcagggcaccagtgaaggtttccaacgcgaggcctgaagatcagattcctattttacaacatcagcctggaaacagcatgaaggaag

SEQ ID NO: 3961 - DNA, 122 bp, Homo sapiens
  misc_feature (61)..(62): /note="This region represents a CpG dinucleotide"
  misc_feature (61)..(61): /note="Nucleotide may be methylated to form 5-methylcytosine"
caaccaagagttgactgaagtgtgcatagaatatatttaactgaataactaagacctgaacgtaatccaaggactgcatgttgagaaatcactgcccctagggtgtgtccttgctaacatgt

SEQ ID NO: 3962 - DNA, 122 bp, Homo sapiens
  misc_feature (61)..(62): /note="This region represents a CpG dinucleotide"
  misc_feature (61)..(61): /note="Nucleotide may be methylated to form 5-methylcytosine"
ccagagagaaatccaggtgggtactggccaaggtggaggtgtgagaaggagggctgaggacggctggggtcacacagcaccaagttgtaccagcccaggcacagttaaccattcattttaag

SEQ ID NO: 3963 - DNA, 122 bp, Homo sapiens
  misc_feature (61)..(62): /note="This region represents a CpG dinucleotide"
  misc_feature (61)..(61): /note="Nucleotide may be methylated to form 5-methylcytosine"
taagctgacattggaacatgaacagtctgaaatcccatgagccccgctgccctgcacctgcgaccctcaggctagaccttggactgtctacaacacgagtcaggcccaacccgccctggaaa

SEQ ID NO: 3964 - DNA, 122 bp, Homo sapiens
  misc_feature (61)..(62): /note="This region represents a CpG dinucleotide"
  misc_feature (61)..(61): /note="Nucleotide may be methylated to form 5-methylcytosine"
caggaagctgggggcccatgcctagaagtgctagctctgtaaataaacccaaagaagctgcgtttgtagatgtacacacattcaggctgagtgcagccaaatgagacgacagttaactcact

SEQ ID NO: 3965 - DNA, 122 bp, Homo sapiens
  misc_feature (61)..(62): /note="This region represents a CpG dinucleotide"
  misc_feature (61)..(61): /note="Nucleotide may be methylated to form 5-methylcytosine"
gacagatgggcttgtgcaagggagagttcgagccttccggacgcctttgcataaaaatgacgagacctgtgcagctttgattatctctggaatactgcaggaacctagggtcccactacttg

SEQ ID NO: 3966 - DNA, 122 bp, Homo sapiens
  misc_feature (61)..(62): /note="This region represents a CpG dinucleotide"
  misc_feature (61)..(61): /note="Nucleotide may be methylated to form 5-methylcytosine"
ataactgataaaatctgcatccttggccttccaacaacctttacaccagcagatggtgggcgtaaagatgtcattcatcatttatttacaatgggttttatttattctagtgtcaacagctg

SEQ ID NO: 3967 - DNA, 122 bp, Homo sapiens
  misc_feature (61)..(62): /note="This region represents a CpG dinucleotide"
  misc_feature (61)..(61): /note="Nucleotide may be methylated to form 5-methylcytosine"
tgcttctcatcactgcacccttctggccaactccagctcaccattctttgctgagcaatacgggcacttctgggaaattatctttgctccctccccccatctcttgcccctcccatggaatt

SEQ ID NO: 3968 - DNA, 122 bp, Homo sapiens
  misc_feature (61)..(62): /note="This region represents a CpG dinucleotide"
  misc_feature (61)..(61): /note="Nucleotide may be methylated to form 5-methylcytosine"
taaatgccataaaaaagatctgaagagtcttgtttgcagtatgttaatgtaggcggctgacgtggttgtttatgattcagcatattacctcatggtgttgaaagtgctctcagaaaccacca

SEQ ID NO: 3969 - DNA, 122 bp, Homo sapiens
  misc_feature (61)..(62): /note="This region represents a CpG dinucleotide"
  misc_feature (61)..(61): /note="Nucleotide may be methylated to form 5-methylcytosine"
gtggtgttgtgtacgtgaatccatcagatcaacgcgacggacactccccaagggccaaatcggaccgcctctcactaggcggaaagttttgaaacttttgcgcgctaaaaatgatgagccag

SEQ ID NO: 3970 - DNA, 122 bp, Homo sapiens
  misc_feature (61)..(62): /note="This region represents a CpG dinucleotide"
  misc_feature (61)..(61): /note="Nucleotide may be methylated to form 5-methylcytosine"
gaatggtcttttgtttatatatatatatatatatatatatatatatatatatttttaaatcggagtcttgtcacccaggctggtatgcaatgacgtgatctcggctcactgtaaccttcacc

SEQ ID NO: 3971 - DNA, 122 bp, Homo sapiens
  misc_feature (61)..(62): /note="This region represents a CpG dinucleotide"
  misc_feature (61)..(61): /note="Nucleotide may be methylated to form 5-methylcytosine"
gggtctttaatttgtgcaactccaaacaaaatctgttatgcttgagtgcacccatgggcacgtatgtgtttgagaacacagctgtgtttaagagaacagtatggtacaaaactagaattgta

SEQ ID NO: 3972 - DNA, 122 bp, Homo sapiens
  misc_feature (61)..(62): /note="This region represents a CpG dinucleotide"
  misc_feature (61)..(61): /note="Nucleotide may be methylated to form 5-methylcytosine"
gctcccctgcattctgctcttcaaagacacatgcagaaccttcagggtgttgaaaggggccgcaaagatcacagctctcagcgggggcgcggtcagtcggccacagcggtggagatggcgtt

SEQ ID NO: 3973 - DNA, 122 bp, Homo sapiens
  misc_feature (61)..(62): /note="This region represents a CpG dinucleotide"
  misc_feature (61)..(61): /note="Nucleotide may be methylated to form 5-methylcytosine"
aaaaggctgaatcagagtcaccaacgatgctttttaaaggaatgcagatttctgtccggacgccctgttggagattctgattcagtgtattctgggcaggactctaagattgcacattttga

SEQ ID NO: 3974 - DNA, 122 bp, Homo sapiens
  misc_feature (61)..(62): /note="This region represents a CpG dinucleotide"
  misc_feature (61)..(61): /note="Nucleotide may be methylated to form 5-methylcytosine"
gcagcgctccagcctccccgggcctcccccggcccggcccactcggccttgctagcctggcgctgggggcgggcaccagcccccacccctcggcgtaccatcccctttacttcccccacccc

SEQ ID NO: 3975 - DNA, 122 bp, Homo sapiens
  misc_feature (61)..(62): /note="This region represents a CpG dinucleotide"
  misc_feature (61)..(61): /note="Nucleotide may be methylated to form 5-methylcytosine"
cacaaggggctgtgtcctgcagctgcgctctggagaccttgccctttctcctgcctgctgcgtcccctccgcctccagcacgtgggcctttctgtcctgttgctgggctgtgcgtgcgtcca

SEQ ID NO: 3976 - DNA, 122 bp, Homo sapiens
  misc_feature (61)..(62): /note="This region represents a CpG dinucleotide"
  misc_feature (61)..(61): /note="Nucleotide may be methylated to form 5-methylcytosine"
gagatagtttcccagagccaggtactgacctcagagtcccaactcctggccacatgaaaacgtgtgtgtgagctatgctttctttttgtcctggagttataaaggttctgttgttcacaata

SEQ ID NO: 3977 - DNA, 122 bp, Homo sapiens
  misc_feature (61)..(62): /note="This region represents a CpG dinucleotide"
  misc_feature (61)..(61): /note="Nucleotide may be methylated to form 5-methylcytosine"
ttttcttttttcctttctctccctcccttcctcctttttttttttttttttttgtagatacggtgtctccccatgtggccaggttggtcacaactcctgaactcaagtgatccgcgcgtctc

SEQ ID NO: 3978 - DNA, 122 bp, Homo sapiens
  misc_feature (61)..(62): /note="This region represents a CpG dinucleotide"
  misc_feature (61)..(61): /note="Nucleotide may be methylated to form 5-methylcytosine"
tgatcagcacatccagattctagtcctggctcattgtggctgttttgttctcaaatattacgtaagggaatttggaaccctagatattatcatcatctgagtctacttcaaacactgatatg

SEQ ID NO: 3979 - DNA, 122 bp, Homo sapiens
  misc_feature (61)..(62): /note="This region represents a CpG dinucleotide"
  misc_feature (61)..(61): /note="Nucleotide may be methylated to form 5-methylcytosine"
agccactacacttgcataagaaactctgatattctgtttttaatgggtcatttagtttgtcgtgcctgtttttgcctttataagagaaattagaaatagtgtgattgacaaaacagagatat

SEQ ID NO: 3980 - DNA, 122 bp, Homo sapiens
  misc_feature (61)..(62): /note="This region represents a CpG dinucleotide"
  misc_feature (61)..(61): /note="Nucleotide may be methylated to form 5-methylcytosine"
ccaactgttttacaaccctaacagcaaattttactttttcactaactgaattttcatgtacgttttaagccagttggatttttttaatgctctattttcaatagaaagatgggggaaaaaaa

SEQ ID NO: 3981 - DNA, 122 bp, Homo sapiens
  misc_feature (61)..(62): /note="This region represents a CpG dinucleotide"
  misc_feature (61)..(61): /note="Nucleotide may be methylated to form 5-methylcytosine"
gcctcaccacagagacttgattctgtccaaaataaagacacctgagatgtggtggcctcacgtcttcccagtgtggagctgtggtggcgtctgaagtgaccgctttgcacttggcattttga

SEQ ID NO: 3982 - DNA, 122 bp, Homo sapiens
  misc_feature (61)..(62): /note="This region represents a CpG dinucleotide"
  misc_feature (61)..(61): /note="Nucleotide may be methylated to form 5-methylcytosine"
tttagcaacttttgaagtgggattaacaagtttggccaatgaagcttcttccctgcccaccgccagaggtgctggagaaaagtaatcctggagggtcggcgtggaggcagtagagaggttta

SEQ ID NO: 3983 - DNA, 122 bp, Homo sapiens
  misc_feature (61)..(62): /note="This region represents a CpG dinucleotide"
  misc_feature (61)..(61): /note="Nucleotide may be methylated to form 5-methylcytosine"
cagagggacttaggccgggaaggggcagcacggcgccctccaggcagagaagcagccccgcggccaccctgatgcggcgcggactcctcctgtccagttctctgtcacacctgctgcctgcc

SEQ ID NO: 3984 - DNA, 122 bp, Homo sapiens
  misc_feature (61)..(62): /note="This region represents a CpG dinucleotide"
  misc_feature (61)..(61): /note="Nucleotide may be methylated to form 5-methylcytosine"
ttcccgtttcccggtggtgtggtgggagttccttcttgctggatttctgagcttgccattcgcgccaatagtttcgtgtgttctgggctttctttacatgcctatatttgtctttggagggg

SEQ ID NO: 3985 - DNA, 122 bp, Homo sapiens
  misc_feature (61)..(62): /note="This region represents a CpG dinucleotide"
  misc_feature (61)..(61): /note="Nucleotide may be methylated to form 5-methylcytosine"
accctaaaaacaaggaagtaggcagtccagtcctgacctgctcggagttgaagcagtcggcgttggaagagcctgaacacccggcctaccacttgtccttccatctctgggccttcaggaca

SEQ ID NO: 3986 - DNA, 122 bp, Homo sapiens
  misc_feature (61)..(62): /note="This region represents a CpG dinucleotide"
  misc_feature (61)..(61): /note="Nucleotide may be methylated to form 5-methylcytosine"
agggcttctgacattttgctccaaggtttgtttgtttttacttagaaaaaatgccatcaacgtcagtgactgtatgctcagttctgctgaagagctgcaaatgttatagatggatttgttat

SEQ ID NO: 3987 - DNA, 122 bp, Homo sapiens
  misc_feature (61)..(62): /note="This region represents a CpG dinucleotide"
  misc_feature (61)..(61): /note="Nucleotide may be methylated to form 5-methylcytosine"
tgatccttacaagaaatatcctggtgcgaaaaacgaccaaaaccacatagccagcctccacgctgttcagagaaagctggcttagcaatgttgtatggtttttggatgcgctgcgttactca

SEQ ID NO: 3988 - DNA, 122 bp, Homo sapiens
  misc_feature (61)..(62): /note="This region represents a CpG dinucleotide"
  misc_feature (61)..(61): /note="Nucleotide may be methylated to form 5-methylcytosine"
ttgctattcactctcattctcttgtgtctgcattccttgactactgatggattcagtcagcgtcacccaggaaggtgtgtagagggatccatgaagcaaaggccaaggaagaaattcaagtt

SEQ ID NO: 3989 - DNA, 122 bp, Homo sapiens
  misc_feature (61)..(62): /note="This region represents a CpG dinucleotide"
  misc_feature (61)..(61): /note="Nucleotide may be methylated to form 5-methylcytosine"
ctttcctctgtccagctcttcccgtgccccggggctggggaaagcgtccggcagccccgccgctccctggccccgtcccaggagccaccccaccgtagggctccagccagggtccaggcgtg

SEQ ID NO: 3990 - DNA, 122 bp, Homo sapiens
  misc_feature (61)..(62): /note="This region represents a CpG dinucleotide"
  misc_feature (61)..(61): /note="Nucleotide may be methylated to form 5-methylcytosine"
aactcacttttgacttacagaaaagttgggaaaataatgtggtttccacatatccctcagcgggctttccctaatgctaacatttacataaccatagtacaagtacgagaacccagaaatta

SEQ ID NO: 3991 - DNA, 122 bp, Homo sapiens
  misc_feature (61)..(62): /note="This region represents a CpG dinucleotide"
  misc_feature (61)..(61): /note="Nucleotide may be methylated to form 5-methylcytosine"
gcctttgtaaataaagttttattggaacacagccacacccattcatctgtgtcacatctacggctgctttgtcactacaacagcaaagttgagtagttgcagcacagactttgcgtggccca

SEQ ID NO: 3992 - DNA, 122 bp, Homo sapiens
  misc_feature (61)..(62): /note="This region represents a CpG dinucleotide"
  misc_feature (61)..(61): /note="Nucleotide may be methylated to form 5-methylcytosine"
ggcttcagggacagtcatcttccctttaagggtcgtgtgggctcatgcatgttaactgaacgtctactatgagccaagcctacaagatctgcagtcacagatacaaatgcggcacagctctt

SEQ ID NO: 3993 - DNA, 122 bp, Homo sapiens
  misc_feature (61)..(62): /note="This region represents a CpG dinucleotide"
  misc_feature (61)..(61): /note="Nucleotide may be methylated to form 5-methylcytosine"
aacaaaaacatcccctgactcccctaccctcaaaccaaaaacaaacaagacaaactctagcggaattgagaatatctgatatgtctgttgatctcaaggatagtgaatagttcacaagcaat

SEQ ID NO: 3994 - DNA, 122 bp, Homo sapiens
  misc_feature (61)..(62): /note="This region represents a CpG dinucleotide"
  misc_feature (61)..(61): /note="Nucleotide may be methylated to form 5-methylcytosine"
tgtgggatgcaaggacctgagaatttcggactgtgatttctcagctagtgtgctatttcccgccaatttgtccactaattagggagaaacgaaaatactgtcagacgtgtggcacctccagc

SEQ ID NO: 3995 - DNA, 122 bp, Homo sapiens
  misc_feature (61)..(62): /note="This region represents a CpG dinucleotide"
  misc_feature (61)..(61): /note="Nucleotide may be methylated to form 5-methylcytosine"
ggctagtccttgagcttattggctgatagcacagtgggcggggtacatagcacgaccccccggagccccgcccatattaatttgcataacggccccggcgcgtgcaagggagaagcgggttt

SEQ ID NO: 3996 - DNA, 122 bp, Homo sapiens
  misc_feature (61)..(62): /note="This region represents a CpG dinucleotide"
  misc_feature (61)..(61): /note="Nucleotide may be methylated to form 5-methylcytosine"
gtctgtgtgtgcagtataatggcaactattcttggggagacttaagtacaaagaagcatacgacctgccagatatgcaggaaagtcaaccaaagcctttgtggggtgtgtttctgataatgc

SEQ ID NO: 3997 - DNA, 122 bp, Homo sapiens
  misc_feature (61)..(62): /note="This region represents a CpG dinucleotide"
  misc_feature (61)..(61): /note="Nucleotide may be methylated to form 5-methylcytosine"
tttctccaccagcctccgacagaaaccctgcagagcttccattctgcgttcagccaccatcgcctcccacccagtggtttctaaacaatctctgagcaagattttggttttatcagcctatt

SEQ ID NO: 3998 - DNA, 122 bp, Homo sapiens
  misc_feature (61)..(62): /note="This region represents a CpG dinucleotide"
  misc_feature (61)..(61): /note="Nucleotide may be methylated to form 5-methylcytosine"
cttactcactgctgaaaaaggaggactctgtatatttttaaatgaagagtattgtttttacgtaaatcagtctggcctggtatatgacaacataaactcaaggatagagcccagaaatttgc

SEQ ID NO: 3999 - DNA, 122 bp, Homo sapiens
  misc_feature (61)..(62): /note="This region represents a CpG dinucleotide"
  misc_feature (61)..(61): /note="Nucleotide may be methylated to form 5-methylcytosine"
ccaaggagttttacattttaaaataatcaagcgtgcctactgcttgccaggccctgctctcgccttcactcgcattattcaattaatcgacacaggcctgtgcagtgcgtcttaatgacaag

SEQ ID NO: 4000 - DNA, 122 bp, Homo sapiens
  misc_feature (61)..(62): /note="This region represents a CpG dinucleotide"
  misc_feature (61)..(61): /note="Nucleotide may be methylated to form 5-methylcytosine"
catagcaatgattgtctttatgctggctgccctgtgccaggcattttacaggcattagctcgcatactccttctaaccaccctatgaggaaagaggatcccagggtcagagtggtgaagcaa

SEQ ID NO: 4001 - DNA, 122 bp, Homo sapiens
  misc_feature (61)..(62): /note="This region represents a CpG dinucleotide"
  misc_feature (61)..(61): /note="Nucleotide may be methylated to form 5-methylcytosine"
caatcctcctctttcggaaaacaaaactaggaagtatggaaagaaagaggccattaaccacgaaaagaaaagcccaaaggaggccctgagggcatcccctagtcctcctcacctcagtaaag

SEQ ID NO: 4002 - DNA, 122 bp, Homo sapiens
  misc_feature (61)..(62): /note="This region represents a CpG dinucleotide"
  misc_feature (61)..(61): /note="Nucleotide may be methylated to form 5-methylcytosine"
aattttctcaacagcatctgctttcttatcagagttctttctgaaacataaacttgacctcgtcatttccctacttgtatgatcaccatgggttgctcctgccttaagagtacactcctgcc

SEQ ID NO: 4003 - DNA, 122 bp, Homo sapiens
  misc_feature (61)..(62): /note="This region represents a CpG dinucleotide"
  misc_feature (61)..(61): /note="Nucleotide may be methylated to form 5-methylcytosine"
tcacgcagtctgaatccaacctgaagtctgcttgtcaagccattagccttatccctgtggcgtctgcatggagaaggaaagccttttttacctccaaattctcacaaaaatccagcgtggga

SEQ ID NO: 4004 - DNA, 122 bp, Homo sapiens
  misc_feature (61)..(62): /note="This region represents a CpG dinucleotide"
  misc_feature (61)..(61): /note="Nucleotide may be methylated to form 5-methylcytosine"
ttgaaagaattgtccttaaaaaataacctgtgcatacgtatgtccatccaggcatgcatgcgtgtttgtatacacacatatgcacacggaatagccatgtacattgaagcaccaaactaggc

SEQ ID NO: 4005 - DNA, 122 bp, Homo sapiens
  misc_feature (61)..(62): /note="This region represents a CpG dinucleotide"
  misc_feature (61)..(61): /note="Nucleotide may be methylated to form 5-methylcytosine"
tcctcaaaatgtaaacagagttaacatatgactcagcaattccaatcctatgtatatatccgacagaaataaaaacatacatctgccaaaaataaaacttgtgcacaaatcttcataataac

SEQ ID NO: 4006 - DNA, 122 bp, Homo sapiens
  misc_feature (61)..(62): /note="This region represents a CpG dinucleotide"
  misc_feature (61)..(61): /note="Nucleotide may be methylated to form 5-methylcytosine"
tgtgagaattaagtaaaatatgcaaataaagtgcctggcatacagtaggcactgagcaaacggtagctcttttttccaggctggggcaagggatgcatataaatgtctggatctgaagtttg

SEQ ID NO: 4007 - DNA, 122 bp, Homo sapiens
  misc_feature (61)..(62): /note="This region represents a CpG dinucleotide"
  misc_feature (61)..(61): /note="Nucleotide may be methylated to form 5-methylcytosine"
gactttctccaaccttcttttagaaaaggagttacccaaatgaagttgtaatgaagaaaacgggacaaagcaaataataatgagtctacagctgaggtaatttatcatgagggttatcatga

SEQ ID NO: 4008 - DNA, 122 bp, Homo sapiens
  misc_feature (61)..(62): /note="This region represents a CpG dinucleotide"
  misc_feature (61)..(61): /note="Nucleotide may be methylated to form 5-methylcytosine"
aaagctggggtaagtctctgactttgagtcatttgttgcatccactacaccagctgttctcgaagtgtgatccatagacccctgagggttcctgccattcttctgaggtattcctgaaatca

SEQ ID NO: 4009 - DNA, 122 bp, Homo sapiens
  misc_feature (61)..(62): /note="This region represents a CpG dinucleotide"
  misc_feature (61)..(61): /note="Nucleotide may be methylated to form 5-methylcytosine"
gagccaaaaacccacagccgcttgactcacggatatactatgatgtcaagctgcagtcaccggtggtcacaatgggcagcctaagtcatcaggaagaggctattgtgcactgcttgggaggg

SEQ ID NO: 4010 - DNA, 122 bp, Homo sapiens
  misc_feature (61)..(62): /note="This region represents a CpG dinucleotide"
  misc_feature (61)..(61): /note="Nucleotide may be methylated to form 5-methylcytosine"
gagtcaatgagaacaaggtgtgctgtttcctctgtgctgtttcttccctgccccactccccgcccctttgtcctatggtgcccaggctgcctgcactgcccagataccacaggccttgccag

SEQ ID NO: 4011 - DNA, 122 bp, Homo sapiens
  misc_feature (61)..(62): /note="This region represents a CpG dinucleotide"
  misc_feature (61)..(61): /note="Nucleotide may be methylated to form 5-methylcytosine"
caatctttctaggactttcttcacttcaagttattctcacataacttctcttcaaactttcgtcattgctatgtctgatctataggaataatagtgggacaagaggataattaactttcttc

SEQ ID NO: 4012 - DNA, 122 bp, Homo sapiens
  misc_feature (61)..(62): /note="This region represents a CpG dinucleotide"
  misc_feature (61)..(61): /note="Nucleotide may be methylated to form 5-methylcytosine"
aaggatgttcatcagagcatttcttttgaagagtaaagaaatggacatgaacctgtggtccgttcatacggtggaatacctatgcagctgtaaaaatcagtgtggtagatctccgtatatga

SEQ ID NO: 4013 - DNA, 122 bp, Homo sapiens
  misc_feature (61)..(62): /note="This region represents a CpG dinucleotide"
  misc_feature (61)..(61): /note="Nucleotide may be methylated to form 5-methylcytosine"
aaatttccttcacactaatctctgagtcagagtatgcttcacagtaaactcaagctgcaacggttgggccagaagtgattggagagagcagacatagatatgggatcatcatgctggatgac

SEQ ID NO: 4014 - DNA, 122 bp, Homo sapiens
  misc_feature (61)..(62): /note="This region represents a CpG dinucleotide"
  misc_feature (61)..(61): /note="Nucleotide may be methylated to form 5-methylcytosine"
cccagctggatgtggtgcactcgggcccccccacccccagccaggcattcccactgtcagcggggcacacttccgtttgcttgaagtaatgcacacccaagggcatttgtgctgccaagtgc

SEQ ID NO: 4015 - DNA, 122 bp, Homo sapiens
  misc_feature (61)..(62): /note="This region represents a CpG dinucleotide"
  misc_feature (61)..(61): /note="Nucleotide may be methylated to form 5-methylcytosine"
aatcccttcctttctcaagagaatccctgaacaaaaacgaaagtttctgtaaggtgtcaccgctcttcaaaggtgtcaggaccctgtcttctctaaaggttttactgtgttaaaaagcagct

SEQ ID NO: 4016 - DNA, 122 bp, Homo sapiens
  misc_feature (61)..(62): /note="This region represents a CpG dinucleotide"
  misc_feature (61)..(61): /note="Nucleotide may be methylated to form 5-methylcytosine"
gctcgggtgccccccctccccacccaaggccggccctttcctgtggagtcatctcaccgccgtgcgcacccactcgtaactcgcacccgggtcctggctgcaccgcatcccctcctgcaccc

SEQ ID NO: 4017 - DNA, 122 bp, Homo sapiens
  misc_feature (61)..(62): /note="This region represents a CpG dinucleotide"
  misc_feature (61)..(61): /note="Nucleotide may be methylated to form 5-methylcytosine"
cctcactgggtcagaagtgcagcagacaccctgccggatctagaggggtgaagtcagccgcgggtctgcgacagcggcaaacagcagtggtggacagcgagcaaaagctcagctcgagcagt

SEQ ID NO: 4018 - DNA, 122 bp, Homo sapiens
  misc_feature (61)..(62): /note="This region represents a CpG dinucleotide"
  misc_feature (61)..(61): /note="Nucleotide may be methylated to form 5-methylcytosine"
tcccctgcctcagcctacgggtgtctcaatgcctggtgcagaaggtgtgtcgctgctgtccgtctgttgtgctgcttccacctctcatgtagtctcccgacactccatgtcacccatgctgc

SEQ ID NO: 4019 - DNA, 122 bp, Homo sapiens
  misc_feature (61)..(62): /note="This region represents a CpG dinucleotide"
  misc_feature (61)..(61): /note="Nucleotide may be methylated to form 5-methylcytosine"
gacgctgcgacggggcgtcccgggggtgacactggcatgtgacgctgcgacggggcgtcccggggcagggccctgccaagggacccccaacaaacacgactgaaactcagcctggatacaaa

SEQ ID NO: 4020 - DNA, 122 bp, Homo sapiens
  misc_feature (61)..(62): /note="This region represents a CpG dinucleotide"
  misc_feature (61)..(61): /note="Nucleotide may be methylated to form 5-methylcytosine"
gatttcaattaagataccatgagcacgggcatcaccgctgctccagggggtgggtggtggcgagggcatgccttggccctgccgccttgtccttatctttacccccagcttggggagcctga

SEQ ID NO: 4021 - DNA, 122 bp, Homo sapiens
  misc_feature (61)..(62): /note="This region represents a CpG dinucleotide"
  misc_feature (61)..(61): /note="Nucleotide may be methylated to form 5-methylcytosine"
cctccccttccctaatcacacctcattcccacccccagccctgaggcccagcccacagtccggcccacagcccacgctaaccctggtggtcccagttagagaagtgggaggccaggtccctt

SEQ ID NO: 4022 - DNA, 122 bp, Homo sapiens
  misc_feature (61)..(62): /note="This region represents a CpG dinucleotide"
  misc_feature (61)..(61): /note="Nucleotide may be methylated to form 5-methylcytosine"
atttctgtcttgctcacagtatagaagctgttgaccgctccttgcttggctgtcacaatacgatgatcaaatggggccggaggagccgggatgtcaactagaaggtgagagaaacagaaggg

SEQ ID NO: 4023 - DNA, 122 bp, Homo sapiens
  misc_feature (61)..(62): /note="This region represents a CpG dinucleotide"
  misc_feature (61)..(61): /note="Nucleotide may be methylated to form 5-methylcytosine"
attttcacattatgaagctacacaattccaaaatacacatgctgaggctctttttaagtccgaattgtctagtaattacaaaaaagtgaagagtttacagatatacaaggaaataaaggcga

SEQ ID NO: 4024 - DNA, 122 bp, Homo sapiens
  misc_feature (61)..(62): /note="This region represents a CpG dinucleotide"
  misc_feature (61)..(61): /note="Nucleotide may be methylated to form 5-methylcytosine"
caacatccggcatgtttacactagggaggaagtttctcaaacagtaacgtctagggctaacgtggataagccggaaaggaagcacatcagcatctatccctgtgaaacactggattgagtgg

SEQ ID NO: 4025 - DNA, 122 bp, Homo sapiens
  misc_feature (61)..(62): /note="This region represents a CpG dinucleotide"
  misc_feature (61)..(61): /note="Nucleotide may be methylated to form 5-methylcytosine"
cagcctgcattgcttgtaggagttggggcacgagccttgcccagggggaaggagtgtaggcggtcttttatcggctaggatgtaagaccgaaacccagtcatgggttttgatgacccatgac

SEQ ID NO: 4026 - DNA, 122 bp, Homo sapiens
  misc_feature (61)..(62): /note="This region represents a CpG dinucleotide"
  misc_feature (61)..(61): /note="Nucleotide may be methylated to form 5-methylcytosine"
caagctgccggctctggccctattggaggggtctcagtaacggagggcaggtgccagtctcgcgccctagttcgttcctctgctacaacgccaagttcgaggccacagtgccttctggaaga

SEQ ID NO: 4027 - DNA, 122 bp, Homo sapiens
  misc_feature (61)..(62): /note="This region represents a CpG dinucleotide"
  misc_feature (61)..(61): /note="Nucleotide may be methylated to form 5-methylcytosine"
taactggacaagcccagggttgacaccatttccgaggagagttgcaaaaaaaacacaacacgaccttggctgtttttcatgaccaaactccagagggccacaagatggagccacttctccct

SEQ ID NO: 4028 - DNA, 122 bp, Homo sapiens
  misc_feature (61)..(62): /note="This region represents a CpG dinucleotide"
  misc_feature (61)..(61): /note="Nucleotide may be methylated to form 5-methylcytosine"
acgtggggcccactggctcacacctgcttttccaccacccctcgcctgccttggggctcacgtccctccccggaattcccacgccccacaggcagaatctgaggcacacctcagcgccccgc

SEQ ID NO: 4029 - DNA, 122 bp, Homo sapiens
  misc_feature (61)..(62): /note="This region represents a CpG dinucleotide"
  misc_feature (61)..(61): /note="Nucleotide may be methylated to form 5-methylcytosine"
gatgtctaaaacagcgcggaggtcaggagaccttgtcgctgccttcacagagttgggcaacgctcccggtcctggtcagccgcgggacgcaggcgcaaatgcaggcttgggatgggggaggt

SEQ ID NO: 4030 - DNA, 122 bp, Homo sapiens
  misc_feature (61)..(62): /note="This region represents a CpG dinucleotide"
  misc_feature (61)..(61): /note="Nucleotide may be methylated to form 5-methylcytosine"
acacagggtggtgctgggtataaagggctgctccaagactggattgtgagtcagacctgccggactcaaattcatactatgtaatacataacccctgggacaaataattccctttcgttgtg

SEQ ID NO: 4031 - DNA, 122 bp, Homo sapiens
  misc_feature (61)..(62): /note="This region represents a CpG dinucleotide"
  misc_feature (61)..(61): /note="Nucleotide may be methylated to form 5-methylcytosine"
gcttactcccgggctggaccttggggttcgcatatttgaaagcgtaaacttgaggaatgacggcggggtgatgggtattttatagagtgggactcaatcgtgctcagcaacagatttctcca

SEQ ID NO: 4032 - DNA, 122 bp, Homo sapiens
  misc_feature (61)..(62): /note="This region represents a CpG dinucleotide"
  misc_feature (61)..(61): /note="Nucleotide may be methylated to form 5-methylcytosine"
ttcctgggttcaagcaatcctccctccttggcctaccaaagtgctaggcatgggtcactacgcccagcctctgctgcttgtatcaaattctctcctcaccctgaaagtctgggaaatccttg

SEQ ID NO: 4033 - DNA, 122 bp, Homo sapiens
  misc_feature (61)..(62): /note="This region represents a CpG dinucleotide"
  misc_feature (61)..(61): /note="Nucleotide may be methylated to form 5-methylcytosine"
agggaggggcagagtgttaacgtcaggtaggaatgaccctcccagaagtcagaatgctcccgtgtccacccgtgttcactgtgctctgctatttatcttcttaagcctctttctgtgattat

SEQ ID NO: 4034 - DNA, 122 bp, Homo sapiens
  misc_feature (61)..(62): /note="This region represents a CpG dinucleotide"
  misc_feature (61)..(61): /note="Nucleotide may be methylated to form 5-methylcytosine"
tccagggggtcctcaggaagcaacctgagtaaggaaatcccaccagagctaaaggacagccgcaaggctagccaagcaggtttccttccttcccagagcctccactgtgaagtgggaggttt

SEQ ID NO: 4035 - DNA, 122 bp, Homo sapiens
  misc_feature (61)..(62): /note="This region represents a CpG dinucleotide"
  misc_feature (61)..(61): /note="Nucleotide may be methylated to form 5-methylcytosine"
atagccaataataataaaaaagagcaactcacattgatggtgcccttattgtgtgtgtgtcgtttcatggcatcctgaagacagctgagagacagatgtgatcatgcctgttttacagatgg

SEQ ID NO: 4036 - DNA, 122 bp, Homo sapiens
  misc_feature (61)..(62): /note="This region represents a CpG dinucleotide"
  misc_feature (61)..(61): /note="Nucleotide may be methylated to form 5-methylcytosine"
tgatggaaaacacatgttcttagaatttggcctaagtacaagacttagccactgattccacgtgaccttcagcaactcattcaacatctgtttccttatctataaaagtatcatctaattta

SEQ ID NO: 4037 - DNA, 122 bp, Homo sapiens
  misc_feature (61)..(62): /note="This region represents a CpG dinucleotide"
  misc_feature (61)..(61): /note="Nucleotide may be methylated to form 5-methylcytosine"
gcagattatccagcttggttggaggaggtcttatcttacttcctcccacccttccttagccgtcgcctctgtttcctcatttgacttcatgtatgttttgatccatgtcaataagattgtga

SEQ ID NO: 4038 - DNA, 122 bp, Homo sapiens
  misc_feature (61)..(62): /note="This region represents a CpG dinucleotide"
  misc_feature (61)..(61): /note="Nucleotide may be methylated to form 5-methylcytosine"
caaaaatatttaaagcaatatttaaaatactttaagtgcgccccgtttcctcctgccacccgtcccaaagcccacacagtctttctcaaaaatgtggatattcaggttaacctgcgattttg

SEQ ID NO: 4039 - DNA, 122 bp, Homo sapiens
  misc_feature (61)..(62): /note="This region represents a CpG dinucleotide"
  misc_feature (61)..(61): /note="Nucleotide may be methylated to form 5-methylcytosine"
agcatctggctgtcctggtggggacatatgagcgctgccacaggccgggaatatcccaggcgagtaagaatagcccacaataagagatgactgctgcttgctctgctggtcactgcagttgt

SEQ ID NO: 4040 - DNA, 122 bp, Homo sapiens
  misc_feature (61)..(62): /note="This region represents a CpG dinucleotide"
  misc_feature (61)..(61): /note="Nucleotide may be methylated to form 5-methylcytosine"
agtagggtcgacttggtgcagataaagcatgggtggctttcacagtggttaaaagaaaggcggttttggaagtccagcttctgttactggaggaatgtcttaatatcagacttgattccagg

SEQ ID NO: 4041 - DNA, 122 bp, Homo sapiens
  misc_feature (61)..(62): /note="This region represents a CpG dinucleotide"
  misc_feature (61)..(61): /note="Nucleotide may be methylated to form 5-methylcytosine"
taaggtccaggcatgggaccctcgcccccgaatgccgtccttccccaccgggggggggggcgggaacataaaatggacccaagtcactgtcccttaaggagcggaccgcctgagccctggag

SEQ ID NO: 4042 - DNA, 122 bp, Homo sapiens
  misc_feature (61)..(62): /note="This region represents a CpG dinucleotide"
  misc_feature (61)..(61): /note="Nucleotide may be methylated to form 5-methylcytosine"
cttgtatccttcccttcaggatagtaagtcaccgcagttccctggcagttctagaggtgccgtcagggagctagcgattagagtcgaaagacttagaaagccacctggtgttctattgtact

SEQ ID NO: 4043 - DNA, 122 bp, Homo sapiens
  misc_feature (61)..(62): /note="This region represents a CpG dinucleotide"
  misc_feature (61)..(61): /note="Nucleotide may be methylated to form 5-methylcytosine"
gccaaagtgggcagatcacctgaggtcaggagtttgagaccaggaaactgaccaacatgacgaaacccagtctctactaacaatacaataattagtcagctgtggcagcacgcacctgtaat

SEQ ID NO: 4044 - DNA, 122 bp, Homo sapiens
  misc_feature (61)..(62): /note="This region represents a CpG dinucleotide"
  misc_feature (61)..(61): /note="Nucleotide may be methylated to form 5-methylcytosine"
agctccctctctctcaggagtttagagaggactagccaggcaatagcaagaaaaagaaagcgtccttagttgcagatgggggctcaccatggagagaccacaggctccaggaccgggccccc

SEQ ID NO: 4045 - DNA, 122 bp, Homo sapiens
  misc_feature (61)..(62): /note="This region represents a CpG dinucleotide"
  misc_feature (61)..(61): /note="Nucleotide may be methylated to form 5-methylcytosine"
gacatattccacccactaagtcataccagaagccttggtaatcatggtggatggtgtgaacgcaaatcccttagatttccattctgcaacaagctttcttggaggaaggtgtgaatatatca

SEQ ID NO: 4046 - DNA, 122 bp, Homo sapiens
  misc_feature (61)..(62): /note="This region represents a CpG dinucleotide"
  misc_feature (61)..(61): /note="Nucleotide may be methylated to form 5-methylcytosine"
agaccagggaaaatgatcacaaaaccagattctgaaaagtaccactctctggctttgagacgaagagcaaagctgttgagcaacagtatggggtaatgactttgaaacacctggagtggttg

SEQ ID NO: 4047 - DNA, 122 bp, Homo sapiens
  misc_feature (61)..(62): /note="This region represents a CpG dinucleotide"
  misc_feature (61)..(61): /note="Nucleotide may be methylated to form 5-methylcytosine"
gagtgctgaggtagttagttgacaccaccagttcattcagttcactaccttttcaatgttcgttagttctttcctgttctcacttcccttctggacatttaactaccagtgtctttgagcac

SEQ ID NO: 4048 - DNA, 122 bp, Homo sapiens
  misc_feature (61)..(62): /note="This region represents a CpG dinucleotide"
  misc_feature (61)..(61): /note="Nucleotide may be methylated to form 5-methylcytosine"
taaacaatcttcctagcatttgtagctgctgtagtatacgtggtacgatagttcccccaccgtaatccacagttttgctttctgtggtttcagttacctgcaggacagtattataagatatt

SEQ ID NO: 4049 - DNA, 122 bp, Homo sapiens
  misc_feature (61)..(62): /note="This region represents a CpG dinucleotide"
  misc_feature (61)..(61): /note="Nucleotide may be methylated to form 5-methylcytosine"
aggatgtgggttatacggggaagtggggaagtgcagcctggtaaatcttagaccattgtgcggattgtaagtgccctttgacatgttgtctattcatgggaaagatgactctatagtcagta

SEQ ID NO: 4050 - DNA, 122 bp, Homo sapiens
  misc_feature (61)..(62): /note="This region represents a CpG dinucleotide"
  misc_feature (61)..(61): /note="Nucleotide may be methylated to form 5-methylcytosine"
gtcaggagttctccctgcttttgccaaaccctctgcaggcacctcttatccatacagggacgcagccaaaggcctagctgtgctgaaggaaatttgcaaatcctgcctcaaatctgcagcca

SEQ ID NO: 4051 - DNA, 122 bp, Homo sapiens
  misc_feature (61)..(62): /note="This region represents a CpG dinucleotide"
  misc_feature (61)..(61): /note="Nucleotide may be methylated to form 5-methylcytosine"
gagggcctcattgctgcagtggggaagggagatgcttcatcagtaggcatgactcatagccgagcctgtgctcctggatttgttctgaagtgagattctattgtgtttattgcaaacagaca

SEQ ID NO: 4052 - DNA, 122 bp, Homo sapiens
  misc_feature (61)..(62): /note="This region represents a CpG dinucleotide"
  misc_feature (61)..(61): /note="Nucleotide may be methylated to form 5-methylcytosine"
gaaaacctgagcatttgcaggcatctggttaaagcagggtctgtgtgtacaattttaaaacgggtaatatgtcatgctcttagttcatcttcacaacaaaactatgagtaagcggtattagc

SEQ ID NO: 4053 - DNA, 122 bp, Homo sapiens
  misc_feature (61)..(62): /note="This region represents a CpG dinucleotide"
  misc_feature (61)..(61): /note="Nucleotide may be methylated to form 5-methylcytosine"
ctggagtgttttcaccccaacaagtggaaatgaacggaatgcaccactctgcctgcagtacggcgcttgcataaggtgcctgccctcatcagagttatacatcatcacttagaggcaagaac

SEQ ID NO: 4054 - DNA, 122 bp, Homo sapiens
  misc_feature (61)..(62): /note="This region represents a CpG dinucleotide"
  misc_feature (61)..(61): /note="Nucleotide may be methylated to form 5-methylcytosine"
tgaggaccccagggctggtggtgaatgggactggagaagccgtgacttgctgttgtgttgcgattgataacactttcactggcactaaactgggatagtgttaccacaggaaggaaattcct

SEQ ID NO: 4055 - DNA, 122 bp, Homo sapiens
  misc_feature (61)..(62): /note="This region represents a CpG dinucleotide"
  misc_feature (61)..(61): /note="Nucleotide may be methylated to form 5-methylcytosine"
tgctcctaaaaaaaaccttcctgggctgcccactgtggagtctgggtctcggagacaggacgggggccaccccagcctctgcccaggccagctgggactctgtgcacaaagaacccaggagc

SEQ ID NO: 4056 - DNA, 122 bp, Homo sapiens
  misc_feature (61)..(62): /note="This region represents a CpG dinucleotide"
  misc_feature (61)..(61): /note="Nucleotide may be methylated to form 5-methylcytosine"
agccgctatcttggatccactctgctatgaagaacagcatgctaggcaggccagaaggagcgatcacagagacaagccatatttgttaagagatggaatttaagaggacaggaatgaaggga

SEQ ID NO: 4057 - DNA, 122 bp, Homo sapiens
  misc_feature (61)..(62): /note="This region represents a CpG dinucleotide"
  misc_feature (61)..(61): /note="Nucleotide may be methylated to form 5-methylcytosine"
tggctaaaactagacactttctctttaagaccaggaaaaaggcagaggtatttccttttacggctcttattcaacatcataggggaagtcctagctaatgcaatgagacaagaaaaggaaat

SEQ ID NO: 4058 - DNA, 122 bp, Homo sapiens
  misc_feature (61)..(62): /note="This region represents a CpG dinucleotide"
  misc_feature (61)..(61): /note="Nucleotide may be methylated to form 5-methylcytosine"
caacgtcgacatcaacatcattagcaaaacatgattcaggtgttcggctgggcagaccctcgcacatggcaatctaaatgaataagcacacttccttctcatttttgagaatgtagctgaga

SEQ ID NO: 4059 - DNA, 122 bp, Homo sapiens
  misc_feature (61)..(62): /note="This region represents a CpG dinucleotide"
  misc_feature (61)..(61): /note="Nucleotide may be methylated to form 5-methylcytosine"
cagctttcgaggtggccttcctggtgggccagtacctgctgtacggcttcgaggtgcgaccgttctttccctgcagccgccagccctgcccgcacgtggtggactgcttcgtgtcgcgccct

SEQ ID NO: 4060 - DNA, 122 bp, Homo sapiens
  misc_feature (61)..(62): /note="This region represents a CpG dinucleotide"
  misc_feature (61)..(61): /note="Nucleotide may be methylated to form 5-methylcytosine"
atttgaggacggagatcaaggagttcaaggacccataagacatgaacttcgttgtcccttcgttttcctgcctcctacaggagagaaataacttggcctcctcaattcttgtttgtctttaa

SEQ ID NO: 4061 - DNA, 122 bp, Homo sapiens
  misc_feature (61)..(62): /note="This region represents a CpG dinucleotide"
  misc_feature (61)..(61): /note="Nucleotide may be methylated to form 5-methylcytosine"
gactctgtatgagaccttcttcaaaaaggacagttaagtaactgcaacctgaatctgaaacgtaagaaaaagtccaaacagatggcaccattcaaataaagaagaattctcactgctctccc

SEQ ID NO: 4062 - DNA, 122 bp, Homo sapiens
  misc_feature (61)..(62): /note="This region represents a CpG dinucleotide"
  misc_feature (61)..(61): /note="Nucleotide may be methylated to form 5-methylcytosine"
ctgcatgctagacacttgcccatcttattagtgatttatataaagatagatgtgtatgtacgtacccataaacacatgcatagtcatagcatggggaagtcagcttgatcgtctcagtagct

SEQ ID NO: 4063 - DNA, 122 bp, Homo sapiens
  misc_feature (61)..(62): /note="This region represents a CpG dinucleotide"
  misc_feature (61)..(61): /note="Nucleotide may be methylated to form 5-methylcytosine"
gctattgattgaactatttattctaccaatagacaatacctatggtgcttttctgtggcacgtttagataaaatatttgctaacctttcagcacagagggagatgaagccctgctagtgaag

SEQ ID NO: 4064 - DNA, 122 bp, Homo sapiens
  misc_feature (61)..(62): /note="This region represents a CpG dinucleotide"
  misc_feature (61)..(61): /note="Nucleotide may be methylated to form 5-methylcytosine"
ccgggaatagaatcatggtgaatgccccttctgtcttatccctctcaatcccttgtcaagcgacaacttcaatagctattgaaaggaaaggcacatgtgcacagagagttaaaacatttctt

SEQ ID NO: 4065 - DNA, 122 bp, Homo sapiens
  misc_feature (61)..(62): /note="This region represents a CpG dinucleotide"
  misc_feature (61)..(61): /note="Nucleotide may be methylated to form 5-methylcytosine"
gaagtgcgccccgttccgatcagtggggtccagggggtcgggccccgtggggagtcccaccgactccccttccgagaggccgttgtaaagctttagcatcctgtgcgccttccgccgacact

SEQ ID NO: 4066 - DNA, 122 bp, Homo sapiens
  misc_feature (61)..(62): /note="This region represents a CpG dinucleotide"
  misc_feature (61)..(61): /note="Nucleotide may be methylated to form 5-methylcytosine"
taccttatttcaggccctgacaaagcaaagaccacttagattccaggaagagagaaaaaccgtgtcaacagtgataaatctggagacagaggcaccatgtgacttcctggtatattgatcct

SEQ ID NO: 4067 - DNA, 122 bp, Homo sapiens
  misc_feature (61)..(62): /note="This region represents a CpG dinucleotide"
  misc_feature (61)..(61): /note="Nucleotide may be methylated to form 5-methylcytosine"
acagagagtgataccccaggaaagcttcctaacacagagcaagcatgctacctaagtccacgtcccaaaatgactcatgtgtgcatgctgaatcaccatacaaagaaaatgtaggttctgtg

SEQ ID NO: 4068 - DNA, 122 bp, Homo sapiens
  misc_feature (61)..(62): /note="This region represents a CpG dinucleotide"
  misc_feature (61)..(61): /note="Nucleotide may be methylated to form 5-methylcytosine"
aagaaaattctcctgataaaacaacagctcgatccaaattgtgcttctccccagaattcacgcctctccctaggagaagagttgaggaactgtacagaaaagggcggcttcgttagaccgct

SEQ ID NO: 4069 - DNA, 122 bp, Homo sapiens
  misc_feature (61)..(62): /note="This region represents a CpG dinucleotide"
  misc_feature (61)..(61): /note="Nucleotide may be methylated to form 5-methylcytosine"
actctagtgtgtctcaacggcatactattgatgcaataattttggagcacaagaattcctcgtcatgcaagactatcccaggcaatgaaaggtatttagcattctggccccgcccataaaat

SEQ ID NO: 4070 - DNA, 122 bp, Homo sapiens
  misc_feature (61)..(62): /note="This region represents a CpG dinucleotide"
  misc_feature (61)..(61): /note="Nucleotide may be methylated to form 5-methylcytosine"
gacagggttctgccatgctggccaggctggtcttgaattactggcctcaactgatccatccgcctcagcctcccaaagtgctgggattacaggtgtacaccctgcccagccacaagccgatt

SEQ ID NO: 4071 - DNA, 122 bp, Homo sapiens
  misc_feature (61)..(62): /note="This region represents a CpG dinucleotide"
  misc_feature (61)..(61): /note="Nucleotide may be methylated to form 5-methylcytosine"
gccagatgcgcactatacaacactgttgcataacctggcctttcctctgcctgtgacccccgtgtccccaccatgaggtcctggagttggttcaattaattgtagacagcatactataaatt

SEQ ID NO: 4072 - DNA, 122 bp, Homo sapiens
  misc_feature (61)..(62): /note="This region represents a CpG dinucleotide"
  misc_feature (61)..(61): /note="Nucleotide may be methylated to form 5-methylcytosine"
ttagatcacgcgagccatgctcaggggcttagagctgagcctgaaaccagaggacaaccacggaatgattcgaatcagaggagggacataatccatttcagcaagatggctcaggcacaagt

SEQ ID NO: 4073 - DNA, 122 bp, Homo sapiens
  misc_feature (61)..(62): /note="This region represents a CpG dinucleotide"
  misc_feature (61)..(61): /note="Nucleotide may be methylated to form 5-methylcytosine"
gctgtctgtcatgcttgccatttttatgaaacactttattgcaggtcagctattattgcacgtgctacttcaagtcactggctcaggctggtgtcatgtgtggtttgctgcaaacggcagcc

SEQ ID NO: 4074 - DNA, 122 bp, Homo sapiens
  misc_feature (61)..(62): /note="This region represents a CpG dinucleotide"
  misc_feature (61)..(61): /note="Nucleotide may be methylated to form 5-methylcytosine"
agttccccaaggccatcagctatttcttagcagggcatttgaggcctctgcacccagcttcgttcatcctttaaggtaggtctcacatggcatgaactctggatgtagctgccaactcagct

SEQ ID NO: 4075 - DNA, 122 bp, Homo sapiens
  misc_feature (61)..(62): /note="This region represents a CpG dinucleotide"
  misc_feature (61)..(61): /note="Nucleotide may be methylated to form 5-methylcytosine"
actgaagagcaggtgagcaaaatgctgctttctgccttggtggcaggcagagaactgtctcgtactagaattcaaggaggaaagaagaagaaataaaagaagctgctccatttttcatcatc

SEQ ID NO: 4076 - DNA, 122 bp, Homo sapiens
  misc_feature (61)..(62): /note="This region represents a CpG dinucleotide"
  misc_feature (61)..(61): /note="Nucleotide may be methylated to form 5-methylcytosine"
ggccttcgcccaggtgcagccgtagggactgcggctcgtcagcctgacgccatcaagctgcgccccagccagccagtcaatggctgtgtccagagcttcccgcctcgggctcagcgtaggtg

SEQ ID NO: 4077 - DNA, 122 bp, Homo sapiens
  misc_feature (61)..(62): /note="This region represents a CpG dinucleotide"
  misc_feature (61)..(61): /note="Nucleotide may be methylated to form 5-methylcytosine"
tttcttctggcagcactcccagaaactaaggtaaagtctccgttattcctgagggggatccggatggcttatcatgtccatcacactccacaatgctatataataccataaaactttgcaaa

SEQ ID NO: 4078 - DNA, 122 bp, Homo sapiens
  misc_feature (61)..(62): /note="This region represents a CpG dinucleotide"
  misc_feature (61)..(61): /note="Nucleotide may be methylated to form 5-methylcytosine"
gtggccacactaaacaccagatttgcagtgcacataaaacagccttctgctggaagatgccgtctagggcttttacagttacagaggagaagtcgatccctgccttcaaagtttcagaggac

SEQ ID NO: 4079 - DNA, 122 bp, Homo sapiens
  misc_feature (61)..(62): /note="This region represents a CpG dinucleotide"
  misc_feature (61)..(61): /note="Nucleotide may be methylated to form 5-methylcytosine"
atcatttacaggaaaaaccagaagttgcagctgcatgctatatgactcaggtcacatggccgcattgctctcaaggctcaacataatttaaagttccgccagctttaggtttgaattattta

SEQ ID NO: 4080 - DNA, 122 bp, Homo sapiens
  misc_feature (61)..(62): /note="This region represents a CpG dinucleotide"
  misc_feature (61)..(61): /note="Nucleotide may be methylated to form 5-methylcytosine"
caggaggttgccgtgcacacgcagtgagagcggtcgtgatgctgctgcgtgatgctatgacgcagatttggagcacaggagacaggttgagacacgcttgttacgtgtgccactcagcagtg

SEQ ID NO: 4081 - DNA, 122 bp, Homo sapiens
  misc_feature (61)..(62): /note="This region represents a CpG dinucleotide"
  misc_feature (61)..(61): /note="Nucleotide may be methylated to form 5-methylcytosine"
gatgtcaggtcagaatattggagttatacatctatttctgagttgaatactcagctcccacgagaaagaaagtagttttaaggtccagcttcttagtctacttgaagcaaattttttttctt

SEQ ID NO: 4082 - DNA, 122 bp, Homo sapiens
  misc_feature (61)..(62): /note="This region represents a CpG dinucleotide"
  misc_feature (61)..(61): /note="Nucleotide may be methylated to form 5-methylcytosine"
tcccaacactttaggagtcccaggcaggagaattgcttcaagtccagcctggcaatatagcgagattttgtctctacaaaaaatttaaaaattagttggacatggtgttgtgcacctgtagt

SEQ ID NO: 4083 - DNA, 122 bp, Homo sapiens
  misc_feature (61)..(62): /note="This region represents a CpG dinucleotide"
  misc_feature (61)..(61): /note="Nucleotide may be methylated to form 5-methylcytosine"
gaactaagtatttttgtgcatgtgttattgagagcattacaggaatctgtagggtaagtgcgtaggaatagaattgctgggttgaatgacacatgcatctgaaatattgatagatagtgcag

SEQ ID NO: 4084 - DNA, 122 bp, Homo sapiens
  misc_feature (61)..(62): /note="This region represents a CpG dinucleotide"
  misc_feature (61)..(61): /note="Nucleotide may be methylated to form 5-methylcytosine"
gcttttgctgccttgttttgtccaattctttgttcaaaaagccaagaacctgggcaactacgcttaactggtaacatatgttggggaaccagccaggaggtaagcccaaagtttaggattta

SEQ ID NO: 4085 - DNA, 122 bp, Homo sapiens
  misc_feature (61)..(62): /note="This region represents a CpG dinucleotide"
  misc_feature (61)..(61): /note="Nucleotide may be methylated to form 5-methylcytosine"
aacagtctgaaaaatacattaaactttaaaaccactcttccaaccacgcatgcagaagttcgccaaagcatacagtatgtctttcaattacgtaatgcttcaaatagcgaacagagcaaaag

SEQ ID NO: 4086 - DNA, 122 bp, Homo sapiens
  misc_feature (61)..(62): /note="This region represents a CpG dinucleotide"
  misc_feature (61)..(61): /note="Nucleotide may be methylated to form 5-methylcytosine"
agctggtcacgtgccccggcgggcgggggagggggcatgtcggggagccggggccgggggcggtcagccccactctaccaacattgatagaaagaaaagaggaggtcttcaaggaaaattag

SEQ ID NO: 4087 - DNA, 122 bp, Homo sapiens
  misc_feature (61)..(62): /note="This region represents a CpG dinucleotide"
  misc_feature (61)..(61): /note="Nucleotide may be methylated to form 5-methylcytosine"
gggttatgacattctgtgcttttctgtgtacttactattcctagtgagttttgtatcttccgatgatttcttattgctcattaatgtccttttctttcaggttgaagaatgccaattagtat

SEQ ID NO: 4088 - DNA, 122 bp, Homo sapiens
  misc_feature (61)..(62): /note="This region represents a CpG dinucleotide"
  misc_feature (61)..(61): /note="Nucleotide may be methylated to form 5-methylcytosine"
cagcagatggtgtttcctggattctgtcccagtgtgtaaaatatgtatgaatgaggaggacgcctggaaggaaataaataaaaccgaaaacacatttgttggggtgatgaaatgatgcatga

SEQ ID NO: 4089 - DNA, 122 bp, Homo sapiens
  misc_feature (61)..(62): /note="This region represents a CpG dinucleotide"
  misc_feature (61)..(61): /note="Nucleotide may be methylated to form 5-methylcytosine"
ttgctgtgggcaccctctttgctagggtgccaaggtcggagctgatattggttatctcatcgggccttgcagcagcgccgcagatattctgcctcccattttgcccgcggggacgccgaggc

SEQ ID NO: 4090 - DNA, 122 bp, Homo sapiens
  misc_feature (61)..(62): /note="This region represents a CpG dinucleotide"
  misc_feature (61)..(61): /note="Nucleotide may be methylated to form 5-methylcytosine"
tttgtattcctagaacctagcacaatgcctgacacatagcaggtgttccataaatatctgcggactgactgtctatttcacttatccttgttccttgtactgcatttcagttctcgctactg

SEQ ID NO: 4091 - DNA, 122 bp, Homo sapiens
  misc_feature (61)..(62): /note="This region represents a CpG dinucleotide"
  misc_feature (61)..(61): /note="Nucleotide may be methylated to form 5-methylcytosine"
tcttcaaattgtctttgatgcttttagtacaccttgcacttttttcttgctatctagacacgaagtactgagaaacagaaactggtataaataggtcttcagtgatgtggtattaaggtgtt

SEQ ID NO: 4092 - DNA, 122 bp, Homo sapiens
  misc_feature (61)..(62): /note="This region represents a CpG dinucleotide"
  misc_feature (61)..(61): /note="Nucleotide may be methylated to form 5-methylcytosine"
aagttcaatctatgtggttaaatagggaagcagaccataagatgtatgcccagtggtgcacgttgctgactcgcaagctatgtgcaggctttagcatttagtgtggtgatgtgtgccctcta

SEQ ID NO: 4093 - DNA, 122 bp, Homo sapiens
  misc_feature (61)..(62): /note="This region represents a CpG dinucleotide"
  misc_feature (61)..(61): /note="Nucleotide may be methylated to form 5-methylcytosine"
cgcctaccggatccgaggtgcgtggcggggcgggtgggcacgcgggagcgggggtggcagcgggcaggtgggcacccccgccgacgccgtcccgtcccccaggccgcgacggagggttctgg

SEQ ID NO: 4094 - DNA, 122 bp, Homo sapiens
  misc_feature (61)..(62): /note="This region represents a CpG dinucleotide"
  misc_feature (61)..(61): /note="Nucleotide may be methylated to form 5-methylcytosine"
ttcctgtggtgagttactgatcctgatgttccccatgttctgtttccttgctgtttggtccgtgatgcagctttaccctgttctcctcactatttataaatgatcacgccctctcccattgt

SEQ ID NO: 4095 - DNA, 122 bp, Homo sapiens
  misc_feature (61)..(62): /note="This region represents a CpG dinucleotide"
  misc_feature (61)..(61): /note="Nucleotide may be methylated to form 5-methylcytosine"
gacgggcttaggtcatgcagtagtcaaattcagaactcatgtttgattccaaagcccacacgttttcctagtttagaaacactaaacatttaattcaccgcaccgggggccagacaggtaat

SEQ ID NO: 4096 - DNA, 122 bp, Homo sapiens
  misc_feature (61)..(62): /note="This region represents a CpG dinucleotide"
  misc_feature (61)..(61): /note="Nucleotide may be methylated to form 5-methylcytosine"
gaaagttgacagggtagaaatcatttttgtagacaagaaaattgaagcacaaggcgataacgcaacttgcccagcagcacatggttattaataggtggagcgggaattagaagccaggtttt

SEQ ID NO: 4097 - DNA, 122 bp, Homo sapiens
  misc_feature (61)..(62): /note="This region represents a CpG dinucleotide"
  misc_feature (61)..(61): /note="Nucleotide may be methylated to form 5-methylcytosine"
tctctctgacatgtaaacatatgtctttctagacaggcaggtctccctatacctgccttacgtgggaagcacgtccgcaggagaggtgccacccagtgcctccagcactgatcaggcctttc

SEQ ID NO: 4098 - DNA, 122 bp, Homo sapiens
  misc_feature (61)..(62): /note="This region represents a CpG dinucleotide"
  misc_feature (61)..(61): /note="Nucleotide may be methylated to form 5-methylcytosine"
aaagtatatgaaagataattttgaatgttctgtatttagaatgtgcttcaacatttaatgcgatctaatttacatatcctttctggtgctattgcaaggtttgtcagggttttacggcaaca

SEQ ID NO: 4099 - DNA, 122 bp, Homo sapiens
  misc_feature (61)..(62): /note="This region represents a CpG dinucleotide"
  misc_feature (61)..(61): /note="Nucleotide may be methylated to form 5-methylcytosine"
catacaagcaacaacaaagaaacttaagaatttgctcaaatgttgggaattacctaaaatcggagtgaactctcttaattgaggtgtaagcaaagggatcatttctaaaattgcctaattgt

SEQ ID NO: 4100 - DNA, 122 bp, Homo sapiens
  misc_feature (61)..(62): /note="This region represents a CpG dinucleotide"
  misc_feature (61)..(61): /note="Nucleotide may be methylated to form 5-methylcytosine"
ggccaacctgtttggcctggaaagagtaagggacttgcctaagatcatatggcttattcacggcacaccaaaagtagatgtgaggctgtcagctcattactgctgctacttcagtctaggtg

SEQ ID NO: 4101 - DNA, 122 bp, Homo sapiens
  misc_feature (61)..(62): /note="This region represents a CpG dinucleotide"
  misc_feature (61)..(61): /note="Nucleotide may be methylated to form 5-methylcytosine"
agcaatgagcacctcctagtgatccaagcactgcccctcctacccacataagcagtaagacgatccaggaggaggcgtaactagttaggacaagaaggaaggtgttttgttttgttttttaa

SEQ ID NO: 4102 - DNA, 122 bp, Homo sapiens
  misc_feature (61)..(62): /note="This region represents a CpG dinucleotide"
  misc_feature (61)..(61): /note="Nucleotide may be methylated to form 5-methylcytosine"
actgcagaggaattgcccatcttaagggcaaaggccatcctatttggtttcaccaaatgccgggcattgatccccaggactggcaagagttggagaagtctagtttccataaatctagaata

SEQ ID NO: 4103 - DNA, 122 bp, Homo sapiens
  misc_feature (61)..(62): /note="This region represents a CpG dinucleotide"
  misc_feature (61)..(61): /note="Nucleotide may be methylated to form 5-methylcytosine"
gaactgttatgaggattgaatgaatgcagactggccatcccctgaggtctgtgtctggcccgcagtaagtgctgttcaataacaaatgtggctatgtcccagagcaagggagaaacctgaga

SEQ ID NO: 4104 - DNA, 122 bp, Homo sapiens
  misc_feature (61)..(62): /note="This region represents a CpG dinucleotide"
  misc_feature (61)..(61): /note="Nucleotide may be methylated to form 5-methylcytosine"
ccgtctatatttagcccatgagcagctttcccctacccagtacccaccctgccttgctgccgtggtctctcacccagcccatcccacagaagtcagggttttaccttggacttttatcttta

SEQ ID NO: 4105 - DNA, 122 bp, Homo sapiens
  misc_feature (61)..(62): /note="This region represents a CpG dinucleotide"
  misc_feature (61)..(61): /note="Nucleotide may be methylated to form 5-methylcytosine"
tgtgtctgagtctcttcactgagaggtgagctttgctacccccagaatggcctccatctgcgttgctttgcattcgggcatgtggtgggagggggcagctcctcctattcacccacagcaag

SEQ ID NO: 4106 - DNA, 122 bp, Homo sapiens
  misc_feature (61)..(62): /note="This region represents a CpG dinucleotide"
  misc_feature (61)..(61): /note="Nucleotide may be methylated to form 5-methylcytosine"
acggctgccaactcctggtgactggtggacccgtccccaactcctggtgactggtggacccgtccccaactcctggggggctctcccctatcccaaaatagccactcctgcctgcagccaac

SEQ ID NO: 4107 - DNA, 122 bp, Homo sapiens
  misc_feature (61)..(62): /note="This region represents a CpG dinucleotide"
  misc_feature (61)..(61): /note="Nucleotide may be methylated to form 5-methylcytosine"
ctggagtttattactgctagggcacacagagcaatccttaaaaatgcgtaagtcagatcacgttcctcctctgcccacaccctcccctggctagtatctcactccaagtaaaagctaagctc

SEQ ID NO: 4108 - DNA, 122 bp, Homo sapiens
  misc_feature (61)..(62): /note="This region represents a CpG dinucleotide"
  misc_feature (61)..(61): /note="Nucleotide may be methylated to form 5-methylcytosine"
cattctcttcctgggtgatcatctgcagcctgttgagaaagaggctttaacttcatagcacgagagctgggacatcaccatatggcagacccggctacagaggaaacacccaaaaatgacag

SEQ ID NO: 4109 - DNA, 122 bp, Homo sapiens
  misc_feature (61)..(62): /note="This region represents a CpG dinucleotide"
  misc_feature (61)..(61): /note="Nucleotide may be methylated to form 5-methylcytosine"
gaagcacctcatctgactacagaaaacaacgacatctggagaagttatttcctgcataatcgggaaaaagaaatgaatcaatcacttttaaaacaggttcttccttttctactgtcatctat

SEQ ID NO: 4110 - DNA, 122 bp, Homo sapiens
  misc_feature (61)..(62): /note="This region represents a CpG dinucleotide"
  misc_feature (61)..(61): /note="Nucleotide may be methylated to form 5-methylcytosine"
ttaaaatataaagatgctattttcaccacattggagcagaagtgcatttgggccccagatcgccacctagtgaccagaaaagaacccattgggcataaccaataagtctgatgggtgtccat

SEQ ID NO: 4111 - DNA, 122 bp, Homo sapiens
  misc_feature (61)..(62): /note="This region represents a CpG dinucleotide"
  misc_feature (61)..(61): /note="Nucleotide may be methylated to form 5-methylcytosine"
gtgctttgttatttatgtttcagagagattttgtagccttcagctctcaagaatgtgtcacgctgtgctgtttatacattgaagatattaatgggcgtagatgtcatttttcattttaatgt

SEQ ID NO: 4112 - DNA, 122 bp, Homo sapiens
  misc_feature (61)..(62): /note="This region represents a CpG dinucleotide"
  misc_feature (61)..(61): /note="Nucleotide may be methylated to form 5-methylcytosine"
ccagggacgggccacaggctccctgcctggggtccaagcctagatcgctcgctccccacccgcaccaaagcccaggcaaagggtgcttcagccacttcctgttgcaggctcagaccaagtcc

SEQ ID NO: 4113 - DNA, 122 bp, Homo sapiens
  misc_feature (61)..(62): /note="This region represents a CpG dinucleotide"
  misc_feature (61)..(61): /note="Nucleotide may be methylated to form 5-methylcytosine"
ccttagcaataccctcccaagggccttcggatgtagttcaggggagtgaccaagagatgacgctattcttgttagtgcaagccagatgagctgggaaaaagaacatttcaccaaacagcttt

SEQ ID NO: 4114 - DNA, 122 bp, Homo sapiens
  misc_feature (61)..(62): /note="This region represents a CpG dinucleotide"
  misc_feature (61)..(61): /note="Nucleotide may be methylated to form 5-methylcytosine"
agggtaataatacctaagtgacaggttgtttcatggaattacaggcatgttaacacctaacgcaaagttaagtactcaataaaggctatatatcaggagggcttacccttaagacatgagcc

SEQ ID NO: 4115 - DNA, 122 bp, Homo sapiens
  misc_feature (61)..(62): /note="This region represents a CpG dinucleotide"
  misc_feature (61)..(61): /note="Nucleotide may be methylated to form 5-methylcytosine"
taaaaaacacacacacacaaaatccaagaaatcacagtcttgagatacagtatcaaaaaccgtacctccaaatggtaactcaaggcaacaaaaaaattgaggggtaaaaaactaaattgcac

SEQ ID NO: 4116 - DNA, 122 bp, Homo sapiens
  misc_feature (61)..(62): /note="This region represents a CpG dinucleotide"
  misc_feature (61)..(61): /note="Nucleotide may be methylated to form 5-methylcytosine"
tttgtttctttctctttttttttctcttctctctagtttatttccctcgatttcaatctacgatgcttctactggatggtaactttcaactctcataattttaatttcccagagcttttctg

SEQ ID NO: 4117 - DNA, 122 bp, Homo sapiens
  misc_feature (61)..(62): /note="This region represents a CpG dinucleotide"
  misc_feature (61)..(61): /note="Nucleotide may be methylated to form 5-methylcytosine"
ggattctagtaaaaaggtgtggacacttacaaaagaaggtcatcggataacagtgagtaccgtgagtgaaccatccagccctttccattaggtgggacaaggttatattttattttcactgg

SEQ ID NO: 4118 - DNA, 122 bp, Homo sapiens
  misc_feature (61)..(62): /note="This region represents a CpG dinucleotide"
  misc_feature (61)..(61): /note="Nucleotide may be methylated to form 5-methylcytosine"
cccggcggctcggcgcggtcttggtctgggtcggtggggttgggccgggagacccgcggccggcggggtccaggctgggggaggccgccgctgccaccaggtccccgaggtagggtaggaag

SEQ ID NO: 4119 - DNA, 122 bp, Homo sapiens
  misc_feature (61)..(62): /note="This region represents a CpG dinucleotide"
  misc_feature (61)..(61): /note="Nucleotide may be methylated to form 5-methylcytosine"
gcggctcctcgggcactcctgccctccttgcaagtccccagttcgcttctccctcctcagcgcgccccaggagcagctcgcactcctggttcaggttgcagctgcccttctccaccacacgg

SEQ ID NO: 4120 - DNA, 122 bp, Homo sapiens
  misc_feature (61)..(62): /note="This region represents a CpG dinucleotide"
  misc_feature (61)..(61): /note="Nucleotide may be methylated to form 5-methylcytosine"
atgcaaacaatatttgtccagtggttgtttgtggaaactcctgtgccgggtgactgctaacgtgggtgatagtagggcttcaaggataagtaaacattagcctcgcctttaattactttcca

SEQ ID NO: 4121 - DNA, 122 bp, Homo sapiens
  misc_feature (61)..(62): /note="This region represents a CpG dinucleotide"
  misc_feature (61)..(61): /note="Nucleotide may be methylated to form 5-methylcytosine"
aattcagcttcgttttctgccgagctctgttcctgcttgtacccagagtcgttcaccttgcgcagcacaaatgtcacattctgggaatgagcctgacacttcagggtcacattgctctcggc

SEQ ID NO: 4122 - DNA, 122 bp, Homo sapiens
  misc_feature (61)..(62): /note="This region represents a CpG dinucleotide"
  misc_feature (61)..(61): /note="Nucleotide may be methylated to form 5-methylcytosine"
gaggcggaagttgcagtgagccgagatcacgccactgcgctccaacctgggtgacaagagcgaaactctgtttcaaaaaaaaggaaaacgtatgtggatgaaaggcccgtacttaagagcta

SEQ ID NO: 4123 - DNA, 122 bp, Homo sapiens
  misc_feature (61)..(62): /note="This region represents a CpG dinucleotide"
  misc_feature (61)..(61): /note="Nucleotide may be methylated to form 5-methylcytosine"
ccctagtattttattatacaaatgcggcctccacctggtggcggccatgatacctgtacacgtgctttaacctggaggctgccttgacacctgtaaacgtagaagggaaagagggtgagaat

SEQ ID NO: 4124 - DNA, 122 bp, Homo sapiens
  misc_feature (61)..(62): /note="This region represents a CpG dinucleotide"
  misc_feature (61)..(61): /note="Nucleotide may be methylated to form 5-methylcytosine"
ggatgctctttcattcctttatgctgcttgggacaggtgcgctcccagaagggatcctgtcgccagttctgggggagcccagccatgctctccccctgcccaccccacagagccctctctgg

SEQ ID NO: 4125 - DNA, 122 bp, Homo sapiens
  misc_feature (61)..(62): /note="This region represents a CpG dinucleotide"
  misc_feature (61)..(61): /note="Nucleotide may be methylated to form 5-methylcytosine"
ccccgcctccccgcttccccgccccgcccccgggtgctgttctgacttccctccctcctccgcagctgttcagcccctcggtgaccgtgcccgacatgagcctgcctgaccttgacagcagc

SEQ ID NO: 4126 - DNA, 122 bp, Homo sapiens
  misc_feature (61)..(62): /note="This region represents a CpG dinucleotide"
  misc_feature (61)..(61): /note="Nucleotide may be methylated to form 5-methylcytosine"
tccaaaacccaggttgcaccataccatctcaaacagagtgatggtgcaaggacaggcatacgaggtcagtctggccaatcaggatccccctaggagttttgcagtgaggaacacttttagat

SEQ ID NO: 4127 - DNA, 122 bp, Homo sapiens
  misc_feature (61)..(62): /note="This region represents a CpG dinucleotide"
  misc_feature (61)..(61): /note="Nucleotide may be methylated to form 5-methylcytosine"
tgattgtctttgtggtgctgaaagccgagtgagtcccacttcccgtggctgcacagacgccgtgggctcagaagccctgcaggctggtagccagactcccttccccaggcacgaactcagca

SEQ ID NO: 4128 - DNA, 122 bp, Homo sapiens
  misc_feature (61)..(62): /note="This region represents a CpG dinucleotide"
  misc_feature (61)..(61): /note="Nucleotide may be methylated to form 5-methylcytosine"
agagtcacatgggccctccagagggcactgcagtgggttggcaccggcatggtcagtgcccgcatggtcagtgcatttgggaaagcaagtgggcagagtgggcagtgaccggtggtcagtca

SEQ ID NO: 4129 - DNA, 122 bp, Homo sapiens
  misc_feature (61)..(62): /note="This region represents a CpG dinucleotide"
  misc_feature (61)..(61): /note="Nucleotide may be methylated to form 5-methylcytosine"
ggcctctgcatggccccggggggccaaagctgcgggaagagcagagtcaggctcaggaggcgcagcagcccgacggggctcccaggcaccgcgaggagagacgcaggcctgggtgcagaggc

SEQ ID NO: 4130 - DNA, 122 bp, Homo sapiens
  misc_feature (61)..(62): /note="This region represents a CpG dinucleotide"
  misc_feature (61)..(61): /note="Nucleotide may be methylated to form 5-methylcytosine"
cagcactcagcacccggatgcgctgctcttgcagacacagacccgtggctactgccgatgcgcagccttctggataaatcctatgcactggatgacttgctctccaggagccatgatttgct

SEQ ID NO: 4131 - DNA, 122 bp, Homo sapiens
  misc_feature (61)..(62): /note="This region represents a CpG dinucleotide"
  misc_feature (61)..(61): /note="Nucleotide may be methylated to form 5-methylcytosine"
ttacagcagctcatttcctaaaaggaagtcctatttacgatgcaccatatgttttgccagcggccgtacccctgagggctggagtcttgtcagatctccttagataagcagggttgggctgc

SEQ ID NO: 4132 - DNA, 122 bp, Homo sapiens
  misc_feature (61)..(62): /note="This region represents a CpG dinucleotide"
  misc_feature (61)..(61): /note="Nucleotide may be methylated to form 5-methylcytosine"
attggaggtcaccccgttaagtcaggaagcctgtctcttacttcaggtacaaagaatgaacgaatgcaggggactaaggcataaacaagggctcatgaatactgtatattgcttggggcctc

SEQ ID NO: 4133 - DNA, 122 bp, Homo sapiens
  misc_feature (61)..(62): /note="This region represents a CpG dinucleotide"
  misc_feature (61)..(61): /note="Nucleotide may be methylated to form 5-methylcytosine"
gaattgtacacctgaacacagagtcaggaagcacttgtcattgtggccactttagccactcgcccacatacatcaccgtaataaccactcagtgggcttggacaaaagacaaacccaaaagt

SEQ ID NO: 4134 - DNA, 122 bp, Homo sapiens
  misc_feature (61)..(62): /note="This region represents a CpG dinucleotide"
  misc_feature (61)..(61): /note="Nucleotide may be methylated to form 5-methylcytosine"
agggacttcttcagatgtcttctgtttgggagccgtgtctataacctcctgaaggtcttccgtcaaaggagctctaaggacaggggagatccttagggggcccactgggggaatgagacatg

SEQ ID NO: 4135 - DNA, 122 bp, Homo sapiens
  misc_feature (61)..(62): /note="This region represents a CpG dinucleotide"
  misc_feature (61)..(61): /note="Nucleotide may be methylated to form 5-methylcytosine"
tttatataaactgtaactgtgcatagattacacagtgcttacccttggggacaattggaacgtatctaattgacagacctggggcatactgcctgctgctaaggtttccactacaggggaga

SEQ ID NO: 4136 - DNA, 122 bp, Homo sapiens
  misc_feature (61)..(62): /note="This region represents a CpG dinucleotide"
  misc_feature (61)..(61): /note="Nucleotide may be methylated to form 5-methylcytosine"
ggccagggcagacctattttttctatgtcctggttttcactttgctgccattcacagggacgatcaggaactcgggtaccattcacagccagaggagccacagcccgcagctgtcaatcact

SEQ ID NO: 4137 - DNA, 122 bp, Homo sapiens
  misc_feature (61)..(62): /note="This region represents a CpG dinucleotide"
  misc_feature (61)..(61): /note="Nucleotide may be methylated to form 5-methylcytosine"
ccaagcagtccctgccccattactgaccctgcaactctgtagacaatcagaaccttccagcgtgcaggaatgtttactatttctggccattgtgtactggttactaagctactgccactgag

SEQ ID NO: 4138 - DNA, 122 bp, Homo sapiens
  misc_feature (61)..(62): /note="This region represents a CpG dinucleotide"
  misc_feature (61)..(61): /note="Nucleotide may be methylated to form 5-methylcytosine"
cagagtaattagaaacctgcattcaaaaacacctatcaaaatccaatagctaattataaacgaccttttgaagaggactgaaaataagacaattgtctgtggatgacaaagtcttaggacag

SEQ ID NO: 4139 - DNA, 122 bp, Homo sapiens
  misc_feature (61)..(62): /note="This region represents a CpG dinucleotide"
  misc_feature (61)..(61): /note="Nucleotide may be methylated to form 5-methylcytosine"
gcgagagggtcacactcccgtaggctccggagctgcagccctacccaccaggcgtccccgcggcctctagaatattgtagaatcttcccaagagcccccgcgggaaggaggcccgccccctc

SEQ ID NO: 4140 - DNA, 122 bp, Homo sapiens
  misc_feature (61)..(62): /note="This region represents a CpG dinucleotide"
  misc_feature (61)..(61): /note="Nucleotide may be methylated to form 5-methylcytosine"
agagaagtctaccacctgtgatacacgcctcagatttatgatcggtttccagggaccagccgaacagcctcgctgcctgcctcttcataaatcaggcactgaaagcagttcagatgcgaatt

SEQ ID NO: 4141 - DNA, 122 bp, Homo sapiens
  misc_feature (61)..(62): /note="This region represents a CpG dinucleotide"
  misc_feature (61)..(61): /note="Nucleotide may be methylated to form 5-methylcytosine"
ggcgaatggcagcacctggctggaaaaggagtgaggggaagtatgggtggctgattgtgacggaaacacaaggctgtacagcactggccatgttccttgagtcaaaatgatccaggtggctt

SEQ ID NO: 4142 - DNA, 122 bp, Homo sapiens
  misc_feature (61)..(62): /note="This region represents a CpG dinucleotide"
  misc_feature (61)..(61): /note="Nucleotide may be methylated to form 5-methylcytosine"
gccggccggctaaccccgggctggcggccttgcagcgtgcgtggcaacagcagctgggcccgcaagactcagcacgggacgtcctcgtccaagtctgggccaagagcagcggcccagggggc

SEQ ID NO: 4143 - DNA, 122 bp, Homo sapiens
  misc_feature (61)..(62): /note="This region represents a CpG dinucleotide"
  misc_feature (61)..(61): /note="Nucleotide may be methylated to form 5-methylcytosine"
gaagtgtttggaattggcaggtaaggaaaaataataagggagcagccttagaaggataagcgcgtctttagtgtcagcaatccttgggctgtagttcatctgataacaaggtcaaaagtctc

SEQ ID NO: 4144 - DNA, 122 bp, Homo sapiens
  misc_feature (61)..(62): /note="This region represents a CpG dinucleotide"
  misc_feature (61)..(61): /note="Nucleotide may be methylated to form 5-methylcytosine"
atggttcaatgtctttttctagatccatcaactccaacaagaagaaacaagcctggccctcgtagtaaaaagatgaccagagtcaaaatctgaaaccaattttgagcttggctctgtcattt

SEQ ID NO: 4145 - DNA, 122 bp, Homo sapiens
  misc_feature (61)..(62): /note="This region represents a CpG dinucleotide"
  misc_feature (61)..(61): /note="Nucleotide may be methylated to form 5-methylcytosine"
cacacacacacacacacacacacacgcagacaaagattccccccttccagatccacactgcgtgcctcctgccagccccatcccatcatcctgtgacagtgcttctttgtggaatagaacaa

SEQ ID NO: 4146 - DNA, 122 bp, Homo sapiens
  misc_feature (61)..(62): /note="This region represents a CpG dinucleotide"
  misc_feature (61)..(61): /note="Nucleotide may be methylated to form 5-methylcytosine"
ggctgagaggagggagtgtggcatcagaacagagtccgccggggctctggcttcctcctccgggatcaagggaaatgtgcgaagcacagtgcagaatcccgggcggctcatgcccactcact

SEQ ID NO: 4147 - DNA, 122 bp, Homo sapiens
  misc_feature (61)..(62): /note="This region represents a CpG dinucleotide"
  misc_feature (61)..(61): /note="Nucleotide may be methylated to form 5-methylcytosine"
aacttaagctggatccgtaaaggcctgacacgaagtcccggctgtataaaacatgatccacggaggtactaaataaataacctggctgtgggcttccaggccgctctatttatcactgcagt

SEQ ID NO: 4148 - DNA, 122 bp, Homo sapiens
  misc_feature (61)..(62): /note="This region represents a CpG dinucleotide"
  misc_feature (61)..(61): /note="Nucleotide may be methylated to form 5-methylcytosine"
ctcaccaggtcactggctggaacccctgggggccaccattgcgggaatcagcctttgaaacgatggccaacagcagctaataataaaccagtaatttgggatagacgagtagcaagagggca

SEQ ID NO: 4149 - DNA, 122 bp, Homo sapiens
  misc_feature (61)..(62): /note="This region represents a CpG dinucleotide"
  misc_feature (61)..(61): /note="Nucleotide may be methylated to form 5-methylcytosine"
atttgtttttctctgatttgtagttacttcactatctcaagataaaagaatattttacctcggtgagagaggactcaagtttttttgacaatgtcatttgtgatacagccaagggctttata

SEQ ID NO: 4150 - DNA, 122 bp, Homo sapiens
  misc_feature (61)..(62): /note="This region represents a CpG dinucleotide"
  misc_feature (61)..(61): /note="Nucleotide may be methylated to form 5-methylcytosine"
tatcgcataaagccctgatcaatcatcagcttatctggcctgtttcctttctggttggttcgttagctccagtcatgctgatcttctttctgtgcctggaacattctgaatcattcccaact

SEQ ID NO: 4151 - DNA, 122 bp, Homo sapiens
  misc_feature (61)..(62): /note="This region represents a CpG dinucleotide"
  misc_feature (61)..(61): /note="Nucleotide may be methylated to form 5-methylcytosine"
gctctgtagcatcagacatcgatgagtcatcagtgatgcagctggccgagatgggtttcccgctggaagcatgtcgcaaggctgtgtacttcactggaaatatgggcgccgaggtggccttc

SEQ ID NO: 4152 - DNA, 122 bp, Homo sapiens
  misc_feature (61)..(62): /note="This region represents a CpG dinucleotide"
  misc_feature (61)..(61): /note="Nucleotide may be methylated to form 5-methylcytosine"
cctccttgccttgtcctccagcctccagccatgcaatggatgcaggtatctggagagagacgagggaagcctggaggtacctactgagcaagctatgcccgtgccctcccacacctcctagt

SEQ ID NO: 4153 - DNA, 122 bp, Homo sapiens
  misc_feature (61)..(62): /note="This region represents a CpG dinucleotide"
  misc_feature (61)..(61): /note="Nucleotide may be methylated to form 5-methylcytosine"
agggaaggccggggacaaggtcaggggagcgcgaggatccactgccctcgagggtgccctcggccacgtggggggcggctcctccacccccctcctcccacctgccgccaccccccactgtc

SEQ ID NO: 4154 - DNA, 122 bp, Homo sapiens
  misc_feature (61)..(62): /note="This region represents a CpG dinucleotide"
  misc_feature (61)..(61): /note="Nucleotide may be methylated to form 5-methylcytosine"
atgggccccagggaaatgccagtaccccgggccggagagtagccgagccccagactgagtcgttgctccatgggccacaaaagctggttcccgcacagcagccgccctgggccccggcagac

SEQ ID NO: 4155 - DNA, 122 bp, Homo sapiens
  misc_feature (61)..(62): /note="This region represents a CpG dinucleotide"
  misc_feature (61)..(61): /note="Nucleotide may be methylated to form 5-methylcytosine"
agggctgtaggacgcccccacacacaggcgagcagagggcgttgcaaacatgggcagaggcggcccagcagcagtttaacattgccctgtgtccaggagaaaggccactgcccaagtatgct

SEQ ID NO: 4156 - DNA, 122 bp, Homo sapiens
  misc_feature (61)..(62): /note="This region represents a CpG dinucleotide"
  misc_feature (61)..(61): /note="Nucleotide may be methylated to form 5-methylcytosine"
tacccccccgccccctccacatgtccctgtctcttttcttttccaacttaaactcatccacggctaaattaacagccccagttgtggcacaaaggaagctttgaaggctgcaccggcttggt

SEQ ID NO: 4157 - DNA, 122 bp, Homo sapiens
  misc_feature (61)..(62): /note="This region represents a CpG dinucleotide"
  misc_feature (61)..(61): /note="Nucleotide may be methylated to form 5-methylcytosine"
tacacaaaaaaccgaaataatcccagaatgcctcagggctccaggggaaggcgaaaaaagcgggtgcgtttataaacttaaaataatcagaggcagcatctccaaggactgtgagaatgccc

SEQ ID NO: 4158 - DNA, 122 bp, Homo sapiens
  misc_feature (61)..(62): /note="This region represents a CpG dinucleotide"
  misc_feature (61)..(61): /note="Nucleotide may be methylated to form 5-methylcytosine"
gaagatcctagttccttccttcccgagtgatacccatgaactgccagtagaggctgctatcgttccatgtgtaaggaatgaactggttcaaggcgcgtcctacccagtcattttctttacct

SEQ ID NO: 4159 - DNA, 122 bp, Homo sapiens
  misc_feature (61)..(62): /note="This region represents a CpG dinucleotide"
  misc_feature (61)..(61): /note="Nucleotide may be methylated to form 5-methylcytosine"
gtaagtatgaattcttagccttcttaaaccctgacctctgcctcttcaactcagggaaaacgcccaggtcctactggtttgatctgttttatgctgcatactctccccaggcagtaagctag

SEQ ID NO: 4160 - DNA, 122 bp, Homo sapiens
  misc_feature (61)..(62): /note="This region represents a CpG dinucleotide"
  misc_feature (61)..(61): /note="Nucleotide may be methylated to form 5-methylcytosine"
ggtgagtcaagaaacattttggctcatggttacaaattatgcgtttactgtattcatcttcgtgcatgcacacatgcaatgttttacaaagcatctgttgagtgtctacggcacaacacaca

SEQ ID NO: 4161 - DNA, 122 bp, Homo sapiens
  misc_feature (61)..(62): /note="This region represents a CpG dinucleotide"
  misc_feature (61)..(61): /note="Nucleotide may be methylated to form 5-methylcytosine"
gtaggcttcttacaagaggaaatctgattccttggcggaggaatagctagagataggagtcgaccttgctgctctgagttcctgatagcagtgctctgctttcttaaactaggacacaaggg

SEQ ID NO: 4162 - DNA, 122 bp, Homo sapiens
  misc_feature (61)..(62): /note="This region represents a CpG dinucleotide"
  misc_feature (61)..(61): /note="Nucleotide may be methylated to form 5-methylcytosine"
gcatggaagatagtggcaggtcacgtgtgtgaagaacaccgcgtggcaaatgcacgtgtgcggagttcttcatggaaggaaatgtcaagaagagccccctggctctgggagctgactcacac

SEQ ID NO: 4163 - DNA, 122 bp, Homo sapiens
  misc_feature (61)..(62): /note="This region represents a CpG dinucleotide"
  misc_feature (61)..(61): /note="Nucleotide may be methylated to form 5-methylcytosine"
atctttttggaacctccccgcagtgaatcacttttcaaacttgcttcacagaacattcaacgctgacaaacctcccatggaaggggaagtaatagagtgtaagaaccacagggtccatggca

SEQ ID NO: 4164 - DNA, 122 bp, Homo sapiens
  misc_feature (61)..(62): /note="This region represents a CpG dinucleotide"
  misc_feature (61)..(61): /note="Nucleotide may be methylated to form 5-methylcytosine"
gggcgttccagaaagcatctgaggaggctggggaaagaaaaaggtttgggaaggagctgccgtccatagagttacacactgtcatgcagaagcacaactcggtgagtgactcggggaaccgt

SEQ ID NO: 4165 - DNA, 122 bp, Homo sapiens
  misc_feature (61)..(62): /note="This region represents a CpG dinucleotide"
  misc_feature (61)..(61): /note="Nucleotide may be methylated to form 5-methylcytosine"
gtctagtcctgaatgtggctctttcctgtgaggtcctcctgcctgtgtggttccacgtatcgtacagatgaggaaactgagactaggggtctcctccctgggccccagggcaccctggggct

SEQ ID NO: 4166 - DNA, 122 bp, Homo sapiens
  misc_feature (61)..(62): /note="This region represents a CpG dinucleotide"
  misc_feature (61)..(61): /note="Nucleotide may be methylated to form 5-methylcytosine"
tctgagccagcggggagaggcccgggcggaggaggctgcggactcctagaggttcagtgccggaagttgggcctggaaagggggcaccgccttcccggttctggtggcggggagtgagggga

SEQ ID NO: 4167 - DNA, 122 bp, Homo sapiens
  misc_feature (61)..(62): /note="This region represents a CpG dinucleotide"
  misc_feature (61)..(61): /note="Nucleotide may be methylated to form 5-methylcytosine"
agtatatgaccccgctctggttcagtattcttatccccaccccaaataaagagaatcacacgaccttattgtgataataaatagcaactgtagtcagagggagagaggcccagggaggaaca

SEQ ID NO: 4168 - DNA, 122 bp, Homo sapiens
  misc_feature (61)..(62): /note="This region represents a CpG dinucleotide"
  misc_feature (61)..(61): /note="Nucleotide may be methylated to form 5-methylcytosine"
gggattacccccaccacacagccccccccaccctcgcctgctcccgcccagcactcaccccgccctgcctgcctcagccaggatggcgacagacacaactgctcacacgcagacatgcgcac

SEQ ID NO: 4169 - DNA, 122 bp, Homo sapiens
  misc_feature (61)..(62): /note="This region represents a CpG dinucleotide"
  misc_feature (61)..(61): /note="Nucleotide may be methylated to form 5-methylcytosine"
cttgctaagaaaccccaaaagacaaactacagacacgttcttaaaatatttcctcaagaacgtggggcacattattcttgtcacatcctgactgccaggaggagctacatccctctccccaa

SEQ ID NO: 4170 - DNA, 122 bp, Homo sapiens
  misc_feature (61)..(62): /note="This region represents a CpG dinucleotide"
  misc_feature (61)..(61): /note="Nucleotide may be methylated to form 5-methylcytosine"
gagagttccaggggtggagatggcctccgccgcctctcactgagcctcccaacagcctggcgaggtgggcatgattaacctcccatcgaaggaggacccaaggtcacactgttggtccctgg

SEQ ID NO: 4171 - DNA, 122 bp, Homo sapiens
  misc_feature (61)..(62): /note="This region represents a CpG dinucleotide"
  misc_feature (61)..(61): /note="Nucleotide may be methylated to form 5-methylcytosine"
cccctgcccgacctcgcagaccacctcagtgcgcaggcgactgccctcgccaggccgcgccgccctgcctcgctcaccccgccccgcgctgaccccagccccagcaaggagtccgaccagac

SEQ ID NO: 4172 - DNA, 122 bp, Homo sapiens
  misc_feature (61)..(62): /note="This region represents a CpG dinucleotide"
  misc_feature (61)..(61): /note="Nucleotide may be methylated to form 5-methylcytosine"
tcgtacctgctacaggtgttcagggctcagacagtgcaagtcacaagcttatagcagcaccgtgtctgtcatgtggtgagaacccactacatggtggctatttctggtgtcatcttctgcag

SEQ ID NO: 4173 - DNA, 122 bp, Homo sapiens
  misc_feature (61)..(62): /note="This region represents a CpG dinucleotide"
  misc_feature (61)..(61): /note="Nucleotide may be methylated to form 5-methylcytosine"
ccagcccctcccacctctggctcttaggactcacattgcaagtgggggaggcatcctccgcgaggcgcggactgagagccagcccctcttccccccctggctctagggacccccatcgcagg

SEQ ID NO: 4174 - DNA, 122 bp, Homo sapiens
  misc_feature (61)..(62): /note="This region represents a CpG dinucleotide"
  misc_feature (61)..(61): /note="Nucleotide may be methylated to form 5-methylcytosine"
gactgcatctaagctcctccttttctgtgggtgatggtggctgtcaggcccctgaacctacgtcatccctccctctgatttgactgtacctttgctaggcctggtcaagggctagggactcc

SEQ ID NO: 4175 - DNA, 122 bp, Homo sapiens
  misc_feature (61)..(62): /note="This region represents a CpG dinucleotide"
  misc_feature (61)..(61): /note="Nucleotide may be methylated to form 5-methylcytosine"
tcggggcatggctggctcagttctgcagttctgctgcctggcatggatgcgtcacaatagcgaggtcaccttcttgccttgggtaatttccctcagaggcaaaacagatccatttttaacag

SEQ ID NO: 4176 - DNA, 122 bp, Homo sapiens
  misc_feature (61)..(62): /note="This region represents a CpG dinucleotide"
  misc_feature (61)..(61): /note="Nucleotide may be methylated to form 5-methylcytosine"
cttttgccaaggtggatgtgttagtctcaggccctcctgggccacactgccaaactcacacggacttctgcattttatgtatttagataagatgtgtgaaaatatatttgaataaaagaagt

SEQ ID NO: 4177 - DNA, 122 bp, Homo sapiens
  misc_feature (61)..(62): /note="This region represents a CpG dinucleotide"
  misc_feature (61)..(61): /note="Nucleotide may be methylated to form 5-methylcytosine"
atgagtcagtgaacaggattcattagttgcctttccatagccttccctgactaatctaaccgcatactaatcattgcttcttgtttctctgaccctaccaactcaactctaagttccttgag

SEQ ID NO: 4178 - DNA, 122 bp, Homo sapiens
  misc_feature (61)..(62): /note="This region represents a CpG dinucleotide"
  misc_feature (61)..(61): /note="Nucleotide may be methylated to form 5-methylcytosine"
gaggagagtgaattgttatgggccttggctgactctggagtagcagctgctagcactgtgcggtcaccaagcaggggaggggctgtggctctgctataaatagtgctgggagccagagtcgc

SEQ ID NO: 4179 - DNA, 122 bp, Homo sapiens
  misc_feature (61)..(62): /note="This region represents a CpG dinucleotide"
  misc_feature (61)..(61): /note="Nucleotide may be methylated to form 5-methylcytosine"
cttcctttggcttattagcatcatgatattaatggatttcttcatgttgagtcatccttgcgttcctggaaacaaactctacttggtcatggtgtgttattactttaatttaatacactgct

SEQ ID NO: 4180 - DNA, 122 bp, Homo sapiens
  misc_feature (61)..(62): /note="This region represents a CpG dinucleotide"
  misc_feature (61)..(61): /note="Nucleotide may be methylated to form 5-methylcytosine"
aaatggaaatgactggactccttgtggctaacttaagatcttgttcatgaactcagcaggcgcttttactggggcagatttaaaaaacaaattcaaaatattgtacactatccaagggaaat

SEQ ID NO: 4181 - DNA, 122 bp, Homo sapiens
  misc_feature (61)..(62): /note="This region represents a CpG dinucleotide"
  misc_feature (61)..(61): /note="Nucleotide may be methylated to form 5-methylcytosine"
acaaaggagccatctagaattctgtgctcctaacccacttctgggaggcacgcaggcatccgatcttctcttaaagactgtaatttattatgcctcttttaagttaaagaggctctctgagt

SEQ ID NO: 4182 - DNA, 122 bp, Homo sapiens
  misc_feature (61)..(62): /note="This region represents a CpG dinucleotide"
  misc_feature (61)..(61): /note="Nucleotide may be methylated to form 5-methylcytosine"
ggcattggacttggtctttgtgggactgggatctgtgggtagaaagaatagggctgaacacgaaacatacctttctgccagagctgctgctgtgatggcgcctgggccccctgaagcctcct

SEQ ID NO: 4183 - DNA, 122 bp, Homo sapiens
  misc_feature (61)..(62): /note="This region represents a CpG dinucleotide"
  misc_feature (61)..(61): /note="Nucleotide may be methylated to form 5-methylcytosine"
tgcgatagtttgctgagaatggtggtttccagcttcatccacgtccctaccttcacagcacgtctacactgatgttgtggccaggcaacttggcactatagcctagccacgtcgacacacag

SEQ ID NO: 4184 - DNA, 122 bp, Homo sapiens
  misc_feature (61)..(62): /note="This region represents a CpG dinucleotide"
  misc_feature (61)..(61): /note="Nucleotide may be methylated to form 5-methylcytosine"
aatgagtttagtgctttggataaactaaaaccccaatgaacaaaaacctcccataactggcgtgtgatgcatgagggcagtgctggtgaagtggggaggacaccagagcctgatcacacagg

SEQ ID NO: 4185 - DNA, 122 bp, Homo sapiens
  misc_feature (61)..(62): /note="This region represents a CpG dinucleotide"
  misc_feature (61)..(61): /note="Nucleotide may be methylated to form 5-methylcytosine"
tacacataataattccgcaaaccctgttgagctcctacatttgccaggcactgtgctaggcgttggagggataacttggagagaaaactgacaaggttcctgctttcacggaggcgacagtc

SEQ ID NO: 4186 - DNA, 122 bp, Homo sapiens
  misc_feature (61)..(62): /note="This region represents a CpG dinucleotide"
  misc_feature (61)..(61): /note="Nucleotide may be methylated to form 5-methylcytosine"
gcaggggttctgatggagtcagtacagttaggaaatttcttccttcctggcttatgatgacggcttcaatgatgcaataactagccaaggtcacacaggaaaggagaaagtgagagagggag

SEQ ID NO: 4187 - DNA, 122 bp, Homo sapiens
  misc_feature (61)..(62): /note="This region represents a CpG dinucleotide"
  misc_feature (61)..(61): /note="Nucleotide may be methylated to form 5-methylcytosine"
ttcgcaatttatcacgcgcatatgtatgtgtatgcataaacagatataattttgtttgctcgcttatttggttcgtcgcctcactagattccggactgtgggctccaggaatgcagacagtg

SEQ ID NO: 4188 - DNA, 122 bp, Homo sapiens
  misc_feature (61)..(62): /note="This region represents a CpG dinucleotide"
  misc_feature (61)..(61): /note="Nucleotide may be methylated to form 5-methylcytosine"
ctgccccgagctttcagagaacacaccccgttctggcaagtgtggtgcatcaggaatgtgcgtaggggttgctgctgacttctgctgcctttcagcctgcttgaatacaggaataagtacaa

SEQ ID NO: 4189 - DNA, 122 bp, Homo sapiens
  misc_feature (61)..(62): /note="This region represents a CpG dinucleotide"
  misc_feature (61)..(61): /note="Nucleotide may be methylated to form 5-methylcytosine"
tgcttttttgttgtccttgtttgagacggacagagtttcgttctgttgccctggctggagcgcagtggtgcgaccttggctcactgcagcctccacctcccgggttcaagcgattattgtgt

SEQ ID NO: 4190 - DNA, 122 bp, Homo sapiens
  misc_feature (61)..(62): /note="This region represents a CpG dinucleotide"
  misc_feature (61)..(61): /note="Nucleotide may be methylated to form 5-methylcytosine"
ccatccaaggagacaatttacagttgagttaatctgggtacattagcgagacatggattccggacgacagaccaatttatgttgtttccctgtccccccttagtgctgctctgtgtgagcaa

SEQ ID NO: 4191 - DNA, 122 bp, Homo sapiens
  misc_feature (61)..(62): /note="This region represents a CpG dinucleotide"
  misc_feature (61)..(61): /note="Nucleotide may be methylated to form 5-methylcytosine"
ctggtgcgtgcgtgtgtgtgtgtgtgtgtgtgtgtgtgcgcgcgcgcgccctcgagcgcgcgttggggcctggcaagacacactcaaaccggactgcctgacaaatccccccttttcatcct

SEQ ID NO: 4192 - DNA, 122 bp, Homo sapiens
  misc_feature (61)..(62): /note="This region represents a CpG dinucleotide"
  misc_feature (61)..(61): /note="Nucleotide may be methylated to form 5-methylcytosine"
gtcccatgggctccagaatcaagccagcttagccaggctgtgttgggtgactcagcggagcgcttgccatggagtcccttgctgtggccaccatggtctcgtgctgtgcctgccatcacctc

SEQ ID NO: 4193 - DNA, 122 bp, Homo sapiens
  misc_feature (61)..(62): /note="This region represents a CpG dinucleotide"
  misc_feature (61)..(61): /note="Nucleotide may be methylated to form 5-methylcytosine"
tagggaagagcagggtttaggaaaggactttctttcgtctctctgatctggcctggaatccggggtgttgactaatgatcaagggtatccctgggtgtggggatgagctggccttggccaca

SEQ ID NO: 4194 - DNA, 122 bp, Homo sapiens
  misc_feature (61)..(62): /note="This region represents a CpG dinucleotide"
  misc_feature (61)..(61): /note="Nucleotide may be methylated to form 5-methylcytosine"
agcggggagcagggaggaagtgggtgacaggaaggaatcagagctgccagttccagctcacgcttgtagtggctccggaaagcctcatccttgggcttcttgggatagagatttttgagctg

SEQ ID NO: 4195 - DNA, 122 bp, Homo sapiens
  misc_feature (61)..(62): /note="This region represents a CpG dinucleotide"
  misc_feature (61)..(61): /note="Nucleotide may be methylated to form 5-methylcytosine"
ctctaccagccatgagcagccggatccgtgggactcactgtcacaactggttgtggggaccgtcccccacactggcaagttcaagtcaacaaactatgctaggcagtgttaaaggtagaggg

SEQ ID NO: 4196 - DNA, 122 bp, Homo sapiens
  misc_feature (61)..(62): /note="This region represents a CpG dinucleotide"
  misc_feature (61)..(61): /note="Nucleotide may be methylated to form 5-methylcytosine"
acagaccataggagtatattaactgcaggatgccttgaaaaagaaagaaaaaagactgagcgactgatcttgtggaaatgatttaaggtgacacttgcagtacttttttttaagggatcaag

SEQ ID NO: 4197 - DNA, 122 bp, Homo sapiens
  misc_feature (61)..(62): /note="This region represents a CpG dinucleotide"
  misc_feature (61)..(61): /note="Nucleotide may be methylated to form 5-methylcytosine"
gaagagcaaatcactaagcaaacgaaattaaacgcccaaacactgcaagtacaaacaaaccgcacttccctctgtggagtgagatcagggctcatcactggacattgaaaataaaacaattc

SEQ ID NO: 4198 - DNA, 122 bp, Homo sapiens
  misc_feature (61)..(62): /note="This region represents a CpG dinucleotide"
  misc_feature (61)..(61): /note="Nucleotide may be methylated to form 5-methylcytosine"
aattggtgtttatcaaatgctttcaggctctggtgagcaagcgtccaggaaaatgtcaagcgcatggagctccaggcctgtctgggggatctgggcacggggaggcatccatgggagaccat

SEQ ID NO: 4199 - DNA, 122 bp, Homo sapiens
  misc_feature (61)..(62): /note="This region represents a CpG dinucleotide"
  misc_feature (61)..(61): /note="Nucleotide may be methylated to form 5-methylcytosine"
ttaacagaaagcagcctgagaagcttttatatgtaaatgtcggcagctgtacctgaaacccgggtacattcaatatggggtctcccgccctcttttccttatgaccgcctttgctggcatta

SEQ ID NO: 4200 - DNA, 122 bp, Homo sapiens
  misc_feature (61)..(62): /note="This region represents a CpG dinucleotide"
  misc_feature (61)..(61): /note="Nucleotide may be methylated to form 5-methylcytosine"
gaggcatgatggagaacagccagtccttgggcttcgtgataagaaaggtctttttaatgacggaaagcaaaataccacagcaattacccggggtcaggtatggaaagtactcatgagactcc

SEQ ID NO: 4201 - DNA, 122 bp, Homo sapiens
  misc_feature (61)..(62): /note="This region represents a CpG dinucleotide"
  misc_feature (61)..(61): /note="Nucleotide may be methylated to form 5-methylcytosine"
tgtcacgctcactgtgagagcatgctgcttcgctctgaaagccaggaaaaccctgaaccccgcaggaagaacaaacaattccagacgcgcgaccttagagacctgtaacacttagcgcgaag

SEQ ID NO: 4202 - DNA, 122 bp, Homo sapiens
  misc_feature (61)..(62): /note="This region represents a CpG dinucleotide"
  misc_feature (61)..(61): /note="Nucleotide may be methylated to form 5-methylcytosine"
acctaggctcagctagaaagagtgctatgatccattagcaatgtctgccctaggactggtcgtaggcagtggaagtacataattgccatccctgtcctaagtgttttaggatttgctaaacc

SEQ ID NO: 4203 - DNA, 122 bp, Homo sapiens
  misc_feature (61)..(62): /note="This region represents a CpG dinucleotide"
  misc_feature (61)..(61): /note="Nucleotide may be methylated to form 5-methylcytosine"
tcagtaatattgttttttaaataagacttcagatttaggggtggaggaggaacaccggatcgcactgtgggagaaacgctggcctgatgatttattataaataaataatgtgccctactgct

SEQ ID NO: 4204 - DNA, 122 bp, Homo sapiens
  misc_feature (61)..(62): /note="This region represents a CpG dinucleotide"
  misc_feature (61)..(61): /note="Nucleotide may be methylated to form 5-methylcytosine"
ccatcgtgcctgacccgaatcactattctatgctaatatgactatgactgttcagctgaccgagaattcatcaagttgcataatgatatactgacacatccttatcctagtcacatagctag

SEQ ID NO: 4205 - DNA, 122 bp, Homo sapiens
  misc_feature (61)..(62): /note="This region represents a CpG dinucleotide"
  misc_feature (61)..(61): /note="Nucleotide may be methylated to form 5-methylcytosine"
tcctctggctcccgccgtccgtcctctgctgggccgtttgcacgcccggcttcccctgtgcggtatcattgggaccgcatgcatcactaatgacgctgcgtgcctgcgggtcagacgggctc

SEQ ID NO: 4206 - DNA, 122 bp, Homo sapiens
  misc_feature (61)..(62): /note="This region represents a CpG dinucleotide"
  misc_feature (61)..(61): /note="Nucleotide may be methylated to form 5-methylcytosine"
taccattaagtaactggtagttctcttataagccaagctaaactgttccaaagaaaaagacgctggaaacactgctagccctgagacccatgaataagtagtcttttcaattatttatttat

SEQ ID NO: 4207 - DNA, 122 bp, Homo sapiens
  misc_feature (61)..(62): /note="This region represents a CpG dinucleotide"
  misc_feature (61)..(61): /note="Nucleotide may be methylated to form 5-methylcytosine"
ttactacgctctatagaaacaacccgatagtcttccatggcaggagtaacctcaaaaatgcgtcatgtctaactttcaaaagcaaagcacagtcattaatgcacggttcaagcaacccagaa

SEQ ID NO: 4208 - DNA, 122 bp, Homo sapiens
  misc_feature (61)..(62): /note="This region represents a CpG dinucleotide"
  misc_feature (61)..(61): /note="Nucleotide may be methylated to form 5-methylcytosine"
tgaatcagtactcctcaggccacaggaaaaatggacaagaaggttccgtgaggcaggcttcgttataaacacctccctccgccatccatattctagcaactcttattagcagtgggcttcct

SEQ ID NO: 4209 - DNA, 122 bp, Homo sapiens
  misc_feature (61)..(62): /note="This region represents a CpG dinucleotide"
  misc_feature (61)..(61): /note="Nucleotide may be methylated to form 5-methylcytosine"
caagaagaggggagatgggccaggcatggtggctctcgcctgtaatcccaaccctgtaatcgcctgaggtgagaggatcgcttgagcccaggagttgaagaccagcctgggcaacataggga

SEQ ID NO: 4210 - DNA, 122 bp, Homo sapiens
  misc_feature (61)..(62): /note="This region represents a CpG dinucleotide"
  misc_feature (61)..(61): /note="Nucleotide may be methylated to form 5-methylcytosine"
catctgaatgcagttggggagtgagacacacacacacacacacacacagactggtggaaacggaactgcaggtgcaaaggcactgaagtcaggacaagtttggtacatttaaggaacagaaa

SEQ ID NO: 4211 - DNA, 122 bp, Homo sapiens
  misc_feature (61)..(62): /note="This region represents a CpG dinucleotide"
  misc_feature (61)..(61): /note="Nucleotide may be methylated to form 5-methylcytosine"
atgtggatgaacctagaggatgttaagtgaaataagccacacacagatagacaaataccacgtgatctcactcttatgtggaatttttttttaaataagttgcttagccgggcatgatggca

SEQ ID NO: 4212 - DNA, 122 bp, Homo sapiens
  misc_feature (61)..(62): /note="This region represents a CpG dinucleotide"
  misc_feature (61)..(61): /note="Nucleotide may be methylated to form 5-methylcytosine"
acccctgtccacatgagccagccagggttgagctagtgcttgccacacccaaaaagacaccgacatttggattgctggctcctcactatattttgaacaattctgccatagatcaagggacc

SEQ ID NO: 4213 - DNA, 122 bp, Homo sapiens
  misc_feature (61)..(62): /note="This region represents a CpG dinucleotide"
  misc_feature (61)..(61): /note="Nucleotide may be methylated to form 5-methylcytosine"
cgtttgatactacttatcttagttttaatatccagatttatttagtgtttgtttttcctacgagaaagactcacatggagcgcctaaagttgggcagtttcccaccatacctacacagagac

SEQ ID NO: 4214 - DNA, 122 bp, Homo sapiens
  misc_feature (61)..(62): /note="This region represents a CpG dinucleotide"
  misc_feature (61)..(61): /note="Nucleotide may be methylated to form 5-methylcytosine"
acagtcatgtgttgctcaaggacaggaataagttctgagtaatgcatcattaggcaacttcgttgtgcaaatgtcatagagtatactcaaatgaacctagatgggatagcctactacacacc

SEQ ID NO: 4215 - DNA, 122 bp, Homo sapiens
  misc_feature (61)..(62): /note="This region represents a CpG dinucleotide"
  misc_feature (61)..(61): /note="Nucleotide may be methylated to form 5-methylcytosine"
tcagaactttgagacaatggctctctctctgtttcccttcccagaccacaaataacagcacgtcgaggcatctgaaaggctgtcacccgcttgactatgagctcacctacttcctggaagct

SEQ ID NO: 4216 - DNA, 122 bp, Homo sapiens
  misc_feature (61)..(62): /note="This region represents a CpG dinucleotide"
  misc_feature (61)..(61): /note="Nucleotide may be methylated to form 5-methylcytosine"
aagacagaaggatctcttatgcagatcaccaggctcctcctcctttttccctgctctaagcggctgtctgatcaggaaatgtgggcttcctgtgttgcttgcacacacaggacctgctctga

SEQ ID NO: 4217 - DNA, 122 bp, Homo sapiens
  misc_feature (61)..(62): /note="This region represents a CpG dinucleotide"
  misc_feature (61)..(61): /note="Nucleotide may be methylated to form 5-methylcytosine"
gaaccgcggcgggtgggatgccgcgcctgcgcacggggtcaagcggggccatagtggaggcgcctcgcctgcacaaagcgcacctgcggacggtggcgctgtggggatagggaggtcccgcg

SEQ ID NO: 4218 - DNA, 122 bp, Homo sapiens
  misc_feature (61)..(62): /note="This region represents a CpG dinucleotide"
  misc_feature (61)..(61): /note="Nucleotide may be methylated to form 5-methylcytosine"
gatgatacctcccagagtcatcagaagatcaaatacaaccatgaacgtgtttgtgctctacgagctgtaattcctaaaagataggtaggttaagatgaagaaaaggcattgttgagtttctc

SEQ ID NO: 4219 - DNA, 122 bp, Homo sapiens
  misc_feature (61)..(62): /note="This region represents a CpG dinucleotide"
  misc_feature (61)..(61): /note="Nucleotide may be methylated to form 5-methylcytosine"
gcactggggaagttttaggtaaatacaacattccacactgatgctttcacagtttaatagcggattcacttataaacattctgataaagatcagaaactaaaatgcattcctgtttaaaaca

SEQ ID NO: 4220 - DNA, 122 bp, Homo sapiens
  misc_feature (61)..(62): /note="This region represents a CpG dinucleotide"
  misc_feature (61)..(61): /note="Nucleotide may be methylated to form 5-methylcytosine"
gaaaattcaatatccaaatgacagacagtggaaattagctgtgattttccctgctctgtgcgaagagctggcatttcctcatttatccattcatccaacaaatatttattgagcaactaata

SEQ ID NO: 4221 - DNA, 122 bp, Homo sapiens
  misc_feature (61)..(62): /note="This region represents a CpG dinucleotide"
  misc_feature (61)..(61): /note="Nucleotide may be methylated to form 5-methylcytosine"
acagtacactattacctcacctttaatattcattgtgtccacagctgggataaatacttgcgttgggtgaccatggggcagagcagcctgtgctttgtgtatatgaagagttttctagaagg

SEQ ID NO: 4222 - DNA, 122 bp, Homo sapiens
  misc_feature (61)..(62): /note="This region represents a CpG dinucleotide"
  misc_feature (61)..(61): /note="Nucleotide may be methylated to form 5-methylcytosine"
accttttttcttcataaattagccagtctcaggtagcagtttgaaaatggattaatacaccgtgaaactagctttgttcagtgatatgtgttactctgtgaggaaactttaaggtctgtcgt

SEQ ID NO: 4223 - DNA, 122 bp, Homo sapiens
  misc_feature (61)..(62): /note="This region represents a CpG dinucleotide"
  misc_feature (61)..(61): /note="Nucleotide may be methylated to form 5-methylcytosine"
tagctcattggattctgtgggatttgatatagatatctcctgctcttagaattcaaaagccgtcaaggagtggagacaccaggagtcattttctggccaggggaggtaggggagataaggga

SEQ ID NO: 4224 - DNA, 122 bp, Homo sapiens
  misc_feature (61)..(62): /note="This region represents a CpG dinucleotide"
  misc_feature (61)..(61): /note="Nucleotide may be methylated to form 5-methylcytosine"
gtgacttcagtctctgccagctggagccctgtctcccagtagccagtggcaggggcagtacgccacctggaaggggaaggtggggaggccatgctggcccaggggagagcatggccactgac

SEQ ID NO: 4225 - DNA, 122 bp, Homo sapiens
  misc_feature (61)..(62): /note="This region represents a CpG dinucleotide"
  misc_feature (61)..(61): /note="Nucleotide may be methylated to form 5-methylcytosine"
tgtattaactcaattattcctcacaataaacctagcctctgtattttacaattagagaaacggaaccattgaggattacaataactcatccaaggccacacagttagtgaggggcagagcca

SEQ ID NO: 4226 - DNA, 122 bp, Homo sapiens
  misc_feature (61)..(62): /note="This region represents a CpG dinucleotide"
  misc_feature (61)..(61): /note="Nucleotide may be methylated to form 5-methylcytosine"
gaataccagctgaaagtctcttccctcattggggagtgtcttgacttaaatatcattcctcgtggcagcaactcagggtgttgtttttcagtcatttcacatctgtggtgttgtgagacacc

SEQ ID NO: 4227 - DNA, 122 bp, Homo sapiens
  misc_feature (61)..(62): /note="This region represents a CpG dinucleotide"
  misc_feature (61)..(61): /note="Nucleotide may be methylated to form 5-methylcytosine"
gggaacagggtgtaagaacattaaaatggattatcttccccaaaatgggataattaaatacgctaacacacagagaatgctgtctctgccctgaggcctgtgtgcatgatgacttgttcttt

SEQ ID NO: 4228 - DNA, 122 bp, Homo sapiens
  misc_feature (61)..(62): /note="This region represents a CpG dinucleotide"
  misc_feature (61)..(61): /note="Nucleotide may be methylated to form 5-methylcytosine"
cgaaatcctggcctcaagtgatccacctgccttggcctctcacaatgctgggattacaggcgtgagccacctcgcctggccactagttcttaaatctccacaataccatgatcagcatggca

SEQ ID NO: 4229 - DNA, 122 bp, Homo sapiens
  misc_feature (61)..(62): /note="This region represents a CpG dinucleotide"
  misc_feature (61)..(61): /note="Nucleotide may be methylated to form 5-methylcytosine"
ctggtattgtcaacatgtattctttcagcgcaggtataatgtcattgtacaatgttttgccgtttaatttaatcagaataatccacactccactgtgccttagaagtatgacagtaacattt

SEQ ID NO: 4230 - DNA, 122 bp, Homo sapiens
  misc_feature (61)..(62): /note="This region represents a CpG dinucleotide"
  misc_feature (61)..(61): /note="Nucleotide may be methylated to form 5-methylcytosine"
cagccatttaataggctcactcctacaaaatgttcatgtattactttatttgttcacccccgcattgcaaaaagtcaatatgataaaaatgtaatgtgttctagaaaataatgagagaaatt

SEQ ID NO: 4231 - DNA, 122 bp, Homo sapiens
  misc_feature (61)..(62): /note="This region represents a CpG dinucleotide"
  misc_feature (61)..(61): /note="Nucleotide may be methylated to form 5-methylcytosine"
agcaggtccccaaagtagaaactttgtcagatcccaaagaatgtcagccccagtgactcacgtgtgtttctcccaaaaacacaatcgcaggcctttgggatcagctcagccatctctgagac

SEQ ID NO: 4232 - DNA, 122 bp, Homo sapiens
  misc_feature (61)..(62): /note="This region represents a CpG dinucleotide"
  misc_feature (61)..(61): /note="Nucleotide may be methylated to form 5-methylcytosine"
ctgaattctggaattaagatattttttcgcttgtgaaacaaaaagcacttatccttttatcgcaaatgttcttcctccttctcctgcccctagtattcccttcctctgccttttgaaacatg

SEQ ID NO: 4233 - DNA, 122 bp, Homo sapiens
  misc_feature (61)..(62): /note="This region represents a CpG dinucleotide"
  misc_feature (61)..(61): /note="Nucleotide may be methylated to form 5-methylcytosine"
tgactgtatatcctgttggttctgtttctcttgagaactttcactaacacagttaacaaacgtttcctgtagacatacaagcagccaacaaacatatgaaaaattctcaacatcactaatca

SEQ ID NO: 4234 - DNA, 122 bp, Homo sapiens
  misc_feature (61)..(62): /note="This region represents a CpG dinucleotide"
  misc_feature (61)..(61): /note="Nucleotide may be methylated to form 5-methylcytosine"
aaaagctatggtatttgctagctgtaaggcctcaggcaagtttataacttctatccactccgtttgcctcatctctaaaggggtaatatgaggattaaataataaaatgtatagtagcacag

SEQ ID NO: 4235 - DNA, 122 bp, Homo sapiens
  misc_feature (61)..(62): /note="This region represents a CpG dinucleotide"
  misc_feature (61)..(61): /note="Nucleotide may be methylated to form 5-methylcytosine"
attcttttgacccggtttatggacttggaatccaactaacttgggaatgagggttcttgccgagatggagggttttgagtaaggggtcctggctggggagagccagagatgaggcccagcct

SEQ ID NO: 4236 - DNA, 122 bp, Homo sapiens
  misc_feature (61)..(62): /note="This region represents a CpG dinucleotide"
  misc_feature (61)..(61): /note="Nucleotide may be methylated to form 5-methylcytosine"
tcagcgcatctcaactcgcggcaggccgccccgcgagccgcctctccctttcctgcggctcgaagggaccccagcgtgaaccgtgtgcttgtttttcattgtctccatctcggggcttcctt

SEQ ID NO: 4237 - DNA, 122 bp, Homo sapiens
  misc_feature (61)..(62): /note="This region represents a CpG dinucleotide"
  misc_feature (61)..(61): /note="Nucleotide may be methylated to form 5-methylcytosine"
acggcagcgctgagagggatggaggggacggggtgctggtgtgagtcgcttcagggagtccgccccacacgaagccacctccccagaggccacgccaacagcaccgcccctgctcccctgct

SEQ ID NO: 4238 - DNA, 122 bp, Homo sapiens
  misc_feature (61)..(62): /note="This region represents a CpG dinucleotide"
  misc_feature (61)..(61): /note="Nucleotide may be methylated to form 5-methylcytosine"
agctgagctgtcatacaacttaatcctttcgcaagtgatagacatcagatccagttctcccgtgcggcaaggtaaagcttgcactatccttgcccaaaatttacgtcacctacttaatgtgg

SEQ ID NO: 4239 - DNA, 122 bp, Homo sapiens
  misc_feature (61)..(62): /note="This region represents a CpG dinucleotide"
  misc_feature (61)..(61): /note="Nucleotide may be methylated to form 5-methylcytosine"
ggaatctagttaccatagtgaccctgttctgctgaaacaaaaacactcaacaggatttaacgaagaattaataaccatcatgattgttcctgattctgacaaagacggtggtggaagagaag

SEQ ID NO: 4240 - DNA, 122 bp, Homo sapiens
  misc_feature (61)..(62): /note="This region represents a CpG dinucleotide"
  misc_feature (61)..(61): /note="Nucleotide may be methylated to form 5-methylcytosine"
ctctcgggttgataagggacgcacgcccgaagaactgcctttaaccagcactggggacagcggcacgcaggtggccggggttggcgaacagccactgcagccgcgcctgcggccgggaagcg

SEQ ID NO: 4241 - DNA, 122 bp, Homo sapiens
  misc_feature (61)..(62): /note="This region represents a CpG dinucleotide"
  misc_feature (61)..(61): /note="Nucleotide may be methylated to form 5-methylcytosine"
cagcattatattctaaccaaaaaatgatcacaccaggccatgcaaaactgtacaatattacgagaaaaaccctaaaaaatttataaaatgaatgatattacactatcaaataaaaagacaag

SEQ ID NO: 4242 - DNA, 122 bp, Homo sapiens
  misc_feature (61)..(62): /note="This region represents a CpG dinucleotide"
  misc_feature (61)..(61): /note="Nucleotide may be methylated to form 5-methylcytosine"
cacccagtggtaagtgtattaaaatagatctgtatcatacagcacagtttctcccggagtcgtgagaatgacaggagggaccgtggcagctgcgggatttgccggcctcctcgctctgcacc

SEQ ID NO: 4243 - DNA, 122 bp, Homo sapiens
  misc_feature (61)..(62): /note="This region represents a CpG dinucleotide"
  misc_feature (61)..(61): /note="Nucleotide may be methylated to form 5-methylcytosine"
acgatgtgagtgaacttaacactactcaactgaacacttaaaaatgtttaagaggccgggcgtggtggctcacacctataatcccaacactttgggagaccaaggcgggcagatcacctgag

SEQ ID NO: 4244 - DNA, 122 bp, Homo sapiens
  misc_feature (61)..(62): /note="This region represents a CpG dinucleotide"
  misc_feature (61)..(61): /note="Nucleotide may be methylated to form 5-methylcytosine"
tatttacctgaaatattgggtctcctgctttttgttcccattccaatgtcatatgatccccgtaccagtatgtcacatgatctcaaaccactatgtcacatgatcatgataggtgaacttgg

SEQ ID NO: 4245 - DNA, 122 bp, Homo sapiens
  misc_feature (61)..(62): /note="This region represents a CpG dinucleotide"
  misc_feature (61)..(61): /note="Nucleotide may be methylated to form 5-methylcytosine"
tctcctgtttttttcaggctcctaaagtaacatcagccatttttagattggttctgttttcgtaccttcccactggcctcaagtgagccaagaaacactgcctgccctctgtctgtcttctc

SEQ ID NO: 4246 - DNA, 122 bp, Homo sapiens
  misc_feature (61)..(62): /note="This region represents a CpG dinucleotide"
  misc_feature (61)..(61): /note="Nucleotide may be methylated to form 5-methylcytosine"
tgggccatgatggagtcatagtcctggttgcttggccactgtgtctggacaaagagctgccgcagcaagtgccgctgctgggcagtctttttgcagctcactttgcctgggagctgctctgc

SEQ ID NO: 4247 - DNA, 122 bp, Homo sapiens
  misc_feature (61)..(62): /note="This region represents a CpG dinucleotide"
  misc_feature (61)..(61): /note="Nucleotide may be methylated to form 5-methylcytosine"
gtagagagaggctcagttacagctctttgaagattaaggtaagaagaacacaggttttggcgtcagactagcaagagtgccagacgactctagaccacctatgagctgtgccctatatttgt

SEQ ID NO: 4248 - DNA, 122 bp, Homo sapiens
  misc_feature (61)..(62): /note="This region represents a CpG dinucleotide"
  misc_feature (61)..(61): /note="Nucleotide may be methylated to form 5-methylcytosine"
aaagtgttcatgtgtgtgtgtttgtgtgatttaattaaattactattctttttttccttccgggaacctttcccaaaatgttagcagagggacagagaaacattggcaacttttgtttcact

SEQ ID NO: 4249 - DNA, 122 bp, Homo sapiens
  misc_feature (61)..(62): /note="This region represents a CpG dinucleotide"
  misc_feature (61)..(61): /note="Nucleotide may be methylated to form 5-methylcytosine"
ctgtccttcagcatttcccagatctgaccctcaggactcaccaagacagaagagggcggtcggggatggagacatggttcctcagccctgtcctgagctctgtggccagggagggaagtggt

SEQ ID NO: 4250 - DNA, 122 bp, Homo sapiens
  misc_feature (61)..(62): /note="This region represents a CpG dinucleotide"
  misc_feature (61)..(61): /note="Nucleotide may be methylated to form 5-methylcytosine"
aggaccttataatccaataggagagattaaactcacagcaacaaagagtccagataagtgcggttgttgccacagtgagtcagcatcagctctagccttaattctcagatcagagcatgggg

SEQ ID NO: 4251 - DNA, 122 bp, Homo sapiens
  misc_feature (61)..(62): /note="This region represents a CpG dinucleotide"
  misc_feature (61)..(61): /note="Nucleotide may be methylated to form 5-methylcytosine"
gctggtggaatggatttaaaaacaagatccaaccacatgctgcatacaaaaaacccacctcgctgataaagacatttacaaagtaaaggactggaaaaaaatattccatgcaaacagaaacc

SEQ ID NO: 4252 - DNA, 122 bp, Homo sapiens
  misc_feature (61)..(62): /note="This region represents a CpG dinucleotide"
  misc_feature (61)..(61): /note="Nucleotide may be methylated to form 5-methylcytosine"
agttgtctgttgcagatatctacactgctgcatgctaagtgtgtcatcctgggattcaaacgtgagtaatagaaaacctgactaagcagcgacttgaactgaataggaggctcgctctcctc

SEQ ID NO: 4253 - DNA, 122 bp, Homo sapiens
  misc_feature (61)..(62): /note="This region represents a CpG dinucleotide"
  misc_feature (61)..(61): /note="Nucleotide may be methylated to form 5-methylcytosine"
ggcgctggtcacctttgtcaggtgcctctcatcttaacttccttctagttttggagtgttcgtctcagaagtcttgaaactaggggtgctttttagcccaaggctatgggtccggttggtgg

SEQ ID NO: 4254 - DNA, 122 bp, Homo sapiens
  misc_feature (61)..(62): /note="This region represents a CpG dinucleotide"
  misc_feature (61)..(61): /note="Nucleotide may be methylated to form 5-methylcytosine"
ccggcctacccggtgggtcttgtcctgccccccaactaccctggctggccccacaggggccgccaaccacacaagccagttcctgtccctgaggacttggctcagggactctgggaatgtgg

SEQ ID NO: 4255 - DNA, 122 bp, Homo sapiens
  misc_feature (61)..(62): /note="This region represents a CpG dinucleotide"
  misc_feature (61)..(61): /note="Nucleotide may be methylated to form 5-methylcytosine"
ccgtatggctccctcagcaggtggctgtaatccactgcaaaggacatcaaaaagaaaacacggccattgcccgtggtaaccagagagctgattcagcagctcaggacacagcatgactttca

SEQ ID NO: 4256 - DNA, 122 bp, Homo sapiens
  misc_feature (61)..(62): /note="This region represents a CpG dinucleotide"
  misc_feature (61)..(61): /note="Nucleotide may be methylated to form 5-methylcytosine"
accctgcgtcctgtgtctagttgtgccattacaaacaataccgaaaacagcatccttccacgtgtaccttggcatagttttgtgagcatacttgtaggttcacttcctaacagaaattgctg

SEQ ID NO: 4257 - DNA, 122 bp, Homo sapiens
  misc_feature (61)..(62): /note="This region represents a CpG dinucleotide"
  misc_feature (61)..(61): /note="Nucleotide may be methylated to form 5-methylcytosine"
cttccccgggtctgccgcctaagcagccctgtccctgatctctgtctcagaggctgctcccggcccagcttcccacaaccatcagcaggacctaaactgccacatatgcgcgccatggaata

SEQ ID NO: 4258 - DNA, 122 bp, Homo sapiens
  misc_feature (61)..(62): /note="This region represents a CpG dinucleotide"
  misc_feature (61)..(61): /note="Nucleotide may be methylated to form 5-methylcytosine"
cccaggaggtgtgttttggttttttgtttttaaagaaaataaatatcttagtatcatttgcgcaagagaacaaagaagctatgtgggttttcttaaaagcaccaaagaaggttcatatcagg

SEQ ID NO: 4259 - DNA, 122 bp, Homo sapiens
  misc_feature (61)..(62): /note="This region represents a CpG dinucleotide"
  misc_feature (61)..(61): /note="Nucleotide may be methylated to form 5-methylcytosine"
aacttttgttttgttttttgagatagggtctagctctgtcaccactaggtgccaacacagcgacctcccaggctcaagcgatcccatccgcctgcctcagccagcctcccgagtagctggga

SEQ ID NO: 4260 - DNA, 122 bp, Homo sapiens
  misc_feature (61)..(62): /note="This region represents a CpG dinucleotide"
  misc_feature (61)..(61): /note="Nucleotide may be methylated to form 5-methylcytosine"
gacacagaactcgctgtctcccaagttaaactgctcaagcattgtgtaacttcagcaattcggaaggcttttcccctccttacattcagctgagatatactttcttctcaagctaaattccc

SEQ ID NO: 4261 - DNA, 122 bp, Homo sapiens
  misc_feature (61)..(62): /note="This region represents a CpG dinucleotide"
  misc_feature (61)..(61): /note="Nucleotide may be methylated to form 5-methylcytosine"
acaaaaggtcaacaaccttgccattcatgcagtgaatactctaaagttcccagctccccacgccccacacacatacccagcttccatgtatcagaccatgcccagccttcatctgataccac

SEQ ID NO: 4262 - DNA, 122 bp, Homo sapiens
  misc_feature (61)..(62): /note="This region represents a CpG dinucleotide"
  misc_feature (61)..(61): /note="Nucleotide may be methylated to form 5-methylcytosine"
aatgaagttcttccctttctggtttgtgtgttttctgtttcttgggtttggagtccggcacgtgactgctcactgtggttacttggagttagaaatccggaggagactcagccggaaaggtc

SEQ ID NO: 4263 - DNA, 122 bp, Homo sapiens
  misc_feature (61)..(62): /note="This region represents a CpG dinucleotide"
  misc_feature (61)..(61): /note="Nucleotide may be methylated to form 5-methylcytosine"
tgaaaagagttgactaattattgttgtttgaagcaatagtgatatggtgtcttctacctccggcaagcatacaaacaccatttgtctaaatagctctgtgtgatccaagatatactattatt

SEQ ID NO: 4264 - DNA, 122 bp, Homo sapiens
  misc_feature (61)..(62): /note="This region represents a CpG dinucleotide"
  misc_feature (61)..(61): /note="Nucleotide may be methylated to form 5-methylcytosine"
acagctcccttgggccagagcctgcagtggaagcctcacattcctaataggaggggcatgcgtcagaaaggagaatttagagtgtcagggttgggatgggtagaggagctggagacccagga

SEQ ID NO: 4265 - DNA, 122 bp, Homo sapiens
  misc_feature (61)..(62): /note="This region represents a CpG dinucleotide"
  misc_feature (61)..(61): /note="Nucleotide may be methylated to form 5-methylcytosine"
agcctcctgagactgtagtctgagtgtttttaccaggccatatgtgtctcatgacccgaccgcaaaaggccatctggtggacattttggtttaacaaaccctttcgagaaacacttggcgga

SEQ ID NO: 4266 - DNA, 122 bp, Homo sapiens
  misc_feature (61)..(62): /note="This region represents a CpG dinucleotide"
  misc_feature (61)..(61): /note="Nucleotide may be methylated to form 5-methylcytosine"
ttgaggaatccactcttcctctgagccacatgtccccaaattgtccacaaccctattccacgaagtcctctgactaaagaaaccagatctcagttcctggttttgggggtggggaggagaga

SEQ ID NO: 4267 - DNA, 122 bp, Homo sapiens
  misc_feature (61)..(62): /note="This region represents a CpG dinucleotide"
  misc_feature (61)..(61): /note="Nucleotide may be methylated to form 5-methylcytosine"
ataacctctgtgagccactttattgcttttactccacagctatgatgtaaactcctcagccgatgtggccattttaatttcttagatttgttttctatattagagtcccagctgcatgaaga

SEQ ID NO: 4268 - DNA, 122 bp, Homo sapiens
  misc_feature (61)..(62): /note="This region represents a CpG dinucleotide"
  misc_feature (61)..(61): /note="Nucleotide may be methylated to form 5-methylcytosine"
ctacatgaaaggttgaggtggggtggcatcttcctggcggggctgcccaaggacgctgcccgtggattctggccctggtgtcttgcaggtcacctctctcttcctgcagggccagggcaggt

SEQ ID NO: 4269 - DNA, 122 bp, Homo sapiens
  misc_feature (61)..(62): /note="This region represents a CpG dinucleotide"
  misc_feature (61)..(61): /note="Nucleotide may be methylated to form 5-methylcytosine"
gcctggctccctttcccaacaccatcccttaaacactggtgttcttcaggcttctgaactcgacctagtctacctgtagactgtgtctcctcattctatgtcctcacagggaggtgagtctc

SEQ ID NO: 4270 - DNA, 122 bp, Homo sapiens
  misc_feature (61)..(62): /note="This region represents a CpG dinucleotide"
  misc_feature (61)..(61): /note="Nucleotide may be methylated to form 5-methylcytosine"
caaggagtgagtcagaacccacattttctgagagatttccagaataagtgcatggtgatccgttctatactcgtagttcattgtactgcaaaattagtacttgattggaaactgtcttattg

SEQ ID NO: 4271 - DNA, 122 bp, Homo sapiens
  misc_feature (61)..(62): /note="This region represents a CpG dinucleotide"
  misc_feature (61)..(61): /note="Nucleotide may be methylated to form 5-methylcytosine"
gcttctaggggggagcccccacgctaaaggtaaagacaaattgcataaaatgtctggacacgatgcgaacaggtgagaatagcgtaggtacaggccgccagggaggaagaaacttggaactt

SEQ ID NO: 4272 - DNA, 122 bp, Homo sapiens
  misc_feature (61)..(62): /note="This region represents a CpG dinucleotide"
  misc_feature (61)..(61): /note="Nucleotide may be methylated to form 5-methylcytosine"
agagtgagaaggggactgaggcctaagcctagaggaacacccacatggaagcaccaaacacgggagactgagaaggagccaagagcctgggaaaaaaaccaggaaagtgtggttttaccagc

SEQ ID NO: 4273 - DNA, 122 bp, Homo sapiens
  misc_feature (61)..(62): /note="This region represents a CpG dinucleotide"
  misc_feature (61)..(61): /note="Nucleotide may be methylated to form 5-methylcytosine"
ggttctgggaggtcccacgttgggtgagggacacagggtcacagacactggccttgtgggcgctttgccccctctccccttggcctgagagcaagctggtcccatgcctgggggccgcaacc

SEQ ID NO: 4274 - DNA, 122 bp, Homo sapiens
  misc_feature (61)..(62): /note="This region represents a CpG dinucleotide"
  misc_feature (61)..(61): /note="Nucleotide may be methylated to form 5-methylcytosine"
atttctccagtttttacctaacgtcctttttctgttctgggattccaaccaagattccaccgtctccttgggttcctctgggctgtgacagtttctcagactttgtttttgatgaccttgac

SEQ ID NO: 4275 - DNA, 122 bp, Homo sapiens
  misc_feature (61)..(62): /note="This region represents a CpG dinucleotide"
  misc_feature (61)..(61): /note="Nucleotide may be methylated to form 5-methylcytosine"
gttatcaggaactaccgcactcagcaggggacaggtataaggaaatcccttctgcaatgacgtgaaggcatctaagatgcaaagaagctggtctggaacacccacttccacaacacagcacc

SEQ ID NO: 4276 - DNA, 122 bp, Homo sapiens
  misc_feature (61)..(62): /note="This region represents a CpG dinucleotide"
  misc_feature (61)..(61): /note="Nucleotide may be methylated to form 5-methylcytosine"
gcctctccagcatggcaaacttaacattgttggacattttgcctcagggctccaaaaacacgtgttcccaaagaccaaggaagaaactgcagaatttttttttaattactaagtctgagaaa

SEQ ID NO: 4277 - DNA, 122 bp, Homo sapiens
  misc_feature (61)..(62): /note="This region represents a CpG dinucleotide"
  misc_feature (61)..(61): /note="Nucleotide may be methylated to form 5-methylcytosine"
attactcctgagggagggccagtgcagggcagtgactttggtgttggttagaactggattcgagtcttggctctgccattataaatactgtgaccttaggcaagtcacctgattgttctctt

SEQ ID NO: 4278 - DNA, 122 bp, Homo sapiens
  misc_feature (61)..(62): /note="This region represents a CpG dinucleotide"
  misc_feature (61)..(61): /note="Nucleotide may be methylated to form 5-methylcytosine"
gtcttgaactcctgacctcaagtgaccctctcacttcggcctccctaagtgctgggattacgggcatgagccaccacaccggccccatgtgtgcttttcatgtgttatagataacccgattt

SEQ ID NO: 4279 - DNA, 122 bp, Homo sapiens
  misc_feature (61)..(62): /note="This region represents a CpG dinucleotide"
  misc_feature (61)..(61): /note="Nucleotide may be methylated to form 5-methylcytosine"
tcacatgattttggtagtgtgacgaaaacctctttgtgggttattttgcaaggttttatgcgaaggtagaataaccagcccacagaaccttcgtaaggacagctgttgcaaagggtcgacac

SEQ ID NO: 4280 - DNA, 122 bp, Homo sapiens
  misc_feature (61)..(62): /note="This region represents a CpG dinucleotide"
  misc_feature (61)..(61): /note="Nucleotide may be methylated to form 5-methylcytosine"
cacaattgactgcatgcttagtgggctgggggaaaacccccacacagttggtcacagaaacgttttgtgttgattattgttgagtgagagaacagaaaaaacactttgttttttttccttat

SEQ ID NO: 4281 - DNA, 122 bp, Homo sapiens
  misc_feature (61)..(62): /note="This region represents a CpG dinucleotide"
  misc_feature (61)..(61): /note="Nucleotide may be methylated to form 5-methylcytosine"
catcttcatagtgttttatactctataaggtgctttctcttttgatctcgtaaaagtattcgtgcccatgttcaaatctgactgcctcttaccagctgtgtggcctgggccaattactggaa

SEQ ID NO: 4282 - DNA, 122 bp, Homo sapiens
  misc_feature (61)..(62): /note="This region represents a CpG dinucleotide"
  misc_feature (61)..(61): /note="Nucleotide may be methylated to form 5-methylcytosine"
caacctcaggcaggtttgactgggggtgaggtcagaacagtgtcctgattccctacctagcgggggtttgaacaaacacaaacctcaaggagggaatacaaaccacagagtggggcacgagc

SEQ ID NO: 4283 - DNA, 122 bp, Homo sapiens
  misc_feature (61)..(62): /note="This region represents a CpG dinucleotide"
  misc_feature (61)..(61): /note="Nucleotide may be methylated to form 5-methylcytosine"
aacttgtggcaacagtagacttcagagaccagactggcggcttgaagaaagctattttctcgtaccaaatacattccatttcctaagtaagttactcaaccaactaaaactccaggtttctc

SEQ ID NO: 4284 - DNA, 122 bp, Homo sapiens
  misc_feature (61)..(62): /note="This region represents a CpG dinucleotide"
  misc_feature (61)..(61): /note="Nucleotide may be methylated to form 5-methylcytosine"
ggcggagacccgcgagcgctcaccctcggcgcgggactaagggaacccacctgagcctcacgccgccaacgcctctgcttccgccctgcgccgggcacttccgcccgcacccaccaggcgcc

SEQ ID NO: 4285 - DNA, 122 bp, Homo sapiens
  misc_feature (61)..(62): /note="This region represents a CpG dinucleotide"
  misc_feature (61)..(61): /note="Nucleotide may be methylated to form 5-methylcytosine"
ctgatggctagtattaagcgtccaggccacacaagcttccttgagttcctagcaaacaggcgttcacatcattaaaagactcactgaccctattctcccagttgcagataaactcaatagac

SEQ ID NO: 4286 - DNA, 122 bp, Homo sapiens
  misc_feature (61)..(62): /note="This region represents a CpG dinucleotide"
  misc_feature (61)..(61): /note="Nucleotide may be methylated to form 5-methylcytosine"
ctcttgtcgaagggtgatgaagcaacttattgtggcagagaggcccccttgacagggaaacgggtgatctccagccagcagacatccagcaactgaaagaggcacaaggctgaaattcatcc

SEQ ID NO: 4287 - DNA, 122 bp, Homo sapiens
  misc_feature (61)..(62): /note="This region represents a CpG dinucleotide"
  misc_feature (61)..(61): /note="Nucleotide may be methylated to form 5-methylcytosine"
tatttatgggaagtctgccccgggatcggagcagatgtcatccagggctctcagatgctgcgaagcggggatggtgtccccatggccggccccctgcactcccacccctgcccatcctctca

SEQ ID NO: 4288 - DNA, 122 bp, Homo sapiens
  misc_feature (61)..(62): /note="This region represents a CpG dinucleotide"
  misc_feature (61)..(61): /note="Nucleotide may be methylated to form 5-methylcytosine"
ggcacaataagagacatctgggttattactatggtttcaggacttttactctccaaaacccgtgttgaaatataatccccagtgtggcagcattgagaggtggggcctttaagagatgattg

SEQ ID NO: 4289 - DNA, 122 bp, Homo sapiens
  misc_feature (61)..(62): /note="This region represents a CpG dinucleotide"
  misc_feature (61)..(61): /note="Nucleotide may be methylated to form 5-methylcytosine"
tgctttcctgtctcttggggagactggacagccggcggggcgtggcgggtgctggggtctcggcccgccgctgccctcgcccccgccccaaggggccagcactcaccggcatggtctggctg

SEQ ID NO: 4290 - DNA, 122 bp, Homo sapiens
  misc_feature (61)..(62): /note="This region represents a CpG dinucleotide"
  misc_feature (61)..(61): /note="Nucleotide may be methylated to form 5-methylcytosine"
gggaccctctcccatgggggcgacgggagacgtcctgccggtagaccttggccagggggtcgcgctccccgcccgcacccctcccggagccccggcggggacgtgcggggacgcgcccgggc

SEQ ID NO: 4291 - DNA, 122 bp, Homo sapiens
  misc_feature (61)..(62): /note="This region represents a CpG dinucleotide"
  misc_feature (61)..(61): /note="Nucleotide may be methylated to form 5-methylcytosine"
tgacatgcatgtatgtcacccccatcggaacacagcaagaccacacttgttctatgactacggatacaccccctttagaaagagcttgacacttgggcagaggatgacaggggctcacacag

SEQ ID NO: 4292 - DNA, 122 bp, Homo sapiens
  misc_feature (61)..(62): /note="This region represents a CpG dinucleotide"
  misc_feature (61)..(61): /note="Nucleotide may be methylated to form 5-methylcytosine"
aggagggaacagccaggaatgtcatggttcagagacactaagctggtacctttgggcttccgttgacacccgctcctccagttgtggttaccctgagctatcctcactccaggagctactca

SEQ ID NO: 4293 - DNA, 122 bp, Homo sapiens
  misc_feature (61)..(62): /note="This region represents a CpG dinucleotide"
  misc_feature (61)..(61): /note="Nucleotide may be methylated to form 5-methylcytosine"
ctaacaaccaggtattaaacattgcactgatacttgtcattgccttcaaaataagctctacgtgttttctttacttcagttgtctcatttaaccataaataagtcctcagaggtcaggggct

SEQ ID NO: 4294 - DNA, 122 bp, Homo sapiens
  misc_feature (61)..(62): /note="This region represents a CpG dinucleotide"
  misc_feature (61)..(61): /note="Nucleotide may be methylated to form 5-methylcytosine"
tgacctgtgtgagaaggtctgagaattttatgtacatccttcgagtggctggtttcagagcgggagatgcattcactgactcagcactcacatgggtgagtcagcagacaccggcctggggg

SEQ ID NO: 4295 - DNA, 122 bp, Homo sapiens
  misc_feature (61)..(62): /note="This region represents a CpG dinucleotide"
  misc_feature (61)..(61): /note="Nucleotide may be methylated to form 5-methylcytosine"
gggacagtggtcacatgtacaagctggctctggcttcagtcccagctgtaccaatgccagcgcctggcccccagggtgagtgatttaacctctaagcctcagccaacttgtctgaaaaatgg

SEQ ID NO: 4296 - DNA, 122 bp, Homo sapiens
  misc_feature (61)..(62): /note="This region represents a CpG dinucleotide"
  misc_feature (61)..(61): /note="Nucleotide may be methylated to form 5-methylcytosine"
cttctaccaccgtagatccgttttgccttttgtgtctggtttcaatgcatcgtaggtccacgacatccttccacaggtaccggccactcattcctttccttgctgcaggggagaccattgcg

SEQ ID NO: 4297 - DNA, 122 bp, Homo sapiens
  misc_feature (61)..(62): /note="This region represents a CpG dinucleotide"
  misc_feature (61)..(61): /note="Nucleotide may be methylated to form 5-methylcytosine"
tgagtgatcataggcaaagtacacatggcctcagagccccaggctttgtcatggtacagacgcactcacaatacctgttgtgaggaccaaggacgtaacacatcaagcccagccctgtgggc

SEQ ID NO: 4298 - DNA, 122 bp, Homo sapiens
  misc_feature (61)..(62): /note="This region represents a CpG dinucleotide"
  misc_feature (61)..(61): /note="Nucleotide may be methylated to form 5-methylcytosine"
ttgtggtgagcagaggcagctgtgcaaacaacctgctgttccggatgtgactgtggtggccgtggggtgcagagtccagggctcatggcgttggtcatgcaaattgtggttcctgggcctta

SEQ ID NO: 4299 - DNA, 122 bp, Homo sapiens
  misc_feature (61)..(62): /note="This region represents a CpG dinucleotide"
  misc_feature (61)..(61): /note="Nucleotide may be methylated to form 5-methylcytosine"
ctcactcatccagaacacagctctaatgaaggcttggtgaagcaagcctctgtatggccacgtgtctctgaggagtcaccagcattactctctaggggacatgggctaaccctaagttctta

SEQ ID NO: 4300 - DNA, 122 bp, Homo sapiens
  misc_feature (61)..(62): /note="This region represents a CpG dinucleotide"
  misc_feature (61)..(61): /note="Nucleotide may be methylated to form 5-methylcytosine"
tatctgaaaattttccccctggcttactcgcttgcagctgcccactttgcagaaggatggcgctctgatctctacgctccctgttccttcagggactccatagtattttttttcacgcgtcg

SEQ ID NO: 4301 - DNA, 122 bp, Homo sapiens
  misc_feature (61)..(62): /note="This region represents a CpG dinucleotide"
  misc_feature (61)..(61): /note="Nucleotide may be methylated to form 5-methylcytosine"
gtaacacacaactgagcatccctcaactgtaacaaaaaaatacctccagccattgccaaacgtctttgaggagcaaaattgtccgcagttgtgaaccctggtctatgtctatccctctacct

SEQ ID NO: 4302 - DNA, 122 bp, Homo sapiens
  misc_feature (61)..(62): /note="This region represents a CpG dinucleotide"
  misc_feature (61)..(61): /note="Nucleotide may be methylated to form 5-methylcytosine"
attgtgatggtaactgaacttatcagaagtcaacttatccttgttgacttatccttgttacgtaagtccaacttatcttgttgatgagtgtgggtgggaggcacgactgagagatatattga

SEQ ID NO: 4303 - DNA, 122 bp, Homo sapiens
  misc_feature (61)..(62): /note="This region represents a CpG dinucleotide"
  misc_feature (61)..(61): /note="Nucleotide may be methylated to form 5-methylcytosine"
gtgattctcttgtcttagcctccggagttagctgggactatgggtgtgcgtcacaacgcccggctaatttttgtatttttagtaaagatgaggtttcaccatgttggccaggctggtctcaa

SEQ ID NO: 4304 - DNA, 122 bp, Homo sapiens
  misc_feature (61)..(62): /note="This region represents a CpG dinucleotide"
  misc_feature (61)..(61): /note="Nucleotide may be methylated to form 5-methylcytosine"
aaacacctccccaaagaaaaccgtgactgtctttctcagccctgggtacccatgctgccccgcaggcctcccttcaatctgtgcttgcacaattctagatgggcgttctccagcggggtctg

SEQ ID NO: 4305 - DNA, 122 bp, Homo sapiens
  misc_feature (61)..(62): /note="This region represents a CpG dinucleotide"
  misc_feature (61)..(61): /note="Nucleotide may be methylated to form 5-methylcytosine"
aaattaatgccaaattgttccttatcagtgagtcatcggcactgctttctgctcccgtagcgccctgtacagatttccgtcagcacttaccatgtcgtattgtcttttccattaggcaggga

SEQ ID NO: 4306 - DNA, 122 bp, Homo sapiens
  misc_feature (61)..(62): /note="This region represents a CpG dinucleotide"
  misc_feature (61)..(61): /note="Nucleotide may be methylated to form 5-methylcytosine"
tctttgtgcacagaatttagagcctcaagaaagcattggatgtatgagctcagtgactcacgaatgtctcatttctgggaacacagacaactgatgggctatattcgttttcctctgtagca

SEQ ID NO: 4307 - DNA, 122 bp, Homo sapiens
  misc_feature (61)..(62): /note="This region represents a CpG dinucleotide"
  misc_feature (61)..(61): /note="Nucleotide may be methylated to form 5-methylcytosine"
attactgtgaggtgggatgaattgatctttcatggaatcctcctgcaatgctcgtgggttcgttccttccttccttcaacaagcgtttcttgcggcatctactacgggccaggtgctgtcct

SEQ ID NO: 4308 - DNA, 122 bp, Homo sapiens
  misc_feature (61)..(62): /note="This region represents a CpG dinucleotide"
  misc_feature (61)..(61): /note="Nucleotide may be methylated to form 5-methylcytosine"
ctggctgacatggaattaatcagcagccaccttctctactggtctctgttactggaaaaacgtcagtgcctctcaagccactttagggaggatccatggcagagttttaaggatcttccagg

SEQ ID NO: 4309 - DNA, 122 bp, Homo sapiens
  misc_feature (61)..(62): /note="This region represents a CpG dinucleotide"
  misc_feature (61)..(61): /note="Nucleotide may be methylated to form 5-methylcytosine"
acaggattatgggtgactttgttcatcacacatttcctattttctatactgtgaaacacacgagctctatcactgctattcccatgcaaggcaattttggaaaaggagaactactggcccca

SEQ ID NO: 4310 - DNA, 122 bp, Homo sapiens
  misc_feature (61)..(62): /note="This region represents a CpG dinucleotide"
  misc_feature (61)..(61): /note="Nucleotide may be methylated to form 5-methylcytosine"
gcaagggctgaagagctatctattggatactatgccgactactgggatgatgggttcatccgtactccaaacctcagcatcatgcaaaatagagacaagggaatggagcaattaggctggta

SEQ ID NO: 4311 - DNA, 122 bp, Homo sapiens
  misc_feature (61)..(62): /note="This region represents a CpG dinucleotide"
  misc_feature (61)..(61): /note="Nucleotide may be methylated to form 5-methylcytosine"
tttgaattacctgtaaatcttgatcaaactcagatgactgtccaactcatccagaaactacgtttgtctaatagaacaggaagcaggtggtggtggtgggtggtgggggggcattgatgaga

SEQ ID NO: 4312 - DNA, 122 bp, Homo sapiens
  misc_feature (61)..(62): /note="This region represents a CpG dinucleotide"
  misc_feature (61)..(61): /note="Nucleotide may be methylated to form 5-methylcytosine"
ggtggtggggttgaaacaaaacaaacaatagaaatgcaactttttgttcaacagcaaagtcggagagcaaactctttgtcaaggcatttattttagtcgattattaatatgtcatctgtgaa

SEQ ID NO: 4313 - DNA, 122 bp, Homo sapiens
  misc_feature (61)..(62): /note="This region represents a CpG dinucleotide"
  misc_feature (61)..(61): /note="Nucleotide may be methylated to form 5-methylcytosine"
gagagtaaaatgctaccttatttgattttaatttttggagattatttcatgatgttaaatcgcactggcctggattgtgtgccttctatagtctcattggggacgcaattgtagccccattc

SEQ ID NO: 4314 - DNA, 122 bp, Homo sapiens
  misc_feature (61)..(62): /note="This region represents a CpG dinucleotide"
  misc_feature (61)..(61): /note="Nucleotide may be methylated to form 5-methylcytosine"
gataaacttcagtgcctggatgagcaagcttcctgtgtgcttcagcttggggcgcatgtgcgcttcttctaggattttctgaaacttggtcaggggctcctggatcatgattgcagattgag

SEQ ID NO: 4315 - DNA, 122 bp, Homo sapiens
  misc_feature (61)..(62): /note="This region represents a CpG dinucleotide"
  misc_feature (61)..(61): /note="Nucleotide may be methylated to form 5-methylcytosine"
taagctttcacttctatagtaaaacttaatccgcacactttagagctcttaatagctccccgactttctccatcgccaacccaccattccaggatgcagggagcagccttactgggaggtgc

SEQ ID NO: 4316 - DNA, 122 bp, Homo sapiens
  misc_feature (61)..(62): /note="This region represents a CpG dinucleotide"
  misc_feature (61)..(61): /note="Nucleotide may be methylated to form 5-methylcytosine"
agaaaggcaacttagaacatctcagaaatcaaagaaccttcagctactctagacagatgccggacatgtgagtagaaggaaagagcaaacagtgtcttgcttttcttagcagctgaaatgca

SEQ ID NO: 4317 - DNA, 122 bp, Homo sapiens
  misc_feature (61)..(62): /note="This region represents a CpG dinucleotide"
  misc_feature (61)..(61): /note="Nucleotide may be methylated to form 5-methylcytosine"
agtgggcagtgtccccattctacagtctagtgtgcaatttccttgctatttgtgatgcttcgtcatggcttggatggccttctgataagaggtcccctctgtagaaatcgtgatgagttaat

SEQ ID NO: 4318 - DNA, 122 bp, Homo sapiens
  misc_feature (61)..(62): /note="This region represents a CpG dinucleotide"
  misc_feature (61)..(61): /note="Nucleotide may be methylated to form 5-methylcytosine"
gatggggaagagtggccattccatagagtatgtagagtggcgatgcagaaaagggtgaaacgtcgttggcgaattgtagctatcctagtttagccagagaaataggatatgggtagagaagt

SEQ ID NO: 4319 - DNA, 122 bp, Homo sapiens
  misc_feature (61)..(62): /note="This region represents a CpG dinucleotide"
  misc_feature (61)..(61): /note="Nucleotide may be methylated to form 5-methylcytosine"
tgggctggaaagaacaaactttcctccaggtcacatcttcctaccttcccactgctgccacgagcctgaatcctcatggtgggccagagtcttcatccatgcaagagacactcccaggcttg

SEQ ID NO: 4320 - DNA, 122 bp, Homo sapiens
  misc_feature (61)..(62): /note="This region represents a CpG dinucleotide"
  misc_feature (61)..(61): /note="Nucleotide may be methylated to form 5-methylcytosine"
aaggggaagtttggacacagacacacagggagaacgccttgagcatgaaggcagagattgcgatgatgtgtctgtctacaagccaaggaatgccaaagatcaccagcagagagaggcatgga

SEQ ID NO: 4321 - DNA, 122 bp, Homo sapiens
  misc_feature (61)..(62): /note="This region represents a CpG dinucleotide"
  misc_feature (61)..(61): /note="Nucleotide may be methylated to form 5-methylcytosine"
gggctgatgctggacatgacaacaaagagtctttctctgctgcatccagatgttacgaggcgattaaacttgggtttaactgacccaggagaatcaactggctgctagagcagccctgcttc

SEQ ID NO: 4322 - DNA, 122 bp, Homo sapiens
  misc_feature (61)..(62): /note="This region represents a CpG dinucleotide"
  misc_feature (61)..(61): /note="Nucleotide may be methylated to form 5-methylcytosine"
ttaagagtgcaggctttggagtcagagtgtctgcactcaaatccacgttctgtacatttgcgtaagatcacttgggctagctacttgacttatctgaaccttggcttctctctccttccgtt

SEQ ID NO: 4323 - DNA, 122 bp, Homo sapiens
  misc_feature (61)..(62): /note="This region represents a CpG dinucleotide"
  misc_feature (61)..(61): /note="Nucleotide may be methylated to form 5-methylcytosine"
tcttgaattaggaaagcaagggattcaagctctaactcaaaaatgtatcccattgtcttccgtccctgaatgcatatggggagggttaagaaagcaaagctggtctataccaaactttccag

SEQ ID NO: 4324 - DNA, 122 bp, Homo sapiens
  misc_feature (61)..(62): /note="This region represents a CpG dinucleotide"
  misc_feature (61)..(61): /note="Nucleotide may be methylated to form 5-methylcytosine"
acctttagaatcaagctcatgattcttaaccttgcacctggtggtcccccatatctaactcgagatcacccaaggattcacctggaaccctgggtaaccagccaaaacgagcctcggtactt

SEQ ID NO: 4325 - DNA, 122 bp, Homo sapiens
  misc_feature (61)..(62): /note="This region represents a CpG dinucleotide"
  misc_feature (61)..(61): /note="Nucleotide may be methylated to form 5-methylcytosine"
ctaatggagtcaaataccaagaagaaattctttttagactatttccaaacccttatcatacgtgtctcagcagcattagaaaggacccagtagtatcgtttggttaagtatcaaccatgttc

SEQ ID NO: 4326 - DNA, 122 bp, Homo sapiens
  misc_feature (61)..(62): /note="This region represents a CpG dinucleotide"
  misc_feature (61)..(61): /note="Nucleotide may be methylated to form 5-methylcytosine"
ggaggcagctgggggcaagacagtgaaaacaggtgggcatccaaccctcaggccccttagcgtttctaaggcaaacaagaaagacttctgtttcctatcactgatgaggtgggctaagctgc

SEQ ID NO: 4327 - DNA, 122 bp, Homo sapiens
  misc_feature (61)..(62): /note="This region represents a CpG dinucleotide"
  misc_feature (61)..(61): /note="Nucleotide may be methylated to form 5-methylcytosine"
cccgctgcttccacacagccgccacacttaggagcgtggccccagatgctggggaataaccgagggtagtctgaccccagagcagcacagcccacagtggacgccacatccaccgcagcggt

SEQ ID NO: 4328 - DNA, 122 bp, Homo sapiens
  misc_feature (61)..(62): /note="This region represents a CpG dinucleotide"
  misc_feature (61)..(61): /note="Nucleotide may be methylated to form 5-methylcytosine"
aagtttgtgtcattcagtgccatgggggttcttcagtttcaggagatgtcccccaccccccggcagggtgctaaccatggagggcaaccactgatgcctccagcagcttctggacagaagat

SEQ ID NO: 4329 - DNA, 122 bp, Homo sapiens
  misc_feature (61)..(62): /note="This region represents a CpG dinucleotide"
  misc_feature (61)..(61): /note="Nucleotide may be methylated to form 5-methylcytosine"
ctttgcaagttgccaaaggcagcttccactgaattacccatcactggagcttcaaactggcgctcagatctcattttaagaggagacaatcattatatgtgagtgttatttttataatcgcc

SEQ ID NO: 4330 - DNA, 122 bp, Homo sapiens
  misc_feature (61)..(62): /note="This region represents a CpG dinucleotide"
  misc_feature (61)..(61): /note="Nucleotide may be methylated to form 5-methylcytosine"
cttcagatagtgctttgaaagtcctgttgactcattcatcttggagatccgatcaccctgcggttgatctcccacacttactaggctgagaagaaagacgtctcttctctccttacaaaccc

SEQ ID NO: 4331 - DNA, 122 bp, Homo sapiens
  misc_feature (61)..(62): /note="This region represents a CpG dinucleotide"
  misc_feature (61)..(61): /note="Nucleotide may be methylated to form 5-methylcytosine"
ggggctggcgcaaaaggggccgcccccgtgccgggaacagactttgaagtgggtttttagcgcgcacgtgtgagagccgggccagggccggagcggggacccgctgggaggaaagaggaggc

SEQ ID NO: 4332 - DNA, 122 bp, Homo sapiens
  misc_feature (61)..(62): /note="This region represents a CpG dinucleotide"
  misc_feature (61)..(61): /note="Nucleotide may be methylated to form 5-methylcytosine"
ggctgcgcctggtggccgtgcgccctggctggagcggcgcgctgcgcttcggcttcaccgcgcacgatccgtcgctcatgagcgcccaggacatccccaagtacgcctgcccggacctggtc

SEQ ID NO: 4333 - DNA, 122 bp, Homo sapiens
  misc_feature (61)..(62): /note="This region represents a CpG dinucleotide"
  misc_feature (61)..(61): /note="Nucleotide may be methylated to form 5-methylcytosine"
acccccatttcagccttcatcctctgggtaactcctacctggtcttccagagcacgcccacgtaacaggcacgccgtaagtgttgaaccaaacaccagacactgctcaggggccataggaac

SEQ ID NO: 4334 - DNA, 122 bp, Homo sapiens
  misc_feature (61)..(62): /note="This region represents a CpG dinucleotide"
  misc_feature (61)..(61): /note="Nucleotide may be methylated to form 5-methylcytosine"
gaggtggctactgagagaggctcctctgcctgtggaaagaagaaggaacaaaaggaaagacgagggaacaaaaggaaagatgaagaacaaaaggaaagactgtcttgtagtttgagtgccag

SEQ ID NO: 4335 - DNA, 122 bp, Homo sapiens
  misc_feature (61)..(62): /note="This region represents a CpG dinucleotide"
  misc_feature (61)..(61): /note="Nucleotide may be methylated to form 5-methylcytosine"
cctcggaggaggcccatgaggaactgccgcatggtctcgaactcgaaagggcgcacgctgcgggagctgtcaatcacgaacaccagatccaggggcccagtgtgacacctgggacctgcggg

SEQ ID NO: 4336 - DNA, 122 bp, Homo sapiens
  misc_feature (61)..(62): /note="This region represents a CpG dinucleotide"
  misc_feature (61)..(61): /note="Nucleotide may be methylated to form 5-methylcytosine"
tgttttttcaaaaaaataagtaccaacccatctttctttgctaatgttaactctaatctgcgttagctgcttgcttttgcagttattggtatgcattcacattctgtatctataggatataa

SEQ ID NO: 4337 - DNA, 122 bp, Homo sapiens
  misc_feature (61)..(62): /note="This region represents a CpG dinucleotide"
  misc_feature (61)..(61): /note="Nucleotide may be methylated to form 5-methylcytosine"
tagtctgaaatgatcaaagcaccaggctcatataactgacttgagtattcaatgactcagcgactgtagaggctaccactactgttgctgttgtcactatcaaaagcacagcttatcccttc

SEQ ID NO: 4338 - DNA, 122 bp, Homo sapiens
  misc_feature (61)..(62): /note="This region represents a CpG dinucleotide"
  misc_feature (61)..(61): /note="Nucleotide may be methylated to form 5-methylcytosine"
agcagagttacaaacaagttgattcttctacatgaatttagtctaagcatcaatattggccgctgatattatgagctttttcaagaagatgagacttttcctcaagtcttcattaccaggta

SEQ ID NO: 4339 - DNA, 122 bp, Homo sapiens
  misc_feature (61)..(62): /note="This region represents a CpG dinucleotide"
  misc_feature (61)..(61): /note="Nucleotide may be methylated to form 5-methylcytosine"
gcaggcaggtgtggaggacagaatgtccacagttcctgagagcacagcaagccagctgggcgcgggcagcttccacagccatctcccaaggacaacatcctgcccaaaggcaggctttcaga

SEQ ID NO: 4340 - DNA, 122 bp, Homo sapiens
  misc_feature (61)..(62): /note="This region represents a CpG dinucleotide"
  misc_feature (61)..(61): /note="Nucleotide may be methylated to form 5-methylcytosine"
cagccagagcaccaagagccgctatgtccccaacgggaagctggcgtcctacacggtgcgcgacctgctgccgggacggcggtaccagctctctgtgatagcagtgcagagcacggagctcg

SEQ ID NO: 4341 - DNA, 122 bp, Homo sapiens
  misc_feature (61)..(62): /note="This region represents a CpG dinucleotide"
  misc_feature (61)..(61): /note="Nucleotide may be methylated to form 5-methylcytosine"
tgacatagggaggcagaatgaattcatttgacatgcttagcacggaacactgacaatatacgtgttctgaacagaataatacagattatatggtaccatagaaagtcaatgactcatgattg

SEQ ID NO: 4342 - DNA, 122 bp, Homo sapiens
  misc_feature (61)..(62): /note="This region represents a CpG dinucleotide"
  misc_feature (61)..(61): /note="Nucleotide may be methylated to form 5-methylcytosine"
gattacaggcgtgagccaccacgcccggccaaaccaacttttttttaaaaaggaagatttcgtttaaaagaaaccaccctgaagggtggagtgtggaactgagcttccgtgacggtcttgag

SEQ ID NO: 4343 - DNA, 122 bp, Homo sapiens
  misc_feature (61)..(62): /note="This region represents a CpG dinucleotide"
  misc_feature (61)..(61): /note="Nucleotide may be methylated to form 5-methylcytosine"
tgggaggaccttcaaggagccaggctccccggcaccagtaggtcttgttcagctgtgaatcggagctaaggtggaatcagattatgacttaatttccctgctaatgcctccctgtctcatag

SEQ ID NO: 4344 - DNA, 122 bp, Homo sapiens
  misc_feature (61)..(62): /note="This region represents a CpG dinucleotide"
  misc_feature (61)..(61): /note="Nucleotide may be methylated to form 5-methylcytosine"
ggggaaggcctgcggcgctgtgaggcaggctgggcggggctgtgacgtcacacaaggcgccgtcccggagcgaccacccaggctggggcacgtggggcgtgggcgtttagtgctgtcgcagt

SEQ ID NO: 4345 - DNA, 122 bp, Homo sapiens
  misc_feature (61)..(62): /note="This region represents a CpG dinucleotide"
  misc_feature (61)..(61): /note="Nucleotide may be methylated to form 5-methylcytosine"
gagtggggaagaaggaagacacttcctgtttgcttcctgttctgtttaacgacaccctaacgattacttttcatttcagcagttatagtttgtttcagtagcaacagttatttccagtttta

SEQ ID NO: 4346 - DNA, 122 bp, Homo sapiens
  misc_feature (61)..(62): /note="This region represents a CpG dinucleotide"
  misc_feature (61)..(61): /note="Nucleotide may be methylated to form 5-methylcytosine"
gatgagggccttgacctcaatggcagatcagttcaccctacattgtaaatggctcatatgcgtagagcaaacggtgatgggtggagggcagtggaaggggcgtggtgggaagtccagagaga

SEQ ID NO: 4347 - DNA, 122 bp, Homo sapiens
  misc_feature (61)..(62): /note="This region represents a CpG dinucleotide"
  misc_feature (61)..(61): /note="Nucleotide may be methylated to form 5-methylcytosine"
ttaaacattctttaagcatttagtaggaactactgctctgggtagaacagagaaggagaacgaagggtataacgcccctgtttgcatgcccagctctgcaaaacatgcctgcagttcactag

SEQ ID NO: 4348 - DNA, 122 bp, Homo sapiens
  misc_feature (61)..(62): /note="This region represents a CpG dinucleotide"
  misc_feature (61)..(61): /note="Nucleotide may be methylated to form 5-methylcytosine"
cccccatgtaccagaggctaacaatgaagtttatttctcactcaccctacaaattcattccgagttattgctattctcctccaaggaagctctacaccaagtaaaagaagctgtctctaact

SEQ ID NO: 4349 - DNA, 122 bp, Homo sapiens
  misc_feature (61)..(62): /note="This region represents a CpG dinucleotide"
  misc_feature (61)..(61): /note="Nucleotide may be methylated to form 5-methylcytosine"
gctctgcctcctccagggtgctgtggctcctcctcaagggagggcggctgggggaggagacgcctcagtacagaaaagctcgcagctgttgttgggtctgatcccacctctcctgctgtttc

SEQ ID NO: 4350 - DNA, 122 bp, Homo sapiens
  misc_feature (61)..(62): /note="This region represents a CpG dinucleotide"
  misc_feature (61)..(61): /note="Nucleotide may be methylated to form 5-methylcytosine"
caatgctaatgtctgacaatttgtcccttatatcatgattaataaatcagcacacgtcgtcgttcaaattctgaatcataagctgaacagaatgcaataacatcgcagaattcttaacaatt

SEQ ID NO: 4351 - DNA, 122 bp, Homo sapiens
  misc_feature (61)..(62): /note="This region represents a CpG dinucleotide"
  misc_feature (61)..(61): /note="Nucleotide may be methylated to form 5-methylcytosine"
gaatagggagcttggaatgactcaaatggacagaacattttgcagtatttggatttctatcgctccacgatagttttgtctccttgattttcacgttagtagaagcatgcaataggttgtct

SEQ ID NO: 4352 - DNA, 122 bp, Homo sapiens
  misc_feature (61)..(62): /note="This region represents a CpG dinucleotide"
  misc_feature (61)..(61): /note="Nucleotide may be methylated to form 5-methylcytosine"
attttccgcttcaggacttctttcaccaggcccttgtctgggccctgtttgactttttctcgtccgattaagtacaagcactttggggtaaggagcaggtctcgctttacaccctgtaagga

SEQ ID NO: 4353 - DNA, 122 bp, Homo sapiens
  misc_feature (61)..(62): /note="This region represents a CpG dinucleotide"
  misc_feature (61)..(61): /note="Nucleotide may be methylated to form 5-methylcytosine"
taacaatgattgaagtccaaaggtaattgtttaaaaaattgtcataagaattaggcagaacgggtagcctcatatacccaaggtggagtaaaagagagtagaaattatgaattatttttctt

SEQ ID NO: 4354 - DNA, 122 bp, Homo sapiens
  misc_feature (61)..(62): /note="This region represents a CpG dinucleotide"
  misc_feature (61)..(61): /note="Nucleotide may be methylated to form 5-methylcytosine"
ggcagaaacagtagattgtgtgctctgtgctgtgaggaatgtatcccctgcactgcctgccgtgtgcccagcacttagcacagagcctgcccttcacaggcgtttacaaatggacccagtgg

SEQ ID NO: 4355 - DNA, 122 bp, Homo sapiens
  misc_feature (61)..(62): /note="This region represents a CpG dinucleotide"
  misc_feature (61)..(61): /note="Nucleotide may be methylated to form 5-methylcytosine"
actcgagagacactccttcagttatttaataaccacacactctgctctgtgccgggccctcggcttggagatggatttatggagctaaattaattattcatttatgtattccagaaaattta

SEQ ID NO: 4356 - DNA, 122 bp, Homo sapiens
  misc_feature (61)..(62): /note="This region represents a CpG dinucleotide"
  misc_feature (61)..(61): /note="Nucleotide may be methylated to form 5-methylcytosine"
gctatctctagaacagttcaggggaagtataatcttgtgacagagtttgtgtgattccagcgcagtaggttgtaaacaactatgaggaaacaggtcagagaacaagctggcctaatgattaa

SEQ ID NO: 4357 - DNA, 122 bp, Homo sapiens
  misc_feature (61)..(62): /note="This region represents a CpG dinucleotide"
  misc_feature (61)..(61): /note="Nucleotide may be methylated to form 5-methylcytosine"
aagcaatgagggccagtccccaggccaggctgctgctgggtacccatggctgcgtgtgagcgaggcaggaccccacctcctccccgtctgcagtccatcctgaccctacagtccccagtctc

SEQ ID NO: 4358 - DNA, 122 bp, Homo sapiens
  misc_feature (61)..(62): /note="This region represents a CpG dinucleotide"
  misc_feature (61)..(61): /note="Nucleotide may be methylated to form 5-methylcytosine"
ttggaaatgcacagaatttctctagacggatacagaggaggcaggaaatggtggctgcctcgagagaagcacactaggtagctagggcacaagggtcagagaaagctctttactttttacta

SEQ ID NO: 4359 - DNA, 122 bp, Homo sapiens
  misc_feature (61)..(62): /note="This region represents a CpG dinucleotide"
  misc_feature (61)..(61): /note="Nucleotide may be methylated to form 5-methylcytosine"
gagggaagtgaagatttatttattcttgccctgtctctatgggtgcaatgaagagcctttcgaaacgccaataagacttcggtacactgagagacactacttgaaaatactcaatttcgatt

SEQ ID NO: 4360 - DNA, 122 bp, Homo sapiens
  misc_feature (61)..(62): /note="This region represents a CpG dinucleotide"
  misc_feature (61)..(61): /note="Nucleotide may be methylated to form 5-methylcytosine"
tctgcttacattgtaaggtgttggctcatttctgaaagcaaaggcatttaaactatctcacggacaactcactctggcccaaaccaccacattcacttgaaacaagaagtgtatgcagtggt

SEQ ID NO: 4361 - DNA, 122 bp, Homo sapiens
  misc_feature (61)..(62): /note="This region represents a CpG dinucleotide"
  misc_feature (61)..(61): /note="Nucleotide may be methylated to form 5-methylcytosine"
cagcctccaccaagctctacccctggcctcagaacctcagggggcaaaagtggccagtcacgtcctctgtctgagaaactagccatgagtctcttgcaggagggaggaaatcattgcttact

SEQ ID NO: 4362 - DNA, 122 bp, Homo sapiens
  misc_feature (61)..(62): /note="This region represents a CpG dinucleotide"
  misc_feature (61)..(61): /note="Nucleotide may be methylated to form 5-methylcytosine"
catgttaaattccattgaagattttacatttgcaccagatgctaactcctaactttattacgtagtgttctctaaaaacattgcctacttcactggtgacccactgactctctgacacactg

SEQ ID NO: 4363 - DNA, 122 bp, Homo sapiens
  misc_feature (61)..(62): /note="This region represents a CpG dinucleotide"
  misc_feature (61)..(61): /note="Nucleotide may be methylated to form 5-methylcytosine"
ctctgcagggcatgcccactgcatgtgctgggaggctctcctacatccaatgggcagatgcgcagtctccacggaggcctcaggcctcggtgtgagccagggctgcttcaaacatgtcggct

SEQ ID NO: 4364 - DNA, 122 bp, Homo sapiens
  misc_feature (61)..(62): /note="This region represents a CpG dinucleotide"
  misc_feature (61)..(61): /note="Nucleotide may be methylated to form 5-methylcytosine"
ttcctaattgggaaactctgttttaccttctctagagaatagacatgcaagtttatgctgcggtaggagagggacagttacccagaggtgcagagagagaagggaatctaggaatccacctg

SEQ ID NO: 4365 - DNA, 122 bp, Homo sapiens
  misc_feature (61)..(62): /note="This region represents a CpG dinucleotide"
  misc_feature (61)..(61): /note="Nucleotide may be methylated to form 5-methylcytosine"
ttaaacacagacaacacttactctgagtgtcctcacacaccagctgtgtggctaagatgacgcaaatctctaacagtgtttgaacactataaatcattccataaaggtaaaataaataattt

SEQ ID NO: 4366 - DNA, 122 bp, Homo sapiens
  misc_feature (61)..(62): /note="This region represents a CpG dinucleotide"
  misc_feature (61)..(61): /note="Nucleotide may be methylated to form 5-methylcytosine"
tactctgaactttctgtcctcatgctgtttactgcatctggaatgtctttgtcctacagacgtttccaatgcaggcttttgaaatccaacccaacaataaaactagctcaaggcactttttc

SEQ ID NO: 4367 - DNA, 122 bp, Homo sapiens
  misc_feature (61)..(62): /note="This region represents a CpG dinucleotide"
  misc_feature (61)..(61): /note="Nucleotide may be methylated to form 5-methylcytosine"
acccagtcacacagctggcaggtgaggagctgacccagagtccacccatcccttataccacgctgggatacctcatgaccaagtggaccctgccacacggccctgaggggctgttcctcccc

SEQ ID NO: 4368 - DNA, 122 bp, Homo sapiens
  misc_feature (61)..(62): /note="This region represents a CpG dinucleotide"
  misc_feature (61)..(61): /note="Nucleotide may be methylated to form 5-methylcytosine"
ccattgacatcattgggattaaattactaatttcccttatgactatcttccagaccagaacgaaacatgtaggaagacaagaactatccctgccattctcagtgttaaatttggaaaggtgt

SEQ ID NO: 4369 - DNA, 122 bp, Homo sapiens
  misc_feature (61)..(62): /note="This region represents a CpG dinucleotide"
  misc_feature (61)..(61): /note="Nucleotide may be methylated to form 5-methylcytosine"
gtgctccgcggttgctgagcaaacacgcagtttcaatgcaggatagtgagtccaaaagttcgtaacagggaaaaaacaggggcctatgagaatttacagagaaactctgaactcctctctac

SEQ ID NO: 4370 - DNA, 122 bp, Homo sapiens
  misc_feature (61)..(62): /note="This region represents a CpG dinucleotide"
  misc_feature (61)..(61): /note="Nucleotide may be methylated to form 5-methylcytosine"
aaaatgaaaccaaacctcactgaatagagtggacagtctgtgtgtaacacaactcattgtcggggtgggtttccatcaacaacaaaacagactgcatatgtagaagaaagggaaaatgggac

SEQ ID NO: 4371 - DNA, 122 bp, Homo sapiens
  misc_feature (61)..(62): /note="This region represents a CpG dinucleotide"
  misc_feature (61)..(61): /note="Nucleotide may be methylated to form 5-methylcytosine"
agagtggaagcggcaggtgatggtgcggaagctgcaggcgcgcctgggcgcagagagctccgcagaggcccaggtaggcccccggcaggggcgggaccagtgggcggggcggggccttttcc

SEQ ID NO: 4372 - DNA, 122 bp, Homo sapiens
  misc_feature (61)..(62): /note="This region represents a CpG dinucleotide"
  misc_feature (61)..(61): /note="Nucleotide may be methylated to form 5-methylcytosine"
caatatcatagcattttagaaaccaacttataaaaatctaaaaagtaaataaaagtggtgcgggtgatacctgggcggaatgtcttggcactcaggtgtaaaggattctggaaatagggatg

SEQ ID NO: 4373 - DNA, 122 bp, Homo sapiens
  misc_feature (61)..(62): /note="This region represents a CpG dinucleotide"
  misc_feature (61)..(61): /note="Nucleotide may be methylated to form 5-methylcytosine"
ctcaagcagtcatttcctctcggcctcccaaagtacttggattacaggcacgagccaccacgcccgcccaaagtcataattcttgagtcatctgctcgtgttatcttggtttcctcaccttc

SEQ ID NO: 4374 - DNA, 122 bp, Homo sapiens
  misc_feature (61)..(62): /note="This region represents a CpG dinucleotide"
  misc_feature (61)..(61): /note="Nucleotide may be methylated to form 5-methylcytosine"
ggtgggggccgctctggctacagtttatcttggcactaacaacggggactgattgggcttcgttgtgaaaaggggggccctgtggtgcgtttacagagtctgagaacacagagttcgtggcc

SEQ ID NO: 4375 - DNA, 122 bp, Homo sapiens
  misc_feature (61)..(62): /note="This region represents a CpG dinucleotide"
  misc_feature (61)..(61): /note="Nucleotide may be methylated to form 5-methylcytosine"
cattgtagattttacactgctgattcatagagcttactcagctgattttcaccctgtcatcgttaagtggactatctggactttcatgcaagatgctgtgattttgaaaccaggtgggggga

SEQ ID NO: 4376 - DNA, 122 bp, Homo sapiens
  misc_feature (61)..(62): /note="This region represents a CpG dinucleotide"
  misc_feature (61)..(61): /note="Nucleotide may be methylated to form 5-methylcytosine"
agatgctaactctagtttccccaaagctgtcttttgcctgctggctttggtcctattccacgtgactgtggagtgcctcaaactcaagacagcaaatgggaaaggaacaggatctggctcct

SEQ ID NO: 4377 - DNA, 122 bp, Homo sapiens
  misc_feature (61)..(62): /note="This region represents a CpG dinucleotide"
  misc_feature (61)..(61): /note="Nucleotide may be methylated to form 5-methylcytosine"
aatgacacagtactccagtgtatcctaatctcttccaggacagtgtttctcaaactaatgcgcatacaaatcaccctgggatcttattaaaacccagattctgattgaacaggtctggcctg

SEQ ID NO: 4378 - DNA, 122 bp, Homo sapiens
  misc_feature (61)..(62): /note="This region represents a CpG dinucleotide"
  misc_feature (61)..(61): /note="Nucleotide may be methylated to form 5-methylcytosine"
cccttcacttccctctctcttctttcgtatgtaaagatcagttacatttatcctttaagtcgtttgattttgcaacagtaaataacttctttcattactttgggacttctccaactctgttc

SEQ ID NO: 4379 - DNA, 122 bp, Homo sapiens
  misc_feature (61)..(62): /note="This region represents a CpG dinucleotide"
  misc_feature (61)..(61): /note="Nucleotide may be methylated to form 5-methylcytosine"
agcctggatgagtattcacccttacttctctgaaacacaaaaaggtgactatatcccttacgtgtcttctggatcatagggtgttcatgagcattaagtgagatcatagatgcttctcaatt

SEQ ID NO: 4380 - DNA, 122 bp, Homo sapiens
  misc_feature (61)..(62): /note="This region represents a CpG dinucleotide"
  misc_feature (61)..(61): /note="Nucleotide may be methylated to form 5-methylcytosine"
tcacgatcattgacctcctctctgaactgataacatgagttagcatgttatctgctctttcgtagttccagaggtgtgatgattatgttccaaatatgtgaaaatctagttgaatgcacaat

SEQ ID NO: 4381 - DNA, 122 bp, Homo sapiens
  misc_feature (61)..(62): /note="This region represents a CpG dinucleotide"
  misc_feature (61)..(61): /note="Nucleotide may be methylated to form 5-methylcytosine"
cgtctttttgcccccgccaccgcggctttctcccactgcggttttttgcccccgccgccgcgtctttttgcctccgccgcgcagatttttgcccccgacgctgcgcctttttcccgccctgg

SEQ ID NO: 4382 - DNA, 122 bp, Homo sapiens
  misc_feature (61)..(62): /note="This region represents a CpG dinucleotide"
  misc_feature (61)..(61): /note="Nucleotide may be methylated to form 5-methylcytosine"
taatgggaaccaataatcatacctcaagtattcccttaatcagggcaataatctcttgtacgttcctggaattctgtattgtttacaatttattctaggacaacataggaaattccaaaagt

SEQ ID NO: 4383 - DNA, 122 bp, Homo sapiens
  misc_feature (61)..(62): /note="This region represents a CpG dinucleotide"
  misc_feature (61)..(61): /note="Nucleotide may be methylated to form 5-methylcytosine"
gtatgagttttatgaaaacatttgtaacccaatcacagctatctttcccctgaaacaacacgtgctttagactgaattggttatagttctaggtatgagaaagaaatatcaaaatgttatac

SEQ ID NO: 4384 - DNA, 122 bp, Homo sapiens
  misc_feature (61)..(62): /note="This region represents a CpG dinucleotide"
  misc_feature (61)..(61): /note="Nucleotide may be methylated to form 5-methylcytosine"
agaaaaatagggcagagaccagaacagcatgctagtaaagccttctctcttaataagctgcgctgatttggtgaacttcactggggctcctggggtcaaagttgtgtaggggttaaggatat

SEQ ID NO: 4385 - DNA, 122 bp, Homo sapiens
  misc_feature (61)..(62): /note="This region represents a CpG dinucleotide"
  misc_feature (61)..(61): /note="Nucleotide may be methylated to form 5-methylcytosine"
tgaggcttcagagacttgcctgatgcctggcctcgctcagaccccgggcacctgggaggtcgtgcctccttgaaatggccactcgccaggctgctttgcaccgcaccgggcacaggctgcgg

SEQ ID NO: 4386 - DNA, 122 bp, Homo sapiens
  misc_feature (61)..(62): /note="This region represents a CpG dinucleotide"
  misc_feature (61)..(61): /note="Nucleotide may be methylated to form 5-methylcytosine"
ttctaatttatttttcccagtagatactaacttttcctctatctttttccacattttacacggaggctagcatctcaccattgtcacaatgactgccagttcccaggcctcaacctggaatc

SEQ ID NO: 4387 - DNA, 122 bp, Homo sapiens
  misc_feature (61)..(62): /note="This region represents a CpG dinucleotide"
  misc_feature (61)..(61): /note="Nucleotide may be methylated to form 5-methylcytosine"
gtgcctgggtctctgggctgtaactgactcaccgggactctgataatattaatactcagacgccagactgcagcctgttctccagaggcccccaggggaatgaatcaatgactgtctgatat

SEQ ID NO: 4388 - DNA, 122 bp, Homo sapiens
  misc_feature (61)..(62): /note="This region represents a CpG dinucleotide"
  misc_feature (61)..(61): /note="Nucleotide may be methylated to form 5-methylcytosine"
aagtcctagagtatcaagaaatcacccaaatgatcagagtggtaacttcacagagcttgacgtatgatgtcaaagctaaacttcaaaaccacagatgtttcctggtacttacagaaaattaa

SEQ ID NO: 4389 - DNA, 122 bp, Homo sapiens
  misc_feature (61)..(62): /note="This region represents a CpG dinucleotide"
  misc_feature (61)..(61): /note="Nucleotide may be methylated to form 5-methylcytosine"
gtggagaagttattgggtcatatagtgatggtgtgcagataggacctggtggtgagttgacgaggagccattgccattcagccatcaagaatcatgatgtgtgttgtgtaggaatggagagg

SEQ ID NO: 4390 - DNA, 122 bp, Homo sapiens
  misc_feature (61)..(62): /note="This region represents a CpG dinucleotide"
  misc_feature (61)..(61): /note="Nucleotide may be methylated to form 5-methylcytosine"
cacagccggggacagtcttgggaggtgactgtggtcaccaccactactgggctgcagcatcgctgaatgcagcccctgccacaactccacaggcattggctgtaatgatgggcgggggtgct

SEQ ID NO: 4391 - DNA, 122 bp, Homo sapiens
  misc_feature (61)..(62): /note="This region represents a CpG dinucleotide"
  misc_feature (61)..(61): /note="Nucleotide may be methylated to form 5-methylcytosine"
cacttctgaaagggggttggctagtttgaaacaagcttacagtggtgcaaaacgcagtggcgtgaaagcaggtaacaaaggcagtttatcaaacagtggcaggcctgtaactcaggcttgtt

SEQ ID NO: 4392 - DNA, 122 bp, Homo sapiens
  misc_feature (61)..(62): /note="This region represents a CpG dinucleotide"
  misc_feature (61)..(61): /note="Nucleotide may be methylated to form 5-methylcytosine"
tgcaagaactggagcctgggatctaccaggacgatattctgttcagtcacagaagcaagtcggagagtggccaagacttgggctttctgctcctgcaaatctgattccatacggattggggt

SEQ ID NO: 4393 - DNA, 122 bp, Homo sapiens
  misc_feature (61)..(62): /note="This region represents a CpG dinucleotide"
  misc_feature (61)..(61): /note="Nucleotide may be methylated to form 5-methylcytosine"
tacgtgcaatgttctgtttgttaatctcatttccccatgagttcatctctgtgtttctggcgcttagcagcagagagcctgacacatacttggtacttcttattttgcaggaatgagagaac

SEQ ID NO: 4394 - DNA, 122 bp, Homo sapiens
  misc_feature (61)..(62): /note="This region represents a CpG dinucleotide"
  misc_feature (61)..(61): /note="Nucleotide may be methylated to form 5-methylcytosine"
gccccctcaggcgtccagatttggggaggtcaagagaagctggtctgcccctctcctctccgcctgctgtcttctcaaactggatgggccagttccgatgccaagatccgccccccatcagt

SEQ ID NO: 4395 - DNA, 122 bp, Homo sapiens
  misc_feature (61)..(62): /note="This region represents a CpG dinucleotide"
  misc_feature (61)..(61): /note="Nucleotide may be methylated to form 5-methylcytosine"
gtgaacactatggggtgataaagagtccctttcttatgttcctgctcagccactgggtgacgtgaccttgtgcaaatccaccccactctaaatctgttctctttacctgtaacagaaggatt

SEQ ID NO: 4396 - DNA, 122 bp, Homo sapiens
  misc_feature (61)..(62): /note="This region represents a CpG dinucleotide"
  misc_feature (61)..(61): /note="Nucleotide may be methylated to form 5-methylcytosine"
gattctacttttgcctgggtgatctaagtcagcttgacacaaagaagcagctttgatttacgacccagatgcagagccgcagttatggggtttctggactcagtatatctatcttgcagctt

SEQ ID NO: 4397 - DNA, 122 bp, Homo sapiens
  misc_feature (61)..(62): /note="This region represents a CpG dinucleotide"
  misc_feature (61)..(61): /note="Nucleotide may be methylated to form 5-methylcytosine"
gcgacgccagttgtacttgtcattgcaattgcaaaatttaattaaatgttatgaaaactacgcgtctgaaaaggaagagctgctgttctgttaaaactaggctgaaacactttggaaccatt

SEQ ID NO: 4398 - DNA, 122 bp, Homo sapiens
  misc_feature (61)..(62): /note="This region represents a CpG dinucleotide"
  misc_feature (61)..(61): /note="Nucleotide may be methylated to form 5-methylcytosine"
gccaggtgcgggttctgggccatcccctcactccctgttcactgccatatgctagctgggcggggttccctcccactcagggtgttctcaatggggcacctacccagcatgcactctccaag

SEQ ID NO: 4399 - DNA, 122 bp, Homo sapiens
  misc_feature (61)..(62): /note="This region represents a CpG dinucleotide"
  misc_feature (61)..(61): /note="Nucleotide may be methylated to form 5-methylcytosine"
ttttttctcattgttgaaatagaaaggttggcttcacactctttcctcatgctaactggacgtgaaaatcttgtctttttgcattacaaaatctgggagttatttgtcattatgactcattt

SEQ ID NO: 4400 - DNA, 122 bp, Homo sapiens
  misc_feature (61)..(62): /note="This region represents a CpG dinucleotide"
  misc_feature (61)..(61): /note="Nucleotide may be methylated to form 5-methylcytosine"
tccggcctccaatcaataaactttcacttctccaaccttacgcaatgcccttctcacccccgtcaagtcctgtaatactgccccagcttctgtgagtacatgttggctaggtcctgcaactt

SEQ ID NO: 4401 - DNA, 122 bp, Homo sapiens
  misc_feature (61)..(62): /note="This region represents a CpG dinucleotide"
  misc_feature (61)..(61): /note="Nucleotide may be methylated to form 5-methylcytosine"
gcgtgttcgctccctctgcccctcagcttcaggcccgtttctgagaagcaataggaaactcgcaggccataaaaaacgcacaggcccgtcccgagcccttcctgtgtcctaaaaatacagcg

SEQ ID NO: 4402 - DNA, 122 bp, Homo sapiens
  misc_feature (61)..(62): /note="This region represents a CpG dinucleotide"
  misc_feature (61)..(61): /note="Nucleotide may be methylated to form 5-methylcytosine"
gtgatcacagtttttgtcattgttttatctgtctaatctctctgggctgcaagctcctggcgctgtgttcctgctgctctatcacatagtaggtgatctatgaatatctgccaagtgaatgc

SEQ ID NO: 4403 - DNA, 122 bp, Homo sapiens
  misc_feature (61)..(62): /note="This region represents a CpG dinucleotide"
  misc_feature (61)..(61): /note="Nucleotide may be methylated to form 5-methylcytosine"
gacctcaatcgttgatttcggctgcacttcctatccctgggggagctttcaacgctccgccgtccaggccgccgggccccgcagcccgcgccccgctctctagggctgggcccccaggggct

SEQ ID NO: 4404 - DNA, 122 bp, Homo sapiens
  misc_feature (61)..(62): /note="This region represents a CpG dinucleotide"
  misc_feature (61)..(61): /note="Nucleotide may be methylated to form 5-methylcytosine"
aacaaaatgaccgtgaataatgtattcccaggcactgcttcctgggcagcactgccaaggcgttctgtggcggctgcatctgtcatcggggaacacaaaacacacagggaagtcacccccac

SEQ ID NO: 4405 - DNA, 122 bp, Homo sapiens
  misc_feature (61)..(62): /note="This region represents a CpG dinucleotide"
  misc_feature (61)..(61): /note="Nucleotide may be methylated to form 5-methylcytosine"
ggcaaaacagctgtggcctcccccaggcagggaaagtggtgggtgtagggctggacttgccggctgagcttgcaggacaatctggttattcatctgcttgaagtcagggcaactctttgagt

SEQ ID NO: 4406 - DNA, 122 bp, Homo sapiens
  misc_feature (61)..(62): /note="This region represents a CpG dinucleotide"
  misc_feature (61)..(61): /note="Nucleotide may be methylated to form 5-methylcytosine"
gtatgttcccactctttaccatgttattttgcagtgccctcccattgcaacttgagtggacgttgctcagccatgggacttgctctggccaatgggatgagagcagaggtgcatcgagcagg

SEQ ID NO: 4407 - DNA, 122 bp, Homo sapiens
  misc_feature (61)..(62): /note="This region represents a CpG dinucleotide"
  misc_feature (61)..(61): /note="Nucleotide may be methylated to form 5-methylcytosine"
cataaaaatagaattaggcaatatgttgccttttgtgactggtttttttgctttgcataacgtcttcaagattcatcatgttgtagcttgtgtgaatatttcatgcctgttaatggctgaat

SEQ ID NO: 4408 - DNA, 122 bp, Homo sapiens
  misc_feature (61)..(62): /note="This region represents a CpG dinucleotide"
  misc_feature (61)..(61): /note="Nucleotide may be methylated to form 5-methylcytosine"
acaaacttcccaggacgacagtcagaaaatcatagttacagaaggcaggctggggagaggcggtttctgggtctccgaatgaggtcacacaattaaaattaaaaaaacgaaaccaaaccaac

SEQ ID NO: 4409 - DNA, 122 bp, Homo sapiens
  misc_feature (61)..(62): /note="This region represents a CpG dinucleotide"
  misc_feature (61)..(61): /note="Nucleotide may be methylated to form 5-methylcytosine"
gagtcagtggacttcctgaatgcagggaacctggtcgtgcttgggtttgcacccctagatcgtccttttgtgacagtggaggagcaaaccctggctgtagcaggtgtgctctgtgtgtttga

SEQ ID NO: 4410 - DNA, 122 bp, Homo sapiens
  misc_feature (61)..(62): /note="This region represents a CpG dinucleotide"
  misc_feature (61)..(61): /note="Nucleotide may be methylated to form 5-methylcytosine"
gagaaagggatccgcttccttcctttagagctgtgaaatgtccccggttggaattaaaggcggctgctggggagaggtgaaattcagccaaaaccacccagtcaggcagcccttctcagaga

SEQ ID NO: 4411 - DNA, 122 bp, Homo sapiens
  misc_feature (61)..(62): /note="This region represents a CpG dinucleotide"
  misc_feature (61)..(61): /note="Nucleotide may be methylated to form 5-methylcytosine"
tccatttgaacaatacaattattcagacaatactaaaccgagctttcaggcaagacctcccgtggccctgacagtcctggggcagagtgggcagcaactccttgctggtggccgtggcggca

SEQ ID NO: 4412 - DNA, 122 bp, Homo sapiens
  misc_feature (61)..(62): /note="This region represents a CpG dinucleotide"
  misc_feature (61)..(61): /note="Nucleotide may be methylated to form 5-methylcytosine"
tgccctcccttttcaagccgcccttttttccagtgaaccagaggatactccaaatgtgcccgacacagacctgtgaggggacttctccacctgggtctcacacgctccacttaaactacctc

SEQ ID NO: 4413 - DNA, 122 bp, Homo sapiens
  misc_feature (61)..(62): /note="This region represents a CpG dinucleotide"
  misc_feature (61)..(61): /note="Nucleotide may be methylated to form 5-methylcytosine"
gtttctcttcaacaataaaattctctgtttaagaatgtgatgagcgggcatggtggctcacgcttgtaattccagcactttgggaggctgaggcaggtggatcacttgaggtcaggagttcg

SEQ ID NO: 4414 - DNA, 122 bp, Homo sapiens
  misc_feature (61)..(62): /note="This region represents a CpG dinucleotide"
  misc_feature (61)..(61): /note="Nucleotide may be methylated to form 5-methylcytosine"
atactcaaaccagaaacaaaactgcctgaatgtgaaactgtttactaaaaacagaaacagcgttctaacggctagaagggtttctactggcagttcattatgcaaaaggagaggttccttca

SEQ ID NO: 4415 - DNA, 122 bp, Homo sapiens
  misc_feature (61)..(62): /note="This region represents a CpG dinucleotide"
  misc_feature (61)..(61): /note="Nucleotide may be methylated to form 5-methylcytosine"
ttctctgtcatcaaatttgctttctgatttctcctctgtattaactgatccaatggcttccgtcattctgaggaaaaagttcaagctccttttcaaggcctacagtgcttgctccttggctc

SEQ ID NO: 4416 - DNA, 122 bp, Homo sapiens
  misc_feature (61)..(62): /note="This region represents a CpG dinucleotide"
  misc_feature (61)..(61): /note="Nucleotide may be methylated to form 5-methylcytosine"
gtgggaggcagggaaggggcgcataggcgtagcaagagatgtcagccctgcctgatttcacggtggtgattactgagtgatttctggattagcctttcacacttgagggttcactgagcact

SEQ ID NO: 4417 - DNA, 122 bp, Homo sapiens
  misc_feature (61)..(62): /note="This region represents a CpG dinucleotide"
  misc_feature (61)..(61): /note="Nucleotide may be methylated to form 5-methylcytosine"
attgaggctggacttgggaggggtttaccccctcaatatcacaaaacccccaagtcccagcggagccggagcaggaagtggagaaaggcctggggccatcatgcgcagctgcaggctggcag

SEQ ID NO: 4418 - DNA, 122 bp, Homo sapiens
  misc_feature (61)..(62): /note="This region represents a CpG dinucleotide"
  misc_feature (61)..(61): /note="Nucleotide may be methylated to form 5-methylcytosine"
tctgaaggacacagagtgctctaagaaagggacgatggggcagatccatgttcacaaacacgcccatgtgaattcactctcagatgtctcctcgtgtcagcacgctgggtgccagcacgctc

SEQ ID NO: 4419 - DNA, 122 bp, Homo sapiens
  misc_feature (61)..(62): /note="This region represents a CpG dinucleotide"
  misc_feature (61)..(61): /note="Nucleotide may be methylated to form 5-methylcytosine"
cacagggtctgttagcttaaggcaattgattcttcccctgattttggcactgcactagaacggctctcaatccaaaatcaaggagagaagaaagagagaactgaaaagacaagaagggaggg

SEQ ID NO: 4420 - DNA, 122 bp, Homo sapiens
  misc_feature (61)..(62): /note="This region represents a CpG dinucleotide"
  misc_feature (61)..(61): /note="Nucleotide may be methylated to form 5-methylcytosine"
aggaattcctccctgcaaaatagctttaaggggcatctggaaacatccagctaggctttacgttgtcctggtgaaggtcaaagttgcacactaggtacagcagagaccttcccactgacagg

SEQ ID NO: 4421 - DNA, 122 bp, Homo sapiens
  misc_feature (61)..(62): /note="This region represents a CpG dinucleotide"
  misc_feature (61)..(61): /note="Nucleotide may be methylated to form 5-methylcytosine"
ctcacccttccctcttggcggtgttgcgggaagggaggagcaactcttcctcaacatcctcgaagctcagtgtctggcattgtaaggccagtggttttcaaacctctgggctcagaaccttt

SEQ ID NO: 4422 - DNA, 122 bp, Homo sapiens
  misc_feature (61)..(62): /note="This region represents a CpG dinucleotide"
  misc_feature (61)..(61): /note="Nucleotide may be methylated to form 5-methylcytosine"
aactgtggcttcccctattttaataatgcattgtaacaattgttaacagtgattaagtttcgcaaaagcacgtgctgaatcagttaagaaaaacttaggatgcaagctgaacaagagactcc

SEQ ID NO: 4423 - DNA, 122 bp, Homo sapiens
  misc_feature (61)..(62): /note="This region represents a CpG dinucleotide"
  misc_feature (61)..(61): /note="Nucleotide may be methylated to form 5-methylcytosine"
acgcaggagcaaacgggtgggtgtgctggtggcgaggtgggtaggggttggtacagggtccgggacaataaattaagcatttgggccacaatgggccaaggtgaggcaccacaggtgggagg

SEQ ID NO: 4424 - DNA, 122 bp, Homo sapiens
  misc_feature (61)..(62): /note="This region represents a CpG dinucleotide"
  misc_feature (61)..(61): /note="Nucleotide may be methylated to form 5-methylcytosine"
gtggaagtagcatataaactttttaaaaggctcaagcccttacctgcagtcacttatatgcgcgtcccacatgctgtgacagctatcttacaagtgcaaaaaatccagaatgtgtgggtatg

SEQ ID NO: 4425 - DNA, 122 bp, Homo sapiens
  misc_feature (61)..(62): /note="This region represents a CpG dinucleotide"
  misc_feature (61)..(61): /note="Nucleotide may be methylated to form 5-methylcytosine"
taggagtcatgcagttggaggctacaagattctgaccgcccctaaactgctcctaagacccgtgcttcagaaacattgcagaccctgccttgatggatcagctggcaccacccagatagata

SEQ ID NO: 4426 - DNA, 122 bp, Homo sapiens
  misc_feature (61)..(62): /note="This region represents a CpG dinucleotide"
  misc_feature (61)..(61): /note="Nucleotide may be methylated to form 5-methylcytosine"
ggccgtgaactgaatggtggcgctggcctgtgcccagtatatctggtatgaccctggggtcgtgtgggggagccggcatgggcagtggaggtgcttatgggacctgcagtaggacacagtcg

SEQ ID NO: 4427 - DNA, 122 bp, Homo sapiens
  misc_feature (61)..(62): /note="This region represents a CpG dinucleotide"
  misc_feature (61)..(61): /note="Nucleotide may be methylated to form 5-methylcytosine"
atttccctatcttacaattctgcaaggtcggtactttaattcccatttcacaaatgaggacgctgaagcttaggggagtgaagtaatttgcccaagttcacaaaaccagtcaaattggaagt

SEQ ID NO: 4428 - DNA, 122 bp, Homo sapiens
  misc_feature (61)..(62): /note="This region represents a CpG dinucleotide"
  misc_feature (61)..(61): /note="Nucleotide may be methylated to form 5-methylcytosine"
caggtagataattcagccaatattccttcctattttcttcaactttcttgtccaaggacacgttgcaattaagtggagatgaaagagcaggaatacagacttgtcatacccagttgcatgat

SEQ ID NO: 4429 - DNA, 122 bp, Homo sapiens
  misc_feature (61)..(62): /note="This region represents a CpG dinucleotide"
  misc_feature (61)..(61): /note="Nucleotide may be methylated to form 5-methylcytosine"
ttcatgaggggtgcatagctgcatagctccctcagcaacttgcctgcatcttgataatagcgatctcttcattctttcttgtgaatcccatgcaggatcctctcttagtcctctctgtctcc

SEQ ID NO: 4430 - DNA, 122 bp, Homo sapiens
  misc_feature (61)..(62): /note="This region represents a CpG dinucleotide"
  misc_feature (61)..(61): /note="Nucleotide may be methylated to form 5-methylcytosine"
aaccagagggggaaaaggtgctggctcttactccccgcattgcggggggtgcctcacccccgtgcgatgggggtcctaagagccagggggggaggcggctagctctaactcccctcatcgcg

SEQ ID NO: 4431 - DNA, 122 bp, Homo sapiens
  misc_feature (61)..(62): /note="This region represents a CpG dinucleotide"
  misc_feature (61)..(61): /note="Nucleotide may be methylated to form 5-methylcytosine"
tttatgaaagaataatttctgtctattgcctaatactgtgtatcatcactgtgcttgacacgtagttggtaatctctaagtatttgagaagcagtgagttaattaatatttgcttttttgac

SEQ ID NO: 4432 - DNA, 122 bp, Homo sapiens
  misc_feature (61)..(62): /note="This region represents a CpG dinucleotide"
  misc_feature (61)..(61): /note="Nucleotide may be methylated to form 5-methylcytosine"
ttatcccagcaccatttattgaatcaggaatcctttccccatggcttttgttaggcttgtcgaagatcagatagttgtaggtatgcagtcttatttctgggttctctattgtctgtttttgt

SEQ ID NO: 4433 - DNA, 122 bp, Homo sapiens
  misc_feature (61)..(62): /note="This region represents a CpG dinucleotide"
  misc_feature (61)..(61): /note="Nucleotide may be methylated to form 5-methylcytosine"
tcccgcccgccaagttcctgcgccacccaatcccctcgcggcccagactccctcggggcccgccccttcgcgcgtcattagcaattccgccatcttgaagtgactctgtcggggactacaaa

SEQ ID NO: 4434 - DNA, 122 bp, Homo sapiens
  misc_feature (61)..(62): /note="This region represents a CpG dinucleotide"
  misc_feature (61)..(61): /note="Nucleotide may be methylated to form 5-methylcytosine"
gttctccagtaaaaagactgcggaggcggacagggtgtggccgccatgggactccgcccccgctctggtgactcccataggttagagatggggcaccgacattgcccactccagcttgctaa

SEQ ID NO: 4435 - DNA, 122 bp, Homo sapiens
  misc_feature (61)..(62): /note="This region represents a CpG dinucleotide"
  misc_feature (61)..(61): /note="Nucleotide may be methylated to form 5-methylcytosine"
ccttgtctgtttaacttagttcagtgaaatttttgcttggacagtttggagaaaagaaaacggtaatttccctcagcagtgtttataaaatgcttttgggaaattatcattattgaacattt

SEQ ID NO: 4436 - DNA, 122 bp, Homo sapiens
  misc_feature (61)..(62): /note="This region represents a CpG dinucleotide"
  misc_feature (61)..(61): /note="Nucleotide may be methylated to form 5-methylcytosine"
agttgtcaaaacaaatacttcaccttcaagttaagatgtaaggttttgtgctgtttctggcgagctgctgaactggcaggaaaggaataaaccagaaacaataaatcagaagcaatttgctt

SEQ ID NO: 4437 - DNA, 122 bp, Homo sapiens
  misc_feature (61)..(62): /note="This region represents a CpG dinucleotide"
  misc_feature (61)..(61): /note="Nucleotide may be methylated to form 5-methylcytosine"
ctgaggttacctttctgttgctttaagtatctatatccttaccaaggagaaattcccaaacgaatccaaactaaggagatgtctttttttctgttgagaatatgtttcttagtgatgaagct

SEQ ID NO: 4438 - DNA, 122 bp, Homo sapiens
  misc_feature (61)..(62): /note="This region represents a CpG dinucleotide"
  misc_feature (61)..(61): /note="Nucleotide may be methylated to form 5-methylcytosine"
ttaatttgtgaagtgcaaaaatactaatttttctcgcgttgtcgttttttctgggcttgccgaggcccctccccctcctgcctcgcttcccatccccctttcctctgcgcccttcccctccc

SEQ ID NO: 4439 - DNA, 122 bp, Homo sapiens
  misc_feature (61)..(62): /note="This region represents a CpG dinucleotide"
  misc_feature (61)..(61): /note="Nucleotide may be methylated to form 5-methylcytosine"
tgagtgcctcatgtttcctaagggctctgcctatccacgcgtgttggacgtgtgcctgtacgttaagtgcaggaagtgccagcctcagtgtgaacgaggttaggccccagcctggcattctc

SEQ ID NO: 4440 - DNA, 122 bp, Homo sapiens
  misc_feature (61)..(62): /note="This region represents a CpG dinucleotide"
  misc_feature (61)..(61): /note="Nucleotide may be methylated to form 5-methylcytosine"
ttagctgtaaggaaagctgatcctatgacacatgctttaggtatgtccgcccctgggaaacgtgaccttcaaggtttgcgttatagaactttattcgcttcaaaagatggagaacacttttg

SEQ ID NO: 4441 - DNA, 122 bp, Homo sapiens
  misc_feature (61)..(62): /note="This region represents a CpG dinucleotide"
  misc_feature (61)..(61): /note="Nucleotide may be methylated to form 5-methylcytosine"
atctcccccaccccacccgccacagccccacagccctgtcggtctagcagggtgagtagccgcactgtctctgaacccttacgcctggactttgaagggggaacagattcttgcttactgag

SEQ ID NO: 4442 - DNA, 122 bp, Homo sapiens
  misc_feature (61)..(62): /note="This region represents a CpG dinucleotide"
  misc_feature (61)..(61): /note="Nucleotide may be methylated to form 5-methylcytosine"
gagtgtttagtcatattcctcaacaatttcactaatgacctgcacctgacttgaaaggctcggttctctaaaccagcttcatcttcccgttatcaagcctcagttcccaacatttgcaatgc

SEQ ID NO: 4443 - DNA, 122 bp, Homo sapiens
  misc_feature (61)..(62): /note="This region represents a CpG dinucleotide"
  misc_feature (61)..(61): /note="Nucleotide may be methylated to form 5-methylcytosine"
agcactttggggtattcaaaaataaatcacaactgaaaaattagagcctctcatccaagacgtcacaaaccaatggaattttaaaatgtagactgattgttgctacaggaaaggagttttga

SEQ ID NO: 4444 - DNA, 122 bp, Homo sapiens
  misc_feature (61)..(62): /note="This region represents a CpG dinucleotide"
  misc_feature (61)..(61): /note="Nucleotide may be methylated to form 5-methylcytosine"
ccaagcctggtccagcctatagtttccccagagctctttgtggcctcctcagtggccacccggctcagacgtggtgttgactgccccacaagcttgacattgtggtctttacccacccactc

SEQ ID NO: 4445 - DNA, 122 bp, Homo sapiens
  misc_feature (61)..(62): /note="This region represents a CpG dinucleotide"
  misc_feature (61)..(61): /note="Nucleotide may be methylated to form 5-methylcytosine"
tgactaatattctcaagctggccaagtacttttttgcagattcaaagtttcaacagcctccggaaggaaaggaacgtgcagctgaagtctctttccagcccttcctgttcttaccagagtcc

SEQ ID NO: 4446 - DNA, 122 bp, Homo sapiens
  misc_feature (61)..(62): /note="This region represents a CpG dinucleotide"
  misc_feature (61)..(61): /note="Nucleotide may be methylated to form 5-methylcytosine"
attgagattttcccccactagagggcgataaaaactaacaacaagctatctgtgaaaacgcgttgtgatggaaagcattttccacgctccactatggaaaagtatggagattcctcaaagaa

SEQ ID NO: 4447 - DNA, 122 bp, Homo sapiens
  misc_feature (61)..(62): /note="This region represents a CpG dinucleotide"
  misc_feature (61)..(61): /note="Nucleotide may be methylated to form 5-methylcytosine"
gctgagaaatgcattgttagatgatttcatcatcttgcaaaagtgtattatgaaagagaacggcaatgatttttcctattcacactggccactagttgcatgagagcgggccctctaattag

SEQ ID NO: 4448 - DNA, 122 bp, Homo sapiens
  misc_feature (61)..(62): /note="This region represents a CpG dinucleotide"
  misc_feature (61)..(61): /note="Nucleotide may be methylated to form 5-methylcytosine"
aatgttattagaataatactttttctatgaataatgtacaaacatacttccgagatattgcggggtcggttccagaccaataaagcctgtcacacgatttttttggtttcccagtgcatata

SEQ ID NO: 4449 - DNA, 122 bp, Homo sapiens
  misc_feature (61)..(62): /note="This region represents a CpG dinucleotide"
  misc_feature (61)..(61): /note="Nucleotide may be methylated to form 5-methylcytosine"
aatgcagcagaaggaaagccggtttcctgttttaaaatccgacactagttctggctctgccgctggctccttctgtgtcctgagtgagcctcaacatcttcatctggaaaatgggtcctgcc

SEQ ID NO: 4450 - DNA, 122 bp, Homo sapiens
  misc_feature (61)..(62): /note="This region represents a CpG dinucleotide"
  misc_feature (61)..(61): /note="Nucleotide may be methylated to form 5-methylcytosine"
acactgaaataggcccatgtgcaccactgctcccgcaggagtttatgtctaggccaagtacgtgctgtttattgacagagaaacaaataccgctcagcacctgtccggtttcagagtgatga

SEQ ID NO: 4451 - DNA, 122 bp, Homo sapiens
  misc_feature (61)..(62): /note="This region represents a CpG dinucleotide"
  misc_feature (61)..(61): /note="Nucleotide may be methylated to form 5-methylcytosine"
cttagaaaggcagctttccaggagagaaggcacgggcattcggctcctgctggggaggggcgaggtaacccgacatcaggtccacaggtccacagaaactgaaatttcttccaagatgaggc

SEQ ID NO: 4452 - DNA, 122 bp, Homo sapiens
  misc_feature (61)..(62): /note="This region represents a CpG dinucleotide"
  misc_feature (61)..(61): /note="Nucleotide may be methylated to form 5-methylcytosine"
tggaattctgccattccaactcttgagttttccgtatagccataataaatggcaagttctcgtactctggtatttcctcataatggcgtatattttcatactccggtgcacagaggcttgta

SEQ ID NO: 4453 - DNA, 122 bp, Homo sapiens
  misc_feature (61)..(62): /note="This region represents a CpG dinucleotide"
  misc_feature (61)..(61): /note="Nucleotide may be methylated to form 5-methylcytosine"
ctaggtaatggtactgaactatgattgtggttatcttaaataggggcatgaaactataatcgtgtctgtgacaaagaaggaatgttatagtcagagagacggtataaaaagatttgctgaaa

SEQ ID NO: 4454 - DNA, 122 bp, Homo sapiens
  misc_feature (61)..(62): /note="This region represents a CpG dinucleotide"
  misc_feature (61)..(61): /note="Nucleotide may be methylated to form 5-methylcytosine"
gaatttttctagccattcatgtgcacacagaaaccaaaaccctccgcgcaggttcttctgcgcactgcgctgctcccagcgcagaggggccgtgttccgggaacacgtttcctgctctaaaa

SEQ ID NO: 4455 - DNA, 122 bp, Homo sapiens
  misc_feature (61)..(62): /note="This region represents a CpG dinucleotide"
  misc_feature (61)..(61): /note="Nucleotide may be methylated to form 5-methylcytosine"
gcatcatcagtgggaaagtaagctctctgaggaccaggtctgactgagagatccccacagcgtaatagataatacattttgtgtctcagcgttgcctatgaaacgccatttattcacttggc

SEQ ID NO: 4456 - DNA, 122 bp, Homo sapiens
  misc_feature (61)..(62): /note="This region represents a CpG dinucleotide"
  misc_feature (61)..(61): /note="Nucleotide may be methylated to form 5-methylcytosine"
taagtcaagccatatatggtcatgattatttgttggacacacactaagcatgtgggactgcgtttatcattagggagataccatggctgtccttatttacttcttcaatctcatctcatagc

SEQ ID NO: 4457 - DNA, 122 bp, Homo sapiens
  misc_feature (61)..(62): /note="This region represents a CpG dinucleotide"
  misc_feature (61)..(61): /note="Nucleotide may be methylated to form 5-methylcytosine"
ctgcctagagtctctcactttaaaccaagccccaggctctgttgctcatgctgaggtgggcggactgcttgagcccaggagttcaagaccaacctgcgcaacagggcaaaaccccatctcta

SEQ ID NO: 4458 - DNA, 122 bp, Homo sapiens
  misc_feature (61)..(62): /note="This region represents a CpG dinucleotide"
  misc_feature (61)..(61): /note="Nucleotide may be methylated to form 5-methylcytosine"
gaaaacattatgctaagtgaaatcagctagacaaattccactggtatgaaattccacttacgtaaaagacacaatatggtttataggttaccagaggattgggggaggggaaatgggagtta

SEQ ID NO: 4459 - DNA, 122 bp, Homo sapiens
  misc_feature (61)..(62): /note="This region represents a CpG dinucleotide"
  misc_feature (61)..(61): /note="Nucleotide may be methylated to form 5-methylcytosine"
cgaaagggcaggttggagcagagtggaggcaaagtgtttcctcatgagttaaggacaggacgtggattgctctggggaagctatgtcaaccaaacctaccatgtccagacagttcttatgta

SEQ ID NO: 4460 - DNA, 122 bp, Homo sapiens
  misc_feature (61)..(62): /note="This region represents a CpG dinucleotide"
  misc_feature (61)..(61): /note="Nucleotide may be methylated to form 5-methylcytosine"
ggagtgaagcgtagagagagaagctttaatgtggataggaaagtctgaagtgagatataccgtccagttactctgggactcgttgagatcctgcaacaggagacagggagcctgagtaactg

SEQ ID NO: 4461 - DNA, 122 bp, Homo sapiens
  misc_feature (61)..(62): /note="This region represents a CpG dinucleotide"
  misc_feature (61)..(61): /note="Nucleotide may be methylated to form 5-methylcytosine"
tctttctttttttttttttgagacagagtctccctctggcgccaggcaggcgtgcagtggcgcgatctcggctcactgcaacctccgcctcccgggttcaagccattctcctgcctcagcct

SEQ ID NO: 4462 - DNA, 122 bp, Homo sapiens
  misc_feature (61)..(62): /note="This region represents a CpG dinucleotide"
  misc_feature (61)..(61): /note="Nucleotide may be methylated to form 5-methylcytosine"
caaacctgtagacatgtccctcggctcagaattcattaaagagcagtggttctgctgacacgggccgccccccgggatgcagcggccagtctcagaatgagagggatggctccgtctccacc

SEQ ID NO: 4463 - DNA, 122 bp, Homo sapiens
  misc_feature (61)..(62): /note="This region represents a CpG dinucleotide"
  misc_feature (61)..(61): /note="Nucleotide may be methylated to form 5-methylcytosine"
gaaaaactaagtgaagaaagtgaaggaggaggatagggcatctgtggggaaggcaggggacggctcaatctatggattcaggaagggtgtggtctgcgtgctcccagtgtgagtgtgggtgt

SEQ ID NO: 4464 - DNA, 122 bp, Homo sapiens
  misc_feature (61)..(62): /note="This region represents a CpG dinucleotide"
  misc_feature (61)..(61): /note="Nucleotide may be methylated to form 5-methylcytosine"
gccacagagcggcagccagaggcatgtgggcagtgcagcctccacaccaggcagagggcccggccagcatggctccaccctgggaagctgcctgccactgggatcagatgggagcaccaggg

SEQ ID NO: 4465 - DNA, 122 bp, Homo sapiens
  misc_feature (61)..(62): /note="This region represents a CpG dinucleotide"
  misc_feature (61)..(61): /note="Nucleotide may be methylated to form 5-methylcytosine"
agttgcagagcctgccctccgcctgccaccgttgctgtggggagcgcactctctgtcgagcgctgctgtagcagacccaccaaatcccatgtaagtggtcagagcacaaatgaggttgtcgg

SEQ ID NO: 4466 - DNA, 122 bp, Homo sapiens
  misc_feature (61)..(62): /note="This region represents a CpG dinucleotide"
  misc_feature (61)..(61): /note="Nucleotide may be methylated to form 5-methylcytosine"
cctgtgttgccatgggacacatttccaggaaggctattaacagtgggtgatttaaatgagcgagagacagaggcacatggctttttaagctgacagggttaacatttcccctcttgactaca

SEQ ID NO: 4467 - DNA, 122 bp, Homo sapiens
  misc_feature (61)..(62): /note="This region represents a CpG dinucleotide"
  misc_feature (61)..(61): /note="Nucleotide may be methylated to form 5-methylcytosine"
atgcactgatttgttctacatgaagccagcctgtactgcattccagtttattttctggagcgtaattagtaatgatgatgattcgttaggtaaagagaaggaaatttatgaggctatggagt

SEQ ID NO: 4468 - DNA, 122 bp, Homo sapiens
  misc_feature (61)..(62): /note="This region represents a CpG dinucleotide"
  misc_feature (61)..(61): /note="Nucleotide may be methylated to form 5-methylcytosine"
tttacagtacatttcctgggatataatggagaatcattgtgagtcattaaaattaagcaacgtgtgtctaagcagcctgcatcaggcttcactacagagtcaggtttcattgttaggttcac

SEQ ID NO: 4469 - DNA, 122 bp, Homo sapiens
  misc_feature (61)..(62): /note="This region represents a CpG dinucleotide"
  misc_feature (61)..(61): /note="Nucleotide may be methylated to form 5-methylcytosine"
agggagatcaggtgatgctcaacagagctgtgcagcagaggtggacacacacagcaagcacgcagttgactcaatcatagtcactgcttgggagggccataggtgctgtccacatcagctct

SEQ ID NO: 4470 - DNA, 122 bp, Homo sapiens
  misc_feature (61)..(62): /note="This region represents a CpG dinucleotide"
  misc_feature (61)..(61): /note="Nucleotide may be methylated to form 5-methylcytosine"
ggagcagcaggtgctaatgaaatcctctctctggggttccagcctttggattatgagactcgcccagcgcaaagcctcatcattgtcgtggagaatgaggagaggctcgtcttctgtgagag

SEQ ID NO: 4471 - DNA, 122 bp, Homo sapiens
  misc_feature (61)..(62): /note="This region represents a CpG dinucleotide"
  misc_feature (61)..(61): /note="Nucleotide may be methylated to form 5-methylcytosine"
ctcaggtgttccgccccccttggcctcccaaagtgctgggattacaggcatgagtcaccgcgcccagcctgtttttaaaaatgttgttgatgtcctggattcttatggagataagcacttag

SEQ ID NO: 4472 - DNA, 122 bp, Homo sapiens
  misc_feature (61)..(62): /note="This region represents a CpG dinucleotide"
  misc_feature (61)..(61): /note="Nucleotide may be methylated to form 5-methylcytosine"
atgagccaccgtgcctggccataatttgctattgagcactaacttcaacttggagtttcccgtttgtgttgtcaataacagtttttcacaaaaactttttttgaacttcatgttttctcaaa

SEQ ID NO: 4473 - DNA, 122 bp, Homo sapiens
  misc_feature (61)..(62): /note="This region represents a CpG dinucleotide"
  misc_feature (61)..(61): /note="Nucleotide may be methylated to form 5-methylcytosine"
tgagtgaggcctatctgggcactgatgccatgaagccaactgatgagtcaacttcctcatcgcaccctggagaagcagctcctgtggatcacaggctgagaagagacccaggacctggccac

SEQ ID NO: 4474 - DNA, 122 bp, Homo sapiens
  misc_feature (61)..(62): /note="This region represents a CpG dinucleotide"
  misc_feature (61)..(61): /note="Nucleotide may be methylated to form 5-methylcytosine"
gtcaagcgatcctcccaccttggcctcctaagatgattacaggccataagccactgcgcccggcccaagcagttctgaataatgatgaaatgggctcagttgagagaagctgaagattaact

SEQ ID NO: 4475 - DNA, 122 bp, Homo sapiens
  misc_feature (61)..(62): /note="This region represents a CpG dinucleotide"
  misc_feature (61)..(61): /note="Nucleotide may be methylated to form 5-methylcytosine"
gattcagaaaataatcagtgctaagcattccctttatgtttatatgatcatcataggtaacgatccagaaaataatcagtgctaagcattccctttacctgtatatgatcattgcaggtaac

SEQ ID NO: 4476 - DNA, 122 bp, Homo sapiens
  misc_feature (61)..(62): /note="This region represents a CpG dinucleotide"
  misc_feature (61)..(61): /note="Nucleotide may be methylated to form 5-methylcytosine"
agctgttacttattcaactctattgcagcaagtatgaggcaatgtgttctcatgacaagacggctgggaatctagagaaatgcaaaaccaaggaatatcatttagtgtaaaaccaccataac

SEQ ID NO: 4477 - DNA, 122 bp, Homo sapiens
  misc_feature (61)..(62): /note="This region represents a CpG dinucleotide"
  misc_feature (61)..(61): /note="Nucleotide may be methylated to form 5-methylcytosine"
cctgatcagggaacctgggttctataactgcttctactactgatttgtcctgtgacttcgcgcaccaaatttaggcttgtaaattaaactcccagatttctgttttccattttgcagctcta

SEQ ID NO: 4478 - DNA, 122 bp, Homo sapiens
  misc_feature (61)..(62): /note="This region represents a CpG dinucleotide"
  misc_feature (61)..(61): /note="Nucleotide may be methylated to form 5-methylcytosine"
aaccaaatcttgattttcacctctccaagtgaaatatcaccagtgaccggggtacctattcgttgcatgtgaattattaacattttatttcttaaaacgccatggcttgaagctccgcttta

SEQ ID NO: 4479 - DNA, 122 bp, Homo sapiens
  misc_feature (61)..(62): /note="This region represents a CpG dinucleotide"
  misc_feature (61)..(61): /note="Nucleotide may be methylated to form 5-methylcytosine"
acctgatggtatacaggctgttctgcggcaaccaggttgggcaaatttctgctgacaggacgattcgtagattgattcagagttcactgaacttccagggctggcccagtgtcctcactgtg

SEQ ID NO: 4480 - DNA, 122 bp, Homo sapiens
  misc_feature (61)..(62): /note="This region represents a CpG dinucleotide"
  misc_feature (61)..(61): /note="Nucleotide may be methylated to form 5-methylcytosine"
tttgggcaaagaggcatgtctgaatcatcattgaatcctcagaccttcctgaagacatgccgcatggcaacacgcccagaatttgtttgttgactgtagaaggagattcttgagtatggaat

SEQ ID NO: 4481 - DNA, 122 bp, Homo sapiens
  misc_feature (61)..(62): /note="This region represents a CpG dinucleotide"
  misc_feature (61)..(61): /note="Nucleotide may be methylated to form 5-methylcytosine"
tcatgtaatcttgaacaagcccaggtactctggctttaattgccttgtgagtaaaatagacgatggtactaagtgattatttaaaatcctttccaattgtagaagtccaaggttgtgtgaaa

SEQ ID NO: 4482 - DNA, 122 bp, Homo sapiens
  misc_feature (61)..(62): /note="This region represents a CpG dinucleotide"
  misc_feature (61)..(61): /note="Nucleotide may be methylated to form 5-methylcytosine"
tgtttagtcattgtgtgttcttaggctcctcttggctgtactagtttcttagaatttcctcgtttttgattgtctggacatgatgatcttgacagttttgaggaaaagtggtcaggtatttt

SEQ ID NO: 4483 - DNA, 122 bp, Homo sapiens
  misc_feature (61)..(62): /note="This region represents a CpG dinucleotide"
  misc_feature (61)..(61): /note="Nucleotide may be methylated to form 5-methylcytosine"
gaaacaggaactgctttgtgcattaaaacagactcataggctcttagcagctgcatcagtcgtttctaggactcctcatgagagggctctttgagcccagtggctgattatggtcccaacag

SEQ ID NO: 4484 - DNA, 122 bp, Homo sapiens
  misc_feature (61)..(62): /note="This region represents a CpG dinucleotide"
  misc_feature (61)..(61): /note="Nucleotide may be methylated to form 5-methylcytosine"
aacaagagtcaattctccatatataaatactcggcccctgttttagctgtgtcttaattgcgcaacatctgtttactctgtgttttaacatctgtgtggatagcattgttgttgtaatattt

SEQ ID NO: 4485 - DNA, 122 bp, Homo sapiens
  misc_feature (61)..(62): /note="This region represents a CpG dinucleotide"
  misc_feature (61)..(61): /note="Nucleotide may be methylated to form 5-methylcytosine"
tctgctctccgaccatggacctggtcccagcctctactggctgtgttgcaatgtagtgatcgtgaataagaggtgcagtcaggaagagtcatcttcgctagtgcacaaacaaaagtgtctgt

SEQ ID NO: 4486 - DNA, 122 bp, Homo sapiens
  misc_feature (61)..(62): /note="This region represents a CpG dinucleotide"
  misc_feature (61)..(61): /note="Nucleotide may be methylated to form 5-methylcytosine"
ttctctgctgtgtgcaatatgaagaaaatccttagagatgacctcacaaatttcctgtttcgtagccagacatctgtaaagatggaaatagtcataaaaagagtggtgttagattaggtcat

SEQ ID NO: 4487 - DNA, 122 bp, Homo sapiens
  misc_feature (61)..(62): /note="This region represents a CpG dinucleotide"
  misc_feature (61)..(61): /note="Nucleotide may be methylated to form 5-methylcytosine"
gatactagtgtaggaaaatctaagatggcatcactatttctgcactcttcacttgaagcacgctgaatagctccactggttacagcatgtctaattaagatcccccgactctgtgtaagctc

SEQ ID NO: 4488 - DNA, 122 bp, Homo sapiens
  misc_feature (61)..(62): /note="This region represents a CpG dinucleotide"
  misc_feature (61)..(61): /note="Nucleotide may be methylated to form 5-methylcytosine"
tgtaaaatggagacagaaaaactcagtttctcgtgagggtaagatgaaattatgtatggacgtgcttagaatagtgccaagcatgtaggaaactctttgaagtgttagctagtattctcact

SEQ ID NO: 4489 - DNA, 122 bp, Homo sapiens
  misc_feature (61)..(62): /note="This region represents a CpG dinucleotide"
  misc_feature (61)..(61): /note="Nucleotide may be methylated to form 5-methylcytosine"
tgtgcatccctggggatccctaagacccatttagggagtccatgtggctaagactactttcgtaatgacacaaagatgttatctggctttttcactctcattctttcacaagtatacagtgg

SEQ ID NO: 4490 - DNA, 122 bp, Homo sapiens
  misc_feature (61)..(62): /note="This region represents a CpG dinucleotide"
  misc_feature (61)..(61): /note="Nucleotide may be methylated to form 5-methylcytosine"
caggttttcactggctgttggctggagatgccagttatttgccacatgagcctctgtctacggcagttgacaacatgcagctggcctacctcagagcaagcaaccaagcaagagagcaagat

SEQ ID NO: 4491 - DNA, 122 bp, Homo sapiens
  misc_feature (61)..(62): /note="This region represents a CpG dinucleotide"
  misc_feature (61)..(61): /note="Nucleotide may be methylated to form 5-methylcytosine"
atgatgccagagagagattactgtgaacaaagcaacaggatgtgaaataactggtgttttcgaaacaatgagacaaatttagggtggccggcatgaggcaaccaagagtggaatgggtgtgg

SEQ ID NO: 4492 - DNA, 122 bp, Homo sapiens
  misc_feature (61)..(62): /note="This region represents a CpG dinucleotide"
  misc_feature (61)..(61): /note="Nucleotide may be methylated to form 5-methylcytosine"
atatctctgactaacatttgggctagtcatgaagagaagaaaaggaagtgacaaagaagacgctctggaataaaccctaggaagtatgtgcctggctgggtgatctagtaaaacagcctggg

SEQ ID NO: 4493 - DNA, 122 bp, Homo sapiens
  misc_feature (61)..(62): /note="This region represents a CpG dinucleotide"
  misc_feature (61)..(61): /note="Nucleotide may be methylated to form 5-methylcytosine"
gctggggttctctgggaaagcttcagaggaagcagcatgggaactgagtcttttcactgccgagatcgcgccactgcactctagcctgggtgacagagcaagactccgcctcaaaaaaaaaa

SEQ ID NO: 4494 - DNA, 122 bp, Homo sapiens
  misc_feature (61)..(62): /note="This region represents a CpG dinucleotide"
  misc_feature (61)..(61): /note="Nucleotide may be methylated to form 5-methylcytosine"
cacttgggaagctccggggcatgtgaaggagctgcaaacatgagaactaatgaaccaaggcggctgccaccaggaaggaacagaacgcaggcattcaaccatgacgtctgcacagtgttagt

SEQ ID NO: 4495 - DNA, 122 bp, Homo sapiens
  misc_feature (61)..(62): /note="This region represents a CpG dinucleotide"
  misc_feature (61)..(61): /note="Nucleotide may be methylated to form 5-methylcytosine"
cacacactctttgtaatactaatgcctgggtaggcagccagctctactgctcgagtaagccgtctgatcttgggaatttacttgccctctgtgtgactcagttttctcatctggaaaaggga

SEQ ID NO: 4496 - DNA, 122 bp, Homo sapiens
  misc_feature (61)..(62): /note="This region represents a CpG dinucleotide"
  misc_feature (61)..(61): /note="Nucleotide may be methylated to form 5-methylcytosine"
tgacttcggcgccccgcgagttgggtgtgtgcggttgggggcggcccagagtgtgccccacgcctgccagtcgggtaggccagcctccctggagagaggggggcctccccaaggtgggacgg

SEQ ID NO: 4497 - DNA, 122 bp, Homo sapiens
  misc_feature (61)..(62): /note="This region represents a CpG dinucleotide"
  misc_feature (61)..(61): /note="Nucleotide may be methylated to form 5-methylcytosine"
gcttgatatatgaacagtgttcacttgcccaacataaacatcaattataacatgaaaatgcgatggtccttcaacccttcattcactcatccaggttaaatgcagaatttggaaagaaacca

SEQ ID NO: 4498 - DNA, 122 bp, Homo sapiens
  misc_feature (61)..(62): /note="This region represents a CpG dinucleotide"
  misc_feature (61)..(61): /note="Nucleotide may be methylated to form 5-methylcytosine"
tacaggcgtgagccactgtgcctggctgcgagcagatgaggttcttcatttctaatgacacgccatgaatcatccaaccacagttacagcaacctgccccatgtcggtcacagagctgaagt

SEQ ID NO: 4499 - DNA, 122 bp, Homo sapiens
  misc_feature (61)..(62): /note="This region represents a CpG dinucleotide"
  misc_feature (61)..(61): /note="Nucleotide may be methylated to form 5-methylcytosine"
ctcaaagggaaaatggggtttgcacatggactttcggctccattcatgaaagcatagatacgtgtgattataacaaggatatgagcttggatgcagcaggctgttaaacaccatgccaggag

SEQ ID NO: 4500 - DNA, 122 bp, Homo sapiens
  misc_feature (61)..(62): /note="This region represents a CpG dinucleotide"
  misc_feature (61)..(61): /note="Nucleotide may be methylated to form 5-methylcytosine"
ttatttttggttttgttttttacatgatgtggggaggtgttggcttccggagttaaagtccgtagtgctgaattagagggaggaatatggagaaaaatgttttcaacacaatggaactttca

SEQ ID NO: 4501 - DNA, 122 bp, Homo sapiens
  misc_feature (61)..(62): /note="This region represents a CpG dinucleotide"
  misc_feature (61)..(61): /note="Nucleotide may be methylated to form 5-methylcytosine"
ggaaaagctgggggcagtgggggtggggagcggtgcaggtggtgatggcctgccctttgccgcaaaatggagggagtggcatgaggtctggccaagaacaataaggccactcaggggttggg

SEQ ID NO: 4502 - DNA, 122 bp, Homo sapiens
  misc_feature (61)..(62): /note="This region represents a CpG dinucleotide"
  misc_feature (61)..(61): /note="Nucleotide may be methylated to form 5-methylcytosine"
tattgcaacccagccagttgtgcatgtgcttgggtgagtgttgacatgccagtcccctgtcgccttggccccctctggacattgggcaccaatgagcatgggagggaagctgagggtaagct

SEQ ID NO: 4503 - DNA, 122 bp, Homo sapiens
  misc_feature (61)..(62): /note="This region represents a CpG dinucleotide"
  misc_feature (61)..(61): /note="Nucleotide may be methylated to form 5-methylcytosine"
agctgggaccacaggcacgcaccaccacgcccagctaatttttgtattttactgtggagacggtttctcaccatgttgcccaggctcatgtgactaatttctgattcagacacagggtgagt

SEQ ID NO: 4504 - DNA, 122 bp, Homo sapiens
  misc_feature (61)..(62): /note="This region represents a CpG dinucleotide"
  misc_feature (61)..(61): /note="Nucleotide may be methylated to form 5-methylcytosine"
cagggacaggcccggactgacatttctggaaaacccagtgtgtgcaaggttaggttaccacggtccataccaatgaggaaattaggctgtagagagaagtaacttgtctaaggcaccgcagt

SEQ ID NO: 4505 - DNA, 122 bp, Homo sapiens
  misc_feature (61)..(62): /note="This region represents a CpG dinucleotide"
  misc_feature (61)..(61): /note="Nucleotide may be methylated to form 5-methylcytosine"
aggctgctgacatctgtttcctttaagaaacttgtaaaaaaatcctcatgcagatgcgcacggttgcttggctatgagcaaagcagcatgccgttcctgaccatccatgggcccctcctaac

SEQ ID NO: 4506 - DNA, 122 bp, Homo sapiens
  misc_feature (61)..(62): /note="This region represents a CpG dinucleotide"
  misc_feature (61)..(61): /note="Nucleotide may be methylated to form 5-methylcytosine"
ctcccggctctgcctcaccctgagcaggtcccggaaggggatagataggaagccgtcggacgtctgggcctgagggtcctgggctgcagctgaggccactccccatctgcggttctatttgc

SEQ ID NO: 4507 - DNA, 122 bp, Homo sapiens
  misc_feature (61)..(62): /note="This region represents a CpG dinucleotide"
  misc_feature (61)..(61): /note="Nucleotide may be methylated to form 5-methylcytosine"
cgggacgcctcacagcaggagaaccccagctgccatcatgcgctgtggcctgaggtggggcggggccagggaccgccaggacagcccgacccgccccccacagtgggggtaggagccctgcc

SEQ ID NO: 4508 - DNA, 122 bp, Homo sapiens
  misc_feature (61)..(62): /note="This region represents a CpG dinucleotide"
  misc_feature (61)..(61): /note="Nucleotide may be methylated to form 5-methylcytosine"
gttaacactgccctggagctcattgagcatttcctgggttcggcaggcaggaagcaccagcgtgttctggatgaaaatagttcctgcctgctggctctccacagctaactcgcctttccaca

SEQ ID NO: 4509 - DNA, 122 bp, Homo sapiens
  misc_feature (61)..(62): /note="This region represents a CpG dinucleotide"
  misc_feature (61)..(61): /note="Nucleotide may be methylated to form 5-methylcytosine"
gattgataagaccacaaggaaggaaagaaatggaaagacaggaagaaacaaagaaagacacgcagaaagaaagaaacatagaaagtaagaaaaggaaataaagtcagaggtagttaagtact

SEQ ID NO: 4510 - DNA, 122 bp, Homo sapiens
  misc_feature (61)..(62): /note="This region represents a CpG dinucleotide"
  misc_feature (61)..(61): /note="Nucleotide may be methylated to form 5-methylcytosine"
cacaaactaggacctttacaccacattggaggcaatagccctgaggttaaagggccgttccgtgtctaaccactgaagctcttgcttgaaggaaggtttcccaaaatgaacccccaaagaaa

SEQ ID NO: 4511 - DNA, 122 bp, Homo sapiens
  misc_feature (61)..(62): /note="This region represents a CpG dinucleotide"
  misc_feature (61)..(61): /note="Nucleotide may be methylated to form 5-methylcytosine"
gtcactggtgaatcactgggagtaaaactaacacctatggagtaattgttcgttgctaggcgcctgtatgctcagatgtcatcacttttggtctgtgctccagccctgtgggatggttgtta

SEQ ID NO: 4512 - DNA, 122 bp, Homo sapiens
  misc_feature (61)..(62): /note="This region represents a CpG dinucleotide"
  misc_feature (61)..(61): /note="Nucleotide may be methylated to form 5-methylcytosine"
tttactgtaaaacagtattctgtgtcataccggcagtagcctcattcatctcatttttttcgattgcatcattttctcttgtgcttgatttaatctcatgctgttttgttcctcacggtccc

SEQ ID NO: 4513 - DNA, 122 bp, Homo sapiens
  misc_feature (61)..(62): /note="This region represents a CpG dinucleotide"
  misc_feature (61)..(61): /note="Nucleotide may be methylated to form 5-methylcytosine"
cacgccaccgcctttgagttggacacagatggcaacccctttgaccaggacatctacgggcgcgaggagctgcgcagccccaagctgttctacgccgaccaccccttcatcttcctagtgcg

SEQ ID NO: 4514 - DNA, 122 bp, Homo sapiens
  misc_feature (61)..(62): /note="This region represents a CpG dinucleotide"
  misc_feature (61)..(61): /note="Nucleotide may be methylated to form 5-methylcytosine"
tagggctgtcggcgtaaatcagggctcagacgggtctgctaggcaacaggctgggttcggcgcctgacaggaagactgtcagcgactttaggcgtgccttacatttagaaagcctcctgtcg

SEQ ID NO: 4515 - DNA, 122 bp, Homo sapiens
  misc_feature (61)..(62): /note="This region represents a CpG dinucleotide"
  misc_feature (61)..(61): /note="Nucleotide may be methylated to form 5-methylcytosine"
tagtagaagccttgggtagtgagttgagaacatggccattagaagatcacctgtcaataccgaataaatgatgatttctaagcttgttagaggaaaaaagcaaaacaaattgtcataggtct

SEQ ID NO: 4516 - DNA, 122 bp, Homo sapiens
  misc_feature (61)..(62): /note="This region represents a CpG dinucleotide"
  misc_feature (61)..(61): /note="Nucleotide may be methylated to form 5-methylcytosine"
cttaaagaccctaactccaagtacagtcatattcagagacactgggggttagggttccaacgtataaattttggggggacaaaattcaactcataagagttcccaggcctatgctctctagt

SEQ ID NO: 4517 - DNA, 122 bp, Homo sapiens
  misc_feature (61)..(62): /note="This region represents a CpG dinucleotide"
  misc_feature (61)..(61): /note="Nucleotide may be methylated to form 5-methylcytosine"
gtgctcagaaccaggagccggcggggacggagccacagagcagccgcttccccgtgtccgcgcccctgtactgtcttcacactcgccatcaccttgcacaccctgcggcaccacacgaccgc

SEQ ID NO: 4518 - DNA, 122 bp, Homo sapiens
  misc_feature (61)..(62): /note="This region represents a CpG dinucleotide"
  misc_feature (61)..(61): /note="Nucleotide may be methylated to form 5-methylcytosine"
ctcattcagcaaatttttatagagtgactactgaagaagaactgtgagagtataaacaagcgactaaaacgtttctgtttttcattacagtctagaagggcagaaaatatattcttgcttta

SEQ ID NO: 4519 - DNA, 122 bp, Homo sapiens
  misc_feature (61)..(62): /note="This region represents a CpG dinucleotide"
  misc_feature (61)..(61): /note="Nucleotide may be methylated to form 5-methylcytosine"
agtgaaaatgaactcagggcaagttttctaaataatctcactatagcgcacacacatgcacgcacacacactcacacacactcacactttttagtatactgaaggatattttgtaaagtgct

SEQ ID NO: 4520 - DNA, 122 bp, Homo sapiens
  misc_feature (61)..(62): /note="This region represents a CpG dinucleotide"
  misc_feature (61)..(61): /note="Nucleotide may be methylated to form 5-methylcytosine"
ttcccataccaatacaagattagtatgcttttgtcaatcattaaacttcctgtggccaggcgcagtggctcatgcctgtaatcccaacactttgggaggccaaggtgggtggatcactggag

SEQ ID NO: 4521 - DNA, 122 bp, Homo sapiens
  misc_feature (61)..(62): /note="This region represents a CpG dinucleotide"
  misc_feature (61)..(61): /note="Nucleotide may be methylated to form 5-methylcytosine"
gtgctgggattataggcataagccatcatgcctggcatgggaagtttaaacaatgaattacgatttccaaactgaatggcaaggatgttatcttagtctgtttgtgctgctataaaaaatac

SEQ ID NO: 4522 - DNA, 122 bp, Homo sapiens
  misc_feature (61)..(62): /note="This region represents a CpG dinucleotide"
  misc_feature (61)..(61): /note="Nucleotide may be methylated to form 5-methylcytosine"
aattagtaggtaatagatttttattataaaatggattataaaatatgaaatgaaaatgtacgtgggccatacaaaggggaaaatgaaatggcaaactccataagacaaagacagatgacaca

SEQ ID NO: 4523 - DNA, 122 bp, Homo sapiens
  misc_feature (61)..(62): /note="This region represents a CpG dinucleotide"
  misc_feature (61)..(61): /note="Nucleotide may be methylated to form 5-methylcytosine"
ctggttctgggccttcccagacaaaagccagagacccggagcctctttctgagaaggaaccgggcgtccccaagatttcctctagccgagtcccctgggtcccccgaggaccgggacagctc

SEQ ID NO: 4524 - DNA, 122 bp, Homo sapiens
  misc_feature (61)..(62): /note="This region represents a CpG dinucleotide"
  misc_feature (61)..(61): /note="Nucleotide may be methylated to form 5-methylcytosine"
aaggcaggaaactttattgaataatcttttctttggggtagagaagttgagaaaccaaagcgtatccaggtcagagaggagagagatccgaccggaagagaagagcacagagggcccaccat

SEQ ID NO: 4525 - DNA, 122 bp, Homo sapiens
  misc_feature (61)..(62): /note="This region represents a CpG dinucleotide"
  misc_feature (61)..(61): /note="Nucleotide may be methylated to form 5-methylcytosine"
aatccaaaatgagaacttatttcctgtgcaggatactatctagaacatagaagccaccaacgttctcctcatgccagcaaatgtcctgcccctctggctgctgcctctgcagtcttgcagag

SEQ ID NO: 4526 - DNA, 122 bp, Homo sapiens
  misc_feature (61)..(62): /note="This region represents a CpG dinucleotide"
  misc_feature (61)..(61): /note="Nucleotide may be methylated to form 5-methylcytosine"
cgcctcccccataatctggtatcttcttaggggagtcttctgcatcggaagtgccctccgcgctgtcccagagaagcagaaagtgatctgaattagcccttgtaataggttccatccagagc

SEQ ID NO: 4527 - DNA, 122 bp, Homo sapiens
  misc_feature (61)..(62): /note="This region represents a CpG dinucleotide"
  misc_feature (61)..(61): /note="Nucleotide may be methylated to form 5-methylcytosine"
ctcacttgatctccctgcctccgcctcccaaagtgctgggattacaagcatgagcctctgcgcctagcctaagggagactttagatttaagacagaagtatgccaggagagaggaggtagct

SEQ ID NO: 4528 - DNA, 122 bp, Homo sapiens
  misc_feature (61)..(62): /note="This region represents a CpG dinucleotide"
  misc_feature (61)..(61): /note="Nucleotide may be methylated to form 5-methylcytosine"
cagccagccagtcaatggctgtgtccagagcttcccgcctcgggctcagcgtaggtggagcggacgcctccactttcatttctgattttagtcttctgcgtctcctctcttgtttatttgtt

SEQ ID NO: 4529 - DNA, 122 bp, Homo sapiens
  misc_feature (61)..(62): /note="This region represents a CpG dinucleotide"
  misc_feature (61)..(61): /note="Nucleotide may be methylated to form 5-methylcytosine"
cttttggttgtacccagcactgcccagaatggcttacagagtttatacccatggaggtttcgtaaaggtgacattaacttcgcagtaaagtcactgaccccgaacctgtgtcacttcaggct

SEQ ID NO: 4530 - DNA, 122 bp, Homo sapiens
  misc_feature (61)..(62): /note="This region represents a CpG dinucleotide"
  misc_feature (61)..(61): /note="Nucleotide may be methylated to form 5-methylcytosine"
acctaccgagagtggggttcgaacccacgcgggcaccagcccattggatcttaagtccaacgccttaaccactcggccatcccggtgactggggcaagtttcaaggcaatcatttttttata

SEQ ID NO: 4531 - DNA, 122 bp, Homo sapiens
  misc_feature (61)..(62): /note="This region represents a CpG dinucleotide"
  misc_feature (61)..(61): /note="Nucleotide may be methylated to form 5-methylcytosine"
ctcaggtgatctgcccaagttggcctcccaaagttctgggattacaggcaggagccactgcgcccgagtggaaagttctaaaattaattgtggctatggttgcacaattctgtgagtattaa

SEQ ID NO: 4532 - DNA, 122 bp, Homo sapiens
  misc_feature (61)..(62): /note="This region represents a CpG dinucleotide"
  misc_feature (61)..(61): /note="Nucleotide may be methylated to form 5-methylcytosine"
gagcacctgggcaccacatgtgccctctgctcggggaccgctgttgacccgacaggcgcacgttccacacccacaccgtcgctgctttgctcagagggaccagggctggaggccgagctgag

SEQ ID NO: 4533 - DNA, 122 bp, Homo sapiens
  misc_feature (61)..(62): /note="This region represents a CpG dinucleotide"
  misc_feature (61)..(61): /note="Nucleotide may be methylated to form 5-methylcytosine"
ctcacaggaacccagggccagcaggaggtgaagttctgccagcccccagcctgggcccagcgcccatgtttatgactgtttatttcagagcaagtagaaaggagaaattagagccatgaaag

SEQ ID NO: 4534 - DNA, 122 bp, Homo sapiens
  misc_feature (61)..(62): /note="This region represents a CpG dinucleotide"
  misc_feature (61)..(61): /note="Nucleotide may be methylated to form 5-methylcytosine"
agttttcacttttctgggataaaagcccaagagtgcagtttctaggtcacacaatgaacacgtgcttattagtgttgtaagaagctgccacactctcatgcagagtagctggaccattttac

SEQ ID NO: 4535 - DNA, 122 bp, Homo sapiens
  misc_feature (61)..(62): /note="This region represents a CpG dinucleotide"
  misc_feature (61)..(61): /note="Nucleotide may be methylated to form 5-methylcytosine"
gtcctccctgctaagcccttcattctgaatttctaaaagtaaggggatgtggtgtgtgaccgtgacacggtgaccaagtctgggaagctggctcccctggccacgctctgccgtgtctgcca

SEQ ID NO: 4536 - DNA, 122 bp, Homo sapiens
  misc_feature (61)..(62): /note="This region represents a CpG dinucleotide"
  misc_feature (61)..(61): /note="Nucleotide may be methylated to form 5-methylcytosine"
taccttattttgagagtttgctgtgtgccagtactatctgccatgaagtaggtggtgttacggtgtccatttcacagatgagaaaataaggcttatgagttgacactttggttgtgatcata

SEQ ID NO: 4537 - DNA, 122 bp, Homo sapiens
  misc_feature (61)..(62): /note="This region represents a CpG dinucleotide"
  misc_feature (61)..(61): /note="Nucleotide may be methylated to form 5-methylcytosine"
ccagccgcctctctctgcctgggtttctcttgttgcagctgggggccaagactctgctggcgtgggcctctgtgggtgctcctcacagagggccgggcagtctttttaagaatgctcaagct

SEQ ID NO: 4538 - DNA, 122 bp, Homo sapiens
  misc_feature (61)..(62): /note="This region represents a CpG dinucleotide"
  misc_feature (61)..(61): /note="Nucleotide may be methylated to form 5-methylcytosine"
gagccaacaacagggaaacaacttgttctttcttatttgctgggacattaatagctccaccgagtaatattcatgtcctttaagcagttcggcattctggaaataattggcatgcaaaaatt

SEQ ID NO: 4539 - DNA, 122 bp, Homo sapiens
  misc_feature (61)..(62): /note="This region represents a CpG dinucleotide"
  misc_feature (61)..(61): /note="Nucleotide may be methylated to form 5-methylcytosine"
tatgccaaactcgccccacgcccccaaatgccaggttccccggggtagcaacgaatgacacgttgtccaatcagacttcagtgtaaccatgtcacagaagacatgactaaagcaaaacagga

SEQ ID NO: 4540 - DNA, 122 bp, Homo sapiens
  misc_feature (61)..(62): /note="This region represents a CpG dinucleotide"
  misc_feature (61)..(61): /note="Nucleotide may be methylated to form 5-methylcytosine"
cgctggggccaccggcctctcacacaggcggccttcgcccaggtgcagccgtagggactgcggctcgtcagcctgacgccatcaagctgcgccccagccagccagtcaatggctgtgtccag

SEQ ID NO: 4541 - DNA, 122 bp, Homo sapiens
  misc_feature (61)..(62): /note="This region represents a CpG dinucleotide"
  misc_feature (61)..(61): /note="Nucleotide may be methylated to form 5-methylcytosine"
ggggatgttgctgagggagatgacttctaagatggtcttgatagatgagtagaaatcacacggagaagaagggtcttgagaaagtaaattcaaatagagttaaaagcaagggcaagaaagac

SEQ ID NO: 4542 - DNA, 122 bp, Homo sapiens
  misc_feature (61)..(62): /note="This region represents a CpG dinucleotide"
  misc_feature (61)..(61): /note="Nucleotide may be methylated to form 5-methylcytosine"
ttgatttacatagtcagagactgcatgctgtcacgcctcttgtatagagaccccttgtggcgttcacctgattgcctcctcggtttgtgtgggaaacgttccatttcttttacagtaggatg

SEQ ID NO: 4543 - DNA, 122 bp, Homo sapiens
  misc_feature (61)..(62): /note="This region represents a CpG dinucleotide"
  misc_feature (61)..(61): /note="Nucleotide may be methylated to form 5-methylcytosine"
cctgtgcatacgtatgtccatccaggcatgcatgcgtgtttgtatacacacatatgcacacggaatagccatgtacattgaagcaccaaactaggcagctggataatgggagagtcggctgg

SEQ ID NO: 4544 - DNA, 122 bp, Homo sapiens
  misc_feature (61)..(62): /note="This region represents a CpG dinucleotide"
  misc_feature (61)..(61): /note="Nucleotide may be methylated to form 5-methylcytosine"
gcgtcctgcctcgagctggtttttagacttcatgatccttcctcccctttactggaggaacgcatgccagtcacttgctctcagttttactaaagttcactttcttcccaggtaacccctgg

SEQ ID NO: 4545 - DNA, 122 bp, Homo sapiens
  misc_feature (61)..(62): /note="This region represents a CpG dinucleotide"
  misc_feature (61)..(61): /note="Nucleotide may be methylated to form 5-methylcytosine"
tcagatggtgatcagcggtcagcaggatgatgattggtgagacggagaggcagcagttgacgagagacagcaagacagccatcagcactacggtaatcaaagctgcagagctgtaacactaa

SEQ ID NO: 4546 - DNA, 122 bp, Homo sapiens
  misc_feature (61)..(62): /note="This region represents a CpG dinucleotide"
  misc_feature (61)..(61): /note="Nucleotide may be methylated to form 5-methylcytosine"
ttattcttttctcttgtatggtaatagtttagaacatcaaaaactgggttgcaccatttgcgattaagcagggcccctattcggtgaccgctgcgccgccagcctggcgcgggcctcctgca

SEQ ID NO: 4547 - DNA, 122 bp, Homo sapiens
  misc_feature (61)..(62): /note="This region represents a CpG dinucleotide"
  misc_feature (61)..(61): /note="Nucleotide may be methylated to form 5-methylcytosine"
tccaaaagaaacaaacatcttaaactcatgaagacattgtctgaacgcctgtttgaataacgttacagatggagaaaaggggacaagctgactatgcatgccaacaattcaagtgcaaaacc

SEQ ID NO: 4548 - DNA, 122 bp, Homo sapiens
  misc_feature (61)..(62): /note="This region represents a CpG dinucleotide"
  misc_feature (61)..(61): /note="Nucleotide may be methylated to form 5-methylcytosine"
catggaaagaaatccttccttcagaggatgtgtccactgaaaacctgtctgagtctgatacggaagaggcaaacctagaggaaaggaaaagagaagataactatcaggatcccttgactggc

SEQ ID NO: 4549 - DNA, 122 bp, Homo sapiens
  misc_feature (61)..(62): /note="This region represents a CpG dinucleotide"
  misc_feature (61)..(61): /note="Nucleotide may be methylated to form 5-methylcytosine"
tgatctttcattgacttctgtgtgaaccaaatccctaagaatctcagacatggacacttacgcatcatcatagttatactgtttctacattatgcaggtttcccagaagaaaataaattcct

SEQ ID NO: 4550 - DNA, 122 bp, Homo sapiens
  misc_feature (61)..(62): /note="This region represents a CpG dinucleotide"
  misc_feature (61)..(61): /note="Nucleotide may be methylated to form 5-methylcytosine"
ggtcagaagcaaggctttccatagttgtgcacacattcctgatggtctctgcgtggtactcgtaagttcagacaagccatattaattccagacttaatcatcaacatttccaccaatcagga

SEQ ID NO: 4551 - DNA, 122 bp, Homo sapiens
  misc_feature (61)..(62): /note="This region represents a CpG dinucleotide"
  misc_feature (61)..(61): /note="Nucleotide may be methylated to form 5-methylcytosine"
accccctgacaggtcttggtggagtgatggcacaggtaggtggctctccacttcatcccccgcgtgtttccgtcgctgcactctctgcttctgtggctcagcatcctggagggaatcctgcc

SEQ ID NO: 4552 - DNA, 122 bp, Homo sapiens
  misc_feature (61)..(62): /note="This region represents a CpG dinucleotide"
  misc_feature (61)..(61): /note="Nucleotide may be methylated to form 5-methylcytosine"
gaagcaggcaggcccgcaggcccatgcccttcttttacagataaggagacagagctgggacgggtggaggagtgttcaaggacattcttggctagaaacttactatctaaaatagtaaagag

SEQ ID NO: 4553 - DNA, 122 bp, Homo sapiens
  misc_feature (61)..(62): /note="This region represents a CpG dinucleotide"
  misc_feature (61)..(61): /note="Nucleotide may be methylated to form 5-methylcytosine"
tccggccctggcggggagagggtaccggctgccaccacctgctgccggtcccctcgcaggcgaccagcccaacttgggctgctcacgctactgccgctgctgccgctgccactgccgctgct

SEQ ID NO: 4554 - DNA, 122 bp, Homo sapiens
  misc_feature (61)..(62): /note="This region represents a CpG dinucleotide"
  misc_feature (61)..(61): /note="Nucleotide may be methylated to form 5-methylcytosine"
tcagggtctcacaaagctataaacagcttgtctgccagggctgctagctcatctgaggcacgactggatacagattcactttcaagcacttgtggttgttggcagcattgagttccttgcag

SEQ ID NO: 4555 - DNA, 122 bp, Homo sapiens
  misc_feature (61)..(62): /note="This region represents a CpG dinucleotide"
  misc_feature (61)..(61): /note="Nucleotide may be methylated to form 5-methylcytosine"
attaaggacaaggaatctaagtgaatgggcagtaggggacatgaaacatggcagggtcaccggagcaagccaaaacacttttgaagagccagtgagtcaaacctgtggaaacctatgccaga

SEQ ID NO: 4556 - DNA, 122 bp, Homo sapiens
  misc_feature (61)..(62): /note="This region represents a CpG dinucleotide"
  misc_feature (61)..(61): /note="Nucleotide may be methylated to form 5-methylcytosine"
gtttatttacaggaaaagcctgcgaagagttccagttaggaatctggctgagatcctgatcgcttacaagctgaggcttttataataaagtttctgttggggaggggttggggaagtgctgg

SEQ ID NO: 4557 - DNA, 122 bp, Homo sapiens
  misc_feature (61)..(62): /note="This region represents a CpG dinucleotide"
  misc_feature (61)..(61): /note="Nucleotide may be methylated to form 5-methylcytosine"
gcgccagggccggttcctgacccgcctcctggctggagggttcaaaagacttcagacctccggggccctgtgcacagagatgctggctgcatggggcgtggaggggcgggatggggagccgg

SEQ ID NO: 4558 - DNA, 122 bp, Homo sapiens
  misc_feature (61)..(62): /note="This region represents a CpG dinucleotide"
  misc_feature (61)..(61): /note="Nucleotide may be methylated to form 5-methylcytosine"
ataaattgttgcacaatgctctggaattggcaacctattcctgcagctaatctcaaagggcggctagacgcttgctcatggttaagaaagagcacacatcatgccacaggtccctcacctca

SEQ ID NO: 4559 - DNA, 122 bp, Homo sapiens
  misc_feature (61)..(62): /note="This region represents a CpG dinucleotide"
  misc_feature (61)..(61): /note="Nucleotide may be methylated to form 5-methylcytosine"
cagtcactgctggtgctactgacagagctgttgacttagtttcactccataactgagtctcggctccttctcaggaaacttacctagactctgttgaacatgacaagtggtccaggaacact

SEQ ID NO: 4560 - DNA, 122 bp, Homo sapiens
  misc_feature (61)..(62): /note="This region represents a CpG dinucleotide"
  misc_feature (61)..(61): /note="Nucleotide may be methylated to form 5-methylcytosine"
accttgctttaggtcctttccaccttttaccaggaccagtttctaatgattctgtttctccgtcttgcctcctatgcacaccaatttattgtccatgctgtagagaaagaaaactttttgaa

SEQ ID NO: 4561 - DNA, 122 bp, Homo sapiens
  misc_feature (61)..(62): /note="This region represents a CpG dinucleotide"
  misc_feature (61)..(61): /note="Nucleotide may be methylated to form 5-methylcytosine"
agggagccgggcctagggtctgttcctgggaaggatctgttccgtggggcccgctggagccgcgttttcaatatgcaaagtgccggtgctgtgcagacctcggtggtggtggttttgcatgc

SEQ ID NO: 4562 - DNA, 122 bp, Homo sapiens
  misc_feature (61)..(62): /note="This region represents a CpG dinucleotide"
  misc_feature (61)..(61): /note="Nucleotide may be methylated to form 5-methylcytosine"
attatggtatttgcattacagtttttttcaagtattttaagccactcttcatgacagaatcgttagaattccctccgtgaatccctgtctgtggccgcgcggtggcgctcgtgggctctggg

SEQ ID NO: 4563 - DNA, 122 bp, Homo sapiens
  misc_feature (61)..(62): /note="This region represents a CpG dinucleotide"
  misc_feature (61)..(61): /note="Nucleotide may be methylated to form 5-methylcytosine"
gaaaattgttttctccaagttctgcaaacttgaacaaatagcaagctggaggtagagtaccgtggttaaatggtctgtgttggttgctttattttcctaaggagaaaaaaaaaaggttaaga

SEQ ID NO: 4564 - DNA, 122 bp, Homo sapiens
  misc_feature (61)..(62): /note="This region represents a CpG dinucleotide"
  misc_feature (61)..(61): /note="Nucleotide may be methylated to form 5-methylcytosine"
ggaacttgctagaaatacatgttacctgatctcaccttaaatctactgagtcagaaactccgggggtggggcccagaaatctgtgttttaaggcccttccagcaagtctgacatgcttgaaa

SEQ ID NO: 4565 - DNA, 122 bp, Homo sapiens
  misc_feature (61)..(62): /note="This region represents a CpG dinucleotide"
  misc_feature (61)..(61): /note="Nucleotide may be methylated to form 5-methylcytosine"
taaatctgtctaaccgcagttgatgcatgagttacatttctacactaacctgcaagacaccgaaaagctaaacagagacttcttttaggtaaaataaacacaagctttacttagggtaagta

SEQ ID NO: 4566 - DNA, 122 bp, Homo sapiens
  misc_feature (61)..(62): /note="This region represents a CpG dinucleotide"
  misc_feature (61)..(61): /note="Nucleotide may be methylated to form 5-methylcytosine"
gctggtcaaggaagccctgcctctcagaggcggtgacatgtgatcagtgccagacagccacgtagctatctgagggggaaatggtcaaggctgagagaacttcaagaacagaaagcaagcca

SEQ ID NO: 4567 - DNA, 122 bp, Homo sapiens
  misc_feature (61)..(62): /note="This region represents a CpG dinucleotide"
  misc_feature (61)..(61): /note="Nucleotide may be methylated to form 5-methylcytosine"
ccgcaaggcaacctctaggctgctgatgctgctctctgcaggcttgtggaggtccagggccgtgtcatagcttggccgtctgggtgcgacagaaacgggagcacttctggcccagagcctcc

SEQ ID NO: 4568 - DNA, 122 bp, Homo sapiens
  misc_feature (61)..(62): /note="This region represents a CpG dinucleotide"
  misc_feature (61)..(61): /note="Nucleotide may be methylated to form 5-methylcytosine"
tgtctatttagaagcaaacctctcgtcacccgctgcggagcatctcgatgttagaaaccacgccactatttttagtgtgtgtccttgtgcttctgcacgatgagtcagggttctcttttaaa

SEQ ID NO: 4569 - DNA, 122 bp, Homo sapiens
  misc_feature (61)..(62): /note="This region represents a CpG dinucleotide"
  misc_feature (61)..(61): /note="Nucleotide may be methylated to form 5-methylcytosine"
cgggctgcagaggtctcctaagcccaccctggacccccgagagctccctggccggagcagcgcagtgccacaacctcactcactccctgacaacccaggccaggggccctgcaacaaataca

SEQ ID NO: 4570 - DNA, 122 bp, Homo sapiens
  misc_feature (61)..(62): /note="This region represents a CpG dinucleotide"
  misc_feature (61)..(61): /note="Nucleotide may be methylated to form 5-methylcytosine"
aaagacctgtgctccctctgctggctctctatagcaatattgaagcagaaaggaaccatacgtagtattggcatcttcagcaaacacaagtcagtttgggtattccgagaagaaccactcat

SEQ ID NO: 4571 - DNA, 122 bp, Homo sapiens
  misc_feature (61)..(62): /note="This region represents a CpG dinucleotide"
  misc_feature (61)..(61): /note="Nucleotide may be methylated to form 5-methylcytosine"
tccggggaagcactggaaacagcaggaccatcccgaaactgcttctgcagtgggaggcgccgggcgcccggctggccgggtggaaaccacgctgcagccgccgggccaagggcaccgcggtg

SEQ ID NO: 4572 - DNA, 122 bp, Homo sapiens
  misc_feature (61)..(62): /note="This region represents a CpG dinucleotide"
  misc_feature (61)..(61): /note="Nucleotide may be methylated to form 5-methylcytosine"
gggcaggaagaagagaatcccctgtttgtaagagaacagtcacatactagatgctgtctacggcttgtgaaaaacacaaggaaacggccacctgagagtactaaagtggccaggcccacggg

SEQ ID NO: 4573 - DNA, 122 bp, Homo sapiens
  misc_feature (61)..(62): /note="This region represents a CpG dinucleotide"
  misc_feature (61)..(61): /note="Nucleotide may be methylated to form 5-methylcytosine"
ctgtaagatatgagtaaaaggagtgaatggagatggtcccaaacagaatttccatagcatcgccagtgatacttcagcatgtaagtgggccaggcttgggaaaaagctgtagctgtcccctt

SEQ ID NO: 4574 - DNA, 122 bp, Homo sapiens
  misc_feature (61)..(62): /note="This region represents a CpG dinucleotide"
  misc_feature (61)..(61): /note="Nucleotide may be methylated to form 5-methylcytosine"
gttgttttgattgtcaagacagatgaaagcataaacttatttatgagataagacttcaagcgtaggcggtactgacatcataaatgggtttaatgccatattaagtaagttgaaattagttc

SEQ ID NO: 4575 - DNA, 122 bp, Homo sapiens
  misc_feature (61)..(62): /note="This region represents a CpG dinucleotide"
  misc_feature (61)..(61): /note="Nucleotide may be methylated to form 5-methylcytosine"
tggcggtttcctgtccgggctggcggggccgccagtcggcgtggggtgcggcaaggggagcggggcgctgggtcagccgagggccgggcctcgggggcgcagccggactggacggcggctcc

SEQ ID NO: 4576 - DNA, 122 bp, Homo sapiens
  misc_feature (61)..(62): /note="This region represents a CpG dinucleotide"
  misc_feature (61)..(61): /note="Nucleotide may be methylated to form 5-methylcytosine"
cagcggccctcccctcgctgatgcccttccgccccgctcaggtagcaggtatgtgccccgcgctgtgctaactgatctggagccgggcaccctggactctgtgcgctccgggcccttcggcc

SEQ ID NO: 4577 - DNA, 122 bp, Homo sapiens
  misc_feature (61)..(62): /note="This region represents a CpG dinucleotide"
  misc_feature (61)..(61): /note="Nucleotide may be methylated to form 5-methylcytosine"
agagtcagagatatgtatgcaccctagccctggctctgctacagtgtgtgatcttgggcacgttttttcttttcttttaaagacaactttattaagacataatttctatacaatatattcac

SEQ ID NO: 4578 - DNA, 122 bp, Homo sapiens
  misc_feature (61)..(62): /note="This region represents a CpG dinucleotide"
  misc_feature (61)..(61): /note="Nucleotide may be methylated to form 5-methylcytosine"
ccccatgctcagttcactccaggcagtcacaatgaccacatcattcttcctcaaacaccccgactcactgcccccttggagactgtgtgcttgttcttcctggctcatgaaatatttgttcc

SEQ ID NO: 4579 - DNA, 122 bp, Homo sapiens
  misc_feature (61)..(62): /note="This region represents a CpG dinucleotide"
  misc_feature (61)..(61): /note="Nucleotide may be methylated to form 5-methylcytosine"
ggcagactcacctagcttgctttgtcaagcatagcttctcataatgcaatatttaatacacgtttttatcatgatgatgaatgtgctgaccccacaattacattttgtctaaatgttttatc

SEQ ID NO: 4580 - DNA, 122 bp, Homo sapiens
  misc_feature (61)..(62): /note="This region represents a CpG dinucleotide"
  misc_feature (61)..(61): /note="Nucleotide may be methylated to form 5-methylcytosine"
ccgatgacagaactaaggctcagaaatgtgaaataatgtgcccaagattacccagctgtacgcagtggaggtgagattggcatccaaaaccttccctctcaagctctatgccactccctttg

SEQ ID NO: 4581 - DNA, 122 bp, Homo sapiens
  misc_feature (61)..(62): /note="This region represents a CpG dinucleotide"
  misc_feature (61)..(61): /note="Nucleotide may be methylated to form 5-methylcytosine"
ctagtatagttgctgctttggcatccattttgggcctgcggtaagttattgaaacccagtcgtaccctatcacctttggtctagttaaaatgttccctccctgtgtggttgtttgtgaaaca

SEQ ID NO: 4582 - DNA, 122 bp, Homo sapiens
  misc_feature (61)..(62): /note="This region represents a CpG dinucleotide"
  misc_feature (61)..(61): /note="Nucleotide may be methylated to form 5-methylcytosine"
aagggtatggggaggggacgtggcctccccgaagaagaaccgatgcactggggctcctggcgtctgcggggtccataacgcctccctagggaggagagggaggagctaggagatgcagggag

SEQ ID NO: 4583 - DNA, 122 bp, Homo sapiens
  misc_feature (61)..(62): /note="This region represents a CpG dinucleotide"
  misc_feature (61)..(61): /note="Nucleotide may be methylated to form 5-methylcytosine"
ccagggacctcatttcaagggtccctccttctgtttctcacaggaagactaggaaatactcgtgctaacagattccattggctgccttaactgtcccaaaatcccagaatcagccccaatcc

SEQ ID NO: 4584 - DNA, 122 bp, Homo sapiens
  misc_feature (61)..(62): /note="This region represents a CpG dinucleotide"
  misc_feature (61)..(61): /note="Nucleotide may be methylated to form 5-methylcytosine"
tggatattcctgttctgtagataaggaaatggtgacttaagtaacttggtcaaggtcacacggctagttaggtgttaccgcagggattctgattttgctccatcaggatccaaagcccatga

SEQ ID NO: 4585 - DNA, 122 bp, Homo sapiens
  misc_feature (61)..(62): /note="This region represents a CpG dinucleotide"
  misc_feature (61)..(61): /note="Nucleotide may be methylated to form 5-methylcytosine"
gcaagaatttgcagaattaagtactgatcagtcattcattcatataatactgactcaacacgtattatgtgtcatgcactgttctaagtgctgggatatagcagtaggcaaaatagaccatg

SEQ ID NO: 4586 - DNA, 122 bp, Homo sapiens
  misc_feature (61)..(62): /note="This region represents a CpG dinucleotide"
  misc_feature (61)..(61): /note="Nucleotide may be methylated to form 5-methylcytosine"
tgcttataggtgctgtaccaggtggaaggattcgttgacaaaaacaatgaccttctctatcgagacctgtcccaagccatgtggaaggccagccatgccctcatcaagtctttgttccccga

SEQ ID NO: 4587 - DNA, 122 bp, Homo sapiens
  misc_feature (61)..(62): /note="This region represents a CpG dinucleotide"
  misc_feature (61)..(61): /note="Nucleotide may be methylated to form 5-methylcytosine"
gttgaaagagaacaaggccttttctaacccatgtctggtccctccatacaaaaaatggctcgagacaaaagggagcctgggtgtctgcctagaactgttgttcgacagaacaaaactggctt

SEQ ID NO: 4588 - DNA, 122 bp, Homo sapiens
  misc_feature (61)..(62): /note="This region represents a CpG dinucleotide"
  misc_feature (61)..(61): /note="Nucleotide may be methylated to form 5-methylcytosine"
accaccaggttgaggccacatttgcataataaaagattagggtgggagggccagtttcttcgaaggctgtgtaaatgacatacctggccaaaccaatcccctgggacctacgtaaatcaaac

SEQ ID NO: 4589 - DNA, 122 bp, Homo sapiens
  misc_feature (61)..(62): /note="This region represents a CpG dinucleotide"
  misc_feature (61)..(61): /note="Nucleotide may be methylated to form 5-methylcytosine"
aggagctagaagtctcagataagtggttgcaagggtgaatactggagtctaacacatctgcgtctaaacttgtctccgactttcaccaattgagtggcccggggcaagatacctaaacttct

SEQ ID NO: 4590 - DNA, 122 bp, Homo sapiens
  misc_feature (61)..(62): /note="This region represents a CpG dinucleotide"
  misc_feature (61)..(61): /note="Nucleotide may be methylated to form 5-methylcytosine"
caaagctcagtgacctcaaacaacaaccatatgttgttgctcaaaggactacacatcagtcgggtggtttctctggccttggctgtgctgactcatgtatctctggtcaactggggctgggc

SEQ ID NO: 4591 - DNA, 122 bp, Homo sapiens
  misc_feature (61)..(62): /note="This region represents a CpG dinucleotide"
  misc_feature (61)..(61): /note="Nucleotide may be methylated to form 5-methylcytosine"
tctgttacttgcaacagaaacaatttttacttacacaggaaggggaggctccttagaggacgtgggagtattgttaccagaagaccgtacattggatacagggcagaaaaaacaatagattc

SEQ ID NO: 4592 - DNA, 122 bp, Homo sapiens
  misc_feature (61)..(62): /note="This region represents a CpG dinucleotide"
  misc_feature (61)..(61): /note="Nucleotide may be methylated to form 5-methylcytosine"
ggcaccatggagtgcgcagccctggctgcactttgccctctgcagctggtgtcctcacagcggctgctccagactggccgctgctgccatcattgccagtaatcccagggattctggtgatt

SEQ ID NO: 4593 - DNA, 122 bp, Homo sapiens
  misc_feature (61)..(62): /note="This region represents a CpG dinucleotide"
  misc_feature (61)..(61): /note="Nucleotide may be methylated to form 5-methylcytosine"
agtttcaaggggtggggttctgtcagactgtgatactgccttccttacagacagctgaaacggaaagttaagttgccaggagacctgcagctccctgggagcttgttgtatctctgtgtttg

SEQ ID NO: 4594 - DNA, 122 bp, Homo sapiens
  misc_feature (61)..(62): /note="This region represents a CpG dinucleotide"
  misc_feature (61)..(61): /note="Nucleotide may be methylated to form 5-methylcytosine"
tgtgtttgccgtggctgttcatgtttgctgtggctcatgtttgccgtggctcgtctttgccgtggcccgtgtttgccgtggctgttcgtgcttgccatggcttctgggcactgctcctgagg

SEQ ID NO: 4595 - DNA, 122 bp, Homo sapiens
  misc_feature (61)..(62): /note="This region represents a CpG dinucleotide"
  misc_feature (61)..(61): /note="Nucleotide may be methylated to form 5-methylcytosine"
attacaggcctgagccaccgcgcccagcctacaacaggaagactttgttaaatgaatgagcgcgcagggaagagcaggtgctttgtgaacttgagagcttcacttcctaatcctgtgactcc

SEQ ID NO: 4596 - DNA, 122 bp, Homo sapiens
  misc_feature (61)..(62): /note="This region represents a CpG dinucleotide"
  misc_feature (61)..(61): /note="Nucleotide may be methylated to form 5-methylcytosine"
catgtgataacatcaagaagtttcccaataatatgaattaaagaccacgtactctgccaacgcaattgtgttcatctatcagacaatgtcagggaaaaactataatgaagctcacaaatatt

SEQ ID NO: 4597 - DNA, 122 bp, Homo sapiens
  misc_feature (61)..(62): /note="This region represents a CpG dinucleotide"
  misc_feature (61)..(61): /note="Nucleotide may be methylated to form 5-methylcytosine"
ggctggtgccccgcgctcctgcgctgcagctgcactaacgctccgcggggagcgtgtgtgcgcactaacccgccgctctgtgtgttctcccgcggctgccgacttctcccagctgggacggc

SEQ ID NO: 4598 - DNA, 122 bp, Homo sapiens
  misc_feature (61)..(62): /note="This region represents a CpG dinucleotide"
  misc_feature (61)..(61): /note="Nucleotide may be methylated to form 5-methylcytosine"
aataaatgtgctgggataaaccttccacacactgagatgacctggaagagtctcagaacacgttcttattggagaacttagtcctgccacatcagtagtggattgaagcattttccctataa

SEQ ID NO: 4599 - DNA, 122 bp, Homo sapiens
  misc_feature (61)..(62): /note="This region represents a CpG dinucleotide"
  misc_feature (61)..(61): /note="Nucleotide may be methylated to form 5-methylcytosine"
accacatggtgccattagatgctcttgacgtgctgtggttttctggttcactctgctagacggtgcccagggctgttcccggagccgtctgtcattgtacttacaactcacatcacaccccg

SEQ ID NO: 4600 - DNA, 122 bp, Homo sapiens
  misc_feature (61)..(62): /note="This region represents a CpG dinucleotide"
  misc_feature (61)..(61): /note="Nucleotide may be methylated to form 5-methylcytosine"
cggggcgtgggctgggtgcccttttgggcctcacttgtccggcctgcggcaagtgctgggcgatgggatgcggttctggcggcaaaggaagggctgcctttgagagtcccgcaggaaggttt

SEQ ID NO: 4601 - DNA, 122 bp, Homo sapiens
  misc_feature (61)..(62): /note="This region represents a CpG dinucleotide"
  misc_feature (61)..(61): /note="Nucleotide may be methylated to form 5-methylcytosine"
tcaggaggcacatgatgtcggcgtgcccagcaggggtgacggtgacgcccatggcctggccgaggtggtagccttttgctgctgtaaagcgactcgtgttccctttgtaattaataagtaat

SEQ ID NO: 4602 - DNA, 122 bp, Homo sapiens
  misc_feature (61)..(62): /note="This region represents a CpG dinucleotide"
  misc_feature (61)..(61): /note="Nucleotide may be methylated to form 5-methylcytosine"
tccctgtccgcacacccacagctagttaaggctattcctatttacacgtcgagtaaactgcgccttcctcggggtcctctgccactggtaactgtctaaatagcaggtgggcctgtagcctg

SEQ ID NO: 4603 - DNA, 122 bp, Homo sapiens
  misc_feature (61)..(62): /note="This region represents a CpG dinucleotide"
  misc_feature (61)..(61): /note="Nucleotide may be methylated to form 5-methylcytosine"
cattaccacatttgtgctttttagttaagctctagatgggcttggctttttacaaatgaccgtctttgggctgatgtgtggcaccagctattattcagtccacatgattctgctggaacgct

SEQ ID NO: 4604 - DNA, 122 bp, Homo sapiens
  misc_feature (61)..(62): /note="This region represents a CpG dinucleotide"
  misc_feature (61)..(61): /note="Nucleotide may be methylated to form 5-methylcytosine"
tcaaaataataataataatagtaataattaataaataaataaaacggacattccctcacacgtgccaagagtgaacacaccagctcggagcaccccagagacatcagagacagagcacatct

SEQ ID NO: 4605 - DNA, 122 bp, Homo sapiens
  misc_feature (61)..(62): /note="This region represents a CpG dinucleotide"
  misc_feature (61)..(61): /note="Nucleotide may be methylated to form 5-methylcytosine"
acatcttttcataactaaagcgtttctgaaactgcagcatacattaagcatttcatatgccgcccattaaataactaatatattctatttcacaaacaggaaaagaggttgaacaccattat

SEQ ID NO: 4606 - DNA, 122 bp, Homo sapiens
  misc_feature (61)..(62): /note="This region represents a CpG dinucleotide"
  misc_feature (61)..(61): /note="Nucleotide may be methylated to form 5-methylcytosine"
taagcactaagcaaatcatgtagagacttccgtggccacatacaaaaaaaatacactgtacggaactggttctgaaaagacactaaacaaacaacaaaacccagcaataacatccctgaagg

SEQ ID NO: 4607 - DNA, 122 bp, Homo sapiens
  misc_feature (61)..(62): /note="This region represents a CpG dinucleotide"
  misc_feature (61)..(61): /note="Nucleotide may be methylated to form 5-methylcytosine"
tgatccagtctgcagccctggctgtctcctgctgagctccaggggccctgtgtttagactcgttctgtctttttatacagggcttacaatatcccttctttcctaacttgcctacactgtat

SEQ ID NO: 4608 - DNA, 122 bp, Homo sapiens
  misc_feature (61)..(62): /note="This region represents a CpG dinucleotide"
  misc_feature (61)..(61): /note="Nucleotide may be methylated to form 5-methylcytosine"
tcagtggtattaagtacatttcgcaatgttgtgtgtcatcaccattacccatttccagaacgttttcaacaaccccaaacagaaactctgtacccattaaacaatagctccatattcctccc

SEQ ID NO: 4609 - DNA, 122 bp, Homo sapiens
  misc_feature (61)..(62): /note="This region represents a CpG dinucleotide"
  misc_feature (61)..(61): /note="Nucleotide may be methylated to form 5-methylcytosine"
aaattaaacaccacatcccgtggtaaaattgttcttgctctattaatagccagcttggctcgtgttgcactgaaaatccacggaggaagggtgtcagagagaagaaaaaggctacagaccca

SEQ ID NO: 4610 - DNA, 122 bp, Homo sapiens
  misc_feature (61)..(62): /note="This region represents a CpG dinucleotide"
  misc_feature (61)..(61): /note="Nucleotide may be methylated to form 5-methylcytosine"
ctggaagttcattgaagagtctgaaattagggacttatttcaaatttggacatggctagtcgaggcgcaacaagacccaacgggccaaatacgggaaataaaatatgccagttcaaactagt

SEQ ID NO: 4611 - DNA, 122 bp, Homo sapiens
  misc_feature (61)..(62): /note="This region represents a CpG dinucleotide"
  misc_feature (61)..(61): /note="Nucleotide may be methylated to form 5-methylcytosine"
ccgtaagtgatgctgtgatgaatctcctgttccgatacactgaaatgattcaccacttaacggtgagtgattttacacactacacgctcacacctaagggccctgagatgaaccctgctatc

SEQ ID NO: 4612 - DNA, 122 bp, Homo sapiens
  misc_feature (61)..(62): /note="This region represents a CpG dinucleotide"
  misc_feature (61)..(61): /note="Nucleotide may be methylated to form 5-methylcytosine"
ccaattctttcagtgcttcagctcttcagccagcccagttttgtttagatttgtgactaacgaagactttttttttttggtcagaacacgaagaggagctggaccaggaatttgagctggag

SEQ ID NO: 4613 - DNA, 122 bp, Homo sapiens
  misc_feature (61)..(62): /note="This region represents a CpG dinucleotide"
  misc_feature (61)..(61): /note="Nucleotide may be methylated to form 5-methylcytosine"
ctttccctctggacacgaacttcataggtgtttctcagtttgtttctccccacttgagtgcgataggatggctagagtgggtggagttcagtatttcccttcccttgtgtcaggtaagctct

SEQ ID NO: 4614 - DNA, 122 bp, Homo sapiens
  misc_feature (61)..(62): /note="This region represents a CpG dinucleotide"
  misc_feature (61)..(61): /note="Nucleotide may be methylated to form 5-methylcytosine"
gccgctgaatagaacaggctaaggtggctttggaagcattttgcaagaccacgcccaggccgccaagcttcggtttcattgcgtgtgtatgtttacataatgtgcctgtatatcgtcagttt

SEQ ID NO: 4615 - DNA, 122 bp, Homo sapiens
  misc_feature (61)..(62): /note="This region represents a CpG dinucleotide"
  misc_feature (61)..(61): /note="Nucleotide may be methylated to form 5-methylcytosine"
aaaaaaaaaaaaaaaaacagagagagagagaaagaaagaaaaaacactgttcccaagctgcgggctcaggacaatgtctgatgcctggcctagccctcatcaatggccttcacaatccctgc

SEQ ID NO: 4616 - DNA, 122 bp, Homo sapiens
  misc_feature (61)..(62): /note="This region represents a CpG dinucleotide"
  misc_feature (61)..(61): /note="Nucleotide may be methylated to form 5-methylcytosine"
gggggtcagggcagagggaggcagtgtccctgctgggcctgtagaggaagctgagggctgcgtataccctggccagcagcccaggaagcctgagcatgtaatgaaaagattgcatctcctcg

SEQ ID NO: 4617 - DNA, 122 bp, Homo sapiens
  misc_feature (61)..(62): /note="This region represents a CpG dinucleotide"
  misc_feature (61)..(61): /note="Nucleotide may be methylated to form 5-methylcytosine"
tgatggaagtcagccaagcgaagacgaagggtgggggagcagtcggcaattccagtttgacgctaatgatttgtgtacaattcaaggtcagagaatgatatgtgaggcttgtgcgcccaccc

SEQ ID NO: 4618 - DNA, 122 bp, Homo sapiens
  misc_feature (61)..(62): /note="This region represents a CpG dinucleotide"
  misc_feature (61)..(61): /note="Nucleotide may be methylated to form 5-methylcytosine"
ccttgccagcagattctgagttttggcttcccccagctttgctcagtgacatgatgagtccgaatcatttctacagattccccagagacaggagccagcttttactttttctcttgcagcat

SEQ ID NO: 4619 - DNA, 122 bp, Homo sapiens
  misc_feature (61)..(62): /note="This region represents a CpG dinucleotide"
  misc_feature (61)..(61): /note="Nucleotide may be methylated to form 5-methylcytosine"
cagttgtttgttacgtaggacaagagacttcgctggccactttttttttggttgtaaaatcggggtaagggttctctgcaaatgactgaagtattaaatgactgaaatattcttagttgatt

SEQ ID NO: 4620 - DNA, 122 bp, Homo sapiens
  misc_feature (61)..(62): /note="This region represents a CpG dinucleotide"
  misc_feature (61)..(61): /note="Nucleotide may be methylated to form 5-methylcytosine"
agttggctgaaagagataaaacaaaaaattgggtatgaaaaaagcaataaggataagttgcgtatgctgaaggaaggctcatttcactaaggaaggagggaggtaatttaagaaaaggtaaa

SEQ ID NO: 4621 - DNA, 122 bp, Homo sapiens
  misc_feature (61)..(62): /note="This region represents a CpG dinucleotide"
  misc_feature (61)..(61): /note="Nucleotide may be methylated to form 5-methylcytosine"
cccgtctttttcacaagccattcaaagtggaaggaatcatatgttaacagcccagagatgcgaaatattcacaaggaacagtagtggcagtaaagatgacctgggaagaataattagggtca

SEQ ID NO: 4622 - DNA, 122 bp, Homo sapiens
  misc_feature (61)..(62): /note="This region represents a CpG dinucleotide"
  misc_feature (61)..(61): /note="Nucleotide may be methylated to form 5-methylcytosine"
ggtgaggctggagacaaagcacccatgaaaagggggtatctctcagcataatatctgacacgtggtaggagctcaataaagatgagaagagaccatacgtgagtaggtagtacagcaaagtg

SEQ ID NO: 4623 - DNA, 122 bp, Homo sapiens
  misc_feature (61)..(62): /note="This region represents a CpG dinucleotide"
  misc_feature (61)..(61): /note="Nucleotide may be methylated to form 5-methylcytosine"
cttatgcctggtgcactgagcatgcagcatgaacaccagcccttatcatttctatgacatcgttgggtcataagtgacattaaacagcagctggttgcctcacattttaaagatgtttttgg

SEQ ID NO: 4624 - DNA, 122 bp, Homo sapiens
  misc_feature (61)..(62): /note="This region represents a CpG dinucleotide"
  misc_feature (61)..(61): /note="Nucleotide may be methylated to form 5-methylcytosine"
catactctgggagtgcaagtctggaaatgcattttcctcaggtgtttagctgcattaaaacgctttttaaaacgcttgagataatgtactcattttgttaggaaacttgtacctttcagata

SEQ ID NO: 4625 - DNA, 122 bp, Homo sapiens
  misc_feature (61)..(62): /note="This region represents a CpG dinucleotide"
  misc_feature (61)..(61): /note="Nucleotide may be methylated to form 5-methylcytosine"
acggctcaggggagtgcatgggcgaggacgcgtggcggatatactgggtgcactggaacacgcggaaggccaggctggccaggaagtcccgggcggacagcaggccggccacaggccgcagc

SEQ ID NO: 4626 - DNA, 122 bp, Homo sapiens
  misc_feature (61)..(62): /note="This region represents a CpG dinucleotide"
  misc_feature (61)..(61): /note="Nucleotide may be methylated to form 5-methylcytosine"
tacaatctgcatttcacttttttttttctgaagtaatctctgagaacattttgtccgttccgcatgtaatttttttccttgcatttttaatctctgccatgccaagaacacgtgaggaggta

SEQ ID NO: 4627 - DNA, 122 bp, Homo sapiens
  misc_feature (61)..(62): /note="This region represents a CpG dinucleotide"
  misc_feature (61)..(61): /note="Nucleotide may be methylated to form 5-methylcytosine"
ggcggtctccctccatccggcacaggcgcggcggtctccctccatccggcacaggcgtggcggtcttccccatccggcacaggtgtgaaatttaaaggcttggacggagtttcctttttcct

SEQ ID NO: 4628 - DNA, 122 bp, Homo sapiens
  misc_feature (61)..(62): /note="This region represents a CpG dinucleotide"
  misc_feature (61)..(61): /note="Nucleotide may be methylated to form 5-methylcytosine"
aaaaacaaaaaggtctacgaaactgtcacagccaagaggtgcctaagaaaccatgaacaacgtaatgtagtgcccagggtgagatcctggaacagaaaaggacattaggtaaaacctaagga

SEQ ID NO: 4629 - DNA, 122 bp, Homo sapiens
  misc_feature (61)..(62): /note="This region represents a CpG dinucleotide"
  misc_feature (61)..(61): /note="Nucleotide may be methylated to form 5-methylcytosine"
gccctggttcagggcgtaagggaccgaagaagcctccgaccctttaatgtgcatgatatccgggctgctgtagggattcctctgcaatagcggggtggcggacaggacttggacctgcccgc

SEQ ID NO: 4630 - DNA, 122 bp, Homo sapiens
  misc_feature (61)..(62): /note="This region represents a CpG dinucleotide"
  misc_feature (61)..(61): /note="Nucleotide may be methylated to form 5-methylcytosine"
ggacaacgtcttaatggttccaccattgtgcaaagaggatgaccactcccagtgcgtgcacgttctctccgctaatgtcactgctcaaaacgttcagaaaattaacacttacgccagggtcg

SEQ ID NO: 4631 - DNA, 122 bp, Homo sapiens
  misc_feature (61)..(62): /note="This region represents a CpG dinucleotide"
  misc_feature (61)..(61): /note="Nucleotide may be methylated to form 5-methylcytosine"
ttcttctttttgacataacaaagtgaacagaatgaaatcatgtacacttgcatgagaacccgtctctgtgttctgttttcctgtctatttttaacactgttaataaattaagttaaatctct

SEQ ID NO: 4632 - DNA, 122 bp, Homo sapiens
  misc_feature (61)..(62): /note="This region represents a CpG dinucleotide"
  misc_feature (61)..(61): /note="Nucleotide may be methylated to form 5-methylcytosine"
ctcaagcaatcctccctcctcggcttcccaaagtgtagggattacaggcgtgagccactgcgccctgccaaaagagggctttagggcaccccagaacgcgagatccccctcatctgtaatct

SEQ ID NO: 4633 - DNA, 122 bp, Homo sapiens
  misc_feature (61)..(62): /note="This region represents a CpG dinucleotide"
  misc_feature (61)..(61): /note="Nucleotide may be methylated to form 5-methylcytosine"
ccatgccccagtgactctacaacttctggatatgtcatttccttgtaaaagtatagcccccgtcatagatataaattggtgctgactccgcttgagtgaactttattagtgaaaacctcagt

SEQ ID NO: 4634 - DNA, 122 bp, Homo sapiens
  misc_feature (61)..(62): /note="This region represents a CpG dinucleotide"
  misc_feature (61)..(61): /note="Nucleotide may be methylated to form 5-methylcytosine"
aacatggtgaaagcccatttctgctaaaaatacaaaaaattagcagggcgtggtggcacacgcctgtagtcccagatactcaggacagtgaggcagaagaatcgcttgaacctgggaggcgg

SEQ ID NO: 4635 - DNA, 122 bp, Homo sapiens
  misc_feature (61)..(62): /note="This region represents a CpG dinucleotide"
  misc_feature (61)..(61): /note="Nucleotide may be methylated to form 5-methylcytosine"
ttcgtcagagattagatggttgtaggtgtgaggcattcccattcatgtgagctccatccccgtgactcaatcatctcccaaacccccacctcctaataccatcacctgggggtttaggattt

SEQ ID NO: 4636 - DNA, 122 bp, Homo sapiens
  misc_feature (61)..(62): /note="This region represents a CpG dinucleotide"
  misc_feature (61)..(61): /note="Nucleotide may be methylated to form 5-methylcytosine"
caaagacacttcatcagctttacaattgcacttaataatgctgccacacctcttcagagacgtttcatttcctatggcatgtcctatctaatcccctagctgaactacaggggacagggaag

SEQ ID NO: 4637 - DNA, 122 bp, Homo sapiens
  misc_feature (61)..(62): /note="This region represents a CpG dinucleotide"
  misc_feature (61)..(61): /note="Nucleotide may be methylated to form 5-methylcytosine"
tcagccaggagttgccacatgactaagctctggccagaggaatgatgcaagcaaaagtgacgtgtgcagcttcttcaagaagaaattgtttgccttccataatttccatctttcttcctgga

SEQ ID NO: 4638 - DNA, 122 bp, Homo sapiens
  misc_feature (61)..(62): /note="This region represents a CpG dinucleotide"
  misc_feature (61)..(61): /note="Nucleotide may be methylated to form 5-methylcytosine"
agctgccgtgagactctaccatctcttcaccatcatcagtaaatatttatcaaggaccaccgcctacacagcattgctcttgtttccacagcaacacactgtcacggagtcaggggagtatc

SEQ ID NO: 4639 - DNA, 122 bp, Homo sapiens
  misc_feature (61)..(62): /note="This region represents a CpG dinucleotide"
  misc_feature (61)..(61): /note="Nucleotide may be methylated to form 5-methylcytosine"
aggaggtgtctctaagccccaaagtttcctccagcttacgtggatggtggtaaaatgcaacggatgaacctgagctcctacctgtcatttatatgttaggatttattttttatgatttattc

SEQ ID NO: 4640 - DNA, 122 bp, Homo sapiens
  misc_feature (61)..(62): /note="This region represents a CpG dinucleotide"
  misc_feature (61)..(61): /note="Nucleotide may be methylated to form 5-methylcytosine"
aagcagggtctcactttgtcacccaggcaggagtacaatggcatgatcttggctcactgacggagccaaaggatacagtcaaataaggaatcagtaagcagaaagatcagaaagaggaacac

SEQ ID NO: 4641 - DNA, 122 bp, Homo sapiens
  misc_feature (61)..(62): /note="This region represents a CpG dinucleotide"
  misc_feature (61)..(61): /note="Nucleotide may be methylated to form 5-methylcytosine"
tcactctgacaggactgagcatgtgctgtgaccctccctcatccacacactgtctctccacgacgcaatcaatctcaaccctgctgtttccgtaaataaagcccagccaacagactctgcag

SEQ ID NO: 4642 - DNA, 122 bp, Homo sapiens
  misc_feature (61)..(62): /note="This region represents a CpG dinucleotide"
  misc_feature (61)..(61): /note="Nucleotide may be methylated to form 5-methylcytosine"
ctgactcttttttgtccctgttctacacagggtatcccaggaggcgttggttcaccaggacgtgatggctcaccaggccagagggtaaggtcttgcccaaggttggtttttagcaaagtagt

SEQ ID NO: 4643 - DNA, 122 bp, Homo sapiens
  misc_feature (61)..(62): /note="This region represents a CpG dinucleotide"
  misc_feature (61)..(61): /note="Nucleotide may be methylated to form 5-methylcytosine"
cttcaactatttattaccaaaggatcacaggtcaccaagcatgaggaagtactgtctatacgttttaagtaagagtccaggtaacacttattgttgttgctgcttcagagaattctccttgg

SEQ ID NO: 4644 - DNA, 122 bp, Homo sapiens
  misc_feature (61)..(62): /note="This region represents a CpG dinucleotide"
  misc_feature (61)..(61): /note="Nucleotide may be methylated to form 5-methylcytosine"
tatacagatttatctttctatcatgactgaggtatgcacagagttgactttatgagtgtacgatctgtgttgctgcacagagtcctgcacttaaaagcaccccatactcagtttaatgtctc

SEQ ID NO: 4645 - DNA, 122 bp, Homo sapiens
  misc_feature (61)..(62): /note="This region represents a CpG dinucleotide"
  misc_feature (61)..(61): /note="Nucleotide may be methylated to form 5-methylcytosine"
tcagatgggacagcattgtgtaattgcagcttatttggcactcagggcccagctccagaacgttctattaaaccagctatatgtccactcggaagttatcagataattccaacacttgattt

SEQ ID NO: 4646 - DNA, 122 bp, Homo sapiens
  misc_feature (61)..(62): /note="This region represents a CpG dinucleotide"
  misc_feature (61)..(61): /note="Nucleotide may be methylated to form 5-methylcytosine"
ctctacctgttgtacattcgtatgagataggtattaatataacctacacttcgtaggtgacgaaacagtctcagagagtgaaagggacttgaccaaagtcacagagccagtgagtgacaggg

SEQ ID NO: 4647 - DNA, 122 bp, Homo sapiens
  misc_feature (61)..(62): /note="This region represents a CpG dinucleotide"
  misc_feature (61)..(61): /note="Nucleotide may be methylated to form 5-methylcytosine"
ttcctttgggtatcgccctggggtcggtgagcgtggttcccagctaggacaacaggcaaacgccgccaagaggttaagatgaccccattgaccacagagcaccagaagtctttggaaggcag

SEQ ID NO: 4648 - DNA, 122 bp, Homo sapiens
  misc_feature (61)..(62): /note="This region represents a CpG dinucleotide"
  misc_feature (61)..(61): /note="Nucleotide may be methylated to form 5-methylcytosine"
gtgtttcaataaaaaggattatatctgtcttgaccattgccacagcattgatgaaaatcacgtactccatccaggacaaatcccacagtcgcctcactttccttctctcaacattttatatc

SEQ ID NO: 4649 - DNA, 122 bp, Homo sapiens
  misc_feature (61)..(62): /note="This region represents a CpG dinucleotide"
  misc_feature (61)..(61): /note="Nucleotide may be methylated to form 5-methylcytosine"
gccattcagaaggaagtggctggtccgtggcggggtggggcctgcctcctggactgaggacgccactctgaagtggagtcttcagatgttggaggaggacagttcgggggggcagtgcgtgc

SEQ ID NO: 4650 - DNA, 122 bp, Homo sapiens
  misc_feature (61)..(62): /note="This region represents a CpG dinucleotide"
  misc_feature (61)..(61): /note="Nucleotide may be methylated to form 5-methylcytosine"
acagtggggattgttgcagcatcagcacttcagccagctctgcaggtttccttggagacacgtggatttctctttctagaccttcagctattttcttttttttcttgttttcttgagatgga

SEQ ID NO: 4651 - DNA, 122 bp, Homo sapiens
  misc_feature (61)..(62): /note="This region represents a CpG dinucleotide"
  misc_feature (61)..(61): /note="Nucleotide may be methylated to form 5-methylcytosine"
ttgattttttttctctcactgaattttgtgtcttggtccagtgatacagggtacaaattccgttatcccattctaaaagtgcaaactatcaagtgattagaggttctccaatttgtagaggc

SEQ ID NO: 4652 - DNA, 122 bp, Homo sapiens
  misc_feature (61)..(62): /note="This region represents a CpG dinucleotide"
  misc_feature (61)..(61): /note="Nucleotide may be methylated to form 5-methylcytosine"
gaccccccagcccccaagcttgcctgccagtctatctctgcctaggtggggaggccccaacgttagttgggagtttgaagaagccttgttctgcagctcaggcatttccacatcaagcccat

SEQ ID NO: 4653 - DNA, 122 bp, Homo sapiens
  misc_feature (61)..(62): /note="This region represents a CpG dinucleotide"
  misc_feature (61)..(61): /note="Nucleotide may be methylated to form 5-methylcytosine"
tattgtttctactgccctggtggtgattcattttaattccacttctgacaatttctcctccgtacaaggcactgtcctgaaacagctggtaaattctaagaggtcacaggacctaatctgtt

SEQ ID NO: 4654 - DNA, 122 bp, Homo sapiens
  misc_feature (61)..(62): /note="This region represents a CpG dinucleotide"
  misc_feature (61)..(61): /note="Nucleotide may be methylated to form 5-methylcytosine"
gccccttctcactctgagcagctggtgcctgggattttaggctgtcacgacgattccacccggccagggcaggcccgaaccagccggaggccacaggagaaccaatgagcctggctggactc

SEQ ID NO: 4655 - DNA, 122 bp, Homo sapiens
  misc_feature (61)..(62): /note="This region represents a CpG dinucleotide"
  misc_feature (61)..(61): /note="Nucleotide may be methylated to form 5-methylcytosine"
aggagaaggaggagtgagacccagccgggtcaataaacctggacgcttggaccctgcctgcgagtctgccggggcgggagggcgcgtcggtggctgctgggccttgcgcacggggagtcgct

SEQ ID NO: 4656 - DNA, 122 bp, Homo sapiens
  misc_feature (61)..(62): /note="This region represents a CpG dinucleotide"
  misc_feature (61)..(61): /note="Nucleotide may be methylated to form 5-methylcytosine"
gaatagcttctacccggtaaatgaggtgatccactattactaataggtatttcaggcaaccgattggagacatttctgtgtgatcaacttgaacactttgaaatggtgttagtcctggattt

SEQ ID NO: 4657 - DNA, 122 bp, Homo sapiens
  misc_feature (61)..(62): /note="This region represents a CpG dinucleotide"
  misc_feature (61)..(61): /note="Nucleotide may be methylated to form 5-methylcytosine"
gacatattgtccaatgtggtttgctttggctaagtatttgaagctggcacgggggtcccccgtggtggttttcacatttggcctccggatggtatgtttaatccttaatattctggactgca

SEQ ID NO: 4658 - DNA, 122 bp, Homo sapiens
  misc_feature (61)..(62): /note="This region represents a CpG dinucleotide"
  misc_feature (61)..(61): /note="Nucleotide may be methylated to form 5-methylcytosine"
tatcaataacacctgccatccagagcccagcacaaatggctggaacaaatatttatgaaacgggattattgaaaaataggcagaagtgtggtacaagacagaaaacccaaggtcctggagtc

SEQ ID NO: 4659 - DNA, 122 bp, Homo sapiens
  misc_feature (61)..(62): /note="This region represents a CpG dinucleotide"
  misc_feature (61)..(61): /note="Nucleotide may be methylated to form 5-methylcytosine"
ctctcaacttgatctctttaaagctgctgggtcagcctccctggcacctcctctttcacacgcaagagcaagaaatggctttttggtttttttgggttttttttgagacagagtcttgccct

SEQ ID NO: 4660 - DNA, 122 bp, Homo sapiens
  misc_feature (61)..(62): /note="This region represents a CpG dinucleotide"
  misc_feature (61)..(61): /note="Nucleotide may be methylated to form 5-methylcytosine"
gaactcctggcctcaagtgattctcctcccttggcatccacaaattactaggattacaggcgtgaaccaccatgcctggccttgaactgtatctttaaagcccctgaaatattgttcctacc

SEQ ID NO: 4661 - DNA, 122 bp, Homo sapiens
  misc_feature (61)..(62): /note="This region represents a CpG dinucleotide"
  misc_feature (61)..(61): /note="Nucleotide may be methylated to form 5-methylcytosine"
acatcgggaatggtgtctatgtgtccactggcctgcagcaaggacccagttccctgccagcgccagtatgctatccctaagctgtgcccataagccccagtgggaggctggatactgggcaa

SEQ ID NO: 4662 - DNA, 122 bp, Homo sapiens
  misc_feature (61)..(62): /note="This region represents a CpG dinucleotide"
  misc_feature (61)..(61): /note="Nucleotide may be methylated to form 5-methylcytosine"
tattatgtaaatatttgaaaaaaactgctcttttcaattgcaagaaggcaaactgtaaaacgcatattgtgtggcagcatagatttactgtttcaaattggatgatgcaggcaaaagtactt

SEQ ID NO: 4663 - DNA, 122 bp, Homo sapiens
  misc_feature (61)..(62): /note="This region represents a CpG dinucleotide"
  misc_feature (61)..(61): /note="Nucleotide may be methylated to form 5-methylcytosine"
atcatctctaggagtagttgtggaagttaaaatatcttgcagcctcaaggtacgtgacttcggggcagtaggcaccatagaaaagcaagcgaggcagtggcaggtcattactgaactgtgcc

SEQ ID NO: 4664 - DNA, 122 bp, Homo sapiens
  misc_feature (61)..(62): /note="This region represents a CpG dinucleotide"
  misc_feature (61)..(61): /note="Nucleotide may be methylated to form 5-methylcytosine"
cttgtcctctgggggctttgtcttcctctgccaaaagaggttcttaagggccttttagggcgggaacccaagccagacacgaggccaagtcaagctagagagtgtggacctggggtcagcac

SEQ ID NO: 4665 - DNA, 122 bp, Homo sapiens
  misc_feature (61)..(62): /note="This region represents a CpG dinucleotide"
  misc_feature (61)..(61): /note="Nucleotide may be methylated to form 5-methylcytosine"
cgcccatctcctgccatccttctctggagagaggcgaggtgcttgaagtcccaaattcctcgtgtagtgagaaaacaggggaggcagaaaatccccaagatatcttcagaaacgaaggtgga

SEQ ID NO: 4666 - DNA, 122 bp, Homo sapiens
  misc_feature (61)..(62): /note="This region represents a CpG dinucleotide"
  misc_feature (61)..(61): /note="Nucleotide may be methylated to form 5-methylcytosine"
gccgcggcccagtcttgctcaccctcgcagagtctaagcgcaggtttctcagatacctgccgcaaggggtccctgtttttctcatctttttaggcacctgccagatttaaaagggcaggaaa

SEQ ID NO: 4667 - DNA, 122 bp, Homo sapiens
  misc_feature (61)..(62): /note="This region represents a CpG dinucleotide"
  misc_feature (61)..(61): /note="Nucleotide may be methylated to form 5-methylcytosine"
tcctctaatattgtgaagcatattatatgaaacaggaacacaaatttctcaaaattcctgcgatgtccaataaagattttcataatttcagctctgcaatcttaataggatttcctaatact

SEQ ID NO: 4668 - DNA, 122 bp, Homo sapiens
  misc_feature (61)..(62): /note="This region represents a CpG dinucleotide"
  misc_feature (61)..(61): /note="Nucleotide may be methylated to form 5-methylcytosine"
ccgtctccccatccaggctgtggatttccatgcacgcttcacaagcagctgtgaggaccacgtgggagcctctgagccagcatggcccaggtctcagcacacagcaagcgactaatccatgt

SEQ ID NO: 4669 - DNA, 122 bp, Homo sapiens
  misc_feature (61)..(62): /note="This region represents a CpG dinucleotide"
  misc_feature (61)..(61): /note="Nucleotide may be methylated to form 5-methylcytosine"
gggttacaagtgagcaaggcaaatgacattatgtgaatacagtttaaacgataacacacacgggtaacccagtgcaggaaataatacaactttccctcccttgttttcatttgcattttact

SEQ ID NO: 4670 - DNA, 122 bp, Homo sapiens
  misc_feature (61)..(62): /note="This region represents a CpG dinucleotide"
  misc_feature (61)..(61): /note="Nucleotide may be methylated to form 5-methylcytosine"
caagcgagggagggagggagggagagattatttctatgtttcctggtcaacatagtgagacgctgtctctacagaagatcaaaaaatgtgttggctgagcatgagcctggtggtgtgtgcct

SEQ ID NO: 4671 - DNA, 122 bp, Homo sapiens
  misc_feature (61)..(62): /note="This region represents a CpG dinucleotide"
  misc_feature (61)..(61): /note="Nucleotide may be methylated to form 5-methylcytosine"
tcctgaccgactggttccttggcgagagcaacagcagtgagtcaggagcaggagcagaagcgggcagaccacagctcggcaccactttcgacggtgtcttcctcaaagagctctaacttttt

SEQ ID NO: 4672 - DNA, 122 bp, Homo sapiens
  misc_feature (61)..(62): /note="This region represents a CpG dinucleotide"
  misc_feature (61)..(61): /note="Nucleotide may be methylated to form 5-methylcytosine"
ccgtggatgtgcagctgccttgcgccttagtgtgtcatctgtaaaatgaggtaatagcaacgtatgtctcatgggttactactgtcagagtcaaatgaggtaattgtaggtaacgccctttg

SEQ ID NO: 4673 - DNA, 122 bp, Homo sapiens
  misc_feature (61)..(62): /note="This region represents a CpG dinucleotide"
  misc_feature (61)..(61): /note="Nucleotide may be methylated to form 5-methylcytosine"
accagtatgactaaggaagggaatttatcttaattaagttaaatagccacatgtggctgacggctgagattttattgtgcaatactgctctagaaagttctctgagatttccataaattcta

SEQ ID NO: 4674 - DNA, 122 bp, Homo sapiens
  misc_feature (61)..(62): /note="This region represents a CpG dinucleotide"
  misc_feature (61)..(61): /note="Nucleotide may be methylated to form 5-methylcytosine"
gggcctcccaaagtgctgggattacaggcatgagctaccgcgcccggcccccaccctccccgttacatttttaacaggagaaaagagggaccggggaccccacaaatacacctctttgcatc

SEQ ID NO: 4675 - DNA, 122 bp, Homo sapiens
  misc_feature (61)..(62): /note="This region represents a CpG dinucleotide"
  misc_feature (61)..(61): /note="Nucleotide may be methylated to form 5-methylcytosine"
gaggccctagacagggagcacctggcaagtcacactcccttgaccacaggactcccactccgctgcttgagtaaacataattatcaagacaatagcagctgtgacttgtcttctggtgccaa

SEQ ID NO: 4676 - DNA, 122 bp, Homo sapiens
  misc_feature (61)..(62): /note="This region represents a CpG dinucleotide"
  misc_feature (61)..(61): /note="Nucleotide may be methylated to form 5-methylcytosine"
cttggccttttgccatgtgtgtaccatccactgggagctgttttcccttgtcctttaaagcgtatccgactctatctccagtgctcttctagcaagctgttacagtaagcataaaaacaagc

SEQ ID NO: 4677 - DNA, 122 bp, Homo sapiens
  misc_feature (61)..(62): /note="This region represents a CpG dinucleotide"
  misc_feature (61)..(61): /note="Nucleotide may be methylated to form 5-methylcytosine"
tgtgaaacacctctccagctgaataagggtgtggctgtgcagctcaatgcagcgaaggtacgtgtcatcaagtcctgtaagcacaagaagtgagaagagaaactgtcagccaccagtccttg

SEQ ID NO: 4678 - DNA, 122 bp, Homo sapiens
  misc_feature (61)..(62): /note="This region represents a CpG dinucleotide"
  misc_feature (61)..(61): /note="Nucleotide may be methylated to form 5-methylcytosine"
aaacagaacattctccactccaatcctgtcaagcaatatggggctaagtagttttcttcccgtttgatagaaaagcagccgaattgaagaacatctgaaattcaatggaacaaaggctaaat

SEQ ID NO: 4679 - DNA, 122 bp, Homo sapiens
  misc_feature (61)..(62): /note="This region represents a CpG dinucleotide"
  misc_feature (61)..(61): /note="Nucleotide may be methylated to form 5-methylcytosine"
ccacccacaacatttgcccaagttactgaagcaacagacttaattcttacaacatgctttcgttatgtgttgtgatttccatattttaaagttatttcaaattgatcgtatttaagaaaatc

SEQ ID NO: 4680 - DNA, 122 bp, Homo sapiens
  misc_feature (61)..(62): /note="This region represents a CpG dinucleotide"
  misc_feature (61)..(61): /note="Nucleotide may be methylated to form 5-methylcytosine"
catctggaaagaggggtcactgagacacagagagaaggtaaatgactaatcaaggtcttacgactagtaagctgaagcatggctttaaatggagagagtgtgacttctctggccatgttcta

SEQ ID NO: 4681 - DNA, 122 bp, Homo sapiens
  misc_feature (61)..(62): /note="This region represents a CpG dinucleotide"
  misc_feature (61)..(61): /note="Nucleotide may be methylated to form 5-methylcytosine"
gtgcgtattgcctcagtggaggcgctccgctggtcctcctagagtttggtgccctgccgccgctgccccgccacgactgcggctgcggctgctccgggcagtgctgcggccgccgcgggccc

SEQ ID NO: 4682 - DNA, 122 bp, Homo sapiens
  misc_feature (61)..(62): /note="This region represents a CpG dinucleotide"
  misc_feature (61)..(61): /note="Nucleotide may be methylated to form 5-methylcytosine"
ctctgtctctgcctagccactaacacactgctgcctccttcactaaggaagcctttctgacgcttctgaggacactgtgattcccatgggtaaccatcatgactcctccacacatgtggtct

SEQ ID NO: 4683 - DNA, 122 bp, Homo sapiens
  misc_feature (61)..(62): /note="This region represents a CpG dinucleotide"
  misc_feature (61)..(61): /note="Nucleotide may be methylated to form 5-methylcytosine"
atgtcctctatgatgtcactgtcatcatcattttacagacacactgcgactccaagtggtcgttactagttcacaatcaagtagctctcgttcatcttctcgttcatcttcaactctatgat

SEQ ID NO: 4684 - DNA, 122 bp, Homo sapiens
  misc_feature (61)..(62): /note="This region represents a CpG dinucleotide"
  misc_feature (61)..(61): /note="Nucleotide may be methylated to form 5-methylcytosine"
gaatattacaccacatccttatcacagctagggggttttggtaacaaaagccaaaaatcccggtatctactggatttaggtggccagaaatgcaatcatttgaagaacagatgcagaacagg

SEQ ID NO: 4685 - DNA, 122 bp, Homo sapiens
  misc_feature (61)..(62): /note="This region represents a CpG dinucleotide"
  misc_feature (61)..(61): /note="Nucleotide may be methylated to form 5-methylcytosine"
ggctcccttggcaggaggcaatgggaagattctcccgagggtgtccctctggctggcctgcgtgccccagggcggggcgataaaactaacttccctttccacggacttcactgctcccagga

SEQ ID NO: 4686 - DNA, 122 bp, Homo sapiens
  misc_feature (61)..(62): /note="This region represents a CpG dinucleotide"
  misc_feature (61)..(61): /note="Nucleotide may be methylated to form 5-methylcytosine"
caaattagattacagaatcagcatttagtaaatctcagcctccttcctttcccaaactagcgactcatcctcgagtttaagaaagaacacaggaaggaaagaaggcaatatccctctctgct

SEQ ID NO: 4687 - DNA, 122 bp, Homo sapiens
  misc_feature (61)..(62): /note="This region represents a CpG dinucleotide"
  misc_feature (61)..(61): /note="Nucleotide may be methylated to form 5-methylcytosine"
gcatgcaggatagaccctgggagccaacctttaaattccttgaaagaaagcaagcaagcacgccaggctgcaaaaggaaagggcaaaacagccctatggcccttgacaaaccagcagggaga

SEQ ID NO: 4688 - DNA, 122 bp, Homo sapiens
  misc_feature (61)..(62): /note="This region represents a CpG dinucleotide"
  misc_feature (61)..(61): /note="Nucleotide may be methylated to form 5-methylcytosine"
aggtaaggatcgctgggcgtttgggtttgggggtgccatagacagtgaaagtgacagagccgtatggtgtctccacagagtgagtctgcaggaaaacagggcaccaagagctaggctcagag

SEQ ID NO: 4689 - DNA, 122 bp, Homo sapiens
  misc_feature (61)..(62): /note="This region represents a CpG dinucleotide"
  misc_feature (61)..(61): /note="Nucleotide may be methylated to form 5-methylcytosine"
tgacatcctcggtctaaaacgcctggcaccatgtgggagcctggctccgctgcctctcaacgcactggcttgctttttgcttttgagtagcttgaatatcaaaccaagcacaaagggaatca

SEQ ID NO: 4690 - DNA, 122 bp, Homo sapiens
  misc_feature (61)..(62): /note="This region represents a CpG dinucleotide"
  misc_feature (61)..(61): /note="Nucleotide may be methylated to form 5-methylcytosine"
gcaactgggttgatctaggctccacaacttcccctttagctctgcagacctcagcacaggcggagcacgagcccttaaccaggaagggatttttgccccattttatcacagtacttagcttt

SEQ ID NO: 4691 - DNA, 122 bp, Homo sapiens
  misc_feature (61)..(62): /note="This region represents a CpG dinucleotide"
  misc_feature (61)..(61): /note="Nucleotide may be methylated to form 5-methylcytosine"
cccagctcccatgcagttggtgaggctggtcttgctcctgccatgccccactaacagagccgagtttatatccaggcagcctgtgtgcaggactaaaacctagccccaggctataagttttc

SEQ ID NO: 4692 - DNA, 122 bp, Homo sapiens
  misc_feature (61)..(62): /note="This region represents a CpG dinucleotide"
  misc_feature (61)..(61): /note="Nucleotide may be methylated to form 5-methylcytosine"
caggaggtaaggagcaaaggcttaataacccaaacaagatgcacatgcaccttataatcccgtctacatgcagggaggaaggtaaagcagtaaactaggttactgtgttctgtgtatcaccc

SEQ ID NO: 4693 - DNA, 122 bp, Homo sapiens
  misc_feature (61)..(62): /note="This region represents a CpG dinucleotide"
  misc_feature (61)..(61): /note="Nucleotide may be methylated to form 5-methylcytosine"
cagctagataaaaagacctaccaggtgtcctatctggctagatatctgataagaatgaagcgacagctcagctgaagtcaatatagaaggggatgaacacctgggaatcaaactgaattgca

SEQ ID NO: 4694 - DNA, 122 bp, Homo sapiens
  misc_feature (61)..(62): /note="This region represents a CpG dinucleotide"
  misc_feature (61)..(61): /note="Nucleotide may be methylated to form 5-methylcytosine"
caggaacagaagtggggaaaaaatgagcagagagagggtgggggcggcacaggaaccggacgggcactgagcgcctcagccatgcccgctgcacacccaattgtagctcatcctcccaagat

SEQ ID NO: 4695 - DNA, 122 bp, Homo sapiens
  misc_feature (61)..(62): /note="This region represents a CpG dinucleotide"
  misc_feature (61)..(61): /note="Nucleotide may be methylated to form 5-methylcytosine"
tctgcgttgtgtgtttcgcattccggaagcaaattactcatctgattttacttcagctgacgctgattttaaatgtgacttggaatcctcagaataattagctgcctaatttggaggttcat

SEQ ID NO: 4696 - DNA, 122 bp, Homo sapiens
  misc_feature (61)..(62): /note="This region represents a CpG dinucleotide"
  misc_feature (61)..(61): /note="Nucleotide may be methylated to form 5-methylcytosine"
aataaagacataagcaccactaaatttttacattacaaaatacttgctgagctagttaaacgagagcatttaagtggaaataaatgatgtctctaaaatagaatgttcaaaataacaatgga

SEQ ID NO: 4697 - DNA, 122 bp, Homo sapiens
  misc_feature (61)..(62): /note="This region represents a CpG dinucleotide"
  misc_feature (61)..(61): /note="Nucleotide may be methylated to form 5-methylcytosine"
tcttgggatcaaagaaaagaatcaaaattactgaggaatttggaaaaggaagaggcatgacgtgggaacgctaatcccataagagctattaatcatggaccccactcagggaccaggatgct

SEQ ID NO: 4698 - DNA, 122 bp, Homo sapiens
  misc_feature (61)..(62): /note="This region represents a CpG dinucleotide"
  misc_feature (61)..(61): /note="Nucleotide may be methylated to form 5-methylcytosine"
cagcgggagagccggtccgaccccagcccagcctgctgggtcagcattcatcagagaggtcgtcgctgcccgggagctccgcggcttcgagctccacgctggacagaaacctcctcagcgtc

SEQ ID NO: 4699 - DNA, 122 bp, Homo sapiens
  misc_feature (61)..(62): /note="This region represents a CpG dinucleotide"
  misc_feature (61)..(61): /note="Nucleotide may be methylated to form 5-methylcytosine"
gcacgtgcttcagttgcaactggtggttgctaacctgtctctgggtggtgatgttggctacgaacagtggtggcagcgtctgttcactgcagatctgttgctttgctgaatggtggggggtg

SEQ ID NO: 4700 - DNA, 122 bp, Homo sapiens
  misc_feature (61)..(62): /note="This region represents a CpG dinucleotide"
  misc_feature (61)..(61): /note="Nucleotide may be methylated to form 5-methylcytosine"
gtcctatgtttacttctatacaagctttgacatattaaccatctctaatgggaacatatacgcaaaccaaaattgtcaaatctgttggttggtgtgaacatatgcaatactttatttattca

SEQ ID NO: 4701 - DNA, 122 bp, Homo sapiens
  misc_feature (61)..(62): /note="This region represents a CpG dinucleotide"
  misc_feature (61)..(61): /note="Nucleotide may be methylated to form 5-methylcytosine"
acacacggtcacggcgtccccaccggagcacggtcacctgtgcctcatcagccacgtggccgccacagggaagagaactggatcgcaaggcaggtgtttcaagtctggtgaaacccagctct

SEQ ID NO: 4702 - DNA, 122 bp, Homo sapiens
  misc_feature (61)..(62): /note="This region represents a CpG dinucleotide"
  misc_feature (61)..(61): /note="Nucleotide may be methylated to form 5-methylcytosine"
gtgttggttaaaactgcactacttttggtctccatctctgatttgtttctcggtgaatgccgtttaacccctttagtgccagggctgatgatttaggatacatttttatgtgttttaagtag

SEQ ID NO: 4703 - DNA, 122 bp, Homo sapiens
  misc_feature (61)..(62): /note="This region represents a CpG dinucleotide"
  misc_feature (61)..(61): /note="Nucleotide may be methylated to form 5-methylcytosine"
ggggaaaggtccttactgtttttccagacctacagttgtgatagaggctcctcccagccccgcccacagaccccaacagtgccctctctcacaaatggattctggggcttggtctttatttt

SEQ ID NO: 4704 - DNA, 122 bp, Homo sapiens
  misc_feature (61)..(62): /note="This region represents a CpG dinucleotide"
  misc_feature (61)..(61): /note="Nucleotide may be methylated to form 5-methylcytosine"
acccttataacagatcaatgtagatgctatttctagtttcccatttacagatcactgaggcgacttggcacagaaacagatctggctctgtcccacactcagctatttgtgccttacagccc

SEQ ID NO: 4705 - DNA, 122 bp, Homo sapiens
  misc_feature (61)..(62): /note="This region represents a CpG dinucleotide"
  misc_feature (61)..(61): /note="Nucleotide may be methylated to form 5-methylcytosine"
tcttctattggcaaagccagtgcttcaagcctgtatcctctgccctgttaaatttggtcccgcgttctcctggaacaacccatgctgagtcagatgaacaacccatgctgagtcagatacac

SEQ ID NO: 4706 - DNA, 122 bp, Homo sapiens
  misc_feature (61)..(62): /note="This region represents a CpG dinucleotide"
  misc_feature (61)..(61): /note="Nucleotide may be methylated to form 5-methylcytosine"
tttatagtattttcttatagcagcccaaatggactaagacatgactaacacaagatattacgaaatccattcagtgctttaggcagaccagtggatttcagtgtaaaggtagaaaaagttta

SEQ ID NO: 4707 - DNA, 122 bp, Homo sapiens
  misc_feature (61)..(62): /note="This region represents a CpG dinucleotide"
  misc_feature (61)..(61): /note="Nucleotide may be methylated to form 5-methylcytosine"
ttgagcaatgttctgtttgttaaagctgcatttcagaagcttgtatcctcctaaaacaaccgtgatcttactgggggagagagaggtgctacaacagatattgattttagtttttctaagta

SEQ ID NO: 4708 - DNA, 122 bp, Homo sapiens
  misc_feature (61)..(62): /note="This region represents a CpG dinucleotide"
  misc_feature (61)..(61): /note="Nucleotide may be methylated to form 5-methylcytosine"
aattttccatactctcttcctctgcctcagtaaactgtaaggcactatgctggatagaaacgccacagaaaatgaaagcagcctggagtgctgaggttagctgcccacaaaagccacctagg

SEQ ID NO: 4709 - DNA, 122 bp, Homo sapiens
  misc_feature (61)..(62): /note="This region represents a CpG dinucleotide"
  misc_feature (61)..(61): /note="Nucleotide may be methylated to form 5-methylcytosine"
agagagaaaagggacgtgctgcagggtttatcagagaagccaggcaggaaggatcagggacgcagccatccactcaggcaatcacaggcagtgggttgggacccccgaaaggaaaaaaaaag

SEQ ID NO: 4710 - DNA, 122 bp, Homo sapiens
  misc_feature (61)..(62): /note="This region represents a CpG dinucleotide"
  misc_feature (61)..(61): /note="Nucleotide may be methylated to form 5-methylcytosine"
gagatgctccagcagggccagggtacagagcctccaccgccctcccatcggccaggggcacgcaaggggcaaaggtctccagcgagagcacaaatctgacacaatttacttctgacaaggca

SEQ ID NO: 4711 - DNA, 122 bp, Homo sapiens
  misc_feature (61)..(62): /note="This region represents a CpG dinucleotide"
  misc_feature (61)..(61): /note="Nucleotide may be methylated to form 5-methylcytosine"
aagtggtcacttccacacacgtattttctcatttaagtgtcatggaatgagaacattttacgagctaggacctattattctctactgtaggacacaggtcatattattcttttatcacagag

SEQ ID NO: 4712 - DNA, 122 bp, Homo sapiens
  misc_feature (61)..(62): /note="This region represents a CpG dinucleotide"
  misc_feature (61)..(61): /note="Nucleotide may be methylated to form 5-methylcytosine"
cacgagccttgcccagggggaaggagtgtaggcggtcttttatcggctaggatgtaagaccgaaacccagtcatgggttttgatgacccatgactgatggattttccttatacttccaccaa

SEQ ID NO: 4713 - DNA, 122 bp, Homo sapiens
  misc_feature (61)..(62): /note="This region represents a CpG dinucleotide"
  misc_feature (61)..(61): /note="Nucleotide may be methylated to form 5-methylcytosine"
ttgtggacacggcattcatacatgccccagcttatttcaataaggcagatattaagaaaacgtggcctgtaaaggcaatgtatctgtcacttatttgaagctcctttggagaaacttgaaaa

SEQ ID NO: 4714 - DNA, 122 bp, Homo sapiens
  misc_feature (61)..(62): /note="This region represents a CpG dinucleotide"
  misc_feature (61)..(61): /note="Nucleotide may be methylated to form 5-methylcytosine"
ctatgcatacttatcttagtgttcaaaacaatcctcataaactgtaactatcatcattcgcgtgttgcagattaggccactgaaactcacggaggggaagaaacttggctagaagtcacaaa

SEQ ID NO: 4715 - DNA, 122 bp, Homo sapiens
  misc_feature (61)..(62): /note="This region represents a CpG dinucleotide"
  misc_feature (61)..(61): /note="Nucleotide may be methylated to form 5-methylcytosine"
cagcagtcctcacagctgtgcaggagccattctcttggggtctctagcagacagcgcaggcgtgttgactcacatcaggaagttgcaagagctaccatggctgaaaagcctcatgccccaga

SEQ ID NO: 4716 - DNA, 122 bp, Homo sapiens
  misc_feature (61)..(62): /note="This region represents a CpG dinucleotide"
  misc_feature (61)..(61): /note="Nucleotide may be methylated to form 5-methylcytosine"
gaaagctgattcatcattaggacgaggttcaagggagaagtcagtggctgcccacactggcgcatccgtcatgggaactttctatgtcaaaaccctgccaatgaatcatgaacattttagtt

SEQ ID NO: 4717 - DNA, 122 bp, Homo sapiens
  misc_feature (61)..(62): /note="This region represents a CpG dinucleotide"
  misc_feature (61)..(61): /note="Nucleotide may be methylated to form 5-methylcytosine"
ccaacagccccgccggccactggcccaggactcagcgtgccgttcctccaggacgcagaccggggctccctaccagccttgagtgagagaccacaagcagcctctgaagtcatcttcctctc

SEQ ID NO: 4718 - DNA, 122 bp, Homo sapiens
  misc_feature (61)..(62): /note="This region represents a CpG dinucleotide"
  misc_feature (61)..(61): /note="Nucleotide may be methylated to form 5-methylcytosine"
aggctgaggcaggagaattgcttgaacctgggaggtggaggtttcagtgagtggagatcgcgtcactacactccagcctggcgaaagggcaagactcatctcaaaaaaaaaaaaaagaaaaa

SEQ ID NO: 4719 - DNA, 122 bp, Homo sapiens
  misc_feature (61)..(62): /note="This region represents a CpG dinucleotide"
  misc_feature (61)..(61): /note="Nucleotide may be methylated to form 5-methylcytosine"
tcaggaagcactcataaatgccacctcctgtgtactgtcaatagagtaagaagccccaggcgtcttaattaaaggaacaaaaaattagtgtgtggattttaaccaattaatgaatgacacac

SEQ ID NO: 4720 - DNA, 122 bp, Homo sapiens
  misc_feature (61)..(62): /note="This region represents a CpG dinucleotide"
  misc_feature (61)..(61): /note="Nucleotide may be methylated to form 5-methylcytosine"
cagaaacagaaagcaaagactgacagttcattcgttctttaaacaaattacatagctgtacgtttatttactgatgcatgaagggttgcagtgaagagcaaaatgtttaccctaactacttt

SEQ ID NO: 4721 - DNA, 122 bp, Homo sapiens
  misc_feature (61)..(62): /note="This region represents a CpG dinucleotide"
  misc_feature (61)..(61): /note="Nucleotide may be methylated to form 5-methylcytosine"
taggttgcttgtagcctgctggttgcactgtttatgaaacagctgtgaggacaggtgggccgtaatctctgggtagctaaagcccagcagcagcccgaggatcatgtgtcaaccctgtaata

SEQ ID NO: 4722 - DNA, 122 bp, Homo sapiens
  misc_feature (61)..(62): /note="This region represents a CpG dinucleotide"
  misc_feature (61)..(61): /note="Nucleotide may be methylated to form 5-methylcytosine"
cccctttctgtatacgcccaaccacacaaggaagtgtattattgttatcccagttttaggcgcagaaaagttaggggaacgtgacagagaaatcctggctccacatttactagtaggacttt

SEQ ID NO: 4723 - DNA, 122 bp, Homo sapiens
  misc_feature (61)..(62): /note="This region represents a CpG dinucleotide"
  misc_feature (61)..(61): /note="Nucleotide may be methylated to form 5-methylcytosine"
gaactcccgacttcagttgatcctcctgccttggcctcccaaagtgctggggattataggcgtgagccaccacgcccagccagaaatgtacttttatatgttatactttatatgtgttactc

SEQ ID NO: 4724 - DNA, 122 bp, Homo sapiens
  misc_feature (61)..(62): /note="This region represents a CpG dinucleotide"
  misc_feature (61)..(61): /note="Nucleotide may be methylated to form 5-methylcytosine"
gatgtgcccgaggagggtgccacgtaacagaatgtcaagcgacaacactctgtctcacgacgtacatccttccaaagtgacctaaggtgaacttcctcgcctcctgccaaagagctaaggca

SEQ ID NO: 4725 - DNA, 122 bp, Homo sapiens
  misc_feature (61)..(62): /note="This region represents a CpG dinucleotide"
  misc_feature (61)..(61): /note="Nucleotide may be methylated to form 5-methylcytosine"
cttctggtgacgagctggcaatctttgtggttcggcttcacaaagtgttccccctatgtgcgtgtctgtgtcccaatttcctcttttagtaaagattttggttctattggattaggagtcca

SEQ ID NO: 4726 - DNA, 122 bp, Homo sapiens
  misc_feature (61)..(62): /note="This region represents a CpG dinucleotide"
  misc_feature (61)..(61): /note="Nucleotide may be methylated to form 5-methylcytosine"
aacattaatgggggtctcgcgttagtatttgaagagtcatccgcttctgaaaagtgttgacgcaaaaccacgacgtctaggcaggaagtggccaattgaaccagggcacgagctctcatttc

SEQ ID NO: 4727 - DNA, 122 bp, Homo sapiens
  misc_feature (61)..(62): /note="This region represents a CpG dinucleotide"
  misc_feature (61)..(61): /note="Nucleotide may be methylated to form 5-methylcytosine"
gagctgaggagggagcaacaggccggggatgaatgggcaaacgtcaggagtcaaaagccacggaccttgatcacttcctgcatgctggacattgatgagagcatggtacaagtatccactca

SEQ ID NO: 4728 - DNA, 122 bp, Homo sapiens
  misc_feature (61)..(62): /note="This region represents a CpG dinucleotide"
  misc_feature (61)..(61): /note="Nucleotide may be methylated to form 5-methylcytosine"
aaaaactgatgcttaggctttaaactatgtggagcacgcccaaggctactttgtagaaagcgaaggtctgtgcaatgacctgctccctggagcccttgtaatagttgttgggaaggtctcag

SEQ ID NO: 4729 - DNA, 122 bp, Homo sapiens
  misc_feature (61)..(62): /note="This region represents a CpG dinucleotide"
  misc_feature (61)..(61): /note="Nucleotide may be methylated to form 5-methylcytosine"
cttatgtgatgtccttaaactaaatgtttctcgaaacccctggctctagtttttcagtcacggcctctttctagcttcagtgccccaccctaccattcaatcaaaagccgccatcccgttct

SEQ ID NO: 4730 - DNA, 122 bp, Homo sapiens
  misc_feature (61)..(62): /note="This region represents a CpG dinucleotide"
  misc_feature (61)..(61): /note="Nucleotide may be methylated to form 5-methylcytosine"
aaagaaggatatatcacaagacagccttagagactgaacactgtggctattataacaaagcggcaaaatgaatcattcatgcgtagagggagtatacaagcattactagctacggctacttt

SEQ ID NO: 4731 - DNA, 122 bp, Homo sapiens
  misc_feature (61)..(62): /note="This region represents a CpG dinucleotide"
  misc_feature (61)..(61): /note="Nucleotide may be methylated to form 5-methylcytosine"
tcagcaaaaatgtaggacacgtgtactcagggctaggaactatgccagctggagctgaaacgctggatcccacacagcccctcccctcagaagccagcaatctcagaggggagacaaacaag

SEQ ID NO: 4732 - DNA, 122 bp, Homo sapiens
  misc_feature (61)..(62): /note="This region represents a CpG dinucleotide"
  misc_feature (61)..(61): /note="Nucleotide may be methylated to form 5-methylcytosine"
atgagccgtgtacaagttacattgatggttggtctgggtttctgattcttgaaaaacactcgagcagaacatttccccaaacgtccctcaccttcctgaagtaaagactgtggagttaaaca

SEQ ID NO: 4733 - DNA, 122 bp, Homo sapiens
  misc_feature (61)..(62): /note="This region represents a CpG dinucleotide"
  misc_feature (61)..(61): /note="Nucleotide may be methylated to form 5-methylcytosine"
cctgtagtttgccccccttaaaactgaactttgtccaaacctgttctaaatatgtgtgtgcgtgtgcatgcatctgggtgttggggaggagcggtcgtaaagttccttttaaatttcaccta

SEQ ID NO: 4734 - DNA, 122 bp, Homo sapiens
  misc_feature (61)..(62): /note="This region represents a CpG dinucleotide"
  misc_feature (61)..(61): /note="Nucleotide may be methylated to form 5-methylcytosine"
tttcattgaaaatgtttgcctaaatcgtacaatctcattttatcatgtagtctgttgccacgacacttacagaagccagtaattaactcaggattccagagtgaaagatagaaagctcaatg

SEQ ID NO: 4735 - DNA, 122 bp, Homo sapiens
  misc_feature (61)..(62): /note="This region represents a CpG dinucleotide"
  misc_feature (61)..(61): /note="Nucleotide may be methylated to form 5-methylcytosine"
agtatgaacccttatttggcagtatctgttcctctttgctgtcgtagctgcttcctgttacgtgaggtgcccctcttcctcctcattcttaaattttgaaactctttttaaggttggactta

SEQ ID NO: 4736 - DNA, 122 bp, Homo sapiens
  misc_feature (61)..(62): /note="This region represents a CpG dinucleotide"
  misc_feature (61)..(61): /note="Nucleotide may be methylated to form 5-methylcytosine"
cgtaattggttccatgtgtgcagtaggagagtcagtgagagggtgagagagacggggagacggaaacctcttaaccacggctcacacggcgtctttggtgaggtggtttaggtttacatctc

SEQ ID NO: 4737 - DNA, 122 bp, Homo sapiens
  misc_feature (61)..(62): /note="This region represents a CpG dinucleotide"
  misc_feature (61)..(61): /note="Nucleotide may be methylated to form 5-methylcytosine"
atcaaatatgcctgtgtaatataggcatcccccttaatatcaccttaaacatttatgtaccgtttaaatctctgttaccttgagaacttggttttgggggttttctgttttggttggttggt

SEQ ID NO: 4738 - DNA, 122 bp, Homo sapiens
  misc_feature (61)..(62): /note="This region represents a CpG dinucleotide"
  misc_feature (61)..(61): /note="Nucleotide may be methylated to form 5-methylcytosine"
attacctaccagttaggaagttgtgtaaattcaatgacagccatcttacagaggagcttgcggacacacaaggaagctgatgcatagtcaacatttaacaagtgttatttacagtacttcct

SEQ ID NO: 4739 - DNA, 122 bp, Homo sapiens
  misc_feature (61)..(62): /note="This region represents a CpG dinucleotide"
  misc_feature (61)..(61): /note="Nucleotide may be methylated to form 5-methylcytosine"
tgtttttgcactaactgctcttttgattgtttttagttcttgcctctgctctcctgtgtacgcatctaggaggctttcagagtgcttctctgtaatagtttctgttttgttacttttaatcc

SEQ ID NO: 4740 - DNA, 122 bp, Homo sapiens
  misc_feature (61)..(62): /note="This region represents a CpG dinucleotide"
  misc_feature (61)..(61): /note="Nucleotide may be methylated to form 5-methylcytosine"
caaaaaaaaaaaaaaaccacctgtcgggctgtggttgggtgtatgacgtgtcttggtccacgtcagttcctggggaatctctgcttccctttctgtgctcccctttcccatgggcccccgcc

SEQ ID NO: 4741 - DNA, 122 bp, Homo sapiens
  misc_feature (61)..(62): /note="This region represents a CpG dinucleotide"
  misc_feature (61)..(61): /note="Nucleotide may be methylated to form 5-methylcytosine"
cagtaagcctgagaaaggggctgcttcggtctccagccacaactctgtgaagccaagccacgcgctgtcttccagagagggaatagaagtttccatcctgtgcacccagtggttgagcaaga

SEQ ID NO: 4742 - DNA, 122 bp, Homo sapiens
  misc_feature (61)..(62): /note="This region represents a CpG dinucleotide"
  misc_feature (61)..(61): /note="Nucleotide may be methylated to form 5-methylcytosine"
ggggaggcagctgctcacacagcagagggtgtttctcaaagtgggatcccccaccagcagcgccagtcagaatcacctgagaacttattagaaattttggccgggcgcggtggttcatgcct

SEQ ID NO: 4743 - DNA, 122 bp, Homo sapiens
  misc_feature (61)..(62): /note="This region represents a CpG dinucleotide"
  misc_feature (61)..(61): /note="Nucleotide may be methylated to form 5-methylcytosine"
cacatacacactcaaacataaataagcaatcaagtcattgcatttctacaaaactgtatacgtgattatgtgtatgattagtttattacagtggtatgatcaagggagaagtcattagttgc

SEQ ID NO: 4744 - DNA, 122 bp, Homo sapiens
  misc_feature (61)..(62): /note="This region represents a CpG dinucleotide"
  misc_feature (61)..(61): /note="Nucleotide may be methylated to form 5-methylcytosine"
cctgttttacaggacactcacagctcctggcacctggcagcttttggggtttcctctccccgccttgcacaggttgactttatttccagatcttttcaaaactcctgtggtaacacatcaaa

SEQ ID NO: 4745 - DNA, 122 bp, Homo sapiens
  misc_feature (61)..(62): /note="This region represents a CpG dinucleotide"
  misc_feature (61)..(61): /note="Nucleotide may be methylated to form 5-methylcytosine"
cagggaaaaccatgtgcacagacagaaactggcttccctaaatccagttcctagcagagacgagacaaaaattcacatcaactgactccaaacctgcagataaaattgagaggcaggacaac

SEQ ID NO: 4746 - DNA, 122 bp, Homo sapiens
  misc_feature (61)..(62): /note="This region represents a CpG dinucleotide"
  misc_feature (61)..(61): /note="Nucleotide may be methylated to form 5-methylcytosine"
agtcacacagcccatcatcctcagatgcttcaatctgaggtctgactaagtcagcaagtgcgagcaaagggtgaccagggtgttgagctgagactgcaggcaacacctccctgtaggggtgt

SEQ ID NO: 4747 - DNA, 122 bp, Homo sapiens
  misc_feature (61)..(62): /note="This region represents a CpG dinucleotide"
  misc_feature (61)..(61): /note="Nucleotide may be methylated to form 5-methylcytosine"
agagcaggaggtgctgtttgaaaatcacatttctgagaaagggttcagatccagaacatacgaagaagtcagaaataaccaagggcatgtcagaaataaccaagggcatgtcagaaataacc

SEQ ID NO: 4748 - DNA, 122 bp, Homo sapiens
  misc_feature (61)..(62): /note="This region represents a CpG dinucleotide"
  misc_feature (61)..(61): /note="Nucleotide may be methylated to form 5-methylcytosine"
cccagtgatatatcttttttaaggtcatgcagctggttagtagaaaacgttgtatcagaacgttgctaggacattgtctacgatgacgtcatgcctctacaatctcctcattgttgggaaaa

SEQ ID NO: 4749 - DNA, 122 bp, Homo sapiens
  misc_feature (61)..(62): /note="This region represents a CpG dinucleotide"
  misc_feature (61)..(61): /note="Nucleotide may be methylated to form 5-methylcytosine"
gtggtgactcaggttgcctggggacagttacacttctccttcctactggaagttgttacacgcagaacattactcatccctgctcgggagagtgaatagaaagcacttcagagaacattgga

SEQ ID NO: 4750 - DNA, 122 bp, Homo sapiens
  misc_feature (61)..(62): /note="This region represents a CpG dinucleotide"
  misc_feature (61)..(61): /note="Nucleotide may be methylated to form 5-methylcytosine"
cacctcttcagcaatgtcctttcagttttcctgccagacccatttaagttttttattgtccgtctgggtgatatcatctaactcatggttttagtctctgttgttgactgtagatttctgga

SEQ ID NO: 4751 - DNA, 122 bp, Homo sapiens
  misc_feature (61)..(62): /note="This region represents a CpG dinucleotide"
  misc_feature (61)..(61): /note="Nucleotide may be methylated to form 5-methylcytosine"
agtgtgagctcaggccatttcacactgccttcgttgagtctgtttggtgctgagaagccacgggaatgagggatgggcagggggccaaggcctgggtggcagacatgcttcttgcatgtcct

SEQ ID NO: 4752 - DNA, 122 bp, Homo sapiens
  misc_feature (61)..(62): /note="This region represents a CpG dinucleotide"
  misc_feature (61)..(61): /note="Nucleotide may be methylated to form 5-methylcytosine"
ctcaggtgatccgcccgcctcggcctcccaaaatgctgggattacaggcgtgagccactccgcctggcctcaagtctttacggtagattatgtttccacaattttctgcaaatgttttccgt

SEQ ID NO: 4753 - DNA, 122 bp, Homo sapiens
  misc_feature (61)..(62): /note="This region represents a CpG dinucleotide"
  misc_feature (61)..(61): /note="Nucleotide may be methylated to form 5-methylcytosine"
cctggggctctgctgctaagacagaaggagacgagggagaaagagaaagaggtgtcgctgcggggcctgctaggagcagcccgtctctggccaaacagagatctcatcccaattgcccggaa

SEQ ID NO: 4754 - DNA, 122 bp, Homo sapiens
  misc_feature (61)..(62): /note="This region represents a CpG dinucleotide"
  misc_feature (61)..(61): /note="Nucleotide may be methylated to form 5-methylcytosine"
aggatctaagtaggtgctgtggctccaggccgggaagttgagtcaggaggggtgggcgtccgaggaggtggaaggaatatctcattcttatgtactctgtttcggttttaggcttatgggtt

SEQ ID NO: 4755 - DNA, 122 bp, Homo sapiens
  misc_feature (61)..(62): /note="This region represents a CpG dinucleotide"
  misc_feature (61)..(61): /note="Nucleotide may be methylated to form 5-methylcytosine"
ctatctatctatctatctatctatccatcttaaggaattggctcatcagtctgtggaggccgcaagtctgagatctgcagggcaggccaacaggctggagacccagggaacggttgatggtg

SEQ ID NO: 4756 - DNA, 122 bp, Homo sapiens
  misc_feature (61)..(62): /note="This region represents a CpG dinucleotide"
  misc_feature (61)..(61): /note="Nucleotide may be methylated to form 5-methylcytosine"
agttgagagatttaaagacaagaccatcgggacaacttttactaatctttgtgaaaaagacgcagtatgacttcaagaagcagcctcatggttaagagaaaggggttctggacctgggctgc

SEQ ID NO: 4757 - DNA, 122 bp, Homo sapiens
  misc_feature (61)..(62): /note="This region represents a CpG dinucleotide"
  misc_feature (61)..(61): /note="Nucleotide may be methylated to form 5-methylcytosine"
ctggcttttgcacagctctgccaacaggtgccactgcaaatgtgtggtgcccaatgctcacgagtgcttttacttgtggtcaacagccccttgcgttcctgagacagagtttccaaactttt

SEQ ID NO: 4758 - DNA, 122 bp, Homo sapiens
  misc_feature (61)..(62): /note="This region represents a CpG dinucleotide"
  misc_feature (61)..(61): /note="Nucleotide may be methylated to form 5-methylcytosine"
atctcccggcgaggcctccgtggctgcattgccggcaatgactaggtgttttatgctgaacgttgaagatattttccactggagatttaacacggaacatcaagaaccattgaaatcactca

SEQ ID NO: 4759 - DNA, 122 bp, Homo sapiens
  misc_feature (61)..(62): /note="This region represents a CpG dinucleotide"
  misc_feature (61)..(61): /note="Nucleotide may be methylated to form 5-methylcytosine"
aatcaaatacggacttagcacatcgcactcactggcactgtaacttcaccgaagactcagcgttcactaggtggctaagtgctattggcaagagttcacagatgaaacacttcaagagacaa

SEQ ID NO: 4760 - DNA, 122 bp, Homo sapiens
  misc_feature (61)..(62): /note="This region represents a CpG dinucleotide"
  misc_feature (61)..(61): /note="Nucleotide may be methylated to form 5-methylcytosine"
ctctccaaagtttctctctccttccatcactgctggtctcatatcagtccagctcacccccgccttcctccaggaaaggactcctgacctcattaggctcgcgccccctcccgctgacctcc

SEQ ID NO: 4761 - DNA, 122 bp, Homo sapiens
  misc_feature (61)..(62): /note="This region represents a CpG dinucleotide"
  misc_feature (61)..(61): /note="Nucleotide may be methylated to form 5-methylcytosine"
ttagcaggagcttttcggtaacgaccctgcacaccacctcccctccccgcacccccaaggcgcatcgctgatgctgactgtcacggtcatgctggtaggacccccaggcgcagacacgggga

SEQ ID NO: 4762 - DNA, 122 bp, Homo sapiens
  misc_feature (61)..(62): /note="This region represents a CpG dinucleotide"
  misc_feature (61)..(61): /note="Nucleotide may be methylated to form 5-methylcytosine"
gaggaaataggctcagagaggttaagtaactatattacacctaacagtatgccccactaacgaatgaggaaataggctcagagaagttaagtaacttgacgtcagttatccagctactaagt

SEQ ID NO: 4763 - DNA, 122 bp, Homo sapiens
  misc_feature (61)..(62): /note="This region represents a CpG dinucleotide"
  misc_feature (61)..(61): /note="Nucleotide may be methylated to form 5-methylcytosine"
agagtcagggaggccaggagcctcagcctgagccctggctcacaggttctgtgctgtcaccgagctacttacttcacccctactcttgcctggtctttcccttgggctgtgagtcagaagac

SEQ ID NO: 4764 - DNA, 122 bp, Homo sapiens
  misc_feature (61)..(62): /note="This region represents a CpG dinucleotide"
  misc_feature (61)..(61): /note="Nucleotide may be methylated to form 5-methylcytosine"
ggtttcccatccctgaacagattgcacaatgtggggaggatcagagggcagggatctagacgtcaggccaactgagagctgacagggaagagagagctagctagtatagacatagacatgag

SEQ ID NO: 4765 - DNA, 122 bp, Homo sapiens
  misc_feature (61)..(62): /note="This region represents a CpG dinucleotide"
  misc_feature (61)..(61): /note="Nucleotide may be methylated to form 5-methylcytosine"
cgcatcagaatttcaggcatgtggggcattgagctgccatgaaataccagagccatcccccgtgcctgacaggtcccagacgccccagggtccctgctcctgggagggcaaagaggaggagt

SEQ ID NO: 4766 - DNA, 122 bp, Homo sapiens
  misc_feature (61)..(62): /note="This region represents a CpG dinucleotide"
  misc_feature (61)..(61): /note="Nucleotide may be methylated to form 5-methylcytosine"
ctccgagctttcaggaggaaccaacgctgcccgacaccttgattttagctctttaagtatcggtttagacactactgaccttcagaagtgcaagaagataaatctattgttttaagccacca

SEQ ID NO: 4767 - DNA, 122 bp, Homo sapiens
  misc_feature (61)..(62): /note="This region represents a CpG dinucleotide"
  misc_feature (61)..(61): /note="Nucleotide may be methylated to form 5-methylcytosine"
ctcaggattgtgttaatacctggaacatgcacaaagatacatacatacctggacagattccgtgttaagcttctatcactttttcttcctcatctaatagcagaaagtgctgattatgtcat

SEQ ID NO: 4768 - DNA, 122 bp, Homo sapiens
  misc_feature (61)..(62): /note="This region represents a CpG dinucleotide"
  misc_feature (61)..(61): /note="Nucleotide may be methylated to form 5-methylcytosine"
tgaatcttaagcacattatgctaagtaaaatgaggcagtcacaaaaggacaaatactatacggtctcactcagacgaggcacttatggtagtcaaattcagagacagaaagtagaatgggat

SEQ ID NO: 4769 - DNA, 122 bp, Homo sapiens
  misc_feature (61)..(62): /note="This region represents a CpG dinucleotide"
  misc_feature (61)..(61): /note="Nucleotide may be methylated to form 5-methylcytosine"
tgttctaatgaatttggagcaccattattaatggagacctcagcaaatcattaatgggttcgtgtctacttccatgactggatcctgggaacgaatcctatgttgtaattatttttattttt

SEQ ID NO: 4770 - DNA, 122 bp, Homo sapiens
  misc_feature (61)..(62): /note="This region represents a CpG dinucleotide"
  misc_feature (61)..(61): /note="Nucleotide may be methylated to form 5-methylcytosine"
tccacaagctacccagtggctagagctctagtggctttcccataccttgctaggtctcttcgtaattggctggactcacctctgtatctttattaattcactggctggactccaacctcata

SEQ ID NO: 4771 - DNA, 122 bp, Homo sapiens
  misc_feature (61)..(62): /note="This region represents a CpG dinucleotide"
  misc_feature (61)..(61): /note="Nucleotide may be methylated to form 5-methylcytosine"
atatcgctgtgagccgcagtgacacacattcatttccgctggaggcagccctagggagtccggcggccctgcagctgtatttcatctctttgaactgtatggcctcccctataattcaggaa

SEQ ID NO: 4772 - DNA, 122 bp, Homo sapiens
  misc_feature (61)..(62): /note="This region represents a CpG dinucleotide"
  misc_feature (61)..(61): /note="Nucleotide may be methylated to form 5-methylcytosine"
aacaggcaccagtataccctcctcctgctgtgcatcttcccctgaccacagcttcctgcccgtgcccagtacgcagatgctgtgccagcttcccccatgcccaccggcaggggctctgctgc

SEQ ID NO: 4773 - DNA, 122 bp, Homo sapiens
  misc_feature (61)..(62): /note="This region represents a CpG dinucleotide"
  misc_feature (61)..(61): /note="Nucleotide may be methylated to form 5-methylcytosine"
cgcagcggggcggggcgggcctggagctgcacccgcttctgggtggacgcacttggcgagcggcgcgggatgcagacggctgcgaggcgctgggcacaggtcagacgtcagtacccgcaggg

SEQ ID NO: 4774 - DNA, 122 bp, Homo sapiens
  misc_feature (61)..(62): /note="This region represents a CpG dinucleotide"
  misc_feature (61)..(61): /note="Nucleotide may be methylated to form 5-methylcytosine"
aaccaggttagaattcaggcctgtttgattttgaaggctgtgcagtttttcctttatccccgattgagtcatcttatttcacattttgtattggaatggagacgagagtctattttctacca

SEQ ID NO: 4775 - DNA, 122 bp, Homo sapiens
  misc_feature (61)..(62): /note="This region represents a CpG dinucleotide"
  misc_feature (61)..(61): /note="Nucleotide may be methylated to form 5-methylcytosine"
cagtttagtcaaccagtgtaagtatcatgcatccttgaagattatctatgtagaccaaaacggagcctggtcttgcctagcataaagtctaggatgactaataccagtgttgatcataatcc

SEQ ID NO: 4776 - DNA, 122 bp, Homo sapiens
  misc_feature (61)..(62): /note="This region represents a CpG dinucleotide"
  misc_feature (61)..(61): /note="Nucleotide may be methylated to form 5-methylcytosine"
ccaagaactccagctacacaggcctcctttcatggtttcatatgagccagcctcttcctccgcccatgtaacactcttcccccaagcctgcctggctagttcctactcatctttcacttcct

SEQ ID NO: 4777 - DNA, 122 bp, Homo sapiens
  misc_feature (61)..(62): /note="This region represents a CpG dinucleotide"
  misc_feature (61)..(61): /note="Nucleotide may be methylated to form 5-methylcytosine"
actcattaatacgtttccagggctgtgaacaatgggagcttttattacccagcaaagaagcgctcactcacttgactgcagcagccgcttagcagtggaaggacagcccctccgttggggct

SEQ ID NO: 4778 - DNA, 122 bp, Homo sapiens
  misc_feature (61)..(62): /note="This region represents a CpG dinucleotide"
  misc_feature (61)..(61): /note="Nucleotide may be methylated to form 5-methylcytosine"
aggtggacctgatggccagagctactagcggggaccaggggtaacatgggtccccctccccgagccatgaagagctgcctgcggccatcttggccctcgcaccccgtctctgtcaccccagg

SEQ ID NO: 4779 - DNA, 122 bp, Homo sapiens
  misc_feature (61)..(62): /note="This region represents a CpG dinucleotide"
  misc_feature (61)..(61): /note="Nucleotide may be methylated to form 5-methylcytosine"
gggagagagatgagtaagatgagatgaccaatccccatctaccgtgtgtgcacacaaccacgcattcgcaagggtgtgggcacacgaacaccgacatacacctacctacagcagaaagcaga

SEQ ID NO: 4780 - DNA, 122 bp, Homo sapiens
  misc_feature (61)..(62): /note="This region represents a CpG dinucleotide"
  misc_feature (61)..(61): /note="Nucleotide may be methylated to form 5-methylcytosine"
cctaatttcctgctccagggcagtaaacacaaatatttcttcaaggggtgatgaaaacctcggaagttttaatttgaggttatctgctacgaaacagtatttctaaaaggctaaagtgataa

SEQ ID NO: 4781 - DNA, 122 bp, Homo sapiens
  misc_feature (61)..(62): /note="This region represents a CpG dinucleotide"
  misc_feature (61)..(61): /note="Nucleotide may be methylated to form 5-methylcytosine"
gagcttgagtaagaagtcttgggtgtagggatacagggtgggaatacaggtcaaaggaaccggttcagttgtttcagttagtcaccgaggaagtgatgccacagcactgtatttttaggaaa

SEQ ID NO: 4782 - DNA, 122 bp, Homo sapiens
  misc_feature (61)..(62): /note="This region represents a CpG dinucleotide"
  misc_feature (61)..(61): /note="Nucleotide may be methylated to form 5-methylcytosine"
ctgacaggagagaggaatttcagagagaggagggaggcagtgccagaacttgtaaggagacggagggtgaaggtgtctgtgttcacattctaactatagttacctttgcttcctgagtgaca

SEQ ID NO: 4783 - DNA, 122 bp, Homo sapiens
  misc_feature (61)..(62): /note="This region represents a CpG dinucleotide"
  misc_feature (61)..(61): /note="Nucleotide may be methylated to form 5-methylcytosine"
cctaaatttatcttaaatgcagtataacaaatttggaatttatctgcaacttacttgaagcgaggaagagctgatgtgataaattacgctaacaagtaaaatctgtgagttgagagatttaa

SEQ ID NO: 4784 - DNA, 122 bp, Homo sapiens
  misc_feature (61)..(62): /note="This region represents a CpG dinucleotide"
  misc_feature (61)..(61): /note="Nucleotide may be methylated to form 5-methylcytosine"
agtcgcaggaggaattgatgcagcatggtgggagtggacgtcactttcaaggtgatcagccgtgaagagcggcaaacacagcgtcttggctcgagttcccccaaacggtgccccctggaaca

SEQ ID NO: 4785 - DNA, 122 bp, Homo sapiens
  misc_feature (61)..(62): /note="This region represents a CpG dinucleotide"
  misc_feature (61)..(61): /note="Nucleotide may be methylated to form 5-methylcytosine"
tcttgattaatcgtttcctttatcaactagcatatttaggttgataagagatttttagaacgctgtcagtccaaattcagcagggatgaggggctcaacttaattttcaagtaatattaact

SEQ ID NO: 4786 - DNA, 122 bp, Homo sapiens
  misc_feature (61)..(62): /note="This region represents a CpG dinucleotide"
  misc_feature (61)..(61): /note="Nucleotide may be methylated to form 5-methylcytosine"
aatgcttccaccaggtccctgctgggtagtgtcactttagcctgcgagggacaggtgacacgagttacagacaggctgcaggaggtaacttggtccatgtgcatacactatacagaatttta

SEQ ID NO: 4787 - DNA, 122 bp, Homo sapiens
  misc_feature (61)..(62): /note="This region represents a CpG dinucleotide"
  misc_feature (61)..(61): /note="Nucleotide may be methylated to form 5-methylcytosine"
actgtcatttaggtggggacaaactaaggtccagtaacttccctgtgtctgttcttcctccgtccccctcccccgtgactctgagtcctgcagaccagcccttgggcatgttttgggtcacc

SEQ ID NO: 4788 - DNA, 122 bp, Homo sapiens
  misc_feature (61)..(62): /note="This region represents a CpG dinucleotide"
  misc_feature (61)..(61): /note="Nucleotide may be methylated to form 5-methylcytosine"
tggttttcgtctacaacaaaagcacacatacacacacacacataggtatacacacacgcgcgcgtctgtcaccaggctctgtgacattctgtacagcttgataaggtccccaataagacata

SEQ ID NO: 4789 - DNA, 122 bp, Homo sapiens
  misc_feature (61)..(62): /note="This region represents a CpG dinucleotide"
  misc_feature (61)..(61): /note="Nucleotide may be methylated to form 5-methylcytosine"
aatggagcaaaggtgatgtttcacttcatcacgtccagcactgtcccaaggttaaatgggcgcgtgaggacagttttctccggtcctggcgggtttgcccacctgccggccagcgttctgcg

SEQ ID NO: 4790 - DNA, 122 bp, Homo sapiens
  misc_feature (61)..(62): /note="This region represents a CpG dinucleotide"
  misc_feature (61)..(61): /note="Nucleotide may be methylated to form 5-methylcytosine"
tatagatagacattttggagaagagtctctctttgaagacttcctctcagagtacaagtccgtggttacaaccattttgtttctcagcaaacatggggaagtttgcttttcttctctgagga

SEQ ID NO: 4791 - DNA, 122 bp, Homo sapiens
  misc_feature (61)..(62): /note="This region represents a CpG dinucleotide"
  misc_feature (61)..(61): /note="Nucleotide may be methylated to form 5-methylcytosine"
tatagatgagaactttgatgcttagagcagatgtgttgctggctcatagcggcatttgaacgcggggctgctgatttctgggcctgtattatttctaagacacctcactgccttctgcacta

SEQ ID NO: 4792 - DNA, 122 bp, Homo sapiens
  misc_feature (61)..(62): /note="This region represents a CpG dinucleotide"
  misc_feature (61)..(61): /note="Nucleotide may be methylated to form 5-methylcytosine"
aattcctcagtagtccattctgtgatgtcaaaggggtgtgggggtgtctgcatgtgtgtacgcacacaattacgtacataagcacatgatggcagtaagggcaaagagagtcttgctttaaa

SEQ ID NO: 4793 - DNA, 122 bp, Homo sapiens
  misc_feature (61)..(62): /note="This region represents a CpG dinucleotide"
  misc_feature (61)..(61): /note="Nucleotide may be methylated to form 5-methylcytosine"
ctaggtcctgactgccaattagctgtacagacactggtgactcacaagtggctaggagctcgtgaaatcccctgcagtgaattgaactaatatttattaggcatcagctctacatggaggaa

SEQ ID NO: 4794 - DNA, 122 bp, Homo sapiens
  misc_feature (61)..(62): /note="This region represents a CpG dinucleotide"
  misc_feature (61)..(61): /note="Nucleotide may be methylated to form 5-methylcytosine"
gcttagaatgtacctgtgcatgggcatttttctctagaggcttatttgtgaatatcattacgttagactagcagcaatttgctcagaactcagtttgtgttaaagtaggattttcttttttg

SEQ ID NO: 4795 - DNA, 122 bp, Homo sapiens
  misc_feature (61)..(62): /note="This region represents a CpG dinucleotide"
  misc_feature (61)..(61): /note="Nucleotide may be methylated to form 5-methylcytosine"
caggcctcttggggctggggctggagtctgctctccatcacttctcgtttccttcccccgcgtgtgtttaacaggagccactgtgcccgctgagtcacttgagaggccagggcccagctcgt

SEQ ID NO: 4796 - DNA, 122 bp, Homo sapiens
  misc_feature (61)..(62): /note="This region represents a CpG dinucleotide"
  misc_feature (61)..(61): /note="Nucleotide may be methylated to form 5-methylcytosine"
aagcaagagggagtcagttaagctggagctctttcactgtctcagtcataatcttgcaaacgtggtttcaatctctccctttgggttttatagcaccttaatcttttttgttgttttgtttt

SEQ ID NO: 4797 - DNA, 122 bp, Homo sapiens
  misc_feature (61)..(62): /note="This region represents a CpG dinucleotide"
  misc_feature (61)..(61): /note="Nucleotide may be methylated to form 5-methylcytosine"
actgcagctgcagaggtcctcagatctggtttcccttccttgagaggcccagttcctattcgtttcctgtctctgctactgactacctccgcccaccctcaacctcaccggctcccacttta

SEQ ID NO: 4798 - DNA, 122 bp, Homo sapiens
  misc_feature (61)..(62): /note="This region represents a CpG dinucleotide"
  misc_feature (61)..(61): /note="Nucleotide may be methylated to form 5-methylcytosine"
caattgaactacagtcatgcaccgcattacaaagttttactcaacaacagaccacatatacgacagtgtttgcataagatcataatagatctgaaaaattcctgttgcctaatgagtcgcag

SEQ ID NO: 4799 - DNA, 122 bp, Homo sapiens
  misc_feature (61)..(62): /note="This region represents a CpG dinucleotide"
  misc_feature (61)..(61): /note="Nucleotide may be methylated to form 5-methylcytosine"
gaaatgctgagtcacagtggattcatgttctcaccctcctagacattgccagacttcgcccgctggttttgctaacactcactcccaccagcagagtttgagagctggccttgccctgtatc

SEQ ID NO: 4800 - DNA, 122 bp, Homo sapiens
  misc_feature (61)..(62): /note="This region represents a CpG dinucleotide"
  misc_feature (61)..(61): /note="Nucleotide may be methylated to form 5-methylcytosine"
gtgtgggctgaattgtgcctcttaaaatggtattatgtcctaatccctgatacctgtgaacgtggccatatttggaaatagggtctttgaaaatgcaagttaagggaggtctttagggtggg

SEQ ID NO: 4801 - DNA, 122 bp, Homo sapiens
  misc_feature (61)..(62): /note="This region represents a CpG dinucleotide"
  misc_feature (61)..(61): /note="Nucleotide may be methylated to form 5-methylcytosine"
tgttgcaactcccctgtctggataattcagctctgtctgagcagtggttcaaggagaacccgctgggtggttagaatcagcttcactttcaaagggcctacaatgtcctcattaatttcttc

SEQ ID NO: 4802 - DNA, 122 bp, Homo sapiens
  misc_feature (61)..(62): /note="This region represents a CpG dinucleotide"
  misc_feature (61)..(61): /note="Nucleotide may be methylated to form 5-methylcytosine"
agctcaggctagagcccaacaacaaagaataacctgtccagctcaaaatgccagtactgccgaggccaagaaccctgacttatcctgatacataggaaaagggttaagcaagaatcatctgt

SEQ ID NO: 4803 - DNA, 122 bp, Homo sapiens
  misc_feature (61)..(62): /note="This region represents a CpG dinucleotide"
  misc_feature (61)..(61): /note="Nucleotide may be methylated to form 5-methylcytosine"
ttttgcccttttacccctctggtaggcgccctagggcgggggtgctgccgcgcgcttcggcgcgccttggttctgtcaccagccccactggggcctcacaatcgctcagccgtccagtgcgc

SEQ ID NO: 4804 - DNA, 122 bp, Homo sapiens
  misc_feature (61)..(62): /note="This region represents a CpG dinucleotide"
  misc_feature (61)..(61): /note="Nucleotide may be methylated to form 5-methylcytosine"
ttataaaattaaatgtttttttgttgaaataagaggaactttaaaaataatgtgtcagagcgttatctacaatcaaacacttatgaagaagctacaggaaaccaactacgatgtaacgctta

SEQ ID NO: 4805 - DNA, 122 bp, Homo sapiens
  misc_feature (61)..(62): /note="This region represents a CpG dinucleotide"
  misc_feature (61)..(61): /note="Nucleotide may be methylated to form 5-methylcytosine"
tctagtgtttgttttctttgccaatactttacacatttccataaacaaatactcttttttcgtctctaataaaatccacatacctggtctcaaattactaaatcaaactgctcagtatgttt

SEQ ID NO: 4806 - DNA, 122 bp, Homo sapiens
  misc_feature (61)..(62): /note="This region represents a CpG dinucleotide"
  misc_feature (61)..(61): /note="Nucleotide may be methylated to form 5-methylcytosine"
cccgcgccccgcgcccctcgccaacccccggtgcgagcccagggcaccgagccccgcagccgctcaggcccacccggtgcctgcagccagcgcacactgggtgctgggaccagcactgagcg

SEQ ID NO: 4807 - DNA, 122 bp, Homo sapiens
  misc_feature (61)..(62): /note="This region represents a CpG dinucleotide"
  misc_feature (61)..(61): /note="Nucleotide may be methylated to form 5-methylcytosine"
taatccttcattagttccaatttgaagccttgtttggggattttctttggggataatttccgtatgattgcttcgaccaagttgcataagttgtttgacagaaagccgactgaattcttgtc

SEQ ID NO: 4808 - DNA, 122 bp, Homo sapiens
  misc_feature (61)..(62): /note="This region represents a CpG dinucleotide"
  misc_feature (61)..(61): /note="Nucleotide may be methylated to form 5-methylcytosine"
gaaatcatcccaaaaggcctgagattttaaaaacagagatcaaaacacactggcattcaacgtctcttgctggtggacccggagcagatgctccccacattccatggggtgcctgtctcaac

SEQ ID NO: 4809 - DNA, 122 bp, Homo sapiens
  misc_feature (61)..(62): /note="This region represents a CpG dinucleotide"
  misc_feature (61)..(61): /note="Nucleotide may be methylated to form 5-methylcytosine"
ggtcgggcgggggccccggcaggcgcgcccagtccgcgcccttcgtcccagcgccggccgcgcagctccgcctgggtggacaagttctctccgagtcccgtgcactcggcgcgccggagcgc

SEQ ID NO: 4810 - DNA, 122 bp, Homo sapiens
  misc_feature (61)..(62): /note="This region represents a CpG dinucleotide"
  misc_feature (61)..(61): /note="Nucleotide may be methylated to form 5-methylcytosine"
agccctgactctcccctctccttcagactttttgcccctggaggttacccaggatccttccgtgggcgaaaatctcagagcggcgccagccccaagttcagcctcagcccaagtcttaactt

SEQ ID NO: 4811 - DNA, 122 bp, Homo sapiens
  misc_feature (61)..(62): /note="This region represents a CpG dinucleotide"
  misc_feature (61)..(61): /note="Nucleotide may be methylated to form 5-methylcytosine"
gtggagaaccactgtctccagatgcagacactagagttgggatcagatggcctagctctacgtcttgtcaggcttgctaagtctcattttcttcatctgtaaaatgggagtgataaatacca

SEQ ID NO: 4812 - DNA, 122 bp, Homo sapiens
  misc_feature (61)..(62): /note="This region represents a CpG dinucleotide"
  misc_feature (61)..(61): /note="Nucleotide may be methylated to form 5-methylcytosine"
ttgaacagaaacgaggacactggggaggcccttccaatgcaggccagacttttaggggctcgacagaacacagctggagaaacatccacaccacacgcggtttcacctgccacacggcagcc

SEQ ID NO: 4813 - DNA, 122 bp, Homo sapiens
  misc_feature (61)..(62): /note="This region represents a CpG dinucleotide"
  misc_feature (61)..(61): /note="Nucleotide may be methylated to form 5-methylcytosine"
tctgtggagcagtagttctcacccctggttatacacacatctggggagcgttgaaaaacacgttcttagaccctatcccaaaaccattagattaaaatatttaaggaaatttatcattagta

SEQ ID NO: 4814 - DNA, 122 bp, Homo sapiens
  misc_feature (61)..(62): /note="This region represents a CpG dinucleotide"
  misc_feature (61)..(61): /note="Nucleotide may be methylated to form 5-methylcytosine"
tttgggggtggggtttcactggcaaacaacatttccattgcactttgaaaactgtgtagacgttgaaacaatagaaatcgttgaagatgatgaaattgcatctggaaagacccagagccatg

SEQ ID NO: 4815 - DNA, 122 bp, Homo sapiens
  misc_feature (61)..(62): /note="This region represents a CpG dinucleotide"
  misc_feature (61)..(61): /note="Nucleotide may be methylated to form 5-methylcytosine"
cgctcctccctccaaggacgactccccgtgtccttctcctgacctggctgctcacggccacgcagcagacacagacactgtacaccctcaaggactcccggcccattcacatgcatgtctgt

SEQ ID NO: 4816 - DNA, 122 bp, Homo sapiens
  misc_feature (61)..(62): /note="This region represents a CpG dinucleotide"
  misc_feature (61)..(61): /note="Nucleotide may be methylated to form 5-methylcytosine"
caagtcaaagtgaattttatgttggactgtattcaattttactactacataaaagaaaaacggatgcctaaagactgagtcagttcagagaagtattattggaaagcaaactagaaagagaa

SEQ ID NO: 4817 - DNA, 122 bp, Homo sapiens
  misc_feature (61)..(62): /note="This region represents a CpG dinucleotide"
  misc_feature (61)..(61): /note="Nucleotide may be methylated to form 5-methylcytosine"
ccctgtctgcgagccccgaggcggagatggctccccaagcctgatgcagacaagagagcccgcccctcccctgtcccgcacctgctgaactttggggtcagcagaggaatgtcccccgctgt

SEQ ID NO: 4818 - DNA, 122 bp, Homo sapiens
  misc_feature (61)..(62): /note="This region represents a CpG dinucleotide"
  misc_feature (61)..(61): /note="Nucleotide may be methylated to form 5-methylcytosine"
agctgtgaataattagatcccttactttaaattaataaaagaagtcgggataacactgaccgtgcaaattacaaacgtgaggagggtttactataaaagtagagaaaagaagatactgtttt

SEQ ID NO: 4819 - DNA, 122 bp, Homo sapiens
  misc_feature (61)..(62): /note="This region represents a CpG dinucleotide"
  misc_feature (61)..(61): /note="Nucleotide may be methylated to form 5-methylcytosine"
tacagacactgcccctttttatataagggacttgagcatttgtggagtttggtgtctgcacggggtcctggaacccctcctcacacataccggggatgactgtacttctcctcatgctcgca

SEQ ID NO: 4820 - DNA, 122 bp, Homo sapiens
  misc_feature (61)..(62): /note="This region represents a CpG dinucleotide"
  misc_feature (61)..(61): /note="Nucleotide may be methylated to form 5-methylcytosine"
taaccattttaagcatacaatttggtgacattaagtacattcacattgtcacgcaaccatcgccaccatgcatctctagaactttatcttcccaaactgaaattacatactgatatggtttg

SEQ ID NO: 4821 - DNA, 122 bp, Homo sapiens
  misc_feature (61)..(62): /note="This region represents a CpG dinucleotide"
  misc_feature (61)..(61): /note="Nucleotide may be methylated to form 5-methylcytosine"
agagtagggggaccgctgagctctgtccacagactagagcaggaaaggggggaaaggcggcgatagaggttagcaggaatgtttaattatcaggagcaggaacagaactgagggcatgccca

SEQ ID NO: 4822 - DNA, 122 bp, Homo sapiens
  misc_feature (61)..(62): /note="This region represents a CpG dinucleotide"
  misc_feature (61)..(61): /note="Nucleotide may be methylated to form 5-methylcytosine"
acaggggcagggtgtgtgagtgagttctcagaggtgtcttcctgctactctctgcatcctcgacaacttccagcattttgccctgctgatcttggggatttcactcttcctctgaaccggct

SEQ ID NO: 4823 - DNA, 122 bp, Homo sapiens
  misc_feature (61)..(62): /note="This region represents a CpG dinucleotide"
  misc_feature (61)..(61): /note="Nucleotide may be methylated to form 5-methylcytosine"
tgagtgtgttgcgcgactgtgcaaagtgaaaatgaatgccctctctgcaaggctgaccttcgggagagggtgatcccggcagcccgtgtgtttgccgcacgcgagggacatgcgtgcagagg

SEQ ID NO: 4824 - DNA, 122 bp, Homo sapiens
  misc_feature (61)..(62): /note="This region represents a CpG dinucleotide"
  misc_feature (61)..(61): /note="Nucleotide may be methylated to form 5-methylcytosine"
gagtgcaatggcacgatcttggctcactgcaacctctgcctcagtaactggtattataagcgtgcaccaccatgcccagctaatttttgtattttttagcagagacagggtttcaccatgtt

SEQ ID NO: 4825 - DNA, 122 bp, Homo sapiens
  misc_feature (61)..(62): /note="This region represents a CpG dinucleotide"
  misc_feature (61)..(61): /note="Nucleotide may be methylated to form 5-methylcytosine"
ttattatgctagggactgcatttgaaaagccaaactctagtatctgtctgtaattgcaagcggatatctcagcacatgcacaagcttatgtcaggaggatgtttatgaaaaactcaccaagc

SEQ ID NO: 4826 - DNA, 122 bp, Homo sapiens
  misc_feature (61)..(62): /note="This region represents a CpG dinucleotide"
  misc_feature (61)..(61): /note="Nucleotide may be methylated to form 5-methylcytosine"
tgtttgccttattgtcacttgatggtggctacactgtaagccctgtagtcacataccattcgtgatgaagaaacaggaagaaggaagaagaagcaccagaagtcatctgcattttcttctcc

SEQ ID NO: 4827 - DNA, 122 bp, Homo sapiens
  misc_feature (61)..(62): /note="This region represents a CpG dinucleotide"
  misc_feature (61)..(61): /note="Nucleotide may be methylated to form 5-methylcytosine"
ccctaataataccttatggctgagctctgaaaatcttcaggccagccaaccccagaggcccggcagtcggcttgctcggcttcctgcccacacttagcacagtgctgaggtagctttagccc

SEQ ID NO: 4828 - DNA, 122 bp, Homo sapiens
  misc_feature (61)..(62): /note="This region represents a CpG dinucleotide"
  misc_feature (61)..(61): /note="Nucleotide may be methylated to form 5-methylcytosine"
tacagagggagccagtgagcagccttgacctcctgaggcctcacagactcactgcaagagcggcttctaggcagtgaagctaagctgcgtcctggagggggcgccacagtccatcatatgct

SEQ ID NO: 4829 - DNA, 122 bp, Homo sapiens
  misc_feature (61)..(62): /note="This region represents a CpG dinucleotide"
  misc_feature (61)..(61): /note="Nucleotide may be methylated to form 5-methylcytosine"
atctctcacacagcttgaggtagctcaagaggagagcaaagggtggtgagacatacaactcgacagccactgtttttaaacagtaaccgtgttcactgaaccaagcaaaaactgggaaatgc

SEQ ID NO: 4830 - DNA, 122 bp, Homo sapiens
  misc_feature (61)..(62): /note="This region represents a CpG dinucleotide"
  misc_feature (61)..(61): /note="Nucleotide may be methylated to form 5-methylcytosine"
tgtattgagttcagtctaaatatatagacactgattccccacccacaaatatgtaaaatgcgacaactaacagatagtttaaagtgggaagaaaaaaggacaggttaaaaagaatgacaacc

SEQ ID NO: 4831 - DNA, 122 bp, Homo sapiens
  misc_feature (61)..(62): /note="This region represents a CpG dinucleotide"
  misc_feature (61)..(61): /note="Nucleotide may be methylated to form 5-methylcytosine"
cgcttctgttatcttttaaaagacctgatcagactggagtacggaagtactctgagctctcggatttttttttaagttaacaggtcataaataagttcaaaagttttctgcagaaccctgaa

SEQ ID NO: 4832 - DNA, 122 bp, Homo sapiens
  misc_feature (61)..(62): /note="This region represents a CpG dinucleotide"
  misc_feature (61)..(61): /note="Nucleotide may be methylated to form 5-methylcytosine"
ttaagttgacagggacacctctaccccatcctctaaaaaatacactgaacaccagtgaatcgtctttaaaagcacccatccttgcctgtcaggttgagaacgtgtgctcccagctgaatcat

SEQ ID NO: 4833 - DNA, 122 bp, Homo sapiens
  misc_feature (61)..(62): /note="This region represents a CpG dinucleotide"
  misc_feature (61)..(61): /note="Nucleotide may be methylated to form 5-methylcytosine"
ccaaaatctgtcccctacgtaaaagaaactagaaacagatgtaaagttaatatcagcagacgtaacacaaggagaaaggggtataaaaacaggtcaacaagttgaaaattggcctgaatttt

SEQ ID NO: 4834 - DNA, 122 bp, Homo sapiens
  misc_feature (61)..(62): /note="This region represents a CpG dinucleotide"
  misc_feature (61)..(61): /note="Nucleotide may be methylated to form 5-methylcytosine"
tactgagcccacagcagagtccatcccggcttctagacacccgcttccagctgggaaaggcgccagctccgcccacccggttcctggtgggtctcggcagttgccccgcccactcacaagcc

SEQ ID NO: 4835 - DNA, 122 bp, Homo sapiens
  misc_feature (61)..(62): /note="This region represents a CpG dinucleotide"
  misc_feature (61)..(61): /note="Nucleotide may be methylated to form 5-methylcytosine"
ccagccccccagctttggttcccgctgggaattcaggccctgtcaggctgtaggtcctctcgggagccctctgcctgccctactgctggcctaggcctcgggctgtctggcggccgcgactc

SEQ ID NO: 4836 - DNA, 122 bp, Homo sapiens
  misc_feature (61)..(62): /note="This region represents a CpG dinucleotide"
  misc_feature (61)..(61): /note="Nucleotide may be methylated to form 5-methylcytosine"
aagtaactcatactgagctctgattagtcagaacagtgaattccaatgacttagcaaccacgtatggggaagaggactggaagccatttcaggacaggggacggagaggacagcgagacaaa

SEQ ID NO: 4837 - DNA, 122 bp, Homo sapiens
  misc_feature (61)..(62): /note="This region represents a CpG dinucleotide"
  misc_feature (61)..(61): /note="Nucleotide may be methylated to form 5-methylcytosine"
gtaagaatactaataaaagcagtaacagcagtggcaaaagtaaccacacaagcagaaatacgaaaaccaagatgataagaccatacagtccggcagtgtcttactaacagggttgtgggcgt

SEQ ID NO: 4838 - DNA, 122 bp, Homo sapiens
  misc_feature (61)..(62): /note="This region represents a CpG dinucleotide"
  misc_feature (61)..(61): /note="Nucleotide may be methylated to form 5-methylcytosine"
cagcagcattagattctcataggagcacaaaccctattgtgaactacagaactgcacatgcgagagatctaggttacatgctccttatgagaaagactaattccagttgccctgagatgaac

SEQ ID NO: 4839 - DNA, 122 bp, Homo sapiens
  misc_feature (61)..(62): /note="This region represents a CpG dinucleotide"
  misc_feature (61)..(61): /note="Nucleotide may be methylated to form 5-methylcytosine"
attgacacagattctcttgcgtaacaccagttgcatgtcagcagggtggctgagctggaccgtcacgcgcacgatcaggaacaaccgctcgtccacgggcgtgcccctgctgagctgagggc

SEQ ID NO: 4840 - DNA, 122 bp, Homo sapiens
  misc_feature (61)..(62): /note="This region represents a CpG dinucleotide"
  misc_feature (61)..(61): /note="Nucleotide may be methylated to form 5-methylcytosine"
gaggggtggccctgccgcattcactttctttttccccagagccagtttcttctggtcctgcgccttcctctcccttctgccttgtgtttccttctggggaactcgacttcttttgactctta

SEQ ID NO: 4841 - DNA, 122 bp, Homo sapiens
  misc_feature (61)..(62): /note="This region represents a CpG dinucleotide"
  misc_feature (61)..(61): /note="Nucleotide may be methylated to form 5-methylcytosine"
aaagaaaaactaagctcgacagctgccactgagtccaactctttaaccagacagaactaccgcattcttagactgttgtttttaggaaaagagaggaagcttgcagaatttgtattgccatg

SEQ ID NO: 4842 - DNA, 122 bp, Homo sapiens
  misc_feature (61)..(62): /note="This region represents a CpG dinucleotide"
  misc_feature (61)..(61): /note="Nucleotide may be methylated to form 5-methylcytosine"
tcaaagctgacatgagtcagcaaagaggtccagttgaagaagataagaaaactgtctaaacgaaatactgagtttgtatgcagtgcttttaaaggcccagaatgtgatctgtggatgtgcct

SEQ ID NO: 4843 - DNA, 122 bp, Homo sapiens
  misc_feature (61)..(62): /note="This region represents a CpG dinucleotide"
  misc_feature (61)..(61): /note="Nucleotide may be methylated to form 5-methylcytosine"
ccagcttcacgtctgattggatgaagtgtcacgcagggagcctctcagcaaacctacctgcgttgaaggtgactggatggtcccgttgcgtggcatctcgtcaaccaatcacagtgggcgtc

SEQ ID NO: 4844 - DNA, 122 bp, Homo sapiens
  misc_feature (61)..(62): /note="This region represents a CpG dinucleotide"
  misc_feature (61)..(61): /note="Nucleotide may be methylated to form 5-methylcytosine"
caacgtggagctcgagcaactcagctgcagagtaagagctcgcagccgtgcgtgtttccacgtgtgggagcgcctctcattcccccaccacacacgcccagtttccgcttctcgcccccaag

SEQ ID NO: 4845 - DNA, 122 bp, Homo sapiens
  misc_feature (61)..(62): /note="This region represents a CpG dinucleotide"
  misc_feature (61)..(61): /note="Nucleotide may be methylated to form 5-methylcytosine"
gaactgtgccatgctcagctatcattttctgcttataagaagtaagtgagagatcaggatcgttagagtctgtaaacacttgaatgcttagaaatgcaaagcaatgagctattctgcagggc

SEQ ID NO: 4846 - DNA, 122 bp, Homo sapiens
  misc_feature (61)..(62): /note="This region represents a CpG dinucleotide"
  misc_feature (61)..(61): /note="Nucleotide may be methylated to form 5-methylcytosine"
aggcaaagcccatccttcttttaccaatgcggctataaaatgtaacttgcatgcctcaatcgctaggaaacaatctttccccaagtcttgggttctcgtttcataagtagtcatttcctgat

SEQ ID NO: 4847 - DNA, 122 bp, Homo sapiens
  misc_feature (61)..(62): /note="This region represents a CpG dinucleotide"
  misc_feature (61)..(61): /note="Nucleotide may be methylated to form 5-methylcytosine"
ttcactactcattatacagtaattacaatacattagcatgctaaacgacactcctaccagcgccatgacagttcacagatgccatggcaaccttaggaagttaccctatatgatctaaaagc

SEQ ID NO: 4848 - DNA, 122 bp, Homo sapiens
  misc_feature (61)..(62): /note="This region represents a CpG dinucleotide"
  misc_feature (61)..(61): /note="Nucleotide may be methylated to form 5-methylcytosine"
cagcttctacttcatattctaagtccctgaatgggattacagctgaaccacagcttacttcgctaaaaccttgacatcctgcctagaccttcctaaaggccagactgcgtctctagaaacct

SEQ ID NO: 4849 - DNA, 122 bp, Homo sapiens
  misc_feature (61)..(62): /note="This region represents a CpG dinucleotide"
  misc_feature (61)..(61): /note="Nucleotide may be methylated to form 5-methylcytosine"
gatgtgtttggtttgcttggataattctacaggctgacggggacctgaagcctagcactgcgcctggtccctttgataaggagggttgcttggctagaggactttatccaccaggagcagag

SEQ ID NO: 4850 - DNA, 122 bp, Homo sapiens
  misc_feature (61)..(62): /note="This region represents a CpG dinucleotide"
  misc_feature (61)..(61): /note="Nucleotide may be methylated to form 5-methylcytosine"
gcagggatagcaggggactgctccttcctgcggcgggcaggtggagttgctgagcagcttcgtcattaggagagagatgcccactaccttaaaaatcagaagctttttggcttctggaagct

SEQ ID NO: 4851 - DNA, 122 bp, Homo sapiens
  misc_feature (61)..(62): /note="This region represents a CpG dinucleotide"
  misc_feature (61)..(61): /note="Nucleotide may be methylated to form 5-methylcytosine"
atcatatgacaaaagaaaaactttcataatcttatgacatgagggaaggaatattaaagccgttctgtgggttattatctctaacgttcccaatagaataggctttgccagctgggtgtggt

SEQ ID NO: 4852 - DNA, 122 bp, Homo sapiens
  misc_feature (61)..(62): /note="This region represents a CpG dinucleotide"
  misc_feature (61)..(61): /note="Nucleotide may be methylated to form 5-methylcytosine"
tgttgtgtaagacaagtggtctggtttatctccacatttacgtatgtattggctttctcacgctcactctctctctctctctttctctctcttccccaccccgcccccacccacccccatcc

SEQ ID NO: 4853 - DNA, 122 bp, Homo sapiens
  misc_feature (61)..(62): /note="This region represents a CpG dinucleotide"
  misc_feature (61)..(61): /note="Nucleotide may be methylated to form 5-methylcytosine"
gcctgggcgctccaaaacattacataaaaacggtgagagcaggggcattcgcatccagctcgactttcataggaatgcgtctggcgtttcaaacactgtgaggttcactatggttttctgag

SEQ ID NO: 4854 - DNA, 122 bp, Homo sapiens
  misc_feature (61)..(62): /note="This region represents a CpG dinucleotide"
  misc_feature (61)..(61): /note="Nucleotide may be methylated to form 5-methylcytosine"
atggttgtaattaagtacagcaactatgaattgtttaggggcttaatttaaccttacccacggaggctccaagttgctacttgctcggtcccctgaacttgggttatttctgtggtcagggc

SEQ ID NO: 4855 - DNA, 122 bp, Homo sapiens
  misc_feature (61)..(62): /note="This region represents a CpG dinucleotide"
  misc_feature (61)..(61): /note="Nucleotide may be methylated to form 5-methylcytosine"
cataagtcagaaatgacgtcacggttacagccacgatactgatgacagccattcacaacacgctgggccagtgcgaaatcctgtcttgctgactgcccatgccagtctaggagggggtgtta

SEQ ID NO: 4856 - DNA, 122 bp, Homo sapiens
  misc_feature (61)..(62): /note="This region represents a CpG dinucleotide"
  misc_feature (61)..(61): /note="Nucleotide may be methylated to form 5-methylcytosine"
agtcctgacacttcctgttcctctcagctcctccttggaggaagtggtgggttgcaccaccgtggcccttcacccctgcccctctccgctctacagcagctctgatgtcagagagcggcccc

SEQ ID NO: 4857 - DNA, 122 bp, Homo sapiens
  misc_feature (61)..(62): /note="This region represents a CpG dinucleotide"
  misc_feature (61)..(61): /note="Nucleotide may be methylated to form 5-methylcytosine"
cactcaaccagtatatggagatcccccccagcactttgaatatgtcattctcctgctttccgtcctctgtggtttgagatgagaagccagccattgattgtattgatactcccatgcgtgtg

SEQ ID NO: 4858 - DNA, 122 bp, Homo sapiens
  misc_feature (61)..(62): /note="This region represents a CpG dinucleotide"
  misc_feature (61)..(61): /note="Nucleotide may be methylated to form 5-methylcytosine"
ttaggagggaccacagatggaacggtcatgaaagtctccaaggcatgacatcaaagctgacgacagaaggaagaactcgcaccttggccaggcacagtggctcaggcctataatctcagcac

SEQ ID NO: 4859 - DNA, 122 bp, Homo sapiens
  misc_feature (61)..(62): /note="This region represents a CpG dinucleotide"
  misc_feature (61)..(61): /note="Nucleotide may be methylated to form 5-methylcytosine"
catgtgagagtctctggagagtggacacgcagctggggagagagcacgctccaacgctgccgtcggtttggtttaacagccacaagccgtcgtttattccgctacttccaattcctctacag

SEQ ID NO: 4860 - DNA, 122 bp, Homo sapiens
  misc_feature (61)..(62): /note="This region represents a CpG dinucleotide"
  misc_feature (61)..(61): /note="Nucleotide may be methylated to form 5-methylcytosine"
ttcccttatctgtgcctgcaggctgtttttttgtctgcaagaattcaatcaaggacccaccgtaactgtctgcctgaccagtttcttcctttctcctctctcactattgtcccccacactca

SEQ ID NO: 4861 - DNA, 122 bp, Homo sapiens
  misc_feature (61)..(62): /note="This region represents a CpG dinucleotide"
  misc_feature (61)..(61): /note="Nucleotide may be methylated to form 5-methylcytosine"
ggattttgcatcatttgaggctttaaagtcattcttcttgtcaggagcaaattcccccaccgtcctcagtaatttttcctaagatcaatgagctgagtgtcggtttgtttttttccacagcg

SEQ ID NO: 4862 - DNA, 122 bp, Homo sapiens
  misc_feature (61)..(62): /note="This region represents a CpG dinucleotide"
  misc_feature (61)..(61): /note="Nucleotide may be methylated to form 5-methylcytosine"
gaagtaaccagtagattcaggagttagctgggtttgggttcagagttgcctcgctcctgccgctgttatttactaatgtgtgggcagaacagcctggggggttgagagagagagagagagag

SEQ ID NO: 4863 - DNA, 122 bp, Homo sapiens
  misc_feature (61)..(62): /note="This region represents a CpG dinucleotide"
  misc_feature (61)..(61): /note="Nucleotide may be methylated to form 5-methylcytosine"
ctgcggagtcattatctggtaacttccttttttttctttttctttttttgaaaccttacacggtaaagatgtccaggtgtaagggattcagatacttaaaactgagaatgttttgtttgtag

SEQ ID NO: 4864 - DNA, 122 bp, Homo sapiens
  misc_feature (61)..(62): /note="This region represents a CpG dinucleotide"
  misc_feature (61)..(61): /note="Nucleotide may be methylated to form 5-methylcytosine"
taaacaagattccgccctcctgaattctgtcacctggccaaaataaacatttaacaagtacgctgctagaattttacttgagaaaaaggaataattcatcttacctagtatttcttctgaat

SEQ ID NO: 4865 - DNA, 122 bp, Homo sapiens
  misc_feature (61)..(62): /note="This region represents a CpG dinucleotide"
  misc_feature (61)..(61): /note="Nucleotide may be methylated to form 5-methylcytosine"
ccgagaggtcccagcagttcctagggcaggtctatggagattcacacacttgaacttggtcgtctgaattgccaaggaggtgggaagatttcttctttaaaaaacaaaacaaaacaaaacaa

SEQ ID NO: 4866 - DNA, 122 bp, Homo sapiens
  misc_feature (61)..(62): /note="This region represents a CpG dinucleotide"
  misc_feature (61)..(61): /note="Nucleotide may be methylated to form 5-methylcytosine"
tctatttcataacattaatgacaaataatgagtcactttctaattttctattcagacaaacgcattttgttctctatattctgtgtttctgtgttctagatttatggacctgaatgcttaag

SEQ ID NO: 4867 - DNA, 122 bp, Homo sapiens
  misc_feature (61)..(62): /note="This region represents a CpG dinucleotide"
  misc_feature (61)..(61): /note="Nucleotide may be methylated to form 5-methylcytosine"
acggttccgcagggggccgctgtctgcttggatctttcatcaggtcccaggcagagggtgcgctctctactcagcttcactccttgggacagaagtgtggctgctgatcctggagtagggaa

SEQ ID NO: 4868 - DNA, 122 bp, Homo sapiens
  misc_feature (61)..(62): /note="This region represents a CpG dinucleotide"
  misc_feature (61)..(61): /note="Nucleotide may be methylated to form 5-methylcytosine"
gggtgggcactcgatggctcgagtttctctgaccagctcgagggctctgacgcttggcagcgaaatgccagattgtttgggaagatctaaaaaaagctcaacacagatgttagcaaggctgt

SEQ ID NO: 4869 - DNA, 122 bp, Homo sapiens
  misc_feature (61)..(62): /note="This region represents a CpG dinucleotide"
  misc_feature (61)..(61): /note="Nucleotide may be methylated to form 5-methylcytosine"
gcacaggtcccaggctgggcagagtgggaccctgtggctcaggaggcaggatgggcttgccggagaccccaccccctccccggggctggagctgaagcacagttgggctttgtgcagagtca

SEQ ID NO: 4870 - DNA, 122 bp, Homo sapiens
  misc_feature (61)..(62): /note="This region represents a CpG dinucleotide"
  misc_feature (61)..(61): /note="Nucleotide may be methylated to form 5-methylcytosine"
acacccaaggaattgaaagggggtctggaagagacatgtgcacatctgtgttcctagcaacggaactcaccatagccaaaagctggaagcagccgtggtgttcaccaaggcgtcatggctgc

SEQ ID NO: 4871 - DNA, 122 bp, Homo sapiens
  misc_feature (61)..(62): /note="This region represents a CpG dinucleotide"
  misc_feature (61)..(61): /note="Nucleotide may be methylated to form 5-methylcytosine"
ctccagtgtctgtgatccctgaccttggattgaccaggaaagtgacctccaaaaatcctccggcattttcagtttctagatcaaaagggctgcgggttccaacctaccaagggcagcaaagg

SEQ ID NO: 4872 - DNA, 122 bp, Homo sapiens
  misc_feature (61)..(62): /note="This region represents a CpG dinucleotide"
  misc_feature (61)..(61): /note="Nucleotide may be methylated to form 5-methylcytosine"
agttagcttttgatgcaataactaaccatcctgaaactttgtagcttaaaacaacagtcacgtattgttactcacaagtctgcaggtcaagtggctggttcttctgatctgggccaggcctg

SEQ ID NO: 4873 - DNA, 122 bp, Homo sapiens
  misc_feature (61)..(62): /note="This region represents a CpG dinucleotide"
  misc_feature (61)..(61): /note="Nucleotide may be methylated to form 5-methylcytosine"
agaggaaatgaatactattgtcagaaccatatctatatagtcaatcatttcctcttttaacgtctgtcttgttctctttttacccaccacatatgtataactatgtgaaaaattatatttgt

SEQ ID NO: 4874 - DNA, 122 bp, Homo sapiens
  misc_feature (61)..(62): /note="This region represents a CpG dinucleotide"
  misc_feature (61)..(61): /note="Nucleotide may be methylated to form 5-methylcytosine"
tctcaatccggtggactggaacttcgcacagccagaagccaagagcaggccagaaggcaacgggcagctgctgcggaagaagaggccatagctgctccagccggggctccggggcggcagca

SEQ ID NO: 4875 - DNA, 122 bp, Homo sapiens
  misc_feature (61)..(62): /note="This region represents a CpG dinucleotide"
  misc_feature (61)..(61): /note="Nucleotide may be methylated to form 5-methylcytosine"
ggcaacattcaaaagcccaggctgccgtgtgaaatctcctggctcctcctttgtgattttcgggctaaaaataaaatccccgggaccccggtggctgccattgttgctgctattgaaacgtg

SEQ ID NO: 4876 - DNA, 122 bp, Homo sapiens
  misc_feature (61)..(62): /note="This region represents a CpG dinucleotide"
  misc_feature (61)..(61): /note="Nucleotide may be methylated to form 5-methylcytosine"
gaaagtcccaggagagagaaactgtcgttcaagtcatcacatagcaaactgcccctaacacgtgctgcacacacattaggtggtgactcagttttggtgtttgacttgagtcttaaaacata

SEQ ID NO: 4877 - DNA, 122 bp, Homo sapiens
  misc_feature (61)..(62): /note="This region represents a CpG dinucleotide"
  misc_feature (61)..(61): /note="Nucleotide may be methylated to form 5-methylcytosine"
ctttgaagctgttttagagaatgttcctgtaggccagggtcttagaaagtttcttttgaacgccttgaccatattcagggctcctgggcccctcatcatgagagaagtattgctaaaacggc

SEQ ID NO: 4878 - DNA, 122 bp, Homo sapiens
  misc_feature (61)..(62): /note="This region represents a CpG dinucleotide"
  misc_feature (61)..(61): /note="Nucleotide may be methylated to form 5-methylcytosine"
cttgatacacaaactggtctggaatgcatttttccaaataagcaacacagcctgtggtcacgtcatcctgatggggctgccagagaacagttgtcatacaagtccttcccatttttagcatg

SEQ ID NO: 4879 - DNA, 122 bp, Homo sapiens
  misc_feature (61)..(62): /note="This region represents a CpG dinucleotide"
  misc_feature (61)..(61): /note="Nucleotide may be methylated to form 5-methylcytosine"
tgccgaaaactgggggaacaaccagtccaaagcatggcagagcagaacatcaggcagcatcgaaggctgctgccaagccaaagaccatgccgaaggaaagggccatctgcccactgtgccaa

SEQ ID NO: 4880 - DNA, 122 bp, Homo sapiens
  misc_feature (61)..(62): /note="This region represents a CpG dinucleotide"
  misc_feature (61)..(61): /note="Nucleotide may be methylated to form 5-methylcytosine"
caaacaatctcaacggggaaaatgcccaacaagaaaacgaaggaggggagcaggcccccacgcagaatgaagaagaatcccgccatttgggagggggtgaaggccagaagcctggaggaaat

SEQ ID NO: 4881 - DNA, 122 bp, Homo sapiens
  misc_feature (61)..(62): /note="This region represents a CpG dinucleotide"
  misc_feature (61)..(61): /note="Nucleotide may be methylated to form 5-methylcytosine"
ttccctaaggagggtttatttaacatacttacaacattgtttactcagataaggaaacaccgagatgctaaaaaaatgattgtgcatgtatgtatgtgatatgcgtaagggtctagcttcct

SEQ ID NO: 4882 - DNA, 122 bp, Homo sapiens
  misc_feature (61)..(62): /note="This region represents a CpG dinucleotide"
  misc_feature (61)..(61): /note="Nucleotide may be methylated to form 5-methylcytosine"
ggcactgtaagagcacgtgttgcctccggggacccgcttgggagggggctagaggggaggcggggtgcagtctaaagaatgtaggcaaaacacacatcatctcaccctgcaagggacagcaa

SEQ ID NO: 4883 - DNA, 122 bp, Homo sapiens
  misc_feature (61)..(62): /note="This region represents a CpG dinucleotide"
  misc_feature (61)..(61): /note="Nucleotide may be methylated to form 5-methylcytosine"
atgaaccttcctgcctttgcccacaaggctgagaactcttcaaagtgagactgtgtcttacgcattttcacttcctccatcatttgacacaggacctggcacgtaacagatgtttaataaat

SEQ ID NO: 4884 - DNA, 122 bp, Homo sapiens
  misc_feature (61)..(62): /note="This region represents a CpG dinucleotide"
  misc_feature (61)..(61): /note="Nucleotide may be methylated to form 5-methylcytosine"
gcagcccagcagggcctacaaggaatgtgtgaacggatgcacgtaaagtgcttagcaaagcgtggtaaacaagagcccttgttgtcattcttgctttaagcctagtcccagtgatgtctgta

SEQ ID NO: 4885 - DNA, 122 bp, Homo sapiens
  misc_feature (61)..(62): /note="This region represents a CpG dinucleotide"
  misc_feature (61)..(61): /note="Nucleotide may be methylated to form 5-methylcytosine"
gagatttttaaagcagttctctttgtaacatcaacattacaatctatatcctgaaaactacgaagttttatattcctccttcccctcactaggcctcccctggcctgcttgtgtatttgctt

SEQ ID NO: 4886 - DNA, 122 bp, Homo sapiens
  misc_feature (61)..(62): /note="This region represents a CpG dinucleotide"
  misc_feature (61)..(61): /note="Nucleotide may be methylated to form 5-methylcytosine"
gtgacattcatgggagactctccacaagtatttactagatgacattgaagattccagattcgtcatgtgtcatctctgaagtcaatgtccactgagtaggatgttggaggaggggcgagagg

SEQ ID NO: 4887 - DNA, 122 bp, Homo sapiens
  misc_feature (61)..(62): /note="This region represents a CpG dinucleotide"
  misc_feature (61)..(61): /note="Nucleotide may be methylated to form 5-methylcytosine"
ctgctgtgctgctggcagctctggctggttgtgctccccatctgcctaacttctcccttccgtcaatctcttggaatttgcccacagggctgaaatccctaatgttgaagcttcctgaccag

SEQ ID NO: 4888 - DNA, 122 bp, Homo sapiens
  misc_feature (61)..(62): /note="This region represents a CpG dinucleotide"
  misc_feature (61)..(61): /note="Nucleotide may be methylated to form 5-methylcytosine"
tgctttattcaatgggttcttgcagcccaagggatgccttagccctgatattgtagtattcgtaggctgattcatgatccctgccgacatatccttaaaagactggatagatgctacacaca

SEQ ID NO: 4889 - DNA, 122 bp, Homo sapiens
  misc_feature (61)..(62): /note="This region represents a CpG dinucleotide"
  misc_feature (61)..(61): /note="Nucleotide may be methylated to form 5-methylcytosine"
gcccccagtttgggttcctttggagttgtcatggaaacacggaggctagaccaggcgaggcgggtgggactaaggaaaggaaggaaggagaactctctggagtctcccccaccaagactcag

SEQ ID NO: 4890 - DNA, 122 bp, Homo sapiens
  misc_feature (61)..(62): /note="This region represents a CpG dinucleotide"
  misc_feature (61)..(61): /note="Nucleotide may be methylated to form 5-methylcytosine"
tctgaatggactttctccttggccagggcgctcttaaaatgtaacctcagagaccggttccggccaggaacgggaagtgcctcattatacccgctggcattaacatcaacacagaccttact

SEQ ID NO: 4891 - DNA, 122 bp, Homo sapiens
  misc_feature (61)..(62): /note="This region represents a CpG dinucleotide"
  misc_feature (61)..(61): /note="Nucleotide may be methylated to form 5-methylcytosine"
ccattacctacaaactgtatgtaagacaaacaggatagtcacggcaccccatctcttaagcggaaacatatttatttgagtaacagtgtggaggaaaaaaaaaaagcagtgtttatttactt

SEQ ID NO: 4892 - DNA, 122 bp, Homo sapiens
  misc_feature (61)..(62): /note="This region represents a CpG dinucleotide"
  misc_feature (61)..(61): /note="Nucleotide may be methylated to form 5-methylcytosine"
ggtgtggaaatgatgcgatgcagactggatggtctaagagcctccctggactgagcgggacgtgggcagggaaggagcctggtgggatgcgaccaccgggggcccctggcggctcccttagc

SEQ ID NO: 4893 - DNA, 122 bp, Homo sapiens
  misc_feature (61)..(62): /note="This region represents a CpG dinucleotide"
  misc_feature (61)..(61): /note="Nucleotide may be methylated to form 5-methylcytosine"
aggttaatggctggggcagaggcccagggaggccaagagcaggacgtgacacaagggtttcggaaggatccccgattttgaacgcttgtggggtgagaggggtctgggtgagagccaaggag

SEQ ID NO: 4894 - DNA, 122 bp, Homo sapiens
  misc_feature (61)..(62): /note="This region represents a CpG dinucleotide"
  misc_feature (61)..(61): /note="Nucleotide may be methylated to form 5-methylcytosine"
gccatgctcctttcctcaggtttgcaataagccatttcagaagatttctgagcagtgacacggcagcaaagaatgaagtgataaaatagtaattacataatttgaactaggttaatgttaac

SEQ ID NO: 4895 - DNA, 122 bp, Homo sapiens
  misc_feature (61)..(62): /note="This region represents a CpG dinucleotide"
  misc_feature (61)..(61): /note="Nucleotide may be methylated to form 5-methylcytosine"
tgagctggctgtgtgtattgagacagagagacaggaatgtggaaacagaggaatgaggtccgtgatctcctggtttttgggcacttatgcaatcgctcatccttggaggatagctatggaag

SEQ ID NO: 4896 - DNA, 122 bp, Homo sapiens
  misc_feature (61)..(62): /note="This region represents a CpG dinucleotide"
  misc_feature (61)..(61): /note="Nucleotide may be methylated to form 5-methylcytosine"
gatgctcctttcctccaggtaccagcagaaagcaggcgttttctcatgtgggaaagatgccggcccccgctgtttggggtggaaatcctctaacccgctgggcctgtgcgccagggctgagc

SEQ ID NO: 4897 - DNA, 122 bp, Homo sapiens
  misc_feature (61)..(62): /note="This region represents a CpG dinucleotide"
  misc_feature (61)..(61): /note="Nucleotide may be methylated to form 5-methylcytosine"
gttccataagctggggttctaggatgtccattcttagttgagtctcatttcctgtcatatcgacgtcaaaggcccaagaccttcctcctccccttgagcaaacaagccacgccctgcaccaa

SEQ ID NO: 4898 - DNA, 122 bp, Homo sapiens
  misc_feature (61)..(62): /note="This region represents a CpG dinucleotide"
  misc_feature (61)..(61): /note="Nucleotide may be methylated to form 5-methylcytosine"
acagcgggagtaacagaccaaaagaagaactgcagagcatccctctctcccccgttcacccgtgccacgagcacgtgagtgcatccacaggcagcacccagtctcctgttccactgactcca

SEQ ID NO: 4899 - DNA, 122 bp, Homo sapiens
  misc_feature (61)..(62): /note="This region represents a CpG dinucleotide"
  misc_feature (61)..(61): /note="Nucleotide may be methylated to form 5-methylcytosine"
aaaaacgttagtatgcggtacccttgggcagaaaaacaaacaagaaaaggttagacaactcgatggtagaccttgagggattagagccagcctttcagggtttaataggttctttctcatgc

SEQ ID NO: 4900 - DNA, 122 bp, Homo sapiens
  misc_feature (61)..(62): /note="This region represents a CpG dinucleotide"
  misc_feature (61)..(61): /note="Nucleotide may be methylated to form 5-methylcytosine"
ggaaagaatgttctttactcccatgcagattcagcatcccttttctataacagagcaaaccgagctttactgggttagctccacatttgactgcagacactgtcccttaagctagattttta

SEQ ID NO: 4901 - DNA, 122 bp, Homo sapiens
  misc_feature (61)..(62): /note="This region represents a CpG dinucleotide"
  misc_feature (61)..(61): /note="Nucleotide may be methylated to form 5-methylcytosine"
taaagaagataaatatcaagatagcatctttgttttgttagtcatggtatttagtggctgcgtaaacagagtgagatcaattgtagttcaaaaggactggagatgaaactgaagttaggaaa

SEQ ID NO: 4902 - DNA, 122 bp, Homo sapiens
  misc_feature (61)..(62): /note="This region represents a CpG dinucleotide"
  misc_feature (61)..(61): /note="Nucleotide may be methylated to form 5-methylcytosine"
atggtattttctaaattaacttgagctctgcatttgtctacaggcctacgaggttcaatccgtaggcttggtacctgaggaggtggcaggcacaagtggaagtttccgcttggctaggtgcc

SEQ ID NO: 4903 - DNA, 122 bp, Homo sapiens
  misc_feature (61)..(62): /note="This region represents a CpG dinucleotide"
  misc_feature (61)..(61): /note="Nucleotide may be methylated to form 5-methylcytosine"
cgggaaaggtagcacctgagcctcccgggctgcgccgacacctggacacctgtctccccgcgggtgccacctactgctccaggggactccagtccccaggttccgccccacggggactgggg

SEQ ID NO: 4904 - DNA, 122 bp, Homo sapiens
  misc_feature (61)..(62): /note="This region represents a CpG dinucleotide"
  misc_feature (61)..(61): /note="Nucleotide may be methylated to form 5-methylcytosine"
catagtgaccgttctcctagggaaagcttttcacacattcaaatctgttgctacaggcagcgttcgtgcacacacaaacagatccaagtaagcggtggctgcaacccagtcctgagtcaatg

SEQ ID NO: 4905 - DNA, 122 bp, Homo sapiens
  misc_feature (61)..(62): /note="This region represents a CpG dinucleotide"
  misc_feature (61)..(61): /note="Nucleotide may be methylated to form 5-methylcytosine"
tcagcaaaattagaccccctggtttcccaagagatgtcatttttaactcttttctacaggcgcctggagcacagggcttcccagaagtctgattcaatgctattttgagctgggttagattg

SEQ ID NO: 4906 - DNA, 122 bp, Homo sapiens
  misc_feature (61)..(62): /note="This region represents a CpG dinucleotide"
  misc_feature (61)..(61): /note="Nucleotide may be methylated to form 5-methylcytosine"
ataataatctcttgagccctttccattccaaatttcaaatctcaaaggtctccagcaaggcgttattcccaaaacagagctttgccatggtaaactagcatgttccagcagggtggtttttg

SEQ ID NO: 4907 - DNA, 122 bp, Homo sapiens
  misc_feature (61)..(62): /note="This region represents a CpG dinucleotide"
  misc_feature (61)..(61): /note="Nucleotide may be methylated to form 5-methylcytosine"
gccagcctgctccacaggtccccagctcttcctcggaaaagggggcagtggtctggatcacgctctgcagggcttctagctgtgacactccaggatgtttgccccaaaccccaggtctgacc

SEQ ID NO: 4908 - DNA, 122 bp, Homo sapiens
  misc_feature (61)..(62): /note="This region represents a CpG dinucleotide"
  misc_feature (61)..(61): /note="Nucleotide may be methylated to form 5-methylcytosine"
atgggaagtggacaggaaacatgaggtcatgacctgcaggcatctttactgcagctctgccggcctggagggggagagggggaggaagaagtatgcgctgcacatttctgaggctactgcat

SEQ ID NO: 4909 - DNA, 122 bp, Homo sapiens
  misc_feature (61)..(62): /note="This region represents a CpG dinucleotide"
  misc_feature (61)..(61): /note="Nucleotide may be methylated to form 5-methylcytosine"
cctcccctagtctgggattggaagagactttcttaaggaggtggctttgcagctgagacgcgaaggagaagttccagttaaccaggtaaagagacgagagaatgtatcaggcagtgggaact

SEQ ID NO: 4910 - DNA, 122 bp, Homo sapiens
  misc_feature (61)..(62): /note="This region represents a CpG dinucleotide"
  misc_feature (61)..(61): /note="Nucleotide may be methylated to form 5-methylcytosine"
aaaaacaagctattgggtaattgctgttttgagacaggtgtcatgtttacccaatgacaacgactcctaataagtacctttcaattgtcccctcagtcttctaatgaaagtatgtgtatgta

SEQ ID NO: 4911 - DNA, 122 bp, Homo sapiens
  misc_feature (61)..(62): /note="This region represents a CpG dinucleotide"
  misc_feature (61)..(61): /note="Nucleotide may be methylated to form 5-methylcytosine"
aggatgttgagcctttgtcaacctgttttgctgagtcatcgttgctttgtcagcctatttcgtgggtcatcactggttgagtgatcaagacttaaacattgtttgtcattgctttaactagg

SEQ ID NO: 4912 - DNA, 122 bp, Homo sapiens
  misc_feature (61)..(62): /note="This region represents a CpG dinucleotide"
  misc_feature (61)..(61): /note="Nucleotide may be methylated to form 5-methylcytosine"
aataaatcggggaacttgcttttctccccaagaccccagatggggcctacccatcgttctcgtgtaacaaaacgtgtaaaaaaaaaaaaagaaaaagaaaaaacaaaacaaaaaaactaagt

SEQ ID NO: 4913 - DNA, 122 bp, Homo sapiens
  misc_feature (61)..(62): /note="This region represents a CpG dinucleotide"
  misc_feature (61)..(61): /note="Nucleotide may be methylated to form 5-methylcytosine"
tgctgaacggggaggggctttggggctaagggaagtgcccgggaccccacctgaccccaacgctcacgggacaggggcagaggagaaaaacgtgggtggacagagggaggcaggcggtcagg

SEQ ID NO: 4914 - DNA, 122 bp, Homo sapiens
  misc_feature (61)..(62): /note="This region represents a CpG dinucleotide"
  misc_feature (61)..(61): /note="Nucleotide may be methylated to form 5-methylcytosine"
tctcgtcctccctgagcccccaaaattcaccatcgtatgtatgtcttcaaactgactaaccggtaagcccaacttttcagctgaaaaacagtgacagatggtctgtaaacactgaacttctt

SEQ ID NO: 4915 - DNA, 122 bp, Homo sapiens
  misc_feature (61)..(62): /note="This region represents a CpG dinucleotide"
  misc_feature (61)..(61): /note="Nucleotide may be methylated to form 5-methylcytosine"
acttcctacttgcttctattcatcaacttcttgctttctgcatattaatcaagactgcaacgtctccggatctgcctcctcccaggttcaagtctagcagagtaatacttgtttcccaagaa

SEQ ID NO: 4916 - DNA, 122 bp, Homo sapiens
  misc_feature (61)..(62): /note="This region represents a CpG dinucleotide"
  misc_feature (61)..(61): /note="Nucleotide may be methylated to form 5-methylcytosine"
ggactatatagctaattgtgtgttttatgggatgtcttaatgaggaaaagcaccacatctcgtcatcatgtcacttctgttgtgtcttgttaaagtgacctcattcacaaagcaaatgctga

SEQ ID NO: 4917 - DNA, 122 bp, Homo sapiens
  misc_feature (61)..(62): /note="This region represents a CpG dinucleotide"
  misc_feature (61)..(61): /note="Nucleotide may be methylated to form 5-methylcytosine"
accacgcccagcccacactggtaaattctataatcattagttgtatggaaaagtacctagcgcattgttgttgcacaatatattttaagtgaatgaatgagtctccagtgtaaatacatgaa

SEQ ID NO: 4918 - DNA, 122 bp, Homo sapiens
  misc_feature (61)..(62): /note="This region represents a CpG dinucleotide"
  misc_feature (61)..(61): /note="Nucleotide may be methylated to form 5-methylcytosine"
cctagtaaaaagcctggtacacacatagttgataccccttatgctgccgagtgaataaatcgaaacttgaaaccattacaaatctagttcctctgtggtatgcgcttttagtgtcctggagg

SEQ ID NO: 4919 - DNA, 122 bp, Homo sapiens
  misc_feature (61)..(62): /note="This region represents a CpG dinucleotide"
  misc_feature (61)..(61): /note="Nucleotide may be methylated to form 5-methylcytosine"
ccagaccagtctgggcgacaaagtgagatcccacctctacacaaaatgtaaagttagctccgtgctgtggtatgcacctgtagttccagctactcggagagctaaggtagaaggactgcttg

SEQ ID NO: 4920 - DNA, 122 bp, Homo sapiens
  misc_feature (61)..(62): /note="This region represents a CpG dinucleotide"
  misc_feature (61)..(61): /note="Nucleotide may be methylated to form 5-methylcytosine"
atgtagtcaaatcacttggagcttttaaaacatactgaccccacaggcttctctctctggcgattttgattcagtagcattggggtgaatccctcctttctgtactgtttaaactgctctgg

SEQ ID NO: 4921 - DNA, 122 bp, Homo sapiens
  misc_feature (61)..(62): /note="This region represents a CpG dinucleotide"
  misc_feature (61)..(61): /note="Nucleotide may be methylated to form 5-methylcytosine"
cgccacgatccaagagagtcttcttcccggctgggcgggggtctccatggaaacgggggtcggttgatcctgggggggaaaccataggaattaccccactcctcggaaagggaggtggaggc

SEQ ID NO: 4922 - DNA, 122 bp, Homo sapiens
  misc_feature (61)..(62): /note="This region represents a CpG dinucleotide"
  misc_feature (61)..(61): /note="Nucleotide may be methylated to form 5-methylcytosine"
ctgagggactcagtgggggttcactaggattgagcagtggcccaggaacttccttgaacacggcagagatttggtgatgtgcgtttactgaagatagagtgcgctcctagtccaggtagggt

SEQ ID NO: 4923 - DNA, 122 bp, Homo sapiens
  misc_feature (61)..(62): /note="This region represents a CpG dinucleotide"
  misc_feature (61)..(61): /note="Nucleotide may be methylated to form 5-methylcytosine"
attgtcagaacgcatatcgtgtttctcagaattatctgtatcatgttggaagtttttatacggaagtgtgtgttgacacaaatgattaaggccaggattcctacaattgacaggaaaatgac

SEQ ID NO: 4924 - DNA, 122 bp, Homo sapiens
  misc_feature (61)..(62): /note="This region represents a CpG dinucleotide"
  misc_feature (61)..(61): /note="Nucleotide may be methylated to form 5-methylcytosine"
ttaaatgatgtatttatgtattacttcagtaaattaattttaataagaaaaatcaatgtacgaggagagactggtgtaactatgctgagagagaaagacatgttactaagaaatgaacagaa

SEQ ID NO: 4925 - DNA, 122 bp, Homo sapiens
  misc_feature (61)..(62): /note="This region represents a CpG dinucleotide"
  misc_feature (61)..(61): /note="Nucleotide may be methylated to form 5-methylcytosine"
gtctgtttgcatgggaggtttgttttgatgatgcaagactgtgcactgacctcaagcctgcgtcttcataatgtggatgattcacaatgggccgaagtgcagagagcttaacacttgccatc

SEQ ID NO: 4926 - DNA, 122 bp, Homo sapiens
  misc_feature (61)..(62): /note="This region represents a CpG dinucleotide"
  misc_feature (61)..(61): /note="Nucleotide may be methylated to form 5-methylcytosine"
gccacactgaagaggtgatgtcatgggcctctgatgctgtgcttgcccccatcacccagccgtctggaatagctgctggaggtgcccagtgtgccagcactgaaggaaggcctggctgcttg

SEQ ID NO: 4927 - DNA, 122 bp, Homo sapiens
  misc_feature (61)..(62): /note="This region represents a CpG dinucleotide"
  misc_feature (61)..(61): /note="Nucleotide may be methylated to form 5-methylcytosine"
gggcagttggtgctgcttgtgtgtgggaggcatgcagacctctctgccgggctgcttgagcgtccttatggcatggcaactggcttcctccagagtgaggaatcccagagagagcaaggcag

SEQ ID NO: 4928 - DNA, 122 bp, Homo sapiens
  misc_feature (61)..(62): /note="This region represents a CpG dinucleotide"
  misc_feature (61)..(61): /note="Nucleotide may be methylated to form 5-methylcytosine"
cacttaagaaaacaaatgagcagcaacagtacatccaaagccatgtaaataaatatgtcccgctcctccactgtccagctgcatggccttaattctctgagcctcagtttcctcatttgtgt

SEQ ID NO: 4929 - DNA, 122 bp, Homo sapiens
  misc_feature (61)..(62): /note="This region represents a CpG dinucleotide"
  misc_feature (61)..(61): /note="Nucleotide may be methylated to form 5-methylcytosine"
ttccttcctggtcatcaccagtcatctctcatctccctcttccagccaacttccagttggcggccagccaaataagacactgactaaagaaggatgttcgttctgtgttatgtgtatagctt

SEQ ID NO: 4930 - DNA, 122 bp, Homo sapiens
  misc_feature (61)..(62): /note="This region represents a CpG dinucleotide"
  misc_feature (61)..(61): /note="Nucleotide may be methylated to form 5-methylcytosine"
cccacaggagcctcttcagctttcctccagctgtggcacaggacatgtgttcggttcactcgatcacattattaagtaacataggtattatttaaaaggagaagagtgagggcggagtccta

SEQ ID NO: 4931 - DNA, 122 bp, Homo sapiens
  misc_feature (61)..(62): /note="This region represents a CpG dinucleotide"
  misc_feature (61)..(61): /note="Nucleotide may be methylated to form 5-methylcytosine"
agcctcccagagcagacacagagccttctaagagaaatgaaaatatccctcctaaacacacgcaagcacataacaaaagccaagttaagaaggttagcgatttagttgtctcagcaacatgt

SEQ ID NO: 4932 - DNA, 122 bp, Homo sapiens
  misc_feature (61)..(62): /note="This region represents a CpG dinucleotide"
  misc_feature (61)..(61): /note="Nucleotide may be methylated to form 5-methylcytosine"
aggagccagcgcgtgtgttgaagtttcttggcccgctcacccggccggcggggaatcctgcgtggctatgaggttttccgaggcccggtcgcccgcctggtctgcgtttattttgggttaaa

SEQ ID NO: 4933 - DNA, 122 bp, Homo sapiens
  misc_feature (61)..(62): /note="This region represents a CpG dinucleotide"
  misc_feature (61)..(61): /note="Nucleotide may be methylated to form 5-methylcytosine"
tcgtctgaggggtgaccttactcactgcccatccatcctgcaccaggctggccccggccacgaggctttgcaatcaaggattcccagcgccactaggacttgttgcctgcccagagtttctc

SEQ ID NO: 4934 - DNA, 122 bp, Homo sapiens
  misc_feature (61)..(62): /note="This region represents a CpG dinucleotide"
  misc_feature (61)..(61): /note="Nucleotide may be methylated to form 5-methylcytosine"
ttagagccagaaaaaagaagcctgccatcgcatcccatcgcctgtcgtgtgaatcatccacgtggatcactgatgcgactcgagggcacggaagggcccgggtgggactgcactcacgtggg

SEQ ID NO: 4935 - DNA, 122 bp, Homo sapiens
  misc_feature (61)..(62): /note="This region represents a CpG dinucleotide"
  misc_feature (61)..(61): /note="Nucleotide may be methylated to form 5-methylcytosine"
atgctctgtgtgattggtgttttgcaatcatgtcaagggcatatacttttaagaacccaacgcttcgaggggatatttgctcaagatcacacaattagtcaacagatgaggtaagagtaaac

SEQ ID NO: 4936 - DNA, 122 bp, Homo sapiens
  misc_feature (61)..(62): /note="This region represents a CpG dinucleotide"
  misc_feature (61)..(61): /note="Nucleotide may be methylated to form 5-methylcytosine"
ttcaaagtaattgccctggtctttttctgtcactgtaatttaacttgaactcatgtcctccgtgggctaatggtattggttccatacaatggttaatccagtgcttcctggaacacaggaac

SEQ ID NO: 4937 - DNA, 122 bp, Homo sapiens
  misc_feature (61)..(62): /note="This region represents a CpG dinucleotide"
  misc_feature (61)..(61): /note="Nucleotide may be methylated to form 5-methylcytosine"
tttaccttaagcatctaaatatgtacagcccaaaataaaattcagcagtaacaacaatggcgttctggtgtttactaacaaacacttcagagtggggcataagggagacgcctctgcctggg

SEQ ID NO: 4938 - DNA, 122 bp, Homo sapiens
  misc_feature (61)..(62): /note="This region represents a CpG dinucleotide"
  misc_feature (61)..(61): /note="Nucleotide may be methylated to form 5-methylcytosine"
ctgcctttgagtcagcctgagctgatgtgttttctggaatgactttttcttttttgaagtcgatctacaggaatcggcctcatcagctgtgtgtgttgagaggtggggacgggggagggatg

SEQ ID NO: 4939 - DNA, 122 bp, Homo sapiens
  misc_feature (61)..(62): /note="This region represents a CpG dinucleotide"
  misc_feature (61)..(61): /note="Nucleotide may be methylated to form 5-methylcytosine"
acagcattctgcccatgcttggtgctgcttctccaaaaggcgactctggcgtgtgttgggcgttacatcattctctccttcaggggcttaaatgatgaaatatcaagagagggaattaaata

SEQ ID NO: 4940 - DNA, 122 bp, Homo sapiens
  misc_feature (61)..(62): /note="This region represents a CpG dinucleotide"
  misc_feature (61)..(61): /note="Nucleotide may be methylated to form 5-methylcytosine"
taaatatttatatacctgttataaaattcaagttattctaagtttaattctgtccttctacgtggcactgctgccacatgtgtttgcttgctagttacccatttggctgtttgctatgcagg

SEQ ID NO: 4941 - DNA, 122 bp, Homo sapiens
  misc_feature (61)..(62): /note="This region represents a CpG dinucleotide"
  misc_feature (61)..(61): /note="Nucleotide may be methylated to form 5-methylcytosine"
ggctggaagaatctttgtccatacagaattgtgatcagactcctggtgctactacatttccgtgctgttggccattacccaggagggctatagcagggtcagaaagacgttagggaaaagag

SEQ ID NO: 4942 - DNA, 122 bp, Homo sapiens
  misc_feature (61)..(62): /note="This region represents a CpG dinucleotide"
  misc_feature (61)..(61): /note="Nucleotide may be methylated to form 5-methylcytosine"
tgaatgcctcagggatcaagaggagctaggatgggagaggctcaaggagtgcgtgggactcggtggcttgactggagtcttctgaaggatgcattattttgttttaaacactttcataaaat

SEQ ID NO: 4943 - DNA, 122 bp, Homo sapiens
  misc_feature (61)..(62): /note="This region represents a CpG dinucleotide"
  misc_feature (61)..(61): /note="Nucleotide may be methylated to form 5-methylcytosine"
agcactgccaagcaattcagaagagaaataaatcaattcattccatctccttaatgctgccgtgtctaacaggtttctatgctgaaaatatcaccagctggacactgtgacacttaatattg

SEQ ID NO: 4944 - DNA, 122 bp, Homo sapiens
  misc_feature (61)..(62): /note="This region represents a CpG dinucleotide"
  misc_feature (61)..(61): /note="Nucleotide may be methylated to form 5-methylcytosine"
tatctaccctcatgcaaattaactcatacaaacagataccgaggaggcccactactaacccgtaagtgcctttgcctttgtgctatttggaactgtttgatctatacagaaaaatttgtccc

SEQ ID NO: 4945 - DNA, 122 bp, Homo sapiens
  misc_feature (61)..(62): /note="This region represents a CpG dinucleotide"
  misc_feature (61)..(61): /note="Nucleotide may be methylated to form 5-methylcytosine"
ctacacacaatgacaggcaccttctatattgagtgagtgtcgccggccgtcctagtgctccgctccttagcaccccagaaagcaccgtcccctgctccgagcacccaaggcactccctgtgg

SEQ ID NO: 4946 - DNA, 122 bp, Homo sapiens
  misc_feature (61)..(62): /note="This region represents a CpG dinucleotide"
  misc_feature (61)..(61): /note="Nucleotide may be methylated to form 5-methylcytosine"
aagctgtcgcgggagcaggcaccttgtggtcagctctgggacccgcatttgcagtgagtgcgtggagccccaggcaaggcctgggaaaggttgcaggtgaagagagggcaccctgtcgtcct

SEQ ID NO: 4947 - DNA, 122 bp, Homo sapiens
  misc_feature (61)..(62): /note="This region represents a CpG dinucleotide"
  misc_feature (61)..(61): /note="Nucleotide may be methylated to form 5-methylcytosine"
gggcaacatcgcaaaagcctggtctctacaaaaaatacaaaaattagccaaacgtggtggcgtgcgcctatggtcccagataggaggctgaggtggaaggattacctgagcccagggaggta

SEQ ID NO: 4948 - DNA, 122 bp, Homo sapiens
  misc_feature (61)..(62): /note="This region represents a CpG dinucleotide"
  misc_feature (61)..(61): /note="Nucleotide may be methylated to form 5-methylcytosine"
acggctggcacttgtcagtgggtaggaccttcagcctacctggggttatgcaaggcactacggctgtggctaggcttggatgtggacagcaggggcagcctggcatgaggactggactagag

SEQ ID NO: 4949 - DNA, 122 bp, Homo sapiens
  misc_feature (61)..(62): /note="This region represents a CpG dinucleotide"
  misc_feature (61)..(61): /note="Nucleotide may be methylated to form 5-methylcytosine"
cctgccctcaaagaacttctagggaacactgactttgcaggcatgattccgtctgcatcacgcatcagtaaacagctatgtgtactgtagggtattgagacacaatgacgttccctctgctc

SEQ ID NO: 4950 - DNA, 122 bp, Homo sapiens
  misc_feature (61)..(62): /note="This region represents a CpG dinucleotide"
  misc_feature (61)..(61): /note="Nucleotide may be methylated to form 5-methylcytosine"
tgaaactgcacatcgtaatatacacattcagagcgggctattggctaaatgaaggcaatgcgtgtggaagtctgatttgccaccttcagggcaggcgtcttatatcctaattcagaaagatg

SEQ ID NO: 4951 - DNA, 122 bp, Homo sapiens
  misc_feature (61)..(62): /note="This region represents a CpG dinucleotide"
  misc_feature (61)..(61): /note="Nucleotide may be methylated to form 5-methylcytosine"
aagcttttgcttcacagttggaacagctcatggagagcagcaaccaggtgttcctgagcccgtcacagaaggagctgccatcagtgcctctcgtgacctgcagtatttgggcctgtggaggt

SEQ ID NO: 4952 - DNA, 122 bp, Homo sapiens
  misc_feature (61)..(62): /note="This region represents a CpG dinucleotide"
  misc_feature (61)..(61): /note="Nucleotide may be methylated to form 5-methylcytosine"
ccctgtctcagctttgtttcaatagaacctaccctaagataatctacaagcaatcttacccgtaattttcaaaaatagtttaaatcttttggtaaatggagaagtactcctaaattaatttc

SEQ ID NO: 4953 - DNA, 122 bp, Homo sapiens
  misc_feature (61)..(62): /note="This region represents a CpG dinucleotide"
  misc_feature (61)..(61): /note="Nucleotide may be methylated to form 5-methylcytosine"
tccttcaggaggtccataaagccactctggatccaaaataatggggtcacatcttgagagcgacctgccctgccctgctctgcccccaaccttcttggcccatgccatgactcactcacctg

SEQ ID NO: 4954 - DNA, 122 bp, Homo sapiens
  misc_feature (61)..(62): /note="This region represents a CpG dinucleotide"
  misc_feature (61)..(61): /note="Nucleotide may be methylated to form 5-methylcytosine"
aggatttagaggcggcagggctggctggggtttctttcaagcgcttgccagctatggagccgtgggcaagccctgtcattcctgagactgacgctgggctggagttctgactggcaccccca

SEQ ID NO: 4955 - DNA, 122 bp, Homo sapiens
  misc_feature (61)..(62): /note="This region represents a CpG dinucleotide"
  misc_feature (61)..(61): /note="Nucleotide may be methylated to form 5-methylcytosine"
aattctgtcactgacaaggtagcaaagccatagcctgatactcctcaggacacctcatcacgcccactgggaacatggcacacactggagattccagtccaaggactttggaatgtcaactt

SEQ ID NO: 4956 - DNA, 122 bp, Homo sapiens
  misc_feature (61)..(62): /note="This region represents a CpG dinucleotide"
  misc_feature (61)..(61): /note="Nucleotide may be methylated to form 5-methylcytosine"
aacacacccagcgggatgcgagcagcccaggggcttccggagaggccggcactgccccgacgggggcgggacctcagagcagcccactcagttctcggagtcagtttctcaccaaaacaagg

SEQ ID NO: 4957 - DNA, 122 bp, Homo sapiens
  misc_feature (61)..(62): /note="This region represents a CpG dinucleotide"
  misc_feature (61)..(61): /note="Nucleotide may be methylated to form 5-methylcytosine"
agagggtgaccgctaatcctaattctaaccccaacctgaatttatgaggtcctgctggtacgcagagggaggactggagggaccagtcaggttggccagctggcccagtggtatagggagcc

SEQ ID NO: 4958 - DNA, 122 bp, Homo sapiens
  misc_feature (61)..(62): /note="This region represents a CpG dinucleotide"
  misc_feature (61)..(61): /note="Nucleotide may be methylated to form 5-methylcytosine"
aaccttctgagttctcagtatgaactgccaggccctgtgtgatctgaaatttgtaaatctcgtcaacctctccaccctcatcctccatcaccttgtgttctgctagttcctcttcagccacc

SEQ ID NO: 4959 - DNA, 122 bp, Homo sapiens
  misc_feature (61)..(62): /note="This region represents a CpG dinucleotide"
  misc_feature (61)..(61): /note="Nucleotide may be methylated to form 5-methylcytosine"
ggaaaactaatgcacacttttttcatcatcattttctgaaatctatttttaaattctggacgtggttgaggacacagtgaatagtttcatatcctgcagctctggtattggtaggtggcttt

SEQ ID NO: 4960 - DNA, 122 bp, Homo sapiens
  misc_feature (61)..(62): /note="This region represents a CpG dinucleotide"
  misc_feature (61)..(61): /note="Nucleotide may be methylated to form 5-methylcytosine"
tgatctcatcccagccttgaagcgggtattgttcacccattttatggatgaggctcagagcggggacttgcccaggtcacatgagtcactggctgagcatctcagacatcgggctgcctgac

SEQ ID NO: 4961 - DNA, 122 bp, Homo sapiens
  misc_feature (61)..(62): /note="This region represents a CpG dinucleotide"
  misc_feature (61)..(61): /note="Nucleotide may be methylated to form 5-methylcytosine"
ccctcatgcttcctgggatcaactcccaagttacctgcttgtacccaagtctgtctcaggcgctgctttggatggagcccagactcagaatgttacctcacttgcctgcacctcagttttct

SEQ ID NO: 4962 - DNA, 122 bp, Homo sapiens
  misc_feature (61)..(62): /note="This region represents a CpG dinucleotide"
  misc_feature (61)..(61): /note="Nucleotide may be methylated to form 5-methylcytosine"
agtacagtgacttgcacacaagctccaaggagccgcgcttatctcctctggccagcctggcgttgcaccgtttgtccgcctgctggggcctggtctgtgttcccgtgctcccataaactccc

SEQ ID NO: 4963 - DNA, 122 bp, Homo sapiens
  misc_feature (61)..(62): /note="This region represents a CpG dinucleotide"
  misc_feature (61)..(61): /note="Nucleotide may be methylated to form 5-methylcytosine"
aaaagttagtcagagccacacttctcaaactttactgtttatcatattcatctgggacctcgttaattgcaggttccacttcagtaggtctgagtcagggccggagattctacttttccaac

SEQ ID NO: 4964 - DNA, 122 bp, Homo sapiens
  misc_feature (61)..(62): /note="This region represents a CpG dinucleotide"
  misc_feature (61)..(61): /note="Nucleotide may be methylated to form 5-methylcytosine"
tacaaatcgcaacagcaggatcacactgcctggctaaaggcaattgctttgcagtgaacacgtaacttaagccatgtcaattaaggtttttccctggaacttttggaaataaagccatggaa

SEQ ID NO: 4965 - DNA, 122 bp, Homo sapiens
  misc_feature (61)..(62): /note="This region represents a CpG dinucleotide"
  misc_feature (61)..(61): /note="Nucleotide may be methylated to form 5-methylcytosine"
aagcgagctgaacacaaggaaaaaaagcttccttgggagacaagaatgctggcatctctacgacaggggcactgttagcattacggacctagaaagtgagatgtcacacatagtcccaacta

SEQ ID NO: 4966 - DNA, 122 bp, Homo sapiens
  misc_feature (61)..(62): /note="This region represents a CpG dinucleotide"
  misc_feature (61)..(61): /note="Nucleotide may be methylated to form 5-methylcytosine"
taaagcttcccacttggcacctcacccagaggctagctcacattagtgtgtcagagggagcgctgctcaggctttactcttccggtcctagttggctacactgtcccctcaccccttacagt

SEQ ID NO: 4967 - DNA, 122 bp, Homo sapiens
  misc_feature (61)..(62): /note="This region represents a CpG dinucleotide"
  misc_feature (61)..(61): /note="Nucleotide may be methylated to form 5-methylcytosine"
agtcacggagataatgacaaagcccagaagtcaataatccattctgtaaacatcacctaccgtaggaagtggtgacctcacaggcgaaacaccacagtcattcattgtcaaggtctgtatgt

SEQ ID NO: 4968 - DNA, 122 bp, Homo sapiens
  misc_feature (61)..(62): /note="This region represents a CpG dinucleotide"
  misc_feature (61)..(61): /note="Nucleotide may be methylated to form 5-methylcytosine"
tcatcttgcattgcttgaagccagattcacttcctgacttcctaattctatgagccagttcgttagttgggttttccttatttagttggggttcctttacttgtagtcataagaatcttaaa

SEQ ID NO: 4969 - DNA, 122 bp, Homo sapiens
  misc_feature (61)..(62): /note="This region represents a CpG dinucleotide"
  misc_feature (61)..(61): /note="Nucleotide may be methylated to form 5-methylcytosine"
acagttaaaacacagcttactagatacaaatcctgccttctcatggtaatatcaatgatccgtacagcagtgaaatgtggagctaattgattcctttgaatgccaaaagcagggtcctaagg

SEQ ID NO: 4970 - DNA, 122 bp, Homo sapiens
  misc_feature (61)..(62): /note="This region represents a CpG dinucleotide"
  misc_feature (61)..(61): /note="Nucleotide may be methylated to form 5-methylcytosine"
taggtcaacaacagttttaccaaacattttgccacagcataattatgttctccagtttcccgactcacaatatttgtgaagtttccatatgcaactttacccatgttacacataatcactgt

SEQ ID NO: 4971 - DNA, 122 bp, Homo sapiens
  misc_feature (61)..(62): /note="This region represents a CpG dinucleotide"
  misc_feature (61)..(61): /note="Nucleotide may be methylated to form 5-methylcytosine"
taacaagaactatcacagaagactgcagaaagcacaatttggcaaaaaggccatcacaaacgtatacaagaaatacttctgcaaggacatctgccttgcaactgcctgtccaacctccagct

SEQ ID NO: 4972 - DNA, 122 bp, Homo sapiens
  misc_feature (61)..(62): /note="This region represents a CpG dinucleotide"
  misc_feature (61)..(61): /note="Nucleotide may be methylated to form 5-methylcytosine"
ccaagggagtctcccaagggctccaagggatggagcgtccgtagatgcccggaggagttgcggtgggcggggggcgcgttgtgtccaaggctgtgtcgagggtcatgtgcagccgcccttgc

SEQ ID NO: 4973 - DNA, 122 bp, Homo sapiens
  misc_feature (61)..(62): /note="This region represents a CpG dinucleotide"
  misc_feature (61)..(61): /note="Nucleotide may be methylated to form 5-methylcytosine"
ccctgtgctgagagggcagtggtttgcctgcatttcccatttctcaaagggaaggccccacggccgccattgctcagccctggactggagcccctcaattgtctggagtggcagtggcggcc

SEQ ID NO: 4974 - DNA, 122 bp, Homo sapiens
  misc_feature (61)..(62): /note="This region represents a CpG dinucleotide"
  misc_feature (61)..(61): /note="Nucleotide may be methylated to form 5-methylcytosine"
cacctggacttcagcaagggcctcctccccagcccatcctgcccatggccacacaggctgcgttcaaagtgagcttcctaataggcattctggactatgctgcttgtcagattcgtctttca

SEQ ID NO: 4975 - DNA, 122 bp, Homo sapiens
  misc_feature (61)..(62): /note="This region represents a CpG dinucleotide"
  misc_feature (61)..(61): /note="Nucleotide may be methylated to form 5-methylcytosine"
aaaagactgatgtggccaggcaccgaggcgcacatctgtaatcccagcactttgggaggccgaggcaggtggatcaccagacatgaggagttggagaccagcctggtcaacttggtgaaacc

SEQ ID NO: 4976 - DNA, 122 bp, Homo sapiens
  misc_feature (61)..(62): /note="This region represents a CpG dinucleotide"
  misc_feature (61)..(61): /note="Nucleotide may be methylated to form 5-methylcytosine"
aaactaaggactagaatgctggcctttgaatgtagctgactcatgtataatcataatgctcgagttaggtctccagaccaaaacagagctccacctcttatatttccagatgattgtgcgat

SEQ ID NO: 4977 - DNA, 122 bp, Homo sapiens
  misc_feature (61)..(62): /note="This region represents a CpG dinucleotide"
  misc_feature (61)..(61): /note="Nucleotide may be methylated to form 5-methylcytosine"
tttagtaagcctgcatcctcttttggtctcacgttggttataatctcatctttgagctctcgtctcgtggaactgatgttttaatgaggttattcctccgtgtggagcagtggtgaggaaca

SEQ ID NO: 4978 - DNA, 122 bp, Homo sapiens
  misc_feature (61)..(62): /note="This region represents a CpG dinucleotide"
  misc_feature (61)..(61): /note="Nucleotide may be methylated to form 5-methylcytosine"
gatgactatttttctctctggaaactcataggatcttctcattatccttggtgttctaaacgttttaatgcaatctaagtgtggacctttgaaaattcattttcttgtttatgtggtggctc

SEQ ID NO: 4979 - DNA, 122 bp, Homo sapiens
  misc_feature (61)..(62): /note="This region represents a CpG dinucleotide"
  misc_feature (61)..(61): /note="Nucleotide may be methylated to form 5-methylcytosine"
gtaagcctttcatccttgcttaatcctaaaaccctacatttaagtacacggcaaagaaaacgtacaatgcaaaggcaagggcatgcttgaagaatgcaaagcagcaaaggattctcaagaaa

SEQ ID NO: 4980 - DNA, 122 bp, Homo sapiens
  misc_feature (61)..(62): /note="This region represents a CpG dinucleotide"
  misc_feature (61)..(61): /note="Nucleotide may be methylated to form 5-methylcytosine"
tgccctctctgaggacttcctgtgttcacagtcatctagcagacaccaggcagtggctgccgctgcttggaaatacagcagacagcaatgtgtccctgagataaccctatccactcagggct

SEQ ID NO: 4981 - DNA, 122 bp, Homo sapiens
  misc_feature (61)..(62): /note="This region represents a CpG dinucleotide"
  misc_feature (61)..(61): /note="Nucleotide may be methylated to form 5-methylcytosine"
caagtgtaagcatctgcagtgaccaaggggcgccatgcaggagacacatacagaagtgcgcgaccctgtaaccaggggccctgacccaacaagagagattgaggaaggcttcctggaggagg

SEQ ID NO: 4982 - DNA, 122 bp, Homo sapiens
  misc_feature (61)..(62): /note="This region represents a CpG dinucleotide"
  misc_feature (61)..(61): /note="Nucleotide may be methylated to form 5-methylcytosine"
cattcatttttaggactcttaaaaatgccatgtggggcttctgtaggtacagggaggaggcgtgacattgctaaagagtgtgagtttgtgtgacacaggccatagacacctgccttaacaga

SEQ ID NO: 4983 - DNA, 122 bp, Homo sapiens
  misc_feature (61)..(62): /note="This region represents a CpG dinucleotide"
  misc_feature (61)..(61): /note="Nucleotide may be methylated to form 5-methylcytosine"
attatttattcatatgtgtaaggatgtgcgcaggacccaacttctcagtgcactgcatgccgttaaaatgtaaacacaactgccactgagtgaatgcagagcatgttctaggtttccaagca

SEQ ID NO: 4984 - DNA, 122 bp, Homo sapiens
  misc_feature (61)..(62): /note="This region represents a CpG dinucleotide"
  misc_feature (61)..(61): /note="Nucleotide may be methylated to form 5-methylcytosine"
tgttggggtcagaaccagagggagaaaggctggggacagggatgggcggagggatccacgcgcagagaatgagattgcttaactccagatcatggtgaggctgcacctctgaaactggaatg

SEQ ID NO: 4985 - DNA, 122 bp, Homo sapiens
  misc_feature (61)..(62): /note="This region represents a CpG dinucleotide"
  misc_feature (61)..(61): /note="Nucleotide may be methylated to form 5-methylcytosine"
ccactctaacccaaaggggtgttccctggtgaggccctgctgagaagctagggttggtctcgcttcatctctgtgtcctgaggtttcttgagaaaggttggttgtgggcccgcagagggctg

SEQ ID NO: 4986 - DNA, 122 bp, Homo sapiens
  misc_feature (61)..(62): /note="This region represents a CpG dinucleotide"
  misc_feature (61)..(61): /note="Nucleotide may be methylated to form 5-methylcytosine"
actttcttgttagtaaccaatgttctctaagacttaggtcaccctgaagacatcggaagacgtaaccaacgaacaaccacactttgagtttcacaacataagtagaagacatattatttaaa

SEQ ID NO: 4987 - DNA, 122 bp, Homo sapiens
  misc_feature (61)..(62): /note="This region represents a CpG dinucleotide"
  misc_feature (61)..(61): /note="Nucleotide may be methylated to form 5-methylcytosine"
ccatagttgagcagaggaaaaaaactgctcagggtagggaaaggaatttgcagactgccacggcaggttaatttagactaatttggaccccaatcatgagagtaacacatgtcctctggaat

SEQ ID NO: 4988 - DNA, 122 bp, Homo sapiens
  misc_feature (61)..(62): /note="This region represents a CpG dinucleotide"
  misc_feature (61)..(61): /note="Nucleotide may be methylated to form 5-methylcytosine"
cagggggaagcccccaagtagtcacagttagctcctccctattggtggggctgccatgcacgtgtcccgggggtggggtgggtagagatgtccttgctttgtctgtggctcatagaacatct

SEQ ID NO: 4989 - DNA, 122 bp, Homo sapiens
  misc_feature (61)..(62): /note="This region represents a CpG dinucleotide"
  misc_feature (61)..(61): /note="Nucleotide may be methylated to form 5-methylcytosine"
taccacctttgaaaaatcacatttccattcgaagtaggtagagtctttccatggaaataacgtgattttttaagactccgaggcattgccacagtgacccctagtggagcttataggccagc

SEQ ID NO: 4990 - DNA, 122 bp, Homo sapiens
  misc_feature (61)..(62): /note="This region represents a CpG dinucleotide"
  misc_feature (61)..(61): /note="Nucleotide may be methylated to form 5-methylcytosine"
tgcgacgatggctgggacctggcggacgcggaggtcgtgtgccgccagctgggctgtggtcgggccgtcgccgccctgggggccgccgcctttggccctggctccgggcccgtgtggctgga

SEQ ID NO: 4991 - DNA, 122 bp, Homo sapiens
  misc_feature (61)..(62): /note="This region represents a CpG dinucleotide"
  misc_feature (61)..(61): /note="Nucleotide may be methylated to form 5-methylcytosine"
gcagctagctggtggcagccctggcagatcccggcacacagtcaggctccacgccttacccgagccagttgtgcctctagattacgcctcgcttaaagtccagcgaccaagatagaaaaaca

SEQ ID NO: 4992 - DNA, 122 bp, Homo sapiens
  misc_feature (61)..(62): /note="This region represents a CpG dinucleotide"
  misc_feature (61)..(61): /note="Nucleotide may be methylated to form 5-methylcytosine"
cgcccgacacccgccccctccccccactcctgagaactctttactttttgtttggaaaatcggggccatttctttatttatctctgggtcttcccggaggagggcagagaaggggagagcga

SEQ ID NO: 4993 - DNA, 122 bp, Homo sapiens
  misc_feature (61)..(62): /note="This region represents a CpG dinucleotide"
  misc_feature (61)..(61): /note="Nucleotide may be methylated to form 5-methylcytosine"
gaagaacggatcacttaaattcagagtggcatttttatttctgagggagctgggctctcacggaacgtgctggagtgacagcctggaagagcgaaagccgccccccctcccgcttccccgca

SEQ ID NO: 4994 - DNA, 122 bp, Homo sapiens
  misc_feature (61)..(62): /note="This region represents a CpG dinucleotide"
  misc_feature (61)..(61): /note="Nucleotide may be methylated to form 5-methylcytosine"
ccagtaaacagtctttaaactgctggatcagtaagctgcttacagccttgcaagcgctgacgccacatctgctcggcaattcatgtgctctcaagccaaggatttagaatccatgtttgtca

SEQ ID NO: 4995 - DNA, 122 bp, Homo sapiens
  misc_feature (61)..(62): /note="This region represents a CpG dinucleotide"
  misc_feature (61)..(61): /note="Nucleotide may be methylated to form 5-methylcytosine"
atggggagggaagagccccagcaaaaagaaacctatccaaataatatcaaatccacctgacgtgaatctgcttgggacaaagtaggtatcacatcaggatgtttctggctgcaaatgacaaa

SEQ ID NO: 4996 - DNA, 122 bp, Homo sapiens
  misc_feature (61)..(62): /note="This region represents a CpG dinucleotide"
  misc_feature (61)..(61): /note="Nucleotide may be methylated to form 5-methylcytosine"
ccaggcctcttgccctttcttcattcaactgtggctctttcaaggtgccacttaaggcatcgctgccttcaggaagccctccttgatgcccaaatttgggtttggttcctcctttgaactac

SEQ ID NO: 4997 - DNA, 122 bp, Homo sapiens
  misc_feature (61)..(62): /note="This region represents a CpG dinucleotide"
  misc_feature (61)..(61): /note="Nucleotide may be methylated to form 5-methylcytosine"
ccacagcagcttaactaatttacattcccaccaggactgtcttaagtgtttccttttctccgcagccttgccaacatctgtaattttttgactttttaatgatattctttatgactggtgca

SEQ ID NO: 4998 - DNA, 122 bp, Homo sapiens
  misc_feature (61)..(62): /note="This region represents a CpG dinucleotide"
  misc_feature (61)..(61): /note="Nucleotide may be methylated to form 5-methylcytosine"
gactaatccaatgcaacagcatcagctggcttctgggctaggccctgtgagtaaccgcaccgcaacctcacagtcaaagaatgttcacatatttgatcttcataacagtcctcctcctatga

SEQ ID NO: 4999 - DNA, 122 bp, Homo sapiens
  misc_feature (61)..(62): /note="This region represents a CpG dinucleotide"
  misc_feature (61)..(61): /note="Nucleotide may be methylated to form 5-methylcytosine"
tgcagcaagccgaatagtatgtgccaacatacttttacgtgcttgtggcttcctttctctcgcaggtttgtaaaagttttggtgcaactccccgacattcaagatgtgccactcttcaaccc

SEQ ID NO: 5000 - DNA, 122 bp, Homo sapiens
  misc_feature (61)..(62): /note="This region represents a CpG dinucleotide"
  misc_feature (61)..(61): /note="Nucleotide may be methylated to form 5-methylcytosine"
tgcctgtggcatttgccgatcttccctaacaggagtgtttccctgaactgtaaaacttcccgcaaattgcacacacagagagagaggacaggagacatagtgaccacggatacaaaggaaag

SEQ ID NO: 5001 - DNA, 122 bp, Homo sapiens
  misc_feature (61)..(62): /note="This region represents a CpG dinucleotide"
  misc_feature (61)..(61): /note="Nucleotide may be methylated to form 5-methylcytosine"
atgtgctatttattacattggtttctgtgacacatgaagcttacctaagctagaccctgtcgtcttgcttacaactgagccatcacttgggagatggaaaaatggcttctggctgtctgaat

SEQ ID NO: 5002 - DNA, 122 bp, Homo sapiens
  misc_feature (61)..(62): /note="This region represents a CpG dinucleotide"
  misc_feature (61)..(61): /note="Nucleotide may be methylated to form 5-methylcytosine"
gaattatgatttagtactaggttatttaaccacattgaaagacttcatctgaaagggcaacgtgaaaagtgttattatatgcagtataaagaagcatagggaaacattgagctctttattac

SEQ ID NO: 5003 - DNA, 122 bp, Homo sapiens
  misc_feature (61)..(62): /note="This region represents a CpG dinucleotide"
  misc_feature (61)..(61): /note="Nucleotide may be methylated to form 5-methylcytosine"
ggagctgagtgtactgggaagtccaggtgcatccttagggtaggctgcatgtgaaagctgcgtcctttttgcctgtggtgaggtgaatatcaatacagtatttatagaaagtccacataaat

SEQ ID NO: 5004 - DNA, 122 bp, Homo sapiens
  misc_feature (61)..(62): /note="This region represents a CpG dinucleotide"
  misc_feature (61)..(61): /note="Nucleotide may be methylated to form 5-methylcytosine"
tactgtgaggacccagagggacataagtgcagacagtgctgactctcccaggagtttactcgtgagtaggggtggcagagaagccatgtgtgtaaaaatgcaaggtagaaagggctttgtct

SEQ ID NO: 5005 - DNA, 122 bp, Homo sapiens
  misc_feature (61)..(62): /note="This region represents a CpG dinucleotide"
  misc_feature (61)..(61): /note="Nucleotide may be methylated to form 5-methylcytosine"
agcccgcggggtcgtgaccttcaccggactacctgctaaggaccgagctccccggacccccgagtccgccccacggctcccccttgcactggcgcagggctctcccagccccttccagatcc

SEQ ID NO: 5006 - DNA, 122 bp, Homo sapiens
  misc_feature (61)..(62): /note="This region represents a CpG dinucleotide"
  misc_feature (61)..(61): /note="Nucleotide may be methylated to form 5-methylcytosine"
ttttattggaacatagctcatttgtttacatattgtctacagctgctatcctcttacaagcgttgactagctgtgacagagaatgtatgtgcaaaacctaaagcatttactatctggcgctt

SEQ ID NO: 5007 - DNA, 122 bp, Homo sapiens
  misc_feature (61)..(62): /note="This region represents a CpG dinucleotide"
  misc_feature (61)..(61): /note="Nucleotide may be methylated to form 5-methylcytosine"
acatccttctctgcagccacaccccaacacacggagcaagaatggagagatggctcctagcgaaaactagactactgagaggaggggaaagaatgctgagcaggcaaaacaacagatgatcc

SEQ ID NO: 5008 - DNA, 122 bp, Homo sapiens
  misc_feature (61)..(62): /note="This region represents a CpG dinucleotide"
  misc_feature (61)..(61): /note="Nucleotide may be methylated to form 5-methylcytosine"
tggtgggctagcctgggaacctaaccatgtggacagacattctcatggaaagcagcctttcgcagtgcccactctgtgtcagctggaaacgccccacaccagccagcactttacacatgctg

SEQ ID NO: 5009 - DNA, 122 bp, Homo sapiens
  misc_feature (61)..(62): /note="This region represents a CpG dinucleotide"
  misc_feature (61)..(61): /note="Nucleotide may be methylated to form 5-methylcytosine"
agggctcttctctacccttgatacactcaacaccacccacagcaaactccagacacagaacgtagtaaacccaggggaccaacagatgcaaatggctgtctttcccagtaagtgtgagcttc

SEQ ID NO: 5010 - DNA, 122 bp, Homo sapiens
  misc_feature (61)..(62): /note="This region represents a CpG dinucleotide"
  misc_feature (61)..(61): /note="Nucleotide may be methylated to form 5-methylcytosine"
agtttcaggggtatcctggggtgatgaaatccttcttcagtcccccctcccccgaggagtcggttgggttggggagggagggtttcagctcctgtactccagcgttccgaggcccacgtctt

SEQ ID NO: 5011 - DNA, 122 bp, Homo sapiens
  misc_feature (61)..(62): /note="This region represents a CpG dinucleotide"
  misc_feature (61)..(61): /note="Nucleotide may be methylated to form 5-methylcytosine"
gcgccagctcagtgctggccacaggcgaaaggcagccggaatgcaccgtcccgtgtgggccggacaccccgtgaggctgagcagttgctaagttctgtgacccgggccagggtggctggaca

SEQ ID NO: 5012 - DNA, 122 bp, Homo sapiens
  misc_feature (61)..(62): /note="This region represents a CpG dinucleotide"
  misc_feature (61)..(61): /note="Nucleotide may be methylated to form 5-methylcytosine"
aatgtgaattgccttctatgtttgcagacacttccgcttcttgaaaaacagcctgaaactcgttatgaaatctgaaatgccttatattcactttcctacccctccttgtgttggaagacatt

SEQ ID NO: 5013 - DNA, 122 bp, Homo sapiens
  misc_feature (61)..(62): /note="This region represents a CpG dinucleotide"
  misc_feature (61)..(61): /note="Nucleotide may be methylated to form 5-methylcytosine"
acaacatgagatgatcttgctctgggccatgccgggaggaagggagaaggtggctgtcaacgagccaggaagcggcactcctgacactggatctaccaacacccctatctcagacttccagc

SEQ ID NO: 5014 - DNA, 122 bp, Homo sapiens
  misc_feature (61)..(62): /note="This region represents a CpG dinucleotide"
  misc_feature (61)..(61): /note="Nucleotide may be methylated to form 5-methylcytosine"
tcatctccccagattgtctcccaatttcttcgtctgtaaaatggggctggcagcagtgcccgcccgcaggcctgtgccgggaccaagctgcgtgtgctgtgtgtcctgtgtctggcagataa

SEQ ID NO: 5015 - DNA, 122 bp, Homo sapiens
  misc_feature (61)..(62): /note="This region represents a CpG dinucleotide"
  misc_feature (61)..(61): /note="Nucleotide may be methylated to form 5-methylcytosine"
ccctctgcaccaccaagtcacaggctctgttccccacttctcctttccagccccaaggtgcgggttattggaattcagctagctttgggaaaacaggactgtttgtattctaacacagagct

SEQ ID NO: 5016 - DNA, 122 bp, Homo sapiens
  misc_feature (61)..(62): /note="This region represents a CpG dinucleotide"
  misc_feature (61)..(61): /note="Nucleotide may be methylated to form 5-methylcytosine"
gttgatgttctttagcttgccttgataagaagttctggtcacccaaaggtttttcccaaacgtggcttccttttgtgattgctgcttgctgtgctgagtggcagtccccggtgttccagttc

SEQ ID NO: 5017 - DNA, 122 bp, Homo sapiens
  misc_feature (61)..(62): /note="This region represents a CpG dinucleotide"
  misc_feature (61)..(61): /note="Nucleotide may be methylated to form 5-methylcytosine"
tccatgaataaatgacaaaaccaatgtgttcagtcttactaatcaaggtagcagatttctcgaatacttgtatgacatggaagaaattactaaccatacagtaggttctcgtttttcagtta

SEQ ID NO: 5018 - DNA, 122 bp, Homo sapiens
  misc_feature (61)..(62): /note="This region represents a CpG dinucleotide"
  misc_feature (61)..(61): /note="Nucleotide may be methylated to form 5-methylcytosine"
gcgactagcccgtcatagcctgcctgtggtctggtggttggccatttgcctctggctcagcgtggcgattgtttcattattttgcattcttttgttgttgttgttttttgttgttttttttt

SEQ ID NO: 5019 - DNA, 122 bp, Homo sapiens
  misc_feature (61)..(62): /note="This region represents a CpG dinucleotide"
  misc_feature (61)..(61): /note="Nucleotide may be methylated to form 5-methylcytosine"
ataaaaagggtaatgcaacagagaaagaaggtagggtccttgcagccaaagggagcagtacggtcagcagcatacagaggcatgatggcatgatgaggcatgatgagtcatggtgcggcatg

SEQ ID NO: 5020 - DNA, 122 bp, Homo sapiens
  misc_feature (61)..(62): /note="This region represents a CpG dinucleotide"
  misc_feature (61)..(61): /note="Nucleotide may be methylated to form 5-methylcytosine"
ctccaggagccccaaggacggcgaagggcagcctggagttggggggcgtcagcgagggcgcgggcaggggagagaggcgcccctggaagtggagccggcctggacagaggcagggttcggga

SEQ ID NO: 5021 - DNA, 122 bp, Homo sapiens
  misc_feature (61)..(62): /note="This region represents a CpG dinucleotide"
  misc_feature (61)..(61): /note="Nucleotide may be methylated to form 5-methylcytosine"
taaacagcatgtgatccatgggtctgctatcaaaacaaatacatttcacgagatgtgaagcgtcatttaacttgagcaatgacttgagattattacttagggtttagatggaatgttttctt

SEQ ID NO: 5022 - DNA, 122 bp, Homo sapiens
  misc_feature (61)..(62): /note="This region represents a CpG dinucleotide"
  misc_feature (61)..(61): /note="Nucleotide may be methylated to form 5-methylcytosine"
acttccagctctaaccttcatcctcaccccgccattaagctattctatgaaaaagggatacgagggctaacgatgcatttgtgatatagtgctgctaatcagcataaggctatattcagcaa

SEQ ID NO: 5023 - DNA, 122 bp, Homo sapiens
  misc_feature (61)..(62): /note="This region represents a CpG dinucleotide"
  misc_feature (61)..(61): /note="Nucleotide may be methylated to form 5-methylcytosine"
gggatggttcagccccgccccgctagggcggggcctgcgcctgcgcgctcagcggccgggcgtgtaacccacgggtgcgcgcccacgaccgccagactcgagcagtctctggaacacgctgc

SEQ ID NO: 5024 - DNA, 122 bp, Homo sapiens
  misc_feature (61)..(62): /note="This region represents a CpG dinucleotide"
  misc_feature (61)..(61): /note="Nucleotide may be methylated to form 5-methylcytosine"
aaggcaacgtgtgtaggctctagttagagcactttggacacctagtggtgattattcagacgatggacacattccagagtctaaggttcctcgtctgcaaaatggggatactaggacctcct

SEQ ID NO: 5025 - DNA, 122 bp, Homo sapiens
  misc_feature (61)..(62): /note="This region represents a CpG dinucleotide"
  misc_feature (61)..(61): /note="Nucleotide may be methylated to form 5-methylcytosine"
aaaactgccctgagctgctactctctcctagggggttgccctgctctgcaggagcagtcacggagctgtaacaccaccagagggggaacactgacgcttcaattaagctgtttcttctactt

SEQ ID NO: 5026 - DNA, 122 bp, Homo sapiens
  misc_feature (61)..(62): /note="This region represents a CpG dinucleotide"
  misc_feature (61)..(61): /note="Nucleotide may be methylated to form 5-methylcytosine"
aactgcagggttcacatgcgtctctgtgtcacattatggtaattctcttaatctttcaaacgttttcattgttattatatgttatggtgatctgtgatctttgatgttactattgtaattgt

SEQ ID NO: 5027 - DNA, 122 bp, Homo sapiens
  misc_feature (61)..(62): /note="This region represents a CpG dinucleotide"
  misc_feature (61)..(61): /note="Nucleotide may be methylated to form 5-methylcytosine"
aggagatttaggtggtgtatcagtgcgagctcggtggcgaacaatgggctccctgttgctcgttgaagcagaatggagacttggcgggattagcggcctctgaggtctccgagggctggagg

SEQ ID NO: 5028 - DNA, 122 bp, Homo sapiens
  misc_feature (61)..(62): /note="This region represents a CpG dinucleotide"
  misc_feature (61)..(61): /note="Nucleotide may be methylated to form 5-methylcytosine"
gtgtatcccttcttacaacatgtagtgcggttctgctaagcactctctccccagcatctacgtttccagacaagattgtgcttgttgtagactggcactcccagggaaccatcaagtgagcg

SEQ ID NO: 5029 - DNA, 122 bp, Homo sapiens
  misc_feature (61)..(62): /note="This region represents a CpG dinucleotide"
  misc_feature (61)..(61): /note="Nucleotide may be methylated to form 5-methylcytosine"
gaataatggagttcagtgttactcaaggggcagtcacctgcacagtcattaccggaatgacgtgtttcatcagatgtttcaaatcccgattcttggggcctgctctaaacctgcctaccaag

SEQ ID NO: 5030 - DNA, 122 bp, Homo sapiens
  misc_feature (61)..(62): /note="This region represents a CpG dinucleotide"
  misc_feature (61)..(61): /note="Nucleotide may be methylated to form 5-methylcytosine"
caggtccagtgacaaacatacacaatttctagagttaccgcggctggcaagagtagaactcgctttgctaattcaggaacggaagttggagatttttgttgattgttttaaagtggctcgaa

SEQ ID NO: 5031 - DNA, 122 bp, Homo sapiens
  misc_feature (61)..(62): /note="This region represents a CpG dinucleotide"
  misc_feature (61)..(61): /note="Nucleotide may be methylated to form 5-methylcytosine"
ttaaattcttatcagatgcaacattttctaaatgagctctccttataccacaaaacttcacgttttcaaaatcaatctgactttgaggaatcctctagagatttactgttaacataaatttt

SEQ ID NO: 5032 - DNA, 122 bp, Homo sapiens
  misc_feature (61)..(62): /note="This region represents a CpG dinucleotide"
  misc_feature (61)..(61): /note="Nucleotide may be methylated to form 5-methylcytosine"
aagccgcaggaatctcaaacacagcctcatcagccctgcctaactcctttggtggcttgacgtggttaatttcaaacaccttagcagggcttaggctgaacgggcccctcgttgccctccta

SEQ ID NO: 5033 - DNA, 122 bp, Homo sapiens
  misc_feature (61)..(62): /note="This region represents a CpG dinucleotide"
  misc_feature (61)..(61): /note="Nucleotide may be methylated to form 5-methylcytosine"
gctggagcagaagttgctggtgcgccgagctgccttgcggtttaggcccagaggttcacgcgagcgagcgcgctgtggtgagcgcgataaccggcgagccgcgaggcgattcggagaatttc

SEQ ID NO: 5034 - DNA, 122 bp, Homo sapiens
  misc_feature (61)..(62): /note="This region represents a CpG dinucleotide"
  misc_feature (61)..(61): /note="Nucleotide may be methylated to form 5-methylcytosine"
caaacagattatagtaaatggttacataatgcatggggttgtgcacctgcgctccaaacccgctgtgtcataccataccggatgtttaccttggcctactcctgactgaagcacagccactt

SEQ ID NO: 5035 - DNA, 122 bp, Homo sapiens
  misc_feature (61)..(62): /note="This region represents a CpG dinucleotide"
  misc_feature (61)..(61): /note="Nucleotide may be methylated to form 5-methylcytosine"
aggctgcttaaggttgagggcaaacctcaaagactcggtaaacaatgtaggctttctcttcggcaattaaaaacttcctggtattgtccgggcacagtggctcacgcctgtaatcccagcac

SEQ ID NO: 5036 - DNA, 122 bp, Homo sapiens
  misc_feature (61)..(62): /note="This region represents a CpG dinucleotide"
  misc_feature (61)..(61): /note="Nucleotide may be methylated to form 5-methylcytosine"
tttgttcctggttcctgggaggtaacctataaacctctgggatttcctgagtgacaagtgcgtctttcttattcatggtgtgtccctcagatcacaactagtagtttatgctaatgaggtga

SEQ ID NO: 5037 - DNA, 122 bp, Homo sapiens
  misc_feature (61)..(62): /note="This region represents a CpG dinucleotide"
  misc_feature (61)..(61): /note="Nucleotide may be methylated to form 5-methylcytosine"
aagtaatccacctgcttcggcctcctaaagtgctgggattacagtgggcgtgagccatcacgcccagcccagttgactgtttagtgatgtaccaaggcttagggaaaagcctgaaatttctg

SEQ ID NO: 5038 - DNA, 122 bp, Homo sapiens
  misc_feature (61)..(62): /note="This region represents a CpG dinucleotide"
  misc_feature (61)..(61): /note="Nucleotide may be methylated to form 5-methylcytosine"
tgcacctggccctagaaggaagatttaacagtaaaatatacttaaatgctgggctacctccgcagactagctcagcctctttgggtctcaaatcagcctggccgggaggctgagtggaggtt

SEQ ID NO: 5039 - DNA, 122 bp, Homo sapiens
  misc_feature (61)..(62): /note="This region represents a CpG dinucleotide"
  misc_feature (61)..(61): /note="Nucleotide may be methylated to form 5-methylcytosine"
tacccactttgtccttcccgttcatgtgtccggccacctgatacgagaggggcacttagccgttgaggaggcggagtctgccgcccgccggctgcccggtgccctcagggatggcctcgatc

SEQ ID NO: 5040 - DNA, 122 bp, Homo sapiens
  misc_feature (61)..(62): /note="This region represents a CpG dinucleotide"
  misc_feature (61)..(61): /note="Nucleotide may be methylated to form 5-methylcytosine"
aggttataaccacaggtttctttatatcgctcttcttggacttcctgatgtcaccctgtgcgtgtccacaatagctgctccaccctgcacaatcttgagaagtgcaaaagggaagcgttacc

SEQ ID NO: 5041 - DNA, 122 bp, Homo sapiens
  misc_feature (61)..(62): /note="This region represents a CpG dinucleotide"
  misc_feature (61)..(61): /note="Nucleotide may be methylated to form 5-methylcytosine"
ggccgtgggaggcttcctgaggtgggggccgggccaggatggctgcagcgcagcgacggccggggccgggagcgggtcctgggcggcccaggagaagcagttcccgccggcgctgctgagtt

SEQ ID NO: 5042 - DNA, 122 bp, Homo sapiens
  misc_feature (61)..(62): /note="This region represents a CpG dinucleotide"
  misc_feature (61)..(61): /note="Nucleotide may be methylated to form 5-methylcytosine"
gtctccatgtgacaaagcagttttgaaggttacagggcttcattggatagccagttgtcacgtattttacaaagtggccttggagaatgtgaatcacctgttgcaatgaacccataatttaa

SEQ ID NO: 5043 - DNA, 122 bp, Homo sapiens
  misc_feature (61)..(62): /note="This region represents a CpG dinucleotide"
  misc_feature (61)..(61): /note="Nucleotide may be methylated to form 5-methylcytosine"
ccagcactatagctgtcattgggggaacttgttagaaatgcaaattttgggtcctctcctcggacctactgcatcagagactgtggggtggggcccagcaatctgttttaacagggtttcca

SEQ ID NO: 5044 - DNA, 122 bp, Homo sapiens
  misc_feature (61)..(62): /note="This region represents a CpG dinucleotide"
  misc_feature (61)..(61): /note="Nucleotide may be methylated to form 5-methylcytosine"
cctataaaatattaattcacaaaatgtttagtctgcatctattccagcctcaagccctaacgttcacttacaggaaataagaagataaaagaacaaggccaacatcacaatgaggaaacaat

SEQ ID NO: 5045 - DNA, 122 bp, Homo sapiens
  misc_feature (61)..(62): /note="This region represents a CpG dinucleotide"
  misc_feature (61)..(61): /note="Nucleotide may be methylated to form 5-methylcytosine"
tctgagaaatgcaggctgggcatcaaggaagaagctggaactgggctgggtgaggaacagcgaggaggagcttctcatggggatccctatggaattgtcacaagcttaggctggcctatgtg

SEQ ID NO: 5046 - DNA, 122 bp, Homo sapiens
  misc_feature (61)..(62): /note="This region represents a CpG dinucleotide"
  misc_feature (61)..(61): /note="Nucleotide may be methylated to form 5-methylcytosine"
gatcatttcaaaattccaaggtttatttttgtggtgaaaacacaatttttatttatttggcgaatgagttatagaaggagttctgactgtacaaagtttcatatgaaccacattcttcaaag

SEQ ID NO: 5047 - DNA, 122 bp, Homo sapiens
  misc_feature (61)..(62): /note="This region represents a CpG dinucleotide"
  misc_feature (61)..(61): /note="Nucleotide may be methylated to form 5-methylcytosine"
gccccgaggcgctggcgagccagggtgtggtcaagggccctggctgccaccacggtctcccgcagagcccctaccaggcgcgcgcgtccctgacccagtcgctcagcatcaaagtgcaggtc

SEQ ID NO: 5048 - DNA, 122 bp, Homo sapiens
  misc_feature (61)..(62): /note="This region represents a CpG dinucleotide"
  misc_feature (61)..(61): /note="Nucleotide may be methylated to form 5-methylcytosine"
gctaacacatcctactgccaaatgccagagctggcaggacctatagaaagctggctaacacggggcacatgtattacccttaagtcctgagcccagggcagacgtcactaagcaccgaccat

SEQ ID NO: 5049 - DNA, 122 bp, Homo sapiens
  misc_feature (61)..(62): /note="This region represents a CpG dinucleotide"
  misc_feature (61)..(61): /note="Nucleotide may be methylated to form 5-methylcytosine"
gtcgtagaccgcgtgtttgttttgaggctatatttagtttcctctttgctctctctgccacgcttgaacaacttgccaaggatgccatctctcttacgtccgccgtggtgctccggattctg

SEQ ID NO: 5050 - DNA, 122 bp, Homo sapiens
  misc_feature (61)..(62): /note="This region represents a CpG dinucleotide"
  misc_feature (61)..(61): /note="Nucleotide may be methylated to form 5-methylcytosine"
accatgtgagtaagccatcttggaagcaaatccttcagccccagccaagccttcagataacggcagctccagccagccgtttgactggaacccacctgggccactcttggattcctgagaaa

SEQ ID NO: 5051 - DNA, 122 bp, Homo sapiens
  misc_feature (61)..(62): /note="This region represents a CpG dinucleotide"
  misc_feature (61)..(61): /note="Nucleotide may be methylated to form 5-methylcytosine"
caacttctgtcatcacagcttgagatatgatgactaatttcagctcgaggaacctggtggcgagcattgaagggacaagtagccaatttgcttgcaacatcaggatgattctgtggaaccaa

SEQ ID NO: 5052 - DNA, 122 bp, Homo sapiens
  misc_feature (61)..(62): /note="This region represents a CpG dinucleotide"
  misc_feature (61)..(61): /note="Nucleotide may be methylated to form 5-methylcytosine"
tatttttctgcggagtacaactgttagtgcctgccggttgcttagcaaggtggtcccttacgattcacagcctttgagatgattttctaggggacccctcaaagacattaggagaataccag

SEQ ID NO: 5053 - DNA, 122 bp, Homo sapiens
  misc_feature (61)..(62): /note="This region represents a CpG dinucleotide"
  misc_feature (61)..(61): /note="Nucleotide may be methylated to form 5-methylcytosine"
gaaagctctgcagccatggccacagccagagatgcagcacagagcctccaggtgaggacacgctgcccctaccctgacacgtgcacccagcaccggacccaccaccagagggcactcctgct

SEQ ID NO: 5054 - DNA, 122 bp, Homo sapiens
  misc_feature (61)..(62): /note="This region represents a CpG dinucleotide"
  misc_feature (61)..(61): /note="Nucleotide may be methylated to form 5-methylcytosine"
acctgttcctggggaaaccagaataaaggctcttgctcccgctgtcccgactgaccctgccgctcccccatgtggcctggcatggtggagcacacactctcctgtcctgggaactgtctcag

SEQ ID NO: 5055 - DNA, 122 bp, Homo sapiens
  misc_feature (61)..(62): /note="This region represents a CpG dinucleotide"
  misc_feature (61)..(61): /note="Nucleotide may be methylated to form 5-methylcytosine"
ggaagtacaacgtgctatgagaacacaaagcagaagcaccacaggcttccccaaagaagtcgcatctctctctagtgggggcaaagaagggaaagcatttcagggagagagaatgatatgag

SEQ ID NO: 5056 - DNA, 122 bp, Homo sapiens
  misc_feature (61)..(62): /note="This region represents a CpG dinucleotide"
  misc_feature (61)..(61): /note="Nucleotide may be methylated to form 5-methylcytosine"
acagtatgggggaaaccacatccatgattcagttagctccacctgtccccactcttgacacgtaaagattattataattcaaggtgagatatgggtgggatcacagccaaaccatatcagat

SEQ ID NO: 5057 - DNA, 122 bp, Homo sapiens
  misc_feature (61)..(62): /note="This region represents a CpG dinucleotide"
  misc_feature (61)..(61): /note="Nucleotide may be methylated to form 5-methylcytosine"
catcgctcaggcagaagcagatctctcaaatcttttctccatgtttcctgtcttttcactcgtggtttccacttcctcatattttgattctctcatgcactagttcctcctttttattcaga

SEQ ID NO: 5058 - DNA, 122 bp, Homo sapiens
  misc_feature (61)..(62): /note="This region represents a CpG dinucleotide"
  misc_feature (61)..(61): /note="Nucleotide may be methylated to form 5-methylcytosine"
gttttctcatgtgggacctgaccttacatgctccttggatgggccacactggtgaccacgcgaggctttgatgctctcatcacagggacctgttctgagttttatgttgtctttgttggttt

SEQ ID NO: 5059 - DNA, 122 bp, Homo sapiens
  misc_feature (61)..(62): /note="This region represents a CpG dinucleotide"
  misc_feature (61)..(61): /note="Nucleotide may be methylated to form 5-methylcytosine"
ctcctgatcagggaacctgggttctataactgcttctactactgatttgtcctgtgacttcgcgcaccaaatttaggcttgtaaattaaactcccagatttctgttttccattttgcagctc

SEQ ID NO: 5060 - DNA, 122 bp, Homo sapiens
  misc_feature (61)..(62): /note="This region represents a CpG dinucleotide"
  misc_feature (61)..(61): /note="Nucleotide may be methylated to form 5-methylcytosine"
catgtgggtgaggtaccttggaaacagatctcccagcactaagcaagccagaagacatctcgacagcaatcccgtgagaaactgtgggacagaaccacccagctaagcagctcgcagattcg

SEQ ID NO: 5061 - DNA, 122 bp, Homo sapiens
  misc_feature (61)..(62): /note="This region represents a CpG dinucleotide"
  misc_feature (61)..(61): /note="Nucleotide may be methylated to form 5-methylcytosine"
gtgtgtgcattctttataatgaagcattttacaaagtggtttcacatacattactgcttccgtttctcattacagccccattaatattccccacctgatgaggaaactttcttcattctcct

SEQ ID NO: 5062 - DNA, 122 bp, Homo sapiens
  misc_feature (61)..(62): /note="This region represents a CpG dinucleotide"
  misc_feature (61)..(61): /note="Nucleotide may be methylated to form 5-methylcytosine"
tcttttcacccctgccattgggagggttccgggttcttgacctgcaaccatgaagaatgacgttatgctgacaccagagagtgaacaaggcagggaagaattttattgagtaacagaaaagc

SEQ ID NO: 5063 - DNA, 122 bp, Homo sapiens
  misc_feature (61)..(62): /note="This region represents a CpG dinucleotide"
  misc_feature (61)..(61): /note="Nucleotide may be methylated to form 5-methylcytosine"
acaagttttcacttttatttacttcatgacagacagtggagacattgcttgataatgatgcggcacagaaagctggtaggttttgagatttagaaaagaaaatttgttagtttttgtgtctc

SEQ ID NO: 5064 - DNA, 122 bp, Homo sapiens
  misc_feature (61)..(62): /note="This region represents a CpG dinucleotide"
  misc_feature (61)..(61): /note="Nucleotide may be methylated to form 5-methylcytosine"
ggctttgaagacggtgggagggacctgcaagcaaagaaatgcaagggcttcttctaaagacgggaaagtcaaggaaacaaattcctccctggaaacaaatgcaggaaggaatgcagccctgc

SEQ ID NO: 5065 - DNA, 122 bp, Homo sapiens
  misc_feature (61)..(62): /note="This region represents a CpG dinucleotide"
  misc_feature (61)..(61): /note="Nucleotide may be methylated to form 5-methylcytosine"
taatcctcagaggcccttggggtcttttaagggcatctccctgtgagtaatatcttccctcgtggttgtttaaaagacaaagaaaatgtaacacgagaaaggaccttaatgcctcaacatgg

SEQ ID NO: 5066 - DNA, 122 bp, Homo sapiens
  misc_feature (61)..(62): /note="This region represents a CpG dinucleotide"
  misc_feature (61)..(61): /note="Nucleotide may be methylated to form 5-methylcytosine"
attgatgattcaggtccctggtagtgcatgcaaagtcatttatgtgcatgatgtgactcccgcattgaagaaagacaaaactataattttggattttatttcactttatagcattctaattt

SEQ ID NO: 5067 - DNA, 122 bp, Homo sapiens
  misc_feature (61)..(62): /note="This region represents a CpG dinucleotide"
  misc_feature (61)..(61): /note="Nucleotide may be methylated to form 5-methylcytosine"
acttcactcctcagatccatgtggacttgcagggctggagccctgtctcagtgtccaagacgtgtgtcttgtgcctgggaactgaggactgcttgttctctgcttcctgcttcagctggatg

SEQ ID NO: 5068 - DNA, 122 bp, Homo sapiens
  misc_feature (61)..(62): /note="This region represents a CpG dinucleotide"
  misc_feature (61)..(61): /note="Nucleotide may be methylated to form 5-methylcytosine"
cccatgattatgaatagccccaagactaatcactcttctgtgatgtctgtccctggaaagcgtagaacaccccacacagtgcccacttttgttctgccagtttggagaccctgacacaccca

SEQ ID NO: 5069 - DNA, 122 bp, Homo sapiens
  misc_feature (61)..(62): /note="This region represents a CpG dinucleotide"
  misc_feature (61)..(61): /note="Nucleotide may be methylated to form 5-methylcytosine"
ctgaggggcccctctgctgggcccacccatgagaacctctgtggacccacaccagccaagcgtgtgctgcgactccagggatggccaagaggatgagccacatccttctttgggattgatca

SEQ ID NO: 5070 - DNA, 122 bp, Homo sapiens
  misc_feature (61)..(62): /note="This region represents a CpG dinucleotide"
  misc_feature (61)..(61): /note="Nucleotide may be methylated to form 5-methylcytosine"
atgaagtatgacagctttcatcagtgttatgacaacatggctgggagaaaagatgatctacgactatgagtttgaattgagggttacagagcctagcttgtagcaccacatagtttttagtt

SEQ ID NO: 5071 - DNA, 122 bp, Homo sapiens
  misc_feature (61)..(62): /note="This region represents a CpG dinucleotide"
  misc_feature (61)..(61): /note="Nucleotide may be methylated to form 5-methylcytosine"
caagtaagtcccggccagccccgcctccgcccggggcgcagtccgcgtggggagggacagcggggcacagaggctccccagggcctagacacccctgtccccgcctcagggggctgcgtctg

SEQ ID NO: 5072 - DNA, 122 bp, Homo sapiens
  misc_feature (61)..(62): /note="This region represents a CpG dinucleotide"
  misc_feature (61)..(61): /note="Nucleotide may be methylated to form 5-methylcytosine"
ataaacaagaatgtctcggtggcatgtgcagcataacacactaacatctgctaacaagagcgcgggtttttttttttttccatgttttgtactgaggaaaggaccactttatattgtctcta

SEQ ID NO: 5073 - DNA, 122 bp, Homo sapiens
  misc_feature (61)..(62): /note="This region represents a CpG dinucleotide"
  misc_feature (61)..(61): /note="Nucleotide may be methylated to form 5-methylcytosine"
gaattttagatttcaccctgtatgtgtccctagcgtgttttaataaaataaattgcttcacgttatattggtatgtggatttccagatacacttctcaccatttaattcaaatgctccccac

SEQ ID NO: 5074 - DNA, 122 bp, Homo sapiens
  misc_feature (61)..(62): /note="This region represents a CpG dinucleotide"
  misc_feature (61)..(61): /note="Nucleotide may be methylated to form 5-methylcytosine"
attaaaatatgtttttctgctttcttctcaaacaggataccatggtagatacttctccttcgcatgtttaattactttggtaatttgcccacttggtatttgcataggctccagtggccaac

SEQ ID NO: 5075 - DNA, 122 bp, Homo sapiens
  misc_feature (61)..(62): /note="This region represents a CpG dinucleotide"
  misc_feature (61)..(61): /note="Nucleotide may be methylated to form 5-methylcytosine"
cgtcatttccccattacctcagaagacccccttaattacttacttatattaactgtagaacgtatttatgcataccaggctctacctctgggctttctattctgttccagagacccagtacc

SEQ ID NO: 5076 - DNA, 122 bp, Homo sapiens
  misc_feature (61)..(62): /note="This region represents a CpG dinucleotide"
  misc_feature (61)..(61): /note="Nucleotide may be methylated to form 5-methylcytosine"
ggaatctcgactttgcagcttgaagtcattttgttggcggcgctggttaccggctacctccgcgcgggcacttgattgtaacagaaagtagttccggcccatgttgtttcggccgaggagcc

SEQ ID NO: 5077 - DNA, 122 bp, Homo sapiens
  misc_feature (61)..(62): /note="This region represents a CpG dinucleotide"
  misc_feature (61)..(61): /note="Nucleotide may be methylated to form 5-methylcytosine"
cccagatgtacacggggttgtcaccacttcttgctttgatccagtcaaaaacgtggagtgcgtcataggtcatgccccgctcagatggcgttcccactgagtcaccccaacctgggagggag

SEQ ID NO: 5078 - DNA, 122 bp, Homo sapiens
  misc_feature (61)..(62): /note="This region represents a CpG dinucleotide"
  misc_feature (61)..(61): /note="Nucleotide may be methylated to form 5-methylcytosine"
ttctgccaaaatcccttagtaaatcagttattgtcatctgaacttcctactcaggcttgtcgtatatgtacctcaaaatctgttttgcttcacatagggatatgtggctttactgatttctg

SEQ ID NO: 5079 - DNA, 122 bp, Homo sapiens
  misc_feature (61)..(62): /note="This region represents a CpG dinucleotide"
  misc_feature (61)..(61): /note="Nucleotide may be methylated to form 5-methylcytosine"
ttcttccttttttatagccctataaagctcaaggcacgggggatataaggcaggcagagccgggctggggaggggggtgggcaggaggtagaggcggtcctgacacgggcagactgcgatga

SEQ ID NO: 5080 - DNA, 122 bp, Homo sapiens
  misc_feature (61)..(62): /note="This region represents a CpG dinucleotide"
  misc_feature (61)..(61): /note="Nucleotide may be methylated to form 5-methylcytosine"
gcgcaaggatacaagtgagtatggcctcctaaccttacttatcctgcctcacaacctcaacgatattcatattctggcatttggggctggataattctttggtggtggtggttaggggaggg

SEQ ID NO: 5081 - DNA, 122 bp, Homo sapiens
  misc_feature (61)..(62): /note="This region represents a CpG dinucleotide"
  misc_feature (61)..(61): /note="Nucleotide may be methylated to form 5-methylcytosine"
gaactggaggatcagcttccctggtgagtcactcatatagctgtcaagttgtttagctctcggcaggaaacctcagttccctgcaggtgggctctgctaggcctagggctgctcaagtgtcc

SEQ ID NO: 5082 - DNA, 122 bp, Homo sapiens
  misc_feature (61)..(62): /note="This region represents a CpG dinucleotide"
  misc_feature (61)..(61): /note="Nucleotide may be methylated to form 5-methylcytosine"
tgtgaaagagagttcacaattagtccaatatctttagaaagattcaaaaacacctaaatgcgaaaaatgcctttattcatttgtcagctggattacagaaagtaggaagaaaagagcctgtg

SEQ ID NO: 5083 - DNA, 122 bp, Homo sapiens
  misc_feature (61)..(62): /note="This region represents a CpG dinucleotide"
  misc_feature (61)..(61): /note="Nucleotide may be methylated to form 5-methylcytosine"
tgttctgctgcagtcaatagaagtttcctctgacacatacttggtaacgctgttacccttcgtttgcctttgtgcatacctaagacatcttccaggacttttgattctcttgataatgagtc

SEQ ID NO: 5084 - DNA, 122 bp, Homo sapiens
  misc_feature (61)..(62): /note="This region represents a CpG dinucleotide"
  misc_feature (61)..(61): /note="Nucleotide may be methylated to form 5-methylcytosine"
gtggtattactttttctagtcaagtgaccattcatactaacatgctataagttcctcaatcgtaaatgcccaccagccatggtgtgcatagcttcagctaatgatagcattttgagctgtat

SEQ ID NO: 5085 - DNA, 122 bp, Homo sapiens
  misc_feature (61)..(62): /note="This region represents a CpG dinucleotide"
  misc_feature (61)..(61): /note="Nucleotide may be methylated to form 5-methylcytosine"
agaaaaccctaaaaagttaccaaagaactaaacaaagttatcaattaatttataattaaccgagataatccttgtaaaaataactttcagcggagggtggatggccttaaatttccccacaa

SEQ ID NO: 5086 - DNA, 122 bp, Homo sapiens
  misc_feature (61)..(62): /note="This region represents a CpG dinucleotide"
  misc_feature (61)..(61): /note="Nucleotide may be methylated to form 5-methylcytosine"
tgggaccccactgtgctgttccctctgacatgtcagctgtggcaggtccaggttcattaccgatttccctgggctctctggaaatcgggccctgcttatttgcctgcatcccagctgcccga

SEQ ID NO: 5087 - DNA, 122 bp, Homo sapiens
  misc_feature (61)..(62): /note="This region represents a CpG dinucleotide"
  misc_feature (61)..(61): /note="Nucleotide may be methylated to form 5-methylcytosine"
tcccggagtcagccgctgtgtccttttgtgaaagaagtacagcccgtcacccagggagggcgcgccttatggcgggttctaacacgcagttgcaatggaaccaactcagtcaatggtgatcg

SEQ ID NO: 5088 - DNA, 122 bp, Homo sapiens
  misc_feature (61)..(62): /note="This region represents a CpG dinucleotide"
  misc_feature (61)..(61): /note="Nucleotide may be methylated to form 5-methylcytosine"
cagaggacgcaattccacctcaaaggcgcagggtggaggaggatggaagagcagcaggcacggtcagtgttggtatcttgggatctctgaaatgttgactgttgactttcttttctccttcc

SEQ ID NO: 5089 - DNA, 122 bp, Homo sapiens
  misc_feature (61)..(62): /note="This region represents a CpG dinucleotide"
  misc_feature (61)..(61): /note="Nucleotide may be methylated to form 5-methylcytosine"
taacaagcaaccccttccgcagagagtggcaggagaggcctttcctgcatccggcacaggcgcggcggtctccccccatccggcacaggcgcggcggtctcccccttctccggcacaggcgc

SEQ ID NO: 5090 - DNA, 122 bp, Homo sapiens
  misc_feature (61)..(62): /note="This region represents a CpG dinucleotide"
  misc_feature (61)..(61): /note="Nucleotide may be methylated to form 5-methylcytosine"
gatcatcagagatagttggcctggttcttcagcaaaatgttgacacctgtgctgaagatccgtgtggaatgattgcagaacgttatgctgttgcttgtggatttaatccgtaagtgtttaca

SEQ ID NO: 5091 - DNA, 122 bp, Homo sapiens
  misc_feature (61)..(62): /note="This region represents a CpG dinucleotide"
  misc_feature (61)..(61): /note="Nucleotide may be methylated to form 5-methylcytosine"
agagcttggggaaacgctgacagtcctccaaataccacaatgcagtgttagaatcagactcgctatgttgaaatttacgaggatttacattttaattagttgctcaaaatttgccctcacaa

SEQ ID NO: 5092 - DNA, 122 bp, Homo sapiens
  misc_feature (61)..(62): /note="This region represents a CpG dinucleotide"
  misc_feature (61)..(61): /note="Nucleotide may be methylated to form 5-methylcytosine"
ccacaggaggaaggctggcagagaggattcattccgtattcattcccctagtgagccacacgcttcggaaggatcacattaaagagatgaatcacacactgactcaaagagagggggtggca

SEQ ID NO: 5093 - DNA, 122 bp, Homo sapiens
  misc_feature (61)..(62): /note="This region represents a CpG dinucleotide"
  misc_feature (61)..(61): /note="Nucleotide may be methylated to form 5-methylcytosine"
gtgattcagtcattattttattttcacaacagcctgatgaggtcagtactctcattatgtcgatttctcagaagaggaactgcggctgggagaacgtgactcatctagctgatggagctgag

SEQ ID NO: 5094 - DNA, 122 bp, Homo sapiens
  misc_feature (61)..(62): /note="This region represents a CpG dinucleotide"
  misc_feature (61)..(61): /note="Nucleotide may be methylated to form 5-methylcytosine"
tgtcacaggagattaaaacagttgagagccttactgacaatcctctacagagatggtgggcgtgcctgggctctggcctatgttaggccctgataatcataggcagcatagcagaaacatta

SEQ ID NO: 5095 - DNA, 122 bp, Homo sapiens
  misc_feature (61)..(62): /note="This region represents a CpG dinucleotide"
  misc_feature (61)..(61): /note="Nucleotide may be methylated to form 5-methylcytosine"
gaaccgagcctcagaatctactcaccccagccagtcaccaccgatttggccaactgggcacgcaggtggaaacctacctgttggcctgtctggcgctaccacccacagacccatgctggtgg

SEQ ID NO: 5096 - DNA, 122 bp, Homo sapiens
  misc_feature (61)..(62): /note="This region represents a CpG dinucleotide"
  misc_feature (61)..(61): /note="Nucleotide may be methylated to form 5-methylcytosine"
tggagagaattagtcaattcttcctggacattcgggagcttctgggtggagggaagactgcgaagcagaaacaaacagaaatcctagagaggcagtcatctgagcattcgtcacaggggcac

SEQ ID NO: 5097 - DNA, 122 bp, Homo sapiens
  misc_feature (61)..(62): /note="This region represents a CpG dinucleotide"
  misc_feature (61)..(61): /note="Nucleotide may be methylated to form 5-methylcytosine"
atgcagaaactgtccagggcaatgatgaatttcaagtttcttcctttgaaggacagggcccggctaatgtgacacatccttcctgaaaatgatgtgtttctaggtttctggcttaagggtat

SEQ ID NO: 5098 - DNA, 122 bp, Homo sapiens
  misc_feature (61)..(62): /note="This region represents a CpG dinucleotide"
  misc_feature (61)..(61): /note="Nucleotide may be methylated to form 5-methylcytosine"
ggacaagccaacaagtgcctgttccggtttcacagctgctggcaggagacatgaagctcccgggtcagagacaaagaatgccaccactcccagctcagcaagcacaggagtgtcactgcccc

SEQ ID NO: 5099 - DNA, 122 bp, Homo sapiens
  misc_feature (61)..(62): /note="This region represents a CpG dinucleotide"
  misc_feature (61)..(61): /note="Nucleotide may be methylated to form 5-methylcytosine"
ctaattggcaaggaaaatcttcaggaccttatgaacaactttttgtaaagtcatgcacttcggcctctgttgttttcattgtgacttttaatgtactcactgactcaaggttcaagcaattt

SEQ ID NO: 5100 - DNA, 122 bp, Homo sapiens
  misc_feature (61)..(62): /note="This region represents a CpG dinucleotide"
  misc_feature (61)..(61): /note="Nucleotide may be methylated to form 5-methylcytosine"
caacatatcatacttgtgtgatgaccttggccaagtgatcaaagtttacttcatcagtcacgttcccctaaaattatgcaacatgaagggtacattcttccctcaaattgataactttggtg

SEQ ID NO: 5101 - DNA, 122 bp, Homo sapiens
  misc_feature (61)..(62): /note="This region represents a CpG dinucleotide"
  misc_feature (61)..(61): /note="Nucleotide may be methylated to form 5-methylcytosine"
ctgaatctggctgccattgtgactctgccgcgcacgcgcagctccatcccctttgaggcgcgcatgtgctcgccaagggggcgcttctgtcaggcctctgagcccaagccaagccatcgcat

SEQ ID NO: 5102 - DNA, 122 bp, Homo sapiens
  misc_feature (61)..(62): /note="This region represents a CpG dinucleotide"
  misc_feature (61)..(61): /note="Nucleotide may be methylated to form 5-methylcytosine"
ggaggactgtgggaaacagctgtttggttcataagaaatgaaccaagtgaattcaaagtacgcaggcattcaactgccgggttcccagagtcagacctgtccactaagcccaggattgataa

SEQ ID NO: 5103 - DNA, 122 bp, Homo sapiens
  misc_feature (61)..(62): /note="This region represents a CpG dinucleotide"
  misc_feature (61)..(61): /note="Nucleotide may be methylated to form 5-methylcytosine"
agccagcccctcccacctctggctcttaggactcacattgcaagtgggggaggcatcctccgcgaggcgcggactgagagccagcccctcttccccccctggctctagggacccccatcgca

SEQ ID NO: 5104 - DNA, 122 bp, Homo sapiens
  misc_feature (61)..(62): /note="This region represents a CpG dinucleotide"
  misc_feature (61)..(61): /note="Nucleotide may be methylated to form 5-methylcytosine"
caagttacaagaaagaattacaatatctcctcacatctctgggtcttcacagatctcaatcgtaattcagagcctcacttgggaaacacaggggacttggagcaggaatcctggctgtgaag

SEQ ID NO: 5105 - DNA, 122 bp, Homo sapiens
  misc_feature (61)..(62): /note="This region represents a CpG dinucleotide"
  misc_feature (61)..(61): /note="Nucleotide may be methylated to form 5-methylcytosine"
ccctctctgtcttgcggccctctgcctccccgcccagctctggaggcagccccggggagccggcatggtcagggtcatgctgttttcagttgtggacgagtgcttagctttgcagacctgat

SEQ ID NO: 5106 - DNA, 122 bp, Homo sapiens
  misc_feature (61)..(62): /note="This region represents a CpG dinucleotide"
  misc_feature (61)..(61): /note="Nucleotide may be methylated to form 5-methylcytosine"
caaatagcaggccatgatgactcggcctctttatgcttcctgaatgtcaggattcatttgcgtggtctggtctccagtcttctggctgtctctgtctccctgaagatgcccaggacaaaagg

SEQ ID NO: 5107 - DNA, 122 bp, Homo sapiens
  misc_feature (61)..(62): /note="This region represents a CpG dinucleotide"
  misc_feature (61)..(61): /note="Nucleotide may be methylated to form 5-methylcytosine"
tgattagccagctggaagggagggccgttgattaaaggtagaatcttccactgcagtcagcgacctcttcagcttggtccacacaggcaaagcagagtggaaaatgctgagtcaaagtggcc

SEQ ID NO: 5108 - DNA, 122 bp, Homo sapiens
  misc_feature (61)..(62): /note="This region represents a CpG dinucleotide"
  misc_feature (61)..(61): /note="Nucleotide may be methylated to form 5-methylcytosine"
tctccacaatgggaccaggataaagtgttactaaaacacatagcagctaattttgctctgcgtggccacttctgtatccttggctaacctgggaaattatcctgcaagtgtgtgtgtgttct

SEQ ID NO: 5109 - DNA, 122 bp, Homo sapiens
  misc_feature (61)..(62): /note="This region represents a CpG dinucleotide"
  misc_feature (61)..(61): /note="Nucleotide may be methylated to form 5-methylcytosine"
aagttccagaaaccaatctcagtcctgaatttatggatctgtttcttgttaagaagcaggcgtaagagggggtgagaggatgagggagagacaggagtgaggtgagagagagagagaaagag

SEQ ID NO: 5110 - DNA, 122 bp, Homo sapiens
  misc_feature (61)..(62): /note="This region represents a CpG dinucleotide"
  misc_feature (61)..(61): /note="Nucleotide may be methylated to form 5-methylcytosine"
tgtagatagcagtatagaaccaaaaatctgtatgaggcctttccatttgtttttgttctacggctatgtcctggcagggcaattgccatattttttttcactttgagtgttttatcttttgc

SEQ ID NO: 5111 - DNA, 122 bp, Homo sapiens
  misc_feature (61)..(62): /note="This region represents a CpG dinucleotide"
  misc_feature (61)..(61): /note="Nucleotide may be methylated to form 5-methylcytosine"
acttcctgtgttggtttcctgtgaagtcagaaaatatttcccaatctgcttgacggtaaacgaatatgctgacattctggtttttcatatgtgagaggtagggaagcctaacattaagtagc

SEQ ID NO: 5112 - DNA, 122 bp, Homo sapiens
  misc_feature (61)..(62): /note="This region represents a CpG dinucleotide"
  misc_feature (61)..(61): /note="Nucleotide may be methylated to form 5-methylcytosine"
tataccaaaaaaaaaaaaaggaagaggaaaaaaaacctgagcccaaagcctagccctaaacgtcacctccggtccccattcccggcttgcaccgggcagcagccaacaccacggggaagtgg

SEQ ID NO: 5113 - DNA, 122 bp, Homo sapiens
  misc_feature (61)..(62): /note="This region represents a CpG dinucleotide"
  misc_feature (61)..(61): /note="Nucleotide may be methylated to form 5-methylcytosine"
ttcatcactatgttctatgggtgtgaagcctttgttttttcagagacccatttccaccagcgggtttgcactgtaagtgtttccacaggaactctgccctttgccagtgtcactgttgtggc

SEQ ID NO: 5114 - DNA, 122 bp, Homo sapiens
  misc_feature (61)..(62): /note="This region represents a CpG dinucleotide"
  misc_feature (61)..(61): /note="Nucleotide may be methylated to form 5-methylcytosine"
tctctcctctcaccctaaaaggcagttaaaccagcaaaaatcagagaagcatgtagttcacgacttgagcccatcctgctaaaggggtttgtttgacgtttctgctaatccgtgtttaatgt

SEQ ID NO: 5115 - DNA, 122 bp, Homo sapiens
  misc_feature (61)..(62): /note="This region represents a CpG dinucleotide"
  misc_feature (61)..(61): /note="Nucleotide may be methylated to form 5-methylcytosine"
ggcgctggtgggagtgtaggacaaccagggatcactctcatcaccatcttggtttttgtgcgttttggccggcttctttcctgcaacctgttttatcagcaaggtcctatgacctgtatgtt

SEQ ID NO: 5116 - DNA, 122 bp, Homo sapiens
  misc_feature (61)..(62): /note="This region represents a CpG dinucleotide"
  misc_feature (61)..(61): /note="Nucleotide may be methylated to form 5-methylcytosine"
agtcttcggcgtgggaccaggtctcgggtggacgcccacagccactcccagtcctgagcacgtgcccaggtctgctaagagttacaggtgcatctcagacatcagtccagggcctcgggcca

SEQ ID NO: 5117 - DNA, 122 bp, Homo sapiens
  misc_feature (61)..(62): /note="This region represents a CpG dinucleotide"
  misc_feature (61)..(61): /note="Nucleotide may be methylated to form 5-methylcytosine"
gtccccggggaccaacgacctcctttgccccagcactgccaaggagatgagctcctggatcgcgcgcatcaacttggctgcggccacgcactccgcgccgcccttccccgccgctgtgggct

SEQ ID NO: 5118 - DNA, 122 bp, Homo sapiens
  misc_feature (61)..(62): /note="This region represents a CpG dinucleotide"
  misc_feature (61)..(61): /note="Nucleotide may be methylated to form 5-methylcytosine"
tatggtcaggaaaggatggagttggccagtgccttggaaccatgggaggttctgcccacgcggcctccagaggatttttaaagctctgagcagaggcagctgcactctagcacgctcctttc

SEQ ID NO: 5119 - DNA, 122 bp, Homo sapiens
  misc_feature (61)..(62): /note="This region represents a CpG dinucleotide"
  misc_feature (61)..(61): /note="Nucleotide may be methylated to form 5-methylcytosine"
catgtgcaggtgtgccagctagaagctggcagtgagtgcctgcccaccccacttccaacacggagggacagacctccagagcctcaggaaagactgcaaaaataatcaaatcctcaccctgg

SEQ ID NO: 5120 - DNA, 122 bp, Homo sapiens
  misc_feature (61)..(62): /note="This region represents a CpG dinucleotide"
  misc_feature (61)..(61): /note="Nucleotide may be methylated to form 5-methylcytosine"
gaatgggatggaggagggagaggatacaggggtgaatcacagggcaggctagctaggaggcgagaacagccagcagtctggatgagcacttcagccctcatcacacttgtgccagccctggc

SEQ ID NO: 5121 - DNA, 122 bp, Homo sapiens
  misc_feature (61)..(62): /note="This region represents a CpG dinucleotide"
  misc_feature (61)..(61): /note="Nucleotide may be methylated to form 5-methylcytosine"
cccttgggttccctcccccatcctccaagtagaatgactacactaccctaacaacagttacggaagggaaaagagacagtcaaacattagacttacttcactgtggttgtcttaggtggcct

SEQ ID NO: 5122 - DNA, 122 bp, Homo sapiens
  misc_feature (61)..(62): /note="This region represents a CpG dinucleotide"
  misc_feature (61)..(61): /note="Nucleotide may be methylated to form 5-methylcytosine"
cattacagtcaacgggtgttgatttttacacattctctgctacccatacttggttaggaccgtggttttcagctcaggggtgcttttgctccccagagatattcggcaatgtccagagacat

SEQ ID NO: 5123 - DNA, 122 bp, Homo sapiens
  misc_feature (61)..(62): /note="This region represents a CpG dinucleotide"
  misc_feature (61)..(61): /note="Nucleotide may be methylated to form 5-methylcytosine"
ttcagagaagagccagataacaaggtagcagagacagaaaacaggctgcccaagtaactgcgcagatctgcagatctgtctaatcctagagcttgggtatgactggccttgattaagtggaa

SEQ ID NO: 5124 - DNA, 122 bp, Homo sapiens
  misc_feature (61)..(62): /note="This region represents a CpG dinucleotide"
  misc_feature (61)..(61): /note="Nucleotide may be methylated to form 5-methylcytosine"
gggagcctcagcacagtatagccttgtatgtgcacaggccatttccacacggggcggggacgtggcagctgtgctttggcggtcatctctggagaagggcggctggggctcaggaggctgag

SEQ ID NO: 5125 - DNA, 122 bp, Homo sapiens
  misc_feature (61)..(62): /note="This region represents a CpG dinucleotide"
  misc_feature (61)..(61): /note="Nucleotide may be methylated to form 5-methylcytosine"
ttttcctctggttagactagggttatgggtttttaggaagaggaagtgcccttctcatcacgacatcacagggcacatgatgtcaatatgaggtgatatctgccagatttctctgccgtaaa

SEQ ID NO: 5126 - DNA, 122 bp, Homo sapiens
  misc_feature (61)..(62): /note="This region represents a CpG dinucleotide"
  misc_feature (61)..(61): /note="Nucleotide may be methylated to form 5-methylcytosine"
caattgttaaaagtgaggggagacagagaagggtcgggaggttggagtccgaaaggtagacgtgcctctgacccacagggaggtcctggctagagccaaggacactcaacaaggtctcccta

SEQ ID NO: 5127 - DNA, 122 bp, Homo sapiens
  misc_feature (61)..(62): /note="This region represents a CpG dinucleotide"
  misc_feature (61)..(61): /note="Nucleotide may be methylated to form 5-methylcytosine"
gcacctgtcctgtggatcgatgatgactactggtggcgtatgagtcatctacagtgaatacgtctctggaactctgaggtctgtcacaaaagaaatctagcccattttctatgtttgataca

SEQ ID NO: 5128 - DNA, 122 bp, Homo sapiens
  misc_feature (61)..(62): /note="This region represents a CpG dinucleotide"
  misc_feature (61)..(61): /note="Nucleotide may be methylated to form 5-methylcytosine"
cagtaagtttgttatatcactgggccaaaatctactttcctggtggggcccggtggctcacgcctgtgatcccaggactttgggaggctgagtagggtggatcacctaaggtcaggagccag

SEQ ID NO: 5129 - DNA, 122 bp, Homo sapiens
  misc_feature (61)..(62): /note="This region represents a CpG dinucleotide"
  misc_feature (61)..(61): /note="Nucleotide may be methylated to form 5-methylcytosine"
ctgcctgtcagggagcccggtgcttgtactctgtatagacattcagcagttagcaggtcacgttcacgcagtctcaagtgccctcctgaaaggagctcatagtcatcaggatggctgggaac

SEQ ID NO: 5130 - DNA, 122 bp, Homo sapiens
  misc_feature (61)..(62): /note="This region represents a CpG dinucleotide"
  misc_feature (61)..(61): /note="Nucleotide may be methylated to form 5-methylcytosine"
ttctaaaagacctatcactgaccctaaaagccatcagaccagcaggaaaaaaaaaaaaatcgaacaatgcaaccaaacacaagccaaagctttgaggtctggccagcttgtaggatagagat

SEQ ID NO: 5131 - DNA, 122 bp, Homo sapiens
  misc_feature (61)..(62): /note="This region represents a CpG dinucleotide"
  misc_feature (61)..(61): /note="Nucleotide may be methylated to form 5-methylcytosine"
caaaaaagcaccttgttaagaaccaacaatcaggttaacgatcacaatacctggctttaacgtcatatcactgaaaggcactgaagagggtaggaaagacagtcttgaattgcctgcacaac

SEQ ID NO: 5132 - DNA, 122 bp, Homo sapiens
  misc_feature (61)..(62): /note="This region represents a CpG dinucleotide"
  misc_feature (61)..(61): /note="Nucleotide may be methylated to form 5-methylcytosine"
gcagatcccatatatgctaaaaattatagtcaacattgtttcatttaaccctcactgggacgtactgccaaacccactttatggataagggatctgaggctcctgagaagttaagtgacttt

SEQ ID NO: 5133 - DNA, 122 bp, Homo sapiens
  misc_feature (61)..(62): /note="This region represents a CpG dinucleotide"
  misc_feature (61)..(61): /note="Nucleotide may be methylated to form 5-methylcytosine"
tgaaatgattaccacaatgaagttagttaacatatccatcatgtcacatagttaccattgcgtgtgtgtgatgagaatatttaagatctactctctcagcaaatttcaaatatgtaatacat

SEQ ID NO: 5134 - DNA, 122 bp, Homo sapiens
  misc_feature (61)..(62): /note="This region represents a CpG dinucleotide"
  misc_feature (61)..(61): /note="Nucleotide may be methylated to form 5-methylcytosine"
actcaagaatgagccaccaccaaatgttctcaagctagttcatgattacttaagaacatacggtggagacagcttcttaaccttcagcagctccacagtcatattggtgtaggattgtataa

SEQ ID NO: 5135 - DNA, 122 bp, Homo sapiens
  misc_feature (61)..(62): /note="This region represents a CpG dinucleotide"
  misc_feature (61)..(61): /note="Nucleotide may be methylated to form 5-methylcytosine"
taaactccaagttgtttacagaaagcaaagctccaaagaaaaaagatttctcaccctagacgatatccaaagaataaactccgggctcagaaaagtttccagaactttcttggcaatgatag

SEQ ID NO: 5136 - DNA, 122 bp, Homo sapiens
  misc_feature (61)..(62): /note="This region represents a CpG dinucleotide"
  misc_feature (61)..(61): /note="Nucleotide may be methylated to form 5-methylcytosine"
atttttcattgtgaattgactccacacctacagaggccaagacaggccctccagcctcagcgcagcatcacgcccgctgcagcagggatcagtcaatgcatgctgattccatgtaagtggat

SEQ ID NO: 5137 - DNA, 122 bp, Homo sapiens
  misc_feature (61)..(62): /note="This region represents a CpG dinucleotide"
  misc_feature (61)..(61): /note="Nucleotide may be methylated to form 5-methylcytosine"
aatgaatttgctcaaggggagagggaagtcactgtagctagaaggataattaccagccaacggtgtttagtcagcagactttgatgaatttagatgagaaagtagatgaggtatgtgaatgt

SEQ ID NO: 5138 - DNA, 122 bp, Homo sapiens
  misc_feature (61)..(62): /note="This region represents a CpG dinucleotide"
  misc_feature (61)..(61): /note="Nucleotide may be methylated to form 5-methylcytosine"
ggcataatgaccgtatcagaacagacatctggtagtatacaccacatagttgccagactccgataccaagggcacatctaagttctcccaccctgatttgcatgcctcaaattcagaattag

SEQ ID NO: 5139 - DNA, 122 bp, Homo sapiens
  misc_feature (61)..(62): /note="This region represents a CpG dinucleotide"
  misc_feature (61)..(61): /note="Nucleotide may be methylated to form 5-methylcytosine"
gaatccacccaagaacaagcttcaggagccacactgacaaaggcccagtgacacacattacgccagagtttcctggagaaacaggcgggtccaggtctggggcagaaggcccatggggtgag

SEQ ID NO: 5140 - DNA, 122 bp, Homo sapiens
  misc_feature (61)..(62): /note="This region represents a CpG dinucleotide"
  misc_feature (61)..(61): /note="Nucleotide may be methylated to form 5-methylcytosine"
ggccagactaaatatttgaaagtttaaaaacaccatatatatggtatcattttaattaaacgactgacattgtgattaaacaaaggaatgaaaatagcagttcctaagggctccgatgacta

SEQ ID NO: 5141 - DNA, 122 bp, Homo sapiens
  misc_feature (61)..(62): /note="This region represents a CpG dinucleotide"
  misc_feature (61)..(61): /note="Nucleotide may be methylated to form 5-methylcytosine"
tcagcttgctgggggtacagaagagttgtcgggagctggagggggtggaagagcatagagcgtaccaattaagagggcagcatgtgagctggagctgaaaagtgtggcaagttcctcaaggg

SEQ ID NO: 5142 - DNA, 122 bp, Homo sapiens
  misc_feature (61)..(62): /note="This region represents a CpG dinucleotide"
  misc_feature (61)..(61): /note="Nucleotide may be methylated to form 5-methylcytosine"
ctccatccagtattgggggtcatcctcctccatccaggacctgaggggtgtccttttctgcgcttccttggatggcaggctttcctatgcagtcattcagaaagtcaggctgacacatgttg

SEQ ID NO: 5143 - DNA, 122 bp, Homo sapiens
  misc_feature (61)..(62): /note="This region represents a CpG dinucleotide"
  misc_feature (61)..(61): /note="Nucleotide may be methylated to form 5-methylcytosine"
catctgtgttaaggccaaaccttttctgcacgtccaagaaaggcatggcgttctgatgctcgtgcccttgtctcttctctggccgctgcttcaggacgattctacttttcaaatttttatat

SEQ ID NO: 5144 - DNA, 122 bp, Homo sapiens
  misc_feature (61)..(62): /note="This region represents a CpG dinucleotide"
  misc_feature (61)..(61): /note="Nucleotide may be methylated to form 5-methylcytosine"
aaactgagaaacatgaagtcactgagctctacagatatgaatagtggcatccactgaacccgctcataagggcaagatttcaacctctaagagagggctaagtcgctggctatacagtaccc

SEQ ID NO: 5145 - DNA, 122 bp, Homo sapiens
  misc_feature (61)..(62): /note="This region represents a CpG dinucleotide"
  misc_feature (61)..(61): /note="Nucleotide may be methylated to form 5-methylcytosine"
atacagagaagagaatgacagaaactacatcaagatgccaacagatggaaacaacccaaacgtccatcaactaatgaatggataaacaaaatgcgatatcaccatacaacagaatactattg

SEQ ID NO: 5146 - DNA, 122 bp, Homo sapiens
  misc_feature (61)..(62): /note="This region represents a CpG dinucleotide"
  misc_feature (61)..(61): /note="Nucleotide may be methylated to form 5-methylcytosine"
aaatgatgattatagttaggacatgccccatgacgatatccaggtcatgtacagcctttgcgtgggacagcagggctaaattttggcggtacatatttaagagggcaagtttccattcaaaa

SEQ ID NO: 5147 - DNA, 122 bp, Homo sapiens
  misc_feature (61)..(62): /note="This region represents a CpG dinucleotide"
  misc_feature (61)..(61): /note="Nucleotide may be methylated to form 5-methylcytosine"
cttgggcttgggcatttgggaaaagaatgatgtctggaagggcttaagggacacagtggacgaggggagagtcctcatctgctggcattttgtggggtgttagtgccaaacttgaatagggg

SEQ ID NO: 5148 - DNA, 122 bp, Homo sapiens
  misc_feature (61)..(62): /note="This region represents a CpG dinucleotide"
  misc_feature (61)..(61): /note="Nucleotide may be methylated to form 5-methylcytosine"
ctcggaacaggataatacaagaaggaaccactgcaagtgaaatccagccaccagtaatgccgagaggccaggcctgtgcctcccaaaacctgctcctccgcaggcttccccggcccatctcc

SEQ ID NO: 5149 - DNA, 122 bp, Homo sapiens
  misc_feature (61)..(62): /note="This region represents a CpG dinucleotide"
  misc_feature (61)..(61): /note="Nucleotide may be methylated to form 5-methylcytosine"
ttatcaaaaacgagctcatggtcattaatttgtgaagtgcaaaaatactaatttttctcgcgttgtcgttttttctgggcttgccgaggcccctccccctcctgcctcgcttcccatccccc

SEQ ID NO: 5150 - DNA, 122 bp, Homo sapiens
  misc_feature (61)..(62): /note="This region represents a CpG dinucleotide"
  misc_feature (61)..(61): /note="Nucleotide may be methylated to form 5-methylcytosine"
agccactgtggccggcctaaatggctatttcatggtgaataaaccattagcctcaggcttcgtctcctctctctgtttgaagacaataaagtatgatgtaattgtattattttgataaggta

SEQ ID NO: 5151 - DNA, 122 bp, Homo sapiens
  misc_feature (61)..(62): /note="This region represents a CpG dinucleotide"
  misc_feature (61)..(61): /note="Nucleotide may be methylated to form 5-methylcytosine"
gaaagaaacatgtcatacaaaacgcccctagagctacgctgtccaatatgaataaaagtacgtaaagtcactcatgataatctttcagatctattggcttaaatgcattatgaaaactaatt

SEQ ID NO: 5152 - DNA, 122 bp, Homo sapiens
  misc_feature (61)..(62): /note="This region represents a CpG dinucleotide"
  misc_feature (61)..(61): /note="Nucleotide may be methylated to form 5-methylcytosine"
tctgtgagtgtgtgtgaatgtatgtgtgtgtgtgtgtgtgtgtctctgtgtgtgagagagcgagcgagcgtgtatgttctcattaggggacgatctatgatttgacagcctcactgctgctg

SEQ ID NO: 5153 - DNA, 122 bp, Homo sapiens
  misc_feature (61)..(62): /note="This region represents a CpG dinucleotide"
  misc_feature (61)..(61): /note="Nucleotide may be methylated to form 5-methylcytosine"
gccaatgccttactgtctattccatgggcttcactaggctgtcccttcttaggcctagaacgaaatgggcttcacaaatagaaattattctaatccaaataatatttccccaagtctcacag

SEQ ID NO: 5154 - DNA, 122 bp, Homo sapiens
  misc_feature (61)..(62): /note="This region represents a CpG dinucleotide"
  misc_feature (61)..(61): /note="Nucleotide may be methylated to form 5-methylcytosine"
aatagctttaaaaccactaaaggtaaacattcttaaatacccttgaagttaagtagatgccggaattgctgagatggctgccaagccaatgttggagaatttatttttttgtacagattata

SEQ ID NO: 5155 - DNA, 122 bp, Homo sapiens
  misc_feature (61)..(62): /note="This region represents a CpG dinucleotide"
  misc_feature (61)..(61): /note="Nucleotide may be methylated to form 5-methylcytosine"
catactttttgtatgtatacccttatttctctccataacacatcacagattttataagcacgtcagtctctctcactaaggcattttcttccttttcccataatgcctagcaattaatatgt

SEQ ID NO: 5156 - DNA, 122 bp, Homo sapiens
  misc_feature (61)..(62): /note="This region represents a CpG dinucleotide"
  misc_feature (61)..(61): /note="Nucleotide may be methylated to form 5-methylcytosine"
cattaggcgggtcattttaatccttgaaaactgagtttacttcctacctaagcttccatccgcttaataccaaggtgatcaagtctgtgtgctaaatacaggaaaagccttaataggagacc

SEQ ID NO: 5157 - DNA, 122 bp, Homo sapiens
  misc_feature (61)..(62): /note="This region represents a CpG dinucleotide"
  misc_feature (61)..(61): /note="Nucleotide may be methylated to form 5-methylcytosine"
tccctaactaccaaggtcctgtttcctactctcacccacagtaacagctggactagttggcgtcaaagtaagtagcccataaaactcagcttcagacttcagctgcagtttctctgtgttgt

SEQ ID NO: 5158 - DNA, 122 bp, Homo sapiens
  misc_feature (61)..(62): /note="This region represents a CpG dinucleotide"
  misc_feature (61)..(61): /note="Nucleotide may be methylated to form 5-methylcytosine"
tctggcttttctggcctcctctgcatctcagacaatttctttggaatccttggcgtttgccgggagcactagcgtatcagaatctgcagttcctgtttgagaactgcccagggcccatttcc

SEQ ID NO: 5159 - DNA, 122 bp, Homo sapiens
  misc_feature (61)..(62): /note="This region represents a CpG dinucleotide"
  misc_feature (61)..(61): /note="Nucleotide may be methylated to form 5-methylcytosine"
tttgcataagaaggagaattgatgccttcaggtcacttgtctctgttttcttcctgcacacgccatagtctccctgttagctaaatgatggtatctctagtattgaccttggtaccccagag

SEQ ID NO: 5160 - DNA, 122 bp, Homo sapiens
  misc_feature (61)..(62): /note="This region represents a CpG dinucleotide"
  misc_feature (61)..(61): /note="Nucleotide may be methylated to form 5-methylcytosine"
aaggttcatgcatatggactgcatctcatgcatgtacttaaaattatgggatggaggcaacgcacaagcacacaagggccaaagtaactaagcagtctatcaatcaaaaggcagatgctggc

SEQ ID NO: 5161 - DNA, 122 bp, Homo sapiens
  misc_feature (61)..(62): /note="This region represents a CpG dinucleotide"
  misc_feature (61)..(61): /note="Nucleotide may be methylated to form 5-methylcytosine"
agtaaggtcaggaaatgatgcagaagccaggctcccagaccagtttaaagtgtgggcagacgcagggctgccattttaaaattctgctgcaaaagggccttagaagatacatcatctactac

SEQ ID NO: 5162 - DNA, 122 bp, Homo sapiens
  misc_feature (61)..(62): /note="This region represents a CpG dinucleotide"
  misc_feature (61)..(61): /note="Nucleotide may be methylated to form 5-methylcytosine"
tgggcaccccttgtgatctctgctttaaatcatttgatgtctgaattggtggaagggacacgggagcacacaccagcctggggagcccactagagtacagaatgcaaactacagggacacat

SEQ ID NO: 5163 - DNA, 122 bp, Homo sapiens
  misc_feature (61)..(62): /note="This region represents a CpG dinucleotide"
  misc_feature (61)..(61): /note="Nucleotide may be methylated to form 5-methylcytosine"
ccaagatagtctttctcttctcatcatgcaccttcagtattaactatcttccagatacctcgtattttcctacctaacctttgctgatccttccaacgcctgaaataccctccatccttgcc

SEQ ID NO: 5164 - DNA, 122 bp, Homo sapiens
  misc_feature (61)..(62): /note="This region represents a CpG dinucleotide"
  misc_feature (61)..(61): /note="Nucleotide may be methylated to form 5-methylcytosine"
ggaaggaaggaaggaaacttcactttccaaaaacaaccactgggagtccgctttgtgcagcgataggtaagcttctgtgcaggaacgggcgctgctgcaccccctaccacccacgcagcctc

SEQ ID NO: 5165 - DNA, 122 bp, Homo sapiens
  misc_feature (61)..(62): /note="This region represents a CpG dinucleotide"
  misc_feature (61)..(61): /note="Nucleotide may be methylated to form 5-methylcytosine"
aattttttcaaaaagacacctctgaaccccgcaaacacaatggaaacggctgggagatcccgccttgcgccgggggggccatttggcccgtgacattgtgtttatttgtatttttagcaaga

SEQ ID NO: 5166 - DNA, 122 bp, Homo sapiens
  misc_feature (61)..(62): /note="This region represents a CpG dinucleotide"
  misc_feature (61)..(61): /note="Nucleotide may be methylated to form 5-methylcytosine"
caaggtctgtggctcctcccgaaacccaagttatgcatccccatccccatgccctcatcccgacctcttagaaaataaatacaagtttgaacaggcttcgctgcctctcgtgttggctacca

SEQ ID NO: 5167 - DNA, 122 bp, Homo sapiens
  misc_feature (61)..(62): /note="This region represents a CpG dinucleotide"
  misc_feature (61)..(61): /note="Nucleotide may be methylated to form 5-methylcytosine"
agctccaggagccccaaggacggcgaagggcagcctggagttggggggcgtcagcgagggcgcgggcaggggagagaggcgcccctggaagtggagccggcctggacagaggcagggttcgg

SEQ ID NO: 5168 - DNA, 122 bp, Homo sapiens
  misc_feature (61)..(62): /note="This region represents a CpG dinucleotide"
  misc_feature (61)..(61): /note="Nucleotide may be methylated to form 5-methylcytosine"
gtccccttctcaggcaggctgtgggggttggggttgggcttcgcgagcccaagcggacgccgcaaagagaatgagaacctcggagcgctcggggcgggcgggcccagcccaggctcttccta

SEQ ID NO: 5169 - DNA, 122 bp, Homo sapiens
  misc_feature (61)..(62): /note="This region represents a CpG dinucleotide"
  misc_feature (61)..(61): /note="Nucleotide may be methylated to form 5-methylcytosine"
cacccactttttctaatattccattgacaattaaaacaatgctctaccctagagagatgacgtcactctctaggtaatttaaaccaaaaacaaaataaacataaataagcacactgactatt

SEQ ID NO: 5170 - DNA, 122 bp, Homo sapiens
  misc_feature (61)..(62): /note="This region represents a CpG dinucleotide"
  misc_feature (61)..(61): /note="Nucleotide may be methylated to form 5-methylcytosine"
cattaatctggccttgtctgtcattttctctccttggcatttgaggtctttgctgcatggcgtgaggactgagtacatcctttctctccccaggagatggagggaaaagagaacagttttac

SEQ ID NO: 5171 - DNA, 122 bp, Homo sapiens
  misc_feature (61)..(62): /note="This region represents a CpG dinucleotide"
  misc_feature (61)..(61): /note="Nucleotide may be methylated to form 5-methylcytosine"
gcaagcaagtcccctgaccctggccagctctgggcagggcagcttccctggggagtggggcgtgtctttacttctcactgggcctcaagggcaggggctggggcttgggcaggtcctcctcc

SEQ ID NO: 5172 - DNA, 122 bp, Homo sapiens
  misc_feature (61)..(62): /note="This region represents a CpG dinucleotide"
  misc_feature (61)..(61): /note="Nucleotide may be methylated to form 5-methylcytosine"
cactaccacacccagatgagtttcctttctgtgactgtcattagtacacaagtgccccaccgcattagctgcctaaaaaggagccaagttgggggacgattgatgagtttgtgacctcattg

SEQ ID NO: 5173 - DNA, 122 bp, Homo sapiens
  misc_feature (61)..(62): /note="This region represents a CpG dinucleotide"
  misc_feature (61)..(61): /note="Nucleotide may be methylated to form 5-methylcytosine"
ttgtatttttaaaagctgtacgtaagaatcctttttcttgaagatgtagacaggtgaatgcggaatatgatatctgacatgattgtaggacactggctgtaataaagtataactgagtatct

SEQ ID NO: 5174 - DNA, 122 bp, Homo sapiens
  misc_feature (61)..(62): /note="This region represents a CpG dinucleotide"
  misc_feature (61)..(61): /note="Nucleotide may be methylated to form 5-methylcytosine"
atgatttttcctactccttctttcaatattttataaatgacttcctcagttgttttctgacgtaagccacacatatgttaccaagcagggcataggttttctaagctcagtaggagatggaa

SEQ ID NO: 5175 - DNA, 122 bp, Homo sapiens
  misc_feature (61)..(62): /note="This region represents a CpG dinucleotide"
  misc_feature (61)..(61): /note="Nucleotide may be methylated to form 5-methylcytosine"
aagacactgacagccacagcaggctggcggtcaggcacaggccaggcgagggccacctcccgggaccgagcaaggcgccctggtcagcctgaagacactggcactaggtctaagacggtgtg

SEQ ID NO: 5176 - DNA, 122 bp, Homo sapiens
  misc_feature (61)..(62): /note="This region represents a CpG dinucleotide"
  misc_feature (61)..(61): /note="Nucleotide may be methylated to form 5-methylcytosine"
cttagcaaatgttccatcctcagacctcatgggggacaactttgtttccagtgctgcagtcgggcctgggaaaaaacagaatgggaaaaaacagaagactttttgttgtcgttgttgttact

SEQ ID NO: 5177 - DNA, 122 bp, Homo sapiens
  misc_feature (61)..(62): /note="This region represents a CpG dinucleotide"
  misc_feature (61)..(61): /note="Nucleotide may be methylated to form 5-methylcytosine"
agcaagctggcacgggaagaggacagggcctctcgtgtcccctcctcccttcccgcccatcgcactggtcctgcagagatagctgtccccttggggccccggggctcccgctggcgcatctg

SEQ ID NO: 5178 - DNA, 122 bp, Homo sapiens
  misc_feature (61)..(62): /note="This region represents a CpG dinucleotide"
  misc_feature (61)..(61): /note="Nucleotide may be methylated to form 5-methylcytosine"
gacattgtgtcttgacctcactgttgatggaccttgtgagttctccagtcttcagagactcgctgccatctactggttattgttaccagttctgctcctctagtcttggagttgggtcccga

SEQ ID NO: 5179 - DNA, 122 bp, Homo sapiens
  misc_feature (61)..(62): /note="This region represents a CpG dinucleotide"
  misc_feature (61)..(61): /note="Nucleotide may be methylated to form 5-methylcytosine"
aggacctgtccccatgacccaaacacctcccaccacaccctacttctcaacacagacacacgggggaatcaaatttcaacatgagatttggtgaagacaaacaaaccatatcctaaccatag

SEQ ID NO: 5180 - DNA, 122 bp, Homo sapiens
  misc_feature (61)..(62): /note="This region represents a CpG dinucleotide"
  misc_feature (61)..(61): /note="Nucleotide may be methylated to form 5-methylcytosine"
ctgtttgcgtggaggtgccatgagggagcagagtgtgcatctgagctccgcctgcctctccgcctcctggctcaggctgtccaaatctgaatcacctgcccaagctctggatgatggtgaca

SEQ ID NO: 5181 - DNA, 122 bp, Homo sapiens
  misc_feature (61)..(62): /note="This region represents a CpG dinucleotide"
  misc_feature (61)..(61): /note="Nucleotide may be methylated to form 5-methylcytosine"
caatttgtaagtacattttgatcttaactgttttaggagagatcatcagaaaaattggcccgatcaaaaagaatgattaacatatgaccagacatgaatatgtgagctagcattagtcatgg

SEQ ID NO: 5182 - DNA, 122 bp, Homo sapiens
  misc_feature (61)..(62): /note="This region represents a CpG dinucleotide"
  misc_feature (61)..(61): /note="Nucleotide may be methylated to form 5-methylcytosine"
ccaagtacataatggtcaataaagtttgcctaagatggaacatctactggaggaggaatgcgtctcaaaccaggagcactgtgggctgggattatacaaagccacaagatgaacaaggtgca

SEQ ID NO: 5183 - DNA, 122 bp, Homo sapiens
  misc_feature (61)..(62): /note="This region represents a CpG dinucleotide"
  misc_feature (61)..(61): /note="Nucleotide may be methylated to form 5-methylcytosine"
taagtcaggtgaaggattatttcctgtgttctgttttttaaaatctttttacgggttagacgagggaacttgaaacaaacaaatcttatcaagaataggttgactttctcaaatttcaaaat

SEQ ID NO: 5184 - DNA, 122 bp, Homo sapiens
  misc_feature (61)..(62): /note="This region represents a CpG dinucleotide"
  misc_feature (61)..(61): /note="Nucleotide may be methylated to form 5-methylcytosine"
cagatgctgcgctgaagatatctgctccagagttgacatgcgtccgtgtccgctgggccacgggcctctcaggtggtcacggtattctgactggttggagggctgcccttatacttcttttg

SEQ ID NO: 5185 - DNA, 122 bp, Homo sapiens
  misc_feature (61)..(62): /note="This region represents a CpG dinucleotide"
  misc_feature (61)..(61): /note="Nucleotide may be methylated to form 5-methylcytosine"
caatgagtgtcatttttaaccagtttgaacattttactacttcctaacatcagaagcacccgggctagagagcccgcttcttgtcctcaataaagtgattaagctgaatgggtgttggggag

SEQ ID NO: 5186 - DNA, 122 bp, Homo sapiens
  misc_feature (61)..(62): /note="This region represents a CpG dinucleotide"
  misc_feature (61)..(61): /note="Nucleotide may be methylated to form 5-methylcytosine"
aacaggaatggaactgatgaacacatgaaagaaacagactgcaaaaaatgcaacccctttcgccaataaacactagatcatttaagggaagtccctcaagagttactgcttcctgattgatg

SEQ ID NO: 5187 - DNA, 122 bp, Homo sapiens
  misc_feature (61)..(62): /note="This region represents a CpG dinucleotide"
  misc_feature (61)..(61): /note="Nucleotide may be methylated to form 5-methylcytosine"
aagtccaggagaccagcggctttctgaacgcgcacctgccaacccactttggacaggtcacgatggacagcgtggcaggaaaagaaaaggtcactgtctacccaacacatgagaaactgttt

SEQ ID NO: 5188 - DNA, 122 bp, Homo sapiens
  misc_feature (61)..(62): /note="This region represents a CpG dinucleotide"
  misc_feature (61)..(61): /note="Nucleotide may be methylated to form 5-methylcytosine"
tgttgtatccatgtaggtataacactgactgtagccaagggcacaaggaccgctaaggaccgttgagcatgctgtgcactgcccaactccagggggcacacgaagcctgaactggctcaggc

SEQ ID NO: 5189 - DNA, 122 bp, Homo sapiens
  misc_feature (61)..(62): /note="This region represents a CpG dinucleotide"
  misc_feature (61)..(61): /note="Nucleotide may be methylated to form 5-methylcytosine"
gatgtgagatggacttgataacgcttaataatgttgtatgttgtatacatttgtgactgacgactgactttttaagactactgtttgcgagatattttgagatttttttccattaaagaaaa

SEQ ID NO: 5190 - DNA, 122 bp, Homo sapiens
  misc_feature (61)..(62): /note="This region represents a CpG dinucleotide"
  misc_feature (61)..(61): /note="Nucleotide may be methylated to form 5-methylcytosine"
aagaagttgatggccaagtctgggaatgtgtacataaccaggacacaaagttacagatgacgagagctttaactgaagtgttagacaatgctagagagtttggagaaacagatgtctgctgt

SEQ ID NO: 5191 - DNA, 122 bp, Homo sapiens
  misc_feature (61)..(62): /note="This region represents a CpG dinucleotide"
  misc_feature (61)..(61): /note="Nucleotide may be methylated to form 5-methylcytosine"
tcagacataaagtctagacgtccccagaggttaatcttgggaacattgtgctgtttccgacgcttctgttaaccgccgtgttttcccctgtttttgttgcagagctctcgcacatgagaagt

SEQ ID NO: 5192 - DNA, 122 bp, Homo sapiens
  misc_feature (61)..(62): /note="This region represents a CpG dinucleotide"
  misc_feature (61)..(61): /note="Nucleotide may be methylated to form 5-methylcytosine"
gactgagctcactggcaggaaagggagcagccttaattggtactggccctgccttggccccgtgacactcattaccacaggctgcccaggaggatgacccgtgcatttgggctgtaagcaat

SEQ ID NO: 5193 - DNA, 122 bp, Homo sapiens
  misc_feature (61)..(62): /note="This region represents a CpG dinucleotide"
  misc_feature (61)..(61): /note="Nucleotide may be methylated to form 5-methylcytosine"
cttgctcgccctctggtggagcttcctgtaaccctaaaatgacgaaaactgggcagtcaccgttttactcgcgtcatctcccaaaatacaaataacttgctctctaatggttcaaaacactt

SEQ ID NO: 5194 - DNA, 122 bp, Homo sapiens
  misc_feature (61)..(62): /note="This region represents a CpG dinucleotide"
  misc_feature (61)..(61): /note="Nucleotide may be methylated to form 5-methylcytosine"
tttttatttatctttcacagatttggagtcaagacacaaacgggttatttaacttatccacgggtatcattagtaaatgatagagtcagaaagcaaacataggcactttgagtttaaagcct

SEQ ID NO: 5195 - DNA, 122 bp, Homo sapiens
  misc_feature (61)..(62): /note="This region represents a CpG dinucleotide"
  misc_feature (61)..(61): /note="Nucleotide may be methylated to form 5-methylcytosine"
aaatatgactgcctgactctcctgcttaaaactcctcaatgagttctcagagtccttgctcgtgcaatgcttggaatgtaataaggaagacagacagcatgagatagcatgcaaggacacag

SEQ ID NO: 5196 - DNA, 122 bp, Homo sapiens
  misc_feature (61)..(62): /note="This region represents a CpG dinucleotide"
  misc_feature (61)..(61): /note="Nucleotide may be methylated to form 5-methylcytosine"
ttttagaaaggtggacatgcgtgtcttcggagtgtgttcataacactctagttttccaaacgtagtagcaaggttgtttcaaaaagcacatagaatgttgtcaccacaaacttgattgcctc

SEQ ID NO: 5197 - DNA, 122 bp, Homo sapiens
  misc_feature (61)..(62): /note="This region represents a CpG dinucleotide"
  misc_feature (61)..(61): /note="Nucleotide may be methylated to form 5-methylcytosine"
ataaacgaaagctgtccttgacaaattggaacaatgaccactctatctcttatggacatacgtgactgggtgagttccctctcttcttcccacctctgagctgtcttccctgcccttgtatc

SEQ ID NO: 5198 - DNA, 122 bp, Homo sapiens
  misc_feature (61)..(62): /note="This region represents a CpG dinucleotide"
  misc_feature (61)..(61): /note="Nucleotide may be methylated to form 5-methylcytosine"
caactggctccgggacttgtgtccttggtgagcctagcggagtgctgggtgcgtcgcctgcgtgctcctcttttggagaaaggagggagggaacggccttgtgagacgactccaggagcgac

SEQ ID NO: 5199 - DNA, 122 bp, Homo sapiens
  misc_feature (61)..(62): /note="This region represents a CpG dinucleotide"
  misc_feature (61)..(61): /note="Nucleotide may be methylated to form 5-methylcytosine"
tgactcccctggttctcacaggcgctcagggaccgggtgggaggaggagaggaggaggtgcggagattccctccgtcagaaaagaaaaagggttcaggaagcgaggcagcaggaggaggggt

SEQ ID NO: 5200 - DNA, 122 bp, Homo sapiens
  misc_feature (61)..(62): /note="This region represents a CpG dinucleotide"
  misc_feature (61)..(61): /note="Nucleotide may be methylated to form 5-methylcytosine"
gtttgatgttcaggctgggacttctgagagtctcatggaactttctcgtcactatcttctcgtccctgacctctctcctagccaagcaagcttcttcaccaagataggataagagagatgtg

SEQ ID NO: 5201 - DNA, 122 bp, Homo sapiens
  misc_feature (61)..(62): /note="This region represents a CpG dinucleotide"
  misc_feature (61)..(61): /note="Nucleotide may be methylated to form 5-methylcytosine"
aactcctctttgtacaagttcctgtaactcgtgcatgcatgggctctttctaggcatcttcgtcatgcgtggcaggctcttctctgccaaatatgtcagttccacccactcttcaaagccca

SEQ ID NO: 5202 - DNA, 122 bp, Homo sapiens
  misc_feature (61)..(62): /note="This region represents a CpG dinucleotide"
  misc_feature (61)..(61): /note="Nucleotide may be methylated to form 5-methylcytosine"
atgaaaacttctctgggggtatgaattgacacagaatattgagtgccagtgagttctccacgcccggtgcaagttacagctgcagacattttcaaaccaaccagctggggtcctcagggact

SEQ ID NO: 5203 - DNA, 122 bp, Homo sapiens
  misc_feature (61)..(62): /note="This region represents a CpG dinucleotide"
  misc_feature (61)..(61): /note="Nucleotide may be methylated to form 5-methylcytosine"
cccctgtacagaggcggggcatggagccggcggctttcagaactcccagggtctctgctgcggtagaccggctatttaacctccctttaatgcctgtgtaatgtgctggagaacaactagct

SEQ ID NO: 5204 - DNA, 122 bp, Homo sapiens
  misc_feature (61)..(62): /note="This region represents a CpG dinucleotide"
  misc_feature (61)..(61): /note="Nucleotide may be methylated to form 5-methylcytosine"
attaaccagatagtttatatttcctgtttaaactgtgttattggatcctgaaggtgccttcgcttttctgtctcattgttgtcttaacctttggtggaaatagtgctgaagaaaccctcttc

SEQ ID NO: 5205 - DNA, 122 bp, Homo sapiens
  misc_feature (61)..(62): /note="This region represents a CpG dinucleotide"
  misc_feature (61)..(61): /note="Nucleotide may be methylated to form 5-methylcytosine"
tctaacaaaaacaaatcagtcatcgtttcccttcttccaggagactgtgcctgaggaaagcggggggcgtggctgcagttctggacgggctggccgagctgcgcgggatccttgtgcaggga

SEQ ID NO: 5206 - DNA, 122 bp, Homo sapiens
  misc_feature (61)..(62): /note="This region represents a CpG dinucleotide"
  misc_feature (61)..(61): /note="Nucleotide may be methylated to form 5-methylcytosine"
agcaatatactgtttattaatgtttcctcccgtttcacctaatggcagcactgtactccacggtgttctggactttgctttattcacttaatatattctggagacttttccatagctgtaca

SEQ ID NO: 5207 - DNA, 122 bp, Homo sapiens
  misc_feature (61)..(62): /note="This region represents a CpG dinucleotide"
  misc_feature (61)..(61): /note="Nucleotide may be methylated to form 5-methylcytosine"
taaggttctcatacagcatatctacttaccttttcttcttgacagcagataagtaaaccacggcttaggagtagatttgccaatgtattttactggagacttttgtagtaagactttttact

SEQ ID NO: 5208 - DNA, 122 bp, Homo sapiens
  misc_feature (61)..(62): /note="This region represents a CpG dinucleotide"
  misc_feature (61)..(61): /note="Nucleotide may be methylated to form 5-methylcytosine"
attaccacaccaaaactgtgctcatttcccaaaaagatcttcagcggatttacccacaaacggccttccctcttagccttcccaggccgctcttgtcctgaagtgtggatctggagttcccg

SEQ ID NO: 5209 - DNA, 122 bp, Homo sapiens
  misc_feature (61)..(62): /note="This region represents a CpG dinucleotide"
  misc_feature (61)..(61): /note="Nucleotide may be methylated to form 5-methylcytosine"
tttgagactgagttcctcagggttgagagcactgctcattcaattttgtaatcccttccccgaggatgcattcaataatgttttgctgaactctttaatgaataaatgaaagcatgctgggg

SEQ ID NO: 5210 - DNA, 122 bp, Homo sapiens
  misc_feature (61)..(62): /note="This region represents a CpG dinucleotide"
  misc_feature (61)..(61): /note="Nucleotide may be methylated to form 5-methylcytosine"
attgcccgaggacacatagcggtgccggcgtctctgcatcccaggtgtctgctggggcctcggtttccccatcgcacagagacctcatcacggggcccatccggggaggaaggcggcacagg

SEQ ID NO: 5211 - DNA, 122 bp, Homo sapiens
  misc_feature (61)..(62): /note="This region represents a CpG dinucleotide"
  misc_feature (61)..(61): /note="Nucleotide may be methylated to form 5-methylcytosine"
aagacaagacggtgtttcatcagccagtgttgcagaactcggcccctctcaggctctgcacgtaccccatcccccgacaaagcctagctctccctctctttctgattcatgggaactaccta

SEQ ID NO: 5212 - DNA, 122 bp, Homo sapiens
  misc_feature (61)..(62): /note="This region represents a CpG dinucleotide"
  misc_feature (61)..(61): /note="Nucleotide may be methylated to form 5-methylcytosine"
cattttatatatcttaaattagtaatactggaactgtcctgctcaacttcatttgccatccgttgtttgctagagactttctcagtgctcactcttacatgcttgtaaatctgtgctgcttt

SEQ ID NO: 5213 - DNA, 122 bp, Homo sapiens
  misc_feature (61)..(62): /note="This region represents a CpG dinucleotide"
  misc_feature (61)..(61): /note="Nucleotide may be methylated to form 5-methylcytosine"
agatggaaaacaggattccttgaaggaatgactgattataagtctgaaacaggaaatgtacgagttgagtccaggacattgtgttggccttgccaaaaagcaagaaattatcaaaggttaat

SEQ ID NO: 5214 - DNA, 122 bp, Homo sapiens
  misc_feature (61)..(62): /note="This region represents a CpG dinucleotide"
  misc_feature (61)..(61): /note="Nucleotide may be methylated to form 5-methylcytosine"
gaaagtagctttaatttgcatattccgataagaatttagtgactcattcattcgttggtacgcctaagtgacaaatggcattattgccggctgtgttgactggctgcctatcagggtgtgat

SEQ ID NO: 5215 - DNA, 122 bp, Homo sapiens
  misc_feature (61)..(62): /note="This region represents a CpG dinucleotide"
  misc_feature (61)..(61): /note="Nucleotide may be methylated to form 5-methylcytosine"
gaatcttcatcataagggctgttaaggagctttcccttttctccaggaagctttgcagggcgcatattgttggctttgcttcctcctctagcaatgaccacctggtgttgcaacactgctgt

SEQ ID NO: 5216 - DNA, 122 bp, Homo sapiens
  misc_feature (61)..(62): /note="This region represents a CpG dinucleotide"
  misc_feature (61)..(61): /note="Nucleotide may be methylated to form 5-methylcytosine"
caaagaggaaatagcttcagtggctggggtaagatccagacggattccttccctgggtctcgtctcacctgccatatcacaaggccccaggcagacctgtggccaccctccctggcactcag

SEQ ID NO: 5217 - DNA, 122 bp, Homo sapiens
  misc_feature (61)..(62): /note="This region represents a CpG dinucleotide"
  misc_feature (61)..(61): /note="Nucleotide may be methylated to form 5-methylcytosine"
ttggtaactgctgtcattttttctcaacaattctgtttcttaaacatatattctcccttccgtattttatgtagctattgtgaatggaatcttttcacccactacagcgtctaacaggttat

SEQ ID NO: 5218 - DNA, 122 bp, Homo sapiens
  misc_feature (61)..(62): /note="This region represents a CpG dinucleotide"
  misc_feature (61)..(61): /note="Nucleotide may be methylated to form 5-methylcytosine"
cctccccattcctgtgtggtttctgaggaggggcagtccttgcccacctacttgtggacgcgcttgtgtggacttggccctgctcgtcatctatcctggtgctttaggacaacaccagttcc

SEQ ID NO: 5219 - DNA, 122 bp, Homo sapiens
  misc_feature (61)..(62): /note="This region represents a CpG dinucleotide"
  misc_feature (61)..(61): /note="Nucleotide may be methylated to form 5-methylcytosine"
aggaaatgtcacaggcctttcccacccctcctgtccacgcccccaacgcacacatgcacccgccccagcacagagcctcgcacatagcaggcacttgggaaacactgacttctttcataccc

SEQ ID NO: 5220 - DNA, 122 bp, Homo sapiens
  misc_feature (61)..(62): /note="This region represents a CpG dinucleotide"
  misc_feature (61)..(61): /note="Nucleotide may be methylated to form 5-methylcytosine"
aacattgctgacagatggccatttggtatgtgcctgaaatacatctagaggtgggaagcacgttagttagaggcaacctgttcactagatttgggacttgagtgttttagcaagatccttga

SEQ ID NO: 5221 - DNA, 122 bp, Homo sapiens
  misc_feature (61)..(62): /note="This region represents a CpG dinucleotide"
  misc_feature (61)..(61): /note="Nucleotide may be methylated to form 5-methylcytosine"
taaccaatctgtttctgcatgtcaattctgttttctgtaccttgctttcccttttctgtccgtaaatcctctccgaccacacagcactgcctgagtcactctgaacctactctggttgagga

SEQ ID NO: 5222 - DNA, 122 bp, Homo sapiens
  misc_feature (61)..(62): /note="This region represents a CpG dinucleotide"
  misc_feature (61)..(61): /note="Nucleotide may be methylated to form 5-methylcytosine"
gacaaggctgagaaaagggaagtcacagggtatcagtgaaaatatatttgctagaaatgacgcagggctcaaagtgggtacactaagctttctggctaggaattatccgctggccacagtaa

SEQ ID NO: 5223 - DNA, 122 bp, Homo sapiens
  misc_feature (61)..(62): /note="This region represents a CpG dinucleotide"
  misc_feature (61)..(61): /note="Nucleotide may be methylated to form 5-methylcytosine"
cttgactcagttcctccttgctgccacttcagaaggcaggtattatgggttccacctttacgattgaagtcaaatctcagagaggttaagtatgctgttcaagggcatccagccatgcggaa

SEQ ID NO: 5224 - DNA, 122 bp, Homo sapiens
  misc_feature (61)..(62): /note="This region represents a CpG dinucleotide"
  misc_feature (61)..(61): /note="Nucleotide may be methylated to form 5-methylcytosine"
cctgctaggaaacaaaaattgtcaaagacaaaatgctaatggagccatgtctctgagcaacgctgcattatatatgtatgagactgtaggagagattacaccaaagaggcatcctgtaacca

SEQ ID NO: 5225 - DNA, 122 bp, Homo sapiens
  misc_feature (61)..(62): /note="This region represents a CpG dinucleotide"
  misc_feature (61)..(61): /note="Nucleotide may be methylated to form 5-methylcytosine"
tgcggtgaaaaaacttgctctagatcagtggctctcaaactttagtacagtcatgcatggcgtaataggattatgttctgaagaatgtgttgttaggcaatttcattgtcatgtgaacatca

SEQ ID NO: 5226 - DNA, 122 bp, Homo sapiens
  misc_feature (61)..(62): /note="This region represents a CpG dinucleotide"
  misc_feature (61)..(61): /note="Nucleotide may be methylated to form 5-methylcytosine"
cacccacaacaggggcagtgcaggtctgtggtcactcctgctctcacctgtggcgtctcccgtagagggattgtcagttctggttccctgtgggcaggaatggtttcctcataggtcactgg

SEQ ID NO: 5227 - DNA, 122 bp, Homo sapiens
  misc_feature (61)..(62): /note="This region represents a CpG dinucleotide"
  misc_feature (61)..(61): /note="Nucleotide may be methylated to form 5-methylcytosine"
tccccagtgtgtgtgacttcagcctgcactagaccatttgaccgacctaatcattttgttcgtaagagcttcaagaacatctaattgagcattcccagcctttgactgtttaaccctgagtc

SEQ ID NO: 5228 - DNA, 122 bp, Homo sapiens
  misc_feature (61)..(62): /note="This region represents a CpG dinucleotide"
  misc_feature (61)..(61): /note="Nucleotide may be methylated to form 5-methylcytosine"
gaaatttttactaggtttgcagcctgagcatcatctttcttaatccctttttccttctggcgcgccccccccttttttttttttaaacctgggaagttgctggctataaatagggtatatct

SEQ ID NO: 5229 - DNA, 122 bp, Homo sapiens
  misc_feature (61)..(62): /note="This region represents a CpG dinucleotide"
  misc_feature (61)..(61): /note="Nucleotide may be methylated to form 5-methylcytosine"
gatgaagtaacatgagccatcagcagcagtcactagaggtagcaagatgattgaagaatgcgggggtgggtagagagcaaaaaacaaggcagaactacactcctggagttcttgaggtggtt

SEQ ID NO: 5230 - DNA, 122 bp, Homo sapiens
  misc_feature (61)..(62): /note="This region represents a CpG dinucleotide"
  misc_feature (61)..(61): /note="Nucleotide may be methylated to form 5-methylcytosine"
ggaggaaggtggagtaaggatgaggtggcccagactgcagctgaatctccggtccactgccgactgactcactttgtaatgtttcgcaagtctcttcacctcactttaccccttctataaaa

SEQ ID NO: 5231 - DNA, 122 bp, Homo sapiens
  misc_feature (61)..(62): /note="This region represents a CpG dinucleotide"
  misc_feature (61)..(61): /note="Nucleotide may be methylated to form 5-methylcytosine"
ctgatacttcattgttggaaggaattaaatctaattgaatagaatcaaatccaaattgaacgggcaggttctaaaccaggcttgcagatcagggccatcagcctcttaaatgcagcccagat

SEQ ID NO: 5232 - DNA, 122 bp, Homo sapiens
  misc_feature (61)..(62): /note="This region represents a CpG dinucleotide"
  misc_feature (61)..(61): /note="Nucleotide may be methylated to form 5-methylcytosine"
aaatcaaaatggttttaaaaggtgtcattttcattggaacggggtggggctcctagtgcccgccacagtcctccactcaggccggcggggcgggccctggcctcggcctcggtgcgtgggtg

SEQ ID NO: 5233 - DNA, 122 bp, Homo sapiens
  misc_feature (61)..(62): /note="This region represents a CpG dinucleotide"
  misc_feature (61)..(61): /note="Nucleotide may be methylated to form 5-methylcytosine"
ccaaaaataaaaataaaacctgtacaaattagagcatttatttttcttccatgtagaaaacgagtctggtcagtccacgccttgtgtggcattccatgatgtcatcaggaacccagcctctt

SEQ ID NO: 5234 - DNA, 122 bp, Homo sapiens
  misc_feature (61)..(62): /note="This region represents a CpG dinucleotide"
  misc_feature (61)..(61): /note="Nucleotide may be methylated to form 5-methylcytosine"
cggcccggacctcagctgcggggagactaccggaagctaaggagaacagcccgcagcctacgccgcggggccctggtgaccggtttggttagtctcgggctctcgagtctgccaggagtcta

SEQ ID NO: 5235 - DNA, 122 bp, Homo sapiens
  misc_feature (61)..(62): /note="This region represents a CpG dinucleotide"
  misc_feature (61)..(61): /note="Nucleotide may be methylated to form 5-methylcytosine"
gtgtgtacacacgcgtgtggagggcctgccttgttcgtgagcaccagccacgccacgtgacgacaggcatcattactaccgcatcgaccgccaggtgctccttccctgagtcaggagccatg

SEQ ID NO: 5236 - DNA, 122 bp, Homo sapiens
  misc_feature (61)..(62): /note="This region represents a CpG dinucleotide"
  misc_feature (61)..(61): /note="Nucleotide may be methylated to form 5-methylcytosine"
tctagctactctactagagctacttcaggaagaagatagtttggcattgtgacaggagtacggcctttggaatcaggatgtgtagacctctgtttgacttcttttgatgaccgtgcccttgc

SEQ ID NO: 5237 - DNA, 122 bp, Homo sapiens
  misc_feature (61)..(62): /note="This region represents a CpG dinucleotide"
  misc_feature (61)..(61): /note="Nucleotide may be methylated to form 5-methylcytosine"
aattcagtttaagtggcttcagttctgaattcctggattatatcgaaatgttgcagatggcggtgtgtgggctttgagctcgtaaattttttgtgtggtactaattcaagacgattgagagc

SEQ ID NO: 5238 - DNA, 122 bp, Homo sapiens
  misc_feature (61)..(62): /note="This region represents a CpG dinucleotide"
  misc_feature (61)..(61): /note="Nucleotide may be methylated to form 5-methylcytosine"
ccagcatggttgggttctgtgtccctcttcctgacttgtagacagctgcctttttgttcacgtggccttgtttgtttgtttgtttggtgcatgcatgtggagagagatctttctcttcctct

SEQ ID NO: 5239 - DNA, 122 bp, Homo sapiens
  misc_feature (61)..(62): /note="This region represents a CpG dinucleotide"
  misc_feature (61)..(61): /note="Nucleotide may be methylated to form 5-methylcytosine"
agtaggcgtgaggtttcaataagccagattaggtgatgcacttaccacagtgcctgcacccgttaagtgctcaataaacattagccattattctctggctcagtttggaagacttacaattg

SEQ ID NO: 5240 - DNA, 122 bp, Homo sapiens
  misc_feature (61)..(62): /note="This region represents a CpG dinucleotide"
  misc_feature (61)..(61): /note="Nucleotide may be methylated to form 5-methylcytosine"
gggaacacccagtaacgattccttcagtgatcccggttctccaaactcttgcctcaaaggcggcctgccccggtgctgtcagccgtgaatggggactcacttcttgggaaaagaggcttttg

SEQ ID NO: 5241 - DNA, 122 bp, Homo sapiens
  misc_feature (61)..(62): /note="This region represents a CpG dinucleotide"
  misc_feature (61)..(61): /note="Nucleotide may be methylated to form 5-methylcytosine"
cagactgtccctctcctccccaattctctggtaattttgggcttgctgagactcaatgcccggggtgagagaagctccccaggcagcatgcctcctgctctctccacccaccttctcttccc

SEQ ID NO: 5242 - DNA, 122 bp, Homo sapiens
  misc_feature (61)..(62): /note="This region represents a CpG dinucleotide"
  misc_feature (61)..(61): /note="Nucleotide may be methylated to form 5-methylcytosine"
gcacttggatctcttgataaactcttaccatcacactttcctttctgacagttaaatagccggaatgttaaataaatagaactgcaaaacttactagatagcattgcttgatcaatttttaa

SEQ ID NO: 5243 - DNA, 122 bp, Homo sapiens
  misc_feature (61)..(62): /note="This region represents a CpG dinucleotide"
  misc_feature (61)..(61): /note="Nucleotide may be methylated to form 5-methylcytosine"
atccacctgcctcggcctcccaaagtgctgggattacaggcatgagccacctgcccggcccgaaaatgttttttaaaaaattagctggacttgatggtttatgcctgtattcccagctactc

SEQ ID NO: 5244 - DNA, 122 bp, Homo sapiens
  misc_feature (61)..(62): /note="This region represents a CpG dinucleotide"
  misc_feature (61)..(61): /note="Nucleotide may be methylated to form 5-methylcytosine"
atggcccagggcacatggccctcctgtacataactcacaaacttcctgcttaccatcaaacgcctcgatttatcaagcaccttggctgacagaagaatgcgggttaagcttcctgctacctt

SEQ ID NO: 5245 - DNA, 122 bp, Homo sapiens
  misc_feature (61)..(62): /note="This region represents a CpG dinucleotide"
  misc_feature (61)..(61): /note="Nucleotide may be methylated to form 5-methylcytosine"
cctatgcttttatgagcataaaccaaagtaacattactgggagatacacagaaagaatcacgttttcctgagaaatctcttaagaaattacatcagttctctggacacatggaggagagggg

SEQ ID NO: 5246 - DNA, 122 bp, Homo sapiens
  misc_feature (61)..(62): /note="This region represents a CpG dinucleotide"
  misc_feature (61)..(61): /note="Nucleotide may be methylated to form 5-methylcytosine"
aagtaaaattcggctctgagaacaaaagctttgggaaccaaaggacagttggcacctcatcgcatgcaataattgtatacttttcaacactgtgtgctgatgcaatctttgcttatttaaag

SEQ ID NO: 5247 - DNA, 122 bp, Homo sapiens
  misc_feature (61)..(62): /note="This region represents a CpG dinucleotide"
  misc_feature (61)..(61): /note="Nucleotide may be methylated to form 5-methylcytosine"
ccacaggcagttaaagtcaagcaactagtagttcagcaggcttcaggaggcagtgaaaaacgggtgaccacacttacacattcctcagcattgaccattcagaaatctggatagaagacaat

SEQ ID NO: 5248 - DNA, 122 bp, Homo sapiens
  misc_feature (61)..(62): /note="This region represents a CpG dinucleotide"
  misc_feature (61)..(61): /note="Nucleotide may be methylated to form 5-methylcytosine"
tttgggttgtttccagtttgcaactattacaagttacacttctcagagcattcctttaggcggcttttggtagacatgggcactcatatctctagggtgtataccctggagtggaatggctg

SEQ ID NO: 5249 - DNA, 122 bp, Homo sapiens
  misc_feature (61)..(62): /note="This region represents a CpG dinucleotide"
  misc_feature (61)..(61): /note="Nucleotide may be methylated to form 5-methylcytosine"
tttaatgtgtgtaaatatttggccaaaggtcacaaagtgtgtaagtgacatatttggtatcgatttctgggcctaagtgcagcaccattttttgctatagcatatttcaagggttttttgtt

SEQ ID NO: 5250 - DNA, 122 bp, Homo sapiens
  misc_feature (61)..(62): /note="This region represents a CpG dinucleotide"
  misc_feature (61)..(61): /note="Nucleotide may be methylated to form 5-methylcytosine"
gatttcacccattgtcctatgaagcccttttcctaatctgggatctgattcacaatcacacgtggcatttagttgtcatgtttccctggtccccgttaatctggaatagtctctccatcttc

SEQ ID NO: 5251 - DNA, 122 bp, Homo sapiens
  misc_feature (61)..(62): /note="This region represents a CpG dinucleotide"
  misc_feature (61)..(61): /note="Nucleotide may be methylated to form 5-methylcytosine"
ggtgtgttggttccaccattctctccaattttgaatcagtcttggaactggaaagagcctcgggggtgaattataccgattacctccctctttctcctccttcccccgaaattcatgtgcgg

SEQ ID NO: 5252 - DNA, 122 bp, Homo sapiens
  misc_feature (61)..(62): /note="This region represents a CpG dinucleotide"
  misc_feature (61)..(61): /note="Nucleotide may be methylated to form 5-methylcytosine"
ctcagacactggatgactcaaagcctagtttaccactgatttccaagatgatgtcagcaacgcagtctgctccattcaacctggcaatcggctctgtgcaggcgatgccccacctgcccctg

SEQ ID NO: 5253 - DNA, 122 bp, Homo sapiens
  misc_feature (61)..(62): /note="This region represents a CpG dinucleotide"
  misc_feature (61)..(61): /note="Nucleotide may be methylated to form 5-methylcytosine"
cccaataaatcaaagaagggctgagaatcctgaccaccacccccagtaaggatcaagttccgctttctggaagaggcctagaggtggattgcaggacttcccagtttaaccaggtgacaaag

SEQ ID NO: 5254 - DNA, 122 bp, Homo sapiens
  misc_feature (61)..(62): /note="This region represents a CpG dinucleotide"
  misc_feature (61)..(61): /note="Nucleotide may be methylated to form 5-methylcytosine"
ttgccagtgtttcctgcttcgtgtctcccaggaaaggggatgctccacttaagctgagtacgacagacagggaatcaaataactaagggaaagtaggtggaaatggggattacggactcggg

SEQ ID NO: 5255 - DNA, 122 bp, Homo sapiens
  misc_feature (61)..(62): /note="This region represents a CpG dinucleotide"
  misc_feature (61)..(61): /note="Nucleotide may be methylated to form 5-methylcytosine"
actcaacaaagagaggccctgaagaattaagtgggctctctgctgcctctggcttcatgtcgcctgtatttaaatcatgatccctttcatcatgttgttccaacaagcatattttccagaga

SEQ ID NO: 5256 - DNA, 122 bp, Homo sapiens
  misc_feature (61)..(62): /note="This region represents a CpG dinucleotide"
  misc_feature (61)..(61): /note="Nucleotide may be methylated to form 5-methylcytosine"
ctgactcaagaaggatgaggtggcccatcccagtgggaacacttaaggaagtcaacgcaacggaaatcgatttgaaataaacgtttagtaagcttttctgaatctgtttgccagaccctgtt

SEQ ID NO: 5257 - DNA, 122 bp, Homo sapiens
  misc_feature (61)..(62): /note="This region represents a CpG dinucleotide"
  misc_feature (61)..(61): /note="Nucleotide may be methylated to form 5-methylcytosine"
taatgctttagtattaatgtaaataagtctgacatatcaaatccacttagaacagcactccgcagaggaaaagaccaaatttaaaacatagataaattccctatgacttatttattgcaagt

SEQ ID NO: 5258 - DNA, 122 bp, Homo sapiens
  misc_feature (61)..(62): /note="This region represents a CpG dinucleotide"
  misc_feature (61)..(61): /note="Nucleotide may be methylated to form 5-methylcytosine"
cctaacagaagtggccatgatgtgctagcaattatgcctgtcctcacaattctctgtgagcgtgctgctctattccttcctcttcacaatatgaagaaagtaaggctcagagaactgcccca

SEQ ID NO: 5259 - DNA, 122 bp, Homo sapiens
  misc_feature (61)..(62): /note="This region represents a CpG dinucleotide"
  misc_feature (61)..(61): /note="Nucleotide may be methylated to form 5-methylcytosine"
ttctggggcataatagagcagcagcacagaacgtaacgtgattgtttgcttttcccgctgcgctgtgtagcccacatccttctacaactccaacaactggttcagtaccaggcgcagagtga

SEQ ID NO: 5260 - DNA, 122 bp, Homo sapiens
  misc_feature (61)..(62): /note="This region represents a CpG dinucleotide"
  misc_feature (61)..(61): /note="Nucleotide may be methylated to form 5-methylcytosine"
ccacttcctctaaaacatcttcaacatctacagctacaatatagccacagatgacaataacgtcccacttcatggaccaggaaaatgctaaatcactaagaaagttttatgtagtgaaactc

SEQ ID NO: 5261 - DNA, 122 bp, Homo sapiens
  misc_feature (61)..(62): /note="This region represents a CpG dinucleotide"
  misc_feature (61)..(61): /note="Nucleotide may be methylated to form 5-methylcytosine"
attttccatggatttgtgagtgactgctcacagactcacatctgtgttcatgactcagaccgtgagctcgcaaggcagaagccaagactgtgtccattcaccattgtccccagtcacgggca

SEQ ID NO: 5262 - DNA, 122 bp, Homo sapiens
  misc_feature (61)..(62): /note="This region represents a CpG dinucleotide"
  misc_feature (61)..(61): /note="Nucleotide may be methylated to form 5-methylcytosine"
ggcagtttatctctctaagagcatcccactcccggtgatacgcccagctctgacacatcacgcacgattgttattcatcatctggtcactgggtttaaggcacagctcagccacttattaac

SEQ ID NO: 5263 - DNA, 122 bp, Homo sapiens
  misc_feature (61)..(62): /note="This region represents a CpG dinucleotide"
  misc_feature (61)..(61): /note="Nucleotide may be methylated to form 5-methylcytosine"
ccattcagcaaatattttttacatgcccgtgtgtgccaggaactatactgtttgctgggacgacagtgatgaacaaaaccaatttggttcctctccatgtggagttgaaagtccagcaagaa

SEQ ID NO: 5264 - DNA, 122 bp, Homo sapiens
  misc_feature (61)..(62): /note="This region represents a CpG dinucleotide"
  misc_feature (61)..(61): /note="Nucleotide may be methylated to form 5-methylcytosine"
aactgcctcccttccttccctccacggttctctcccgtaatcagcttttctaccacacagcgagcaaggccaacttccctaaactaagaatgctgagattcttttcgacttataatgttctg

SEQ ID NO: 5265 - DNA, 122 bp, Homo sapiens
  misc_feature (61)..(62): /note="This region represents a CpG dinucleotide"
  misc_feature (61)..(61): /note="Nucleotide may be methylated to form 5-methylcytosine"
gccccagggctgtggggaagggttgatgaatagtattcccacgcagtgctttgcacagtccgggcaccacaggatccctgtcattgtgaaacatctgtcacggtgaacaacttgccactccc

SEQ ID NO: 5266 - DNA, 122 bp, Homo sapiens
  misc_feature (61)..(62): /note="This region represents a CpG dinucleotide"
  misc_feature (61)..(61): /note="Nucleotide may be methylated to form 5-methylcytosine"
gaaatcatgtttaatgtgtgattctgtacagatgggtgtgtaggaaatatgaccggcatacgcactgacgttgacccatacaagtctaggcatctgttaagtgtttggccctgtccaggaag

SEQ ID NO: 5267 - DNA, 122 bp, Homo sapiens
  misc_feature (61)..(62): /note="This region represents a CpG dinucleotide"
  misc_feature (61)..(61): /note="Nucleotide may be methylated to form 5-methylcytosine"
tgccggcgttaagggaacgcagggatgttctgggcttgcgcagtggcacaaaatgacgggcgtggcggctatgaatgtgagagcatgcgcaatgtggccccctaatggtggctgcgctgagc

SEQ ID NO: 5268 - DNA, 122 bp, Homo sapiens
  misc_feature (61)..(62): /note="This region represents a CpG dinucleotide"
  misc_feature (61)..(61): /note="Nucleotide may be methylated to form 5-methylcytosine"
ggtgccggcgtttccgcgccctccttctctcctgcgccgtgacctcaaaagggcggcgggcgggggcccctccactccagccctgtcgatcctatttctgaagggccttagggaaggagatt

SEQ ID NO: 5269 - DNA, 122 bp, Homo sapiens
  misc_feature (61)..(62): /note="This region represents a CpG dinucleotide"
  misc_feature (61)..(61): /note="Nucleotide may be methylated to form 5-methylcytosine"
cagatgttctcagtcagttcaaggttccagaattgaagacactccaatgcccagaaaccacgcatcactcgtttgaaatcacagaccagctcgggctaaagcactcatcagcacaatctcca

SEQ ID NO: 5270 - DNA, 122 bp, Homo sapiens
  misc_feature (61)..(62): /note="This region represents a CpG dinucleotide"
  misc_feature (61)..(61): /note="Nucleotide may be methylated to form 5-methylcytosine"
tccattctggggtggggtagtagacctagaggcctgggtttccagttcccgtagtctgagcgtgggtgtgcatatataagtgagtgaggtgtcagtggactcgggtcctgaggctgtgaggt

SEQ ID NO: 5271 - DNA, 122 bp, Homo sapiens
  misc_feature (61)..(62): /note="This region represents a CpG dinucleotide"
  misc_feature (61)..(61): /note="Nucleotide may be methylated to form 5-methylcytosine"
gccctacctctgtttgtcctaggcatcctttccctcttacatattatagatgtacagagacgcaaaacagaagaacaactttatttgtggaatttacataccagggcttcttgcctacaaga

SEQ ID NO: 5272 - DNA, 122 bp, Homo sapiens
  misc_feature (61)..(62): /note="This region represents a CpG dinucleotide"
  misc_feature (61)..(61): /note="Nucleotide may be methylated to form 5-methylcytosine"
acatttgtctctcccacgatgacgtcaacgtgtaccagcccttctcttccacatgggaaacgtgttatgttgttccaattgtacattcacttggtgaagggttgtgttaagtgattccaaaa

SEQ ID NO: 5273 - DNA, 122 bp, Homo sapiens
  misc_feature (61)..(62): /note="This region represents a CpG dinucleotide"
  misc_feature (61)..(61): /note="Nucleotide may be methylated to form 5-methylcytosine"
aaaaaatctggagtggagaacggaagcaaaacacaccaacgtacttttcaaaactgaggacgtgctgctctcttgtggaaatctgtattgccaacttgtaaagcctgggctgagttgcttat

SEQ ID NO: 5274 - DNA, 122 bp, Homo sapiens
  misc_feature (61)..(62): /note="This region represents a CpG dinucleotide"
  misc_feature (61)..(61): /note="Nucleotide may be methylated to form 5-methylcytosine"
tagggctaagactcaaagaagaactgcccaaggtggattcttgactgtgccagagctgaccgaggtctgtccaagacctaaggatgctacaaggtgttcatattgagcatggggtgcccagg

SEQ ID NO: 5275 - DNA, 122 bp, Homo sapiens
  misc_feature (61)..(62): /note="This region represents a CpG dinucleotide"
  misc_feature (61)..(61): /note="Nucleotide may be methylated to form 5-methylcytosine"
accacaagatagtgggtccctctgctgctgttgtcagatagaatttattgaagactgggacgtggaaacaaagaggaaggaagagacgttttaatctctgtgggtgttaggctgacttctga

SEQ ID NO: 5276 - DNA, 122 bp, Homo sapiens
  misc_feature (61)..(62): /note="This region represents a CpG dinucleotide"
  misc_feature (61)..(61): /note="Nucleotide may be methylated to form 5-methylcytosine"
cctgtacctcggaagcagcattcccttcagccatgggaggttctttttttctgcatttagcggtggaacttttaagatttatgttaataaggaagaggaaattaatttaaacctatttaata

SEQ ID NO: 5277 - DNA, 122 bp, Homo sapiens
  misc_feature (61)..(62): /note="This region represents a CpG dinucleotide"
  misc_feature (61)..(61): /note="Nucleotide may be methylated to form 5-methylcytosine"
ccctctggctcctcctatctccctccagtcctgggcccatcctcccatcctttgtttgctcggaagcccagtgtttcctgccaggccccagccagggacccccaagtgaacttgacctgcct

SEQ ID NO: 5278 - DNA, 122 bp, Homo sapiens
  misc_feature (61)..(62): /note="This region represents a CpG dinucleotide"
  misc_feature (61)..(61): /note="Nucleotide may be methylated to form 5-methylcytosine"
gcgctggagcaactggggcgaagttgaactgggacatccttggagatgatttttgaaaaacgagcaagccatgcctggaaatgagggagagtgggaaagacactggattgagagtcagaaga

SEQ ID NO: 5279 - DNA, 122 bp, Homo sapiens
  misc_feature (61)..(62): /note="This region represents a CpG dinucleotide"
  misc_feature (61)..(61): /note="Nucleotide may be methylated to form 5-methylcytosine"
gtgcaacatcgggtttgagactgcagaaaactaagtctggaaattgggccatttgttccccggggaggcagtgctttccttccagtaccccgtcggttgttatttggaacacctggcatttc

SEQ ID NO: 5280 - DNA, 122 bp, Homo sapiens
  misc_feature (61)..(62): /note="This region represents a CpG dinucleotide"
  misc_feature (61)..(61): /note="Nucleotide may be methylated to form 5-methylcytosine"
tactggtagatgttacaacacggatgaaccttacaaatgtggaagctaaagatgtcagtccgtagagacagattagtggttactaagagttgggtgagtgattgctaatgtatacaaagttc

SEQ ID NO: 5281 - DNA, 122 bp, Homo sapiens
  misc_feature (61)..(62): /note="This region represents a CpG dinucleotide"
  misc_feature (61)..(61): /note="Nucleotide may be methylated to form 5-methylcytosine"
tcaggttcagagacacattctagaatgttacagttttctcattatgcattgtatctgttccgtgttgaagtacctgtaggaagaaaattaagtacaggttttgtgtgtaggttgagagctga

SEQ ID NO: 5282 - DNA, 122 bp, Homo sapiens
  misc_feature (61)..(62): /note="This region represents a CpG dinucleotide"
  misc_feature (61)..(61): /note="Nucleotide may be methylated to form 5-methylcytosine"
ttgtttacttaagagaacctgttgctaaaatagtaatgaggaagagtgtaatataagtctcgtcatacaccccttgctctgcaagtaaccagagtgctatgtctgcatgctgttcagtctcc

SEQ ID NO: 5283 - DNA, 122 bp, Homo sapiens
  misc_feature (61)..(62): /note="This region represents a CpG dinucleotide"
  misc_feature (61)..(61): /note="Nucleotide may be methylated to form 5-methylcytosine"
tattctggaagaaggcttgcctggcacctggaattccacacccttgagctctccttttcacggaacagcattcgtcagatttactgacagcatagcagtggcataattaacaaataatccag

SEQ ID NO: 5284 - DNA, 122 bp, Homo sapiens
  misc_feature (61)..(62): /note="This region represents a CpG dinucleotide"
  misc_feature (61)..(61): /note="Nucleotide may be methylated to form 5-methylcytosine"
cgcctccatcccctgccgcgtagcccacgcatccaacctcttgagggaaaggcgggagggcggtgtctcccaaaagagctcccacctcttgtgttggcactgcacattgatgccattcttag

SEQ ID NO: 5285 - DNA, 122 bp, Homo sapiens
  misc_feature (61)..(62): /note="This region represents a CpG dinucleotide"
  misc_feature (61)..(61): /note="Nucleotide may be methylated to form 5-methylcytosine"
attgtatagtatgtgagttgtatctcaataaagcattttttaaaatagccttgggctgggcgcagtggctcatgcctataatcccagcactttgggaggccgaggcaggcggatcacctgaa

SEQ ID NO: 5286 - DNA, 122 bp, Homo sapiens
  misc_feature (61)..(62): /note="This region represents a CpG dinucleotide"
  misc_feature (61)..(61): /note="Nucleotide may be methylated to form 5-methylcytosine"
cccctgggcctgtcctctggctgcaccttcaacaaacaatcaatgaatctttcactagtgcgcatccagggtttgaatgcggtatgcttggtccacatttctgttctaggactgggcatggc

SEQ ID NO: 5287 - DNA, 122 bp, Homo sapiens
  misc_feature (61)..(62): /note="This region represents a CpG dinucleotide"
  misc_feature (61)..(61): /note="Nucleotide may be methylated to form 5-methylcytosine"
tgccctctagctgctgctcagagaagctggtggcggctttgtcatacaagcttttatcttcgtaggtcaggagactgctctagagaggagaatcaacatcctggcttgggaggtttcccacc

SEQ ID NO: 5288 - DNA, 122 bp, Homo sapiens
  misc_feature (61)..(62): /note="This region represents a CpG dinucleotide"
  misc_feature (61)..(61): /note="Nucleotide may be methylated to form 5-methylcytosine"
ctgcagcctgattgcccggttttcggccccgtgccccttattggataaagcttcaggccccgtccccagtccgtgagtgacagaagatgtgaccaaacactggactcaatgaggacggagtg

SEQ ID NO: 5289 - DNA, 122 bp, Homo sapiens
  misc_feature (61)..(62): /note="This region represents a CpG dinucleotide"
  misc_feature (61)..(61): /note="Nucleotide may be methylated to form 5-methylcytosine"
acctcgtgatctacctgcctcagcctcccaaagtgctgggattacaggcgtgagccaccacgcccggcaatattgtgattttttatatcacatgagcacacattgaaacctgtcaacaatat

SEQ ID NO: 5290 - DNA, 122 bp, Homo sapiens
  misc_feature (61)..(62): /note="This region represents a CpG dinucleotide"
  misc_feature (61)..(61): /note="Nucleotide may be methylated to form 5-methylcytosine"
ctgctggtgaggtcggcgatccgggtgtagctggggttgcaggcttggcaggcacggcggcggtatcgggaggcacagcgatcttgagggactcaaaaggctgggacaactgagaccccgtg

SEQ ID NO: 5291 - DNA, 122 bp, Homo sapiens
  misc_feature (61)..(62): /note="This region represents a CpG dinucleotide"
  misc_feature (61)..(61): /note="Nucleotide may be methylated to form 5-methylcytosine"
ttcgttctctttcctgtggttcagtgtagctggcagtcagggagaactctctgcagctggcgccggccctgtatttgttaggcttgtttctcctgggctcggctgctgggcaaggccttttg

SEQ ID NO: 5292 - DNA, 122 bp, Homo sapiens
  misc_feature (61)..(62): /note="This region represents a CpG dinucleotide"
  misc_feature (61)..(61): /note="Nucleotide may be methylated to form 5-methylcytosine"
gttgccatgcttgtctgcacactcaggcatgtgggtgcacacctatattcatccatgtggcgtgcctggagggtgtggcccgcggtgcccagtatagagcaggcgcatggccacacggctcc

SEQ ID NO: 5293 - DNA, 122 bp, Homo sapiens
  misc_feature (61)..(62): /note="This region represents a CpG dinucleotide"
  misc_feature (61)..(61): /note="Nucleotide may be methylated to form 5-methylcytosine"
tccttgctgaacttggaatgcgacagctcagatccaaccaaaattaactgcatcagatgtcgctgatgtgaaaataaaaatcaactaagccaaacagcagaagaaaaggtggatggaggaag

SEQ ID NO: 5294 - DNA, 122 bp, Homo sapiens
  misc_feature (61)..(62): /note="This region represents a CpG dinucleotide"
  misc_feature (61)..(61): /note="Nucleotide may be methylated to form 5-methylcytosine"
agttaaattaaaagcactttccaaacaaacctaggaaagtattaaagttagggactcccacgaaatgttactccttaattgtggcttggataatagcaggaagaactgcagacaggaacaca

SEQ ID NO: 5295 - DNA, 122 bp, Homo sapiens
  misc_feature (61)..(62): /note="This region represents a CpG dinucleotide"
  misc_feature (61)..(61): /note="Nucleotide may be methylated to form 5-methylcytosine"
gaacgctgctgtcatcactgcacgtggacacatcatcaacctctcagcgtgacgtgccctcgtgctttcaggtaaaacactacagagaaacttcctgttggcaggtggaccccgcactccct

SEQ ID NO: 5296 - DNA, 122 bp, Homo sapiens
  misc_feature (61)..(62): /note="This region represents a CpG dinucleotide"
  misc_feature (61)..(61): /note="Nucleotide may be methylated to form 5-methylcytosine"
aggtttttctttctcttgttgccctgtcaggtctaatttggcggcattatgctgagagggcgggcctgctcctgacaggagggggttaaatgagattgcaagctttggaggctgtcagcagc

SEQ ID NO: 5297 - DNA, 122 bp, Homo sapiens
  misc_feature (61)..(62): /note="This region represents a CpG dinucleotide"
  misc_feature (61)..(61): /note="Nucleotide may be methylated to form 5-methylcytosine"
acgaagtcttcatttcctatggggcgataacactgctgctttgtggatgactacctgtcacgcccaaatcctgcaaacttttctacatagggaaatgaaattgggcttatttcccctgtagc

SEQ ID NO: 5298 - DNA, 122 bp, Homo sapiens
  misc_feature (61)..(62): /note="This region represents a CpG dinucleotide"
  misc_feature (61)..(61): /note="Nucleotide may be methylated to form 5-methylcytosine"
acttacacctaagaaaacaatttgcttagaagaccttaggatataggatctacatctctccgcatcctgtgtttatgctcctgtatgttccaggttggcccaacaagccagaaggaagagcc

SEQ ID NO: 5299 - DNA, 122 bp, Homo sapiens
  misc_feature (61)..(62): /note="This region represents a CpG dinucleotide"
  misc_feature (61)..(61): /note="Nucleotide may be methylated to form 5-methylcytosine"
ttttttcctttttgtcttttattgagacagggtttcgcccttttacctaggctggagtgccgaggtgtgatctcagctcactgcaacctctgcctcctgggctcaagtgatcctctcacttc

SEQ ID NO: 5300 - DNA, 122 bp, Homo sapiens
  misc_feature (61)..(62): /note="This region represents a CpG dinucleotide"
  misc_feature (61)..(61): /note="Nucleotide may be methylated to form 5-methylcytosine"
aaatttaagatgggaaataaaatcaaactaagggtatagtcaacacacaatcgcagctagcggtagcctacaagtgtgatcctgagcttctaaggagctggggaaaaaatgtgattaataag

SEQ ID NO: 5301 - DNA, 122 bp, Homo sapiens
  misc_feature (61)..(62): /note="This region represents a CpG dinucleotide"
  misc_feature (61)..(61): /note="Nucleotide may be methylated to form 5-methylcytosine"
cccaggaaccctggatggaggcatccactttggcttctctgatgacaagcacacttcctccggacacttcttctgagtgatggcccagaagcaagtgttcctcttgctggagggcagctgga

SEQ ID NO: 5302 - DNA, 122 bp, Homo sapiens
  misc_feature (61)..(62): /note="This region represents a CpG dinucleotide"
  misc_feature (61)..(61): /note="Nucleotide may be methylated to form 5-methylcytosine"
aatctaggtgatgccctggacagcagcaactccatgcaaaccatcaaaaagaccaccacccgccagagaatggatggcaaagtgctgtctgagaccaatgacaccaaattgagacattaagc

SEQ ID NO: 5303 - DNA, 122 bp, Homo sapiens
  misc_feature (61)..(62): /note="This region represents a CpG dinucleotide"
  misc_feature (61)..(61): /note="Nucleotide may be methylated to form 5-methylcytosine"
actcctcccaggagccgctttccacccacagtctcccttctgggagcatggggcaggtggcgaggtgctgggttcctttctcacccatgctggtcccagcaggctgaactgagcagctctgt

SEQ ID NO: 5304 - DNA, 122 bp, Homo sapiens
  misc_feature (61)..(62): /note="This region represents a CpG dinucleotide"
  misc_feature (61)..(61): /note="Nucleotide may be methylated to form 5-methylcytosine"
agagagcaaaacaaggggaacaaagaaacaaagaggaatcagatggaaaggatgaacgcacggtgagtctgtactgtaaccagctacagctgggttgaaattcagtgtcattagcatgcagc

SEQ ID NO: 5305 - DNA, 122 bp, Homo sapiens
  misc_feature (61)..(62): /note="This region represents a CpG dinucleotide"
  misc_feature (61)..(61): /note="Nucleotide may be methylated to form 5-methylcytosine"
ccaggattcagtgacccacgtctgtttgaggctgttctatgttgttccatccaagctgagcgcattcttggcttcaggtcagcacacacctcctggaatagtgccttagcttgcacttttga

SEQ ID NO: 5306 - DNA, 122 bp, Homo sapiens
  misc_feature (61)..(62): /note="This region represents a CpG dinucleotide"
  misc_feature (61)..(61): /note="Nucleotide may be methylated to form 5-methylcytosine"
acaatatccccctagggaaacctgtgacaagaaatcaccctctctggacgatcagccacacgcagtagcaactgaatttgatcgttgctgatgaaaataacctcaggaaggagtgttcatcc

SEQ ID NO: 5307 - DNA, 122 bp, Homo sapiens
  misc_feature (61)..(62): /note="This region represents a CpG dinucleotide"
  misc_feature (61)..(61): /note="Nucleotide may be methylated to form 5-methylcytosine"
tttggctcaaatccccgcagtggctcctggtcttcctcagactaaagaccaaagtccttacgatggccttcaaggtcctacatgattcctttccaagaacagcaagtgtgttcttcaaacac

SEQ ID NO: 5308 - DNA, 122 bp, Homo sapiens
  misc_feature (61)..(62): /note="This region represents a CpG dinucleotide"
  misc_feature (61)..(61): /note="Nucleotide may be methylated to form 5-methylcytosine"
tgcttcaaacagctgctcactagagaccaatgactgacattttgagtcccactataaaaacgcctgtcttcattcctctttagagcaatcacataagaagtcagggctccagcaaccccttg

SEQ ID NO: 5309 - DNA, 122 bp, Homo sapiens
  misc_feature (61)..(62): /note="This region represents a CpG dinucleotide"
  misc_feature (61)..(61): /note="Nucleotide may be methylated to form 5-methylcytosine"
cttttcaaatatgatttttatctaaatggtgtcccttaaaacttcattttaacactcaaacgatccccagctgttcgggtagattggcccctgctgggtctgtttcccaacacttcccatat

SEQ ID NO: 5310 - DNA, 122 bp, Homo sapiens
  misc_feature (61)..(62): /note="This region represents a CpG dinucleotide"
  misc_feature (61)..(61): /note="Nucleotide may be methylated to form 5-methylcytosine"
agttccaggggcggcggtatcggtggctgccctactacagcggtgagcgcggccgggactcgctctctcggggcctcttgtatacctacgttgatgccacagttcctattgccgtattatag

SEQ ID NO: 5311 - DNA, 122 bp, Homo sapiens
  misc_feature (61)..(62): /note="This region represents a CpG dinucleotide"
  misc_feature (61)..(61): /note="Nucleotide may be methylated to form 5-methylcytosine"
ggcaggtgtactgaatccgcacttatgtttctttctctttttaactgggccttgtactaccgctgccataaacaatagctttggtgtcagccaaccaaagacagggtcaaattctcttttca

SEQ ID NO: 5312 - DNA, 122 bp, Homo sapiens
  misc_feature (61)..(62): /note="This region represents a CpG dinucleotide"
  misc_feature (61)..(61): /note="Nucleotide may be methylated to form 5-methylcytosine"
tccgcttcaggacttctttcaccaggcccttgtctgggccctgtttgactttttctcgtccgattaagtacaagcactttggggtaaggagcaggtctcgctttacaccctgtaaggagagg

SEQ ID NO: 5313 - DNA, 122 bp, Homo sapiens
  misc_feature (61)..(62): /note="This region represents a CpG dinucleotide"
  misc_feature (61)..(61): /note="Nucleotide may be methylated to form 5-methylcytosine"
atcatggtacccaggaggagcttgatggagtcctcttgccttggcttgtgcccacattggcgcggaacacctcgtgtgcagaaagcgtcggtgactctggatggagaaggcaggggcaaaca

SEQ ID NO: 5314 - DNA, 122 bp, Homo sapiens
  misc_feature (61)..(62): /note="This region represents a CpG dinucleotide"
  misc_feature (61)..(61): /note="Nucleotide may be methylated to form 5-methylcytosine"
tctgttgagtaaagaaacactactatttccgttttacagatgacaaaactaaaagaccagcgacaataagtgatttgtcaaagtcccattgacacagggagctgtgctggtttgaagcccac

SEQ ID NO: 5315 - DNA, 122 bp, Homo sapiens
  misc_feature (61)..(62): /note="This region represents a CpG dinucleotide"
  misc_feature (61)..(61): /note="Nucleotide may be methylated to form 5-methylcytosine"
agatgggctgatgcataaagggaacttcagcacaccagcccacactcagtaaagatttaccgtgcttcactgtctccgtttcagtcttcatcatgtggcatgctacttacattactcttgtc

SEQ ID NO: 5316 - DNA, 122 bp, Homo sapiens
  misc_feature (61)..(62): /note="This region represents a CpG dinucleotide"
  misc_feature (61)..(61): /note="Nucleotide may be methylated to form 5-methylcytosine"
tgctaggattacaggcgtgagccaccacgcccggcccaaaaaacccatatgtttagcatacgctaaaaacaccaactgaaccttctggagaaagtgggtcctgtggtgagctgaccacaggg

SEQ ID NO: 5317 - DNA, 122 bp, Homo sapiens
  misc_feature (61)..(62): /note="This region represents a CpG dinucleotide"
  misc_feature (61)..(61): /note="Nucleotide may be methylated to form 5-methylcytosine"
gcaggcaagggagactcctgggctccctgggctcgggcggggcgggaggtgggcggacctcggactccgccctcctggatcccgacttcccctccgccccgcagagctgccccgacggcgcc

SEQ ID NO: 5318 - DNA, 122 bp, Homo sapiens
  misc_feature (61)..(62): /note="This region represents a CpG dinucleotide"
  misc_feature (61)..(61): /note="Nucleotide may be methylated to form 5-methylcytosine"
taatgcatagtaaaaacactgtaatgaaactactgcttaatctgctgtgattatctaaaacgaacaagcaactgtttcatccttattttgcagcatctgctcattggtacataaactgtgtg

SEQ ID NO: 5319 - DNA, 122 bp, Homo sapiens
  misc_feature (61)..(62): /note="This region represents a CpG dinucleotide"
  misc_feature (61)..(61): /note="Nucleotide may be methylated to form 5-methylcytosine"
attccacttctcagcctcacctgggggcattgtcagctaataatatgtgaaagtccctggcgcttagtaggtgctcaataaatgttaattgaatctgcaacgtcacttcgcttgctccttta

SEQ ID NO: 5320 - DNA, 122 bp, Homo sapiens
  misc_feature (61)..(62): /note="This region represents a CpG dinucleotide"
  misc_feature (61)..(61): /note="Nucleotide may be methylated to form 5-methylcytosine"
cattttctaactcaacattctatgagtgcaagaacacttattagcgccacctacctgaaacgttatcattttaacactggccagatttttaaaatattgccatgtaatatgtgggtaatagg

SEQ ID NO: 5321 - DNA, 122 bp, Homo sapiens
  misc_feature (61)..(62): /note="This region represents a CpG dinucleotide"
  misc_feature (61)..(61): /note="Nucleotide may be methylated to form 5-methylcytosine"
catcactgctaatgctcagggataaaccttaagagataaccatgactcctttctttctttcgcactccatacttcaagtatgtcagcaaatcctctcagctctatcttcaaaatatattcaa

SEQ ID NO: 5322 - DNA, 122 bp, Homo sapiens
  misc_feature (61)..(62): /note="This region represents a CpG dinucleotide"
  misc_feature (61)..(61): /note="Nucleotide may be methylated to form 5-methylcytosine"
ttgtttaaccataaagtggttactgactccccttctgactaagagtatacagcaaagtgacgggttgtctctcctgtctgagtcagttagggctgctataagaaagtgccacagacagggtg

SEQ ID NO: 5323 - DNA, 122 bp, Homo sapiens
  misc_feature (61)..(62): /note="This region represents a CpG dinucleotide"
  misc_feature (61)..(61): /note="Nucleotide may be methylated to form 5-methylcytosine"
gcagcttggtaaattgttctcaggtggctcctttgtgcctcttctgtggccacaggaagccgtgactgggctttcctgctattccaggaagaggagaagacaggtgcagcgaactgagcacc

SEQ ID NO: 5324 - DNA, 122 bp, Homo sapiens
  misc_feature (61)..(62): /note="This region represents a CpG dinucleotide"
  misc_feature (61)..(61): /note="Nucleotide may be methylated to form 5-methylcytosine"
aacctcacatcatctgtttcccattaatctgtcacagctcccaggagacagatcccaaggcgtgcatgtgtctagaaggcccttaggtctcggctgagggagatttcttaggcaggtcagcc

SEQ ID NO: 5325 - DNA, 122 bp, Homo sapiens
  misc_feature (61)..(62): /note="This region represents a CpG dinucleotide"
  misc_feature (61)..(61): /note="Nucleotide may be methylated to form 5-methylcytosine"
tgcaaagccccccaggctttatttagcttagaagcagcaaagccatcaagttccctcaggcgtttattatttcgcaggcattttcaaacacatgatttttttctggccttttacgtccttga

SEQ ID NO: 5326 - DNA, 122 bp, Homo sapiens
  misc_feature (61)..(62): /note="This region represents a CpG dinucleotide"
  misc_feature (61)..(61): /note="Nucleotide may be methylated to form 5-methylcytosine"
aagtctcagggacccatccccgggcaatggtggcggtcactgtgaccaaagcggcggctccggcctcgcgcatgcgcactggcgaggccgactcacccgcccccacccccccttactcggca

SEQ ID NO: 5327 - DNA, 122 bp, Homo sapiens
  misc_feature (61)..(62): /note="This region represents a CpG dinucleotide"
  misc_feature (61)..(61): /note="Nucleotide may be methylated to form 5-methylcytosine"
gcaacagggcgagactccatctcgaaaacaaaacaaaacaaaacaaatgacttgaggagacggcttcagaaaatactgttgtgtttggtgactgagtggttattcatgttcttggacaatgc

SEQ ID NO: 5328 - DNA, 122 bp, Homo sapiens
  misc_feature (61)..(62): /note="This region represents a CpG dinucleotide"
  misc_feature (61)..(61): /note="Nucleotide may be methylated to form 5-methylcytosine"
cgtgaggggcatacgggccgcaggactggggctgaggctcgatcaccctcccccgcccctcgagatgccgcccagcccccagtcccgcggtgtccccggcgcctcctaccgtcagcagggtg

SEQ ID NO: 5329 - DNA, 122 bp, Homo sapiens
  misc_feature (61)..(62): /note="This region represents a CpG dinucleotide"
  misc_feature (61)..(61): /note="Nucleotide may be methylated to form 5-methylcytosine"
gacctctccaaggcagacctaatgtggtgacaaaacctatcacacttgcttactgtggcacgatgcttttgcgttgtgacacagcatagctacagtgcttacagcacaatgctgtgagccca

SEQ ID NO: 5330 - DNA, 122 bp, Homo sapiens
  misc_feature (61)..(62): /note="This region represents a CpG dinucleotide"
  misc_feature (61)..(61): /note="Nucleotide may be methylated to form 5-methylcytosine"
gaaataaagtgttgggaaggatgactgggagagaattactatagggttttcctgtgcctccggctgggaaagccccttaggcttagctttctgtgccatcacaacctttttcttcctccagt

SEQ ID NO: 5331 - DNA, 122 bp, Homo sapiens
  misc_feature (61)..(62): /note="This region represents a CpG dinucleotide"
  misc_feature (61)..(61): /note="Nucleotide may be methylated to form 5-methylcytosine"
aacctgccttagtttatccatgaacaaagccacgcatgctagtggacacacacacacatgcgcgtgcgcgcgcacacacacacacacacacatacacacagagactttgtatgtgagtaatg

SEQ ID NO: 5332 - DNA, 122 bp, Homo sapiens
  misc_feature (61)..(62): /note="This region represents a CpG dinucleotide"
  misc_feature (61)..(61): /note="Nucleotide may be methylated to form 5-methylcytosine"
tacaagtagcatcttccaatcactgcttgaacacatttattgctacagaatgcatttcctcgtggggtaccacagtttcattgccagaacaggcagaaatgccctccttattgactcccatt

SEQ ID NO: 5333 - DNA, 122 bp, Homo sapiens
  misc_feature (61)..(62): /note="This region represents a CpG dinucleotide"
  misc_feature (61)..(61): /note="Nucleotide may be methylated to form 5-methylcytosine"
ctctgatgtctgtattagatcctacatggcagtaggctccatggtgccaaaagacctgagcgtctttctccttaaaggtgactgcagctgtgcctccaggaacacaaacatgctcaggagaa

SEQ ID NO: 5334 - DNA, 122 bp, Homo sapiens
  misc_feature (61)..(62): /note="This region represents a CpG dinucleotide"
  misc_feature (61)..(61): /note="Nucleotide may be methylated to form 5-methylcytosine"
ctaaagtttctttgtttgttctgctttgtagcttcctttgacttttgtttctaaggcttgcggggggctgccatttggtttctcttcaagaattaacaaaccacttactcttgaattctctt

SEQ ID NO: 5335 - DNA, 122 bp, Homo sapiens
  misc_feature (61)..(62): /note="This region represents a CpG dinucleotide"
  misc_feature (61)..(61): /note="Nucleotide may be methylated to form 5-methylcytosine"
tctaacctctgttttttctacttaactgagggcagagattgtgtctgacttgttccctgccgtcctcctagtacctacctcagtgcttggagaatgcatgaatgtatgcgtgccccagtcct

SEQ ID NO: 5336 - DNA, 122 bp, Homo sapiens
  misc_feature (61)..(62): /note="This region represents a CpG dinucleotide"
  misc_feature (61)..(61): /note="Nucleotide may be methylated to form 5-methylcytosine"
tgtgcaagtgttgataaaggctggaaagtggacagatgaaaagatattattatacatctacgtgaatgagatctgcatgttgtgtgtgaagtaacatgttagtagaattagccaaaagttct

SEQ ID NO: 5337 - DNA, 122 bp, Homo sapiens
  misc_feature (61)..(62): /note="This region represents a CpG dinucleotide"
  misc_feature (61)..(61): /note="Nucleotide may be methylated to form 5-methylcytosine"
cctaattgattaccaccccatgatgaatgacactgggagccagagtgtgctaagcaccttcgtagagtggtacccaatgagctggagagattttcccttcctcgagacaatggttactcctg

SEQ ID NO: 5338 - DNA, 122 bp, Homo sapiens
  misc_feature (61)..(62): /note="This region represents a CpG dinucleotide"
  misc_feature (61)..(61): /note="Nucleotide may be methylated to form 5-methylcytosine"
catattcatgcccttctgtgggggctttcccttcaatctgagtgggccctgtgactctttcgtaatcaacagaatgaggcagaagtggtaccgtgtggcctttgcaaggctaaatcaggcct

SEQ ID NO: 5339 - DNA, 122 bp, Homo sapiens
  misc_feature (61)..(62): /note="This region represents a CpG dinucleotide"
  misc_feature (61)..(61): /note="Nucleotide may be methylated to form 5-methylcytosine"
cacttgttaagaactgtgctggtattgcaagcttagtttataagattggttttcatcgggcgcggtggctcaggcctgtaatcccagcactttgggaggccaaggcaggtggatcacctgag

SEQ ID NO: 5340 - DNA, 122 bp, Homo sapiens
  misc_feature (61)..(62): /note="This region represents a CpG dinucleotide"
  misc_feature (61)..(61): /note="Nucleotide may be methylated to form 5-methylcytosine"
aaacttgccaagcctgcttgctgagcgaacaagcgagggggcaagaaggcggagggtttgcgctgaccattcgaagggggctctgcttcatctcccaaggctgtgggaaagggacagaaagt

SEQ ID NO: 5341 - DNA, 122 bp, Homo sapiens
  misc_feature (61)..(62): /note="This region represents a CpG dinucleotide"
  misc_feature (61)..(61): /note="Nucleotide may be methylated to form 5-methylcytosine"
catttagcccatctggttaagttaaccatggaataaacaaacaaacaaaatctctgtccacgccacagactgcagcttgtctgtgggcagctctgtcactaaggattgccagtggttagaag

SEQ ID NO: 5342 - DNA, 122 bp, Homo sapiens
  misc_feature (61)..(62): /note="This region represents a CpG dinucleotide"
  misc_feature (61)..(61): /note="Nucleotide may be methylated to form 5-methylcytosine"
aacaatgtgaggtagaaatatggctaggctgtgaaagatctctatctttccataatcttacgtttcagacctttgataaaattagtatccccaaaacatccttccagttcatttccaaccat

SEQ ID NO: 5343 - DNA, 122 bp, Homo sapiens
  misc_feature (61)..(62): /note="This region represents a CpG dinucleotide"
  misc_feature (61)..(61): /note="Nucleotide may be methylated to form 5-methylcytosine"
taaacatttctgaaacattcctcttccatttattctgtgattttcttcagaaacacaaggcgtgcacgagtcagcttatcagcttatccttcacccacacgtaggctcttctttccaatcaa

SEQ ID NO: 5344 - DNA, 122 bp, Homo sapiens
  misc_feature (61)..(62): /note="This region represents a CpG dinucleotide"
  misc_feature (61)..(61): /note="Nucleotide may be methylated to form 5-methylcytosine"
ggagagtgtacagttcccagcgaacattgccagtggaggctaattttcaccagtgaagggcgattttgatagaaaagcacagtgtctcaactacttgtggtttttgattctgaaagaggagg

SEQ ID NO: 5345 - DNA, 122 bp, Homo sapiens
  misc_feature (61)..(62): /note="This region represents a CpG dinucleotide"
  misc_feature (61)..(61): /note="Nucleotide may be methylated to form 5-methylcytosine"
cgataatcacactcaacaggggccggcagaactgtgctgaccgttctgggtgactcgtcacgagatgcacccagcccagcctcttgcaggcggtagaaagtcaataaatattcacgagaggg

SEQ ID NO: 5346 - DNA, 122 bp, Homo sapiens
  misc_feature (61)..(62): /note="This region represents a CpG dinucleotide"
  misc_feature (61)..(61): /note="Nucleotide may be methylated to form 5-methylcytosine"
attctcatttatgtacacaccacttatatcaggttcttctggagaatatattctgtttgacggaagaggaaggaagagaggataaattatgtttattggagaactacctaacccagactttg

SEQ ID NO: 5347 - DNA, 122 bp, Homo sapiens
  misc_feature (61)..(62): /note="This region represents a CpG dinucleotide"
  misc_feature (61)..(61): /note="Nucleotide may be methylated to form 5-methylcytosine"
atgaaggtctgctttgccagtacgcagcaggtcccagtctctacgccgtcccgaacacctcgtagaaatacggggcatgcacaacgttgtacctgctccaatctaagcagcaatccagccct

SEQ ID NO: 5348 - DNA, 122 bp, Homo sapiens
  misc_feature (61)..(62): /note="This region represents a CpG dinucleotide"
  misc_feature (61)..(61): /note="Nucleotide may be methylated to form 5-methylcytosine"
cctctcggcacctaatgcaaaatctagcacacagactcccaagaaatgtttgcttaaagacggatagagggccacaggggcaggttttattagcagttgctgaagatgttggaatgcaaggt

SEQ ID NO: 5349 - DNA, 122 bp, Homo sapiens
  misc_feature (61)..(62): /note="This region represents a CpG dinucleotide"
  misc_feature (61)..(61): /note="Nucleotide may be methylated to form 5-methylcytosine"
ggagtcatctcatggtccactttttcttgaagccaggtaacatttccaatgggttggcctcgttggagtttttccagcttgaaaaacctaagcattttcttctctgactttttttttaataa

SEQ ID NO: 5350 - DNA, 122 bp, Homo sapiens
  misc_feature (61)..(62): /note="This region represents a CpG dinucleotide"
  misc_feature (61)..(61): /note="Nucleotide may be methylated to form 5-methylcytosine"
aactacctagagcgctgccgctactgcaacgtcctctgcggggagcgtgaggaggaggcacgggcttgccacgccacccacaaccgtgcctgccgctgccgcaccggcttcttcgcgcacgc

SEQ ID NO: 5351 - DNA, 122 bp, Homo sapiens
  misc_feature (61)..(62): /note="This region represents a CpG dinucleotide"
  misc_feature (61)..(61): /note="Nucleotide may be methylated to form 5-methylcytosine"
gaaagcctacatcaggccagatgttccctaaacactggaaagtgggtttggggtaagtttcggacacataatccttccattagagagattaaaaggatgctttagagataagccgacttcac

SEQ ID NO: 5352 - DNA, 122 bp, Homo sapiens
  misc_feature (61)..(62): /note="This region represents a CpG dinucleotide"
  misc_feature (61)..(61): /note="Nucleotide may be methylated to form 5-methylcytosine"
gaaggccctgaggcaggacggtgcctgttgtgttggtcctgaaggcactacgaggaagcccgcatggctggagcagagtgagaggaggagggggggagggcaggccacgcatggccctgtga

SEQ ID NO: 5353 - DNA, 122 bp, Homo sapiens
  misc_feature (61)..(62): /note="This region represents a CpG dinucleotide"
  misc_feature (61)..(61): /note="Nucleotide may be methylated to form 5-methylcytosine"
agagcaagactatgataatgccaacgtcagcaacaccagaggataaacctctggtttaggcgccttcctccttatgcctggcccttctccaacagctctctctctactaggtctcagccatc

SEQ ID NO: 5354 - DNA, 122 bp, Homo sapiens
  misc_feature (61)..(62): /note="This region represents a CpG dinucleotide"
  misc_feature (61)..(61): /note="Nucleotide may be methylated to form 5-methylcytosine"
agttgtccagaagcacagccgctcttaatgcagagactgcctgggccctcctctagagggcgtggtggagcacagtcccagggactttctcactgcaagtgaacaatggcgacccctccccg

SEQ ID NO: 5355 - DNA, 122 bp, Homo sapiens
  misc_feature (61)..(62): /note="This region represents a CpG dinucleotide"
  misc_feature (61)..(61): /note="Nucleotide may be methylated to form 5-methylcytosine"
cgccatctctctctttccggcagctgcagggtgttaccggggcaacagacggctgtctgacgggatttggcagtttaactcttactccgcacaaaatacgaaagtgagaacgattgaacaga

SEQ ID NO: 5356 - DNA, 122 bp, Homo sapiens
  misc_feature (61)..(62): /note="This region represents a CpG dinucleotide"
  misc_feature (61)..(61): /note="Nucleotide may be methylated to form 5-methylcytosine"
ggcattccttttattgtccctgaaggtgattttcagatgctcgtgtttccacaggaaaaacgtgtcaacatggttcatattgaatccaggaaatctcggcgaagaagttctgaggttgaaat

SEQ ID NO: 5357 - DNA, 122 bp, Homo sapiens
  misc_feature (61)..(62): /note="This region represents a CpG dinucleotide"
  misc_feature (61)..(61): /note="Nucleotide may be methylated to form 5-methylcytosine"
agacaaagaactgtctttggttgagagggtgtttctgtccacttgctgtgccatgcaggacgtgagacgggatagggagatttcatgtgtgtcataggctgatgtggttctgccattgtaag

SEQ ID NO: 5358 - DNA, 122 bp, Homo sapiens
  misc_feature (61)..(62): /note="This region represents a CpG dinucleotide"
  misc_feature (61)..(61): /note="Nucleotide may be methylated to form 5-methylcytosine"
aagaagagggtggcttataaatgggctggctcagcatgtctcagcattgtttgtaacttacgcattcattcaacacccattgattgaggatatactatgttggtggtgccggaggatgtgaa

SEQ ID NO: 5359 - DNA, 122 bp, Homo sapiens
  misc_feature (61)..(62): /note="This region represents a CpG dinucleotide"
  misc_feature (61)..(61): /note="Nucleotide may be methylated to form 5-methylcytosine"
cctgtaggtgaagacacagactccacagggtggggcttctggctggctcctggataaatacgcagcacctggaatgccacctagcacacagcggtgcctcagtaaataatgctggaatgagt

SEQ ID NO: 5360 - DNA, 122 bp, Homo sapiens
  misc_feature (61)..(62): /note="This region represents a CpG dinucleotide"
  misc_feature (61)..(61): /note="Nucleotide may be methylated to form 5-methylcytosine"
gaagctcacccaatcattgtgttcagagtttgtagtggggcttcatcacacaggcataatcggttgattaaccacatggttaatctctatctccaagttgatggataccacgtgacccaaag

SEQ ID NO: 5361 - DNA, 122 bp, Homo sapiens
  misc_feature (61)..(62): /note="This region represents a CpG dinucleotide"
  misc_feature (61)..(61): /note="Nucleotide may be methylated to form 5-methylcytosine"
atctaattaaacaactaataaaaatagttgtttaatccacgttgacatcttcttacattgcgatagaaattttgatatatttatccatatgatgaattgcttaaagccggtggttctcaacc

SEQ ID NO: 5362 - DNA, 122 bp, Homo sapiens
  misc_feature (61)..(62): /note="This region represents a CpG dinucleotide"
  misc_feature (61)..(61): /note="Nucleotide may be methylated to form 5-methylcytosine"
gtccacgttcccggcagccaagggcaccagtggaatttgcttcctctaaatcctgctttccgcaatttttttttcctttgttagtttcctcagccggagggagggattgggggagagagagc

SEQ ID NO: 5363 - DNA, 122 bp, Homo sapiens
  misc_feature (61)..(62): /note="This region represents a CpG dinucleotide"
  misc_feature (61)..(61): /note="Nucleotide may be methylated to form 5-methylcytosine"
agagtccaagatttcacatcatacacccccattgacccattgtagtttgcacttccctggcgaccaggaaattttcattatatctggctgaagtccctctgattgctatgcaaacctatttc

SEQ ID NO: 5364 - DNA, 122 bp, Homo sapiens
  misc_feature (61)..(62): /note="This region represents a CpG dinucleotide"
  misc_feature (61)..(61): /note="Nucleotide may be methylated to form 5-methylcytosine"
ttgcccggttttcggccccgtgccccttattggataaagcttcaggccccgtccccagtccgtgagtgacagaagatgtgaccaaacactggactcaatgaggacggagtgacaacctaggc

SEQ ID NO: 5365 - DNA, 122 bp, Homo sapiens
  misc_feature (61)..(62): /note="This region represents a CpG dinucleotide"
  misc_feature (61)..(61): /note="Nucleotide may be methylated to form 5-methylcytosine"
gagtagataaatgcatacgtgtctttaaaaagtctaattagtgggaaattgcaggccaggcgcacacagggttgaggcaaatatgtgtgattatacatgcagcttaactaaataacccataa

SEQ ID NO: 5366 - DNA, 122 bp, Homo sapiens
  misc_feature (61)..(62): /note="This region represents a CpG dinucleotide"
  misc_feature (61)..(61): /note="Nucleotide may be methylated to form 5-methylcytosine"
tgaaaccttccaacaataataaagaaacttcaaaatacctctgtctacactgtggagtgacgtgaggataggtgggagagaaacaggactgaaaaggggaaggatcaaggacttctctgtgt

SEQ ID NO: 5367 - DNA, 122 bp, Homo sapiens
  misc_feature (61)..(62): /note="This region represents a CpG dinucleotide"
  misc_feature (61)..(61): /note="Nucleotide may be methylated to form 5-methylcytosine"
gctaaatgtacgcttaccttgtgaccccagaaatttcacttcaagaggaatgagtgcatacgtccaccaaaggcatgtgcaagaatgtccatagcacgtttattcgtagtagtaaaaaactg

SEQ ID NO: 5368 - DNA, 122 bp, Homo sapiens
  misc_feature (61)..(62): /note="This region represents a CpG dinucleotide"
  misc_feature (61)..(61): /note="Nucleotide may be methylated to form 5-methylcytosine"
tttgatggtcttgcatttgttctcatcagctagctgccaagagctgagccacacggctaacgccaaagtccaaagcctggtgtgtgttcttggtatcagaccctcagggtgcagctgagtgt

SEQ ID NO: 5369 - DNA, 122 bp, Homo sapiens
  misc_feature (61)..(62): /note="This region represents a CpG dinucleotide"
  misc_feature (61)..(61): /note="Nucleotide may be methylated to form 5-methylcytosine"
caaccagagccccagcagccagatgcattgggagggcaaccagctcccttgtctcccaaacgtaatcattccaatccaagctggggctgcctggaagtcaacactcaaggcacatttaataa

SEQ ID NO: 5370 - DNA, 122 bp, Homo sapiens
  misc_feature (61)..(62): /note="This region represents a CpG dinucleotide"
  misc_feature (61)..(61): /note="Nucleotide may be methylated to form 5-methylcytosine"
actgtaggccaagccctgcctgccaggtctacatataaccacagttacatgttgtgtgatcgtatagttaaagccaactgtctaaacacattatcaggatttcgcaaccagtggtaagaata

SEQ ID NO: 5371 - DNA, 122 bp, Homo sapiens
  misc_feature (61)..(62): /note="This region represents a CpG dinucleotide"
  misc_feature (61)..(61): /note="Nucleotide may be methylated to form 5-methylcytosine"
ccccccattgcctccaggaacatgctaagctctgcctggctcaaagccaagtttggatggcgtccacgaggccactgagcaagcggctttgaaagatcatgctgtcgcactggcagtcagga

SEQ ID NO: 5372 - DNA, 122 bp, Homo sapiens
  misc_feature (61)..(62): /note="This region represents a CpG dinucleotide"
  misc_feature (61)..(61): /note="Nucleotide may be methylated to form 5-methylcytosine"
cctgactccctgcttcaattacttgggaaagtaaatcacctcagtgttgtttcttggctccgagggtcttgttttatcagcagccgggatgcaacagatgggtcatctcatcctcatgggaa

SEQ ID NO: 5373 - DNA, 122 bp, Homo sapiens
  misc_feature (61)..(62): /note="This region represents a CpG dinucleotide"
  misc_feature (61)..(61): /note="Nucleotide may be methylated to form 5-methylcytosine"
ctgtcccaccagagctttgggctgctgggaagaatggggaagaaagggccccagagggagcgaccttggggctgtatgaatgggggaaagagagtgagacttaagcagaccccaaggaattg

SEQ ID NO: 5374 - DNA, 122 bp, Homo sapiens
  misc_feature (61)..(62): /note="This region represents a CpG dinucleotide"
  misc_feature (61)..(61): /note="Nucleotide may be methylated to form 5-methylcytosine"
cctctgcatagccacagtacacataattctagcttccaatagggataagagtgatgtggccgctcctatcaggaagctgtcagttcctggacgctcctgtgggggatcttggggaaggaagc

SEQ ID NO: 5375 - DNA, 122 bp, Homo sapiens
  misc_feature (61)..(62): /note="This region represents a CpG dinucleotide"
  misc_feature (61)..(61): /note="Nucleotide may be methylated to form 5-methylcytosine"
cagcattgcattaggtaccttggcaagagccaagcgaggtaaacagttccattacacatacgccacatgaggagtgagagatgtcagagctgggccagtatggaggcagctgaggtacactg

SEQ ID NO: 5376 - DNA, 122 bp, Homo sapiens
  misc_feature (61)..(62): /note="This region represents a CpG dinucleotide"
  misc_feature (61)..(61): /note="Nucleotide may be methylated to form 5-methylcytosine"
cttccaagcctctgcttttcttccccatccactcatctgacattgctattcatcctatttcgtatttcttttatagcactgactaattcaactataatggtttctctgagtgtttcctaaac

SEQ ID NO: 5377 - DNA, 122 bp, Homo sapiens
  misc_feature (61)..(62): /note="This region represents a CpG dinucleotide"
  misc_feature (61)..(61): /note="Nucleotide may be methylated to form 5-methylcytosine"
ggaggtcgaggctgcagcgagctgtgatcgtgccactgccgtccaccctgggtaacagagcgagaccctgggaaaggaaggtaggaaggcaggaagggagggaagaaggaaaaagaaagaaa

SEQ ID NO: 5378 - DNA, 122 bp, Homo sapiens
  misc_feature (61)..(62): /note="This region represents a CpG dinucleotide"
  misc_feature (61)..(61): /note="Nucleotide may be methylated to form 5-methylcytosine"
ccccgacgggctgatggatgacggccggggtggctgcgtggtggagaaggaatgcccttgcgtccataacaacgacctgtattcttccggcgccaagatcaaggtggactgcaatacctggt

SEQ ID NO: 5379 - DNA, 122 bp, Homo sapiens
  misc_feature (61)..(62): /note="This region represents a CpG dinucleotide"
  misc_feature (61)..(61): /note="Nucleotide may be methylated to form 5-methylcytosine"
atgcacaggcttgatgtcattctccctgatttcagctacaggaaaaaggagcattcactacggtccatctctggctgagtccttgcagctatcaaaagtctaggcctcccttgcagtcctga

SEQ ID NO: 5380 - DNA, 122 bp, Homo sapiens
  misc_feature (61)..(62): /note="This region represents a CpG dinucleotide"
  misc_feature (61)..(61): /note="Nucleotide may be methylated to form 5-methylcytosine"
cttgttattgacttttgccaccttctcattcgtgtgtgggtccctggaattcccctgtaccgagctgctcttgtttgtcttttaagtcagcattttccccagtcctgcctggatgcatatgg

SEQ ID NO: 5381 - DNA, 122 bp, Homo sapiens
  misc_feature (61)..(62): /note="This region represents a CpG dinucleotide"
  misc_feature (61)..(61): /note="Nucleotide may be methylated to form 5-methylcytosine"
gggtggaagagggatttttcccttctgccatccatactgtgaatttccttggcagaaatacgtatttcttctctggcagtaaaatcaatgaattactaaaagttcactaatgtactctttgg

SEQ ID NO: 5382 - DNA, 122 bp, Homo sapiens
  misc_feature (61)..(62): /note="This region represents a CpG dinucleotide"
  misc_feature (61)..(61): /note="Nucleotide may be methylated to form 5-methylcytosine"
atagtgatcaaacaaacatgaacttagacctgctttattattaggtaacttctttgagctcgttggacctcagtttctgtctgtaataggattaacaatgccttttttgtgtgtgggactat

SEQ ID NO: 5383 - DNA, 122 bp, Homo sapiens
  misc_feature (61)..(62): /note="This region represents a CpG dinucleotide"
  misc_feature (61)..(61): /note="Nucleotide may be methylated to form 5-methylcytosine"
acgtcggagtgggcgctgggagttcatggaatcgtggagtaatcaaaggaactcagaaaccgccccacgaaccctagattttaccgggtttctacagaaactgaagccaaggggtccagcac

SEQ ID NO: 5384 - DNA, 122 bp, Homo sapiens
  misc_feature (61)..(62): /note="This region represents a CpG dinucleotide"
  misc_feature (61)..(61): /note="Nucleotide may be methylated to form 5-methylcytosine"
ctcatctctcttccctgtggccacgaccctatgtcagcttccttcattcatttactcattcggcaactttttattaagcccttaccatgtgccaggcactgtgctagccactgaagatttgg

SEQ ID NO: 5385 - DNA, 122 bp, Homo sapiens
  misc_feature (61)..(62): /note="This region represents a CpG dinucleotide"
  misc_feature (61)..(61): /note="Nucleotide may be methylated to form 5-methylcytosine"
aagcttataaaaatgtggtgggtatttcagctgggactcaaatggacccccaggattctgcgaggtgaacatatttcatgcctaaaggctgaatactgccctgccagtggtgggggtagtga

SEQ ID NO: 5386 - DNA, 122 bp, Homo sapiens
  misc_feature (61)..(62): /note="This region represents a CpG dinucleotide"
  misc_feature (61)..(61): /note="Nucleotide may be methylated to form 5-methylcytosine"
tggttgtaacccttggagttgaacctgtcttccagaatccctacaaattgcctcatgtgacgcaactggatctgtaacttgatcttctacctaatgcggagaagcctgacaatcttggatca

SEQ ID NO: 5387 - DNA, 122 bp, Homo sapiens
  misc_feature (61)..(62): /note="This region represents a CpG dinucleotide"
  misc_feature (61)..(61): /note="Nucleotide may be methylated to form 5-methylcytosine"
ccttgcttggcagaggaggcagcgcgggcaggccagccaaatgcttgggcgacagggaagcgtggagtctgcgggcttgcggcggatttatcagcgcagccatgccacctccctgctcacaa

SEQ ID NO: 5388 - DNA, 122 bp, Homo sapiens
  misc_feature (61)..(62): /note="This region represents a CpG dinucleotide"
  misc_feature (61)..(61): /note="Nucleotide may be methylated to form 5-methylcytosine"
attatttctccatttacatattaggaccttgtatttcagaagagataagagactttcccacggttacgtacgtagtaattggtagaactggctgttaaaagatatgtctattcaaatcaaaa

SEQ ID NO: 5389 - DNA, 122 bp, Homo sapiens
  misc_feature (61)..(62): /note="This region represents a CpG dinucleotide"
  misc_feature (61)..(61): /note="Nucleotide may be methylated to form 5-methylcytosine"
ctgagctgactaatacactcagtttcctcatttgaaaagcagggataaaactagtacttgcggcatgacgttattgtgagaatccaatgaggaaacacacgtaatgccttcctgcttcattt

SEQ ID NO: 5390 - DNA, 122 bp, Homo sapiens
  misc_feature (61)..(62): /note="This region represents a CpG dinucleotide"
  misc_feature (61)..(61): /note="Nucleotide may be methylated to form 5-methylcytosine"
cttggctcggagccactattgtctgtaaaaggtataactaccctgctgatgctgtacatacggatggcttgcttgctcccagagagagaacaaagccatgttgaaacttcttacaattcctc

SEQ ID NO: 5391 - DNA, 122 bp, Homo sapiens
  misc_feature (61)..(62): /note="This region represents a CpG dinucleotide"
  misc_feature (61)..(61): /note="Nucleotide may be methylated to form 5-methylcytosine"
gacatgagggggcatggcagaggttgtgtgtaggactgccagagctgggcagaaaaaccccgctgccaaaggcctcctagcgggcagctgtactctgtggtaccaatgggcatccagccctg

SEQ ID NO: 5392 - DNA, 122 bp, Homo sapiens
  misc_feature (61)..(62): /note="This region represents a CpG dinucleotide"
  misc_feature (61)..(61): /note="Nucleotide may be methylated to form 5-methylcytosine"
ttacagcaagtaaacatttaaaataatgttactcagatccttaccccagctcattgtcttcgttgtttaaggtattcaaatattgtcacaattcataatagtttttagtaccttacttggta

SEQ ID NO: 5393 - DNA, 122 bp, Homo sapiens
  misc_feature (61)..(62): /note="This region represents a CpG dinucleotide"
  misc_feature (61)..(61): /note="Nucleotide may be methylated to form 5-methylcytosine"
ttggagggggcctgagggctgcggggcgggaccgagcagggcggggcgcttaggtggcctcgggggaggcggggcttggaggctccgcccctcaggccccgcctcctccccggctagtcttt

SEQ ID NO: 5394 - DNA, 122 bp, Homo sapiens
  misc_feature (61)..(62): /note="This region represents a CpG dinucleotide"
  misc_feature (61)..(61): /note="Nucleotide may be methylated to form 5-methylcytosine"
gctttgcttaccacttgttcttccctttactgctgctgttgagtgatagcatgtatgacacgtactatttatgttcttagagataagaacgtaaaatgctgatgtgttctgtcttattctaa

SEQ ID NO: 5395 - DNA, 122 bp, Homo sapiens
  misc_feature (61)..(62): /note="This region represents a CpG dinucleotide"
  misc_feature (61)..(61): /note="Nucleotide may be methylated to form 5-methylcytosine"
caggtgccggcttctgtgtcctcagcgggtgcctcagtcctgccccggaggctgcagggacgcagactccccaaggtgcatggaccctgccccgggcagccgctggacttgagacttggggt

SEQ ID NO: 5396 - DNA, 122 bp, Homo sapiens
  misc_feature (61)..(62): /note="This region represents a CpG dinucleotide"
  misc_feature (61)..(61): /note="Nucleotide may be methylated to form 5-methylcytosine"
aaaccagcggggggttcggttaaaccagcggggggttcggtaacaagggacttttgtcagcgggtagtgaaattcatcagatttccaagctgctgctgttgatgctcctaaggaagcagaca

SEQ ID NO: 5397 - DNA, 122 bp, Homo sapiens
  misc_feature (61)..(62): /note="This region represents a CpG dinucleotide"
  misc_feature (61)..(61): /note="Nucleotide may be methylated to form 5-methylcytosine"
cctgctgacctcggtgctcctggatgagacacagtggcagaccccaggccagttcaaccccggccatttcctggacgcgaatgggcactttgtgaagcgggaggccttcctgcctttctctg

SEQ ID NO: 5398 - DNA, 122 bp, Homo sapiens
  misc_feature (61)..(62): /note="This region represents a CpG dinucleotide"
  misc_feature (61)..(61): /note="Nucleotide may be methylated to form 5-methylcytosine"
taaggtgagcaacaccgattcaggtagtttaagttccgagaggaaccagggcagcctcagcgggtagcttagatacttttcttagatactctctgggcagtggcctgaatgctgagtgggag

SEQ ID NO: 5399 - DNA, 122 bp, Homo sapiens
  misc_feature (61)..(62): /note="This region represents a CpG dinucleotide"
  misc_feature (61)..(61): /note="Nucleotide may be methylated to form 5-methylcytosine"
gatgcatggcctattacatttgagaaacaccatactctgtatcacctcttggagcctgaccgtatatatcagggctctgaaaagtcctgcagttaataaacttcttatctttaacccagaat

SEQ ID NO: 5400 - DNA, 122 bp, Homo sapiens
  misc_feature (61)..(62): /note="This region represents a CpG dinucleotide"
  misc_feature (61)..(61): /note="Nucleotide may be methylated to form 5-methylcytosine"
gacgaggctgtgtgcagacatcctgacgcaggagccagtagacaatgcccagctgcccagcgctggccccgcatcacactggcatcgtgcccaggcagccccagctctgaggctcctcccac

SEQ ID NO: 5401 - DNA, 122 bp, Homo sapiens
  misc_feature (61)..(62): /note="This region represents a CpG dinucleotide"
  misc_feature (61)..(61): /note="Nucleotide may be methylated to form 5-methylcytosine"
tgtgcagtctctgactcatcaaggctcccacactgacttccctgagaccctggaagctatcgagctggaccttgacctctcaagccgtggacgccaagtcccagggccaggtttttaaagga

SEQ ID NO: 5402 - DNA, 122 bp, Homo sapiens
  misc_feature (61)..(62): /note="This region represents a CpG dinucleotide"
  misc_feature (61)..(61): /note="Nucleotide may be methylated to form 5-methylcytosine"
ctacaatcattccaaaccctcttttcctatgacagcaggagcaaatgtagttttgatgtgcgtttggttgttggcttgtttgtttaataaaatccgtgtgtgtgtgtgtgtgtgtgtgtgtg

SEQ ID NO: 5403 - DNA, 122 bp, Homo sapiens
  misc_feature (61)..(62): /note="This region represents a CpG dinucleotide"
  misc_feature (61)..(61): /note="Nucleotide may be methylated to form 5-methylcytosine"
ccgaggctcctcaggcatctctctccatctccctgtggtcttgacacatgcactctccagcgtggcagcctcagggtgctggacctctgactgtcagctcaacaccatcacccgcagcccat

SEQ ID NO: 5404 - DNA, 122 bp, Homo sapiens
  misc_feature (61)..(62): /note="This region represents a CpG dinucleotide"
  misc_feature (61)..(61): /note="Nucleotide may be methylated to form 5-methylcytosine"
gacatgatccttatgtgggttaagctgaggcccctgccccagtgacacagaggcctcaaacggcacagtgcaccttctgtccgaagcagccggcgaggcggcccgcgaacctctgacgtgct

SEQ ID NO: 5405 - DNA, 122 bp, Homo sapiens
  misc_feature (61)..(62): /note="This region represents a CpG dinucleotide"
  misc_feature (61)..(61): /note="Nucleotide may be methylated to form 5-methylcytosine"
acatcagaaggaacagactctggacgcgcggccgttaagaactgtaacactcaccggacccgccccctttaagaactgtaacacaccgcgagggtctggggcttcattcttgaagtcagtga

SEQ ID NO: 5406 - DNA, 122 bp, Homo sapiens
  misc_feature (61)..(62): /note="This region represents a CpG dinucleotide"
  misc_feature (61)..(61): /note="Nucleotide may be methylated to form 5-methylcytosine"
ggcaccagcggtgctttgtctattccagttggctggatgataaaaagaggtgtccaaaaacggaaataaaaaggcaaaagggcaacttggatgtaattatctacaagtagaagatatattca

SEQ ID NO: 5407 - DNA, 122 bp, Homo sapiens
  misc_feature (61)..(62): /note="This region represents a CpG dinucleotide"
  misc_feature (61)..(61): /note="Nucleotide may be methylated to form 5-methylcytosine"
ttttacttcccgcccgccaagttcctgcgccacccaatcccctcgcggcccagactccctcggggcccgccccttcgcgcgtcattagcaattccgccatcttgaagtgactctgtcgggga

SEQ ID NO: 5408 - DNA, 122 bp, Homo sapiens
  misc_feature (61)..(62): /note="This region represents a CpG dinucleotide"
  misc_feature (61)..(61): /note="Nucleotide may be methylated to form 5-methylcytosine"
taattgttctccgttcgttgatatcaaagacagttgaaggaaatgaattttgaaacttcacggtgtgccaccctacagtactgccctgacccttacatccagcggtgagtttgaatgtgaca

SEQ ID NO: 5409 - DNA, 122 bp, Homo sapiens
  misc_feature (61)..(62): /note="This region represents a CpG dinucleotide"
  misc_feature (61)..(61): /note="Nucleotide may be methylated to form 5-methylcytosine"
ctcccacataaatcacaaaacaaagggagaaagaacaactacaagtctctaaacctttgccggcacaaagagaagtgaccaaagaaaaaaaggcactcagcacataacagctgtctgaattt

SEQ ID NO: 5410 - DNA, 122 bp, Homo sapiens
  misc_feature (61)..(62): /note="This region represents a CpG dinucleotide"
  misc_feature (61)..(61): /note="Nucleotide may be methylated to form 5-methylcytosine"
tttgtgaagttactgtgtgaactctgaaattcagtggctgtcaaaagaggtgaatgcttgcgagcaccttgcagacctgcccccgccaccaagctctgtgagtggaagactcaatcagagaa

SEQ ID NO: 5411 - DNA, 122 bp, Homo sapiens
  misc_feature (61)..(62): /note="This region represents a CpG dinucleotide"
  misc_feature (61)..(61): /note="Nucleotide may be methylated to form 5-methylcytosine"
agctcctcatacgcccctctgagataattaagtattattatccctattggcaggtggagacggtaagacagagtgtttaagtgacttagttgtaactgctgggattgtttgcgggagaaacc

SEQ ID NO: 5412 - DNA, 122 bp, Homo sapiens
  misc_feature (61)..(62): /note="This region represents a CpG dinucleotide"
  misc_feature (61)..(61): /note="Nucleotide may be methylated to form 5-methylcytosine"
atttcttggtaaatggctgcaagaggtgccaactcagcatgccttctgttcaaggaccttcggttttcctcattcacagggatatgctgcagacattgctcaagtgtttggtactccttact

SEQ ID NO: 5413 - DNA, 122 bp, Homo sapiens
  misc_feature (61)..(62): /note="This region represents a CpG dinucleotide"
  misc_feature (61)..(61): /note="Nucleotide may be methylated to form 5-methylcytosine"
aatgaaatccccggaagtgtgtctgccaacaatccttttattttggctttacctgctgttcgcctgatgcctgtaaacctttcccgagtgttgattttcggaagggtgctttgcagggtgga

SEQ ID NO: 5414 - DNA, 122 bp, Homo sapiens
  misc_feature (61)..(62): /note="This region represents a CpG dinucleotide"
  misc_feature (61)..(61): /note="Nucleotide may be methylated to form 5-methylcytosine"
agatgcttcctgcaaaacccacacccacaagacaggaagggtctcctgaaggtggggtaacgtgttcagtgacaccgtgtcatgtgctaacagctgagcaccaactcagggccatgctggaa

SEQ ID NO: 5415 - DNA, 122 bp, Homo sapiens
  misc_feature (61)..(62): /note="This region represents a CpG dinucleotide"
  misc_feature (61)..(61): /note="Nucleotide may be methylated to form 5-methylcytosine"
ctgcttagaagttaccaactggctgttggttaggcctagcaaattatgtagacttcttttcggctaagaatcatagcaagtttattccctcagggtaggaaggtcatattttttctttaggc

SEQ ID NO: 5416 - DNA, 122 bp, Homo sapiens
  misc_feature (61)..(62): /note="This region represents a CpG dinucleotide"
  misc_feature (61)..(61): /note="Nucleotide may be methylated to form 5-methylcytosine"
ccataattactctttctatagagttgatcagcctgagaacatacctggggtcaaaccattcgtgctggctcaattttctacctcctttcataattccactgagggtggcgggggaacaaaag

SEQ ID NO: 5417 - DNA, 122 bp, Homo sapiens
  misc_feature (61)..(62): /note="This region represents a CpG dinucleotide"
  misc_feature (61)..(61): /note="Nucleotide may be methylated to form 5-methylcytosine"
acaccccaaaaccccgcacaaattaagggattacatatctgagtgacaagtacatacaaacgcattacttctagagatacttagatgtagataaaagaccacatttcaatagaaggatcaca

SEQ ID NO: 5418 - DNA, 122 bp, Homo sapiens
  misc_feature (61)..(62): /note="This region represents a CpG dinucleotide"
  misc_feature (61)..(61): /note="Nucleotide may be methylated to form 5-methylcytosine"
tcacttcatttcgttcaatttcgttcaatttcattccttttcatccagcgccgggaggcccgaggccacaaggaaggggagggggtctttccgggcgaatttccctcatcttgtagatttac

SEQ ID NO: 5419 - DNA, 122 bp, Homo sapiens
  misc_feature (61)..(62): /note="This region represents a CpG dinucleotide"
  misc_feature (61)..(61): /note="Nucleotide may be methylated to form 5-methylcytosine"
ttcaagcccacccaccaggtctgaaaaccctactttatctgattgcattattggccaagccgctcatctctcattgagaatcagtgctttacttaagaaaagctgcaaatcaaacaacaggg

SEQ ID NO: 5420 - DNA, 122 bp, Homo sapiens
  misc_feature (61)..(62): /note="This region represents a CpG dinucleotide"
  misc_feature (61)..(61): /note="Nucleotide may be methylated to form 5-methylcytosine"
ccatcgggcaggttctgatatctccattcacgcgatgagacggtctgtgtgacccaacggcgcccctacgtggccccaggctggatactgattggacccctgccttgtgccctggggacacc

SEQ ID NO: 5421 - DNA, 122 bp, Homo sapiens
  misc_feature (61)..(62): /note="This region represents a CpG dinucleotide"
  misc_feature (61)..(61): /note="Nucleotide may be methylated to form 5-methylcytosine"
ggcagaattatgcctcacacggaggtgagcccctgaccaagactccaaagtcccacctcccgtcacccagctggggtgcacccagctgggacatcggttgctttcagtgagagagtcaaatg

SEQ ID NO: 5422 - DNA, 122 bp, Homo sapiens
  misc_feature (61)..(62): /note="This region represents a CpG dinucleotide"
  misc_feature (61)..(61): /note="Nucleotide may be methylated to form 5-methylcytosine"
gaactttacagatttaacagattgttggacagaaaagaactcttgccttgaaattcctaacgcaggagtggcatataactggtatgtatgccaccataccctgccccggccacatgcccata

SEQ ID NO: 5423 - DNA, 122 bp, Homo sapiens
  misc_feature (61)..(62): /note="This region represents a CpG dinucleotide"
  misc_feature (61)..(61): /note="Nucleotide may be methylated to form 5-methylcytosine"
gtgcccagccccggcgcccctgcagaacgagccattggtggcggtcccgatgccgttgtacgccgcagcgccctcctcgctgctcagaaccagggcgtcctcgctcaagttcaccagaactt

SEQ ID NO: 5424 - DNA, 122 bp, Homo sapiens
  misc_feature (61)..(62): /note="This region represents a CpG dinucleotide"
  misc_feature (61)..(61): /note="Nucleotide may be methylated to form 5-methylcytosine"
tgagaaggaaggagcagggcagtgattgcttagtttatcctgggacgcgggagctgtccccgtggactgagtggcgcggagaggggatcactgagaccgggaagggtcatccagacaaataa

SEQ ID NO: 5425 - DNA, 122 bp, Homo sapiens
  misc_feature (61)..(62): /note="This region represents a CpG dinucleotide"
  misc_feature (61)..(61): /note="Nucleotide may be methylated to form 5-methylcytosine"
tttatgagaaggtagcacctgcgtcctccatcagcacccttttaacgggcaagcacatcacgcaaataacaaatgtcgcatgccttttatgtgtcaggcggcctgtaatgatcagatgatga

SEQ ID NO: 5426 - DNA, 122 bp, Homo sapiens
  misc_feature (61)..(62): /note="This region represents a CpG dinucleotide"
  misc_feature (61)..(61): /note="Nucleotide may be methylated to form 5-methylcytosine"
agatccctaatttcataagcagcttcagtgagcacatagaattaacagccatatttcttacgctgttttttccacaatacctaccttgtatccagggattaaattcatgtaattctgaagga

SEQ ID NO: 5427 - DNA, 122 bp, Homo sapiens
  misc_feature (61)..(62): /note="This region represents a CpG dinucleotide"
  misc_feature (61)..(61): /note="Nucleotide may be methylated to form 5-methylcytosine"
ggctttaaaattgaacttatattaatacattttaaatttaatttggaactagtttagaatcgttgaagctaggactctctgttgactcagaaattgtagaaatgagtggggatggcatttca

SEQ ID NO: 5428 - DNA, 122 bp, Homo sapiens
  misc_feature (61)..(62): /note="This region represents a CpG dinucleotide"
  misc_feature (61)..(61): /note="Nucleotide may be methylated to form 5-methylcytosine"
agccaccgggggagatctggggggaggggtctcctggcgcgtggggtccgaaggaggcagcggcacaccgggaagagggtctccctgggagtccaaatttccacctggagaggatgagtggg

SEQ ID NO: 5429 - DNA, 122 bp, Homo sapiens
  misc_feature (61)..(62): /note="This region represents a CpG dinucleotide"
  misc_feature (61)..(61): /note="Nucleotide may be methylated to form 5-methylcytosine"
cttctgttttctaaaccacaagtttctaaaagcaccaaggaattttctacctgtttatttcgttttgtttttgtttctgtttttttgtccaaggtgaggcccaagttgacactgagtattct

SEQ ID NO: 5430 - DNA, 122 bp, Homo sapiens
  misc_feature (61)..(62): /note="This region represents a CpG dinucleotide"
  misc_feature (61)..(61): /note="Nucleotide may be methylated to form 5-methylcytosine"
ataatgatgttactggcttaaaggaatatattgaaaccaaatcaaaagaaagacaggaaacgctgacatcaaaggtttacataaacattcctggaaagcaagagaggagtgcataaaagaga

SEQ ID NO: 5431 - DNA, 122 bp, Homo sapiens
  misc_feature (61)..(62): /note="This region represents a CpG dinucleotide"
  misc_feature (61)..(61): /note="Nucleotide may be methylated to form 5-methylcytosine"
atatcctgaatcagggagatcctcaggggaggcatgagtgagctggcatcagacttcctacgttctgaatcaagaagtattcctagaataaacaagttggtcatgtccaaagagatctgaat

SEQ ID NO: 5432 - DNA, 122 bp, Homo sapiens
  misc_feature (61)..(62): /note="This region represents a CpG dinucleotide"
  misc_feature (61)..(61): /note="Nucleotide may be methylated to form 5-methylcytosine"
ctgcactccagactgcatgagaacgtaaaaccctgacttaaaacaaaaacaaaaagaaaacgtgctcattggctaagcctggtagaagccacatgaccaaggctgatcattgctgccactgg

SEQ ID NO: 5433 - DNA, 122 bp, Homo sapiens
  misc_feature (61)..(62): /note="This region represents a CpG dinucleotide"
  misc_feature (61)..(61): /note="Nucleotide may be methylated to form 5-methylcytosine"
ccttctgttctttccctctgctctctttcccttcatagcatttgtctctacctggcattacgtatacacacacctgtgtggggagtatctgggcttatctgttgtttttctaatgtgaacta

SEQ ID NO: 5434 - DNA, 122 bp, Homo sapiens
  misc_feature (61)..(62): /note="This region represents a CpG dinucleotide"
  misc_feature (61)..(61): /note="Nucleotide may be methylated to form 5-methylcytosine"
tgagaactaaaacaatcattagagaccattacaccacactcccattttacagaagggaagcggaggcctgaatggatacagctagctgtgatgatttgcaaatcatgatgagtaaaaaaact

SEQ ID NO: 5435 - DNA, 122 bp, Homo sapiens
  misc_feature (61)..(62): /note="This region represents a CpG dinucleotide"
  misc_feature (61)..(61): /note="Nucleotide may be methylated to form 5-methylcytosine"
ggtgacttctcaggttctcggggtggcagctgcagtgatgacaccgcttcctggtggtcacgccgcgggcaggacgcgggaggccaggtccgtgcatcccgcgtgtcctgagcttcggccca

SEQ ID NO: 5436 - DNA, 122 bp, Homo sapiens
  misc_feature (61)..(62): /note="This region represents a CpG dinucleotide"
  misc_feature (61)..(61): /note="Nucleotide may be methylated to form 5-methylcytosine"
ggatttaaagtgtcagaaaactttttattgagcacctactgtatgaggcatcattctctccgtggggaagatcataatgaacaaggccaacaccctgtccttatggaactatgcattaagag

SEQ ID NO: 5437 - DNA, 122 bp, Homo sapiens
  misc_feature (61)..(62): /note="This region represents a CpG dinucleotide"
  misc_feature (61)..(61): /note="Nucleotide may be methylated to form 5-methylcytosine"
aacaggcagccctgggcatcctcccagggcatcttggatggctgtgctagccttgcctgacgtgtgtcctctatccctgacttcacatggccaatcagaggccaggagagaaccgcagctgc

SEQ ID NO: 5438 - DNA, 122 bp, Homo sapiens
  misc_feature (61)..(62): /note="This region represents a CpG dinucleotide"
  misc_feature (61)..(61): /note="Nucleotide may be methylated to form 5-methylcytosine"
gctcgggtaggctggggtggtacaggtttgacttctgccgaggttataataatgatctaacgatgactggtgttcatggggtgctttctggctcagaaaacgccttcatatacgtctctcat

SEQ ID NO: 5439 - DNA, 122 bp, Homo sapiens
  misc_feature (61)..(62): /note="This region represents a CpG dinucleotide"
  misc_feature (61)..(61): /note="Nucleotide may be methylated to form 5-methylcytosine"
tgacctgagggcgtcccttaggggctgcagtctcctcttggccatctggaagggtgtgctcggggttctagggggcagatggggcagggtccctgcagccctgtctctgagatgatggactg

SEQ ID NO: 5440 - DNA, 122 bp, Homo sapiens
  misc_feature (61)..(62): /note="This region represents a CpG dinucleotide"
  misc_feature (61)..(61): /note="Nucleotide may be methylated to form 5-methylcytosine"
aactatataaatctggcttcctgatgtaatctatttctagtaatgtatatttggccctgacgtgtaattcctgtcatgggccacatcaacctgtgaaagacaaaaaccagattcctgacaag

SEQ ID NO: 5441 - DNA, 122 bp, Homo sapiens
  misc_feature (61)..(62): /note="This region represents a CpG dinucleotide"
  misc_feature (61)..(61): /note="Nucleotide may be methylated to form 5-methylcytosine"
gatgacgtcaaacccccggcattcaaaccttcccaagttctggctgcagctgtccctttccggggaaacaaaggcacctccagcgcccccacccccagccagcctcaccgatcaaggaggcc

SEQ ID NO: 5442 - DNA, 122 bp, Homo sapiens
  misc_feature (61)..(62): /note="This region represents a CpG dinucleotide"
  misc_feature (61)..(61): /note="Nucleotide may be methylated to form 5-methylcytosine"
gttcttcgcagggcagacctggaggttgttcctctctaccacagttgccttgggggtacacgtaaaggtggtgtagtttttttcctggttagccttacttttacctaccttttgagaggaag

SEQ ID NO: 5443 - DNA, 122 bp, Homo sapiens
  misc_feature (61)..(62): /note="This region represents a CpG dinucleotide"
  misc_feature (61)..(61): /note="Nucleotide may be methylated to form 5-methylcytosine"
aagaaagcaaacctctggatccatctggaagcaggtagcaggtgttgcccaagtcagctgcggctaatagtaataataatggctgccgctcaatgagcacttaccacgtgcagacgttttta

SEQ ID NO: 5444 - DNA, 122 bp, Homo sapiens
  misc_feature (61)..(62): /note="This region represents a CpG dinucleotide"
  misc_feature (61)..(61): /note="Nucleotide may be methylated to form 5-methylcytosine"
acatgctaatgagtccccgtggctgtgcccatcttgtggcctggacctgggctggtggctcggtcatggggatgatggtgacaatgatggtttttcacctcactttctgtgggtctaatgtg

SEQ ID NO: 5445 - DNA, 122 bp, Homo sapiens
  misc_feature (61)..(62): /note="This region represents a CpG dinucleotide"
  misc_feature (61)..(61): /note="Nucleotide may be methylated to form 5-methylcytosine"
aacctggcttgcaataagtaatagtttttgtaactgtgtaatatacagcctctccaacagcgttttccggctaggcctccgaagactgtctgagacaatgtgcacatcctgtatgtgtgtga

SEQ ID NO: 5446 - DNA, 122 bp, Homo sapiens
  misc_feature (61)..(62): /note="This region represents a CpG dinucleotide"
  misc_feature (61)..(61): /note="Nucleotide may be methylated to form 5-methylcytosine"
agaagcctggaggacagggctggctttggggatagcagcagggcgagattctggacaattcgggggtttggtttggcttggcctacagggtcagtcatgccgcaggctctgggtgcttctgg

SEQ ID NO: 5447 - DNA, 122 bp, Homo sapiens
  misc_feature (61)..(62): /note="This region represents a CpG dinucleotide"
  misc_feature (61)..(61): /note="Nucleotide may be methylated to form 5-methylcytosine"
ttgtgccaggcttgcactgcctctgggaatccaaacacgggaaaacagacctctccactccgctgggggagcttaaagagcagtaaaagtgaggccaaaaaccaaacacacaagagcttaga

SEQ ID NO: 5448 - DNA, 122 bp, Homo sapiens
  misc_feature (61)..(62): /note="This region represents a CpG dinucleotide"
  misc_feature (61)..(61): /note="Nucleotide may be methylated to form 5-methylcytosine"
tggtgtatttgttggggataaactcaccacacaggaaacagctgggtacatgctcacaaacgtcagtaccttgctggtcccaaaggctcatctgaagttgcaagtttgaatccccctttcca

SEQ ID NO: 5449 - DNA, 122 bp, Homo sapiens
  misc_feature (61)..(62): /note="This region represents a CpG dinucleotide"
  misc_feature (61)..(61): /note="Nucleotide may be methylated to form 5-methylcytosine"
ggatttttaggaaccgtattagcaagttcctcagttcctcaccatgtgaacctctcttcacgacttagtaactggcttcctctagagtgactaatccaagagacagcaaggattgacagcca

SEQ ID NO: 5450 - DNA, 122 bp, Homo sapiens
  misc_feature (61)..(62): /note="This region represents a CpG dinucleotide"
  misc_feature (61)..(61): /note="Nucleotide may be methylated to form 5-methylcytosine"
ttaagtgcaggaactagatgacataatctgctatgcagtttccagctgttaagttctaaacgctaagccagagagagacaggtttagcatcagtaataacatatgagaatagtcccccaggc

SEQ ID NO: 5451 - DNA, 122 bp, Homo sapiens
  misc_feature (61)..(62): /note="This region represents a CpG dinucleotide"
  misc_feature (61)..(61): /note="Nucleotide may be methylated to form 5-methylcytosine"
ggtggaaaggctgttgccaattaattttattttcgtcacccattttcccttccatgtaatcgtcaaattgtttattgtacatattaaaaatgacacacaatcaagagggcatatgctatatt

SEQ ID NO: 5452 - DNA, 122 bp, Homo sapiens
  misc_feature (61)..(62): /note="This region represents a CpG dinucleotide"
  misc_feature (61)..(61): /note="Nucleotide may be methylated to form 5-methylcytosine"
ataaaggcctgccctcttacaggtagcagtctgaagttaagatgtaacacacatacctcacggtaccttgctgtctttgggttgatagatcataaggataaccctgcctcccccagattgct

SEQ ID NO: 5453 - DNA, 122 bp, Homo sapiens
  misc_feature (61)..(62): /note="This region represents a CpG dinucleotide"
  misc_feature (61)..(61): /note="Nucleotide may be methylated to form 5-methylcytosine"
gcttgtcatttcctatctggaaccacgaaccctagttccacccctgagtttcctaatgctcgacataagcctctgaagccaatctgcattgtgcattgcagatggtacagaatcctcttgta

SEQ ID NO: 5454 - DNA, 122 bp, Homo sapiens
  misc_feature (61)..(62): /note="This region represents a CpG dinucleotide"
  misc_feature (61)..(61): /note="Nucleotide may be methylated to form 5-methylcytosine"
acatgcagccaaaataacccttgaaatgtgattttcatcttacccagtgtcttagaacctcgttccctctgaaagatgtggctttaatgtggagctatttaattgggcggggaagaggggat

SEQ ID NO: 5455 - DNA, 122 bp, Homo sapiens
  misc_feature (61)..(62): /note="This region represents a CpG dinucleotide"
  misc_feature (61)..(61): /note="Nucleotide may be methylated to form 5-methylcytosine"
tatttgttaaacaaatgaatgaattttgaatgattatctcctctactcagagctaaaaatcgaactgagactcagaaagctttattgcttgcccaagtgaaagagctaaggtaaaccccaag

SEQ ID NO: 5456 - DNA, 122 bp, Homo sapiens
  misc_feature (61)..(62): /note="This region represents a CpG dinucleotide"
  misc_feature (61)..(61): /note="Nucleotide may be methylated to form 5-methylcytosine"
tttcctgcattcttaaaacaaggaatgtctatatctaaccttccacattcccaaggtcaacgtcaccaactatctccaggttaagtccagggatcggtctccgtccccatcagtgaggccct

SEQ ID NO: 5457 - DNA, 122 bp, Homo sapiens
  misc_feature (61)..(62): /note="This region represents a CpG dinucleotide"
  misc_feature (61)..(61): /note="Nucleotide may be methylated to form 5-methylcytosine"
gacttgccacatattgggcaatggagcctggcacgattacacctggagcggatggccttacgtggagcatgggccctacctggggcagtgaacatctctgaagacatttccttcgggtggtg

SEQ ID NO: 5458 - DNA, 122 bp, Homo sapiens
  misc_feature (61)..(62): /note="This region represents a CpG dinucleotide"
  misc_feature (61)..(61): /note="Nucleotide may be methylated to form 5-methylcytosine"
gaatcagcccctcaggtcactctgactctaccgcagcctggtgtcaaagccagcccttcacggaacagccaggagggcatcacagctgacctctggccaagctgagaaagagagcaagagag

SEQ ID NO: 5459 - DNA, 122 bp, Homo sapiens
  misc_feature (61)..(62): /note="This region represents a CpG dinucleotide"
  misc_feature (61)..(61): /note="Nucleotide may be methylated to form 5-methylcytosine"
aattgttttttttaaaacatagtaattttcttatatttttccaagcctcacatgtcagtccgttttaactctgtttactctacttcccaggtacacactctctccctctcttcctctccaca

SEQ ID NO: 5460 - DNA, 122 bp, Homo sapiens
  misc_feature (61)..(62): /note="This region represents a CpG dinucleotide"
  misc_feature (61)..(61): /note="Nucleotide may be methylated to form 5-methylcytosine"
ctcctgcccctctccccatcttcaaggtcatgtgagtgccccacttcctcagtgtagaggcgtttccagtgtccgggagacttggaggaggggtggggtctgagctgggatgtggactcctg

SEQ ID NO: 5461 - DNA, 122 bp, Homo sapiens
  misc_feature (61)..(62): /note="This region represents a CpG dinucleotide"
  misc_feature (61)..(61): /note="Nucleotide may be methylated to form 5-methylcytosine"
gagtataattttagccttggaactcactgaggatatttgggcacttgtgccttctgcttacgacagattgttgatcacagttatgatttatctccggctgcgtctttgggcaggaacgcaac

SEQ ID NO: 5462 - DNA, 122 bp, Homo sapiens
  misc_feature (61)..(62): /note="This region represents a CpG dinucleotide"
  misc_feature (61)..(61): /note="Nucleotide may be methylated to form 5-methylcytosine"
aaacccgccgcggaggaagaggaggaggaatccatcccagggcgaccaagcttgcagagacgaactccgcaccgaccttcacgtgtctccgcgacggaaccggaaccacagctagctgcctc

SEQ ID NO: 5463 - DNA, 122 bp, Homo sapiens
  misc_feature (61)..(62): /note="This region represents a CpG dinucleotide"
  misc_feature (61)..(61): /note="Nucleotide may be methylated to form 5-methylcytosine"
aacctactattgtgccactcattgaatttcagccagtcaagggcagtcaactgttcaaagcgtgtttaaataaggcaaatgccaactataaccaatccagccgtttctgtacctcacttcct

SEQ ID NO: 5464 - DNA, 122 bp, Homo sapiens
  misc_feature (61)..(62): /note="This region represents a CpG dinucleotide"
  misc_feature (61)..(61): /note="Nucleotide may be methylated to form 5-methylcytosine"
ccccaaagcaaccttcctgaatacataggtgccgggcatgaaactctacaaaagcaaccacgttcctgccactgtaaatgcatcttggtggccctagggtggcggtgaaccactgaaacaaa

SEQ ID NO: 5465 - DNA, 122 bp, Homo sapiens
  misc_feature (61)..(62): /note="This region represents a CpG dinucleotide"
  misc_feature (61)..(61): /note="Nucleotide may be methylated to form 5-methylcytosine"
gtaactctaccactaatcatttaatcttgagtttctgcttcttcttccagaatatgaaggcgttgactgtctcaagttctcttctgttctgaacagctattctacaaaagctcccattctag

SEQ ID NO: 5466 - DNA, 122 bp, Homo sapiens
  misc_feature (61)..(62): /note="This region represents a CpG dinucleotide"
  misc_feature (61)..(61): /note="Nucleotide may be methylated to form 5-methylcytosine"
ggtcttatgctcactagttcctaagcctgggtgttgtagtcagcataataacttgcttaacgttttattcttcaggacttctagccacagaagagtgagctatactagcaatcaaactttga

SEQ ID NO: 5467 - DNA, 122 bp, Homo sapiens
  misc_feature (61)..(62): /note="This region represents a CpG dinucleotide"
  misc_feature (61)..(61): /note="Nucleotide may be methylated to form 5-methylcytosine"
ttccaatacattagatgtacttgcatagttaatttttctttttaatgcacaacatgtgatcgttgacatgcagtgccagagtatatctcagtgtttgaagagacatttcttttcatctaaac

SEQ ID NO: 5468 - DNA, 122 bp, Homo sapiens
  misc_feature (61)..(62): /note="This region represents a CpG dinucleotide"
  misc_feature (61)..(61): /note="Nucleotide may be methylated to form 5-methylcytosine"
tcccttggactcggtttctggtaattgtgttttcaccaagttgtcaagctgtgaactgcacgtattgaagaagaggaacaaggagtgaagcttttgcaagttgctcatccttaagtagactt

SEQ ID NO: 5469 - DNA, 122 bp, Homo sapiens
  misc_feature (61)..(62): /note="This region represents a CpG dinucleotide"
  misc_feature (61)..(61): /note="Nucleotide may be methylated to form 5-methylcytosine"
ggaggggctgcgatctcttttaaagctagaccaattttacactggcaggggccgtgtgtgcggctctacattacagcgccctacaggatgcatctaaactagtttggtcagcttatccattc

SEQ ID NO: 5470 - DNA, 122 bp, Homo sapiens
  misc_feature (61)..(62): /note="This region represents a CpG dinucleotide"
  misc_feature (61)..(61): /note="Nucleotide may be methylated to form 5-methylcytosine"
tcccacagggccactgctcccagcaaagacttgcccttgtccgtagctccctgcgggtggcgctgtgtctcatgcattttgcattgtccatgcccttcacagggcccagatacaatcagcag

SEQ ID NO: 5471 - DNA, 122 bp, Homo sapiens
  misc_feature (61)..(62): /note="This region represents a CpG dinucleotide"
  misc_feature (61)..(61): /note="Nucleotide may be methylated to form 5-methylcytosine"
gcttaggaattttcttattaaggctgttatgcaacctgcattttagcaagggcatacaaacgcacggaaagaatattcccatacagaaatcttttttttaacttttgtttttgtttttgaga

SEQ ID NO: 5472 - DNA, 122 bp, Homo sapiens
  misc_feature (61)..(62): /note="This region represents a CpG dinucleotide"
  misc_feature (61)..(61): /note="Nucleotide may be methylated to form 5-methylcytosine"
aggaagcaaaagtgggcatggattctgaggtcaggcaggcctgcattcaaatcctgtctccgtccttaagtagctgtgtgaccttgggcgtgttggttaacctctctgcacctgtttcctcc

SEQ ID NO: 5473 - DNA, 122 bp, Homo sapiens
  misc_feature (61)..(62): /note="This region represents a CpG dinucleotide"
  misc_feature (61)..(61): /note="Nucleotide may be methylated to form 5-methylcytosine"
catttcatgagtaaataagaatgctatttttgagtagcccaagagttgtgctgttctcaccggggatgcttaactatgaccttggaaaagctcctcctcgccctggcaggggtcaaagtcgc

SEQ ID NO: 5474 - DNA, 122 bp, Homo sapiens
  misc_feature (61)..(62): /note="This region represents a CpG dinucleotide"
  misc_feature (61)..(61): /note="Nucleotide may be methylated to form 5-methylcytosine"
caagttacatcccatcgccaggcccagcaccatccacacagcagccccacacgtggggagcgtcgctgtggttatggccgacttgccgtgtaggctaagattgttccccttacacacacaga

SEQ ID NO: 5475 - DNA, 122 bp, Homo sapiens
  misc_feature (61)..(62): /note="This region represents a CpG dinucleotide"
  misc_feature (61)..(61): /note="Nucleotide may be methylated to form 5-methylcytosine"
ctggcacaggtaagcagcagagtgtttttttttgtttttttgttttttttttccagacagcgtctcattctgtcatgtagctggagtgaaatggcatgatcaaggctcactgcagccttgac

SEQ ID NO: 5476 - DNA, 122 bp, Homo sapiens
  misc_feature (61)..(62): /note="This region represents a CpG dinucleotide"
  misc_feature (61)..(61): /note="Nucleotide may be methylated to form 5-methylcytosine"
tggaacagcctactatacatacacctaggctacaaacctgtactgcatgttactgaataccgtaggcaattgtaacacaatggcatttgtgcatcttaacgtaggaaaggtacagtaaaaac

SEQ ID NO: 5477 - DNA, 122 bp, Homo sapiens
  misc_feature (61)..(62): /note="This region represents a CpG dinucleotide"
  misc_feature (61)..(61): /note="Nucleotide may be methylated to form 5-methylcytosine"
cgcgagcgctgcccccctactcagatggcactctagaactggaatgtcccacagagcagccgcaaaccacagatggctgttaagcacttaatatgtggctgctgtgaattgagccttgccac

SEQ ID NO: 5478 - DNA, 122 bp, Homo sapiens
  misc_feature (61)..(62): /note="This region represents a CpG dinucleotide"
  misc_feature (61)..(61): /note="Nucleotide may be methylated to form 5-methylcytosine"
ggggaagactccgccgccagcggggtgactgtgctcggcgccgccgccatcgcagcgaggcgcgcggacaattgcacttgcgtctcgattccgttaagctcctttagccccgccttccgtta

SEQ ID NO: 5479 - DNA, 122 bp, Homo sapiens
  misc_feature (61)..(62): /note="This region represents a CpG dinucleotide"
  misc_feature (61)..(61): /note="Nucleotide may be methylated to form 5-methylcytosine"
tcacattgccacgcctgcttgtttgttttatctgtggctgctttctcactgcaagggcagcgttgagtagttgcaacagagtggcccacaaagcctgcagtatttactatttggtcatttat

SEQ ID NO: 5480 - DNA, 122 bp, Homo sapiens
  misc_feature (61)..(62): /note="This region represents a CpG dinucleotide"
  misc_feature (61)..(61): /note="Nucleotide may be methylated to form 5-methylcytosine"
gagaaaagtgtcttctttcagcaatatggtaaacaccgccttcaaaggctttgttcatgccgcctcatctgtgaagcctgcccagaccccccaggtggagtttagtttctcagtgctcccag

SEQ ID NO: 5481 - DNA, 122 bp, Homo sapiens
  misc_feature (61)..(62): /note="This region represents a CpG dinucleotide"
  misc_feature (61)..(61): /note="Nucleotide may be methylated to form 5-methylcytosine"
ttcctcacccagagcacgctggggccaaattgacttaaagcttaaggctacccagtgagtcgatgctggcaccaggactgcagccctcagtgctcaatgcagggggagtgtggtggagggcg

SEQ ID NO: 5482 - DNA, 122 bp, Homo sapiens
  misc_feature (61)..(62): /note="This region represents a CpG dinucleotide"
  misc_feature (61)..(61): /note="Nucleotide may be methylated to form 5-methylcytosine"
aggataatggtgaagggcactcccaggacaacagctgttcaggaaacacggcaatcaacccgtccagatgggaacagaaggagggatggctccaggagcagatatctccaaggagaagatga

SEQ ID NO: 5483 - DNA, 122 bp, Homo sapiens
  misc_feature (61)..(62): /note="This region represents a CpG dinucleotide"
  misc_feature (61)..(61): /note="Nucleotide may be methylated to form 5-methylcytosine"
cgacagcccgccagcccgcccgcccgcccccctgtcctcctgcccccccgcctgtcctcccgcctgtctggctgccctgcctctggatcagcctggcacagagccctgggctttcggccagc

SEQ ID NO: 5484 - DNA, 122 bp, Homo sapiens
  misc_feature (61)..(62): /note="This region represents a CpG dinucleotide"
  misc_feature (61)..(61): /note="Nucleotide may be methylated to form 5-methylcytosine"
actatttttgatacttcacataagtggaatcatgcaatatttttctttttgtggctggttcgtttcacttaacacagtgtcctcagagttcatctgtgttgtagcatatgataggatttcct

SEQ ID NO: 5485 - DNA, 122 bp, Homo sapiens
  misc_feature (61)..(62): /note="This region represents a CpG dinucleotide"
  misc_feature (61)..(61): /note="Nucleotide may be methylated to form 5-methylcytosine"
tctggaagttctgccactttttacccctttggtcattaaattgtttgttttccttattttcgtttgtttgttttaaagcgtttttcctcccttagatggtttttccaaaaccaccctttggt

SEQ ID NO: 5486 - DNA, 122 bp, Homo sapiens
  misc_feature (61)..(62): /note="This region represents a CpG dinucleotide"
  misc_feature (61)..(61): /note="Nucleotide may be methylated to form 5-methylcytosine"
cccagaaatggattaacaagccctgactcccctcttggtgcaaggtcagccctgcacttacgaggctccaagcctggctcttcaccaggcactctgtgaggaaggagcacccattcaaaaca

SEQ ID NO: 5487 - DNA, 122 bp, Homo sapiens
  misc_feature (61)..(62): /note="This region represents a CpG dinucleotide"
  misc_feature (61)..(61): /note="Nucleotide may be methylated to form 5-methylcytosine"
ccaataattatagagcagctttctttcatggctcacagttccttcttaggcctctataagcgtcacaaggaaaagagaccatgcctttctgtgggcacagcataccttcgttttattaccca

SEQ ID NO: 5488 - DNA, 122 bp, Homo sapiens
  misc_feature (61)..(62): /note="This region represents a CpG dinucleotide"
  misc_feature (61)..(61): /note="Nucleotide may be methylated to form 5-methylcytosine"
gcggcggtgagcgatgccttccctctgccacaaggcgccgcctgcagagcctgccgcgtccgccacgcccagagcgtacccgcagctcagcgccgagttactcctgctggcggtggccaggg

SEQ ID NO: 5489 - DNA, 122 bp, Homo sapiens
  misc_feature (61)..(62): /note="This region represents a CpG dinucleotide"
  misc_feature (61)..(61): /note="Nucleotide may be methylated to form 5-methylcytosine"
atttaacaaggttcactttcctgttgttctaaggagcagagaatgatcaactgcgtcaaacgctgcttttagggaaaataagatgaggcccacgaattgaccagtaagtgctcaaataggtt

SEQ ID NO: 5490 - DNA, 122 bp, Homo sapiens
  misc_feature (61)..(62): /note="This region represents a CpG dinucleotide"
  misc_feature (61)..(61): /note="Nucleotide may be methylated to form 5-methylcytosine"
taggcaggtgtgtgaattgtacaaaaccagacatgctattcagaggccttttgcaaaatacgttgcgcttcttagagcccaagcacaaaggaattgaggaaaccaaggcttcaagtccccag

SEQ ID NO: 5491 - DNA, 122 bp, Homo sapiens
  misc_feature (61)..(62): /note="This region represents a CpG dinucleotide"
  misc_feature (61)..(61): /note="Nucleotide may be methylated to form 5-methylcytosine"
tccatttttaaagaggagaagcttttgaaacgcagtggcactcacaggcaaaatttgaaacgctaccctcagggaccaccatgttcgcaatgccaaggcaggggccttttgcacctggaata

SEQ ID NO: 5492 - DNA, 122 bp, Homo sapiens
  misc_feature (61)..(62): /note="This region represents a CpG dinucleotide"
  misc_feature (61)..(61): /note="Nucleotide may be methylated to form 5-methylcytosine"
gcgtgtgctggtctgtaatctgctattggcggaaatgatcaccgttttacaccttcactgcgtgtgctagtctgtaatctgctatttgcacttatgagtgcatgtgaatatttttcagtcac

SEQ ID NO: 5493 - DNA, 122 bp, Homo sapiens
  misc_feature (61)..(62): /note="This region represents a CpG dinucleotide"
  misc_feature (61)..(61): /note="Nucleotide may be methylated to form 5-methylcytosine"
cataaaaggtagatggacaaatgttaaatgactaagcagaaaagagaaagttcaaaccaacgtatccacagagctactgctgggacataagccagtttgacctgcaggagttcagaaagtct

SEQ ID NO: 5494 - DNA, 122 bp, Homo sapiens
  misc_feature (61)..(62): /note="This region represents a CpG dinucleotide"
  misc_feature (61)..(61): /note="Nucleotide may be methylated to form 5-methylcytosine"
aagacagggtggactcttcttaggaattttttttaaaacatcaaatcctagagtcataaacggcttgtttctaaatcacattactggtatcttggaacagcaagggtggtgaaaatatagca

SEQ ID NO: 5495 - DNA, 122 bp, Homo sapiens
  misc_feature (61)..(62): /note="This region represents a CpG dinucleotide"
  misc_feature (61)..(61): /note="Nucleotide may be methylated to form 5-methylcytosine"
atgaaaatgacagctaaatactaaagtaagccatgccatttcctacttctccattcttggcgcacactgtccactctgtcaggtatgtctcctgagctccaccctccctaccctgtctactt

SEQ ID NO: 5496 - DNA, 122 bp, Homo sapiens
  misc_feature (61)..(62): /note="This region represents a CpG dinucleotide"
  misc_feature (61)..(61): /note="Nucleotide may be methylated to form 5-methylcytosine"
tgggattgcgggtgtgagccgctgtgcctggctgcacttttccttctaatggaatgtaagcgccacttttgtctgttattttcactgtagtatccctagcctttggaatgttgcctggcaag

SEQ ID NO: 5497 - DNA, 122 bp, Homo sapiens
  misc_feature (61)..(62): /note="This region represents a CpG dinucleotide"
  misc_feature (61)..(61): /note="Nucleotide may be methylated to form 5-methylcytosine"
ggcgtctttctcagcttggttccagcaagtgtgtggcactgagaggttggatagagcctgcgtcctcaagaagtgtattaccaaggggggccataaggtgtccacatgactaaatcagcata

SEQ ID NO: 5498 - DNA, 122 bp, Homo sapiens
  misc_feature (61)..(62): /note="This region represents a CpG dinucleotide"
  misc_feature (61)..(61): /note="Nucleotide may be methylated to form 5-methylcytosine"
atgtgtcttgtggcaattacaggtgtcttcaagcattgcctcagggacatgccaagggaacggaaaccagtcccagtaccctgctctgggagatgtggtcacagggttcggggtgttgagta

SEQ ID NO: 5499 - DNA, 122 bp, Homo sapiens
  misc_feature (61)..(62): /note="This region represents a CpG dinucleotide"
  misc_feature (61)..(61): /note="Nucleotide may be methylated to form 5-methylcytosine"
gctggccgcgctctcattaagatttgccgctagcagtggcggtgttcagcatgtatgtgacgtgcattctgttattgtatgcttggcttgtcagcctgcagctttctgacactcacttatgt

SEQ ID NO: 5500 - DNA, 122 bp, Homo sapiens
  misc_feature (61)..(62): /note="This region represents a CpG dinucleotide"
  misc_feature (61)..(61): /note="Nucleotide may be methylated to form 5-methylcytosine"
cagacacagatgtgcacacactccgatgggggggggttcttgtctaactgcagacatagacgactgcaaaccccaatgaggggttcctgtccaactgcagacacagatgtgcacacaccctg

SEQ ID NO: 5501 - DNA, 122 bp, Homo sapiens
  misc_feature (61)..(62): /note="This region represents a CpG dinucleotide"
  misc_feature (61)..(61): /note="Nucleotide may be methylated to form 5-methylcytosine"
gtagaagttgaagcggcttcagtgcaaaactaacattctctggatctttctcacgctgttcggaaagtagatcacccactgttatttccttttcctggcttttttttttttcctaacagaca

SEQ ID NO: 5502 - DNA, 122 bp, Homo sapiens
  misc_feature (61)..(62): /note="This region represents a CpG dinucleotide"
  misc_feature (61)..(61): /note="Nucleotide may be methylated to form 5-methylcytosine"
atgctgcctgccaacaggggaaccttggctctcctctgcaggccccttatccttctggggcgagactggcttacttacacagaggtctcagagcagagttccaagaaggtgaaagtggaagt

SEQ ID NO: 5503 - DNA, 122 bp, Homo sapiens
  misc_feature (61)..(62): /note="This region represents a CpG dinucleotide"
  misc_feature (61)..(61): /note="Nucleotide may be methylated to form 5-methylcytosine"
catgacactccggaaaatttcatctcatccttgaaaatgaagacttttcacacccaacagcggtcaagccgggcctcagccttctgaccctcctcccctgcttcctggcaggtacaggtttg

SEQ ID NO: 5504 - DNA, 122 bp, Homo sapiens
  misc_feature (61)..(62): /note="This region represents a CpG dinucleotide"
  misc_feature (61)..(61): /note="Nucleotide may be methylated to form 5-methylcytosine"
tcccctagagctggacttacagaaaggccacgaagggacgcaggcctgttgcctgtcacgcgtctgaggtgcttccggtgaacaatttatacgaagcgataaagaccacaccctggaacctc

SEQ ID NO: 5505 - DNA, 122 bp, Homo sapiens
  misc_feature (61)..(62): /note="This region represents a CpG dinucleotide"
  misc_feature (61)..(61): /note="Nucleotide may be methylated to form 5-methylcytosine"
aagcagaaaggaatttgtttgagggcattaaaatgcttccagaaatcatcaggagatacacggaaacctctaggttgtgcttttgggaacagccctcagagctatgcagcagatctgggtct

SEQ ID NO: 5506 - DNA, 122 bp, Homo sapiens
  misc_feature (61)..(62): /note="This region represents a CpG dinucleotide"
  misc_feature (61)..(61): /note="Nucleotide may be methylated to form 5-methylcytosine"
gtagtgactggcctccctgtagaattgtatgcgcaagtggtctctgattaaagctgcccacgtgtcatatttggtaagtgtcgatatctgcttttgactgtgctttgccatactcagatcca

SEQ ID NO: 5507 - DNA, 122 bp, Homo sapiens
  misc_feature (61)..(62): /note="This region represents a CpG dinucleotide"
  misc_feature (61)..(61): /note="Nucleotide may be methylated to form 5-methylcytosine"
gtgtttctgtttcctgtaacatgtgcttttcttccaaacttaatctgacttggccaacaccggtacagttggagattcagcactgaaatagagtaacctctttctccccctatccaaactcc

SEQ ID NO: 5508 - DNA, 122 bp, Homo sapiens
  misc_feature (61)..(62): /note="This region represents a CpG dinucleotide"
  misc_feature (61)..(61): /note="Nucleotide may be methylated to form 5-methylcytosine"
tcttgattggctctgaaatcctccccattttcaaaagggatgcagtcaagcaggccaaagcgctccatgttagctaacaaatgtttgcaaatcataataatgtaggaagagaaccataaact

SEQ ID NO: 5509 - DNA, 122 bp, Homo sapiens
  misc_feature (61)..(62): /note="This region represents a CpG dinucleotide"
  misc_feature (61)..(61): /note="Nucleotide may be methylated to form 5-methylcytosine"
cagattgtgtctgactatcctccaagcacagcctgcaagctatactttcgagaataggttcgcctaacaattaaggcagacagggctatctggaaagctaattttggtgcagtatctgatta

SEQ ID NO: 5510 - DNA, 122 bp, Homo sapiens
  misc_feature (61)..(62): /note="This region represents a CpG dinucleotide"
  misc_feature (61)..(61): /note="Nucleotide may be methylated to form 5-methylcytosine"
ccaagaagctgtagtttccttcctgtgtgaatattaggtgtgagaagagttcacagctcacggctttggcagagccaatatttgacttgcagtgttccccggcagaaaggcagaagaggcct

SEQ ID NO: 5511 - DNA, 122 bp, Homo sapiens
  misc_feature (61)..(62): /note="This region represents a CpG dinucleotide"
  misc_feature (61)..(61): /note="Nucleotide may be methylated to form 5-methylcytosine"
cactaatgccgacatgggaaccactgtaactgacattccacttgcagacatgctagggtacgctctaccggctagggagggagggtttctgtgggccagacccagtcagccaaccttaggaa

SEQ ID NO: 5512 - DNA, 122 bp, Homo sapiens
  misc_feature (61)..(62): /note="This region represents a CpG dinucleotide"
  misc_feature (61)..(61): /note="Nucleotide may be methylated to form 5-methylcytosine"
tggatttttggtagcgtgcttatgagtcactgtgttgtgtcctgcactgtgtacagggcacggagattattgccaccaccgatgactgtgcagcttgaggtatcgatacactggactgttca

SEQ ID NO: 5513 - DNA, 122 bp, Homo sapiens
  misc_feature (61)..(62): /note="This region represents a CpG dinucleotide"
  misc_feature (61)..(61): /note="Nucleotide may be methylated to form 5-methylcytosine"
aatgactgatgccatgggcaaatcctatttctgtaaataactgaattttcttctggactgcgcatgaggggagaaagatgtctgcagtttcggtttcctggaaaatgaaacctatctcattt

SEQ ID NO: 5514 - DNA, 122 bp, Homo sapiens
  misc_feature (61)..(62): /note="This region represents a CpG dinucleotide"
  misc_feature (61)..(61): /note="Nucleotide may be methylated to form 5-methylcytosine"
aaatcatgtgcatttatatgtactagttgcaatgtaaaatgtatttcttactgaggaccacggggaaaaaaagtttggaaaaattactgagaactttacttaagaacaatttgtatactcta

SEQ ID NO: 5515 - DNA, 122 bp, Homo sapiens
  misc_feature (61)..(62): /note="This region represents a CpG dinucleotide"
  misc_feature (61)..(61): /note="Nucleotide may be methylated to form 5-methylcytosine"
taatgtggtcaaaggaaagacagaaaagacatctggatgcctacaagttgtgtgtgcacacgcttgcacacatgtgagtgggcagatgtcaggaagcactcataaatgccacctcctgtgta

SEQ ID NO: 5516 - DNA, 122 bp, Homo sapiens
  misc_feature (61)..(62): /note="This region represents a CpG dinucleotide"
  misc_feature (61)..(61): /note="Nucleotide may be methylated to form 5-methylcytosine"
atgcttccctggtccctgctctgctgctaccttcctgagcacacgtcagccactgggacccgccctgccactgaatttaacatgatctcatgcccctgtgacttgttcttcactttgcctcc

SEQ ID NO: 5517 - DNA, 122 bp, Homo sapiens
  misc_feature (61)..(62): /note="This region represents a CpG dinucleotide"
  misc_feature (61)..(61): /note="Nucleotide may be methylated to form 5-methylcytosine"
cacagctgaaagccagcagagccaaggacctgagtggctttcttggaactgatagcttcgcgctagacaaaagtgaatgagaatatgaaccaggtataaaaagcacgagccgggtgcagtgg

SEQ ID NO: 5518 - DNA, 122 bp, Homo sapiens
  misc_feature (61)..(62): /note="This region represents a CpG dinucleotide"
  misc_feature (61)..(61): /note="Nucleotide may be methylated to form 5-methylcytosine"
ctccaggagttgtcaaggcagcagaaaggagtcacccagccaaaggaggagatggctcagcggggctgcaccaaggggccaagaggccctacccgtgtctaaaccctcctctcactccccta

SEQ ID NO: 5519 - DNA, 122 bp, Homo sapiens
  misc_feature (61)..(62): /note="This region represents a CpG dinucleotide"
  misc_feature (61)..(61): /note="Nucleotide may be methylated to form 5-methylcytosine"
caacacaactggagcagtattactctaactcttccacagattcttttctatcacccaaatcgcatgttttcccacaaccgatgtcacaaaagaggcctttaacagaaaagcctctggctctt

SEQ ID NO: 5520 - DNA, 122 bp, Homo sapiens
  misc_feature (61)..(62): /note="This region represents a CpG dinucleotide"
  misc_feature (61)..(61): /note="Nucleotide may be methylated to form 5-methylcytosine"
taggtagcatgtgcatttgttccgtctgtttgtatatttatcttgcctttctctttcctgcgtagattgtttatcagaaataatttgtgaaatgtgtgtgtatgtttgctgaggttattgtg

SEQ ID NO: 5521 - DNA, 122 bp, Homo sapiens
  misc_feature (61)..(62): /note="This region represents a CpG dinucleotide"
  misc_feature (61)..(61): /note="Nucleotide may be methylated to form 5-methylcytosine"
aacccttaccgaaacaattgttcagatgagcaacgccaagtttaaagaaaggaagtaaaccgtctcaagaactgtcaatctgtttgtgttcgataggctgagatttgaaaggtttgattctg

SEQ ID NO: 5522 - DNA, 122 bp, Homo sapiens
  misc_feature (61)..(62): /note="This region represents a CpG dinucleotide"
  misc_feature (61)..(61): /note="Nucleotide may be methylated to form 5-methylcytosine"
gttcctgctctctcagagcctgcagggctgccttctccctgccctgctgcctgggtgaggcgccactgcccatgacagctcattcttgctgcccaggaagaccagcgccagacaagtggaga

SEQ ID NO: 5523 - DNA, 122 bp, Homo sapiens
  misc_feature (61)..(62): /note="This region represents a CpG dinucleotide"
  misc_feature (61)..(61): /note="Nucleotide may be methylated to form 5-methylcytosine"
ctggagaagctacctggagaacctggagaacctgttccagtgcctgggccaggtgctgcccgagtcttgcctcctggtgtggaacacggccatgcctgtgggcgaggaagtcaccgggggtt

SEQ ID NO: 5524 - DNA, 122 bp, Homo sapiens
  misc_feature (61)..(62): /note="This region represents a CpG dinucleotide"
  misc_feature (61)..(61): /note="Nucleotide may be methylated to form 5-methylcytosine"
tgggggaccttaagtgattattcatggaatctttcatgctaaagatgcattgcagcgaaacgtcattggtttggaccaaatccggttatggtctgaagaacctcaggtatgggacatcccca

SEQ ID NO: 5525 - DNA, 122 bp, Homo sapiens
  misc_feature (61)..(62): /note="This region represents a CpG dinucleotide"
  misc_feature (61)..(61): /note="Nucleotide may be methylated to form 5-methylcytosine"
gaaactttgtttagtacatagtgttccggtaacatttaactgcactttatcaagctcactcgtctcatctccagctcccagggactctttgctttccctctgatgtagattctgctggggtg

SEQ ID NO: 5526 - DNA, 122 bp, Homo sapiens
  misc_feature (61)..(62): /note="This region represents a CpG dinucleotide"
  misc_feature (61)..(61): /note="Nucleotide may be methylated to form 5-methylcytosine"
gatgagaaactgagagcagttaacaactaaaggttaagtatgagagccaggatgcacttgcggtggtattgcttacaaagagatccttatcaccctgcagtggaagagagctcagctgcggg

SEQ ID NO: 5527 - DNA, 122 bp, Homo sapiens
  misc_feature (61)..(62): /note="This region represents a CpG dinucleotide"
  misc_feature (61)..(61): /note="Nucleotide may be methylated to form 5-methylcytosine"
tggctggcagcatcgtattatagcctgagatagttgtattcattcctgaaaccctcccaacgcccccatggggtctatccacagcaggcgtcttccttaggggaaaaaaagggaagaaaggt

SEQ ID NO: 5528 - DNA, 122 bp, Homo sapiens
  misc_feature (61)..(62): /note="This region represents a CpG dinucleotide"
  misc_feature (61)..(61): /note="Nucleotide may be methylated to form 5-methylcytosine"
aggtattcccagtttagggtatctatttatgaacctttcccgtagccgccattcctggagcgcctcctacaggtcagccaccaaacagagcacttaccatgtgtgtctgattgtattctcac

SEQ ID NO: 5529 - DNA, 122 bp, Homo sapiens
  misc_feature (61)..(62): /note="This region represents a CpG dinucleotide"
  misc_feature (61)..(61): /note="Nucleotide may be methylated to form 5-methylcytosine"
cacaaatcagcttgaaacacccatttttcatctttcttttggcaaagggtgttgttattacgtgcagttatgtgttcactggagatacatacagaagtagttcatgtcctcatgaggctttc

SEQ ID NO: 5530 - DNA, 122 bp, Homo sapiens
  misc_feature (61)..(62): /note="This region represents a CpG dinucleotide"
  misc_feature (61)..(61): /note="Nucleotide may be methylated to form 5-methylcytosine"
tcccggtccccgccgaataagttgtgatcactgcagaaaaggtgtcccattgctcggggccgcaggcgtcagagagcccagggcaagtttcaggggctaccggggtccctggctaccccgcg

SEQ ID NO: 5531 - DNA, 122 bp, Homo sapiens
  misc_feature (61)..(62): /note="This region represents a CpG dinucleotide"
  misc_feature (61)..(61): /note="Nucleotide may be methylated to form 5-methylcytosine"
ccatcttggcctcccaaagtgctgggattacaggcttgagccaccacacccagcctcaggcgtggctctaagccctttacatatatgaacttgctagtttattccatgtgtcagccctgtga

SEQ ID NO: 5532 - DNA, 122 bp, Homo sapiens
  misc_feature (61)..(62): /note="This region represents a CpG dinucleotide"
  misc_feature (61)..(61): /note="Nucleotide may be methylated to form 5-methylcytosine"
cagcatgagcaggcccagtcatacatttggttccctgccccagaacagttagtggaagtgcgtgcaccacctgccaaagccagggtggccttgggtattcccacttcagttccctcctttgt

SEQ ID NO: 5533 - DNA, 122 bp, Homo sapiens
  misc_feature (61)..(62): /note="This region represents a CpG dinucleotide"
  misc_feature (61)..(61): /note="Nucleotide may be methylated to form 5-methylcytosine"
gaggtgctggccacgagactggtgagcgggcggcaggacaggtgcccgactcagggctggcgtttgcaggcggtgctggagcggccggtggctgaggtggcggccccggtggtgaaagagct

SEQ ID NO: 5534 - DNA, 122 bp, Homo sapiens
  misc_feature (61)..(62): /note="This region represents a CpG dinucleotide"
  misc_feature (61)..(61): /note="Nucleotide may be methylated to form 5-methylcytosine"
aacctattacttcttgacaccctttccatattgcctgagttgtagaacaagtatttatgtcgttcttaatactgtgtgttttttaagcacagggtggatagtcatgaaaaagtccggtatca

SEQ ID NO: 5535 - DNA, 122 bp, Homo sapiens
  misc_feature (61)..(62): /note="This region represents a CpG dinucleotide"
  misc_feature (61)..(61): /note="Nucleotide may be methylated to form 5-methylcytosine"
tgcacatgtggagattcttagcctagtcactccatattgtttaattttcctcactgtgcacgtgctgggggcagaattctctattgtggacatgtctggttctgtgtaacttcttttatctg

SEQ ID NO: 5536 - DNA, 122 bp, Homo sapiens
  misc_feature (61)..(62): /note="This region represents a CpG dinucleotide"
  misc_feature (61)..(61): /note="Nucleotide may be methylated to form 5-methylcytosine"
tggtcccctggaaaatgttcgtcctcagtgaacatcgccctcggtgtctgtgcatgtgtacgtgtgtatgtgcatatgtgtctgtgtgtttctttctgtctcactgtctttctcttttttat

SEQ ID NO: 5537 - DNA, 122 bp, Homo sapiens
  misc_feature (61)..(62): /note="This region represents a CpG dinucleotide"
  misc_feature (61)..(61): /note="Nucleotide may be methylated to form 5-methylcytosine"
aggaggaggtaggagacagataacggaacaggtcaggacccctccattcccctatacatacgcataaatacaaacacagacacacccgagtgaatgacagggaccatcaggggacagattga

SEQ ID NO: 5538 - DNA, 122 bp, Homo sapiens
  misc_feature (61)..(62): /note="This region represents a CpG dinucleotide"
  misc_feature (61)..(61): /note="Nucleotide may be methylated to form 5-methylcytosine"
ggggatgcgggccggcatgtgcaccactgcacccacatggcagctccagagcggagcacacgcaccctggggcccggccactccacacaggcacgcacccagcagaaaccaccccctgccaa

SEQ ID NO: 5539 - DNA, 122 bp, Homo sapiens
  misc_feature (61)..(62): /note="This region represents a CpG dinucleotide"
  misc_feature (61)..(61): /note="Nucleotide may be methylated to form 5-methylcytosine"
gaaatcacccgtcttctgcgtcgctcaggctgggagctgtggaccggagctgttcctattcggccatcttggctcctcgcagttcattgtttgtggggttaattggaagcagctgcagcagg

SEQ ID NO: 5540 - DNA, 122 bp, Homo sapiens
  misc_feature (61)..(62): /note="This region represents a CpG dinucleotide"
  misc_feature (61)..(61): /note="Nucleotide may be methylated to form 5-methylcytosine"
gctcctgcaggccatctggatgtatatgtgtaggtcacaggggttacaatggctgagcttcggcttagaggcctgacatggacaactttggaaaaactaggtctttactatgaagtatttca

SEQ ID NO: 5541 - DNA, 122 bp, Homo sapiens
  misc_feature (61)..(62): /note="This region represents a CpG dinucleotide"
  misc_feature (61)..(61): /note="Nucleotide may be methylated to form 5-methylcytosine"
agaacaaaataaatgtccagtaaccagccctataaaaattaacatctatgaactgtctgacgaagaatttaatctccttttaaaactcagtgatcaagaacagaaaaccaaacattgcatgt

SEQ ID NO: 5542 - DNA, 122 bp, Homo sapiens
  misc_feature (61)..(62): /note="This region represents a CpG dinucleotide"
  misc_feature (61)..(61): /note="Nucleotide may be methylated to form 5-methylcytosine"
tttggcatgctatgtctatcagcctgtggtaacccttaggcattttatttctacaggaaacgatgatggtgaggacaacatgtggtgacccacaggaacataatcatgttaactcctgactc

SEQ ID NO: 5543 - DNA, 122 bp, Homo sapiens
  misc_feature (61)..(62): /note="This region represents a CpG dinucleotide"
  misc_feature (61)..(61): /note="Nucleotide may be methylated to form 5-methylcytosine"
tcaaagtgctgggattacaggcatgaaccaccacgcccggccccattcgttatttcttaacgctggatgaatattaggctgtttgaaggtagagactgtgtcttattttcttttttattgtc

SEQ ID NO: 5544 - DNA, 122 bp, Homo sapiens
  misc_feature (61)..(62): /note="This region represents a CpG dinucleotide"
  misc_feature (61)..(61): /note="Nucleotide may be methylated to form 5-methylcytosine"
tgggaagagtttcccaaacccatgtgctgtcatatccatccttgagagcccttcccatgacgtgacagataacaagggcctcagaagtcacctgcagaggccttaggaactggtaacacttg

SEQ ID NO: 5545 - DNA, 122 bp, Homo sapiens
  misc_feature (61)..(62): /note="This region represents a CpG dinucleotide"
  misc_feature (61)..(61): /note="Nucleotide may be methylated to form 5-methylcytosine"
tgttgcctccctgtacaaggccatgtgaggacacagtgagaaggcagctatctgcaagcccggaagagaagcctcaccagaaaccaacacgattgcaccttgatctcagactttcaggctcc

SEQ ID NO: 5546 - DNA, 122 bp, Homo sapiens
  misc_feature (61)..(62): /note="This region represents a CpG dinucleotide"
  misc_feature (61)..(61): /note="Nucleotide may be methylated to form 5-methylcytosine"
ctgttgaggaactactcctgtcctagaatctggcaatctggttttaacagcaggggcccacggatggcatgtgaacaaccctggattgagtgatgatgaatgattcagaggtggacaggagc

SEQ ID NO: 5547 - DNA, 122 bp, Homo sapiens
  misc_feature (61)..(62): /note="This region represents a CpG dinucleotide"
  misc_feature (61)..(61): /note="Nucleotide may be methylated to form 5-methylcytosine"
gccttagctcagtgccagtgtggtaaccttaaactcgcttacttaagtggctgatctcatcgcttcctttatgtggtttgtgggatttttcccctctttgccttattacgtcccttgaccac

SEQ ID NO: 5548 - DNA, 122 bp, Homo sapiens
  misc_feature (61)..(62): /note="This region represents a CpG dinucleotide"
  misc_feature (61)..(61): /note="Nucleotide may be methylated to form 5-methylcytosine"
gggaacatgcaagagctcgccgggcggccctggagaatgcgaagccggaggagaccggttcggcctgctgcagtcttcctaggaaccctcgactcctgtgtgggctaggatgagggtcctct

SEQ ID NO: 5549 - DNA, 122 bp, Homo sapiens
  misc_feature (61)..(62): /note="This region represents a CpG dinucleotide"
  misc_feature (61)..(61): /note="Nucleotide may be methylated to form 5-methylcytosine"
tcatacatagctgtcctttttctctcattgagggctctgtttattgtcaccccctgctaccgccttctctgacctgcctagctaaaacagcccctcccatatgcagtcactctacatcacag

SEQ ID NO: 5550 - DNA, 122 bp, Homo sapiens
  misc_feature (61)..(62): /note="This region represents a CpG dinucleotide"
  misc_feature (61)..(61): /note="Nucleotide may be methylated to form 5-methylcytosine"
aggccgacgcagcacggggactctgaggactctgagatcgagtctccagtttgtcagctgcgtttgggggtctggagcaagatgttatttttgatgtttgcaaccagaaaacagaggagctg

SEQ ID NO: 5551 - DNA, 122 bp, Homo sapiens
  misc_feature (61)..(62): /note="This region represents a CpG dinucleotide"
  misc_feature (61)..(61): /note="Nucleotide may be methylated to form 5-methylcytosine"
ctcgtatgactgtctgctccttggcagagtcaccaggtgtccagatcagccttagaaacccggtctgatcagtttcctgggaactacaaggctcctgtgaatcctctctccctctgcaagct

SEQ ID NO: 5552 - DNA, 122 bp, Homo sapiens
  misc_feature (61)..(62): /note="This region represents a CpG dinucleotide"
  misc_feature (61)..(61): /note="Nucleotide may be methylated to form 5-methylcytosine"
actgagtctccttaggtaaatcacagaattctctgactcatctagaagtgatgataatgacggttacttgatagagttgttcataaggatctaatgaatgcggaataaatgcatatctctgg

SEQ ID NO: 5553 - DNA, 122 bp, Homo sapiens
  misc_feature (61)..(62): /note="This region represents a CpG dinucleotide"
  misc_feature (61)..(61): /note="Nucleotide may be methylated to form 5-methylcytosine"
tgatacattactgaagtaaaagtgatgggaattctaaaagccaaactactctgtaatgaacggccatgtaaccctggatgagtcactgttcttaagtaaatggtggcaaggcaaagatgaac

SEQ ID NO: 5554 - DNA, 122 bp, Homo sapiens
  misc_feature (61)..(62): /note="This region represents a CpG dinucleotide"
  misc_feature (61)..(61): /note="Nucleotide may be methylated to form 5-methylcytosine"
gcaactgcacaaagctgttggaagcagatgatgctgtctagactcctggatatgataaaacgtttcagcagcagcagccctcagttgtggcttaaccttcattttgcccttgaccaagagcc

SEQ ID NO: 5555 - DNA, 122 bp, Homo sapiens
  misc_feature (61)..(62): /note="This region represents a CpG dinucleotide"
  misc_feature (61)..(61): /note="Nucleotide may be methylated to form 5-methylcytosine"
atgttattttacttggatttgaactttatatgaatacaatccatcccgtctgtggtcttccgtaatctacttttcttcctagtaaatgtatgagattcagccatgttgacaaatatgccata

SEQ ID NO: 5556 - DNA, 122 bp, Homo sapiens
  misc_feature (61)..(62): /note="This region represents a CpG dinucleotide"
  misc_feature (61)..(61): /note="Nucleotide may be methylated to form 5-methylcytosine"
aagtttccaattgcaatagtataaaaataaggaacttaatcaaaataaatgtaaagtgaccgagcatagtgactcacacctgtaatgccagcacattgggatgccaaggtggggagatcact

SEQ ID NO: 5557 - DNA, 122 bp, Homo sapiens
  misc_feature (61)..(62): /note="This region represents a CpG dinucleotide"
  misc_feature (61)..(61): /note="Nucleotide may be methylated to form 5-methylcytosine"
gaggcccgggctggggacccgctggccgggggagcgtctcctggaagtcccgtcccccaccgacctgcatggtttctgcgctcgggacttgcaggctgagggccaagcaccgcgagaccacc

SEQ ID NO: 5558 - DNA, 122 bp, Homo sapiens
  misc_feature (61)..(62): /note="This region represents a CpG dinucleotide"
  misc_feature (61)..(61): /note="Nucleotide may be methylated to form 5-methylcytosine"
ctgttagaatgcatggccatggacgacttggtgaccagtggcctgtaaaatgccacagaacgccctggcagctaatttttaattcccaggaagttgcttgcaactttgcaaagataaggcaa

SEQ ID NO: 5559 - DNA, 122 bp, Homo sapiens
  misc_feature (61)..(62): /note="This region represents a CpG dinucleotide"
  misc_feature (61)..(61): /note="Nucleotide may be methylated to form 5-methylcytosine"
atcactcctgaaacctgtgaaacaacgaaccccccggggagaaacgaacaactccagactcgccgcctgaagagctgtaactctcacttcgaaggtctgcagcttcgctcctgagtcagtga

SEQ ID NO: 5560 - DNA, 122 bp, Homo sapiens
  misc_feature (61)..(62): /note="This region represents a CpG dinucleotide"
  misc_feature (61)..(61): /note="Nucleotide may be methylated to form 5-methylcytosine"
gccctaactagattagaaactgacatgttctaccccagggcctccgcgaacgacagcaggcgagaatccttgctctggacacggggaacagggtcagcatctcgtctcctatctccaccgac

SEQ ID NO: 5561 - DNA, 122 bp, Homo sapiens
  misc_feature (61)..(62): /note="This region represents a CpG dinucleotide"
  misc_feature (61)..(61): /note="Nucleotide may be methylated to form 5-methylcytosine"
agggactgtggggcactgatgacaatgtggcccttcatcaccaaggagctggctgggcctcgtgagagctggtggaaagaaagcaggatgtctctggccctcctgtcttcctagacttgaag

SEQ ID NO: 5562 - DNA, 122 bp, Homo sapiens
  misc_feature (61)..(62): /note="This region represents a CpG dinucleotide"
  misc_feature (61)..(61): /note="Nucleotide may be methylated to form 5-methylcytosine"
gacaccctcaagggaggagtgcaggcactcaaagatttgagtcacaggcaatgtggttcacgtactatatgaataagcacaatgaaggtatggagtactctgtaatcaaggggaggggtttt

SEQ ID NO: 5563 - DNA, 122 bp, Homo sapiens
  misc_feature (61)..(62): /note="This region represents a CpG dinucleotide"
  misc_feature (61)..(61): /note="Nucleotide may be methylated to form 5-methylcytosine"
aggcaaccacagtactggggtgaggtcacagaagctgagtccagcccttgcttggggagacgggtacaggaagtagcaggggcagggagggaaggggtagatggagagttgtcatcagcacc

SEQ ID NO: 5564 - DNA, 122 bp, Homo sapiens
  misc_feature (61)..(62): /note="This region represents a CpG dinucleotide"
  misc_feature (61)..(61): /note="Nucleotide may be methylated to form 5-methylcytosine"
tgttcattatgccacctgctgtgttaagcactttacattcattacttcaattaattctcacgccaacccttgaaagtaagaattatggctcttgttttacaccttaggacatggcggctctg

SEQ ID NO: 5565 - DNA, 122 bp, Homo sapiens
  misc_feature (61)..(62): /note="This region represents a CpG dinucleotide"
  misc_feature (61)..(61): /note="Nucleotide may be methylated to form 5-methylcytosine"
tcgtgtaaaaaacacactattttgtcctagactcagtatcagtgggttgtatctcactgccgtcatttcatggaataactaggagttactcaacacagtctatagctggtttttttaacctt

SEQ ID NO: 5566 - DNA, 122 bp, Homo sapiens
  misc_feature (61)..(62): /note="This region represents a CpG dinucleotide"
  misc_feature (61)..(61): /note="Nucleotide may be methylated to form 5-methylcytosine"
acctctagagaattaaagtgatttcttcaagagccaggcttgcaggggaaatctaagggccggcagcctttcatgcacagacagctcagctctggcctttgttctaagagacagcagccagc

SEQ ID NO: 5567 - DNA, 122 bp, Homo sapiens
  misc_feature (61)..(62): /note="This region represents a CpG dinucleotide"
  misc_feature (61)..(61): /note="Nucleotide may be methylated to form 5-methylcytosine"
cgctgaaaatgaaggtatgaaaaggcatcatcatccgtggttcccacctggcataatgaccgtatcagaacagacatctggtagtatacaccacatagttgccagactccgataccaagggc

SEQ ID NO: 5568 - DNA, 122 bp, Homo sapiens
  misc_feature (61)..(62): /note="This region represents a CpG dinucleotide"
  misc_feature (61)..(61): /note="Nucleotide may be methylated to form 5-methylcytosine"
catgatccgccaacctcggcctcccaaagtgctgggattacaggcatgagccaccgcgcccggacaggacatgggggtttctaaacaaggctcttcagtatcagctcattgtgagtcacaga

SEQ ID NO: 5569 - DNA, 122 bp, Homo sapiens
  misc_feature (61)..(62): /note="This region represents a CpG dinucleotide"
  misc_feature (61)..(61): /note="Nucleotide may be methylated to form 5-methylcytosine"
aaaacaggaagttaacaaactaaagcaggccttgcagctggtatacgtcttactcaagctcgtcttgtgaccttgtcatgttgcccagaacagagaaactggagttgttgtgaagtaacctt

SEQ ID NO: 5570 - DNA, 122 bp, Homo sapiens
  misc_feature (61)..(62): /note="This region represents a CpG dinucleotide"
  misc_feature (61)..(61): /note="Nucleotide may be methylated to form 5-methylcytosine"
ttgagcagaaggttaaaagtattgctttctgagaagtcccattcggtcactcctctctctcgcaagagagacagctgttctcccttttcttttgcctataaacttccgctcctaaactaaaa

SEQ ID NO: 5571 - DNA, 122 bp, Homo sapiens
  misc_feature (61)..(62): /note="This region represents a CpG dinucleotide"
  misc_feature (61)..(61): /note="Nucleotide may be methylated to form 5-methylcytosine"
cctcctttggtgctcttgggaactttgctacaggtatcatgtgagtaagtccaggtgactcggagatgagtgatacttggccctgttacctgcactgtccctgctgagagccagctgactgc

SEQ ID NO: 5572 - DNA, 122 bp, Homo sapiens
  misc_feature (61)..(62): /note="This region represents a CpG dinucleotide"
  misc_feature (61)..(61): /note="Nucleotide may be methylated to form 5-methylcytosine"
ttattttttgagtctgtagcacccatggtctggttttataaacagcagaactgaggactacgaagagaattcggcagaataaattaaagatatgtaaacaaacaatgaaaagctagttttgc

SEQ ID NO: 5573 - DNA, 122 bp, Homo sapiens
  misc_feature (61)..(62): /note="This region represents a CpG dinucleotide"
  misc_feature (61)..(61): /note="Nucleotide may be methylated to form 5-methylcytosine"
aaagctacaaacaccaggcacatgtcattctggctgaaggcaaatgatgggacaggcccccggagctcccctaggacagaagctcaccttcagccccacggctgcactcagagatggccccg

SEQ ID NO: 5574 - DNA, 122 bp, Homo sapiens
  misc_feature (61)..(62): /note="This region represents a CpG dinucleotide"
  misc_feature (61)..(61): /note="Nucleotide may be methylated to form 5-methylcytosine"
gtctcttcccttctggctgtaagagacttagcttgcctctgagctccttctctttggggtcgcccagggctctgccaaatgcacaaaaaaccccccccctttttttggtgggggaggtcatg

SEQ ID NO: 5575 - DNA, 122 bp, Homo sapiens
  misc_feature (61)..(62): /note="This region represents a CpG dinucleotide"
  misc_feature (61)..(61): /note="Nucleotide may be methylated to form 5-methylcytosine"
tgtcatcactccagatgtcttaggcctcctcttctgaaactactgtcaaaatctctggcacgtttttgaatatcctcaatgaagaaaaatcttaatcttttttgaggaagaattggatcttt

SEQ ID NO: 5576 - DNA, 122 bp, Homo sapiens
  misc_feature (61)..(62): /note="This region represents a CpG dinucleotide"
  misc_feature (61)..(61): /note="Nucleotide may be methylated to form 5-methylcytosine"
aaaaaccgaaataatcccagaatgcctcagggctccaggggaaggcgaaaaaagcgggtgcgtttataaacttaaaataatcagaggcagcatctccaaggactgtgagaatgccccaagtc

SEQ ID NO: 5577 - DNA, 122 bp, Homo sapiens
  misc_feature (61)..(62): /note="This region represents a CpG dinucleotide"
  misc_feature (61)..(61): /note="Nucleotide may be methylated to form 5-methylcytosine"
caaataccaagcacttttagccttcggctcaacttttatacacatatctgcatgctgagacgtgtctagaagtaagtcaccaaagtttttgcttatattagttcccaagtaaagcagaagac

SEQ ID NO: 5578 - DNA, 122 bp, Homo sapiens
  misc_feature (61)..(62): /note="This region represents a CpG dinucleotide"
  misc_feature (61)..(61): /note="Nucleotide may be methylated to form 5-methylcytosine"
tttcagacacagatagttcccttttggtgaaacttgttgcaatgttccacaaagtgttaccgcatctggaaagtccataataattttgatttatctgcactgacagtcagcagtatgttata

SEQ ID NO: 5579 - DNA, 122 bp, Homo sapiens
  misc_feature (61)..(62): /note="This region represents a CpG dinucleotide"
  misc_feature (61)..(61): /note="Nucleotide may be methylated to form 5-methylcytosine"
ggctggatgaaattctgccctgtacttgcaaacatttgcagaactgctcagtcagccttccgggaaaaccatgcccacatcctactggattcctctagctttggtgttgtcaacacagagat

SEQ ID NO: 5580 - DNA, 122 bp, Homo sapiens
  misc_feature (61)..(62): /note="This region represents a CpG dinucleotide"
  misc_feature (61)..(61): /note="Nucleotide may be methylated to form 5-methylcytosine"
caatgactctttaaacttctgctcagatgcatccaatgtcacatctgcttacatcctatacgctgcagcaagtcacatgaccaatgtcaacatcagtggaatgggcaagtgtatttgtatag

SEQ ID NO: 5581 - DNA, 122 bp, Homo sapiens
  misc_feature (61)..(62): /note="This region represents a CpG dinucleotide"
  misc_feature (61)..(61): /note="Nucleotide may be methylated to form 5-methylcytosine"
agggaaaagtgtggtataaactggttgcagagcaggcacagccagactgtgcagggcaaacgtcataaactagtggcctgtggttctaatctggacatctgtcttgcagatgtttcgagttt

SEQ ID NO: 5582 - DNA, 122 bp, Homo sapiens
  misc_feature (61)..(62): /note="This region represents a CpG dinucleotide"
  misc_feature (61)..(61): /note="Nucleotide may be methylated to form 5-methylcytosine"
gaagtgatgtgtgccacttcgaagcagaagctctgattcatcatatggttctactatgttcgttctctcttccatgaaaccagcaatatcccaaatacagactgctggtcccaggatggaaa

SEQ ID NO: 5583 - DNA, 122 bp, Homo sapiens
  misc_feature (61)..(62): /note="This region represents a CpG dinucleotide"
  misc_feature (61)..(61): /note="Nucleotide may be methylated to form 5-methylcytosine"
cttgggatgaatctgataagcaaatcatgaaatgattatttagacacaagatgtgttgctcgacagtatgcctaaagtatatcatgactaaggaatgaatgctacttaatgttgaaatcaga

SEQ ID NO: 5584 - DNA, 122 bp, Homo sapiens
  misc_feature (61)..(62): /note="This region represents a CpG dinucleotide"
  misc_feature (61)..(61): /note="Nucleotide may be methylated to form 5-methylcytosine"
gaaattaaacacaatttgccccaagtttcatcttttataaaaccattctcatggtaagtacgtttcaatgacccaaatgaattaacaaaaaattaatcggggaaatgaaccctgattgctac

SEQ ID NO: 5585 - DNA, 122 bp, Homo sapiens
  misc_feature (61)..(62): /note="This region represents a CpG dinucleotide"
  misc_feature (61)..(61): /note="Nucleotide may be methylated to form 5-methylcytosine"
gctgtgagtgggcgacaaggaacctcgtggtctccgtgtgctttgcggggaccacctcttcgcaggggccgccacctgcctctccggcgctgcatccttagcatccccactgcccccggatc

SEQ ID NO: 5586 - DNA, 122 bp, Homo sapiens
  misc_feature (61)..(62): /note="This region represents a CpG dinucleotide"
  misc_feature (61)..(61): /note="Nucleotide may be methylated to form 5-methylcytosine"
aactgtgattctcaacatttgactcttctggctgatatggcatatttgtttagcttctctcgaacagagctaccaacagatcagtcactcatggtgactcggggagcatcagttgtccacca

SEQ ID NO: 5587 - DNA, 122 bp, Homo sapiens
  misc_feature (61)..(62): /note="This region represents a CpG dinucleotide"
  misc_feature (61)..(61): /note="Nucleotide may be methylated to form 5-methylcytosine"
attgtctggctggccgatttccccattgagatgcttatctgacatggcttctgccaccatcgtcctgcacttctccattaaagagcagccattcagctgtgagttccccattgcttcagctg

SEQ ID NO: 5588 - DNA, 122 bp, Homo sapiens
  misc_feature (61)..(62): /note="This region represents a CpG dinucleotide"
  misc_feature (61)..(61): /note="Nucleotide may be methylated to form 5-methylcytosine"
acacacacacacacacacacacacacacacacacacacacacacatttaatgttcccaaacgattactgagtgctaaatagacttgctggaatctgatggttgaaagaaaattcaaaaatgt

SEQ ID NO: 5589 - DNA, 122 bp, Homo sapiens
  misc_feature (61)..(62): /note="This region represents a CpG dinucleotide"
  misc_feature (61)..(61): /note="Nucleotide may be methylated to form 5-methylcytosine"
gacaaaaggaaggggaggagtgaaaccaaacccagcttgcagcgcacttcgtgttcaccgcgggtcggcctgcgctcccacctgcttcctcgtgttgtttgctgcctattgacctagaatcc

SEQ ID NO: 5590 - DNA, 122 bp, Homo sapiens
  misc_feature (61)..(62): /note="This region represents a CpG dinucleotide"
  misc_feature (61)..(61): /note="Nucleotide may be methylated to form 5-methylcytosine"
ctacacactgtattttctttaagtcattcttcctactaacttattcatctcacaacatcacgagatcatttctattactgtacttatttcgcagatgaggggcctgatgtaccaagaggtta

SEQ ID NO: 5591 - DNA, 122 bp, Homo sapiens
  misc_feature (61)..(62): /note="This region represents a CpG dinucleotide"
  misc_feature (61)..(61): /note="Nucleotide may be methylated to form 5-methylcytosine"
tacagatgaaagtccagatatgccatcctgtattgtagccatggtcggtataaccatgctcgtttccaaactgtcacagcacattgcatattttctctgatttgtgaaagataatatgtaaa

SEQ ID NO: 5592 - DNA, 122 bp, Homo sapiens
  misc_feature (61)..(62): /note="This region represents a CpG dinucleotide"
  misc_feature (61)..(61): /note="Nucleotide may be methylated to form 5-methylcytosine"
agttaaattcaggaaatatttttgagcacctaatgtgtatcactattgtgctttgacttacggatacacaacagtgactaagacccagtccttgctcatgttgtggttgggacattgacgta

SEQ ID NO: 5593 - DNA, 122 bp, Homo sapiens
  misc_feature (61)..(62): /note="This region represents a CpG dinucleotide"
  misc_feature (61)..(61): /note="Nucleotide may be methylated to form 5-methylcytosine"
gggcgtcgtcctgttcctgcagtggcacatgcagttgtgggagagccagtgcccccacgccgtgtcatgcagcctgtttgtgagtgtccgcgtaacctttaattctgagctgattttgcttt

SEQ ID NO: 5594 - DNA, 122 bp, Homo sapiens
  misc_feature (61)..(62): /note="This region represents a CpG dinucleotide"
  misc_feature (61)..(61): /note="Nucleotide may be methylated to form 5-methylcytosine"
atgtaaggttttcagagggagtagtcacaaaagctttcagaggaagtactggttttcttgcgtctttctgcagttaacatttcatttcctcctctaaggtggatcctgttttagtgaataat

SEQ ID NO: 5595 - DNA, 122 bp, Homo sapiens
  misc_feature (61)..(62): /note="This region represents a CpG dinucleotide"
  misc_feature (61)..(61): /note="Nucleotide may be methylated to form 5-methylcytosine"
gatatttgtatgtgaggactgagagttaaatgtaaacatctggaaactacaaaatgagcacgaaatgatgtttttattcttagaacagaaagtccccacacccgcggccctggtgactgatg

SEQ ID NO: 5596 - DNA, 122 bp, Homo sapiens
  misc_feature (61)..(62): /note="This region represents a CpG dinucleotide"
  misc_feature (61)..(61): /note="Nucleotide may be methylated to form 5-methylcytosine"
tgggtgtctgcttgtccagaacattcttgctaaataattggcttagaaagtcgtgaaaggcgtcagtggctctgaaccacggggaaacccaaacagtttatgaagaacaagatcagcccgcc

SEQ ID NO: 5597 - DNA, 122 bp, Homo sapiens
  misc_feature (61)..(62): /note="This region represents a CpG dinucleotide"
  misc_feature (61)..(61): /note="Nucleotide may be methylated to form 5-methylcytosine"
gtgtatttgttgtagttttgttttttaaaactatgcataaacaacatgagacattcatttcgtttggctagtgaatctctgctgttggtttaaaccaagtataatcaccagcacacccaatt

SEQ ID NO: 5598 - DNA, 122 bp, Homo sapiens
  misc_feature (61)..(62): /note="This region represents a CpG dinucleotide"
  misc_feature (61)..(61): /note="Nucleotide may be methylated to form 5-methylcytosine"
ccagccggaggccacaggagaaccaatgagcctggctggactcctgcaaaccttgagggacgccgagattcacattcactgaattttcatgccacgtgacactcttcttcttttgttccctc

SEQ ID NO: 5599 - DNA, 122 bp, Homo sapiens
  misc_feature (61)..(62): /note="This region represents a CpG dinucleotide"
  misc_feature (61)..(61): /note="Nucleotide may be methylated to form 5-methylcytosine"
ttctcatgagatcagatggttttataagtgtttgacagttcctccttcacatactcaccccgcctcctgcgacattgtgaagaaggtgcctgcttcccctcccgccatatgtttgtaagttt

SEQ ID NO: 5600 - DNA, 122 bp, Homo sapiens
  misc_feature (61)..(62): /note="This region represents a CpG dinucleotide"
  misc_feature (61)..(61): /note="Nucleotide may be methylated to form 5-methylcytosine"
gagcaaatagttgtagcagtttcttccagatggctagattacaccacaggcagtatgtaccgcaagtagcagctgcactgacagcttcctgatttcctagctttctaattacatttagggac

SEQ ID NO: 5601 - DNA, 122 bp, Homo sapiens
  misc_feature (61)..(62): /note="This region represents a CpG dinucleotide"
  misc_feature (61)..(61): /note="Nucleotide may be methylated to form 5-methylcytosine"
attaaactagatgacttctaacttcctttccagctctaaaacactatacaaacaataagacgtctatagtgaaatggcattcaaaataccaactgtgataatctaatttctttccaattata

SEQ ID NO: 5602 - DNA, 122 bp, Homo sapiens
  misc_feature (61)..(62): /note="This region represents a CpG dinucleotide"
  misc_feature (61)..(61): /note="Nucleotide may be methylated to form 5-methylcytosine"
caggaagtgttggagattaacctgcaagtacaccaaccacagaccatatcctggaaattacgtaggtttttttgtttttttagagacagggtctcgctatgttgcccaggctggtctcaaac

SEQ ID NO: 5603 - DNA, 122 bp, Homo sapiens
  misc_feature (61)..(62): /note="This region represents a CpG dinucleotide"
  misc_feature (61)..(61): /note="Nucleotide may be methylated to form 5-methylcytosine"
gtgtatacttcctgtctgatcctagtcctgagattccagaagacacaaaaacccagttcccgcagggctggagacgaaggcagaggggctgactggctacccagctccatctctgagtgctg

SEQ ID NO: 5604 - DNA, 122 bp, Homo sapiens
  misc_feature (61)..(62): /note="This region represents a CpG dinucleotide"
  misc_feature (61)..(61): /note="Nucleotide may be methylated to form 5-methylcytosine"
tagagttctgtccccacgctccaatccttcagatttggatctccccttcacacacaccctcgccttgccccaaagtcagcatcccccagcgctgagatatgaagaccaccccgtcaaagggg

SEQ ID NO: 5605 - DNA, 122 bp, Homo sapiens
  misc_feature (61)..(62): /note="This region represents a CpG dinucleotide"
  misc_feature (61)..(61): /note="Nucleotide may be methylated to form 5-methylcytosine"
tgtaaggctagacactgcatcattcttttcagaaaccagtgactttaggcatgtggaactcgtagtcatgacaacaataaaccagctttgagtctgtgtttcagctcagaaactgccttgtc

SEQ ID NO: 5606 - DNA, 122 bp, Homo sapiens
  misc_feature (61)..(62): /note="This region represents a CpG dinucleotide"
  misc_feature (61)..(61): /note="Nucleotide may be methylated to form 5-methylcytosine"
tcttgctttgctaagttgtgcaataactgtgattgcacccttatttgatgatgtgtgtttcggtaaccatggagcgagtgctgctttgccaatcctaggtcaacactgacccctttccaagg

SEQ ID NO: 5607 - DNA, 122 bp, Homo sapiens
  misc_feature (61)..(62): /note="This region represents a CpG dinucleotide"
  misc_feature (61)..(61): /note="Nucleotide may be methylated to form 5-methylcytosine"
gacttacatatgggacttgaatatgctcaattttttttcacaaaggattttatgtcaattcgagctgtgaagttataatttgaaccctaattgaggataattataaggctatcccacaatgt

SEQ ID NO: 5608 - DNA, 122 bp, Homo sapiens
  misc_feature (61)..(62): /note="This region represents a CpG dinucleotide"
  misc_feature (61)..(61): /note="Nucleotide may be methylated to form 5-methylcytosine"
agcaagtagagtgtacaatggagccaacacctaaagtttgctctcatttgacaatgaacacggtgagagggagccacttactggtaaccatgcagaacatgccttctgcagttcatggagag

SEQ ID NO: 5609 - DNA, 122 bp, Homo sapiens
  misc_feature (61)..(62): /note="This region represents a CpG dinucleotide"
  misc_feature (61)..(61): /note="Nucleotide may be methylated to form 5-methylcytosine"
cttcctgactttcacagtcctaccttcatctggattcttattgggccgaaactaacatggcgttttctgtttactacctcatctgtgcttactgacggagggcagcagagcctgtctgtgaa

SEQ ID NO: 5610 - DNA, 122 bp, Homo sapiens
  misc_feature (61)..(62): /note="This region represents a CpG dinucleotide"
  misc_feature (61)..(61): /note="Nucleotide may be methylated to form 5-methylcytosine"
tccatggggccactgaccccacagttaccccagaaccctttcctggcacagcttgtgacccggggcatgtagcccttaaggcacgttcattgtgaagggcaggttttgtctcctccaaaccc

SEQ ID NO: 5611 - DNA, 122 bp, Homo sapiens
  misc_feature (61)..(62): /note="This region represents a CpG dinucleotide"
  misc_feature (61)..(61): /note="Nucleotide may be methylated to form 5-methylcytosine"
ccccaggttccaccccaagtacacttggaagccaggcccctccacacaggctgagcaccacgcttccacaaactgaaaacagagagaatccacttggtttcaaagttagaatagggatagcg

SEQ ID NO: 5612 - DNA, 122 bp, Homo sapiens
  misc_feature (61)..(62): /note="This region represents a CpG dinucleotide"
  misc_feature (61)..(61): /note="Nucleotide may be methylated to form 5-methylcytosine"
tccccatttacatttttttaggagattacacatagaagaataaagcttgacacattaaagcggggaaagactggtaagattccatgagcagagacacaatcaaattattcatgctccagtga

SEQ ID NO: 5613 - DNA, 122 bp, Homo sapiens
  misc_feature (61)..(62): /note="This region represents a CpG dinucleotide"
  misc_feature (61)..(61): /note="Nucleotide may be methylated to form 5-methylcytosine"
tacatgtaaaaattaccctttctctcactcttaaagtagatatagatcattcattcaattcgaaagtgaaatttgcatttgttacttaacattggtcacagagaaaacatgatgggaacaaa

SEQ ID NO: 5614 - DNA, 122 bp, Homo sapiens
  misc_feature (61)..(62): /note="This region represents a CpG dinucleotide"
  misc_feature (61)..(61): /note="Nucleotide may be methylated to form 5-methylcytosine"
ttcctctcgcagcaattaattacacagagcggcgtgttttgacgcggaccacagcaaacgcgtcaggtcacgggcatttacgcgtatctgagagcaacgtctttatcatcagcacggtgcgt

SEQ ID NO: 5615 - DNA, 122 bp, Homo sapiens
  misc_feature (61)..(62): /note="This region represents a CpG dinucleotide"
  misc_feature (61)..(61): /note="Nucleotide may be methylated to form 5-methylcytosine"
caccgctagagcgaggagactggtgggccagggaccggctgagcaccactcctacccccacgcactaattaggatcagagcccagatggtcacagccttccagctgtgaggctcgagactca

SEQ ID NO: 5616 - DNA, 122 bp, Homo sapiens
  misc_feature (61)..(62): /note="This region represents a CpG dinucleotide"
  misc_feature (61)..(61): /note="Nucleotide may be methylated to form 5-methylcytosine"
gccactcctcaaactgcctggcattggtggtaatctatggcaaagcacctctcctttttgcgttaccctctttgaagtgagtaacactatgtcttagagagccttcttttcatttgtgtttt

SEQ ID NO: 5617 - DNA, 122 bp, Homo sapiens
  misc_feature (61)..(62): /note="This region represents a CpG dinucleotide"
  misc_feature (61)..(61): /note="Nucleotide may be methylated to form 5-methylcytosine"
acttttatgacagctggagaccttgaacacacttggccatggcttatcagcctccaatgacgtagtcgtgaagcaaagaacctcttggacccttaactttatcactaatagcaacatcccca

SEQ ID NO: 5618 - DNA, 122 bp, Homo sapiens
  misc_feature (61)..(62): /note="This region represents a CpG dinucleotide"
  misc_feature (61)..(61): /note="Nucleotide may be methylated to form 5-methylcytosine"
ccgatctcctgtaatctacctggattggaacgcccagctttgtacagcctgagctctggccgactggaatttctgccaggtcctattcacacccttggccccagctggctgtgaggtttcct

SEQ ID NO: 5619 - DNA, 122 bp, Homo sapiens
  misc_feature (61)..(62): /note="This region represents a CpG dinucleotide"
  misc_feature (61)..(61): /note="Nucleotide may be methylated to form 5-methylcytosine"
tgtcagctgattggatggtgcccacccactttgggtgacggaggatcttccttattgagtcgactgattcaaatgtcaaatctcttctggaaacactttcacagacatgtgcagaaataata

SEQ ID NO: 5620 - DNA, 122 bp, Homo sapiens
  misc_feature (61)..(62): /note="This region represents a CpG dinucleotide"
  misc_feature (61)..(61): /note="Nucleotide may be methylated to form 5-methylcytosine"
ggttgggtgcatattttcagtatatgctgcagcagctctttattaaagtataaatcattacgaagtcttcatttcctatggggcgataacactgctgctttgtggatgactacctgtcacgc

SEQ ID NO: 5621 - DNA, 122 bp, Homo sapiens
  misc_feature (61)..(62): /note="This region represents a CpG dinucleotide"
  misc_feature (61)..(61): /note="Nucleotide may be methylated to form 5-methylcytosine"
aatgccatcactcccagtcattggagatcgtgggtgcccctgagggttacagatcaaggacgtgatatgttgaaagcacaggttttaggatgattagtagggttgaaaggtatgcatttctg

SEQ ID NO: 5622 - DNA, 122 bp, Homo sapiens
  misc_feature (61)..(62): /note="This region represents a CpG dinucleotide"
  misc_feature (61)..(61): /note="Nucleotide may be methylated to form 5-methylcytosine"
gaaaaaaaaattgattaaaatatcagcataggctgggcactcaacacttcgggcagccaacgcagcagcatcgcttgaggccaggagttcaagactagtctaggcaacatagtgagaccctg

SEQ ID NO: 5623 - DNA, 122 bp, Homo sapiens
  misc_feature (61)..(62): /note="This region represents a CpG dinucleotide"
  misc_feature (61)..(61): /note="Nucleotide may be methylated to form 5-methylcytosine"
ggtgatccacctgcttcagcctcccaaagtgctgggattacaggcgtgacctgccgagcccggcctggacctgttcttcaaccatgaagaccaggggaaagtgctaacacagtccccactac

SEQ ID NO: 5624 - DNA, 122 bp, Homo sapiens
  misc_feature (61)..(62): /note="This region represents a CpG dinucleotide"
  misc_feature (61)..(61): /note="Nucleotide may be methylated to form 5-methylcytosine"
tgtgcacaaacacctgcacaaccaggtaaatacataaccacacacagatgcgtgtgcgcacgcccaggcacacatgcaaatgcctgcgcacgtgggcaggcacccacacataatcacagggc

SEQ ID NO: 5625 - DNA, 122 bp, Homo sapiens
  misc_feature (61)..(62): /note="This region represents a CpG dinucleotide"
  misc_feature (61)..(61): /note="Nucleotide may be methylated to form 5-methylcytosine"
cagcctttttccaagtcacactgggcctttctaatcctgtaatcaacacaatactttatacggcctcaggcttgtggctcaacagggatgaaccaggccagggtgacagggaccctttcttc

SEQ ID NO: 5626 - DNA, 122 bp, Homo sapiens
  misc_feature (61)..(62): /note="This region represents a CpG dinucleotide"
  misc_feature (61)..(61): /note="Nucleotide may be methylated to form 5-methylcytosine"
gctgaactgtgggcctgtgattcttgggcctggcaagtgtgtgctgaggtgttccttccacgcctccctgttcttggaggctgagctttgagcagacctttgcgtgtttacacaagtttggg

SEQ ID NO: 5627 - DNA, 122 bp, Homo sapiens
  misc_feature (61)..(62): /note="This region represents a CpG dinucleotide"
  misc_feature (61)..(61): /note="Nucleotide may be methylated to form 5-methylcytosine"
ttaattttcctaaagcctgcctttgaccaagacagtttgctgcttaaacttggaccaaaacgccaccactgtccccatggccttggccgatggggtgaaatagtcatgcctggggcagccat

SEQ ID NO: 5628 - DNA, 122 bp, Homo sapiens
  misc_feature (61)..(62): /note="This region represents a CpG dinucleotide"
  misc_feature (61)..(61): /note="Nucleotide may be methylated to form 5-methylcytosine"
tgtctctacccaccttcgttcctcgaggctcctcccatgttcccgcccacctcaggtccccgaggctccacccatgtcaccgcccacctcagctacttgagaacccccgtcccttgggtccc

SEQ ID NO: 5629 - DNA, 122 bp, Homo sapiens
  misc_feature (61)..(62): /note="This region represents a CpG dinucleotide"
  misc_feature (61)..(61): /note="Nucleotide may be methylated to form 5-methylcytosine"
gtgtaggtgttgtatgatttacacacttctggttgtagatctagatccacctctctccttcgattctttcctgggcaaagtaatcagtgatttgcgtgttttgagcacaaaagctgagaaaa

SEQ ID NO: 5630 - DNA, 122 bp, Homo sapiens
  misc_feature (61)..(62): /note="This region represents a CpG dinucleotide"
  misc_feature (61)..(61): /note="Nucleotide may be methylated to form 5-methylcytosine"
acgtaactgaggacgcccccaacccatggccacggcccctcgggccgtcacacagggctgcggctcatggggccctgctagagcaggcgtctgtcctcagtcagtgcgaccgacttgaaacc

SEQ ID NO: 5631 - DNA, 122 bp, Homo sapiens
  misc_feature (61)..(62): /note="This region represents a CpG dinucleotide"
  misc_feature (61)..(61): /note="Nucleotide may be methylated to form 5-methylcytosine"
tgtcttctgcttcacttattgacatcagagggccaaaaactctaccttcagatcaaacaccgccatttttttgacatgggacccttgaaggggcatgcggctcagctgcacatgtgcacagt

SEQ ID NO: 5632 - DNA, 122 bp, Homo sapiens
  misc_feature (61)..(62): /note="This region represents a CpG dinucleotide"
  misc_feature (61)..(61): /note="Nucleotide may be methylated to form 5-methylcytosine"
tttttctttaagcttcttttagccagaaacataaactgaaactgtaattattactgcaatcgtatgttgaatagacttgtgaaactagcaatttattaggcttttaatgatatctggaccaa

SEQ ID NO: 5633 - DNA, 122 bp, Homo sapiens
  misc_feature (61)..(62): /note="This region represents a CpG dinucleotide"
  misc_feature (61)..(61): /note="Nucleotide may be methylated to form 5-methylcytosine"
cttttatttaaatgattggaatataaatcctgtttttcagatctgatttcttgacatttgcggggaacactagcatatctgttgcttttgttttaggaacaaaagtaaactctgtagggagt

SEQ ID NO: 5634 - DNA, 122 bp, Homo sapiens
  misc_feature (61)..(62): /note="This region represents a CpG dinucleotide"
  misc_feature (61)..(61): /note="Nucleotide may be methylated to form 5-methylcytosine"
tggggcagatcaccttccttggtggcaatggcaaacttctctgccacaatggctttgagacgttgctcagcttcctgcagcaatttcaggttggcatcaatcatgctccctgctcaacaggg

SEQ ID NO: 5635 - DNA, 122 bp, Homo sapiens
  misc_feature (61)..(62): /note="This region represents a CpG dinucleotide"
  misc_feature (61)..(61): /note="Nucleotide may be methylated to form 5-methylcytosine"
ccgagaacaacagcggtaggaaatcattggagttctcaaattgctccccccacccccacccgcctcgagtttatttaagtgacatcaagggattagagcgaagtcggtcagtagagcactgc

SEQ ID NO: 5636 - DNA, 122 bp, Homo sapiens
  misc_feature (61)..(62): /note="This region represents a CpG dinucleotide"
  misc_feature (61)..(61): /note="Nucleotide may be methylated to form 5-methylcytosine"
cgtatgagggtttcagtttctccatatcctcaccagtactatgtgtatgcttatagcaatcgtacagggtgtgacgtgttatctttttgtggtttttatttgcattttcctgatggctcaag

SEQ ID NO: 5637 - DNA, 122 bp, Homo sapiens
  misc_feature (61)..(62): /note="This region represents a CpG dinucleotide"
  misc_feature (61)..(61): /note="Nucleotide may be methylated to form 5-methylcytosine"
tggggctcaagtgagacagaatatgaaagtgcatgatgcctggtgctggctgcagaccaacgaaaatctctgggccttggtgtttatacaggtgtgcctctaactgtctgtgggtctgcagt

SEQ ID NO: 5638 - DNA, 122 bp, Homo sapiens
  misc_feature (61)..(62): /note="This region represents a CpG dinucleotide"
  misc_feature (61)..(61): /note="Nucleotide may be methylated to form 5-methylcytosine"
tcacagagctctcaagactctgaacaaaacagtggaccatcaccttccaaaggtgatgcgcgcgcgcgcacacacacacacacacacacacacacacacacagtttggcattttgttatagg

SEQ ID NO: 5639 - DNA, 122 bp, Homo sapiens
  misc_feature (61)..(62): /note="This region represents a CpG dinucleotide"
  misc_feature (61)..(61): /note="Nucleotide may be methylated to form 5-methylcytosine"
tgcttaaaggtcacaagattgtgataacaaatcaaaaaccaggttgtgataatatgttgacggtgtaggaacactgtgtaaagaactggagaataataaacattaaggccagtaccggcatt

SEQ ID NO: 5640 - DNA, 122 bp, Homo sapiens
  misc_feature (61)..(62): /note="This region represents a CpG dinucleotide"
  misc_feature (61)..(61): /note="Nucleotide may be methylated to form 5-methylcytosine"
cccacctaccaccggtccctagccaccccttcctggaaaatgtgatggaggagggagagtcggccaactccaacaccacctggccctcagcagcagacctggacgctggcccggaagcagcc

SEQ ID NO: 5641 - DNA, 122 bp, Homo sapiens
  misc_feature (61)..(62): /note="This region represents a CpG dinucleotide"
  misc_feature (61)..(61): /note="Nucleotide may be methylated to form 5-methylcytosine"
agtggggtgtctttgtgtggggaactgactgatgctactttcagggatgacaatagctgccgaaaagttcgagatggatgaaggtttgttattccatcatgattttgctcccaggtttaatg

SEQ ID NO: 5642 - DNA, 122 bp, Homo sapiens
  misc_feature (61)..(62): /note="This region represents a CpG dinucleotide"
  misc_feature (61)..(61): /note="Nucleotide may be methylated to form 5-methylcytosine"
cacagattctcttgcgtaacaccagttgcatgtcagcagggtggctgagctggaccgtcacgcgcacgatcaggaacaaccgctcgtccacgggcgtgcccctgctgagctgagggcagcca

SEQ ID NO: 5643 - DNA, 122 bp, Homo sapiens
  misc_feature (61)..(62): /note="This region represents a CpG dinucleotide"
  misc_feature (61)..(61): /note="Nucleotide may be methylated to form 5-methylcytosine"
agaacaagctgtgctgtttcctgcctcaggccctgcctaatgcacttcctgttccctctgcgtcacatgctgtgtacctccactcttcggtaatcgctggtcagtctcactcattggatctc

SEQ ID NO: 5644 - DNA, 122 bp, Homo sapiens
  misc_feature (61)..(62): /note="This region represents a CpG dinucleotide"
  misc_feature (61)..(61): /note="Nucleotide may be methylated to form 5-methylcytosine"
ccctgggtgccagtctctccttctgtagctccgcaaagctctgggcttgtgtgagagtgtcggtgtgtgtgcatgtgtgggggtgagtctgcatgtgcacctgtcatgtgtagaagcttgta

SEQ ID NO: 5645 - DNA, 122 bp, Homo sapiens
  misc_feature (61)..(62): /note="This region represents a CpG dinucleotide"
  misc_feature (61)..(61): /note="Nucleotide may be methylated to form 5-methylcytosine"
aagtaaaaaattgagttgagtaaattttattctattctttccaggatgttgcaatccctacgcaaccaaggtttcaagttaaagagaatttggctgacccactcacagcaacaaggaaaata

SEQ ID NO: 5646 - DNA, 122 bp, Homo sapiens
  misc_feature (61)..(62): /note="This region represents a CpG dinucleotide"
  misc_feature (61)..(61): /note="Nucleotide may be methylated to form 5-methylcytosine"
accatggtagaagtaatgctttcaaccagcttctcaggttgctctcgggcatctgaagggcgcaataactctgtcatgttaatcagctcttgctgaaaagcaaaccagctgagctgaaagga

SEQ ID NO: 5647 - DNA, 122 bp, Homo sapiens
  misc_feature (61)..(62): /note="This region represents a CpG dinucleotide"
  misc_feature (61)..(61): /note="Nucleotide may be methylated to form 5-methylcytosine"
ggcacggcagatggtgatgccccttgcttctggatggacacaggtagacactatgtggtccgtggatgtctcacgacagagctcaacagaaaagccccaggctggaggcgaggcactaagca

SEQ ID NO: 5648 - DNA, 122 bp, Homo sapiens
  misc_feature (61)..(62): /note="This region represents a CpG dinucleotide"
  misc_feature (61)..(61): /note="Nucleotide may be methylated to form 5-methylcytosine"
aagaaaactccacgaagaggaaaaactgaaaagggaggagagtgtcaaaaagaaggatggcgaggaaaaaggcaaacaggaagcacaagacaagctgggtcggcttttccatcaacaccaag

SEQ ID NO: 5649 - DNA, 122 bp, Homo sapiens
  misc_feature (61)..(62): /note="This region represents a CpG dinucleotide"
  misc_feature (61)..(61): /note="Nucleotide may be methylated to form 5-methylcytosine"
gaggcaaaacataactgtaagtttagaatgggggtgagaggctgtcatctggagggagagcggggggcctcagtagcctcttgagggaagtgggactcctggctccccagggcctggcctac

SEQ ID NO: 5650 - DNA, 122 bp, Homo sapiens
  misc_feature (61)..(62): /note="This region represents a CpG dinucleotide"
  misc_feature (61)..(61): /note="Nucleotide may be methylated to form 5-methylcytosine"
aaaacgattctcatttatttcccctgcatctgtactttcctcttaccatcccctccccttcgttaatgaaattcctgtctaagaggtgaaagattccccatgggcttgcgaataaaaagcca

SEQ ID NO: 5651 - DNA, 122 bp, Homo sapiens
  misc_feature (61)..(62): /note="This region represents a CpG dinucleotide"
  misc_feature (61)..(61): /note="Nucleotide may be methylated to form 5-methylcytosine"
gtcctagataaaatatggccagcaattccattaacaaaacactgacaagacacctcagggcgagctgtacattgacaacagcatcgtcaagcagaatgcacttcagggaaaacataataagg

SEQ ID NO: 5652 - DNA, 122 bp, Homo sapiens
  misc_feature (61)..(62): /note="This region represents a CpG dinucleotide"
  misc_feature (61)..(61): /note="Nucleotide may be methylated to form 5-methylcytosine"
ggagcgcagccagttattcatggcacaccgggacagactctcgatccaggttctgcaaaacgagcaccaccaagcccttaatgcagggtccccagccccggggccaggcaccaggaaggctg

SEQ ID NO: 5653 - DNA, 122 bp, Homo sapiens
  misc_feature (61)..(62): /note="This region represents a CpG dinucleotide"
  misc_feature (61)..(61): /note="Nucleotide may be methylated to form 5-methylcytosine"
ccctactgctggcctaggcctcgggctgtctggcggccgcgactcagcgctgacctcgggcgcaacccagtcaggcttcgtgtccttcaggggttctaggctaacaggcgaaaggaagggcg

SEQ ID NO: 5654 - DNA, 122 bp, Homo sapiens
  misc_feature (61)..(62): /note="This region represents a CpG dinucleotide"
  misc_feature (61)..(61): /note="Nucleotide may be methylated to form 5-methylcytosine"
gggaggagggagcggtgcagtctgtggcagactttggcacagctgctcaggactgttatacgagtgtcagagggcacaaactggttagcacttggttcaggtatttttaattcagatatttg

SEQ ID NO: 5655 - DNA, 122 bp, Homo sapiens
  misc_feature (61)..(62): /note="This region represents a CpG dinucleotide"
  misc_feature (61)..(61): /note="Nucleotide may be methylated to form 5-methylcytosine"
aagagggcagcactttcttttaaaatttaaagtatgactaaaaaaatacaatcaaattaacgttttctatcatgaagttaagcttgaatgatttacaggaagatgggagcctctctgtcctg

SEQ ID NO: 5656 - DNA, 122 bp, Homo sapiens
  misc_feature (61)..(62): /note="This region represents a CpG dinucleotide"
  misc_feature (61)..(61): /note="Nucleotide may be methylated to form 5-methylcytosine"
gacaggctcatccctcttatcagacaggctggacttgctgggaagttgacactctgggggcggccttcatggataaatactctagttttcttgcccctcaagtgagacaaccccaaggcgtg

SEQ ID NO: 5657 - DNA, 122 bp, Homo sapiens
  misc_feature (61)..(62): /note="This region represents a CpG dinucleotide"
  misc_feature (61)..(61): /note="Nucleotide may be methylated to form 5-methylcytosine"
gctaaaggtcattcccttgaaatgcatcataccaaatggaatcttatttcttgccaaaaacgttgtgggtgtctgtcacaacatttatcttccttccatcaacagcagcagcagcaacatca

SEQ ID NO: 5658 - DNA, 122 bp, Homo sapiens
  misc_feature (61)..(62): /note="This region represents a CpG dinucleotide"
  misc_feature (61)..(61): /note="Nucleotide may be methylated to form 5-methylcytosine"
caagaggaaacaatttctctaccaggggtgtgtatatgtgtgtgtgtatgtgagaatgtgcgttaccagcatcaatttggataggtaaatggaaacgtgattactccacaatgatgcaagta

SEQ ID NO: 5659 - DNA, 122 bp, Homo sapiens
  misc_feature (61)..(62): /note="This region represents a CpG dinucleotide"
  misc_feature (61)..(61): /note="Nucleotide may be methylated to form 5-methylcytosine"
atggataaataacagtatctgagacctgctgttggtgtatgttaaatgttctttaaaaagcgtcaaccatccccaacacacgactctcctgaaagggaaaggtatgcgggtttgcagaggag

SEQ ID NO: 5660 - DNA, 122 bp, Homo sapiens
  misc_feature (61)..(62): /note="This region represents a CpG dinucleotide"
  misc_feature (61)..(61): /note="Nucleotide may be methylated to form 5-methylcytosine"
tcacattggtgacaagcagaagagattaggttgtcctttgatttgttgatacacatgccacgctgtcagatgatatttgagattatgccctgagctcagagatgcatagcgtgaggatgaca

SEQ ID NO: 5661 - DNA, 122 bp, Homo sapiens
  misc_feature (61)..(62): /note="This region represents a CpG dinucleotide"
  misc_feature (61)..(61): /note="Nucleotide may be methylated to form 5-methylcytosine"
gactcccaccccacccgcaatacagggttgaggcctctgttgcaggtttttcttgattttcgttactggatagcctcagtccttcttaggtgagatcatgctgttcttcttccttcatatat

SEQ ID NO: 5662 - DNA, 122 bp, Homo sapiens
  misc_feature (61)..(62): /note="This region represents a CpG dinucleotide"
  misc_feature (61)..(61): /note="Nucleotide may be methylated to form 5-methylcytosine"
aactttcagctcagctggttccagagtttcacaacccagctctgtcttgcttacatctgacgtgctacttcactggtgtgacctccagtgtgcttagtggataatgacactgcataatcccc

SEQ ID NO: 5663 - DNA, 122 bp, Homo sapiens
  misc_feature (61)..(62): /note="This region represents a CpG dinucleotide"
  misc_feature (61)..(61): /note="Nucleotide may be methylated to form 5-methylcytosine"
ttgcccaactggtctcaagtgatcctcctgtgtcatcctcccagagtgttaggattaaggcgtgagccatggctgctagcctgccattcttttcttagcacttgaaaaatcttgtgctgctt

SEQ ID NO: 5664 - DNA, 122 bp, Homo sapiens
  misc_feature (61)..(62): /note="This region represents a CpG dinucleotide"
  misc_feature (61)..(61): /note="Nucleotide may be methylated to form 5-methylcytosine"
ccttgccttccataatggggaatcaacagtctaaaactgaaaattccagaagttgcaacacgtgtgttattacttggaagtaaataccaactgggttggtccattccggctgctctaacaaa

SEQ ID NO: 5665 - DNA, 122 bp, Homo sapiens
  misc_feature (61)..(62): /note="This region represents a CpG dinucleotide"
  misc_feature (61)..(61): /note="Nucleotide may be methylated to form 5-methylcytosine"
tccgaatccccccagtgctgcacccgaacgcctccctcccacgcagcctcctgccgtctccgcaggttttaaatcagacgccgctcaggctgtgcccaggctgctgagccaaaagcgggatc

SEQ ID NO: 5666 - DNA, 122 bp, Homo sapiens
  misc_feature (61)..(62): /note="This region represents a CpG dinucleotide"
  misc_feature (61)..(61): /note="Nucleotide may be methylated to form 5-methylcytosine"
cagacaactggacatgtagatccaggaaaagagccctcctctgagtcacgccaccctgtgcgtcatgggagataaagacttgtattaaacaagctggtggaaagaaacacatttatcgagga

SEQ ID NO: 5667 - DNA, 122 bp, Homo sapiens
  misc_feature (61)..(62): /note="This region represents a CpG dinucleotide"
  misc_feature (61)..(61): /note="Nucleotide may be methylated to form 5-methylcytosine"
atatataataaacatttgttattactgtgtatatttatataatgaatatcagactcactacgtgctcagcagcatcctgatgtgttcacaggaattgcatagttgagataccctatgaacca

SEQ ID NO: 5668 - DNA, 122 bp, Homo sapiens
  misc_feature (61)..(62): /note="This region represents a CpG dinucleotide"
  misc_feature (61)..(61): /note="Nucleotide may be methylated to form 5-methylcytosine"
gcaacttcctccacaaggtctcccaggagctgaatggaaaagccgagaggaagcaaagggcgtctgaaatctagacagagccagagtagtcacctagactgtctgggatgaaccatcccttg

SEQ ID NO: 5669 - DNA, 122 bp, Homo sapiens
  misc_feature (61)..(62): /note="This region represents a CpG dinucleotide"
  misc_feature (61)..(61): /note="Nucleotide may be methylated to form 5-methylcytosine"
cacgctcaggagcgatgagaggggcgccctggccacgcttcaggaaagcctgtgtctgcgcgcggggcaaggggctccacgacaaaaggacaagatttgacttaaattaagtttttcccttg

SEQ ID NO: 5670 - DNA, 122 bp, Homo sapiens
  misc_feature (61)..(62): /note="This region represents a CpG dinucleotide"
  misc_feature (61)..(61): /note="Nucleotide may be methylated to form 5-methylcytosine"
taataactgttggaggctgaacagacttttctgtgaccccttattagcagtgccaggatgcgaagattgctcatcagccatggtgagcaccacaaattagtcatgtttggaggcagcaggtt

SEQ ID NO: 5671 - DNA, 122 bp, Homo sapiens
  misc_feature (61)..(62): /note="This region represents a CpG dinucleotide"
  misc_feature (61)..(61): /note="Nucleotide may be methylated to form 5-methylcytosine"
aaaggaaaaggttcactttcctgagcccgcaaaatcagatggcccaggacacagaagctccgccctccactgccctgggtcgagatcttcctctgtgtacagtgaattcaccattttaccac

SEQ ID NO: 5672 - DNA, 122 bp, Homo sapiens
  misc_feature (61)..(62): /note="This region represents a CpG dinucleotide"
  misc_feature (61)..(61): /note="Nucleotide may be methylated to form 5-methylcytosine"
aggtcgggagttcgagactagcctggccaacatagcaaaaccctgtctctactaacaacacgaaaattagccaggagtggtggcccgtgcctgtaatgccagctacttaggaggctgaggca

SEQ ID NO: 5673 - DNA, 122 bp, Homo sapiens
  misc_feature (61)..(62): /note="This region represents a CpG dinucleotide"
  misc_feature (61)..(61): /note="Nucleotide may be methylated to form 5-methylcytosine"
aagagtttgttatttttcttaaacatttaattttcaatgcattctggttattttctcctacgcatcttagagaagaggttatttgctgaaattgtcaatgcggctttggctacattatctga

SEQ ID NO: 5674 - DNA, 122 bp, Homo sapiens
  misc_feature (61)..(62): /note="This region represents a CpG dinucleotide"
  misc_feature (61)..(61): /note="Nucleotide may be methylated to form 5-methylcytosine"
aacagcacactgcccccacgatccaatcacctcctaccagtttctgcccttgacacgtggcgatcgtaggattacaattcgagatgagatttgggtggggaacagagccaaaccatatcacc

SEQ ID NO: 5675 - DNA, 122 bp, Homo sapiens
  misc_feature (61)..(62): /note="This region represents a CpG dinucleotide"
  misc_feature (61)..(61): /note="Nucleotide may be methylated to form 5-methylcytosine"
gtgccttttcaaattttctgttttatgtaaagctgtgtttggggcattaacaatgcataacgataaccacttaacaaacactgcgaagggaatctgaagtaggtggcctctagggtggggga

SEQ ID NO: 5676 - DNA, 122 bp, Homo sapiens
  misc_feature (61)..(62): /note="This region represents a CpG dinucleotide"
  misc_feature (61)..(61): /note="Nucleotide may be methylated to form 5-methylcytosine"
gggcatctcaaatgagagggcagcatacatacatgtaattggttgcttttttctttccctcggcagtctgtaaaaaatgtgaaaatgctcctgcttctgcctagccattaaaaggcagtggc

SEQ ID NO: 5677 - DNA, 122 bp, Homo sapiens
  misc_feature (61)..(62): /note="This region represents a CpG dinucleotide"
  misc_feature (61)..(61): /note="Nucleotide may be methylated to form 5-methylcytosine"
gaggaggaactgctgagggcagggccatgagctcagagctggggacaatggccctgctatcggggcacttccacaatggctgctcatcagtcctggcagagactaaagggcagacttttttt

SEQ ID NO: 5678 - DNA, 122 bp, Homo sapiens
  misc_feature (61)..(62): /note="This region represents a CpG dinucleotide"
  misc_feature (61)..(61): /note="Nucleotide may be methylated to form 5-methylcytosine"
tgcccagaagggtttcctattgtgacacctcatttccttcttaggatcatgggattttgtcgtttgcctcttctgtggatgagtgaatctcatcccaagagcctgttttcgatgtatggggt

SEQ ID NO: 5679 - DNA, 122 bp, Homo sapiens
  misc_feature (61)..(62): /note="This region represents a CpG dinucleotide"
  misc_feature (61)..(61): /note="Nucleotide may be methylated to form 5-methylcytosine"
cttgcttggtaaaactacctctaataatttaggaatatatttgccttctgtgaaagccatcgcaaagtataaaaatagtgtaagtacaggtatttaggctcacaaaatatcgttatgactga

SEQ ID NO: 5680 - DNA, 122 bp, Homo sapiens
  misc_feature (61)..(62): /note="This region represents a CpG dinucleotide"
  misc_feature (61)..(61): /note="Nucleotide may be methylated to form 5-methylcytosine"
gcatcctcttcaggacaactggcttagactctaaaaagtctaaacaaacaaaacaaaccacgggaactggtccaccttaaaagagatgaaagggagagaacaaaatgcaatgagtaaacttg

SEQ ID NO: 5681 - DNA, 122 bp, Homo sapiens
  misc_feature (61)..(62): /note="This region represents a CpG dinucleotide"
  misc_feature (61)..(61): /note="Nucleotide may be methylated to form 5-methylcytosine"
atctccttacttccatatggcactgttgtacactcatttactcagagccagaaacgtcagcgtcatcttggatttttcttatgctctttctctctctagtcatatgccagactttaaactct

SEQ ID NO: 5682 - DNA, 122 bp, Homo sapiens
  misc_feature (61)..(62): /note="This region represents a CpG dinucleotide"
  misc_feature (61)..(61): /note="Nucleotide may be methylated to form 5-methylcytosine"
tggcaattcattctaggaatgctcacaaacccgtaggccatatgaatcatcaaattagtacgcttggagaaattcaggatgaaaactaatttctgtgtattaaatttcattgaaccctgagc

SEQ ID NO: 5683 - DNA, 122 bp, Homo sapiens
  misc_feature (61)..(62): /note="This region represents a CpG dinucleotide"
  misc_feature (61)..(61): /note="Nucleotide may be methylated to form 5-methylcytosine"
tgacgcatgactggtgaagttagtgactcctggtgactgactcagtccccaacctctgcacggaggtcacaggttccagcaagtcccagcctcgaatcctgccttggtctttctgccaccag

SEQ ID NO: 5684 - DNA, 122 bp, Homo sapiens
  misc_feature (61)..(62): /note="This region represents a CpG dinucleotide"
  misc_feature (61)..(61): /note="Nucleotide may be methylated to form 5-methylcytosine"
acacatctgaggaggcaccattcacattggggacacatacagaactaacttacctgggagcgctgcaggtgagtgtagacattccaggcctcttggctgagtcctgaagcagcaagagagcg

SEQ ID NO: 5685 - DNA, 122 bp, Homo sapiens
  misc_feature (61)..(62): /note="This region represents a CpG dinucleotide"
  misc_feature (61)..(61): /note="Nucleotide may be methylated to form 5-methylcytosine"
acttttgtaagacaagcagtgaagtctgtcctcacaccccaccccatgactacagaatgacgtaactgaaagctgaaaggttctgctcctaagtgacacacagtagaaaattaaaatatcta

SEQ ID NO: 5686 - DNA, 122 bp, Homo sapiens
  misc_feature (61)..(62): /note="This region represents a CpG dinucleotide"
  misc_feature (61)..(61): /note="Nucleotide may be methylated to form 5-methylcytosine"
ctcaaaatacatttaaaaatacaacatgtggtttaattttgttgttttagttcagtcctacgtaaagagaggaagagtataaataagtaacctttctaagttcttggatccctgtgtcaaga

SEQ ID NO: 5687 - DNA, 122 bp, Homo sapiens
  misc_feature (61)..(62): /note="This region represents a CpG dinucleotide"
  misc_feature (61)..(61): /note="Nucleotide may be methylated to form 5-methylcytosine"
ttgattatggtaattgttttgctcaggttgtacgggtatggccaattttgtttgaaagctcgctctttctctgcgctttcctgtcgagttcccttcaggttctggtttcctccgacggtggc

SEQ ID NO: 5688 - DNA, 122 bp, Homo sapiens
  misc_feature (61)..(62): /note="This region represents a CpG dinucleotide"
  misc_feature (61)..(61): /note="Nucleotide may be methylated to form 5-methylcytosine"
ggtgccatgtcaatgcaaaacacagttacttttgcaccaacctaaagttacaacaccatacggcaacaaatggccctgcagccaggaagtaagacagtgctgaagaactggtacaaattaag

SEQ ID NO: 5689 - DNA, 122 bp, Homo sapiens
  misc_feature (61)..(62): /note="This region represents a CpG dinucleotide"
  misc_feature (61)..(61): /note="Nucleotide may be methylated to form 5-methylcytosine"
taaaaacacctgtgatgccaatgtggacattgccgctgccatgtctttacacgcatgtgtcgtatagctctgtcatcgagttgaggaagtccatggtttgcaaataagggtgggggaatcaa

SEQ ID NO: 5690 - DNA, 122 bp, Homo sapiens
  misc_feature (61)..(62): /note="This region represents a CpG dinucleotide"
  misc_feature (61)..(61): /note="Nucleotide may be methylated to form 5-methylcytosine"
atcttgtcaccctcagacatggccctagtcagtttcgaaagtctcataaaatctcagaagcgatggaactgggcttgagggttttttagactctgaaaaacagcttttcaaaaaaacaccct

SEQ ID NO: 5691 - DNA, 122 bp, Homo sapiens
  misc_feature (61)..(62): /note="This region represents a CpG dinucleotide"
  misc_feature (61)..(61): /note="Nucleotide may be methylated to form 5-methylcytosine"
agtatattaggataagaggccctaccctttcccatctcacttcctcatagaaatctcctacgactgatcaagatggtcatgcctcagttcaaactggacagggtcttagaatgtgacctctc

SEQ ID NO: 5692 - DNA, 122 bp, Homo sapiens
  misc_feature (61)..(62): /note="This region represents a CpG dinucleotide"
  misc_feature (61)..(61): /note="Nucleotide may be methylated to form 5-methylcytosine"
ctgaggtcagtctctcccaagaaggcctctccagagagccgggtgctgggccatctccctcggacagcgactgttttatcgtctccatcgatggtccgtaaagacactcagtcaaaaggctg

SEQ ID NO: 5693 - DNA, 122 bp, Homo sapiens
  misc_feature (61)..(62): /note="This region represents a CpG dinucleotide"
  misc_feature (61)..(61): /note="Nucleotide may be methylated to form 5-methylcytosine"
ctctgcaatggctgctggggactgtgtctgttgcaaggaggctcccctgcagtgaggagccggggcactgcaagtctgttccatagcagccctttttgcaaatggtagttgatttttgcaga

SEQ ID NO: 5694 - DNA, 122 bp, Homo sapiens
  misc_feature (61)..(62): /note="This region represents a CpG dinucleotide"
  misc_feature (61)..(61): /note="Nucleotide may be methylated to form 5-methylcytosine"
ccaggaagcttcctttatttatttccaagcatctatataaagaaaggctgcacttgattgcgtaagcatgagccttttgttaggcagcgtggatgttgcaagtttaaaccccaactaggaaa

SEQ ID NO: 5695 - DNA, 122 bp, Homo sapiens
  misc_feature (61)..(62): /note="This region represents a CpG dinucleotide"
  misc_feature (61)..(61): /note="Nucleotide may be methylated to form 5-methylcytosine"
ctccttccatctccacagcactgtgtgagggatcagtgataagagacggtgaaagacatgcgcaaatggataaataataagcaggatatgtagaatgacacaacaattgatgagtaatttag

SEQ ID NO: 5696 - DNA, 122 bp, Homo sapiens
  misc_feature (61)..(62): /note="This region represents a CpG dinucleotide"
  misc_feature (61)..(61): /note="Nucleotide may be methylated to form 5-methylcytosine"
gaagcgcaagccctattcgaagttgcaactggcagagctggagggcgagtttctggtcaacgagttcatcacacgccagcgccggagggaactctcagaccgcttgaatcttagtgaccagc

SEQ ID NO: 5697 - DNA, 122 bp, Homo sapiens
  misc_feature (61)..(62): /note="This region represents a CpG dinucleotide"
  misc_feature (61)..(61): /note="Nucleotide may be methylated to form 5-methylcytosine"
ttatcccctggactcctgggtgacaaaggtcagttgcctgccctgcagcttgctgtggttcgtagctccgaagctcccaataagctctcggcctgaggaaacaccctcccttggtggttgca

SEQ ID NO: 5698 - DNA, 122 bp, Homo sapiens
  misc_feature (61)..(62): /note="This region represents a CpG dinucleotide"
  misc_feature (61)..(61): /note="Nucleotide may be methylated to form 5-methylcytosine"
tgaacctcttatggtggcttccactttaggagtggtaggtaaccaactgccaaccaacaacgtgccagactgcatcctaaggcctttagatgaattaactctccaaatcctcacgatagtcc

SEQ ID NO: 5699 - DNA, 122 bp, Homo sapiens
  misc_feature (61)..(62): /note="This region represents a CpG dinucleotide"
  misc_feature (61)..(61): /note="Nucleotide may be methylated to form 5-methylcytosine"
ttttctttgttcatcctatctctagatatctgtttctgctagttctgaaagcattgagaacgtatcctacctgcctttggagaaaagtaaacaaagagatttataacctctctctttttttt

SEQ ID NO: 5700 - DNA, 122 bp, Homo sapiens
  misc_feature (61)..(62): /note="This region represents a CpG dinucleotide"
  misc_feature (61)..(61): /note="Nucleotide may be methylated to form 5-methylcytosine"
agaggcccaggagccagtctgccaaagtgatctcagagatgacatcattgtccaccattgcgttagtccctaaggcgactcagacagaaacaaagggaaggagagaagccaggcagacggag

SEQ ID NO: 5701 - DNA, 122 bp, Homo sapiens
  misc_feature (61)..(62): /note="This region represents a CpG dinucleotide"
  misc_feature (61)..(61): /note="Nucleotide may be methylated to form 5-methylcytosine"
ttttgaaatgagcgataagggaaggtattgcaagaacagatgagaaaagaatacgattaacgcctttataaaagttgggcagtggagtagtaactaattttaagaggttaagtaaggagacg

SEQ ID NO: 5702 - DNA, 122 bp, Homo sapiens
  misc_feature (61)..(62): /note="This region represents a CpG dinucleotide"
  misc_feature (61)..(61): /note="Nucleotide may be methylated to form 5-methylcytosine"
actgagacagtagtgttgcagtaaagaaagagtatactgcaagggagtcaagcagaatgacgggagatatttctcaaattcacctcaccaggaactcagaggttgggttttttaaggataat

SEQ ID NO: 5703 - DNA, 122 bp, Homo sapiens
  misc_feature (61)..(62): /note="This region represents a CpG dinucleotide"
  misc_feature (61)..(61): /note="Nucleotide may be methylated to form 5-methylcytosine"
ctggggccgagtggcgggaagccccctctcatttccaattatcaggcagcagaggcttgacgcacagccagcactgaaggccagagtaggcctggctgtcaccagcattgtttggctccatt

SEQ ID NO: 5704 - DNA, 122 bp, Homo sapiens
  misc_feature (61)..(62): /note="This region represents a CpG dinucleotide"
  misc_feature (61)..(61): /note="Nucleotide may be methylated to form 5-methylcytosine"
gcgtaatttcgagagggagggccgagactgcctggggggaagtcccatggctacctggttcgaggcagctctttgatatctcctggagcactcctggtcctagaaccagacagctctcaact

SEQ ID NO: 5705 - DNA, 122 bp, Homo sapiens
  misc_feature (61)..(62): /note="This region represents a CpG dinucleotide"
  misc_feature (61)..(61): /note="Nucleotide may be methylated to form 5-methylcytosine"
gtctcataccatcaaaaggtagcaccttctgcagctgctttcagaaaaaatgccaacaaacgccaagcaaatcactgttttgatgagattttatgcagaaattcttagggccccaagaagac

SEQ ID NO: 5706 - DNA, 122 bp, Homo sapiens
  misc_feature (61)..(62): /note="This region represents a CpG dinucleotide"
  misc_feature (61)..(61): /note="Nucleotide may be methylated to form 5-methylcytosine"
tttcagttactatatgtactcaccaacatttaacttcccattttcaagttgcagcaatctcgtaagtatgtagtaatctttcactgaagttttaagttgcatttccccaatgtctaatgtta

SEQ ID NO: 5707 - DNA, 122 bp, Homo sapiens
  misc_feature (61)..(62): /note="This region represents a CpG dinucleotide"
  misc_feature (61)..(61): /note="Nucleotide may be methylated to form 5-methylcytosine"
cttgtcctgagaagtggcatcttcatatggcattcaggcttcttcacattctggtgtgaacgcctgccttcccccttttccaccactcccctttacagacctcaagtatcaaaacaacacta

SEQ ID NO: 5708 - DNA, 122 bp, Homo sapiens
  misc_feature (61)..(62): /note="This region represents a CpG dinucleotide"
  misc_feature (61)..(61): /note="Nucleotide may be methylated to form 5-methylcytosine"
gcattcacaatatggctaactggcacaagaggcctagcttttggcctatctttgtttacacgccttcctcacaaagcttaatcatttctactttttttaaagcaagagatgtgcaactcttc

SEQ ID NO: 5709 - DNA, 122 bp, Homo sapiens
  misc_feature (61)..(62): /note="This region represents a CpG dinucleotide"
  misc_feature (61)..(61): /note="Nucleotide may be methylated to form 5-methylcytosine"
ttagtttaatgaatttttacacatgtatacaggcacataaccaccaccttgatcaaaacacggaacattttgagcaccttaaaaggcccccttttatttccttctaacaatggggacttttt

SEQ ID NO: 5710 - DNA, 122 bp, Homo sapiens
  misc_feature (61)..(62): /note="This region represents a CpG dinucleotide"
  misc_feature (61)..(61): /note="Nucleotide may be methylated to form 5-methylcytosine"
ctggctagggctgtggcaaacagggtgccattaggagtgcagcgcgagtggctgccagcccgttcacaacaccacatgtgcggtgctctcagcccaaggggccctctgggagctgacaggaa

SEQ ID NO: 5711 - DNA, 122 bp, Homo sapiens
  misc_feature (61)..(62): /note="This region represents a CpG dinucleotide"
  misc_feature (61)..(61): /note="Nucleotide may be methylated to form 5-methylcytosine"
ggcagagctaagcaggccacagacatctttccccagaaaagctgagggtgagaggcagggcggttcaccctccggatggctgtttgtaaagtaaatattgattttgagccatcccccaacct

SEQ ID NO: 5712 - DNA, 122 bp, Homo sapiens
  misc_feature (61)..(62): /note="This region represents a CpG dinucleotide"
  misc_feature (61)..(61): /note="Nucleotide may be methylated to form 5-methylcytosine"
gccaagccgaagtcaccgagcaggcacgggtagagatgggatgcccaggctcccggctgccgcccagccccaccctgcgccgaaggagactgagagccgagctgcgccggcggagactcaaa

SEQ ID NO: 5713 - DNA, 122 bp, Homo sapiens
  misc_feature (61)..(62): /note="This region represents a CpG dinucleotide"
  misc_feature (61)..(61): /note="Nucleotide may be methylated to form 5-methylcytosine"
gctagacctggtttccacttgatccttttcttcaagataactcacctgcccagtgataaacgtatggcccagcgtccaccctctcaaaagcaatttgtctctggaatcctctcttccaagct

SEQ ID NO: 5714 - DNA, 122 bp, Homo sapiens
  misc_feature (61)..(62): /note="This region represents a CpG dinucleotide"
  misc_feature (61)..(61): /note="Nucleotide may be methylated to form 5-methylcytosine"
tagtggagagagagcgagtcttcctcagctttaggcacagagcatgcaaacggggattagcgatgcacagcttgacctgctccaggcatgaaaaggcagccagtctggctagtattccaggg

SEQ ID NO: 5715 - DNA, 122 bp, Homo sapiens
  misc_feature (61)..(62): /note="This region represents a CpG dinucleotide"
  misc_feature (61)..(61): /note="Nucleotide may be methylated to form 5-methylcytosine"
ctgcaaagggggtgatcagacactggactgtggtaacacctcagaggggtgggctccagacgcagcctggccctacctggcaccctcccttgcatctgtagtgcctcctgtcctgacttagg

SEQ ID NO: 5716 - DNA, 122 bp, Homo sapiens
  misc_feature (61)..(62): /note="This region represents a CpG dinucleotide"
  misc_feature (61)..(61): /note="Nucleotide may be methylated to form 5-methylcytosine"
caagttacggagaggctaatgaaattggagttcaaaaaccctcttttgacagctgcaattcggtaccagctggtggcagtaatctactccagactaaacatcaatgaggatgattcagctct

SEQ ID NO: 5717 - DNA, 122 bp, Homo sapiens
  misc_feature (61)..(62): /note="This region represents a CpG dinucleotide"
  misc_feature (61)..(61): /note="Nucleotide may be methylated to form 5-methylcytosine"
tgtggtcagggtgggcctctcatagaaagtgactaacaaagtagcccaacatggggtaggcgtgcatttcaggaggaggaaccaggtggttgcacatcaggctgttctgtgtgtcaagaact

SEQ ID NO: 5718 - DNA, 122 bp, Homo sapiens
  misc_feature (61)..(62): /note="This region represents a CpG dinucleotide"
  misc_feature (61)..(61): /note="Nucleotide may be methylated to form 5-methylcytosine"
ttcagctcctggcaacttggaggaaacaggttcctatagggctgagtcagggtctatgatcgcacagtatggatgactcactggggctattcctatggatcatttggaatttcactggtagt

SEQ ID NO: 5719 - DNA, 122 bp, Homo sapiens
  misc_feature (61)..(62): /note="This region represents a CpG dinucleotide"
  misc_feature (61)..(61): /note="Nucleotide may be methylated to form 5-methylcytosine"
ttccaggctcctgaagacgcctgggctgcctgattgacagcccagaagctgaggcctgaacgcatctgccaggtggttattgctctgcttccatggaaacgcacacaggacgggggagctga

SEQ ID NO: 5720 - DNA, 122 bp, Homo sapiens
  misc_feature (61)..(62): /note="This region represents a CpG dinucleotide"
  misc_feature (61)..(61): /note="Nucleotide may be methylated to form 5-methylcytosine"
cgtaccagctgtgcctgttctctttcaaagagcttcctggaagctcagttcagtgacttccgcttacatgtcattaaccaaaactgtgtcacattgccacccgtagctggagacaaggctgg

SEQ ID NO: 5721 - DNA, 122 bp, Homo sapiens
  misc_feature (61)..(62): /note="This region represents a CpG dinucleotide"
  misc_feature (61)..(61): /note="Nucleotide may be methylated to form 5-methylcytosine"
gtgacccacggaacttagcccctctgttctgtttgcatacctgcaaattgtgggcattcacgccgggactgccaactcaccaggttatttatagtgacaagagagtgagacagtgggcttga

SEQ ID NO: 5722 - DNA, 122 bp, Homo sapiens
  misc_feature (61)..(62): /note="This region represents a CpG dinucleotide"
  misc_feature (61)..(61): /note="Nucleotide may be methylated to form 5-methylcytosine"
ctgggactacaggtgcatgccaccacgccaagctaatatttaaaaaatttttttagataccgggtcttgctttgttgcccaggctggtcttcaacttctgggctcaagcaatcctcccacct

SEQ ID NO: 5723 - DNA, 122 bp, Homo sapiens
  misc_feature (61)..(62): /note="This region represents a CpG dinucleotide"
  misc_feature (61)..(61): /note="Nucleotide may be methylated to form 5-methylcytosine"
ctcagttttgtttttaaacccataggggagacagtttccggacgcccaacaatcacagggcggcccaggaccgagagagagcaatagactcgcctcttgcttccgcatccccagttctggtc

SEQ ID NO: 5724 - DNA, 122 bp, Homo sapiens
  misc_feature (61)..(62): /note="This region represents a CpG dinucleotide"
  misc_feature (61)..(61): /note="Nucleotide may be methylated to form 5-methylcytosine"
gatccatctgcatagaactccctgcctgctctctttagttaactacattttcccaaattacgtaatgccttttactatgctatgagaaataagaaaaagtatgagttatatactgttgtgta

SEQ ID NO: 5725 - DNA, 122 bp, Homo sapiens
  misc_feature (61)..(62): /note="This region represents a CpG dinucleotide"
  misc_feature (61)..(61): /note="Nucleotide may be methylated to form 5-methylcytosine"
atcaatttcatggttgtcagcaatgcctaatccatcttccatagtctggaaccactcaggcggcagactcccttgaggtgggagtgctccttgtactcacttgtgttcctgccatcctcggg

SEQ ID NO: 5726 - DNA, 122 bp, Homo sapiens
  misc_feature (61)..(62): /note="This region represents a CpG dinucleotide"
  misc_feature (61)..(61): /note="Nucleotide may be methylated to form 5-methylcytosine"
cgaccagctaggattccctgcaacaatggataggcaatgagtatcagactgtacctggcccgtgttcaacagcgccactgtgtggcagtgaaaagcaagtgcagggtagaccaatgagacct

SEQ ID NO: 5727 - DNA, 122 bp, Homo sapiens
  misc_feature (61)..(62): /note="This region represents a CpG dinucleotide"
  misc_feature (61)..(61): /note="Nucleotide may be methylated to form 5-methylcytosine"
caatctaaagtctatggtttaatctcttacttaaatacattcatttgcatttgagtaactcgacagtgatgcagggcaggcgacccccggaaactggggtttagcccacgagggttattggc

SEQ ID NO: 5728 - DNA, 122 bp, Homo sapiens
  misc_feature (61)..(62): /note="This region represents a CpG dinucleotide"
  misc_feature (61)..(61): /note="Nucleotide may be methylated to form 5-methylcytosine"
tcacatctttgggcctaaagttacacagcaagctttaaaaattgcaactgctgggctgggcgcggtggctcatgcgtgtaatctcagcactttgagaggccaaagtggatgaatcacctgag

SEQ ID NO: 5729 - DNA, 122 bp, Homo sapiens
  misc_feature (61)..(62): /note="This region represents a CpG dinucleotide"
  misc_feature (61)..(61): /note="Nucleotide may be methylated to form 5-methylcytosine"
aagcctaggtcaaatgcctcctctttctttattcttcaggaaacacaaagtaccagagcacgttcctggtgcagaagatgcaacagaaagtgggatgtaagtgatctctatcctcacagagc

SEQ ID NO: 5730 - DNA, 122 bp, Homo sapiens
  misc_feature (61)..(62): /note="This region represents a CpG dinucleotide"
  misc_feature (61)..(61): /note="Nucleotide may be methylated to form 5-methylcytosine"
gttttgttgtcgttccccctgcttaaagcacttgatgcataactctgtctaccttcattccgtagtaagacagagacgcttggcttcagacattttcctttgggtattaatgtgtaagttgt

SEQ ID NO: 5731 - DNA, 122 bp, Homo sapiens
  misc_feature (61)..(62): /note="This region represents a CpG dinucleotide"
  misc_feature (61)..(61): /note="Nucleotide may be methylated to form 5-methylcytosine"
gtactgtatattaaacatttaaagtgatgttgctactgcttccttatctggaccattaatcgggaagcttcccaagaacatggttttataagtgaataagaagaaaggagaatgaggaagag

SEQ ID NO: 5732 - DNA, 122 bp, Homo sapiens
  misc_feature (61)..(62): /note="This region represents a CpG dinucleotide"
  misc_feature (61)..(61): /note="Nucleotide may be methylated to form 5-methylcytosine"
ctctgccggggagcgccagactcagatgaaaggtattatgacattcgagatgaataatgacgtaagaaggacttactctattgtatatcacggtgcagtatcaaaacattttgtcccatgag

SEQ ID NO: 5733 - DNA, 122 bp, Homo sapiens
  misc_feature (61)..(62): /note="This region represents a CpG dinucleotide"
  misc_feature (61)..(61): /note="Nucleotide may be methylated to form 5-methylcytosine"
gcagaggatatctgccttatctgacaaacatcatctcagctcaggaagccatgtacaatccgtctatcagatctgacattggtggtatctacgcagcccttcccagcacacaccctgccttt

SEQ ID NO: 5734 - DNA, 122 bp, Homo sapiens
  misc_feature (61)..(62): /note="This region represents a CpG dinucleotide"
  misc_feature (61)..(61): /note="Nucleotide may be methylated to form 5-methylcytosine"
caggcaggtggagtggttctctgaagaaaaatctccactgttagaggaagaagtttccaacgccaagcataaggaatctacaagatgtggaagaagcactgagcaatgtagaagtttccaga

SEQ ID NO: 5735 - DNA, 122 bp, Homo sapiens
  misc_feature (61)..(62): /note="This region represents a CpG dinucleotide"
  misc_feature (61)..(61): /note="Nucleotide may be methylated to form 5-methylcytosine"
cagcaccacccagggacgggaggcatgagccggtcaaggcacctgggcaaaatccggaagcgtctggaagatgtcaagagccagtgggtccggccagccagggctgactttagtgacaacga

SEQ ID NO: 5736 - DNA, 122 bp, Homo sapiens
  misc_feature (61)..(62): /note="This region represents a CpG dinucleotide"
  misc_feature (61)..(61): /note="Nucleotide may be methylated to form 5-methylcytosine"
tgcaaggaatcaggtgtctgctttttccttcactttccgcaagtttactctgcagttgatcgtcgaaggtggtggaaggtttcattttcccggaaggggcatttggaagtaagtgcaccagc

SEQ ID NO: 5737 - DNA, 122 bp, Homo sapiens
  misc_feature (61)..(62): /note="This region represents a CpG dinucleotide"
  misc_feature (61)..(61): /note="Nucleotide may be methylated to form 5-methylcytosine"
ctgtccctggtggccttgcctgcctgccagcccataacgtcatccctgcaggaggagaggcgccaccttactaaggaggtggggatctcagacccgtgggtgggtcctgagccattccactt

SEQ ID NO: 5738 - DNA, 122 bp, Homo sapiens
  misc_feature (61)..(62): /note="This region represents a CpG dinucleotide"
  misc_feature (61)..(61): /note="Nucleotide may be methylated to form 5-methylcytosine"
gagattgtgactcagatgacactttcagaaacatgttccaggtggtaagccactagagggcgaggactctgactgcctggctcaccactgcaatgccaatgcctagcacagaatagctggat

SEQ ID NO: 5739 - DNA, 122 bp, Homo sapiens
  misc_feature (61)..(62): /note="This region represents a CpG dinucleotide"
  misc_feature (61)..(61): /note="Nucleotide may be methylated to form 5-methylcytosine"
ctcactgatctccagctgcctctggatgcggcctttgcagcgctcgcggtagtcggactgcgtggcgttgtactccgacatgacctccacaaactttctggacagcgtggagtgctgggggc

SEQ ID NO: 5740 - DNA, 122 bp, Homo sapiens
  misc_feature (61)..(62): /note="This region represents a CpG dinucleotide"
  misc_feature (61)..(61): /note="Nucleotide may be methylated to form 5-methylcytosine"
gatggttaaaacacaaactgcctaatcacagtaatgccaacgtttgttttgggtagaagacggaatgtacaaagtacacacatttgaaatgtttgccagctggaagctggaaccctacagat

SEQ ID NO: 5741 - DNA, 122 bp, Homo sapiens
  misc_feature (61)..(62): /note="This region represents a CpG dinucleotide"
  misc_feature (61)..(61): /note="Nucleotide may be methylated to form 5-methylcytosine"
caaaattgagcagtaatgcgaaagcacaaggcctggcccatgttggccataaggtggcaccgttagtccagtgtggcgggcaaacctcttgttggctggtaggtgcagtgagggcagaaccc

SEQ ID NO: 5742 - DNA, 122 bp, Homo sapiens
  misc_feature (61)..(62): /note="This region represents a CpG dinucleotide"
  misc_feature (61)..(61): /note="Nucleotide may be methylated to form 5-methylcytosine"
acttttccaaatgacaatggggcatggagcttgagagtggaaatgaggccctagggatagcgtgcttaggaaaacactcccagcctgatgtaattctgggggtacaatggcattttcatcat

SEQ ID NO: 5743 - DNA, 122 bp, Homo sapiens
  misc_feature (61)..(62): /note="This region represents a CpG dinucleotide"
  misc_feature (61)..(61): /note="Nucleotide may be methylated to form 5-methylcytosine"
ctgccatggggccagtgtgcagactcagggctctgattcaaggaatctgaaacaaaccctcgtactacccagaactcaggaagtctaattcttagcctgaaaaatgacctgaagttacatat

SEQ ID NO: 5744 - DNA, 122 bp, Homo sapiens
  misc_feature (61)..(62): /note="This region represents a CpG dinucleotide"
  misc_feature (61)..(61): /note="Nucleotide may be methylated to form 5-methylcytosine"
ttctgattgcagaaccaagtttatcatgcctcacctcaaagacaccagcattgctgtatgcggtggtgtgcacctatagaaccagccactcaggaagctgagggggaaggatagcttgagcc

SEQ ID NO: 5745 - DNA, 122 bp, Homo sapiens
  misc_feature (61)..(62): /note="This region represents a CpG dinucleotide"
  misc_feature (61)..(61): /note="Nucleotide may be methylated to form 5-methylcytosine"
gtggtcctggccatgtgctaaatgtgcatgaatttctgacacctaaaatagccccggacacgggacacagtgccaggaagctcctgttcaacatctcagcaactggtagcttcagggctgag

SEQ ID NO: 5746 - DNA, 122 bp, Homo sapiens
  misc_feature (61)..(62): /note="This region represents a CpG dinucleotide"
  misc_feature (61)..(61): /note="Nucleotide may be methylated to form 5-methylcytosine"
taagtttggcctaaaggtttctctgtacatcatgaactataacgtaaatggaatagtatacggactctagtctactcttgtgccagtcactgagtttggccaatcgaagatggccaatgatt

SEQ ID NO: 5747 - DNA, 122 bp, Homo sapiens
  misc_feature (61)..(62): /note="This region represents a CpG dinucleotide"
  misc_feature (61)..(61): /note="Nucleotide may be methylated to form 5-methylcytosine"
tgggggtggaatctgttagaactctccaagctccatggggctcgaacttcagtgccaaagcgggatgggtttgtggcttcagctctctgggacacagctgccagcctctccttgtccagctg

SEQ ID NO: 5748 - DNA, 122 bp, Homo sapiens
  misc_feature (61)..(62): /note="This region represents a CpG dinucleotide"
  misc_feature (61)..(61): /note="Nucleotide may be methylated to form 5-methylcytosine"
aagagcagaagcaggagacagtggcctttctgagccttacacaagggctctctgggatgccgctcatctggactgtttgtcttcacagaaagccaatgatggttttcagggactacagctga

SEQ ID NO: 5749 - DNA, 122 bp, Homo sapiens
  misc_feature (61)..(62): /note="This region represents a CpG dinucleotide"
  misc_feature (61)..(61): /note="Nucleotide may be methylated to form 5-methylcytosine"
tatctcttatcctgtagcaaatattctgtattttatctctttagaatatgcagaaatccacgatctctacctgagatttaaggaagcatgagttattgatttaaaccttgcatctggtatag

SEQ ID NO: 5750 - DNA, 122 bp, Homo sapiens
  misc_feature (61)..(62): /note="This region represents a CpG dinucleotide"
  misc_feature (61)..(61): /note="Nucleotide may be methylated to form 5-methylcytosine"
aagcaggaagtttgcaccagagccaagaagagagcttgcagctgccagggaatggcctggcggaggaagcgcagcctcgcccagctcagcagacctgcttcatgacagaggcagctcttctg

SEQ ID NO: 5751 - DNA, 122 bp, Homo sapiens
  misc_feature (61)..(62): /note="This region represents a CpG dinucleotide"
  misc_feature (61)..(61): /note="Nucleotide may be methylated to form 5-methylcytosine"
ctcctaatatcttcctagacttatgctttccttggaattccagcaatagaactgcatactcgtaccctaatcaagaaccttttatgtactaggtgctctactagacatgagataaaaagata

SEQ ID NO: 5752 - DNA, 122 bp, Homo sapiens
  misc_feature (61)..(62): /note="This region represents a CpG dinucleotide"
  misc_feature (61)..(61): /note="Nucleotide may be methylated to form 5-methylcytosine"
tcccacctgctatgaacatctatgtccatatttgtacatgtagacataagttgtcaattgcgaaatatggttaggtaatggttggactgcaattttcttaactgactggaacttgtaagtct

SEQ ID NO: 5753 - DNA, 122 bp, Homo sapiens
  misc_feature (61)..(62): /note="This region represents a CpG dinucleotide"
  misc_feature (61)..(61): /note="Nucleotide may be methylated to form 5-methylcytosine"
atctttgaggtcctgaaattgtaaaatatctcacagtgtctcgctccgttgtctgtgcttcgtctgtgtttacttgtttgtttctcattgtcgctgcacaatcttctcatcgtgtatagggt

SEQ ID NO: 5754 - DNA, 122 bp, Homo sapiens
  misc_feature (61)..(62): /note="This region represents a CpG dinucleotide"
  misc_feature (61)..(61): /note="Nucleotide may be methylated to form 5-methylcytosine"
ataagcccagatctattatgcaactatatactctcgtaacaagtgagtcacagaagcctccgtcaacactgacatattgatgaccttaagaagttagtgattacctatgatgtacaacaaac

SEQ ID NO: 5755 - DNA, 122 bp, Homo sapiens
  misc_feature (61)..(62): /note="This region represents a CpG dinucleotide"
  misc_feature (61)..(61): /note="Nucleotide may be methylated to form 5-methylcytosine"
ctgagcatggtgccacttccccagtgttggccttgtttcctgctcagcatttggcagatgcgcctctggcccaactaggatgtttccattttacagacgggaaatccgaagcccagagagat

SEQ ID NO: 5756 - DNA, 122 bp, Homo sapiens
  misc_feature (61)..(62): /note="This region represents a CpG dinucleotide"
  misc_feature (61)..(61): /note="Nucleotide may be methylated to form 5-methylcytosine"
acaagtttggaggatccgtgatggctgagctcttccgagtccctggagatgtccctccctcgcgattggtgcctgccctgcccctgccagggtcactctgcgccacctccctggggctcagg

SEQ ID NO: 5757 - DNA, 122 bp, Homo sapiens
  misc_feature (61)..(62): /note="This region represents a CpG dinucleotide"
  misc_feature (61)..(61): /note="Nucleotide may be methylated to form 5-methylcytosine"
gcaaaccaatttctatttgctgactattctccagggcttttaaaagcaaataaaatgtaccggaaactgttttccaaatgacaacaaagaatacatctcctactctctcttctcccccaaca

SEQ ID NO: 5758 - DNA, 122 bp, Homo sapiens
  misc_feature (61)..(62): /note="This region represents a CpG dinucleotide"
  misc_feature (61)..(61): /note="Nucleotide may be methylated to form 5-methylcytosine"
tgattttactgtttcctaggaaatgagaacagaagccattgccagacctctggaaataaacgagactgaaaaagtgatgagaattgcaataaaagagattttggtaagatgactttgctttt

SEQ ID NO: 5759 - DNA, 122 bp, Homo sapiens
  misc_feature (61)..(62): /note="This region represents a CpG dinucleotide"
  misc_feature (61)..(61): /note="Nucleotide may be methylated to form 5-methylcytosine"
caggacatcctcggcggctcctggggtttgaagagcaaacgtttttccctgggctcagtgcgttttgtcccaacttcatctgtttctgaaatgttctcacttggcagtgtctagtcaaggag

SEQ ID NO: 5760 - DNA, 122 bp, Homo sapiens
  misc_feature (61)..(62): /note="This region represents a CpG dinucleotide"
  misc_feature (61)..(61): /note="Nucleotide may be methylated to form 5-methylcytosine"
aggctgccgcacatgtggttttgaaaccaacctttccccttggccccagcagtgcgttggcgtgtccctggggctggtcccagtgcccgcctggaaatgcccttggtttgggcccctgcctg

SEQ ID NO: 5761 - DNA, 122 bp, Homo sapiens
  misc_feature (61)..(62): /note="This region represents a CpG dinucleotide"
  misc_feature (61)..(61): /note="Nucleotide may be methylated to form 5-methylcytosine"
aaatctgggcaggaataccagaatgtcaatgatcaggactggaactgcccagtctgcccccgctttgctgatgtagccagaaggtgagcctatgataatgagaaaggcaccaatcgaaaaag

SEQ ID NO: 5762 - DNA, 122 bp, Homo sapiens
  misc_feature (61)..(62): /note="This region represents a CpG dinucleotide"
  misc_feature (61)..(61): /note="Nucleotide may be methylated to form 5-methylcytosine"
acgcacaatattgtgagaattcaggagcacgagctttaactaacagcacaaggcatatcacgtgagagtcattcagtggctggtattcactgatctctatcagagcagaaaacaggtgcttt

SEQ ID NO: 5763 - DNA, 122 bp, Homo sapiens
  misc_feature (61)..(62): /note="This region represents a CpG dinucleotide"
  misc_feature (61)..(61): /note="Nucleotide may be methylated to form 5-methylcytosine"
tcatggataagccggataagcctggacttcccaagtgatgtcacagtgagacttgagcttcgataaccaagaacttcaagaccaaaccatcatttcaagagattatcgagaaaatgaatgtg

SEQ ID NO: 5764 - DNA, 122 bp, Homo sapiens
  misc_feature (61)..(62): /note="This region represents a CpG dinucleotide"
  misc_feature (61)..(61): /note="Nucleotide may be methylated to form 5-methylcytosine"
attcctctggtgccatctccaggcggaaagggtttacagttgtctctggtaattttacctcgtcctccctggtagagaggagaggaaggctacccttgcaaagttatcctgtttctatgcaa

SEQ ID NO: 5765 - DNA, 122 bp, Homo sapiens
  misc_feature (61)..(62): /note="This region represents a CpG dinucleotide"
  misc_feature (61)..(61): /note="Nucleotide may be methylated to form 5-methylcytosine"
tccaatccgctcctccctggcctccgattggccagttcagtacccgccacccacactctccgcaacctgggctcctagggccgcctccaccccgccccgccccccgttgtcctggccccgac

SEQ ID NO: 5766 - DNA, 122 bp, Homo sapiens
  misc_feature (61)..(62): /note="This region represents a CpG dinucleotide"
  misc_feature (61)..(61): /note="Nucleotide may be methylated to form 5-methylcytosine"
gcaggcggaccgctgctctcgctcaagttctggcgtggggctgcgctggagcaactggggcgaagttgaactgggacatccttggagatgatttttgaaaaacgagcaagccatgcctggaa

SEQ ID NO: 5767 - DNA, 122 bp, Homo sapiens
  misc_feature (61)..(62): /note="This region represents a CpG dinucleotide"
  misc_feature (61)..(61): /note="Nucleotide may be methylated to form 5-methylcytosine"
aagtcaaattttttgttttcctctgggacctggccagtcactgggtgtagaaatgtgttccgtctttcattgtggctgtagagggaaaaacagaagagttgtggtaaagatgaagaaggcag

SEQ ID NO: 5768 - DNA, 122 bp, Homo sapiens
  misc_feature (61)..(62): /note="This region represents a CpG dinucleotide"
  misc_feature (61)..(61): /note="Nucleotide may be methylated to form 5-methylcytosine"
agttgtgtgaaaaaattttaacaggttagagttgtgttgtagaaatctggtagccagccacgtgtaagacgaattgtagaaaggagagatcacaaatggctatcataagagaatcactggga

SEQ ID NO: 5769 - DNA, 122 bp, Homo sapiens
  misc_feature (61)..(62): /note="This region represents a CpG dinucleotide"
  misc_feature (61)..(61): /note="Nucleotide may be methylated to form 5-methylcytosine"
gatgctatgaaggtttaatttcctgcttcaccatggatacaagcctcacaacatctaaaacgtaaacttcacaagaatgtgactcttcaaagataccagacctgtgcctgacttgcagcctg

SEQ ID NO: 5770 - DNA, 122 bp, Homo sapiens
  misc_feature (61)..(62): /note="This region represents a CpG dinucleotide"
  misc_feature (61)..(61): /note="Nucleotide may be methylated to form 5-methylcytosine"
gacagcccatgacccagagacagcacacgtcggaggaaagccacagaatgaaagggcaaccgacccaagaaggagcagagcctgacaaacagatgttgaggaaagcagactcgatggaggag

SEQ ID NO: 5771 - DNA, 122 bp, Homo sapiens
  misc_feature (61)..(62): /note="This region represents a CpG dinucleotide"
  misc_feature (61)..(61): /note="Nucleotide may be methylated to form 5-methylcytosine"
gacaaaactgaggctcagagaggctgagagagacactgctgaggtcacacagccaggagtcggcaggaagccctgaacccaagcagggctggcctggctactagcctgggctcagtccttta

SEQ ID NO: 5772 - DNA, 122 bp, Homo sapiens
  misc_feature (61)..(62): /note="This region represents a CpG dinucleotide"
  misc_feature (61)..(61): /note="Nucleotide may be methylated to form 5-methylcytosine"
gaaacacctgtgtggcagataaggccaactgagtgtgatcagctgaggaaaccttagggacgcatgtcactcaatatttctttttccatgccaggcagggcagaggcacaatctagcctgtg

SEQ ID NO: 5773 - DNA, 122 bp, Homo sapiens
  misc_feature (61)..(62): /note="This region represents a CpG dinucleotide"
  misc_feature (61)..(61): /note="Nucleotide may be methylated to form 5-methylcytosine"
tgctggcactctcatctctattgtacaggtaagaaatggaaactcagagagggcaagtaacgtgcccaaggtcacacagctattaattggcacagctgggatttgcacgcagtccagttcca

SEQ ID NO: 5774 - DNA, 122 bp, Homo sapiens
  misc_feature (61)..(62): /note="This region represents a CpG dinucleotide"
  misc_feature (61)..(61): /note="Nucleotide may be methylated to form 5-methylcytosine"
aactaaaagaaaccaaggatcttggtggtggaatttgcttgacttcttgtcctccaatcacgtccacttcctgttttcttttaaagttcactgacaagatcttattttatgtgacaaatatg

SEQ ID NO: 5775 - DNA, 122 bp, Homo sapiens
  misc_feature (61)..(62): /note="This region represents a CpG dinucleotide"
  misc_feature (61)..(61): /note="Nucleotide may be methylated to form 5-methylcytosine"
atcactaagatgcaaagtcttaacaatgtcctacaatgccctaagtaatctacctggcaacgtgtgcctctctacactggttggttctagcacttcctgtctctggatctttggactggctt

SEQ ID NO: 5776 - DNA, 122 bp, Homo sapiens
  misc_feature (61)..(62): /note="This region represents a CpG dinucleotide"
  misc_feature (61)..(61): /note="Nucleotide may be methylated to form 5-methylcytosine"
ttattccaagttttctttttagagcaatcttccctgtctaagcaggacagatgggccttccgtccacactagtggctgtggaatgaatcataacagaggttttatgtgtctttcagctcctg

SEQ ID NO: 5777 - DNA, 122 bp, Homo sapiens
  misc_feature (61)..(62): /note="This region represents a CpG dinucleotide"
  misc_feature (61)..(61): /note="Nucleotide may be methylated to form 5-methylcytosine"
caccagaaacaggagaacttacagatatgttgccttttttggtgtatgtggaacatagtacgagaaactctcatgggaactctgaggaaggaaacataccatgtctgtcactaaccagggaa

SEQ ID NO: 5778 - DNA, 122 bp, Homo sapiens
  misc_feature (61)..(62): /note="This region represents a CpG dinucleotide"
  misc_feature (61)..(61): /note="Nucleotide may be methylated to form 5-methylcytosine"
ctcaagggatcctcctgcttcagcctcccaggtagctggcagtataggcgtgcaccactacgcctggctgattttttatttttatttatttatttatttactttttgagacggagtcttgct

SEQ ID NO: 5779 - DNA, 122 bp, Homo sapiens
  misc_feature (61)..(62): /note="This region represents a CpG dinucleotide"
  misc_feature (61)..(61): /note="Nucleotide may be methylated to form 5-methylcytosine"
ctcactgcctggatgagttcatggacaaacatgcatggcgtgtctgtccatctgcattagcgctgagcagaaaagatacggacgcacagcagctcatggtagcagtccacgcacgtcgtcct

SEQ ID NO: 5780 - DNA, 122 bp, Homo sapiens
  misc_feature (61)..(62): /note="This region represents a CpG dinucleotide"
  misc_feature (61)..(61): /note="Nucleotide may be methylated to form 5-methylcytosine"
tgaagacccagtcatcaaagagcctttacttccttctgcaaaggcaagactcatggcagacgtgtccatgcacaccaagtttgagagctgccatgagactcccttctgttgtgaaaaatact

SEQ ID NO: 5781 - DNA, 122 bp, Homo sapiens
  misc_feature (61)..(62): /note="This region represents a CpG dinucleotide"
  misc_feature (61)..(61): /note="Nucleotide may be methylated to form 5-methylcytosine"
gtaccagctagccctcccattgtaaacaaccatcaaaaatgacaaaacacacaaggcaaccgtattcaggtttcgtaaaataaacacaagactgtaattcctgagagaagagaaactcacca

SEQ ID NO: 5782 - DNA, 122 bp, Homo sapiens
  misc_feature (61)..(62): /note="This region represents a CpG dinucleotide"
  misc_feature (61)..(61): /note="Nucleotide may be methylated to form 5-methylcytosine"
gtgtgtgttagacagaaagaaggaagagggcagggagagaaaaccaccgcattcaagcatcgccgcctctaggtgtaaggttcattccaggactgcctggagttggtgactttgcattcctg

SEQ ID NO: 5783 - DNA, 122 bp, Homo sapiens
  misc_feature (61)..(62): /note="This region represents a CpG dinucleotide"
  misc_feature (61)..(61): /note="Nucleotide may be methylated to form 5-methylcytosine"
aaatatttgactagcaacaggctgatctcagaacagctctagtgcctgcactgtggcacccgtctcagtcctgtgactcacatggctgcaatgagattggaagtgcacttccattggaagag

SEQ ID NO: 5784 - DNA, 122 bp, Homo sapiens
  misc_feature (61)..(62): /note="This region represents a CpG dinucleotide"
  misc_feature (61)..(61): /note="Nucleotide may be methylated to form 5-methylcytosine"
gcggcgcggtaggggaaaggagcccggctccactcacgcgcccgggggcggcactggggccgccgctgcgtctctccggctcaaaaaactgaaaaggggaaaggaaaaaaaaaaaaaaaaga

SEQ ID NO: 5785 - DNA, 122 bp, Homo sapiens
  misc_feature (61)..(62): /note="This region represents a CpG dinucleotide"
  misc_feature (61)..(61): /note="Nucleotide may be methylated to form 5-methylcytosine"
gacagcatgccggcggcggggctgctggcgcttataccggctgggctgctgtaatgcgtgcgggaagtttcatcatgcctgcgaggatcaaccagcgcgtgcagaggcggggctcgcggggc

SEQ ID NO: 5786 - DNA, 122 bp, Homo sapiens
  misc_feature (61)..(62): /note="This region represents a CpG dinucleotide"
  misc_feature (61)..(61): /note="Nucleotide may be methylated to form 5-methylcytosine"
tatatttcattaagaaaatgtattgtaaaggtaaaaaagcaaatgatagaacagaaacagcgcaatattctgaattgaagaaacagtgcaatattctgaattacagtggtctttaagtaaat

SEQ ID NO: 5787 - DNA, 122 bp, Homo sapiens
  misc_feature (61)..(62): /note="This region represents a CpG dinucleotide"
  misc_feature (61)..(61): /note="Nucleotide may be methylated to form 5-methylcytosine"
agcgtgtccctcaaagtggaccttcctaagcatcggcgctttgctttgcgctgggtggtgcggctgagtcactaattagcagtgagagcctgggctgtatctcctaccaaataaccagcgga

SEQ ID NO: 5788 - DNA, 122 bp, Homo sapiens
  misc_feature (61)..(62): /note="This region represents a CpG dinucleotide"
  misc_feature (61)..(61): /note="Nucleotide may be methylated to form 5-methylcytosine"
acggtgattactcacaggtgcggttccactactgatcagaacgggagttttgaactgctccgtttttgacctgagtcagttcacccctccttaagcaacctggtggccccttgctcccagtg

SEQ ID NO: 5789 - DNA, 122 bp, Homo sapiens
  misc_feature (61)..(62): /note="This region represents a CpG dinucleotide"
  misc_feature (61)..(61): /note="Nucleotide may be methylated to form 5-methylcytosine"
agccccagacataagccccagatgattgagagaccgggctacacacgtgtggatgtcccccgtgcatacacacaagcacccatccgataggctgggatccagctgcaagtttggacactgac

SEQ ID NO: 5790 - DNA, 122 bp, Homo sapiens
  misc_feature (61)..(62): /note="This region represents a CpG dinucleotide"
  misc_feature (61)..(61): /note="Nucleotide may be methylated to form 5-methylcytosine"
acaagatgtactttcgacactgcccttccaaccagctgtagggactgaagtttgttgagtcgtccatactttatctatttttttttttttttttttgaggtggagtctcactctgtcaccag

SEQ ID NO: 5791 - DNA, 122 bp, Homo sapiens
  misc_feature (61)..(62): /note="This region represents a CpG dinucleotide"
  misc_feature (61)..(61): /note="Nucleotide may be methylated to form 5-methylcytosine"
cattacctgcagcaagggcctgtgtaaatgcatgtgatttacagagcattttatgtactgcgtgtcattcatgcttccggtgagccctaagtctaagatagggcagatagcatcaggtccat

SEQ ID NO: 5792 - DNA, 122 bp, Homo sapiens
  misc_feature (61)..(62): /note="This region represents a CpG dinucleotide"
  misc_feature (61)..(61): /note="Nucleotide may be methylated to form 5-methylcytosine"
tgtttctgatttccttactctgttttaagtcccctcccacaacatcagcaccctggattacgtgctgtactacctctttacttttaaacaaaagtgaaacaagtgcaaacaaaagcttgtgg

SEQ ID NO: 5793 - DNA, 122 bp, Homo sapiens
  misc_feature (61)..(62): /note="This region represents a CpG dinucleotide"
  misc_feature (61)..(61): /note="Nucleotide may be methylated to form 5-methylcytosine"
acaagtaacaagacctactgacatcatgtataccaatatgacacacacagaaatatacagcgtccctgctgttgttcttgccaagattgagtaatcgcaatgtaatcataagaaaacatcag

SEQ ID NO: 5794 - DNA, 122 bp, Homo sapiens
  misc_feature (61)..(62): /note="This region represents a CpG dinucleotide"
  misc_feature (61)..(61): /note="Nucleotide may be methylated to form 5-methylcytosine"
gcaggcaaatcgatgtatccctgaaatccaacatccaatctgaagttaaatgagctttaccgttcaagccacttagagttggacttttagttaacttgcaaccgaatataaccggcacatat

SEQ ID NO: 5795 - DNA, 122 bp, Homo sapiens
  misc_feature (61)..(62): /note="This region represents a CpG dinucleotide"
  misc_feature (61)..(61): /note="Nucleotide may be methylated to form 5-methylcytosine"
cacctctaggcaaagaagcaaaagcttttctgtgtgttgaatgcatcattaggtgaaaagcgggtaggctaaaaatcaatatgactacttaccttggttccagttttagacatttttggtgc

SEQ ID NO: 5796 - DNA, 122 bp, Homo sapiens
  misc_feature (61)..(62): /note="This region represents a CpG dinucleotide"
  misc_feature (61)..(61): /note="Nucleotide may be methylated to form 5-methylcytosine"
attcctaagtgtcagccctattaactttgatgttcgtttggttattactacaaatccccacgtttatttcttttcaagagaaagttgttcgaaatgtgaacgttttccatctttacctgact

SEQ ID NO: 5797 - DNA, 122 bp, Homo sapiens
  misc_feature (61)..(62): /note="This region represents a CpG dinucleotide"
  misc_feature (61)..(61): /note="Nucleotide may be methylated to form 5-methylcytosine"
aaaaaggttttcagcagataaacagccgggacctcgggggattgtgcctcagcctaggcccggtagtcgaagacatatggacaggaaatgggcaagacacgggcctttcagagaagagagac

SEQ ID NO: 5798 - DNA, 122 bp, Homo sapiens
  misc_feature (61)..(62): /note="This region represents a CpG dinucleotide"
  misc_feature (61)..(61): /note="Nucleotide may be methylated to form 5-methylcytosine"
taaaaagcctaggtctctttttggcacctgtgaaaagttcaaaccatgcatcttgtcctacgacaggcagccttcaccctagctgcaccccctagctaccataaaaacccaagccagtagcc

SEQ ID NO: 5799 - DNA, 122 bp, Homo sapiens
  misc_feature (61)..(62): /note="This region represents a CpG dinucleotide"
  misc_feature (61)..(61): /note="Nucleotide may be methylated to form 5-methylcytosine"
ggagtgaagccccaggggacactgaggcacaccctgcacagagaactacagttgtagagacgttctttgtgttcatttttctttgatgcaatagatgatgaactccttgagagcagggatct

SEQ ID NO: 5800 - DNA, 122 bp, Homo sapiens
  misc_feature (61)..(62): /note="This region represents a CpG dinucleotide"
  misc_feature (61)..(61): /note="Nucleotide may be methylated to form 5-methylcytosine"
tgagcttcaccctggagcggctgtccagccgattgcagcgcagtggcagcagcgaggactcggggggcgcgtcgggccgcagcacgccgctgttcggacggcttcgcagggccacgtccgag

SEQ ID NO: 5801 - DNA, 122 bp, Homo sapiens
  misc_feature (61)..(62): /note="This region represents a CpG dinucleotide"
  misc_feature (61)..(61): /note="Nucleotide may be methylated to form 5-methylcytosine"
attaaaatgtttgtagtcacccagttgtctctatcattacaatgcttgtgatcagccaggcgtgtctcctattagaatgtctggggtcacccaggtttctctattactacaatgcctgtggt

SEQ ID NO: 5802 - DNA, 122 bp, Homo sapiens
  misc_feature (61)..(62): /note="This region represents a CpG dinucleotide"
  misc_feature (61)..(61): /note="Nucleotide may be methylated to form 5-methylcytosine"
tctgctttttctccccttcaatttagttgacaggttaatttcagaactgagtgctgcttacgaaggtcagtgtgaccagctgaaccacctcagctggtgtctttcaggacactcatctctca

SEQ ID NO: 5803 - DNA, 122 bp, Homo sapiens
  misc_feature (61)..(62): /note="This region represents a CpG dinucleotide"
  misc_feature (61)..(61): /note="Nucleotide may be methylated to form 5-methylcytosine"
acagcattcaaactaaggcagtctcttgaatgcaccaaaaaaagcaaaagtactatctcccgaaatcacttgccagaggtagtttttgaaacaagttgaactgtagatcacattttatcttt

SEQ ID NO: 5804 - DNA, 122 bp, Homo sapiens
  misc_feature (61)..(62): /note="This region represents a CpG dinucleotide"
  misc_feature (61)..(61): /note="Nucleotide may be methylated to form 5-methylcytosine"
ccttctaccccaggaaaaacattaaaaaattctaccctaaactcttcacatacacagagacgcaataacagaattgtgaagtactgtgccaaaagagaggccatgcttctcaccagaggaag

SEQ ID NO: 5805 - DNA, 122 bp, Homo sapiens
  misc_feature (61)..(62): /note="This region represents a CpG dinucleotide"
  misc_feature (61)..(61): /note="Nucleotide may be methylated to form 5-methylcytosine"
taagcagtgcatcgtgggagcagtgggagcagcgacagcagctccgcacagcattatctgcgggctggtagctctttgtcaatagatgactcaactcacagagcaacttgacagtatccctg

SEQ ID NO: 5806 - DNA, 122 bp, Homo sapiens
  misc_feature (61)..(62): /note="This region represents a CpG dinucleotide"
  misc_feature (61)..(61): /note="Nucleotide may be methylated to form 5-methylcytosine"
cagactatccctcgggagggactggtcaacaacttaggctgctgccactaaggaatgacacgcagttatatgccttggggcagatctaaagacgtgaatgtgggctgggcatggtggctcac

SEQ ID NO: 5807 - DNA, 122 bp, Homo sapiens
  misc_feature (61)..(62): /note="This region represents a CpG dinucleotide"
  misc_feature (61)..(61): /note="Nucleotide may be methylated to form 5-methylcytosine"
gcaggaaatacccagctgctgaaacaggatgtgcatatgaaatacagcagcttagaccggcgcgtggtggctcacacctgtagttccagcactttggtaggccaaggtgggcggatcatgag

SEQ ID NO: 5808 - DNA, 122 bp, Homo sapiens
  misc_feature (61)..(62): /note="This region represents a CpG dinucleotide"
  misc_feature (61)..(61): /note="Nucleotide may be methylated to form 5-methylcytosine"
acagaagatcacttgttgatcttcacttgcaatttcatttccctgtagcgtggctcattccgttgttttcttttctctgtttaaggaaatggcatcagattttcatgatagcatgtacagcc

SEQ ID NO: 5809 - DNA, 122 bp, Homo sapiens
  misc_feature (61)..(62): /note="This region represents a CpG dinucleotide"
  misc_feature (61)..(61): /note="Nucleotide may be methylated to form 5-methylcytosine"
cccacaaatcaccaccaagtatcagtaactttgacctttgagcacatattcttagcaggccgcgctcttagggatcccatgtattgactcatttaattatgacgtcaaaacacttactaccc

SEQ ID NO: 5810 - DNA, 122 bp, Homo sapiens
  misc_feature (61)..(62): /note="This region represents a CpG dinucleotide"
  misc_feature (61)..(61): /note="Nucleotide may be methylated to form 5-methylcytosine"
tgctatcaagtagatactaagactggagccaactcactgaagagcaaagccaagagatggcgagagactatgtctggtaacctcatttgagttcctgaatccagccaggtctgaagccagta

SEQ ID NO: 5811 - DNA, 122 bp, Homo sapiens
  misc_feature (61)..(62): /note="This region represents a CpG dinucleotide"
  misc_feature (61)..(61): /note="Nucleotide may be methylated to form 5-methylcytosine"
gttcaactgactcattcattcaccacaagattccagggtggcgcaaaactacatcctcgccgtaagccttaaaacatgactgtgccccactgacagacatggaaacttgggctaagagagaa

SEQ ID NO: 5812 - DNA, 122 bp, Homo sapiens
  misc_feature (61)..(62): /note="This region represents a CpG dinucleotide"
  misc_feature (61)..(61): /note="Nucleotide may be methylated to form 5-methylcytosine"
cacgctaggtccatgctgtgtggctgtcattgtggttatggttcttgtgacaaaagtacacgccaccactcaatcagtctatcagcagcccagcaatgcaagcacaacagctccccggggtg

SEQ ID NO: 5813 - DNA, 122 bp, Homo sapiens
  misc_feature (61)..(62): /note="This region represents a CpG dinucleotide"
  misc_feature (61)..(61): /note="Nucleotide may be methylated to form 5-methylcytosine"
tttttttccacctaacggcttttccctgagctttcaggaggccattgaagccgttaagaccgggtcaggtgaacaggaagttaaagactgaaaaggagacacaaaactgccgactttcccga

SEQ ID NO: 5814 - DNA, 122 bp, Homo sapiens
  misc_feature (61)..(62): /note="This region represents a CpG dinucleotide"
  misc_feature (61)..(61): /note="Nucleotide may be methylated to form 5-methylcytosine"
ccccagaggaagtctctgcttgcacttgtgttttcttcctcatttggattgtttaggtctcggaagtttgctcagcaagagtctaccttcgcccagcctccgcagagctggcaaggcagggg

SEQ ID NO: 5815 - DNA, 122 bp, Homo sapiens
  misc_feature (61)..(62): /note="This region represents a CpG dinucleotide"
  misc_feature (61)..(61): /note="Nucleotide may be methylated to form 5-methylcytosine"
ccacagggcctccagtgtgtactagctggctctttgtaagaaaagtctgccccacccctgcgctactaggaagaatagatgaggagttgtggctaactgttaactgcctaagtacaaatgca

SEQ ID NO: 5816 - DNA, 122 bp, Homo sapiens
  misc_feature (61)..(62): /note="This region represents a CpG dinucleotide"
  misc_feature (61)..(61): /note="Nucleotide may be methylated to form 5-methylcytosine"
cgggcaggggaaggaagggtcatcctatggcttggtccctagagcaaatgttgtgacagccgtgtgctcacctggctggtgaatcagcccaatggcttccatgagctcaggctcagacaact

SEQ ID NO: 5817 - DNA, 122 bp, Homo sapiens
  misc_feature (61)..(62): /note="This region represents a CpG dinucleotide"
  misc_feature (61)..(61): /note="Nucleotide may be methylated to form 5-methylcytosine"
taaaaaccagaaggaaaagaatttcaggatggcaaagggatgggcatggtagtggtaagacgatgaggtgtgaggggcagaggaataagaaatttaatggtttttattcagactttattatt

SEQ ID NO: 5818 - DNA, 122 bp, Homo sapiens
  misc_feature (61)..(62): /note="This region represents a CpG dinucleotide"
  misc_feature (61)..(61): /note="Nucleotide may be methylated to form 5-methylcytosine"
gatgtggacactgtgctgaaagcccaaggaagctttaatcaattctcaagttgctaggatcgtccactcaagtttattttgccagctctgcctggtatgaaactgtcaatagatataacaca

SEQ ID NO: 5819 - DNA, 122 bp, Homo sapiens
  misc_feature (61)..(62): /note="This region represents a CpG dinucleotide"
  misc_feature (61)..(61): /note="Nucleotide may be methylated to form 5-methylcytosine"
gaggccgttttctgggctaagcagcgacggcgctaggcgactccgcttgtccttcgtttccgctgtcagctcagcaggtgacttattcccagtgctgctcttctcacagacacaaaaccaac

SEQ ID NO: 5820 - DNA, 122 bp, Homo sapiens
  misc_feature (61)..(62): /note="This region represents a CpG dinucleotide"
  misc_feature (61)..(61): /note="Nucleotide may be methylated to form 5-methylcytosine"
taacacatggctccatttgtgtctatttccacctagcgtattgtgaatattttctacaggcgcacactaatcaccaactgaagtgagaatcacattttcctccacttggcttggtactacag

SEQ ID NO: 5821 - DNA, 122 bp, Homo sapiens
  misc_feature (61)..(62): /note="This region represents a CpG dinucleotide"
  misc_feature (61)..(61): /note="Nucleotide may be methylated to form 5-methylcytosine"
gttttctttccagaggaacatagcaattttatagcaaaacaccctattggcagttagcatcgcagttaggagcccagggacggagctggtggcatgtgtccagatgttggatctgtctattc

SEQ ID NO: 5822 - DNA, 122 bp, Homo sapiens
  misc_feature (61)..(62): /note="This region represents a CpG dinucleotide"
  misc_feature (61)..(61): /note="Nucleotide may be methylated to form 5-methylcytosine"
gatgagtcattcattctttcaacctttcattcattcaacctttcattcattcattgagtacgctaagcttattcccgcctccaggcctttgcccttgcagttccctccacctggaatgctct

SEQ ID NO: 5823 - DNA, 122 bp, Homo sapiens
  misc_feature (61)..(62): /note="This region represents a CpG dinucleotide"
  misc_feature (61)..(61): /note="Nucleotide may be methylated to form 5-methylcytosine"
tctcactggttactaagaacatttggaggcaagcatactgacagcaaaaacacccggggacgaggacctcacactcagcagacagaggaggcaggatcacagttcttccttctccagcctcc

SEQ ID NO: 5824 - DNA, 122 bp, Homo sapiens
  misc_feature (61)..(62): /note="This region represents a CpG dinucleotide"
  misc_feature (61)..(61): /note="Nucleotide may be methylated to form 5-methylcytosine"
tctcttgcatcacttgaccctgggtggacaaggctgactcattcagtcatctgtgttgctcgtaagcacttgggagtacagcttgctgatatggcctaagaggaaacatttcacagactcca

SEQ ID NO: 5825 - DNA, 122 bp, Homo sapiens
  misc_feature (61)..(62): /note="This region represents a CpG dinucleotide"
  misc_feature (61)..(61): /note="Nucleotide may be methylated to form 5-methylcytosine"
aatgctctgcaatcccatccaattcaatctggagtgagcatgaagtaagacacgtgctctcgtgtgtcacaggagagacgctcagggctctctgcatgcagatagccaaaatgcacatgctc

SEQ ID NO: 5826 - DNA, 122 bp, Homo sapiens
  misc_feature (61)..(62): /note="This region represents a CpG dinucleotide"
  misc_feature (61)..(61): /note="Nucleotide may be methylated to form 5-methylcytosine"
ccggcactgcttcctctttctgcttctctgtttcctgatgacatcaacataaataggaaacgtgggaggctcactctgcctagaggctccagaagaagactggtctctcccaccacacagag

SEQ ID NO: 5827 - DNA, 122 bp, Homo sapiens
  misc_feature (61)..(62): /note="This region represents a CpG dinucleotide"
  misc_feature (61)..(61): /note="Nucleotide may be methylated to form 5-methylcytosine"
ccatccacagaccatcagtgtatcttaaatgaaaagcaaactaagagggaagaagaagaacgcaaaaaataacaaggaatgaggaagctgacaacatacaatgatgaattcaactgctaacg

SEQ ID NO: 5828 - DNA, 122 bp, Homo sapiens
  misc_feature (61)..(62): /note="This region represents a CpG dinucleotide"
  misc_feature (61)..(61): /note="Nucleotide may be methylated to form 5-methylcytosine"
ttctttgctccaaattgttaagtaagcatccctgctttagcctcattagactcccaaggccgctgatgaagggggatggaagccagcatttattgaatgattctggtgtgctagatactttc

SEQ ID NO: 5829 - DNA, 122 bp, Homo sapiens
  misc_feature (61)..(62): /note="This region represents a CpG dinucleotide"
  misc_feature (61)..(61): /note="Nucleotide may be methylated to form 5-methylcytosine"
ctctcccttgtcagactgccaagatgctgattctattgaataaactccttcctgctggcccgtgagaaggaccccctagcgagtcccttgccctctaactctagagctcaatggggaggaaa

SEQ ID NO: 5830 - DNA, 122 bp, Homo sapiens
  misc_feature (61)..(62): /note="This region represents a CpG dinucleotide"
  misc_feature (61)..(61): /note="Nucleotide may be methylated to form 5-methylcytosine"
ctggtcgtggtggtgtgcacctgtgcctgtagtcccagcagctactcgggagactgaggacgaaaatagggaagcctgaatataaattagctataaaataaacccaaagaaagtacaaggaa

SEQ ID NO: 5831 - DNA, 122 bp, Homo sapiens
  misc_feature (61)..(62): /note="This region represents a CpG dinucleotide"
  misc_feature (61)..(61): /note="Nucleotide may be methylated to form 5-methylcytosine"
gccctgaactcagcagagagctgaggactggtttccctgggtgggactgacccacttcagcgggaagaagagggtatgtggactggaggttgtgccagcgtgggctgggatggggacagagg

SEQ ID NO: 5832 - DNA, 122 bp, Homo sapiens
  misc_feature (61)..(62): /note="This region represents a CpG dinucleotide"
  misc_feature (61)..(61): /note="Nucleotide may be methylated to form 5-methylcytosine"
aattcagcacagctaaggaaagacatgacataatgaagtaatcagaaatgagaatggaaacgtaaacaggggcaagtaagcaggaccttacacatgagaactttaccaagcatagtttctgc

SEQ ID NO: 5833 - DNA, 122 bp, Homo sapiens
  misc_feature (61)..(62): /note="This region represents a CpG dinucleotide"
  misc_feature (61)..(61): /note="Nucleotide may be methylated to form 5-methylcytosine"
aaaaactgcggcgggaactgctgccatgcagctgggctcccaatgcagtggggatggtggcgctctgggctggcgggagctatcctgccggacgtgattcccagcacagccgtgagcggcag

SEQ ID NO: 5834 - DNA, 122 bp, Homo sapiens
  misc_feature (61)..(62): /note="This region represents a CpG dinucleotide"
  misc_feature (61)..(61): /note="Nucleotide may be methylated to form 5-methylcytosine"
tatcagattgagaagggcttgtccttgtagcttcacagcctggctgaagttccacacagacgtgaaagatcggaagtagtatagatggcagaaggcaaacactagtgtgcccagattaaatt

SEQ ID NO: 5835 - DNA, 122 bp, Homo sapiens
  misc_feature (61)..(62): /note="This region represents a CpG dinucleotide"
  misc_feature (61)..(61): /note="Nucleotide may be methylated to form 5-methylcytosine"
ctcccttgtggaactcaaaagtcacctacccattccccagggagctgggtgataagaaagcgcaaagtttaggattactctttgataagagtcttgcttaaacaagatcacatacaaaagcc

SEQ ID NO: 5836 - DNA, 122 bp, Homo sapiens
  misc_feature (61)..(62): /note="This region represents a CpG dinucleotide"
  misc_feature (61)..(61): /note="Nucleotide may be methylated to form 5-methylcytosine"
ccaaactacaggccctacatgtcagccacactatatgccttacatactggttgttgttgtcgttgttgttgtcgttttttgagacagagtcttgctctgtcgcccaggctggagtgcaatag

SEQ ID NO: 5837 - DNA, 122 bp, Homo sapiens
  misc_feature (61)..(62): /note="This region represents a CpG dinucleotide"
  misc_feature (61)..(61): /note="Nucleotide may be methylated to form 5-methylcytosine"
catatataaagacaatctttaaaaattttttttaattaaaaaatatatattagccagacacggttgcacaaacttgtagtcccagctattaaggaagctgaggtcggaggatttgctcgagc

SEQ ID NO: 5838 - DNA, 122 bp, Homo sapiens
  misc_feature (61)..(62): /note="This region represents a CpG dinucleotide"
  misc_feature (61)..(61): /note="Nucleotide may be methylated to form 5-methylcytosine"
atgttaactataacgtaataccaaagaattcagtttacttttctcgcatgcaagctgtttcgaaatctgagatattgagataaacagatccttaatagttataaggtgtacacatcttgtac

SEQ ID NO: 5839 - DNA, 122 bp, Homo sapiens
  misc_feature (61)..(62): /note="This region represents a CpG dinucleotide"
  misc_feature (61)..(61): /note="Nucleotide may be methylated to form 5-methylcytosine"
aagtggaacaactctaccttgttcctcttactacttaaggctagggttgcctttctcaggcgtgcgagaaaaaaaaatttttcatttccaaagcttgctctgtttcagttttaccaactctc

SEQ ID NO: 5840 - DNA, 122 bp, Homo sapiens
  misc_feature (61)..(62): /note="This region represents a CpG dinucleotide"
  misc_feature (61)..(61): /note="Nucleotide may be methylated to form 5-methylcytosine"
ggctgcttttaagccaaggggccttctggctttttggctgctggcatgcaagctcagaggcgctccttgagttcattcttttcccatcttttcccttgtttccgtgacagaatacagtcgct

SEQ ID NO: 5841 - DNA, 122 bp, Homo sapiens
  misc_feature (61)..(62): /note="This region represents a CpG dinucleotide"
  misc_feature (61)..(61): /note="Nucleotide may be methylated to form 5-methylcytosine"
tataagttccccaatccaaagtgaacttggaaagtcttccttgagatccacggcaacttgcgtagacttctgttatgattcttatcatacttctttgtgcacaaatttttctcttgctccaa

SEQ ID NO: 5842 - DNA, 122 bp, Homo sapiens
  misc_feature (61)..(62): /note="This region represents a CpG dinucleotide"
  misc_feature (61)..(61): /note="Nucleotide may be methylated to form 5-methylcytosine"
taaccgaattccattactgaaggaagtttttgaggcctttcctaacactcccattaacatcgatatcaaagtcaacaacaatgtgctgattaagaaggtactcaaggcattgcctcctctgg

SEQ ID NO: 5843 - DNA, 122 bp, Homo sapiens
  misc_feature (61)..(62): /note="This region represents a CpG dinucleotide"
  misc_feature (61)..(61): /note="Nucleotide may be methylated to form 5-methylcytosine"
gatgaaaattaatttgaccagttccttttaaatttttagaatgtggctcctggaatgttacgtgtgactcacaccgtgtctccactgaatggcgctattctaagagaagctgctcaaaatag

SEQ ID NO: 5844 - DNA, 122 bp, Homo sapiens
  misc_feature (61)..(62): /note="This region represents a CpG dinucleotide"
  misc_feature (61)..(61): /note="Nucleotide may be methylated to form 5-methylcytosine"
atgtcccagggccctggcacatcctggaaatttcaaccagggagtgcaaatgacctgccacgcttggttgcaggaatctgtcattttcagggcattttcgcttcaagagaggcatgaaattg

SEQ ID NO: 5845 - DNA, 122 bp, Homo sapiens
  misc_feature (61)..(62): /note="This region represents a CpG dinucleotide"
  misc_feature (61)..(61): /note="Nucleotide may be methylated to form 5-methylcytosine"
ggtttcagctgaatccaccaccacatttcatatggattgcacagtggtcctcaaatgaagcgtctgccagactcagctgcagggcttgctaaacacaaacttctgggcccctcctcagagtt

SEQ ID NO: 5846 - DNA, 122 bp, Homo sapiens
  misc_feature (61)..(62): /note="This region represents a CpG dinucleotide"
  misc_feature (61)..(61): /note="Nucleotide may be methylated to form 5-methylcytosine"
ttgtttaaccacacccttgactttctgttcagaacacactttcctaagaatgaatcttctcgttttagcttcttttgcaaaatgaataggcagagaatttcccaaatcatgaaatcctggtt

SEQ ID NO: 5847 - DNA, 122 bp, Homo sapiens
  misc_feature (61)..(62): /note="This region represents a CpG dinucleotide"
  misc_feature (61)..(61): /note="Nucleotide may be methylated to form 5-methylcytosine"
ataaatcaaattgagagccccttcagcttgtctgtcaggtcaggaatgaactaatttgtacgtaccttttctccctcatcttgtgtcagtccttcactatgtaccagttacataatcttctt

SEQ ID NO: 5848 - DNA, 122 bp, Homo sapiens
  misc_feature (61)..(62): /note="This region represents a CpG dinucleotide"
  misc_feature (61)..(61): /note="Nucleotide may be methylated to form 5-methylcytosine"
ggagggggaggatgggtttgcaggatgattcaggaatcagcagaaccaagtctttggcatcgtgaaatatcttattggaagaggctgagccagaggtaccaggacttaatccaggtaggtgg

SEQ ID NO: 5849 - DNA, 122 bp, Homo sapiens
  misc_feature (61)..(62): /note="This region represents a CpG dinucleotide"
  misc_feature (61)..(61): /note="Nucleotide may be methylated to form 5-methylcytosine"
ttattttgtagacagtgtccttcatttggggttctctagcacttcctcatgagatgtgtacggtgcacttttgacagaaataccacagatgtgttctcagtgcattttattaggaggccctt

SEQ ID NO: 5850 - DNA, 122 bp, Homo sapiens
  misc_feature (61)..(62): /note="This region represents a CpG dinucleotide"
  misc_feature (61)..(61): /note="Nucleotide may be methylated to form 5-methylcytosine"
aggggcaagctttcaggaggtgccagtgcagggtcagctcctccttaacaattctgcacccggccctgacaccaagtctaaagggtcatgaacctctgagtgaaaacaccaagtgcaggatc

SEQ ID NO: 5851 - DNA, 122 bp, Homo sapiens
  misc_feature (61)..(62): /note="This region represents a CpG dinucleotide"
  misc_feature (61)..(61): /note="Nucleotide may be methylated to form 5-methylcytosine"
tccaggccaaggtgaactttcatcctctcaagcccaatgaaccgtagacaggagagggaacgtgaaggcactggggcagaagaaacatctcggaaacccctaaactgcctcagcttaattta

SEQ ID NO: 5852 - DNA, 122 bp, Homo sapiens
  misc_feature (61)..(62): /note="This region represents a CpG dinucleotide"
  misc_feature (61)..(61): /note="Nucleotide may be methylated to form 5-methylcytosine"
tgccaaaagcatataattcaacttctgaaaaatacgaatggtcttcatcactgcagacaccgccccagcattttgaatcatcaaggtagctacttgtattctgtttgcagtatgtagtttgc

SEQ ID NO: 5853 - DNA, 122 bp, Homo sapiens
  misc_feature (61)..(62): /note="This region represents a CpG dinucleotide"
  misc_feature (61)..(61): /note="Nucleotide may be methylated to form 5-methylcytosine"
tatagcctgtgtttttctttgctggcctatggtgcctcccagtgcatggaagtggaagtacgggaccaatgcaattgatggtgatgatgccagtcattactaagctcctgtctaggcaggac

SEQ ID NO: 5854 - DNA, 122 bp, Homo sapiens
  misc_feature (61)..(62): /note="This region represents a CpG dinucleotide"
  misc_feature (61)..(61): /note="Nucleotide may be methylated to form 5-methylcytosine"
cctgggcacatatctgttgactctggattctgccaaaaagagtctgccattccagcaatgcgtttacaatgatcaaaccttgctggaaggaaacgttcataaattgagaaactgcctgaatt

SEQ ID NO: 5855 - DNA, 122 bp, Homo sapiens
  misc_feature (61)..(62): /note="This region represents a CpG dinucleotide"
  misc_feature (61)..(61): /note="Nucleotide may be methylated to form 5-methylcytosine"
gagtccaagcccagaatcctggcatccagggctctcaattacctgacttcactggcccatcgaaattgatcttctattgtccctgagtccacacccttcattctggccaagttaatctccat

SEQ ID NO: 5856 - DNA, 122 bp, Homo sapiens
  misc_feature (61)..(62): /note="This region represents a CpG dinucleotide"
  misc_feature (61)..(61): /note="Nucleotide may be methylated to form 5-methylcytosine"
aatctccttcatgacaaccctccaaagcaatccaagttcattcccagaaaccggttaagtcgctttatatttacataactagaaatcacaaacaatgctatattttattctatcttaattcc

SEQ ID NO: 5857 - DNA, 122 bp, Homo sapiens
  misc_feature (61)..(62): /note="This region represents a CpG dinucleotide"
  misc_feature (61)..(61): /note="Nucleotide may be methylated to form 5-methylcytosine"
ctgtgcataactctggttaaaagcctttggaatcagcccctcaggtcactctgactctaccgcagcctggtgtcaaagccagcccttcacggaacagccaggagggcatcacagctgacctc

SEQ ID NO: 5858 - DNA, 122 bp, Homo sapiens
  misc_feature (61)..(62): /note="This region represents a CpG dinucleotide"
  misc_feature (61)..(61): /note="Nucleotide may be methylated to form 5-methylcytosine"
tctggtgcacctggctggctctgtgctgtctgggctgagcactgagctaggtttcccatacgtctgctctgtcattcacggctgcattggcagcccagaagccatggatgtggctgcaggag

SEQ ID NO: 5859 - DNA, 122 bp, Homo sapiens
  misc_feature (61)..(62): /note="This region represents a CpG dinucleotide"
  misc_feature (61)..(61): /note="Nucleotide may be methylated to form 5-methylcytosine"
acaatgctgtgaggtgggggtgggggttgggaggcagatgctattactccattctactggcgaaaagactgagcctctggagatgtcaggtgacctgtgctcagcacgaggctcctgggtgg

SEQ ID NO: 5860 - DNA, 122 bp, Homo sapiens
  misc_feature (61)..(62): /note="This region represents a CpG dinucleotide"
  misc_feature (61)..(61): /note="Nucleotide may be methylated to form 5-methylcytosine"
acgtggagctggggctacagccattactttcggacaggtgcaattcaaagcgtgatcctccgaccaagagcttcgtcatcgccacctgggagcttattagaaatgcaggatctcaggtctcc

SEQ ID NO: 5861 - DNA, 122 bp, Homo sapiens
  misc_feature (61)..(62): /note="This region represents a CpG dinucleotide"
  misc_feature (61)..(61): /note="Nucleotide may be methylated to form 5-methylcytosine"
tctgggaatgaggcaactcaaggttctaggaggaaacacaaattatatttctgggtgactcgaattggccatgacctcactacaaatactgaggctttgaaggaactctggttcataagaga

SEQ ID NO: 5862 - DNA, 122 bp, Homo sapiens
  misc_feature (61)..(62): /note="This region represents a CpG dinucleotide"
  misc_feature (61)..(61): /note="Nucleotide may be methylated to form 5-methylcytosine"
tttgagagttgataacttcccaaaaggagtcatactacacagttttgcactggtttctggcgaaatttgctgtttaatgatcataattttaaaggccttttattgccctcaacaaatgtaac

SEQ ID NO: 5863 - DNA, 122 bp, Homo sapiens
  misc_feature (61)..(62): /note="This region represents a CpG dinucleotide"
  misc_feature (61)..(61): /note="Nucleotide may be methylated to form 5-methylcytosine"
gaaacaccaagttgttatgcaaagccacaggagttaagaatttagacaaggccaacacttcgctaacaagattcacttagagtccaccagttaattgtcaactaagatctgctgagaatccc

SEQ ID NO: 5864 - DNA, 122 bp, Homo sapiens
  misc_feature (61)..(62): /note="This region represents a CpG dinucleotide"
  misc_feature (61)..(61): /note="Nucleotide may be methylated to form 5-methylcytosine"
ttctaggaaggtgcccgtacttttccttagatgagcactctaccatttaaagggttttcacgttcattgtctcagttgataataaaccagtcccaggttatggggaatccctcctttctttc

SEQ ID NO: 5865 - DNA, 122 bp, Homo sapiens
  misc_feature (61)..(62): /note="This region represents a CpG dinucleotide"
  misc_feature (61)..(61): /note="Nucleotide may be methylated to form 5-methylcytosine"
gttgagacagtagaggtgggttgaagcacttttaatcacaaacaaacaatagtataagaccgtgaacagctcacccagtggctgttgccctcctccagccctcagctcaccctcttcccatg

SEQ ID NO: 5866 - DNA, 122 bp, Homo sapiens
  misc_feature (61)..(62): /note="This region represents a CpG dinucleotide"
  misc_feature (61)..(61): /note="Nucleotide may be methylated to form 5-methylcytosine"
ctccctcctccgcatccctccttccccgccctccgcgaggctgcagcccaggctgagcgccgcctcccaggcccagggccgcccctccaagccccaaccccgggtttcatccctggcaaggg

SEQ ID NO: 5867 - DNA, 122 bp, Homo sapiens
  misc_feature (61)..(62): /note="This region represents a CpG dinucleotide"
  misc_feature (61)..(61): /note="Nucleotide may be methylated to form 5-methylcytosine"
gggtcattgttgctgtccagagtggaagccatcagaggtgtcctgtttatctgtgtgactcggccctctttgggtcacaaaggccagatgatccagcagctacctggagggtggtttatgac

SEQ ID NO: 5868 - DNA, 122 bp, Homo sapiens
  misc_feature (61)..(62): /note="This region represents a CpG dinucleotide"
  misc_feature (61)..(61): /note="Nucleotide may be methylated to form 5-methylcytosine"
ccaagtgggttctggctggagtagccttgcttctccagatttagcatcctgcagagccaccgagaaaataaaaaagctgggcttggaggctgcctagagggacaggtgggtgaagggtcacc

SEQ ID NO: 5869 - DNA, 122 bp, Homo sapiens
  misc_feature (61)..(62): /note="This region represents a CpG dinucleotide"
  misc_feature (61)..(61): /note="Nucleotide may be methylated to form 5-methylcytosine"
aagattctgtggctctgagccatttttgggctgctgaaggaagtatctgggccttatgctcgctgcattgcccctctttccaagtgaatcacttcattaaaatgaaaggtttactaaaacag

SEQ ID NO: 5870 - DNA, 122 bp, Homo sapiens
  misc_feature (61)..(62): /note="This region represents a CpG dinucleotide"
  misc_feature (61)..(61): /note="Nucleotide may be methylated to form 5-methylcytosine"
tggcagactaaaaaaacattattagatttccaatgaaaacttttgctgtagtggttctaacgtgacacagccctacaaaaataaagatgaatcacggcccatttcgaaggagaggtctgact

SEQ ID NO: 5871 - DNA, 122 bp, Homo sapiens
  misc_feature (61)..(62): /note="This region represents a CpG dinucleotide"
  misc_feature (61)..(61): /note="Nucleotide may be methylated to form 5-methylcytosine"
acaaccttgacagatgggtttcctgggcaactgtaggcaccttgagtattttcttcagtgcggttacctctgtacctgacactcagtcaatgttgcttgagtggacaagtgaatgactgtcc

SEQ ID NO: 5872 - DNA, 122 bp, Homo sapiens
  misc_feature (61)..(62): /note="This region represents a CpG dinucleotide"
  misc_feature (61)..(61): /note="Nucleotide may be methylated to form 5-methylcytosine"
gggctaccctataagggcagggctcagatacaatccgagagcaggactaaagcatgagggcggccaaggcggaagggagtagggaaggaagcgccgcgcgtttccaagatacgcaggcgggc

SEQ ID NO: 5873 - DNA, 122 bp, Homo sapiens
  misc_feature (61)..(62): /note="This region represents a CpG dinucleotide"
  misc_feature (61)..(61): /note="Nucleotide may be methylated to form 5-methylcytosine"
ttcataggtttggcaaagtcaccaacactatttcctttcaaatgccaagggagattttaacgtggctaccaagaaacaaacaagcggagatgtcaaacagttaatgtgtccatttagacccc

SEQ ID NO: 5874 - DNA, 122 bp, Homo sapiens
  misc_feature (61)..(62): /note="This region represents a CpG dinucleotide"
  misc_feature (61)..(61): /note="Nucleotide may be methylated to form 5-methylcytosine"
atccgaacatcagaaggaacagactctggacgcgcggccgttaagaactgtaacactcaccggacccgccccctttaagaactgtaacacaccgcgagggtctggggcttcattcttgaagt

SEQ ID NO: 5875 - DNA, 122 bp, Homo sapiens
  misc_feature (61)..(62): /note="This region represents a CpG dinucleotide"
  misc_feature (61)..(61): /note="Nucleotide may be methylated to form 5-methylcytosine"
tgagaatgaggaactgtccctgttttgttttcttttacccagtcaagtgtgtctcagctacgagtttgagcatatctgcttacagggaagcttgttgagtgtgtcagatatttttgggcctc

SEQ ID NO: 5876 - DNA, 122 bp, Homo sapiens
  misc_feature (61)..(62): /note="This region represents a CpG dinucleotide"
  misc_feature (61)..(61): /note="Nucleotide may be methylated to form 5-methylcytosine"
cgtgtaggaaggcagtgacagtccaagtgacaggcagatcataaaacctcaaggataggccgggcccggtggctcatgcctgtaatcccaagcacttcgggaggccgaggtgggcaaatcac

SEQ ID NO: 5877 - DNA, 122 bp, Homo sapiens
  misc_feature (61)..(62): /note="This region represents a CpG dinucleotide"
  misc_feature (61)..(61): /note="Nucleotide may be methylated to form 5-methylcytosine"
aaagggttgaaattaagccagaggataaggaaaagagctgtgtcagttgagaaaaagatgcggtcagtcaggcttgtaatgtgctaaaaccacaagaatgttacaggttcagcacccattct

SEQ ID NO: 5878 - DNA, 122 bp, Homo sapiens
  misc_feature (61)..(62): /note="This region represents a CpG dinucleotide"
  misc_feature (61)..(61): /note="Nucleotide may be methylated to form 5-methylcytosine"
ccctctgggttctctagagcaacagcaatacccgcccggcaggggtgtggcttagagccccgcacctcctcgccgcgcggcgggcctgacttctagccacgggtctccgcagttggcccagc

SEQ ID NO: 5879 - DNA, 122 bp, Homo sapiens
  misc_feature (61)..(62): /note="This region represents a CpG dinucleotide"
  misc_feature (61)..(61): /note="Nucleotide may be methylated to form 5-methylcytosine"
tcacaataaataggagtagaccttatgggggaatgagaattccaagccgacaacatcacacgtgccaacacagagaagctagaaacaccagatgtttagggacctcaggatcaggaactggg

SEQ ID NO: 5880 - DNA, 122 bp, Homo sapiens
  misc_feature (61)..(62): /note="This region represents a CpG dinucleotide"
  misc_feature (61)..(61): /note="Nucleotide may be methylated to form 5-methylcytosine"
gaagatgttaagatttgggcttcagttatttatgcaagtctttaactcttattatcttttcgcaagaaaatattgttgccacctgctggcagtcatgtattagtggaatggttttctactcc

SEQ ID NO: 5881 - DNA, 122 bp, Homo sapiens
  misc_feature (61)..(62): /note="This region represents a CpG dinucleotide"
  misc_feature (61)..(61): /note="Nucleotide may be methylated to form 5-methylcytosine"
atattccaccacaccactgttatcgtctactcacttcacttgacaataatgtaggctgggcgtggtggctcatgcctgtaatcccagcactctggaaggccaaggcaggcagatcacctgag

SEQ ID NO: 5882 - DNA, 122 bp, Homo sapiens
  misc_feature (61)..(62): /note="This region represents a CpG dinucleotide"
  misc_feature (61)..(61): /note="Nucleotide may be methylated to form 5-methylcytosine"
ttctaattgaagagctctgccaaatttgcttctccttgctactttagctattttctgttccgcgggactctgtcaaatgtaaacaaagggtaggtgaaggagcatgattaatcgcaaagctt

SEQ ID NO: 5883 - DNA, 122 bp, Homo sapiens
  misc_feature (61)..(62): /note="This region represents a CpG dinucleotide"
  misc_feature (61)..(61): /note="Nucleotide may be methylated to form 5-methylcytosine"
cctgcccgcccttctcctccagggcatcctacaaatgtcctgtgccaccacctctcatagcgctgccaggagcagtgtgagaaggactcatgaccacgcctcaatcctgaattcccctcgcc

SEQ ID NO: 5884 - DNA, 122 bp, Homo sapiens
  misc_feature (61)..(62): /note="This region represents a CpG dinucleotide"
  misc_feature (61)..(61): /note="Nucleotide may be methylated to form 5-methylcytosine"
tcttggttcccacagtcttccaccagaagcccaccccacgtgtaggcgcgggcgttcaggcgggctgctgcttgctgggaaccacgtttctcagcctgacttgttctctctcttcctctcct

SEQ ID NO: 5885 - DNA, 122 bp, Homo sapiens
  misc_feature (61)..(62): /note="This region represents a CpG dinucleotide"
  misc_feature (61)..(61): /note="Nucleotide may be methylated to form 5-methylcytosine"
acatatgacacagattagtttcaaaggtcataactgtgtggccagagttaagtgattagtcgagaagggcaaaacataacaagaccaagtgtcagtttgcaatgaggcatcaccaatagcta

SEQ ID NO: 5886 - DNA, 122 bp, Homo sapiens
  misc_feature (61)..(62): /note="This region represents a CpG dinucleotide"
  misc_feature (61)..(61): /note="Nucleotide may be methylated to form 5-methylcytosine"
tatatttccttgtgaacagtctgtacttggcatgttgtcattataacactgccatcatgccgcctgtgatacactactaggtggagcacaggacagaggacccagaaaagaagaaacacaga

SEQ ID NO: 5887 - DNA, 122 bp, Homo sapiens
  misc_feature (61)..(62): /note="This region represents a CpG dinucleotide"
  misc_feature (61)..(61): /note="Nucleotide may be methylated to form 5-methylcytosine"
gttaggtacaggacaataaaggaggcaattaatctataaaaaagatcagtgactggaaggcgaataggtctggcctctggttgtttacagaacaagaacaatgaggaagagagctaatttat

SEQ ID NO: 5888 - DNA, 122 bp, Homo sapiens
  misc_feature (61)..(62): /note="This region represents a CpG dinucleotide"
  misc_feature (61)..(61): /note="Nucleotide may be methylated to form 5-methylcytosine"
gattctcaacctggctgcacatcagaatcaccttaaaggctattgctaatgcctgtgccccgtcccagatccgtcaaatcagaatccctggggtaaggccaggctttgactcatttttttaa

SEQ ID NO: 5889 - DNA, 122 bp, Homo sapiens
  misc_feature (61)..(62): /note="This region represents a CpG dinucleotide"
  misc_feature (61)..(61): /note="Nucleotide may be methylated to form 5-methylcytosine"
aacctgtcatcatggggcagccaagccaatggccctaattaaagtctcctgagacacaggcgtggctatctccttccagcgaggcccgtctctagataaatgctcctctaccacagtgccag

SEQ ID NO: 5890 - DNA, 122 bp, Homo sapiens
  misc_feature (61)..(62): /note="This region represents a CpG dinucleotide"
  misc_feature (61)..(61): /note="Nucleotide may be methylated to form 5-methylcytosine"
ctcctaagcacgttacctatgctaaaacatttcatccttacaaacaaccctgtgaggaatcgtttttccagatgaataatttgagacacagaacggtcaagaaacttgccaaaggctacaga

SEQ ID NO: 5891 - DNA, 122 bp, Homo sapiens
  misc_feature (61)..(62): /note="This region represents a CpG dinucleotide"
  misc_feature (61)..(61): /note="Nucleotide may be methylated to form 5-methylcytosine"
gaagaaagcagtttctaggtgggtgcccgtcccgtctgctctcgccgtctgctgggattccgagaaagaagatgctggttgctcacggtatgctcaacccctctgccccacggcgctgcagg

SEQ ID NO: 5892 - DNA, 122 bp, Homo sapiens
  misc_feature (61)..(62): /note="This region represents a CpG dinucleotide"
  misc_feature (61)..(61): /note="Nucleotide may be methylated to form 5-methylcytosine"
ggtctgacaaaagttatttcatcctagtatctgcaatttttccgcagaaaattacagagacgcacagtgaatgtgaaaggagggaaattaacaatagctattggcagagccaaacaaatcat

SEQ ID NO: 5893 - DNA, 122 bp, Homo sapiens
  misc_feature (61)..(62): /note="This region represents a CpG dinucleotide"
  misc_feature (61)..(61): /note="Nucleotide may be methylated to form 5-methylcytosine"
gtcgattttaaacatgttcctctggtgatgctgttattctctccagtttgagaaccaccacgtcagaggcgtcttcctgtctgaaccattctttcctgctgctctcaggaaggcagaaaggt

SEQ ID NO: 5894 - DNA, 122 bp, Homo sapiens
  misc_feature (61)..(62): /note="This region represents a CpG dinucleotide"
  misc_feature (61)..(61): /note="Nucleotide may be methylated to form 5-methylcytosine"
tttgcagccctgagccccagggatggaaggcgtgagtccagcattgtgagacagcagtgccgagagccttctctgagtaaggcaggaagccttcccaattccagtctccaagttttattctt

SEQ ID NO: 5895 - DNA, 122 bp, Homo sapiens
  misc_feature (61)..(62): /note="This region represents a CpG dinucleotide"
  misc_feature (61)..(61): /note="Nucleotide may be methylated to form 5-methylcytosine"
tggcacaaaaggcaccaacattccctttccaaaccatccatcaccatgggtggaaggcagcgccacctgctgcccatcatattatggctcacatacccataatttccttgcggtgctgaatt

SEQ ID NO: 5896 - DNA, 122 bp, Homo sapiens
  misc_feature (61)..(62): /note="This region represents a CpG dinucleotide"
  misc_feature (61)..(61): /note="Nucleotide may be methylated to form 5-methylcytosine"
cgatgacctcagggggtgttattatatcatctacatcggcatctgcctctccctcctgcacgcaggtcctggagtctgtccccggcccacagaagactcatgaatgaatcaccaaataggat

SEQ ID NO: 5897 - DNA, 122 bp, Homo sapiens
  misc_feature (61)..(62): /note="This region represents a CpG dinucleotide"
  misc_feature (61)..(61): /note="Nucleotide may be methylated to form 5-methylcytosine"
tgtactgctgaagatctattatttccttcatttcatagttatcaccttttctcttacatacgatcactgccaaatcaaataagaagatatgcctgggaaaaagagattgattgattgatttt

SEQ ID NO: 5898 - DNA, 122 bp, Homo sapiens
  misc_feature (61)..(62): /note="This region represents a CpG dinucleotide"
  misc_feature (61)..(61): /note="Nucleotide may be methylated to form 5-methylcytosine"
caacccacgggttctacataaagcctgaagccagcagacatgtaatggaatacattcctccgtgtgagtcaagccttgttgaaaaggaagcaatcaccctgttatggaaataaatcataaac

SEQ ID NO: 5899 - DNA, 122 bp, Homo sapiens
  misc_feature (61)..(62): /note="This region represents a CpG dinucleotide"
  misc_feature (61)..(61): /note="Nucleotide may be methylated to form 5-methylcytosine"
accccagcatttctgggtttgatttgctatatgggagagtatctctgtgtcttttgtccacgttattatttgttatgaaaaattatgagcatgttccctaagactaggttttctagcatggt

SEQ ID NO: 5900 - DNA, 122 bp, Homo sapiens
  misc_feature (61)..(62): /note="This region represents a CpG dinucleotide"
  misc_feature (61)..(61): /note="Nucleotide may be methylated to form 5-methylcytosine"
ttcctcaacaaaaatcttatcaaatccaacccaattgagcatataaaagatattacactacgaccatacttagtaaccccaggtatgcaaggatggcttaacaggagaaaatccatacatgt

SEQ ID NO: 5901 - DNA, 122 bp, Homo sapiens
  misc_feature (61)..(62): /note="This region represents a CpG dinucleotide"
  misc_feature (61)..(61): /note="Nucleotide may be methylated to form 5-methylcytosine"
tccctacatttctttttcctcccatcaaaatggtattgacaagagaccataaaccttgggcgaatggaacaaaagggaactatttgcactcacactaaatggatcacacgtgaaatatttag

SEQ ID NO: 5902 - DNA, 122 bp, Homo sapiens
  misc_feature (61)..(62): /note="This region represents a CpG dinucleotide"
  misc_feature (61)..(61): /note="Nucleotide may be methylated to form 5-methylcytosine"
tgaaaaatgaggaggccaggcaataaaagagtcaggatttcttccaaaaaaaatacacagcggtggagcttggcataaagttcaaatgctcctacaccctgccctgcagtatctctaaccag

SEQ ID NO: 5903 - DNA, 122 bp, Homo sapiens
  misc_feature (61)..(62): /note="This region represents a CpG dinucleotide"
  misc_feature (61)..(61): /note="Nucleotide may be methylated to form 5-methylcytosine"
atgcctgtccacgcctccactcccgggccacttccccgtggggcgggcagtggggcagggcggggtgggaatctgctgcaaccagggaagggaattgccccccgggcacagagagtttggag

SEQ ID NO: 5904 - DNA, 122 bp, Homo sapiens
  misc_feature (61)..(62): /note="This region represents a CpG dinucleotide"
  misc_feature (61)..(61): /note="Nucleotide may be methylated to form 5-methylcytosine"
atatcagtagccttcaataaatgggcttaggtccattcctatcagtgctgacaaaggaaacgtgtgagcagaatctggaggaccatggtcctccatgtgctagaatatacagtaagcaagga

SEQ ID NO: 5905 - DNA, 122 bp, Homo sapiens
  misc_feature (61)..(62): /note="This region represents a CpG dinucleotide"
  misc_feature (61)..(61): /note="Nucleotide may be methylated to form 5-methylcytosine"
cgacggattcctctaagccagcagtgaaaacgaaccttgaactgtgagctgactgtaggccgccgatgtttgcttccacatttcaaggtatcctggttgttgcggcttgaaacatgttcaaa

SEQ ID NO: 5906 - DNA, 122 bp, Homo sapiens
  misc_feature (61)..(62): /note="This region represents a CpG dinucleotide"
  misc_feature (61)..(61): /note="Nucleotide may be methylated to form 5-methylcytosine"
ttcctttctctttcccagttccaactctggtggaggtgctaatgagaagagaaaaggtcccgaggtaagaagtgaaagagagaaaagaaagggtcagaagaaaaacagtaatccacatatgt

SEQ ID NO: 5907 - DNA, 122 bp, Homo sapiens
  misc_feature (61)..(62): /note="This region represents a CpG dinucleotide"
  misc_feature (61)..(61): /note="Nucleotide may be methylated to form 5-methylcytosine"
tcaggcaggacaccccttgtcattcgaacggttctggtgtgagccagggtacagctgggccgcctggggccccttgccgagtttccgttccacttcaggtgtcgcttcccgcggcccattgg

SEQ ID NO: 5908 - DNA, 122 bp, Homo sapiens
  misc_feature (61)..(62): /note="This region represents a CpG dinucleotide"
  misc_feature (61)..(61): /note="Nucleotide may be methylated to form 5-methylcytosine"
taagttttcgtgttcattgaaacatcactatttcaggggcctcaatgtttcaaccctgaccgttggctttttttttggagacggagttttgctcttgttgcccatgtggctgtattaggtat

SEQ ID NO: 5909 - DNA, 122 bp, Homo sapiens
  misc_feature (61)..(62): /note="This region represents a CpG dinucleotide"
  misc_feature (61)..(61): /note="Nucleotide may be methylated to form 5-methylcytosine"
ttagtcactgtgtttctgcttacagtatgtgaaatactctcaccagaacaaaggtcccagcgtcaataagtcaaaccgcagactctgacagctgagtgaatagcagaggccagagtccactt

SEQ ID NO: 5910 - DNA, 122 bp, Homo sapiens
  misc_feature (61)..(62): /note="This region represents a CpG dinucleotide"
  misc_feature (61)..(61): /note="Nucleotide may be methylated to form 5-methylcytosine"
gactgtgtgttttgtatcccaccaaaaatcacatgttgaaatcctaactcccaatgtgatcgttttaggagttgggtctttgggaggtgattaggccataagaatgcagccctcatgaatgg

SEQ ID NO: 5911 - DNA, 122 bp, Homo sapiens
  misc_feature (61)..(62): /note="This region represents a CpG dinucleotide"
  misc_feature (61)..(61): /note="Nucleotide may be methylated to form 5-methylcytosine"
tgaaggtgacctgaagggccgacttttgcagtgagtgttcctgacagctgggggggggcacgactgaagctctgccttgggtcttacctggccgtaaggcaactccatttttagcttggatc

SEQ ID NO: 5912 - DNA, 122 bp, Homo sapiens
  misc_feature (61)..(62): /note="This region represents a CpG dinucleotide"
  misc_feature (61)..(61): /note="Nucleotide may be methylated to form 5-methylcytosine"
agcgcctcatatttccactttccagtggtaactagcagaggtaagagaaaaacagccatgcgggtgagtcatcattcctcactccaggaaatggctcattttacaagcttttggaaggacct

SEQ ID NO: 5913 - DNA, 122 bp, Homo sapiens
  misc_feature (61)..(62): /note="This region represents a CpG dinucleotide"
  misc_feature (61)..(61): /note="Nucleotide may be methylated to form 5-methylcytosine"
ttgtagggtagggtgcatgtgactgccacactggcttcttggtgttcatcaccagacaaacgtctgttttcctgccatgatgctaaccatgtttagcatttgtgtccacttggtatgataac

SEQ ID NO: 5914 - DNA, 122 bp, Homo sapiens
  misc_feature (61)..(62): /note="This region represents a CpG dinucleotide"
  misc_feature (61)..(61): /note="Nucleotide may be methylated to form 5-methylcytosine"
tctccatctgggctagcatttagtcttcagcagtctacaagaatgatttcagaaaggaaacgacgacatgagaagaaacagaaactgtggatcatgatggctcataaaataggaatgactcg

SEQ ID NO: 5915 - DNA, 122 bp, Homo sapiens
  misc_feature (61)..(62): /note="This region represents a CpG dinucleotide"
  misc_feature (61)..(61): /note="Nucleotide may be methylated to form 5-methylcytosine"
ctgctttgtaggggcaccccactggctgatggaaaaacttgctgaaggacgcaggttggccgtagctggtcagtaaaagcaacctgctaggtagcagagaaatatgctaaaggatgcagggc

SEQ ID NO: 5916 - DNA, 122 bp, Homo sapiens
  misc_feature (61)..(62): /note="This region represents a CpG dinucleotide"
  misc_feature (61)..(61): /note="Nucleotide may be methylated to form 5-methylcytosine"
tgctcctcacccatccggtctcactgggacgccacgttcctcagggaagccagtcgggaacgttttttttgtttgtttgtttgtttttgagacggagttctatgttatccaggctggtgtcg

SEQ ID NO: 5917 - DNA, 122 bp, Homo sapiens
  misc_feature (61)..(62): /note="This region represents a CpG dinucleotide"
  misc_feature (61)..(61): /note="Nucleotide may be methylated to form 5-methylcytosine"
tgtgcaagaagcaatgaggttttgagcacggttttttaccactttatgaatcaaccttcccgcctcctcttcccccccccatctctggagtcctcatagttttctctttaaaatcatttgta

SEQ ID NO: 5918 - DNA, 122 bp, Homo sapiens
  misc_feature (61)..(62): /note="This region represents a CpG dinucleotide"
  misc_feature (61)..(61): /note="Nucleotide may be methylated to form 5-methylcytosine"
ttaagaacaactgagttacagcaataaaactaattacatgtgcacgcctcagccaggaagcggatgatgtagccataattacacattcagacagggaagtaaaggcagtcccatttaggact

SEQ ID NO: 5919 - DNA, 122 bp, Homo sapiens
  misc_feature (61)..(62): /note="This region represents a CpG dinucleotide"
  misc_feature (61)..(61): /note="Nucleotide may be methylated to form 5-methylcytosine"
ggaaaacatctgaggaagtgaggatttgtctgccctgaccacatcctgtgcagccaggcccggctccctccagggctggtgcaatgcagtggcgcccaccagcggccgccctccggggcccg

SEQ ID NO: 5920 - DNA, 122 bp, Homo sapiens
  misc_feature (61)..(62): /note="This region represents a CpG dinucleotide"
  misc_feature (61)..(61): /note="Nucleotide may be methylated to form 5-methylcytosine"
aaaagataataaagggaaaggagagagagaaaagcattgcctgtggcagggtggagaaggcgaaatgctcagggaggccagaaaaagacccacccattgcagcaccactgaaaagttcaggc

SEQ ID NO: 5921 - DNA, 122 bp, Homo sapiens
  misc_feature (61)..(62): /note="This region represents a CpG dinucleotide"
  misc_feature (61)..(61): /note="Nucleotide may be methylated to form 5-methylcytosine"
caggtcaaattatgataatctctgggaattaggttttgaaagaatgccaaccctcttctgcgccctctggtggcctccagcctgctgatttttactcagaaagcaaggtattgattttcaag

SEQ ID NO: 5922 - DNA, 122 bp, Homo sapiens
  misc_feature (61)..(62): /note="This region represents a CpG dinucleotide"
  misc_feature (61)..(61): /note="Nucleotide may be methylated to form 5-methylcytosine"
tcctgtttctatggatttgactattctgggtactatatgtaaatgataccacacagtctgcgttcttgtgactggcttacttcacttagcacaatgtcattagaattcatccatgtggtagc

SEQ ID NO: 5923 - DNA, 122 bp, Homo sapiens
  misc_feature (61)..(62): /note="This region represents a CpG dinucleotide"
  misc_feature (61)..(61): /note="Nucleotide may be methylated to form 5-methylcytosine"
gactatgtctaagcacctgtgacacacctggagcaacacccaggaaggcagaggggagggcgagaacctggtattgactgccaagtgcatggcacaatggaccaggaggaggacggtgggga

SEQ ID NO: 5924 - DNA, 122 bp, Homo sapiens
  misc_feature (61)..(62): /note="This region represents a CpG dinucleotide"
  misc_feature (61)..(61): /note="Nucleotide may be methylated to form 5-methylcytosine"
ccaccagtggtccccttcctttgtattgttgtttctgatctcattttgctcatcccaggacgtgcttaagccaaatgctttgcttttctggagagatgaaatagaggagagccattcatgaa

SEQ ID NO: 5925 - DNA, 122 bp, Homo sapiens
  misc_feature (61)..(62): /note="This region represents a CpG dinucleotide"
  misc_feature (61)..(61): /note="Nucleotide may be methylated to form 5-methylcytosine"
cctgggcttttcaatccaggccagtaattgtccctctttgtttggaaaatgcacagggatcgaatatccatcagtctaaggcagtatataggggaaagaggaggaaggagcagggcagaagt

SEQ ID NO: 5926 - DNA, 122 bp, Homo sapiens
  misc_feature (61)..(62): /note="This region represents a CpG dinucleotide"
  misc_feature (61)..(61): /note="Nucleotide may be methylated to form 5-methylcytosine"
gcaccaccgaaagctcatttgaagtacaatccatcatctgtgtccaacatgacagggaaccgggcagcgcacacgctccatcagatgctgtgattaaagggagggacgctgcggtttgtcac

SEQ ID NO: 5927 - DNA, 122 bp, Homo sapiens
  misc_feature (61)..(62): /note="This region represents a CpG dinucleotide"
  misc_feature (61)..(61): /note="Nucleotide may be methylated to form 5-methylcytosine"
cactgtatatacctctttctgaagagcttagtaaatgtcctgatggctgtcaggagtgcacgtaaaaaacccaacataatcacctgggactgtgttggaattgtcgttctgtgtggaatagt

SEQ ID NO: 5928 - DNA, 122 bp, Homo sapiens
  misc_feature (61)..(62): /note="This region represents a CpG dinucleotide"
  misc_feature (61)..(61): /note="Nucleotide may be methylated to form 5-methylcytosine"
aaaaacttgaaactgcttaaaagctaaagggaagaaacccaatagaagaagttggcaatacgactgcaaatggggacagtaagagctaactgtaaactggaaatgtctgtatgaaatgatgt

SEQ ID NO: 5929 - DNA, 122 bp, Homo sapiens
  misc_feature (61)..(62): /note="This region represents a CpG dinucleotide"
  misc_feature (61)..(61): /note="Nucleotide may be methylated to form 5-methylcytosine"
ccttagatataagagtaaatattttgttctgccctcaattcaaatatgccctcaggagagcgacatcaacagtcatgcggttactgtatggcaggctttgtctggaaccaagcactgaaact

SEQ ID NO: 5930 - DNA, 122 bp, Homo sapiens
  misc_feature (61)..(62): /note="This region represents a CpG dinucleotide"
  misc_feature (61)..(61): /note="Nucleotide may be methylated to form 5-methylcytosine"
gtcagaacttctgtaagtgagccgaggcacaggcagcatgaaaacagtcctggcgggcatcgacaggcccgggccgaagaacttctgctttacacccttccagttaacaacatatcccttat

SEQ ID NO: 5931 - DNA, 122 bp, Homo sapiens
  misc_feature (61)..(62): /note="This region represents a CpG dinucleotide"
  misc_feature (61)..(61): /note="Nucleotide may be methylated to form 5-methylcytosine"
tcagtagttgagtctgaggtcaaacttggggctcactgtctctatatgccccaacagggacgtgctgtgtggcttcctcctctgtgtcaacatctctggagctcctcggctaggggacctgg

SEQ ID NO: 5932 - DNA, 122 bp, Homo sapiens
  misc_feature (61)..(62): /note="This region represents a CpG dinucleotide"
  misc_feature (61)..(61): /note="Nucleotide may be methylated to form 5-methylcytosine"
ctcccttgcccttttgcctcagatttccaacgcttgctagctttgtctgttttgaatggccgtgctcagtgttcagctacggaaatcctctccttccccagctggctcaccaggaaattgtt

SEQ ID NO: 5933 - DNA, 122 bp, Homo sapiens
  misc_feature (61)..(62): /note="This region represents a CpG dinucleotide"
  misc_feature (61)..(61): /note="Nucleotide may be methylated to form 5-methylcytosine"
gttgacagagagactccagctcaaaaaaaaaaaaaaaaaaaaaaaaaaaaatctgacctacgttatttgacttaggtcataaaacctccattccagagagggtcctgccccacaccagaagg

SEQ ID NO: 5934 - DNA, 122 bp, Homo sapiens
  misc_feature (61)..(62): /note="This region represents a CpG dinucleotide"
  misc_feature (61)..(61): /note="Nucleotide may be methylated to form 5-methylcytosine"
tacacagagcggcgtgttttgacgcggaccacagcaaacgcgtcaggtcacgggcatttacgcgtatctgagagcaacgtctttatcatcagcacggtgcgttccctgcaaaggtaatgaat

SEQ ID NO: 5935 - DNA, 122 bp, Homo sapiens
  misc_feature (61)..(62): /note="This region represents a CpG dinucleotide"
  misc_feature (61)..(61): /note="Nucleotide may be methylated to form 5-methylcytosine"
ctcaaagttcaacaaaatgtggatgcgtcattttatttacacttcaatggccagaacttacgaaatggcctcatccagttgcaagaagtttgggaaatgtagccttccatatttacaggaat

SEQ ID NO: 5936 - DNA, 122 bp, Homo sapiens
  misc_feature (61)..(62): /note="This region represents a CpG dinucleotide"
  misc_feature (61)..(61): /note="Nucleotide may be methylated to form 5-methylcytosine"
cctcttcccctgcgaggccgagagggtgcagagctggtggcttcaggaggtggctgtgagcgcgggtctggggccaagagcagaggacaggagaagactgccaagccaccaccggtcctgcg

SEQ ID NO: 5937 - DNA, 122 bp, Homo sapiens
  misc_feature (61)..(62): /note="This region represents a CpG dinucleotide"
  misc_feature (61)..(61): /note="Nucleotide may be methylated to form 5-methylcytosine"
tagggctggggaagccccagtcaagacagtcagccacagcctgataactctccctgcatgcgcaagcccaccgcttgcaacctggaggaagctcctgtcagcaatgggctctaatgacatgt

SEQ ID NO: 5938 - DNA, 122 bp, Homo sapiens
  misc_feature (61)..(62): /note="This region represents a CpG dinucleotide"
  misc_feature (61)..(61): /note="Nucleotide may be methylated to form 5-methylcytosine"
aacgtgaggggaggctattggaaagttttaagcagtgaattaacatgatcagggtaccttcggacaccaatggctaggtggagaacaggctacaacaaagtgttatcagagtccagtcacga

SEQ ID NO: 5939 - DNA, 122 bp, Homo sapiens
  misc_feature (61)..(62): /note="This region represents a CpG dinucleotide"
  misc_feature (61)..(61): /note="Nucleotide may be methylated to form 5-methylcytosine"
ttctggtgggggaggactctgagtacagaatataaatcactcttggcttcccagagcttacgctgactcatttgagaaacagaaaaagtgactggcaggccaacatatacatacacatgcat

SEQ ID NO: 5940 - DNA, 122 bp, Homo sapiens
  misc_feature (61)..(62): /note="This region represents a CpG dinucleotide"
  misc_feature (61)..(61): /note="Nucleotide may be methylated to form 5-methylcytosine"
tattgtaaagagatcttgagtaatcatttttatcttcctaaaatagccgttgtttactcccgtaagcgagtaagaaacttgtgccattattccttattgggtgcatatagatttctcacctt

SEQ ID NO: 5941 - DNA, 122 bp, Homo sapiens
  misc_feature (61)..(62): /note="This region represents a CpG dinucleotide"
  misc_feature (61)..(61): /note="Nucleotide may be methylated to form 5-methylcytosine"
ccttgtaaaaactgttacttccctttaaaatgatcctttgtggtttctgtggggagcctccggctctgaagacagagttggagggtggtgagagtattaggcaaacaacaaaacacacacac

SEQ ID NO: 5942 - DNA, 122 bp, Homo sapiens
  misc_feature (61)..(62): /note="This region represents a CpG dinucleotide"
  misc_feature (61)..(61): /note="Nucleotide may be methylated to form 5-methylcytosine"
agaaagaatgactgaatatttaatcataactacaacttttccttcttaaatactgaccagcgaactcacacgtgttcacgactttaaataaataattcacctttttaaagagaaatgtactt

SEQ ID NO: 5943 - DNA, 122 bp, Homo sapiens
  misc_feature (61)..(62): /note="This region represents a CpG dinucleotide"
  misc_feature (61)..(61): /note="Nucleotide may be methylated to form 5-methylcytosine"
aagcatgtggaattgctgtgactggccagtactgcctttgcctgtagataagatcaggtgcgtccaggatggtatggccgtagattgcctttgcctttagaccaaccttccctgcatactca

SEQ ID NO: 5944 - DNA, 122 bp, Homo sapiens
  misc_feature (61)..(62): /note="This region represents a CpG dinucleotide"
  misc_feature (61)..(61): /note="Nucleotide may be methylated to form 5-methylcytosine"
tccaatcttcttgaaaaccagttcttaattgtaaggaatttttccacctgggaaccatgccgtaatttaaaaatataaaagacctttcatgaacaataactgcaaataacccatttgttagt

SEQ ID NO: 5945 - DNA, 122 bp, Homo sapiens
  misc_feature (61)..(62): /note="This region represents a CpG dinucleotide"
  misc_feature (61)..(61): /note="Nucleotide may be methylated to form 5-methylcytosine"
tgcggctgagtcactaattagcagtgagagcctgggctgtatctcctaccaaataaccagcggagtggagtgacaggtccttacttaaacatggtttaagtaagcattcacagttccttact

SEQ ID NO: 5946 - DNA, 122 bp, Homo sapiens
  misc_feature (61)..(62): /note="This region represents a CpG dinucleotide"
  misc_feature (61)..(61): /note="Nucleotide may be methylated to form 5-methylcytosine"
tctttcggagttcaatcttcaggaacagtcctaggctgaagatgatgatgccagccaacacggagaaccagttcatgagccagagcccttgggccaacttgacccgcttcttctggtcaaac

SEQ ID NO: 5947 - DNA, 122 bp, Homo sapiens
  misc_feature (61)..(62): /note="This region represents a CpG dinucleotide"
  misc_feature (61)..(61): /note="Nucleotide may be methylated to form 5-methylcytosine"
ttttgcaataaaatcaagaatcatctacccaggggaccattcaaacttgttaattcaaaacgtaggaaaagatgtgggcctgggtttgcatacctatccacagaatgggcctgatttgtggc

SEQ ID NO: 5948 - DNA, 122 bp, Homo sapiens
  misc_feature (61)..(62): /note="This region represents a CpG dinucleotide"
  misc_feature (61)..(61): /note="Nucleotide may be methylated to form 5-methylcytosine"
gggcagaaaaggaaaggtaggctgtaggggacataaattacaaactggagtccctcaattcgtgagtggagattcacgtgtctattacagacaagccacattgtttcaggctcttatagtga

SEQ ID NO: 5949 - DNA, 122 bp, Homo sapiens
  misc_feature (61)..(62): /note="This region represents a CpG dinucleotide"
  misc_feature (61)..(61): /note="Nucleotide may be methylated to form 5-methylcytosine"
ccacaaggtgccaggactagcatggtgctaggttacctgtggggccctgtggtgtctccacggcattgcagtgacatgctcagtgaaggggacctgttaggcatttcatgagtggctcagag

SEQ ID NO: 5950 - DNA, 122 bp, Homo sapiens
  misc_feature (61)..(62): /note="This region represents a CpG dinucleotide"
  misc_feature (61)..(61): /note="Nucleotide may be methylated to form 5-methylcytosine"
cttactctttctgctcgggaggctgaggttcctacatttccagctcatgctggactgtaccgtaagcaacaagtgaaatgagttcagtgatctcattctagtccttcgactcctgtccacat

SEQ ID NO: 5951 - DNA, 122 bp, Homo sapiens
  misc_feature (61)..(62): /note="This region represents a CpG dinucleotide"
  misc_feature (61)..(61): /note="Nucleotide may be methylated to form 5-methylcytosine"
aactattgcataaacaaggctggtttgtgaaccaaaggacatgagccccaaacctggagtcgcagaggcagcatgacagcacagacagcacagcttctggtgtcaggcattcctgcactcaa

SEQ ID NO: 5952 - DNA, 122 bp, Homo sapiens
  misc_feature (61)..(62): /note="This region represents a CpG dinucleotide"
  misc_feature (61)..(61): /note="Nucleotide may be methylated to form 5-methylcytosine"
catacttatagcaataaattattccttgggtatctgaggttcaaatttaactctgtgggccgggcgcggtggctcacgcctgtaatcccagcactttgggaggccaaggcgggcggatcacg

SEQ ID NO: 5953 - DNA, 122 bp, Homo sapiens
  misc_feature (61)..(62): /note="This region represents a CpG dinucleotide"
  misc_feature (61)..(61): /note="Nucleotide may be methylated to form 5-methylcytosine"
tcactgcagcctctacctcccgggctcaagccatcctcctacctcagtcattcaaaatgccgacattacaggcctcagccatcacgccccgccaagatcgtgtattcctgagtgctccgtgt

SEQ ID NO: 5954 - DNA, 122 bp, Homo sapiens
  misc_feature (61)..(62): /note="This region represents a CpG dinucleotide"
  misc_feature (61)..(61): /note="Nucleotide may be methylated to form 5-methylcytosine"
caggcaggatttgcagcctatgggcatgtggggagctagttcagccttgagtagcccccacgtgcctcctgtggagcactggtatgggtggggtatccagggacaacaggagaaatgggatg

SEQ ID NO: 5955 - DNA, 122 bp, Homo sapiens
  misc_feature (61)..(62): /note="This region represents a CpG dinucleotide"
  misc_feature (61)..(61): /note="Nucleotide may be methylated to form 5-methylcytosine"
agcacagattccattggctgcttgtgctttcatcattacagtacaattaacttcagaagtcgagagatgctgcagaattttaagtacccaaagtttctcaacaagttgattttcaagcaagg

SEQ ID NO: 5956 - DNA, 122 bp, Homo sapiens
  misc_feature (61)..(62): /note="This region represents a CpG dinucleotide"
  misc_feature (61)..(61): /note="Nucleotide may be methylated to form 5-methylcytosine"
ggcttagcataggactcctgcactcgaactggagttccttggcagaagcagaaccagtttcgtgactctgatcactctgttaaacttttctgtacctcaattcctaatttgaaaataggcat

SEQ ID NO: 5957 - DNA, 122 bp, Homo sapiens
  misc_feature (61)..(62): /note="This region represents a CpG dinucleotide"
  misc_feature (61)..(61): /note="Nucleotide may be methylated to form 5-methylcytosine"
gagcaaggataaaggtcaccacttgagggagggttggagccaatgagtggattattcccacggccgcaaggagtgtacactgtttaatgtactggaaaatcagagtggacaggcaggaaggg

SEQ ID NO: 5958 - DNA, 122 bp, Homo sapiens
  misc_feature (61)..(62): /note="This region represents a CpG dinucleotide"
  misc_feature (61)..(61): /note="Nucleotide may be methylated to form 5-methylcytosine"
aactcaaattctatttttatacaaatcagcaaacatgaatttaaggccttcagactagtccgtcacagggaggacttcagtcaaaagattagtttccttcctgttgctgcctcaagataaca

SEQ ID NO: 5959 - DNA, 122 bp, Homo sapiens
  misc_feature (61)..(62): /note="This region represents a CpG dinucleotide"
  misc_feature (61)..(61): /note="Nucleotide may be methylated to form 5-methylcytosine"
tacatagcgatgaactagccaggacacattgttatttttcccctggtttgcctccctgttcgtaatcctccgtcaccgttcacatttctattgattttcagccaaactcgggggttggcaaa

SEQ ID NO: 5960 - DNA, 122 bp, Homo sapiens
  misc_feature (61)..(62): /note="This region represents a CpG dinucleotide"
  misc_feature (61)..(61): /note="Nucleotide may be methylated to form 5-methylcytosine"
gtctgcggtggtttggcagtagcttagcctcaaggataaaggagagccatgactactcaccgctagagcaagacacactctagccatagttctaattcaagacagtgtattgcagtagccgt

SEQ ID NO: 5961 - DNA, 122 bp, Homo sapiens
  misc_feature (61)..(62): /note="This region represents a CpG dinucleotide"
  misc_feature (61)..(61): /note="Nucleotide may be methylated to form 5-methylcytosine"
tgttgatccacgcttagcttgactggctcattcagagtgcattctttgtgtgcacacaggcgtgtccttttgttctcccctctcacctgcctccctgctctgctcacctgtccttgtttgta

SEQ ID NO: 5962 - DNA, 122 bp, Homo sapiens
  misc_feature (61)..(62): /note="This region represents a CpG dinucleotide"
  misc_feature (61)..(61): /note="Nucleotide may be methylated to form 5-methylcytosine"
agtggactcaaagcgagggaagcggcagtggtgggtttaatgaggctccccgggcacacgcggtctgtgggcaggtgggtgtcctttgcatcacaagaggtgtgttttgggtgggatgaggg

SEQ ID NO: 5963 - DNA, 122 bp, Homo sapiens
  misc_feature (61)..(62): /note="This region represents a CpG dinucleotide"
  misc_feature (61)..(61): /note="Nucleotide may be methylated to form 5-methylcytosine"
taactgcaccccatgtcctgatgaccacatcaccaggagcactgagtgccagcagtggggcgtggccaggccgagaaaattaaccatggtgtctgcccagtgcgttctcgagtcaagttaat

SEQ ID NO: 5964 - DNA, 122 bp, Homo sapiens
  misc_feature (61)..(62): /note="This region represents a CpG dinucleotide"
  misc_feature (61)..(61): /note="Nucleotide may be methylated to form 5-methylcytosine"
ctttgttattcctctagtcagacaaatgctcgtttggtttaatctgacttaacaaattaacgagatgaggaagaaaattccaggccttgggacattcactgaagcccaaccaggcaccaaga

SEQ ID NO: 5965 - DNA, 122 bp, Homo sapiens
  misc_feature (61)..(62): /note="This region represents a CpG dinucleotide"
  misc_feature (61)..(61): /note="Nucleotide may be methylated to form 5-methylcytosine"
cacatgcaatgcagcatttacctggactaagtccacatcttgctcttgtgtttctagagtcgctgggaagctgtgagacaccacaccccagaacagcagcagcagcagtggaggaaagctgt

SEQ ID NO: 5966 - DNA, 122 bp, Homo sapiens
  misc_feature (61)..(62): /note="This region represents a CpG dinucleotide"
  misc_feature (61)..(61): /note="Nucleotide may be methylated to form 5-methylcytosine"
tgcaggtgcagtcagccctagcctttttgggaacagagaatgatgttgaactgaagggggcgctagatttagaaacctgtgagaagcaagatataatgccagaagtggacaagcagtctggt

SEQ ID NO: 5967 - DNA, 122 bp, Homo sapiens
  misc_feature (61)..(62): /note="This region represents a CpG dinucleotide"
  misc_feature (61)..(61): /note="Nucleotide may be methylated to form 5-methylcytosine"
aaaccacctgacaaaaggcagattcataggaggaaaggcatacaaatttactaacatgcgcgggagtcttacaaaataaaagatctcaaagaaatggccaaatagttgatggttttatacca

SEQ ID NO: 5968 - DNA, 122 bp, Homo sapiens
  misc_feature (61)..(62): /note="This region represents a CpG dinucleotide"
  misc_feature (61)..(61): /note="Nucleotide may be methylated to form 5-methylcytosine"
aggccctgctgaactcagagcccccatgaggatagaggctataacgtaacagacatgaaacgtcctgaaagctccacgtgcaaagtgagttgcttatgcctgcgtaaacttcttgttcttca

SEQ ID NO: 5969 - DNA, 122 bp, Homo sapiens
  misc_feature (61)..(62): /note="This region represents a CpG dinucleotide"
  misc_feature (61)..(61): /note="Nucleotide may be methylated to form 5-methylcytosine"
aaggatctgtgagaaaaaagaaatcctttctcccctacagggaagatgctgagtgtatcacggaggcagatccccagttgacaaaagtaattctccagagaaagggggagctaaaaattgtc

SEQ ID NO: 5970 - DNA, 122 bp, Homo sapiens
  misc_feature (61)..(62): /note="This region represents a CpG dinucleotide"
  misc_feature (61)..(61): /note="Nucleotide may be methylated to form 5-methylcytosine"
actgggtccggggcagactgagcataactacgctgagccacgtcaccggccggtgagacgcgcggaggcattgatgggtcccctggttcccgctcagtctccgaaatgtgagctgccgcgga

SEQ ID NO: 5971 - DNA, 122 bp, Homo sapiens
  misc_feature (61)..(62): /note="This region represents a CpG dinucleotide"
  misc_feature (61)..(61): /note="Nucleotide may be methylated to form 5-methylcytosine"
gcgctgggtttcacagatgcagactgaagtccaggctctgctgcagattaacggggtggccgccagcaagtcaagtgacttgctcttctgtgcactgcatgtacttgggttcctctcacagg

SEQ ID NO: 5972 - DNA, 122 bp, Homo sapiens
  misc_feature (61)..(62): /note="This region represents a CpG dinucleotide"
  misc_feature (61)..(61): /note="Nucleotide may be methylated to form 5-methylcytosine"
tattctccaacttggtccagtgagacccttttaagatatgagtcacgatgactcattctgcgtaaagaacttactgatttccaatttaccgagtttaaatcttttgcttggtgcacaaagcc

SEQ ID NO: 5973 - DNA, 122 bp, Homo sapiens
  misc_feature (61)..(62): /note="This region represents a CpG dinucleotide"
  misc_feature (61)..(61): /note="Nucleotide may be methylated to form 5-methylcytosine"
catcctccttccttctgtagtactgggtgaagcccgcggatttgtgataagcagttgccacgactcagaaggtggtccgcgtctccacgctggagcaatggccatgctagaaagtgcagttt

SEQ ID NO: 5974 - DNA, 122 bp, Homo sapiens
  misc_feature (61)..(62): /note="This region represents a CpG dinucleotide"
  misc_feature (61)..(61): /note="Nucleotide may be methylated to form 5-methylcytosine"
tccggaaaacagtggtcataatagggcctaccttactgtgaacattaatgagaaaatgcacggtgtttggtccaaagtaagttaactactaatagctgcagaatcggggacattttctattc

SEQ ID NO: 5975 - DNA, 122 bp, Homo sapiens
  misc_feature (61)..(62): /note="This region represents a CpG dinucleotide"
  misc_feature (61)..(61): /note="Nucleotide may be methylated to form 5-methylcytosine"
gcttatgccttagggagttctatgtgagcagcaaggttattccccctagttacacacacacgcacatgtgccaatactcctgcaaagacttgctgtttctaaaatccactactcagaaaaac

SEQ ID NO: 5976 - DNA, 122 bp, Homo sapiens
  misc_feature (61)..(62): /note="This region represents a CpG dinucleotide"
  misc_feature (61)..(61): /note="Nucleotide may be methylated to form 5-methylcytosine"
gccagtttactgtctgtggtaaggcttcctgctctcagctcccagagttccttgtgaagccgtgttggtggtcaagattaagaaggttgctgacctctttctaggcaagattttcttggata

SEQ ID NO: 5977 - DNA, 122 bp, Homo sapiens
  misc_feature (61)..(62): /note="This region represents a CpG dinucleotide"
  misc_feature (61)..(61): /note="Nucleotide may be methylated to form 5-methylcytosine"
gccaaagcccttaaagccccaaaaggccagaactgcaccagagattgggaaactgcagaacgtctgtgtgtgtctgcagaggggtttctcttcttagcacattcagtgaaagtcttcaaagg

SEQ ID NO: 5978 - DNA, 122 bp, Homo sapiens
  misc_feature (61)..(62): /note="This region represents a CpG dinucleotide"
  misc_feature (61)..(61): /note="Nucleotide may be methylated to form 5-methylcytosine"
cagcccactgaatgcttcctgagggccaggcctgagcccaggctttactcatatgcaccccgccccattaggagtgtcaagctgatgagtatggcctaagaggcctcattccagagggatct

SEQ ID NO: 5979 - DNA, 122 bp, Homo sapiens
  misc_feature (61)..(62): /note="This region represents a CpG dinucleotide"
  misc_feature (61)..(61): /note="Nucleotide may be methylated to form 5-methylcytosine"
gtgcgacaagcactacatatacgaaaatagaaaatacaagagtgtaaatgtaagatggtgcgatacagtgtataatttgctaatggagtacggaggacatacaggtcagcatgagagactac

SEQ ID NO: 5980 - DNA, 122 bp, Homo sapiens
  misc_feature (61)..(62): /note="This region represents a CpG dinucleotide"
  misc_feature (61)..(61): /note="Nucleotide may be methylated to form 5-methylcytosine"
tgttgaatggttgagatcttaatttctgttagaacggtctcctgagaatgacctcctacccgttgcctcagtaacctcttacgcatggagagcagagctgcaggaaagcaggacacacgtga

SEQ ID NO: 5981 - DNA, 122 bp, Homo sapiens
  misc_feature (61)..(62): /note="This region represents a CpG dinucleotide"
  misc_feature (61)..(61): /note="Nucleotide may be methylated to form 5-methylcytosine"
aaggtggtatgtgttttaggatgctcaactttgtgtactttatattttgtgtacacatctcgtgcccagcctttagcaagactttccgaaattaatgttttgattccagaaacttcaggcca

SEQ ID NO: 5982 - DNA, 122 bp, Homo sapiens
  misc_feature (61)..(62): /note="This region represents a CpG dinucleotide"
  misc_feature (61)..(61): /note="Nucleotide may be methylated to form 5-methylcytosine"
cagacaggagccaaggccccattgaagctccaggatgacgatggccctcaggggaacagacgcaaaaccaggcacgggcctgccttccagctggaatctacctgtcaggcccagaacttctg

SEQ ID NO: 5983 - DNA, 122 bp, Homo sapiens
  misc_feature (61)..(62): /note="This region represents a CpG dinucleotide"
  misc_feature (61)..(61): /note="Nucleotide may be methylated to form 5-methylcytosine"
tcagaaggagcgaatttcctgcagagctgagcctcccagggcggccacaccttccccacacgttccctcggcaggttccaggcggaacacaccgctcgtctgcaggcgcttggtggtggagc

SEQ ID NO: 5984 - DNA, 122 bp, Homo sapiens
  misc_feature (61)..(62): /note="This region represents a CpG dinucleotide"
  misc_feature (61)..(61): /note="Nucleotide may be methylated to form 5-methylcytosine"
gcacgctggaaacgcctcccaggcttataggagaggccgggcccagggcaacgctggaaacgcctcccagtcttacaggagagggcggggcctagggcaacgctggaaacgcctcccaggct

SEQ ID NO: 5985 - DNA, 122 bp, Homo sapiens
  misc_feature (61)..(62): /note="This region represents a CpG dinucleotide"
  misc_feature (61)..(61): /note="Nucleotide may be methylated to form 5-methylcytosine"
tttactgatcaaggggcatttaaagcatgacagtgttaaagtatgccccggctggcaaagcggacttcctgtggctaactgaggtgctcattaaacagatcaggtggccgtggctgggtgag

SEQ ID NO: 5986 - DNA, 122 bp, Homo sapiens
  misc_feature (61)..(62): /note="This region represents a CpG dinucleotide"
  misc_feature (61)..(61): /note="Nucleotide may be methylated to form 5-methylcytosine"
tcgttgatgatcctcataacatttaggccagcaatagttccagcgtctttggttgcttggcgttgggcatcattaaaataggctggtacagtaacaactgcatgggtaacctaaaaggataa

SEQ ID NO: 5987 - DNA, 122 bp, Homo sapiens
  misc_feature (61)..(62): /note="This region represents a CpG dinucleotide"
  misc_feature (61)..(61): /note="Nucleotide may be methylated to form 5-methylcytosine"
tagtctttgtaccaacatagcattggcaggtcttaggcattcaataaaacatctgttgaccggttggttgactaaatggattaaaaatacacaggttaagaaggaagggtaaattttattac

SEQ ID NO: 5988 - DNA, 122 bp, Homo sapiens
  misc_feature (61)..(62): /note="This region represents a CpG dinucleotide"
  misc_feature (61)..(61): /note="Nucleotide may be methylated to form 5-methylcytosine"
tggtgttcagccactgtgttaatcctccgtgggggcctgctacgtgctgctctggtgaggcgttccaccgggtcaatttcctacccgggagcgctctttggattgcatcactcaggctggcc

SEQ ID NO: 5989 - DNA, 122 bp, Homo sapiens
  misc_feature (61)..(62): /note="This region represents a CpG dinucleotide"
  misc_feature (61)..(61): /note="Nucleotide may be methylated to form 5-methylcytosine"
acgttttcaaagtattttctttagatgagtgtcccaattctgtatctacatttcccccaacgactcacagtccagtagttataaggtgaataattaagattgtagggaatctaaaagtgctt

SEQ ID NO: 5990 - DNA, 122 bp, Homo sapiens
  misc_feature (61)..(62): /note="This region represents a CpG dinucleotide"
  misc_feature (61)..(61): /note="Nucleotide may be methylated to form 5-methylcytosine"
atcaaagcattatctgatctagcttaaagataattagacagctcaacctccttttgccttcgtatattacataaacgaagaaaaacaaaaagcctaatagacttgtcagaaggtcacagctc

SEQ ID NO: 5991 - DNA, 122 bp, Homo sapiens
  misc_feature (61)..(62): /note="This region represents a CpG dinucleotide"
  misc_feature (61)..(61): /note="Nucleotide may be methylated to form 5-methylcytosine"
gctttgcaccattcaatcagaaatgaagccttgacccagtttggggagaggatgtcaagacgggaaatggaaaattagtccaaggaacccagggacacttaagtgcctctacctctttttaa

SEQ ID NO: 5992 - DNA, 122 bp, Homo sapiens
  misc_feature (61)..(62): /note="This region represents a CpG dinucleotide"
  misc_feature (61)..(61): /note="Nucleotide may be methylated to form 5-methylcytosine"
acccgggaggtggaggttgcagtgagtcgacatcgcaccactgcactccagcctgggtgacggtgagactgtctccaagaaaaaagaaagaaaagcatgtagttaacctgcaacgacatcaa

SEQ ID NO: 5993 - DNA, 122 bp, Homo sapiens
  misc_feature (61)..(62): /note="This region represents a CpG dinucleotide"
  misc_feature (61)..(61): /note="Nucleotide may be methylated to form 5-methylcytosine"
ccaagattctctccagcaatagcccagacctcacacaggaagatgtgacagttcccaggacggcaggaaagtcaagaaaccttagagcatatgtaagagattcagacttccacatctgtgat

SEQ ID NO: 5994 - DNA, 122 bp, Homo sapiens
  misc_feature (61)..(62): /note="This region represents a CpG dinucleotide"
  misc_feature (61)..(61): /note="Nucleotide may be methylated to form 5-methylcytosine"
acaccagacacacacacacacacacacaaacacacacacatacactccgcggtgtctgtccgtctgggatttgtgtctcaactgtttctgcccagtgtgtaaatatttgtgggggcctggtg

SEQ ID NO: 5995 - DNA, 122 bp, Homo sapiens
  misc_feature (61)..(62): /note="This region represents a CpG dinucleotide"
  misc_feature (61)..(61): /note="Nucleotide may be methylated to form 5-methylcytosine"
atgaggatgggcaggtgtcgtgcagcctccacacacccacgtctcaaacacactgttccacgccaggccaccggtcaccgcaccttcccacaccgccaagcacactgacacacggggccgct

SEQ ID NO: 5996 - DNA, 122 bp, Homo sapiens
  misc_feature (61)..(62): /note="This region represents a CpG dinucleotide"
  misc_feature (61)..(61): /note="Nucleotide may be methylated to form 5-methylcytosine"
attgtcatattgtttaagggttgttaaggaaaaaaaaaaaaaaaaaaagaaaatctctaacgcagctcctgcaaaagtatctgcttcaggaagttgaaggatacactgagccagtgcacaga

SEQ ID NO: 5997 - DNA, 122 bp, Homo sapiens
  misc_feature (61)..(62): /note="This region represents a CpG dinucleotide"
  misc_feature (61)..(61): /note="Nucleotide may be methylated to form 5-methylcytosine"
ggctcctcgggcactcctgccctccttgcaagtccccagttcgcttctccctcctcagcgcgccccaggagcagctcgcactcctggttcaggttgcagctgcccttctccaccacacggtc

SEQ ID NO: 5998 - DNA, 122 bp, Homo sapiens
  misc_feature (61)..(62): /note="This region represents a CpG dinucleotide"
  misc_feature (61)..(61): /note="Nucleotide may be methylated to form 5-methylcytosine"
tggtggtgtccacgttggtgaggtcgtagagggaggatgacacgggtccgtacgcccagtcggtgaacttcctggacaggctccggagccgcttctccttgatctcacgactgaggatgtac

SEQ ID NO: 5999 - DNA, 122 bp, Homo sapiens
  misc_feature (61)..(62): /note="This region represents a CpG dinucleotide"
  misc_feature (61)..(61): /note="Nucleotide may be methylated to form 5-methylcytosine"
agccgctacgggtcagagcttttattggaagaccaggtttgccttgatgcagccaaagtgcgttccagttcaccccactcttgcttgtgtttcttctttatgtaaattgtgtgatgtttcaa

SEQ ID NO: 6000 - DNA, 122 bp, Homo sapiens
  misc_feature (61)..(62): /note="This region represents a CpG dinucleotide"
  misc_feature (61)..(61): /note="Nucleotide may be methylated to form 5-methylcytosine"
agggaaacatgcaatcaatgtgagctcatgttactgggataattcaagctccccttctcccgccaggttcctggctggctgctgaggtttcactctccctggaaagacaggagagctgagtt

SEQ ID NO: 6001 - DNA, 122 bp, Homo sapiens
  misc_feature (61)..(62): /note="This region represents a CpG dinucleotide"
  misc_feature (61)..(61): /note="Nucleotide may be methylated to form 5-methylcytosine"
caaggtgtgggcaaaagaacattattgcaatggtggtaatatgaggaaatgatgatatcacgttagaagtccaggagcaagtatgaatgttccccgaacagagaaactgtctgccttcaaat

SEQ ID NO: 6002 - DNA, 122 bp, Homo sapiens
  misc_feature (61)..(62): /note="This region represents a CpG dinucleotide"
  misc_feature (61)..(61): /note="Nucleotide may be methylated to form 5-methylcytosine"
ctgaaagccccgggctgtttcagaacccggtcagggtaaccgtcaggcctgcggtcaccgcgctgcaatcccaggaggccttgcgtcagcggccattatatcaataaggaagtacaatcacc

SEQ ID NO: 6003 - DNA, 122 bp, Homo sapiens
  misc_feature (61)..(62): /note="This region represents a CpG dinucleotide"
  misc_feature (61)..(61): /note="Nucleotide may be methylated to form 5-methylcytosine"
aaccttgaagaacctggccacagttaatgaccttggcatatatcagagattactaaccaacgaaaactcaatctgtgactgtgcccttattacttcctcactttactgaaccagccaaccac

SEQ ID NO: 6004 - DNA, 122 bp, Homo sapiens
  misc_feature (61)..(62): /note="This region represents a CpG dinucleotide"
  misc_feature (61)..(61): /note="Nucleotide may be methylated to form 5-methylcytosine"
gcactctttaagttcctgaatgcatgtttactattgtcctcttatctaaagcaaattatgcggccaagcctaaattcaagagatgaaaaaatacactctgcttctttgtaggtacagctgca

SEQ ID NO: 6005 - DNA, 122 bp, Homo sapiens
  misc_feature (61)..(62): /note="This region represents a CpG dinucleotide"
  misc_feature (61)..(61): /note="Nucleotide may be methylated to form 5-methylcytosine"
cacccggctcccggccttagggttcctgcttttccatggggtcttggggtggtgcatccccggcacccctacagcatccgccccttccgagcatgtcttccccgtcacagagaacttcatgt

SEQ ID NO: 6006 - DNA, 122 bp, Homo sapiens
  misc_feature (61)..(62): /note="This region represents a CpG dinucleotide"
  misc_feature (61)..(61): /note="Nucleotide may be methylated to form 5-methylcytosine"
ccacagtaaagcacagtaaaggctgaggctggaggggctgggatgccctagatctttccacgcactagaacaaattaggaatggaggaaaatgtgtaaagtccatgtgcacacccacattgg

SEQ ID NO: 6007 - DNA, 122 bp, Homo sapiens
  misc_feature (61)..(62): /note="This region represents a CpG dinucleotide"
  misc_feature (61)..(61): /note="Nucleotide may be methylated to form 5-methylcytosine"
aaaatgctgtctcaaaaaaaaaagaaaaaggaaagtgagtcagatgccaagctggtattgcggcatcagcttgtgtagtaagatttgacctggtcagaaaggtctcaaatggctaccctgag

SEQ ID NO: 6008 - DNA, 122 bp, Homo sapiens
  misc_feature (61)..(62): /note="This region represents a CpG dinucleotide"
  misc_feature (61)..(61): /note="Nucleotide may be methylated to form 5-methylcytosine"
acaccagaggcaggcaaagccacacctgtgggtgcaggccacacgcaggctgcacagacccgggacaggtctgagctctgaggcgtgcggcccatctccgcggcaggagcttctgtctgagc

SEQ ID NO: 6009 - DNA, 122 bp, Homo sapiens
  misc_feature (61)..(62): /note="This region represents a CpG dinucleotide"
  misc_feature (61)..(61): /note="Nucleotide may be methylated to form 5-methylcytosine"
ttcactgagaggtgagctttgctacccccagaatggcctccatctgcgttgctttgcattcgggcatgtggtgggagggggcagctcctcctattcacccacagcaaggcaaaacccggtcc

SEQ ID NO: 6010 - DNA, 122 bp, Homo sapiens
  misc_feature (61)..(62): /note="This region represents a CpG dinucleotide"
  misc_feature (61)..(61): /note="Nucleotide may be methylated to form 5-methylcytosine"
ccctcccacctctggctcttaggactcacattgcaagtgggggaggcatcctccgcgaggcgcggactgagagccagcccctcttccccccctggctctagggacccccatcgcagggggtg

SEQ ID NO: 6011 - DNA, 122 bp, Homo sapiens
  misc_feature (61)..(62): /note="This region represents a CpG dinucleotide"
  misc_feature (61)..(61): /note="Nucleotide may be methylated to form 5-methylcytosine"
aaacctggtcaacaacatatgggatgtcaccagattcagactcagaagtttccataatgccgttgccaacagctagacacagtgagtcatgggggccccagtaaccaaactctcatcacaca

SEQ ID NO: 6012 - DNA, 122 bp, Homo sapiens
  misc_feature (61)..(62): /note="This region represents a CpG dinucleotide"
  misc_feature (61)..(61): /note="Nucleotide may be methylated to form 5-methylcytosine"
aaagggaagcaacgaggtgaggctgactggtgcctatcagagggcctggtgcatcctggacgctaaagatatccctgtagggtggcggggtcggtggggggagtccctatgtgctgaccact

SEQ ID NO: 6013 - DNA, 122 bp, Homo sapiens
  misc_feature (61)..(62): /note="This region represents a CpG dinucleotide"
  misc_feature (61)..(61): /note="Nucleotide may be methylated to form 5-methylcytosine"
aactcctgggcttaagtgattctcccgcctcagcctcctgagtagctggtattatcggtacgtgccaccacacctgacttgaattgttttcaatgactgagaagcttaggttcagaagaagt

SEQ ID NO: 6014 - DNA, 122 bp, Homo sapiens
  misc_feature (61)..(62): /note="This region represents a CpG dinucleotide"
  misc_feature (61)..(61): /note="Nucleotide may be methylated to form 5-methylcytosine"
caagggaggcactccatctcgacttatccgaggtgctggaggggagaaactgctgggccccgggctccctgctgcatctcactcacctctgcaataaggggcagagaccgaacacagacatg

SEQ ID NO: 6015 - DNA, 122 bp, Homo sapiens
  misc_feature (61)..(62): /note="This region represents a CpG dinucleotide"
  misc_feature (61)..(61): /note="Nucleotide may be methylated to form 5-methylcytosine"
ccgctgtattatgatcaacagtcctattttgtttcttccccaaagttcctgtttatgtctcgcagcctttatattgactttttaagaactcagccagttggccagtggccatggtaaaattg

SEQ ID NO: 6016 - DNA, 122 bp, Homo sapiens
  misc_feature (61)..(62): /note="This region represents a CpG dinucleotide"
  misc_feature (61)..(61): /note="Nucleotide may be methylated to form 5-methylcytosine"
tgagagcgcaacatcagaagttgcccagtcctgctggttttgccaactcagacttgcctgcgcagcctccgttgatggccccactcctgttgtcagatcacagagcactctgggatctctac

SEQ ID NO: 6017 - DNA, 122 bp, Homo sapiens
  misc_feature (61)..(62): /note="This region represents a CpG dinucleotide"
  misc_feature (61)..(61): /note="Nucleotide may be methylated to form 5-methylcytosine"
gctgggtcagtgataatgcgtatactgccaaactgtcctacaaacaggccatcctctaaccgttagtgtgataggcagaataaagcctcctcccagacatatccatgtcctaatcctgagag

SEQ ID NO: 6018 - DNA, 122 bp, Homo sapiens
  misc_feature (61)..(62): /note="This region represents a CpG dinucleotide"
  misc_feature (61)..(61): /note="Nucleotide may be methylated to form 5-methylcytosine"
tggacgcacagccctgggcttcagccccgactgtcccagtggactgagcagggcagctggcgaggcaggaccctacccccaacctcggagctcggggctggggagggagacaggtgccagcc

SEQ ID NO: 6019 - DNA, 122 bp, Homo sapiens
  misc_feature (61)..(62): /note="This region represents a CpG dinucleotide"
  misc_feature (61)..(61): /note="Nucleotide may be methylated to form 5-methylcytosine"
acctcctaggctcaagcaatcctcccgcgttagtctcctaagtagctgggattataggcacgtgtcatcatgactggttaatttgtgtgtatgtgtttgtgtttgtagagacaggattttac

SEQ ID NO: 6020 - DNA, 122 bp, Homo sapiens
  misc_feature (61)..(62): /note="This region represents a CpG dinucleotide"
  misc_feature (61)..(61): /note="Nucleotide may be methylated to form 5-methylcytosine"
acttgaatcttctgttcatctggcagctgggcagctggctgatgtaacagctgcagaacacggagtctcccagaagggagaaaaagagaaaagaaaaaagacacacatagcccaggatgata

SEQ ID NO: 6021 - DNA, 122 bp, Homo sapiens
  misc_feature (61)..(62): /note="This region represents a CpG dinucleotide"
  misc_feature (61)..(61): /note="Nucleotide may be methylated to form 5-methylcytosine"
cctgcatttgtttcccagggctgctgtaacaatgaccacaaactgggtggcttgcatcatcggaaatgtatttgctcacagcttgggaggccagaagttcaaaagaagggttgggcaaggcc

SEQ ID NO: 6022 - DNA, 122 bp, Homo sapiens
  misc_feature (61)..(62): /note="This region represents a CpG dinucleotide"
  misc_feature (61)..(61): /note="Nucleotide may be methylated to form 5-methylcytosine"
ctccggtcatggagctgagccgatttcactgtgctctgattctctaaatactgctactcacgtagggcaattctgttcaacacggtgagctgggccggctgtgactcacagcaccgagcccc

SEQ ID NO: 6023 - DNA, 122 bp, Homo sapiens
  misc_feature (61)..(62): /note="This region represents a CpG dinucleotide"
  misc_feature (61)..(61): /note="Nucleotide may be methylated to form 5-methylcytosine"
caattaaagttttaaaattaacaaagtaatctctaattgaaggtgtgaaaagactgagaacgtctgttgcagcacggcatagatgagtgcttgaaagatagaaacttaagttcattctacac

SEQ ID NO: 6024 - DNA, 122 bp, Homo sapiens
  misc_feature (61)..(62): /note="This region represents a CpG dinucleotide"
  misc_feature (61)..(61): /note="Nucleotide may be methylated to form 5-methylcytosine"
ccagcaaggtttgagaaacactgttttcccattgggggaaacatttattttttaaataaacgagccaatatattttaaaaaagagagtttggttggtgccagatgtagcttcactctcaacc

SEQ ID NO: 6025 - DNA, 122 bp, Homo sapiens
  misc_feature (61)..(62): /note="This region represents a CpG dinucleotide"
  misc_feature (61)..(61): /note="Nucleotide may be methylated to form 5-methylcytosine"
attccttctgcttaagaaattagcatttcaaaaatatgccactttcccctgaactccaagcgtgtctaataatgcgagaagcagattgtcttccctcgtttccttaatttgtttcatctaaa

SEQ ID NO: 6026 - DNA, 122 bp, Homo sapiens
  misc_feature (61)..(62): /note="This region represents a CpG dinucleotide"
  misc_feature (61)..(61): /note="Nucleotide may be methylated to form 5-methylcytosine"
tgtcttacccttcatcacacttattgtaagattttatcattttgaaagcagctgttaggccgggtgcagtggctgacgcctgtaatccgagcacttggaaggctgaggtgggcattgcttga

SEQ ID NO: 6027 - DNA, 122 bp, Homo sapiens
  misc_feature (61)..(62): /note="This region represents a CpG dinucleotide"
  misc_feature (61)..(61): /note="Nucleotide may be methylated to form 5-methylcytosine"
ttgatgaaagtataaagtggtataatacatttgaaatgcatttcattcactcatcaaatacgtagcaagaacttatatgagtcaagtataattctaggtggagatctgcaatgagccaaaac

SEQ ID NO: 6028 - DNA, 122 bp, Homo sapiens
  misc_feature (61)..(62): /note="This region represents a CpG dinucleotide"
  misc_feature (61)..(61): /note="Nucleotide may be methylated to form 5-methylcytosine"
ttaagcttaagcttattagtttccaggtaaattcaccactgctgtcaacacataaggatccgttgatcctataaggcagggacaaattgttcaactgaagagtttgatccacaggaacaaag

SEQ ID NO: 6029 - DNA, 122 bp, Homo sapiens
  misc_feature (61)..(62): /note="This region represents a CpG dinucleotide"
  misc_feature (61)..(61): /note="Nucleotide may be methylated to form 5-methylcytosine"
tccgtcacgtgtaccttttctttccaactagactgtagttgatctcaaggtcggagaccacgttgcacaacctctttcagatacgtgttcaccagtatttatttatttattggcattcccta

SEQ ID NO: 6030 - DNA, 122 bp, Homo sapiens
  misc_feature (61)..(62): /note="This region represents a CpG dinucleotide"
  misc_feature (61)..(61): /note="Nucleotide may be methylated to form 5-methylcytosine"
aatgctcctcacaactatataaaacagaatgttctcttagatatacaaacttcccctttacgatgttatgataagcaaaatatttaactcccaaaaacttgacagaaaatgaaagtgcagtg

SEQ ID NO: 6031 - DNA, 122 bp, Homo sapiens
  misc_feature (61)..(62): /note="This region represents a CpG dinucleotide"
  misc_feature (61)..(61): /note="Nucleotide may be methylated to form 5-methylcytosine"
atcctaggggctgctgcttgcagcagaagataatgcttttgcatgcatctctaagcacagcgtgaaatgagtccctagtgggaggaagcatgaccaatgagtgtcagatgttcaggctttct

SEQ ID NO: 6032 - DNA, 122 bp, Homo sapiens
  misc_feature (61)..(62): /note="This region represents a CpG dinucleotide"
  misc_feature (61)..(61): /note="Nucleotide may be methylated to form 5-methylcytosine"
gagactcagtcctgcaaccacatgtaactgaattctgacaactggaaagaatctggaagccgaatcattcccaaaactctagaaagaaactcagccctggtgacactgatttcaaccttgtg

SEQ ID NO: 6033 - DNA, 122 bp, Homo sapiens
  misc_feature (61)..(62): /note="This region represents a CpG dinucleotide"
  misc_feature (61)..(61): /note="Nucleotide may be methylated to form 5-methylcytosine"
cactttttcttttttattctctcaagccccagcatcatgcagtcctcagttgggtgcttacgtgctcttctcttccttgcagcagtcctcaaggcagggcagattcctctttaaggtgctcg

SEQ ID NO: 6034 - DNA, 122 bp, Homo sapiens
  misc_feature (61)..(62): /note="This region represents a CpG dinucleotide"
  misc_feature (61)..(61): /note="Nucleotide may be methylated to form 5-methylcytosine"
gagcaaggagacaaggtccagcgaggcaggtcaagatctaatgggaagcctgagtaattgcgtgaaatgccagccagcatctagagctcacctttacggccaatgaggacgtgactcatggc

SEQ ID NO: 6035 - DNA, 122 bp, Homo sapiens
  misc_feature (61)..(62): /note="This region represents a CpG dinucleotide"
  misc_feature (61)..(61): /note="Nucleotide may be methylated to form 5-methylcytosine"
agtcacagtttccacccacactcaggggaagggattatactggatgtgaacaccaagtggcggagatccctggagatcacctgagggtcttctggccacactgctttgtatctctgtcccca

SEQ ID NO: 6036 - DNA, 122 bp, Homo sapiens
  misc_feature (61)..(62): /note="This region represents a CpG dinucleotide"
  misc_feature (61)..(61): /note="Nucleotide may be methylated to form 5-methylcytosine"
aggctttgactaacatccatgtcacacagaacttaaggagctctgagttcacaaaagccacgtcagacaaatgagcatgttgggaaatgaggtacatacagcctcattaggaaaaaaaaaca

SEQ ID NO: 6037 - DNA, 122 bp, Homo sapiens
  misc_feature (61)..(62): /note="This region represents a CpG dinucleotide"
  misc_feature (61)..(61): /note="Nucleotide may be methylated to form 5-methylcytosine"
gtcccgcccacctcagctcttcgatgccggtgaacagcttctgcaattcctgctcgctcacgtaggggccctcgccagcccgaggccccattccccagcctgcggggaccaggccgtgtggc

SEQ ID NO: 6038 - DNA, 122 bp, Homo sapiens
  misc_feature (61)..(62): /note="This region represents a CpG dinucleotide"
  misc_feature (61)..(61): /note="Nucleotide may be methylated to form 5-methylcytosine"
ggtatatttacacatctgtaagatggaatgcacatgataaaattatattccttccaggtgcggtggctcatgcctgtaatcccagcactttgggaggccaaggcgggcagatcacctgaggt

SEQ ID NO: 6039 - DNA, 122 bp, Homo sapiens
  misc_feature (61)..(62): /note="This region represents a CpG dinucleotide"
  misc_feature (61)..(61): /note="Nucleotide may be methylated to form 5-methylcytosine"
tggaatgcaatgtgtcaatattttgagaagtattttttttctttcaagattataagtatgcgaggagagatcgtcgcaaaagtacagttaaaaggtttcggctaagataagaactccttcac

SEQ ID NO: 6040 - DNA, 122 bp, Homo sapiens
  misc_feature (61)..(62): /note="This region represents a CpG dinucleotide"
  misc_feature (61)..(61): /note="Nucleotide may be methylated to form 5-methylcytosine"
atcttctttctagttgctttggagaattcctcccttactagattgacctagactgagccacgttaccacctttccttgatcacagtgattaagtaatgaatacttaagccaagatgggccat

SEQ ID NO: 6041 - DNA, 122 bp, Homo sapiens
  misc_feature (61)..(62): /note="This region represents a CpG dinucleotide"
  misc_feature (61)..(61): /note="Nucleotide may be methylated to form 5-methylcytosine"
agagatgagaggcctaattctaatttgagatcagagcctgacagctgggcaggtggcaggcggccgcttcctcccctccgtggagcctgccaggagaggggctgtggtcgtattaagggtgt

SEQ ID NO: 6042 - DNA, 122 bp, Homo sapiens
  misc_feature (61)..(62): /note="This region represents a CpG dinucleotide"
  misc_feature (61)..(61): /note="Nucleotide may be methylated to form 5-methylcytosine"
ggttctggaaggggaaattctgcttcatgattgcagcatcgactgcctgagcttctagtccgtctgcccagtggattcgggactttccagttccgaccaacgcatgagtcaattctttcaaa

SEQ ID NO: 6043 - DNA, 122 bp, Homo sapiens
  misc_feature (61)..(62): /note="This region represents a CpG dinucleotide"
  misc_feature (61)..(61): /note="Nucleotide may be methylated to form 5-methylcytosine"
ttttctaccacacagcgagcaaggccaacttccctaaactaagaatgctgagattcttttcgacttataatgttctgactgtctctctctgtttccccttacctcagaatttgtttaataga

SEQ ID NO: 6044 - DNA, 122 bp, Homo sapiens
  misc_feature (61)..(62): /note="This region represents a CpG dinucleotide"
  misc_feature (61)..(61): /note="Nucleotide may be methylated to form 5-methylcytosine"
gccttaatcacccccattccgtgcggtggtatctcccaggctctacattctcgggagcggcgcctcccaagggggtcctgggaccttctcgcgctcctcctggcctctgagggatgcgtcct

SEQ ID NO: 6045 - DNA, 122 bp, Homo sapiens
  misc_feature (61)..(62): /note="This region represents a CpG dinucleotide"
  misc_feature (61)..(61): /note="Nucleotide may be methylated to form 5-methylcytosine"
gaccacacagaatgggtttcactgaaagtaatagagtgaaattgtctgcataattattttcgttggattgagaatcagcagccctctttgggttcaggaaataaacctctgttaaaaccata

SEQ ID NO: 6046 - DNA, 122 bp, Homo sapiens
  misc_feature (61)..(62): /note="This region represents a CpG dinucleotide"
  misc_feature (61)..(61): /note="Nucleotide may be methylated to form 5-methylcytosine"
aggccttggggcagggatgacagaggcatttgttattaaggaggatcttcaacacataggcgcagtgactcagcactgcagcccagcccacgcagttccactgttaggagcctttggcacag

SEQ ID NO: 6047 - DNA, 122 bp, Homo sapiens
  misc_feature (61)..(62): /note="This region represents a CpG dinucleotide"
  misc_feature (61)..(61): /note="Nucleotide may be methylated to form 5-methylcytosine"
actcttccagacttcctaattttaagaactgtgacatacaccccttttttgagacagccacgcacactgtgtcacaagagtctccaagaattttttcttttcttttttttttccccttggcc

SEQ ID NO: 6048 - DNA, 122 bp, Homo sapiens
  misc_feature (61)..(62): /note="This region represents a CpG dinucleotide"
  misc_feature (61)..(61): /note="Nucleotide may be methylated to form 5-methylcytosine"
gggaggaagtgtcagtagctgggcaggccttcttggcaagcattcctccctgggttgtggcgggggctcccggcctgctgtgtggcagctgcaggctcctggggacctgaaggaaaagctta

SEQ ID NO: 6049 - DNA, 122 bp, Homo sapiens
  misc_feature (61)..(62): /note="This region represents a CpG dinucleotide"
  misc_feature (61)..(61): /note="Nucleotide may be methylated to form 5-methylcytosine"
gactgccctgtttcagatctgggttcatggagtgtttcacctgcctggctgaagaaggaacgtggccgtacttgtgaagctaatagtgagaggttcatttgtttaaacagcagttggtggaa

SEQ ID NO: 6050 - DNA, 122 bp, Homo sapiens
  misc_feature (61)..(62): /note="This region represents a CpG dinucleotide"
  misc_feature (61)..(61): /note="Nucleotide may be methylated to form 5-methylcytosine"
cccgtttctcttggtcgtaccagcttagcaggctccctcggaaggctgtgacttcagctacgtctctgaatagatggtatgaggagacagaggcctgcaataccacctcttccggctgcctg

SEQ ID NO: 6051 - DNA, 122 bp, Homo sapiens
  misc_feature (61)..(62): /note="This region represents a CpG dinucleotide"
  misc_feature (61)..(61): /note="Nucleotide may be methylated to form 5-methylcytosine"
tgtaacgccactttggatttacaaactgatttacacacagcctgtgcacctcctctcccgcggcactatgtaaactctcaaagattcatgggtaaagggtaaatcagattacgtactaatat

SEQ ID NO: 6052 - DNA, 122 bp, Homo sapiens
  misc_feature (61)..(62): /note="This region represents a CpG dinucleotide"
  misc_feature (61)..(61): /note="Nucleotide may be methylated to form 5-methylcytosine"
cggtgctcctcctgctgtctacactgcctacgaatagtacctgtctgagtcagagtgacccgtgtgaatacagggatgcaggggtttggggagaggtgggaggggacgtggcttgtcacatg

SEQ ID NO: 6053 - DNA, 122 bp, Homo sapiens
  misc_feature (61)..(62): /note="This region represents a CpG dinucleotide"
  misc_feature (61)..(61): /note="Nucleotide may be methylated to form 5-methylcytosine"
agacgtcataaaaggaaaagaatggaaaattttggaaaggaagttttctgagaccatttacgtgacaaagaagtcaggaaaatgtggcattgttgtgattatcttcatcatttcaggatctg

SEQ ID NO: 6054 - DNA, 122 bp, Homo sapiens
  misc_feature (61)..(62): /note="This region represents a CpG dinucleotide"
  misc_feature (61)..(61): /note="Nucleotide may be methylated to form 5-methylcytosine"
cgatggttagcattttctaagtgaagcatatctgagcctattccaggcctgactgacacccgctgagttcgtaattgtagcttgagcacaggtccttagcagataatgtcctaccggttctt

SEQ ID NO: 6055 - DNA, 122 bp, Homo sapiens
  misc_feature (61)..(62): /note="This region represents a CpG dinucleotide"
  misc_feature (61)..(61): /note="Nucleotide may be methylated to form 5-methylcytosine"
accctttcagttctggtactgggcagtgggctctctccactcgctgcctaggcccttcgacgctcccacccagaaatgatgacatggctagtgaggctgacagtcttgctgtaattgggaga

SEQ ID NO: 6056 - DNA, 122 bp, Homo sapiens
  misc_feature (61)..(62): /note="This region represents a CpG dinucleotide"
  misc_feature (61)..(61): /note="Nucleotide may be methylated to form 5-methylcytosine"
cctgactcctaggagagcgctggactgatgtgacccaagtcacagcaaagtgctgacaggcgcgtgtttcttttgttttgaaacctggttaggcaatagctttttgaactttcctttggtcg

SEQ ID NO: 6057 - DNA, 122 bp, Homo sapiens
  misc_feature (61)..(62): /note="This region represents a CpG dinucleotide"
  misc_feature (61)..(61): /note="Nucleotide may be methylated to form 5-methylcytosine"
actccagctcctctgcctacaggctgtggcccagggcaggttgcttcatcgctcttagtccgagtctcctcatttgtgaaataggggtaataatagtatctatctatctctcagcgttgtgg

SEQ ID NO: 6058 - DNA, 122 bp, Homo sapiens
  misc_feature (61)..(62): /note="This region represents a CpG dinucleotide"
  misc_feature (61)..(61): /note="Nucleotide may be methylated to form 5-methylcytosine"
cccgtgccctcgatcacatcgccagttcacaaacacacatgcgcacacgcacacgccgcccgcccaccaggcagacacccacacacctgtgcacgcacgcgcacgccaagccagcgggccct

SEQ ID NO: 6059 - DNA, 122 bp, Homo sapiens
  misc_feature (61)..(62): /note="This region represents a CpG dinucleotide"
  misc_feature (61)..(61): /note="Nucleotide may be methylated to form 5-methylcytosine"
tgcaagcctcagatgattgtactggttactgaatgggttgacctctctctagtagatagacgtgcaatggacacatagtaggtgcctgataaatgtttattcttatataatgtgtattaccg

SEQ ID NO: 6060 - DNA, 122 bp, Homo sapiens
  misc_feature (61)..(62): /note="This region represents a CpG dinucleotide"
  misc_feature (61)..(61): /note="Nucleotide may be methylated to form 5-methylcytosine"
gtgtcataatgaggccccagtgttatctctgctgttagaacattgggcacccagcagtgacgttagctagattaatcttggcgagaggaatccagcttggtgagctcatgtaaaatctaccc

SEQ ID NO: 6061 - DNA, 122 bp, Homo sapiens
  misc_feature (61)..(62): /note="This region represents a CpG dinucleotide"
  misc_feature (61)..(61): /note="Nucleotide may be methylated to form 5-methylcytosine"
gcctaagattttgcactccaggccctttgtctgacctgaaattactgagctaaaagggaccgaaagatcctaatggaaccaccgatgggaaaactgcggcccaggaggaaacacaccaagca

SEQ ID NO: 6062 - DNA, 122 bp, Homo sapiens
  misc_feature (61)..(62): /note="This region represents a CpG dinucleotide"
  misc_feature (61)..(61): /note="Nucleotide may be methylated to form 5-methylcytosine"
ctgcctccttacatattttaagtttggcctaaaggtttctctgtacatcatgaactataacgtaaatggaatagtatacggactctagtctactcttgtgccagtcactgagtttggccaat

SEQ ID NO: 6063 - DNA, 122 bp, Homo sapiens
  misc_feature (61)..(62): /note="This region represents a CpG dinucleotide"
  misc_feature (61)..(61): /note="Nucleotide may be methylated to form 5-methylcytosine"
cttatctcaaatctgtgaggccgacagatagggatgtggagatagagaaacaaatattgccgctttcccaaggacatgtggcttgtgagtggtagaaccagactagggcttcgcctctgaga

SEQ ID NO: 6064 - DNA, 122 bp, Homo sapiens
  misc_feature (61)..(62): /note="This region represents a CpG dinucleotide"
  misc_feature (61)..(61): /note="Nucleotide may be methylated to form 5-methylcytosine"
gtcccacgggcattgcctccccaagtgggacccattttgtggcacgtggcccggacgacacgtatccctgggcttgacatacacagacacacaggaaacattggccatgggacatgcctctc

SEQ ID NO: 6065 - DNA, 122 bp, Homo sapiens
  misc_feature (61)..(62): /note="This region represents a CpG dinucleotide"
  misc_feature (61)..(61): /note="Nucleotide may be methylated to form 5-methylcytosine"
gagatcagacaatgctgttggcttgaaacatggccttagggttttaaaggtcaaagtctgcgagttcagaaagagtagggagctccaatattaggtacccagttaacaaaattaataaaacc

SEQ ID NO: 6066 - DNA, 122 bp, Homo sapiens
  misc_feature (61)..(62): /note="This region represents a CpG dinucleotide"
  misc_feature (61)..(61): /note="Nucleotide may be methylated to form 5-methylcytosine"
ctcataaatggaattagaggcttgagggagcttgttcgccccttctgccatgtgaggacacgtagaaagcactatcaccaggaacaggctgtcaccagacaaccgttgctgccttgatctta

SEQ ID NO: 6067 - DNA, 122 bp, Homo sapiens
  misc_feature (61)..(62): /note="This region represents a CpG dinucleotide"
  misc_feature (61)..(61): /note="Nucleotide may be methylated to form 5-methylcytosine"
gcctggacgaggaactggaagactgcttcttcactgctaagactacctttttcagaaatgcgcagagcaaacatctttcaaaggtaaacataataatggaatgcaggagcctttcgtggggg

SEQ ID NO: 6068 - DNA, 122 bp, Homo sapiens
  misc_feature (61)..(62): /note="This region represents a CpG dinucleotide"
  misc_feature (61)..(61): /note="Nucleotide may be methylated to form 5-methylcytosine"
tgaaccctgactgatataacttgttattaagaaacaggaagataaaaactaattgagcatcgaagtgcttttacttctaggaagagagaattaggggttggtaccggactatagcttttgtt

SEQ ID NO: 6069 - DNA, 122 bp, Homo sapiens
  misc_feature (61)..(62): /note="This region represents a CpG dinucleotide"
  misc_feature (61)..(61): /note="Nucleotide may be methylated to form 5-methylcytosine"
ctacatctgcatgactaaaagcaatgtcaggacaagcataatgcagtctgctttgctccacgggattggcattgggactgccacagaggctggcactgatttctgtgtccaaggggaataga

SEQ ID NO: 6070 - DNA, 122 bp, Homo sapiens
  misc_feature (61)..(62): /note="This region represents a CpG dinucleotide"
  misc_feature (61)..(61): /note="Nucleotide may be methylated to form 5-methylcytosine"
tgccccaccttgtctgccggtggagactgagcagtcagcccgctgtaatagcgaggccgacgcgggaggtgatgccgcctggccggtcaggtgctgaggcgccgaggagaggacatggctca

SEQ ID NO: 6071 - DNA, 122 bp, Homo sapiens
  misc_feature (61)..(62): /note="This region represents a CpG dinucleotide"
  misc_feature (61)..(61): /note="Nucleotide may be methylated to form 5-methylcytosine"
tccatttcttttccccaagaccacagggataaataaacccaactaatagccctcatgtgtcgcaggagcaggcctcagggattcccccaaactgagaggcctgggggagcctcctgagcaaa

SEQ ID NO: 6072 - DNA, 122 bp, Homo sapiens
  misc_feature (61)..(62): /note="This region represents a CpG dinucleotide"
  misc_feature (61)..(61): /note="Nucleotide may be methylated to form 5-methylcytosine"
ctgtgatatgtttagacaatgcactgtatttaactgaatttacagatgccccaactcagacgtggtagtaaacgccagagactaataggaaattaaacatgtacaatggactaactccattt

SEQ ID NO: 6073 - DNA, 122 bp, Homo sapiens
  misc_feature (61)..(62): /note="This region represents a CpG dinucleotide"
  misc_feature (61)..(61): /note="Nucleotide may be methylated to form 5-methylcytosine"
cattttgcaagttccacttgctcccattcgtgttgctaacactttaccctttccactgctcgcagtgttaagaatgaattctcaagccataacacagtactgtaaagttccgcagggcttcg

SEQ ID NO: 6074 - DNA, 122 bp, Homo sapiens
  misc_feature (61)..(62): /note="This region represents a CpG dinucleotide"
  misc_feature (61)..(61): /note="Nucleotide may be methylated to form 5-methylcytosine"
tcacttggttagtaagtggctgggatgccttgcttggagatgtgtttctagctgcttagacggcatcgcctctcaggcgaggtgctcagtgagtgtcaaaaccaaaagttgagccgggcaca

SEQ ID NO: 6075 - DNA, 122 bp, Homo sapiens
  misc_feature (61)..(62): /note="This region represents a CpG dinucleotide"
  misc_feature (61)..(61): /note="Nucleotide may be methylated to form 5-methylcytosine"
ctatgcaatatgaaacctgagaacaaggcttaataacagcccctccaggacggcggcaagcgagccctcaagcgcagtctgcatttccccagccgcagccaggcagctgccggcaccttggg

SEQ ID NO: 6076 - DNA, 122 bp, Homo sapiens
  misc_feature (61)..(62): /note="This region represents a CpG dinucleotide"
  misc_feature (61)..(61): /note="Nucleotide may be methylated to form 5-methylcytosine"
ctgtgggtggcacatgatgactgtccctgctactctgccaatgtgagaaggcactgcagacggtgtccaccacatgggtgccctggatttggtcctcagcaggctgggcttggcctactggc

SEQ ID NO: 6077 - DNA, 122 bp, Homo sapiens
  misc_feature (61)..(62): /note="This region represents a CpG dinucleotide"
  misc_feature (61)..(61): /note="Nucleotide may be methylated to form 5-methylcytosine"
aagtgaccaccagccacacccacagaagcggccttgagctgcccagttctttttctttggcggggggagagggggcggataagatcattaacataataatgcgtgagctgagtttttgcata

SEQ ID NO: 6078 - DNA, 122 bp, Homo sapiens
  misc_feature (61)..(62): /note="This region represents a CpG dinucleotide"
  misc_feature (61)..(61): /note="Nucleotide may be methylated to form 5-methylcytosine"
tttggttcattggttcaaacccaagagagaaatttccttctgttatcaggaatggttgggcgtttcctgagcaactggtttgtttctgtattatgaataccatgggtgttgtaactgtgtgt

SEQ ID NO: 6079 - DNA, 122 bp, Homo sapiens
  misc_feature (61)..(62): /note="This region represents a CpG dinucleotide"
  misc_feature (61)..(61): /note="Nucleotide may be methylated to form 5-methylcytosine"
taagtctgtgtgtaaaatgagtagaaaataggtcttttaaagaacttaactcattaattacgtgctaccattcctgagaggaaacatggggtcctggggaaatggagtaggtgaggaagtag

SEQ ID NO: 6080 - DNA, 122 bp, Homo sapiens
  misc_feature (61)..(62): /note="This region represents a CpG dinucleotide"
  misc_feature (61)..(61): /note="Nucleotide may be methylated to form 5-methylcytosine"
ttgctctgctgtgaggtcagtttcatgtgcttaagcaactttgcttcaggtcacaccctacgggacacccacggcagcctgccgcctactaatcatagagcccttcgtgttccttttttgtc

SEQ ID NO: 6081 - DNA, 122 bp, Homo sapiens
  misc_feature (61)..(62): /note="This region represents a CpG dinucleotide"
  misc_feature (61)..(61): /note="Nucleotide may be methylated to form 5-methylcytosine"
ctttttcctggacccagagctagactacatttctaagcctgtcttgcagttaggtatgggcgtgtgacttcattctaaccaatgaactgtgagtgatagctccaggcaaggcccacaaaact

SEQ ID NO: 6082 - DNA, 122 bp, Homo sapiens
  misc_feature (61)..(62): /note="This region represents a CpG dinucleotide"
  misc_feature (61)..(61): /note="Nucleotide may be methylated to form 5-methylcytosine"
ataaattttagtgtctattaaaattcacacaatgaatatacatgtgctattctaaacatgcggaatacagcagtgaacagaatggacaaacatcctggcttgtggtgcctgtgttctagtga

SEQ ID NO: 6083 - DNA, 122 bp, Homo sapiens
  misc_feature (61)..(62): /note="This region represents a CpG dinucleotide"
  misc_feature (61)..(61): /note="Nucleotide may be methylated to form 5-methylcytosine"
tgaataacatttaaatcaggtttgtgttctgtcatctttcgaattgctgcataaataagccgttttctttttgctttttatgccttttgattttctgataacaatattacgattgcactgaa

SEQ ID NO: 6084 - DNA, 122 bp, Homo sapiens
  misc_feature (61)..(62): /note="This region represents a CpG dinucleotide"
  misc_feature (61)..(61): /note="Nucleotide may be methylated to form 5-methylcytosine"
aaaagaaacacctaggagttctgatgcagacagactacaggccaaacttactagctgcaacgagattttctccaagacttgcaaatgaagaaaataagattgctcttgaagttaaagtatga

SEQ ID NO: 6085 - DNA, 122 bp, Homo sapiens
  misc_feature (61)..(62): /note="This region represents a CpG dinucleotide"
  misc_feature (61)..(61): /note="Nucleotide may be methylated to form 5-methylcytosine"
ccacatcttgtgcattctttcctctgttttccttttgactttaaatggaaagagagcaggcgtatgcgccagcagcattctatgcctgtgactcctgagtagccttttccctctcctttttc

SEQ ID NO: 6086 - DNA, 122 bp, Homo sapiens
  misc_feature (61)..(62): /note="This region represents a CpG dinucleotide"
  misc_feature (61)..(61): /note="Nucleotide may be methylated to form 5-methylcytosine"
ctctgccctaatcctctcttacccagtactatggggtttgtttacaggaaacccttgccacgagaagttttctgctagttttcaaccgtattttggcatcatcaactcaggcatatggaaac

SEQ ID NO: 6087 - DNA, 122 bp, Homo sapiens
  misc_feature (61)..(62): /note="This region represents a CpG dinucleotide"
  misc_feature (61)..(61): /note="Nucleotide may be methylated to form 5-methylcytosine"
gtttcacctcctctccccacagttccagcagacatctgagcatgctctcttttcttgctccgtggttgatgtctttgctcagctgaatcagagctttgaaattattaagaaactggaatgcc

SEQ ID NO: 6088 - DNA, 122 bp, Homo sapiens
  misc_feature (61)..(62): /note="This region represents a CpG dinucleotide"
  misc_feature (61)..(61): /note="Nucleotide may be methylated to form 5-methylcytosine"
aaagaaaaaaaaaagaaaaactacacacacacagaaaaaaccagaaaaactacatcaacccgaaaagtggagcaatccactgctgaccgccctgggtagtcttgtaaacaaggtcaattgtt

SEQ ID NO: 6089 - DNA, 122 bp, Homo sapiens
  misc_feature (61)..(62): /note="This region represents a CpG dinucleotide"
  misc_feature (61)..(61): /note="Nucleotide may be methylated to form 5-methylcytosine"
cattatcaggcttctcatctctgccaacctggtaagtacaaagggcatctcttgtagtttcggttgcatttttctcattatgagattgagcagcagacaatgtctttaaaagacttattttg

SEQ ID NO: 6090 - DNA, 122 bp, Homo sapiens
  misc_feature (61)..(62): /note="This region represents a CpG dinucleotide"
  misc_feature (61)..(61): /note="Nucleotide may be methylated to form 5-methylcytosine"
cctctggcttcctgctgccctgaggcctctgcaagcaagggctcttgcctccggggagcacgcccaggaccgtggcaggggctcccaaaggccggggacaggcctgagcaagcggagagccc

SEQ ID NO: 6091 - DNA, 122 bp, Homo sapiens
  misc_feature (61)..(62): /note="This region represents a CpG dinucleotide"
  misc_feature (61)..(61): /note="Nucleotide may be methylated to form 5-methylcytosine"
tttccaacatatgatgtaaaaccaatgaatcacagtaactaactcaaataagtgaccctgcgtcattcctattatgagaacaggccatctgctcattgtcctcgaaagctaaacactgctcc

SEQ ID NO: 6092 - DNA, 122 bp, Homo sapiens
  misc_feature (61)..(62): /note="This region represents a CpG dinucleotide"
  misc_feature (61)..(61): /note="Nucleotide may be methylated to form 5-methylcytosine"
ctaaaagatcccacctactccatcattttactacttgtgtctacctcagtctctgtaatacgtgctcactaaaagttgattaatttacactcatagattaaagcttcttcatttaatagatc

SEQ ID NO: 6093 - DNA, 122 bp, Homo sapiens
  misc_feature (61)..(62): /note="This region represents a CpG dinucleotide"
  misc_feature (61)..(61): /note="Nucleotide may be methylated to form 5-methylcytosine"
gcccatcctgcacccgccgcccgtgagcaagagcgacgtgaagcccgtgcctggcgtgcccggggtgtgccgcaagaccaagaagaagcaccttaaaaagagtacgccctccacgccctgcc

SEQ ID NO: 6094 - DNA, 122 bp, Homo sapiens
  misc_feature (61)..(62): /note="This region represents a CpG dinucleotide"
  misc_feature (61)..(61): /note="Nucleotide may be methylated to form 5-methylcytosine"
ttacttaatatagtcacttcctgattattcctttctttcttttgtggtttctcaacctttcggtgtcactgattaagattccttataccagaagtatatagctgacaggacaaagggcccca

SEQ ID NO: 6095 - DNA, 122 bp, Homo sapiens
  misc_feature (61)..(62): /note="This region represents a CpG dinucleotide"
  misc_feature (61)..(61): /note="Nucleotide may be methylated to form 5-methylcytosine"
tgagcggcggttattggggctccaccagaggggacgtggacaggcgagacggcacagccccggcgcagccccgcgagtcctgctaagcccagctccccggactaagggcccgagatacgggc

SEQ ID NO: 6096 - DNA, 122 bp, Homo sapiens
  misc_feature (61)..(62): /note="This region represents a CpG dinucleotide"
  misc_feature (61)..(61): /note="Nucleotide may be methylated to form 5-methylcytosine"
ggtgatctgcctgcctcagcctcccaaagtgctgggattataggtgtgagccactgcgtccggcatgtgtcagatttttaaatggcactttttatgtagcaatataaatttttttaaaaatt

SEQ ID NO: 6097 - DNA, 122 bp, Homo sapiens
  misc_feature (61)..(62): /note="This region represents a CpG dinucleotide"
  misc_feature (61)..(61): /note="Nucleotide may be methylated to form 5-methylcytosine"
cccaagcttcccctcctgcttcttcacaggaaccacagcagccaagtcctatactatgcccgcccctgctgcagcagcagccatttttggctcagccctgctgcagtcccagatgaaagcca

SEQ ID NO: 6098 - DNA, 122 bp, Homo sapiens
  misc_feature (61)..(62): /note="This region represents a CpG dinucleotide"
  misc_feature (61)..(61): /note="Nucleotide may be methylated to form 5-methylcytosine"
agtggtctaagtcaatggagctgcctatggttgtgctacatacatggattcctggccaagcgggtgagtagggtcacctgggcagggctgcatctgctcagaggcagggagtctttttctgc

SEQ ID NO: 6099 - DNA, 122 bp, Homo sapiens
  misc_feature (61)..(62): /note="This region represents a CpG dinucleotide"
  misc_feature (61)..(61): /note="Nucleotide may be methylated to form 5-methylcytosine"
gcaccgacccatacatagcttaatggtttatgtcagtgtgttactatagctatttgctggcgataagcatcgtaaggaaatgaaaggcttttggttgcaattctcctgtggttctgtccagt

SEQ ID NO: 6100 - DNA, 122 bp, Homo sapiens
  misc_feature (61)..(62): /note="This region represents a CpG dinucleotide"
  misc_feature (61)..(61): /note="Nucleotide may be methylated to form 5-methylcytosine"
gacaacacttaacccaaccttgtaatcttctgcagcaaaagtggtgggggaattctgatacgtgctctgtcctggttaatactagaaggttctgaggcatccataattctaaataattaaag

SEQ ID NO: 6101 - DNA, 122 bp, Homo sapiens
  misc_feature (61)..(62): /note="This region represents a CpG dinucleotide"
  misc_feature (61)..(61): /note="Nucleotide may be methylated to form 5-methylcytosine"
ttggtgagggcctccttctgggactatctgtccacctgatcagtgatatagacactgtgccgcggagaggagccacatctcccagccagcctgccagcagagtaattggctcagggttacaa

SEQ ID NO: 6102 - DNA, 122 bp, Homo sapiens
  misc_feature (61)..(62): /note="This region represents a CpG dinucleotide"
  misc_feature (61)..(61): /note="Nucleotide may be methylated to form 5-methylcytosine"
ccagagcttcttttgaataaccagtaaggacccatgactcagaatcattgcttcgagggccgtattgagcaactctgaaactagatgcagaacagatgtcgttgtagaagcctaacatgcag

SEQ ID NO: 6103 - DNA, 122 bp, Homo sapiens
  misc_feature (61)..(62): /note="This region represents a CpG dinucleotide"
  misc_feature (61)..(61): /note="Nucleotide may be methylated to form 5-methylcytosine"
gaaaattggagaagtaaagatcaaacctgcttcctttaatagcacaacccacaggttgtccgtgttgcttctgctcacacctcattagccagtatttagtcacataaccaagagagactgga

SEQ ID NO: 6104 - DNA, 122 bp, Homo sapiens
  misc_feature (61)..(62): /note="This region represents a CpG dinucleotide"
  misc_feature (61)..(61): /note="Nucleotide may be methylated to form 5-methylcytosine"
agattaactcattcttgcaaagtgtcaagcattccccttccttctcggctggtggagtcacggagcacagggctctgcagaagaagtggcctgtggataatgagaaaagcaatggctttcta

SEQ ID NO: 6105 - DNA, 122 bp, Homo sapiens
  misc_feature (61)..(62): /note="This region represents a CpG dinucleotide"
  misc_feature (61)..(61): /note="Nucleotide may be methylated to form 5-methylcytosine"
aagacccaacggagccccagccccacgtgatactaccctgggggcaaagaagcactgtcgcgcccctctttgtgtgacaagaacttcctggaaactgtgacactgaagggccctggggaggg

SEQ ID NO: 6106 - DNA, 122 bp, Homo sapiens
  misc_feature (61)..(62): /note="This region represents a CpG dinucleotide"
  misc_feature (61)..(61): /note="Nucleotide may be methylated to form 5-methylcytosine"
cctcagcggcgctcatctgcaggtgccagcagagggcgcctctcacattccccgaaggggcggggagggcgctctcctgacaacagtgatgtctgtgtatttaaaacaacaggacattcccg

SEQ ID NO: 6107 - DNA, 122 bp, Homo sapiens
  misc_feature (61)..(62): /note="This region represents a CpG dinucleotide"
  misc_feature (61)..(61): /note="Nucleotide may be methylated to form 5-methylcytosine"
ttgagaagagtctctcactccaggatactaagacagagtcttatgtaacaaacccaatcacgagagtgacatcccatattctgtgggttggaagcaagtcacatgtcatgcccacagtcaag

SEQ ID NO: 6108 - DNA, 122 bp, Homo sapiens
  misc_feature (61)..(62): /note="This region represents a CpG dinucleotide"
  misc_feature (61)..(61): /note="Nucleotide may be methylated to form 5-methylcytosine"
gggaggttgcttctgtcggaggactgctgcgagttctgccagagagagcagctcttgtcccggaacatgaggtaggtggtggggcttggggacacgcggctggactggccggagaagtcctc

SEQ ID NO: 6109 - DNA, 122 bp, Homo sapiens
  misc_feature (61)..(62): /note="This region represents a CpG dinucleotide"
  misc_feature (61)..(61): /note="Nucleotide may be methylated to form 5-methylcytosine"
cttttcccacagcctctcgaactttgtgcaagaatgtggcctagggaggccagccgtgcgcgggcgggccgaccaaggttgggggacaggcagggcaggacttgccaggtgtccgtcctgtc

SEQ ID NO: 6110 - DNA, 122 bp, Homo sapiens
  misc_feature (61)..(62): /note="This region represents a CpG dinucleotide"
  misc_feature (61)..(61): /note="Nucleotide may be methylated to form 5-methylcytosine"
tatgtaacggagtatctagtcatgaagaaaactggctctggagcctcctacctgacttcacgtactgcctctgcaacttacaaggtgcctggacaaattacttaacctctctgggcccctat

SEQ ID NO: 6111 - DNA, 122 bp, Homo sapiens
  misc_feature (61)..(62): /note="This region represents a CpG dinucleotide"
  misc_feature (61)..(61): /note="Nucleotide may be methylated to form 5-methylcytosine"
ccggcaaccactcatctgctttctgtttgagaccttagctcttgaacctacaggttgcaccggaaccagcccagcctcgacctctaggggagtaaagggagagcaggtttgtcagggaatct

SEQ ID NO: 6112 - DNA, 122 bp, Homo sapiens
  misc_feature (61)..(62): /note="This region represents a CpG dinucleotide"
  misc_feature (61)..(61): /note="Nucleotide may be methylated to form 5-methylcytosine"
cttctgccccgccctgccggccgtggtggccctgctgctgcactacagcatcgacgaggccgagtgcttcgagaaggcctgccgcatcctggcctgcaatgaccccggcaggaggctgatcg

SEQ ID NO: 6113 - DNA, 122 bp, Homo sapiens
  misc_feature (61)..(62): /note="This region represents a CpG dinucleotide"
  misc_feature (61)..(61): /note="Nucleotide may be methylated to form 5-methylcytosine"
gcctgttctcccgtttgctctccctgtctgcctctgccgctctctaccttggtagcttaccgaaaacagccaccgtagggcgtttttatatttgtgaaaactacttccaaggagataattga

SEQ ID NO: 6114 - DNA, 122 bp, Homo sapiens
  misc_feature (61)..(62): /note="This region represents a CpG dinucleotide"
  misc_feature (61)..(61): /note="Nucleotide may be methylated to form 5-methylcytosine"
cactgcactcacagcagcagattgttaataattgggtatatcagcttctgaagcagcaagcgaggttgatcagattaaaacacgaacaagactgaaaacaagagagcagtggaattaaaaat

SEQ ID NO: 6115 - DNA, 122 bp, Homo sapiens
  misc_feature (61)..(62): /note="This region represents a CpG dinucleotide"
  misc_feature (61)..(61): /note="Nucleotide may be methylated to form 5-methylcytosine"
gtgtaccaggccccatggtcagtaggaaagtatatccctgagggtacaaaaatgaaaaagcgtacatccactcaccaaggacttcccactgtgccagggtctctagccccttatggggtgtg

SEQ ID NO: 6116 - DNA, 122 bp, Homo sapiens
  misc_feature (61)..(62): /note="This region represents a CpG dinucleotide"
  misc_feature (61)..(61): /note="Nucleotide may be methylated to form 5-methylcytosine"
cgttatccccctgccatggcgacccaaagtgctgggattacaggcaggagccaccacacccggccacagcatctgtaatatttgtaaataaatttctaacaaagagtagagattgtggtttc

SEQ ID NO: 6117 - DNA, 122 bp, Homo sapiens
  misc_feature (61)..(62): /note="This region represents a CpG dinucleotide"
  misc_feature (61)..(61): /note="Nucleotide may be methylated to form 5-methylcytosine"
tggtgtctggtgagtgtgtcacctgatcagccttctcagagtgacaggccagcaggatgccgtgtccctggctgacagaaggaggaagccacaggccaaacccagactccctctgggtagaa

SEQ ID NO: 6118 - DNA, 122 bp, Homo sapiens
  misc_feature (61)..(62): /note="This region represents a CpG dinucleotide"
  misc_feature (61)..(61): /note="Nucleotide may be methylated to form 5-methylcytosine"
atttgcaagaaatccaagaaagccctggtgagtggttgcttttcctatgttgcaaccatccgcgaagtgaatgctgctctgtgtctctattgttgttttgatggtgttcgagatgatgagga

SEQ ID NO: 6119 - DNA, 122 bp, Homo sapiens
  misc_feature (61)..(62): /note="This region represents a CpG dinucleotide"
  misc_feature (61)..(61): /note="Nucleotide may be methylated to form 5-methylcytosine"
ggaaggaaaatggttcctgatggaaacaccgaaatccagagctcagagaacacggactggcggggcaggcggcagagccttgcggcgctggacacattgaacactcagcgcccagcacaggg

SEQ ID NO: 6120 - DNA, 122 bp, Homo sapiens
  misc_feature (61)..(62): /note="This region represents a CpG dinucleotide"
  misc_feature (61)..(61): /note="Nucleotide may be methylated to form 5-methylcytosine"
accacaagatgaaacaagcctggatcctggaaccactgcttggagggggttgcctgccatcgtgaatacacattggactttatataaatacgaagtctacttctcttgttttaaattactga

SEQ ID NO: 6121 - DNA, 122 bp, Homo sapiens
  misc_feature (61)..(62): /note="This region represents a CpG dinucleotide"
  misc_feature (61)..(61): /note="Nucleotide may be methylated to form 5-methylcytosine"
ctcagcaggcttgaacccaaactgggccttgaacattcccaagcactgagaaaggtatttcggttgttgctcaaaacactgaaactggcccccagccctgagccaaatttctcaaactgtca

SEQ ID NO: 6122 - DNA, 122 bp, Homo sapiens
  misc_feature (61)..(62): /note="This region represents a CpG dinucleotide"
  misc_feature (61)..(61): /note="Nucleotide may be methylated to form 5-methylcytosine"
cctttatctcactgtctctatctctagcaaggaaacctgtttcctgactctgcagaatttcgctttccccctttttccttaaaagcagagttacaaaaaaaaaaaacaaaaaaaaaatcaaa

SEQ ID NO: 6123 - DNA, 122 bp, Homo sapiens
  misc_feature (61)..(62): /note="This region represents a CpG dinucleotide"
  misc_feature (61)..(61): /note="Nucleotide may be methylated to form 5-methylcytosine"
cctcccctgctgccgcagtgcttcccgcctgcgcctacctggaggcggggccggctctgacgtcacccagagccaatgggagtgctcggccctgagggttgggggcctcagagtgcaccgcg

SEQ ID NO: 6124 - DNA, 122 bp, Homo sapiens
  misc_feature (61)..(62): /note="This region represents a CpG dinucleotide"
  misc_feature (61)..(61): /note="Nucleotide may be methylated to form 5-methylcytosine"
cactaatttttcaataagcttcattcttggcaaatgatggtcagcctccctctccaagctcgtgcagtttagccctgaggtctgggaacgctggcagagagattgaaggaaagaatgttatg

SEQ ID NO: 6125 - DNA, 122 bp, Homo sapiens
  misc_feature (61)..(62): /note="This region represents a CpG dinucleotide"
  misc_feature (61)..(61): /note="Nucleotide may be methylated to form 5-methylcytosine"
tggggcagcctcagcgcagcttctcgggtggggcggggcgctcggggcctaaggcgcagtcgcaggctggggagggggctcggctcgccggggacgcgcccaggagagaaagcggcggcagg

SEQ ID NO: 6126 - DNA, 122 bp, Homo sapiens
  misc_feature (61)..(62): /note="This region represents a CpG dinucleotide"
  misc_feature (61)..(61): /note="Nucleotide may be methylated to form 5-methylcytosine"
tccctgctgcacgttaaagctgttctcttttgcactctgaaccggtcttttaccaccacacgtgattccgccacaccccacatcggtcatgtgagaaacgtgggttcactgagctgcgtgtg

SEQ ID NO: 6127 - DNA, 122 bp, Homo sapiens
  misc_feature (61)..(62): /note="This region represents a CpG dinucleotide"
  misc_feature (61)..(61): /note="Nucleotide may be methylated to form 5-methylcytosine"
aggtaaagacaagtaagtaaacagttgctgtacagcaggatgaagtgtttattagagccacgtccaaggtgccatgggcaaatagagaaaagcaaacaactcaagaaagcaggtgagtgtat

SEQ ID NO: 6128 - DNA, 122 bp, Homo sapiens
  misc_feature (61)..(62): /note="This region represents a CpG dinucleotide"
  misc_feature (61)..(61): /note="Nucleotide may be methylated to form 5-methylcytosine"
aagtgctaacagagcaaatctgaaacaagttcatggggattgggtaatgagtcatcgaaacgaaatcttttggaaaccatgctgctatcctctgggatattctctttgtcttctctatcacc

SEQ ID NO: 6129 - DNA, 122 bp, Homo sapiens
  misc_feature (61)..(62): /note="This region represents a CpG dinucleotide"
  misc_feature (61)..(61): /note="Nucleotide may be methylated to form 5-methylcytosine"
tcgaaattacggaacatttttaacttctttactcagtggtaaagaatggaacatcttttacgtcaaactactgaagttgtgggcaaaattacaagcgatgattatgcaggataggttagttt

SEQ ID NO: 6130 - DNA, 122 bp, Homo sapiens
  misc_feature (61)..(62): /note="This region represents a CpG dinucleotide"
  misc_feature (61)..(61): /note="Nucleotide may be methylated to form 5-methylcytosine"
ctgctatgtgccagggcctgtgctacgcagtgggataacaggggagaacaagacaggcagcgtgcctgccttcaaagaggcttctttctattgtggggagacagacagtaaatacttttaag

SEQ ID NO: 6131 - DNA, 122 bp, Homo sapiens
  misc_feature (61)..(62): /note="This region represents a CpG dinucleotide"
  misc_feature (61)..(61): /note="Nucleotide may be methylated to form 5-methylcytosine"
tggactctaagactgcattcaattctagttctaccacttggacaaggcactttttttcttcgggctttttctctgtagaaaacgaggagtaatatctgcctcataaggctgcgggcttaact

SEQ ID NO: 6132 - DNA, 122 bp, Homo sapiens
  misc_feature (61)..(62): /note="This region represents a CpG dinucleotide"
  misc_feature (61)..(61): /note="Nucleotide may be methylated to form 5-methylcytosine"
cccaggaatatgagctgacagggccacaggacctgcttggaagaggtcctgaccaggaaccgaatcatgccactagaacctctttaataaaatgaaagaaaactaaggccttgaaataggaa

SEQ ID NO: 6133 - DNA, 122 bp, Homo sapiens
  misc_feature (61)..(62): /note="This region represents a CpG dinucleotide"
  misc_feature (61)..(61): /note="Nucleotide may be methylated to form 5-methylcytosine"
ctgttgttgaagttctgtgagattgcctgtgttcacaggagaatgcccggctgaggtaggcgtgccaggctagtgcatggcaacaccaagacctggctgatggagctaggcctgttatggac

SEQ ID NO: 6134 - DNA, 122 bp, Homo sapiens
  misc_feature (61)..(62): /note="This region represents a CpG dinucleotide"
  misc_feature (61)..(61): /note="Nucleotide may be methylated to form 5-methylcytosine"
tgtgagctactgcctgcctccggtgctctgtttctgtccctagagttcttttcctttccacggagttttggtatgcatttcaatgaatgtttgtattatgttgtccaacatacttgtgtcct

SEQ ID NO: 6135 - DNA, 122 bp, Homo sapiens
  misc_feature (61)..(62): /note="This region represents a CpG dinucleotide"
  misc_feature (61)..(61): /note="Nucleotide may be methylated to form 5-methylcytosine"
gaagtaagaaacttttctccctttcttaagttggatgtacttcacaaaacaaacaggccacgcccatgatgccagggtacggggcagtttccctcagcagctggctgcagctgctttttcta

SEQ ID NO: 6136 - DNA, 122 bp, Homo sapiens
  misc_feature (61)..(62): /note="This region represents a CpG dinucleotide"
  misc_feature (61)..(61): /note="Nucleotide may be methylated to form 5-methylcytosine"
ggaggctggagctgcagatgcagtgaagtcacaggttccgtgatgtcacaggtgggcaggcgcactggtctgtaacggattggcttggccttacccacgaggctttgcggtggctgttggct

SEQ ID NO: 6137 - DNA, 122 bp, Homo sapiens
  misc_feature (61)..(62): /note="This region represents a CpG dinucleotide"
  misc_feature (61)..(61): /note="Nucleotide may be methylated to form 5-methylcytosine"
tgctgggaaagaagggcagtggtcgatcaatacccaagatcaagtgagcttagctcctcacgtgagtatttcagaaggcattgctttttggttgcatttccttgtaagttggcgagctgcat

SEQ ID NO: 6138 - DNA, 122 bp, Homo sapiens
  misc_feature (61)..(62): /note="This region represents a CpG dinucleotide"
  misc_feature (61)..(61): /note="Nucleotide may be methylated to form 5-methylcytosine"
gggggtgcttgtgactgtctttgtgactccagctctccctgtgaggtcaggacagattctcgagaggagagacctcacccctctgataccaagaatgctcatgacagcctacacttctctgt

SEQ ID NO: 6139 - DNA, 122 bp, Homo sapiens
  misc_feature (61)..(62): /note="This region represents a CpG dinucleotide"
  misc_feature (61)..(61): /note="Nucleotide may be methylated to form 5-methylcytosine"
aaccactgtgggaggtagtttatcataacccattttatgagtaagagcaataaggctcagcgtagggtgaccaactgcccaggatttcccaagatgtggggctttcagtgctcatggcagga

SEQ ID NO: 6140 - DNA, 122 bp, Homo sapiens
  misc_feature (61)..(62): /note="This region represents a CpG dinucleotide"
  misc_feature (61)..(61): /note="Nucleotide may be methylated to form 5-methylcytosine"
tgctccgctgaaactgtacttggctgaaactgtacttggcaatatcacctctgacctccacgttgctgaaccccatgaacacttttaatcttaggcctcttggcagcctccgatacagctga

SEQ ID NO: 6141 - DNA, 122 bp, Homo sapiens
  misc_feature (61)..(62): /note="This region represents a CpG dinucleotide"
  misc_feature (61)..(61): /note="Nucleotide may be methylated to form 5-methylcytosine"
attacactttctgtcttttgatgttatctgagtttcatggcattatctgtttttggcgaacgtccatatgactttagctggacaaggaaaccaggaaggaaataggaaaccaagatggaaag

SEQ ID NO: 6142 - DNA, 122 bp, Homo sapiens
  misc_feature (61)..(62): /note="This region represents a CpG dinucleotide"
  misc_feature (61)..(61): /note="Nucleotide may be methylated to form 5-methylcytosine"
cacggacctatcaacattctgacagttttctggtcttgacacattatccttttaatatagcgctggattcaatttattaatattttaagtatttttatgctcacaggggaagtcgatctgaa

SEQ ID NO: 6143 - DNA, 122 bp, Homo sapiens
  misc_feature (61)..(62): /note="This region represents a CpG dinucleotide"
  misc_feature (61)..(61): /note="Nucleotide may be methylated to form 5-methylcytosine"
tgcactgtgtagggaggcatttcttcacctctttgcagagatgttcagcccatgatcttacgtaacattgcacccacgccctccacccacataaggattatgcaattgcgtgtaggattcct

SEQ ID NO: 6144 - DNA, 122 bp, Homo sapiens
  misc_feature (61)..(62): /note="This region represents a CpG dinucleotide"
  misc_feature (61)..(61): /note="Nucleotide may be methylated to form 5-methylcytosine"
agttccaaaccctgcatgggaccaggggcaccgagggccccagctcccagggtagggggtcgtgccactatgcactgccttttcttcttccggtgctgctttactttctcttgctcctggag

SEQ ID NO: 6145 - DNA, 122 bp, Homo sapiens
  misc_feature (61)..(62): /note="This region represents a CpG dinucleotide"
  misc_feature (61)..(61): /note="Nucleotide may be methylated to form 5-methylcytosine"
aaagtgacaatttggtttatccaataatcagattaataaaggtataccatttctaaggcacgagagcaggaatcttaagctgaggtagccctgggactaaatatgccatcctcttgtatcaa

SEQ ID NO: 6146 - DNA, 122 bp, Homo sapiens
  misc_feature (61)..(62): /note="This region represents a CpG dinucleotide"
  misc_feature (61)..(61): /note="Nucleotide may be methylated to form 5-methylcytosine"
atagcatctacctcacaggcttgtactgacgatagagcactaaccacagtgcttgacaggcgtagatattcagtaaatgcaacctaaatatcctagcactcatctgggttggaattgcaaag

SEQ ID NO: 6147 - DNA, 122 bp, Homo sapiens
  misc_feature (61)..(62): /note="This region represents a CpG dinucleotide"
  misc_feature (61)..(61): /note="Nucleotide may be methylated to form 5-methylcytosine"
tcagtaagttctcatcattagactgtaagcttcttgaggtcttagaagcttacagtctaacgtagcttagagctgtgctgtccaacacagtagctatgagtcacatgtggtgagtacaaatt

SEQ ID NO: 6148 - DNA, 122 bp, Homo sapiens
  misc_feature (61)..(62): /note="This region represents a CpG dinucleotide"
  misc_feature (61)..(61): /note="Nucleotide may be methylated to form 5-methylcytosine"
accagcctggccaacatggtgaatccccgtctctacaaaaaaaaaaaaaaaaaatttagccgggcgtggtgacccctgcctatagtcccaactagtgggcagtctgaggtggaaggatagtt

SEQ ID NO: 6149 - DNA, 122 bp, Homo sapiens
  misc_feature (61)..(62): /note="This region represents a CpG dinucleotide"
  misc_feature (61)..(61): /note="Nucleotide may be methylated to form 5-methylcytosine"
ctctctctctctgcatttctttccttcagtgcaggctctcagtttacagttctgcactcacgcctgtcttccccatcaactaagctccttgagaacatgggctttgcatctgctcacatcgc

SEQ ID NO: 6150 - DNA, 122 bp, Homo sapiens
  misc_feature (61)..(62): /note="This region represents a CpG dinucleotide"
  misc_feature (61)..(61): /note="Nucleotide may be methylated to form 5-methylcytosine"
cttgctagggtcacttgggacacagaattgggggtgacagcccaggacaagaagcctctacgaatgttgcaggtctttccagatgacccaggcaggctcccttgctgatctgctggcgatgt

SEQ ID NO: 6151 - DNA, 122 bp, Homo sapiens
  misc_feature (61)..(62): /note="This region represents a CpG dinucleotide"
  misc_feature (61)..(61): /note="Nucleotide may be methylated to form 5-methylcytosine"
aagagtatctggcatttagcaaatccttatcaatgctgatcaaatgaatgaatgaacaaacgtggcgacatttaagcaaactagtaatgcagtcagtctaagctaagagttgagacatttca

SEQ ID NO: 6152 - DNA, 122 bp, Homo sapiens
  misc_feature (61)..(62): /note="This region represents a CpG dinucleotide"
  misc_feature (61)..(61): /note="Nucleotide may be methylated to form 5-methylcytosine"
gcggagcagaaccgcgctgcctcagaagctgccgggctgtgtgtttctgcgggagtgttgcgagtgttggctgcccgagtgtgtatgcggctgtctgtgtgtgcgcgtgtgtgtgtttctgt

SEQ ID NO: 6153 - DNA, 122 bp, Homo sapiens
  misc_feature (61)..(62): /note="This region represents a CpG dinucleotide"
  misc_feature (61)..(61): /note="Nucleotide may be methylated to form 5-methylcytosine"
ttggctattaagtcatcgccactgtagtgactcaggcaggcatcatctctactaagccagcgacagccttacttttgggcctcagcagactgatatatgtatgatcattccaaagcaaggga

SEQ ID NO: 6154 - DNA, 122 bp, Homo sapiens
  misc_feature (61)..(62): /note="This region represents a CpG dinucleotide"
  misc_feature (61)..(61): /note="Nucleotide may be methylated to form 5-methylcytosine"
ggagccccgcccagagcctgctccgctctcaggccgcccaggctagccagccgccagccgcgctcgcccatggagatcctagacgagttcgacagggggaagctccaagaatccttcccaaa

SEQ ID NO: 6155 - DNA, 122 bp, Homo sapiens
  misc_feature (61)..(62): /note="This region represents a CpG dinucleotide"
  misc_feature (61)..(61): /note="Nucleotide may be methylated to form 5-methylcytosine"
caggtgtgcaccactgcacccggcccaatttttctttaagcaaggtcacatgctcatatgcgcagagttttaaaactattgatagttttaattgatgggcatgacagaagtcgaatgctgct

SEQ ID NO: 6156 - DNA, 122 bp, Homo sapiens
  misc_feature (61)..(62): /note="This region represents a CpG dinucleotide"
  misc_feature (61)..(61): /note="Nucleotide may be methylated to form 5-methylcytosine"
gtgaactcatcttatgcctctgacacaatttcttgagacaccatttgaaactgcagtggccgctctggggaattttcacatgaatgaggttgttcgtttgagaggttctgtacagcaaacat

SEQ ID NO: 6157 - DNA, 122 bp, Homo sapiens
  misc_feature (61)..(62): /note="This region represents a CpG dinucleotide"
  misc_feature (61)..(61): /note="Nucleotide may be methylated to form 5-methylcytosine"
ttgtaaagcaccaaagcaacatgtaacatatgaccacaagtaaaccacatgctgttccttcgcgtggaagttggaaagtcaaatgcaaaagtaaaatggaggagatgggttacatcatttta

SEQ ID NO: 6158 - DNA, 122 bp, Homo sapiens
  misc_feature (61)..(62): /note="This region represents a CpG dinucleotide"
  misc_feature (61)..(61): /note="Nucleotide may be methylated to form 5-methylcytosine"
gatttcagatgagacaccaattattgcggtgatggtggccctgtcctctctgctagtgatcgtgtttattatcatagttttgtacatgttaaggtgagcctactaacacttcacattctctt

SEQ ID NO: 6159 - DNA, 122 bp, Homo sapiens
  misc_feature (61)..(62): /note="This region represents a CpG dinucleotide"
  misc_feature (61)..(61): /note="Nucleotide may be methylated to form 5-methylcytosine"
tcactacctcattatctctacacttcaaaatacatatacctagattgaatgataatgttacgatacaagctctgcttgtagaatataaacctgacaacaagtaaatgaacagcgtttcgtta

SEQ ID NO: 6160 - DNA, 122 bp, Homo sapiens
  misc_feature (61)..(62): /note="This region represents a CpG dinucleotide"
  misc_feature (61)..(61): /note="Nucleotide may be methylated to form 5-methylcytosine"
ctatagtaaaacttaatccgcacactttagagctcttaatagctccccgactttctccatcgccaacccaccattccaggatgcagggagcagccttactgggaggtgctggggcagagtac

SEQ ID NO: 6161 - DNA, 122 bp, Homo sapiens
  misc_feature (61)..(62): /note="This region represents a CpG dinucleotide"
  misc_feature (61)..(61): /note="Nucleotide may be methylated to form 5-methylcytosine"
ttccttaagagcatttaagctggtccatcatggatcctgctgagtcatctgtttgctacccggatgtgtctccagacaattgtttattaggtttaatatcagccactctgtaaataatctta

SEQ ID NO: 6162 - DNA, 122 bp, Homo sapiens
  misc_feature (61)..(62): /note="This region represents a CpG dinucleotide"
  misc_feature (61)..(61): /note="Nucleotide may be methylated to form 5-methylcytosine"
aatctctaaatcgattgagatgcttcagtaactttttgttttatagaacctctgggtatacgtgttatttaccagctctatcttttaaactggacaaaagttttcacgcttattaaatctat

SEQ ID NO: 6163 - DNA, 122 bp, Homo sapiens
  misc_feature (61)..(62): /note="This region represents a CpG dinucleotide"
  misc_feature (61)..(61): /note="Nucleotide may be methylated to form 5-methylcytosine"
gaaatatcaaccgccagctttcatctgtgcctgggggcggtccttcctgtgctcgtggcacgtgtttatactatgattgacaacccttaaggagaaaggctaaggtcatgaaacaaagctct

SEQ ID NO: 6164 - DNA, 122 bp, Homo sapiens
  misc_feature (61)..(62): /note="This region represents a CpG dinucleotide"
  misc_feature (61)..(61): /note="Nucleotide may be methylated to form 5-methylcytosine"
tgcctgataattgctccctggatccatcaaggtttaaggggcggaggggggcgacaagggcggggcacagaggaagcatccagcttaataatttaaaggaaaaagatttaggtgagagggcc

SEQ ID NO: 6165 - DNA, 122 bp, Homo sapiens
  misc_feature (61)..(62): /note="This region represents a CpG dinucleotide"
  misc_feature (61)..(61): /note="Nucleotide may be methylated to form 5-methylcytosine"
gtctacactctagcttcatgtggccttctttcttgtgcttgcctatagtttctgttctctcgtaagttcagcttacacctgagccgtcatggacaccactgtctctcttttacttacttttg

SEQ ID NO: 6166 - DNA, 122 bp, Homo sapiens
  misc_feature (61)..(62): /note="This region represents a CpG dinucleotide"
  misc_feature (61)..(61): /note="Nucleotide may be methylated to form 5-methylcytosine"
tatttattccctttgatgcctcagttctaacagtaaacattaatgtctgcagcaggcaaacggaatcagggtcttgttggtatttcacaatgaaatcatagctttgtggtgagtattgttcc

SEQ ID NO: 6167 - DNA, 122 bp, Homo sapiens
  misc_feature (61)..(62): /note="This region represents a CpG dinucleotide"
  misc_feature (61)..(61): /note="Nucleotide may be methylated to form 5-methylcytosine"
gctaataaggcccttatcaaaaggggaatctccttcaaagaatagtttagaaatagcaggcggtactgaattttgcatgtggggctgacagtctgtaagaatactgctcttgttttcaggaa

SEQ ID NO: 6168 - DNA, 122 bp, Homo sapiens
  misc_feature (61)..(62): /note="This region represents a CpG dinucleotide"
  misc_feature (61)..(61): /note="Nucleotide may be methylated to form 5-methylcytosine"
gggctcattcaaatgaacacctggactttgtcaaaagaagagttattgtcagaataaagacgctgcttataaaatgctagggttccctgtgtggagccaagaagatttcttctttctttaag

SEQ ID NO: 6169 - DNA, 122 bp, Homo sapiens
  misc_feature (61)..(62): /note="This region represents a CpG dinucleotide"
  misc_feature (61)..(61): /note="Nucleotide may be methylated to form 5-methylcytosine"
gctaacactctccggctcgcagaagcggcagcagccggcgggttttgagcttccgagtcccgggtgcgcaagagtgtggacgccacccctccagggctgccaagcctccagggctgccaagc

SEQ ID NO: 6170 - DNA, 122 bp, Homo sapiens
  misc_feature (61)..(62): /note="This region represents a CpG dinucleotide"
  misc_feature (61)..(61): /note="Nucleotide may be methylated to form 5-methylcytosine"
taggtacttgcagggtaggaaaaagttactctgagtgaatcttctaattcactgactcttcgccatagcttttgcagagtatgcccaagagatgagtcagaaccagaagacgtctggctttc

SEQ ID NO: 6171 - DNA, 122 bp, Homo sapiens
  misc_feature (61)..(62): /note="This region represents a CpG dinucleotide"
  misc_feature (61)..(61): /note="Nucleotide may be methylated to form 5-methylcytosine"
gtgtaagagcacatacttaccacaaatcctgcccttaggtctaaataacctcaatgtgatcgttcttcaattctacacatcacttctgaatcaccccttccctatggtatataagccctgag

SEQ ID NO: 6172 - DNA, 122 bp, Homo sapiens
  misc_feature (61)..(62): /note="This region represents a CpG dinucleotide"
  misc_feature (61)..(61): /note="Nucleotide may be methylated to form 5-methylcytosine"
tgagcaaatatacaaaatcaggaaatgatgaacagcaatccataagacagacttcccttacgaaggagacatgtttttgtttttctagttttgtttttaaagcaaagaacattttacgctta

SEQ ID NO: 6173 - DNA, 122 bp, Homo sapiens
  misc_feature (61)..(62): /note="This region represents a CpG dinucleotide"
  misc_feature (61)..(61): /note="Nucleotide may be methylated to form 5-methylcytosine"
acccctgcagccctctcctagggaaattcatggggcaccttgcgtcacagctgggtggggcgagagctttctccatgagcagagagggaccctgtacccagagcagagcggagtgctcgggg

SEQ ID NO: 6174 - DNA, 122 bp, Homo sapiens
  misc_feature (61)..(62): /note="This region represents a CpG dinucleotide"
  misc_feature (61)..(61): /note="Nucleotide may be methylated to form 5-methylcytosine"
tatggattcatatctctatctcttaattatgaaaaaccagatagccatcttaaaatcctacgttttctacttcatgtttctccttgataaaggatagtgttcctgaagtccacatgcatggt

SEQ ID NO: 6175 - DNA, 122 bp, Homo sapiens
  misc_feature (61)..(62): /note="This region represents a CpG dinucleotide"
  misc_feature (61)..(61): /note="Nucleotide may be methylated to form 5-methylcytosine"
agcagtatgactggctggaaggcataaagcagcagacatggggagaagttcagtgaaaggcggcagagcaacacagcagggctgaggtgcccaggcccagagacagaccctgtagctggtgg

SEQ ID NO: 6176 - DNA, 122 bp, Homo sapiens
  misc_feature (61)..(62): /note="This region represents a CpG dinucleotide"
  misc_feature (61)..(61): /note="Nucleotide may be methylated to form 5-methylcytosine"
ccatgggtctctgtgcccctttgtctcctgtggtcttggtcgtcccgtgccctccaggctcgcgttggacgacgccattcgacacaagccgctgaacatgtcatcccgtttttcacccaggg

SEQ ID NO: 6177 - DNA, 122 bp, Homo sapiens
  misc_feature (61)..(62): /note="This region represents a CpG dinucleotide"
  misc_feature (61)..(61): /note="Nucleotide may be methylated to form 5-methylcytosine"
taaaagacagacgcgtggcttgcaatgctatttaatactttcttttccttccattttcaacgtagaagtgatgcttgaaaccacagcagccattttggggccacgaggcaataagcacaagg

SEQ ID NO: 6178 - DNA, 122 bp, Homo sapiens
  misc_feature (61)..(62): /note="This region represents a CpG dinucleotide"
  misc_feature (61)..(61): /note="Nucleotide may be methylated to form 5-methylcytosine"
aggatacagagagatctggaaaccttgccttgagagacgtaatcgaaagaacctaggacacgtgccctgaaaatgagacaaggaagacatgtgagaaccatctgcatgtttgcaaagtctgt

SEQ ID NO: 6179 - DNA, 122 bp, Homo sapiens
  misc_feature (61)..(62): /note="This region represents a CpG dinucleotide"
  misc_feature (61)..(61): /note="Nucleotide may be methylated to form 5-methylcytosine"
gcagaagtagaaccctttattaaactcatccagtatcaatctatgaacatcccaattacacgttgtttgttggtaggaagtcaggttgaactaagtaaggaacattcaccagtaatgtgtca

SEQ ID NO: 6180 - DNA, 122 bp, Homo sapiens
  misc_feature (61)..(62): /note="This region represents a CpG dinucleotide"
  misc_feature (61)..(61): /note="Nucleotide may be methylated to form 5-methylcytosine"
tttacagttccttttgtcctctaaacctgaaactaggtacattttcagccccacttttagcggcagctggttagctctgtttgcaaagcattctggctccagtacctgaacttaatggtgca

SEQ ID NO: 6181 - DNA, 122 bp, Homo sapiens
  misc_feature (61)..(62): /note="This region represents a CpG dinucleotide"
  misc_feature (61)..(61): /note="Nucleotide may be methylated to form 5-methylcytosine"
ttttctagttgttgttagtgggagccttggtctactgcaagctgctccatcacacctgagcgtggacattcaatttcctgatggtctactacgtaaatgtaaaagtgaaactatctttgtta

SEQ ID NO: 6182 - DNA, 122 bp, Homo sapiens
  misc_feature (61)..(62): /note="This region represents a CpG dinucleotide"
  misc_feature (61)..(61): /note="Nucleotide may be methylated to form 5-methylcytosine"
caggaaagagacactttggtgttgcttctgctagatggagtttgctctgattcagcaaaacgaattcctgacttatgattactagatgcagcagcccctgggggtgctccacccacacgcaa

SEQ ID NO: 6183 - DNA, 122 bp, Homo sapiens
  misc_feature (61)..(62): /note="This region represents a CpG dinucleotide"
  misc_feature (61)..(61): /note="Nucleotide may be methylated to form 5-methylcytosine"
agctcccctctgccagagagatctgagcatttcatcactggcttaaaaccctccagcctccgccttgctccctcatcctgtgaataaactccaaatcccttcccgggtcacactggcctctc

SEQ ID NO: 6184 - DNA, 122 bp, Homo sapiens
  misc_feature (61)..(62): /note="This region represents a CpG dinucleotide"
  misc_feature (61)..(61): /note="Nucleotide may be methylated to form 5-methylcytosine"
caaatctccaggtctgtctgcaaaaagaagaatttggtcctgccagttcagtaaacaccccggcctttcttattgccgtgcagcagacttacatgaaggagcaagaaaacaattccactgtg

SEQ ID NO: 6185 - DNA, 122 bp, Homo sapiens
  misc_feature (61)..(62): /note="This region represents a CpG dinucleotide"
  misc_feature (61)..(61): /note="Nucleotide may be methylated to form 5-methylcytosine"
attttaaagagagcaggggtataagccagagtggtggggtgagcagtttggagggaaagacggttacagaacaggtaactaaaggtgacttaaatcatagcaggtgaccaggggtgactcag

SEQ ID NO: 6186 - DNA, 122 bp, Homo sapiens
  misc_feature (61)..(62): /note="This region represents a CpG dinucleotide"
  misc_feature (61)..(61): /note="Nucleotide may be methylated to form 5-methylcytosine"
gaccaagacaggaagtccagccaggaggtctgagtcacagacgccgagtggagagccaggcgcaggggcccggcggccacgggagtgggtgcttggggccccgctgggctaatcctcctctg

SEQ ID NO: 6187 - DNA, 122 bp, Homo sapiens
  misc_feature (61)..(62): /note="This region represents a CpG dinucleotide"
  misc_feature (61)..(61): /note="Nucleotide may be methylated to form 5-methylcytosine"
gctttgttatatttgctatcttttgagagttctgttttgtttgcttgtttgtttttatagcgagctgaaaatgtcaggaagtatgagtgctcttgataaaattagttgataggagaaactaa

SEQ ID NO: 6188 - DNA, 122 bp, Homo sapiens
  misc_feature (61)..(62): /note="This region represents a CpG dinucleotide"
  misc_feature (61)..(61): /note="Nucleotide may be methylated to form 5-methylcytosine"
catttcattaaataagtgttctgctttggccttcttccagctggcatgatactagactggcgtgaagcagggaagtggaatcatcttaaatttagcatcatgaaaatctgttcctcgtgaac

SEQ ID NO: 6189 - DNA, 122 bp, Homo sapiens
  misc_feature (61)..(62): /note="This region represents a CpG dinucleotide"
  misc_feature (61)..(61): /note="Nucleotide may be methylated to form 5-methylcytosine"
gtcatggtttcctctgcctcctaaaaccctcatttatgagtcagttctgcctcttactagcgtgtgaccctcggcaagctgcttaatcactttgagcctgttcccttgctttgtaaaaataa

SEQ ID NO: 6190 - DNA, 122 bp, Homo sapiens
  misc_feature (61)..(62): /note="This region represents a CpG dinucleotide"
  misc_feature (61)..(61): /note="Nucleotide may be methylated to form 5-methylcytosine"
caaaagtatatagaaggataacaaggtgtggataaggaaggggtgccattagtacaaggacgtgcctgtcacatgtaagagctggaaatcaggctccaagcttccccagtgccacagcaaag

SEQ ID NO: 6191 - DNA, 122 bp, Homo sapiens
  misc_feature (61)..(62): /note="This region represents a CpG dinucleotide"
  misc_feature (61)..(61): /note="Nucleotide may be methylated to form 5-methylcytosine"
aactatttatctgactccttccatctccacagcactgtgtgagggatcagtgataagagacggtgaaagacatgcgcaaatggataaataataagcaggatatgtagaatgacacaacaatt

SEQ ID NO: 6192 - DNA, 122 bp, Homo sapiens
  misc_feature (61)..(62): /note="This region represents a CpG dinucleotide"
  misc_feature (61)..(61): /note="Nucleotide may be methylated to form 5-methylcytosine"
tatttccctgatgactaatgacactaagcatctttttcctgggcttagtggccagttgttcgtcttctttggagaactgtctagatcccttgtccactttaaaaatcggggtttttaaaaat

SEQ ID NO: 6193 - DNA, 122 bp, Homo sapiens
  misc_feature (61)..(62): /note="This region represents a CpG dinucleotide"
  misc_feature (61)..(61): /note="Nucleotide may be methylated to form 5-methylcytosine"
caggttaagcaggtgtgagccagggggcggagtggagcctgtgtgtctgtttggacaaaacgggaggcacattttcaggtttaggaaataccatgtacaaaagcttgaattgatgaacttct

SEQ ID NO: 6194 - DNA, 122 bp, Homo sapiens
  misc_feature (61)..(62): /note="This region represents a CpG dinucleotide"
  misc_feature (61)..(61): /note="Nucleotide may be methylated to form 5-methylcytosine"
tgcttcgagtgggaggagccttggggttattctagcatattccttgagggttattgcagtcggcgagggctagattagatgagagtgcggaactggacccccgttctggcggcggtcctttt

SEQ ID NO: 6195 - DNA, 122 bp, Homo sapiens
  misc_feature (61)..(62): /note="This region represents a CpG dinucleotide"
  misc_feature (61)..(61): /note="Nucleotide may be methylated to form 5-methylcytosine"
tgctcacttcccatttctaattgactacagcaattgcaattcttgctgaaccattctcagcgtgtttgagttacttgaggcatctgactgtaggctctacctataccctgatgccaactcta

SEQ ID NO: 6196 - DNA, 122 bp, Homo sapiens
  misc_feature (61)..(62): /note="This region represents a CpG dinucleotide"
  misc_feature (61)..(61): /note="Nucleotide may be methylated to form 5-methylcytosine"
tagtgctctcctatcatcaaatcgattacaaatgttcatctgttaaatgttcctgggccacgcaaaacattccagctggccatatttactttcgcattccttgctctaagtactaacattac

SEQ ID NO: 6197 - DNA, 122 bp, Homo sapiens
  misc_feature (61)..(62): /note="This region represents a CpG dinucleotide"
  misc_feature (61)..(61): /note="Nucleotide may be methylated to form 5-methylcytosine"
aaaagacagtgagcaaagtcaaaccatgactcaccatctgttgaaacctgctgggaacaacgggtcctcatatgcctccgtggagctcctggccttgaagactgagcccagttgacctcatc

SEQ ID NO: 6198 - DNA, 122 bp, Homo sapiens
  misc_feature (61)..(62): /note="This region represents a CpG dinucleotide"
  misc_feature (61)..(61): /note="Nucleotide may be methylated to form 5-methylcytosine"
aaaaagaatgttatgctctgttgatgcttttggtgactatgacacaggggccctgtcttccgcagaccctgcagggccaggctggcatagacccagctgagcaaccgtcgcctgagagcttt

SEQ ID NO: 6199 - DNA, 122 bp, Homo sapiens
  misc_feature (61)..(62): /note="This region represents a CpG dinucleotide"
  misc_feature (61)..(61): /note="Nucleotide may be methylated to form 5-methylcytosine"
tcttggccaccctctcatgagagcctgtccttgactaaacaaggtcttcactaaacgctgcgctttacgggggagctgtaataattgccacttcctcatggtgtctgccctagatttagtga

SEQ ID NO: 6200 - DNA, 122 bp, Homo sapiens
  misc_feature (61)..(62): /note="This region represents a CpG dinucleotide"
  misc_feature (61)..(61): /note="Nucleotide may be methylated to form 5-methylcytosine"
atccctggggccagtggcatatggggcctggacacagggcggcctgagggctgggggccacgccccctggtcaacttgggccatctgagaggccacagagacagccaatggtttgctgtgcc

SEQ ID NO: 6201 - DNA, 122 bp, Homo sapiens
  misc_feature (61)..(62): /note="This region represents a CpG dinucleotide"
  misc_feature (61)..(61): /note="Nucleotide may be methylated to form 5-methylcytosine"
ttttttttttgggacagtgtctcactctgtcacccaggctggaatgcagtggcacaatcacggctctgcagggtgcagactccaccttctgggctcaagccatcctcccacctcggcctccc

SEQ ID NO: 6202 - DNA, 122 bp, Homo sapiens
  misc_feature (61)..(62): /note="This region represents a CpG dinucleotide"
  misc_feature (61)..(61): /note="Nucleotide may be methylated to form 5-methylcytosine"
tgcatagttctcatgtttcacagctttttctaggaccgatttcctgaagtgatctttttacggttgtgtatactaactattcagcaggtcaggcagtgaaatagcatccttgcattaatcag

SEQ ID NO: 6203 - DNA, 122 bp, Homo sapiens
  misc_feature (61)..(62): /note="This region represents a CpG dinucleotide"
  misc_feature (61)..(61): /note="Nucleotide may be methylated to form 5-methylcytosine"
gttcctttacagtgctcacccattgtagcaaatggggaagtcaatcacgtttcaaaatcacgtggatatgagtcagcatgctggttcctgacttactagatcttgcacaatatatcagtaat

SEQ ID NO: 6204 - DNA, 122 bp, Homo sapiens
  misc_feature (61)..(62): /note="This region represents a CpG dinucleotide"
  misc_feature (61)..(61): /note="Nucleotide may be methylated to form 5-methylcytosine"
ttatgaatgtgggttcaaagtgctttgatttgtttaaataccttgcataatgttaaagggcgaagggaggtgctccagtggattatttttcaatttaggagttcaaattctttgtaaatttg

SEQ ID NO: 6205 - DNA, 122 bp, Homo sapiens
  misc_feature (61)..(62): /note="This region represents a CpG dinucleotide"
  misc_feature (61)..(61): /note="Nucleotide may be methylated to form 5-methylcytosine"
tgccttgggtggggaagggtatgccctaagctagaaattgctatggctctggtaggagagcgagcacaaaattcttatgacattgccatttcctgccatcctgtatttctctctgggacttc

SEQ ID NO: 6206 - DNA, 122 bp, Homo sapiens
  misc_feature (61)..(62): /note="This region represents a CpG dinucleotide"
  misc_feature (61)..(61): /note="Nucleotide may be methylated to form 5-methylcytosine"
cgggagcacttaaaacaatacctattatgttgtaagtgctcagctaatatttgttgaacacgtgaatgaatgaaagattcctggcacaaagtgctaatcttcaataaatattgtttgaactg

SEQ ID NO: 6207 - DNA, 122 bp, Homo sapiens
  misc_feature (61)..(62): /note="This region represents a CpG dinucleotide"
  misc_feature (61)..(61): /note="Nucleotide may be methylated to form 5-methylcytosine"
tcaggattgctggtttgttcttgctgttgatccggagctaaaattcacagtgcaagcccccgcatgctgctctgttcccagctgcaatctagtcctccctcccgtctgccatgatcctgaaa

SEQ ID NO: 6208 - DNA, 122 bp, Homo sapiens
  misc_feature (61)..(62): /note="This region represents a CpG dinucleotide"
  misc_feature (61)..(61): /note="Nucleotide may be methylated to form 5-methylcytosine"
gccccagggctccaggcggtgcttgttcctcagcctcttctccttcctgatcgtggcaggcgccaccacgctcttctgcctgctgcactttggagtgatcggcccccagagggaagaggtga

SEQ ID NO: 6209 - DNA, 122 bp, Homo sapiens
  misc_feature (61)..(62): /note="This region represents a CpG dinucleotide"
  misc_feature (61)..(61): /note="Nucleotide may be methylated to form 5-methylcytosine"
gtttgtttttataatgggtcttgctctgtcatctcagtttagagtacagtgtcatgatcacggctcactgcagcctcaacctcagcctcctgggtagctgggactataggcatgcaccacca

SEQ ID NO: 6210 - DNA, 122 bp, Homo sapiens
  misc_feature (61)..(62): /note="This region represents a CpG dinucleotide"
  misc_feature (61)..(61): /note="Nucleotide may be methylated to form 5-methylcytosine"
gccccagccctggcagcgcctccagctccctggtcatacccttagtgccagagtaggcagcgcctctcggaagtgaggaagcccaccctgctgagtgacccacagcctcaggcctcagcagc

SEQ ID NO: 6211 - DNA, 122 bp, Homo sapiens
  misc_feature (61)..(62): /note="This region represents a CpG dinucleotide"
  misc_feature (61)..(61): /note="Nucleotide may be methylated to form 5-methylcytosine"
tagcttagcaagacagctgggaggggatttgtttgttatgttttgatggcggaagttacacgggtactatgctgcttttataaaggacttgcgtcgtaaagtcttttttcctcaccctagtg

SEQ ID NO: 6212 - DNA, 122 bp, Homo sapiens
  misc_feature (61)..(62): /note="This region represents a CpG dinucleotide"
  misc_feature (61)..(61): /note="Nucleotide may be methylated to form 5-methylcytosine"
agctgagattgcatgactacactccagcctgagcaatagagccaaaacctgtctcaaaaacgaaacaaagcaaaaaaataagtgattctcaaatttttcggtctcaggactccattatactc

SEQ ID NO: 6213 - DNA, 122 bp, Homo sapiens
  misc_feature (61)..(62): /note="This region represents a CpG dinucleotide"
  misc_feature (61)..(61): /note="Nucleotide may be methylated to form 5-methylcytosine"
gttcactagtggatggttgtccctaggggaagtaaattttggagcacttttatgaaagcacgcagaaaccaggggtggggcagaaacagaaactagagatctgtgtctatctgagtggagcc

SEQ ID NO: 6214 - DNA, 122 bp, Homo sapiens
  misc_feature (61)..(62): /note="This region represents a CpG dinucleotide"
  misc_feature (61)..(61): /note="Nucleotide may be methylated to form 5-methylcytosine"
ctaaaagaagaagatggcctcttggatcactttggtaattaattaccactaacaaaggaacgaaataaaggtgagacaaacagcagattacagacactaagggccgttgctcctagtctcag

SEQ ID NO: 6215 - DNA, 122 bp, Homo sapiens
  misc_feature (61)..(62): /note="This region represents a CpG dinucleotide"
  misc_feature (61)..(61): /note="Nucleotide may be methylated to form 5-methylcytosine"
aggagaatgagttggccatggaagaggaagtgaaagagctttctggcaataggaactctgcgtgcaataagcctgagacaggggcccctagcatgctagagcacagtaaaagaaggccagtg

SEQ ID NO: 6216 - DNA, 122 bp, Homo sapiens
  misc_feature (61)..(62): /note="This region represents a CpG dinucleotide"
  misc_feature (61)..(61): /note="Nucleotide may be methylated to form 5-methylcytosine"
agaggtgtcagcggctcacaacaccttgggctgggccagagggaggcccggtccccggggcgggatcgctaacctccagggctgcgtcggtgctggcctcaaagccgtcacagaccagcacg

SEQ ID NO: 6217 - DNA, 122 bp, Homo sapiens
  misc_feature (61)..(62): /note="This region represents a CpG dinucleotide"
  misc_feature (61)..(61): /note="Nucleotide may be methylated to form 5-methylcytosine"
ttgaagtgcacactgattgacacgacatgttggaagccaacggtaaaacaacctgccatccgtaaggcacatctccaacatgtcagtaaacaaggagaacagacgttaagtgaacatgagca

SEQ ID NO: 6218 - DNA, 122 bp, Homo sapiens
  misc_feature (61)..(62): /note="This region represents a CpG dinucleotide"
  misc_feature (61)..(61): /note="Nucleotide may be methylated to form 5-methylcytosine"
accagttgcagactcattaccctgcattccagtttgtgctgatgaaaatcagtttcagtccgtggcctggaattcatgtacagcacttcctgtagcctcttatataaacacatcaaaaaaat

SEQ ID NO: 6219 - DNA, 122 bp, Homo sapiens
  misc_feature (61)..(62): /note="This region represents a CpG dinucleotide"
  misc_feature (61)..(61): /note="Nucleotide may be methylated to form 5-methylcytosine"
ctgaatttatagtaaaaagaaaaacattgtttgggttcctccagtagcagagacagaatacgaatgcaagtagtctattctgtgttgagtgatcacagaaagttcatgtgggagagtagggg

SEQ ID NO: 6220 - DNA, 122 bp, Homo sapiens
  misc_feature (61)..(62): /note="This region represents a CpG dinucleotide"
  misc_feature (61)..(61): /note="Nucleotide may be methylated to form 5-methylcytosine"
tcctttgacatgtatgaaatgtttatattttctgccttttactggaaaacttcacccccacgcctacaccccttctatttcccttctttactttctttttttctttgtctctagttctactt

SEQ ID NO: 6221 - DNA, 122 bp, Homo sapiens
  misc_feature (61)..(62): /note="This region represents a CpG dinucleotide"
  misc_feature (61)..(61): /note="Nucleotide may be methylated to form 5-methylcytosine"
cttttcgggtcatctagatttctcaactcaccggaagcatgcacacgaatgttgagttcacgtgttcatctgggcaaaacgctttctccccaggacttccctgtccttaggggcagcctgac

SEQ ID NO: 6222 - DNA, 122 bp, Homo sapiens
  misc_feature (61)..(62): /note="This region represents a CpG dinucleotide"
  misc_feature (61)..(61): /note="Nucleotide may be methylated to form 5-methylcytosine"
aaacagtagcccggagaggaggctctcttggtaggatcccacggcaaccgaatggatgcacgttgtttatgacgttcttacccatgaaagcgctcaaggatccgcttgcttgcttacatgtg

SEQ ID NO: 6223 - DNA, 122 bp, Homo sapiens
  misc_feature (61)..(62): /note="This region represents a CpG dinucleotide"
  misc_feature (61)..(61): /note="Nucleotide may be methylated to form 5-methylcytosine"
tactcactatatgccagtagcacaactctctaccctccaccaagttgtaacaaccaaaaacgtatgcagacactgccaaatgttccctgagggtgaaaattgcctccagctgagaactactg

SEQ ID NO: 6224 - DNA, 122 bp, Homo sapiens
  misc_feature (61)..(62): /note="This region represents a CpG dinucleotide"
  misc_feature (61)..(61): /note="Nucleotide may be methylated to form 5-methylcytosine"
tcttccactgatgcatttctttcccacacccatgtttatacatttctcaagataaagtgtcgtattacaaggaagccaacatctttcaaaccctgagaacattactatagtgacgtacatgg

SEQ ID NO: 6225 - DNA, 122 bp, Homo sapiens
  misc_feature (61)..(62): /note="This region represents a CpG dinucleotide"
  misc_feature (61)..(61): /note="Nucleotide may be methylated to form 5-methylcytosine"
atttatgtactgtaaaagatatgacataagagaagtattttgagatatgaagaagagcaacgtagtagggtatatcatttcttagctacatcatatgggcagtatacttgaatgaatatttc

SEQ ID NO: 6226 - DNA, 122 bp, Homo sapiens
  misc_feature (61)..(62): /note="This region represents a CpG dinucleotide"
  misc_feature (61)..(61): /note="Nucleotide may be methylated to form 5-methylcytosine"
cgaaaagatttctgattagcaggtcacataagttacatctgacaagtcttgtcagaactccgtcagtaccagtgacacacactagaccataccacaggccacattttatccctggaacacag

SEQ ID NO: 6227 - DNA, 122 bp, Homo sapiens
  misc_feature (61)..(62): /note="This region represents a CpG dinucleotide"
  misc_feature (61)..(61): /note="Nucleotide may be methylated to form 5-methylcytosine"
cctggagctctcctttgtggccctatcttcctaactgctgtattggtttcctgtggttgacgtaacaattttccactggcttggtggcttaaaatgacagaaacgtatgctctcatagtcct

SEQ ID NO: 6228 - DNA, 122 bp, Homo sapiens
  misc_feature (61)..(62): /note="This region represents a CpG dinucleotide"
  misc_feature (61)..(61): /note="Nucleotide may be methylated to form 5-methylcytosine"
gacagtgtgaccttaaaaactggaaccaagcctattctcacccattcagcagtgaccaagcgagattttaaaggtcactgtaatttatggcacatgctagagctggcagaactctattaaaa

SEQ ID NO: 6229 - DNA, 122 bp, Homo sapiens
  misc_feature (61)..(62): /note="This region represents a CpG dinucleotide"
  misc_feature (61)..(61): /note="Nucleotide may be methylated to form 5-methylcytosine"
gtgtcgttgaaacagtatgttgctttccttctctggcccttagcttaactatctgtacagcgggaacattggcaaactcctacgtggaggagcttgcaggtccacttcaagttatcagactc

SEQ ID NO: 6230 - DNA, 122 bp, Homo sapiens
  misc_feature (61)..(62): /note="This region represents a CpG dinucleotide"
  misc_feature (61)..(61): /note="Nucleotide may be methylated to form 5-methylcytosine"
tccgagtgtagagggcatgctgccctcctctctccacctaactgcccgccagcaagggagcggtgccagccgccacacgctgacggtggagacgctactacacagccagctccctccctgtg

SEQ ID NO: 6231 - DNA, 122 bp, Homo sapiens
  misc_feature (61)..(62): /note="This region represents a CpG dinucleotide"
  misc_feature (61)..(61): /note="Nucleotide may be methylated to form 5-methylcytosine"
aggccactggctctcaactcttagctaccatccatgttccccactggaagcatgtggaaacgtctgggctccctggctgcaccctacagccaagggagactgcacagcagatgtggaaaggg

SEQ ID NO: 6232 - DNA, 122 bp, Homo sapiens
  misc_feature (61)..(62): /note="This region represents a CpG dinucleotide"
  misc_feature (61)..(61): /note="Nucleotide may be methylated to form 5-methylcytosine"
cgtgagtatctcccaaggccctgaccagtcagtcagtcagtgaacaaacattttttagcacgatgtttatacctggcaccaagccagagtaacagcaagaaagaagacagacaaggcccttt

SEQ ID NO: 6233 - DNA, 122 bp, Homo sapiens
  misc_feature (61)..(62): /note="This region represents a CpG dinucleotide"
  misc_feature (61)..(61): /note="Nucleotide may be methylated to form 5-methylcytosine"
agggcctgggcaggagctgcagctgtttccgtgagattgaacagcttcctgtgcagggtccgctgctggacctggatgaggccaagggacatgggtacccacaggcgggccccagcaggggc

SEQ ID NO: 6234 - DNA, 122 bp, Homo sapiens
  misc_feature (61)..(62): /note="This region represents a CpG dinucleotide"
  misc_feature (61)..(61): /note="Nucleotide may be methylated to form 5-methylcytosine"
ctgggatactcactgtgtgctcctttctaccttcatgaaccccctggattctgatcctgtcgccttactgaggtcgatgggcctcacttgctctggctagcatcttcttggcctttccctgt

SEQ ID NO: 6235 - DNA, 122 bp, Homo sapiens
  misc_feature (61)..(62): /note="This region represents a CpG dinucleotide"
  misc_feature (61)..(61): /note="Nucleotide may be methylated to form 5-methylcytosine"
gagggcggagcaggatctccctacctctgagctcttagaggcggatgatgggaaaatcgacgctgggaaaacggagcccagttggaagattaacccaatttggaaaattgacacagagaaaa

SEQ ID NO: 6236 - DNA, 122 bp, Homo sapiens
  misc_feature (61)..(62): /note="This region represents a CpG dinucleotide"
  misc_feature (61)..(61): /note="Nucleotide may be methylated to form 5-methylcytosine"
ctgggctcaagtgatcagcccgccttggcctgccaaagtgctgggattgcaggcgtgaaccgtgcacttgcctggaattcttgcccttaagtagcttatgatctaatggggaaggcaaatag

SEQ ID NO: 6237 - DNA, 122 bp, Homo sapiens
  misc_feature (61)..(62): /note="This region represents a CpG dinucleotide"
  misc_feature (61)..(61): /note="Nucleotide may be methylated to form 5-methylcytosine"
ttactatttccattgcttgcatttcttactgacagtaattggaattaaacttttttttttcgtgagaaggaagagattcttttggtaagatatcatcttaaatgatggctctcaaatacttg

SEQ ID NO: 6238 - DNA, 122 bp, Homo sapiens
  misc_feature (61)..(62): /note="This region represents a CpG dinucleotide"
  misc_feature (61)..(61): /note="Nucleotide may be methylated to form 5-methylcytosine"
tcatctttttgttgaccaacttttcctttaatcccaaattgctcgggatttatcatgagccgcctaagaagacatggagttggaagtggagacccagagtggtgcatggaagctggttgtca

SEQ ID NO: 6239 - DNA, 122 bp, Homo sapiens
  misc_feature (61)..(62): /note="This region represents a CpG dinucleotide"
  misc_feature (61)..(61): /note="Nucleotide may be methylated to form 5-methylcytosine"
tcttggcaccccatcactgcccttgctcatctgcagcagctctggtgtgtgctcactgttcgcagtgttagtcctgaatcactcaccacaactcacttgccttgtgctgtccaatcttactt

SEQ ID NO: 6240 - DNA, 122 bp, Homo sapiens
  misc_feature (61)..(62): /note="This region represents a CpG dinucleotide"
  misc_feature (61)..(61): /note="Nucleotide may be methylated to form 5-methylcytosine"
ttcttggtgacctggatgtgagtacagtgtggcaggaagactgtggttagttgctgggggcggtagaggccagtcactggacacgatgtgccattacatagtcctaacaaccttgtgggctt

SEQ ID NO: 6241 - DNA, 122 bp, Homo sapiens
  misc_feature (61)..(62): /note="This region represents a CpG dinucleotide"
  misc_feature (61)..(61): /note="Nucleotide may be methylated to form 5-methylcytosine"
cctcatcgccctgtcccccaccccgaggcccagcccagaggcgggcttcctcctctgccccgcggggggccgcaataattgctaatcagccaccgctaattatccggcccatggagaggtga

SEQ ID NO: 6242 - DNA, 122 bp, Homo sapiens
  misc_feature (61)..(62): /note="This region represents a CpG dinucleotide"
  misc_feature (61)..(61): /note="Nucleotide may be methylated to form 5-methylcytosine"
tgcacaaaacatttgagaagtaaatacttgtctggcagtacataaactgtaggctttcaacgtgatggtgtatagtgtatcaggaaggcaaactcaaaaagatctggattctgggggaatgg

SEQ ID NO: 6243 - DNA, 122 bp, Homo sapiens
  misc_feature (61)..(62): /note="This region represents a CpG dinucleotide"
  misc_feature (61)..(61): /note="Nucleotide may be methylated to form 5-methylcytosine"
aatatgaatcaatgctgaatcattatcaagcttcaaatcatcatcttctccaaatgtacacgtcaccctttactccctcgttccttcctaacaaatcatgactgccttcttctaccttagac

SEQ ID NO: 6244 - DNA, 122 bp, Homo sapiens
  misc_feature (61)..(62): /note="This region represents a CpG dinucleotide"
  misc_feature (61)..(61): /note="Nucleotide may be methylated to form 5-methylcytosine"
attgcgccagtgcaatccagctcaaaaaaaaaaaaattatctcaatcctcacaccattcccgaaggacataagtgatagatcttcaatccattattagaaatcctgggggccacatatgttt

SEQ ID NO: 6245 - DNA, 122 bp, Homo sapiens
  misc_feature (61)..(62): /note="This region represents a CpG dinucleotide"
  misc_feature (61)..(61): /note="Nucleotide may be methylated to form 5-methylcytosine"
tctctgcagcctctccgactccccaggctgggttgggtgctcctccctctcatcccacagcgctatgtctcatgtcttctggaaaacttgccaatccctagtgtaagtgtgactggtctatt

SEQ ID NO: 6246 - DNA, 122 bp, Homo sapiens
  misc_feature (61)..(62): /note="This region represents a CpG dinucleotide"
  misc_feature (61)..(61): /note="Nucleotide may be methylated to form 5-methylcytosine"
aatatacctcaagattatttacttagccaactagggcatttcctgaatattatctaagtacggaaatgagctagcaaagaaattccaattacttccaaagagggaaggataaaagcaaatag

SEQ ID NO: 6247 - DNA, 122 bp, Homo sapiens
  misc_feature (61)..(62): /note="This region represents a CpG dinucleotide"
  misc_feature (61)..(61): /note="Nucleotide may be methylated to form 5-methylcytosine"
ctctgaggtcgtgcagcaaattcgtggcaggtccactgactgctaggccaggggtcttgtcgctggtccacgcagaaaggaaggatggctactttctgttcctcccctgaccaccaccccat

SEQ ID NO: 6248 - DNA, 122 bp, Homo sapiens
  misc_feature (61)..(62): /note="This region represents a CpG dinucleotide"
  misc_feature (61)..(61): /note="Nucleotide may be methylated to form 5-methylcytosine"
cacgtgtggttcggcctcgccaagctgggctgcgtggtggcctttctcaacaccaacattcgctccaactccctcctgaattgcatccgcgcctgtgggcccagagccctagtggtgggcgc

SEQ ID NO: 6249 - DNA, 122 bp, Homo sapiens
  misc_feature (61)..(62): /note="This region represents a CpG dinucleotide"
  misc_feature (61)..(61): /note="Nucleotide may be methylated to form 5-methylcytosine"
gagcagggctgctgagcagctcccagggctgggcagggttcaggctctccggctggttgccgcatagcgggcagactgtgagtggggatgggctgcttactcacatcccggctgtgttcctg

SEQ ID NO: 6250 - DNA, 122 bp, Homo sapiens
  misc_feature (61)..(62): /note="This region represents a CpG dinucleotide"
  misc_feature (61)..(61): /note="Nucleotide may be methylated to form 5-methylcytosine"
cattatctttcagatggtttcctgttttccctgatttttccacatatgggccataaactgcgtaatacaaagagtaatagattgagctagaatccaggtgttcttatttctagttctaacac

SEQ ID NO: 6251 - DNA, 122 bp, Homo sapiens
  misc_feature (61)..(62): /note="This region represents a CpG dinucleotide"
  misc_feature (61)..(61): /note="Nucleotide may be methylated to form 5-methylcytosine"
ccttgtacggcacgctttatatactgtagtacctgctcctgtctacgtgcctgccctgaccgccctgcagaggctccatgggcgaggctgacagctgacacccacagggccatgtactctaa

SEQ ID NO: 6252 - DNA, 122 bp, Homo sapiens
  misc_feature (61)..(62): /note="This region represents a CpG dinucleotide"
  misc_feature (61)..(61): /note="Nucleotide may be methylated to form 5-methylcytosine"
atggcgcgatatgtctatgggttgggcactataccaagtactttccaagtactctcactccgtgctcaaaataccaccaggaaataggtattctagataaggaatctaaaactcctccaggt

SEQ ID NO: 6253 - DNA, 122 bp, Homo sapiens
  misc_feature (61)..(62): /note="This region represents a CpG dinucleotide"
  misc_feature (61)..(61): /note="Nucleotide may be methylated to form 5-methylcytosine"
ctaaacacttcttttctaatgagctgctctgtgtgaggccctggtcagggaaaacgtggtcgataaggcatcacatttttgacatggagcttctgacaaataatctcaaatttatcactgac

SEQ ID NO: 6254 - DNA, 122 bp, Homo sapiens
  misc_feature (61)..(62): /note="This region represents a CpG dinucleotide"
  misc_feature (61)..(61): /note="Nucleotide may be methylated to form 5-methylcytosine"
ttccttaactggagctacacagaaggagttgagtgatggtagatatcaggccctggtctgcggcttggaagtttcctgtgaataagaaaaacatcatcgcttcttgagtcacaaggatgata

SEQ ID NO: 6255 - DNA, 122 bp, Homo sapiens
  misc_feature (61)..(62): /note="This region represents a CpG dinucleotide"
  misc_feature (61)..(61): /note="Nucleotide may be methylated to form 5-methylcytosine"
gctcctgtgtccccatttgtatcagagtgggtgactcaagtgtccaccttcagccaagagcgtggccagggctggggcacgccacatgacctcacttgtgtgtctaccagctaaggcacctc

SEQ ID NO: 6256 - DNA, 122 bp, Homo sapiens
  misc_feature (61)..(62): /note="This region represents a CpG dinucleotide"
  misc_feature (61)..(61): /note="Nucleotide may be methylated to form 5-methylcytosine"
gggtcctttgacagcttaatactgcagagtttctggtgacttcatagttagggcagccaacgtgagaccatctgtttagtagtgggcagaaaagctcagtaccagcaggtagctgctgctga

SEQ ID NO: 6257 - DNA, 122 bp, Homo sapiens
  misc_feature (61)..(62): /note="This region represents a CpG dinucleotide"
  misc_feature (61)..(61): /note="Nucleotide may be methylated to form 5-methylcytosine"
cattttgggggctgaggcactcacggggcctccccaggtttcactccgtttctacacagtcggagccccatggatctcccatctcccggaggaaccgtgaagccaaacagaagcgcctgcga

SEQ ID NO: 6258 - DNA, 122 bp, Homo sapiens
  misc_feature (61)..(62): /note="This region represents a CpG dinucleotide"
  misc_feature (61)..(61): /note="Nucleotide may be methylated to form 5-methylcytosine"
tttgaattgctttcacaaagctatacaatctttgatgtgggtacaccctctgcctcctggcggaagcataaacaaaaagaaaggatttccctcaaattaatcccactggattcctacaaatt

SEQ ID NO: 6259 - DNA, 122 bp, Homo sapiens
  misc_feature (61)..(62): /note="This region represents a CpG dinucleotide"
  misc_feature (61)..(61): /note="Nucleotide may be methylated to form 5-methylcytosine"
taacgttccgaggtattggtaaggaccagcagtgctaacacaccacattaaatcagcaaccgtgtggtcggggagccactgactgcctcatgtcattgtgacccgtagaggagccagcagga

SEQ ID NO: 6260 - DNA, 122 bp, Homo sapiens
  misc_feature (61)..(62): /note="This region represents a CpG dinucleotide"
  misc_feature (61)..(61): /note="Nucleotide may be methylated to form 5-methylcytosine"
tgtcaccctctggtgagctgccaaaccatgcatgagttgttccatccgagcttttgtgcacgtggagagctggtgactgactgcataaggtactggatgcctggcttctccacgtaactcta

SEQ ID NO: 6261 - DNA, 122 bp, Homo sapiens
  misc_feature (61)..(62): /note="This region represents a CpG dinucleotide"
  misc_feature (61)..(61): /note="Nucleotide may be methylated to form 5-methylcytosine"
aaagaaagaaatggatctttcagccagagcgaagcttcggataactgcagccccagctgacgtgtgtgaactccaacttcatgagagatcctgagtcagaatgacctggctaagccgcttcc

SEQ ID NO: 6262 - DNA, 122 bp, Homo sapiens
  misc_feature (61)..(62): /note="This region represents a CpG dinucleotide"
  misc_feature (61)..(61): /note="Nucleotide may be methylated to form 5-methylcytosine"
ggtggctctccagcaaacaatgagcagaggagttactagagaggagaggatacttaaaaccggagacatgcaatttggagcctgacagatccagatgagccttctagatctgcacttttcta

SEQ ID NO: 6263 - DNA, 122 bp, Homo sapiens
  misc_feature (61)..(62): /note="This region represents a CpG dinucleotide"
  misc_feature (61)..(61): /note="Nucleotide may be methylated to form 5-methylcytosine"
aaaatgaggaaatgacatgcctcagccaaaccacagctctggcttgtgctcgtggatttgcggaggaggcattgcagaggggatcgaagaataactagacttagtagaaatactaccagaat

SEQ ID NO: 6264 - DNA, 122 bp, Homo sapiens
  misc_feature (61)..(62): /note="This region represents a CpG dinucleotide"
  misc_feature (61)..(61): /note="Nucleotide may be methylated to form 5-methylcytosine"
caggccactcaacccactgtgaggtcttactgtggggattaccgagtcaccaccaggctgcgctgaacaggaagtgaacaagtcaattcgagaaagatccaataagggaatattctctgggc

SEQ ID NO: 6265 - DNA, 122 bp, Homo sapiens
  misc_feature (61)..(62): /note="This region represents a CpG dinucleotide"
  misc_feature (61)..(61): /note="Nucleotide may be methylated to form 5-methylcytosine"
aaaaggcttctgaaatcaggcaatgcctttctaattcttacaccaacctctggagttgggcgacatggcttctcccctttctaggtcccatgaaagccatcttgctattactcacctttggg

SEQ ID NO: 6266 - DNA, 122 bp, Homo sapiens
  misc_feature (61)..(62): /note="This region represents a CpG dinucleotide"
  misc_feature (61)..(61): /note="Nucleotide may be methylated to form 5-methylcytosine"
tgcaatacagcacttgcataataaacagcccgggctgagccaaagcacagaaaacaccagcgccacagaaggccactgtggggcagcctctcaacctcgagttctgttaaataaaaaataaa

SEQ ID NO: 6267 - DNA, 122 bp, Homo sapiens
  misc_feature (61)..(62): /note="This region represents a CpG dinucleotide"
  misc_feature (61)..(61): /note="Nucleotide may be methylated to form 5-methylcytosine"
tgtaacgctctaacgttagagcagctaacggctctgctcagaatttctcccgacagaggccggagtgttcaagagcttggcgatacagaaatttctgctggtgttggggcgggtgcgggaac

SEQ ID NO: 6268 - DNA, 122 bp, Homo sapiens
  misc_feature (61)..(62): /note="This region represents a CpG dinucleotide"
  misc_feature (61)..(61): /note="Nucleotide may be methylated to form 5-methylcytosine"
gattctaacgacacctcagcacttgccagcacaggccctgcgtgtgagaacatctcctgccgctcccacttcctcatcgcgggtgtaacagcgctgcacgccggtgcccctcagaacaggaa

SEQ ID NO: 6269 - DNA, 122 bp, Homo sapiens
  misc_feature (61)..(62): /note="This region represents a CpG dinucleotide"
  misc_feature (61)..(61): /note="Nucleotide may be methylated to form 5-methylcytosine"
tccttagttcagtggtcctcaaagcttactattagtaaaaccacttggactgctctttaacgtgtagatttctagacactgctcagagattgtgacttagatagaatgagctagggttgagg

SEQ ID NO: 6270 - DNA, 122 bp, Homo sapiens
  misc_feature (61)..(62): /note="This region represents a CpG dinucleotide"
  misc_feature (61)..(61): /note="Nucleotide may be methylated to form 5-methylcytosine"
tgcatccgctgaaactcctcctcagacagagcttgcgccatgttcctccccccacccccccgccagctttctgcgcagacgcagctcgcgcctcctggcagtattaaggtcggaccaaacca

SEQ ID NO: 6271 - DNA, 122 bp, Homo sapiens
  misc_feature (61)..(62): /note="This region represents a CpG dinucleotide"
  misc_feature (61)..(61): /note="Nucleotide may be methylated to form 5-methylcytosine"
tctgaaagtcacagatgcgggttttcctccaaatgatccacaagccagctttaataaacacgttggtgcaggtgagaaaatgacccctcagtctccctcccctcaaagaccagggcagccag

SEQ ID NO: 6272 - DNA, 122 bp, Homo sapiens
  misc_feature (61)..(62): /note="This region represents a CpG dinucleotide"
  misc_feature (61)..(61): /note="Nucleotide may be methylated to form 5-methylcytosine"
tgttgctcatcttgctacatcacatcagttggaagagaaaatctgtcgaattatacatgtcgagttctagaattttgtgaatgtaagcacacagtctttgagatgtaagaactttatgacat

SEQ ID NO: 6273 - DNA, 122 bp, Homo sapiens
  misc_feature (61)..(62): /note="This region represents a CpG dinucleotide"
  misc_feature (61)..(61): /note="Nucleotide may be methylated to form 5-methylcytosine"
ccgtcccacccctccctgagcacgccaccccgccctctccctctctgagagcgagatacccggccagacaccctcacctgcggtgcccagctgcccaggctgaggcaagagaaggccagaaa

SEQ ID NO: 6274 - DNA, 122 bp, Homo sapiens
  misc_feature (61)..(62): /note="This region represents a CpG dinucleotide"
  misc_feature (61)..(61): /note="Nucleotide may be methylated to form 5-methylcytosine"
tctgaaaacctctagtattttggatacttagcatctgctaggccttatactcagggaaggcgatctcctcgcagagctagaggatgagtcattatgtatgagccagttgttgtggtctcatt

SEQ ID NO: 6275 - DNA, 122 bp, Homo sapiens
  misc_feature (61)..(62): /note="This region represents a CpG dinucleotide"
  misc_feature (61)..(61): /note="Nucleotide may be methylated to form 5-methylcytosine"
gcggtcttgacagcatagatgtttgcctcctcttggaactttccgatgtttttcttatagcgaatcctcttgttgccaaaccagttggagacctgtggggcagaaaggagggtcaggtagaa

SEQ ID NO: 6276 - DNA, 122 bp, Homo sapiens
  misc_feature (61)..(62): /note="This region represents a CpG dinucleotide"
  misc_feature (61)..(61): /note="Nucleotide may be methylated to form 5-methylcytosine"
tgaaagcctccaggattttgagcttcttctctgccagaagtggtaagtcctcctgagccccgacctccctttggttgacggccctttatttattctgatctactatttctttttctttctag

SEQ ID NO: 6277 - DNA, 122 bp, Homo sapiens
  misc_feature (61)..(62): /note="This region represents a CpG dinucleotide"
  misc_feature (61)..(61): /note="Nucleotide may be methylated to form 5-methylcytosine"
gagagtgactctccgatgagtcacagctgcttctttgctgattggtatggccacaaggagcgtcctcttggccctcgtggtccttaacttactcttctatgttccaccaggtaaaatggagt

SEQ ID NO: 6278 - DNA, 122 bp, Homo sapiens
  misc_feature (61)..(62): /note="This region represents a CpG dinucleotide"
  misc_feature (61)..(61): /note="Nucleotide may be methylated to form 5-methylcytosine"
tcaatatggtttgccattattgacataggattgcaaagataagtttgtaatttttttacacgagcacattcatctggacattgtatgacctttcggaagtgttgatcatagccttcaagagt

SEQ ID NO: 6279 - DNA, 122 bp, Homo sapiens
  misc_feature (61)..(62): /note="This region represents a CpG dinucleotide"
  misc_feature (61)..(61): /note="Nucleotide may be methylated to form 5-methylcytosine"
cacatggttctgttgttgccatggcaataatctgcaattgtgcagaaaatccacagaactcgtgagcaactccttagtggattgggctgaaagaaaatcaaacccgtgaaagccctgaattg

SEQ ID NO: 6280 - DNA, 122 bp, Homo sapiens
  misc_feature (61)..(62): /note="This region represents a CpG dinucleotide"
  misc_feature (61)..(61): /note="Nucleotide may be methylated to form 5-methylcytosine"
tctcccatgcctccaggcctttccatgtgatgttttcactgctgaattttctctctggagcgctggattttctctcttgagtcctgggctgtaagagttcttccaggctagcccatgtggta

SEQ ID NO: 6281 - DNA, 122 bp, Homo sapiens
  misc_feature (61)..(62): /note="This region represents a CpG dinucleotide"
  misc_feature (61)..(61): /note="Nucleotide may be methylated to form 5-methylcytosine"
aaaaagagcaaaggaggaggtgctacacacttttaaacacccagatctcatgagaactcacgatcacgagagcagcaagaggcagatgcatcctcacgatctaatcacctcccaccaggccc

SEQ ID NO: 6282 - DNA, 122 bp, Homo sapiens
  misc_feature (61)..(62): /note="This region represents a CpG dinucleotide"
  misc_feature (61)..(61): /note="Nucleotide may be methylated to form 5-methylcytosine"
ctaggacaatgacacacacataataagtgctttataaatatttgtggagtgcatgaatgacggaattataggcaattaagacaaggttgcatatagctgtgtggcatcgctatacacaaggg

SEQ ID NO: 6283 - DNA, 122 bp, Homo sapiens
  misc_feature (61)..(62): /note="This region represents a CpG dinucleotide"
  misc_feature (61)..(61): /note="Nucleotide may be methylated to form 5-methylcytosine"
tggtggctttccttctgagctttccccacctgagtcatctgcaaagggcaaggctgcaggcgggagaggccggtgtgatgtgaccgccagccacggtccccacacccctctctgagggctgt

SEQ ID NO: 6284 - DNA, 122 bp, Homo sapiens
  misc_feature (61)..(62): /note="This region represents a CpG dinucleotide"
  misc_feature (61)..(61): /note="Nucleotide may be methylated to form 5-methylcytosine"
tgtaaatctccctcttagctcttctgctattgagccttcactgctccaccttcagctctccgtctatgcaggcacactgtcacccactggtcatgtgaatgaaacctccaattacaccagga

SEQ ID NO: 6285 - DNA, 122 bp, Homo sapiens
  misc_feature (61)..(62): /note="This region represents a CpG dinucleotide"
  misc_feature (61)..(61): /note="Nucleotide may be methylated to form 5-methylcytosine"
aaccaaccccctaacttcctcttctcacccttaaatcatctttagttaattgagcatttacgatgttccggggctgtgtccagtacttttcatgtgttgaagtctcaaaacaatattgagag

SEQ ID NO: 6286 - DNA, 122 bp, Homo sapiens
  misc_feature (61)..(62): /note="This region represents a CpG dinucleotide"
  misc_feature (61)..(61): /note="Nucleotide may be methylated to form 5-methylcytosine"
ttcaaaaactcttctgctctttgtttcgccagagttgagttgagagctcagactgagttccgtctggcctctgcccctattgcagtcaccttccttgcctgtttaactttgtcaagtgcaat

SEQ ID NO: 6287 - DNA, 122 bp, Homo sapiens
  misc_feature (61)..(62): /note="This region represents a CpG dinucleotide"
  misc_feature (61)..(61): /note="Nucleotide may be methylated to form 5-methylcytosine"
tgtgtattaagtcttgtttcctatctcctttcattttttccttctcttttaaagtcagttcgtcttaagtagtttctttgttaggtaaatttaataataataaaaatctgacgtgttcagga

SEQ ID NO: 6288 - DNA, 122 bp, Homo sapiens
  misc_feature (61)..(62): /note="This region represents a CpG dinucleotide"
  misc_feature (61)..(61): /note="Nucleotide may be methylated to form 5-methylcytosine"
tattatcccaagatatcatgtaattatatacaaagaaagcttaggatttacgcatttctccgtttaagccctgaagtatgtctatatgatgacaccaatgtgagaaaaagcgagtgacagat

SEQ ID NO: 6289 - DNA, 122 bp, Homo sapiens
  misc_feature (61)..(62): /note="This region represents a CpG dinucleotide"
  misc_feature (61)..(61): /note="Nucleotide may be methylated to form 5-methylcytosine"
ttttggttgttgttgtcacaaatgaaggaggggtgctaccaaacacaccacattgcacaacgcacacacccacaacaaagaatgtcaagagtgccgaggctgagaagccctgccacaaaagc

SEQ ID NO: 6290 - DNA, 122 bp, Homo sapiens
  misc_feature (61)..(62): /note="This region represents a CpG dinucleotide"
  misc_feature (61)..(61): /note="Nucleotide may be methylated to form 5-methylcytosine"
ttgatttggctggggctcaggctggcctgtttgtgaatttcacaattcacagatgttagccgctctcgggctaagtaaaggaagagaatgtcaagttttaaatagcttctcccttccatcct

SEQ ID NO: 6291 - DNA, 122 bp, Homo sapiens
  misc_feature (61)..(62): /note="This region represents a CpG dinucleotide"
  misc_feature (61)..(61): /note="Nucleotide may be methylated to form 5-methylcytosine"
aggtaacatccacttgatcacagttagaagtatgctcctaactcacttacaggaagtaatcggttaaccgatcacaagttatcacaagcttacttcttaaaggggcctcttccttttccttt

SEQ ID NO: 6292 - DNA, 122 bp, Homo sapiens
  misc_feature (61)..(62): /note="This region represents a CpG dinucleotide"
  misc_feature (61)..(61): /note="Nucleotide may be methylated to form 5-methylcytosine"
tttgggaccttgcaacctgggttggaggaagcctctcacgtaattccgatgtgtgctaaacgtcgcgaaccactggaataatacctatatgtaggtttgtgttaacgtgccatcaattatgt

SEQ ID NO: 6293 - DNA, 122 bp, Homo sapiens
  misc_feature (61)..(62): /note="This region represents a CpG dinucleotide"
  misc_feature (61)..(61): /note="Nucleotide may be methylated to form 5-methylcytosine"
aggccaacacctggaagatttttgttccacaaaatgtaaaatgcctcatccaggcagcatcgccatcagctggaggcttgttaaaaatacacagtctcaggccccatgtagacctgctgagt

SEQ ID NO: 6294 - DNA, 122 bp, Homo sapiens
  misc_feature (61)..(62): /note="This region represents a CpG dinucleotide"
  misc_feature (61)..(61): /note="Nucleotide may be methylated to form 5-methylcytosine"
tcttgcatggtggtgctgacaggatcgctcacctccaggctctcagcagtgatcctgtgacgcaagggctggccctgcactggggttgatcttcccacttccaggcccccttttcaggcctc

SEQ ID NO: 6295 - DNA, 122 bp, Homo sapiens
  misc_feature (61)..(62): /note="This region represents a CpG dinucleotide"
  misc_feature (61)..(61): /note="Nucleotide may be methylated to form 5-methylcytosine"
tgcctctaaagctcttggttttatcagctcacccaaactgaagatgaaacactggctcctcgtgatgctgttgcaacacagatgtgtcaccaggtccccaagatgatatgttaagatggctc

SEQ ID NO: 6296 - DNA, 122 bp, Homo sapiens
  misc_feature (61)..(62): /note="This region represents a CpG dinucleotide"
  misc_feature (61)..(61): /note="Nucleotide may be methylated to form 5-methylcytosine"
tcctcttttcagttcttaaaaatacagtaacgacggattcctctaagccagcagtgaaaacgaaccttgaactgtgagctgactgtaggccgccgatgtttgcttccacatttcaaggtatc

SEQ ID NO: 6297 - DNA, 122 bp, Homo sapiens
  misc_feature (61)..(62): /note="This region represents a CpG dinucleotide"
  misc_feature (61)..(61): /note="Nucleotide may be methylated to form 5-methylcytosine"
ggacagtgttgtgcacttttaatatgttagctcatcgcattcctgtaagtacaatagggacgataatatgcatggggctgtttcatgaggattgaatagataacaagcacatgataggcatt

SEQ ID NO: 6298 - DNA, 122 bp, Homo sapiens
  misc_feature (61)..(62): /note="This region represents a CpG dinucleotide"
  misc_feature (61)..(61): /note="Nucleotide may be methylated to form 5-methylcytosine"
aatccagctgggagggaagacaacctcttgggagactcttgcttctccagggacgggagccgcagggctgcggggcacacggggctgtcactctattcccgattaagtctcacttcccaaat

SEQ ID NO: 6299 - DNA, 122 bp, Homo sapiens
  misc_feature (61)..(62): /note="This region represents a CpG dinucleotide"
  misc_feature (61)..(61): /note="Nucleotide may be methylated to form 5-methylcytosine"
ccagagtctggccttctggcagagcctcatatttctttcagactcaggagctggaggcaccgttttgtctttgctacctgtgtatctgattccgtacagatgcgaggctaggccctgagagg

SEQ ID NO: 6300 - DNA, 122 bp, Homo sapiens
  misc_feature (61)..(62): /note="This region represents a CpG dinucleotide"
  misc_feature (61)..(61): /note="Nucleotide may be methylated to form 5-methylcytosine"
tatgagtggttttgggagaggccaggctgagctcttactagctccttgcaacaaaacaagcgaatgtgaaaagtcttaaacactcagctttctggtcagaggaaatcccaaaatcagcatga

SEQ ID NO: 6301 - DNA, 122 bp, Homo sapiens
  misc_feature (61)..(62): /note="This region represents a CpG dinucleotide"
  misc_feature (61)..(61): /note="Nucleotide may be methylated to form 5-methylcytosine"
gacccgtgttggctgctttctgtaacagtcatagttcatggtcagagtcagatttcctctcgtcatgccttccttcccttccttctgctccctcccacagccgccctttgggtctgggctgg

SEQ ID NO: 6302 - DNA, 122 bp, Homo sapiens
  misc_feature (61)..(62): /note="This region represents a CpG dinucleotide"
  misc_feature (61)..(61): /note="Nucleotide may be methylated to form 5-methylcytosine"
gatgacttagtgattaatcagcatagggacaatgagcacattttctcaccttactaaatccgcaagggaagctgaggataacctggcaatgccagtttgccctagggacccccaggctctgc

SEQ ID NO: 6303 - DNA, 122 bp, Homo sapiens
  misc_feature (61)..(62): /note="This region represents a CpG dinucleotide"
  misc_feature (61)..(61): /note="Nucleotide may be methylated to form 5-methylcytosine"
tataaaattgctgtctgtctcctctacttttcttgaacctgctagatcaggaacaggaagcgaaagagcatacattgactatgcaggtaagactgcatctctatttgcataagaagagaaac

SEQ ID NO: 6304 - DNA, 122 bp, Homo sapiens
  misc_feature (61)..(62): /note="This region represents a CpG dinucleotide"
  misc_feature (61)..(61): /note="Nucleotide may be methylated to form 5-methylcytosine"
gaagcaaagagggagggggagaggaaaaggatgggagaaaaaggggaaggaggagaggagcgaaggaagattcatttgacagaaagcgcatcaccgtatttgcagaaaccttactggatggt

SEQ ID NO: 6305 - DNA, 122 bp, Homo sapiens
  misc_feature (61)..(62): /note="This region represents a CpG dinucleotide"
  misc_feature (61)..(61): /note="Nucleotide may be methylated to form 5-methylcytosine"
ctggtcctctttctggccaaaccatgtcaatcaacttgccaggagccttgtactccacagcgctgtcatttctctgcaaactccccaggtgagctcatccactcctgccactcccgcaactt

SEQ ID NO: 6306 - DNA, 122 bp, Homo sapiens
  misc_feature (61)..(62): /note="This region represents a CpG dinucleotide"
  misc_feature (61)..(61): /note="Nucleotide may be methylated to form 5-methylcytosine"
cccacctcaggcatgtcaataaaccacaggcatgaaatcttcctcatagttcttggagggcgtgtttggctggacacatccatgctccatagttaaacctttagagaactacccaaaaatcc

SEQ ID NO: 6307 - DNA, 122 bp, Homo sapiens
  misc_feature (61)..(62): /note="This region represents a CpG dinucleotide"
  misc_feature (61)..(61): /note="Nucleotide may be methylated to form 5-methylcytosine"
gctattttaagtcctgaatgtcaaaactcttctgggacattgatctcaaactgcttattccgtgaagtgaaaccaggctttctgccaccaatgtggcgtccctttttgcaattttagaaaaa

SEQ ID NO: 6308 - DNA, 122 bp, Homo sapiens
  misc_feature (61)..(62): /note="This region represents a CpG dinucleotide"
  misc_feature (61)..(61): /note="Nucleotide may be methylated to form 5-methylcytosine"
ggaggcctcccagcactatccaaagtgggaagatacccagacccaaagtgtcttctgactcgtcatcacagctatatccctggaagaggagtgtctctccccacagtgccttcgcctctcct

SEQ ID NO: 6309 - DNA, 122 bp, Homo sapiens
  misc_feature (61)..(62): /note="This region represents a CpG dinucleotide"
  misc_feature (61)..(61): /note="Nucleotide may be methylated to form 5-methylcytosine"
tgaggttgtgaagaagaatctgttccatacctctctgctagcttctggtggtgtgctggccgtctttgacattccttggcttgtaaatctctgcctttatcttccatggagctttccttgtg

SEQ ID NO: 6310 - DNA, 122 bp, Homo sapiens
  misc_feature (61)..(62): /note="This region represents a CpG dinucleotide"
  misc_feature (61)..(61): /note="Nucleotide may be methylated to form 5-methylcytosine"
caaagacccactcttcttagtcctaggagtgactcatggcaaatgctaaatgtgtctgcacgtgtgtgtttgtgcaagtgcatttgtgcacacgctaagcatttgaaacaagtcttacagat

SEQ ID NO: 6311 - DNA, 122 bp, Homo sapiens
  misc_feature (61)..(62): /note="This region represents a CpG dinucleotide"
  misc_feature (61)..(61): /note="Nucleotide may be methylated to form 5-methylcytosine"
accacatggtaggcatcttaagtggatgcagaccattgccccatggacatgtatgaaaaccgttttggtgaaagcatgtggcacgaggcctgacaaacaccatggaactctcctaatgaact

SEQ ID NO: 6312 - DNA, 122 bp, Homo sapiens
  misc_feature (61)..(62): /note="This region represents a CpG dinucleotide"
  misc_feature (61)..(61): /note="Nucleotide may be methylated to form 5-methylcytosine"
tattaagcaagaaaaattagcatcacccagaatattacaatgggtgtctaaatgaacatgcgttccactttcagcaagcctcaaccttggcttcactcccagggctgatggcacaacagggc

SEQ ID NO: 6313 - DNA, 122 bp, Homo sapiens
  misc_feature (61)..(62): /note="This region represents a CpG dinucleotide"
  misc_feature (61)..(61): /note="Nucleotide may be methylated to form 5-methylcytosine"
atgcgattgtggcaagttgctttgcttctgagcgtcaggcctcttgtctgtagaatggaccgttcctcggggctgcagggcagatgggaaacggagaaagggggctcttgtcctacgggctc

SEQ ID NO: 6314 - DNA, 122 bp, Homo sapiens
  misc_feature (61)..(62): /note="This region represents a CpG dinucleotide"
  misc_feature (61)..(61): /note="Nucleotide may be methylated to form 5-methylcytosine"
actcagataatcacattagttttgtcattaaaagatcccttttatagaaagtacctaaaccgcttaaaccacccagagaggttgcatacattatcaaacaccaagacaaacaaaagggattt

SEQ ID NO: 6315 - DNA, 122 bp, Homo sapiens
  misc_feature (61)..(62): /note="This region represents a CpG dinucleotide"
  misc_feature (61)..(61): /note="Nucleotide may be methylated to form 5-methylcytosine"
aaacaaaatattatgtatgtatatttatacactgtttgtgtataaacacacacatatacacgaaggaatattatttagccattaaaaggcatgaaggatacatgctgcagtatgaatgaacc

SEQ ID NO: 6316 - DNA, 122 bp, Homo sapiens
  misc_feature (61)..(62): /note="This region represents a CpG dinucleotide"
  misc_feature (61)..(61): /note="Nucleotide may be methylated to form 5-methylcytosine"
ctttgggaagcagcagtgggtgaatcaccaggtcaaagcctttctttaaggtgtccacgccgcccctaatcctgctcgaagcagccctgagaaacatcgcccattatctctccataccaccc

SEQ ID NO: 6317 - DNA, 122 bp, Homo sapiens
  misc_feature (61)..(62): /note="This region represents a CpG dinucleotide"
  misc_feature (61)..(61): /note="Nucleotide may be methylated to form 5-methylcytosine"
cccttgagaaatgcagggaaggaggcacccccacagtgaacgcctcttcttcgccagagacgcctgagaattcacatcagggacacttcacatcagggacaggccggggcagagaccctgac

SEQ ID NO: 6318 - DNA, 122 bp, Homo sapiens
  misc_feature (61)..(62): /note="This region represents a CpG dinucleotide"
  misc_feature (61)..(61): /note="Nucleotide may be methylated to form 5-methylcytosine"
tccagctgggactgaatgcatatccagggatgacgctgtttgtggattgattactgctgccgtggtggtttccttgactgtgtagattgctgcagctacacgtgcaggcaggaaaccaaatg

SEQ ID NO: 6319 - DNA, 122 bp, Homo sapiens
  misc_feature (61)..(62): /note="This region represents a CpG dinucleotide"
  misc_feature (61)..(61): /note="Nucleotide may be methylated to form 5-methylcytosine"
gtgtggatgggagcagggtgctttctagggaacttcatttccttcgtgttttccaaactccgtgcactaggtagtagtttatatttggttaacagtgacatcttttaatgatgttttaacca

SEQ ID NO: 6320 - DNA, 122 bp, Homo sapiens
  misc_feature (61)..(62): /note="This region represents a CpG dinucleotide"
  misc_feature (61)..(61): /note="Nucleotide may be methylated to form 5-methylcytosine"
agtatcctaaatagatcctggctgtgtgatttcaggcgctcgaggagtgccctcctggaacgtcagtttccttcctcaaagccccgagggcaggttcttaacactggctggaggtcaaatag

SEQ ID NO: 6321 - DNA, 122 bp, Homo sapiens
  misc_feature (61)..(62): /note="This region represents a CpG dinucleotide"
  misc_feature (61)..(61): /note="Nucleotide may be methylated to form 5-methylcytosine"
gttggtgttttccttagcccttcagtcatggaataaaatcatttgaatgtcactttatgccgctgtatctgaatacctggttataaataaaatctctcatttaccagatggaaagctgtttg

SEQ ID NO: 6322 - DNA, 122 bp, Homo sapiens
  misc_feature (61)..(62): /note="This region represents a CpG dinucleotide"
  misc_feature (61)..(61): /note="Nucleotide may be methylated to form 5-methylcytosine"
gctggcttgaaggaacaaagatttctttctgtccattgctggtcaggtgcagctctgatccgtgtcatcctcactctgaaaccagggtggatggagcctccttctagaacactacaagttgt

SEQ ID NO: 6323 - DNA, 122 bp, Homo sapiens
  misc_feature (61)..(62): /note="This region represents a CpG dinucleotide"
  misc_feature (61)..(61): /note="Nucleotide may be methylated to form 5-methylcytosine"
tgacctcgtgttctgcctgcctcggcctcccaaagtgttgggattacaggcgtgagccaccgcacctggcctgcacttggccattcttaagataacaactttgccattatccatcgattcct

SEQ ID NO: 6324 - DNA, 122 bp, Homo sapiens
  misc_feature (61)..(62): /note="This region represents a CpG dinucleotide"
  misc_feature (61)..(61): /note="Nucleotide may be methylated to form 5-methylcytosine"
acagtgtaccactattgaccttcactgggatttgctttcctgggatctggagaagcacagcgtgttcctgtgcatgaacatactgttatctttggcttggtctgaggctgtagaacagtcca

SEQ ID NO: 6325 - DNA, 122 bp, Homo sapiens
  misc_feature (61)..(62): /note="This region represents a CpG dinucleotide"
  misc_feature (61)..(61): /note="Nucleotide may be methylated to form 5-methylcytosine"
cgaggagagggcagtggcttctggcacggcagcagtgggcatacagaggcagtcgggacccgtctggaagagcctccgcccggggtaaggagccgggactgtgtctaggaggcagtggggag

SEQ ID NO: 6326 - DNA, 122 bp, Homo sapiens
  misc_feature (61)..(62): /note="This region represents a CpG dinucleotide"
  misc_feature (61)..(61): /note="Nucleotide may be methylated to form 5-methylcytosine"
ggtaaaatgaggatccttccccacaaacattgctattattcagctcatttcaaaggattccgctgctgccatttgtgagagccgctggaggctgagtgaaagtcattttgaaagactgatcc

SEQ ID NO: 6327 - DNA, 122 bp, Homo sapiens
  misc_feature (61)..(62): /note="This region represents a CpG dinucleotide"
  misc_feature (61)..(61): /note="Nucleotide may be methylated to form 5-methylcytosine"
catctgcccaatatccttccttatgctgattctattttgttttagcaacccacttcctcccgtcacttcatttaaaaggatgctgccatagtctaaccctactgaacactctagcattctgt

SEQ ID NO: 6328 - DNA, 122 bp, Homo sapiens
  misc_feature (61)..(62): /note="This region represents a CpG dinucleotide"
  misc_feature (61)..(61): /note="Nucleotide may be methylated to form 5-methylcytosine"
ttgtcaccacagacagccagaaggtcaagcagctggcctccaccttgcttccttctggtgcgcatatataggagcctgattagcatgtagaatcctagcagaatgggagtctttgaaatagg

SEQ ID NO: 6329 - DNA, 122 bp, Homo sapiens
  misc_feature (61)..(62): /note="This region represents a CpG dinucleotide"
  misc_feature (61)..(61): /note="Nucleotide may be methylated to form 5-methylcytosine"
gctacttcaggtcagggaccatgtcatttttttttttccctctgtatctccagggcttatcgctgaaacttagcaggcactcagtaaatattttgctaagcagttaaaactaagagaagaaa

SEQ ID NO: 6330 - DNA, 122 bp, Homo sapiens
  misc_feature (61)..(62): /note="This region represents a CpG dinucleotide"
  misc_feature (61)..(61): /note="Nucleotide may be methylated to form 5-methylcytosine"
ttcccttgatgtaagttcaaagaccataaggaacaatttagggaacactcagttgctcagcgggagtcccttgtggcttatcagtgtcactaagagcaccagatgcatttataatcccatcc

SEQ ID NO: 6331 - DNA, 122 bp, Homo sapiens
  misc_feature (61)..(62): /note="This region represents a CpG dinucleotide"
  misc_feature (61)..(61): /note="Nucleotide may be methylated to form 5-methylcytosine"
atactctatccaaacatgatctgagaacactcttgtggttttaaggttatatgggacctccgtttcacctttgctttcacttgacaaaagaaggaacaacttctctccatggttaatactac

SEQ ID NO: 6332 - DNA, 122 bp, Homo sapiens
  misc_feature (61)..(62): /note="This region represents a CpG dinucleotide"
  misc_feature (61)..(61): /note="Nucleotide may be methylated to form 5-methylcytosine"
tctttggtcacaccactctttcactactgtttacttagtgactagcggaatgtctgtcagcgctccctcaatgtttgttgagtaagtaaataactctataattattactttaagataatact

SEQ ID NO: 6333 - DNA, 122 bp, Homo sapiens
  misc_feature (61)..(62): /note="This region represents a CpG dinucleotide"
  misc_feature (61)..(61): /note="Nucleotide may be methylated to form 5-methylcytosine"
atccacaggccagtcatgcccctccactgccgctgctccagctgagcacaaggaagtggacgcaaagaatctgacgactctggtgatgacatggctttggactttttgacccgacctgtttt

SEQ ID NO: 6334 - DNA, 122 bp, Homo sapiens
  misc_feature (61)..(62): /note="This region represents a CpG dinucleotide"
  misc_feature (61)..(61): /note="Nucleotide may be methylated to form 5-methylcytosine"
ttctaacaagctcccaggtgagcctgctgcttttgttctgtggatagagagtccgggtgacgggtaaaggagaaataactggggctgctgattcacatcacaaacagctgcgggtgatggag

SEQ ID NO: 6335 - DNA, 122 bp, Homo sapiens
  misc_feature (61)..(62): /note="This region represents a CpG dinucleotide"
  misc_feature (61)..(61): /note="Nucleotide may be methylated to form 5-methylcytosine"
aaagagatcttcctgcaaattgagccctatttgtaattaatcccctaatcatgataaccccgaatctctgtttcagttcaccagatctatcatggccacagatttgatttgtataaatttgg

SEQ ID NO: 6336 - DNA, 122 bp, Homo sapiens
  misc_feature (61)..(62): /note="This region represents a CpG dinucleotide"
  misc_feature (61)..(61): /note="Nucleotide may be methylated to form 5-methylcytosine"
ctttgccatcccctgtgttcagcttggagtcaccagtggtgaaggtttccatgggaaccacgaggggttcagaattctgtgtctgaacactgcatcccagagggaagagacaagcactgaag

SEQ ID NO: 6337 - DNA, 122 bp, Homo sapiens
  misc_feature (61)..(62): /note="This region represents a CpG dinucleotide"
  misc_feature (61)..(61): /note="Nucleotide may be methylated to form 5-methylcytosine"
gcattgtaaagccatgacagacatgacatctatctgtaagggtggtgcttcaggtgactacgtagcttgtgtgtaatgttcctgtgatttagtcagattctttaagtagacgatatggttgc

SEQ ID NO: 6338 - DNA, 122 bp, Homo sapiens
  misc_feature (61)..(62): /note="This region represents a CpG dinucleotide"
  misc_feature (61)..(61): /note="Nucleotide may be methylated to form 5-methylcytosine"
cttgagatagacagggctgggctgaggctacagtcaatagggagccatctcatggagactcgggcaggaagccatgactgtggttaattcaatggtgggttccttttacatgtaagcgaaac

SEQ ID NO: 6339 - DNA, 122 bp, Homo sapiens
  misc_feature (61)..(62): /note="This region represents a CpG dinucleotide"
  misc_feature (61)..(61): /note="Nucleotide may be methylated to form 5-methylcytosine"
cttaccttttgagtcctagtcacactaaaaatccctttcattaaagtggtggcaactcctcgtcaataagggaagggaactgacatttgtgcacctgcaatatgttttgcatgtttcctcat

SEQ ID NO: 6340 - DNA, 122 bp, Homo sapiens
  misc_feature (61)..(62): /note="This region represents a CpG dinucleotide"
  misc_feature (61)..(61): /note="Nucleotide may be methylated to form 5-methylcytosine"
aaggaacgcagtcttctgattggtgtgcgtccgctcgccgtgtccatggtaaccagctagcgccctgacccggcccggacctcagctgcggggagactaccggaagctaaggagaacagccc

SEQ ID NO: 6341 - DNA, 122 bp, Homo sapiens
  misc_feature (61)..(62): /note="This region represents a CpG dinucleotide"
  misc_feature (61)..(61): /note="Nucleotide may be methylated to form 5-methylcytosine"
aaggccaaaatctttggagaggccattaatgtgtgtggttttttttttttttcttttttgcggctcgttaaattcctctgaggaagcaaacagaaacagctaaaaggagaagcttaaatgtc

SEQ ID NO: 6342 - DNA, 122 bp, Homo sapiens
  misc_feature (61)..(62): /note="This region represents a CpG dinucleotide"
  misc_feature (61)..(61): /note="Nucleotide may be methylated to form 5-methylcytosine"
agcagattccaattcaaccaaaggaggaactaactgtgggaactgtctggagctggacagcggggagaacgtgcctgtcactggagtacacaggtaattagtcaaactgggacttgacatgg

SEQ ID NO: 6343 - DNA, 122 bp, Homo sapiens
  misc_feature (61)..(62): /note="This region represents a CpG dinucleotide"
  misc_feature (61)..(61): /note="Nucleotide may be methylated to form 5-methylcytosine"
ctttgagtctatgtaatatgatcagtaccttcactttcgttttctcttgtaattatgaaacgagtgtgacaattctgcccatgacacctcagagtctgttaccaaagtcactgaaaacatca

SEQ ID NO: 6344 - DNA, 122 bp, Homo sapiens
  misc_feature (61)..(62): /note="This region represents a CpG dinucleotide"
  misc_feature (61)..(61): /note="Nucleotide may be methylated to form 5-methylcytosine"
aaaagaacatagctaagagagtcatcagaactgaattctgactctggttagttatgtggccgtggcccagtatgtgattgcatattgatgttgaatgagacacaaatttaaccctcaaggag

SEQ ID NO: 6345 - DNA, 122 bp, Homo sapiens
  misc_feature (61)..(62): /note="This region represents a CpG dinucleotide"
  misc_feature (61)..(61): /note="Nucleotide may be methylated to form 5-methylcytosine"
ccataaatccaacctaagaggaaaatgtgcagtaaaaatgaattgcttgatcttgatgcacgtcagtcatggaagtaaaaaactgtgatacctgcctgatttgtcaagaaaaattaaataac

SEQ ID NO: 6346 - DNA, 122 bp, Homo sapiens
  misc_feature (61)..(62): /note="This region represents a CpG dinucleotide"
  misc_feature (61)..(61): /note="Nucleotide may be methylated to form 5-methylcytosine"
cagaaaaaaggtcaagtcagttgttgcttaactgcagcctggctgatgtgttcttttgaccggaaagataggggttggggtgtgatgtggtgggacctggtccagacaggataaagtgccgg

SEQ ID NO: 6347 - DNA, 122 bp, Homo sapiens
  misc_feature (61)..(62): /note="This region represents a CpG dinucleotide"
  misc_feature (61)..(61): /note="Nucleotide may be methylated to form 5-methylcytosine"
aaaaaaaagtagtgaaaatgtatggtttattaatgtaatcagcttgttattattagcatgcgtacttaatagccacaaaataaagcttaccagagatggtgtatttcggtccttgtgaaata

SEQ ID NO: 6348 - DNA, 122 bp, Homo sapiens
  misc_feature (61)..(62): /note="This region represents a CpG dinucleotide"
  misc_feature (61)..(61): /note="Nucleotide may be methylated to form 5-methylcytosine"
taatataaatgaactcaagaactgcaagagctcttggcacactgagtttatgggctgcaccgcatgtccatcacatactcgtatttttttcatagttgagccaatggtatgacaaccatggg

SEQ ID NO: 6349 - DNA, 122 bp, Homo sapiens
  misc_feature (61)..(62): /note="This region represents a CpG dinucleotide"
  misc_feature (61)..(61): /note="Nucleotide may be methylated to form 5-methylcytosine"
gacaggtgtgagtcaccatgcccagacacattcatattttagtttctaaagatcagtgaacgtttcaaatatcaagatcccttttaagtcaaataatatcctcaacaatcacatgataataa

SEQ ID NO: 6350 - DNA, 122 bp, Homo sapiens
  misc_feature (61)..(62): /note="This region represents a CpG dinucleotide"
  misc_feature (61)..(61): /note="Nucleotide may be methylated to form 5-methylcytosine"
taacacctaaatttccgttgttttaagacactcagtttatgttaatttgttacaccagcccgaggacacaaatactctagggtacaaaggtctgacttcctagcttaatttgagataagcta

SEQ ID NO: 6351 - DNA, 122 bp, Homo sapiens
  misc_feature (61)..(62): /note="This region represents a CpG dinucleotide"
  misc_feature (61)..(61): /note="Nucleotide may be methylated to form 5-methylcytosine"
ccctcctaggaggtggtgaacccacaggcgtggctcaccatagggagccctcggccaatgcgggttcctctcccgtggtccaccggccagcctgtccctgcttactcactgaacaagcactc

SEQ ID NO: 6352 - DNA, 122 bp, Homo sapiens
  misc_feature (61)..(62): /note="This region represents a CpG dinucleotide"
  misc_feature (61)..(61): /note="Nucleotide may be methylated to form 5-methylcytosine"
agcagctgtctatatgctggtaaaactgcatatatatatatatataatcaactgaataaacgagattttgatacaaaatttgtgctgtcaagaaaggcaaacaggactgccagtttcctgca

SEQ ID NO: 6353 - DNA, 122 bp, Homo sapiens
  misc_feature (61)..(62): /note="This region represents a CpG dinucleotide"
  misc_feature (61)..(61): /note="Nucleotide may be methylated to form 5-methylcytosine"
tggccaccagctactgcgggaggctctgggaggccagcggaaggcgcagcgcgcggtggacggtgctcgggcgtagagggggagagcggccggtagagggggagagcagaccagcccggccg

SEQ ID NO: 6354 - DNA, 122 bp, Homo sapiens
  misc_feature (61)..(62): /note="This region represents a CpG dinucleotide"
  misc_feature (61)..(61): /note="Nucleotide may be methylated to form 5-methylcytosine"
tctgttcaaaaggtccatcacaaaagtttctggttcctggtttgccacaagggaccctggcgtcctgtcctcctgaagcattcatgaatggcagttttccctgtgagccttccagcttggct

SEQ ID NO: 6355 - DNA, 122 bp, Homo sapiens
  misc_feature (61)..(62): /note="This region represents a CpG dinucleotide"
  misc_feature (61)..(61): /note="Nucleotide may be methylated to form 5-methylcytosine"
caatgggaatggaagagagagctgaaaagggacaagtgcaggaattagcaaatggtacttcggtgaatggacctcagtgcatttaaaatagcaattgatctgctcttgactcataccctaag

SEQ ID NO: 6356 - DNA, 122 bp, Homo sapiens
  misc_feature (61)..(62): /note="This region represents a CpG dinucleotide"
  misc_feature (61)..(61): /note="Nucleotide may be methylated to form 5-methylcytosine"
atatgtattgcatatgatactaacccatgtgtaatcaatttttcatatttttacagtctacgtaaatatagtttgtattggctgcttattatttccttcaatgagtttatcatagtaatcct

SEQ ID NO: 6357 - DNA, 122 bp, Homo sapiens
  misc_feature (61)..(62): /note="This region represents a CpG dinucleotide"
  misc_feature (61)..(61): /note="Nucleotide may be methylated to form 5-methylcytosine"
catgccagctccgggggctcatttgctggggaagaatgtcagtgatcataactgctgcaccgctttcttgaagactttataggctccctctcgtgggaccctccgcataaggccagaaggcg

SEQ ID NO: 6358 - DNA, 122 bp, Homo sapiens
  misc_feature (61)..(62): /note="This region represents a CpG dinucleotide"
  misc_feature (61)..(61): /note="Nucleotide may be methylated to form 5-methylcytosine"
caggacagttcatttggttgtgttcagtcagcggtaaaacacattccatatttttcctcccgatctgggaaagctgtgatgtctcctcctgtagcagaaaggaaacaaaagaaatcaattat

SEQ ID NO: 6359 - DNA, 122 bp, Homo sapiens
  misc_feature (61)..(62): /note="This region represents a CpG dinucleotide"
  misc_feature (61)..(61): /note="Nucleotide may be methylated to form 5-methylcytosine"
ctttaagtcctccaagcctcagtttcttcctctgtgaaatgggcataatgacatctgtgacgtgaagaatcaaggagatgaagtatggacagcgtttagcccagagtcctgcgcctagtaaa

SEQ ID NO: 6360 - DNA, 122 bp, Homo sapiens
  misc_feature (61)..(62): /note="This region represents a CpG dinucleotide"
  misc_feature (61)..(61): /note="Nucleotide may be methylated to form 5-methylcytosine"
tgaattggctgcctttatctacattctgaaccaaaatttaattctagagtttgtagtcagcgtttttccaaatgtgtaaaactgtaatccttcataaaatgtcatatgtaaaagagtaagca

SEQ ID NO: 6361 - DNA, 122 bp, Homo sapiens
  misc_feature (61)..(62): /note="This region represents a CpG dinucleotide"
  misc_feature (61)..(61): /note="Nucleotide may be methylated to form 5-methylcytosine"
ggggagggagaagcctgaggtggaccccaaggcatctactcattagtgcaggcctccatacgacacatgtacccatgaactaggctgagggaaaaccaaccaaccagccgaccaaccagcca

SEQ ID NO: 6362 - DNA, 122 bp, Homo sapiens
  misc_feature (61)..(62): /note="This region represents a CpG dinucleotide"
  misc_feature (61)..(61): /note="Nucleotide may be methylated to form 5-methylcytosine"
agctcattatgaaaactgcttagcagactgactgtaaatagacagcattcaggaaagttgcggttattttcatgccatatccaatgtgctagagatgagttctgggtgcttgcataatggtt

SEQ ID NO: 6363 - DNA, 122 bp, Homo sapiens
  misc_feature (61)..(62): /note="This region represents a CpG dinucleotide"
  misc_feature (61)..(61): /note="Nucleotide may be methylated to form 5-methylcytosine"
ctgaggaagcagtctgggaactgaagccgctgtgtatccgctctctggagacctgaggggcggccccgacgccctccagggctgagtacctacactcacacacacggcggcatttcctcacg

SEQ ID NO: 6364 - DNA, 122 bp, Homo sapiens
  misc_feature (61)..(62): /note="This region represents a CpG dinucleotide"
  misc_feature (61)..(61): /note="Nucleotide may be methylated to form 5-methylcytosine"
tttctgtgatgttcttcttatggagccaacacacagtcagccatcacttccactgttgcacgtgcacaagaaaagctggaattaaatgtgagctgagttaacttaaagaacagtcatttgat

SEQ ID NO: 6365 - DNA, 122 bp, Homo sapiens
  misc_feature (61)..(62): /note="This region represents a CpG dinucleotide"
  misc_feature (61)..(61): /note="Nucleotide may be methylated to form 5-methylcytosine"
gggtttgtttgtttttaaacctgaagaattgggataatctgtttcctcacagaatcattacgcagatgcaatacagttaatgaaggtaacatggcacataggaagagcacaatacacgtcag

SEQ ID NO: 6366 - DNA, 122 bp, Homo sapiens
  misc_feature (61)..(62): /note="This region represents a CpG dinucleotide"
  misc_feature (61)..(61): /note="Nucleotide may be methylated to form 5-methylcytosine"
ctttacgtatctcgagttgctggcgctgcacacagcccttgtgatgacaatacaatcatccgcattttacaggtgaagaaactaattcattgaaatttcctccccaaggccctagagctgag

SEQ ID NO: 6367 - DNA, 122 bp, Homo sapiens
  misc_feature (61)..(62): /note="This region represents a CpG dinucleotide"
  misc_feature (61)..(61): /note="Nucleotide may be methylated to form 5-methylcytosine"
ttaaattaagtacatatcacatttcacatacaacacatgccagaatttccttgtggcaagcgaattcactgaagacctgcagtgcatcacatcacaatgtggaaaacacagatgtgactttc

SEQ ID NO: 6368 - DNA, 122 bp, Homo sapiens
  misc_feature (61)..(62): /note="This region represents a CpG dinucleotide"
  misc_feature (61)..(61): /note="Nucleotide may be methylated to form 5-methylcytosine"
cactcacagatttagcaaaaacaagcaaacaaataaaaaacaaaacaaaagcaaatcttgcggtacacagattttctaataaagattgtgttgaagtgagtcaggcacaataggtgccctca

SEQ ID NO: 6369 - DNA, 122 bp, Homo sapiens
  misc_feature (61)..(62): /note="This region represents a CpG dinucleotide"
  misc_feature (61)..(61): /note="Nucleotide may be methylated to form 5-methylcytosine"
gagaagcactgggttgaggagggtgctgggtgaggctggggcttctctggctgcaaatgacgtgagcactgtcatgtcaggagacctgagacagcagcaaactgtgagaggggctgggctca

SEQ ID NO: 6370 - DNA, 122 bp, Homo sapiens
  misc_feature (61)..(62): /note="This region represents a CpG dinucleotide"
  misc_feature (61)..(61): /note="Nucleotide may be methylated to form 5-methylcytosine"
ttatttctatgtgggaatacctcattgtgagcaaacctgacatacagcagtaggactgaccgtcactagaaagctttgacacaacacttttttttattatagcacactgccaaaatgtgttt

SEQ ID NO: 6371 - DNA, 122 bp, Homo sapiens
  misc_feature (61)..(62): /note="This region represents a CpG dinucleotide"
  misc_feature (61)..(61): /note="Nucleotide may be methylated to form 5-methylcytosine"
ggtctcagcttggagctagtgtcctctgactgctgccacattccagtggccaaggcaagtcgcaggaccaagcccgacatcagtggagtggggaaatacgcgcctctcaagctcctccccat

SEQ ID NO: 6372 - DNA, 122 bp, Homo sapiens
  misc_feature (61)..(62): /note="This region represents a CpG dinucleotide"
  misc_feature (61)..(61): /note="Nucleotide may be methylated to form 5-methylcytosine"
gccttgcggtcgaagcgggcggccagctgctccagcttctcctggcggatgagctcggtgcgcagggccagctcacgctcgtgctccgccttctccagccgctcccaagcctatggggtggg

SEQ ID NO: 6373 - DNA, 122 bp, Homo sapiens
  misc_feature (61)..(62): /note="This region represents a CpG dinucleotide"
  misc_feature (61)..(61): /note="Nucleotide may be methylated to form 5-methylcytosine"
cccagcccagcaactccatggtaatatctctacccactactgactagtgacctgtttcaccggcccagcaagaagatgacccagagccttagccaaagacaggcaccctccagcttccttct

SEQ ID NO: 6374 - DNA, 122 bp, Homo sapiens
  misc_feature (61)..(62): /note="This region represents a CpG dinucleotide"
  misc_feature (61)..(61): /note="Nucleotide may be methylated to form 5-methylcytosine"
aagcacaaggctcggcaacacgagacacaggccccagcacacatagccccgaggccgcaacgaggccacccaacacctgccctcagacatacttctggtctgtggccttgtcctttcctcct

SEQ ID NO: 6375 - DNA, 122 bp, Homo sapiens
  misc_feature (61)..(62): /note="This region represents a CpG dinucleotide"
  misc_feature (61)..(61): /note="Nucleotide may be methylated to form 5-methylcytosine"
cataattttgtcgttccttgctaccacatgattgtgacatcaaaacagtctaacagttaacgctggtaacaggatcgttccaagaacccaagctctggagacgagcataaaggcacaaaaca

SEQ ID NO: 6376 - DNA, 122 bp, Homo sapiens
  misc_feature (61)..(62): /note="This region represents a CpG dinucleotide"
  misc_feature (61)..(61): /note="Nucleotide may be methylated to form 5-methylcytosine"
cagtgctcagtgcgatgggaaactcgggctgggtctctgtggccaatgactcctgagcctcgccggcacgttttattcccggctgtccttccagtccggaagcctgaagtggacaccgagga

SEQ ID NO: 6377 - DNA, 122 bp, Homo sapiens
  misc_feature (61)..(62): /note="This region represents a CpG dinucleotide"
  misc_feature (61)..(61): /note="Nucleotide may be methylated to form 5-methylcytosine"
cagagaaccccaacagcaagagagccccaggtgatgctggctctccacgtgcatccggcacgtttcactgcagccatcatcaacttggcaaagtaggcaagctcagcttgtggtttccattt

SEQ ID NO: 6378 - DNA, 122 bp, Homo sapiens
  misc_feature (61)..(62): /note="This region represents a CpG dinucleotide"
  misc_feature (61)..(61): /note="Nucleotide may be methylated to form 5-methylcytosine"
atagaggctgtgaagattaaagaggggaggggcaggatgacaaaggttctcaaaaaacagcgtcccatctggaggcctgtgtcactggagcacttgtattaatagaaacttggccatctctg

SEQ ID NO: 6379 - DNA, 122 bp, Homo sapiens
  misc_feature (61)..(62): /note="This region represents a CpG dinucleotide"
  misc_feature (61)..(61): /note="Nucleotide may be methylated to form 5-methylcytosine"
gtacttacctaatacacctcacatgacgtggttacgtaatgtgtgggggttgtacacctgcgctccaaatgtgctaagtcatgctgtgctggaagtcccagcctactcttgactaaagcaca

SEQ ID NO: 6380 - DNA, 122 bp, Homo sapiens
  misc_feature (61)..(62): /note="This region represents a CpG dinucleotide"
  misc_feature (61)..(61): /note="Nucleotide may be methylated to form 5-methylcytosine"
caaaagctagacctagtgaggtctagcccagggcatacaaagcacgcccacacattcaaacgcccttcagtccagtcacaggcccatgctctgggaagagctctcaggatagtaacggctct

SEQ ID NO: 6381 - DNA, 122 bp, Homo sapiens
  misc_feature (61)..(62): /note="This region represents a CpG dinucleotide"
  misc_feature (61)..(61): /note="Nucleotide may be methylated to form 5-methylcytosine"
gctttctgcagccacacacacacaaaaagtgacacaaaagtattaggtcatacagtagcacgtaagttcagagtgcctcctagtggagtctagtgttgatcaagtaacattggaataatttt

SEQ ID NO: 6382 - DNA, 122 bp, Homo sapiens
  misc_feature (61)..(62): /note="This region represents a CpG dinucleotide"
  misc_feature (61)..(61): /note="Nucleotide may be methylated to form 5-methylcytosine"
tgtgggttagtggggagcggtgcagccatgctgatcgggagtctgcactggcacagctggcggcctgcacagcaccctcatcggaaagtgatccatcacccgacagtcgtgttgccatccag

SEQ ID NO: 6383 - DNA, 122 bp, Homo sapiens
  misc_feature (61)..(62): /note="This region represents a CpG dinucleotide"
  misc_feature (61)..(61): /note="Nucleotide may be methylated to form 5-methylcytosine"
aggtcaccagggcctcaacaagagctgtgtcatcagggctgggatactagcaggggcaaacgaggcactggcttcaggacaacatgtgagggggtgctcaaaaagtcagtcatcaagataga

SEQ ID NO: 6384 - DNA, 122 bp, Homo sapiens
  misc_feature (61)..(62): /note="This region represents a CpG dinucleotide"
  misc_feature (61)..(61): /note="Nucleotide may be methylated to form 5-methylcytosine"
attaccagaacatttactaactacctcatctttccctacactggtaatgtctgtaaaggccgcttacataccaagaaggaataagagctgacaatagtgagctcttactgaatgtcaggcat

SEQ ID NO: 6385 - DNA, 122 bp, Homo sapiens
  misc_feature (61)..(62): /note="This region represents a CpG dinucleotide"
  misc_feature (61)..(61): /note="Nucleotide may be methylated to form 5-methylcytosine"
tgcaatgggccctgcaaattatgtagacaatcctgcctctggccctgtgggcagggcctgcgtctccttcccaggatagctgagtgaaggattagatactaagccttcatgatgggttttgg

SEQ ID NO: 6386 - DNA, 122 bp, Homo sapiens
  misc_feature (61)..(62): /note="This region represents a CpG dinucleotide"
  misc_feature (61)..(61): /note="Nucleotide may be methylated to form 5-methylcytosine"
ggcctccacccaacatccagtatgcaactgaggcctcttgccaacagctgtgtgagtgaacgtggaaactgatgctccggtcccagacaggccttcggaagacggcagctgccacctcatgg

SEQ ID NO: 6387 - DNA, 122 bp, Homo sapiens
  misc_feature (61)..(62): /note="This region represents a CpG dinucleotide"
  misc_feature (61)..(61): /note="Nucleotide may be methylated to form 5-methylcytosine"
gacttttcaaagggattatacctaaatccaataaagcctctggctccagctgccaatttgcggtaatacagccaatagagaaatgtgttaaactgtatcaagagcaaaatccagactgtgag

SEQ ID NO: 6388 - DNA, 122 bp, Homo sapiens
  misc_feature (61)..(62): /note="This region represents a CpG dinucleotide"
  misc_feature (61)..(61): /note="Nucleotide may be methylated to form 5-methylcytosine"
atgcctggtgtcctgccaccaatggctccaggaaccccaagttctctcccacaccctgggcgtgattaaaactagtaacacctttctgttagaaaccacagcgggtgaggacacagctgttt

SEQ ID NO: 6389 - DNA, 122 bp, Homo sapiens
  misc_feature (61)..(62): /note="This region represents a CpG dinucleotide"
  misc_feature (61)..(61): /note="Nucleotide may be methylated to form 5-methylcytosine"
aacgacacggagggggacgtgccaagtgcgaacccacaggggcagagctttttagggatccgctctacctatttacatcataaattaggtttgtgctagccacgtaggaattaatccaggga

SEQ ID NO: 6390 - DNA, 122 bp, Homo sapiens
  misc_feature (61)..(62): /note="This region represents a CpG dinucleotide"
  misc_feature (61)..(61): /note="Nucleotide may be methylated to form 5-methylcytosine"
tgacccccactgagcgtgtccctcaaagtggaccttcctaagcatcggcgctttgctttgcgctgggtggtgcggctgagtcactaattagcagtgagagcctgggctgtatctcctaccaa

SEQ ID NO: 6391 - DNA, 122 bp, Homo sapiens
  misc_feature (61)..(62): /note="This region represents a CpG dinucleotide"
  misc_feature (61)..(61): /note="Nucleotide may be methylated to form 5-methylcytosine"
tgcaaagaaagagggtcccgaaacgtgagtactcagcaggtgacagacacttggctaagccgttgctcctggagtcctcaaagcaactgcaaagtattgtccccatttaaaggatgggaaaa

SEQ ID NO: 6392 - DNA, 122 bp, Homo sapiens
  misc_feature (61)..(62): /note="This region represents a CpG dinucleotide"
  misc_feature (61)..(61): /note="Nucleotide may be methylated to form 5-methylcytosine"
aattgcattagagtgattcatatatcgctttcgaaatgccaacggacacacagtgactcacgttccctgctttcatcctcatatttccttatggaaatactgaggtcctgcatgtgccattt

SEQ ID NO: 6393 - DNA, 122 bp, Homo sapiens
  misc_feature (61)..(62): /note="This region represents a CpG dinucleotide"
  misc_feature (61)..(61): /note="Nucleotide may be methylated to form 5-methylcytosine"
tatactggttcggagagttccccttctgcccatgactaggaagctggagagagtgctgcccgaacctaacaatacgaaaaggcctgtctcatcagacagctgaagcgtcagggccatggagt

SEQ ID NO: 6394 - DNA, 122 bp, Homo sapiens
  misc_feature (61)..(62): /note="This region represents a CpG dinucleotide"
  misc_feature (61)..(61): /note="Nucleotide may be methylated to form 5-methylcytosine"
cagcctctgggcctgggctcactagtggtagccagctgacctgagcatcagagtaagatgcgtgcctgaaaaattcccctggtggggccggtcatgaaaagtgccgttctcctcattcatgt

SEQ ID NO: 6395 - DNA, 122 bp, Homo sapiens
  misc_feature (61)..(62): /note="This region represents a CpG dinucleotide"
  misc_feature (61)..(61): /note="Nucleotide may be methylated to form 5-methylcytosine"
gatgggaaacaaaataatcagaaaaacataattatccctagccataccatacttgctagacgctagaaagtatacatatatgtaatctctgtatacatagagaaagcaaaaagcatgtgcac

SEQ ID NO: 6396 - DNA, 122 bp, Homo sapiens
  misc_feature (61)..(62): /note="This region represents a CpG dinucleotide"
  misc_feature (61)..(61): /note="Nucleotide may be methylated to form 5-methylcytosine"
aaattttaagtcagaaattcaaagtaagtttgcacaatggcacatcaaaacagagataaacgtcagatgtgaaggaaatcagcagccaggcctccttgtttcccctcaaattttgtgttatg

SEQ ID NO: 6397 - DNA, 122 bp, Homo sapiens
  misc_feature (61)..(62): /note="This region represents a CpG dinucleotide"
  misc_feature (61)..(61): /note="Nucleotide may be methylated to form 5-methylcytosine"
ttgaagtgattggaaccagggcaagtttagatcttgacctgaaatgccagaaaaggagatcgtgactcctgaaggaaaagtgctgcagaaatctgaacaaaaatgtcagggcctgaatacta

SEQ ID NO: 6398 - DNA, 122 bp, Homo sapiens
  misc_feature (61)..(62): /note="This region represents a CpG dinucleotide"
  misc_feature (61)..(61): /note="Nucleotide may be methylated to form 5-methylcytosine"
tctctatggtagttgaaattatacctcctggtgtagattttcctgcctttctgcctttcgcgttctgtttccacgactctcaagtttgtcctctagcccttgttttgcatttttaatttctg

SEQ ID NO: 6399 - DNA, 122 bp, Homo sapiens
  misc_feature (61)..(62): /note="This region represents a CpG dinucleotide"
  misc_feature (61)..(61): /note="Nucleotide may be methylated to form 5-methylcytosine"
ttcaaactataggagataagtaatatctttgtaatgtgaagaaagccattttcattatcacggggccttgacaagtagcttcccacacagcttgtcaagtcaaatgctactaatactgccag

SEQ ID NO: 6400 - DNA, 122 bp, Homo sapiens
  misc_feature (61)..(62): /note="This region represents a CpG dinucleotide"
  misc_feature (61)..(61): /note="Nucleotide may be methylated to form 5-methylcytosine"
gtcagctcagcgggctcccaagtgtgattacactaccacttcatagaattcaattaaacccgggacggggcatcggcgaatcactggaggagtatgaagttgagatgttttctgctttctcg

SEQ ID NO: 6401 - DNA, 122 bp, Homo sapiens
  misc_feature (61)..(62): /note="This region represents a CpG dinucleotide"
  misc_feature (61)..(61): /note="Nucleotide may be methylated to form 5-methylcytosine"
agctcttctttctgctattgtggaattacagcaggattctgtggtttatcatatcattgtcgtgatcatcatcataaatcatcatcccaagcaaatatttttgagcccctactctgtgcctc

SEQ ID NO: 6402 - DNA, 122 bp, Homo sapiens
  misc_feature (61)..(62): /note="This region represents a CpG dinucleotide"
  misc_feature (61)..(61): /note="Nucleotide may be methylated to form 5-methylcytosine"
ctctgcggctggagaatccagttctaagctggttcacttatgcagctggcaagtggtagtcgctctaggcaggaaatctcacttcctcaatatgtaaacctcttcacaggtttattggagtg

SEQ ID NO: 6403 - DNA, 122 bp, Homo sapiens
  misc_feature (61)..(62): /note="This region represents a CpG dinucleotide"
  misc_feature (61)..(61): /note="Nucleotide may be methylated to form 5-methylcytosine"
tttcctggctctgggtccttctccctttttcttatagacacacctctctatagggtgtgtcgtgttggcattggtaacagggcagagcttcagcactcagaagctgcctgagaaatggggag

SEQ ID NO: 6404 - DNA, 122 bp, Homo sapiens
  misc_feature (61)..(62): /note="This region represents a CpG dinucleotide"
  misc_feature (61)..(61): /note="Nucleotide may be methylated to form 5-methylcytosine"
ctgggaggacagacagagactgggatcttgctgctttcaaagtgtttggtcacaaatacacgttcaaatatgtgttctgcagtttatttaaagaggataaaggagggaaacaaaaaagacaa

SEQ ID NO: 6405 - DNA, 122 bp, Homo sapiens
  misc_feature (61)..(62): /note="This region represents a CpG dinucleotide"
  misc_feature (61)..(61): /note="Nucleotide may be methylated to form 5-methylcytosine"
gcccaagacaccccaatctggatcttgcaaacccaacatttcaggctgggtgggtgtctgcgtgtgtgcaaacgtgcacacatgggccctacctccatttacactggaaggactcctcctta

SEQ ID NO: 6406 - DNA, 122 bp, Homo sapiens
  misc_feature (61)..(62): /note="This region represents a CpG dinucleotide"
  misc_feature (61)..(61): /note="Nucleotide may be methylated to form 5-methylcytosine"
agtgtttggccagcaaacttggtgagtaaatggactagaactaatcctgtagctaaacagcgagggctttagaaaaggaaacacctcacttgcctaatagctcccagggaggggtgagatat

SEQ ID NO: 6407 - DNA, 122 bp, Homo sapiens
  misc_feature (61)..(62): /note="This region represents a CpG dinucleotide"
  misc_feature (61)..(61): /note="Nucleotide may be methylated to form 5-methylcytosine"
ggctaacaaaagcccccagtgaacaaagtccccagtgaaatgcggtgcaaatctctatgtcgctactgatgcagctgtagggtgggggactggaggtttgctcggcatcctcccatttttga

SEQ ID NO: 6408 - DNA, 122 bp, Homo sapiens
  misc_feature (61)..(62): /note="This region represents a CpG dinucleotide"
  misc_feature (61)..(61): /note="Nucleotide may be methylated to form 5-methylcytosine"
atattgggatgcaaattgttttatatgccatgctactcaggcgtgattgttgctttttagcgacagcaagttgaagtattgagctcatttgatatgtgttctgccagtcttcatgttatcac

SEQ ID NO: 6409 - DNA, 122 bp, Homo sapiens
  misc_feature (61)..(62): /note="This region represents a CpG dinucleotide"
  misc_feature (61)..(61): /note="Nucleotide may be methylated to form 5-methylcytosine"
aaaaatgtataagatagcacatctgtaatgattctccagctgctcagtggctgggggttacgtaagtctctgttacctttctcatttccttttgttcctcttgagcattcatttgtctcctc

SEQ ID NO: 6410 - DNA, 122 bp, Homo sapiens
  misc_feature (61)..(62): /note="This region represents a CpG dinucleotide"
  misc_feature (61)..(61): /note="Nucleotide may be methylated to form 5-methylcytosine"
caagcctaaagaagattggcagcttctgcttctttcctcttggaacatactaccttagaacgaactaccagcttttgaggaagtccaagcagccacataaagaggcccacatgaaagagaat

SEQ ID NO: 6411 - DNA, 122 bp, Homo sapiens
  misc_feature (61)..(62): /note="This region represents a CpG dinucleotide"
  misc_feature (61)..(61): /note="Nucleotide may be methylated to form 5-methylcytosine"
taacataacactgtttaaggtatcagcactctgatttccttcaggtaaactattacttcccgaatttcagtacatgtggttttggtgtcacttttcctcaatctattatttcagtagtgcat

SEQ ID NO: 6412 - DNA, 122 bp, Homo sapiens
  misc_feature (61)..(62): /note="This region represents a CpG dinucleotide"
  misc_feature (61)..(61): /note="Nucleotide may be methylated to form 5-methylcytosine"
tataaagacatcagctcctgggctgcccctctattccagagtgttgatgaatgtgtggctcgcccacactgcctgattcataagcacattagtgctgactcaccgacaactgagagaaaaaa

SEQ ID NO: 6413 - DNA, 122 bp, Homo sapiens
  misc_feature (61)..(62): /note="This region represents a CpG dinucleotide"
  misc_feature (61)..(61): /note="Nucleotide may be methylated to form 5-methylcytosine"
cgcgcctggtggaggggctggcccaggtgccgcagggccactgcgaggagcacctggacccgctgagcatctactgcgagcaggaccgcgcgctggtgtgcggagtgtgcgcctcactcggc

SEQ ID NO: 6414 - DNA, 122 bp, Homo sapiens
  misc_feature (61)..(62): /note="This region represents a CpG dinucleotide"
  misc_feature (61)..(61): /note="Nucleotide may be methylated to form 5-methylcytosine"
gctatgaccttatttttctgtcctgtgctttagcttcctttccgaaataaacacctcccacgattgttctaagggtcaagtgagttaatgagtaaacaatggcttaaacttcctcttgcaaa

SEQ ID NO: 6415 - DNA, 122 bp, Homo sapiens
  misc_feature (61)..(62): /note="This region represents a CpG dinucleotide"
  misc_feature (61)..(61): /note="Nucleotide may be methylated to form 5-methylcytosine"
ttcctcatttttagcttatctcagggttgtaaagatttttgtttttcctctccaatggtgcgactttatatgcttagtcataatggtggttgggcaaggagtcagttttgttgtctccatag

SEQ ID NO: 6416 - DNA, 122 bp, Homo sapiens
  misc_feature (61)..(62): /note="This region represents a CpG dinucleotide"
  misc_feature (61)..(61): /note="Nucleotide may be methylated to form 5-methylcytosine"
ttaacggcaattaagagggatagaaaatgtattccagctgataaaaaggaattccctgtgcgaaagggaaaggcagaaagcagctggaaaaaaaaaatagcaggcagttgtcttaataacgt

SEQ ID NO: 6417 - DNA, 122 bp, Homo sapiens
  misc_feature (61)..(62): /note="This region represents a CpG dinucleotide"
  misc_feature (61)..(61): /note="Nucleotide may be methylated to form 5-methylcytosine"
caggggtgtgcgggttctgcgtgtaggagaatctgcttgggaaaccacagccctgcctgccgtggagatggacgcagcgtcccgctcacccggcgcacactgcagggctccatgcgggagtg

SEQ ID NO: 6418 - DNA, 122 bp, Homo sapiens
  misc_feature (61)..(62): /note="This region represents a CpG dinucleotide"
  misc_feature (61)..(61): /note="Nucleotide may be methylated to form 5-methylcytosine"
aagaaatcattgactttgaggtcattatcactgagacagcctaggaaagcatgccagttccgcttttaacactaatttttgcctattaaaaaattatcacttcacacattcatgtaaaatat

SEQ ID NO: 6419 - DNA, 122 bp, Homo sapiens
  misc_feature (61)..(62): /note="This region represents a CpG dinucleotide"
  misc_feature (61)..(61): /note="Nucleotide may be methylated to form 5-methylcytosine"
agtaatcatgcttcctatttgtatagctctttacaaatgatttggaggtatgttaactcacggttcagtggagaggataagatactcattctctgcaaataaggaattgaggctcagccagg

SEQ ID NO: 6420 - DNA, 122 bp, Homo sapiens
  misc_feature (61)..(62): /note="This region represents a CpG dinucleotide"
  misc_feature (61)..(61): /note="Nucleotide may be methylated to form 5-methylcytosine"
atgtaagaaccgcaagttctgaaaacattggcaatgacgatggaatccactgaatgttcccgtgtccttttctcctcttcggatagtgctggtgctccctcttttccacataggtaagcttg

SEQ ID NO: 6421 - DNA, 122 bp, Homo sapiens
  misc_feature (61)..(62): /note="This region represents a CpG dinucleotide"
  misc_feature (61)..(61): /note="Nucleotide may be methylated to form 5-methylcytosine"
caagcggcagagctgggctttgggtttggggccagattgaggcctccacactctgggctgcggctgcatgttggccacgcactgtgaggttcaccttatcttttcttcctcataccctgggc

SEQ ID NO: 6422 - DNA, 122 bp, Homo sapiens
  misc_feature (61)..(62): /note="This region represents a CpG dinucleotide"
  misc_feature (61)..(61): /note="Nucleotide may be methylated to form 5-methylcytosine"
acagatttctaagggatgtgtgactcagactggtgcttaagtgctgccttagtggacactcgacaccagcagaatgtttctgactctcaggcatttcagctgatctgcatgtgaacttcagc

SEQ ID NO: 6423 - DNA, 122 bp, Homo sapiens
  misc_feature (61)..(62): /note="This region represents a CpG dinucleotide"
  misc_feature (61)..(61): /note="Nucleotide may be methylated to form 5-methylcytosine"
tatggagatactcttattatttgcatttgataccatcttctgacaaggcctataaaattacggcacagagtatgagacaggacataattttacatatattgttagcggacaattagacatcc

SEQ ID NO: 6424 - DNA, 122 bp, Homo sapiens
  misc_feature (61)..(62): /note="This region represents a CpG dinucleotide"
  misc_feature (61)..(61): /note="Nucleotide may be methylated to form 5-methylcytosine"
taataaacataaaagatctagtcaacctctctttgagtcacaaagagaaactacttagcccgtggctattgccattgctaatggcgtaagccagaattggtgaaaatgtaaagaaataagcc

SEQ ID NO: 6425 - DNA, 122 bp, Homo sapiens
  misc_feature (61)..(62): /note="This region represents a CpG dinucleotide"
  misc_feature (61)..(61): /note="Nucleotide may be methylated to form 5-methylcytosine"
cgtgaacactcaggcctggctttgtattccagattgatatcaaatctaaaccaacagattcgttagtgtccaacatgccaaggaagatgagtaggcttggccaaagaacagtagctcatgtt

SEQ ID NO: 6426 - DNA, 122 bp, Homo sapiens
  misc_feature (61)..(62): /note="This region represents a CpG dinucleotide"
  misc_feature (61)..(61): /note="Nucleotide may be methylated to form 5-methylcytosine"
tcagtggtttggagattgtaaaatgatgatgttgataatgttgatgtcatttttagctgtcgtaagtgaaacgtgatgttaaatagtgatattatcatgcttactctctcagctactttata

SEQ ID NO: 6427 - DNA, 122 bp, Homo sapiens
  misc_feature (61)..(62): /note="This region represents a CpG dinucleotide"
  misc_feature (61)..(61): /note="Nucleotide may be methylated to form 5-methylcytosine"
atgtacaagttccagaatcaaaggtaaaacaaaacccaccaagaatcagctcactgttagcgtcctagttgaaaaataaggcttatcaaagtatttcagattgcattaacacttttgatata

SEQ ID NO: 6428 - DNA, 122 bp, Homo sapiens
  misc_feature (61)..(62): /note="This region represents a CpG dinucleotide"
  misc_feature (61)..(61): /note="Nucleotide may be methylated to form 5-methylcytosine"
gggagaactatattaattttaagggggaagaactcctgctgttaaaagtgaaacaaaaagcggaggttaaaaatattcattttaagagggagcaattcaaaataatgatataatcaaaacat

SEQ ID NO: 6429 - DNA, 122 bp, Homo sapiens
  misc_feature (61)..(62): /note="This region represents a CpG dinucleotide"
  misc_feature (61)..(61): /note="Nucleotide may be methylated to form 5-methylcytosine"
gctcaaacagttcaggatccaggacagttccaggcatcatgggagagggatgctgtgatgcgtgctctcagttcttttatgtgtttggggagcctgactggaatggatagtaggtggccaca

SEQ ID NO: 6430 - DNA, 122 bp, Homo sapiens
  misc_feature (61)..(62): /note="This region represents a CpG dinucleotide"
  misc_feature (61)..(61): /note="Nucleotide may be methylated to form 5-methylcytosine"
gctacttttatctgtggggtattgttccaaaaccaaggccatatatttttatgtgttttacgtaagtgcatgtgtaatttattgatagcaaggtttgcatgcatttgttctgtgaatcagct

SEQ ID NO: 6431 - DNA, 122 bp, Homo sapiens
  misc_feature (61)..(62): /note="This region represents a CpG dinucleotide"
  misc_feature (61)..(61): /note="Nucleotide may be methylated to form 5-methylcytosine"
aagaaaaccacaaaaatggttttcagattaagttctcagaagcttccctgtatggctgcacgggctagaatggagaaacaggccctcaaaatgcagcactggacttcacattattttttttt

SEQ ID NO: 6432 - DNA, 122 bp, Homo sapiens
  misc_feature (61)..(62): /note="This region represents a CpG dinucleotide"
  misc_feature (61)..(61): /note="Nucleotide may be methylated to form 5-methylcytosine"
ggccttggagaattaccattcttaccaattgaccacaaaagcagataggaacagtatctacgtattacaaaccagaatcaaaatgaccttcacacatgattagtgtggaattcttttcagtg

SEQ ID NO: 6433 - DNA, 122 bp, Homo sapiens
  misc_feature (61)..(62): /note="This region represents a CpG dinucleotide"
  misc_feature (61)..(61): /note="Nucleotide may be methylated to form 5-methylcytosine"
gttattggcaggattaaatgaggtgatattagtaatgcaatagtcaccaccatgcccccacgaaaactaacattcattgagaccttattgtgttgggcattgtgctcaggacttcaaatggg

SEQ ID NO: 6434 - DNA, 122 bp, Homo sapiens
  misc_feature (61)..(62): /note="This region represents a CpG dinucleotide"
  misc_feature (61)..(61): /note="Nucleotide may be methylated to form 5-methylcytosine"
ggttttcagaaactggattacaaagtgccctggtgaggttctgtttgtgtttacactatgcgcttaggctgcttgttcagtgcctttgatctgtgggtttataaaacttgaaacgttttcag

SEQ ID NO: 6435 - DNA, 122 bp, Homo sapiens
  misc_feature (61)..(62): /note="This region represents a CpG dinucleotide"
  misc_feature (61)..(61): /note="Nucleotide may be methylated to form 5-methylcytosine"
caaggatattgtaaaaagggtctaaatgcactttgactcatgtctgtgatgttgcaaaagcgcatcaactatcgagggactgctttgaagggaaacggtcatttgactacatttgctctgct

SEQ ID NO: 6436 - DNA, 122 bp, Homo sapiens
  misc_feature (61)..(62): /note="This region represents a CpG dinucleotide"
  misc_feature (61)..(61): /note="Nucleotide may be methylated to form 5-methylcytosine"
aggcaccttgagcaacaggaagaacagatgctgtgacccagcttccttttttctgagaagcggagagtctgaatcatagaagaagtgcagtgattcagattttgagataagaaaggacacat

SEQ ID NO: 6437 - DNA, 122 bp, Homo sapiens
  misc_feature (61)..(62): /note="This region represents a CpG dinucleotide"
  misc_feature (61)..(61): /note="Nucleotide may be methylated to form 5-methylcytosine"
agaatggagaaatgaccgcctaatgagcgcaggctttccttttggggtggtgtatgcatacgtccagactcttcaaaatgtgtgtattaaacaatgtacaatttatgcataccaattttcat

SEQ ID NO: 6438 - DNA, 122 bp, Homo sapiens
  misc_feature (61)..(62): /note="This region represents a CpG dinucleotide"
  misc_feature (61)..(61): /note="Nucleotide may be methylated to form 5-methylcytosine"
ggagaagaaatctaacctccatccacaagttatcatcatcagtttgtggtagggcgagaacgggaagtcatgtctgagagctatgcttatccagggctgctttgactctgttctcctgcctt

SEQ ID NO: 6439 - DNA, 122 bp, Homo sapiens
  misc_feature (61)..(62): /note="This region represents a CpG dinucleotide"
  misc_feature (61)..(61): /note="Nucleotide may be methylated to form 5-methylcytosine"
tcctttaagtcagggatcagctgtggactagtaataaactccctatccgttctgctaatccgcaagtcttcaagtgtcacagtgtctgataaactctggttgagacacttgagcactgagcc

SEQ ID NO: 6440 - DNA, 122 bp, Homo sapiens
  misc_feature (61)..(62): /note="This region represents a CpG dinucleotide"
  misc_feature (61)..(61): /note="Nucleotide may be methylated to form 5-methylcytosine"
agagccatggattattattctcaggccttgcttcaagggctttcctctaaagctagagaccgagaactgaagcccaggtcgcctctgctctggatccccaaatccatgtgagggatctgtct

SEQ ID NO: 6441 - DNA, 122 bp, Homo sapiens
  misc_feature (61)..(62): /note="This region represents a CpG dinucleotide"
  misc_feature (61)..(61): /note="Nucleotide may be methylated to form 5-methylcytosine"
aaatgacagatcattaacaagtgaaaattgaaagccgagatgaaaacctcccccaggaaacgtagtcaggctgctccattctccagagatgtaaatcaataaaataattccagagagcttaa

SEQ ID NO: 6442 - DNA, 122 bp, Homo sapiens
  misc_feature (61)..(62): /note="This region represents a CpG dinucleotide"
  misc_feature (61)..(61): /note="Nucleotide may be methylated to form 5-methylcytosine"
aataacacatgactaaatagatgttaaagaagacctcccttggggcaggcattattcccacgtgcatggcaacagagttcgtaacagggcttggtgaacagtataatctcaacacattaact

SEQ ID NO: 6443 - DNA, 122 bp, Homo sapiens
  misc_feature (61)..(62): /note="This region represents a CpG dinucleotide"
  misc_feature (61)..(61): /note="Nucleotide may be methylated to form 5-methylcytosine"
ccagggagccataaagagatgacctccgataacctgaatcaatatttccccattggggctcgggcccccgcagctgtcttcttgatcatctggcagatgccacacccacccttggccctccc

SEQ ID NO: 6444 - DNA, 122 bp, Homo sapiens
  misc_feature (61)..(62): /note="This region represents a CpG dinucleotide"
  misc_feature (61)..(61): /note="Nucleotide may be methylated to form 5-methylcytosine"
ttttgagactttgctgattctcctttctctcttgagggtttcttgttttcccttcctccccgggttgtgctagtagctgctctcaactactcacactccctggggagattcctacacttcct

SEQ ID NO: 6445 - DNA, 122 bp, Homo sapiens
  misc_feature (61)..(62): /note="This region represents a CpG dinucleotide"
  misc_feature (61)..(61): /note="Nucleotide may be methylated to form 5-methylcytosine"
atctctgctgccatctccactccagccgagcctcctcccaccaccacgatgaaccgtgagcgctggacctggagaagaggacatgtgaaacagggacatatgaaacacacctacacatccac

SEQ ID NO: 6446 - DNA, 122 bp, Homo sapiens
  misc_feature (61)..(62): /note="This region represents a CpG dinucleotide"
  misc_feature (61)..(61): /note="Nucleotide may be methylated to form 5-methylcytosine"
tatgcttccagtgcctttggaagaggaagggaagaagtttgttctggttatgttttgtaccgcaaatgtggaaaagaaatgttgcctgcaaccacacacacataacttggcttctttggtca

SEQ ID NO: 6447 - DNA, 122 bp, Homo sapiens
  misc_feature (61)..(62): /note="This region represents a CpG dinucleotide"
  misc_feature (61)..(61): /note="Nucleotide may be methylated to form 5-methylcytosine"
gacacaggggaagcaccagtggtcagagagactacagcagctggggatgggtgggaggggcgtattgccctaatctggagggtaagacctagaaaagggcctggaaaggccattctccctca

SEQ ID NO: 6448 - DNA, 122 bp, Homo sapiens
  misc_feature (61)..(62): /note="This region represents a CpG dinucleotide"
  misc_feature (61)..(61): /note="Nucleotide may be methylated to form 5-methylcytosine"
tgctctctgcctgcaggcatttctgagtgtcttggcctcctgaggctggggaagggaggacgtgaactctctgttgaatgtgggaggatgccgggatagcttgaaaaggacgacaacgccac

SEQ ID NO: 6449 - DNA, 122 bp, Homo sapiens
  misc_feature (61)..(62): /note="This region represents a CpG dinucleotide"
  misc_feature (61)..(61): /note="Nucleotide may be methylated to form 5-methylcytosine"
ggaacctgtgagaaatgccgagtctcggacccatccagagcgcccgaatggaaacctaggcgttacgaggccccaggttcagcgtctcacgggtcctgcaccacctgggacgccccgcaagc

SEQ ID NO: 6450 - DNA, 122 bp, Homo sapiens
  misc_feature (61)..(62): /note="This region represents a CpG dinucleotide"
  misc_feature (61)..(61): /note="Nucleotide may be methylated to form 5-methylcytosine"
cagcggcagcttccgccaactactgctgcccaccctggccgagctcagccgcgtcttgggcgccacctcatcctggcggcggcccacctgccccggctgctactgcgttgccgctagctgag

SEQ ID NO: 6451 - DNA, 122 bp, Homo sapiens
  misc_feature (61)..(62): /note="This region represents a CpG dinucleotide"
  misc_feature (61)..(61): /note="Nucleotide may be methylated to form 5-methylcytosine"
aattctgaaatttatcttctaaagtaattcagtctctcttttcattctcacatctatttacgttagaatgaaacctaaagggtgatttctcttgggtgaaataccaggaggctgagggaaac

SEQ ID NO: 6452 - DNA, 122 bp, Homo sapiens
  misc_feature (61)..(62): /note="This region represents a CpG dinucleotide"
  misc_feature (61)..(61): /note="Nucleotide may be methylated to form 5-methylcytosine"
catgcctgccctggtacagcgccgcatcgcagactacgaggctgcctcggctgtgccaggcgttgctgctgaacagcctggggtctctccatcaggcagctagccatacccaaccccaggaa

SEQ ID NO: 6453 - DNA, 122 bp, Homo sapiens
  misc_feature (61)..(62): /note="This region represents a CpG dinucleotide"
  misc_feature (61)..(61): /note="Nucleotide may be methylated to form 5-methylcytosine"
tatgatcaactggagtcaggcccagctgtatttgtctacactgaaagcattcatgggaagcggtaggtggcagatgaacatggaaagagcatgtgaaggagaaaggataagggttaggtttt

SEQ ID NO: 6454 - DNA, 122 bp, Homo sapiens
  misc_feature (61)..(62): /note="This region represents a CpG dinucleotide"
  misc_feature (61)..(61): /note="Nucleotide may be methylated to form 5-methylcytosine"
ttagtcatctcttcagagccacacttccaggaaaaggctattgttcctgcatttcctgatcgcttacttcctgtcatttttttcaaaagagaatcaaaactgttctaaaatcacacaaaggt

SEQ ID NO: 6455 - DNA, 122 bp, Homo sapiens
  misc_feature (61)..(62): /note="This region represents a CpG dinucleotide"
  misc_feature (61)..(61): /note="Nucleotide may be methylated to form 5-methylcytosine"
aaggattaaaacatatgtaattccttgacacagacacttcctttactgtcatttagagaacggtttcagaagacagcctcttggagaatcttagtttgatggtccagattttgtagtttctt

SEQ ID NO: 6456 - DNA, 122 bp, Homo sapiens
  misc_feature (61)..(62): /note="This region represents a CpG dinucleotide"
  misc_feature (61)..(61): /note="Nucleotide may be methylated to form 5-methylcytosine"
gtatgaatcgaagccgtgtgagcaaaatgccagctccaccacaaaatagttatataatctcgtgcaagatatttaactcctaagggctttggtctctctttacgatgggagtagtataggta

SEQ ID NO: 6457 - DNA, 122 bp, Homo sapiens
  misc_feature (61)..(62): /note="This region represents a CpG dinucleotide"
  misc_feature (61)..(61): /note="Nucleotide may be methylated to form 5-methylcytosine"
cactctgctgcactcacattcacactcattcacactcgtgcacacccggttcacactcaccggctcggggccacccacacacattccagctcaggcccaggcccactggccggctccgtggg

SEQ ID NO: 6458 - DNA, 122 bp, Homo sapiens
  misc_feature (61)..(62): /note="This region represents a CpG dinucleotide"
  misc_feature (61)..(61): /note="Nucleotide may be methylated to form 5-methylcytosine"
gtacagctggcttaggctcattgtgatttgaattcacccatggttggggctcttcatttccgctctgaaggcttcctcttcatcacagtgcaagagggcaagcctttgcatagctcctttct

SEQ ID NO: 6459 - DNA, 122 bp, Homo sapiens
  misc_feature (61)..(62): /note="This region represents a CpG dinucleotide"
  misc_feature (61)..(61): /note="Nucleotide may be methylated to form 5-methylcytosine"
ccctcaggagaatgtaaacgcatcaagaggatcttgtctttcactaattgtattttcaggcggggcccagaggctcacgcctgtaatccctgcactttggaaagctgaggggtggatcactt

SEQ ID NO: 6460 - DNA, 122 bp, Homo sapiens
  misc_feature (61)..(62): /note="This region represents a CpG dinucleotide"
  misc_feature (61)..(61): /note="Nucleotide may be methylated to form 5-methylcytosine"
gggagggtgacacccgcagccccagcctcctggggtgtgggtatggatcaccttgtgtagcgcctacttagggacaaggtttcatacccaccatcgcatttccagggagatgagagtggaaa

SEQ ID NO: 6461 - DNA, 122 bp, Homo sapiens
  misc_feature (61)..(62): /note="This region represents a CpG dinucleotide"
  misc_feature (61)..(61): /note="Nucleotide may be methylated to form 5-methylcytosine"
tgtcatctaatagttaagaattggtagacacaggaaagcaagaattgaggcaagttttgacgatgtgctgataagtgagcccttggttcatgtaaacaaatagttctcctgataagtaatct

SEQ ID NO: 6462 - DNA, 122 bp, Homo sapiens
  misc_feature (61)..(62): /note="This region represents a CpG dinucleotide"
  misc_feature (61)..(61): /note="Nucleotide may be methylated to form 5-methylcytosine"
gcctggctagggagctattttatgctgcttcacagattgagcagtgtgaaataccactgtcgaggaagcagactccagggtgtgtgtgtttgtgagtttttgtgtgtgcacagatgtgtacc

SEQ ID NO: 6463 - DNA, 122 bp, Homo sapiens
  misc_feature (61)..(62): /note="This region represents a CpG dinucleotide"
  misc_feature (61)..(61): /note="Nucleotide may be methylated to form 5-methylcytosine"
ataaatctttatgtaatcttagtttgggttgttgcatcactcctggaatataaaatattacggactgtggaatttatgaggcctgacatgttatgagttctcaaagatggttcagcagcagt

SEQ ID NO: 6464 - DNA, 122 bp, Homo sapiens
  misc_feature (61)..(62): /note="This region represents a CpG dinucleotide"
  misc_feature (61)..(61): /note="Nucleotide may be methylated to form 5-methylcytosine"
agttcctagcctgggcctaggactggctgaccccgtgtgtggggccagggctcccgaacacgggtccaccggctgcacgagagtttccggggggccctacccttccgattcggcaggtttag

SEQ ID NO: 6465 - DNA, 122 bp, Homo sapiens
  misc_feature (61)..(62): /note="This region represents a CpG dinucleotide"
  misc_feature (61)..(61): /note="Nucleotide may be methylated to form 5-methylcytosine"
aaagaaccccgatgttgttaattgcagctagaggtgaccttgtgatataattctggccagcgatacataagcaggagtatgttggggatatctcggactgtttctttcttctgacataaata

SEQ ID NO: 6466 - DNA, 122 bp, Homo sapiens
  misc_feature (61)..(62): /note="This region represents a CpG dinucleotide"
  misc_feature (61)..(61): /note="Nucleotide may be methylated to form 5-methylcytosine"
atctccgggaagaatctcatgggatctgggccctgcaacacaagggcctttgaagtgagacgaggaggagcctcaggaagggtcgccggggtgactaaagaaacctgcggagggagctaagg

SEQ ID NO: 6467 - DNA, 122 bp, Homo sapiens
  misc_feature (61)..(62): /note="This region represents a CpG dinucleotide"
  misc_feature (61)..(61): /note="Nucleotide may be methylated to form 5-methylcytosine"
ggtgtacttcctgcttcctctagagctctttccttgtttcactctgacactgtctttgaccgccctgagccgctccccctccccctccccagtggttctgatgctgccccttagcaggtagc

SEQ ID NO: 6468 - DNA, 122 bp, Homo sapiens
  misc_feature (61)..(62): /note="This region represents a CpG dinucleotide"
  misc_feature (61)..(61): /note="Nucleotide may be methylated to form 5-methylcytosine"
ccaagtgcaaaggaaacacactctggcctccaggcaagcattttcttgaacatgtcattccgctctccctagtgacaataataggaaggggaggaagagagagaaaagttacagctttggag

SEQ ID NO: 6469 - DNA, 122 bp, Homo sapiens
  misc_feature (61)..(62): /note="This region represents a CpG dinucleotide"
  misc_feature (61)..(61): /note="Nucleotide may be methylated to form 5-methylcytosine"
ttatcagagatgcctgcggagtagcaggtctgatgagatcagtctgtccccaggccaaaccgtgaccagatttcctttgaacataatctcttagagcagtgtttctctatctggtttaaaag

SEQ ID NO: 6470 - DNA, 122 bp, Homo sapiens
  misc_feature (61)..(62): /note="This region represents a CpG dinucleotide"
  misc_feature (61)..(61): /note="Nucleotide may be methylated to form 5-methylcytosine"
cctgcctgctaagtcaccaagtcacctgggccagtcatttccgcagcctgggcctctgtgcgaccaggagtgaccctccctaatgggatttagctgccggcacatcttgggccccatataaa

SEQ ID NO: 6471 - DNA, 122 bp, Homo sapiens
  misc_feature (61)..(62): /note="This region represents a CpG dinucleotide"
  misc_feature (61)..(61): /note="Nucleotide may be methylated to form 5-methylcytosine"
ggatgatggtcctggggactcgggctgcgtggaagggtcggcaggtgggctctgtggagacgtggtcagatgaggtttcgggttgagtatgctctcggtggatgaatcacctctgccacacg

SEQ ID NO: 6472 - DNA, 122 bp, Homo sapiens
  misc_feature (61)..(62): /note="This region represents a CpG dinucleotide"
  misc_feature (61)..(61): /note="Nucleotide may be methylated to form 5-methylcytosine"
ggctgtcttgtgcattgtaggacattaagcagtttccttgacctctacacatgagatgaccgtatcacttcccttctcagttgtgtcaactaacagtatctcctggggagcaaaattacctt

SEQ ID NO: 6473 - DNA, 122 bp, Homo sapiens
  misc_feature (61)..(62): /note="This region represents a CpG dinucleotide"
  misc_feature (61)..(61): /note="Nucleotide may be methylated to form 5-methylcytosine"
ctttgtgcactctggtagaaaagcagcacattccatttagttatgcctctgtcagcacggcgagtgttatttaattgcagaaaacaatttggagataagagtgagattcaggaaggaaatta

SEQ ID NO: 6474 - DNA, 122 bp, Homo sapiens
  misc_feature (61)..(62): /note="This region represents a CpG dinucleotide"
  misc_feature (61)..(61): /note="Nucleotide may be methylated to form 5-methylcytosine"
ccaccccccctttaattgaaactgtgtgcatgcagtgagcgcaggattctagtaatccgacgggaggatccacttaaaagactaaaatccagaaaccccaggaaaaaagaataggaccggcg

SEQ ID NO: 6475 - DNA, 122 bp, Homo sapiens
  misc_feature (61)..(62): /note="This region represents a CpG dinucleotide"
  misc_feature (61)..(61): /note="Nucleotide may be methylated to form 5-methylcytosine"
ttagtgataatgtcagaattttgtttctacagcttcttccccctgtagctacttcacatgcgttgacatagaaatgtgacacatctttctcattagagaaaatgttttcatgcttttagatt

SEQ ID NO: 6476 - DNA, 122 bp, Homo sapiens
  misc_feature (61)..(62): /note="This region represents a CpG dinucleotide"
  misc_feature (61)..(61): /note="Nucleotide may be methylated to form 5-methylcytosine"
agagtttatttaaccaccttgctgctggcatgaaagcctcaggtcctttaccctggttggcgggggggggggtgggggggtggggggcgggggggggcagtgaattggtggcggcaggtgta

SEQ ID NO: 6477 - DNA, 122 bp, Homo sapiens
  misc_feature (61)..(62): /note="This region represents a CpG dinucleotide"
  misc_feature (61)..(61): /note="Nucleotide may be methylated to form 5-methylcytosine"
tgcaaattcctgagccccacccacaccccctgatcagaggtgcagcaatctgtgctttaacgagccctgaagagtcccagttccacattatgaagcattaaggggaggatccaggctacagg

SEQ ID NO: 6478 - DNA, 122 bp, Homo sapiens
  misc_feature (61)..(62): /note="This region represents a CpG dinucleotide"
  misc_feature (61)..(61): /note="Nucleotide may be methylated to form 5-methylcytosine"
gaggttggagggaataacagcaaaaataattgacattcttgggtccatcggtcggtgtgccgggcctgtgccaaggacttcacctgcccttcccattcaatattcaccaaaaaacctatgtg

SEQ ID NO: 6479 - DNA, 122 bp, Homo sapiens
  misc_feature (61)..(62): /note="This region represents a CpG dinucleotide"
  misc_feature (61)..(61): /note="Nucleotide may be methylated to form 5-methylcytosine"
gcatgaaagggagacacgggcaaggacataagctcatttccttctggggcttgaggagttcgtcaacaacattttagtgattcagtaatgagttgctggttccctagaggcgaaacaggtct

SEQ ID NO: 6480 - DNA, 122 bp, Homo sapiens
  misc_feature (61)..(62): /note="This region represents a CpG dinucleotide"
  misc_feature (61)..(61): /note="Nucleotide may be methylated to form 5-methylcytosine"
ctaacaaatgtgctgttctggtgcggcgatgctgacggcaggagagtgtgtgtctctgtgcgtgaatatgcatgcgtgtgtacatgtaagcacgtgtgtgtgagccctcggttctttcccct

SEQ ID NO: 6481 - DNA, 122 bp, Homo sapiens
  misc_feature (61)..(62): /note="This region represents a CpG dinucleotide"
  misc_feature (61)..(61): /note="Nucleotide may be methylated to form 5-methylcytosine"
cctcctgcttgcttggaatgtgaattcagactttagtcagcaggctaatgcaagggacaccgctggtgcacaggctgcagattaagggcggggagacatcccattattgggtgcacattctc

SEQ ID NO: 6482 - DNA, 122 bp, Homo sapiens
  misc_feature (61)..(62): /note="This region represents a CpG dinucleotide"
  misc_feature (61)..(61): /note="Nucleotide may be methylated to form 5-methylcytosine"
attttttgcctccttgcatgtgtgattactcacattaaaaatagctttgtaagagaaaaacgatgtgaaatttatgttttaggtcaatatgttggggatttctgagctgtttttcatttgta

SEQ ID NO: 6483 - DNA, 122 bp, Homo sapiens
  misc_feature (61)..(62): /note="This region represents a CpG dinucleotide"
  misc_feature (61)..(61): /note="Nucleotide may be methylated to form 5-methylcytosine"
gctggttgcaaactcctggcctcaggtgatccgactgtctcgagttattacttcttgttgcgagcgtgtctcagctgattcggcttaactgtaatttgatggttgattaagcttaagtatgg

SEQ ID NO: 6484 - DNA, 122 bp, Homo sapiens
  misc_feature (61)..(62): /note="This region represents a CpG dinucleotide"
  misc_feature (61)..(61): /note="Nucleotide may be methylated to form 5-methylcytosine"
accactaacttgtgttcttgaagtatttaaagaaatatcctctcaggggaaaaaaatgcacgtggttacctttggccttaagtgtgattatgtggggaaaccctgtgactggtcatctgttg

SEQ ID NO: 6485 - DNA, 122 bp, Homo sapiens
  misc_feature (61)..(62): /note="This region represents a CpG dinucleotide"
  misc_feature (61)..(61): /note="Nucleotide may be methylated to form 5-methylcytosine"
agggcatcacttagttcatttccatctggccagtgtttattctgtgctttttgtataaggcgagagtgcaaagaggtatgaccagtcctctaggaatccctagccagtaaaaaacttttgtc

SEQ ID NO: 6486 - DNA, 122 bp, Homo sapiens
  misc_feature (61)..(62): /note="This region represents a CpG dinucleotide"
  misc_feature (61)..(61): /note="Nucleotide may be methylated to form 5-methylcytosine"
taaaagggtgcctttaatacaatatttaggtaggttgacctgactgcctaatttatatgacgaaatattaaagccctgggtactgtgaggatttcctagtactaaagtttgtccttatgttt

SEQ ID NO: 6487 - DNA, 122 bp, Homo sapiens
  misc_feature (61)..(62): /note="This region represents a CpG dinucleotide"
  misc_feature (61)..(61): /note="Nucleotide may be methylated to form 5-methylcytosine"
tcctatgctaccaacattgtactacaatagtattccatagcttattttccacacatacttcgctacttctttcctgtgtgtgtgtgtgtgtgtgtgtgtgtgtgtgtgtgtgttttccacta

SEQ ID NO: 6488 - DNA, 122 bp, Homo sapiens
  misc_feature (61)..(62): /note="This region represents a CpG dinucleotide"
  misc_feature (61)..(61): /note="Nucleotide may be methylated to form 5-methylcytosine"
ccagtccagggtcagatcctgggctgatgccacctgagggcggggtgggggcgtggcctccgtgcacatgggagactccaggtgcaggagagggggaggtggacttcctcttggtcttccca

SEQ ID NO: 6489 - DNA, 122 bp, Homo sapiens
  misc_feature (61)..(62): /note="This region represents a CpG dinucleotide"
  misc_feature (61)..(61): /note="Nucleotide may be methylated to form 5-methylcytosine"
caaaggggcctggaggctgcaggaagtaggtcagcagcctatggtggtgttactgggcttcggctcctgacagaagctcctcagcccctggctggagtgaggaggggtcatgccccccgcca

SEQ ID NO: 6490 - DNA, 122 bp, Homo sapiens
  misc_feature (61)..(62): /note="This region represents a CpG dinucleotide"
  misc_feature (61)..(61): /note="Nucleotide may be methylated to form 5-methylcytosine"
tctgctctgggggccctccacagcccagctccaggaaggtgactgcttcctggtttgagacgtattattaaactgtaatcatactgtgcatggagtcagccaaagcagtggctattaatagg

SEQ ID NO: 6491 - DNA, 122 bp, Homo sapiens
  misc_feature (61)..(62): /note="This region represents a CpG dinucleotide"
  misc_feature (61)..(61): /note="Nucleotide may be methylated to form 5-methylcytosine"
cttttagttgtcatgtctccttttgctctgcttggctgtgactctttttcagactttcctcgtatttggatgaccttgacagttctgaaaattgctgagtatgtattttgtaccagggtaca

SEQ ID NO: 6492 - DNA, 122 bp, Homo sapiens
  misc_feature (61)..(62): /note="This region represents a CpG dinucleotide"
  misc_feature (61)..(61): /note="Nucleotide may be methylated to form 5-methylcytosine"
gtgttgggtggtgatggccgtgttctcccctgcacacatggcatgggttgccagcttggtcgtacccattgcaccactctactggcctcacccctgcccagtagagaccagcagctccttcc

SEQ ID NO: 6493 - DNA, 122 bp, Homo sapiens
  misc_feature (61)..(62): /note="This region represents a CpG dinucleotide"
  misc_feature (61)..(61): /note="Nucleotide may be methylated to form 5-methylcytosine"
agaacattagcctctataaccctattataattctaggaaaactcgtcagtgtatgacctacggtttcatatgtgttgaccttggtaaatacaggaagggggttagtcataagtcagtgtgtt

SEQ ID NO: 6494 - DNA, 122 bp, Homo sapiens
  misc_feature (61)..(62): /note="This region represents a CpG dinucleotide"
  misc_feature (61)..(61): /note="Nucleotide may be methylated to form 5-methylcytosine"
atttatccaagctaagtgatcaaacacattattagaccagagtcctcttcaggtgcagggcgccttgttttcacaccggtctcaaatgtctaatgctgtgttaacaaagactgaacatttga

SEQ ID NO: 6495 - DNA, 122 bp, Homo sapiens
  misc_feature (61)..(62): /note="This region represents a CpG dinucleotide"
  misc_feature (61)..(61): /note="Nucleotide may be methylated to form 5-methylcytosine"
ttctcataggaaagtcctctcttcctgttccaagtgccatgctgggagacctggccagagcgccctctactgggttcaccccatcatgcaaggatggtgtgagaatgagaaataaactcttc

SEQ ID NO: 6496 - DNA, 122 bp, Homo sapiens
  misc_feature (61)..(62): /note="This region represents a CpG dinucleotide"
  misc_feature (61)..(61): /note="Nucleotide may be methylated to form 5-methylcytosine"
atgcagattttgggaggattaatgaacctattcaatggagaaatcaacattctgttccctcgtgttttttcctccttctcttatgttcctctttcacatacacaaacttatgtatacatcta

SEQ ID NO: 6497 - DNA, 122 bp, Homo sapiens
  misc_feature (61)..(62): /note="This region represents a CpG dinucleotide"
  misc_feature (61)..(61): /note="Nucleotide may be methylated to form 5-methylcytosine"
gcctttgagtcatgaatgaagaaaatcactttcacttgtgggagccagtgggctccagttcgtgttgtctctgttgtccgtggagactttgaagatgtttatatgcacctcaactatcaaga

SEQ ID NO: 6498 - DNA, 122 bp, Homo sapiens
  misc_feature (61)..(62): /note="This region represents a CpG dinucleotide"
  misc_feature (61)..(61): /note="Nucleotide may be methylated to form 5-methylcytosine"
aggtttgtaagttggaaacaaagaaggcaaataaactaagatgagaaccaaatgtctacacggatgctaccaaaatctctctgttcatttgactggtgaaattctgcccgctgttggatttg

SEQ ID NO: 6499 - DNA, 122 bp, Homo sapiens
  misc_feature (61)..(62): /note="This region represents a CpG dinucleotide"
  misc_feature (61)..(61): /note="Nucleotide may be methylated to form 5-methylcytosine"
ctgcctgaaaaccccattcttaatgagttttgaagtttcatttgaaaagtcataatgctacgtgttcaaatactactagtataccaacattccgacatacaatgcccctgagagtcagcttt

SEQ ID NO: 6500 - DNA, 122 bp, Homo sapiens
  misc_feature (61)..(62): /note="This region represents a CpG dinucleotide"
  misc_feature (61)..(61): /note="Nucleotide may be methylated to form 5-methylcytosine"
tctctcatgtagaaatatttaaaattctaagtcactaaaaagcctttcattttcatttcacgagatatgaatcagtatttccctatctattcacttttataaacagcatcagcaacaatgaa

SEQ ID NO: 6501 - DNA, 122 bp, Homo sapiens
  misc_feature (61)..(62): /note="This region represents a CpG dinucleotide"
  misc_feature (61)..(61): /note="Nucleotide may be methylated to form 5-methylcytosine"
aatgtagggaaaaggtcaccgatgtgtcagctgctgcctgttctgggatcgctggtgctccgggcggcatccccacctcagggtcgtcttcatacccccatcactctcctcctccccaagtc

SEQ ID NO: 6502 - DNA, 122 bp, Homo sapiens
  misc_feature (61)..(62): /note="This region represents a CpG dinucleotide"
  misc_feature (61)..(61): /note="Nucleotide may be methylated to form 5-methylcytosine"
taggtagcattactcttgatgatgcaggcatgagtgatgtcctctccattccccaatcctcgagccccttgaaatgctatttgaggaatgctatcaaaacaccagtgctctttgagagaatg

SEQ ID NO: 6503 - DNA, 122 bp, Homo sapiens
  misc_feature (61)..(62): /note="This region represents a CpG dinucleotide"
  misc_feature (61)..(61): /note="Nucleotide may be methylated to form 5-methylcytosine"
gtgattcaattctaatattttgtccttgtaatcttgtacctgggttaatgcaccagcctccgctggtagagggagccacaagtgcagagatctgagataggacctggcaaagagcctagtaa

SEQ ID NO: 6504 - DNA, 122 bp, Homo sapiens
  misc_feature (61)..(62): /note="This region represents a CpG dinucleotide"
  misc_feature (61)..(61): /note="Nucleotide may be methylated to form 5-methylcytosine"
gcaggcatctgttctccccagatggtcactggtatgttttatttacctaaagccttcacacgtaaaataccttagtgactgttgtcgtgtatctaagacctactgtaatgcttagctcatcc

SEQ ID NO: 6505 - DNA, 122 bp, Homo sapiens
  misc_feature (61)..(62): /note="This region represents a CpG dinucleotide"
  misc_feature (61)..(61): /note="Nucleotide may be methylated to form 5-methylcytosine"
ggcatggagaaatgactttgaatgtgagatatgcacttagagaagggctgcagtatcacacgcctgcagcagagtatcaggaggctttcacttctgattaggaaatcccctttggtttaagc

SEQ ID NO: 6506 - DNA, 122 bp, Homo sapiens
  misc_feature (61)..(62): /note="This region represents a CpG dinucleotide"
  misc_feature (61)..(61): /note="Nucleotide may be methylated to form 5-methylcytosine"
aaaagctcactctcccttcatcccttccactccccccgcaacccccaccaagcatccattcgtactttctggtggattcttccagtctgcaaatatagcaattacaaatgtatactcttatt

SEQ ID NO: 6507 - DNA, 122 bp, Homo sapiens
  misc_feature (61)..(62): /note="This region represents a CpG dinucleotide"
  misc_feature (61)..(61): /note="Nucleotide may be methylated to form 5-methylcytosine"
gtaggccacagaggcggcccaggcaggcagggtggagtagctggctgtgctatccgaggtcgctgtcctaatcagagcagggccgggagagccaggacaggaagtatggagagcagggagcg

SEQ ID NO: 6508 - DNA, 122 bp, Homo sapiens
  misc_feature (61)..(62): /note="This region represents a CpG dinucleotide"
  misc_feature (61)..(61): /note="Nucleotide may be methylated to form 5-methylcytosine"
gtgaggaggaaactcaccggatgcctgcacagggaatgccacggggccagtgctacactgcgcccatcaagtgagtcccagcagtgaggagaaacaaagcagcaaacaggaagcagaaaagt

SEQ ID NO: 6509 - DNA, 122 bp, Homo sapiens
  misc_feature (61)..(62): /note="This region represents a CpG dinucleotide"
  misc_feature (61)..(61): /note="Nucleotide may be methylated to form 5-methylcytosine"
cttctagagcagtgcttcgctaactttagcatcagagtcaattgaaggcttattcaaacacgggagcctgagctccatactcagcagttctgattcaacagacataaggttgggcctgaaat

SEQ ID NO: 6510 - DNA, 122 bp, Homo sapiens
  misc_feature (61)..(62): /note="This region represents a CpG dinucleotide"
  misc_feature (61)..(61): /note="Nucleotide may be methylated to form 5-methylcytosine"
taatgttgtctctgaagatgacttgtgatttttttttcttttttttaaaccatgaagagccgtttgacagagcatgctctgcgttgttggtttcaccagcttctgccctcacatgcacaggg

SEQ ID NO: 6511 - DNA, 122 bp, Homo sapiens
  misc_feature (61)..(62): /note="This region represents a CpG dinucleotide"
  misc_feature (61)..(61): /note="Nucleotide may be methylated to form 5-methylcytosine"
taacctgtattcattagcaaaaggtagctccaggggaccattattctccagagcagaatacgtccagagcaggcttcagccaccagagagagccctcagacagttgaaaataggtcaggatg

SEQ ID NO: 6512 - DNA, 122 bp, Homo sapiens
  misc_feature (61)..(62): /note="This region represents a CpG dinucleotide"
  misc_feature (61)..(61): /note="Nucleotide may be methylated to form 5-methylcytosine"
cctactgacctcactccctgatgagaagggtccagcagtgcatgtccacccctcagaccacgagcgcccgtgtctaagacaccaattgttcctgactgcactgctcctgcctgcacgtaact

SEQ ID NO: 6513 - DNA, 122 bp, Homo sapiens
  misc_feature (61)..(62): /note="This region represents a CpG dinucleotide"
  misc_feature (61)..(61): /note="Nucleotide may be methylated to form 5-methylcytosine"
ctctgagaatctgatgcactcagtctttgtgatctcacagaataaagaggctgcagcattcggacgaaggcccctcgctctggtgtgtttgcagagctcagggtggtttgctgtgacctgat

SEQ ID NO: 6514 - DNA, 122 bp, Homo sapiens
  misc_feature (61)..(62): /note="This region represents a CpG dinucleotide"
  misc_feature (61)..(61): /note="Nucleotide may be methylated to form 5-methylcytosine"
taaaaaaaatctcaattctttttttaaaaaacaaattttaatgtgcatatttaatatacacgacatggtgttatgagctacatatagatagtataatggttactatagtgaagtaaattaac

SEQ ID NO: 6515 - DNA, 122 bp, Homo sapiens
  misc_feature (61)..(62): /note="This region represents a CpG dinucleotide"
  misc_feature (61)..(61): /note="Nucleotide may be methylated to form 5-methylcytosine"
tccacggtgatggggctctggaggctggggtgctccacgtggcaggtgtagacatctccacgctggggagtcatttccagcatcaccaggatctggaaagtccagtcaccattcctaataag

SEQ ID NO: 6516 - DNA, 122 bp, Homo sapiens
  misc_feature (61)..(62): /note="This region represents a CpG dinucleotide"
  misc_feature (61)..(61): /note="Nucleotide may be methylated to form 5-methylcytosine"
tcctgctatacttaataaaattcacgtttcaaagccactcctttcatttactgatgtctacgctggtgactgacatgctgcatttttaagcagctgttcattaaacagcaagaaacagttat

SEQ ID NO: 6517 - DNA, 122 bp, Homo sapiens
  misc_feature (61)..(62): /note="This region represents a CpG dinucleotide"
  misc_feature (61)..(61): /note="Nucleotide may be methylated to form 5-methylcytosine"
actttgcgcgtagattaacttgcttctctgtttatgctaattaaaacagacctcagaagacgagcatgcaaacggagatactgtgattaggaggaggaggttttaaaatttttatcagttaa

SEQ ID NO: 6518 - DNA, 122 bp, Homo sapiens
  misc_feature (61)..(62): /note="This region represents a CpG dinucleotide"
  misc_feature (61)..(61): /note="Nucleotide may be methylated to form 5-methylcytosine"
actttgagaaacgtgttcactcatgacgctggcaaaagagcttcacttgaaagacagatccgcaaaaatgcatcagagatagaatatgggaccctgcctagggagaggtgagtcacctaagc

SEQ ID NO: 6519 - DNA, 122 bp, Homo sapiens
  misc_feature (61)..(62): /note="This region represents a CpG dinucleotide"
  misc_feature (61)..(61): /note="Nucleotide may be methylated to form 5-methylcytosine"
tcacagtttctgtgagtcaggaatttggagtctggtcagcagcgtagcctgtctccattccgcttggcatcagcaggggaggctcgaagtatggggaaatcatctgaaggctcgcgagctga

SEQ ID NO: 6520 - DNA, 122 bp, Homo sapiens
  misc_feature (61)..(62): /note="This region represents a CpG dinucleotide"
  misc_feature (61)..(61): /note="Nucleotide may be methylated to form 5-methylcytosine"
aaacagcttacccaaggccacagagctgaaatttaagctggtctgtgcaactttttcttacgcatatgttcagctaggaacattagatgtgaagaaacccagtacttagattttagaaagtt

SEQ ID NO: 6521 - DNA, 122 bp, Homo sapiens
  misc_feature (61)..(62): /note="This region represents a CpG dinucleotide"
  misc_feature (61)..(61): /note="Nucleotide may be methylated to form 5-methylcytosine"
cggccgcgaggccctgagatgaggctccaaagaccccgacaggccccggcgggtgggaggcgcgcgccccggggcgggcggggctccccctaccggccagacccggggagaggcgcgcggag

SEQ ID NO: 6522 - DNA, 122 bp, Homo sapiens
  misc_feature (61)..(62): /note="This region represents a CpG dinucleotide"
  misc_feature (61)..(61): /note="Nucleotide may be methylated to form 5-methylcytosine"
ttaggaagctgcggatcggtttcaggtgttttctcttaggagcctgcctttccctggcagcgcctgtgaccaattattattttagagaaacagttgacagctgcctgaccatcacatgatgg

SEQ ID NO: 6523 - DNA, 122 bp, Homo sapiens
  misc_feature (61)..(62): /note="This region represents a CpG dinucleotide"
  misc_feature (61)..(61): /note="Nucleotide may be methylated to form 5-methylcytosine"
ttcccaaaggaaccttacaggaatgcttttactactagaaaacatacagcagcagctgggcgcagtggctcacgcctgtaatcccagcactttgtgaggccgaggcagttggatcatgaggt

SEQ ID NO: 6524 - DNA, 122 bp, Homo sapiens
  misc_feature (61)..(62): /note="This region represents a CpG dinucleotide"
  misc_feature (61)..(61): /note="Nucleotide may be methylated to form 5-methylcytosine"
caagccaaagaccatgccgaaggaaagggccatctgcccactgtgccaagccgagctcaacgtgggcagcaagagcccagccaactataacacatgcaccacctgcaggctccaggtgtgca

SEQ ID NO: 6525 - DNA, 122 bp, Homo sapiens
  misc_feature (61)..(62): /note="This region represents a CpG dinucleotide"
  misc_feature (61)..(61): /note="Nucleotide may be methylated to form 5-methylcytosine"
tccttgcttcctctcgcgccgagcctggaaaagcgaggtgcagggtagaatctcccgggccgcctccgtgtcccggacgttggcccagctctgagtcgcggcgctcggccctggggtgcggc

SEQ ID NO: 6526 - DNA, 122 bp, Homo sapiens
  misc_feature (61)..(62): /note="This region represents a CpG dinucleotide"
  misc_feature (61)..(61): /note="Nucleotide may be methylated to form 5-methylcytosine"
gaaatgatgatgtttgcataacaacaaaattgcccagtgaagcaattttcacaatgtgtccgtgtagttaagtgacacatgactgtggctcagcacttctggtcatctagagagtaggacag

SEQ ID NO: 6527 - DNA, 122 bp, Homo sapiens
  misc_feature (61)..(62): /note="This region represents a CpG dinucleotide"
  misc_feature (61)..(61): /note="Nucleotide may be methylated to form 5-methylcytosine"
tcaccttcctgtacttgcctcggccgccagccgatcccgcccgatacccccgctacctggcgctactggagactctaacccgagacctgggccccacgctgctggttcatggggtcactcca

SEQ ID NO: 6528 - DNA, 122 bp, Homo sapiens
  misc_feature (61)..(62): /note="This region represents a CpG dinucleotide"
  misc_feature (61)..(61): /note="Nucleotide may be methylated to form 5-methylcytosine"
aactgatcctaaaaggtcacattcttcctctggttcttatgaacaagttacacatatatccgttgatttccagcttgatgcatgactaagtgccactttctaggaacctactaagtgagtta

SEQ ID NO: 6529 - DNA, 122 bp, Homo sapiens
  misc_feature (61)..(62): /note="This region represents a CpG dinucleotide"
  misc_feature (61)..(61): /note="Nucleotide may be methylated to form 5-methylcytosine"
tggaagacaccccggcctgtggagagactgccagggcctcaaatcacttaggaaagggcgcgggtccggttggaccttgaaggacaggcaggcgagggtactccagggaacagctaagcaaa

SEQ ID NO: 6530 - DNA, 122 bp, Homo sapiens
  misc_feature (61)..(62): /note="This region represents a CpG dinucleotide"
  misc_feature (61)..(61): /note="Nucleotide may be methylated to form 5-methylcytosine"
tgtcagcttagaatagacattttcagacatttaagctttaaaaaatctgttcccatataccgcaggaagctactgtaggacatgctccaccaaaatgaggatgcaaaccaaaaaagtgcaag

SEQ ID NO: 6531 - DNA, 122 bp, Homo sapiens
  misc_feature (61)..(62): /note="This region represents a CpG dinucleotide"
  misc_feature (61)..(61): /note="Nucleotide may be methylated to form 5-methylcytosine"
caaacaaacaaaaacgtcagagtaaagctactgaaacctctaaatgtttcttaacctacacgttcattaaatcatatcttgtttctgcgtgcctttaattttcacatctgcaaaattgcttt

SEQ ID NO: 6532 - DNA, 122 bp, Homo sapiens
  misc_feature (61)..(62): /note="This region represents a CpG dinucleotide"
  misc_feature (61)..(61): /note="Nucleotide may be methylated to form 5-methylcytosine"
gtgttctcttctagatagtacgcagagtacgaggcactattttaaacactgataagggcacgcatagaagcagggactctgcttgctgccagtgaattcaggtaatgtatccattgttccaa

SEQ ID NO: 6533 - DNA, 122 bp, Homo sapiens
  misc_feature (61)..(62): /note="This region represents a CpG dinucleotide"
  misc_feature (61)..(61): /note="Nucleotide may be methylated to form 5-methylcytosine"
tggagcctcaggttccctagctgggaaataagggcattaggactccctttttatggcctccggagcttacatgtacttaaataatgcatgtgcactgagcacacagtaagcattcagtaagt

SEQ ID NO: 6534 - DNA, 122 bp, Homo sapiens
  misc_feature (61)..(62): /note="This region represents a CpG dinucleotide"
  misc_feature (61)..(61): /note="Nucleotide may be methylated to form 5-methylcytosine"
ggggatcccccccaactgaaggttcctccactgtttagaccatatagggtaacttctggacgttgccatggcatttgtaaactgcctggcgctgctaggagtgtctttagcatactaatgca

SEQ ID NO: 6535 - DNA, 122 bp, Homo sapiens
  misc_feature (61)..(62): /note="This region represents a CpG dinucleotide"
  misc_feature (61)..(61): /note="Nucleotide may be methylated to form 5-methylcytosine"
tctttttctgtgtgaatacttccattgtttaagtgttcgttccagtcctcaccatgaggtcggctcttttgtccccaagtggacatttaaaatgcaagtcccggccaggggtggtggctcat

SEQ ID NO: 6536 - DNA, 122 bp, Homo sapiens
  misc_feature (61)..(62): /note="This region represents a CpG dinucleotide"
  misc_feature (61)..(61): /note="Nucleotide may be methylated to form 5-methylcytosine"
tcctgtccatgtagtcacctctgtcaacagcagctgcgatgactcttcttatagaacacacgcagtcaccttcacactgctgagtgtttgttgaatgactgtatgagtgagcaaagaagttt

SEQ ID NO: 6537 - DNA, 122 bp, Homo sapiens
  misc_feature (61)..(62): /note="This region represents a CpG dinucleotide"
  misc_feature (61)..(61): /note="Nucleotide may be methylated to form 5-methylcytosine"
gaacatgcatggaacaacagctgtttgtgtagcaatatgccgagatagtcccacaaactccggtcacaggtttaaataaggctgccacgaacttggaaggcatcaaactgtcagagaaggtt

SEQ ID NO: 6538 - DNA, 122 bp, Homo sapiens
  misc_feature (61)..(62): /note="This region represents a CpG dinucleotide"
  misc_feature (61)..(61): /note="Nucleotide may be methylated to form 5-methylcytosine"
cataaatcagatgtacagatgtaatcaaacactgaatgtgcctataaagcaatacacttacgttaaattttaaaagtcttcactgggagtacagagggaatagggggttgctggtcaaaggg

SEQ ID NO: 6539 - DNA, 122 bp, Homo sapiens
  misc_feature (61)..(62): /note="This region represents a CpG dinucleotide"
  misc_feature (61)..(61): /note="Nucleotide may be methylated to form 5-methylcytosine"
ggaccgccccatagggaccccacccatagggacgggctgcattgcgcatgtctgcaagggcgtggcaaggggaggaatgagcgggaaggggcggggctgagtggactggcgggacgagaaaa

SEQ ID NO: 6540 - DNA, 122 bp, Homo sapiens
  misc_feature (61)..(62): /note="This region represents a CpG dinucleotide"
  misc_feature (61)..(61): /note="Nucleotide may be methylated to form 5-methylcytosine"
cattctatcccaattagatcactccaaattatattctatatttgtttagcataattgacacgtcacatgagtacaggggaggttaggttcataacacgcactgtaaaaacacacacacacat

SEQ ID NO: 6541 - DNA, 122 bp, Homo sapiens
  misc_feature (61)..(62): /note="This region represents a CpG dinucleotide"
  misc_feature (61)..(61): /note="Nucleotide may be methylated to form 5-methylcytosine"
actctcctgggcttgaccctcagcctcccaagtagctgggactacagacatgtgccaccacgtccagctgattttttaatttttttgaggagacagggtctcactgtgttgttcaggctggc

SEQ ID NO: 6542 - DNA, 122 bp, Homo sapiens
  misc_feature (61)..(62): /note="This region represents a CpG dinucleotide"
  misc_feature (61)..(61): /note="Nucleotide may be methylated to form 5-methylcytosine"
ggaggaaaatcattagatatacagtaagttatgacctcagttatatgttaggtggtcttacgctagtcaagagactgtcgtgtttacctttgaagtgctggaaatatatcccttcagactga

SEQ ID NO: 6543 - DNA, 122 bp, Homo sapiens
  misc_feature (61)..(62): /note="This region represents a CpG dinucleotide"
  misc_feature (61)..(61): /note="Nucleotide may be methylated to form 5-methylcytosine"
ttggtaggtggtgctttgcttcctcttgtgtctcggtgcagatgctgttgctaaggtaaccgggtaagcataaaacagaaacagcccatagggtcttgctgcctccacctgtgtgtccagac

SEQ ID NO: 6544 - DNA, 122 bp, Homo sapiens
  misc_feature (61)..(62): /note="This region represents a CpG dinucleotide"
  misc_feature (61)..(61): /note="Nucleotide may be methylated to form 5-methylcytosine"
caaatcaatatcactctaaatcagtataatccgttcatcacaccatgagtaacaattacccgtttgaaagagcttcctgagtagcctgaaggctcaaatcaatgttttctacttagtacaat

SEQ ID NO: 6545 - DNA, 122 bp, Homo sapiens
  misc_feature (61)..(62): /note="This region represents a CpG dinucleotide"
  misc_feature (61)..(61): /note="Nucleotide may be methylated to form 5-methylcytosine"
tctttctgtgaattcattcttggctgatctcatcatcagaatgccactattataaggtaccgcccctggaattgctcaaactcagcagctgactagacttcttcaggatgcctcaaggcatc

SEQ ID NO: 6546 - DNA, 122 bp, Homo sapiens
  misc_feature (61)..(62): /note="This region represents a CpG dinucleotide"
  misc_feature (61)..(61): /note="Nucleotide may be methylated to form 5-methylcytosine"
gactctgcactgctttcagcgttccaggacttaacaacacggatgatcggcagttctttgcgtttatttttggtcctacatgttgttcttcaaacccatttcctcttgttctttccccaaca

SEQ ID NO: 6547 - DNA, 122 bp, Homo sapiens
  misc_feature (61)..(62): /note="This region represents a CpG dinucleotide"
  misc_feature (61)..(61): /note="Nucleotide may be methylated to form 5-methylcytosine"
tagaaaagtcacctgctgttacaagttactctggtctcctgttgttacagacttacacgtcgattgtgttctatgtttataacttgaattcatatgggatttcacaggaccactgctctttt

SEQ ID NO: 6548 - DNA, 122 bp, Homo sapiens
  misc_feature (61)..(62): /note="This region represents a CpG dinucleotide"
  misc_feature (61)..(61): /note="Nucleotide may be methylated to form 5-methylcytosine"
ctatgtcctggtcctttcaccccggggccaaagaggattccaaaatctattagtacaagtcgagtttgattggcagtggtgtttacaatcaactgatcaccagttacagatttctttcttcc

SEQ ID NO: 6549 - DNA, 122 bp, Homo sapiens
  misc_feature (61)..(62): /note="This region represents a CpG dinucleotide"
  misc_feature (61)..(61): /note="Nucleotide may be methylated to form 5-methylcytosine"
actcaacaggtgtaccaggtattagtgcattcagtttgcttgtccttgatgttggggtgccgttctaaagtacactaacctagcttgtctggtaattgaatgcagttttttcctcttctttt

SEQ ID NO: 6550 - DNA, 122 bp, Homo sapiens
  misc_feature (61)..(62): /note="This region represents a CpG dinucleotide"
  misc_feature (61)..(61): /note="Nucleotide may be methylated to form 5-methylcytosine"
ggttctctcccctgtgcttcaccccacctccccgtccctagccatttctagtctccaatccgggtcttacatttaccctggctccagagcacagaccttcctgcagttgggccggcgcgttg

SEQ ID NO: 6551 - DNA, 122 bp, Homo sapiens
  misc_feature (61)..(62): /note="This region represents a CpG dinucleotide"
  misc_feature (61)..(61): /note="Nucleotide may be methylated to form 5-methylcytosine"
gttcttcagaattccaaaattaaaagctcttctggccccacgccattagtgccctctgtgcgtacccaggactgagtacgttgaagaagaaagaagagaaaggtatagctaactcatgtaaa

SEQ ID NO: 6552 - DNA, 122 bp, Homo sapiens
  misc_feature (61)..(62): /note="This region represents a CpG dinucleotide"
  misc_feature (61)..(61): /note="Nucleotide may be methylated to form 5-methylcytosine"
aggtaatggaggggggagttccctgatcctgggactgaatgggtgcttcagcattagctgcgcctgtagaagtcctgtgatagccgagcaccctccctcagatggcctgttgagattggcag

SEQ ID NO: 6553 - DNA, 122 bp, Homo sapiens
  misc_feature (61)..(62): /note="This region represents a CpG dinucleotide"
  misc_feature (61)..(61): /note="Nucleotide may be methylated to form 5-methylcytosine"
ctaattacgcacacctcagctccccgggggggccaggaggaaatgcccggcagagccctccgtcctaccccgtgcagcctgggtctccctccacgggcccagcctcttccactgctgctttc

SEQ ID NO: 6554 - DNA, 122 bp, Homo sapiens
  misc_feature (61)..(62): /note="This region represents a CpG dinucleotide"
  misc_feature (61)..(61): /note="Nucleotide may be methylated to form 5-methylcytosine"
ctcaaaatttaacaactgttttttgcaacctctaatgagccagctctaaactatgtagcacgcccaggaagtataattcacattaagacatagtatagagttctctaagtgacattagttat

SEQ ID NO: 6555 - DNA, 122 bp, Homo sapiens
  misc_feature (61)..(62): /note="This region represents a CpG dinucleotide"
  misc_feature (61)..(61): /note="Nucleotide may be methylated to form 5-methylcytosine"
agccacctatacccagccaacaaagaattttttttcatataaatttagtgtagcttagagcgtacaatgtttataacgtctacagtagtgtatagccatgtcttaggccttcacattcactc

SEQ ID NO: 6556 - DNA, 122 bp, Homo sapiens
  misc_feature (61)..(62): /note="This region represents a CpG dinucleotide"
  misc_feature (61)..(61): /note="Nucleotide may be methylated to form 5-methylcytosine"
ctccagcctgactgtgaggaaagttctgtcatcccccaagagtgacttatagtccaagttcgctggtaatggggccatccattcccttcagggaaagctccaccccaggaagacaattccca

SEQ ID NO: 6557 - DNA, 122 bp, Homo sapiens
  misc_feature (61)..(62): /note="This region represents a CpG dinucleotide"
  misc_feature (61)..(61): /note="Nucleotide may be methylated to form 5-methylcytosine"
tctatttacttaaagacggactgccagacttccataaacacttgtgagagaaagacagtccggttcgttgttctctgcccagccattatccacggtgtttcaagccttctgtattttggcct

SEQ ID NO: 6558 - DNA, 122 bp, Homo sapiens
  misc_feature (61)..(62): /note="This region represents a CpG dinucleotide"
  misc_feature (61)..(61): /note="Nucleotide may be methylated to form 5-methylcytosine"
gatcgaggaaagaccagccttgcataagacaaagccagtgatcattagccagcatggagccgtgagcagtgcatgcgtagttatactaattggttgattgatgcaggttctgttggaaaata

SEQ ID NO: 6559 - DNA, 122 bp, Homo sapiens
  misc_feature (61)..(62): /note="This region represents a CpG dinucleotide"
  misc_feature (61)..(61): /note="Nucleotide may be methylated to form 5-methylcytosine"
agctgcaggattcactcttccggggcacagatgcctgagaaacttcagagaggcagaaggcgtgagtctgagcagccatcatctgggcatcaaggggttaacccatccctgagggctgggcc

SEQ ID NO: 6560 - DNA, 122 bp, Homo sapiens
  misc_feature (61)..(62): /note="This region represents a CpG dinucleotide"
  misc_feature (61)..(61): /note="Nucleotide may be methylated to form 5-methylcytosine"
ttttcaaacctgtgaccttgtgcaagttcctcaaccttgccaagtctcaagagttttattcgtaaaggacaatggtatctaccacattaaggttactgtaaataataaattgtattttagtt

SEQ ID NO: 6561 - DNA, 122 bp, Homo sapiens
  misc_feature (61)..(62): /note="This region represents a CpG dinucleotide"
  misc_feature (61)..(61): /note="Nucleotide may be methylated to form 5-methylcytosine"
ttccaggtccaggaggcggagcttgatttccatgctgagcagggtgtccaggtcattccgcgtcaggtcgctcatcatgtccttcccgagtagcgcattcagtccatccgtccagatacagt

SEQ ID NO: 6562 - DNA, 122 bp, Homo sapiens
  misc_feature (61)..(62): /note="This region represents a CpG dinucleotide"
  misc_feature (61)..(61): /note="Nucleotide may be methylated to form 5-methylcytosine"
ttactgcacctccaaagagaaaacgctttaaacaaatccagttttagccctctgtgataacggagacgtttgctcactcatcaaccattagccctgagcttaaggaagagtgagtacttagg

SEQ ID NO: 6563 - DNA, 122 bp, Homo sapiens
  misc_feature (61)..(62): /note="This region represents a CpG dinucleotide"
  misc_feature (61)..(61): /note="Nucleotide may be methylated to form 5-methylcytosine"
taggtcacattgtgaaaccaggacagctttcttcctttctttagcagtttcctctttaggcgttgtatggccaatggtgccatatacactagagcttcctggcagaagggggacccattcac

SEQ ID NO: 6564 - DNA, 122 bp, Homo sapiens
  misc_feature (61)..(62): /note="This region represents a CpG dinucleotide"
  misc_feature (61)..(61): /note="Nucleotide may be methylated to form 5-methylcytosine"
aggcatctgtctcctgctcctccctgggaatggaatgtctcggtgtaaaacccaatcgtacgttccagttactgagatagagaaaaccgccttatggctggaggttagaaatgctggcggca

SEQ ID NO: 6565 - DNA, 122 bp, Homo sapiens
  misc_feature (61)..(62): /note="This region represents a CpG dinucleotide"
  misc_feature (61)..(61): /note="Nucleotide may be methylated to form 5-methylcytosine"
gttaatatttgtatcatttctaccatgaatctcaagccctttcttctgggggtcagactccgtgcatcaggagggagatagggtgtcagatcaccctttgttcttgcagagagggtgactaa

SEQ ID NO: 6566 - DNA, 122 bp, Homo sapiens
  misc_feature (61)..(62): /note="This region represents a CpG dinucleotide"
  misc_feature (61)..(61): /note="Nucleotide may be methylated to form 5-methylcytosine"
tgggagcacaagcctgggtgaccagtggccggaggggaaggaaatggactgaggtggtgacgaagggggacactcctgacacatgtcattccatggctgaatgactaaggagaaatacacag

SEQ ID NO: 6567 - DNA, 122 bp, Homo sapiens
  misc_feature (61)..(62): /note="This region represents a CpG dinucleotide"
  misc_feature (61)..(61): /note="Nucleotide may be methylated to form 5-methylcytosine"
tttctccaaagctgagagagatcctttcactatttacatcattcagccctcaagactagacgcactgtattttgttaacaaaacaaggccatatacccaggcgtcagtggctgtcccctctg

SEQ ID NO: 6568 - DNA, 122 bp, Homo sapiens
  misc_feature (61)..(62): /note="This region represents a CpG dinucleotide"
  misc_feature (61)..(61): /note="Nucleotide may be methylated to form 5-methylcytosine"
cagcggctcttttgtggccaacttagcaaaagatctggggctgggtgtaggggaactggccgcgagaggcgcccggattctttccaaagggaacaaacagtatttgcagctcgaacggaaga

SEQ ID NO: 6569 - DNA, 122 bp, Homo sapiens
  misc_feature (61)..(62): /note="This region represents a CpG dinucleotide"
  misc_feature (61)..(61): /note="Nucleotide may be methylated to form 5-methylcytosine"
atgcctgactcgctccagttctcagaaagtgtttactaagtgaaccgcactgccaggtttcggtttcttcagtcacatccacagtgaggatgttaccactgagatgagggcaggattgtaaa

SEQ ID NO: 6570 - DNA, 122 bp, Homo sapiens
  misc_feature (61)..(62): /note="This region represents a CpG dinucleotide"
  misc_feature (61)..(61): /note="Nucleotide may be methylated to form 5-methylcytosine"
attgctctgcaaactgtcaacgttatgtaaacattgctattcagagtgtgctcccaggtgcgggaggtacagctgttatctgttggagatcactcctgaagtaacattcctagtgccatggg

SEQ ID NO: 6571 - DNA, 122 bp, Homo sapiens
  misc_feature (61)..(62): /note="This region represents a CpG dinucleotide"
  misc_feature (61)..(61): /note="Nucleotide may be methylated to form 5-methylcytosine"
ctgtgagcaattgatggggaatgttctgcagggacatctcaaagcctgggatgggtgggacggaaattactattctttggtgtggaatcttcattctctaggccagtgatgtcccctgctca

SEQ ID NO: 6572 - DNA, 122 bp, Homo sapiens
  misc_feature (61)..(62): /note="This region represents a CpG dinucleotide"
  misc_feature (61)..(61): /note="Nucleotide may be methylated to form 5-methylcytosine"
agccctcgctccacggctcgcggcagttccttgaagcccacccaggtggggagcccctggcgcagcccaactctctgcagtctcggggaagctgaggcagagagggaagccccgccccgggt

SEQ ID NO: 6573 - DNA, 122 bp, Homo sapiens
  misc_feature (61)..(62): /note="This region represents a CpG dinucleotide"
  misc_feature (61)..(61): /note="Nucleotide may be methylated to form 5-methylcytosine"
actccacaacacctctgtcatgtaacaggcggccctgatgtggcacacacaagagaactccgcccccgcaactcccagagcctcaactctctcaagcctttccttctgtattagaatgtgga

SEQ ID NO: 6574 - DNA, 122 bp, Homo sapiens
  misc_feature (61)..(62): /note="This region represents a CpG dinucleotide"
  misc_feature (61)..(61): /note="Nucleotide may be methylated to form 5-methylcytosine"
ctcactaaatagtagtattacggtttacaggggatgtggagagtgtgccaggtttgaaaacgtcagagatccagaaacccaacctcaagctgtgcagagagcctgggactagcccaatggtg

SEQ ID NO: 6575 - DNA, 122 bp, Homo sapiens
  misc_feature (61)..(62): /note="This region represents a CpG dinucleotide"
  misc_feature (61)..(61): /note="Nucleotide may be methylated to form 5-methylcytosine"
tggagaatgtggacagacattcagactcaaggaagagcaagggaggtggattgaccccttcgtattggagacccagtgagataatatcaaagttgcattccccacttcgatgacattctcct

SEQ ID NO: 6576 - DNA, 122 bp, Homo sapiens
  misc_feature (61)..(62): /note="This region represents a CpG dinucleotide"
  misc_feature (61)..(61): /note="Nucleotide may be methylated to form 5-methylcytosine"
ccagttgcatagctcttccagaaatatttcttgacgcacttatttagcactttctattgccgttactgagcagattacagaatcctcccggccctttcaccaaacccgtctagagctggtat

SEQ ID NO: 6577 - DNA, 122 bp, Homo sapiens
  misc_feature (61)..(62): /note="This region represents a CpG dinucleotide"
  misc_feature (61)..(61): /note="Nucleotide may be methylated to form 5-methylcytosine"
atgtagtctgtggtcagtgtggctggcagccagcctggcagatggccagaacccagagctcgctgggaaggagcataaacaaggcgcctggtgggcagctgtgacccagaatcttccagcag

SEQ ID NO: 6578 - DNA, 122 bp, Homo sapiens
  misc_feature (61)..(62): /note="This region represents a CpG dinucleotide"
  misc_feature (61)..(61): /note="Nucleotide may be methylated to form 5-methylcytosine"
agatggttcctgagagggcacaaccctagagctgcctatactgctctatacttctgttaacgctgcagccttggctgtggggagaaaaagaataaagaatagaagtgggggactcacagcat

SEQ ID NO: 6579 - DNA, 122 bp, Homo sapiens
  misc_feature (61)..(62): /note="This region represents a CpG dinucleotide"
  misc_feature (61)..(61): /note="Nucleotide may be methylated to form 5-methylcytosine"
ttgatctgacctgtggaaggcacagccatctaatcttcctgcttagccaaggagcaggcccgcctacaggttacacaatggcagacacaagcaccagcaggagggaaaagtttcagtgggca

SEQ ID NO: 6580 - DNA, 122 bp, Homo sapiens
  misc_feature (61)..(62): /note="This region represents a CpG dinucleotide"
  misc_feature (61)..(61): /note="Nucleotide may be methylated to form 5-methylcytosine"
gaaccaattccagcttcataactcagctgtgaacgaactcccttaggcatttggtagccacgtagccagtagttcaagactagaaaaccctgaggaaagaaaaacagaagcaaagggagtgt

SEQ ID NO: 6581 - DNA, 122 bp, Homo sapiens
  misc_feature (61)..(62): /note="This region represents a CpG dinucleotide"
  misc_feature (61)..(61): /note="Nucleotide may be methylated to form 5-methylcytosine"
gtctaaaagatattttaacagttccatttgcaggatgcataggtaaagttttcagcccaacgtgatgtttaaattagtttgttttcatcgtaactactgacgggacttaagttagccctcta

SEQ ID NO: 6582 - DNA, 122 bp, Homo sapiens
  misc_feature (61)..(62): /note="This region represents a CpG dinucleotide"
  misc_feature (61)..(61): /note="Nucleotide may be methylated to form 5-methylcytosine"
cctattgtgaaatgacgcatggctgtatatacagtcagccctctgtatctgtgggtttcccgtctgtgtattcaatcaaccacagatagaaagtatttaaaacaaaaaagaaaagaaaaagg

SEQ ID NO: 6583 - DNA, 122 bp, Homo sapiens
  misc_feature (61)..(62): /note="This region represents a CpG dinucleotide"
  misc_feature (61)..(61): /note="Nucleotide may be methylated to form 5-methylcytosine"
aattgtcctgtatgcttggttcacacagtgcgttattttaccttcctctgagctgctaatcgcctgcctctgagctgggtgagataaatatcacaaggcacaaagtgattgtacaataaaaa

SEQ ID NO: 6584 - DNA, 122 bp, Homo sapiens
  misc_feature (61)..(62): /note="This region represents a CpG dinucleotide"
  misc_feature (61)..(61): /note="Nucleotide may be methylated to form 5-methylcytosine"
aaagcctgaggatgcacttagtctggagcgacaacccaaggcaacgccggcagacagcaccgcctgcctcagagcagccgtgggtgtgtacccttgtgggcgcaaaaacccaagtacaacag

SEQ ID NO: 6585 - DNA, 122 bp, Homo sapiens
  misc_feature (61)..(62): /note="This region represents a CpG dinucleotide"
  misc_feature (61)..(61): /note="Nucleotide may be methylated to form 5-methylcytosine"
caaagcgggagaaaaagcaagtgagcaaaacaggctaacacagggacgcgttcaaatacacgataccatcgacaggaaaacaagccatgctgccccaggcatcctgtgtgacgctgactatt

SEQ ID NO: 6586 - DNA, 122 bp, Homo sapiens
  misc_feature (61)..(62): /note="This region represents a CpG dinucleotide"
  misc_feature (61)..(61): /note="Nucleotide may be methylated to form 5-methylcytosine"
gtgagtcatgagaaaaccctcaggtgtagggttaccaacatttgcaggagttgccactggcgcatactggaatgctgagtgccaaagccatacagtgtctgttcaaggaaggttgttacgag

SEQ ID NO: 6587 - DNA, 122 bp, Homo sapiens
  misc_feature (61)..(62): /note="This region represents a CpG dinucleotide"
  misc_feature (61)..(61): /note="Nucleotide may be methylated to form 5-methylcytosine"
aacagcgccctcacatgctatgtacaattcagcctacggacgtacttggtggcatttcagcgtgatgagccttacaggggttttcagacacagactttactaagaacaacatgtggatggtt

SEQ ID NO: 6588 - DNA, 122 bp, Homo sapiens
  misc_feature (61)..(62): /note="This region represents a CpG dinucleotide"
  misc_feature (61)..(61): /note="Nucleotide may be methylated to form 5-methylcytosine"
ctctccgtggctccagccaaaagctcaggcgtcatctctactcctccctttgaccctcagcgacagtcagttgtcagtaaagactcctggctctgattctaaactaaacatagaatcaggct

SEQ ID NO: 6589 - DNA, 122 bp, Homo sapiens
  misc_feature (61)..(62): /note="This region represents a CpG dinucleotide"
  misc_feature (61)..(61): /note="Nucleotide may be methylated to form 5-methylcytosine"
atgatttccttctccactgcccatgtatgaaatatacacaaatccagggcagccctgggccgaaggagtgtttatggttctgcccggccataaacatgccagccttcaaaacaccaggacat

SEQ ID NO: 6590 - DNA, 122 bp, Homo sapiens
  misc_feature (61)..(62): /note="This region represents a CpG dinucleotide"
  misc_feature (61)..(61): /note="Nucleotide may be methylated to form 5-methylcytosine"
attcacaccaaaaaacaaataacaacacacaagaaactcacagctgtgttcaagtgggaacgccagtactgttttaggaggaaagaggacaaaggcaacaaaccaacatctgcttgcttgct

SEQ ID NO: 6591 - DNA, 122 bp, Homo sapiens
  misc_feature (61)..(62): /note="This region represents a CpG dinucleotide"
  misc_feature (61)..(61): /note="Nucleotide may be methylated to form 5-methylcytosine"
gagctggagggcaatgacttcatcagctgttgttgctgtcacagtcccagtgtcgtgaggcgttccctgttcacctctgtgtatccacagttatgtgaatggttgtgtgcatgaatttgtgg

SEQ ID NO: 6592 - DNA, 122 bp, Homo sapiens
  misc_feature (61)..(62): /note="This region represents a CpG dinucleotide"
  misc_feature (61)..(61): /note="Nucleotide may be methylated to form 5-methylcytosine"
gccattgactttgtgtgtccttaaggaagtaactgtgtctctctgaatcttgaatgaccacgggcacactggaaatgaaagtatttgccagtttccacatgaaaagtgagtaaagcaggatt

SEQ ID NO: 6593 - DNA, 122 bp, Homo sapiens
  misc_feature (61)..(62): /note="This region represents a CpG dinucleotide"
  misc_feature (61)..(61): /note="Nucleotide may be methylated to form 5-methylcytosine"
gactagagaggtaaagtaacttgcaggaggtcacaccgcttgcaatgataggaaccctagcgatcctgctccagagatgaatataagctatagcgccagctgtacagaagtgcagtttctta

SEQ ID NO: 6594 - DNA, 122 bp, Homo sapiens
  misc_feature (61)..(62): /note="This region represents a CpG dinucleotide"
  misc_feature (61)..(61): /note="Nucleotide may be methylated to form 5-methylcytosine"
tggggaagttcacgaggttgacctgagccagggctggttcacagtggttgagcagcagagcgccctctggggtgcaggccagaggaggttggtggacaggggtgtgtgtggagagagagtcg

SEQ ID NO: 6595 - DNA, 122 bp, Homo sapiens
  misc_feature (61)..(62): /note="This region represents a CpG dinucleotide"
  misc_feature (61)..(61): /note="Nucleotide may be methylated to form 5-methylcytosine"
ggtcagcagggtgattcctatgcaacagcaaagaactaagcaggaaccaagcagcacaaacgtaggcaggactgaggcggtagcaagggacctgaccgagggcagagtcaggcagaagggca

SEQ ID NO: 6596 - DNA, 122 bp, Homo sapiens
  misc_feature (61)..(62): /note="This region represents a CpG dinucleotide"
  misc_feature (61)..(61): /note="Nucleotide may be methylated to form 5-methylcytosine"
ggtagcaactcatattctttgtgggactaaagtttgtccttgccaatggtcaacagttatcgtggggagagaggagaggagagggacatattctctcccagcctttcacctgctaggcctat

SEQ ID NO: 6597 - DNA, 122 bp, Homo sapiens
  misc_feature (61)..(62): /note="This region represents a CpG dinucleotide"
  misc_feature (61)..(61): /note="Nucleotide may be methylated to form 5-methylcytosine"
gcttctgccagaacaacagactgaggggccaagagggagagaggaggtaggaggccaggtcggaggctgctgcaggatccaagcaagggcatgatgtgactgtgacctgcatagatgggcat

SEQ ID NO: 6598 - DNA, 122 bp, Homo sapiens
  misc_feature (61)..(62): /note="This region represents a CpG dinucleotide"
  misc_feature (61)..(61): /note="Nucleotide may be methylated to form 5-methylcytosine"
tcgaggcatccgtgactatccacaaaccaaccggagaaacctcagcttcctccgcacccccgaggagcctgcggatttaaaatgaagcccgcaaacctcacagaaggtgtcaggcaaagacg

SEQ ID NO: 6599 - DNA, 122 bp, Homo sapiens
  misc_feature (61)..(62): /note="This region represents a CpG dinucleotide"
  misc_feature (61)..(61): /note="Nucleotide may be methylated to form 5-methylcytosine"
taacaaagaataattaattctattatatagaaatcaacaacaaccaccacaaaacattggcggtgggtccactggttgtgaaattatagtgtagttttaatctgcttaatcttatggaagga

SEQ ID NO: 6600 - DNA, 122 bp, Homo sapiens
  misc_feature (61)..(62): /note="This region represents a CpG dinucleotide"
  misc_feature (61)..(61): /note="Nucleotide may be methylated to form 5-methylcytosine"
agctagacctagagctctggtcctggcttggcgaagaatgggagaggtcaaaggtgggagcgaggccgctgactggtgagtagagccccaccagagcagatgagctggaagtgcagcagagt

SEQ ID NO: 6601 - DNA, 122 bp, Homo sapiens
  misc_feature (61)..(62): /note="This region represents a CpG dinucleotide"
  misc_feature (61)..(61): /note="Nucleotide may be methylated to form 5-methylcytosine"
gaacagaatagagaacccacctacaacaatctgatctttgacaaagttgacaataacaagcgatggggagagaactccccattcaataaatgatgctggaataactggctagtcatatgcag

SEQ ID NO: 6602 - DNA, 122 bp, Homo sapiens
  misc_feature (61)..(62): /note="This region represents a CpG dinucleotide"
  misc_feature (61)..(61): /note="Nucleotide may be methylated to form 5-methylcytosine"
ggccctggcatactcccaaatttacattatgaaccataatctgggccagctcccacaggacgaactggcttggggctcccctcttcatttccccagagggccttctccccatccatagccag

SEQ ID NO: 6603 - DNA, 122 bp, Homo sapiens
  misc_feature (61)..(62): /note="This region represents a CpG dinucleotide"
  misc_feature (61)..(61): /note="Nucleotide may be methylated to form 5-methylcytosine"
gtccaaccttccgcggcgagcagcgccggcccctcaccgagctgtctgacccggggtctccgtgacttttaaaagtttgttcccagcctcccacagggcactggcatggccatttgtcagca

SEQ ID NO: 6604 - DNA, 122 bp, Homo sapiens
  misc_feature (61)..(62): /note="This region represents a CpG dinucleotide"
  misc_feature (61)..(61): /note="Nucleotide may be methylated to form 5-methylcytosine"
cctttgtgaagagaaaacccttatctaggacatccacagggtagaggttgggtgtgtgtacgggagtgtctgaggcccagtgtgttttttagggttaccccatgtaaagcacttaccgctgt

SEQ ID NO: 6605 - DNA, 122 bp, Homo sapiens
  misc_feature (61)..(62): /note="This region represents a CpG dinucleotide"
  misc_feature (61)..(61): /note="Nucleotide may be methylated to form 5-methylcytosine"
tatatctctgtggtatattctgtatcactagagaagtggaacagcatttagggtctagtgcgtaatcttgttgctatgttgaagaatggatgtaggcaatttattgcattcatacctgccag

SEQ ID NO: 6606 - DNA, 122 bp, Homo sapiens
  misc_feature (61)..(62): /note="This region represents a CpG dinucleotide"
  misc_feature (61)..(61): /note="Nucleotide may be methylated to form 5-methylcytosine"
gcaggaccccacctcctccccgtctgcagtccatcctgaccctacagtccccagtctcctcgtcccatgcctccgtctccagctgctgccttgcctccagggatggccccttttctgtcccc

SEQ ID NO: 6607 - DNA, 122 bp, Homo sapiens
  misc_feature (61)..(62): /note="This region represents a CpG dinucleotide"
  misc_feature (61)..(61): /note="Nucleotide may be methylated to form 5-methylcytosine"
tagccagggtggaacaccactgttgaggagacaccccagagacaccgaactggttcatcgcggccacttatgaatcagctggctctgcctgtcatgccgcgaaccagtcaagaaatacctgc

SEQ ID NO: 6608 - DNA, 122 bp, Homo sapiens
  misc_feature (61)..(62): /note="This region represents a CpG dinucleotide"
  misc_feature (61)..(61): /note="Nucleotide may be methylated to form 5-methylcytosine"
cgtggctgggctgtccagctccgaatccccccagtgctgcacccgaacgcctccctcccacgcagcctcctgccgtctccgcaggttttaaatcagacgccgctcaggctgtgcccaggctg

SEQ ID NO: 6609 - DNA, 122 bp, Homo sapiens
  misc_feature (61)..(62): /note="This region represents a CpG dinucleotide"
  misc_feature (61)..(61): /note="Nucleotide may be methylated to form 5-methylcytosine"
cctgttgtctattcgaagccaaatggaatgacagaggaacagcaaaaaatctataaggaacggctggccctgtacagatttttcaatgatgtcaccacagaaacggctgaaatgtcacataa

SEQ ID NO: 6610 - DNA, 122 bp, Homo sapiens
  misc_feature (61)..(62): /note="This region represents a CpG dinucleotide"
  misc_feature (61)..(61): /note="Nucleotide may be methylated to form 5-methylcytosine"
acataaagtcccagggcgaggcactcagtctcaactgaataaatacttgctgacctgcagcgttggacaggaaatggaagatggatggctctgagcagctcctgccaaggaggatggacgga

SEQ ID NO: 6611 - DNA, 122 bp, Homo sapiens
  misc_feature (61)..(62): /note="This region represents a CpG dinucleotide"
  misc_feature (61)..(61): /note="Nucleotide may be methylated to form 5-methylcytosine"
aatccctgtcctcaaggagtgtgcagtccagtataaggagagtcacatgaataaattcaccgtgagagatgcaataatataaatatgtatgacataaggattttaatctgtctcgatacagt

SEQ ID NO: 6612 - DNA, 122 bp, Homo sapiens
  misc_feature (61)..(62): /note="This region represents a CpG dinucleotide"
  misc_feature (61)..(61): /note="Nucleotide may be methylated to form 5-methylcytosine"
tcctgctcagcatttggcagatgcgcctctggcccaactaggatgtttccattttacagacgggaaatccgaagcccagagagattaaataatttgcccaaggtcacacagctggctagtgg

SEQ ID NO: 6613 - DNA, 122 bp, Homo sapiens
  misc_feature (61)..(62): /note="This region represents a CpG dinucleotide"
  misc_feature (61)..(61): /note="Nucleotide may be methylated to form 5-methylcytosine"
cagctgtagaaaggagagaataaatccataccatgacactgttataagacagaagggaagcgatgcaggccataatgcatggtgtctggcacttgataagcccacacatggtggctgccatt

SEQ ID NO: 6614 - DNA, 122 bp, Homo sapiens
  misc_feature (61)..(62): /note="This region represents a CpG dinucleotide"
  misc_feature (61)..(61): /note="Nucleotide may be methylated to form 5-methylcytosine"
cttgttacaggaatactagcaatatatacaaacaaggtacacaaacacagcgacaggacacgttccaccaattccacacagccacaatcctaagtcattactcttagcaaagcctcatataa

SEQ ID NO: 6615 - DNA, 122 bp, Homo sapiens
  misc_feature (61)..(62): /note="This region represents a CpG dinucleotide"
  misc_feature (61)..(61): /note="Nucleotide may be methylated to form 5-methylcytosine"
atttgcagtttcctttttcttttcctgttcctgtgtacatgctcttctgctctgagttcacgtctctgtgtttttggtggcatagggagggttaggcaaacatgctttctttgtgaagcctt

SEQ ID NO: 6616 - DNA, 122 bp, Homo sapiens
  misc_feature (61)..(62): /note="This region represents a CpG dinucleotide"
  misc_feature (61)..(61): /note="Nucleotide may be methylated to form 5-methylcytosine"
caggccccagctggccctggagcaagagcactgccccctcctgtgcacttggcctcaaaccgacccaggacaggctacactgggctaatctgacccctgaagtgggtcctctgcctgggtgt

SEQ ID NO: 6617 - DNA, 122 bp, Homo sapiens
  misc_feature (61)..(62): /note="This region represents a CpG dinucleotide"
  misc_feature (61)..(61): /note="Nucleotide may be methylated to form 5-methylcytosine"
taacagaagggaacagctgataaaagaagccctcctttgttctacatttcctgcccaggtcgctcaagttctgtttgctttgactgtctctggagtgcttgctgggtgaggtcaaggaaggg

SEQ ID NO: 6618 - DNA, 122 bp, Homo sapiens
  misc_feature (61)..(62): /note="This region represents a CpG dinucleotide"
  misc_feature (61)..(61): /note="Nucleotide may be methylated to form 5-methylcytosine"
caggcagaattaaccccaggtgatttgtgtgcagagtacaatttgagacgtgctgccttgcgtgaccaggtgatctgagtttacttctagcgctaagacccaactttctctaagattatctt

SEQ ID NO: 6619 - DNA, 122 bp, Homo sapiens
  misc_feature (61)..(62): /note="This region represents a CpG dinucleotide"
  misc_feature (61)..(61): /note="Nucleotide may be methylated to form 5-methylcytosine"
ctgtgagcacaccggcctgtaaacaaaatcataaatgttatttggcatgataccaggggacgcaactgggagttagagaagcctatggcagtacagttgtaagtttccacaataaactgcat

SEQ ID NO: 6620 - DNA, 122 bp, Homo sapiens
  misc_feature (61)..(62): /note="This region represents a CpG dinucleotide"
  misc_feature (61)..(61): /note="Nucleotide may be methylated to form 5-methylcytosine"
tgtacttcctctaatcttgttctatctgcctttttacagaaatcagatcagctgctttcccgtgccaatcttgctaaaagcagagcacaagaagcactgagtatgggcaatgccacttttta

SEQ ID NO: 6621 - DNA, 122 bp, Homo sapiens
  misc_feature (61)..(62): /note="This region represents a CpG dinucleotide"
  misc_feature (61)..(61): /note="Nucleotide may be methylated to form 5-methylcytosine"
taagctccgtgctgttttcaagtgcttgtggttttcttgcctaacctgcagcctctcggccgtgtcgttatgttatccatcccaccaccactggactgtaggaaggcggatatgttgtccag

SEQ ID NO: 6622 - DNA, 122 bp, Homo sapiens
  misc_feature (61)..(62): /note="This region represents a CpG dinucleotide"
  misc_feature (61)..(61): /note="Nucleotide may be methylated to form 5-methylcytosine"
tagcaacgtctatgagtaagtcaccctttggccatactctcaaaggctcacaaagatagacgtgcaaggacactcattacaacattgtttaacagaatgtcaatgggacatttcatgttgtc

SEQ ID NO: 6623 - DNA, 122 bp, Homo sapiens
  misc_feature (61)..(62): /note="This region represents a CpG dinucleotide"
  misc_feature (61)..(61): /note="Nucleotide may be methylated to form 5-methylcytosine"
attttaacttgttcttgtttttcctgttgtgcaaggcgagctgcaacttcttcaggtggtcgctcccttatagaagatgaggatgcttcttcttgcagcaaaagtaaataagaggaaatcaa

SEQ ID NO: 6624 - DNA, 122 bp, Homo sapiens
  misc_feature (61)..(62): /note="This region represents a CpG dinucleotide"
  misc_feature (61)..(61): /note="Nucleotide may be methylated to form 5-methylcytosine"
atgaattgcccggctaatgtcactgccggacgcccgggtagtcgccacttggtttaaaggcggagctgttcttgcatttcaaagaaatccagattccgaaagtaagtaacaaccatgcccgt

SEQ ID NO: 6625 - DNA, 122 bp, Homo sapiens
  misc_feature (61)..(62): /note="This region represents a CpG dinucleotide"
  misc_feature (61)..(61): /note="Nucleotide may be methylated to form 5-methylcytosine"
agggaccagttctgtcctggtcactgctgtatccccagctctagataaggcctgagacatcgtaggagtgccagggatctttggttactgagaaaacgagcagctagatcaaggttcccaac

SEQ ID NO: 6626 - DNA, 122 bp, Homo sapiens
  misc_feature (61)..(62): /note="This region represents a CpG dinucleotide"
  misc_feature (61)..(61): /note="Nucleotide may be methylated to form 5-methylcytosine"
ccttcgctctccttggccagtgtagttttccttgcccaattcggttgaatttacttcttccgtccattgttactatttgtttctttatttcccaaatccttccttaaaacttctccttttta

SEQ ID NO: 6627 - DNA, 122 bp, Homo sapiens
  misc_feature (61)..(62): /note="This region represents a CpG dinucleotide"
  misc_feature (61)..(61): /note="Nucleotide may be methylated to form 5-methylcytosine"
gggcctaatacactgttaatcctctctaggaaattgctctggctaggaattcaagtactgcgtttaatagaggtggccaggtgagcatccttgccttggtgaaaaagctttcagtttttcac

SEQ ID NO: 6628 - DNA, 122 bp, Homo sapiens
  misc_feature (61)..(62): /note="This region represents a CpG dinucleotide"
  misc_feature (61)..(61): /note="Nucleotide may be methylated to form 5-methylcytosine"
tatgggcttacagacctgagccaccgtgtccagccggttgactctctgattagcctttcacggaatatacagtttacctgtgacaaaggtagaggaatagtcacttatgcctttgtctggct

SEQ ID NO: 6629 - DNA, 122 bp, Homo sapiens
  misc_feature (61)..(62): /note="This region represents a CpG dinucleotide"
  misc_feature (61)..(61): /note="Nucleotide may be methylated to form 5-methylcytosine"
gtggactatttaaagacagaagtgcaggacttgtatcaacataactgcttccagtagatgcggcagggttcaaggagtcctgcctagtggaaacaagttcttggtctgattttaacctgcca

SEQ ID NO: 6630 - DNA, 122 bp, Homo sapiens
  misc_feature (61)..(62): /note="This region represents a CpG dinucleotide"
  misc_feature (61)..(61): /note="Nucleotide may be methylated to form 5-methylcytosine"
cagctatcctaataaattagtgctgtatgttctcacattctcagaatgctccatcctccacgttaaccacaaggtggaattaagcatcattgtatctaacaaagaaatgaattacaaggaaa

SEQ ID NO: 6631 - DNA, 122 bp, Homo sapiens
  misc_feature (61)..(62): /note="This region represents a CpG dinucleotide"
  misc_feature (61)..(61): /note="Nucleotide may be methylated to form 5-methylcytosine"
aaccaccggctggtcctgaagctagtgtatttccttttttcatttggaaaatgtggccaccgtatgaaaaccttaccttttttacattccaaacttctgccaaacctttgtatctttcacat

SEQ ID NO: 6632 - DNA, 122 bp, Homo sapiens
  misc_feature (61)..(62): /note="This region represents a CpG dinucleotide"
  misc_feature (61)..(61): /note="Nucleotide may be methylated to form 5-methylcytosine"
ttcccaaggtgtaggtgtcagacatttgtttcttcattaccgctcacttcctaaagagtacgtagattcacagctattttgcatgttttctagacggtccaaatgtcatcactatcgcctag

SEQ ID NO: 6633 - DNA, 122 bp, Homo sapiens
  misc_feature (61)..(62): /note="This region represents a CpG dinucleotide"
  misc_feature (61)..(61): /note="Nucleotide may be methylated to form 5-methylcytosine"
caaacaagttcccctctctgtcaatgctgaatgaactggttgatgaaactgtataacagccgtggcatcgtgacagtcgaggtcggcccatcttcctttatgctttagccacacacagaagt

SEQ ID NO: 6634 - DNA, 122 bp, Homo sapiens
  misc_feature (61)..(62): /note="This region represents a CpG dinucleotide"
  misc_feature (61)..(61): /note="Nucleotide may be methylated to form 5-methylcytosine"
cgcccactttgtggcctgtgccgctacctcactcgttcttatggctgagtaatattgtgtcgtatggaggggccacattgtgcttatccatccatccactgatgggcatttgggctgtttct

SEQ ID NO: 6635 - DNA, 122 bp, Homo sapiens
  misc_feature (61)..(62): /note="This region represents a CpG dinucleotide"
  misc_feature (61)..(61): /note="Nucleotide may be methylated to form 5-methylcytosine"
cttcagtgatattcacaagcgcgtgacatgatgtggcaacaaggatactctgcaatactgcgtgtcatagcagaggctgccaacaacacaagcgtccaccagaagtcagagaaaagccgcac

SEQ ID NO: 6636 - DNA, 122 bp, Homo sapiens
  misc_feature (61)..(62): /note="This region represents a CpG dinucleotide"
  misc_feature (61)..(61): /note="Nucleotide may be methylated to form 5-methylcytosine"
cgttatcttgaggcggagctgctgcctcaggctgctgttagtgacttccagaaccctgttcgtctgctggagctgctgagacacctgcagatctgtttggccacagagatttggtggatgtc

SEQ ID NO: 6637 - DNA, 122 bp, Homo sapiens
  misc_feature (61)..(62): /note="This region represents a CpG dinucleotide"
  misc_feature (61)..(61): /note="Nucleotide may be methylated to form 5-methylcytosine"
ttatagctgttgagagctgaattgccggcattgatcacaagtgagactggaaaaacaacccggggaacactcttatgttaagtcagtagcaccatctcaaacatacatccaacttctgaggg

SEQ ID NO: 6638 - DNA, 122 bp, Homo sapiens
  misc_feature (61)..(62): /note="This region represents a CpG dinucleotide"
  misc_feature (61)..(61): /note="Nucleotide may be methylated to form 5-methylcytosine"
ttggcaccctcccttctcaaaggcgtttgaaagagtgaagtctaaagcactagatgagatcgaatttttggaatagaaagaaaactttagtagtatctgctttagtattctcatgttacaga

SEQ ID NO: 6639 - DNA, 122 bp, Homo sapiens
  misc_feature (61)..(62): /note="This region represents a CpG dinucleotide"
  misc_feature (61)..(61): /note="Nucleotide may be methylated to form 5-methylcytosine"
agaaaggagcctcccaatagatatgctctgtgaaatgatcagtgctctctcattccatgccgatgaccaacacttattaaaaaacagttgatcaagtaattccagtgaaagaagaggatctc

SEQ ID NO: 6640 - DNA, 122 bp, Homo sapiens
  misc_feature (61)..(62): /note="This region represents a CpG dinucleotide"
  misc_feature (61)..(61): /note="Nucleotide may be methylated to form 5-methylcytosine"
aaacattcatataatgcatatgtacatgctctgtgccaggcagtgctcaaggtgttaggacgggaaagaacagccttgctaaaaatcactgctatcacggggagcttacattctagtagaga

SEQ ID NO: 6641 - DNA, 122 bp, Homo sapiens
  misc_feature (61)..(62): /note="This region represents a CpG dinucleotide"
  misc_feature (61)..(61): /note="Nucleotide may be methylated to form 5-methylcytosine"
tcaaatcttgaagctctgaaactacttcccttacagtaacacacttctaccaatagatgccgccctttcacttcttgagtgcacaatctcctgtgtggcatttgcttaaggcagagcttgct

SEQ ID NO: 6642 - DNA, 122 bp, Homo sapiens
  misc_feature (61)..(62): /note="This region represents a CpG dinucleotide"
  misc_feature (61)..(61): /note="Nucleotide may be methylated to form 5-methylcytosine"
ctcctcgttctactcagtttggacctgcattttggatcacaaatcccagagtctagtcaacgtactgtttagcccaagggttaagagaatggattctggagtcactgtgctggctttgcatc

SEQ ID NO: 6643 - DNA, 122 bp, Homo sapiens
  misc_feature (61)..(62): /note="This region represents a CpG dinucleotide"
  misc_feature (61)..(61): /note="Nucleotide may be methylated to form 5-methylcytosine"
catgcagcaacatcttggcttgaggcgtctggggtacagccggcagcaagagtgggcaggcgccgtgggcgtcctcaccactgcatgttcagagcccacatgcccacagaccaggctggtga

SEQ ID NO: 6644 - DNA, 122 bp, Homo sapiens
  misc_feature (61)..(62): /note="This region represents a CpG dinucleotide"
  misc_feature (61)..(61): /note="Nucleotide may be methylated to form 5-methylcytosine"
gggtgtgtgaattaacttccctcaccccagagtcctaatccaaaaaataggctcaacagccgcaccctgaagccagcagaggagctcaaaggtcaagagcaggacagaaggcagatacagag

SEQ ID NO: 6645 - DNA, 122 bp, Homo sapiens
  misc_feature (61)..(62): /note="This region represents a CpG dinucleotide"
  misc_feature (61)..(61): /note="Nucleotide may be methylated to form 5-methylcytosine"
aaatgtcgatgtagttgggtctgatgcccagcgactttgcctcgaccacatctgtgacatcgccgtccagcatgcggatgcctgaaagcacagaggaggctcggtgtcggcgcccaggctcc

SEQ ID NO: 6646 - DNA, 122 bp, Homo sapiens
  misc_feature (61)..(62): /note="This region represents a CpG dinucleotide"
  misc_feature (61)..(61): /note="Nucleotide may be methylated to form 5-methylcytosine"
aaggtttatatgttctctgtttctgatcaaggttgatcctgagatcaggagtttgggctgcgactgctgggaactagcctgagtcatacactgggccaacattccagtgttatcttcagtta

SEQ ID NO: 6647 - DNA, 122 bp, Homo sapiens
  misc_feature (61)..(62): /note="This region represents a CpG dinucleotide"
  misc_feature (61)..(61): /note="Nucleotide may be methylated to form 5-methylcytosine"
gtgatgtctcccatctgtaatatggggtcagtgatgctcagccctcctgtgtcttgagcccggatgaacttcagaggcaaagtaaacaccttaagtgcagcatattaaaacagcacttacca

SEQ ID NO: 6648 - DNA, 122 bp, Homo sapiens
  misc_feature (61)..(62): /note="This region represents a CpG dinucleotide"
  misc_feature (61)..(61): /note="Nucleotide may be methylated to form 5-methylcytosine"
cgaggtgcactccactgccccctgaaattgccatcagagcattgtttcataatctatgttcgtctgttccctctacaagcttgtgagtggcttgattttccacttccttgtgcacgggggtc

SEQ ID NO: 6649 - DNA, 122 bp, Homo sapiens
  misc_feature (61)..(62): /note="This region represents a CpG dinucleotide"
  misc_feature (61)..(61): /note="Nucleotide may be methylated to form 5-methylcytosine"
aacagcctctgtgtgagttgcaggactgaggtcctctgcaatttctcagggaaatacttccgggagacgcagtcctcagtgcctggaggtctctgggtccaggtgagtgtggtgtgagtaat

SEQ ID NO: 6650 - DNA, 122 bp, Homo sapiens
  misc_feature (61)..(62): /note="This region represents a CpG dinucleotide"
  misc_feature (61)..(61): /note="Nucleotide may be methylated to form 5-methylcytosine"
aatgtggagagcggctctccactgtttctcagatcgagcaccaactcatcaatgtctccacgccctacattcaggagtttcattacgtcatatgtgttcccaactgaatggaaagttccttg

SEQ ID NO: 6651 - DNA, 122 bp, Homo sapiens
  misc_feature (61)..(62): /note="This region represents a CpG dinucleotide"
  misc_feature (61)..(61): /note="Nucleotide may be methylated to form 5-methylcytosine"
tcttggtaaggatgactcagcaattcataaatctcaacatttacaataaacacaaacctacgtcacatgtcttttactctcaaataggtagtacagtaccaagctgcttctcaggactacat

SEQ ID NO: 6652 - DNA, 122 bp, Homo sapiens
  misc_feature (61)..(62): /note="This region represents a CpG dinucleotide"
  misc_feature (61)..(61): /note="Nucleotide may be methylated to form 5-methylcytosine"
gaccaggtgggtctgacttcatggctgtgctgattcaaatcctctgcacagctgctatgacgcaaaataataattattattatagttctgtctgggtgcggtggctcatgcctgtaacctca

SEQ ID NO: 6653 - DNA, 122 bp, Homo sapiens
  misc_feature (61)..(62): /note="This region represents a CpG dinucleotide"
  misc_feature (61)..(61): /note="Nucleotide may be methylated to form 5-methylcytosine"
gccgaagcggccttctgacacagcatgactcagcaggtttggagtgcaggcgcaaaaccccgcacgttatgtaaccatgccatgtgaggtgcattaggtgatcacccacgtaagctcatgct

SEQ ID NO: 6654 - DNA, 122 bp, Homo sapiens
  misc_feature (61)..(62): /note="This region represents a CpG dinucleotide"
  misc_feature (61)..(61): /note="Nucleotide may be methylated to form 5-methylcytosine"
ctttcaaaatgaacatatcaaacttgattttcattagaacatagttatttcttcacacaacggagtaaaaggcaagacagactcatgaagacagctttgaagcaagcacctgaaccaaactc

SEQ ID NO: 6655 - DNA, 122 bp, Homo sapiens
  misc_feature (61)..(62): /note="This region represents a CpG dinucleotide"
  misc_feature (61)..(61): /note="Nucleotide may be methylated to form 5-methylcytosine"
atagcattggtgaaacaaggcccttgcacgccttgctttagggcatcctcccccgagccacgatgatgacacacatgaggctggtgcccacactaacttagctgcctgcaggctctcccagc

SEQ ID NO: 6656 - DNA, 122 bp, Homo sapiens
  misc_feature (61)..(62): /note="This region represents a CpG dinucleotide"
  misc_feature (61)..(61): /note="Nucleotide may be methylated to form 5-methylcytosine"
tttccttccctgctctcccttttcttcctctagtttttagccagacgccaattctccaggcgctgcagcatgtccaagcgagctgtgacgaagcccacaagatgaagtgaggctcctgccac

SEQ ID NO: 6657 - DNA, 122 bp, Homo sapiens
  misc_feature (61)..(62): /note="This region represents a CpG dinucleotide"
  misc_feature (61)..(61): /note="Nucleotide may be methylated to form 5-methylcytosine"
ctgctctgcagggaacctcaggtaagactggaaaaaatatggatgtgtggatggtgctcacgtatcttctgtgagaacatatttcttgggcatcactgggtggtccattggctgctatcagg

SEQ ID NO: 6658 - DNA, 122 bp, Homo sapiens
  misc_feature (61)..(62): /note="This region represents a CpG dinucleotide"
  misc_feature (61)..(61): /note="Nucleotide may be methylated to form 5-methylcytosine"
ttttccttatgttgtctctgagagcctgacttccgttctccctgctaggctatccccaggcgtttccttccttgattcatgaactctaagatgactagatcaccaggtcggccccaagtatt

SEQ ID NO: 6659 - DNA, 122 bp, Homo sapiens
  misc_feature (61)..(62): /note="This region represents a CpG dinucleotide"
  misc_feature (61)..(61): /note="Nucleotide may be methylated to form 5-methylcytosine"
gaatggactatggcagaaatgacagtcataaaatacaccatggcttcttcttgctttcaccgtgttgggttgttggttctggaaaaagccagctgctatataggggggttctcaagaaacgc

SEQ ID NO: 6660 - DNA, 122 bp, Homo sapiens
  misc_feature (61)..(62): /note="This region represents a CpG dinucleotide"
  misc_feature (61)..(61): /note="Nucleotide may be methylated to form 5-methylcytosine"
ttattcttgccagagactctagttctattctcagaactgtgcacagagttagcccctagacgcgctgctgctgtctttagcatcatgtgctagttgggagtctgctgagaagcagatgccaa

SEQ ID NO: 6661 - DNA, 122 bp, Homo sapiens
  misc_feature (61)..(62): /note="This region represents a CpG dinucleotide"
  misc_feature (61)..(61): /note="Nucleotide may be methylated to form 5-methylcytosine"
ccctgaggccagggatgaggactcacacacacacacacacacacacactacacacgtgtgcgtgcatatgacaggtcaccaagggttatgcaaccaggcctcagagacaggaatagcctctg

SEQ ID NO: 6662 - DNA, 122 bp, Homo sapiens
  misc_feature (61)..(62): /note="This region represents a CpG dinucleotide"
  misc_feature (61)..(61): /note="Nucleotide may be methylated to form 5-methylcytosine"
gggtcacttgtgagtcacagcaagaagcagccaggtctgggacgtcttgtcagtaaaagccgctgcctgaagtcgcctccccttcttgctatctcagcgtcattcctgcctgcccttcccct

SEQ ID NO: 6663 - DNA, 122 bp, Homo sapiens
  misc_feature (61)..(62): /note="This region represents a CpG dinucleotide"
  misc_feature (61)..(61): /note="Nucleotide may be methylated to form 5-methylcytosine"
gagattgggcatagtaaatgaatacagactttgaaagcagacaaatcagttttgacccaacgtgttgccacatactagctgtgtgtccttgggcaggttacttaacctaatttacgaaatct

SEQ ID NO: 6664 - DNA, 122 bp, Homo sapiens
  misc_feature (61)..(62): /note="This region represents a CpG dinucleotide"
  misc_feature (61)..(61): /note="Nucleotide may be methylated to form 5-methylcytosine"
aaaagaaaaaaactagatagacaagacctgggccttaaagtctttctgtttcacagagcacgctgagtaatataaaactggatgatagataactaaatctctttttgtgccctattcaaaat

SEQ ID NO: 6665 - DNA, 122 bp, Homo sapiens
  misc_feature (61)..(62): /note="This region represents a CpG dinucleotide"
  misc_feature (61)..(61): /note="Nucleotide may be methylated to form 5-methylcytosine"
tggtggaccaggagtagctgtggccgtgggtagctggtggtgcccaacagctcacaccagcgtatgagggagtggcacatacacatatgtgtgggagtctggtgtgctgggtgtgcctcagt

SEQ ID NO: 6666 - DNA, 122 bp, Homo sapiens
  misc_feature (61)..(62): /note="This region represents a CpG dinucleotide"
  misc_feature (61)..(61): /note="Nucleotide may be methylated to form 5-methylcytosine"
ctaaaggttaccacaattatgactaagaatttcaaataccagattgaatatctcattctccggattatagaaaaaaaggtatgggaaaggatcttcatcatccacattctatccatatgtag

SEQ ID NO: 6667 - DNA, 122 bp, Homo sapiens
  misc_feature (61)..(62): /note="This region represents a CpG dinucleotide"
  misc_feature (61)..(61): /note="Nucleotide may be methylated to form 5-methylcytosine"
tcacagcagctctaaacatgtatgcaagtggtcattatcacaaaagtgtgtaataacactcgcagaatttactgtgttagctctggggtttttctgggagatctgcaaacttagaacaaaca

SEQ ID NO: 6668 - DNA, 122 bp, Homo sapiens
  misc_feature (61)..(62): /note="This region represents a CpG dinucleotide"
  misc_feature (61)..(61): /note="Nucleotide may be methylated to form 5-methylcytosine"
gcctcagcaaaacggaactgccaagcactggtatcagggacttgggatggcctgaaccatcgcagccctgagtcatatgacacagcagttttcttcagccctgcccgtgaggtaggagactg

SEQ ID NO: 6669 - DNA, 122 bp, Homo sapiens
  misc_feature (61)..(62): /note="This region represents a CpG dinucleotide"
  misc_feature (61)..(61): /note="Nucleotide may be methylated to form 5-methylcytosine"
gataggaagcattagaggtagtagtgggggtttgcagttttagacagggagagcagggaacgcttcactgaaaagaaaacagctgagtcaagtgaaggcctgaaggaagtgaggtgccagtc

SEQ ID NO: 6670 - DNA, 122 bp, Homo sapiens
  misc_feature (61)..(62): /note="This region represents a CpG dinucleotide"
  misc_feature (61)..(61): /note="Nucleotide may be methylated to form 5-methylcytosine"
aagtccagatgtcagagtgagggtggggttaagcacagcaaggtcagcagccatcacagacggtcatcagtgtattgatgccactcagccagtgtgccatcagcacggctccttagttcacc

SEQ ID NO: 6671 - DNA, 122 bp, Homo sapiens
  misc_feature (61)..(62): /note="This region represents a CpG dinucleotide"
  misc_feature (61)..(61): /note="Nucleotide may be methylated to form 5-methylcytosine"
tcttcccctgcgaggccgagagggtgcagagctggtggcttcaggaggtggctgtgagcgcgggtctggggccaagagcagaggacaggagaagactgccaagccaccaccggtcctgcgac

SEQ ID NO: 6672 - DNA, 122 bp, Homo sapiens
  misc_feature (61)..(62): /note="This region represents a CpG dinucleotide"
  misc_feature (61)..(61): /note="Nucleotide may be methylated to form 5-methylcytosine"
tttctcagcgagcataacaagccccctcccaagtcttttcatgaagaaatgctggaaaggcgggctcaggaggagcagcagaggctgttggaggccaagcggaaagaagagcaggaggtgag

SEQ ID NO: 6673 - DNA, 122 bp, Homo sapiens
  misc_feature (61)..(62): /note="This region represents a CpG dinucleotide"
  misc_feature (61)..(61): /note="Nucleotide may be methylated to form 5-methylcytosine"
gcctgaaatgtcctgtgcgcctttgcctttcttcatctcaaggccttgcaacatcacaagcgcagctgttaaccagatgcatgcaacataagccacagagtgtgagaaaaaaagtattagca

SEQ ID NO: 6674 - DNA, 122 bp, Homo sapiens
  misc_feature (61)..(62): /note="This region represents a CpG dinucleotide"
  misc_feature (61)..(61): /note="Nucleotide may be methylated to form 5-methylcytosine"
tatgaggctggggcatttaatggatcatccacaaggccactgaaggtactaaagatatagcgagagtaggcattgtgagtcagactgtaagccatgctctaaagcccattctcaaagtggaa

SEQ ID NO: 6675 - DNA, 122 bp, Homo sapiens
  misc_feature (61)..(62): /note="This region represents a CpG dinucleotide"
  misc_feature (61)..(61): /note="Nucleotide may be methylated to form 5-methylcytosine"
actcttttcacttctatatcacatttattcttcctttaatatgtgaccttatactggcctcgcccttcacaattcctctgtcgcttacgtattttactttctgtgggcagaacattgtttcc

SEQ ID NO: 6676 - DNA, 122 bp, Homo sapiens
  misc_feature (61)..(62): /note="This region represents a CpG dinucleotide"
  misc_feature (61)..(61): /note="Nucleotide may be methylated to form 5-methylcytosine"
ttcaacctgatcccagtgctaaattagataagtgcagccaccaggatgagcactctgcctcgtcatactcccaggacaattttgagcctccccatcagtgtcaaattacctgtattggtgct

SEQ ID NO: 6677 - DNA, 122 bp, Homo sapiens
  misc_feature (61)..(62): /note="This region represents a CpG dinucleotide"
  misc_feature (61)..(61): /note="Nucleotide may be methylated to form 5-methylcytosine"
ttgagtatgaactctaataaaaagctgactgtaatgcatagtttaaagtttaaaccttgccgagcaataacaatctctagatgtctgttgtttcactctaatacttactgtggaattacacc

SEQ ID NO: 6678 - DNA, 122 bp, Homo sapiens
  misc_feature (61)..(62): /note="This region represents a CpG dinucleotide"
  misc_feature (61)..(61): /note="Nucleotide may be methylated to form 5-methylcytosine"
gaagaaatccgtttgtttagagtgacaagaagcacaaacagggcaggtacggaatacagacgttgacatattcacactagcctttttcagaaagcagagctccattatctcaaaaagctaaa

SEQ ID NO: 6679 - DNA, 122 bp, Homo sapiens
  misc_feature (61)..(62): /note="This region represents a CpG dinucleotide"
  misc_feature (61)..(61): /note="Nucleotide may be methylated to form 5-methylcytosine"
gcaggtcggctgttgagcccctgaacaatgaggagctcacctttagagggtccagtgctccgcctgggtcacagaggctcagaattacaaaatcctctggtagctttcatggcactctcact

SEQ ID NO: 6680 - DNA, 122 bp, Homo sapiens
  misc_feature (61)..(62): /note="This region represents a CpG dinucleotide"
  misc_feature (61)..(61): /note="Nucleotide may be methylated to form 5-methylcytosine"
aggggggaccctagctggccaggtcaagagaggaggtagaggtttgggccatcatcaccacggaacttgaaggacacgtggccagccaggcctcaggagcctcttatctcccactgcagcgg

SEQ ID NO: 6681 - DNA, 122 bp, Homo sapiens
  misc_feature (61)..(62): /note="This region represents a CpG dinucleotide"
  misc_feature (61)..(61): /note="Nucleotide may be methylated to form 5-methylcytosine"
ttatgaaatttctacgggcaaagactcgaatgccctttaactgggtgcgcacatgggcatcgcatagttttccagagtaacccaagatactggggtggagagaaaaatggaaccagaagaca

SEQ ID NO: 6682 - DNA, 122 bp, Homo sapiens
  misc_feature (61)..(62): /note="This region represents a CpG dinucleotide"
  misc_feature (61)..(61): /note="Nucleotide may be methylated to form 5-methylcytosine"
ttgtaaattgaggacaagaatacccatctcatgaggctactgaaaggattaaatgtaaagcgttttgcaagtgcctcatctgtggcaagccttcatgtttgttatacagtaggtatgagata

SEQ ID NO: 6683 - DNA, 122 bp, Homo sapiens
  misc_feature (61)..(62): /note="This region represents a CpG dinucleotide"
  misc_feature (61)..(61): /note="Nucleotide may be methylated to form 5-methylcytosine"
cacgtccaagtccgcatctccagatgcagacgcggggttgggcacaggctgcagtgagcgcgcgggccaccagggggacacgcctgcgccttggcccgagctcgcggcagctgcggtcagcc

SEQ ID NO: 6684 - DNA, 122 bp, Homo sapiens
  misc_feature (61)..(62): /note="This region represents a CpG dinucleotide"
  misc_feature (61)..(61): /note="Nucleotide may be methylated to form 5-methylcytosine"
ggaggagttgttgagtcaatacttaagggctggcactgctcagattctccctgtactctgcgtctgtctctgatgttggcgatgtcacaatccccaatctttcacaacatttggacacagta

SEQ ID NO: 6685 - DNA, 122 bp, Homo sapiens
  misc_feature (61)..(62): /note="This region represents a CpG dinucleotide"
  misc_feature (61)..(61): /note="Nucleotide may be methylated to form 5-methylcytosine"
gatatgtacgctttgtgccgaacacttatgattcattcacttttgtgcatgcatgttatacgtcaataacaatattaattttttaaaaaagggccaggtgcagtggctctcacctgtaatcc

SEQ ID NO: 6686 - DNA, 122 bp, Homo sapiens
  misc_feature (61)..(62): /note="This region represents a CpG dinucleotide"
  misc_feature (61)..(61): /note="Nucleotide may be methylated to form 5-methylcytosine"
agagcaaacaaaagtcagggaggacttcctggagtagagaccatcaaagctacccaaatgcgaggccctcagggccttggaaaccaagtgcagcaatattggtatgtcattgtacatagtta

SEQ ID NO: 6687 - DNA, 122 bp, Homo sapiens
  misc_feature (61)..(62): /note="This region represents a CpG dinucleotide"
  misc_feature (61)..(61): /note="Nucleotide may be methylated to form 5-methylcytosine"
cccgaccttcctgcgccatcaacttctcaggagtggctggagaaagatgcatgtgccaagcgagacaacaaccccaggtccatgtgtccaaatccccgtagccagggcggcggccagccaaa

SEQ ID NO: 6688 - DNA, 122 bp, Homo sapiens
  misc_feature (61)..(62): /note="This region represents a CpG dinucleotide"
  misc_feature (61)..(61): /note="Nucleotide may be methylated to form 5-methylcytosine"
gataggaacactatctgacctaatggcatgaaccctttaaaatcagagttttttttccatcgctggcagaagaagaagtcatcaagattcatccttactggcctaaaagaaagcaaacatcc

SEQ ID NO: 6689 - DNA, 122 bp, Homo sapiens
  misc_feature (61)..(62): /note="This region represents a CpG dinucleotide"
  misc_feature (61)..(61): /note="Nucleotide may be methylated to form 5-methylcytosine"
cgcggtacccgcccatcttccggccaggatgtgtggtcctggtgagcgattgtcctgtggcgtccgggaccgagtttgtggcccagggttatgtgtgcacttcacacctctgacttttttca

SEQ ID NO: 6690 - DNA, 122 bp, Homo sapiens
  misc_feature (61)..(62): /note="This region represents a CpG dinucleotide"
  misc_feature (61)..(61): /note="Nucleotide may be methylated to form 5-methylcytosine"
acgttctatcccagctagggctaccagttcatgaggtacttcctgttctggggcagcctgcgtttaaacgtgggctacactgaactttggatcatagcagccagtgagcagaagcagagcct

SEQ ID NO: 6691 - DNA, 122 bp, Homo sapiens
  misc_feature (61)..(62): /note="This region represents a CpG dinucleotide"
  misc_feature (61)..(61): /note="Nucleotide may be methylated to form 5-methylcytosine"
gatgggtttaataaaaagtagagctcctgcatggcacacaccgagaggactagttggcagcgtgcagggcacctgtggctgctcctcactaaccactgtgtgtttgtctttttcagtttatt

SEQ ID NO: 6692 - DNA, 122 bp, Homo sapiens
  misc_feature (61)..(62): /note="This region represents a CpG dinucleotide"
  misc_feature (61)..(61): /note="Nucleotide may be methylated to form 5-methylcytosine"
actcccccatccctgacgcaaacctctgagcaggcttaggctaaatttcctcaagtagggcgtggagccaaggctccgatttccaagctgctgactgtccattacaggtctcccatcgacga

SEQ ID NO: 6693 - DNA, 122 bp, Homo sapiens
  misc_feature (61)..(62): /note="This region represents a CpG dinucleotide"
  misc_feature (61)..(61): /note="Nucleotide may be methylated to form 5-methylcytosine"
gctgggatcccactaacattggccaaactgctgcagacatgaagacttcatctgggaacccgaaaggagaactcaaaatccaaatcttcagactttcttaggagaagcgtggaagtgggaaa

SEQ ID NO: 6694 - DNA, 122 bp, Homo sapiens
  misc_feature (61)..(62): /note="This region represents a CpG dinucleotide"
  misc_feature (61)..(61): /note="Nucleotide may be methylated to form 5-methylcytosine"
ggcctgggatcatttccagaggcatatttctccctgcactccaatggcaacactgggtggcgtgctaaagggcctgttgaactatattaaacgcctcaagacttgaggtggagtatgttgga

SEQ ID NO: 6695 - DNA, 122 bp, Homo sapiens
  misc_feature (61)..(62): /note="This region represents a CpG dinucleotide"
  misc_feature (61)..(61): /note="Nucleotide may be methylated to form 5-methylcytosine"
ctcacaaacactccagtctcactttctgtaacctctgcataactgactggctgacattcacgtcaaagtacaccatactaagtacagggacaaacacacaaagatgcttcctcactgatagg

SEQ ID NO: 6696 - DNA, 122 bp, Homo sapiens
  misc_feature (61)..(62): /note="This region represents a CpG dinucleotide"
  misc_feature (61)..(61): /note="Nucleotide may be methylated to form 5-methylcytosine"
taaattatttttctgtacttcagctttatcaggtgaatgtcatgggagatgacaaatccccgtaagtcataggattattttgagtactaaatgaacaaactgaaaagcaactagcagaggac

SEQ ID NO: 6697 - DNA, 122 bp, Homo sapiens
  misc_feature (61)..(62): /note="This region represents a CpG dinucleotide"
  misc_feature (61)..(61): /note="Nucleotide may be methylated to form 5-methylcytosine"
tgaattgtaacaagacttgaaatacaggacttttttaatctagtggttctttatttataacgtaggctgaagcaattgttacaatgtaggagggagacacattacacaattgttatttatac

SEQ ID NO: 6698 - DNA, 122 bp, Homo sapiens
  misc_feature (61)..(62): /note="This region represents a CpG dinucleotide"
  misc_feature (61)..(61): /note="Nucleotide may be methylated to form 5-methylcytosine"
cctgttccctccagaacagtgaggagatctgttactttgaaaagatggcaaattaacactcggtctgccctgccttacaactgaaatgtttgcaacgcccgctgtgagcagatgtgctgggt

SEQ ID NO: 6699 - DNA, 122 bp, Homo sapiens
  misc_feature (61)..(62): /note="This region represents a CpG dinucleotide"
  misc_feature (61)..(61): /note="Nucleotide may be methylated to form 5-methylcytosine"
tgctctttcagggaaagaggagacaggcctagtcagctctggcagccgccaggcagggggcggacccccgacccagggggccttcttgaaactgctttattttaccccctgtttccagagcc

SEQ ID NO: 6700 - DNA, 122 bp, Homo sapiens
  misc_feature (61)..(62): /note="This region represents a CpG dinucleotide"
  misc_feature (61)..(61): /note="Nucleotide may be methylated to form 5-methylcytosine"
gaggcttcatgaaatttcaggtatgttccactgaggtactttaggactaacactgtttggcgacctgaaggtttgctctggggatttttatgccacacatagctgcatgcatgagcaactct

SEQ ID NO: 6701 - DNA, 122 bp, Homo sapiens
  misc_feature (61)..(62): /note="This region represents a CpG dinucleotide"
  misc_feature (61)..(61): /note="Nucleotide may be methylated to form 5-methylcytosine"
ctacatatgcatgtctaattccatcatttgttttattaccacagaatcttgagaaacacacgaactatttttccccaatctataaaaagggctttggatttgcaatatcaagtgcaaggaga

SEQ ID NO: 6702 - DNA, 122 bp, Homo sapiens
  misc_feature (61)..(62): /note="This region represents a CpG dinucleotide"
  misc_feature (61)..(61): /note="Nucleotide may be methylated to form 5-methylcytosine"
gcagtggaggaagacataaggccggggtgactcagggcagatcaaagctgtggggctcagcgagatgagatgaggaatgttttcctggggctgtggggccagggtggctctggaggcaagag

SEQ ID NO: 6703 - DNA, 122 bp, Homo sapiens
  misc_feature (61)..(62): /note="This region represents a CpG dinucleotide"
  misc_feature (61)..(61): /note="Nucleotide may be methylated to form 5-methylcytosine"
gcagagctgcgtggaaaggcgcggggcgcctgcgtggcgaaggaactcagctgcctgacacgcccgcaagtaccacggacctgctccggcctcggcctctgcgggccaaacgcggagcgagg

SEQ ID NO: 6704 - DNA, 122 bp, Homo sapiens
  misc_feature (61)..(62): /note="This region represents a CpG dinucleotide"
  misc_feature (61)..(61): /note="Nucleotide may be methylated to form 5-methylcytosine"
tttgtaatttcagggcttaagcactattatcctaatccaagttcacagtcctgttgttgtcgaggagggttcaaaatcatttggagataatcaagctcagacagcttaggataggtgagaag

SEQ ID NO: 6705 - DNA, 122 bp, Homo sapiens
  misc_feature (61)..(62): /note="This region represents a CpG dinucleotide"
  misc_feature (61)..(61): /note="Nucleotide may be methylated to form 5-methylcytosine"
gtgccaggctagtgcatggcaacaccaagacctggctgatggagctaggcctgttatggacgtgagggactgcctttctctttgccaaaatgaagacagcagttgaaattatttcaaacgct

SEQ ID NO: 6706 - DNA, 122 bp, Homo sapiens
  misc_feature (61)..(62): /note="This region represents a CpG dinucleotide"
  misc_feature (61)..(61): /note="Nucleotide may be methylated to form 5-methylcytosine"
ggggtttccacagcgaggagcctccaccgcttgcccacccgcacccgcgtcccagagccgcgccctagtacctgaagccagacagaccggtcagcccaaggtccgtgaggccagggtgggaa

SEQ ID NO: 6707 - DNA, 122 bp, Homo sapiens
  misc_feature (61)..(62): /note="This region represents a CpG dinucleotide"
  misc_feature (61)..(61): /note="Nucleotide may be methylated to form 5-methylcytosine"
cgtgactgggaagaaagggtaggaccatgctgtgaagagctttaggctttagatgctaagcgaaggatcctgaacttaaaagtgccagattgtgaaataaaagggaaaggagttttcctgta

SEQ ID NO: 6708 - DNA, 122 bp, Homo sapiens
  misc_feature (61)..(62): /note="This region represents a CpG dinucleotide"
  misc_feature (61)..(61): /note="Nucleotide may be methylated to form 5-methylcytosine"
tcatttttaaaatatctgaagtcctttcatattcatgacctcattcaccatcatgtgagacgggttgggtggctttgttgttgcttaagattctcagaatcctagaagctgaacttcactat

SEQ ID NO: 6709 - DNA, 122 bp, Homo sapiens
  misc_feature (61)..(62): /note="This region represents a CpG dinucleotide"
  misc_feature (61)..(61): /note="Nucleotide may be methylated to form 5-methylcytosine"
ggcagaccttggtaggtgattagatctgaaggacacaggaggaaaaaaagttagagctgacgtatttctaaagttcagagagaggcaagcagatggagtcattccaagatacaggcctctgt

SEQ ID NO: 6710 - DNA, 122 bp, Homo sapiens
  misc_feature (61)..(62): /note="This region represents a CpG dinucleotide"
  misc_feature (61)..(61): /note="Nucleotide may be methylated to form 5-methylcytosine"
tctctgaaccaaatttattttctgctttactctggattaaaggatttggcataatggctccgaaaaaccttgctgactgagtcagcaccctgtgtgcaccataaaccccctccttctgttaa

SEQ ID NO: 6711 - DNA, 122 bp, Homo sapiens
  misc_feature (61)..(62): /note="This region represents a CpG dinucleotide"
  misc_feature (61)..(61): /note="Nucleotide may be methylated to form 5-methylcytosine"
gagtttccagagaaatgaacagcagacattcacagacataagaatgttttttttttcccccgcccaaggagtgtggttagtggttgtttttaaaactgtacattttactgtacatttttttt

SEQ ID NO: 6712 - DNA, 122 bp, Homo sapiens
  misc_feature (61)..(62): /note="This region represents a CpG dinucleotide"
  misc_feature (61)..(61): /note="Nucleotide may be methylated to form 5-methylcytosine"
ttctgtgaagagctgctgatctcccaccagaagcagagtcaagtgttgtgaagcacatgtcgcagcatttttgctctcagatgatggaactgcctgtctcctaacagagctggcagggcctc

SEQ ID NO: 6713 - DNA, 122 bp, Homo sapiens
  misc_feature (61)..(62): /note="This region represents a CpG dinucleotide"
  misc_feature (61)..(61): /note="Nucleotide may be methylated to form 5-methylcytosine"
caaatctgagcttggctctcctggatggagaactacttgtcagtggtgccatctgcagggcgttaaggaatttgccaggagtttgatgggattgggaggggaatatggcatctccagataaa

SEQ ID NO: 6714 - DNA, 122 bp, Homo sapiens
  misc_feature (61)..(62): /note="This region represents a CpG dinucleotide"
  misc_feature (61)..(61): /note="Nucleotide may be methylated to form 5-methylcytosine"
aatctgtgtatgatcctatgattggaaagttttcaaagccacaaatacctgttcccctaacgttagaaaagttggtctgtttattggccctgaaggtgatccgcacaaagaaaccacttgct

SEQ ID NO: 6715 - DNA, 122 bp, Homo sapiens
  misc_feature (61)..(62): /note="This region represents a CpG dinucleotide"
  misc_feature (61)..(61): /note="Nucleotide may be methylated to form 5-methylcytosine"
agctctttgaatctcagaaaaaagtagattttaataaagtgtgaaagttgtcaatcaaagcggagtcacttgtgttcaagaaacaaaaaaacaacccgaacaaatagagtagggtttgcagt

SEQ ID NO: 6716 - DNA, 122 bp, Homo sapiens
  misc_feature (61)..(62): /note="This region represents a CpG dinucleotide"
  misc_feature (61)..(61): /note="Nucleotide may be methylated to form 5-methylcytosine"
agctcttttgctggtacttaaggagttcttgggtcactctgcaggaacactggagcccggcggccccactctctttattggcagctctggcgtccttccatcacccactgcggcgtcttggc

SEQ ID NO: 6717 - DNA, 122 bp, Homo sapiens
  misc_feature (61)..(62): /note="This region represents a CpG dinucleotide"
  misc_feature (61)..(61): /note="Nucleotide may be methylated to form 5-methylcytosine"
ggatgccggtagtgtggctcagtccacgtcagaaggcatcagaacccgggaagctgatggcgcgactcagcccgaggccacaggcgtgagacccggggctgccagtgcgagtcctagagccc

SEQ ID NO: 6718 - DNA, 122 bp, Homo sapiens
  misc_feature (61)..(62): /note="This region represents a CpG dinucleotide"
  misc_feature (61)..(61): /note="Nucleotide may be methylated to form 5-methylcytosine"
tatgagaaaactgattgagatggctttcagggaagcacataatgctcagaagcttggatacgacttagactgctgggggctaaggaaagagtgagcatcaggaaatgtttatgtttcctgaa

SEQ ID NO: 6719 - DNA, 122 bp, Homo sapiens
  misc_feature (61)..(62): /note="This region represents a CpG dinucleotide"
  misc_feature (61)..(61): /note="Nucleotide may be methylated to form 5-methylcytosine"
acaaaatcctgattgtgaatcctgcaaaccagcagcaacttatagaaggcagcagccacacggaggaaacaggaaagaaggacaggggattatttttttaaatctgatgcaacttgcattgt

SEQ ID NO: 6720 - DNA, 122 bp, Homo sapiens
  misc_feature (61)..(62): /note="This region represents a CpG dinucleotide"
  misc_feature (61)..(61): /note="Nucleotide may be methylated to form 5-methylcytosine"
ctgaagcagagacatccaaggagggccctagacgtggatgtttcctattgtactttcttccgcgttgtcttctcagtagttcttttcctggcatcacaacttctgtttttatagtatatctg

SEQ ID NO: 6721 - DNA, 122 bp, Homo sapiens
  misc_feature (61)..(62): /note="This region represents a CpG dinucleotide"
  misc_feature (61)..(61): /note="Nucleotide may be methylated to form 5-methylcytosine"
tcataaaatattgctgagtccatagcaacaatttgtcctataacagccctgattatgaaccgtgcactagtcaatgaaacgatagcatgtcttcagtgatttgttgtttttgaatgtacaaa

SEQ ID NO: 6722 - DNA, 122 bp, Homo sapiens
  misc_feature (61)..(62): /note="This region represents a CpG dinucleotide"
  misc_feature (61)..(61): /note="Nucleotide may be methylated to form 5-methylcytosine"
ggacacaaagacggggtctcttcctcctcggtgaaatcctagatgggatttcctgctgcccgcccggacgatgagcggatccccaacatggctccaaggccagtgtctcccgctcccgtccc

SEQ ID NO: 6723 - DNA, 122 bp, Homo sapiens
  misc_feature (61)..(62): /note="This region represents a CpG dinucleotide"
  misc_feature (61)..(61): /note="Nucleotide may be methylated to form 5-methylcytosine"
ctgagtcaggaatagagaagctggccccagggcagccatgcaggagcttgtcagacatggcggggggttgggcctttattctgagagtaataagaagtcactgaagaatttcaggcagagga

SEQ ID NO: 6724 - DNA, 122 bp, Homo sapiens
  misc_feature (61)..(62): /note="This region represents a CpG dinucleotide"
  misc_feature (61)..(61): /note="Nucleotide may be methylated to form 5-methylcytosine"
accttcataattctggctttgagccaactctgtccttaactacttaatgggccttctaggcgctttccttcttcaactatccctcctaaaatatgcattaaagtttatttttaacagtcctt

SEQ ID NO: 6725 - DNA, 122 bp, Homo sapiens
  misc_feature (61)..(62): /note="This region represents a CpG dinucleotide"
  misc_feature (61)..(61): /note="Nucleotide may be methylated to form 5-methylcytosine"
ctggttggaggagtttttggccagctctgacccccttgcctctggaaaggcagagtcctccgagtcccccatggcttccgctctcctggccaggacaaggacaggcctggccggatcctgtg

SEQ ID NO: 6726 - DNA, 122 bp, Homo sapiens
  misc_feature (61)..(62): /note="This region represents a CpG dinucleotide"
  misc_feature (61)..(61): /note="Nucleotide may be methylated to form 5-methylcytosine"
tggacctgatgtcacatgctgattcagaccctagctctcgggccctacctacttcctgaacgggaacatggcttagagaagcacatggcattgggcctcgcccatgcaaccagccacacaca

SEQ ID NO: 6727 - DNA, 122 bp, Homo sapiens
  misc_feature (61)..(62): /note="This region represents a CpG dinucleotide"
  misc_feature (61)..(61): /note="Nucleotide may be methylated to form 5-methylcytosine"
ccaggcacaaggcctgtgtcacctccatctcagacctagagggaggagaatatctggccccgtttcctgtgatttcctcaggccccctgccagagtgtgattagtaaatgcaagtcaggctg

SEQ ID NO: 6728 - DNA, 122 bp, Homo sapiens
  misc_feature (61)..(62): /note="This region represents a CpG dinucleotide"
  misc_feature (61)..(61): /note="Nucleotide may be methylated to form 5-methylcytosine"
ggtaggatgaggggtatctgtaggatgctgttcccccttggggtgggggggcttctccaacgagcactcagccccagtacagaaacagggacacagtgtgtccatcagctccttggagtctg

SEQ ID NO: 6729 - DNA, 122 bp, Homo sapiens
  misc_feature (61)..(62): /note="This region represents a CpG dinucleotide"
  misc_feature (61)..(61): /note="Nucleotide may be methylated to form 5-methylcytosine"
cctttgtttgccagggctcctttcttcgtgccctccgggtcttgggagcacagtagttatcgggagcgtcgcctccggcgtgggctctcgggcgcgagtttcggacgaggcctgggcgcggt

SEQ ID NO: 6730 - DNA, 122 bp, Homo sapiens
  misc_feature (61)..(62): /note="This region represents a CpG dinucleotide"
  misc_feature (61)..(61): /note="Nucleotide may be methylated to form 5-methylcytosine"
tccctttatcgactgaactgctcttaggagggagctgtgccgggaagtcaagcttaccagcgtcaaagctctagcagctaaaacagtgcaccccctgctcgtcgaaaatgactcctgatctt

SEQ ID NO: 6731 - DNA, 122 bp, Homo sapiens
  misc_feature (61)..(62): /note="This region represents a CpG dinucleotide"
  misc_feature (61)..(61): /note="Nucleotide may be methylated to form 5-methylcytosine"
cactgagacctaataaaaacaaccaaaaggaactgcccagcagagaggaagagactcagacgcagcagttttggccgcgtaactgattgactaagcaacctgaagcctgtcatgaatcggtg

SEQ ID NO: 6732 - DNA, 122 bp, Homo sapiens
  misc_feature (61)..(62): /note="This region represents a CpG dinucleotide"
  misc_feature (61)..(61): /note="Nucleotide may be methylated to form 5-methylcytosine"
gaacgtatccaagcaccaaggcttccgcctgccggaaagaacaatgagcttaattgtgttcgcttaccaaactcgcccccgctcacggcgattttagaggaattctgaaatggtcgcttcat

SEQ ID NO: 6733 - DNA, 122 bp, Homo sapiens
  misc_feature (61)..(62): /note="This region represents a CpG dinucleotide"
  misc_feature (61)..(61): /note="Nucleotide may be methylated to form 5-methylcytosine"
agtgtagtggctcaccctataatcccagcactttggaagaaggccaagataggtggattgcgtgaacccagcagttcaagatcagactgggcaacatggtgataccccgtctctaaacaaaa

SEQ ID NO: 6734 - DNA, 122 bp, Homo sapiens
  misc_feature (61)..(62): /note="This region represents a CpG dinucleotide"
  misc_feature (61)..(61): /note="Nucleotide may be methylated to form 5-methylcytosine"
gcgcgctgctgcctgcagtccgccgggcctgagcacacccgaggctcccacctgcggagccgctgggggacctcacgtcccagccaggatccccctggaagaaaaagggcgtccccacactc

SEQ ID NO: 6735 - DNA, 122 bp, Homo sapiens
  misc_feature (61)..(62): /note="This region represents a CpG dinucleotide"
  misc_feature (61)..(61): /note="Nucleotide may be methylated to form 5-methylcytosine"
acccaaacctctgtcatcgtcaagagatggaaagatgaggaaatcatgagcaagaacacacgtctttctagccagtcagatgcctggttctatcagtccctgtgtccttggctgtcagtccc

SEQ ID NO: 6736 - DNA, 122 bp, Homo sapiens
  misc_feature (61)..(62): /note="This region represents a CpG dinucleotide"
  misc_feature (61)..(61): /note="Nucleotide may be methylated to form 5-methylcytosine"
atgagctaatcagggctgagccaaatgacacatgtaaacagatgagccgtccggggatgccgccttgtcctgcttttatcttacacaaacacctccacactggacttagaaggcttttggca

SEQ ID NO: 6737 - DNA, 122 bp, Homo sapiens
  misc_feature (61)..(62): /note="This region represents a CpG dinucleotide"
  misc_feature (61)..(61): /note="Nucleotide may be methylated to form 5-methylcytosine"
ggaagaaaaggaagcagagtgccaagccccacagggagtggttttgtcagttgctttcaccgcaggctctgaggaggggaaggaatcccaggatgaggccctcaggagcttttatttattta

SEQ ID NO: 6738 - DNA, 122 bp, Homo sapiens
  misc_feature (61)..(62): /note="This region represents a CpG dinucleotide"
  misc_feature (61)..(61): /note="Nucleotide may be methylated to form 5-methylcytosine"
ccagagtgaaatcaagtaagcagtccatttctctcttattcccttctgtttgcattatctcgactatcttagttcaggcccttttttgtagactattgacagaaggtaactcaaaaagcatg

SEQ ID NO: 6739 - DNA, 122 bp, Homo sapiens
  misc_feature (61)..(62): /note="This region represents a CpG dinucleotide"
  misc_feature (61)..(61): /note="Nucleotide may be methylated to form 5-methylcytosine"
ctcctccttcgtgtgagcaaagcgccgcgcctccctcagggcggaacggaggcaactttccggagtctatttttgttaagacaatcaactccaataactgagctgaagtttttgtttaaaaa

SEQ ID NO: 6740 - DNA, 122 bp, Homo sapiens
  misc_feature (61)..(62): /note="This region represents a CpG dinucleotide"
  misc_feature (61)..(61): /note="Nucleotide may be methylated to form 5-methylcytosine"
tgtgagagttttaagaggtggggcctttgaaaagtgactaagacatgagggcactgcctccgtgagagggattcatgccttcccttataaaagaggtggaaagggccgggcacagtggctca

SEQ ID NO: 6741 - DNA, 122 bp, Homo sapiens
  misc_feature (61)..(62): /note="This region represents a CpG dinucleotide"
  misc_feature (61)..(61): /note="Nucleotide may be methylated to form 5-methylcytosine"
ttggaactcatctaagtcaaagacaacaacaccctctgagatgctactgacctcatgccacgtaactattctgtggctgccaggaggaaccgcccactcgctcttcttgggtttactcctaa

SEQ ID NO: 6742 - DNA, 122 bp, Homo sapiens
  misc_feature (61)..(62): /note="This region represents a CpG dinucleotide"
  misc_feature (61)..(61): /note="Nucleotide may be methylated to form 5-methylcytosine"
caagtgcacggggcacagcggagtctgtcctgtgacgcgcaagtctgagggtctgggcggcgggcggctgggtctgtgcatttctggttgcaccgcggcgcttcccagcaccaacatgtaac

SEQ ID NO: 6743 - DNA, 122 bp, Homo sapiens
  misc_feature (61)..(62): /note="This region represents a CpG dinucleotide"
  misc_feature (61)..(61): /note="Nucleotide may be methylated to form 5-methylcytosine"
gcccctgctccatttgctttctttagcgtctcctagaacaaacactggtccaggtgcaaacgctcaattcacaaggaatgcagagaacacagaaatgactccaggctgggctgctggtaatc

SEQ ID NO: 6744 - DNA, 122 bp, Homo sapiens
  misc_feature (61)..(62): /note="This region represents a CpG dinucleotide"
  misc_feature (61)..(61): /note="Nucleotide may be methylated to form 5-methylcytosine"
gcgtgaatcactgaacccaggcccatccttgggaccccagccctggccagccggcatcaccgcctggactcagcagcttctgccaagccaccacctgctcccaattagcccctgggccctaa

SEQ ID NO: 6745 - DNA, 122 bp, Homo sapiens
  misc_feature (61)..(62): /note="This region represents a CpG dinucleotide"
  misc_feature (61)..(61): /note="Nucleotide may be methylated to form 5-methylcytosine"
ttctgctgacacctcgattttaggccagtgagacctgcttcagacttctgacctacagaacggtaagaaaataaatttgtgttgcttatagccatgctgtgtgtggtagtttgttacagcag

SEQ ID NO: 6746 - DNA, 122 bp, Homo sapiens
  misc_feature (61)..(62): /note="This region represents a CpG dinucleotide"
  misc_feature (61)..(61): /note="Nucleotide may be methylated to form 5-methylcytosine"
aagttgttgattattaaacatcaggaagatattttgactagaggaagtaaatgttttaagcggttcattgaaaggacatttcaatgattaacaggaactgtgctacaccagttaggcttaat

SEQ ID NO: 6747 - DNA, 122 bp, Homo sapiens
  misc_feature (61)..(62): /note="This region represents a CpG dinucleotide"
  misc_feature (61)..(61): /note="Nucleotide may be methylated to form 5-methylcytosine"
ctccagcctgcggtttcatgggaaacctgatcttgccgtgttctcagggacctgggcttccgtctggcctcacctttctctttatggaaaaaatccccgggttgattgtttcccatggccag

SEQ ID NO: 6748 - DNA, 122 bp, Homo sapiens
  misc_feature (61)..(62): /note="This region represents a CpG dinucleotide"
  misc_feature (61)..(61): /note="Nucleotide may be methylated to form 5-methylcytosine"
gtagccagagctcttggagatgtgaatgccagcagtctcaggatgcattccacagcattccgttgcacagaaagttttggcccctttggtagagaataagctcaaaaggacaaaagtagaag

SEQ ID NO: 6749 - DNA, 122 bp, Homo sapiens
  misc_feature (61)..(62): /note="This region represents a CpG dinucleotide"
  misc_feature (61)..(61): /note="Nucleotide may be methylated to form 5-methylcytosine"
gcttttcttttcaatgctagaacctaaccatggaaagtggaattgaaaacaattacacagcgaattggcttatgcgtggacttcgatctgggatccacgaacatacctaatgcttggcaaaa

SEQ ID NO: 6750 - DNA, 122 bp, Homo sapiens
  misc_feature (61)..(62): /note="This region represents a CpG dinucleotide"
  misc_feature (61)..(61): /note="Nucleotide may be methylated to form 5-methylcytosine"
ggtttcccactgtgcctgcagcgccacggagtgcagtttcgtggaggctactgcagatggcggagagggaggggtcattgattattcattcatgtattcaacaagcacacactgagccctat

SEQ ID NO: 6751 - DNA, 122 bp, Homo sapiens
  misc_feature (61)..(62): /note="This region represents a CpG dinucleotide"
  misc_feature (61)..(61): /note="Nucleotide may be methylated to form 5-methylcytosine"
ctgaggacaccacatctgacacatagcagacagcaccacagcacagccctccaccagaggcgtctgcattaccggagcagcagcacagctactgagagtgtgccacaaccaggctccatgcc

SEQ ID NO: 6752 - DNA, 122 bp, Homo sapiens
  misc_feature (61)..(62): /note="This region represents a CpG dinucleotide"
  misc_feature (61)..(61): /note="Nucleotide may be methylated to form 5-methylcytosine"
agtacaagtaaatagggctttgagttatgaactctgaaaagacaaacataaagttaatcccgttatctgagaaacatatttaccttgcaggaacatagtactttctatatcataatcttgat

SEQ ID NO: 6753 - DNA, 122 bp, Homo sapiens
  misc_feature (61)..(62): /note="This region represents a CpG dinucleotide"
  misc_feature (61)..(61): /note="Nucleotide may be methylated to form 5-methylcytosine"
ggtaatgtgtgttggcaccatgcctggcactagcaggtgctgtggaggtactgctgtcatcgttgccaccatcctcaggagggttgagttggcaccgagataaacatggaagataatacgca

SEQ ID NO: 6754 - DNA, 122 bp, Homo sapiens
  misc_feature (61)..(62): /note="This region represents a CpG dinucleotide"
  misc_feature (61)..(61): /note="Nucleotide may be methylated to form 5-methylcytosine"
ttggggagatctgtgtcagatttgctcaattttagctgtggctttgactcacacaaataccgtatgttttagttgatttcaaactctgcctacagattaagagctcagggctaatgaaagcc

SEQ ID NO: 6755 - DNA, 122 bp, Homo sapiens
  misc_feature (61)..(62): /note="This region represents a CpG dinucleotide"
  misc_feature (61)..(61): /note="Nucleotide may be methylated to form 5-methylcytosine"
ctcttccgatagttctggcagagacggctgcggggagacacgggcggaggcgggtccgggcgggccccacgtcgcgcagcctcagcgtgttgcgcctcccgcggctgcggccagagacttcc

SEQ ID NO: 6756 - DNA, 122 bp, Homo sapiens
  misc_feature (61)..(62): /note="This region represents a CpG dinucleotide"
  misc_feature (61)..(61): /note="Nucleotide may be methylated to form 5-methylcytosine"
agtggtggagcctgtgcagcggggtctttgttcacgggctaatgcttctcctaagcacctcgtgtgtgttcttcggcctcactgctctgtggcttaggtatctgtgctgtggggtttgagaa

SEQ ID NO: 6757 - DNA, 122 bp, Homo sapiens
  misc_feature (61)..(62): /note="This region represents a CpG dinucleotide"
  misc_feature (61)..(61): /note="Nucleotide may be methylated to form 5-methylcytosine"
cagacaaaatgtgcagctcatccaaaatagctgagtagttggcaagaaccaagcctgaagcgcagctgtcctttctaactgaaacctaaaattgttgggctcttaattaatgttggaaggct

SEQ ID NO: 6758 - DNA, 122 bp, Homo sapiens
  misc_feature (61)..(62): /note="This region represents a CpG dinucleotide"
  misc_feature (61)..(61): /note="Nucleotide may be methylated to form 5-methylcytosine"
aggatgacttcctctctacatttaattatgtgactcacttccagtctcagaagcctaatccgttccagggagagcttgacgagaataaagcagtcatcaggaagaaacacttcttcaatata

SEQ ID NO: 6759 - DNA, 122 bp, Homo sapiens
  misc_feature (61)..(62): /note="This region represents a CpG dinucleotide"
  misc_feature (61)..(61): /note="Nucleotide may be methylated to form 5-methylcytosine"
caacgacataaacgaagtcacttcctggattggctttcctaatggcctggagcatctgctcgtcctctaggcaccgggcactgaagccggacaggggctggctgctccggcagatggaggcc

SEQ ID NO: 6760 - DNA, 122 bp, Homo sapiens
  misc_feature (61)..(62): /note="This region represents a CpG dinucleotide"
  misc_feature (61)..(61): /note="Nucleotide may be methylated to form 5-methylcytosine"
gtttctaagattatgtatcttgcacgtttggcacttgagggggtgctcatcttttgattccgctattgaggtagaggcgggacgggggaagcagctttcagtaagacccgcccgctcttgcc

SEQ ID NO: 6761 - DNA, 122 bp, Homo sapiens
  misc_feature (61)..(62): /note="This region represents a CpG dinucleotide"
  misc_feature (61)..(61): /note="Nucleotide may be methylated to form 5-methylcytosine"
tctataagcaaaataagatatttttaaaatttaagaatacttggctatggtctcaaaaaacgtgactcatcttgaaagaagttgggaattgttatttttgttgcttatgacagaaaaaaaca

SEQ ID NO: 6762 - DNA, 122 bp, Homo sapiens
  misc_feature (61)..(62): /note="This region represents a CpG dinucleotide"
  misc_feature (61)..(61): /note="Nucleotide may be methylated to form 5-methylcytosine"
tcaccgttggttggatcaacatggctccagccccagcctgtggttatcagtgacataagacgcttattctggcctgggcctggtggggggtgagggggaggcacatttgtttgggtggttgg

SEQ ID NO: 6763 - DNA, 122 bp, Homo sapiens
  misc_feature (61)..(62): /note="This region represents a CpG dinucleotide"
  misc_feature (61)..(61): /note="Nucleotide may be methylated to form 5-methylcytosine"
ttccagcccctgccaggattctttctgggtacttggtgaccctggctggagtgtggcaatcgtgggtggacctgggaccacagatgtgactggtgtgaggaagggccattaggggcagagtc

SEQ ID NO: 6764 - DNA, 122 bp, Homo sapiens
  misc_feature (61)..(62): /note="This region represents a CpG dinucleotide"
  misc_feature (61)..(61): /note="Nucleotide may be methylated to form 5-methylcytosine"
attgagagaccgggctacacacgtgtggatgtcccccgtgcatacacacaagcacccatccgataggctgggatccagctgcaagtttggacactgacaagtctcaagtctaacaggaaata

SEQ ID NO: 6765 - DNA, 122 bp, Homo sapiens
  misc_feature (61)..(62): /note="This region represents a CpG dinucleotide"
  misc_feature (61)..(61): /note="Nucleotide may be methylated to form 5-methylcytosine"
gccgggccgcgggagctgggccggggcctgcacaaggcggcgtctgtggagctgccgcagcgccggagccccagcccgggagccacccgcctggcccggggaggcctgggtgagggcgagta

SEQ ID NO: 6766 - DNA, 122 bp, Homo sapiens
  misc_feature (61)..(62): /note="This region represents a CpG dinucleotide"
  misc_feature (61)..(61): /note="Nucleotide may be methylated to form 5-methylcytosine"
agctgcctctcttttgcaatttttatatgacacaactactaaagcatagctttacccttccgtcttctaacctgattttctgctattcattgaaaacgttcaattttcccatcagccatgag

SEQ ID NO: 6767 - DNA, 122 bp, Homo sapiens
  misc_feature (61)..(62): /note="This region represents a CpG dinucleotide"
  misc_feature (61)..(61): /note="Nucleotide may be methylated to form 5-methylcytosine"
gattcctttaaattacccaacctctcttgcttcattcaaacatgtgcagcttcaagtgggcgtctactgcattagattagataagtcacaagggcagagtctctggactgcaggcgttgctt

SEQ ID NO: 6768 - DNA, 122 bp, Homo sapiens
  misc_feature (61)..(62): /note="This region represents a CpG dinucleotide"
  misc_feature (61)..(61): /note="Nucleotide may be methylated to form 5-methylcytosine"
agcagttgtggaacttctagggttgtatttaaaggcccatgcaggaacagggtgagcagtcgtgactgcggctgtgtggtaaaataaggatgggagcgggaaatggggcaggagaagtaaat

SEQ ID NO: 6769 - DNA, 122 bp, Homo sapiens
  misc_feature (61)..(62): /note="This region represents a CpG dinucleotide"
  misc_feature (61)..(61): /note="Nucleotide may be methylated to form 5-methylcytosine"
ccatgcacaaagaaacagaaagcagaacctgttggcactttcgcacatctcctgtttgtccgccagactagctacagtattttgtactcaatgatgtgacttaagtatcagtaatgattact

SEQ ID NO: 6770 - DNA, 122 bp, Homo sapiens
  misc_feature (61)..(62): /note="This region represents a CpG dinucleotide"
  misc_feature (61)..(61): /note="Nucleotide may be methylated to form 5-methylcytosine"
tagtgcttttttttatggcctctctcattcatggatataatcccacagaggcaggattttcgtttacaattaatgaatgaaacaaacagatcaatgttaaagaaagagcagtagctcacacc

SEQ ID NO: 6771 - DNA, 122 bp, Homo sapiens
  misc_feature (61)..(62): /note="This region represents a CpG dinucleotide"
  misc_feature (61)..(61): /note="Nucleotide may be methylated to form 5-methylcytosine"
gctcaggggcccttcacacacatacctttgggaccaacgctgtttcgtctgcagcaatggcgtgcctggctttcatgcttgtggtttgtaccatagttgtgatgttgtctagaattcccatg

SEQ ID NO: 6772 - DNA, 122 bp, Homo sapiens
  misc_feature (61)..(62): /note="This region represents a CpG dinucleotide"
  misc_feature (61)..(61): /note="Nucleotide may be methylated to form 5-methylcytosine"
ggctgagtaggtggggcttagttaacactgccctggagctcattgagcatttcctgggttcggcaggcaggaagcaccagcgtgttctggatgaaaatagttcctgcctgctggctctccac

SEQ ID NO: 6773 - DNA, 122 bp, Homo sapiens
  misc_feature (61)..(62): /note="This region represents a CpG dinucleotide"
  misc_feature (61)..(61): /note="Nucleotide may be methylated to form 5-methylcytosine"
catacctgcctgcaagagctgacgggtatgtctcttcccaaccagcattcagtgagctcacgtaggtagcttgaaatcagccatggtgggagtatttacaccgcagaaataagcagcactat

SEQ ID NO: 6774 - DNA, 122 bp, Homo sapiens
  misc_feature (61)..(62): /note="This region represents a CpG dinucleotide"
  misc_feature (61)..(61): /note="Nucleotide may be methylated to form 5-methylcytosine"
agcaaatcaagacctttgtttatttccacatacctgtacacacatgggtatgtgcatacacgcacacacagagcttcaaggagccagctttaagaaaatgcctgcctaaaacacccccactt

SEQ ID NO: 6775 - DNA, 122 bp, Homo sapiens
  misc_feature (61)..(62): /note="This region represents a CpG dinucleotide"
  misc_feature (61)..(61): /note="Nucleotide may be methylated to form 5-methylcytosine"
gacggacctcatggccttcagcccctgccttcctcctgatctgggatcagttgatgtaggcgaagagcaagatttaaatgttgatcatggcctcaaagtaagtccatttaaatttagaactc

SEQ ID NO: 6776 - DNA, 122 bp, Homo sapiens
  misc_feature (61)..(62): /note="This region represents a CpG dinucleotide"
  misc_feature (61)..(61): /note="Nucleotide may be methylated to form 5-methylcytosine"
cttgtggctgcttctgcagataagctgttcggtgacctccatatttctaaatactgtggccgtattgctgtttcggtttttcagtttcaggtattatctagtgactttctgatagggaagtg

SEQ ID NO: 6777 - DNA, 122 bp, Homo sapiens
  misc_feature (61)..(62): /note="This region represents a CpG dinucleotide"
  misc_feature (61)..(61): /note="Nucleotide may be methylated to form 5-methylcytosine"
tcagagtaagtggtcctctgtcatgatgggcacatagcttgtcttgctagtgaaggatctcgtcaaaaagttagtttagagagctttctctgggacatggtaaaagacaacctggaatgaag

SEQ ID NO: 6778 - DNA, 122 bp, Homo sapiens
  misc_feature (61)..(62): /note="This region represents a CpG dinucleotide"
  misc_feature (61)..(61): /note="Nucleotide may be methylated to form 5-methylcytosine"
agccggctagcccctgtaacagggggtgcgcactgcacttggcgagcattgagggagggacgtgggaggaggagatgtaggttgtgggcaaaaccacagtggtttccaggatgttgagtctg

SEQ ID NO: 6779 - DNA, 122 bp, Homo sapiens
  misc_feature (61)..(62): /note="This region represents a CpG dinucleotide"
  misc_feature (61)..(61): /note="Nucleotide may be methylated to form 5-methylcytosine"
agccccaggctcccaggcctcacccacaagattccctgcgtgctccttgattaccacccccggccccagcacactcttaactttcagaaaatggctttgtgacaatccaggcgcatctgatc

SEQ ID NO: 6780 - DNA, 122 bp, Homo sapiens
  misc_feature (61)..(62): /note="This region represents a CpG dinucleotide"
  misc_feature (61)..(61): /note="Nucleotide may be methylated to form 5-methylcytosine"
aaacagaggtacacagatctagtgacacctccccaagtaatatactggaaggatttagggcggcaaactgtttggaaagaagagactttttgtagtcttttaggaaaaattgagaaaatgtt

SEQ ID NO: 6781 - DNA, 122 bp, Homo sapiens
  misc_feature (61)..(62): /note="This region represents a CpG dinucleotide"
  misc_feature (61)..(61): /note="Nucleotide may be methylated to form 5-methylcytosine"
atcttgtctgccagcacccttttcttcctttgttccttttcctctctgtgttattgcctgcggcagccagtccttcatactagatagagttcagataaagcaaacgtttggcaaaaacatac

SEQ ID NO: 6782 - DNA, 122 bp, Homo sapiens
  misc_feature (61)..(62): /note="This region represents a CpG dinucleotide"
  misc_feature (61)..(61): /note="Nucleotide may be methylated to form 5-methylcytosine"
agaggaggggacttgtgggcaggatcaggagggaggacaatggggagcataggttgaaggcggatcagacaggaagcagctgcctacctattccagctgatggatgtgccctgcgagttcta

SEQ ID NO: 6783 - DNA, 122 bp, Homo sapiens
  misc_feature (61)..(62): /note="This region represents a CpG dinucleotide"
  misc_feature (61)..(61): /note="Nucleotide may be methylated to form 5-methylcytosine"
cagaaaacttaccacaggcttactctcctgcagccctacaggaaattattgcaaagaatacgcattagcagccaacacacggaattggactagagaactggctggtgtgcaagcggaatgga

SEQ ID NO: 6784 - DNA, 122 bp, Homo sapiens
  misc_feature (61)..(62): /note="This region represents a CpG dinucleotide"
  misc_feature (61)..(61): /note="Nucleotide may be methylated to form 5-methylcytosine"
tcccttgccagcttccctggtgaccagccaggacccaaatcacctgggtcccctcccctacgccctcctgcaaagaggaagtgctcatgaacttcggccctgccagggccttatcagagccc

SEQ ID NO: 6785 - DNA, 122 bp, Homo sapiens
  misc_feature (61)..(62): /note="This region represents a CpG dinucleotide"
  misc_feature (61)..(61): /note="Nucleotide may be methylated to form 5-methylcytosine"
gagtttccgttttctatcctccaaccagaaagctggggctcaaatcaaagcaaagagcaacgattgacttcaccctcttgaattttgatgcagtgggtagggacttcaccagaccactggat

SEQ ID NO: 6786 - DNA, 122 bp, Homo sapiens
  misc_feature (61)..(62): /note="This region represents a CpG dinucleotide"
  misc_feature (61)..(61): /note="Nucleotide may be methylated to form 5-methylcytosine"
ttcctgcctgcagacctggcctgctgcttctttctccttcctccctccctgcctgccctgcggtttcaaagtagattagaaataacagtgtcccacatggaagcctctacttcttcctgggt

SEQ ID NO: 6787 - DNA, 122 bp, Homo sapiens
  misc_feature (61)..(62): /note="This region represents a CpG dinucleotide"
  misc_feature (61)..(61): /note="Nucleotide may be methylated to form 5-methylcytosine"
gccagccaggcccaggcaaggcgctctgtgccacctcgcccttccagggcagttaggcttcgcagagcatgcttccggtcctctctcccctgctctccaccccagctccctgtcatgcattc

SEQ ID NO: 6788 - DNA, 122 bp, Homo sapiens
  misc_feature (61)..(62): /note="This region represents a CpG dinucleotide"
  misc_feature (61)..(61): /note="Nucleotide may be methylated to form 5-methylcytosine"
aaagaagaaacactggagctgggggcggagactacgaggtgctcactgcgcatgtgcgcgcgctaggtcagcttctcggttccagccgggcgggggggtcgggtgggggtgggggtaggggt

SEQ ID NO: 6789 - DNA, 122 bp, Homo sapiens
  misc_feature (61)..(62): /note="This region represents a CpG dinucleotide"
  misc_feature (61)..(61): /note="Nucleotide may be methylated to form 5-methylcytosine"
agagttccgtcggccaaaaccacttgaaactcgctcagcggcgtcggggctccagccaggcgtcaccttccacagcgaacctgcgaaccacagcgtcccctgggggtctccgtccgcgtggc

SEQ ID NO: 6790 - DNA, 122 bp, Homo sapiens
  misc_feature (61)..(62): /note="This region represents a CpG dinucleotide"
  misc_feature (61)..(61): /note="Nucleotide may be methylated to form 5-methylcytosine"
gcaacaaacgaaagtgaaagcaactgagccaactaaaagagtcctctcggatctagtgcccgtgattcatgctctgacccatttccatttcagattccaaaccctaggttacactcaaggct

SEQ ID NO: 6791 - DNA, 122 bp, Homo sapiens
  misc_feature (61)..(62): /note="This region represents a CpG dinucleotide"
  misc_feature (61)..(61): /note="Nucleotide may be methylated to form 5-methylcytosine"
caggctcaaccaacacatagagggatttcagtggggcccaataaccctccagaaattattcgcaaaatgttatatctatgagcatatgtacattttttgagggaggagttccaaaacatgaa

SEQ ID NO: 6792 - DNA, 122 bp, Homo sapiens
  misc_feature (61)..(62): /note="This region represents a CpG dinucleotide"
  misc_feature (61)..(61): /note="Nucleotide may be methylated to form 5-methylcytosine"
tacaaaatataagaccctgcaatgtgatatcatacattgttttatggatacattgaaatgcgatacaaacataaaaagctgcatgaaatgaaacccacccaaatcaggatagtggctgtctc

SEQ ID NO: 6793 - DNA, 122 bp, Homo sapiens
  misc_feature (61)..(62): /note="This region represents a CpG dinucleotide"
  misc_feature (61)..(61): /note="Nucleotide may be methylated to form 5-methylcytosine"
atttgcggctgactaaggctggaaaacgggctgccagaacccaagaggggaggatgaaagcgaaggtgacacaggatgtggcttggcagagaggcgtgcacacagaagtagtgggcagctgg

SEQ ID NO: 6794 - DNA, 122 bp, Homo sapiens
  misc_feature (61)..(62): /note="This region represents a CpG dinucleotide"
  misc_feature (61)..(61): /note="Nucleotide may be methylated to form 5-methylcytosine"
atttactaccactcctgcctgtaggctgacagctgtttgtgggcagggacacatcctcagcgccagctcaaagccagccctatgccctcagggatcttagtgggactgaagcccttggtggc

SEQ ID NO: 6795 - DNA, 122 bp, Homo sapiens
  misc_feature (61)..(62): /note="This region represents a CpG dinucleotide"
  misc_feature (61)..(61): /note="Nucleotide may be methylated to form 5-methylcytosine"
taatcataatattattgttacttagacctttggcttggggaggctggatttacaaacctacgattcaccaagagtcttagcagtctgagaggtcgccttctgttaaaaggtggctgctgtag

SEQ ID NO: 6796 - DNA, 122 bp, Homo sapiens
  misc_feature (61)..(62): /note="This region represents a CpG dinucleotide"
  misc_feature (61)..(61): /note="Nucleotide may be methylated to form 5-methylcytosine"
tccaaatgcaggtctctgggttggaagctgtaactatttctgggcttattctctcagaggcgtgccccaaccctagcagcagaaaacactgacagtggaaatataggacatgtctcttctaa

SEQ ID NO: 6797 - DNA, 122 bp, Homo sapiens
  misc_feature (61)..(62): /note="This region represents a CpG dinucleotide"
  misc_feature (61)..(61): /note="Nucleotide may be methylated to form 5-methylcytosine"
gagtccccagaggcaacaggggtacctgagcgccgaggggatcccgagactcggagaaaccggaagagcctgaccccagggagcggagagtttggggtgcgctctcagagctgtgactccac

SEQ ID NO: 6798 - DNA, 122 bp, Homo sapiens
  misc_feature (61)..(62): /note="This region represents a CpG dinucleotide"
  misc_feature (61)..(61): /note="Nucleotide may be methylated to form 5-methylcytosine"
agatggcatcctcttccaatataaagctgtttcatccacgttaaaaaatctattgttggccgggcacgttggctcacgcctgtaatcccaggactttgggaggccgaggcaggcggatcaca

SEQ ID NO: 6799 - DNA, 122 bp, Homo sapiens
  misc_feature (61)..(62): /note="This region represents a CpG dinucleotide"
  misc_feature (61)..(61): /note="Nucleotide may be methylated to form 5-methylcytosine"
aggaatttgtaactctgtgatctcagaagcctttctgctccaggattctgtaaaaatagtcgagtagcttttgcctcccacagatgtcattaggttcttctaacgtctaaagtgctgtgagt

SEQ ID NO: 6800 - DNA, 122 bp, Homo sapiens
  misc_feature (61)..(62): /note="This region represents a CpG dinucleotide"
  misc_feature (61)..(61): /note="Nucleotide may be methylated to form 5-methylcytosine"
agataagaatgccacccacctccttcatgcaatgatagggaaacgcaagtaacaggagggcgcttaacagtttgccagacatgtggcccacgctcgctcactcctggacaggatagggctgt

SEQ ID NO: 6801 - DNA, 122 bp, Homo sapiens
  misc_feature (61)..(62): /note="This region represents a CpG dinucleotide"
  misc_feature (61)..(61): /note="Nucleotide may be methylated to form 5-methylcytosine"
gaaaagaaaacgtctgcttagtaaagacagtgctttcccttattgtttttaagttcaaaacgctctagagactcagatattggaatgaatctaaatcaagtcgtgattgaaatcagtagtct

SEQ ID NO: 6802 - DNA, 122 bp, Homo sapiens
  misc_feature (61)..(62): /note="This region represents a CpG dinucleotide"
  misc_feature (61)..(61): /note="Nucleotide may be methylated to form 5-methylcytosine"
ccgagcttttaggggaagaggcactcgtgaataattcagcctctttcactgagatgaaaacgccctaatagaactaatggactcgctgcctcaaaactcgactctggtgggactcatctcat

SEQ ID NO: 6803 - DNA, 122 bp, Homo sapiens
  misc_feature (61)..(62): /note="This region represents a CpG dinucleotide"
  misc_feature (61)..(61): /note="Nucleotide may be methylated to form 5-methylcytosine"
tttgttcagcaatgagtaaacacagtctgtgtgcccgttgagaacagatagcatcagaggcgtcctgagcaacaacaggaataggttcagtgctgtcacttaagactgtactctggttttcg

SEQ ID NO: 6804 - DNA, 122 bp, Homo sapiens
  misc_feature (61)..(62): /note="This region represents a CpG dinucleotide"
  misc_feature (61)..(61): /note="Nucleotide may be methylated to form 5-methylcytosine"
aaattactcacaggaaccctctcccgaattttgctaatcctgtggttttctgatatttaacgtaatattcctcctacctatggtgctcattagtgaaagtatagaaatgcttctcttggtta

SEQ ID NO: 6805 - DNA, 122 bp, Homo sapiens
  misc_feature (61)..(62): /note="This region represents a CpG dinucleotide"
  misc_feature (61)..(61): /note="Nucleotide may be methylated to form 5-methylcytosine"
tatctcccagccctgaagagatgtctttaaaatgacttcccacgggtgtcaacacatgtacgcaggcagatagaggagaacgtatcttagtcctgacttaggatcattaaaattcctgaacc

SEQ ID NO: 6806 - DNA, 122 bp, Homo sapiens
  misc_feature (61)..(62): /note="This region represents a CpG dinucleotide"
  misc_feature (61)..(61): /note="Nucleotide may be methylated to form 5-methylcytosine"
ttgtgcaagccaaggagttacttccgtggggagaaagctgcagtgctgattggaaacatgcgttattgctggtttaaatttggcttatttgcaacagacagagattgggagagataggagaa

SEQ ID NO: 6807 - DNA, 122 bp, Homo sapiens
  misc_feature (61)..(62): /note="This region represents a CpG dinucleotide"
  misc_feature (61)..(61): /note="Nucleotide may be methylated to form 5-methylcytosine"
tctgttccttagcagtgaaagcagtcagcctgtccttcctggttttccgttaaactaagccggtttcaagtttcagctcctccttgaattccaggctgctgagacttccctctagaatcctc

SEQ ID NO: 6808 - DNA, 122 bp, Homo sapiens
  misc_feature (61)..(62): /note="This region represents a CpG dinucleotide"
  misc_feature (61)..(61): /note="Nucleotide may be methylated to form 5-methylcytosine"
tggactgagtatctggaaagccagtctgcaggatgggttctgagggcagaacccagaggacgtgcagtgaggaagctggaagagagcacactccctgggttcctttggtttactgtcctatt

SEQ ID NO: 6809 - DNA, 122 bp, Homo sapiens
  misc_feature (61)..(62): /note="This region represents a CpG dinucleotide"
  misc_feature (61)..(61): /note="Nucleotide may be methylated to form 5-methylcytosine"
tagaactgaagagagtcaaggcatacttacaatctccatttgaatcttgtttttcttgctcgaatatcaatcttgatttcgcaacaccccatagcagctctgtggaggccttttttgtctgt

SEQ ID NO: 6810 - DNA, 122 bp, Homo sapiens
  misc_feature (61)..(62): /note="This region represents a CpG dinucleotide"
  misc_feature (61)..(61): /note="Nucleotide may be methylated to form 5-methylcytosine"
gcttagtgcagggctttctatgtatgaaatccagggcattttctaattccccttatggcacgacaatggaaatccaacccttgatatggatttctggggcttagcagtccctaatcctcttc

SEQ ID NO: 6811 - DNA, 122 bp, Homo sapiens
  misc_feature (61)..(62): /note="This region represents a CpG dinucleotide"
  misc_feature (61)..(61): /note="Nucleotide may be methylated to form 5-methylcytosine"
cgatggattgtttcaggccaggcccactgcttgctgtactttaatgtcattgctgcttatcgccttctctgcagccttgttgacactcctgacaacaagtgtttgtctttggcttctagggc

SEQ ID NO: 6812 - DNA, 122 bp, Homo sapiens
  misc_feature (61)..(62): /note="This region represents a CpG dinucleotide"
  misc_feature (61)..(61): /note="Nucleotide may be methylated to form 5-methylcytosine"
gcagcactttaggcagcccataagctatgcgagaatgtgaacgctcaccttgctccgtcacggttctgacctaccacataaacaggaagaagccagtgaccggaacagctctaggaataaca

SEQ ID NO: 6813 - DNA, 122 bp, Homo sapiens
  misc_feature (61)..(62): /note="This region represents a CpG dinucleotide"
  misc_feature (61)..(61): /note="Nucleotide may be methylated to form 5-methylcytosine"
gccagatgccgtggaagcagaagctgctctgacgctgtcgtggctgtgagttggggaactcgggccttgaaactcactcaatcaagagctgctcctgccttcccttcttttggtcaggtggg

SEQ ID NO: 6814 - DNA, 122 bp, Homo sapiens
  misc_feature (61)..(62): /note="This region represents a CpG dinucleotide"
  misc_feature (61)..(61): /note="Nucleotide may be methylated to form 5-methylcytosine"
tcaccaaactgcccaatgccttaaccagagacattcaaactgcaaaccaggatgagaagtcgatggttccgcactgtagacaggttttcccaagataattgaacaaggggagactcttaccc

SEQ ID NO: 6815 - DNA, 122 bp, Homo sapiens
  misc_feature (61)..(62): /note="This region represents a CpG dinucleotide"
  misc_feature (61)..(61): /note="Nucleotide may be methylated to form 5-methylcytosine"
accaacactgatttgacttccaccagcaggctcagcagcacagcctctagatgttttgctcgtttcatcgccaggcggtactctttcccacggtactataaagcaattcctgtttttcactt

SEQ ID NO: 6816 - DNA, 122 bp, Homo sapiens
  misc_feature (61)..(62): /note="This region represents a CpG dinucleotide"
  misc_feature (61)..(61): /note="Nucleotide may be methylated to form 5-methylcytosine"
ctttaaaccttctcaggttcacccacatgaaacggctgtgctgagtgtgctgccggtgcccggggagcttctctgactgtgacccggcagaggcttctgtggcggtgcatgagcggccctac

SEQ ID NO: 6817 - DNA, 122 bp, Homo sapiens
  misc_feature (61)..(62): /note="This region represents a CpG dinucleotide"
  misc_feature (61)..(61): /note="Nucleotide may be methylated to form 5-methylcytosine"
aactccatcacttactagctgtgtgatttggggcaagttggtcaatctctctgtgctgcacgtgcatctcagagtcattgggaagattcagtgacatgaatcatgacatattcaacacatag

SEQ ID NO: 6818 - DNA, 122 bp, Homo sapiens
  misc_feature (61)..(62): /note="This region represents a CpG dinucleotide"
  misc_feature (61)..(61): /note="Nucleotide may be methylated to form 5-methylcytosine"
gaaacaaattctccagccctgagatgactgcagcctgggctgacagcttgacagcagcctcgtgagaggccctgagccagaattacccagctaaacccctcccagactgctgacccatagaa

SEQ ID NO: 6819 - DNA, 122 bp, Homo sapiens
  misc_feature (61)..(62): /note="This region represents a CpG dinucleotide"
  misc_feature (61)..(61): /note="Nucleotide may be methylated to form 5-methylcytosine"
tcatctgtccaatgggaatagtcatcctcccatcacaggtcatgaatgagacaacactggcgtagcacttcatacaggctgcgctttgtggtaaatgctcaacaagtgggcgttgttctcat

SEQ ID NO: 6820 - DNA, 122 bp, Homo sapiens
  misc_feature (61)..(62): /note="This region represents a CpG dinucleotide"
  misc_feature (61)..(61): /note="Nucleotide may be methylated to form 5-methylcytosine"
ccccacccgaaggccactgtttttggctcttgctgctatggaaggacaggagtgagctcccgctcttgacaggaaactctccaggagcagaagctgtaacttcctcatctttgcatcatcag

SEQ ID NO: 6821 - DNA, 122 bp, Homo sapiens
  misc_feature (61)..(62): /note="This region represents a CpG dinucleotide"
  misc_feature (61)..(61): /note="Nucleotide may be methylated to form 5-methylcytosine"
ggtagcaagagtccagtgtgggccgagcggaaagcggggcattgaggtgaaaggaggagccgtgcctaccgggggaactggatatgcacagggcatgatctgaactgtcagcgaaaatgagg

SEQ ID NO: 6822 - DNA, 122 bp, Homo sapiens
  misc_feature (61)..(62): /note="This region represents a CpG dinucleotide"
  misc_feature (61)..(61): /note="Nucleotide may be methylated to form 5-methylcytosine"
tttcagtttgtggaaagtgacgactttggacatccactgttccccagtagcggggctgtccgggtgaatgtacatcctctttggcatttcggggtcggccttaccagccaccatccaccgag

SEQ ID NO: 6823 - DNA, 122 bp, Homo sapiens
  misc_feature (61)..(62): /note="This region represents a CpG dinucleotide"
  misc_feature (61)..(61): /note="Nucleotide may be methylated to form 5-methylcytosine"
gacctcgccctcctccctggccggccttcccacccggaggggctcctcagccacgcactgcgtccagcaaaaccactaagtcagggaggccagggcgggcagcccattcatcgtcctcaccg

SEQ ID NO: 6824 - DNA, 122 bp, Homo sapiens
  misc_feature (61)..(62): /note="This region represents a CpG dinucleotide"
  misc_feature (61)..(61): /note="Nucleotide may be methylated to form 5-methylcytosine"
cagagtaatttaaacaattatgggcttaaagaattgatcattacagcccctgggatttagcgctgcaggctgattcccctgaaaaacctctgatttatcagggctgctactcggccaggcaa

SEQ ID NO: 6825 - DNA, 122 bp, Homo sapiens
  misc_feature (61)..(62): /note="This region represents a CpG dinucleotide"
  misc_feature (61)..(61): /note="Nucleotide may be methylated to form 5-methylcytosine"
atgtattttttattgagtggaagtggatcgtcacaaaggtccttaccttagtcatcttcacgttgaataggctaaggaaaagaagcaagaggaagggttggtcttgctgtctcagggtgcag

SEQ ID NO: 6826 - DNA, 122 bp, Homo sapiens
  misc_feature (61)..(62): /note="This region represents a CpG dinucleotide"
  misc_feature (61)..(61): /note="Nucleotide may be methylated to form 5-methylcytosine"
cgcagcgtggagggcttcgaaaacgggggtgggggcgcccaagagctcagtgcccagccccgggatcgcctcctcccctcaggacccgcgagccctcggtgccgaggacgctcgagtggggc

SEQ ID NO: 6827 - DNA, 122 bp, Homo sapiens
  misc_feature (61)..(62): /note="This region represents a CpG dinucleotide"
  misc_feature (61)..(61): /note="Nucleotide may be methylated to form 5-methylcytosine"
ctttgcacctcgcatctgagcaggattgttattcccagtgtggcctccccttgacacccccgccaggactgcatacgaggtgggggtgcccagcacaagctggccggggtgagcctgtcctg

SEQ ID NO: 6828 - DNA, 122 bp, Homo sapiens
  misc_feature (61)..(62): /note="This region represents a CpG dinucleotide"
  misc_feature (61)..(61): /note="Nucleotide may be methylated to form 5-methylcytosine"
attgaggtaataaatgcagagtactactggaaagtgcctacaggctttcatagccatcttcgtgtcattctaacatcagaatgaaacttactaaaaatctcttccatataatctagataatg

SEQ ID NO: 6829 - DNA, 122 bp, Homo sapiens
  misc_feature (61)..(62): /note="This region represents a CpG dinucleotide"
  misc_feature (61)..(61): /note="Nucleotide may be methylated to form 5-methylcytosine"
caactccgctcagaagcctggggcagactccccgccccacccagcgaacgagcatgtggccgggacctgggtgaggatttcctcgccagccctccttggcacagagctgtgcatctcacgac

SEQ ID NO: 6830 - DNA, 122 bp, Homo sapiens
  misc_feature (61)..(62): /note="This region represents a CpG dinucleotide"
  misc_feature (61)..(61): /note="Nucleotide may be methylated to form 5-methylcytosine"
ataataatattttaacaaactgtcttgtaagcattttgtttaatgaaagaagttttgaaacgtaagggaacgatcattgcactgttgaagtcatgagacttttaaatggctttgttccaatt

SEQ ID NO: 6831 - DNA, 122 bp, Homo sapiens
  misc_feature (61)..(62): /note="This region represents a CpG dinucleotide"
  misc_feature (61)..(61): /note="Nucleotide may be methylated to form 5-methylcytosine"
tatatattatctgagaaaaagtttattgaagcacatttttacacttttaatccactggaacgtcactgagaaaatgttctgagagtcataagaatgttgactaattgggctgtttgtcccac

SEQ ID NO: 6832 - DNA, 122 bp, Homo sapiens
  misc_feature (61)..(62): /note="This region represents a CpG dinucleotide"
  misc_feature (61)..(61): /note="Nucleotide may be methylated to form 5-methylcytosine"
agaggccaccagacacattttctcaaccgcagatcccccttccccacaccctgctccttgcgtgtcagcctgagagcccttgctttgagaagcttggcagaagctgcaaagggtgggcgggc

SEQ ID NO: 6833 - DNA, 122 bp, Homo sapiens
  misc_feature (61)..(62): /note="This region represents a CpG dinucleotide"
  misc_feature (61)..(61): /note="Nucleotide may be methylated to form 5-methylcytosine"
tgaaatatttaattgccaatgtataagacagccaggggaagcagcatcctcagcaaagtacgaagtagacaaaatgttcagagaaagacaaacaaggatacaggaaattttgctgatgatag

SEQ ID NO: 6834 - DNA, 122 bp, Homo sapiens
  misc_feature (61)..(62): /note="This region represents a CpG dinucleotide"
  misc_feature (61)..(61): /note="Nucleotide may be methylated to form 5-methylcytosine"
gttacaaccgtggtgttcacatgccaccctactgtgggtcactctgttccactcacattacgggaacaacctaaaacaaaatgtctgagtgacaggatgagtgggccacaccacagacagga

SEQ ID NO: 6835 - DNA, 122 bp, Homo sapiens
  misc_feature (61)..(62): /note="This region represents a CpG dinucleotide"
  misc_feature (61)..(61): /note="Nucleotide may be methylated to form 5-methylcytosine"
tgctaatttacagggctctcctaattcaggatgatgacactgcattctcagtggcttgctcgttgaggtgagaaatttgcctccagttcaacttagagcttggtaactacccactgtagcat

SEQ ID NO: 6836 - DNA, 122 bp, Homo sapiens
  misc_feature (61)..(62): /note="This region represents a CpG dinucleotide"
  misc_feature (61)..(61): /note="Nucleotide may be methylated to form 5-methylcytosine"
ccagctggtcctcattgcaggttgggggagggatacagggttgtagaagagctccagaatcggccccaaataggtgagatcagagttctgccattgaaaggcttcttgccctccttgggcca

SEQ ID NO: 6837 - DNA, 122 bp, Homo sapiens
  misc_feature (61)..(62): /note="This region represents a CpG dinucleotide"
  misc_feature (61)..(61): /note="Nucleotide may be methylated to form 5-methylcytosine"
tccagaatgccccgacccacggcccccaaccaccaaggaagtactttgtcgcccctgtgacgtttcctaccttgatctgtgcacagagtttacctggtcaccgcggtattgcaagcctctcc

SEQ ID NO: 6838 - DNA, 122 bp, Homo sapiens
  misc_feature (61)..(62): /note="This region represents a CpG dinucleotide"
  misc_feature (61)..(61): /note="Nucleotide may be methylated to form 5-methylcytosine"
tttccttttactgtccataaatgttatctgaccatgtggcagtcctggagtctttctgaacgtgttctggttctgggggctgcctgattcatcattgtttgatcagttaaactcttaaattt

SEQ ID NO: 6839 - DNA, 122 bp, Homo sapiens
  misc_feature (61)..(62): /note="This region represents a CpG dinucleotide"
  misc_feature (61)..(61): /note="Nucleotide may be methylated to form 5-methylcytosine"
ctgggcctctggaggtgattcatgaggctctgccctcaggaacaggattattacccagtccgtagtacccaatagatgatcttgctgccccacgcgaggatacagccaggaggtctacagcc

SEQ ID NO: 6840 - DNA, 122 bp, Homo sapiens
  misc_feature (61)..(62): /note="This region represents a CpG dinucleotide"
  misc_feature (61)..(61): /note="Nucleotide may be methylated to form 5-methylcytosine"
aagtatgcctctaaggcaagtattttgggtgttgctgctaatagaagtatcaagttactacgtctcaggatgggctgctgatgcaatttgacatcatttcctgatcaccaagaagacatgtg

SEQ ID NO: 6841 - DNA, 122 bp, Homo sapiens
  misc_feature (61)..(62): /note="This region represents a CpG dinucleotide"
  misc_feature (61)..(61): /note="Nucleotide may be methylated to form 5-methylcytosine"
ttcaggtgagatatcatcatctctactttatagatgaagactctaagagattaaatcacacgcctaatggaaggactaatccacacagacccagaggcctcatgtgggtctccagactcaca

SEQ ID NO: 6842 - DNA, 122 bp, Homo sapiens
  misc_feature (61)..(62): /note="This region represents a CpG dinucleotide"
  misc_feature (61)..(61): /note="Nucleotide may be methylated to form 5-methylcytosine"
ccaagaacactcccccaagaaaccatgaaagctaaaaggattgctgagacagactttcaacgacatgggtaaagcaagagttaatatgggcgtggctacatcttatcccaggcctttaaggt

SEQ ID NO: 6843 - DNA, 122 bp, Homo sapiens
  misc_feature (61)..(62): /note="This region represents a CpG dinucleotide"
  misc_feature (61)..(61): /note="Nucleotide may be methylated to form 5-methylcytosine"
tttcgcctaaaggctttgatatttttcaaataaaaatttaaaagatccagtaccttctcccgaagcttcttcatagagtagtggatttttagaaaacacaaaggcctaggggtggggcgaga

SEQ ID NO: 6844 - DNA, 122 bp, Homo sapiens
  misc_feature (61)..(62): /note="This region represents a CpG dinucleotide"
  misc_feature (61)..(61): /note="Nucleotide may be methylated to form 5-methylcytosine"
aagggaaaaatcttaaggagcctctagcccaagaatccacagtgtaagtagtgggaccagcgtttaaccccccttatccccatggcttccattgcacaacaaaatgtatcagcccacagtgt

SEQ ID NO: 6845 - DNA, 122 bp, Homo sapiens
  misc_feature (61)..(62): /note="This region represents a CpG dinucleotide"
  misc_feature (61)..(61): /note="Nucleotide may be methylated to form 5-methylcytosine"
catgttagaagacccaggaacatgatagaggacctagcaacagtgcccactgacctggctcgacctagggaagacatagggatgtgcacagcagcagaggaatatcatggaggtacatacaa

SEQ ID NO: 6846 - DNA, 122 bp, Homo sapiens
  misc_feature (61)..(62): /note="This region represents a CpG dinucleotide"
  misc_feature (61)..(61): /note="Nucleotide may be methylated to form 5-methylcytosine"
cacagattaaggaacagcagtgttatcatggatgtatcatgcctacactgaagagataagcgcttgcaggcactgccatcatgtggctatgtttggtaatttatttggtaatatacgaatga

SEQ ID NO: 6847 - DNA, 122 bp, Homo sapiens
  misc_feature (61)..(62): /note="This region represents a CpG dinucleotide"
  misc_feature (61)..(61): /note="Nucleotide may be methylated to form 5-methylcytosine"
ttgctctgttgctctctgcttggccacagttttgcaatgattgttttcctcaggccacagcgccatcaagcactctcacttccatggctctggctctcagaggggctctggtaacaccagtt

SEQ ID NO: 6848 - DNA, 122 bp, Homo sapiens
  misc_feature (61)..(62): /note="This region represents a CpG dinucleotide"
  misc_feature (61)..(61): /note="Nucleotide may be methylated to form 5-methylcytosine"
tatgcgggaaatgagcaagcaggcatcatagacaaggaacccagaagcctcagctatgcacgggataaggaagtgactaattgcaaattcagtgctcagaaaaaaaggaaataatttaaatc

SEQ ID NO: 6849 - DNA, 122 bp, Homo sapiens
  misc_feature (61)..(62): /note="This region represents a CpG dinucleotide"
  misc_feature (61)..(61): /note="Nucleotide may be methylated to form 5-methylcytosine"
cttttattttaggttcaagggtacatatgtagatttgttatatagataaactgtgtgtcacgggaggttgctgtaaagactgctttgtcactcaggtgataagcacagttcagacaggtagt

SEQ ID NO: 6850 - DNA, 122 bp, Homo sapiens
  misc_feature (61)..(62): /note="This region represents a CpG dinucleotide"
  misc_feature (61)..(61): /note="Nucleotide may be methylated to form 5-methylcytosine"
attaagagcctgatagactaagtacacacattttgtgtctaaatataaggaaaacccatacggaactgaaacagcttgtggttaaacctcaccataatgtggtcttcaacttcccattttgt

SEQ ID NO: 6851 - DNA, 122 bp, Homo sapiens
  misc_feature (61)..(62): /note="This region represents a CpG dinucleotide"
  misc_feature (61)..(61): /note="Nucleotide may be methylated to form 5-methylcytosine"
atggtgggggatcatgacctgaaggattctttccttcccatgagctgcagggctggttgccgtccttgcaactgtgtcttatttgcctgtgccgttatatcttggtgacccctccacgtgta

SEQ ID NO: 6852 - DNA, 122 bp, Homo sapiens
  misc_feature (61)..(62): /note="This region represents a CpG dinucleotide"
  misc_feature (61)..(61): /note="Nucleotide may be methylated to form 5-methylcytosine"
cagcagggtctaacaagttcacgtgccacctggaggcagtggtagtcatccatgccttctcggtgaggcactgtacgccagagtgactttaaagtatgaggaagccattagcactgctccag

SEQ ID NO: 6853 - DNA, 122 bp, Homo sapiens
  misc_feature (61)..(62): /note="This region represents a CpG dinucleotide"
  misc_feature (61)..(61): /note="Nucleotide may be methylated to form 5-methylcytosine"
tcttccttaattagttacaggactatatctgcaactcctgtgatttattcgctcagtgcccgtgtcactgtcacccactggtggggtgtgcttgttgtaaatacccatttaaatgtttacat

SEQ ID NO: 6854 - DNA, 122 bp, Homo sapiens
  misc_feature (61)..(62): /note="This region represents a CpG dinucleotide"
  misc_feature (61)..(61): /note="Nucleotide may be methylated to form 5-methylcytosine"
tcgatttcatacttgaatttaggctgatttaatctcgcctctacagcccctactcccccccgccattggtttacctgtcctgcatgcccgtttgggacacactcaaactgtaactcaaaaat

SEQ ID NO: 6855 - DNA, 122 bp, Homo sapiens
  misc_feature (61)..(62): /note="This region represents a CpG dinucleotide"
  misc_feature (61)..(61): /note="Nucleotide may be methylated to form 5-methylcytosine"
tgaggtctgagagcaaagtcagagatgactcttttgggggcttgaaactgtctattgcagcgaggagtcctttcggtctcacccttgagggtgcatctatcagagcttttgtctgttttaca

SEQ ID NO: 6856 - DNA, 122 bp, Homo sapiens
  misc_feature (61)..(62): /note="This region represents a CpG dinucleotide"
  misc_feature (61)..(61): /note="Nucleotide may be methylated to form 5-methylcytosine"
atagctagtaaacagtagagccagagccataattataactgttctttctgttacatgttacgcagcagtttagtccagaaaagcatttacccctaggccaagaaatagggaaggtaagtgta

SEQ ID NO: 6857 - DNA, 122 bp, Homo sapiens
  misc_feature (61)..(62): /note="This region represents a CpG dinucleotide"
  misc_feature (61)..(61): /note="Nucleotide may be methylated to form 5-methylcytosine"
ggcaatcgtcagtaaaatcttcagtctctttagtgctcaagtaaatgtaaatttaaactgcgtaataacaccttttccacctattggattggtaaggattttcaaaattacccagagcaagg

SEQ ID NO: 6858 - DNA, 122 bp, Homo sapiens
  misc_feature (61)..(62): /note="This region represents a CpG dinucleotide"
  misc_feature (61)..(61): /note="Nucleotide may be methylated to form 5-methylcytosine"
tgaacatgaaacaatctagaaagtcagtggtgtgtggaacagcccaaagcaggccagctccgccacaaggtccagtctctaacccaaccctgctgccactcagctctgtggcctcgggcagc

SEQ ID NO: 6859 - DNA, 122 bp, Homo sapiens
  misc_feature (61)..(62): /note="This region represents a CpG dinucleotide"
  misc_feature (61)..(61): /note="Nucleotide may be methylated to form 5-methylcytosine"
acacaccagttaatgacatcaagggggaagttaggaaagatgaaaaattggagaccaagacggtcataacatggttctaatttgtggttaagaaattcatgaaggaataggtcaatgtgtac

SEQ ID NO: 6860 - DNA, 122 bp, Homo sapiens
  misc_feature (61)..(62): /note="This region represents a CpG dinucleotide"
  misc_feature (61)..(61): /note="Nucleotide may be methylated to form 5-methylcytosine"
gggtcctccgggtgatgaggagccgctggagggccctgagctgcacgtgctaatgattaacgccccgtccgtgctggccggtttctcaaatgcctcctgacgattgcgcacagccggacatc

SEQ ID NO: 6861 - DNA, 122 bp, Homo sapiens
  misc_feature (61)..(62): /note="This region represents a CpG dinucleotide"
  misc_feature (61)..(61): /note="Nucleotide may be methylated to form 5-methylcytosine"
ataaagcaggaaggccgaaggccccgttttcgcccaaaaacaatgctccacgtaaatttgcgggaacaaaagccaccagaaatccagcccgggttttccgcctctctgctctccgcggacca

SEQ ID NO: 6862 - DNA, 122 bp, Homo sapiens
  misc_feature (61)..(62): /note="This region represents a CpG dinucleotide"
  misc_feature (61)..(61): /note="Nucleotide may be methylated to form 5-methylcytosine"
tgagttaggaagctgctaatcctgtaggctaagggaccagataattgctgagcagcctctcgcaggctttacattccttctccgtctcctgggctcagtactcccaccctcctctgaatcaa

SEQ ID NO: 6863 - DNA, 122 bp, Homo sapiens
  misc_feature (61)..(62): /note="This region represents a CpG dinucleotide"
  misc_feature (61)..(61): /note="Nucleotide may be methylated to form 5-methylcytosine"
tttttcatgcctctgtgggaagtccctggtcagttttaaaagggaagggcatgactatgacgctggattctccctgctagtgatgcatgagcacctgtggtgaacgagatggaaatgatgaa

SEQ ID NO: 6864 - DNA, 122 bp, Homo sapiens
  misc_feature (61)..(62): /note="This region represents a CpG dinucleotide"
  misc_feature (61)..(61): /note="Nucleotide may be methylated to form 5-methylcytosine"
gaagtcagcctattaaccactaagctaagcacacaggctgctcacacaagcccacttcaacggagaccaaaacaggaagtaactctagctagaaagaccttttggcccatcataaaacttct

SEQ ID NO: 6865 - DNA, 122 bp, Homo sapiens
  misc_feature (61)..(62): /note="This region represents a CpG dinucleotide"
  misc_feature (61)..(61): /note="Nucleotide may be methylated to form 5-methylcytosine"
ccacaatcacagcagtactcattaccttagtcaacctctcctactgcttccatcaatgcacggtcattaccagccaatgctaaaatggaatccgaggcttagtaaatcacctccaattgaca

SEQ ID NO: 6866 - DNA, 122 bp, Homo sapiens
  misc_feature (61)..(62): /note="This region represents a CpG dinucleotide"
  misc_feature (61)..(61): /note="Nucleotide may be methylated to form 5-methylcytosine"
aggggagtgagtgagaggatgcaccacagccttggttcacgcctgaagaaactgaggccacgagaggggaagtgaccagctcagtgccacaccaccagcagatccaagtggctgtgagtcag

SEQ ID NO: 6867 - DNA, 122 bp, Homo sapiens
  misc_feature (61)..(62): /note="This region represents a CpG dinucleotide"
  misc_feature (61)..(61): /note="Nucleotide may be methylated to form 5-methylcytosine"
ctcaattagaatgggagaaatggagaatggttgacagtgtcaatcaaaacacaccagcgacgtgttcttaggagggttgacttctagagggcagatgaacacagcaattaagtgcatgggat

SEQ ID NO: 6868 - DNA, 122 bp, Homo sapiens
  misc_feature (61)..(62): /note="This region represents a CpG dinucleotide"
  misc_feature (61)..(61): /note="Nucleotide may be methylated to form 5-methylcytosine"
ttatgatttggcttagtgtacgtgcagtgacccatgtgtgcatattgatcatcaatccatcgtggctttcttagctatcttggctttcttttgttagcagagcttacctgcaactgtagttt

SEQ ID NO: 6869 - DNA, 122 bp, Homo sapiens
  misc_feature (61)..(62): /note="This region represents a CpG dinucleotide"
  misc_feature (61)..(61): /note="Nucleotide may be methylated to form 5-methylcytosine"
ctggagagagcttgctgggtctgaagcggggcagccctgctcagctctgtccattgttgccgtgtgagaatgctggccctgtgttgccaaatcttctgattttgtttccaagagaaaccaga

SEQ ID NO: 6870 - DNA, 122 bp, Homo sapiens
  misc_feature (61)..(62): /note="This region represents a CpG dinucleotide"
  misc_feature (61)..(61): /note="Nucleotide may be methylated to form 5-methylcytosine"
gtggcccggaatacagccagaggagtaaggcgactgggtgggaactgtgtgggaacccctcgcagcccagctctctgctaggcctgtgtatcacaatctgagctcgccttgtattcctacgt

SEQ ID NO: 6871 - DNA, 122 bp, Homo sapiens
  misc_feature (61)..(62): /note="This region represents a CpG dinucleotide"
  misc_feature (61)..(61): /note="Nucleotide may be methylated to form 5-methylcytosine"
tggccagcatggtgaaaccccgtctctactaaaaatacaaaaattagctgggtgtggtggcgcgcccctataatcccagctactcgagaagctgaggcatgagaatcgcttgaacccaggag

SEQ ID NO: 6872 - DNA, 122 bp, Homo sapiens
  misc_feature (61)..(62): /note="This region represents a CpG dinucleotide"
  misc_feature (61)..(61): /note="Nucleotide may be methylated to form 5-methylcytosine"
actaggtaaatgacagtcacagcggattccaggggttgtgtccacgatcccggggggcgtcggctttgagcagcctcaaggggagggttttgtctggctccttgcttcctctcgcgccgagc

SEQ ID NO: 6873 - DNA, 122 bp, Homo sapiens
  misc_feature (61)..(62): /note="This region represents a CpG dinucleotide"
  misc_feature (61)..(61): /note="Nucleotide may be methylated to form 5-methylcytosine"
gtattatgctacctttgggggaactccctgaacccctgaagattaggtctggtgaacactcgaaggattcaggaaaatacctggattactcatgccattccctcagaaaagagattttgttt

SEQ ID NO: 6874 - DNA, 122 bp, Homo sapiens
  misc_feature (61)..(62): /note="This region represents a CpG dinucleotide"
  misc_feature (61)..(61): /note="Nucleotide may be methylated to form 5-methylcytosine"
cttagcttcctaagcctctcatagtaactcatattccttgtcctgtgctccaggcaaatacgactactcagatttcccaacacctgaaactttcccaacccactaacagaaatgtactctca

SEQ ID NO: 6875 - DNA, 122 bp, Homo sapiens
  misc_feature (61)..(62): /note="This region represents a CpG dinucleotide"
  misc_feature (61)..(61): /note="Nucleotide may be methylated to form 5-methylcytosine"
gattgcaagaataaaatttgaaacataaagcagccaaaccagtttcccttgttttctcatcgcaacttgaggttcctgtgcattctctgcacagtgctcaggtatctactcacaataatttc

SEQ ID NO: 6876 - DNA, 122 bp, Homo sapiens
  misc_feature (61)..(62): /note="This region represents a CpG dinucleotide"
  misc_feature (61)..(61): /note="Nucleotide may be methylated to form 5-methylcytosine"
gcaaggggaggtcccccacaccaaccacagagtgattcagcccacatagtaatcatgccacggttgagaataaatatgtgtgtgaagagaataactatgtaatatcacccaggtcaaacagg

SEQ ID NO: 6877 - DNA, 122 bp, Homo sapiens
  misc_feature (61)..(62): /note="This region represents a CpG dinucleotide"
  misc_feature (61)..(61): /note="Nucleotide may be methylated to form 5-methylcytosine"
actgaagaactagagtgtcactgctggtgaactgtggcacggttgctcaacacatcacctcggacaaattcaggaagcatttctttagcccacaagtccagacccaggtgctctgtatgttt

SEQ ID NO: 6878 - DNA, 122 bp, Homo sapiens
  misc_feature (61)..(62): /note="This region represents a CpG dinucleotide"
  misc_feature (61)..(61): /note="Nucleotide may be methylated to form 5-methylcytosine"
cacatgagaggctcagtgtaggcgtctggacaggggccagtcccacaaggctactgactccggaccacaaagaagctggaagcagcagctccgcctctgcagccaattgcagagcttttttc

SEQ ID NO: 6879 - DNA, 122 bp, Homo sapiens
  misc_feature (61)..(62): /note="This region represents a CpG dinucleotide"
  misc_feature (61)..(61): /note="Nucleotide may be methylated to form 5-methylcytosine"
aaagtgacaacatgccagctccaaaagctgagtcctcaagatatgttgtatgtttccattcgctctcttgtccttttgccgtcaccataaaatgtacatacctgggctaacccactggtttc

SEQ ID NO: 6880 - DNA, 122 bp, Homo sapiens
  misc_feature (61)..(62): /note="This region represents a CpG dinucleotide"
  misc_feature (61)..(61): /note="Nucleotide may be methylated to form 5-methylcytosine"
tgctgggattacaggcatgagccaccgcgcccggctcattccaacttttaaaaaaagatacgtgacagttttgagcaaaattaatgacagtgtatttggggaattatgacatatattaaagt

SEQ ID NO: 6881 - DNA, 122 bp, Homo sapiens
  misc_feature (61)..(62): /note="This region represents a CpG dinucleotide"
  misc_feature (61)..(61): /note="Nucleotide may be methylated to form 5-methylcytosine"
tgtccgtgtggctgttggggttgttgctgaggtacattttgtccatggccttgagggcctcggtgagatagttctgcagggccgtgaccgcggcacacaccgcggggctgccgaagccgtgg

SEQ ID NO: 6882 - DNA, 122 bp, Homo sapiens
  misc_feature (61)..(62): /note="This region represents a CpG dinucleotide"
  misc_feature (61)..(61): /note="Nucleotide may be methylated to form 5-methylcytosine"
aaactgaaggaaaatccacagggaccgggattgatggagacgcaaaatgggacagaaaggcgggctgaggaaaccaactttcagggaagtggttattacctggatggaatctggaaacacca

SEQ ID NO: 6883 - DNA, 122 bp, Homo sapiens
  misc_feature (61)..(62): /note="This region represents a CpG dinucleotide"
  misc_feature (61)..(61): /note="Nucleotide may be methylated to form 5-methylcytosine"
aagccaggctccgagccggctgctgggtagagtgccgcaccccagggaacgctcagccctcgtggactcacctctgggcttgcccagcctaagccccgcagtaacagctggggtgaagcctg

SEQ ID NO: 6884 - DNA, 122 bp, Homo sapiens
  misc_feature (61)..(62): /note="This region represents a CpG dinucleotide"
  misc_feature (61)..(61): /note="Nucleotide may be methylated to form 5-methylcytosine"
gcaatcttactgagaattgggatttttctcttatttccagccttgatatagaattgagaacgtgacattaattatttttgtctctcaactaaacttattttttaaagatattttaattatat

SEQ ID NO: 6885 - DNA, 122 bp, Homo sapiens
  misc_feature (61)..(62): /note="This region represents a CpG dinucleotide"
  misc_feature (61)..(61): /note="Nucleotide may be methylated to form 5-methylcytosine"
aaagtgacatgcctgtaaatgaggtgatatgtgggaaagtgctcactgagctcaatgccacgtacatgatatacactcagtaaacaccagttttcttgaatctttcttttcctcatatattt

SEQ ID NO: 6886 - DNA, 122 bp, Homo sapiens
  misc_feature (61)..(62): /note="This region represents a CpG dinucleotide"
  misc_feature (61)..(61): /note="Nucleotide may be methylated to form 5-methylcytosine"
tgtgtgtgtctgtctttctaaatctttcttgacattattgcctcaaaggcactgagacagcgtgtgttaaaacccaaggacacagattgtaattctagtcttattgctgtaggaatcagttt

SEQ ID NO: 6887 - DNA, 122 bp, Homo sapiens
  misc_feature (61)..(62): /note="This region represents a CpG dinucleotide"
  misc_feature (61)..(61): /note="Nucleotide may be methylated to form 5-methylcytosine"
ctgtgtgtttgtagaaggagtatgaatctgtatagagagtgcttactgaagctccaggctcgccaggctcaccagggggaccttggaagccttggggacccttgagaagaaggaaaaagatg

SEQ ID NO: 6888 - DNA, 122 bp, Homo sapiens
  misc_feature (61)..(62): /note="This region represents a CpG dinucleotide"
  misc_feature (61)..(61): /note="Nucleotide may be methylated to form 5-methylcytosine"
acttcttttctgccagggctgtctgtgttctctgccgaagcagacacaatcagtttctagcgtaggctgtctggcaccaactgtatttaccatggtttattcttgggattcctctaaaaggg

SEQ ID NO: 6889 - DNA, 122 bp, Homo sapiens
  misc_feature (61)..(62): /note="This region represents a CpG dinucleotide"
  misc_feature (61)..(61): /note="Nucleotide may be methylated to form 5-methylcytosine"
gaatcaagttccaccacttgactactactttcctttgatttgattgttagttctgctaaccgtgacaactgtcacgatgtgagacaaaggagaatgattataattgtgtctgggtcagtgtc

SEQ ID NO: 6890 - DNA, 122 bp, Homo sapiens
  misc_feature (61)..(62): /note="This region represents a CpG dinucleotide"
  misc_feature (61)..(61): /note="Nucleotide may be methylated to form 5-methylcytosine"
aaaagagcttggagaaccccctctcctcttctgccaggtgaggccacagcaagaagactgcggtctacgaaccaggaagaggccttcaccagtcaccaaatatgctggcgccttaattttag

SEQ ID NO: 6891 - DNA, 122 bp, Homo sapiens
  misc_feature (61)..(62): /note="This region represents a CpG dinucleotide"
  misc_feature (61)..(61): /note="Nucleotide may be methylated to form 5-methylcytosine"
gaaagctcacagtcactgcctttgcttctcaaacaaagcttgtctaagcaaagtaaaattcggctctgagaacaaaagctttgggaaccaaaggacagttggcacctcatcgcatgcaataa

SEQ ID NO: 6892 - DNA, 122 bp, Homo sapiens
  misc_feature (61)..(62): /note="This region represents a CpG dinucleotide"
  misc_feature (61)..(61): /note="Nucleotide may be methylated to form 5-methylcytosine"
gctcaaagaggaaaggcagttcgtgaccgtctggggacagcccctcagggtgcagaggtccgtgaagacgcagacatagtctccacccggagtcgggcgagtcctccaacccagcttcctcc

SEQ ID NO: 6893 - DNA, 122 bp, Homo sapiens
  misc_feature (61)..(62): /note="This region represents a CpG dinucleotide"
  misc_feature (61)..(61): /note="Nucleotide may be methylated to form 5-methylcytosine"
ctccatctgggggcctgcttgtctgcggcgactctttagttcacaggaggggacggccggcgctgacagcttcccctttgctttccccacgaagctcctccctggcagcccctgaccttccg

SEQ ID NO: 6894 - DNA, 122 bp, Homo sapiens
  misc_feature (61)..(62): /note="This region represents a CpG dinucleotide"
  misc_feature (61)..(61): /note="Nucleotide may be methylated to form 5-methylcytosine"
gtcactggggtgttgctttatgatggtgacagaccctctgttggggcctctcacctgggtcgcctgtgtgccggctggtgccgcacgaaggccagcctttccttacagatgctgccttggct

SEQ ID NO: 6895 - DNA, 122 bp, Homo sapiens
  misc_feature (61)..(62): /note="This region represents a CpG dinucleotide"
  misc_feature (61)..(61): /note="Nucleotide may be methylated to form 5-methylcytosine"
cacgtcagcggcgggattcgattctcccaggagcgcaaacgctactgagaactgcgcctgcgagggggtccgggctgcgggctccttagaagttaatcctggtgatcccaggtggaacggtt

SEQ ID NO: 6896 - DNA, 122 bp, Homo sapiens
  misc_feature (61)..(62): /note="This region represents a CpG dinucleotide"
  misc_feature (61)..(61): /note="Nucleotide may be methylated to form 5-methylcytosine"
cacttgcccgcctcccgccagcggtgggtggctgcgtctgaaggctgtcgtcggttacagcgggaatgggcgggccaacatggtctggaggccggacacaggtgggggccaagagcctaccc

SEQ ID NO: 6897 - DNA, 122 bp, Homo sapiens
  misc_feature (61)..(62): /note="This region represents a CpG dinucleotide"
  misc_feature (61)..(61): /note="Nucleotide may be methylated to form 5-methylcytosine"
agaactactgtactaaatacaaatactccttgcatgcctggactcaaaatcactgggaaccgtacacaggactagggcaataaaagtattgctcacctttggaaggagctggattgcctgta

SEQ ID NO: 6898 - DNA, 122 bp, Homo sapiens
  misc_feature (61)..(62): /note="This region represents a CpG dinucleotide"
  misc_feature (61)..(61): /note="Nucleotide may be methylated to form 5-methylcytosine"
tgccttgatagaaattatcagaactcaattcattaggcaattgttaatttcattcaaatccgaaggtcagtggcacaatagggcttggcataggttcctatgcttctttcacgtggctcaga

SEQ ID NO: 6899 - DNA, 122 bp, Homo sapiens
  misc_feature (61)..(62): /note="This region represents a CpG dinucleotide"
  misc_feature (61)..(61): /note="Nucleotide may be methylated to form 5-methylcytosine"
tgagacagggtcttgctgagatgcccaggctgggattacagccatgagccactgtacccgcgcctgacctgttgtacaggtttctgagttaagatagcaaaggtatctgaagcgtttctttc

SEQ ID NO: 6900 - DNA, 122 bp, Homo sapiens
  misc_feature (61)..(62): /note="This region represents a CpG dinucleotide"
  misc_feature (61)..(61): /note="Nucleotide may be methylated to form 5-methylcytosine"
aaaagtggttatgtggttactctctatataagggcaatcaggtccttaaggttgagttcacgcccacagcttggggtctggcagaagtacaatactctgacagtgtcttcctgaatgactca

SEQ ID NO: 6901 - DNA, 122 bp, Homo sapiens
  misc_feature (61)..(62): /note="This region represents a CpG dinucleotide"
  misc_feature (61)..(61): /note="Nucleotide may be methylated to form 5-methylcytosine"
cctcttcaaacaggacagagctcacacccctttccaggtaaaggtgtgtgtgtgtgtgtacgtgcacgcacgcgcgcgctgatggcaatgtcggctgcctcactcattctattcctagtcca

SEQ ID NO: 6902 - DNA, 122 bp, Homo sapiens
  misc_feature (61)..(62): /note="This region represents a CpG dinucleotide"
  misc_feature (61)..(61): /note="Nucleotide may be methylated to form 5-methylcytosine"
tccttgagtactgagtcagactgccactgagtcacactgaatacaaatctagtcatttctcgaattaaaactctctatagtctcctaaaatgcggagggatgtatactccttgaacagtccc

SEQ ID NO: 6903 - DNA, 122 bp, Homo sapiens
  misc_feature (61)..(62): /note="This region represents a CpG dinucleotide"
  misc_feature (61)..(61): /note="Nucleotide may be methylated to form 5-methylcytosine"
gtcgtagtgtccaaggtcagttgacctccctggagggtgggaggggggcagggttgtggccgctgactcacataaagctgtgttttagtcagataaggaacatgcagatcatatatctttct

SEQ ID NO: 6904 - DNA, 122 bp, Homo sapiens
  misc_feature (61)..(62): /note="This region represents a CpG dinucleotide"
  misc_feature (61)..(61): /note="Nucleotide may be methylated to form 5-methylcytosine"
tcatccctcaaggcatctctctgattcatgccactcatcttagaagcctgaataagggaacgtgaatgaatcactgctatgggaaattaaagataatggagccagtaaaaccctagtggcat

SEQ ID NO: 6905 - DNA, 122 bp, Homo sapiens
  misc_feature (61)..(62): /note="This region represents a CpG dinucleotide"
  misc_feature (61)..(61): /note="Nucleotide may be methylated to form 5-methylcytosine"
tttataaaaaattgaggaagaaactgaggctcagaaagactgagtagtctttctagaccacgaagctagttaagttatggttccaggatttaaagcctgacaactgaccccaggatcaacat

SEQ ID NO: 6906 - DNA, 122 bp, Homo sapiens
  misc_feature (61)..(62): /note="This region represents a CpG dinucleotide"
  misc_feature (61)..(61): /note="Nucleotide may be methylated to form 5-methylcytosine"
cagggccaatgagaaatgcagccctgccacattcacaaagtgcacactcacgctgacacacgctcacgctcacacgctcacgctcacactcacgctcacactcacacgctcacactcacact

SEQ ID NO: 6907 - DNA, 122 bp, Homo sapiens
  misc_feature (61)..(62): /note="This region represents a CpG dinucleotide"
  misc_feature (61)..(61): /note="Nucleotide may be methylated to form 5-methylcytosine"
aaccaatccagagccatccctcctctatctggcccatgcaccccaggaggcaatattcctcggccttaatcatcccagtatcaggtgccaggcaactaggaaccaccactacagctcaaagc

SEQ ID NO: 6908 - DNA, 122 bp, Homo sapiens
  misc_feature (61)..(62): /note="This region represents a CpG dinucleotide"
  misc_feature (61)..(61): /note="Nucleotide may be methylated to form 5-methylcytosine"
aatgagtaacaactatgagcaaaatttctgactcagcttccagtgtcaatgcaatggaaacgatttccttttctgtatttctcaggtagttgcgtggattaaggagatacagccctgaacac

SEQ ID NO: 6909 - DNA, 122 bp, Homo sapiens
  misc_feature (61)..(62): /note="This region represents a CpG dinucleotide"
  misc_feature (61)..(61): /note="Nucleotide may be methylated to form 5-methylcytosine"
agttggaggcagtcctgtgtgggtctggagcagggctacgcagcgatctccagcatggagcgcactttcctctctcagcttctttctctgggtgtctcaatttttgctttcccacggccatt

SEQ ID NO: 6910 - DNA, 122 bp, Homo sapiens
  misc_feature (61)..(62): /note="This region represents a CpG dinucleotide"
  misc_feature (61)..(61): /note="Nucleotide may be methylated to form 5-methylcytosine"
ctcaccattagtcaccagagttagatactaagtagaagcagtacgtccataaagtcattgcggaaatgtatacttaaatgacctgagaggggcattgggttttttcccatttatacaataaa

SEQ ID NO: 6911 - DNA, 122 bp, Homo sapiens
  misc_feature (61)..(62): /note="This region represents a CpG dinucleotide"
  misc_feature (61)..(61): /note="Nucleotide may be methylated to form 5-methylcytosine"
ttgcggttttcgggctttttctcagctgcggtgcatttgtggcttttatttctgcactgccgcttgttacttggagccattacttcctatctgtgttgtcaatcgtgtcttgaggttattct

SEQ ID NO: 6912 - DNA, 122 bp, Homo sapiens
  misc_feature (61)..(62): /note="This region represents a CpG dinucleotide"
  misc_feature (61)..(61): /note="Nucleotide may be methylated to form 5-methylcytosine"
agaaacaactatcaacttcaaattatttgggtttaccttataaactccatcttagcgaaccgtcagtatgaacagtaagacagtacgaaaagtagttgcatttactgagcacctactatgtg

SEQ ID NO: 6913 - DNA, 122 bp, Homo sapiens
  misc_feature (61)..(62): /note="This region represents a CpG dinucleotide"
  misc_feature (61)..(61): /note="Nucleotide may be methylated to form 5-methylcytosine"
aaatgatgtaacttgtgccagtgttatgggaagttaaagatccatctacaagggttaatacgcccttgtttgttacatgagtaggaggatttcacccatttagattagctcagcatttaaag

SEQ ID NO: 6914 - DNA, 122 bp, Homo sapiens
  misc_feature (61)..(62): /note="This region represents a CpG dinucleotide"
  misc_feature (61)..(61): /note="Nucleotide may be methylated to form 5-methylcytosine"
agagttggctcagatcgcatggctgttgctaaatcaaacaccgaggctagcaggatagaacgctctcatcaatgaggcctaggtcccgagcccaccctgagagacaggcagtggcctcaaga

SEQ ID NO: 6915 - DNA, 122 bp, Homo sapiens
  misc_feature (61)..(62): /note="This region represents a CpG dinucleotide"
  misc_feature (61)..(61): /note="Nucleotide may be methylated to form 5-methylcytosine"
cacgtcgtctttgacctgcttttaaagcacattcccgtgtgtcgtgaacaacgctgtccccggcgtctgctcatcaagaggtgcgaggtgcttctgccggtttctcctccgctggggacgca

SEQ ID NO: 6916 - DNA, 122 bp, Homo sapiens
  misc_feature (61)..(62): /note="This region represents a CpG dinucleotide"
  misc_feature (61)..(61): /note="Nucleotide may be methylated to form 5-methylcytosine"
ctttacatatcataaggcaagaactaactatcaaaaagaatgatttaaacaactatgatacgtcagttgtgaatagcaggaagaattcaaaaggaagttgttatctgaaatgggtattttaa

SEQ ID NO: 6917 - DNA, 122 bp, Homo sapiens
  misc_feature (61)..(62): /note="This region represents a CpG dinucleotide"
  misc_feature (61)..(61): /note="Nucleotide may be methylated to form 5-methylcytosine"
ccgctcataataccactcagaattaataccccatggtcaagaaacattttgaaacactgacgtaaaattttaagcttgtggacgcgcacacattctctctgtctgaaggttctggcaatagg

SEQ ID NO: 6918 - DNA, 122 bp, Homo sapiens
  misc_feature (61)..(62): /note="This region represents a CpG dinucleotide"
  misc_feature (61)..(61): /note="Nucleotide may be methylated to form 5-methylcytosine"
tctgtagcttggccctactcgctcttacaaggttcccaggtgatgccgatgctgccgctccgggatcacacctggagacctagtgccaaaccctcctaatcaaggcaccgactcagccggca

SEQ ID NO: 6919 - DNA, 122 bp, Homo sapiens
  misc_feature (61)..(62): /note="This region represents a CpG dinucleotide"
  misc_feature (61)..(61): /note="Nucleotide may be methylated to form 5-methylcytosine"
gtttaaagaatgtccatgtctttcttagaaaagccccttgtgagcagccttgttttgttgcggttgtcttacaggaagcagctcagggttttgcgtatatgtgttttatttttaagttgtac

SEQ ID NO: 6920 - DNA, 122 bp, Homo sapiens
  misc_feature (61)..(62): /note="This region represents a CpG dinucleotide"
  misc_feature (61)..(61): /note="Nucleotide may be methylated to form 5-methylcytosine"
gtgtgaggtgaatgtataagccaagaatgagtcagtagattcttcagcagctctgccctgcgctgatcctctagagttggaaagggctgctgttgtgccactgggtcagtgccaaaagcaga

SEQ ID NO: 6921 - DNA, 122 bp, Homo sapiens
  misc_feature (61)..(62): /note="This region represents a CpG dinucleotide"
  misc_feature (61)..(61): /note="Nucleotide may be methylated to form 5-methylcytosine"
gagatttgggtggggcacagccaaaccataacaggtggtgtctgtgtcgctgggttgctgcgtgagttaagcaggatgtccatggaaatgtgcaacctgtgctggccctgggcgagtgctca

SEQ ID NO: 6922 - DNA, 122 bp, Homo sapiens
  misc_feature (61)..(62): /note="This region represents a CpG dinucleotide"
  misc_feature (61)..(61): /note="Nucleotide may be methylated to form 5-methylcytosine"
tcttggtatttcctgaggaccgaatggggcctgcagcaactagctttgggtctgactaagcgtttttgtttttttttttaactggagaggagcaagctgcaacgagggcctcattcctggtt

SEQ ID NO: 6923 - DNA, 122 bp, Homo sapiens
  misc_feature (61)..(62): /note="This region represents a CpG dinucleotide"
  misc_feature (61)..(61): /note="Nucleotide may be methylated to form 5-methylcytosine"
gctagctgcactgccctccaactgaatcaacggtatcagcatggtgaataaacaggtatgcgctttctagagtgacaacagcagggtgtcagttcccaacacacctattccggtaccattat

SEQ ID NO: 6924 - DNA, 122 bp, Homo sapiens
  misc_feature (61)..(62): /note="This region represents a CpG dinucleotide"
  misc_feature (61)..(61): /note="Nucleotide may be methylated to form 5-methylcytosine"
attatagaatgcctgactttccccatatcttagcatcacaccaacaggggttcagtataacgacagtgtattacaatggaaagaactgtaaaatgcagagtctctgaagaagagtcttaagg

SEQ ID NO: 6925 - DNA, 122 bp, Homo sapiens
  misc_feature (61)..(62): /note="This region represents a CpG dinucleotide"
  misc_feature (61)..(61): /note="Nucleotide may be methylated to form 5-methylcytosine"
agactatctcctttgtagcagagtgaacttgagtcacaacccgaagtcatcctggtgaagcggcttcatttgtctggggtaatacccgaggttagttgtctcatgccaaggaaatcgaggat

SEQ ID NO: 6926 - DNA, 122 bp, Homo sapiens
  misc_feature (61)..(62): /note="This region represents a CpG dinucleotide"
  misc_feature (61)..(61): /note="Nucleotide may be methylated to form 5-methylcytosine"
gttcttgaccagggtggagatcttcattatcaagtttcctgtaactaaaagggaacagatcgtctgagatcttgctccacttgtccttgagggttattaaggtttgtgtgtgactgggcgtt

SEQ ID NO: 6927 - DNA, 122 bp, Homo sapiens
  misc_feature (61)..(62): /note="This region represents a CpG dinucleotide"
  misc_feature (61)..(61): /note="Nucleotide may be methylated to form 5-methylcytosine"
gggataagcagtgaacaacaacaaaaagacaaacttcttccaccctgaggcgtatgttctcggtgagaaatgggcaataaacataatacctaagaaaattatacgggatgttagtgacaaat

SEQ ID NO: 6928 - DNA, 122 bp, Homo sapiens
  misc_feature (61)..(62): /note="This region represents a CpG dinucleotide"
  misc_feature (61)..(61): /note="Nucleotide may be methylated to form 5-methylcytosine"
cttcctcaggctacctggttggagcgtgccatctgtttcctgctttaccctgattgacaacgggctaacagccaagtcaagtcaacctgagtcctctcaaaacccttctttttgcactcccc

SEQ ID NO: 6929 - DNA, 122 bp, Homo sapiens
  misc_feature (61)..(62): /note="This region represents a CpG dinucleotide"
  misc_feature (61)..(61): /note="Nucleotide may be methylated to form 5-methylcytosine"
gtccattaatttagcagattgataacaggctacttggttctcatgtgaattctgtggcaacgtgaacaggtccaaggctgttcaatggagatgcagaatggagattcagttctttgtgatcc

SEQ ID NO: 6930 - DNA, 122 bp, Homo sapiens
  misc_feature (61)..(62): /note="This region represents a CpG dinucleotide"
  misc_feature (61)..(61): /note="Nucleotide may be methylated to form 5-methylcytosine"
agcaagtgcaagtgtgagatttagagattctaagaggggaagggccagaggtcttgaaaacgaccttcattcgttcattcattcgagaagtttgcgagggcctccgtgtcctgcgtttagtg

SEQ ID NO: 6931 - DNA, 122 bp, Homo sapiens
  misc_feature (61)..(62): /note="This region represents a CpG dinucleotide"
  misc_feature (61)..(61): /note="Nucleotide may be methylated to form 5-methylcytosine"
atttctgagctatttggctgatgagcacagatgagcagagccaaccggctttaacatcctcgatgcatgaacaataaaggcttattgttgcatgaggttttgtgtggttcatcttatatagc

SEQ ID NO: 6932 - DNA, 122 bp, Homo sapiens
  misc_feature (61)..(62): /note="This region represents a CpG dinucleotide"
  misc_feature (61)..(61): /note="Nucleotide may be methylated to form 5-methylcytosine"
acacgtgcatggggctccctggaggctgagggagtgtggttggtatgctgtgccaacacacgacagagcagttacaaccattcggaaatcatgctgtgtagagcagagcaaggaggaagcac

SEQ ID NO: 6933 - DNA, 122 bp, Homo sapiens
  misc_feature (61)..(62): /note="This region represents a CpG dinucleotide"
  misc_feature (61)..(61): /note="Nucleotide may be methylated to form 5-methylcytosine"
ttagggaggccgaggtgggcagatcaactgagttcaggagttcgagaccaccatggctaacgtggtaaaaccccatttctactaaaaatacaaaaaagtagccggcgtggtggcgctcgcct

SEQ ID NO: 6934 - DNA, 122 bp, Homo sapiens
  misc_feature (61)..(62): /note="This region represents a CpG dinucleotide"
  misc_feature (61)..(61): /note="Nucleotide may be methylated to form 5-methylcytosine"
atagctgaatcacctttcccagaattctctctttcatcataaatgtagcaacacttactacgaagtgggttatctcctcacagtgtttaagattcttcttgctcggggccagatgcaagata

SEQ ID NO: 6935 - DNA, 122 bp, Homo sapiens
  misc_feature (61)..(62): /note="This region represents a CpG dinucleotide"
  misc_feature (61)..(61): /note="Nucleotide may be methylated to form 5-methylcytosine"
tgctgatatgctcctggagccagtgccctgtgctaatagattctatcacagcactgaccacgctctaatgatagcaattgttaacttgtttgtttctctcaccaagaagtcacgaactgtgg

SEQ ID NO: 6936 - DNA, 122 bp, Homo sapiens
  misc_feature (61)..(62): /note="This region represents a CpG dinucleotide"
  misc_feature (61)..(61): /note="Nucleotide may be methylated to form 5-methylcytosine"
ctgcttcattttccttcaatgcacttcttactgtctgacataatttatgtcagtggctcacgcctgtaatctcagcactttgagaggccgaggtgggtggatcagctgaggtcaggagttcg

SEQ ID NO: 6937 - DNA, 122 bp, Homo sapiens
  misc_feature (61)..(62): /note="This region represents a CpG dinucleotide"
  misc_feature (61)..(61): /note="Nucleotide may be methylated to form 5-methylcytosine"
gacacggccagtaagctgtggagtctggatttgaactaggctctcttggagtttggagcccggtcttttcatttctggcagagacctgtggcttcagggggcggagcccagcccatggggga

SEQ ID NO: 6938 - DNA, 122 bp, Homo sapiens
  misc_feature (61)..(62): /note="This region represents a CpG dinucleotide"
  misc_feature (61)..(61): /note="Nucleotide may be methylated to form 5-methylcytosine"
cctagttcataggtggtacattcttgctgtgtcctcacatgatggaagaactaactagctcgctgcggcctcttttataaaggcactaatcccattcaggagagttccccttcatgacctaa

SEQ ID NO: 6939 - DNA, 122 bp, Homo sapiens
  misc_feature (61)..(62): /note="This region represents a CpG dinucleotide"
  misc_feature (61)..(61): /note="Nucleotide may be methylated to form 5-methylcytosine"
gccattcttgttttcaggctccatttacccgtttctcagagaggccctggtgtgagtggccgggccacatatgactcgcccgtagcacctgtgggtctggcacgaccacacgccaggctgac

SEQ ID NO: 6940 - DNA, 122 bp, Homo sapiens
  misc_feature (61)..(62): /note="This region represents a CpG dinucleotide"
  misc_feature (61)..(61): /note="Nucleotide may be methylated to form 5-methylcytosine"
agaaggctttcctctccaatagtgaattaataaaggataagtaggaaaaacgttacgaaacgatgtggtaacattatagactctgtattagggcaaaaattgtgagatagtagaagatctgt

SEQ ID NO: 6941 - DNA, 122 bp, Homo sapiens
  misc_feature (61)..(62): /note="This region represents a CpG dinucleotide"
  misc_feature (61)..(61): /note="Nucleotide may be methylated to form 5-methylcytosine"
acttacagccatggcaaaaggtgaagaggaagcaaggcagcagaaaggagaagtgccaagcgaagtggggaagagcgccttatgaaaccatcagatctcaccagaactccttcactatcaca

SEQ ID NO: 6942 - DNA, 122 bp, Homo sapiens
  misc_feature (61)..(62): /note="This region represents a CpG dinucleotide"
  misc_feature (61)..(61): /note="Nucleotide may be methylated to form 5-methylcytosine"
aatgcaggccagacttttaggggctcgacagaacacagctggagaaacatccacaccacacgcggtttcacctgccacacggcagcccgggtgcccggatcactgtgtgtggagactcaggc

SEQ ID NO: 6943 - DNA, 122 bp, Homo sapiens
  misc_feature (61)..(62): /note="This region represents a CpG dinucleotide"
  misc_feature (61)..(61): /note="Nucleotide may be methylated to form 5-methylcytosine"
tttagatgatccaggtctcagatttttggagattttgctcccctgccaactttcctctttcgctttttaggacttgagtcttaaacaaacaactaagtaaaaaagaaatatatttctatttg

SEQ ID NO: 6944 - DNA, 122 bp, Homo sapiens
  misc_feature (61)..(62): /note="This region represents a CpG dinucleotide"
  misc_feature (61)..(61): /note="Nucleotide may be methylated to form 5-methylcytosine"
caccaagccattcatgagggatctattcccatgatccagacacctcccattaggcctcaccgccaatcttggggatcagatttcaacatgaggcttgaggggaatacatatccaaactatag

SEQ ID NO: 6945 - DNA, 122 bp, Homo sapiens
  misc_feature (61)..(62): /note="This region represents a CpG dinucleotide"
  misc_feature (61)..(61): /note="Nucleotide may be methylated to form 5-methylcytosine"
tcatttggccaaagcaacaccaaacaaagctcaagagtcagacccatttccttgaagactcgtctctctggtatgctaagaaaaattaaatttgcaattttcggatgtacatatgccagaat

SEQ ID NO: 6946 - DNA, 122 bp, Homo sapiens
  misc_feature (61)..(62): /note="This region represents a CpG dinucleotide"
  misc_feature (61)..(61): /note="Nucleotide may be methylated to form 5-methylcytosine"
ggattttcctgggagtaactgctgagcgtcctgtaaacagatgggctgggctcttgctgccgcaagcctgtgtggccaggttcaggcagcccagggccacaagctcccttgatctttgtaaa

SEQ ID NO: 6947 - DNA, 122 bp, Homo sapiens
  misc_feature (61)..(62): /note="This region represents a CpG dinucleotide"
  misc_feature (61)..(61): /note="Nucleotide may be methylated to form 5-methylcytosine"
catccagatatactgcggctcaggaagccaagaacagtctcctattggacatcatcagttcgtcatagggataatttcctggccttcttagataagagagttcaacttccctgtggtctttt

SEQ ID NO: 6948 - DNA, 122 bp, Homo sapiens
  misc_feature (61)..(62): /note="This region represents a CpG dinucleotide"
  misc_feature (61)..(61): /note="Nucleotide may be methylated to form 5-methylcytosine"
ttcccctttctggctcggttgtcacatccttcagggacattccagcttctgatcacttttcgctttgcctcagcacagtcgcactatgcggccagtcacggcaccactgcactactgcacca

SEQ ID NO: 6949 - DNA, 122 bp, Homo sapiens
  misc_feature (61)..(62): /note="This region represents a CpG dinucleotide"
  misc_feature (61)..(61): /note="Nucleotide may be methylated to form 5-methylcytosine"
ctataccatctaggtttgtgaaagtaaactctatgtttttacaatgacgtaatcacctaacgacgcatttctcagaggatctccccatagttaagccaggcgtgactgtatatgtatattta

SEQ ID NO: 6950 - DNA, 122 bp, Homo sapiens
  misc_feature (61)..(62): /note="This region represents a CpG dinucleotide"
  misc_feature (61)..(61): /note="Nucleotide may be methylated to form 5-methylcytosine"
actggggtaactggttttccttttggtaaaaaccaagttacactcctgtttcataagccacgttgttaatattaatcgtgtgcttatgtggcaggtatgagtacacacccctcaaatctcca

SEQ ID NO: 6951 - DNA, 122 bp, Homo sapiens
  misc_feature (61)..(62): /note="This region represents a CpG dinucleotide"
  misc_feature (61)..(61): /note="Nucleotide may be methylated to form 5-methylcytosine"
tggctccggggctgggtctgaggctccgttctcaaccaggaagcacagggctgggctgctcgctgttggtttcggtaacttcttctcccaggaagggccctgctccaggggcttgcagtggc

SEQ ID NO: 6952 - DNA, 122 bp, Homo sapiens
  misc_feature (61)..(62): /note="This region represents a CpG dinucleotide"
  misc_feature (61)..(61): /note="Nucleotide may be methylated to form 5-methylcytosine"
tgagagaggacagaacctctaaccaggaagaggctgtccccgccaagctccggagaggcgcggaagcatgaccctcaggtatgggaccaggtctataggaaacccatgtggtgtgccctaat

SEQ ID NO: 6953 - DNA, 122 bp, Homo sapiens
  misc_feature (61)..(62): /note="This region represents a CpG dinucleotide"
  misc_feature (61)..(61): /note="Nucleotide may be methylated to form 5-methylcytosine"
gctacatctggatgtggcttttgtcagaaattatttgcatttctaagcaaatcagattaacgtctagtacaatcttccatctctgcatgtcaagtggacaggccaatttaacatttggcata

SEQ ID NO: 6954 - DNA, 122 bp, Homo sapiens
  misc_feature (61)..(62): /note="This region represents a CpG dinucleotide"
  misc_feature (61)..(61): /note="Nucleotide may be methylated to form 5-methylcytosine"
tcttctgtcttaggattttccctctctactgtttgtaatttcatgagcatgtcagcctaacggtgagccgaccttcaggctcctaagcgtgaaggccggagactctccctttgtaaggctta

SEQ ID NO: 6955 - DNA, 122 bp, Homo sapiens
  misc_feature (61)..(62): /note="This region represents a CpG dinucleotide"
  misc_feature (61)..(61): /note="Nucleotide may be methylated to form 5-methylcytosine"
agtctgcaccggttagcttcaggcccatcatctcttacttgattggctgatgaaatgcaacgtcattgctcctgtatatctcaggcatttgacggcttaaggctttgttttattttttaaaa

SEQ ID NO: 6956 - DNA, 122 bp, Homo sapiens
  misc_feature (61)..(62): /note="This region represents a CpG dinucleotide"
  misc_feature (61)..(61): /note="Nucleotide may be methylated to form 5-methylcytosine"
atcacctcccaaatatcccacttgcacccaaaaccttgtcttgggtcagcttctgggagccgacctaagccagcagctataatgctcagggcttaagagctttggaatcagatggacctgag

SEQ ID NO: 6957 - DNA, 122 bp, Homo sapiens
  misc_feature (61)..(62): /note="This region represents a CpG dinucleotide"
  misc_feature (61)..(61): /note="Nucleotide may be methylated to form 5-methylcytosine"
ttttcccttctcctttccaagttgtaatcccccaactggcctccaagtcatgaccccactcgccatggcactgactcagccagcctctgggccaccacctgggaagatttcgacaccctggc

SEQ ID NO: 6958 - DNA, 122 bp, Homo sapiens
  misc_feature (61)..(62): /note="This region represents a CpG dinucleotide"
  misc_feature (61)..(61): /note="Nucleotide may be methylated to form 5-methylcytosine"
ctctgtcactcaggctggaatgcagtggtgcaatcagagctcggtgcaatcagagctcaccgcaacctctgacccccaggcttaagccatcctcccacctcagcctcccaagtagctgggac

SEQ ID NO: 6959 - DNA, 122 bp, Homo sapiens
  misc_feature (61)..(62): /note="This region represents a CpG dinucleotide"
  misc_feature (61)..(61): /note="Nucleotide may be methylated to form 5-methylcytosine"
gattatcaggttacagtgacacacacacaggctgtcagataatggacaaagtcccagcagcgtgtacaaccagctggtggctcccaaattcaaattcccccagcggcatccgttcggttatt

SEQ ID NO: 6960 - DNA, 122 bp, Homo sapiens
  misc_feature (61)..(62): /note="This region represents a CpG dinucleotide"
  misc_feature (61)..(61): /note="Nucleotide may be methylated to form 5-methylcytosine"
ttcacagagtgatggatgttgcctggtaaaatttcccaacaggtgtccccaaggggatggcgttgatccccttagtctctttctggcatacaaagtatctggtgtacttgcttgtatttgtg

SEQ ID NO: 6961 - DNA, 122 bp, Homo sapiens
  misc_feature (61)..(62): /note="This region represents a CpG dinucleotide"
  misc_feature (61)..(61): /note="Nucleotide may be methylated to form 5-methylcytosine"
cccgtttcctttgttcctggctgctgtggtgctggtcacgcttgggagcatggagacactcgttccttgtctctccaacccaccggccattggcccagatcacaggcacctctttggcagat

SEQ ID NO: 6962 - DNA, 122 bp, Homo sapiens
  misc_feature (61)..(62): /note="This region represents a CpG dinucleotide"
  misc_feature (61)..(61): /note="Nucleotide may be methylated to form 5-methylcytosine"
tttaatagaagctaagtgattcacccttaataacatggttcattgtcgggtaaattaagacgctgaaatacttcagcccttaggcatattaagagcataaagccagtggggtcttctgtgtt

SEQ ID NO: 6963 - DNA, 122 bp, Homo sapiens
  misc_feature (61)..(62): /note="This region represents a CpG dinucleotide"
  misc_feature (61)..(61): /note="Nucleotide may be methylated to form 5-methylcytosine"
gactttcttcctctaacagggccttgaccttggtctggattagtgggaaattaacacactcgtcttgaaattttaaatacttgagcctgaatctaccaaatcaggacattcagatttttaaa

SEQ ID NO: 6964 - DNA, 122 bp, Homo sapiens
  misc_feature (61)..(62): /note="This region represents a CpG dinucleotide"
  misc_feature (61)..(61): /note="Nucleotide may be methylated to form 5-methylcytosine"
gcttgtaggctagctggcgtcagtagtcattctgtgtctcataaattaccgttttattagcgccagatacattgtcatgtaatttcatttgatcacaagtatcctatgagataggcgaagca

SEQ ID NO: 6965 - DNA, 122 bp, Homo sapiens
  misc_feature (61)..(62): /note="This region represents a CpG dinucleotide"
  misc_feature (61)..(61): /note="Nucleotide may be methylated to form 5-methylcytosine"
ttcctcctattctatttgttcagatagctgcttctagctgtctttcctgatacctcatcccgtgttcatttctctgcccccagttcggtctgtgatgctcttttattacactgcatgcactt

SEQ ID NO: 6966 - DNA, 122 bp, Homo sapiens
  misc_feature (61)..(62): /note="This region represents a CpG dinucleotide"
  misc_feature (61)..(61): /note="Nucleotide may be methylated to form 5-methylcytosine"
cagtgcagataaagatgtatttcgtccaactctttgctcaggctttagccctaattctatcgcaaacaatgttcattgtttaatgtctttatattcagaagttgttcccatgcatatctgca

SEQ ID NO: 6967 - DNA, 122 bp, Homo sapiens
  misc_feature (61)..(62): /note="This region represents a CpG dinucleotide"
  misc_feature (61)..(61): /note="Nucleotide may be methylated to form 5-methylcytosine"
tttccctgggctgttcccattcttatgatttttcaagagtctaagagattatttgtgccacgcttgggttctttataagctggcttttgtccaggaagcttatgtttgtctctctgagaaga

SEQ ID NO: 6968 - DNA, 122 bp, Homo sapiens
  misc_feature (61)..(62): /note="This region represents a CpG dinucleotide"
  misc_feature (61)..(61): /note="Nucleotide may be methylated to form 5-methylcytosine"
tacttaaccctttgagcccttctcatccatacaggaaggagaagagtagcacctgcctcacgtgtttaaccagaaagaggacctcaggctccagtgatggatcgggacatgtcttgtcctga

SEQ ID NO: 6969 - DNA, 122 bp, Homo sapiens
  misc_feature (61)..(62): /note="This region represents a CpG dinucleotide"
  misc_feature (61)..(61): /note="Nucleotide may be methylated to form 5-methylcytosine"
atggcttggcctgaagaaaatcagaggagtcctgaagaaacagaaaggtcaaaactgtaacgcttgagacaaagacaaacagcagattgacagaggaagtattttgaattctcaagtgtgtt

SEQ ID NO: 6970 - DNA, 122 bp, Homo sapiens
  misc_feature (61)..(62): /note="This region represents a CpG dinucleotide"
  misc_feature (61)..(61): /note="Nucleotide may be methylated to form 5-methylcytosine"
atggctctaatcccagcctaatcacttttctaaatgacatgttttaaactacatcagaggcgagacaatagaggtggatattttaaaagcttgttcttaaaccttgagggtgtacttgatcc

SEQ ID NO: 6971 - DNA, 122 bp, Homo sapiens
  misc_feature (61)..(62): /note="This region represents a CpG dinucleotide"
  misc_feature (61)..(61): /note="Nucleotide may be methylated to form 5-methylcytosine"
gtgcccctgcctggaaccagccatggcatttacatcatgatgtcagtttgactcaacgtccgtcactgcacttacatcacttcataagcaatttcccaacatttctgacgctgtagtcacaa

SEQ ID NO: 6972 - DNA, 122 bp, Homo sapiens
  misc_feature (61)..(62): /note="This region represents a CpG dinucleotide"
  misc_feature (61)..(61): /note="Nucleotide may be methylated to form 5-methylcytosine"
ctgccttcggagcgcacaaagcagagctgcagggctcagatgaggacgagcacgtgcgagcgcctaccggccaccaccaggctggtcactgcctcatgtgggcctgcaaagcctgcaagagg

SEQ ID NO: 6973 - DNA, 122 bp, Homo sapiens
  misc_feature (61)..(62): /note="This region represents a CpG dinucleotide"
  misc_feature (61)..(61): /note="Nucleotide may be methylated to form 5-methylcytosine"
ggacgagaaatcattagcgagcacagaagtcttagcagccctggctgatgggctccaagccgctggcacatggggagccggcagaagccacccattttccacgttccgggagcgggaggttg

SEQ ID NO: 6974 - DNA, 122 bp, Homo sapiens
  misc_feature (61)..(62): /note="This region represents a CpG dinucleotide"
  misc_feature (61)..(61): /note="Nucleotide may be methylated to form 5-methylcytosine"
tcctgaaccagactgtaaaaacagaggatttgagtagcacatttcacttgcatacagcagcgtttgttcgttttgagtgtttttgtacaggaaactgatctacagggtaacattcacacaca

SEQ ID NO: 6975 - DNA, 122 bp, Homo sapiens
  misc_feature (61)..(62): /note="This region represents a CpG dinucleotide"
  misc_feature (61)..(61): /note="Nucleotide may be methylated to form 5-methylcytosine"
taaaattctaggatcttaaaacacacacacatatatgaccttcacagacatatgaacgcacgtaacaaattaggtttgtggaaaacactaccagttacacaatactctctctccaagtgaaa

SEQ ID NO: 6976 - DNA, 122 bp, Homo sapiens
  misc_feature (61)..(62): /note="This region represents a CpG dinucleotide"
  misc_feature (61)..(61): /note="Nucleotide may be methylated to form 5-methylcytosine"
tgtttaagaaagataatggcagcagaattttggaggtaaatgacagagaagtaaattgaacgacagggagacctgctgtgaggttattataaagatgccaataagacatgatggaagccgga

SEQ ID NO: 6977 - DNA, 122 bp, Homo sapiens
  misc_feature (61)..(62): /note="This region represents a CpG dinucleotide"
  misc_feature (61)..(61): /note="Nucleotide may be methylated to form 5-methylcytosine"
gatccttgacttagtgggtacatttcctattttctaccttatctcagacaacagtgctgtcgaaatttccaccactccctaagaagagtttttttccccagcctccaataatatttttctca

SEQ ID NO: 6978 - DNA, 122 bp, Homo sapiens
  misc_feature (61)..(62): /note="This region represents a CpG dinucleotide"
  misc_feature (61)..(61): /note="Nucleotide may be methylated to form 5-methylcytosine"
ggttcaagggattttcctgcctcagcctgctgagcagctgggattacaggcatgagccaccgcgcccagcctgcatgggctcattctcttatctgacatggagagagaaaagggtgcagaca

SEQ ID NO: 6979 - DNA, 122 bp, Homo sapiens
  misc_feature (61)..(62): /note="This region represents a CpG dinucleotide"
  misc_feature (61)..(61): /note="Nucleotide may be methylated to form 5-methylcytosine"
tatttggctaacaatccatcattgcattcatctggcagtgtttcaaaacatatcccaagccgcagaagactactgagccagaggagcattgagtcataattagctcaagattaaagttcacc

SEQ ID NO: 6980 - DNA, 122 bp, Homo sapiens
  misc_feature (61)..(62): /note="This region represents a CpG dinucleotide"
  misc_feature (61)..(61): /note="Nucleotide may be methylated to form 5-methylcytosine"
cataaaaaataagaaaaacttcagacagtttgtataagtcaacaggagaaactcaaaaaacgtggggaaagaaatatgctgggctgtgttttatcagcacaagagcaatgagtcatttaggg

SEQ ID NO: 6981 - DNA, 122 bp, Homo sapiens
  misc_feature (61)..(62): /note="This region represents a CpG dinucleotide"
  misc_feature (61)..(61): /note="Nucleotide may be methylated to form 5-methylcytosine"
gctacaggctggatttggcctgcaagctgtgattcattgacttcagcctagagtgtgatccgtcctagtgaatgttccacatacacttgaaaagaatgtatattcttcttctgttgcagttg

SEQ ID NO: 6982 - DNA, 122 bp, Homo sapiens
  misc_feature (61)..(62): /note="This region represents a CpG dinucleotide"
  misc_feature (61)..(61): /note="Nucleotide may be methylated to form 5-methylcytosine"
cttgtctctatttctactgcacccccagggacaagccatttcacaatctttaggctttaacggatgcctaattgctcctctgcaatttcattcctggtattttgttgtggttttgttttgca

SEQ ID NO: 6983 - DNA, 122 bp, Homo sapiens
  misc_feature (61)..(62): /note="This region represents a CpG dinucleotide"
  misc_feature (61)..(61): /note="Nucleotide may be methylated to form 5-methylcytosine"
ctgcttcctcagtttcagattcctctgactattactcactcctcacttttcctgggtctacgacttggcagagatcaaaattgtgggattcttaatagttgccaaacttcacgtttagttaa

SEQ ID NO: 6984 - DNA, 122 bp, Homo sapiens
  misc_feature (61)..(62): /note="This region represents a CpG dinucleotide"
  misc_feature (61)..(61): /note="Nucleotide may be methylated to form 5-methylcytosine"
gctatggtctgtagttcccatagaccacaataccctaccctctcagtcctcagttccgggcgattctagaaagatggacacataggccccagtccctcaggtcaccccaggccaaccttggc

SEQ ID NO: 6985 - DNA, 122 bp, Homo sapiens
  misc_feature (61)..(62): /note="This region represents a CpG dinucleotide"
  misc_feature (61)..(61): /note="Nucleotide may be methylated to form 5-methylcytosine"
ctccagggtttatgtgttaaatttcagctatgtcgtgtactcacagcttagtgcttcagacggttatggggaactaggaattcttaaaggggtaggacaggatgtccttttctatcgctcaa

SEQ ID NO: 6986 - DNA, 122 bp, Homo sapiens
  misc_feature (61)..(62): /note="This region represents a CpG dinucleotide"
  misc_feature (61)..(61): /note="Nucleotide may be methylated to form 5-methylcytosine"
cgctggcatcactgtcaggacttatctcaggcaacaggctttcctggtcattcttttctccgcgtctggcatcggagcctttcctcagaagcttccagggtatgattggggttctgaaggct

SEQ ID NO: 6987 - DNA, 122 bp, Homo sapiens
  misc_feature (61)..(62): /note="This region represents a CpG dinucleotide"
  misc_feature (61)..(61): /note="Nucleotide may be methylated to form 5-methylcytosine"
tccccggggctcccacagcaaagctgtttgtatccctggtgctagagttccttgcttgctcgtcactttatatgcattttctcattcacactcatgacattagttgttattgtgacctcagc

SEQ ID NO: 6988 - DNA, 122 bp, Homo sapiens
  misc_feature (61)..(62): /note="This region represents a CpG dinucleotide"
  misc_feature (61)..(61): /note="Nucleotide may be methylated to form 5-methylcytosine"
ggcagacagaattccacatgtggaatccatgtgatgccacatacagtagagggctgcagtcgtttcctgaagaggtgaatggcatgctgatacaagcagggattgactaaagctagtcagaa

SEQ ID NO: 6989 - DNA, 122 bp, Homo sapiens
  misc_feature (61)..(62): /note="This region represents a CpG dinucleotide"
  misc_feature (61)..(61): /note="Nucleotide may be methylated to form 5-methylcytosine"
agttagttcatttttatttccctctttttttttctttctttttttgagacggagtctcaccgtgtcacccaggctggagtgcagtggcttgatcttgggtcactgcaaccttcacctcctgg

SEQ ID NO: 6990 - DNA, 122 bp, Homo sapiens
  misc_feature (61)..(62): /note="This region represents a CpG dinucleotide"
  misc_feature (61)..(61): /note="Nucleotide may be methylated to form 5-methylcytosine"
ctgagtggcactgtgggactagtggtatgggggagaacattttaggtggtggcatatggacgtgacattacataacattgaatcacgtagagtgaaaattatttcgttttcaatttcttctc

SEQ ID NO: 6991 - DNA, 122 bp, Homo sapiens
  misc_feature (61)..(62): /note="This region represents a CpG dinucleotide"
  misc_feature (61)..(61): /note="Nucleotide may be methylated to form 5-methylcytosine"
ggcatgaggctgcaggagtcaaccagggcaggaagcctggggcctcccctccctggcacccggcatagccatgcccaggcccaagatggccctgactccagggacagacttcaggcaacagg

SEQ ID NO: 6992 - DNA, 122 bp, Homo sapiens
  misc_feature (61)..(62): /note="This region represents a CpG dinucleotide"
  misc_feature (61)..(61): /note="Nucleotide may be methylated to form 5-methylcytosine"
ttggtggtctctgatgtgctggacgtgctgttctgggacttgcttctttcactcacgttacgcgtttgggattcaccctgttgacactgagaggtgtggcttgtttgttccttgctgtattc

SEQ ID NO: 6993 - DNA, 122 bp, Homo sapiens
  misc_feature (61)..(62): /note="This region represents a CpG dinucleotide"
  misc_feature (61)..(61): /note="Nucleotide may be methylated to form 5-methylcytosine"
acacctgccttcatcccaccacattcttcttcattgacctccaagggctctacagctgcacgtgttggataaatgccagttccccagcttgtaacccaaggagtcatgagtcagagccaccc

SEQ ID NO: 6994 - DNA, 122 bp, Homo sapiens
  misc_feature (61)..(62): /note="This region represents a CpG dinucleotide"
  misc_feature (61)..(61): /note="Nucleotide may be methylated to form 5-methylcytosine"
acatattatgtgattacctgtggtttatcttatgagagaggcctaagactcctaaatagccgttggaagggtagtgtttttccaagggaatgtttatgagtaactagaggatccactgacag

SEQ ID NO: 6995 - DNA, 122 bp, Homo sapiens
  misc_feature (61)..(62): /note="This region represents a CpG dinucleotide"
  misc_feature (61)..(61): /note="Nucleotide may be methylated to form 5-methylcytosine"
tctcttagaaataatcacagctaggcctctttataaccggcgagtctttttcctttcacacgccatttgcaggcgcgtggcatggtatttgtaactaattttcagtagcaagtgggtcactg

SEQ ID NO: 6996 - DNA, 122 bp, Homo sapiens
  misc_feature (61)..(62): /note="This region represents a CpG dinucleotide"
  misc_feature (61)..(61): /note="Nucleotide may be methylated to form 5-methylcytosine"
ctgttaggtagtagtattcccatttcacaaatgaatacattgatatttagaaaggttgcccgcagttttatttgctagtagagttgggatttgaatcatggtctgactgggttgcaaagcta

SEQ ID NO: 6997 - DNA, 122 bp, Homo sapiens
  misc_feature (61)..(62): /note="This region represents a CpG dinucleotide"
  misc_feature (61)..(61): /note="Nucleotide may be methylated to form 5-methylcytosine"
cgtctgcctcctgaccattcctcctgaccacggtgtgtttcccatgtggctcctgcagggcgtgcctcttgtctctaagacctgtacttacaatatatatttttttctttgagcctcttctg

SEQ ID NO: 6998 - DNA, 122 bp, Homo sapiens
  misc_feature (61)..(62): /note="This region represents a CpG dinucleotide"
  misc_feature (61)..(61): /note="Nucleotide may be methylated to form 5-methylcytosine"
gtaaaaacaaccagaacacatagtaagccctgttggtcccgtgagattgcctgctcttcacgtctcctgtttgtgaaatagcacaggattttaggtgcagggtttttcatatgccgaataaa

SEQ ID NO: 6999 - DNA, 122 bp, Homo sapiens
  misc_feature (61)..(62): /note="This region represents a CpG dinucleotide"
  misc_feature (61)..(61): /note="Nucleotide may be methylated to form 5-methylcytosine"
tccgactgaacgtggcaggcagcaccctgtcgcgctacctgcgggatctgctggtggcggcgaaccctgacctcttgcagcaggccctgccccgcaaggccatcacacatctcaagaagcgc

SEQ ID NO: 7000 - DNA, 122 bp, Homo sapiens
  misc_feature (61)..(62): /note="This region represents a CpG dinucleotide"
  misc_feature (61)..(61): /note="Nucleotide may be methylated to form 5-methylcytosine"
ttaaaattttgcagctggttattctgggtccacacttcccttaagagttgcgatacttaccgtgaacggtccctaacttcgttcttgagctagtaacatcacgaactctgctagaaagaaga

SEQ ID NO: 7001 - DNA, 122 bp, Homo sapiens
  misc_feature (61)..(62): /note="This region represents a CpG dinucleotide"
  misc_feature (61)..(61): /note="Nucleotide may be methylated to form 5-methylcytosine"
gtcccttcgtgggcgggaatcacagcaagggcggtcgcggccacgtggccaggccaggcccgcacccactatcgcccaggaggcgccgctaacagcgggtctcagccacgggcctctgaagc

SEQ ID NO: 7002 - DNA, 122 bp, Homo sapiens
  misc_feature (61)..(62): /note="This region represents a CpG dinucleotide"
  misc_feature (61)..(61): /note="Nucleotide may be methylated to form 5-methylcytosine"
ttgttgaggaattgcttgttgagaacatgcaggtgtgttaagtgctcagtaaacatcagccgcctgagaccaggatcagggattatgccaccccgctgctgcccactgctcctggagtggcc

SEQ ID NO: 7003 - DNA, 122 bp, Homo sapiens
  misc_feature (61)..(62): /note="This region represents a CpG dinucleotide"
  misc_feature (61)..(61): /note="Nucleotide may be methylated to form 5-methylcytosine"
cagtgaactttgataacttttaggaaaactgtctgaagataaatataagcaagttgagaccgagaaaacgagaaattcagacagttcagatagttcagtagaaaatctagctaggactttaa

SEQ ID NO: 7004 - DNA, 122 bp, Homo sapiens
  misc_feature (61)..(62): /note="This region represents a CpG dinucleotide"
  misc_feature (61)..(61): /note="Nucleotide may be methylated to form 5-methylcytosine"
cagacttgaaagcagaaactgaaagcagagaaaaccactacatttaagatggtggcttaacgatagcagtggaaaagaaacagcatgcattgggcatagatatcacattcttccaagaactt

SEQ ID NO: 7005 - DNA, 122 bp, Homo sapiens
  misc_feature (61)..(62): /note="This region represents a CpG dinucleotide"
  misc_feature (61)..(61): /note="Nucleotide may be methylated to form 5-methylcytosine"
ctccctctctttgtctactaaggaaggatgaaagaaagtgcttaatcaccagctctttgtcgttggaactgagaagctgcagaatatagtggctgctggaactgcctcctcaaaggcatgtt

SEQ ID NO: 7006 - DNA, 122 bp, Homo sapiens
  misc_feature (61)..(62): /note="This region represents a CpG dinucleotide"
  misc_feature (61)..(61): /note="Nucleotide may be methylated to form 5-methylcytosine"
tttgtggttttcctgacctgatgcactgtgttcacggtctgtgcctttacatgcacacttcgctttgcctagaaggcatttctcaaggcaaactcctactcacacatcaacacctagctcag

SEQ ID NO: 7007 - DNA, 122 bp, Homo sapiens
  misc_feature (61)..(62): /note="This region represents a CpG dinucleotide"
  misc_feature (61)..(61): /note="Nucleotide may be methylated to form 5-methylcytosine"
tttatttggttcaggaaggacaatgagagattgtcaagtcgaacagactcactttacagacgaggataccaggtcctagaaaagttaattgaccagtcactgagctaactgcattgaatcat

SEQ ID NO: 7008 - DNA, 122 bp, Homo sapiens
  misc_feature (61)..(62): /note="This region represents a CpG dinucleotide"
  misc_feature (61)..(61): /note="Nucleotide may be methylated to form 5-methylcytosine"
ttaaatctctgtgaaggccctaatttatagataagcattgcactatctaatttatgccaccgggtggtagtattttattttcatttatgtaagctctagactagtagctttcagactttttg

SEQ ID NO: 7009 - DNA, 122 bp, Homo sapiens
  misc_feature (61)..(62): /note="This region represents a CpG dinucleotide"
  misc_feature (61)..(61): /note="Nucleotide may be methylated to form 5-methylcytosine"
tgcaggcaaaaacctgtcactctttcctcattcagcccagtgtctcattacatctcctgtcgatcagggtctaaatgtgtggggcggagaaccccagccaatcagtggtgctagcgtgaaaa

SEQ ID NO: 7010 - DNA, 122 bp, Homo sapiens
  misc_feature (61)..(62): /note="This region represents a CpG dinucleotide"
  misc_feature (61)..(61): /note="Nucleotide may be methylated to form 5-methylcytosine"
gggtctagttaattggtcatccacctgtgactccttactcaatgatttgatttggctctacgtccccacccaaatctcaccttgaattgtaataatccccacgtattgtgggagggacctgc

SEQ ID NO: 7011 - DNA, 122 bp, Homo sapiens
  misc_feature (61)..(62): /note="This region represents a CpG dinucleotide"
  misc_feature (61)..(61): /note="Nucleotide may be methylated to form 5-methylcytosine"
actaaaggttactcaaacacaaacaatgtgataccatgacagtcaacctgataacagagccggctcctgtgagactatctagcaggtagcatacactgtgtggatacactagacaaagggat

SEQ ID NO: 7012 - DNA, 122 bp, Homo sapiens
  misc_feature (61)..(62): /note="This region represents a CpG dinucleotide"
  misc_feature (61)..(61): /note="Nucleotide may be methylated to form 5-methylcytosine"
ttacctaaaaagtcagaggtacttcagccacgtctatttccaaaccagaaataactcagacgtagcctcagcagcactagagatccacattagttacactggcttaggatttaaatgttcac

SEQ ID NO: 7013 - DNA, 122 bp, Homo sapiens
  misc_feature (61)..(62): /note="This region represents a CpG dinucleotide"
  misc_feature (61)..(61): /note="Nucleotide may be methylated to form 5-methylcytosine"
gttacatacaataaaatatgcccttttgaatgtgtagtcctatgagttttgacaagcactcgtggttatgtaatgatcactactaccatgatcaagatatagaatatttttatcacctctca

SEQ ID NO: 7014 - DNA, 122 bp, Homo sapiens
  misc_feature (61)..(62): /note="This region represents a CpG dinucleotide"
  misc_feature (61)..(61): /note="Nucleotide may be methylated to form 5-methylcytosine"
tttttttaaaaatcactgatgcattacatgcccagctgcctcactaaatagattatttgccgtcaccattctgtcaccgtaaaagtttctaacatttttgaaaaggctcccttacccagaaa

SEQ ID NO: 7015 - DNA, 122 bp, Homo sapiens
  misc_feature (61)..(62): /note="This region represents a CpG dinucleotide"
  misc_feature (61)..(61): /note="Nucleotide may be methylated to form 5-methylcytosine"
gtcaggaaatggcctcttcctggtgccggctgccaatttaccacttttagagaggcagtgcgataattgccaaaccatcacccgacatgtctagtgggtcggtgggagacccctctctgggc

SEQ ID NO: 7016 - DNA, 122 bp, Homo sapiens
  misc_feature (61)..(62): /note="This region represents a CpG dinucleotide"
  misc_feature (61)..(61): /note="Nucleotide may be methylated to form 5-methylcytosine"
aagtgggcatctctgtgttccaataaaactttatttacaaaaacagcagctggcccagtgcggcctcagggcttagcttgtgggcctctgctccaacatttggttattgtcagtttggccag

SEQ ID NO: 7017 - DNA, 122 bp, Homo sapiens
  misc_feature (61)..(62): /note="This region represents a CpG dinucleotide"
  misc_feature (61)..(61): /note="Nucleotide may be methylated to form 5-methylcytosine"
cttggtggcccaagcatccttctagggtccttgcaagcagcagggctaggggcagccccacgagggctgcctccccacggctggccctagcaccctcagcaaatccacaggaactcaccaag

SEQ ID NO: 7018 - DNA, 122 bp, Homo sapiens
  misc_feature (61)..(62): /note="This region represents a CpG dinucleotide"
  misc_feature (61)..(61): /note="Nucleotide may be methylated to form 5-methylcytosine"
gccaactttctctgatttctcattggccagaagtgtggcctatgctctgcctaacccaatcgccagcaagggaattaggccatgatgattggcttagaccagtcaaaatttgccctctggaa

SEQ ID NO: 7019 - DNA, 122 bp, Homo sapiens
  misc_feature (61)..(62): /note="This region represents a CpG dinucleotide"
  misc_feature (61)..(61): /note="Nucleotide may be methylated to form 5-methylcytosine"
taccctgtgtacagtatgcgtgtatgtatgtgtgtgtgtgtgtgtgcccgtgtgtaattacgccctaccactcaatgctgtgtgcttgctctgtgctgggctctgggcaggtgcctgcaggg

SEQ ID NO: 7020 - DNA, 122 bp, Homo sapiens
  misc_feature (61)..(62): /note="This region represents a CpG dinucleotide"
  misc_feature (61)..(61): /note="Nucleotide may be methylated to form 5-methylcytosine"
gtgcaccaccagaaagttcactgacccttcacaagcaggggtcataggtccatttcccagcgtcatcaggaatcactccaggctgtgcactgacccagctcagggagcagtggccagcgatg

SEQ ID NO: 7021 - DNA, 122 bp, Homo sapiens
  misc_feature (61)..(62): /note="This region represents a CpG dinucleotide"
  misc_feature (61)..(61): /note="Nucleotide may be methylated to form 5-methylcytosine"
tcaacatgactaggctgtggtacccagttgtttggtcaaacatcaatctagacattgctgcgaaggtgtttttagatatgattaatatgcaaatcaatagattatcctccataatatgagtg

SEQ ID NO: 7022 - DNA, 122 bp, Homo sapiens
  misc_feature (61)..(62): /note="This region represents a CpG dinucleotide"
  misc_feature (61)..(61): /note="Nucleotide may be methylated to form 5-methylcytosine"
cccaccctcacccgccctgtttgccaggctcacacagcctttcttggagaggccctctggcggggagtttactctcaaaggctctatatctagctgacctgggattgccacccagctccgcc

SEQ ID NO: 7023 - DNA, 122 bp, Homo sapiens
  misc_feature (61)..(62): /note="This region represents a CpG dinucleotide"
  misc_feature (61)..(61): /note="Nucleotide may be methylated to form 5-methylcytosine"
ctcttcttggttttctggctttcttgctatcactctgtttgtcttgcctcagctgatgtgcgcctcccatttggtaagggcctttgtcatggccaagacatctaaagaaatcctagtctgtg

SEQ ID NO: 7024 - DNA, 122 bp, Homo sapiens
  misc_feature (61)..(62): /note="This region represents a CpG dinucleotide"
  misc_feature (61)..(61): /note="Nucleotide may be methylated to form 5-methylcytosine"
ttgggtgtgttccttaagctgaacttccgtagatctggcaggacatttaacaccagaacacgaagcctgcttcagaagtgactgaaacggcatctgcctcacagtgcatatttaaaaaatga

SEQ ID NO: 7025 - DNA, 122 bp, Homo sapiens
  misc_feature (61)..(62): /note="This region represents a CpG dinucleotide"
  misc_feature (61)..(61): /note="Nucleotide may be methylated to form 5-methylcytosine"
ccttcccaggcctctgttcactcctgagcatgactggtacctaacaggtgctcagacagtcgctggatgcagatgagggaacggctgtggacattcagtccttcagaccacaaaaggacttt

SEQ ID NO: 7026 - DNA, 122 bp, Homo sapiens
  misc_feature (61)..(62): /note="This region represents a CpG dinucleotide"
  misc_feature (61)..(61): /note="Nucleotide may be methylated to form 5-methylcytosine"
tgtctgttgatgattcattttttcattcaacaaacatttaatgaggcctacaatgtgcaccggattaggcactgtgaatacaaagatgagtaaggcactgtccttgcccttaaggaatttaa

SEQ ID NO: 7027 - DNA, 122 bp, Homo sapiens
  misc_feature (61)..(62): /note="This region represents a CpG dinucleotide"
  misc_feature (61)..(61): /note="Nucleotide may be methylated to form 5-methylcytosine"
aggcatggataaatctttgctaacagtcgtaagagtttacctcctgtgaggacctggctacgtgctgagcaccctgcttggtgctttgtacattgtgactcattcagttgctcaaacaacac

SEQ ID NO: 7028 - DNA, 122 bp, Homo sapiens
  misc_feature (61)..(62): /note="This region represents a CpG dinucleotide"
  misc_feature (61)..(61): /note="Nucleotide may be methylated to form 5-methylcytosine"
cttccgtcctacttgggacgaaatccataacgcactccgcggtccgaagttgtggggtctcggagcttccaggtgtgtctcgtgaactgcacaagcatttttttgtccccatgcgtcctacc

SEQ ID NO: 7029 - DNA, 122 bp, Homo sapiens
  misc_feature (61)..(62): /note="This region represents a CpG dinucleotide"
  misc_feature (61)..(61): /note="Nucleotide may be methylated to form 5-methylcytosine"
aatctcagctttatgatgtcagaagacttttaaacttcccattttccacagcttgttccccgcctagggaaaaagctcaatcacttcataaatctggcatcattctagtacactgtgtttta

SEQ ID NO: 7030 - DNA, 122 bp, Homo sapiens
  misc_feature (61)..(62): /note="This region represents a CpG dinucleotide"
  misc_feature (61)..(61): /note="Nucleotide may be methylated to form 5-methylcytosine"
gtgaaaaaattaatggctactccctttcatctcttcaattttgccttttttttaacgaatcgttaaaatagggacatttcctgttaacttgactttggtattgtgttctctgacccaaaatt

SEQ ID NO: 7031 - DNA, 122 bp, Homo sapiens
  misc_feature (61)..(62): /note="This region represents a CpG dinucleotide"
  misc_feature (61)..(61): /note="Nucleotide may be methylated to form 5-methylcytosine"
agacagagcaagatcctgtctcaaaaaaaaaaaaaaaaaaagtataagcgtcgtgctgtacggtgacacatcttgtgagagttggcatcaggactcaagcccaggagacacagttctcttac

SEQ ID NO: 7032 - DNA, 122 bp, Homo sapiens
  misc_feature (61)..(62): /note="This region represents a CpG dinucleotide"
  misc_feature (61)..(61): /note="Nucleotide may be methylated to form 5-methylcytosine"
cccagagagtgagcagcagcaagatttattgcaaacagttaaagaacaaagcttccacagcgtgaaaggggaccctagcaggttgcagctgctggcacaaatagcctgcttctattccctta

SEQ ID NO: 7033 - DNA, 122 bp, Homo sapiens
  misc_feature (61)..(62): /note="This region represents a CpG dinucleotide"
  misc_feature (61)..(61): /note="Nucleotide may be methylated to form 5-methylcytosine"
caggttgcaggccccgctcttggcgatgaagcgggctttggggaggcggtctcggatgcgcggcttgcgcaggttctctgcggcgatgcgcgccagcacatactcctccgggatgatactct

SEQ ID NO: 7034 - DNA, 122 bp, Homo sapiens
  misc_feature (61)..(62): /note="This region represents a CpG dinucleotide"
  misc_feature (61)..(61): /note="Nucleotide may be methylated to form 5-methylcytosine"
catgcatacgacatacttcctgcagtataatgatggttatcagtgtgctacacgttataacgaaagtcaattgtttcttacctggaaatatctcctgtgattcagtttcaccaatccaggct

SEQ ID NO: 7035 - DNA, 122 bp, Homo sapiens
  misc_feature (61)..(62): /note="This region represents a CpG dinucleotide"
  misc_feature (61)..(61): /note="Nucleotide may be methylated to form 5-methylcytosine"
ttgaaaatgtacaaaaggaaatgtcaagaggcctaggttccctctcatgacagaaacagacgtcagcagagcaggtcgctcagcccagttcagctctgtgtatgaaacagagattctagccc

SEQ ID NO: 7036 - DNA, 122 bp, Homo sapiens
  misc_feature (61)..(62): /note="This region represents a CpG dinucleotide"
  misc_feature (61)..(61): /note="Nucleotide may be methylated to form 5-methylcytosine"
aggaaactaagacacactttctatttggaaagcacattccaaaaacactagctttgttttcgcaatcagaaagccaattcctgtcactagaaaaaacaaaagttgatgcagtttcaatttcg

SEQ ID NO: 7037 - DNA, 122 bp, Homo sapiens
  misc_feature (61)..(62): /note="This region represents a CpG dinucleotide"
  misc_feature (61)..(61): /note="Nucleotide may be methylated to form 5-methylcytosine"
ctctcttatttttttcaacctcagccttttatgtgggcggagtggtgatcacctaattctcgcagacctggctgggggctgtcttctcctctaatcttacaaaaatggtctagcagctcggt

SEQ ID NO: 7038 - DNA, 122 bp, Homo sapiens
  misc_feature (61)..(62): /note="This region represents a CpG dinucleotide"
  misc_feature (61)..(61): /note="Nucleotide may be methylated to form 5-methylcytosine"
gcaatagagacctggagtgggcacactacatatccccctgcagtgatggaacccacagaccgcaggtcctctgcagtccattctcctgcctgtccagaggatccggatgttttctctttact

SEQ ID NO: 7039 - DNA, 122 bp, Homo sapiens
  misc_feature (61)..(62): /note="This region represents a CpG dinucleotide"
  misc_feature (61)..(61): /note="Nucleotide may be methylated to form 5-methylcytosine"
cctccccacgctgggcggggcacagctccaggccgggccgactcaggctgcgccagggtccgctagcctctgggatgcatggggacccctgggacgagggagcactctcctgagcaggaaat

SEQ ID NO: 7040 - DNA, 122 bp, Homo sapiens
  misc_feature (61)..(62): /note="This region represents a CpG dinucleotide"
  misc_feature (61)..(61): /note="Nucleotide may be methylated to form 5-methylcytosine"
aagaccaagggactttttacttacttcacattagtctcaaaatgtatgcatttctccaaacgtgaaggctttgtgtcctatttctctgatcttcagaaaaaaacacaagagagcgagtagag

SEQ ID NO: 7041 - DNA, 122 bp, Homo sapiens
  misc_feature (61)..(62): /note="This region represents a CpG dinucleotide"
  misc_feature (61)..(61): /note="Nucleotide may be methylated to form 5-methylcytosine"
ctgattctctgctgtaaccatctcaacttctctgaacttcctatcaatataaatcaatcacgacacccccacagtgcccaggcatgtacagggagaaaaaaagtaatcagtaactgaccact

SEQ ID NO: 7042 - DNA, 122 bp, Homo sapiens
  misc_feature (61)..(62): /note="This region represents a CpG dinucleotide"
  misc_feature (61)..(61): /note="Nucleotide may be methylated to form 5-methylcytosine"
tgacagtagggaattgacatttcctgagccagcgtctggggcatcggaccaagtgcagggcgagctgggcagggaggggtgcagccggctctgccgtcagcctaaagccatgagcgacctgg

SEQ ID NO: 7043 - DNA, 122 bp, Homo sapiens
  misc_feature (61)..(62): /note="This region represents a CpG dinucleotide"
  misc_feature (61)..(61): /note="Nucleotide may be methylated to form 5-methylcytosine"
atgcctgacactggatggcagtgttgcactgggcagaattcactaagtgcctaagggtcacgcaggtccatttgttttttgttttgttttgcttttaattgtatatatttaaggtgcacaat

SEQ ID NO: 7044 - DNA, 122 bp, Homo sapiens
  misc_feature (61)..(62): /note="This region represents a CpG dinucleotide"
  misc_feature (61)..(61): /note="Nucleotide may be methylated to form 5-methylcytosine"
atagatttgtgcaaagcattgtgtaagcatggcatatatagtttaaagaattccttgttgcggaaactccaggttttgttattcgtttgaagggtatgtgtgtttcctcctcctttacttcc

SEQ ID NO: 7045 - DNA, 122 bp, Homo sapiens
  misc_feature (61)..(62): /note="This region represents a CpG dinucleotide"
  misc_feature (61)..(61): /note="Nucleotide may be methylated to form 5-methylcytosine"
taacagcgtgcattacgtattcagatactgctttgcttcatcctctctaaaatttaacaccgaggagtttaagaaatgaagataaggaactcgaattatttttaaactttggatcaatgtaa

SEQ ID NO: 7046 - DNA, 122 bp, Homo sapiens
  misc_feature (61)..(62): /note="This region represents a CpG dinucleotide"
  misc_feature (61)..(61): /note="Nucleotide may be methylated to form 5-methylcytosine"
tggcacgacaacccagagggaggaagacctttccagtaggttttagaaaacatcgtgaaccggaattcagtggtcacctgaaaggcacatttcacagaccagctagcaaacagactcagcag

SEQ ID NO: 7047 - DNA, 122 bp, Homo sapiens
  misc_feature (61)..(62): /note="This region represents a CpG dinucleotide"
  misc_feature (61)..(61): /note="Nucleotide may be methylated to form 5-methylcytosine"
tagtaacagcaacaacaacaataaggccaactgtctttgctcaagctgttaactcttctccgcttgtagctatagcaccacctggagggagagtgggaacgtgagtctggaattgaattatt

SEQ ID NO: 7048 - DNA, 122 bp, Homo sapiens
  misc_feature (61)..(62): /note="This region represents a CpG dinucleotide"
  misc_feature (61)..(61): /note="Nucleotide may be methylated to form 5-methylcytosine"
agaaagatccaaaagtcctgtggatctgctttaacatcaataaaacagttatccacccttcgtagcttttagtgaaggctacaaaagtatgctttttatggattacacatgtgcacgcaact

SEQ ID NO: 7049 - DNA, 122 bp, Homo sapiens
  misc_feature (61)..(62): /note="This region represents a CpG dinucleotide"
  misc_feature (61)..(61): /note="Nucleotide may be methylated to form 5-methylcytosine"
ttgaaacatgtcccttcaagtggtaaattagctgctgccctgggctagttgagtgcctgccgccaacgcaagaccagcaagcacagccaggaacgtccagaattagttcactaccacatgct

SEQ ID NO: 7050 - DNA, 122 bp, Homo sapiens
  misc_feature (61)..(62): /note="This region represents a CpG dinucleotide"
  misc_feature (61)..(61): /note="Nucleotide may be methylated to form 5-methylcytosine"
cagccacagctttgagataagatttcatttcctagccagcggcctgtgtcacacatatctcgctagaatctcttggggaggggccaaaagccactggacaagggacaggatggggtcagggc

SEQ ID NO: 7051 - DNA, 122 bp, Homo sapiens
  misc_feature (61)..(62): /note="This region represents a CpG dinucleotide"
  misc_feature (61)..(61): /note="Nucleotide may be methylated to form 5-methylcytosine"
atggtcttgacaatttaatcaacctctctaacaatctgtctcatgatctttgaaagaaaacgtttgggggagaggtcacttccactcctaaaatttaaatattaaattcagtttccttagag

SEQ ID NO: 7052 - DNA, 122 bp, Homo sapiens
  misc_feature (61)..(62): /note="This region represents a CpG dinucleotide"
  misc_feature (61)..(61): /note="Nucleotide may be methylated to form 5-methylcytosine"
agtgaaggaagggtgacatgtatgccattgccacatgctatgtatttgctattcctccttcgtaggtgtcctctgagacagaaagaaagttctagggccatgcatggtgaagagaataggag

SEQ ID NO: 7053 - DNA, 122 bp, Homo sapiens
  misc_feature (61)..(62): /note="This region represents a CpG dinucleotide"
  misc_feature (61)..(61): /note="Nucleotide may be methylated to form 5-methylcytosine"
tacggtctttggaaaagcagaagttatttccaatgacacatactatttgctgaaaatttacggtagattgactcatgcatctttgcattgtacttagattaaaattctatagctttggttga

SEQ ID NO: 7054 - DNA, 122 bp, Homo sapiens
  misc_feature (61)..(62): /note="This region represents a CpG dinucleotide"
  misc_feature (61)..(61): /note="Nucleotide may be methylated to form 5-methylcytosine"
tttcccatctgctgacgtaggcccagggctgccctgcccctgctgccagtgtaccgtgagcggggctccagccagttcaagctcagagccagagctggacgggccagaactgcgctgcacac

SEQ ID NO: 7055 - DNA, 122 bp, Homo sapiens
  misc_feature (61)..(62): /note="This region represents a CpG dinucleotide"
  misc_feature (61)..(61): /note="Nucleotide may be methylated to form 5-methylcytosine"
ataaagttccttaggaacacatacttttatcatgttcaccactttattctaagtgcttaccgcaggcagtagcaggtacagagtaagttctcaataaatatctctataaacaatagaagtcc

SEQ ID NO: 7056 - DNA, 122 bp, Homo sapiens
  misc_feature (61)..(62): /note="This region represents a CpG dinucleotide"
  misc_feature (61)..(61): /note="Nucleotide may be methylated to form 5-methylcytosine"
ctgttaggttgcgtcagagtcccaatccaaatctcataactaagatcagttttggccaggcgtggtggctcacgcctgtaatcccagcactttgggaggcggaggcgggcggatcacgaggt

SEQ ID NO: 7057 - DNA, 122 bp, Homo sapiens
  misc_feature (61)..(62): /note="This region represents a CpG dinucleotide"
  misc_feature (61)..(61): /note="Nucleotide may be methylated to form 5-methylcytosine"
ttccccgagggcaccagcactggccgaccgacctggcttggggcgcggcgctggcaaacccggccttctgaggggacgccacgctgactctagtgcaggcagcccccaaaacggtataattg

SEQ ID NO: 7058 - DNA, 122 bp, Homo sapiens
  misc_feature (61)..(62): /note="This region represents a CpG dinucleotide"
  misc_feature (61)..(61): /note="Nucleotide may be methylated to form 5-methylcytosine"
aaaggcaagatgagagagcaatggctcccagccctttttagttaatgaatagcttagaaacgaacccatgtccagtgcaaagctcaagagaagccaagggaagcagaatctggaggcaaacc

SEQ ID NO: 7059 - DNA, 122 bp, Homo sapiens
  misc_feature (61)..(62): /note="This region represents a CpG dinucleotide"
  misc_feature (61)..(61): /note="Nucleotide may be methylated to form 5-methylcytosine"
cctttggataacaaatattaaggacagaagaaaaaaggtatgagtaacattcctacagcacgttagtgaaaagaaggtgggttttgagatcaggcagaattggattcaattctagcttaact

SEQ ID NO: 7060 - DNA, 122 bp, Homo sapiens
  misc_feature (61)..(62): /note="This region represents a CpG dinucleotide"
  misc_feature (61)..(61): /note="Nucleotide may be methylated to form 5-methylcytosine"
gccgagttgggcccctgcctcccacactagggagctgtgcagtgagtcagccctgcatgacgcaatgaagaatgtacataggagttccaggagtgagccaccatgtggatgcctaccgcatg

SEQ ID NO: 7061 - DNA, 122 bp, Homo sapiens
  misc_feature (61)..(62): /note="This region represents a CpG dinucleotide"
  misc_feature (61)..(61): /note="Nucleotide may be methylated to form 5-methylcytosine"
cacctgtgaagctgtggccacaatcacaatggtgaacttgtccgtctctcgaagagtcctcgggccctccctccccatctccaggcaaccactgatccgctttctgtcactgtaatttagca

SEQ ID NO: 7062 - DNA, 122 bp, Homo sapiens
  misc_feature (61)..(62): /note="This region represents a CpG dinucleotide"
  misc_feature (61)..(61): /note="Nucleotide may be methylated to form 5-methylcytosine"
actgaggtccttgctgtatgcagatgtctttgcctctcccctacagctccttttctgccccgccatggatcccacatggtgtcagtcaccgtgtctccctggactcctcttggtttcggcag

SEQ ID NO: 7063 - DNA, 122 bp, Homo sapiens
  misc_feature (61)..(62): /note="This region represents a CpG dinucleotide"
  misc_feature (61)..(61): /note="Nucleotide may be methylated to form 5-methylcytosine"
tatttgttgtactgaataagtttcgaacacagggagaactgtttaatttcactctcatgacggttagatgggagctgtaagcattagtgatgctagttcaccatgatgcaaattcagctttc

SEQ ID NO: 7064 - DNA, 122 bp, Homo sapiens
  misc_feature (61)..(62): /note="This region represents a CpG dinucleotide"
  misc_feature (61)..(61): /note="Nucleotide may be methylated to form 5-methylcytosine"
acaatgaaatcaggccgggcatgcaggctcttgctgggaacagcacactggggaactgtgcgcctttgaggttttaaccgtccgctggggaaacaagtgagttctttgaaggaaaacatatt

SEQ ID NO: 7065 - DNA, 122 bp, Homo sapiens
  misc_feature (61)..(62): /note="This region represents a CpG dinucleotide"
  misc_feature (61)..(61): /note="Nucleotide may be methylated to form 5-methylcytosine"
attcaaaatggggcaaaaaacagatatgagttaatgtcaggaaagtttttcataagctagcggttagatagctatgagttttccctatttaataggaccccgatatcttccaaattaatata

SEQ ID NO: 7066 - DNA, 122 bp, Homo sapiens
  misc_feature (61)..(62): /note="This region represents a CpG dinucleotide"
  misc_feature (61)..(61): /note="Nucleotide may be methylated to form 5-methylcytosine"
atgttcctgagccttaacttctatgggtgatttttttctctctgcatttgtgtttctctacgttttctgcactaatcatgtattccttctggaattagaaaaaaaaaggcagagcacagtgg

SEQ ID NO: 7067 - DNA, 122 bp, Homo sapiens
  misc_feature (61)..(62): /note="This region represents a CpG dinucleotide"
  misc_feature (61)..(61): /note="Nucleotide may be methylated to form 5-methylcytosine"
atgccaagataattcccacccacagacatactcacgattcatcttttcacgcaactttcacggagcatttactacgtgttctaggcctgtactcgatactaagaggagaaagacaaaacaag

SEQ ID NO: 7068 - DNA, 122 bp, Homo sapiens
  misc_feature (61)..(62): /note="This region represents a CpG dinucleotide"
  misc_feature (61)..(61): /note="Nucleotide may be methylated to form 5-methylcytosine"
ggggggccattcgattcgcctcagttgctgctgtaataaaagtctactttttgctaaaagcgtcgtgtgttcgcgcctttcccgccagggggagcgggcccggggcggaggcggggcccagg

SEQ ID NO: 7069 - DNA, 122 bp, Homo sapiens
  misc_feature (61)..(62): /note="This region represents a CpG dinucleotide"
  misc_feature (61)..(61): /note="Nucleotide may be methylated to form 5-methylcytosine"
ttatgtgtggctgacacttctgcctcacacgacacgctgttggagtttctccctaggtgtcgagcctgagagatgatcaaaatctgccaagaaacagtttatctatcctgcccagacagata

SEQ ID NO: 7070 - DNA, 122 bp, Homo sapiens
  misc_feature (61)..(62): /note="This region represents a CpG dinucleotide"
  misc_feature (61)..(61): /note="Nucleotide may be methylated to form 5-methylcytosine"
atgagttcactgcattgtctacttatctgtttttgtaatttcaacttttatttttgatttcggggtgcacatgtgggtttgttccataggtatattgcatgatgctcatgtttggggtatga

SEQ ID NO: 7071 - DNA, 122 bp, Homo sapiens
  misc_feature (61)..(62): /note="This region represents a CpG dinucleotide"
  misc_feature (61)..(61): /note="Nucleotide may be methylated to form 5-methylcytosine"
ggactggtcacatgctcttttctaagccagtgcctgggcaagggaaggggttggtcataacggatttagactacttaggatttacttctgggccaaggagagggagggggtgagggaggggg

SEQ ID NO: 7072 - DNA, 122 bp, Homo sapiens
  misc_feature (61)..(62): /note="This region represents a CpG dinucleotide"
  misc_feature (61)..(61): /note="Nucleotide may be methylated to form 5-methylcytosine"
acgcatctaagcgcagtgtgcttttgaggcttggaaattcatggtggcagctctgccacccgcagccaggctggtggctgccgaggcctagaaaggacagggcatccaccaggctaggatgg

SEQ ID NO: 7073 - DNA, 122 bp, Homo sapiens
  misc_feature (61)..(62): /note="This region represents a CpG dinucleotide"
  misc_feature (61)..(61): /note="Nucleotide may be methylated to form 5-methylcytosine"
cttctttggggccctagtaacaatttgacagtgttatatagataaacataattcctctcacgtaagttgtgaattccttgagagtaagaattgaactgtgccccaattcatctctatgatca

SEQ ID NO: 7074 - DNA, 122 bp, Homo sapiens
  misc_feature (61)..(62): /note="This region represents a CpG dinucleotide"
  misc_feature (61)..(61): /note="Nucleotide may be methylated to form 5-methylcytosine"
agtggggacagtagctgaaagtgtcagtcaagaggtgtcctctctgggtggaaaccctctcgttttcagtgaaatctctcaggaactgcttcatggcagcagattttgagaaccagtgaaag

SEQ ID NO: 7075 - DNA, 122 bp, Homo sapiens
  misc_feature (61)..(62): /note="This region represents a CpG dinucleotide"
  misc_feature (61)..(61): /note="Nucleotide may be methylated to form 5-methylcytosine"
gaaaccacaggtctaatcggagggcaacagtgtcatctggaagtgccggctcagggatgccgtcctgacggaagtcatgaatgctggaagtgggtctcgcagggtgagaggagtcaccaggt

SEQ ID NO: 7076 - DNA, 122 bp, Homo sapiens
  misc_feature (61)..(62): /note="This region represents a CpG dinucleotide"
  misc_feature (61)..(61): /note="Nucleotide may be methylated to form 5-methylcytosine"
tagctaattatgtagcagaacaaggccttacatatctgactctgcagtgtagactgaccccgtgctagtgatgtggtctatgcccatttgttcatacaagctagtggctgtcacagatgcat

SEQ ID NO: 7077 - DNA, 122 bp, Homo sapiens
  misc_feature (61)..(62): /note="This region represents a CpG dinucleotide"
  misc_feature (61)..(61): /note="Nucleotide may be methylated to form 5-methylcytosine"
ggccacagtaaggcaaatttacagtgaaagccacttgactgatggagtgcacaaatccaacgacccatgaagccagcaccagcctgatgcaagtctgccaactcatcaaagtcatgtaatgc

SEQ ID NO: 7078 - DNA, 122 bp, Homo sapiens
  misc_feature (61)..(62): /note="This region represents a CpG dinucleotide"
  misc_feature (61)..(61): /note="Nucleotide may be methylated to form 5-methylcytosine"
ttttaaatagcccaaacaatgggagttaacaaattgggcactaacattttaactttttctcgtgtttcaatatgtggaatttcttgcttagaagctggctctttccaagtatattgtttcat

SEQ ID NO: 7079 - DNA, 122 bp, Homo sapiens
  misc_feature (61)..(62): /note="This region represents a CpG dinucleotide"
  misc_feature (61)..(61): /note="Nucleotide may be methylated to form 5-methylcytosine"
aggttcctcagcccttcacattctgagttcagaacaccatgctgaggcacagtcatgagacgtgggagaggaacacccagcagacatttctagaagaaaagggttattctgtctcctaagcc

SEQ ID NO: 7080 - DNA, 122 bp, Homo sapiens
  misc_feature (61)..(62): /note="This region represents a CpG dinucleotide"
  misc_feature (61)..(61): /note="Nucleotide may be methylated to form 5-methylcytosine"
caaacagccttagccacaccccatatccagatctgaccaatcatcgcttcgctaggacagcggaacaaccaattgacagaatgaccccgcccaggatccttaaggcctttcgagggttgtgg

SEQ ID NO: 7081 - DNA, 122 bp, Homo sapiens
  misc_feature (61)..(62): /note="This region represents a CpG dinucleotide"
  misc_feature (61)..(61): /note="Nucleotide may be methylated to form 5-methylcytosine"
ttagcatgtgttccagacctgtcaaatcctaacaaagaaaaagatgataaatctgttatgcgcattgtaagtaatgactgtggttttaaaaataaaaattaagtgaaagcttccaaaaatgg

SEQ ID NO: 7082 - DNA, 122 bp, Homo sapiens
  misc_feature (61)..(62): /note="This region represents a CpG dinucleotide"
  misc_feature (61)..(61): /note="Nucleotide may be methylated to form 5-methylcytosine"
cattcattcatcactaatttattcattcaacactgatttacagaacacctgactctatgacgtcatacttggccctaggaatggaataatgaacacagcagataaatggaactgataaatgg

SEQ ID NO: 7083 - DNA, 122 bp, Homo sapiens
  misc_feature (61)..(62): /note="This region represents a CpG dinucleotide"
  misc_feature (61)..(61): /note="Nucleotide may be methylated to form 5-methylcytosine"
agaaactctggagttggggtccagcaatgttaacaagctctaggggatgattctgctctgcgtcaaactttgagaactggagctctaaaactatgaccacaggcaccatgaagaacatgttt

SEQ ID NO: 7084 - DNA, 122 bp, Homo sapiens
  misc_feature (61)..(62): /note="This region represents a CpG dinucleotide"
  misc_feature (61)..(61): /note="Nucleotide may be methylated to form 5-methylcytosine"
tatgtcttaaatactattatagtaggaaagggagaggagaaaattccccacccactcccccgatttggcccgtgtagcttccctttgagggtgtgtgacttgccatctgcaaaagtcatggc

SEQ ID NO: 7085 - DNA, 122 bp, Homo sapiens
  misc_feature (61)..(62): /note="This region represents a CpG dinucleotide"
  misc_feature (61)..(61): /note="Nucleotide may be methylated to form 5-methylcytosine"
acatggcagaggctgagttaatgatactgttggtctggcccataggattgagatagtccacgctgagtcatttcagagctgtgtggtatttcaatccaagattgctctgtaaactatgatgg

SEQ ID NO: 7086 - DNA, 122 bp, Homo sapiens
  misc_feature (61)..(62): /note="This region represents a CpG dinucleotide"
  misc_feature (61)..(61): /note="Nucleotide may be methylated to form 5-methylcytosine"
gcactattcttcttccctaactagagcttcttatgtctgtccggtcttcatcaatagatccgtaggaagcacccgccagacactgtgtcccgcccctgccttcaagctgctctagcagagat

SEQ ID NO: 7087 - DNA, 122 bp, Homo sapiens
  misc_feature (61)..(62): /note="This region represents a CpG dinucleotide"
  misc_feature (61)..(61): /note="Nucleotide may be methylated to form 5-methylcytosine"
ttcaagcaaagcctgatgagctggtccatgtctcctctgatccctgtcagccctgacctgcgctggctcttcacaaatggttaggaaggagactagaacagaaattatatccaacccccaac

SEQ ID NO: 7088 - DNA, 122 bp, Homo sapiens
  misc_feature (61)..(62): /note="This region represents a CpG dinucleotide"
  misc_feature (61)..(61): /note="Nucleotide may be methylated to form 5-methylcytosine"
tatgcaaatcagctgtctgttcaggtcttgtgtttgttttccccatagacataatccagccgttagttattcaaagcagcagatgggagaaggaatccgtggaaatgtggatttattagctc

SEQ ID NO: 7089 - DNA, 122 bp, Homo sapiens
  misc_feature (61)..(62): /note="This region represents a CpG dinucleotide"
  misc_feature (61)..(61): /note="Nucleotide may be methylated to form 5-methylcytosine"
tccctgtttgggggagatgtgtggtcctggtgcatacaagcctgcacacatgaccacatgcgcactgcaaacctccgggggatcggcctcctgggggctgagtgcttgcttgggcagctcta

SEQ ID NO: 7090 - DNA, 122 bp, Homo sapiens
  misc_feature (61)..(62): /note="This region represents a CpG dinucleotide"
  misc_feature (61)..(61): /note="Nucleotide may be methylated to form 5-methylcytosine"
aaaaagaatgcattctacgtccatgctaagccttctgcggtgaccaccgaggacagagcacgcaagtaggccactacctgggacaaaggccgcaggtaccaaatcatatctgagtctcatga

SEQ ID NO: 7091 - DNA, 122 bp, Homo sapiens
  misc_feature (61)..(62): /note="This region represents a CpG dinucleotide"
  misc_feature (61)..(61): /note="Nucleotide may be methylated to form 5-methylcytosine"
cccaagagcttgaagcctcgtgagcagagccaactattgctaaacactataaccaggggacgctcagggatccagctgcctctcacatctgggaagatttcctggaaccaagacaccctggc

SEQ ID NO: 7092 - DNA, 122 bp, Homo sapiens
  misc_feature (61)..(62): /note="This region represents a CpG dinucleotide"
  misc_feature (61)..(61): /note="Nucleotide may be methylated to form 5-methylcytosine"
gctccataaaggggacaaggctaaggcaacatccactactagattcaaaaatgaatataacgaggctttatattcaggtaacccagaggttcattatacagactggtattaaacaaacaact

SEQ ID NO: 7093 - DNA, 122 bp, Homo sapiens
  misc_feature (61)..(62): /note="This region represents a CpG dinucleotide"
  misc_feature (61)..(61): /note="Nucleotide may be methylated to form 5-methylcytosine"
ataaagagtttcatcatggatgattcaagaggttgagatgcaagctgtggtgatagctaacgatgcctctagcccagctgacctcactttctagctgttgacaggttcagtcaggctggcca

SEQ ID NO: 7094 - DNA, 122 bp, Homo sapiens
  misc_feature (61)..(62): /note="This region represents a CpG dinucleotide"
  misc_feature (61)..(61): /note="Nucleotide may be methylated to form 5-methylcytosine"
acaatgcctagggagatctttgtccagaaaggtgagttcagagagcctgctgtctgaccacgcttccccttccctgggcgcagatccttaaaagtgttaagtgaacactgctgagttcactt

SEQ ID NO: 7095 - DNA, 122 bp, Homo sapiens
  misc_feature (61)..(62): /note="This region represents a CpG dinucleotide"
  misc_feature (61)..(61): /note="Nucleotide may be methylated to form 5-methylcytosine"
agggtggctatagctcaggagagtgctcgaaaaaccccatgcatagctcaaaaaaccccacgcgtagctcagatgctctcaggctcaggtgcctaccgaggatgtcacgcattcccagtgct

SEQ ID NO: 7096 - DNA, 122 bp, Homo sapiens
  misc_feature (61)..(62): /note="This region represents a CpG dinucleotide"
  misc_feature (61)..(61): /note="Nucleotide may be methylated to form 5-methylcytosine"
caaagtgcaaatgcaccactggtttttccccaaagaacttcctggctgcaggagctgggacgtactgtttgataggaactcaagagacagtggcatttccctctctctggaccttccttagc

SEQ ID NO: 7097 - DNA, 122 bp, Homo sapiens
  misc_feature (61)..(62): /note="This region represents a CpG dinucleotide"
  misc_feature (61)..(61): /note="Nucleotide may be methylated to form 5-methylcytosine"
cactgtcaatactttctatatcatcctaccactgctgcaaacttcttccttcagagtgatcggaatttaacttcctctgcctgcaccttccctgagacaggaaaagccacaaaagaaataag

SEQ ID NO: 7098 - DNA, 122 bp, Homo sapiens
  misc_feature (61)..(62): /note="This region represents a CpG dinucleotide"
  misc_feature (61)..(61): /note="Nucleotide may be methylated to form 5-methylcytosine"
ataaaacctagagataaacaactcacagtttttatgttgagcaatactgtcacctgaaagcgtttcagcttgtattcttttacaggagaataaggacactgatatatttctgaatggagaaa

SEQ ID NO: 7099 - DNA, 122 bp, Homo sapiens
  misc_feature (61)..(62): /note="This region represents a CpG dinucleotide"
  misc_feature (61)..(61): /note="Nucleotide may be methylated to form 5-methylcytosine"
gctgcttggtcaaaaaataataataactctcggtggcgctgctggtggtgcctgagaagtcgctgttgcagtgcttgcatcctccgcatgctaatgaagctgtgatgtcagcaagtcagtca

SEQ ID NO: 7100 - DNA, 122 bp, Homo sapiens
  misc_feature (61)..(62): /note="This region represents a CpG dinucleotide"
  misc_feature (61)..(61): /note="Nucleotide may be methylated to form 5-methylcytosine"
cctaagtcaaatcacatcattcttctgccaaaaccctccaaagactctcagcttgctcagcgcacagcccggtgctcctggagcccacagaaggggcactgccctggcttccccttctgccg

SEQ ID NO: 7101 - DNA, 122 bp, Homo sapiens
  misc_feature (61)..(62): /note="This region represents a CpG dinucleotide"
  misc_feature (61)..(61): /note="Nucleotide may be methylated to form 5-methylcytosine"
gcatttaatgatttatgagggttataaacctcaattcaaaaaagcccaagttctgacagacgtcacttaaccactaccactcctcaattctaatatgcctcagcagtccacataggtggtta

SEQ ID NO: 7102 - DNA, 122 bp, Homo sapiens
  misc_feature (61)..(62): /note="This region represents a CpG dinucleotide"
  misc_feature (61)..(61): /note="Nucleotide may be methylated to form 5-methylcytosine"
gtgaggcctcactcaggctcacagcccctgatggagcactcagcttggcggctgcctgcccgaggtctccagaaaaggcagccagctcctagttgaagtcctcccactttacttccccttcc

SEQ ID NO: 7103 - DNA, 122 bp, Homo sapiens
  misc_feature (61)..(62): /note="This region represents a CpG dinucleotide"
  misc_feature (61)..(61): /note="Nucleotide may be methylated to form 5-methylcytosine"
tagttaagaatgcccagattatcctctttttgtcggtgtcaagaatttaatcctccctggcgccataccaacctccaccatacctgtttgtttttatgtgaatatgtaaaaattaacacccc

SEQ ID NO: 7104 - DNA, 122 bp, Homo sapiens
  misc_feature (61)..(62): /note="This region represents a CpG dinucleotide"
  misc_feature (61)..(61): /note="Nucleotide may be methylated to form 5-methylcytosine"
ggtgtgtctctgtatgcaatttaattactgtactttggttctgtatcattccaacagatacgctttaatgtaacccatgtcctggggagtggagggccagagcaggtggctgctgcagttcc

SEQ ID NO: 7105 - DNA, 122 bp, Homo sapiens
  misc_feature (61)..(62): /note="This region represents a CpG dinucleotide"
  misc_feature (61)..(61): /note="Nucleotide may be methylated to form 5-methylcytosine"
gtcctttctggggctcatgggtgcctctgccatccctgggatgctggaaggggaggtggacgggggataaattgcttaatgcaactctaaagccttgcttgaagagagaaccagccctgcag

SEQ ID NO: 7106 - DNA, 122 bp, Homo sapiens
  misc_feature (61)..(62): /note="This region represents a CpG dinucleotide"
  misc_feature (61)..(61): /note="Nucleotide may be methylated to form 5-methylcytosine"
ccatgttgtagacaccatcctgcctgtcaatacccatttcagtttgactgtggtagtatccgtcttgtgtttaagtcacccttatttgacttactcatgacccaaaatgcaagagtagtgag

SEQ ID NO: 7107 - DNA, 122 bp, Homo sapiens
  misc_feature (61)..(62): /note="This region represents a CpG dinucleotide"
  misc_feature (61)..(61): /note="Nucleotide may be methylated to form 5-methylcytosine"
actcttattcggctcggagccttatttctgctgctgggttttgctggctgttgctgtcctcgctgtctattttttctccccactagagcgcaggcgagggaagacaaaagacggagaacgac

SEQ ID NO: 7108 - DNA, 122 bp, Homo sapiens
  misc_feature (61)..(62): /note="This region represents a CpG dinucleotide"
  misc_feature (61)..(61): /note="Nucleotide may be methylated to form 5-methylcytosine"
gagatggtgtcagcagtgactcccaggaatatccagtggtgtggtggcccatcccaggcccggctgggcaggtggctggcttgctgggggatgtgatgatggtggtaggcatgggaggcact

SEQ ID NO: 7109 - DNA, 122 bp, Homo sapiens
  misc_feature (61)..(62): /note="This region represents a CpG dinucleotide"
  misc_feature (61)..(61): /note="Nucleotide may be methylated to form 5-methylcytosine"
acagcttagtttccagccagatccatgggactgtgggtgaattccttccttcttcaacaacgttgatgctgatttcatgctgtttgtgcaacttaggcagtaaaaagtttcctttccccctt

SEQ ID NO: 7110 - DNA, 122 bp, Homo sapiens
  misc_feature (61)..(62): /note="This region represents a CpG dinucleotide"
  misc_feature (61)..(61): /note="Nucleotide may be methylated to form 5-methylcytosine"
caggcaggcaaggaaggtatcaaccacactgcctgaggaggctgggagagggggaagggacgttaacaaagagaagatacggccttgcctctgaagaattttataatacagctggagaacca

SEQ ID NO: 7111 - DNA, 122 bp, Homo sapiens
  misc_feature (61)..(62): /note="This region represents a CpG dinucleotide"
  misc_feature (61)..(61): /note="Nucleotide may be methylated to form 5-methylcytosine"
ctgaacagaagattgtttacaagattattttcttcttttaacctgcagggtcatgactaccgtacttcctcacactcctctccaggtcttttgttgtcaaaaggggcagctcacttatgtga

SEQ ID NO: 7112 - DNA, 122 bp, Homo sapiens
  misc_feature (61)..(62): /note="This region represents a CpG dinucleotide"
  misc_feature (61)..(61): /note="Nucleotide may be methylated to form 5-methylcytosine"
aggtcagcacaatgatccccagattgtacggaaataataacaatgggaacaacagagcagcgatatttcctgagcactcgcagtgtgccgatcattgattggattatgtcacctggatcatc

SEQ ID NO: 7113 - DNA, 122 bp, Homo sapiens
  misc_feature (61)..(62): /note="This region represents a CpG dinucleotide"
  misc_feature (61)..(61): /note="Nucleotide may be methylated to form 5-methylcytosine"
tgtagcagtgcattgagagtcagggcctctggcacctccatggggctcagggtctgaagacgtgatccaaacctgacaacttggtggcaggttctgtgagcattcatgatgttgtgaaaagg

SEQ ID NO: 7114 - DNA, 122 bp, Homo sapiens
  misc_feature (61)..(62): /note="This region represents a CpG dinucleotide"
  misc_feature (61)..(61): /note="Nucleotide may be methylated to form 5-methylcytosine"
tgtcattcctattctccctttcacctctaccgttttccaacagatgagcaaatacggtaacgatagcattttggtctagttcctgcacaaactcattcctctgcataaaaggcagacctttg

SEQ ID NO: 7115 - DNA, 122 bp, Homo sapiens
  misc_feature (61)..(62): /note="This region represents a CpG dinucleotide"
  misc_feature (61)..(61): /note="Nucleotide may be methylated to form 5-methylcytosine"
tcattcacccatctattcactcatcattgcattgactcacccaatccagtcactctttaacgtcttgattcattcactcagtcattctggcatgcactcattcattcaatggcccatccatt

SEQ ID NO: 7116 - DNA, 122 bp, Homo sapiens
  misc_feature (61)..(62): /note="This region represents a CpG dinucleotide"
  misc_feature (61)..(61): /note="Nucleotide may be methylated to form 5-methylcytosine"
gtgactggttcaaaggtgaacacatgacccagacagagccaactggagtcccttcctgtacgtgtgtatgggaggaaggaaatggaaaggatgttagtatggagctgtctgtttgcagacat

SEQ ID NO: 7117 - DNA, 122 bp, Homo sapiens
  misc_feature (61)..(62): /note="This region represents a CpG dinucleotide"
  misc_feature (61)..(61): /note="Nucleotide may be methylated to form 5-methylcytosine"
aaattcctctgcccctgagtttacagagctcagctgttaagtatttccctgttgaagtggcgtgcaagggggtgggttgctctttatttcctctgctgtctacttcccatacctaaaagggt

SEQ ID NO: 7118 - DNA, 122 bp, Homo sapiens
  misc_feature (61)..(62): /note="This region represents a CpG dinucleotide"
  misc_feature (61)..(61): /note="Nucleotide may be methylated to form 5-methylcytosine"
acccatgtgaaataaacagctttattgctcacataaagcctgtttggtggtctcttcacacggacgcgcatgaaactaacaatgtattggggagagaaacacacatctgcaaatatcattgc

SEQ ID NO: 7119 - DNA, 122 bp, Homo sapiens
  misc_feature (61)..(62): /note="This region represents a CpG dinucleotide"
  misc_feature (61)..(61): /note="Nucleotide may be methylated to form 5-methylcytosine"
aaaaggcatttttgaaaaagctgaatatgaactaggtgttttatgatattaaggaagtatcgttaattttgttaggtgtggtaatgataccgagattatgaaagaaaatatcagctgggtgt

SEQ ID NO: 7120 - DNA, 122 bp, Homo sapiens
  misc_feature (61)..(62): /note="This region represents a CpG dinucleotide"
  misc_feature (61)..(61): /note="Nucleotide may be methylated to form 5-methylcytosine"
cccaaaacaaaccagcacgcctatcataccaaaagtagctatgtctttaaattaaattgccgttcgtaagttccttttacatagaaaatttggagcagtcagtgtcctcagcacccgtcagt

SEQ ID NO: 7121 - DNA, 122 bp, Homo sapiens
  misc_feature (61)..(62): /note="This region represents a CpG dinucleotide"
  misc_feature (61)..(61): /note="Nucleotide may be methylated to form 5-methylcytosine"
taaattgagccattgcaaaatgtgtttctctacctttcatttgatagattcctacttaagcgtcaaaatgcagtgcatacagcatcgcctttggaaatccatctttgacctcccttctgtaa

SEQ ID NO: 7122 - DNA, 122 bp, Homo sapiens
  misc_feature (61)..(62): /note="This region represents a CpG dinucleotide"
  misc_feature (61)..(61): /note="Nucleotide may be methylated to form 5-methylcytosine"
tacttccttcctaaataagcaataaggtcaacaagggctgggtaaaaagcctcacaaatacgaaagctgtcatgtttgtgagcccagaatttcagttctgagtgatgattggctatggaaaa

SEQ ID NO: 7123 - DNA, 122 bp, Homo sapiens
  misc_feature (61)..(62): /note="This region represents a CpG dinucleotide"
  misc_feature (61)..(61): /note="Nucleotide may be methylated to form 5-methylcytosine"
tggagggggcagggtttccggaagctgggtgtacacactctgcctctaggacgcctgagacggagactagatgctgtccctcaagcagaaggaattgagcaactactctccacctcatctgc

SEQ ID NO: 7124 - DNA, 122 bp, Homo sapiens
  misc_feature (61)..(62): /note="This region represents a CpG dinucleotide"
  misc_feature (61)..(61): /note="Nucleotide may be methylated to form 5-methylcytosine"
tggcagagctgcgtctgcactgttttcccttgtggcgttgtggtgtcggcccgtttggtgcgcagctcagcatccgttcagacatgtggctgccatcctgttcctgatgaggcaaatggctg

SEQ ID NO: 7125 - DNA, 122 bp, Homo sapiens
  misc_feature (61)..(62): /note="This region represents a CpG dinucleotide"
  misc_feature (61)..(61): /note="Nucleotide may be methylated to form 5-methylcytosine"
tgaaatgctctttgcagaaagtttcagccgtaacaaatgagcacgcaccgcgcaccagatcgcggactccgggatggtgcctggaggtgagcagatcttccttcgccgcacaagctggaaca

SEQ ID NO: 7126 - DNA, 122 bp, Homo sapiens
  misc_feature (61)..(62): /note="This region represents a CpG dinucleotide"
  misc_feature (61)..(61): /note="Nucleotide may be methylated to form 5-methylcytosine"
ccatgatagactttacagtatcaacttagtaacgtatcatacagagcatgtcgtcgtcaccgtttctaaaatgttcagtgagccaagagcaagtccacagtcacagggcaggtacagtgagt

SEQ ID NO: 7127 - DNA, 122 bp, Homo sapiens
  misc_feature (61)..(62): /note="This region represents a CpG dinucleotide"
  misc_feature (61)..(61): /note="Nucleotide may be methylated to form 5-methylcytosine"
ctttctgaaaagttcacttacaacatacacagaatgaaaaacacacgatgccccaactctcgccttcctagtgagttggttcaggggcctggatgttgtcaaatattgagatctttagaaat

SEQ ID NO: 7128 - DNA, 122 bp, Homo sapiens
  misc_feature (61)..(62): /note="This region represents a CpG dinucleotide"
  misc_feature (61)..(61): /note="Nucleotide may be methylated to form 5-methylcytosine"
tcctttccataggtccatgagactggggcagcagcaggggcaggtacagagcacctcagccgcctctccacctgacagcaacatcaaagccgaggccaaggcgggagggcccagagtgagac

SEQ ID NO: 7129 - DNA, 122 bp, Homo sapiens
  misc_feature (61)..(62): /note="This region represents a CpG dinucleotide"
  misc_feature (61)..(61): /note="Nucleotide may be methylated to form 5-methylcytosine"
gcgtctccctggaggggctgagtcgcagggtgtgtagggcaagtccgtggagggctgagtcgcagggtgtgcagggtgactccatggagggctgagttgcccgccgtggtcagatccctggg

SEQ ID NO: 7130 - DNA, 122 bp, Homo sapiens
  misc_feature (61)..(62): /note="This region represents a CpG dinucleotide"
  misc_feature (61)..(61): /note="Nucleotide may be methylated to form 5-methylcytosine"
ggcgctgagtgcacggctgggctccacgctgatttctcctaatgaattaataatggcgctcgggcgggcgggggtggccggctgcggaccgcggagagagccgaggggaaggccgtggaggg

SEQ ID NO: 7131 - DNA, 122 bp, Homo sapiens
  misc_feature (61)..(62): /note="This region represents a CpG dinucleotide"
  misc_feature (61)..(61): /note="Nucleotide may be methylated to form 5-methylcytosine"
gggaaaaaaaaaagtatttatgaaactcctacggtagcagaataagcctccagggcccttcgagcaatcccaggtattctcttcctctttcagttccacttagagaaaaactactctgtggc

SEQ ID NO: 7132 - DNA, 122 bp, Homo sapiens
  misc_feature (61)..(62): /note="This region represents a CpG dinucleotide"
  misc_feature (61)..(61): /note="Nucleotide may be methylated to form 5-methylcytosine"
agttaacagaagcaagttgactcaggcaactgtgagaaaagctaagactgtttgcatgcacgtggtgagtcatctaatgtgtaagtcaagctaccagctagaattaatcttgtgcatggaaa

SEQ ID NO: 7133 - DNA, 122 bp, Homo sapiens
  misc_feature (61)..(62): /note="This region represents a CpG dinucleotide"
  misc_feature (61)..(61): /note="Nucleotide may be methylated to form 5-methylcytosine"
tgattcataataatgaatcacaaattcatgatgatgttaatttatttgctgaaacagtaacgtcttttatgttattcttggtggaagctgatgcccaggtgcctcccacctctggccacaag

SEQ ID NO: 7134 - DNA, 122 bp, Homo sapiens
  misc_feature (61)..(62): /note="This region represents a CpG dinucleotide"
  misc_feature (61)..(61): /note="Nucleotide may be methylated to form 5-methylcytosine"
ggtttatctatgttgtaacatgtatcagacgtcattactttctgtggctaaataatattccgttgtctgtgtataccacattttatgtattcatttatccactagtggacacttgaatcatt

SEQ ID NO: 7135 - DNA, 122 bp, Homo sapiens
  misc_feature (61)..(62): /note="This region represents a CpG dinucleotide"
  misc_feature (61)..(61): /note="Nucleotide may be methylated to form 5-methylcytosine"
gctttaaagagatttgtttcagttccttgtttgagggaggtaatgggccagcctaagaatcgaaagtgacaatgaaatatgaatgtaaaagaggaagggagacagacctctggcttgttagt

SEQ ID NO: 7136 - DNA, 122 bp, Homo sapiens
  misc_feature (61)..(62): /note="This region represents a CpG dinucleotide"
  misc_feature (61)..(61): /note="Nucleotide may be methylated to form 5-methylcytosine"
aacccgcccaatcgcccaaatacttcagaacgtttcaggcagaggaaatatgccaagacccggtgctcagaaggtgggggagcgtggccaaagctaaagcagtggctggcagctggtggcgc

SEQ ID NO: 7137 - DNA, 122 bp, Homo sapiens
  misc_feature (61)..(62): /note="This region represents a CpG dinucleotide"
  misc_feature (61)..(61): /note="Nucleotide may be methylated to form 5-methylcytosine"
cacctattcttctgttcacatgacttgggatttccagttctgaaagcattgatcagctcccgctccgtacccgatgctgcacgtggctctagggctgaatgtgatgtgggtcgtggccagct

SEQ ID NO: 7138 - DNA, 122 bp, Homo sapiens
  misc_feature (61)..(62): /note="This region represents a CpG dinucleotide"
  misc_feature (61)..(61): /note="Nucleotide may be methylated to form 5-methylcytosine"
cagcttttcttttctatgtatagacacacaaatacttaccattgtgttacaactggctaccgtagccagtacagtaccatgctgtacaggtttgcagctcaggagcaacaggccatatcgtg

SEQ ID NO: 7139 - DNA, 122 bp, Homo sapiens
  misc_feature (61)..(62): /note="This region represents a CpG dinucleotide"
  misc_feature (61)..(61): /note="Nucleotide may be methylated to form 5-methylcytosine"
tcacttgtctcctttctgactgtccctgccaatgctccagctgtcgtctgactctgggttcgttggggacatgagattttattttttgtgagtgagactgagggatcgtagatttttacaat

SEQ ID NO: 7140 - DNA, 122 bp, Homo sapiens
  misc_feature (61)..(62): /note="This region represents a CpG dinucleotide"
  misc_feature (61)..(61): /note="Nucleotide may be methylated to form 5-methylcytosine"
aatcaattatttacttgattgctgcaagctttagactgaacgttccttgagaaataggatcgttcattaaattattcagcaaacatctattgcacttggcaggagctgatgtggaggcaggg

SEQ ID NO: 7141 - DNA, 122 bp, Homo sapiens
  misc_feature (61)..(62): /note="This region represents a CpG dinucleotide"
  misc_feature (61)..(61): /note="Nucleotide may be methylated to form 5-methylcytosine"
gctgagcgtggccccaagcagaacaattaagcaggcagaatttattttcattgtgggttacgtctccattgtgcaatctagaatggcttggactggacgtcagaactggattctgtttccag

SEQ ID NO: 7142 - DNA, 122 bp, Homo sapiens
  misc_feature (61)..(62): /note="This region represents a CpG dinucleotide"
  misc_feature (61)..(61): /note="Nucleotide may be methylated to form 5-methylcytosine"
aaaatatatgcagcttggcataaaaatatttctgaaatgaatgctatcttccctctcctccgttaaaagagtatacaatgtaatttgccttttatgaatgattcagtatccttatgatgcct

SEQ ID NO: 7143 - DNA, 122 bp, Homo sapiens
  misc_feature (61)..(62): /note="This region represents a CpG dinucleotide"
  misc_feature (61)..(61): /note="Nucleotide may be methylated to form 5-methylcytosine"
tgaagctgggcaagccatttcctctttctgggactcaatcatgtgaaacacagttgtgctcgtcatctctctactttctgttacaacatattatgattctgtttgggaccagccttgagcaa

SEQ ID NO: 7144 - DNA, 122 bp, Homo sapiens
  misc_feature (61)..(62): /note="This region represents a CpG dinucleotide"
  misc_feature (61)..(61): /note="Nucleotide may be methylated to form 5-methylcytosine"
agaccaatcttggaggactggcagagctagggccggcaccaggagttatctgttagcctgcgctttgcaaggtctgaaaccctcagatgctgcctctccaagaatgcccagctctcctccct

SEQ ID NO: 7145 - DNA, 122 bp, Homo sapiens
  misc_feature (61)..(62): /note="This region represents a CpG dinucleotide"
  misc_feature (61)..(61): /note="Nucleotide may be methylated to form 5-methylcytosine"
ctgccaagtaaaccttacacatggtagagtttaaatctcttgcctttaaagggatctccacgtccagccaatctgaattaaagatgagtacccattagtattatgcagacggttcagcttct

SEQ ID NO: 7146 - DNA, 122 bp, Homo sapiens
  misc_feature (61)..(62): /note="This region represents a CpG dinucleotide"
  misc_feature (61)..(61): /note="Nucleotide may be methylated to form 5-methylcytosine"
cgtctcctcctcagtcatagagcaattgtttttcgtccgtttggtaggtaaaacccccatcgaaaccctcatccgggatatgttactgtccggcagcagttttaactggccgtatatggcaa

SEQ ID NO: 7147 - DNA, 122 bp, Homo sapiens
  misc_feature (61)..(62): /note="This region represents a CpG dinucleotide"
  misc_feature (61)..(61): /note="Nucleotide may be methylated to form 5-methylcytosine"
agctaataacacaaatgaagtgccccttcctgcagggttatagatcttcaaattaaagatcgttcctgtaccctgcaccacccttcagccactctaattaatcaattcacagctttccgtcg

SEQ ID NO: 7148 - DNA, 122 bp, Homo sapiens
  misc_feature (61)..(62): /note="This region represents a CpG dinucleotide"
  misc_feature (61)..(61): /note="Nucleotide may be methylated to form 5-methylcytosine"
cctctctcccaggtctgaaacacaatagagacttttaaagggacacttctgtgtattctacgactgacccatgaaattcactgggaaggagcctgcaagagagctcagactcttttcacttc

SEQ ID NO: 7149 - DNA, 122 bp, Homo sapiens
  misc_feature (61)..(62): /note="This region represents a CpG dinucleotide"
  misc_feature (61)..(61): /note="Nucleotide may be methylated to form 5-methylcytosine"
taatttagcaaacatttctgaggacccacttattgggcacttaaagaagtgagtatgacacggccctgccctagaagaccttgcagtctaggaaggaggttcatgctgtgacttctgagctt

SEQ ID NO: 7150 - DNA, 122 bp, Homo sapiens
  misc_feature (61)..(62): /note="This region represents a CpG dinucleotide"
  misc_feature (61)..(61): /note="Nucleotide may be methylated to form 5-methylcytosine"
ctcaaacagaatgtgcatttgagggcagaatgtgtaaatattgcactactgtgttataaccgtcaggagccatgctgatgatgaaacgtcccagatgccggtgctggaaaggtccctggctt

SEQ ID NO: 7151 - DNA, 122 bp, Homo sapiens
  misc_feature (61)..(62): /note="This region represents a CpG dinucleotide"
  misc_feature (61)..(61): /note="Nucleotide may be methylated to form 5-methylcytosine"
aaatattaaccataacttgaggataagaatcaccaagcctgagctgggcgctgtggctcacgcctgtaatcccagcactttgggaggccgaggcgggtggattgcctgaagtcaggagttcg

SEQ ID NO: 7152 - DNA, 122 bp, Homo sapiens
  misc_feature (61)..(62): /note="This region represents a CpG dinucleotide"
  misc_feature (61)..(61): /note="Nucleotide may be methylated to form 5-methylcytosine"
gggtgcctcgcaaccctggagctgcatttaagtggactgtctcccagtgacagaggcgggcggctgcacttagctgtgccgtgggcttactcacagggggtggagacaagatgacatcacac

SEQ ID NO: 7153 - DNA, 122 bp, Homo sapiens
  misc_feature (61)..(62): /note="This region represents a CpG dinucleotide"
  misc_feature (61)..(61): /note="Nucleotide may be methylated to form 5-methylcytosine"
ggccaggcactgttctggcaataggcctctgtcctaatgccaacgaaaggagcttatctgcgggggaggctgactgataatcaataagtaaaaaataaattcaagaacagaaacgttcagag

SEQ ID NO: 7154 - DNA, 122 bp, Homo sapiens
  misc_feature (61)..(62): /note="This region represents a CpG dinucleotide"
  misc_feature (61)..(61): /note="Nucleotide may be methylated to form 5-methylcytosine"
tttgttcggtggagtcatgttttagaaagataagctcataaactgttcaaatacaaacaacgttagcacctctcctagtttacaaattctgaccaaccataatgtaaacctcaattataaac

SEQ ID NO: 7155 - DNA, 122 bp, Homo sapiens
  misc_feature (61)..(62): /note="This region represents a CpG dinucleotide"
  misc_feature (61)..(61): /note="Nucleotide may be methylated to form 5-methylcytosine"
ccttcttcacccagtaggcttcattctcttttctgagtcctacctctgtgtcttcacatgcgacagccactattaccctggcactttccttgtgtgtgtgtcacagccctagcgagtttcct

SEQ ID NO: 7156 - DNA, 122 bp, Homo sapiens
  misc_feature (61)..(62): /note="This region represents a CpG dinucleotide"
  misc_feature (61)..(61): /note="Nucleotide may be methylated to form 5-methylcytosine"
caatagggtaatcagctgttattgtgagtctgagagtctctgtcgaaacagagagtgagccgcatcagggagggagggagaaatggatgaggtgatgcaaaagtgctcccatttcccaaccc

SEQ ID NO: 7157 - DNA, 122 bp, Homo sapiens
  misc_feature (61)..(62): /note="This region represents a CpG dinucleotide"
  misc_feature (61)..(61): /note="Nucleotide may be methylated to form 5-methylcytosine"
tgattttaaaaatatttacaattgagatgataaaacaactcatttgtcattggaaaattgcgctacaccacacaactttgtgcttcaggttttcggatggaggtggctgcagaccttaggta

SEQ ID NO: 7158 - DNA, 122 bp, Homo sapiens
  misc_feature (61)..(62): /note="This region represents a CpG dinucleotide"
  misc_feature (61)..(61): /note="Nucleotide may be methylated to form 5-methylcytosine"
aatttgcaaagtggtgcagtactcagattgacctcagggagcttagagaggggtgaggagcgagacaatcacataatcaatgcaagaactaggaagtgatgtgaagggcaccaagagatcac

SEQ ID NO: 7159 - DNA, 122 bp, Homo sapiens
  misc_feature (61)..(62): /note="This region represents a CpG dinucleotide"
  misc_feature (61)..(61): /note="Nucleotide may be methylated to form 5-methylcytosine"
caatgtctgccttctgagctgtgggcgattcccattgttgtgaggtttcctccaactggacgttaagttactgagaacaggaatcagggatgcgattggtgcgtgtcttctgtggctacctg

SEQ ID NO: 7160 - DNA, 122 bp, Homo sapiens
  misc_feature (61)..(62): /note="This region represents a CpG dinucleotide"
  misc_feature (61)..(61): /note="Nucleotide may be methylated to form 5-methylcytosine"
ctctctctgcattgctcagccctcggttgatcccttcaatgaccttctcaatggggtcatcgctggccgcccatccagacagggcccccagtagcagaaggagggagcaggagccgaccaga

SEQ ID NO: 7161 - DNA, 122 bp, Homo sapiens
  misc_feature (61)..(62): /note="This region represents a CpG dinucleotide"
  misc_feature (61)..(61): /note="Nucleotide may be methylated to form 5-methylcytosine"
taattgtagatggatttccaaaccacagaacacttgaagatatactacaggtggcactcacgcttgacacaagttttacttcagatgttagagatttctgcatgtattatcatcatgttctc

SEQ ID NO: 7162 - DNA, 122 bp, Homo sapiens
  misc_feature (61)..(62): /note="This region represents a CpG dinucleotide"
  misc_feature (61)..(61): /note="Nucleotide may be methylated to form 5-methylcytosine"
tagggggatgggattatgctgattaagagtaggtccaaccctttatgaactctggctttacgatgaatgaggctggcattaatgcctgcaaaaatggacaaacttgctgtttgaatttattt

SEQ ID NO: 7163 - DNA, 122 bp, Homo sapiens
  misc_feature (61)..(62): /note="This region represents a CpG dinucleotide"
  misc_feature (61)..(61): /note="Nucleotide may be methylated to form 5-methylcytosine"
aagatgatatcaccccccaatcgcaggaggtgtacacctactctgtgatattttttccaacgtgcagggcaggggaggataatactcttcttcacagcacagggtgtgtacagccccactgt

SEQ ID NO: 7164 - DNA, 122 bp, Homo sapiens
  misc_feature (61)..(62): /note="This region represents a CpG dinucleotide"
  misc_feature (61)..(61): /note="Nucleotide may be methylated to form 5-methylcytosine"
cagggcactccgtgtgctctagtcctttttagatgagaatgagccatcttcctcctactccggggcctttgcacatgcaaatgcttctgtgtgaatcaaccttcctttagcccaagtaaatt

SEQ ID NO: 7165 - DNA, 122 bp, Homo sapiens
  misc_feature (61)..(62): /note="This region represents a CpG dinucleotide"
  misc_feature (61)..(61): /note="Nucleotide may be methylated to form 5-methylcytosine"
tccctctggccctgaagccctgggcttgatatgacctcaaggcacccagacctgtcctcacgcgggccgtcctcccgtctcccaggaagtggcagtgagatttagtggttgacaggatgctg

SEQ ID NO: 7166 - DNA, 122 bp, Homo sapiens
  misc_feature (61)..(62): /note="This region represents a CpG dinucleotide"
  misc_feature (61)..(61): /note="Nucleotide may be methylated to form 5-methylcytosine"
gctggaattggtttggatttagcctctgccgacttcagagtgtgcaacagccaaatagaacgcacgtcaagttttgcaaactgtccagcacagcccgcgctgtttctgtggttaagcgccat

SEQ ID NO: 7167 - DNA, 122 bp, Homo sapiens
  misc_feature (61)..(62): /note="This region represents a CpG dinucleotide"
  misc_feature (61)..(61): /note="Nucleotide may be methylated to form 5-methylcytosine"
cagaaggagaaatcagagctccaggaagttaaagtgaaaagctagaaaagtcaggtaggccgtctcaggtctggccatgccgaagttatgcttacgcctcttacgaggacaaaaggaccccc

SEQ ID NO: 7168 - DNA, 122 bp, Homo sapiens
  misc_feature (61)..(62): /note="This region represents a CpG dinucleotide"
  misc_feature (61)..(61): /note="Nucleotide may be methylated to form 5-methylcytosine"
agttaaacccagaatgtcattaactctgtgttctttatgtggataatgaacttcctcttacgcccatcagtgggctctgaagggtcattgattgtaaactcctttggcttaagaaattctag

SEQ ID NO: 7169 - DNA, 122 bp, Homo sapiens
  misc_feature (61)..(62): /note="This region represents a CpG dinucleotide"
  misc_feature (61)..(61): /note="Nucleotide may be methylated to form 5-methylcytosine"
tgctcagacagtagggaatctggagggatgaatgagcaaagcctgtgtcatcctagaggtcgtgtggaggtttgcaagagtaaaggatgcttagaactgtgtctcacagaggtaacgtagga

SEQ ID NO: 7170 - DNA, 122 bp, Homo sapiens
  misc_feature (61)..(62): /note="This region represents a CpG dinucleotide"
  misc_feature (61)..(61): /note="Nucleotide may be methylated to form 5-methylcytosine"
gatcacaccctttacggacgcggcacctgcgacagggatgcgcgaggagtcagggggcctcgccggatcgaacctaagctggggaagagtatttcttgtatttttaggagaaattctcagcc

SEQ ID NO: 7171 - DNA, 122 bp, Homo sapiens
  misc_feature (61)..(62): /note="This region represents a CpG dinucleotide"
  misc_feature (61)..(61): /note="Nucleotide may be methylated to form 5-methylcytosine"
ctgtgttgtttataccaacatcgttgctgtggaaatagctgtttcaacattaggaactcacgactgactcaagtaaggtgtggagcagaagtcttatttaaacagtggcaggacccataaaa

SEQ ID NO: 7172 - DNA, 122 bp, Homo sapiens
  misc_feature (61)..(62): /note="This region represents a CpG dinucleotide"
  misc_feature (61)..(61): /note="Nucleotide may be methylated to form 5-methylcytosine"
gcaatcttttatgggtttctcattaaggaggaaggtttcctgcttaggggtagccttctccgggcactcagcctcaccatctgctggatagaggggagaagctctacaccttttactacacc

SEQ ID NO: 7173 - DNA, 122 bp, Homo sapiens
  misc_feature (61)..(62): /note="This region represents a CpG dinucleotide"
  misc_feature (61)..(61): /note="Nucleotide may be methylated to form 5-methylcytosine"
ctttttaatttaaagcagggtctgcatatcatctgaagtaatctctctttggggacaccccgcatgtccagaactgccatccggtattgtggtggccctaaggctaggggtagcatggagac

SEQ ID NO: 7174 - DNA, 122 bp, Homo sapiens
  misc_feature (61)..(62): /note="This region represents a CpG dinucleotide"
  misc_feature (61)..(61): /note="Nucleotide may be methylated to form 5-methylcytosine"
ttaatacaggagggaaatgggagtaaataacagttattttctgagagacatttctaaggacgactttaaaagaccaggcaaaggagagcagagcccagccgttgccgcttgagagagataag

SEQ ID NO: 7175 - DNA, 122 bp, Homo sapiens
  misc_feature (61)..(62): /note="This region represents a CpG dinucleotide"
  misc_feature (61)..(61): /note="Nucleotide may be methylated to form 5-methylcytosine"
tggtggggggatgcaattggggccttcaagactagacaaggtattacagctcttcctgaccgtgtccttgggaagcctttgagacctcttggcagggaaagttcaccagagactattgctta

SEQ ID NO: 7176 - DNA, 122 bp, Homo sapiens
  misc_feature (61)..(62): /note="This region represents a CpG dinucleotide"
  misc_feature (61)..(61): /note="Nucleotide may be methylated to form 5-methylcytosine"
gtggagtcaggtggaagagcctgatacttccaagtaaaggatctaccttaaggcttctttcggatatcctttatcttctcattttttaaggtctaccaaaaataatctgaacctaaaaagac

SEQ ID NO: 7177 - DNA, 122 bp, Homo sapiens
  misc_feature (61)..(62): /note="This region represents a CpG dinucleotide"
  misc_feature (61)..(61): /note="Nucleotide may be methylated to form 5-methylcytosine"
ttgggacggagcccattttagacagtacaaacaataggcacaagagggatggctctgtaacgttagtagggcatatttgcagaaaagtatgtggtgccttgtaaccagtacttccggtacct

SEQ ID NO: 7178 - DNA, 122 bp, Homo sapiens
  misc_feature (61)..(62): /note="This region represents a CpG dinucleotide"
  misc_feature (61)..(61): /note="Nucleotide may be methylated to form 5-methylcytosine"
tctagcgacaaaagattgaatttggccgttactcactcctcctccaacaaagttgtcaaacggggctgctacagacaagtagaatcacagattggagatcagctgtcattatgtaacagctg

SEQ ID NO: 7179 - DNA, 122 bp, Homo sapiens
  misc_feature (61)..(62): /note="This region represents a CpG dinucleotide"
  misc_feature (61)..(61): /note="Nucleotide may be methylated to form 5-methylcytosine"
caggcccgagttgatgggcacctcgggctcatcaccgtgaagtcccctgcggccgaagggcggtggatttttagggtctctcccgcccacccctaatgccagtccccaccactgcgtactct

SEQ ID NO: 7180 - DNA, 122 bp, Homo sapiens
  misc_feature (61)..(62): /note="This region represents a CpG dinucleotide"
  misc_feature (61)..(61): /note="Nucleotide may be methylated to form 5-methylcytosine"
ttggagatatagtgggtaaagtctggcacagccctggtcacaaaaaacactttttccctgcgtttctaggatgaggaggtgaatgattagtttacacgagtttccatccattggagtcatga

SEQ ID NO: 7181 - DNA, 122 bp, Homo sapiens
  misc_feature (61)..(62): /note="This region represents a CpG dinucleotide"
  misc_feature (61)..(61): /note="Nucleotide may be methylated to form 5-methylcytosine"
tttctcatcgctgccttttgaatatttttcctcttatgtaaataatttctaccagtattacgcaatgttctgctatcttaagataaaacaacagccaaaactatttgttgcttgttttctta

SEQ ID NO: 7182 - DNA, 122 bp, Homo sapiens
  misc_feature (61)..(62): /note="This region represents a CpG dinucleotide"
  misc_feature (61)..(61): /note="Nucleotide may be methylated to form 5-methylcytosine"
tgtgcgcgagtcttttaacctttctgagcctcagttttctcctctgtaaagtcatctggccgtatggtttcttcaaggattaaatgagatgctcaatatattataaatgtgtaatagaagaa

SEQ ID NO: 7183 - DNA, 122 bp, Homo sapiens
  misc_feature (61)..(62): /note="This region represents a CpG dinucleotide"
  misc_feature (61)..(61): /note="Nucleotide may be methylated to form 5-methylcytosine"
ctttgtaattcagcattgactgaccagagctttggtcctatgaacgtacctatcctcaaacgcatttactctcaaaggcaaggacaatagtctggtagatgctgagtcagccctgttgctct

SEQ ID NO: 7184 - DNA, 122 bp, Homo sapiens
  misc_feature (61)..(62): /note="This region represents a CpG dinucleotide"
  misc_feature (61)..(61): /note="Nucleotide may be methylated to form 5-methylcytosine"
gtttgttctattccttgtatacataaccaggacatgagagattccttatcttattaccaccgtgagccattcaggctgcaagctgtatttcgatggtattgttgggtacgtttgtactcatc

SEQ ID NO: 7185 - DNA, 122 bp, Homo sapiens
  misc_feature (61)..(62): /note="This region represents a CpG dinucleotide"
  misc_feature (61)..(61): /note="Nucleotide may be methylated to form 5-methylcytosine"
tagaattctccaagactctgccctatgcctttcttcctttggataattttaacctgtattcgttccttgtaatacagtagccacaagtataacaacttgctgtgagttctgtgagatcttct

SEQ ID NO: 7186 - DNA, 122 bp, Homo sapiens
  misc_feature (61)..(62): /note="This region represents a CpG dinucleotide"
  misc_feature (61)..(61): /note="Nucleotide may be methylated to form 5-methylcytosine"
gggagggtcaaaacattcaacaaggaactaactaaacccttattatggcaatttctctagcgtctttcttttcagcttgggaatctcttagctagtaaagtcatttatatcaaggctcttcg

SEQ ID NO: 7187 - DNA, 122 bp, Homo sapiens
  misc_feature (61)..(62): /note="This region represents a CpG dinucleotide"
  misc_feature (61)..(61): /note="Nucleotide may be methylated to form 5-methylcytosine"
tcttcatcatgtcttttttctatgccatcaatcagtcgaggataccacattgtgtttagccgtggttgaatttttaaatgatttctgattataagttctcatctactgctgagaaaaataac

SEQ ID NO: 7188 - DNA, 122 bp, Homo sapiens
  misc_feature (61)..(62): /note="This region represents a CpG dinucleotide"
  misc_feature (61)..(61): /note="Nucleotide may be methylated to form 5-methylcytosine"
ttaagaaggaagacttatttacttacctaatctctgtaagcagtaaactattacgactctcgtaactctttgctgcttcctccgtttgtcagcttgatgttttctcttccacattttctacc

SEQ ID NO: 7189 - DNA, 122 bp, Homo sapiens
  misc_feature (61)..(62): /note="This region represents a CpG dinucleotide"
  misc_feature (61)..(61): /note="Nucleotide may be methylated to form 5-methylcytosine"
catacctccttcactgttttaatcttgctcctccttttagatgacttaaattctgttcatcgctaaagtatgagtggaaagtggggtagtgaacccagacaagactgggtgtggccctggct

SEQ ID NO: 7190 - DNA, 122 bp, Homo sapiens
  misc_feature (61)..(62): /note="This region represents a CpG dinucleotide"
  misc_feature (61)..(61): /note="Nucleotide may be methylated to form 5-methylcytosine"
tttgttttttttttctgaccagcagcccccaggccccttgcacgggctgagtctggcccccgcccctcccactgggtaaaggtaaacaagaggcatgtaagggggaaggacagagccctact

SEQ ID NO: 7191 - DNA, 122 bp, Homo sapiens
  misc_feature (61)..(62): /note="This region represents a CpG dinucleotide"
  misc_feature (61)..(61): /note="Nucleotide may be methylated to form 5-methylcytosine"
atcagtaaggggaagggagtactgagggaggagattgtgtagttcatcaaatcagagcggcgtttgctgggatgacatcctgcattcagagtggacaagggaaagatggagatggagagcct

SEQ ID NO: 7192 - DNA, 122 bp, Homo sapiens
  misc_feature (61)..(62): /note="This region represents a CpG dinucleotide"
  misc_feature (61)..(61): /note="Nucleotide may be methylated to form 5-methylcytosine"
ctttagcacagcggttgctgtgaggattaaatgagatgctttgtgtaaagccctgtgcagcgtgtgacccacagtgagtgctcagttcatagtggttgctgctgtctgttatgataacactg

SEQ ID NO: 7193 - DNA, 122 bp, Homo sapiens
  misc_feature (61)..(62): /note="This region represents a CpG dinucleotide"
  misc_feature (61)..(61): /note="Nucleotide may be methylated to form 5-methylcytosine"
gcttttttcgaaagccaccaataccagccgctactacacctcaaacaaaacctagctacgcgggtacgctcccgaagcgttcagctctggaaacagcccaacgacgctctcaaaagccgaca

SEQ ID NO: 7194 - DNA, 122 bp, Homo sapiens
  misc_feature (61)..(62): /note="This region represents a CpG dinucleotide"
  misc_feature (61)..(61): /note="Nucleotide may be methylated to form 5-methylcytosine"
cagctcacgcccccccacacccccacctagccttcccaggttcccaacctccccccgggacgtgcacctgcctttccttgggggctacaaccacaagcccctggagagcacggctgcacaga

SEQ ID NO: 7195 - DNA, 122 bp, Homo sapiens
  misc_feature (61)..(62): /note="This region represents a CpG dinucleotide"
  misc_feature (61)..(61): /note="Nucleotide may be methylated to form 5-methylcytosine"
gtagaagttgtcgagtcttagacaggcttggagcgtacttgggcaggtgtgtggggtggccggtgtacctcaagccattggttcccaaatcttagcatacagcagaattgcctggagcattt

SEQ ID NO: 7196 - DNA, 122 bp, Homo sapiens
  misc_feature (61)..(62): /note="This region represents a CpG dinucleotide"
  misc_feature (61)..(61): /note="Nucleotide may be methylated to form 5-methylcytosine"
cctgctgagtgcaagaagccacaccttgacaatgtatcaagccctgaatataggacactgcgtgaaagcctctgtgcaagtgtcatgtgtatgtgtgttgtattcatgtgtcatgtgtaggg

SEQ ID NO: 7197 - DNA, 122 bp, Homo sapiens
  misc_feature (61)..(62): /note="This region represents a CpG dinucleotide"
  misc_feature (61)..(61): /note="Nucleotide may be methylated to form 5-methylcytosine"
ttttggcagcaagcggtaagggcggattccagttctggttccgggtcctctactggggagcggatgtgtgtcaattgccctcctagcctggcctggtgtagtgtgcaggagccatgtggggt

SEQ ID NO: 7198 - DNA, 122 bp, Homo sapiens
  misc_feature (61)..(62): /note="This region represents a CpG dinucleotide"
  misc_feature (61)..(61): /note="Nucleotide may be methylated to form 5-methylcytosine"
aaatctttgtggcttcagtgtcaaatctgtaatctttcaaactggccaggttctgaggctcggttcaatggtctaaaactgagtgttcctcctgaaggcaagatccacatgaaaacataggc

SEQ ID NO: 7199 - DNA, 122 bp, Homo sapiens
  misc_feature (61)..(62): /note="This region represents a CpG dinucleotide"
  misc_feature (61)..(61): /note="Nucleotide may be methylated to form 5-methylcytosine"
gacccagacggggagagggtgctgggcgccggcaagccacagcgtctgctctcatgatctcgcccccacccgccttgggcccccagaggtctgtgctccgctcctcttcctcctcagaactt

SEQ ID NO: 7200 - DNA, 122 bp, Homo sapiens
  misc_feature (61)..(62): /note="This region represents a CpG dinucleotide"
  misc_feature (61)..(61): /note="Nucleotide may be methylated to form 5-methylcytosine"
agaaaaaactctcatatagtgttaaatttgttaaaaacagataacctttatagatccttacgtaggatgtgtctatcagaaagatttagaatacttaatgctgtgctgtacttcctttttct

SEQ ID NO: 7201 - DNA, 122 bp, Homo sapiens
  misc_feature (61)..(62): /note="This region represents a CpG dinucleotide"
  misc_feature (61)..(61): /note="Nucleotide may be methylated to form 5-methylcytosine"
tcatgaattttggtagtttctcctatagaacttggccaatgctggtgactagacacatggcgggttgacgtgaggtgctgtggttattccaagaatgataattaatacgatacgtctccccc

SEQ ID NO: 7202 - DNA, 122 bp, Homo sapiens
  misc_feature (61)..(62): /note="This region represents a CpG dinucleotide"
  misc_feature (61)..(61): /note="Nucleotide may be methylated to form 5-methylcytosine"
tagctcagctccaagtccaagggcagttttatctttctgtataaaatatgaagttccagacgttctacttctactccaacttttcattcttatattttaactatataatagacacattattg

SEQ ID NO: 7203 - DNA, 122 bp, Homo sapiens
  misc_feature (61)..(62): /note="This region represents a CpG dinucleotide"
  misc_feature (61)..(61): /note="Nucleotide may be methylated to form 5-methylcytosine"
ctccgcgcaggtaggtccccaggcgctcaccggtgctgcgtctccaacccgtggcgcgcgcggttggcatcctccaggtggcgctgcagctcctcctgccgctcccggtcggccgcctcctg

SEQ ID NO: 7204 - DNA, 122 bp, Homo sapiens
  misc_feature (61)..(62): /note="This region represents a CpG dinucleotide"
  misc_feature (61)..(61): /note="Nucleotide may be methylated to form 5-methylcytosine"
gcattactaccttctcagctaaagatgatgtagggaggaaaaaagaagagaagaggaaaacgaaagaaaatgagtgtcattgtatgtaggaagtgtttgttctaagtgcatcgtgtggacat

SEQ ID NO: 7205 - DNA, 122 bp, Homo sapiens
  misc_feature (61)..(62): /note="This region represents a CpG dinucleotide"
  misc_feature (61)..(61): /note="Nucleotide may be methylated to form 5-methylcytosine"
ttcccctcttttaatggggcttttaattagcaatggggctaatctcctaggatccaatcccgtgacaggcattttcctgcatgattatgtagcaagtcataaagaagaactgctacactcat

SEQ ID NO: 7206 - DNA, 122 bp, Homo sapiens
  misc_feature (61)..(62): /note="This region represents a CpG dinucleotide"
  misc_feature (61)..(61): /note="Nucleotide may be methylated to form 5-methylcytosine"
agcatttgatacagtgggctaacagcacggatgaatctttaaagctcatcacttcactcacgtacaatattccagcctcctctgcatgggaagcaaactcctcttgtcctgtctttagtttc

SEQ ID NO: 7207 - DNA, 122 bp, Homo sapiens
  misc_feature (61)..(62): /note="This region represents a CpG dinucleotide"
  misc_feature (61)..(61): /note="Nucleotide may be methylated to form 5-methylcytosine"
caagagccctttgattgttggagaggcccgataatgctgtcaagagctcggtggactgagcggcggccgagacgcaccagatctgcactaagtgtagctgacagcaaacgatttagagtcag

SEQ ID NO: 7208 - DNA, 122 bp, Homo sapiens
  misc_feature (61)..(62): /note="This region represents a CpG dinucleotide"
  misc_feature (61)..(61): /note="Nucleotide may be methylated to form 5-methylcytosine"
tctctgtgcgcccattgtgagtctctgtaaacaatggattcctctgtttctcccagggcacgtggtccaacactgccttcaaggttaggtgtccacagttcgagtgcaagcccagatccact

SEQ ID NO: 7209 - DNA, 122 bp, Homo sapiens
  misc_feature (61)..(62): /note="This region represents a CpG dinucleotide"
  misc_feature (61)..(61): /note="Nucleotide may be methylated to form 5-methylcytosine"
tggggtgcagcagtcaaaacaccagtgtgaacaggacattgagaatggccggacaggaagcgagcctgggcactgacagcctcaagcagggatagacctgcaaagaaatccccaagcccgct

SEQ ID NO: 7210 - DNA, 122 bp, Homo sapiens
  misc_feature (61)..(62): /note="This region represents a CpG dinucleotide"
  misc_feature (61)..(61): /note="Nucleotide may be methylated to form 5-methylcytosine"
aggcaagttgccagtgattcaaactcagcaggtttgtgggtgattttttccttactgttacgtttgtggagtaggaaaaactagaaaggaaaaaaaaatcccaaaggttgaaaaactgtatc

SEQ ID NO: 7211 - DNA, 122 bp, Homo sapiens
  misc_feature (61)..(62): /note="This region represents a CpG dinucleotide"
  misc_feature (61)..(61): /note="Nucleotide may be methylated to form 5-methylcytosine"
caccaaaaaaaaaaaaaaaaaaaaaaaaaaaaaaaaaaaaaaaaagaaaaaaaaccccgccggatccgaccgccactttcaaaaccccccaccgctctagaaccgcgggagcttccgtccct

SEQ ID NO: 7212 - DNA, 122 bp, Homo sapiens
  misc_feature (61)..(62): /note="This region represents a CpG dinucleotide"
  misc_feature (61)..(61): /note="Nucleotide may be methylated to form 5-methylcytosine"
gcaaataagtggcatttcatgcaactgctcttggcaaggcagctcccacgccagtgtggacgggcagtggtgactttgtccccagttcccacatcctcctcccacggccgctcagcagcccc

SEQ ID NO: 7213 - DNA, 122 bp, Homo sapiens
  misc_feature (61)..(62): /note="This region represents a CpG dinucleotide"
  misc_feature (61)..(61): /note="Nucleotide may be methylated to form 5-methylcytosine"
tggagggaggaagaagggaaagagagagagtggagagattatataatatggtaaataagacgttgcattttgaggagtaaatgaaacaacaaaacacagtgctaaaaggaaacaattattga

SEQ ID NO: 7214 - DNA, 122 bp, Homo sapiens
  misc_feature (61)..(62): /note="This region represents a CpG dinucleotide"
  misc_feature (61)..(61): /note="Nucleotide may be methylated to form 5-methylcytosine"
tacaccatgcgttctttcttatctcttaggcactgctgctctagacaggacagctggatacgtttccagtgatgctgtccttgatgacagcggccctttatggctgttttcaagcctacagc

SEQ ID NO: 7215 - DNA, 122 bp, Homo sapiens
  misc_feature (61)..(62): /note="This region represents a CpG dinucleotide"
  misc_feature (61)..(61): /note="Nucleotide may be methylated to form 5-methylcytosine"
cggagaggaagaaagaaagagggagtggtacagagaaggttggggagaagccacagcttgcgagctgggggtataatgaatgatttccaggatctttaggtcctttaaatttgggggtgaga

SEQ ID NO: 7216 - DNA, 122 bp, Homo sapiens
  misc_feature (61)..(62): /note="This region represents a CpG dinucleotide"
  misc_feature (61)..(61): /note="Nucleotide may be methylated to form 5-methylcytosine"
cacaggacaaatgagttatggcctggtttacctgtacagtgtccctcagtagaactataacgaagttggcccaccatttttctttaccacattttatcacattttgataaaactcatcagac

SEQ ID NO: 7217 - DNA, 122 bp, Homo sapiens
  misc_feature (61)..(62): /note="This region represents a CpG dinucleotide"
  misc_feature (61)..(61): /note="Nucleotide may be methylated to form 5-methylcytosine"
aggtggcccaggctctgcaacctgaacccacgtggagtcacaccatgacccaggactccacggattatactgactcagctagagtcaagagggctgcagtgcttattgatgacatcttttta

SEQ ID NO: 7218 - DNA, 122 bp, Homo sapiens
  misc_feature (61)..(62): /note="This region represents a CpG dinucleotide"
  misc_feature (61)..(61): /note="Nucleotide may be methylated to form 5-methylcytosine"
cctcattcctcgtggcctccttttcattgctgttgcttcctcaatcggtccttagtgaaacgccaatctcagtggtgtgggaacgagtatgagagacctcgctctaggtgctcgcacggaac

SEQ ID NO: 7219 - DNA, 122 bp, Homo sapiens
  misc_feature (61)..(62): /note="This region represents a CpG dinucleotide"
  misc_feature (61)..(61): /note="Nucleotide may be methylated to form 5-methylcytosine"
cctcggttggtgtctagcacctagtaggttctcaaatactttttgaatcacagtgcctgccgatatatttaatgtttcaaaatagttctgccgtcataaagaaaaacatcatggtgtagggg

SEQ ID NO: 7220 - DNA, 122 bp, Homo sapiens
  misc_feature (61)..(62): /note="This region represents a CpG dinucleotide"
  misc_feature (61)..(61): /note="Nucleotide may be methylated to form 5-methylcytosine"
ctgaggtgcttaacattggtggccacaaatggacatggcgtaccagcggtggcctggactcgtgcctccttcctgcagacaccatacttttactaatgcaccctaatattacgtttttggca

SEQ ID NO: 7221 - DNA, 122 bp, Homo sapiens
  misc_feature (61)..(62): /note="This region represents a CpG dinucleotide"
  misc_feature (61)..(61): /note="Nucleotide may be methylated to form 5-methylcytosine"
tttctagaatgaaatacacacacacacacacacacacacacacacacacacacacacacacgttttagaagtaaaactggcagaaattacctgaattcaattgttggatctatgtcataata

SEQ ID NO: 7222 - DNA, 122 bp, Homo sapiens
  misc_feature (61)..(62): /note="This region represents a CpG dinucleotide"
  misc_feature (61)..(61): /note="Nucleotide may be methylated to form 5-methylcytosine"
attaccaaattgagccccaccttgtgagtcagtggggcaggtgcctcccaaggcctccagcgccatggattacctgcctcggtcaggttctagagcccagcttggccttgggctgggcagca

SEQ ID NO: 7223 - DNA, 122 bp, Homo sapiens
  misc_feature (61)..(62): /note="This region represents a CpG dinucleotide"
  misc_feature (61)..(61): /note="Nucleotide may be methylated to form 5-methylcytosine"
cactgcttgcagagactttggacacactgtcaagtggcactcaaaagtgccactgtctgacgcactgaggaagaaagacttgaggctctagagactattccagaccccaccctgaggattta

SEQ ID NO: 7224 - DNA, 122 bp, Homo sapiens
  misc_feature (61)..(62): /note="This region represents a CpG dinucleotide"
  misc_feature (61)..(61): /note="Nucleotide may be methylated to form 5-methylcytosine"
atgaggcacaagaacaagaggccaccttatgctgtggccagcagaggcattcaaacattccgtcagcaggattccagccaacctccgaagctcacttttataagccagccccaggcatccca

SEQ ID NO: 7225 - DNA, 122 bp, Homo sapiens
  misc_feature (61)..(62): /note="This region represents a CpG dinucleotide"
  misc_feature (61)..(61): /note="Nucleotide may be methylated to form 5-methylcytosine"
attaaaagctcttctggccccacgccattagtgccctctgtgcgtacccaggactgagtacgttgaagaagaaagaagagaaaggtatagctaactcatgtaaaatcccttctcctttacac

SEQ ID NO: 7226 - DNA, 122 bp, Homo sapiens
  misc_feature (61)..(62): /note="This region represents a CpG dinucleotide"
  misc_feature (61)..(61): /note="Nucleotide may be methylated to form 5-methylcytosine"
cgacagattgacaaggcacgtaaacttctctaggcagaggaaatagaatgtgcaaaggcacgtcgttacgaaacagcatagtacagaggaaaactgcaagggtctgaactgaaatgaagaca

SEQ ID NO: 7227 - DNA, 122 bp, Homo sapiens
  misc_feature (61)..(62): /note="This region represents a CpG dinucleotide"
  misc_feature (61)..(61): /note="Nucleotide may be methylated to form 5-methylcytosine"
gacttttcatttttgcacctgcctcagcactgtatgaatctagctagacccatgtggggacgtgccaagctctgtgaagaagctgattatgctggtcctctaggtccagctggtgacaaata

SEQ ID NO: 7228 - DNA, 122 bp, Homo sapiens
  misc_feature (61)..(62): /note="This region represents a CpG dinucleotide"
  misc_feature (61)..(61): /note="Nucleotide may be methylated to form 5-methylcytosine"
cccgcctggcttaggttcggatgcccaacccagttgccccgtgagtcacatcaaacgtcccgtccctcccaacccacagccagactcccaggaggctccgcagcacctgaagctgcggctgg

SEQ ID NO: 7229 - DNA, 122 bp, Homo sapiens
  misc_feature (61)..(62): /note="This region represents a CpG dinucleotide"
  misc_feature (61)..(61): /note="Nucleotide may be methylated to form 5-methylcytosine"
atgaataatcaaacttactgcaggaagcaaatgaagtgcctctgtaagatatactcaaaacgtctgctgtgcaaatgatgaagctgatgaaattgagtctatgttgaaatattttatttata

SEQ ID NO: 7230 - DNA, 122 bp, Homo sapiens
  misc_feature (61)..(62): /note="This region represents a CpG dinucleotide"
  misc_feature (61)..(61): /note="Nucleotide may be methylated to form 5-methylcytosine"
tttaatactgatgccttcccttgaacccagctgtccgctaccactactctcctgcctccacgaggcacctgtgcagaagttatctatcctaggaggcagagcccatgcagctgacaggctct

SEQ ID NO: 7231 - DNA, 122 bp, Homo sapiens
  misc_feature (61)..(62): /note="This region represents a CpG dinucleotide"
  misc_feature (61)..(61): /note="Nucleotide may be methylated to form 5-methylcytosine"
tctgctctgctgcctccactcctgcggaactgttgccttgggcctcccttgtcagggtctcggacagctctgcagtctcttttggagctacccctggaactggccactcttcttttctccca

SEQ ID NO: 7232 - DNA, 122 bp, Homo sapiens
  misc_feature (61)..(62): /note="This region represents a CpG dinucleotide"
  misc_feature (61)..(61): /note="Nucleotide may be methylated to form 5-methylcytosine"
agaggtgattgtgtcatgagggctccacccttatgaatgggatcagcaccctgataaaagcgcttaagtttgaagggaaagggctctttcttgcccttccacgttccaccatgtgagggcac

SEQ ID NO: 7233 - DNA, 122 bp, Homo sapiens
  misc_feature (61)..(62): /note="This region represents a CpG dinucleotide"
  misc_feature (61)..(61): /note="Nucleotide may be methylated to form 5-methylcytosine"
ggggcattcacaagtgcaggatgccttctccgggctcccatgatgatccagacaggtaggcgttttccttccctttttgcagattgtgaaaacagcgttcaaaaaagactcatgggccgggc

SEQ ID NO: 7234 - DNA, 122 bp, Homo sapiens
  misc_feature (61)..(62): /note="This region represents a CpG dinucleotide"
  misc_feature (61)..(61): /note="Nucleotide may be methylated to form 5-methylcytosine"
ggacatctgcccagatatcttttcaaatctggccatcatagccaaagttggacaatgatccgttgggtccacaaatcttacagtgagagcactcaatgcagagaattcttatcgggattaaa

SEQ ID NO: 7235 - DNA, 122 bp, Homo sapiens
  misc_feature (61)..(62): /note="This region represents a CpG dinucleotide"
  misc_feature (61)..(61): /note="Nucleotide may be methylated to form 5-methylcytosine"
cctagaaaggagctgctgccttacaagactgcagcaggctgtggctgagtcgggggcaggcgccagtgtgggcaaggctgcctggagttctgatgctggttcctcatcagaggagctgccga

SEQ ID NO: 7236 - DNA, 122 bp, Homo sapiens
  misc_feature (61)..(62): /note="This region represents a CpG dinucleotide"
  misc_feature (61)..(61): /note="Nucleotide may be methylated to form 5-methylcytosine"
gtgaggttaatactgggattaaatgaattaataggtgtaaacactgagagacaagtctgacgtatgtcaagaaatgttagtgtttgaaggagattggttccaagaccccctgcagataccaa

SEQ ID NO: 7237 - DNA, 122 bp, Homo sapiens
  misc_feature (61)..(62): /note="This region represents a CpG dinucleotide"
  misc_feature (61)..(61): /note="Nucleotide may be methylated to form 5-methylcytosine"
tttactggaactactgctcggatgctaggacaccaaaccgaaatcctgataatgagctgtcgttatatcatggccacatctagaaatctaattgcacagtgagagtgcataggatgaaatgg

SEQ ID NO: 7238 - DNA, 122 bp, Homo sapiens
  misc_feature (61)..(62): /note="This region represents a CpG dinucleotide"
  misc_feature (61)..(61): /note="Nucleotide may be methylated to form 5-methylcytosine"
ggttgttgtgcaagtagaggccgttcttgaggaaggccggcagcgcggccagctcaggtacggagatgtgtcccagccggttggaggagaggtccagagtaagcaggtgggtggcgctcaga

SEQ ID NO: 7239 - DNA, 122 bp, Homo sapiens
  misc_feature (61)..(62): /note="This region represents a CpG dinucleotide"
  misc_feature (61)..(61): /note="Nucleotide may be methylated to form 5-methylcytosine"
ggctcgagctgcccatggccccgtggcgtgggccctgctgccagggtgccgtgctctgcccgcccgccagcccagcagcggccgcactcggaacctcagctcctccagccggcccctccttc

SEQ ID NO: 7240 - DNA, 122 bp, Homo sapiens
  misc_feature (61)..(62): /note="This region represents a CpG dinucleotide"
  misc_feature (61)..(61): /note="Nucleotide may be methylated to form 5-methylcytosine"
ggctctcagcagaaactggctgattcacttgggagatgaaggggcagagcacacaatgttcgttaaggaagaatgtcaacagctgggacatcttagcactcagtccctcctgcagtctatca

SEQ ID NO: 7241 - DNA, 122 bp, Homo sapiens
  misc_feature (61)..(62): /note="This region represents a CpG dinucleotide"
  misc_feature (61)..(61): /note="Nucleotide may be methylated to form 5-methylcytosine"
ataccttcctcttaagcttacagtctaaaggggaaatagtcatgcaatcacagtacaatacgtgaattgctactgtcaagctttagattctagatatagtaactggagcacaagaaaagaca

SEQ ID NO: 7242 - DNA, 122 bp, Homo sapiens
  misc_feature (61)..(62): /note="This region represents a CpG dinucleotide"
  misc_feature (61)..(61): /note="Nucleotide may be methylated to form 5-methylcytosine"
agtcattagtttcattctacagctatacagagagctcatgtaaattcctgaaggctgcaccgcctacaagtggtggggctggagttcgcacgttgctcttgtgccctggagtgatggcagca

SEQ ID NO: 7243 - DNA, 122 bp, Homo sapiens
  misc_feature (61)..(62): /note="This region represents a CpG dinucleotide"
  misc_feature (61)..(61): /note="Nucleotide may be methylated to form 5-methylcytosine"
aaaatgggaccaaacactttgattcacagaggcagtgttatagagggcaagagcctggcacgtctgaatttgtatcttggctcagccacttggaagctgtgcacccctgggaaaattccttc

SEQ ID NO: 7244 - DNA, 122 bp, Homo sapiens
  misc_feature (61)..(62): /note="This region represents a CpG dinucleotide"
  misc_feature (61)..(61): /note="Nucleotide may be methylated to form 5-methylcytosine"
gctccctggtcactgcagcagtcaggtagaatggcaggtcatgccctggcccttaaagtccgcttgggtgtgtgcacgttcttccgttcacatttcattggccaaagcaaatcacaaaccca

SEQ ID NO: 7245 - DNA, 122 bp, Homo sapiens
  misc_feature (61)..(62): /note="This region represents a CpG dinucleotide"
  misc_feature (61)..(61): /note="Nucleotide may be methylated to form 5-methylcytosine"
attatggtaataactgactcaggcaagggtcatcaattgatattaagctcttggaaacggcgtgtgttgaggaacaggctatttaattactttcgaagtatctccccagaaagcacttatta

SEQ ID NO: 7246 - DNA, 122 bp, Homo sapiens
  misc_feature (61)..(62): /note="This region represents a CpG dinucleotide"
  misc_feature (61)..(61): /note="Nucleotide may be methylated to form 5-methylcytosine"
aaaggtaaatatgaacaagagcttgttgaatacctattgtgtcctagaaactgccaggagcgctgaaaaaagaggacatcaaagattattttttaaagtttttgtttatttatggctttttt

SEQ ID NO: 7247 - DNA, 122 bp, Homo sapiens
  misc_feature (61)..(62): /note="This region represents a CpG dinucleotide"
  misc_feature (61)..(61): /note="Nucleotide may be methylated to form 5-methylcytosine"
cgtggcctaatggataaggcgtctgacttcggatcagaagattgcaggttcgagtcctgccgcggtcgaagggaggttatgattaacttttagtttattcctccctcaggaacgaagtattg

SEQ ID NO: 7248 - DNA, 122 bp, Homo sapiens
  misc_feature (61)..(62): /note="This region represents a CpG dinucleotide"
  misc_feature (61)..(61): /note="Nucleotide may be methylated to form 5-methylcytosine"
aaggatccttgtgttatctctttgtatttctgtggttatatcagttgacatttgctttagcgtattatttgctgttgtttactatatcagaaaagagtctgtagtaataaactttcttttac

SEQ ID NO: 7249 - DNA, 122 bp, Homo sapiens
  misc_feature (61)..(62): /note="This region represents a CpG dinucleotide"
  misc_feature (61)..(61): /note="Nucleotide may be methylated to form 5-methylcytosine"
taaaagcaactgtgtgacgattcctccaagcaagaaattggaattgaatgtctcaagtctcgttgcggttgctgaggggattggatatagggacctggactccaacatgaagaagctaggga

SEQ ID NO: 7250 - DNA, 122 bp, Homo sapiens
  misc_feature (61)..(62): /note="This region represents a CpG dinucleotide"
  misc_feature (61)..(61): /note="Nucleotide may be methylated to form 5-methylcytosine"
agatggtgctgtctgagaaagccagtggaagcaccctccgggggtgcacggaggaaaggacgctcagcctgacctccctggggctgtccatgccagcggatccatgtgagggaggggcccgc

SEQ ID NO: 7251 - DNA, 122 bp, Homo sapiens
  misc_feature (61)..(62): /note="This region represents a CpG dinucleotide"
  misc_feature (61)..(61): /note="Nucleotide may be methylated to form 5-methylcytosine"
tctttgctgcttctgctgacaattttgtaaggtaattaaattggctgattgaagtcacagcggtcatggggcgataaagaccatttggatttaatggaatttaaaacaacagagcacagaac

SEQ ID NO: 7252 - DNA, 122 bp, Homo sapiens
  misc_feature (61)..(62): /note="This region represents a CpG dinucleotide"
  misc_feature (61)..(61): /note="Nucleotide may be methylated to form 5-methylcytosine"
gggcataaattaataatgccatccttcttctatcttataggaaaacagaaaaacagtggacggtgtccgtggtctttgaatcctttctacaggtccttctcaaatatcagctgctgaactat

SEQ ID NO: 7253 - DNA, 122 bp, Homo sapiens
  misc_feature (61)..(62): /note="This region represents a CpG dinucleotide"
  misc_feature (61)..(61): /note="Nucleotide may be methylated to form 5-methylcytosine"
tgcatgccagacttcttatctgatttcctacactgcatgaaaacaccgtcagccaggggacgtgccttatctgtctgttgcagagaaggctccatctgtcctttgcagaagaaactgaaggc

SEQ ID NO: 7254 - DNA, 122 bp, Homo sapiens
  misc_feature (61)..(62): /note="This region represents a CpG dinucleotide"
  misc_feature (61)..(61): /note="Nucleotide may be methylated to form 5-methylcytosine"
tgagcttgggaggcggaggttgcagtgagtcgagatcgcaccagtgcactccagcctgggcgagagagtgagactgtcttggaaaaaaaaaaagtataagtttttgcttccaataacatttg

SEQ ID NO: 7255 - DNA, 122 bp, Homo sapiens
  misc_feature (61)..(62): /note="This region represents a CpG dinucleotide"
  misc_feature (61)..(61): /note="Nucleotide may be methylated to form 5-methylcytosine"
tctgccaaccctggcacttctccgtcctcatcattggcagtcttctccatggagagatggcggatgtgctcgtgtttgctcaccagctgccagaagccagctgtgacacttaactatacccc

SEQ ID NO: 7256 - DNA, 122 bp, Homo sapiens
  misc_feature (61)..(62): /note="This region represents a CpG dinucleotide"
  misc_feature (61)..(61): /note="Nucleotide may be methylated to form 5-methylcytosine"
tgggaggtgaaggctgggacccagaacagcagagactctgtcgatgatgtggaaagaccgcggctgcagtttgggcaggctgagccagggttgggtcttgcatgttgagaggctggcctgcg

SEQ ID NO: 7257 - DNA, 122 bp, Homo sapiens
  misc_feature (61)..(62): /note="This region represents a CpG dinucleotide"
  misc_feature (61)..(61): /note="Nucleotide may be methylated to form 5-methylcytosine"
gcatcagtttaaacaaacatagacacacacatataacatctcaagatcgcataatacagccgccaagatggggtcacagatgagttcagtaaataaagaatgtcatggactagtatggtcag

SEQ ID NO: 7258 - DNA, 122 bp, Homo sapiens
  misc_feature (61)..(62): /note="This region represents a CpG dinucleotide"
  misc_feature (61)..(61): /note="Nucleotide may be methylated to form 5-methylcytosine"
ggttaatccctctgtggaaacattgggttgaaagcccggaggaggtcaggggtctgattacggcttctgtttacatataaacttcctggtcctaggagacaatcggaggggtgggggaaggg

SEQ ID NO: 7259 - DNA, 122 bp, Homo sapiens
  misc_feature (61)..(62): /note="This region represents a CpG dinucleotide"
  misc_feature (61)..(61): /note="Nucleotide may be methylated to form 5-methylcytosine"
ttttgtccatgttcatgtacatcttttacatttttaaattcttgttttagtgggttttggcggggagcaaagaaggatgtttattcagatttatttgtttaactgtaagaggaacttgtttg

SEQ ID NO: 7260 - DNA, 122 bp, Homo sapiens
  misc_feature (61)..(62): /note="This region represents a CpG dinucleotide"
  misc_feature (61)..(61): /note="Nucleotide may be methylated to form 5-methylcytosine"
tgcaaatgagagaaaagagtgagaaaaagtcatttcacatacagaaaaaacaagacatgtcgtctcagaaattgtgtagtttcttgcttaagcactcgagatgttcagtgaacagctaacaa

SEQ ID NO: 7261 - DNA, 122 bp, Homo sapiens
  misc_feature (61)..(62): /note="This region represents a CpG dinucleotide"
  misc_feature (61)..(61): /note="Nucleotide may be methylated to form 5-methylcytosine"
ccgacactggggactggctctgtcccttgcttcctatctgtaagtaatcaacctgtgttgcgtaacttgtatgtgagcatgtaggtcaccagcgcatggaggactaaacagtagcccaggat

SEQ ID NO: 7262 - DNA, 122 bp, Homo sapiens
  misc_feature (61)..(62): /note="This region represents a CpG dinucleotide"
  misc_feature (61)..(61): /note="Nucleotide may be methylated to form 5-methylcytosine"
agtccaggcgctcagacttttctccttcatgaccctcatctctgctctcgggcctcagcccgcctgtcgtactgcaggaaattttgtttcctgcttgtcttcaaagacttcagggcttagaa

SEQ ID NO: 7263 - DNA, 122 bp, Homo sapiens
  misc_feature (61)..(62): /note="This region represents a CpG dinucleotide"
  misc_feature (61)..(61): /note="Nucleotide may be methylated to form 5-methylcytosine"
ttgcagaagcatcttaaagacaagagggacagggcttagagaattttttttttaaggcaccgttcttgcaaaagagtgatgtaagaggtaaggaagctaagagacaaaactgaacaaatgag

SEQ ID NO: 7264 - DNA, 122 bp, Homo sapiens
  misc_feature (61)..(62): /note="This region represents a CpG dinucleotide"
  misc_feature (61)..(61): /note="Nucleotide may be methylated to form 5-methylcytosine"
aaaggaaatgtaaagaatgcagagaataaagatttcaattgttggtaataacagataccacgaagtgggaaaccactgtaagtataataccaactttcattggtaaaaaggcattttgagct

SEQ ID NO: 7265 - DNA, 122 bp, Homo sapiens
  misc_feature (61)..(62): /note="This region represents a CpG dinucleotide"
  misc_feature (61)..(61): /note="Nucleotide may be methylated to form 5-methylcytosine"
ctgtaaacaccactgcacttggaccagccagcagccgaattttcctaataaaagttgacacgcttttttaaaatttggtgacttggtaggaaggaaaactattatttatatttggaaaagaa

SEQ ID NO: 7266 - DNA, 122 bp, Homo sapiens
  misc_feature (61)..(62): /note="This region represents a CpG dinucleotide"
  misc_feature (61)..(61): /note="Nucleotide may be methylated to form 5-methylcytosine"
ccttgagaaaaacacaggagggattgggaggatgtagaaattcctatttgtaagggtttgcgatctgggtatatgtccactgagccgtgaacttactgtctcgagttctgtattctagttgg

SEQ ID NO: 7267 - DNA, 122 bp, Homo sapiens
  misc_feature (61)..(62): /note="This region represents a CpG dinucleotide"
  misc_feature (61)..(61): /note="Nucleotide may be methylated to form 5-methylcytosine"
gtttctgacttgcataattgggcggtgatgtcattcactgagattagaagcattccagggcgactatgtggtagagaggctacaatgaattcaactttagatgtattggagatgtgtttaga

SEQ ID NO: 7268 - DNA, 122 bp, Homo sapiens
  misc_feature (61)..(62): /note="This region represents a CpG dinucleotide"
  misc_feature (61)..(61): /note="Nucleotide may be methylated to form 5-methylcytosine"
cacgatttagctcaccattttgcagggtggcagcttgggctgggcatgggtgagctcactcgtgtgtctgaggttagctgtggtcacctaggctgctctgcttctaggggttggctaattgt

SEQ ID NO: 7269 - DNA, 122 bp, Homo sapiens
  misc_feature (61)..(62): /note="This region represents a CpG dinucleotide"
  misc_feature (61)..(61): /note="Nucleotide may be methylated to form 5-methylcytosine"
tattacaagtggcagggggaacctacctgtggtggcatttctgttaaataataatgtgtacgtgattgagctttgtaaactaaaaataactagaaaagggaagtgatgctctggagtggctt

SEQ ID NO: 7270 - DNA, 122 bp, Homo sapiens
  misc_feature (61)..(62): /note="This region represents a CpG dinucleotide"
  misc_feature (61)..(61): /note="Nucleotide may be methylated to form 5-methylcytosine"
attcaggaagaggaaaatatctttaaatgcaatgaatgtgaaaaagtgtttaacaagaaacgcctgcttgctcggcatgagaggattcactctggagtgaagccctatgaatgcacagagtg

SEQ ID NO: 7271 - DNA, 122 bp, Homo sapiens
  misc_feature (61)..(62): /note="This region represents a CpG dinucleotide"
  misc_feature (61)..(61): /note="Nucleotide may be methylated to form 5-methylcytosine"
agaaagccctcagaattcaggcatatattacaaaattgcccattcatgtggataggactacgagtcatgtaacagctaacctctgtggcttctgtgactcatcacagggacagggttatttc

SEQ ID NO: 7272 - DNA, 122 bp, Homo sapiens
  misc_feature (61)..(62): /note="This region represents a CpG dinucleotide"
  misc_feature (61)..(61): /note="Nucleotide may be methylated to form 5-methylcytosine"
gcactccaagtcccactggcctgggttcgaatcccagctctaccacctctgctgtctgtacgatgggggattttgaatcctgttctgcatagtactctgagtcaggccctgtgctgagcact

SEQ ID NO: 7273 - DNA, 122 bp, Homo sapiens
  misc_feature (61)..(62): /note="This region represents a CpG dinucleotide"
  misc_feature (61)..(61): /note="Nucleotide may be methylated to form 5-methylcytosine"
ccttttgcatggcaccattacagcttggtaactaccagccagctttgctattcttgtgggcgttggcacctctcatcacttcctccccacccatctttcaaatgtctgaagtgttgcgttgg

SEQ ID NO: 7274 - DNA, 122 bp, Homo sapiens
  misc_feature (61)..(62): /note="This region represents a CpG dinucleotide"
  misc_feature (61)..(61): /note="Nucleotide may be methylated to form 5-methylcytosine"
atggagctactaattttgtaaatactttcatgcagttaaaaactcatttaattttccttccgtttacttcttaacagattgctaccactggtcagaaaccaacttcctagaacctcctgata

SEQ ID NO: 7275 - DNA, 122 bp, Homo sapiens
  misc_feature (61)..(62): /note="This region represents a CpG dinucleotide"
  misc_feature (61)..(61): /note="Nucleotide may be methylated to form 5-methylcytosine"
ctgctggtcactaataactcccctatctttggcatgggggaatgtccagatagacatatacgcaaaatatccctcaggtgatttctggggatgatgacaatcaaagggaacacctagcacag

SEQ ID NO: 7276 - DNA, 122 bp, Homo sapiens
  misc_feature (61)..(62): /note="This region represents a CpG dinucleotide"
  misc_feature (61)..(61): /note="Nucleotide may be methylated to form 5-methylcytosine"
aaaaggcatgctccatgtcctcacagagcttatggaacaatgaagaagcactgcaaaccacgaaaagggtgcaatgttgagaaatgagaacttcctggtgaaagtacatttaaagcatttga

SEQ ID NO: 7277 - DNA, 122 bp, Homo sapiens
  misc_feature (61)..(62): /note="This region represents a CpG dinucleotide"
  misc_feature (61)..(61): /note="Nucleotide may be methylated to form 5-methylcytosine"
agccctgacatcattgcagttccctttttccagaaatgcagtgcccttgaatactttccccgcccattgaaggcaaacagggttttttctggcattctgcacacctgttttgctgccctgcc

SEQ ID NO: 7278 - DNA, 122 bp, Homo sapiens
  misc_feature (61)..(62): /note="This region represents a CpG dinucleotide"
  misc_feature (61)..(61): /note="Nucleotide may be methylated to form 5-methylcytosine"
gataacactggggagagttaactttttcacctctgtttgttgatatgcccctttgtgctccgtattcacaaaggggcacctcaacaagcccatcatttgttaatgaatgcctttactttcat

SEQ ID NO: 7279 - DNA, 122 bp, Homo sapiens
  misc_feature (61)..(62): /note="This region represents a CpG dinucleotide"
  misc_feature (61)..(61): /note="Nucleotide may be methylated to form 5-methylcytosine"
cttagtatttttgataacataagatagcattgtctcatatgtcttttctctctttccttccgtcaccacttcccccaccccaaatattggttctgttatgattctgcaatgcaatttacaat

SEQ ID NO: 7280 - DNA, 122 bp, Homo sapiens
  misc_feature (61)..(62): /note="This region represents a CpG dinucleotide"
  misc_feature (61)..(61): /note="Nucleotide may be methylated to form 5-methylcytosine"
tgactgttatgcagcaggccggcaggtcaataaacttgcttgcctgactttgagtatactcgtcttttctcttggccaaccttacggtagctgtaccagtttgcatttccaccagcaatgaa

SEQ ID NO: 7281 - DNA, 122 bp, Homo sapiens
  misc_feature (61)..(62): /note="This region represents a CpG dinucleotide"
  misc_feature (61)..(61): /note="Nucleotide may be methylated to form 5-methylcytosine"
aagcagttaggcagtagcagagtcaggattcacacctagtgagcatgacttgagagcatacgttcttacccactatctgttactggtctcttagtttcattttccacccaaaccctgtatct

SEQ ID NO: 7282 - DNA, 122 bp, Homo sapiens
  misc_feature (61)..(62): /note="This region represents a CpG dinucleotide"
  misc_feature (61)..(61): /note="Nucleotide may be methylated to form 5-methylcytosine"
aaacttttcaggagcctaagatctaatcaacttgatcaactcttatggacaacaggcagacgtggttcctgttgtcatagggctgctcagctagagagaagacagacaatgagctacccaac

SEQ ID NO: 7283 - DNA, 122 bp, Homo sapiens
  misc_feature (61)..(62): /note="This region represents a CpG dinucleotide"
  misc_feature (61)..(61): /note="Nucleotide may be methylated to form 5-methylcytosine"
ctggggaagggcagggctgcaggctctttgggagacccagagaacaagctcccaatggggcggggggaggaagaactgtcccctcttagggcccctcagcctcagcctgggcagaaaatgag

SEQ ID NO: 7284 - DNA, 122 bp, Homo sapiens
  misc_feature (61)..(62): /note="This region represents a CpG dinucleotide"
  misc_feature (61)..(61): /note="Nucleotide may be methylated to form 5-methylcytosine"
ttaagaacagcctgggtaatatggccaaaccctgtttctacaaaacaaacaaacaatgtgcgcctgtagttccagctactggtgggggagggggtacagctgagatggggggatcacttgag

SEQ ID NO: 7285 - DNA, 122 bp, Homo sapiens
  misc_feature (61)..(62): /note="This region represents a CpG dinucleotide"
  misc_feature (61)..(61): /note="Nucleotide may be methylated to form 5-methylcytosine"
tactgctgcatgggaccctgcagtgtggttatctccagtttcaagtgcagtgttctaacgcgtctgtttttccttacgtctgccaacactgaatattgtcgtcttttttaatctatctaatt

SEQ ID NO: 7286 - DNA, 122 bp, Homo sapiens
  misc_feature (61)..(62): /note="This region represents a CpG dinucleotide"
  misc_feature (61)..(61): /note="Nucleotide may be methylated to form 5-methylcytosine"
tcagacttaagtcaacataaatattagcccaggactctcacttggctcagtctgagttggcgcattccctaagggaaactgtagggtgtcagaagaaagccccgatttgtacctataagaga

SEQ ID NO: 7287 - DNA, 122 bp, Homo sapiens
  misc_feature (61)..(62): /note="This region represents a CpG dinucleotide"
  misc_feature (61)..(61): /note="Nucleotide may be methylated to form 5-methylcytosine"
gtgagatgatttcctaatactcattgctttccaggagcttagggctcaggtaaagtccaacgttgtcaacaacttaggtcctgatggtgatgatgatggtgatggtgatgatgatgatgagg

SEQ ID NO: 7288 - DNA, 122 bp, Homo sapiens
  misc_feature (61)..(62): /note="This region represents a CpG dinucleotide"
  misc_feature (61)..(61): /note="Nucleotide may be methylated to form 5-methylcytosine"
agggtggtgctggcccagagtctcagtgtccccagggatttgccatgatgattgaacgaccgtaatgggattgagcggcagggttctagtggacgcaatgaagcggattgcaaagaggaagc

SEQ ID NO: 7289 - DNA, 122 bp, Homo sapiens
  misc_feature (61)..(62): /note="This region represents a CpG dinucleotide"
  misc_feature (61)..(61): /note="Nucleotide may be methylated to form 5-methylcytosine"
gagaaaaaaatgcatggacagtgttggcaacagtgcaagtttcagaacaaactttggtcacgtaaatctttgggaagtaagtccagtacctcattccatcattctgtggtcaggaaactact

SEQ ID NO: 7290 - DNA, 122 bp, Homo sapiens
  misc_feature (61)..(62): /note="This region represents a CpG dinucleotide"
  misc_feature (61)..(61): /note="Nucleotide may be methylated to form 5-methylcytosine"
ttgctggtctgcgggaaatcgagctttcaaaacaagtcctgaagcaggaatgctggggaacgagatgtcacaattaccaggtgagaccagcggccctgctcaagctgtctcctgacaggcag

SEQ ID NO: 7291 - DNA, 122 bp, Homo sapiens
  misc_feature (61)..(62): /note="This region represents a CpG dinucleotide"
  misc_feature (61)..(61): /note="Nucleotide may be methylated to form 5-methylcytosine"
ctacgctcagcgagcgacagagcaacgtcgcactgcattcttaccaaacacccaggtgaacgacgcatccaacgatttgggagctcaggacccatggtccctaaaaggcaacaattaagact

SEQ ID NO: 7292 - DNA, 122 bp, Homo sapiens
  misc_feature (61)..(62): /note="This region represents a CpG dinucleotide"
  misc_feature (61)..(61): /note="Nucleotide may be methylated to form 5-methylcytosine"
gtctgctgcctggtgccatgtcttattgatgtaagggtttcctgagacactcatgagcaccgtccccacccccaggtggatctactgttctcaggattccacattttccaaacataacccca

SEQ ID NO: 7293 - DNA, 122 bp, Homo sapiens
  misc_feature (61)..(62): /note="This region represents a CpG dinucleotide"
  misc_feature (61)..(61): /note="Nucleotide may be methylated to form 5-methylcytosine"
atgcccaagcggtaaactgcctgtttcctggtccagtcacctttgcggggttgttctgtgcgtgcctgaaatctctccccagacacttggctccgtgactgcctctcacttcctaatcaaac

SEQ ID NO: 7294 - DNA, 122 bp, Homo sapiens
  misc_feature (61)..(62): /note="This region represents a CpG dinucleotide"
  misc_feature (61)..(61): /note="Nucleotide may be methylated to form 5-methylcytosine"
attactggaacaaggctgttgaatttatattaaaaagttcagacaccctcagacacatgacgccatctggtcgtgaaatgtactcttggcaaatggaggaaaaggaacaggggaagatcctc

SEQ ID NO: 7295 - DNA, 122 bp, Homo sapiens
  misc_feature (61)..(62): /note="This region represents a CpG dinucleotide"
  misc_feature (61)..(61): /note="Nucleotide may be methylated to form 5-methylcytosine"
tggtttgaattgcttgacaggacaggtattggaaacttgcccactccatttgagtggacgcgtggcctgatcacccatggtgtgcctgtaccggcacttcggtttttgtttttgacttgact

SEQ ID NO: 7296 - DNA, 122 bp, Homo sapiens
  misc_feature (61)..(62): /note="This region represents a CpG dinucleotide"
  misc_feature (61)..(61): /note="Nucleotide may be methylated to form 5-methylcytosine"
agtatgagacatccattgtacccaaagctaggtggccttaagaaggtcagtgtcgctcagcgacagggctcggccccccctcgtgcaaacccaccccgaggtgtgaggccaggagtgtgcgg

SEQ ID NO: 7297 - DNA, 122 bp, Homo sapiens
  misc_feature (61)..(62): /note="This region represents a CpG dinucleotide"
  misc_feature (61)..(61): /note="Nucleotide may be methylated to form 5-methylcytosine"
ggttttctgctcagaaagggatgacacactgggagagctagctaagggccccgacgaagacgaccctggggacacagccaatggcactgtacttaatacttgtgctgctggaacaggggact

SEQ ID NO: 7298 - DNA, 122 bp, Homo sapiens
  misc_feature (61)..(62): /note="This region represents a CpG dinucleotide"
  misc_feature (61)..(61): /note="Nucleotide may be methylated to form 5-methylcytosine"
tacatggacaaaagggaggctcagagaaagtaagttacctgactgcccacctcaagggggcgccaatcagaattcaggcttaggatttgcatagggggagcatcacaagtggatgacgaatt

SEQ ID NO: 7299 - DNA, 122 bp, Homo sapiens
  misc_feature (61)..(62): /note="This region represents a CpG dinucleotide"
  misc_feature (61)..(61): /note="Nucleotide may be methylated to form 5-methylcytosine"
gatgaggaaattgtaggctccacccctgaggacaatagcggactgagatagcttaggaggcggtgaattcatgagcagcacaggtctttagcagaaacaagttgactgctggttgtgatgtt

SEQ ID NO: 7300 - DNA, 122 bp, Homo sapiens
  misc_feature (61)..(62): /note="This region represents a CpG dinucleotide"
  misc_feature (61)..(61): /note="Nucleotide may be methylated to form 5-methylcytosine"
tggttgatctctcagtatttcataatgctctcctaaagctcagttctacagtagggaactcgagctgaggcaatgctctgtgaatacacttctaacttttgtagacctttgcttcctccaaa

SEQ ID NO: 7301 - DNA, 122 bp, Homo sapiens
  misc_feature (61)..(62): /note="This region represents a CpG dinucleotide"
  misc_feature (61)..(61): /note="Nucleotide may be methylated to form 5-methylcytosine"
tttttataagagaaattgcttttattccaggtactattgttgcataaccaccaccctgaacgtagtggtgtaaacaacagccgcttgactgtgctcagggattctttggaccttggacgggg

SEQ ID NO: 7302 - DNA, 122 bp, Homo sapiens
  misc_feature (61)..(62): /note="This region represents a CpG dinucleotide"
  misc_feature (61)..(61): /note="Nucleotide may be methylated to form 5-methylcytosine"
cattaaagagaaagggtacgttgaaagtgggattgcatagatttcccatgaccactgccacgctttgaagggaaactgctcagctgagcactgcttcctggaatgagcaaggccatctgccc

SEQ ID NO: 7303 - DNA, 122 bp, Homo sapiens
  misc_feature (61)..(62): /note="This region represents a CpG dinucleotide"
  misc_feature (61)..(61): /note="Nucleotide may be methylated to form 5-methylcytosine"
agttctcaaaagttacagactgtatgattccatttatgtgacacttttgaaaagataaaacgatagcaacagagactagatcaaaatagcaaaatagcagggagtttgtcgggggcaggaaa

SEQ ID NO: 7304 - DNA, 122 bp, Homo sapiens
  misc_feature (61)..(62): /note="This region represents a CpG dinucleotide"
  misc_feature (61)..(61): /note="Nucleotide may be methylated to form 5-methylcytosine"
atggagtcactctggttcaaacacctctgacacttccactccaggattggggttgggggccgagggtggccaggacacaagcaagccccaagcacttgctttccccctgactctctaaacct

SEQ ID NO: 7305 - DNA, 122 bp, Homo sapiens
  misc_feature (61)..(62): /note="This region represents a CpG dinucleotide"
  misc_feature (61)..(61): /note="Nucleotide may be methylated to form 5-methylcytosine"
aggctgagccttgctgagggcactgaagctccggggagtttatagctggaggctcgggcccgccccgaggggagagggagggggagagaattcctttgctcaaacacaagcctgggagttca

SEQ ID NO: 7306 - DNA, 122 bp, Homo sapiens
  misc_feature (61)..(62): /note="This region represents a CpG dinucleotide"
  misc_feature (61)..(61): /note="Nucleotide may be methylated to form 5-methylcytosine"
gtttcctgtccgggctggcggggccgccagtcggcgtggggtgcggcaaggggagcggggcgctgggtcagccgagggccgggcctcgggggcgcagccggactggacggcggctcctgtgg

SEQ ID NO: 7307 - DNA, 122 bp, Homo sapiens
  misc_feature (61)..(62): /note="This region represents a CpG dinucleotide"
  misc_feature (61)..(61): /note="Nucleotide may be methylated to form 5-methylcytosine"
tgggagagcaagtctactgatgaatcatttcctgctcttccctctgcctgggactttgcccgcagattcttcactttactcggtcctctaattcaaatctcagttcttgtatcaactccttg

SEQ ID NO: 7308 - DNA, 122 bp, Homo sapiens
  misc_feature (61)..(62): /note="This region represents a CpG dinucleotide"
  misc_feature (61)..(61): /note="Nucleotide may be methylated to form 5-methylcytosine"
gcagagttttgcatgtgtgagaatcagactgagctataaacagatacacacacacatagacgcacaggttcaagggagatggtctatgactcaataactcatctggtttgtcaatttcggta

SEQ ID NO: 7309 - DNA, 122 bp, Homo sapiens
  misc_feature (61)..(62): /note="This region represents a CpG dinucleotide"
  misc_feature (61)..(61): /note="Nucleotide may be methylated to form 5-methylcytosine"
tatcagtcttgagccaatcaggactgcaacttttacttttcaggcaatgctctacacagccgacccagtcaatgcagactggcattacccacattttcctattgctcaactacagaatgagg

SEQ ID NO: 7310 - DNA, 122 bp, Homo sapiens
  misc_feature (61)..(62): /note="This region represents a CpG dinucleotide"
  misc_feature (61)..(61): /note="Nucleotide may be methylated to form 5-methylcytosine"
atgcatgtatggaactgttaccctgtaggtaacaacttcatcaactatgattcaatgctgcgtccagttttttgcttttagtgtgacagactccacttgttcccaaagttcctttagtcagc

SEQ ID NO: 7311 - DNA, 122 bp, Homo sapiens
  misc_feature (61)..(62): /note="This region represents a CpG dinucleotide"
  misc_feature (61)..(61): /note="Nucleotide may be methylated to form 5-methylcytosine"
taaagaaacaagtaaaagacgcggttcctgagcgggggaggggcctttgggcgaaggaggcgcgtcgttttctcgaagccagagaaatttgtcctgtccgccccacccactcccctaagatg

SEQ ID NO: 7312 - DNA, 122 bp, Homo sapiens
  misc_feature (61)..(62): /note="This region represents a CpG dinucleotide"
  misc_feature (61)..(61): /note="Nucleotide may be methylated to form 5-methylcytosine"
tggcaacagtctcttggaacaggttgtcatcagcatcccgatttgaggaggaggacgttacggcttagagagagaggtttgtaacttgcccaagtcccacagctagtaagttcagggctagg

SEQ ID NO: 7313 - DNA, 122 bp, Homo sapiens
  misc_feature (61)..(62): /note="This region represents a CpG dinucleotide"
  misc_feature (61)..(61): /note="Nucleotide may be methylated to form 5-methylcytosine"
aagcattctgaaatttggcttcctcatgtttcatccccttagttaatctaagcttccatacgttatctctcttaaagaagtatttagatggcaaataaagtatttaaatagcaaaattaatt

SEQ ID NO: 7314 - DNA, 122 bp, Homo sapiens
  misc_feature (61)..(62): /note="This region represents a CpG dinucleotide"
  misc_feature (61)..(61): /note="Nucleotide may be methylated to form 5-methylcytosine"
cctccgtccgcgtccctcctccctcctccctcctccgcatccctccttccccgccctccgcgaggctgcagcccaggctgagcgccgcctcccaggcccagggccgcccctccaagccccaa

SEQ ID NO: 7315 - DNA, 122 bp, Homo sapiens
  misc_feature (61)..(62): /note="This region represents a CpG dinucleotide"
  misc_feature (61)..(61): /note="Nucleotide may be methylated to form 5-methylcytosine"
ggctgggatttaggattgtgcgagcttatggtccccccaaccccaacatcattgaaattacgtgtctgttcaaagccttgggactgagtctcccagctcaaccagcagggcctgcaagaagg

SEQ ID NO: 7316 - DNA, 122 bp, Homo sapiens
  misc_feature (61)..(62): /note="This region represents a CpG dinucleotide"
  misc_feature (61)..(61): /note="Nucleotide may be methylated to form 5-methylcytosine"
acttcaagatatggcaaataaacgtatatgcatttaaaatacctcatttccttccttgtccgtcatgtgatgctacaccacagtcaggctggaaaggcagccgtgttatgtggggttaaata

SEQ ID NO: 7317 - DNA, 122 bp, Homo sapiens
  misc_feature (61)..(62): /note="This region represents a CpG dinucleotide"
  misc_feature (61)..(61): /note="Nucleotide may be methylated to form 5-methylcytosine"
ttttttttttttttgagacagggtctcactcgcccaggctggagtgtggtggggccatcacggctcactgcagcccaggctcccgaagagctggaactacaggcatgcaccaccatgctaat

SEQ ID NO: 7318 - DNA, 122 bp, Homo sapiens
  misc_feature (61)..(62): /note="This region represents a CpG dinucleotide"
  misc_feature (61)..(61): /note="Nucleotide may be methylated to form 5-methylcytosine"
aaaaatatttttaagctttctctcagaattgaaggcagtaggggagggatacagaagttccggaaatggctgactgtgtagacaagatggtgtggtttcagagtacagctgaatatatacag

SEQ ID NO: 7319 - DNA, 122 bp, Homo sapiens
  misc_feature (61)..(62): /note="This region represents a CpG dinucleotide"
  misc_feature (61)..(61): /note="Nucleotide may be methylated to form 5-methylcytosine"
ttccatggcaaactccagagaattaagaagccaaactcaacatcgccatgggcctcaggacgactaaacagatggggagaggcactaaagctcctggtcaccaagagggtatgtaggcattt

SEQ ID NO: 7320 - DNA, 122 bp, Homo sapiens
  misc_feature (61)..(62): /note="This region represents a CpG dinucleotide"
  misc_feature (61)..(61): /note="Nucleotide may be methylated to form 5-methylcytosine"
atatgactatgagaacacattgtgattttggagagatcttatcaaagtgaagagtcttgacgcttaagcctcattagcatcatggcaaacagccctctaagacactgtttcagagagagtgc

SEQ ID NO: 7321 - DNA, 122 bp, Homo sapiens
  misc_feature (61)..(62): /note="This region represents a CpG dinucleotide"
  misc_feature (61)..(61): /note="Nucleotide may be methylated to form 5-methylcytosine"
gagaaatccaagaaccctaaatgtataaggagtgaagcaatgttgaaatggacttacaaacggatgcagctatattctccagtggagacagccagtgccaacttttgtgcttattccaaatt

SEQ ID NO: 7322 - DNA, 122 bp, Homo sapiens
  misc_feature (61)..(62): /note="This region represents a CpG dinucleotide"
  misc_feature (61)..(61): /note="Nucleotide may be methylated to form 5-methylcytosine"
tgtgaggttacctttttccttgttgcattggaagcgggccttctcttccagcaggccttccgcctggttgttgttggtgtctgtgatggctgttgttttgtctgttaatttcaggacctcct

SEQ ID NO: 7323 - DNA, 122 bp, Homo sapiens
  misc_feature (61)..(62): /note="This region represents a CpG dinucleotide"
  misc_feature (61)..(61): /note="Nucleotide may be methylated to form 5-methylcytosine"
ccctggcagctgtggactctactcagcactctatcagttgtctgcgttcaggtagagagacgcaaaggaagagtgttgtggaaagctccggaagagtctggttttgactggcgtctctgtcc

SEQ ID NO: 7324 - DNA, 122 bp, Homo sapiens
  misc_feature (61)..(62): /note="This region represents a CpG dinucleotide"
  misc_feature (61)..(61): /note="Nucleotide may be methylated to form 5-methylcytosine"
cccgctcgcctataaggagctgtccgccacccgggtgctgattccagctctcgcgcccgacgaggtggatttggctgtccaccgagctccggcgcctgtcgttctaattgggtttggatttg

SEQ ID NO: 7325 - DNA, 122 bp, Homo sapiens
  misc_feature (61)..(62): /note="This region represents a CpG dinucleotide"
  misc_feature (61)..(61): /note="Nucleotide may be methylated to form 5-methylcytosine"
tacctgtaattatcctgtaactcataagtccttttgctggtttcaatggacaggcttcctcgttgggacagaaaaataggtagcagttgggttgtctagctgtttttcgagtgtcgaagatc

SEQ ID NO: 7326 - DNA, 122 bp, Homo sapiens
  misc_feature (61)..(62): /note="This region represents a CpG dinucleotide"
  misc_feature (61)..(61): /note="Nucleotide may be methylated to form 5-methylcytosine"
gtaccctgacaaatcaactgtctacatttttcccgttcccctccgggccacacgcttgtgcggacatgactttgaagccacagtcaaagagcaattgtgtttgtgcattcatttgttcagca

SEQ ID NO: 7327 - DNA, 122 bp, Homo sapiens
  misc_feature (61)..(62): /note="This region represents a CpG dinucleotide"
  misc_feature (61)..(61): /note="Nucleotide may be methylated to form 5-methylcytosine"
tgtattataaagtatttgccatggtgacaaagctgggagaaacatcccattagccacagacgggctacagactgttctgattatccatgtccaaaactcagtctggctacagctttgtgtta

SEQ ID NO: 7328 - DNA, 122 bp, Homo sapiens
  misc_feature (61)..(62): /note="This region represents a CpG dinucleotide"
  misc_feature (61)..(61): /note="Nucleotide may be methylated to form 5-methylcytosine"
ccgcaccttccctcccgctccctctggccgccgggcctcagccagcgctgctccctgacccgcctgtgccctcgccagggcccctcgccgccgcctcctgccgcctcccgatatggccaaac

SEQ ID NO: 7329 - DNA, 122 bp, Homo sapiens
  misc_feature (61)..(62): /note="This region represents a CpG dinucleotide"
  misc_feature (61)..(61): /note="Nucleotide may be methylated to form 5-methylcytosine"
ggcaagaaggaaggagggaacagcatgtacaaggactggaaacaagagaggctggccaagcgtgggacagtcaatagctcagtatggtaaggagttagaatttaagacatgcaaattgtgga

SEQ ID NO: 7330 - DNA, 122 bp, Homo sapiens
  misc_feature (61)..(62): /note="This region represents a CpG dinucleotide"
  misc_feature (61)..(61): /note="Nucleotide may be methylated to form 5-methylcytosine"
tgggtttcacctgacaaccctcgtacacagaattagtcattctgatgcataatgcaatgccgcatagccgcctctcacggaataccattaggctctttctcccggcctgacgtccttattcc

SEQ ID NO: 7331 - DNA, 122 bp, Homo sapiens
  misc_feature (61)..(62): /note="This region represents a CpG dinucleotide"
  misc_feature (61)..(61): /note="Nucleotide may be methylated to form 5-methylcytosine"
agggttccacccaggtcaatgagttattagaggtcaggattacaaagtataaaacatgcccggaaaccagggtcattcccagagaaatgggatggcttatggtctgctcatccacccccaaa

SEQ ID NO: 7332 - DNA, 122 bp, Homo sapiens
  misc_feature (61)..(62): /note="This region represents a CpG dinucleotide"
  misc_feature (61)..(61): /note="Nucleotide may be methylated to form 5-methylcytosine"
ggtgatccgcccaccttggcctctcaaagtgctgggattacaggcatgagccaccatgcccgaccagacctaggcttttgattccaaagtacagaaacttaatatttgaaggtgtggtcatg

SEQ ID NO: 7333 - DNA, 122 bp, Homo sapiens
  misc_feature (61)..(62): /note="This region represents a CpG dinucleotide"
  misc_feature (61)..(61): /note="Nucleotide may be methylated to form 5-methylcytosine"
agtgcactttccggtccctccaggtcagcaggctgcccagcagcggcgaggctgcagccacgcccaccatgtccatgaccgtggtcaccaaggagaagaacaagaagggtgaggtggggcag

SEQ ID NO: 7334 - DNA, 122 bp, Homo sapiens
  misc_feature (61)..(62): /note="This region represents a CpG dinucleotide"
  misc_feature (61)..(61): /note="Nucleotide may be methylated to form 5-methylcytosine"
ttcctcttcctgtgatccccacgatggtgaattcagcaacataaatagctcctgcgcacacgccaggcagggatggcgaagaacacacaagaaccctcactgcctccaccaaaagggctcag

SEQ ID NO: 7335 - DNA, 122 bp, Homo sapiens
  misc_feature (61)..(62): /note="This region represents a CpG dinucleotide"
  misc_feature (61)..(61): /note="Nucleotide may be methylated to form 5-methylcytosine"
ccctcagcatgtttcttaggcaacagataaagacttctggtgactctgtgttttctggtccggcttggctttctcatggggccagggagggaagctgtagttttctagaatacacacacaca

SEQ ID NO: 7336 - DNA, 122 bp, Homo sapiens
  misc_feature (61)..(62): /note="This region represents a CpG dinucleotide"
  misc_feature (61)..(61): /note="Nucleotide may be methylated to form 5-methylcytosine"
ttttatcacaataaatatttatagggtcagcatttggcctgggtattccacagccactcgcgcccctcttgcttcaggcactcccaactcagcccccaggtgccaaaccccccccccgccat

SEQ ID NO: 7337 - DNA, 122 bp, Homo sapiens
  misc_feature (61)..(62): /note="This region represents a CpG dinucleotide"
  misc_feature (61)..(61): /note="Nucleotide may be methylated to form 5-methylcytosine"
attcaaaaagtagcagagccagaatgaaaccctggtgcctggtttcaaggcatgcagtctcgccatttactacatactgtcttcaagtgaaaagaaaaacaaaaagggcaaaagtgcaacca

SEQ ID NO: 7338 - DNA, 122 bp, Homo sapiens
  misc_feature (61)..(62): /note="This region represents a CpG dinucleotide"
  misc_feature (61)..(61): /note="Nucleotide may be methylated to form 5-methylcytosine"
ttatgaaagtaattcatcagaagagatgaatcctctctttctctgcatgttgtgtgtaaacgtgaatcctggagttattgtagtcatcttgctacctgcctgaggataaagccaatgcaggg

SEQ ID NO: 7339 - DNA, 122 bp, Homo sapiens
  misc_feature (61)..(62): /note="This region represents a CpG dinucleotide"
  misc_feature (61)..(61): /note="Nucleotide may be methylated to form 5-methylcytosine"
taaaactgattgtaaacttgcccagtaatgattggtcatcttccttacaaaggctgccttcgtttatactattttacatgcatttcattatacatcataaaggttttaaaggtaagctgcct

SEQ ID NO: 7340 - DNA, 122 bp, Homo sapiens
  misc_feature (61)..(62): /note="This region represents a CpG dinucleotide"
  misc_feature (61)..(61): /note="Nucleotide may be methylated to form 5-methylcytosine"
ccatgttaccaaatccagtagttagttcttagtctcattctacttcaccagtcagcattacgtggtacagttagtctgttctctgtgaagcattttcttaacttgatcgtatgccatttttt

SEQ ID NO: 7341 - DNA, 122 bp, Homo sapiens
  misc_feature (61)..(62): /note="This region represents a CpG dinucleotide"
  misc_feature (61)..(61): /note="Nucleotide may be methylated to form 5-methylcytosine"
gaggagctgcggcgcgcccctctcaccgcgattgttcacttgccaggcgccacgtgtgggcgacgtcactgggctttatgctttcatcgccgctatctgcctacgtgagctgctctcctccc

SEQ ID NO: 7342 - DNA, 122 bp, Homo sapiens
  misc_feature (61)..(62): /note="This region represents a CpG dinucleotide"
  misc_feature (61)..(61): /note="Nucleotide may be methylated to form 5-methylcytosine"
ctacagacctgcatatctactacttgctggacatgtgcataaataaaactgccctctcagcgcctcaaacaagcggcatgtactttccttatctaagttaattgcctcaccctatcatgtgg

SEQ ID NO: 7343 - DNA, 122 bp, Homo sapiens
  misc_feature (61)..(62): /note="This region represents a CpG dinucleotide"
  misc_feature (61)..(61): /note="Nucleotide may be methylated to form 5-methylcytosine"
ctgctttctgcacttccgggtgtatgacctaatctttctagaagctgacccaagaggctccgcaatgtgagccacaaaaagtcatcagcattccctacctgcctctctgcagtctgcagcat

SEQ ID NO: 7344 - DNA, 122 bp, Homo sapiens
  misc_feature (61)..(62): /note="This region represents a CpG dinucleotide"
  misc_feature (61)..(61): /note="Nucleotide may be methylated to form 5-methylcytosine"
atgaagtaggtgcagttattaacacctccctttttcaggtggagaaactgaggcacagggcggataagcaatttcttagggtcatatggcaaatcaacatcaaagccaggactccaccccaa

SEQ ID NO: 7345 - DNA, 122 bp, Homo sapiens
  misc_feature (61)..(62): /note="This region represents a CpG dinucleotide"
  misc_feature (61)..(61): /note="Nucleotide may be methylated to form 5-methylcytosine"
atgtaagagaatgtccttgttttcagaaaatactacacacgaaaatatttacagtgaaaacgtcattctgtttctaacttgtctgccaagtggttgtctggcctccgcttgcacagctccct

SEQ ID NO: 7346 - DNA, 122 bp, Homo sapiens
  misc_feature (61)..(62): /note="This region represents a CpG dinucleotide"
  misc_feature (61)..(61): /note="Nucleotide may be methylated to form 5-methylcytosine"
tttagcactactctctctcctagaacgagagccccttgaagtccaaagctaggtcttaatcgtctttttatgctctggatatgtagtgcctgtgtaaggtgttgtagggcctccataagtat

SEQ ID NO: 7347 - DNA, 122 bp, Homo sapiens
  misc_feature (61)..(62): /note="This region represents a CpG dinucleotide"
  misc_feature (61)..(61): /note="Nucleotide may be methylated to form 5-methylcytosine"
actgggacagaaattttttaagaatcttagccagtcatgacggcatgcacccatagttcccgttaattgggagtctgagccaggagatccctcaagtccaggagctgggggctgcagtaagt

SEQ ID NO: 7348 - DNA, 122 bp, Homo sapiens
  misc_feature (61)..(62): /note="This region represents a CpG dinucleotide"
  misc_feature (61)..(61): /note="Nucleotide may be methylated to form 5-methylcytosine"
ccctattgaaatgagggattcaagcagcaatcatcaatagaagccaaaatcctcctttgacgggaactggataatcccaagtgctggactgtcgcccacagattctccgctgctggtcatga

SEQ ID NO: 7349 - DNA, 122 bp, Homo sapiens
  misc_feature (61)..(62): /note="This region represents a CpG dinucleotide"
  misc_feature (61)..(61): /note="Nucleotide may be methylated to form 5-methylcytosine"
tgcttcagcctcaacaagtgtgtttatgtaaagttaaatgaactctggcagtgagctgcacgttttttaaaattaggaaatgagttagctaatattgaacttgaggttttagtcaatgcaat

SEQ ID NO: 7350 - DNA, 122 bp, Homo sapiens
  misc_feature (61)..(62): /note="This region represents a CpG dinucleotide"
  misc_feature (61)..(61): /note="Nucleotide may be methylated to form 5-methylcytosine"
ttctttccagcttcctctctctcgctatatgatctgtgcaaaccggctccccttctccttcggccacgagtggaagctttttgaagccctcaccagtgcagacgttggtgccatgcttctca

SEQ ID NO: 7351 - DNA, 122 bp, Homo sapiens
  misc_feature (61)..(62): /note="This region represents a CpG dinucleotide"
  misc_feature (61)..(61): /note="Nucleotide may be methylated to form 5-methylcytosine"
aaatatgctggctttgagacccggagggcacgaaaacagggagctggggttctggaaggacgccagctcggcctgcgaggggctgaaaaatacctgctgttgcctctgtctcgttgagagtt

SEQ ID NO: 7352 - DNA, 122 bp, Homo sapiens
  misc_feature (61)..(62): /note="This region represents a CpG dinucleotide"
  misc_feature (61)..(61): /note="Nucleotide may be methylated to form 5-methylcytosine"
cgtcacaccatgtcatgtagctttttcttcgcatatctgttgattgcttgcacttctgcccgtcctcatactagggcttagttcagcacttctccctggactggatttagactctgatgccc

SEQ ID NO: 7353 - DNA, 122 bp, Homo sapiens
  misc_feature (61)..(62): /note="This region represents a CpG dinucleotide"
  misc_feature (61)..(61): /note="Nucleotide may be methylated to form 5-methylcytosine"
tatgggaattaaatgagaaagcatgtgccaagttagtacattgcagccacaaaataatggcggtggaggtagcttaaattgagataattagctataatgatgatgataataatgacaaccag

SEQ ID NO: 7354 - DNA, 122 bp, Homo sapiens
  misc_feature (61)..(62): /note="This region represents a CpG dinucleotide"
  misc_feature (61)..(61): /note="Nucleotide may be methylated to form 5-methylcytosine"
ccagggatgaatgtgggagggaatcagtctgtgagaaattcttaactctccccatgctctcgctcttacatcctgatacttgagttatgtgtgttcccaaacgtgtttataccagttgtgct

SEQ ID NO: 7355 - DNA, 122 bp, Homo sapiens
  misc_feature (61)..(62): /note="This region represents a CpG dinucleotide"
  misc_feature (61)..(61): /note="Nucleotide may be methylated to form 5-methylcytosine"
gcaagacctcttcactgattctccaaagactatagaatgttctctttcaggagcaagctgcgacatgtttaactagtttaggtaaaacaacaataactgttatttaccagggaacaggcttt

SEQ ID NO: 7356 - DNA, 122 bp, Homo sapiens
  misc_feature (61)..(62): /note="This region represents a CpG dinucleotide"
  misc_feature (61)..(61): /note="Nucleotide may be methylated to form 5-methylcytosine"
aatttccaccgtctttattttccttgtgcccagttgcctgtataagtgctgcaacacacacggtgggtaagaaccagaattgaggacaggccaacactcccagtacaaatggagccaacaga

SEQ ID NO: 7357 - DNA, 122 bp, Homo sapiens
  misc_feature (61)..(62): /note="This region represents a CpG dinucleotide"
  misc_feature (61)..(61): /note="Nucleotide may be methylated to form 5-methylcytosine"
aagaatgtttttttttctgttcgtatactttccccaacttctgctggcctggaatcagtacgccctaaccagcccatagatatgtggtcaggtttctagataaggcataggaacacttaggg

SEQ ID NO: 7358 - DNA, 122 bp, Homo sapiens
  misc_feature (61)..(62): /note="This region represents a CpG dinucleotide"
  misc_feature (61)..(61): /note="Nucleotide may be methylated to form 5-methylcytosine"
ccctggagccactgtgtccctcgtggctggtggtcagcattgtctgccattcctgctcctcgcccgccaggtgcgggttccgcctgtgagtccctcccagccggcagctgtgctgctccgcc

SEQ ID NO: 7359 - DNA, 122 bp, Homo sapiens
  misc_feature (61)..(62): /note="This region represents a CpG dinucleotide"
  misc_feature (61)..(61): /note="Nucleotide may be methylated to form 5-methylcytosine"
gcatctctgaagttcactatcactctaggggaacttgagctgctgcttagcttctctctgcgcttctcttctatgaacttgaaatatgctctactgagtctgtttgaagctgaatcttttga

SEQ ID NO: 7360 - DNA, 122 bp, Homo sapiens
  misc_feature (61)..(62): /note="This region represents a CpG dinucleotide"
  misc_feature (61)..(61): /note="Nucleotide may be methylated to form 5-methylcytosine"
tttgggatgcctgattcacacttaacagacatacagacacttaacttacagacttacagacgcttaactgcctaacagacagtgtcagctcaatcagtcacaagttcattcatttggtcata

SEQ ID NO: 7361 - DNA, 122 bp, Homo sapiens
  misc_feature (61)..(62): /note="This region represents a CpG dinucleotide"
  misc_feature (61)..(61): /note="Nucleotide may be methylated to form 5-methylcytosine"
ctggacaggaagagtggcccctgtgcagagcagtgcctctggggttcagagaacatgtggcgacagtgccaaacactacctgggccaaggaagggctccaggcctagaaggtctctggtgag

SEQ ID NO: 7362 - DNA, 122 bp, Homo sapiens
  misc_feature (61)..(62): /note="This region represents a CpG dinucleotide"
  misc_feature (61)..(61): /note="Nucleotide may be methylated to form 5-methylcytosine"
ggaagaaagaggaaaagagagagagaaagtgtgcacgcacaggcgcacaaacacaaaatccggcttccacggaggacagcagcagcctgctgcacagtggggaccaagagatacaaggctgc

SEQ ID NO: 7363 - DNA, 122 bp, Homo sapiens
  misc_feature (61)..(62): /note="This region represents a CpG dinucleotide"
  misc_feature (61)..(61): /note="Nucleotide may be methylated to form 5-methylcytosine"
gggctctgggaaggaccttcctggcctcttcccgcttctgctggcagccggcaatcctcccgagcctcagcctgcagccgcgtcactccaatctctgcctccgatgtcacgtggcctcctcc

SEQ ID NO: 7364 - DNA, 122 bp, Homo sapiens
  misc_feature (61)..(62): /note="This region represents a CpG dinucleotide"
  misc_feature (61)..(61): /note="Nucleotide may be methylated to form 5-methylcytosine"
tatgcgagaaggtttgaatagcagtgtcttccctggtgcatggcaggtccttggtacctccgccaactctcttctctacacacctgccagcatcccttcctcatcctgtgttcaatgtggct

SEQ ID NO: 7365 - DNA, 122 bp, Homo sapiens
  misc_feature (61)..(62): /note="This region represents a CpG dinucleotide"
  misc_feature (61)..(61): /note="Nucleotide may be methylated to form 5-methylcytosine"
gctgtgacagggtgaggatgcatgagaagacacggagacagctgattctgcccacgtggccggcagggctccagagtggagtcgggctttggagatgctcagagtggccatggctggttaga

SEQ ID NO: 7366 - DNA, 122 bp, Homo sapiens
  misc_feature (61)..(62): /note="This region represents a CpG dinucleotide"
  misc_feature (61)..(61): /note="Nucleotide may be methylated to form 5-methylcytosine"
attcagctccttggtcacgagacaggaattgcaaggtggagggaagctgtaattccaacacgtaagtccatggatactccagtaaagcacaggcataggtgccactgatccagcagaggcag

SEQ ID NO: 7367 - DNA, 122 bp, Homo sapiens
  misc_feature (61)..(62): /note="This region represents a CpG dinucleotide"
  misc_feature (61)..(61): /note="Nucleotide may be methylated to form 5-methylcytosine"
gtcccagggtcatgagggcagagcatcctttttagggcgagctctctacaagcaccaggtcgccacagcagctcctctgcggctatgcattcgccattcttccctgtgtcagccgtggtgct

SEQ ID NO: 7368 - DNA, 122 bp, Homo sapiens
  misc_feature (61)..(62): /note="This region represents a CpG dinucleotide"
  misc_feature (61)..(61): /note="Nucleotide may be methylated to form 5-methylcytosine"
taaatgactttgagatacaaaggaagaaaaaaaatcagtcactgctgaagttcaaagaaacgatgttctactgagtgctttatggatttttttaagtacaattttccaaataatagaaaaac

SEQ ID NO: 7369 - DNA, 122 bp, Homo sapiens
  misc_feature (61)..(62): /note="This region represents a CpG dinucleotide"
  misc_feature (61)..(61): /note="Nucleotide may be methylated to form 5-methylcytosine"
ttagtcataaaaatgtgttattcatatctcttactgtggcagacagcttagtattttgatcgccaaagctgtagtccttttgggttcatcagtgaatctcatgagctgcttatggtcaatat

SEQ ID NO: 7370 - DNA, 122 bp, Homo sapiens
  misc_feature (61)..(62): /note="This region represents a CpG dinucleotide"
  misc_feature (61)..(61): /note="Nucleotide may be methylated to form 5-methylcytosine"
aaaagccttggatggtggagagctactttaaagtctaagggggaaaatacctgtatgttacgtttcactggcaaaatgaactggtaacagaccaaggcagagagacagctagacagtggttg

SEQ ID NO: 7371 - DNA, 122 bp, Homo sapiens
  misc_feature (61)..(62): /note="This region represents a CpG dinucleotide"
  misc_feature (61)..(61): /note="Nucleotide may be methylated to form 5-methylcytosine"
cagagacactgtcacattcagggagggcaagactcagaagtcactcattgtatacactcacgcacacatgccccagcctggcaaagatgtggtccttgaccttcagacaggcagaatgcagt

SEQ ID NO: 7372 - DNA, 122 bp, Homo sapiens
  misc_feature (61)..(62): /note="This region represents a CpG dinucleotide"
  misc_feature (61)..(61): /note="Nucleotide may be methylated to form 5-methylcytosine"
caaaacagggtgtccatgttgcctgtgcttttgactgacaaccttgatttacatgatttacgttgctttgatgtctagcatatgatatcttttcatgatttacaactggggatataaggcac

SEQ ID NO: 7373 - DNA, 122 bp, Homo sapiens
  misc_feature (61)..(62): /note="This region represents a CpG dinucleotide"
  misc_feature (61)..(61): /note="Nucleotide may be methylated to form 5-methylcytosine"
ggacaaagcatctgacggtttggaggatgtttctgtagtcctaggaatccacagtgaattcgagtctagactcagtcatttttcagggtcaggggaggagggagaagtagcaaatcagatat

SEQ ID NO: 7374 - DNA, 122 bp, Homo sapiens
  misc_feature (61)..(62): /note="This region represents a CpG dinucleotide"
  misc_feature (61)..(61): /note="Nucleotide may be methylated to form 5-methylcytosine"
agtaatagttaaaatcctagccttttgaatatcttgcctatcctgcatccttgtgtgagtcgcctacattaagcagtatctcttgaggaggaggccttgagagtcaaagtctgtcaaatgag

SEQ ID NO: 7375 - DNA, 122 bp, Homo sapiens
  misc_feature (61)..(62): /note="This region represents a CpG dinucleotide"
  misc_feature (61)..(61): /note="Nucleotide may be methylated to form 5-methylcytosine"
gagtcaactggagccacataattgctgggaatgtaacctgtctctccagttgtcaaggagcgggcttcccaccaatctccttccctgtaaataaaaaagaaaagtaaatatgttgaccattt

SEQ ID NO: 7376 - DNA, 122 bp, Homo sapiens
  misc_feature (61)..(62): /note="This region represents a CpG dinucleotide"
  misc_feature (61)..(61): /note="Nucleotide may be methylated to form 5-methylcytosine"
tgccggcggcgtcgacagcgacagcgtttggaatgacgcatgcctcggtgaagtcgggggcgtgaagcaacactgtctctctcctaagcacacgctgtgccgagggaccggatcctgggctg

SEQ ID NO: 7377 - DNA, 122 bp, Homo sapiens
  misc_feature (61)..(62): /note="This region represents a CpG dinucleotide"
  misc_feature (61)..(61): /note="Nucleotide may be methylated to form 5-methylcytosine"
agtcaaggaaccctgagaggaaaggcattaatggagtttcacaaactttccctaccacagcgctgctgaatttcagcagtgccctagattcaggcatcctgctgttcctggaatccccatcc

SEQ ID NO: 7378 - DNA, 122 bp, Homo sapiens
  misc_feature (61)..(62): /note="This region represents a CpG dinucleotide"
  misc_feature (61)..(61): /note="Nucleotide may be methylated to form 5-methylcytosine"
ttttatcacctatcagttgagtttttggaaagccttccagggcagcgttgtggttttgaacgcactcttgttcgtgatttatctggtagtacagctctgctgacaaggctctgaaaactcag

SEQ ID NO: 7379 - DNA, 122 bp, Homo sapiens
  misc_feature (61)..(62): /note="This region represents a CpG dinucleotide"
  misc_feature (61)..(61): /note="Nucleotide may be methylated to form 5-methylcytosine"
tcttcctgaaccttgtcacatgtcctgccctgcccacatcctcctcaactcaggtcttaccgctcagccaacacctctagggactcagcgccctctgcccaccgcttcaccatccaggctgc

SEQ ID NO: 7380 - DNA, 122 bp, Homo sapiens
  misc_feature (61)..(62): /note="This region represents a CpG dinucleotide"
  misc_feature (61)..(61): /note="Nucleotide may be methylated to form 5-methylcytosine"
ctttgtggctgtgagactttcaagggaatttgaacatttgaggtggctagggtagtattgcggacctggctgctcaagggagctgttgaacatttgtatgtagtgatatcacctgaactttt

SEQ ID NO: 7381 - DNA, 122 bp, Homo sapiens
  misc_feature (61)..(62): /note="This region represents a CpG dinucleotide"
  misc_feature (61)..(61): /note="Nucleotide may be methylated to form 5-methylcytosine"
taggggcagggagccggcccagcttcaaaggcagaggctggctctccacacaccctgaggcgctattgagcaaagacagcaactgtgttcctatctggggccccagccctctgtctgccctt

SEQ ID NO: 7382 - DNA, 122 bp, Homo sapiens
  misc_feature (61)..(62): /note="This region represents a CpG dinucleotide"
  misc_feature (61)..(61): /note="Nucleotide may be methylated to form 5-methylcytosine"
aatcgaaaatctgatgatcccaactgggtacttttcaggaaaggagtgggaggctgcccacgtatattgagtgcctacagtgtgccagggcacctgctgatttatttgattcatacagtagc

SEQ ID NO: 7383 - DNA, 122 bp, Homo sapiens
  misc_feature (61)..(62): /note="This region represents a CpG dinucleotide"
  misc_feature (61)..(61): /note="Nucleotide may be methylated to form 5-methylcytosine"
ataaattcaaaaatttataaaactatagtccagggtggggggctggcttctccacatctgcgggttttatctggagtactttatgcagtgactaagaatgtgtatttctgacaagccctcaa

SEQ ID NO: 7384 - DNA, 122 bp, Homo sapiens
  misc_feature (61)..(62): /note="This region represents a CpG dinucleotide"
  misc_feature (61)..(61): /note="Nucleotide may be methylated to form 5-methylcytosine"
aaggattctgcccctaacctggaggaggagaaggaaaggcactgccaggagaagaaacagcgctgggcccaagaacctgaaacatcacctatagaacgagtggaaggcagagattgtccaag

SEQ ID NO: 7385 - DNA, 122 bp, Homo sapiens
  misc_feature (61)..(62): /note="This region represents a CpG dinucleotide"
  misc_feature (61)..(61): /note="Nucleotide may be methylated to form 5-methylcytosine"
ctattaaaattttaatattaactttgaaggtcttgttttgagattagcaatggtgtagagcgctgtgttggtatcaaaagtctctgatcaaccaactcattacctgtaggattttggatgag

SEQ ID NO: 7386 - DNA, 122 bp, Homo sapiens
  misc_feature (61)..(62): /note="This region represents a CpG dinucleotide"
  misc_feature (61)..(61): /note="Nucleotide may be methylated to form 5-methylcytosine"
acccagacatactgaatcctcatctgcattttaactagatccccaggtgatccttaggcacgttaagcctgaggaagcactgtgatgcatttcttgttattagtaggaacaaagcaggtgcc

SEQ ID NO: 7387 - DNA, 122 bp, Homo sapiens
  misc_feature (61)..(62): /note="This region represents a CpG dinucleotide"
  misc_feature (61)..(61): /note="Nucleotide may be methylated to form 5-methylcytosine"
ttgagacgggctctccctatgtttccttggctgattttgaattccagcgctcaagcgatccgcccatcttggcctcccaaagagctgggattacaggcatgagccatgagccactcactcat

SEQ ID NO: 7388 - DNA, 122 bp, Homo sapiens
  misc_feature (61)..(62): /note="This region represents a CpG dinucleotide"
  misc_feature (61)..(61): /note="Nucleotide may be methylated to form 5-methylcytosine"
ttgggtgttctgttatctgttatctgttctgtcactgttctgttatctgactatcactcacgtgcaagctccaagggagacttgaatgaaagttcttaaaaacagaagtaaagcacagtagg

SEQ ID NO: 7389 - DNA, 122 bp, Homo sapiens
  misc_feature (61)..(62): /note="This region represents a CpG dinucleotide"
  misc_feature (61)..(61): /note="Nucleotide may be methylated to form 5-methylcytosine"
cttgttaagtgggggatgtatgtgctctgttgaaatatcagctgttgtagttgccaaagacgttcctgagccaccagaagccttttctcttcagtccaaccatgtgttcaccttgccccaaa

SEQ ID NO: 7390 - DNA, 122 bp, Homo sapiens
  misc_feature (61)..(62): /note="This region represents a CpG dinucleotide"
  misc_feature (61)..(61): /note="Nucleotide may be methylated to form 5-methylcytosine"
gccttaagtaatctgcctgcctccacctcccaaagtgctgggataacaggcctgagtcaccgcacccagcctcaccactggcttttgagcaggagagtatcttggtagtgagcttcaggatc

SEQ ID NO: 7391 - DNA, 122 bp, Homo sapiens
  misc_feature (61)..(62): /note="This region represents a CpG dinucleotide"
  misc_feature (61)..(61): /note="Nucleotide may be methylated to form 5-methylcytosine"
ctggagatggacgagcagacccaggccccaggccgagcctctgagccctgacaccccttacgattcatccaaaaaagcaaagaaaaggcgcttacgtgagggcagcggtggctaggtccaaa

SEQ ID NO: 7392 - DNA, 122 bp, Homo sapiens
  misc_feature (61)..(62): /note="This region represents a CpG dinucleotide"
  misc_feature (61)..(61): /note="Nucleotide may be methylated to form 5-methylcytosine"
tactcctacgtactctataatcaagtagcaataaaataaagatgctgcttaggagaatggcgttagataaatctctactgaacatgaagatgaactttaacactgaaatgaacatgatagcc

SEQ ID NO: 7393 - DNA, 122 bp, Homo sapiens
  misc_feature (61)..(62): /note="This region represents a CpG dinucleotide"
  misc_feature (61)..(61): /note="Nucleotide may be methylated to form 5-methylcytosine"
ttgcgacagagtttgcttcactcaggccttatctcataattaacgtgagaaacactccctcgaaaatttgtttttaaatatagccctgattaaacagcatagtcacatgccactcctgaaaa

SEQ ID NO: 7394 - DNA, 122 bp, Homo sapiens
  misc_feature (61)..(62): /note="This region represents a CpG dinucleotide"
  misc_feature (61)..(61): /note="Nucleotide may be methylated to form 5-methylcytosine"
ctaacactagagccttttaaagccaagcttaacactccctttgtgctttgcagcaagtaacgtgaaacaaatctcttttctcagaaagcaatctccttttgaatcctctgtcagagtaaaaa

SEQ ID NO: 7395 - DNA, 122 bp, Homo sapiens
  misc_feature (61)..(62): /note="This region represents a CpG dinucleotide"
  misc_feature (61)..(61): /note="Nucleotide may be methylated to form 5-methylcytosine"
tgtgcccccatagtataggtgccgaagtgattctgaaaaacgtagatcatgtcctgcccccgctgacagctcctcccctgacttcccttgcaggctgagcagcaggtggtgtttacaccatg

SEQ ID NO: 7396 - DNA, 122 bp, Homo sapiens
  misc_feature (61)..(62): /note="This region represents a CpG dinucleotide"
  misc_feature (61)..(61): /note="Nucleotide may be methylated to form 5-methylcytosine"
tctagaactcctgagctcaagtgatctgcccgccttggcctcttgtgctgggattacaggcgtgagtcactgttcctagcagggctttctttaaatctgtaaattcctgttggtttcttgaa

SEQ ID NO: 7397 - DNA, 122 bp, Homo sapiens
  misc_feature (61)..(62): /note="This region represents a CpG dinucleotide"
  misc_feature (61)..(61): /note="Nucleotide may be methylated to form 5-methylcytosine"
taaaaatcattatttcattccatcttttcatcattgttaacactaaaccatttggagtcacgttggcaactggatttcatcttgagacttgtcattgaggaatcattttgttgtgtagcaat

SEQ ID NO: 7398 - DNA, 122 bp, Homo sapiens
  misc_feature (61)..(62): /note="This region represents a CpG dinucleotide"
  misc_feature (61)..(61): /note="Nucleotide may be methylated to form 5-methylcytosine"
aaaaaaaaaaaggcctgaggcgtaaaccactttgtgaagcttgaacttcttccttgaacacgctttctgggaagtagctggctgttagtatctgaccaaagtgtgcctctcattgactgaac

SEQ ID NO: 7399 - DNA, 122 bp, Homo sapiens
  misc_feature (61)..(62): /note="This region represents a CpG dinucleotide"
  misc_feature (61)..(61): /note="Nucleotide may be methylated to form 5-methylcytosine"
ctgttaaatgttcctgccacagttaaagaaaaagagagaaaaagagagtgagagagacaacgataagctattgaaggacgctcagtggaaagtgtggtgatgtaggcagtttttatttttgc

SEQ ID NO: 7400 - DNA, 122 bp, Homo sapiens
  misc_feature (61)..(62): /note="This region represents a CpG dinucleotide"
  misc_feature (61)..(61): /note="Nucleotide may be methylated to form 5-methylcytosine"
ctgtccattcgggccctgttttccttgttaaatatgatcccatcgtatattatatgttatcgagttaaatgtgctacccacagcatgcagagctccagccagcagccctcagagctgcagga

SEQ ID NO: 7401 - DNA, 122 bp, Homo sapiens
  misc_feature (61)..(62): /note="This region represents a CpG dinucleotide"
  misc_feature (61)..(61): /note="Nucleotide may be methylated to form 5-methylcytosine"
cactgaaataacaatggccagccttaatctcacctttataacatgatttcatttaatcttcgcaacaactctacaaagcaatatagatatggaatccgaggcttagagttcacacagacagt

SEQ ID NO: 7402 - DNA, 122 bp, Homo sapiens
  misc_feature (61)..(62): /note="This region represents a CpG dinucleotide"
  misc_feature (61)..(61): /note="Nucleotide may be methylated to form 5-methylcytosine"
cccagttaaccagtaacagcaggttggcaggtttagggttaaggtaggggaaaatacagacggtttaaaaccagtgtggcatatgcagatgttgggctcttttatcaaccttatcctgcccc

SEQ ID NO: 7403 - DNA, 122 bp, Homo sapiens
  misc_feature (61)..(62): /note="This region represents a CpG dinucleotide"
  misc_feature (61)..(61): /note="Nucleotide may be methylated to form 5-methylcytosine"
gccagctccaaatgtttttctccctgtcttcagcttacattctcctacttcttatatcaacgtcgtatcaagcattgagaaatgcttccatttgagccagtctggctgcttgctactcagga

SEQ ID NO: 7404 - DNA, 122 bp, Homo sapiens
  misc_feature (61)..(62): /note="This region represents a CpG dinucleotide"
  misc_feature (61)..(61): /note="Nucleotide may be methylated to form 5-methylcytosine"
aaaaaattcagcaaataaattgtttgctttacaactgccagccgcagttgcctctggcagcgttgtttttctgctgactgcgacagattgagctcttctgccggaatttctctagagggcag

SEQ ID NO: 7405 - DNA, 122 bp, Homo sapiens
  misc_feature (61)..(62): /note="This region represents a CpG dinucleotide"
  misc_feature (61)..(61): /note="Nucleotide may be methylated to form 5-methylcytosine"
cagtgtaacccagagcaattaaatactagaaactgccaatccatggaacacttgcctttccgtgaagcagggtgcatgccccgggcttgaagggcatcgggaccaagactggagcccgcctg

SEQ ID NO: 7406 - DNA, 122 bp, Homo sapiens
  misc_feature (61)..(62): /note="This region represents a CpG dinucleotide"
  misc_feature (61)..(61): /note="Nucleotide may be methylated to form 5-methylcytosine"
gttgaactagcttcatcaacttctcaataaatggacacatttagcttctaaaggtagaaacgagtctaaaagggaagaagatggtaagcaatttagcaacctacagtcttcttcagtttttg

SEQ ID NO: 7407 - DNA, 122 bp, Homo sapiens
  misc_feature (61)..(62): /note="This region represents a CpG dinucleotide"
  misc_feature (61)..(61): /note="Nucleotide may be methylated to form 5-methylcytosine"
ggtaggacctttcagatcatctattttaaccccttcactttctctgaacttctcttctagcgctgtgcactcaattctcattcatgatgtgatgccttgacctcgctgaaggacaagtagaa

SEQ ID NO: 7408 - DNA, 122 bp, Homo sapiens
  misc_feature (61)..(62): /note="This region represents a CpG dinucleotide"
  misc_feature (61)..(61): /note="Nucleotide may be methylated to form 5-methylcytosine"
ctgcatctgtgggggctgcctcagccctaaccatgtcaacatagtgttgaaattcagttccgagaaacacttgtgggtttgtagactctatggcatctggaagtgaaagagggacacatctc

SEQ ID NO: 7409 - DNA, 122 bp, Homo sapiens
  misc_feature (61)..(62): /note="This region represents a CpG dinucleotide"
  misc_feature (61)..(61): /note="Nucleotide may be methylated to form 5-methylcytosine"
atccctttatgagctgcttatctggattcggagttctgtgtgtgctcccagacagagttgcgaaatattgtaaggctgtcctaaagtgagtcagctgcaaaataaatcagcaatcaatcctg

SEQ ID NO: 7410 - DNA, 122 bp, Homo sapiens
  misc_feature (61)..(62): /note="This region represents a CpG dinucleotide"
  misc_feature (61)..(61): /note="Nucleotide may be methylated to form 5-methylcytosine"
aatacattccaagacccccagagggtgtctgaaagcacagatagtaccaaaccctacctacgctgtacatgacagtcgacctgataatcgagttggctattaagtgactaatggctgggtag

SEQ ID NO: 7411 - DNA, 122 bp, Homo sapiens
  misc_feature (61)..(62): /note="This region represents a CpG dinucleotide"
  misc_feature (61)..(61): /note="Nucleotide may be methylated to form 5-methylcytosine"
aacgctttcttagcactgctccccgcaggcagccccaccgtcagcagagctgggtcctggcggttaccttggctaggcttagccatatccgtgtcctggcatccccaggggtgtttgtggtg

SEQ ID NO: 7412 - DNA, 122 bp, Homo sapiens
  misc_feature (61)..(62): /note="This region represents a CpG dinucleotide"
  misc_feature (61)..(61): /note="Nucleotide may be methylated to form 5-methylcytosine"
cctggctgagaggcccctccaccctggctcccacccaccccccagccctgggcctccacacgcccagccccatggtcctggagagtcccccgctccagccctggaccctccagcgcctgcag

SEQ ID NO: 7413 - DNA, 122 bp, Homo sapiens
  misc_feature (61)..(62): /note="This region represents a CpG dinucleotide"
  misc_feature (61)..(61): /note="Nucleotide may be methylated to form 5-methylcytosine"
gcagccttaatgttaatacagagatcacaagactgacagaacagactctttgtggcaatacgataacaaattataaacaggatctaaggccatgccaggaagggttaagtcacgcaccctta

SEQ ID NO: 7414 - DNA, 122 bp, Homo sapiens
  misc_feature (61)..(62): /note="This region represents a CpG dinucleotide"
  misc_feature (61)..(61): /note="Nucleotide may be methylated to form 5-methylcytosine"
agaggttagaaggtggggctgaaagttccaaccccttcattacacaggtggtttgttccccgggaaaccagccctcactctaagggtatccaggagcccactgagagccaccccgttagaac

SEQ ID NO: 7415 - DNA, 122 bp, Homo sapiens
  misc_feature (61)..(62): /note="This region represents a CpG dinucleotide"
  misc_feature (61)..(61): /note="Nucleotide may be methylated to form 5-methylcytosine"
ctttttcaaaaaaatcttcattgacttctctactcaccagatcaagttcaaactctttagcgtacaagacaaaacactaaagagactatgaccaaatgccaaactcatgtttcccttttctc

SEQ ID NO: 7416 - DNA, 122 bp, Homo sapiens
  misc_feature (61)..(62): /note="This region represents a CpG dinucleotide"
  misc_feature (61)..(61): /note="Nucleotide may be methylated to form 5-methylcytosine"
agagagaaagacacttgaacatttcagaaagggcagcagttttgaatgtacctccttccccgagagctatcaaaaacctgcctatttttgcctagttcaaaagccacttcctccttgtaccc

SEQ ID NO: 7417 - DNA, 122 bp, Homo sapiens
  misc_feature (61)..(62): /note="This region represents a CpG dinucleotide"
  misc_feature (61)..(61): /note="Nucleotide may be methylated to form 5-methylcytosine"
ctgctgcttgctggctgcatttattcccctctctgagccttggtctcctcatctggaaaacggagattcttatctgtacccagatgaggcacagcatggaaaagactcagcacatagaagac

SEQ ID NO: 7418 - DNA, 122 bp, Homo sapiens
  misc_feature (61)..(62): /note="This region represents a CpG dinucleotide"
  misc_feature (61)..(61): /note="Nucleotide may be methylated to form 5-methylcytosine"
gtttaaatcattcaactaattaaatgatgggattattcctctgcctacggtgacatcattcgcggtaattagtactctatttggactgtggcagtaagattcctgatatcaacaccaacctg

SEQ ID NO: 7419 - DNA, 122 bp, Homo sapiens
  misc_feature (61)..(62): /note="This region represents a CpG dinucleotide"
  misc_feature (61)..(61): /note="Nucleotide may be methylated to form 5-methylcytosine"
ttccatgcacacctctgcttggctgcaggcgcttgtggagctgaaggaagtgctgccatgcgctgtgcaggtgtgtcacattatcacccaggcccacttcaaggcaaacagatgaaaacgac

SEQ ID NO: 7420 - DNA, 122 bp, Homo sapiens
  misc_feature (61)..(62): /note="This region represents a CpG dinucleotide"
  misc_feature (61)..(61): /note="Nucleotide may be methylated to form 5-methylcytosine"
cacacaccccctcacattcacacatataggttcacaatcacactccgttacagacacacacgcagagtgatacacatctttggaaacacactccaggcagagacgcactgtctcttacacac

SEQ ID NO: 7421 - DNA, 122 bp, Homo sapiens
  misc_feature (61)..(62): /note="This region represents a CpG dinucleotide"
  misc_feature (61)..(61): /note="Nucleotide may be methylated to form 5-methylcytosine"
tgttgttgaaaacttcttcaggtccccagtccacagtgatctctttttcctttaaatcctcggagcacttgtggtctgaacagtgccactagtttggaaatgaatcatatgctgcctgcaac

SEQ ID NO: 7422 - DNA, 122 bp, Homo sapiens
  misc_feature (61)..(62): /note="This region represents a CpG dinucleotide"
  misc_feature (61)..(61): /note="Nucleotide may be methylated to form 5-methylcytosine"
cctcgcttcatatcaccttgaacacaagttgaaaacctaaacctttgcagcatgtgcttacgtagaaacttatgcaattcaaacagaagtcatgcagctgggacgggctcagattgcctgat

SEQ ID NO: 7423 - DNA, 122 bp, Homo sapiens
  misc_feature (61)..(62): /note="This region represents a CpG dinucleotide"
  misc_feature (61)..(61): /note="Nucleotide may be methylated to form 5-methylcytosine"
cccctgctccccaacccgcaaatgggtggtgagacctgagggactctcaaattcctccagcgatcccgccgtctctgtgcctggccctctttatctgggatcgagccactcacacccttgct

SEQ ID NO: 7424 - DNA, 122 bp, Homo sapiens
  misc_feature (61)..(62): /note="This region represents a CpG dinucleotide"
  misc_feature (61)..(61): /note="Nucleotide may be methylated to form 5-methylcytosine"
catagggcatcagtaccagtgcccttactgtacagatggggaaaatgaggctcagacaggcgaagtaagtagcttaagttcacacagagaggaaatggcagggattcaaagcctaggagtcc

SEQ ID NO: 7425 - DNA, 122 bp, Homo sapiens
  misc_feature (61)..(62): /note="This region represents a CpG dinucleotide"
  misc_feature (61)..(61): /note="Nucleotide may be methylated to form 5-methylcytosine"
ctgctgagctttactgtgggaagagggggaggtgaaggaaattattacaaaatttttgtacgtgatgaggagacagcctctggacttccccaaatatttccgtattccctaaaacagctcta

SEQ ID NO: 7426 - DNA, 122 bp, Homo sapiens
  misc_feature (61)..(62): /note="This region represents a CpG dinucleotide"
  misc_feature (61)..(61): /note="Nucleotide may be methylated to form 5-methylcytosine"
tgcccctgtttgttgtaatctataatattactgcctcccgtggccccagagcagctgccgcgggagaatccagggatggtgggcgctaggtgtgcgctgaggggatgtggtggcaggcgctg

SEQ ID NO: 7427 - DNA, 122 bp, Homo sapiens
  misc_feature (61)..(62): /note="This region represents a CpG dinucleotide"
  misc_feature (61)..(61): /note="Nucleotide may be methylated to form 5-methylcytosine"
acttcagttcctgaaacatagtacaggataagtgtacaagaattgatttaagtcagttcacgaactgacttaagaaagctggcagaagagtcaggactaaaatcgagtctttaagttatggg

SEQ ID NO: 7428 - DNA, 122 bp, Homo sapiens
  misc_feature (61)..(62): /note="This region represents a CpG dinucleotide"
  misc_feature (61)..(61): /note="Nucleotide may be methylated to form 5-methylcytosine"
gtctgttgaattacaactagtgcagttccttatgtcaataaattcactgaacgctcgatgcggaagccatatttctgaacgagagaagaccaaaatttgtcatttaattaattaagggatta

SEQ ID NO: 7429 - DNA, 122 bp, Homo sapiens
  misc_feature (61)..(62): /note="This region represents a CpG dinucleotide"
  misc_feature (61)..(61): /note="Nucleotide may be methylated to form 5-methylcytosine"
cactaccctcaaaatgtcaccgagtctagccagttctgtgtcctccaaggccacactacacgtggccaccaccacctcctggctgatgatacagtgacctctggcagttccccattcttacc

SEQ ID NO: 7430 - DNA, 122 bp, Homo sapiens
  misc_feature (61)..(62): /note="This region represents a CpG dinucleotide"
  misc_feature (61)..(61): /note="Nucleotide may be methylated to form 5-methylcytosine"
ccctggacccctacatcctcacctcccggggcagtgggggcctgtgggtggcaggggccgcggagccgagaccccttgcaggccaccggagaacccggtgggggtggggggtgcggcgcgga

SEQ ID NO: 7431 - DNA, 122 bp, Homo sapiens
  misc_feature (61)..(62): /note="This region represents a CpG dinucleotide"
  misc_feature (61)..(61): /note="Nucleotide may be methylated to form 5-methylcytosine"
gtgctgctgaggacggggtgtctagggacagggtggggcagcccccctcctggatagaatcgcctcattgtgggctggactgtggccccaggcactgcccccaccctctgcccccatcccac

SEQ ID NO: 7432 - DNA, 122 bp, Homo sapiens
  misc_feature (61)..(62): /note="This region represents a CpG dinucleotide"
  misc_feature (61)..(61): /note="Nucleotide may be methylated to form 5-methylcytosine"
tctaagcttcagtttccctcatgcatgaagtggacacaatacacacacaaaaactgcttacgtgttcttagagttttgagatttgtagggaggtttcctgtttcttattgcttaatattggt

SEQ ID NO: 7433 - DNA, 122 bp, Homo sapiens
  misc_feature (61)..(62): /note="This region represents a CpG dinucleotide"
  misc_feature (61)..(61): /note="Nucleotide may be methylated to form 5-methylcytosine"
tggagtttagcactcaaagacccacttcccaggaaaaccctacctgggatgtgaaaagtccgggctttcggtttttggcgataggttggagagaatatatacacacaaaaagtgacaacccc

SEQ ID NO: 7434 - DNA, 122 bp, Homo sapiens
  misc_feature (61)..(62): /note="This region represents a CpG dinucleotide"
  misc_feature (61)..(61): /note="Nucleotide may be methylated to form 5-methylcytosine"
gaaactgaatcaacccccaagagcgttattagtatcagactaaattatctcctttaactgcgtcacatcatgacctttactttttaaacagatatcttgtttttcttatcttctcttcttga

SEQ ID NO: 7435 - DNA, 122 bp, Homo sapiens
  misc_feature (61)..(62): /note="This region represents a CpG dinucleotide"
  misc_feature (61)..(61): /note="Nucleotide may be methylated to form 5-methylcytosine"
gggagatggtggtcagggatctctgccttacagattttcaataaccctcctgtctgcagccggcccagatgcagggaccctccaagtcctgagctcactcggttccctgcgcactttttggc

SEQ ID NO: 7436 - DNA, 122 bp, Homo sapiens
  misc_feature (61)..(62): /note="This region represents a CpG dinucleotide"
  misc_feature (61)..(61): /note="Nucleotide may be methylated to form 5-methylcytosine"
tttttaggcctgcccccacagtgcctcattctatttttatgttagacactgtttctctttcgtattgccagatgccctttctactgtggctcaccaaatcctccagcaacagctgttctacc

SEQ ID NO: 7437 - DNA, 122 bp, Homo sapiens
  misc_feature (61)..(62): /note="This region represents a CpG dinucleotide"
  misc_feature (61)..(61): /note="Nucleotide may be methylated to form 5-methylcytosine"
cagattgacatcacagcgggaggccttcagtgtccctccactctcagccctgtgctgcaacgaatcagagggatcccagcctgatgcctccagtgtaaagtccaccatcagcctttcttcct

SEQ ID NO: 7438 - DNA, 122 bp, Homo sapiens
  misc_feature (61)..(62): /note="This region represents a CpG dinucleotide"
  misc_feature (61)..(61): /note="Nucleotide may be methylated to form 5-methylcytosine"
actcataaaatagcaaaaaccacaaaacacaactaaattgcaacaggctgtacttactgacggactttagaaaggaaagctcattgtgtgctttaagaaaagctttcaggagtttgagaaag

SEQ ID NO: 7439 - DNA, 122 bp, Homo sapiens
  misc_feature (61)..(62): /note="This region represents a CpG dinucleotide"
  misc_feature (61)..(61): /note="Nucleotide may be methylated to form 5-methylcytosine"
cgagtcgtccgctgtgtgtgcatcatctgctgtgcgtgtgtcatctgctgtgcatgcctgcgtcatctgctgtgtatgtgtcatctgttgtgcatgcgtgtgtcgtctgctgtgggcgcgtg

SEQ ID NO: 7440 - DNA, 122 bp, Homo sapiens
  misc_feature (61)..(62): /note="This region represents a CpG dinucleotide"
  misc_feature (61)..(61): /note="Nucleotide may be methylated to form 5-methylcytosine"
tagcagcatcgaaaacttggagtcggaggccgtgttcgaggccaagttcaagcgcagccgcgagtcgcccctgtcgctggggctgcggctgctgagccgttcgcgctcggaggagcgcggcc

SEQ ID NO: 7441 - DNA, 122 bp, Homo sapiens
  misc_feature (61)..(62): /note="This region represents a CpG dinucleotide"
  misc_feature (61)..(61): /note="Nucleotide may be methylated to form 5-methylcytosine"
gatattattcccatttcacagatgaggaagttgaggcttagagaggataaatgacctgcccgagttaccatagctaataagtagcaaagccagaacttctaaggtgtgcctgagtctaaagc

SEQ ID NO: 7442 - DNA, 122 bp, Homo sapiens
  misc_feature (61)..(62): /note="This region represents a CpG dinucleotide"
  misc_feature (61)..(61): /note="Nucleotide may be methylated to form 5-methylcytosine"
aagctcacagaaacttagagcagaatggtgattgttggagaatggatggaggggcatatacggcattcaatggttatgaacttttagttataaaatatgaataagttatatagatcttctgt

SEQ ID NO: 7443 - DNA, 122 bp, Homo sapiens
  misc_feature (61)..(62): /note="This region represents a CpG dinucleotide"
  misc_feature (61)..(61): /note="Nucleotide may be methylated to form 5-methylcytosine"
gggcccgtgctacagacggagcagggcgggcttggattcgaggtctgctaccgacaggctcgatgctgttactcagctgctctaagcctcagccctttgtctgggaaaagcccgcctcacag

SEQ ID NO: 7444 - DNA, 122 bp, Homo sapiens
  misc_feature (61)..(62): /note="This region represents a CpG dinucleotide"
  misc_feature (61)..(61): /note="Nucleotide may be methylated to form 5-methylcytosine"
aacccttactgtaccattgtaggcaggcaaaatgactcactagaaatcaccctataagtccgccaagtgctcagggcatctgcccatcaaatctgtattcatttcacccatactcttattct

SEQ ID NO: 7445 - DNA, 122 bp, Homo sapiens
  misc_feature (61)..(62): /note="This region represents a CpG dinucleotide"
  misc_feature (61)..(61): /note="Nucleotide may be methylated to form 5-methylcytosine"
caaaacagacaaattgagtagagcaagtgttttcccaaaggaaaactgagtcactattaccggaagaaagggacatgtatactgagcaagcaaaacctatggaggccctctctagtgcaggt

SEQ ID NO: 7446 - DNA, 122 bp, Homo sapiens
  misc_feature (61)..(62): /note="This region represents a CpG dinucleotide"
  misc_feature (61)..(61): /note="Nucleotide may be methylated to form 5-methylcytosine"
gaatgcccacttcctttttagttctgactaaatagacaagtacagagcttctcagaaatgcgcatataactccaataattctacagttgagtaagcccagaaaaacatggaaaaaagagctg

SEQ ID NO: 7447 - DNA, 122 bp, Homo sapiens
  misc_feature (61)..(62): /note="This region represents a CpG dinucleotide"
  misc_feature (61)..(61): /note="Nucleotide may be methylated to form 5-methylcytosine"
tttttttttttaaagaatttttttttggccgcgcgtggtggctcaacgcctgtaatctcccgggttcaagtgattctcctgcctcagcctcccaagtagctgggaactacaggcgcgtgcca

SEQ ID NO: 7448 - DNA, 122 bp, Homo sapiens
  misc_feature (61)..(62): /note="This region represents a CpG dinucleotide"
  misc_feature (61)..(61): /note="Nucleotide may be methylated to form 5-methylcytosine"
atgtgctggtctaaagagggaagcactaaggtcagttaggaagcagaagtgggagaaggacgagaatgactgagaccctttgatggggttttcacgagaaggaatggaaggggcagggtagg

SEQ ID NO: 7449 - DNA, 122 bp, Homo sapiens
  misc_feature (61)..(62): /note="This region represents a CpG dinucleotide"
  misc_feature (61)..(61): /note="Nucleotide may be methylated to form 5-methylcytosine"
tgatgagcagttttttctttatcctatgagcactaggaagcccccaaaaggtgccaagtacggaagtaacacgatcaggtatgtcttttaaaaaaaatcattctgggtggaaaacactggag

SEQ ID NO: 7450 - DNA, 122 bp, Homo sapiens
  misc_feature (61)..(62): /note="This region represents a CpG dinucleotide"
  misc_feature (61)..(61): /note="Nucleotide may be methylated to form 5-methylcytosine"
gttttgggggctctcgtttgaaagcagcattcctctgggaaaccaatgaatacagaataacgaattagaatggaggtgaggtaattcaccaagtttttctgcagagttatgagtgtttctga

SEQ ID NO: 7451 - DNA, 122 bp, Homo sapiens
  misc_feature (61)..(62): /note="This region represents a CpG dinucleotide"
  misc_feature (61)..(61): /note="Nucleotide may be methylated to form 5-methylcytosine"
tcatgaccaggaggtaacaagcaggaataaaaggccaccagagtcacagagacgaagctgcggcgttaccgaggtgcgaatcactgtgattcctaggtgcgaatcatcaccagcaatcactt

SEQ ID NO: 7452 - DNA, 122 bp, Homo sapiens
  misc_feature (61)..(62): /note="This region represents a CpG dinucleotide"
  misc_feature (61)..(61): /note="Nucleotide may be methylated to form 5-methylcytosine"
ttgtcctttcttcctccctgtgggctgtgaatccaactcgtcctgggagcagggcgctctcgccttctgttcctctccgagctcagtgcacagaagcattctgcttacccagctgggactgc

SEQ ID NO: 7453 - DNA, 122 bp, Homo sapiens
  misc_feature (61)..(62): /note="This region represents a CpG dinucleotide"
  misc_feature (61)..(61): /note="Nucleotide may be methylated to form 5-methylcytosine"
ataatgtccttggtatctaactgacccgttcaaggtcatctggttagtcagctgaggccacgtctgcccaggatgagtgctctaggccagggcccacgggctcctcccaactcccacacaca

SEQ ID NO: 7454 - DNA, 122 bp, Homo sapiens
  misc_feature (61)..(62): /note="This region represents a CpG dinucleotide"
  misc_feature (61)..(61): /note="Nucleotide may be methylated to form 5-methylcytosine"
cagctctgaggagagatgtgtaagcagctgtacctcctgtggagctacctcttcctctagcggtctgtgggactcagccagcttcacaagattcaggaaatgaggagggcggggtgataaaa

SEQ ID NO: 7455 - DNA, 122 bp, Homo sapiens
  misc_feature (61)..(62): /note="This region represents a CpG dinucleotide"
  misc_feature (61)..(61): /note="Nucleotide may be methylated to form 5-methylcytosine"
tatccaccaggccagtaaagccttcacaggatggtagccatctgctgcactgctgggagccgcctcctcccttcctgatccccaacattgataagcacagaaaaatctcagcaaacgcattt

SEQ ID NO: 7456 - DNA, 122 bp, Homo sapiens
  misc_feature (61)..(62): /note="This region represents a CpG dinucleotide"
  misc_feature (61)..(61): /note="Nucleotide may be methylated to form 5-methylcytosine"
tggcgataggtcagaaggagcgttggctactagtgacccctggcgataggtcagaaggagcgtcctctgctgcaagtgatcctggagctgagtcttgatgtccatggctggatgtcaggaag

SEQ ID NO: 7457 - DNA, 122 bp, Homo sapiens
  misc_feature (61)..(62): /note="This region represents a CpG dinucleotide"
  misc_feature (61)..(61): /note="Nucleotide may be methylated to form 5-methylcytosine"
aaggtgagagccgccttcaagcacaaaaccaaggtctggtcgctcacgagcagctctgcccgcacctccaacgcgaagcccttccactcggacctcgtgagtgcagcctccataaaccgagg

SEQ ID NO: 7458 - DNA, 122 bp, Homo sapiens
  misc_feature (61)..(62): /note="This region represents a CpG dinucleotide"
  misc_feature (61)..(61): /note="Nucleotide may be methylated to form 5-methylcytosine"
ggaatcaagaagatctaggtatcagtcttggctcctctgtgtaggagctgtttgatcttgcgtaatcaacaaaatcagcaacaatgacagcagcagctacattcacttagtgcttgttttgt

SEQ ID NO: 7459 - DNA, 122 bp, Homo sapiens
  misc_feature (61)..(62): /note="This region represents a CpG dinucleotide"
  misc_feature (61)..(61): /note="Nucleotide may be methylated to form 5-methylcytosine"
agtcactgctcccagcccagaaattgatggtttctttagcaattttgtcacccatcaagtcgttagtcatattaatcctccataacttagtctttttgccccctgattatcttttgggtggg

SEQ ID NO: 7460 - DNA, 122 bp, Homo sapiens
  misc_feature (61)..(62): /note="This region represents a CpG dinucleotide"
  misc_feature (61)..(61): /note="Nucleotide may be methylated to form 5-methylcytosine"
gatgaggcctggaatcagtcccaggctagagggcagagtccaggagactgccacctgccacgctgtccgctatttgttcaaaggtttctcagcttagtgacaaaatgagcaaagaaagaagt

SEQ ID NO: 7461 - DNA, 122 bp, Homo sapiens
  misc_feature (61)..(62): /note="This region represents a CpG dinucleotide"
  misc_feature (61)..(61): /note="Nucleotide may be methylated to form 5-methylcytosine"
gacggggtttcgccatgttgctcagtctggtcttgaattcctgggcttaagggatttgctcgctttggcctcctgaagtgttaggattacaggcgtgagccaccgtgcctggcctgaaaatc

SEQ ID NO: 7462 - DNA, 122 bp, Homo sapiens
  misc_feature (61)..(62): /note="This region represents a CpG dinucleotide"
  misc_feature (61)..(61): /note="Nucleotide may be methylated to form 5-methylcytosine"
caaggctgctctgtccctgcaagaaataccaagtaccaaagacctagcacccaatgagaacgagaggaattttggtcttagttcctggcaggagtgtttagagcttgctttcttaaaatccc

SEQ ID NO: 7463 - DNA, 122 bp, Homo sapiens
  misc_feature (61)..(62): /note="This region represents a CpG dinucleotide"
  misc_feature (61)..(61): /note="Nucleotide may be methylated to form 5-methylcytosine"
tccatccgtgggaccactctgttttccagtactggcccacaatagcctcactgggcagctcgcagacataaccactcctgctggagatagatgctggcccacagagaccagctggaactgcg

SEQ ID NO: 7464 - DNA, 122 bp, Homo sapiens
  misc_feature (61)..(62): /note="This region represents a CpG dinucleotide"
  misc_feature (61)..(61): /note="Nucleotide may be methylated to form 5-methylcytosine"
gggcctttccctcctcacctgtaaaactgttagtttggcccaatcatgtagaagcttctccgccccacacacatacacactcctgtctttagagtctgtctgggcacagggcagctccctac

SEQ ID NO: 7465 - DNA, 122 bp, Homo sapiens
  misc_feature (61)..(62): /note="This region represents a CpG dinucleotide"
  misc_feature (61)..(61): /note="Nucleotide may be methylated to form 5-methylcytosine"
gcctgtcctggaatccatgtctgcctgggtgtcgaggctttcagggctgggcctgcccgccggcccttcagcacaaggctctgcccaggcaggtgctgggggtacccatcgaagctccacag

SEQ ID NO: 7466 - DNA, 122 bp, Homo sapiens
  misc_feature (61)..(62): /note="This region represents a CpG dinucleotide"
  misc_feature (61)..(61): /note="Nucleotide may be methylated to form 5-methylcytosine"
atccagctttaggatgtgctggcggctgcaacaaacatgcactctgatcaatgagctctgcgctcattcactccacacgtgtttactgagcgtctactgtgtctaagaccctgagctctgca

SEQ ID NO: 7467 - DNA, 122 bp, Homo sapiens
  misc_feature (61)..(62): /note="This region represents a CpG dinucleotide"
  misc_feature (61)..(61): /note="Nucleotide may be methylated to form 5-methylcytosine"
ccatcacgtcaaagcggatcccgtaggctttcatcagggtgcggaactccaccccggctgcgtctcggtaatatctggcaaatctgagggagacagggcccaggggaggcctcagcctgcct

SEQ ID NO: 7468 - DNA, 122 bp, Homo sapiens
  misc_feature (61)..(62): /note="This region represents a CpG dinucleotide"
  misc_feature (61)..(61): /note="Nucleotide may be methylated to form 5-methylcytosine"
cagaactgtacagcagctgccgaaagagttttgatgcctcagacctgtcatcttattttgcgtgtgtaataattacaggaacgaggatgtggacatgtactatcaattagtgttaagtaaaa

SEQ ID NO: 7469 - DNA, 122 bp, Homo sapiens
  misc_feature (61)..(62): /note="This region represents a CpG dinucleotide"
  misc_feature (61)..(61): /note="Nucleotide may be methylated to form 5-methylcytosine"
agctggtggaaagaaagcaattaatatacgaaaaatttcaaaagtgcttcagagagctgacgagagcccaagtcagttttataaaaaactttgtgaagcattccggccttacaccctatttg

SEQ ID NO: 7470 - DNA, 122 bp, Homo sapiens
  misc_feature (61)..(62): /note="This region represents a CpG dinucleotide"
  misc_feature (61)..(61): /note="Nucleotide may be methylated to form 5-methylcytosine"
caagatcacgccactgcactccagcctgggtgacagagtgagtgactgatggtgaggacacgggctctgaagccacactgcttgggcagagatgccactcattctgtttgttttctcatctg

SEQ ID NO: 7471 - DNA, 122 bp, Homo sapiens
  misc_feature (61)..(62): /note="This region represents a CpG dinucleotide"
  misc_feature (61)..(61): /note="Nucleotide may be methylated to form 5-methylcytosine"
atgatcatcatcagcactagggccaaaggacagttcctagcaatgttcacgcactgcactcggggggcaggaaccctgctatgactttctttatttagcatgaagagcactcagacaactct

SEQ ID NO: 7472 - DNA, 122 bp, Homo sapiens
  misc_feature (61)..(62): /note="This region represents a CpG dinucleotide"
  misc_feature (61)..(61): /note="Nucleotide may be methylated to form 5-methylcytosine"
gagaaagttattacatacataagaacacatttactttcattttatttttctcctacagagcgtcctatatttctgtaaactggattacagggtacttagaagaacgagcttgcttgtcactg

SEQ ID NO: 7473 - DNA, 122 bp, Homo sapiens
  misc_feature (61)..(62): /note="This region represents a CpG dinucleotide"
  misc_feature (61)..(61): /note="Nucleotide may be methylated to form 5-methylcytosine"
attcaatatggccattcactttctgctgtggttttgatttatcttcatcctctttgatctcgatttagcctctgcctttgctggctctttcttgaagccctttttctctcttggttttcatg

SEQ ID NO: 7474 - DNA, 122 bp, Homo sapiens
  misc_feature (61)..(62): /note="This region represents a CpG dinucleotide"
  misc_feature (61)..(61): /note="Nucleotide may be methylated to form 5-methylcytosine"
tatctactttatgctcgaggtggctccacctccaccatgagccagagccaatgatgctcacggccccaaccatgattaaaaagagattgccctgcaaggtaaatcagttaaaaccaacctct

SEQ ID NO: 7475 - DNA, 122 bp, Homo sapiens
  misc_feature (61)..(62): /note="This region represents a CpG dinucleotide"
  misc_feature (61)..(61): /note="Nucleotide may be methylated to form 5-methylcytosine"
tcagtggtgagcgggagacaggcccaaagagctgaggaagtgtaaactccagtgataaggcgataacttgaggaaattaaaaccccgtagtgtgggaaagaacaattagccaagacagaggg

SEQ ID NO: 7476 - DNA, 122 bp, Homo sapiens
  misc_feature (61)..(62): /note="This region represents a CpG dinucleotide"
  misc_feature (61)..(61): /note="Nucleotide may be methylated to form 5-methylcytosine"
tttatggcgaaagccaggtgaagccaggaacagactctgtgcctctgaggcagccggacgcggctgttgacgcagaaggttgattttgtctggatctctcttgaccagacaaggtagggtta

SEQ ID NO: 7477 - DNA, 122 bp, Homo sapiens
  misc_feature (61)..(62): /note="This region represents a CpG dinucleotide"
  misc_feature (61)..(61): /note="Nucleotide may be methylated to form 5-methylcytosine"
gtgtatgtgattattgctttacaatccttgaatttgagtcttatgaggcattaccaccttcgtatttgtaataaaactccagctttacagacatcacctaggggaagggaagggaattgggg

SEQ ID NO: 7478 - DNA, 122 bp, Homo sapiens
  misc_feature (61)..(62): /note="This region represents a CpG dinucleotide"
  misc_feature (61)..(61): /note="Nucleotide may be methylated to form 5-methylcytosine"
ccctgccccacacgggacgaagaacctgcagtgccatgttccgtgagccaagggtgaacacggtcgcacctcacgcagtcgtgcagcaggtcctggcagatgatgcatgtcagcgtctcctc

SEQ ID NO: 7479 - DNA, 122 bp, Homo sapiens
  misc_feature (61)..(62): /note="This region represents a CpG dinucleotide"
  misc_feature (61)..(61): /note="Nucleotide may be methylated to form 5-methylcytosine"
gaccccaggagcctcactacctgtccccatagagctcctaaccagatgcaacagtgactgcgtcaccattccccacttttcccaactacgcagtgacaaacctaccagctttaccccacttc

SEQ ID NO: 7480 - DNA, 122 bp, Homo sapiens
  misc_feature (61)..(62): /note="This region represents a CpG dinucleotide"
  misc_feature (61)..(61): /note="Nucleotide may be methylated to form 5-methylcytosine"
ctcctaggcttaagtgatcctcccttctcacactcctgagtagctgggactacaggcacacgccaccatggccagctaattttacagtaagatattttgagagagaagagagaccatattca

SEQ ID NO: 7481 - DNA, 122 bp, Homo sapiens
  misc_feature (61)..(62): /note="This region represents a CpG dinucleotide"
  misc_feature (61)..(61): /note="Nucleotide may be methylated to form 5-methylcytosine"
actttagagaaaaagcaattttgattggatttctgattttaaacctgtccaaagaacatacgctgcttgcttagacaatagaagtggtcgagattgaaaaaggaggaaaaataaaaaacaaa

SEQ ID NO: 7482 - DNA, 122 bp, Homo sapiens
  misc_feature (61)..(62): /note="This region represents a CpG dinucleotide"
  misc_feature (61)..(61): /note="Nucleotide may be methylated to form 5-methylcytosine"
gaaactcatcattctcggtagttggctaaatttaagtagtggcattctcaacatagcttccgccccatatatagcaacccaacagcacccaagatgaaaacagggctgcgaacatgacagac

SEQ ID NO: 7483 - DNA, 122 bp, Homo sapiens
  misc_feature (61)..(62): /note="This region represents a CpG dinucleotide"
  misc_feature (61)..(61): /note="Nucleotide may be methylated to form 5-methylcytosine"
acctgtcacacagaattaaacaaaagaagttattaatagttcaatgaaaggtgacactcacgccaaatacttggttttgaggaggatcacatgagataatgcatgcaaaagtgctctgtaaa

SEQ ID NO: 7484 - DNA, 122 bp, Homo sapiens
  misc_feature (61)..(62): /note="This region represents a CpG dinucleotide"
  misc_feature (61)..(61): /note="Nucleotide may be methylated to form 5-methylcytosine"
cccgcgggaaggaggcccgccccctcatgaatagcaagcagcctcagctctcgtagtgcccgcctccctcatgaatattgtagatcttcccagaagccctagcgggaaggaggttccccccc

SEQ ID NO: 7485 - DNA, 122 bp, Homo sapiens
  misc_feature (61)..(62): /note="This region represents a CpG dinucleotide"
  misc_feature (61)..(61): /note="Nucleotide may be methylated to form 5-methylcytosine"
aagttcagacactctgtaagagagagccatttgctgtttttctgtgattcaatcccgttccgaacagtggtcagcatggttagtagctaagctgctcatctgtttttttaaggcattgtaac

SEQ ID NO: 7486 - DNA, 122 bp, Homo sapiens
  misc_feature (61)..(62): /note="This region represents a CpG dinucleotide"
  misc_feature (61)..(61): /note="Nucleotide may be methylated to form 5-methylcytosine"
agaggtttaattgaattacggttctttatggctggggaggcctcagtaaacatacactcacggcataaggcaaaggggaagcaaggaccttcttcacatggtggcaagagagagaagtgcca

SEQ ID NO: 7487 - DNA, 122 bp, Homo sapiens
  misc_feature (61)..(62): /note="This region represents a CpG dinucleotide"
  misc_feature (61)..(61): /note="Nucleotide may be methylated to form 5-methylcytosine"
aaatgttaacctagcctattacgtgtcaggctatgttctctgcactgagaacactgtcaacgaaactaatacaatccccggctccttggatctcatgatcactgtttatctttcccatggct

SEQ ID NO: 7488 - DNA, 122 bp, Homo sapiens
  misc_feature (61)..(62): /note="This region represents a CpG dinucleotide"
  misc_feature (61)..(61): /note="Nucleotide may be methylated to form 5-methylcytosine"
ccctgaccacagcgcatctcacgccggcgagcaggtccaccctgaccatggcacatctcacgccggtgagcaggtccaccctgacaaaggaaagggagagcccaggagtgtccacttccagc

SEQ ID NO: 7489 - DNA, 122 bp, Homo sapiens
  misc_feature (61)..(62): /note="This region represents a CpG dinucleotide"
  misc_feature (61)..(61): /note="Nucleotide may be methylated to form 5-methylcytosine"
tcatctgactgccttgtgatgtgatgtagctacatgaacatgtccacatctaatttgtggcgcagaagttagacatctgtgatgcaggaagtgtcagcaaatttttattttaaatctgttag

SEQ ID NO: 7490 - DNA, 122 bp, Homo sapiens
  misc_feature (61)..(62): /note="This region represents a CpG dinucleotide"
  misc_feature (61)..(61): /note="Nucleotide may be methylated to form 5-methylcytosine"
gactgtgtctgctgtgttgtctgttataagatgtttcagacctattttgcatactggcagcgacaagttgagacttgttcaacttgacacagtcctgtggtcatagcgaatctttctaaagc

SEQ ID NO: 7491 - DNA, 122 bp, Homo sapiens
  misc_feature (61)..(62): /note="This region represents a CpG dinucleotide"
  misc_feature (61)..(61): /note="Nucleotide may be methylated to form 5-methylcytosine"
aaacactacttagcaagaaatatgcacaacacaaccacaaggggctataacaagacatcacgcttagggctgagattagactcctttcactaaaattgatgagtcatttgtcacaatacaga

SEQ ID NO: 7492 - DNA, 122 bp, Homo sapiens
  misc_feature (61)..(62): /note="This region represents a CpG dinucleotide"
  misc_feature (61)..(61): /note="Nucleotide may be methylated to form 5-methylcytosine"
tccagcctgggcgacggagcaagaccctgaccaaaaaaaaaaaaaaaaagtatctcgtgacggtgtttagaggaagttatgcgtgtgataaaactgcataaaccacacacacactcacacac

SEQ ID NO: 7493 - DNA, 122 bp, Homo sapiens
  misc_feature (61)..(62): /note="This region represents a CpG dinucleotide"
  misc_feature (61)..(61): /note="Nucleotide may be methylated to form 5-methylcytosine"
gaaatgcacacaagattacacagcaagtattatcgagtgcgtattacatttgaagtgctgcgttgagggctttacatggattagttcattaaactcaatgaattaaatactgttatcattct

SEQ ID NO: 7494 - DNA, 122 bp, Homo sapiens
  misc_feature (61)..(62): /note="This region represents a CpG dinucleotide"
  misc_feature (61)..(61): /note="Nucleotide may be methylated to form 5-methylcytosine"
attctcattttacagaagagaaaaacagaagttcagagaaataatgtgtcccaggaagtacgaagagggatttaagcctagattcagctgactctgaagcctatttttgcaccaccttctgg

SEQ ID NO: 7495 - DNA, 122 bp, Homo sapiens
  misc_feature (61)..(62): /note="This region represents a CpG dinucleotide"
  misc_feature (61)..(61): /note="Nucleotide may be methylated to form 5-methylcytosine"
gtatatggacacaggtactgcactaaacacttttcctgccttatcatttaatctgcacagcgtcccctctggggtccacatgtattttctccatttattgataaagaatttaagatttggag

SEQ ID NO: 7496 - DNA, 122 bp, Homo sapiens
  misc_feature (61)..(62): /note="This region represents a CpG dinucleotide"
  misc_feature (61)..(61): /note="Nucleotide may be methylated to form 5-methylcytosine"
acctttggctttaagcctcaagttctacatttttttcttccccgtgtgcaaaggtgctctcgccaacaaagtgaagaggaaagacacactggcaatgaagttgaaccacagacccagtgaac

SEQ ID NO: 7497 - DNA, 122 bp, Homo sapiens
  misc_feature (61)..(62): /note="This region represents a CpG dinucleotide"
  misc_feature (61)..(61): /note="Nucleotide may be methylated to form 5-methylcytosine"
ggcgggggctagcctaacctttttcttctgccatgagactaaccctggcttcttcacgtgcgggtggaagggttcctaacagcaacagctgacaaacttaatgagcaagcactttttcagcc

SEQ ID NO: 7498 - DNA, 122 bp, Homo sapiens
  misc_feature (61)..(62): /note="This region represents a CpG dinucleotide"
  misc_feature (61)..(61): /note="Nucleotide may be methylated to form 5-methylcytosine"
cttcatctgaagactgaagtccagtctagtgctgagaaccactcccttaccgagagcgagcgcttagcacaacatagccataataatagctgcctaataaccttttcctttctgcctggctc

SEQ ID NO: 7499 - DNA, 122 bp, Homo sapiens
  misc_feature (61)..(62): /note="This region represents a CpG dinucleotide"
  misc_feature (61)..(61): /note="Nucleotide may be methylated to form 5-methylcytosine"
cattattatgaaccttttggacctgatgaatgtacaatgtacctctcccatgagcgaggacgcaagggcagtcatcaccgctttatcacagagaaacgagtctttaagaactgggcacggac

SEQ ID NO: 7500 - DNA, 122 bp, Homo sapiens
  misc_feature (61)..(62): /note="This region represents a CpG dinucleotide"
  misc_feature (61)..(61): /note="Nucleotide may be methylated to form 5-methylcytosine"
gaaatcaaagaactcacgtaatgcatatgaatacacattgatttatttactatacaaattcggagttttatataaagtgctggatttccttaaacagcatgagttgaggaaactcttttaat

SEQ ID NO: 7501 - DNA, 122 bp, Homo sapiens
  misc_feature (61)..(62): /note="This region represents a CpG dinucleotide"
  misc_feature (61)..(61): /note="Nucleotide may be methylated to form 5-methylcytosine"
aaaattcagtatgagacatccattgtacccaaagctaggtggccttaagaaggtcagtgtcgctcagcgacagggctcggccccccctcgtgcaaacccaccccgaggtgtgaggccaggag

SEQ ID NO: 7502 - DNA, 122 bp, Homo sapiens
  misc_feature (61)..(62): /note="This region represents a CpG dinucleotide"
  misc_feature (61)..(61): /note="Nucleotide may be methylated to form 5-methylcytosine"
tggtattctatggtgtagaaatcaaattttgactttaataaactcatcacatggcaactacgcgagggcttaacagcctgtaagaataagaatgcaagtactcagacaaagaaatgtctggg

SEQ ID NO: 7503 - DNA, 122 bp, Homo sapiens
  misc_feature (61)..(62): /note="This region represents a CpG dinucleotide"
  misc_feature (61)..(61): /note="Nucleotide may be methylated to form 5-methylcytosine"
acgtgtcagaaataagagacttctcacacacacttgaagtatctctccatgagtgtttaccgcttcctttgtgcagggctttgagtcctgtgtggcatcagacaggcctgtcttaagttcct

SEQ ID NO: 7504 - DNA, 122 bp, Homo sapiens
  misc_feature (61)..(62): /note="This region represents a CpG dinucleotide"
  misc_feature (61)..(61): /note="Nucleotide may be methylated to form 5-methylcytosine"
gacaattaaagttacttaattattaaaaactgtgtgtgctgctgcccagagagaaagaggcggccaggcctggctcccgcagcccctcacaggagtgactggacactgtgggaaccggcccc

SEQ ID NO: 7505 - DNA, 122 bp, Homo sapiens
  misc_feature (61)..(62): /note="This region represents a CpG dinucleotide"
  misc_feature (61)..(61): /note="Nucleotide may be methylated to form 5-methylcytosine"
tctggagacacatttaggacatcagaagtagcaccaccaggcacagcagcccctcctccccgcccacaccagatgtgaggcggcccccacaatgttctgtcaacagaggctgttctctctca

SEQ ID NO: 7506 - DNA, 122 bp, Homo sapiens
  misc_feature (61)..(62): /note="This region represents a CpG dinucleotide"
  misc_feature (61)..(61): /note="Nucleotide may be methylated to form 5-methylcytosine"
gaagtcttgacaagggctggacaatccagaggctggacaatgtcactaaacactcaggtccgttctgtctctgctctgctaaacacaatgtcagctccattccaaggttgttttccatgtgg

SEQ ID NO: 7507 - DNA, 122 bp, Homo sapiens
  misc_feature (61)..(62): /note="This region represents a CpG dinucleotide"
  misc_feature (61)..(61): /note="Nucleotide may be methylated to form 5-methylcytosine"
ggtagatggatccaaaaatatgttgaatcaaaaaatgcagaatgtgctgtgtgcaaaaaccggagaaggaataaataacccaccctgagggagattcattcagatgtttcctctccaagaaa

SEQ ID NO: 7508 - DNA, 122 bp, Homo sapiens
  misc_feature (61)..(62): /note="This region represents a CpG dinucleotide"
  misc_feature (61)..(61): /note="Nucleotide may be methylated to form 5-methylcytosine"
gagcccagacgtctacgccaggtcctaattcagttggttcaactgggctgggtgtggacacgtgttgtccagtgagtcatgaatatggataggggtcacacagaataaacttgaccattctt

SEQ ID NO: 7509 - DNA, 122 bp, Homo sapiens
  misc_feature (61)..(62): /note="This region represents a CpG dinucleotide"
  misc_feature (61)..(61): /note="Nucleotide may be methylated to form 5-methylcytosine"
ctgggccagtcacttcacttctctgcaacttgccttgctctgtgaaatgtagataataatcgttcatacccatggggttatactggaattaaatataacagtatgtacaaagggacataaac

SEQ ID NO: 7510 - DNA, 122 bp, Homo sapiens
  misc_feature (61)..(62): /note="This region represents a CpG dinucleotide"
  misc_feature (61)..(61): /note="Nucleotide may be methylated to form 5-methylcytosine"
gtttaaggttaagtaagcctttcatccttgcttaatcctaaaaccctacatttaagtacacggcaaagaaaacgtacaatgcaaaggcaagggcatgcttgaagaatgcaaagcagcaaagg

SEQ ID NO: 7511 - DNA, 122 bp, Homo sapiens
  misc_feature (61)..(62): /note="This region represents a CpG dinucleotide"
  misc_feature (61)..(61): /note="Nucleotide may be methylated to form 5-methylcytosine"
cctagcctcgccctttctctccctctggactgagacctctttatttcctctgtagtttctcggtgtctcttcttttctcttttgcttcctctcccatttcgtttactgaccattatcaaaat

SEQ ID NO: 7512 - DNA, 122 bp, Homo sapiens
  misc_feature (61)..(62): /note="This region represents a CpG dinucleotide"
  misc_feature (61)..(61): /note="Nucleotide may be methylated to form 5-methylcytosine"
tgtaaattgaaacttcctttaatacttaactgtgagttaaacatagttctggagctccatcgaaagggtcttagtcagccaggcacagtggcttacacctgtaatcccagcattctgggaag

SEQ ID NO: 7513 - DNA, 122 bp, Homo sapiens
  misc_feature (61)..(62): /note="This region represents a CpG dinucleotide"
  misc_feature (61)..(61): /note="Nucleotide may be methylated to form 5-methylcytosine"
cagctgtggaccggattcagcttggaggctgcctgcttgcaaactctgtcctctgtcctgcgcaattgggaatcactcggggttcttttgttctcttaaagaaacatggctccttcaaccag

SEQ ID NO: 7514 - DNA, 122 bp, Homo sapiens
  misc_feature (61)..(62): /note="This region represents a CpG dinucleotide"
  misc_feature (61)..(61): /note="Nucleotide may be methylated to form 5-methylcytosine"
gcccttggtgttgcaaagggaatcgggctggcatgtcttcaggggaagttgcgtgaggtccgggaggcccagggcagggaccgcatctgcaggattaggcaccggggcaaggtcttttggga

SEQ ID NO: 7515 - DNA, 122 bp, Homo sapiens
  misc_feature (61)..(62): /note="This region represents a CpG dinucleotide"
  misc_feature (61)..(61): /note="Nucleotide may be methylated to form 5-methylcytosine"
ttcatgacagatgacagggagtgtgaaatgcagtattttttaaacttttttgttacaatccgtagtaagagatctttttatagcaagactccattgatggctgagtatggttgtgtgcacct

SEQ ID NO: 7516 - DNA, 122 bp, Homo sapiens
  misc_feature (61)..(62): /note="This region represents a CpG dinucleotide"
  misc_feature (61)..(61): /note="Nucleotide may be methylated to form 5-methylcytosine"
gcaactgtcaaatcacactgcacataggtgtgtctggcagcctcacagctgtcctcctcacgcttcaggccacacaggaaggccaaggacactgcaggaaacagtcaccattaggaaagaac

SEQ ID NO: 7517 - DNA, 122 bp, Homo sapiens
  misc_feature (61)..(62): /note="This region represents a CpG dinucleotide"
  misc_feature (61)..(61): /note="Nucleotide may be methylated to form 5-methylcytosine"
cgctgttggaatttcctctcccccgcggtttccctcgcggttcagatcgggaccagaacgcgatcagcttcagtgccccgccgcaggcatttttaaatagagtattgcgtcccccattcagc

SEQ ID NO: 7518 - DNA, 122 bp, Homo sapiens
  misc_feature (61)..(62): /note="This region represents a CpG dinucleotide"
  misc_feature (61)..(61): /note="Nucleotide may be methylated to form 5-methylcytosine"
ggctttaaaactaattacctaagccacgttcaatctgacaggaggtattattggagctagcgcatcagtcagatcacttaattacttcataaatcctgggtcttagcatagattttaaagca

SEQ ID NO: 7519 - DNA, 122 bp, Homo sapiens
  misc_feature (61)..(62): /note="This region represents a CpG dinucleotide"
  misc_feature (61)..(61): /note="Nucleotide may be methylated to form 5-methylcytosine"
gttgtttacagataggactcagagaagttgggtgacttgcccaaggtcacacaccaaggacgaaacagagccaggatttccacccagcatgaggcctggcagatgttcagtatttcacccaa

SEQ ID NO: 7520 - DNA, 122 bp, Homo sapiens
  misc_feature (61)..(62): /note="This region represents a CpG dinucleotide"
  misc_feature (61)..(61): /note="Nucleotide may be methylated to form 5-methylcytosine"
aagagaggaaaggctgaaggacataatccatagcaaagttctggcccagaagaaagcaaccgagagtgatcagccctaagcacagttgcttttatttgaggtgcagccttttgcatgtagca

SEQ ID NO: 7521 - DNA, 122 bp, Homo sapiens
  misc_feature (61)..(62): /note="This region represents a CpG dinucleotide"
  misc_feature (61)..(61): /note="Nucleotide may be methylated to form 5-methylcytosine"
tatttccttgagccaagtgagctgcaaaatccattatgttcccttcccacctccacctaacgcctgactctgagtcactatgtgatgctcccaccagtagagtgggagttatttttctggaa

SEQ ID NO: 7522 - DNA, 122 bp, Homo sapiens
  misc_feature (61)..(62): /note="This region represents a CpG dinucleotide"
  misc_feature (61)..(61): /note="Nucleotide may be methylated to form 5-methylcytosine"
ggtcagagtcagagactcaatgacatcctaatgctcagcgaattgggagtaggccacgcacgatacctggaagctctgaggtttaggcacagaagtccacatcacacccattctagaaagaa

SEQ ID NO: 7523 - DNA, 122 bp, Homo sapiens
  misc_feature (61)..(62): /note="This region represents a CpG dinucleotide"
  misc_feature (61)..(61): /note="Nucleotide may be methylated to form 5-methylcytosine"
tgcagggccttgtgtgactgtgttcacgtcggcccctctcacctctgagctcctccccaccgcgcttgtgagtggagcagcccaggagactgtatgtggggttttccaaccacaaagcatgg

SEQ ID NO: 7524 - DNA, 122 bp, Homo sapiens
  misc_feature (61)..(62): /note="This region represents a CpG dinucleotide"
  misc_feature (61)..(61): /note="Nucleotide may be methylated to form 5-methylcytosine"
cgctatgggttgtgattcaccctccaagaactgtgcttgcagttcccaactgatccagcacggagcacagtgcctgttaacaacctgagcaagataaggataatagcaccctgcaacttctc

SEQ ID NO: 7525 - DNA, 122 bp, Homo sapiens
  misc_feature (61)..(62): /note="This region represents a CpG dinucleotide"
  misc_feature (61)..(61): /note="Nucleotide may be methylated to form 5-methylcytosine"
ccagggcagccctgctccaagaggacatctgataacctgcagataattataagtttatggcgaacaaactattgctgaaagatggcatcgtgcacagctgttgtttagacaaacccgctgta

SEQ ID NO: 7526 - DNA, 122 bp, Homo sapiens
  misc_feature (61)..(62): /note="This region represents a CpG dinucleotide"
  misc_feature (61)..(61): /note="Nucleotide may be methylated to form 5-methylcytosine"
tacttccgatgcacacttcgcacctcagcttcaacacaaatctacaagaaaggtacaggacgtatattacctatcagcctcaaggagacccagtgacccaatgaggctgggtgactgcctcc

SEQ ID NO: 7527 - DNA, 122 bp, Homo sapiens
  misc_feature (61)..(62): /note="This region represents a CpG dinucleotide"
  misc_feature (61)..(61): /note="Nucleotide may be methylated to form 5-methylcytosine"
taggtttcaattacatcagattatagtttttagtctgacagtttgtgtctggatgtacaacggattaattttattaagtttgttggaagagttattgaaacaacaggtttcaattattttgt

SEQ ID NO: 7528 - DNA, 122 bp, Homo sapiens
  misc_feature (61)..(62): /note="This region represents a CpG dinucleotide"
  misc_feature (61)..(61): /note="Nucleotide may be methylated to form 5-methylcytosine"
ctggactacccaaaggagatcagagacgagtggcccagtcctatccgtcattcactgggacgctccatcatggctagtcagctgaatggatggatgaagtcctgttcagcaccagtgcctgg

SEQ ID NO: 7529 - DNA, 122 bp, Homo sapiens
  misc_feature (61)..(62): /note="This region represents a CpG dinucleotide"
  misc_feature (61)..(61): /note="Nucleotide may be methylated to form 5-methylcytosine"
atatctgtcctacatctgacatttagacacaagctctcactgcagggagtctcatgagagcgtgcctaggatggcaggaaggatggcatttcttaagatgggtctgactacatgatgtatgt

SEQ ID NO: 7530 - DNA, 122 bp, Homo sapiens
  misc_feature (61)..(62): /note="This region represents a CpG dinucleotide"
  misc_feature (61)..(61): /note="Nucleotide may be methylated to form 5-methylcytosine"
aactgtgatacacgcattccttggactattactcaggaattaaaaggaacaaactattgacgtaggccataatttgggtgattcttcagggaattacggtgaatgaaaaaaggccaatcttg

SEQ ID NO: 7531 - DNA, 122 bp, Homo sapiens
  misc_feature (61)..(62): /note="This region represents a CpG dinucleotide"
  misc_feature (61)..(61): /note="Nucleotide may be methylated to form 5-methylcytosine"
ttaaagagcaattataatacagcgtgatatgtgctattaggggaggaggtaaagggctgacggaatacaggctccacaggaggacataagtggagcatctaacccagactagagagaggctt

SEQ ID NO: 7532 - DNA, 122 bp, Homo sapiens
  misc_feature (61)..(62): /note="This region represents a CpG dinucleotide"
  misc_feature (61)..(61): /note="Nucleotide may be methylated to form 5-methylcytosine"
cagctcctgctctcatacattctgagagccagtttgacaataggcaactacacaaaaaaccgaaataatcccagaatgcctcagggctccaggggaaggcgaaaaaagcgggtgcgtttata

SEQ ID NO: 7533 - DNA, 122 bp, Homo sapiens
  misc_feature (61)..(62): /note="This region represents a CpG dinucleotide"
  misc_feature (61)..(61): /note="Nucleotide may be methylated to form 5-methylcytosine"
aggtttcctttaactatctaggtcatattttattctatctatctatctgagacagaatctcgctctgttgcccaggctggagtgcagtggccaatctcggctcactgcaacctctgcctccc

SEQ ID NO: 7534 - DNA, 122 bp, Homo sapiens
  misc_feature (61)..(62): /note="This region represents a CpG dinucleotide"
  misc_feature (61)..(61): /note="Nucleotide may be methylated to form 5-methylcytosine"
tggcggcagagggaagagccccacgtgggccagctgtgagggtggcaagcagcagggaggcggaactcctaagccaggagccgaggcggggcctgacatgcactcctggccttggcgggcgc

SEQ ID NO: 7535 - DNA, 122 bp, Homo sapiens
  misc_feature (61)..(62): /note="This region represents a CpG dinucleotide"
  misc_feature (61)..(61): /note="Nucleotide may be methylated to form 5-methylcytosine"
gtagtgggactggatatagagaaggagatgctggtagaagccaataccagcaaccaggtgcgtcctgtaggcacattccaaagtgctccggctgtggatgtgctacagattgcgaaagggaa

SEQ ID NO: 7536 - DNA, 122 bp, Homo sapiens
  misc_feature (61)..(62): /note="This region represents a CpG dinucleotide"
  misc_feature (61)..(61): /note="Nucleotide may be methylated to form 5-methylcytosine"
agtgacagtttaccaagaaatgaactgtgatatacagaactacattcccaggtcctactccggaatgctggcagctaggcttatatctctccggaagattagaagatccttctctgagaaaa

SEQ ID NO: 7537 - DNA, 122 bp, Homo sapiens
  misc_feature (61)..(62): /note="This region represents a CpG dinucleotide"
  misc_feature (61)..(61): /note="Nucleotide may be methylated to form 5-methylcytosine"
taaggagactttattgaatatgcattgatgactcactaacactgaactcatggccaacagcgctgtaactcatccctgaacgaagcttactgaacacatgtattttctccgcaaggaacgtc

SEQ ID NO: 7538 - DNA, 122 bp, Homo sapiens
  misc_feature (61)..(62): /note="This region represents a CpG dinucleotide"
  misc_feature (61)..(61): /note="Nucleotide may be methylated to form 5-methylcytosine"
gtgaaacacggtgctgcattaggtgcatacaggacggtgcatacaggagctagacagacccgcattataaccctgaatcatctacttgttgactgtgtcatttcaggaaaatttttcatagg

SEQ ID NO: 7539 - DNA, 122 bp, Homo sapiens
  misc_feature (61)..(62): /note="This region represents a CpG dinucleotide"
  misc_feature (61)..(61): /note="Nucleotide may be methylated to form 5-methylcytosine"
tgaacattaaacaaaactaagtagtggtaagtgttctttctatgccagtagcccctgagacgttaaggatcctagcaacagacaagatatctatcatctagtagatttagtagactgtatgt

SEQ ID NO: 7540 - DNA, 122 bp, Homo sapiens
  misc_feature (61)..(62): /note="This region represents a CpG dinucleotide"
  misc_feature (61)..(61): /note="Nucleotide may be methylated to form 5-methylcytosine"
gaagggagcgaagtgtgtggcagcccagtttttttctgaacatgaatagaggaaagagaacgcctccagccagcagagcacagccaggctgcaccgtgttttgataaggttgtggctagccg

SEQ ID NO: 7541 - DNA, 122 bp, Homo sapiens
  misc_feature (61)..(62): /note="This region represents a CpG dinucleotide"
  misc_feature (61)..(61): /note="Nucleotide may be methylated to form 5-methylcytosine"
gggctaatgtgataatgggaaataatgaaatttgttgtttttatcagtgtgtatatggggcggggtttacatttgcattttcacagggcccttggcaagttcacagggttgaacagttggga

SEQ ID NO: 7542 - DNA, 122 bp, Homo sapiens
  misc_feature (61)..(62): /note="This region represents a CpG dinucleotide"
  misc_feature (61)..(61): /note="Nucleotide may be methylated to form 5-methylcytosine"
ggtatgaaaacgtaatgttagtctgcaagcataaatgttgatgttggagatggagcttatcgaaggcttgcacatgtgagactctgagtgacgtcagtgatgtgttgagcaacattgtgatc

SEQ ID NO: 7543 - DNA, 122 bp, Homo sapiens
  misc_feature (61)..(62): /note="This region represents a CpG dinucleotide"
  misc_feature (61)..(61): /note="Nucleotide may be methylated to form 5-methylcytosine"
tgcaggaactcaaaagcataacctgggtggggctgggtccggaagcacagtgggggcccccggcctgttcccaagatcctgaagtcaccaccacctgggctcagtcctgaggcactattgaa

SEQ ID NO: 7544 - DNA, 122 bp, Homo sapiens
  misc_feature (61)..(62): /note="This region represents a CpG dinucleotide"
  misc_feature (61)..(61): /note="Nucleotide may be methylated to form 5-methylcytosine"
cgggaggggcgggaagggaagtgactttaccaagaacctggcctgtgaagagtgggaggacgaaggggaaagtggctgaggggcttctcactatttttaagacggacaagacttgagtccag

SEQ ID NO: 7545 - DNA, 122 bp, Homo sapiens
  misc_feature (61)..(62): /note="This region represents a CpG dinucleotide"
  misc_feature (61)..(61): /note="Nucleotide may be methylated to form 5-methylcytosine"
ccgggtcggggggctgtgggagagcccccagatcagccctaagactgcgggctagaggggcgttggctgcatggggtccctgggccctgtatttacccaggccagagcagtgcagcttgagt

SEQ ID NO: 7546 - DNA, 122 bp, Homo sapiens
  misc_feature (61)..(62): /note="This region represents a CpG dinucleotide"
  misc_feature (61)..(61): /note="Nucleotide may be methylated to form 5-methylcytosine"
caactggttaggcaagttgccagtgtcaccaatgacggacagttgacttggctaatttgccgtttgctattcatgttacaggtattatatgatgcttctggggttcttgagaaaaatagaga

SEQ ID NO: 7547 - DNA, 122 bp, Homo sapiens
  misc_feature (61)..(62): /note="This region represents a CpG dinucleotide"
  misc_feature (61)..(61): /note="Nucleotide may be methylated to form 5-methylcytosine"
ctgggatcaaaagaggtcacaggatattcagtggacacattctgaaaaacacttgtcagacgaggtaattatatttcagataataacgtgagcagggaaatgccaatgcctgaaattcccta

SEQ ID NO: 7548 - DNA, 122 bp, Homo sapiens
  misc_feature (61)..(62): /note="This region represents a CpG dinucleotide"
  misc_feature (61)..(61): /note="Nucleotide may be methylated to form 5-methylcytosine"
cttagcccttctatgagaaacaggaatgctaaaaccaccaccctcccagggctgttaatgcggatcaaatgagatcacacacctaaggaacgccacagtgcctggctgagaataaggattga

SEQ ID NO: 7549 - DNA, 122 bp, Homo sapiens
  misc_feature (61)..(62): /note="This region represents a CpG dinucleotide"
  misc_feature (61)..(61): /note="Nucleotide may be methylated to form 5-methylcytosine"
ctctggggggcagagcagcaggggaggaagctgacaagctgaactgcgtccaggccgggacggcgtgaaagacagacaggagcatctagttttgactcagtcaacaatggggaccaggtgca

SEQ ID NO: 7550 - DNA, 122 bp, Homo sapiens
  misc_feature (61)..(62): /note="This region represents a CpG dinucleotide"
  misc_feature (61)..(61): /note="Nucleotide may be methylated to form 5-methylcytosine"
ctggtacaccccaggcctgtgagtctttagaggttgagtttttgtctgaaagagatatggcgcctacaggaggtcagggacaggccttctgtttcttgggaggccctaccccaccccttagt

SEQ ID NO: 7551 - DNA, 122 bp, Homo sapiens
  misc_feature (61)..(62): /note="This region represents a CpG dinucleotide"
  misc_feature (61)..(61): /note="Nucleotide may be methylated to form 5-methylcytosine"
gggacaaaggtgttgaatggtacaggaaacaggagtcttaccagggtcatgctgagtgtacggcccatgacagcatggaacaggtcgtgtgcagctgggccagacacaacaaaaaattcaca

SEQ ID NO: 7552 - DNA, 122 bp, Homo sapiens
  misc_feature (61)..(62): /note="This region represents a CpG dinucleotide"
  misc_feature (61)..(61): /note="Nucleotide may be methylated to form 5-methylcytosine"
ccctccctcagtcaaatcagtgtagcaaaatgtattacccagtcacaacacaggatgttgcgaggaaacaagggtggtagcaacaaatgcagcctattctgaacactgcaaggtgcatgcac

SEQ ID NO: 7553 - DNA, 122 bp, Homo sapiens
  misc_feature (61)..(62): /note="This region represents a CpG dinucleotide"
  misc_feature (61)..(61): /note="Nucleotide may be methylated to form 5-methylcytosine"
tgggacttgaatttggaagtttgggaagatcagaatttgaggtgaagattgcaacctcagcggtgctcatgagtcactgatggttcaaactacctggtgagtcacacacggataactgagca

SEQ ID NO: 7554 - DNA, 122 bp, Homo sapiens
  misc_feature (61)..(62): /note="This region represents a CpG dinucleotide"
  misc_feature (61)..(61): /note="Nucleotide may be methylated to form 5-methylcytosine"
cctagagctgagagtgtggtcaaacctacacaaatcacatgcctaagaatgtgagaagggcgttcccctatgggaaacctaggtgcttttggcaggagaaggaaaaacaatggtagagaagc

SEQ ID NO: 7555 - DNA, 122 bp, Homo sapiens
  misc_feature (61)..(62): /note="This region represents a CpG dinucleotide"
  misc_feature (61)..(61): /note="Nucleotide may be methylated to form 5-methylcytosine"
cgcatctgtctggagtggtgagtacctggaccctcccatccctgcaggctgctggtggaccggttctcaggccggttctgggcctggctggaacgggaggagttcctggtccccaagaatgt

SEQ ID NO: 7556 - DNA, 122 bp, Homo sapiens
  misc_feature (61)..(62): /note="This region represents a CpG dinucleotide"
  misc_feature (61)..(61): /note="Nucleotide may be methylated to form 5-methylcytosine"
tataccacctctcaagccagttttggtcactttcttcgaattggagcttactgatcatcccggttgggttctaatagagctggtctctgagctgagcctacttttcagcctccagccccaag

SEQ ID NO: 7557 - DNA, 122 bp, Homo sapiens
  misc_feature (61)..(62): /note="This region represents a CpG dinucleotide"
  misc_feature (61)..(61): /note="Nucleotide may be methylated to form 5-methylcytosine"
ttgaaggataagaaggagcttactgggcttattataagtgggtagaagcacactcttcaccgtgggaacagtaagtgaaggacacagaatcatgaaagataaatgcattgtagagaacactg

SEQ ID NO: 7558 - DNA, 122 bp, Homo sapiens
  misc_feature (61)..(62): /note="This region represents a CpG dinucleotide"
  misc_feature (61)..(61): /note="Nucleotide may be methylated to form 5-methylcytosine"
ctttagaatgcttccttcactttctcacatacccacagtgtttcagagctagccacagaacgatgcatgttgcaatgctatgctggaaatacagactcatgttgaaatcgttgccaacaact

SEQ ID NO: 7559 - DNA, 122 bp, Homo sapiens
  misc_feature (61)..(62): /note="This region represents a CpG dinucleotide"
  misc_feature (61)..(61): /note="Nucleotide may be methylated to form 5-methylcytosine"
aaagaaacccacagttatacaaacaagagaaagggtgctttgtgcatgcctagagacatacgcacaactacacagataagggagagttatgcagacagcttttcagataagagaagttactc

SEQ ID NO: 7560 - DNA, 122 bp, Homo sapiens
  misc_feature (61)..(62): /note="This region represents a CpG dinucleotide"
  misc_feature (61)..(61): /note="Nucleotide may be methylated to form 5-methylcytosine"
agtgacagtggcagccctcaagcaggatgcagacctgtgggggctcaattcttagagaagcgccagctctaccttcaggcttgccctctgggatttgaggcaggggtggaactactctccgt

SEQ ID NO: 7561 - DNA, 122 bp, Homo sapiens
  misc_feature (61)..(62): /note="This region represents a CpG dinucleotide"
  misc_feature (61)..(61): /note="Nucleotide may be methylated to form 5-methylcytosine"
tctccccatgtgatagcctgagatatggcctcatgggaagggaaagacctgacagcccgacgccagtaaaggggctgtgctgaggattagtaaaagaggaaggcctctttgcagttgagata

SEQ ID NO: 7562 - DNA, 122 bp, Homo sapiens
  misc_feature (61)..(62): /note="This region represents a CpG dinucleotide"
  misc_feature (61)..(61): /note="Nucleotide may be methylated to form 5-methylcytosine"
ctggcagacaataagctgaagctttcattagcagcttaagctgaggactatctatgcaaccgatactccctgtgtgctccccgggactgcttaatgtgagcccttgtggagcgattggcacc

SEQ ID NO: 7563 - DNA, 122 bp, Homo sapiens
  misc_feature (61)..(62): /note="This region represents a CpG dinucleotide"
  misc_feature (61)..(61): /note="Nucleotide may be methylated to form 5-methylcytosine"
tatttgcatacgagcctttgtgtgtgcacatgcttttcatttcccttgggtacacacctacgagtagaattgctgggtcatatccacaggaactgccagactgttgtccaaagtggctgccc

SEQ ID NO: 7564 - DNA, 122 bp, Homo sapiens
  misc_feature (61)..(62): /note="This region represents a CpG dinucleotide"
  misc_feature (61)..(61): /note="Nucleotide may be methylated to form 5-methylcytosine"
agctagcctttgattgttcattccagagttgaataatcctttcatctgccactagagccccgaacccagcagccctacacctcctaaatcataaaatcatttcacctggcacctttaaaggt

SEQ ID NO: 7565 - DNA, 122 bp, Homo sapiens
  misc_feature (61)..(62): /note="This region represents a CpG dinucleotide"
  misc_feature (61)..(61): /note="Nucleotide may be methylated to form 5-methylcytosine"
ctgcaacacagagtggtaaagagctagtctcaatcatgcacatgacaacaccagtaggaacgacaaaaattaaagacagaaggaaactagcatcctggatgacaacaaggaacagagttgct

SEQ ID NO: 7566 - DNA, 122 bp, Homo sapiens
  misc_feature (61)..(62): /note="This region represents a CpG dinucleotide"
  misc_feature (61)..(61): /note="Nucleotide may be methylated to form 5-methylcytosine"
ggctgcttcttcaagcagtctccctcacgcataaggtgggatggaaggagttgaaaatatcgcaggttgctatttggttcatgtttattctagccagctaaagaaaggagagcctgaggtgt

SEQ ID NO: 7567 - DNA, 122 bp, Homo sapiens
  misc_feature (61)..(62): /note="This region represents a CpG dinucleotide"
  misc_feature (61)..(61): /note="Nucleotide may be methylated to form 5-methylcytosine"
ctcaaatataagagaggtctcttaggggtttcatttctgaaactatgactaagccatgttcggttgtgccaagtgactcattaatcataaaaagaatatttaggatgcatgtggtgatccat

SEQ ID NO: 7568 - DNA, 122 bp, Homo sapiens
  misc_feature (61)..(62): /note="This region represents a CpG dinucleotide"
  misc_feature (61)..(61): /note="Nucleotide may be methylated to form 5-methylcytosine"
gctcaggcagctgtaattctccaggacatcagataaaaggtaaaaaacagatgggagacgcgcctagacagggtattgaataccagcccgaggggcttgggtttcatccaaacagcaaggca

SEQ ID NO: 7569 - DNA, 122 bp, Homo sapiens
  misc_feature (61)..(62): /note="This region represents a CpG dinucleotide"
  misc_feature (61)..(61): /note="Nucleotide may be methylated to form 5-methylcytosine"
gaataattacgtcagctcaactcatctcatccattgttgcaaggagtaaattagatggcacgtgtgaaaatgctttgtaaactactgagaactgtgtaatgcattgtaaggcattgtcatga

SEQ ID NO: 7570 - DNA, 122 bp, Homo sapiens
  misc_feature (61)..(62): /note="This region represents a CpG dinucleotide"
  misc_feature (61)..(61): /note="Nucleotide may be methylated to form 5-methylcytosine"
gtgttactgtgcggtacaggctgatctttgcacctccactttgggtggtatttgaatatgcgtgtttatgtgtgcttaaaccttggtaaaggcaaacacttggcattttaggatgtcagagg

SEQ ID NO: 7571 - DNA, 122 bp, Homo sapiens
  misc_feature (61)..(62): /note="This region represents a CpG dinucleotide"
  misc_feature (61)..(61): /note="Nucleotide may be methylated to form 5-methylcytosine"
gtagaactgaaagaactttcagggaatattgttcctagaatctgtggttccaccagcctgcgtataatagttaaagtgcagtaacatagctagagtttgcagaataaagttagcagttgtac

SEQ ID NO: 7572 - DNA, 122 bp, Homo sapiens
  misc_feature (61)..(62): /note="This region represents a CpG dinucleotide"
  misc_feature (61)..(61): /note="Nucleotide may be methylated to form 5-methylcytosine"
taaaggaggatccacagaacattcatgtaattactacaattaacaaggagatgcaagtcacggccagggactagtaagttctgctataaacacacaatcacagagcaataaaggattttggc

SEQ ID NO: 7573 - DNA, 122 bp, Homo sapiens
  misc_feature (61)..(62): /note="This region represents a CpG dinucleotide"
  misc_feature (61)..(61): /note="Nucleotide may be methylated to form 5-methylcytosine"
aatgacagccttgttgtcatcactgactgcctgctgattagatatgacagcaacccacaccgtcgtagtcacggtcatgctgaaaaggcagaagcgaacctgagctgcccaaagacaaaggc

SEQ ID NO: 7574 - DNA, 122 bp, Homo sapiens
  misc_feature (61)..(62): /note="This region represents a CpG dinucleotide"
  misc_feature (61)..(61): /note="Nucleotide may be methylated to form 5-methylcytosine"
acagtaatgtaattccattgccttttaccatatggctattgtatgacatgtgcgtgtctgcgcattttcacgtgcatatgagcttagtacaatggaatgaggagaccggggtcagataaatc

SEQ ID NO: 7575 - DNA, 122 bp, Homo sapiens
  misc_feature (61)..(62): /note="This region represents a CpG dinucleotide"
  misc_feature (61)..(61): /note="Nucleotide may be methylated to form 5-methylcytosine"
gatcctgggactgaatgggtgcttcagcattagctgcgcctgtagaagtcctgtgatagccgagcaccctccctcagatggcctgttgagattggcagtgctgttgtgaggaatcctcagtc

SEQ ID NO: 7576 - DNA, 122 bp, Homo sapiens
  misc_feature (61)..(62): /note="This region represents a CpG dinucleotide"
  misc_feature (61)..(61): /note="Nucleotide may be methylated to form 5-methylcytosine"
gaggggaggggaggggaagggaagggaagggaagggaagggaagggagaaaagaaaaagacgagtgaatcttacattaaagacagcagaatagcagaagaagcttaaggacacatcaaggac

SEQ ID NO: 7577 - DNA, 122 bp, Homo sapiens
  misc_feature (61)..(62): /note="This region represents a CpG dinucleotide"
  misc_feature (61)..(61): /note="Nucleotide may be methylated to form 5-methylcytosine"
gtgagtctctggtattgggttttatctgatgtctgatggcaaggacagtttattcctagacggataggtcccaagttgttaggcaagctcacctttagtaagttgtgaagccttacatccca

SEQ ID NO: 7578 - DNA, 122 bp, Homo sapiens
  misc_feature (61)..(62): /note="This region represents a CpG dinucleotide"
  misc_feature (61)..(61): /note="Nucleotide may be methylated to form 5-methylcytosine"
acaatctttgcggcaccagggtgggactatttccccacttccatgttgaaactgacagaacgaattgtgtcttagagactctcaaacactaatgtcccctttgactatctaagctgttgagc

SEQ ID NO: 7579 - DNA, 122 bp, Homo sapiens
  misc_feature (61)..(62): /note="This region represents a CpG dinucleotide"
  misc_feature (61)..(61): /note="Nucleotide may be methylated to form 5-methylcytosine"
acccagaacccacggtgagcacccggcaggaagtggccacagcaccatcactggaggccacgcggagtctgaggacagcagctttcccccctatgctgttgtggggactccaggctcagcct

SEQ ID NO: 7580 - DNA, 122 bp, Homo sapiens
  misc_feature (61)..(62): /note="This region represents a CpG dinucleotide"
  misc_feature (61)..(61): /note="Nucleotide may be methylated to form 5-methylcytosine"
ctgccactccagagagatggctatgccggtccgcgtggcgcgcagggccggatggtttggcgctctctgcgaggcccgcaaggctgcacttgggagggcttcagtatggtgacctttcctaa

SEQ ID NO: 7581 - DNA, 122 bp, Homo sapiens
  misc_feature (61)..(62): /note="This region represents a CpG dinucleotide"
  misc_feature (61)..(61): /note="Nucleotide may be methylated to form 5-methylcytosine"
acagctacagtgatgaacttgatagcatttcatatttgcaactgttaacacgtttctgcacgggcatctttgcaaggaacctgcacactgtatctgaaaggatgatgtcttgttcagataaa

SEQ ID NO: 7582 - DNA, 122 bp, Homo sapiens
  misc_feature (61)..(62): /note="This region represents a CpG dinucleotide"
  misc_feature (61)..(61): /note="Nucleotide may be methylated to form 5-methylcytosine"
atgtgttcactgtggctggccatgggcagagagtaatgtgaggtagcaaagaagtggttgcgtggggccagatgatgcattagatgctggctttgacattcatttaataggcagtagatgtt

SEQ ID NO: 7583 - DNA, 122 bp, Homo sapiens
  misc_feature (61)..(62): /note="This region represents a CpG dinucleotide"
  misc_feature (61)..(61): /note="Nucleotide may be methylated to form 5-methylcytosine"
caacaagtactgtgtgttccttacggtttggaaatcacttgaaacactgtgtcccctccccgccaaccatcccacgctgtaccccaaccttcggagtcctcctatcagagtcccctgaaggc

SEQ ID NO: 7584 - DNA, 122 bp, Homo sapiens
  misc_feature (61)..(62): /note="This region represents a CpG dinucleotide"
  misc_feature (61)..(61): /note="Nucleotide may be methylated to form 5-methylcytosine"
tggctcttgggacactccctcttagaacccagccaccatgctggagacagatcaggtaagcgtgccgttcaacagccctagctaagctcccagctgactgccagcattagccaccaatgtgg

SEQ ID NO: 7585 - DNA, 122 bp, Homo sapiens
  misc_feature (61)..(62): /note="This region represents a CpG dinucleotide"
  misc_feature (61)..(61): /note="Nucleotide may be methylated to form 5-methylcytosine"
tgccctcagaaaagggcttgagggagggagtccacccatttttgcccttctgctttgtgccgtgtgagaacacgacaaatctccctttaggaagatgtagtcttcaatgcgccatcttggaa

SEQ ID NO: 7586 - DNA, 122 bp, Homo sapiens
  misc_feature (61)..(62): /note="This region represents a CpG dinucleotide"
  misc_feature (61)..(61): /note="Nucleotide may be methylated to form 5-methylcytosine"
gcagtgagcagtgttttcgggatgagtgcctccctgccaacgagggacggacagtgtgaccgccaccccggggaatctggtgtggaggtggggctgtccagtcccgagtggtgctgaagcca

SEQ ID NO: 7587 - DNA, 122 bp, Homo sapiens
  misc_feature (61)..(62): /note="This region represents a CpG dinucleotide"
  misc_feature (61)..(61): /note="Nucleotide may be methylated to form 5-methylcytosine"
tatttccttgtattctgtcaaacaactgtctcttggtttaaatacttttctgctggtcttcgctctctctctctcctcttctggtttattttcatccagatgtggattttccccaaagtttc

SEQ ID NO: 7588 - DNA, 122 bp, Homo sapiens
  misc_feature (61)..(62): /note="This region represents a CpG dinucleotide"
  misc_feature (61)..(61): /note="Nucleotide may be methylated to form 5-methylcytosine"
tgcccgcagccatgatgatccgattggggatggggattactggggcatcttctcactctgcgacggcgcccgcggtgggcagggggtggtgcccagggggagcaaaaaagtaaattgcaggg

SEQ ID NO: 7589 - DNA, 122 bp, Homo sapiens
  misc_feature (61)..(62): /note="This region represents a CpG dinucleotide"
  misc_feature (61)..(61): /note="Nucleotide may be methylated to form 5-methylcytosine"
atgagctctgatggttttataagtgtttgacagttcttctttcactctggtctctcctgccgccttgtgaagaaagtgcttgcttccccttcgccttccggcatgattgtaagtttcctgag

SEQ ID NO: 7590 - DNA, 122 bp, Homo sapiens
  misc_feature (61)..(62): /note="This region represents a CpG dinucleotide"
  misc_feature (61)..(61): /note="Nucleotide may be methylated to form 5-methylcytosine"
cccagatcgccggcgaagcgcagggggaggctgggaagggcatcgggagacacgggcctgcgccccctacccgggccccggcccacctgtccgcacacctgtccgaagccttaaaaggtctt

SEQ ID NO: 7591 - DNA, 122 bp, Homo sapiens
  misc_feature (61)..(62): /note="This region represents a CpG dinucleotide"
  misc_feature (61)..(61): /note="Nucleotide may be methylated to form 5-methylcytosine"
acacagggcagaaagcatctgctttatgctgagtaattcagaaggatgttacccttcatacggtgctggtgagaaaggcacctgctgagtttccatatcaacttcctgctgagtttctctat

SEQ ID NO: 7592 - DNA, 122 bp, Homo sapiens
  misc_feature (61)..(62): /note="This region represents a CpG dinucleotide"
  misc_feature (61)..(61): /note="Nucleotide may be methylated to form 5-methylcytosine"
gagagaattgctgctagctattattaaggttaaatccctgttttataatttcctagtttgcgaaagagaaatttgaaacataacagccaggaagtcataaaaattggagcgtagttgtattc

SEQ ID NO: 7593 - DNA, 122 bp, Homo sapiens
  misc_feature (61)..(62): /note="This region represents a CpG dinucleotide"
  misc_feature (61)..(61): /note="Nucleotide may be methylated to form 5-methylcytosine"
ctgcgcagaggccccggacccgggtcgcctcctggtgcgccgtctaagctgcctgtggtgcgccgagagcttgctctaccactgcctgtcggacgccgagggcgacttctcggacccgtgcg

SEQ ID NO: 7594 - DNA, 122 bp, Homo sapiens
  misc_feature (61)..(62): /note="This region represents a CpG dinucleotide"
  misc_feature (61)..(61): /note="Nucleotide may be methylated to form 5-methylcytosine"
gcctcctgttgtctgaacaagctagtatggaagtagcatctaggcaagctggtgttaagacgcaagtaattactcagagaaattgctggtgtgtcaaactgcttgatatgtaagtttcctcc

SEQ ID NO: 7595 - DNA, 122 bp, Homo sapiens
  misc_feature (61)..(62): /note="This region represents a CpG dinucleotide"
  misc_feature (61)..(61): /note="Nucleotide may be methylated to form 5-methylcytosine"
ttcaggacagaattaatggtaactgactgaaacgagaacgggctgcagctctgtgcctagcggacctccacaccagcagcctaacgtgctcaaaatggaatgcagtttctcttagagctgac

SEQ ID NO: 7596 - DNA, 122 bp, Homo sapiens
  misc_feature (61)..(62): /note="This region represents a CpG dinucleotide"
  misc_feature (61)..(61): /note="Nucleotide may be methylated to form 5-methylcytosine"
cttcaagggaaattccaggcatctagctaggcttgagaagtaaatgagcaacttgatcaacgagaaggtaatggtaacttaaaacaatagccaaggaaattggagtcgtaacatatttggtt

SEQ ID NO: 7597 - DNA, 122 bp, Homo sapiens
  misc_feature (61)..(62): /note="This region represents a CpG dinucleotide"
  misc_feature (61)..(61): /note="Nucleotide may be methylated to form 5-methylcytosine"
tcctgctacagtccttggttccctgaccaggaagcgaggtgactgacaagccctgtggagcgtccctgcagaggactccggccagcctgactgacgcaatccaaagagcgctcccgggtagg

SEQ ID NO: 7598 - DNA, 122 bp, Homo sapiens
  misc_feature (61)..(62): /note="This region represents a CpG dinucleotide"
  misc_feature (61)..(61): /note="Nucleotide may be methylated to form 5-methylcytosine"
atccgcccgcctcggcctcccaaagtgctgagattacgggtgtgagccaccgcgcccagccgatcctccagaatgttttgcaacaggttgagaagccctggggtagaagtgaaacaagactc

SEQ ID NO: 7599 - DNA, 122 bp, Homo sapiens
  misc_feature (61)..(62): /note="This region represents a CpG dinucleotide"
  misc_feature (61)..(61): /note="Nucleotide may be methylated to form 5-methylcytosine"
ggagcttgtcccggatcaagcccagcaggcgccggccggctgagcctagtgagggagccccgtgagcccgtgccagcccggaacccgcaccagcctgcaagcgccacgctcagccccggctg

SEQ ID NO: 7600 - DNA, 122 bp, Homo sapiens
  misc_feature (61)..(62): /note="This region represents a CpG dinucleotide"
  misc_feature (61)..(61): /note="Nucleotide may be methylated to form 5-methylcytosine"
tgcgcctaaccctccaacgcccctaatcctccatcgggcacgcctctgacccattgggcgcgtgcctaaccctctggcaccccgtatcctccagcaggcgggcgcctaaccctccagcgccc

SEQ ID NO: 7601 - DNA, 122 bp, Homo sapiens
  misc_feature (61)..(62): /note="This region represents a CpG dinucleotide"
  misc_feature (61)..(61): /note="Nucleotide may be methylated to form 5-methylcytosine"
aaaagccaaaacaacacagccaaatgcccccagcaggggagcgccgcaggaggctaacgacgccagcattttcacacaccaacgctgcacccagcaaagcagctgacagcgaggggactccc

SEQ ID NO: 7602 - DNA, 122 bp, Homo sapiens
  misc_feature (61)..(62): /note="This region represents a CpG dinucleotide"
  misc_feature (61)..(61): /note="Nucleotide may be methylated to form 5-methylcytosine"
actgcagcagaaaggggcagagtccctttaggcccttgacaagcacggcggattagtaaccgtataatttaaccctccagttagccttggaggactcggtgtcgcacttccgcccgaactct

SEQ ID NO: 7603 - DNA, 122 bp, Homo sapiens
  misc_feature (61)..(62): /note="This region represents a CpG dinucleotide"
  misc_feature (61)..(61): /note="Nucleotide may be methylated to form 5-methylcytosine"
caatcagtattctaagtgtggccgagtgacagtgggcatagatttataacaaggaagtgacgtgcttatcaccatagatttgcaagtaaactgcatgtatttaattgtattgaattgagttc

SEQ ID NO: 7604 - DNA, 122 bp, Homo sapiens
  misc_feature (61)..(62): /note="This region represents a CpG dinucleotide"
  misc_feature (61)..(61): /note="Nucleotide may be methylated to form 5-methylcytosine"
catttccaaaggacaggaagtcacctctgagctgttgcggcttttctacgagaagcagaacgtgtacggcactccaagatcggaaaacaatgtcaggtttcaactggaatgacacagatgta

SEQ ID NO: 7605 - DNA, 122 bp, Homo sapiens
  misc_feature (61)..(62): /note="This region represents a CpG dinucleotide"
  misc_feature (61)..(61): /note="Nucleotide may be methylated to form 5-methylcytosine"
ctgcccccaccccggggaccctgtgacatggtgcctgagaggcaggcatagaggcttctccgccagcctcctctggacggcaggctcactgccaggccagcctccgagagggagagagagag

SEQ ID NO: 7606 - DNA, 122 bp, Homo sapiens
  misc_feature (61)..(62): /note="This region represents a CpG dinucleotide"
  misc_feature (61)..(61): /note="Nucleotide may be methylated to form 5-methylcytosine"
cagagtttgaaacagcctgactctcctcttctggcaacattcttttccttggtttggggacgctgtactgttctggttttgcccctccctccgagcattccttgtgtttgtcctggcccatt

SEQ ID NO: 7607 - DNA, 122 bp, Homo sapiens
  misc_feature (61)..(62): /note="This region represents a CpG dinucleotide"
  misc_feature (61)..(61): /note="Nucleotide may be methylated to form 5-methylcytosine"
tgacctcgtgatccacccacctcggcctcccaaagtgctgggattacaggcatgagccaccgcacctggccaaagaaaaattttttaaagcagatttcctgcagagatttacatactgcatg

SEQ ID NO: 7608 - DNA, 122 bp, Homo sapiens
  misc_feature (61)..(62): /note="This region represents a CpG dinucleotide"
  misc_feature (61)..(61): /note="Nucleotide may be methylated to form 5-methylcytosine"
gctctaaatatttaaagaacttattaaaacacaaattgctgagcctcacgggttcccaggcgatgctgatgtaactggtcctgaggccacactttgagaaccgctgctctaagtaacaaaat

SEQ ID NO: 7609 - DNA, 122 bp, Homo sapiens
  misc_feature (61)..(62): /note="This region represents a CpG dinucleotide"
  misc_feature (61)..(61): /note="Nucleotide may be methylated to form 5-methylcytosine"
tcagaaagattttttaaagtgtgaagctaagtatgttggattaagtacctaaccttgatacgaggaagtctggtaaaataatttagcattagataggttcagttgctgaggaatgtttctga

SEQ ID NO: 7610 - DNA, 122 bp, Homo sapiens
  misc_feature (61)..(62): /note="This region represents a CpG dinucleotide"
  misc_feature (61)..(61): /note="Nucleotide may be methylated to form 5-methylcytosine"
aagagttgaagcaaataatcagcttaccaaaagcttaaaaggagaagctgtggaaagatacgtccacaggatgatttgaaaagcacagacataatgctgggaaactagaagtacaagttcat

SEQ ID NO: 7611 - DNA, 122 bp, Homo sapiens
  misc_feature (61)..(62): /note="This region represents a CpG dinucleotide"
  misc_feature (61)..(61): /note="Nucleotide may be methylated to form 5-methylcytosine"
gggaaggcttcctgaattacccaggtacaattagtccctctcccttctgcgagattgtaccgttttgctcatttttcttctattctgattgacacatatttattggacacctactatgtgct

SEQ ID NO: 7612 - DNA, 122 bp, Homo sapiens
  misc_feature (61)..(62): /note="This region represents a CpG dinucleotide"
  misc_feature (61)..(61): /note="Nucleotide may be methylated to form 5-methylcytosine"
ttcccaggacaaaaacaatgacagacttgtccgagctaccatcgaagtcttgggtctgcacgcaaaggatggaatcccccatctccattcccaaaagtttccctacgggagcctggtgttgt

SEQ ID NO: 7613 - DNA, 122 bp, Homo sapiens
  misc_feature (61)..(62): /note="This region represents a CpG dinucleotide"
  misc_feature (61)..(61): /note="Nucleotide may be methylated to form 5-methylcytosine"
attgaaataattcgccccccatcccccccggctcccatcctctgggaaggctgcacagcgcgccaaggaaatctgtcctcccagccagaccccagcggcctttctgctgcgctccacagcta

SEQ ID NO: 7614 - DNA, 122 bp, Homo sapiens
  misc_feature (61)..(62): /note="This region represents a CpG dinucleotide"
  misc_feature (61)..(61): /note="Nucleotide may be methylated to form 5-methylcytosine"
cctgagagttgacttgaagctgacaggtggcttgagggactgcatgtgtagagacccctccgtgcacacacatgatacccacagataacccaggtgcaaatgggctcctctctccgctctgc

SEQ ID NO: 7615 - DNA, 122 bp, Homo sapiens
  misc_feature (61)..(62): /note="This region represents a CpG dinucleotide"
  misc_feature (61)..(61): /note="Nucleotide may be methylated to form 5-methylcytosine"
cataccactagagacagatagagggcaagacaactggtgtgtttgaatatttgcttgcaacgcttctgaatgtcacaatttgtaatacaaaagctgaaagtatcactaaatttgccccacat

SEQ ID NO: 7616 - DNA, 122 bp, Homo sapiens
  misc_feature (61)..(62): /note="This region represents a CpG dinucleotide"
  misc_feature (61)..(61): /note="Nucleotide may be methylated to form 5-methylcytosine"
gggtttttgggaatgtagcacctcagtgggcgggccttcagggcatactgtacacattggcgctgtgacacatacaacaggacaggtcagcaccaagaggcccctccctccctctccacacc

SEQ ID NO: 7617 - DNA, 122 bp, Homo sapiens
  misc_feature (61)..(62): /note="This region represents a CpG dinucleotide"
  misc_feature (61)..(61): /note="Nucleotide may be methylated to form 5-methylcytosine"
tctgcttctctgcatctctgctgatcccaccttaatgcaagctggtttgatcttgagctgcgttatgtcatgagacagtgatgtggaacctgcaacctttcatgttgctcttaaagtccaac

SEQ ID NO: 7618 - DNA, 122 bp, Homo sapiens
  misc_feature (61)..(62): /note="This region represents a CpG dinucleotide"
  misc_feature (61)..(61): /note="Nucleotide may be methylated to form 5-methylcytosine"
gatgtgtggctcacatgagtgtatgttagcttttcagaaaccatgaaatggtttccagagcggctatagtacgtctgcatctccatcagcaatgtttatgggttcctgttgctcttcattct

SEQ ID NO: 7619 - DNA, 122 bp, Homo sapiens
  misc_feature (61)..(62): /note="This region represents a CpG dinucleotide"
  misc_feature (61)..(61): /note="Nucleotide may be methylated to form 5-methylcytosine"
agcggggacccagggagtcctcacgccccatggccttggctgcagagaacacgccagcaccgccacagcaggcacccacatggagccgggcgggtacacacccctcacacccacacaggcct

SEQ ID NO: 7620 - DNA, 122 bp, Homo sapiens
  misc_feature (61)..(62): /note="This region represents a CpG dinucleotide"
  misc_feature (61)..(61): /note="Nucleotide may be methylated to form 5-methylcytosine"
aaaattcttatttcctcttctaggttatggtttaactcagcagaatttgttgaacaactacgacatgctggggatcatggtatgtttagagacacaaaagtgaattcaaaatcttctcttca

SEQ ID NO: 7621 - DNA, 122 bp, Homo sapiens
  misc_feature (61)..(62): /note="This region represents a CpG dinucleotide"
  misc_feature (61)..(61): /note="Nucleotide may be methylated to form 5-methylcytosine"
gtgtctggttcagtcttctgtgcatttggaattttcaaattgaggctatcagggtttgttcgccctggatgtagaaagcaaaaatctggatcttacacattcctgggatctgactggtgagg

SEQ ID NO: 7622 - DNA, 122 bp, Homo sapiens
  misc_feature (61)..(62): /note="This region represents a CpG dinucleotide"
  misc_feature (61)..(61): /note="Nucleotide may be methylated to form 5-methylcytosine"
gtagcctaggagaacaaacagactccactctaaggagcccaggcattccatgctgatccacgcctgcccagcccggcggcatccccactgtctgtgcatggacaccagccctccctggctcc

SEQ ID NO: 7623 - DNA, 122 bp, Homo sapiens
  misc_feature (61)..(62): /note="This region represents a CpG dinucleotide"
  misc_feature (61)..(61): /note="Nucleotide may be methylated to form 5-methylcytosine"
gcgaagagagtgaaattctgtctcaaaacaaacaaacaaacacacacacgcccttaagaacgcaatgaggataacatgttggcccttgtatttgagaaggcaacctggcttgactctgagct

SEQ ID NO: 7624 - DNA, 122 bp, Homo sapiens
  misc_feature (61)..(62): /note="This region represents a CpG dinucleotide"
  misc_feature (61)..(61): /note="Nucleotide may be methylated to form 5-methylcytosine"
ctaaagcaacatttcccagggtcccctgccacaacctctccctgggagctgggaattgagcgcagccagctggactctggttagtgggtttcataacgtgtttctgttttgcatagcgtaaa

SEQ ID NO: 7625 - DNA, 122 bp, Homo sapiens
  misc_feature (61)..(62): /note="This region represents a CpG dinucleotide"
  misc_feature (61)..(61): /note="Nucleotide may be methylated to form 5-methylcytosine"
gcccttacatgtgaccggcctgtggtcagagcaccctacccaggctggggttgggctgcacgagcatcctggccagccctgccccaaatgagacaggaagtgctctgaagtgcctctgtagc

SEQ ID NO: 7626 - DNA, 122 bp, Homo sapiens
  misc_feature (61)..(62): /note="This region represents a CpG dinucleotide"
  misc_feature (61)..(61): /note="Nucleotide may be methylated to form 5-methylcytosine"
gacgacatagaacaagcctcacagttcctctgcctgttgaaggtcaactcttaagtaagacggaatttagcttgcaagctgtttatgaaggtgcatctttggggtcaacatcagtagaaagg

SEQ ID NO: 7627 - DNA, 122 bp, Homo sapiens
  misc_feature (61)..(62): /note="This region represents a CpG dinucleotide"
  misc_feature (61)..(61): /note="Nucleotide may be methylated to form 5-methylcytosine"
ctgtagtcccagctacttggagggctgaggtgggaggattgcttgagcccaggagtttgacgctgcagtgagcgagattgtgccactcgtaacagagcgagaccctgtctcaccaaaaaaaa

SEQ ID NO: 7628 - DNA, 122 bp, Homo sapiens
  misc_feature (61)..(62): /note="This region represents a CpG dinucleotide"
  misc_feature (61)..(61): /note="Nucleotide may be methylated to form 5-methylcytosine"
aacgtaagtcacacgtgaatagcggtggaaatccaagaattttatctcatttcctgtacacgttactgaactgttcacctctgagtgtaatgctttcctggtggcacatggagaatataatc

SEQ ID NO: 7629 - DNA, 122 bp, Homo sapiens
  misc_feature (61)..(62): /note="This region represents a CpG dinucleotide"
  misc_feature (61)..(61): /note="Nucleotide may be methylated to form 5-methylcytosine"
ctcctgactcccagtcaggaaacagcataaccaagtatcctccattaggacagattgtatcgtgacagaggaaacacattactcttcaactttatcaccagggtaataaagacaggcaataa

SEQ ID NO: 7630 - DNA, 122 bp, Homo sapiens
  misc_feature (61)..(62): /note="This region represents a CpG dinucleotide"
  misc_feature (61)..(61): /note="Nucleotide may be methylated to form 5-methylcytosine"
tgtattggcccaggacagccatttaccaccttgtttttggttatttcagctgctgctaggcgttctccttcaaacacacctggattgctgtgaggacactgccccacaggcggaacacaatg

SEQ ID NO: 7631 - DNA, 122 bp, Homo sapiens
  misc_feature (61)..(62): /note="This region represents a CpG dinucleotide"
  misc_feature (61)..(61): /note="Nucleotide may be methylated to form 5-methylcytosine"
attagcttcaaaaaaagtgactcagtgcagttgaacattcacttactaaacataattaaccgtctcttattataaagttaatactatgggctattgtgatgtcatgattgcttttggtttta

SEQ ID NO: 7632 - DNA, 122 bp, Homo sapiens
  misc_feature (61)..(62): /note="This region represents a CpG dinucleotide"
  misc_feature (61)..(61): /note="Nucleotide may be methylated to form 5-methylcytosine"
gagagctgccaaaacaactaaaataacagcctaacctttcattttcattttctccttgagcgggaatgtgaaacattgcagcttttatctgggttgtgtgttcaagtttatttgcttgcttg

SEQ ID NO: 7633 - DNA, 122 bp, Homo sapiens
  misc_feature (61)..(62): /note="This region represents a CpG dinucleotide"
  misc_feature (61)..(61): /note="Nucleotide may be methylated to form 5-methylcytosine"
gtgaccgtggaagctggggtttcatcacagcaatccaccaagtttcatgtttctattttccgttgtcaaagagatttttaaaatatcaatatgcagagacagaaacaaaatagaacaaaaac

SEQ ID NO: 7634 - DNA, 122 bp, Homo sapiens
  misc_feature (61)..(62): /note="This region represents a CpG dinucleotide"
  misc_feature (61)..(61): /note="Nucleotide may be methylated to form 5-methylcytosine"
ccctatccaattgtcacaaaggctagcccatggccagtcctgtgaggggctggtgctgggcgtggaagctcttcttgaccttcttacttgtggcatgactcgaaaagttgcgaacctttctg

SEQ ID NO: 7635 - DNA, 122 bp, Homo sapiens
  misc_feature (61)..(62): /note="This region represents a CpG dinucleotide"
  misc_feature (61)..(61): /note="Nucleotide may be methylated to form 5-methylcytosine"
tatgacttcttgctgagcttcacatgagctccttttagataacgtgccttctatcttggacgatttattcactttcatgttccctggaatttattgctaaacgttgacgtgaatgcttacag

SEQ ID NO: 7636 - DNA, 122 bp, Homo sapiens
  misc_feature (61)..(62): /note="This region represents a CpG dinucleotide"
  misc_feature (61)..(61): /note="Nucleotide may be methylated to form 5-methylcytosine"
cgtgtccagaaagccagtgctgggcctttagctctagtccatcagggtaatgccaaaccccggcccagcccagtccctaagactgacagccatggagggcagggccaggcctcccagggccc

SEQ ID NO: 7637 - DNA, 122 bp, Homo sapiens
  misc_feature (61)..(62): /note="This region represents a CpG dinucleotide"
  misc_feature (61)..(61): /note="Nucleotide may be methylated to form 5-methylcytosine"
ctgggaggctgaacaacagacctgcactctctcgcagctcggaggctgcaggtctgaaatcgaggggctgacagcgctggtttcctctggaggctgcgagggagaaaccgtcccctgcctct

SEQ ID NO: 7638 - DNA, 122 bp, Homo sapiens
  misc_feature (61)..(62): /note="This region represents a CpG dinucleotide"
  misc_feature (61)..(61): /note="Nucleotide may be methylated to form 5-methylcytosine"
caaaaccttttgattctactcatcccctggttaataatttccagtttacccagcaggctacgtaacatcccctttcctgggaaagaatttctgtgccccggctggcagtgaactggtcccct

SEQ ID NO: 7639 - DNA, 122 bp, Homo sapiens
  misc_feature (61)..(62): /note="This region represents a CpG dinucleotide"
  misc_feature (61)..(61): /note="Nucleotide may be methylated to form 5-methylcytosine"
aacttccctggtggctgacagctgcgtggacattcagcggccctacctttttccgtcaggcgccagcagcccctctgtgtagaggtgagacaggccaagctgcagcttctagacgagacgcc

SEQ ID NO: 7640 - DNA, 122 bp, Homo sapiens
  misc_feature (61)..(62): /note="This region represents a CpG dinucleotide"
  misc_feature (61)..(61): /note="Nucleotide may be methylated to form 5-methylcytosine"
cagcccaggtgaacacagtcaactgggacaaaatgtggcatctgccagggcaggtaggggcgtccaaggagagaatatagtcatgggttgtttgttagtttctggttgggccagtaaagccc

SEQ ID NO: 7641 - DNA, 122 bp, Homo sapiens
  misc_feature (61)..(62): /note="This region represents a CpG dinucleotide"
  misc_feature (61)..(61): /note="Nucleotide may be methylated to form 5-methylcytosine"
tatctggccatcagagtcttactaattttctttgttgatttgtaaaagttccttttaaagcgttccttgtatagaaaagatatttgactggttttaaaacacatttttgttttcttttgact

SEQ ID NO: 7642 - DNA, 122 bp, Homo sapiens
  misc_feature (61)..(62): /note="This region represents a CpG dinucleotide"
  misc_feature (61)..(61): /note="Nucleotide may be methylated to form 5-methylcytosine"
actgctttccatgagcctccttgatttgttaaatattgaaggcacttacctaaatactgccgtgttgccagtagcgtgccggttaccagtttggccgttcttgtacacaatatgtgagtaat

SEQ ID NO: 7643 - DNA, 122 bp, Homo sapiens
  misc_feature (61)..(62): /note="This region represents a CpG dinucleotide"
  misc_feature (61)..(61): /note="Nucleotide may be methylated to form 5-methylcytosine"
ccaatcccttatgaatagtttcctctccccaaatttaatcttagtctagattctaaatttcgtactatcataggatcatataattatagaattaaagagacttgagtcatcatttatttcag

SEQ ID NO: 7644 - DNA, 122 bp, Homo sapiens
  misc_feature (61)..(62): /note="This region represents a CpG dinucleotide"
  misc_feature (61)..(61): /note="Nucleotide may be methylated to form 5-methylcytosine"
atagtatataaaaggtttgggcgtcgatcagcgagggagcagcaaatggccggcggttggcgcctcgcggggggcgggcggcgcagagtagggggcggtggccagggccgaggcgtcgcagc

SEQ ID NO: 7645 - DNA, 122 bp, Homo sapiens
  misc_feature (61)..(62): /note="This region represents a CpG dinucleotide"
  misc_feature (61)..(61): /note="Nucleotide may be methylated to form 5-methylcytosine"
tacacacaatgtccacagtggcactattcctaagcaccaagacgatgggaacaacccacacgtccatcagcagatgaacggatgaagaatgtggtctacataaacaatggaacatgactgag

SEQ ID NO: 7646 - DNA, 122 bp, Homo sapiens
  misc_feature (61)..(62): /note="This region represents a CpG dinucleotide"
  misc_feature (61)..(61): /note="Nucleotide may be methylated to form 5-methylcytosine"
gctccaagaagggtagctctgggatcccgggcaggaaattggtgacaaggtgacaaggtgcgcgtgtcacagctgcccagttcacggcttattcagtcttctccctccccccactccccacc

SEQ ID NO: 7647 - DNA, 122 bp, Homo sapiens
  misc_feature (61)..(62): /note="This region represents a CpG dinucleotide"
  misc_feature (61)..(61): /note="Nucleotide may be methylated to form 5-methylcytosine"
aataatccctcactcccagataacactggatttgactcaagtggccaaggctatccaaggcggtgagagggtcagtttgtccaggtcttcatgaccctgccttagtaatcctctctgagttg

SEQ ID NO: 7648 - DNA, 122 bp, Homo sapiens
  misc_feature (61)..(62): /note="This region represents a CpG dinucleotide"
  misc_feature (61)..(61): /note="Nucleotide may be methylated to form 5-methylcytosine"
gaagaggggggccaggcttctttaaacaatcttcctagcatttgtagctgctgtagtatacgtggtacgatagttcccccaccgtaatccacagttttgctttctgtggtttcagttacctg

SEQ ID NO: 7649 - DNA, 122 bp, Homo sapiens
  misc_feature (61)..(62): /note="This region represents a CpG dinucleotide"
  misc_feature (61)..(61): /note="Nucleotide may be methylated to form 5-methylcytosine"
ctgactggggttacatcagccttgagtcagcctctgggtgggggggcaattttgggggtgcgctctgtcccttaccttgccagctccccagaacctctcctctttggtcacccatcgtcagg

SEQ ID NO: 7650 - DNA, 122 bp, Homo sapiens
  misc_feature (61)..(62): /note="This region represents a CpG dinucleotide"
  misc_feature (61)..(61): /note="Nucleotide may be methylated to form 5-methylcytosine"
ggtgggcgctgagtgagggagtccccatgtctggtttcctctgtttgtccctcacctggtcgagtcccagaccctactgatcttggcctgtccagccaccaacagtaggctgccttccagtg

SEQ ID NO: 7651 - DNA, 122 bp, Homo sapiens
  misc_feature (61)..(62): /note="This region represents a CpG dinucleotide"
  misc_feature (61)..(61): /note="Nucleotide may be methylated to form 5-methylcytosine"
gtcccctggtccatatgggcccccccgcccatggggttgggctggtccttatagtgcctacgttagtctgtgtggagcccctggccagcgggggagaaaaaggtggcttctggtccgtctgt

SEQ ID NO: 7652 - DNA, 122 bp, Homo sapiens
  misc_feature (61)..(62): /note="This region represents a CpG dinucleotide"
  misc_feature (61)..(61): /note="Nucleotide may be methylated to form 5-methylcytosine"
caccaggcaagaagtccatgcagatttacttttagtagttcacatgacaaataaatactgcgtttgatttccaaacattaaaccatagtatattatagatagatatagagttatcattcaaa

SEQ ID NO: 7653 - DNA, 122 bp, Homo sapiens
  misc_feature (61)..(62): /note="This region represents a CpG dinucleotide"
  misc_feature (61)..(61): /note="Nucleotide may be methylated to form 5-methylcytosine"
tcatctcaggattttccatttctctgccttaatggaggctaagtactcacactatccctacgtttgtccaggaaagccaggacgccactcacctgcctgtcatctgggcttactgcctgcac

SEQ ID NO: 7654 - DNA, 122 bp, Homo sapiens
  misc_feature (61)..(62): /note="This region represents a CpG dinucleotide"
  misc_feature (61)..(61): /note="Nucleotide may be methylated to form 5-methylcytosine"
tactcggtttctggttcattgtaatttcatgtacattcacttgagtattactttagcatacgtgtgagcttggctagtgtgatactgtaggcaaatattgtaattctcaaggggaagtttca

SEQ ID NO: 7655 - DNA, 122 bp, Homo sapiens
  misc_feature (61)..(62): /note="This region represents a CpG dinucleotide"
  misc_feature (61)..(61): /note="Nucleotide may be methylated to form 5-methylcytosine"
gtttttgcttggctctgcttgccagctgttcccctctgcactgtcagggagggctcctgtcggggtcaggcgggctttctgtttgtccagttagaggacctgtctctccaggacgcaggtcc

SEQ ID NO: 7656 - DNA, 122 bp, Homo sapiens
  misc_feature (61)..(62): /note="This region represents a CpG dinucleotide"
  misc_feature (61)..(61): /note="Nucleotide may be methylated to form 5-methylcytosine"
gagctaggggcgggacagagccctggggaagagcccagccagaccatggggttggagcaccgaggacctactacgggttcaggttcccggcccagggttaaagtggacggagctctaagctg

SEQ ID NO: 7657 - DNA, 122 bp, Homo sapiens
  misc_feature (61)..(62): /note="This region represents a CpG dinucleotide"
  misc_feature (61)..(61): /note="Nucleotide may be methylated to form 5-methylcytosine"
ttatacttaagtaaacaaacacacaacttacctagaggcccagaacaaataacaaacaatcggggaagagggcatgacctctcaggtagattacctcctcattgtcatttctattagggtag

SEQ ID NO: 7658 - DNA, 122 bp, Homo sapiens
  misc_feature (61)..(62): /note="This region represents a CpG dinucleotide"
  misc_feature (61)..(61): /note="Nucleotide may be methylated to form 5-methylcytosine"
tgggatttgtgcccttatagaaagggacacaacatgagatgatcttgctctgggccatgccgggaggaagggagaaggtggctgtcaacgagccaggaagcggcactcctgacactggatct

SEQ ID NO: 7659 - DNA, 122 bp, Homo sapiens
  misc_feature (61)..(62): /note="This region represents a CpG dinucleotide"
  misc_feature (61)..(61): /note="Nucleotide may be methylated to form 5-methylcytosine"
cattagcatgacaatactggaggcagagataaagctagagagctttaaagctggaaggagcgggaatgtgtgggttaagacaaccaactcccatttgagtcctaactgagaatgtcattagg

SEQ ID NO: 7660 - DNA, 122 bp, Homo sapiens
  misc_feature (61)..(62): /note="This region represents a CpG dinucleotide"
  misc_feature (61)..(61): /note="Nucleotide may be methylated to form 5-methylcytosine"
cagtgctaaaggcccggctgtcactgctctgcagaatggtgaccttcagggagcccccggcgccccatacctgcatggggagtaggaactgaacttccatcaactgtgtacttatagtgggc

SEQ ID NO: 7661 - DNA, 122 bp, Homo sapiens
  misc_feature (61)..(62): /note="This region represents a CpG dinucleotide"
  misc_feature (61)..(61): /note="Nucleotide may be methylated to form 5-methylcytosine"
ggaaagcagaagtggggctggctggctcaggccgggggctacaggcactctccagcaacacgcaggcagatgcaaaagtgggaactcagaaagctcagggaacagacatcttaaaaaaaaaa

SEQ ID NO: 7662 - DNA, 122 bp, Homo sapiens
  misc_feature (61)..(62): /note="This region represents a CpG dinucleotide"
  misc_feature (61)..(61): /note="Nucleotide may be methylated to form 5-methylcytosine"
gggaagggggcggaggccgaccgaaggcggctagggactggctgaagagggttagcgaaacgttagcggtcgggtctgggcagggggtggagctggttgaaggaacggggcagtcccctgag

SEQ ID NO: 7663 - DNA, 122 bp, Homo sapiens
  misc_feature (61)..(62): /note="This region represents a CpG dinucleotide"
  misc_feature (61)..(61): /note="Nucleotide may be methylated to form 5-methylcytosine"
ctaaaatgggggctgttacatttctgccatgacagagaagtttttggggggaaatcccaacgatgaccacagcctaaaaatgcacagcttagaggggagtttccaatggacttggtcttcag

SEQ ID NO: 7664 - DNA, 122 bp, Homo sapiens
  misc_feature (61)..(62): /note="This region represents a CpG dinucleotide"
  misc_feature (61)..(61): /note="Nucleotide may be methylated to form 5-methylcytosine"
gtccctagttgtctttttctttgatctctctctagttaagacttgctcctggaggcaaagcgtggtggtgtctggctcagcatagcacctgccataattacaaatggcaattatggaatgaa

SEQ ID NO: 7665 - DNA, 122 bp, Homo sapiens
  misc_feature (61)..(62): /note="This region represents a CpG dinucleotide"
  misc_feature (61)..(61): /note="Nucleotide may be methylated to form 5-methylcytosine"
gatatttaaaggacacaggaagtacaggcacttccttccccgactgtaaaatctggttggcgtactaagtcatagaaatataaatagttcagtacccatataaagaggtgtgactaagaacc

SEQ ID NO: 7666 - DNA, 122 bp, Homo sapiens
  misc_feature (61)..(62): /note="This region represents a CpG dinucleotide"
  misc_feature (61)..(61): /note="Nucleotide may be methylated to form 5-methylcytosine"
agagtaaatgacactacaatacagtgctgggctcacagctccggaaatgctcataggctccggaaatgctcagtcaccttctctgttagtcaccttgttccatcaagcagcattttttcctc

SEQ ID NO: 7667 - DNA, 122 bp, Homo sapiens
  misc_feature (61)..(62): /note="This region represents a CpG dinucleotide"
  misc_feature (61)..(61): /note="Nucleotide may be methylated to form 5-methylcytosine"
ggctcaggtgcatccgcccaatctgggatcattagtcagatctggtgacaatggtgaaggcgggaagcctccccaaggacaaatactatggttattttaagcctctctgtgtcatcactgtg

SEQ ID NO: 7668 - DNA, 122 bp, Homo sapiens
  misc_feature (61)..(62): /note="This region represents a CpG dinucleotide"
  misc_feature (61)..(61): /note="Nucleotide may be methylated to form 5-methylcytosine"
aaaatgtaagtgtatgtgacttaccacaaagacctagaatttcacatttcttatattttacgtgcaggtgctgaggtcattatttctcagatttgtcctgttatgagaatattacctaagat

SEQ ID NO: 7669 - DNA, 122 bp, Homo sapiens
  misc_feature (61)..(62): /note="This region represents a CpG dinucleotide"
  misc_feature (61)..(61): /note="Nucleotide may be methylated to form 5-methylcytosine"
ggatgtgagtaacgggtagactcaagcctcaaactcacatcttctgactcatttattttccgctgacatgtctcaccccagaggctggcctgggcaggaccaaccactgcaggtgttcacac

SEQ ID NO: 7670 - DNA, 122 bp, Homo sapiens
  misc_feature (61)..(62): /note="This region represents a CpG dinucleotide"
  misc_feature (61)..(61): /note="Nucleotide may be methylated to form 5-methylcytosine"
gtcctggaggcacatggagaaggttgacaaagcctcattcctctgaaacatttcatgcaacggatttggttgaaaccccagattgtgatctggagtctttagcaactgtgctcatttcctac

SEQ ID NO: 7671 - DNA, 122 bp, Homo sapiens
  misc_feature (61)..(62): /note="This region represents a CpG dinucleotide"
  misc_feature (61)..(61): /note="Nucleotide may be methylated to form 5-methylcytosine"
ttatttcccccgttttgcagcccctcttatttttgtgtcgaggttggggtcggtactgaccgtcctgccagcagctctgaattttgaaaatacagatatcaccttcggggaagggggaaagc

SEQ ID NO: 7672 - DNA, 122 bp, Homo sapiens
  misc_feature (61)..(62): /note="This region represents a CpG dinucleotide"
  misc_feature (61)..(61): /note="Nucleotide may be methylated to form 5-methylcytosine"
ttgtcctatctccctgtgtgtgcaggactggctcagtctgcagcttttattagaaatcaacggaagccaccagaacacagagccctgaatgaacactgtggacctggatcatccgacctgaa

SEQ ID NO: 7673 - DNA, 122 bp, Homo sapiens
  misc_feature (61)..(62): /note="This region represents a CpG dinucleotide"
  misc_feature (61)..(61): /note="Nucleotide may be methylated to form 5-methylcytosine"
ttagcacatgactatgggctaggcattccgcttggttatcccgcttcatagacgtgagcccggttactccgacacaccgtggccccaggcagcctccccgtcctcaccaccttttcttctgt

SEQ ID NO: 7674 - DNA, 122 bp, Homo sapiens
  misc_feature (61)..(62): /note="This region represents a CpG dinucleotide"
  misc_feature (61)..(61): /note="Nucleotide may be methylated to form 5-methylcytosine"
aatatgcttttataattttattctatgtagccaatttgttatcactgttgtgtgtgtgggcgcatgtgtgtgtgcacatgttttgatggtttatatgtaaagttttttggctggcttactac

SEQ ID NO: 7675 - DNA, 122 bp, Homo sapiens
  misc_feature (61)..(62): /note="This region represents a CpG dinucleotide"
  misc_feature (61)..(61): /note="Nucleotide may be methylated to form 5-methylcytosine"
ccactttctgtcagagctctggcttgactgtggagttcagaggtttcctaacatagtacacgtcaggactgactcacgatgaagcactccttaaaaaattagaagtgtgtcctcatgttttg

SEQ ID NO: 7676 - DNA, 122 bp, Homo sapiens
  misc_feature (61)..(62): /note="This region represents a CpG dinucleotide"
  misc_feature (61)..(61): /note="Nucleotide may be methylated to form 5-methylcytosine"
gggtgtaacgctgcggtctgaggaccctgaaccctttttccttccttaaaaatgagatagcggccaggcgcggtgactcatgcctgtaatcccagcactttgggaggccaaggcagaaggtc

SEQ ID NO: 7677 - DNA, 122 bp, Homo sapiens
  misc_feature (61)..(62): /note="This region represents a CpG dinucleotide"
  misc_feature (61)..(61): /note="Nucleotide may be methylated to form 5-methylcytosine"
taagaacatcagtgttaccgtccttagtatcaaataaatgcaggcaaaagcacaagactacggagttttatttagcctgaacagcctagtagtgttggatttaggaggtgtttaatgctgac

SEQ ID NO: 7678 - DNA, 122 bp, Homo sapiens
  misc_feature (61)..(62): /note="This region represents a CpG dinucleotide"
  misc_feature (61)..(61): /note="Nucleotide may be methylated to form 5-methylcytosine"
agtcactgcctttattctgctttgagtctgcattttcttccttggcatgcctgtgattcacgcattctcagcctccccgaaagtgcccatcagggctcccctctgtttaatgagatccacat

SEQ ID NO: 7679 - DNA, 122 bp, Homo sapiens
  misc_feature (61)..(62): /note="This region represents a CpG dinucleotide"
  misc_feature (61)..(61): /note="Nucleotide may be methylated to form 5-methylcytosine"
taaattgctacttgatttgtgtgcagtgtttctttgtctgcttataaggcctattttagtcgctggaaatggttattcaatcagccaatatttggacaagtgtacactgtattcaaggtgat

SEQ ID NO: 7680 - DNA, 122 bp, Homo sapiens
  misc_feature (61)..(62): /note="This region represents a CpG dinucleotide"
  misc_feature (61)..(61): /note="Nucleotide may be methylated to form 5-methylcytosine"
tttattataagcgccccgagggctgtgtccacatctccttaatgttctggaagcttcgcccgctctccgcagaccagtgcagggcggtacatattgattggtgcgggcgtgcttgttctatt

SEQ ID NO: 7681 - DNA, 122 bp, Homo sapiens
  misc_feature (61)..(62): /note="This region represents a CpG dinucleotide"
  misc_feature (61)..(61): /note="Nucleotide may be methylated to form 5-methylcytosine"
tttaccagctgcccttcagggctgaccttggagctgaagcacctgacagctgtgaaccaacgtcagcagttgtggaaacaagataccgcagtttctttacccctaccccaacagctcatgca

SEQ ID NO: 7682 - DNA, 122 bp, Homo sapiens
  misc_feature (61)..(62): /note="This region represents a CpG dinucleotide"
  misc_feature (61)..(61): /note="Nucleotide may be methylated to form 5-methylcytosine"
ctgcttgcaaagctgttgcattttccattcccaccagcagtgtgtgaaggttcagcctgccgtactttaatgattattggtgacactctttcaagtaacttgttggtaataagaagtcaatt

SEQ ID NO: 7683 - DNA, 122 bp, Homo sapiens
  misc_feature (61)..(62): /note="This region represents a CpG dinucleotide"
  misc_feature (61)..(61): /note="Nucleotide may be methylated to form 5-methylcytosine"
ctttttgaaaacagacttctaagtaaggacaactaccttagaaagacctggaattctgaacggagaggctgcttgttctctgacaaactttagaagtcaagttttaagtctcagtatgtttc

SEQ ID NO: 7684 - DNA, 122 bp, Homo sapiens
  misc_feature (61)..(62): /note="This region represents a CpG dinucleotide"
  misc_feature (61)..(61): /note="Nucleotide may be methylated to form 5-methylcytosine"
ctgatcaccatggcaacacacaggggtgggtactgtggtttctctgcctgaagacgcactcgtcaaagactacttggtgttacagaattctggtgcagtgaagcaacagttctgggacatat

SEQ ID NO: 7685 - DNA, 122 bp, Homo sapiens
  misc_feature (61)..(62): /note="This region represents a CpG dinucleotide"
  misc_feature (61)..(61): /note="Nucleotide may be methylated to form 5-methylcytosine"
tgtgtgttcaggacaggaggactaaggaccaaacaggtttgggaatgacagatcccttgacggaactggctgacaactttgctcaccagtcacagcagggcagcccagggagtgaacagggg

SEQ ID NO: 7686 - DNA, 122 bp, Homo sapiens
  misc_feature (61)..(62): /note="This region represents a CpG dinucleotide"
  misc_feature (61)..(61): /note="Nucleotide may be methylated to form 5-methylcytosine"
tgcccccaacaccacttcagcttctgccagacagatggaactctccagcatgaaaatctgcgcagccattccaacaagcagggtaggtgaaacttgaattaaaattctcccctctttatttt

SEQ ID NO: 7687 - DNA, 122 bp, Homo sapiens
  misc_feature (61)..(62): /note="This region represents a CpG dinucleotide"
  misc_feature (61)..(61): /note="Nucleotide may be methylated to form 5-methylcytosine"
aactttggcctgagctctgcgatggtatctgcaaacctagcattagctttgcagcattttcgtgtgggcaggtggttgcttaatttgcactttaacatgccagcagcagatcctggcacaga

SEQ ID NO: 7688 - DNA, 122 bp, Homo sapiens
  misc_feature (61)..(62): /note="This region represents a CpG dinucleotide"
  misc_feature (61)..(61): /note="Nucleotide may be methylated to form 5-methylcytosine"
gtcatgatcatgatcatgacgatagttggcatgtattgagtatgcatgcatcatgtgccacgtattgaactcaaaaaactcttaagtgtgatattttcagaaccttctacaatccttcaagc

SEQ ID NO: 7689 - DNA, 122 bp, Homo sapiens
  misc_feature (61)..(62): /note="This region represents a CpG dinucleotide"
  misc_feature (61)..(61): /note="Nucleotide may be methylated to form 5-methylcytosine"
gcagacattttcgtgggctccagggacgacacttctaaaggagaggcgaggttcactggacgttttgggaaactgtaaggcaaaaataaaattctaagcctcccaaccgactgaatggacct

SEQ ID NO: 7690 - DNA, 122 bp, Homo sapiens
  misc_feature (61)..(62): /note="This region represents a CpG dinucleotide"
  misc_feature (61)..(61): /note="Nucleotide may be methylated to form 5-methylcytosine"
cctccccaggcttcaaggaggtggccctgggccgtgaccctacttctgtcggcgtctgttcgggcgcccgcagaagccagactcttgggcagggaagacgctaaccgaggtctccaaagttc

SEQ ID NO: 7691 - DNA, 122 bp, Homo sapiens
  misc_feature (61)..(62): /note="This region represents a CpG dinucleotide"
  misc_feature (61)..(61): /note="Nucleotide may be methylated to form 5-methylcytosine"
gtgacgtatctatataacccatagacacttcctggcaataccttgtgaaacttgccttttcgtgtatagtagtttcctaacttcttgttctagattaagcttcagtgaaaagtgattaatat

SEQ ID NO: 7692 - DNA, 122 bp, Homo sapiens
  misc_feature (61)..(62): /note="This region represents a CpG dinucleotide"
  misc_feature (61)..(61): /note="Nucleotide may be methylated to form 5-methylcytosine"
aggaactaaacatgcaaggcttctgctttctctcgtctctctcttaccccttagagaagccgctggctgaactaaaaataagtcacttaaactaagttgttaaagagtcatcgtactcaatt

SEQ ID NO: 7693 - DNA, 122 bp, Homo sapiens
  misc_feature (61)..(62): /note="This region represents a CpG dinucleotide"
  misc_feature (61)..(61): /note="Nucleotide may be methylated to form 5-methylcytosine"
ctttccttgtcacaaattaaagtcctctccagtggccaaggatttatcagcaaccttgttcgtaatgatcatcttatgaatggtgattaagaaaaataaatcacttcctcttgctaataaat

SEQ ID NO: 7694 - DNA, 122 bp, Homo sapiens
  misc_feature (61)..(62): /note="This region represents a CpG dinucleotide"
  misc_feature (61)..(61): /note="Nucleotide may be methylated to form 5-methylcytosine"
gtccagcggatccctttggtcacttagctgtctcggttgtcagatcaactgtcctgttgtcgcattgcttgtgtttgtcacccttatttcacttaataatgatcccaaagcacaaatagtgt

SEQ ID NO: 7695 - DNA, 122 bp, Homo sapiens
  misc_feature (61)..(62): /note="This region represents a CpG dinucleotide"
  misc_feature (61)..(61): /note="Nucleotide may be methylated to form 5-methylcytosine"
tgactcatttaaccttaattacttccttagaggccccatctccaaatacagccacacaggcggttagggctttagcataggaattgcagagacacagacattcagtccatagcaaccctcct

SEQ ID NO: 7696 - DNA, 122 bp, Homo sapiens
  misc_feature (61)..(62): /note="This region represents a CpG dinucleotide"
  misc_feature (61)..(61): /note="Nucleotide may be methylated to form 5-methylcytosine"
atcttggtgaggagcaggattcctgtaccttcacagggagcacagctgcgtaagtgcaaacgctaagcatgtcaggtcagaattctagatttcccctcccaacgtgcaactccacctccttt

SEQ ID NO: 7697 - DNA, 122 bp, Homo sapiens
  misc_feature (61)..(62): /note="This region represents a CpG dinucleotide"
  misc_feature (61)..(61): /note="Nucleotide may be methylated to form 5-methylcytosine"
cccctgaggtggagccccgcctagtgtactgctacccagtccggctggctgtgtctgcaccgcccatgcccagcgtggagatgcacatggagaacaacgtggtctgcatccggtataaggga

SEQ ID NO: 7698 - DNA, 122 bp, Homo sapiens
  misc_feature (61)..(62): /note="This region represents a CpG dinucleotide"
  misc_feature (61)..(61): /note="Nucleotide may be methylated to form 5-methylcytosine"
aaaaaaagactagaagtaagaattctacaatcattagactgggcagatgaactcttaagacgggaagaaaagttgcaaaacgttagagctttaaaataattttacttggttttggaatactt

SEQ ID NO: 7699 - DNA, 122 bp, Homo sapiens
  misc_feature (61)..(62): /note="This region represents a CpG dinucleotide"
  misc_feature (61)..(61): /note="Nucleotide may be methylated to form 5-methylcytosine"
cattccatctatctagagcagtagctctcaggcctgtccataagttaaaatcacctggaccgctgattaagcaatgactctctctaggccctacccccagagagattctgatgcagtcggtg

SEQ ID NO: 7700 - DNA, 122 bp, Homo sapiens
  misc_feature (61)..(62): /note="This region represents a CpG dinucleotide"
  misc_feature (61)..(61): /note="Nucleotide may be methylated to form 5-methylcytosine"
caatcttgtcttaagctattaataaaaaacatgtgcactatcatatcacagttgggagggcggggtggggattgttacattttgttacattttgttagctgtatttcaacatactggtttcc

SEQ ID NO: 7701 - DNA, 122 bp, Homo sapiens
  misc_feature (61)..(62): /note="This region represents a CpG dinucleotide"
  misc_feature (61)..(61): /note="Nucleotide may be methylated to form 5-methylcytosine"
gtaagtaacatgaaatagtattgtatacctataaccatttgagctaaaaccaaaaccagacgttgttgtcattgtatgaggaattcactaatgtatttagcattctcaatatagtaaaatcc

SEQ ID NO: 7702 - DNA, 122 bp, Homo sapiens
  misc_feature (61)..(62): /note="This region represents a CpG dinucleotide"
  misc_feature (61)..(61): /note="Nucleotide may be methylated to form 5-methylcytosine"
tgaggcaccctacaggcaatcaaccaagtaacatcgacagtcattggtattgaggaaacccgccaaggctgctctagacttgggtcggcaaaccacagcctgcgggtaagtccagcctgtgg

SEQ ID NO: 7703 - DNA, 122 bp, Homo sapiens
  misc_feature (61)..(62): /note="This region represents a CpG dinucleotide"
  misc_feature (61)..(61): /note="Nucleotide may be methylated to form 5-methylcytosine"
atcccctcctgctctttcagccctcccagtctaactggagagacatccacaggcaaatctcgctgcatgattctgtgatcaatgctgtggttaccccagggagcatttgattatgaccctga

SEQ ID NO: 7704 - DNA, 122 bp, Homo sapiens
  misc_feature (61)..(62): /note="This region represents a CpG dinucleotide"
  misc_feature (61)..(61): /note="Nucleotide may be methylated to form 5-methylcytosine"
cctcaagaacgtgtacgcgcaggggcgtttccttgtccgttaataacacaagctacaggccgagcgtggtggctcacacctgtaatcccagcactttgggaggccgagacgggtggatcacg

SEQ ID NO: 7705 - DNA, 122 bp, Homo sapiens
  misc_feature (61)..(62): /note="This region represents a CpG dinucleotide"
  misc_feature (61)..(61): /note="Nucleotide may be methylated to form 5-methylcytosine"
gacctatgttttctaatagggagcctgctgctctggccatcagcctttagtttttcccctcgctgggattttcagatacttaggacgcagcaaaggtgcccaggcgattataatggtgggag

SEQ ID NO: 7706 - DNA, 122 bp, Homo sapiens
  misc_feature (61)..(62): /note="This region represents a CpG dinucleotide"
  misc_feature (61)..(61): /note="Nucleotide may be methylated to form 5-methylcytosine"
atcatataagtaaataaagccctaggcaagcaggagataagtgcacagcagtgctccatacgaagcccattattgtcattggcatagagagttgtgtgatatctttcctccaaagactgaaa

SEQ ID NO: 7707 - DNA, 122 bp, Homo sapiens
  misc_feature (61)..(62): /note="This region represents a CpG dinucleotide"
  misc_feature (61)..(61): /note="Nucleotide may be methylated to form 5-methylcytosine"
tcctaactgaactgaaagccttcattctaaccattagtttggtcaggaacatttcagggacgccagggtggctgttttattttgcacttcctttactgccctcccagcagcctacctagcag

SEQ ID NO: 7708 - DNA, 122 bp, Homo sapiens
  misc_feature (61)..(62): /note="This region represents a CpG dinucleotide"
  misc_feature (61)..(61): /note="Nucleotide may be methylated to form 5-methylcytosine"
tgctgaatactgaccaatctctaattccaagtggcaatgtcttcggtgttttacaaaaggcgctagctatctaaggcatctgctctaaaggactaacaaaacaaatcccagaaacaggaagt

SEQ ID NO: 7709 - DNA, 122 bp, Homo sapiens
  misc_feature (61)..(62): /note="This region represents a CpG dinucleotide"
  misc_feature (61)..(61): /note="Nucleotide may be methylated to form 5-methylcytosine"
gcagctgtttacattaattatcttgtggatggagtccctcactgagctgatatgctgttacgttagtgctttcaggttttgggttgaatcacttaggtatgcctacacacttgctttgagaa

SEQ ID NO: 7710 - DNA, 122 bp, Homo sapiens
  misc_feature (61)..(62): /note="This region represents a CpG dinucleotide"
  misc_feature (61)..(61): /note="Nucleotide may be methylated to form 5-methylcytosine"
ctgattctcacatgtaaatccctttgggttataaaagacaagtgcatgcaggcacacacacgctcacacatgtcagctcaggggcatgagcagccttctcctcccaggcccgggccatcagg

SEQ ID NO: 7711 - DNA, 122 bp, Homo sapiens
  misc_feature (61)..(62): /note="This region represents a CpG dinucleotide"
  misc_feature (61)..(61): /note="Nucleotide may be methylated to form 5-methylcytosine"
gtctctcagcaagtggcatcactgaatctctagatacctaagccaaggcctgggaatcttcgtctactcattctcagtcatcccttacactcaattagtcatcaggttatcttaagtctccc

SEQ ID NO: 7712 - DNA, 122 bp, Homo sapiens
  misc_feature (61)..(62): /note="This region represents a CpG dinucleotide"
  misc_feature (61)..(61): /note="Nucleotide may be methylated to form 5-methylcytosine"
ttcagttatacccaccctgtgggtgtcatggaacctgctagtaattaggactgcccctgccgggcatgtaaaatttagattttacaaggaaatatcattctgctgctttcttggttaattaa

SEQ ID NO: 7713 - DNA, 122 bp, Homo sapiens
  misc_feature (61)..(62): /note="This region represents a CpG dinucleotide"
  misc_feature (61)..(61): /note="Nucleotide may be methylated to form 5-methylcytosine"
gatcctccaggataacaatgttctcatttccagaagatcattacgcaaggcactttctttcgtcctagtacagataagggtggttcaaaaagactcaaaagtttgcccatgggctgtgcatg

SEQ ID NO: 7714 - DNA, 122 bp, Homo sapiens
  misc_feature (61)..(62): /note="This region represents a CpG dinucleotide"
  misc_feature (61)..(61): /note="Nucleotide may be methylated to form 5-methylcytosine"
cctccaaggggaggctgtggcaagacgacttctgctccctggcggtgagtgaagctcagacgcttagatgggatttcagtggagagctagtctcctcaggaaacctgtgagctccctcacca

SEQ ID NO: 7715 - DNA, 122 bp, Homo sapiens
  misc_feature (61)..(62): /note="This region represents a CpG dinucleotide"
  misc_feature (61)..(61): /note="Nucleotide may be methylated to form 5-methylcytosine"
cttgcgaaggtcaccaattttgcatgttttgtttcctgatgcatttccagttcttgaaaacggtgcctgacacatagcagacactggatatactatggctcatttgaatgaataaaaggagt

SEQ ID NO: 7716 - DNA, 122 bp, Homo sapiens
  misc_feature (61)..(62): /note="This region represents a CpG dinucleotide"
  misc_feature (61)..(61): /note="Nucleotide may be methylated to form 5-methylcytosine"
aaaacaaacaaaaaaactctaccacaaagacacacaggaaacaaacaaacaacaacgaaacgaagagagtgcacagaaagaaaagtaagcaaataattaattcttgactaacagtccatatt

SEQ ID NO: 7717 - DNA, 122 bp, Homo sapiens
  misc_feature (61)..(62): /note="This region represents a CpG dinucleotide"
  misc_feature (61)..(61): /note="Nucleotide may be methylated to form 5-methylcytosine"
aacgagtgatgtttaagcctcattagggctatagaaccagcgttctgacaaaaaaatactcgctattgactttgacctcacttccctacctccctctgttcgtgggattattgaaccagggt

SEQ ID NO: 7718 - DNA, 122 bp, Homo sapiens
  misc_feature (61)..(62): /note="This region represents a CpG dinucleotide"
  misc_feature (61)..(61): /note="Nucleotide may be methylated to form 5-methylcytosine"
acagagttccagggtgattgctagcatggaggagggaggctcctgtgctgggtaagaacccgtcctccagaaactaggactgtctgggcttgaacccaagtgccttgctgtgtcagttgggg

SEQ ID NO: 7719 - DNA, 122 bp, Homo sapiens
  misc_feature (61)..(62): /note="This region represents a CpG dinucleotide"
  misc_feature (61)..(61): /note="Nucleotide may be methylated to form 5-methylcytosine"
cccactaggtcttctagctaatctcataaacttccaaaaactttagcacagccatcaccccgtaaggccctggtttgagatctgtatctgtttggataacactgcccctccatggaatatac

SEQ ID NO: 7720 - DNA, 122 bp, Homo sapiens
  misc_feature (61)..(62): /note="This region represents a CpG dinucleotide"
  misc_feature (61)..(61): /note="Nucleotide may be methylated to form 5-methylcytosine"
cttacaatgtgtatctaaaagcttcctcctgagtgtctgcctcaggccagggctctctgccgggcaccgaaacctactcatatcaaatgctaactatgaagcaaaacactggccaacaatga

SEQ ID NO: 7721 - DNA, 122 bp, Homo sapiens
  misc_feature (61)..(62): /note="This region represents a CpG dinucleotide"
  misc_feature (61)..(61): /note="Nucleotide may be methylated to form 5-methylcytosine"
ctcaacttccttttgcctttcaaatctctcatgagtgcatcagatttaatgaggcctactcgcatcatccagaactctaacttgagggagtctgagtttgtagctggagagcatttttaaca

SEQ ID NO: 7722 - DNA, 122 bp, Homo sapiens
  misc_feature (61)..(62): /note="This region represents a CpG dinucleotide"
  misc_feature (61)..(61): /note="Nucleotide may be methylated to form 5-methylcytosine"
agggggagaagcttggataatcattagaaaaaccctgttcacctataaaacctattctgccgcctcgaagcaaacactggagaaaggctgatttgagtatttaggctttataaattgcactt

SEQ ID NO: 7723 - DNA, 122 bp, Homo sapiens
  misc_feature (61)..(62): /note="This region represents a CpG dinucleotide"
  misc_feature (61)..(61): /note="Nucleotide may be methylated to form 5-methylcytosine"
catgtcaaataaataaatacataaataacaaaacaccaggggttcttgctccagatcctccgtttgatagctgtgtggcatttgagcaatatctacaagttgctttttgcatctgtaaattg

SEQ ID NO: 7724 - DNA, 122 bp, Homo sapiens
  misc_feature (61)..(62): /note="This region represents a CpG dinucleotide"
  misc_feature (61)..(61): /note="Nucleotide may be methylated to form 5-methylcytosine"
gagggagatttggcagaaaatgagaaggcagtgtgatcaccgaggcagagattggagtgacgcagccacaaaccaaagaatgctggcagcagtccaggtgtggtggctcatgcctgtaatcc

SEQ ID NO: 7725 - DNA, 122 bp, Homo sapiens
  misc_feature (61)..(62): /note="This region represents a CpG dinucleotide"
  misc_feature (61)..(61): /note="Nucleotide may be methylated to form 5-methylcytosine"
aaatgattaatatttgtatttttgttgtaaagctttattttataatgctactgtgtcatacgattccaggaaacacacattgctttaaactatgtgagtactgccccctatgtgtttgtatt

SEQ ID NO: 7726 - DNA, 122 bp, Homo sapiens
  misc_feature (61)..(62): /note="This region represents a CpG dinucleotide"
  misc_feature (61)..(61): /note="Nucleotide may be methylated to form 5-methylcytosine"
tctaacatagcactgactactttccatttgagttatttcttgacatgactggatcccccacgaggcatatcttattcattattgcagttctaacagggactggtgtcaacagtgaatggatg

SEQ ID NO: 7727 - DNA, 122 bp, Homo sapiens
  misc_feature (61)..(62): /note="This region represents a CpG dinucleotide"
  misc_feature (61)..(61): /note="Nucleotide may be methylated to form 5-methylcytosine"
gaagttattttttggccatctaccacgtttgcctaattctctgccttaactcccaacaggcgtgaagtccttgcctacgaagcagctttaggggctctcagatttcaagaagctaggttagg

SEQ ID NO: 7728 - DNA, 122 bp, Homo sapiens
  misc_feature (61)..(62): /note="This region represents a CpG dinucleotide"
  misc_feature (61)..(61): /note="Nucleotide may be methylated to form 5-methylcytosine"
gatcttcatatacttgcaaaaagaggtcctcttcagattttgttccatccaggtacactacgaaggggaaaagagagcagttcaaatgctaacaggcttattaatatacaatgtttactttg

SEQ ID NO: 7729 - DNA, 122 bp, Homo sapiens
  misc_feature (61)..(62): /note="This region represents a CpG dinucleotide"
  misc_feature (61)..(61): /note="Nucleotide may be methylated to form 5-methylcytosine"
taggccttcaggagtcctcgtgttacacactcaacgcctaatggagactggattcatttacgtgtattaatgtaacctgcgtgatcatgtgagtgcaagtgctttgtagattgtcctgggag

SEQ ID NO: 7730 - DNA, 122 bp, Homo sapiens
  misc_feature (61)..(62): /note="This region represents a CpG dinucleotide"
  misc_feature (61)..(61): /note="Nucleotide may be methylated to form 5-methylcytosine"
ggcagggaacagctttattttaactccgggtttgtggagagagggcaggacgaggcggagcgggtttgagggggaggacctagctggtttttcccagcatcccccaggccacttctctcacc

SEQ ID NO: 7731 - DNA, 122 bp, Homo sapiens
  misc_feature (61)..(62): /note="This region represents a CpG dinucleotide"
  misc_feature (61)..(61): /note="Nucleotide may be methylated to form 5-methylcytosine"
aattgtctgcaagcttctcaaaggcatagactacagacaatgaattggctgaatgagtcacggtagcatggagtgagggaatgggaaacaaatagattacacagtctgtttttccaagagtt

SEQ ID NO: 7732 - DNA, 122 bp, Homo sapiens
  misc_feature (61)..(62): /note="This region represents a CpG dinucleotide"
  misc_feature (61)..(61): /note="Nucleotide may be methylated to form 5-methylcytosine"
ggcttgactgcgggccctcaggtgtccttgtccagggctcagcctccccatcctctgcagcggggacattctaagtgagtgtcttgtttaaaaaataaaggtggtaaaaactggagtgtgag

SEQ ID NO: 7733 - DNA, 122 bp, Homo sapiens
  misc_feature (61)..(62): /note="This region represents a CpG dinucleotide"
  misc_feature (61)..(61): /note="Nucleotide may be methylated to form 5-methylcytosine"
ggaagtggttaggtgtggagctaatatttactctttttccgcccgtaattttctttcttccgttctccttccgcaaggaacgtcttggggcttctcgaacatctctcagcatttactgtacg

SEQ ID NO: 7734 - DNA, 122 bp, Homo sapiens
  misc_feature (61)..(62): /note="This region represents a CpG dinucleotide"
  misc_feature (61)..(61): /note="Nucleotide may be methylated to form 5-methylcytosine"
attatttaaatgagcaatgtactactacacatacattgtgcaattgcatcatatcctttgcgcaatctattctgcagagtcttcagcaaccagggcgtttgtgtcctgtagacaggctagga

SEQ ID NO: 7735 - DNA, 122 bp, Homo sapiens
  misc_feature (61)..(62): /note="This region represents a CpG dinucleotide"
  misc_feature (61)..(61): /note="Nucleotide may be methylated to form 5-methylcytosine"
tgaaaacaaattacagagtgatttctcattagtcccattatggggaacatgcctcatccacgttcttaatgaggctccagtaagtctgtagactgtttggggctgagggtggggcattggtg

SEQ ID NO: 7736 - DNA, 122 bp, Homo sapiens
  misc_feature (61)..(62): /note="This region represents a CpG dinucleotide"
  misc_feature (61)..(61): /note="Nucleotide may be methylated to form 5-methylcytosine"
tcactgaaggctctgtaattctctgcagtcaggcctgcctcagcccctcctctgaaattgcgctccctgaggttgataatgacttcttcagtgtatgatcctgtggacaggattcagaactt

SEQ ID NO: 7737 - DNA, 122 bp, Homo sapiens
  misc_feature (61)..(62): /note="This region represents a CpG dinucleotide"
  misc_feature (61)..(61): /note="Nucleotide may be methylated to form 5-methylcytosine"
ctgagggtggggggtccagagagtgggcctggggcctgggccccggcccaggcaccctgacggcctcaggcggccggtgagtgggcatcgcccacccccacccccacccggcatctggctgc

SEQ ID NO: 7738 - DNA, 122 bp, Homo sapiens
  misc_feature (61)..(62): /note="This region represents a CpG dinucleotide"
  misc_feature (61)..(61): /note="Nucleotide may be methylated to form 5-methylcytosine"
actgaggcggcaacgtgtatgtgaccttgcccacgtttcttcctgtgagcaacacttaatcgctagcattaagcccatttcatggaggttaactaagcagactgtgagcttaaatgatttcc

SEQ ID NO: 7739 - DNA, 122 bp, Homo sapiens
  misc_feature (61)..(62): /note="This region represents a CpG dinucleotide"
  misc_feature (61)..(61): /note="Nucleotide may be methylated to form 5-methylcytosine"
gtgttagaaaattccaaacaatggccgggactcccagtaatttaaatataatggcctatgcgggttcttaagcagaggaattagttaacagagttagaacaaaggagagcattatcacaaag

SEQ ID NO: 7740 - DNA, 122 bp, Homo sapiens
  misc_feature (61)..(62): /note="This region represents a CpG dinucleotide"
  misc_feature (61)..(61): /note="Nucleotide may be methylated to form 5-methylcytosine"
atgtgacttaagatcacctgggagtccttttcgttactgacttgtgcgacttgtgtggctcgtgtgctctcatgcttaattggattggtctttaatctggggccagggaagtgtttgacctg

SEQ ID NO: 7741 - DNA, 122 bp, Homo sapiens
  misc_feature (61)..(62): /note="This region represents a CpG dinucleotide"
  misc_feature (61)..(61): /note="Nucleotide may be methylated to form 5-methylcytosine"
aagctatctttactgcacacacaaatagatgaactcgatggacaacttgagttttatccacggtgactgcatctgttgcattggccttcatgctgtcagtctcaggcaacaagaacatgagc

SEQ ID NO: 7742 - DNA, 122 bp, Homo sapiens
  misc_feature (61)..(62): /note="This region represents a CpG dinucleotide"
  misc_feature (61)..(61): /note="Nucleotide may be methylated to form 5-methylcytosine"
gctggtgagacaaatatgagactctgcttccctctggtgtcattctgtgggaaatacactcgttccaaagcatgactgcgggcagccaacatttatgggccgcatgggatgtgcagtgctct

SEQ ID NO: 7743 - DNA, 122 bp, Homo sapiens
  misc_feature (61)..(62): /note="This region represents a CpG dinucleotide"
  misc_feature (61)..(61): /note="Nucleotide may be methylated to form 5-methylcytosine"
gggaggcggaggttgcagtgagcccagatcgcatcactgcactgcagcctggctaccgagcgagactccatctcaaaaaaaaaaagaaaaaaagaagagaggtttgtttggctcatgattct

SEQ ID NO: 7744 - DNA, 122 bp, Homo sapiens
  misc_feature (61)..(62): /note="This region represents a CpG dinucleotide"
  misc_feature (61)..(61): /note="Nucleotide may be methylated to form 5-methylcytosine"
tctatctttgctctgctcttcagacactttaacacctgagcacggcagagctttgtttttcgttaatgcatactttcatttttgtcttaaaaccacaatgaactttctcaacgatcatgttt

SEQ ID NO: 7745 - DNA, 122 bp, Homo sapiens
  misc_feature (61)..(62): /note="This region represents a CpG dinucleotide"
  misc_feature (61)..(61): /note="Nucleotide may be methylated to form 5-methylcytosine"
tgctcaacttgcagcagcctctgcctcaccccttaaaggagctgattatagattcccttacgctgcctctctaattgtctcatgattgcattcttgagggctatggaccgagggaaaaggat

SEQ ID NO: 7746 - DNA, 122 bp, Homo sapiens
  misc_feature (61)..(62): /note="This region represents a CpG dinucleotide"
  misc_feature (61)..(61): /note="Nucleotide may be methylated to form 5-methylcytosine"
cacaggatttgacacatgggacccctgggagaaggaggaaacacccacggcttacaaacccgcagcaaacccagagtcctcagcctaggaaaggggctggggacagggcctgacaccctgaa

SEQ ID NO: 7747 - DNA, 122 bp, Homo sapiens
  misc_feature (61)..(62): /note="This region represents a CpG dinucleotide"
  misc_feature (61)..(61): /note="Nucleotide may be methylated to form 5-methylcytosine"
atggcagccttttcaccttagttttggactcagcattaaagactgccatacatggttgtgcgggctgagcactatgtaactctagggggcaccactcacctaggtttcttagactgccatat

SEQ ID NO: 7748 - DNA, 122 bp, Homo sapiens
  misc_feature (61)..(62): /note="This region represents a CpG dinucleotide"
  misc_feature (61)..(61): /note="Nucleotide may be methylated to form 5-methylcytosine"
gatctcattttcaacagaccacaattagtcctctggagaatgccatagaaaccatgtccacggccaatgagaagatcctgatgatgataaaccagtaccagagtgatgagaccctccccatc

SEQ ID NO: 7749 - DNA, 122 bp, Homo sapiens
  misc_feature (61)..(62): /note="This region represents a CpG dinucleotide"
  misc_feature (61)..(61): /note="Nucleotide may be methylated to form 5-methylcytosine"
ttgactcatgcaacatggatggatcataaatatattttgctaagagaaagaaattattctcgaaagataacatactatagtaataggtgtggagagggtgtgactataaagggcagaatttt

SEQ ID NO: 7750 - DNA, 122 bp, Homo sapiens
  misc_feature (61)..(62): /note="This region represents a CpG dinucleotide"
  misc_feature (61)..(61): /note="Nucleotide may be methylated to form 5-methylcytosine"
aggaaatctgatgttctaaacagagcgattatataaaacgctggctgtggcttaagcaaacgcaatcacagaattgcctagctgtgagtcagagtcggcttgatcctgaaaagtcccttgct

SEQ ID NO: 7751 - DNA, 122 bp, Homo sapiens
  misc_feature (61)..(62): /note="This region represents a CpG dinucleotide"
  misc_feature (61)..(61): /note="Nucleotide may be methylated to form 5-methylcytosine"
tcaggggacagggtaggggtggggactatgggacagggctcagtgctggacccaggagggcgccttgcgcaaggttttctgatgcaactggctgagtgcttcagcattccacccccaccccc

SEQ ID NO: 7752 - DNA, 122 bp, Homo sapiens
  misc_feature (61)..(62): /note="This region represents a CpG dinucleotide"
  misc_feature (61)..(61): /note="Nucleotide may be methylated to form 5-methylcytosine"
cggccctctgacactgaggtcggagttatcatttcaaaaccttgctctgtattaaacagccgtgttgggcagggccagactgctggactgacagtagggggcaggcagccggaccctctgag

SEQ ID NO: 7753 - DNA, 122 bp, Homo sapiens
  misc_feature (61)..(62): /note="This region represents a CpG dinucleotide"
  misc_feature (61)..(61): /note="Nucleotide may be methylated to form 5-methylcytosine"
cctttagaggatagattgtcacatctggtggaatcagaagggaaagcccagctgggtgagcgttagctactgatagtaagtattgtgttttctttgaagtggttctcttgtgaggaaatgat

SEQ ID NO: 7754 - DNA, 122 bp, Homo sapiens
  misc_feature (61)..(62): /note="This region represents a CpG dinucleotide"
  misc_feature (61)..(61): /note="Nucleotide may be methylated to form 5-methylcytosine"
atcaccacagcctgcagcagactgatgatcctacagagagaacacagctgtcagagcaagcgagcaccgcttctcacaaagagactgaatgaagctgctggcagacacagagccctgagatc

SEQ ID NO: 7755 - DNA, 122 bp, Homo sapiens
  misc_feature (61)..(62): /note="This region represents a CpG dinucleotide"
  misc_feature (61)..(61): /note="Nucleotide may be methylated to form 5-methylcytosine"
tttcttaaccagtactttgcatctgaatcacataatttctcaattcccctaaggataatacgtaactagaactgttctcgatgcatgggaaagaagttgattcattacacatggtgggtacc

SEQ ID NO: 7756 - DNA, 122 bp, Homo sapiens
  misc_feature (61)..(62): /note="This region represents a CpG dinucleotide"
  misc_feature (61)..(61): /note="Nucleotide may be methylated to form 5-methylcytosine"
ccccatctaggctactgcccagaagctgaaacataactcaagagagtcatgaccgtgttacgggaaaacccgttctggagctgggacctactcctccttaatggctgcctccagaaacagga

SEQ ID NO: 7757 - DNA, 122 bp, Homo sapiens
  misc_feature (61)..(62): /note="This region represents a CpG dinucleotide"
  misc_feature (61)..(61): /note="Nucleotide may be methylated to form 5-methylcytosine"
atcattactatcaattttagaggcacagacttccttctaaataagactcctttccaaacacgtacatctagagccattcattctatcttctcccactgttagaatgtccttatcttaagcca

SEQ ID NO: 7758 - DNA, 122 bp, Homo sapiens
  misc_feature (61)..(62): /note="This region represents a CpG dinucleotide"
  misc_feature (61)..(61): /note="Nucleotide may be methylated to form 5-methylcytosine"
aacagaagtgacagctaagagatgcctatctatgatacacaggtagctcctttacattgacgggaaaataccaatactccagtggaaaaatgagcagagaatatgaataggcaattcacaaa

SEQ ID NO: 7759 - DNA, 122 bp, Homo sapiens
  misc_feature (61)..(62): /note="This region represents a CpG dinucleotide"
  misc_feature (61)..(61): /note="Nucleotide may be methylated to form 5-methylcytosine"
atctgacagtaagttatatgtcattgctttgggaattctaaatactgaaaacttctttcacgctttccaacaaaattattactgtggaagagctatattttgaacattataaatacaaaatt

SEQ ID NO: 7760 - DNA, 122 bp, Homo sapiens
  misc_feature (61)..(62): /note="This region represents a CpG dinucleotide"
  misc_feature (61)..(61): /note="Nucleotide may be methylated to form 5-methylcytosine"
aggcctgtaatccgagctacttggaaggctgagtcatgaggaccgcttgaacccaggatgcggaggttgcagtgagtcaagattgcatcactgcacaccagcctgggtgacagagcaagact

SEQ ID NO: 7761 - DNA, 122 bp, Homo sapiens
  misc_feature (61)..(62): /note="This region represents a CpG dinucleotide"
  misc_feature (61)..(61): /note="Nucleotide may be methylated to form 5-methylcytosine"
ggcgccccgtcgcgccccacatacgcggggtgcactcggcggggccgggcgggaacatggcgcctgccctccactcgggaccgccacagaaaaatcgggggtgcgtgcagcgtcagcacagt

SEQ ID NO: 7762 - DNA, 122 bp, Homo sapiens
  misc_feature (61)..(62): /note="This region represents a CpG dinucleotide"
  misc_feature (61)..(61): /note="Nucleotide may be methylated to form 5-methylcytosine"
gacaagcattttcttgttccttctaaggccttcctgatccaaggtagttttgagcacaaacggctgtgctggttaagcttttggcttgtgggaagaaagccgcacatcaactcctgatacgc

SEQ ID NO: 7763 - DNA, 122 bp, Homo sapiens
  misc_feature (61)..(62): /note="This region represents a CpG dinucleotide"
  misc_feature (61)..(61): /note="Nucleotide may be methylated to form 5-methylcytosine"
acacacaaaaccacacacacacacacacacacacacacacacacacacacaaccaaaaaacgagcataggatttggtattagactgtttcgaaggcctcaaatttggtgtggtatgaacttg

SEQ ID NO: 7764 - DNA, 122 bp, Homo sapiens
  misc_feature (61)..(62): /note="This region represents a CpG dinucleotide"
  misc_feature (61)..(61): /note="Nucleotide may be methylated to form 5-methylcytosine"
cgctccctctccatgaacagtcttggcctttgttccacatcagcctaaaatgagctgcctcgttcttttttagaggcagccaagtagtccaccatatggaggtagtacaatttgcttaacta

SEQ ID NO: 7765 - DNA, 122 bp, Homo sapiens
  misc_feature (61)..(62): /note="This region represents a CpG dinucleotide"
  misc_feature (61)..(61): /note="Nucleotide may be methylated to form 5-methylcytosine"
gttcttaatcttattcgttccctctttgtttatcacaaagctttgttggacaaaaaaaagcgagcaccaggtacggatggggatgtctctataaccaggctgctagaccctgtttgaacctg

SEQ ID NO: 7766 - DNA, 122 bp, Homo sapiens
  misc_feature (61)..(62): /note="This region represents a CpG dinucleotide"
  misc_feature (61)..(61): /note="Nucleotide may be methylated to form 5-methylcytosine"
tgcacatgcacatgcatgcacacacaaatacacacagacacacaacacacacagccctctcgatggcctctgcctgcacatgggtccaagctgtccaggaccctctccagtgcattgcaaaa

SEQ ID NO: 7767 - DNA, 122 bp, Homo sapiens
  misc_feature (61)..(62): /note="This region represents a CpG dinucleotide"
  misc_feature (61)..(61): /note="Nucleotide may be methylated to form 5-methylcytosine"
tcggctcggctctggccaaggagcagctctgggaagcaacgggaggtgaggcagcttgttcgaagcctgctggtcaggatggagtcggatctgaactgtggccgtctgacccccaagcaggc

SEQ ID NO: 7768 - DNA, 122 bp, Homo sapiens
  misc_feature (61)..(62): /note="This region represents a CpG dinucleotide"
  misc_feature (61)..(61): /note="Nucleotide may be methylated to form 5-methylcytosine"
acagagccaggatcccatcccgttgacacagctgggctccagtgtcccagagatgctaaacgatggtccctcacagccccacggggcttcagagagagccatgtgaatttgaattatgctca

SEQ ID NO: 7769 - DNA, 122 bp, Homo sapiens
  misc_feature (61)..(62): /note="This region represents a CpG dinucleotide"
  misc_feature (61)..(61): /note="Nucleotide may be methylated to form 5-methylcytosine"
actttttagctttagatcactgtcttatctccaacatccatcagaattccgggaacttcacgttacctaataaatgtttgaggaataattaaatgaatgaataagtgcatatatgcattttt

SEQ ID NO: 7770 - DNA, 122 bp, Homo sapiens
  misc_feature (61)..(62): /note="This region represents a CpG dinucleotide"
  misc_feature (61)..(61): /note="Nucleotide may be methylated to form 5-methylcytosine"
ctgagaagttcttagagtttatccctgctactactgctgcacattatcacagtattaatacgactgttggggaataaatgcatttaacagttaatgtgaactccacagaaataaattacatg

SEQ ID NO: 7771 - DNA, 122 bp, Homo sapiens
  misc_feature (61)..(62): /note="This region represents a CpG dinucleotide"
  misc_feature (61)..(61): /note="Nucleotide may be methylated to form 5-methylcytosine"
aattgtggatagcaaccaaggctggtgactcatcacatacacaccccccctccccccgcacgctcttacagagagacttgaacttaaagaggcatcgagaggcagctggctccatccgtggg

SEQ ID NO: 7772 - DNA, 122 bp, Homo sapiens
  misc_feature (61)..(62): /note="This region represents a CpG dinucleotide"
  misc_feature (61)..(61): /note="Nucleotide may be methylated to form 5-methylcytosine"
gtcctcatcaagtactggtcctcgtgtatgtgttctgcttccgctttctcaggatgtttacgtttttgcaaatacgtttatggaaaagagttacctcacccacctctccaaacatctatttg

SEQ ID NO: 7773 - DNA, 122 bp, Homo sapiens
  misc_feature (61)..(62): /note="This region represents a CpG dinucleotide"
  misc_feature (61)..(61): /note="Nucleotide may be methylated to form 5-methylcytosine"
ggagtgtggagtttttcatcttccaattggagaagactgttttgcaattttgagtacctccgccagtgaagaactgtgcaaaaggccgattcctagttgtgccctagtaaatgttttcagaa

SEQ ID NO: 7774 - DNA, 122 bp, Homo sapiens
  misc_feature (61)..(62): /note="This region represents a CpG dinucleotide"
  misc_feature (61)..(61): /note="Nucleotide may be methylated to form 5-methylcytosine"
ttgtcttgtccacaccaatattgacgccattacacactcgggctgatttcttattctccacgttttaaaagaaaaatctgccgggcgcagtggctcacgccagtaatcctaacactttggga

SEQ ID NO: 7775 - DNA, 122 bp, Homo sapiens
  misc_feature (61)..(62): /note="This region represents a CpG dinucleotide"
  misc_feature (61)..(61): /note="Nucleotide may be methylated to form 5-methylcytosine"
caaagcacttccagacactgcgttctcccaccaggccccaggtcttatgcctcatgggaacgtctctccgcatccatcttcatgctcttgcctgaagcacccagcgcggagcaagcagaata

SEQ ID NO: 7776 - DNA, 122 bp, Homo sapiens
  misc_feature (61)..(62): /note="This region represents a CpG dinucleotide"
  misc_feature (61)..(61): /note="Nucleotide may be methylated to form 5-methylcytosine"
agaaatagaaaaacatatttaccaacctgctagcgtgggtctattttctcacaagcaatgcgaggcctctgcaagctgaagagggacctcacgtctctataacaatgtggattctattgtta

SEQ ID NO: 7777 - DNA, 122 bp, Homo sapiens
  misc_feature (61)..(62): /note="This region represents a CpG dinucleotide"
  misc_feature (61)..(61): /note="Nucleotide may be methylated to form 5-methylcytosine"
atccatgccctgtacacacctggcaaacacttccagctctaaccactctcccacctgccccggtttcccaggcttaagcaggaggagtccccatcatccagcccaagcctcgcctttgacca

SEQ ID NO: 7778 - DNA, 122 bp, Homo sapiens
  misc_feature (61)..(62): /note="This region represents a CpG dinucleotide"
  misc_feature (61)..(61): /note="Nucleotide may be methylated to form 5-methylcytosine"
gtacaggcagcccctcctgaactccccacggcacagccaagaccaggctgcaacttctgacggaactgtcctgaagctttagagaccacatgaggggcatctagaggggacagggctctcgg

SEQ ID NO: 7779 - DNA, 122 bp, Homo sapiens
  misc_feature (61)..(62): /note="This region represents a CpG dinucleotide"
  misc_feature (61)..(61): /note="Nucleotide may be methylated to form 5-methylcytosine"
aagccctccccaggccagtgatgagcccaaaagctcctctggaaaacgttgatctttgcacggcgcccatgcaggcttccaggccaccagggcatgggcaggactcagcccgccatgggcgc

SEQ ID NO: 7780 - DNA, 122 bp, Homo sapiens
  misc_feature (61)..(62): /note="This region represents a CpG dinucleotide"
  misc_feature (61)..(61): /note="Nucleotide may be methylated to form 5-methylcytosine"
ccttctgagtcaaaaacaattcagctgcaggtgctgctatgggaaaaaaatgcaaaggggcggcagcttttcaaaaagtcagatggctttgtccaaatttaacgtgtccaacatttcaagtt

SEQ ID NO: 7781 - DNA, 122 bp, Homo sapiens
  misc_feature (61)..(62): /note="This region represents a CpG dinucleotide"
  misc_feature (61)..(61): /note="Nucleotide may be methylated to form 5-methylcytosine"
tcattgcgggtgtattctcttggtcaaagccagcgcagattcaagaggtagggaaatagacgccatctcttggtgggagaagctgcaaaggatttgtggccatttgaaatctaccaggctgt

SEQ ID NO: 7782 - DNA, 122 bp, Homo sapiens
  misc_feature (61)..(62): /note="This region represents a CpG dinucleotide"
  misc_feature (61)..(61): /note="Nucleotide may be methylated to form 5-methylcytosine"
cgtgcaggattgatgttgcgttcacgggaaacctgacctcctttaaccaaggactgggtgcgtgcccccagctaatcctcctgcccatcagaaaatggtgctctttaaagttttaaacgagt

SEQ ID NO: 7783 - DNA, 122 bp, Homo sapiens
  misc_feature (61)..(62): /note="This region represents a CpG dinucleotide"
  misc_feature (61)..(61): /note="Nucleotide may be methylated to form 5-methylcytosine"
agtaaaatgtgctcagaatatacagttaacgattgagcacaacactcaaacctgccaggacgtggttttcccctctactttgctgggtaaccaaaagctatcagacattcatagctggttta

SEQ ID NO: 7784 - DNA, 122 bp, Homo sapiens
  misc_feature (61)..(62): /note="This region represents a CpG dinucleotide"
  misc_feature (61)..(61): /note="Nucleotide may be methylated to form 5-methylcytosine"
cattttcttaagcagtgaaccatgcagaatactgttgctaaacatcgtttctgccttcctcgtgttctcttggtagtttttactgtttggcttgatcctgctgaggaatgtgcttaccactg

SEQ ID NO: 7785 - DNA, 122 bp, Homo sapiens
  misc_feature (61)..(62): /note="This region represents a CpG dinucleotide"
  misc_feature (61)..(61): /note="Nucleotide may be methylated to form 5-methylcytosine"
gtagtattgttatagcagcaccagacagactaaggctgtgtgtgtgtgtaaatacagatacgtggcatgcatatatattattaacaaacaggtaagaatccaaacgacattcctgagcacat

SEQ ID NO: 7786 - DNA, 122 bp, Homo sapiens
  misc_feature (61)..(62): /note="This region represents a CpG dinucleotide"
  misc_feature (61)..(61): /note="Nucleotide may be methylated to form 5-methylcytosine"
ctctgttaaagacttcctgaagatcttcacatttctttatggcttcctgtgcccctcatacgaacttcctgacacaaagtttgaagaagaggttccaagaatctttaaagaccttgggtatg

SEQ ID NO: 7787 - DNA, 122 bp, Homo sapiens
  misc_feature (61)..(62): /note="This region represents a CpG dinucleotide"
  misc_feature (61)..(61): /note="Nucleotide may be methylated to form 5-methylcytosine"
attaagactttcactaaccagtggaaattaggtaagcaccaatacaatagagactacacacggagagctagaatcaccactctgactcagcaataatgaggagccactcctgctacttgagt

SEQ ID NO: 7788 - DNA, 122 bp, Homo sapiens
  misc_feature (61)..(62): /note="This region represents a CpG dinucleotide"
  misc_feature (61)..(61): /note="Nucleotide may be methylated to form 5-methylcytosine"
ggtggttctgcccctgcccagcctgtcttaaccatgctgcctggtctgtgccgggctctgcgcattcagggtgtgattccatttaattaaacttaaactaaaccttagtgcacaaaggggaa

SEQ ID NO: 7789 - DNA, 122 bp, Homo sapiens
  misc_feature (61)..(62): /note="This region represents a CpG dinucleotide"
  misc_feature (61)..(61): /note="Nucleotide may be methylated to form 5-methylcytosine"
aaccagagcttctcagactttgctgtacatctgaaccactagggggacttttaaggatcccgattccagctgggtgcagtgactcacgtctgtaatcccagtgctttgggaatctgcagcgg

SEQ ID NO: 7790 - DNA, 122 bp, Homo sapiens
  misc_feature (61)..(62): /note="This region represents a CpG dinucleotide"
  misc_feature (61)..(61): /note="Nucleotide may be methylated to form 5-methylcytosine"
ttacagacaaagggccaaatcttggtcttgatctgtgccaatcgacttcaaaagttgtgacgttcttggatcagttctgctagggtgagacccgaatttggatccccaacagttctggagta

SEQ ID NO: 7791 - DNA, 122 bp, Homo sapiens
  misc_feature (61)..(62): /note="This region represents a CpG dinucleotide"
  misc_feature (61)..(61): /note="Nucleotide may be methylated to form 5-methylcytosine"
ctccacctgggcccgcagctcggatagctgctgctggttcagcctgcgagggtggggggccgcttagtgcctgtgcccacttttggccccctctgtccctgctccgcgcaggtaggtcccca

SEQ ID NO: 7792 - DNA, 122 bp, Homo sapiens
  misc_feature (61)..(62): /note="This region represents a CpG dinucleotide"
  misc_feature (61)..(61): /note="Nucleotide may be methylated to form 5-methylcytosine"
ataggcattagaaatggagctcaaaatgtgcctgtgacccaggtagtgtacatggaagttcgaggtcaagttgagcacacctccatctctcatcccctcccagcctgtggtgagctaagcct

SEQ ID NO: 7793 - DNA, 122 bp, Homo sapiens
  misc_feature (61)..(62): /note="This region represents a CpG dinucleotide"
  misc_feature (61)..(61): /note="Nucleotide may be methylated to form 5-methylcytosine"
tctcctagtgtgccaggcagtgtcaggcagtaaaaatgtaagcatatacactcttgccctcggaaagcctttacactgtgtaggatagaaacaagtaaatatacatcatacactgtcaaata

SEQ ID NO: 7794 - DNA, 122 bp, Homo sapiens
  misc_feature (61)..(62): /note="This region represents a CpG dinucleotide"
  misc_feature (61)..(61): /note="Nucleotide may be methylated to form 5-methylcytosine"
acataaacaaaacttcttctcagcaatttttaacagtttaaaaggaatcttagaccaaaacgtttgagaacctctgttctaatggaaacatgggaagctaagaacattttttagagttgttt

SEQ ID NO: 7795 - DNA, 122 bp, Homo sapiens
  misc_feature (61)..(62): /note="This region represents a CpG dinucleotide"
  misc_feature (61)..(61): /note="Nucleotide may be methylated to form 5-methylcytosine"
tgctgaaggccttttgttgccagtggtgtccagccggttgccctttgtatttgatgatgacgacattgaaaggattgttttgtgcagggactctggacaaaaaagagacatttgggacagaa

SEQ ID NO: 7796 - DNA, 122 bp, Homo sapiens
  misc_feature (61)..(62): /note="This region represents a CpG dinucleotide"
  misc_feature (61)..(61): /note="Nucleotide may be methylated to form 5-methylcytosine"
ggaggctgagatgggaggatcgcttaagcccaggagttccaggctgcggtgagctgatgacgccactgcatgatgaatctttagttgttcaaacaacaggaaggatggtgttgcagtcaaca

SEQ ID NO: 7797 - DNA, 122 bp, Homo sapiens
  misc_feature (61)..(62): /note="This region represents a CpG dinucleotide"
  misc_feature (61)..(61): /note="Nucleotide may be methylated to form 5-methylcytosine"
gattacatgcatgagccactgcatccagcagcaataacaatttctgtcataccatataatcgtatctcctttttgcccattaatttagtaattatctttccttcaattaagctaagtcctta

SEQ ID NO: 7798 - DNA, 122 bp, Homo sapiens
  misc_feature (61)..(62): /note="This region represents a CpG dinucleotide"
  misc_feature (61)..(61): /note="Nucleotide may be methylated to form 5-methylcytosine"
aactggtagttgctgacacatactttacacgaacatagtgtttatgtcagtccattctttcgtgagttttctgagtaatttcatggaacattgttggatcagcaatttgttctcccagcaat

SEQ ID NO: 7799 - DNA, 122 bp, Homo sapiens
  misc_feature (61)..(62): /note="This region represents a CpG dinucleotide"
  misc_feature (61)..(61): /note="Nucleotide may be methylated to form 5-methylcytosine"
cgagtgggtgcggtcagggaagaccggcggcttctgtcccgagggatggattccattaggcggcgtttctcagggtgtctccgaggctggttgcatcacaatcgtgaatacctgctaattac

SEQ ID NO: 7800 - DNA, 122 bp, Homo sapiens
  misc_feature (61)..(62): /note="This region represents a CpG dinucleotide"
  misc_feature (61)..(61): /note="Nucleotide may be methylated to form 5-methylcytosine"
ccaatcaacatgagtcaccaggggacttgggccctcagtggcttccgtgtggccaggctacgcatgcccagtcagcatttgcccagtcggatttgcacaggcagggccatcacaccccatca

SEQ ID NO: 7801 - DNA, 122 bp, Homo sapiens
  misc_feature (61)..(62): /note="This region represents a CpG dinucleotide"
  misc_feature (61)..(61): /note="Nucleotide may be methylated to form 5-methylcytosine"
acactggccactaaggtggagtttcctttggccacaggccactaacaatccttgagttcccgcctatcccacgtccaaataagtacaagaataacagtgtccttatcccacaggttacatgt

SEQ ID NO: 7802 - DNA, 122 bp, Homo sapiens
  misc_feature (61)..(62): /note="This region represents a CpG dinucleotide"
  misc_feature (61)..(61): /note="Nucleotide may be methylated to form 5-methylcytosine"
gagccccacctccacgtgtgcccggggcgggtctcccagcagcaccacctcctccacccccgaagctgcttcttagaccaaaggcttgctccttgcaaaagactgaacagctgcatcgtttc

SEQ ID NO: 7803 - DNA, 122 bp, Homo sapiens
  misc_feature (61)..(62): /note="This region represents a CpG dinucleotide"
  misc_feature (61)..(61): /note="Nucleotide may be methylated to form 5-methylcytosine"
acaccgagagaagccaatcttccaaggccctccgtctgggaaactctgacctgggggccacgctaaggggaaagctcccgttctgtaaatcagtgctctcttccgaggcccagctggaggca

SEQ ID NO: 7804 - DNA, 122 bp, Homo sapiens
  misc_feature (61)..(62): /note="This region represents a CpG dinucleotide"
  misc_feature (61)..(61): /note="Nucleotide may be methylated to form 5-methylcytosine"
acagacgattcaggaaggaaaacaagaaactagggaccctggtgttcaggtaggcagctccggttgcagtctgcccctctgagtcactccaggcggtgacctcccccaacccgccctcattc

SEQ ID NO: 7805 - DNA, 122 bp, Homo sapiens
  misc_feature (61)..(62): /note="This region represents a CpG dinucleotide"
  misc_feature (61)..(61): /note="Nucleotide may be methylated to form 5-methylcytosine"
accttttcttttcaaccagatctttgtgatctgcattggagctatctcagcaatcagcttcgtatatccaaacaaaattctgtcattctttagttgaagcctgcctcttgtgtggcctgcca

SEQ ID NO: 7806 - DNA, 122 bp, Homo sapiens
  misc_feature (61)..(62): /note="This region represents a CpG dinucleotide"
  misc_feature (61)..(61): /note="Nucleotide may be methylated to form 5-methylcytosine"
catccaggttgtggtattttattagacactggggctgactgagacagctgggtcctccgccgagggtcccatcgggctgaaactgtccactggcagcatcctcactggggggctggactggg

SEQ ID NO: 7807 - DNA, 122 bp, Homo sapiens
  misc_feature (61)..(62): /note="This region represents a CpG dinucleotide"
  misc_feature (61)..(61): /note="Nucleotide may be methylated to form 5-methylcytosine"
tgctgttagtctttaagaccaacactaattaacagcatttatttttactgtgattgcctacgtgaaagtatgcaaaagtaaatttatattctgagaatgtggttgctttggtctgaagcggt

SEQ ID NO: 7808 - DNA, 122 bp, Homo sapiens
  misc_feature (61)..(62): /note="This region represents a CpG dinucleotide"
  misc_feature (61)..(61): /note="Nucleotide may be methylated to form 5-methylcytosine"
ataaaaatacctcaaagtctgtggtgacagaggctgtttgcgaaactccatgcacactgtcgtagcctggtggtgcttcagttaaggaaaagtccttctcatgtaagtccatacactttccg

SEQ ID NO: 7809 - DNA, 122 bp, Homo sapiens
  misc_feature (61)..(62): /note="This region represents a CpG dinucleotide"
  misc_feature (61)..(61): /note="Nucleotide may be methylated to form 5-methylcytosine"
agaactgcagagagacctgttgctcctagctgggctcttaatgccaaacaaaagaagcaacgtgtcagtaattcagttggtggatgccttggagccattcaagatgcattttgctcattagc

SEQ ID NO: 7810 - DNA, 122 bp, Homo sapiens
  misc_feature (61)..(62): /note="This region represents a CpG dinucleotide"
  misc_feature (61)..(61): /note="Nucleotide may be methylated to form 5-methylcytosine"
ctttatcataagtgcgtaaaagtcttgagagtaaatccgaagagagttaaaaacctcctccgcctgccccacatatgcaacacaggctcttgttgacataactgactgtaataaatactttg

SEQ ID NO: 7811 - DNA, 122 bp, Homo sapiens
  misc_feature (61)..(62): /note="This region represents a CpG dinucleotide"
  misc_feature (61)..(61): /note="Nucleotide may be methylated to form 5-methylcytosine"
aaggcttatcaggatccatatcgcagcttgtaaagtcaccacaatcaccacgccaacagacggaacgcctggaagtaaacagaacttctagaacagtagaacatcaaagggtgtcagggaca

SEQ ID NO: 7812 - DNA, 122 bp, Homo sapiens
  misc_feature (61)..(62): /note="This region represents a CpG dinucleotide"
  misc_feature (61)..(61): /note="Nucleotide may be methylated to form 5-methylcytosine"
tttaaacctatttaagcacaattcatttgaagacgagcattcccttatgtggaccagctccgctcactagattttcagagggtggggaacgggagggtttagactctaaataagatatatta

SEQ ID NO: 7813 - DNA, 122 bp, Homo sapiens
  misc_feature (61)..(62): /note="This region represents a CpG dinucleotide"
  misc_feature (61)..(61): /note="Nucleotide may be methylated to form 5-methylcytosine"
gatttggcaactctgctgttcttagctgggcttgcatacatgactgagggtgtccactgacggctggcagattgaggctagctgcagctgaagtgattggcatgactcatctctgctctgca

SEQ ID NO: 7814 - DNA, 122 bp, Homo sapiens
  misc_feature (61)..(62): /note="This region represents a CpG dinucleotide"
  misc_feature (61)..(61): /note="Nucleotide may be methylated to form 5-methylcytosine"
tcttacctacctacgcagaaaaaaatataaagttttaacagtgcctgccttacaataaagcgtagtggtaagcgatgtccaaaaaaagacgataacattttgatatcaaaagtctaataaaa

SEQ ID NO: 7815 - DNA, 122 bp, Homo sapiens
  misc_feature (61)..(62): /note="This region represents a CpG dinucleotide"
  misc_feature (61)..(61): /note="Nucleotide may be methylated to form 5-methylcytosine"
cctctctacatctccattcttattttatagattgccgttctttggtcttcatggcaggtacgcagcccccactgcttgtgagtgtatgtgacacagggccagctacctcaaggaagtgactc

SEQ ID NO: 7816 - DNA, 122 bp, Homo sapiens
  misc_feature (61)..(62): /note="This region represents a CpG dinucleotide"
  misc_feature (61)..(61): /note="Nucleotide may be methylated to form 5-methylcytosine"
tggccaacatagtgaagccctgtctctagtaaaaatacaaaaattagctaggcgtggtggcgtgcgcctataatcccagatactaggaggccaaggcacaacaatcacttgaacccaggagg

SEQ ID NO: 7817 - DNA, 122 bp, Homo sapiens
  misc_feature (61)..(62): /note="This region represents a CpG dinucleotide"
  misc_feature (61)..(61): /note="Nucleotide may be methylated to form 5-methylcytosine"
cagactcagggctagtgaaggaggctgagaacaaccgggacgtcatctcagaacatctttcgcaactggatttagagattaattgaggtaaagggaagagatgcaaatacttctcctcctcc

SEQ ID NO: 7818 - DNA, 122 bp, Homo sapiens
  misc_feature (61)..(62): /note="This region represents a CpG dinucleotide"
  misc_feature (61)..(61): /note="Nucleotide may be methylated to form 5-methylcytosine"
gaagtccactcagctggttggggagcttagggttttctttttggtttacaagcggaactgcgaattagaataatgcatttaagggatttttaagttctagctttgacatgtaaagagcttaa

SEQ ID NO: 7819 - DNA, 122 bp, Homo sapiens
  misc_feature (61)..(62): /note="This region represents a CpG dinucleotide"
  misc_feature (61)..(61): /note="Nucleotide may be methylated to form 5-methylcytosine"
actgcgccgtgcatagtgctgaggaaagctgcccactctgttctcgcccttgtagctgctcgctcctctagcctgacttcaactgttccttaaacttgatctcttaagagtctgtcagtttc

SEQ ID NO: 7820 - DNA, 122 bp, Homo sapiens
  misc_feature (61)..(62): /note="This region represents a CpG dinucleotide"
  misc_feature (61)..(61): /note="Nucleotide may be methylated to form 5-methylcytosine"
gaaaatatgggggcaacatgagagggaaacagaagctgttacaataagagacaagaaaagcgagatttagggaaaggggaatgagaaaacagaagataaataatagaaattattttcttaga

SEQ ID NO: 7821 - DNA, 122 bp, Homo sapiens
  misc_feature (61)..(62): /note="This region represents a CpG dinucleotide"
  misc_feature (61)..(61): /note="Nucleotide may be methylated to form 5-methylcytosine"
cacgttttattcccggctgtccttccagtccggaagcctgaagtggacaccgaggaactgcggtgcggaaactaagatagtactgggaagacttgggttctggccagccaagattaccaaaa

SEQ ID NO: 7822 - DNA, 122 bp, Homo sapiens
  misc_feature (61)..(62): /note="This region represents a CpG dinucleotide"
  misc_feature (61)..(61): /note="Nucleotide may be methylated to form 5-methylcytosine"
aggaggggcaatagctaaacaaatacctgcattagtcaaggagcactcagaaacagggctcgacctgctgggagaggattttgctaaggaaagcctgtactcacagaagaaggaagcaaaac

SEQ ID NO: 7823 - DNA, 122 bp, Homo sapiens
  misc_feature (61)..(62): /note="This region represents a CpG dinucleotide"
  misc_feature (61)..(61): /note="Nucleotide may be methylated to form 5-methylcytosine"
ggtaggcaaaatcacaagtggttgagaatcactggcttaattctttctcagagcaatactcgggctaaaacactgcctggtacatactagtaactaaaaaattaatttgttgaataaacaaa

SEQ ID NO: 7824 - DNA, 122 bp, Homo sapiens
  misc_feature (61)..(62): /note="This region represents a CpG dinucleotide"
  misc_feature (61)..(61): /note="Nucleotide may be methylated to form 5-methylcytosine"
tattgacttcagccaaagatcattggtatttcctgagaccggaaagatttgggccttgtgcgtaaacaacatcttggatcaggcacggaaatttcaacagtacttggcaatttcctagcagc

SEQ ID NO: 7825 - DNA, 122 bp, Homo sapiens
  misc_feature (61)..(62): /note="This region represents a CpG dinucleotide"
  misc_feature (61)..(61): /note="Nucleotide may be methylated to form 5-methylcytosine"
tacttactgatttcaaacatttggaactaaactggaacgtatttttctttccgatttctgcgtttttgaggtgtgtgtaaacccaccagcgcagcagctgggagggcccttcaaaggtgggc

SEQ ID NO: 7826 - DNA, 122 bp, Homo sapiens
  misc_feature (61)..(62): /note="This region represents a CpG dinucleotide"
  misc_feature (61)..(61): /note="Nucleotide may be methylated to form 5-methylcytosine"
atgtgggcagccaatggcccctgagaaggctcaaaactttctggatgttctttctgaagtcgtcttcagagccagtttagtcaggcaggactactactctgattccctataatcagatactt

SEQ ID NO: 7827 - DNA, 122 bp, Homo sapiens
  misc_feature (61)..(62): /note="This region represents a CpG dinucleotide"
  misc_feature (61)..(61): /note="Nucleotide may be methylated to form 5-methylcytosine"
acggggacaaatcccagtgagcagctggccagctggcacagaccacaaggacggaagtgccgtgttaagggggcgacatgatccaacccgcttcaccctcacacagcccgatttgggggtgt

SEQ ID NO: 7828 - DNA, 122 bp, Homo sapiens
  misc_feature (61)..(62): /note="This region represents a CpG dinucleotide"
  misc_feature (61)..(61): /note="Nucleotide may be methylated to form 5-methylcytosine"
gattgatcctaaacttccctcctgcattcatgggagttagctgacaggaaatacacagtgcgaggaagtggtgagtgagagaaaaaaaaaaaacagctaactgataagatcttaattgcaag

SEQ ID NO: 7829 - DNA, 122 bp, Homo sapiens
  misc_feature (61)..(62): /note="This region represents a CpG dinucleotide"
  misc_feature (61)..(61): /note="Nucleotide may be methylated to form 5-methylcytosine"
attggaagttggataaaaggcagaatgagtaaaggcagaaacagaagcaaggtgatggggcgggagagcaagaagcaaaataaaaggcagaagttgagcaacctaaacaaaaagtaagatta

SEQ ID NO: 7830 - DNA, 122 bp, Homo sapiens
  misc_feature (61)..(62): /note="This region represents a CpG dinucleotide"
  misc_feature (61)..(61): /note="Nucleotide may be methylated to form 5-methylcytosine"
ggtaagggaagaattgaatgtgtaaacaagcatgaaatgcaaactggagcagtaactccacgtatgaggcagaaaagaaacttaaaaagcaaacaaaaaggtggtttgtttacaggaagaat

SEQ ID NO: 7831 - DNA, 122 bp, Homo sapiens
  misc_feature (61)..(62): /note="This region represents a CpG dinucleotide"
  misc_feature (61)..(61): /note="Nucleotide may be methylated to form 5-methylcytosine"
atccatgatgcagagataattgaagagaagtgcaaagggaaatgcagccccctggtaaaacgatataggatggagaaagaacagccaaagccactccattaggaaccagaacaaaagagcct

SEQ ID NO: 7832 - DNA, 122 bp, Homo sapiens
  misc_feature (61)..(62): /note="This region represents a CpG dinucleotide"
  misc_feature (61)..(61): /note="Nucleotide may be methylated to form 5-methylcytosine"
ggcacttctaggcagctaccaggagatcccggttccaataatgaaatactacaatgttctcggcagcctgtcctctcagtgagctgtgtcctaggattcacccacaccaacatcatttcaag

SEQ ID NO: 7833 - DNA, 122 bp, Homo sapiens
  misc_feature (61)..(62): /note="This region represents a CpG dinucleotide"
  misc_feature (61)..(61): /note="Nucleotide may be methylated to form 5-methylcytosine"
ctgaagggacaaagctgtttttagtggggagactccccgtggagggtgaaatttgcattgcgtgcttggagagtggcaagttaatgcttcctggcagcaccaggaagccgcaggtacctgtg

SEQ ID NO: 7834 - DNA, 122 bp, Homo sapiens
  misc_feature (61)..(62): /note="This region represents a CpG dinucleotide"
  misc_feature (61)..(61): /note="Nucleotide may be methylated to form 5-methylcytosine"
ggatctgaagggactgtgtgatgtggctaagcaagtgcagctgccctgcatctcttcctacgtccaagaacctcttgggcccttcctttagcccccagacaccttgaacaaccagatacaaa

SEQ ID NO: 7835 - DNA, 122 bp, Homo sapiens
  misc_feature (61)..(62): /note="This region represents a CpG dinucleotide"
  misc_feature (61)..(61): /note="Nucleotide may be methylated to form 5-methylcytosine"
tagcctcattttccacatgagaagggtttagtaagggtttagtaagagaagggtttagtacgttgctcaaggcctcagaggcaggaaatactggaaccaagattcttaccaggcagtctaaa

SEQ ID NO: 7836 - DNA, 122 bp, Homo sapiens
  misc_feature (61)..(62): /note="This region represents a CpG dinucleotide"
  misc_feature (61)..(61): /note="Nucleotide may be methylated to form 5-methylcytosine"
tttctaggaaatagctcacttgccagttttggtaaccctaacagagctgttttgccaaggcgtctggtgaatatttctgtcttccagtcaggactaatatagtacttttcagaggtgatagc

SEQ ID NO: 7837 - DNA, 122 bp, Homo sapiens
  misc_feature (61)..(62): /note="This region represents a CpG dinucleotide"
  misc_feature (61)..(61): /note="Nucleotide may be methylated to form 5-methylcytosine"
ttccatacacggtgctggtggttcaatggatttaatttgtaagagcaaagccagtcttcacgtgcaaaagctttttctcatgtctgtgcactaaaaacagtatagagaaaaatgatactttt

SEQ ID NO: 7838 - DNA, 122 bp, Homo sapiens
  misc_feature (61)..(62): /note="This region represents a CpG dinucleotide"
  misc_feature (61)..(61): /note="Nucleotide may be methylated to form 5-methylcytosine"
cgctggaaaccagcctggaaaagcctggcattttaattgatcccagagcttcttgcctcacggctcctgctgtgatgaagtctgctacttgttccaaagattctccgcctggttgcctagcc

SEQ ID NO: 7839 - DNA, 122 bp, Homo sapiens
  misc_feature (61)..(62): /note="This region represents a CpG dinucleotide"
  misc_feature (61)..(61): /note="Nucleotide may be methylated to form 5-methylcytosine"
aaaaaaaaaaaagcatctaccaagccttcctgacagcttggttcttgttttactgaataccgtatgagaggattggatgcttatctggtatggcctgccataaaattcaaaaaaagaagaga

SEQ ID NO: 7840 - DNA, 122 bp, Homo sapiens
  misc_feature (61)..(62): /note="This region represents a CpG dinucleotide"
  misc_feature (61)..(61): /note="Nucleotide may be methylated to form 5-methylcytosine"
tgtggaatggatgtgtggcagctggggacattgggccgggctcccgggcttggcctggagcgactacccggcaccatcagagggagtgagaggaagtgggcgctggtttaatgtggtcagct

SEQ ID NO: 7841 - DNA, 122 bp, Homo sapiens
  misc_feature (61)..(62): /note="This region represents a CpG dinucleotide"
  misc_feature (61)..(61): /note="Nucleotide may be methylated to form 5-methylcytosine"
tctagtgcccattcagcttcttagcctgagttactccatgttgtttatcttttcctgctgcgcatgtgtaaaaaaggtgggggaggggtggggaagggggcgcgggggcgccggggcgccag

SEQ ID NO: 7842 - DNA, 122 bp, Homo sapiens
  misc_feature (61)..(62): /note="This region represents a CpG dinucleotide"
  misc_feature (61)..(61): /note="Nucleotide may be methylated to form 5-methylcytosine"
gttaattgacaaactacacaacccagcataatcctacctgatacccccaaagcagaatcacgtttgctactgtaaacagataaaggtttaggagatgggcaggtatgtccaatgtctcactt

SEQ ID NO: 7843 - DNA, 122 bp, Homo sapiens
  misc_feature (61)..(62): /note="This region represents a CpG dinucleotide"
  misc_feature (61)..(61): /note="Nucleotide may be methylated to form 5-methylcytosine"
gttgtctaagggtgaagggtagcttcagagttgggttagttgcacctgcagtcacctccccgccacctcacacaccaccctgcagcttcctgccttccccatcttttcccccagcagtagga

SEQ ID NO: 7844 - DNA, 122 bp, Homo sapiens
  misc_feature (61)..(62): /note="This region represents a CpG dinucleotide"
  misc_feature (61)..(61): /note="Nucleotide may be methylated to form 5-methylcytosine"
gctaatgcaagtcccagggggactgtgttgtaagaaaaagggaaggccaggcaggtacagcgtatacatagtgcaattagatttgctgacctaaaagttagaacacgaggtctaacaaacta

SEQ ID NO: 7845 - DNA, 122 bp, Homo sapiens
  misc_feature (61)..(62): /note="This region represents a CpG dinucleotide"
  misc_feature (61)..(61): /note="Nucleotide may be methylated to form 5-methylcytosine"
aaattacttctcagtgatgagagcctgacaaagcaattgtgccctgagaattggctgtgccgcagagagacaggctggcctcctaatctcaagaagcttgggtctttgtccctggatcctgg

SEQ ID NO: 7846 - DNA, 122 bp, Homo sapiens
  misc_feature (61)..(62): /note="This region represents a CpG dinucleotide"
  misc_feature (61)..(61): /note="Nucleotide may be methylated to form 5-methylcytosine"
tgctaaaatttcttatttaaaaaacgttagttttagtgggaggggagatgtcagtatttacgagagcgtttacaatggtgggcccaactaccaggagcacaagatgtaattattaagatggc

SEQ ID NO: 7847 - DNA, 122 bp, Homo sapiens
  misc_feature (61)..(62): /note="This region represents a CpG dinucleotide"
  misc_feature (61)..(61): /note="Nucleotide may be methylated to form 5-methylcytosine"
gacacagtccaactccatcctcaccaggtcactggctggaacccctgggggccaccattgcgggaatcagcctttgaaacgatggccaacagcagctaataataaaccagtaatttgggata

SEQ ID NO: 7848 - DNA, 122 bp, Homo sapiens
  misc_feature (61)..(62): /note="This region represents a CpG dinucleotide"
  misc_feature (61)..(61): /note="Nucleotide may be methylated to form 5-methylcytosine"
cccagcctcaataaatctaaagttattttgaaatcaaaagtttcttatctaacaaactaacgggataaaggggaaagtctttgagcctgagctcctggatgccctgcctctcactgatgacg

SEQ ID NO: 7849 - DNA, 122 bp, Homo sapiens
  misc_feature (61)..(62): /note="This region represents a CpG dinucleotide"
  misc_feature (61)..(61): /note="Nucleotide may be methylated to form 5-methylcytosine"
agcatggtggtacagggtagggagtcctacactggttctgattctgccactcacaagctacgttttcattctttctctgagccttgattttcccttctataaagtgaagggttagatcaaat

SEQ ID NO: 7850 - DNA, 122 bp, Homo sapiens
  misc_feature (61)..(62): /note="This region represents a CpG dinucleotide"
  misc_feature (61)..(61): /note="Nucleotide may be methylated to form 5-methylcytosine"
aagactgcagaaacagcctgggcatggatgggagtctgagccactcagcagtctaggagccggaaaccccagtctagcagcaggaacagcctggtcaggcctctgccactgctgctaggccc

SEQ ID NO: 7851 - DNA, 122 bp, Homo sapiens
  misc_feature (61)..(62): /note="This region represents a CpG dinucleotide"
  misc_feature (61)..(61): /note="Nucleotide may be methylated to form 5-methylcytosine"
caataaaagatgtaggatttgaattagaattcttgctactgaatctgtgttcttaaccaccgctttctagagagaaagaggacaaagaaggcaagtcagttctcagccctgagaattccacc

SEQ ID NO: 7852 - DNA, 122 bp, Homo sapiens
  misc_feature (61)..(62): /note="This region represents a CpG dinucleotide"
  misc_feature (61)..(61): /note="Nucleotide may be methylated to form 5-methylcytosine"
ctgagcagggcaagagcttcatgagccgctctttaatgctgcgcttggtgctgttctgagcgtacaggaaacctagaagatacaggatcagttctgttaatgctgtctgcagagagaaaagg

SEQ ID NO: 7853 - DNA, 122 bp, Homo sapiens
  misc_feature (61)..(62): /note="This region represents a CpG dinucleotide"
  misc_feature (61)..(61): /note="Nucleotide may be methylated to form 5-methylcytosine"
gaaccgatggatacaggaataatcctttgataataaccctgtaatcctcttggcactaaccgcttcagattttgtgagttaaaccagctccacactcaggtcccagactgggcaaaggagat

SEQ ID NO: 7854 - DNA, 122 bp, Homo sapiens
  misc_feature (61)..(62): /note="This region represents a CpG dinucleotide"
  misc_feature (61)..(61): /note="Nucleotide may be methylated to form 5-methylcytosine"
gcgtgcacaggtcctgtccgtggcgcatccgccctgaatcacagaaaacacgcaccccgccgtcaggcccctgtgacctcgggtgtgtgagtggcagttattttcgttgaagccagtgtccc

SEQ ID NO: 7855 - DNA, 122 bp, Homo sapiens
  misc_feature (61)..(62): /note="This region represents a CpG dinucleotide"
  misc_feature (61)..(61): /note="Nucleotide may be methylated to form 5-methylcytosine"
actgatttgacattttgcaatgaggagtacttagtgttacttgctactaggaaatttcatcgtgtactccctcttagcatgtataaaaagtttaactagcatgttccctacattccctggca

SEQ ID NO: 7856 - DNA, 122 bp, Homo sapiens
  misc_feature (61)..(62): /note="This region represents a CpG dinucleotide"
  misc_feature (61)..(61): /note="Nucleotide may be methylated to form 5-methylcytosine"
ttctgtgctctactaatgctactttaattttcgaagaagtaatattataaaccagtcatgcgggataagaaaaaccctagacattccatagtggccgggtagctatagaacataattcccat

SEQ ID NO: 7857 - DNA, 122 bp, Homo sapiens
  misc_feature (61)..(62): /note="This region represents a CpG dinucleotide"
  misc_feature (61)..(61): /note="Nucleotide may be methylated to form 5-methylcytosine"
ttaaaatggaaatcagatatgatttcccaactactcaactctgctgttgtagcacgcaaacggccatagagaacatgtaagtgagcggttgtggctgcattccaataaaatatttctgcata

SEQ ID NO: 7858 - DNA, 122 bp, Homo sapiens
  misc_feature (61)..(62): /note="This region represents a CpG dinucleotide"
  misc_feature (61)..(61): /note="Nucleotide may be methylated to form 5-methylcytosine"
agggaggtagtgaaagggaagctggccggacaggcagggccattccaagagggctttgtgcgcagggctaagccaagctttctccataggcaatggggagcaactggaggttcgtagcagga

SEQ ID NO: 7859 - DNA, 122 bp, Homo sapiens
  misc_feature (61)..(62): /note="This region represents a CpG dinucleotide"
  misc_feature (61)..(61): /note="Nucleotide may be methylated to form 5-methylcytosine"
gtacagtcatctcatagaaatgaagaaactttataggattcctgaggagtgctgagtgcccgcttgaggtttctgaattctgaatcagtcatcttggctttgtaactttcctcaacaaagtt

SEQ ID NO: 7860 - DNA, 122 bp, Homo sapiens
  misc_feature (61)..(62): /note="This region represents a CpG dinucleotide"
  misc_feature (61)..(61): /note="Nucleotide may be methylated to form 5-methylcytosine"
tacaaagacagcagcaacacgtactcattcaacaaacactccctgagtgcttgctatgtgcgtggattgtcctgggtgctgcagatgacacagggatgagccagatgtcttggccaacagag

SEQ ID NO: 7861 - DNA, 122 bp, Homo sapiens
  misc_feature (61)..(62): /note="This region represents a CpG dinucleotide"
  misc_feature (61)..(61): /note="Nucleotide may be methylated to form 5-methylcytosine"
aagcgaggtgggtcagagctcggggtcaacttaccgggggtcctttcggtccaggaaacccgttgggaccctgaggtccagggaggccctagagacagaggtggggggagtcaggagaatgg

SEQ ID NO: 7862 - DNA, 122 bp, Homo sapiens
  misc_feature (61)..(62): /note="This region represents a CpG dinucleotide"
  misc_feature (61)..(61): /note="Nucleotide may be methylated to form 5-methylcytosine"
ttcactgaccaggcctttcctggaggaaacacccagggccgggcggctgctgtttccacacgtggactcggatctgctgtgacaccgtcagcccgacagtctctccatatgcagcctttcct

SEQ ID NO: 7863 - DNA, 122 bp, Homo sapiens
  misc_feature (61)..(62): /note="This region represents a CpG dinucleotide"
  misc_feature (61)..(61): /note="Nucleotide may be methylated to form 5-methylcytosine"
tcttgcttcaggctttgttctatagaaaacccagttacaacaacatccaaacaaagatatcgagtaagaagttcaaagcctagaactcaagagcaaagtcaggattggagctatcagtatgg

SEQ ID NO: 7864 - DNA, 122 bp, Homo sapiens
  misc_feature (61)..(62): /note="This region represents a CpG dinucleotide"
  misc_feature (61)..(61): /note="Nucleotide may be methylated to form 5-methylcytosine"
ttggacatggcaataattaaatatcagcatcaggcagcctcactaaacaagacgctgcagcgtttcaaattaaggggccaaccttaggcacacacacgaccgaagagcagccgctgagctca

SEQ ID NO: 7865 - DNA, 122 bp, Homo sapiens
  misc_feature (61)..(62): /note="This region represents a CpG dinucleotide"
  misc_feature (61)..(61): /note="Nucleotide may be methylated to form 5-methylcytosine"
gaaacacccttttctacttcaaaggaactgagagaaagtggctgggcagataaaaccctgcggaatgtcccataaatcagcaggctgttgagttacccaaacaaactgcaggggcaggggag

SEQ ID NO: 7866 - DNA, 122 bp, Homo sapiens
  misc_feature (61)..(62): /note="This region represents a CpG dinucleotide"
  misc_feature (61)..(61): /note="Nucleotide may be methylated to form 5-methylcytosine"
gtgggtgtgtgtgcgtgctcaccacacagttggcatcctgtggggcagctcagatacaggcggagcaaggccctgctggaggcacctgccctgcggtcacacagcacacacctgaaaccaca

SEQ ID NO: 7867 - DNA, 122 bp, Homo sapiens
  misc_feature (61)..(62): /note="This region represents a CpG dinucleotide"
  misc_feature (61)..(61): /note="Nucleotide may be methylated to form 5-methylcytosine"
accattagccaccctttaatgagcgggtgagtgccctttctgcatcagacacagtatttccgtacatcattagtgccaatcctcacaataatcctgtgttcatctccctaatttacaaagag

SEQ ID NO: 7868 - DNA, 122 bp, Homo sapiens
  misc_feature (61)..(62): /note="This region represents a CpG dinucleotide"
  misc_feature (61)..(61): /note="Nucleotide may be methylated to form 5-methylcytosine"
ggaaaatgaacacaccctgtatgacaagcaccagtggtactccccgacttgaaagagatgcgtctcatcggagccatggcctttacggctttggctttgatgtcatgtttgaagacactttg

SEQ ID NO: 7869 - DNA, 122 bp, Homo sapiens
  misc_feature (61)..(62): /note="This region represents a CpG dinucleotide"
  misc_feature (61)..(61): /note="Nucleotide may be methylated to form 5-methylcytosine"
tgtgtggcacagcctaggctcatagacatcacattctctgtggttctacttgtgctcactcgtaattgtcacctgccctggaatatgtgagctttcagtgagaaagaacatctgtccctctt

SEQ ID NO: 7870 - DNA, 122 bp, Homo sapiens
  misc_feature (61)..(62): /note="This region represents a CpG dinucleotide"
  misc_feature (61)..(61): /note="Nucleotide may be methylated to form 5-methylcytosine"
ggagagttcccattgaaattcattcgggagcctgttaacagctgttgtttccagtagggacgggcaacagagagaacaataaataactcaaatataaaatgcctttaccttctttgttctac

SEQ ID NO: 7871 - DNA, 122 bp, Homo sapiens
  misc_feature (61)..(62): /note="This region represents a CpG dinucleotide"
  misc_feature (61)..(61): /note="Nucleotide may be methylated to form 5-methylcytosine"
ttatgactacagttttattacagcaaaagggtgcaaattaaaatcagccaagggaggagacgcatagggcagagtccaggaggggtcaaactctgagactctagtcatctgtccgccttgtg

SEQ ID NO: 7872 - DNA, 122 bp, Homo sapiens
  misc_feature (61)..(62): /note="This region represents a CpG dinucleotide"
  misc_feature (61)..(61): /note="Nucleotide may be methylated to form 5-methylcytosine"
agaactagtggtggtgggatggtatttggtacagaggagggaatgttctgccatctggtccgagaagaagagaaggtcaatttgcctagaaagaagaatgaagctgactcacaaagaagcag

SEQ ID NO: 7873 - DNA, 122 bp, Homo sapiens
  misc_feature (61)..(62): /note="This region represents a CpG dinucleotide"
  misc_feature (61)..(61): /note="Nucleotide may be methylated to form 5-methylcytosine"
ccatatgctgtcagaacagtgccggcctgggagctgcatgtgatctgggcttgggttgagcgggttgggagatgctagccatatttggaagaaaaaggcacctgaggctctgaggcttcggt

SEQ ID NO: 7874 - DNA, 122 bp, Homo sapiens
  misc_feature (61)..(62): /note="This region represents a CpG dinucleotide"
  misc_feature (61)..(61): /note="Nucleotide may be methylated to form 5-methylcytosine"
tattaggtcaaatgctttgtaaagttccttccagttctgaagctctatggttgtaagcctcgccttggcttgactgcacggctttaaagtacgaatctgttcacaggttgtccatgattaaa

SEQ ID NO: 7875 - DNA, 122 bp, Homo sapiens
  misc_feature (61)..(62): /note="This region represents a CpG dinucleotide"
  misc_feature (61)..(61): /note="Nucleotide may be methylated to form 5-methylcytosine"
ttctaagtccctttcacatatattatttcatctgggcctcacatcactgtgcatctgctacgtaactatggcagttcagcaggtcacacattctttcttcttaataatttttatttcagcta

SEQ ID NO: 7876 - DNA, 122 bp, Homo sapiens
  misc_feature (61)..(62): /note="This region represents a CpG dinucleotide"
  misc_feature (61)..(61): /note="Nucleotide may be methylated to form 5-methylcytosine"
acattcattataccagcagtagtctctctgtgatcacactcattagactgtttactaccacgaattctgggagaaatggcctgggacattaaaagaaacaaacaagctaagagggctgtcta

SEQ ID NO: 7877 - DNA, 122 bp, Homo sapiens
  misc_feature (61)..(62): /note="This region represents a CpG dinucleotide"
  misc_feature (61)..(61): /note="Nucleotide may be methylated to form 5-methylcytosine"
cctgccgcggctgccacttctgggagattcatctctaaggcctcaggggacctgggggatcgggagacaggctgtaccatggcgtctccaccaccacacggtcccctccccgcctgcacccc

SEQ ID NO: 7878 - DNA, 122 bp, Homo sapiens
  misc_feature (61)..(62): /note="This region represents a CpG dinucleotide"
  misc_feature (61)..(61): /note="Nucleotide may be methylated to form 5-methylcytosine"
caccacacatcaaagccagaggccctgggaggctggccagccgccaaagacgcctgagagcggcaggggagtgtgttgccttaggacaatagcaaactgggacgtggtagagtctgtaaatt

SEQ ID NO: 7879 - DNA, 122 bp, Homo sapiens
  misc_feature (61)..(62): /note="This region represents a CpG dinucleotide"
  misc_feature (61)..(61): /note="Nucleotide may be methylated to form 5-methylcytosine"
acttgctgtatcttaggcaaacaaaatattctatggactatactgtaaacttcatgatctcgtattttaatggttggtagtaggaaacagttttagcaggataattcggtctaaatttaggt

SEQ ID NO: 7880 - DNA, 122 bp, Homo sapiens
  misc_feature (61)..(62): /note="This region represents a CpG dinucleotide"
  misc_feature (61)..(61): /note="Nucleotide may be methylated to form 5-methylcytosine"
gccctttacgatgacctagtccaacccactcattgtacagattgggaaactggggcccagcgagattactatttaacagctttgaaatgactgcaggagggagaacacgaggaaacatccaa

SEQ ID NO: 7881 - DNA, 122 bp, Homo sapiens
  misc_feature (61)..(62): /note="This region represents a CpG dinucleotide"
  misc_feature (61)..(61): /note="Nucleotide may be methylated to form 5-methylcytosine"
cctagctttagattggcgcctcagcggcttctgactttagcaattccagtgttcaggcagcgaaagccagggaaacacaatagaaatgacaggggcgggagtaacaggagagtgttggaaaa

SEQ ID NO: 7882 - DNA, 122 bp, Homo sapiens
  misc_feature (61)..(62): /note="This region represents a CpG dinucleotide"
  misc_feature (61)..(61): /note="Nucleotide may be methylated to form 5-methylcytosine"
tataccgataaggaaatgtcaccaagatagggtgttaaagcgggggaaaaacccaacaaacgtgtagaacgtgtacagactggcactaaatatgttaaaatggagtaaggaagggtatagat

SEQ ID NO: 7883 - DNA, 122 bp, Homo sapiens
  misc_feature (61)..(62): /note="This region represents a CpG dinucleotide"
  misc_feature (61)..(61): /note="Nucleotide may be methylated to form 5-methylcytosine"
ttaagtactaataattcactttattcagcaggctctttaacgggggatccaaacgtaaaacgagagagcacgcgtgtttaaatcgaattaattaccatacgaaagttcaaccagacttagga

SEQ ID NO: 7884 - DNA, 122 bp, Homo sapiens
  misc_feature (61)..(62): /note="This region represents a CpG dinucleotide"
  misc_feature (61)..(61): /note="Nucleotide may be methylated to form 5-methylcytosine"
cattgatgattcctttctttatattgagtgaaggaaaccagaaacaactctatgagtcaacgtatgtgaaactgccggaaaaggcaaaactaagctatactgacaggaagatctgtggttgc

SEQ ID NO: 7885 - DNA, 122 bp, Homo sapiens
  misc_feature (61)..(62): /note="This region represents a CpG dinucleotide"
  misc_feature (61)..(61): /note="Nucleotide may be methylated to form 5-methylcytosine"
attcaccccaatcctgggacaaactctctctcattgagtcctatgagaatggaatagtctcgcccatcaggtgagagtgtaaacaatcacgtatgacatcacatcacaacaccaccttgggg

SEQ ID NO: 7886 - DNA, 122 bp, Homo sapiens
  misc_feature (61)..(62): /note="This region represents a CpG dinucleotide"
  misc_feature (61)..(61): /note="Nucleotide may be methylated to form 5-methylcytosine"
gggttattcatactcttaatatttctattaagaaagtagaagactgacagaggttaaaagcggctcattaacttagcagagaggcaggcttgaggaggagcctccagtcttctgagccccag

SEQ ID NO: 7887 - DNA, 122 bp, Homo sapiens
  misc_feature (61)..(62): /note="This region represents a CpG dinucleotide"
  misc_feature (61)..(61): /note="Nucleotide may be methylated to form 5-methylcytosine"
ggcctctatttctagtaactcactcatttcctgacttggacctggctggtgctgtatcctcgtggatggcatttgcgccagggcagaggttcagagcagttgtccgcttggcagaagtcagg

SEQ ID NO: 7888 - DNA, 122 bp, Homo sapiens
  misc_feature (61)..(62): /note="This region represents a CpG dinucleotide"
  misc_feature (61)..(61): /note="Nucleotide may be methylated to form 5-methylcytosine"
tttcttaaagccttctatggaacccttagataatttaactataaaatgagttttctaaaacgtctgcgttagaattggagcattcttattgaatgttgaagcttttaagagagaacttgatg

SEQ ID NO: 7889 - DNA, 122 bp, Homo sapiens
  misc_feature (61)..(62): /note="This region represents a CpG dinucleotide"
  misc_feature (61)..(61): /note="Nucleotide may be methylated to form 5-methylcytosine"
ccgactgtaagctcttcaccgctctgtattttctctcagcaatagaatgggagtgactggcgtaactttaaattttctggtaacctgttttttaaaaaataaaaacaaaaacatggaattgt

SEQ ID NO: 7890 - DNA, 122 bp, Homo sapiens
  misc_feature (61)..(62): /note="This region represents a CpG dinucleotide"
  misc_feature (61)..(61): /note="Nucleotide may be methylated to form 5-methylcytosine"
cattgtcctcattgtcactgccattcactggggacttggccttgtgctaagaacttgacacgtgttgtcttattcagtcctcaccaaaactctacgagcaggaattaccgttatccccattt

SEQ ID NO: 7891 - DNA, 122 bp, Homo sapiens
  misc_feature (61)..(62): /note="This region represents a CpG dinucleotide"
  misc_feature (61)..(61): /note="Nucleotide may be methylated to form 5-methylcytosine"
aaccagactctatcttgggaatgtgaattgagaaatatagacttgagatcagtttgttcacgagacacaataaaggaaattagctttggagaaagttctttgtcaggaactctcctgtcgca

SEQ ID NO: 7892 - DNA, 122 bp, Homo sapiens
  misc_feature (61)..(62): /note="This region represents a CpG dinucleotide"
  misc_feature (61)..(61): /note="Nucleotide may be methylated to form 5-methylcytosine"
actgagattggttgacattgcaagctcagttttcattcaagcagacacagcatccgacaccgcctatggaccagagtttgattacataatactcgcaggttaccaaattatttacacaactt

SEQ ID NO: 7893 - DNA, 122 bp, Homo sapiens
  misc_feature (61)..(62): /note="This region represents a CpG dinucleotide"
  misc_feature (61)..(61): /note="Nucleotide may be methylated to form 5-methylcytosine"
ggttttagagacttacccaacaccttcctgccctcaggagttcaccagagggaagagcaacgcaatccagacttcacccgggaatagttgtgtggctttggccgagatgtttctcctccctg

SEQ ID NO: 7894 - DNA, 122 bp, Homo sapiens
  misc_feature (61)..(62): /note="This region represents a CpG dinucleotide"
  misc_feature (61)..(61): /note="Nucleotide may be methylated to form 5-methylcytosine"
agaagggaagaattgagaaatattttagaggctgattcagtaacaagtcatagtgaccaacgcaagatgcaggagtcaaagatgactttgatgttgatacattcattagacatttattgtgt

SEQ ID NO: 7895 - DNA, 122 bp, Homo sapiens
  misc_feature (61)..(62): /note="This region represents a CpG dinucleotide"
  misc_feature (61)..(61): /note="Nucleotide may be methylated to form 5-methylcytosine"
ctagtatgagcatttgctcaattactcactatgattagtatccggattatttacagatcacgggtcatggtcatttggacataggagcatgttccacttacaatgactgtgcaccaatcacc

SEQ ID NO: 7896 - DNA, 122 bp, Homo sapiens
  misc_feature (61)..(62): /note="This region represents a CpG dinucleotide"
  misc_feature (61)..(61): /note="Nucleotide may be methylated to form 5-methylcytosine"
ggatcttcagtgatttacataatttctctgagtcatgatttcctcctctctgagacaatccgttcacgaaagtatcaagttgtgaacggcacatagtaggtccccggtgctgactcattact

SEQ ID NO: 7897 - DNA, 122 bp, Homo sapiens
  misc_feature (61)..(62): /note="This region represents a CpG dinucleotide"
  misc_feature (61)..(61): /note="Nucleotide may be methylated to form 5-methylcytosine"
aacttctcttttcactcgaagaaaaacaaggacagtgattgcaatgacactggatgtttgcgctgtttgataagtgatgactaacacgtctactacttttaacaatttttgctttcctctcc

SEQ ID NO: 7898 - DNA, 122 bp, Homo sapiens
  misc_feature (61)..(62): /note="This region represents a CpG dinucleotide"
  misc_feature (61)..(61): /note="Nucleotide may be methylated to form 5-methylcytosine"
gtttttatatatttttgtagtgtgttgagaagagcaaaagctttataaatatacctgatgcgctgtagaatgaaaatgtaaaagataacctgtatgtgttccgagctttaattttttgttta

SEQ ID NO: 7899 - DNA, 122 bp, Homo sapiens
  misc_feature (61)..(62): /note="This region represents a CpG dinucleotide"
  misc_feature (61)..(61): /note="Nucleotide may be methylated to form 5-methylcytosine"
ggctcttccagcagctgaggcaacacaccctcctgtatgggaagtgggtggtgtatcacacgattcatcacagcactttcattgtttcaaaattctgtgaggagtaagaaaaaatataaaag

SEQ ID NO: 7900 - DNA, 122 bp, Homo sapiens
  misc_feature (61)..(62): /note="This region represents a CpG dinucleotide"
  misc_feature (61)..(61): /note="Nucleotide may be methylated to form 5-methylcytosine"
ggagatgttcctgccaggcatgctgcctacttaagatgttctgacattttcaggaagttacgtaacacagtatgaaatagtcaaacgttgctttttagctgataaatcctccagcaacgtat

SEQ ID NO: 7901 - DNA, 122 bp, Homo sapiens
  misc_feature (61)..(62): /note="This region represents a CpG dinucleotide"
  misc_feature (61)..(61): /note="Nucleotide may be methylated to form 5-methylcytosine"
ggggtccccctcatctcccactcactccctccattcagcccccactggccccatccttcccgaactcaccagccacactccaaccttagggcttttgctatagttgtttcttctagaacagg

SEQ ID NO: 7902 - DNA, 122 bp, Homo sapiens
  misc_feature (61)..(62): /note="This region represents a CpG dinucleotide"
  misc_feature (61)..(61): /note="Nucleotide may be methylated to form 5-methylcytosine"
aaatggagttgtcccatgttcagtcaaaatggccaggcctttaaagcccactcagtttcacgtggtccatacccaaaaggaagtgaagttgggtagggcagccctcttggcaggcaatccct

SEQ ID NO: 7903 - DNA, 122 bp, Homo sapiens
  misc_feature (61)..(62): /note="This region represents a CpG dinucleotide"
  misc_feature (61)..(61): /note="Nucleotide may be methylated to form 5-methylcytosine"
gggttgagaagacattgaccagaccaaaaggagaattgaaagtacttcccctgaacttcacgactagttggtctggctagatcaccttattgtgaaactccagatgacaagccctttccatt

SEQ ID NO: 7904 - DNA, 122 bp, Homo sapiens
  misc_feature (61)..(62): /note="This region represents a CpG dinucleotide"
  misc_feature (61)..(61): /note="Nucleotide may be methylated to form 5-methylcytosine"
aggttaagcacagaactggactgtttgtatcaaggaaattcgtggagcttgttctcctgccgctatagcagctggtattgcctggtctaatgtcccttctttgatttcattgttaagccctc

SEQ ID NO: 7905 - DNA, 122 bp, Homo sapiens
  misc_feature (61)..(62): /note="This region represents a CpG dinucleotide"
  misc_feature (61)..(61): /note="Nucleotide may be methylated to form 5-methylcytosine"
agcagttgaggctactgttgctcaacacattttgctttcacttcagtccatcagtcttttcgcaatgtgaagatcacccacatggaagtgtcctgggatatgtcaggcacctctttacttcc

SEQ ID NO: 7906 - DNA, 122 bp, Homo sapiens
  misc_feature (61)..(62): /note="This region represents a CpG dinucleotide"
  misc_feature (61)..(61): /note="Nucleotide may be methylated to form 5-methylcytosine"
tttaatacacaggttgacagtgatgacttcaccgtaccagtgtctgttggtcacaaaccacgtgtatactctgcagcaaggatgggctggcagtgaaaacctcatgtgtcattttgctttca

SEQ ID NO: 7907 - DNA, 122 bp, Homo sapiens
  misc_feature (61)..(62): /note="This region represents a CpG dinucleotide"
  misc_feature (61)..(61): /note="Nucleotide may be methylated to form 5-methylcytosine"
agggttgtgagctttgattgtgtaaaatgcctctcctgccgaggtcggaggcaggtcttccgcacggagatgatttattcaggagccttttaaaactgatctagatagaacctttgggaggg

SEQ ID NO: 7908 - DNA, 122 bp, Homo sapiens
  misc_feature (61)..(62): /note="This region represents a CpG dinucleotide"
  misc_feature (61)..(61): /note="Nucleotide may be methylated to form 5-methylcytosine"
cagattccactaatcagaaatgtaaggcataaagtagactaggatttatctttttatcaacgatgatgaaagatggcccaaggaaataaatgacataaacaagattaaagggggatgttttc

SEQ ID NO: 7909 - DNA, 122 bp, Homo sapiens
  misc_feature (61)..(62): /note="This region represents a CpG dinucleotide"
  misc_feature (61)..(61): /note="Nucleotide may be methylated to form 5-methylcytosine"
gggactactgacttgggttcctttgtggcggccttgctatccaggctcagattgcaggcacggcttccatgatgcaaccacagtgtgagtgtttagtttttagcactcactacaaccacatg

SEQ ID NO: 7910 - DNA, 122 bp, Homo sapiens
  misc_feature (61)..(62): /note="This region represents a CpG dinucleotide"
  misc_feature (61)..(61): /note="Nucleotide may be methylated to form 5-methylcytosine"
atattcccaaaagctctatttttttttctttcttcttttaggttctctgtgttctatcgacgtctggtgcaatggagaagtcaggagatggtacttgaatcctgactctgtcacaagctggc

SEQ ID NO: 7911 - DNA, 122 bp, Homo sapiens
  misc_feature (61)..(62): /note="This region represents a CpG dinucleotide"
  misc_feature (61)..(61): /note="Nucleotide may be methylated to form 5-methylcytosine"
tttagttcttggtaattctacccaagtctgaaaggaaatcaagatgactgtccacattgacgcaaatcacaggacatggaggcaatgtcaggcatttaatgttgtaaaagttgcaaaccaga

SEQ ID NO: 7912 - DNA, 122 bp, Homo sapiens
  misc_feature (61)..(62): /note="This region represents a CpG dinucleotide"
  misc_feature (61)..(61): /note="Nucleotide may be methylated to form 5-methylcytosine"
cagtaagattatagtcttacttcaatacatccaatccataataaaatacaatctcacaaacgatccagaggacccgtttaggggttccttaagaattcatgtctgtcatatgtaaggattct

SEQ ID NO: 7913 - DNA, 122 bp, Homo sapiens
  misc_feature (61)..(62): /note="This region represents a CpG dinucleotide"
  misc_feature (61)..(61): /note="Nucleotide may be methylated to form 5-methylcytosine"
gtaggttaaagttgatactcattaggactctaagtaccatatttttctacttagtgcaaacgtcagaaagtaagtaatcatgtttaaactgacaagagctttaaccaggaagttgcctacat

SEQ ID NO: 7914 - DNA, 122 bp, Homo sapiens
  misc_feature (61)..(62): /note="This region represents a CpG dinucleotide"
  misc_feature (61)..(61): /note="Nucleotide may be methylated to form 5-methylcytosine"
ggcacattttgaaattcctatgactaaactccctaaaaataggagcaatcaggccgggtgcggtgactcatacctgtaaccccagcactctgggaggccgagatgggtggaccacctgaggt

SEQ ID NO: 7915 - DNA, 122 bp, Homo sapiens
  misc_feature (61)..(62): /note="This region represents a CpG dinucleotide"
  misc_feature (61)..(61): /note="Nucleotide may be methylated to form 5-methylcytosine"
tttcccgtcctcccttcccccacaaccccccccaccccccgcccgacaatgagatccctacgaatgggaactaacagagagagtggtctcaggtcttgctatctgttacttaacaaaaatcg

SEQ ID NO: 7916 - DNA, 122 bp, Homo sapiens
  misc_feature (61)..(62): /note="This region represents a CpG dinucleotide"
  misc_feature (61)..(61): /note="Nucleotide may be methylated to form 5-methylcytosine"
acagcacagcatacagtggtcagtagatcatcagcttactcctggtctcctgttgtgaaacgctctcagatgaattgttcttgtgccatgacacaccaacgtggcaagttcctcagttgcct

SEQ ID NO: 7917 - DNA, 122 bp, Homo sapiens
  misc_feature (61)..(62): /note="This region represents a CpG dinucleotide"
  misc_feature (61)..(61): /note="Nucleotide may be methylated to form 5-methylcytosine"
agttggatacatgggcacggaaggctcatacacggccaaagaaggctagtcacatgggcacggaaggttgctacctggacacagaatgtcaacagtgatgacagctaatacattgtgggcac

SEQ ID NO: 7918 - DNA, 122 bp, Homo sapiens
  misc_feature (61)..(62): /note="This region represents a CpG dinucleotide"
  misc_feature (61)..(61): /note="Nucleotide may be methylated to form 5-methylcytosine"
ttactacacattctttattcctttctgtagaactttcacatagccatcctattagattttcgtggtcatccaaagtgcttcaggcaggtattattggcttcattttagagatgaggaaggcg

SEQ ID NO: 7919 - DNA, 122 bp, Homo sapiens
  misc_feature (61)..(62): /note="This region represents a CpG dinucleotide"
  misc_feature (61)..(61): /note="Nucleotide may be methylated to form 5-methylcytosine"
caccaagaagcaagaaacagataaatctgggaacctggccagctcaggctgtcaggcaagcgtagaccttacggaagccacgagcccccaaacccacggaaagacagttgccttaactcagg

SEQ ID NO: 7920 - DNA, 122 bp, Homo sapiens
  misc_feature (61)..(62): /note="This region represents a CpG dinucleotide"
  misc_feature (61)..(61): /note="Nucleotide may be methylated to form 5-methylcytosine"
tctgcagtcttaaagcagcagcagagacgtgcagccgaactgaggcaggaccggggagagcgcagccaccgcacagtcacgcacagtcatcaggaggaatttcttagaggcttaaataatca

SEQ ID NO: 7921 - DNA, 122 bp, Homo sapiens
  misc_feature (61)..(62): /note="This region represents a CpG dinucleotide"
  misc_feature (61)..(61): /note="Nucleotide may be methylated to form 5-methylcytosine"
ccatttcatagcagaggaaattgagacccagagagatgaagtcacttgcctagggtcacacggctagtcactagtcagccacaaagcaaaggccagcgttgccaaacacaccgcctgctgag

SEQ ID NO: 7922 - DNA, 122 bp, Homo sapiens
  misc_feature (61)..(62): /note="This region represents a CpG dinucleotide"
  misc_feature (61)..(61): /note="Nucleotide may be methylated to form 5-methylcytosine"
ggttggtcaagtggacagaggagtcacatctgactggtggtcaaactggcacatgtttatcgcattctaatcttttatctaacaatggtttcttaatttctgcttctttgtattttgcattt

SEQ ID NO: 7923 - DNA, 122 bp, Homo sapiens
  misc_feature (61)..(62): /note="This region represents a CpG dinucleotide"
  misc_feature (61)..(61): /note="Nucleotide may be methylated to form 5-methylcytosine"
ttgatgctgtttccccaaggcttgtttcctggttgatttaggcggtgctactaaactgagcggtagttgccgggaagatgaagcactgcctgaagtttcagtggtaaaaccatcatttactc

SEQ ID NO: 7924 - DNA, 122 bp, Homo sapiens
  misc_feature (61)..(62): /note="This region represents a CpG dinucleotide"
  misc_feature (61)..(61): /note="Nucleotide may be methylated to form 5-methylcytosine"
agggcagcccagcctgtgagtaacactcactctggatttccctggccagagtcctctctgcggaggaacttgggaccagttctttagggagttttgggtgacatcatccctccttactcaag

SEQ ID NO: 7925 - DNA, 122 bp, Homo sapiens
  misc_feature (61)..(62): /note="This region represents a CpG dinucleotide"
  misc_feature (61)..(61): /note="Nucleotide may be methylated to form 5-methylcytosine"
ggccagtgttctgtttacaaaactccagagtgtgacataccacatcagcattcatatctgcgctaagcctggagggaaacggtgcaaaacaaaggctattcagatctcttaggcattaggaa

SEQ ID NO: 7926 - DNA, 122 bp, Homo sapiens
  misc_feature (61)..(62): /note="This region represents a CpG dinucleotide"
  misc_feature (61)..(61): /note="Nucleotide may be methylated to form 5-methylcytosine"
ccaggatttacatatttcaatatcccttccttgaaggctaagcatttcctcctacagtgacgtcacttctaagaattactcagggcttctgaaggggacttcccttcgtaaccgtatcccaa

SEQ ID NO: 7927 - DNA, 122 bp, Homo sapiens
  misc_feature (61)..(62): /note="This region represents a CpG dinucleotide"
  misc_feature (61)..(61): /note="Nucleotide may be methylated to form 5-methylcytosine"
ggcgactaaaagggccgccagccagggaacaccctggggagcctacggacctctcctctgcggtgtaccttctcagtcacagtcctgacccttctggagggagatgcactgtgtaggcgatt

SEQ ID NO: 7928 - DNA, 122 bp, Homo sapiens
  misc_feature (61)..(62): /note="This region represents a CpG dinucleotide"
  misc_feature (61)..(61): /note="Nucleotide may be methylated to form 5-methylcytosine"
gcggcccctggccaaccaggaaggcacaggcagggctgagtttgcatgacaggaggagctcgggctcggaggaaagcattttagacctgaggtatcgacgaagggtcaacagggatgaccag

SEQ ID NO: 7929 - DNA, 122 bp, Homo sapiens
  misc_feature (61)..(62): /note="This region represents a CpG dinucleotide"
  misc_feature (61)..(61): /note="Nucleotide may be methylated to form 5-methylcytosine"
ctaaccttacgtatctgtgaatttcaaggatgttacatttttacataaacaactccagtgcggattctctggaatggggggagtaatacccccattctagaatattaaaacattttcccccc

SEQ ID NO: 7930 - DNA, 122 bp, Homo sapiens
  misc_feature (61)..(62): /note="This region represents a CpG dinucleotide"
  misc_feature (61)..(61): /note="Nucleotide may be methylated to form 5-methylcytosine"
tccataaaggctgaggtttttgtctgtctgttttgctgctgtagccccagcaccaagaaccgtggctggcacacagtaaattcacagtaaaaatgtcgagtcaatgaacaatcttgacttgg

SEQ ID NO: 7931 - DNA, 122 bp, Homo sapiens
  misc_feature (61)..(62): /note="This region represents a CpG dinucleotide"
  misc_feature (61)..(61): /note="Nucleotide may be methylated to form 5-methylcytosine"
acgtcatggggctctgacccaggccacagcatgggtgagccctaaggacgtcacgctcagcgcgagaagccggacacaaaaggccaaacagggtgtgatcccatttctatgaaatgtccagg

SEQ ID NO: 7932 - DNA, 122 bp, Homo sapiens
  misc_feature (61)..(62): /note="This region represents a CpG dinucleotide"
  misc_feature (61)..(61): /note="Nucleotide may be methylated to form 5-methylcytosine"
ggtgaatcaatgaaccccttaatgaatggtccacccctagatcatcagcatcctttttaacgctaggcatatagtctgaactcaacacatgtttacagatggaatgctgcacagtcctgcca

SEQ ID NO: 7933 - DNA, 122 bp, Homo sapiens
  misc_feature (61)..(62): /note="This region represents a CpG dinucleotide"
  misc_feature (61)..(61): /note="Nucleotide may be methylated to form 5-methylcytosine"
tttcaacatttgatcagtgcataacatttcttggagaggtgtggttttttttcttcccttcgttatctgtttactagggtgatgggagttaaaggtagtaaaaacttcacaatcatggttga

SEQ ID NO: 7934 - DNA, 122 bp, Homo sapiens
  misc_feature (61)..(62): /note="This region represents a CpG dinucleotide"
  misc_feature (61)..(61): /note="Nucleotide may be methylated to form 5-methylcytosine"
atgctgagtctccttgtacccacatcacctttttatgaggtcagtgttaccaagaggacccgcacacaggggaggaagaggcaggagaccaaaggaactcagtgcttgcctccagtgatgag

SEQ ID NO: 7935 - DNA, 122 bp, Homo sapiens
  misc_feature (61)..(62): /note="This region represents a CpG dinucleotide"
  misc_feature (61)..(61): /note="Nucleotide may be methylated to form 5-methylcytosine"
cccagccctctccccgcccatatatgtagggcagcagcaggatgggcttctggacttgggcggcccctccgcaggcggaccgggggcaaaggaggtggcatgtcggtcaggcacagcagggt

SEQ ID NO: 7936 - DNA, 122 bp, Homo sapiens
  misc_feature (61)..(62): /note="This region represents a CpG dinucleotide"
  misc_feature (61)..(61): /note="Nucleotide may be methylated to form 5-methylcytosine"
gcgaggaggctctaacctctggcagcctgagcagcgcaagccgggcaatggccggttgggcgcagccggcgggctttgatagggagccaggaccccctgctgggagttcccaggaggattgg

SEQ ID NO: 7937 - DNA, 122 bp, Homo sapiens
  misc_feature (61)..(62): /note="This region represents a CpG dinucleotide"
  misc_feature (61)..(61): /note="Nucleotide may be methylated to form 5-methylcytosine"
aatcagaggagaacatcacttcaccagctgagcagagctactgccactgccaaagacccccggctgaccagctgctctggagcctctgcccactctgccctccagcaaagtgcccatcctct

SEQ ID NO: 7938 - DNA, 122 bp, Homo sapiens
  misc_feature (61)..(62): /note="This region represents a CpG dinucleotide"
  misc_feature (61)..(61): /note="Nucleotide may be methylated to form 5-methylcytosine"
gtttgcttagctcttatttgggagacaaaatttttctttgacagtagggagaggtggaagcgactggaacccatgttacatggggaagaacagtgcagcaaaggacacgtttgagtttcgag

SEQ ID NO: 7939 - DNA, 122 bp, Homo sapiens
  misc_feature (61)..(62): /note="This region represents a CpG dinucleotide"
  misc_feature (61)..(61): /note="Nucleotide may be methylated to form 5-methylcytosine"
aaggttaaaaatctgggaatgacagttgtcaatttctagagacgtcttcagatggccacacgatgtcagtgtaatacaaaagaaagagcaaatgactctattgcagtggacttccattgcaa

SEQ ID NO: 7940 - DNA, 122 bp, Homo sapiens
  misc_feature (61)..(62): /note="This region represents a CpG dinucleotide"
  misc_feature (61)..(61): /note="Nucleotide may be methylated to form 5-methylcytosine"
gcactcccttccttaatgattacatttcaaagacattatcaaagagataactcccaggtgcgtgcgaaagacattcataggaattaaagttgttaagaggcttttaaaaaagatttacatat

SEQ ID NO: 7941 - DNA, 122 bp, Homo sapiens
  misc_feature (61)..(62): /note="This region represents a CpG dinucleotide"
  misc_feature (61)..(61): /note="Nucleotide may be methylated to form 5-methylcytosine"
ggggttgggaggagggagaaaatctatagctgttacagtttcccagcaatgatccagttccgcagcaatgacccagttctccagcaatgatccagttcttcaggttggaaacagcacacaca

SEQ ID NO: 7942 - DNA, 122 bp, Homo sapiens
  misc_feature (61)..(62): /note="This region represents a CpG dinucleotide"
  misc_feature (61)..(61): /note="Nucleotide may be methylated to form 5-methylcytosine"
ggttctgtgaactcaagggagggggaatagagtaaatttccaggagtacttctggttcctcgtgtccacgtgggtcttagggcagtactatatacatcaaatgttgtctaatacttccagtg

SEQ ID NO: 7943 - DNA, 122 bp, Homo sapiens
  misc_feature (61)..(62): /note="This region represents a CpG dinucleotide"
  misc_feature (61)..(61): /note="Nucleotide may be methylated to form 5-methylcytosine"
tgcagaaacacaattttggaagaaagagagggagtgcttttgagtcatttttagtttctgcggcagcaggatttccaactggtataaagatagtcaggaatgaacagaaacagtgaagggcc

SEQ ID NO: 7944 - DNA, 122 bp, Homo sapiens
  misc_feature (61)..(62): /note="This region represents a CpG dinucleotide"
  misc_feature (61)..(61): /note="Nucleotide may be methylated to form 5-methylcytosine"
cctttggcaaataatcagcacccaattaattctgaatttcccattgtttgctccagctgtcgagctccttgcacgagcaaagaatgattgttcaatgttttccttgtaatgaactgtgagag

SEQ ID NO: 7945 - DNA, 122 bp, Homo sapiens
  misc_feature (61)..(62): /note="This region represents a CpG dinucleotide"
  misc_feature (61)..(61): /note="Nucleotide may be methylated to form 5-methylcytosine"
tccctcattattttggaataaatcacatattttatatcatttcatcatcactaaattgttcggcatgtatctctaaaagataaagacatatttttccttctaaacatgaccacaataccatc

SEQ ID NO: 7946 - DNA, 122 bp, Homo sapiens
  misc_feature (61)..(62): /note="This region represents a CpG dinucleotide"
  misc_feature (61)..(61): /note="Nucleotide may be methylated to form 5-methylcytosine"
aatgttctcaaaagtaattaagaaactttaagacacagcttctactttttccccgtttagcgtagctgtttctctctgctagtcagagtttggatctgcctctgggagcccaagtgcaattg

SEQ ID NO: 7947 - DNA, 122 bp, Homo sapiens
  misc_feature (61)..(62): /note="This region represents a CpG dinucleotide"
  misc_feature (61)..(61): /note="Nucleotide may be methylated to form 5-methylcytosine"
ttcctcttacgatttcactaatggcagctcaaagctgctgagctctgccctgacggcatgcgcccccgcttctgtgagagcacgcttcctggcatgggggtcgaatcatgtcgataaaatgg

SEQ ID NO: 7948 - DNA, 122 bp, Homo sapiens
  misc_feature (61)..(62): /note="This region represents a CpG dinucleotide"
  misc_feature (61)..(61): /note="Nucleotide may be methylated to form 5-methylcytosine"
taatttgacatttgactgagagaacagcccagctccttagtggctctggtgtattgatcccgtgctgtgggcgggcgtgggtctgcggcttcctgtctgagggaatgcagtgccacggacag

SEQ ID NO: 7949 - DNA, 122 bp, Homo sapiens
  misc_feature (61)..(62): /note="This region represents a CpG dinucleotide"
  misc_feature (61)..(61): /note="Nucleotide may be methylated to form 5-methylcytosine"
cttcccactccacctcaccacctcatagaggaaaattgtgacgttaatgggaaatgtcagcggtaatgtcttcaggctgggcctgtggagtgactcccttgccacaggatatttaagcaatg

SEQ ID NO: 7950 - DNA, 122 bp, Homo sapiens
  misc_feature (61)..(62): /note="This region represents a CpG dinucleotide"
  misc_feature (61)..(61): /note="Nucleotide may be methylated to form 5-methylcytosine"
agacttaccagttactacacgtacttaaggatttacaataaaccagcttccatgcagaaacggagtttttttctggaatagaaacctgaaaagcatttctcccctggccttcctaaggggtg

SEQ ID NO: 7951 - DNA, 122 bp, Homo sapiens
  misc_feature (61)..(62): /note="This region represents a CpG dinucleotide"
  misc_feature (61)..(61): /note="Nucleotide may be methylated to form 5-methylcytosine"
tccctgctctcttcgttgttcctctgtgtttcctgcttactgcttcctccagcctgtgagcgcagcctcccctacagtggtttgcctgacctctcttgaagcaggttgcttttctagctcat

SEQ ID NO: 7952 - DNA, 122 bp, Homo sapiens
  misc_feature (61)..(62): /note="This region represents a CpG dinucleotide"
  misc_feature (61)..(61): /note="Nucleotide may be methylated to form 5-methylcytosine"
acagctcatcttttgacctaagactcttaataagtaaagagcagttgtaatctgatagcccgaggagacatgttttctttggcctacatgatgctttttagaaaacattgaggcgatattaa

SEQ ID NO: 7953 - DNA, 122 bp, Homo sapiens
  misc_feature (61)..(62): /note="This region represents a CpG dinucleotide"
  misc_feature (61)..(61): /note="Nucleotide may be methylated to form 5-methylcytosine"
atgggcaggcaggaaggcagactggtgagccccagcttacagctgcactgctgcccacagcgtgccaagttggaggccgccattgccgaggctgaggagcgtggggagctggcgctcaagga

SEQ ID NO: 7954 - DNA, 122 bp, Homo sapiens
  misc_feature (61)..(62): /note="This region represents a CpG dinucleotide"
  misc_feature (61)..(61): /note="Nucleotide may be methylated to form 5-methylcytosine"
caccttgtacaataccacagagaaatgcaaaataaataatttttaatagggcaaagggctcggtactctcaaaagcagaaatagcccagagggagggcttgagcccgtaattctagcacttt

SEQ ID NO: 7955 - DNA, 122 bp, Homo sapiens
  misc_feature (61)..(62): /note="This region represents a CpG dinucleotide"
  misc_feature (61)..(61): /note="Nucleotide may be methylated to form 5-methylcytosine"
tgccattgcattgtatttgaggaggtgaggtcatctctagccttatctagggagtctctccgagggcacaagtgtcagacaggctggagttattcaggcaggccctccacaaaccctttcac

SEQ ID NO: 7956 - DNA, 122 bp, Homo sapiens
  misc_feature (61)..(62): /note="This region represents a CpG dinucleotide"
  misc_feature (61)..(61): /note="Nucleotide may be methylated to form 5-methylcytosine"
cccatgcgcgctccagcgtcctgaccaggggaacgttttccttagggacccggaggcgagcgctggagggagggatggttgctaacgcaactctctgcagggcagacccaccagcacccgca

SEQ ID NO: 7957 - DNA, 122 bp, Homo sapiens
  misc_feature (61)..(62): /note="This region represents a CpG dinucleotide"
  misc_feature (61)..(61): /note="Nucleotide may be methylated to form 5-methylcytosine"
ttcccagtgaccataaatagtagtcaaggggaaggatttataaaccaagagaagctcccacgtaaaccccaaagttaaaatagaggaaggatttcccagcagaagcttgtatgctagtctag

SEQ ID NO: 7958 - DNA, 122 bp, Homo sapiens
  misc_feature (61)..(62): /note="This region represents a CpG dinucleotide"
  misc_feature (61)..(61): /note="Nucleotide may be methylated to form 5-methylcytosine"
catttgctttctcttgagctgtttattttgccagcaggcagggtcacctgtccaattgcccgctaatgaactgtacagtcttaactgccaacccactcccgcccgagaggagagggaaagga

SEQ ID NO: 7959 - DNA, 122 bp, Homo sapiens
  misc_feature (61)..(62): /note="This region represents a CpG dinucleotide"
  misc_feature (61)..(61): /note="Nucleotide may be methylated to form 5-methylcytosine"
atggtcactgcatcataatggcggtcacaatgcaggtatcaaagtgcctacgtgctcccccgtgtggtgagggtggggcaaagcagggctcgcttgaccactttatttcatcctctcttaag

SEQ ID NO: 7960 - DNA, 122 bp, Homo sapiens
  misc_feature (61)..(62): /note="This region represents a CpG dinucleotide"
  misc_feature (61)..(61): /note="Nucleotide may be methylated to form 5-methylcytosine"
tataacttttaggatctatgtaagtgatgcaaaatatataataagtatagatccaatccacggatgaaaagttgatgagctcattcaaaaagtctctcagtcaagaatatacctaatttcca

SEQ ID NO: 7961 - DNA, 122 bp, Homo sapiens
  misc_feature (61)..(62): /note="This region represents a CpG dinucleotide"
  misc_feature (61)..(61): /note="Nucleotide may be methylated to form 5-methylcytosine"
ataaagatttcaaaagctcttaataccctttgtaaaatgtcttcctgttaatttacctagcgtaatctctagttgctgcactgaaccctgactgatataacttgttattaagaaacaggaag

SEQ ID NO: 7962 - DNA, 122 bp, Homo sapiens
  misc_feature (61)..(62): /note="This region represents a CpG dinucleotide"
  misc_feature (61)..(61): /note="Nucleotide may be methylated to form 5-methylcytosine"
gagtcccatgcagggcatcttggcccacagctcttcaacaagtttgcactgccttacatccgtgatgtggccaagcaagtgaaggccaggttgcgggaggcaggcctggcaccagtgcccat

SEQ ID NO: 7963 - DNA, 122 bp, Homo sapiens
  misc_feature (61)..(62): /note="This region represents a CpG dinucleotide"
  misc_feature (61)..(61): /note="Nucleotide may be methylated to form 5-methylcytosine"
agtcatatgtgtgacaaaacccagctgcttcaactggaaatgagtttggcagcaatggtccggaacaccaataaattgaatacccaagagctaaaggtcatcctgcccccagaaccagtgct

SEQ ID NO: 7964 - DNA, 122 bp, Homo sapiens
  misc_feature (61)..(62): /note="This region represents a CpG dinucleotide"
  misc_feature (61)..(61): /note="Nucleotide may be methylated to form 5-methylcytosine"
aggaaagcacaagagccagtgtaacaccaaaaccactcctactcgtattcaaaaactgtgcgatttgagagtgatgtaatttcaaagaagtcacttcatcttaagaggtacaagaggccagg

SEQ ID NO: 7965 - DNA, 122 bp, Homo sapiens
  misc_feature (61)..(62): /note="This region represents a CpG dinucleotide"
  misc_feature (61)..(61): /note="Nucleotide may be methylated to form 5-methylcytosine"
gtatctctgagacaccccgattggctggagaattgacttgggagagataaggagggagggcgggtgccagcatgctatgggctcctgcgtgaggcctgtggtacacagagattaggttgtga

SEQ ID NO: 7966 - DNA, 122 bp, Homo sapiens
  misc_feature (61)..(62): /note="This region represents a CpG dinucleotide"
  misc_feature (61)..(61): /note="Nucleotide may be methylated to form 5-methylcytosine"
caacctgcagaacccccaggaggcagggattctacatcaaactggccttcccagtggccacgaaggtatacttgtcaagatcagctgataggacatattgtacttaattgtttgttagcttg

SEQ ID NO: 7967 - DNA, 122 bp, Homo sapiens
  misc_feature (61)..(62): /note="This region represents a CpG dinucleotide"
  misc_feature (61)..(61): /note="Nucleotide may be methylated to form 5-methylcytosine"
gaactagaagagcacatttgcagctaccactgtaatagctgtaataagacaagaatcatccgtgtatgatcaaaaacaatgggaggagtgacactgtgcacaccagcagggcaggaagctct

SEQ ID NO: 7968 - DNA, 122 bp, Homo sapiens
  misc_feature (61)..(62): /note="This region represents a CpG dinucleotide"
  misc_feature (61)..(61): /note="Nucleotide may be methylated to form 5-methylcytosine"
agttgtggcccagaggctggctggagggagaaagacagaagaaggaccatcggccacagtcgggctttgatcccaggatgtttgttgaatgcaggaatgactccaagcatttaaagctgggg

SEQ ID NO: 7969 - DNA, 122 bp, Homo sapiens
  misc_feature (61)..(62): /note="This region represents a CpG dinucleotide"
  misc_feature (61)..(61): /note="Nucleotide may be methylated to form 5-methylcytosine"
actgtcagtggaaagaagataattatcagcatttgtttttgtttctgacaaaagaatagccgctgggtatggtatctctgaaaacggcaagcttggtcatgtttctttatcttgaatttaca

SEQ ID NO: 7970 - DNA, 122 bp, Homo sapiens
  misc_feature (61)..(62): /note="This region represents a CpG dinucleotide"
  misc_feature (61)..(61): /note="Nucleotide may be methylated to form 5-methylcytosine"
tgaaattgcagcacgctaagcaataaggaaacaaaaattaaaaagcaaaacttccaggagcgccctataaagcttaagaataaaagaatgaaaaaataatgtatgttatttactggctggag

SEQ ID NO: 7971 - DNA, 122 bp, Homo sapiens
  misc_feature (61)..(62): /note="This region represents a CpG dinucleotide"
  misc_feature (61)..(61): /note="Nucleotide may be methylated to form 5-methylcytosine"
aaaaaattaatgagtatgtagaatgtgcgaggtgatggacacacaggcagctccttgccccgtaaagcttccattcttttgcttctgttgtgtgttttttcttttgttttttttttgttttg

SEQ ID NO: 7972 - DNA, 122 bp, Homo sapiens
  misc_feature (61)..(62): /note="This region represents a CpG dinucleotide"
  misc_feature (61)..(61): /note="Nucleotide may be methylated to form 5-methylcytosine"
tacagtgaggaaatgcagcaattgagaagcttctaaatgctgtaatcctaaacatttctccgcattgctcatgtaaatagccaataataacaatatgatagttctattttttctgtaatcta

SEQ ID NO: 7973 - DNA, 122 bp, Homo sapiens
  misc_feature (61)..(62): /note="This region represents a CpG dinucleotide"
  misc_feature (61)..(61): /note="Nucleotide may be methylated to form 5-methylcytosine"
caccagctaaatgtcagacaaagcacaagggaattggagcttgatcaatttcaaaggtttcgttcttagctacagagactgctctgattacctgaagggcatgtactgcttgggaatgctgc

SEQ ID NO: 7974 - DNA, 122 bp, Homo sapiens
  misc_feature (61)..(62): /note="This region represents a CpG dinucleotide"
  misc_feature (61)..(61): /note="Nucleotide may be methylated to form 5-methylcytosine"
tagacttgttttccagtcctgatgtttcattgactgtgtttacattgaccattcgacttgcgagcctaaacaaagagacattaacacgcttgaggaaatgcaaacagaaaatagtgtcattg

SEQ ID NO: 7975 - DNA, 122 bp, Homo sapiens
  misc_feature (61)..(62): /note="This region represents a CpG dinucleotide"
  misc_feature (61)..(61): /note="Nucleotide may be methylated to form 5-methylcytosine"
gttttgaaaaatggaaacattgtacaaatgtgagatgttgtgcaacatgtcactgaaacacggtggtataagagaagttttgggaaccagcagaccagaattaggcctgagaaaatcttaca

SEQ ID NO: 7976 - DNA, 122 bp, Homo sapiens
  misc_feature (61)..(62): /note="This region represents a CpG dinucleotide"
  misc_feature (61)..(61): /note="Nucleotide may be methylated to form 5-methylcytosine"
cacttttacttttctttgagactctccacttctcttttcctcactgagggtgtgcatgtgcgtgtgtgtgtgtgtgtgtgtgtgtgtgtgtgtgtgtgtgtgtgtttcatctgctgcttttc

SEQ ID NO: 7977 - DNA, 122 bp, Homo sapiens
  misc_feature (61)..(62): /note="This region represents a CpG dinucleotide"
  misc_feature (61)..(61): /note="Nucleotide may be methylated to form 5-methylcytosine"
ggagaaaagccggaggcttgccgagaggagcactgagaggcgactgctgggtgagaccttcgggcagggaaggcatgggatctggggagacacagagcctgatgatactcagagggctgggt

SEQ ID NO: 7978 - DNA, 122 bp, Homo sapiens
  misc_feature (61)..(62): /note="This region represents a CpG dinucleotide"
  misc_feature (61)..(61): /note="Nucleotide may be methylated to form 5-methylcytosine"
gttctgggccaaatgtatccaaattaaactgagggggatggaaataactctcccttgatacgccctggttgctgaaggtgggtttgtttttaagtagaataaaatgtacagctgaatataaa

SEQ ID NO: 7979 - DNA, 122 bp, Homo sapiens
  misc_feature (61)..(62): /note="This region represents a CpG dinucleotide"
  misc_feature (61)..(61): /note="Nucleotide may be methylated to form 5-methylcytosine"
atgactgtttatttcagagcaagtagaaaggagaaattagagccatgaaagacaggacaacggaccaataaaaaccagctcccagaagagtcagaaggaggaagacaggcaaaactgtcacc

SEQ ID NO: 7980 - DNA, 122 bp, Homo sapiens
  misc_feature (61)..(62): /note="This region represents a CpG dinucleotide"
  misc_feature (61)..(61): /note="Nucleotide may be methylated to form 5-methylcytosine"
agggagcaaatcaatccatgataaagggtgggcattctcactcacagagctaccaaaagacggaatggttgtttggggaagtagggagtttcccatccctgttcttggatgactatcaaaag

SEQ ID NO: 7981 - DNA, 122 bp, Homo sapiens
  misc_feature (61)..(62): /note="This region represents a CpG dinucleotide"
  misc_feature (61)..(61): /note="Nucleotide may be methylated to form 5-methylcytosine"
ttacaggaaagcacccaaaggaaaaaaaaaaaaaagcatcattactatttgaggaattaacgtgccacccagaaaatcctcaggggtcagatgaggactgtcagaaattctgcataggttca

SEQ ID NO: 7982 - DNA, 122 bp, Homo sapiens
  misc_feature (61)..(62): /note="This region represents a CpG dinucleotide"
  misc_feature (61)..(61): /note="Nucleotide may be methylated to form 5-methylcytosine"
taaccctgctgagacagtcagtgctgtgtgggggccggggaggggccggggttccatctccgggaagaatctcatgggatctgggccctgcaacacaagggcctttgaagtgagacgaggag

SEQ ID NO: 7983 - DNA, 122 bp, Homo sapiens
  misc_feature (61)..(62): /note="This region represents a CpG dinucleotide"
  misc_feature (61)..(61): /note="Nucleotide may be methylated to form 5-methylcytosine"
ctccgtctgggtcctaactgcagtgcatctagagaccctcctctgactcaggcataaggacggcccgcatattcatgcaggttactctgaacaagaacagtctatgggttacttccctagga

SEQ ID NO: 7984 - DNA, 122 bp, Homo sapiens
  misc_feature (61)..(62): /note="This region represents a CpG dinucleotide"
  misc_feature (61)..(61): /note="Nucleotide may be methylated to form 5-methylcytosine"
acaggataatgacctgtctctgtcttctaggagctgcctcctagggctctggggatgaaacgagatggttctacagcaccagctgagagcctgcacatagcaagtgcccagtacttgatgat

SEQ ID NO: 7985 - DNA, 122 bp, Homo sapiens
  misc_feature (61)..(62): /note="This region represents a CpG dinucleotide"
  misc_feature (61)..(61): /note="Nucleotide may be methylated to form 5-methylcytosine"
tttaattcaatggcacatagtaggtgttcaataaacattaatttcacacagatacctcaacgccctggggagtagagtagaaagaaaactaaatctagaagcaaaaacaatttcaaatccca

SEQ ID NO: 7986 - DNA, 122 bp, Homo sapiens
  misc_feature (61)..(62): /note="This region represents a CpG dinucleotide"
  misc_feature (61)..(61): /note="Nucleotide may be methylated to form 5-methylcytosine"
tagacgctgaagaagaactcccgttccagctctcggatctggtacttggtataggggcagcgctttttgcgggtgcgttggccacctgtggagggagaaaaggcatggggtgagccaggtgt

SEQ ID NO: 7987 - DNA, 122 bp, Homo sapiens
  misc_feature (61)..(62): /note="This region represents a CpG dinucleotide"
  misc_feature (61)..(61): /note="Nucleotide may be methylated to form 5-methylcytosine"
atttcctttcctttctttctccctccaaatgttcacatagcctcacatttcaagatttatcgtaatatggtgacacagatgatgaaatgtccctttctctttctaatgctcaaaaaatctag

SEQ ID NO: 7988 - DNA, 122 bp, Homo sapiens
  misc_feature (61)..(62): /note="This region represents a CpG dinucleotide"
  misc_feature (61)..(61): /note="Nucleotide may be methylated to form 5-methylcytosine"
tgcaagtacaataacaagtttcacagggccattctttacaatacactttaatatctatgacgcaatgccaaaactcacatcagtgaaattaattctacaaggcacaaaacacaagtgtacaa

SEQ ID NO: 7989 - DNA, 122 bp, Homo sapiens
  misc_feature (61)..(62): /note="This region represents a CpG dinucleotide"
  misc_feature (61)..(61): /note="Nucleotide may be methylated to form 5-methylcytosine"
atcaaataaagtgaggattgaacaattgaagggtcactgataatcactgtaaggatttagcgccagggcttggcagtactcaggtgagtaaacgttagttattgctaatattattcatttat

SEQ ID NO: 7990 - DNA, 122 bp, Homo sapiens
  misc_feature (61)..(62): /note="This region represents a CpG dinucleotide"
  misc_feature (61)..(61): /note="Nucleotide may be methylated to form 5-methylcytosine"
gatagggcctctggcctcaaaaatctaacatcccaggaggagataggagggccagccatgcgtggtttgaggttggtattaatgtcatgctgtggatctaatccagcttaaattctgcccag

SEQ ID NO: 7991 - DNA, 122 bp, Homo sapiens
  misc_feature (61)..(62): /note="This region represents a CpG dinucleotide"
  misc_feature (61)..(61): /note="Nucleotide may be methylated to form 5-methylcytosine"
aatgttgcgtgacaatcttagacaccttcgaggggtgtcttcctgtgtttgcactgtgcacgttacacagttgtgtgcatgccagcaccgacaaagcccccatgtccctttgctgagcagtt

SEQ ID NO: 7992 - DNA, 122 bp, Homo sapiens
  misc_feature (61)..(62): /note="This region represents a CpG dinucleotide"
  misc_feature (61)..(61): /note="Nucleotide may be methylated to form 5-methylcytosine"
ccagggttgctgcttatcattctacaatccacagggcagctttccaaagaatttgctggccgcaaataccaacaggtctgagattaagaaaccctgttctagatgaatatacaccaaacttt

SEQ ID NO: 7993 - DNA, 122 bp, Homo sapiens
  misc_feature (61)..(62): /note="This region represents a CpG dinucleotide"
  misc_feature (61)..(61): /note="Nucleotide may be methylated to form 5-methylcytosine"
gcactatttttaaaggaggtcattagtgagtcatgtttaagctcaatgcttagccatcatcgccatttgggtgcttgttgggaaggtcctaaattgagcggcctttgggcacagatctctgt

SEQ ID NO: 7994 - DNA, 122 bp, Homo sapiens
  misc_feature (61)..(62): /note="This region represents a CpG dinucleotide"
  misc_feature (61)..(61): /note="Nucleotide may be methylated to form 5-methylcytosine"
atgactcagccttgggagtcacacagcattggttacaaacaataaacaaatccagattcacgggcagaggagttagactccacccttaaagtgggaattgcaagattctagaacaacatatg

SEQ ID NO: 7995 - DNA, 122 bp, Homo sapiens
  misc_feature (61)..(62): /note="This region represents a CpG dinucleotide"
  misc_feature (61)..(61): /note="Nucleotide may be methylated to form 5-methylcytosine"
gagggtagttcttacaattccttgaaaatttcttgaaaagataaaggaagttaagccaaacgcaccaaggctgaacttcttggtttaaatagtaggaagacagcaatgcctgattttgcccc

SEQ ID NO: 7996 - DNA, 122 bp, Homo sapiens
  misc_feature (61)..(62): /note="This region represents a CpG dinucleotide"
  misc_feature (61)..(61): /note="Nucleotide may be methylated to form 5-methylcytosine"
aatgagcctagggagaaaaatccaggcttgctgaactaataaatcagtgggagaggtgagcgcttgctctagtgaggcatttatgattggctgcctttcattgagccacacggcgagctcat

SEQ ID NO: 7997 - DNA, 122 bp, Homo sapiens
  misc_feature (61)..(62): /note="This region represents a CpG dinucleotide"
  misc_feature (61)..(61): /note="Nucleotide may be methylated to form 5-methylcytosine"
gaagttggcagtgaagctctagccgcaaggatgttcacatgccagcatgttcacctaaagcgagagtatatatgcaactggctgagatccaaagaaggaaactgtgctaaagagagatagct

SEQ ID NO: 7998 - DNA, 122 bp, Homo sapiens
  misc_feature (61)..(62): /note="This region represents a CpG dinucleotide"
  misc_feature (61)..(61): /note="Nucleotide may be methylated to form 5-methylcytosine"
ggaaaatgtccttcttctgtccatttcctagttatgttctgaagcagatacctgagtggccgttgtggaggaaagggcagagaaatgggaggagagaaagtgacagcctccttagattactg

SEQ ID NO: 7999 - DNA, 122 bp, Homo sapiens
  misc_feature (61)..(62): /note="This region represents a CpG dinucleotide"
  misc_feature (61)..(61): /note="Nucleotide may be methylated to form 5-methylcytosine"
cttctctccatgcccctgaatctgttcatttcaaggtcatgaataacctcttttgccaaacgcagtggccaccactgtgtcttcatcttattcaactttcgaaaatatttgacatagttgat

SEQ ID NO: 8000 - DNA, 122 bp, Homo sapiens
  misc_feature (61)..(62): /note="This region represents a CpG dinucleotide"
  misc_feature (61)..(61): /note="Nucleotide may be methylated to form 5-methylcytosine"
aaggtataattgccctgctgatgctgtgcacagggcttggctcagttcagtgtggcttgacgtggcaggcacactggcacccagagaaagagagagaaccagagctgtctgtcttgcagatg

SEQ ID NO: 8001 - DNA, 122 bp, Homo sapiens
  misc_feature (61)..(62): /note="This region represents a CpG dinucleotide"
  misc_feature (61)..(61): /note="Nucleotide may be methylated to form 5-methylcytosine"
ccagtgaacagtagaacaagttgaagacatcaaatgaggctcctagcccttgcttgtggacgctgttgtgttttgcatgtaagtcaacatactttggtgaagggaacaaagggaagtgggtc

SEQ ID NO: 8002 - DNA, 122 bp, Homo sapiens
  misc_feature (61)..(62): /note="This region represents a CpG dinucleotide"
  misc_feature (61)..(61): /note="Nucleotide may be methylated to form 5-methylcytosine"
accttgggcaaggaagttatttaaccttttcttgctccagttttccacctgcaaaatgggcgtgcctacctaaatgggttggtatgaggatgagtaaattattaactcagagtgtttggcac

SEQ ID NO: 8003 - DNA, 122 bp, Homo sapiens
  misc_feature (61)..(62): /note="This region represents a CpG dinucleotide"
  misc_feature (61)..(61): /note="Nucleotide may be methylated to form 5-methylcytosine"
ctgtggttttttgcccttcctcctttttccttcttccagtttgtaccacagatatggatacgatgtttggaatgatagagctatcctgagatcatgaagatgacatgaacacacattaaagt

SEQ ID NO: 8004 - DNA, 122 bp, Homo sapiens
  misc_feature (61)..(62): /note="This region represents a CpG dinucleotide"
  misc_feature (61)..(61): /note="Nucleotide may be methylated to form 5-methylcytosine"
tttttaaatgatttaaaacctgtttctgtaccaagtggtacagaaataggggccagcccccggtccagcgccacgagctcctagggccagagtgcaagagaggcacagggcgagagggggac

SEQ ID NO: 8005 - DNA, 122 bp, Homo sapiens
  misc_feature (61)..(62): /note="This region represents a CpG dinucleotide"
  misc_feature (61)..(61): /note="Nucleotide may be methylated to form 5-methylcytosine"
ctgcacccggaaggaggaagctgcacagggtgtctgtggctggccccgggatcccccactcggggacttcctcttcctctcagggcaggtgcagctgccacagtgagacgggcaccccgacc

SEQ ID NO: 8006 - DNA, 122 bp, Homo sapiens
  misc_feature (61)..(62): /note="This region represents a CpG dinucleotide"
  misc_feature (61)..(61): /note="Nucleotide may be methylated to form 5-methylcytosine"
tcccctcctcctcccatctgctccccgcccctcccctgggcccactcccgctagcggcggcggctcattgcaggccggcatgtctccccggtgacctcaccccagatctggcctttctctgt

SEQ ID NO: 8007 - DNA, 122 bp, Homo sapiens
  misc_feature (61)..(62): /note="This region represents a CpG dinucleotide"
  misc_feature (61)..(61): /note="Nucleotide may be methylated to form 5-methylcytosine"
acatcaagagccttgactccaaaatggtgtgaattggctgccatctgctggaccgggacacgtaaaggtgaattctaggttttatttagcgtccaggaaaatcaaatcccagtctcaaacaa

SEQ ID NO: 8008 - DNA, 122 bp, Homo sapiens
  misc_feature (61)..(62): /note="This region represents a CpG dinucleotide"
  misc_feature (61)..(61): /note="Nucleotide may be methylated to form 5-methylcytosine"
gaaacaaaaaccctaacaatttacagttcaccctctttgatgtaaggtgcagtggggacacgaagcccaggcctctgagtaggatgtagttggattggcacagaaagcaaactcttctttct

SEQ ID NO: 8009 - DNA, 122 bp, Homo sapiens
  misc_feature (61)..(62): /note="This region represents a CpG dinucleotide"
  misc_feature (61)..(61): /note="Nucleotide may be methylated to form 5-methylcytosine"
gcactgagttgatgatttcatggctattatctcacataatcctattggattgggtaagtacgatgaggaaactgaaattcaaagaagttaagcaaattgcttgagggccctcagatggtgaa

SEQ ID NO: 8010 - DNA, 122 bp, Homo sapiens
  misc_feature (61)..(62): /note="This region represents a CpG dinucleotide"
  misc_feature (61)..(61): /note="Nucleotide may be methylated to form 5-methylcytosine"
tcatccaaacaggcaagtgttggcctttattttgatggtgttcttgtctcaggttcgcctcgagcctattcgttattctgtgttggaggaaacagagagcggctcctttgtagcccatctgg

SEQ ID NO: 8011 - DNA, 122 bp, Homo sapiens
  misc_feature (61)..(62): /note="This region represents a CpG dinucleotide"
  misc_feature (61)..(61): /note="Nucleotide may be methylated to form 5-methylcytosine"
attgccaggaggcgagactgagagtgtcacagggattggacttgacctcagacatcttgacgctcaaaccaggattctagcagttgagttattcagtttcacgttaatccacaggcagacgg

SEQ ID NO: 8012 - DNA, 122 bp, Homo sapiens
  misc_feature (61)..(62): /note="This region represents a CpG dinucleotide"
  misc_feature (61)..(61): /note="Nucleotide may be methylated to form 5-methylcytosine"
tccttttactgtgtgtagtcactgtcctaagtgctctacttacaccttcaaaacgacctacgagacaggaactactattatacattttacatggaaggaaagtgaggcacagagagggtcag

SEQ ID NO: 8013 - DNA, 122 bp, Homo sapiens
  misc_feature (61)..(62): /note="This region represents a CpG dinucleotide"
  misc_feature (61)..(61): /note="Nucleotide may be methylated to form 5-methylcytosine"
tatttagatcctctgtgctctagggagaaggcagtgtctcagctccagccgtggcttactcgctgtaagacctgggccagatgatgtaatctctgcatgtctcagtggctcatcaaaaaaaa

SEQ ID NO: 8014 - DNA, 122 bp, Homo sapiens
  misc_feature (61)..(62): /note="This region represents a CpG dinucleotide"
  misc_feature (61)..(61): /note="Nucleotide may be methylated to form 5-methylcytosine"
ccgggggctgctgagaaaggccctgctccctggaggcaacaggtgctgagagacctggaacgaaaaacggtcacagacaacccaccagcctttcaaagtcaacgtggtaggtggcgataatc

SEQ ID NO: 8015 - DNA, 122 bp, Homo sapiens
  misc_feature (61)..(62): /note="This region represents a CpG dinucleotide"
  misc_feature (61)..(61): /note="Nucleotide may be methylated to form 5-methylcytosine"
ggaccatgaggacccaggacccagaaggcaggacagtttctcttccacatgtcgccacagcgggatgcaggcactgccatcaacgcctgtcacttggattgagcaagaacagcctctcccca

SEQ ID NO: 8016 - DNA, 122 bp, Homo sapiens
  misc_feature (61)..(62): /note="This region represents a CpG dinucleotide"
  misc_feature (61)..(61): /note="Nucleotide may be methylated to form 5-methylcytosine"
aaagtcctcctcactgaaacttgcgagtattttatgattctccttcctgtgctgacttcacgtacactagaggctcattcgtaagtgtgaagcaatgtctttagccctctgttaggatatag

SEQ ID NO: 8017 - DNA, 122 bp, Homo sapiens
  misc_feature (61)..(62): /note="This region represents a CpG dinucleotide"
  misc_feature (61)..(61): /note="Nucleotide may be methylated to form 5-methylcytosine"
aagggcatgactatgacgctggattctccctgctagtgatgcatgagcacctgtggtgaacgagatggaaatgatgaagaagcccatgatcccacctgctgattgtcataggacaatttgag

SEQ ID NO: 8018 - DNA, 122 bp, Homo sapiens
  misc_feature (61)..(62): /note="This region represents a CpG dinucleotide"
  misc_feature (61)..(61): /note="Nucleotide may be methylated to form 5-methylcytosine"
tttgccagggctcctttcttcgtgccctccgggtcttgggagcacagtagttatcgggagcgtcgcctccggcgtgggctctcgggcgcgagtttcggacgaggcctgggcgcggtggcagg

SEQ ID NO: 8019 - DNA, 122 bp, Homo sapiens
  misc_feature (61)..(62): /note="This region represents a CpG dinucleotide"
  misc_feature (61)..(61): /note="Nucleotide may be methylated to form 5-methylcytosine"
agacaggatctcactattgttgccaagtctggtcttgaacggtccttggggtcaagtgatcgtcccatctccacctcccaaagtgctgggattacagaagtgagccaccttgctcagcctgt

SEQ ID NO: 8020 - DNA, 122 bp, Homo sapiens
  misc_feature (61)..(62): /note="This region represents a CpG dinucleotide"
  misc_feature (61)..(61): /note="Nucleotide may be methylated to form 5-methylcytosine"
acccaagaggtggttcaggggcagcgcctgcaacccccaacagtgattaaaataggctcacggctgctttttaataccattgatgtaagtttttaaaatagggggaaaaaatccatgctgaa

SEQ ID NO: 8021 - DNA, 122 bp, Homo sapiens
  misc_feature (61)..(62): /note="This region represents a CpG dinucleotide"
  misc_feature (61)..(61): /note="Nucleotide may be methylated to form 5-methylcytosine"
ggcccaattcccactcccccaaacacacacaagtacacactgactaaggcacagctagggcgggggcgggcagaaggccccttgggaggacgtggcgccacagctgcaatgggtgtgggggt

SEQ ID NO: 8022 - DNA, 122 bp, Homo sapiens
  misc_feature (61)..(62): /note="This region represents a CpG dinucleotide"
  misc_feature (61)..(61): /note="Nucleotide may be methylated to form 5-methylcytosine"
ctcttatctgcctgccagagaagacagctactggtattgacagttctcctgcaccgagggcggccagccggctggggtgctgactctcagctctcttgtttttgtgcctgccaggcactcgc

SEQ ID NO: 8023 - DNA, 122 bp, Homo sapiens
  misc_feature (61)..(62): /note="This region represents a CpG dinucleotide"
  misc_feature (61)..(61): /note="Nucleotide may be methylated to form 5-methylcytosine"
ctaattacctaggcttgggtctggaatgcagacatttatagactcatagtcacaagtacacgcaaacaattagtatttcacagtgtgctccaaatctttcagtccagcagtaccttctaagg

SEQ ID NO: 8024 - DNA, 122 bp, Homo sapiens
  misc_feature (61)..(62): /note="This region represents a CpG dinucleotide"
  misc_feature (61)..(61): /note="Nucleotide may be methylated to form 5-methylcytosine"
ctagaggaaagtcaggaacctaagttctgcaaccccaactctgccactcaccagctgtttcgtgactttgaataaatcctttctttctggccctaagtgtttccatctttaaaaggagaaga

SEQ ID NO: 8025 - DNA, 122 bp, Homo sapiens
  misc_feature (61)..(62): /note="This region represents a CpG dinucleotide"
  misc_feature (61)..(61): /note="Nucleotide may be methylated to form 5-methylcytosine"
gctgaatgggacaaggagcactggataagcagaaaggcagagccgaagatcacaggcagacgctgagcttgagtgagagagaactgtgctgccactcactacagcagaaagcacagcaggcc

SEQ ID NO: 8026 - DNA, 122 bp, Homo sapiens
  misc_feature (61)..(62): /note="This region represents a CpG dinucleotide"
  misc_feature (61)..(61): /note="Nucleotide may be methylated to form 5-methylcytosine"
tctgaacgtggccaagagccaaaggatcgtatctggagcaagcagaccgattttcagaaacgcacattgggtaggttacccgtggtgacgcaaaccagacttacttgatctaaatctccttt

SEQ ID NO: 8027 - DNA, 122 bp, Homo sapiens
  misc_feature (61)..(62): /note="This region represents a CpG dinucleotide"
  misc_feature (61)..(61): /note="Nucleotide may be methylated to form 5-methylcytosine"
aatttgacttttctaaaacttgtcttctgttttaataactctcagctgaagctataatcccgctgactgagtagaggcaaaaatgaggaaaaaaagttgaaaaatgcatacctttcatcaaa

SEQ ID NO: 8028 - DNA, 122 bp, Homo sapiens
  misc_feature (61)..(62): /note="This region represents a CpG dinucleotide"
  misc_feature (61)..(61): /note="Nucleotide may be methylated to form 5-methylcytosine"
agagggaaggaattgggaacccagcaggttggtgtccttggatatgtgccccgcagaagtcgggcagcagttcctggttcgtgtggttacgctagagagaaactgacctggttcatctggtt

SEQ ID NO: 8029 - DNA, 122 bp, Homo sapiens
  misc_feature (61)..(62): /note="This region represents a CpG dinucleotide"
  misc_feature (61)..(61): /note="Nucleotide may be methylated to form 5-methylcytosine"
aggtaatggggggtagaaggatgttgtgataagctacaaattctggcaagggccagatcacgtgggccctgctacgccacaaggaggagcttgcttttacttagcagatgatagagatatta

SEQ ID NO: 8030 - DNA, 122 bp, Homo sapiens
  misc_feature (61)..(62): /note="This region represents a CpG dinucleotide"
  misc_feature (61)..(61): /note="Nucleotide may be methylated to form 5-methylcytosine"
tctcggtaagtctaggtggctgccttagcttgtcagtgacacacgaggcaggcgtgctgacgtaaggctgagacgtattcgattccaccctctgcggctctcttcctcctctccgatgcaga

SEQ ID NO: 8031 - DNA, 122 bp, Homo sapiens
  misc_feature (61)..(62): /note="This region represents a CpG dinucleotide"
  misc_feature (61)..(61): /note="Nucleotide may be methylated to form 5-methylcytosine"
taagacacctcatgtacctttgacaaagccattctagcacaagcaaaacggtcctgagaacgagtatcttagccacctggtatggcagaggacacattcatcatggaaaaagtctgaggaaa

SEQ ID NO: 8032 - DNA, 122 bp, Homo sapiens
  misc_feature (61)..(62): /note="This region represents a CpG dinucleotide"
  misc_feature (61)..(61): /note="Nucleotide may be methylated to form 5-methylcytosine"
tgaggaaaagatcatattatagaagaggaaactgacactccaagacgcttgttaacttgccgagaaagtgagtggcaaagtctgagttggaagaagttgggtctgacttcaagttcagtatc

SEQ ID NO: 8033 - DNA, 122 bp, Homo sapiens
  misc_feature (61)..(62): /note="This region represents a CpG dinucleotide"
  misc_feature (61)..(61): /note="Nucleotide may be methylated to form 5-methylcytosine"
ttgttaaaagcccatcgcaggactaactgtgccttgtcctgtggatgatagtcagttactcgttcaaatgaattagaagtcaacgttttcaccatcttgaggttcattgtattaactattca

SEQ ID NO: 8034 - DNA, 122 bp, Homo sapiens
  misc_feature (61)..(62): /note="This region represents a CpG dinucleotide"
  misc_feature (61)..(61): /note="Nucleotide may be methylated to form 5-methylcytosine"
ataatcttccccgggggaagaaattcaatttggcctgaatatcactgtatcctcactaggcggatggagttggcagccttgtacgaggttctgctagggaataatgcaaatacttccccttg

SEQ ID NO: 8035 - DNA, 122 bp, Homo sapiens
  misc_feature (61)..(62): /note="This region represents a CpG dinucleotide"
  misc_feature (61)..(61): /note="Nucleotide may be methylated to form 5-methylcytosine"
agccgggagctatttaacgaggtttagggtaggctcctaggtcactgcgcaggactgctccgttacaggtgggcaggggaggcggctgcgttacaggtgggcaggggaggcggctgcgttac

SEQ ID NO: 8036 - DNA, 122 bp, Homo sapiens
  misc_feature (61)..(62): /note="This region represents a CpG dinucleotide"
  misc_feature (61)..(61): /note="Nucleotide may be methylated to form 5-methylcytosine"
ggtcatgggttagcaccaggtgtcacagtgaatcaatcttggattggtaaaaggttgtcacgacggcagaaaattgcaggctagagcaaattgtcctatgcccattacagaatctcaagtaa

SEQ ID NO: 8037 - DNA, 122 bp, Homo sapiens
  misc_feature (61)..(62): /note="This region represents a CpG dinucleotide"
  misc_feature (61)..(61): /note="Nucleotide may be methylated to form 5-methylcytosine"
tttcttcagccactccaggctggggtcctgggggtctgaggctcccagtgacgaaggacacgacgagcaccggctccttggcccaggcattcttgaagaaggtgcggagtctcgcggccatc

SEQ ID NO: 8038 - DNA, 122 bp, Homo sapiens
  misc_feature (61)..(62): /note="This region represents a CpG dinucleotide"
  misc_feature (61)..(61): /note="Nucleotide may be methylated to form 5-methylcytosine"
tgggtcattctcttgcttaaccccagagttgctctcattttgaattgagacacattcctccgcttaacctagcttagacacaaacttcaacaaacttctctgaacccttacttgccaagaaa

SEQ ID NO: 8039 - DNA, 122 bp, Homo sapiens
  misc_feature (61)..(62): /note="This region represents a CpG dinucleotide"
  misc_feature (61)..(61): /note="Nucleotide may be methylated to form 5-methylcytosine"
atgaggaggaagaaaatgtaggtgataaggttctcatattgggccttttgacttctgttacgaaagctgttcattattatacatggctattgtatatgtctaattgagattacagataagcg

SEQ ID NO: 8040 - DNA, 122 bp, Homo sapiens
  misc_feature (61)..(62): /note="This region represents a CpG dinucleotide"
  misc_feature (61)..(61): /note="Nucleotide may be methylated to form 5-methylcytosine"
acttattgaggacatgaaattagtaagaacacagtgaagcaactgattgctttctgagcccggctaatcactggactttagcttcatcataagcaaagtcatatgcaaggtcatcatatgcg

SEQ ID NO: 8041 - DNA, 122 bp, Homo sapiens
  misc_feature (61)..(62): /note="This region represents a CpG dinucleotide"
  misc_feature (61)..(61): /note="Nucleotide may be methylated to form 5-methylcytosine"
gcttgaagacctaatgctctctctaggtctatctcagcattgagcccctggatgctgttgcgtggcttagatgacttatacatgctttgtggcatgattcatactaccttctaccttctgtg

SEQ ID NO: 8042 - DNA, 122 bp, Homo sapiens
  misc_feature (61)..(62): /note="This region represents a CpG dinucleotide"
  misc_feature (61)..(61): /note="Nucleotide may be methylated to form 5-methylcytosine"
tttactaattctgctactgctatcttctaagaacttaaaaggaggagccaggtgtacaggcggaatgtgaaagtgaacaaggagcatgaccactgaagcacagcatcacagggagacgttta

SEQ ID NO: 8043 - DNA, 122 bp, Homo sapiens
  misc_feature (61)..(62): /note="This region represents a CpG dinucleotide"
  misc_feature (61)..(61): /note="Nucleotide may be methylated to form 5-methylcytosine"
ccttctgtctggttgcacctgggtgtgcaactgagcatgcctatgactgcctgtttcttgcgggggtcatggtagccctcctgtctggctcattgtctgcctgtgtcatggtgcctgccacc

SEQ ID NO: 8044 - DNA, 122 bp, Homo sapiens
  misc_feature (61)..(62): /note="This region represents a CpG dinucleotide"
  misc_feature (61)..(61): /note="Nucleotide may be methylated to form 5-methylcytosine"
ccgacagaagtaaccgttccacttggcatggaatgtgtccctcagatacttccttgatagcggtgggtcccttgaccacttgataattcctagctcagaaactcagcggtcagggaggctct

SEQ ID NO: 8045 - DNA, 122 bp, Homo sapiens
  misc_feature (61)..(62): /note="This region represents a CpG dinucleotide"
  misc_feature (61)..(61): /note="Nucleotide may be methylated to form 5-methylcytosine"
actgaaggttccttgggtttgtgttttctctggaaaaaatttttcgtgaaacctgatgtacgtatactgcactgatgtagcctgcctgacactgtaagagattttggaaccatactcaacct

SEQ ID NO: 8046 - DNA, 122 bp, Homo sapiens
  misc_feature (61)..(62): /note="This region represents a CpG dinucleotide"
  misc_feature (61)..(61): /note="Nucleotide may be methylated to form 5-methylcytosine"
agaagtattgctgtgaactctacacatagtttatttttaatatgtatactttcctagtgccgtccactgcaaaaaccaagaaacaatggtgagccccataacagtgagcacctctagcacct

SEQ ID NO: 8047 - DNA, 122 bp, Homo sapiens
  misc_feature (61)..(62): /note="This region represents a CpG dinucleotide"
  misc_feature (61)..(61): /note="Nucleotide may be methylated to form 5-methylcytosine"
cgccctgcacgcacctttacagatgcaggtggctgtttcctgtgttagactgcaagctcccgtgagctgggtccattgctcatcgttgacttggcctggcaaataatgacttggcctggtaa

SEQ ID NO: 8048 - DNA, 122 bp, Homo sapiens
  misc_feature (61)..(62): /note="This region represents a CpG dinucleotide"
  misc_feature (61)..(61): /note="Nucleotide may be methylated to form 5-methylcytosine"
tttaattgtaggcctcggcaagccacaaaagctttgttgccacacatggtcgtggtgagtcgactgtttgaaaagctgcttgcacagagccagacacaagcgaatgcccagtgggggctgtc

SEQ ID NO: 8049 - DNA, 122 bp, Homo sapiens
  misc_feature (61)..(62): /note="This region represents a CpG dinucleotide"
  misc_feature (61)..(61): /note="Nucleotide may be methylated to form 5-methylcytosine"
gggcctgagcaagctggcacgggaagaggacagggcctctcgtgtcccctcctcccttcccgcccatcgcactggtcctgcagagatagctgtccccttggggccccggggctcccgctggc

SEQ ID NO: 8050 - DNA, 122 bp, Homo sapiens
  misc_feature (61)..(62): /note="This region represents a CpG dinucleotide"
  misc_feature (61)..(61): /note="Nucleotide may be methylated to form 5-methylcytosine"
gacactttttttcttgtcccctgaaccatttgaaagatgcagacatcctgacactaagaacgaggatggctttctgtatcaccacattaccgtcaaattgctcaagaaatggaacatcagtt

SEQ ID NO: 8051 - DNA, 122 bp, Homo sapiens
  misc_feature (61)..(62): /note="This region represents a CpG dinucleotide"
  misc_feature (61)..(61): /note="Nucleotide may be methylated to form 5-methylcytosine"
catcattgtctagaagttacattctgtatgacacatctgtcagatccctggaagcttcctcgccaccgactgcatggcaggtggtgctcatgtcactcggcccttccttggccccacacagc

SEQ ID NO: 8052 - DNA, 122 bp, Homo sapiens
  misc_feature (61)..(62): /note="This region represents a CpG dinucleotide"
  misc_feature (61)..(61): /note="Nucleotide may be methylated to form 5-methylcytosine"
aaaccagcatctccctatctgtctctcctaattgcacaaaggacttgatgtggattatcacgtcacactccacaaggaaatggcaaaacaaaaagaagtttggagaagcaaggaaagtacca

SEQ ID NO: 8053 - DNA, 122 bp, Homo sapiens
  misc_feature (61)..(62): /note="This region represents a CpG dinucleotide"
  misc_feature (61)..(61): /note="Nucleotide may be methylated to form 5-methylcytosine"
ttcacaacagcctgatgaggtcagtactctcattatgtcgatttctcagaagaggaactgcggctgggagaacgtgactcatctagctgatggagctgaggttcaagtgcaggtatctggcc

SEQ ID NO: 8054 - DNA, 122 bp, Homo sapiens
  misc_feature (61)..(62): /note="This region represents a CpG dinucleotide"
  misc_feature (61)..(61): /note="Nucleotide may be methylated to form 5-methylcytosine"
atagcacagatcagtcagtgtaaatccttcagtggcacagccaggatagcagcaccccaacgatactttgccaaagcctccatttttacttcaactgccacagtaacagactggtgtcaccc

SEQ ID NO: 8055 - DNA, 122 bp, Homo sapiens
  misc_feature (61)..(62): /note="This region represents a CpG dinucleotide"
  misc_feature (61)..(61): /note="Nucleotide may be methylated to form 5-methylcytosine"
aatttcacagtaaatttgatctgtttctcatggggcaagactttaattctgctgattattcgatatgggaaagcactctgtcactataatatctgctatgtgatccatgtataacagaatga

SEQ ID NO: 8056 - DNA, 122 bp, Homo sapiens
  misc_feature (61)..(62): /note="This region represents a CpG dinucleotide"
  misc_feature (61)..(61): /note="Nucleotide may be methylated to form 5-methylcytosine"
cattcacacatgcatacacacattcacacatatacacacacattcacacatatacacacacgcttcctatagaactgagctcaggacaaaatccaactgtgagggccactgaaggcctgttt

SEQ ID NO: 8057 - DNA, 122 bp, Homo sapiens
  misc_feature (61)..(62): /note="This region represents a CpG dinucleotide"
  misc_feature (61)..(61): /note="Nucleotide may be methylated to form 5-methylcytosine"
gcatgttttctctgaagggttaactaaaaaaaaaaaaaaaaaaagcctttgtgtctgtttcgagttctccagttgaaatactgtactcattgaactgcaagaaataaaacctgcaagtaggc

SEQ ID NO: 8058 - DNA, 122 bp, Homo sapiens
  misc_feature (61)..(62): /note="This region represents a CpG dinucleotide"
  misc_feature (61)..(61): /note="Nucleotide may be methylated to form 5-methylcytosine"
tgaaaacgggcactcattgagtgacagatcttttaccacacacaaacactaacagatacgcgtaactgcgccctgcgacattttattttccggctgctccccctccgctgtcaggtgggcag

SEQ ID NO: 8059 - DNA, 122 bp, Homo sapiens
  misc_feature (61)..(62): /note="This region represents a CpG dinucleotide"
  misc_feature (61)..(61): /note="Nucleotide may be methylated to form 5-methylcytosine"
ataaaacaatatttgcccattgtgattacactattcaaggttaaaactcttgaaaatcaacgagaaggaagcatgctataatatctgtgctatttggataagcagaaaagaaatattgcatt

SEQ ID NO: 8060 - DNA, 122 bp, Homo sapiens
  misc_feature (61)..(62): /note="This region represents a CpG dinucleotide"
  misc_feature (61)..(61): /note="Nucleotide may be methylated to form 5-methylcytosine"
ttttaaggtggttagtcatctgctaaattggctgaaatgcggattacccagttccttcgtcgtacagagttgcattctgaggagtggggctcggggatacagcccccagaaattctgaacct

SEQ ID NO: 8061 - DNA, 122 bp, Homo sapiens
  misc_feature (61)..(62): /note="This region represents a CpG dinucleotide"
  misc_feature (61)..(61): /note="Nucleotide may be methylated to form 5-methylcytosine"
cctagaactttgagaaactttggtgtttccccccttcctacttttgtttacatcatagtacgtagatggtacaatattttggttaacctcagtctgacacttagattgtgttctcttttgcc

SEQ ID NO: 8062 - DNA, 122 bp, Homo sapiens
  misc_feature (61)..(62): /note="This region represents a CpG dinucleotide"
  misc_feature (61)..(61): /note="Nucleotide may be methylated to form 5-methylcytosine"
gcccgcagcggacccagccaggtagcgaagggcttcccacgccttcccctctggcgcatgcgtgtagagacatcctgcgtcctagaacatccatttatcagtgattcatcttttaatttata

SEQ ID NO: 8063 - DNA, 122 bp, Homo sapiens
  misc_feature (61)..(62): /note="This region represents a CpG dinucleotide"
  misc_feature (61)..(61): /note="Nucleotide may be methylated to form 5-methylcytosine"
ggatggcggggtccccacatccttacggagtgcttagtgtcttttcataggtgtggaagacgaggttgcctctgaagcttactgatctcagttgaatctggaatgatgtttagaatctccag

SEQ ID NO: 8064 - DNA, 122 bp, Homo sapiens
  misc_feature (61)..(62): /note="This region represents a CpG dinucleotide"
  misc_feature (61)..(61): /note="Nucleotide may be methylated to form 5-methylcytosine"
aatctcctggatagtgtttctttaactgggctcgagccccacagtaaagtcttggtcctccgccggccagagcccacatctctgattcagcaacaggggcaggtgttcagggcaatctgggt

SEQ ID NO: 8065 - DNA, 122 bp, Homo sapiens
  misc_feature (61)..(62): /note="This region represents a CpG dinucleotide"
  misc_feature (61)..(61): /note="Nucleotide may be methylated to form 5-methylcytosine"
ttagattaagacaattaaatcaccctagatctacctagtggctagggtaagttaacacaacgtttgcaactgagccttaacatattccctcttcctgaccatgcctcctccctcaactttca

SEQ ID NO: 8066 - DNA, 122 bp, Homo sapiens
  misc_feature (61)..(62): /note="This region represents a CpG dinucleotide"
  misc_feature (61)..(61): /note="Nucleotide may be methylated to form 5-methylcytosine"
gagctgccatgcctggccttatttcccttacatttaagtggacagtcgctgcctagggttcgtgtgtgcagtttccctcagtaaatgtgcaatgagcgcctactattctctaagcactcagc

SEQ ID NO: 8067 - DNA, 122 bp, Homo sapiens
  misc_feature (61)..(62): /note="This region represents a CpG dinucleotide"
  misc_feature (61)..(61): /note="Nucleotide may be methylated to form 5-methylcytosine"
aaacataatccattacaaataagggccttacctcctaggcacatggtttatcatataaaccgtgaggaattctgctcccaatctgtgtggtgcaggcttgggtcatgacctcaagttcaaag

SEQ ID NO: 8068 - DNA, 122 bp, Homo sapiens
  misc_feature (61)..(62): /note="This region represents a CpG dinucleotide"
  misc_feature (61)..(61): /note="Nucleotide may be methylated to form 5-methylcytosine"
gaggaaacaaccaaataaattaactggataaataagtcagtgaatgaaacaaattatgagcgaatagatagacaaagggatggataattgatggatatattacagctagtgaataaaagagt

SEQ ID NO: 8069 - DNA, 122 bp, Homo sapiens
  misc_feature (61)..(62): /note="This region represents a CpG dinucleotide"
  misc_feature (61)..(61): /note="Nucleotide may be methylated to form 5-methylcytosine"
cgttctccttccgcaaggaacgtcttggggcttctcgaacatctctcagcatttactgtacgcccccctcccctcgcttttgctgataaaatggttggtgttgtgtttaaagtgtttataaa

SEQ ID NO: 8070 - DNA, 122 bp, Homo sapiens
  misc_feature (61)..(62): /note="This region represents a CpG dinucleotide"
  misc_feature (61)..(61): /note="Nucleotide may be methylated to form 5-methylcytosine"
aaggtaatgaaagtgtttcaggttcctctttgtccatttgcaaataaactggtgagttaacgtcactcccagtgcaaatgagagtgtagtgcacacgtcatgaagatgaagtggtttcccct

SEQ ID NO: 8071 - DNA, 122 bp, Homo sapiens
  misc_feature (61)..(62): /note="This region represents a CpG dinucleotide"
  misc_feature (61)..(61): /note="Nucleotide may be methylated to form 5-methylcytosine"
aagtaagaaacatcaacagatatccttatgctgtgctgtatttcaaaaatcttccacaaacgaggttccagcaatctggaaacagatatgtaaaacagcatataagctgcatttacttgccc

SEQ ID NO: 8072 - DNA, 122 bp, Homo sapiens
  misc_feature (61)..(62): /note="This region represents a CpG dinucleotide"
  misc_feature (61)..(61): /note="Nucleotide may be methylated to form 5-methylcytosine"
ggataagatccagaatttcctggattatcaggcagagtcttgttctcttccctttctttccgtcaaacaaatgaagtctctctctctgtgctgagctgcctggaggtgggggaaggatgaca

SEQ ID NO: 8073 - DNA, 122 bp, Homo sapiens
  misc_feature (61)..(62): /note="This region represents a CpG dinucleotide"
  misc_feature (61)..(61): /note="Nucleotide may be methylated to form 5-methylcytosine"
aagagggtaagtaaattaaaattagactttttgaagacattgtcctgtatgtggagctgacgttcacactgggtaatattgagagcccaggatatagcaggtacccattaaatctttgtgga

SEQ ID NO: 8074 - DNA, 122 bp, Homo sapiens
  misc_feature (61)..(62): /note="This region represents a CpG dinucleotide"
  misc_feature (61)..(61): /note="Nucleotide may be methylated to form 5-methylcytosine"
agtggaagaagtgtagctgggtgatacagcctagaaaagatatagccctgcgactgcacacgaggtttacgagcagcttgggcagtgtcactgaagaataagaaatatccagacaagaaagg

SEQ ID NO: 8075 - DNA, 122 bp, Homo sapiens
  misc_feature (61)..(62): /note="This region represents a CpG dinucleotide"
  misc_feature (61)..(61): /note="Nucleotide may be methylated to form 5-methylcytosine"
gtggctccggcagggtctccatggttggccggtccagcgcctccaggaagtcgaagctgccgcagtggcgcttgttgaaaggcgcgggctcagcaggccgagccagggatcgctcacatggc

SEQ ID NO: 8076 - DNA, 122 bp, Homo sapiens
  misc_feature (61)..(62): /note="This region represents a CpG dinucleotide"
  misc_feature (61)..(61): /note="Nucleotide may be methylated to form 5-methylcytosine"
ggtcaggtgaacaggaagttaaagactgaaaaggagacacaaaactgccgactttcccgacggcgaattggccctctggaaacagccgaccaatcacaggcagcaggggcgcgccctgcagc

SEQ ID NO: 8077 - DNA, 122 bp, Homo sapiens
  misc_feature (61)..(62): /note="This region represents a CpG dinucleotide"
  misc_feature (61)..(61): /note="Nucleotide may be methylated to form 5-methylcytosine"
acagcaaaaagggaagagacgggaaatgtgccaagatactccagggggtcagcccgggagcgggtgtaacacatacaataagcaatggccccgtgagaaggctcaggatttgcaccctcagc

SEQ ID NO: 8078 - DNA, 122 bp, Homo sapiens
  misc_feature (61)..(62): /note="This region represents a CpG dinucleotide"
  misc_feature (61)..(61): /note="Nucleotide may be methylated to form 5-methylcytosine"
cagccccttcaacctcccacactacagcccctcctacccgcccatcacccgctcacagtacgactacaccgaccaccagaactccagctcctactacagccacgcggcaggccagggcaccg

SEQ ID NO: 8079 - DNA, 122 bp, Homo sapiens
  misc_feature (61)..(62): /note="This region represents a CpG dinucleotide"
  misc_feature (61)..(61): /note="Nucleotide may be methylated to form 5-methylcytosine"
aacaatacaaaatgacttgcctatgaaagtattgtgatcagagtttgacttcagctttaacggccaagaaacagaagatgtgagtcactgccaaatatgcatattggtttattttgtgtgcg

SEQ ID NO: 8080 - DNA, 122 bp, Homo sapiens
  misc_feature (61)..(62): /note="This region represents a CpG dinucleotide"
  misc_feature (61)..(61): /note="Nucleotide may be methylated to form 5-methylcytosine"
tgaagaaagcagagttgggatgattcttaaatttgtaacacaaatgactgcatgactggtcgttctgtcaaatgaggcagtgaaatctagatggagttcaggaaaggggcaaaagacaagtt

SEQ ID NO: 8081 - DNA, 122 bp, Homo sapiens
  misc_feature (61)..(62): /note="This region represents a CpG dinucleotide"
  misc_feature (61)..(61): /note="Nucleotide may be methylated to form 5-methylcytosine"
cactcctgggccgcagccccggcggcaggcggagaggagtgctcggctggcctctgcctccgggagccaggccccctgcacagctgccctggagctccccagggcccagctcatggacagcc

SEQ ID NO: 8082 - DNA, 122 bp, Homo sapiens
  misc_feature (61)..(62): /note="This region represents a CpG dinucleotide"
  misc_feature (61)..(61): /note="Nucleotide may be methylated to form 5-methylcytosine"
gtttccctggaaactgggtggctcgggggtgcatgtgctatctctgtgtgtctgtgtaaccggagtgtgtttatgtagctccggatgtgtttgtgactctgggcttacgaatcctgtgtttg

SEQ ID NO: 8083 - DNA, 122 bp, Homo sapiens
  misc_feature (61)..(62): /note="This region represents a CpG dinucleotide"
  misc_feature (61)..(61): /note="Nucleotide may be methylated to form 5-methylcytosine"
tgtctcagttttctaaactaaccacactccaggctttgggtgacttagcaaatgtgttggcgtgggaccagcagaaaggcagattctggtcccagcctgtcgctaactagctgggcgacctt

SEQ ID NO: 8084 - DNA, 122 bp, Homo sapiens
  misc_feature (61)..(62): /note="This region represents a CpG dinucleotide"
  misc_feature (61)..(61): /note="Nucleotide may be methylated to form 5-methylcytosine"
gccacccacacctgccatgggcactaaactccagggcaggggcattgtttaccttatttgcggggccatctcagcctttagcccaggcctgtatacaataggtgttttggctgggtgtagtg

SEQ ID NO: 8085 - DNA, 122 bp, Homo sapiens
  misc_feature (61)..(62): /note="This region represents a CpG dinucleotide"
  misc_feature (61)..(61): /note="Nucleotide may be methylated to form 5-methylcytosine"
gtacataacattctgtacagggttgtaacccaggagtaataggctataccatacagcctacgtgtgtagtaggctgtgccatctaggtttgtgtaagtacactctacgatgtttgcataatg

SEQ ID NO: 8086 - DNA, 122 bp, Homo sapiens
  misc_feature (61)..(62): /note="This region represents a CpG dinucleotide"
  misc_feature (61)..(61): /note="Nucleotide may be methylated to form 5-methylcytosine"
tagggaaggagatggttctagtaccacagataacacacaagagggagcagttcagaaccacggtacaagcacctctcacagcgttggcactgtcttcagagatctctggcatgctgctttct

SEQ ID NO: 8087 - DNA, 122 bp, Homo sapiens
  misc_feature (61)..(62): /note="This region represents a CpG dinucleotide"
  misc_feature (61)..(61): /note="Nucleotide may be methylated to form 5-methylcytosine"
gcctgggagaaacagactctcttatattaatctatgaagaattttaaaagaatgaaaacccgagtttatcaagttcatgttactatctttatgtattgacatttggaaatgtctctagtcat

SEQ ID NO: 8088 - DNA, 122 bp, Homo sapiens
  misc_feature (61)..(62): /note="This region represents a CpG dinucleotide"
  misc_feature (61)..(61): /note="Nucleotide may be methylated to form 5-methylcytosine"
aggggctggaatgacgcaatgggcctcttagaaatggcattactcaccatgcttgggaggcgtcctacaagcaggtagggttcccccacccaacaattttattttattttgtttgtttgttt

SEQ ID NO: 8089 - DNA, 122 bp, Homo sapiens
  misc_feature (61)..(62): /note="This region represents a CpG dinucleotide"
  misc_feature (61)..(61): /note="Nucleotide may be methylated to form 5-methylcytosine"
tgtcttggaagaggggctaagatgtgggacgaacgtgattattcaatgggcatgcgcttccggccacgcatcacacgcacatacaccagcgcggttatccataactctaccatttcaagtga

SEQ ID NO: 8090 - DNA, 122 bp, Homo sapiens
  misc_feature (61)..(62): /note="This region represents a CpG dinucleotide"
  misc_feature (61)..(61): /note="Nucleotide may be methylated to form 5-methylcytosine"
aaacatgtagaagggtgaattatttcagcaaagttctactcatccagatgccctaggctacgggcttctgtaggctgctctaatgtgttacaaaaccctcttgggtgaactgggtgtggacg

SEQ ID NO: 8091 - DNA, 122 bp, Homo sapiens
  misc_feature (61)..(62): /note="This region represents a CpG dinucleotide"
  misc_feature (61)..(61): /note="Nucleotide may be methylated to form 5-methylcytosine"
gaactaaaattcagggagcacctgtgatgtaccaggctcattgttatttcatttacacctcgtaacaaccctaggaggtggctgattttatcttcatttttaccagtgtggaaactggggct

SEQ ID NO: 8092 - DNA, 122 bp, Homo sapiens
  misc_feature (61)..(62): /note="This region represents a CpG dinucleotide"
  misc_feature (61)..(61): /note="Nucleotide may be methylated to form 5-methylcytosine"
tattttactactgcgctgtacctagatgatgatgatacgtgagttaggctaacatttcaacgtaattttggatagagaccttgtctaaagtttacttcatattcaaacctgtccaaatgaga

SEQ ID NO: 8093 - DNA, 122 bp, Homo sapiens
  misc_feature (61)..(62): /note="This region represents a CpG dinucleotide"
  misc_feature (61)..(61): /note="Nucleotide may be methylated to form 5-methylcytosine"
cttcctcactcatgaatcattctaactttaggcactgtaaaagcctagttgaggacgtatcgctggggaggtagcgtgttatacaagtctcaaatcctaccactgaagcagtgcctactctg

SEQ ID NO: 8094 - DNA, 122 bp, Homo sapiens
  misc_feature (61)..(62): /note="This region represents a CpG dinucleotide"
  misc_feature (61)..(61): /note="Nucleotide may be methylated to form 5-methylcytosine"
cagtgcctcttctcagaggttggctcttcttagttttctctccctggtcactgcacctggcgatgcttagttcatgcttagtggggttcctggtgagccacaggatccccagctcttagtca

SEQ ID NO: 8095 - DNA, 122 bp, Homo sapiens
  misc_feature (61)..(62): /note="This region represents a CpG dinucleotide"
  misc_feature (61)..(61): /note="Nucleotide may be methylated to form 5-methylcytosine"
aataatttggccaatttggcagttaagaacagaaaccagagaagacttaagactaagacacgtagtttcatggattatgtgtcagactttcagtgaacttgtagccctgggctgtgaacttt

SEQ ID NO: 8096 - DNA, 122 bp, Homo sapiens
  misc_feature (61)..(62): /note="This region represents a CpG dinucleotide"
  misc_feature (61)..(61): /note="Nucleotide may be methylated to form 5-methylcytosine"
atatgtgtgcatgtatcattttgatgtcgattccgcatgcagagcagtcgagttgccctacgtgtgccactcacgacagaagcccttttttgcatgtatcattttggtagaatgatttatat

SEQ ID NO: 8097 - DNA, 122 bp, Homo sapiens
  misc_feature (61)..(62): /note="This region represents a CpG dinucleotide"
  misc_feature (61)..(61): /note="Nucleotide may be methylated to form 5-methylcytosine"
acccctctctggatctccatacacccggattatctggcagtcactcccttggtcagaaggcgtcactgccctcttagatcaccaccgtaggactagctgccgacccgggtcacgccactcac

SEQ ID NO: 8098 - DNA, 122 bp, Homo sapiens
  misc_feature (61)..(62): /note="This region represents a CpG dinucleotide"
  misc_feature (61)..(61): /note="Nucleotide may be methylated to form 5-methylcytosine"
cacttcaagaggaatgagtgcatacgtccaccaaaggcatgtgcaagaatgtccatagcacgtttattcgtagtagtaaaaaactggtaacctaaatgtccatcagcagttgagtggctaaa

SEQ ID NO: 8099 - DNA, 122 bp, Homo sapiens
  misc_feature (61)..(62): /note="This region represents a CpG dinucleotide"
  misc_feature (61)..(61): /note="Nucleotide may be methylated to form 5-methylcytosine"
ctttgcattctttatctggatgtattattgagttaaaatatcctcattaaatctgttcttcgagtccacatcatggagccacctggtggaaagctggctcatcacaaggtcctgtgaatagc

SEQ ID NO: 8100 - DNA, 122 bp, Homo sapiens
  misc_feature (61)..(62): /note="This region represents a CpG dinucleotide"
  misc_feature (61)..(61): /note="Nucleotide may be methylated to form 5-methylcytosine"
cactgaccaggccccgcccttcaaccagggcttctgcagcgtctacatcactctgctcaacgagctggacgaggccgtgcagttctccaatgcctcatacgaggctgccatcctggagaatc

SEQ ID NO: 8101 - DNA, 122 bp, Homo sapiens
  misc_feature (61)..(62): /note="This region represents a CpG dinucleotide"
  misc_feature (61)..(61): /note="Nucleotide may be methylated to form 5-methylcytosine"
tacccatgcatcgctgggccgatgatgaaaatgaagaagtcttctgatgaagcgagaccccggaagtgcagcttcaggcaaaatcctgagcgaattctttgctgccaggacagtccataggc

SEQ ID NO: 8102 - DNA, 122 bp, Homo sapiens
  misc_feature (61)..(62): /note="This region represents a CpG dinucleotide"
  misc_feature (61)..(61): /note="Nucleotide may be methylated to form 5-methylcytosine"
cataattctttttcacatttcacatattcgtacacattcaacatccagtccataaacatgcgctgagcacctattatatgtgattcatgtgttaggcctgaggtataaagtaaaaacacaca

SEQ ID NO: 8103 - DNA, 122 bp, Homo sapiens
  misc_feature (61)..(62): /note="This region represents a CpG dinucleotide"
  misc_feature (61)..(61): /note="Nucleotide may be methylated to form 5-methylcytosine"
ggttgctaatgcatcaggtagccatgtattccgatggagctgcttcataaaatgtagcagcgtgtgcatgtgtgagctcacatgtgtgaacatgaccagagcaccggccctgggctgtggac

SEQ ID NO: 8104 - DNA, 122 bp, Homo sapiens
  misc_feature (61)..(62): /note="This region represents a CpG dinucleotide"
  misc_feature (61)..(61): /note="Nucleotide may be methylated to form 5-methylcytosine"
agaaacatgttgtaacatcctgctggcacaaagagcccacacttactgaacatgccaaaacgttgcctcatgaatatagaagagagggcagtcagagaagtaccagctctattcttatagaa

SEQ ID NO: 8105 - DNA, 122 bp, Homo sapiens
  misc_feature (61)..(62): /note="This region represents a CpG dinucleotide"
  misc_feature (61)..(61): /note="Nucleotide may be methylated to form 5-methylcytosine"
cccagctgctttggtcattgctacattctgggaatcctctgaagactctaagaccaaactcgtaccaaagggtcacagctgctggaataaaacggctcccaagattgcaggctggagggtgc

SEQ ID NO: 8106 - DNA, 122 bp, Homo sapiens
  misc_feature (61)..(62): /note="This region represents a CpG dinucleotide"
  misc_feature (61)..(61): /note="Nucleotide may be methylated to form 5-methylcytosine"
caagggcagctctgcaaggctacagaagagctttgtgggggctctggccagacccaggggcgatggctaaaaccaaagaggaatggatgtactgaattcccatcagagaagtgtggctcccg

SEQ ID NO: 8107 - DNA, 122 bp, Homo sapiens
  misc_feature (61)..(62): /note="This region represents a CpG dinucleotide"
  misc_feature (61)..(61): /note="Nucleotide may be methylated to form 5-methylcytosine"
cctaaaagatttacttgctctggccgggctcctaattgcatgggctgagcatcagctagacgcctgaaatcgaacacctcgacaccttttaactaacctgggaacatatttctgacttggtg

SEQ ID NO: 8108 - DNA, 122 bp, Homo sapiens
  misc_feature (61)..(62): /note="This region represents a CpG dinucleotide"
  misc_feature (61)..(61): /note="Nucleotide may be methylated to form 5-methylcytosine"
tctggggagatctagaataatctaagggggtaagctggactagccaatgggaaatcaaaacgaagatactggagagatgttcccagaaaaggagcattcctaatgggcttggccctagtcac

SEQ ID NO: 8109 - DNA, 122 bp, Homo sapiens
  misc_feature (61)..(62): /note="This region represents a CpG dinucleotide"
  misc_feature (61)..(61): /note="Nucleotide may be methylated to form 5-methylcytosine"
gtctttcctcccatactagattctacacctcttgcaaactgagtcccaaagtgttctgcacgtaactggtgctcttaaaagtggtggaaagaatgaaataaatgtaatacaatgacttcagg

SEQ ID NO: 8110 - DNA, 122 bp, Homo sapiens
  misc_feature (61)..(62): /note="This region represents a CpG dinucleotide"
  misc_feature (61)..(61): /note="Nucleotide may be methylated to form 5-methylcytosine"
tgacttgcatggacttgtgccctccctacccaggcccacagactcctgcacgcaaatcaacgaatgccccaattatggatctaggaaggcagaaggcaagtcatgttccaggctctgtgcca

SEQ ID NO: 8111 - DNA, 122 bp, Homo sapiens
  misc_feature (61)..(62): /note="This region represents a CpG dinucleotide"
  misc_feature (61)..(61): /note="Nucleotide may be methylated to form 5-methylcytosine"
gccctgctcacaatccctgagtggcttctgttgtggttagagtaaatacatactcctccccgtggctcagagtcattggtgtctgtcccctgcctgccatgtaaacctcctttctcgttgtg

SEQ ID NO: 8112 - DNA, 122 bp, Homo sapiens
  misc_feature (61)..(62): /note="This region represents a CpG dinucleotide"
  misc_feature (61)..(61): /note="Nucleotide may be methylated to form 5-methylcytosine"
tgatgtaggcagtgcatctacgctggttgaaactagtgggcggtgtaggcggtgcgtctacgctggttgagctagtgcacaaagcaggcactgtaacactggttgagcccctagttcatgat

SEQ ID NO: 8113 - DNA, 122 bp, Homo sapiens
  misc_feature (61)..(62): /note="This region represents a CpG dinucleotide"
  misc_feature (61)..(61): /note="Nucleotide may be methylated to form 5-methylcytosine"
tcataaagctctaagcatgatgttaagaactccaggaatcctggactcacactgtgcttccgtcttcttattaaggctcactgactaagcttctgcaggatgattttcaaatctactgacat

SEQ ID NO: 8114 - DNA, 122 bp, Homo sapiens
  misc_feature (61)..(62): /note="This region represents a CpG dinucleotide"
  misc_feature (61)..(61): /note="Nucleotide may be methylated to form 5-methylcytosine"
aacagtaaaaaaaagaatcctttgttccaaaaaaagtgttcttaaaaatgcgttgtaggccgggcgcagtggctcacgcctgtaatcccagcactttgggaggccgagatgggtggatcacg

SEQ ID NO: 8115 - DNA, 122 bp, Homo sapiens
  misc_feature (61)..(62): /note="This region represents a CpG dinucleotide"
  misc_feature (61)..(61): /note="Nucleotide may be methylated to form 5-methylcytosine"
caccctgctcctgctgctgtctgactctgagacaacacggccgcgccaactcgctaagaccggcccagcccacggagtaatcctcaatacgctgtcacatacacgaaaagaaaatcaatcag

SEQ ID NO: 8116 - DNA, 122 bp, Homo sapiens
  misc_feature (61)..(62): /note="This region represents a CpG dinucleotide"
  misc_feature (61)..(61): /note="Nucleotide may be methylated to form 5-methylcytosine"
ctctgtggggtggagtcagggctctgtggggtgtactcagggctctctggggtgaagtcacggctctgttgggtggagtcagggctctgggtggagtcagagctttgtgggtggagtcgggg

SEQ ID NO: 8117 - DNA, 122 bp, Homo sapiens
  misc_feature (61)..(62): /note="This region represents a CpG dinucleotide"
  misc_feature (61)..(61): /note="Nucleotide may be methylated to form 5-methylcytosine"
ccataattcaggttctgcaaggcttcgcatgagaaattaggtaactgtgactcactatttcgttctttctctttcactgccatgttaaggcctatgaatcagatgcctatatcttcagtaaa

SEQ ID NO: 8118 - DNA, 122 bp, Homo sapiens
  misc_feature (61)..(62): /note="This region represents a CpG dinucleotide"
  misc_feature (61)..(61): /note="Nucleotide may be methylated to form 5-methylcytosine"
tggctgtgatttttaggatactcctacatgtatactacctgactgcagtagtgacaccaccgggcaaggagaatagcagaaaaatgtggcagcctctcagaagttactagttggattcagta

SEQ ID NO: 8119 - DNA, 122 bp, Homo sapiens
  misc_feature (61)..(62): /note="This region represents a CpG dinucleotide"
  misc_feature (61)..(61): /note="Nucleotide may be methylated to form 5-methylcytosine"
gtcctacccagcctgaagaagccacccagtcatttcctgttgcacttccttgtttattttcgacacagttctccccacccctgagaattcttgtcacttcctcctgtactgcccacttctac

SEQ ID NO: 8120 - DNA, 122 bp, Homo sapiens
  misc_feature (61)..(62): /note="This region represents a CpG dinucleotide"
  misc_feature (61)..(61): /note="Nucleotide may be methylated to form 5-methylcytosine"
catccgcctcgtgttccagtgcggccacggcgcatgcgccccctgcggctccgcgctcagcgcctgccccatctgccgccagcccatccgcgaccgcatccagatcttcgtgtgagccgcgc

SEQ ID NO: 8121 - DNA, 122 bp, Homo sapiens
  misc_feature (61)..(62): /note="This region represents a CpG dinucleotide"
  misc_feature (61)..(61): /note="Nucleotide may be methylated to form 5-methylcytosine"
gggcacattcggtctctgggtagggcagactggcactgccagggagtcaacccccaggagcggccctcaaccaatgatgaatgggtgttggctgataaataccccagcttcctcgcccttgt

SEQ ID NO: 8122 - DNA, 122 bp, Homo sapiens
  misc_feature (61)..(62): /note="This region represents a CpG dinucleotide"
  misc_feature (61)..(61): /note="Nucleotide may be methylated to form 5-methylcytosine"
tctgtaacaagatgatgcaatctcccaaggttattgggaagattagagatatggggtacacgaaacttgtgtacctggtgcaaagaaatgcttggtgcaaaacagctatgcaattaataggt

SEQ ID NO: 8123 - DNA, 122 bp, Homo sapiens
  misc_feature (61)..(62): /note="This region represents a CpG dinucleotide"
  misc_feature (61)..(61): /note="Nucleotide may be methylated to form 5-methylcytosine"
cccctggccaccctcttcttctggttttgctttcccccaggggatcctaaagcttggtatcgccccaggaagaagagagtcaagtgggtgattcatcctactgaccagagggggatattgag

SEQ ID NO: 8124 - DNA, 122 bp, Homo sapiens
  misc_feature (61)..(62): /note="This region represents a CpG dinucleotide"
  misc_feature (61)..(61): /note="Nucleotide may be methylated to form 5-methylcytosine"
cgcacacctcgaggccactgtagggttactcactggactaacttggatatttttgtgtctcggaatagggaggctggagcggggagaagagagaggctgggaaaggctggtgggcggaacag

SEQ ID NO: 8125 - DNA, 122 bp, Homo sapiens
  misc_feature (61)..(62): /note="This region represents a CpG dinucleotide"
  misc_feature (61)..(61): /note="Nucleotide may be methylated to form 5-methylcytosine"
gagccactgtgcccagctagttgcttacttcttaagtgacctaatggtgacttcagtgctcgagggcacttcctaggctatttggtggccctcagtaataaagagattgtataatcttgtat

SEQ ID NO: 8126 - DNA, 122 bp, Homo sapiens
  misc_feature (61)..(62): /note="This region represents a CpG dinucleotide"
  misc_feature (61)..(61): /note="Nucleotide may be methylated to form 5-methylcytosine"
tgatatccatcagaaagctgggagcctgcctgggcaggatgaccataacgttccggcgagcgttttgtttatttataactgatgtccccatagcgagtgcttggcaaagaagtgaaccttgc

SEQ ID NO: 8127 - DNA, 122 bp, Homo sapiens
  misc_feature (61)..(62): /note="This region represents a CpG dinucleotide"
  misc_feature (61)..(61): /note="Nucleotide may be methylated to form 5-methylcytosine"
cctggaaccccaggctgcctttctttttatttgagttaagatgtgttggttgcctggatacggctgagcttgtgaaaaaaatgtcactgagctgctgtcatgatggccattttattaccatg

SEQ ID NO: 8128 - DNA, 122 bp, Homo sapiens
  misc_feature (61)..(62): /note="This region represents a CpG dinucleotide"
  misc_feature (61)..(61): /note="Nucleotide may be methylated to form 5-methylcytosine"
gagggggctccatgtgttgtactcatgttctaggctcagtactgatggctttacatgaatcgcacaactgaaaactcataatatttcctcatggttttatagaaactgagcacagaaagact

SEQ ID NO: 8129 - DNA, 122 bp, Homo sapiens
  misc_feature (61)..(62): /note="This region represents a CpG dinucleotide"
  misc_feature (61)..(61): /note="Nucleotide may be methylated to form 5-methylcytosine"
ccaggagagaacgcttccctagagtggatatttcagaagtagttgctacacacgtgaacacgatacaacaattttgacttggctgtatcttcaagatctttggggagaagaggacagctgcc

SEQ ID NO: 8130 - DNA, 122 bp, Homo sapiens
  misc_feature (61)..(62): /note="This region represents a CpG dinucleotide"
  misc_feature (61)..(61): /note="Nucleotide may be methylated to form 5-methylcytosine"
gcctccaagctgctctgggtcatgggtctgtggtgtctccagtcttgcatgtcaccagctcgagccacatccaagtggggagggagccagggagctgttgttggcaggggaagtgggggtgg

SEQ ID NO: 8131 - DNA, 122 bp, Homo sapiens
  misc_feature (61)..(62): /note="This region represents a CpG dinucleotide"
  misc_feature (61)..(61): /note="Nucleotide may be methylated to form 5-methylcytosine"
cagtggccctggctaggaaccaattttgttttctcaccaaccaaattggcattgataagacgcaggagaatactccttgatcataaggatctcccaggctagcataacaactgaatgagtga

SEQ ID NO: 8132 - DNA, 122 bp, Homo sapiens
  misc_feature (61)..(62): /note="This region represents a CpG dinucleotide"
  misc_feature (61)..(61): /note="Nucleotide may be methylated to form 5-methylcytosine"
cattttttgtttgttttgttttgacagaggttctgtcgcccaggctggagtgtagcggtgcgcccgtggctcagtgcagcctcgaccttcggggctgaagtgatcctcccacctcagcccct

SEQ ID NO: 8133 - DNA, 122 bp, Homo sapiens
  misc_feature (61)..(62): /note="This region represents a CpG dinucleotide"
  misc_feature (61)..(61): /note="Nucleotide may be methylated to form 5-methylcytosine"
agcacaggtggtctcacatctgggaacgaagcctgagtccccagggaaggactctcgccacggttaacggcatctttacggatgtcaaagaatagcttgggagggtcaggaggaggagcagg

SEQ ID NO: 8134 - DNA, 122 bp, Homo sapiens
  misc_feature (61)..(62): /note="This region represents a CpG dinucleotide"
  misc_feature (61)..(61): /note="Nucleotide may be methylated to form 5-methylcytosine"
agaacaggaagtctcaacggaaaatgaggtcagcctggtggctgagaggaaaagggtcagcgagcacagccttctgcccccgtgggtccccacagcggccagcccagggccctgcatgcagc

SEQ ID NO: 8135 - DNA, 122 bp, Homo sapiens
  misc_feature (61)..(62): /note="This region represents a CpG dinucleotide"
  misc_feature (61)..(61): /note="Nucleotide may be methylated to form 5-methylcytosine"
taagatatgcaaatattaaagtcttacaagaattgcaagaatgtgcaggaagaggaaatacgattcactgcctgggagcataaatggctatggtgaaccaaaaattgtaaagttgactcatt

SEQ ID NO: 8136 - DNA, 122 bp, Homo sapiens
  misc_feature (61)..(62): /note="This region represents a CpG dinucleotide"
  misc_feature (61)..(61): /note="Nucleotide may be methylated to form 5-methylcytosine"
caaataacaatagcagcagcaactaccatttattgagtgcctattatgtgtcaaattttccggtaaaaggtttttgtttttgtttttaaatttgttgatttaaaagtaaagaaatttactca

SEQ ID NO: 8137 - DNA, 122 bp, Homo sapiens
  misc_feature (61)..(62): /note="This region represents a CpG dinucleotide"
  misc_feature (61)..(61): /note="Nucleotide may be methylated to form 5-methylcytosine"
gaatctcctgcaatcaggagtagtggcttggggaagttgctggtgatactcagaaaaccacgaagacaccacagcccagccgtggtagtctgttccttgatggaaaagcctttttcttatta

SEQ ID NO: 8138 - DNA, 122 bp, Homo sapiens
  misc_feature (61)..(62): /note="This region represents a CpG dinucleotide"
  misc_feature (61)..(61): /note="Nucleotide may be methylated to form 5-methylcytosine"
gttgtttataaagagagagacactggaagatttaagtggccagcgagagctgtgtcgtgacgcgctgtccttgccagactgtctgcagcctttagacaaagcaaggctgaggcctgcagcaa

SEQ ID NO: 8139 - DNA, 122 bp, Homo sapiens
  misc_feature (61)..(62): /note="This region represents a CpG dinucleotide"
  misc_feature (61)..(61): /note="Nucleotide may be methylated to form 5-methylcytosine"
tgagattcaaggctgtcatcttgattggacttatccagggacctagctcaatcttttactcgcttccttacctggttcctcccttaacataccttataccccaggaaaaaggcaatgtatta

SEQ ID NO: 8140 - DNA, 122 bp, Homo sapiens
  misc_feature (61)..(62): /note="This region represents a CpG dinucleotide"
  misc_feature (61)..(61): /note="Nucleotide may be methylated to form 5-methylcytosine"
agcagtgaaagtgctgacagtggggacagtgtcaatccatccacttctagtcattttacccgtgagtactgaaatcagaaccgaagtcaattgtctggttctacagcaaaactaattgtgtc

SEQ ID NO: 8141 - DNA, 122 bp, Homo sapiens
  misc_feature (61)..(62): /note="This region represents a CpG dinucleotide"
  misc_feature (61)..(61): /note="Nucleotide may be methylated to form 5-methylcytosine"
tattagagacagtccaagaaatcatcaaaacttctccactttgtgcttcactttttgtggcggaggtgtggcagggacagggaggggaagataaagtctgtggggttaagggaaggtgactc

SEQ ID NO: 8142 - DNA, 122 bp, Homo sapiens
  misc_feature (61)..(62): /note="This region represents a CpG dinucleotide"
  misc_feature (61)..(61): /note="Nucleotide may be methylated to form 5-methylcytosine"
aaaaacaggaatgacttcttcgaattggtgcactagagaaatgttttccagtcgcctaagcgtttaagcatggtaaacagattaccatattagttgcccagaccttgcaaaacttcatagtg

SEQ ID NO: 8143 - DNA, 122 bp, Homo sapiens
  misc_feature (61)..(62): /note="This region represents a CpG dinucleotide"
  misc_feature (61)..(61): /note="Nucleotide may be methylated to form 5-methylcytosine"
gagctctctacacttcagacccctcatcttcaaaaatgagaatcactgcccatgacaacccgtggaattcttatgtaacctagggaaatgatgaatgtggagtaggttactagggttggaat

SEQ ID NO: 8144 - DNA, 122 bp, Homo sapiens
  misc_feature (61)..(62): /note="This region represents a CpG dinucleotide"
  misc_feature (61)..(61): /note="Nucleotide may be methylated to form 5-methylcytosine"
tggaaaataaaatttatatttctaactttgttttccctaagtcaaatgagatgcatacaacgtatctcttggtcagcattaagatgaatgggtgaattgatgaatgaatgaatgagaggttg

SEQ ID NO: 8145 - DNA, 122 bp, Homo sapiens
  misc_feature (61)..(62): /note="This region represents a CpG dinucleotide"
  misc_feature (61)..(61): /note="Nucleotide may be methylated to form 5-methylcytosine"
tcataaacagaagatgaatccaccaggtactcagcatttgcatcaccttaagtaattttccgtattaagatttgaattgatttgtagttgccacatcaggccttttgaggatggacctgctt

SEQ ID NO: 8146 - DNA, 122 bp, Homo sapiens
  misc_feature (61)..(62): /note="This region represents a CpG dinucleotide"
  misc_feature (61)..(61): /note="Nucleotide may be methylated to form 5-methylcytosine"
gctggttaaaatgccgttctgcggccctctttaattaaggccgagatgtaataaccaatccgctgctgcgaacttgtttttaaccatcagaacgcgaggtgaatgacatggagttgggttga

SEQ ID NO: 8147 - DNA, 122 bp, Homo sapiens
  misc_feature (61)..(62): /note="This region represents a CpG dinucleotide"
  misc_feature (61)..(61): /note="Nucleotide may be methylated to form 5-methylcytosine"
cgggggggctcgcggggggctcgcgggggggctcgcggggggctcgcggggggctcgaggcgtcccatgtgggcagccgttgggacctgccaagcactgcgcctagtgatctccttcgggtt

SEQ ID NO: 8148 - DNA, 122 bp, Homo sapiens
  misc_feature (61)..(62): /note="This region represents a CpG dinucleotide"
  misc_feature (61)..(61): /note="Nucleotide may be methylated to form 5-methylcytosine"
ccccagcggtcgctctcactttgctgtgtgaaaaacccaaaggaatgattgcgagtcccccgcaaggggggttggtcttccttgctgacaagagtagaaagataaggtgcagaaggcagtga

SEQ ID NO: 8149 - DNA, 122 bp, Homo sapiens
  misc_feature (61)..(62): /note="This region represents a CpG dinucleotide"
  misc_feature (61)..(61): /note="Nucleotide may be methylated to form 5-methylcytosine"
aatatttagattagatgatcatcctacttcaggatatgttgacttcattgatattggcatcgagcacttagaatgtattataaaatactgccaatctttagaaagtattttcattaacttcc

SEQ ID NO: 8150 - DNA, 122 bp, Homo sapiens
  misc_feature (61)..(62): /note="This region represents a CpG dinucleotide"
  misc_feature (61)..(61): /note="Nucleotide may be methylated to form 5-methylcytosine"
gagatctccaacaactgcctgtccaaggcccagctggctgaggtggtggagtccatgttccgggagtcgggattccaggacaaggaggaactgacatgggaagattttcacttcatgctgcg

SEQ ID NO: 8151 - DNA, 122 bp, Homo sapiens
  misc_feature (61)..(62): /note="This region represents a CpG dinucleotide"
  misc_feature (61)..(61): /note="Nucleotide may be methylated to form 5-methylcytosine"
ggagtgaggaagcaggaggcagggaggctgccttccttcaggcagtgagtctactaagtgcgttcagtgtgacctccagaagcatagatagtgcactctttagaaaaaggtgggcgcacctg

SEQ ID NO: 8152 - DNA, 122 bp, Homo sapiens
  misc_feature (61)..(62): /note="This region represents a CpG dinucleotide"
  misc_feature (61)..(61): /note="Nucleotide may be methylated to form 5-methylcytosine"
atccagtaccagccatggcagtgtctaggggttgtctgcaacctctggagcaccagagggcgtgtgttacaatcagtgctcttttagcatttgctgtccacagatggctaagtgttaaatca

SEQ ID NO: 8153 - DNA, 122 bp, Homo sapiens
  misc_feature (61)..(62): /note="This region represents a CpG dinucleotide"
  misc_feature (61)..(61): /note="Nucleotide may be methylated to form 5-methylcytosine"
acgtaacttaaaaagttgctggctccttcagatgtaagccaaaaatacagttctagtctgcgtcagcccacaaaggatgaacaaaggttggcaagtgctgctcttaaaatgcacacatcttt

SEQ ID NO: 8154 - DNA, 122 bp, Homo sapiens
  misc_feature (61)..(62): /note="This region represents a CpG dinucleotide"
  misc_feature (61)..(61): /note="Nucleotide may be methylated to form 5-methylcytosine"
gagtaagcagtgtgaccttggaccagtcacaatctctctgagctttaattccttcaactgcgtaatgaggatactaattcttactttgcaggattgtgacccacaagtatgctatacagatg

SEQ ID NO: 8155 - DNA, 122 bp, Homo sapiens
  misc_feature (61)..(62): /note="This region represents a CpG dinucleotide"
  misc_feature (61)..(61): /note="Nucleotide may be methylated to form 5-methylcytosine"
accgcttgtaaaagtgaaacagtacaaacctaagtcttcagattttgtctcaggaagcaacgcaactcttgtgcgagcaatccatgagcaggaagtggtgaaatactttaaaggtttattga

SEQ ID NO: 8156 - DNA, 122 bp, Homo sapiens
  misc_feature (61)..(62): /note="This region represents a CpG dinucleotide"
  misc_feature (61)..(61): /note="Nucleotide may be methylated to form 5-methylcytosine"
gggcctggctgtgctgctggtactgaacccctgacagcttgattccaacatcaaagggggcgttgaactaggaggcagggcagggaggacccaggagatgtcagaggtcatgcccatcccca

SEQ ID NO: 8157 - DNA, 122 bp, Homo sapiens
  misc_feature (61)..(62): /note="This region represents a CpG dinucleotide"
  misc_feature (61)..(61): /note="Nucleotide may be methylated to form 5-methylcytosine"
aagcagttaacgtagcagaggaatggacctgctggctgccacacgggaagttctcagaggcgtccgtggcgaagcctctgtgtcctggagctatcatggttacttccttgctgcttacttct

SEQ ID NO: 8158 - DNA, 122 bp, Homo sapiens
  misc_feature (61)..(62): /note="This region represents a CpG dinucleotide"
  misc_feature (61)..(61): /note="Nucleotide may be methylated to form 5-methylcytosine"
tgctccagccacgtcagactcccttgtcctccccacacagcaaccaatcctgagtgtccacggctccagaggtatggttgggaaccccctctgtgagttttcacagatgcatcatcctagca

SEQ ID NO: 8159 - DNA, 122 bp, Homo sapiens
  misc_feature (61)..(62): /note="This region represents a CpG dinucleotide"
  misc_feature (61)..(61): /note="Nucleotide may be methylated to form 5-methylcytosine"
cagctgggaagtgagagaccgggatttaagctgatgtttgcgcagccaatgcgcgtcatacgcctctgaattaccttccccttgccccgtgtgtgtgtgatatttgtacttgagctgcctgg

SEQ ID NO: 8160 - DNA, 122 bp, Homo sapiens
  misc_feature (61)..(62): /note="This region represents a CpG dinucleotide"
  misc_feature (61)..(61): /note="Nucleotide may be methylated to form 5-methylcytosine"
atcagagatgtggaaataataggcgcgtgtatatgtaagtatgagatattcatctcacagcgcctgtcatgtaggaggtgatttaaaattattaaaggaaggaaaacagtatcctgtcccag

SEQ ID NO: 8161 - DNA, 122 bp, Homo sapiens
  misc_feature (61)..(62): /note="This region represents a CpG dinucleotide"
  misc_feature (61)..(61): /note="Nucleotide may be methylated to form 5-methylcytosine"
ccccatgatccgaaattccacctaggtacaggagtgtgtacacacgagcaccaggagacacgcacaagaatattgacggtggcattatctgtcatagtcaaaagctggaaacaatgcatgct

SEQ ID NO: 8162 - DNA, 122 bp, Homo sapiens
  misc_feature (61)..(62): /note="This region represents a CpG dinucleotide"
  misc_feature (61)..(61): /note="Nucleotide may be methylated to form 5-methylcytosine"
aagaacgaggcgagtaagaccagtgaagcaggaatgcacacagatatggaaagaagtccccggcatcatgataaatggaagcaactttcagaacagcctgtgtaatacaattctatttatga

SEQ ID NO: 8163 - DNA, 122 bp, Homo sapiens
  misc_feature (61)..(62): /note="This region represents a CpG dinucleotide"
  misc_feature (61)..(61): /note="Nucleotide may be methylated to form 5-methylcytosine"
ctaagtcaagaatgtagcacgttgaccagccaccctcaaacttccagagaggagtctacacgtgtaagaatcacagctcaaggagactgagaatctacagtagattgaagcctaactcaaaa

SEQ ID NO: 8164 - DNA, 122 bp, Homo sapiens
  misc_feature (61)..(62): /note="This region represents a CpG dinucleotide"
  misc_feature (61)..(61): /note="Nucleotide may be methylated to form 5-methylcytosine"
ccactgctatattgggagttacgtcatactctaccccctggatatttggatcaatatcaccgggtgggtgtacacctactgcaatattgaaagtaataccatgctgtctccctccctggaca

SEQ ID NO: 8165 - DNA, 122 bp, Homo sapiens
  misc_feature (61)..(62): /note="This region represents a CpG dinucleotide"
  misc_feature (61)..(61): /note="Nucleotide may be methylated to form 5-methylcytosine"
ctccctaaatggaatggggattccgctgacgttcttcagaagctctgcgctgcgggcctccgtgtcccttctactcccgctgtctgaaccccgcgatgtcccccgcgctgttcgtcccctct

SEQ ID NO: 8166 - DNA, 122 bp, Homo sapiens
  misc_feature (61)..(62): /note="This region represents a CpG dinucleotide"
  misc_feature (61)..(61): /note="Nucleotide may be methylated to form 5-methylcytosine"
cctgcgctgaaggcgttggggctcctgcagttctggggcagccacaggcgcccagggtttcgtgccgatcagcccaggacggtcttcccggtgcagtttctgatgcggggagggcagtgctg

SEQ ID NO: 8167 - DNA, 122 bp, Homo sapiens
  misc_feature (61)..(62): /note="This region represents a CpG dinucleotide"
  misc_feature (61)..(61): /note="Nucleotide may be methylated to form 5-methylcytosine"
gcaatagattctaggagtataaaaaacatagaaggaagggaacacagctctctactaccccgtctggctgctgatcagagtaagtttggagaaacatcaacaaatgtgttctgccattgctt

SEQ ID NO: 8168 - DNA, 122 bp, Homo sapiens
  misc_feature (61)..(62): /note="This region represents a CpG dinucleotide"
  misc_feature (61)..(61): /note="Nucleotide may be methylated to form 5-methylcytosine"
tcttgattagtcattagtatgtagttggtatgaattgggtattataattaatctgggaaccgagtactatctagggtagccaaagagaaaggagtcattatcaggaaagtaaaatcactggt

SEQ ID NO: 8169 - DNA, 122 bp, Homo sapiens
  misc_feature (61)..(62): /note="This region represents a CpG dinucleotide"
  misc_feature (61)..(61): /note="Nucleotide may be methylated to form 5-methylcytosine"
ttttttgttttttgtttttgtaatataacccactgttcctcatcctactgaccaaaaactcggcacaccctaaagctgctgagcagtgcgaaaatttaagagtcaatacaagaacgtaaata

SEQ ID NO: 8170 - DNA, 122 bp, Homo sapiens
  misc_feature (61)..(62): /note="This region represents a CpG dinucleotide"
  misc_feature (61)..(61): /note="Nucleotide may be methylated to form 5-methylcytosine"
attgttgatgtgttgcagtggagccagtccagtaactattttctgtatgatgcagtcacccgtattataaaggctgttgcaatcaatgactaatatccctgcttacttctgcaaaattttat

SEQ ID NO: 8171 - DNA, 122 bp, Homo sapiens
  misc_feature (61)..(62): /note="This region represents a CpG dinucleotide"
  misc_feature (61)..(61): /note="Nucleotide may be methylated to form 5-methylcytosine"
tcacaaacttttcttcaaaaaatatgtggcagcctcaaaaagaacactagagcacagtgacgttgagcatgtcttctactgagggcaagtgttattgcctgggatttaatggctcttacaga

SEQ ID NO: 8172 - DNA, 122 bp, Homo sapiens
  misc_feature (61)..(62): /note="This region represents a CpG dinucleotide"
  misc_feature (61)..(61): /note="Nucleotide may be methylated to form 5-methylcytosine"
cagagaagaaagcaggcagcccaggcgacagcagcaagcgggggccacgtgggtgcggaacggtccgtggaagcgtgcgtgcaggcccctgcaccctgcaagaagccctttcgagccaggaa

SEQ ID NO: 8173 - DNA, 122 bp, Homo sapiens
  misc_feature (61)..(62): /note="This region represents a CpG dinucleotide"
  misc_feature (61)..(61): /note="Nucleotide may be methylated to form 5-methylcytosine"
actatttagcatctgcatctttaaaaaaaagggtccctggctgattaactgtaatatgatcgtagaaacaagaaatatggtgaattgattgacatagtgatgaaaaactgtaatcagcaaat

SEQ ID NO: 8174 - DNA, 122 bp, Homo sapiens
  misc_feature (61)..(62): /note="This region represents a CpG dinucleotide"
  misc_feature (61)..(61): /note="Nucleotide may be methylated to form 5-methylcytosine"
aaaggcaaagatttggctacactccccaaatccacaagcctgtgctgtggatccatgggacgattccaaagtggagactaggacttttctgagccataacaacatgtgggaataaatgtatt

SEQ ID NO: 8175 - DNA, 122 bp, Homo sapiens
  misc_feature (61)..(62): /note="This region represents a CpG dinucleotide"
  misc_feature (61)..(61): /note="Nucleotide may be methylated to form 5-methylcytosine"
agccagatatagaaagccaaataccacatgatctcatctagatgtgtgtatatatacaaacgtacatatctatatgtgaaatctaaaacagtcaaacccatggaagcagacagtagataggt

SEQ ID NO: 8176 - DNA, 122 bp, Homo sapiens
  misc_feature (61)..(62): /note="This region represents a CpG dinucleotide"
  misc_feature (61)..(61): /note="Nucleotide may be methylated to form 5-methylcytosine"
cagatctggctgatggccaaactgtccgtagggcagagttcacattcttcttgttcactgcgctgtttgcagcacaaagcacagagcctgggacccatgagtgcccagttaaacattcactg

SEQ ID NO: 8177 - DNA, 122 bp, Homo sapiens
  misc_feature (61)..(62): /note="This region represents a CpG dinucleotide"
  misc_feature (61)..(61): /note="Nucleotide may be methylated to form 5-methylcytosine"
agctggcttgaaaagcagcacctactttattatttaagagttcttcaaatattgacttttcgttttcaaaacaaagtaagagtagaaaacggcactgtttgtaaccaggagaaaaccacaac

SEQ ID NO: 8178 - DNA, 122 bp, Homo sapiens
  misc_feature (61)..(62): /note="This region represents a CpG dinucleotide"
  misc_feature (61)..(61): /note="Nucleotide may be methylated to form 5-methylcytosine"
gaagtatatacgtaattcatgacaaattcactttcatgaccatgaaatctgccttaatcccgttgacttaggagctaaaataacggtgagagccaagcttgtgatttgggggggaatatcaa

SEQ ID NO: 8179 - DNA, 122 bp, Homo sapiens
  misc_feature (61)..(62): /note="This region represents a CpG dinucleotide"
  misc_feature (61)..(61): /note="Nucleotide may be methylated to form 5-methylcytosine"
ggtttagcagtatgtagatcttttaaaaggtagatgtaattcttaatgacaacagatatacgtgaaaaagcgaatcataggctgccatcgtcatagggcttatgctataaaatgctacttct

SEQ ID NO: 8180 - DNA, 122 bp, Homo sapiens
  misc_feature (61)..(62): /note="This region represents a CpG dinucleotide"
  misc_feature (61)..(61): /note="Nucleotide may be methylated to form 5-methylcytosine"
ggctcagcccatgggagggtgcactccagcaccaggacctgactgttctgcaaacattgacgcacagtccccaggttgcagggagagcgaagcttgcatgctctttgccctcaaaagcttag

SEQ ID NO: 8181 - DNA, 122 bp, Homo sapiens
  misc_feature (61)..(62): /note="This region represents a CpG dinucleotide"
  misc_feature (61)..(61): /note="Nucleotide may be methylated to form 5-methylcytosine"
gttaggttgtactgtaaacacccgacagaaaccacaaaggggaatgcacaactcactatgcgccaggtaagggctttgcatctgtctcatttaatcctcccccaagctctgtgaggtaggta

SEQ ID NO: 8182 - DNA, 122 bp, Homo sapiens
  misc_feature (61)..(62): /note="This region represents a CpG dinucleotide"
  misc_feature (61)..(61): /note="Nucleotide may be methylated to form 5-methylcytosine"
tcctgtccttgatgggctgaactggctagtcccaaagtgaggcttcagtctagtcacagacggaccctcggccttggctgaagactgagccttgacttcgataacaaaataagataaagcat

SEQ ID NO: 8183 - DNA, 122 bp, Homo sapiens
  misc_feature (61)..(62): /note="This region represents a CpG dinucleotide"
  misc_feature (61)..(61): /note="Nucleotide may be methylated to form 5-methylcytosine"
gaaaagaaacctatgaaaggtcttcaacttgttttgtttcttacatctcgggcttcttcccgttaacagcacttcctgaaggggaacgtgcctatttgtctgatctaaacgtaagtagccat

SEQ ID NO: 8184 - DNA, 122 bp, Homo sapiens
  misc_feature (61)..(62): /note="This region represents a CpG dinucleotide"
  misc_feature (61)..(61): /note="Nucleotide may be methylated to form 5-methylcytosine"
acgctgcggcgggtgtgggagcccttccttcctgaggtgactccctctgtgcggaatcaccgtgctgtccgttccttcctccggcggtggacacggagctgctgcttccacatggccgctga

SEQ ID NO: 8185 - DNA, 122 bp, Homo sapiens
  misc_feature (61)..(62): /note="This region represents a CpG dinucleotide"
  misc_feature (61)..(61): /note="Nucleotide may be methylated to form 5-methylcytosine"
cccttattgatgtttgtaattgcattatctcataaaggaggatgatcaatgaaaccgagccgtgcattctggggtcagaggaagccaaagtactgtttgtcccctttaatacaacaagtact

SEQ ID NO: 8186 - DNA, 122 bp, Homo sapiens
  misc_feature (61)..(62): /note="This region represents a CpG dinucleotide"
  misc_feature (61)..(61): /note="Nucleotide may be methylated to form 5-methylcytosine"
gttatagtgaaaaccacagaaaaaactgcagctattaacctatgaggaactccctgggcccgctgcacatgtgtacatataacacagctctgtactctgaagagcttcacaaaataaaacat

SEQ ID NO: 8187 - DNA, 122 bp, Homo sapiens
  misc_feature (61)..(62): /note="This region represents a CpG dinucleotide"
  misc_feature (61)..(61): /note="Nucleotide may be methylated to form 5-methylcytosine"
aatactgatttaaccgaaactgtgacaaacctcatcagccgggcagggatgcgtgtggagcgagccgctggccaagtgctgccagatgccccaagtgacccagagaaatggtcatctggatt

SEQ ID NO: 8188 - DNA, 122 bp, Homo sapiens
  misc_feature (61)..(62): /note="This region represents a CpG dinucleotide"
  misc_feature (61)..(61): /note="Nucleotide may be methylated to form 5-methylcytosine"
cctggagtcctcaccacctccctgtgggtgaccactgacaacttcctgccccttcccctgcgttccccaccccagggaagcgtgactcccgtcggcatttaactgctactctgggttttttt

SEQ ID NO: 8189 - DNA, 122 bp, Homo sapiens
  misc_feature (61)..(62): /note="This region represents a CpG dinucleotide"
  misc_feature (61)..(61): /note="Nucleotide may be methylated to form 5-methylcytosine"
ctcatctcctactgccctccctctccctctctgctcttgcaatagctggaataggccaggcgcgcttcatgctcaggaccttgaatgctttgtgccttgatattgccttgccacacttccca

SEQ ID NO: 8190 - DNA, 122 bp, Homo sapiens
  misc_feature (61)..(62): /note="This region represents a CpG dinucleotide"
  misc_feature (61)..(61): /note="Nucleotide may be methylated to form 5-methylcytosine"
ctccagttaccaggcagtgctgtcaggctgggactctccgtgatgggtgtcctggaagtccgtatctctagaaaggatgtaatttatgaagcacacatcattgcctctgaaactagagaggc

SEQ ID NO: 8191 - DNA, 122 bp, Homo sapiens
  misc_feature (61)..(62): /note="This region represents a CpG dinucleotide"
  misc_feature (61)..(61): /note="Nucleotide may be methylated to form 5-methylcytosine"
ggtggagtagaagtggagggaaggaggggtgatgctgaccccacactcgagccacagcctcggaatctctttacccgtaggcgccacacttggcacacaatgagtctgtgagttgaggggaa

SEQ ID NO: 8192 - DNA, 122 bp, Homo sapiens
  misc_feature (61)..(62): /note="This region represents a CpG dinucleotide"
  misc_feature (61)..(61): /note="Nucleotide may be methylated to form 5-methylcytosine"
cgtttttatggtctccatttctacctttcagaagaaaaaagtagcttgtttttctttcctcgggacagtaagagttagaaatgccagcctagaaaaacttttatgcaggtctcgaagcatcc

SEQ ID NO: 8193 - DNA, 122 bp, Homo sapiens
  misc_feature (61)..(62): /note="This region represents a CpG dinucleotide"
  misc_feature (61)..(61): /note="Nucleotide may be methylated to form 5-methylcytosine"
gaccgagggggactgtgggtaataaaccatggaaggcaaacccacggatggaggcactaccgtgttctgccaaaatatgctggctgaagccagggtttactgaaggcagaatgcttcctgtt

SEQ ID NO: 8194 - DNA, 122 bp, Homo sapiens
  misc_feature (61)..(62): /note="This region represents a CpG dinucleotide"
  misc_feature (61)..(61): /note="Nucleotide may be methylated to form 5-methylcytosine"
gtgcttctgtcccaggcatcctccttaatcctttgacatgagcagccctagaggttgcctcgtgttgtcaccatccttagtcatttaatcaacatatttttatggaaagtctctatgtgctg

SEQ ID NO: 8195 - DNA, 122 bp, Homo sapiens
  misc_feature (61)..(62): /note="This region represents a CpG dinucleotide"
  misc_feature (61)..(61): /note="Nucleotide may be methylated to form 5-methylcytosine"
ggggcccccgcagcagcagagcccacgtgatgtggggaaatcagtcagagcgcctgattccgagggagaaaccagctcagctcacacacgaacctatgaaaattctttattgttaatttctt

SEQ ID NO: 8196 - DNA, 122 bp, Homo sapiens
  misc_feature (61)..(62): /note="This region represents a CpG dinucleotide"
  misc_feature (61)..(61): /note="Nucleotide may be methylated to form 5-methylcytosine"
cctgtggaagagagagactgagtctcaacccgagctgtcttgcaaaacactaatggcttacgttccgtagtttcactcttatgtgtagtttttatattccatcagggtgatcccttggggac

SEQ ID NO: 8197 - DNA, 122 bp, Homo sapiens
  misc_feature (61)..(62): /note="This region represents a CpG dinucleotide"
  misc_feature (61)..(61): /note="Nucleotide may be methylated to form 5-methylcytosine"
agcatacaacttcctcttagattttaagtgccacattctttacatgcttttgaatccattcgttccattcaattaatatttggtaagcatctattatgtgacaagccctgttttagacgcat

SEQ ID NO: 8198 - DNA, 122 bp, Homo sapiens
  misc_feature (61)..(62): /note="This region represents a CpG dinucleotide"
  misc_feature (61)..(61): /note="Nucleotide may be methylated to form 5-methylcytosine"
ccttcactgacctcaatcgttgatttcggctgcacttcctatccctgggggagctttcaacgctccgccgtccaggccgccgggccccgcagcccgcgccccgctctctagggctgggcccc

SEQ ID NO: 8199 - DNA, 122 bp, Homo sapiens
  misc_feature (61)..(62): /note="This region represents a CpG dinucleotide"
  misc_feature (61)..(61): /note="Nucleotide may be methylated to form 5-methylcytosine"
ttgtgccctcacatggcagaaagcaaagggcaaaaaagggatgaactccttctgtcaaaccgtttcataagagcactcagtcccattcatgtaggtagagcccttatggccccgcctcttaa

SEQ ID NO: 8200 - DNA, 122 bp, Homo sapiens
  misc_feature (61)..(62): /note="This region represents a CpG dinucleotide"
  misc_feature (61)..(61): /note="Nucleotide may be methylated to form 5-methylcytosine"
caaaaacttcccatggatcaagtggcattgcgtgcctcacagtaagaacgtgctgctgtacgactcactctagagggagctttgcaggttcactctacagagagcccctctgcagatgctag

SEQ ID NO: 8201 - DNA, 122 bp, Homo sapiens
  misc_feature (61)..(62): /note="This region represents a CpG dinucleotide"
  misc_feature (61)..(61): /note="Nucleotide may be methylated to form 5-methylcytosine"
aaatggaagtgattcagtcttctctcacatcacagaactatagtgtgatcctttgcacaccgttaagtgatttacatacaagtggtaccagggagtgctagtattctctttccactccctta

SEQ ID NO: 8202 - DNA, 122 bp, Homo sapiens
  misc_feature (61)..(62): /note="This region represents a CpG dinucleotide"
  misc_feature (61)..(61): /note="Nucleotide may be methylated to form 5-methylcytosine"
gttttagtgcaagattttaaaatatgaaatcaacgatttatgaactgggttcagagtctccgtgtctacccggcctcttcaagcacagccacaagaaagcactaaggttttcagctaacaaa

SEQ ID NO: 8203 - DNA, 122 bp, Homo sapiens
  misc_feature (61)..(62): /note="This region represents a CpG dinucleotide"
  misc_feature (61)..(61): /note="Nucleotide may be methylated to form 5-methylcytosine"
acatatgcctcagggtgctctggccggatctgcaagcctcattcatctggtcagagttctcgtgtggcagctcctgcagcttgcagagcttcacaaccccgggctggaggcagacagagccc

SEQ ID NO: 8204 - DNA, 122 bp, Homo sapiens
  misc_feature (61)..(62): /note="This region represents a CpG dinucleotide"
  misc_feature (61)..(61): /note="Nucleotide may be methylated to form 5-methylcytosine"
tagttcaaaaatcttgttagatgctgtggaaacctcacccggcagtagtgatagctgccacgtactgagggattttatagacatttacattttcacttgtcctcaccttccagatgaggcag

SEQ ID NO: 8205 - DNA, 122 bp, Homo sapiens
  misc_feature (61)..(62): /note="This region represents a CpG dinucleotide"
  misc_feature (61)..(61): /note="Nucleotide may be methylated to form 5-methylcytosine"
aggttgctctggccactgaaattaaaagaggcctccttctgttcattttactagtggcatcgccatgcagttttccgtgtattacagtcagtttccttgcgtgcgtgtttggcttttcactt

SEQ ID NO: 8206 - DNA, 122 bp, Homo sapiens
  misc_feature (61)..(62): /note="This region represents a CpG dinucleotide"
  misc_feature (61)..(61): /note="Nucleotide may be methylated to form 5-methylcytosine"
atgcagatatttctgacagcaagggccagaacctcatgcatgttatagtgcattttataacgcctcttggggaggaaagctgaattttggaaagccaatatcttttaaatgtagtggtatca

SEQ ID NO: 8207 - DNA, 122 bp, Homo sapiens
  misc_feature (61)..(62): /note="This region represents a CpG dinucleotide"
  misc_feature (61)..(61): /note="Nucleotide may be methylated to form 5-methylcytosine"
ctctccccttctctccaaccacagtcccccaggaagggggaggaccaaacgttggtggggcggatattgagggtggcagaaatccttgccatgagctcctgcaaccagaagtcccggttgag

SEQ ID NO: 8208 - DNA, 122 bp, Homo sapiens
  misc_feature (61)..(62): /note="This region represents a CpG dinucleotide"
  misc_feature (61)..(61): /note="Nucleotide may be methylated to form 5-methylcytosine"
tttccacaaaccttcactgagagcatgcttcgtgccttgggggctcaaaaatgaaagacacgttccctactctcaggaatttcacaggctggtgcggggagacacacagataagtagaccat

SEQ ID NO: 8209 - DNA, 122 bp, Homo sapiens
  misc_feature (61)..(62): /note="This region represents a CpG dinucleotide"
  misc_feature (61)..(61): /note="Nucleotide may be methylated to form 5-methylcytosine"
ttgtacatgttgattcattcacaccacatcccaagaaataatgctcttcctatgagattacgtataagaaaagtgcttttgaagggtgaatcattgtttattgtctctaatacacagtgcct

SEQ ID NO: 8210 - DNA, 122 bp, Homo sapiens
  misc_feature (61)..(62): /note="This region represents a CpG dinucleotide"
  misc_feature (61)..(61): /note="Nucleotide may be methylated to form 5-methylcytosine"
ttcacttgcgtgggaagtccagctgtctcaatggggcccaggagacagactgacgagggacgaattcctgtgtttgggactgggcttgaaaagtctcctgtttgtaacactcaacttgtaga

SEQ ID NO: 8211 - DNA, 122 bp, Homo sapiens
  misc_feature (61)..(62): /note="This region represents a CpG dinucleotide"
  misc_feature (61)..(61): /note="Nucleotide may be methylated to form 5-methylcytosine"
taacagaatcacttccctttcatcagttgacatcagcattcctgtttttgtgacattctacgtgtctccaacatctgtgatggcagcgccccagaaagggatataaactgggaagtgggtgg

SEQ ID NO: 8212 - DNA, 122 bp, Homo sapiens
  misc_feature (61)..(62): /note="This region represents a CpG dinucleotide"
  misc_feature (61)..(61): /note="Nucleotide may be methylated to form 5-methylcytosine"
tcccggccgtgcctgtgcagtgggggaactgcggggatacaggtgagccgcgggggcgcgcgccctcggaacactttctaactctggaggagcgtaaaggaacaagacctcactgagaccgc

SEQ ID NO: 8213 - DNA, 122 bp, Homo sapiens
  misc_feature (61)..(62): /note="This region represents a CpG dinucleotide"
  misc_feature (61)..(61): /note="Nucleotide may be methylated to form 5-methylcytosine"
tggcctctgatctttgaacatttccatagtgcacccgacacgtcgggcccggtcatagcccggcgcagcccctcgctcactcaggaacatctgctacagcatttaccacgttaatagattag

SEQ ID NO: 8214 - DNA, 122 bp, Homo sapiens
  misc_feature (61)..(62): /note="This region represents a CpG dinucleotide"
  misc_feature (61)..(61): /note="Nucleotide may be methylated to form 5-methylcytosine"
gcctggaggcggaggagggaaacccgaggggtgtgagccatgccccacggactcccatcccgccagtctgaaggccacccccgccccactcgcccacatccactccgggcacccatgggcac

SEQ ID NO: 8215 - DNA, 122 bp, Homo sapiens
  misc_feature (61)..(62): /note="This region represents a CpG dinucleotide"
  misc_feature (61)..(61): /note="Nucleotide may be methylated to form 5-methylcytosine"
aaacaaatttctaagattagtcagtttccccttgcaactatgaagttggttcagggcctccggctgacccttctctcagtatttccctctcagagctcagctttacatcataggcaagataa

SEQ ID NO: 8216 - DNA, 122 bp, Homo sapiens
  misc_feature (61)..(62): /note="This region represents a CpG dinucleotide"
  misc_feature (61)..(61): /note="Nucleotide may be methylated to form 5-methylcytosine"
actgcttagcttctgagatcagacaagatcgggcacattgagagtagcatggctgtagggcgttattaatttttaaagttcacttgaaatcattagagtagctaagaaaaaaaaaagatctt

SEQ ID NO: 8217 - DNA, 122 bp, Homo sapiens
  misc_feature (61)..(62): /note="This region represents a CpG dinucleotide"
  misc_feature (61)..(61): /note="Nucleotide may be methylated to form 5-methylcytosine"
atttaagctacagcagctcaaagaaggcctgtttttaaagcttagcagaagcccattctccgctgaagcctgttctttgtggaagcctggctggggggcagtgggggcggtgccactgtcga

SEQ ID NO: 8218 - DNA, 122 bp, Homo sapiens
  misc_feature (61)..(62): /note="This region represents a CpG dinucleotide"
  misc_feature (61)..(61): /note="Nucleotide may be methylated to form 5-methylcytosine"
cttcctgttctccctccttacaggctgagttcttgggctccaagttgagcacagaaaatacgttcaaggccgggcgcggtggctcacgcctgtaatcccagcactttgggaggctgaggcag

SEQ ID NO: 8219 - DNA, 122 bp, Homo sapiens
  misc_feature (61)..(62): /note="This region represents a CpG dinucleotide"
  misc_feature (61)..(61): /note="Nucleotide may be methylated to form 5-methylcytosine"
aaactgtttctcctgaaatactcaaccttgcatttgctgattcatttccattgtgtcatccgtgtgtcattgtgttgagtctgtcatttagctctccgtctggctcatatgaatttttctct

SEQ ID NO: 8220 - DNA, 122 bp, Homo sapiens
  misc_feature (61)..(62): /note="This region represents a CpG dinucleotide"
  misc_feature (61)..(61): /note="Nucleotide may be methylated to form 5-methylcytosine"
tggccatgattgggaacttcacgtatggacttggtgtggttttaaaggcaccagctgctacgtgtcacaagaatacttactttgtgcatcatcttccttggcttattgcaagttttggaatc

SEQ ID NO: 8221 - DNA, 122 bp, Homo sapiens
  misc_feature (61)..(62): /note="This region represents a CpG dinucleotide"
  misc_feature (61)..(61): /note="Nucleotide may be methylated to form 5-methylcytosine"
ccaacagtcatgcccccagctcagcgccacagctgtgagagctgttcccggggaggggagcgtcggccaggggacatgggtgagacacacaggacctcttcgtgccagcttttcaattcgtc

SEQ ID NO: 8222 - DNA, 122 bp, Homo sapiens
  misc_feature (61)..(62): /note="This region represents a CpG dinucleotide"
  misc_feature (61)..(61): /note="Nucleotide may be methylated to form 5-methylcytosine"
gcgtcatcactacccgttttgtattcacttgcacttttcctagatgtcctttgctttcttcgttaggtgtggagggcgcagctttccagagccgacttcctcatgaccggatgacttctcaa

SEQ ID NO: 8223 - DNA, 122 bp, Homo sapiens
  misc_feature (61)..(62): /note="This region represents a CpG dinucleotide"
  misc_feature (61)..(61): /note="Nucleotide may be methylated to form 5-methylcytosine"
ggagtcgtgatggtagctgcaggcacaggcttttgtttattgtgccagatcctcagagggcgtcatcgggaacaccatgtccttcttgtcatgtatctcgatgatgacatcctgctttctgt

SEQ ID NO: 8224 - DNA, 122 bp, Homo sapiens
  misc_feature (61)..(62): /note="This region represents a CpG dinucleotide"
  misc_feature (61)..(61): /note="Nucleotide may be methylated to form 5-methylcytosine"
tgacaaaatgaagatcaatatgcctgtttcctattctgagttagtcactgtccacagcaccgccttccccaccaccaaggggaagagaggctgcaggacaaggtgagcgcacccatgtcctt

SEQ ID NO: 8225 - DNA, 122 bp, Homo sapiens
  misc_feature (61)..(62): /note="This region represents a CpG dinucleotide"
  misc_feature (61)..(61): /note="Nucleotide may be methylated to form 5-methylcytosine"
ggaaggatgcacagcctctcgttccaaagtccacagtctttctagtttctggaaggatcccgagtgactgccttttagtggtagcttctcagactccaccagggactcagccagcacccgcg

SEQ ID NO: 8226 - DNA, 122 bp, Homo sapiens
  misc_feature (61)..(62): /note="This region represents a CpG dinucleotide"
  misc_feature (61)..(61): /note="Nucleotide may be methylated to form 5-methylcytosine"
ctcacttgttggaaaataggtaaatgagcttatctcaagtccttaattagaacataaccacgtgcaagggagatctcttatcagcatagatgtttttacccacagtttaatgtttgtactgt

SEQ ID NO: 8227 - DNA, 122 bp, Homo sapiens
  misc_feature (61)..(62): /note="This region represents a CpG dinucleotide"
  misc_feature (61)..(61): /note="Nucleotide may be methylated to form 5-methylcytosine"
cgtggggaccacactttgagaactaccgccttatctcagagatactcttaacttgtgtatcgtgactcctagtcccctggggatgctttactcctcccctaaaacctagtcactcgatgggt

SEQ ID NO: 8228 - DNA, 122 bp, Homo sapiens
  misc_feature (61)..(62): /note="This region represents a CpG dinucleotide"
  misc_feature (61)..(61): /note="Nucleotide may be methylated to form 5-methylcytosine"
gccgtttccctttgtggcctaggtgcagtggaggcttgcctcttgcatcagctgagacgccgtgccgctggcttcctgcgcagtgacaagatggcagccctgttcaccaaggtggggaagac

SEQ ID NO: 8229 - DNA, 122 bp, Homo sapiens
  misc_feature (61)..(62): /note="This region represents a CpG dinucleotide"
  misc_feature (61)..(61): /note="Nucleotide may be methylated to form 5-methylcytosine"
aaagccagttactaggcttgctaagctctgcttaaagttacagggccttgcctttggggccgcaggctgcctcatgcacgcctctcttgttgtggatgctgggctcttccatgacaacatag

SEQ ID NO: 8230 - DNA, 122 bp, Homo sapiens
  misc_feature (61)..(62): /note="This region represents a CpG dinucleotide"
  misc_feature (61)..(61): /note="Nucleotide may be methylated to form 5-methylcytosine"
ggcctcagtttgcaaatctttgaaatgaagccaaacctacatttctcacagttcactaaacgagcaagcatgtaaatgcccagcacagcgagtcacacatggtagggcccccgtacatggac

SEQ ID NO: 8231 - DNA, 122 bp, Homo sapiens
  misc_feature (61)..(62): /note="This region represents a CpG dinucleotide"
  misc_feature (61)..(61): /note="Nucleotide may be methylated to form 5-methylcytosine"
gcctcacaatttagtaagagagacacaccaacagatcatcaaaatgtaaagtgttgagtgcgtcagacagacacacatgatggcatggaagctgttggagatgggctgtgatccaggagacg

SEQ ID NO: 8232 - DNA, 122 bp, Homo sapiens
  misc_feature (61)..(62): /note="This region represents a CpG dinucleotide"
  misc_feature (61)..(61): /note="Nucleotide may be methylated to form 5-methylcytosine"
gtaaatataatttagtgtctgtgggctatatggtctctgtcacaactgtgcagactttgccgtctcatcacaaaggcagccgtagacaacacattaacgaatgagttcgaatgagttactgt

SEQ ID NO: 8233 - DNA, 122 bp, Homo sapiens
  misc_feature (61)..(62): /note="This region represents a CpG dinucleotide"
  misc_feature (61)..(61): /note="Nucleotide may be methylated to form 5-methylcytosine"
ccactccattggcctcaaatctttatctcttccggtatttcttatctcagtgtttgtttacgtcagaaacataaagctcatgctagacatattgcatttcttacttcctgacttaaaacctt

SEQ ID NO: 8234 - DNA, 122 bp, Homo sapiens
  misc_feature (61)..(62): /note="This region represents a CpG dinucleotide"
  misc_feature (61)..(61): /note="Nucleotide may be methylated to form 5-methylcytosine"
tgggttggaagatgggaagtcaatgcagaagcaccgttgaaagtattccactgggcagggcgcggtggctcacgcttgtaatcccagtacttcgggaggccgaagcgggaggatcgcttgag

SEQ ID NO: 8235 - DNA, 122 bp, Homo sapiens
  misc_feature (61)..(62): /note="This region represents a CpG dinucleotide"
  misc_feature (61)..(61): /note="Nucleotide may be methylated to form 5-methylcytosine"
acgaggagtttgtccgtgtgctggtgtccaagtgaggccggcgcccaccatgctcctgggcgcccacgcggcccacagggcaagaacccggggcctcccgcctcctcccccatccccctgcc

SEQ ID NO: 8236 - DNA, 122 bp, Homo sapiens
  misc_feature (61)..(62): /note="This region represents a CpG dinucleotide"
  misc_feature (61)..(61): /note="Nucleotide may be methylated to form 5-methylcytosine"
gataatgcaggtcaaatgctcagcacagtgcctggcacctagtaagtgctcaagaaatctcggtgttcatttgatttcatctttgaattcaaatgaggcaaaggaatgaggcagagggccac

SEQ ID NO: 8237 - DNA, 122 bp, Homo sapiens
  misc_feature (61)..(62): /note="This region represents a CpG dinucleotide"
  misc_feature (61)..(61): /note="Nucleotide may be methylated to form 5-methylcytosine"
aggccagtggtgatagcagaaattataacttctgggcctagggcttctgccccagatgaccgcaaacccattgtatactgcaaaagaaaactacttgccttagtatgtgggttcctcaagta

SEQ ID NO: 8238 - DNA, 122 bp, Homo sapiens
  misc_feature (61)..(62): /note="This region represents a CpG dinucleotide"
  misc_feature (61)..(61): /note="Nucleotide may be methylated to form 5-methylcytosine"
tctctctccctgtggtttttgttcctgccctttctccttagctaccaggccttgttcaaccggggacaaaacaaacaggggctgtctgtggagaattggcctcttcaacaacacaatgggga

SEQ ID NO: 8239 - DNA, 122 bp, Homo sapiens
  misc_feature (61)..(62): /note="This region represents a CpG dinucleotide"
  misc_feature (61)..(61): /note="Nucleotide may be methylated to form 5-methylcytosine"
tttgtgctatatgaaactttcccccatctacacacgttctgggaacatggaatattggcacgagaaaagatagtgtaatttaggctgtgcacatgaaaaccttcagaagcatcttgggaaac

SEQ ID NO: 8240 - DNA, 122 bp, Homo sapiens
  misc_feature (61)..(62): /note="This region represents a CpG dinucleotide"
  misc_feature (61)..(61): /note="Nucleotide may be methylated to form 5-methylcytosine"
ctgatttcccttcttgaagtacaggatttggaaatcactgccacagcccagttcagctcacgtggacctgccaagaccagcagagtgcacaggaggtccagcagagtgcacaggaggtgcag

SEQ ID NO: 8241 - DNA, 122 bp, Homo sapiens
  misc_feature (61)..(62): /note="This region represents a CpG dinucleotide"
  misc_feature (61)..(61): /note="Nucleotide may be methylated to form 5-methylcytosine"
ttccatatgatgaacatctgattttctaggaccttcatcttcatttcactgaacaacagccgttggaggatctcgtcctggagggcaaagcaggcatgcgttctattgacttcttttgtgtt

SEQ ID NO: 8242 - DNA, 122 bp, Homo sapiens
  misc_feature (61)..(62): /note="This region represents a CpG dinucleotide"
  misc_feature (61)..(61): /note="Nucleotide may be methylated to form 5-methylcytosine"
gattaacaagtctgttatttaatcttcatttatctttactcattttgtagtcagggcacacggtcatgatttttgtcaaggaagtgttctctgattagaaatgcagagccaatagacccgag

SEQ ID NO: 8243 - DNA, 122 bp, Homo sapiens
  misc_feature (61)..(62): /note="This region represents a CpG dinucleotide"
  misc_feature (61)..(61): /note="Nucleotide may be methylated to form 5-methylcytosine"
acgttcagcatgttcagctctcctgttctttgttctccattttaaagtttaaaacttcctcgttctttatgtctccttgcccctagtttcagtaaacaaccccctcttagcctctatcatct

SEQ ID NO: 8244 - DNA, 122 bp, Homo sapiens
  misc_feature (61)..(62): /note="This region represents a CpG dinucleotide"
  misc_feature (61)..(61): /note="Nucleotide may be methylated to form 5-methylcytosine"
cctggtcctctgtagcgtccctccatgtgaggtcctcccattctatctcattgtgcctcacgccctgctgctggcctcctttctgcctctctggcttcctctttccttctaggagggaaaga

SEQ ID NO: 8245 - DNA, 122 bp, Homo sapiens
  misc_feature (61)..(62): /note="This region represents a CpG dinucleotide"
  misc_feature (61)..(61): /note="Nucleotide may be methylated to form 5-methylcytosine"
actgtgaagtgttacacaatcttctcttttaggcaagcctggccattgtgacacccagtgcgacaggcaggggttgtaagttgcatcatagcaccttggagcacttgctcaaggtaccaagt

SEQ ID NO: 8246 - DNA, 122 bp, Homo sapiens
  misc_feature (61)..(62): /note="This region represents a CpG dinucleotide"
  misc_feature (61)..(61): /note="Nucleotide may be methylated to form 5-methylcytosine"
ccactggtgagctgcaggcacagcaagtgaactattttgccgaagctccagagacatgaccgtgggcctgcgctacctggactgattggaacagcattgctgctggtcatgctcagaagcca

SEQ ID NO: 8247 - DNA, 122 bp, Homo sapiens
  misc_feature (61)..(62): /note="This region represents a CpG dinucleotide"
  misc_feature (61)..(61): /note="Nucleotide may be methylated to form 5-methylcytosine"
tgctcaatcaactacaaatttggggattcccatgaccctccctgtattagttcatttccacgctgctgataaagacatatcatgctgataaagaacagcatggaaaagaactgagcccctga

SEQ ID NO: 8248 - DNA, 122 bp, Homo sapiens
  misc_feature (61)..(62): /note="This region represents a CpG dinucleotide"
  misc_feature (61)..(61): /note="Nucleotide may be methylated to form 5-methylcytosine"
ttttgctacttcctctgttatttccctatctccagtatttatcatcttttgctggactagcgcaataacccaatgcagtcatagatttcatcagtccaacctccacatcacagcccaaggtg

SEQ ID NO: 8249 - DNA, 122 bp, Homo sapiens
  misc_feature (61)..(62): /note="This region represents a CpG dinucleotide"
  misc_feature (61)..(61): /note="Nucleotide may be methylated to form 5-methylcytosine"
taatcctcgcgtgttgcaacagcccaagatcaccctgcaaaggctattatttgcccagagcgttgcaggctggggaaatcttcatgtaccccttttccttttaaacaccagatcctatatcc

SEQ ID NO: 8250 - DNA, 122 bp, Homo sapiens
  misc_feature (61)..(62): /note="This region represents a CpG dinucleotide"
  misc_feature (61)..(61): /note="Nucleotide may be methylated to form 5-methylcytosine"
cggaatgcctctgatcttttgagtctgaagtctgtgaatcataagaagaggcagatggcacggtggactgcagagaccaaggtcttggaattacacagatctagacttgagtctccttagtc

SEQ ID NO: 8251 - DNA, 122 bp, Homo sapiens
  misc_feature (61)..(62): /note="This region represents a CpG dinucleotide"
  misc_feature (61)..(61): /note="Nucleotide may be methylated to form 5-methylcytosine"
aagttgctacttgctcggtcccctgaacttgggttatttctgtggtcagggcaatggcagcgttttcaggtaccagcttcaccacagtcagcactttccagaagagttcctgggctggctgg

SEQ ID NO: 8252 - DNA, 122 bp, Homo sapiens
  misc_feature (61)..(62): /note="This region represents a CpG dinucleotide"
  misc_feature (61)..(61): /note="Nucleotide may be methylated to form 5-methylcytosine"
aaagaaattgccatatttattgctttagtgggataaaatgcatggttgtctaaaatgaaacggtagcaccaagtccatggcccatgaaagtgactctgctgccatctatgcccaaagcctct

SEQ ID NO: 8253 - DNA, 122 bp, Homo sapiens
  misc_feature (61)..(62): /note="This region represents a CpG dinucleotide"
  misc_feature (61)..(61): /note="Nucleotide may be methylated to form 5-methylcytosine"
ggaatgtagtgaatctcattggctgcctcagcactggcactcttctggggctgcgggacccggcggcgtttgcaccagcgccggcgagtatacaggatcatcaccaggcacaagatggacag

SEQ ID NO: 8254 - DNA, 122 bp, Homo sapiens
  misc_feature (61)..(62): /note="This region represents a CpG dinucleotide"
  misc_feature (61)..(61): /note="Nucleotide may be methylated to form 5-methylcytosine"
gcgtaaatgacaagcatctgggaccctccccttccctgatccctgccaccaccactcaatcggccagataatcaattgtttctgaggtcactttcacataatcttggcaactttagttgttg

SEQ ID NO: 8255 - DNA, 122 bp, Homo sapiens
  misc_feature (61)..(62): /note="This region represents a CpG dinucleotide"
  misc_feature (61)..(61): /note="Nucleotide may be methylated to form 5-methylcytosine"
tgtgaggagccgagaagggcccctggctgacagccagcaggaaacagggactttctagcacgaaaacattagtgctgaggtcctagcaatgcccagaaattaccatgtcagtgctctggagt

SEQ ID NO: 8256 - DNA, 122 bp, Homo sapiens
  misc_feature (61)..(62): /note="This region represents a CpG dinucleotide"
  misc_feature (61)..(61): /note="Nucleotide may be methylated to form 5-methylcytosine"
cactgagagttgaacagggaggcgaagacaactttgttttttcccgggagagccctcgctcggaagtgcctcctccctccttctgcggcttgcgccccaagaccttcatccgccgccggggc

SEQ ID NO: 8257 - DNA, 122 bp, Homo sapiens
  misc_feature (61)..(62): /note="This region represents a CpG dinucleotide"
  misc_feature (61)..(61): /note="Nucleotide may be methylated to form 5-methylcytosine"
tttgggaggctaaggtgggagaatcacttaaacccaggagttcaagaccagcctaggcaacgtggtgagaccatgtctatacatataatttaaacattagctgggcatggtagtgcatactt

SEQ ID NO: 8258 - DNA, 122 bp, Homo sapiens
  misc_feature (61)..(62): /note="This region represents a CpG dinucleotide"
  misc_feature (61)..(61): /note="Nucleotide may be methylated to form 5-methylcytosine"
tattccccagtcatgtttcctctttctcctgaacctccacccactgtgtttttccatgcacgaaatagcaccattattcagccagtcacccaagtcagaaagctaaacatcatatgtctctg

SEQ ID NO: 8259 - DNA, 122 bp, Homo sapiens
  misc_feature (61)..(62): /note="This region represents a CpG dinucleotide"
  misc_feature (61)..(61): /note="Nucleotide may be methylated to form 5-methylcytosine"
tgtagatcagcccttggcccattacccagattctacataacaaaggacaggaccaggaaccgtctcttgtagggctgggcaaggagattgcaagttctcacattgtctgacattatatcctg

SEQ ID NO: 8260 - DNA, 122 bp, Homo sapiens
  misc_feature (61)..(62): /note="This region represents a CpG dinucleotide"
  misc_feature (61)..(61): /note="Nucleotide may be methylated to form 5-methylcytosine"
agtttaattatgaaaagaattacacttatgccttgattcagaagggagggagggaggaagcgatgcaaactccaaagcaccactgagtctcaccactgggggatcctacagagaaactggga

SEQ ID NO: 8261 - DNA, 122 bp, Homo sapiens
  misc_feature (61)..(62): /note="This region represents a CpG dinucleotide"
  misc_feature (61)..(61): /note="Nucleotide may be methylated to form 5-methylcytosine"
ggactgaacaaagaggaagccagagagcagaggagtatgaccctcttgtccacaccctggcgaggcaacaaaggctgggtgtgcccttccaccaaagccttaaggtggtggtggctctgctg

SEQ ID NO: 8262 - DNA, 122 bp, Homo sapiens
  misc_feature (61)..(62): /note="This region represents a CpG dinucleotide"
  misc_feature (61)..(61): /note="Nucleotide may be methylated to form 5-methylcytosine"
gcttccttccatcctattccttctcagaaattgcatctggcttcagcaaactcagaagaacgaaagtcagaacgtactcatcagtgaggaatagatgtcaatatccactcataacattgtat

SEQ ID NO: 8263 - DNA, 122 bp, Homo sapiens
  misc_feature (61)..(62): /note="This region represents a CpG dinucleotide"
  misc_feature (61)..(61): /note="Nucleotide may be methylated to form 5-methylcytosine"
aaatgtgaagtattcacttctctattagtcacaccttttacaccatagactccaaagaggcgttaagcacctggttttcctttggctcagaaaaaccaaccaccaaaaaccgccgtttttta

SEQ ID NO: 8264 - DNA, 122 bp, Homo sapiens
  misc_feature (61)..(62): /note="This region represents a CpG dinucleotide"
  misc_feature (61)..(61): /note="Nucleotide may be methylated to form 5-methylcytosine"
ctcaacaaacatttgttgagtggcttgactcagctttgctccttctcctgagtattcctccgtggagttttagcaacttcccataggaaatccaggctaaggtctgattcatccagtcctga

SEQ ID NO: 8265 - DNA, 122 bp, Homo sapiens
  misc_feature (61)..(62): /note="This region represents a CpG dinucleotide"
  misc_feature (61)..(61): /note="Nucleotide may be methylated to form 5-methylcytosine"
gtaggaggaggaaactgttctggaggaaactgtgttatcacttgacatcaagttaaaggacgcagaagcatcatggtattttgttaccttatgataagagttacatataggggaggaggaga

SEQ ID NO: 8266 - DNA, 122 bp, Homo sapiens
  misc_feature (61)..(62): /note="This region represents a CpG dinucleotide"
  misc_feature (61)..(61): /note="Nucleotide may be methylated to form 5-methylcytosine"
tcccccatctgggcggcgggcggggctcacaggctttagcaattagcgggcgcgggtgggcgcgcggcgcgggcggaggaagggccggagcaggtgagccgcggcggagcctcattagggcg

SEQ ID NO: 8267 - DNA, 122 bp, Homo sapiens
  misc_feature (61)..(62): /note="This region represents a CpG dinucleotide"
  misc_feature (61)..(61): /note="Nucleotide may be methylated to form 5-methylcytosine"
cagttctgaagctctatggttgtaagcctcgccttggcttgactgcacggctttaaagtacgaatctgttcacaggttgtccatgattaaaagccacacctgggccgagcacagtggctcac

SEQ ID NO: 8268 - DNA, 122 bp, Homo sapiens
  misc_feature (61)..(62): /note="This region represents a CpG dinucleotide"
  misc_feature (61)..(61): /note="Nucleotide may be methylated to form 5-methylcytosine"
ttccctgcaatgctatttgtgtgtgattacaccacactcacaaactgatcaaagcatctccgctccctgcatcctgcttgagttagcagtattcgctctggctgctgactcggcaggctcaa

SEQ ID NO: 8269 - DNA, 122 bp, Homo sapiens
  misc_feature (61)..(62): /note="This region represents a CpG dinucleotide"
  misc_feature (61)..(61): /note="Nucleotide may be methylated to form 5-methylcytosine"
ctcggggttgggggacagccctgcccgctagttgctcacagtccaggagggagacttgcacgtacactcacacagccaatgtagagtattaatgggcaccaggacagaaaagaaaggggagg

SEQ ID NO: 8270 - DNA, 122 bp, Homo sapiens
  misc_feature (61)..(62): /note="This region represents a CpG dinucleotide"
  misc_feature (61)..(61): /note="Nucleotide may be methylated to form 5-methylcytosine"
tgcaggagaaatcctcagtggctgcagttccacctcattgtcagccctgcgattaaaaagcgcagctctgtcattaaggggaagaaaataactcaagcctgcccgccctgcaggttcccagg

SEQ ID NO: 8271 - DNA, 122 bp, Homo sapiens
  misc_feature (61)..(62): /note="This region represents a CpG dinucleotide"
  misc_feature (61)..(61): /note="Nucleotide may be methylated to form 5-methylcytosine"
ggctgccagcacagtttcgcatccctcccacacatgtccgcattccaggcccagacactccgtgccctgggctcctatgaagggcaagaaaccactgattaggaagcaagaagaagaaaaag

SEQ ID NO: 8272 - DNA, 122 bp, Homo sapiens
  misc_feature (61)..(62): /note="This region represents a CpG dinucleotide"
  misc_feature (61)..(61): /note="Nucleotide may be methylated to form 5-methylcytosine"
tgccagctggaactgtggagacgcacatttggtcaggcagcgttccttcccctttccccacgggtgtcctgcttgtatctcaggagattacacaggccattgcctgtcttccagctggctaa

SEQ ID NO: 8273 - DNA, 122 bp, Homo sapiens
  misc_feature (61)..(62): /note="This region represents a CpG dinucleotide"
  misc_feature (61)..(61): /note="Nucleotide may be methylated to form 5-methylcytosine"
acttgaagatttcaggcaccaacagtgtttcttctttgtctattagtttcttagggctgccgtagcaaagcgccacaaactgggtggcttaagcaacagacatctattgtctcccagttctg

SEQ ID NO: 8274 - DNA, 122 bp, Homo sapiens
  misc_feature (61)..(62): /note="This region represents a CpG dinucleotide"
  misc_feature (61)..(61): /note="Nucleotide may be methylated to form 5-methylcytosine"
aaggcctttatttttcctcgcgggaaaagggattgcaattactataggttttacaggtatcgcgagatttcgtcaaatctcattacggatcccggctgaaagccattttgtttttcagctca

SEQ ID NO: 8275 - DNA, 122 bp, Homo sapiens
  misc_feature (61)..(62): /note="This region represents a CpG dinucleotide"
  misc_feature (61)..(61): /note="Nucleotide may be methylated to form 5-methylcytosine"
gagtgcagtggcatgaccacggctcagtgcaggcttgacttccagggctcaagcaatactcgcacctcaggttttccagtagctgggaaaacaggtgcgcaccacaatgccctgctaatttt

SEQ ID NO: 8276 - DNA, 122 bp, Homo sapiens
  misc_feature (61)..(62): /note="This region represents a CpG dinucleotide"
  misc_feature (61)..(61): /note="Nucleotide may be methylated to form 5-methylcytosine"
aagaggagggaactcattttatgagatcgatattatctggataccaaagctgaacaaagacgccataagggaactacagattatagtgagtatcccctattggaaatgcttggaaccagaag

SEQ ID NO: 8277 - DNA, 122 bp, Homo sapiens
  misc_feature (61)..(62): /note="This region represents a CpG dinucleotide"
  misc_feature (61)..(61): /note="Nucleotide may be methylated to form 5-methylcytosine"
ttacccccgaggtggtctgctctcttgcatgtctcaggagaagctctcctgatgaagcagcgtgctattccgagcactgggtgactaacctttatgagaagttcctagaggaactattgcaa

SEQ ID NO: 8278 - DNA, 122 bp, Homo sapiens
  misc_feature (61)..(62): /note="This region represents a CpG dinucleotide"
  misc_feature (61)..(61): /note="Nucleotide may be methylated to form 5-methylcytosine"
ttatctccccataaaatcctttaacataaaacatcactgtaagccatggtagtggactcacggaggtttacatagagagttgtccacctgcacgtcccacgacagccaaatccccaggcctc

SEQ ID NO: 8279 - DNA, 122 bp, Homo sapiens
  misc_feature (61)..(62): /note="This region represents a CpG dinucleotide"
  misc_feature (61)..(61): /note="Nucleotide may be methylated to form 5-methylcytosine"
caagcatgagtcaccgtgcctggctaaatgagctaattcttacgaaatgtactcaacaagcgcttggcacataataagcactcagtggctgtccactttccttatgtgactcccacggtagt

SEQ ID NO: 8280 - DNA, 122 bp, Homo sapiens
  misc_feature (61)..(62): /note="This region represents a CpG dinucleotide"
  misc_feature (61)..(61): /note="Nucleotide may be methylated to form 5-methylcytosine"
gcagaggctgagggcatctggagtttacttcctatttcttattgtttccctactagctggcgaagcacattgtctgatagaaatgaacttttggtgtatgtgtatctctgagccccatatga

SEQ ID NO: 8281 - DNA, 122 bp, Homo sapiens
  misc_feature (61)..(62): /note="This region represents a CpG dinucleotide"
  misc_feature (61)..(61): /note="Nucleotide may be methylated to form 5-methylcytosine"
ggactgtagtccactgtagcctgccttctcactgtgtaaatacataactacatgggctcccgtgagcttgccacacgccacaggctatgcctaattctacaaagcctgaaggaaaaatactg

SEQ ID NO: 8282 - DNA, 122 bp, Homo sapiens
  misc_feature (61)..(62): /note="This region represents a CpG dinucleotide"
  misc_feature (61)..(61): /note="Nucleotide may be methylated to form 5-methylcytosine"
taatcagtcggagcaggcaatgatcagagactgggcagggccttacctccaactctagaacgccagggaagcagcagccacccctcagggctcagaaaagggagtttctaagtactaaaagg

SEQ ID NO: 8283 - DNA, 122 bp, Homo sapiens
  misc_feature (61)..(62): /note="This region represents a CpG dinucleotide"
  misc_feature (61)..(61): /note="Nucleotide may be methylated to form 5-methylcytosine"
ctcctgtccccccagtcacgcttgcacagatctgactcagcagctgccttcctcctttcacgtcattgcatcgggcacatgctggtcatgtgtttctaaattaagtcctgttgtgtggggaa

SEQ ID NO: 8284 - DNA, 122 bp, Homo sapiens
  misc_feature (61)..(62): /note="This region represents a CpG dinucleotide"
  misc_feature (61)..(61): /note="Nucleotide may be methylated to form 5-methylcytosine"
gcaaaggggcataattgccatctagtggcacaaacccacaagtgtgagctccattcttggcgtctgtagtctcttcaggtaagaaattgttatggcctatacaacctcctctgtcctcttcc

SEQ ID NO: 8285 - DNA, 122 bp, Homo sapiens
  misc_feature (61)..(62): /note="This region represents a CpG dinucleotide"
  misc_feature (61)..(61): /note="Nucleotide may be methylated to form 5-methylcytosine"
cacacctgtaatcccagctatttgggtggctgagtcacagagttgcttgaacccaggattcggagtttgcagtgagctgagattgcaccactgcactccagcctgggcaacagagcaagact

SEQ ID NO: 8286 - DNA, 122 bp, Homo sapiens
  misc_feature (61)..(62): /note="This region represents a CpG dinucleotide"
  misc_feature (61)..(61): /note="Nucleotide may be methylated to form 5-methylcytosine"
aaagagatgcagagataaacacaatcacatcaaagggctgattcctccactttctaatagcggaataatcaataagaaagatggttaagataagattccgctcctatcgtatgcctttcttt

SEQ ID NO: 8287 - DNA, 122 bp, Homo sapiens
  misc_feature (61)..(62): /note="This region represents a CpG dinucleotide"
  misc_feature (61)..(61): /note="Nucleotide may be methylated to form 5-methylcytosine"
cacatgtattaactgtcttctgtgttgcagcatctgagttctttctcatgttcggacatgcgctgtccttgaagaatttgagtagacagtgtaaacgcccatgcgtggcgaacagcataagc

SEQ ID NO: 8288 - DNA, 122 bp, Homo sapiens
  misc_feature (61)..(62): /note="This region represents a CpG dinucleotide"
  misc_feature (61)..(61): /note="Nucleotide may be methylated to form 5-methylcytosine"
attgcaagttttctaaatagtgcatccttgtggtctacatgtgagttactaatatggaaacggggggccgggtgtgatggctcacacctgtaatcccagcactttgggaggccaaggcgggt

SEQ ID NO: 8289 - DNA, 122 bp, Homo sapiens
  misc_feature (61)..(62): /note="This region represents a CpG dinucleotide"
  misc_feature (61)..(61): /note="Nucleotide may be methylated to form 5-methylcytosine"
gtgacttggggcagctgactgcaggcgtctccacctctgtgtaatggaagtaataatgcccgcccacaggacgggaggaattaatatgagatacatacaatctggcggtttccgccgggccg

SEQ ID NO: 8290 - DNA, 122 bp, Homo sapiens
  misc_feature (61)..(62): /note="This region represents a CpG dinucleotide"
  misc_feature (61)..(61): /note="Nucleotide may be methylated to form 5-methylcytosine"
agccctatcccaggaaaagcagcacccctcaagtggcaaacagtgacctccacacccccacgcctgccttcctaagtcctgtccgtggagatggaggggcagacaggggccagttcctggga

SEQ ID NO: 8291 - DNA, 122 bp, Homo sapiens
  misc_feature (61)..(62): /note="This region represents a CpG dinucleotide"
  misc_feature (61)..(61): /note="Nucleotide may be methylated to form 5-methylcytosine"
gtaaaattacattctctggctaagcctagccctttgttgaaatagccacattatctatgacgacagtgacaaggccaaaggtgagaaaatctacatgaattattctctcaaaaggattcaga

SEQ ID NO: 8292 - DNA, 122 bp, Homo sapiens
  misc_feature (61)..(62): /note="This region represents a CpG dinucleotide"
  misc_feature (61)..(61): /note="Nucleotide may be methylated to form 5-methylcytosine"
gagagagcctgtctatctgtggatgaagtcacttcttagaaggaaatacagccaagatgacgaagatgatgtagacatcatcttgcattgcttgaagccagattcacttcctgacttcctaa

SEQ ID NO: 8293 - DNA, 122 bp, Homo sapiens
  misc_feature (61)..(62): /note="This region represents a CpG dinucleotide"
  misc_feature (61)..(61): /note="Nucleotide may be methylated to form 5-methylcytosine"
gtctctgactaaatttaatacttctttggaccaaggtacctggtggaggaagataatgcacgggcctcaaaggtgtcgaatttttagaactcttgtaaagggatgcacttgagaactatctg

SEQ ID NO: 8294 - DNA, 122 bp, Homo sapiens
  misc_feature (61)..(62): /note="This region represents a CpG dinucleotide"
  misc_feature (61)..(61): /note="Nucleotide may be methylated to form 5-methylcytosine"
caagactggaggaactacttcagattaaagcaaactaaagagagacacaactaaatgcaacgtgcagtcctggattggacaattggcaaaaagggaacatggagggtggattaaatcgtact

SEQ ID NO: 8295 - DNA, 122 bp, Homo sapiens
  misc_feature (61)..(62): /note="This region represents a CpG dinucleotide"
  misc_feature (61)..(61): /note="Nucleotide may be methylated to form 5-methylcytosine"
cacgctggagactgacagaccattttcaggaatatgtggtccaggcagctgtttctgcttcgttgaaggcttggcctgctttctcagtttgagcaccagatgaaggagatgacatgtgtttg

SEQ ID NO: 8296 - DNA, 122 bp, Homo sapiens
  misc_feature (61)..(62): /note="This region represents a CpG dinucleotide"
  misc_feature (61)..(61): /note="Nucleotide may be methylated to form 5-methylcytosine"
cttttttaaagaaaaaaaacctccctcaccacatgtcaaactctaggaaagcaagtaattcgaagagttccaccatatacgaaatgatgtacaagagcacggaaataaagaggccagtgtct

SEQ ID NO: 8297 - DNA, 122 bp, Homo sapiens
  misc_feature (61)..(62): /note="This region represents a CpG dinucleotide"
  misc_feature (61)..(61): /note="Nucleotide may be methylated to form 5-methylcytosine"
cagcttggccaacatggcaaaaccctgtctttactaaaactacaaaaattagccagtcgtcgtggtgcatgtctgtagtcccagctacttgggaggctgaggcacaagaatctcttgaaccc

SEQ ID NO: 8298 - DNA, 122 bp, Homo sapiens
  misc_feature (61)..(62): /note="This region represents a CpG dinucleotide"
  misc_feature (61)..(61): /note="Nucleotide may be methylated to form 5-methylcytosine"
agcctgtgacttgtttgaattaaactgtactttcttttcaggttgccacaatccattgtgcgtagtggttccatttcaaaagaatgttacaggatagcctcattttatgataactggaataa

SEQ ID NO: 8299 - DNA, 122 bp, Homo sapiens
  misc_feature (61)..(62): /note="This region represents a CpG dinucleotide"
  misc_feature (61)..(61): /note="Nucleotide may be methylated to form 5-methylcytosine"
aggtagattcttaaattattgattttaaactacaacttttcttctaagtactattttagccgtatttcccaaatattcatatgtttgggtttcattttcattaagctttaaagttttttatt

SEQ ID NO: 8300 - DNA, 122 bp, Homo sapiens
  misc_feature (61)..(62): /note="This region represents a CpG dinucleotide"
  misc_feature (61)..(61): /note="Nucleotide may be methylated to form 5-methylcytosine"
acctcaagtgatccacctgcctcggcctcccaaagtgctaagattacaggtgtgagccaccgtgcccagccaagatatctgataatctttttgaagatcccttgtatgtgatgagtcacttc

SEQ ID NO: 8301 - DNA, 122 bp, Homo sapiens
  misc_feature (61)..(62): /note="This region represents a CpG dinucleotide"
  misc_feature (61)..(61): /note="Nucleotide may be methylated to form 5-methylcytosine"
atattgttttccaccaactcaactaagattatggattgccaaactgaccatattactgcccgtttcttggattcttttcttttgattatcatatgtgagtcagtcttagccctgtatgattc

SEQ ID NO: 8302 - DNA, 122 bp, Homo sapiens
  misc_feature (61)..(62): /note="This region represents a CpG dinucleotide"
  misc_feature (61)..(61): /note="Nucleotide may be methylated to form 5-methylcytosine"
attcctcttgcccttcaagtaaaggcccaaaactacagccagctgtctcatgtgataccacggactctgccattgtgtcagcccacctgggcactgctattctgtatctgttacaaggaaca

SEQ ID NO: 8303 - DNA, 122 bp, Homo sapiens
  misc_feature (61)..(62): /note="This region represents a CpG dinucleotide"
  misc_feature (61)..(61): /note="Nucleotide may be methylated to form 5-methylcytosine"
acacccacgcttccctgtggactcacctctgcagccacaacaacaccctcctctccttggcgtggaagccagcgctcctggcccactcccagtaggggatgtcctctgagttgtttttcctg

SEQ ID NO: 8304 - DNA, 122 bp, Homo sapiens
  misc_feature (61)..(62): /note="This region represents a CpG dinucleotide"
  misc_feature (61)..(61): /note="Nucleotide may be methylated to form 5-methylcytosine"
cctgctcctccccaccactgtttccttgactggaaagtgggtgtgatggagaacatgacacgctctcagctctcggagtctagcttctctttgctgtgtccaaagtgagggcttactataga

SEQ ID NO: 8305 - DNA, 122 bp, Homo sapiens
  misc_feature (61)..(62): /note="This region represents a CpG dinucleotide"
  misc_feature (61)..(61): /note="Nucleotide may be methylated to form 5-methylcytosine"
ggcccgcggggccctagccgaggccgtagtaggtggaatacggggcagccacggaggaatcgggggcgaggcgcggagaggccccggatgcagcggtcccgccccgagaacggagcgcgcgg

SEQ ID NO: 8306 - DNA, 122 bp, Homo sapiens
  misc_feature (61)..(62): /note="This region represents a CpG dinucleotide"
  misc_feature (61)..(61): /note="Nucleotide may be methylated to form 5-methylcytosine"
gatatggaatctgatcccataactagatagcaggttacaaaataaggatttgtatctctccgttccttattatactcaatgaccttagacagttttctagctaatagtatagtagttatcat

SEQ ID NO: 8307 - DNA, 122 bp, Homo sapiens
  misc_feature (61)..(62): /note="This region represents a CpG dinucleotide"
  misc_feature (61)..(61): /note="Nucleotide may be methylated to form 5-methylcytosine"
ggctgggtgtgtgtgccgcctctgtgtgagcatgtgctagtcacacagctgggatatggccgtgttttggttccagctctttgggctagagccacgccgcagtagtgatagctccatttggg

SEQ ID NO: 8308 - DNA, 122 bp, Homo sapiens
  misc_feature (61)..(62): /note="This region represents a CpG dinucleotide"
  misc_feature (61)..(61): /note="Nucleotide may be methylated to form 5-methylcytosine"
atagctgtatagggcatttcccaggcatggagcttgcaggactggcagctgctctgggtgcgtcagtgagtggtgagtaaccatgacgctgtacacttaggcaacactaggtttataaagaa

SEQ ID NO: 8309 - DNA, 122 bp, Homo sapiens
  misc_feature (61)..(62): /note="This region represents a CpG dinucleotide"
  misc_feature (61)..(61): /note="Nucleotide may be methylated to form 5-methylcytosine"
agttaagtaacttgcccaaggccacagggctagttaaggacaggtaagcagaacagctggcgtgtcccagcacctgcgcacttctctctctctctctctctctctgagacagcgtctcactc

SEQ ID NO: 8310 - DNA, 122 bp, Homo sapiens
  misc_feature (61)..(62): /note="This region represents a CpG dinucleotide"
  misc_feature (61)..(61): /note="Nucleotide may be methylated to form 5-methylcytosine"
ggaggagaacgcggaggaactgcaaattcctgcctctcccagcaactgtgaagggacctacgttgattgcgtgcccaccacacatctttaccacgtatgttgtattgtagggagagtggttt

SEQ ID NO: 8311 - DNA, 122 bp, Homo sapiens
  misc_feature (61)..(62): /note="This region represents a CpG dinucleotide"
  misc_feature (61)..(61): /note="Nucleotide may be methylated to form 5-methylcytosine"
tcccagaggcgcctccctggccatagctgagtcaaccacagttgctttcctggaaatgggcgactgcaatgctatttggacttttcagttgatctggggtgatgtaaactcggggagcatct

SEQ ID NO: 8312 - DNA, 122 bp, Homo sapiens
  misc_feature (61)..(62): /note="This region represents a CpG dinucleotide"
  misc_feature (61)..(61): /note="Nucleotide may be methylated to form 5-methylcytosine"
gttgcttaaaaaacaacaacaacaaaaaacacaacggtgatataactagaactttaacagcgataggagtaagcaagtaccctaggaccaatggcatacttctgccacatccctgtttatat

SEQ ID NO: 8313 - DNA, 122 bp, Homo sapiens
  misc_feature (61)..(62): /note="This region represents a CpG dinucleotide"
  misc_feature (61)..(61): /note="Nucleotide may be methylated to form 5-methylcytosine"
gatgtagtgggaacgctccctcctcgagcattaaccgggttgaccccacccctctgtcctcgctgtcttcagtccaatcaagatcggaaagcaggatcaagagaaagatgatcagaccggaa

SEQ ID NO: 8314 - DNA, 122 bp, Homo sapiens
  misc_feature (61)..(62): /note="This region represents a CpG dinucleotide"
  misc_feature (61)..(61): /note="Nucleotide may be methylated to form 5-methylcytosine"
ccctaactctgctgctgaaacagatactgctgtccaccctcctaccattctctcttttgtcgattgctgtgatgtgtcactatcctggttcgcctctcctctgtcccttcctgctcccccta

SEQ ID NO: 8315 - DNA, 122 bp, Homo sapiens
  misc_feature (61)..(62): /note="This region represents a CpG dinucleotide"
  misc_feature (61)..(61): /note="Nucleotide may be methylated to form 5-methylcytosine"
aactaatgtttgctgcatgaatatggccagtatcacaaatcctctagtaacactgcaatacgctgtctcagaacttcgatttctttctattatttgttgcagtgtttatttcttctatttaa

SEQ ID NO: 8316 - DNA, 122 bp, Homo sapiens
  misc_feature (61)..(62): /note="This region represents a CpG dinucleotide"
  misc_feature (61)..(61): /note="Nucleotide may be methylated to form 5-methylcytosine"
tctgtcatcacttcatagaaggcacgatgactcaggacaggatagacgcaatttgatggacgagagattctggtgaagtctagtgcatacaatgccctgaagatggcaaacctgagtcagat

SEQ ID NO: 8317 - DNA, 122 bp, Homo sapiens
  misc_feature (61)..(62): /note="This region represents a CpG dinucleotide"
  misc_feature (61)..(61): /note="Nucleotide may be methylated to form 5-methylcytosine"
tttctatctctatccacagtctggaatcgttaggattattttaagccttcataacatttgcggacagcttggagtgttttgtacatgtagtggggcagtgcctggcctcctgtgagagattg

SEQ ID NO: 8318 - DNA, 122 bp, Homo sapiens
  misc_feature (61)..(62): /note="This region represents a CpG dinucleotide"
  misc_feature (61)..(61): /note="Nucleotide may be methylated to form 5-methylcytosine"
agcagcagctgctggccatgtgaccatgggtgcagatgaccttgtatgcctcatcctgaccgtgaccacaaagctgaaggagtctctctcttctattgggaaataagtctttgcctgtggtc

SEQ ID NO: 8319 - DNA, 122 bp, Homo sapiens
  misc_feature (61)..(62): /note="This region represents a CpG dinucleotide"
  misc_feature (61)..(61): /note="Nucleotide may be methylated to form 5-methylcytosine"
tgttcttttgtaattgaagggcattgttctgtgcccagtcctgctggtagacctgctccccggtggctgggttacctgtctcctgaagcatctggtcttcatcgatgtcatagaggttcccc

SEQ ID NO: 8320 - DNA, 122 bp, Homo sapiens
  misc_feature (61)..(62): /note="This region represents a CpG dinucleotide"
  misc_feature (61)..(61): /note="Nucleotide may be methylated to form 5-methylcytosine"
acaagtttgacagcgcccaatagacatacatgctggacaggtggggtgaggactgagctccgccctggcctgcctatgccaagtgttgtcctcacagatccagtgtgcctgcggggctgcca

SEQ ID NO: 8321 - DNA, 122 bp, Homo sapiens
  misc_feature (61)..(62): /note="This region represents a CpG dinucleotide"
  misc_feature (61)..(61): /note="Nucleotide may be methylated to form 5-methylcytosine"
gcttctgtacgtaggaacccagtcacttcgtagcagagaggcagactgcgcacagatctgcgtggggaagggagtgcgccaagccacagcctgatgggccggcgtgcctggcaggaggctca

SEQ ID NO: 8322 - DNA, 122 bp, Homo sapiens
  misc_feature (61)..(62): /note="This region represents a CpG dinucleotide"
  misc_feature (61)..(61): /note="Nucleotide may be methylated to form 5-methylcytosine"
ggcacatggtctggtgcgcacacatactcaacaaatgctttgagcaccaaatgacatcaccggtcagcgaccctcagcttagcacaagtttgtggtcgtggccaggcagtgaatgaaccagg

SEQ ID NO: 8323 - DNA, 122 bp, Homo sapiens
  misc_feature (61)..(62): /note="This region represents a CpG dinucleotide"
  misc_feature (61)..(61): /note="Nucleotide may be methylated to form 5-methylcytosine"
gtataacaggggtggttgcgggtgcattcctgtaggcattatctttcttctgaggtcctccgcctcttatctgcctaaccagcccctgtctcctctctcacagtcatgtggggagtccaggg

SEQ ID NO: 8324 - DNA, 122 bp, Homo sapiens
  misc_feature (61)..(62): /note="This region represents a CpG dinucleotide"
  misc_feature (61)..(61): /note="Nucleotide may be methylated to form 5-methylcytosine"
ttgtaagccagccggactatcaggaagtgtgaatcaacaggataaatttctctctcatagcgcaagtgctggtcatccaaccagctcattgttgtttatgttgactgtttcaaactctttct

SEQ ID NO: 8325 - DNA, 122 bp, Homo sapiens
  misc_feature (61)..(62): /note="This region represents a CpG dinucleotide"
  misc_feature (61)..(61): /note="Nucleotide may be methylated to form 5-methylcytosine"
taatccccgcattgtacagcagggaaactgagtcacagagcagcttaggtgctggctcaacgcctcagtctggtaatggaattacatgagagctttagctctggagcagcctgtctgctgtg

SEQ ID NO: 8326 - DNA, 122 bp, Homo sapiens
  misc_feature (61)..(62): /note="This region represents a CpG dinucleotide"
  misc_feature (61)..(61): /note="Nucleotide may be methylated to form 5-methylcytosine"
ctagcagagttgagtaattcagacacaaaccagatggcctgcaaagcctaaaatatttaccgtctgctcctttaaagaaaatgtttttccagcccctgacatagaagaaggtaaatggaaac

SEQ ID NO: 8327 - DNA, 122 bp, Homo sapiens
  misc_feature (61)..(62): /note="This region represents a CpG dinucleotide"
  misc_feature (61)..(61): /note="Nucleotide may be methylated to form 5-methylcytosine"
ctttggcagctcatgaatctctctgagcctgtttcttcatctgtacctaccattccaggtcgtgagggttaagtatgatattgcatgtagagcacctagcatgaagcctggcacgtggtgat

SEQ ID NO: 8328 - DNA, 122 bp, Homo sapiens
  misc_feature (61)..(62): /note="This region represents a CpG dinucleotide"
  misc_feature (61)..(61): /note="Nucleotide may be methylated to form 5-methylcytosine"
tgggagtgtgcaccctggagtccttgccgtaggatattgactaatagaaaacaactccagcgctgtccagtttaaaatcctcagagaagaacgaggggaaaactgggtaggtacgggtagct

SEQ ID NO: 8329 - DNA, 122 bp, Homo sapiens
  misc_feature (61)..(62): /note="This region represents a CpG dinucleotide"
  misc_feature (61)..(61): /note="Nucleotide may be methylated to form 5-methylcytosine"
tctcacagaagcaactcacatttcacaataagatatgactcaatagtctctctgcgcatgcgtgtcagccaataatgcttagtcagaagaactcaagacagtctatgaagcagtagggaata

SEQ ID NO: 8330 - DNA, 122 bp, Homo sapiens
  misc_feature (61)..(62): /note="This region represents a CpG dinucleotide"
  misc_feature (61)..(61): /note="Nucleotide may be methylated to form 5-methylcytosine"
catgcctctgtgcacccaccaggtccttaataaataatctgttaactgccatttttagaacgctgtattctaaatctcatttcctcagcaggaagcccatgcccttaggggttaggatctgt

SEQ ID NO: 8331 - DNA, 122 bp, Homo sapiens
  misc_feature (61)..(62): /note="This region represents a CpG dinucleotide"
  misc_feature (61)..(61): /note="Nucleotide may be methylated to form 5-methylcytosine"
actccagcctacttcaaatcctgtatagcataaattatcatcattgtcaagagaactgggcgttgagaaaaggagaaaagcacacctggattcagcagaacgacattaaattattatgtctt

SEQ ID NO: 8332 - DNA, 122 bp, Homo sapiens
  misc_feature (61)..(62): /note="This region represents a CpG dinucleotide"
  misc_feature (61)..(61): /note="Nucleotide may be methylated to form 5-methylcytosine"
gaagaaggaagactcccccccaccccaccaaaaaaaagccatcacacaactggctaatggcgtcatcgcattccacctggctgagatcaaagcagaaaaagaagggtgggaagtgggcttgg

SEQ ID NO: 8333 - DNA, 122 bp, Homo sapiens
  misc_feature (61)..(62): /note="This region represents a CpG dinucleotide"
  misc_feature (61)..(61): /note="Nucleotide may be methylated to form 5-methylcytosine"
agaaaaaaaggtatttaaaaactctaaaaagcagattaggaaaattaagaagcagcaacacggcaggagcaaaagatacacaaacataaggcaaaacataaaagaaggtgagaggataaact

SEQ ID NO: 8334 - DNA, 122 bp, Homo sapiens
  misc_feature (61)..(62): /note="This region represents a CpG dinucleotide"
  misc_feature (61)..(61): /note="Nucleotide may be methylated to form 5-methylcytosine"
cctagaatctgatcctgagacaaggattcctgctcaagagacttgtaaggcagtgttttccggaaaagactggtaggggagtagagaaggtggacaagagagggaaggaagtcaagctaaca

SEQ ID NO: 8335 - DNA, 122 bp, Homo sapiens
  misc_feature (61)..(62): /note="This region represents a CpG dinucleotide"
  misc_feature (61)..(61): /note="Nucleotide may be methylated to form 5-methylcytosine"
caaggccccagggagctgatgttgcactggagctctactctcctctcagcgagctggtgacgtgccagtccagcaggcctggcttatccaaccacaagtatgaatcggcagaaggcaatgag

SEQ ID NO: 8336 - DNA, 122 bp, Homo sapiens
  misc_feature (61)..(62): /note="This region represents a CpG dinucleotide"
  misc_feature (61)..(61): /note="Nucleotide may be methylated to form 5-methylcytosine"
gagattacatgaatgatgtcatttaatcttcaggccaagtttgctctactttacccctcccggccccaacactccacagaaagtagtgagctacatggtagagggcctgcttttatgtggtg

SEQ ID NO: 8337 - DNA, 122 bp, Homo sapiens
  misc_feature (61)..(62): /note="This region represents a CpG dinucleotide"
  misc_feature (61)..(61): /note="Nucleotide may be methylated to form 5-methylcytosine"
cggaaccattctaagtgttttacatgtattaactcatttaattctctcaacaatcctaggcgagagatcacgtcacttgcttaagatgacacagtagcagaactaggattcaaacacaagca

SEQ ID NO: 8338 - DNA, 122 bp, Homo sapiens
  misc_feature (61)..(62): /note="This region represents a CpG dinucleotide"
  misc_feature (61)..(61): /note="Nucleotide may be methylated to form 5-methylcytosine"
ccgccacctccaggggcagcctctgctgccggctcacatgtgaggagggagctgctgccccggcctctgagagaagcccagtctgttctggtcaagcaagaagcaagtggaccagggaggag

SEQ ID NO: 8339 - DNA, 122 bp, Homo sapiens
  misc_feature (61)..(62): /note="This region represents a CpG dinucleotide"
  misc_feature (61)..(61): /note="Nucleotide may be methylated to form 5-methylcytosine"
ataaaaggtgcgaggcagcaagcagaacattcacatgggtactctgggggttcctgcccacgcttaggtctctgatgcactcaagcctcatgattcatccatggctgtgtaccttgacacca

SEQ ID NO: 8340 - DNA, 122 bp, Homo sapiens
  misc_feature (61)..(62): /note="This region represents a CpG dinucleotide"
  misc_feature (61)..(61): /note="Nucleotide may be methylated to form 5-methylcytosine"
acccaggtttgcctgactcaaaagttctttcctgttaccccaggcagccaggacgctgttcggttgtgtttttataaaagtgctgtttctctcttgtggcagctttctcattagtgaaagga

SEQ ID NO: 8341 - DNA, 122 bp, Homo sapiens
  misc_feature (61)..(62): /note="This region represents a CpG dinucleotide"
  misc_feature (61)..(61): /note="Nucleotide may be methylated to form 5-methylcytosine"
agtcaagtcagaacagcagcccggtggagctcaaaggctgacttttcaccacctgggggacgtgaatgagtcactacttccaggagggtttttttaaggatagtttagcttctactatgaca

SEQ ID NO: 8342 - DNA, 122 bp, Homo sapiens
  misc_feature (61)..(62): /note="This region represents a CpG dinucleotide"
  misc_feature (61)..(61): /note="Nucleotide may be methylated to form 5-methylcytosine"
cactccagcctgggcaagagagcgagaccctgtctcaaaaaacaaaactgaagaaagagtcgagtcagaaagattgacatgggcctgcaggaggtttcatatcttgttcttactctcattag

SEQ ID NO: 8343 - DNA, 122 bp, Homo sapiens
  misc_feature (61)..(62): /note="This region represents a CpG dinucleotide"
  misc_feature (61)..(61): /note="Nucleotide may be methylated to form 5-methylcytosine"
caaagtccagttattaacttgcaagtcctccttggagaactgttctgccactgtctctcccgtggcctcagggaaatgtcttaattacttattgtgtagattaaatgagaaaatatgtgtaa

SEQ ID NO: 8344 - DNA, 122 bp, Homo sapiens
  misc_feature (61)..(62): /note="This region represents a CpG dinucleotide"
  misc_feature (61)..(61): /note="Nucleotide may be methylated to form 5-methylcytosine"
gaaaaagtaaggcacattcccaggaaattactttgctaggtctgactcacaaggcagtttcgtggactgataatacctttctcctctatcttgtaccaaactcatttaaaaacgacctttgc

SEQ ID NO: 8345 - DNA, 122 bp, Homo sapiens
  misc_feature (61)..(62): /note="This region represents a CpG dinucleotide"
  misc_feature (61)..(61): /note="Nucleotide may be methylated to form 5-methylcytosine"
ctgatttctgtacgtcatttcccctttttcatctataaatattcttttaccaagtggctgcgctggagtctctgtgactctgctgtgattctggggttgcccaattcatgaatcattaattg

SEQ ID NO: 8346 - DNA, 122 bp, Homo sapiens
  misc_feature (61)..(62): /note="This region represents a CpG dinucleotide"
  misc_feature (61)..(61): /note="Nucleotide may be methylated to form 5-methylcytosine"
cacttccccactaactgcaaagtccacaaaggcaaggaccatgtctaccatgtcatattccgtgaagcaactcccactcaagcaatttcctctctgcagcaaattcaggagagcattttcct

SEQ ID NO: 8347 - DNA, 122 bp, Homo sapiens
  misc_feature (61)..(62): /note="This region represents a CpG dinucleotide"
  misc_feature (61)..(61): /note="Nucleotide may be methylated to form 5-methylcytosine"
ataagaagaaaagcacaaacagaaaaataaagccatgtgtaagaaaggcagggattagaacgatatagctgcaggccaaggaaccccaaggattgtcagtcatcctagaagcaacagagaag

SEQ ID NO: 8348 - DNA, 122 bp, Homo sapiens
  misc_feature (61)..(62): /note="This region represents a CpG dinucleotide"
  misc_feature (61)..(61): /note="Nucleotide may be methylated to form 5-methylcytosine"
aggaacagggtgccacgagctcttggtaacggagcagcgagacctgcagctacatctggtcgggcaggaagagtgggaagttgggctgggtggcacagaagcccaggggagcagcagcacag

SEQ ID NO: 8349 - DNA, 122 bp, Homo sapiens
  misc_feature (61)..(62): /note="This region represents a CpG dinucleotide"
  misc_feature (61)..(61): /note="Nucleotide may be methylated to form 5-methylcytosine"
tttgagttggtagtgacagcatcattttcaccagtggctccagtgaccttccagtcccagcggagccatctgaggtcacccagcctgctttgagctagtagctttatgactggcaaagaaat

SEQ ID NO: 8350 - DNA, 122 bp, Homo sapiens
  misc_feature (61)..(62): /note="This region represents a CpG dinucleotide"
  misc_feature (61)..(61): /note="Nucleotide may be methylated to form 5-methylcytosine"
gcaggcagaggtgccttcctgcaggtgtgccagagtctttggtaatgagccattatgctccgtcagtcattctgctgtaaccatgcatagtcatcctgtttccttcctcacagtatatggag

SEQ ID NO: 8351 - DNA, 122 bp, Homo sapiens
  misc_feature (61)..(62): /note="This region represents a CpG dinucleotide"
  misc_feature (61)..(61): /note="Nucleotide may be methylated to form 5-methylcytosine"
tcaaagagttccaccatactcctgggaatccagaaaaccacatggatgtgtagagttgtgcgcatgcccagaaaggacctgagaaggccctaatctcacctcttgctaacctggaggctgta

SEQ ID NO: 8352 - DNA, 122 bp, Homo sapiens
  misc_feature (61)..(62): /note="This region represents a CpG dinucleotide"
  misc_feature (61)..(61): /note="Nucleotide may be methylated to form 5-methylcytosine"
gatcataagctctagtcttgcttttgcctttctctctctttgatcactatctgtggtagacgccagctgtgacattttgagtttactcaagcagccctatacagagatccatgtgacaataa

SEQ ID NO: 8353 - DNA, 122 bp, Homo sapiens
  misc_feature (61)..(62): /note="This region represents a CpG dinucleotide"
  misc_feature (61)..(61): /note="Nucleotide may be methylated to form 5-methylcytosine"
aggtttgtgtaggttaagaaactagacctcagaaatgatttcatgtcttggataaagtcacgcataaccccacaaggtaaaagctgtatcaggtttgattggcaagtgagtgcctcatgcat

SEQ ID NO: 8354 - DNA, 122 bp, Homo sapiens
  misc_feature (61)..(62): /note="This region represents a CpG dinucleotide"
  misc_feature (61)..(61): /note="Nucleotide may be methylated to form 5-methylcytosine"
tttggcaccttaattatatctgcaataatcctttacagcaatacctagattaatgttccacggaataactagaagatatatgtacactaggagctaagaacttaggggtcatctaagaatcc

SEQ ID NO: 8355 - DNA, 122 bp, Homo sapiens
  misc_feature (61)..(62): /note="This region represents a CpG dinucleotide"
  misc_feature (61)..(61): /note="Nucleotide may be methylated to form 5-methylcytosine"
acccccatttctgtccccattgtgccccgatgttacatcacacactatgattaaattggacgtcagtgcttaaattgttatgaccacgcacacattctctgctgaaccagtagtgctctgca

SEQ ID NO: 8356 - DNA, 122 bp, Homo sapiens
  misc_feature (61)..(62): /note="This region represents a CpG dinucleotide"
  misc_feature (61)..(61): /note="Nucleotide may be methylated to form 5-methylcytosine"
tctttcttacttttttttcttagtatttttccaactccaaccacattacttgtttcacaacgacaggttaaacggttgcaacttgtctgagagtcatgaggaaatcaggcaagaggaaacag

SEQ ID NO: 8357 - DNA, 122 bp, Homo sapiens
  misc_feature (61)..(62): /note="This region represents a CpG dinucleotide"
  misc_feature (61)..(61): /note="Nucleotide may be methylated to form 5-methylcytosine"
gggagcagcagctcctgaaggttccatggcagggaacaagacactccttctggaaggcaccgattttcctagccccactcccattacacgcacacacacacacacacatacagagtgattca

SEQ ID NO: 8358 - DNA, 122 bp, Homo sapiens
  misc_feature (61)..(62): /note="This region represents a CpG dinucleotide"
  misc_feature (61)..(61): /note="Nucleotide may be methylated to form 5-methylcytosine"
gtggaggaataagacgcccttgtgataagcccggctcataaggataaggatactaagaagcgccgtattttatggggcatttcctacgtgctacgctctattctaagcattgggtgtggagg

SEQ ID NO: 8359 - DNA, 122 bp, Homo sapiens
  misc_feature (61)..(62): /note="This region represents a CpG dinucleotide"
  misc_feature (61)..(61): /note="Nucleotide may be methylated to form 5-methylcytosine"
gagacactagaatgagtgctttgcctacaccatctcctttcatcttcaccccagtaacaacggccctcagggctcatcgtgggtgttattcactgtccacattttgcagaagaggaaactga

SEQ ID NO: 8360 - DNA, 122 bp, Homo sapiens
  misc_feature (61)..(62): /note="This region represents a CpG dinucleotide"
  misc_feature (61)..(61): /note="Nucleotide may be methylated to form 5-methylcytosine"
caactgaactatggtggttaggttagtaattagatgcacagacaaaatcacaggaatctgcgtgagccttgtcctactggtaaaggagtcttgtgaggattaattgaaataactcgcaaaaa

SEQ ID NO: 8361 - DNA, 122 bp, Homo sapiens
  misc_feature (61)..(62): /note="This region represents a CpG dinucleotide"
  misc_feature (61)..(61): /note="Nucleotide may be methylated to form 5-methylcytosine"
tcagctcttgctgtgcactgcctgacacgcgttgatgctgtgctttgtggagcctgtttacgtttggtagaaatggcaccatctagtacttaaaaaggatcatcaccacaataactgtttgg

SEQ ID NO: 8362 - DNA, 122 bp, Homo sapiens
  misc_feature (61)..(62): /note="This region represents a CpG dinucleotide"
  misc_feature (61)..(61): /note="Nucleotide may be methylated to form 5-methylcytosine"
aaagtggcttgaggtctcagaggcagctctctcagcctgtaccctccatcctttcattcacgtccatgtagacattatcactcagggaagtgagtgttccatactggggaagtccccttggg

SEQ ID NO: 8363 - DNA, 122 bp, Homo sapiens
  misc_feature (61)..(62): /note="This region represents a CpG dinucleotide"
  misc_feature (61)..(61): /note="Nucleotide may be methylated to form 5-methylcytosine"
tacagggtttcatgagatctacacctgggctgggcacgcctgttggttttttactgacaacgcataatttttcgaggagtggtaatcagaggcaaccgttctagtgacagtgattcaggcgt

SEQ ID NO: 8364 - DNA, 122 bp, Homo sapiens
  misc_feature (61)..(62): /note="This region represents a CpG dinucleotide"
  misc_feature (61)..(61): /note="Nucleotide may be methylated to form 5-methylcytosine"
cgtcatatgctctccgtaggttacctgtctatttagaagcaaacctctcgtcacccgctgcggagcatctcgatgttagaaaccacgccactatttttagtgtgtgtccttgtgcttctgca

SEQ ID NO: 8365 - DNA, 122 bp, Homo sapiens
  misc_feature (61)..(62): /note="This region represents a CpG dinucleotide"
  misc_feature (61)..(61): /note="Nucleotide may be methylated to form 5-methylcytosine"
acagacccatgaagctgtgaattccacaggcgtctgatctagccaactgcagaagtgcatcgtgagagttgcttttcccaaatcaatcagcgcccaggctacaaaaacaggcagaggaggtg

SEQ ID NO: 8366 - DNA, 122 bp, Homo sapiens
  misc_feature (61)..(62): /note="This region represents a CpG dinucleotide"
  misc_feature (61)..(61): /note="Nucleotide may be methylated to form 5-methylcytosine"
agcaagttaattatagcgagcaaaaaagtgcagtggttatataaataagctattgttatgcgcatgcaagttgggccttgtcaagggacttgcaaggtttagaggtcagaggatccatgtaa

SEQ ID NO: 8367 - DNA, 122 bp, Homo sapiens
  misc_feature (61)..(62): /note="This region represents a CpG dinucleotide"
  misc_feature (61)..(61): /note="Nucleotide may be methylated to form 5-methylcytosine"
cacagtgtgaaaatattctaatcaaaatatttgcaaagtgtgagagaagctgggaagagacgcaacccatgagctaagtcctgagttgaaaatcaaagacacgaggcatgagagaaacaatg

SEQ ID NO: 8368 - DNA, 122 bp, Homo sapiens
  misc_feature (61)..(62): /note="This region represents a CpG dinucleotide"
  misc_feature (61)..(61): /note="Nucleotide may be methylated to form 5-methylcytosine"
gtcttggttcccttgagaaatgcagggaaggaggcacccccacagtgaacgcctcttcttcgccagagacgcctgagaattcacatcagggacacttcacatcagggacaggccggggcaga

SEQ ID NO: 8369 - DNA, 122 bp, Homo sapiens
  misc_feature (61)..(62): /note="This region represents a CpG dinucleotide"
  misc_feature (61)..(61): /note="Nucleotide may be methylated to form 5-methylcytosine"
atcaaattggcaaaaatccaacaatgcaatgacattctgtgccagccaggctgtggggtgcgtccatggtgtagcactggtggagggcaccctggcacaggccaccggaatgataaactcat

SEQ ID NO: 8370 - DNA, 122 bp, Homo sapiens
  misc_feature (61)..(62): /note="This region represents a CpG dinucleotide"
  misc_feature (61)..(61): /note="Nucleotide may be methylated to form 5-methylcytosine"
tgtaaatgttgttcttggggttgctattagtactatcatcatctccatcatcagagacagcgttgtttgctctaggttgtgatcctccacacaatagcctcaatccgcttgtcaggactatg

SEQ ID NO: 8371 - DNA, 122 bp, Homo sapiens
  misc_feature (61)..(62): /note="This region represents a CpG dinucleotide"
  misc_feature (61)..(61): /note="Nucleotide may be methylated to form 5-methylcytosine"
ccctaacccttgactaacttcctgtatgtatgtagtcagtttactccctcagtttctactcgctcagaaactgagtggactacatacgggaaattagtcgagacaaggaagatggaacagag

SEQ ID NO: 8372 - DNA, 122 bp, Homo sapiens
  misc_feature (61)..(62): /note="This region represents a CpG dinucleotide"
  misc_feature (61)..(61): /note="Nucleotide may be methylated to form 5-methylcytosine"
gggaggaaagcaaaccaggggagcagctgctgggccccagggctgggcctacagagctgacgcaggtgcaactaggcaaagaacattccagttcctccaaggccccgctaggatcattccat

SEQ ID NO: 8373 - DNA, 122 bp, Homo sapiens
  misc_feature (61)..(62): /note="This region represents a CpG dinucleotide"
  misc_feature (61)..(61): /note="Nucleotide may be methylated to form 5-methylcytosine"
acttattgtggagattaaactgatttggctctaggtatcaaccccaaaacatacttactgcgtttcctggctggctttcctgcagtttggcaacggcaacgttttccctttcttcaggtgct

SEQ ID NO: 8374 - DNA, 122 bp, Homo sapiens
  misc_feature (61)..(62): /note="This region represents a CpG dinucleotide"
  misc_feature (61)..(61): /note="Nucleotide may be methylated to form 5-methylcytosine"
ttcaaggatttagggtgactgcccatcatttccatagtctggaaccaaatcaaacttcagcgtttaactaggcaagtgtaatcttatttaactcaaaattttcagtgacaactcaataatgt

SEQ ID NO: 8375 - DNA, 122 bp, Homo sapiens
  misc_feature (61)..(62): /note="This region represents a CpG dinucleotide"
  misc_feature (61)..(61): /note="Nucleotide may be methylated to form 5-methylcytosine"
gctcccggaggccctgggactgcacccagcgcaggtgccggccctggagctggagatggacgagcagacccaggccccaggccgagcctctgagccctgacaccccttacgattcatccaaa

SEQ ID NO: 8376 - DNA, 122 bp, Homo sapiens
  misc_feature (61)..(62): /note="This region represents a CpG dinucleotide"
  misc_feature (61)..(61): /note="Nucleotide may be methylated to form 5-methylcytosine"
tgtgtgttttaaacgtctggattcaagttttctttctaagggaaagcccaaagtgctcatcgtgggcagtagctagagctccgtgctctgtattctgtactgctttcttcatggaatttgtt

SEQ ID NO: 8377 - DNA, 122 bp, Homo sapiens
  misc_feature (61)..(62): /note="This region represents a CpG dinucleotide"
  misc_feature (61)..(61): /note="Nucleotide may be methylated to form 5-methylcytosine"
ccacttttaattatatgctaattaagaggtggattattcagaacattctggaaaaggggccgagagcgtccagaaccatatatggtaacttccaggccattgctatggcccattgccatggc

SEQ ID NO: 8378 - DNA, 122 bp, Homo sapiens
  misc_feature (61)..(62): /note="This region represents a CpG dinucleotide"
  misc_feature (61)..(61): /note="Nucleotide may be methylated to form 5-methylcytosine"
cctgctgtctactccccaccttcggtgagcggccgccatggtggagcagggtccgagccacgtcctgcagggcacgtctggggcatttcctgttttgtggtaggaaatgtccctgacctttc

SEQ ID NO: 8379 - DNA, 122 bp, Homo sapiens
  misc_feature (61)..(62): /note="This region represents a CpG dinucleotide"
  misc_feature (61)..(61): /note="Nucleotide may be methylated to form 5-methylcytosine"
cttaaagaatagtgcttaagtaagctccttagcagagcattcaacttactccagttccaccgtggctctgtggtggaactggctttcagattcgcttttgcagatgccatgttctcaccaga

SEQ ID NO: 8380 - DNA, 122 bp, Homo sapiens
  misc_feature (61)..(62): /note="This region represents a CpG dinucleotide"
  misc_feature (61)..(61): /note="Nucleotide may be methylated to form 5-methylcytosine"
agtgttagagttatgtttttcatacgcatgcaagacagcttacattctgcactctggtggcgtgcagatgtcctggagagtaaggctcctttggttccctcacttttccttttgctaataga

SEQ ID NO: 8381 - DNA, 122 bp, Homo sapiens
  misc_feature (61)..(62): /note="This region represents a CpG dinucleotide"
  misc_feature (61)..(61): /note="Nucleotide may be methylated to form 5-methylcytosine"
tggacatgtttcctgtgatctaaatctgatgtaaggaaatgacaattgtgaaagacccagcgtgagagaatctgatgggagggtgggtcatcagggaccagctggcctggctgatgatgtat

SEQ ID NO: 8382 - DNA, 122 bp, Homo sapiens
  misc_feature (61)..(62): /note="This region represents a CpG dinucleotide"
  misc_feature (61)..(61): /note="Nucleotide may be methylated to form 5-methylcytosine"
ctgtcaacagtactattttagatccttatcaggtcatacctagactctacagtgccttttcggtagccctgaatccttcttatatcttgtatacatcactgtctttggtcataccacccttt

SEQ ID NO: 8383 - DNA, 122 bp, Homo sapiens
  misc_feature (61)..(62): /note="This region represents a CpG dinucleotide"
  misc_feature (61)..(61): /note="Nucleotide may be methylated to form 5-methylcytosine"
ggtcgaagtgttacctactgatagctagcacagagtaggtgctgaggtcacagaatgtgacgagaatttcaagaaggagcggtgctcagtgttgcagagattaaggagtatgagattgaaaa

SEQ ID NO: 8384 - DNA, 122 bp, Homo sapiens
  misc_feature (61)..(62): /note="This region represents a CpG dinucleotide"
  misc_feature (61)..(61): /note="Nucleotide may be methylated to form 5-methylcytosine"
accaggccaggcttggctttctgacccttgtcagacagtttaccctccaaatgacctatccgtttagtctttttcaatgtagttgtatcgatgtggccttatagtccatcacctagaaaaac

SEQ ID NO: 8385 - DNA, 122 bp, Homo sapiens
  misc_feature (61)..(62): /note="This region represents a CpG dinucleotide"
  misc_feature (61)..(61): /note="Nucleotide may be methylated to form 5-methylcytosine"
aaatgccaacagaggaggctgagaaggagtgcttgcgaaatacgggaaaaaccagaggagcgaagtatcagggcctggaggagaaagttttttgagatcagcaattgacctgctgtgccaaa

SEQ ID NO: 8386 - DNA, 122 bp, Homo sapiens
  misc_feature (61)..(62): /note="This region represents a CpG dinucleotide"
  misc_feature (61)..(61): /note="Nucleotide may be methylated to form 5-methylcytosine"
cttgaacagcggaggcccagcctggctcgtccccctcctgccccctggggcgggtgtctgcggcctccaggctactcctggatgattttattagctgtgttgggagcatatggtcctcggac

SEQ ID NO: 8387 - DNA, 122 bp, Homo sapiens
  misc_feature (61)..(62): /note="This region represents a CpG dinucleotide"
  misc_feature (61)..(61): /note="Nucleotide may be methylated to form 5-methylcytosine"
gctaccaggatagagagatgaccaaactctagaccgggaacaagtcgaacaagtcagtgacggagaagagctagccactatctctaggtcagagcaaagttctgggttcaatagaagtgcaa

SEQ ID NO: 8388 - DNA, 122 bp, Homo sapiens
  misc_feature (61)..(62): /note="This region represents a CpG dinucleotide"
  misc_feature (61)..(61): /note="Nucleotide may be methylated to form 5-methylcytosine"
gcaaaatcacaccaggttctgctgggcaaatctcccaggtggcgtattgctagaggagagcgccactgcagaggacacactgtcttggccactggctttgcaaaccatagtggaggagggag

SEQ ID NO: 8389 - DNA, 122 bp, Homo sapiens
  misc_feature (61)..(62): /note="This region represents a CpG dinucleotide"
  misc_feature (61)..(61): /note="Nucleotide may be methylated to form 5-methylcytosine"
acggcatgccgtaggaaagttttatttccaattgattggttacaaatcagataaatatcgcgtctaatgaaagcagctttgaactgctggaaatgttatctataggagtctggggtttatca

SEQ ID NO: 8390 - DNA, 122 bp, Homo sapiens
  misc_feature (61)..(62): /note="This region represents a CpG dinucleotide"
  misc_feature (61)..(61): /note="Nucleotide may be methylated to form 5-methylcytosine"
gcaggctgtgttattaagtgcgtgtgtgtgggtgtgccttcctgagctgagccctattatcgcaaggtggcttgctctggccctgaacagtcttatttttggttcgtttggttgggtgttga

SEQ ID NO: 8391 - DNA, 122 bp, Homo sapiens
  misc_feature (61)..(62): /note="This region represents a CpG dinucleotide"
  misc_feature (61)..(61): /note="Nucleotide may be methylated to form 5-methylcytosine"
cgatctttcccctggcctccagtttgcctggcaaagtcacaggaagtatctccatggcaccgcatcagccctcacagagcaggaaaccttgatttctacagaggctgtttcctcccagcctt

SEQ ID NO: 8392 - DNA, 122 bp, Homo sapiens
  misc_feature (61)..(62): /note="This region represents a CpG dinucleotide"
  misc_feature (61)..(61): /note="Nucleotide may be methylated to form 5-methylcytosine"
ggagtagcagtccaatttctctttggtagtcaggattaatcacccaagtcagcccagtaacgtctttctttgcctgttgattcagaggcaagaggaactgaaagtggccaggtggcactgaa

SEQ ID NO: 8393 - DNA, 122 bp, Homo sapiens
  misc_feature (61)..(62): /note="This region represents a CpG dinucleotide"
  misc_feature (61)..(61): /note="Nucleotide may be methylated to form 5-methylcytosine"
ctaatggcccgccagttgatacatgtgccctatcatttgcttcctgtgggggctggggggcggttccagcaagccttgcctagaattggccaattagaatccattggtgacttgatggacag

SEQ ID NO: 8394 - DNA, 122 bp, Homo sapiens
  misc_feature (61)..(62): /note="This region represents a CpG dinucleotide"
  misc_feature (61)..(61): /note="Nucleotide may be methylated to form 5-methylcytosine"
agagaaatcttttgctaatcattgctctttggagccaacctgttcttcgacactagatggcgtcattcactcacctcagctcatctcttggcaagagaaaaatttgattcccagttgggcat

SEQ ID NO: 8395 - DNA, 122 bp, Homo sapiens
  misc_feature (61)..(62): /note="This region represents a CpG dinucleotide"
  misc_feature (61)..(61): /note="Nucleotide may be methylated to form 5-methylcytosine"
gggcgtgaagaaacgtgtaggatgaggaaagagaacttgtgagccttaagagctgcccggcgccgtcttaccaggcctcgcccggcccggccctggccctcagttccctgccagggttggga

SEQ ID NO: 8396 - DNA, 122 bp, Homo sapiens
  misc_feature (61)..(62): /note="This region represents a CpG dinucleotide"
  misc_feature (61)..(61): /note="Nucleotide may be methylated to form 5-methylcytosine"
gtttcgctcacagatgtatctatccctggaatgtcctttgggatgtatctgtccctgaaacgtcatttggcaaatagttgacactcaagaaatgtttgttgccgaatggattacctgacctg

SEQ ID NO: 8397 - DNA, 122 bp, Homo sapiens
  misc_feature (61)..(62): /note="This region represents a CpG dinucleotide"
  misc_feature (61)..(61): /note="Nucleotide may be methylated to form 5-methylcytosine"
ttcgttgaagtatctttaaaagctcatatgtgagatgctgtaatcttccttttattttcacgcctatatcctgatttcttgactaggtggtaaacaatgtgaaggtatgtaatgaagatata

SEQ ID NO: 8398 - DNA, 122 bp, Homo sapiens
  misc_feature (61)..(62): /note="This region represents a CpG dinucleotide"
  misc_feature (61)..(61): /note="Nucleotide may be methylated to form 5-methylcytosine"
attgtgctaagtgaaataggccagtcacaaaaagacaaatactttacgagtccacttacacgaaatatctaaagtagtgaaattcatagaaatagaaaataggactgtggttaccagagact

SEQ ID NO: 8399 - DNA, 122 bp, Homo sapiens
  misc_feature (61)..(62): /note="This region represents a CpG dinucleotide"
  misc_feature (61)..(61): /note="Nucleotide may be methylated to form 5-methylcytosine"
acccgtctgagagttgacttcataatcgagatggctacgaagtgactaatggacaggtagcgtaaaacgcacggatacactagacaaaggaatgattcatatcctggatgagacagagtggg

SEQ ID NO: 8400 - DNA, 122 bp, Homo sapiens
  misc_feature (61)..(62): /note="This region represents a CpG dinucleotide"
  misc_feature (61)..(61): /note="Nucleotide may be methylated to form 5-methylcytosine"
aggctggagggcagaggcacattcacggctcactgcagccttgaccttctgggctcaagacgaagaaattggggattggcttaagtaattgcccaagtaattgcttaagtaattgcccaagt

SEQ ID NO: 8401 - DNA, 122 bp, Homo sapiens
  misc_feature (61)..(62): /note="This region represents a CpG dinucleotide"
  misc_feature (61)..(61): /note="Nucleotide may be methylated to form 5-methylcytosine"
tatatttatatgcatgcatgcacacacacgcacacacacacacacactctcactcactcccgagtcagaaaaaggactcagcacccagacatactgcaggctcttgaagaagacagtatttt

SEQ ID NO: 8402 - DNA, 122 bp, Homo sapiens
  misc_feature (61)..(62): /note="This region represents a CpG dinucleotide"
  misc_feature (61)..(61): /note="Nucleotide may be methylated to form 5-methylcytosine"
cacacatttgaaaggccagaggaaccccgaaccccacccaccgcccatgcatctccctgccgcccacggagatgcctccggttcaagacaaaaatcctttagcatgcttagctgtttcttgt

SEQ ID NO: 8403 - DNA, 122 bp, Homo sapiens
  misc_feature (61)..(62): /note="This region represents a CpG dinucleotide"
  misc_feature (61)..(61): /note="Nucleotide may be methylated to form 5-methylcytosine"
ccagctgcccctgccccgtaccatcttccttccccctccactcaggaacaaaaggtcccacggttcaggccatctggatttggagctgtcatttatagtcgcccaaactttgaggatgactt

SEQ ID NO: 8404 - DNA, 122 bp, Homo sapiens
  misc_feature (61)..(62): /note="This region represents a CpG dinucleotide"
  misc_feature (61)..(61): /note="Nucleotide may be methylated to form 5-methylcytosine"
ctgtccatggtgctgattaggcaactgctgttgtgcactgtccagggttctgtttagaagcggcacatatatggtttcctttgcctatgtgcagccttggctttccatagatctttgtttga

SEQ ID NO: 8405 - DNA, 122 bp, Homo sapiens
  misc_feature (61)..(62): /note="This region represents a CpG dinucleotide"
  misc_feature (61)..(61): /note="Nucleotide may be methylated to form 5-methylcytosine"
gttttaagtcctatatcttgacatcccgagtataaatgcgggtaccagacacagtacaaacgttctcaaagcccagttacgtattccaaaccaaacgcgggctcttgaagggtgatgaggta

SEQ ID NO: 8406 - DNA, 122 bp, Homo sapiens
  misc_feature (61)..(62): /note="This region represents a CpG dinucleotide"
  misc_feature (61)..(61): /note="Nucleotide may be methylated to form 5-methylcytosine"
aggtccctccttgtgttcccagaatgctgtcaagctcgactgggacctcctccctgaaggcgtctgcatttttcatgagtgaagaggaaagagatgatgcgtcagaaattgcggtaaatatt

SEQ ID NO: 8407 - DNA, 122 bp, Homo sapiens
  misc_feature (61)..(62): /note="This region represents a CpG dinucleotide"
  misc_feature (61)..(61): /note="Nucleotide may be methylated to form 5-methylcytosine"
ccaactcctgacctcaggtaatccacctgccttggcctcccaaagtgctaggattacaggcgtgagccactgtgcccgccctcagcaggttctttaaaacagttatttttatgaaatttgga

SEQ ID NO: 8408 - DNA, 122 bp, Homo sapiens
  misc_feature (61)..(62): /note="This region represents a CpG dinucleotide"
  misc_feature (61)..(61): /note="Nucleotide may be methylated to form 5-methylcytosine"
gagttgcctctccttgagccagggaggaccccgtccggtgctggcagttctcttcttccacgcctcctgggcctggcccctcatccagggccgagccggggcgttttgctagcagatttctc

SEQ ID NO: 8409 - DNA, 122 bp, Homo sapiens
  misc_feature (61)..(62): /note="This region represents a CpG dinucleotide"
  misc_feature (61)..(61): /note="Nucleotide may be methylated to form 5-methylcytosine"
taatagaatcttccttctagggctgttttgaaaaccaaagaacacaatgtatgcagtgcacgtgaaacacagggttcaataaatggtagggaagattcagagaaactaaccatgtagaggga

SEQ ID NO: 8410 - DNA, 122 bp, Homo sapiens
  misc_feature (61)..(62): /note="This region represents a CpG dinucleotide"
  misc_feature (61)..(61): /note="Nucleotide may be methylated to form 5-methylcytosine"
tagtaccttcttgtcatgataaagattgtaacaagaacaggaaatggcacagcacaaatccgttttcatgataatgatctcgtgaatgtaaagagcataggaaatggaacaaatgtaaccct

SEQ ID NO: 8411 - DNA, 122 bp, Homo sapiens
  misc_feature (61)..(62): /note="This region represents a CpG dinucleotide"
  misc_feature (61)..(61): /note="Nucleotide may be methylated to form 5-methylcytosine"
gatcacctgaggtcgggcattcgagaccagcctgaccaacatggtaaaaccccatctctacgaaaagtacccaaaaaattagccaggtgaggtggcagatgcctttaatcccagctactggg

SEQ ID NO: 8412 - DNA, 122 bp, Homo sapiens
  misc_feature (61)..(62): /note="This region represents a CpG dinucleotide"
  misc_feature (61)..(61): /note="Nucleotide may be methylated to form 5-methylcytosine"
cactatcaattctggtttgcaccctggtcacttaatcactgtgcttccacaaccatgaaacgtcagtatggcaaatcctgccccaagctggtcatatcatacatccaaaatatcaaggcttc

SEQ ID NO: 8413 - DNA, 122 bp, Homo sapiens
  misc_feature (61)..(62): /note="This region represents a CpG dinucleotide"
  misc_feature (61)..(61): /note="Nucleotide may be methylated to form 5-methylcytosine"
tcacctagctgctcttacactgcatacctatgtgtgagtgctcatttcatccagggtctgcgggacagacccagcagaggatatttcctgtcatagctgaagtgtgaataggccttatgttc

SEQ ID NO: 8414 - DNA, 122 bp, Homo sapiens
  misc_feature (61)..(62): /note="This region represents a CpG dinucleotide"
  misc_feature (61)..(61): /note="Nucleotide may be methylated to form 5-methylcytosine"
caagctctgcagtgacttcatcaatattttagctcctgcagagccctgttccttagcaaccgcatcctccgtgccctccagaaaggctcccgagtcgggtgttcctcacatccccgtcctgt

SEQ ID NO: 8415 - DNA, 122 bp, Homo sapiens
  misc_feature (61)..(62): /note="This region represents a CpG dinucleotide"
  misc_feature (61)..(61): /note="Nucleotide may be methylated to form 5-methylcytosine"
gccctgagcacatcacttaaattatctttgccctatttcccttcagtaaaatcaaagtctcgtctttctaaggtattgtgaggattaaatgagtaaatgtatgcaaagatgcttaatttagt

SEQ ID NO: 8416 - DNA, 122 bp, Homo sapiens
  misc_feature (61)..(62): /note="This region represents a CpG dinucleotide"
  misc_feature (61)..(61): /note="Nucleotide may be methylated to form 5-methylcytosine"
taccctaggtgagaccagtagaagaacccagctcagattacaaaactatgagcaaacaaacggttgttattcaagtaaagctcactaaagctcttcatgacaaacgggtatagtcatggggg

SEQ ID NO: 8417 - DNA, 122 bp, Homo sapiens
  misc_feature (61)..(62): /note="This region represents a CpG dinucleotide"
  misc_feature (61)..(61): /note="Nucleotide may be methylated to form 5-methylcytosine"
gagcagcttgtggcctcccttaggcaagtttaaaagccagatgtcctttttcccagaatgcggagtggtgtgtactattcatcagcttgggctgccacagcaccatgccagactggatggct

SEQ ID NO: 8418 - DNA, 122 bp, Homo sapiens
  misc_feature (61)..(62): /note="This region represents a CpG dinucleotide"
  misc_feature (61)..(61): /note="Nucleotide may be methylated to form 5-methylcytosine"
ccctttcaagcctccctgcttcttttcgcggctccccgcaatgtccaaccactccgggggcgcgaacccagcacccaagagtcctggggacctcacgcatgcgcggcaggggcggcgtgtgg

SEQ ID NO: 8419 - DNA, 122 bp, Homo sapiens
  misc_feature (61)..(62): /note="This region represents a CpG dinucleotide"
  misc_feature (61)..(61): /note="Nucleotide may be methylated to form 5-methylcytosine"
gatgggttgcatggagaccaacgcttacaaggcgagggaacagcagggctgaggaagggacggggaagccgtaaaaatgcagcttcccacttgctgcaataggatccctatcactactcaga

SEQ ID NO: 8420 - DNA, 122 bp, Homo sapiens
  misc_feature (61)..(62): /note="This region represents a CpG dinucleotide"
  misc_feature (61)..(61): /note="Nucleotide may be methylated to form 5-methylcytosine"
tttaaaatttcgcttgctgccttggttgctgtgatgtcacttgcccatccctagactgttcgccatggatttccctatcaaccctcagccctggcctttgatcctgtacagaagatcctggc

SEQ ID NO: 8421 - DNA, 122 bp, Homo sapiens
  misc_feature (61)..(62): /note="This region represents a CpG dinucleotide"
  misc_feature (61)..(61): /note="Nucleotide may be methylated to form 5-methylcytosine"
gttctgctctatgctgtgctgtctgcttcaaagggactgagcaactctttttataggggccgtgggttattcgtagcagtcctatctttggaacttctctttccactggaatatatacagtt

SEQ ID NO: 8422 - DNA, 122 bp, Homo sapiens
  misc_feature (61)..(62): /note="This region represents a CpG dinucleotide"
  misc_feature (61)..(61): /note="Nucleotide may be methylated to form 5-methylcytosine"
tctcacacgctctgttaactgcaaaactcttatgatctaacagcgagccccctcgcctctcgaacatgttttcaatttttgcagagccgccagagacgtcaggagaccctcccctgctgaag

SEQ ID NO: 8423 - DNA, 122 bp, Homo sapiens
  misc_feature (61)..(62): /note="This region represents a CpG dinucleotide"
  misc_feature (61)..(61): /note="Nucleotide may be methylated to form 5-methylcytosine"
ggtctagtcttccccgaagggagcttgccaggctctgcgacaggcttggaagttggagcccgggccctgggttctctcagcttccagctcaggaggcggagtgggaggagcgggcctggcgg

SEQ ID NO: 8424 - DNA, 122 bp, Homo sapiens
  misc_feature (61)..(62): /note="This region represents a CpG dinucleotide"
  misc_feature (61)..(61): /note="Nucleotide may be methylated to form 5-methylcytosine"
ttcaggggctctccacacctcttccctgggcccgcctggaaccaccctttttcttgatcacgttttctgacctaggccggtcacaaagtttgactctgagggttgtgagcaatagcaggagt

SEQ ID NO: 8425 - DNA, 122 bp, Homo sapiens
  misc_feature (61)..(62): /note="This region represents a CpG dinucleotide"
  misc_feature (61)..(61): /note="Nucleotide may be methylated to form 5-methylcytosine"
aatgcccacatccagttctctgtccctgaggcacggaggtggttgtgctgggctcagagccgccgtctgactggttggaagccctgctctgattttgtgaatcaccctagttaagtggaagc

SEQ ID NO: 8426 - DNA, 122 bp, Homo sapiens
  misc_feature (61)..(62): /note="This region represents a CpG dinucleotide"
  misc_feature (61)..(61): /note="Nucleotide may be methylated to form 5-methylcytosine"
tgcttgctcctctctttccctccctctctcttttttttctacccttcttcttgtccttgtcgctctggttgggggctggttggtttagatacagcgagtgctccctggcagcctgaactgcc

SEQ ID NO: 8427 - DNA, 122 bp, Homo sapiens
  misc_feature (61)..(62): /note="This region represents a CpG dinucleotide"
  misc_feature (61)..(61): /note="Nucleotide may be methylated to form 5-methylcytosine"
aggattttacttaatgcctatttgtagaaacctactcattgaaatgaacatacctctccacgtcaatcagtggtgctcaagattgcaggaaaaaagttctccaccagtcaacatttgaaaat

SEQ ID NO: 8428 - DNA, 122 bp, Homo sapiens
  misc_feature (61)..(62): /note="This region represents a CpG dinucleotide"
  misc_feature (61)..(61): /note="Nucleotide may be methylated to form 5-methylcytosine"
atcttatatgacataagaattaatctgacctgctttctactgttatgccattaaaaacaccgctgaaagttatagcctacagtaatacgtcactctaaataaacaaggtaggaaatagctta

SEQ ID NO: 8429 - DNA, 122 bp, Homo sapiens
  misc_feature (61)..(62): /note="This region represents a CpG dinucleotide"
  misc_feature (61)..(61): /note="Nucleotide may be methylated to form 5-methylcytosine"
agggatttgccatgatgattgaacgaccgtaatgggattgagcggcagggttctagtggacgcaatgaagcggattgcaaagaggaagctggcagccacactgcttctccaaaattagtttt

SEQ ID NO: 8430 - DNA, 122 bp, Homo sapiens
  misc_feature (61)..(62): /note="This region represents a CpG dinucleotide"
  misc_feature (61)..(61): /note="Nucleotide may be methylated to form 5-methylcytosine"
actgtctgtctctccctcctctggccatgtaaaactgcctgcttcccctttgcaatctgccgtgattgtaagtttcctaaggcatacccagccatgcttcctgtagagcctgtggaactgtg

SEQ ID NO: 8431 - DNA, 122 bp, Homo sapiens
  misc_feature (61)..(62): /note="This region represents a CpG dinucleotide"
  misc_feature (61)..(61): /note="Nucleotide may be methylated to form 5-methylcytosine"
aatttaaaagcatgaaatcatccttagaaatcatggactcccataatgaaagcaaaccaccgcttgagttcttctgatttttatccaacctgttcatcttacccttctttttttcagggcaa

SEQ ID NO: 8432 - DNA, 122 bp, Homo sapiens
  misc_feature (61)..(62): /note="This region represents a CpG dinucleotide"
  misc_feature (61)..(61): /note="Nucleotide may be methylated to form 5-methylcytosine"
tggctgtctctctttctctgggcaccagtgcctgcacaagagccatgttgagccaggctgcgccccaagagcgcctgtacaacggtagcagggcaattataccttttacagacaacagtggc

SEQ ID NO: 8433 - DNA, 122 bp, Homo sapiens
  misc_feature (61)..(62): /note="This region represents a CpG dinucleotide"
  misc_feature (61)..(61): /note="Nucleotide may be methylated to form 5-methylcytosine"
ggagggagtagagggtttgcggaagaagggggtggacttttcaatctgatagacctgaggcgaaatcagaaaccagtctctcttagccgtggaatgctggataagttacgtcacttttctgg

SEQ ID NO: 8434 - DNA, 122 bp, Homo sapiens
  misc_feature (61)..(62): /note="This region represents a CpG dinucleotide"
  misc_feature (61)..(61): /note="Nucleotide may be methylated to form 5-methylcytosine"
caaaaagggagctgcttgtttatcctgctgtcagccatttcccatcaacgtctggcccagcgagctgtgttggggccagcactgctttagtaccaatagtctggccctcttccaggtactca

SEQ ID NO: 8435 - DNA, 122 bp, Homo sapiens
  misc_feature (61)..(62): /note="This region represents a CpG dinucleotide"
  misc_feature (61)..(61): /note="Nucleotide may be methylated to form 5-methylcytosine"
gagaaacaggaattatgccaaaaagcctctcagcaacccaaaggtatcgcaatattcacacgcagtatttatgtgagaaatactacaccaactcctttactttctctatacacaatgttaat

SEQ ID NO: 8436 - DNA, 122 bp, Homo sapiens
  misc_feature (61)..(62): /note="This region represents a CpG dinucleotide"
  misc_feature (61)..(61): /note="Nucleotide may be methylated to form 5-methylcytosine"
acacagcatccctttaaatgaccctggagaccgtgatttgccattgccagacaggatggacgggaacagataggcaactgtgtgcgatcacaggacataatggaatgaaatgtcagatcagg

SEQ ID NO: 8437 - DNA, 122 bp, Homo sapiens
  misc_feature (61)..(62): /note="This region represents a CpG dinucleotide"
  misc_feature (61)..(61): /note="Nucleotide may be methylated to form 5-methylcytosine"
cagagggcttgtgactcaaatgaagcattaagaaaatgagaaatcaccatgagtcatcaacgattagggttactgaaaaataactgaaactaagaatgttaaatccacagatgctaaaggtc

SEQ ID NO: 8438 - DNA, 122 bp, Homo sapiens
  misc_feature (61)..(62): /note="This region represents a CpG dinucleotide"
  misc_feature (61)..(61): /note="Nucleotide may be methylated to form 5-methylcytosine"
gcttagaaagcctcagtgacaaggccacacagacaggaaggggtggaattgagattcatacgaagtccatccgacctccaggctgtgttgttgctatggggcttcatggctcatgttggaaa

SEQ ID NO: 8439 - DNA, 122 bp, Homo sapiens
  misc_feature (61)..(62): /note="This region represents a CpG dinucleotide"
  misc_feature (61)..(61): /note="Nucleotide may be methylated to form 5-methylcytosine"
agaactggaatttagatttcagttagtaagctgaagtcatatcatagctgtgggattgaacgatgtggggttgagtcaaacacaaggaagtactggcagctccagtagccgaaaagtggaga

SEQ ID NO: 8440 - DNA, 122 bp, Homo sapiens
  misc_feature (61)..(62): /note="This region represents a CpG dinucleotide"
  misc_feature (61)..(61): /note="Nucleotide may be methylated to form 5-methylcytosine"
agagcctctgatctactagaatcgtactccagtttgttcatatacccagaaactatgcaccgctgagtggtccctgaagacgttagtacatgcacgtgatggaaccagctgatgggaatgta

SEQ ID NO: 8441 - DNA, 122 bp, Homo sapiens
  misc_feature (61)..(62): /note="This region represents a CpG dinucleotide"
  misc_feature (61)..(61): /note="Nucleotide may be methylated to form 5-methylcytosine"
tagggaatgcttcatgaatttgcaagtcatccttgcacggggccatgctaatttctgtatcgttcaaaaaaaaatgattgcttaatgtacaaatgttcagatgttctctgcagggattagtg

SEQ ID NO: 8442 - DNA, 122 bp, Homo sapiens
  misc_feature (61)..(62): /note="This region represents a CpG dinucleotide"
  misc_feature (61)..(61): /note="Nucleotide may be methylated to form 5-methylcytosine"
tctggcaggaaatgagaaggtaaaaggtcagatcagagttatggtcttgtaactgcattgcgaagtgatgggtgtgaagagagggaattaagccttgaatcacagaaaggaaggctcccatc

SEQ ID NO: 8443 - DNA, 122 bp, Homo sapiens
  misc_feature (61)..(62): /note="This region represents a CpG dinucleotide"
  misc_feature (61)..(61): /note="Nucleotide may be methylated to form 5-methylcytosine"
gttgatttgtggtttcatcctcagaacttcttggctggtactgagttatcaggattgattcgcattagtgtcactaaagttggtatacaatcttccactgctaaatttgactgcctttaaaa

SEQ ID NO: 8444 - DNA, 122 bp, Homo sapiens
  misc_feature (61)..(62): /note="This region represents a CpG dinucleotide"
  misc_feature (61)..(61): /note="Nucleotide may be methylated to form 5-methylcytosine"
cccagcttcttaatattggtacattggggattaagttgcaacatgaattttggaggagcacggacattaaagccatagcactggcattcaataagtgtatattgtagctattataataatat

SEQ ID NO: 8445 - DNA, 122 bp, Homo sapiens
  misc_feature (61)..(62): /note="This region represents a CpG dinucleotide"
  misc_feature (61)..(61): /note="Nucleotide may be methylated to form 5-methylcytosine"
acacggacagctcctctaaatctggacaaaccaagacccaacagaagcctggaattcaatcgggtcatatgtctcagctgcttggaagacagctcctgttcagggagagacaaacataaaga

SEQ ID NO: 8446 - DNA, 122 bp, Homo sapiens
  misc_feature (61)..(62): /note="This region represents a CpG dinucleotide"
  misc_feature (61)..(61): /note="Nucleotide may be methylated to form 5-methylcytosine"
gggctttaagacttgcccatggccccacacagggtggggattcccacctgctttgccaaccgctaagcccatgctccaagcactgcaccccgtccacaaggtcagacgggccactcctcggg

SEQ ID NO: 8447 - DNA, 122 bp, Homo sapiens
  misc_feature (61)..(62): /note="This region represents a CpG dinucleotide"
  misc_feature (61)..(61): /note="Nucleotide may be methylated to form 5-methylcytosine"
caggaaacaaaatgcactcattcaatttcttcaagttgagtggagacctcctggatgccacgtgtcagctttacctgctagaaacacacgctcacctcgctgtccaagaccctggaaagggg

SEQ ID NO: 8448 - DNA, 122 bp, Homo sapiens
  misc_feature (61)..(62): /note="This region represents a CpG dinucleotide"
  misc_feature (61)..(61): /note="Nucleotide may be methylated to form 5-methylcytosine"
taagatgccagcaagtttggtttctggtgagggccctcttcctggctggtagacagctgccgtctccctctatcctcacgtggcagagagagtgctccggtatttccttctcttaagcggat

SEQ ID NO: 8449 - DNA, 122 bp, Homo sapiens
  misc_feature (61)..(62): /note="This region represents a CpG dinucleotide"
  misc_feature (61)..(61): /note="Nucleotide may be methylated to form 5-methylcytosine"
ctaaataaggaacataggaaacaattgtcctgaaatatgaacaccatgttttttttcctccgcttgatcaaagaaagactccagcaaaaggggaaaaaataattaaaaagtaaaagtcttac

SEQ ID NO: 8450 - DNA, 122 bp, Homo sapiens
  misc_feature (61)..(62): /note="This region represents a CpG dinucleotide"
  misc_feature (61)..(61): /note="Nucleotide may be methylated to form 5-methylcytosine"
caacaccactgaggccgccagtcacaatatttacccatgccagagtgttctgtttgttttcggtggaggatgcagagagtagataaacgaaaagcaaaacttctctgtgtcaaaacacaagc

SEQ ID NO: 8451 - DNA, 122 bp, Homo sapiens
  misc_feature (61)..(62): /note="This region represents a CpG dinucleotide"
  misc_feature (61)..(61): /note="Nucleotide may be methylated to form 5-methylcytosine"
gaatgcagtcatctgtttattcagtaaatttccgtatcttactaatcacaacagcatccacgtacacttaaaatagtgcctatatgtatgtgtgatacttgtttacataacaagcttgctga

SEQ ID NO: 8452 - DNA, 122 bp, Homo sapiens
  misc_feature (61)..(62): /note="This region represents a CpG dinucleotide"
  misc_feature (61)..(61): /note="Nucleotide may be methylated to form 5-methylcytosine"
ttgtttgtgaatacttactgtttgccatagtctgcttctggtgatgaagaataagaatgacgagtccttaggtagggcaagttgatagttatcttctggaaaaggaggcttcctggggagtc

SEQ ID NO: 8453 - DNA, 122 bp, Homo sapiens
  misc_feature (61)..(62): /note="This region represents a CpG dinucleotide"
  misc_feature (61)..(61): /note="Nucleotide may be methylated to form 5-methylcytosine"
cgcacccccggctctgaggtcagggctggcaggagtaatccaccctttccaggtgtgtggcgcaaacacggacgcaaagatctcccctagggtctgtaacaatttccaggctgaaaggtgat

SEQ ID NO: 8454 - DNA, 122 bp, Homo sapiens
  misc_feature (61)..(62): /note="This region represents a CpG dinucleotide"
  misc_feature (61)..(61): /note="Nucleotide may be methylated to form 5-methylcytosine"
cattgaatttgagtgtctttacagcctttgttttctggtacccttgggaggcatccatcccgtttaataaaaggtaccttccacaggaaactcccttcctttgtcatctttggtatccccat

SEQ ID NO: 8455 - DNA, 122 bp, Homo sapiens
  misc_feature (61)..(62): /note="This region represents a CpG dinucleotide"
  misc_feature (61)..(61): /note="Nucleotide may be methylated to form 5-methylcytosine"
ctcagtttttgggaggagggaacagtggtacagtgtacacaaaggcaaacaatatccagacgtcctgcttttagtaatgctaaaattgatcccatgagttccgacggtgaaagtctgatccc

SEQ ID NO: 8456 - DNA, 122 bp, Homo sapiens
  misc_feature (61)..(62): /note="This region represents a CpG dinucleotide"
  misc_feature (61)..(61): /note="Nucleotide may be methylated to form 5-methylcytosine"
taaagattttttttcagatccctcagtcccagcattcctagtctggttaaactcgtccagcggtgcccagcactcataggacctgctttgcatcatagcctgcagacaggcttcccacacag

SEQ ID NO: 8457 - DNA, 122 bp, Homo sapiens
  misc_feature (61)..(62): /note="This region represents a CpG dinucleotide"
  misc_feature (61)..(61): /note="Nucleotide may be methylated to form 5-methylcytosine"
ccttatggccagtttattacaaacagtttatgttcaaaccttgtttttctccaccccttgcgttgtcatatttcattttgtactgtacggcccacatttcttatcctgttctttactatgag

SEQ ID NO: 8458 - DNA, 122 bp, Homo sapiens
  misc_feature (61)..(62): /note="This region represents a CpG dinucleotide"
  misc_feature (61)..(61): /note="Nucleotide may be methylated to form 5-methylcytosine"
tttttctgctttcagaaacacatcactcttctctaagccctggttttccgtgtttgtgggcgtgtaggtgtgtgtgcttgtacatggtggcagctgttacgattctttccacacggagaaag

SEQ ID NO: 8459 - DNA, 122 bp, Homo sapiens
  misc_feature (61)..(62): /note="This region represents a CpG dinucleotide"
  misc_feature (61)..(61): /note="Nucleotide may be methylated to form 5-methylcytosine"
ctctgacttcctgaactgtccagaagtagtccccctccttgccaggtcttgagatgtccacgtggaacttttcggcccggcccatttgtatatgaatgtttcacgcaacactctactacatc

SEQ ID NO: 8460 - DNA, 122 bp, Homo sapiens
  misc_feature (61)..(62): /note="This region represents a CpG dinucleotide"
  misc_feature (61)..(61): /note="Nucleotide may be methylated to form 5-methylcytosine"
aggaagcagagataataaaggaagtggaagaaaatcaagaaaatcattgatttctagtctcggatgaattagaagatactgtgtactattgaagagcaggttcagtcagatctcctcctctc

SEQ ID NO: 8461 - DNA, 122 bp, Homo sapiens
  misc_feature (61)..(62): /note="This region represents a CpG dinucleotide"
  misc_feature (61)..(61): /note="Nucleotide may be methylated to form 5-methylcytosine"
tgaggagattcaaacacagatctgcccattgcctgagtctgtgattttttttcattacatcgtgctgctcccttatttccagaggtgttctgagctgattggggcatgggccaggtcaaggt

SEQ ID NO: 8462 - DNA, 122 bp, Homo sapiens
  misc_feature (61)..(62): /note="This region represents a CpG dinucleotide"
  misc_feature (61)..(61): /note="Nucleotide may be methylated to form 5-methylcytosine"
ttaattcattctatccaggacattcatggacgcttaataggatgcagacagcacgtcaggcgttgtgggaagcacggccgctactgacagaagggccccacaagtcactcggcctgtacttc

SEQ ID NO: 8463 - DNA, 122 bp, Homo sapiens
  misc_feature (61)..(62): /note="This region represents a CpG dinucleotide"
  misc_feature (61)..(61): /note="Nucleotide may be methylated to form 5-methylcytosine"
gtgtgagcccattgtggaaagtctgttgctgggaaacacaaggaagcaacttcccctgaacggatcctttcagtttgtatagacaagagtaacactggatttaatgggcagtaggtagaggg

SEQ ID NO: 8464 - DNA, 122 bp, Homo sapiens
  misc_feature (61)..(62): /note="This region represents a CpG dinucleotide"
  misc_feature (61)..(61): /note="Nucleotide may be methylated to form 5-methylcytosine"
tcttagtgttaaacaaacaatcaataacctcataaacttaaaaattgctgcaggaaataccggacagtttatggaaggatcatatgacagaaggaagggctgaagagtgtgagaagctagac

SEQ ID NO: 8465 - DNA, 122 bp, Homo sapiens
  misc_feature (61)..(62): /note="This region represents a CpG dinucleotide"
  misc_feature (61)..(61): /note="Nucleotide may be methylated to form 5-methylcytosine"
tcttatgtaatttccttctttcccttaacataatgttttcaaggttcattcgtgtcaaagcgtgtggtagtacttcctctttttttttctttttttttttttttttgagacagagtctcact

SEQ ID NO: 8466 - DNA, 122 bp, Homo sapiens
  misc_feature (61)..(62): /note="This region represents a CpG dinucleotide"
  misc_feature (61)..(61): /note="Nucleotide may be methylated to form 5-methylcytosine"
aaactttctcttcatgtcttcccagtatcagtcaatcataacttgagctttaccaatatgcggtatttgccttcttacaactatataaatactcttcacagagaagtcatttggtatgcaat

SEQ ID NO: 8467 - DNA, 122 bp, Homo sapiens
  misc_feature (61)..(62): /note="This region represents a CpG dinucleotide"
  misc_feature (61)..(61): /note="Nucleotide may be methylated to form 5-methylcytosine"
gattctctctgattggaggttttttgaaaaaacaggttagggattggcctgggtggtttgcgtgtcctagcacaaaggcaggggctgatgaccttggggtgtcaattagactatggcaaata

SEQ ID NO: 8468 - DNA, 122 bp, Homo sapiens
  misc_feature (61)..(62): /note="This region represents a CpG dinucleotide"
  misc_feature (61)..(61): /note="Nucleotide may be methylated to form 5-methylcytosine"
gtgatcctttccggaagcggaagctcggggggcgggccaagaaggtccgggagcccacggcggttgttttttctgtgaggcttcacttacctcggtctgggcttctctgaggctgcgagaga

SEQ ID NO: 8469 - DNA, 122 bp, Homo sapiens
  misc_feature (61)..(62): /note="This region represents a CpG dinucleotide"
  misc_feature (61)..(61): /note="Nucleotide may be methylated to form 5-methylcytosine"
ctttgaatgagagtccttatggctattgtcttgtctctgttccaccactgaatactggtacgtagaaggaaggtaacttgacttttcagatcagcagttgacaaactattggccactggcca

SEQ ID NO: 8470 - DNA, 122 bp, Homo sapiens
  misc_feature (61)..(62): /note="This region represents a CpG dinucleotide"
  misc_feature (61)..(61): /note="Nucleotide may be methylated to form 5-methylcytosine"
tagctgccagagccaaacagactgttccatgtgagaaaaccaacctccagattcctggggcgtttctggtgtagtgaccttccagagggaaatctacccctactcctatccagtactcttcc

SEQ ID NO: 8471 - DNA, 122 bp, Homo sapiens
  misc_feature (61)..(62): /note="This region represents a CpG dinucleotide"
  misc_feature (61)..(61): /note="Nucleotide may be methylated to form 5-methylcytosine"
accaagccctgtagctggtgatcattaagcagtaaaggcatccctaatggtggctaatggcgggcttaagtactagttacctgaaagaacccctggggttggctcacttactgtattgagtg

SEQ ID NO: 8472 - DNA, 122 bp, Homo sapiens
  misc_feature (61)..(62): /note="This region represents a CpG dinucleotide"
  misc_feature (61)..(61): /note="Nucleotide may be methylated to form 5-methylcytosine"
caactactatccataccacttcccttattctcacctcacactaaagctggtccaaggcagcgtaaggtctatggtattaacactagaaacagtaaaaggaaaaagaaaggggagttaaaatg

SEQ ID NO: 8473 - DNA, 122 bp, Homo sapiens
  misc_feature (61)..(62): /note="This region represents a CpG dinucleotide"
  misc_feature (61)..(61): /note="Nucleotide may be methylated to form 5-methylcytosine"
gcccaagtctccccacgtcccaagcagtcatcccaagcttgttccaaaagcctcctcttccgcaccagctgcttgggcaccacggttactccggcccgcatctcagccccctctgcatgtcc

SEQ ID NO: 8474 - DNA, 122 bp, Homo sapiens
  misc_feature (61)..(62): /note="This region represents a CpG dinucleotide"
  misc_feature (61)..(61): /note="Nucleotide may be methylated to form 5-methylcytosine"
cgtgttacaaaatcttgtttccttcattccgtttctattcttcaagttccttaaaagctgcgccattttttgagtgaaaaatgtgcgtaacttctgatatcagcgtagagaggtgagggagg

SEQ ID NO: 8475 - DNA, 122 bp, Homo sapiens
  misc_feature (61)..(62): /note="This region represents a CpG dinucleotide"
  misc_feature (61)..(61): /note="Nucleotide may be methylated to form 5-methylcytosine"
gttctaacaagctctgtggggatgttgatactgctggtcctcagatgacagtttgaagggcgaggccctatactataaggaagcagggtgcactgtgactgcttactcactttttgcatttt

SEQ ID NO: 8476 - DNA, 122 bp, Homo sapiens
  misc_feature (61)..(62): /note="This region represents a CpG dinucleotide"
  misc_feature (61)..(61): /note="Nucleotide may be methylated to form 5-methylcytosine"
aaggttctaaatatctacatattggcagacaagaaatctgacttagcaaactctcctctccgtcaaacaagcaactcaaagacactcatactaacacctctaggcctcagaatggaagggga

SEQ ID NO: 8477 - DNA, 122 bp, Homo sapiens
  misc_feature (61)..(62): /note="This region represents a CpG dinucleotide"
  misc_feature (61)..(61): /note="Nucleotide may be methylated to form 5-methylcytosine"
tgggactgtggtgacttctgctgctggccccgcccctgcccccagagcgtccttggctgccgtctggccgggctctcatggtacttcctctgtgaactgtgtgtgaatctgcttttcctctg

SEQ ID NO: 8478 - DNA, 122 bp, Homo sapiens
  misc_feature (61)..(62): /note="This region represents a CpG dinucleotide"
  misc_feature (61)..(61): /note="Nucleotide may be methylated to form 5-methylcytosine"
ggaaagacccttgctggcttccttccacatctctaaagtgagaaaattgacctggatagtcgctaagctttcccccatttctcagattgtgtaaatccgtgcatcagtagacttaggaatct

SEQ ID NO: 8479 - DNA, 122 bp, Homo sapiens
  misc_feature (61)..(62): /note="This region represents a CpG dinucleotide"
  misc_feature (61)..(61): /note="Nucleotide may be methylated to form 5-methylcytosine"
gtttttgttcccgtagcgtgctgggatttgcaaaggcttcccaggcttgtgggtaggaaccgttatttgcagttgatttttgttttaggaacagcagttggatgaaaaagatgcccggcgct

SEQ ID NO: 8480 - DNA, 122 bp, Homo sapiens
  misc_feature (61)..(62): /note="This region represents a CpG dinucleotide"
  misc_feature (61)..(61): /note="Nucleotide may be methylated to form 5-methylcytosine"
ttgtccttcactgtctccctgagagcatgagaggggaggagtggacagctgcaggtgcaacgggaatagctgcaaatcctaagcagctccatagcaacatgtgcagctcgtgatgatgatat

SEQ ID NO: 8481 - DNA, 122 bp, Homo sapiens
  misc_feature (61)..(62): /note="This region represents a CpG dinucleotide"
  misc_feature (61)..(61): /note="Nucleotide may be methylated to form 5-methylcytosine"
tggaacctggactaaaatcaatcccagctcaaggtaattacaggacatgtgctaccaccccggcagggcaagtcagaggctgagctgctctcctagggcagccgtggcgattagttaggaat

SEQ ID NO: 8482 - DNA, 122 bp, Homo sapiens
  misc_feature (61)..(62): /note="This region represents a CpG dinucleotide"
  misc_feature (61)..(61): /note="Nucleotide may be methylated to form 5-methylcytosine"
atcagaatgaagaaagacagtgtccagctgtagcagtagtttggtagcaggagaattagacgtaaaggtactaatgcctgaggggtgggtcatgaattaataattgctatgtggcggatgag

SEQ ID NO: 8483 - DNA, 122 bp, Homo sapiens
  misc_feature (61)..(62): /note="This region represents a CpG dinucleotide"
  misc_feature (61)..(61): /note="Nucleotide may be methylated to form 5-methylcytosine"
aaataggctttcaaagcaagaaagatgagaagtacttggtatgtctttgggtctttatcacggagctctaagttcttgctgagtgtaatctaattaatcttgctcatacttatggaggtgtc

SEQ ID NO: 8484 - DNA, 122 bp, Homo sapiens
  misc_feature (61)..(62): /note="This region represents a CpG dinucleotide"
  misc_feature (61)..(61): /note="Nucleotide may be methylated to form 5-methylcytosine"
aagagaaggcatgcgttaaattgtggtcatgcggagctaagtgtctttgagacattaaatcggacacgtcctgtaggttatacaggcgccaaggaagaaaatctgcataagaacacagtttt

SEQ ID NO: 8485 - DNA, 122 bp, Homo sapiens
  misc_feature (61)..(62): /note="This region represents a CpG dinucleotide"
  misc_feature (61)..(61): /note="Nucleotide may be methylated to form 5-methylcytosine"
aaggtcaccatctttcctgttgtgcagagagctgatggacaaagttgaatttctggctgccgccatatacctgatgtcaactgtaccatatctagattatcactcaggcccacacctttatg

SEQ ID NO: 8486 - DNA, 122 bp, Homo sapiens
  misc_feature (61)..(62): /note="This region represents a CpG dinucleotide"
  misc_feature (61)..(61): /note="Nucleotide may be methylated to form 5-methylcytosine"
actcaagctggccatttaatccttgagagtcctggagctgtctagatacctctctgagtacgtgcacacaatatcaggtgtggcctgaataatgcagaatatcatgtctggggtagcactct

SEQ ID NO: 8487 - DNA, 122 bp, Homo sapiens
  misc_feature (61)..(62): /note="This region represents a CpG dinucleotide"
  misc_feature (61)..(61): /note="Nucleotide may be methylated to form 5-methylcytosine"
atgactgggacatgtacttggttccctcctacgtaggcacccaaatatggggtacgacttcgaatcacgtgcttttgttgtccagtcgtaaatcctgcctgatgacctctagaggtaaactc

SEQ ID NO: 8488 - DNA, 122 bp, Homo sapiens
  misc_feature (61)..(62): /note="This region represents a CpG dinucleotide"
  misc_feature (61)..(61): /note="Nucleotide may be methylated to form 5-methylcytosine"
ttcctattttgtgattaggatgctccatcagtttctgccaccagcttgctggagacgctgcgtgtccctgactcctctcaaagggtgaaaagctcagtcgcacccgagacctgctcctcagg

SEQ ID NO: 8489 - DNA, 122 bp, Homo sapiens
  misc_feature (61)..(62): /note="This region represents a CpG dinucleotide"
  misc_feature (61)..(61): /note="Nucleotide may be methylated to form 5-methylcytosine"
ctagtgaaattttttaaggttcatcttttcctctcaagttcatttctaaagttctcagatcgccattttcagaaacgaagtgtctttgctgtttctcagaacaccctgtgttgataggcagt

SEQ ID NO: 8490 - DNA, 122 bp, Homo sapiens
  misc_feature (61)..(62): /note="This region represents a CpG dinucleotide"
  misc_feature (61)..(61): /note="Nucleotide may be methylated to form 5-methylcytosine"
ttacttggattctatgttaccttatgacaccatttcagataacacgagaccttaaaataccgttgtaaagttaaggaaagtttgaactaactgtagcccatgaacgagtcctttctctgaca

SEQ ID NO: 8491 - DNA, 122 bp, Homo sapiens
  misc_feature (61)..(62): /note="This region represents a CpG dinucleotide"
  misc_feature (61)..(61): /note="Nucleotide may be methylated to form 5-methylcytosine"
tgtcttaacctcctctgcccccagagtatcccagcacttcctacactgcccggcatctggcggctcaaagcacgcctactaattggtaaaaggaaatacaaagaaggtacatctgttatatc

SEQ ID NO: 8492 - DNA, 122 bp, Homo sapiens
  misc_feature (61)..(62): /note="This region represents a CpG dinucleotide"
  misc_feature (61)..(61): /note="Nucleotide may be methylated to form 5-methylcytosine"
tcccccgcccatctataatccttggatcactgacgcagcatgatgtaatgggctttccatcgctctaatagtctggcctgtcagtgtggatttatctcaacatgtacagggacatggggcct

SEQ ID NO: 8493 - DNA, 122 bp, Homo sapiens
  misc_feature (61)..(62): /note="This region represents a CpG dinucleotide"
  misc_feature (61)..(61): /note="Nucleotide may be methylated to form 5-methylcytosine"
aggaacaaaatttctttatgcaatgtcatttttaaaatgtaacatttacataaacatatacggcttgtttgtttagaagcattcttgtatgagtcaccttatgcaaaccagatttggaaaac

SEQ ID NO: 8494 - DNA, 122 bp, Homo sapiens
  misc_feature (61)..(62): /note="This region represents a CpG dinucleotide"
  misc_feature (61)..(61): /note="Nucleotide may be methylated to form 5-methylcytosine"
caatgagtaattggtatgcaggcagacagaggttaattaagaggcaacgtggtcaggcaacgtgcacagaccaagtgcacaatcttggatatgtagttttacttcccttgcctttggtttta

SEQ ID NO: 8495 - DNA, 122 bp, Homo sapiens
  misc_feature (61)..(62): /note="This region represents a CpG dinucleotide"
  misc_feature (61)..(61): /note="Nucleotide may be methylated to form 5-methylcytosine"
agatggttcttctgctgatcctaactggacacactcatgcatctgtagtcaactgctggtcgctatgctgctctgcttctggggttgactggtggtgggtggggtgccagggatgactgggt

SEQ ID NO: 8496 - DNA, 122 bp, Homo sapiens
  misc_feature (61)..(62): /note="This region represents a CpG dinucleotide"
  misc_feature (61)..(61): /note="Nucleotide may be methylated to form 5-methylcytosine"
tgggaaccaaatgttggctaggaaagctgcagtattctcacactcttcctgtaaacccagcggcttttcaaagtgataataatcaagggctgacagcacaggacacgccttaacccttccat

SEQ ID NO: 8497 - DNA, 122 bp, Homo sapiens
  misc_feature (61)..(62): /note="This region represents a CpG dinucleotide"
  misc_feature (61)..(61): /note="Nucleotide may be methylated to form 5-methylcytosine"
atatatttagtgtttcctaagaaggaaactgttgaatggaatctgctttggaaagatgtacgtatgtcatatgccaggaaaagtggattttgattaagaaatttggcatttgcaataaatcc

SEQ ID NO: 8498 - DNA, 122 bp, Homo sapiens
  misc_feature (61)..(62): /note="This region represents a CpG dinucleotide"
  misc_feature (61)..(61): /note="Nucleotide may be methylated to form 5-methylcytosine"
agtctgccacctccccatgctaggctgagttagcaggagctggcaggaagcacgcagaggcgcccgccctgtcagcttttcactgtggattaggcttccttctgttggctctggaaattgtt

SEQ ID NO: 8499 - DNA, 122 bp, Homo sapiens
  misc_feature (61)..(62): /note="This region represents a CpG dinucleotide"
  misc_feature (61)..(61): /note="Nucleotide may be methylated to form 5-methylcytosine"
cttaagagtgtatgtgtattgcttgaaccccaaaagctaggcagtgaaccaaggccactgcgcccagccaaggaccacgtgtccctgagaacctaaacatcctggggcatagctggggacat

SEQ ID NO: 8500 - DNA, 122 bp, Homo sapiens
  misc_feature (61)..(62): /note="This region represents a CpG dinucleotide"
  misc_feature (61)..(61): /note="Nucleotide may be methylated to form 5-methylcytosine"
gcctgaagctagcatggcactgtgtctcactgaaggcccactgtaaaactacctggctaccgcctatgttctctcaaggacctagggctctacaatcagcaggtggcaaagcgagtcaggct

SEQ ID NO: 8501 - DNA, 122 bp, Homo sapiens
  misc_feature (61)..(62): /note="This region represents a CpG dinucleotide"
  misc_feature (61)..(61): /note="Nucleotide may be methylated to form 5-methylcytosine"
cacagacatacaaatgtgtgcgattgaaagtctgaattacacggacaaagttcccacagccgtgctaaaagaatcagtaaataagcagttagtaactcaatgactttcattgttatttcagt

SEQ ID NO: 8502 - DNA, 122 bp, Homo sapiens
  misc_feature (61)..(62): /note="This region represents a CpG dinucleotide"
  misc_feature (61)..(61): /note="Nucleotide may be methylated to form 5-methylcytosine"
gcagcagcttgaggcagtcgggctggttgtagagtgctgcgtagtgcagagccgtgttcccgtcagcagccttggcatccaggtgaccactggggagaggagggttcagggagaaaggaagg

SEQ ID NO: 8503 - DNA, 122 bp, Homo sapiens
  misc_feature (61)..(62): /note="This region represents a CpG dinucleotide"
  misc_feature (61)..(61): /note="Nucleotide may be methylated to form 5-methylcytosine"
ctccgacaagcagattctaaacatctatgacctgtgcaacaagttcatagcctatagcaccgtctttgaggatgtagtggatgtgcttgctgagtggggctccctgtacgtgctgacgcggg

SEQ ID NO: 8504 - DNA, 122 bp, Homo sapiens
  misc_feature (61)..(62): /note="This region represents a CpG dinucleotide"
  misc_feature (61)..(61): /note="Nucleotide may be methylated to form 5-methylcytosine"
tgttagattcggtgcttttttttacagatgagattgtaaagtgagcctgtaagtgatttacggctcacttgtgatttgcttaaaacatgtgtcaccacgggaagggtgatgtactttctttt

SEQ ID NO: 8505 - DNA, 122 bp, Homo sapiens
  misc_feature (61)..(62): /note="This region represents a CpG dinucleotide"
  misc_feature (61)..(61): /note="Nucleotide may be methylated to form 5-methylcytosine"
tcacttttatctctttaagacacctgtcttgatgtcctctactttatttatttgcaaacacggccctttccatcctattaatttcttaacagcaggaaacatgttttatgcatctttcagaa

SEQ ID NO: 8506 - DNA, 122 bp, Homo sapiens
  misc_feature (61)..(62): /note="This region represents a CpG dinucleotide"
  misc_feature (61)..(61): /note="Nucleotide may be methylated to form 5-methylcytosine"
agggggacgtgggtgggcggggtgggcagtggtggtagctggggcggggtggtgagcccgcgccttggaggggctgggaaggccagcgtgttgggggaggcgcctgggcctctgggactggg

SEQ ID NO: 8507 - DNA, 122 bp, Homo sapiens
  misc_feature (61)..(62): /note="This region represents a CpG dinucleotide"
  misc_feature (61)..(61): /note="Nucleotide may be methylated to form 5-methylcytosine"
tagggttgggggatggaagagagaaagagctgtggatgggggaatgaggcttggtggggacgagggctcaagaagagctggttggccaggcatgatgactcacacctgtaatcccagcactt

SEQ ID NO: 8508 - DNA, 122 bp, Homo sapiens
  misc_feature (61)..(62): /note="This region represents a CpG dinucleotide"
  misc_feature (61)..(61): /note="Nucleotide may be methylated to form 5-methylcytosine"
tgtccaccctcctaccattctctcttttgtcgattgctgtgatgtgtcactatcctggttcgcctctcctctgtcccttcctgctccccctacactgattctcaggcctcagctgtctgttc

SEQ ID NO: 8509 - DNA, 122 bp, Homo sapiens
  misc_feature (61)..(62): /note="This region represents a CpG dinucleotide"
  misc_feature (61)..(61): /note="Nucleotide may be methylated to form 5-methylcytosine"
tgtcctgacttcaatttcagaccctagaagtacttatatgtaaaaaattgtgtcagtccacgtaagaaaactactgtgggagtgtttacaaatgattatcttgtgcataagcttctaagatt

SEQ ID NO: 8510 - DNA, 122 bp, Homo sapiens
  misc_feature (61)..(62): /note="This region represents a CpG dinucleotide"
  misc_feature (61)..(61): /note="Nucleotide may be methylated to form 5-methylcytosine"
ccattttacatgtatacatgtttgtgtgattctttgatccatttcccctttacagattcacgcctggttacattccccatacttttaatcaatttttccctttcctggggaaaaagatgaaa

SEQ ID NO: 8511 - DNA, 122 bp, Homo sapiens
  misc_feature (61)..(62): /note="This region represents a CpG dinucleotide"
  misc_feature (61)..(61): /note="Nucleotide may be methylated to form 5-methylcytosine"
aaagaaaggaaatggaaacatgaattcataaggctgcacctttctctctctgcaaattcccgagggaaggtgatccattagaaacagaggcagacatgccaaaagcaataaaggggcaggct

SEQ ID NO: 8512 - DNA, 122 bp, Homo sapiens
  misc_feature (61)..(62): /note="This region represents a CpG dinucleotide"
  misc_feature (61)..(61): /note="Nucleotide may be methylated to form 5-methylcytosine"
tggataataaactgtggtatattcagatagtgaaaattgacaggctagagctgtatgcaacgacatggatgattatcacaaacataatgcactgcttgaaacaccagttgtattgtgtgatt

SEQ ID NO: 8513 - DNA, 122 bp, Homo sapiens
  misc_feature (61)..(62): /note="This region represents a CpG dinucleotide"
  misc_feature (61)..(61): /note="Nucleotide may be methylated to form 5-methylcytosine"
gtaggggtagattgtgtacagggatttccatcccaagccctcagtccatctgttggggagcgcaggaggcgtgaaggcaaaatcaaacccgtgggctcagcggccaggaatggtcatgagac

SEQ ID NO: 8514 - DNA, 122 bp, Homo sapiens
  misc_feature (61)..(62): /note="This region represents a CpG dinucleotide"
  misc_feature (61)..(61): /note="Nucleotide may be methylated to form 5-methylcytosine"
ggagagcagcaaccaggtgttcctgagcccgtcacagaaggagctgccatcagtgcctctcgtgacctgcagtatttgggcctgtggaggtggtgtttgcagagccaacgttggcctccatc

SEQ ID NO: 8515 - DNA, 122 bp, Homo sapiens
  misc_feature (61)..(62): /note="This region represents a CpG dinucleotide"
  misc_feature (61)..(61): /note="Nucleotide may be methylated to form 5-methylcytosine"
gtacccgcccatcttccggccaggatgtgtggtcctggtgagcgattgtcctgtggcgtccgggaccgagtttgtggcccagggttatgtgtgcacttcacacctctgacttttttcagggt

SEQ ID NO: 8516 - DNA, 122 bp, Homo sapiens
  misc_feature (61)..(62): /note="This region represents a CpG dinucleotide"
  misc_feature (61)..(61): /note="Nucleotide may be methylated to form 5-methylcytosine"
cttctctcaaggatcatagtcaggggcaatctattgttcaataactaaaaaagtgcctcacgcatgttgtaacagttttatatttgtttatggcaggaaggctagtccagtaatagttgctt

SEQ ID NO: 8517 - DNA, 122 bp, Homo sapiens
  misc_feature (61)..(62): /note="This region represents a CpG dinucleotide"
  misc_feature (61)..(61): /note="Nucleotide may be methylated to form 5-methylcytosine"
gaaagcacgtacagcgtggaggggaaagcagtgcagggccaaggccaggaccctggagagcgctagtgttggtaggcataaattgctctacagaagaaacggaataggaaagagaagatggt

SEQ ID NO: 8518 - DNA, 122 bp, Homo sapiens
  misc_feature (61)..(62): /note="This region represents a CpG dinucleotide"
  misc_feature (61)..(61): /note="Nucleotide may be methylated to form 5-methylcytosine"
cagcatcgcctgggtcatagcctgagtttgagaaccatcgccctgcatggcctgaccagccgaggctagtggcagctctgtgcaacgtgtctacttcctcttccctaaacagctccttcccc

SEQ ID NO: 8519 - DNA, 122 bp, Homo sapiens
  misc_feature (61)..(62): /note="This region represents a CpG dinucleotide"
  misc_feature (61)..(61): /note="Nucleotide may be methylated to form 5-methylcytosine"
tcacactccacatctactttgtctcagtgacttaaataattgaacaggcttggagcttaacggatcttctgttcttagccacaccttttcctctcatgagcctctggccataacaacatgct

SEQ ID NO: 8520 - DNA, 122 bp, Homo sapiens
  misc_feature (61)..(62): /note="This region represents a CpG dinucleotide"
  misc_feature (61)..(61): /note="Nucleotide may be methylated to form 5-methylcytosine"
cactccatggctaatgccctgattaactttttagttaagttacttcccaacatttcaacccgtgttgtgagtatttgtattcccaactctgactctcagtcagcatctcaaagtaaagcaac

SEQ ID NO: 8521 - DNA, 122 bp, Homo sapiens
  misc_feature (61)..(62): /note="This region represents a CpG dinucleotide"
  misc_feature (61)..(61): /note="Nucleotide may be methylated to form 5-methylcytosine"
tccctgatggagtctgaagctgggaacgaccctgtccacccccaagttccttaagtcagacgcttatctcactgggtcagacccagcaccactcagcacctggggctcccattgttacagct

SEQ ID NO: 8522 - DNA, 122 bp, Homo sapiens
  misc_feature (61)..(62): /note="This region represents a CpG dinucleotide"
  misc_feature (61)..(61): /note="Nucleotide may be methylated to form 5-methylcytosine"
ttaaccgactgctctctgaagacttcttgatttggtatttggagacagacatcaccctgacgtacattaggaggcctgtgatcttaggcttgttccagctgtgattcacttcacgtctgatt

SEQ ID NO: 8523 - DNA, 122 bp, Homo sapiens
  misc_feature (61)..(62): /note="This region represents a CpG dinucleotide"
  misc_feature (61)..(61): /note="Nucleotide may be methylated to form 5-methylcytosine"
aaaaatatttccctgctatctatttctatatgctgcagttcctgtattactaagcattaacgtgttagacataagccacacacctgtccgagaagggtgacaattttgtgaagaatgccctt

SEQ ID NO: 8524 - DNA, 122 bp, Homo sapiens
  misc_feature (61)..(62): /note="This region represents a CpG dinucleotide"
  misc_feature (61)..(61): /note="Nucleotide may be methylated to form 5-methylcytosine"
atacaagtcattctatccaactgcctgatgcctttggaatctaccccttggcaaagaccacgacaaaatatggtaaacagaatataaggctatgatgggatgtatttatagtcacaggaaaa

SEQ ID NO: 8525 - DNA, 122 bp, Homo sapiens
  misc_feature (61)..(62): /note="This region represents a CpG dinucleotide"
  misc_feature (61)..(61): /note="Nucleotide may be methylated to form 5-methylcytosine"
gcaggggaaatgagaacagacccttgttcatgtttttgccatctttatcagcctggaggccgttactgtgacgaatgaactcccacaattttcagttttttcttcagtatattattaagtaa

SEQ ID NO: 8526 - DNA, 122 bp, Homo sapiens
  misc_feature (61)..(62): /note="This region represents a CpG dinucleotide"
  misc_feature (61)..(61): /note="Nucleotide may be methylated to form 5-methylcytosine"
caaatccatcgtgactcacaaacaacgaacttattaccaggaaacattgctgtgagccaccgtgtttgtcaaagtgctaatgtccttatattttaaccagacagttccgtaaacagagggtc

SEQ ID NO: 8527 - DNA, 122 bp, Homo sapiens
  misc_feature (61)..(62): /note="This region represents a CpG dinucleotide"
  misc_feature (61)..(61): /note="Nucleotide may be methylated to form 5-methylcytosine"
atttatagcctcttgcttatcttacgcagtccagtcctcagggagtatgtgacacatggccgttcctgtgtctgggacacatcattactccaccatggctctgactcagacggatgtctggg

SEQ ID NO: 8528 - DNA, 122 bp, Homo sapiens
  misc_feature (61)..(62): /note="This region represents a CpG dinucleotide"
  misc_feature (61)..(61): /note="Nucleotide may be methylated to form 5-methylcytosine"
tctttgagattacagcaagtcttaagacatttacggtgctagcctctcactagcttgagacgactgctgtcctgcccagatggcactttcagttagtgagcacttactagtggcagctttat

SEQ ID NO: 8529 - DNA, 122 bp, Homo sapiens
  misc_feature (61)..(62): /note="This region represents a CpG dinucleotide"
  misc_feature (61)..(61): /note="Nucleotide may be methylated to form 5-methylcytosine"
agaagcaggaggattcgtcatgcaccctgaggcttgccagtattgatgtcagacttcctccgaccgtgttgccaccctggactgtttgactttggtagctattttaaaacagcaagaagagc

SEQ ID NO: 8530 - DNA, 122 bp, Homo sapiens
  misc_feature (61)..(62): /note="This region represents a CpG dinucleotide"
  misc_feature (61)..(61): /note="Nucleotide may be methylated to form 5-methylcytosine"
gtttataaaacctggcctttgcctgcctggaccgaaccgtgtggttctggggctctgatgcgccccagagaagggaatgggccctatcctgaggttggtaccacccttttggcggctttttg

SEQ ID NO: 8531 - DNA, 122 bp, Homo sapiens
  misc_feature (61)..(62): /note="This region represents a CpG dinucleotide"
  misc_feature (61)..(61): /note="Nucleotide may be methylated to form 5-methylcytosine"
tgagaagtttggagccggctttactcagttcctaagcagctgggttatcagtggatacagcgctgctcaccctgtaaaagattgcgggaaaaccggcaggcccttttaaggacttctgctca

SEQ ID NO: 8532 - DNA, 122 bp, Homo sapiens
  misc_feature (61)..(62): /note="This region represents a CpG dinucleotide"
  misc_feature (61)..(61): /note="Nucleotide may be methylated to form 5-methylcytosine"
agggcactcatgacaacctcctcttgacagaggaggggacagaggcacagagaggcaggacgaccatgtgaggtcacacaatgagtcacgagtagagacagcctgaatccaagtccttcctt

SEQ ID NO: 8533 - DNA, 122 bp, Homo sapiens
  misc_feature (61)..(62): /note="This region represents a CpG dinucleotide"
  misc_feature (61)..(61): /note="Nucleotide may be methylated to form 5-methylcytosine"
gttattaatctggtatgtctagtattttttaaaggcatattgtggaaaacattgtttcatcgtaaagtgtggtgacttagtccctgaggtctggagccagctgcctaaattaataaatcttg

SEQ ID NO: 8534 - DNA, 122 bp, Homo sapiens
  misc_feature (61)..(62): /note="This region represents a CpG dinucleotide"
  misc_feature (61)..(61): /note="Nucleotide may be methylated to form 5-methylcytosine"
tttggcattttgtcactggcttttttctcttaacaaaattctttcacgattcattcatgtcgtatgagtactttattcctatttattggtgaataagattccattttatcatattttattta

SEQ ID NO: 8535 - DNA, 122 bp, Homo sapiens
  misc_feature (61)..(62): /note="This region represents a CpG dinucleotide"
  misc_feature (61)..(61): /note="Nucleotide may be methylated to form 5-methylcytosine"
tacctttcttttttcctgtctaatcattcacttctttacctcccctttgtctttttctcccgcaaagttaccagaaaggagggtttggtttggtcctcaagtagtactttcttgtatgaagt

SEQ ID NO: 8536 - DNA, 122 bp, Homo sapiens
  misc_feature (61)..(62): /note="This region represents a CpG dinucleotide"
  misc_feature (61)..(61): /note="Nucleotide may be methylated to form 5-methylcytosine"
tcagttggcatttgtcacgtatcttcatgccagtgtctttgtatctgaattctaaaactgcgtgaacacaaaggttatgtcttttgtcttattcatctgggttgtcactggaacagagtcag

SEQ ID NO: 8537 - DNA, 122 bp, Homo sapiens
  misc_feature (61)..(62): /note="This region represents a CpG dinucleotide"
  misc_feature (61)..(61): /note="Nucleotide may be methylated to form 5-methylcytosine"
cagatggtggtgtttgagtcatgtggcagaaatgctccaagatttctgcctcctggtgttcgcatctttgggtaattccttcccattgagtgtggccagaagctcctgtgacttgcttctaa

SEQ ID NO: 8538 - DNA, 122 bp, Homo sapiens
  misc_feature (61)..(62): /note="This region represents a CpG dinucleotide"
  misc_feature (61)..(61): /note="Nucleotide may be methylated to form 5-methylcytosine"
ttttcacatctctggaatctgataaagttgtgacccaataactagagagagcatgcattgcggagaataatgagtataaaaggtctgggtaaaagccagaggacaggaagctggatgcttat

SEQ ID NO: 8539 - DNA, 122 bp, Homo sapiens
  misc_feature (61)..(62): /note="This region represents a CpG dinucleotide"
  misc_feature (61)..(61): /note="Nucleotide may be methylated to form 5-methylcytosine"
ttctcacgagaccttgatggcttaaaagtggcagtttcccctgctgtgtctctgtcctgccgcatgtaagacgtgccttgctttccgtttgccttccgccaggattctaagtttcctgagcc

SEQ ID NO: 8540 - DNA, 122 bp, Homo sapiens
  misc_feature (61)..(62): /note="This region represents a CpG dinucleotide"
  misc_feature (61)..(61): /note="Nucleotide may be methylated to form 5-methylcytosine"
agaggttacttcctcttttctatgagtgctgagtctcaagcttgcaaacaccccaagtgacgccatctgtctgtagcaggaccctttgctccgggccctctccaggagggcctatgcccaga

SEQ ID NO: 8541 - DNA, 122 bp, Homo sapiens
  misc_feature (61)..(62): /note="This region represents a CpG dinucleotide"
  misc_feature (61)..(61): /note="Nucleotide may be methylated to form 5-methylcytosine"
ttgatgtcagtctcattgggcctgccgttgctcttcttgggacagaagatctctttgatccggccaattcggtagggctcaggggcatccaggttgctgcctttgatgtagtcggagtattt

SEQ ID NO: 8542 - DNA, 122 bp, Homo sapiens
  misc_feature (61)..(62): /note="This region represents a CpG dinucleotide"
  misc_feature (61)..(61): /note="Nucleotide may be methylated to form 5-methylcytosine"
ttactactatggcactttggggccattattaagtataataaggattaaacacagcaccaccgagatggctattaagtgactcatgaatagggagtgtagacactggacaaggagaagattta

SEQ ID NO: 8543 - DNA, 122 bp, Homo sapiens
  misc_feature (61)..(62): /note="This region represents a CpG dinucleotide"
  misc_feature (61)..(61): /note="Nucleotide may be methylated to form 5-methylcytosine"
ggtggaaggtgactggatcatgggggtgggccttcatgaacggtttggcaccatcctcttcgcgctgttcttatgatagtgagtgggtgagtgcctgagagatctggtggtttaaaagtggg

SEQ ID NO: 8544 - DNA, 122 bp, Homo sapiens
  misc_feature (61)..(62): /note="This region represents a CpG dinucleotide"
  misc_feature (61)..(61): /note="Nucleotide may be methylated to form 5-methylcytosine"
gttcttgggagccctctattggccttctgggtaatagcaggcagcctctgctgggggctgcgctccgtgagtcctggggagttacaatgaacaagagccttagtgctgtctgaaacacaaag

SEQ ID NO: 8545 - DNA, 122 bp, Homo sapiens
  misc_feature (61)..(62): /note="This region represents a CpG dinucleotide"
  misc_feature (61)..(61): /note="Nucleotide may be methylated to form 5-methylcytosine"
tgagtgcagtaatggggcctgggcttggatttgggagtaaccacctggccagccaaacaacgatcttttttttgagacggagtttcactcttgttgcccaggctggagtacaatggcgcaat

SEQ ID NO: 8546 - DNA, 122 bp, Homo sapiens
  misc_feature (61)..(62): /note="This region represents a CpG dinucleotide"
  misc_feature (61)..(61): /note="Nucleotide may be methylated to form 5-methylcytosine"
ttttaatagctgtctggtgaacaaagacatcttccttggcgtcattcctgtggatgaatccgtaaccattccggacgttgaaccatttgacagtgcccaggactcggagtgccagcagcacc

SEQ ID NO: 8547 - DNA, 122 bp, Homo sapiens
  misc_feature (61)..(62): /note="This region represents a CpG dinucleotide"
  misc_feature (61)..(61): /note="Nucleotide may be methylated to form 5-methylcytosine"
ccgcagttactgtctttgttatgtgctctaggtggccttctcagtgctgaactgcagacccgtgtatttttagaaaaggaagaggcttctgtgtgtactgtttatgtacagacacatatcag

SEQ ID NO: 8548 - DNA, 122 bp, Homo sapiens
  misc_feature (61)..(62): /note="This region represents a CpG dinucleotide"
  misc_feature (61)..(61): /note="Nucleotide may be methylated to form 5-methylcytosine"
aattgcccaagtcacaacatctttctagtggagccatgtacctgttttgagtcattgccacggtttttggaacaagctcccgcctacttgctgggactgagcctctctggcatgctctgacc

SEQ ID NO: 8549 - DNA, 122 bp, Homo sapiens
  misc_feature (61)..(62): /note="This region represents a CpG dinucleotide"
  misc_feature (61)..(61): /note="Nucleotide may be methylated to form 5-methylcytosine"
cccaggattcagggccgctctctacctgtaaagcagtgtagctaaggggaagctgagccccgcaaggcgttttcaggcaggacaccccttgtcattcgaacggttctggtgtgagccagggt

SEQ ID NO: 8550 - DNA, 122 bp, Homo sapiens
  misc_feature (61)..(62): /note="This region represents a CpG dinucleotide"
  misc_feature (61)..(61): /note="Nucleotide may be methylated to form 5-methylcytosine"
aatcagcctcctggagtttcctcctcctctctgcgggtggaaaccccaagtcagctcaagcgcctggcattccatggaaaatgtgtgtctttattgtccatggcaaggcaccaacagccgtt

SEQ ID NO: 8551 - DNA, 122 bp, Homo sapiens
  misc_feature (61)..(62): /note="This region represents a CpG dinucleotide"
  misc_feature (61)..(61): /note="Nucleotide may be methylated to form 5-methylcytosine"
ggggcagtttgtctatctggccccctgtggattagcattctttattggtttaggattagacgtcattcaggttgaacggagttccctgaggtgggtgggtgcgtgtttatgtgttgagggga

SEQ ID NO: 8552 - DNA, 122 bp, Homo sapiens
  misc_feature (61)..(62): /note="This region represents a CpG dinucleotide"
  misc_feature (61)..(61): /note="Nucleotide may be methylated to form 5-methylcytosine"
tgtttcacgtggcattggcggggactttcttcctttgtaatgtgctcactggggttgtcacgtcacatagccacgtggagacagccactgaagttcaaagacaagatgggtgtaaatgtgat

SEQ ID NO: 8553 - DNA, 122 bp, Homo sapiens
  misc_feature (61)..(62): /note="This region represents a CpG dinucleotide"
  misc_feature (61)..(61): /note="Nucleotide may be methylated to form 5-methylcytosine"
tgaaacagcatgtgcagatcaagcactgttctttcctttagagtgtgtgtttatttggggcgacttggagggttgctaattgagattatggggaatctaaagccacaccccaaaccgcccct

SEQ ID NO: 8554 - DNA, 122 bp, Homo sapiens
  misc_feature (61)..(62): /note="This region represents a CpG dinucleotide"
  misc_feature (61)..(61): /note="Nucleotide may be methylated to form 5-methylcytosine"
catacccttatgtcctggaaaaagttaaaagaggaactggattacaggctttcatagcttcgggctggctgagagccaccccacattcgcctacactctctggctcatgtttgctgctgatg

SEQ ID NO: 8555 - DNA, 122 bp, Homo sapiens
  misc_feature (61)..(62): /note="This region represents a CpG dinucleotide"
  misc_feature (61)..(61): /note="Nucleotide may be methylated to form 5-methylcytosine"
atatagagagtcatgtgttgcttaatgacaaggatactttctgagaaatgcattgttaggcgatttcatggttgtgtgaaatcacagagcgtgttgctgcaaacctaggtggtgtggcctac

SEQ ID NO: 8556 - DNA, 122 bp, Homo sapiens
  misc_feature (61)..(62): /note="This region represents a CpG dinucleotide"
  misc_feature (61)..(61): /note="Nucleotide may be methylated to form 5-methylcytosine"
ggttaatgcatctctaccaactaacctagaagtcagcaagcccatcatctctaaccaccacgttttggcaaaagggacattactatttgcctaatttagtttagatggtaagcctaaaaaag

SEQ ID NO: 8557 - DNA, 122 bp, Homo sapiens
  misc_feature (61)..(62): /note="This region represents a CpG dinucleotide"
  misc_feature (61)..(61): /note="Nucleotide may be methylated to form 5-methylcytosine"
tcccctttttaataggggtggggctaatgcctgcagcacagctcatgttcccagctcagacgaggtgaagatatgacaggtttgagaagagtaaattcccagcagcccagcgccactcccgg

SEQ ID NO: 8558 - DNA, 122 bp, Homo sapiens
  misc_feature (61)..(62): /note="This region represents a CpG dinucleotide"
  misc_feature (61)..(61): /note="Nucleotide may be methylated to form 5-methylcytosine"
tctggcagatctgctcctccaggatgctgatatacatcttaatttctgacagctgagccacgtagccagcttctgtgtcagccagggttccttctggggagctttgctacaaatgcccatga

SEQ ID NO: 8559 - DNA, 122 bp, Homo sapiens
  misc_feature (61)..(62): /note="This region represents a CpG dinucleotide"
  misc_feature (61)..(61): /note="Nucleotide may be methylated to form 5-methylcytosine"
atttcctttgcttgttctttgcagctccttgaatgctagaacaaaagggtaaacacaaagcgtccagaagagctctgagaagaaaacatagaggcagcaaactgccctaattgatctactca

SEQ ID NO: 8560 - DNA, 122 bp, Homo sapiens
  misc_feature (61)..(62): /note="This region represents a CpG dinucleotide"
  misc_feature (61)..(61): /note="Nucleotide may be methylated to form 5-methylcytosine"
atgcgtaaaaccagatctggtgcataaaaagaagacacgtgtttgtttttaaagcttctacgcctcaagtcatatatgtgaagttgcttgacaaggagcattggctgggcttcccatcttag

SEQ ID NO: 8561 - DNA, 122 bp, Homo sapiens
  misc_feature (61)..(62): /note="This region represents a CpG dinucleotide"
  misc_feature (61)..(61): /note="Nucleotide may be methylated to form 5-methylcytosine"
tctgtatttaagttgacaacataggcatctctttaacatcttaattaaagaatgttggagcgatgctttctgcttttttgatgacaagtcttggctcatagtcaaaaattccagtttagctt

SEQ ID NO: 8562 - DNA, 122 bp, Homo sapiens
  misc_feature (61)..(62): /note="This region represents a CpG dinucleotide"
  misc_feature (61)..(61): /note="Nucleotide may be methylated to form 5-methylcytosine"
tccgcgctggagcggattgctggcatgtgacttctgacagccggaaatttgtaggtgtcccgcgagtttaaaacaagccatatggaagcacaagtgcttaaaaataatctcctgccagccca

SEQ ID NO: 8563 - DNA, 122 bp, Homo sapiens
  misc_feature (61)..(62): /note="This region represents a CpG dinucleotide"
  misc_feature (61)..(61): /note="Nucleotide may be methylated to form 5-methylcytosine"
tctcacccgtctcctctcaggcccctcccatgaacttacgggctgtgtcaatttctgtgccgtaggtctattaaaaccttctgggaggccaggctctcagttcaagccctatactcctctgg

SEQ ID NO: 8564 - DNA, 122 bp, Homo sapiens
  misc_feature (61)..(62): /note="This region represents a CpG dinucleotide"
  misc_feature (61)..(61): /note="Nucleotide may be methylated to form 5-methylcytosine"
acacacgagtcattcacgggtcagcaatgattcagtcatgggtcacacactggtcacacacgtcagtcacatccccccccccacatcagctatgtgtcagaacatacctgccatgtgtcaga

SEQ ID NO: 8565 - DNA, 122 bp, Homo sapiens
  misc_feature (61)..(62): /note="This region represents a CpG dinucleotide"
  misc_feature (61)..(61): /note="Nucleotide may be methylated to form 5-methylcytosine"
caatatttttaaaaaatagatctcacctttggttaggtgtcctggaactgctggtaatggcgtctttctctgatggtaccagaaataatggaacttccttgaagctgatagccaatgaaatg

SEQ ID NO: 8566 - DNA, 122 bp, Homo sapiens
  misc_feature (61)..(62): /note="This region represents a CpG dinucleotide"
  misc_feature (61)..(61): /note="Nucleotide may be methylated to form 5-methylcytosine"
cttattcagaaaaaaaaaatgaactgcattctcaaagccaataaagataaaagaaacctacgttagtccaaaacagcacagctcaagggtgggaattgcacaagattaaggtttgtcctcag

SEQ ID NO: 8567 - DNA, 122 bp, Homo sapiens
  misc_feature (61)..(62): /note="This region represents a CpG dinucleotide"
  misc_feature (61)..(61): /note="Nucleotide may be methylated to form 5-methylcytosine"
ggagactatttcacacaatttaatacaggaagtcgataatgaggaacacacccttgttcccgtcattcacgtataaagagtggctaccttaaagagtcacgtttcttttttaaagatacact

SEQ ID NO: 8568 - DNA, 122 bp, Homo sapiens
  misc_feature (61)..(62): /note="This region represents a CpG dinucleotide"
  misc_feature (61)..(61): /note="Nucleotide may be methylated to form 5-methylcytosine"
atctagcttgagagtctgaggcaatttcctgatgatacatctcagtgggcctaaaggaaacgaaacacctacaccattgctcaatgctggaaaattctccacagtggccgacccctttagga

SEQ ID NO: 8569 - DNA, 122 bp, Homo sapiens
  misc_feature (61)..(62): /note="This region represents a CpG dinucleotide"
  misc_feature (61)..(61): /note="Nucleotide may be methylated to form 5-methylcytosine"
atgtgccctttgactctcccttccattaagataactttccttgtggatttccggctctctcgtaggcttgctaaataccagggtaaacacaatttgtgtgtgttgctcaaacgttgcataat

SEQ ID NO: 8570 - DNA, 122 bp, Homo sapiens
  misc_feature (61)..(62): /note="This region represents a CpG dinucleotide"
  misc_feature (61)..(61): /note="Nucleotide may be methylated to form 5-methylcytosine"
ctcatggtgagaaccatgaagtgtcaaagagaaaccataaattcctcctcaggcctgactcggagcagacatcctatcattctgccttattctgttggctaaagcaagtcatgaggcccaac

SEQ ID NO: 8571 - DNA, 122 bp, Homo sapiens
  misc_feature (61)..(62): /note="This region represents a CpG dinucleotide"
  misc_feature (61)..(61): /note="Nucleotide may be methylated to form 5-methylcytosine"
atctgaggcatgtaccaatgacagccagttcactcattcatcccgtaattatgtattgaacgcctactatgtctgtcttgctcaccaatgcattcccagcccctatcacactacccgtcact

SEQ ID NO: 8572 - DNA, 122 bp, Homo sapiens
  misc_feature (61)..(62): /note="This region represents a CpG dinucleotide"
  misc_feature (61)..(61): /note="Nucleotide may be methylated to form 5-methylcytosine"
caaggatgtgtttttggaggggtcatttggaaagggaagagaaatgatgggaggagaaaacgataatcaaacctctgtgggagagagggtcacacagattttaacacctttaacatgggaag

SEQ ID NO: 8573 - DNA, 122 bp, Homo sapiens
  misc_feature (61)..(62): /note="This region represents a CpG dinucleotide"
  misc_feature (61)..(61): /note="Nucleotide may be methylated to form 5-methylcytosine"
gagaggctatacataatgcctgtgaacaaacaaaagtcaccttggttattgactcattgccgcatgcatagctttttaatacaatgtgtatttggatgtattttaaatttattcacttgatc

SEQ ID NO: 8574 - DNA, 122 bp, Homo sapiens
  misc_feature (61)..(62): /note="This region represents a CpG dinucleotide"
  misc_feature (61)..(61): /note="Nucleotide may be methylated to form 5-methylcytosine"
ggagcagctgcctgcaccaagcttccctcctctggagaaagcacctcctcttctccctcacgtgctccctgatgaccgccaggctccttgacatggttcccaggaccagcctctcccagggt

SEQ ID NO: 8575 - DNA, 122 bp, Homo sapiens
  misc_feature (61)..(62): /note="This region represents a CpG dinucleotide"
  misc_feature (61)..(61): /note="Nucleotide may be methylated to form 5-methylcytosine"
actcaagaccctggaaccttcaatctttttgccagcatatctttcatgcagttgatgggtcggaggaacaaagtgtctgtaaagttgcaggagcttttttttttttttccccctcttcttct

SEQ ID NO: 8576 - DNA, 122 bp, Homo sapiens
  misc_feature (61)..(62): /note="This region represents a CpG dinucleotide"
  misc_feature (61)..(61): /note="Nucleotide may be methylated to form 5-methylcytosine"
atgtgcatggtcggtatatgtgtgctgtgctttctcttcctgtaggcaaggcagtttccccggcatgaaccagagtggacttatggcttccagctctccctacagccagcccatgaacaaca

SEQ ID NO: 8577 - DNA, 122 bp, Homo sapiens
  misc_feature (61)..(62): /note="This region represents a CpG dinucleotide"
  misc_feature (61)..(61): /note="Nucleotide may be methylated to form 5-methylcytosine"
tgatgtgtaataacagttatgtctatttgggcacaacagacactgtgtaggagtcttccccgcttcatttcctaacccttatcttgacgagcacactcatggaagagtcatggaaggcggga

SEQ ID NO: 8578 - DNA, 122 bp, Homo sapiens
  misc_feature (61)..(62): /note="This region represents a CpG dinucleotide"
  misc_feature (61)..(61): /note="Nucleotide may be methylated to form 5-methylcytosine"
taaaacaaagtttgacttctggacaattatccagggagagggcggggaacacaccttgcccggactgtctgggaatcccattgacaggtcatctcaggttcaccatcttcctgtcgtgggct

SEQ ID NO: 8579 - DNA, 122 bp, Homo sapiens
  misc_feature (61)..(62): /note="This region represents a CpG dinucleotide"
  misc_feature (61)..(61): /note="Nucleotide may be methylated to form 5-methylcytosine"
ggtgacttgttcctggttctgccacttgctgatttgcttagacaagacttctttgggcctcggcttgcctgtgtgacttgacaagtgagaattataataatgtccctgcccgggagctgttc

SEQ ID NO: 8580 - DNA, 122 bp, Homo sapiens
  misc_feature (61)..(62): /note="This region represents a CpG dinucleotide"
  misc_feature (61)..(61): /note="Nucleotide may be methylated to form 5-methylcytosine"
ctaacattgttctaacattgttcattccttctaacattcccttccgctttgaggttgatacgaagatctatgatttaacgtttgtcaaatactctaggcttctcagatgaaagacaacatta

SEQ ID NO: 8581 - DNA, 122 bp, Homo sapiens
  misc_feature (61)..(62): /note="This region represents a CpG dinucleotide"
  misc_feature (61)..(61): /note="Nucleotide may be methylated to form 5-methylcytosine"
ctcaaggagctagagctttgctttagtaaaattagacaagtcattcatttctgggtgtcacggaatggagtggccaatggcctgcagagcaacatgcccaagttttattgtgactactgcaa

SEQ ID NO: 8582 - DNA, 122 bp, Homo sapiens
  misc_feature (61)..(62): /note="This region represents a CpG dinucleotide"
  misc_feature (61)..(61): /note="Nucleotide may be methylated to form 5-methylcytosine"
caccaggaaggaccttgtaggcagtttgattgctatggttctataaacaagtgaaaattccgtaacatctttgggctttttatttcatttttaaattaagaggttgggcaaagtgatttcta

SEQ ID NO: 8583 - DNA, 122 bp, Homo sapiens
  misc_feature (61)..(62): /note="This region represents a CpG dinucleotide"
  misc_feature (61)..(61): /note="Nucleotide may be methylated to form 5-methylcytosine"
taaacaccttgacattttcaggactttctgccacctgggatttagatcaaaactgcagtgcgtgtcagaccatctcagaacaaggaatgtttgtctcagacattattatgccctatctcttg

SEQ ID NO: 8584 - DNA, 122 bp, Homo sapiens
  misc_feature (61)..(62): /note="This region represents a CpG dinucleotide"
  misc_feature (61)..(61): /note="Nucleotide may be methylated to form 5-methylcytosine"
tggagaggaaggggaagcagctctgccttccctccaatctaactacacaacccctgctgccgtaacttatttttagacatttaatctaaaattcccagaaaggaagcggatctacaacctct

SEQ ID NO: 8585 - DNA, 122 bp, Homo sapiens
  misc_feature (61)..(62): /note="This region represents a CpG dinucleotide"
  misc_feature (61)..(61): /note="Nucleotide may be methylated to form 5-methylcytosine"
atgatgcagaagtgatccgtggacatgagaactttccccatttctgacattttctattttcgtttctgctttttctgaacttaaataagacactgtgttctgctgacaagaaaaaaaaatac

SEQ ID NO: 8586 - DNA, 122 bp, Homo sapiens
  misc_feature (61)..(62): /note="This region represents a CpG dinucleotide"
  misc_feature (61)..(61): /note="Nucleotide may be methylated to form 5-methylcytosine"
gaatgggtctggaggaggagccagcactaaagacacaaggaaagacagtttcacagtcaccgctttgcagcaaatagagccacaggctgccccaagggccaccacatagtcttttcccccga

SEQ ID NO: 8587 - DNA, 122 bp, Homo sapiens
  misc_feature (61)..(62): /note="This region represents a CpG dinucleotide"
  misc_feature (61)..(61): /note="Nucleotide may be methylated to form 5-methylcytosine"
taagcctccccagctgagcaggagatgagcgataaggatcactcccaccctaccggagatcggcctatttccagtgacactgaagctccaagctggaggccagcctcccacataacagtggg

SEQ ID NO: 8588 - DNA, 122 bp, Homo sapiens
  misc_feature (61)..(62): /note="This region represents a CpG dinucleotide"
  misc_feature (61)..(61): /note="Nucleotide may be methylated to form 5-methylcytosine"
ctatgatttttgattatcagctccagcatttatggatcccttctcctattatctaatctacgggctctaaagattaaactgtgcactttggactatttaaatagttcttaaccactgatctc

SEQ ID NO: 8589 - DNA, 122 bp, Homo sapiens
  misc_feature (61)..(62): /note="This region represents a CpG dinucleotide"
  misc_feature (61)..(61): /note="Nucleotide may be methylated to form 5-methylcytosine"
tgcatgttggtgaagtgaattactcttcttgccatagagaaaatgggctggctaaagggacgtgtaaagcagagagaagacaagatcagggaaagggcacatttgggatcaaagtgatttga

SEQ ID NO: 8590 - DNA, 122 bp, Homo sapiens
  misc_feature (61)..(62): /note="This region represents a CpG dinucleotide"
  misc_feature (61)..(61): /note="Nucleotide may be methylated to form 5-methylcytosine"
ccgtttttattgtatatatgtttatatattaggttgggccatgtgaaattgctgatgtgacgggttttgacgagagaaatggcaactgtgtggttcaacctaatatttagatagtattgtct

SEQ ID NO: 8591 - DNA, 122 bp, Homo sapiens
  misc_feature (61)..(62): /note="This region represents a CpG dinucleotide"
  misc_feature (61)..(61): /note="Nucleotide may be methylated to form 5-methylcytosine"
gcctcgacacacctaacgaatggaggcgggccggaggccggtggaaccagctcgagctctcgagggccgtttgggggctcgcgccgtacggcttgtgaagtctcgcgcctctccccttagtc

SEQ ID NO: 8592 - DNA, 122 bp, Homo sapiens
  misc_feature (61)..(62): /note="This region represents a CpG dinucleotide"
  misc_feature (61)..(61): /note="Nucleotide may be methylated to form 5-methylcytosine"
aatggacttttgcgatgtatatactgtgaggctattttgagcttctctctttaaggcacccgcacatctgaatatgcttacttggctttactctttaacatataagaacacatgaaactttg

SEQ ID NO: 8593 - DNA, 122 bp, Homo sapiens
  misc_feature (61)..(62): /note="This region represents a CpG dinucleotide"
  misc_feature (61)..(61): /note="Nucleotide may be methylated to form 5-methylcytosine"
aactctgcgggagctgggactttgagattttgttccctgatgtatttccagcacggagaacgggctcatggaaggaaggcacccatttcttcagtgaataaaagtggcacagcagtcagtca

SEQ ID NO: 8594 - DNA, 122 bp, Homo sapiens
  misc_feature (61)..(62): /note="This region represents a CpG dinucleotide"
  misc_feature (61)..(61): /note="Nucleotide may be methylated to form 5-methylcytosine"
aagacgagaaatagcagttgactcaagacctactggagggttctgcttgccctgctgaggcgcctttgtttgtggaactgcattgttttgtttctgtggttatatttagagcagtgcacaga

SEQ ID NO: 8595 - DNA, 122 bp, Homo sapiens
  misc_feature (61)..(62): /note="This region represents a CpG dinucleotide"
  misc_feature (61)..(61): /note="Nucleotide may be methylated to form 5-methylcytosine"
gctaggtatgagtctgcaattatgataggcggccatcagggggcatttcagcgccttggtcgtgtggccaaaggatcaggtttaccataatcagagaataaggtaatttttacttctttaaa

SEQ ID NO: 8596 - DNA, 122 bp, Homo sapiens
  misc_feature (61)..(62): /note="This region represents a CpG dinucleotide"
  misc_feature (61)..(61): /note="Nucleotide may be methylated to form 5-methylcytosine"
ggagaaagaaaggaggagagattaataaagtttggacggctccctcggcctccgctgggccgcgggcgcaagaaagacgcggaccctcgaggcggacgagttgcgggaacttcgcttgcctg

SEQ ID NO: 8597 - DNA, 122 bp, Homo sapiens
  misc_feature (61)..(62): /note="This region represents a CpG dinucleotide"
  misc_feature (61)..(61): /note="Nucleotide may be methylated to form 5-methylcytosine"
ggattagaaaattgaggattagagaagtcaccaaccagtgctccaggcaactgcaggtcacgaagctgtgacttgcctccaaagactgctgactaaaggctggaaagtctggcttaacctac

SEQ ID NO: 8598 - DNA, 122 bp, Homo sapiens
  misc_feature (61)..(62): /note="This region represents a CpG dinucleotide"
  misc_feature (61)..(61): /note="Nucleotide may be methylated to form 5-methylcytosine"
cgcagccctcctcagtgacgacggcgggtttggcttcatccccttccatgaagatgagcgcggctccctctcctttgtgttggatctggggccctggggagagctgggcacacggctggtgt

SEQ ID NO: 8599 - DNA, 122 bp, Homo sapiens
  misc_feature (61)..(62): /note="This region represents a CpG dinucleotide"
  misc_feature (61)..(61): /note="Nucleotide may be methylated to form 5-methylcytosine"
ctgggtcaggcgcaggccacagaaacatgtcagcaaacgttttattaagcaactgcagtgcgccaggcaccgttctagacacaggtggacaacagcaaggccctgcccacagtgactcacag

SEQ ID NO: 8600 - DNA, 122 bp, Homo sapiens
  misc_feature (61)..(62): /note="This region represents a CpG dinucleotide"
  misc_feature (61)..(61): /note="Nucleotide may be methylated to form 5-methylcytosine"
gagagaagtttcagtgaactttggtttcctcatttgtatttgtatctcataatccatgcccggcctactttcctgggtgatcagatgaattaaatgtgataattgtgaaataacttgactct

SEQ ID NO: 8601 - DNA, 122 bp, Homo sapiens
  misc_feature (61)..(62): /note="This region represents a CpG dinucleotide"
  misc_feature (61)..(61): /note="Nucleotide may be methylated to form 5-methylcytosine"
ccaggaagcaaagtcaagcttgtttctgccaacgtggtgcatgagagcacatgctgcttccgccccggaacctgagcacgctgagacgccccagcccatcccccatctctgctgtcatcacc

SEQ ID NO: 8602 - DNA, 122 bp, Homo sapiens
  misc_feature (61)..(62): /note="This region represents a CpG dinucleotide"
  misc_feature (61)..(61): /note="Nucleotide may be methylated to form 5-methylcytosine"
gttagataaggtatgggttagccagacgttggaattttattcagccactaaaaatgatgtcgtagatgattgtttattgacatgataggaggatatcctgtatggaaaacacatataatatt

SEQ ID NO: 8603 - DNA, 122 bp, Homo sapiens
  misc_feature (61)..(62): /note="This region represents a CpG dinucleotide"
  misc_feature (61)..(61): /note="Nucleotide may be methylated to form 5-methylcytosine"
tgctactccagccacgtgagttttccgcctgtcagccaagcaaaatggccttcctgcagtcgcacggccctttggtctctgctcagggcttcggggaccctttccagccattgccctgcacc

SEQ ID NO: 8604 - DNA, 122 bp, Homo sapiens
  misc_feature (61)..(62): /note="This region represents a CpG dinucleotide"
  misc_feature (61)..(61): /note="Nucleotide may be methylated to form 5-methylcytosine"
ctgggttccatgaccttcctacagttacatttatgacactttaaggctataaaccatgggcgaggaggtggactgaaaccctcacatgctgctgtggcagatgaaaaggctgaagccacttt

SEQ ID NO: 8605 - DNA, 122 bp, Homo sapiens
  misc_feature (61)..(62): /note="This region represents a CpG dinucleotide"
  misc_feature (61)..(61): /note="Nucleotide may be methylated to form 5-methylcytosine"
actctaccaacatgggcttgcgatggccattgaaggctcttaagactggcacaatgccaacgggaagggcaggttgccctcaatgtccaggaattgtaggtagccgaatacagtgcagtgct

SEQ ID NO: 8606 - DNA, 122 bp, Homo sapiens
  misc_feature (61)..(62): /note="This region represents a CpG dinucleotide"
  misc_feature (61)..(61): /note="Nucleotide may be methylated to form 5-methylcytosine"
tcaatttacatgaccatgaggaaactgaaacctagcgaagttaaatgacttgcccggggacggacagctagctagttcctgcttgaactgaggaccatctatttggttaccgggagtgtggc

SEQ ID NO: 8607 - DNA, 122 bp, Homo sapiens
  misc_feature (61)..(62): /note="This region represents a CpG dinucleotide"
  misc_feature (61)..(61): /note="Nucleotide may be methylated to form 5-methylcytosine"
gcaaggatggactgtgggccaagacagacttcagggaataagccagctatcacatgtagccgaggattgaaaatctgcacatttcttgtttaattatatttagagacagatggaaattatgc

SEQ ID NO: 8608 - DNA, 122 bp, Homo sapiens
  misc_feature (61)..(62): /note="This region represents a CpG dinucleotide"
  misc_feature (61)..(61): /note="Nucleotide may be methylated to form 5-methylcytosine"
aaaacagaccccaaactctgggtgtcagctacctaaatctctgctaatggctgaatcacacgtgtggggcaggctccaggcagctaagctaaggatgaagtcattgtattgagatttgagct

SEQ ID NO: 8609 - DNA, 122 bp, Homo sapiens
  misc_feature (61)..(62): /note="This region represents a CpG dinucleotide"
  misc_feature (61)..(61): /note="Nucleotide may be methylated to form 5-methylcytosine"
aagctaacagagatagctagaaagtggccaggtacaacttgatctagggtcctcctggctcgtttctgtgctctctcatgatggacactgatgattgttttggggtgaggggcatggaagca

SEQ ID NO: 8610 - DNA, 122 bp, Homo sapiens
  misc_feature (61)..(62): /note="This region represents a CpG dinucleotide"
  misc_feature (61)..(61): /note="Nucleotide may be methylated to form 5-methylcytosine"
ggcaagaacgatgccatcggcaaagtctttgtgggctacaacagcaccggcgcggagctgcgacactggtcagacatgctggccaaccccaggcgacctattgcccagtggcacaccctgca

SEQ ID NO: 8611 - DNA, 122 bp, Homo sapiens
  misc_feature (61)..(62): /note="This region represents a CpG dinucleotide"
  misc_feature (61)..(61): /note="Nucleotide may be methylated to form 5-methylcytosine"
ggaaacaggttccgagaggtaaagtcacttgctgcccaagctccaactgctactaagtggcggaaccaagattcgaccccaggtctctgtgactccagggcatgaggcacacccatcctcag

SEQ ID NO: 8612 - DNA, 122 bp, Homo sapiens
  misc_feature (61)..(62): /note="This region represents a CpG dinucleotide"
  misc_feature (61)..(61): /note="Nucleotide may be methylated to form 5-methylcytosine"
aatcagaggaggaaggagagagtgcagaagctgtcagaggcgagagatcttggctggagccgccaaaaaactggcaacatgagttagcgtaactgagtaaacagcaaacaatctccaaatga

SEQ ID NO: 8613 - DNA, 122 bp, Homo sapiens
  misc_feature (61)..(62): /note="This region represents a CpG dinucleotide"
  misc_feature (61)..(61): /note="Nucleotide may be methylated to form 5-methylcytosine"
gccatctgggaataattaagacgaacgggaaattcttgctctgtgccaaaccgagcccaacgctgagagtaaggtgggtgtgtaataagcacttactggatcacactgaataagaggattca

SEQ ID NO: 8614 - DNA, 122 bp, Homo sapiens
  misc_feature (61)..(62): /note="This region represents a CpG dinucleotide"
  misc_feature (61)..(61): /note="Nucleotide may be methylated to form 5-methylcytosine"
tccctgggtctctgcggatttttaaacttccccccaagttggcatagattcttgtgaacacgctattccttactgacgtcgttttcttggcgtttgggagtaataaaaggtgcaaatgattt

SEQ ID NO: 8615 - DNA, 122 bp, Homo sapiens
  misc_feature (61)..(62): /note="This region represents a CpG dinucleotide"
  misc_feature (61)..(61): /note="Nucleotide may be methylated to form 5-methylcytosine"
catctcctactgccctccctctccctctctgctcttgcaatagctggaataggccaggcgcgcttcatgctcaggaccttgaatgctttgtgccttgatattgccttgccacacttcccagc

SEQ ID NO: 8616 - DNA, 122 bp, Homo sapiens
  misc_feature (61)..(62): /note="This region represents a CpG dinucleotide"
  misc_feature (61)..(61): /note="Nucleotide may be methylated to form 5-methylcytosine"
cagtacttagttaaaggaactgaatagtttgtgcaacattccctgtctttgtctgtgttacggccctggcctcccagaattgtgggtgattcaggggaaatgagagccacatgtttctgaat

SEQ ID NO: 8617 - DNA, 122 bp, Homo sapiens
  misc_feature (61)..(62): /note="This region represents a CpG dinucleotide"
  misc_feature (61)..(61): /note="Nucleotide may be methylated to form 5-methylcytosine"
agcataaccccttgccattgtgaatcacatttccctgttgaagaaaattgcaaccaggcacggtggctcatgcctgtaatcccagcactttgggcggccgaggcgggcagatcacttggggt

SEQ ID NO: 8618 - DNA, 122 bp, Homo sapiens
  misc_feature (61)..(62): /note="This region represents a CpG dinucleotide"
  misc_feature (61)..(61): /note="Nucleotide may be methylated to form 5-methylcytosine"
cataagtagtacagcctgctctttatggcgagcagctagggagagggataaggaaagaagcggccagggtacagccaaataagcctgtaatagaggcagattaatcatcaaaacaaggccgg

SEQ ID NO: 8619 - DNA, 122 bp, Homo sapiens
  misc_feature (61)..(62): /note="This region represents a CpG dinucleotide"
  misc_feature (61)..(61): /note="Nucleotide may be methylated to form 5-methylcytosine"
agtgaaagtagggctcatggaagcaagcgatccatggagatgtaggtcagatccatttcacgtggttccaggcccatcctgtggttacttccccaggtccagaatgcataactgaagtacat

SEQ ID NO: 8620 - DNA, 122 bp, Homo sapiens
  misc_feature (61)..(62): /note="This region represents a CpG dinucleotide"
  misc_feature (61)..(61): /note="Nucleotide may be methylated to form 5-methylcytosine"
tacctttagcatggattcacaaccttctgcttgtttcagctaagacagaagtgtcagccacgtcagctccaccttaaggaggggcctggatcacaaactgtagttattagctcaagcagagg

SEQ ID NO: 8621 - DNA, 122 bp, Homo sapiens
  misc_feature (61)..(62): /note="This region represents a CpG dinucleotide"
  misc_feature (61)..(61): /note="Nucleotide may be methylated to form 5-methylcytosine"
aaggaaagtcccacagagatgagagataacaggcttaggcagctgatggcaagattcttccgcattactcttcagacacacaccagcccagccagaagcaagtcccagcccccagccctccc

SEQ ID NO: 8622 - DNA, 122 bp, Homo sapiens
  misc_feature (61)..(62): /note="This region represents a CpG dinucleotide"
  misc_feature (61)..(61): /note="Nucleotide may be methylated to form 5-methylcytosine"
ggggcaggacagagtgtaccggcgggggggtgggggcgaggttggagccctggtcaggggcgcacaagccgcagaactgaaggtggaggtgtggatggagacttgatttcaaggccgcccac

SEQ ID NO: 8623 - DNA, 122 bp, Homo sapiens
  misc_feature (61)..(62): /note="This region represents a CpG dinucleotide"
  misc_feature (61)..(61): /note="Nucleotide may be methylated to form 5-methylcytosine"
gacggccagcagcgggtggagctcatcacaccgtcacactaggcccacgacggccagcagcggggggagctcgtcacactagggggactctggtcctccgccttgaccagcccccacctgcc

SEQ ID NO: 8624 - DNA, 122 bp, Homo sapiens
  misc_feature (61)..(62): /note="This region represents a CpG dinucleotide"
  misc_feature (61)..(61): /note="Nucleotide may be methylated to form 5-methylcytosine"
cagtgctttataaatatctatactgcatgatggaatgacagcactgagtgcctccctacccggaccagcaagagaagagagacttccaaacaggcattataaacacttaaaaaaaaaaaaaa

SEQ ID NO: 8625 - DNA, 122 bp, Homo sapiens
  misc_feature (61)..(62): /note="This region represents a CpG dinucleotide"
  misc_feature (61)..(61): /note="Nucleotide may be methylated to form 5-methylcytosine"
ggcggagctcgtttgactaaattgaacacaagtttggctaaactgaccacttgtttctcccgcctgtctgatgagctgcttgagtgacgtctggctgaactgagtgcttgtaggtctgaagg

SEQ ID NO: 8626 - DNA, 122 bp, Homo sapiens
  misc_feature (61)..(62): /note="This region represents a CpG dinucleotide"
  misc_feature (61)..(61): /note="Nucleotide may be methylated to form 5-methylcytosine"
ggcatgcaccccgcagaggagaggataccacagccacaaccacggtcacccacaaggtcacgccaggattcccgcagtcatgtgcagttccatcagtgcagcaaagtgcctactttgtgccc

SEQ ID NO: 8627 - DNA, 122 bp, Homo sapiens
  misc_feature (61)..(62): /note="This region represents a CpG dinucleotide"
  misc_feature (61)..(61): /note="Nucleotide may be methylated to form 5-methylcytosine"
atgttggatttagcagccctgagggccagggctggcaggcatgcccagtgctctcgtgggcgcaccccggcatgtcggctccactgctgtgtgcctgggggcagcttgttttcctctgctct

SEQ ID NO: 8628 - DNA, 122 bp, Homo sapiens
  misc_feature (61)..(62): /note="This region represents a CpG dinucleotide"
  misc_feature (61)..(61): /note="Nucleotide may be methylated to form 5-methylcytosine"
gggaggagaagtcgcctctgagtcgtgaagagagatcagctcagcaccacatggatcccacgctaactgtgcagggatactaaagtgaagatccagtgaaagggtgaatctcaaagcatcct

SEQ ID NO: 8629 - DNA, 122 bp, Homo sapiens
  misc_feature (61)..(62): /note="This region represents a CpG dinucleotide"
  misc_feature (61)..(61): /note="Nucleotide may be methylated to form 5-methylcytosine"
atgttgagtcatctacctggttgcgtgtgtgggtctcacatatctcttcttctgtggctacgggagggagtggtgaagaaaagagaatgggcaggcagtaacagtgatgaagccagctcttg

SEQ ID NO: 8630 - DNA, 122 bp, Homo sapiens
  misc_feature (61)..(62): /note="This region represents a CpG dinucleotide"
  misc_feature (61)..(61): /note="Nucleotide may be methylated to form 5-methylcytosine"
gggaaaaaagtattacaagctctctgaatcatcaaacagttttaagtaagatggtaaaaacgaagcagaatccatgctcagtgcagcagacattgattgagcatctgccataggcaaggcac

SEQ ID NO: 8631 - DNA, 122 bp, Homo sapiens
  misc_feature (61)..(62): /note="This region represents a CpG dinucleotide"
  misc_feature (61)..(61): /note="Nucleotide may be methylated to form 5-methylcytosine"
tttacaagaaagacttatatcaataggaagcaccaccccaatagaaaaattggtagtggacgtgaacaagcatttcacaaacaaatgaaatgccaactgctgacgggaagattctgcgcctg

SEQ ID NO: 8632 - DNA, 122 bp, Homo sapiens
  misc_feature (61)..(62): /note="This region represents a CpG dinucleotide"
  misc_feature (61)..(61): /note="Nucleotide may be methylated to form 5-methylcytosine"
actcggcaatgcttcctcatgtccccacagttcaagctaaatgcctcataaaagcctgggcgaaccagcctccctacccagccaccttctcctccctgcaccctgaacacttccctccgacc

SEQ ID NO: 8633 - DNA, 122 bp, Homo sapiens
  misc_feature (61)..(62): /note="This region represents a CpG dinucleotide"
  misc_feature (61)..(61): /note="Nucleotide may be methylated to form 5-methylcytosine"
cggtactcacacacaggagaagtaggaatgcggtactcacacacgggagaagtaggaatgcggtactcacacacgggagaagtaagaatgcggtactcacacacatgagaagtaagaatgcg

SEQ ID NO: 8634 - DNA, 122 bp, Homo sapiens
  misc_feature (61)..(62): /note="This region represents a CpG dinucleotide"
  misc_feature (61)..(61): /note="Nucleotide may be methylated to form 5-methylcytosine"
tggggtacctcacagggccctttgagacactgatgtgatatcatttctcctcagatggagcgtctgtgtggcaccaggtgtccctctggttccaggaggctcatctctctgcctccagtcca

SEQ ID NO: 8635 - DNA, 122 bp, Homo sapiens
  misc_feature (61)..(62): /note="This region represents a CpG dinucleotide"
  misc_feature (61)..(61): /note="Nucleotide may be methylated to form 5-methylcytosine"
aattttgactgcaacacagcagaagttccatcaagactcctcagctggaactcctccaggcgagaggctcttcagatctccttgttcttgggaaggatgaagcagaacagttgacatcatac

SEQ ID NO: 8636 - DNA, 122 bp, Homo sapiens
  misc_feature (61)..(62): /note="This region represents a CpG dinucleotide"
  misc_feature (61)..(61): /note="Nucleotide may be methylated to form 5-methylcytosine"
atctctcctccactctctgtccacctccgtttctctttctgacagtcactatctctccttcgctttcggcctccacttctcgctgttcctcgcggcacagggccttggataaactacttaac

SEQ ID NO: 8637 - DNA, 122 bp, Homo sapiens
  misc_feature (61)..(62): /note="This region represents a CpG dinucleotide"
  misc_feature (61)..(61): /note="Nucleotide may be methylated to form 5-methylcytosine"
gattctgatgaaacgggaaatgtcatgcatgactgttgctgcactttgagtattaagaggcgagccttaagattacagttgagaacacatctggtttaaagtgagtcctgcaaaaaacaaaa

SEQ ID NO: 8638 - DNA, 122 bp, Homo sapiens
  misc_feature (61)..(62): /note="This region represents a CpG dinucleotide"
  misc_feature (61)..(61): /note="Nucleotide may be methylated to form 5-methylcytosine"
gaaaggcttccaagaggaagtagactcactcttctccagctcttcagtgagaactattcccgtttgtgctttggcaaaatgacaaatgatgacaccccatagactcactttgtagactaact

SEQ ID NO: 8639 - DNA, 122 bp, Homo sapiens
  misc_feature (61)..(62): /note="This region represents a CpG dinucleotide"
  misc_feature (61)..(61): /note="Nucleotide may be methylated to form 5-methylcytosine"
gtcagagagctggcggggctgagggaaggaagcctgcctccctggcaggcaagcaggcggcgggcgcggaagcaccagctttcacgtctctggcagagccccactccggctgcctgctgcct

SEQ ID NO: 8640 - DNA, 122 bp, Homo sapiens
  misc_feature (61)..(62): /note="This region represents a CpG dinucleotide"
  misc_feature (61)..(61): /note="Nucleotide may be methylated to form 5-methylcytosine"
catgatgccactatgacctctgccctttaacccttagccttactttacattcctgactaccgattggctgagggattgtctaatagaatgccacacaaccagtctcaggatttcagcaccac

SEQ ID NO: 8641 - DNA, 122 bp, Homo sapiens
  misc_feature (61)..(62): /note="This region represents a CpG dinucleotide"
  misc_feature (61)..(61): /note="Nucleotide may be methylated to form 5-methylcytosine"
cagtcttgccatttcacaagttcacagtgtcaggagccaaatccatttcattgctaggtccgcagtatgataacacttgacctttcaaatgaatttatatcagatttaaaaaaaaataccta

SEQ ID NO: 8642 - DNA, 122 bp, Homo sapiens
  misc_feature (61)..(62): /note="This region represents a CpG dinucleotide"
  misc_feature (61)..(61): /note="Nucleotide may be methylated to form 5-methylcytosine"
cccccacagagaggaatgaagtcaagtcagaagctaggccagcaaatcattttcgtcttacggcttcccagaaaagctttggcaggggacatgaccagaccatgaactatgataaatagatg

SEQ ID NO: 8643 - DNA, 122 bp, Homo sapiens
  misc_feature (61)..(62): /note="This region represents a CpG dinucleotide"
  misc_feature (61)..(61): /note="Nucleotide may be methylated to form 5-methylcytosine"
agccaggctggtgggagtgagaggcagtcgataaacacaagtctcacctcaccccagacacgacactcacgccagtcccttgcacacatttaccaagcacgctctctgggccacgctttgtg

SEQ ID NO: 8644 - DNA, 122 bp, Homo sapiens
  misc_feature (61)..(62): /note="This region represents a CpG dinucleotide"
  misc_feature (61)..(61): /note="Nucleotide may be methylated to form 5-methylcytosine"
gcccagaaggcaagaattgcagcaggtgtgggaaattgaatggtgtggctgctcttctcccgagctgtcagctgttggcaggctgaatgaatctagctctagagctggctgcagacaatgca

SEQ ID NO: 8645 - DNA, 122 bp, Homo sapiens
  misc_feature (61)..(62): /note="This region represents a CpG dinucleotide"
  misc_feature (61)..(61): /note="Nucleotide may be methylated to form 5-methylcytosine"
tcccttccctgacattccactttatttacaattgtaccaaaaagaattgagttggttgcacgatagaattaccttaagggaagtgggagcattcagtttacaaagtatattttgtactgttt

SEQ ID NO: 8646 - DNA, 122 bp, Homo sapiens
  misc_feature (61)..(62): /note="This region represents a CpG dinucleotide"
  misc_feature (61)..(61): /note="Nucleotide may be methylated to form 5-methylcytosine"
actttccaatctacagagcaccttcacatttaacatctcactggattattatgatggcaccgtgagctaaaacactgaggcactggcatcatggctaccaacagacatgaagaaactgaggc

SEQ ID NO: 8647 - DNA, 122 bp, Homo sapiens
  misc_feature (61)..(62): /note="This region represents a CpG dinucleotide"
  misc_feature (61)..(61): /note="Nucleotide may be methylated to form 5-methylcytosine"
cagttcccactttcctgcattctctgggcccatggtggcatcttttgcttgcggtgcattcgtaactttccaacagcctgcctgtcatgtggattagcggttgtgtttttgtatatccgagt

SEQ ID NO: 8648 - DNA, 122 bp, Homo sapiens
  misc_feature (61)..(62): /note="This region represents a CpG dinucleotide"
  misc_feature (61)..(61): /note="Nucleotide may be methylated to form 5-methylcytosine"
tgagccaccacgcccaggcccagagccattcttctgttgcttagaccagaaatcttgattcgtatttctcttacttctgtcaagaaattttgttcagaatgtatttgcaatctacaatctga

SEQ ID NO: 8649 - DNA, 122 bp, Homo sapiens
  misc_feature (61)..(62): /note="This region represents a CpG dinucleotide"
  misc_feature (61)..(61): /note="Nucleotide may be methylated to form 5-methylcytosine"
agaggacgctgcggggagggacctggttgtgtgcttcaggtgccccaagggacacggagacgcgcgagggttgggatcaaggcgttgaagacagagcgacagcccttctcggcctcccaccg

SEQ ID NO: 8650 - DNA, 122 bp, Homo sapiens
  misc_feature (61)..(62): /note="This region represents a CpG dinucleotide"
  misc_feature (61)..(61): /note="Nucleotide may be methylated to form 5-methylcytosine"
taagtattgtcttatgcaatactcattggcttattatctaaggctgcattcacacttcaacggcagaggtgagtcacttgtggccagctgtgaaaacgcaatttacttactatctggccctt

SEQ ID NO: 8651 - DNA, 122 bp, Homo sapiens
  misc_feature (61)..(62): /note="This region represents a CpG dinucleotide"
  misc_feature (61)..(61): /note="Nucleotide may be methylated to form 5-methylcytosine"
catgtcagacactactctgggcctggtgatattgtaatgacagataaggtccctgccttccggaactttaaaatctaactggaacacacaaataagataaattcaagtagctgttacaaagg

SEQ ID NO: 8652 - DNA, 122 bp, Homo sapiens
  misc_feature (61)..(62): /note="This region represents a CpG dinucleotide"
  misc_feature (61)..(61): /note="Nucleotide may be methylated to form 5-methylcytosine"
accctcgagccgatgaaacgcaccacgaccttggcttcccgaggcggcctcccctcaccccgacacgggagctgacattgtgcattccattcagagctccctttgttcaggccacatagaaa

SEQ ID NO: 8653 - DNA, 122 bp, Homo sapiens
  misc_feature (61)..(62): /note="This region represents a CpG dinucleotide"
  misc_feature (61)..(61): /note="Nucleotide may be methylated to form 5-methylcytosine"
cattagccagaacttgtaagtagaaaatagtgagaagtcaggcagtcaacagtcctgaaacgttctcttccaactgaccagccaggaagccaaacaactaaagtgagaaaacctcctgccac

SEQ ID NO: 8654 - DNA, 122 bp, Homo sapiens
  misc_feature (61)..(62): /note="This region represents a CpG dinucleotide"
  misc_feature (61)..(61): /note="Nucleotide may be methylated to form 5-methylcytosine"
gcacagcctgcaagacttcatggcatttggtcacagtccttctgtcctgatgacatcaggcgaaagaagtgccacagtgtttccctggggcctgaagagtattaatcacacagtcagatgtt

SEQ ID NO: 8655 - DNA, 122 bp, Homo sapiens
  misc_feature (61)..(62): /note="This region represents a CpG dinucleotide"
  misc_feature (61)..(61): /note="Nucleotide may be methylated to form 5-methylcytosine"
ttgaagggggtggaagatcatcagggagagagtaggttttcctatttgagaagtgaaaggcggtatagacggctgtcctccatgccttggattgtaggtggcatttactgctcaaggagaag

SEQ ID NO: 8656 - DNA, 122 bp, Homo sapiens
  misc_feature (61)..(62): /note="This region represents a CpG dinucleotide"
  misc_feature (61)..(61): /note="Nucleotide may be methylated to form 5-methylcytosine"
ctgtgttggtggtgaggcataattatgatggaaaaaacattttccaaggtctggaactgacgtgtactccttgtgacattttaatctgtgagtaatagattccattgcctacagggctgcaa

SEQ ID NO: 8657 - DNA, 122 bp, Homo sapiens
  misc_feature (61)..(62): /note="This region represents a CpG dinucleotide"
  misc_feature (61)..(61): /note="Nucleotide may be methylated to form 5-methylcytosine"
tgctgatgaagtaaaagttgacagtgagaagccttccagcaggagctaccagtgcccactcgcagttcgtgttgtttggataggtgcctggatagccagggctggtgaatgagcctctgtct

SEQ ID NO: 8658 - DNA, 122 bp, Homo sapiens
  misc_feature (61)..(62): /note="This region represents a CpG dinucleotide"
  misc_feature (61)..(61): /note="Nucleotide may be methylated to form 5-methylcytosine"
tggtaaggagggcatgatggaaagccggcgtggagggagagaggaggcacgcgcgtgcagcgccgtgacgtgcatttagttacacgacggcttctggaggcccacaactgattaatatacac

SEQ ID NO: 8659 - DNA, 122 bp, Homo sapiens
  misc_feature (61)..(62): /note="This region represents a CpG dinucleotide"
  misc_feature (61)..(61): /note="Nucleotide may be methylated to form 5-methylcytosine"
acgcaggcacagagcgatctgggtggggtcaggtggcggaggatgaccagcaggggccgtcgccacacatgctgggtgcacagcccaggcagacgggcaatcagcatttccagactctcatt

SEQ ID NO: 8660 - DNA, 122 bp, Homo sapiens
  misc_feature (61)..(62): /note="This region represents a CpG dinucleotide"
  misc_feature (61)..(61): /note="Nucleotide may be methylated to form 5-methylcytosine"
ttgcctttctttctatctgggctgtcagctgattggatggtgcccacccactttgggtgacggaggatcttccttattgagtcgactgattcaaatgtcaaatctcttctggaaacactttc

SEQ ID NO: 8661 - DNA, 122 bp, Homo sapiens
  misc_feature (61)..(62): /note="This region represents a CpG dinucleotide"
  misc_feature (61)..(61): /note="Nucleotide may be methylated to form 5-methylcytosine"
caaattggaccagaagacaacttcattcatgctttttaggaagtgagacaatttctagaacgtggaaagcaaagcaaattgagtcatttaatcccaggatccagaagtttcacaggtgaagg

SEQ ID NO: 8662 - DNA, 122 bp, Homo sapiens
  misc_feature (61)..(62): /note="This region represents a CpG dinucleotide"
  misc_feature (61)..(61): /note="Nucleotide may be methylated to form 5-methylcytosine"
aggctgagaaccactggtttctgttgaaacctcagttcctggctgaagagacacttgcggcgagcttgtctgtatcattagtcacttctggggtccaggggtgagactgggagtggaggaag

SEQ ID NO: 8663 - DNA, 122 bp, Homo sapiens
  misc_feature (61)..(62): /note="This region represents a CpG dinucleotide"
  misc_feature (61)..(61): /note="Nucleotide may be methylated to form 5-methylcytosine"
cttaacctatagcctcagccaagcaatatccacttagactcactgctctgaggactgccccgccctgacatcagcttccctatcctttccagaaatatttctttgagacctgctggctacag

SEQ ID NO: 8664 - DNA, 122 bp, Homo sapiens
  misc_feature (61)..(62): /note="This region represents a CpG dinucleotide"
  misc_feature (61)..(61): /note="Nucleotide may be methylated to form 5-methylcytosine"
cgatttggcttgtctgttcacatttgcatgaggaactgaactgttgttttcatagggaaacgagagactgtgtttcctcagcttaaaaaagaaagggcattttgctcctcccagccaaaatg

SEQ ID NO: 8665 - DNA, 122 bp, Homo sapiens
  misc_feature (61)..(62): /note="This region represents a CpG dinucleotide"
  misc_feature (61)..(61): /note="Nucleotide may be methylated to form 5-methylcytosine"
ggccaaggatctgggccatttaagtggagtcttgaaggatgagtaggtgttaggcacagacgcacagaggcaggcaaagccacaggctgttggtttaggcaaaaattgagactggctggata

SEQ ID NO: 8666 - DNA, 122 bp, Homo sapiens
  misc_feature (61)..(62): /note="This region represents a CpG dinucleotide"
  misc_feature (61)..(61): /note="Nucleotide may be methylated to form 5-methylcytosine"
gatgctgaattctgctacagttatcattttgtagaaggatgagtaaaacaagataaaacacgtgagtgttcatttacagaagttacaagctttatgaaatgcaaaggagctgtattttacca

SEQ ID NO: 8667 - DNA, 122 bp, Homo sapiens
  misc_feature (61)..(62): /note="This region represents a CpG dinucleotide"
  misc_feature (61)..(61): /note="Nucleotide may be methylated to form 5-methylcytosine"
gaagcaaatttcttaggtatctgattacccaagctgccactcctgggagctttcctctgacgttatacaaagcatatctattatttacacagaattgtttatcttttcatctctcacaagga

SEQ ID NO: 8668 - DNA, 122 bp, Homo sapiens
  misc_feature (61)..(62): /note="This region represents a CpG dinucleotide"
  misc_feature (61)..(61): /note="Nucleotide may be methylated to form 5-methylcytosine"
tttccgtaagtggtaaggtcagcctcatacagtattgcacagcctttcccattccttttgcgtcagtgagaatcaaatgattcaacagtgaaaagcaaactcttggactggaatagcaagat

SEQ ID NO: 8669 - DNA, 122 bp, Homo sapiens
  misc_feature (61)..(62): /note="This region represents a CpG dinucleotide"
  misc_feature (61)..(61): /note="Nucleotide may be methylated to form 5-methylcytosine"
attcaggaatgaaaaggaacaaatgttcttttctgtcatgctccacaataaaaatcgaagcgaatgtttgccgcacattcacatgggcctgttggattataatggcactacccttgtcagag

SEQ ID NO: 8670 - DNA, 122 bp, Homo sapiens
  misc_feature (61)..(62): /note="This region represents a CpG dinucleotide"
  misc_feature (61)..(61): /note="Nucleotide may be methylated to form 5-methylcytosine"
ggtggtttctttgctatacaactttaagacaaattccctggctgtcccaataagttgccccgtttaactcctttatagaaattctagagccatgactgcttgctggttggttttccagagaa

SEQ ID NO: 8671 - DNA, 122 bp, Homo sapiens
  misc_feature (61)..(62): /note="This region represents a CpG dinucleotide"
  misc_feature (61)..(61): /note="Nucleotide may be methylated to form 5-methylcytosine"
gtcacaatctcaagggagaaagacctcaaaaatttgtggatgctcatgtctggaaaagggcgactgtggttcataccaaactgagaagaaagagattcatgagcccagcctgccccacggca

SEQ ID NO: 8672 - DNA, 122 bp, Homo sapiens
  misc_feature (61)..(62): /note="This region represents a CpG dinucleotide"
  misc_feature (61)..(61): /note="Nucleotide may be methylated to form 5-methylcytosine"
cagcagttttacataactgccaaactgttattcaaggtggctggaccgttttacagcccccgttgtatgcgtcccagttgcctcccccagcagcatgtggtgtggttggtctttttcgtggc

SEQ ID NO: 8673 - DNA, 122 bp, Homo sapiens
  misc_feature (61)..(62): /note="This region represents a CpG dinucleotide"
  misc_feature (61)..(61): /note="Nucleotide may be methylated to form 5-methylcytosine"
ctcagggtcattgccgttggcctgaagcaggagcggcaggacatcgaagcggcctctaggcggtttccagccctgctgtatgcatatctgcaagcagacccggccaggtaatgccactgtac

SEQ ID NO: 8674 - DNA, 122 bp, Homo sapiens
  misc_feature (61)..(62): /note="This region represents a CpG dinucleotide"
  misc_feature (61)..(61): /note="Nucleotide may be methylated to form 5-methylcytosine"
ctggacggccgccctggggaccgggtgaatctctcctgcggaggagtctctcatcccatccgctgggtctgggcacccagcttcccggcctgcaagggcctgtccaaaggacgccgaccgat

SEQ ID NO: 8675 - DNA, 122 bp, Homo sapiens
  misc_feature (61)..(62): /note="This region represents a CpG dinucleotide"
  misc_feature (61)..(61): /note="Nucleotide may be methylated to form 5-methylcytosine"
ctgtgctgtgatggggcatggatgctttctcagaggtactttccccctaagctttaggcacgtctgaccatttcttctgctttggtccagtgctttcctcatgatttagactctggatgaag

SEQ ID NO: 8676 - DNA, 122 bp, Homo sapiens
  misc_feature (61)..(62): /note="This region represents a CpG dinucleotide"
  misc_feature (61)..(61): /note="Nucleotide may be methylated to form 5-methylcytosine"
gagggactcagctgtgagtcagcagctgtggcaatatcagcacagtactgtgccccagtacggaagggagatctgaacaatgcatcatagcatcccataacacattacaggtgttaggggct

SEQ ID NO: 8677 - DNA, 122 bp, Homo sapiens
  misc_feature (61)..(62): /note="This region represents a CpG dinucleotide"
  misc_feature (61)..(61): /note="Nucleotide may be methylated to form 5-methylcytosine"
gaacactagctagacttctaaggtttttcactctagttcctgactcctggatagcaccaccggacccacccagtgcctgggagacctggctgccctgaagtgagagacacaggcctggctgg

SEQ ID NO: 8678 - DNA, 122 bp, Homo sapiens
  misc_feature (61)..(62): /note="This region represents a CpG dinucleotide"
  misc_feature (61)..(61): /note="Nucleotide may be methylated to form 5-methylcytosine"
agagtcagctgactgagggccaacagaaacagcaggcagccgctgtcagccacaaagaaacgcagatcctgaaactgtcatcatacaggtgagaggatagttatgtgtgaggtgttcaaaga

SEQ ID NO: 8679 - DNA, 122 bp, Homo sapiens
  misc_feature (61)..(62): /note="This region represents a CpG dinucleotide"
  misc_feature (61)..(61): /note="Nucleotide may be methylated to form 5-methylcytosine"
tgttttcttctttgtgctgttgggtgtgttgtgacccttcagacttcttcagctccactccgctgatagaggctgtgccttctcagggcgtgctcttgaaatgcaacctgctggagaaagac

SEQ ID NO: 8680 - DNA, 122 bp, Homo sapiens
  misc_feature (61)..(62): /note="This region represents a CpG dinucleotide"
  misc_feature (61)..(61): /note="Nucleotide may be methylated to form 5-methylcytosine"
aagaccaaacttaactggagcctgtgactaatgtgccaggagcaatgcaaatcctcctcacgtcatcttggttgttctccccagtttaccacagccaccacccttctgagtcccattcccaa

SEQ ID NO: 8681 - DNA, 122 bp, Homo sapiens
  misc_feature (61)..(62): /note="This region represents a CpG dinucleotide"
  misc_feature (61)..(61): /note="Nucleotide may be methylated to form 5-methylcytosine"
gggaaggggcctgactagcggaaggccacaccccacaccaggcctgctgaggcctccccacgagcccagggcagtagggggagtacagctggcttccttgtcaaatgggttgaggaaatgct

SEQ ID NO: 8682 - DNA, 122 bp, Homo sapiens
  misc_feature (61)..(62): /note="This region represents a CpG dinucleotide"
  misc_feature (61)..(61): /note="Nucleotide may be methylated to form 5-methylcytosine"
gggtggcaaaactgtcccaaaaaatcaggaagtataggatgcatatggttatccatgatacgagcttgtaatccagacatgaaggcctgtaaaagatgtctcagatttggagtgtctaaact

SEQ ID NO: 8683 - DNA, 122 bp, Homo sapiens
  misc_feature (61)..(62): /note="This region represents a CpG dinucleotide"
  misc_feature (61)..(61): /note="Nucleotide may be methylated to form 5-methylcytosine"
gtggcccgggcgaggtctgtgtggtgctgaacgcctcctctgctctgttcccttccagcccgaccctgcccgccctggactggcagctgccgtcccactcaggcccgtatgagcttcggatt

SEQ ID NO: 8684 - DNA, 122 bp, Homo sapiens
  misc_feature (61)..(62): /note="This region represents a CpG dinucleotide"
  misc_feature (61)..(61): /note="Nucleotide may be methylated to form 5-methylcytosine"
tactttaaccttgctccagacactctgacatctctgtttagtctctggtgtaaaaaggttcgtctctcatatttcttgaggttggggaaaggaaatggtcacagagtttaggtgagggtggg

SEQ ID NO: 8685 - DNA, 122 bp, Homo sapiens
  misc_feature (61)..(62): /note="This region represents a CpG dinucleotide"
  misc_feature (61)..(61): /note="Nucleotide may be methylated to form 5-methylcytosine"
gactgagttgaggcacattttgaagagaggggattcagctgattttaaaattcacagtcacggagagtgtaatttagtgactatagtttaataataaatgtttaggatgaccccaaattgca

SEQ ID NO: 8686 - DNA, 122 bp, Homo sapiens
  misc_feature (61)..(62): /note="This region represents a CpG dinucleotide"
  misc_feature (61)..(61): /note="Nucleotide may be methylated to form 5-methylcytosine"
ttacttaaattgtggtggtggaaagcgtacctcatctctctggcatccagttctctcatacgtaaattagaaaaaagtaactattcttaactcatagatgtaagagagaattaaatgaggta

SEQ ID NO: 8687 - DNA, 122 bp, Homo sapiens
  misc_feature (61)..(62): /note="This region represents a CpG dinucleotide"
  misc_feature (61)..(61): /note="Nucleotide may be methylated to form 5-methylcytosine"
ctgggagaggagagggtgagatgggaaaacacacagcgagttagtcccctcacaaggaaacgaacaaactccacgaaaacgtgactttgcaggacaagaggcaggaccccgcaaccttcagt

SEQ ID NO: 8688 - DNA, 122 bp, Homo sapiens
  misc_feature (61)..(62): /note="This region represents a CpG dinucleotide"
  misc_feature (61)..(61): /note="Nucleotide may be methylated to form 5-methylcytosine"
tagaaagcaccataagctatacatattcttgtctctcctaagcttttaaaaaaattttaacgggatttaccctgggaacataaattcatctacaagagaaattagagacgtttcaaggaata

SEQ ID NO: 8689 - DNA, 122 bp, Homo sapiens
  misc_feature (61)..(62): /note="This region represents a CpG dinucleotide"
  misc_feature (61)..(61): /note="Nucleotide may be methylated to form 5-methylcytosine"
actccggcacagcatttgtggggcattctttggaaagagatgggactgccaaggcttttacgaaaaaaccctgtcttccatgaaaattctcatatgtggcagtgagcagatatgttcacaga

SEQ ID NO: 8690 - DNA, 122 bp, Homo sapiens
  misc_feature (61)..(62): /note="This region represents a CpG dinucleotide"
  misc_feature (61)..(61): /note="Nucleotide may be methylated to form 5-methylcytosine"
tagcttgtgagatcagatgagattgggcacgttcagggtggtttggtggtagacacatgtcggggtttctatttcaatcagaagacagaaaaataagacagggagcatgggaaatcacctcc

SEQ ID NO: 8691 - DNA, 122 bp, Homo sapiens
  misc_feature (61)..(62): /note="This region represents a CpG dinucleotide"
  misc_feature (61)..(61): /note="Nucleotide may be methylated to form 5-methylcytosine"
cagcgcgcctcttgcgcgggtgcgggcccttattacactttagcagcgagggagggtccccggagggtgcctaagactagggcgtctgcacagcccttgttgattttctcgtgcttgttctt

SEQ ID NO: 8692 - DNA, 122 bp, Homo sapiens
  misc_feature (61)..(62): /note="This region represents a CpG dinucleotide"
  misc_feature (61)..(61): /note="Nucleotide may be methylated to form 5-methylcytosine"
tcgggtgtttgttatggtcagtccccattctcagtaccaatttcctgtcttagtctgtttcgtgctgctgtagcagaataacacagattgggtaatttataaagaaaataaatgtatttggc

SEQ ID NO: 8693 - DNA, 122 bp, Homo sapiens
  misc_feature (61)..(62): /note="This region represents a CpG dinucleotide"
  misc_feature (61)..(61): /note="Nucleotide may be methylated to form 5-methylcytosine"
ccagaattttcttcctttttaaggccgaataatattccattgtatggctagatcatatttcgcttacccattcatctgtccatggactgtctgagtaaccttttggctattgtgaatcatgc

SEQ ID NO: 8694 - DNA, 122 bp, Homo sapiens
  misc_feature (61)..(62): /note="This region represents a CpG dinucleotide"
  misc_feature (61)..(61): /note="Nucleotide may be methylated to form 5-methylcytosine"
ggagggcatccactgtccggggccattcccacagctcccggatgctgggtctggaggctgcgcccttcccctgcaggagctcagcccagtggtaagtcatctgtgtgtcatctatgtattta

SEQ ID NO: 8695 - DNA, 122 bp, Homo sapiens
  misc_feature (61)..(62): /note="This region represents a CpG dinucleotide"
  misc_feature (61)..(61): /note="Nucleotide may be methylated to form 5-methylcytosine"
cctgtcctgcagtggggctgcttgctgatactgacacgcatgtgcgactgggtgcccatgcgtgtgcgtgcgtgtgccgtgtggatgccgtgtgcccgtgcctgcgcgtgcgtgtgccgtgt

SEQ ID NO: 8696 - DNA, 122 bp, Homo sapiens
  misc_feature (61)..(62): /note="This region represents a CpG dinucleotide"
  misc_feature (61)..(61): /note="Nucleotide may be methylated to form 5-methylcytosine"
ctttcatgtgtctggggcccacctcttgtgttcagtaaacatacacgtgtctcagactcacgctgcatagtcaaggaacgaaggatcaagtcaaataatgcaaatttatgagttcaaaaata

SEQ ID NO: 8697 - DNA, 122 bp, Homo sapiens
  misc_feature (61)..(62): /note="This region represents a CpG dinucleotide"
  misc_feature (61)..(61): /note="Nucleotide may be methylated to form 5-methylcytosine"
ctgcactgctgcaggctgtcctggcacactgcaggccgggcatcatttcatggtggaggacgtcactcagttttgcatgaggctcttgcatcacatttgtatttaaggaattcacaccttat

SEQ ID NO: 8698 - DNA, 122 bp, Homo sapiens
  misc_feature (61)..(62): /note="This region represents a CpG dinucleotide"
  misc_feature (61)..(61): /note="Nucleotide may be methylated to form 5-methylcytosine"
gcccgcctgcatcgccctcctcctctcccagggccaccgtgcccggcagaacccagctcccggaccggtgcgggttctcaccaccaaagacggagcagacggccaccccagcctccactcca

SEQ ID NO: 8699 - DNA, 122 bp, Homo sapiens
  misc_feature (61)..(62): /note="This region represents a CpG dinucleotide"
  misc_feature (61)..(61): /note="Nucleotide may be methylated to form 5-methylcytosine"
cagtcagggagctgctgtgtccctgccttcagcagtcacactgtctcagtcacagtcacacgtactcacactgggcccagcacccccctcgggacacgcaggctcctgcatcacccagcctc

SEQ ID NO: 8700 - DNA, 122 bp, Homo sapiens
  misc_feature (61)..(62): /note="This region represents a CpG dinucleotide"
  misc_feature (61)..(61): /note="Nucleotide may be methylated to form 5-methylcytosine"
ttcaaagtttaagtcctcagtatttccttaaacacctttaaacatatcaagtatgttaagcgcaatatttcgcaactcaaccaaaataaaagcatattgcctctaatgtttatatattacaa

SEQ ID NO: 8701 - DNA, 122 bp, Homo sapiens
  misc_feature (61)..(62): /note="This region represents a CpG dinucleotide"
  misc_feature (61)..(61): /note="Nucleotide may be methylated to form 5-methylcytosine"
ctcctcttccggccatgggcagacagggtggggctggccctagccgtgcctggccgctgacgagcttgcagctcctgtggtctgtgtttgatctgataagcgcaagttcctgagagtctgtt

SEQ ID NO: 8702 - DNA, 122 bp, Homo sapiens
  misc_feature (61)..(62): /note="This region represents a CpG dinucleotide"
  misc_feature (61)..(61): /note="Nucleotide may be methylated to form 5-methylcytosine"
gtcatgaagcttttgccttatgctttctaataacagctttatagttttagtcctatgtttcgatctttgatccattttgaggtcattttgtacatagtattaagtaagagtaatgtcattct

SEQ ID NO: 8703 - DNA, 122 bp, Homo sapiens
  misc_feature (61)..(62): /note="This region represents a CpG dinucleotide"
  misc_feature (61)..(61): /note="Nucleotide may be methylated to form 5-methylcytosine"
gtcagtcaggaggaggaacttgtagaaaagccaagttctgatggtgatggctcagggcgacgtcagaaaagcccaaaagcaaatcagcagaggccgggcttggagcacatctcatgctctta

SEQ ID NO: 8704 - DNA, 122 bp, Homo sapiens
  misc_feature (61)..(62): /note="This region represents a CpG dinucleotide"
  misc_feature (61)..(61): /note="Nucleotide may be methylated to form 5-methylcytosine"
aggatccttagcaaagagaactaccttggagataaaagcatgctttcagagccagaaagacgttgagattggaagcataaaaacgcctagtgagctactcagctgttgtttgggttcacatt

SEQ ID NO: 8705 - DNA, 122 bp, Homo sapiens
  misc_feature (61)..(62): /note="This region represents a CpG dinucleotide"
  misc_feature (61)..(61): /note="Nucleotide may be methylated to form 5-methylcytosine"
tttcttataatgagcaagctggagattcaggagagctgatgggtgcagttctagtccagacgccagcaggcttgaaatccagaaagagccaatgtttcagtgcaagtctgaaggcaggaaga

SEQ ID NO: 8706 - DNA, 122 bp, Homo sapiens
  misc_feature (61)..(62): /note="This region represents a CpG dinucleotide"
  misc_feature (61)..(61): /note="Nucleotide may be methylated to form 5-methylcytosine"
aagcctcgctgactgacctcttaccaccagtgtggtccctcctcctgtctgtttagctctcgcttccggcacactggggaatgctattccacagatgtaaattgcactgtcatttgaagtca

SEQ ID NO: 8707 - DNA, 122 bp, Homo sapiens
  misc_feature (61)..(62): /note="This region represents a CpG dinucleotide"
  misc_feature (61)..(61): /note="Nucleotide may be methylated to form 5-methylcytosine"
gactaataccagaggatccaaagctgcacccacttgttaattttgaggaatttttaaatgcgggatttaaaaaagatttaatttcacgcataggtatgaacagcccctcatcatcccaggta

SEQ ID NO: 8708 - DNA, 122 bp, Homo sapiens
  misc_feature (61)..(62): /note="This region represents a CpG dinucleotide"
  misc_feature (61)..(61): /note="Nucleotide may be methylated to form 5-methylcytosine"
cagaccagttctctttttctccagccttatttagctctatgggtgcaggcatgacataagcggagttgaatttactaatatggttttaccaagagagtttttcaggagagtagtggaaggga

SEQ ID NO: 8709 - DNA, 122 bp, Homo sapiens
  misc_feature (61)..(62): /note="This region represents a CpG dinucleotide"
  misc_feature (61)..(61): /note="Nucleotide may be methylated to form 5-methylcytosine"
gaggcgaagtaggaagtgggattttctcttccctctcctgggcccgtttgcccctaccctcgcccagcaagctgcgcccaaattctattctgcctctggaaactgctggaccatccaaggtc

SEQ ID NO: 8710 - DNA, 122 bp, Homo sapiens
  misc_feature (61)..(62): /note="This region represents a CpG dinucleotide"
  misc_feature (61)..(61): /note="Nucleotide may be methylated to form 5-methylcytosine"
cgggcgctcgctcgggggcctacagaatggcgtgtttcggggttgtggcgggccgaggggcggggtcgcagcaaggccccgcctgtcccctcctgggcctctcaaagtctgagccccgctcc

SEQ ID NO: 8711 - DNA, 122 bp, Homo sapiens
  misc_feature (61)..(62): /note="This region represents a CpG dinucleotide"
  misc_feature (61)..(61): /note="Nucleotide may be methylated to form 5-methylcytosine"
ctattatgcttcttttgatttatcataagggaagatataagaagactgtgctaactaatacgttacagaatgttcaggaaagagaaccctagggaaaaactatgaattacatcagctgatgt

SEQ ID NO: 8712 - DNA, 122 bp, Homo sapiens
  misc_feature (61)..(62): /note="This region represents a CpG dinucleotide"
  misc_feature (61)..(61): /note="Nucleotide may be methylated to form 5-methylcytosine"
gattgcacccatcttagatgctaacgaaatggcctttgagtgcagggatagttaatgttacgtatgtgttcagagttacctaaggaagagcaactccctcccctagtctcaaaccagctaca

SEQ ID NO: 8713 - DNA, 122 bp, Homo sapiens
  misc_feature (61)..(62): /note="This region represents a CpG dinucleotide"
  misc_feature (61)..(61): /note="Nucleotide may be methylated to form 5-methylcytosine"
ggataactcagcttgacctgattcacagcttcttaaagcactgtgtataaacacaactttcgtattgatttttctatacatccaaatttccccttgatctttcaaccacagtagttctgaaa

SEQ ID NO: 8714 - DNA, 122 bp, Homo sapiens
  misc_feature (61)..(62): /note="This region represents a CpG dinucleotide"
  misc_feature (61)..(61): /note="Nucleotide may be methylated to form 5-methylcytosine"
ctatgactattttgctgcatttcccttcagtgcctttacttttttctttgtattatgttgcgcaggttatttagaacctttcttgtcagcctttccccacctgccaccaaccttctctttcc

SEQ ID NO: 8715 - DNA, 122 bp, Homo sapiens
  misc_feature (61)..(62): /note="This region represents a CpG dinucleotide"
  misc_feature (61)..(61): /note="Nucleotide may be methylated to form 5-methylcytosine"
cttttccactaatgtcctttttctgttctaggatccaatccaggatactacattgcatcacgtttatttattcttttgcagtctgtgacagttgctcaatccttccttcttttctatgagca

SEQ ID NO: 8716 - DNA, 122 bp, Homo sapiens
  misc_feature (61)..(62): /note="This region represents a CpG dinucleotide"
  misc_feature (61)..(61): /note="Nucleotide may be methylated to form 5-methylcytosine"
taatggcgtccacggaagctgtgacgatgttggtcttgcagtggcgtgcagccacgatcccggcgacctcatccatgagcttcatggtcacacctgcggagaaagggacatgcggcagatga

SEQ ID NO: 8717 - DNA, 122 bp, Homo sapiens
  misc_feature (61)..(62): /note="This region represents a CpG dinucleotide"
  misc_feature (61)..(61): /note="Nucleotide may be methylated to form 5-methylcytosine"
tcaaaaccctgggccagccgcgggtggcgggttggggcaggcacaaagagggcctctgtgcggccggctgggctgcccacaggattctgggggaggaggccggagccggtttccgtcccgtt

SEQ ID NO: 8718 - DNA, 122 bp, Homo sapiens
  misc_feature (61)..(62): /note="This region represents a CpG dinucleotide"
  misc_feature (61)..(61): /note="Nucleotide may be methylated to form 5-methylcytosine"
cagtcatcctagctctggacaactctgagtgactcatgggggccgtggtctgacagactgcgtcttcctcccaccagcccaatgcaaccccacagctgcccagaacaagcctgtttctttct

SEQ ID NO: 8719 - DNA, 122 bp, Homo sapiens
  misc_feature (61)..(62): /note="This region represents a CpG dinucleotide"
  misc_feature (61)..(61): /note="Nucleotide may be methylated to form 5-methylcytosine"
ctcagttctagatgctggagattgagctcctggagcaagacacacttcctgcccttgaggcgttaggcctgatggggagtcagatttgaaatacacaaatgatgcaaacaagtgtctgtgtg

SEQ ID NO: 8720 - DNA, 122 bp, Homo sapiens
  misc_feature (61)..(62): /note="This region represents a CpG dinucleotide"
  misc_feature (61)..(61): /note="Nucleotide may be methylated to form 5-methylcytosine"
tcaactcctgacctcgtgatccacctgtcttggccctgggattacaggtgtgagccaccacgcctggccaggagtttcttaactgttctatacatgacacatgctcctgaggaagtgaggta

SEQ ID NO: 8721 - DNA, 122 bp, Homo sapiens
  misc_feature (61)..(62): /note="This region represents a CpG dinucleotide"
  misc_feature (61)..(61): /note="Nucleotide may be methylated to form 5-methylcytosine"
gaaacgcacacactgcatccacctgggcctcttcgtattagcctcatgggacttacagggcgaggagaatccacacaagcatgaagctcatgctgcttgctatgctaggggtgagtaataaa

SEQ ID NO: 8722 - DNA, 122 bp, Homo sapiens
  misc_feature (61)..(62): /note="This region represents a CpG dinucleotide"
  misc_feature (61)..(61): /note="Nucleotide may be methylated to form 5-methylcytosine"
gtacctatttgaactttctattattttttttctcttggttctgaagcattacatcaccttcgttccttactatattaatgttagataaacatataagcctgtttatgagaaatatatttggt

SEQ ID NO: 8723 - DNA, 122 bp, Homo sapiens
  misc_feature (61)..(62): /note="This region represents a CpG dinucleotide"
  misc_feature (61)..(61): /note="Nucleotide may be methylated to form 5-methylcytosine"
aaatcaatcaggtgcaaagggttatttacacaactgatagcttcctgcctcagatagtcacggcttcttttaaggttgctgaagcaaacactttgcttaatatttgaacctagagaagttga

SEQ ID NO: 8724 - DNA, 122 bp, Homo sapiens
  misc_feature (61)..(62): /note="This region represents a CpG dinucleotide"
  misc_feature (61)..(61): /note="Nucleotide may be methylated to form 5-methylcytosine"
attttctggacagcaaaataataattagcatggctggtgagcagagggaaacgtctcactcgattgcacccagacatttctggataacatcattcttcagagtgtgacagtcgaggctgtct

SEQ ID NO: 8725 - DNA, 122 bp, Homo sapiens
  misc_feature (61)..(62): /note="This region represents a CpG dinucleotide"
  misc_feature (61)..(61): /note="Nucleotide may be methylated to form 5-methylcytosine"
cgaattaagccactgaaccaagtactggcccagccacagaatggacttttatgtccagttcgctgacgtccctcatggatacagggtgctgaggtgggactcaagttatataggggagtgtt

SEQ ID NO: 8726 - DNA, 122 bp, Homo sapiens
  misc_feature (61)..(62): /note="This region represents a CpG dinucleotide"
  misc_feature (61)..(61): /note="Nucleotide may be methylated to form 5-methylcytosine"
agacatctggccgttaaccacattcctacgcaggggctacactgcgcatgtccgaaggggcgtgtcaggggtggggcgaggaggaggtaccgttccgatgcagagacggtgccgagggaagg

SEQ ID NO: 8727 - DNA, 122 bp, Homo sapiens
  misc_feature (61)..(62): /note="This region represents a CpG dinucleotide"
  misc_feature (61)..(61): /note="Nucleotide may be methylated to form 5-methylcytosine"
ccctcgtcaaggcgcccacggcctccgagcgggtgactgggaatggcgggggctgtgttccgcgataccgcgataaaacccccacgtcgccgcggcaaagtcgcgagagtaccgtggacccc

SEQ ID NO: 8728 - DNA, 122 bp, Homo sapiens
  misc_feature (61)..(62): /note="This region represents a CpG dinucleotide"
  misc_feature (61)..(61): /note="Nucleotide may be methylated to form 5-methylcytosine"
taaacagcacatcgttgcttttgcatcagccagaaaaaaaaaatactttttagaagaaaacgtacattatcatgagtcatagtatttgaggagtacagctctgaagcggcctgaggtgaggg

SEQ ID NO: 8729 - DNA, 122 bp, Homo sapiens
  misc_feature (61)..(62): /note="This region represents a CpG dinucleotide"
  misc_feature (61)..(61): /note="Nucleotide may be methylated to form 5-methylcytosine"
gcttaatctgctcaaagccctcagtgatcacttcattaatttattccagctgcttctagccgctgcagacatatgagtttgcaactttggccttctgtgtcagtgcttcttaaacttgaaca

SEQ ID NO: 8730 - DNA, 122 bp, Homo sapiens
  misc_feature (61)..(62): /note="This region represents a CpG dinucleotide"
  misc_feature (61)..(61): /note="Nucleotide may be methylated to form 5-methylcytosine"
cgcaattacttttgcaccaacctaatataaattatgacttaaaatgtcatgaagaaaatacgtaggagctctgaaggagaataacttgacttttcacatttgtgaaagaagctgatatttaa

SEQ ID NO: 8731 - DNA, 122 bp, Homo sapiens
  misc_feature (61)..(62): /note="This region represents a CpG dinucleotide"
  misc_feature (61)..(61): /note="Nucleotide may be methylated to form 5-methylcytosine"
agcaggaggaggatttctctgactgataactttctgagaaggtggggtgctgggttggaccgccctgtaccctggtaatgggctgtctgcagttgctgtgttagtgactgggggtaaagtat

SEQ ID NO: 8732 - DNA, 122 bp, Homo sapiens
  misc_feature (61)..(62): /note="This region represents a CpG dinucleotide"
  misc_feature (61)..(61): /note="Nucleotide may be methylated to form 5-methylcytosine"
cccaccagtgagcaggctgaggttgaaggactatatgctgtccatgtcacaactgactcacgaactgcagaaggcaaagctttccactgcagaaaggcattcatgacctcatcccaaaggac

SEQ ID NO: 8733 - DNA, 122 bp, Homo sapiens
  misc_feature (61)..(62): /note="This region represents a CpG dinucleotide"
  misc_feature (61)..(61): /note="Nucleotide may be methylated to form 5-methylcytosine"
acagccacctctgtgtcagagcaggacgagacagccgctcagcagctgcacaggctacagcgcaatttaaggcaggaagtggagagaaatgccatttcttacagaaaattcatggggagaga

SEQ ID NO: 8734 - DNA, 122 bp, Homo sapiens
  misc_feature (61)..(62): /note="This region represents a CpG dinucleotide"
  misc_feature (61)..(61): /note="Nucleotide may be methylated to form 5-methylcytosine"
atcttttgccacctaagtctgccagcctacttatttgctctagacctgcccagcagagggcggctccccgagttctttccatgggaagccaccctgggactcggccccctttcttctgcctt

SEQ ID NO: 8735 - DNA, 122 bp, Homo sapiens
  misc_feature (61)..(62): /note="This region represents a CpG dinucleotide"
  misc_feature (61)..(61): /note="Nucleotide may be methylated to form 5-methylcytosine"
ctcactcctaccaacaagcatggtaaactcactagggtacagcttccttgtattttaagacgcctgcagctccagctgtactgtctttgataggctgataagttcaattcagggagtcaggc

SEQ ID NO: 8736 - DNA, 122 bp, Homo sapiens
  misc_feature (61)..(62): /note="This region represents a CpG dinucleotide"
  misc_feature (61)..(61): /note="Nucleotide may be methylated to form 5-methylcytosine"
aagatattacctgagattgggtgatttatacacaaaggagatttaattgactcacagttccgcatggctgggaaagcctcatgaaacttataccatgaaggaagagaaagcaggcaccctct

SEQ ID NO: 8737 - DNA, 122 bp, Homo sapiens
  misc_feature (61)..(62): /note="This region represents a CpG dinucleotide"
  misc_feature (61)..(61): /note="Nucleotide may be methylated to form 5-methylcytosine"
tgtgtttctctgtgattctcttgcccttttccttatggtctgcaactacagtcatcatgtcgcaatctagacaggaaggagaaaaggcctaaagggctaacctcctagctgagtcagccgct

SEQ ID NO: 8738 - DNA, 122 bp, Homo sapiens
  misc_feature (61)..(62): /note="This region represents a CpG dinucleotide"
  misc_feature (61)..(61): /note="Nucleotide may be methylated to form 5-methylcytosine"
taacttaaatttaaaacattgtaaagataaacagaaaacacagagttctcagtacaaatacgtcagcaaatttagactgccgattctgcaggaaaatggtgaatcatggctggaaaagtgaa

SEQ ID NO: 8739 - DNA, 122 bp, Homo sapiens
  misc_feature (61)..(62): /note="This region represents a CpG dinucleotide"
  misc_feature (61)..(61): /note="Nucleotide may be methylated to form 5-methylcytosine"
cctctgctgtaggctgtggttgagctccacactgaggctctttactgcactgcattctgacggctgagaatgaaagtgtccttctgaacagatgaacttgaaatcgactcacctcagagccg

SEQ ID NO: 8740 - DNA, 122 bp, Homo sapiens
  misc_feature (61)..(62): /note="This region represents a CpG dinucleotide"
  misc_feature (61)..(61): /note="Nucleotide may be methylated to form 5-methylcytosine"
gcatttgtccccacttagtaaataaatggctatctgttgctcagccaaaaaccctggagtcgcacttgccttctctcatttaccaacacctgacagttgatccatcagagagtcctgctggc

SEQ ID NO: 8741 - DNA, 122 bp, Homo sapiens
  misc_feature (61)..(62): /note="This region represents a CpG dinucleotide"
  misc_feature (61)..(61): /note="Nucleotide may be methylated to form 5-methylcytosine"
cagagaaagccaaatatgcttccctaaccaatcacgtaggcagcctctcttctagtgagccgcctcagctttccaaggcaggctgtctgaactgcaacagggctcacctgtttcccactgtg

SEQ ID NO: 8742 - DNA, 122 bp, Homo sapiens
  misc_feature (61)..(62): /note="This region represents a CpG dinucleotide"
  misc_feature (61)..(61): /note="Nucleotide may be methylated to form 5-methylcytosine"
tacagagcacctctttcactccctgagaatgctgaagagccttgagaccaggtcaaaatacggcaagagaaaaacagcatgtctacaccactgaaaattaatacaattcaatatttatgttt

SEQ ID NO: 8743 - DNA, 122 bp, Homo sapiens
  misc_feature (61)..(62): /note="This region represents a CpG dinucleotide"
  misc_feature (61)..(61): /note="Nucleotide may be methylated to form 5-methylcytosine"
tattgcagacaggacacttccttccctgtctgttggctcctgcttttgagtaaacaaagacgcagtcatttggactgatggtatctgacaaaagcagatgctggaggagaagacggttaaga

SEQ ID NO: 8744 - DNA, 122 bp, Homo sapiens
  misc_feature (61)..(62): /note="This region represents a CpG dinucleotide"
  misc_feature (61)..(61): /note="Nucleotide may be methylated to form 5-methylcytosine"
acagtcattcaaccaacaaagaagcctggctggccagcctcagatgtacttcattcctcacgagtgtggatgtggaaaatatatatacacatgactcactattctcttgctcaagttaccat

SEQ ID NO: 8745 - DNA, 122 bp, Homo sapiens
  misc_feature (61)..(62): /note="This region represents a CpG dinucleotide"
  misc_feature (61)..(61): /note="Nucleotide may be methylated to form 5-methylcytosine"
aagagatgtgatgtccttaagtaaactgacctgccttcatggcttgtcctgtaatgaatgcgttcaagacagtgttttggggacaggaaagaggcattcttaggtaagcggtggtggggggt

SEQ ID NO: 8746 - DNA, 122 bp, Homo sapiens
  misc_feature (61)..(62): /note="This region represents a CpG dinucleotide"
  misc_feature (61)..(61): /note="Nucleotide may be methylated to form 5-methylcytosine"
aaacctgccccagtggcctctttattcataggactggactccctgctgggtctgagagtccgtggaagcaggaaaaattctgactcatctcaatgcaagtatctgttcagagctggttcacc

SEQ ID NO: 8747 - DNA, 122 bp, Homo sapiens
  misc_feature (61)..(62): /note="This region represents a CpG dinucleotide"
  misc_feature (61)..(61): /note="Nucleotide may be methylated to form 5-methylcytosine"
ttgtgacaagctggggacggaccaagaaggtggtgctgaggcagcactaatatgaattagcgttacaacaatgtcccagcccaagaagagagtgaatttacctttccttcacatttttgttc

SEQ ID NO: 8748 - DNA, 122 bp, Homo sapiens
  misc_feature (61)..(62): /note="This region represents a CpG dinucleotide"
  misc_feature (61)..(61): /note="Nucleotide may be methylated to form 5-methylcytosine"
tgaaaaagaaagtaactctctcgcgtattccacaactagctcttcacctatcaaattacgcgcaatggaaacatcttagtcctcagagcaatcctgggtgcaaggcagaggcggctgttatc

SEQ ID NO: 8749 - DNA, 122 bp, Homo sapiens
  misc_feature (61)..(62): /note="This region represents a CpG dinucleotide"
  misc_feature (61)..(61): /note="Nucleotide may be methylated to form 5-methylcytosine"
gtttgatctgataagcgcaagttcctgagagtctgttgagctgtggagcagccctgtctgcgtcactctacgggggacctgtgcccactccctgctcacatccctgacctctgctcgctgct

SEQ ID NO: 8750 - DNA, 122 bp, Homo sapiens
  misc_feature (61)..(62): /note="This region represents a CpG dinucleotide"
  misc_feature (61)..(61): /note="Nucleotide may be methylated to form 5-methylcytosine"
acgggtgtatttgggagctgaggggccataccacctggtgcacatccacagcagcagcggcgtcctgcaggtgcaccatgcagactcactgagaacagctgcgtcagccacccccaccacac

SEQ ID NO: 8751 - DNA, 122 bp, Homo sapiens
  misc_feature (61)..(62): /note="This region represents a CpG dinucleotide"
  misc_feature (61)..(61): /note="Nucleotide may be methylated to form 5-methylcytosine"
ctaactcccagcctcaggtgatatgcatgtcttggactcccaaagtgctgggactacaggcgggggccactgcgctggccctcagttctttcaggaagtcccaaaacctgtgaaattaacca

SEQ ID NO: 8752 - DNA, 122 bp, Homo sapiens
  misc_feature (61)..(62): /note="This region represents a CpG dinucleotide"
  misc_feature (61)..(61): /note="Nucleotide may be methylated to form 5-methylcytosine"
aaaatttgcattttcttcaaggaaattcatggaaaggacattgacaagtatacagacttccgataacctgggagatcacaccagtagaccagataaaaacttccaggactcttatttaaaag

SEQ ID NO: 8753 - DNA, 122 bp, Homo sapiens
  misc_feature (61)..(62): /note="This region represents a CpG dinucleotide"
  misc_feature (61)..(61): /note="Nucleotide may be methylated to form 5-methylcytosine"
tgatctggtctaggataaatagtcatccctcttacctgtccatctacttaacaaaactggcgggttacgtgcagtgttatttttaatgattcatactaaaacttgatgtgtgagagcaatat

SEQ ID NO: 8754 - DNA, 122 bp, Homo sapiens
  misc_feature (61)..(62): /note="This region represents a CpG dinucleotide"
  misc_feature (61)..(61): /note="Nucleotide may be methylated to form 5-methylcytosine"
aggacacgacgagcaccggctccttggcccaggcattcttgaagaaggtgcggagtctcgcggccatcttggtctcggcggcggcgacggcggcgaggacgcggagcactctgggagttgtg

SEQ ID NO: 8755 - DNA, 122 bp, Homo sapiens
  misc_feature (61)..(62): /note="This region represents a CpG dinucleotide"
  misc_feature (61)..(61): /note="Nucleotide may be methylated to form 5-methylcytosine"
actcagggcggatgtctgaggggtctgcgttgggctttctggtcgcttctctgcgaagcgcgcttgttcctgaggcggtgcctgcctgtgtcgtcgtccctgtttgttcttcttcaaacctc

SEQ ID NO: 8756 - DNA, 122 bp, Homo sapiens
  misc_feature (61)..(62): /note="This region represents a CpG dinucleotide"
  misc_feature (61)..(61): /note="Nucleotide may be methylated to form 5-methylcytosine"
tgtaaataagtaatgccttagattgataaaagtcaatgctgggttgggtagaacatgtcacgcaccccacaggaagatgggttctgggtccaccaattctgttgttccaggaattgattcca

SEQ ID NO: 8757 - DNA, 122 bp, Homo sapiens
  misc_feature (61)..(62): /note="This region represents a CpG dinucleotide"
  misc_feature (61)..(61): /note="Nucleotide may be methylated to form 5-methylcytosine"
gggcttctgggcagtgagaatgactcaaacctgagcaatgcttctgggcctctgatttcacggtgtctctgagttgcaacagcaagcagaccttggagatgccaccttcacagacatggtgg

SEQ ID NO: 8758 - DNA, 122 bp, Homo sapiens
  misc_feature (61)..(62): /note="This region represents a CpG dinucleotide"
  misc_feature (61)..(61): /note="Nucleotide may be methylated to form 5-methylcytosine"
ttgttctggccaggacatcgggatggatggggaggtggggagagctggagctggagatgacggctggggatttgtcacagagcttcctgatatgcctgaggtggtgggaatggagagtgggg

SEQ ID NO: 8759 - DNA, 122 bp, Homo sapiens
  misc_feature (61)..(62): /note="This region represents a CpG dinucleotide"
  misc_feature (61)..(61): /note="Nucleotide may be methylated to form 5-methylcytosine"
cttccagcccattcgggaagatgacacactgaacaaacagatagtggcaggaaagggtgtcgtgtacctgacgggtaacacacaagatgccctggaagctcttagcacaggggcttgtgaga

SEQ ID NO: 8760 - DNA, 122 bp, Homo sapiens
  misc_feature (61)..(62): /note="This region represents a CpG dinucleotide"
  misc_feature (61)..(61): /note="Nucleotide may be methylated to form 5-methylcytosine"
cccagaaatggtctctgggcagtgagctggggcaataggagggctcacctcattcattcccgtctctcagggaccacagtgttttaccgcttggtgtagagccttgcaaacttgtttcgtag

SEQ ID NO: 8761 - DNA, 122 bp, Homo sapiens
  misc_feature (61)..(62): /note="This region represents a CpG dinucleotide"
  misc_feature (61)..(61): /note="Nucleotide may be methylated to form 5-methylcytosine"
attcataaactgtcagttgtccatgacgtgctctctgatcctctcagaaaatgtattattcgttcttgagacttcactaacagtcattatcagaacaatattgtcagtatatttttcaacac

SEQ ID NO: 8762 - DNA, 122 bp, Homo sapiens
  misc_feature (61)..(62): /note="This region represents a CpG dinucleotide"
  misc_feature (61)..(61): /note="Nucleotide may be methylated to form 5-methylcytosine"
tggacataagttatctgtaacttttccctattataaaagatgcagtgagaatcatccttgcgcaatctagtccccgggcaagattcttagggattaaatgactggatcacatgataagaata

SEQ ID NO: 8763 - DNA, 122 bp, Homo sapiens
  misc_feature (61)..(62): /note="This region represents a CpG dinucleotide"
  misc_feature (61)..(61): /note="Nucleotide may be methylated to form 5-methylcytosine"
ccctgggtttggaagctgtgtttgctgatgccagcctgcttaaatagctgggctggctgacgcaggctgctgatagcacgtttatttacgcctatgagcacacactcgagcaaggacctgaa

SEQ ID NO: 8764 - DNA, 122 bp, Homo sapiens
  misc_feature (61)..(62): /note="This region represents a CpG dinucleotide"
  misc_feature (61)..(61): /note="Nucleotide may be methylated to form 5-methylcytosine"
cctgtttggctgacagctcccaggcagcctcagtaaactgagagagagagcagagtgattcgtcaagactaccttgtgacaggggcacaccaccacaacccagctaattttttgtattttta

SEQ ID NO: 8765 - DNA, 122 bp, Homo sapiens
  misc_feature (61)..(62): /note="This region represents a CpG dinucleotide"
  misc_feature (61)..(61): /note="Nucleotide may be methylated to form 5-methylcytosine"
aagaaaaaagctaatagcatctggtggctaaaaacattctgcttaatctcctcatggactcgttatctcctttgcctaacagctgctggtaataattgactagaattttttggcaaatacag

SEQ ID NO: 8766 - DNA, 122 bp, Homo sapiens
  misc_feature (61)..(62): /note="This region represents a CpG dinucleotide"
  misc_feature (61)..(61): /note="Nucleotide may be methylated to form 5-methylcytosine"
gcccagccagccccttacaaaactactcccagtggaaagtttttggcaatgggacggggccgcctgccatcctctgaacatggtttgagtgtggttagctgccaaccatgagacattttaca

SEQ ID NO: 8767 - DNA, 122 bp, Homo sapiens
  misc_feature (61)..(62): /note="This region represents a CpG dinucleotide"
  misc_feature (61)..(61): /note="Nucleotide may be methylated to form 5-methylcytosine"
atgccccagccttgaccttccagcttcccatctgccagacttgctcaagagagtggctcacggctaaggagtggaaactgacacccagagaaggatctagaacctcgtactcttccatgctc

SEQ ID NO: 8768 - DNA, 122 bp, Homo sapiens
  misc_feature (61)..(62): /note="This region represents a CpG dinucleotide"
  misc_feature (61)..(61): /note="Nucleotide may be methylated to form 5-methylcytosine"
gggattataggcgtgagccaccgtgaccagcctaatgcagggtttatggaggcttcattacgtatagatgattaaatcattggccactggtgactgagctcgatctccagcctctctccctt

SEQ ID NO: 8769 - DNA, 122 bp, Homo sapiens
  misc_feature (61)..(62): /note="This region represents a CpG dinucleotide"
  misc_feature (61)..(61): /note="Nucleotide may be methylated to form 5-methylcytosine"
aatctgacatgttgtaatacactgttagagacatattgtggctataagattaatgatagccgtaaggcccatgcaaacatcttgcagggctgacactatgtgtcaattagcagtatgatgca

SEQ ID NO: 8770 - DNA, 122 bp, Homo sapiens
  misc_feature (61)..(62): /note="This region represents a CpG dinucleotide"
  misc_feature (61)..(61): /note="Nucleotide may be methylated to form 5-methylcytosine"
ctgctgaggaaggtaagttactggaatccctgaactctcataaatgaccaccccccaccccgccctgtcccactccctcctccctgcctctttagattctttgagcaaatatcccttcccaa

SEQ ID NO: 8771 - DNA, 122 bp, Homo sapiens
  misc_feature (61)..(62): /note="This region represents a CpG dinucleotide"
  misc_feature (61)..(61): /note="Nucleotide may be methylated to form 5-methylcytosine"
cactgaagaattgaagagaatagggagatcagagatggcttgcttatttaggcaaggcttcgaggaatcagaacagactataaaagggctgtgctgatagagaacgtgtgtgtgtgtgtgtg

SEQ ID NO: 8772 - DNA, 122 bp, Homo sapiens
  misc_feature (61)..(62): /note="This region represents a CpG dinucleotide"
  misc_feature (61)..(61): /note="Nucleotide may be methylated to form 5-methylcytosine"
aaaccttcctcatagctgatgctgtcacagtcaaataatgaccttcctttccaagttgcacgggttctcaacttttgagaagttttctgtaatcttcctgtgttcctgtaccccaaaacaca

SEQ ID NO: 8773 - DNA, 122 bp, Homo sapiens
  misc_feature (61)..(62): /note="This region represents a CpG dinucleotide"
  misc_feature (61)..(61): /note="Nucleotide may be methylated to form 5-methylcytosine"
gaagcatagagaagttcaactcatccaagttcccaaagaaactgaacagggatctgaatacgggcaggtctgtccagctgcagagcccagagcccttgatgccacctaaaactgcctcccgg

SEQ ID NO: 8774 - DNA, 122 bp, Homo sapiens
  misc_feature (61)..(62): /note="This region represents a CpG dinucleotide"
  misc_feature (61)..(61): /note="Nucleotide may be methylated to form 5-methylcytosine"
ctttcacataaatcactacctgatacacatttcaacctgtgatatatcttttttccaagacggagtctcgctctgttgcttaggctggagtgcagtggcgcgatctcggctcactgcaacct

SEQ ID NO: 8775 - DNA, 122 bp, Homo sapiens
  misc_feature (61)..(62): /note="This region represents a CpG dinucleotide"
  misc_feature (61)..(61): /note="Nucleotide may be methylated to form 5-methylcytosine"
caaaagagacagtgacagagaaggacggaccccttgctgagctgcacgctgggaatgagacgagctactcagggcttctttcagctgcaggaagtgctttcaatgccctatttatgaggctc

SEQ ID NO: 8776 - DNA, 122 bp, Homo sapiens
  misc_feature (61)..(62): /note="This region represents a CpG dinucleotide"
  misc_feature (61)..(61): /note="Nucleotide may be methylated to form 5-methylcytosine"
aaagctgagcagctctgcagggctccaggccttgatctcccccgcttcgggtggatgcaccgttcccatcttccgcaggccctggggtggacccggaggcgacaaaccttggcaaaagtgca

SEQ ID NO: 8777 - DNA, 122 bp, Homo sapiens
  misc_feature (61)..(62): /note="This region represents a CpG dinucleotide"
  misc_feature (61)..(61): /note="Nucleotide may be methylated to form 5-methylcytosine"
tgtgtatgaggtcaggcaagtcaccaaactgcactgtctcaatttcctcctttgatataacgcatgataatatttggaaggcagatagcatagtggtttaaggacacagactcagaagccaa

SEQ ID NO: 8778 - DNA, 122 bp, Homo sapiens
  misc_feature (61)..(62): /note="This region represents a CpG dinucleotide"
  misc_feature (61)..(61): /note="Nucleotide may be methylated to form 5-methylcytosine"
ccaagggccagccttctgcgtgattgccagtgtctctatgtttttatagaggagaggtcacgatgctgccccctggagttcatttgaatctgacacgcagctgtacactggccaagatacca

SEQ ID NO: 8779 - DNA, 122 bp, Homo sapiens
  misc_feature (61)..(62): /note="This region represents a CpG dinucleotide"
  misc_feature (61)..(61): /note="Nucleotide may be methylated to form 5-methylcytosine"
tagtttccttctttgttcttcctttttcttccttctcttctcttttcttttttctcttttcgcagccaaagccagcctccgactttcttcccttaactgttaaagatcaataaagcagaaat

SEQ ID NO: 8780 - DNA, 122 bp, Homo sapiens
  misc_feature (61)..(62): /note="This region represents a CpG dinucleotide"
  misc_feature (61)..(61): /note="Nucleotide may be methylated to form 5-methylcytosine"
agccttcagagaaggactaacacacaagaaacaaggaagaaaacaattgcactcccttaacggcacagtgcttactatatgtgtaatgagagttctaagaaaaatgaggtaagtgtgggcaa

SEQ ID NO: 8781 - DNA, 122 bp, Homo sapiens
  misc_feature (61)..(62): /note="This region represents a CpG dinucleotide"
  misc_feature (61)..(61): /note="Nucleotide may be methylated to form 5-methylcytosine"
cagaaggaagtcatttttctttgcattgttcatcccagtcactggcatggccggatcagccgtggtcatgacctgatcatcctatgaggctccttgactgcacttcacccacctgctgctgg

SEQ ID NO: 8782 - DNA, 122 bp, Homo sapiens
  misc_feature (61)..(62): /note="This region represents a CpG dinucleotide"
  misc_feature (61)..(61): /note="Nucleotide may be methylated to form 5-methylcytosine"
tccagcacactcactctctggtccagtcttagacacagtttattctctctctgcacctgtcgtcaattcataagaggcagcagcatcagagcatcacctacctggggaatcatgagacagca

SEQ ID NO: 8783 - DNA, 122 bp, Homo sapiens
  misc_feature (61)..(62): /note="This region represents a CpG dinucleotide"
  misc_feature (61)..(61): /note="Nucleotide may be methylated to form 5-methylcytosine"
agcttcacctgcctggctctgtcatcctttgggcaccaacacttccttatttaagttgcacgggctgaccttgactgttgactccaggaatgtgtgcaaatccttgactcccatgaggaccg

SEQ ID NO: 8784 - DNA, 122 bp, Homo sapiens
  misc_feature (61)..(62): /note="This region represents a CpG dinucleotide"
  misc_feature (61)..(61): /note="Nucleotide may be methylated to form 5-methylcytosine"
atgcctcacccctccagggcctcaggagtgaacttttagctcccagtgtggcagctaaagcgctccacaatatgacacagatcctctcctttcacccttacttctctttattttcctatgca

SEQ ID NO: 8785 - DNA, 122 bp, Homo sapiens
  misc_feature (61)..(62): /note="This region represents a CpG dinucleotide"
  misc_feature (61)..(61): /note="Nucleotide may be methylated to form 5-methylcytosine"
cattggaagcaggggtctcagaaggaaggcgcagatgggaaaggcttttctgggcggtggcgtttcaatgcaaggagggcgcttgaatcactgacagacttcaagttaagggagttttcgtg

SEQ ID NO: 8786 - DNA, 122 bp, Homo sapiens
  misc_feature (61)..(62): /note="This region represents a CpG dinucleotide"
  misc_feature (61)..(61): /note="Nucleotide may be methylated to form 5-methylcytosine"
caactgtgggagagaaggttgtttgtccactaaaatcctggctcctcctccagagaatagcgtttgttctaggaagtggctgcctccctgtgactggaatgtgagccaatgtaatgtgtaac

SEQ ID NO: 8787 - DNA, 122 bp, Homo sapiens
  misc_feature (61)..(62): /note="This region represents a CpG dinucleotide"
  misc_feature (61)..(61): /note="Nucleotide may be methylated to form 5-methylcytosine"
gtagacgtgatgtcaagaactctgaattagaatgccttgcctttgtccttgtcacatctccgtgacctcatctgcctagtttagtgcctacattgcaggttcatttgaaactcacctcttct

SEQ ID NO: 8788 - DNA, 122 bp, Homo sapiens
  misc_feature (61)..(62): /note="This region represents a CpG dinucleotide"
  misc_feature (61)..(61): /note="Nucleotide may be methylated to form 5-methylcytosine"
gtttagatacacaaatacttaccgttgtgttacaactgcctacagtatttggtacagcaacgtgctgccccagtgtgtagtccaggagcaataggctaatgccacatagcctgggggtgtag

SEQ ID NO: 8789 - DNA, 122 bp, Homo sapiens
  misc_feature (61)..(62): /note="This region represents a CpG dinucleotide"
  misc_feature (61)..(61): /note="Nucleotide may be methylated to form 5-methylcytosine"
gtttttagatttctagtctctgcagtactggaagacacgcatgaaggaagctggaatggacgctgggtgcctgtctcactgcatccaccacaattgtgttggttagtaggactactacaggg

SEQ ID NO: 8790 - DNA, 122 bp, Homo sapiens
  misc_feature (61)..(62): /note="This region represents a CpG dinucleotide"
  misc_feature (61)..(61): /note="Nucleotide may be methylated to form 5-methylcytosine"
acagcccaaggttggaactggttaatagttgcatggtgtgtgtgtgtgtgcatgcacacacgcatatgtgctctatccttgtagtagtcagagagcagatagtaactaagaaagaaaggcaa

(The sequence listing continues in the following parts.)
